United States Patent Application Publication US 2013/0034624 A1 - sequence listing, part 13

SEQ ID NO: 43793 - DNA, 2798 bp, Bovine  19866881340157
  misc_feature (1)..(1): n is a, c, g, or t
ngcgctgctccttggattagcagatactcgttgagaagttgcttggcgtcagacacgatgctaagcaaagcaaggcctgaaaggtgaagggacccagacgcccggggagctgaacgcctagggaggggcgccgcgagccgcgtccccgagtggcctggagagctggcaggaggcggcgtcctctcagcccttgggttctggggaggccgaggtgtggaagactcactttgagcggcacaggatccggggagtgttaggaggtgaagaaaggtgaacgggcagggagaaggtggatgagtatgacacagtgtgtttctgagcgcgaggtccggaggaggatggagatgagaaaagggattccagatgggaattccagaagaaagcagaccgctgaggtttgcgtcgggttgaattccgcatacgcgtgtgtctgggtcagtgtgcggtgccactgaaatgtcctacctgagggccgaggagacagaaacgtgttctcccgaagccctgggcctggacaacaaccgggtgccgtcgggtggggccgtgatgagcgctcacttcacagcttgcggacggcctcctcgagctctgcgctcacgctggcagagcgggagggtgagtcccagcgggagtgatgcggcagggacccggcgctctgctctctcttccgttgcttcttgggtctcagttgcctcctctgcagaatgagcgagtggggtctagactcggcccttggaggattccaaaggccgtgtgaccctgtcttctttctcccctcagtcccttccattcttcaccacctcttttctgcccttctctccttcctttctttttttcccccaaaatattgaacactcacaagccctctgctggaccttataagatggatgttgtgatggtctggcacatctcattttctcatctgtccctcctaacgcagcgcagatgaacctgtagaaaggcccaggagattgtgttgcccagtctgatcacttcttgtccatgtccagagttcgccaggccctttccctccgtcgaccagacttcctactcctcagtcttgctttggctgggcctcgcactgggcagaactctattctagcccatgaagaaggcaagtgaacctttctgcacatgtcaagattatagattggaagacacaggatcgcttgtgatggcctgcctgtttaccaaatcagaatactcgatttgtatatttgccaactcggagaaagcgacctccacttaccagttagttgaggctccctggtggtccagcagtaagaatctgccagccagtgcaagagatatggattcaatctctgggtcagaaagatcctctggaggagggcacggcaacccactccagtattcttgctggagaatcccatgaacagaggagcctggtgggtaacagttcatggggtcgcaaagagttggacatgatttagcaactaaacaacaacaaaaacaattatttgatagcatgtttatgctgacaaatatcaaatattaagaaaacaaagcctctatggatccaatggttagtgttacaaataagaaagtacctgctatatgcctgctgaagtcagctagactcctttctctggcgtctcagctccttctctcctcccagaatactcaccttctagacacaagtggggagcagtttcctgtggctgaggtttctagggagtcctgttcctgagaacttgagtttctggaatcttagaaacttttctgaattgccaagaagaggtgactgtcctgattattacttcttttcttaaaatggatagtactaaacaaatctgtgccatttcccctcttcatttagataaactgctctcgactaccaggaaggctttgagaatccctgggtgggtttctgagcagtttcggccaacaaagtgaaagggcaaatctccatgtgcgagatggcacacagattgcaccgtgcccatcatccactctgcactgccctctcaggggcaggcagcctttccaggcctccttgtccagacccctcctccctggggaagtgtgactctgcacagagttgggctttgctgtcgtcaattgccaagagctcatgattagctggacctgcacccaggtctgttttgccccaccagaccgtcttcttgtctgggatcgctcctccctgcctgaggtcatcatgccctggttattcacggtccatagtaaagctcttttcagcttgctttactttatatccactctttcatggctgttttaaacacacaattactagggaagaatatctggctttgaggtacaatgtcaacatcaaacacctaggccccgcggtaacgtggcagcctctaccttgcagaattagaggttctgttttgataacatgggttcgtctaatcatttgaaatttcatacaaacacatacctatacacacttttccaggagacaaccacaatggccattttcaatgacataagaacttgcatttcagtgactatacaaacatcgacccaaatcatctgccaaatggtttttgttcataccaaatctaaatatttttaataatagtagcaatggtaacagtaccatttatgtagcattcactatatgctggaccagtttctaagcagtttaaatgtattggctcttctgaaaacacactaaacccagctgaggggatatctaatgtaggcagacgctgtgtgcccattgaatgcagagaattattgatattggactgtcttgtagactcacgtcccttcggtcatttttggtaaattccttctctcttcccagggca

SEQ ID NO: 43794 - DNA, 1330 bp, Bovine  19866881344139
  misc_feature (1)..(1): n is a, c, g, or t
naataagctaatgaacaaaggaatatggaacagctgacttactctttggcctatactcttaactgccctctttcttgttgtctacttatttccattcctttaaaaaatagcttctttaaagtgcactgtataattttgaataccaataacaaataatgttaagctcttaaagggcagggactgtctctgccttttaaactttgtttgcattaagcttcctgttccagttagtgtgttgttctgtgagaaggcattctgaataattgtccctgactaataaatgaatctgtctgttggtatcctagcaaccacagttgaatctttttgtcttagtgaaagaggttaataacctttaccctcaggcccttctccacttgagtcaaaagtaatggtcagaaacagaccttttaaaactaaagcaattttttgctatcaagcaaaatgctagagaaaagaacctcctgacttaattttcattgctccttaacaaaaatagaatttagataactaaattattctgtaaaaaatggaatcattcagatcatgaaaaaccactcttcagtagaggaaaagagatgagtatgtacacatacattccaagttaaaattcactctgtgacaggaagtatttgtataatactcctaaatgaacgtgcagtttacttgtaagtgaaatttatagagagcttttccttttctgcagcaacaatttaaaacaaactttagcccagtagttgatttcatcagtggagttttgtctgttggggctagaaatatttgaaataaatttttaggaaattcctatattaagtcaccatacttaaaaaattatgttcctgcatttttgtgtgtggagatatttttctttttgggttgaattgaaaaggtacatttcaaattatatttatatattaataaaatttctaactatgtctttttctagtacataaggacatgtaaccattatcatgtaatattttatgtggtttacatgagttaaaacaaacttggaaagaaattaagtaaatgctgataattgtgtactgttacgcttttgaaaagttttgaatcatagaccatgaaattaaatgttagttgattgatacatgttcatgttgtatttaataagctgattaaaacaccattacagcacctttatatctacaatcttaattctttgcttcctgctagttaactgtggaaatagttaattttccttccaaggaaaaaagtgtgtagagagaagataaggtatactaaatgaaaaattggacggcatattggttagtcaagcaatttgtaaaatgaacattagaaaataatcccccca

SEQ ID NO: 43795 - DNA, 1937 bp, Bovine  19866881366071
  misc_feature (1)..(1): n is a, c, g, or t
ntaaaatctagaaattccacggtttagtttctcagatattctttttatctgttgcctttatggacttcctggtgtctcagctggtaaagaatccacctgcaatgcaggagacctgggttcagtccctgggttggggagatcccctggaggagggcaaggcaacccactccggtttcctgggctggagaagcccgtggacagaggagcctggcgggctgcagccaggggtcgcacggagtgggccacggcgggtgactgagcacacggccgttacacctgcctctactgtgctgtgtggtgctgactcgcagaaagaaaactgtaattgttactcagtgttttgtaaagaatattgtaatagtgtgatttcataaatattcactgtgtgttgttatttgtggtttcagataaggaagtgcaggcatttcatctgattccgactcagacgttgcttgagaaggactgaaagcgtgactccacaacagtgggcctggttctctgctctggagtaagagagcaggctttaagacatcttgttatatgttttactattttgtatgtcaacgttttcaagcacatattttgtatctgagctccatttgcacagcttcctaggtggtttatgtggagtcaaggcggaaatcctgacaccagctctcccccttggcttctaaaacgcctcacgctcagttatctccttccttctttgcgtggtcctggacgaggagctcagtgttcctcattgcaagtacaatgcaatccatttataaataattcatatttacattgtacatcacttacacactataaaatattggatatatttttggctttctacttacaatttcaggattcttattgcaaatgaattaattgcattttctccttttgcaaggttgaggtgaaaactaatgacagagataacagattttttttccctcttggtaattagaaaggctttagcgtcatcatttaatccccaaggacagggaaagtgattactctcaatgaatgaattgcagtctacagttccattttaattaaacatttattttttttacaatatgagagattcattaagtaaattttaggaacataaatgcttgaagacataggaattgttttaaaggttcctataaaattattatggaatcacattgtgattcctaagaaatttaccgtttatgaagtcgatttacaaagggaactcaggattttcccactgttattttttggtgatatttatattctaatttttgttgttgttgtcctgcaattgacaaatcgtcagatgtgtaagggactacccttttcacctgagaagtgcacttctagaaacgtttctcaaggagaggaggaccaggaatttggtgtttctaggacacatttgtcccgtcgtacacgtgggcgtctctgaagactggagaggacttgtagcgtccgtttcaccacgcagggccttgctgccagcgtgctgcgagggccctgagggcctgtgcgcggctatggcccacctggcacagctttggctggggctgtcaatcacggcaggccagattaaatcggttctgcaagagcccacaggccatcttaatagctgccacctgatcaatgaagcaagctgaattgttacagaacgtggaggctgtgattagaaggcaggtaattgggtaactgtccattttcaggataagctagatctgtattgatcatgaaaggaaaaagtctgacttgattaacgaatcttctcagcatccataagctaatggtaggttttaaaatgtaattttgcttctggtcctcagcaagtggccaaaagcagctaagggaggggctacggagaaagagacagtgtttataaatccggagcttcagccatcatttggggaaagaggcagaatttctgcttcgggcaaagggtgcctctaccctctgaa

SEQ ID NO: 43796 - DNA, 1020 bp, Bovine  19866881401179
  misc_feature (1)..(1): n is a, c, g, or t
ntcaagatactggcaaacacataaacctgttttaggttccaacagttcaatgggcttcttacttcaaccctggtctcagtagcagaagcaaatgctatgtaaaaacccctttccaatatctcagagcccagagggaaaatgaatatgtaatatgctgggtgacagtcaaaggaaatgctaaggctaataacgtttcagctgtttgaataagggtccacatttctatgtattataaatatcacatagtatttaaactgaatttagctaaaaaatattcaaatatgaagtttaaaaagtaaaaagaatgttaacatacccagttattttcaaaataaaacaagagtagacagaaaatgggctgatgataacaaggcagtttctgttaaatccactgtctatgtgttacaagtaggaaccatgactatacttgattgagtcacataaaataaagaaggtagatgttgtctgcatgaatctccttttagttaactagatttttcattttaaaaagcttatagagctgaatactgctaccacagggggaagaatcaaacaagtcattgctagcatagattatgaagatcacttgagctatgtttctgttaaattcccataatcaattggtattcttcagggacaataaaagcttacagagaactctgctagaattaacaggttcttctctgcaacagctagcttgcaaatttagctacagacatttaatccatagattcatcttcaaaaagggaaaaacaaaccattgcataaccattacactagcagtcaaaacaaaattctgtcagtaatgtcactagatgttaataatgttatagatgtcagtaatgttaatagtataagctcagaatttaaaaaaatgggaacaaacgtatgtgtctttttttttttcctttctggaaccctgctctccaacaaaggatttgaggagaaatatttcagctaaaacatctacttctgcttcattgactagataaagcctttgactgtgtagatcaccacaaa

SEQ ID NO: 43797 - DNA, 1125 bp, Bovine  19866881424174
  misc_feature (1)..(1): n is a, c, g, or t
nttgttccacttcttgtagtagaagagcaaataaaaacaaacttcgaaaaattaccttggtaaaacaacaagtatggttttttcagataaatatttaaaagaaaataatagaaatgggtaaaatgatgtgaacgcatagataggaagctgttaaaatcagcacactgtattttattgtgatcagtgatttatttggccacatgataaaggctataaatgcgttccactttcctctgaatcctaaaaagaatgtttcttgttcacattagactaatattctttagaaaataatttgaatttaagaagctaaatatttagaaaaattttggttagattgcctattaaagagggtttatatattcagcattagtaattgccagtgaggaaactctgaacagctgccatctaggattctaacatatcactgctgccatctaggattctaagatatcactccttgttaaacgtgcgacacaaactccatagccccacaaggaagtcgattttctctccagtcagagagcaagttcaagattagttatgcattaaacagtccatttggggaggctaattagagagagaagaccttgaaatagaagtcatcagaaaaagctagcagatgagtcttcccggagacttgatttgtcctttgtcaccaacaggatcacctgcgaaagtgcaggttggcctcatccgtgtctgggtgtgaggctcacgaggcttgctgatcctgagggaagagccacgctggttccggagactgtctttaggggccctggagcctctgggtatcaggtttccaaatgagtagagcaggtgtgaagaagtaagtgccaaaaaaatagacacaggcacacaagaatttggattgttctgttttccccaggactttattagtaccaggaatgagcagaacagacagcagtaagatagtcacatttttaacaggaaacccaatatgtgaaaaaagtgtctgaattctatcccatttacatatacttggattagtgtaattctcactccagccaaataacaatgcctctggaaactggcctagtttaacgtcacgttatttttggtaacattttcatcgaggataagaaagaagtaattctgtataagttg

SEQ ID NO: 43798 - DNA, 813 bp, Bovine  19866881613470
  misc_feature (1)..(1): n is a, c, g, or t
nagttactatgtggactaaatgtgttaatcccattacgttttcagatggtgtctgactcatgaaaaaactcaatagatgatatccaaattgcacacacacggcaacaaagtcattttaatgggcaggatagattgagacaaggcgataagctcagtattaagacatttctgtattgtaaccttgagaaagacttggctaagaaaagagtcacaaggtgcctggagccagggtctgtctcagcacaccacactgtgacgaggggtctgctccgcctggggggtcgcggcagagggggtcacctgcagccccacacctgctcagaagaggccgtgctctgagctgtgcgcgtgcagctgggacgggacaggtgctcagtacacgctgggcagtgcgggcctgtcaccacgcccctctctgtcactcgctctgcccagtgggcaggcttagagatagcccaggacacaggtggggaacctgggaaattggtcatgttttttagttaggacagggtctccctgggacagagcattgaggattccaggtcactctctctgcaggctgctgaaacctctggttgagcatcggataccctgggagctgtgctgaatccccagggagtcactggcttcactctgggcagttagtgcatcactgcagttatggccgggtttctagagagtccctaaatgggactctgatggccagaaaaagatgattttcagccctgtacacctaacttcctattagagggttacttaggcactggagacaatctggctcattaataaataaatgcatttttatatttttta

SEQ ID NO: 43799 - DNA, 1899 bp, Bovine  19866880464588
  misc_feature (1)..(1): n is a, c, g, or t
naacagacatggccacttcacacagagctgcataaaacattccagttttcatccagcctttctgtcttaatcctattaattcatgcagttctattattttctcagtttaattataggcttcatgagatcctgtctctctcacaggtttgggtgctgcatagtacatgaagttcgtttgtcaaggagcccgaaaaacttcccttcccttccctcccagtcattccacccactgacatagcataaggctttgggtccctgagcggaggcttgagccaagatacactggcccctttgtcagtctttatctaggtaactaggtaagtctgctcactccactgtcatcccagctgacccccaggtgggttctcattgtaatctttgcctcctggcttttaaaattactccacactgggttaaatagagtggaaaggcatgtttgagaacccatgtccccttggtccactcattctgtgatagtgttccattaagacttttgtttagatccctttaatgcctgctctattcatcccattctcaaacaccgtgcagagatttcctttctgcagggatttgtgccttgattttcctttctgctttttgccattttttaagtctgtttcttaattagcatctataagactcataaggggaaacagaaaaatctaacaagtcattttgggctgttgtttgatttgacagcagttaggttacacggcatgctgatgcaaaaggggtgctttaatcacagcacttaccatgccctgagtaaggattaaagtcgcaattgccataaaaccagtgtctgccaaagatgcatcccccacattagccctcgcacgttccatttcagcaggcttttcaggaagctgataaaaacaacccaagaaggaaaccacttcagactacaccccctggtgtcagtgggttcttggtgttgccatcttcctcacctttaatcacagcacttaccatgccctgagtaaggattaaagtcgcgattgccataaaaccagtgtctgccaaagatgcatcccccacattagccctcgcacgttccatttcagtacaggcttttcaggaagctgataaaaacaacccaagaaggaaaccacttcagactacaccccctggtgtcagtgggttcttggtgttgccatcttcctcaccaggctgacctttttgatgaccagaggtcaactctcccgtcccacagctgagcttcgtcagctccaagacctgaccccagcactttctttcaattcagttttagctatcacaggtaacagtaaccccagggactgcatacttaactgttttcttattattctacaattcctatacatccactgaggctcaaaccccaggagctgggtatatcatctctaaactctgttgtttacttttgagtaggagatggcagcacagctgctacttcatactgtgaatgacctagtggccgtccaaggatcaaaggatcctcactgcctcacccaccctctcatcctttctcttcccaaaccgcatgtctcagtgagtcaggccttgtagtagatccctcacttttgacacaaaatgctgtttcctcccttttctgggcatacagtaatacgaatctgatgttcaccacactacctggagttagcatcagaccccacagtgggggacagagtccccgacaagacggtccctccatcagaaaccatatgcaatttggggattcctagctgttaggggtggagtaggcgatggcaccccactccggtactcttgcctggaaaatcccatggatggaggagcctggtaagctacagtccatggggtcacgaagagtcggacacaactgggggacttcactttcacttttcactctcatgcattggagagggaaatggcaaccca

SEQ ID NO: 43800 - DNA, 1046 bp, Bovine  19866880639230
  misc_feature (1)..(1): n is a, c, g, or t
nctctttgcatcaggtggccaaagtattggagcttcagcctccgcatcagtcaccttacagaatgaaaaggcaagaagacaagaccctgaaagatgagcctttttattactttacaccaagcggctgcatgtcctcctcctggtcccatcataatgtgcttgctgtagcaaggcaccccagggtgggggcacagacctgtgattctcagtcatgtcaaaggtcctggccgtgacagcttgctgcgtccagccgctgggccaggacaccctcggtcctagggagcagtgttgcacttcagtttccccgtgctctgtgaaggatcctataaccaaaatattcttgtagatgacaagtagtaacacccttaccaaaagccactggtttctagaagtgaggctggatttggcctgtttcatgtctgtttcctttctctcctgtcgcagcagggggaggcacgtgatcattaaggttttccgtcctgtcatctgaagggctgagtaggagcaggacgccgtatcacagtgagacaggatggtcatagagttaagtgcctagaaacaaacagccgtagaagcgcttcgtccgtaaaatcaatggggaggagtctggggcatttgctccagaaaatggattcggagttctgcccaagggaatacttggatgggatcaaggtggagactctgccgcagggtaaaacaaggggtacaaaacaagggcagcagtcaggaaggtaattgagtgattctccacctaagaaagcgtggccctctccactgtcgttcagtcactcagtcacgtctgactctttgcaacctgtgggactgctgcactccaggctttcccgtccttcactgtctcccagaattcactcaaactcatgcccatcgcgtcagtgatgccatccaaccatctcaccctctgtcgtccccttctcctcctgccttcagtcttttccagcatcagggtcttttcctcttcactgggccttcttcaaaggcagaccccacccacctggagtcaccagggggtccataccacagagcag

SEQ ID NO: 43801 - DNA, 1171 bp, Bovine  19866880915987
  misc_feature (1)..(1): n is a, c, g, or t
ngcttgccgtgttaccgcggaggaacttaatgacacttagtatttcatgtgaagtacgtggcccctcgtcttgtcaccctctgcgcttggtctttggggagaagccagggggtcaccgatcctgggttcagagggactgcaacggggggacggaatttagcccttgtttggggttgggaaaatctggttgcttgggggattaggcaaaacgtctggttggaattggtatttaaatggagcagatcatgtatgtgtgtgtatgtatatatattcacatacaccaacgcataattatatcttcaagccttatgacagtttcagacctaaaggcacccttagaaagcatgaatgcaacactttacgttttaagggggagagaactactgcccagagaagaagtatgtatattcacgcttatagttaagaaaatgaaatctaatgtcctcagttccgcccattgcctacctacccaagtcttcaataaaaggactgaggcaggaagcatggcattggagttgatgccatgggaccttcctgggccctgctttactttctttgaacctcagtttcttcatctttcgaagtggagacttctgggctagattaagcccacctgaggtttgcaggtaccttttgaatacagatctccagcccaacacacgccaaagaactcagtgcctgagatatgttcatcttatttcacgataagacagagcaaaagaagggacaaaagctaaatactatagtcatcttgcccagactccctgccagagctgtcttccgctttggggggacctggaaaggaactagacacagaatcatgccgtgggcagcttaagggctgtatgtgatgtgtctctttgaattggtgagccaagagctaaagggtcatggcaccactttgcgacgtttgagtgaagtgagcattgggttttcccaaagttaaaaaggctgctgtgtctggtcccttgatcttctgagccttgctgtggctcagagtctgaagcagcgtgggtgtctggagtggcaggagcaaagcaaggtcaccccgcacggaaggggcctccctcctgcgtcagggatcctggtgattcctgggaaccatcatggcagagaagactgcgggaccaggcacctagtaggcgctcagatgtctgttaccagactcctc

SEQ ID NO: 43802 - DNA, 1643 bp, Bovine  19866881270322
  misc_feature (1)..(1): n is a, c, g, or t
nattaccagcacgggaaccatgcgacagtatttatgtacactattcattggataccaacaccaaatctgcaagaagacactattctacacattttcagatgaagaaacagaatcctaatgagatcaagcaacttagccagttagtaagcaatagaacaagaatttgaaccatgataacagtgcttctcattataccagtgagcatctccctgaccaaacactttttcataatccaaatactatttttttaatgttctctcatgaatatacagttaagtttttcagaagctatgcattgacaatactctgaacagctaatattaatagaatgtgggcttgtatattcttgtatgtaaaaatcatcagttttaatttctaatattcattcatggaaataactcatataaacaaaagctctttggagttctcaataacttttgagagtacataaagcagttctgagatcagagagttcgagaacaaagaattatattggactaccttccatagatcaaagacactccaacttcagagtcttagtagcctagtaaaaaaacagtgatcaaagtaaagaaaactagtcaatacggtatcaccagaattagcaaataaacaaacaaaaacacaagggtctttattgtattttatgtggtgggaatttttcatttcaaagttgaagagaaatcacaggttgcttaccagacataaaactatgtctgattttcactgaatcattgattctcattgagatgccaaatgagctgttcttgtgagcctcctcattgatgtctaacagagcagttccctcctgtttgtgacaaaggtacaaagcttaatagccagggggggaaggggggagggataaactacgagttagggattaacagatacacactactatatatcttgtagcatagataaacaagaaggatctactgtatagcatggagaactatatttaataccttgtaataacctacaagaaaagaatctgaaaaagaatgtatatatataaaaaactgaatcacttggctgtacacctgaaactaatacagtattgtaaatcaaccgtattcaatattttaaaaatatgcagaagaaaaaaaattttatttaaagcctggttaaggatccagactcagactgcctggtatcaaatcctggcttacctgcatgaaacaagaggcaagttatacttaccctgtttaaagttatttcctcatctacaacatacaataatacataccattataatataatacttatgaggttattgggaagattaaatgaaataatgattctcaaaagtgagtggaataaaatgtggagcacatggtaatcagccaatgcatttcagttatctttgctgttatttttgagtcagttggtagctacatggactcctcaatgtggtcttatttttttttttctaaactccattcaggcttcagtgaacagttggttcttcctatggcaaggaactaattcctcctcgtctataatatcacatttttagcaacaaagtgacttaaaataatcaggaaaagtttcaagaggcagcttagctggttgcttcttcctttttgaagaaccatctgtcaaagacagtgattgtgaagaagatataaattactggcttcgca

SEQ ID NO: 43803 - DNA, 1272 bp, Bovine  19866881273559
  misc_feature (1)..(1): n is a, c, g, or t
ngagataaatagtggcgggcagactttgggttgaacccagagcctggcatacagcaggtgcttaacatacatcgttgaagaaatacacagatggcctttctcttaactcaacaggggtagaactcttcagacattgccaaggactttccagacattatcacttgcacagccccaagatttcctgcagcagaaagagaagttgggaatgagtccgggggtggtcagcacccgccagagctggatgacagctttatagaggaaacggctgggacggtccatcctcacggtcctgggactgggtggctggagaatttcaatcaattatagtttttacttgggagctagctcactttgagggagaatttgttacttgaaacaaactacactgtaggcaaaatacattttgtgatgcaaactgggagccacctgggtgtcccgctgtggtttcccatgcttttcttgtccgtttctgccatctactggccacaatgcaaattactcccgggtttcttgagattctacctgagaggaagggcgttttattcctgtaccttctggatctgaaatgcaatttcccagatagttcaccaagacacaaaatgtatctctccataagtcatagttctgaggggactgaattatctgtttattcattcgctttattagcttagttttgtcagagaggcagtgtttgaattctgcccacctgtgtttaaatcaggccacttccctggtggctcagacagtaaagaatctgcctgcaatgtgggagacctaggttcgaaccctgggtttggaagattcccctggcaaagtgaatggctacccactccaatattctgacctggagaatcccatggacagagaagcctgggaggctacagcccatggggtcgaaaagagttggacagaactgagagactttcactcctgcattggcaagtgagttctttactactgggccaccagggaggccccttccttagtttaggcaggcattagtttggaacatggcaaattccgtaaattagttattatttataacctatgcccaatatttgcagaggaattttgtttccaaactgtttccattttatctcttgagactcagctcagaagctgcagcttccattttggagccttccttcatacctccttctggaacaatccattgtccctctgagttcccatagcacagtatctagacctctcttggactgagattttcacttggaatataaacctgccggccagtatacatgcctagatctc

SEQ ID NO: 43804 - DNA, 1954 bp, Bovine  19866881696543
  misc_feature (1)..(1): n is a, c, g, or t
nactattagtggtagcagtaattataataacagttgaatgaaactggtataaactcatcacagctttcagactaccctcctggtgccaaaacatttcaatagttcttttttggagtggaaatcttcccattcacaggatccatttctataagattagtaagtcattttgcctgggaaaacttttcattcagaaaagggcaccagttccttctgaattcttaaccactacactttcaataatgtcaggagatggggctgggggagaaccaggaggctggtcactcagtccttgcaagatgcttacggatcgaacctgatggcttatttaccctgacaccttggtggctcagacgctaaagaatctgcctgcaatgcatgacacccaggtttgattcctgagtcaggaagatcccttgatgaaggaaacggcaacccactccagtattcttgcctggagaatcccagggacagaggagcctggtgggactacagtccatggggttgcaaagagtcggacacgactgagcaactaacacacacacacatacactcacccagtcacaccattttctcctaccctttccttccgaccaagtactcggcctatatttaaagacaactgtgagcaaggaaccaaaagttaacctcctccagcgaaaacaattctgacttttcggtcccactctacaggccagccttgagagcctctggttaccctgagcaggcgaactggcatttcagcaagcacctgacccaggctgaacataatggaactatgacctcagaggttggaaatgttctacttctgtttacgaggtcgaggagcctaacttggtctggggacagatatgagttgatcattatgatcacgtgtgatttcgatcaaaaaaaaaaaaacccagaaagttttaaatggagggaggtgtggtaagggaagatagaaagaagaggcagatgaaatttcagcttttaagatttccagtacagaggccccgcccgcagcttatcagtggcaagcagctctgcggacattcgccttctaagctccgtgcagcccatttcactgtgtcacaaggacacgtcctgtggcattttcctcccctccatttaagctggtcctgtcaagatcaggcgtcttactatcatgcaaccagtacgggactgagccaaaaaggggtcaggacagccagccctggcttcatctttggaggaaactgttgatggccacatcgttcccaccccaccttctggcccttgatttttacttttccgctcctcttgttcctctcccagcaggctccatgctggttgtctcaccccgttccctgcccaccgaggggggcaagtatggggacagggaagagcaggagccagcccaggacagggggtgaggggaggcggcaacaggggtgcacgctgtaacagaaggaaagagaggacctcccaaagctttgaaggccagtctggttccctaggacgctctcattaccgtcactcaggttttcatgccctgagaagccatatttttctatgcaaacctatctcataggtttgctaagaaaacaaagcagtggctacgtccctggcctggcatgagtgacatcctagctgcacaaggcagacaagccagctcactcccggagccttgcacttatctctgtgataagtgatgggaaaggcggtcccagaatgctgagcgagagatgatcaccacgggtccctcactcatctttctgacctcaaagaaaaaaattaaacacatttgaacctgatcccaattcctcacctgtttggccagaatccttgctgtcaaccttacagtctcagagggattccagttttccccaaaaacaaccatgggagaacattccagcttgtgcatgggccaatcttctctctgggaaagttaaaaaaaaaaatattacacacacacacacattgcaataaagtttga

SEQ ID NO: 43805 - DNA, 865 bp, Bovine  19866881735225
  misc_feature (1)..(1): n is a, c, g, or t
natgcctgcttgcatcttcccatttggacatccttctttccttaaaaaacagaaagggcactgtagtggtgagaggcggagaaacatgaagccgcgcactttgtcatgcaataacagcagccatctggtccgaaagcggagccaagagtcaccttaccttgctctcccactggtacgtgccattttcccaaaggagagtttgaccagactcagcccttgagtgggagtaagttggtcaaaggggatacgagccaacactgaccgaccccgacagcgtgaagggcactttccaaagagacaaacgacacgatctctgacccatgagcctggcccgggacatcacagctattaacatcaacctgcactatgactcaatgctttggggcaagtcagaggctcttatgccctgattttctcacctgctagaaagggacagaaataaacaaagccaccttggaagcctgagtctgtaaagacagaggactggggtcaacctatatactgctaagaacacaaagtgggtgacaatctttagtatttagagatgcagaagacaggatggagcatgtcagtaacaaatgttgtctaggaagcaaaatttaaaaacaacgctacccagcaactagagacatattcttaaataaaatacccctggatctgactggtacacacatctaccttgtctgtatcccactgaatgattcttctgctttgtcataattaggtcagtcctccccgttcatcaccatagaattcattttcctgcttctcataggggatagggacgttgctgttccctaactgttagttgctggtgtgtttgctgtgttagacaagccacggagttttcaaaaactgtaagcca

SEQ ID NO: 43806 - DNA, 1239 bp, Bovine  19866881931354
  misc_feature (1)..(1): n is a, c, g, or t
ntatgtcagtgtttcacaatgttgcccttatcttatttctctttgttggactagtttgctcaggagctcatcctggtggaaggcttttattttctaaaagtggagaacagttccttgaagaccctcactgattgggtatcttcctttgggcaaggcaccttactgagggttttgctgggtaacaggtggaaacaggcttataggtagcaggtcatttgcccagggcacgctgttcagcagggcagggttttgccccaggtttgccagcacaatccatatttttaaccactatattgtagcgttttcttgggttagatttgtactgaagacagaaaaccagtgaaaggaaattaaagtcacttttttttttttttttttttctgagcgtaagtaagaaagaactttgccgtgttggagaatgtttccttaagagctttagcaaaagttcccagcttgggtgaggatttagatttaaacagaagattgaagattttttttttattctaatcaacactgttcacagcggaaggaaggctgtgttccctgtggctaaaattctttagttgtgtttaacagctgaggtcttccgtttttcctagttttttttccttccagaaaaatatatgggtcctttcacttgcttggctttctgtaatttactttttcagaggtgtagctgggggtggagtggacaaaacagtaactccttgccccatttccaccgccccacgcccgccccccgccgtcagcccttgggaagcctcctccggaactgccaggcctgtcggttccttgactccatagcaccccctagtgagctgctggagatctgcgagctcagccaggagaagatgagctgcgtgttcgaggacagtaacgtgtacatgcttcacatgatgtaccaggccatgggcgtctgcttgtacatgcaggactgggagggagccctgcggtacggacagaaaatcatccagccctacaggtgattgcactggctcttcccatcagcgtagctcagagtagagttgggtggtttggaacgcgtcccttggccattctgtctatacgctcccatgttggagcgggccaggagcagctttctctcctctccatgacatctgcaggtgcatgctcagggtgcttcccctgggcccagcctgtgccctccaccacctggaagagacacccagggaggcaggttgaggtgacaccgggtagcggggggagggctggggcagg

SEQ ID NO: 43807 - DNA, 1589 bp, Bovine  19866880122828
  misc_feature (1)..(1): n is a, c, g, or t
nacactgatgtatagaacagtcttatggactctgtgggagagagagagggtgggaagatttgggagaatggcattgaaacatgtaaaatatcatgtatgaaacgagatgccagtccaggttcgatgcacgatactagatgcttggggctagtgcactgggacgacccagagggatggtatggggagggaggagggaggagggttcaggatggggagcacatgtatacctgtggtggattcattttgatatttggcaaaactgatagaattatgtaaagtttaaaaataaaataaaataaaaaaattttaaaaattaaaaaataaagtcaccaggaaaaaaaaaaaagagagagagaactccttgggcaagtcacttcccctttgaggatttcaatctttttcatgtgataaatgaagtaacttgaagtggatgatctctgaagttctttttatcttcaagtctccatgaatctgtgactctataatatccgccttgcaggaattcttcaagaattaatgtttgtgaaataatttaagactcaaggatgaaaggttttatgctagtgccccaaactatttttattaaatgaagcatgccagggaagtctgttgtgtttggggatagctgccgtgagagttcccagcactgcctatgcccaacacagactcagaaagggacaaaaaagaacaagaattcctctaatagatccagaaattatgatgagtagagagcacaaatattcctgaaattcaaacatggaagtgataacatgtacattcaaacattaagtttacagaaaagggtccatgaaaagatcacgcattgatagcctgctaacactcattcacatgccagggaagaagaattgatgtctgtatgcctgcttgtgtagtgtatctccaaaaacttccactttgtgctgaacctttctttgcctgattccttctgcaaaacctcttttatgaccctgttttgattatctaaaataacaagtgattactgaatcactgagttggaattcaagacagcataaaatcattaattcaattttccccatatttctcttgtcaataaattgagcttcagggtagtcaatgaactatcaaaaaatcacaattaatgcatatttataccaggactgaatagcatgctgtgactcataaccaatgcttatttcaccacggcttaatatcttaaaaattaattctagtctcaatactatttgagagcataacagatcacctaactgcatgttgacaaaagctttcaatgagttaacacaaaaggttgaatgaagaaaataatctaccccttggcaagggcagtggagaaaaaattgtacaccaatctaaaagtgtgggtagaaactccacttcaccatttaggaataataaacgaaccatagtcaatagacttagtccattggtggattactgggttaagttactttctaggtttcattttccagcaatatgaaatggcaagggttagaattaaaaccatcaaaaacagagattcattttttggtcataatagtgaaacattccgcagttttaggacagaagatagaaatatattgaagccagtt

SEQ ID NO: 43808 - DNA, 1009 bp, Bovine  19866880428521
  misc_feature (1)..(1): n is a, c, g, or t
naaaatgtgtcttggattatttgcagtgtccattaatgagatactacagaagaccagcagcatctataaaaataagtttaggagtgctcagaagggcaagcatgcttaatgcactgcatgaataataatagcagactataagtcttactggaaagccaaagctttgtagaactgttaacaattataattcccatttagtaggaatgggtagaaggataaattttggtgggggtttggtgagaaattccatggcataagaagcttgtcccagggaaagtaaaacaaccaaacagaggagaaaaaatactcattcccattcattccccagtattgtccacagatggctgtagcaggagaaagtaaataaatagataattatactgacataaagaccaattttaaaggtctcctatattttaaaaaaatctataaatcttaaaaatgaaagctcacttgcctaaaaatgtaatattatctacttggcattaagctcttaatggttacaatgatttcaactaaaccctattgcctcccctgtgtcataaccactactaccaaattcttgcaccaaaagtagaaaattagtttttctttgctagtccctgatcatttattttggatacactttctatcatgggagttaagagaaaagctgcaaagatactagagagtgctcatcttctctggtcctgattgtttgtgcctgacatttccttggagccttaaggtgactatgtcactttagacctgaataatatgacacccttcttagaacgacctttaaaggtaataaccaacccagcattttgttggtttctctgtggtgtttgttctggacagaagtcataagaaaaaaataaaaaaacagtgaatgaggccttttcgagatccaatcagtttaacaggccttattcatgggaaaggttatgtgagtaggttgcagaacaagacagtgcttctctttcccatatacttcctgaagtcttaatcccctctttctctaaatgtc

SEQ ID NO: 43809 - DNA, 1011 bp, Bovine  19866880512328
  misc_feature (1)..(1): n is a, c, g, or t
ntccaggcaagaacactggagtgggttgccatttccttctcaaatgcgtgaaagtgaaaggtgaaagtgaagtcgctcagtcgtgtccgactcttagtgaccccatggactgccccctaccaggctcctctgtccatgggattttccaggcaagagtactggagtggggtaccattgctttctctggaatcttgctttaagtccgaatatttttgccatcagtttgtgtatctgttcagtattctgctgttttatttctgtttctatccttggtggcttgttataacctcagagcagtgaagaaaaaatatgtgagtgtataacagcggtagagatcaggcaatccccttaagtatatttggcattgctctatctttaagcaatttgcccaacctgtataattacaccgcctctgctgggcaagggtttttcctaatcagcatcagtggactgtgtgggtctgaatgttggcgcaagctcagcatatttcatcaacacagtgatttccttggaggtgtgccatcatcaagatatcaaaacatcaagaagcagaaacatgctttcactgttagagcaaaatggagaaaattcatttaaaggagtccttaatctagaattaaacttttgtctaaaatgcctttccttccccttgacctaatgttacctgctctttgaagcctcattgtcctgcctcctccaataattcttgagatgctgctcccacactcactgtgttcacacaacccacctgatccaatagatctgtttgttggttcagccatgtgcccttcgaagccctggtgtccctacagacctcccttcttttcagtggttgtagagagctccacagaaggcacagctgcctatggcagaacctcagccttcctgtccacagtgacccttggttgattagctcttttcatgacccaaaagtgaaagtcaagtctgactcccaccctgtgaactgtagcgcactggtcttttctgtccatgggattctccaggcaagaa

SEQ ID NO: 43810 - DNA, 957 bp, Bovine  19866880547853
  misc_feature (1)..(1): n is a, c, g, or t
nctcagggttgtaaactaggcagagagatcagcatcttcatttcttaagtaacttggatttataaatttgtaaatcttatataaatgtataaatttataaaatacttataaatttagatttccattagtcatattttaggattggagtcctgataaaaaggatactcatgtaatttaacacattgtcagagtccagggcagatcaaaaatagacataaattatatgttttacattattgtcactctctctctcaacttttgtttggtatttctgaaaaaaaaaatatatatatatacagagggaggaactcagaataaatatcctgtagatatgttcttatgaaaatattgtaacatagataggagacagagttactggcaaatagaattgaaatatggaaattttacacccaaatgtaactattaaataattgaagattttatttaagctaaataaagttggagtgaagagtttacatctaaaaacaaaaaaagtgaacttatccttacttaaaagcaactttctccaaagaactatgcttagcttgaaaaacactttataacagatgacttctactttttgatttcaaattcttctcagaaaagcactctaaaatgagctttttgtaggacaaatcataaatagaagcaatgacaagaggtgtctttctctcagtgttcattgccattgtctgaccttcaagcatatggagagaatctggatttgtggtctgtaccttttgacataaactatgctgaacacatggcctttccaaaaatacttcagggaacagttctctgagtatcattcatcatctcttgccacaatgacatctcattgcaaaggaaagcgaaattgttgctatgagatggagagttgatggagaataggaaaaaagttaatacggtagctaataaagggcacttgaagatactcttcaatgatattgatgtatt

SEQ ID NO: 43811 - DNA, 761 bp, Bovine  19866880613142
  misc_feature (1)..(1): n is a, c, g, or t
nctcctaaatcttcataatagatgaagcaacaggtgaagtgaagattgctcattctctgagacctgtccctagctgccactccacaaaggaagtagaactggaaatctcttcattcccttggataattacagcatcactccccttcctgtctgttaaaactcttatcatggtattgtgttgacctcttgctcactcactctcattctctgaagactgtggtacctacttacagccctccggtctcccacacataggaccatcaccttggttcactttagcaactatcacatccaacttgcaggctttatatttctttgacttgtcatctgcagtgaattctgtcctcatccatcatttaatctcatcatttaatttgacttcaacatatatgctccattttctttcttttttactcaatagagaagtcccaaccatgaacaaattcaattatatgccttctatgaaatgtcacatgtcaaaacctgctaaagaaaagcacacagctttatagattggctttaacataacctagagactcaggtgtcctctgattattcagccttattcaacacaccttctctctttctttctctctctctctctctctttttctggccatctaattctgcaacgtgactgttttaaaccttccatgttttcttcaatgcttcaaccaaataaatatcattttctcatccttcatcatttttgccaaactaaactcaggtctgctcacctgatctgcagcaaagccaatcta

SEQ ID NO: 43812 - DNA, 1743 bp, Bovine  19866880685162
  misc_feature (1)..(1): n is a, c, g, or t
ncacctggtggttaggatttggcacccagggaataggtgaaggcaaggcttggatattaatgggaaagatatttgcgagaaggcggaaaccttcttggtaccagcccagcaaccattctgacataaagagaaagccaagactcacctggaccccatccttctgcctgcaactgtaacgtcctgtccttctcctctgttgtgatctagtgttacaagtctccacacaattcacaaagaagagcttttagctgataaagcacacatcactcttggttgagtaacagatttttgaggagttactctgttgtaggcaattacacaaaacataagatgtattctgcctctaggaaacttccagtttaaaaaggggaagaactaacataatgaaaataccatataatgattgtaaatgccacaggagcagcccagaacatatcataagacttcagaggaaagcgctttcttccaatttaaatttcttaaaatgttttatatcagttctaactttttatttaccacggataaagaaaagttttcttacagatgttagctcagacagttctgaggtttcctaagaaatattgtggccttactggtcatattgattcaacttgaaaatttgtccattttattatttagttataagcagcacatgtagcaagttgctaaagttattcttattgtaaatatgctattgcttcataaataggagctcatttttgttatttccttactatttaaactaatgtctctctcttgaaggtgttgctatggcaaattaaattagaattttggacccctctcccctttgcatactcacacactgctattttcatgctgactcatgtggccctgagtgatcaaaactcttttacaaataactcttagcatattcaatgatctaacctaacttgagtctatttctgacctgttcagtcttcacagatgcctgactgtgaaactggaaattcatgaggtcacctctaagaattttctttgtattgtgtacagcagaggggagggtggtatttttcatacttattttcttttaactctgctttttaaaaactttctgaatctgtcattgctatatgctaagcatatggtccaaagcagttcctgcttttgtggagaataaccaagtcaaggacagagggtacattgtaataatgaaatgcgaagttctcattaaaaggcaaatccttcatctcaaaagattgaacaggatgcaacctcagttgactggtgggaatctcctatgaaagcactaaaaaagtattccaactgaagactattttttggatctgtaccactttcatttcaatgaattgaaatatttgagtgtactttaagcgtacatcctataaaaatttattctgggatacataaatgtcagcaaatgggttgccagccattataattccttctttgtttaatacatattttcccatcagggattgtgacatgtttcatcaatatagactctacaagaaatgttgccagttttctgcatagttgtgcctcttaatgaaatttcctgaccttatttttctcattcctgtggactcaccatcttccttgtcttcctgcagtctgttagctgcacaataattttccaagtgttcatctctagcctgtcttaaacactctacccataactttacgcatttctaaaatctccaccttgatgttttttcaggtgcctaataaagctcaaaccccattcccctcatcccacctaaa

SEQ ID NO: 43813 - DNA, 1984 bp, Bovine  19866880697848
  misc_feature (1)..(1): n is a, c, g, or t
ntttatatgtacatgtgtgtttgtgaacatgtgtgtgagtgtttgtgtgttgggaaggtgggaagttttagatttcctttgaaatagctgggaagaatccaaaagataaggaattagggatagtttggatattaaagtaaaggcaaaaagccaaaggagtgaaaatcagttggttgggaagaaaatgtagtaataatagtaacaggatcagtaacatttgttgaaaattactatatttcagtcactaaatgatgccgaatgtactttcagaaatgcaatgttcacatcaggacaacaaggaaatacataagaacgtgaccagaatcaaagacaattgcaaagggtattggacaagagtttaggagacatgaaccatttaactgtgtagaggatcaagtcaaacgagaatatccctaaaattatcacaggaaaggaaaggatccaggttctacagggatctaagaattgtgtgtgtgatgtgtgtgtgtgtgtgtattatacagggcgtgggagagggagaaagagagagaggaggagggatcaacaagatgtcccaacaatgatgagaaaagaaaccttacaaaagaaaaacaatgaaggtgccttaagaatctttattttttaaactatgccaagtaaggagagcttgtatgatagacaccatgtgcagctgaaaaatgaacactttgtccctgaaaacttattctggtataaaaataactgcacactgcagaaggttctaaatattttgtgttgtagaagatatttgatatagaatagtatgttggctgaactgaaaaggtaagagtattttaaattcatgcgatgagttgcgaaactatcaagtacttactaataaagctctttgatttttggctttgcttttagtaagggtaaacattttggagactttgaatatatttttatattctggataatggcaggaagattaattattcaaagtggatattggtgagaacctctgactgcttgagggtatcctgtttttccacaaggtaatttctactttatttgccttgtctttatgaaatatttaacagatgcatcagagctattctcagtcactcagtaatgagtttagtaaatttccaagctgccagagtaacatctcactatttgaaaagagagaggttgtgacaatggcatgaataccttaataacaaatctatcacttgtcatatttcaccaaacctgagaacatttacgaaagataagaagcttaattccttagctttttttacatgaagctcaagatatttagaagagttgaagaataagaatttcagagtgttatcagattatcatcctacctctcaaactagagagaagttaacattatttggattgcttggaaaagataagagattatagaaaactcaaagttgtatatacactccatgcacacacactcgcaatcgactagcagaaaagaaacaaatttttaactaatcaagattaactgttttaagtatttactttttaaagcaaataagccttcgatatacttattattataatgtgacaaagcttcatttattacaacatcttgggagatgttttttaacattattttgcatcaggattagtgagtggcagagaaagtgtttacatatgttttgatgagagcttagcagagactgttttaaactggctcttcaagtgctccagaaccagaatatccaggctgtatgaagctgaggaaaagtacaattacttgttgcaattcacaatcccctactttctccctccaaatctgtccagttggctctcaaagtttaaaaatgaaacacgggaaaattccggtgtgttcctttcttgtcttttcccatccctccattatatcctgagacatttgtgattactatcaaaatagccaaaatgaatgacttcttaaacattggttgtttgaatatgacagctttgtattcctaagaaacttactctccaaacatgttatctctat

SEQ ID NO: 43814 - DNA, 829 bp, Bovine  19866880840079
  misc_feature (1)..(1): n is a, c, g, or t
nattaatttagaaaatatttattttctttaaaatgacagaagagaactgagtgtcttttttcttcacctaatttacccatgattatgaaaaatcaggataaaatacaaaaagccatagtcaagacataacttggtttcaatgtaaagcactttctctgaaaaaatagaagactatagagtgctgattcttagcctgggctttacactaaagtgacatggggaaatttttaaaagattagatgtctagattcacccataatgattccgatttaattagtcagtggtggggatgagcattatattttcaaaaactccaggtgattctaatctgccatcagtgttggaaaaggctgccaaaaaatattaacctcaaaaccctaattgtgaaaatgaatattaaattacagtttggaatataaagtggattacaaagtcatattctggcagttaagaaaaatgctcaagcattcattttaacatttaggaatttagcaagtgtagaggcataagccatatatgtatgtatgactgaatcactgtgctgtacacctgcaacatcgtaactcaactatacttaaaaatttttaaagaccatttaaccttgattggttttaatttaatcacacctacacagttttcttttcatttaaggtaatatatctactggtgccaaagagtaggacatgagcattttggggagggggggcattattctactcaccagacttcagatcaattttatttacatattactatttatatggtcttttggcccagttattacttttccccattggctgtgtaatctatggtgcatttccaccttctt

SEQ ID NO: 43815 - DNA, 1729 bp, Bovine  19866880856399
  misc_feature (1)..(1): n is a, c, g, or t
nacatagtcgtttttcttttcgcaattaaagactactgacctctaaaaatttccagtatcctttcagtgtctactgtattgaaaatctatgagatcaaaagtacaattgttctagacaggagctatgctgccaaattatgttgtacagaaaataacttaatatcaacctaacacatattctgagcagatataaaacttagtcccctataatttcaaagcatcattgaataatttgtttctctgcacaacagtttaaaacattaacatctctttcctcttgtatttctttgagaatttattctttgatcttgtctctaaagagtttgatttcatttcctactgcagaggtgtggattgggtgggagtaattttaaaagctacaaagtagtagccataaacaaaataagacccgaagaatggaagatttttttttcctggcattactgctcctggagagttaatgtgatcatgtgatgagcttcctggctgtgagacagcgtcgtgacctgtaattctattgattcactttggaactattcacctaccagagacatttttttttttcatgctgcatcgagaaactgaaatactgcagggagttcctaactgacctcctacgtttagagtcaccccaactccctaaatcatttcacacagtacagtgagagagcactccagaaagtaaatcatgtcatcccctgcttagaattcaccggtagtttcctattacaagacagtaagtccaactcctttaataaagctttcacggtccttacagaagagggcctgctttcttgtctagtctcaaatcccatcacttacctcggttccttaaacatcatttgctgttccatgacgtgcatgatccatgatccagccccatgatgtacataaatgccttttccaggtactccccaagtcccctgtctgttcactagcttatggcacatgcttgcttgtgcagtgaaaaatataagaggaaacatattttggactaaggtcacactagataaaagagattgaaaaaaggataaagtttgttttcttctctaccaacttctaatctctatatatactatacctctctacatctgactgcctactaatctcagacacttatactatcttttactttccctgttcttagggaagcaggctctaaaaaataatttgtgattagttaaatacactcagcgtgaatcactgagtcaaatattacagaatgtttattatataccaggctttgttctaggctcagggagattaccagcgaacaggatggtgccagctctcaacaagcacacattctaatgaaggaaatggaagaggagcaactaaatcattaaataagatgatttcaggtagaaatagtagggagaaaacaaaacatttacatcctatggaaaaatctgaatgaacttttgggccaagctaacaggactaagtgctgggaagaaggggtctagtttagattacgtggttcaaagggtccctttgaagctaagccctctgtgaggaagaagcctcggccatagaacagaagcacccagcagaggggtgggtagtgcacaggccatgaggtgaaaattaacttggtgtgtttcagagtagaaagaaagaccaggatagctggagtggagttcaggagaagaggcctgagggcttggccagcagcaagccatgcagtgcctagcagacctagcaggggctcttatttattcctagtgca

SEQ ID NO: 43816 - DNA, 1398 bp, Bovine  19866880946869
  misc_feature (1)..(1): n is a, c, g, or t
natacatatagtcaaagctatggtttttcccgtattcatgtatggatgtgagatttggaacaaaaaggctgagcaccaaagaattgatgcttttgaactgtggtgttggaaaggactcctgagagtcccttggactgcagagagatcaaaccagtaaatcccaaagaaaatcaatcctgaatattcattaaaagaggtgatgctgaagctaaggtctaatactttggccatctgatgcaaagagtcaactcattggaaaagactctgaaagcaggggtagaaggggatgacagaggatgagatggttggatggcatcactgagtcgatggaaatgagtttgaccaagctctgggagttggtgatggacaggaaagcctggcatgctgcagttcatgggatctcagagttggacaggactgagcgactgaactgaactgagtgcatatgtgataagaagctctggaaaagtcttttaaaaatatcattttcctttttattagattttaaggtcactcaactgctgcataaaaaatagtctggaaaacacaatgtattttcttattacttcaattcactacacgtagatgggggtggtctctgtgatgccataagtgctgggttaaggttctacgaaaacacggaaatgtatttacttttttcttttcttgtaatttcaggacagggaagaaaagagtacaagaaaaccagaaacatcattgaaaattaattgtttcacaaactcaaatgaatatttaggttcttaaatgattattttaatagacaatgtccagaacttattttggacaatttctgctgtatttgttccttaataactatttacatctaggtagagcaaggggcctccagaattataaatgaaatattttagaaaatgggttataagatacaataaaaacccttgggagagagaaacaaataacaaaaacaaaaagcaaaacaaaaaaattctgatcctttaattatgcagaagtacggatgattccttctgttacaatcagtgctaaacgacactaagagtaataggtctacctgtaccttttccaaataagtttttttatcagcattgttttagttcttcactttctatttttaaagcattttgagacttacattcagaatgtagccaaaagagccagatttgcctagtgaaatagctgttttagacaagtgtgacttgtttctgacatatgctatacaagcaattgtgttaggatgacatccatcagagataatagcaagctaaaaatggcactatcatatttcatcctgataatcataaaagcatacacagaaagccctaatatttcagcccacaggagcaaaactctccaattggttttcatagcggtagatgtatttaaaccaagatagaaaaa

SEQ ID NO: 43817 - DNA, 1128 bp, Bovine  19866881003088
  misc_feature (1)..(1): n is a, c, g, or t
nattaaaaaactgtataactcccttgctaacactagcaaggggggaactctccgtcccccttctgatgtctatgtcagaagttttctctgtccatttttcactttcataaaactctgctacacaaaaactcttgagtgatcaagcctggttcctggtcccaaagctaaatcttcttcttcagagatcagtaatttgacactgttcaccgtaagctatcaaaaccatggagtgtttagagtttacataaaggatcccaatacagaaattttaaagatattcaaagatttgcattggtggctggagttcgtttttagaaagtgatggtaacgctggcaggacagagtgaaaggaaaggctgaggagaaaaacaagtttgtcctaaagctgagaaacacagaagacttggacaagtatttagaaagagtagtgcttcatactatggacttcatatcagaaaccagtcttgtaatcagggtctgatacgagatctatgatatcaaaggatttgtttacattctatgaaagttagttaacttagcagtaatataaaattaatattacctttctcatagagtcttgttagatatgataatatatatgatgcatatgataatatatgatattaggttagtttacttgctacacttttcggttggtgggtttttttttatttttattttttttacttttgagatagggtagaagggaacattgatgtttgtccttctagagagatttcctccagtgagcatgctttcatggaagcctttcatcttttcaattttgatctttattatgtatatgccagaggtagagaaagctgtaaaacctctctgccctacattacatccatttcaagatttagatcagaggctggaggaagacccagagtgctcagatatatggatgatgtaatgctgacataaataataaattcactggctagaaggatgaacaggccagacaaataagcattttaaaagagggtaaaaaaaatactgaagcctaataggaatggaaataaatgttggtatttggttctcatctcctcaaaaaaaactacacatgcgcaagatagaggatattaatttatggaaaatacttgtgtatagaaatgaccacaaggt

SEQ ID NO: 43818 - DNA, 2624 bp, Bovine  19866881049166
  misc_feature (1)..(1): n is a, c, g, or t
nactgagatgcagtatttacagcaagacacatgtctgcatttctgagcacttgaaaatgattaagctttcagggagactgtcaggatcacttactgtgcattaaatcctatgtcccttccttgagattgagggcatcctttctatatgctgatggactagactactgaggactagacattgactatctagacaatgctagtccgttactacagggtttattaacactttatatgttgagagtacattggtcctcaatgaaaaccctacctttgctttgagacaatgtgagcaacattcagcctgaggagttgtagataatgttatctgtgattttcaaggggaaatacatagctagtttgctattcacaatttagcagagcttaacaaatgaccaccagataggaatttagtatttcacaacagttgtactaattattttcactaattgtcacacatttgtattctttgaaattggtttgttatctccttattactttggtttaaaataaagattgattttctcagctaattcaacacacttgcttttaatttatttggtcacatgaattagctgcaatcacaacatatatgggatgaattgaatcatatcagcaccattaccaacaactttattcacactaaatcttcgctggtcagaactgaccaccacttaatgtcattttatatatatgaatgtaaacatagcttaagctgaggcaaaggaaaacagacctaattcaaatgagtggttcaacactttggatttggattggaaagatgtgaattgaatcagaagtgagcagataaaaaaggaagatgtgaacaaataactaaattttaccatgagatcagttccctatccagccatgtggctttgagagtaatcctccagctgctaggtagctcttctttgcatctcactgctctttgcatccttaaactcatatccttagagctatataagtgatttttatgctattttaatatgtgtgtgagctttaatactttttaaaaagttcaactgaatggaaagtaatttatgtttcttgaactagctgctgctgctgctaagtcgtttcagtcgtgtccgactctgtgtgaccccatagaaggcagcccacgagtctcccctgtccctggggttctccaggcaagaacactggagtgggttgccatttccttctccaatgcatgaaagtgaaaagtgaaagtgaagtcactcagttatgttcaactcttagcaaccccatgggctgcagcctacgaggctcctccatccatgggattttccaggcaagagtactatgccaaagtgtcttagtagtttgaaaagttaagagaatttatttcttgttagattaaagctgtgtctgcaatggtttgactgcaggttggctgtggctctgctgggtatatctaggactgcttccatgtgtcttcttatttttatcccaaagtgaagaggatatcattgtttaggacatgtttcccccatagtgtggaacaggagcagcagattctgaattagtacatataactgcatggaaagcttcaacctggctgtggtgtcatctctatcaacttgccactgaccaaagccagtcacatgactgcagtcaaagtcagtgaagtgggcctgatatttctctaactggctgtacaggcaagccctgtgtcaacatatagggatatatgttcaattctattaaagggaggaatgaacagatggcaataatcatctatctctttttatttgaactcctccttcattgtacttccctcacattaagtttgaagtggttataggcaatttgtatctaactaaagtgaacttggggagttggtgatggacagggaggcctggcgtgctgcgattcatggggttgcaaagagctggacatgactgagcaattgaactgactggctgactgaaagggaagaagagtttgggggtacatttagtttgagtttagtggagtatacagtttatattcatttctatgactagttaaaatattttccaggtgtgggagtagcttctcggaatactcatcttgcccactgtactaacctatctggcattatcacatgaaaatcaaggacaggcatgagtgcagctaaatatataagataaagtgttatcttggtgcatggaacatacctgaattttcataatatttctgatatttgtccactttcataaatttgtaatttatagctatttgtgatctcattgtaagtataaattctgtacttaatttcatagtgtaattttatattcttttacttaatgagcacccacaaaattgaataagcttctagagaaaaatgataggccataagaatacgtcactgcatttcttttagaaaaagatgaatgtgaaaatttgtttagttctcagtgattgataacatatcctccattccatcaccagttgggttttactcaaaggatcagttttccaaagtgaaagtagaagtgttagtcactcagttgtgaccaactctttgggaccctatggacaacagcctgccaagctcctctgtccatggacttctccaggcaagaatactggagtgggtagtctttcccttctccaggagaactttctgacccagggat

SEQ ID NO: 43819 - DNA, 1283 bp, Bovine  19866881183601
  misc_feature (1)..(1): n is a, c, g, or t
nagatgtgaagcctgattctactgagagaaaatttattccctttttaagtgtaatacttattttaaatcgatttgtagttttaggatgttctggtagtgtttcaatgttcatcattacttataaacacattgccagtagtatttccttacctggataaaatgtgggaaaaaacaatgatgcccctaaatttcaattagaaaaaatggaacaattatttgactgcacagctgtgtctgaataaaagtaatgtattactctaaggaaaagatatttattatctctcctaaaaaaggatgaacaactggattataactaccaaagagaagtaagtttggataaagtaaattgaatttacatgcaagtaagtaaagtcaaaaatattaaatgtcctcaagtgtcactaagattatcaaagcaagccaagaggtaagaaaaaaaattatattaggtccctccataggagtgagaagacttttataggctggtgactaatatcataaaagcactctacacaagatataaaatgattaaaaaaaaaatccactttcattttattgggtaaaggaaaccataatgctgaagtttatgagcacctttgaattattgttgctttgcctaattggtcttacaatttacatttgcaaatatctaacataacagtcttcacagacatcacttgatgtcaaaactgtaggaaatagggcaaaagagagtcttttttgatcatctgtattgttgagttgttgctttcaggatcatcatcatcgtgattcctcagcatctagcacttccttgaggaaaactttgtgtcctggttcacaaacacaggggagctttgaggattgctttcccataagcagttctcaataatctgtacattctcccaataagccaactttttctctatttttgaacttattttcaaaatgtaccttcatagcatggggacagtattattactttaactagtgaagtataatattcacattaaaatttgcatatattaatatacagatcacaaaatcttcacaaactgaactgagtgccagatggacagattatcatccacaccaggaatactcttgtgatctccttgttactgcccaacctaaacaaaggtaacaagtctccagacttctaacatataggttagttttgtctattgtcatactttataaaatcgcaatcatacagtgtttcttaccaactgacttctttcatcaaagtatctttgttaggtttatccatacgcttgggcatagttgtaaaccatatattctca

SEQ ID NO: 43820 - DNA, 860 bp, Bovine  19866881374457
  misc_feature (1)..(1): n is a, c, g, or t
ntatatatatagcatgatatgagtaaataccccaaagttctcaaagacccatctacacatacataagctcaaagaattctctgacattagcttaaggatatcttaagtagtgcagttgttcagacctggatcaagataagtaagaaaagtttagaaacattcaactctgtgagagccacaaattagtctttttttaatcaatattgtatgatctgtttgatgtcaaaccatgccagctgctacccacaccaccccaaatagttcttcccaattattgtctcttctgagagtcaccaggctggaattgatttcttccacggcagacaccaaaatccagagcccaaggcaatgctctgcctcccttgtcagcagtcttccttgttactagtgacttatgtctatttctctgcttcatttgtcctgcttatttggtgtctgcacacagctggttcctgttcgcccaggtcttacaaaaccgtcctacattttggtgtctaagacagcctgggcactaattgttctgcacagctgatgctgaactttaaacaccatccctctgtgtgacctgattctgacatcagttcttggatgaacctcctcctatggattgcttcagggatatcagatatccatctctgctttgatgacaggcttctagtctgatatatctaaatcacagccatatttatgtgtttacttcttggaagtcattgtgttttttgatttgttattcttgtcctcattatgaatctgcgtatgtttaacaactgactccctccccctttttgaattccaggtgaaatctagtatacaaaagataaatgcactgctctgctgaatcgaagaagaatgggagtttt

SEQ ID NO: 43821 - DNA, 792 bp, Bovine  19866881703659
  misc_feature (1)..(1): n is a, c, g, or t
ntagcagcataaattggggcatccccctggggctcggatggtaaggaattttccctgcattgcaggagacctggggccaatccccttgttctggaaaatcaccctggagaagggattggcaagccaagtcccaggattcttgcttggagaattagatggacagagggagcctggcaggctacagttcatggagtcgcaaagagttggacacaacttagcaactaatacacacagcatgaattagctaatggtacaaatctacgtttacttttccttttaattttggaaagaaaaatatacctttaaaagatatattttcagtagcatccctaaaagaaataaattggcctatataacacgaaattttccacctgcccctgtagtattctgttagtgttgccaggaggttatttaatcaatttgtaaatcacattgagaacttttccccaaaattacagtgaatcttccaagtctttgagcattatgatttttaaaaatcatgtttatgaatccagaacagagcagtagatgcaaagaaggctttgcaatgggtcatcttgaagttaattgactttcttcttgctttttttctcctgcatttagtgtgattttaactttcttgaaatctgctttcattactttttaaaataattctgtaacataactgatgtgggatttggaccataaagaagactaagcactgatgaactaagaactgatgcttttgaactgtagtgttggagaagactcttgagagtcccttggactgcaaggagatcaagccagttaatc

SEQ ID NO: 43822 - DNA, 1539 bp, Bovine  19866880456152
  misc_feature (1)..(1): n is a, c, g, or t
naaaacatctcactgttctttgttgtgtaaaattcaaacagtaagttttggaaggagcttcttcccggggtcagacgaatctgatttcacccccacaggtccagcaggcctagctttctgatcttggcgggagtgcatgtacgcatgctcagttatgtccgactctgcaaccccatggaccaggctcctctgtgtccatggaattttccaggcaacaatactgaagtgggttgccatttcctcctccaggggatcttcctgacccagagatcaaacttgcgtgccctccgtctcctgccttgccagtcgtattcttaccactgcactgcaccaccgggaagtttggggaagtcactgaatcttgccagcctcagtttcctcatctgcaaatagtgattatgatattctgtagttgtaggactgctgagaggatgacatacgtggaacccccatagtcatcgctgtcataaaagtgatgcacaggaaatattaaatctttggcagtattgcaaccttaacaatcattttcgttgtaagattatgcatttgccagacatgctccctggaaggtcaaggctttctctgagaccggtggactcgcaacgctgttgagagcaccaggtggtggtggcgccccctaggggacctttgatcaagggttctatcaacttcccagcgctaagtgaacagcgaggttgtgtttccagtatgtttctctccatagcatgataaccttactgaaatagtagtctctatagactaaacacaaacatgagcatttaaaaataaaaaaatgatatatattatttgaaagagaaaaaaaagacaatgaaaaagagctacattgcataacttcctgattcccttaaacggtttttaattatttctcaactgaatctaaccttggttttaactccctcaccttaattttgattcattcttatgtgggcagaaggctaacagcctctggactgtgcttaaccatagaatttggcaaagtgctctgtggaaaaagccctgggtcatttttcacctgctgggggattaaatcccctcattaagaggcttaggagagccacttcagccagtacttacaagaaaatctggcctctacatgccgtttcagaacttggccctcttcctggtgtctttgtccacactgaaacagaaaatgctccctgggttctccaagctctgtgacccttgacttctaatcaaaacgcggttaccagagttaccctggcccccgcacaggcaccctgactcttcgcttgtggccagcaccactgggcacagccactctgctttctcctggcagctcacacaaggtgcgctttgggatgctctgcatgttgctgcggccttcccaggaagcactagtggaaaaccccgcctgcctatgcagcagatgagacctaagagacccaggttcgatccctgggtctggaagatcccctggaggagggtacgcaacccactccagtattctgcgttacttaatgcgtaacacagctcccgggaccctgtgctcactgaagc

SEQ ID NO: 43823 - DNA, 2591 bp, Bovine  19866880466438
  misc_feature (1)..(1): n is a, c, g, or t
nttatggcagaaagtgaagagaactaaagagcctcttgatgaaagtgaaagaggagaatgaaaaagctggcttaaaactcaacattcagaaaactaagatcatggcatctggtcccatcacttcatggcaaatagatggggaaacagtggaaacggtagcagactttattttttgggggctccaaaatcactgtagatggtgactgcagccatcaaattaaaagacacttgctccttagaagaaaaactatggccaacctagacagcatattaaaaagcagagacattaccttgctgacaaaggtccgtctagtcaaagttatggtttttccagtagtcatgtatggacgtgagagttggactataaagaaagctgagggctgaagaattgatgcttttgaactgtggtgttggagaagactcttaagagtcccttggactgcaaggagatccaacaagtccatctcaacggaaatcagtcctgaatattcattggaaggactgatgctgaagctgcaactccaatactttggctacctgatgcaaagaactgactcattggaaaagaccctgatactgggaaagattgaaggtaggaggagaagggaaggacaggggatgagatggtttggatggcaccacccgacttgacggacaggagtttaagcaagctttgggagttggtgatggacagggaagcatggcgtgctgcagtccatgggatcataaagagtcggactgagggactaaactgaactgaactgaatttttactacaggcatgactcccaaaatttgcaattatgttttgtgaacttatttaagccaatgttcctcaactgataagccacactgttttcaagattcccaaatttctgtttcccttgtatttaaaatttcaaaataaattaaacctggtacagggcatacaacaagagaagcttaaatactgtgtgtgccacttcaaaacattcaagctcaattctcctcaccttcacacacaggctggcgatcaatgatagaagccaaggtaatactaacactaaggttatgtttaaactatctgctgttgaaaatctttacatatcctaattcttatcggcaattcacactatcataggcacattgttaatgtaaagacttattgtcttattatatgccagatcctctgatgtatctagcgatacaaaggaagatctttactcgtcctcaaagaactcaagatctactggggaaaaggccaattataaatgcagacatgcaacatcagagacagagggttacaaggccagaatggcttcctggatgatggatgaccattcaaggcggagaagagagcatgaccaaaggaaagacagggccggtgcgggaactgcacaaatgcagacctggacaggcaggatcaaagtcaggcaggatcaaagtcgtacagtgtcttaattgttcacactgaccttctcttgttggcctggggatccatggaaagaccaagcaaaggtgtaaggtgtgtaaatgaaaaatattatgtgtcttaaatatcgaggaccttttagctactgtgtgggctgcaaattttaggggaacaaaactggaggcagtccaaaggccatttaagtgaaaaatcaagaggatttgaatgaagactatagacatgtgtttttttttttcacagaggatacacttgatatgtagaggagatagaatcagggaacttttcatcacaggatgtgggggatgaagtcgtgggaagactcccagatttctggcttgggacgtgatgccaccaaacaggatccaggaagaagagcgggtttaagggcgggtgtggcagctttagaacaagctccagtgagctgagtgggccaaggatgacattctgggtgacactgagcaccaaggacggatgacacagagggacagagcttggaaccaggggcaagtgctgacgccctggcagtccacgatgtcaaggagaaaaacaaacaataagctcacttgtggcagagaggtctggtgaggaaaagactggagaatgcccacgagatgtagaaagcaggatgcatgaaggacctcagtaaaatctattaatatgtcagccaagctatgagaactaaaagtcaggccatagtgagttaggaggtgaaggagaggtgagacgcagggaggtacggctgaggagctcctaggtggagaagcagggttcaaggtggggtttgggttggtttgtattttaaatcagttgaaagctcaccacctagagatagacagcattgacatttcacataggcatacctcagagatatccgacaactgccacaaagcaaatatcacaacaggtgagtcacccacattttttggtttcccaatgcatataaaagttatgtttacactctactgtaatctattaagtgtgtattagcattatgtctaagaaaaaaatgtacataccttcatctaaaacggatgctgctggaaaaaatggtgttgacagacatacacactgctatgcgtgaaacagttggtgagaagctgctatataacacagggagcccagcctggcgctctctgataacctagaggggtggggtgggg

SEQ ID NO: 43824 - DNA, 3019 bp, Bovine  19866880645052
  misc_feature (1)..(1): n is a, c, g, or t
nctggagaatttgagcattactttactagcatgtgagatgagtgcagttgtgtggtagtttgagcattctttggcattgcccttctttgtgattggaatgaaaactgaccttttccagtcctgtggccactgctgagttttccaaatttgctggcatattgggtgcagcacttttacagcatcatcttttaggatttgaaatagctcagttggaattccatcacctccactagctttgttcgtagtgatgcttcctaaggccccttgacttcacattccaggatgtccagctccatgtgagtgatcacaccatcgtggttacctgggtcatgaagatcttttctatatagttcttctgtgtattcttgctacgtcttcttaatatcttctgcttctgttaggtccataccattttatgtcctttattgagcccatctttgcatgaaatatttccttggtatctctaattgtcttgaagagatctctagtctttcccattctattgttttcctctatttctttgcacggatcactgaggaaggctttcttatctttccttgttattctttggaactctgcattcttacacttttataagtgcatcattaaaaactagtcacatttatttcaaattgctacagagtagtgcgtaagtgctcagacagtggaaactttcatgatcttcttcatccagaacatggagaaaatagatattaaatcttatgtactttctgatgatgcttatagcaacttacagctcggatagaaaggttatcttcttcatcgcccaaatttcacagctgatggaaatgaaggacatacacattgatatccagagggaagacaccacagtgatgactgtgtcagagtgatgttggaagaaatcgttgatgtcgtggttgatttatttttttatttacaaagtgccccatagcgtggtttagttaatcaggaagaaattaaatacagtgtgtttattttaaatcatacctgacttaatacccccccacacacaaaaaaacgccttgatattttcaactaaaaagattgtttattagctaccatagaattgttatccttccattaggattgacatacattcaccaccatgtgtaaaatggtagctagtgggaatctgctgtgtggcacagagagctcagctcggggctctgtgtgacctcgagggttgggatgaggcgggcggtgggagagaggctccaagagggaggggatatatgtctaaatatacacgattcatgtacagcagaactaatacaacactgtagaccaattatactacaattaaaaaaagaagacaaacctccatgtaggcttgagatgtgtatgtatgcctgtgtgtgtgtatttaacctgcaacaaataacattatcaacaaagtctttgtcggtactgaaaatagaagggaagttacaagttacaagttactaactttcaaagcttactaagctttgaaaacctctctacaaggctgatgtctcactatctcttttctgaaacatgctggcaaatatttttaacctaagcagactttcagtcatttggatcattgtccaaattcaccatgtggaagtttttccacatcgtttaaaacaaagcttatgggccctgaaatgcgaatctacatccggcactcgttttgtctttcgctcattctcagaatgtctgatagcgggtagccgtgccagaatacaggcacccttagagctgacgtgtgggaaagacgatccaatgaaaggaacacccaagctgctgtaacagtgcccatctaccttcacgaggagcaatggtgtaggtgtaccattcaaatcaagtgcagactaattgttcactttctaaacggacaattactacatttcatgttgacttcccaaagcagatttttcatggttagcaatgcttattttttttttttaaggtttttttccttatgtggactgtttttaaagtctatcttgaatttcttacagggttgcttctggtttatgttttggttttttggccctgcggcatcttagctccccaaccagggatctaacggtactctctgcattagaaggcaaggtcttaacccctggaccaccagggaagtcccttgatgagtgatatttaaatgaaagtgctaagctccaggaatgccttttgtttaatttcactctttattgatagggaactagatttctcagattcctgatcaaaatgcagaggctgtttttgaaaagccatattcttgttgcatgtgcttggggtgagtggagagggggaggaggagaggaataccatgtgaatgaatgaatgggtcagagggtcagggagtgatgtagacacgtggtggtgaagggtctttatagattcactttcacttccagatatactttacctccttaggactcagcaccagggtctgctgagacttgatgaccttaatatatgacagacagagttcccataacctaaaaggttatcactgaggcagtaggaacagtgatgcagaagagaagaggagaatggtggttttaccaatgaggaaatattgagacatctctttcagtctctggcacagcatttttgcctgattttctatgaaagttacttgtctggcaccaactgtgacacataatgaagggatgtgaagatccagagattcatagaagttctgtcaagtgttgaaataataaatagctcagttttcatcattggtcctcatttacaagcagcattcactaagcactttttccgcctcggtggatgaccaaggatgtaggcagtgaaactactcaagctgttaccgtcatggtaggtgcatgtcactacacatttgtccagacctctgcagtgcacactaagagtgagccctgagctgtgcacttcattgtgtatgtgtcggttcatcagttgtcataaatgtccccttctggtggggatgttgataacaggggaggctgtccttgagtagggggcccccaaagtatttgggaaatcttggtacttctcagttttg

SEQ ID NO: 43825 - DNA, 1360 bp, Bovine  19866880739965
  misc_feature (1)..(1): n is a, c, g, or t
ntcaccatctcccagagtttgcccaagttcatgtccattgaatttgtgataccatccaaccatcctctgtctccctcttctcctgtctccaatctttcccagcattaagggtcttttccagtgagtcagctctttgcctcaggtggccaaagtattggaacttcagtttcagcatcagttctttcaattaatattcagggttgatttcctttaggattgactggtttgatctccttgctgtccgagaactcttactactttgcttaagaagatgatagttacttggctcaagatcagcagttctgagtggttgctctacctgtataaaacccttattcgaggaccatctgaaaattttggggatattcagaaaaactcaggccaggctgagtggagggtgaattactccttaacatttggtgtcagcccaagttctccaaagatcatctagtctggaaggcttttcatacctcactgggttttgggagaaatgcacggtgtttagacacaagtgaaagattctagtatcttaggtaaccaggtagattaggcattagggatttagcgctaagaccttaacctgcatcaatataaaagcctctcctccttttactgtaaactaccctgtcagctgctggtcttcagtggggaagcaacttactgggattcaagaactgtccatcggagagggctgcgacaaaatagcaacggttcaacatgagtttctccatgcgcttggattctggcatgaacagtcacggtccgatcgaaatgactatgtcagcataatttggaacagaattatttcaggtacgtttatcttgttgttttacgttgttttaaacttaaatgctgaatttctaaacacgtgctttcttctgccattggtgttgtctattaataatgggaaaacgctgatgctttgatcttaacttcatttggctctgggcttcccaagtggcggtagtggtaaagaatctgcctgccaatgcaggagatgcaagagacacagatttgatccctgggttggaaagatctcctggagaagggaatggctactcactctagtattcttgcctggagaatcccatggacaaggagcctggtgggctatagtccatagggtcgccaagagttggacatggctgagcacatttggctctaattcagtaagagatgaagtgcctgaaggcgattgggaaacagttttccagaaccccagtttgagctggatgtgatgttaggaaccagtgtttcctaaagagtattttatggagcactgttccacaattttttcgcaagtgttttgtagaaaggaatctgtggtcaaattaatttgggaaatcctaggttaaaagaa

SEQ ID NO: 43826 - DNA, 1889 bp, Bovine  19866880819670
  misc_feature (1)..(1): n is a, c, g, or t
ntttactgagaacaaattggtggtgttgatcatcactgggacagagcaaaggcaatggagagcctgctggaatcgtgttcatggagactgatctttgtagcagtgttttattttcaagtatcagtagggaacaaccctctgctgtgtggtttttgctcaacattttctttatataatatagctcggccagattattataatctctgaggactgtatgaatgactgcaacctagaatttgaagtcttttccaaagggtttgtttttaaccattgtgtctgtctcctgctgcttaaatccctcacagatgcagggagatgggaagaggatattctttgctctccactgtctatccctctctgccttcttatttattgtctttactatatgcctgcgatgcaggagacgcaagagatgcaggttcgatccctgctgtctaatccctggctcaggaagatcctctggaagaggaaatggcaatctgctccagtattcttgactgaaaaaccccatggacagaggagcctggtgggaaacagttcatagggttgcaaagaattgggcacgactgaagtgacttagcacacacacaagcacagaggtcagaaactctgggttgttggcccctgcctgactctctctttctgcaaggccaacattcatgctttatttcagcaccagatgcctggaattccattttttttctttcctgaacccctgcaatgacctttggctagtctccttgccaccatttttgctcccctagggttcgttcttcatgcagtagagagaatgaatgtattaaaatgaaattcaggcttcctcttctcctcttttgccatttcagggatgttatgaatgctttagtatgaaattctgctcatctgcttttggcagagctagcttctcgtccttcaaatctcacctcagtggacaccttctcagaggggtcttctctgatcagcctgaagtgtttacatcctcatcttactctttgtctcaggccctgtttttgtcccttgtagcttttattgcagtttgtacctgttttatttgtcttctcctatagtattcaccttctacaaaagcagggattccagtagtttttgcttcctccccattaaatctctcctacttaacatggaatcttgctcgtgctcaatcgctttggggttgtgtccaactctttgtaaccccatggattgtagcccaccaggctcctctgtccatgggattctccaggcaagaatggggttgattgccattcccttctctagggcatcttcccgactcaaggatttaacctgagtctcctgcatcacaagcagattctttaccatctgagccacctgggaagtcctagggagatgatctaaatgagaagcaaagggagaactgcccttctccagggactgcacacaaacccaggatttggagccgcatctggctgctctatctctgacttatatgtgagaggggtggaaccactaagcgttcaggtccgcagacccaagatcacaaaatattcatgaagtctcccattctatgcacttctaccatctctgcaagcagcacagatcagaaaactcatccccttcttatacccggagaacagaacagatgtagagagagatgaaatcgtttgccaaaggtcacagagttcatcatgcttgaggacaaggaccaggaactcaaacatttctttattccaaattcagagctttctctagcagatgcttctgcctgaaaagctggtgtttcagttcttgtatgctaagctctgttgcagcatttcttctgatgtatggcccaaattctgcttcagtgggtcttgctcaaaactcatttctttggtgaaccatcttctaatctcaaatgaccacaggctctc

SEQ ID NO: 43827 - DNA, 2901 bp, Bovine  19866880936971
  misc_feature (1)..(1): n is a, c, g, or t
natcagtgcttatttcgataataatcactttaaaaatcttttttggcacccatacgtatcatcgaaacagccttgggaggtagtattgttacagttttcatcttacagataagaaaactgagattcagcagttaggtaagtgcccagagataaaagtaaaagttaagttccatcataaacttataaatcagccaaagtcagttcctggttttcgtgtttcagtatcatttgtcaggatgaggacttgacaagcttttgttcttgacactctgtagttccagggtcaggagagaatggggtctatcttctgtttctgaccccccctttctcagcacagtttgtgagattcatagctccctgaggggaagggtcaggctgataaggggttcagctgcctccagggccgaggggccgtgtggagaagtgctagctgtcatcatgggaaccaggcatgccgccaaggtgaggaaagtgtgagggcttagcaagaccttgtggaaggaagttcatggatcgaagccataaattcacagggctgatggctgtcccaaggctgctagtttgcttgtgagccgagggttcgaccagagcaaacagactttctctgccagataaagcatatttatttttgtctcttatttagttgtatgttgtaggccttctccctttcctatttttcgctgagagttgaaatggcagctgaagttcgttccttcccaagtgaaaaagaaagaatatagaaatgggggggcgcactgtacatgttgagtgtctcgtgtttttggtggcaacagtagttcaatttattgtttttattctcggctttagagtggattttggtaattctgagccgtgtgtgtgctcagttgctcagtcatgtctgactctttgtagccctatggactgtatcttgccagggtcttctgtccatgggattctccaggcaagaatcctggggtgggttgtcacttccttctccaggaaatcttcccaaccctgggatcaaacccaaatctcttgcttctcctgcactggcagacggactcttgacagtagcaccacttgggaagcccctattctgagctattggctatcagttcaccattgtgaagagactagtccagttcactttggataaaacatgagggtaataaacattgcataaaggtaagctcaatttgcttggtttaatgatgtaaagagcacagttcagttcagttgctccgttgtgtccgactctttgcaaccccatggactgcacagtacctcacaattacacgctaggcttccctgtccatcaccaacttctggagcttgctcgaattcatgtccatcgagtcggtgttgccatccaaccatctcatcctctaccatccgcttctcctcctgccttcaatctttcccagcatttgggtcttttccagtgaatcagttctttgcatcaggtgctccataaagagcacagggatggaataaaaacccttttccgagaaagttagaacaaacattctttaaaacacctgtttgaattatttgtattggatttttaaaaaggaagtagacacagcgactaaaggctcatttttggtcccattttctggtgtttgaaaaccgcctcatttctgtctgtcggtaggtaattctgtccctgtatctgaaggcaggatggccttggcctcagggtcattcagcctggtagcctgtttcaagatgtaattgtcatccttgacgttcatcatccccggctttcactttcttctttacctctaaacagtctagaaagtcagcttctaccagcatctctggttgtggcgttttagacaccagagagcttggaatcatgtgttgaacggttgtaaaggctagagttgccttcacctccttcctttccatatagaactaatggcagacagtttccatccctttacgcatggtctcactcagctctttagctctttatcaggtccccagtactacgtaacaaaatccaggggctagaaggaaactccagggtaatcccaccttgtccccatcgtatgatgttatgggaggaggcgagagctggaggttacgtcctgtctccaggtccctggctgagtaatggtcgaaatagaactgaaacccatgtctccggctctgtctggtgctattttaaccataacacattactttggttaaacttgtttgtttcccagctgtcccttttgtcattgtaattatcctgtatcattataatggcttaaaatccatgtgtgacaggaagagccacgtgatactgggactttctctgaaccgtataggaagggctccctgtgttgcagaggcaggatcgacagctagacatggcatttctccgttaattccatggtaacttttaaagtcagcgagggggctcggatttgaatctgtctgtcttcgaaatctctgccccctcagtacctcacaattacattttcagaataaataaacctcttatacttgaggttttctttttaattttaaatctaatcaggataatgtatttttcttgaactattaccttgctttgttttaatttagacatagaattcaagacaaacgcttggaatgaatagtgggatgcatgtaagcagtcctgataatgaggctgcttgaagttacagaaatgacatctgacttaagcggcttcatcaggttgaataagagaggacattgataactggcaaaaaaagaggccttgtttttactcaggatttatgttccagcggttagcttggagtgtttcttttacgttagaaagaggtagataaatataagtccttttcatgtcatagttaattttcttgcttgtgaatcactgggtttaaaacactgatagctttacacacgttcatctaaatgagtagtaaggcagagctatag

SEQ ID NO: 43828 - DNA, 808 bp, Bovine  19866880947189
  misc_feature (1)..(1): n is a, c, g, or t
naataagttgacaaccttcatttccagtttattttaaactggttttgaaccctctgtctctgattctctatagtagtaagataagaaatggaaaagtgaggtgataatctaaaatccaatttacttcaattatttgaatatttaagataattatttctttttttaaacttaaacaagggataatttccaacatgggctaagttatcataaaggatttgtaaaccatcccaatgtagatgtgataaataaggttgccatggcacttctctgaatagccttccctaagtctctctgccctctattccagggagcctacaagtcatccacaatatgctattgtccagaaaaaggcagctggacagaactcgaaggagatgtggcagaaccgctggcagggccagcctgtgcaacagttatcctgcccgcctgcgtaccttacaacaaataacaccaggaaaccccggaacgacacattctaggaagcagtgacaagtgacatccctattgtagccagaacaatgcattctaatggtacatctgccgaaacccactttagtgtctggtgatttacaagaagctacaaaaggaaaagacctgttcttgaacggaaactctgtctgtaactcggatcacatcaaacttcctgtggtgacagactcttccattgcagactggttttaacttgtctcagctttacgaaatccctcacgtggatctcgactttcaacaggagaaagaaaatacagaggagtgccccccgagagacctgaggatcagtattgtgcattgtagtttacctgcatgtgat

SEQ ID NO: 43829 - DNA, 1155 bp, Bovine  19866881041361
  misc_feature (1)..(1): n is a, c, g, or t
ntagttgagcagttttatttaggcgattttcttgggctttgcagaagcccaaggaatatacatagatatgttttaagagaaagtgaagtgtgtgccatttctgtttggcgtgggcctttttgttgttattgctgttggttttggttgataggaatcagtttgaaactctgaagggcaaggttatagattaagaatggtagcactgcgagaaggcgtagggaagggctgagggtgatgaagatgctgttctggtagattatcaacttgtccttgtccatgcacccagcatcagtaacttctctccatttaagaaaaaaaaaatttaaaataaaaagttctattatcctttagagtagttggttttctttctttcttttttttttaaattcagggtgttcactgtgaaactcttgaccttcatataatgatatttggtttctcaaccttacatttcacctgttggccataaaagctgtgttattactgaggactgaaattccacccactggtttttccagaatatttgtagaactttctcaaccactaagagctgccaacccagctttggtatgtagacctcccagctagccggaagcaaaatataatttaaatcacttttttctgttgcataactgccgttgacttcggcacttagttttccttaatggctgtaatcaaagtttatctcatattatgatgtagtggttagactttcttgtaaaaaaataaggaagaggattaaaagctgcattggctcggctttctagtctttgtcccttttggtttttgaatggatggatctgtgtgaacagaatgtttctctatgatatacgggtcccttcctctaaacatatatatatatatatatatatatataatacatttgaaagacttttctctttctttctcctggggcagcctttgccataactttatttataaatccatttgtacagcagatattgggcgaggatcttctctgccaggcagtgtccccatctctgaaacactagagaaccataagcctgccacgggcgtgtgttgcactgtagctaaaaagtagcactaaagaacattatgtagagctccctgcgccatacagtagtttctcattagttatttattagttattgatacacacagtatcaatagtgt

SEQ ID NO: 43830 - DNA, 716 bp, Bovine  19866881085851
  misc_feature (1)..(1): n is a, c, g, or t
ntgtgctttgcaggattctaatgcacaattaatctcttactctagcatgacaaattacttccaccttctaaaaatagttttaaatccctacagtaaatcccaaatatcaaattagcatatataataatcccagaatcaagttatatggtcttaaactagattcatttttctaccaaaaaatacaagatcatagtagcatgatagaaattaagtctcacaaattatttcagttgcgaaagtgcgttatcccaggaaatgtaatgttgaggtaaaaggcatgttgctcatcataagaattgctctaaattttaattcctgctctgccacaaggcaccagaggcttcaatttaattcaaataaaagatagggacattaaacaatgatatacagagctgtgcaagtgaaatttctaatgatacacaggagtaagcactcctttcaaatcagagtattgattcctgatgcactataaatggtcatcaaaatattctctccatttcacagacagcaatttccctataatacatacgtatgtaaaagatatgtacccatctatcaccacttctgaataatatgtatacatgaagataactatcaacaaaattattcatcattggtatagaattcaatgtaattcactgtaacaaaaattttatttttcattttttgtaagccaaaagaatcatgctgggcattttcatattggttcatataat

SEQ ID NO: 43831 - DNA, 1522 bp, Bovine  19866881200527
  misc_feature (1)..(1): n is a, c, g, or t
ngctttaatggtcagacttgacttcagtggtgaaatttggatttatggtaaaattctagatgtcaaaggataattatttgtcctctctgcagttcatgttcttatttaaatatgatctttaaatattaaaatattaaatatttgtttaaaattaaaatattaaattaaataatttaaatagatatttattatttaaattaattaaaattgaattgagttaaaatttaaataaataaatgtttaattaaattaaaattaaataaacaaatatttgattaaattaaaattaaatatttaatatttatttaatatctttaaataataaagataatcaatacagctttttaaaataaaaagtaaaataattttaatactattttttttaagagaaatttcctagaaggaagcaatgccaaaagctcatcatgtcaaagaacatttgatctgagtttataattttcacagagatttcttgtcctcaatataatctttcagggctcaagtttggagtctcatttttgaagatctcagttcaactggtctgtgccacagagggctctagacccccgactggaatcaagtttctatgagcacaagcttgttgacacatgtgtgagtgtctgttgcatggaaacatttaataggaatgttccaagacaaacaataggacagtagaaaaaacaaaataaaaaattatatacagatacatgaactttaaagaactaaaaaaaaaaaaatttaattaataaataaagataatctgaatggagccccattctttctaggccccaaacagtgttctccatagaaatacagggatttaaggtcattttgaaccctaagattaaatacagttcactctatccctggaattttaaaggacagattaactcaacaatataaccaggtaccaaaatgtacagaagagtaaatgaaagagtgaatgtgcttccatgggtgtttaatgacaagggcatgattttgcctatgaaataagaggtaattaaattctatgcaaagtatgaaattctttatttgaaataaagaatcatttgaaatagcacagtattaaatgtcttagtagaaaatctgtctctctgtgcaaaattaaaataatgggaaacatcttaaatttaaaattcgtttagaatctcttaattttaaaactagtggcccacaagaattgaaaattgtgattatgccctaaccatagggcagtgccactttagctggtttccaaaaatacccactgtcccttgtcagtcaaaactggtagaaacaattgatatcacaaacttgcaatcataggcctcacaagtctgacttgacaaccatgctgcatggcaggcctggaaccacagaacgatgcttccacaggaaaaggtctttagatgatcaaatccaacctcattttacagggtgcaatattccattaaagggacctactatcttctttgaaccaatgctaaaattctagaactgccccacggagaaatagttagttacttaagcctcaggctta

SEQ ID NO: 43832 - DNA, 616 bp, Bovine  19866881485328
  misc_feature (1)..(1): n is a, c, g, or t
ngacgaaaaaaaaaaaaaaaaaaaaatcaacattagggaaacctctgcagatagtaatcttggaggcgagctgtccctccctacccgcctgcaagaattactcaacctgagaaaccctgaagagttagcttaggtaactttctcacaaaataattgtgctttgggtggcatctttattttggcaactctccccctcccctccccaagaaggagcagattttagggggaaaggtcctgggtgaccaatgaaagagatcacatttctcagagaccttttattacagcttgtctgttttgtttaagtcaactgaaagtaatttagagctgtgtagcaaatgtttttagtagaggtgatggtatgcttaaggttaattattagcttagtgcatttccagcctggaaaaaaaactgaagtcccgaaaacctgtattgacctggaacctgagctcaaaactaagacatgctcgtgtttcctgaaattgacaaccagagactaaccccacgtctcccagctgtttgttctgcaggttgacatctgcaaacaggtagatagatgtgcatactgttaagatacttttcggtttgagagctgtgacagacaaggggcagtttaggt

SEQ ID NO: 43833 - DNA, 667 bp, Bovine  19866881520144
  misc_feature (1)..(1): n is a, c, g, or t
nccttgaaaatccgtctcctattctgttaggaacacacgttatttgtggacactccaaatttcatactaacccaagctatcatctagaacatatggaatagtatgaggccacctatatctttctccaatgatggcatttctttcttgtatctgtcaaaaataagtgggaaaggtatcagtcaaaaattatgaaacaagcaatagttaacccagaaataaaagaagttttaagctttcccaagcaacctaaggggttccttgtagctcagtggcaaagaatccacctgtcaatgcaggagactcaggttcaatccctgagtcgggaagatgtcctagagaagggaatggctacccactccagtattcttgcctggagaattccatggacagaggaggctggcgggctacagtcatgaggttgcaaaagaatcttgacaggacttaggaactaaataacatcaaggcaacctaaacaaattttctgtgtgaagcgacttagcagcagcagcagcagcatgcacatatatgtgtggtatgtacatctactcttatcacaacaaaagttttaggaggaaatcattagcttctcttttttaataaggagaatggcaagcattaatatttcctttaatcttatttcacttcaattattcatatttttacatat

SEQ ID NO: 43834 - DNA, 755 bp, Bovine  19866881521296
  misc_feature (1)..(1): n is a, c, g, or t
nattctcgcctgggaaatccctggacagaagagcctggtggggctacagtccatggagtcgcaaaagaggcgaacccgacttagcaactaaacaacaactatgtataaaagatcgatgagggaggagaaaccagagccatggggtgtgtgcaggaaactcagaaggaaaacacagtgccattcagggaaaagagaaaatgtcattttctgcaactaaattgttgtatcataaaaacggttttaattttattccacagtgggctctaaagaggcagccaagaagcaactgcagtgaagttagtcagaaaatttaacgtgaaattctcccgcttgttgatgcagtaaacactctatcaagaggattcagaatgattgctgaagccataaagtggtaagaaaccaatgcctatttttcagcttatgtctttttcattttttaaaacaactgaaccaagtgcctgcttgaggcaaaataagtctcacaaaaattgtctagaaaaaaaaagcttaatataatcacttaaaatatccttgggcaggtcactaatagagacactatttaaatgaattcatgaagtaaacatttttttggtgctataattatcctgttggcttaagtactatgtataacatgctaaaacttacatatttagctcaaagatgtagtaaaaagaactctcaaagaactggtgtgttaaattccaaaatacgttagtgccatcctgaaatttccccacatctggatataattataa

SEQ ID NO: 43835 - DNA, 1153 bp, Bovine  19866881574698
  misc_feature (1)..(1): n is a, c, g, or t
nctgccatcatccatccctccttaaacaaatgctggttgtcatcaaaatgattattattactatgcaggccagatcctctgatgaaatgaagctgatgaaacactcctctcaagtaaagagactaaactattcccaggtggcctgatttattccctggaagttgtggttttccaagtggaaccctgatggttgaaaggcattccctcattgctttagaatggaaagttaaccctacagagtacacgtctgcagggcaggaaggccaggctgcatccaggtgcccaagcaggtgaccaaagaacttggcatttcccccatggtttcttgtccagcagcatcctcagaatctactagagattttaacccagactcatttcactcctgaatcacaaattgctatgtccgtggagggttgcagtccatcggcacgtggtggaggacttattaagaaccataatccactgtggaagaactccatgcccaagcttaaccatgaacttgctaagctagagaggaaaggttgacctcttaaatgctaaaacagacataatttacttaagttttgctttgttttattttgaagtagtccttttctttgtattttgaatgtatagaaaagatgacagtggaggataattttcatctttgtatgtgatagatgtatcaatgtaaaatacatataatggaaaagtttaaaaaaaacaaagcaaaagaatctactagcaagcatgtgaagagtttcctggaccccacccccagagatttggatgcactagtcaggcagggcctgtgtgtgtgtgctgtgtgcttagtcgctcagtcatgtccaactctctgcgaccccatgaactgcagcatgcccggcctccctgcccatcaccaactcccggagtccacctaaacccatgtccatcgagtcattgatgccatccagccatctcatcctctgtctcccccttctcttcctgccctcaatctttcccagcaccagagtgttttccaatgagtcagctcttcacatcaggaggccaaagtattggaacttcagcttcaacatcccttaaggaggaaccaaaggtccttgacaatttgctctcctttgactgtttttctttgtttctgcatgttctcacttctctgatgaaatttatt

SEQ ID NO: 43836 - DNA, 1811 bp, Bovine  19866880117724
  misc_feature (1)..(1): n is a, c, g, or t
ntccaagtccagttctaactgttggcttcctgacctgtatacagatttctcaagaggcaggtcaggtggtctggtattcccacctctttcagattttccacagtttattgtgatccaccacaatcaaaggctttggcatagtcaataaagcagaaatagatgcttttctggaactctcttgcttcttccatgatccagcagatgttggcaatttgatctctgggttcctctgccttttctaaaaccagcttgaacatcaggaagttcacggttcacatattgctgaagcctggcttggagaattttgagcattactttactagtgtgtgagatgagtgcaattgtgtggtagtttgagcattctttggcattgcctttctttggaattggaatgaaaactgaccttttccagtcctgtggccactgctgagttttccaaatttgctggcatattgagtgaagtactttcacagcatcgtctttcaggatttgaaatagctcaactggaattccatcacctccactagctttgttcatagtgatgctttctaaggcccccttgacttcacattccaggatgtctggctctagatcagtgatcacaccatcgtgattatcttggtggtgaagatctttttgtacagttcttctgtgtattcttgccacctcttattaatctcttctgcttcaatggtatgttaggtccataccatttctgtcctttattgagcctatctttgcatgaaatgttccctttgtatctctgattttcttgaagagatctctagtctttccctttctgctgttttcctctatttcttttcattgatccttgaggaaggctttcttatctctccttgctattctctggaactctgcattcagatgcttatatctttccttttcacttctcttcttttcacagctatttgtaaagcctccccagacagccattttgcttttttacatttcttttccatggggatggtcttgatccctgtctcctgtacaatgtcattagtttgttacatatcaaataaccacaatgtctcagaagctcagaacaatcagcatttatgcttatatgttgaggttagacattgaatccagaccaacataactgtgaatgttggttggcctcaattttctcatcagagaaaaaaagacagtagcacctgtcatgcggtgtttgtgtgattagctggtatacactcagggaaagtgttagtcgctcagtatacaactctgtgcgaccccatggactgtagctcaccaggctcctcttcatggaattctccaggtaagaatactggagtgggttgccatttctttctccgggatctttccgacccaagcatcacctccgggtctcctgcactgcaggaagattctttacggtctgagccaccagggaagcctaatacagagtctagcacacctggtaaataagtctccctctttgtttttactcaaggagatttgaccatcagaagctacatctgataccttcaagcaccagattttagagccaccctgtgtcagactttttgggacaaaagaaataatgcaacagtttgactcatgatactttgtggaaccttcatttgagtgaaaaaaacttatatatgtgacagctgtacagtgaaggcttgatttgtgtgcatgggttagaaaagagggtgtgcactggaggaaacggaacagagctaatatgttaccgtctgtgatttgacctgctctctgcctgactagctgcatattcatgtcaatttcctcccggttacctaggacaagaaatgaagaggaaagat

SEQ ID NO: 43837 - DNA, 2269 bp, Bovine  19866880363660
  misc_feature (1)..(1): n is a, c, g, or t
nttatgtgagcatgggatggtttatcccaggtgttgatatcaaaaggatagcaaaagggtttaaggccagttctttaaagaaatatgaggacccaccttccctgtccctcttccctctctcagggccagagttgaaaaccagagggcgtgtgttggcgggctactcccaccatcaccgaccatccccgagaaagcagtgtcggaagcacaaaaagagcccacgtacaatggttagtcttcaaaggggctcatttgttatattgctcagagccccaccgagttgctgcaagcttataaccgccgctaatttcaaagggagctctgaacttgcatacgctccgcgaggcacggcgcgggatgagaaacagcctgagtggcttgaagccatgctcagacattttttaatgttcgtcaatgtctttggcaccatcactttcacagagaaacccacttacctcctgctgcaaagtgtgaaataaagccattttcaagcctgggtatgggatagtctggaaattgggctaaatcttaaaaccacatgaagactgaaaacaggattcacaagctggagctcagctcccactaacccacttccaaggtcaggtcaccgtgacaccctgctcggttagatactgtcagtgccacctttgaagggttaaggcagtaaactgtggttgtctcaggagctaccaaactaaaggcccatctccaaggcatcccaggatcactggtccccagaataggagagaagcattatttcagttagtgctttgtcaggacccaattggcacatccctggggaaattcaagttaggaactggcatttcttgccacagtgctcagcctcaggaggtgctgtaagtgtcccgttggtccagaatgtttgtaggagacagattcagatccatcagaggtcttcccctgatcacctgcatagtgaccagctcttctccagttgtgtttctggggctccctagtcaccaaggcaaggagaaagagatcccttagggactcagaaatgaccctgtacactccaggaaactctgcgacatgcaattctccaaggagcctctggatgagtctccatgagcaacttgtttttagaaagataaaggaaaaaaggtgtcctttttgttcactgttcaatgaatattcattaagtcttggacagtggattggatgctgtcttttagtaagaaagagaaagttatttatttggaagaaaaggaggtaaataatgagacatgagatgtggtttttagaaatcggaagatgccctcaataagtttaaaactgcaacctcttctctaaagttcataagaaagtattgctgggcgtttatatactcacatgctcactctttcatcgctcctttaaccagtgcttactgagtacctgctccatgtaggtgcaattccacttgttaggatcagcagtggacaaagcagatgaaagtcccctcggcttgtgtccaagcggcaaacacatgctgtttgttcagtcactaagtcgtgtctggctctgccaccctatagactgcagccaaccaggcttccctaggataacaaaataagtaagaaaacttttaagttcctgttcttcacacagtgaaagctgttcacttacacgtaagatctgtggccttaaatgaaacctaaaagtaatgttttttgacaaaaaaaaaaaaaaaattctctgtgtttctgtctcacctcaagaggcttgtgagtagatgtagccatatatagacagatgaggcaccacgagtagtttctagaaatgtatcaagtcatatctatccacagtggcatccctaaatgttcccatcatcagtgtaaacacctttgagtaatctgtcttcacttactgctctccttaaatactcatgcaatatgccagcaggctgtctcccttctttctgttgcatcttcttatcactaaaaggagacagccacctctacccctaaaacacaatatacttgtatatttttccctctcatcctctttccctttatctcttcttttcttcctataggatctatgttgtaccagacatggtacattcccataggcctcatcttaaccacactaaaaaaaaaaccacctaaattttaatatggttgcttttagaaacactgaaaagaactacatagaatggaaagacgtgaaagtcagatttctcgtagaatatatgactaatgccactgccagtggcaacaccttccacttactgtacctgagagtttacaagtcctttttaaagatatac

SEQ ID NO: 43838 - DNA, 1254 bp, Bovine  19866880420597
  misc_feature (1)..(1): n is a, c, g, or t
nttatccaccaaattgtcactgaatttactgctgtatccactgcaaagctcatttagcatcatgctgtattgactatcctttcatgttagtcaacatcaatcccacatctttaattctgggtgcaatgtgggctgtcgcccagaagaagaccagccccctccctggtgaacatgttcgggtgggtttctattgtgaatattataaaatcactcttggttggaaatatgaacttgcctttgcaagcagcagcaatataagagatgaaagcgtattactgagcttgtgttcaaagacaatggttgagagtgaaaacttcccattctgagtccatttttgtgaaagagactgtaaacaagatggaaacaaagaagtatgatggatgacaacatttcttgaacttcaacttcacagactagcagcaaatctcatgacattctctatggtttctttggttatttttggataagatagcaccttcttgtattaatatatatcccctcatttatgaaactatgtctaaagttcctaatgaactttaaaataaaaaaacacgtttcagagaaagaatgaactgatgcttcatccatcaactatcttcctttaagctgttttttaatgaagaatttggttatgcatgaaaatgcctttgggggcttccccagtggctcagaggtaaagaatcctcctgaaatgcaggagataaatgcctttagtaatgttcagcagataaaagataatttctaaacaacactggaacgaagtctcttttgtataaaaatgtttcacctctaccccttgttaaaggcaatgaagtgttgtaattcatacaacaaaagctacaaatgctgtaaattaaatgggtattcatcttggagattaattgttaaagttacagtgctcacttaagtacctttcaggatctatcactaaatttatgcatcagcgtttttagttttgctcaaaaaccgagaaactcacagttttatacaggctgttaatggagatatgtgtcaagtgttaatatcttgtctctttaagcaatgaggtacactatctaaaaagcaagtgaactaacttataaatgactgcctacatagacagagagatgcattcattattaaagaaatatttgtctcttgttcagttactgaaattggaaattgtacctttaatggtgaagtcattcagtcatgtctgatcctttgcgacccaatggactgtagcctaccaggctcctccatccatgggatttt

SEQ ID NO: 43839 - DNA, 2432 bp, Bovine  19866880491190
  misc_feature (1)..(1): n is a, c, g, or t
ncccagtatccattattattggtattcaaggtacacttgaaattcataatcatttccctgtagcagcaatcaagttattttgtttgaaaagcaccatgaatgatacaactgggtagaagaaggaaatacttttgtttccatcattatattattcaccactgaatcacaggggcctaatttgtgggaaggcacattgtagaaacacagtaattatttgttgaataagtgatagaaagaaagaatgaatggggtaggaagaaagattcagacttacaggagtgtgggtcttaattgtagcaatcatagtgaatctgtcacacaaacagctggataagggaaagtcaaatgtctccaggggctaaattctgggacataagaacatatcattatagagacctcatataacctctgtccagcctgaggctgccctggttggctggagccctcactgcatttttttctattgttttttaattaagcagctaggttcctgggttaataatattaatgacattctgagttttgattttttctcaatttttaatcagaaatggagacatgtctttttaatagttttaatgatttctaattttaggaatgttcatgaaatcaaacagtctgaattttaagtggagctgcagatatcaaaattgggtatttaaaaaaaaaaattaagaaagacactagtttccaaaatgccaaatgtgtataagatttgcctacctttgtacaatttccattcatttaccctcacaaaaatgagataaattgaatgtcttattctattaaccttttataaggggattctgattcttagctctcagtgaaatttaaagtattgttaactcacaaatcaacagtatgattataaagcttcttgaaggcaatcactggaatgcattaagtaactagcaagattacatggtgtttctagcctaatgtggcacaattcagattgcagtaattggtgcccagtgaagaaaagtaccagtcaaatcaataaacttagactcttgtacattgataactgagcctggctgttaaaagtcattgattaccaagagaacggctattaaaagaaagaggccaagaagctgactgggatgttttactctaataaaaaagtagctctgctgaagtaaatagttgttgtttctcagcaataagtcgatttctgcaagagcacatcagtcatttgccaaatcagatcccctcggccatgccgacctgctcagcccacgtatgtttcttccaattccgtttcactgggtttggtggcaaatgacagaatggagggaatattttgacatcttactgtagtattgttccagatttggggtactggtgctcttggcatgaatttctaacatgttctgattccagcctgtgattcatccagcccagcacttcaaatgatgtactctgcatgtaagttagataagcaaggtaaccatatacaacattgatgtactctttccctagtttgaactagtctgttgcttcacgtctagttctgtttcttcctgacctgcatacaggtttctcaagaggcaggtaaaggggtctgctattcccatctctttaggaattttccacagtttgttgtgatccatagagtcaaaggttttagcttttggtagtcagtgaaacagaagtagatttttcccccctgaaattcccttgctttctgtatgatcccatggatgttgatagtttgatctctgattcctctgccttttctaaaccaagcatgtacatctggaaggtcttggttcacatattgataaagcttagcttgaaggattttgagcattaccttactagcatgtgaaataaacacaattctgtgctaggatgaacattctgtggcattgtcattctttgggattggaatgaaaactgacatttttcagtcctgtggccactgctgcgttttccaaatttgctggcatattgagtgcagcactttcacagcatcatcttttaggattttaaataactcaactggaattatatcaccttaactagttttgtttgtagtaatgcttcctaaggcccatttgacttcacattccaggatgtctggctctaggtggatgaccacaccatcatggttatctgggtcaatacaactttgtttatacagtacttctgtgtattcttgccatctcttcttaatctcttctgcttctgttaggtccttatggtttctgtcttttattgtgcccatctttgcatgaagtgttctcttgatatgtccaaatttcttgaagagacttctagtctttcccattctattgcccaaacatgtggtgctaatccacaaaaacaagccctccttcccagaaccatccctaatcagctactcaaaaaactagctgaactttggtaggtctctcctgctaaagtcttacaaaggtttccaccttctt

SEQ ID NO: 43840 - DNA, 1504 bp, Bovine  19866880503535
  misc_feature (1)..(1): n is a, c, g, or t
ngatacgtcctggtcttcaggcatgactggatccagagcttcaaattctgttggagctagcccctggccatctctgatctctgttctctgcctcgattctcaggtaccacgtggctagcccctcatagtgctcctcaagagacagtctcactccccagggttacatcactgaaggaccactcagcattctcagcactgctggtttacttccattcgttttcccaaagtaggagtttgccccttggatggcagagaacaggtaacatgcagggctgccagctcatagccctgtgcagaggtccatgtggcaagccatggaggcctcctgtcaacagctggcaagaaaatgggacaccttgcccacaatcatgtgagtgagccctcttggaactgggatttccaaccccagcaatccttttatgatgcagccctaactgtagagactcagcctgaattgtcagctaagtttttcttacatacttgacactcaagaaactgtgagatgttaaatgtttgatgctttaagctgctaagttttagggtaatctgttatgcagcagtggatcactaatacaaatcctaaaactgaacaggagatctgtacaggagtaaacacacaaattagagttacattctggactagacattggtaaagttagcttaacctttgctccggttcagctggagaattgtctaaattcagcaaaggtggtcttccaattgtgataccctgtagtaaagtatttgtgcctcattcatctctctcctgctcgctctatcacaggacttgaactgacaaagggacttgatgaattctggttgaatgatcaactgaagaaataatgaatgcttctgtttcctcacttagaaaaagatgaggtctcattgctgtttcatacccttcttcatgacttgttcaaagaaagttaaaggatataaaacaaagagggttagagcattttgacctagaagacaagaattctcagagatgccttcgtcttcaggaagacctggaatggtggattatcagcatcattatgcttcaataatagcactttgttaaaattaaatcatgcaatatcatatcatgcaacaatgtgaactattgcagaactatatttttttcacttggagagatacttatgatattgtgattacaatggagcatgatgcattaagtaaggtcttgatatttgttgaataagtgggtgaacaaaggttcaaaagaacatgtcctgtttttaatataaaatattaatatatccatatatgtaatgaggtggtgagaaacatatttggtataatatttctgatttgaatactctattttgggaatctattggagtggtgggtaatgtgagggttggaggtgaggtccctaatggtatgcagagtgaaaatttatgatcagtaagttgttatctaaagagactggttaaatggactctttggtttttttgtttgcctgagccatgaggtacgggcgtaagcaaacttcagaaag

SEQ ID NO: 43841 - DNA, 2662 bp, Bovine  19866880516302
  misc_feature (1)..(1): n is a, c, g, or t
ntggagcggcagcgcgtcatggccgcccaggtggcgctccggaggcagcaggccacggaggtgcgtacccgccagccggctcaccccctcccgggtgtttggggccgcggtgggggtcgggagtcggggaggcaggtaacgcacactcttcggcccgggtcttccaggcgcctggccctgcctcagaaggatgtgaggacacctctgcccacgctggcctgcggtgtcgggaggcaggaagccatggccatcgctggggaacttggcagaaaagattttgtgtgaagaagcaggcagagaggtcttgaaagtggtttagttcctttggggacattatgggacataattttatttcgattttctgtattttatcgtttattttggtggtgttgggaagcggaggacagaggccattgcagctccctaagtccatgggcgtattacccagctgatcgagaaaaagaaccacccagcacgtagagctcacagcacttccgcagtcacgggccacttaggaaagttgctgcctatttatgtgtttgtcagtcgtgtcccactctgcgaccccacggactgtagtccaccaggcttctctgtccagggggttttcccggcaagaatactggagtgggttgccgtttcttacagatgagagcaaaagtgacgtgggaattttgaagagacgtctgacttccaggagaactacctaagaaccagttgacagatctctgccgccagcgcggggctgtggctgtgacgagagcctgaatcttctttaagggaaagggtcttcttgaacctcggcctgggactgtgtgtttcttgtgtccctgtgcaagcgcgctccgaagagagcgggcagctcccacttgggggtggatggagaatttttgatattactttttggcgagaaggggccggggagtggaccacaggcaggccttgggcagtgatcctcatgggaagcctcccaaaggccctagagagcgcggcgcgctgggctccagaggtgcctgggccgcggcgcggcctcctcgggtgtcccgcgtgttgcaaggcggtctctgcgttcgctcgcgctccccgcggcttgcgggcggggacgcgggtggggaagggcccggaattccacctaccgggcggtgacagagggtgcgcccgactctggttttgctcaccttcgggtgcccagtgaacagcttggagttttgggcagacctggaaactttcgacttttccgcgtcgactctctgtaccggatcccatcagccctgcttcgaggagaaacctgctccacatctctgaccaacgtcgtcgggtgcccggcggagtctttggccctaggctgggctccgaggttacagcggttcgccgcagctctgttttagggcccggctcctaccatctcatccactgtggatttcacgtcctccccgcctgtccctccacttctgaatgtggactatgtctggatgactctcgaaaagtggccccagggaaagcccgggcccttgccccacaattggagggttcagacagagcatctagctcattgtgctggaactaagcggtgctgatattaatttgtttagaatcatctttacatgggatgggaaaataaatacatttagaacgaggaagattactcatgcctctcccttctcttaaccaacctcccccccccccccaccctagggctctattgattatgtttcttgtatttacaggacaagaaggggctttccgggaaacagaataatttcgagcgcaaagcagtgtatcagaggcaagtcagggcacccagtttgctggccaaaagcattttagaaggtaaagcaacgcagaattatcctttagccttttaaactgtgttctcagtgattctcattattcaggcacatggcatttttacttatctgtgaaggagcaatctgagggggaattgctttttattggaaagtttgggtttgggaaggaaatcaggatttgggaaaattaatctcacatacctcctttttttcactggtaattttgttttctgcctagtagttaatgggttaacatggagtacatgtgaaatttgccctagtgtgagggatgtacagatacattgccaagtgatcccagagcagatgtcctggaaggaaataaattaaaagaaaagaaatctttagtttcatttggaactaaatagaatgagtcaagtgagtttaacagctacccactgcctttagtctgggcagtccagcctttaatacctctctttttaattgtactccttttctctctggattatctacttaaattgcagttattccacgcttcattttgctatattgacagtttatagattgtagaatgtggaaaaagttttgaatcacacaagagaagtggaggttgaatttgaacagagtgatgtctctctctccgtgtgtttgttttctctaaagcttgggaatatgttactttttcttacaatactactgatttttaaaaatggttcagtttgggtatggaatttatttattgatataataatatattgactgtttctcaccatttaaagaaagggaaagtttatatttgctctaattgctgccatttcataaggcctcagcgtgaaaagcaggtttgttttttttttttttttaaagtaggcatt

SEQ ID NO: 43842 - DNA, 2159 bp, Bovine  19866880522680
  misc_feature (1)..(1): n is a, c, g, or t
nttaatatccaaaatacataaccaactcatacaactcaatatcaaacaaacgattctattaaaagtggtagaagatatgaatagactttttaaagaaagacatactgatggctaccaggcacatgaaaagatgttcaacattgctaatcatcagttcagttcagttcagtgcagtcattcagtcgtgtctgactctttgcgaccccatgaatcacagcatgccaggcctccctgtccatcaccaactcctggagtttacccaaattcatgtccatcgagtcagtgatgccatccagccatctcatcctctgttgtcccctcctcctcctgctcccaatccctcccagcatcagggtcatttccaatgagtcaactctttacatgaggtggccaaagtactggagtttcagcttcagcatcagtccttccaatgaacacccaagactgatctcttttaggatagactggttggacctccttgcagtccaagggactctcaagagtcttctccaacaccacagttcaaaagcatcaattctttggtgttcagctttctttacagtccaactctcacatccatacatgaccacaggaaaaaccatagccttgactagacgaacctttgttggcaaagtaatgttgcagttaggacagtcctatgcagtattttattagtctttctctgcctctttgtccatatttggtgtctacttttttgagctaattagggggttcactctctaatggcacatgggtttaagttatagcctctccattttcaagtcataaggaacattcataaatagcttttacatgtaaagacttctggaactgattcaaattaatacaaccttttttttttttttttttgagctcttgctgtatgaaaagctcttgctgtatgaaaagctgtgtgtgaggtactgagagaagatgggatagatgagatgtttactgtccaggagctcacagcatctcactagggaggccggtacaaacgcagctgacaaagggagataagaagtgctgtatcagagaaagagttctccctcatggattcaagcctatctttttattttttcatatttgttttctgaaaagcaggggattctaagacttagaattgcatttttacaatcaaactttgaagagggaaaattcttaaactgactcttctgcatcaccaatatactgttcaaatggaagaattgtatccttcattactaaaaggctactttcttagagatgacaatttgaataaagcagggttttactagaggttcttttggtaaatgaatgtgaccatttaatagacttctggacagttgagggactctaatctctatgattccttggtttgtatctggtttaaaatttggcttatggtcaccaaatcatcctctctgcaagaaaatttgctgatatgtagatccccatgcaaattgcttttcattgagctcccagtaaaattccctctatgctttttgactgttgtcatgttacattccgggttcaaagaactatggcaagctgagacatgtttatttaaatggattttgtggaaatgtaacattagctttctaacacctgtttgcatttccatacagactcaatagaaaggaagctttattctcatgctgaacatgcagaataatatctcaaatcctctgcttctgattgaggtaggaaaggcaagttgtgtcttttttatttattcattcagttaattattcatccatccatcctatactggatacttgcattgtcccatgccctgtgggtagtcactggttacataaggtaactaatcattaagggggcaaaagcacatgctagttagtctttacttcttccaaaactaccaaccattgtgttcatgcaggattccagctatgtttttccaaatgatttctcttgtattgatcaattatagagaagctgttgtattctcattattgagagcactggagtagactgtttaaatcaaagtggaataatgtaaatcaatacttgtgccaccttggtaaagtggttaagttttcttacctataaaatggggacaataataatgatctgaaaggatttttaagaagagcatgcctggcagatagcgaacaatgaagaaacatgagtggctttacttttttctgcagaaacga

SEQ ID NO: 43843 - DNA, 2646 bp, Bovine  19866880656266
  misc_feature (1)..(1): n is a, c, g, or t
ntagaatttttccagagcttattgatttgttactgttttagagtctgtgcagacttttgtctcccttaaatattttagaaaagaataactgtatgctcttgtgttgtgcactgttattaatatcctgtagtgatattgtctttaataattcttttcacatcagggaacacttttccataaagcaatagttctcaactgggggctattttgttctcgggaacatttcacaatgactggagatgcttttttattgtcgtgactgggggtaagttcctgctggcacctagtagggattctccccaacatccttccatgcaacaggacagcatccacaacattaattatctgcttcaaaatgtcagtgcttagtttgagaaactcagctgtagagcagagcgttgcaaattgtactggtcatcagtcatctgaaaggcttgttaaagcaacaattgccccctaccaaatttctgatctagtaggctttggaggaggctgagagtttgtagttctaacaagttgtcaggtgatgttgatgctgctggtctgagagccgcgctgcgagaactatttccatagggcttaataagttacatgactttaattgagcctgtatgaactattagcttcttaatttgggtcctgacttatattcagtagttaggcttatcatatcgctggtgtgttgcaaacatcacttgggcccaggccaggtctcttcctttcttggtatgtcctgggatgctgagaatagaaaataggtctcattactgtggaccagatggtttcacttggctgtgtggactcggcaccatataaatggctccaaggacatatgaatgagttgttggcctggggaagattgatagagagaggggagagatggagcaagtgaatgtggaaaggaaagaaacatccattttttattgtgcttacgacactctctcactgtatctcgaaaccacaacacacctgtgcagagttttgcaatttcttataaaaacatggccttttagtctggaatggtagattctcaacctgacactatcttaatggtattgcagtcaggttaacttttcactgtcatcacaccagagggaagatttatcgcttgtgtctccgggttcataatctcttttccaagcatcctttctcccaccttgcctcctgttgccctcagtccattcagcatgagcagagctcactgccccctctcataatgcatcatatcgagaccttgcacagaggtggcaactgaattcagggttggggaagctaagtcaagttggaactgagagggctgggggtaaagcacgggttagatcagaaagatcccagaagctgtgggtcagaaaccaaggaaaaattgtgcttaagatgaggcagtatgtcaaaaaccagataaaggttagaaaagcactggggccaaagcatgcaggaatgggagtgttcacaactgaagtgaagcccttttttcgaagcctcttatgatttttacttggaaatagtgctggtctgtgaagtgctaagccagttcatctggttgacggggtagacctcagagcataagaagaatagttgataattttctaggtggagcacagagatgggcatatagggatttcaaagatactgctaatatttctttcctcaaggtgttaaagcaagtggattattttattactatctactacttagaaagatgttaatcaaacacctcctattcctcaagataattttctccccctttcagaaataaggaaatggaaactgagaaagagaggtcatttgctcaaggaagtgtggggctggcatgggggtacccagtttcctccgtccagccctgctctcctctctcactgaagtatgaggctgtttgggtcacaggcggtttcccaggtttcctcctgatcattgtggagtcctctctgtgggtcgggggtcaccctgttgcccaatcacgggtgctcacagctccagtattccagcctgctgaaatttagccacctttctatgaagattttttaccggtttctcttcaaatattaaacaattctcaaaccataaatacagcaactcacttcctttctaacctgagaatttgaggggtggtgttttgcagcactgaaaattaaaattggtagttccatgagtatttggcacagccatccctgacgaaacgtgcgagctgcagtgcacgtgggaagtctgctgttaagtcaggcccacacctgaccacgtgggagcctcgctcccaccgtcgtgggtcatgccagcctttcctatagcacagtcctgctgcacttagcagtgctctgccctcactcacttcacttgagcagggtcttagtggcactgtacaaccgagtttacggcgcccatgagtcatggagggagagagctgcatggtggctggagccagcggcagaatcaaagaggcagaaggtggggaccatggtttagggatctcgagggcctgggagtcatagattaatgcccccatcagggcatcctgggggaattgcagcatcctaaaattttggaacaaagtagaccgcctagtccagagtttttacaggacacaccctgatagaaaaaccagggctgtgttactttagctagagccaagccagagatgtgtgtctttat

SEQ ID NO: 43844 - DNA, 693 bp, Bovine  19866880656952
  misc_feature (1)..(1): n is a, c, g, or t
ntaagaagactgggaaagtaagaagacatggagtcaccaagggcaaggggaaaaggatagaagcaaataaaatgaagctgcgtaacatataagatgagagagataccattagaaaataaataatgcttatgttgatgaaaatcaaaaactgcatgtgatcccgaagaaaaatcttcacatcagaatctaaaaaaaaatatagccatgcaaataagggcccattattttcccctctgcacagaatgactggctttgagttttaacatgggaggaaaagccagatggcggcagacgggcttattatagaaagtccacttgcactgaagttttctcagcactttctgtcgttgctgagtgaggttttgttttgtttccttcttaagtgtagggcaggcaagtaccaaaatttgtataaagtctgcaaccttttcatgcaaatgttctattcaatacctccaatacatgatatatgatgccaccacaggaaaactagtgttgctacagacgttaatcataattatgaaaatttttaatttaaatgtaggtctgaacacacaaaatacagtgcatggccatctgttagttttccatctgggctcatttgcaaaatacattctgtttcactccccccttccccctctatttataatcttccctggaaaacaaatatggctaatctatggcatgccagag

SEQ ID NO: 43845 - DNA, 1457 bp, Bovine  19866880719553
  misc_feature (1)..(1): n is a, c, g, or t
nactctctatgacttaaagtctgtaaagtaagtagctagtatgctgctctctagagtgaccaaagccagccctgagtattctttatggaatcccattggaaatatgtttgcacagagtttaatcacagatgtattcaaataagaaaatgcctcatttgccaatgctttcctgaacaaggaataaatacacatcaggaaattggcctcaaaagaattaattccacttcatgtcactggtccatttttgataggattaggtgaacattcatttttgggaagatggactacatatatttggcagaatctcagggtatttagggacctggaaagagtgatattagaactacacccagggagttgtaaaccttttaaaatgcttcaaggtggttttgtatcactttataaagctgtgctataaaagataagctaaaaatcagaattttatatatggtctatctgccaccaaagggcactacagccaggctacaggtcatggttacttaaattgcgtttgatatatttagaattatttataaattcttagtaaaaaaaagcatgttgattacttgctatattcaaagagcaacattagacactgtgagcatatgaggttttttaagaccgtctttagttcagtgtattacaatctatttggggtcatggtacatgtacacaaagataataacaaaaataataaacaggtaacatttatctggcatatctatgtgcaagatatttcctatacattatttcacttaacctaatcctcagacagttcaggtggtctggtattcccatgtctttcagaactttccacagtttattgtgatccacacagtcaaaggctgtggcatagtcaataaagcagaaatagatgtttttttttggaactctcttgctttttcgatgatccagcggatgttggcaatttgatctctggttcctctgccttttctaaaaccagcttgaacatctggaatttcacggttcatgtattgctgaagcctggcttggagaattttgagcattactttactagcgtgtgagatgcgtgcaattgtgaggtagtttgagcattctttggcattgcctttctttgggaaacctatatgcaggtcaggaagcaacagttagaactgaacatggaacaacagactggttccaaataggaaaaggagtacgtcaaagctgtatacttgtcaccctgtttatttaacttctatgcagagtacatcatgagaaacgctgggctggaagaagcacaagctggaatcaagattgccgggagaaatatcaataacctcagatatgcagatggcaccacccttatggcagaaagtgaagaggaactaaaaagcctcttgatgaaagtgaaagaagagagtgaaaaagttggcttaaagctcaacattcagaaaatgaagatcatggcatctggtcccatcacttcatgggaa

SEQ ID NO: 43846 - DNA, 1623 bp, Bovine  19866880750954
  misc_feature (1)..(1): n is a, c, g, or t
nggcctgcagagcctcttttaatgaaacattgaagtcaccaccaccccacctccccatcagcatcgccatcacccaatctctaagagcccgagtgtgttgcgtgcctacatgcagacagataaggagagaggctgaggcatgcagcccagcctgcctttgttggtgctgcagtgcagagagagcctgcagttattggggtagccaacctccacagcccctgacatgctttgctcctctaggagacagtaatacattacaggtgttataacttttcctcagaatcagactgcctggggaactgtaaatctaaatcatggctgccctcaggaaacctgtgggcctgtaaacacagtgaaatgagtgagatgaaagcatctgaaggagaaaatgaatttctggcatcccactgaagtctatttcatttttacagtccggtcaccctcctgtggcaggggcagcgcctgggagggacaggctgcctcctgactgacagctgacgagcatggctcctcctggaagccttggctccagggcctaatcaagagacaagagctgcagcagactctgagtgtccccgccacaaacagctcagagtgccacgtaagacgtcgccaaggcatggtggtggggtttttctttgggggaggctgggcctgtctgagcaggtatttgtaatcaaggccattcttcagttcaaaggcagagcttagcgtgtgaggcgggatgtgtgagagggaagagaggggataagaaagaaaggcagagaagtgactccccagagaatgtgcagatgcttcgatttcagggcacagacctgggcacctgcagaaaggcggcagctggccaatactgctcagagcagtgagcgccaccccctgggctgtagcaagcatagggccagagccaggaagtcatcgaattataatttttttaacgtggcaacttgaatgtcacaccagccaaaccagaagaagctttagctctcagtggagaagagagccagaaagctctcaccggagagaatgatgggacatttgaaatggaggaaaacgttaccctctgattttcaaaataaacttccctctgatttcatgaacgtgaatttttaacattaacaatttaatgttaatgaatttaacaaccattctggccttttgtgacatggaccattgactgactgattaaatgtttcactgaggtcatggggaaggagttagttcagtatattctctataatggatagatacatgactcagttgtaaaaatctgcctgccaatgcaagacacaggagttgcaggttcaattcctgggtcaggaaggtcccctggagtaagaaatggcaaccccctgcagtattcttgactggaaaattccatggacagaggaacctagtgggctacagtccacggggtcacaaagagtgagacatgactgagcactgcatgtgcaacgtcaaacactgacagtaatgaacccagagtcacctctcccattaccagggaattctacaaaaaggatctaaaagtaatttttgaattcttagtaaatcccccaaactcacattttacatgctttggcaatgactgcaaaactgcgaaggcctgtttttagaaaatcacct

SEQ ID NO: 43847 - DNA, 971 bp, Bovine  19866880921173
  misc_feature (1)..(1): n is a, c, g, or t
ncttgatatggttttataaagtattcagttttaatctgttatgatataagcatgttgtcctctgagggataagaaaaaaacttactgagtcatcttggaatgtagcgagtaagaccttgatgtaacattctgactctctctagaatccttaataaaagtctttcatccattggtttacatttccctgagataagggtcttccattcatagcttttctcctctctctcttcctacaccaaagaccctgggaatgtaaacctacccgagcaagaactcctgccctgctgggtgctagagaatctggtcccatactgaacatcctgttctgggaatgcgcaaagagacattggaggatgagggaggaagtaactgacactgcctggagcagtccaggaaggcacggggaggaggttcctctggagctggaccaccaggaatgaggcaatttctcccagctttgaggatgactgaaggggaagaacattgctggctaaaggcataatgagtatcacataaattggagacctacatgcacttgtttgctagcaatattgttagacaaaaaaagttttgtttaggtgaagagccatgtgtcataattaactagaaacttctaatactgatgataacatgtatcacttattatataccagattctgtcctgtttaaaccttcagcagtcttgaggatgccgcaatttttatacccatttgacagatgagaaaactgaagccaagagatgttaagacactcaccaaagattacacatttagttaggagaagattgggagtttgatccaagacagtctggctctggattctaggctggtatccacagcactcttactgcctctatagcaacaatctggaagttgaaatatcaagacgttatttccgactctttaaaacactatttacactacaaactagtcgagggattttctaaaaacaggccttcgcagttttgcagt

SEQ ID NO: 43848 - DNA, 1515 bp, Bovine  19866880934124
  misc_feature (1)..(1): n is a, c, g, or t
nctacaaacttcctttaaggcctaacccaagagttttcaactaccaatggacttagggagctttcaaaattactgacgtcccagggtcccactctcagagactaatttgattggtccagagtgaagaccagactccagcatgttctaaatgtctgtatagaatttagtgtgcaaccagcattgagaaccactgtcacagcctatcattcctgggacaaacctggcttgcttccaacgtgcactgtaatattctggtctgaattaagttacctatgagagaggagaggaggaatggaaaaagaaaagagaaacctaaagagattccctgggcaaccttcttcttcttcctcccctctgtccctcagcttcaaattatgtctctatgttgcctgatgccaaacttaaagagttttgaggcagagtgacttttaggggaggggtgggaaactcaaaatgtccaggggctcggtaagttccatatatgagagaggcagcccagcaggaccgagacagatgactgcccacagggccctcattggctctaaccaaacactgatgtgtaataattattcgatcccaaaggccccagagaaagtaattttctaaagaggctaaaaatacaattttacccgaaatgtcgcaatctgcaaatgttggaaactaactcctttctttcccctcttttttaaaaattctgaataagctaaataaaacacatctgcaggttaaatgaagcccaaagcctaccagcttatgacctatgacttaaggaaccatccatttttcatgattcaaatctagaaacaaagatccaaagactgaaaacagtaaaatacagctggaacccagtgacaagtttgcttaacttattaaagggcaggtttgagtctcttaaccagatgatgttcataaaaccacaggcagacagtgcaggacttgcatgtaagacttaacccacatggattgggaggagctagttaaagctgcatctttcctgaaatcatttccctttcatttccttcccccataaaactccaggtgtgcctttcgtcttgtcacatgtcaaagaagagactctttccaagtgatcttcatttctttggctaccatctgtgctcccaagcctggcttctaataggtatgcggttgtcaacaccattgagaggaagcattttacataataaattcagaattcttctgaattcccttccctgagattagactgataggattttgcccagaaaatatacaggtaagacagacccatgctgacaaatcctaaagggtagaagacaagagccatggcatcaattaaactagtaaagagaaaaaaaaaaaaagttaagcgctaggtaaactaaagaactggaacaggaatatactggagagggctgcagaaaggcagcctgtggctggtaaaagacagaggaaaccttgtatacctgtttcccttctctcatctaggaaagagggatttcagagccctaaatgtctgctttccatggtaatggggga

SEQ ID NO: 43849 - DNA, 1236 bp, Bovine  19866880947394
  misc_feature (1)..(1): n is a, c, g, or t
ntcttgggtcagagagattagtgatgatttctctactgccttagagaaatactctatataccaaatcaaatcaaagcatgcagataaagctgcttgtaaagcacacagtgctatggacctataaacttttataactaaagtggaacattaaaaaaatacaatgggagaaattaattttaatgaaaaaccaaacagagtgatcgaaaacccaaggactggttataagccaaagaatcttggttcagttctagagtgtaagtaccttttattaaaccagtaaattattttcaagagattcctaatgccaagtgcttaaaataaaacctaatcctatgaattatgaacaaatgtaaacatttaaagtttctgttccaggaattaataaaaagctagactggggcattcatcctaaagaaatttttccagacaactgaaggattaaaatgttgctgtgcaaacttcaacacttggctatttttgtagcaatgcctttaaagtaatttttgagaaagataacacacaattaggaaggtgcagacaacacaaacatggatctagatggattatcataaagcaaacatctctggacccaccacaggagtcaataaatacaacacaggagacatcacagaagactgctgttagcctcccaatcccgaggcctcttctctcccagaaaaggcagtctctaacaaagttgtcttagtttctcttcccgtttctccaaagttttaaaatcttagcagacccttcacatttaaagttgtggacctctttctatgctaattaattcatcactccttttaatgactctattttaaaaagagaggtacctgcgtacattttttaactgctcagattttaaatgtctacttgtcatattaacgtgaattgttttactgtgcagtatgcagatgcttccaggtgccagtcatttggataagcattgccatttgcccccagttaaatggccttagacctctgaaatacttctaattcattcctttgtgccctttcattgtagaaatctgtcacctgatatttttgcaaacctacttctcacttcaagcacctctctctacatcaacaaattccttttagggctgattttccctagttaacatcctggacaaaagagcaaacatccagtcttctctccagcttgtagagaagaattaccagaactgcttgttaagaataaaaattcctaaacccatggaacgtttgaattctggg

SEQ ID NO: 43850 - DNA, 1924 bp, Bovine  19866880985855
  misc_feature (1)..(1): n is a, c, g, or t
nctgtgaatgtgtgattcgtttctccaatcctggtaagtatttagtgttggcgctttttcaaattttagtcatttttgtaggtcataatgttatctcattgttttattttgaatttctataatagctcatgattgatagtaatcagatacagagcatgttttcctatctttactggccatccatatatcctctttggtgaaatatctacttatgtattctgcccattttccaattgtattgtttggggcttttaaaactgttgagttttgcaaaattccttatatatcccagtgcaaaatctttgtcagatatgtggcttgtacaatattttcttttattctgtaccttaccttattacctctttacaaaggagatctttaggagaacaaaggttttaattctatgagttcaaatttatacattttctctttatataccacgctttttaggttaaagctaagaagaatttatccacttggccatctctaacttttacttagtgtgtttagaccattcacatttaacataattgttcatatgttagagcctgagttttccactttattcgtttttaacttcgcttcctttgtttcttactcctgtgtttctattttcttgcctttctgtgggttactcgaacaattcttagaattcaaacaatgtttaatagtatttctgagtgtatctttgggcacagttttctcagctgttgttctatagtttacatttttttacagggtcacaggcgtccgtgtctagaatgggtctgaaggtggggatactaaaagagagaccaggagaaatgctactgagggttatcacaccactgtgaaattgctactctaagtgttgtccttggtgaaaggtcccaagaaagcacatattcttctctctggatgaaatattatttctcattctttgcacgtcaactctcactcagcttttgttattttcatctaaaagcctatgacttctaagatgggatttctgtattgctccgtgttggcccacatcgcccctaactttcctattatagaactaaccgcatgcatttataatttctagtttgctcatttgttctgcccattacactgtgaactccttgagtgcaggaatcatatcttattacttcattctgggtactaacccctcatacagtgcctgagacctagtaggccctcaagaagtatctgttgactgaaagaataaattttatgagagtcatttaaattgcctcccaaaacactgtcagtttactcccgcagatgttgtcaaagtgttttaataccagtatacagcaaattaaaattcaaatattaataatttaaaaccacattttcaatttaagttttcttttagtagactccactgaaattgggttataaacaataaaagaaaccttaattagtatgcttattatatataatagtactctgtgtgctattctgggattcttcttaatgttgttttggttacttttgaatagaatagaccagagatgtaatattgctgcagaagctattctaggacaccaagtcactatttcaactcagagaacacaacagattaatcacctaggcatccagaatgagttctgggtttgatttccctgagtttcaaaggtaacaaaccaaaacctcctatttttatgttccaaggaaatataaccaaacccacaatattcacataacaccaaaaagtggcccaaacagctgctgttggtgaaacctttatgtgcagattgtaacctagaggaaacgtttttggacaagtgtagatgagagctttctgcacaggactcactgctctgagtgctgacacaggatgacagtgtggcatgggaatcagtattccaggctacgatatttttaaaaagtaacgtatgactgcttcccaaggaaagcaaaccacagagccagactg

SEQ ID NO: 43851 - DNA, 1672 bp, Bovine  19866880996177
  misc_feature (1)..(1): n is a, c, g, or t
ntcacctactgagcatgtcacatttttggtgacatatgtgtgagggaattccaatcagatctcccactccgctcaggcccagggctttgctgctgtcctgtcagtccattaaaacccatgacctcagccaccagggaatggtaaatatcttcagggcaaagcagactctagtatttgcttatcagttactgggcttgtcatttctagcctctgagattcctttatttttctggcagcttaggtatacattattaatatgtcattaatattttatgccacatctttaggtgtgaggtctctaaaaatctagtatgccatatttttttgtaaagctctttgaattagttagctacttccgtgtaacaaattatcccaatacttagtatgttcaagcaataggttttatctcctaggttctgtgggtcaggaatccatacgcagtttctctttcatgaggctgcagtcacggtgttggcaggcatgtcactcatttcaaggctcaatttggggaggatctgattctaagctcacttgtgtggccgttggcgagacttatacccttgctggctggtggttggagacattagttacttgttaagtggttctttccacaggaatacctacaacatagccacttgtttcttccagagtgagggctctgagagagggagagagaaagtaggaacacatggatgtcatggcctccttgtaactcaatctcagaagagacattccatgacctttgccatcttctgttcactagaagtgagtcactatttccagccccttctcaaaagaggtgatgacagaagtgtaatcatttgaaaccattttaaaggctgcctacctcacttgtataaatctctttttaaaaagtaaacaacaaagtagaaaaaaattaaaaagtataaataggcaattttttcaaagaagaaatttaaatatctgataaatatataaaaattgtccaatatctctagtaattaaagaaatgctaattaaaacagcagttggataacaatcttacctatcagactgattgacaaagatctttttaatatcgtgtagaaaacaaaatatggaaactagcaactttgtgcagtgctagtgggagtgtaaattagtatttactgtgatttaatttgagagtgggtcactgtccttaaaagtctacgtagcctgaaaaaatacatatatatgttaaaatttattgtctaacaattttacaatgagagacttgccctaaggaaaaattataaaagcttgaaaatagtcattgaactatgttcatctttttggtaaacccttttaaaataaatgtctaaaagaagtcattggtaaataaattatcccacatgctcataagataaaactatgcctctgttaaaaataacaagtctgcatatgttaacatggcaagatttacccaaacatattgttagtaagcaaaatagtgtatattgaattatttatttttattacatataatgttaaacacatgtatatacagaggaaatattagcaagctatggaaatagtattattacatcatctctgggtgatggaattaagttgctttttattacatttttgcttactgtattgtctaaattctccagaaataatatatttatgtatcaattatcataattttaaacaaaaaaaagtttat

SEQ ID NO: 43852 - DNA, 1778 bp, Bovine  19866881035813
  misc_feature (1)..(1): n is a, c, g, or t
ngccatggaatgggctatctttctgtgtctacttctcactagttaagcaagtaaggagtaaatcagggcaagttatttgccttctttgggcttccatttcttagtgggtcattgtgagaaagtgggattaaaaacttcctgtaaccttgcagaaaaaagcaggggtgtataattatattactaagtgattgtaagcattttacaaacatgacaatatgaataaaagttattgttatcagtaataaaaagaatgcaacagtgagtgcttcttatgaaccagacatttaatatacatatggctgtctgcttttatgaaggcagagatgccggttcaagaaattgcataatgtgttcaagctcactcagctgatgagtggctgatctgggatttgaattcagaccagtctgactctgaagcccataggaaggtacctcagggacccgatgtcactagattcctccttagcagatgtcacctcagaggaacctgccatcattttgactcagaaagccctactgactgcccctccgctgcatgcatgactggcctgcccaatgctgacagtccctggagagaagccccgcaggggaccccttggacggtcacccaccaaccaccactgcctccccagcagcagccgtgcctgctggtgtcttcgaccagtagcagactgaggcagaaggagcaaaccgttccctagaaaccaacccttcccgctccttttcccagagacctggaagccaaatcccttagttaattcagggaaagtgtcatgtgactccactgtctccaaggctgtcacttgcccattcactcactacttactggcaaaaaatccttctgtctggatgccatcgagtctttttccttcagtgtctctatctactccattccagatttaaaatttgcttccgttattgtatcaaaacaatcaatagaaattcgatacaaaacataggagtttttaaatgaaccatcctttgctctttacagttaaacaaactcttaaaagactactaatgaccatagtcctttaaaaatattttaatcatctacatatatgtatgtatatgaattcataaatatcatgtgtatatatgtgtatacctgcatggtaaattaagtgccaatatctacaagcagatatatagcttaatagcacacacacacacacacacacacacacagggtttatcttattgggttgttttttttttttttggatttagcaggtttttttcttttttcttttaaattaattttatcttaattggatgatgattaccgtataatattgtgatggtttttgccatatactgacatggaaagtcctatcttattgggttttaaaaaatatttatttatttatttggctgtgccaggtcttagtcgtgggacatgggatctttatttgcggtctggtggatctagttccctgaccagggatcaaacccaggccccctacattgggatgaaaagtcttagccactggaccaccagggaaatccctgtcttgttttttttgagggatggaacctgggccgttcacttatttgctctcagatgaattccctgcccttgttctaccttactatgttttaaagagggtgataacctacaagtatttttaaatatttactttttaaatattaagatgttcatttgtgccttatacctatgttgttatagatgttgagcctagaactacaacaacaaaaacgagggatctaatcttgggatatgaggtttagaggagctaaccatatccacagccaat

SEQ ID NO: 43853 - DNA, 855 bp, Bovine  19866881079807
  misc_feature (1)..(1): n is a, c, g, or t
naatcttacctgggagagttctcctgccaggctgctttaagggcatgctgttagcatgcgtctccatttgtggctggagctgggatgcaggctcatagattcatgtcgttgctagggaagaatgctgtaatccattgccaccataggcaggtttctgcatctgtcagcagatattcctcttctgaacctttacattttgatgctgtctttgggcctaaacataatgttaaaaattactgctcatgatggaaaaagataacaagagaaagagtggttgtttccatgcccacttaaatgggaccacccctgcccatccatcacgtgccttgtgactatggtttggaaggagagaaacctttactgcgtagggcccccctcctttccttaatcagctcacactcggtcctttctttatgttcacgacctgctgccaacagatcttagaattgcagaaatataaataaataaataaaatggttgtcccttacaagaatatcagatacctctgcttttagtaaagaaaggaaaatacagcttccggacattgttaaagagggcaaaggagttggtagctcatggtatctacttatggcctgaattcacactaactagcagtcaactactcccttaaccttgaggctgttcttgcttagattctcaataataatttctcccttaaccagggggtaccattgccacttacttaaattatcctcacagggatgataaatgcctgctctggggttcctatttgctgtattcttcttcagaaacttggaaatagaagttttcatcttgtttcagaccactctgttgaaagttttgaaagagctggaaaaagaaagggacagaaat

SEQ ID NO: 43854 - DNA, 1737 bp, Bovine  19866881107231
  misc_feature (1)..(1): n is a, c, g, or t
nttagaaacccattgctgtaaacctgagtcacctatcaatccattgtatttgttctccaataacccaagtagtgaagccttttcgatcacctctttcatttaacatcttttctctaacctagaaaatgtcagaatgctttattttttttttttttttttggagaggctggtttaagttctctgaagcttatacacataagcccatacgttatgcgccagtacaaaatgcccagctgagaatagtggtgccttcactgaatgatggagcttaagcttcttgaaacaactgcaacttaatgtttaaatgcagatattttactgtcttattcactacacatattcttgaatccaaatgaagaagtaatactttttactctacatttttgattcatggtgacctcattaatcggcaagcaagttcatcctaattataaacttttgagacattactgcattaataggatgtggaagaggcttactgatggaatatctcgttcctatattttgcggcttaagaaactgccagaatagttgaatgtttcaaattcttttatgaaacaaatggacagagtgacggcaaaagaaaaaaaaaaatgtatgacctaatcactactagaaaatatatgtccttggggctgagggagggggaaagttcatgagtctggcaaacaggcaagatgggcctgccgttggtcaatttgtatgatgagctgaggagtttcccagttgtccgaatggaacagagacacaaacacgagctcagtcaggaatagagccagagacgggtgatcatgaatacatcggagcatctgtcacttggatgagctcctggcgtagtccttcaccctgtgtctgagtccagagatgagctgggataatatgcatgaaaatggtagggctgctccggagagccatcctaaggtgttaaagcacatgcattactgctttgggaaccctctagtgtaacagaaatctaaagagaagaagcaccaatgcccccaactcacagcaggattctgaacagttgaagcatctcacaggtacttacttgggccttggtggaggaagacccctgggggtagtaagcagccaaagcagcaatagctcggcccatccggggccacagtcccttggtcaggcgtgtgggatgggcaaagatgtgtggacatctagtggaggaggcagagataggacatgttccacacaccaagcacagggaacagagagtcttatcagaagaacagaaatgaaggtgatacacagtaactaatttgacttatttctctttaaaagccttttattttagattggagcatagccaattaacagtgtgatagtttcaggtgcacagcagaggggctcaaccgtgcatatacatgtatccattctcccccaagggctttcctgatggctcactgggcaaagaatccacctgcagtgcaggagacatagggacgcagattcgattcctgggtgaggatgatcccctggaggagggcatggcaaccctgtccagtattcttgcctggagaatcccatagaaaaaggagccatggagctacagtccaaaggggtcacagtcagacatgactgagcgagtagacatgcatgcaatctcccccaaactccctcccatataggcttccacataacactgagtagagttccctgtgctatacagtagatccttgttgttatccatttgaagtacagcagtgtgtacgtgtccatcccaag

SEQ ID NO: 43855 - DNA, 877 bp, Bovine  19866881120481
  misc_feature (1)..(1): n is a, c, g, or t
ncagatggttttagtgttcctaatggagtcaaaggttatcctatgcattgctgatagatcacgaattctctttagtgatgtgttgtttcagcagcactgggttagaagaggcaaattctgaacagtagagacacatgatgctctagcaaaatgaacgttcgagtattgatatgcggaaagtgttagtgtacaaagatgttagagacatgaatttgaaagtgatctgtcaacacaaacaaatcaagattatattctaagttcaaagcagaagttttcctggttctcatttactgggaaaatgagcaagataaagagtctagagatactgtttttttttgttgttttttttttatgttgacgtatactgagcaatttcccccaatgcagagaaattgccaatgaatgtttaaaattaattgattcaacaaattcttaaggagtacttactatatgctagggaatgcagctaggaatgacagacaaatagcttggattttttggatacttacatttttgttggagaagagacaggcaatagacaagtaacttaaaaaaaatcaaacaaggtaattttagctaatgataaatgtcattaaaacataaaactacatagtgtgaaagagtgtctgtgggtggagagatgggctgaaaacctgtatagtcagggaaagcctctctgaagaagaggaatttaagctgagatctgaatgacaagaaggagccaactttgcaaagccttgagggagaacattccagagacaggaagcagcaaatgcagaatccctcaggtaagagcaagcttggcagcttcggggacaaacaaggccagtgaggactgagggctgttggtgagggggagtgatgcacttttatttaa

SEQ ID NO: 43856 - DNA, 1073 bp, Bovine  19866881246806
  misc_feature (1)..(1): n is a, c, g, or t
ncttggccttgtgccctgctttttccagtgagttttagtggttatgatatatgcagaggcttgtattgtgcttgtgtggttggaattgctctgccattggcatgagaagaaatactttgggtaccatgaacttgctggagaagggcatggcaacccactccgtattcttgcttggagaatcccatggacagaggagcctggtgagttacagtccatgggctgcacaatctgaaacgactatagcaacttagcatgcacgcaccatgaccccaagcctgggagtcagaataagatgcatgtggcaaagccaccctagcctcctcataggcaagtaagagatatgcttattgttgtaagccagtgtgattttatacttgcttgttatgcagaaataacctgactgatacaatcctgacctgttagttgtgtggttttgtagccatgttttctttgcccatagaggattgaatatgtcccctcttactgagttgtactgaaattgaagtgaaataatgtacagtcctgacacaggccccaaggatattgattaacttatccttggccccctccagagttgatggtcaacttttccttgctagcatcagttctaagagtagtaagatttttgtcaaaaaagtcacccctgccaaatgaaaggggtgggtatccaaggtgatttgtcagttgctttcatcatttagaattgtaacagaagccacagcaatataatttcttaggttccctgataaacaactagaaccattaacaccagcaaatctagttccattgtttcttcatgggacctcctatctttagaaataccaatataagcctgtttcagcagtgcacttagcataccccgtgtcccttgagaaataactggcttttgtttttgatgagccagaatgcatgcacacgtgcatactatgcagtacacactgcccttcatcagctcaggcttttgttcatcaaaataatagaaagtagtggcataaagccattctctgagaaataattcattacaaacaaaatcatccaaatgccagttcttctgccctcaataccttcaacaa

SEQ ID NO: 43857 - DNA, 1128 bp, Bovine  19866881378208
  misc_feature (1)..(1): n is a, c, g, or t
nctcctattgctctaattatcgaatacttaccctgaagaaattatttcctcatttccctaacccattcctgccacaggcctcttctgtgctgggttaaaccctaagctaaggaaaacacctgtggactgcaggataatgagagaagagaggattgcctggctctctgtgaagctttgcacatttgtccactgatgtgcctatggtacaaatggaatgaaacaaaatctgtaatagatatgaaagagatatttctgtcactgctacattatctatggaaaggtttatccacgaccgaaactttaatgtcagtgtagaatcctccaatgtatttttcagctttctttttcctactattaagttgtgtgtaaggaaaccataggctgattctagtagcagcctgacaaaagcatagttaaagatgcaaatgtggtgtgggtcagacatcccaagtgccaacacgtattatgttgggtaatctgctattttggattatccctttgtttctctgggtaattgagagttttctatatccacaattaactcccgcatctatatataactaagcccttttaattttgtatccaacctacaatgggacctgctctacccaagaattaagctttttcccagccaccttttcagacctctgggtctccccattcagccacttgtgacaatctgtcccagaaaattggaaaaccgttcagtttaattggttctaaaatggaggattcagtgcctgtgctgagtttgaggatgaaactaacattttacaaagcccagcccagcagcagctgccctttgggatttgggaggtagagcagcaagtcactctggaatttagagctttattacaaagaagtgctaactcttctggttctgcttataaatggaataaagggagaatctggctcacccatgagtgctttaaccttgtacatgctcaatatccttatgaaatgcaatatcttatgatcctttaaataacaaatgaccttattcccttttatagggtcattaaggcctctaacggtcaaggtataaatcccagccactactgcacatcttaatttactattcatatgtaaagctctcttggttctcaattactatacaacagcaaccgg

SEQ ID NO: 43858 - DNA, 700 bp, Bovine  19866881529028
  misc_feature (1)..(1): n is a, c, g, or t
ncatagaaacaatggttctttcaacacagcatcctttgtatgcatattaaacccatacgccttttctcatttttcttgtaatgtggcattttcaatctgtcttttattttcctacattgatatagatgcaggttcagagaaataattctctactatcaggggaaaaaaatgggtgagcatgatgctaagtggcaagtgatattaaaccccaaagtcaggaaggcgagaggcctgtggaggggtctgcggtgacctggagagtccatggttccttccaaatcaggcagcccctacccagttccagacaactgctgacactgttgacatgtaggaatgtggactctgtgttactaatcttctactttctaaagaacagctaggaatctggattttttttggtaaaatactctttttttgttttctatttttaaaacacagtttgggcctaataaaacatggctgtgggctagatgacgttggtgagcagccatttcaccttctctgggctattctaggggttggcaaactatattctgtaggcaaagtccagcctaccatctttcttttgtaaatgaagttttattggctcacagccgtgctcatttgtttatgtattacctatggctgcgtttgtgctataggcgtagaattcaatagttaggacactaattgtatgagctaaaaagcatactatctgtac

SEQ ID NO: 43859 - DNA, 732 bp, Bovine  19866881772661
  misc_feature (1)..(1): n is a, c, g, or t
naatttggagggtacacagttgagcccttaatgacagaaaccagggaatctgagtttctagcagtgtcttcaggtaattttgatatagccaggcatatagccagggttttgtatccactgcagacacctgctagatctgaagccctgtaagcacaatcctcacttttctcctttgcaaatgagagctgctcagccaagtcaactgattttcaacaggactgtaacaaatatgctccagaaggactcagtaacccaatactttgctgcctgcagatacaatctgggttcatctgtagctggacttttgggtgtcaactcagagacatttcatttcatgtccagtgaattacattctcaaaagcaaagcaggtttggtctttgtagaaaaacatgaatctgaagacaggttatgagtgaagcttagtgtgctggaaaatggatcagatgtagactgaattgcatttattttctgtggctacaatttggtctgttttccaagaatcctcattaaatcttaaaccccaggatatacccctgtcctttaaggaccagtacaacactagcaagcatttgcctgaaaagtcaatcttcagtatagatttccctcaaataaaccctttctttctgccaactgtcaaagttgtctatgtgaatacaaataactcctctaacagagggagccctcctctctgcatgtgtgtttttgggggtaggtcagttaggatagcctct

SEQ ID NO: 43860 - DNA, 1306 bp, Bovine  19866880948145
  misc_feature (1)..(1): n is a, c, g, or t
nttttttctcattttaactctcacctcatatggtcccttggtttgtaacattttgcagctgttttgatttcttttcctctccttggaaattctttgcaaattcaggagaaaaggtgttgatgttttttccttattcagaaattatggtggatgaaaaaaatctgattaggtgactccattgcagctggtcccaactttttactaaaataattgtgagggaactgaaaaggtgagaactcaggccatgaaaaatttagaatataggatgacagtatgccacaatttgaagaaaagcatcaataacttagtgagagatggtggtgaatttgtaaaaagcaataaatagaagaaaaatgccttgattccttttttttgtgacaaagaaaagacatcctgaaaataagtaagaaaactcttttatttcatttatattcaataattgtttcctaacagaatatgaggacctatgccaataggaaaaccgtgtagatatatctctttattcttctggcgctggtgttgacataggagaggaacttccgtcttcattattcctctaacctccattttactgtactctatattattttatcaaataatatcaaaacatttaaacttaaatagactgccaactctctaaacaggatctcgatctaagatgtagcagaagtaaaaggattatgtttgcacatgagaaatgaaagtaagaactgtgaagaaactctggagagtccacaagtctttgagcctaatgtctggaagaaatggcagctggaggcggatgacctctcatcacctttactgtttctcacataacaatattgcagtaagcacctaactgattgtgcttctagcttggcagtacagtatctactccttaaaatagaataatccttttgaaatataaggcagatcatttcacctttctgcttaaaaacactattctgctttctatggcttcccattttatccagcataaaattcaaagttcttactgagcctataaatgcctttagggtactgtccctcagctatgtctctgaaaaactcaccagactccccactgatcattcttgtcagtcacaccagtgtccttggtgttgttttgaagtaagccaagcacgatttcccttcacggtctttatcctcactgttttctctgtatgtcttactggatgccttgggcgttccacatggtttacctcctcgctccccagttctttgctcatatactattttaatacagaaatatttagaactaaaattgtactcacacattcttattcctcttttttatatgcttaca

SEQ ID NO: 43861 - DNA, 1175 bp, Bovine  19866881008184
  misc_feature (1)..(1): n is a, c, g, or t
nttggtagtaagtagatgaaagaaaataaaaatgcccagtttgtctatcaatataatagctggtcaataaaaagaaaagataaaatgtcattatttgctcatttacatggtactttcttaagaccagatagattacaaaggacatattatttgctttttaacactttgatgtacagagtattaaagaatgacatgatttgcaatttaatggtgaaatagatatcataatttattaaacaagatatttataggcatacaacactgcctaggttttgaatatttctctgaaattgcataatgtcttttctgaaaccagcatgagagagaatctatagttccatatcttcatagcaattcaatcaggaaatatttttataatgcacaaaacgactgcacagtctcctcattgccacattcatctccttgttcctgaaagtatagatgactggattcagaaaaggagtgataaatgcatcaaaaatagcaagatatttatccaagtgtgatgtgggagaaggccaggtgtagaaaaacattagtggcccaaagaagaaaaccaccacagtaatatgagctgacaaagtggaaagggccttggataacccacgagaagcatgtttccaaacagtaaacagaatgaagatgtaggaaatgaccagcaagacaaaggagcccacagaaatgagcccactattgacagttaccatgaactccagttcttgggtgtttgtgcaggcaagtctgaggagccgaggaaggtcacagtaaaaactatctaacacattaggaccacaaaaaggtaaatctactacaaaacccaattgaaccaatgaatgtataaggccaatggtccaggaagtgactaaaaagtgtagacacattcttggactcatgatggtcaggtattggagaggcttacatatggccacatatctgtcaaaggccatggtgatgagcagcaccatctcagtgcccccagcagcatggctaaagaagatctgggtaatacatccacaaaaggagatggatttatgcttcttgaaaataccataaatcattttagggactatgattgagcaaaataccatgtcaatgactgaaaggttagccaagaggaaatacatgggggagtgcagatgagaatccaaggctacagtgaacacaacgacaaggtt

SEQ ID NO: 43862 - DNA, 1077 bp, Bovine  19866881553299
  misc_feature (1)..(1): n is a, c, g, or t
nactgtgggttccggtgctttttgctcttccccttttatatccatcttcctttcctcactgcctgtcctgtggacttcaaatggacttcaaactacagcattagatgcaaggacgatagactggtagagactgctgaatccgcttctgcaggatcagtaagatcaagtcactgtcacagatctcttggtatattatctcctggtggttctgcttctccattggaaccctgagtaatatggccagtaatccaaatttcttatttttcctattttttcagggaaatttggagcccaaagtgactgagaccatggggggaggaaatcgttcggtggtgtctgagattgtgttggtgggactcaccagttctttggagatgcaacttgtcctctttctaattttctctgtgttctatgtaacaagcattttaggaaacctcctcattgttctcacagtgacctctgactcccatttacactcccctatgtacttcctgctagccaacctctcctttattgacatgtgggtttcctccattacagctcccaagatgatatctgatcttttcaaagagagaaaagtaatctctttccaaggatgcattgctcagatgttcttcgttcatgttattggaggaactgagatggttctgctcattgccatggcctttgaccgttatgtcgctatatgtaggcctctccattacctgatcatcatgaacttcagaacttgtatttcactcttggttgctgcctggaccattgggatcatccactcactcatccagattctatttgttgtaaacctaccattctgtggccccaataaagtggacagcttttactgtgatcttcctcgatttattaggcttgcctgcacagacacttacagactggagcttgtggttactgccaatagtggtttcatctccctgggaacatttttcattctgattacctcctatatcttcatcttggccactgtttggcaacgttcctcaggtgacttgtccaaggccctctctacactatcagctcacatcgcggtggtggtcttatttttcggcccatgtatttttg

SEQ ID NO: 43863 - DNA, 1828 bp, Bovine  19866880345953
  misc_feature (1)..(1): n is a, c, g, or t
ntagccatcatggtcaacaagagagtccataattcaggacttggatgcaatctcaaaaaagacagaatgatttctgttcgtttccaaggcaaaccattcaatatcacagtaatccaagtctatgccccaaccagtaacgctgaagaagctgaagttgaacggttctatgaagacctacaagaccttttagaacacccaaaagatgtccttttcattataggggactggaatgcaaaagtaggaagtcaagaaacacctggagtaacaggcaaatttggccttggaatacggaatgaagcagggcaaagactaatagagttttgccaagaaaatgcactggtcatagcaaacaccctcttctaacaacacaagagaagactctacacatggacatcaccagatggtcaacaccgaaatcagattgattatattctttgcagccaaagatggagaagctcatacagtcaacaaaaacaagaccaggagctgactgtggctcagatcatgaactccttactacaaaattcagacttaaattgaagaaagtagggaaaaccaccagacggaggcttcataatttagctgcccacaggacagacacctccactagactgctggttctccaagggcagcacctgtgtcctactcaccttcaccctgcctgctccatgagagctcagcacagaagagacactgagtaaaggatgaaggaatgtgcgaagggacaaatgaaggaaaaagcaggtatcagtggaagaactccccaagttcagaacacctctgggagggatgccctccagtcacctctcttggaatgctgtggggcgttttcaaagggccctggtccagacgacctctgaagatgcttctcatcctggttcctgaaatgtattccaactagactagagaaaaccacgttcagtttagagtgtttctttcttccttctttattataagctctcagcaatactaagcatcagaagacattcaaatattccttatctaagaatgcaattcagttcagtgatgagggcagaacactgcccatgatttgaagaattccttctaaccagaaattaacaggctgccccttcatcagactttgggaggacctgtgtcacttgctctgtgagacagcatagtgcaaatgaccacggctgaatctccactaatgagtaacttggtacagtcttctatcagagacatctaaagatttttttaaacatacaactaccttccaggtacaaagtttcagttaggcaagataaataagttctggagatctattatacagcatagtacctagagctaacaatattgtattctatacttgaaatttgctaaatgggtgtatcttagctaagcactgcaccacacacacatgcatacacccaacaataacaataaagggagcaggaggaaacttaggtaagtgatggatagtttatgaccttgatggtgatttatacacttatcccaaaactcaatgagctttatatatatgtgtgtgtatatacatatgtatgtgtatatatgtgtaaatatatatagctttttacatgtcaatcataactcaaaaaagtatttttaaaaaaaaactattttccagatagtcatttggaatggaaccacatctactcatacattcagcaacaatttactaagtaacatctactgtgccgggcatgaggccaggtcagctcaaatccccacggggggcgggtggggagactggaagtccctgtgctcttacccggtgttcgttgatgagaaggtcccgagcagcattaaatatcagtgtgtggaggtgttttgaataaaacaccaa

SEQ ID NO: 43864 - DNA, 964 bp, Bovine  19866880374781
  misc_feature (1)..(1): n is a, c, g, or t
ntctggcttttttatcagcagtcaattatgaatttttgaagtacatggaagttgtggaagtctgctccttttcgttttagggcagttttgccgtgtttagtctgtaaggctctctgatcttagaaatgttgtgacttaaggataaactcgtataaacagtgttgactacattaatgaattgcgatgtttcatagaatagcattggggcttggagtgggccacccaaaatatgcactatggcacgttgattattttgaattaaagttacttaataaacgaccagtgggacactctggccctcctttctgttgcctgaaagcaggaagtacgtcacatgaaaggtgcactccctacatctaaggaagtagaaagacaccctttccacaaaagatagggaatttggggctgagaagcctaatgtaaagaaaattgttacttctttacctgttatcccaaacccatactctgttttgattcttaactaattgagcacccaaaacgtcagtttctttgtcctgtcagttcctcacaaatgtattctttctttgtctaaaaaatagaaaagctgtttcatttggctacttcttaggtcccatttctatgaaagtgtcatgtgcacaaattaaaatgtatttctttctctcctgttgatctgtctcatgtcagatttgtttgtctaaccacaagaactgaagaggggtagatggggaagttcccctctcccttataatgataataaccattggcccttttctttggaggattgtacatcatgctataaactgattttgcaatgcttttgtaggtcttggaggaacgtgtgtgaatgtgggttgcatacctaaaaaattgatgcaccaagcagcgttgttaggtcaagccctacgagactctcgaaactatgggtggaacgtcgaggagacaggtacgtgggggaagctgctcttccatttgtgctgttgag

SEQ ID NO: 43865 - DNA, 1928 bp, Bovine  19866880468927
  misc_feature (1)..(1): n is a, c, g, or t
nctatattgctctcccttatactgccgcactttgcataatcctagggacataccagatctccaacactgctgaattaataaatgaaagagtgaaccaaaaaatgaaccgagaaattcaccctggagctcagctccacacatcagtgctctcagatgccaactgctatcctgtcttcatctccccagtctgcatcctccctgactcagcagtagatgacccctgtcaaccaggtgagctatccattgttcctaatgacaccccagtgtgtgtctggtttttctctcccaagttcaaccgcaaaggaaggtgctatctagtggagttaactgtgctcaagaaaaagcttaacaacagcaacagtaacaataacacaaacaacaatggtagcctttccagtagtattcgtggacactgtcaaaagggaaaaactaaaattaggaaggaaaggactcagatccaaaggtcaggagcttaataagaacctgaagtgtaagttctggagaagctaggccaagacaagacctgaggatcaatcatgggtcaagtggcaggagaggtggagaccacagggggagaaacagagaggctggaaacagggtaagctgcccatcccttggacagggtgcacagccatgaatcatgtcttaaagggacagagttgagcctgacaacagccaaccatctttttccgccagtctgtcttgtgttctgactgtcttgtgcattcattgtttgcagaaacatgtgcccacaaacaatggatctattttggagggcccatctcactctcagtttcctccaggtgcagcacaagtgacccaccactgaccagttaagatggagtttgcaatttcagaattggttgcttacttgttcagaactagagaaaaaggtgaagcaaagttatgaaatgcagaaaagtcaaggcagtcatctttttctaaaagcaaaaaataaacaagagttgaaacacacaaaacacaaatactgagatttatgaatgtaattcataccctagtatactcttaaaaaaaaaaaaaaaaagatgcaagcacagaagcacgacaaaagctttgtaagctaaacttttcttactaacgacaaagacaggtaattgaggcagatgtaaatgaagcaccaccacaatgggtaagtgctgaccacagatttaagactggcaaacctaaacaggggaagttataaataaatatgataacctgtcattgaaaccttgccttcaggaattcggatgatgatctgaaaacaaattcgaatttcaattaccctgtaggaagcagtaaggaaggcagtgtttttatcagaaactggggtgcgagtcagggcggggggttatgtaaagattaggttaaagagacagagaaaatattttccaaggcgcaagcttagggtgagggacttccctcacacgaaagacacctggtctttctgtacttctacgaagttacaaagctgtactccctctctcatttgcagccccacaggttttgctttcaaagatctgcaggtgtatcctcctgcacgtcaaactgaaagtgtttcttcttttttgtgctagactggactttactaccatgctctccacctgactcacagcagggactctgggaccaccgggtcaccgcctttgaacttcatgagggagtcggggcattaaagtggctcgcaatttccctcaagggaaggtggagggagccccgctactctcttctggaaatcgaatctggaggcctgggattccggtcgtgaaaggagcagacgtaacagggattccggctgcccaagtgacgcacgggaaggcagattcggaaaaggctcgcgaacgagcacgaggctggggccagactcaaagaggccgccccccagaacacgggaagggtctcggccaaggccttgggggctttctagg

SEQ ID NO: 43866 - DNA, 928 bp, Bovine  19866880471092
  misc_feature (1)..(1): n is a, c, g, or t
ntcttaactttgaaattagtatttccagccaagaactgccttctagactccagacctaagtatccaactgtccattagaaatctttaccaacatgttcctcaagtgcctcaaaaacagcaagttcaaggttgagcctatcttattcccaaatctgttcttgcttctgtatttcttatcctgatgaagagtatcatcatccactgaatatccaacccagaaaactgggagtcatgttcgacttgttttcatttatcatatacaaccagtttcctagtctaataggtgctactttctaaaagtctctgaactaatgtattctctcctctccatctcacccactgctttagtctctatgcatctctttctaacaagtctcccaatcatctcctataatagctcttcctgatggtgaggctagaatgtcctttccaaaataaaaaaacaaaaactaatcgtgccactctttcacttttgaaaaataccagttactccaacctacggaggaaaagcccaatctgctcttgttaacctgagactagctagccattcatttacatatttgaatatctacgatgtgccagatgctgtcattgtataaccactcgtttccccatttgcctaatattaattttatccaaactgccttataagtacgatttagagtacatgatttagagtacattaggatcctaaaatctcaaagctcatatttgttttcaagaatgtaaacttctttacatgatggacatagaaaatcactataaaaattttaaattgatgtctagtaccaagcttttatagttctgaccaaatgagtcgcttacatcagcaaatcaacaaaacaaagtctctcctcttccacaagtaatgaaatcagaaaaactataggaaactatttttcttgaatatttttatctaccatggatt

SEQ ID NO: 43867 - DNA, 1441 bp, Bovine  19866880488391
  misc_feature (1)..(1): n is a, c, g, or t
naccatctgaagggtaactgtcatattacacagacataccagtgaggactgtgatgaacatggcactaccacggtgtgcaatgtagagcttgcacaagtgagcagcctcatctttgaacaagaatacagggtgggaaaaagagacaggaaaacatgaaagagtaagggcagtggtgtttgtgagtcaacttgcactgactcctcaaaagctgcttgtgcatatcttcccccaactctgctctcactaatggcacgttggaagctggaagtcagtcatgtttggttggagtatttacatcatggaaattggcaacaaatcaggactttatcctcccagagagctggttgttaaacactagtaagggcacaatgggacaagatcatatcatggagggttgagataaccctgaaggatgtggatttagattgtaggcaaggaagagacaacacagtgacctaatcggaacccctttgcattcctggcctcttcattcaaaggtccctccacttctgacctaactaaaacttgttttcctttgacaggatgacttcctttgcacccccctggggcagaagctgttcatcctcacttatctttgatcagacacagaagaaagaagggaacaatattcttttgtgcccctactggctctttcaaccattaacaatcccctctcctttgacatacctggtaggttgcccaaacatcctttgcctgaccactgaaacttagtagagttactgttcattttcccaaatgagagctttggtgcctcctttcccacccttctcatcgactctaaggtcatcagtttcctgggagactcagtgctcatgtggatgatccagcattctaatcttatgattgtaaacttgtcagtgtcagggatacttcactttagctccacttcagacactcacctgcagccatatcctggattgcaaagccaacttaggaactgttgtatctttgaaatgtggttatgatgacaccttgtctacaagcttgaattaaaaggattaagtgacatgatgtatggaaagcatctagaagatgcctggcatttaacaggcatccagtgagtattacttttcttgccttttcaagacagaaagcataattttgaaactctggtatttcttctccctttattttagagtgttatttgaatttgacgtaaatgtctgatgcttatgtagtaaatcctctgctaggtgacatccttagagatctgtgttctagcactcaggagctgctggcatccaatgttatgggtggcaattgtgctaacatgcacaacacaatatccacccttttaattacagaacattcttgcagtaaagtgacactgattctcatctgattaatatttatagttttcagttttggctaaatgccagctatcttcatcatgtgaatttcctcagcttctcagctccc

SEQ ID NO: 43868 - DNA, 769 bp, Bovine  19866880498658
  misc_feature (1)..(1): n is a, c, g, or t
naaaaggaaatccccccaacctctttcgaggaagagcgatggacacccccattggcccaaaccctaaccctgttatcccctcctcccaggctcaacgcccccagaaccttcgagaagaggccgcgcttgaggagaggggggcgtcccggggtgccctctcctccaggaccactcaccgaaggtcagcaggacgcagcagaggcccagcacccacagggccctcatggcgcacggccggtgagtctcaagtcccctttgagctcaggagccgcctccgccccctcctacgccggagttccgaggctcacacctcaagccgcgcgatccgcccactaccccccgagcgggtccggccgcttttcacccccacttctcgcgggcgggggacgggaaacacgaacccaccaatcgtaccgcaccacgcacccgctgtacccaatggggactcgtgggggggaccgcagttcaccaatcgggagctgtccaggtgcggtgcccgatgcccgaagcgtggctcctcccgattggccagtcctggccccttttctccaatcaaatggttccgcgggcccctctcactcggaaccgcccctttacttgggttcttctggcctctaagggaaaccgtccaatgaacgtcagcacagaactcatccccacttgtggagaggtcgcgcggaaccacttccggatcctagagcgcgtttattccgtgcccaggggaagcggtagccatggcaacgagttctccaccttttccgtgtccacg

SEQ ID NO: 43869 - DNA, 988 bp, Bovine  19866880507765
  misc_feature (1)..(1): n is a, c, g, or t
ntgcccacacggagcttacactgtaattggtagaatgctcatagcagtgtcattcagaatagccaaaactgaaaacaatccaaacctccatgaacaggggaacagataaataaattgtggtacagtcatacaatggaatactatacagtagtgaaaacaaatgaaatacacttacatgcataaacattgataggaatctcaaaaacaatgtcagaaaaagtcacagaagaatatataaaacatgataccatttacatataagttcagaaacaagtaaatctaaataatatattagggatacataacatagaatgcaaagccataaataaaaacatgagagttgttaccaaataatccagaataatgtttacctcatgtggtatgtgtggaaggaaggcaaagtgggggagctgtatacatctgagggtattctaattcttaagctgaagacatgtgtgatcattttattctcaacaaacattttaaaagaaaaaaataaaaggttatgtgatacaatttcaccaacaaagagagggaatatctgatatttcagccactgttctgcattgcaaatcagccaattactgtaactggtggggaagaagtacatagtaagaaaggaataaatacgagctattcttcacagaagttaattacgttcccagaaagctgggatctaatgagatggcagtattacagtgctgttctgccaagttggttcagccactggcatgattctggttaaccggttactttgttcactgggtataattatttgtataagtggagaataaaatgataagtgatgcaaatcccaaaataaactgagaagacattgattctactgaattctgttgactttcaaaagtacaaattccctttggcacattctcctaatagtgcatttatgtattaagcaattgaaaaataaagtgcatggtagctagtttctccacactggtcaataacaggtgcccaagtggtcaca

SEQ ID NO: 43870 - DNA, 768 bp, Bovine  19866880523247
  misc_feature (1)..(1): n is a, c, g, or t
nacagcgggcacgcggcgctcgcagacgctcggtcgtggtccagattccctcctgccctcagaccggctccccctaccccccacgcccgatcacccccgcccgcctcccctacccctcattaccccgcccgggtcgccccatgcccccgccttcgtgggcattctcgccgccctcgcggcgcctgggcacgcatgtgacgccctctgcggagaccaactctcctctcctctcgccccgctcccggcacttcaaaacctctaagcgagcttttctcttgctgtgctgtcattgtttaaagggcccgactcgcttgcacatcttagatgctcagttaaagtgaccgtaaagggaaacggtctatcttctcctgcaaacataaaactgcaggtactgggtggggaggggagactggtcagcagtaaatttccttccatcctaaaatccgttgcccctggtgcccagaccagacacgtcgcccggggataggggcggtagtgccctccagtacttcgccccccaccctgccccgccccgccccgctccgctccgctccttccagccttgcccctggacccccgcggtcacgtgaccatcatcccccaccttggggtaccgtcccccgccccaagcgcacagctggaggccggtccccgccctcccccgggagcagcggcgccggagcgggcgcagtgcattgtgggcagaggggcgggggttgggaagatggcggctcccagcctcctcaactggaggcgggtttcttcctt

SEQ ID NO: 43871 - DNA, 2167 bp, Bovine  19866880629006
  misc_feature (1)..(1): n is a, c, g, or t
ntggtttcagaggcctcctcactcgggccagcacagcggcctggattcccagctgcttggagcaggggtggaagaaacccggacccgctccaaagtcgacgcaagcaagggaggtgcagtgggggagcaggactctcttggaaacggaatattggcctcgaggctctccagccttttgagatttccaatgggattttagaagcagctgaagcaccatgaagggcagtaccctggggccagctacgatttgaacgctctgccctgcagctctttggacggaggaacccagaatcctgatctcaccgctcaccaggtaaacagaaatttacaacagggtgacagcctgtctatttcactctggcctgctggcagctgtccttcattttgctgtagacgcaagaaagtagatctgaggtggactgtcccatgcaaaccaccttcaggcgcccccagctgatgtttgtagcatgccagcggaatctgcttcatttttttgccattgctgcaaatccaaaatagtgtgcaagtttttcacatcctgcattgcttttccagacctggatttatctccatctccctacccgccaaagagtgttgatttactgttttcctcatattttcagtgtggaaatcatcggttagctaggacttgataaatgctagcatttaagacaggtatgtttctgagccacaaaagatttaactgagttatgaatcttgttttcggaatctgtcctaggaagctgttctgagggctccaagcaccgccccacttcccccgcaaagaactagcaatcatatgaaatctaaataaggcttattgtaaatacagtagtcatagtgttcaggctgaaaaatgctttttaatgttcaaaaaatgtcctcttatgttcactttatgagcaagaataatacattggctaagcctgataaaaactgataagtaacttatgacataacttaagaagggatacttaatataagaggaaaaggaaaagaagaaaatatgatatccaaacatctgaatgtgctgtggaaaaggcagtccctagctgtttggccctgtgcagccaaatttcccaagcgacattggtttgtttgtcttttcctccgaatgttttggtgttgcatccatacacggaatgcttttgcatgctgcatgatggaattctgggtctctatctaactcagagctgtgcagggcagtggtgagaacatgggctctggggtctgactcacagagatgagtctttgcactgccactttgaagctttgactctgggtgactcttcttatttgtaaaataggaattaagggacatcatatgtgtgaatgtgttgtgtgctcagtctctcagttgtgtccgactctttgtggtcccacacactgtccatgttcctctgtttgtagaattttccaggcaagaatatattccagggattccctgacccagggattgaacccatgtctccagagtctcctgcacctggcagtcgctcagtcatgtctgactctttgcgacttcatggactatagcccgccaggctactctgtccatgggattctccaggcaagaatactgcagttggtagtcattcccttctctaggggatcttcccaacccaggcatcaaatccaggtctcctgcattgcaggcagattctttaccagctgagccatcagggaagcaccaaggctttgccaagtgacaagtgactaccacttttactttactgtgtctggaagggcataatgcaggatcagcagagtactgagccctcagggagggagggaagcttctctagtggtgcatctctagtgatgatgatgctgggggcggggaaagtgaccacacatcctgcactgggccatagccccactttggatacacggttccccctaatagcccagtcaccagacgttcctcacatccacccaagttgtctctccagggcccgacgttcttccttctcttcaaacacctctccttcttttttccactctgcctctctttagttctcctgcctcttcccttgatgagagaaagatgtgctcaccaagccacagccttcaccatttcattcctagttcccagggagcttgattctaaagacttcttttatttcagcatctgccaaagaatgttccaaagaagatagtcccatga

SEQ ID NO: 43872 - DNA, 987 bp, Bovine  19866880775353
  misc_feature (1)..(1): n is a, c, g, or t
ngaaaaggtctgtttattccatcctaaagaaaggcagtgccaaagaatgctcaaactaccgcacaattgcactcatctcacacgctagtaaagtaatgctcaaaattctccaagccgggcttcagcaatatgtgaaccgtgaacttccagatgttcaagctggatttagaaaaggcagaggagccagagatccaattgccaacatctactggatcatggaaaaagcaagagagttccagaaaacatctatttctgctttattgactatgccaaagcctttgactgtgtggatcacgataaactgggaaaattctgaaagagatgggaataccagaccgaccacctgacctgcctcttgagaaacctgtatgcaggtcaggaagcaacagttagaactggatatggaacaacagacttgttccaaataggaaaaggagtaagcacatcaaggctgtatattgtcaccctgcttatttaacttatatgcagagtacatcatgaaaaaggctgggctggaagaagcacaagctggaatcaagactgccgggagaaatatcaataacttcagatatgcagatgatatcacccttatggcagaaagtgaagaagaactaaagagcttcttgatgaaagtgaaagaggagagtgaaaaagttggcttaaagctcgacattcagaaaactaagaatagtctacggccataccaccctgaacgcgcccgatctcgtctgatctcggaagctaagcagggtcgggcctggttagtacttggatgggagaaaactaagatcatggcatctggccccattactttatggcaaatagatgggcaaacagtggctgactttatttttctgggctccaaaatcaccacagatggtgactgcagccatgaaattaaaagatgcttactcctggaaggaaagttatgaccaacctagacagcatattaaaaagcagagacattacttgccaacaaaggtccgt

SEQ ID NO: 43873 - DNA, 1236 bp, Bovine  19866880785810
  misc_feature (1)..(1): n is a, c, g, or t
nctatgtcttgtgacgccatggcacttggtcggacatcctgggagtgccagcatcctaacaggagcactttaggtttctactttactaagcacttttgtatacagtcacgtatttcactcttcgtataaatgaattttatttatatataaatatatatatatatattcattccacaaggaaccaagggtggtaataagtatgactcactcactcctgtgccaattataaattaagtcataattcaagtcctgagacattccagtcattccaaagggcatgaaagcctcattttcacctactagccatttcctagaaatagctattgtactttttacattttgtactctttcaaaatgactatcaggcaaaagaaactcagactgatgtttacaagcttttacagaccatttgtatgtttctgatgcttaataaagaaaggaaaaggaaaaaacactgtcatttatttccgacctttttaaatggaaagacttttttctgagtaaagatttttttctgataacctaagtacattgttaatttccatcattttcccaaaattcctctacttcatgactctgattcatttggtttggtaaaatatgagaaattcaagaaaaagcagcaagaaatgtggcccagtcctcatttttatgaaagcatgaaaatagtcttaaataataaataaactcctcaataagtgggcctaacactgtacccaacaaagaaataggaaataagatttctcaccgccaggtcactatatatgtggtcaccaaaatacaacactttggagcccctccatccagtaagcttcaaaaattcatataaattgccctgcaataacagaaaaatacaggtgttatattgcattattatgacagataaaaggcctgtacaccccatggcccaagatatctacttttttttttaaacttaaaatatttttgcttttacagtttaagtatcgaaatattaagataaaaaacatttatgtgaaatctttgagccctttcttctaagtcaaatgcacttttcaggagggattcatattgtataccttcttaaggatcttttttttacatttaatattctgtaatttattgaccatgtcaataagtattcgcctgccatgtaatttcagcagctgagacctacccatgattcgtttcatcaattatctgatactagacatttaccttcctacctattttgtaagtaacatcatgataaacatt

SEQ ID NO: 43874 - DNA, 2932 bp, Bovine  19866880813466
  misc_feature (1)..(1): n is a, c, g, or t
nctgcctggagctgattccttgacaccagtagtcccccctagttccaacctggcactaagaggcagtgtggctttacaaatgttgtaatcactgaagttaaattgcctttaccacattctccttctgggactttgctagttacttaccctccctgcccagttgccagatttctcaaataacactagaggatacccagttaagtcagttgcagataaacagcaaataggcatacagtatttgggacatgcttattctaaaaaattattcattgtttatctgcaattgaaatttaactggcatcctatattttatctggtaaatgaatcctttggtctcagttttctcatctgtaaaatggagatggtagtggtaatatgcatgggtgctaggttgcttcagtcgtgtccgactttttgcgaccctatggactatagcccgccaggcttctctgtccatgagattatccaggcaagattactggaatgggttgccattcccttctccaggggatctttcagactcagggattgaactctcacgtctcctgcattggtaggctggttctttaccactagtgccacctaggaagccctggtggtattatgcctacctccaaaggcggtgctgaggactaagggagctggtacacataaagaacctaggatgtgcctggcggatagtaagcattcagaatatgctacttaccaattctgtttctgtggttctcagatcactggctggcctctttagttcaggaggtgtgtcttggtttagttttatattctaagctactgatcttgtatactccggcttggtgttaaggactcaaaatcttgagttgggcctgattgcaatggcaactccaacacttaccagacctgtgatcttgggcaagttacttacctctctgagcctcagttttgttatctgtaacctggaaaggaagataaggatgagagtttcctgtacagttgttttgagaatgaaaccacacatgcaaactgcttagcaataatatgtattcaacaagttctctccatctattgttgagctgataactacctccccacttaggacatttctgtgcatctcattttttatacggcttgtgatcccttgggtttattattttccttcccaccagtgtctgcctttctgtggaccccctgggtcaccctgatgcctcaggtcaaagcaaaggcctgcccttcagaaatgtggggacagtagtgggttggcctgctgaagttgctttaacagaataccataacaacagacatttatttctcatagttctaggggctgggaagtccaagttcatcatgccagcagtttttggttcccagggagggtcttcttgctggcttgcagatagctgccttctctctgtggcctcacatggcagagagaaagctctggtccctctttctcttataagggctctagactcatcatggggttcccaccctcatgatctcatttaaacttgatgtcccaaagcctcccctcctagtgtcatcaggttggaggtcagggtattagcatatgaactggggagcacagatatccagtccataacagtaagcaatcactttgccctttagcctggtgggtcacaagcccccagctgagatggctggccagaatgaggaacatgctacagagaaagcctcatgtcccctgaagaacatgtgatgcttaggctcaggaagactcctggagacagccaattccagccagcaggcgacccacccttagccctgccataggcagacactcagtggacaccgcatggatcaggctgctcatttcagagaaggagtcatcagggcacctcttgagaaatcagcctgaagcaccgaggttgccttatcagcccctccctgcacacaggcccttttctgtcctcactaaatcttcactttctggtgaggacatggaggaaacgttaccagctttgaagataattgagggcacttagtgaaggtttaactgattcattaaatgaatgacttataaaatatttaagccatttaaagtaattataagcaattcattcagagaagcacaatcacctcctgaacatggatagttttacaactacactggagtattcaaatgaaaaaatttaaaggttgaaggtaggaaattgtttaccatgtgtttaaaaacagccgtttctgactctagtgtcttaatttgttttcctttccagtgagtataaactatggaagtagacacccctgaggtctacatggaagtaaagtgtgtttatggggacattgactactttttccaaacctgtcattgaagaacatgatctgctaatggatttttcatttatgcttaagtcataatttacatacagtaaaattctccttttttgatgtaaagttatacacactttgatgaacctaaacagttatgtaacaaggaccacaatcatgatagagaacagctaggtcactccccaaaatactctttgtagtcaagttctccctcaacccccaacccctggcaaatacatgatctgttttctgtgcccgtcacggtgcctttgcgattcctatgactggaatcatacagtatgtacctttgtgagtctggtttctctcacttagcacatgcatttgagattcatccatgttacaagatcagcagttcattctttcctaatgtttcatagtccaccatcatctacccagttcatctattcaccagctggaagacatttgggtttccaatttggtgcaaataaggataaagctgctatgaacattcacatacaggttttaatgtaaatattagttttcatttcacttgagagtaaatacttagaagtgggagtcatggattgtatattgaatgtattttaaccttataagaactgccaaactcttccaaagtgcctgcatcattttttcattccca

SEQ ID NO: 43875 - DNA, 852 bp, Bovine  19866880861102
  misc_feature (1)..(1): n is a, c, g, or t
ntgctcgattttcaaggacacacattaatttagttttatttttccttggtgttttaggacaatcagctaaagcttaaactctatggaagcaaaaagacggtaaaaattatacaagggaatatacttgcttccaacgggctcttgcatatcctcgacagagccatggacaaggtggtgcccacatttgagagcaatactgaggtgagaacttcaggtaaaagtaatgtcaagtcaaatccatcttcccttgttcctcagagagtcatgttcatgaagaaatgcaagccagcaccatgggcttgtatttctgtttttagtagaattctgacacctctgtggagaaagagaaaggcatcgcctgaagtgacttagcagcagcaggtgtaggaaagaggttgattttgtgatctttttcatagacactcctgataactcagaccaattgtcacataaatttatcccttgtgcattatggatgaaggcgtatcttccctgtgataaaattcattccctctaatctatttgatgatggccaaagactatcctggggcttcccaggtggctctagtggcaaagaacctgcctgccaaatgcaggagacataagagatgcaggtttgatccctgagttgggaaggtcccctggaggagggcgtggcaacccactcctagtattcttgcctggagaatcccatggacagaggagcctggcgggctacagtccacagcgctgcaaagagtcagacatgactgaagtgacttagcacgcaaagactttcagaacatgcagatctgaactactgttgaaataaacacaggaagcacatgtataatgtgttgtggttagccagat

SEQ ID NO: 43876 - DNA, 1704 bp, Bovine  19866880869286
  misc_feature (1)..(1): n is a, c, g, or t
ntcctagctatccaagatttacctcaccctgtctatggctcggttcccttaacttcaagaaaaatattaatagtattataaaggtcttatgagaattaaaataatacatacagtatattaaacttatagcctggcatatgagaaatgctcaaaattcgttcttatgatcactagatgataaaccccacggggtttttttagagcagggattcgttcttttgaactcgttctgaactcgcttgccttgttcgctgctatgtcagcagtgccctgtgagtccatgtcccagggaaggcacacagttacaatttgctgaaagcatggatgaaggttattactgtttaataagccaggaaataaaggattagagagtgagagagagagagagacaagaggggcctactgtggagagcaaaataaaaaaaagaagaaaattaaccaaagtgttgtctaaacccaagtcaatagacagaaagtcaaagaagaactgtcccagtgtggactgaggccacacttgacagcaattgcatgtttccagcactgagtgatggatagattagtggtaacaccagtagacagaggaactgaatagagggcaagcttgaagcaggtcaatctgaaacagtttaggctttgcatctctttaatttgcactggtcattcaggaaagccattggtcaagcaacaaaattattagcagctctcgggaaagggggcatggaccctgatactacaaaaggtcacaactccaaacacagataaaaaaggaaggtgtcaggggtgtggctgaagccatgagaaagtagagagaaagaacacgactcacgcttggagaaatagccaccacaagacaacaaagaggagccatttccaatttcatactaactctgcctatcttcagaactgtgggtttaagtggtggggagaagggctccgaggtctggtgagttgatcagaatgatgtgtgaatacagaacagtaaccctgggccacactacagcccagcagaatggaccatggagacatcggtactcactgtacctgagagcgtacatctcttcttcattttctggcactgatctgctttgatcttggccgctgtgagcaaataggcttcagtagcatcatatcccatttctgataatacattccagtagtggatgaggtgcagccttgtccagaagctcgggctttgggtctttgttataaagtcggtgatgcttgtaacacaacgtattagtggaggttgttttagtatttcatgccttcaaggcagctgttctgtttaccacatcccattagcctctctgtaaacttcttcgctaatgtgactttagtagatcaccagataaaccagctgaagccaatgccagtcctctggcccctcctcaggccaggctccctgaatctgccagcagagccagcccctccctcttctgagctcacctaggtctgtgtgaagcatttcccaccatggatagcaattctctggctccacaccttcccttctagaaggagagccatagctccttcactcctgaattcccagggcctggaacagcctgggagacagcagaggtcagtgagagatgtctgctgaatgaatgtgcaagggggacaaggagaaaggggagggacggaaggaagtggggtggaggggaagagaaggaaagaaacaagggaaggaggcaggagggcccagca

SEQ ID NO: 43877 - DNA, 1438 bp, Bovine  19866880874544
  misc_feature (1)..(1): n is a, c, g, or t
ntgttttgagaacttgttggcagtgatctggggaaatgcttcaacggggatttgattcaagcctttaattcactgtaaacaactggctacaatgcctctttcattttcccggggttcagactgcacacccaggagctctgagtgcattggcaatggcccttttccttttctcctcatgaacttggggaagaattgagtcaaaaagcacattatttatgattgttctgagactggtttcaggtactttttatccacctactattttagatgatatgtgttaagctaactttttgaggcattgtcaacctaacatggtctttgaccacatgtctgttccattccaaagaccatctagtaccacgggagagaatgagagggaggccagaaggctctgggctctgaattcctgaggccagctcctccctggatatcccagtcagccaacccaataaattcctgtcttttccttaaacagctttgaaatgacgttccatttcttgcaaacaaggatccttacaaatgcattccttgtaaccaaaacagtacgcacatttagagagaagcttgcaggggccagatgataataataggtaccatttacagagcttaatttgcacccagatctatgttgaccatttaggtacattattatcttttttaattcttatgaataaacttagatgaatatattactaattccatttttcaaacgaggaaactgtgacttagagagagtgacttgctcaaaatcacacagctagtatataaatggtgtgacagggatttgaaattagggctttctgacttcaaagctgatgctctttaaccacaggactctagaagagctattttggctaccccaaaggcaggggaggtgggctccaggtaacagatgtcaatgtgtgttgatgaaattcacagctcccagggaagttggtccactttcccctgagtgctcggttactctaactactgaggtcatacatctgaaaagggtggtatcttttcctgtccagcatgttgtcaactctaaactctgtttgagataaaataagaggctttagaaacctgatatggcacatctaactgcaaggcacagcagtggtgagccaaggaagggaattcctgaaacaaattcttataggaaaacttctaaggtaattttgaaatgcaaggttgagaggagttcttgagaaggtttccaagaaaaaacttcttttgtttacttttttaaaagaatatgagattgttatagagattcagtacgcctgattggcatctttctccctctctttacaatttcatctcatctctgacggtggcacattccatttaaagctgctgtaaagtggtgtttccaatacttgcaggccaaagcgttctaattaagtaggtgcccaagagatgtttgcatcttttagagaggagctgatggtgt

SEQ ID NO: 43878 - DNA, 4444 bp, Bovine  19866880882890
  misc_feature (1)..(1): n is a, c, g, or t
ntgtgcctatgtaatgaagcatcaaagactctgatgctgggagggattgggggcaggaggagaaggggacgacagaggatgagatggctggatggtatcactgactcgatggacgtgagtctgagtgaactctgggagttggtgatggacagggaggcctggcgtgctgcgattcatggggtcgcatagagtcagacacgactgagcgactgaactgaactgaatgaagtgtccattaaaacctgaaaggatggggttcaaagagtttccagtggatgagcactttgaaatttggggagactgatacacaggaaagggcatgggagctccaagttcctttccaggtaccttaccctatgcatctcttcacttggctgttcatctatttcctttatgataccccttatgataaattggcaaacataagtaaatatttctgagttcttttctgagttctgtaagtcactccagcaaattaattgaacctgaggagggtgttgtaggaccctctaatctttagccagtggttggaagcacaggtgacagctggacttgtgactggtgtcttgaagtgggatgcagggagtgtatcctgtaggtgtgagcccttctcctgtgggccctgacactatttcctggtagatattgtcagaattgaattgaattataggacactcagctggtgctgggaaagattgaaggcaaaaggagaaggggatgacagaggatgagatggttggatggcatcactgactcaatggacatgagtttgagcaagctccaggagacagtgaaggacagggaagcctgtgtatgctgcagtccatggggtcgcagagagttggacacgactgagcaactgaacaaaaacagctggtgttggcacatttctttttggtgatgggaaaaaaaaaccaacaacaaagtttttctttttcagtccattgtgatttgatacctttgcaaaatacattaaaaatgtactactaaggtagtgtaataccggcattaagaaagacatatagatcaacagtcgagaaacaaacccttagatttatggttactggatttttaacaaaggtgccaagacttttgctgaaaatcaattaatttaatggggaaatagtaggcttctcttttcaacaaatggtgctgaaaaaactaaatatccatatggatatttaaaagaatggaactggattccttccttatacggtgcacaaaaatgaactcaaaatcgcagacctaaaggtaaaacctattataagaaaacataagagcaaacttttggaatcttggcttaggcaaagccttcttaaaggatataacaccaaaagcactagagaaaaagaaaaaatagagaataattttaataatattaaaacaaaacttctgtgcttcaaaggacaccatcaggaaaatgaaaagataactcacagaatgggagagaatatttacaaaacatacacatctagtaagaggtttataaccagagtagacaaagaactattgcaacgcaatgataaacaagataaataacccaactgaaaaatgggcaaagggtttcaatagacatttttccaaagaagatatataatggccaaagatgtgagcaggatttgtaaatcagtaggagacactgtgggtcccccagggttagcaagaccaggaaatcatgagcaatgaaggagcaatgggagggaataatttcagaatctttggagagagacttccctggtggtgtagtggttaagaatcagactgacaatgcaggggaaacgagttcgatcccgatccgagaagatcccacatgctggggaggaactaaacccgtgtgccacagctactgagcctgtcctctaggtcctgtaacaactactgaagcctgagcacagcaacgaagtcccagcgcagccaaaaataagtgaataaattaaaaaaaagaatctatggagaggagttgaagggtgagggctgcccagacaggactgtggcctttggtagagagacacagcaaatccactgcttccagcgagaaagtaatcaggaaaatacacaccccaaacccactctctttctgcctttgatttccttccccattggtcaaactcaggagtagagcttgcatcccccagtaggaaccccagtggaattagggtgagtatagaataggaataggaaatagagctgtgcatgtaaaataggagacagagggaaaatttatgcatgggatggaaagtcaaaatgaaagaaaaaccacggtgaggatcagggcaggaacaaggaaagtggggtgggaacagtatatactgtggctgcctgtggagtgtcaggatgttctctgaggggtagaacccaggggcagttgggctttgagcagaagtgacctaaaaactattctgctgtttcctcacttctgtttggagcattgtcctgggccagaggtgatctttctcaaagggccagatggtaactattttgttttttttcgtcacagttactcaactgccattgtagtgagaaagtagcctcagacaatacataaatgaattatttggttgtgtttcaaaataactttataaattacagagctttataatctgcagggcttccttttagctcagacacttaagaatccgcctgcaatgtaggagacctgggtttgatccccaggtcaggaagatcccctgcagaagggaatggcaacccactccagggagaatcccaaggacagaggagcctggtggtctacagtccaggggaacacaaagagttggactgagccactgacaactccactgtgtttacagcaagcctgaaagctataaactcttaagaattttttttatcattttgcctttaggtagacttgtgatgtatctattcaaatgacctttcccagttctggcttctgacagataaacaatctggacttctttcagtgtaccaggaatgaatgagtcagtagattctgccttaattcctacagatgtctaagaaaggaagcatgagtgtctgaggggccactaataagtgacatgcggcagaaatttccagtgtccaatctccaatgtcttcatctcaaatattttcctaaaaataggtgagactaaaggaaggaactccaggagacagtgaaggacagtgaagcctggctgtactgcagttcatggggtcacaaagagttggatgtgacttagcgactgaacaaaaggaaggtttgcttttcatgccaggaacattctctagtctggagaaatgaagatgaagcttggaaatcacacagacctgagtttaaagccagtcacttacaggttgtttgaccttgctgagccagctttctcatctgttgaacgaagataatccttaccttatagggagcaatagctgttattattataaggagtcaccaaaatattgggttggccaaaaatttccttttggattttccatatcatctgatggaaaaatctgaacaaactttttggccaacaaatatattcctgtttagagcttttttctctccttactcttttcttttcccctcttgaagactattggttctaaaagtttgttcccaatctacaggctttccccttaggttctctgatgctccttgggcaaatcaaaaataggttgcagacagtgtataaactgatggagatcctttgtttttttattttttatcttattctttcatggaaaggcattttattttcaatatagcggggtgtacaagtcagtcccaaactcccaatttatctgttcaccccgtccctgcaaccataaatttgttgtctaagtctgtgagtctgttgaagattctttgcttatagcaatagaaactgaattcaaactaatgtaagaagaaaaaaaaaagaaagatggagtaatttattggatcctggagtggttctccaaattgaaacataactattcagcctcaggaaagcatggatttcaggaactgaactcatattctattttctctgcatttcttatgtggacgagtattttctatacttcaagagaggtgtctgctgagaaccctcagtcatgtcacagcttcaccacctgtgaggaaaggaaagttctttgcctcttcttcccctacagctgtatttcaaaaccccacgaaagggtcctgtctgtcctgacttgggttggcacccactccccgagctacttgctgtggctatggacctgaggcaccatgacctgctgagcttgtgtccagcacacacagcacctgattggccacacccgctcagaccacacggctggagtgggggacaagcacttgtcactaaaggagagtgatgtgacctgaagaaggatggaaaggcgtgctcggcagagagatgcgtgctatatgcacaggccaaatctgctctattcagcacatcgacacagcgattttcccaagtgcctgccacgattacag

SEQ ID NO: 43879 - DNA, 1826 bp, Bovine  19866880948162
  misc_feature (1)..(1): n is a, c, g, or t
ngggagtcaacaagcatttgagaagcaagtatttattttcttaaataaagtggagtcaatctttcatcattttaatgcttaccacagagtctacagtgttccgtccttccctctgctcacctttttctcacattatccacttctaaagagccacctgaaatatccaaaaagtacttactttcacagggtgacaactctaattagggggccatatgagccacagtgacatattctgagcatttcagaaggctccttaacaccggcagggttggatccctttgagaacctaacagaagccatagaattctcgcccctcagaaaaacacaaacacaaaccttgtggaaaacttcagggagcttgactccgaagcctattcatggtcaccaagaaagatgccacattacactaactttaaaaccaagccttcacatcccccacacagcatatccagaccaaagacagcaaatgaaggaatgaacgaatgaatgaatttctctcccattgacaacctagatatgactgagtctactgaaaatcacagtcaagattcaccaacgatttcatttcttcattagtttcttttgtcaaaatcaatgagataataaccctggtcttgtttttcttttttacatataagattcatctgaaaacaggaaacacattttaagaaacttgaaggcagacagttcacaggaactaatcctgaggaagggagaaaccagtggctcttcagcatccaacatcgaagagcatctggccattatcaacaggtcactgcccagaatgtcactttccgaataggactgcatggcactgtccgaacgaagtcagtgaaacaggatcacttacagaatgaccaaaagctcctctttcacaaatgacctttccaagggaagttctcgcagcctgctgccattagaagtttctatttagaactggtgctgacaggaaagtctctccccctttctgctacctgagaagagtatgcaaagccctcaaggaaacacgactatgctggaacacggtgctgacagtcagcacatctccaggggctgcccaggaatgaattctccactggcgggaaagcccgcggtgtagccatcacatgaacatcaccagaaagcgtgcgtgtttaattagtcatcacttgaaataaacaccaggaacatcagtagcttaaaaggagctcaacaccccatgcaaccacttcaagaaagtgctaagaattaatgcaagtcattacaaggcaaaagcaaagaatgccaaccactcagacagagagaaacggtctgtctaaactgtggactccaaatataaacagaagggcccttgacgagtcagttatgtacttgcccaaagcagagacaagagtgggtacgaattaagagagcgaatttcttttgcactcaatggatgataagagcaagatgccacaatgaggacaaagatgtggagagacagttctgtcactctgcccaaagccccaaccatagccaagtttcaaggcagccaccctgaaccgggaggtgactgcctttcctcgggcaaggcagcaagctgggcaacccccgcacactcacaggtcacccacttgctcatcccatggagcactgggacacccagtggaccacctacaggagtcatctgtcagctttctgagactctgtttttgcttatttttatggtggtaaaaaaagcataacctaaaatttaccattttaaccatttcagtgtacagcacagtggcactaaggtgattcacactgctgtgagaccatcaccaccacccatctccagaactctttcatcttgcaaaactgaaact

SEQ ID NO: 43880 - DNA, 1264 bp, Bovine  19866880951009
  misc_feature (1)..(1): n is a, c, g, or t
ntgaaggttaactattctttaggaagatcaatccaggtcaatttgggagatggattggaggagcaggataagagagagataagaggcagagagactggttagtgcttcaagataattaggtttgctctgatgcgggtcacttacaacacatggactgtgtcacagttaagttaggggactttcccattagaactcctcgggtactggtcatatttcaggaatagaggagagcagtcatgtttatgtgactcttcggtttatgtccaatgttgactttctcctaagtgttcaggagggtaatttgtacactgaaaagtactgttcttgagctgaaaccttcaggtagcttttgttggagtgacaaatgaaggcttagagaaaagatacaattatcaaagtctaggtttgagattgggggaaagaggggcctcttctcttagtaaaataacatcagcattagaaacctttgtcctacacatactggttgtgatatcttttgtgtaactaccgtgaaaacaaatatttgactcattagtgatatagcttgctttgaaaccaatgctggggatatggaagactaagacagatgaagaattctaattctgttctcaaggtcaccaatttcaaaggaaacaaagttagaatcatgcaaagtacgaacagtagattcctttcttacagggtggatagcctgtttgcaaagttgtttgctattgttgctatttagttgctaaatcacacctgactctttttgaccccatggcctgtatcctgccaggctcctctgtccatggagtcctccagtcaagaatactggagtgggtagccattcccttctccaggggatcttcctgacccagatctcgaacctgggtctcctgcattgtaggcggattctttaccatctgagccaccagttacttaagggcaagaatctctgttctctctgaagcaagctctgttttacctgcctgcatgcaattgtaaacagcacagatacacataaactccttcattttgggggagtgggctgctttaatgctttcttccattttaagagaatatcttgtccctacccattgatcattcctgctgagccttgttaaaaaacaaccaaccaaacaacctaaaacttcattgcagacatgtgcccttggttaccactaggtttccagcctcccaagaaaatgtgcctatttccctggtctgtggagctctgcccagggccacacactgtcagctcccctttgcctataatgcagca

SEQ ID NO: 43881 - DNA, 879 bp, Bovine  19866881081794
  misc_feature (1)..(1): n is a, c, g, or t
nccattatcacacctaagaaaaataagagaaaggccaggaagaagacccaagccctctgcttttattcttggcctttctcttaccttcacaacaaggatgcccagaactgtatcctctgcacctctgtaagctctcctaggctgagtgacttctgtgttgtggtttctctatagtaacagtcaagccttgaacattcagagcccataggcctgactacaggatggcaagaaagaggcagctggggtgtcacctcacagtcagtgttggaaagagggaatccttaggaaaggccctgaatggtggcaaggaggatcttgcatggggagttgtttaccagatgccagactttggggctgcggccaaatctggaaagaatgttttgagacctggcagttgctaaggggattagctctgccttggaagaaaaggcaaaactgggaaggactccagaaaagtattccaaaaatcagagcccataaattttattttacatgccaactctaatcagttggtaggagctttcagaattgataaatggagatggcgtctaaagccatcaccagactcagtaaaagaaagaaagagagagagagaaaagaaggaagaaagaaagagaaagagagcactgtgattgattaataatgtctgccatgggttcaggtaaagagtaatgggaaaggatctgggaatcaaaaggaagataaaagtgagggctcctaaaatgtacttttgaatgacttaaatccagcagagcatataccctgagtggaaacaacacaggctttgtgactttgaattcctggttctgcctcatttcttactgtgtaatcttgggcaatttacaaaaccccgatctgtgaatggggactgttttgcag

SEQ ID NO: 43882 - DNA, 1402 bp, Bovine  19866881105734
  misc_feature (1)..(1): n is a, c, g, or t
ncatgcattatgggtatacctcatattgttagcatcctacctgtcctccatgactgctctccttcctgcagttgcaggctgaggacaggaaggaacctttctccctacatcttggcatacctatcatacacacagggcttacagaattatgccttgatttctcaatcctgactagtctgaacattgcaaaagagtagtgatgtctactgtggagcatcagtatatagacacagtaggtgctcaaatgtttgttggatagaaggtaccatcctgttaataaatgactgaaaagatggacttaaatggctactgtactgttgcaatggaatataagcagaaacccattttccacctgacatttacaatctagccaaggcacaagacaaataaaacagcactttggcatctgattttataaatattatacacttgagccatgctaattatgaaatataggtatattttaaatggagtttagggattgagacaatgtaaactacacttcggatagaagaatccttaagctacggttggggaaaaaaagtgtgacaataggtagctagttagaagacagtccaggtagaagagagaataaaagcaaggaagaagtcattttcaaaactatggttgttacattaaaatataaacctgaaatacacatttcttaaaaataaagggtaccaaagacctagtgtacctccagtacttggtccttgagttcaattgctggttgtgcatcttctaccctgtatttagtggagaataccacttggggtagaaggggtaattaaaaaggatttaactcatttaagaaatgtaactgtccttaacttcatctttaactattatctgaaaatgtaaaggcagtccacatacaagcagaaaacctaatgctgaaagacattatatgtaacagattaagaaaatttccatctgtatataaaatactaaatataaatcacaagtacaagaccttttctttagtaaatctaatcattttgtcaacttctctataatggagagtggtagacacttaaaacccattagttctttgtgtagaagctgtgttatcttctaatgggaggctgggcgagagcttacatcctggcagggccttccctgaggatgcttacttggttgagatgtccttgcctgtctggtatgcctgggctttcatgatcctctccatgttgccagaccacccgtactggctggctaccagagcacacggagactctgtcaggcgctgagacaccacagccttctcgatctttggaggagaaagcgaaagttagttatctctaaatatcaacaataaaggtcgtcaagtaattgcatttcaactccttaaggactcatcacttaggatcacaaacaggcagttcagaaaaagtacctctta

SEQ ID NO: 43883 - DNA, 1512 bp, Bovine  19866881126822
  misc_feature (1)..(1): n is a, c, g, or t
ncattatctgtagcctaggcctcggttactttttaacccatggaaggtaataaaaagagcttaagacctcattatgtgcacacattgtgagaagtgctttgtgcacctgcttatttcaccctgttaacagctcaggagacagatctcagaaccctcaacaatgaagaactctgagtcagaggttcacattcttgccaaagttgcacagcattaagtgccaaagcactttaaatttgggtcagtctgtaaatagcccaggctcctgcactactccaatgctaccttctaaggacacaaagtattgcaaattcaagttagctcattgattcatttgtcacatttactaagcactgaagaggttgtaatacagcatggaagataaataagcacggcctctgcaataaaggggcttgcagatctagagtcttacgcatctctttagatggaattccttttagaaagatgtgtgttgatgggacacagatagacctttatgagaaggtgaaggcctttgttttcaagcaaaaatagctttgtcttgggttatactacccttggtccaaaaactactacaactggtaaatagtttctaaagggccattaaatgtcatcctaagaacagttatagttttatgttatgagtgaaagtttcattgtattcaacaagcccaaaagtttctattttgggaaatgtaaatcaataataggaacaagataatcaaccttccccaacatctttctgaaaagtataaccaactctttaaccagtattttattagtttatttcaatcactactcacttcaccccttgtttttttacattcctcttctccaaaatgacacctaggggtattcattcattcagtcgtacctcccatctatttattgcttgtcatcactaatacacagtttggggcacagattaaaatcaaagattcttcactgatcaacataagtaatgattatttattattcattacttcatctctttgtggatgaaattgtaagtgaacaaagataaatgatacctgaaaatatctaacataaatacagtagaggattttaaaaattatttcccaatttacctgcagtaacatgttctcaatgctcaagaataactcttccgcttcactggtcttgcccagaagcttcagaaatcttgcaataaagaatattaatcggcatttgtcagcagcagtaaccttaaaaagcctgcattccaacactagaatagaaagaaaagtcaataatcctaaagcatatttggagaggaacaaagaatgcctatcatttaatcttgatgaaagagttaaacattaaatacttatctctatttcactgtttttctctcaaaggatcagcacacctgcttttattaatattaaagtttacatatattactgagtatcttaaactaccacatgaaaaataagtcaaggcctttgactaacttccataagtaaattttgaaaaccaaggagtcaaaaaagagtatttctatagctcaatcca

SEQ ID NO: 43884 - DNA, 1872 bp, Bovine  19866881213399
  misc_feature (1)..(1): n is a, c, g, or t
natttcaccactcctgtcttcctctcctctatttttctaccattaaaatcctgcctgatactttaatcccagtgttcatccatctttctgaatctgatttaccctattctgtaagccagaaattagtgttcccgtctttgaatccccaaggctcttaccattccacatattagcctcatctttgatgcctataatatgctagctattctcttatttatatgtataaaaaatgaggggggtaacttgctagatacatcccaaaggttttttctagttctaaaacttcctactaaaatttcaaaatagtttgtagagcataagtaagccagtgaacaaatatttaccaagtaagcacctagtatttatcaggtctgtaccatgtgctgatgacctaacaggtcaacaacaaagacaaggtctctgtcctgtcttgtagagaagacaaatattacgtaaactgggggcaaggagaaggggtggggagcgcagcccattaacatttccaaggcacaggctctggaatcagatcatctgatttgaattccctgctaataactggcaagtgggatgagcatagtacaataagagtactcagtaaatgttatatatagctattaaataattataaatcattaactaattgctagtgcccaatgctgaggaaaacaaagatgttttatgatacacttttggagctgactccataaggaacctcaatcaaggaagggcatcttaagaagatgacatttacactgagactgaaaggtgaacagcaatcaggcaaacaaagataggacaagaatgttccaggcaaaggaaactgagacacaatactggtggcctggaatgagctaagtagaggctaggtcaagcagtgccttgtggacaagagtaaatcaaattagagttttaacagaagaatgccagcccgatttctttttaaaaagatcactctggttacagtcccgtgtagacaatgaactggaaggaaagcaagaatggggtcagaagaccagtaagaaccatatgctgtgtttagggcaagagttcaggccagatgacgaactttcccagtattgacaggaaacagcactggagagcagaagcagagactacaaagctttttcattggtaaactcagcagacttggtggctgactaagagctggagcaaaaaccaaggataacgctgggattcttacagctggggagacagatggctttccctggagaatgcaaaagcaaggggagtggagtgctgggtgatgaagggagcccagctgaagctggtgaccaggcatgtctagtggaaccaataggtccagctgtgatacttacaagcttgataagaacagagaagctaaagtggtggattccatccagacagcaaacaggaaagaacacaagggatactgataagaatgatcaatcattagatccaagggaaatgagaaatcccaacaaggagttaaatcccattaaattaactatcctaagtatttagttgaactgataatattgttctctaaaatattaagtgcaataaatggtcagctgattaagtagtaaattttattctgtaattttttgatggggcagtattttaactacactaataatctgttgatcaaattgccaacatccgctggatcatggaaaaaggaaaagagttccagaaaaaacatctatttctgctttaatgactatgccaaagcctttgactgtgtggatcacaataaactgtggaaaattctgaaagagatgggaataccagaccacctgacctgaaacctatatgcagctcaggaagcaacagttagaactggacatggaacagcagactggttccaaaaaggaaaaggagtacatcaag

SEQ ID NO: 43885 - DNA, 711 bp, Bovine  19866881246350
  misc_feature (1)..(1): n is a, c, g, or t
ntagaaaataaacaaactgcattctatgctaagaacaaaaatctttagtacgagtttgtgatcatagcctctgaaatttcgaaagctgccacaatatttttccagtcttgtaaactcaaagatataactccctgtttcctgctgtggaaactgggatcatttccctcaccggctaggttaatattaattggctctaatattggcagcctgtcttggtcaagccttattcttgcaaaaccatcccttataatgaaagaaacataaaatatattctccacagtacgagagaaagagtttggatcaatcacaaactcaaaataagacacaggagtatcaggatactttcgaaagtacgtttgcaacaatcccaaaattctttctacttctttttctgtggcttcttgattaccactcagatccagcttcctcagctttgtaggcataaccccattctcttccattttctgaacttttctccggtgattacgtcgcggctttcgcgcagcagactctggtttgaacgaaccaaaaagaaagtggaatgtttcagcttgtgagtatacacgatgtcgcttccttctgtactgtctcccagaaggaaagagctatgttatcgtcacagttattcaacggatcacgttcgtcatcttccatccaatttagacccacaaatataaacagaaagtcacagaatgccacctgattaaaaaa

SEQ ID NO: 43886 - DNA, 2848 bp, Bovine  19866881257692
  misc_feature (1)..(1): n is a, c, g, or t
ntatagcactttgtttaaaaaacttatataactgtgcctggtgacggactgggaagtctggtgtgctgcagtccatggggtcacagagtcggatacgactgagtgactgaactgaactgaacaggtggaacagttctcagagtcttctgagatgctctttccgggttttaatcctcaaatttgacttgaataaaatttttcagttctttcttagatcgactgattaatttttcattgacacttctaaatatagaaggattcaaaccttctgacttaatgtcagtgctcttccaattacatgtgggatgtgaggaatggcttgaccacgggatcatctgtgttacaaagttcagtgtagttctcatagacagactaactggctgacacttacattgtctcttacgggccccccaggtggcacagtggtaaagaattcgcctgccagttcaggagacccaagagacacaggttcaactgctgggtccagaagatcccctggagaaggaaatggcaacccgttccagtattcttgcccagaaaatcccatggacagaggagcctggtggtctgtatagttcatgcgttcacaaagagtccgacacagctaaggctaaatttcactgtgtggatgaacatccccccaattctcagtggcttaaaagagcaaaggttaatcatgtccaccgcatgttggctggaaccccaaatccaggtggatctcctcaacccaggatggatggagcagtcaccatcttgaacatggccagtcagcactcacaactcatgggcagaattagccacaagcaccactcaataagaggcagagtattaatttcaaacaaaagcagcctgcaggtatatgtgcctaagagaccagtttgcctcaaaatgactgacatgacatctggacaaaagacgtaaaaacgtagcccttcaccaaaatatcacagcagacaaatgctgtagctccaggctttgggatatttttcatcctttaggaatgggcttgcttcttataccaaggctgcatggaagtgaattatcgaaactacaattcctggtgcttctaacaaaaactagtattcacagcctgattctgaagcaagcaaacttgcagttctaaccacagtgaacagtgccagcagtgctttatttggggctcatgttacagaggagtacagcatgaacccacaattttaccagtaacaccatgccccttcaatccctaggcctccaagaatgttactgttcttggtcagatggagagattgagagccttgtaaaccatcataaaatggagtgaatagaaaagctgacactacatccgagaacatcctcattcctcaccctgctcttctctgccttatgtaacttaagagatggtgggaatgatgtcaatgtgggaggggaaaaataaaaaggattcatgtgggctttttgaaaaaaaaaaaaaagtaagagagaacacagtaaactggaaaggaaatttaagcttagaatcttgccagaggctgtcatttaaagggttttaaagtcctgagacgtgaggtcccctgtgtgagcgatgctcagagagtgctctgactccaggtaaggttctgtgactgctgtttctctgattcagatctgcagttcttttcaggaggggataagaattttatttcagaacaaaggcagagactgctaattccaccctaaatccatttccctcatccttcttagtgacagagtcccactttggttgaggggagcaatacacccagttgaaacctctgtccccaaactcccttgtaactgtgtgctgtgcttagtcgctcagttgtgtccgactctttgcgactccatgtaactagctatggccaaatgacgaagtcccgggtcaaagagacttaagtgaaaatgttggtggaaaacttctaggaaaactccttaaaaggaaacgcaagcccttctcccacaccagcccctgtccttcctattgtttgaaatatgatggctggagctccagcagccatactatttccagtagtcatgaacatgaggtaaccttgagactgtaaaccagtgtaacagatcagggacagggaaggagctgggctccagatgactctgaagagcaacagcataggcttggactgctgacctccagaagtctttcaaatgagagaataaaccctggtatattaagccattgaaatcatgtctctgttacagccacatacaaatcttaatttatacaaccattttaatgcatatttatagactcatttctactcaagaaatcccagctataactttcccttggatgcgactctcacctccccttagccagcaggtgtctgcacagattcgagccttacccagcagcttgtgttccacggcacttcgcagggactggtgccggaagtacaggaggccattgggcttctcctggagccagtgtctggtggcattgcggaaggcagcccagtgcaacgtggtcactttgtaatgccccttgtagcccagcatgtccaagagctggtatatctcgtcttcggccagcccacaatgtgagatgctcagcagacacagggtgtcagacacccagccgtccaaccctgtgcagacaacacactgatgatggtgacaaaggacggctcacacatgccaggcatcattctacatgttgtgtgtgatcaaccaactcatttccttccatcatcctttaggtagatactataaccgccccatcttacaaataagaaaaatgaagcccagagaggttaagtaacttagcccatgtcacacagaaaccagtgcagaactgggatttgaatgcagacggtgcggctacagaatccacgtt

SEQ ID NO: 43887 - DNA, 544 bp, Bovine  19866881327023
  misc_feature (1)..(1): n is a, c, g, or t
nattaaaaatttatgaactttgagggcaaagagggatgaaataaaggaaagaaaggtatactcattctgattggaaaagcttcttgatttaagatagttgaaatttcattcccattatgtctgtttgttgctttaataaaagaagtatgtcctaacactaattatatcagacatattaatagaggcaattatgcttatgcaaatttttctctggttttggatctgaaatgattcttccacgatgctgttggaagcactgagtgtggttccattttttttttttctgctaaagactaaaagtacttgagaagatgagagacatctgcttttgagatgcacagtaatagagcagcaagtttgcaatttagcatcttccctaaaagcagatgtgaatgttccagcctcttcataattatccattctctcgtcttttgttaaaagagagtgagagttttttttaaagatttatttattttttcggctgtggtgggtcttcattgctgcatgcaggctctctgtccgtgcagtgagcggggcggatggg

SEQ ID NO: 43888 - DNA, 2234 bp, Bovine  19866881327116
  misc_feature (1)..(1): n is a, c, g, or t
ntctcctgtgtctcctgtattgcaggcagattctttacctgctgagccctgggaattatcaaacacaggaaatttaaccattacacaagactgttatcttacgtacagttcatatgcaaatattccagagtgtcccattaaatgttccttatagctgtttactttttgatccagaattctgttgagaatcttccattgcatttggttgccttctttagttaagaacattttagtaggacttgttttgcctttcattgacattgatatctttgaagagcctaggtcagtttttaccctcccctccctgtcccgtatgtcttgaatttgtatctgattgttttctgatattagactcaggttaaacgtttttggcaaaaatactacaataggtaatgttccagtgccacttttaagaatactttttattcccttttaaatgtttgaagccaggagtcttttaaaaatttctaatattctcattttcaaatatctagcaggtcagttactggtaagtgactcctgtcatcaagtcatgatggaggctgtgggctatttgtacaaatcacttgatttaagggccacctacctcggatattctcattcatcgatccctgggatcctacagtgagtttctgttctgtgtctcaacaagaagtatacttcaggttattcttgtcctgtaaatgacctcttgacaactttcattcctttgcagccttctaagggaaattgagcggactcggggtaggagatattggcctcaaggtttgagccagcagtcttctgaaggtcctaggcatggcgccttatttttggagcacttgcttaaattaaactatcacagtgctcagagttcagacacggtgagctcagcaatgtgcaccaaagcagataagctacagggggctaaaagcttggactttgtggctgagacaatttcagataaatcaaaacatgcttcaggacaaggaaaaaagctcttgagacccattgtttccatttcggctgtggaaaagactcgatggaagacacagagtaatgttgaaatatggaatggcccggaaaaagcagcagtgaagaaaaagaaagattattcctctaaaactttacctttgggtaaaatggatggtgtagtaaagctttcatggcaacggattttgtcagctaaaagtgagagtgaaaaaggcctaattaatgcaaattaccagcatcccctggtagagtctcttagcgcaaataatccctggaaatctgtatctgagctcatctcagagaagtggctttttcataacccagattacagttcagtttctcacaagtgttttttgcagagaagatctcagtttgaaacaaagttgatggaagacctcaaatgatactaataaagattttcatgggctcttctgtgtaacttttttctacttgtcattatttagaattcttcgatgagatattttctggtgataatcaaggtcggggattttatttttattttttagccccttgaaatattgtaactgactgtagctaaaaagaacactttttaagtcattcatatttctgtggtaagtagaaaactgttgatatcacagggttccatatctaaaaatatgtggagataatgttactaaagttctaattgtgttatttactatttgtctatgaatttatgaattaatgtttcatgtacacaaaatttataattgctgtcactgcatctcttaagtaacataaggaaggacataaattggaataaactaaaaccataaagttagtttaaagtactagagtccacagatttgataccttatctatcttaaacattttaattgcctctcattttatcggtgatttgtaagatattacctgttaactgctgaggattaattattgacttccttcttgcttatcacccagcgaaatcctacctattacattaggaatccaagtgaaagaatgggcttagctgtgcgactttaacagcactattgcacttaacctcagtttcatcacttagaagatgggggaaattatagtgccaactttttaggatttctgagaggactgcatgagaaaatgcacactgcaagccttcagtgaatagtaattactgtctgtcacgatctagcccagagcccaccttttcccatgaaaacaattgatcccctcagcccacaacttaagcatacaggaatgctttgggttatttgtcttaaatcgtgccccaactatgt

SEQ ID NO: 43889 - DNA, 859 bp, Bovine  19866881509573
  misc_feature (1)..(1): n is a, c, g, or t
nttctctgaaatctttgaacagaagtttctctacacaattcgtgggacttgtctctgaagtcagaaaaacgtggtttgaaatgtaatttctgcctgtctaacgggcagagatttcccatctttgcctttcagctttccccatctcagtaaagggggtgatcattccagacatgaagcccctgttttaggaatgggcacatcctaattcctttccctcactctagcctcaaatacttcaacttctaactcagctaggaaacatttgggggatggaggggcagagtatgactttgttctccagaacattagacttccttaaaaccccacaacagctggctagtgccgcaaacaaaaactacggtagcttacatcccccgaggcaacttttctcctaggcttttacctgaatcaagttgctaaatttgccgtagccgtggttcatggccactgtcgtaagattttgctgcaaagatagtaagaatgggaatgaaacttttattcgtacagttcacaaagcactttaacaaacgctcaactgaataaaatgaggggaagataacataggagactctaggttgtacgcctgcctttctgtaacacaggggctggatggctaagcactgcattttcccagactgccctgcagctagagtcccacatgtgatatggcatcccccaagcagaagtgcttgtacaaaacttataggtagaaagacatgacacgaggaagtggtggctgctagcagggatattagatcttctgatggtcacagggctggaggcatctggtgtgcagactcttgtttcctagagatggggctggagacagagggcacaggcagaagctggttctgggcag

SEQ ID NO: 43890 - DNA, 874 bp, Bovine  19866881599901
  misc_feature (1)..(1): n is a, c, g, or t
naggatctctctttaaaaaaaaaaaagaaagaaagatgtgctaaaaatattcattgtggttgtcaccgatttttttttctgtcgctacttgaatttaaaacagtttgtaccataagttcataaaacagtcattttgtctatgaggtgggaaaagtatgtatttgttctcaatgagagaaaatttcataagaaaggaaagtagctgtatctaattttgtttaattctccacaaactcctgacacaatgacacagaaacttcttggctttcagatctccgacctccatggcaaaatcaaacgttgtcatctgccgtcgtactgctatgctttattaaattatcattagtacgtgtgacctactaactatgtgaccgcgtgcaggagaatgaggatgactgctgtcctcgttccagtggtctccgggcttgccagcctcctctgaacaagagggtgaggcacagcattgagtcttcaaagaggtcacatcaaaccacgcttgcaccacaggcaaggtgaagcgtggatcacagggacaacggggaattgtgtgtctgctggcaggactggaaccgatgccaatcacacaaagacccagccttcagttcagcccttgacaggatgcgattcctttcaggctgactcggccaacagagcaggctcctgaatattttctggctgcgtttcctaacactaacgatgtaaatgaatatttagcctcggatattaactcggagtaacaatgctggttatgtcctctaagtcagtaatcactgagcttgttgaatactgtggtgatttgtcatggctgaaagcagcaaattagttttggggaacttgaattttctcaaattgtcccttcagattccagccagga

SEQ ID NO: 43891 - DNA, 2018 bp, Bovine  19866880374235
  misc_feature (1)..(1): n is a, c, g, or t
ntaagctccggagagtgaccaataatgaggtctcaagacctctacacttgctgcgatgtaactctcagattgaacgaatgtgatttgctcagtgcaaagaatgactgctgaatacacacacatatcctgcctcccataaaaggacatacatcatgaagtattagcaaaatgaataaaccaaggaagaaataaattcaccaaatttgttcaaatacacttaggaagtgttataaattaattcctaaaaaacgacagcaaaatagtccttctgtcaatcaggacagaacagccctcttttgagtaaaggtgcaacattcctgaggggctgctgtggccataaatcagagaataacctttgtctgtacatcttacagaaggaacattcatcatcggggctactgcctgaatagctttagaggcagtactaggtaatagttaagagctttgagagagaggggagggaggctcaagaaagaaaggatattcatgtaactatggctgacttgcggtcttgtagggtaagatccaacacaatgtacagcaatcttcctccaattaaaaaataaattaaaaaaagagcttcaagcatcggagacagcttgaaaggtgagtcccaggtcagccaattattagctcagtggccttgaacaagcagcttaacccatctcaacttctggattctcatctgtaaaagggggacaactgcatctgcctcagagggttgctgtgaggatgactacgtgtctgcaacatggaaagcgccgttattacaaacaataacaccatcagtagcgtcatcttctgagtgttcagaccacgtcacctttcaaccagaggcagatgaataaccagagtacacaacaaaataaacaaaagcaatttaactaagctacatacttccaattttctggttaactcaaaactgacaccacaacatcttcataaagaagtactcaataatttctaggaaattatctaaggaagtcctttagagggaaaacacagtactgggctaaaaattagatcttatttctagtaggaaatttctgggtatttcctaactacctgtttgagcactcccaatttacttaacttttatattactacacgtagtaaaatactgaacatttttggtggtcttgagtctcgtcagactgcaaccccgttttctgtaacaggacaagctccaggggggtctgtaggcaagaacactggagcggatggccatttccttctccagcggatcttcctgcacaagagactgaactctcgtctcctgcactggcaggcggattctctatcactgagccaccagagaagcccacaatacttaccatactttgttgtaaccttttctctacgttacttgccttcctcatcatctccctacgtggttaagctctccaatgcagaatccatacgtatggcttcttcgcaccttcactgcaagtaatggtccccactagaagggcccaataattaactggtgtcgttttaccaacgaagcgtttacctgaatccagcgcgaataatttgctaaaatttcaggacaaaaactcagggaaagagctaactgttctttcaacttataggaacgactcttaaattcataaccggcggcccacaggcccgtttgcagaaacgcaaacttgctttgtgcgccgtagtcacgacgttcactacaaaagccagatgccacgtcttactaaatgccttctccatgcttcaaacggctaagtatattcttagtatatgttctaagaatattctacgtgtatattctaagtatactctaagtctctcgagtttcattcatcgatgaaaccctaacacagcagacaacgtgctcctctgaggtgctgtttacctaggccgctgggaaccaggcctgacgccccgcctccccaccacccgcggtccctgcgcgcgcgggctctcacctcgcagtggccgtcgccctcgggctcagggtgtacagcgaatccaaaaaggacctgctcgtagcatccagcaaccac

SEQ ID NO: 43892 - DNA, 2313 bp, Bovine  19866880567145
  misc_feature (1)..(1): n is a, c, g, or t
ntggaataaggtagcagggtgggtttatgatgactgagactaaatgctggtgatcaaactgctaaaaaattctgatatatagaggacgatgctgctgctgctgctaagttgcttcagtcatgtccgactctgtgcgaccccatagaccgaagcccaccaggctcccccgtccctgagattctccaggcaagaacacaggagtgggtcgccaattccttccccaatgcatgaagtgaaaagttaaagtgaagtcactcagtcgtgtcggactcttagtgacccggtggactgcagcccaccaggctcctccctccgtgggattttccaggcaagagtactggagtgggttgcccttgccttcttcgatagaggaagataattataggttatagaaattctattttatttagaattgtagaaattctgaagtttttaaatatgtcatttagtaggcacatactccaaagttgtagttatctaacataatattatttatttaataatagcttccatataattcctatccataactgatgataatctaaagatgtagggatatgaaacctaccatgtttatggataaatgccagcccctgcaatatctgatacataatatttctgatgacagactcagggaacaacttgtttctgtgaagaaatgaacaaataaacagtaatgtaattcagtttgtaaaaagaatggtatatactcgaaggtacagtcatagaatcagacacaatgttttgtacacgggtcttcagctgaaatggaaaaggttacttgaataggaaaggcttgtaaattaatcctcataaacaatatttcaggaagttaagctaccaaaaacagtgtcaaaatggcacttaccctcaaatagcccttttaccatgcacagtcattagtactttcgtttatacttttttctttctttttttttaaattatgaaagtatgataacacatttataggagacttggaaataagttgtacttttatacttggaaataatattctaaacaatatcacttttatttccatttaatttagaaatccagaatagaatcatgaaattccaaagctgcctctttttcagtgctcatttgcaattgtattaattacttccaccaaaaggtttatatatttttttaaaatcagatgaatatatttgttatatttatatgtacttaattttttcttcaaaattatatctcaacgtatcttgtttatcatcttatatatttaaaagagcataaattattattcaaagccaagattacccataatcataccacctgatgaagaaactatattgatttttcagtattctaatccagtcataattcacatgtataattcttatataagatgtcagtgttacataaatataactttggtttctgtttttatggggtcgctgagggtcagacacgactgagcgacttcactttcacttttcacttttatgcattggagaaggaaatggcaacccactccagtgttcttgcctggagaaccccagggacgggggaacctgatgggctgccgtctatggggtcgcacagagtcagacatgactgacgagacttagcagcagcaagcactttcataatcttcatagttatcacttctaatggctacaaaataactacatcagtattatccattataattaccaaccttttctcccattgatagttacttattttaaatagttcagagataggtgaagctttgtatagtcgtttaacagaatattctaactgtggtcactatgggtattatgtatcagcattaaaaagaaaacctgtaagtggataaatcaaataagaaatgtatcaccactaaaattacaactacatataaagcacgcatgcctgcatacaggagctaggaagaacttgagaaaaataaacactgatttgagaggtagaggttttctttacttttaactgctattaatgtcataatgctatcagcctggaagataacatatattcagtatttttgaaagaaggaaaaataggattaaataggatttctcaagttcatccttagaacttgagaaagtgtgtatgtgtgtgtgtgtgggtggaagaaacacagagagagaaatcagcatcaatccactgggaaattcatctcatattttaggatcttttgctgaacgcctctggctttaaagacaggcaaaatggacattaaactccagatgtgatcagtagctaccatgagttgtttccatgctcatggcacatgactgaaaactgcccttgtttagagattctgtccgtatgtttaaaaggagaattttc

SEQ ID NO: 43893 - DNA, 1641 bp, Bovine  19866880681043
  misc_feature (1)..(1): n is a, c, g, or t
ntacctgcctcctgagaaatctgtatgcatgtcaagaagcaacccttaggactggacatagaacaatggactggttccaaattggggaaggagtagtcaaggctgtatactgtcaccctgtttatttaacttctattcagagtacatcgtgtggaatgctgggctggatgaagcacaagctagaatcaagattgctgggagaaatatgaataacctcagatgacaccacccttatggcagaaagtgaagaggaactaaagaacctcttgaggaaagtgaaagaggagagtgaaaaagctggcttaaaattcaacattcagaaaactaagattatggcatgtagttccatcgcttcatggcaaaaagatggggaaacaatggaaacattgacagattttattttgagggtctttaaaatcactgcagatggtgattgtaaccatgaaattaaaagatacttgctccttggaagaaaagctatgaccaacctagacagcatattgaaaagcagagacattaccttgccaactaaggtctatctagtcaaaggtatagtttttccagtagtcatgttgtgagagctggactataaaaaaagctgactgctgaagaattgatgcttttgcagtgtggtattggagaagactcgtgaaagtctcttgtactgcaaggagatccaaccagtccatcctaaaggagatcagtcctgaatagtcatgggaaagactgatgttgaagctgaaactccagtactttggccacctgatgtgaagaactgactcattggaaaagaccctgatactgggaaagattgaaggtgggaggagaaggggacaacagaggatgagatggttggatagcatcaccgactcaatggacatgagtttgagtaaactccaggagttgatgatggatggggaagcctggcgtgctgcagtccatgaggttgcaaacagtcggacgtgactgagcgactgaacaacaacaacagagatatgtcctgtgcccatctgttgcttttaaaatggaatcttacagcctttattcacactgagatataaataactgataataaccacaaataagaagtttcggtagagctggcatatcctgaaagagacaaaggccagctggaagaggctctgtggcagctgcgtaactggtagcacttctgtagcacctaagaatgggcctttttctacatgaatcatcgaaaaccaaagtccacagtgagtgcagatgaactcaaactttaccccagcatcttgtagcacacacagcaatttcctggcataactgcatgtttacaagactgggaccattcagctgtgaaatgctcggaggccagcacgtgcccgccagcaaggctcaggggcttcgtccagccctccacggcctgcacatcagcattttgtcacaagagaacaagatgagagcggagctccagcaccccgatgggttttgctgtagaaggtgtgaatgctcttctctgaactttgcttacttaaggatttaacgcgtttgctatcaagaatttgaagggaagtggttttgtggggtttgaatacattttttacatttaacttttgggtcactcgtttattggtctaaagccccattttttaattttttttttttttt

SEQ ID NO: 43894 - DNA, 1932 bp, Bovine  19866880755788
  misc_feature (1)..(1): n is a, c, g, or t
ntcagaggaactgaaatttctcctttttattcaggagcagaggttttacattttttaaattatttatttacttatttgaccttgctgggtcttagttgcaacatgcaggatctaatttagttgtggcagaactctaagttgtggcttctgggatctagttccccgtctggggattgaacttgggcttccaccgggaacgtccctgagattctatattatttagaggatttgtacagaaacctgggaaacttgcgctttacaatctgaaataactgagtgaaaatgagccagaaaacaggatgtggtctagaagtctgcttataagcaacctccctaagatacagaggaaaagactgaaggataatgcatcagacgaagcaaaagcagtttgttatcctagagtcttttccatggaccttggaatccttggatcaagctcacccctctgagaatgggactcagtacatccttagaaggaagacatatggtgagactccaacatttcaaatacagattccatcacacatctcctgttttgtcttctttcgtgattcattcccaaccagagttcaggtcacactgataaactgcctacatgtaaaacacagcttagaatactcagactttattatatatacaaaataaatgtatttggctgtgccaggtcttcacacgtgatcttcattgcagattgtgggatctagttcttcgaccagggattgaaccccgggccccctgcattgagggcaggcagtcttagccactggaccatcagggaagtccctggaatacttagacgttgaaggcttggtttgacatataactgatttcactttgctgtatagcagacactaacaacaaagtaaagcaactaatattccaattaaaaaaatttttaataaaatggaataaaagcttagcttgttttgacaaaatttagtataattagaggctagacaagattatgcattaaaaaactgaaatggattttatgtggagaagaaaagagaactaattatatgcaaagttcataaatgtaagactgtctactcctcagctggtaaatataccatattctctggaattcttgtttgctactcttcggtattaatagctaatgaggttgctctacactgcactgctggtggaaacactgaagagagactcaggattttcatgagaccctggagattcatttctttaacgaggacaagatgccttgaatctgtgaaacgttatactaagcatttgctgaacctgaaggtgtagcaagtggtgacagaataatgttatcagtgacctgtatccgttgtgcaaatgccaggaaaataatttcaaggggatttctcaggtatttgtaatagatcgtaaatcaaaaatggctgctgactagtaacatcagacattccaaaagagtttctagagtattctttgaactgcaaatgtaaaagttgttctcaaaagtataaatatatctactttaggtaatccagaaaagaatggataaatataatttgagtctccacaattatctcttaaagtgctctccaagggaaattctaaagtaagtaagaagtcaattctaaaatgtagaaaatggcatctttcctggtagtttagcagttagaactctgaggttctactgcagggagcttgggtttggtccctgatcagggaactaagatcccacaagctgcatggtgcgaccccccaaaaaaaaaaaaatgtagaaaaggagtaaggaatgatgaattatccttttttttactggacatttgcagtggtgatatatatcaactgagacaggtgttgagtctgcctcaaggccacaggtgcaaagccctgtaccaaggccacagaagcagaaagcagaaccaaggtcacccccagaactgactgagcccctttgtaaccattgccaaaggccctccc

SEQ ID NO: 43895 - DNA, 2247 bp, Bovine  19866880911516
  misc_feature (1)..(1): n is a, c, g, or t
ntgctgcacaggcttttctctagttttggggagtgaatgggcttctcattgaggtggcttctcttgtggcacacaggctccagggcacgcaggcttcagtagttggcggctcccaggctctagagtgtaagctcaatagtcagggcacacagacttagctggtctgcagtatatgggatcttcccagaccagggattgaacccatgtctctgcattggcaggcgggttctttaccactgagctaccaaggaagccccctgacttttttttcatggctgcaccatgaggcttataggatcttagctccccaaccgggaactgaacccaggccctagcagtgaaagcacggagtcctaactactggactgtctgggaaatcctagacaccttttttaaatcacattttccttttatttatatgtaagatggaaaaggaaatggcaacccactccagtattcttgcctggagaatcccaggtacagaggagcctggtgggctgccatctatggggtcacacagagtcggacacgactgaagcgacttagtagcagcagcaagttggatgtaagtgaaacaaactggctatttcttgacaacaaatacgcaagaaaacatggatttgtggtcactcttctaacaacaaatatttattcttgaaattcaaattttttttgccatgctgatttgtttgtgtctttttcactccattgtcaaatcatagtgtaatctttttgtgtgcttactcacattcgactctttgtgaccccgtggactgtagcccaccagactcctccgtgcgtgggattctcctggctggcgtgtaaaacaggatcaactctaggggctgggctcccctgctggtctctcctggaatcaatctggggttatagtcagcggacagtccaagatgtcaggtgagtggggctgtgggttggctgtttactggggcacctcagttcccccccaacatgacctctaatctttaggtttgagtgggtttcttggcatgatggtggaagtgttttgcaagagtaaaaccccagagtgaaagtgcttatcaaccaatgcactgaagttgcacagtggtgtcactgggggtccacatgctctgtctcagaaggctgacaggctgtttccatcaagcacaccctttccatgctgaggactcaactgtgacaggtgagctccactgtcttctatcatctagtgctcttgtaagagagcctgagggtctggcgatggagatcaaacatctcgttctaatctgcatttttctacaccagatgcaggcaagaaggcttgcactgtttgtgaacagaaagtgaaagtgaaagtgaagtcgctcagtcatctccggactctttgcgatgacccagggattgaacccaggtctcccgcattgtaggcagacactttaccatctgagccaccagggacatggccgtttgtgaacagagtgagtgagtgacgtcgctcagtcgtgtccgactctttgcgaccccatggagtatagcctaccacactcctctgtccatgggattttccaggcaagagtactggagcaggttgccatttccttctccaggagatcttcccgattgaacccaggtctcccgcattgtaggcagacactttaccatctaagccaccagggacatggccatttgtgaacagaagaaagcagcaaatcattcagtgtgtcagagtagctaatgccaccatcagtttagatcaggcacatgtcatattaaatctattaccttttttttaaatatagttttatatagttgatctacaatgttgttttatagctgatttacaattgaaatatagttgatttacaatgttgttttaggacacctattttcaaacgccttgcagtgcagcctggtctaacttgatagttctgtggcctctctttgtcgttactggttcagttgctaactcttgtccgctctctgtgaccccatggactacagcccgccaggctgctctgtccacaggattctccaggcaagagtgggttgccatctccttctccaggggatcttccggacccagggatggaacttgagtctcctgcactggcaggtggattctttcccagaaccaccaaggaagctggacgtgacctctgctggcacccatgtaatacaacacactcccagaagtgaacgtgctggcaacgtttatttacattacactccctcaagaatctgtatttatacacacaatccagtgccttc

SEQ ID NO: 43896 - DNA, 1767 bp, Bovine  19866880945697
  misc_feature (1)..(1): n is a, c, g, or t
ncacatacaggatttaccacatttcccatcccactagaattttttcttgtgatgagaacttttaagatctagtctcagcaactttcaagtatgcactatgacttacttaaggatagaaatttaaaaaaaaatacaattcaagtgaaaaagtgctgttatttcaaaagtactggtacctgagattttggcttgatgtatgtcttggcacagccttcctattcagacaaaatatatgatctcacttttttaaaaaaagcgaatagtatcaactcagggtcagggctgaccttgactacggctttgagcaccactgttccccactgctggactatggattccttcaagtttcaacaccaagatgattcccttagtctgccagcaacgttcatcatttttttttttttttaggagaggggtggctttgtttggttctatcaatggttgctgctttagaaattctcaaaggaaacttttatctcacaggagacaaagcctcgccagtccaatttccaaaacacaagagctgaaaagctatcagaagttctgctcccccagccgtattctgtataaaaccaccatacatttgctcaaagtcaacccaaactaaagtcagtgggcacttgtttgtttgcaggagaaaatacagccaatacaatttcagaagtactgttctgaatgaactgtatattctcatttttcttacgaagctttctatttccgcagcccacagaggagcaattcaaaaccgaccgcccgaggcctgtgctgtcactgctgccaccggttctttagaacagagttgctctgaaattgcgttttggaaatcccttccacgtaaattgttaaaaagaaaatggcacctaaggaaaagtcaatgtgaccttctcatcctggttcacttcaaaagaacattttcaaataaacagtaagtctacaaccttgcagtagctaatggcaacaggttttcaccattaggttcatttagtcgatgttttcctccattcatagagatttcctggatctgtgttactatacacagtgtttaactttcagaggtgagactttggcagcctggtgcaaatacaggattcaaatacatagtatttttgattaaacttcataggcatgcattgaaaaacgtttggcagaatgcccaccagagcagtaacaggggttagttctcctgtggaggaggtgcagggagatgagttaggaatgcaggttgcagggtggactctgtgcacctctgttatctgagctgatcaacaagcctgcactcccataacgtttaactggtaaaattaaaaacgtaacgcagaggtgctcagtctcatgtttcgctgttgactgagtttaaacgtacctgaatgtagaagtttaagaagaggatgaccagcgtcatcatgtaagaagactggaagatgaggcagcccaaggggaagccgcagggcctgaccacggcgctcatggtgtgggtgatggtgagcaggaactgcacctgtgggcggcaggggcggatcgctctggctctgctgcaagcctgctcccggggcgagacagccccaaagcgcccgaggggcccactctcctctctgggagttttgtcagaagttagaagtgtgtaaaattggccatcgttaattttctctggggaacatctcaggccatttagctagaaacacttcagcagagtaacttcaaaagtattcgtctacatttcacagcaaggagtgagctagctgcatattccatacgcacaggacgcat

SEQ ID NO: 43897 - DNA, 1445 bp, Bovine  19866880948511
  misc_feature (1)..(1): n is a, c, g, or t
ncaaaagtctccgaaaatgcatcccattgtacacataaaatataaagaaatggtatgtggtaatttaaaaaattatctttcctttgatagtatgaattaaaacgctcttttaaaagtgagagtgtactttcacggctatatttaaaatggatagccagcaaggacctcctgtagagcacagggaactctgctcaatgttatttggcagcctggatgggaggggaggtttgggggaggatacacatacatatacgtgtatttctgtggctgagaccctttgctgtccacctgaaactatcacaacattgtttgttaatccatacaaaattaaaagtttagaaaaataataaatggagatcactgacattaaaaaagtgagtgtactttcaaatgtgagggtacagttattttctgctctccactgacattctgatgagaaattaggaagataaagaaaaacataagaaatagaattatctttggtctgcttcccacagagaacgaaacagtctccttagctaccatcctcggaaatgagagacgtgtgaggtagaactgaggtcttctcaggttcttttcatctctggggttttaccttaacttctctcaagttcatacattcatcccaagaatagaactttctcttcattctgaaattaaaaaagaaaagtttagtgcctggggacggagggtgtgaagacacaaattacactgctggctttccactctattattagtttgcttcaggcaagctgtgtatctgtcttccctcctccttaaaagcagatcatctccattctgtgcatctcaaggccacttcctgcacgctcatgactatgtcacttcttggacaaattacctaatgaccctccatgccgcaaattccttagctatagcgtagaaaccgctgcataagagaagcttattgtaaaaggcttaggtaaggacttagtaaatattagatgttcctatttttaccagtatctgtgaaagtgaaagtgaagctgctgagtcgtgtccgactcattgcgaccccatgaactgtagcctaccaggctcccctgtccatggggttttccaggcaagggtattggagtgggttgccattcccttctccaggggatcttcccaacccagggattgaacctgggtctctcacattgcaggcagacgctttaccatctgagccagcagggaagcctcaccagtatctgtggttggctacaatgagaaaagaagggcatcactgctattattcctaaaatactcttagtgaatccgaatttcacttatatgtattcaggtgctaaaaattaagggcttactgacttaccaaaagatacttttcagtactatagccataaatgtcttgctgaaatgaagaaagtccagtgctcaatttgaaataaaatacaaatcaattcaaatatagtataaaagtattt

SEQ ID NO: 43898 - DNA, 1411 bp, Bovine  19866881160076
  misc_feature (1)..(1): n is a, c, g, or t
nacacacaaacccgtacatacacaccctgaataatattggggagaatcagagtttgacaaggtagagggtaccttcagtttctccacttataaattcaataaaatatgacccagttccagaattgtgcatttctagatagctctaatttaatgaatttttccctcaatacgtggctctttggggtatgtagaaaattggactttcacctaaaatctctaccttcaaagtcaagataaaatttaaatctttagggacttccctggtggtccaatgattaaggctctgcattcccaatgcagggggctcaggttagatccctagcagggaactacatcccatacgccccaactaagatctgatgcaaccaaatgatttttttttttaatttaaatcttacacaaaattggaggtccttgagcatttcaaggactctgtgacatcactttaaaaatgaaaagtatttcttcactgtcagctcacccacgccagtggggtgagcaaattgtaacaccttcaaacaaaggtctcttttgtttggtcagtgccaaagccttcaaacgccgttgcaactggttacaaagctcagagataatgcatatttctaggaatgatttagtcacttcttacagactcataccaaagcaaacagaggtagtgtcccgtccttctagaatgacttcatgctatgtgactgtgcttatcggagagaacgggtcagcatcataggtagtgtattgtctgggccggtagacaatgctctatttgtgagggagaggaaagaatatataaattttggagatttgatggtaaaattgagacactattggttgaacacatctttaaaggcagactagtttgagtacattgtgctcacagaggtaggtgtagtcagaaatgcccccgggcgactttcctggcagtccagtggttaagactctgctcttccatcgcagggggcacaggtttgatccttggtggggagctaaaattctgcatgctgcacaggggtggccaaaaaataggagaaaaagaaagaaagaaatgcacttggttctgaatagctgtgccataaacctcgtggtccaggcccccatccagagaagcaggctgctcctatctaaaggtgactcactgcacaagtgtgactcactgcacaggtgtgactcactgcacaggtgtgactcaggatagtatgtcttccttcaaagttgtgactctagcaatgtgtgaagagcacaaggagtctccccttaaagggatcccacagtatattaacttttggaacaaagaatcccttagcaaggtcatactcacatctggtttatttgaatcatttttatagtgctcggtttccttagagcagagcacacttaaaccagctatttcttacaacagtttttgttttcacat

SEQ ID NO: 43899 - DNA, 1453 bp, Bovine  19866881303082
  misc_feature (1)..(1): n is a, c, g, or t
nattgtaggtcggaatttggggagggcacagctgggcaatttgtctctgtttcggccactgagttctggcatccactgagttggctgggctgaaggttggagatgcgtgacgtaggtatataccttcatgtgtatgagtgccttagtgtttcccagactttccttctcttcctctagggtgggagcttggcaaacttttcctgtaaagggccagatatgaatattttaggctttgagggtcttatgctctctgccacaattattcgaccctgccgttagtgtgaaaacagccatagacaataatgtaaacaaatggctatttcaataaaactttataacgttgacatgtaaacttcatatacttttcacatactacaaaatgttattcttcttttgatttccccccctaactgttaaaaagcattaaaaaccattcttagctcataggccctacaatacgggtagtgggctagatttggcccatgagccatagattgctgactgcctacttcagggcctttgcatacagcttgggcttgcagcatgacggtcacacttcttcatgtaatggctggcttctaacaagtgttctagagacagtaagtggaggcggctaggcttttaaggcctgggtcctgaaactggcacaatgtcacttctgccatatgctcttggtcaaagcaatcacagagcccacagagatcaaagcgggtggagaaattaacttcacttgatagggaagtagcaaggtcacagtgcagaggagccagtggggaaataaagagatcttactgtggctacaaatacaatctaccacatgaggatcaggaataatgtgtataaagtgaacttagtcgctcagtcatgtccaactctttgtgaccacatggactgtagtccaacaggctcctctgtccatggggattttccaggcaaatactggagtgggtagccatgcccttctccaggggatcttcccaacccatggatcgaaccaaggtctcctgcataccttgcagattctttaccataagagccaccagggaaccttcttcctaacattcactcagtgtatgatgactcatgttcctattaatagtatcattgttaactctgagaggagagcagttagcattgagattcacactttgcttcttttaggagaaatgtagtgaaaattattcaaatttaggctttgaagaactcacttatactttcctcatctacagtaatgggatttataagagtacttatatttcagagtggttttgggaagttagtgaaataaaatacgaaaagttcttaggtagaacaggcctggtatgaatgaaataactgttattattattgttattattttatggtttgaaaaaagattattattttcagtgatctaagcttttctaggacttctaaaacctaggcctctaaaatgcaacaaggtcccaaatca

SEQ ID NO: 43900 - DNA, 861 bp, Bovine  19866880430830
  misc_feature (1)..(1): n is a, c, g, or t
nctactgtcttctagcgtagggtgccatgaccagaggtagcccctcctctgggagcagatgcaacaagagtaacagggactgcatatttttattactgttctgaatcattggagatattttcatcatctcagtagtcttgcctttaaagcttcattgattaaataaatgtttacaacagttacttctgttgtttttataacactccacatttacaaaatgtctaaaaataaatgcttagctgtgggtagaagcagtcattcccacttaacgtgatcaatatccattttacatcagggaatacataatcttgagtggctagttgtaacttattattagatttggaaatcacttcctgtgtgcttgccatgtgctgagtactgtcctctgggttgataaggtaacattcactgaatgcattttcctacttgatcctcaaagctgacaatttttaagttaggtcttgttattattcctagtgtagggatgagaacagagaattctctcaagtaactaaacaacttgatcaaccttgtcttcataagtggtacagatgagacatagtcctagtctatggcagttaaaaaaataagctcttttaactctaaagctccatcttctaacctttacacaattacagttcaacaccccttctactggcataatgcagaagaattgcaaatattacatatgcatgtgtataaatttaccttgaatataaaataggtaaagattttgtttaactcttcaactgtaaatgtaaataataaatcttgaaattaaaaaattaggttagtatctcttaaaataatataaaaccagatatatcctgataagtacataggaacttaaaaaaaatattt

SEQ ID NO: 43901 - DNA, 3506 bp, Bovine  19866880756261
  misc_feature (1)..(1): n is a, c, g, or t
ngaatttgaagagatgcttagtgttaataaaaattttttaaaaagtgatatcatggcgtcaatgctatgcttggccataatctatccatgtgagcctctttagaatgtggaggcaagttgtagttaacagaaaacaatccttcaaatgcagtgatgcttaaaaagacacaaatttattattttcacttaaacatagaattatatgtaaagcaatcacatttatcaaggtatagtcaagaaatatatttatttggaaataaacttaatctactatttcattgaaaatatcatatgttctaaataaacttttaacttcagagaaattatgaccatctagaataatttggtgccaagaagtaaaatatatatctagacttctgagaaggtatacattttaaagaatgcgacaacattgtacatataagttggttgttatggctgcaagggtactttaattctgagatataattactttaatgaattctgccactgtgaaatattttatctggtcacatttcatgctggaagaagcagctaagctgggatcgatggaattccaaagatttcacatgaagtgagctttttcagataggggaaaatgatccaagaacaaaatctttggggttctcaggaatatcattctttgtaaaatatttttaaaaattattcctgtcactccttagaccttaatagtacttgaaaattatcctgttctcggtggtgttgcctaaaagtggacttcagtgctagtcagatacccctctccatggtgtacatccctagatatggtgccttccttctttatttacccatggatcaaacaaagagctatttaactaagggagaaggtgggaaggccatctcagaagacccttatgtaatctgagtgatggaaagttgcttttctgtgctctcccctcctccacactacctgttctacttggaatactgcttcatatttgcatcttccctcacttttaggggagatgggaatgtagaaaccaagtagtaaacttaccacctgagaagagtagtgtggcttataccacagggatcacaggctgccaagagtcctttttggaatgtgaaaaattgtgtgtgcacacacacacccagtgaaggaaaatgtgaaaatttgcacacatgtgcgtgtacacacacacagtgaaggaaaagtaataagttgcttggagatttctcttggcacaataacctaagttgtgcaaaagtatctctgactacattttaagcaactctctctgactcagagcagaaaagaacataaaataatattatccactgctgtaataaaatgttttggtactcaaaatgccacatattcttttatttcttagagatgggtacttccgtttatactccaaattctatgaaaaaagtcctattcttttttaattgaataaacatttattgagtatctattatatgtcaagcattatactgttcctaaacttacaaagtcaaccatctagtggaactttatgtagacacaatgatgctactgatgattattgcagtgaggtgcccatggtaatgatggagatgaaaatcgagcacaaataggaaattactaagtatccctgaatatctgtagagatttgctcttcaaagtttcacctcaaaaactctttttactttgatttactacctttttatgttgactctgacttgcagtcctcgggaataaagctatgtgtggcattttaagcattctctcttgttggtttcagttaagtgctctccagctacaatcttttagaatcttttactccatcctattttgtatttacctgttaactggtctctctccaaatagccacatctcttaagggcagagactaggatttgttaattttgaatcatcaaatataaagtttcaaaaaattgttgttagatttgcgtttgtggcagaaatgatttgaagagaaagaagtttggcatttagatgaagaggtaatctttattaagctggttagtgtttatcatagctcccaatttgtggatcacttttaagggtactagggccggtgaagctttggtgaacttgttttgacagatgcgatgatcatttagccttttattatataatctcacaggaaaagttcagagtgagatgatgtacagcagaaggacaagaactccaaaagcttaaaaactccaaagattaaaacaaagtctgggagaaacagaatccagagggtacggggcttacagggggttgtgttggaaactttctgtgtgaccaggtgaccaagagcacaagctaaactgacaggtgagttaattacattagtttgaacttcaaatctaatcagtatcttggggtttgaagtccagatagggggagggaataggcaactcaatgactttctgaataagcaattgaaagagtctataaaacctaataataagaatagtgacccccaagggcaggaccactattcctgaggaatgtcaagaatcaaaaaggggacttcctggtggtctagtggttaagacttcaccttccaatatagggggtgcaggttcaatctctgattggggaactaagactgcaactatctggtggccaaaaaaccaaaccatgaaacagaagaatattgtaatagatttaacaaagacttaaaaaaaaatggtccacatcaaaaataagaaacaaacaaacaaaaaaaaaccttaaaaaaaaaaaagtaaaaaaggaagcagtactttaaactcatgtccaatcatcagaatgatgtagtctttggctattattatcattatggttattattactgtcatcatcatcattattattttgccataacttggtgtatcaggaggaattcttgtgcttcctgataagaattaactgtgcagctgagctgactaggctgggttgcattggctagagtagaagaagatattacaaaaagaaggagaaaggagagaaaaatgtgaacatctgtggatgatatatgtaaagttcttccatttcttgaactttataagatgatggcagcaggaacttgacaagagtaacattctctttggaggttgccctccatggatgctcccatttatcacaacttatagaagtcgtatgtgggagagttactttagacaaagccaacccagctgtaattaatggctcaggccaatactgggtctttgcaacaggtgacagcaagttgcctgaagtagttacaatgaaagagaataatctagtggaagctattatcctaagtaatatattttatacaaaacagagttaaggaaaatgaataacagtatttaataatgcacaatatgaagtcaaagagaattttgaaaaccttaaaagatgctttattgctaagttccaccattgctagagaaaaattaaattttatatagtagtcttttgttgtatgttagtaaaatattgaaataaaggaggaaaataatattgcttgaaatttttatttttagaatggatcaggattatacaatgaggtgtatcgcag

SEQ ID NO: 43902 - DNA, 885 bp, Bovine  19866880791113
  misc_feature (1)..(1): n is a, c, g, or t
natcggagaaggtaatagcaaccccactccagtactcttgcctggaaaatctcatggatggaggagcctggagggctgtagtccatggggtcactgagggtcggacacgactgagcgacttcactttcacttttcactttcatgcactggagaaggaaatggcaaccctctccagtgttcttgcctggagaatcccagggacaggggagcctggtgggctcctgtctatgggatcgcacagagtcagacaggaccgaagtgacttagcatagatactctgataaaagagacaatgtaaaatccccattgacagaggagcctggtgagctatagaccactaagcatagcacaacatattatcactaatcacagatcctagtgctttggtgggcaatgatcatgtatatcagaatgtgtaataataatgcttctaagaccaataaataaatgaacttcaatttgaacatatgatattggctttctttagtaaaaaaaaaaaaaatcgacattgtttttctctcaattaaaatagtttaattcagcagtgttttctgtttaaattatggtcagaaaaacaatcaccacaaaactgatttgtacttcataaacattagagactcaaatgttagacatgggaaatcaaaagcatattttattataattatttccagtatatattactctacagaggatctccttggcatggagagtaagtcaaaaattttactcacagcatcctcaaagaaaaagtttatatgaaatacatagtttggttcagggctttccaggtggtagagtggtaaacaatccacctgccatgcagagactcaagagacacaggtttgatccctgggttaggaagatgcccggagaaggaaatagaaa

SEQ ID NO: 43903 - DNA, 1551 bp, Bovine  19866880803052
  misc_feature (1)..(1): n is a, c, g, or t
naaaaatgcattatttggcttcagcatgaaatttcccagatagtccaaggcaaatctgccaaatctatgccaatacttttctaagtattttgcaaattaatctttagaaaggatgaaagtttactttcttaactttgcaattaaatgaatattttctcttcataaacagaacttaatgaaccaatgtttatgtaattgtctgtttgccaattaaacacttatcctagaactcataactacccttcttcgtcaaggagtcagcaatagaaaattctttcttttctgtcttttttttttagtaacctttcttctgccaacttttcccttattcttcctcctaactgtttttgctcatcctctttgctttttactccttgctttttccatttctccaccctgctccacttccagtggagcaggaagtgagggcatagtgatatctcataaacagctaagtggggaacagcaggtgaaggtgtagatcaggcaggagagggaagccatgatcataaagcttgatcgccttggtttaaaacatttagaagctgagatggaggaattttcctggcccagaatctgggaactaaaaaaaaaaatttccattagatttttctcaaatgaagagaagattacatgttcagatggttcaatgtcattggcagtgatgctgaggaaaagccagagagcgaagagctaaaaaaaaataggggcaaactgtctagttgtgcacaggagggaagttgagcccaaagttgagataatgagagtgaatttgaaagagacagagactatcgaaggaatacaacattaaaagaatccctggaggagtcagcaatcagttgcagaaaggacagaagtgagtcacagattagcaatggaatgaatgcacatttatgcgttctttcctagctcctttcctgaaaagcacatatatcaccggatggttatctgaacaagagccccgctgaagagggtgacaatcagcctaagccaagcagacaagtaactctgctacagggaacagccctagaaacaggttttacgatttagcatagatatgtcttttttcttaaaagaaacaatctcagcttatattttattcatagaagccattctttactctattgccttgagtgattttggcggtgagtagatgtgagagtagtagctttaaattcacccgtgcccttgaaacagcagtgtgcagtacattcagcattgttaccctgtcgctcttctgcctgctttgtgggcctgttatgaaactcctcttttcagaaaattgtattctggtgctattattgaattaacattttacttaaatgtacacacacacacacatatctctgagagaccatgtaaataatcaaaggacagcaaaaaggcatactctctaggaaaaaattttaaaatgtctaaaatgccctgcttaccttagtttcaagggagatgcaaggacctattaatgaggtttaccaggtgactcagtggtagagaatccgcctgccactgcaggagatgcatattcagtccctgggctggggaagatcc

SEQ ID NO: 43904 - DNA, 1037 bp, Bovine  19866880949277
  misc_feature (1)..(1): n is a, c, g, or t
ntgaatctgtgtctcctgcattggcaggtggcttctttaccactgagcccctgaggaagtctgttactgatattacttggttattactattgctaattcattaacaggctattggtgaacatctcaatgaacttagagagcatgtatcattatttgcaatcatgataaacaatgtcatattttgcttcatattattctctaaattttaaaactatgttcagtattttataaacatattttaaattttcttgtaaaaaatgtgagctggtattagggtacaaatttattttccttaaaactatttgactataacacaatttccccaaacctcctatctctttattcaatttatttctctaataaggaagcatgccttgaaattgctttctctcgtttttccctatcagaagtccaaatatgttgctctttaacaaacatggtaataaaagcaaagccccaaggctccacttactattatgcaaagactggttatagaatgcaattcttgaagaacatttgcttgcctagaatctattcagggctcaggtaagagtgtcaatttcatcacacttgtctcttgatcattataaagtatgaacttcttgaagagagaaattctatttaatcatccttggaactctcatttctggcacagaatatgacccacagtgggtgtgtttaatgaataaatataaatacttgatactttttagtcactgagttactgatgttcaattttcatttgacttttttttttttttttggtgcactggcagatgactatttaaagaacaagcaataaaaaatggggattgtatctgtatgaatcactctatgagttatttgtatatggatttcagtacatcttatagctaggctttgtagtgattttcaagggaccttggtaagttcaaattcctaaaatcagatcacaagtctatattgcttttttatggaaatgcaaaggccttaaaaatgtgctaggaatgcaaatgcttgctttggtttccaattatactttgcaagataaaggacat

SEQ ID NO: 43905 - DNA, 1771 bp, Bovine  19866880985618
  misc_feature (1)..(1): n is a, c, g, or t
ntaactctgggggaaaaaagtgtgcacacataatttaccaggtcaaaaatctgctgggaaggtcttgccctctggtataagaaatcatgttatgctcaccttttcctggggccagaatacttacagctctctcagcaacactgctgttccttttatgtatttcccagaagactaaaaagtgcaataacagaacacttatatttattattatctaaaacattacagccttcatttccattctttaaaaattaatttctctgaagtgaaatctaatgatttatctgttttaaaactattcaatagatttgtatcttctttaagataaatctgaaattcttggcatgacatacaattatcttcagtatatatctctttcctattttgtccatcatttctcacttctctcctacctcaaaacttacatttcagcaaaactgaggaatttttagttgcctaaacacggtgtgttgtctaatgttttgtgctgttgtacatactgttccatgaggtttacctggtgattcagtggtaaagggtctgtctgcaatacaagagatgaggatttaatccctgagttgaaaagatctccagagaaggaaatggcaatccactccagtgttcttgcctggagaatcccatgcacagaggagctgggcaggctacagtacatggggtcgcaagagttggacatgacttagcaactaaaccaacaccacaagtgttcttgcttgggaaatcacacagacagagcagcctgacaggctacagtccatggggtcagtaaagagtcagacatgacggaggaactaaacaacaacatactatcccatatgtccagaatatgtgggcaggaatcccttagaagaaatggagtagccatcatagcagcaaaaaagtccgagatgcagtacttggatgcaatctcaaaaatgacagaatgatctccatttgtttccaaggcaaaccattcaatatcacagtaatccaagtctatgccctgaccagtaatgccgaagaagttgaagtcgaatggttctatgaagacatacaagaccttcttggggactggaatgcaaaagtgagaagtcaagaaacacctggagtgacagacaaatttggccttggagtacagaatgaagcacgtcaaaggctaatggggttttgctaagagaaagaactggtcatagcaaacaccctcttccaacaatgcaagagaagactctacatatggacatcaccagatggtcaacactgaaaccagtcagcaaaaacaagaccaggagctgattggttcagatcatgaaccccttattgccaaattcagacttaaattgaagacagtagggaaaaccactagaccattcaggtatgacctaaatcaaatcccttatgattatacagtggaagtgagaaatagatttaagggtctatatctgatagacagagtgcctgatgaactatggatgggggttcatgacattgtacaggagacagggatcaagaccatcccatggaaaagagatgcaaaaaagcaaaatggctgtctcaggaggacttacaaatagctgtgaaaagaagagaagcgaaaagcaaaggagaaaagaaaatatatacacatctgaatgcagagttccaaagaatagcaaggagagataagaaagccttcttcagtgatcaatgcaaaaaatagaggaaaacaacagaatgggaaagacttagggatctcttcaaaagaattagagatactaagggaacatttcatgcaaagatg

SEQ ID NO: 43906 - DNA, 1080 bp, Bovine  19866881099206
  misc_feature (1)..(1): n is a, c, g, or t
ntaaacctaatgttttgactttattgtgctttgtcctccaattgttctctgataaggtccttcaggacagctgccctacacacaccatactcacaccttcttatgctctagcaaagtgagaagtgcaaacagagaactcagtaatgattcatgaatgccttaagagtccccaagaaaatatgatcagaggtcttgaccatgattttgcttatagaataataaaagttaaagttgatcctttagaaaagttatctttcctagggatagctacccattgaaagggtagcttacatatatgtatgcttcccaggtggcattagtggtaaagaaccgccagctaatgcaggagacataagagaatcaggttcaatccctgggttgggaagatcccctgagggagggcatgacaacccactccagtattcttgcctggagaattccatggacagaggagcctgacaggcttagtccataggactgcaaaaagtcagacacgattgaagcaacttagcacacacacatacacatattcatatatacacattttaatgtagcatcagttttagctatcatggattaacacaactctaacaatattatattttgaaatagaaaactgaaatctcaatttactaaaaatataatctgatagtaataatttaaaaaatattctttcacaaaatagagaataactaacctagtaggccactgtcagcataataagccccagtaggagaggcacacagattcaagagtcaagcaaggcagatgttaatatattctgttaaacatttgtcatctgagggaagaatatgccccagtgatcaaatatatttaagttgaactttaattctactgccccagctgaaatttttcttttctacatttcaaataaattagaaaaccacagggggaaagctctgggaaaatacctgctgtgctttatggattggccacaattaataaataaaatgaactcttgtctctgaaaaaattgcacttcaatggcacatatttttttcctcaacgctgaaaacacctcagattgacatgaaatactgcttcttatatttcttttaa

SEQ ID NO: 43907 - DNA, 898 bp, Bovine  19866881203383
  misc_feature (1)..(1): n is a, c, g, or t
ncagtccatggggtcgcaaagactcggacacgactgagtgacttcacttgcacttttcactttcatgcattggagaaggaaatggcaacccactccaatgttcttgcctggagaatcccagggatgggggagcctggtggctgccatctatggggtcacacagtgtcgaacaggactgaagtgacttagcagcagcagcactgtagttaataaatctcattaacttcgtttaagaaaccaaagtttctaaagatttggttttgtttttaaaccactgggtttttatattataaaagttgctaatatctcaaggacttcgtattcctcagaggacaaataagggaatattattgtaaaattaagctgtctgctataattggtttagtacaattgcaattagggagatcacttcagaaatctagggaggcattaatgaggattttgagctggcattgaatgatgtgagtattttgagcattgacaaaataagatattctgggttgggatgcaagttgagagggttaacagaataaataaaaatggagaggaggaaaacagttcatggttcaggtgtgtttaaacgacaatgagaaaatcaatatgcctggagacgaggtttttgattgagtgaaaatcaatttggcaaggttgattataaagatccttgcatttggggttaggttctataaagattgaaatatgcgttaattgcatccagaggggaacaaatggggaatgggtgtttagcattctgaccaaaccatttctttaattaaaaaaaagaaagaaagaaaaaattactgttgtttctgtttttttaaaaataacacaagtatacagtgaaaaactcataatataaaaaagggaagcagagtaaagtcaaaatcactcacaaccc

SEQ ID NO: 43908 - DNA, 931 bp, Bovine  19866881218903
  misc_feature (1)..(1): n is a, c, g, or t
ntaggatagtcctagctgtggattgttctataccagaatggaaaaaaggcattgacaagaggcatgggcagagaattaggttagcagagtaaacagatactccataaacttcaaaagtgctatatctgcttggggaaataatactcttagaaagtcttattcttctgcataataaattagttatttgcactaaagaaaccaacaataatgatgcaattttttctgaatgaatcttcctttgttgctatttaatcaagcttcatttttaatctgcatatagaaaagattaaatgctgggtgcttaatgactttagggggaaaaaaaaaaaaaaacattgcctgaatgtttaatatcaacccagggcttcttgtacacctatgtgaaaaaccaagaattacagtagagattggcagtggtaatggttatttgaaatcctgcttctacaaaacaaatggcctctttcaatgctttcattcttcaaatataacacttctctgaatggaaaagacgcccaaccaaaccatctgtcagagaagacagagttcggctgcaaaaggcagtttgttttgctgcactcttaaattttcttacttcaaactagatgaactgtagcaaaacagaaagtactctgcttctcagatgcaataactgatgtagaataacagaaatagtacggggaccgagagttggtttcatttatgtataatctaaataccatcattccacactagggacattttatatgttccctgttgattaaaggtcagctatattggaggtcaaacacctgccttcatttaaaacacagagtgttatgatagtatttgatccctaaagtgtcaagtagagagctttgcatactatttgacatatattcaaactcatatatatagtttatagactatgccttagaaagccggatatattaag

SEQ ID NO: 43909 - DNA, 996 bp, Bovine  19866881342246
  misc_feature (1)..(1): n is a, c, g, or t
natatatatatatatatatatatccccccatatatatataaaccttatttttttcaattattgacaagtgggaaattcctttatttgattctattaaattgttgacaatatacatggggaaaaataatcaagatgatgagaacagagaacagttattctggatgtctcatttaggaatttttaattacatgacagattccaccagttctttctaccagttttcaaatttttatttttattttcttttttttcccagttctttattttaaagtcttctaagactcaaaccaggatatggacgactgagactctgttatcacaggacaccaggtaaaaattgaaagggctggggaacagtcaaggtgattattttctatgagtaaagaacaaagagtagtgttttgtcttttactagatgctatgttcagagtttcttgagaatctctctacaataccaacaggtactttccctatgacagttttatgaatgatgtatcctcaatctgtaaagaaagctttgtcatctaaggcagtgcttttctaagtatggtaacctgagttggcagcatcagcatcactggccatatcccagatcaactggacaataatcatggattttggagcccaggaattcatgcagatttgtatgcattctaaaatgtgagaaccatcagttgagctctccaatatggtagacactagccacataggatatttagatttggatttaaattaatttaaatagaatagaataactcggctcttcagttattttagtcacatttcaagtacttaaatggcacattttgttagtggctacaatgttagagagtaaagatatagaaccagttactgagatttttattggagaacattgcctatcaaggcaatgattcaaacaactgctgagtttatcatgctactttcaattattccaaaacttctaacatcctcacttttttactttcttctcattgcttcattttttattagttt

SEQ ID NO: 43910 - DNA, 1079 bp, Bovine  19866881472076
  misc_feature (1)..(1): n is a, c, g, or t
nttcttacctggaaaatcccatggactgtagccttccaggctactctgtccatgggggtagcaaagagttggacacgatttagcaacaaaacaacaaatgacaacagacacagtacatccagaaaagaattcatctaactttggaacttattttattggaagtgcatactttgacctataaattctgaattggcctttcaactaaccaaagttagagccccttgaaggccaaaagaggcgggggaaaggagaaaaagaaagaaagagaccttacagcctgactataaatcatgtcagtggtttcttcttcactctcaggatgaaatccaagtcccttagcatcacacaaaagacctttcatgattttacctcttcctgatctccagattcatgtctcaatctgtcctcatatgttttcaatacttcagactgatcagcttgcagtaactccaaaagcaacagccctttcatagcctggtgcccttgaacttaccacttcatcttcctagaacccctatgctcttaaattttttacctggaaaatttctattaatccagaaaggctcacatcagaactcaggccatatctgagtgaattgcctttttccctgatctcccaatagcacactcttatattgatttaataacccttacaaaaaagtattttctaaactactctactcatatgtttcctcctctagattttggaaaagtttatgtcccacatctcagcatctttagtatatatcagaccatcagacacatcagagatgctcaataaaggaaaatattttgcagagttcttctactattctatccaggtcagaaataatctcttgcacatggtaacatttttattcagagaatagtttaggctccactcagaatgttgtgttgtggatctatttggatgctgcctcatagcatctaattgttcgatttgtctgtctggttattggcagcctgcagggtgttaggagggaaaactcacagctattttaagagctacttattgagtcagccctgaaagttttgtttatcattttctttattctgcttccttttatattcctgggact

SEQ ID NO: 43911 - DNA, 1324 bp, Bovine  19866881524775
  misc_feature (1)..(1): n is a, c, g, or t
ntacagccactatggcgaacagtgtggagatttctcaaaaaactggaaatagaactgcccatataacccagcaatcccactgctggatacacacgaaggaaatcagaattgaaagagacatgtgtaccccaatgttcatcgcagcactgtttacaatagccaggacatggaagcaacctagatgtcccttggaagatgaatggataagaaagtgtggtacatatacataatggaatattactcagccattaaaaaagaacacatttaagtcacttctaatgaggtggatgaaactggagcctgttacacagagtgaagtaagtcagaaagaaaaacaccaatctacagtatactaacacatatatatggaatttagaaagatggtaatgatgaccctatatgtgagacagcaaaagagacacagatgtaaagaagtcttttggactctgtgggagaaggcgagggtgggatgatttgagagaatagcactgaaacatatatattatcatatgtgaaacaaatcaccagtccaggttcaatgcataagacagggtgctcagggatggtgcactgggataaccctgagggatgggatgggaagggaggtgaaggcggggttcaggatggggaacacatgtacacccatggctgcttcatgtcaatatatggcaaaaaccactacaatattgtaattagcctccaaattttttaaaaagggaaaggctacccactctaatattctgacctaagatttccaggttaatttggaaaagcaaaagactaacttaagagatgctgaattaaaatgcacaacagggttgattcctcatgataaaatcaaatgatactgctacccagtctttgtgtataaaaatgtagtagttaacacattaagatttattttaagtcatattcattcacttcgtatgaaatcaggaattcttctggtattgcttcatatatgttttctgattaggttatttagagatcaagaaaaatgaattataaaacctctatttccatcaatgtacctcttaaaccgtacccactttctcctaatatcccaagcaggacatcaaggattactgcctgtttcagattctaataactgcttcccatttagtggcctgacttcccagaaccattagaaatgaaatgttttcacctaatgtttaaagattacctgccacaagtatgctctaccataattcaggaagtgcattgtaaaaaattgatttttctttaaaattttttgagaaaaaaattgattttaaagtagactctgtaacctttaggaattttaaaagaaatttttaaaactttt

SEQ ID NO: 43912 - DNA, 692 bp, Bovine  19866881535183
  misc_feature (1)..(1): n is a, c, g, or t
naatgtttgcattctgaaggtggagaactgagtatggatttgcctttcctgattttttcccctccattccatggttaaaaatcctactcatacttatgatacattctacatttggaatgctgtttcattcctattcagagctgagagctgtaatggtgaatctaaaaaaactaatatagaatcacagatggtgcaaatatttgaaaataggtaaatacaatctaggattagctgtttgggctcagaaatgtcagcttcgtattgcttattggtcacacaagacagttttagctaaggggaaatccaggacaaaagcatcatggtataaaatttctggtttggagctatgcagtataacaagcccatgattattacataaactccagaatgagtctctatgtagctagaaaaggtgttttagacaggtcacaaagtaccaagaggttatatatatgataaaaattaagtaaatataatagcatggaactgctatcattaatatctgctaaattacatttaaagccaatttttgaggagaaaatatccattcttatagaaatgctgcagtttcacagtacatgacctgagcatgggaactactagattgccagcataaaatctgtagatggtagttattagtagtaagtgctgtgtgtccctatttctgactgagagttttaagcaatataatt

SEQ ID NO: 43913 - DNA, 1816 bp, Bovine  19866881601605
  misc_feature (1)..(1): n is a, c, g, or t
ntcccttacccaaaagtaaaattctttgacagcactccattttataaagctaatgaaagcctttaactatgtgtgaaggctaaaatgaccataggggaatgcattttatattataatgacttaatggaaccaattatattatattaccataaaaacttttaaatagaaaattgtattcaccagtaaaattgtcttacatttcagtgaggatgtgcatatgccaactgcttattataagtcaagattcaagaaatattcaccagttagtattgttttatgatttttaattcaagatccattaatacttcagaagcaagaagagcttttgtaaaattacatttaattataaaatagtcttaaatataaagcatctagggagtatgtcaaacttttcaaaaactgtaactaattaaatctttctagggagaaattggatcatctaacaactctgattcctgaaaaggacatttctgcaacagtgaagaacattagcattctcttcatttccaattttgcattcacttaagacaaacacaaaattaataatcaaattcataatgcaccattagctctgaacatattaatgaacaccattaatattgtttcaaagaaaatgggttttgatatcaaacctaaaatcactagaggatagttaatatatagaaattgtatcttagtaggataataatgcttgagtaatacaaatggtcattcagatttgaaagcgtaatttgaaaaattctatttgaagcaaagaaatagttttgatcttctttaatattttgttattttcataaagcttcattaattttaaaaaagggcttatacttttaatcaatcactgttttacttaaaccattgctactgcttcaacaataaaatgtgtgagattagtaccggaggaaagtaataaaggattttatcacaatttattggttctgggccaatgaaatttttatagataattataaatttatattaaggaagaaaggttgaagattatctaaaataaattgttgtaactgatcaaaataagcaatagaaaatgttaatagtctacactggcattaattaaaatttattttagttacaatgcttaaagaaataataataaattacattaatacattaccatcccctgcaaagaaaaacatgcttcatatcattgaaagttttttaaatatgacaactaaaatcaatttgactgccaatgttattcagttactacaacaataaaaaaatgacattataggtttagataaaaactgcatttatttaatttttttttgaaataaaagacaataagaataatatattgctctacactatgggcttccctggtggctcagacagtagaaaacttgtttgcagtgctgaagacccagattcgatccccaggttgggaagatcccctggagaaggaaatgacaacccattccagtcttcttgcctggagaatcccatggacaaaagaccctggtgggctatagtccatagggtctcacagagttggagtgactaacactttcacttaacttttatgaatataaaatgttattggcattaagctaaattaaaaattgcaaatataaaagaagctcattgttaaaaaaataaatctagaaatcaatgaataaatagaaaatgataaataagtctctcacttagctacctgttccaatttccagaggttatctaggaggagcagaatatatgaccccaaagtggaataccactttgagttattttgagatgacggcaatcaaggcctaatagactgaagaagaaggtgattattaacttctctcttaactgc

SEQ ID NO: 43914 - DNA, 793 bp, Bovine  19866881705020
  misc_feature (1)..(1): n is a, c, g, or t
ntgggggggcatgtctgagttgatgtctgcatgtattttgtctctcaatcatcttttaaatgaatatactccccaccctcttgagcaatttataatgtcattattatatctatacactgcattctacagcaaagaaagtagaatgtgatttacaggtaggaagatcaaagaatatttcagaagtgaggggatatcatttaactgaagagtgacagatgattacaccttgcctcaagtcacctgtgatattaaaaataaattaaatccctgaagaaaagcaaagccattcagtttccacacccgtctgtaagcttgatgtttattacctttgcactagcagcttagagaaatatctttacatagattgattctttcaaagcttgaaagggaagtcctttgtgtagagggtctgagcaatctttccaaagagcttaaatcctagaattcctaatttttctgcattcagattctgagggtatggtctttattatttatatgaaagtgagagatttacctatttggttaaacctgccagaattataaaatttactagtaattttttattgtaactatgaaaaagtatcttatctagttcatgaaacaggagagacaatttatgcatgcagtttacattgaaattggacaaagcctaatatgttcactagacgaaagatgaaaaaggaacacatgtttccaaaatttgtttccccatcctgccctaaccacaatcatttttagagaaattcagaacattacatgaagaccactcaggaaaaatatgtactctctttga

SEQ ID NO: 43915 - DNA, 1799 bp, Bovine  19866880209898
  misc_feature (1)..(1): n is a, c, g, or t
nccccttctcctcctgcccccaatccctcccagcatcagagtcttttccagtgagtcaactcttcgcatgaggtggccaaagtattggagtttcagctttagcattattccttccaaagaacacccaagactgatctccttcagaatggactggttggatctccttgcagtccaagggactctcaagagtcttctccaacaccacagttcaaaaatatcaattcttccgcgctcagctttcttcacagtccaactctcacatccatacatgaccactgcaaaaaccatagccttgactagatggacctttgttggcaaagtaatgtctctgcttttcaatatgctatctaggttggtcataacttttctttcaaggagtaagcattttttaatttcatggctgcagtcaccatctgcagtgattttagagcccagaaaaataaagtctgacactgtttccccatctatttcccatgaagtgatgggacctaacttagttctaatcaactcatctgattaccatctgattagtccaggtgactgtggcaaatcacttaaccaaccgtgttccactttcctcaatctaacttggagatactagtaaactccaccttaggaggctgttttgaataaacagaaagatggttggaaggacttagtcggcgcagaataaatgcatctaccatgctaattactttttattattattgtccaagatcacaaagagagcaggcagtagacctgcctagaacccatgacagtggctacaagtgcatgttttcactctatactaagctgccttttagatattttcgttaacttccaggaaagcagtagaccctgcatacgtcatgcaaaaggattgcagaagctgagggcaacaaagaggaagacagggtgctgggcccagggacaccagaagcaggagccaccaaccagaactgcccagtctataagctgcatccctctgagggaaggcaacacagccaggattgtaaccaactgtcaaccagggccagaggccagccaacactactcacaggtgacaatggccaatcactgtaactgtattctgagcctgtggtttcagtgtctgacaataagccaaatttaagttatactagaattttaatttttcttaggggaaagttatatatgagatactttctagatacaaaagtaagagaaaccaaaatgtgcaatgtagggaatcagacagaagcatttcatctgggatggactcctcccacaaaagcaaatacttcttatggacttctacagaaaataatctgaaaaggaaacaacatgttaaaaatcatgtaatatattccaaaggtaaacaaacatttctaaaatcacttactgccaattcatgtatatggattccaggaggttaagtaaatcatgaaggaaaaacctccaagactaacccacttatttagccttaatggaattgggtttccttcaatattgttttaagtaagtggatttttggttggggtctagaaattgtgtggttatagggatatttttgttgtaatggtgtttgttacagtcagatttgatttgtacatctcccaaaacaaatgttatgacaaccagaaaaaaatttgggaatctaggccaaacaaaactaggtctttaaaaatttcacttcttgtaagatgcaaagactgtacaattctctgtcatatttattctgaatatcagtgatgcatcctctacatttttgagagccaaaggcacataatttatagcagggtttctgaaactatgcccttttcactgggttgtggcat

SEQ ID NO: 43916 - DNA, 3404 bp, Bovine  19866880407582
  misc_feature (1)..(1): n is a, c, g, or t
ntggaaggaatgctcatctctccacctccatattatatagtaaaatacttttctgtgatagcaaaatatagaaacaacagcttaaaaactgaaagagaaaccactataaatctgccattttcttaattatgcctttcaataaaaattaagggaaagaatgtaaataacatagttattaaataggatttgttttgtcatatgtcctgggttgagcaaattcttttataaaatgccacaataatcaagatctgctttctgggagctcacacttacagagtacctaagccagaaacaggccaacacaaaagaagtacagcagttaaacactatctataaacagaagagggaataggggttataagcaggaaagcagtatgagcaagtcattgattattgcatttttatttttaaaaaagcataaggttatctaccttttaagatttcagtaacgaaatatcagtaaggttattaaaggatacagaactaatgaatgaaaaatgggtttcaactcaaagaggagaccttcaaaatgaaactattagctggggtaggaagtgtattggcctcccaaagatgtccatgcccagaactcatgtatgttactttatgtttcaaaggggacattgcttaaataaagtttaataatcttgacatggggaaattatactgtgttatctccttgggtgcagtataatcacaagagtcgatataagaagaaaaaaaaaaggaagggggaggaggaaggaggagagtctgataaggagatgtgacaactgaaacagaggagggagtgacaaggccataagccaaggaatgtgggcagcctctggaaactggaaaagacaaggaaagagattccccccagaacctccaagaggagtgcagccttgccagcacattgtggacttctgacctccaaaattataataaatctgtgttgtttcaagccactaaatatgtggcaatttgctacgaaagtggtaggaaacagcacattgaatctggggttaggagggagttactttttagagaaaattcacaaagaatcagactcaattctccagataaatgctttctcagttcagaaacggttgttctagatgaatctgtaattttattatttttttctaatagctttgtgtgccaccttcatactaagagaaagagaagaagaactatcctttctcatacttcccctaggtaccagtcagaatgatattttttcttattgtttcaattaatccttataaaggctctaaaatggaagtacagagttctatttacaagtgaggtaactgattctcagagaaaataaactcaacacattttaagttggtgatagaaaaatgcactcatgagacagagatcagaatgttggtaactcatattctcttccagagaggaaatatagaagggacaggattagataaataaaaagatagataaataaaaaagttttggatcaagtcacacagaattttacaaacagaaattagtgtggccaaaagtttgcaaagttttgtctagaaagttattagggaaaggaaaaaaaaaaagccttttggacactttacctaacctcctggttttcttctctataaaggaaagataacaatagacgtctctctcataaagaatcccaaggaacagaactgaatactgtgacactgaagagccctttaaatgttgattcaatactctgtggtctacttatgatccccaaaccaatttgtgactcattcaacactaagaagttatctgttctgaaggagaaaaagagacattgtaaatcaggtggcaatcagtgattccaaacggaattgaacatattctttgtccaaatgaacagaagatgttggtatgaattgtgtactctccatgagaggtagatacagccaaagctggttaccagggggtgagcacaatgcaacagcagctcccaagtcatcttggatgagtgtctcgagttaggtcatcaagctgaatgaggtcacctacatagagtttagacaactgcaaagtagaaaaatatgacccaagactggcttaagacctcaacacagctacagagccaatggcagctggaaactcttaagggctaaatgcaatggcgagagtaattttgacatcaaaggcatcagtttgacaaatgaaaatcaaattggatgaactttaatgcaaacagctgggtgtgatgcaacttaaagaggcagatttcctggagtcagccaagcagatttattagaatcctccatacctcccaaggagaatgtaaatacagagtttttaattttcaagtttttccactccaaacaatggaagggagagcatggtaagataaatagtctgcaccactgcattccttggaatgatttagtggctatgcttgctctatctgtgccaagaccttttctctggtctgtccacattttcctcccttcctttctcccatctttccttctaatgtgtagtacattttaccttcaggtaatacattggaatgtggagtgattgattcagagagtatttttatgctaaaggatgcctgttattggaagctcctctgaacgaataggtcaggactccatgacacttggcatgagtgagcatgatagataaatttgcttcccaacatgtgtttgacaaccagccatactattaaatacatgaaagtgcaatgtggatatacatcagctgtggtttggaccaaagtgtaggtagctcaccagttgatggagaaattaaactcatgattaagtggaggaaagagaaaaagtttaccatcagccagtgaggtgtgctctaaggaatggcattaaggacctctgtctgttctgctctgaattagtgagcgacccttattctgttattagtggttacttatttgagtcagaatgcgaatatcagtacaaaggattcaagtttctggaaaaggaaatactattgcaagccttattgctctaatttctctgctataaaagaatagaagctcttgaagatggaaacacttgaccatgaagcatagaagcttcttgatattgctcattattgtgtccccagaaatttaacaaacgataggacgcctactaagtgcacaacacatatttaatatgttaatgagcaacataagttagaaatctgtaaacagggcttggcatgataacactttacaggagggatgagacatctatttcattaagtcatcattatccatttaacttatgtcacaggatgtgcagagcaaattcaaagccgtaaaattgaaactcaggattaatatgggggttcaaacaaacaaagagaaagcagaaaaaaaaatcctctaatgtgtggtaccatttaaagagcctgtttgcctcatttcataacctatgcaatatgtctaagcagcatgtaagagattt

SEQ ID NO: 43917 - DNA, 939 bp, Bovine  19866880429790
  misc_feature (1)..(1): n is a, c, g, or t
nttggtaaagaatccatctgccaatgaaaaagacacaagagacatgggttcagtccttaggttgggatgatcccttggagaagaaaatggcaacccactccaggactcttgcctgggaaatccaacggatagaggaacctagcaggctatagtccacaggtttgcagagtcggacacgactgagcatgcacacaggcactgtatgttgtagcacgtaccaataccttacttattttcatggcagaataacattttatggcatagatatgtcccactctgaatatccattcagcagttagtggacattgggctgtttccactgtttggctactatgaagaatgctactatgaatgtttgtgtacaagattttgtgtagacgtgttttcatttctctttggtctatacccagaagtgaaattgctggatcctgttgtaactctatgcttaagcttttgaaaattgcagttttctaaagtggcagaatcatttttcacccccaccagcagtgtaggagagttccaatttctccacttcctcacctacatttgttgttatctgactttctgatgatagccatcacagtaggtgtgaaatagtatctcattttggtttctatttgcatttccctgatggttaatcctaggctttcgttgaagtgcatcttaaaatatttattacagttattcaattcaatgttaaagcccttgctcttaaagcaattaaaatatcaatgagaaaaaaaagtggacattaatgcactaagctgatatgaacatgtgagcatatacgtatgtacatgtttgtatatcttgcatgcacacatttctttacatgtaaacatttatgtctccgaactatgaaaacatgggctctcaagttaaattgcttgaggtcaaatccaggcactgccacacagtacctggatgacccagagcgag

SEQ ID NO: 43918 - DNA, 1683 bp, Bovine  19866880457875
  misc_feature (1)..(1): n is a, c, g, or t
ntcactggcctgcctgtgaaggtatgtatttatcatacgaaggcagggaatggttatgtcactggcctcagaataactaggctggcttcccaagggctgctaccagcaaatcctggtcaatgccatttacgtactacttcctaagtacatatgtgcggagaacttactacactctgattaagaaagcttttgagtttaggtattgatgctcatactaacaacaaagtacacaactgtaaatgcaaaattaagtaattcaaagtgtgcagttcctatttgtcaatgttgacatttctatgggtatgcagatacccttccaaattacaaagatttttgaagggtaaaatagatatattttattttctatcatttaatggcttcggggaaaaactctacttcctctttattattaaaaaaaaataaggaataaagaagcattcaaagtgatagcacaggtggtttcaagggaagattttagtttctgtatgcataacttcattaaaagctccaagagatgtaactgcatatgctctaaaacattcaactactgtaaaatacaacgaattgacagcatctgtacttgagaacttcctttgctttctaatctatacaaaatataaatggcatgtataacacaattatccacaatacagcagcatatttacattgtgcatgatccaaaagttatcaagcaatttcatactttactcatttcctgccacagttgcctgtttttcttgtttccttactatacaaatttcaggtatccttagcacacctcattatggtattacacaagcacatccaaatcattaggccctagaatacttttcctctttccctataacttctctataaagacacagaggaggcaggtaagacagatgtaaaacccaaggagaataacttgctatactggaaaccaagatgtcattaaactaagaaacaaaacaaacaaaaaacaattcattctggtgaagaaaaatgctcttaaacgttttaataaagagttttgtaggctggaactgtttcccaaaatgtgtatttccttataaatagattttttccccatcattacctatcttacagccaaagcttaactcaagaaaagcagttattctttttcacatggcaaagacataataaaaagagcaacacaagccagatcttataattcaatcttggtctataaatcttgattctgatagagaaataggaccaattttttcaaaaatctcaaatgcacaactgaaagaatctaaaaatgcagttcaccactatttggtgaagcccatcaaatcatcttggtaaacctcaaagaatccactactaggtttattcaaattgtttatagcctgatggcaagtcattccttcatctgtaactttgagtcctaccttgatggagtctctgtctataggcaaaacagcagcaacaagggcaggtcaagaggggagaagaaggcaaaaaagaaaagtaccagttagtttacataaaatcacacacttgtcaaatttgatctctactaaataataaataacacagatgtcaacttttctgtaaagttaattaattaaaattaattactactcgaccagatccacagagcaccaagctacctttgacataatttcagaaaccaaagctggatattcttggtatttatactccttattgactttt

SEQ ID NO: 43919 - DNA, 3658 bp, Bovine  19866880489846
  misc_feature (1)..(1): n is a, c, g, or t
ntcctccccttggtgatgatctggtgataattttttccagaggcagtagtcctagaggctctgaaacacagaaactctgtcaccctcagtcaccacaataaccaaagacccctggtgattctcactggacatgtagccatgagagaaaaatacactttgttttattaagccaattggagatagtttgttagccagattaacttaatggaactcatcaggcagatagagttctcatagtttcttttcaggaaaaatttttttttccttttttttttttttttttttaggaaaaaaaaattttttttccatttacttttatttcatcatgaaaagttcatgcttataaattatatacagaccacatttgtctgattttttaaatacacccatgtaactacaaccccaattcagaaatagagcattactagaacttccagatttcattgactcactgattcacctccactgattgctcctccctttcccccaaaaatgataattatcttattttctgttaataaattcatttgcatttcataataattttatctcacatgtacactgcttagttttgcacatcacttcactttattcgaatgaaatagtattgtatgtattctcctagaacttgttttacctaattttatgcttttaagattcaatccatgatgacacagttatattttattctttctttttttctgctgcaattgtatgaatttcaggatgaattgtaacatgaatttatcccttctcctagtagctgaccacttgagtttcatgttgggaatttttgccattagaaactacagtaggacttccctggtggtccagtggtgaagattccacctgccaaggcagaggacatgggtttgatccctggtccaggaagattccacatacccccaggcaactaatcctgtgtgccgcaacactgaaacctgcctgcccgagagccctgctctgcaacaagagaagccatcacagtgagaaacccatgtaccacaactagacaggagctgtcactcgctgccactcaagaaagcccatgtgcagcaatgaagaccagcacagccaaaaccaaataaacaaaccacactaataagaatattcttgtgtatagcctagcatacatatgtaagcatctctgtaaggtgtacacctgggaacagaaacgctgagttatattcacatgctttactgcataggatcaaactgttttccaaagccgctgtaccagttcacacttaccaccagcttgtaggagagttctctttgcctcacatccttaccgacacttggtactgtcagcctttctcttcatttgccccttctggtgggtgtaaaatagtatcttattgtggttttagtttgcaatttctttagggtatactttcatcacatgtgaattcaagaaaccaaagtgagaaaccattgaaaatgatttgccacagttattcctaacaactggataaacttcacaaaccagactcctttgtacaggagaggtcaaataattgaaaaaggcacaattattcattttggggcttagaaaataccaaagggcttatgctactgttggtggtgtaggttaaacaactatttcacaaatggctccttttagaaggttaacggtattatctaaggccaggaggaaagcaaatacatttcaaggaaattataaacatttcttttatcttaccagataaagagattcagtataaatcctaatgcacccacttggctgtacacaatttataggagatgaagagtttgaaacactttcatgtaaacaatcacagattttattttttttttgaaggttgctaaaaggctctttgacactctttgtaagtggggagcatctcagagtaagaactggttctggataatatctgaattcatttcccactagcaaagcagctccattaagcactgctttcatttctgaaacctttacttttatgtaatgtttacatcattgacaccttctgttatagaatctctaatataaacaagggatgtaataagccctaatgtattttaatgaaattttaagagatatggctatgggatgaggataaccaaacaggagtagagattaaagcaaacgttttattaaacacctcaatttgtgtgacaatgacaactctaaaatcaagtccaggaaagaatcactcttcctgtgtttgttcatccattacaattcgatgaactccaaatgtgatctgactagccaaattctgtaacacagaaattcagcagaaaattagaaattcagccctattggaagagagatacaaaaataaatgtactttacttcataacatctacatgctcatgtcaactttgagttttatgaatcacaacagtaatactatatgaaaagcaagtctttgtaactcaccatcctaatgtagcaacctgagaaggtgatccacccatgaacaaactttacctgatatggttcagctaacatgggttatttgaaagtgtgcttagcattgatacctgtaagaccaagttaaatagaaggggtggttcctgattaactctgatatctatgtctttattctctacaaggctcactggtgttctgtggggaagatgcaagagttccaggcatcagcagtgataattctggcctgaggaatacgagtggactagagagctgtggcttacataagtgttactcaatgtgtggtccacaaactggtaccatcccatgaacaaactgctaacaatcgccaataaaaaaaaaaggtcaacagaacaagttgagaactaagtgtttaaaacctatatagcaaaggatatcgcgaaacagcccagggaatgattactgaatttgtcttgatgtctatgatgtgttacaaaagaattcagttcagttcagtctctcagtcgtgtccgactctttgtgaccccatagactgcagcataccaggccttcctgtccatcaccaactcctggagttcactcgaattcatatccattgaattggtgatgccatccagccatctcatcctctgccatccccttctcctcctgccttcaatctttcccagcatcagggtcttttcaaatgagtcagctcttcacgtcaggtggccaaagtattggggtttcagcttcaatatcagtccttccaatggatattcaggactgagttcctttaggatggactggttggatctccttgctgtttaagacacttccaagagccttctccaacaccacagttcaaaagcatcaattcttcagtgctcagctttctttatagtccaactctcacatcctcacaagactactggaaagaacatagccttgactagatggacctttgttggcaaagtaatgtctctgctttttaatatgctgtctaggttggtcataaattttcttccaaggagtaaacgtcttttaatttcatggctgcagtcaccatctgcagagatatcggagaccccaaaaaataaagtctgtcactgtttccactgtttccccatctatttcccatgaagtgatgagaccagatgccatgatcttagttttctgaatgttgttttaagttaatgttttcactctcctctttcacttttatcaggaggctctttagttcttcttcactttctgccataaaggttgtgtcatctg

SEQ ID NO: 43920 - DNA, 1217 bp, Bovine  19866880522102
  misc_feature (1)..(1): n is a, c, g, or t
ntatatagggaaatgaataaaaatgtcctagtaaatctgggcattattgggtttattggactgccctgaaaaaataacctgtagagaaaattgaaatgatcacttctgtttataccacagctatctggacctgaaaggtctctgacttattccacatccttgtaccagccccagtccctgctgcagggattagaaccaaaccatattggactagtcagaatgagactcctgaatcggacgtttaggctggaatctgttttgataataaagtctgatagtaacctagtcagaccttatttagagaaattttaaattgagctggtgacagttctgtccttgggagaagagagccaactgtgactaaacagaggcacattgaggaagcagtactttggtactgctggagttgcagttactcccccgctcctgacaggagtgtcttcagttcttgcccgcactgcgcaccctccacagactgtgtgtgttcccttcctcctgtcagtggcagatgctcccttgtaaactgttttgctcaccttcatcattttcagttccttctctacctatttttctcctacccttttttcctcagtctccattctcccttaggggtcagccctctttcctggggatgaaggaagactattactataaaatgtctcatgctggctgtggtctgttatgtataacatgtgaagtgagaaattttgttcataaatgtcttagacaaaactctgcttcgtgctagtccatttgatttgcttgatggtcattaatattgaggggcatataagtaggaagaactccttgtcaatttgtatgttttcctttggctattaaaaaggaacaactgtacctctgtagctgagagattttcctgatttcctgttagacagctaaacaaagattattattttaatggtttctgatttcacaaccttttggtcttgacagatgaacttgaaaattgagcagtgccttctaaattatttaaagtaagctagtaggttgtcagtttggcagctagagggcaaataggcctgcattgggtcattgggatgcatagtaaaattaggtatagtcccgcccctcaagatgttttcctgctgaagtatgcaacttgggatatgctgccttctgagtagaaaaagatgcattaatgaatcgttcctcttcatttctttgagcttccagttagtcccagattcccttaaaat

SEQ ID NO: 43921 - DNA, 1731 bp, Bovine  19866880526428
  misc_feature (1)..(1): n is a, c, g, or t
nagaaactaggacttgagcaagagagataaaatgtctcccttttaactagtgaggtttagggagtgcagatatatggtcttgctttcactcccctgagctgaacatacactccaaactgaaggtctcccttgtgggtggtagatcctgccccactcaacttacctcaaagaataaatagtgcagacaaatggaaatgtgtcttctctgtaagcaggcaaatcacaaagaggaagagaaaaggcaaggaactggcttaataactctcaactattccttagctaacattattctaactctccctggatcaagatttctcacacttgacatgattgatattttggatcagataattctgtgttgtaaggggctgtcctaggaggatcctgacctctatccactaggtgccagttgcatccttcctgcccctggttgtgactcatgtctccagatgttgccaaggcaaaatcatccctggttgaagaatcaccactccagagtaaaagggagagggcagaaatgtattattttgatagggcttccacttggagggaacattggggtgggaaagtttacagtagctctcatgaaatgagtaaaacaaaacaaaacatacaaaaaatcagcacacaaactcaatgtgtttctttgtgtaaaaatcgtctctcccccatacccaaccattagtactggtatggaagtgaagaagggtaagaaagcattcaacatttaaatatgctcatttatatgcctgacagtcttaacaagtctcagggttgtagtacttttaaaaaaagaagaaagagagaaaaagaggaagagagagagacagaaaaaaagaaacagaaaaataataggttcttggaattctaggaaaataaatcagtgcaatacctatttatcagtgacttaagtaaataagataggtcagaggtcattaactccatatggaaaccaggaaattggattcatgaaactgttcagaaaaatgtgccagccactgtcaagattactataatctaaattttgaagtttgaaagagaggttaatttgatatgaagttgtggtcaagaaatgtgtgactctcaacagaaaatgcctgtactaaaatttctgaattcacaaatttggggattccaaaggtctcggtctgtatccctcatgaatgtcaagtatctactctaattacatataattacatatattttcatcaatttatcagttaggtctgcaacactgctgttgtttccccttcacctttattcatgttgctttttaatcagatttcaaagcatttcactaagatcatgtctgattaaaacctaataaaactagtatcaggaaaacgtctgggataaaagagataccatataatcccagttgtcaacaacgcgttttttaaagtcagcaaattactccgaggtctgttcctcctagcaacttctgaagaatctggaaacctcagcctaagggaagacttttgttcttttaggggaaacactggtgttgtctgtaggtatgccactggaagaaaaatgaatgctgaaagcctccattactttttctctttagtttataaactcctgatgcttcattctccagactttctcactgtttgggatgggcaccatagagtcagtaaaaataataattataccttgtattttcaatgtagtattaacttttcaaagtgtgtttttgtatctatttgagcttccagacaccagggaaag

SEQ ID NO: 43922 - DNA, 1473 bp, Bovine  19866880535597
  misc_feature (1)..(1): n is a, c, g, or t
naccattgaataaaagcaacctcccttgggtagcagtcacagctttcatcattcttcttcatcagttttgcactgtggactcaattttcaactccagccctatgtacaggacactgtttgtctgcacaccctgcagtgatttcatccatagccatctctgtctgtgtggaccccacaacctgacaatctgtgacgttagcccctatgtgcttctgccacctttcttttccacaggatttccatcatgtattttaatatctgtcttcttattttatgtatgtcttttcattggaggtgggtgagcacttaaagcaggaagtcacaatgacattttcaccaagtttgtaaacaggatttctagttgaaaattaaaatctattgccctctgagaagatagtaaactccaggagttggtgatggacagggaggcctggcatgctgcagtccatggggtcgcaaagagtcagacatgactgagcgactgaactgaagtgactgagaagatagatggatagacaggatgtaggggaaacatttatggtagtttgacttataagacgtactaaaaagttgagtttggaccagagagaacagctctgatctaactaaatgaagcttttactgaaaagggtgattaatattagtaaatacaatcaatatgtaaaagttgccagaattctgccaggaaaaaaacaatttgtaatgactaacttgagtgcacaagacattgtaaactgattgaaaggaccaagttaattatgtatttcaaaacaaatttttcttatttgttttgaaaattttactctatttaacatcatataagatgataattatcatcatctgtatagcatactcaaatgttgtcttgatgtaacagggagaatctacaatctgaaattatcttcatagattcaatttacacattacagtttctaactattaagctactgactcagaataatgctaccttagcaaatttaatggaaagtgcttattggacttgtaaatcttaagtctcaaaaatcttaattaagaattacctttgtcctaaaacaataagaatagttgattcgcattaattttggtgttactcacaaatgttgtctataacaaatataacttcttccaacaacaaagaaatgaattaaattctctaattttaaacacaaaggtgtgtttccaattttatccaaatccgatctcctctcctaagtagaaatcttcttttctctagcttggtgatattgtgtttgaaggacgtttttaaagagcacatcatattatcctttgaggatattagtctatcagatattcaacctgggattaaacagccctgaaccttcatcttaatttcttcctttacattcagatatgtcccacaccatttaagagacagctttaaatgctgctgctgttgctactggtggttttagctcagctgtttcagtttgatggcagcacactaaattaact

SEQ ID NO: 43923 - DNA, 2926 bp, Bovine  19866880577221
  misc_feature (1)..(1): n is a, c, g, or t
naagtaggtatgttagggaagaaacatatgtgttactcctactattatcctgtgaatcaatttcttatgaagacatggatggtgtgatctgcatgtgtacctgaatgatgccaagaaggctgttggtctgagagctccagaaacatcctctgactgctactgaaatatccaaatggttatggatggtgtattaacatgattgataaggatttttttttaataagtcttttcctatcatacatgggattaatggaggaaatttcatgtgtgggacatgataggattttagactttataacggtcaggatcatattcagaggtagctgagaaattactgaagacagtgatatagtgactgcagggtggagagtatttggaaatcatgggtctagctttgaaaatctggttttgttggtattgggtgatttggagccttgctttatacagaaagttcccaggaagccaactagtaaaatctgtgacattatatcatgtagcttttgctggataacagaccaccccaaaacttaaatgcttaagacaacaatatccaattatttgactcatgatttgtgggtcagaaatttggcctgggctccactggacaattcttctgctcttggggctaggatctgtcatatctatgattagctgtttccagtgatcttccaagaatgagcagataccaattagctgctgggttagctgagtctgtccacctgggaggtgagcagggtcattagctatgacagttaactcctctacatgatttctcatcctctagcagagtaacacaggtttgttcacaaggcatgtgggcaagtgtccaggagaagaacagaaatgtgaaaggcttcttaaggtctggcctcaggccatgtgtctttcaccagagaaaatcacaagatcagcccaaattcatggggtgtgaagctagacaccacctcaagccattgtaaggattttgacgttgagaggggaccattgcaccattgcaccttgacgttgagaggggaccattcactatcctgtgaatagtctaccaaaatctccttcaggtgattgaagcttagtcgggttgggtatacctgggctcttttccaggtctattaagaaggccaccacccttttgagctaacttttttccagtgatcttccaggaatgaagagataccaatggtccaacattgatctgttaccaaaaccaaatatgtgtgtcgaagccttgtcctggaaggtaatttggcttaaaggtaatatggcttagatatttggaacaatcaagagttttaagataggtcaggaaattgaaagggttaacaacagtagttaaactgtagctgaagctatctagtatatttggccagtggaggtgagttgggccagttggaatatatttagaaatgaattagactggatattgccctgcatgattctctcttgaatctgtatgaaatgcttcttgctcattttttttttaatatttaattttgcctgtaagataactaaaataaatagcagcgaagtgtaatatttcgaaataatcccatagttttcaagtgctcttgaagtagaaagccacagggctgtatgtgcttttctccactgatttaacacttattgtgtatgctgcctagaatggttccctttaattgatacttggcttgatatccttttaaattattaaagattggagacactcattaaatgagagattaaaagacatggtagacacagctaattattaaaggcccgagaagggacacaaaatgcattttatctaagactttaatggattataaaagtaaatgaatggtttagtgataaaccagtaggagttaatcaattgaacaaaactatagggaagctatttgagtctagatttgaagggtttataagtaatcatagttagagacttaccagctgttccctatttctttactttgagctgctaattggtcaggaaattgggtccaagctcatcatccaagttaaagatgactagaggaaggcagcttatatgtctttgtgggggaaggtttgcattgctaaacattagcaagtcagagtggagtgaattctttcatggcacattgtgatttaaactctgtcatgaatctccatagaggcaaagctctaaggaggcactgttttttacttcctcatttctgaacttttcaacctctcaactggtcctttaacttccagatcacgggcagtgtattatttttgcctgcttactaagagggaacgttgattgttgacatagccactgctcgccagtgagattagtaacacgatgcggagattttcagcacttaaaagtcattggttcaacatggctcagataggtaatgacttaaagttattctgacttgacagctgtttagaggctcatttgaagcgaactctttcttggttcgcctccagacaggggacatgttgctgctggggattgcaaaatgtcatctctgttggaatcttactgagcagtaaggctcagtgttgagtcatcatcatgaaggctaaaataacatgttccctagaatcaagaacatttggctggattttgtgtaaaggttttgagccctgtagaaaaataatatcgagttagtttttccccagagtcaaactcactctactcacaagtttaataccattaactagtttaagacaccagggcaacttttaacacattgctaacaatcagtgaaaacttcagacaagatgtgtttaatgtcctttcatggcccgtcaacaattagccacatctaccgtgctttctaatcacttatttaatgaacatctccgattagaaataagtgtctgccagccacttaagcagtgatttaggcactagagaaggtatggttcagagggttttaaatcacagaggactcagtcatttccagctttacaaaattca

SEQ ID NO: 43924 - DNA, 1704 bp, Bovine  19866880600108
  misc_feature (1)..(1): n is a, c, g, or t
ngcaccctcattagaaggtgagaatggagatttgctcatctctccattggaaattgcactggagccatgctctgtgatgaaaagcaggtaggtggattagaacaaacccctgcacatggagtagaaagcacttggctgtagttttctcttcctcatgggagttaaatgacctcatgggagataaatataacatatttatctttctcttcccttccttactgctggccgtgatcttctattttaatgttatttttaagtagatctaatatctaattatttacccatttcttttttattgtaaggtaaaaagggaagaatactgtaaaggtattataagatgttgaaagataattttctctaaattattgcaaatccgttatgaaatggaacaggttgtgtatacgttaagccaagagcaatagcaacaacaaggcacaattcagtacttgtgcctttgtacaggtcacctaattctttgcactctagttttctgtgctgttaaggatgggtgataactgtgtatgaagtccacaggtcgttaagagggctaagtaagatgaagggaaaaatttaaaaagctgtcaaacacctttcaaacatattattattattataagtatttgttgagtcatattgcacagggatgatgagatgaatttaataagaacataaatcatgtgatattgctatggtgtagacacactggtaaatattaatgttggagaaacaatttgcatttaacatactggaataaaaatcatagccaataccaccaaagacactcggagtgggcagagatctttgaggttgtctgactgttttcaaactgcatcttgcagagcctggttttaggtgttaagttatggctggtaaaggggaaaaggtgaggcccactgctctgagtcctggcccctgccctattgccagaacattttccactagtgttaattaccagatagaagtcctggtaagatttcatttgaaataatgttcaaccactcttctttataccaggattcagagggtactgagattttcccgggaccatgaacttaaccactagaagatcagaccctgagtcagttctccagcccatgaaccactctttacatcatacatcaactttccaaaggctcagatctagagttcttggttgcagagcaaccattggccacacaagctaggtgctgaactgtttccctatgcactttggtaaaaacagaatactttaagaggaagaagattatctttctaagttaaacagaacatggtacaaatgatgagtattcagagcagttcctggtgggagcacatgggttcacaagtggaactccatcagtttcatacaagggattttcctgggactcagttctagatagctgccactcacaaccaaaagaaactagatttgccaaaattgattggatgtaacatgaattatttgattcattcacattatttgtttgggatcctggcttaacatggaagagagaagcttgtacagaagtaaaatgaccaagaagtggcccttgttcatgagaggactaaaaggccttcaagagttttgtccaggaagtactcttacttatcagtaaagataaactcactcaacttgccatgaatcagatctcttttctgatctgagttcataataatcttccagttaaggcaagtctgatactgggattaccaagcctaaaagtg

SEQ ID NO: 43925 - DNA, 1377 bp, Bovine  19866880605683
  misc_feature (1)..(1): n is a, c, g, or t
naaataaactaaacgcagccctgtaccagacacagcctccaaatctgcagacaaactgaggaattttctttctttcagctgtgaattcaaaaggctatttgaaaactgaatttttttttaacactatgttataaggaaataactggtgaggaaaaaggaagacacatcacataaaaatgcaattaactacacagccacaaaagacggggctacaggaagattatcctgacttgcaggcagtttcattttttgcatttgtgatttgtggtgtgactcaagacagacttttataaatgacagataactttttagttaggaagggaaaattattgcagtcatatatagcttggtaattcaaacaaagctaccaacaaaatcacatccaagccaaaaactaaatttaccataaaccacagatgacaaaaccatctctgtaaccccaatgtgtgtatcttcatcttcactgagatacgtttcactacatttccccatgtccttcccccatccttacaaaaagactcacaaaacaaacatccatcaccaagtcagtgagcccactctgttccaaagtacctttgtcaattaaacttgaatactgaaaatatacatatacttagtgatcaaagtcctatggaaaaatgaagaaaaataaaattttagaattaaaactaatcatctggaaacaggcaacgcaaagaaagaccgtgaaagtgaggaaagtgtcagtcacttggacgtatctaagtctttgcaaccccacaggctgtagcccaccaggctcctctgtccatgggattctccaggcaagaatactgcagtgggttgccatgtgctcctgggactcttccagaccgagggatcaaacccatgtctcttatgtctcctgcattggcaggtaggttctttaccactagctgcctcctgggaaaccccccccaaaaatgaacaactgcttacaaggctaagttctttggatttggaggaaggagtactgctggaggatgcaatcgaagctggactgattggggcatctttcttgagcaggcgtgtcttgtccaggccgttctctctcggggaatgtgctgggctccctcgaggtgatgatggatcctacaaagaaacatcaagggtatcaaatagagcacagcacattcacaatgcgagagtacttggtgtggacgtttcaagccagaagtcttcaatagcttaggagcaaaaaatgttctggaacagactgttaagactcttcaaattgctgtagaaaatattcagtatcgaggtcaataaaaatactacaaaatttatcatatttattttaaaacagcaacaaaaaaaaaactctacaaatttgcaagtaacttgtcaaggagacctgta

SEQ ID NO: 43926 - DNA, 1271 bp, Bovine  19866880639637
  misc_feature (1)..(1): n is a, c, g, or t
nactctgcaatgagaagccattctaatgagaagcccgaccaccactacaaagaagcccccactcaccacaactggaggaaaaaacccacacagcaatgaagacccagcatgctgctgctgctaagtcgcttcagtcatgtccgactctgtgcgaccccatagacggaagcccaccaggctctcccatccctgggattctccaggcaagaacactggagtgggttgccatttccttctccaatgcatgaaaatgaaaagtgaaagggaagtctctcagttgtgtctgactcttagcgactccatggaatgcagcctaccaggctccgccatccatgggattttccaggcaagagtactggagtggggtgccattgccttctccgcccagcatagccatagataaataaaagtattgaaaaaaaaaaagtagcaatagtctagacccatcaaaatgcaacacgttccccaccatctgtcactggtgattaacaagcctggacactttaactttgtggtctcagaaggtaacaccttttggatatttatatttggcaccttctgtgcttttaggagaatgtgagttaccactgggcatcctcagagtgttatgctctttaagactttcccaggttatcaccttctactctcttgaggactggcactatggtgacattctcctgaatttttagagcttcctctttcactgtttgaaatctttgccaatgtgctaacagcctacacacactgggtctcataaccacagcaggcaatgccttctggaaatagacacggattataactgacattggtattgacccagatgttaagccatacttataaaagaggggaaagacttgatctctggtactgaaaatcaacagtgactactgccgaagctgttcaagtaactttttgacaactcacctgagtttctctgctgcactttctagaacaccagccaatccaagttctcttcaaaatgaacaaagccttgcacttaggaaattaactgcctctggatgcagtagtcaccttctctgcctctgtgaatatttaggaagagcaacccagcagttcctgggcctcttcaagacctccatcagcatcattgccacagagatgcagaggctttctgcaaggcaattccattgctaagtcaattatcacaggatgtggcaggcttttagagagattaaactgccctttctacgaaagaaaatgagaattctcaaatgggacccctctaataacccattgctcagctacagtat

SEQ ID NO: 43927 - DNA, 1447 bp, Bovine  19866880652290
  misc_feature (1)..(1): n is a, c, g, or t
ncccaagaaataaagtgacattttcctacaagcccatgacatctaaaatgatgcaggaaggagctagcattcagaccttggtcttttgactttaaatatgatgtactttcccccaaaccaatgttgccctttgcactcttgctgaaacctcttacagtcacttctcatggagaacaaaattagtcaaccttgtttgttatcagcagatacagcagaaagcaccctgatctgatctcatggtctatttgtaatttgaatagagaaacaaggaagttgggagttttctgcctcctgctaaaagtggatgaggccctacttctgatgcagatgtacattttgaagattccagtgctctctttaaaatcatctgttccaatttgaagctccaaaaattgcaaactctgactctcaagtcatactgaacttgctttcgactaacattctgactctgaagctatttcacttcatttaaccacatttcctgggttgaaatgactagcttttgaaccacttttctcatgtaagaggtctgaaaaaatgtaagcaaccacgtttgttttgctgagaaccagtagaacaaccatggcagtgtttgttctctgatcctggacttagaaaaaggtgtctcagtctgtcactaattttgtgttttctataaaacttctcttggcaaaggattacatgctagtttgttttgttcctttttaagtccaacagactttctccctctgagccacattacttctcagctgactctagggcaacccatcccgttagaacacccagcccgcttctcagtgtgagagcagccatggcatgccagcgatgtcatgataataatttacagctgaggctgttgcatccccagctcttttcatgtgactgtgtgtacaagtaaaatatgcccagaaacaagggaaatatgttcaattattttattgcattattttacaatgtacatcatgtctccccaggcactgaaaaacaccccaagtaaaacgcaagtaaagataaatcctgggatcatcaaaacagggaccaaaccaaaaatgtgcctttggtttatggtgaaataggttcaagtggaagtttatcatcattttcatcttaggcctgtgtcttttatattatattcaaattaattacacatggaaatatttctataatgagatatgggtatgatttcctgagaacaaagcttggtggaaaaccagaaatttctttggggaggcatttgatgcaaaattatgccacctttaatttggttataaacctggaatctaacaacaacaatgaactactgcatgtggtaatcatcagcgtcaatcttgttttctctgagagagaaaggaaagaagaaagaaagggggagagggaggagaaaagaaataattaaggtaatgatataaaggtcaaattttaaaattgttagaagtcccaggaaatt

SEQ ID NO: 43928 - DNA, 1683 bp, Bovine  19866880681994
  misc_feature (1)..(1): n is a, c, g, or t
nttgcattattatgctttataaaactacaaacttagaaacattaaacacagatcttttttccttacagttggatcatgtaaatatactagcaaatttgttaagaacaaagagtcacactgtgaaagcagcggccaatttggagaggacaaactatcttaaatgtgaatggttagtaaaaacttctaaaaagtaaaactaataacctagaattaaaaaacagaaatttaattttaaaaagtaaacacatattggtatattgaaaaaaagaaggtaatgtctaataaaagctaaagaggacagaaacaaagtgaaaataaaaaaaataataaaatatatgaatcctattatatggaaatcctaactgctttggtaataaaagagaagctttaaagtcagttattcctaacattataaatcacagtacctcaaattgagaaaaaattctagatcctagtctgaaacccagcctggactttactaaggctattgatcaagtcagttgcaaaaccactactctaactgtagttctttcagtgcaggaattagtttgggtcagggacactcagggggaatctgtctatgatggtgggggtagggaggatagagaagacaggtttaaagccaggtaagaccctttactgatgtcataaccaaagccctctagcaattgaaaagggtggccccatctcttcatcatgactcttctgtcacctcaagatcaaagatgaccaagtatgagaaagagttctataaagtattcctccacccccaaagaggtggtggtgttataatcaactaattataataacaggtagcacagattttaccagcaaacaagagtgtctctctggagtcagactgcctgggttaaaaatcttctacttaatagccctgtagcctcggggatgttgttcagcctcagtctatagtcaacaacaccccacccactttctcaaccagggtgctctgaagaataagtgaaagaagccacataaagaataaggcacagtccctggcaaataactgagcctccacattatttactgcagagttagtgtggatcttctatttgaagcctcacataatgactattctaagcatttgggtacagcttccaagggagtgcagtggtgaaatatccacttgccaactgtaggagatgaaagagatgtgggtttcatccctgggtcgggaagatcccctggagtatggaaatgggaacctgctgcagcattcttgcctggaaaatcaaatgagcagaggagcctggtgggatacagtccgtggggtcacaaagagtcagacaaagtacccagacacacaacaaaaagcatttgggtagcactgtctcttagcatagatatgcagatggcccataatgatagggttccaataggctgctattaactaaaacacatctcctttcaacaatcacaataaggttttggtgtaatacttcaggcaagattgtaaataccacctccacactggactttctaatttgacttcaaatgcatttcaagctaacttcactttccagtggcacaggtgcagtgctcagatgtccctgccaacttacaaaatcccaactggcaagaatacgccaaaggtcgagcacacaaatagatcaagaactctaaaactcatgttatggtttgtttgctcatcagctgcaactttca

SEQ ID NO: 43929 - DNA, 1018 bp, Bovine  19866880703662
  misc_feature (1)..(1): n is a, c, g, or t
ncaaggtctaacgaggaagcagcagtcaagccaaggcgtggcaagctgcacccaaggaccaaatccagcctgctggcagttctcatacagtccacaagctgagaatggctttcacatttttaaatagtagggtggaaaataaaagaataacattttgtaacacgtgaaaagatgctgaaatccaaatttcagtgtccataaataaagttttattggaacccagccatgctcattcatttgtatactgtctacggctgcttctttgccaggttggcagagttgaatgcctccaaccgagactgaaaaatatttactatctggccttttaaaagttcacccaactctggacttgcttctagtagggtgacctattagacagtgtcctggtttgtctgggacacagggcttccaaacctaaaactggttcagtcccagacagactgggacagctggcaatttctggcatttcaatcatctattctgccccctttcccttagtcaaacgtgcgcccctaaagagcagaagcacatttgctctgtgtaggcccccaccctagacaggagaactgaataaagaaaataaaggaaacaaactacaaaattctaagtaggctgtgtccacaaaaacaggaaacacaggaacattctaaaataaatacacgcaaatacgaaaaggagtacgtcaaggctgtatattgtcaccctgcttatttaacttatatgcagagtacatcatgagaaacgctgggctggaagaagcacaagctggaatcaagattgccaggagaaatatcaataacttcagatacgcagatgacaccacccttagggcagaaagtgaagaggaactaaaaagcctcttgatgaaggtgaaagaggagagtgaaaaagttggcttaaagctcagcattcagaaaactaagatcatggcatctggtcccatcacttcatgggaagtagatggggaaacagtgaaaacagtggcagactttatttggaggactccaaaatcactgca

SEQ ID NO: 43930 - DNA, 531 bp, Bovine  19866880745239
  misc_feature (1)..(1): n is a, c, g, or t
ntttgacatgtgctaattaaggaatttgatatgtgtgaatttgtttccaattatgagatctgagtccaataatgaattctttgaacctgtttccaaagtaacatatttggtcctgtaataaaatttcatcccagtgtctaagtaaaaataatttgccaccttcatgatagtgagagggaaaatgtcaaagaagttacacttaatgctttcaatggaaaaagtaatttaaaaaatttttaaatgataagaatctatgtaaaatgcatgatattacatgaaataagaataaaagaaagtgcattggtcctatgagtagacaataagaaaatgaaagcagtttagtgtatggggtgattaaagcttgagtgaatttttctttctcttaatactggattttcactattgatagacattatgttatttcaaatgggcttccctggtgatcagagagtaaagaatttatctgcaaggcaggagaccaaagtttgatccctggatcaggaagattccctgaagtagtaaattacaacc

SEQ ID NO: 43931 - DNA, 1914 bp, Bovine  19866880766666
  misc_feature (1)..(1): n is a, c, g, or t
nttgctgacactggcaaagctatgctaatattattccaaattaattttcttaaagattggcaatgtcattgatggcattacatgtattcggctatatctctatagttttatagacatcctgtatatgaacagtatgtatttcttgacagttttttgttttgtttttgcatcattgcagcatcctatcctggcatgactattgaaagtcttcaaatgggcgatggtcataaacagaaatatccatacttgcagtgccagaaaggaaatatttcacaaatatcctagattgtttttctaaaaggccaactcacaaactctgcagatttatccatctcaggctcactgactataatacagaaatacatttggcaaaaatccaaggactggatacatttaaaagtagcatattatcacaagccctttactttttccaaacaccacttattgtagagaattagaagacagaggagaggagataggaaaaaagtgttaaccttggccctggcagtctgttatccagcagacatgaccagggagtatggccaaagagagaggcgatgaaaccaattcctagacaggggttcagttatactgactttcacaaaacatgcctgccctgccatgccaatgaagttattaaaattgaaatttaaatgtattccaggttcttataaaacagctgcaggacaaagtcagtctccatcaccttctggggaaaacctttgctttcaaagaatgagacttcacaaactgcattgatcagagcctcttttatagactgaaagcatatgtgtttcagagctgtttctgccctgatgtttcttttctagatacagtagtccttccttatccatgggggacatgttccaagatccccagtggatgtctgaaaatgtgcatggtactgaaccctacatagactgcgtttttttccctacacatatataactatgataaagtttaatttgtaaatcaggcatgttagagattaaaaataactaataataaagtagacacaattacactgtaataaaagttatgtgaatatggtctccctctcaatcaaaatcttttattgtactgcattcacccttcttcttgtgatgaaaaaaaaaacctacctggtgagatgaagggaggtgaatgatataggcactgtgacatagcattaggctactactgtctttctgatgctaagtcagaagaaggatcatctgtgttgagtcattctggatcatagaaccatgacggacgtatgatgaggatggctggggatcctgggtggggaggagcaggatggagtcagacagcatgaggtttcatcatgctactctgaaaaacatgtaatttaagccttataaattgtttatttctggaattttccatttaatatttttggactgcagttgattgaaggtaactgaaactgcagaaaacaaaactatggataaggagggactactatacttctctttcaaatatttctataaatgctgttgctcactgagaggcttcatttgaagttacagtctttgtgcaacgtctccatttgacctggatcataagcagtacagactggagagtgggaaaatctttagcatgaaatggattcaaatgtttggtgctatcctaactgtgggagatttaaattttaaatagcattcccatcattgctgaagagaaagatatgtttctattaatatgaatcactttccatatattgttcagaagccaaaaacctgaccatgagagtagacgtattgtgtctataggttgattatctgaaatgtgaataagatgtaaactggacctgggttcctctgcattgtgaaagactgaaaacttttaaaagtgctttgaagtcacacacataaaaactcctctgtgaatttgcacggttttaaataaatattt

SEQ ID NO: 43932 - DNA, 2864 bp, Bovine  19866880804489
  misc_feature (1)..(1): n is a, c, g, or t
naaaaatatgctatttttattatcttaccacagtactttcactcaatatatgcagttttagattcaaattaattaatctcctctgtgatgacttaataccacgtggttaagaaggctgcaaatctattacgctattcctaaaaccacctaggaaagagcatcccaaatacataaggttaaaaaggtaatatttgacttgcttatgaaattttcacatactagcaagagagatgaggcttgtacgtgtgtatcctgccaacaatccagttctcctacaaataatcccacaaactacacaaagtactactgagttaataagaataaaagtttataaaattagtccaaatttattagtttcctaataaattttagcactctttttggggtagaggggacagaaatattgataacatgctaattagtattcaagcaaaatgctcaaattttacacaaaatttttaaaagccacagtgcaaaacataaaatttcagagaagacatgaaacttctattctaacatgtaaacaggagagagaaccacacagcaccaagcaccatgcggtgagcacactgggagtgaaggctacacatgcgaagcgttacctggaatatactggccccataaggtgttctccaggcattcagaaggttgtcctttcccgtgctgacaaaccatttgcctaaagaaatagggtttcaaaaaaggcagtgtctattactttgtcagagtcccaagatttgtgttacagagcttcaatgatacacagaaaacttacctcatctgaaacaagtaagagtttcttttcactggcaagataaagcccactctcacattatataaatgagttatttatacttaggacagggatgaagtagacagataccagaaaatgacatagtattagggaagtaggtatgtgtgagaaaggaacagaattctgagaagggatacatccatgaactgaagaccagacttgaaacaaagcagcaggaaggtagaagggcagatggtggacacgggggcttgcttaccacagtgggcaaacttgagcgacagcacgcagctctcgtgcaggtggagctggtacttgtcgggcttggtgacatgcaacacctccacgttgctgttttccatccccacagccagccactctccggtcgggcagtagcccagagaaaagatctagaatggaaacaggtgacgatggtggctacagaggatgtacttcctttaacagggaggcgaggcactgcttcctctggggatactacttaaatggtgaaagacatcaagacaatgttaactgtgcaggaagaaatcaaggcaagtgtgtaaccccaagtaatgagtcagatgtccacaatctaacttactaatcaattgtgagaaattcaaaggtctacagagtaatggttattgaaataaaagtttgcaaaaagcttgtaataaatgaaattttttaaaaaatctgtcaataaaatatataccattgtactttgacaataataaaatttttcttaactaattcagcgtcaaaagtgactgtcacatggtaaaggaattgctgttgaagtctctgatatatctcacaaagtcatatgtgtgtgctaagtcacttcagtcgtgtccgattctttgcaaccctgtggactgtggtccaccaggctcctctgtccattggattttccaggcaaaaatactggagtgggtttgccatgtcctccctccaggggatcttcccaaccagggatcgaacccgcatctcttatgtctcttgcatcagcaggtgggttctttaccactcgtgtcacatggtaaacgaatagctgctcaagtctctcatatatctcacacaacccagtctctaagatggcacgtgctcgagtacacacctgggaggtgaagtcgtgctgctgcagctgccgcccctcacgaaggtcccaggaccggaccgtgttgtccaagccacccgtccagagcttggtgccatcattagagatgtcaatacagctggccccgtccgtgtggccctggaattgcctgaagatgccaacatggagaaaagtccttgaactttttaagtttttaggtgaactcagtttaaaattccttagtcatcagtttcattgcaggcctgattggtatatttcctttcggtttattaggtgttctattattcaaaataataacaaagcatatatgtagagagattaaagtttaattgagatgctgaatctcttgcactttttatttatgaaaacttaggaagtactcttcaaattactcatatgctaaaacatgactgaaataactgataggaaaaagatatccatctgaaacaagagaacacagctacataaatatgaattaatcaaagatatgatctgagacctactctatccttgggataggaaggaaggagagaaggtgggaatatgtaggagatctttcccttctgaaagctttggggaggggcataggaaggggcaggacaaattctgcccttgagcaacaatgcaacataggaggctgccccaggagcatataaaatgtgtaagaaacgggtgctggggtggggattagaagcagttcctcataacagccttaccctaaaggggaaaaagtgataactactttgtttttagaatcattcagagttgcatcctgcaaaataagttacagatggacagcaggggtctcttttccttcaccctgtcactgggctccattacaatctccgcagaaacctttagcagttcacgcctcttgtctcctgttctctcaggtgttgacacctgaagatcacatgtgctttagggcttttcttatcaatgccaatcctttatcacctcatttctacacaa

SEQ ID NO: 43933 - DNA, 2099 bp, Bovine  19866880837923
  misc_feature (1)..(1): n is a, c, g, or t
ntgtttaatatatatatattattgttgtttagttgttaagtcacatccaactctttttgtgacccgatggactcctctgcccatgggatttcccaggcaagaatactagagtaggttgccacttccttctccagggggtcttcctgacccagggatcgaacctgcatctcctgcattgacaggcggattctttatcattgagccacctgggaatccttatatatataattggttcctaaaaagttctgggtttgactaccaaagcctattttaataagataattgctttcttttttataattgtatttatttatttttggctgtgctaggtctctgttgctttgtgtgggcattctctagtcgtgttgagcagaatttactctttactgtggtgcacaggcttgtcattgcagtggcttctgttgttgtggagcacaggcttagaggcgtgcgggcttcagcagctgcagcacacaggctcagtacttgcagctcacgggctcagtacttgcagctcacgggctcagtacttgcagctcacaggcttagttggccagcagcttgtggaatcttcttggaccagggattgaacctgtgtcccctgcattggcaggcagattcttatccaatgcaccaccaaggaaatccaaagatctgtatattttaactgtagttgacaatgcctctaccccttcaacatattttatcagttcacttaaccattaaataaattacaaataaagtaatatctctttcatttatacctggaagagacacccaagatattacaggttagaagtagggatgtgactgtaggaacttctactttctggggaaaatgtaaagctatcctgtagcattttagaagtattttatcataactggaccttacataaggagagacacctaccagcagacaatattgaaataaatggttggcacagaggtttctcctaaaatttaaaagtcctcttcttaaaagttcatatggtataataggaattctgtgtattttatctcatttatgtttcacaataaccctacgaaatgagtactattataattcccactttacatagaaaaaaactgaagcttccttctgagcctaagtgagcaaatttcagtaaacaggtggagaccacacagttcatgaacagccgagtccacattgttctcagctttgcctgatggcaagcccagcctgtggtcactttatagtgctagtttctgattcttatggttgggagtcccttctcttgcacaaatacctattttattaatatattgtgttgaaaaaaaaaaacagccatagcctctgttttatttgcaaaatctctggatcttcaagcacaatgaaaatacttcagaatatacagtctgcacaggactgccattgtgttggttataattagtgtcatgtgtgtgtgtgtgcatgtttaaaagaatcattctatcattcaaaaatatattttccatacataagaatacatgctttgctaaaggcggcatatcagaacaacacttataatttcaggataagcataaattaaatttaaacttgttttaaaatacaaaaacattaaatatatagactagttgccaaaaatgaccatttaacacaaaattgttgaataattcattgtgtactatataagcaaattctgcattcagttgacattgctacaggtcatgtaagatgatgcatttactataactcatggccactatttattgtctaaatttcttacaaatacataatattgcctatagagggatcagataaaaatatggatgaatcagtcaagactccttattcccttacacatctgtacaagtcagcaatagatggcttttacaaataggcatatcctcgttagcacaggaagtgcattcccagatatgggaatgctaagtgaatcagtaccaaccattcttattatgacatagcctctgtgaggatgtggtcccccacatggcatttgttcaatcactaacagtgcctaaaatagtccttgttcaagagcagacatgcagtaaatatttgctgaataaatgaacggtttatccattcaattcagcatccctgaagtcatacatgc

SEQ ID NO: 43934 - DNA, 1154 bp, Bovine  19866880860667
  misc_feature (1)..(1): n is a, c, g, or t
nctttttgctatcagaggaatagtctgtggagtttctgtgcttctcagcacctcggaaactggctgatggggataccgaagagctctggaattagaaaggaaagcagaattgagagatgaccagtcatttaaccctgtcattttttaaaatcacatgagactttatctcctttttgctcttagtatacgctcaccaagctgttaagaggagacaggcctcccccgacccactccgcattgatgcctgcatgcgtgcgtactaagtcacttcagtcgtgtcagactctacacatcctcatggatgtagcctgctgggttcctcagtccatgggattttccaggcaagaatactggagtaggttgccacttcctcctccaagggatcttccctacacaaggattgaacctgcatctcttacatctcctgcattgacagatgggttttttaccaccagtgccatgtgggaagcccaccctgggtcagtatagctataaaaagatcactccctagtggtcagatgtgatgatggcaactcctccactagctccagagacagcggtgcagggtgggagtttagaggaggaagactgaggactagtaagtgggtttccattgataggggatgagtaactctaaacccttcctttctgtatcaatccatctcagggttttatatgattactctaaatgtaggaaccaagcatggtaactactgctactcaaacgttcactcttatgtttggtggcagaaaagacagtaggcattatccattaaaggctgaagacagaagcaaaacactacaagtcaaacaatttcatactgatagcttcttgactatcatctatgcccactgagttccaatcctcattcccaggctaagacttgcttcaatgcttctgctttgttttcctaccatggcccaatgcaattaggcttttacaaccattttgccattgaaatcatgcacacaaacaccatctgtgagttactacttaccaatttaatgccaacccctatatctagtttttcccctttccagtctatcttccacatttctgggattctcaaacaaatctccttccagagattctcacccttccttaaaaaatggcaaacggtgtcccactatccacaggggggaaaaaaccccaa

SEQ ID NO: 43935 - DNA, 3839 bp, Bovine  19866880876116
  misc_feature (1)..(1): n is a, c, g, or t
ntggaaataattgcctgatggcctcctcggtctcttgagagaaatccatcttcactctcacaataccagggagttactgccaagccttggccttgaaattcaaaacattcttctggggaaaaaataaaaagaagatggcctctgccaattattagagaaaaattgatatgcagcaaatatctcttataccaccacacacttgactggagaagggggaccagttactagggtgggaatctgctgagtatctggattcaggacaggggagaggaaggcaccagcatgtaaacacctcaatggacctatcacagctttggagtctgtgctggtacagactctccgtagactgaggtcactacttttgaaagctgttgttgttgttcacttgctaagttgtgtctgactctttgtgaccccgtggactgcaacataccagactttcctgtcctttgctgtctccctgagtttgctcaaattcatgtccattgagtcaatgatgccatccgaacatctcaacctctgttgcctccttctcctcttgccctcagtttttcccagcatcaggatcttttcccatgaatcaactctttgcatcaggtggccgaagtattggagcttcaatttcagcatcagtccttccaatgaatattcagggtcaatttctttaggattgactggttggatctccttgctgtccaaaatactctcaagactcttcttcagcaccagagtttgaaagcattaattcctcagtgttcagccttgtttatggttcagctctcacatccatacataattactggaaaaatcatagctttgagtatactgacctttgtcagcaaagtgatgtctctgctttttaatatgctgtctaggtttatcattgcttttcttccaaggagcaagcatcttttaattttttcactgcagtcaccatacacagtgattttggagcccaagaaaatgaaatctgtcactgtttccacttttttcccatttatttgccatgaagtgatggtaccagatgccatgatcttagttttttgaatgttgagttttgaaccagctgtttcactctcctcttttaccttcatcaagaggatctttagttcctctttgctttctgccattaatggggtatcatctgtatatctgagattgcttatatttctcctgacaatattaattctatcttgagcttcattcagctgagcttcattcagccctttatttcacatgatttactctgcataaaagttaaataatcagggtgacaatatatagccttgaaatactcctttcctaattttgaaccagtctgttgtttcatgtctggttctaactgttgcttcttgacctgcatacaggtttcccaggaggtagataagatagtctggtattctcatctctttcagaattttccatttgttgtgatatacacagtcaaaggctttgacacagtcaataaagcagaagtagttctttttttttttttttttaattcccttgctttttcaatgatcccacggatgttggcaatttgatctctggttcctctgccttttctaaatccagcttgaacatctcgaacttcttggttcacatactgttaaagcctatcttgaaggattttgagcattaccttgctagaatgtgaaataaacacaattgtgcagtagtttgagcattctttggcattgcccttgtttgggattagaatgaaaactgaccttttccagtcctgtggccactgctgagttttccaaatttgctggcatattgggtgcagcactttaacagcatcatcttttaggatttgaaatagctcaactggaattccatcacctctactagctttgtttgtagtgattctccttaaggcccacttgacttcacactccaagatgtctggctctaggtgagtgaccacacccattgtggttatccagttcattaagacctttttttgtatagctcttctgcatatccttgccacatcttcttaatgtctgctgcttaagttagatccttgccatttctgtcctttattgtgcccatttttgcatgaaatattcccttgatatctctaattttcttgaagagattgctagtctttatccattctgttgttttcctctgtttctttgcattactcacttaagaagggtttcttatctctccttgctattctttggaactctgcattcagatgggtatatctttccctttctcttcggccttttgcttatcttcttctttttttgaaaaataggttgcctattaacaagacagaagatggtacagggtggtctctcatctataaagcttgtgggacaaaaaacacaggagggcttctctttgctcaattcttgctcaattctctgaaaaacatgagccctttaccactacttcagacagcctgacaggtcctcccagacatttgacatgctttaattggaattaagtgggaaaaggtcagggactctgacctgacttcagtgtgagcactgggacataagtcctctgagctggggatggagataggaaaagggatgcctaagaagcaatgttgataggatctgtggagtatttactttgcactaagttggtgatggacagggaggcctggcgtgctgcggttcatggggttgcaaagagtcagacacgactgaatgactgaacagaactaaactgaagctttgatctactgtctccacacatggcaactctttcaatattcaggataactctgagctggcatgaccatgcccattttccagatgagggaatgaagagacagatcctaagtactgtggtccttgctctatactggggaagtgtcagtatctgagtttaaactctactgactggctacagagcccatgcttttaagccactccagtgactctctcaaggtctcctacttcctctgattacttcccactaggttagaaatagagctaattccactttaaaggaaaaaaaaaaaatctacatcggaaatattgaactctaagactttccatttgggaaaacaaaaaaaacagtaggcagcctaatgaaaggaaaaaaaaatccaagactgaattccaactgtccttctcggatttgaggaatggagctataagctgaaagtgtaaagaaaaagtcattggaagaataaaatttggggcccaaagtgttcaacttcaaacatatctacagcaaaacttattttaacaagatatgatttcaaaagagaacatgacagatagctgataaaggctttcttctccagtcaggaacagagagatttcgcctcccatttgttatacacagatgactaggaagaggttcaggtagatgtggggacagcagccagttttctaagtaagtaaattagagaacatgaaaaggcatgttggaacatatcctttaataatacatgccagaaagtaatttctattaattatccagttgagctatttcaaatcctaaaagatgatgctatgaaagtgctgcactcaatatgccagcaaatttggaaaactcagcaatggccacaggactggaaaatgtcagtttttattccaatcccaaagaaaggcaatgccaaagaatgttcaaactaccgcacaattgcactcatctcacacactagcaaagtaatgctgaaaattctccaagccagtcttcaacagtatgtgaaccgtgaacttcctgatgttcaagctggttttagaaaaggcagaggacccagagatgaaattgccaacatccactggatcatggaaaaagcaagagagttccagaaaaacatctatttctgctttattgactatgccaaagcctttgactgt

SEQ ID NO: 43936 - DNA, 1774 bp, Bovine  19866880937748
  misc_feature (1)..(1): n is a, c, g, or t
nattacagggctaaccagagacaggttttccaaaatacatatttagcaaactaactttggtgtccgtgaaaagcttagaggggatttagtggaggaatgggtaagctagttcttcagcagcagaatttcacatctcagctctaaactgttcattccaccccatctccccttgccttctctcctccctactctgcctgtaccaccctcaagcggaaccctgttcacagcctgacataattggcaacatgctttgttgttggtttgccttgctgatgcctcattactggaaggttgccaatgttagcataccagctacatgcaccaatggtctgatctggaatggaaaatcctactgtatatgcctatgcaggagtgagtcactaaacagctctgaagacgaactagacaaatgtttgaataaaagcaactgaagggtaactgctaattctgaagtcatggtcccagctgactttcctggcttccttccctcctagattttcctgtgctcctttgttatctgtggtttaatcctcaagtacagttctggtgcgatccatgaggcaatgtttctaaatgctaacatattggctcaattatcccaaaagaagggaactaaaaacgtttttcttcttgcagctaccaaatgtccaagtctggatggcttgcttaaaaacacacatacactgaaggtttgccccttgcttccatgctgaacactttcttctccccaagagatgacagagaccgtgatcaaaatatgagatgtgtagagaaaatctgtttcacttgtgtataccatttttgaaagctgaactaaaataacatccctaccttttctcaggttggatttcctaaaatatacttttgtttcccactctgaaacaaagatttgagccaatttattttgccccaatttgtgacattagcaaataaatgtctaaagcatcttaagtgaaatcacagaaactatttcatcaaaatttcaaaatgttgagtatatgtatttgtgtgtacatactcctgtttcttcgaggtaaggaatgaggctactcagaattaataagggataataagtgatggttttctttcatgaactgccactgaaggtttcaggaagactttaaaaaaaaaaaagctctggtaactagtttccattgtatttattaaaatcccacacgctacttttgtttgtcttccatccactttcttcatggaaaccaaagacacaaagaagaagcaaagccctgacttgcacttgataaatatggccctcatagcattctgcacaatttggagcctagaccattatttcagtgaagcctgtgattgttcattagcacaaagagtgtgtaataaatataatgaaagactgctggctttactctatctttgtcatctaaagcagttccatgaataactaccggggatttgtctccaaatgacttatctgcttcccttctaataaataacaagtaattagggtaatatattgtttcctagttatgttctccatgtagtgaagagaaacaaatgcacaagtttagatatgaaagaatagtagataatttttatattatcccttaaagtatttagactcattatgcataagttaaactgctgggaggtctaagtacaaagcaagagccgagcttctacatttaatgagtttctttattactcagggcatgaattactactctgatactataaaactgcaacgagtgctctgcatcttatatgagactctttgaggaatgcactcgtcagtgaactg

SEQ ID NO: 43937 - DNA, 854 bp, Bovine  19866880942047
  misc_feature (1)..(1): n is a, c, g, or t
nctttgttttaactttgcacatgcttggtacttataatagaaagagacaggaaccaagactgtttgctttttctagtgagagaaaataaaacaagaagacaatccaaaggaagccatagtgagatcaccagtagataaacatttcacaagagaaatgataaccactattatgagaagcaaatgcatcttttttttttcttggccatagaactttaaaaccgtctctgaaaacatcccgttatccctcagctagcagacacacatcttccaatatttgacaaataccatcttgaatctttcttagtgcaggtggttctaactgtgtcatgctgttactctcttctcagttaaagtcgcatttctttttcaaattccttctgcacagcagaagaaaaccttagcagatggattagggtaaaggaaatggtacataatgaatcacatttgaaaccccagcatgcagatcaatatataaatatatataatcctcctcctctctgttcattcagtgaatttgagtgtttcagagactcaggaggccagaatcctgctatgtgctgagaaagcttctcacgcagctatgcctctctccttcagactgatttctttatctcccctgccattgagcaagaaatgtcatagcatcttctagcccaagtcttctgaacacttggagatatcaaggccagaattctcatcttctgcaactccagggaaattttctggtgaacatttgctatagactgaatgtttgtatctctcccttcccctacaaattcatatgttgaactctaatccccaaagtgatggtgttaggaggtgagggtcttgggaacgattagagggggagtcct

SEQ ID NO: 43938 - DNA, 1154 bp, Bovine  19866880949663
  misc_feature (1)..(1): n is a, c, g, or t
natgagactctcccctacctgctttggaaacccaaagtgatgactcagtctctctttgttacctctctgaatgctgtgaaatttccttctagacttctccttctgttcactatagagtcccaagccttttgctgcattcctacgctccagtaccccggtgtaactcctccccatacaattctacttggcagtccagcattacctgaaaaactttaacaaaacctaccccctaagtaactttcgctgcctcaagttaccagtcaccactcatttgttttccttttgtgtttctatatccatcatcctggaatcctgtcaattctcagtcccaccatatcagttagaccctcagcaccccatactttgattagtacaaatctgcactagctcatttcgactgcagtgaacccacaatgcatcatcactgccaatacttttttcttaatccatggccgctcctgtctcttagaaccacctcttcattacttatcaaagttgtactcagctatcctgctcagctcatgtttcaccggttctgcaaaggcctctccaaacacaccttgcgtctactatctcataggactccctctatcattcactggcacaggctgcctcataaaggtactgttactcatctgcttatggagaagacgaccttgacttgtcaacaagattgtgaccttccagggagaagacagaagcctcaggactctgtaccctggcacctggctcaccactatttagtcatatggctgcatatttaaagttttgggtaaattaattttcaactaaatatagagttcctatatattctctacgcaacttctactaatgcaaaaacgtcttacatacctgtagactttatcaaaaccaaaaataaaaaaaaattacatacccagagaacttatcaaaactaaaaaattaacattgtacattactattaatctaacacagaattcactctgatttctctagctttccattaatgtcatttttctgttccagaacgccacactgccctgaggttttaatttttcacttgtttttataacaaaattataaagtcttttcaaagattttatgaatgacaacatccagattataatcgtaatgttgaatatattatgccttgaatttaggagagaaaaaaatga

SEQ ID NO: 43939 - DNA, 1782 bp, Bovine  19866880968366
  misc_feature (1)..(1): n is a, c, g, or t
ncagtgattgttgaatggaattggaatttcctttcagtagacctgaatgttcattacatatctggcttgtgcttatagctgatctgggcacatggccagaattctttaattctcacaaagatcctaagaaagggattatgacccatcaaggaatgattaaacagaatcagatctgcacaaggtgatacagttattaggtagtggattctggatttgagatgaatttacctggaagggtgtttgttgggcgatgggtctgcctttgtttggagatcaggccccagcacatttctggaatggagaactcctggaaggctgggctagtccttgggtttgcccttgagccactgcactttgggcttataccagactcctggagtgtgggggcattctctgcatctctgcttggagtcggggccagaggcttggcctgagctctttctccatctagactgctttcagtgggtgagagggctaagggtcgctttcgcctggagtctcccacgcatgggggcgaagagagctgcttatttatcaagatgaatttgcttcctccctgggtaacctatttctcatttgtttaccaacttgcttttccatttaacttttatcttttccttgtggcctctaaaactatgcctgaagacaacgggctgtttgttaatcaccatcttgtgggtttttgaagggggaagctgggaggggaaaatgtgatgttttgtggcctctttgtagttcaaaaagaggttcttagatgcaggaaatcgctcacaactcaaaattttaaatgaaggcaaatgttttgcttatactgttaaaagactttctttgcagcattcaaatgaagggatatttcctttctcaatgtcccttagtccctactggatagtgcttgtttttgttgcatttgttttatttgctggacaaaattccttgtattctaaatgatactagtttgagccgggttggattagtggactgagggataagatgcatctttttaggtgctgttccagcgtcagtgaggccgggatagtgcaggtgctggcccttggttcttgctttcttcattttgtcttgcctagaattgttttttttttttttttaactttttgttttgcaccatagagtaggtaaaggcaattgtgaattaaatgtttcaaatgtgtggttagaagcaatttgtgtttgtttttagtgagaatgtttttatttgacttgactggatagactggtttatggcttcaggacaatagtaatcacttgatggctccagagccagtgaaagggatgtgaaatttagatgttttccctttttccctccccgcacctcctcttaaaaacctctagtactttagccgtggtggcagatccagtggtctcgtggctcatttaccatcagttctgtggggtgggctgttggagagaagtgggaggcagcgcgtgtaggtgcgaacgatgaatatttacactgatgatgacagttcgcgagactgaggacttgacttgttcagagtaagttcactgagaagagagttcatgactgtttactcctaagagggaagggcctgaggagttttagtcagaagcaaaaattagagtcattttgatgtggccttagtaacagctgtcagtggtggttgctttctgtctgtaaagagggatttggctggcaatcatcaatgcaaatctatatgccctctctgttttcactggacttgacctagtgtttatgccaggctttgacagtttctctaccaccgagcccagctttcctcagag

SEQ ID NO: 43940 - DNA, 2713 bp, Bovine  19866880970504
  misc_feature (1)..(1): n is a, c, g, or t
natggagtgaacgttaagcttaagcaaataagtactccatcaggataattaatttaattgtgaaaaagagccagtaattatttctgaaaatatatagcaatgaggtagtagatacagcctcaattctgttaacagtttttactgaagtttctgaaacaaagaattatctcctcacatattcaagtttggaatgagggcaaaataagaactactaacggatcaagttcagaggaaatgtctttctgccagcaaaaaaagaaattctttttaatcaaatgtccccaattccttgaccaatccctgagcaagagcagtgtgagtgtagaggttcagtctacacaaatccctggcaactctagacaactccaactggaaaccaagcagaggttttcttgtccagcacctctcactctataattctaccaacaggaaaatcctgcagagattaaaaaataaaaaacaacaactttcttagaagtaatgacaccctagtagcaatgaccacacttggtgccatatcttggcttctttaaataaacaaacaaacaaaaaaaggtgagcctgctccatccttgccagaaagtaagattaacaggtatgacaaacaggacaacgggtcaactcgaaggggtgctcactggcaaaactcgagacaattcaagcatcatgaagaataaaaactgtaatagattacaacataattttaaaaacagttgccaggattagactccatggtacccccaagaaaacaggcgtaccaatgggtcatgaggccaagaatcagagaagagttctcaggaccacaaccatgcttccaaccagttggccaagttgggtgcactgaacatgtgtgccccgacccaaccagaagacctgattctatgaggaaaataagaaagggaccagacacaggaactgggcaagagaaggcaacaaactctgaaataaagcggcaagcacagaaaacgcctgagactgggctggtatctatactccctgggttgtgaagatgccctttagtaggaaccctatctgtgggggctgagatgagtctgagaaaggaaatcctggatgatatgtaaggaggcaccataatgaagggacatcagagccactcagctagaatctttatcatctctgtgagcaagagcaggtcacttcatgacctcaagtttctttatgtaaaatgtgggaaaaggtataaaacctacctctccaaggctgctgggaaaattttataagattgagcatataaaacccttagcatgatgcccaataaatgattgcttctatcattggaaaaaagtatccaaaagtctatatttacacacctactcactcactcacactgggaaggagcaagggggaaggcaggaaagaatattattttaaaaggaaaagaatttagaatttaccacctcattactccaaatctattcacagcatcaagaaacactaaaaccactgggtgaaatgttgctggggaacaggttattcagtgtcaaaggatatccgcacagatgattagcttcaacaataatgtgatacaactgggaaatacacaacatcagtcagggagtgttttcactaaaaatacttaacctgaatctaggtggctcagatggtaaagaatctgcctgcagtgcaggagattctggttcgactcctgggtcggggaagatcccatggagaagaaagtggcaacccactccagtattcttgcctagatagtcccatggacaggagtctggcaggcagcagtccatgggatggcaaagagttggacacaacagagcaactaacactttcactttcaaacatgagaaaacaaccgcacaagtccagattgtagggcattccataagaccgtcattttgaagattccaggtcaaagtcataaagtgaaatgtttgggaactgtttctcagcagcgtgagagaagactgaagagacagcacaacaaaagcactcctgtacgtgcagaacagattgagggacaattgctgagaagaaagatgtggtatcaaggacattttctggacaaatgtgaatatgaactatacactccatagatggatgtcttaactctatcacgctcatgctggaaaactacaggagatgcacactgatgtattacggggtgaatattatcaagtcttcctctttcaaacaattcagcacacacaaaatataagtcttctgtctgcatgcatacacgtacaaagcaaaagtgacaaaatgttaattggtgaatctaggtcttgcctggagaatcccagggacgggggagcccggtgggctgccgtctgtggggtcgcagagtcggacacaactgaagcgacttagcagcagcagcaggtctaggtgatgagttgttgctgttgtttagttgctaagttatatctgactcttttgcaaccctataaactgtagcttctctgtccatgggatttcccaggcaagaatactagagtgggttgccactttcttctccagggaatcttcctgatctagggatcaaacccacatctcctgcactacaggcgaattctttatcactgagtcacctgggaagcccaggtgatgagtacactttgttttacggttctttccactcccctgtagttgtagaggtggggaaaacaggatgcacccttctagccagaaactgggagttcctgctctgaacaaatctctctagcaaaagctagaa

SEQ ID NO: 43941 - DNA, 1020 bp, Bovine  19866880983797
  misc_feature (1)..(1): n is a, c, g, or t
ntagtaattcttctctaaggtgttgtccagtaccatcctggcatgtatgcaatacacacagcttcgacagtaagcagtatcattcttgattcacacgggtcgtttcccgattagtaaattcattaggcactccttagaatataattcctattaatagtcctcatagttgtgcagggggatgcaggagaaaccagatcaaaccagccacacaactatgttcctaccccgcagtgcagaactcttggccatggctgggcctggttttacttagatattgagtatcagaacgctactcagggcctagggaacaatatgccaaatgtctagttgacagctagaagtagcagataaacctgtaatatttcaaacaagaaaaactaaaagtcaccatgctctgtaaattatcccaccagcagctattcctaaaggaagccttatcttgataccaccccctagccctcctttctacattcccatttttcttttggtctttaggcttggtcaacaagtctgccattagcccttgattgactgccctctgcacttttcatcttctgtcctgtgttagtggtattgattttcagtattggatctctccctccatgtcccatatcaggcactattaagtctgtaatatattctttctgcaatacaacactttcagttagttgagtgtaaatagaagcacaaagtcacagaatctcagagataaaaggaatcttagaattcatacaggtcaactccatcattttacaaatgataaaactgaagcctagggaggttaagagctgagcataagatcaaggtcactcaagcactaaaagtgaaggatcaagaacttaaacctctgggttctgtttgcaagtccagcctgtacttcatgtcctagggcaatatttatcccttcctaatgcagtgaacctgtcactctacgggcttggctgtaacaaagggacatactagggaggtaatccataatagagtgctatatattagaggaaaagaaatcacttaagattt

SEQ ID NO: 43942 - DNA, 1653 bp, Bovine  19866880989206
  misc_feature (1)..(1): n is a, c, g, or t
naagtctccacatcataaaaatattctctcaaacccataatatgtaatagagtcagcatttagaaaccgaaaccaggaaagtcacatatcagagataaaaagccacagagcgttcaccgttattttctcaagcattttgagatttcactaatgtaccctgtggctgactgacagaactagatgtcctttcataattcagtgttccaaaggaagttggcctggtcacgccggactgacagaaccagaataactaacacaagaagaaaccccagggtttctggttcttgtgtttcgtgtgaccttcaagcttaacttcaagtttcagatttatgtgaactttaaaacagattcatgagtttcatttttaagtcactgtgattttcatgggtttcttaaaaagacattaacaacaaatcacccagggctcatttcaatcccacctcactcttttgatacctctggagcctaaagaagtaagggaatttgggggaatcgtgttttaatgtatttatgttctgcctgcagacacggcacgggttggagaaagtagtcaagtttgcaattatatgaccacgggtttaaagaaatctagctcttatttatagtcatgtgtgagatttatgagttgattaagtcttcattgatcaaaagcatacttcaatttagtatttagtgtgagaatttgcaaataaggtccagatgtgtttatgtgagccagacaccatggtaaccagactgtgaaataaacctacttagttgatgtctaggtgaggccaaaacaactggttgattcaaaaatttcaattaccagacaagaccttggaaaaaaagctatcaatttgttgctaaatttagctggccaattttgtcaaaaaaaaattttttttttcagacagcctttgaattatgaaatctctaataagaaaaaagtggtataataaaatattaaaattcttggatagccagagaattgcatacaatgcagacacaactttgaaacagaaaatgtaaaatgcataacaatttccaggaataacaccaacaatttcagccatttctagagaagcaaactacattagaagacttatgaaaattattcatgtaaaatctagaaactattttgtagcactccttgattaaaatagcgctccacagcagagggccaagaacagaatgcacttttctaactctagatatctctgtcagtcctaggtttggagatttaataaatgaaataaagatattcacttgcagcaaaaggaaactccatttaactggctctctcttcattcataaggagactctactcctcaggtaacatgtgatccatggtgggcttggtactagtagccagaaggtcccagtagcacatctacccacatgtgctatcatctgccgatctgcatgattaataagaaccagtgatgtttgtacccaaacctattttaacttgttttaaaaagatgaaacataggacaataaaagaattattattttctgagaattaagtcaaatccttagtaaaaattcaataaaatgagctactaaaaaatgttatcacatgacatgtgagaaagaaaatttgtaaggtttcctctattaaattgctctaagagtatctttaagtgctcataaatttttaaacaagtcaaa

SEQ ID NO: 43943 - DNA, 1921 bp, Bovine  19866881004876
  misc_feature (1)..(1): n is a, c, g, or t
ntgacacatgaatttctgtttcgtatttctactttcctaaatttggtctttttaatttgatgaaaaacaaaacctttcactatgttatgaggtacagttgtatgtgtagtgctgttttttttttttttttttaaattttttttggcacctagcttaacatgatactgaattactctgaactgcattttgcatgtatagaataattggaaaatagaagttgaaaactgtgatcagtcactttcatattgtgccttagggaggaaatgaacaaaatgcagtggttacatggactggtggcagtgttctcgcctcataatggcaccaggttaacttgtcttattccttgttaactttgtaaggaatcaatggcttgtggataacatggtttgatgtaggagagcttggctgaaatcaccagggatcccctgataagtatgcagtgacacctgtaagaccatcttccgagatcattcattaagtgccagcagccttcaccggacatgtctgcttcgcattcatgccattttatcagtgttggtaatgtgttgtgacgtgctgtcatgtctaaggaatgtcctaaaatgactaacgcacctggatcggggctttagaggatttggaccagttttctactttttacattgggcagcctttcatttaaaacattatttcttacaacactgaatgaggcatcggagcataatcctgtcccatgttccatggttgactaattggcttgttctgcatggtcgtatattttgattgacagttggatacttggtgagatccttatggtagcatcataacctgcttccccttaggaaatgaaagatggttctcaagagggagaactttttttctgtaggcttttttgccttgcattgtgaatataaacaagaaaaagaaaaataattcaaatcattattttgaacacacttaatcaaatgtgggcctccttccaaaggcagcaatgccaattcttatcagtatgtgtccaagaaaattggtacatatttgagaacctgactcatttctttgactttctgttagatagcagttggattattactggacctaagctttaaggtaccttaggttagagctgcattgtagccgtagccataagtggctatctagatttaaattaaggttaaatatgagtggctttgtggctcaaatagtaaggagtctgtctacaatgtgagagacccaggtttgatccctgggtcgggaagttcccctggagaagagaatggcagtccgctccagtattcttgcctggagaatcccttggacagagaagcttggagggctatagtccatggggtcgccgagagtgcacatgacttgagtgactaatgctttcactttgacttttcaaagttaaatattgttaaaaactcagtttctcagtcacagtagtcacgtttcgggtgcttactatccacccatatttggctaggcactacagcacagattagaacatttccaacatcgcggagttttgtgttggaaggctctggacctgtagagcttattggacatatcaataaagaacgccttgcctgcatgtgagttcttgagaatgatgaagacaaggccacgtggtcagtacgagaaagacacaggcgacagtttccaaagtgtgtcctgagagccaaagttccacagccaagattatttggaaaggcctgcgtacgtatttgccctcttttgagatttgaaactgagcaaatgagcagtttgcctggtgttagttgaattaaatcttgtgagttttaaaattttgtgtaagtaatacctaatttcttaggggactaacatttcttggaataatatttaggaaagactgactagaaggattttggttaaatttaaagcttatttgtgctagtaaactgctgaagaaggctcagtgggt

SEQ ID NO: 43944 - DNA, 1365 bp, Bovine  19866881010494
  misc_feature (1)..(1): n is a, c, g, or t
nttagctgaggcccagagtaaagtggcttcctatctgttaaacaggggcaataacacttgattcctcacttccaggcatgttgtaaagtttaattagatgttagccataaagtaccatgaacttctcagagaaaggcagcatataaatacaagttacagagcttttattattcatctttcttctctgatttatctagaagccagcctcctgtaactcagaacttaagcattttatccccagatattcctgatctttcttagaggaagagttaggctcttgtccttttttcctccctctctaaatgtctgatgctctgaatttcactcagcctctccgtgctcactcatttacatcatccgatggattgccttcactcaccctatgtgctttgattggatgaccacagagacagctttgattggatgaccacagagacagctttgattggatgaccacagagacagcttgatctccctgagtactcccttgaactttcaactttaagtttcaataggcaccagtgggattctaatcaaggcgggggagactattgattgtttggctctatcatgaatgcacaattctctaaatcttttctattccattgtttgaaagtaattggtaaatcgttaggattgagaccacgcccttctaaactgaagatgaatttctaacttggtcaggtcacttgtggcttagcgccttaagactgtcatttctgcccatgtttatttttcatatattattaaacaaaacagatgttatcacctgctttttctatgagtggggtttccacaaacagaactaaaagcaatgtttccacaaacagaacctacaaataggttccaatttcttttctcttcaaatgaaatgcattgtttttgtacaaactgcaaaataggaactaatgttattaatacttaatagggaattattaattttaaggaaaatccacagttgaatttttcaaggttggactcaagtattaatctttctggtattttcaggatttatagcagatactgcatgtgtcacagactacaacaatattggataaatagacaaaattttgggagcgggggagtggagaggaatcagaccatttcattgtatcctagaaaggtagaaaaaaatcattaaatcaatatttagatgtgatttctaccagaaattagctgggacacaacaaatatggtctagttctagagagcaggatagatggagggtttaaggagaagagaggcttgcaagagtttgcaattgtatccataatatttaacttaaaaaaaaaaagatctaaagcaaataaggcaaaatgctaagattttctaagtggcaaatgcaggctattcttttactgtttt

SEQ ID NO: 43945 - DNA, 1186 bp, Bovine  19866881033065
  misc_feature (1)..(1): n is a, c, g, or t
nttcaattgtacagagtttcacctcaaaaggcctggggatatgtgcagagaccgtgaaatgcctgagatctttggagtgctggacatatgagacacaaaggatatttggttttccccatttgtccacagctgtggtcttaatgtaccaggaaatgggtgcttaacaagggatttttgtgctgcttcctgagcagttaaatgtattcacagcctggggaattaaggggaaaaatgagacaaggaaatgctttgggggtccactgaggcagggggaccaaaccacaggtacagggtatttcgacagccaaagagcaccaaaggaatccatagctacggcaagtttggtgggacaagcatgcagcaaacagggctctttacttcttctcagaattctgaggaagaaagttccaacggctgtggctcaggcgagaagctctggccttatgtaaggctcagggagaagcatatggcagtatgttgaagctcatgatggaaaattttcccaactgagtttaagtgaacatgttgtatactccagacagctggcaaagagtaactggcatcctggcaaatctaaagacaaaatgacttttttttcctcatactttctcttctctgtgttacttcctccaccaagtctcagctttgatccatcgctggctcaaaaaaagaggggaacattgcttctatttgtgaaatgctgtttctaggatcgtccataaatgctatttgtatggatctatggctctgatcaatcgtctcaggactcaaggtaagtttctaactctttgggggcatggggcacctgagagtcctgaggccgggtggatccatgtttaggaggacacagccactggggcagcgtcccaggaagatagcgctggccgaggcagctgagtgaggctctctaactctgagcagaacaagaaacagaagggggatgcattttagaattaagagtcttagtttataagggaaaggtgatttctatttggatttcacttttaactctgtttcctccaggactttaagaagtgatccattgttcatacctggggaatcaataccgtaatattcgtccattccataatctctggtgagctgttttggctaatgtgcttgtgtatagcttgagattaagaattcagcctaaaactcaacttggcctctaaaacaacttaacgtc

SEQ ID NO: 43946 - DNA, 1028 bp, Bovine  19866881062356
  misc_feature (1)..(1): n is a, c, g, or t
naaatctattgaaaggaaggagggaggaagggagggaggggaagccaaaaaaaaaagaaaactcaggcaagagaaatcttatccatagaacaacttaggcagatatcagggagttgggcttctcagacaaaggcaatagagaacatcagttttctgtggctgctttcttacctgaggcctgttttaagtaatggtcaaaacttgtgagttatctcacctgtgtggtacctagaaagcatttcctctttggcaagtggaagagagatcctgtactatttttttctcaatataaaaaatcatacctgaatttgtgagtacaggctcatgaagctatgacaaaaattaaagagaagcagtcttcacacatgttttgaaattttgaagaaaaagagagctaatagaagttgccaaatttgtctttctgacaagtgtctctttgtacaaaagtggtcccaggaagcagtctgcatctacatcagctcttaattgtgatgtgctgggaaaaggacaccatgccgatttcaccacaggaaaaaaatgtaaatgttgaagatttttatggagcaatgacctcatcgttattttggtaattttattttttaaaaaatatttttttaaaaataaaatgtggtaacctttccaaacctccctttctgtggcctccatatccacctcctgtaaaaagcatgaagaaaacttcagtggagcaacaaggctgtaacactgggagaaatgattgatttcacttgaacaccaccaccaacaaaaaatgtttaaaaacagtttcatggctcaactttctccttgcttttttttttctctcttatagttggaatgtattttatcgtctgtcagttttgccctatgatatgtcctcttaaattggatctgtaagcccttcataaagtttaataaatcttcagcatttcaccctaaggaaattatattaaaaaccttcaaatgtgaagttgggccggcagacacacagcgctgggaattttatcaccataatcagcgtgtaatgaaag

SEQ ID NO: 43947 - DNA, 1093 bp, Bovine  19866881066744
  misc_feature (1)..(1): n is a, c, g, or t
nttccttctccatgcgtgaaagtgaaaagtgaaaatgaagtcactcagtcatgtccgaccctcagtgaccccacggactgcagcccaccaggctcctctgtccatgggattttccaggcaagagtactggagtggggtgccactgccttctcctgtattaaaactataagagaaacagaccccaaaatggtaaaccggagggtctttgggtggaaaatttctccttgacaacacaaaaagtgacagttctgtaaaggaaacaatgaattccctattgagattctggtggccatgaaaatatgccctgtccaagcgtttgtttgctctcacacaggcccacacaaaaagcaattttcccaaccatgacgatagggtgctgactgtttggagaaacagcaagtatggatgacacatacctgttttaattgcttcatgaagcattgcaaggtttttgtctgtatctagaaatgacagaggtttccatttcagctctggatattatagctaggccagatggaatcctgtcgactacgtgattgagcgtatttttcatttgaaagtaggagccattgggtccatcagctgtagggtaatctgtgagaacatttttcttcattttagccagtagaccgtgcagaaacacctgtttcaaatctcggatcatttgcaactgctatctaagaaataagtgttgaaacaatatcattaagccactttttaaaattcacatacttgagcacaggagaaagtcagagtttgctttgccagtttcactagcatgactctcagagttttggataattaaacatgcctgtccccacttgtaggctactctgactcaaggtcccagaattcccaggactacagaccttcctgggatgaggggatttcagtgctaaaaccagaaaagaccaggagaaagcaagacaggttggtcaccttgttatagacacagtacctgaggtgttgagaggctggctggatgatctctcagccttgtcacttggtggtcaagttatctctgagtttccactcatttactgtatattcacttgagcaaggcatggcactgtctggtataatggctccattt

SEQ ID NO: 43948 - DNA, 669 bp, Bovine  19866881085560
  misc_feature (1)..(1): n is a, c, g, or t
ntctctggcaacactctaacactttgtggagggccaggagcatccccatcttctcatgctgcatacagccaagaacaccccagaaacaagtgcactgtttggtgtttgggaacagtgcggtcagtgcagggagccctgagaggaaagtcaagaaacctactgtttccctttcggccagcagcaccttggacgcccgctgacccgcatgaaccctggactaccagcccgcgtgctgatcctcctgtactgtgacaccaggctagtcccttaagcccttaagccccggtgtcatctgttcaaggaggccagtggaatgacactgcttggcaaactgtcggggactccactgaaaactaaatacagggatccaagcttgctacttgctttacaggaacaccaggaagattaaggagaacatataaaacgccttaagctctctgtaaagaaaggtgttacagggaactagtgctcgtaatttctacaattattcttctttcagttatatttccttgcattttcagattctttatccaaaataacccagactttcagaagcagaatatgtatttcaaaaataaaaacacaatcccaattagaataacaattaagtgaagcttgctaggaaatcagaaagtcaatatccaccttccttggctccacctctcctgc

SEQ ID NO: 43949 - DNA, 872 bp, Bovine  19866881129498
  misc_feature (1)..(1): n is a, c, g, or t
naattacattgttaaatgattaaaatgaaggtaatatgctaaacagatgaggaaccacacctgaataaagagcattctctccagtacatggacttttaaaatacaggtggccacaaaaacgtgcagaatcaaactgcaaaacatacaacttcctttctaaagtgcacagttactgtcatttaaaacacttataaagaaataatagcttacctgcttgtgcatttctatattcaacccataggacatctcataatactgtcaaagaaggaaaagcaattaattttgagcctttcatcaaacaagcttcctagtttgttcaaaatgtccccaagcaaacataaaagcctcacctaaaccaaaatatccatccttccaatgatggtacatcaggaagaacactctacgagtatcttcagcttaataaactaaaagccaccttaagacacagaatctaagagaataactcacaaaagtaagaaaatcaagctcaaacatagcattcttaacacctccaaggatctttgtacatcacaagcggatgactcacaaaggtctgatgaaaatgtggtactctatggactctaattcctaggcacagcaggcaagttcataacaaaaacaacacgcctcatacaaatgctgaggctttgacatgaactatttgaaacggtgatgctatttcagagtttctcattttaaggacactacctcatgttcatacattcatacaaaggaaaaaggcttgataggaaatgaatgagttactctagagcctttatgaacaagagtaaaaatatacttggtaatacttctgaaaaagctgatctgattggtttaaacatgtagtataactggcattaaagaaattctgg

SEQ ID NO: 43950 - DNA, 1401 bp, Bovine  19866881168902
  misc_feature (1)..(1): n is a, c, g, or t
nctgacccaagtccacgaggaagtgagaagaactggcagggcttgttgcatcacagaagactggatccaaaggtcaattaagatttcagaggatgcaaaaaggggaacaagaacacaggctacgtaaaagccactgaagcaatttcatcattgttaatcctgcaatgaatgtgtctcttccccaataaaaataaaatgttgagccccaggacagtaaacatttctgtccttttcaccactatattcctggagcctgagcacagggactgtacctgactagccattgaataacatatctttacaaaacatttaacaggtaagttttgtggcttattatatgtagactgtcactatatttagtatcacatggcaattactaactatcctgatgatgaaacaaaactgacagataaacttaactcttgggagctatattagtttactagggctgccaagcaaactcccacaaaccaggtggctgaaaacagaagcttattctctctcacgtctggaggctgaagtgtgagatcaaggtgtcggcagggccatgctccctttgaaggctctgggaagaatccttccttgtctctccagcttctgggagtggctggtaatccttggtactgcttggtttgtggcagcatggctccaatctctgcttctatcttgatgtggcctttctctcagttcatgtatttccctgcccctacccaaataatggcgacagttatgtcgctgatgtgtctcaggtacttcttcttctagaggactttcccaccacatccatgtggcctcagtgttaaggaagaggtactggcttttttaaagctagatttccacacaaaagctctcctactcccttctcatttcttttagagtcctgcctcatctccacctttggaagtactaaggaattcaatctgtacccattagccaaaggaaaaatatttatactgtgaaataatgaacatgaccccccaaaacattctctctgactcaagactctgagtgaggcagggcaataggaaataggatgtgagacccacacacacacaccttgtgtgctgggtggccccttgagacacagggcttctgggttagggataaagcaagaatacatgtgttttctccttaaaaaaaaacaaagctttgaaaagattaatgatacgcttaaatgatgtgatacatacattttcttaattgttaggaagtatacacctgaaatcaatagtctccatcatgaagttacttctgacttgaaaacactttttggataagtaataagcaaacagaagacatttttaattcaagccaaagtagctaaaaaacagaaatcacaatcttacatcctaatattctgccaagtagttaagcatgataactgacattcagacatatgac

SEQ ID NO: 43951 - DNA, 857 bp, Bovine  19866881193017
  misc_feature (1)..(1): n is a, c, g, or t
ntgttgaaaggacaagccgggactggttccactcacccttttctctcctgcctgtttttccgtaatgagggtggtacttaagatagttgatacggtgttttataggtgatgatttagaggagggaatgtgtatttgaaggatgtaagtcaagatctgggttgtacttagatttccttatttcttgaacagcctgaaactggaatgtgagaaactcgccagtgagaagacagagatgcagcggcattatgtgatggtaagaaaactgtgtcgcagattcagagtacctattagtttggggtaccaaaagctagaaatatgttcagattgctggaggctgcaggattagaggatagtcgctgtgccagtgcagttgaagttgtgggaatgcgaccattagcaacctgtaattcgaggatgttataacttgcctctgacaaccagctttgatttgaattttcaaaaagtttagttgcacagggtataattttctgtgctttgcttttacagattgaaaaaaaaacaaaaacctcatttacatttcgttgggattcataggcaaaatgtttttgtgttagtggttttctttgttgttttattgctcttgcttcaaacagcttttaaccagagaatttttcagtaaactgttaaagttttaaatgtgttttatttcttttaaacaatggtgaataagaaaagacactagacatcttttcagatttttcttccctgttcttcctttacattgtatattcctaatgtatgtgtatttgcgtgttttgtgtgttttcagtttccctactgttgcactgggattgttgtagtctcctgtaaaccgattcgttctcccagaatttct

SEQ ID NO: 43952 - DNA, 979 bp, Bovine  19866881305840
  misc_feature (1)..(1): n is a, c, g, or t
ntaaaatttaattcaaaagccatcactttccatgaaggcttcccttccaactaaatggaatctttccctttggctcttgcttttctgtaagagatagaaacttccctttcatatagggcagttcttaatcctggctgcatattagaaccacttggaaatctattaaaaaatattgatgcctgggcccctatcccagaaattctgatttagttggtctgaggtgaggctcaagcatcaatatatttaaaaagctccctaggtgattctaatgtgcagtcaagattcagaactgatggttgaatgagtatgttcttaaataatgtttgtcaatgaatcaagctaagatattaatggcttaaagttttaatagactaaactttaaaaacttgcattttttattaaaagcaatgcaatactaagtctgaagaatacaaaggtaaataatacatgttttaatgtttaacttaaaggaaggaatcataatttcactaagggggtacataagagctgcgagcatagaatatggtatatgagtagtagcctagaaatatatctaaagtatttttggagcatgaagcagggaaaccccctaatttaaaagtagcagaaaaagaggagtaaaagaagcctaagtgtgtaggtgacattgggctgaatgttgaaacatgaaaacaggtttgcaaagtcaggggtggaaaggctttccaggccatataaggaggtgtcaaaaaccatggctcattccgattcatacaccttcctaaaccaaaaattgaattgctagtagagaaaatggcaactctctgcctagttcttagttgtgagaggatgagaggatattttggggccagaggtctatgtctcaaattactcctgtagcagaccacctcagttgcaatggaccagctccaactttagttattttttccaaaaacagagaatgtttgcctttcaaaacaaactcataggaaggatgagt

SEQ ID NO: 43953 - DNA, 1179 bp, Bovine  19866881370553
  misc_feature (1)..(1): n is a, c, g, or t
ntgttgacctcatgcccttcatcagtgtctacaagaaagattgcagccagcagcaggaggcccagacacagccaggccacccaaattccgtctgttgcttaccaggggtgagaacacacttaagaagtccttcaagatttacttcacacccagaagcataatgggaaatgtatgcaggtccagagtcatgctttgtgtgtggatatgtaaagtagcatgctcagcctttctgccccagaaatgacccttctgcagcatcccttgatttgcagaaagaaaatgcaaacagagaaagctggactatagacacatgtttatgaagcttggataattgctcacatctgcttgggaaagaaattcttaaatattccctagatgttctagataattccgggtttggttctactgctatctttgcaccacacccccctgcccccaccccctcgcaaacttggcatttgaaaataatcaccatcaacagttccagtatcttttttcttttttgtgagtgtcttagcaaaactgaaattcagttagttgagatgaaatgcaccaccaactgatgaaggaaagaaactggccaaatatctctatcttgtaatgctttatatattgataaaatcagagaatacaaagtaatatgctataataaaacagtataaagcaaatgtctgtgctatattcaaattactccttacacaaaacctttcattggctctccagtttgttaacttactataatattcttctctttgattgccatgcaactcttcttacttcgaggagtatgccttactgttaattttctcccccattcagctttagaattaacttgctcaattaatctcattttcatttattttacagtgtttcatgtttatatgctgattttatgaacatctgtttcaatcacagttgcaaacccattacttttatgagctatacatattttaaagagatttactgctgacctttgttggtgaattggatgtttttgttgtcagtaccatttctgtaattgatgccattgttcctgccacccagatagcgatttcaaatgagatatatttgggggactctttagacacttaaacacattaaaccagacagaatagtcacttaacattgtgtagctggataaaagaagtgtacttaatcttgcagcataagcataggtaa

SEQ ID NO: 43954 - DNA, 1571 bp, Bovine  19866881423090
  misc_feature (1)..(1): n is a, c, g, or t
naactaggtgatataagtcttaaaagaataaagctcttaaaattttaacagtctaaatagggagttttcactgatgcacaggaaaggataggatatttcagcccttaggtatttattttccccaactggcaagacatatgcgaatgacatttgtttgaatattctactagttattggtaagtgcttttcctcttaccttacaaaagatacagttcttattatacccatgttctggtatataagaaaaatatcattaccctaaatattttttctacatcaaagttacacctgaactcaaacaatgaaaccagtctatgatgtgggcctggacatgggttctttcttagttgaaactttagccagaagaagaggaagataagaacaagacggttggatattctaggaatatcatatcaacagtactccatgcattattacattttctgggatgttgaggcatccagcctacttctagagccagcagcctctacatgtgtccacaaatataaatcacttggagtgatgaatccttgtgtaacttctgctccatcccattaatcatcaggcaagtctgctgactgctccactgaggttcttaccctgacctaaaggcatgacctttgctgagaggccaggacaaatgaaccaccctcatccctagtatttccataatgtgagtcctttccctgaccaatgagttgtgctcctaatgccccagttgcgtaagacctctaaggtatcaaacaccaaagactgttcaactgcaaaagacaacaaaagtgaatgagattctaagagcttattagggagagagagcttgattttttcttacctttttggtttgtttcattaatgaaaagtcaaagcacatgactattttcttgtaaggaggaaattacatatcgaaatttgttctgaataggtttactcttgttcatacagcagtgggtctgtaagaatcatacataataaaactgttcaaaatgtgagttcctgggcctcatggcctgagaacccaatagtgcacacagggtgtaaggcccaggaatcaatatttttattaaacaccggtaggtaagtgtctgatgcaagagatccttggacctcactctgagaattggcaattagcttttgccagttgcctttgttgctgtgtagttgttgcagctgccactgctgttctcaacagctgttctcttcacatgtccccaggcacctgctttctcactgtttgctgctggtggtaaatccgcaagtctgaggcatggtgtctggaatagaacatcagtcaggaatcctgagcctaggttctgccactaaataactatgttatttattatttagcctctctaatattccattgaaataataattttcaaaggcctctgaagcttaaaacatttcagtcagttcagttcagtcactcagttgtattctgactctttgcaaccgcatgaatcgcagcacaccaggcctccctgtccatcaccaactcccggagttcactcagactcacgtccatcaagtcagtgatgccatccagccatctcatcctctgtcgtccccttctc

SEQ ID NO: 43955 - DNA, 922 bp, Bovine  19866881532128
  misc_feature (1)..(1): n is a, c, g, or t
nttttatactcctaccctttggttgtgtcacgttgcttttccggagggcagttcacttgcctgcctgccagtgggcatgtgctgaggttagcatgcagccagtgtttgaacatgcatgtgtgttagaggtatgtggatccctgtctgacttcttgtttggtcattattgggttagatctcaatagccatgacgacctttcagtgggaatatatcctttaggggctctcgtattcacaaactgtggacttaaattaacatcctgaattcaaatgctcttgtggatcacaaacaacaaaggatgtattgtctttctcatcctttagctgtaaccacaaaaacccaccaacccactgtatccccatttacctatttctactcaggatttgcttgttgaccagattacatggagtggtgaaagcactaaaggggtccatttgcatttctttaggaagcctggctgccccttgcctgatcagaccagcgtgtgtctctttaagcagctctgctttatggagatggccagtgggaagaaatgtgtatccgattgtgctacggacaggctgaggtggtgttccccaaggcagaaggagaaagtctgaatttttcttggggtggtgttagattttagacttcctcaggcatagactcctacgcataattaccagtacagcttattcccgtggcattttttgcgggatctgtggggttatgttcagatgtgggaggagatcttagggtgttggtggagctagctcatttgccagtaggtcgttttcccacgtgagttatgttgtttgtgtgagcaggcccggtaggaacagaatgtgtaatggtagtggtgctgagcaagactggactggaattaattggctcaggaagtcgtcccctgtagaggaaagccgtagggagatacggcaactc

SEQ ID NO: 43956 - DNA, 790 bp, Bovine  19866881641785
  misc_feature (1)..(1): n is a, c, g, or t
ntgtccaaactaatcacatgtgtacatagaacctgtacttaatcagagaccatttcatccaatgtgaccagagagtagtattaatttttttagagatattctcctgacacacacttctggcaagagcagactaatggattcactataagtcattaaagacatatgaacaaattgtgagtcatatgatccaggtggttgaggcagggtatcttcaggttcagtctaccttatgtttcttgttctccattttgttgtcgcctgcataagaatctctgacaggcaaacagaattaacgtgtcattttctcactgagaaataggtggaaccaaaaggcagcattttctacccttgttcttctttcagggacaagactaacacacatatacaataaaactattgagctattttaatacctttcctgtcatgcattcaggaccctctaaagttgtcatccgctactgtttcatttaattctctggccttcagggtaatgtcagaaaattgaagagattaggaggtatttctttcctgttcaatgcatttgtgttgctgtaaattggcaccagctttcaatctcacggtcagggctctccagggtcctcccactggtatgacagccagtcagcatgataaatggcacacaccctctggcaggacagacagttgttcttcccttcctgactgccgcaccagccaagaggcaacatctcgccatcttactgcactgagtaaccacccccttaacactgatgttcttcaagttaattaaaggatctagtttccctgatta

SEQ ID NO: 43957 - DNA, 1025 bp, Bovine  19866881819642
  misc_feature (1)..(1): n is a, c, g, or t
ncaattatgttattagaacattgctgattgccccagtgcctattgttcagcttaacctttaaatgctagtggtaattaactactttatcattctaccaggaaactccaacatgtagaactctgttctacagtaaaattcacaaataaagtgctacccacagttcctgaaacagccagtttgaaaagaaaaagctatttgtacatgtgtgccaataaataaacattaccatttagtattaattaaaaaaaatattttgtcattgtttaaaaatcaaattttcctttttgacagagtagcagtaatgttcagtggagaatatcagaatcaaaagactcagtgaatcatacacagatgtactcacttttcttcttgttgtaaagcaccacattagtaggatgaaggggtgcagaagtatatgatggagtaaggcgaagaagcggcagagccgccacgttgccatacctaaggcatatcatgcctcagatcctactctactggatgacctcttatggatttgtttagccaagggaccctctggaaaggaatgtaccacatgaattttggattacagttgaggtgtgcagaggggtcgtgcagtcatttctgttcataaaaaaataattcttggcagctcagtgccactctttgtgctgggtgcccccaccgccggggatctgcagcctggagtgggtaggaccttgtaaacaaataggtatcaactgactgtgaatgctccactgtctgggtgaataaaacattaggacacaaagagtgatggattctgcctgacagtgtctgagggagtatcgaacagtgaagttagagctggttcttaagaatggtgaaagagggtttcaaagggaagatactgagagaaaggacattcttgaaagctgggtgggggtggggaaggcttccagtgcagtgacaagaggcacgggataaggtggagcagcaacatgctgagagctctgagaccaggcctgggctgaattggggcagagagtaagggcttgaaagacag

SEQ ID NO: 43958 - DNA, 1668 bp, Bovine  19866881845302
  misc_feature (1)..(1): n is a, c, g, or t
nattaaaggtttaagttatatttgatggcctgtgagggatataattaatgattaagaatcaaatctccaatgttttctttgtgcctagagcactccattatggatcaaagaaaattcacaaaacacaaaccaataaccatatttactgggaagataaagaggcccataaacatagtaggaaaaggtgagcccgaagcactaggtttaattctgttgttgatctttgacaagtctggaacttagtcagctattctcttatgataaaagaatcatcagtgttaacaagaccactggtacatagcaatcgtcagcatgccaagcacggctatttcacaatcacttgcagaaggtgaagtgcaagatggtacctcaaattctcctggatccaaagaagggactggcaactaggcattatgtctttttgtcctggagccatttttctgagaattactgacacatggaaccggggcattgatgaactttcataatctcattagaaacagggcatccctctaaaatctcttccatctgcctgaggaggtgggttctaggcctctcagagtttgcccttggacttgcctcccagttgagatgcagtgtgaagtgatgtgactggtggcttgtgggatgcaaggttacattcagttccgcctcctgtctgctgctgttgtgtgactgcccaaccctcgttctaaaataaataggtttgtatttctgccgatggagccgccgagccaattgcccccctctctgagaccccgagcctccctccccacccatacttcaccccacaggctgcctggcagaggcagggggcaggatgcacagtgtaataaattccatccactgctgagctgagggataacagatggataggtttcctcatgcaatttccacttcacttggtttgggtataaaatagcagaagggtggcttttttcttgtgcaattttcaaacagatgaaaccagagggagggtttgcaagagtgggagaaaactgagggacttgactgtccttcagagaaagccaaatgaacaggatgcccccaaaaccttgtgaagaattcagacttgtttttgctgctagatgggagtcagattcttcatccaaaactgcctgctcatccctaccaggcatggcaaaggcaacgatcaggggaggccagacagtctgttgctcatgttgttatagtgttatggtgattgcagtacaaattctcagggtggaaaaaaaggtataatgacagattgtgtgattatacccatacttataattaagctgttacaatacagacaagcgcctgctcgctaatgtcaccaacagaaacctctttgcttggaaaggagagtgactcactctggcaattagaaggagttccctacaggacttcattttcaaaccttatgagccctgcaacaagaagatgtgttgcttgtttgaattacagggaaaagcacagagatccaggagcaaccactcaatttccaggtacaggctggggcattgttagagaaggagttattacgatcacaaataccctcgttgcaatgcacagagaacttggctcctgctacaaagcacttcatcattgtgtttctatccaactctgtggggcaagctggatactctggtttgctcttcaggactgagagaggaaaaagaagag

SEQ ID NO: 43959 - DNA, 1316 bp, Bovine  19866881979278
  misc_feature (1)..(1): n is a, c, g, or t
ncaattagttatttggattattttaatgccattatgcaaattaacttatttgcttagatagtaaaaactgtgagcttaaagttagctgcagggggtgacataattatggttgttaaaagtaaaacatttcatgctgatgtatggcagaaaccatcacaatattataattatcctccaattaaaagtaaaataaaattttgaaaaagagtaaaacatttctagtttaaagaatcacagacatttttgcagagaaagtgagcaggaaatgatattacatccttttgtcgtgttgttctgtccatgaaaggaagaccagaatacattaagcagagagaagctgggagcaaaggcagttgtttagaggagagaagggagaagagaaggagaaagaaggaatagaagcagcctgaggtcttccctgatggtagagtggttagaatccatgcttccactgcagggagcacaggttccatccctcactggggatctatgatcctgctagcctcatggtacgataagtatgaaagagacaatgctttacttgtatcaatcatcaagctgtagcatttgcaaccaagtaattaactatctgggagttggtgatggacagggagacctggcgtgctgcaattcatggggttgcaaagagtcggacatgactgagtgactgaactgaactgaactgaattaactatcttatttaagaaagcagctcaccgagtagacagataaaatggaacgacataccaaaaaattaaaagttaaaacccaaattagatgttgcatagtatttgaatagagttcaatttggggtgcttatttgcaggggttcataggtatcttatttatgttctgcattatatattttcttaagacttgttagacaatgtagtaactaacatatcacttaataaaatacatttactttaacagaaaggaaactttgctaggatcattggtgtaggagaaagcaaattaattagattttaggaagccagctcctggttctaattcttccaacagaattttttttttaccttgggtaattgactactgacaaggcccttatttctatatttgtaaaataaaagatttgggtaggtgaatacttttcaaacttcatttccagccttgcaacaatttgttcaagcagaactcttatctggaaacctagtgtgcaaattgagaggggctctgcttgaagctgaggtggagataagagccttccctgccagggccatactctattagacctgcatcacaaggcaaacttaacacctctccagaggctgctgtctgaatggtccaacatcata

SEQ ID NO: 43960 - DNA, 2604 bp, Bovine  19866880597472
  misc_feature (1)..(1): n is a, c, g, or t
ntttcaatgtcattctcccaaatcttcccaccctctccctctcccacagagtccataagactgttctatatatcagagtctcttttgctgtctcgtacacagggttattgttgccatctttctggattccatatatatgcattagtatactgtatttatgtttttccttctggcttgcttcactctgtgtaataggctccagtttcatccacctcattagaactgattcaaatgtattctttttaatggctgagtaatactccattgtgtatatgtaccacagctttcttatccattcattttgatatttggcaaaactaatacaattatgtaaaatttaaaaataaaattaaattaaaaaaaaaagtctacaaatgataagtgttctcagtgacttatttgtattcctcataatgagtcatattctcttactagtctgaggcttccttgggcaactggttcacccttgctgcattttttgtaagagtagctttcttgccactttctacatattctctgttattcattctgattttcttaaaggataactgttctgcttcacatctgtgagtacaggtcactttgggttgctgctgctcccttactccctaccccgacttttataacttctcagctattcttgttcattgtcatatagaatattgtaaagacttccaggaagcagcatagtggaatgcagagaataaatgtcaaaatataagcacctagatccttagtgtggtgaccatagagattagaagttaaggtaatatcttaggtttttttagatttaaaattctttgtttgcctgcaattacatttcttaacactagcccgcaatttgtgaaagaacttgtgtctttgagggttgagtagaaaaagtatttggatattcagtagtataaatgctcttagttaattagattactccaagaaattgttgtgagccagtttggaaatccagtgacttttgaaaggaagaaatataatttttttaattgcagcatagttgatttacaattgtgttagtttctggtgtaaaatgattcagttttgtgtgtgtgtgtgtgtatcacattttctttttcatgttctttcccattatggtttattatgggcttccctggtagctcagatggtaaagaatctgcctgcagtgtgggagacctgggtttgatctctggattgggaggattcccctggaggagggcatggcaacccactccagtattcttgcctggagaatccaccaggacaaagaagcctggaagactacaattcatggggttgcaaagagttggacgtgcagtgtttacaattataatagtttattttattgtaaaagtttatgtaatttacaattacaatagttgatttacagttgtgttagtttctggtatagcagaatgattcagttttatgtgtgtgtgtgtgtatgtgtatacacacattctttttcatattcttttccgttatgatttactataggacaccaaatatagtttctgtgctatacagtaggaccttgtgtatctgttttatatatagtagtttgtatctgctaatcccaaactcttagtttatcctttccctactcccttttccctctggtaaccatgagtttgttttctgtatctgtaagtctgtttcataagtaagttatttatgtcatattttagagttcacatacaagtgatgtcatatggtatttgtctttatttttctgacttacttcacttagtatgatagtctctaggtctctccatgttgctacaaatggcattatttaattcttttttatggctgagcaatattccattgtatatatgtaccacatctctatgtgttcctctgttggtgggcatttaggttgcttccatgtcttggctattataaatagtgctgaatatagataaatagttatttatttatatttaaataaataaatgaataaatttattataatataaatctatttatttataatatatctaaattataaatagtatgaacattgggatgcatgtatcattttgaattatcattttctctatatgtatatgcccaggagtggacttgctggatcatatggcaactctaatcttagttttttaaggaatccctatgctgttttccatagcagctgcagcagtttacattcccaccaacagtgtagggagttcccttttctccacatcctctccagcatttgttatttgtagactttttaatgatggccattctgactggtgtgaggtggtacctgactgtagttttgatttgcatataagaagtataatttaaaaattactttgtctgaattttgtcagctagttcaagagagcctgtggttaactcttagtttaaaacaggagttttaaaactcttcctcaaaggccaaggtgtttttctgagggccactgagagggatggtgccactactaggaagaatattaggccctctctatctgatctacttttatcctggcagttctacttttatccagttgtaattatttaaaatataagtactgcaaccattgcttggctcttgattttttaccattttatggatgtataattgacatataataaattgtgcat

SEQ ID NO: 43961 - DNA, 2382 bp, Bovine  19866880688545
  misc_feature (1)..(1): n is a, c, g, or t
ngggcagctatggaaaacagtatggagggtcctcaaaaaaaataaaaaaaatagtactaccatacttccaggcacttctacttctgtgtatttattaaaacaacggtaattcaaaatgatatatgcacacctgtattcactgtggcattacttacaatagccaagacatggaaacaacctgctactgctaagtcacttcagtcgtgtccgactctgtgcgacctcatagacggcagcccaccaggcttccctgtccctgggattctccaggcaagaacactggagtgggttgccatttccttctccaatgcatgaaagtgaaaagtgaaagtgaagtcgctcagtcatgtctgactcttcacgactccataaaaaaagaagtcttgccattttcaacatggatagaccttgagggcattctactaagttaaataagttagaaaaagataattacttatgatctcacttatatgtggaacgtaaaaataccaaaaaaccaaccaaacaaaaaaacccaagctcacagatatagagattggtggttgccagaggtggggattagggtgtgtgtgaaataggtgacaggggtcaataggtactaatttccagctattaagtgagtaattcatggggatataatgtatagcatggtgactatagttaataatactgtattacatatttgaaagtagcgaggagaatggatcttaaaagttctcatcacaagaaaaaaaattttttgtaactatatgtagtgatagatgttacttagactgatcattttataacatacaaatcacatcatcattagacacataaaactaataatgctatgtcatttatatctcaatttaaaaaattaagagatattataggattatattaaatcatgcatgtcaaacttctgaaaagtgtaaagcactattgaatttaaagaatcttcactcaatttaaaaaaatttaaagattttttttttttttaaatcctgaaggagtccagaggcctcttgtgagtatgtgacaaagcttgtatactaagattcctctgccttactccacaggcacaagtgggaaaaggacacttttttccatgcaatttcagcaaaactaattattcagcatcctagcccttagttggtcagaaaaaacaaaaagggattgaggtgggtactatgagcaggcagagttcagagagagaagggacagctgaacagagtgacaaccagagtagagtcagagaaagaaagaagcaaccccaaagcacagtagtccaaagaagttctcaagaggggtaaatggcctcttgacacttccaggttttgtaacaggtcagtgattatctatgataatgatgcagcaagtaattgctgtaacctaatactgctctagattctttatagtatctagaacagtagacagtctgtatcttctgttttaaaggtaggaaaatggatgaaacactagagattttcaatgaaaataattaaaatatataaatctcatttctgactttctgctccttacagatttgaattttttgtttccatggatgaagtacagaagaggtcactagatgtcgcagtgaaaaacagtagaccacttggttcacacagaaggaaggaactgggaaaggtaagtacaaaaggggatcttggtactctttccctcctggtggctacctggagttcataggtggaacacatccttgctgaaattttgatgcgatcatcagtttgttatcagaactgactttaaggaagatacagcctcactgggaggttttttgttttgtgccttttaaaaaatactcttaaaactaaagtatataaattaataaaccctattttaagaaactcaagaacatccaagttcatcactacaaaagtatttgaacctctaactatgatattaagtattgttttcacaagtacagcattgtgtgaagcttggatcttctcattatgtcaagacttttgtggtgaatgttattttaacttaaagttagaagtaaaggaaatataatcctcaggaaggagagacaaaaaagaatggtatttgtatactctgtagttgttgtattttaaacattatcttatgctcattctttaaagcccactctgtgaagtaggtgatgatattcccatttttattgttgagaaaactatagtgtcttgcttaaaattctggatcagtttgtaagtaaaggcaagctgttttctctaaaacattcgttaagtaaattcctgaggtacaactgcaaatagcagttcaccttttcctaggacactgaggttggtgtcagtactgtccttctggagaggttctatatattcaaagtcaaaggaaaaagaactattgctcaaaactcaaggaggccttttt

SEQ ID NO: 43962 - DNA, 1103 bp, Bovine  19866880771418
  misc_feature (1)..(1): n is a, c, g, or t
nccgaggaagagcacaaataagtgaagcaaggactggcatgggactgtggctaactgaggagcacacggccaggcatgacaggggcaaggctgaattctgcactggtaaccactatgcaggaatttgttgccagatcctttgactttttaagaaaaactagaaataaggacttaaataaaatctcttaattaaaaaatctagtaattaattcaaagttaaaaaagacctgtaagggcccaataaaatatgaatgcaggcccagctcagtcagtaaactaccaggcttaactgctcatttgctcaataatagatggtctatacatcaagcaaggttggatcactgtattataccacaaagaaaattaagtttcaggtggacaaaacatacaaattttaaaaaagtataacaaggaccttaagaagtagatttacttatataataatagtatcaacaacagcaaaaacaaaaagatagaaaaggaaacaagagaaatggcttaagcagggagagtaaagaaaaggattatggtatctattaaaatcttgtcaggtttttgctgctctactttgaacaaggccaaagtctcttttcaagggacaattctaagtcaaggtaccaacctctagcaattaggtatgtcatggcaagacaaaacacgctaagcacacgccaataaaggatacaagtattccttactaactgataatttatcatactgtgattcttaaccaaggttccctgtaaacaccagtctttttgtcagcaatacctggaagtatctctggtcaatcagagcctgctgctggttatctttgctgggctcatcttttccctctttgtcctcagcttttttttgactgataatattctgtaatctaagggggaaaaaaaaccaagagaatacatacgttttactaaacagcggattaagatgacaaaataagccaatgatccagctaccctcccgttaactctgtcattttacatatgtgtatgtgcatgcatacacatgcatataatcatatatacatttttaatttaagctatattgtcaccagaaaacgaaaagaccttctcaatagatacaatatagaaggaatc

SEQ ID NO: 43963 - DNA, 1146 bp, Bovine  19866881007169
  misc_feature (1)..(1): n is a, c, g, or t
ntccctgagagaagctctactaaacatatatgttattattagaagaataaattatcacctatgaagtatgtcaccaaaaatacttgtatctgaatttagatttaacttccaggttagagggaacacaggagacagaagaataaattaaacgacataaggaagcaaatagacaaatctagcatgtacctctccaggaaaaccaatcattttcttcaacaagttaatgacattaaaacaaacaaaaagggcagagaagaggaagaggaagattccaccagtttaagagagaaaaccaatacccaagatgaaatctatttttgaaaaaatgaagagtctagctacatatccatttatgtagcaaacattactgtttatccaagacggtatgaggaactcttttgcagagataagaaaacactctattttgagtgataatgcgttcttcttcttcctgtgttaatctatagatatccttctgcaaggcagcaatagtctcttgttgctccattcgttttatcttataatgttcacattttgcctgtaagaaatttttcaaaaaataaattacaatatgtacatctaagacatgctgttctcacaatattgtacaaaaagctatcctcacaatttctatgaagctgtcttattcaagaacttcagtagggaggctgtttttaaatgggtacaaggtccagaaacaatgatacatcataaatgcaaaaactgtaacaagtaaaatcagcataaaatggggaaaatattgtttatactcgcatgcatttaaggatacataataagtaaaagaactcaatctttgtaaaactaagtttatatacaggtttagatgaaaatgataatcaggaaggggccaatattaaagatcctgcaaagaaccaagaattaaaattacaattcttaaatgatcaatgataattcaggatttcatatggtttaattaacttaggcattcatgtaatgtgggagactgcacactcagcataatcaggaatttgttaagaaataatatatacacccaagatttatgcaaggggaatgtaaatcctgaatactctcttttgtcttcagtgaaataccactggcctggttttcctaaaagactctgatgctaggaaagactgaaggcag

SEQ ID NO: 43964 - DNA, 1611 bp, Bovine  19866880368551
  misc_feature (1)..(1): n is a, c, g, or t
ngaattgagcattccatatgatgctattatgaagacaaattgaaaaatggtgaactatatagaaatcttgaagagatggtgaaactatcctttctaatatggactggtgtaatttatattttaaagttcagctggtaaaagtactaagctttcagcaaagtaactttcaatgagtttgcttgtagggaatagactttcaggagtggacttgataaattttgagtcctgagaaaagtattgaatgtaattaatattaggaatcaaaactcagaagaattaaaattgggcttgctttaatttggggccaatatacataattgtaaagggattatatttctatatgaaatgctggggttgctttatctctgtttttattggctgctccaatgaaaatcctattggtcaggggattagccaaaatgtaggtggaggaaagagtaggaagagaatgtggggaaaaattttggtaggaagaagctaaaattggattggaattctctacaaaagtagaataatcaggcccttaacagagagttacagttgtcttctgtgttttgaatttaagcagtttaaatattcttggggacggaaatattttcttagcataaaacacaggtgcaggtactgtgcagccaaggaaaagcattggtaaacatttgaacgtccttccaatggcgtggttcagagccaaactttcaatctgcctcagtggcttaattttctcatcacactcaaatagagatagcctgttctcagtgtaatgaaaggaccatctcagagtaacatgaggaatctttgtgcaaaggcaatgggggctaaaataatcttcaagggagttagctatgtttgttcagcagcaagacacttttaaatggaaagtgttctctggatgtttgtactggacagtgatgtttttacattccagccatctcacttagtctcattggactggattctcccttttaagttaagaggtagttggcagaatgtctcccctggcatagaggagagaagaaactttttctgttttcagatttttcaaagcttttgtatatatgccaggttatgacaataaaagctagaaacaacaaattattctaggctttggtagataagagaagcccacttttgttaagagatccagatcttctgggcatttatcgccttgataatgcattttgtcgttttacaccgtcttacgtcctctccctggacagaactccatgttctcagaacgtgggcaaccttccttctttctctcagcctgtagtggctatgacagtctccatgtgtgcccttttgttttttttccaaaaaaagagaaacacttatttcctattctggctcattttacttttcctttctaattcctaattaactacctttctccattataatacatgtctccaaggactgtggggcaaatagaatcatcactaacattccttcctttgtgagaatacatcctggcatttagaatatctgtaaagggagttaaatcactgacttaaaattctggcatttttgttgttgataaaaattttgaagattctttttaaaattaccttgcctatttttcccctgggttctcactcatttgaacagtttctc

SEQ ID NO: 43965 - DNA, 3943 bp, Bovine  19866880385617
  misc_feature (1)..(1): n is a, c, g, or t
nactgtcataaacagagaggcacctctgacaccacataaataaacataggatggcctcactgagagatgagagaccaaatgagacctccagatgtcctttgtaaagcaccacacacatgactgaagccatctgagaccatctggtccaagcccaagccagcccagaagagaagaactgctccacagaacggtgagaaaaaaatttttatggcatagtgtttttaagttactaaattttgaggtggtttgttacacagcaaaagctaactgataaacccagtaaaatttcttgtgcagaaaaattgtggtaagggtcaacacatcctagcacccgtcttctcagtggagaacagcttcaccacgtattccatccgggtgactttgtcatttctgctatcctcattttcttccattcattcataaagtatttgttgcttattttcttctgaaagagttctaaccatctttttgtttactctattttagatggagtaacactgctcaccctcaacaacatataaagttttataacgcatgcaaggcagtcaatgaagtgctttttataagagcataaaaattgggaactgcctaaatcctcaacattaggagtatagtcagataaaacatggtatctgatggaaaaatattcagccactgaaaatcttatttttgaaggatatttagtaacaagggaaatgtttctgataattagaaagtgaaaaaaagcacaatttaaaactaaagatatagttattcatatacccatatataaaagtgaagggcatgtattgggatttaacagtcattctctctaaataatgacataataaataatttttactagcttctataactttttctttatcaatcgttactcacacaatgagcatttattgctttcacaatcagagaaaacatgttaaaaacaaattcataaattttatttttgctttctctcacagttatccaaattaatcattaaaatgtcttttgtgacccatatccattaaacaaaataggaaaatgttcatttggcaactagagtttacattgactactacagtacttttgttttttaaaaaagtatccaggtatctacagctatctagctgaaaaaaatcaaaaaccaaataaaatataaaaggagaaatattaaacactgctatagcctcaaccactcaggtgcaccctgttcttagacataaaggattagtcacatgtgtcattccttctgaaaatgcaatctttctatttgatactgaataacgtattaaatttattgaagttatgataactaacttaaaagtatctgtggaaaacaggtgacttactaaattttgttagagcaaagacaacaatattgtactctaaggtaataaacttgttttcacagagaaatagattaataattgtgaaactatatatgttagaatttagtaaataattatattgtgggtataagagccagctatctcactgccatagaaaggacatacaggcaaggtaagggagaaggcaacaatggtccttgtagttttagatgtaaattgactatatcagtataaactctgctgttgttgatattgttactgtttttaacatggataggtttagacatatatatatctttcctagttctgtcccctaagagtatttcgaaggaagattaccaagtacaaacgatcatgcttaacatccagattttggtttctaaatatagcattctccaagaaaaataaatagagcttagctaggaaaaatatgttggggacattttatggtgtcagaaattacagagcatcttaaaagatgatgtactgaggacataaaatcatttctgtgccactttttgcaaaaatgcataatataaacttgaacacgaaacatcttacagacagatttattctacataatactggctagtacccttctaagatgtcaaggtcttaaataaaacattaagactgaagaaataccctaattagaagagactaagaagacatgagggtttcccaggtggcattagtggtaaagaacccacctcctaatgccagagacataagagagcaggttttatgtgggtgaggaaaattccctggaggagggcatggcaacccactccagtattcttgcctggagaatcccatggacagaggagcctggagaactgagtctagttcagtcatttgctcagtcatgtcagactctgcaaccccatggactacagtacgccaggcttccctgtccatcaccaactcccaaagcttactcaaactcatgtccatcgagtcagtgatgccgtccaaccatttcatcctctgtcatctacttctcctcctaacctcaatctttcccagcatcagggtctttttctttgcatgagtcagttcttcgcatcaggtgaccaaagtattagagtttcagcttcagcatcggtctttccaatgaatattcagaactgatttcctttaagatggactggttggatctccttgcagtccaagggactcccaagagtcttttccaacaccacagttcaaaagcgtcaattcttcagtgctgagctttctttatagtccaactctcaaatccatacatgactactgggaaaaccatagctttgactagatggacctttgtcggcaaagtaatatctctgctttttaatattctgtctaggttggtcataacttttcttccaaggagtaagcgtcttttaatttcattgctgcagtcaccatctgcagtgatttggagcccaaaaaggtaaagtctctcactgtttccattgtttccccatccatttgacatgaagttatgggactgactgccatgatcttagttttctgaatgctgttttaagccaactttttcattctcctctttcactttcatcaaaagactctttagttcctcttcactttctgccataaggggtggtgtcatctgcatatctgaggttattgatatttctcccagcagtcttgattccactttgtgcttcatccagctcagcattttgcatgatgtactctgcatataagttaaataagcagggtaacaatatagtcttgaagtactcctttcccgatttggaaccagtctattgttccttgtcctagttccttgttcctagtctattgttgcttcttgatatgcatgcagatttctcaggaggcaggtcaggtggtctggttttcccatctctttaagaattttccacactgaatccatggggtcataaagagtcagacacgactaaagcaacttaccgtgcatgcacggatacatgaagaataatgaaatcgaaggattcaggattaaatcttagttcagatttttaaaaaaaattagtaggaaaattgaagaaatctcaataagatctgtagattggtcagtagtaatatatcagcatgaattcctggctttgatcactgtgctatggttgtttatgtaagatggcaatatatggtggagatggctaaaggaatccttaatgccattttcactagttttgtaactctggaaatacttgaaaactaaagattttttaataaggggtttcctgcaggacaggacagttttttgttttttttttttgtttttttttttgacgtcagctagactcttcttcaaaagttgttcctaatttcacagttgtcatttttatctgttaaagacttttctcattaagccagaagaatcaaactaaatgttatgcaataagatctctttcttcttcccatagcttccttctctccgtttaaactttgcattatgttattctctcatcaaacctgcatgagaaattcttacttatgtaacacttaatgtaatatataacatcttataaacttccaatatcattgaaatactataataatgtaattctggacactgtggttaaataattgctactgtcttgatagctactcagaataat

SEQ ID NO: 43966 - DNA, 661 bp, Bovine  19866880466590
  misc_feature (1)..(1): n is a, c, g, or t
ncacacagaagaattaggccatttacaaattgcagaagaccaaaatttctatgaatgaggatattttatacattccaaaagagaatatttgggtattagaaaatgagacattggaaaacctgatgaatcactaaaatatatttctaagtttcactctctttgtatcaggctgtgtcagagaaatatgaaggtgttctccctgtcttaaatagtttcactagaaaaatctacctccttccaaaaagaaactccttgtttattctagatttagtgtatattatccatgaatattgatttattaataattgagagataaaatttttaaaaactatgtgtttttgtcttttggtataaatttccaaaatattgttaatagtttgaagtgaattgacatctagcttttttttcccctaagaattattatcacatgcaaaacattttttgcatgtagtcaatcatgatctacatttccagttttagataggaatgaaattgcaaatggaattactagtatttctctttcaaaataagtaaagcactattatgccatagattaatgcatgtgatgagccaactcacatattttacaatatgacatgattctaatgtcgtagcagatataacaggctagcttacaaaagattcaaattaggccaagaac

SEQ ID NO: 43967 - DNA, 1517 bp, Bovine  19866880564062
  misc_feature (1)..(1): n is a, c, g, or t
natgagcagtgtaagctaattaacattatcagaaatgaagtaaataaagttcctaagatcactggacaaagaaaatgaaatttgaaggacaaattgttcagaacaatttgaacaagttcttagggccattctgggccaaattttcagcatatttaaggctgcattcactgaggtaaacctgtaaagaattaaccagaattcagtgttgggacagcagttggttcattcatttgtcattctgaggcagatgcagagatgtgccaggtcctaccaggtaagggggaatgtgagtctcacgctcatggtccatgcctcccccaaggttagtcttggttagtcttccctgtcttgaggacaccaaagtgaaagtgaaagtcactcagtcctgtccaactccttgcgaccccatggattttacagtccatggaattctccaggccagaatactggagtgggtagcccttcccttctccaggaatcttcccaacccagggattgcacccaggtctcccacactgcagacggattctttaccagctgagccaccagggaagcccaagaatactggagcgggtagcctgtcctttctccagcggatcttcccaacccaggaatcaaactggggtctcctgctttggaggtgggttctttagcagctgagctaccagggaagcccacattaactgagacatatgatattgtactctgaaattttttagcctcatcaactttgaaaaggaataattactgaatttacttttattatgcagtccagtttcttctggaatattgtaatttactattaaataatggatatgttttgcctcaattttttgaataaacttaaataattttttgagactcctaagaatgcaacattctgtgctgggaaattgagttgtaattatctaagtaactttttaacctggtcaaattttcttaaaataagtgggtatgaagttcagcaggatcaaaggtaattaatgttttccagcagtaagtgtgataaatacttgcttgttaagtcaattacatcaagacaaaacttgaatgtgaagtaagagtgtactataagtaaattgcaaatagcattcatgtgacagatctactaatttgctacttgttattccagaaagatttgaaaaaattagatagctgaagctgttataaggaagacaatttactgcagagacaccccaaaagaaaactttagacctcacttttgcctgttgatttttgccaagtagtcatctggggtctgttttgaaacaatctatgaccattcacaccaaagcatagttgtagagaaaaattagaaacaattgctcattctgcttcttggtaatataatgctatttgcttaagatctgcaaatacttgctgccgagtatcagtggtattggcctaaaataagagtataataggaaagtctgtggaagaagtgacagcattccctgttgaactgaaatttaatgaggacagtggagaggtgtaattgtgtgttctacctgactcaa

SEQ ID NO: 43968 - DNA, 1199 bp, Bovine  19866880582437
  misc_feature (1)..(1): n is a, c, g, or t
ngatgttttgtgtcatcttcacattaaaagtaagatcattgtcatctctcctacttacttgcacttgaattgtcttcagtaatttagcaggctcatcttattttatagtcactgctacaagaaaaatgcagaggtcatgaggactgaaaaggatcgctatatattaaacatgtggaaggagcatataaccgagcattatcagatttatcactatacctgcatatacaggcaatgcttttctctaccacattcagaatacaaggctcacagaatgttagggctggaaaggccattgttgatcatcattttacaaacacaagaatcagagactcagaaaagttctacaaatttaccaagaactaatggctaaaaagtggtagaactgaaaaaaagaaatgctggtctctagacattcctttcaaacttgatcacacacatcagaatcacttggagggtctgttgcaacagattgaaggcccatacccagagtttctgattcaggtatcaggtggctggagcaggagggggaattctcatttctaataagtcaagttccaggtgatactgctcttgatgatctaggaaccacactttgagaactactggtctccaccagttttcataaacagctgttatcttattttcaataacttttctcatcataatgagcaaagcaaactcagggttaataccacattacttggctgtaatctctctaatagaggattaggataatacctacagtgtgaaaaacctggaaaaaaaataaagcaagattagggaatgtaagggcactaaatactaaaaagcttatgcccattgaggtgaatcattatcccaaccagcctatctaaaatctcaagttaatattaaaccacacccagtgtaaaagagccgagcaacgccctaaaatgttcctctctttccctccatcctcagaagtccctatgtcatttatatcctaagaatttcctactgcatatgtcaagtcatactaaaggtagctctgcttctgtgatatccaagctgtcctttttcgttgcctctttacctgtctgatcacatgtctattttgtgagtaccaaataatctctgagctgcagttttcttatatcataacagaatctcgtccgaagccaaacacagggaagacgaccttgttctctgctgccttcccccactagcagtatttagaccaa

SEQ ID NO: 43969 - DNA, 1713 bp, Bovine  19866880584765
  misc_feature (1)..(1): n is a, c, g, or t
nccttaaatctttcccagcatcagggtcttttctaatgagtcagtttcttcaagtcaggtggccaaagtattggagcttcagcttcagtatccaatccttctaatgaatattcaggattaatttcctttaggattgactggttcgatctttttgctgtccaagggactctcaagagccttcttcaacaccacagctcagaagcatcaattcttggagttcagccttctttatggtccaattcttgcatccatacatgactcctggaaaaaccatagctttgactagatggacctttgtttttttgtttgtttgtttgtttgttttttggcatttgcttcatagaacaataatcattggtcttctgctttgtatcagaatttgtaaaacgaatcagtgtaattttgtattcagttcagttcagtcgctcagtcgtgtctagtctttgtgaccccatgtatcgcagcacgccaggcctccctgtccatcaccaactcccagagttcactcaaactcacgtccattgaggcggtgatgccatccagtcatctcatcctctgtcatctccttttcctcctgcccctagtccctcccagcatcagagtcttttccaatgagtcaactcttcgcatgaggtggccaaagacctggagtttcagctttagcatcattcattccaaagaacacccagggctattagattcagttaaattcatcaacatttattcactggccctgtctaggcactgtgctagtactctgagggtgagaaagatgagtaggacattggactattctgaaagatctgaaaaacaatatattcttgggtacaaggtggcttaaataccacattttctaattttctatttttatgactgaaaacatggcttccaggtccttctctaccaattccatgcaaccacggcaaactggttcaagtttgtattgtatttgaattgctttataatctgttgttgagtcgccaagttgtgtctgactctgcgacccattggactgcagcccagcaggctttcctgttccttgccgtctcctggagtttgcccaagttcacatctatttcattggtgatgccatccaagcatctcatcctctgtgtctattgtatagcatcattcgtagttctcaaatgttttggactcggaacctttaatagtcttaaaagctattgaggatcaaaaagaccttctaaatatatataaataaaagtcactcagtcatgtccaactcttagcaaccccaacgactgtagcctgccaggctactctccatggtattctccaggcaagaatactggagtaggttgccatgccctcctccagcagatcttcccaacccagggattgaacctgggtatcctgcattgcaagcagattctttactgtctgagccaccagggaagcccatgaatactgtagtgggtagcctatcccttctccaagggatcttcccaatacaaggatggaactggggcctcctgcatttcaggttaattctttaccatctgagctaccaggaaagcccaaaaagacctttaatttttgtgaataatgtatatcagtatataccacattaaaaatgaatactgagaaagtttcaaactatgcattcagttcagttcaatcgctcaatcccgtccgactctttgtgatcccagggactgcagcatgccaggtttccctttccatcacaaactc

SEQ ID NO: 43970 - DNA, 1532 bp, Bovine  19866880585237
  misc_feature (1)..(1): n is a, c, g, or t
naagagagtattctccttttgatactcatgttattgcttcatatggaaggaggaaggacctgagaatacagttgctctggtggtgggagtagccagtctagctggggtccttttcagtgtccctagggcctctgacttctggttgtgtgggaagtccatgccagttttatacatcttcctccacctacaaaaatatccgatgaccgttagggagcattttcctcatgagtgtatcttttggaacatgatgccaggcactgtagaaaatctgaggtaaaccacgcctcttctcttttttggaggctcctattttttactttattaaaaaataaagtaatgccaaaaaggatcatagaaactgcgatgaatttaaagttgttggatgaaatgcttcttttcaaaactgttgccagtacgtctatgaaagtttaggtataatttcatttggagatatcaaaaatctaaattggagtcttattttgaatatgaagcttatgccaaatggttctcttggatccctcatccccattattcccatgatcggtcctagaagtaactgtaagccattctgtctgcctttaagacactcaaaatcaactgggtgagcagtgttaaaaatgctaatacaggtgggtatataataaagtgcttagttggcagcagacactggatgtattttttagagttcagagaatgaagcgggttagagcagtcaagagcttgtgcatgcaagacttgggataaaaggattttaggaacaaaaacaagatactgattcctcctataagtttacatttcaagtcaaattggctctattgggcctctgagctcttctgagttcctgtgtaatttaagccctgtgttgctgtccgtttgaagctggctaatatgtgaagccacagccaccaacgatgcagatttgagagtgaacaatggactctgctcactcttcctttgagtccaggagggagctaataactttccttcccgggcatgcaaaccctagtgggggatgcccagtgtggatggctgaattgccacagacgagccttctggaggggcttctaaagacctcctgcctttgaagtgggtcaggatacctcatgtggagctgtcctaggcatggtgggaccagatccacaaaacattctcgccgtagtggggctgcgagcatttcctccagcctcctgtttggacagcaggagcccagcaggaacccggggagcacgccccatggagtcaccaagtctggaagagcagttaccacccatcgaatcctgttccccgatgtggtgctggctggagcgggaagggggctgctcatcagactgaactttcttcccttctaagagatttttttttttcttccctctttaaaccaaaggcagaatttttgtttgaaaatgatttcttagactggttttagttagaaatttccatagggaacaatggaacgatagtacatttctaatttaaaactttgcatttgttgatgaagtcatgaaaataactagactaggcaacgcaaacat

SEQ ID NO: 43971 - DNA, 782 bp, Bovine  19866880678818
  misc_feature (1)..(1): n is a, c, g, or t
natattttgaatatgaatcacatatgtgacccaaagtaaattcccattctgtccttgttgcactatggtggtgtgtgcacattgttgcactgtggtaaagaatttgctgccaatgcaagaaacctaaatgctgcaagtttgatccttgggttggggctatcccctggagtaggaaatagcaacctgttctagtattattgcctgaaaaattccacagagagaggaccccagtgggctatggtccatggggttgtaaagctggacacacctgagcacatgcactttgttgcactaaaggatagacacagagcttgaaaacactttttctctgtttcccattacatctctagatggtaggaaactgaggatgatgcaagagaattcttgtccttggagaacatcactctgtattgcaaactttgtctataggcagtttttagtaaattgtgattgaccagtaaattgagatatcaattaatgaattgctaggtcgaatgggcaagaaggggcatagcagagtacttttctgccaaaggaaacctagcttattaggcttaagcatatgcaaaacacatttgaaatgcattcaaagagcattcattcccaggtgcaataaagttctatttattctattccatttcaaaaagaaaaattttttcacaaattcctcttactaacaataaaccccattataagcaagtgtaggggaaaaaatgtttatattttcttttttgcctctttgcttttggaatgtatgagtttattcacaagttaagccaatg

SEQ ID NO: 43972 - DNA, 1366 bp, Bovine  19866880700069
  misc_feature (1)..(1): n is a, c, g, or t
ngtacataatttgttatgtcagcagtgagtggtgaaagctgagcatttgtgagatgtgaagatgaaaagttagcccttacaaaattaagagaagctatttgtattagtggttaagagcatagactcagcaacaggactatctggactcaaatccccctctactgtttctttattgaataatatggggtaagttatgtctctcaattcattttgatagagtagcaactctgcataatgagttatatatttctatttattagttgactggattcatttttgcataataagaggattgttgttgcttttttcccctgaaagcaatggagattatctactaaaggatttttagcagtggaatgacatgataaatttgtctttaaaaaacatctctagcagtatggaagtcaatgagaaaaatatatgcataaaactattttatttctctgggtttgtgtgtgtcaggattacactttctattgagtcatagtggagaaaaatgagaaaatgcaaaagaaataaaagttactttatatagtcttgtggcagaaacacctccctcactaatttttaccaataaaaataactcactttggaagttccaagggattttcacattcagggggtaaaagggaaatcaactaatgctgtagtctaaattaaatgaaaattcattatacaaattatccatgaatttgaaacaggtgttcctttcctacttcaggaggtaagaaatgagaaaactgccacaaatttgttatttatttaaagtgttcttaaagtgaaggaaaagttcatccacagtgccttatttctaagtttccttctgaggaagtcttcttgaacaaagagaatttacagaatgtcagaaagaaaaaaaataaccaagaaagagatgtgtcatttataatattttcatctgccaatatggttggctaagtaatcagggaattgtgatgctggtggctccaaaggaaaattgtgatttattagttggcgccactcaaataaaggtgactctactctctttgtgactttggaaatgcccaattccatccctaaaaggaatacagggattaaaaatccaggacagctgcaggaagccttctctgagggctctcattctactgcctaaaaaagagagcacggaaaaaaaaatattttacacgaatctgttggcaagactctgccttcataaaactcagctgtttttgcattaactgtaagaacgcccatgaggtttgaataaaagcagatatttctcttttatactgacctctcttagaagacatccaagggatcaacatgttcttaaaaatctcaaactgaccacttataataacacagtttgagatatgattctctaaaa

SEQ ID NO: 43973 - DNA, 1979 bp, Bovine  19866880717120
  misc_feature (1)..(1): n is a, c, g, or t
ngagacccaggttcgatccctgggttgggaaaatcccctggagaagggaaagctatccactccagtattctggccttgagaaagccatggactatataatctatggggtcgcaaagattcagacaggactgagcactttcacttcagttaatgtggctaaaggtcctgacagggtagtataatacatcggtctttattttttaaaaaaatgataacgaaaaccatgtaatctttaatttgggggagcatctaaattttctatctcatcttaagacattgctaatgaagaaaacttaaaagttgtttcaggtgttagaagtgttctgaacacaaatcaagcaatgactagcacttaattacttcatgttaaaattatcaggatgtctaaaatctattctatgcataaatgcttggatattcaatggaaactaaaatcatttaacttatgcaaaattaattacatgcactcaatttaaacaaataaaaagaataggtaattttcctcgctttttcactcagtgaggatgcagggtaaactagggtgcgagaaatgggacacacggctacatgtcccctcagtcatcccagttcgtgtatgtctctcgtaatctgagcatcccatcatgctgtgtatgattcagaggttagcaatacgtgttttcctgttagtgagtcctgtaaacaaaaattagtcttctgttctcagccaaggaatgagcaatttttcccaatactgtcatgaaaatgtggatattttggactcagtgaaaccataaattatgtctgtctcccgtgtaacaacttcttaatggaatgttcgtgttacactgattctgcaatttttgccccacatgttcatttaagaaactgacctacctataaaagaagctactgtccttaaacttactgcagccacctattatcacatggatactcataatctctcagtagtggcaagaaacattttacctcagtacaaagtagattacatttgcatatttatatctcacaaatccacaatgcattgcatactcataatgcaacttgatgtgaatatgtaaataccaagatatgtaagtatttaaatatcagaaaagatttcacatagaagtagaggatatccataatgcaacttactatctgcctaatactacagcacaatccaaaaagttagtgctacctgtcagttggaaatgcccaagaaataagcctttccccaccacactgaagaagcctgagcaggtctagcctgagtagcctggtctctgtcaagagatttccacagcagaagacagaattcaatcagaattcttcctggaaaagcccagtttgcctctaggccatcttaattcggatgaaactgaactatgatttaaaaagaaaaacacaaatatttatagagttccctactgttatggagctgtcctgattgctacagggaatagaagatgtttttacaagcgctctatattttttaaaagaaattcatgttcacacaaaaatttacaagtaaattacaggaaagttagaaagccattgcaatagggaaaagtgatgaaggcccagcgtaggatagtaaaataggaatggtgactggggctttgaaagacacctaagaaccagattagtcttagtaaataaatgcatttagagtacaagagaggagttaggtgagtcaaagttgtctcatttttaatttggagtagatgagataacattaaccaagaaagaaaacacaggaatacaaaaaggttttggtcaggagataacacattttttttactttgctgctttgatttttaagatgggatttgagggactattttttcttttttttaacattttattaattttttttggcagggagagcttccctggtggctcagctggtaaagaatctgcctgcaatgtgggagacctaggtttgatccctgggttgggaagatccccggagaagggagcagatatccactccagta

SEQ ID NO: 43974 - DNA, 1318 bp, Bovine  19866880722066
  misc_feature (1)..(1): n is a, c, g, or t
nacacacacacacacacacacacacactccaattttcctgaaacacacagcatacaaaattatgatgaggtggatacagaggtatagaaactaattagcacttaggatcatgaccttaataagttactttgcataccataaaactacctatggcaatactgattcagtaagttttaataaatatatgaatataactgtgcaacgatcacctaactagtttaaaactttttggagtgccaaaaagctacctgatgcctttggcagtcagtctccactattatctccagcccctagcacttggagatctgaatttttcttcacagatttcctttctctagaaacttcatgtcaatttaattatgcactgttctttcatttagtataaactctgttttttcatgcatcagcagtagtttttcactttttatttctgaattgtagtccactgcacgaatataccacattttctttattcatttaccaattgatagatatttggattgcttccaatttgggattgttttatgaataatgcctctataaacattggtcaaaagtctttaaatgaacacaagtttgggtagatatctaggagtgaaatcacttggtcaaatggcactctatcagtaactttctaagaagttgtcatattgtttgagtcatacgtttgtaagtccttggtcatagaccgcttatggaggataacaatgatgagacagcttgctggaatacctgatgacacctgtagccatactcatctctttccaacttcacactataatatcacaagggacccggctatgacaatcactgttgtttacaaataagaaagttcaggagagtgagaacaaaataggcaacttatgaacagttcatgaggacattatctgaacactaatttttaatgattctcacagttcatcacattacatggggactctcatagagaaaagttattggaactaaggtgtgtataggtgtgcccagcttggaaatgtactttgtgctaatcagaaatatgcatcgaccatgagaccaaaagtataagattctgtactcgactagtaagaatggtttctatggcgttatttctatctgctcatcatctatatctgaaaaaaataaattttcctacagtatcttcagaatttaaaagttacatgaaaagctaaatgggcttgttcatagagggtggcaaaactgatgaagacaatgtgcagtgactttctatatgaggcagaaacatgcacaacgcataaagagaaagaaactaaaaatatcctgatgttgttataaaggaaagcagagccaaaagcaa

SEQ ID NO: 43975 - DNA, 1399 bp, Bovine  19866880775984
  misc_feature (1)..(1): n is a, c, g, or t
ncttacattggaaatgagcaaggtaattaaaaaagaaaaagaatatttctaatccccgagattttcagaagagtgagctaaaccagatttgtagatcatatggttgtggatcatatggtgcttacttgggaaaaaaatacatagcagaaaagctattctttgtttcagggataaaaatgttatgtttttcatagctgacatttctgtcacacttgagttactgaagcaaacacccatttcttcattaataatgaaaggagttagcttcagagctcaactatttaagcaatacaacagacatcacttacacaggtcaattacaatttctaataattaaaaacaaggaggaaaatattcagtctcacatgacgctgtctaatttggtaattttcacacatttcaaaaccgagacttgaggttgagtgcaaagagtacacagccctggctgacacatccagagttcctgtgaatacagctggagaagtcactaacctttatcctggcactgacaccctgcttctggagagcaaacttgccttctacctacatctcagaaaactcacctgtcattattagatctttgttgtttaatgcctggtcttatttcacattggagaatcaaagagtatttgatgaataattatttgcctgttatttttttaaattcctttttcaagtttctacttttacttcctaagctggatatttacttacacagtcctttgctaattatgtaggtcatcagctgctctaacaaggcaaactgacaggtctgctcctactttaggcaaactcttcaaaaatatccctcaagtacacagaagtactgcaactcaatttttccatcttaaagagtatggcactataggaaaatgtcatcaactaatatttttatttagagttgaccttcattatttatttttatttattcctgtgtgtgcatgtatgtattctgttgctcataaagaagtcaatttgttcagctatctctggtatccagcactatggaggtaggataaggtgtcattatgtctggatgtgcctaagttttacattttcagttggctggattaccaaaactgagttgagaaggcaccctggggtttttcttattcatttgcaggttttgttcttgttatgtattttatatcctccagcctgaccctgctattttgaaaaggtcagtttgactttttgtgcattagatttctttgataatgttgctgttttgtacctttggtcactagcgatctatgggtgctgttaattatctcagaactatgagttcaccaatggaaaacaattttgaaatgtgtgtgtgtcccatacttatgtgaaacctcccacaaattcatttaactttaacttttttttctataatgggaaagattgggatttc

SEQ ID NO: 43976 - DNA, 914 bp, Bovine  19866880828359
  misc_feature (1)..(1): n is a, c, g, or t
naagaataatttgaaagagactagatacacatatatgtataactgaattcgctttgctgtacacgtgaaactgacaccgctatctatgtttcaatataaaatatttttcttaaaaaaaatgggtagcagcatcttgatgaagaatataaatcaaatgcttgtatttattggtgagttataactatcccagggattgtggaataaaacagtcttcatctctccttccaccattcaaatgcttcctttgctttgttagccctttgggaaatcacagttctctctaggttgcattttcctcctcagccaagaaaacttactaagcgattacactgccacttaatccagtataattatactaatatgtactgtaagtctactcagcaacaatgcctctctgttcagggaggtgaaagctttgtggaatctagatactatatagccaaagaagaagatactttcatcactacggagggtgaaatcgcttccagcaatggctaaaactgaggaaaatatgggctccctttcctcaagagatgacaggttaagtaagtcattactggaaaatactgaggcagattgctggatatatgccaacaagatgaaacttgttgaaatcaaggggaattttaaaaaatcttgaaacagtaatgtcgcctctctctcagtggtcaaagcgtgttttcactctcttgctctcatctgcttttctcgggcaaagagagaggtgaatcacttttgttctgctgtgattatttttacccctcaaaacatagctttagggctccattttagggcataattgcacacagagcctacttcctcaaaaggttaaaaaacaaagcagaactcctctactcacagcaaatatcaagcaggagatgagtcaggtccaagtgaaagaagaaatactaaca

SEQ ID NO: 43977 - DNA, 997 bp, Bovine  19866880840979
  misc_feature (1)..(1): n is a, c, g, or t
ncccagggtgataaactatagaggtaacactttctgaggatgctttattttcctcccacaagggactcagtatttgtttagatttcacagcaaaaccatataatctgagacgctcttgtggcatttgcgtaacattggtattcacattaagagagaaagtgatgctgtgaggcacccaactactattacaccaagtatggctaagacccagagtgcagtgctgggaagaagcaacagggagttaaaataaggacacagggataaattatttgacatgatcctgagcagacctgacttttgtaatgatactcaaacagcagataaccctgaaggcaatctgacaaagaagaataaggtggtcataccagcagatatgaaaggagatgagtaagctttcctgaaatgtctgaaccactactgaaaagcatgtccttcgactgtgaccaccatttcttttttcttcttatgcctactgccttccggctaatgtaaggattcacttttgcttatctgctttaacacagaagaaccctagtgaggataaagttataaggattggaagggatagggaaacaaagatgtgtacaaaaatagcaatggaagtttcagaataataacataagaaggtccatggttttctgattttatccaaataaatattaatttcaaaataatatctgacttgaacttgagagggagaagatgaaaatgttcctcacttagcctctgattcagtatgctgtttttggttgagtatagacagtaaagcataggagcagttcagttaagatatttaaagatgtcttaaaggactaataaagctcatgcttttaggacctactcagtaagtcggtgaggggagaatgttgggcacttcagcaagtgaccaccaccaacaaattttgcctaagtagtagatgttatgtggtagattccccaccaatctttcaaacagttcaattaggtgttattataaagtcaagctaacatgaagcat

SEQ ID NO: 43978 - DNA, 1778 bp, Bovine  19866880914172
  misc_feature (1)..(1): n is a, c, g, or t
ntgattgcatggatattattactaatcccgttgcatatgacaagttaagggaagctagaagcatttgcttttgtgcatcaggagtaaagagaaagaatgccaggggtcagagattggcttatcctgtttggtcagggacaagtcagggataattaattagaattatagatactaggaggttggaaagacctactgtgtttcactccttctaaccaaggtttgttcttaccctcaggactgtgtgtgtgtgtgtttctgtatctgtcttttgggtttaaccaagacactgaggaaaaacctggaataagtttgttccctgtctgactcagcatttatgaagtgaggaaatgaaagggagagggaggattcatttgattcattaagactatccagtatcttaggtgatacattaaaaataagtgctgtcagatgtaatatgacatagaaatttctaatttagcctacttatgtactaaatttatatttcatatatctgttgtgctggtttcccactttatatttaccagcaaggtatgttgagcagagtgtgggctttgatatcagataattttgaggtcaagcactgggaagtccttcttagtattaagaagggcaagccacagataagccttggcctcactgagctttgatttttctcatttataagcaaaagtaatactgtccatttcataggactggtttagtggctagagattatatatgaaaagtatctgtcttaggaactagcgtttactggatgcccagtggatattgttgctgttgtcgtctctactattgttatacgagcaagaggatctttggagaaaggatagttgtctggggaaagactcacgggggatcttatgacagagtctctttcagatatcttgctcttgtaacaaattacatctgtgccttttctccaggtgaatcatgcacatccagcctggccagctgcttataacctcgctcctctttcactttcactaagtgttcagtaataaaaataagatgacagtttgccacttccaagtgtggtgactcagccctcagggttgcttgtgaagtcacttacctttccctcactttgtgccatacgacattgaaggaagggtgttaggtgacataaacaattcttttccttatcctgaaatttaaaaaaaagttatttttccaagtatcacaccttttctgtgaaataatattttttcttttatttttaccaaataattaaaaggcaattagacaggtatctatgaattattattaacatcaacattcaaatatatttctgtctaattaaatatgttaaatatctacaaattcaggactgttgtagatgtaggctttataacaggcacaataatagtcaaagttatttcagtaatgaagtagaaataggaggaatttgtgtgtaagaagatgatattttttaaagagtttagtagtaagggaaacaaaaggctaggaagctaaccaagaatgccaaatgattgttttcagttagatgaaaatataaaatatgtcctttaaaatgaagacatattttattctgttattttttttttgacatgtgtcatttttccagggcaagtgtttgaatattttagtttcttttagaatgtaacagctgctaataatttctgaagtttgaaactggtggccagtcatcaggtattgagttgagctgaaactttcatagttgtcagcattttttattcctcttatccctgtaagtgaacatttttgcagaaagtccagtatcacactatcactgg

SEQ ID NO: 43979 - DNA, 1546 bp, Bovine  19866880950117
  misc_feature (1)..(1): n is a, c, g, or t
nctaaaaagttatgctgtactaaaaataggagatatttaaaaatctccagtagtagctagcattcaaaatgttacattaatttgaaattaatttcagtcacataaaaaactaaagaactgttgcacagctaggttgtattatttccatcagactatattcaaggtgtaggaaagcaaacacatggctccatgcagttatttctctaaaatacctttcgcttgaaattattagcatatatggccaattctaatagctgcttagagaactcaaaatgtcatgacatccctcttgttgtagcatatattttgtttttgtttcacagaatacaattattaaaaatagaaatattcagagctaacatcctccatgagagatggccattacatatttgtttttaatagtcatagaattttagatttgcaaagaatttccaattttacttgtagttattcctctgcttttaaataagacaacattttgatcatttggaagaacttaatcttttcttaaaattctcctgagatccatactttgttttggcagtttccaaccaacacatcaagttgtgctggcaggttctgcacacggaatggcctgtgcccattgcagtgccctaaattgtaagcccaggtatgggatgggatctgggagcgtgcttgggagaagtgatttttttttttctgtacagtaccttcccttaccaaacctgataaaacttaatggaaatgagaaggtctccttttcttaaagaaagcaatattgggaggacccctgttttatgttaccactgggtgatttcactttctccaaacttaggtattatatctttatatatatcccttctaaattctttggactccaacttcccagaagaacagggaagagctgctctctatcgctgatagcacagctctctgtgtacttgaggacttcaggctcgtggctgatctgctgtgacactggtaatgagtgccttgttgggggctactcaagtaagtgagggataagatgactggctgtttatcaaagactcctcaagtctgatgctcatactcactggcttaagagcccaagaatgaacaaagaagatgggagagttggtaggaaaatgttggagatagcagagatgaggtgctaaggactgggtggagatatcatttgccagtcaggatggccttgggtgattatgtgtctgtataggggaaagtgatgtatctgtataggggatcgtagagaaagggaggagagatagaaaaagacaaatactaaatactttcataatgatggaaatttttaaaaagttagagtaaaggctagctaaatctattgatactcaaacgcagtaattagatttagtctctctatatatcgcgcgcgtgctctctctctctctatacacacacacacacacacacacactgtatatagatagatatatgtagttttagaacttcatttcatgtgtatgtatttcctttgaacctgctgcataccatgtattggattagtcactgggaatacaaagacaagtaagccatagtctta

SEQ ID NO: 43980 - DNA, 3318 bp, Bovine  19866880960552
  misc_feature (1)..(1): n is a, c, g, or t
ngacccctgctttttacaagatgtgtgatttcctgccacctgacccctgacctcatttctctgctcatacctaggtacctgcctgctgtaacactaaacttgtctgacgtggtttatataatatataaaataactggcataatttctggcacattatcagaaccccctatgtggtagttataataattattattataataataatatattacccggctactcctgttacttcctagtccctagactaagctgctcagagatttaaaaaaaaaaaaaaaaacaaaaaaacctcttaaaagactcaaagtctactgaggaaaacttgaaagagcatcaaaacccaaaatatagtacggtaagtgctgttcgccttcaagaaagtggagcatagtaagaacccgatgagtgatggttggcaatagaactgccaatgtcattaccaacttaattgaaactatttacaaatcaggggattttgtccttgctattaatgattttttttagttttttgattattttttaatttacttcttttaagagttgtgtgtccctttgtaaagctaagcataggggagttgttctgactttggacttgagcatcaaaaacttagaggataccactgatctcagaaatgttgccttatcctgaaattagaaggaatctcttagcataagtaatgtgtgtggggacccaggcattcatgtgaatatttagagactgaatactaatcacctttgtagaaatgaatttcaaaagtttagagatcataaatattttcctatcattcctataatgaggcaattttcccaacttcagagctttaacatatagtattttaagattaaagaaaatgctataagacacagaggagcaattttcagaagactcaaaactcctgaggtataggagtgattgcaatctggaccacaataaaatttattaacctcaaagttaggttaataaattaggagttaggagtcaggattagcaactggagtttgaaaaaggatgcagcacttatatttactttctccatcactttgatgggtctggcaaagcttaaaatgtgtgtgtttctcaggatatcactttttcacactttctgagaattagaagttaagatagtttgagacttgggctgatttaaagagaaagggaatctggtattgttctttatcttcatcaaacacaagtttgagtaactgggaatggacaggaaatgaagtccttacaggtggacataaataacaaacaaacgaagaatttaagcatggataagaaatgggaatacttaggaatcaaaaactgagatagaagaaggtaagtgtgaatatatgaaataaagaaaacagacatcaatgtaatctttttaaagaaacaaagactaagctgaaatagtcttaatatagtccccttcgttgtttttctctcttagtttctagacaagaaaaagtccgctgttagctgcttacttgcttctttgttttatggctgggggactgggggatagaaagatgaaaacccacccaaggtgaggtatccatgaggggctgagcagggtctcagaccccagaatgacgggagtctgttacactgcctgccctctctgagttttaattatgtctttttcaaaatttggggaaatgtagcaaataaaatgtgcagaataaatgcttcctttctcaagtttttatacggtaacctcctttttaatctgacttgcagtaaataaatattcatctcactttactggttttctctgaggctggagttcatttaaggttcaattttaggaagttggatttttaataagattcctttaaatggtttccatatttagccaatcttgcagttctcaacagtacatggaagagcaagcagggagcttaagaaaaaaattagcttctttaactactagatgaaaccgaaatttgggctctctgactcctaagaggctgaagttgtgtttggcaatctaaatttatcaatagcctaacataccactcttcaaaaaggacttctttagctttcttatgatagtaatgtttcttaagttatcaggaatggtcttttccctctaagtgttttcagcttatagctcttttctgaaatgcattaatttcaatcctgtgccactgctgcatattaacttatacatacgaaaaacaacatcaaatatggaagaattcgttcatgaccctgttttaaaaagacaaatctgggtgtagtttttaaaactgcgcaaaacttggccatttttatagtacatgtgtgatgccatcccttgtttttctctactggatacttcaacaaaattaagaatgttatttttctttggattgttacttgaattctgcgaggcagtcaataccgagccctgtaactgctgatggtgtagataggaaggtgggcaggggaaggaaggtgggcaggaagcagaaggatagcaggaaacattttatgatttatacaactcttatgaaaaatgttctctttacttacggcatagtgttactattattatcacttggagggcctgaggcatgggccacacacatcatctggctaaaaataattctgcagcctgtctgggtgtcattatggtgtttgtttcataacaactgcctatgaatctttattaaaattcaagtgggttgcgacttgctgccaacagtgggggcccgtatataactaagagggcatggtctgtctctgggaaggctctggcaggatcagagcagggtgcgtccaaaactggctctctgcaaagatgcccagaccagagactctgaaagagacaggaagagaccattaacacgtgtttctcacaaataagatatgtgatattgagttcactcacagaatgaaaaggggtagacctgccaggctaacaacctagttgagagcgagttgccacttcttcccttgctgactgacctggggagtgagtgttaagggtcagggacttttctaaagatttctacaagcatgaaagcaacgatttagccttttgggtagatatattatgaaatggtgggatttcaatggtggtataataatctttataattgtttttgttctttcatgtattaagatacaaccagggtttatgacaaaatcttcataaaaatataggtaataatcaagagtgaggttcacagatttaacatctgaactgtatattatttttgcaagtttttttttttttttctggattaaaatactccgagaaaactactatgaaaacatgggcatagaactgcttgtgaggaaaaaatacataatcttagtattaaaattaaatatgttaaaaggaa

SEQ ID NO: 43981 - DNA, 962 bp, Bovine  19866880976506
  misc_feature (1)..(1): n is a, c, g, or t
naaactctggattgtaaacaaacagtaggattttccacagtggaacagagaataatgagatgaaggatgcagaagagaaggggtaggtaaggccgcacctagttcaccagagaaattaatgagctgaaaactctcagacgctctcctgataaactcccagatttctcaatttttaaagtccatgaactgcatgcagctcttccctccttttctttcctacacttttaaatttccatatcattgcttgtttttctttcctttcttttcttagtccctcttgatatttgaaatagtaggtcaaatttggacgtctagtaggtggatgctgttttagtagtaggggggaagtagttgctcaaattccctggtttgcagagccttcatatgatttcatggatttcacaaatctttctagattcagtttggttcagttcagtcactcagtcatgtctgactctacgaccccatgaactacagcatgccaggcctccctgtccatcaccagttcccggagtttactgaaactcatgtccattgagtcagtgatgccactcaaccatctcatcctctgttgtccccttctcctcctgccttcaatctttcccaacattagggtcttttccagggagtcagttcttcacatcaggtggtcaaagtattggagtttcagcttaagtatcagtccttccaatgaatattccagactgattttctttaggattgactggtttggtctttttcagtccaagagattctcgagtcttctcccaacaccatagttcaaaagcattaatccttcgctgctcagctttctttatagtctaactctcacatccatacatgactactagaaaaaccatagccttgactagacggacctttgttgacaaagtaatgtctctgctttttaatatgctgtctaggttggtcataactttccttccaaggagtaagctagatta

SEQ ID NO: 43982 - DNA, 796 bp, Bovine  19866881021087
  misc_feature (1)..(1): n is a, c, g, or t
naatatgaaaggtccgatacagtcccaggttctttcccttcctactatcacatctcaagttgctgttacagtgaagtcaaatgttgtgttaaactgtgatgaacttgctttgagatgctctttcaatgtagtgtctccttccagtttgaagctattatccctcaaagtcctcaaagggcaaaagataatgagtcatcttcagagccctagagactgacaggaaagctgtcctcctcataaatgatattagtaagaaacctctacgttgaaggaggaagggtaggtaggggaaaaggagaaacacaacccctcataccgtgtaatttccaaatgaattcatacatgaaccaaagtaatatacctaaaagcgaaacaaagtcactacaaatgctgtaaaaataactggcgttgaggaagataaggatgctgctgcctattgatctgaatcccttttgcctgttggttctcacttgacactacaccatggcatttccttttgtgacccctgggtcttgatctgaaaacctaaacagtcatttctcaccgagtggggagagagcagttgtgttaacatctgttttttaggtcttttatttttaagttcttgttgaaaactccttgatctgcctaccagggaattgaagcacattccatgtgcctgccgcctagctctcttttctctttatttggtctacagaatattgatttagattttggcctattcgcattgctttaaacttttaaacactggctcttatagctagaggaaacactttgctgaagctaaaatgatcac

SEQ ID NO: 43983 - DNA, 1820 bp, Bovine  19866881089348
  misc_feature (1)..(1): n is a, c, g, or t
nagggctgtttgttttacctgaggtcctcactccaggcctcaggaccttcctttattctatttttgtgggcttttcccttctttgtcttttagccaccgccattttggactcttttatcatcttctaactacctaacagatctaaagtaccatcatatattttattttaatcagctcacaaatcttccccaaagtttttgtgatgacagcattatgagacattttaacaagcacacacacaacatgctaattgctatatatgcagagcatcataactgttggcctagcctgcctcctcaaactttatgactcctgtgaatatactcaatgaaagccaatttcagaacctatgtcttgccttgtgtattcttcaaatgcagcaagtttaaatatgaataactgacatgttttgttctttttgtaatatgtgctgagtatctactctaacctgttaactctactagaagcccagttaactctactagacaccagaaatacagtggtgaggaaaacaatcttttctcaaagatcttacattctgttgtaaagagttaaaagatgcaacaaaattaacaaaatgaggaaaactggcaaaagcactaagagaaaatatgggctgtaataagaataacaaaaggagtggggcagggtgggggctggagatgcattgggtctgactgaatcagaaaagatttcctgaagaggggacatttacgctaaaatctaaaaacgatgcaatgcttagattgacaggcatttggggaatatgatcctctgaagcagtaaagagcttgccttgttaaggagttgaaacaagaccaggatggctgaggcctagcagacaggccatgataaaacatgagggtttttcctagagcattgagaagcaattgaagatagttagagaaatgatttacatggcctagttacatctggtatatttttcttagttcctaaagcaaagtaattaaatattgctaacttaaattttatttgccctgaagttttccatgatgcatttgaaataaagttttcaccaaccttcattgtttgaacatgttaatgctacagcgaaacttgatttgcttgactgtcttccaaagatcagtccttactgatctctcataaaactcagaaccacttaagcatcctagctcaaagccctgttttccctctatcgtcttcatgaccatggagacctacagttcccagacgttcatatgacaaagggcattaatcatctgcttcaaagggctccatttgttgtgttggcagctttcattctttctgctccctaatgaggctcagtcccactcactgacatcctacaatagtcagacgaaccaccatctcaagttctgccaggaatcaaaaataacataaactgcattctatgctgggtatctatatttaatgataatgtattaatataatgtctctggtggtattttttcaaaatttgtttctccatttccccttcatctggaaaaatgcctcctaaccattgtctatatagcttgtctgaagaatcgaaatgcttattccccctgtaatacctatattataattagcacacagaaatcctttaaaagttcctgattttaattaccacctagaaagagagtggtcctcataattgttcagtagagttctctataccacccccaactgggaacagatgcagctaatgtgattctgcaaatgaactcacagaaatcctggtgcttcctcaagggagcaggattcttttcccaaggtacaggatacttcagaaaagggatagaagagacaccttcttcaacatgcatttataccttctg

SEQ ID NO: 43984 - DNA, 1215 bp, Bovine  19866881094001
  misc_feature (1)..(1): n is a, c, g, or t
nctagtattaaatttcttctttctgttcttggacaagtcttttctaaaccaaagtcaaagagcaatggaaaggctctgccacttctagttattagggcttttctcaaaacaccctggtttctcataaccaccagggctgctaactacattgtccatactgcctggcaaacacaccccattatctaaatatttctacctatctttgccttccattcatgggaatacgttcttcctttcttcttttcactcagggcccctaaggtaagatagctaatgtgataaactagtgaatcagcacaattacatgaatgtatggcctttcctcaaggatagtatggacattttaataaaacttttccagatttcatgacaagagggtggtaagaataacttgctaggagaagaaaaaagaggtctaccgactgcctaaatgtaaaaccagccccatgtatgaccatccagatctagacaggcacattgctcagctgttggttgagttagcaggatgctgggagccctgccccggagacacagatagaagaggctgagtcctaaattactgcatgaaacagaattccatgtagtgccctcccccagttcaccagtgtccacaccgctacctcactctggcctgtgaggtgagtgagaactgaagagaagttctcctgtaggcactgaagacgcagactgccaggttgtgaagagagccgcacgcagaggatggcaggcagcctgcgggtgctgccactgcctccagcttacagccagcaagagaagaggggcctgcttctatcgccatgaagaaataagttctgccaacaactggtgagcttggccaaaggctgtgtcagaggcatttgcagctctcaccaaaccctcagtttcagcctggtggacagagaatgcgtctacgccatgtgccgactctggccttcagaaccgtgagataagctgcttgtactgtctaagctgctaattttgtaggattctggcagcaatagaaaactagtagagtagctaagcaggcttcctaggtggttcagtggtaaagattccacctgccactgcaggagatgcgggttcgatccctgggtcaagaagaccttctggagaaggaaatggcaacccactccagtattcttccctggaaaatcccagggacagaggagcctggcgagttatagtccatggggtcgcaagtgtcagacattattt

SEQ ID NO: 43985 - DNA, 1017 bp, Bovine  19866881109144
  misc_feature (1)..(1): n is a, c, g, or t
nttgtgtctatgaagagaaaaaggctacatggtctggggctttggaatcccacaatatttgcatataaaataataaacacgttagatcacttttatttgggatgatgaatctttcattgcataagaactgtctcagaaaaacgcccccatgctatgttctgattttaatggctaaatatttttttatgaggactcgatatttccacgtctgtttatccgacatcatttgtaggtacaaagagagaataatcacaactagaaacaatgcagccttctccactgcacttattaactctctttggtattgatgagaatggagtgttcaatcatatattttggtagtgagttatggttaataatatcacaagtaccgtgatgacattatagaactaaatcttatttctaacaagtggtgaagcttagttaaatgccctgtcaataatgttgtcaattaactgtcaattactagagccaaggtaaaggcaagttgtttgtttctcagcaaacagttcacagagaagattgttgcaattatcaatctctcacgtcctactacattaagtgtcttactagaggttgaagagtcattaatatcttacatagtcgaggctttgccacaattgtttaatagctattttgcaattataagcagaacactagttaaactaaattagagttcataattatttttgtaatgaattggaaatataaaaatacatgtaactctctggaagtccaagcatacttagttctccttagcctcccatggagtgaagggttaatatattaagaaatgcagtataattgcattaattgctgtgtattggttctcaataagtgagacttgttttaattttgaatcccaaatgggcagtacctctgtgtgattctcttagaactctagaaggtacattttttatttctcatgtaccaacatactatggatttacatatctctaacaagtggacttttacagaattaagtatactaagaaacaataaagcatttggatttag

SEQ ID NO: 43986 - DNA, 1596 bp, Bovine  19866881121336
  misc_feature (1)..(1): n is a, c, g, or t
ntctttcatttatcctatatgatttctttttaaatactaggaaccagcaattatccactttatatatatacttttaacgttttagttcaaaatgtcaagttatattctggcctttaacaaacacttctgtatttggtatctttatcaaacataattcatgagtatctcttgtatttttctaggtttctgatgaaaatggaaacctgaattctgaacttattgtgatggtcagtttttcaaagggagtgtagtcagagggattagaaagagtaaatttttccagttgtgaggagcttaatgatatttttaggccatgtcttatgataagtggcatagcttatcattgagagggacagaacttggaaaagcaatatggtcattttaagtcatcagctgtacagaacctttgtgtgcaagaaatttatttatgttttgaacacctagaattcatagatgctcttgactggtcagtattctgtgatcccacattagttaccttggacttcttagacagataaagaagagaggattatttttactgattaggtggatgcaaagccttggggacaaatggatggtgatctagtactttatatgtcaactttttttaaagtttagaaatgaaaacactgatgaatgaagaatcaagaaagaaagataaattgcaggcacctctttctcccagatagtaacgcggttaaacatggcccattagtttccatcctgaaggtagtattgatgatgtaatactcctgtgaaagtagacgtcaaatttaacacattttactcattcactatgatcaatttatcaatatgaatgagaatatcagagaacctatcacagaaatatgcatgctttggaacctagtcatatgccttgatgttgatgtagaaaatgagtttggtgggctagctcaagagattctgaatgaaggtgcaaaataaagattccaaaataagcaagagatactttcagttgaaagcattatagagtccaaaattccaagtaaagaaataattctatatttgcttcagagagacactatttatctctgttgcccaacatactttgaaacaactatttggttttaatggatatatatcttgccactctgccatcagtaatttgaacagcttgaaatactgtatgtcatcttacactgctttctctttgaagaaaacacaatcactggattgtttttcattgatttaaaaacattgacttgctgaagtatgagcctgtgtgcagtcataattcttgtcttttcttcctcggcaaagcctatgataattctttgagtttcaagcaggtgtcacgcatcagatccaagtgcttaataaatgcaccagaagtatatttttcttaaggccttgtgtttatcccatttccatttatcttgtgaaatgtcttcaaatgcttttataaaatcctgggaaagagcaggttagcatttccacttggcaagcagagctagtatgtgtaaggctctcctgtcgattttgaccttaaccaatgttggtaattcctagcctgtgtgccaatggactgtgaggagtgatggagttatgggatggggcccaccaatccatatatac

SEQ ID NO: 43987 - DNA, 1649 bp, Bovine  19866881128552
  misc_feature (1)..(1): n is a, c, g, or t
ncataactcgcagcttcaatgtcaaggccttttcagtaaactcgggtgatttcactgtcttaggggaaacacaaagcaaacctttttccttcactcaagaaaaaaattaacttagtgcacaggttagaaatagggcttccaattatttttatgttatttatatacagaatcaacaatgtttagccaaaagttcatatgcaaagaaatgcatgctattttttgaaatctgagtacaaattttctagtattaacaaaaaaaatttacttgacctgatatgaaattcttactaaaatcacgtctacaaaagactgttggctactcactgctttgttccatcctattcaaaggctcccatcaatgctacatctatacctattgagagaacaatgaactgtcagctactgttctaatgcaccacattatctccattgaccagctcactgcagaatcttggcaaggattctttccattagaaagctaacttattgcatatatttatgttttatttatgtctattggacaaaagattattaaacagaatggatgttaagattacattaaaacatctgacagaaggtagaacttcagggtgaaaacttaacccctccctttaaactcaactcatcagagatccctatgatgatccccgaatagacagagcctactagctcagttgagtgcatttgttggacaggagcagagggtgaaggacttcgagaaaaaccttgggctccttttaaggagtatgataaacaacagtattttgttttgtttcaacacactgctagtgtttctgctgttctaaaatctgcctgtgccgtgagagtcctggaggtgacctgctgcctgtgaggcaccctgcctgattggcatcgactcccggtgacctccctgcaggcaaagccccgaggacagcctcctggaggcagaggtagagtttaaaacacaggtcgcgcctgtatgatatttttaaattgtcagagttaggagacagagaagcaaaatcattactaacatgattcatgtttttcccgaagcgcctcaagggtctccagaaatatttagcaacactcccaccgcttttgtattatttagatttattttactaagaataaagtcatttctttccagcccacaagtccaaagtttctcattatcctccaagcaatcacatgacagatgttaatggcttccctgtgctaaagaatgtcaactgtcatactctagggagattttacattgtggtcaaaatacgaaaagtattgtcatctaaacatggcaaaaggcttgactcggctatctcatctaaagatctggttcttaacaattgagagtgatgtagaaggatgtgatgtatctgagatattagggaaaacatgaattatttttcttctggtatttttgtgattcaaaaaagagcagtgtatatggagggagatattattttatagttgtgattattgttcttatatgtttgggtagttccttgggctttttcttcctcagctgtatgcaaacatatgcctaaaaatacaagacatttcagataagggttattctaacaaagcacacaaaggaacttttttttcccttcagaaatcatatctctgacaagagtctgacaaatgtctggagaacacagaggata

SEQ ID NO: 43988 - DNA, 2261 bp, Bovine  19866881185958
  misc_feature (1)..(1): n is a, c, g, or t
ncttgaaggtttttcttttagatgttatacgtaaaatgttgaatggtggctcagagtataaagagtctgcctgcaatgtgggagactcaggttcgatccctgggttgggaagatcccctggagaaggaaatggcaaccccccccgagtattcttacctagagaatgtcaaggatggagcctggcaggctacacaactgagtgacttcactttgttttgttttgttttgtagccagtgttatcttaaaattttccaaagtagttttaatattagagagccaaactacaaaaaaaatcataaactattaaactacttgcaagtcataggctattacaacttgaaagagtttttgtactcattcagtcctgtccacacattgttagaactgggaatctgagggtccataaagttctttttctcaactcacataggtggtcagaatcagaaccaggatgaagatttaagtcttgtggcacccagtgtgctgattgtgtttatttctcaattacgaaagaagacaatttctaggacaaagtcactatctttttctttgagggggatatttttctgagcacattgcattccaatgatgttcattatgctcacacatggaaacttgggtaaaatgtgcacatgcacacacatacaggtctttaattgaagtcatttccaaatattttttgaggcaattaggtcacagttgtgggtatgcgagggaagatccgtgagtagcaaaaaatctaaatagcttggtgatagctgaaagattgtattggtgagcaatgatgtttttgttaattggagatactaggtcttctctgattccactagaaaataccaatgaaagagttttaataaggtattatgggaataggaaaatatatgaatttgacttattccatgtcctgtgggcagtttttaacattctcaaatgctcaacatctttatctactagactagatctactttcaacagttaaagccagataagattaagaaaaaagtttcctgagatgttcacaagtgtagaaaggagctatggatattttcaataaaagaagtcagtctctttgagttctgtaagagagaagagtaatgccaaatatcttcacaggattttccagtaaccttccatgccagagagttgtagaatactttaaattgctccatctacttctttttttcctcatggaatcaggctatataacatcaaaaactgaaactgaaagctgctcagtcgtgtctgactgagacaccagaaactatacagtccatggaattctccaggccacaatactggagtgggtagcctgtccctgctgcagtggatcttcctgacccaggaattgaactggggtctcctgcattgcaggtggattctttaccaactgaactagcagaaaagcttctaatctagactttaataagtttattttactccttatgaacttggataattcatattttattggttgttttgagggtttctgagaaacaatttcatgtttctgctagttacattttcattttcttcaggtaattgaatgctaccctgatcatggcaagttaccatatttccccaaagagtaggcatttctcagaggatgttttctcagaggatattcccctcttggaatacttttcttctagttcatagcttcagcgatgatcatccttgttgtgtcattgaacatttaccacacacatctggtcccataccaaattctcactaagtacttgtgaaattgatgagctttgctggactgtttttttctgtccaactgttcacttcgttttgactgcaaatcaacagttactgtgacggcaccagtaagttacagatcacctaccattcagttcatcctgtgcatattgccctaaggattaattaataggaagtgaccttcactgtaatgcttactttagtgttcttgactatcattatcatcagaggaggctcagaagcataatttagagatgtacactagagggtggtgttttacctggacactagactcatcaatgcatcggctttgaggaagaatgaaaaatgtctccaggaaatgttccccatgtttaatgttacataattctcagcacatatgccccattaacaaagttgataaactccagggaatggaagcagagactgagtcacttggcggccttgctatcccatttcttcaacacattcctgtaggtgtttggttttcctgagctccacatgcagagtgtcacttgaaaaccaacactgatcactgg

SEQ ID NO: 43989 - DNA, 723 bp, Bovine  19866881338196
  misc_feature (1)..(1): n is a, c, g, or t
naaacagactcctggccctgccaagtctaacataaagagagaacccagaactccacacaggtttctcatttatagcataatttcctccaaagacagctatttaaaaatgtagattaacccttaatgtctgaattctccagattgaaactttgaaacaatgcagtcccatctgccacattgaaaacccaggtggcaaaggagttgcccaggctttccccagtgagggccagagcccggcctactgactgtccacacaggagggagcaccacgctgcatgcttggtggtcctcccatggagaggcaaccgttgtgttcttaggctataaattataatcagctgataaaagaagaaaggaagtcatgatgtgtcttctcaaaaaaaagtactaaggcgtatgtgtatcattaacacctaagtgaaacaattcaaagtagtaactcctttaaagtgattgccaggcattcaccagactattcttaagggtttaaatatgaatatatgcaacaaatgacttcacattcaccccaaaatggaattatacatttctgtatctagtctgtataactttcgcttaagagaaaagtgatcattcaaaaggctgcaaaatgttaacctgagtgtgtgtgtgtacacatgtgtgtgaatgctttgtgtgtgcatgcacacttacctgtacaatgtcatttcaaattagtagtaggtagtggtcattcagtcatgt

SEQ ID NO: 43990 - DNA, 1024 bp, Bovine  19866881375597
  misc_feature (1)..(1): n is a, c, g, or t
naactaaagagcctcttgatgaaagatccaaccagtccattctaaaggagatcagtcctgaatattcattggaaggactgatgttgaagctgaaactccaatactttggccacctgatgcaaaaagctgactcatttgaaaagaccctgatgcagggaaagattgaaggcaggaggagaaggggacaacagaggatgagatggttgaatgacatcaccaactcaatgggtaagtgtttgagtaaactctgggagttggtgatggacagggagacctggtgtgctgcaatccatggggtcaccaagagttggacacaactgagcgactgaactgaactgaactgatgatttctctcacccttctcaaactcataccaaaatacacatgggtgcaagtgatatcattttataaaaaactatgaatcctcattaatttgaaaagcaatgtcatttccaactttacatctttgactattgttaacaacagaatacttcctagatgcctcaaaataataccagcattctagtggtagtggtttagttgctgaattgtgtctgacttttgtgatcccatggactgtagcccaccaggcttctctgaccatgggatttttcagggaagaatactggagtggtttgccatttccttctccaggagatcttcccgacccagggatcaaacccaggtctcctgctttgcaagcagaatctttaccaactgcctgtggttgggggtcagggaagccctgacctcatttggaagatttcatgggtcagtgagctccttgaggttccagcactggtccctacttagtcccagcacagggcctgaggaggacattgaatattgccagcattcaacagttgtgggtggaactcaactcagcatccactgggtggccctactattaaggaatggtttctcctcactagttgcaaacaagaactgccaaacacaatttgttcctccagactagctgtcagcacttttaatccatattaaaataagcatgcttacaaaggaa

SEQ ID NO: 43991 - DNA, 1520 bp, Bovine  19866881541999
  misc_feature (1)..(1): n is a, c, g, or t
ncctgcctggagaatcccatggatagaggagcctggtaggctacagtccatagggttgcaaacagttagagatgatttagcgactaacacttatacatgtgagaaagaaatgccgtgaactgtatttccttgattctctatttgataaaaagctagtgttgcaataaaatgggtaaaacctcagtttaaaaacaagaaagaactgagcaaatctagaaacaccatcaaatatttttgaacttaaaaaagtcagttccggttgtggatgtatatcgtattcatttggcgttttaaactaactgcaaaggtaatttgtaacatttcaaaatagcttttgagttctgttgcctcacttggattatttcttttaagaaacagactggcagcatgttctttttgatgctgagctaaactggatcaaagtttcagtcccaatgtttaaaatgctacatgtgctctgaagagagactagagaccagacacgcattcaggtgaggcttcaatggcatccaaactctcaaactctcttaattgaaaatagcttttgttttttgcctttggtaaagtttcatatgctgcattaagcaatattttgcagtagtaagagttaaaatagtttaatacatatcaaatatgaaataaaactagtcagttagtagcaagatgagagcattaaaaacaggcaatgaagaacaaattatagatagttctctactagtcaagacaacctctgctcctcctccctttttctttccttcacaaacaccagagatcctatgagctataaggagaattcagttaagttgagaatatctaataataggaaattccaaggtatcctctattacatattctgtggcagtgaaagagcaacatgataatgagaaagcagatggttcagagccacagtatacacattgttcttgtaactttcatatgtccaatttcaaaatacttggttaatgacaagtaagatgtacagttctatagttaagtccaaaaatcaagaaatattgcccacttagaaaacttgatttatgcccagaataaatcaaattgcaaatacatataaatgaatagtggggaaggaaatggcaacccactccaatattcttgcctggagaatcccagggacagaaaagcctggtggactactgtccatgaggtcacaaagagttggacatgactcagtgactaaataaaatgataaatgaataaattaaaattttagccttaatgaattcacagatttgactagtttatgcatttatccattcattcaatcatccatgcaacagagttactgatccctctacaaaaaaaaaaaaaattagtcctgtttaggataatccgtttccctacaaaatgactatccattttttaaggtatagtaaatgaataatttttgaaagtttggaaaatctttaaactctgttgcacagtttagaaaaatatcatttatttttgctttcttaaatctgtaactccaacaaaactaagttagtaagcagatatttttc

SEQ ID NO: 43992 - DNA, 961 bp, Bovine  19866881624825
  misc_feature (1)..(1): n is a, c, g, or t
ncaaaattacagctcccatggtaagaaatgctgtcaacatggtaatgacttgtttaaacatttattaaatcacttcacagcaaatagtaacacatgaagtgttatcctcacatttcacagcgacatcactcctaagcagaaaaaacgctagccaaactgttttaaaatcttcatcaagatattatgtagttaattttgaggggctggattattcttgtttgttcacaaacaaccttttaataaatttggcaagcaaatgcaagcatggatgcattattattgctgaaaaaataaatgtctaaaaatcagaaaattcaatattggaatacccacaacacaatggttttcatcttctctatgcatttgtcagccttcttctatttcactttgactttctgtgatcatggattataataaagttactattaatgacagactcacaatatcacaatttgtaacctataacttgtgtgaatactcaatcttatgtttctctttttcatccttttaaaaatgtttactccaaagaaaataacaaagaaaaggaatgagtactttttaaaaacacactctcattggtcatttctaaaacactactcattctcttggtaaacagagatatattaatctaaaggtatatgtacatacatataaatactttttacatagaatattgctgaattggtttagttagcatttcagaataggtcaaaggaagttattgacaattaacattttttatgtccatttattacttgaaccatttatttttgtattaacaaaaagaccattaaaagttcactgatttaacaaagaaattaagatctgtaaaggtagttccaagctagtgtgacatctccatgaagttggagacccaaacccttccttaatgtttccttatcactcattagaacattgtccgtctacggttgaagagggctcaccactgcccactgttgtc

SEQ ID NO: 43993 - DNA, 738 bp, Bovine  19866880396544
  misc_feature (1)..(1): n is a, c, g, or t
naccaggctcctctgtccatgggattctccaggcaagaatactggagtgggttgccatttccttctccaggggaacttcccgacccagggatcgaacccaggtctcccgcattgcaggcagacgctttaacctctgagccaccaagggaagaacatgtatgactatatgtgtatacaaatccacgaacatatccgtatgtgtatataaatccacttatgtatctataaagtatcaattttattgaagtctgaatgcattggggattctaacatgacatggttttatttttcactaatcactgttctaaactgttatgtcagaggcccctttgggcatatcccattagtttctgttaaaaatgtagctatttaaaaaggaattagttcagcccactttgaaagtctaaccccaaaactattacagatctcctctccttttctctgcagcacaggcttagtctatatttcaagagacttgcagaagtgaaatcaagtgggtttctcctttaattcattttcctcctttctctcctgggtcagactctgggacaccttctctccctcagccccatccaattctgggtctgtagatcctctggaaaaggaaagaggggagaaggtaggggtcctgactgcctgtctatagtcagaggcatctttgatctctggcttggtctggttttgtctgccactggtagcctgtgctcatgggatagtctcttcatggtttcaggaggt

SEQ ID NO: 43994 - DNA, 1132 bp, Bovine  19866880407750
  misc_feature (1)..(1): n is a, c, g, or t
nggtcttggccttataatgtttccctttacagttttaatctaacaagaaggaaactgatggggcaaaaaaaaaaaaacctaaaaatgaactgacacttgtaggctaggagcatctttataacaattgaaatcctgaccactgactgcttttacatttagctggtgaaaaaatgcataaccagtttagacatctcccaacttagtatgtagaagatctagacactctgtgatgggctgtggcctgttccctctttgccttgtcccctgagtcaacatgggtcagatcatacatgtttgtgagttgactgatgtgtgatgcatgttgtttgcaaggctctcccttcctcctgacatatgctgttggcacagcccccgcccgggtaacatttgatcttcatggcacttgtgaagtctcaactgtttaatcagtttaaatactcagccttccacttcagtcaagaagcattttaaagcagcgcttcaactgaacacttcattaatgtaatttagttaagaaaaacaagttccgtcagttttttcctaaaaggatgtcccagtgtatccttttcatttcctatctcgtatcttgtctatctgaatgtattatagggctggaatgtgattgcctattcagaacgacagaaaaactatccgatttctaaagcattttctgtttctgagaagaatattgtattaggttactatataagcgaagcgagggagcaagccctgaaggacatttctaaaagagtgcacacattcagcagagtaaataaagacgtatctcctattctcgctgaaagaaaattccattttcaatggaaaggaaaaaaaaaaggaggtgatatttttattgtctttcattgttgaaagacactgtatttttctaaagcagttttcccaaacacactgtcttttcctgttaaggtggtgtatttccagggaattgcatcagaactagggtcaactttgcatcatgacacagtggaaatgattggtgatggggtctgtcatgttgagcttcacacctcccaccctcagacgtcactctgcactgtcagtcctgcagggccgtggtccacattccttcttagcagttacttcctttcctgcaccctgtattttagctgta

SEQ ID NO: 43995 - DNA, 1353 bp, Bovine  19866880458123
  misc_feature (1)..(1): n is a, c, g, or t
ngacagacagaattcaaactaagctttaaagtccataccttttccaacaactaaaaccacttcttacatcttattcaatgactaactcttgagacaacatataaatgagaagagtaagctaaacttaatatgtcagctatttaccatgttagactgctttgtgctggcttgttttaaaatatgttcctcagacttccctggtggtctggtggttaagattctgcctgccagtacaggggacatgggtttgatccctggtctaggaagatttcacattctgctgggcacctaagcccatgtaccgcaactactgagccccagagcctagagcctagagcccaagctctgcaacaagagaatccaccaaaataagaagcccgctcactgcagccagagaaagcttggttgtggagtacctaaatactctgcagtacctaagaccaggggcaaccaaaaaatatatatataaaacatgtacctcaagataaatcaatatccctcagcatttgaacaaatagagcataaagcaaaatggactaaaaagcatggcagttttaagtatggtcaagtgcttgaaagatgactatctttttgttacattgccagaaacttttattaccaaaagtaaaaaataacccaagaactgtaggacttaagtgtaggaagaagtagaagttacaacttaaaacagtgtcaaatgtgagtttaaatgcagtcatctatgcttagaaaagatatgcattagataattaaatgtgcttagaacttttaatgtgaaggtaatatatccatattttaagcaattcaagcagtaagaaatgtacatataaatatacaaatatgtgttttataaacaaaaatcactcatgccacttgcttttttcatttaatagatacattggctgcattttcatgttgctacatgtacattggccttgttctgtgacacagtggtccagcgttacatagttgggttgtaccatccctggtttaacttcccctattgatggacacttaggttcttttctacaattccaaagtcctagcattgagtatggcatcccactccagtactctttcctggaaaatcccatggatggaggagcctggtgggctgcagtccatggggtcgctaagagtcagacacaactgagcgacttcactttcacttttcactttcatgcattggagaaggaaatagcaacccactccagtgttcttgcctggagaatcccagggacgggggagcctggtgggctgccgtctgtggggtcgcacagagtcggacatgactgaagcgacttagcagcagtagcagcagcagcattgagtatttttgcacatctttataca

SEQ ID NO: 43996 - DNA, 893 bp, Bovine  19866880475858
  misc_feature (1)..(1): n is a, c, g, or t
nctagtgggataatatattttaagtgatttctgaaaatggcccgtgaaagccgtctgccacatggcccatgtttgcacatctctatatagttacgattgcggaatttgacagtataactctgaatctgattaattaagaatgtgtaaaaaacaaagttcttgcattacagctcgttccttatctttgtgtcttttactgtgatgttgtagaacttggatcatatggaaaactaaaatattatgacacaatgactgaagaaggtaagaatgattttagaattgtattcattggctttttttttttttaatttatggtgtctgtggcttgcccatttttttagtctttattttccccctctttgcatgacttcagtgacattgtgtgatttataattctttctgcattttcgtctagttgctgccattgtgttgatttggaattggagacatgcaataccatgggtgatcatgttattccattcaaacgatccaaaccatctcagtcgtgtaacacactcagtgaaatggtgtcagcaatgtaaacacaagcccacacccattggatcaccgttagttcctccacatgcttacaacatagaaaaatacatcagaccgacacttccttttaatatgcccctaatttgggggtggggggagatatgtatcttctggtgatattctgatttatgcaaaggaatgagcaatctaaaggaatccctagattcgaaatggagacctgtttctgatgcagaggactgtaggcccctgtccttttctcccacagcccatgctaactcatctgagagaggccagggtcattgttccagccagtggggctgtatatattggagttcacaccgtgtgagattggacgtatcgttttgagcatttcc

SEQ ID NO: 43997 - DNA, 1465 bp, Bovine  19866880497018
  misc_feature (1)..(1): n is a, c, g, or t
ntgttaagacattagccacacttccttctcccactaatttggttatgagaatgttgcagtaggtcccctgtggacaactctcctgacccaaaatttgatgccagtaaccaagagtgtcctgtgagcaccagaattgcacactgtgcctctgaaaacgtcaaacagtgaagccttagcagtacatgcccagaataaatattcaccaggaaccttggcattttggatattatgtgaagtggaagtggaagagagctggtgagactttgcagatgccttgattgcgctctgtcattattccatttgacagtttattgcagacaggtttctctttctcatacagcttgaaatggtgtcaagggaaatgtgtcccactttcctcagaccagctctaaaaaatttcagcgagtcataagggaaataagttgataccacactttaaaattccagaagttgaagagagcaaaaatgggtcatcttttaatgagctaatagaaagccattccctcagtgggaactattgatccaagtaattgaacatgcatgatgtccagtccgaggcattcagtgactctgacacagtaaccctaaggctggcagtcagtaagggctatggtgccagtctaaggaacacagttatactggaccagtatgaactcattgaattgtcatcactgtcttcatctatcccagtcttattagatcttaatacacacatgtgtgtttttttttttttttttactaaattttcagtgaaattttcatgtaattgcgtcattgaaaaatgaatcgttcaaccattttatggaaactcctactcctgtataattactataaggaggcttcagatgattttagtcagagaaagagcagagaagctgtacagagcactctaaaaaaacaatttaagatccaggttaaaaaaaattcagaacctcaagcaatacattgagcctggattaggtgagaaggcattatgtaactttattgttcatcaatttaactttcaaatttagatgattttgtatagaattccatttttttctagagttctttaaaaatcaaatagacttctgggggaagcatttaaaattttatttatttattttaattggaggacaattacaatattgtgatggttttgtcatatatgtcagtatctttttattgataaactcatttaaccaattctttgaaaattagaagtccatgtatggtgcatatgacaattcttggttagtcagagcattaaattgacctaaccattttattctgtcaccactttcaaataaactggaatgtgctgggctgcttataaggcatctctctcccatagaaccttgatataggtctttttctgatcaaacattcccatttcttttctggaaacttgagactcagtgagtcagcacaatctgtccaagggttgcagagaaataaacagcaacactatagccctctggcctgt

SEQ ID NO: 43998 - DNA, 904 bp, Bovine  19866880543965
  misc_feature (1)..(1): n is a, c, g, or t
ncgggaccttgcctcatcagactttgctcccactttctcagcagaacctacccctgtcctagtctctgtgtgagggcagagagaggcagaggtctgagcacatccatgaacagcaacaataacaagaaacacaagaaagcacagtagccaagatttcttctgttttctagaatgtgggctcttttgcaaataaactggtccagacacttcctgtttatagaaggagatcctgcagttcaaagcagagcaggctttaaaaggaggcttggcctgtgacgtgatttcatgcagatgattccacagaccacaacttggaaagcagtttatttatcccattatcaatggggagggcagactgggtgcccaacttctggtcacctcaagttttctttctgcttattctcaaactgaaccagaggcaggtaaactagacaaggaacccaaattagagaatttgaaggaagggaaaatgacattcatcaagaatatgtcttggaaaacaaaacttcttcacacttcagcttccttagggaaggcccaagtttttaaaggaagatgcctcatgtatttaaagaaaaatataactttggtgaaacaagaagttaacggcctaaaaagtaagatgagagagagctgggggctacaggaggcttccaattatacttaattcagtgcatataagaaagtggaaaggaagagaggctgaaagctggagggctccaataggtatttgcagaagtttgtaagtgtggcagtcagagggacaaaggtcaccctaaattttcttaaatttataagcagatagccagactgcatgtgcaggctattgagtgaaagaagcagtgatctaagtgggttgaatgtacaggtttagcattgtaatagaatagcacttaccggcagg

SEQ ID NO: 43999 - DNA, 918 bp, Bovine  19866880564213
  misc_feature (1)..(1): n is a, c, g, or t
ncaagggagactgcatgacttcctttgtaggtttttgaaagaaatggttgacaattctatttcttatagagaatagagttctatcagggcatagggggaaatacctaatcactctctggccagcccttaccaacagtaattgtaaatcatataactgtaataattcattcacctggaaaaggacacttgcctttatggccttcttccttaattacctttctgggtggaaatctgctcacaggctggttttgggtactgattttgccgttcatttaccaggctgatgaaagtgtacatatcccataaagtctttaaactgtaatgaacttctagaactcttcccctcaaatgaataaacagaacaaggaaaatagtaggttgtcgcaggataaaatgaagacaaactgttctgtgtttatgcctgaggtcagaccccaaaagctttcccgaggtatcttccatgcttcttctagggccagactgaacaccagacctacataaagcaatgaaagattggacctatagttatggtgtttttttttttttttttttaatgcctgcaaagtagcctgacaagattaaactgtactttctagatacctctagttttgtgatgtgtactgtttggttccatagaaaaatagctttgatatgtaatgctttgataatgatggaatattaataggatttttcctcctctggtcctctcctacccagatatgcccaaattctatgtttcctgacaatttcatgtctcctcccaaccactcattcctgagcatgttgtgcaaaatttctgtgttgtgctgacaagttgcattttaatcccttgtcgtgaagttcatttccatctcttatctttcagttcgcagcataaatgcccctttctcacagaagatttcccgatgttaagattag

SEQ ID NO: 44000 - DNA, 1213 bp, Bovine  19866880566645
  misc_feature (1)..(1): n is a, c, g, or t
natgtaaagcagaaggtggagaaatggaggtagccaatgaccatagtaatgtaaagcaagagtgaaacccagatttaactgagaatgagtgaaatctgggagcaacccaccacagcatgtggctagaccatcagatgggtggaaaggctatggtgagactcggaaccaagagtagatgttgaaaatcctaagtggcatgtgctgctgctgctaggtcgcttcagtcgtgtccgactctgtgcgaccccatagacagcccaccaggctccgccatccctgggattctccaggcaagaatagtggagtgggttgccttttccttctccaatgcatgaaagtgaaaagtgaaagtgaagttgctcagtcgtgtccgacccctcagcgaccccatggactgcagccttccaggctcctccgtccatgggaccttccaggcaagagtactggagtggggtgccattgccttctcctaagtggcgtataggtgagctcagattgttattctgatggcactgggaacttgtgagattttaatcaaggagtgaaaatggctaggtttttgtttcatatggataatttggaggcctgaatgaagaaggaattgataatctatcctgaagtgggaagagctattagaggaaggattttgtagtagtttgggcaatgtgtaagagcatgccagttatgggttagagggcttcttcaggaaatattttaaaagagaaaatggcagctcttgatgatgggtgtagggtggtagagtcaggggaggaagagtggcttcaggggtgtcttagggttccagttgagtgactgtgttagtggtgttatacctcttgagagattgcaagaaagatgatgaatttattcttttcagttttcctcaaagaaaaactaatttttcagatgtttccattttgctttgtagatagttccatgatgatttttttcccccggtacttctttgacactgtagctgttagacctctgggtcttttcatgatccttatcagaagtaaacttttgctttaaatctctatttatgcctaactctctgtgttcttattttttttttttttaacttttaggaggaacctaagaaagttcgctttgattatgacttattcctgcatcttgaaggccatccaccagtgaatcacctccgctggaaaaactgactttcaacaatcccacagaggagttcagaagaaag

SEQ ID NO: 44001 - DNA, 1607 bp, Bovine  19866880580413
  misc_feature (1)..(1): n is a, c, g, or t
nttgtccaggaaaggcttcatttatgctggaggtttttaaagctctttccatgtttttatttttaaacaatattaaggcctctgatttgtcagatatctaattgtgccattttctgttttgtccatatcatgatttatttttttcccctgaaatataccaagccatgattactctggttgttgtcttccccatgacaatcaaggatgaccagggaacaggtctatcaaatctttcaccaactaatctctgtaatacccaccgagactaacacactatcctcacttagacatgacatgaggcttttcaaggagattctgctgaggatgtgaaatgtaagggccattcattcaacaaagagatgtagagtgagatgcaggaccaggaagtctcatgcctagtgggtaaaaccactcattgctgctgctgctgctgctgctaagtcgcttcagtcgtgtccgactctgtgcgaccccatagacggcagcccaccaggcttccccgtccctgggattctccaggcaagaacactggagtggcttgccatttccttctccaatgcatgaaagtgaaaagtcaaagtgaagtcactcagtcgtgtccgactcttagcgaccccatggactgcagcctaccaggctcctccatccatgggattttccaggcaaaagtactggagtggggtgccattgccttctctgaaaccactcattaggaagcagataaaaatgttcaagtggagaagagtttgagaaaaggagtgaaggatgtatgaagggttataaattgttgcaactggacatcaaacagttgcaactggcacatcaaacatcaactggcacaccaaccaggcgcctacctcctgagggccttttggggggcaatgagagcatcctgatcttgggcaggttataaaacctggtctcaaggtctcctctgcaaaaggcaagttgtaaaaggaaatttccaaagtcttcctgcttttaaaaatgctaggattttctaaagggtgaaataaatgctgtattaaaaatagatgttcatggtttccaaatttggtcttatatctttaaaagagtacatagtaagctgtggagggttttctaaaaagagaagagagacaacaaagctattaatatgatgaagagcaaaagacaggcaccatggaacacatcaccaccttcctttaaccttagttttaggagagggatctgagactcactggtcttattgtacagtccaaggaggactgtgcatggctggtctttaaaaatggagaggagggacttctctgactgatggtccagtgactaacactcagcactcccagtgcagggggcccaggttcaatccctggtcggggaactagatgccatatgtcacaactaagaatttgcatgctgtgactaaaaaagatctcacatagcacaactaagacctggtacagccaaataaacaaatactgttttaagtatgaaaaaataaaaacacaaaagtggagaggtaacttgttgcatgtttctgaaagttagttgctagacagtgaatgcaagcttcgtaagcaagtgtaaggcatgactctcacataaagttatcagataacccagca

SEQ ID NO: 44002 - DNA, 2655 bp, Bovine  19866880630350
  misc_feature (1)..(1): n is a, c, g, or t
ngagaaacccgtctgcatagcaaaagaccccaattatgcaaatctatgttgtatttgcaggcttcctctgttgaatgcaacatatatttggctcagtggctcagtggtaaaagaatcctcaggttccatcctggattgggaagatcccctggaggagggcacggcaaccccctccaatattcttgcctggagaatcccatggacagaggagcctggtgggctacagtccatggggtcgcaaataattggacatgacttagcgactaaacaacaatgttgcattcgcagagaaacaagagaatgaagtagaggtgctaaaaggttgggtgtggggtgcacagggccgcagagctgggggtaatctcagtgatttctgtccaggcagcaagcagccctgcgttttatttgctgcctgctgaagtcagcagcttttgaacttgagcaaaaaggggcagaaggcagatcagggcctggcaggatgactattagcctgtcagatgggccctccaaacctccaacacagtgctgcagatagcatccatcactcccttccctgcttgtttaaacatgaaagtgtagcagtcaggaccatgcgtcagatctaaaaatatcaataggaattttccactgatgcttccttttgagatcatataaataacacacacagctcctgctcccctgtgtcccccacctgggactcttgcttccagaatcctggagtatttcaagcagtagcactgaatcccaccagcacctctccctagggaggtggtaggtgggccagtctcaggccatgtggtctacaggaaaagcatgcgactagagacaggaatgagtgtgacgctcgacctgctactgtgttatgtttacttatttataatgtataccctaatactgccaaaaggatttttagtggcttacacaatcaccctcactttctctccaggagttgaaacaaataattaaaaaagctaatcttaagccatactgaaaaaggttctttccatatgagtgtatgtccttggcagcaagtgaaagaattttaaacaccaaatacgagggaattaagaggattaggtaataaggcagaattaggaagttggtgcatattatttgggttgtcttggatcttcattaaatatgcttcttatgttctccatctcattgttctgtaatacgttggaaaagaaggaggatctaaaatcagtcatctacgtttccaccttaggaaacaggaaaatgaagcacaaattagatccaaagtaagcaggagaaaagagataataaaaatcagagaagaaatcaatgacactgaaaacaggaagtcaacagagaaagtcaacaaaagcaaaagctgtttctttcgctatgtagggtccatccactgtttcctttacccatccctagggctcctgcccctgacagaagcttgggtgtgctgttcctggttcctcctctgagccacctccaccttctcccagcagatgcagcagatgtagcaaataccactccctatagggctcacccagcctcccaaggggtcagttgactacatgaataatctctatgtaatgagaccagtgaagactagaaaagaggtgcatgttaactgtttccttccagatatgatctttattgtttcactccaaatgaatgactttctgctccccacctgggagatgcctcaggaataggggaggatcatgcaagagttgagaccttacattacatgcaataagtaccctgtatcatgcaaggtggaatggttttattcagacagagaggagtctagcacttccttggaagacccatcaatctgatctggtcatcaagctccttccccttccagaatggacacttcccccccacccgccatggtcagatcccccactgccatctgcaatctagaaacttctctctagactctaagttaaccttttttttagagaaaaaagcaaaagcaactctttatgactcatatcattttaatgacaccaacagatggtgacatttcatcaataacccttctgcttataacctacggattagctcctttctccatctgccaaagtcaccaggcaggcagtgccaccagcaaatagtggaaaataattatctgtttagatacataagctctaaacacactaccgtccaacgcaaacaattagctatattgtacggcttccaaaagctgcatttaaggtggctgttgctagagcagaaatggacaaggagaagatgctgggtctcaggttacacaaacagtgctctctgtggggacatcatggcctcttgtggatgaagcttgccatagacagaagttcaggggcccagaatcctgcagaggatttgagaggtacccagggagcaaggctgtcagcatgtcttaggggaaattctctttgtctttttgccaagtgcaatctcactctggttcaatgggtgacagcttgcaagctagttagaaaagtggaaaaaaagtactgttccaagtctggggcttgttttgcctttgcccaagctggggctgctggcatgctcatttgtctcaaccccaggagaggctgggcaatgattttccagtttttcctggagtcgtggcatcctcactttgaccttgcaataacccatcctaaaacttctgtagcatatcca

SEQ ID NO: 44003 - DNA, 1686 bp, Bovine  19866880653869
  misc_feature (1)..(1): n is a, c, g, or t
ncaggaaacagacatttttattccttctagtacttattagcaatttaaggtaccgtctctcccatttgggctgacagaatggcctacgttttgcactcagccaccttagtcctatatgtacctatctactaccaatgccaaaaggaagttactaaacataattttgtgggtgctgcctcagccattgagaatcttactgctggcccagggaacatttccgaatgttcatcactgcgagtcagcacttttaaaattagaatctcacttcagtaaatgctcacgtaaagcatatccatgatgcaggataatgaatttcagacgcccctaattaggtcccaattccagttaacctgcggcacagagatctgcttaggaaatgccaacaggaagatgaagcgggtggatttgggcaggagaaatgatgataaatcagcccagtggaagccatccatcggtgcctgttttggtggcatgaaggaattgtttttgcaaacgagtgtttgtcactcccctgtcaaatattctgcaaacataatatactgtttcccagacacaggttgactgaataagtcactagagagtaaaagtaaaccatctccccagtcattaatctgtagctcctgagaatgtgtttgtgatgctcatgctaactgagaacaaagatcatggccaaacctgttgctgctctgttagcaggctgtgttactgcccactgctttagagtctgtggttgtgctacagagagagtgtcttgactcaaaaactgtttttaactgagcaagatgaactagagacaaagggaatggaaacaccaaaatgccagtgagaccccatttctccactggaccacagatggtttgcttcctgctcggtgccccagacctcaactgggccaagctgagagatactgcagtgaacaagagagccagtactcctgcccgcttgagattaccttctagaggaggaagccagaaaataatataatttagcaggtgaatttgcagcaacatggatggacctaaagatgatcatactaagtgaagtgagtcagaaagagaaagacaaataccatgtgatgttactttatgtggagtctaagatatgacgcaaatgagcctatctgtgaaacagagacagactcagacgtagagaacagacttcgggttgccgagcaggaggggtgtggaggagggagaattggaagtttggaattagcagatttgaactgtcatatgtaggatggataaacagggtcctactgtaccacccagggaatagaattcaatatctataataaaccagaatggaaaagaatatgaaaaagaaaagctatatatatatagcttcccaggtggtgcagtggtaaagaatctgcctgcagtgcaggagacccaggttccatccctgtgttgggaatatcctctggagaagggactggttacccactccagtattcctgccttgagaatcccgtggacagaggagcctgacaggctatagtccatggggtcacaaagagtcagacactactgagcgactaacgcgcgcgtgtgtgtgtgtgtgtgtgtgtttataactgaatcactatgctgtacctcagaaactaacacaacattgtaaatcaactataaactgaaatagagtgttagtcgctttgtcatatccgactctttgtgaccccatgga

SEQ ID NO: 44004 - DNA, 842 bp, Bovine  19866880690023
  misc_feature (1)..(1): n is a, c, g, or t
naattgaaattaagggtgctttacttgagcagaagggatggtggggttggagatgatggagaaggagggaagagttagaagacatcaatagttcttttaaatatgagaagtttgagatatgtatcagacatccaagcagaaataaatgttaagtaagcagttggacatatgattctggcgcttgtgagaaagatactggaacagccacagatctgagacttgtcagcatacagatgctattaaaagctatggaatagaagatgagaaggccaaaggacagagctttcaaatcttgcaatatttagaggtaagtagaggaaaaggagtcagtaacaagaaaaaacctaatcactatgctgtctcaaaaacctagagactcagtgttttaaggaagaagtaatcaattgtactaaatcctactgagaggtcaagtgagctgagggcagaaaattgccaattaacattgctgagatgtgggtcacaggcaactcagaggtagcaggcagtttctaagacaacctccagggatccttgcctcctagtattcatgccatcacacagtctctctccttaaccattgactcgcttctaatagaatacaaaagaagcgatgcaatgtcacttctgagattagatagtaaaagactgggagtccatcttgctatctttcttgggtgctgataaagagtaaacagataattaggtttaaattgcatagggatttttcaaggcaactataaatatgatggaggaagagaagggtataggacttaaagttcataacagagtagttatattgggtggtctctggactctaagcttcgtaaaaagagaagtgagat

SEQ ID NO: 44005 - DNA, 2946 bp, Bovine  19866880717716
  misc_feature (1)..(1): n is a, c, g, or t
ncatatgcacatttaagttaattgaattgaatgttataacttcaacaaaataacaataataatgagttttaaactagagtactataaaatattacttgtgtacctactttatcagagatagtaatatacagatgtgtatctatagaggatttattccatatatacttaatgagaaattaagagattttaaaggataaattggttctgcgtgcgtacatgctcagtcactttagttgcgtccaactctgaaaacctatggactatagcctgccaggttcctctgtccattggattctccagggaagaatactagagtggttgctagttcctcctccagaggatcttccccacccaggaatcaaaccctggtctcctgagtcttctgcattgcagggggattctttaccactgagccacccgggaagccacctaatttggttctatttatgcttaaattttttcttgtcttacgactaagttaatacctaaaccccagacacagagcagagggaaggtaaaaattcatggtcccactaccaggaaaacctcctgtgacacccacctttccctaggggtctcagtgccagcttggtacccctaaccctgcctgtttcacacacatgcctccctgggagtgcaactgtctctttacatgtctgtctcccccactagcgtgtgctcctcttgcatgcggagtccatgtattatttatccgtggatcaccagtgcctggggcatccttggcactcaataaatatagcttttgaatataatcagaattcagattattccaggtcaatgtttatgaacatctgttgttcaataagtgctccagtcaagcagggcacacaggaataagtggatccgatgctattgactgcaaggaacttgaaatgtcacagtttaaatagtaaagaatagtcttctgaggtgaggtttttttgttttttttttaaatctcacctcctgctctttaagtaaaattgtatataacataatgagatggtaaatgtttaaaatatctataaggcttattatatatgattatatttctgtagttctaaaatagtaataatagctaattcttgcctagaaccatggtaagtgctttatatacaacactgtgtatcatttacacacaatactttaatacatacattatacatacacaagatattatatttatataatactttacctatgctactatgtatcatttgttctctacccagttgctcccattttacccattttctagatgaagaaatagaagcatggggaagttaaataacctgcacaagtcactttacggagttggaatatgataccaaaatttaaatgtttgtttcccctaccccagtttagcacaaaattttcaaattttcaaatctgcagtttaaaccacttcctttgtacacaaaaagtttagtgttatcaagttaacttgcttctaaattcagaaatatccatttgttctgaatcatttaaatcacaatgccaaggattgtaacacagtctgatcccacatcagagctgaggtcacaagggagttgctgatagttgtccaatttacactgcagcttcctactgaaaaagagaagccctgtgatggtcagattcaaagctgggctcaagctctaagccaacctaggctgggagcttctttcatctaaacagaaaacggccaagtaaatagtgcatgccgtgtgaacacgccattattttgttctgagcaaattaagctacttgtttactgatatgaagaaagaaaaggaattactcaaaataaattgatgaggttttggatggtgtgcaagtgctgacatgggagtagcgagatgtgtgttacgtttgccttccttgtaagcacccagtttgcttaccaatgcagagaattctgtttattgctgatatgtttattatttttacctttcctgctctccacaaagtaattaagttagctaaagaacatatgtatgtaaggacagtttttaaaactctgaaagacaaagaaccagaaagaggaaggagagatttacatcagcaaccacggagaagataggttaatgcaattgagagttagatttagcactgagcttcttggcagccaaagctaaaagaggaacattataaattatgtagttcacattatctgataaaaagaatgcagtttgttctttgggatacacacaagatttttcctaacattaaattctaagaggaacttctcccagggatatataaggaatgaaccatatcaaattaacagatcaatagcagttttgtaaaagatgcagaaatttatactatttcttactttctgaatcatttccttttttttcacacattttcttgtatctgtgttgcatacaagtccaagtcccctagtccaaataatctaacaattgcctaatatcaaataatgaggaaagataattttcctccccctgaattatctcaaaatcatataagcagaagctaagctaggtctgcatttctcttacaacatttaacaaaagtggaattttctgaacaaagagaattttagatgttatcagctcttcaaggaaaaggactcactgattagtaaagtctctagtgagtaaacacatattaaaccacaatgccaaaggtattgtactaatcattactttgccaacaaaggtcgtctagtcaaggctatggtttttccaatagtcatgtatggatgtgagacttggactataaagaaagctgagcaccgaagaattgatgcttttgaactgtggtgttgggagaagactcttacgagtcccttggactgcaaggagaccaaccagtccatcctaaaggagatcagtcctgaatattcattggaaggactgatgttgaagctgaaactctaatcctttggccacctgatgcaaagaactgactcaaaagaacttgaaaagaccctgatgctgg

SEQ ID NO: 44006 - DNA, 1045 bp, Bovine  19866880734943
  misc_feature (1)..(1): n is a, c, g, or t
nttcatgtgtcctatccccctcatctttctttgctcttatactttagtgatcctaatatattagccatcttgaatttcctgatcatcccatgctatttaatgtcctcatgaaatacccttggtcctgttatgacctgattaatactcaccttttctctgaaacttttctaaataatctgccccactttaatgaatccctcccttctgtgtgctccctccattaacagtttatctatatttttattatagttgttactgtctcatcttaaagtgtttttctcctgatcagtaaggtgtttgaggggaagatacagatgcttaactatctgatttctcagcacttcagactgtgcctggtagttaactggtgctcaagaaattttgagttaaaaaagtgcaaagatttgtttatatatttgtaactgacttctcttaactgatttatgtattcatagttgcagtgtcttaactgcaaatacatccagatgatctggaaatgtgatacttggctcctccccttaatgggggtagagtggacaggccacacagaatgggagactccctggtagacctgtcttggctctcttagacgaccacagttcagggaataacccacccttgtacgaataagtttatacaacagaatcctgggatcagttggggaccaaggagtctttgcagcctttgcctctgtgttggaggacagaaactagccaaggagtatggagctcttgaaaacgcccatgaaaagacccgagatttttttgttgttgttaactgattctatcatgaggagtattaaaccacaaaactaacaaaggggaggcaaggaccacaaattaatcttttattgagacaacagagggatgtcagagtgtacaatcccaaaacatttgcttctgtattttgaaaaagcaaatggttttcagagaaatttcaataacaggatgttgaagtgaaagaaatttctgcctccctgtttcctatagggactgtgtggaggcatgataacatgaaagctatacgatcaccttgtttttgctgt

SEQ ID NO: 44007 - DNA, 1515 bp, Bovine  19866880738283
  misc_feature (1)..(1): n is a, c, g, or t
nctgactggtgtgaagtggtacctcatagtggttttgatttgcatttctctgataatgagtgatgttgagcatcttttcatgtgtttgttagccatctgtatgtcttctttggagaaatgtctatttagttctttggcccattttttgattgggtcatttatttttctggagttgagctgtaggagttgcttgtatatttttgagattagttgtttgtcagttgcttcatttgctattattttgtcccattctgaaggctgtcttttcaccttgctaatagtttcctttgatgtgcaaaagcttttaaggttaattaggtcccatttgtttatttttgcttttatttccaatattctgggaggtgggtcatagaggatcctgctgtgatgtatgtcagagagtgttttgcctatgttctcctctaggagttttatagtttctggtcttacgtttagatctttaatccattttgagtttatttttgtgtatggtgttagaaagtggtctagtttcattcttttacacgtgtgaaggaatttttaaataaacattattttcttttattaaaaaaaaaaaaagaaactgaattccatcaaaaaggacaaggaatctgaacagcatcagtcttctctacagcaacaatgaaacatcaaagacagaaaagaaataagtgccttaaaaattccaagagacaatcatttcttacccaagaatttacacaaagccaggctttgaacagagcataagaggaggataaagatatttcagacacacaagcattcaagatttctcccatgtccccttctgaagatgtggcagtcagaatgcgagttgggaaggaatttccaaacacaaagtattgcagaaaggggtgagtttattaagaacaaagagcacagataatgtaggcactgcaagtacagctgaccactagagaaagtcgacagttttcacgggttagtttttgcagcctcaaaacaaagaaaattcctgctgaaaggctggctttaggtgattggttaaggtgctatagggtgagcactgtggtgggcatttttgtctaaaatgggatcgagaagcctgctggtgataatcatgggggcttttggcaatggttacaaagaggctcagtcagttttggaggtgaacttggttctgggctccatgtctgtggccttgatgcaaggccttacactgtggccttggggcaggactccacagaagacacaggaggctgtgctccagttagcagggaaagtaaagaagaaaagaggattgaggaaacagggctctcaacacaaagagaattcccaggatgatacccgtggagcaggtctgggcagctgttggctcatgtggcaacaggagggcacagggctccaggactgatgtctcctaaaggggaaaacacgaaactggcaaataactgaaattccctccacctaaaaatactgaggggaaatgtacagttctatcagagagtttgaagtgaattagtatactctgcaactcaa

SEQ ID NO: 44008 - DNA, 3994 bp, Bovine  19866880743711
  misc_feature (1)..(1): n is a, c, g, or t
naatgggcgacacagcttattgaaaggttggggacagggttatgtagagatgagggctttgggggtcaggggtggtgaatattgtaatatgaatattgtaatatgaatttaacagctaacactcaaatcagaaaaatcttgtgataacaaaatgatcctactaactcaaaagattgtgataaataccagggggaaaagaaaataagacaacaaaacctttgaaaatgattcatcgctagggaccaggaagcaggagttacgagccatgtagaaatattgggttgaccaaaaagttcattcgggtttttggaccaggaagcaggagttacgagccatgtagaaatattgggttgaccaaaaagttcattcgggtttttccataggatgttacagaaaacccagatgaattttttggccagcctaatcttttgcgtatttaaggaattcattatatgtcacctgtcttccattttcattctgaacaaactgagaaataagcaaaaaggattgtcaggtggaatgatagagaaatgatcactatttttagcaataaaggctaatttagggagatggtgagcttgagtaccaagtagatttatggacagagtcctagtactagaccgggggaggcgtgctcccatgatattaggacccctccccaccacacacgtgcattcattatatggagggtttgggtgctgccgaactgaatagtttgagacccctgagctgggaaaaagactagtgactcattcatactacttgttagaagtgactaaaacaagtattttatttcagtattcaaaaccaaggatacagtagcatattcctactggctcaaggcacacttccattccaatatttgaactttatattggagttctgagtcagagataggtgaagagagaatgaactttaaggaggaaagcagcaggagcacaactttttgagcttttagaaagaagtgctccttgcttgccctctggatgggctgtcctgaatcgaggcctgttccccggtgtatctccttttaccagtattatttatccttatttccttgctcatgtggccctgcaggaatcaggaagacagccagagttttagactgcaggttgcttgatgcaactgatggatggcctgtggctcccaaccctccctctgaaccctgcctcaacattacacctaccttggtgcccaggagccctgagctgagatagtgttgcaaagagaaattcaatttttgtgtttcctgagcatttaagcctagaaaatatttctgtctctaatgtaaaaataataggtattcatcatttctcatttcctaaatagatggaagaaaaagaggagaggaggaagaagagaagaaagagcaacgatttgggtgtgttgctttaagtgctattgcagaaaccactgtcaaaagcaaagaagtttgtactgcctcccttaaccccacaggtatttttttttctgcttttatggttctcattgaactggaaggggagagccaccggccaaaaaacgagccaaatgcaaaggaaaacaaagtcgtctcagggttggagacctgagaagaacatttttagagcacactgggcttttattttgatatttatttttacttttaactatgcaaaatggatcctcttagaaaatagatagttatgctagattgtagaccagctggtggtaaaaaaaaataaataaaataaaaaatccgctggaatcacctaagcatgtaattcccataagaaaaaggcagtttactgttacttaggcagggaccaaaaacttcagtcatatacagtgaggattagcagaaagaatgtggaatttggagccaatattgggtacaaatgagagctgcttaatattggcaagctacttagcctcactgagcctcagttgattgatctataaaatgggaatagtaatagtgcaaaactcatgagattgagaagagataggtgaaaacttctagttcatgataggtgcataataaatgttagttctctctctctctttttttttttttgctccatcatggcagtcattagtgctgaccaccaaatcttaccattcttctgccaatcacatagtgcaactgtactttctagcttccttgaagatagatatggccatgctttttgctttagtcagtgaagtgagagtagccttaatgcatcacttccaaactgaagcaagtacaagatttgccatgtatcttttctttgtgacagcaactggcagtgttctagatagtcaccaacttggagacaggcatgagatgacacagcaaaattcacagagcacaggtagggtgaatgagagacagaaacctttgttgtttcaagtcactgtgattttctgagctccttgttactgccgcataacctgtacccttttgattggcccactctccttaaatgaactgcatttgctgcaactcattaactcatttcacagctatatgctgaatggatgtcaagcactgtgcttgatgctggaaaatacacgatactgattcttgccctcaaggagctcataataaggggaaaagaaggaggtcattgtcgggcgtcttttaaaactatcacccatcgattataaggtttaacaacagtcaaggttgggaactctgcttttgtgcacaattgaatccttcatttatgttctattgtctatagatattgataacagagaagccagaaattataatagaaagtaggaaaaacagtattgtgtcagaagagagggaaaaaagagatggttaaactgacaaagaaatataaatacttcatctttacttttgttgcctacaactccctggctcactcagttttctttcttccactttgcccttaagaaaatttagtagaattttgttttcctttagactaaatgtcaagtcaaaaacaatgtaaagttgtttattatcactataactctagagctatttcttcctgtaaaaaaattccaatgatgtggaacttccatggtggtccagtggctaagactctgtgctcccaatgcagggggcttgggttccatccctgggtcagaaagatctcctggaggagggcatgacaatccactccagtattcttgcctggagaatcccatggacagaggagcctggtgggttacagtccatagggttgcaaagagtcagacaggactgaagggacttagcacacatgcacaattggttaccctgaagtccaatttgtatggaaaaggcaaattaaatccatgattgttttcttttttctaaaacaatttgaaaataatgagttcattccttcttacccatcaacagtgacctatcaagttactatagaatcattatgaacttacagatataatcatacttgatacatttgaaacaattccaattattatcaatttttggtgctcagattgatccatccttgtctgggggagcctatttcaattgattccttagtcttcctgacataacctggaagtgattgatagcttccttgatttctgtaaatatctacaattaaaatgatacaatatctgggatttgctttaaaatgatggcatggagaaaatgcgtataaatgaaatgtgattgacagtgagttgattgttgttcaaggagggtgatggccccattggaggttcattatactgtcctatttgtaactgtctggaatcttccaaaataacaggcaaatattaaaaattcacacaatgacttccagaataagactttaaatccttagcaagataataatcttaaatgcctggctttggtgggagaaaaagagatttcaagtttctcaaggcttctcttgacttatcagggacgtgtagaggtctgagtataaagttttacccaaagtcaaaggtggtgcattttccagatacgacggacgtttcccctagtcccaggaaagcatgaagaaaccctaagtggaaaataggaagagggtggaggggtaaggagagggggaaaacgtctgat

SEQ ID NO: 44009 - DNA, 1237 bp, Bovine  19866880762957
  misc_feature (1)..(1): n is a, c, g, or t
nttacacaggctgtaagatacacttgtaaaaatcacggaaagtattcttaactttttccctcatataagacaggaaaaataagtaacagagtaatagaaacaaaaacgcctgggggaaataaagcttccagagaaaaacagaaagtcctggcctattttatctttttattttttaatggatctattaaagaagctgtgttctgatattgtgttggcaggtggggaggaattttctgtgcaaggtgatccatgtgagagaagggcagctaaaagaaaggccccacaagagtcatgaaggccataatctccccaagttcatcggtcaccacctgtgaagctcatactgtatttggagaaccaacccatagtgtctctcagagcaacagatggatcaaatgaattagtcggagcccttcccaggacgccaggcatacagcactttggagggaaggcagttcatcagtgcatcctgcgacaagagcctgacatctgcttaatcttctccctcagactccaaccccacactggatatttcaaatgggtaacaatgtgaaagctccatgtggacttccctttcattattatcatttcaaatgctaaatgttatctacttaaagatcttaccttggctccctgccttggcagaaggcaagatttttctgctaataagagcctggaggctttacaagaccatgggagttttcaaaatattcctacatattcataatagtcaaattaatagatctgatgccagatgtaaagtggcattttataggtagctttaaaaggtaccaatggagtaacttttaaaactactttagacatgcagccatgaatctaaactacaagcttgttgccttttgatcttggctgtgtgctcactgtcctatagctaactaatcagaaaaggtttggcatatttcttccctggaaagatatctgacattcaggaaagaaatttaggttaaacacctttcaactatcctctctgtaacaattaaaagcttttcctttgacttactgacacggttcacaaccacacacaatgaaggcaaaataaatctttcctgtgcggtacattatacgctcttagatggattaagacctgctatccaagtctgcatttttacaggttttaggtccgctaaaaagccatcatgattagtgacagctcgagcagcgggtaaacagggtgaaggaaaaccactggtaagatctacttttgggatcttctgac

SEQ ID NO: 44010 - DNA, 788 bp, Bovine  19866880827565
  misc_feature (1)..(1): n is a, c, g, or t
natgcataaatgggtggattcaggtacctgcctggttacatttacactcagcccagggcttgatccccagagggcacccagttaatccgctgcccagacaaacattccagtggcttagcaccactggctggcctggagaggcagaggttgtaggattaacattcaaacggtccaattagcttctagaaagctctctgattagtggtttggactgacagggcaaccacgagaccagcacttttgggaatgctagaaatactggctgttcatggtgtgagtatatccacccatgtgactccctcagggctggcagcctcatatagaggcttagcaatgttggggatgtgtcaggatataacccaaacctcataacctgagatctacttcttttccagagctgtgctggatcgtcctctgcagttactctgcctccaaaggccaactgcacttcatatgcagaaaccatggctctgaccatggaacagagggactgactgccagggtcactttttattgcaggcccagctggcctcccatctgcttgtcagcctggagaaaatgctgaaagctgaaaatgggaaaataatacagctcgaactattaagaaatcctgatttttctttcagttgtcatcctgtgagtaaaacctaggaattaacctataacctgtgtgtgtgtgtgtgtgtgtgtatgtttaatttcagatatgggcaaaagccacagggacacattccttagaccaccccaggcccaacggtattagaggaagaaaacaggactccaaagtc

SEQ ID NO: 44011 - DNA, 1007 bp, Bovine  19866880904864
  misc_feature (1)..(1): n is a, c, g, or t
nttattaacagcaaccaaggctggtaattctgtcccttttctctatcacctccctgtttacctcactttggagttccctttgtgtttccatgcaaatgcagaggggttaacattaaatatgctttaaaagcaggtatgggaaacccatcctttgtgaattgaatttattaactatattctgttgcactactttgatattatgtcaaatggatcatttcaaacctttgaccaagcattttatttccatgttcttgctcaaatctattgtgaaaacatatagtgagtgtgctttaacagtcccgtctgttgtagtttttataattgagtaagctgatttttcagacttctcagtatgtgaatgacagtagatccacagtgtcatttcatgttctcttatgttagtaagtgaaacatatagccctaattaaatttaatattttattctgatttttctggtgttgaccccagacctcctcccacttcacagtcatacccgtcccatatcatcttcttaaatcaaacaagttaattcaggtgaacatgcctagacagatgtctggtatataataggtacttcagtatatgattttacccctttcagatctgtaatattcatccttattagcaagtaaacacctgttcaagggaatatccaaggctggataatagcatcacaccaggtttgttagtttggctggtttttagtaacaaccaactcactttcctcacatcaagttcatggattaaggtccgttagagggagggacctgagggagttgagtttggagcacagttgagtccaaccgtggaggcgagtctgctgagaactaatgctgacgcagactgtcctctcccagctcctgacaggcagggtgggaagcgacgctagtgcagaggggaccgatggctcctcaactaataataatgttatgagagacaccagatggaaaagaagtaaatggctattgggagtagcccaacacgtgagggctacaatctgagctgga

SEQ ID NO: 44012 - DNA, 1247 bp, Bovine  19866880920662
  misc_feature (1)..(1): n is a, c, g, or t
nggagccctcttttatctcccctaataccaaattacccgcttctccctccctggacattctcactgtcctccccaaagatctgccactcacaggtgggagtggatcctcccataccttctcctaaacatttatgtgtgtgtatgttgttggaggttttttgttatattcactttcaacaaatcagtcactgaatttaaatacatcctctatgatttaaaaacacttagtactttgagaaaatatttatacagctttagttgaggagtaaaataaatcatacatagttcatagtttatttatcttgaattatgcataggattaggttaaatctaaaaaatcagtcacctcagatcctttttggtagtggatggatatgggtgaatgtagcaaaaattataagcaaaacatattcaggaaatcacttgggaatcaatgtagaactccactcacttaacctcatgaactgtttcataagtttctctattatacatctcacttatatcttgagaaaatagctttctaatccaagtcctagaattagatattgtatgtatcaatcaatagagtatctattacattttcatgtttttcctaaaaacaatatcctagtgaaaggattctgagttctttaataatacaatagaatcaagctaaaaataacattttgatcctgtagaaatctgatattgctaagaaaggggatggattatatagttaggataaacaaggatctacttgatatcattttttacattcctttcatagtttaaaaagcactggtttagattttgcattctgtggtgcagacctacattagtgaaattgtcatgtatactttttaaaatttgcttattacacttgtgaacattttcaggtgatcatagaaatgtctaaatagctaaagctatactagcacagtccagtattgatcccatcccactcagaaaaattcatttaaaatagaaaaaaaaaatctcatgtaatgggattgtaagctagaagccttaagtgctataataaaatacaatcttatgcaaatacagtcttagtgggacttttcctgctgccttggaaatggtgactggggcctgaaactgtaagtaacaagattcagggaccctacattccaacccctggggctggttctcatccaggtctactaagagattagctctgctatcaccatccactccccacttcttatatccattcacatctatatgagaagacaggaagacagggtcat

SEQ ID NO: 44013 - DNA, 1652 bp, Bovine  19866880950747
  misc_feature (1)..(1): n is a, c, g, or t
nttgatgatgctaggtgggttttcatctcccccaaatttctcgcaacacatgtgccttaacttttcctggaaagcgaattaccaataaaagagcagttcctccttatattaagtggctaagattatattttagctcataggagtaaagagggcaaagaaaaaggaaatggagatataaaatgacttactaaggtaattagaaaagattagtaaaaagagaggatgtagggagggtatgaggttgctaagaactcagtgattctcactaaggagaagttgtggaactcaagagaagtggattcgaatagctctgcatgccatctcccaagtggcaaggacattttgcttaagctcttgggcaagaatgaataaagcaccggtcccatgcagacaagtcaggtgcttaggatttgagcaatgtctaacacagtggttctcacctagggttgatctcacctctcaggaaatattaggcaatgcctggagacatctttgattgtcatgactctttagagaaagaaaggaagagcaagagctgagatgtattctcaggctctagtgggtagaaaccaaggatcccatttgacagtccatgatggacagcgcaaccctcacaacaaaatggtccagcccaaatgtcaacagtgtcaaggttagaaatcctgaccaaatgctagctcaaaacattatttttaggattatgatgacaatattatcactttaaaaggctaggtccgataatatcagaattggcagagtttagagaaaaaagtgataattctcctttgtttgataaagtaaaggttttggtcctttgggctcatcttcattccagaacatgataaactattttaaaatcgagtcttctcagaatagttctgaaaactagggacactggctatggatctaggcttcctggattgaattccagctcagccatactagcgttgaagcctggacaagttacttaacctccgagcttcaatttcttcatcttttaaatggagatcatgagaagaccaccttcaggaggttgtgggagatgaacaagctgaacgatgtaacatacttggccccaaacctagcagcggaagtgctccttaaatatttgttattatcctactcactgttctaattgttcatcctcaggctgccatgcccagtagggatgttcttttgttacttctaagtgttgaagtctacaggcgaaaagttcaagacaggaagcctgactctcaaggcagagctctttgcacatgaccctttgagtaaaaaattcagtacacacttcagaaacactgagcgtgaggcaatctgacacgtggtgctgttacttctcctgccttcttcccttctatgatctttcttcagctgaatcagtaaaagtaccagaaaagaaggctttccccccaaatataaaatcaggaattaagctaaaaccaccagcctcctcatttacatttaaaacatactggtttcacaaaagagaggcaagaatgggttgttagattacaggcttgatgttacagtggcacggataataggaagaaaaaagctacatcgaggcaggataatttctgctgctaaagaggcaggaaagataagccaagaaatgtgctagaataaagaatcaaaggatttttttcttaaag

SEQ ID NO: 44014 - DNA, 1133 bp, Bovine  19866880987243
  misc_feature (1)..(1): n is a, c, g, or t
nacttatatattagtgagaaagagaaacagtgaaaagaataagaatgagaaggaggaggggaggaaaaggaagaggaggggaagaaggagaaagaggaggagaaaaaagaatagagaagggaccctatgagtgtgtgtgtattttttttaattgtgtaagctccatggagaaaaatggagaggacaaggaggaagccaggagtggagatgcaatttaaaattttaagtgctaagactagtctatggggaacaaagagaagcagaaagatagtggtggcttaggatagggtggtgacagtgagagtggtgagaagtggtcactttctgggtttatttttaaattagaaccaacaggattgttaacagactgaatttgagagaaagaaaagaaagttaacatgagagaaactaacttggggaagaaggtgaaggatttgttttggatgatgagggtagcagaggtgatagatatttaaagaaagaggagaagttatgaaatagtaatttaggaagaaacaatgtaggagaaaaaagatctgaagtcataagaaataatagttttctaaaatcgaaagaagacataagtcctcagactggaagtacaaagtcttaaactgaatatataaaaataaatccacatgtcaccactataatgaacctgcagaacatcaaagaaaataagaagacttttaaagctctcagatagcaggcttttccttagctgcaatcaatgccaaaaaataacaatactatcttcagggctcaccggaaataactgtcaatctgcgattttatgccctaacaacctttcagttgtaagacaaaaaagaagtcattttcaccattcagaaacttggagtatttaccacttactgatcctcacaacggggactattaaatgatttacctcaagaagaaaaatgaacccagaaggaagaaacaaaacagcacacacacaaacatgcacacataaaaatcactatttattttgaatttttaaaagtacaatagaagctgtgaactcaataaaaagatggggtggaggcatcgttccttggtagtaggaagcaggctaatagatcttgtaatgtttgacagggagacagaattattacatagctaaaggttgctgg

SEQ ID NO: 44015 - DNA, 2438 bp, Bovine  19866881018389
  misc_feature (1)..(1): n is a, c, g, or t
nttttttacatctagtctctataagtgttcattgctcagttgtgtacggctctttgcaaccccatggactgtaacccaccaggctcctctgtccatggggattctccaagcaagaatattggagtgggttgccatgctctcctccaggcgagcttcccaatccagggattcaacctgggtctcctgcagtgtaggcagattctttacagtctgagctagcagggaagcaagtctccataaacagacacattatattaataggttaaattaaatgtccacatccatgaacttcatctgcctcatcaggtgctcactcttgagcacttgggtctctctgctctggatatccaagctccctgcagctggtacctgctcttttgagactgtgcttgcctggcacaaggacttctgaaggaggtggcacaatgctgggacagaatgtccatgccagcctcaccaagtacgaagaataacctgtccccacatctgagtcttcatgaggatgcattactcactcaggactaaactcctccttgctgttccaaccaacagactggtttctgtgccccagggtctaggtcagagttccccaaactgtgaaatattctggaggctattaattggtgcactgaggaaataaccttccactaggtacataagttttcaaaatccttaaaatgttaatgtttttcttactttttattctcctttatcttagagaatttactctattcctgtgggataggaaatggacatgagtttgagcaaactcttggagacagggaagcctggcatactgcagttcatggggtcacaaagagtcacacatgacttagtgactgaacaacaatagggtttggtgggttttttaaatatagttatagatttttcaacataggtgtaaaaaaggaaccaagaactagcctacccttctattccctggataactcctgtggacattttaaaacattaaataatacctgcacagatttagaaagtaagtaacagaacaaatcaaaaggtgaaaggtgtgttcattaactcacttatttataaatacatagctattggtcatgacaaaaccaaaagtaaacatcagatgcttcagtctttggaaatcaggggcccctcctcagtaagtcttccctttgttctgggtagaaaagccttcttaaacaatcttcaaatgttcatttcctacactgtatcagaaaaatttctcttagagttgttaagtattattctgaaaattattcagagttctatcgtcacatactctttatgtaaatatcatccatttctttcatgaaatagaaagtgagttccaatttcgttactcacatgcttttaaaaaacagaatgcatgtatgtcctttaaacttatcagagatgaatagggaatgctgtaaccaatccaagaatgtctcggtaatctggtaatattgacactattgtagtggttttatttcaggcacctgccagaacaatctatactaaggaatggtgactatttctttgatgaacctaaaacaagatctggaaagaactcaaaaagatcactcagaataacttctcatctatagggagtccatggagagcagaacccaggtttatctacctgagttttccccatagtaccctgcacttagaattaactctatgaatgttctatgaattgactgaaagtcataactattcagagcggatggcttacaccttaaagattttttgggtggctcttcatactcttcatcacacacacaaaggatcctgaggctctgactaaacaaatgaagacacagagatgcaatattggaactggtatagagtatagcccttaaacagggcttccctggtagctcagacagtaaaagaatctgcctcccatgcaggagagacaggtttgatccctgggtcgggaaaatcccctggagaaggaatggcaacccactccagtattcttgcctggagaactccatggatagaggagcttgatgggttatagtccatggagtcacaaagagtcagacaagactgagtgaccaaggcgtcacttcattcaacccttaaacaagagaactcagagtatttggaaagtcacggaacaatagttttgtttaaagtagatttcacccagaagccatcaagtacagaaggaggtgggggaactgtctgcagtttgaagtagtagacttcctttaattgcaattagcatttaaaaggctttcacattcatttttattcaaatatgccacctttgtagtcatagtaacccttttatatttagatttggttgcagctacaagtctacttgagccattcatttttatcctccctcctgaatagaccaggttttttctttcaaatagaatccactgttgtacatttttattctattaataacacatggttctctctaaaggctgtagaaaaggaaa

SEQ ID NO: 44016 - DNA, 2221 bp, Bovine  19866881123837
  misc_feature (1)..(1): n is a, c, g, or t
ncctcaggatcctaagagctctacagtgtttcctacaatttccaggttaagagtcacctagagaacttgttaaacccatagctttttagctgcagcccccagaggctggggtagacaagcattccagaaatctgtacccagaacaagtccgtgatgagcattggggatccctgggaaacagaatcctgatagctgaacaaccagaagattgttgctaggattgtaacctccaaacctggtggcctgttagaaactttaacaatcaggatctgtggcccctattctaggcttattaaatcacaatctctggcagtgggaaccaggactttaattttttacactcctatcctggctgcacattagaataatctagggagcatttgaaattactgagatccaaggcttcgggcaaatgaattaaagcagagcctctggaaaaggaatggcttgtaaaagctcccctgggtgatgctgataaaaccagaccacagctcagcatatgggaatcactggggtagatggtgtaggatgatgctgacgtcatcaggttctcatctttattaaacaaaacggagcagcgaggagcaactacacactgacttggtggcgctgcagggctggttcctttgttctgtcagcgccccagactgctccctgtgcgctgtttgaactatgtattccgatgctgggaaagagtgagggcatgaggagaaggggtaacagttgatgagatggttggatggcatcactgactcaatggacatgagtttgagcaaactcaggaagacagagaaggacagggaagcctggtgtgctgcagtccacagggtcacaaagagttagacaatacttagcaactgaacaacaacaaatttactttaggccattctttaaaaaggttgtgaaactcagatcagattaagaagtttgccatcagcaatgggagtgagaaggctgggagcccagagaggctgtttggtctgtctgccagttaaggatttccatattgcttcaaacaaatcctaaccacatgatgacattgtagctcaggaggaaagagtctctgtcccagcaaagtgggagggaaattctgtagccatcacggttacattttcacaagctcctcaggagactggttggcacatggtagatactcaataaatatatgttgaatgacagactgaatttccatcaccacagccagaaccttaaataacctttcaagatggttcactggtggatttttcaaaaattgctaccacagttgtcacaaagtatgatgccgtgaactattagaactggaggcaaatttactttcatttttaacgtggatggacaaattctacatagttacctaagttagaagtttatttccttaaacttccagaaggatggggatttcaatactggcatcttcccactgtggtggacacagtaattgcccccaaagatgaccatatcctaatagctaaaacctgtgaatatattaccttacgtggtaaaggggcaagtttgattatgattaggtaaagaatcttgagatggggaaattatcctggattctctggattgtccaaaggtaattacaagagttcgtaaaagatggaaggaggaggcagaaggtaaaagtcagggagatgatttataaagctacactgctgacgttgaagatggaggaggggaccgtgagccaagaaatgcaggcagtctctagaaactggagaaaggcaaggaaactgattctcccctggagtctctggaagactttgtgcagccctgccgacattctgggaaaaggcaatggcgccccactccagtactcttgcctggaaaatcccatggatgggggggagcctggtgggctgccgtctatggggtcgtacagagtcggacacgactgaagcgacttagcagcagcagcagccgacattctgagtttagcctgtgctcagtcgcttcagttgtgtctgactctttgcagcccgttggaccataggccaccagcctcctgtgtccatgggattctccaggcaagaatactggagtgggttgccatttcctcctctccagggggtcttcccaacccagggaacgaacccgcatctcctacgtctcctgcactgcacacagattctatgtttgcactgtttgaagcaactaagtttgtcataatttattatagcagcaatagaaaattaacacatcacataattaagagaaa

SEQ ID NO: 44017 - DNA, 1506 bp, Bovine  19866881184097
  misc_feature (1)..(1): n is a, c, g, or t
ntgtgctgcgattcatggggtcgcaaagagtcggacatgactgagcgactgaactgaactgaactgaactgatgtctcttgaataagacactgcttcagatctcttcctctgtttcaagtcacatactttctcagctgttttcaaggcgcagggattaactaaagcttctccagttgtgcttggtaatgtgataagcaaccttattcaatacttcaaaacaaggttttatgtttcagaaatttcaagatttagtagaatcccaaggctttttcttaaaaaagttttttttttttttcttttctttcctcactgtctggttaaggaaagtttccctccagcattgctagggctagcaaatttggttcagttcagttgctcagtcgtgtccagcttgttgcgaccccatgaaccacagcacaccaggcctccctgtccatcaccaactcccggagtccacctaaacccatgtccgtcgagttggtgatgccatccaatcgtctcatcctctgtcgtccccttctcctcctgccctcaatatttcccagtatcagggtcttttctagtgagtcagttcttcgcatcaggtggccaaactattggagtttcagctttagcatcagtccttccaatgaatatttaggactgatttcctttaggatggactggtcagaccatagagactgtacagtatccagtgaactgtcccaggagcccctgggccagaagattggacaaaagtaagacgcagtgcctcagtgtcaaggctgaggcaggaagagctgaccagagaagaacataaaaccccgaaggctgaggcaggaagggctgaccagagaagaacatgaaaccccgaaggctgagccagtgctaaacagaggagggggcttgagcttgccagggcctggggcacagctttggcaccaggctgcccctgcacagggcctgaaagggtgagcaagggcctgacaggctcaggctggggggcggccagggccacagcaggagcggagaacaacagtgagtggcccagtcaaagcgaagacgcgactgaggatgacagggtgagaacacggctgcaaggaggtggggggatttgaatttatctgggaagacggtgcgaagcgctcagagaatcggagagtggccaagagcctgcttccaccaggtatcagcctgcgcatcagatacgcccagcaaatgtttgcttaatgaaactgaattgatttcatcataaagtagtttgcacgtctggcccctcggtgtggaggagaaagggtgcagggtgccgatgacggggagcggggacatcctggaacccaaagccatggccatgaatcaggaaatgcccttttccccagactctgttcccaggatcctgggacccagccagctagccggggcgccttatcagaaggaaagtcagacagcccatccctggggtgactgagagctgaactgagctctccccacccagacagacggcaggactgggagggagccacgca

SEQ ID NO: 44018 - DNA, 682 bp, Bovine  19866881217776
  misc_feature (1)..(1): n is a, c, g, or t
naggacagtaatgaaagagagaagcatgggatttttttcaaacctgaagtgctacagtcaattatgtttcagtgggcctgttggtttagtttctgaaatacacatgattctcacagataggcttgtttcattgcatacaaccacaaaataagagaagaaacaaacaagaactcaaaacaagcactgacactccaccactcctcttgactctgacctctcaaataagtgagcaaaactgaagacaagcttattgtaagcaggaaaagtactaggatggagatgggaccaaggacaggatgatatatactgaaaacgtggtggcaggccccttccaacaccaagtgcaggtcttttgctgctttctctcatcccctatgaaaacttgaaataatactttttttttataaaccattattataatgggatgttctttctacaagacagagttaagtaaactccagggataaatacaatgatatacactcaaaagaaatgaaatgaacattctggagaaatggcccagacctactaaattttcacccatgggtcatttcagtaggaagagaaataagaaatatatccagcttgggagatccagaataaaagacagcaaaatttttggtttctaagatagtctaagataaattaagagagatgacccagtaataattttcaagaatca

SEQ ID NO: 44019 - DNA, 900 bp, Bovine  19866881247142
  misc_feature (1)..(1): n is a, c, g, or t
ntagtcagaattggccttctgcgtccgtattttgcctgctgtcagttccgttcatgaaaagcaccccagaagctttattcattatcattctgagtcatttctctaccatgggggcagctctaatgcaatttatatttagttcttcctatgcttctagttctttacatcaagccctcctgttagtggtaaggataagtgagccattggaaaaggttttgaacccttagtgaatttcatcctaaaatataccaaaatgctataatctgtatgcaattttcattaagaacttccaccacctgcttgctgaagccacagcaccgctccactcataatcaccacgcagggggcagcattagttaacgtcattagacaaatgttgaggttttcttttgcgtgttcattagcaccaggtggcaagaaactgctagacataggtgaggaatttggggagggggtgattgaggattatgcatcatttagtcactcaactttctgagcatccttgaaaaaccaaagagactaatagaggagtaattttctgtttttttttttttttttcagatacttcaggatcagttctggtttccaaatagagggtgatctttactagctgggtcataaggcaagtcacttaacctctctgtgtctcagattcctcatctataagaacagggatcataattttatctgtctcatagggttggtatgaaaattaaatgtgttaacacagataaagcattctgaatagagcctggttactgcagtcatcattaccatcatcatttgctaactctgcattaacatcgttcatgtatacacactggggagcccacagtgcctaaaatagaattgcagaaaatgatctgactgaagcacagcagcttctcttgtcctttcgtt

SEQ ID NO: 44020 - DNA, 1618 bp, Bovine  19866881397612
  misc_feature (1)..(1): n is a, c, g, or t
nccttgctgcttctggcttcctctcaactacccaccacactccctcattcttagacaagggtgcggaattaattcttgtctgattagcagctactgtccttgtacttcctgacctgccttattgtcttttcagggataggctggtgctgaatggtgtgggaggctatgcccagctcactgcccttgttatctttgccagagccaccctaactccccttatgtctgatatgtgtctcagggtgaggagcccataggaggggagtcaccaaggtaaatcatggcgaagacgtcagggagctagacctgtacagcacccccccactggtggaagtcgacacaacccatcaccatgagcccttgaagcattgtttggatcggaggcaataggaggagactagaggaggtgaagaaagcttctctactgaaaaggagtatttaacagcaccttacaatttttaggaaagacaaacttttgaaacctaaaacttttaagtaaccacaataaactctgacctgagtctcagggtagatgtctccaactcactgtttaaacttcagtttaagtcctaatgttaagtttggccataaatgaggcttgacatcatgataaaacaggctcctctggtgtctgagatgcacctaacctgtgtgaccatcctttatgttttctagggctccttaactatttgggattcaccatgaagaatttttggccttattgttctggcatctgtattgtaggttgtcttcacttttaaatattaggcagctcacagtactataaatggattaaaaaaatgaaagttggggcttctgattggaaggtttgtatattatttaaaattgcaaaggtaagaaaagtagaagaatggaataagataaaacatttggaagaggaggaggtttagagtaaatgagctaaatcctcccttttcatattaaggtgtctagagatattatctcaagttgataaatggagaaaaagaggttaagccttttatctagatttatggaggtaactgctaaaggtactaaaaacaaatagttaaaaagagggtgaatctggggagtgcgatggggggtggaggcagcgagcagacgggaaaggcattgctgcttttccccctaagttcttctctccttgttttgctaccaacacatgtatgactccactggaattttttttttcccctaaacaaggaacagaaagagaggaaaacatggtgggaacataaaattgaatcaagaattaggttgagaagcacaccacattgatgtgcacatttgctgcagctgggccgcacatttggctctgagctgtgcagcagcagttggaaaaggaacccctggtcagtggattcataacgcccaagatgaaagcaaactggttcttggagagaatctagcctgtttagtcacagtgaaatttctgaagtctttctgaagaaaacatggtgacgtgaggaacattctcaacaaccttactgtaacatcaccttttcccaccttagtgtgattctcaactgagatagttggggcgcacacccaagggtaatttgggtaaataattccatgggaagtcagctccctgactgatctagggatagactttagaata

SEQ ID NO: 44021 - DNA, 1017 bp, Bovine  19866881446061
  misc_feature (1)..(1): n is a, c, g, or t
nggaaggagcagaacagctcttcctggtcccatttttcttgtttgatcatccagagcatgtaaattacagtgaaatatggcctgagtcagcttctcacaggacagaaatcagtaaccattgatattgctaagcaacaccgcagaggagcaagactgcaaattaggtgacaaatttataagaagttggagtgtctggggactctcttgggtgtttcattatgaaccatctggatgatccacagtaatgaccacacattattgttcactgttcaaggatgataattcccatataattatatggcacctccatgtgtgatcctcacctacctttcagaatctttcactgtgtttttcacaatccagatatttccctgaaaaataattgggaacagttacacctaacggacaatgttcattcctctcctaaataagattttttttaattactcttttgactcatgtggtggcatagctagatggcaagaatgtgcaaaaaaaaaaaaaagagtgtgttagtcatggcatactagcatttccattggcctgacgtggacttagccttggtgtcccagagaagcctgaggtgatgagactcgtagtctgctcctaagtcaaagataagcacacggtggtacctacaccaagggagatagctaagcctcaagggaaatgaggaagggaaccaaagcctttggcttttccagaagggtagctgagcaaggacccctccctggtctcacttgttcattcattcactcattcattaatatttataagaaaattggactcaccatcctgattttaaaccaagcccagagtggtttgctttttttaaatttggaattggttaccaacatttaaggtacttccctgatggctcagatggtaaaaaaaaaaactgcagtgtgggagacctaggtttgataccagggtcagggaagatcccctggagaagggaatgacaacccattccagtatttttgcctggagaattccatggacagaggagcctggcag

SEQ ID NO: 44022 - DNA, 730 bp, Bovine  19866881534730
  misc_feature (1)..(1): n is a, c, g, or t
nttgggcagttttgatttgttcacagcagttggcaaatggtaggtgctcaacaaatatgtgttgaaaggttactctgacttgtattgatatataaaaaccagattttagctctggctaacatttattctgtagtagtcagtgtttcacataaacccatcctctcctgttacctggatctcatgtgtcagcaaatggtcagttaacttgtgttcttctattttttttttggaatcctcaactttacattgtaaattggtgcctgtcaatctcatttgaaatgtgggtttgtaacagaagtggcgggacctgctgtgggttcttaattaaatgggactgaaggtttagtggcccatgactaagacgggatgattcagttcatttaagatttaatcaaaagagaaatttaccatgcttaattgaacatgccaacttcctggtataacagatttccactttttttttttttttaagagaaggcttcatggaagtgggaaattatattattaatttataataacagtattcaagtttgactgatgaaggcgacttagcattttaagctctggggatgtcagaaatagacaaaaaaaaaaaaaaatccatgattcacttctgctgccacttaacattttctacgtatgtgatgtggcaaaatctgcctttacttgccaggtccaatctttctgcttttactgctgaggtttagatcagaaaataagatgcaataag

SEQ ID NO: 44023 - DNA, 3408 bp, Bovine  19866880359974
  misc_feature (1)..(1): n is a, c, g, or t
ngtggccaaagtaatggagtttcagcttcagcatcagtccttccaacaaatattcaggactgatctcctttagaatggactggtttgatctccttgcagtccaagggactcacaagagtcttctccagcaccatagtgttggcttaaggagcgtgcagaagaatggaagaatcagagtgaggtgaagtcaatccagaaatattccaagcactactgagttcaaaatttggtcctgagaagaggtaacaaatgagtgagtaataggtcctttcttgccattcctagccatgtgtggttgcccttaaactgactgcccaaacacatcagtgatcagcttgagaagagtgatatcttgagacctcaatcaaaaatataatagagacagtgcacaggggcagcctgttggtatttctatctttctctctgccacatccgatggagagttgctgtagttcagtggctaagtcatgtccgactctttgcgaccctgtggactgcagcacaccaaactccctcgtccttcactatttccctgagcttgctcagactcatgtccatccagtcagcgatgccatccaaccatctcatcctctgtcgtccccttctcctcccaccttcaatctttcccagcatcggggtcttttccaatgagtcagctctttgcatcagatggtcaaagtgttggagctttagctacagcatcagtccttccagtgaatattcaggtgtgatttcctttaggatggactggttggatctccttgcagtccaagggactctcaagagtcttctctaacaccacagtttgaaggcatcagttctttggggcttagcctttttttagggtccacctctcacatctgtacatgactactggaaaaaccatagctttgactagatggatctttgtcagcaaagtgatgtctttgctttttaataggatttctatgttctggtagagagaatgaagaacaattttagattttcaagaccaatgaatgattcagtaaaataaatagatacttgatgtcctactgtctcctcttttcctctcccctctccaaaccatcaacatccacgtagcctaaaatgttccttattcatctggcttttttatggcttcatagatgaggcctttcccaccatctgcgctccagctggagagccctctccagagaacatctatcaacctgactgcctgaatccaatcccagctgtctttgctccttgaaattcagcccactgacaaactgctacttttaaactcaagcaaattcagagaggttgtacgtttgccaagcaacatcagctctgggtcattttaaggtctgtttttaagggacaactccacgtggcaatacacagttaattggatgcatgatttctagtggctccatgcttgtgtgagttctgtgtcccagaaaaacttctttagggaagtctgggggtgggctgtctcagcaggggataccacagcaatgtggcttcccagaagagcctccatccttgccagcgctccaaacaggatcagagtctctaaaagaatagacaatagatgctgtgtgcgtctgaagggccacatctgcctgacacatggagttaggcaactattttctaggttttaccatgctggtttataggtctattctaagactgcataatggatttcagagaataccttctccctttaccctggatccccccaaaataaacttctatgttatttttggggcttcctggtggctcagctgtaaagagcctgcctgccaatgaaggagatgcatgagactgcaggctcaatccctgggtccagaagagcccctagagaaggaaacgggaacctgctccaatgttcttacctggagatttccagggacagaggagcctggcaggcagtagttcatggggatgcaaagagttggacacagctgaggaggcacacatgcgtgcatgcatgttatttttaatgagctaaaacaattatgggcaaaggcagacaaggccagttttaagcaaaaacataaagtcctacatagtctcctttgtgccacctcttccctgtttaagtccctcccttcctgattctgggttccctgttcctcccatcatgcttgcctctgtggttctcgtccagcctttctgtgtttctcatgattggaggcacaggcttaaatttggttctgcccatgaacagctgttctgtgagcagccatgactgaggacgactgctgtggagaattcctctcgaaggtctttccttcagtctgcaaatctgttccagtttccccaccttgagaattctttcccttgacattgccagctgtggctcctgttccccattcctttctcttctcttgctgctaaaatggggtctcattcatttcctcacatggctttactcatagcccctctggaaccccactctagacaccccatctgggattgataggctcctgagattgtgctggaagaccaccactttcttcttgccccatccaaaggcctttcattcatacttttctttgacttccaggacaggttccccaagcatcgctgggtagtaagggctttgaggatcaggctaagaaacttgaatgtcatcaggctattaatgaacagcagtactgatgaatattcttggacaaggcatgacatgattggacctgtgtttatggaggcccttcttcaggttaaggagaaaagggtgaactagagacagtctgaagggaaaaagaaggcagttggaagactttggtaggccatgaacaatcaggttcaaatggcctgacaaaagggggctggtacggagatgccttaaaagaaggatttgattctattgatgatctgcttattctgcaagtatcagaaaaagagagagtcctttctgaaattttgccttgaaaaggagggagggagataggcagggattttttaaaaaatgccagtcttccagtatttcatccttatacccttcactctgcaatgaggagtaagaggctagaggggtttggggattttattcacatattttttttaatctagaaaagagtaactacatacaaactactgcattgccccagtattaagccttagagggtccccaagaatgtaggtcgtaggccaagagctgggaatgtcaggaaggcatgtgatttttttgtttcacagtgggaggttttgaccctgaagaaagagcagtgggtggggtctgggagtggagacaggaaaagggagcagatttttctcatctggatgcagcttgaagagctgccagcaaaaatggtgcagctgctatcttgcacaaaccctcgaatgaggccacagggccctgtgggtttgcacagtacccacttccttctgttttttttttttttttcgcgtgttctttttaccaaatacgcaaataga

SEQ ID NO: 44024 - DNA, 1111 bp, Bovine  19866880641083
  misc_feature (1)..(1): n is a, c, g, or t
nacagcctgtctggcgctgatctcccccgttttctctcaggtcctgaagctgcttctcgtggcctgggaccgccgcctcatctttgccatcgggacatccagcaccacgggtgagtcagacaccgtcatctggaatgaagtccatcacaagacagagttcggctctaacctcaccggccacggctacccagacgccaactacctggacaacgtgctggccgagctggccgcccagggcatttccgaggacagcgctgcccaggagaaggactgagcgggggggtggggcctcgggggggcaggggtgtgggagccacagggcaggaagtagggagagtcagggtggaagttggtgccgtgccctcctgagccccttgtgcagtctccatctcccatccttccggccacagcagggagccagagtgaataagggggtgtcattcacaaacctcatccaacacacaggggctgtgggacagggtgagggccgccctccatctgttcctgtggagtttcggtgctgggtaggcagggactcctcccctcaccgccccctaccccccagcagggggcacggtcagcacacttagggtacgggcacctcttaccctggccttgtgaagccagaggcacccgccttggctggcttctcgctgcttccactctgcttggagagcggagtttctacttttctctcaccccctggaggtgaggagctctcactgtgcaagactgaggggcagaggggtgaaccgctaaaccactgcgacatcggcaaccgatgcctcgatgtacatcgaggaagtgcttctcaccaagagggtctgagcagtgagggcttccaggagcatctcagctcccatcgtggtcctggctgctcccgcctcccgctcacccctctcccctgtccaaagaggcatccgattctcttatgcagacggagggactctgggattcctctctggggcgctatgtctcccgcccctctctgatcagaccagagcctgcgtcccacttagcatctgaattagtcctcagggagaggagcccaactcttccaactcatcccagaccagctcaaagattccttggattcatccagtcactggag

SEQ ID NO: 44025 - DNA, 1040 bp, Bovine  19866880874954
  misc_feature (1)..(1): n is a, c, g, or t
ntacctggcattcagaggcaacccctgtgaatgggactcggtcccaccagacgctctggggagtgagctcccttccctccctcgtttaaaacaacactccatgggtgatggcagcagagcgggaggcagccaagaggaggcacagggcgtgcgtggaggcctttaccgtatcccctgaactagcctacggcacaaagagagagaggagacccgtgtgaatgagttcagagagcagtcatctgcaccagaaccccagcccgtgtgacctctcctatcggtcactgagagatctggaccccagctggaatttcactgggcgggttctgctgtggccacagtgctttacacccagcagacactcgtgtatctcacagaagtctttaatctcttccactggattcatgacgtcttatgccccttccacccccagcctcctcaacgtaacttctaaagtgccgacttcagtgagatgtggaatcctcctgtttccaacttactgcagttttgtctccagcaagttcagtttctgtcggtcaacgtaacgagaaaagagggatactaggtttgtgggtatagagattggcttggccaggcccgtctggggaatccgcaaaagttctcgggttgccacaaacatcacctccgtcctaacagggaaaaccgataataatgtaagaaaaggaatgaaaaagaggacctgaaagaacttcaaagaagaaacatggcccagactgaccatgggttgctttgcgccaattctgaagcagcgtctgagctctgtaggtcttccccgcggctcaggacgacgaggagcagggacaggccaaactgcgagaggagaaaggagaggagacagagggcgtgagacaccgcgccggccgacggggggccaggcggtcgagggggcggcgctgaatgcaggcacccctcgccatgctgctccgagcccgtgcagagcccagaggggtccctccagactcagcagctcaggctctctcaagggcaacggctcccccatcccacccttcgataaaagcgga

SEQ ID NO: 44026 - DNA, 1587 bp, Bovine  19866880951750
  misc_feature (1)..(1): n is a, c, g, or t
nccccgggggcggccggccaggacgcggcgcggcccgcggcgcccgtgaccagcgggtagaccaggtccaggcggcggcgcacgcggcgctggcgctgcgtctgccggttgatctggcccatggtgccgaagtcaatgacgtagccgaagccgatggggctcaggtcgatccagggcctctgcttctcgaaggcgtgttggatggtgatgcccacgtccatgtcgtagggcgtccaggagccgtggtcgttctcccactcccacaccacgccctttccgggcgccgaggcggggtcgtagtagttgcgccggacgggccggagggtccctgccggagagggacggaggaggcggtcagcggcacccagggctggaacccacgggtgctaccttaagaggctcgcggtaagcgagtctacgtggccggcccttggctgccttggctttgaaggaggcgccttcctgccgttttaaggtctgccgtgaacggggagggttcaggggtgcaggctggggtggaaggcagggtgggaagctgatgagctgcaagggaaggatgcgggtgacgctgcagggtaccccaaagagcactgcctggtttggagttcggagactctactttagtttgcagccacatttgtttgcttaatataacagcccacaacctccttttctcccccaggagaaataagataatagctcctttgcaaagtttttgccataattaaatgttgctctctcactcaacatgtatgtatttgtgccaagtccgggatttctcaagcgccctgtcctttgcactaaggcatatcacctttgacacatagtaggtgctcttaaataatctctcttcttccgtgactctctgaaggcctaagcccccgagggctaagaggaaaagaacacaggtcagggaaccctagagaacgtaggaagactctgtccccacccaggatgcccgcccaggtggtgatggagctggctgtctggacttttatgggtgtggtaaaaaaataaaagatcagggtggaagaactctctcatatttcccagcattaaatcttatatcaacaacagtaatagcgatcctaagaataactttctatttatctaacatcttttattcaagaggctcaaccttcctaaagatagggttgtggctgtttagttgccgtttagtcaaaagttgtgtctgactctttgcaacctcatggactatagcccaccaggctcctttgtccatgggattttccaggcaagaatactggaatgggttgccatttccttctccaggagatcttcccaagccaaggactgaaactgagtctcttacatctcctgcattggcaggcggattctttacctgctgacgccccaggaaagccaaaggcagggtgaaagtgaaggtgctacttgctcagccctgtctgactctttgtagcccactaggctcctctgtccatggaattctcctggcaagaatactggagtgggttgctgttagcttctccaggggatctccccacccccggaattgaacccgggttcctgcattgcaggaggatttttaccatctagccaccaggg

SEQ ID NO: 44027 - DNA, 1594 bp, Bovine  19866880983811
  misc_feature (1)..(1): n is a, c, g, or t
ngacgtcgcacgcccacagcaggaggtgaacaccggggcctccagggctgaagtcctgaaggaaaggaaggcagtctggggtgaggggcttggaatttctgcaaatactaacacccaggttggggagcaactccccgaacccccccttcctgcaacaggaagcgtgctacagtcctgaggctccttcacctgctcacagagggatcggtagccattctcctctaaccggtccagctcaaaggtctccccgaggagtgggttgaacggcttgctggtgcggaagacagtggtggagtaggaggacacggtgaaagctgcaacataacagagctgttctagagagttctcgcacgtggcggcccggtccaacagctcgtggtactccaggtcttcagtgaggcgctgaagcatggacaagggctcgttaaagttcacctgtcaggaaaagagcagatgtaaacgccttgcctgcacagccacaccacaccatttcttcttttctttctccgcaggtggagacacacactgagacgtcaagacgataaagcagatccctggggagagcagcctctgctccatggggacgctctacgccaaagaacgcccgttctccatgctgagctgctcgcgtctggggctgggcgatctccacctgcactgatttgctagctgaaagctgagacgggaaccatgcctcttttgttcagcactgcatatccaagagccccggacgcctggccccgggagactcataaaacaggcatcaaatgagtcaatgaaaggggaaggacgtgagcacagggacacccagacaggaggctgggcacgtaacccttctgaggaggagaggaaagctagcggagtccaggagcaggcagtcctgacggggagcacgctacaggggccagcttccgctccacacctggccatcactggactcaattcagtgccccgtcaggccaggtgctgccttctctcaggctgcacagctgcattctggaccgggagtgttcacaccaggggcagggaaagggctctgcgtgctcctgtcttcacgtttaagagccaacttgaggacaccagactacaggatgaagcgagcgtgtgtctgtgtgtgcctctctcgggagaaggtgtccacgcacgccacagattcatgggtgccaggccctacacaacccactgtgggcagagaagtgagcagaagagactttgttctccccaccccaaagagtcagcttctaggttgtactgtttggaacatatcatgactttctatttaaaaacttattatcaaaagaggttaggttcccaggttagcccataacgctgtttagtcagcagcacagctaaacaagcctgaaaaccagcagctcaagttctgagtccagagaagagaagaaggaaggaaaaaacgccctttgtactggatgaagctgaccgaaagcaccgttttggttactgaaacaagcaacaatgacacttttcttcctagactcccacctcttttcctgtctttttctgcacttttatccaaccttctgcccgccactctctgtgagtcacatactaccctaatatttactgtcctgcc

SEQ ID NO: 44028 - DNA, 1407 bp, Bovine  19866880988963
  misc_feature (1)..(1): n is a, c, g, or t
ngggctggagaggggacgggagagtcccagagggccggacaacagctgcccgagcagggcatgtccgccggtcttggaaagcccccacgtcctgagcgctaattaggatggtcatgggaaaggggtgtctttccaccccctgtcttcatctgtagccatgactcccaacaagctcgctgccaaggactttgcagacactcgcctattgagggaagccttctgggaaaaggattccagaagtgttagcatctggggggcttcagccttggtgagagagggggaaaggtggatctgagagagactgggggaggaggggctaaagagggaagtggggagactggggcagaggacagtggggagactggggcagagggaagtggggagactggggcagaggacagtggggaggctgggacagaggagagtgtggagactggggcagaggggagaggggagactgggacagaggattgtgtggcctggggggatagggagaagttaactgtggatttggggtagcggttggaaaggtctatcccttttggtgggtccagagggaggatgatggtcaagacacctcccgacagggaactccagtcctgctcagaattcacggacgggtgttagctgttcagtcgtcattgttgagccgctaagtcgtgtctgactcttttgcaacccatggactgtagtccaccaggctcctctgtccgtgggattttccaggcaagaatactggagtgggttgccctgccctcctccaggggatcttcctgacccagggatcaaacttgtgtctcctggatgggccagctggttccttaccgctgagccaccagggaggcctatgagctgtcccatttcagattaaatctcagctgcaggtggagggacaccttagcaacataaaggtcccaggcctggtcccacatttggaaaggaggaaagcttactcagtgttcagggatgtctgcggtgggcctggtatggatcctttgtacagaagtgaagtctggaggagacccggtggaaggacagaccctcctccccaggtctgaccactatttgctgagaaccagctgaccactgcctgggagtgcacagggaccctggaggctggggcgccccacaggttagacctgagctggccctggagcctttttctaactgccttagggtacttgttccactgttctcttccttttagagactgttggtttcacccactcacgctaagggtcagttggccaacccatcctccgtgccagacccggtgcagaaggccctgggctggattcctgggagtgctgggtctgtcggggagcttgccaaagcagaatagcatcttggggtgtctgcaacccccctcttctgtctttctccgccaacagacacacaattcctctc

SEQ ID NO: 44029 - DNA, 862 bp, Bovine  19866881069008
  misc_feature (1)..(1): n is a, c, g, or t
ngaagcagcgtggcagagttggaagaactccctaaagtttgagtccccgtctctgctgataaccagatatgtaccctggagcgagtgagcctttcgggtcttccaaggtaaaatgggaccaaaaacccgtgctttgtagacttgcaaggattaagtaaagcgataaggcctgcaaactagaagtggggggagcccacgaatgatgtctgctcttccttggcaggcatagtcctcaccgcaaccctaacaccatggctgggatttacagatgagcaagtcaggattctacgatattagggaaccggcttctatcacagggctgctgttgctgctgctgctaagtcgcttcagtcgtgtccgactctgtgcgaccccatagacggcagcccacccagctcccctgtccctgggattctccaggcaagaatgctggagtgggttgccgtttccttctccaaagcacgcaggcatgctaagtcgcttccatcgtatccgactctgtgcgaccccatagacagcagcccagcaggctcctccgtccacgggatcctctaggcaagaacacgactgggttgccgtttcctgctcttagtaagaggcaacgtctccttcagaattcagacctgcggggaccccaaagaccaaaaggctcccctccgcaccacaccactgcgggcctttcccctgcagccagggggtctggagaagccatggaggagcttaagccagagcagcccctgggtcctctctgactcaggcgatcctcaggtctgaggcccggggctccggacgcgctcaggggtgtcaccgcagaagcacttacccagaggcgatcagcacccgggactgggcgagggccagt

SEQ ID NO: 44030 - DNA, 1312 bp, Bovine  19866881838452
  misc_feature (1)..(1): n is a, c, g, or t
naccctgcgctccacccggcaataaatgtctgatgtgtaatcacatgatggaggctgggagccgagcttactactttcttggagccttcctggtgcctaacccagtcctaggagagcagtcaccgaatgaatgcggtgacctggtcatttacaggtggtcatttgtggtacagcacgtcagcagctgggagtgtggctgctgccggagaggaagcccttcggtaacagacagagcaggagcagcactctgggtccaggtcccgcgccctaaaccctgcagagatggacacgagggcgcttctgggcttcagaagcacgcagaggccccttgctcacctggtcaatccacagtttgcccacgatgatgttgtgcaccgttgtggtcactttcttccaagtgtagtggtgcccagtcgcatggaaaatacagtggatgctccctagaagcagagcgcggcacacattaagcccaacgctagaaaagcagccccgtgctggctggaaataatgatgggttgattttattctatcaatatttcttacttttaaaaagaaaacagtacatcagaaaggacttataatctttacaaatgttgaaagtactgaatctttcactagatttttaaacttgttcaatatgaataaaatataattaacaatgatgaacactaacaactggtacaacttaactgacaaatagtattctgcaacaatagaaataaaaatgaagcaaaaccccagtcttcactaactgggcctgccatactagcagcaaaattaacaagaacaggtcaaatctatcccaacatgaaaaaaaaattgccttgtggcaaagagcacgttggtgatcagtactgaggacaagccccattgtgagtcactagctgtgtgactttaggcaagtcaccggtccgtatatgggcctttaaaaaaaataagcgtttagcatttttttttaaagtctttactgcatcttttacaacactgcttctgctttacatgctggtcttttggcctcgaggcatgtgggatcgtagctgccagaccaggactgaacccgtacccactgcactggaaagccgagtttcagccactggaccattagggggtccctacctttgagccttaatagataaaaaaataaaaacaaagaggagtagtggacagaccaagggctctagaatcagacagaactggttcactggtccaccactcgttagctgtgtaagcctgtgtcgtataataaagaatttgtctggtctttgtccaacattgaaacccttgccatttcccaagtgatagtgtctcgttg

SEQ ID NO: 44031 - DNA, 3373 bp, Bovine  19866881908619
  misc_feature (1)..(1): n is a, c, g, or t
ncttttaatttcttgctgcaatcaccatctgcaatgattttggagcccagaaaaataaagtctgacactgtttccactgtttccccatctattgcttatatatgaaatcaaaagaaatggtacaaatcaatgtatttacaaaatagaagttaagtcacagatgtagaaagcaaatttgtggggagggaaaaattggaagactggacttgacatatgctatatatagaatagatatgtatatacagaatagatatattctatctagaggatagataactaatatgtatatagaatagataataaaaaccccactgaaaagcacaggagactattcaatatgctgtaaagacctgtataggaatagaatctacaaaagagtgtatacatgtatatgtgcaactggtcactttgctgtacagcagatactaacagagcattgtgaatcaactatatttcaataaaaatattagaaagaaacaaaatgcacagtggtaagggggatgagaagtacacacagggaaaaataaaagtatttgttgagttggtatggctttttcttttttcaaccagtcgaactagtttacttctgagaaagtgatgtaaacagcagggcaggtagctgcggatgctgccatggcttatcattacatatggggactttacaaaatcaaacagtgtaagacccaggtcacatgcaagtctgacaaagtcatgagaagtgaaaagcaatggaaatccttaaaaactgagacgctttacatataccgaatgattgtggtgggctctgctggtgtattttacagatgaactgactaaaaagaaggcccaaagtggctgacgaaagagaaacgacagagaagatttacagtgtttggtgctgttgttgcttagtcactaagtcatgtcctaccctttagggaccccagggactgtggctcgctaggttcctctgtccatgagatttcccaggcaataatagtggagcaggtggccactgccttctccaggggatcttcccggcccagggattaggaaacagttatagggtaactgttgttgagctgggcccagctgctgggtccctgctctgttgagacagggtccccgtggccttctccctgcctggaccttgcagtgctatccttcacccggaccccccacttccattacagttcacatttgtgcctggcttgctgtcagctgcactccagggatatgttctttcttctgtgtatctggattcctgctgatgttcctgttcgacactgatgtgctgggtcctttgtatctgtgcatcctggtatagtgaattgtctatgtatggttgagccccagtgtatgacagctaatatttaaaaaatacctcagttgtatacttgcatcttggcccattgcctataaggagattatcccttttcaaacagcatgaatcttctccttagtcttttcatggctgccttcatctcctggttcctcagggtgtagatcagggggttcaggacaggaatgatgacagtgaggttgatggagacagctctgtccatggggagggtggagaagggccgggcgtagacgtagatgcagggcacgaagtgcagggtgaccaccgtgatgtgggcggtgcaggtggagatggctttccccctgccctccccagcctgagaccttattagtaataatatgaccatgtaggatacaaggaggaagacgaaccacagggtggtgaccaggccattgttagaaatcatcaggagctcaaggacagcagtgtccgtgcaggcaagtgtgaggacctgggggacgtcgcagtagaaagtgtccaggacgttcggtccacagaaggggagggggagtaacagggagatctgcacgatggagtggacgaagccccccgcccaggaggccacgatgagggcagtgcaccgcccctgactcatgacggtcacgtagtgcaggggcttagtgatggccacgtagctgtcaaaggccatgaccgagagagagaagatgtctgcacccccgaggaggtggaagaaaaacatctgcgtgaggcagccatggaaggagatggtctttctctctgaaagaaggtccaccaggaccttgggggcggtgatggaggagaagcagatgtccaagacggagaggttgcggagcaggaagtacatgggggtctggaggcaagactcgcagctcacagtgaccatgatgaggaggttgcccagcagagtggtcatgtacacaaagcacaaaaagagaaataagaccaagctcaggtcttgggactgagtaagccccagaaacacaaattcatttactctgctaccatttcccaactccattgaatcatgtgtcctcttcctgtgttcctggggaaaaatgaaaagtgttatttcagagagtgtccgccctaccttaacagagtcaggtttagagagtcaggtattaggtctaaaaactagtgagatgttttgcccagtggatatctgttctggggttatggctaacatgagcaaagtgatacctcatgacacaagcatgcatttagttattatttcctatgtagattatacatgttttataaaatgaatacagtgatgctctgcatatataagttctaagtattcaagataaagtgaccattgtagcatgaggaatatgaagttggagtcggcttggtgagtggtagtgtctgataccgctgagtttcccatgagtgcctgtttgatatgacttagttctcaagagttccattttttccctcagatgatgccttatgtaaatggcttaaaaactgctatctttagaatggttctctttggactgatttctatagaagcactcctctctttttcaaaccacactttcccccccaccaattatttgattaattattttaaagaaaatcccacattgtacataaatttacccattactacttaacatgctaacgtataatgatctgtctgccatgccattagcacacctagcaaacaaaaatgcctcacgtttcctgatgcaaatgagacccaaatattgtgacttcttaaaaagtgtttgttaaggacttttctggtggcgccgtggataagactctgcctgccagaggacgcaggttccatccctgggccgggaagactgcacgtgctgaggagcagctgagcccgtgtgccaccgccgccaagccgagctctgcagcctgaggtccgcagcctagagccgtgcccacagcaagagaaaactcgggagcagcaatggagaccgagtgtagccaaaaataaagagatgaatacgacattttggcagtttcttaaattgctaaacatgcacttactgtttagtcttatggcttttgagttactacttttttggt

SEQ ID NO: 44032 - DNA, 992 bp, Bovine  19866880155636
  misc_feature (1)..(1): n is a, c, g, or t
nagtcctgggtgttcattggaaggactgatgttaaagctgaaactccaatacttggccacctcatgccaagagttgactcactggaaaagactctaatgctgggagggattgggggcaggaggagaaggggacgacagaggatgagatggctggatggcatcaccgacttgatggacatgagtttgagtgaactctgggagttggtgatggacagggaggcctggcgtgctgcaattcacaggattgcaaagagtcggacacgactgagcgactgaactgaactgaactgaagtcacccagtctatggtatttggttatagcagtcttgatggattaagatagaagtttactttgtctatgcttcaagacttaaaatgttaaagctggtttaaagatatcagttcccatctacccatcatgcactgttccccatgactctcttaagccagaagcctggcttcattatcatttaaaattgtcctttgaggtggaagcctgacagggatgctatgaagtgaccataatgaagtccagtagttggcatgggggcactactgactgggctggcttgaggacagggaaggtccaggccacagctgagcctcgaggctgccaagaagagctgccccagtgccagagttccaggttgggactggggatgtctgccatcgctcctgcaggggtgggtgggggtgctttgacagtgatcagctgtggactaggattctgctaggtcagcagtgactgagagaggagtggcgctctgggaatcctgcaagatctatcaggtttgcaattctgatggggttaaaatcaaggctccaggaacagtcttttggaggtagtgtgtactgggttactggggtctgacagagtcatagccaggaatttcaatcgtctacaggcttcaagtcatttagtctcaaatcacatgcgtgtaaaaggtcagaggggagaaaatgtcccactcatcaggatactttaccaaaat

SEQ ID NO: 44033 - DNA, 1541 bp, Bovine  19866880357980
  misc_feature (1)..(1): n is a, c, g, or t
nccccagttctgaacttgaaccatgatatttcttcacaattgcaagcattcaaagtattggcatcccaaatttatttaacatggattggtactgggtatacattgataagatattttcattttagaatagagaatttcattattagaaacttgtgttgagtaattacttcctaaagagtttcttagactacttgtgttctctctgtgtttcattttataatgaaattcttacaataataacttcataagttgagctatgtgggaataatgtttaacactattttctaagcagttaataaatattaattaaattatagaacacttgttattttcataagtaaatagtctttgaaggtggaagtgttaagatatataatagatgagtctgtcctggtagaattttcaaatcatacgaaagggagttcccttgtcagcaggaggggaataacacaggaattttatgttcttggtcaacagtaaaatttttgatctcaattactattttctttgcagttctgaaataattccgagtaagaattttttaaaaattctcagaaaattaggttattaaaatgtatctgtgaccatcccatgtataatctgtgctctgtaaagatgtcatgagaagagcatggcaaaagggaacagctggagggagagagaaagacaaagagggccagatcaggggcagagagaaggcaaggaagcaggtgctttaggattataagtgctttatgctgtttttgctaagttttccaatgtgcatcaacccagttggtagcaaagtgaagcaactaaatgtagacccttgggtttaaatcccggtctgccacctaataactgtgtgaccttagggaagttacttaactcctctgagccccaagttttttttttctttaatccacaaaatggaaatagttgcagtatctacttcatggagttgttgtgaggaataaatgagtctgtgtatgcggagctctaagtggttctccctacataatgtgtgttagctgttattcagtcttttgactttaatctgtgctcaagtagttttattcattttaatgacttaaaattagttctacaaatgttaaaagttgtccatatagaaatgtatactagggttttctttcttttttttttttagcattcagtctttttttaatcaaagtatagttgatttacaacgctgttaatttctgctgtacagcaaagtgattcagttatatatatatgtttttatatgccttccatgatgatttacctcaggatattgaatacagttctctgtggtatacagtatgactttgaggcttacccgttatatatatatatacaatggtttgtatctgctaatctcagattccaaatccattcctccctcactgccccaccttccctcacttagcaaccatgggcgtgttctctgtgtctgggtttacattcattcttttttttttttttttaattttattttatttttaaactttacataattgtattagttttgccaaatatccaaagaatccgccacaggtata

SEQ ID NO: 44034 - DNA, 1366 bp, Bovine  19866880420942
  misc_feature (1)..(1): n is a, c, g, or t
nactgcatggttaccaataatttaaatcttattgatttggtagttttatttatatttatagttagcaaatctgattttgtttaaaagatcctaatgaaactaaaatctttctgcattgaaaaggaatccaagtgacatatactaaaatgggtgcttttcgtaagggccatgacaccagttaatttccttcattacttacataataaatatggccataaaatgtgattaaaaaatcatctgtgtacggcttttgtttttaaaaaattctgacaaatcaaaataaggctctaccagtggttcccaaaatgtgtctctatgtagcttaagaacaaagttttgaggattttccttcattattagattatgagattatcttgtgaaactaaattttccctttattttcttaaaaggtggtagtagatggttattttttttcatgtaatgacttggaaaaatccaaaatttgccaatcttatgtcaattgcctagatttttaaatagcatatgaaattttaaaattgtatatgaaaccataatctctaggtaccacactggcctacttagtatgaaattttatatacacacacacaaacaaacagataggaattttcacctggtaccacagggaaaaatcattttgaacatgaacttgcgttcaagaagttcttgattctacccaaagatacttaacacttctctatttgtctctctctctctctctggtctggggctaagagcgctcaggtagttaagccacaactacttgaggacaggaagagatgacttatcttgcaagcacacagaagtagacattttgccgaacatcctaggataaaccacagcctaataaggttaataatgaagatgacaaatagtacataaagaacagaactatggaaaactaacggtagcaataaactttttgatattcctctcattgagaaatggattttaactgcctacccttggatcgacaggttgccttagggattggctggaccaaaagactgtggcagaagtgatattctgggactttggagccttagaactccagcctggaacactggaaccttctttctcacagtcctgagctgctacacaaacctgactactgttaagacactgtactgtgaggaagccaaaccttggcatgagagaggccatgtcaaaaagagaatgaaatgcctagccagcaccacaccgttcaagcctctagttcttgatcttcccagcagagactccacacctgggggagcagcgacaagccatcccgcataggccatgtccaaattcataagccacacaatgatgagatgacaataagttgttgctttaagcaacagataaccagaataaaacaaatccc

SEQ ID NO: 44035 - DNA, 4876 bp, Bovine  19866880521470
  misc_feature (1)..(1): n is a, c, g, or t
ncgttttctctttaagttatttaaatgccacctttcccccttttattattatgcgatggccccttaacccagctcccctggaggctcagatggtaaagaatccacctgccaatgcaggagatggttcgatccctgggttgggaagattacctgagaagggaatggccacccactctagtgttcttgcctgggaaatccatggaaagaggagcctggtgggctacagaccttggggttgcaaagagccagacacaacttagcaactagacaaccttcaacacatttcttcaaaatctaaaaatttcagcttttcaaatttcttgtttttctgtgtctgccccatatgccgtctttttcgagcaacttccctgggctatctgtgtgtgtccaggacacattgcccgccaacctttaaaccaccaaagggaaggaaaaggacaggggtgtgtgtagtcactggtcaagttggggacaggcggatacactctgccagctacagtaatcaggccgagatgccccgattgaatcactgctcatctatagggaaaaaagactctcagatgggaaaaaaaggaaagagtgaattgagtactggagcagggagaggagggtggggaaggtggtgacaggagcagacggctcctgcttgcctctctgctgcctgccacagggccagaagcaggcggaaccccacagcactcacgcggatttccactctgctcctcagcgggggaaactacagtgacaggaccctcatcacagacaagaaccaaagggctctgatctcaacctttctaactgatgctctgaaccgcctgtcaagcctcagctggcagcaagcgctagtactgcatgacagaacacaggtgtgcaagtgtgtgtgcacacacgcctaggtgaattagattttttgccacccaaataagagataaaacccaaagacagacagatctatggcttcgagtatgcatgtgtgcatgctcagtagcttcagtcatatctcactttatgggaccctttgggccgtagcttgccatgggattctccaggcaagaacactggaatgggttgccatgccctcctccaggggatcttcccgaccctcgtctctcacgtctcctgcactggtagggaggttctttaccactagtgcctgggaagccctccagtctgtatgcacacatagaaaaatcactgaaaataaactgccaggcataaactgggaaattgggaccgacatatacacattactatattgtaaagcaggtaatgtgtaagaacctactgtatagaacacggaactatactcaatactctgtaatgacctaaatggggaaaagaatctaaaaaagagtggctatatatatgcataactgattcactttgctgggcatctgaaacttaacactgttcaaatcaactatactacaatgaaaatgtattagaaaataaattgtatatacagatgagttttaatgacattttgtagatcaaagttaaatattaatttccaacaaagggaaggagatggagaatacagaagggcagcattgaagcttcagacattttattttgtgagcaggtttaaactaacagtttcttaaacggtctacatgttttcaacattcacatgaaattaacgttcttgagcatttctttctggattctgaaatgttcagtataaatcataaaaactgaaaatgtcacaagtaaactcctgggtcgtacctgataggaaattacagtcattgagaataagccagtttctaccaaatactgggggcaggggggtgcgtgtgtgaaaggacaagactggaaaagaagtttcagtttgtctattcttgctatctagagcaaaaaacagctctgctgttactgatagcacaccttcccttacatcctctgatgtcagcctgtacaaactagatagtagagcaaagaaccaatgtttgattttcttaaagtaacaatactttgggcaggggtgtgtgagtaaacagtgtcagtttaatgcttagcataatatgatgaaagcaaaataatatgttaaccctcaacatagcttaaaaaaaaaaagcactcttcttgcatgaaattcatcaatgcaacttacaaggtaacaaagcaggtgttcaaaatacaatctcatgccattaaaaccagttaatcatccagaattcatgtaaacggtaatgtgtattttatcttttatcggtactggccatcttccaaacagggcctgtaaaactgtcagatttattacatgctgaacaaattcagttaaagaataaataaggataatactactgctgaaatccaaacataataagtgatcaaacatcagatctctattgccattttcaagaaagttataaaacattagcctgctatgaaattcctacttgcagatgaaatttataatgaaaggacacacagcgctgttgaaacaacttttcttatcaacacctaacatggggaggagctggccgataaatcacccagctcttgatacgagaccagaaaggcttctatgcctcccaaggccttctggctcttttctaaaatgctctctacaagatgctgctgctgctaagtcacttcagtcgtgtctgactctgtgcgactccatagacggcagcccaccaggctcccccgtccctgggattctccaggaaagaatactcgagtgggttgccatttccttctccaatgcatcaaagtgaaaagtgaaagtgaagtcgctcagtcgtgtccgactcttctcgacctcatggactgcagcccaccaggctcctccgcccatgggattttccaggcaagaatccgggagtggggtgcgactgccttctccgctataagatgcaggtgacactactgtgtcatctggggtctgattcttcataaacttagtaagacaaagaaacactcaagtaatactaaaagtgtacatacttctgtttgtttaaacacttttccatttctatcctattgaattcatcatgagacgataatctttgagggccctccacagctcagaagtccatgtcaaaagttcgatgtaggcattgtttctctatcacaagtaaaaaacatttgttcattctaaactgtaaacaattttttcctcagagtatactgtgttccaggagggtcttggttttacaaaagcgaattttctggatcagactctgaagaagtctaaagaaacacagcatctaatgctgaaatatacataatgtgccttaaggatgtagaggcttgagaaaggcagaaaatcaagtgggccaacccttagatgtcagttagatgatacagcagtgaagacaggggagggggaagaaatcactttctaaacagtgtcaactaaacaaaattacccaaagcaaacaatattttggcaagaccccaactcttggcaggagttaacaaattttccatgcagtacatacataggttgtatgaaaggatatattgttggttcattcaaacaagcagacaaagaagcaacacacatacaaatacaacagaagcaggactatgaacatttactgaaggcagggctgaaaggacagagaaaaagaccaaacttttccttcccactgggaaaacaagtaatgcattagcacagtgacagaagatgctattcaacatttcaaaactaaattttagttagtaaaatggtctatgatttcccccaaagtgttattttttactagatctcaagaacagttttaacttcatctttacccgacagtatgttgtttcttgcttttcatacaataaagttgtagtttaccccatacattacagtgtgtatttacagaatgagactcacacaagtgcacattaattcatggagtgacaacagtcaggttgctgcgttttaggaaactcccttcacataaatccagaagacagggcatctgataggaaacaaactctcagtttaacttcattacctttgagcaacttactctacacttgccttttttaaagttaactgcaataagccaaacacatactattactattatgagatgatttttcaaagataaaacactaacagtctccagttggacacaggagtcaaaaaaataccacaggctacaactacagctcttctccaagtaaaatggcttcactacctaccttgtcttatgctgtttcttactccacgggaacagtaatgactgtgtataaacaaacgttcaagcctaaaagttccttcgttctcagtgtgctgcactcttacatttacttttgtataatggccttagagtggtatattagacagtaactagaagacatattccattttctgactgaaagccaataatcctcatgaattttttagctgagagacacttcaagatgccattgggaagacggtgagaaacacattaggctgcaaatgtgaggcagcagctttttaacacagggctgcaataatcaagtaagtggctaaattcatgtttgctggttacacaaatattttgctgtaacatttccatcattaccatctctacaaaagaggggaaaaatatcctctctgaaaatcttctcttagcaaaattcagtgcagaatgtgtcaggatgagagagctttctaaggtgtgtgtgtgtggggggagggaggtagatcttgtctgacgatagtggcataggacagtttccactttctcagttctcacaggctaaggtccttaatcgctggtagcgcagacggtaaagaatttgcttgcaacgcaggagacccggattcagtccctgggctgggaagatcccctgaaatagcaacccactccagtattattgctgaagaattccatggacagtccatggggttgcaaagagccggacacaactgtgcgactaa

SEQ ID NO: 44036 - DNA, 1353 bp, Bovine  19866880566370
  misc_feature (1)..(1): n is a, c, g, or t
ncagcatgtggatgttgggtttgggggctggggaaggtttcttgaggtgggaatttgaagtaaaatatattctgtttaaaagtgtactgattcccatgtatgtgcatttagaatcgccagccacttatgaatcaaatcagcaatgtttcaaatgtgaacttgactctgaggcctggagtacccacacaggtaaggggcagacaagctgtcagtatccacttaacctgtctcatcatttccctccttgatatcctatgtaaagcgacttagaaggccacacatagatctagatccagacgatggaggtcacgccatgtgccttattggtctagtctgttgtctttgtggttccctccccatcactgccatttttattgccacatacggtcagttaccattattcacactgtgtgttcagtcctgggtttccctgatggctcagtgagtaaagaacctgcctgcaatgcaggagaccacaggggatgcgggttcagtccctgggtcgggaagatcccctggaggaggaaatggcaagacactccagtattcttgcctggagaatcacatggacagaggagcctgggatacagtccacagggtcacaaagagtgggactgactaagcaaacaagcaaagttcctgccaacactgaattggcaaatagtgaaccattgcttctaggagaaataaagtgttcggtttctttgagcctcttgtcacatttccatcagtcagtccatgtgtgtttctgtttgaggacaccttttgtaatatatattgttgatccattaacgtcaaactcaaagccagcagcaccataactcacgcctgaatgaagctcgtctaactcacacagtttcccccacaaggcacatcagcctcctggacttgtttaggacactagatagcccttgagcactagtctcaggaaccattttaaacagcagagttactgatgaaaagcacagcagtgtgaaaaacgtggaactaagtagtccacaagaaggacacttgtctgcagtgtgagagctgaaataagaactgatgtcacctcgtttcagccgtgggtaggaatgtgcatgttgggcttctcacatattttgctgttccacatgtatccataaatgacgatggtgcagtgagtattggttctggggtgacaagtacatgttagcgggtaggccagctcgccagtccgtgaataatgaagtcagctgtgtacagccaagatccataaccagcctgtccccatcactgacagcaagcacggtaccccttccctcatccatccttccatccatcctccatcctggcctctgtcaccctcctctccttatgcaactccctttcttt

SEQ ID NO: 44037 - DNA, 981 bp, Bovine  19866880582908
  misc_feature (1)..(1): n is a, c, g, or t
ntggaacacgcgtcccctgcattggcaccggggaagcaaaacaacccttaagagtcatgcgggtagggtttcggaggttagcctggcctccccagctctatcttctgatgaagcacacaccctccccttcagcactcgcactgcccgggatccacctagaagcgccccttccgcctcctgctcccacctctcttccagttgcccccgactcccgcattatggggcccgcctttaccggcgctatcggtggggatcaggaggcccgagatcgcgtgctgcaggcgggctgagtgctgcgggctggggatgaccccgtacagaaccaagtgcaggtcttcctgggtgaagtggtagcggcgagaagccttcccttttcggttcacgagtttggggccatcctcagagggctcgctgggggaccccgataacagctgcgagggcttcggcctctcaggtaacaacgaagcatccacggggggcggcggaacgaaaatctcaggtccccaacactggccaccgtcgctccggccggcggtgtgtgccaagtcctcgctggcggcgccggtaaactcacgactgctgttctggaagtgcggcacctccctggggaggtggggaacagggtaccaggtcggcagcttgctgtaccagggcaggtcgcatagcggctccctcgggagggccaggccctggcttagcaagggaggcgcggtccggaagccgaaggggggcagagccggggacgctgccagggcttccaggggccggaaaggctggaagccctcctctgccgcggtcagggtgttcccgtagtggccgtagggcgggaaaggcgtgtagtaggcggccaggtgttgggggctgccctggagccagtcgggagggtagcatcccttgtcctgggggccggcctcccccggcggccgcagggccatccccgggccacggcgctcggcgggtctgcggaaaagcaagggcggc

SEQ ID NO: 44038 - DNA, 1567 bp, Bovine  19866880614749
  misc_feature (1)..(1): n is a, c, g, or t
nacctattagctcaagctataaatagggtaaaatcatctacttccttccagttcagtcaaatgaacatttcccttttacttttggtctatttctgtttgtgtatctttcatactcagcattaccttaatccactggcctgcctttccacgagacgagtgtggtgttttggttttataatatgttctatgatttgccgtgcagactttttggctcactctctcaaataacaagttgtatttttctttcccatttgtcttggggagtgtccctttattctaaacattttccattttaaaatcacaactcctgtactaaaatacatccattcttctgtcttactgagcaatttagtttatggaacaataaactccaggttattaaaaatattttgcctaaatacagagttgctgaacttccatttgaagtaatttgatggagatcataaaggaatcttttggggagcttgggacataagttttgagagagtttatcatcttggccattttttcatcaattacctggtacacatttctagttaggtttccctgcaatacctctgagcaaacattgggttcttatgcaaaaggcttcttacaagagattgatttgttgatttttaaaatgcctcttaaaataagaattcccattaaatttcatattggaaaaagaagcaatatgtatgattgacatctccaagaatgtcttgtgtgtgctactcacatacaattgttttgtagccattatattgaacatgtctcattttgagagtataaccttgagttgtcattgctttagaaaccatggactggttaggacatccattaatgtcctcgaacaagtgctatagcagaatccccaagggagacagggattttactggtctctggacacaggaatccatttgttggagcatatactgagtgtgatgagctgtaaaatgaagttaatttctgtgccagaccaaatgtggtgaaagcccgagcaactggataagatgagggctgcatatccttcggataaaaaaatcactgccttaatttcagatattgtcacatgaggtttttttggtttatttgactaggccacgtagagcaatcaagaggaacatgaacataatctaagcaagagctcaggcttcaggaagctctcattgtgaaatctttaatttcaggttacacttcatgcagagtagtcgaagaaaagaggacaatgccttttcgctaaaagcaccctgtaagtgaaactgttaataccattcttgtgagttcttgtagctgcaaattttaaaacagaagaactggaattttctatcttccacttgagggtacctgattatcaaagcaggaacagtaaaacattttcattttacatttgctactaggagttcatttggagtttgagagtatttttctggctgagattctctttaagctatttaatagtttttctgttattttccatgtcagttttttccttgctattgacagttgctctgctgtttttaaagacagtactcactacggaaaagcgaagcccacattttctacttcccagcccaccccaccc

SEQ ID NO: 44039 - DNA, 961 bp, Bovine  19866880621317
  misc_feature (1)..(1): n is a, c, g, or t
ngagaggttgtatgcagagagtatagcatcatcataagaatgaagtagggccactcctaaaatgatagactaattgtaggtaacgatgatattgaaaaattgcccctcctcttctgttcccacagttaaaatgtccctttacttattagctccaattagtttccatggtaaccgaccagcccttgtaaacccgtactctgagcttcactcatctttgtctagactgagctcaccacccttcttcctccacatttggcagttcagctgagtctatatctatatccatatcttttgcacacatgtaaccggcacctaagtgcccacatccacattattgctagtacaatggtggccaagggagaatggaagtggcatttaatccctgagtaccacacgtgcatctgctgccacactaatttttccctctcttggttattgtttcttccagccttgttctattatcatctgtttgctgcttgtaatttcttttcagggaagccaatacagtataataaaaacctcattaaacagaaacacctatcagcctcggtgaaagccctaaatgactcctttttgtctaaagaatcattaaaaaagaaaaaccacttgtttgtcatgcttggaaaaaagagaaccaaatcagcaaaagggtttaccaagccagaggtctaatatgaagatttaatgtacttaagacaccatggttcttttcccccttgtgctgcccgttggctgagaatcccaacctgggctcagtaaacaaataatgagggagggtgagtaagtctgccactccagagccttggtggagatgggaggacctggatctgcagcagcctggttgtcataggccacactgtaccccggggccaccggcaggtgatgctgctggggtccccagatgttagtgtgagaagcatcccgtggaaagtgggggaggactttcagcaaaagttgaaat

SEQ ID NO: 44040 - DNA, 2018 bp, Bovine  19866880632602
  misc_feature (1)..(1): n is a, c, g, or t
ncactttttattatgctacatgaatctagattattgatttcataaagacaaaaattgaagtaatattcagaacttttaagataagcatcactgcaatgggtgatcttaactgccatttcttttggggggggccaacttttttttaattggagtataatatgtaattgttttacagtgctgtattagtttctgctgtaccacagtgtgaatcagctgtgagtgtacatatatctcctccttcttgattaactgccatttctttattaactttaggagttttcatgaccagactactatctagaatttgttaagtcccactttcttattttattaacccagtacagtattaagcatcagattctttgctatacctattccaaaattaaaattcaggatgtaggctatggtaagatgaggggaaaaaaatgtcagtgaatatataacaagaagcagaggagccctgagacataaattatgtcagttctcaggataatttactctgctgatgatataatgagattgaaaattatcacatggccagaaggtctgcagcattgccattgtagaattgcttcactggcagcgccgcacatatagaagaaattaggatttttaaagcaaagataaccagttggcgcataagatgatttttatttttagaaagtctaattctgtgaaaatctactgtataatggggctagggagacacagaaaaaatgtaaagattgtctgacccagtctttatttttagagatgacaaaatttagcgcttgggactaccctgctgaccaaaagactttaaaaggaccctatgttgggccctgcttatttctctttcatcactggcttgaaaacacgtaatgacaatttttagagaaaaagtgaaaacagacttaacctgattttccagagttgacaaggcactggaaggccagagagtgctgcttcctacttggttcttagaagcagctgagaaaacccttaactaggtggactcttagaattcgatgaaagaactggaaacaaaattcatttggaaatgatggggaattttaaatattacagttaggaaaatccggtatacctgtgtttattacttacattggggatgacttaaagtagggtggaaactcttgggaagattttcaaggcttctaaaaagagatgctggcagtaaccacaaggctgtgactcaagctgtctgagagcaagctcattaattgcagaaatcagattgctagatgtcagcgggtcttatctcataagatcaaatccacattttcactgttgcaaaatagtcttctgagaattcagtgcattgagcaaaacacctgtgtagcaggacttcagtgctaaacatgtgagagataatgctttgaatctagagacttaaggtttgaatttgcatcttttccctgttaacatgtaataatttaaacagagaaaacttgctctcattgagccattctaggcatagatgcacactcatgcttacatcatagcatagtagttgctaggcaacaaaactaaatgtcaggttttttcatgacagcatatcatagtaagctttaagaaaacaaatagttttataaggtgaaagaatttcatctttccactatatctttaccattgtataaagcagtaggaagccacgtgcacttccaaaagtgacccgtagataatattatcatgacaatccctgttgaaggtgtatttaaagctgtgagtttaaaagaacacttagtacataactaatcaactgacttacttcctgacctccctccccacataccccatatacacatgtgcacacactcacacaaggggttccaacagttgatgccaacctatcatggaaagctatttacacagtcttgctttggcttgcacgttgtttacaccaatgggaacagcacaatgaacatttaagaagagcttaaaacaaaatggtgtctgttatgtgtgtgtgtgtacatatatgtgcacatatacatacatacacatatgtgtatatttta

SEQ ID NO: 44041 - DNA, 1465 bp, Bovine  19866880645706
  misc_feature (1)..(1): n is a, c, g, or t
naacctacatctgcattggcaggttggttctttaccactgagcccccgggaagcccaaagcaattataccacaacaaaaattttttaaaagcatcattgtcataatagactgaaactgtaggatcccgtaaacaaattgctgataaacgttcgtaaacagtgttttttcattctgcatttctatttttttaattgcacgcgcgcgcgcacacacacacacacacagtcctgcgctaaagtaagtgagcgttttgccccttgccagaaagaagctaagatgctacgacgtaatgagttttattaacgctcataatgtctgcaaagcagcccagcctaagtatcgtatccctttttagtctctccccgaagacctacttacaggagcactcgcatcggtgcctaattgatctgcaaaatgccggctgctgcaacctcttccaggcactcgcgcggttcctgtaccatctctaccgcctgctacgaacctacggagacaggctcagcgctgtactggaatcagccagaccagacccgttcccccagcgtacgcagagctcatctgtctccaattgggatatcccgctcccagccccaacacacacacacacacacacacacacacacacacacacacacacacggttagaatagctgtgaggacacacacacacacacggttagaatagctgtgaggttctctggctgggacacaaaaacgtcctaagtcattctgatgatgtgataggaaaaaaagaactggaagcaaaaatgcaatgaaacaaagcttcgaaaactaaaaaattggcttattttttcagtaatcccggtgcttaagaaaaaacggaattaagagacattccgggaatcaggtctggggtggggcggctgttggctttctagtaagtgatcctcagtacatttaattgagaagtctgggtctcttttttggtacagatgtggctccatccttagtttatcaatcgtgacggctaatcccttcacgtgtagtgaatacagtttccaagaagccactggaactagaatcagaggttgtcagggtgggagttctcagaccaggggcccaagtcgctggcagcttctgggatccgattaaaaatgcaaataatcaggctccacccaagattttctgaaacttgaactctggggagtggtcccagccacccatggtttaacaaaccctcccaccaagagtctgaggcaggctcaagtctgagaagccctggattccctgtctgtttcccaaactgtgtgtgccctgtgcttagtcattctgccctggtctgactctgcgacctcatggactgtggcctgtcaggctcctctgtctcaggatttttcaggcaagaaacttggagtgggttgccattccctcctccaggagatcttcccaacccaggggattgaacctgcatctcctgtgtctccttcattgcagggggaattc

SEQ ID NO: 44042 - DNA, 1240 bp, Bovine  19866880696453
  misc_feature (1)..(1): n is a, c, g, or t
ntgaaatattgtaaaacctccacacttcaataaaaatattaaaaaaaaagaaaggctccctagaatgtgcacaatattcactctgggttgatatcaccctgaacaccatagtggaatctgacgttcattttttccaaattaaaaaaaccacaaagagctacattagccagtcaaggtaagatgaaagtcaggagtttccaccttggttagtagacaactatttcttagctggcactttccttgacatacatttagttatcccctgaaagtctgaccttaagttgatagtaactgaactgtgaacaagatttttcatacacttaggtattttctcatatttcaaatcccattagtaccttggttgttctttggataaattaaatccttctatgttcacaatgcatcacacttcaagaaagactttggcatggattattatttgttcttcacagtaacttctgtaggaagctacagaatgcattattattccttctctaatccactggcatcccctagaggaggttcagaaagctgaaactcacattccagttctgactctgaacctgggaacttttcctcccccaaaaatcagttcttttccatttccccccattattttgctaataatcaccaacttaatcatcctggacataaatgttagaaatatacagactagtgcgtgcatgtgcactaagttgccacagttgtctccagctctttgtgaccctatggaccacagcctgccaggctcctctgtccatggggttctccaggcaagaatactggagtgggttgctatcccctcctctatggaatcttcctgacccagggattgaacccacatcaatagttgataatcaatcaagtctaagaagcacagagagtcccataaaggataaagccaaggagaaacacattgaatatgtgctccatgcaaactgaaacacatattaattaaactaacaaaaaataaatgagaaaaaaatgaaaagcaacaagggaaaagcaataagtaacagaaaggaatctccataaggttaagagctgatctttcagcagaaactctgcaggtcagaagggagtggcaggatatatttaaagtaatgaaagggaaaaacctacaaccaggataattatacacagcaaggatctcattcaaaatcaatggagaaatgaaaagctttacagataagcaaaagttaagagaattcagtatcactaaactagttttacaacaaat

SEQ ID NO: 44043 - DNA, 1000 bp, Bovine  19866880811834
  misc_feature (1)..(1): n is a, c, g, or t
ngagtaatggagtaggagtaccaaaggttgcaattagttcactcggataaaagacgctgtctgtgagtcagagctaccaggtggataattattaacatataaaagcagatgcgctgtttaaggcaaaaggggcggggcgggggcaggtccgccgtagacaatgaaggagggtctctgccgaccgcccgctgcttattgtttgggctctagagactgctgtctacagcctaatcctcctccagggcttcgttcctcgctcgtccctcggtcccacttcggaccgtcagagtctcccagcgctgtccgccgggggcgccgggaagccagactcagccgcccttctctgaccgccctctcttctgctttgcaggttggcacctttgcgcccgagggtgtcgcgagccgaggcggcgaggaccgggcgcctctggcccagccagcccggcgggatgcggccccggcagcagcgctaaccgcccccacgctgggcaccgggcgttcgcgctccgggcggcaggcggagcggcagcggcggaggggatgcgccggggacacgccaggatcctgctgcgcgctcccagcccggggtggaccctaagttgggctcatcgcaggaccgcgcggacccctgccctctggggcacgcggctgcggagcctcgggaccacgactgcggtcaggatgcactgggcacctcccagctggtgaggatgccccacagcgcggctctgcatcgccagccccggtccttggtgggcacgacagcctgggcccggcttcagcccctcgtgccggtggatgcaaagctccggagtccttgagtgcgatcggcgaccgaatctgaattctgagagccatggaccgaggcgctgggttggagccccaggcgggagagccgcaggaagcgcgcaccagggtaggagctgtccaagagaagtgtgaaccctagtccttcaggtcccagagtttacccgccctgaacagcgcctcctgcccgcca

SEQ ID NO: 44044 - DNA, 775 bp, Bovine  19866880820416
  misc_feature (1)..(1): n is a, c, g, or t
nctactgtaaatagcgctgctacggatattggagtgcatgtatcttttcaaattatggttttattttttaagctaaaaaacacaaatggacatggttaaaagagtttgggatgatggctatcatccaggaaaggaatggtaaccaagaacatcagcagtatccacgttttattatgaaattttaaaaacatttctgaaaaaaataaaaatatatctcaagcaactatgagcaaatgttaagtttttaaaagctaaaagacacagtatttattctatttttccctcacttgaaatattttacaagtcaaaaagaagaaaatcaaaaatgcttgtgatactcccctaagtttctgagactatagtcaacgagattaagctctaagcctttcccaaaagcctttccctggcagttcagtggttaagactttggccttccaatgcagcggagcaggggatgtggtttcgatcctagtcaaggagctgagatagatttccacatgcctcatggccaaagaccaaaacataaaacagaagcaatgttgtaacaaattcaatgaagactttaaaaatggtccacatcagaaaaaaaaaaaaaaaaaaaaatcgaataaatctttcccaaatggtccctgggtaccactctgaaaagcaaaatagtgagctgattagaccattgatctggttcaatgtggcatttcttaaattcttaggaaattgggctggtgctaacatcttaggaaggctgacttatgatctacttatatcataagtaaaa

SEQ ID NO: 44045 - DNA, 1313 bp, Bovine  19866880837352
  misc_feature (1)..(1): n is a, c, g, or t
ntctctaatttgtccctcccccttccctctcctctagaaaataatcttttttttttaatgaaagaaataccaataaatgcatcagcgagacacatttatggagtgactctttccaaagagagattctttacccactgggattgaggcttattaaccttggcctaattgtggtcttgagctgtcactcatttattatttatcttcataccctctaacctggttccctatccaatttaaacaaacaagacagccctaagggttctcttaaacagcctaaaatatagtcattcttctacttgggcattggccctaggtcctgtctgtgccctaagctaatctatgaaggagcagaattcttgagatagaaaagacttaattcttgcatatttaaaactaaaaagctactgaaagaaactgaggggtataattgtcagcagaggactagggtcctcctgggctgatttttttttttttttgactctgtcatgtggattgtgggatcttagttccctgttcagggatggagaagtcataaccattggaccaccagggaattcccagggttgggttttttttccccctcctgtgctcactggcatggttcccagcatccacgtggaaaacagtctaacgtagacacacagagcgaatgtacaagtgaatgtacaaggctgcttgcccccagtcctctcaattatggatcctgatttaagaaaatcctactgaggaagtggtcaattacacctactttccttgtctccttgcctggaagctatttcacttcctagccaaagtctaaccgatgtctgatttccatgtttcccaccccactccagtactcttgcttggaaaatcccatggacagaggagcctgttaggctgcaatccattgggtcgctaagagtcgaacacgactgagtgacttcactttcacttttcactttcatgcattggagaaggaaatggcaacccactccagtgttcttgcctggagaatcccagggacgggggagcctggtgggctgtggtctatggggtcgcacagagtcagacatgactgaagtgacttagcatagcatagcatagcatttaccgcttcacctggggccatttgcccaggtggacatgctctcctggtaagggtttcctcactgatcccatatatagtctctttagcttcctccatctccagttcaggttctaatcctcaccctttccactgcaatctcacttctgttctctgtccctatttcaaaatactgttccactcaagcaacacatgaaaaaccagtctggaaggtaatcttagagac

SEQ ID NO: 44046 - DNA, 2909 bp, Bovine  19866880855335
  misc_feature (1)..(1): n is a, c, g, or t
nccttgaatgagaaacactcaatacagatttatacaaatgatgataaaaatacagtatattaatttcctcaatgaatgcccttatatttgctcccaatcccagatgtgtgtaaaagaaagcttttacaatactgattgatagtctggatctagactcctacctttcttttttacctttactcttttcactcagataaaatgacacttaaaaccatcttgaatagaaaaataactatcatagtttcaaagagttctaatgacaggacttgtggtttttcattgtgatttactcttgggtttaatatatataatgagttgaaaataaggctaaaattaatctctttctccacacacacacacattaaaatacatttggatggtttcaaccaagtttttggttctttatttcaaataatctgctaatttttattcagctcaccattagaaaaatgcattatgaaaatttccctactagagttaatattgctttgcctatgtttatttcttctctatttttggagtacacatttaaattaatctgttttaaatttacttcaagaaattttcttcttcaaggagagtatctatatgcctttggctgcctagcaataaactttgacatctataggcattttcttctgcagcattgggaagttctagaagggggagatttgatcacgctaagtttctgatcaaacatttcttcccctcaagtttttgtaagctttaattctcatcaaaagttcttctagttcctttcttaggcatgatttcttcacaagacaaaaagattaatgccttcctttaaaacgctttgccaagatacttcaaagttttgcttaggcatctcttcgaacgctcaaattagccacatcaatttgaagagctggtttaaactatttcaggcagaaaatgagtcagaaagatttttgtaaaagttctacaaaatgaaaattggacttgatttctgtaatttttcattttcctggttttatgaatttttcatgtgtcaaatcaatttgttccctgaaggaaatagaaagaacatatgtattttaatgacgtgtattcaaataaactacaaaacaatgtttcaaaaaaatttttaaaaactagtaattttacgtttgcctaagagaaaattgctttaaaaaatggtaacacagttctaccatgtttggagggaaattttcaggccactaccagtttaaaacatggtttgctcttctaatggagccaaatagcaagaagaaattctctacagactatttctaaaccctcatcataagtggcccagaagcattaagaaagcctaagagtaccatttagttagtatcctttacacatgctcccttgtgtaaataagtatataacttaagtcagtgaacatattggaaatttctctgtcattgtttcctgttggttatgaaacactgtagaaacaaacgttgtttaaatactctacccagtgaagaatgctattttcagtataacagcgccattgaagtacttcctgcccttaataagttagtgataggttaaacacacactcgataatagttcttttctgagtcaaaataacaagaaagttaactgtgcagttcaggctcgctagcagtttatcttactaaataaaaatgtgttgtgttcccttgaaatgaaagaaaagtcttagataaaatgtgcctagaagtcaacgggagatagaatcaatctgtatttgggaaaagtgaaggagggaggggagtgaaagaatccctgtttcttttttttcccttaaagtcagtcattctaactttgatctaaatttaggtaatgcatacttcctgtggtaacctttcttttcaagctgcaacatttttgatgttaaaattgctctgaagcagtatttttggggtggagttttaaatgggaatggatagaaggtaaaaccaggaactgggtttcattaagaaaaaaatactgtgtgtacgtctgtgtgtatgcctgtatgtgtccattcaaaatgacagatttgtgcagataatactctgtgctttaaattcccaaagtgagacagttttgattttaaaaacgttcttataaataccaattagaaactgcaagtgactcaaggacttaaaaaaaccttctcctttgttagttttttgtatgaagctaatgtaatcacatagctaaatataaaaatgccaaacagcgcccccctttccataccctttaagtccctagggcctcagtctagggatagaaataaactgttccgggagggagggaccaaccacttagccactaagccaaggtggacctcgtgagtcaccatcttgccctctagcgtgtgtcaagaagcctgagtgacagtatctgtgcctgccactctgaactgccactagccctgtgtattctaatctagtaaacctcaaaagattaaaacgtctgcagctgtcagtgtggttttacacgacactgtattcaagatatggttattaagtttctgctgaggccccatgtaatgatctcacagcatcacagagtagccggtgttgagagctccgcaccaacagctaagtttaaggattcatcaccaaaggtgtttataccatgacgctgtttccctcctgaatggcacaaagccctcacagaatggtggtagtgggccagacatcagagtggaagatggacagaaagcttgtgctcaggacgcagaaggagcccggctgtcagaggatgtgtggccccagccccgtgccggggcccatcaggcctctccaccctagcgccgcccccaggctcagcctccacctaggaggtccccgggtggtcaggggtgctaacctctcctcttcccgtgcacacctgaaacagcgacacctaaagtgtccacttgcaaaacaagttccaaggccaagtca

SEQ ID NO: 44047 - DNA, 1675 bp, Bovine  19866880890061
  misc_feature (1)..(1): n is a, c, g, or t
nataatattggttattattagatataattattattaggtaaaatctagggcattgtgatgaacacgtgttcactgttttctgtgaggcattattactgttgttacaaattagcaagacataaaggtgcacttaatgcattttccctcaatttacatgcccttccttcttaaatcatttccagaaatgcttaggaaatgtgaaaggagtttatcagacaaatgtattgtcttttcctccagcagaatgtcatatcacttcttgaaagatcctctccaaatgcttcaactcaaactgattttaacaaacttgactatacacaccataattaggaagccaattcattcagttcatttgcatccgtctaaataatttttcctgacagatgacttccgttctaagtaccaagtactttttaatcctaggcaggttattgctgaggataaacgatttcacattctcataaagatgccagtcattaagaatattaacacgaattccttcccctcggatagaaaggagctgtcattttagcaatgttgctgcatcagcctttctattgtcaaacagaacaaatgatgagaaaatcaatttactctttagaattagtcaagtgaggaattctttgaagtggggggtcagggtttttgtctggattccataatctggaaaagcgggtactgtacagacgttggtaaaatgttgtgaaatttaatgagcactgtttgctgccatagaccttccagacagaatctatctctgaaaaagaattccccactcttaaaatagaggtttgatgagcaccagatgtggtttaaacgaagccttgtccagctgaactcagaatatattttgatctgtatgaggcacagtctagaaagaggggcagtgaatcgatcgaccagagcctgtgttgagggtggtggtggggcttgaatatatatttactccataaagcttctcacattaagcaaaatgcaaatgagcttttaacaaacactttctaatagttggaggatgtcatacttgctgcttatgagacgatttgcagttttatttcatgtctaagatgtgcagaggatagcatttcaatgggtagccacaacctttaggtgggtctgtattctggcaatgattgtacttcccacatctcagtttctccacccacaaagggaagattagctagttcttcaagaatgacaagcatttaatatttggaaaagactaaataatgaagtgcttggattctatagaaatgccgaggagaaaagatttatttcaagtcaaaatctagtacaaacatgaccttcctattgtaaatctcatgaatagggaaagaaattacatcgaagactgtttcttgggctgagaatttggaaatacattaatattgggatgcttcagatggtaaaaaaaaaaaaaaatattaaaaacatctgcttattataatctcttgtctttggagatgagaaaaattctttctgctacattgtcctgaaagaatgcagttagtaaagatttaaatgacaggaatgaaagggtcatcttttgatttctttgcctttgggcaggactacagttaagccagctcaggaaagagaacaatgctgtttcttgcaaaaatctccaggtgagaataataaaaattaaaaagagcacaagggaaagccccaggga

SEQ ID NO: 44048 - DNA, 2287 bp, Bovine  19866880901675
  misc_feature (1)..(1): n is a, c, g, or t
ntgacaatgatagaattcctgagtatatgagtggcagggggaggtcacacaaggcttcactgaagtctgaactttcttagtgaactaaaaagggatcccaccattttgataggagtagagctggtaggacagatgtcatgctggtgcttgaatctagaactttttaacaccaatggccatgtttgggaagatgttgaattttgaacaaagaagagacatggttaagctagcatctaagaagattgctctggtaccctggagagttgaaggtgaatttaaaaggaactccagtactcttgcctggaaaatcccatggacagaggagcctggtgggctgcagtccatggggtcactaagagtcagacacgactgagcgacttcactttcacttttcactttcacgcattggagaaggaatggcaacccactccattgttcttgcctggagaatcccagggatgggggagcctggtgggctgctgtctatggggtcacacagagtcagacacgaccgaagtgacttagcagcagcagggcttcccaggtggctcgagtggtaacgaacctgcttgctaatgcaggagatgtaagagacacgggtttaatccctgggtcgggaagatcccctggaggaggacatggcaacccgttctagtattcttgcctggagaatcccatggacagaggaccctggcgggctatactccatagggtcccagagaggcagacatgacaggtgtcttagcacagcacagcatacagataggagacagaccattagaagctattagtaatctggggtgggagggggaagagaaggcataaactgtggtagtgaagaaagaaatagagaaaagagaacagcattgagaagcatttaaatgacaagatcagcaggagaagggattgatcagctctgatgagtggagaagatgccagaagagatggagaaaaaggatccaagtgggctctagttccatttatcactcagggaataatagtcatgccgccgagacagagacactataagacccaaagccataataacatggattattttctgtaaacagagaccaaagcactagactgcccaatagtcacaaggcatttcatgtttatctagtgctccatgaattttcagtcatttggaagacagggagagctgttgcagtttagaaatgagtaactactgtctcagaggaggtcagcctcctcaggatcacacaactagtaaatgagacagcagaacttccttccaaatctgtctgtccctctgctccggcagaactgcagctgtttcgaggagctgtttccgtgccaggacagaggcatgaactatctgtcttggggatggtgtttcctgcccaggtgtccttgccgagctgtatgtgttgctgaccatggttaagagtcttggtgggtgacacctgagaactctagtatagatgcatgcatgcgtgctcaatcacttcagccatgcccaactctctgcgaccccatggattacaacctgccaggctcttaactccatgagattctccaggcaagaatactggagtgagttgccatttcctcctccaggggatctcctgacccagggattgaacccacatctcctgcattatagacagattctttaccgctgagccaccagggaagccctctactaccagacagatatatattatgccttttttccctttgccagatagaatccaaaatgaaagactaataataagtttccaaggaaatatccctgatggataccctcccgtatcttcttcagtggcataggttctcttgggagtcactactctgaaaccctaggagtcccacataccctgaaaaacactggagagtgtttcacacatttcagacatgtaggtgggctgggggcagatggcatttcttcatgctacacatgcaatgtactcatttgatctgcttcctaaatctgaggcagaactgacttcattgaaaatattcatggatctcaaaggtgactgccttaaattagttttgtgttaagtgcaatgtgtagctccaatgtgaccaggatgggaggttctgtaatgtggaaggaaagtatgagatgtggggttccttctctgccttcagaaatagcagtttggggacagtcatttagcttctctgaatctagctccatccctacaaaaatagagcatgctgttgcaggttattggataattccaattagaaatggtctgtgaaatctttggacagtgtacatttgattacgtgaggtatcactgataactgaagtcct

SEQ ID NO: 44049 - DNA, 1901 bp, Bovine  19866880903700
  misc_feature (1)..(1): n is a, c, g, or t
nctttcccgatttggaaccagtctgttgttgcatgtccagttctaactgttgcttcttgactggcatacagatttctcaggaaatagatcaggtggtctgctattcccatctcttgaagaattttccacaacttgttgtgatccacacagtcaaaggctttggcgtagtcaataaagcataaatagatgttttgaatgaagagacggagccaaagcaaaacacaatactcagttgtggctgtgactggtgatgaaaggaaagtctgattctgtaaagagcaatattgcatgggaacctggaatgttagatccatgtttagctatgatcagttctaattactggtcacatcttttgtcacttaaaattagaagataaactactggctgggtcaaattctgcccaatttggtaatttcttaaaaaggaatgagcctgcaccagtgcccagaatcctgattcatttcctcccaaggtcactggaagttgtttgcaggcaagaatcaaatcctccccagcacctggaaggctgagtcagttctccggccaacgacaactgtatgccagagttccatttgttgtcttgaaactagttaattccccatggcttttatgtctgtccctaagcactgctgatgccagggttggaaagctgtctactgtttcctggcctcttatttcaatatgattgtgcttctgtcctacatacgaccgtttctctcctctcttctcgctctctccttttcctcttcttcctcttctctcttagatatgacattttattaaaaaaaaaaaaaatatatatatatatatatatatttatttgttttcctgagccatgagtggatttccattctctcctccaagggatcttcccaacccagggattgaacccaggtctcctgcattgcaggtggattctttaccagctgagctaccagggaaacccaagatatgactttttatttaaagaaatgttttgtttgactgtgccatgtcttagttgcagcgtgtgggatctagttccctagccaggaatctaacctaagccccctacgttgggagtatggagtcttagccatgggaccaccagggaagtcccagttaccaccttttatactccacaaatacagttaacaacagtgtggagagaatttactccgtgtctaaatctgtctaacagactatttctattggaagtggaggagcttagggatctcctcatacccaatctttttatttttaaatattttattcatttctttttttcaccacactgtgcaacttgtggaatcttagattcccaatcagtgattgaaccacagccctcagtcttgagaacacaaagtctaaatcattggagagccaaggaattccccacattcaatctttctttaaatatttttctttggcaggtgggaggtgaccagattcataattccaaataaatatacaataaatgtgttttttttaatttaaagcttaaagctctttttgatgtaacaaacatcatggacatctaaataatctgtagaaaatacaattttttttgttgctgttgctgctaagtcacttcagtcgtgtccgactctgtatgaccccatagacagcagcccaccaggctcccccgtccctgggattctccaggccagaacactggagtgggctgccatttccttctccaatgcatgaaagtgaaaagtgaaagggaagtcgctcagtcatgtccgacttttctcaaccccttggactgcagcctaccgggctcctccgtccgtgggattttccaggcaagagtactggagggggggtgccatcgccttctccggaaaatacaataagctcattttaatttcttatttttagaaagacagttacataatgagtctagtcacatcttagtt

SEQ ID NO: 44050 - DNA, 1497 bp, Bovine  19866880910046
  misc_feature (1)..(1): n is a, c, g, or t
nttgcttcttgtctcaacaggcatttcaaaaggagggtaattaaccaaaatcaagagttctttggttgagttagtaacaggcttctcctttgttctaaatcccttcataatccctttccccaccaatttttccagtatggcctggattttacaaaccacctctttcctggcctgctggacggagtcctggcccccagtttcaactgaatccagttccagaagttccttgattagcatctcttccagaagccagtaggctttgtctgtcttttttcctatgaactcttctacttgctcaagatactggaccttctccagcacatgtatgatttttttaatgcttgggggagtcccttcatctgaagataaacactcttcagcaagatgattaccctcgtcttgagtgcagggatgttcgtaggtggcattaccgtacagatgaggctcagcactatactggacctgggaatccaaaagctccgcactgtcattgttcactgatcccgaggactgccgtactgatggacactgcaaggaaagttgtgctggctcatgtcttgatctggttcgctgtaggtgtaggaggagtccttaggctgtgggggtggcggtcctgctgggggtacatccaacgggagactggggttgggctgttgccaggtgaacggtaagtgcttggaacctctgtggagtaattggtctgagcatacccaggtgtgtaataggccccagggtatgaggcagtatttgtcccggggccagtgggatacggtgggccatatcccctatttgtataagaattcaaactggctttgcatttccgatcttccagggaatgtacttgggtgaggagccggaggtcgggcagcagcattccaatagttagaattgtaactaggatatggtggctactcctggtggcctccgccagcatgaccaggctctgaccaggcgcctccagacgcttagtagccattgcctcctccgccttcccccggccaggtggtctccgccgggccgcccccgcgcccccgccaggaaatgggaggctggggaggctcggggcacggggagtagatgggcggaagcggaggcaccggcacatctccacccccaggccgtagtagcggccataagatgggccgtcactggggccgtagcccgagtgcctcaaggccaacatgctccatttttaaaaaaaaatgtttttactattacaattctcgctcactcttaaggttgagagacagagagagatacacacacacataacattattattagtggcattaatttttgcttaagtggcttttctaagtgtacatatattagtcaagaaagcacttaggctgatgaattaagacgtgtgctttgggactggcttccttttacctttggagactctttaatgcttattgttaaggatgcttcaaaaaatgctgaaaagtcaacaacaagaaatattttttgagttgcttttgggcttagctaccttca

SEQ ID NO: 44051 - DNA, 716 bp, Bovine  19866880945618
  misc_feature (1)..(1): n is a, c, g, or t
nggctcattaaaaaaaaacaaaaaaagcatctttctcttgaatgttcatgagggagcatctgtatgggaatttcaactgccctaaaattaattagatggcagctggttccagcacccattctctctccacacttctgaggtctgtattttgatcctcaacaatcaactgacatcagataaatacgaatcacgaatgaagtgtgaggaaccagaagaaaaaggactccgttgctcacttccatgtcttaaattctggagggtgacacggggcagtgaaagaagaaagaagggtatactgtttccccctgccatacagattattgtgttttacacaaacacacacgcccccattattttaaactttatgagctgttttgtaaacagttctaatgcttttgactctgcagcctgtaattattcctttggagggaaggagagagggagagagagaaagagagagaaagagaaagactcaataagaagtaggctttaaaacaaaagtccagtgtctgcagcaaggcagtcctgaccacattatctgcagagcaaccagctaaccacctccgattgatcctgtggcttgagaaagtcaatatgcacagtttggcgtgtggggttttttcttggtttctgtttggtaataaccttgggggttattttcagtgattgcggtgcctgctgaacactgaaagcacgcaattgttctgccctgactg

SEQ ID NO: 44052 - DNA, 1574 bp, Bovine  19866880953301
  misc_feature (1)..(1): n is a, c, g, or t
ntattttgcctagagaatcccatggacagaggagcctggtgggctacggtccatggggtcaccaagagtcggacatgactgaagctacttaactattttgttgtattttgtttcacagtgagagccatcatggtagcgtttgcctcttgagaagaagtggaagcaatgcctcaacagaaggaaaacgtgaaatggccaatgtctcagaatatatcaaatacagaccgagaaacgatggtaatatattataattctagcgaggacttagattattcagtcccaggccctctgttaaattgcttaatcctcaccaccaccctaccaggaagatactattattattctcatttttattgatgtatttattttggctgcattgagttttagttgcagcacacaggatcttcattgccacataccaccttccctctagtagcagtacacaggcatagttgctccttggcatgtgggatcttagatccacgcccaggcatcaaacccacatcccctgcattggaaggagaattcttaaccactgacccaccagggaagtcccttattctcattttacagatgagaaaagctgaccaatttagcttcaagtcaactatagaaaaacaaacaaaacaaaagccatgactctaacatgtttcttgcacctactgactttcattggttcatttaatgctcgttccaattttttttttttcccctctctgtagcgtcttctcagcatgctttagaaagtggagactggagaaatcttcattcttttctgatgcaaagattaattccagtgacacatataatccactgtgtcctaccattttccataatgggatgacaatttttaacttttgtgagacaagttatgcaaataagcacagccaaagagaatgcacaaaataggatgtgagagcaaaggagaatggaacagtgatggtccttccttttctcttacagcagcaatctgctgaaaagaggcctcttgggcaggcagagggtcaggattttgcacagctgctccggatccggctccaagctctcactccccccaggaaagaggccaagagcttcctttaattgactccctcctgcccccattcattaacatgtggccctccaacactgcaatttgggaaagtgcctctccactcagaaggatggagagtcctgcctggatgtttaggaggtggcaatgagcagcaacatcgcgggctggcacctccattcagagcactactggcatatgcctacatgcaattagaaaaaagatattcccagattagctggctcattgacacctgaagcaagatgagaaggtgaggggggacaggagacacatattcagatggtgtgaaagacatatttatccatttatctaaataatattaggagaatctcatccaaaaaaagagaaaaacactgggccttgacaatcccacaaagaaggccacagcaaccgagcagagggcgcctgacgtgtcctatggtcctaacagtcacgagggggagaggccaaagtttgacgctgagctcaggctgaatctgacagtttaagaactgagtttcag

SEQ ID NO: 44053 - DNA, 1347 bp, Bovine  19866880961241
  misc_feature (1)..(1): n is a, c, g, or t
naaacatcagactaaagcaacaataaaaacttgtaaaatgctgaatattttaggtactacatggttctctaatacatacaaacacccaaaaggcaatttagatccaactttactccattaaaacactgaagttcccagagtatggagtgtaacctgatcgtaactgctatgaagggggagggctgactatacgctaaatcttgccatctgtaggtgcttggctttacacaattccagtttttggtgttttttttttttaaataggttcaaaagtttacagtatatttttctatttactaccagccacaaaattattttatgttatgtcatccttaaacaattctcagagcgatttgggtatatccaatcataaatttgcacaagagctctatctccaaatccattcacattcatattatgaacagtctttaatggtaaagcaaataatacttatttatatatttaggaaaaagactgttgttgtcgttcacttacgaagtcgtgtctgactctgcgaccccatggactgtagtacgccagtcttctctgtccttcactgtctctcagagtatgctcaaacttgtccactgagtcaaggacaccatccaaccatctcatcctgtcatccccttcctctgctctcagtctttcccagaatcagggtcttttccaaagaggattaaacctcccccaaaataattctcccaaagatactacttctagaatgtaacaattattctaactctaagactcctatatgaaaatactgatggcttgcaacccagcaattcacaaagatggtgaactgaaaagaattcatactcaggacctcaattttgttattactaagtgaactctacttatattcaagatgctcactaatttccactcatttcacctgtaatgttcacaagagaaacactgatgctctgtcttccacgactgggactcaggactgcagaactgtcacagtgagttagaccaaacagatctacagtacaattaaacacattaaaacatctgcatatacggagcccatacatggctaataaaaaggccctttcaccaaaccagtaggctgatctgtagttctgatgattttaaattagcaaccactccaaaattcaaaaaaaggccaaatataccactttctaaaattctctcactttgggtctatttctctccattacagttatcaaatttcacttgccaaactctatccttaattaatcacaggaaattcccagtaaattgaaatcatcactataaattcagtaggagtaacgcgaaaacatcaaagggtaaaatatagtctttaaaaagaaataagagagcaccaacatacag

SEQ ID NO: 44054 - DNA, 1873 bp, Bovine  19866880994288
  misc_feature (1)..(1): n is a, c, g, or t
nataaagctggcatttgcatttaagcaaaagaagaagtgattattaaaaaaaaagaagaagaaatgattatagcaagtcagtaagtgctgtgatagataggtgaatatagatataaaagagactggaataaacagagaaggtaagaaatagaacttcttttgatctccaagagtatattgatgtcctgccatgcgggaaataataaaaagctactatatttttttcttgagcagtgttaaaagcatgttgtataaatatatccatacatactgtgtcccatacctccctctgagaatggtggtcaggtcttcaactttgtctttgtttattatgagaggaaatgttgatctacagagaaactccaaaagcaacactctaaaagccaaaatgaagatttgtaatagatgctgctggatctttcagggcagttttatcatgaattattcacagaagaaattttgatgattgggtattaggtgtgattctgttaaatatcttaaatcttacggggactgcagtcaaaggctatgaggcatgtaaactgaggaactgttaacaacaaacagccattctaggttgtaagtgtctccactccaggttcctatatgtttaaacattgtgcgtttctaaccaggcttctttaattactgataaataacttacttctatattgtcatatctcaatatcaaaggatgcaaagaaaaggatgctaaggtgttgttgacccatgaaaagaatttctcaaaggcatgaaaactttctgaatactattgctgtgtattcagagaactcacatttttccaagaggcagatgaatgacataaaaattgtaggaaatattggggtttcgctggtggtccagtgattaagactctatgcttccactgcaggcggcacaggttcgatccctggtccgagaactaggatcccacatactgcacagagcaacaaaataaatacatttaaaaatttatatatagaaatatgttgtgaatttacattgtttactttcaaaggcaaaattaccagtgagctaatgaagcttaaggttcagagcctcttcctgcactcatccccgtgaggtgaggttctcgatggggaaactgcatttgcttaaggaagagctttttcctaagtacttcaaataatcacctaaagagatgtccaaagaagtctgaatcttctgcagagctctagcatctgctgtttctcttctcgttctctataacgaagaatgagaatcatacttaattttgtattctttgacttcattttggctgtgctgggtcttcgttgctgtgcaggttttcgggggctacccttggttgtggtacacgggcttctcaccccggtggcttctcttgttgagattctaggctctagggcatgcggacttcagtagtcgtggcgcacgggcttagttgctccaggccatgtggaatctgcccagaccagggatcaaacccatgtctcctgcattggcaggccagttcctatcctctgagccaccaaggaagtcccctaattttgtattcttaaagagagtcccttccctctaattgtatcagcttcaggccctacaaaacagatctttctctaggtactagcaaagtttataatctctactaggtcaaaagcaaaagggtcagtgtccatagtgaaaatgagagcttacacatgtcatgtggggtgctgactgtgctgggcagtcgtttactcacatcatcatcccagttcatccatgcagcaccctgtagagtaggtttatcattaactccattttatagaaggggaacctagagtttaagtgcaagtgttttgactcaaactgaaatccagatctctactgagcttcacacgcagtatcccca

SEQ ID NO: 44055 - DNA, 848 bp, Bovine  19866880994787
  misc_feature (1)..(1): n is a, c, g, or t
nacttcagagaataaatgcacctcttaagggcgactctttggaatggtttacttgtggactaattgggaagaatcagattcagtagtcaaagcctctaaaatccttggatgaagcacagatgctgagctggaaatgcagtgtgctatttgtatattatttcattccatgaagtggcaacttggcagagtcgtatttagaagtgattgtactctctagtccttctcctcagctgtcttttgtgtgggtataatttcctgcagtcgtatcatagacatttatgcgctgctgtttgcataagccttttattggaaataacccagcaaaatagcactcgctgctagctagcttagcacagttgggccttatcgaagatgtaccaccctgcatatcagaacagtgaaatcttcagttaatgttggcgggctgacagccacaggcagcacattctcaggcctgcttgctatccctggcttccctcttgaggaagaaggcccagagagccaagtgacataattctgtgcacacaggtgcctcataaaaacagctggttcaagtgggtgttattacttttcacttcattgacttatactatgtatgcagctgatgccttattgcattaaaaatgtatttaacaaagagattaactattccatgacattttatcaggttttcaaaacctgatatttttggtttaatatagaattacaatgctaatgggctaacaaattaatatcataaatgacctaaactttatttcaccctgcagcttgttaactgtgacaccttcagggtttatctcatttttaatcattttgaattaataaaatatcttggtgcatcaggaaat

SEQ ID NO: 44056 - DNA, 2592 bp, Bovine  19866880996713
  misc_feature (1)..(1): n is a, c, g, or t
ncctgttggacattaagattttatgaaactttgggaatattctgaaggggtaacaacaataaacatctaacttctacattaggggaaaattttaatgttccaaagcatctagcttcagagaaaatctaaaatcaagattctactgggttcatgcacaaaatctactattgtatataagtaaaactcataaaaccaacttaatttgtctaacagatgtttaattcaagtcaaaggaaatttccatttccattccattcaaatataatagaatcagtaaccaccatacagttttcaaactttatcttataacctagcaaatagtttattgtctggactgtaataaaactgccatataaaaggaagaattagaaatctagatcaaacagcctttttagtgacaaagaactcaaagaaactgcaaggtaaactgtttcctccaggcttgattttctctattctaacttaagccaccaattcaataattacaacacagctgtttcttcaaaggtattctttcatagtttaggtgaagaagtcaaagtcttggtattcatataagcacggggaaagtcttttacaagctcacccattcatctgtctgatgaaatttaccccagctcatcacacccatgctttttagtcctttgctcttctcaaggaggtataataaaactgggctccaatgccgtgatattgacagctaacagactacccaccctttaaggtgaagaccacaaaatttcaaatgtatgatttctgctcatgttagaattttatctaactggcaccaaaaccacagctaaaactgtggtttaaagaaagcaaaggcctcaaattaccaattctaaatcaattcagtatttttgaatacttccaaaagcagtaaaggcaaataagtctacagactatggcacaacaatctctcaaccttgcctggagacatatatttaagagatcctccgaaactggactacatacatctatagtatatggttaaaaagccattattaaatgctacatatttcttccttccccttggctctttttggatgggaaggcagaactgtagctgtgactagaacaaaaaaatatatttccactaactgaagaaacccatgattcactcatgaagtagcacacaaggctttgacaaaccaaatatgcaaaactgggttaaaatcacaagtttcaaaattcactgttaatttctcaggttatgtccaatttttctgagtctcaagctagcaatagaagtctcaacagaaatctctgtatcccaacagcaaagaaacatagaaaaaaagaaagggagggagggatgaagagaaggaaggcaagtgctacataatcattatggatatggataattttataaataaatgtttaatttatcccttacatttagatgctatgaacagtggaaaacaatatacatgatttgtgcttcaaaaataaactatgaggtgttaaatggaagcagcctgattttatttgctattttctctttaaggaaattctggcaaggtcagctgactcaaattcaacacctgtccagaaaataacatacatctgtcactttttccaaaatgaaagtgaacggcatagctaaaattccttgtgtgtgtatgtgttcagttgctaagttatgtctgactcttcgtgaccccatggactgtaggtccaccaggctcctctgtccacagaattttccaggcaagaatactgaagtgggttgccatttccttctccaagggatcttcctgacccagggaccgaacctgtctcttgtgtctcctgcattggcaggcagattctttaccctagtaactgacccacatcaaatgccacgcacttgttactatggtggcacaaatgtgcaattctgcttatcgcagactttctccctaaagctaacaactctattattcaggttaagtagaacatacaactttgaactgaaatctaaaggccagtaacaaaagaaggcaagagaatataagttttattaatataaacaatctgcaaccacttctccccactctcaggcatacatacacctacactacagatctctacttctttctcagaagattctagctccaatgctacttcttctaagacatgctaactcaaaagattaacacaaggtatagactggtaacactttcgctgctgctgctgtgttgcttcagtcgtgtccgactctgcaacccaatagacggcagcccaccaggctcctctgtccctgggattctccaggcaagaacactggagtgggttgccatttccttctccaatgcatgaaagtgaaagtgaagtcgctcagtcgtgtccgactctagcgaccccatggactgcagcctaccaggctcctccatccatgggattttccaggcaagagtactggagtggggtgccattgccttctccggcaatactttcgcattagccatctaatcccacaagctgagagtagcttttcagaggaacctgaagtgtcatgctatgcatgctaagtcgcttcagttgtatctgactctttgtgatcctaggactgtcgcccaccaggctcctctgtccattagatgctcc

SEQ ID NO: 44057 - DNA, 904 bp, Bovine  19866881094557
  misc_feature (1)..(1): n is a, c, g, or t
nctagcagtcttcatgagacttcatgtgggagtggaaggcttcttgatctgagaaggtcttcccacaggtgttacagggagagccgtcatcctcccctgtgcgagcgccggacatggctgtcgtgagcagcgtgcgatgcaaaagatttaccacagtacttgcatttgaagggcttctccccccgagtgctgcctgatatgcgtgcggagtatactggaggcagtgaatttctgcagaggacagaaagcacaggaaaaaataaaatgccatccaccaatgaaacaaaggagttaatttcattatgaccgatccttggtgttgttttcttgaaaaattgtgtctgactcttttgcaaccccatggactgtggcccaccaggctccactgtccctgggattctccaggcaagaatactagaatggttgtcatttcctcttccaggggatcttcatgacccagggattgaatccacatttcctacactggcaggtggatcctttaccccggagccacctcagaagccctcattgatcctgatatcacactttagttctccgcagtcaacaaatcctggattttaatgctatagggcactcttggtcaccaggaatagccttaataaaaaaggacatgatggacatgccactggttacaacagtggcccttcaatggctaagatcgtctgggtgtctagtcaaaaatgcaggttgacctgatgagtacgctcttttgggtaagaaggcagctgcatttaagcagatggtactgagatcacactccaggatgatctgcattatggaaggaattgctaacattggccactatctttgcatacatgggtaccttattggtttctttcttttttttttttagttaaacttttagagtaatagtgattcacat

SEQ ID NO: 44058 - DNA, 1071 bp, Bovine  19866881158363
  misc_feature (1)..(1): n is a, c, g, or t
nctctgggtcgtcccagtgcactagccccaagaaaacaaagagagcagataatgtcatccaccactgtctctttgcctagcacttcaacctgttaccaaggacatttaaaaaaaaaagtgtggagcaactaccgtgtgtcaggcactgacgtagtgtttccacacgtgtgtttcgaaagttgatcgtttatcagaaatcaaacaaattggccagattcagaatacctttggtgtttttttgtttgtttttttttatgttttaaagattgttttggccgtggtaatatttttcttcgtggaataacctagaagattacgtagggtgcatttccaataaggatacattttgatgttgaaaaagtgtgcttacatgtgttttgctaatacatgaaactagttaaatatcagtgtctgggcaggtatcatgtctcccccagtgttcttgaggccagatgtgtcaactttatattactgggtcaaaagttctagagaacaggagcagacaggtctcctctgtcccacttcatgcactgaagtgttcgtggccggcgtgctgcttcctgctgcaccgaagaccatgcatcagagtgtttgcagcaagcagttatttttagcagcagacctagaaatttttagttttttcatgttacagtagatattttaaatgtattatcatcccaagaagaataaataatttgagacacgtgtatgcgagtgcatgtgtgcattttgcacgtgtgtgtgagagagagacatccccttaataacaggagagggtagaggcttattcagtctattatcataaagctctgctaatgtagcttcggagtcatgtgaccacagaaaaggctattatctcaatgaaaaggaaactggtttttcaagcaagcaatagaatagaagcaggaagaattttcgagtgttccaccatgctggattgtcaaagggggatctgtctgatcagcagctaaaaaaggatttgtgaggctagtttgtcagctatcgttagaagcaagtgatggaggaggtaagcggcagggtgctcagcatgtgcttaggtttacatcaagg

SEQ ID NO: 44059 - DNA, 1904 bp, Bovine  19866881180118
  misc_feature (1)..(1): n is a, c, g, or t
ntattacagcatcacaaaacgtgatgctgaagaatcatgaaaagtacttattgtctgattccctttgcttgaagttctagaaaaagctaaactaatctgtgatagcagaagagttacagttgttggtggggtgagggggtgggctgaggagagctctgctgggtgatgaccatgctgtgtatctagatgggagcgtcagttccataggtgctttcactggtgtgtgtgtgttactcgctcagtcatgtctgactctttgcgaccccacggactgtagctcaccaggctcctttgtccatggaattctccaggcaagaatactggagtgggttaccatttgcttctccaggggttcttctcaaaccaggctttcgttggtaagaatgcttaactttattcttaacatctgtttattgcaccaaatgtaaatttcaccttgttactctattgaattcttgtttgacttctcatcagacttttggtttaagaaattaatcacaattatataaataccaccatcaggaaaaaccttaaagttagaaacagctttacaaaccatccagcctaattccctaagccttcgtgaagaaaagggttaaaaccgataaactggagtctgctgcagccaccagcctgccctcaggagggggctagacagcttcacccacttgtgcttgccagcagaagatgtgagagagggacaggtttgctaactgtagtatgtcttgaagcgagagcacagaatctggactaagacattttacctggaagttttggcaagagacgttttcttcctgtaatggttttggtcagtgaattctcagcagattttgcgattgcccatgactagctaagaaataatttgtgaaaactccattgtagctgataaaggaccacatggtggtaaagagtgcttgtgacctcaccttagctcaagataatcaaagctttgatgatgttgtgagcagaaaaggacaaataggtggatggatttcacaaaactaccccctgtagtttttatgctgttcctttaaaaaaaagaagtgttctctcatatctgctattgttagtttcctataataacattaatttcctatgatgacctggctgattactgattttagattttaagtgcacaatgaaaatatttaggtggctgttaaaatcattataacttgtaaaagttctttgtgctttggcttttttgatgaggtatcaccaggtgtgtgtgagcgtttgagtgttttaaatttattttcttgatgtctcaatttctctgctggagtcctcatggaagctgtgctcactgaccccctgtgtagtcaccagaggcttggtgagatgttaggactgtgttccagcagagtaaccccgggtcccttccagtgactggaagagagttagtcaacaccccactccatcctgctcgagttatttatgtgtcgagtggttaattaaattaaaactaaaaagtttcataatcagaattatcaaaatttgggggttcttagaaattacagagtttttgtatagataacttttatgtggtaataattccttctgtctagttgtatctataacaacttttgttttttcctatattaaagagtataattttggcttggtttacttagggataatgcagtttgtgtaaaatgatttggtgaggcgaaaactgtcttgatctccaggtactgaaacaattcttctttaacttatctatacacacacacacacaccccaatactgtctgattccacttaaacaaggggtctaaagtagttaaatttcacagaaacagaaagtagattgtgtgtgccagagcctggagggaaggggaaatgggagttgttgtttaatgggtgcagtttcagttttgcaagataaaaaggtcgagagcacta

SEQ ID NO: 44060 - DNA, 1118 bp, Bovine  19866881263403
  misc_feature (1)..(1): n is a, c, g, or t
nctctccgcatctttttaaatcgggctgctccaggtcgtagatgcacctcatggcatcttttagatgtggcttgcaggaccttcttcaccgtggcatgcaagatctagctccccgaccagggactgaacccaggcgccctgctttgggatcttgaagtctaacccactggaccaccagggaagtccctctctgtatttttatataatctattccaccttcgagtctagaataaaccacgtgagccaagacatgaggaagtggactgactgactacccgggagagtcataggcccactccaggaaccacataagactcagtagtcaccagaacttgccagttggagacctgatcagagattcttaagtctagaataggacagaaaaagcacaaagacagcccaagagcatacttgctttgggctaccttcctgcgctccttagcaattaaacttgattatagccgacagctcccattacaattatctgaagacgatagcaagagcctcctgtcaggaagctattaataacccgaaagccttgtcttctttctccctgtagtcactctttactttctgggggagattacagaccctgcagatccaatgaagcacagagtccgggcatgcctatggagagttgggacagagggtgggtgactcaggagaggtgctgcccagacaagaaaccctgatataaaggaaccatgtatgtgcctctgcccacccactcagggccagcctaacacatgctgacccaagcaggggcagtcagttcagcaacctgtccagaataaccccaaggatgctgtgccctgccagccacaacgaaagctcacaccactctcttcccaagcagaattaattttatttttaataatgacagcccactttgagtgtttaactgcatgccaggccaggtcctgttttaagtgcgtcacaggttaactcacaaaagaggtgttagtcagtcagtcatgtcctactgtttgtgatctcatggactgtagccccccaggctctttggctcctctgtctgtggaattctccaggcaagaatactggagtggatagccattcccctctccaggggatcttccgacccagggatcaaacccaaa

SEQ ID NO: 44061 - DNA, 1528 bp, Bovine  19866881327398
  misc_feature (1)..(1): n is a, c, g, or t
ntgtaggagtcgtttacactgaaatgtgacatctacgttttgaaatctaaactcctaccttctcttgatgagatcgtggctgcctccaacattcctgggaggaagggggtaggggcgcagctaagagcagaaacttctctcttcccacagacagctcttcaccgtttgccacgggctgaacttcagaaacactcaaggaaaatcattttcctttctactcgtgtaaattagcacgcaagcccatagataaaggtggcttttttgaatcactcgccgccttcacagacatctctttgtgaaaagcgctgggtaccagggggctgcactctgtcattgattatttttattgattatttttattggcttctagttaattgcacatataatgtccatatagctcaaacagctcattaacaattttgctttgaaatgttttcaatttggggccatttcagtacctccttcttctgttcttctgtgcatttcttttccagttctctgaactattttatagaactaattactttgatagcagtttaaagcagaaaatggctatagttgttacaatacttttaaagagctatctggagataaagtaatcgtttaaaatcttataccaacttaaaaaaattccatcagacttctaaggaattttgataatctgaaatacaaaataggaatttgaaatattagcaactccctgtctgcaggaagccaacattttaaatattgcactttttgaatttctttgaactgagagagggatcactgggggaaaaaaaagaccccaaaccaattaaacttgcttaaagtatgaaaatctagactacaaatacatatctaatacaaagagaattatttcaatatatagcaaaattgactaactttttttcagaactttttgtgtgatattatactaatgtacttaaaaatgacacctggtacagttttctgaagcacaagattagagaactattatttttagacaatgaatttttcctgtaattgggctgtagggaagaaggaagaaaaaaaacaaaaacaaaaaccagtattagaagttggagtcctgattcattggctcagtttcttcccagaagtgattatgaggtgtccatttcaccatatccaggagattcactaaaccactactcctaatcagttaaacccagatacataatcaacactgaaactttcaacaatggcaagtggccccaccggggcaaagcttccctctggcaccataaaatttttaatagtgccaattattgcaaggcaatttttttcattaaaaattttttttttctcttcgttaatccaaccagactcacgtctggaaatctggattacttcagctgcgtagattttgaagaccctggagacgttattaaggtagtttaccttctcttaaactgaattgagtcacaaaagtaaaacctaagaaactgtaaaggtgttgaatcacatgttatccaccttgggctggtaacacaccttctgtgagacatttccccaatgagcctgggct

SEQ ID NO: 44062 - DNA, 684 bp, Bovine  19866881364287
  misc_feature (1)..(1): n is a, c, g, or t
nagcccttgcacttgtgaattcgaagcttgccagacgtgtcctcgacgcactgccacttctgcaagagccaacgtgagagccagttacacacccacatcaggtgtttctgattaaggactgctgcttttgtttttagaaccctggcaacaccgttaaaaagagcgcatgaaaaaaggccagctttcaagtgaccctggaataagttgactcctgctctcttagttctttccttcactgcgggcgaatacagatgaccacgaaatcacaggaaatcagaactacctcagtgacaccagagccaagaattgatacataaatcctccagcatccagactaaacagtcttgaatgaaacatggaaaagcccttccttaactcaccaagcctcagagcacagctgtcagggctgttttcaccagacccgtcttttttctggaaaaaacaaacttggctgctttgttctctgcccttgaatttctaattcgaggccagtaagagtggcatatgaggaagacagaaatgaatttaacctgagtccatcatggcgagccaaatttcatacacggcagacaagaacatttgcttctcttagctcaggcggtaaagaatccgcctgcaatggaggagacttgggttcgatccctgcgtcagagggatcccggagaagggaatggcaacccactc

SEQ ID NO: 44063 - DNA, 1443 bp, Bovine  19866881401895
  misc_feature (1)..(1): n is a, c, g, or t
ncctctcttgttctgagagactggctgtttgcacagttgtggttcacacaaagagcagcttcagatgcaggaagcccccatcattttactttcccttcattttgttaaagcaaatgagctttggaaccaagtcctggttcgattccctgctacttttgttaacctgagaaagttagctttgctaagcctcagttttctcacctgtgaaatgggaatgataaacctatttcccagaagagctgagctaattaaatgagtagatgtgaacaaaacacttagcacagtccctgacccgtggtaaatactgaattttcactattaaacaatgtttataggcttccctggtggctcagacagtaaagaatctgtttgcaatgcaggagacccgggttcaatccctgaatcgggaagatcccctggaaaaggaaatggcaacccactccagtattcttgcctggagaattccatggacagaggagtctggtgggctacagtccatagggtctcaaagagtcagatatgactgagtgactgactttcataggcttatcagctaaggagaaagttcaaacacgttatagtctgatggagaggtcaaatgaaaaacaattctcagtgtgaaaagcatagatatattctagcatagatatgttctttgggagtgtgaagtggcagcgtcttatgatccagggagttggggaagacttcaaagagaaggtaatgtactttatgggtccccaaagggaagtatgggcactgcttagatctctatagattaaatataggctcaaaccacctgttttagaacaataggactcacttccctatagttagcaaaaattatgcctgtacctatattgatttgtctataatgaacagctttactgataaacatgtatattgtagtagacttgcttgtaattccagcaaatccaataaattgatgatatctatatgtgaggttaggaatgagaaaaattcagagactagatatgtaagtaatcaatataataccctagtaaattctagagataaaatgtgttgaaattatgattcttcatcactgcacgtaacacattagtgactatatttaatagcctaattagcagtaaaattttatgagttaacatcaccatgagaacattcccttctacattactgagttttatctgtaaatttgtaacatgaccacaatcatctcgaggtatttttacacattttattcaatgaacctaaatgaacttgcactaattagattttcactgccagtcttggttttataagtttgaacccatacaccttcagagaactcgtgtggtctgggggtggtgcacacttgaaatcgctttacaaacacagagatgtaccagagagaaaaattctttagctgtgtctgaagtctttcctaaatgggtatttcacaacgtttaacgtgaactattt

SEQ ID NO: 44064 - DNA, 1873 bp, Bovine  19866881406432
  misc_feature (1)..(1): n is a, c, g, or t
ntgcctaaaggctggatatgactggatcaggctcagcggtagcctgtttttaatctttgataactaaatatgagggatgatagtcaaatttgctttaaaatggatttttcaaagtaaaaccttaaagtttgatggtagaggttgttttgtgtgtttttttttttttcaaataggcaaaaataagccagattaagaaaagttatataagaatcaactgtattactggactttttccctccaggattgcaggcaacttgaaaaatgtgtataaacatacatgtttgtcagccctattaaagcaactcttgccttctaaaaataatggaaaaaggatttgaggggaatcatggcgacgctattgtcatcttatgccatcacagttgtttctgactgaggtctgtgctgtgtttcagctatataatatgcttgtggaaacgggtgagctggagaacacttacatcatctataccgccgaccacggttaccatatcgggcaatttggactggtcaaggggaaatccatgccatatgactttgatatccgtgtgcctttctttattcgtgggccaagtgtagagccaggatccatgtacgtatttctctgtttccaacattcaactgtcatagctcgtgtatgtctgagataattcgattaccaatctcagggtctggtttcctttagtccaaacaaaaaagggtgagtgtaggttcataatttagaagacaaaacctcccgcctgccccacccctcccccagtcctgccacatgctaaattaatgtctactctttcaagagaaaggaaaaataactgtatcaatgattagctctctcaaaccgaccagaatccatgagactgtgaacacagacatagagtgtgattttaggtatgtcatccttaccttcttcgaatctttttttaaaatgataaccagtgccatcctcttggttgcttttttaaaaaaactattactgaagaatttttaaaggaaattaaatgttaagaactttaaagtttaaataattttagatacattttatttaattaaaattatttaaatgaactttaaatgaattttaagaaaagaagcctgaaggactgaaattccatttctgtcatcttaagtcactgcatccctttgcatgtcagtattcccatcataaatggattttgtatgccctgccagcacatcataatgtgtagtgtaaaatgagatcctttacatgaatcagttaccgaaagcgtgaaagaaaagagtgcaagtagaattcaaaacctgggatgacccttcaagtgcatccagtctggacccctgatttcacaatgaagaagctgcacagacagggtacgcacgcccctctcagagttcccccatcctggatgtgacagcagtggggcccagatgccagataatctgagtctcatctatgtggcttgtctgctgctgcattccagtgcatgctggggaggaagtgatggcaataagaagggccgctttggagaatgttattatgtctttccctggcttcccggatggctcagcaggtgaagaatccacctgcgatgcaggagacacaggaaacgggggtttgatccctggttcaggaagatcccctggaagaggaaatggcaacccactccagtattcttgcctgaaaaaaatcccatggacagaggagcctggtgagctacagtccacagggttacaaagagttggacacgactgggtgacacatgcaaaggagtcatgtgcacacatgcattgtctccagatcgctggaaactcctggggaagcactggatctagagtcggaaggctttatgtttgaaaggctaggcagcatgcatttaattcaagtataaaaaccttgtgt

SEQ ID NO: 44065 - DNA, 640 bp, Bovine  19866881957262
  misc_feature (1)..(1): n is a, c, g, or t
naggtagacattaaggactgacaaagtagaagtttgtatagtatggcacgttacagagaggcttttgtacaggcttcaaatttagctttcctttgaatattcactggtttatgaaacgtggtttgcaaaaccttgtcaagattcgtcttactacaaaaaagaacagactttctggggcctgaagggatttgtacttgaagatactccagtcagcagagggtcatgttgagcattctgcagacagaactgtttcaaatctgcagctgcctgggaaaccttcactcgattgagcccggcctccagccggagctgttgaaccacttttttcatagccgcgatgctggatgaaccagacatggcgcactggaaaggatggcagatctgcgggccgtcggcagctctgcggtgggtccgctgggccagtccgcggggctgggggtctagattctcatttttaaagatgctttaatgtaaacattgtatcccctaaatagagtttgtataagtctacctttattatatagaaatgcaagttaaaaaacaacaacaaggttttatatttgaaaagacatctaaaaatctccattgagtcatctctatttgtcatctctatttgtgtaatggaatcgatgaacgatga

SEQ ID NO: 44066 - DNA, 1515 bp, Bovine  19866882029624
  misc_feature (1)..(1): n is a, c, g, or t
nctgtctgtacctctttttagagttacttaacaggcctgcgttgtttatgaacacataatctggttcctttatgttagaaagaggcaaatctgactaaccctcaatcctggcattgactcataccaaaattaacacttttatgccttttgatcagggcttccctggtggcttggtggtaaagaatctgcctgccaatgcaggagattctagttctatccctggagtgggaaaatctcacggagaaggaaatgcaagcccactccagtatttctgcctgggaaatctcatggacaggggagcctggcaggttatagtccatggggactgcaaagagtcaggtatgacttagcaactaaacaacgacaacagcgtaccttttgaccaatatagcaaatcaaacaactgtcctttccaaaggggttggagctgttggtatcctgcataaggaggtactgagaaagggtggaggggaaagagagaaaggtaagatacttgctgtggacttcctgtgtgccaagacagtgctggcatttccactcccgtgccaactctttaatccccacaagagtggtatgaggcaataggcctgattcttatctcactttacagaagagaaaactaagaaggtaaaccacttgcccaaggatgctcagggagcaagaagcaggtttgggacttaagtccaggtcttcctgagcctggattcttactcactatattgtccagataccacttgtaattaacttctcaataaccaggcctagctcactcccatcctctccttagattgtccatgttgttttgtgagagctgttagatttgtatatgtatataaatgaagagtttccaaatatgtagttatctccttaataacagtattccttttaaatttcccttttccccaacattacagcgctctgcccacagggaactctggagacagcttttgttcttgtggcaagttttaacccaagccacaaccagcctcctgtatctccatcccaatccaccaagtgttctcttctactggtggagaaaaagtgatttctcattgtttaaaatcatgctgttttccccaaaaacttgtgtagattataacccctaaaaaatgtttcttagtcaatgcatttgtctgctttggagttacaattacagtaattaatgtagaagctgaaaagttgattttattgtggctgagagagttccctactgagaccctagatcttagaagtattttctattctggaatcattttttaaatgtagatactttataatactttttatttctatttctctttctttataattctcaagaagactttttttctttgtctcttcttgtgtggtggctccacagctcagggtcaccatagacaagagaagctaagctgattcaattcactaccatccgctgtggagggaacacttgggctgtcgagctcaggaattcacatccttaacggcaatgaagacctgagactcactcaccagctgataacctataggacagga

SEQ ID NO: 44067 - DNA, 736 bp, Bovine  19866882101841
  misc_feature (1)..(1): n is a, c, g, or t
nttaaaggtgaagttagccagtctccgtgggcttacattgcttctcccgctgcccatgcccccgttcccttctccaggggatcttccccaacctggggatcgaacccagatctccattacaggcacattctttatcgtctgagcccccagggaagcctgtatagttgatttagttggtgacataaagtcatttaagagtactttatagcagcagtataataacctaacagagtctcatgaaataatttggaggacttttctcagtctggctacgcagcccaattgatgtgaagcaggcatcctgttttcccgtagaaagatcacaggctcactgccgtcttcttcttttctcgtcatgaatcatctttgtcttagtgctaagaagtaccttccagagtttgatctgcttcctggacatgtgaggtgttgagagggtctgtgagaagggtggtgccgagtcatgggagactttctctgaagcattaaaactagtcttgttgtaatccccacattcagcagacagaagtgggagttaagacttgtcaattcatactgagaacagcagaatggaaagagatgacttgaggttgcatgacataacctgaataaatcaagagaggaaaatggagttgaaatatttcctgtgtggctggtttgttttgcctttagcgctggtgagaatttagcattcagcactgttatccctgtgtttcgtctaagtgacatttaaagatat

SEQ ID NO: 44068 - DNA, 1178 bp, Bovine  19866880134741
  misc_feature (1)..(1): n is a, c, g, or t
ntcaaactgcttgccatagatagacgcacccacctcgacctgtcccctgttgggtcacctccctggatcataaagtctttgatgattctgtggaatttggtgccattgtagtaacctcgatgagccaattcagcaaagttcttacaggtctttggagcatccttccagtacagctccagcacgatgatccccatgctggtctccaggtacacgttgggcggctgccaagagtctggaggaatcgccgccatggcgaggctggcggaaaacctactttcttcaatttaagtctgaatttggcaataaggagttcatggtctgagccacagtcagctcctggtcttgtttttgttgactgtatagagcttctctatctttggctgcaaatcaatctgatttcggtgttgaccatctggtgatgtccatgtatagagtcttctcttgtgttgttggaagagggtgtttgtcatgaccagtgcattttcttggcaaaactctatcagtctttgccctgcttcattccatattccaaggccaaatttgcctgttactccaagtgtttcttgacttcctacttttgcattccagtcccctataatgaaaaggacatcttttttgggtgttagttctaaaaggtcttggaggtcttcatagaaccgttcaacttcagcttcttcagtgttactggttgggttgtaggcttggattaccgtgatattgaatggtttgccttggaaacgaaatgacattctgtcgtttttgagattgcatccaagtactgcattttgaactcttttggtgaccatgatggctactccatttcttctgagggattcctgcccacagtagtagatataatggtcatcgaagttaaattcacccattccagtccattttagttcgctgattcctagaatattgatgttcactcttgccttctatttgaccatttccaatttgccttatttcatggacttgacattccaggttcctatgcaatattgctctttacagcatcgtaacttgcttccatcaccagtaacatccacaagtgggtgttgtttttgctttggctccaacccttcattctttctggagttatttctccactgatctctggtagcatattgggcacctactgacctgaggagttcctctttcagtatcctatcattttg

SEQ ID NO: 44069 - DNA, 1537 bp, Bovine  19866880415588
  misc_feature (1)..(1): n is a, c, g, or t
ntgagttgctcagggcccatgactgctcactgcccctgagagctgtggtcagggggactagtggttgccccttctacttatccaaacttcggggctcagggggcatgggtcagtgcagaccggcaatgccaggacagaggggcctggcactgagcctcagcctgccaagtgacagcaggcctgggtctttccccgtctagtacttcgtctttgacttccacgtctctcctgatgtcatgtttgacaagatcatcaagatctcggtgagtggggagcagtgcccagcaggtggggctcttagctcaaactgtactttagtgcagccttgaaaagggcaccctctctgggcaggccagccataggacggcacagccataaaaagatgcacagccagccaagcagggcacaggctggagttgggcccctctcactcccttagccacatcattctgtgcagtgtacaacatgctcacatgtacctggaagccagcaaaacactggcgaggcagaaggggctgatgctaagcctcagacagatacccctgccctgccagacaccctcctgcttgacctgaaactcacttccccataaagagttgggggggggtgccctctatcagtcagcccttccctgccccacggcctcagccccatcccacctgatcgacggctggtggttctgcccggaaggtgattcactccaagaacctgctgcgcagtggcaccctggtggggtccttcaaaatggacgtgggaaccgtgtactcccagccgggtgagtagctgcgtggctgggtcagtattggtgcacacagctccaggagcatgggtcatacatgcagcccctaacacatctcacagaagcaaatggggacagagccttgctgggaacaggtgtgaactgtagttgaaattgaaagaggagtggggggaagaggaaagttctgagtctgggatattccagggcccacacaaaatcagaggacaatgtgccctttgtataggctgtgctcgcagtcaacctgaaggggcagacccatcctagattagcctcctcctctgatatctggtctttcctccaccctgtcctgggtcctaggagctttggggggacactacttgtccctgtctctaggaggcttttggtctgcaattggagacagacagtaagtagatagtcgcaggaaataggagatgtacatatggaaaggggccaggatcagcttttctgaggaagtcaaggaaggctgcatggaagaggagacgcaccaacaaaaggattagaagtttgaatagggagccagagggttggggcgtggaacagaagggatgggtgcatccaagataaaagtacagcagccacagagccttgggggtgtgaaacagcaatctgaactattcagagaggggtcaacagctatgcctggcaggagcacagggggaagggtagggtgaacattgggggctagggagagctgcatcaggaggccccacagggggatgcttaaggtcggcagtctttcccccaggcgctggg

SEQ ID NO: 44070 - DNA, 778 bp, Bovine  19866880530645
  misc_feature (1)..(1): n is a, c, g, or t
nacctgcctgagtatgcacatgtgcgtctgtgtctgtgtgtgtgtatgtgttacgagtgtgcacgtggggtgtgtgtgtgtgtacatgtgtgtacttatctccatcctcttctccatcccagtctctctagcccttctccctcccagtgccccccaccctcagtgcttggtgacctgggggcagggggaagtccctaaggcccagcctggccccagcccagcccctctgagctgtactccctcatctctctctcccctcttctcgaggtgacgcgccaaggtgatcaaaggccagcctcgtggcttctgattttgcctcatgttcatcctcaggaccccacgcccagtcccttgcacctcaccccactcccagcctcctgcaccccgataccttctggccggcaaagaagacttgcacataggggtcgaccagatccttgttctcgccagtgaaagccttcttcacattggccatgaggctcgtgttcatgcggggcagcccctctgctcggtagatcttcacgtagaaccgggcccactggcgttcagggggcaccccttcggggagcagcaagttcctgccggcatgaacagctagggctgcggtggccacacctggccgactcctgccccgacatccccatgcctctggggcccaggaccacgggtgaaggacggctgagaaggtccatagcagaactgaagacacccggagtgcagggcacccgctctcttggggggatcctgggcaaatctccccatctccctaagcctcagt

SEQ ID NO: 44071 - DNA, 952 bp, Bovine  19866880543463
  misc_feature (1)..(1): n is a, c, g, or t
nattcttactgtaggctctggacctgtttgtttctcttagacctgcttttcattcctgtggactgtgggcagtagagcatgatgccattggctatcactgccctttgtaatcctctgattgatgacacatcataattcactatagaaaaagcttttgggcttccctggtggctcagtggtaaagagtccatctgccaatgcaggatacatgggttcgatccctggttccaggaagatcccacacgctgcagagcaactaagctggtgtgcctcaactattgagcctgtgctctagagcccaggagctgaaactaccgaaacccgcgtgccctagggcccgtgctctgcaacgagagaagcccctgcaatgagaagccatgcgccacaactacagagtagcccccaccggccatagccagagaaaagtcctcgcagcaatcaggacccagcacggccaaaaaagtaattaaaaaaaaaaaaaaagagctttgaaaaaagaaaaagctttttctgcttatcagttcccagaaaacagcatgcctgtttctcttggcaaagggtaaaggttatttttcaaataaatgttaacttaatcagggaattttaaagattacccactttgtattaaagatttggatttcaaaaaaggtaaattgttggttactgatctactgatgtttgtttgttctaaattctgcattttgtctagaaggttctccaattgctacagatgtagtatggtcagaaacagacaaatacaacaagccaataatcaacttggtgtacaaccactttgcaaccaagtggctccttattcgtagctgcatgaaaacaggaaaagcaggaggccagggaggtgggcttctcaggaccctctgagggtttgtggtcacagctgagctttcccatcactggattcatggcagtcgtaatgatacgcacccgcaattta

SEQ ID NO: 44072 - DNA, 1780 bp, Bovine  19866880587696
  misc_feature (1)..(1): n is a, c, g, or t
nccctgggttgggaagatcctttggagaaaggaaaggctacccactccagtattctggcctggagaattccatggactgtatagtctatggggtcacaaagagtcggacaagactgagcaactttcactttcactagactacaagtcccactgccttcccaggtagtcacctaagcctaataccacccctctgccctcaccaaagagcactttccaagttcccagccctttctcactgattgtcaccagtcctgtgagccagatgactccagcatagacacaggctggtgctgaaagggctccatggacgctagtcctcagcctgggtaccccgccccccaatacatacacacaaaccttctctttggagatgactgacatcccacatatggtgacctgaaccccaagagagatggcaccagataaaatggacacaacttctcagccggaaaggacattttgcatcactgttcaatctccatcttttgcagaggaaagaaacgggagacgccaagagcagaaatgctttgtttctaaggtcacagagcaggaaagaaacagagctctgactggaagatagttttcatccagactgggacacttttgagagtgaaggaagtgctaacagggacaataggcataaaccaggatggcaagtgtaaagcagggtcggaccatagggccaccctatccctgagagaggcctctgagccctgatgtagatgccacatcacaccattcctggttcacttcagctctagacctggtctccagctaagccctgctacccgccagagtgattcacaggcattccatttcaacaatcacacttgaatttggtcctcttttattttctatcctaactaaggccatcacctttcacctggttcccctcacctggaactcttcttaatccttataaccaactggtcaccaagtcctggctattctgcttctgccacttgtcgtctggcccttcctcctctctgactctgctgttgcagcctgtcttcagttcctcctctgatgtctttcctccctttgtatttcataccgaagtcactctggatttgggctgaatctgagactgcacaggtgtgagacatcaagcagagctacctaactggttgctacctggttgcccaccctctaaatgttgtagaatgttccagaacctttctagtgctttttaaccattggcagatctccagggacctcagtgtgcccaaacatatacatcccttcatttgtttagggctcaagagtcatgtgggaaggaactcagcttctctcagatctgtccctgggctgagatggctggaaggcagctggcagcccggaatgcagagaagcacctggagggaggaggatactcacagagaggccaaagtgggtgtggggtctggaagcgagagccaggggcctggatggtgtgtgaggctgcgcctgagtttcaccctccgggagagtctgtgtgggagacagagaggtctgaggggaggaggcaagagctggttgactggggtcccagctgctctgctatgggttccccctccgacaaggtggatggtgacaagtagaaaggacataccagaggtcaggtatttggaggaggaggctgggaaggggggttggccctggcagaggcccactgttggcccagaggccaggctgtggcagaggctggccaagctgcccgtaagtgggcagagtggtcagtggagtagaaagatggtgaaagtgggcagcagcagcttgggttatgtgtaaaacaactcta

SEQ ID NO: 44073 - DNA, 2027 bp, Bovine  19866880643069
  misc_feature (1)..(1): n is a, c, g, or t
nccagaaagccgaagtaaatcctttctgatgaaacaacatcggtcagagccaaaaacatatctctggacttccctggtggtccagtggttaagaatctgcctgccaatgcagggaacaggggtttgatccttggtccgggaagatgccacacgctgtagggtaactaaacctgggcaacacaactgctgaagcctgtgctccaagcctatgctcggcaacaagagaagccactgcagtgagaagcctgtgcagcacagtgagagagcagcccctacttgccacaactagagaaagcctgcatgcagcaacaaagacccagcacagtccgaaaaaagagtatctctataatagaaacagacccacaggtgatccagatagtggagttatctgatagacttttaaataactgtgatttaaatggtcaagaaaatcgattacaagagggagaatttcaccagagaactgcgatctatacaccagaatcaaatggaaattaaagtggcatggatagaattcagcaattaataccctcgaagaacagctaacattttttcattcagccagaaggaagggcacctcaggggcaggtaagtgccctgtgaaacctcacagttggcagcctgcaaacaggatggagggcggggtgtggggctggcagggccagcggcagcattctgtgcaaaaaattcagaggccagttggaaccacagtctgctagaatttgaatgctggatgaagaaatttgaatcttgttccgcaaagagtgaacagtagttcgttctgtttgtgtctctgggtttactttgcctccagggtcagtttagaaaaagtaaaaaaaaaaaaagaaatgatgtaggttgcatttttaagttactttttttaaacattaagaaatcagtatctgaaccaatacttaaaacattttaaattgtttctccatccacaaagagcctcatcttttgggctatttttgtaacactccataacaagcctatattacagtttcggactgtagcattgaacttctaaacaaattttggtattgagcaagacctttttcagctggtttattttgtccttcctttgctgaccttgtaaactacttaattgcgaaatgtggcttgtctcagagtgcctcttaaacattgtattctttaaaatagagattttccattgcacgggagaccaggagccatatcaacatactcgcacaacaaagccgggctcctcacttccacttacttagagacatatggtttttatcagccacttctctcttcttggcagaaaagctggcaagggtttaaattttatttagcaaatagcccatccctctaacaccaagcccccactcgctgttctgtctcttccgctgtcccacctgaccctgcctccttctccagtcccaaagtgtgcccccaatctccttccaggaagacccaatcaactgaatcacccacctgccggggctggtcagtggagatctgaagcaggaaaacagccagaaggcctctgggagttggagaacaagctgagtatgaacggtctcttagaagagggggttcctgaaattagatcagcgggcccagctgggagctgttcctcactgatgcagagaaggggcagctgatgaggacggctcagggcctggagaccactgccatttggggtgtcctacccccacagtgatccagtggggaagcccagtgccactcccttgccacggtctcccccaccctctgctcccgccagttcttacccttctgacatcactgtgagggagtctttgaaactggtagcaaagttcggtgagtcttcattctccctgagcatccttcccccgaggctggctgagcctcaatgacatgtatagggccagaaagaagtgcctgagtgctggtgaggacggccctagactagactagagggttcccgccggcttagcaccctcaccagtgccatatttgttgcaacaactgaccatttctgcctccaaacataccctgaatccatgcacgtttctcta

SEQ ID NO: 44074 - DNA, 1204 bp, Bovine  19866880686019
  misc_feature (1)..(1): n is a, c, g, or t
ntctgatgagccctggccggtggcactctcccagcccctgactgtcccggctgcctcggcttcctcggccccagtgactctcactggcctcaacttcacaacaggtggggaagaacctctcctgacccccggcctttcaatggcttttaactgctcaggtgggagggggagctcagggtgcgagagctgcccagccctcccacagtgtcctgatctgagatactgtggggagctcctccctatttcttggagggtctgcgtgcccagcttcttccccacccctcatcggacagatcttcccttcctgctccatgtccccatcttctaaactttggcagaggctcaaggggcagatgatgctgagccggggcttctccactcccacctcggatgcctttgcccagcatgctctgctgctttgaaccctggctgggaaggcagtgactttgggattgttccagaaagctagccctagggcctcgcagacagcaggcattagcctttcctggacaccctgctcacttctcatttcccttccttctgtcacagagtgcaatgtcacccacgacgggcgcagctactgtgcttgcctctctgggtaccagtggaacgccagcatctgcagccatcgccagccctgtcaaaccaccatcaagcaccggccgtgtggctgtcttgttctgagccctactgaagccgggtactgcgagctgctgccacctggtgaggagggctgggaacttggaaaccaatagccccgagtgaacaaaaccctctctgtgtttttcctctctgagggctgtatctctgccagctggtccaagcccagcggctcctctgggtgagagaaaatgccaggtatcacagcagatcacaggccccgcgcttgggacaggaatagtgagactaaccaacaacagggctctggagacaggtggacaaggaaagtttcctttctggtggagggggaagtcttaggtcagaaagcttccctgtgtggttcctactgacatatagggtcttccaggctggactgcagcagccacactcctccagggacaaaacaggacaattagtgttgggtggggaaggagtgaggagagatgggcttcggaaaatgggggaggagggcgaggctccagggccacaagtttctgttctgggggtcctgtctcctgcctcctgcagtccccgcaaccctgaa

SEQ ID NO: 44075 - DNA, 2039 bp, Bovine  19866880717471
  misc_feature (1)..(1): n is a, c, g, or t
nattgagacagcagttttctgaactgttgtgcagatggagctaatcatcgcagggctcaccaggcattccctaaccactagtgtagacgtttctcagattttactttttatggggaaattcaaggaaagtactgcctatctttgcttgaaagcggttctgtttaaatgttataaaatgtaaacgctatggaatcagaagggagcctggccttttaaagaagtttttggccaaagctagcatttaaaactgctggaaatcagtagggctgttaacatgtaatttttagcgactccaggcaaatggccttttctccacagtggagatgggttttagccaggagggtgcaggcagggcaagcttgtcaggggaggacgtctgtctcctcctgagtgagacgtgaccatgtgggcagggcatcggcaccttggagctctctttgccgctgagtggctccctcagctgtggaggtgcctggaggaaggggcgtccttcccgaccacccccttcagcccaggcacaatgtggacatttttcaccacaggaggttgtgccttctgggaaggggctccttttccattccaaggggaatcaaaaccaccttgcttcaggcctgagagtcaagtggaaataagttttcctttctctagcataaacagacctgtgggagacctttactgaaagcatagatcccattcttcttcactttctttctccaaagcagtggttccagcaggttcctgtaaaagggaaaaaatgcagattcccaagtcaattacctggagattacccaaggtctggtgagctggtcttggctggcagggctgactctgtactatctgatggaaggactcctgcgtaaggggtcttgggttagcactgaatgatcccagaagcaggggctgcagaagggcagcagaaggaccacagagaccccatctcagggctgttggctgagctgataagctggagcaataccccccgtgggggaaagagcagtagcggggcccagactgagggcagtgagctgctggtgggaaggacgttgcattttcaggcctggctctgctccttcccgctcgtgtgacctgggcaggtcgttcaacctccctgagtcttggctcatcagtaaaaaggggagagtaattcctggctcatgtggctccggcatctggtaggtgttcagcattggtggctgttatgttccctgtggtagagaaatttaacttggccccggggccctgggggacaggcttcagggtgtctgcctgtgctgtgggaacaggggagagggtgagcctgtgccccacataactctgcccatacataccctcccccctgccagggaccccgcggccagcctatccaggcatctccctgattcttactctcccagttcagagcgtgacttcctcctcggtccttctcaggtttcaggtttttgttgggtgatatgaggcagattgagatgcctttggggggttccttctaactctttaaatcctgcgcaacgatgagttctgtcctgtgcagactgaggcagggaaaggcgagccccatttgaggcttcacggccctgctgaggacgggatctgggctcacactgactccctggcagctcccggtgcgtccttggtgacatgggacattgtccacatatcagggtcagatttttccctgtgaatcaacaggaaggaagagagacgtgctctccacaagtgttaaatccagagaggcctttcagtccaatcctggctctgccactttccttgtatgactatggacgcattattttagcactgagtctcatttacaaaagagggacaggataaagtggtccctttggggcctttcagtaacggcagagacagcttggtcctaccctgagctatctctaaatttccttgtgaagatccatcctgtcctcatgttttctgggcctttcttgaggttggcttggaagctaaagctccctcctcttaagcgttttagctgtgggactttagatgagtccacaggctgagcctgaagcatgcaaccc

SEQ ID NO: 44076 - DNA, 3215 bp, Bovine  19866880720284
  misc_feature (1)..(1): n is a, c, g, or t
naggcttttgagttcctcttcactttctgccataagggtggtgtcatctgcatatctgaggttattgagatttctcccggcaatcttgattccagcttgtgtttcttccagtccagtgtttctcatgatgtactctgcatagaagttaaataaacagggtgacaatatacagccttgacgaactccttttcctatttggaaccagtctgttgttccatgtccagttctaactgttgcttcctgacctgcatacaaatttctcaagaggcagatcaggtggtctggtattcccatctctttcagaattttccacagtttattgtgatccacacagtcaaaggctttggcatagtttgttattttaaaatcaaagaagacacaccataaaaggagattattacaaagttcaaaagcaatccaggtattattctttctctacccatgacagataatatttctcacatatcttcattatgatatattggcattctgatactactgactaaagaaacaaagctaaagtaatctggattttgcacctgattttctaattagctttctttcattatataattattaaaaagaaaactgttctttattatcctagatctagccaacagcaatactgatgcagaattacaaacatatacatatttcacatgcatatttattcaccattcttctctgttattaaaagctggcattcttctaggatacgagtccttaagagtacaagccagctgtcaggtcacatgtatagaaacaaaacacctcaaaagtcaccttagtcctgtgtactcacattaaatacctgctgatttaagtaatggaaggaaattgaaagggtagagacactactcaaaattttggaggcactttacagaacgcggtagtctccaaatttatcttcataaattcttatttcaccacagcatcaaaagctcttcctcaactatcatgatccttacaaaactactacaatcatattctgatgatccattaggttatacactacacatcaggaagcaaatacaaaagtgtaaggctgacagtgaacctgccttaggaataaagaaatgaagcatggaccaaagtgatgaaggattcagacaaatgtgttatctgactgccacacattagctgtgttgcgttggcggaaactttaacctctctagacctgtttcccccatccacaacagttattaaaacttccattgccaatatgttatgaggattacacaagggttaaatgtgtaaaaagtctaggatggcacataaaaagccttcaattaagcttttctattggttttaaacatttcttgcaaagtcagacaggactgagcaactaagcacagctacccagtttcatccttctccgacactagtcagtcaaactatcctttttggtctgcccttatcttactctccttgatccagaccaaactgtacaggcagcagcaactcaagtcagcaattttgttctcaacttctccagagtttgctcacttatcttctactccttcgctgcattctaccttccttccccttttatggatattcacaacttttcatgcattaaaagtgtttacagggcttccctgatggtccagtgactgagattctgagctcccaatgcagggagcccagggttcgatccttggtcagggaactagatcccatatggtgcaacttcaagatcccacaagccacaataaagacccaatggagccaaacaaatatacaaaatttttaaagtgtttctatatcattaaaatgagttcatatactatctttaaaggccatcaaatctttagaatctaggacttgttgattaattgtttcaaacttattaatgcataatgcttattactctctacacaatatcatgacaacttgttatttggtcagaataatgctttgcaatggcacttgtttactctgtattaaagaaaacacagccactttaaactcctgcttgtttacttgacttccccaaatctttatgttctcctcccctctagctttcagatgaggtgttttttttttaatgttttctctttcttgttcttaaaattcaaaccaaaaaaacctttcaagcaacctcttctctggcgtttttatcagagagacaaaacatctgcttaaacaaattaaatcagtgctgatccactcaggataccaccagccaaagcacaaaaccatttcattccaacagagaagcaggaggaggtgggtgggaaggatcttcaaatggtattaggcaacaaatgacttaatggagaagatgaggactcttccctaccagaaaataaaggacatttctacttttggcacttaacaatttaggagacacggcttgttaagaatgatgtgtatggtggggggcgggggcggggggagatgtactagtaaaatttaagcatactgttctctaattccttagcaatatccttagcaatattatctcatcttggcattttttttcttctactctccaggaagtctgtactctcacactgctgcgcatgtagctgcttcaaaatttagaaccagacctgtctcttcaagacctccaagtcagtctcagtttccactcccaacaaatgtgggagaagaacctctgcctttcaccccaacttattattcttcccaggggtccttggcttttgctactaattttgttttatctaacatttatacctcaacatccatgctcttaactatgaatgccatcgcttccattttttactttaataaataaaatctgtcacttacagaatgctgtgcaagaaactgaggttccctgatagctcagttagtaaagaatccacctgcaatgcaggagaccccagtttgattcctgggtcgggaagatccactggagaagggataggctacccactccagtattcttgggcttcccttgtggtttagctgctaaagaatccgcctgcaatgtgggagacctgggttcaatccctgggttgggaagatcccctggagaagggaaatgctgcccactccagttatcttgcctggagaattccacggactgcatagtccatggggtcgcaaagagtgcaacatgactggaaattagtgcaagaaattagagcaatggtcctcccttcgctatagggccaatcatacactgttaccaaaggtgatagatgacaaagaaaaggggaaagactgagtcctcaggatccaatcaa

SEQ ID NO: 44077 - DNA, 1244 bp, Bovine  19866880750025
  misc_feature (1)..(1): n is a, c, g, or t
ngggctgggcagggaactctcgcgagatcccttggggagttgaggcagagtgggttctggaacccagctccttcccaggtctcctccctcccaacaggcctctaaaagccgctttcccgaggtcatcgagctggtttaatgagatcctatctgtggaaatgtcttgtaaactgtgaagcattataaaaatgctatttgtcatgatttgtgacagacctgggattggaacccgaatctactggctcccgggccagtgcgttaagcccagcaataagaagaggcattagacagtaatttagcattctttatttttagagtcacgctctcagagacacttgctaactagaaaccccattccagcctccctctctctccctacaccgcgttctgcttggtggctggcagggtaggggtggcggggtgccggcggacttctatcttttattccctgattcaaaaaattatttacaaatcttctaagatatctcaggcactttgctggtgctgagcgtgtggtggtgatcaagacaaatatagccctggccttaaggagattggcatctgatggggaggagcgtaatcagtaatcgcttggttaactctgcagttgtttccgtgccggtgctgcgaacagagtgcaggacacagtgacaacgcctaaccaatcctaggggtcagggaggctcctttgagaaggggacatttagcagagacctgaaggatgcacagaagagaatcagacaggagacgagaagggtgtcttttggcaggggagccaccaggcagaaaggatctcaagaaggtgctggcagagttgagaagggcttaagggtggaatgtgtgtcaagggcaagagtcaggaaaagcaagactggaagaggggttggggtttgaacacacggggtgggtgactccatgagggtttatcttcaaagctttcctcagagcaatggacgtcattgaagggtgttatgccgaggaatgacataatcagatttttgtgttcaaggggtcattctgctcctagggtggctggcgaacatgctggacggaggccggcctggctctgtggaggaatgtgaggagactcctgagtaacgagggaggggggaacagtgctgggacagggcagcagtggcgagaaagagctggatgagtttgtgtgacattttcaggtggaatcagcagcactgggggggtccggatgtgggcgggggagttgggtgcggattgccagtggggac

SEQ ID NO: 44078 - DNA, 1317 bp, Bovine  19866880797473
  misc_feature (1)..(1): n is a, c, g, or t
nattaccaaagaagcagtctgcgcaagtgggaggagtaggggccttggagtcagttttggctaccccactcccatcacctctttggtttcttctcactagaaaaagggggtggcaccagctgatctcaaggtcccttcctgctctgacagcctctgggctatgaatagatgaggctggggccccggaggagtctaatgactcaacagctagagaggttaagctttcccagaaaagtgtttccgtttgcgtttgatgaacttagggcccaacaaaggaagggtttcctgtctggaagactagggatgaaggagctggaggaacccttgcagttcctggaggctgtgactaaccaggtgaatgactaactcagaccctgctgaccttcaaccaatcagggctgctcatgaccaccctacgagctggcatcactaaacatgtcttggccatgccagtcccagctggctctgggtttcacggcatatggaggcagaggaagcagccaagaaactggcaggggaaggaacactgggctttgaatcagaagtcccagcttcttgctctaactccactgctcaccagctgcgtgactttgggggagtcctttccccttcctgagcctctatgccttcatctacactaagggatctaactacctgccctggaaacttccctgagctatgaaggctgagacttaagagatgagatgagagcacattgtgaacactaacacaatgaatgaatgaatgagaaattttgtcgtcattctattccagtaggattcctggtcccccaggagacctatttgggtccccaatgtgatcaagtggacacagactgctgcctttgggttttgagtcaagatcagtctgatgtagggccctttccaaccatctgatcacagcccacagagaattttattagacctgagcccatacggatagcttccagccaggtggcatagccagagtgagaggtgacaaaaagccaggaatcattgggtggggcagagtgggcagtgccagtctggggcccccacagaattagggtggtgctctgatgctctctcctcttgccaagaaccttataaataaataatcaccacaaccacactgtctgcctctgcccccagcttttagcatctttcttggtgaggactacaagcactttggagaatggcaggaacgggagaggaggaaggatgatgccctctcatgtctgcacaccttaaacccatcaagagcattctgtgagtgttcctgtgtattactgggtacctgtgctggcactaagagcaaaaagatgggaaccacagggcc

SEQ ID NO: 44079 - DNA, 2317 bp, Bovine  19866880943408
  misc_feature (1)..(1): n is a, c, g, or t
nttccctttacttttactttatgcattggagaaggaaatggcaacccactccagtgttcttgcctggagaatcccagggacaggggagcctggtgggccgccgtccatggggtcgcacagagtcggacacaactaaagcaacttagcagcccagttttatatacgctctttacttatctcctcagaagctctcactcccaatcaggtagtcataggagcaccatggcacagcaggagctttggagaaggcaacacaagcaaaactcttcctttggacacaaggaaaccgaacttaggtcagactgggggcctctacgatatcaccttaaaggtctacaaatgcccagcatggcccgaattgtgacacaaggctgcatcgtggtccagctgaggtgccttacttggccagcaggctcatgaggtaggttgatgtgttggtgtccagtctcaggggaggcaccgtgacgtaggcggctgcgtgggaccagtcctggtggtagtagtgtaagcccgtgagcgtggcgtgtgcagtggtggtctcagccagcacaaccttccctgcaagaagaggggagtccgaccatcaccaggaggccagtgaacctgggggagcattggtcggagcctctcactgggcaggagaaggagctgaagtcagaaaggaagggactagcctgagctcggctgggcattggagaccccagctgcggtcaaggccagagtgctcccgcatcccacgagacagaggcggaaggctgggtccacagcacaggtgagaccctggaggaggtctagctagaggagaggtaggaggcgagatgcggaaggcagtgtggcgggagggctggaaggccctaatttatatccccaggttcgtgactgtgatcttttatgcttgttatcaggcccccactggcaccccaagccaggctgggagtacaagcatggacaaagccttcaggcgtggccaggtgctcagacacacaggtgtcctagggctggtacactgggttcctgaaggggatgtccagctccgacactgtcatttctccaaggactacataggcatttccccctgaaatgtccgctgtaactcatccaggattttatgttggttaccaaggcaaccactagcaaaacccaagagaccaaaaaaaaaaaacaaaacaaaaccaattcatgagttgattaaaaaacttgaaaaatttttatcaatctgaggagaggtgacagacacttctgtaaagctgttatgcatacaaatgtgcagaggaaaacccttattctaaggggccaaccccaggcctgggcaggaagacagcaggaaagagaagggcagggcagtctcagggcctggcctcaggagccagaagggaaagtgcatgaagctgctgggcacccctcacacaagggctaactgcccagcccaccctactaactcaccttgcatcttagcagctgcaataacatcaccggctgagatgctggacacgttgaccagatagatgggacagtgagtctaaacacaggaaacatggtgggaaggagagagcatcaaccccataacaagcatcaagatgaccagacaggattagtcctggcgccagcacttccccctgcatcgctctgcaccctccttaggctgacagtcttctgcacagaatgcaggcctggcagctgcaggctaggggaaccccacaaaacaaggaggggacaggtggtgcctggcaccagagcccacagtgggaatatctgggtaagatgtcaagtgctgaacctcacattttctaccagccaacaccaagactatttacaacttaaaatgagggattttttcctgttcatgaatgtgaagacctaggtacagttgtgtattatgtcccatatctaaaattatgatgcctgccatgtgaaggctgctctatcagcagatagaatgtactctaccccagagaagaaatgttacacaagaggttcagggttcagtctacatcagacaggaccagtcttgcaaatggacactggattataactctgattaacttttcctctactgaactgtgcaaccatggtccatggtttcacttctttgggaatatgtttgagctaaaaaaaggaggaattgcccttttgttgttcagatctttccttactctggggtaagtttccatcaggaagtaattgctagcataattattgttataacaataaaatgatgtccttgtccagcttctagacttataaagggctaatggaaaacttcccaaatgttattctagtgccttcttatcaaattaggaggatagagaatttagga

SEQ ID NO: 44080 - DNA, 772 bp, Bovine  19866881019537
  misc_feature (1)..(1): n is a, c, g, or t
ntctccccggccaccccgcccagtctggcttttctctcagtagccatgatggctgggtgacctcctctgaccctgggcccacgtctccccaacccctcagcttctccccacatcgactctcagccccagcctggcccaggccccatgcccatcccaagtccccaggacttgtcccagtcacctcatctccaaccccagcccggtaaccccccatccccacacctctaatcagcccctaacccacccaggtacgagctgagggtcatcgtgtggaacacggatgaggtggtcttggaagatgacgacttcttcactggggagaagtccagcgacattttcgtgcgggggtgggtgagaggtcccctggatgggaagggggccgagctgggtaagcccaccttcctggaaggcaggagaggagggagagaacggcgaggagggggggtgctgtgggtggagagaggcctctggggaggtggctgaagggccacaggtgatgacccacaggtggctgaagggccagcaggaggacaagcaggacacagacgtccactaccactccctcacgggcgagggcaacttcaactggcgctacctgttccccttcgactacctggctgccgaggagaagatagtcatctccaagaaggagtccatgttctcctgggacgagaccgaatacaagatccccgcacggctcaccctgcagatctgggacgccgaccacttctctgccgatgacttcctgggtgtggggctgggaccagagcag

SEQ ID NO: 44081 - DNA, 1967 bp, Bovine  19866881094140
  misc_feature (1)..(1): n is a, c, g, or t
nttcgggcaccggcgacagcccacgcgggggatgtcctcccagtgtctcagggccagcagtgccacgtgctcttctgtgggcttcctctggcctgtgggtgccagaggtcagctcatatgtgggctcagcagaacaagagacctgtgctgggccaggggctcaagggcatacagaggccccttctccggtctactgatggggaaactgaggctcagagggagatgcaacaacagcccaagctctcaggtgcctcatgggccccggatgggtctgtgtccttgggttttccctgcttggggggaaactgacccgagaatcccgctgggctgcgaggtcagggaagagaagaacctacatcctgtccagcaccttgaaggtgggtggcacaagcttccagcagagacatttgctggttctccatgaagggccacaagggcaaaagggtggggagggccagaacaacctgggtctacactgccctcactctgccttgtaaaagctgagtgaccttgggcaagtcactgaaaccctttgggtctcgttttcctcatctgtagaatggggaagaaccttcctaccccacagggaggctgaggggaagagaaaggggacaagtgggcaagtgcggtgtgggatggggaggaagggcagaggctgagcggacagaaggggggacgctgcggtgatgagcagaggggtggtcctaccacaaggatgtgtgggtccttccatggcctcttgacacccccccatagctgcatgcagcatcccttaccattctcgtcctcgatctcagagggccctgtgaagatgcggttggacaccttcactctcccggggggcccgaagtgggggccgtccactttgccctccttgcagaggcgggtcaggatctggctgggcttcatagggtcccgccagatattgtagccgtgtctgtgggaggagacgcatggcctgggtggggcttggggtgtggctggggcatccccaggtagtaagtggcccctgccagattccttaggttggctgttgccccatgtgagcaagtgagccctgcctcatgctccaggatcagctgagacacgagggctgctggaggctgatccctcctgccctgggctcgggccccacatgctccatgctcctcaaggacgagcatccagtctccccgagtgcagccgcaccatccccctgactatgtccactcctctggaacttcaaagactccctgaagaaactgacaaccagagaggttaaggggctggcccaggggtcacacagcctggaattggcaccagctggccagatctccagtggactcttcctagcacactcctgcctcctcccagcccgcttttctctccctctgtttcctctgtcctggaattctctggctctctccttgtcttggaacctgcagtcctggcccctgaaggctgagcccagagcttgtcggggtggaggcctggctgggacagaaaccatatgtccaccttcccaaatcccatggtttgcatcttgattttgaagtcaaggtgcagtaggcagcccccctgccccaccccgccccacgcacacggagtaggtctgggcgatgccgcaggtggcgcggtgcttgctgtagaagcggttttccaggtcgatcttggtttccccaatgaggtcatcagtgcctaccagatcccagtcgtacacggccaccgtcagcatggattccatggggaagcaggcttcgatgtcaaaggacctggtgcggcggggttgggagaagggttgagggtaggggtggggtagggtggggcaggagggcatctgggctgggaagtccgggcagggtggaggtggggcaccaggaggccttacttcccaaagacggggttgagctgcttggagatgtagttctccttgtcacggatatcagtcttgcctagccggaggcgatgtacgggtcagctttgccgtt

SEQ ID NO: 44082 - DNA, 1572 bp, Bovine  19866881135088
  misc_feature (1)..(1): n is a, c, g, or t
ntttctgattctctgcattctggctccttttgcgcccctgtccaggtcctgaatgagtcagatctggacaacgacaatatgctgtctttctcagagtttgaacacgcaatggccaaatctccagatttcatgaagtaaggtgttctggagtcggggggtgcccagcctagtgggggagacaggaagctccccgcccccagtctccctgagccagcagagcacctcagtcttcccaatgaggtcatgagtttccagggcactttgcagattctttcagaatcagcaatactggaacttctgagaaatgaggtaacctggaaagagacagggcatggagtttcaaaaggcaaagcggagattgcagttcaggcattgcaagcaacgcgggtggtccagactttaggtgctgtccctctccagccagcgcaaagcccactgggctgcaggactgatctggggagtcccctttgccactgttagtcctgctcccctcccactacaacctccagtggccactaggagctggggactggcaccaaacccgggtgggcagacagtgaatatgccagtgatggagctcagaagaactcaggtggaaaggggccgtaagggtcatatctggtccagacacttctggacaattggccatctccatattggctgtgttcaacagttttatttgggtccctccagctgtgggaagtacaccaccactgaaggcagcccatatcaggaggaccagcccggttagggcagtcttctcgcactgaactacatgtttgcctgtgtctgctgttcctgcaccctgttctgcccttggtcatcagccaaggtgacagcaaggacaaatgccccttcaaaatggtttaaccaatcaaaaatgaacaaaaccagctaggcctcatggagcacccggctaggagcccggagtctctgcctctgtcctcagcagctctggtctttgctttacgtgcagccagaaatctctgctttgccaggcatgagaccaaatgtggcctctccacagtggtcaagtttatagctctttggctcccaatgaccctcagtgaatgtccctcggctctgactgaattcccagagaatctgattggccagtccaggcaggtgtctggccctcttccaatcacctggctggaggagatggcccttccttccaacatggctgcccaggggctcttttagagaaagacagtccacacttggagcaccctacttgattctcttcttctataacagcccagcacacaactgaggctggaatctgtctgccttgagtgttttctttgaatcactcccctttctttccactggctccagcaccacaaggttgtgactgccttagcattctggagctgctcaaaggagctttaaagaaggctttggggtggcttggattgctgcaagctgaccattgctcagacaaagggacacagagctgtgaacccaggaagtagaggggattttacaacttcaggcttgaggtggctaatggaattccttctttcagctcctttcggattcatttctggggatgttgacggaacacaaata

SEQ ID NO: 44083 - DNA, 1291 bp, Bovine  19866881212801
  misc_feature (1)..(1): n is a, c, g, or t
nggatgggcacctcaaggagcgctggagggctggtgcaaagcctcctcccctcccctggtgctgtctcctttctccaagggttgggtctgcctgaacaggctggactgggcaggttcccagcaggggaaatggaatctttttgtatctgagggactggggcaggcttacagccccagggattaggtgttaggacaggctgcccctcccagcctcttggggccagggaggagtttaggcctgcagtcactttgggaaggagtcaggcttcccaacttggccctgggaaaggtttggctcactgtgcagttacagaagccctcaggtagcacagaacaacggccaaaagccagccctggctcatctgggggtgacatcagtgactccccaatgggatagcacttgtctccttgaaaaacgcttccctaacgtgtatttataaatgcacagttcattgtgtactaactttgtaccagatctgtatttctccttgaactggctgaccacttcacgtgggcttttgtggttttaagtctcataacaaggacccttgttttagagacggggacttgggcgagagagagctgtttcagcctcatacagttaacgggtggatctaggcccaaacccacctgcttgaacttattttcagaaaaggtagcaggatatatggaaaggtcagacttcagacttttgaatgtcacaggttggatgagttatagatttctcacctataaaatggggataatgatgccaacactgatgaactcacaaaagtaataaataagacataaaagacctggtagatggcagggagtcaataaaagttcttttctgtctcttctccctttctcctctgctgttgtaatgccaaagaagatgaagcttaatagttctatgaagacctacaagaccttttagaactaacaccaaaaaaaaaaaaagatgtcttttttagcacaggggactggaatacaaaaggaggaggtcaggagatatctggagtaacaggcaagtttggccttggaatacaaaacgaagcaggacaaaaggctaagagttttgccaagaaaatgcactggtcatagcaaacaccctcttccaacaacacaagagacaactctacacgtagatatcactatatgattaatactgaaatcagattgattatattcgttgtagccaaagatggagaagctctataccgtcagcaaaaacaagacagggaactgacggtggctcagatcatgaactccttattgcaaaattttcctctgggctgggtgggtgtgg

SEQ ID NO: 44084 - DNA, 965 bp, Bovine  19866881356560
  misc_feature (1)..(1): n is a, c, g, or t
natgttcccccacctcggcttcccttttcacctccagaccctccctctgtccccgagtggtccagccgtgtcctcaccagctcccgcatgcaggacttgagacgctcccggtccagcctggtgcgggatgagtggccctggtccttgtccgcgagggagaggaagcggctggggtagggggtgggagcagagcttagcagagatgacaccttctctgccagcctcccattgccgccccacactggcagcccctccactcactagcaaccagagctcagctcctctaggacgccccgaagtcgacgctcagggtacgacttctcccgttttgatcatctcctgcacgtcattcaggccttcttcctgtgaaccagcagtgtgagccacagcccccctcagcctccccaaacatctccctctttcatcaagaggatgaggggctagtatcctaggacctcccatgagcactatccctggagtgctccgccatcataaggaaaagtgaaagtgaagtcgctcagtcgtgtccgactctttgcgaccccgtggaatgtagcctaccaggctcctctgtccatgggattttccaggcaagagtaggggagtgggttgccatttccttctccaggggatcttcccaacccaggggttgaactctggtctcccgcattgcaagcagacgttttaccttctgggccaccagggaagcccagaaacaccaatttccaggttctgttttcagaacctggaagctgtcatgctcgtgactctttggttcctgaggaagaagccatctctgggtcatgagtctgtggtcctggtggacccacaggggtcggacagagcccaggatcagatgcaagggggcagcaggtagagagagagggattggccagacgcctccagggaaacccaagactagatgggccacaattcccagactccactactgggaagccctcaga

SEQ ID NO: 44085 - DNA, 2078 bp, Bovine  19866881357676
  misc_feature (1)..(1): n is a, c, g, or t
ntgcacaactggtgagctcttggggctgaggttctgctgctggcagagagaagggtggggttggcatggggcaatgtctgaggtaccagatgcactgggaggatttggaagaataccaggtgggtagatcaggcaggagattctgggcagtggtgggagcttcctgaggcaggtgggaggggtgggaaaactctcactgtggtccctgccttcgctaaacctacatccatgtgacccagactggctctcagagggcccctccccatttgtttcctgctccagatcccagggctttcgccttgtctccgatcctttctgtaggcctgtaccactgtgctccctcccaaggccatcagagacggggcactgtttcctcctctgccaccacctcgggcgtctgctgctgagggctgggagcctccattccctggttgttcaatgagagcatcagcttttcctcccaacccccgaagtttcccactccccagagggccagggcagggctggatggagtgggcaagtcacctgtctgtggtttgtttcaggccttgaccttcttgaccaggaatgaaatcctgtggtgagtagagggggtcccctttccctccccttggaactgaaatcttaccctggtacagcctcactctggtccctgaatgtggtccctgcccagagctacaaagtcctggagacgaggctgtcagcagacaggcagagacagaccccagtcctggagggtccaaggtcacgattcccagggccctactacattgaaatgtcagattgtaggttgctatgggatccatggcgaggtttcttcatagaaccgcagaggtggacagggccttcctgggatgatgaggacaaggaggagaggacttaggaaacaggtctgcagtacatacagcgaggtggtcctctatctgggtaaagctgatgccccactgaatctctcttagtcctcccttccctcccaagcttcgcttcactgcctcccagcatggtgggtgtaacagtgcgcagtccattccctgttcttaagctggtgatggccagagaggaaggctccgggccaagacagccaacacaaggatccctcatgggaccgcagagagggtagacagcatgagagatgtgagagcactcagcctgggccaggtgctcatcagaaactcgttagaggaggaaagggggtctctagggcattgttggtggggtgaagggaggttggagtgaggagactgccctgagacccacagaaccctctcgcctctttgtctctgctggacacaccctccccagacaacacccagcctggaagctgcacttcccactcagggtcccaggcagggcaatgattctgccccaagcatgagactctcccggcacgggggtggggggctgatggatgtccagggcacagtaagtgatggagaccagggacagtcaccagattacatcgctttccttttaaaacgagtgtttgctcattttagaaataaagaaaaatataacaaaactctacatcctactacttttacatctcattgatattttctaaaaaaggaacacttgcataaaaatgaaataaaaattgaaaagtaatatgtgagcatggccagaaaattcaaatagcataaatatcctaaaagaaaagtaagtgtccctctccttcccaggccttctccctgatgataaccctgttcacagttggtttctcatcaaggcttccataaaaattttcatagatagatctaaataaatatccttcaaaaattttatctcattcacactgcagcatttaccaatttatagtgtagcattatactgttctggaccttttttctttttaagttttcatgttgtctatctttacataaagcacatagagatatgtctcattctatgactatgggacattctttcctatagaggaaatatcattcattttacaacctccccccataacatacacttaagttctttatgacttttagttctatcaataacgttatagtaaacatttatgtaaaaatagcttatttaattgataagcttttgaattgtggtgctgcaga

SEQ ID NO: 44086 - DNA, 1540 bp, Bovine  19866881368647
  misc_feature (1)..(1): n is a, c, g, or t
nccatacactccacaaaaatggggctctaccatggaactgggcgatcatgctcatgggtcacaaatgtaagagaatgagcacatagacctggtcaaggtgtgccccctgagagctaaataaatatgactgtgtgcatatgcctgcacatgtgtgcgtacacacacacacacacacacacacacacacacacgcaagggcacacctcatacaccccatccagagcagcaggagctgaatcgaatccagattccaggcagaaccttaggaggttctgcagaggagagggcttctcttctattgggatgcaaatatcttggcattcagagaaggtgggagagcagggagcagaggaggagtgtggcagagagaagaatcacgaagacacgtcacctttctaaagctcctttctttgagatgcacacccgcctccgggggcgggatgctttgtgcctgtgtgcccttggcatatggaagcccgatgttccaggacacggttccccccagcttctggacttatgcctctcccagcgaacatttattgagcacttgtcatgggtcaggggcactgtaggtttttggggtaaaggagaactcacattagcagaggagatgacctaatgtggacctccagctggatgaagggtcataatccttttgtggggcagagatgctgggtaggcgggtggtcggggaagacaacagggagcctggctctgtgagtgagggtgagagccccctggttgggcggagatgcatccttccaggtagagaaacgtgtgtgaaagctcggagagcatgcaggtccccagggatgtaagtgacatgtccagggcatagggcacctctgggaaagtgagaggagggggtgcaccgtggggatctgatgatgaaggatcactctgtcatcagtgtggacgacaggctgcagggggtgagcctgggtctagggcaggggtctccatcctccgggatctaatgcttgatgatctgaggtggaggtgatacaataataatagaaataaagtgcacagtaaatgaaatgcgctggaatcagtccgaaccgccccaccccccgcaactgtctgtggaaaaattgtcttccatgaaactagtacctggtgctataaagtttggggaccgctggtcaaggggacttactatgagatccgaggctgcccagttaagcaaagaggagggcttgtagccctgggagggtggagggccatgggaaatccctaaggagggagcagaagcaggactggcagagaggcccgatgtggcaattagtagggtgaggcctggtttctgggggattctatagatggaggtggtgttaaccaggacaaggagagccaggaggaacagcaggctagttttggttgtgctgagtctgatgcccccggcaagccctcggtggacaccttggatgtgtggatctgtggccagaagaaagatcggagctggagacacggatctgggtgtcctttggtgttggacgtctaatgtgaatgagctctcccagaggcagtgggtccccga

SEQ ID NO: 44087 - DNA, 1600 bp, Bovine  19866881374862
  misc_feature (1)..(1): n is a, c, g, or t
nttggagcttgaaatccggtacctgggtgggaaaggctgtgtgggcgagtgttaatgtccacgcctgcagtaccaggcccttggacgtcaggtcctggtgttgattttgttgctactttaccgagagagaaagccacctctctggtgggcctcaattacatactcagaggtttactttctccacacaggtggtcagagaacatggaaagcctgggtgcagggctcctgcagtaccatgggtgtagtagaggctgtgggtgggatgaaatgcctgtcaatcttgcattgcatgggcaatggcagagcctcaggaggccagagttccgccttttgtccataatctacaggcccagcctaagaagaggctgtcatgaaatcatttttaaattccctatgacagggggctctgttgagaaaatacactcttccacccaggcctctgcagctcttgggtcgcagggactgttactcatggtgctagttccatttctctgaggctactcacccaggaagcccttggatatcatctgctgcagcatttccaggcttccacctgcaaaccgctccccaaactctttgccgagattttctgccacgtgttttgcgacatccacaccaacttcatctaccagtgtagcggcgcccacagggaagccgaagctggtggtcagggagtccagcttcttagggccgactccttcctggatgggcagcaaacccaggacctcaggggaaggctgtcccagactcccctaagggcaccccgtgctactctcagaatcagcctggtgtagcgcccacttctcttctgggcactgccaggtcagacccaggactgggactgatacacacagggaagcacaaagaggctggagagccccaggagaaagtgtgaacctttcctaacctatggcattcaaaggaggtctagacatgaacaaattattcatatctttcttgtttgcaatcctgaatctcaagaataccgagattgcatgccagatgtggtaaggttccctaccctgagagaggagacatcaccagggagcagggctgcagcagcccgtgatccctgagtctaatgggagcccggcgagtgtggccagccctttctgccactgaccaacctggatggctaccagaggggtctgtgtgtggcagaagcaggtacagcaccaatcagaccaaacgggtcctgttctggatgaagatgcagaaacagcacatagagcatgtcgggaggcctcggggtgactggagcagggaggacgcttggggagcagagctaaaattctgcattttcgcccatgacgtcccaacagtgggtggaatggaagggcagcaaaaggccttcctggagaagagccagcagtcagtgtattagaaggaagtctgctcttcatcttgacattaccagtctggaaaactagtttcaggagtggaagatgcctccaacattctgagagtgataccaacctggagaattctgatgacttcagacatcatgggtgtgaggcacctggtggtatagaagccaggtccatcctgcaaagggagagaacacgagctcatgggcccctggctgagggcactgcccgag

SEQ ID NO: 44088 - DNA, 1047 bp, Bovine  19866881418839
  misc_feature (1)..(1): n is a, c, g, or t
ngcctgggcatccctttgtttctatgtctttgggttgcgcaatactgaaagaatcccggcaggagatattttctttgagggtctgtacaaaaagggttaatgaggcagattgtggtacacaccaaatgtctctagtcggggtttaaggtttgacttgtagtggtatgagggtgtggatttttttaatcattagtttcaaatctactttaaaatcggaatcaaaggtttgcaaccagaaacccggggcttcacagaccagtacgaaaaccactggaccctaactctaaccctgactttagtcaccaccacccccgccccgcccccactcatcagccatgccctcgctcatccctgcagctctaaagaaaagccagtcaccagcatccagtgcccaagacttcctgcacccatccccctgcctacagcccccactggctctgtgccatctgtccctgggcacacctgggtactgcagggggatgtcaatcttgggcccgatgacgtagtggccctcctccagggtgtgggctgtcaccgtggtccactggcggcaggaatgaatgagcaggatgtctcgctcactgacgccctcagcatactcccctgggagggggcaggcggacagaggagggaggagagaaaagagaacatcaggaggggcagagagacagggtgacctcctcaccgagacaccgcccgaggacagctctccacgatccctgtccgggccagcaatgctccagggatgggggctgccagctgtgagcttggggctgaatcaggccccgtctctcagggctcaggcttccgatggggcctcagaaaccaacgctgcctccatcctgcatttatccttcgactggactgcctgctgtcccagtccgtgtgctggagccaggggctcctccctccaggagccctgaggcccagggggcaggaggtggggagagatgtgaacagaggatgcgggcccagtttgaggcactgaatggaggcagtctgagctctcacagaaggggcagcaaactagttgggggggggggaggg

SEQ ID NO: 44089 - DNA, 1341 bp, Bovine  19866881433838
  misc_feature (1)..(1): n is a, c, g, or t
nggattctctaggcagaatactggagtgggttgccatgctctccaggaaatcttctcaacccaggggatcgaacccagatctcccgcattgcaggcagattctttaccatctgagccattgtccagacctttaatttgcctctaatgataaattttctaagaattcaggtagagacacttgttcctaaggttcctccgatatgacttcagaacaaatgactagggaccctcgggtgtaataaattgtaccaggaccaattagaattattttttttaaaactttagattcttgagcaacagcttcagcaaatgaaagcaacttatcagctaaaccaagagaagctggagtataacttccaggtgctgaagaagagagatgaagaaagcacagtgattaagtcccagcagaagaggaagatcaaccggtaagctcgcatgcagagtgtctttcttctgggcctttctctactgaaaagagggatgggtatgtactcttttgtaggagtagaaattgttagaagtgtaactaattcttagggcttcccaggtggtgctagtggtaaagaacctgcctgtcaaagcaggagataagagacacgggttcggatcctggggtctgaaagatcccctggaagagggcatggcaacctactccagtattcttgcgtggagtagccccgtggacagaggagcctggtaggctacagtccatggggtcacaagagtcaggtatgacagaagcgacttagcatgcacgcataactaattcttattaaaagaggtgttttttttttttttcttttgaaaacaggatacattcaaccagttctgtcctccggaccccacaggcagtttacagcaaaaagaaaagaatttacagcaaaaagtctgtctcccatatgtcttttgtctgggtcctctgtcccacctctggattcgtttcttttcctttttccaaaatttccttatgcacatacaagcaaacacaaagtctcatgcccgtctgcttttacacaaccaatagcatcctgtacacattgttctgtatcttcacgatgtttccatgccagttcatagagaatgttcacgttatttcttacggtgtcttgtataacactgcatagatatgctaggatttactcaaccaggcccacactgctgtgcattttgttgacttctaaacccttgctgttgcaaataatgccaacataagtattcagttcagttcagttcagttcagtcactcagtcgtgtccgactctttacaaccccatgaattgcagcacaccaggcctaccctgtccatcaccaactcccagagttcactcagactcatgtcca

SEQ ID NO: 44090 - DNA, 1135 bp, Bovine  19866881668211
  misc_feature (1)..(1): n is a, c, g, or t
ncaggtagcacctgggctgaactcactttcaggagtgaaatgaacatttactgacagcctgctctgtgcaatgttcttaatatttattctcttatttggtcctcaaaatgactctataattgaaagcaaggactcagatatctgtatacccatgttcgtagcagtatttttcataatagccaaaatgcggaagcgaccacgtgtcgatcgacagatgaatggataaacaaaatgtggtatgtacataaagtggaagtgaatgttatccagcctcaaaaaagaaggaaatcatgacacatgctacaacatggttcaatcttgaggacattatgctctctgaaataagccattcacaaatggacaaaaactgtatgatctcacttttataaagttggagtaatcaacttcatagagatagaaagtaaaatggtgttttccaggggctgggaggagtggggagaatggaaattagtatttacttaggacagagtttcagttgggaacaatggaaaagttctagagatggattattgtggtgacaacattgtgaatgtacttaatgtcactgaaatgtacacttaaaatggttaaaatgagaaatctcatgttatatgtatcttgtgtgtgcgcttagccaagaccgactctttgtggcctcatgaactgtgacctgccaggctcctctgtccatggaattctccaggcaggaatattctgacccagggatccaacaaagtcttctgcatctcctgcactgcaagcagattcttcatcactagtgccaccagggaagccccatatatatatatatcttatcacaataaaaatttaaaaaaatatatgattctgtagggtagagcttactcttctcattttatagataagaaaaatggggctcagaggaaatcacgcagccagacggaatgagtgtccatctgtctctggagtcccatgtctctttcacacgataccgccccttccagggctcaggatagccctggcataactgcggggctcccgggctccaagattcctctgtcaaaggatggaggaaagcccaagtgaaattggatctaactgcagtttagaaacagaggggtaggtggggcttgggcttgaattacaaggacgaaag

SEQ ID NO: 44091 - DNA, 674 bp, Bovine  19866881814919
  misc_feature (1)..(1): n is a, c, g, or t
nggagagcttgttgcatcttctacagaaaccccttcaaggtgaatatcagatattccctcgctcttccccaccccaacagcatccatatgtttccagcctcactccccctccgcccctctgccctcccaccctgagccagtctcccacagcatcatttctcctaggagcagctcaccccaaccctctgcccagaccacctcagggccaatctctgcctgcccagaagacattaagggccagtttgaaaattatctttttcctcagcacaatcaaattattagtcttaactccttcctccgctagtctctgcaggcaggtaaagattcaccatccctttgatatgaattatgccacccccttggaaggcagaagtgctggaataatttcgttggttgtttaaatcacagcttttgccttcctgctgctcaagtttaagtatagcccagagatgttttcattggctccacctgcctagtttgaaatatcttccccgctctggctccacccctccctcgtcaacacctcccgagccctatcctatgaccctgatacacgtgctttctcaaaacagctcaggcctgtttccttatttcccagtccttgctgtttccaagttggagaaccagccatgggcaccacaggaaggccctattctcactcctccttagaagtc

SEQ ID NO: 44092 - DNA, 1361 bp, Bovine  19866881984374
  misc_feature (1)..(1): n is a, c, g, or t
ntagatagatagatatcctttctcttaaagcattccaagaacacctacacttagtgtttcactgaatgctgtttggaaaatgctaatatagaacagtcctcttattagagaccagcaaagttaaattagtgaagagatgaggtaggtctccagccctggctttcctactcagatcatttctgcctccttgtctatttctggctaggcctgaaggggccgatgaagggcaaggagaaggtaagggctgcaaaggaggagaagaagaaaagaacccagagcctaggccctggccaggggtcggaggcccccgagaagaggaaacccaagattgatgagctcaaggtgagggtctgggagcagaccccaccagggtgtggggacgtcatgcctaagtcaagacagaggcctgtaggcctgcctcacctccctgatggcctggcttggctcaggtgtaccccaaggagctggagtcagagttcgacaacttcgaggactggctgcacacgttcaacctgcttcgggggaagacgggggacgacgaggatggcgggaccgaggaggagcgcattgtgggccggttcaaggtcaggcggcaagtgtgagtggggcccagcccctaagacccaggccctgagtcctgagcccccccaccagctctcctccccaccccaagcctggggctgacagccaaggggaactgtcagctgccccagtgggaaaactatcagaatacttgcacactgagtgataagggggatctgccctgaatccactcccccacttcaacccccacataattgcccccactccggccacttcctcaaaaacccctgactctctgtgacccagcaactaaaagattaaggccccaaacccccgcagcagggtgcagaccctcagtgctctgggctattttaaatgccacccctgcctgtgcccacgggagcctgcaccctgatccacacttgctgcaccccagggctccctctgcgtgtacaaagtgccactcccagaggacgtgtcccgggaagccggctacgaccccacctatggcatgttccagggcatccccagcaatgaccccatcaacgtgctggtccgggtctacgtggtccgggtgagagccccctcgcagcctctctccccaggttcccagttctcctgcccaagaggggctgaagcaacctcaaactgatagcccccaactgggagacaccagggagggcagctggccttttgccatcctttatacaagcggaagccaaggcccagagttggtcagggactcacccggggtcacacagcaactctctggtccagtgctcctgcccttcattatcatgggaccatcatggggtggg

SEQ ID NO: 44093 - DNA, 1971 bp, Bovine  19866880488750
  misc_feature (1)..(1): n is a, c, g, or t
nacaaagaatgtcgctgccagatcagaaaagacttcccaggtggctcggtggtaaagaacccacctgccaatgcaggagacacaagagacctgggttggattcctgggtcggaagatcccctggaggagggcatggcaacccactccagtattcttgcctgggaagtggacagaggagcctggcgggctacagtccatggggtcacaaagagtcggacacgactgagcatatgagctttatgagtaagcgaaggacgttgcagccatcaacccttggccccagcagctgccctgagtgtgccctggagaggagtcaggacggagaaaagcaggaccctggccccaggtagctgaggggcacatcagaaggagcaatttcagtgagcccagactcgtgcaccttcccgtacacaggaaagcactaaattcactgccttgagatgtctgggttttctttaattaacagggatcttttgatgttctgaccacctgggctttgctgcaaacccccgtctctcctggctccccacccccgacctctaccaagcggtccctccaagggcgctgggaggctgcctccaggcatgcatcctcagcacgtctgccgagtgaaacgtgattctcaaattgtaggttgtgcactgttttccagtcgacaacacccacactcggtgtgggagtcgcttctgtcagccctgacggagagtcgcccgaggctttctctgggatccatctctctgtggttctggagtgcgggcgagaagtgctaaccctgtgtcctgatcgtcctgtcctgctccgggaatttgcaaatgaacgtctccctgtctctccgggccgacggctggtgacaacacagacaaggagtgtgaacgcgtcggggacaactgtgctgctgctggtgtttggctgatgggataagttataatttcacactcgaaaatatcagcatccatccaaaatgagtgcattacaagcaattagtgtagattatggatttgaaatgaagaaggaaatatattaatctgtctaattactatgttaattaggcatcggtgccataatatttcatacctaaatgctaatgttgatgatgctttaattattatatttttttggagtgcaaaaatgaaccaaaccctgctcttctgctccatagcaaagaacagacactggcctggcccttgggggtccaggcgtcccactgcccaccgcttgcttgccagggcccgtgccatccagactgcgtctgtgcagatggacattgtcagttgaaacccaggggacaaggcagcggttgcagtcacatcagagcacgcgccgcctgtgaggggctgaagctgcagaaaggctggctgcgcacttcaggatttcagtgagtttgctgcgctgacacgccttgtaatgcctcgagcgtcaggtccaagccttgatgaccctgggacgtgtgtcgtgcactgggatgggccagcagggtccttggaggacggcccgggggctcgcgttgcccagggtggggtgatcaggtggagtgctccaggtggcccagaacattcctgattttaaaaccgacagtcctgtgtgccaggaacactttcaatcctgggaaaatggagatggttttcttgggactcttctggttttaagactgcaggcccctcagcctcgggcagacccatgcggcagcctgcaccccctggggctccagtgcgaccctgccgtggcctgtgggatggacgctcaagcgagggccgcttgatggacggggggacagagggcggctgtgtcacaacagcaaggacgcccagaggttaaaacagcgccttctgtggcgcttctgttccgagcacgtgcggctgctcagatcacctggtctgaatgcggcttcgggccttggacggcacctccagggcgagctgaactccagaccgcagacggcagggtgtgggcttcagctgaccgatgcgctgg

SEQ ID NO: 44094 - DNA, 1617 bp, Bovine  19866880594936
  misc_feature (1)..(1): n is a, c, g, or t
nctggaaaatcctcccgctatttcttgggggcttagaattaataaagccaggcggtataaaatatgtgctttgggtttttgaatgatcacttctgcaccaggtcatataatacggctttaactccatgtggcctgtctattaagcaagacaggatgagcctcacaaataataaaaaatatttatgcttttcttagtgatactaacaaggtaacatatcagaggagaaatggcaggagaagaataaggtaactgtgtcttatgaattcacggctcagtgggatcccggccagcccccataaacaccctaggattctctgctccgtactgctgttattccacaaattgtattttttttgctttttgtttgtgaaatctgaagtgtcataaatgcctccgtctcatctatatttgatagttaatattagtctcaaccaggaaagtgcactttacatgtgacaacatacgattacctgagagtgttattgcaaaggaaaaaatcaataccgatttataattcacgatcgcagtctatcagtttttatggctctctatccagtctcattaattttttattatgattgactgaaactgaaagatttttaacatgtttcgctgttatttattcaaccttaataattaaataaaccttaattggctgtatttcgaggcatcttggcgctgcggccaggaagggttggggtgaccatccatttttaatgcgggtgcacctcacgttttcttctgaggcgactcagggaagggggtctgctgtgtaccatcaccagagcgagagaaataggttttgtcatcacctaatcaaattctgtttaagaggagaccatttgttttaattcaaaatataaattatcgatagcgccgagagaaacgtaataaaatattcctggagcaacgtgagcccacgccgtgtacctgcacggaactttgatcagcggctaatatcttgattaatgaggccaagggccccgttgcaccgagagctgctggtagggacgccctcgcccggggtctcccgattggtggttaacaggtccctttgaaaggtgattgacagatggaaaattgcactttcaaatttcatccgtattcatttcagttgttcttctacatgtcaaccgcttcccgtctctggcaggccacggctgtatacattagctgttcccacagtgagaaaagagggaagacaatcccgtacttgagcattctgaaggaaaatcaatcatgtcataagtgagaagtatggataagtttgaactgtggcaactttcatcatttcatttctggccacgctggtgggtttctgagtgtccaggctgcgtgaggcaaccccagctgcaggggaagaataggcaggataatagagctgggctgaaagggaaatgttcttttccctggtatttgtcaaggaaggttcttgtggttttgcacagaagaaacatcaaaccctaagactatatacactggacgttttgacagaactgaaaaaaggcttctatggactatgacagggatagaccgacccttctcaatcaaacgactgggcttcagccttgcgtttttttttttccaatttttgtttgcactggactcttgactgt

SEQ ID NO: 44095 - DNA, 1213 bp, Bovine  19866880595977
  misc_feature (1)..(1): n is a, c, g, or t
nctcctgcttggcaggtgggttctttaccctagtgccacctgggacgccccatatatatctatctatacagggacactgtgcacatgggcaagaccacccgaggacaaggagaaggagtctgtctacgctccagggagagtggtctcagcaggaaccagctccaagcacctggacctcaggcctccagcctccagaccatgaggactagatccccgttgtttgagccaccccatcttggtcctctgacagcccgaacggactgacacaggggccagtgtaacctctgtcctttgtaaggtcactgggttcctaagtttatctgagccaacgccttgaaatccctgtctccaaccatcctctgcaggaaggaaaaaaccacagacttcgcctctcatctcaggatagtgaatcaggctctgtggaatgtcacgatccctcgtgtctggggagggtgaagcctccgacttgcagcctcctctgggactctgcacaagcgctgggccagcctgtccccagggcactgcccagtcttcctctctgctgcaaggtgccctccctgcagatgggatgccagaacccaggacagcaccatctgtcccagcagcccgatcgcgcatccctggctacagtccgggtcatccaatgagtcacaccatccctgacgagccagcagggccctcgtccagtaatcggtgctgctttaggcacgatggtttcctcataaattcagctgatggccttcccattattgcttttcagagagaagatttagagcagcagaaaatactatgaaaaaggatattaggcttagattgaccataacacaatgatcatgagatccaagctccccagtctacgctgtaccattaactacacatcttccccacatgccacccggcgggctgcaaagcaagtgttggctggagatttcaatcttagtgagcaatttaaactcagtgttttgcataaatagattacacaaaatctgtttattgtgatttccacatatatgggatggggaaatgtcatagaggatttctccttctctaggaggctcgaacaacagagaagtaaattccactcatctaagtcagtgcaggtgggacacatcgagaggaaggtgacaaaatggaatttcacatcgtgaaggctaggactctggagagtcccttggacagcaaagagatcaatccagtcaatcctaaaggaaat

SEQ ID NO: 44096 - DNA, 1654 bp, Bovine  19866880706907
  misc_feature (1)..(1): n is a, c, g, or t
nagcttgtgggccccatcccacggtcgacgcgggtgcgctgagggccgttcagacttaggcttgcggcacattttccccaccatgaatggtgaccccctagtggtccagggggctcaggctcagtgcttccgatgaaggcgcccaggctcagtccccggtcagggagctggatctcacacgccactctcacgtgccccaacgaagaccctgcatagccaaatcaatcagtgtttttcaaatgaatgaactgactctgactctgccccttcaaggaggacaactcacagtatttgttaccaataataaaaatctggatttgaacaaaaattagaatttttggaaacttgcatctgccactgtgagctttacagttcctggatacttgggcttttctgacaagattagtgatgtaaacagatgttaacttttgcaacattttgtaaagaaacgtgtcagtatttggaagacacgtgtaactcggtgagccaacttccaaatgaccagtgcacagtgtcacaaacccgccgtgagcccgggcgccttgcacaggacgggatggacgggctgggttcagtgagaggctcgctgcgggactcaggcctgcctgcagctgagcgtgaagagttccctgctgtctggtttggatgtgtgttcagaggagagtatctgcagttttctgaaaaggctgttcaaatcttcctcccttagcaactgtgaggccagttcctcacccaagcagacaaagctcagtgtttgaagaaagcagggaagtcgggctgtcttcctgagcgcaggcatctccctgagcgcaggcatctccctgagtgcaggcatctccctgagcgcaggcgttgggagatcggcatgaatgcaaaacagtgccacccgtctgtctcttcttatttttgctttaggaaatgcagattttttaaattatgtatttgtgaacataggcttatatataatgggggtcttgctattttgagacaaactaataagtaattttaaatttctgttgcaattcctagtttgctaaccatcagcgaatgtaacccacgtatctgttgttgaagcctcagtaacttttccacctgtaaaggtgaagagagcacgcattctgcaaagggccccagggcagggatggggctatgggtcagccttgctaaagaatttcattcagagggtgtgtccaaagaaatgactgtgtgagggcagacgagggagcttatttctcagttagcatgcaacaccaggagctcatcctgttcccgcgtctgcattttgtgctgttgacttccccaagccacatccgagaggagggatgaagccaagctattactaagctgcgttatgttgataagtcagagatggatagtttacaagccagcttttatccttttgtgctaagactgaaacaccgccactaaaaaagaaagattgaggggggaaaaaacactcgaattgcagatggatggagcttgcagcatcctttccatcctgatgttccctgagttggtgaggggagctggcagctgtgagccagtgattcaggttttttttcttttcactttgtgttttataagtgatgtttaaccaggcccccttaaaatgtgttattgttagaaaacaaaccaagaaacagggaacagtaat

SEQ ID NO: 44097 - DNA, 1417 bp, Bovine  19866880748722
  misc_feature (1)..(1): n is a, c, g, or t
ntgatttttttgatatttagttgaccattatcatctgcataattgagcatcagccttagaattaaactcacatgttctttctcccaactccctgcgtattagaattcttttggttggttttagaaacattctagaattttaaaacattttgcatctaatataacgctgaaaacatgaaatctacataatgtatgcagcgtaactaatattagaagcatgttcaaggagcagcctgtggggttaatagagtttaatttgcaagacaaatgaaggcttatttcctcctaggcactctgctcttcattctggtagggccacttttgaagaatagtccattaatagatgatgagaacccttgttggacaggagcagtatcagccagcagtggaatcagagcctttccactcagagggtgtttgccagaatacagagcccttgattaaaatgcagcgcttaaatagttctgtgcgggcttcctcacacagccacagatgggcaggggggaggacgcacaaatgctttatctctgtgataaaccaagattacagaaataaaaatagataatccagatgcccccacagacagtgggaagtttttaagtaaaccaagacttaatccacttaatgtggaaatattctgcattaaaaaaaaaaaatgttttcaagaatctttataacaaaggaagatccttataataaacatcctacctgaatttatccaaagaaaattaaaatgattaaaagactgaaaggaacatgttcagtcaacagtggttatctctggttgatgggattgcaagtaatttataactgcctgtgagctcagcagagtcagcggagctggcttgagagtttttcagcaggagacaccctggcatttgagacaccctagtctttgtgctgaccgttgcctcgctaaatgccagtggtgttccctagttgctgtgaagccagcggtgccttcacatttcctgaacatccatagatgagcactagccctgagatccctaggtcagcggctcccacattggcaggagagcatccgaaagcgtgttgccatgctgattatggcctacagttgcggtcagatctagcagaaggctgagagacgcctctagctccatctttattgatgacttatggacagaaaagaggatttgtagccagatagaaatgtgttcgaaaaccaggtggccctgtcttgttttctcccagcccttctgcacctgaggctgacttgggaccacccagggtcaggcgtcccctactccagggcaggcgtgtgccatggaggagccagccctggctggtcagagatctcctagaggacaggggatttgattcaaggaggaaaactggagtgagcagtttgggggaagtcagatgtttaaaacatgaaaagaagcagcactcttgag

SEQ ID NO: 44098 - DNA, 843 bp, Bovine  19866880756450
  misc_feature (1)..(1): n is a, c, g, or t
ngaagcattataaggacacctttttccatttccctgtccagtgcgggccgcagccctgggggcgggggccggggctgggaggccgctgggtctgggggcctccttgcctttcctcccctccagacccctgcccctgtcctgtccctccacctccaggcctgcgggagtccctctaccctacgtcggggtgatcgtccccagctgggagccactgtctctcttgctcgttgatgaccagagcagttgaaaccgaaagggcaggcggttgcagccctgatggatcagaggcccagagggtggacgtgggcttggagccgggcgctaggtccctggttggagtcacgccaaggacacgggttgggagagctcggccccttggtgaggaggggagcccttggaaccatctgccctccacctcatcttttctcctttcaagggggtttcaagttggaaccatggctggtgtcttgaaggattcatctgggccttcctggggggtttaggaatgacagaccaggagagaatttcggaaccagacggttctcgtaaaacaaaataatggattccttccaagtatgcgatattgatttacatcacctaagaagtcatcctaacactctgcgaaggatatgttttcagttctaaaatcttctaatgcatatgtcaattttaacggatttttccctgttaggtctaaatctttcctttggatcatgccacgcagctgtcgtgagcactgataatgtgacaaatggggttaggatacgcatttccattttccaaatgagcctttcttgtgaggctgcggctggcctgcctccttccaggcaaatgagcccaaag

SEQ ID NO: 44099 - DNA, 1886 bp, Bovine  19866880803017
  misc_feature (1)..(1): n is a, c, g, or t
ntgatgctttcatggccttgtagatcagttcagagggtagatggtgtctttcacttttttttttttttttttactgtcttttacctgtcaggagctcaaggtacctataattctttaaattctacacataaggagacgaagccacactatgtaaaggactctctgttgctttgcatggttccatttccacactgggctcaacggaacctcatggacagtgggccagatttccatctgccccgtccagccccacccatgaatttttattgcaaggagctgcactttgtcttcgtaacatggaagaacaatacatgttgtttcataaaggggccttcttgtttcccccctgcaaaggaaagcttccattggctgggggagagaaggggcagcctttggatgagggaaggcccaccacgggccagtccccagctctgagccctggggagaaagccctcggggcggggcatgggggggcgctgcaggcaccaagcagggcagcaatggggacagttcaagaggagcaacaaggggcgggaggcgaggaggagccaaagagaacgggaagggagagaggaacgagcagagggaggagaggagggctgcaccaggcggctggactgcaggacaggctgacagccccacccgcgcctgctcagcaccgccaacgaggcctaggcctgggcagcccacgtgcctccggcccgttctgaatgcagatggtgacagacaccgcaatgcagacaaagggtcaagccttccccttccgctggacgcactgtgcacagagcagaggggaaagttctcaactactgggcatttaaaccactgaaacagtccgtttccacaagcacaaggatgattcctcctcataacgatcaaaccgaggccctgtgagaaccagaaggggcctgtgaatcagagagcccatcatgttcagggtaattttcaggtcaagtatatttaattgtattgcagcgctccaaaaatcagcaacccatgaatggcagaactagtctcatcaagcagcacggcccaccgtctgaccttgccagcgagcaggagggcagagacctgaccacaatgagttccgtacagtcacacagcatccaattcttgtcattttttaagaatttaatttccacaataaagctatgattaaaaaaaaatagtttcttacaacagcgaagagttcttgtaaacacatgagatgaaattctcgagtatgtctgtggaggcaggggcggtgcatggaccccgagggcccagcactggccgggggagagagccaggacctccagggaaccacagagcctggcctctggaccccaaggggctctgcctccaaccccaggaccagggaaggcaatggcgagcagtgggagcccagcccaacgtcctgaccacgctagacaaaaaccaccttacaccaggcatccatccccgtgcccgggacccacacactagagtggacactccagtaccctgacctatcaagcacagtcttgaccgagtgtatttgtgttttcatgcctccccaaatagcgcaagactggcattaactgcagtctcaccacatgacccagaagaggctgcacagctccctcagggtcacacagcagaagagcagcagaggcagaactgccgtggcctgtctcctgagactccacattcgccggaccctagccggagtctctgccaccaggaaaggcccacctaacagacctattcccacccatgacaggaaaaccaagctcccactactgctgtcagaacagacacccaacagccctgctgcccgacccacgaagcaactgccttcaggatgggggattttacgtctgtcacaaaaacgcccgtcacatttaatgcagttacttctcaattcc

SEQ ID NO: 44100 - DNA, 1534 bp, Bovine  19866880843334
  misc_feature (1)..(1): n is a, c, g, or t
ntgtgtgcacacgtgtgcggcctggcgtggggctgctcgaggtacctgcttctgtggccccagctgtgggggacagcaatgcttccccccaccagagtcctggcgggcctggcttagctgctggcctagcagtgaacacacctctacccagggcttccgaggctgggacgtctctgcagcctgtacctgctcccttcgtatccagaaaagcgagcatgtgatttcaatttgaaattaaaagtcatgtctgaataacagagcttcatcctcatttcctaataccctggtttttactactttgcattcaactgtgaaaagtcttttaaaactcggaacagcagtaaaacttgaatgaatttttgacccattattgcatagcgggtgtgccttccaagttggagagactgccaagttctccccacctaatatttccactttaattgtgccacttgagaaatttacgtgcctcaaaatatggcatgaatcttacgcttattgcagtatcattagcagcaacatttaagcaacatctgtgtgctatagaactaattgaagtagcagaagtggcagctgtaaatccacaggaagatggcagtttgtacccagcactgctgagttagctactaactgtcagcctgttcctgcaatctggtctcgagcaccacggtacaggcacacagtgtccaaaaaaatacagcgagtaggctaatgatcccattaaccactttgttgcaccaatttggctgtttttccagtttccttgttgaatttcattataaatttctccattcttgtaaaaagtccagtgtgagacgtgtctgactttaaactacttacctgagccgagaaacactcgtctggccagaccaaactgagaattgattttttgtgacttaataatttggttcccccctcactccttgcagttgcttaaaaaatttttttattccacatgtctctgtaaaaaatgactttaaaatccatagtaatgctgatatttaaagcaatggcattttcttcccgcgaatacaacattttcaataatcgatacacaagaaggcagccataattcactgcgggcgggggtggggcaggcgcagcgggtaaggggggtgccaaggtgtgagcgcgcctcggatgactcgccagctcctcatgtcacggctgaggagtgggcggccaggttctctgggttcagacccaaaggcatcgcttgctttccttccccggatatggagaaaaatgatgccgatccttccacacagggcgtgagttaagctgggagtgagggatgtactgagatgcctctttgtgaagaagtgagggcatccgagccactgcttttattcgaaacgctccttccactgagcacggctggaaaagctatttctcacgcctcctacaaaaaccagccccatcctgctcttaactccggtcctgcttgttttcgtcttggcagtgagtggatgttttctccctcggcacctggcccttagacaatgatgtaactggtatctttcgaagcactcaggag

SEQ ID NO: 44101 - DNA, 2021 bp, Bovine  19866880895078
  misc_feature (1)..(1): n is a, c, g, or t
ngtgcctgtgtgacctgagctcccaggaacagccgctgaggcatccgtgtccctcggaggaggggacgtgcattcgctggcaggccctgagcggccacgggccacgtgggtgccaggttgggccaggcacttgggggtggaggcatctgtaggcggtgggaccaccccggggtctgccccagacggacagggaccctcccccccgagtcagcccctctggcctcctggccatgcccccacgggtctccagatacccagttcttgacccgtgggctctgggtgcagagacccgcaggctgtggtcggcatgctgactcagaagagacgtgacggcaggaaggcctggttcctcttaagtgctccgggggctaccggggacccgcggcccctgtggcaggagggctgccgagccgggcgtcatggttggagggagggcatgcaggcaccgtggcatgggcagatggtgtcctggggctgaggcccagccgctcgggtgccatggcggggtgggtgaagctggggcggctctccatagccagctgcccccagcggggcagaaaatcttccttggccagagggcccctgccctcagggaagcaggcatcccgagtccattccagggacacccgtgtcccagtgcccatcgtccacttctgcggcctatgctgcgtccacaccatggtgagggggcttctcagaccccacgttcggggtcctggtggtccaaagctctggggtttcctccacaaagggttctcccatgaatggatgcttcaatgaagccattcagccagccgggccccctcctgcggggggctcatctacgcctcccgagcatcatcaatgggaatatacatttcaaatgtgcgtcagggctagggggccccgagctctccgggagcggagggaaggtggggtcataacctgtctgacctggaagcttctgtctgatttgtgctgccctggaattgatggggacagaggcgcaatcacagggactcgctcctctctgcaggctgcgccagccctcctggaggccggacaccctgcgggcagccccatcccctgggcgtctggctcccgtcatcggcaggctcgcagggacgcatctctctgagccctcctgggtgaggtggccaggccgccagaggccaaggtctaaacgagctgtttacagcagctgagaaaccccaggttcttctgaaccagacccgatgcgtccccccagagtgggtgtgcggtggggcgggccgagcccacccagccaggcccctttgccggctgctttcagccttggtaaaggcagaattaccttgggaggcggtggcggtgcagtgggttagcacggtgaattaaaagaatgagtcacagtgacatgtccggctcctccgcaccagtcctttgtattcccagcgcgcctcacccctgttgcaagaaggtcaaaaattagagagagagaacaattttcaagcggctagcacttaggagcagaattaacaatcactctgtatgtaattgccagttaatagtaaattgccttccagactgtaaaatgcaatataaacgggtgggcacctaaaattaaattaatgagatatttgctgcatttaaaagtgaacagtgcaaattaataactgagtgcaatgcttgttttaatatttgtctaatagtgtatcgtttgctcgtttaataataattaaaacagtcccggaatatcttacctgaggaactccatgggcagagtgaacagtctcacatttataatttcaaccagtagaaagacatcgagttgttcagagcaataaaagaaattattttttaattagaatgtaagcattgcggtgttattcgattaagacaaattggaatttgtatgcttctaattgaaattatgttcgagggaaaactgcttttacagacagcgttttgcgagcgtggtgaggtgcttttgcacaatcacaaatgtcccttttcccagcgtgtctgtggccagagggctccatgtgacatcgaagggcagg

SEQ ID NO: 44102 - DNA, 893 bp, Bovine  19866880951943
  misc_feature (1)..(1): n is a, c, g, or t
nctgtgtaattgcctgcagcccgggtaattaattgttagttgtgggtgcatcgtcgtgagcaggagaggcccctgtgttgggaaggtccctgaattggattttcatccgctcagcaccatcactgttaattactagagccagagtgaggcctttttggaaatgaaaacacattaccctgactcccagcccttctggatccatgaagctctcttttggccgccttgcagatccatgcagataacggcctcgatgccttctttagacttatgtatagctacgatcgtgcccttagaggctgcttctatcctgacagacggggtgggctgcacgtggagatggctgtttcttgatggtgcttggttggagcccttgcaagagaaaagagtatcaagcctgggagcctggtcatcactacattattaagtacgaggctggaaggtattagcattggcagagtgccccgtcaccagggtctgtttgagattcagtttgtctctgctcagccctcgccggccttcttttgggaatccttgagcacctttttctcacggcacatactcacacctggtttctggctagtgtggatttgcctggaactgcacctgtgtgcacacaatcaaggctccccaagtatttccacactctgattcctgacgtccatggctacgcacctcacgtgctgaaagggactcttcagatgggactgaatcaaatatcttgatacaaggagtttcagaaacattgtcaagtaattaaaggtaaactttaggtcatgtatggatgtgaattcagttcagttcagtcgctcagttgtgtctgactctttgcgaccccatgaactgcagcatgccaggcctccctgtccatcaccaattccggagtccacccaaac

SEQ ID NO: 44103 - DNA, 974 bp, Bovine  19866880953702
  misc_feature (1)..(1): n is a, c, g, or t
ncggcattgttcgcttagaatccacggcacagcgccgatgggagctgcgtgaagaccttcattccagaaacgtttttcttctggggaattttcattcgaagcagaggcttcaaaaaaaatgaatgcagacaagcaagtgtgatgaggcagctccagcgtgcccagccatacccacacgatggaggtgaagtcacgactcagaaagctatgtccaagagaggcggggatcacagatgcaaacactggtgtgtctcgtttgcgaggcgaccgtcccctaaacatatcagatgcactcccctattcccaggcagactgataaagtagtttgatacaaatcagttgtagattagattctgcaaagcacgttttcctaggaaatccaattgcacctgctttggtttctggggcggcatccgttatccggtgatggtacaggaattgcgctgcagctctttgagtgggaagggcgagatccttcatccgaccggggtgggatgagactgctcgagggggttccgcagggaaggggctccagtgggcacccttgggtcccaggctggctgggcaaccttgccaggcccctcggctggtgcctcccccaccaagacccacccaaggggcccagcctgcaggccatacatccgaaggcaggcgttcggtggagctccccgcaatttattttaattacgtgtgtcataaaaagaccacctacagatgagacaatgctgccgtaagagtctcaaggttactgcagggaatacttcataactgaagtgtgttttccccaaggacttatactaccatttgatttaatttttaatttttacattttaatcaaaaatagatcaaatggtggtggtctctccggggaaacatacttcagataggaagccggccatgctccttttaaatatgtaaagctgccatcctcctataagtcacggcgggcgcccggctgccagccgcccctgcca

SEQ ID NO: 44104 - DNA, 1247 bp, Bovine  19866880989471
  misc_feature (1)..(1): n is a, c, g, or t
nactcgctcctcaaacttcacacctcgttactgtgttgataaattagaagacatagaaatgttggtcactcatttgtgtcccactctttgcaaccccatggactgtgggcttccaggctcctttgtccatgggattttccaggcaagaatcctggagtgggttgccattcccttctccagggcatattcctgacccagggattgatccctggtctcctgcattgtaggcaaattgtttgctgtctgagctaccagggaagccccactgataaatcgttttaaaatacagtgaaatctaagctaaccaaaatgatgttgaaaaagagtgttcagcatggcagttattcgtctctgtggaggcccagcacatgctctttcctcaggacgtctcgccaggaaggacagatggtcttcacagtggagagtgagcatgtgtgagccaccaagacttcgtctgtggttctgctgcaccctggagggggacatgctctgagaatcttagggttgccgtggaggggattcttgtttgtcagaacaccttcctgtcttagtaactaacctgtaacaaaaacaagactgaatctgctttggatgtgacgccacgcttagagcagtattgttccctcagatggccaaggctctgggtgatgtccagggacagccagcctgagacttagtgtcccaggctgtgaccgtgatcagctcttgccctccacagctctgtctcaccagtggaccgcacaggacaggggaaggactgcccagtgtgtgtgtggtggggggaggggtcgttataatgaggcccgagcaggcgctgcttcacagcttgcctggggccttcgtgcgccaaggatagtaaagtaaactccgggacacacgagtccctgctgtggacctaggagtccccctaagcctccacttgactttcctctcctgtagatggttagggtgaatgagcgcgaaggttccacacactgatggatacctttctttattttgcccttagttgagctgcggtggggagggggacgtccagtgctggatgtcaggaggttcacgtcccagggtatcctgctgcatccgagctctccagctacagaggaaccttctttacaaattgctgtattgtcataggtggcattctggttaaaagttcatctggatttcaacctcgcgtgaaattgcagagctgccactggaaagctcagccttagttgagaacctttagggagctctctgacattgca

SEQ ID NO: 44105 - DNA, 1222 bp, Bovine  19866880996664
  misc_feature (1)..(1): n is a, c, g, or t
naaaagcaaatgtcattcggaagcctcagaaatgaaaatttgtatgaacttattagcatgaagtcaacagcgctagttaagggcaggctccccgtgtgtgctctgtgcgtctgctgctgagggagcctcgcggggatgagcaaatagagcccccgctagtccaacattagagcaaacaaagggaggtggtgtcggcccggctcaacaacaatacctgccgtgattaactcccgtgtctgccgctgcctctgacccggcagggagccacgctgggcttccgggaagtcctgcttatgaagacgtgcggccagggctgacccagagtctaaaacgacggtttatcaggagctgagctactcggggtggcggtgggtgggggcgtgctcacgtgggatggacagcctaaagaggcccgggcgtccttgggaggctcgtccccgcaggcggcgggtgggggccgcacggtcaatccgccgcatgtgtacgaagctttagttactgtcttttggacgaatctccaccgaggtggttgcaagtggtggaagatcaccgaacggggagggccctcaggccaggggtcgagctcctccacgtcctgctcccctcagcacccgccccaccggatggaggaggatgcgggtgacacgggggcgcccagggcccactgggggctcctcctctccacggaggaccaaggcccgcgctgcctcttgtctgggctgtaattgtgtccagaccgcatcagccgggagatgcggcagagcctaggggccacacggccgcccatcacgcaggcctcttctttgtaccaaagatacaggcacagagaggcccagagtcccacccgtggcgcccagcccggcagaggcggcctgccggtcagagggccgcagcccccgtctccccagcagtcagctccctccgcgctgggtctctgcccacgacaggccctctcgggtggcggagacggtctgcagccccgtgcaggaaaagagccgatcagaggccggaacaaagctgcctcctcgaggctgtggccttcagcctcgcctctgcaggctcgcggcagggctgctgggagcatgggcctcctggtctttcctctgtgcccgcccttgcggtctgtctacaccctccccccccagcaggccccgagcagcagcattgtaataactcatgcaaatgtgagcgctccggagacaaagggaggtcaggccagcgg

SEQ ID NO: 44106 - DNA, 3853 bp, Bovine  19866881005118
  misc_feature (1)..(1): n is a, c, g, or t
nttgcatgaaatacagcccccagttacgtgcccctgaactgcttgccatcatggacaccctgcagggatagacaagggcccagcagtcttccagatgtgtggttccaggaaccagaacatcccagggcctatgtggacttgacatcatgcattcctgatggactcagctggaaaactctaactcaggtccaggataatcaggaccatctgctgtgatgtgttgtaacaggtgtcctgtttctgaactcagcatggcgacccacttagatgctaagttgggacgccctgttatggaattccagcacaagccccctcagctcctttccatccacagtcctcaactgattgaagtttgaaagctcttggcttgaagaggtgcgggctcaccaacgtgtgcaggctggggtgggtctaaagaaaagaaacaggcagcaaccccaggcttcttggcttcttttcattaagcaaagcaaattgcacttcagaatttgtttccgcgagtgattctgtaaagctacactgcctgtctcaaaatttgtaagttcagaagatgccatgaaatgtctctccattaaatactgtcgccaagagaagcatgaacaagataaattcatttctgctccaaaccgagctttgtgaggcataaatagagtatcagtgcatgccttctgtggagacagtccacgtggtcctgggaaggccaccctgggtactgctgaccccagttctaagggggagttaagttcacaccaggggttcatgaataggcgagatgcaaactgcacaaaacacaggttcgctctgcctgacgaggcttcgggagtgatagtaacaaatgagccacctcatgggaccttcactttcagacaagcacgttcccaggcacgctttcacctccagaggtgccgacccaacactcaggtgaggacatctgaccctggagaagggaggactcccaggccccccagctgggggacagcagtacccgccctatgtcctggtttccaagcccagctcttaccccatggctgacacagacaccagatcatggtcaccaggacgaagcaggaagcaatggccatttgaacccacgtgtatgtgcacaggggccccacactgccttggggggattacacagcccccacaagacttgttccagttaccccccacacttggtgaagttagaactcgagcatggtccccctgggatctcaccaagaggttaatccctacccaccccctccagaaggcttctcttgacgctcatccctggcggaggcaacgtgcctccaaaaatgccagggagactgcagaagctcacacggatgaggacagctcagagggtcagggggtgggggtctcctgcccctgccagttaccctcagtttatctggtctcagggcagtgggtcccccttaacgggtcccaaactcacaggctgtgtcacttacttgaagctcttgcacaggactggcccagaagagccagaaccagacttggcctgcgggtagcatctgccccaccagccaccccgaccttttctaccctcaaagcaagtttctcctcgaaaggtcctctctgcccactggccacatgtccattacactctgagatgctctaatgacactgagcctaaaagggggaaagagatgggctctgcactgccttcattccctttctctgggggtcttttgggctcagaggcaaactgctgacccccaggccctacatcctcaacaacctctgaggtctgggatggaacagggggtgggatgaatcaggggccaagccttgcagccacgactgcccatcattgcctgtgtgactgagtagccaccctgccgggttctgcaataaagtgactgcaaaagtatggggcaaggtcggccagaggaggtcaactccagcagctggttttctgatgcgtcagacgaagaggttgtttctagaagtgaaaacatcactgtgcacctacagataaccgcagtcaaccacttaccctctgcaaggggtgatcccattaagcctaattgccttgcacagatacgagagttccaagccgggaacaaatgaactgcaatttagctctggggtgttttcttaacttgtcttatctggagtgtttaaggaggtgaccccgcaggctccctggggagcaggcagaggtgccttgagaaagcctgggggagtatctagcgaacaacagcaggtgcacatatgaggtcaggagtgggggaggagagggggagatgcccatcttccatctagggaatggtagtacacaattttatcctaaatcctctccttttggtgtaccagtttccaagcaggaatggtgatggatttagctctcagggtccctgcagatatgatggtgggcagtgcagagacagctgtccctgggaggcaggaacagacagagcagagccccagagatttaaagggatgcatttagaagaaaaccaaaacaaacgttagtttgaaagagtaaagaaacagagaaagagtgaagaacgtccagcctatcacaatctaagacatgcaggacacagcagctaacactctagggtctgcccagcaccactgactgcatcaggctggctggaaattccacatgaagcaacttctggggcctttttctctctaccattcccttgttgttagggttccaggaacctcatcaggacctggcatggcagggtcattagtttcctgggctgctgttacaaagtaccgaaaactgtgtgacttacaacagaaatttattctctctacaggtctagaggccaggagtcctacgtcaaggtgtcagcagggctgagctccctccgaggctacaggggaagggtccttcctgcctcttccaactcccagtggctccttggcttgtgtgaagcatcacttcagtctctgcctcccacgtcctgaccccctgcctcccagctgcacccgggcatgaggcagaagcctctgcacacacagcaggtggcaccaccgatactgctctgaccccccgggggcccatccaacccgactgacgccacagctccaccactcccacgagctcaggggagagcaactgcaggcccttggaggtggcacgcatgtgtgtagaaagctcttcaaagtccccccccccccctttgaagtaggcgcctccaggcagggatggctcagaaggcagttatgttgccacgtgggctgcaactttatgtgactgaagccactgtgagtgaggagggaccagcctccagacatcggtcctgtcagcgacataagggagattcgatttgctctaataatgtggctaattactagcatttcaaatttaattaagaaagatgctcctggccttatttgtgttgagcttcatatctctgtgcatataacatctctggattaacaagaaaaggaactatttacatagaatctttaggacatccaaggagaatgtgctggatctctccagacactgtttagacaccaaaccagtccatctctgactacaaacactgctgcagtggagactgcttgggtgctcccaggggccacaggttcaaaggtgaacatggcccttccccgccttgggcaggagagggttactaggctccaagtgtgaaggataagcccccagtgaaggggaactaggcagggcttctggatgaggtggtatgaggctgggcttcagagtagggcagggggaccagatgggagagagcagggaagaagaaggattccgggtagagggaaaattctctgtaggagcttagaaactattggaagctattcatctggccccttaggttaccaaataaagagatggaggttgttggcaggaaaaatgtaaggagtt

SEQ ID NO: 44107 - DNA, 2191 bp, Bovine  19866881015846
  misc_feature (1)..(1): n is a, c, g, or t
ntactaaaaacgccctgcagtaccctcccatacccttcccccagtgtaggtgaggccagcaagcacacgggtgtctcctcaacgtgtccgtgacccaaggatgttagctctcaggctacaataacgcttcttctgtggccgagcccacaggggacaggacaatggcacagaacttactcaggaaagcgtacaggagggtgaggcttgtcatcacgcctgacgggagcggtgcagggactcagccagactggaaggcagcttttgacctggaccagttagctagttattacataaacctgagtcaggccgctgactcagggcgaatctgggctgggtctcctcgagccatccactgtctaacaccagccaggctgcggactaaaaccatcagcaccgctctctcaccccaccacgaccaccagcattaccactactgagcccgcgtttgtgaccccaccacatctgaaccctgcagggcaagcacagtgccacctgccagagttggtgagtggcaagagctggagtcgagcccagcagcctgactctgatgctccgatctcactctgggtggatgagctagcggacacacccaggcccgtctcacgcgtaacagtacaatacagagctcccagtgagacgacctgtgaaacacggagcatagtttctatgcaagtaacggtggaacacgctgaaaacctagattccaggaatctagtctgaccaacagaatatgaagagtgctgggtggggctgctgcagctctggaagggagaaggcagtcctttgaaagagggcacagcaaggcacagctggtggcttcaggtaggaggtgggcggaagagctggcagaagcggcgggagagccagccagcccctcgtctcctccagacctgccgaaagcaaccaatggaaccacctcccaggaagctacggttacagaggacttttaaaaaaagacttggcttttttttttgacagcctgtaagaattgtcaccaatggcaaatttctcgaatttctcccaagcatctcaagttttatagctttttaaaaaactattatataatcaagttttggaccaagaccattttttttttaacttagaggagcacagtagatgttctttggtgtactcctcggaaatgtctgcttcttccctgcctctcaaatcccaggatgtgtgtcctgtgcagaggtcccggagtgagacctcctaacaagaataccaagagaaaggagccccaaagccccaggacatcgctattgtcctgatttgtaaaccctacttcatgccaggacagcaccaaaatagtacttcaaatagtagaaataacattataatcatagttcaaaaaagacacacgaagtgaaagcaagaaacccagaggacacacagtgcccagtctcacctcttgggctcaaaatctaaaattaaagcacgcttaaggtgatgtctatgtgtaacaacagccagggcttctcagcccattccggacttctatacttttaaatatagttggtttgcatttaaagcaggagtctgtgtctctaaattgtttattttgcttcagtatgccttaaagtgccacactgcttaatatcttggaaaagctactgtgtggaacagtagcattcttaagttaggagtgacaaatccgagaaaacctctacaatttggcttccatatctctgaattggtatttcaatgacagatgtttgttgcggcaaaaacctctgtcagaacaaaattaggtgatctatcattttaagatatggtcttcatatactgtttactcgaagatatcacttgcctcaagccaattttgaccaagaacattttgtgatatggaagtgatttgtatatcatcatttttgtgataaatgtagctcttgaacacaaaataacctaccattccacagtattacagttaaaactcctcctccagtaaatctgcactagtccttttattactaccaagacactgcatgtaggctccagcagatttttccccttgaataagatttctacttgtctgcctttgcactgggtgtagggatttctaacccactgtcaaggcaccctaaaccctaccctctccccagctcctgaagcttcttagggtcatggtgccttcctggaggactcctgcagttttacggcccttggtggcacttgccaagctgccgctgct

SEQ ID NO: 44108 - DNA, 2463 bp, Bovine  19866881028739
  misc_feature (1)..(1): n is a, c, g, or t
nggagagggcagggtctgagggccctgtcggtggcggcggtcactgaggcagccatttgaccaagctgtgcccgaggctccaggccaggcccctgcacagggcccacaaggagggtctcaccgctgccccagcaccggtttttctgggtctggagtcagactcctctccagtgctgggctcaccactccaggcttaggtccaatgcccaatccttcagggtcagttctcttaattaacacgtgcacacacacaagcacacacacacactcatgcaattttcctatagcaatccaaggcgccaggctgctgggtcagaagttcccccatcagccacacacacgcacggtgtctggacacgtggcatagctctcctcttaagcaggggtcacttgctcaatgcccagtgctgaggtcatttgccaaagttcattgctgcaaatcaatgccaccacgctaccgatagtcggagaaggagaagggtggacaggagctgagcagtacactacacctggactcacaagctctccccacacagacaccctccagggcttctgcgagacctcccacggcaccctcatcctgccccagggagactggaaagagctgtggtatctccaaggccccagataggcaatcacaaatctgaaacaggcagtgctggtggtaaagaacccgccaattcaggagacacaagagacgcgggtttgatccctgggtcaggaaaagcccctgcaagatgacatggccacccactccagtattcttgcctagagaatcccatggacagaggagtctggcggcttacagtccatggggtcacacggagttggacatgacagcagcagctgagcatggcacagccatcagcccacagcccagaagccaggctggccagccccagggtcacaccttgtttgccagcgccgtgcgctcagatctctgagccactaaaagctcagaaccaatcagggctaattgcaggtttctgtgccaccctcctggctcagctgttcagcaaaaattacatttcattacttttttcactaatcagcttcaagagcagagtgcaaaattaacttgaaataatttcatgctttcaagtaacctttattttctaaattgtggtgctttgccgtaactatttcatcctactgtataataacagtgttctttgcgtgagggtagagcacttatatagcagctgctatcttaatcaaatatcaatagctcatctttatttcagcattaagtcaatagcacatgccatttgttacttcataaacctcaataccgtaagtattatcagttaaataagtgttctctaaagtgtggtttaatgaattagaaccaatttaaaagagtctggattgaaatctgccaaatttaagacttctataaaacactgaactcttcaggtaaccaaatgttcagctatattttgaacacacaccctctcctaacaagtgctcacatactgtggtttcacttaaaatataagttagcgtatttatgctgaagactcaaccaatcgcaaaccgagctcctgtgtttctatttttcctctgtcctaataaattgttaacacacacttgcccaaccttgtcccccaaaagccaatactgaagcaaagaaatatgcttgttgtcgcttaaccatcatgaatgtaaataagacctgggggctccagtcaactgtagactcctgtcagaagacagaacagacatcagaaaggggccagagcaatcctgaacattagcagggtcctggtgcccaggaagcagagggcgacagccacaccctgtacccggaactcgcctggaaggacgtattcacatctgagcccctcgctggaaagaaaagaggcgacagaacgacctagatggaatcaggccccgagacacacggaggaaggttggccagaggatttgcacacgtgtcccaggggcagggccaggatgacccagtagaagcaatgggctaggagggctgtctacacccacagctgctcggacgtggaacgagccacttacaggacaactagctgagttctctcattcccaaggtgacggaaaactgcaaagagaggacctaacaggtgggctctttgtatttgccttaaaagtcagtatttcccagaaatctcttctgggcagaggtcaggggtctccttgagtggaggaggcagagcggggactccacgagagcccaagaggctgcaggtcacagtgtgcaggggaggagagggcggctcctgagagctccagagaccctcagtcagtggatgcctgcagaaaagcttcccacgtccaggaagagggccgccaggaaggccacaggggacactcacctgagctcacacggggcagagaatggggcctgtccccaccagcccgagcagaaaaccttaaacatccaggaagaggaccgccaggaaggtcgcaggggacactcaccagagctca

SEQ ID NO: 44109 - DNA, 1505 bp, Bovine  19866881061697
  misc_feature (1)..(1): n is a, c, g, or t
ntcgagcagccccacgccagaccgcacacgtgtgcacacactgtgacacgggcatgcacgtgtgcgcgctaggcctgtgcctctgactcggggggcaaggaaggacaggggccccagcctcccaccaccaacgagggcccgcagagtttctctcccacttatggtcctttgtcttcccagcacaggctcctgccaaaccaccaaatctcctttcccaagaaaaacctctcctgtggagaagagctccctgacgggctgtcacgtccgcttctgactctctctcaccccacttaagggaggcggtgcttgttggggggcagggacgctgctctcagccggccatccacctcctgagcctccgatggggctcagtgaccccagtccatctcacttggtgatccgtacctattagcaccgttaggacttgaggccacgcgccggatggcggggacaaggctcctccgtgtctctgctggtctcctttccctgcacgtcctgttctggtggtggggaccgtctccagtggggcatccacacaatgttgtcttgtagacgtttgccaagtacttaccctccccttagatgatgcagctcatttggtgaaacctttgccaggcaggtccaggactgaatggtccagccctcaagagactgctccacgtcttctgtccgtctgtctctccccgctcctggtctcaccccccagccctgccaccaccacaggcccatctctctgagcctgtggcacctggattgcgaacagcaaatcttacagatgtcaggatggccttgttgtgaagcaaaaaggacaatgagttcctgctgacctcggcacagcggctcttgctggagcacagtatgtattttctcctggcggtgaagagcccgcaagtaattgacggagaacagaaatgtcacgggagcacttgtgttgacactgctctatgcgtggagggaagcccagcccagcagtgggggctgagcacgagcccgggaacttgtaatttagcgaggacaggatggagggatcagtctggtcggactccccaagtcctggtgagctgccccaggaccgcgggggccatggggagagccccgtgtgcacagacacacctggaagcggagcccggctgctgccccagtcggtttccagccctttactgcctccatgatgcttaatgtactgtttgtgtatgttgtccttgccgtatatttgatgtgctctcatatattttactcatctctggcttccacaaaggcatgctcccagcaaaaatgaggctcgttatttgccgccatcaatcaagtgtctgtgtggtcggcacctcgtgggatgggcttgattttaagtataaacgtaactcctgctcttcggcgccatttcattctctgtcctgggtctgttgaggggttgtctggatgcggtggccttcctggaggggcagacggccacgccagagctgcctttgggtctgcacattctcagggcccctagaggggagccg

SEQ ID NO: 44110 - DNA, 730 bp, Bovine  19866881093104
  misc_feature (1)..(1): n is a, c, g, or t
ntaactgactgagaaaaagctttatttttgctttaggcaattacatgcagactagagagattgactggtagtgtttcatttttaagggttaaagtgacagactggaaatgttatgcttaaggataaaatagaaggttttaataacaaaatatttacacacatttttttaagaaaaatgcatgaatgcagtaaaactatttagaaatagaaaaaccatgtttaacggttatagaaccaccatttttctccacaatcatttccactcatgacagatgacatgaataaggagcctaactgccacatttcatcactatctaccaacaataaaaccctaaagaatgctttggaatctgtaatgtttccatgtctgatttaaaaagtaaaacccaattagatgactcactgcaggaaaatatctgcactgtggttcaaataccttttgcttcactaaaagcgctgtcagagcaaacagacatgagagctcccagataacttaattaacctgcaagatcaaggatgtatcattctgttttaaaagatgtgcatctcagtgctcctcaaaaatcatcctacagcacgacagccttctttcctgtcctcctgggcagcacagaaaaaggacagtctaatcctctgacgactgagaccctatcagcatgccaggctcctgagacactaagcatactacaggtagagcccaaaagttagggtgagaagacagatgtgcagt

SEQ ID NO: 44111 - DNA, 1164 bp, Bovine  19866881126261
  misc_feature (1)..(1): n is a, c, g, or t
ngatgtctttgtattgagcaatttaattttactttatttaatttttacacattacaacctgtgttcattcaggcactgaagggctgcagtctgtcggggcagggtctgggtctccctgttagtaaaatatactatatcttatttaacaatccccatcgccttaattgaagtgcgttcttgtccctcggaaaaggaactgcagatgttcttattatgtagttatgttgctaatgtgaaaaactgcctcattatgaggatctgtttgtagctagaaaattactgcattatgacaaatgcatgattgggaagttacaggaagatgatcattattgaaatgaaactggaactcatttaatagctgcaaccagcagctggaatgaagcaaatgaatgtcttcctgtttttattgttgtaggcaggtttttcaggcagaagggaaatttgtgctaaacctggaacttcttgtatcgctctttgctcgctgggcttgggtttaaacggaggcaacgctgaaggcagcgggtctcctacctgggtgtcccccttgtgcactaatgatgctgttttaaacacaatggtgtcagtagggacagtcagtctgggcgtgcttagtgcctgtagccctgttcgctggctgggctggtctccaggtgcccctggcagggggggtcaggaggttgccatcacaattaagccctgtcactgcgacccctccttcccgccccagaccgtccctgtttgcagccggggtgcctccaggcctgggggtggttgggggatcccagcgccccgggcaggtggcccatcaagagcggcagcagcagcacgaataaggggtcaggtctgctcggggctgctgttcctgttgcctttgggggcaggtttcccccgggggcgccccaggcacatagtagctgcttaataaatggtgagcggatgaaatggatttagagacagttggtttggctgttttccttctaagacagatgctcttgtagaaaacaggcttcccaggtggctcaaacggttcagagtctactgcaatgcaggagacccaggttcgatccctgggtcgggcacttcctctggagaagggaatggcaccccactccagtatccttgcctgggaaaccccatggacagaggagcctggtgggctgcagt

SEQ ID NO: 44112 - DNA, 923 bp, Bovine  19866881199108
  misc_feature (1)..(1): n is a, c, g, or t
nctaccgttttgattgatctgttcacatattgattagatagtttatctaattaaaatgggttcactggagactgtccttccttgagtagttgtgaggattcagaattgcccccgctcccctcccaaaaaaaaaaggcttcataaatcagaagctgtttctactgcccacattgtatcatcgagtgagcccaggtcaatgtcacagttacagccaggatctggtaatgaacgttttttgcatctgaaaagaccgagctgaataggaataaagtggtttctgagcagggaaagtatcctttctcaagttcacggtgaggaaggcaaggaccactctgtctggggaacgagttatccgctggagggatgactcggccctgatccaggttcaggccctcccgtctcagtacttcacaggggtaaagaaggaagtcacgccagcagggacagctttgctcccagggacaccttccccggggagcttgtgacaagcaccccagaatcggtacccctgcctaactaacaactcaggaaacaggaaatgacatcggccctgagatccgccttgaacagaggggctctgcataatgcattatctccgggagacctggggtagctgagacttgagcccagacgtgagccagagcctggatctggggtgcagggagccccagttcttgttcggacagcagggagggccagctccccctgaagaaccacagcctcatggaaaacagctgggcaggtaagggggcaccaggaggtgggcacacgtaaaagcctgccacacgaggtggcttaaaagccttagctgtggcgggcctccgtgaacaaggagccatacacgcaagatgcaggggagagttggggcgcggagatgggacggggcagggcagccaggggctcgtggggattcttcacgcttt

SEQ ID NO: 44113 - DNA, 2342 bp, Bovine  19866881211334
  misc_feature (1)..(1): n is a, c, g, or t
nttcggaagcctgacaccgccccgtcaccctgccctgccgcgcccccctgccctgccgcgcctcccgcgcgtggatccaccccctgcttagctaagttcctggcttccctgacccagagggaccctgggccccagccaggcatcccacaaccacaccaggcccgtgtccagccacgctcaccaagatctccagttcccttcacttccgcctaggagcctccctcgacctgaccgagagctcagacaggtcacgactggcttcagtcatgatgagagaggggacagtcactacaggctggcacttggcgtctgcttctaccaggatcaaatctcgagccactgcagctgctggccatcaacaccccctgaaaggagctcagggtggagtacagaagccccccatgctctggagaaactggtgggcagttctttagatagtgagctattttcaggagaagattttatgagtccagtttttgcatctcctcaaatctagaaaaacactgaactccttcgtgatgacatctgctcctcgtgacgagcagcgaccctcacaagactagcaaagccttctgcaggaacaagtgcttgattgcatgaactgccctgccaccaaaatcacacatagaccaacctccccactgctctttggagcagtctctcggagccagccaaggtgctatctccggggccatagccttcatcttgccccaaataaagcttaactcacagctctcacatggtgcgttttacttccagtcaacagaaccaattctggacagaaaacgtaagagctggcgcaggacttgccatgttctcctgcgtcaggatgacccctgaggtctgtgttgagactacagtgtccgaggccaggggagcccgctcaccctggatccccgagtgtctacccagcaaagagccctgggctgtgtaagataaacacggacgataataagggcacatgtgttgcttggacaccgagaatcaaggccgtttgtttctgcagcatcacctcacctatcctgactgctgcaaccagggtaaaccagctgcacacgccctggccgcacagacacgctcacactgccctctcagagagagctggtccctcgtggtggaaagagccctcggtgattctggggaggcttgcttgacaggggccacaaactaccctccaaccacgtcagtccctggcagagaccaccctccccagactggtggctctgggcactccacggtcccctcttccagttctccatcttgcctctgaatctgaatttctacctggtgtgatcgggagcctggcttcctccctgcaaagacgggtctctgataatcacactgtctgtctggaattgctgctccagaatcaatagagaatgtattgataaaagttaaattgcccctgactaaagcactttcctgccaaagagaggcagcataattaaactgcagacaatttagcaaaaatttaaactttagcttttacaatctcgagaggtgtcagcgcaaagccttcccttaagcgctcactttcctgtgggataaaattgctctgagtgcttttgctagtggacatttgggtttgttttttgtttgttttccggaatggatgtgagaaatggcagatttggatcagcaattcgcacaaagagaagtccttttggccactgagtttataagtgggcctttcctttatttcttcattctgtgactacgtatcaagtgcctactaagtgccaagcaccgagaagacataaccttaagctgggagcaagtgtcaagtgatgacggcgagaagcagccggtagatgtggggctgcatgtgtgtcggggggtccctgagcctgagcctctgctggctcctctgcacccaaggagcttgctggtccgctgacacgctccccgcttcattcattcaccctccactcatccaccccctcagctcagggctgcagagctcagactgtgaggctctggtcccagctctgggggctcagcaccccgaccagcaacagaatcggccacctcgggagcccacgtgtaacaagcataagaggaaggagggacacgtggcatattgagcaagtgtgtgtcgggcaacatgaggcagaagagcaggcatgaaaggactgggcggggagggcgctgggtgtctggacagaccaggcaggtccctgaggaccccttgctggggtcatttccacagaggctgacctccagcagccagaagaggactggacaccctaagatggcccagctcacaatgtgggcactgggtgctggctgatggggccccaagaggccagctcccctccactccacacggtctctgactgccc

SEQ ID NO: 44114 - DNA, 792 bp, Bovine  19866881275994
  misc_feature (1)..(1): n is a, c, g, or t
ngattagaaatgttgacagttgaggtgtgtaaagaatgtcatattcacgcacattttccaacttcaatattaggatccttcattttttatgacttctgtaaagcccctttgaactgcagacaggggaaccaggagaaaactttccatagagtgtactgcacgcactaacagcatgacctgatttccaggtgacttgttacccttgagtgtgcagaaatcacttcacaggcaaagaaattataacaaaagcaacatcctaattacacgagccacacatacccaaggacgggcggtaaacaggagcaccttcctgtgtgacaggagcagacacctcggcccccaggtaaccgtattcacctccactttctgttcttcagacacctccaggccctcaggctcttacagaattttaaattaatgtctatagcattacaggagacgcagagtcctcatacatttaaatttacacctcatgaaaattcttattaactaaatttttccctcaatactcgcaggtcaagaatcgatgaatagtcaatttttttcagtcaaaattaaacaaatcataaaaaatggcataattttcagcattgcagattagatttagtgggcaatatctgccagatatgaaaaacagagctcattatgttgcactaaagtaagtttcactgcagtgtttttatttcacttcgtcagcctcaccacttttggtaagttcactacgatctttcacaaaataaccctggtttgaaaacagacttcgcaggtccctgtcccgatgccccggacatg

SEQ ID NO: 44115 - DNA, 964 bp, Bovine  19866881282212
  misc_feature (1)..(1): n is a, c, g, or t
nacacacgcccccgacccccggggaggctggtggtggagccaagggcggccccccatttacagatcagaacctgagcgccagagagcacacttgtgctgttcagtccctaagtcacatctgactgttttgcggccctgtgagctgcagcctgccaggctcctcggtccatgggatttcccaggcaaggatgctgggagggggttgccatttctttctctagggtctccctccgtgtcctgctcttccctctctgagttacaccttctgtgacgttttgctcgtctgcataatttggaaaatgacaagggagtggctgggacgtggggtgagaagaagggcgggggtttcgctgctcacgggttaaaccaaacaggactcagcgccgcgttcgctgctgcagcctgagcaccctctcgttccgggcgggggcggctcctgctgtcctggctttactcgtcttagaaaatgctttgccacgtgagccgcccagcccgactccgccgccatcagctgtgacccagtggtagttgaccttccagcaggagccgccagcaccacaaacaattcctcggtcaaattaaatattcagtacaccctgggtgccctgaatcataatgctgctctctgcgacggggctttacctggctccgaaatggttctttaaccacaaattcattccgagtgacgcgtccaatgaaatgaaccttctcccagtggctggagatcacccctcattcgccactgtgtccctccacttaatggcacgctttaaaaaatgacgtcactagttaaatctgtgtggtcatttcatccccaactcatctctacagctttcaatgaatgcttaaaattccttccgccaagcctcgggcaaaacgtgaattttttaggaaagtaaacaaaaatcacggtttccatctgggaattagtgaggaatgaacaattcacagctggttttaaagt

SEQ ID NO: 44116 - DNA, 1059 bp, Bovine  19866881323359
  misc_feature (1)..(1): n is a, c, g, or t
nccgggtgcgtggccctgcccgcagtccacgtggcgccagggcccaccgagcggtggcatcgcgtaagccgtgtgtacacacacgggccttccaaaccatgaagttgtaacggtgagtcggagataaattaatattgttgaaattaatgaactgagaaattgaagctcccatcactacatgaaccaaatgtattaatatgtgatacataaattaatgagaataatcactcttgacaaaaattaaacaacactaaagttaaaaggttttaaatcaccttggcaccaggagttcactgggaagcgtccttgcacttggcatctcggcacaagttctctctctgttccaagaagagaagggacacgctccctacatgtgggagccgtgacttctgtcttgtcacggcccttgggcccacgattgcaaaccaggtgggctgtggtggcttttgatcttggccagcccgcgactcaccattacgatacggagcggtcagcagcaggtccagggcaggggctgagagcagaggggagcccgaggcatgcccagtccacgtagggagtgagagcggggcccgggtgccccccggtccgagatccggccacagctggcatcacaggagtggcccggttggcgcgcctctgttgacagaggtggcctcggggggcctgggcctctgtgtgccgctgaggtgtgtgggcggcggccccttcgcacgcagaaggccagaagcctttccctttgccacgtgaggtctttgaggagaggagcctgggggggagtctgtccccatgtgcacccccaccccgtgaagtaggtgcccttaaccgagcccacggctggttagtggagggccgtgcaaagccactgtcccattgaccaaagcccagggaggccccccgcgtctggtgaggggtgcccctgacctgccccccctctcttgcagctatgtctgggctggtagtcccacccatgtgaggggcgctgttacctgccgccacgcagcgtccaaggacggacttcaggggacacgtcaggacacacgaggtgctgacgggacg

SEQ ID NO: 44117 - DNA, 2607 bp, Bovine  19866881513184
  misc_feature (1)..(1): n is a, c, g, or t
ntggtgaagttgatacagttttttagaataggaactcattgtttttccagttacagtgagaaaaagcctttgtagattctgtctgcaacatgttttcaggagtgaattactagatttggaaagtgagggatgcctgagcttttgttctcaacttctttctggaagaactggacttcaactgtgcatgctcatcgtatttcagaacattagtctgagataacagaattgcatttggagataaggttggtgtagtcacagtcattcgatatgaaatgaagggtgcaccttgtaggtatgtttcccttcaccctgtcagctgtacctgcttcccttgtgcagactccagaagggaccccacttcctccatgtcggcagcgaggccacctgggccttcaagagcccaccaggatcaggccgcacccagcagcagctgtgtcctcaggacccatcttcggtgtcagtagagtcgaagtctcatccattgttgataagcggccagatagaaatgtgtaacaccttggctaacaggctgtgatgaaattgaaggtggtcttttcaaagactccttattgaaatacagcccattttgggtaaatgtaatagtacaatgagccctcagctgagtggaaacattatagaatgcaaatggaaagatttgtggtatttttccttcatgaatttgtagttatctttgcaggagtgaagaacatccaatatttcatggcctttccccaggattgtgtgtcttagcaggtgcgaggcgtgtggccctgatcctcgctggctctctctgacttcccggtggctttggtccctctgcctggtgggggcagggccctttccatctgagttcgctaatttcccgttttccctccctaaatggaagctgtggcgttctctctccttggccctcctttctgagatgggaaattgtgttacagctctgttgtattatcgtggacctgctgtggaaatcccctgtgtctttcctgtgattgccaccctgcgctgcacctgaggagaggcccccgcttttacagtctttgtttctgctcttttgtgaaagtgcagctgacttggagtctttcgtcaagtgtgtcagatcatttttgccatttcccttttcccttcagccttctcttactttccatttcggtcttggttacccatcttaggcacactcatgcttgctgctggtcggtctgttatgctctcagggtagccttgatctcattccattcccttaacaagtggcattagcagttggcatatttgggatttgaacgagcagtgtttggtcttctagcgttttgcacacagcagtggggcgatgccctggttctagaatactcacctttaccagggcgcagtttctgcgtcggaacaaggctccaggcctgcacacagacgtctattgtttactcttaggtgttggtgtttgcacctagaccttacccacttacgtgaatggcctcgtgatgacgaggacaattaaagtattgtaatatagtatattaagtagacttagactacacatttacctgtatatactatattttcaatatttattcagaatgacttttctcaaatatttaataagaattaataattgaatgtactcttgccttcttactttgccctgggatcccataagatctttgaagctaaaactagtttgggcccttaaggggtttatagaaattaggtatgtctgagtatgaaaatggctggtatggtgaaaaaattgagtccttaagtaatttactattcccagtgataattagaagaaacccctgctccagctccatttcccaatctttttactgttttcagggggagttcttgaggtattagcagctattttttttcatgtgatctcagtgtaaggtaagtggctttggcatagcatgttgccttgatgggttattaaattgtcacttctaagagatgaatgtgggttacagagtatgttgtgccatatatcattttagtcatcaggaatgtttcagaaaactgagtaagagtaaattcttttaaatttatgattgaaattagcaattttattaggtcttttttaaaaaaccctacaaacttttaaagtctttctcaaaatatacatctttgttctcaaaagaggcctgcagactgcccttaatttgtctttaaaggacacagaattttagcagaatccttgggctgcggagtagacagacgcagcggctgttccttgggcggtctgcacagagggctgatgtgccctgagatttactgtgcatcaccatggccatcattcccctaagtattaattttaactccactaataagaaactgaacaaaagtggaattatgagttcagtagtattctatgaaaggtcagttgttaaaaaggcagagtctgacattctgtgaacaaggtgccttcattaatcatcctgataggaggacacgggcgctcttgaccagcaccagtgagccttgcagcgggcgctcggagggcctgatgtgcacgtctctatgtaaagacacaggttgcttccatgtatgttgagttaatataagaaatttatcttggaatttggggatgtgtgtgtaatacagaaactcttc

SEQ ID NO: 44118 - DNA, 987 bp, Bovine  19866881658271
  misc_feature (1)..(1): n is a, c, g, or t
natgaatgatgccctgtggcctttcctgcaaactacagccgggatcatttgcagactttttcctgaaagcgcaactgtaggtcctaagtctgggtgacagctcggagggagcattccaagacgatggtccaattttgctcgtttttggtaattatgtccaactggcgagtgtccgcctctcgcgcccagcgctgctgagggcctctgcactgtggttcttgtagctgatcacgccccacgccatccgtgtccagaccccaccgaggcacattcctggagtcgtcgaagtcaccttgtcctacaagtccaagcagttctgtaaaggtgctccagggcggtttgtctacaccggtgagtccacctttccagctttccctgatccaggagggcctctccatggcccccgggggccccgcacggttctgcagggagggctggcgggtgagccagagggtggtgtcatcagggaagtctctgcatccttgaccagttggtgtgacgccgtgaacaggtgcagatccctggggccgcgggatccgtcccctcaccccctctgtggtcctgcctgtaaaaggatgcggtgggctgtcggtaaccacgttcccagcgtccgaggggtggctgccccgtgaggtcccagaggtcaggctgtgtccccaaggtcacccatacctggggataacagaagcaggtctctgcccggcctggggcctcacaccacacactgccctgctgctgatggagggtctgaattctgtgcggggctgggcacgcggacatcaccaggaagggtcccctctgaggtcctggaccgccatccagaagccatgttctgcagtgctttgcacacaggtggcttggaggacacgatccgtccgaggctgctgttgggaaagaccacggtgaccacagggctcgtccgcattgaggcctctggtcctgccacccacagagcttgggatgtctgagagggctccacgtgctgag

SEQ ID NO: 44119 - DNA, 1040 bp, Bovine  19866881678546
  misc_feature (1)..(1): n is a, c, g, or t
ncccttgccccaacgccctgggaaacagaatacctgtgccaaccaccctgaacttgccccggggtgaaaagagtgggggtaccaagcgcccacggccaggctggcacagcggccgtgttcaaaggatgcttgccaaatctggagcctgggcgtttgtatgcagactgtgttcctggagaaattttacaacaaacctaagtctctgatgtcctgttaattttaaaagctcttctgtttgtattacagagacacgccagctggggagaggtgcctgctccaacacaagaaatgtattgcaaaggacaaggaaaacacagtttcgagccactagaaaaacaagctgcacagtcaccaaacaagaggagacgacactgacgttctgaacgcagagcacagcctcgaaaaaagcctaagtatccctactgagccacagctcaagggttagagcagtggtcttgtaagccacttggctcagacggtaaagaatctgtctgcagggcaggagacccgagttcaatccctgaattggaagatccctggagaagcgaatagcaacccacgccagtattcttacctgtagaatcccatggacggaggagcctggtggactactgtccacaggttcgcaaggagtcagagacgactgagcgactaacgcttgtaaaccaggggttttgagttcacatcttcctggggccggtgcttatttttttccctcaatcactaaataactggaccaaacagtgttaacttataaaaacagatggtcagcgggacgcaccagaatacgggacataaaaaaatcaggaaggccttggctctctctgcagtgagtggaggggagctgccctgaccccagccctcaaatcagcccagaccctgtgtttctgagaaccagacacagacacgagggtcagctcacgcaagctcctggtttctggattaagctgaaaaatgtatttaatttgaaaaccagaatgaatgaccccaggggaaaaaaaaattccgattacctcttccttcagattaagaatcaaaag

SEQ ID NO: 44120 - DNA, 1280 bp, Bovine  19866881696336
  misc_feature (1)..(1): n is a, c, g, or t
ncacactcaacctggtaagctcacacgtgggggcacgagtgggcagcggcccacgtgcgaccctgctcatgcccctgcccccgaccccacaatgggaagcaggaaagggcccgacagccctggccggcacctcctgcagaggcagcggggtgaggtgctggtgggggagggtagcaaacgtgggtgcctgggtggtctctggggcttgaggggtcttcctgaccatcacaccctgcaaacggggatccctgaagcgggggcacaccatccaggagacaggtagcttaagttgagagacaggggctctgcacccaccttggggagtcacgactcttactcagatgccctggttcgctcaggggcatctgacaaaggctacggagctgtgggcatcctggggcactgcccaggttgggggccgcttcccctgcgttgctaagggaattgaaatgtgagctgagtttcctagcatttcccactcttaaaaggatatttgaagaatttttatagtagtaaaattcatcttaaattgattttttatgcttgtgctaaagatctcaacctctgatttactctgtagttctcctttttaactctttctctattggcattagataactattcatgggtgaaatgtaattaaacagctttgattctgaagcaaggatttatgatactacatttaaaatgaatggcattaaacacacacataaaatcagatttttaaagccatgacacaaatttccatttctacaataaaatgaaatttattctctgccctgccctctcctccaacctcgctccgctcgtccctgaaagagctgtggtgtgacaggatcacagcatctctaacggctgctcttattatggaggagtttctccaggcttcctaccgacgaacctgaaaccccaatcattatgggctccgtggcccacactcatttaaatctcacatccacatctccctgggagccgggagcctagcagctcacctaccaccaaacgcacagacttgtggccaccgcctctgggaagcaccgctgtgcgggagcccagcccccagaaggccgctggaaggctagcgctgaggatggaagcgagataaggccgccccaccgcccgggggccaggctgaggctgacctcagagccaatcctcgaaaagccgcccaggacgccatcggtaagagcagtactgaggccagtatcaggacactggggcccttatacttgttttcagttggcacaagaaggctggtagtggctggaaaatgaatttgg

SEQ ID NO: 44121 - DNA, 994 bp, Bovine  19866881745385
  misc_feature (1)..(1): n is a, c, g, or t
naaaagggggggacgtgccatttatgttggttcttgcatattttattctacaaagaggaagagatgcggacgcactgagaaaagcatacgtcctggccgagtggcgagccctgggtctccctccctccctggctcggaggactggctcaaagggcgggccgctgctggacctcgtggccctgcccagggcggctgtgtttttagaaagagcagacagtgtcccctgcccctaaatccagggcggtcctttacacaatgtgcctgcgccacggtaaacacggagcaggaagagagagggaggaggagctgctgtcgccacagagagtctgcacagggtgacgctggctgagggcagggctcagcagggctgctgcttctcggcgcttcttagaaggcaggaaatatctgaatatagcttgggacatgcagacgagctaaacacacttcttccgctagttcattcttcagtttcggaagcactttgttacatggccttaaaacttcacacaatgccctggcaactgagcctcagaaggtctgtcctgcctggagagtcccacccctcaaggtcgtgaaagccacatctcagagagagatggttcttttccaggagataccttacttttacattcggacactggaaacatgaccttcaaaatgggacctgtacgctcataaatcctatactctgagtcatctcggttggttggacaacatcagtgcctcaacggacatgaatctgagcaatctccgggagctggtgatggacaggggaggcctggcctgctgcaatccatggggtcgcaaggagtgggacacgaattcagtgactgaaatgacctgagtcatcttgaacataagggttgcaagtaaacctgagggagagcgcgtttaaattaagtaaccgtttttacacttttggatcctgcaaacagctagacggcattaccgccattgggttttgtatcgattcttcgtacgtctgacgttggta

SEQ ID NO: 44122 - DNA, 1030 bp, Bovine  19866880431560
  misc_feature (1)..(1): n is a, c, g, or t
natattgactgagattcatggttcatcatgcattttattagtgaagaacacacttaggtatgtggatgtcaatcaagtccataaggcagacagcaaatctttaaaacaaatatggtaaggattttgaatgaccctgagttcatatcacttaatatgtaaaatcttttcatctttcattttttcatttttacttttcctatactttctcagtcaattgtaaagactgtgatttaagatatccacattgcaattgatagagatctcaagaattttttgctaaaatgatttattgcacttggaatactgtacttaatctccagtgccccacccatcctcttaaaacatttattttaaaaataagtaatgatctatgtaaagattcttcacacatctaaaactgactctggatatttttagtatgacccttagactgcctcttctctgatatctccttcctgacatttacttctagattatacaaatacttctattacatttacccagtgagagcgttatacctatttcacaagctgagactttataatcaaattttaaaacacagtaaagtgactgatataaataaatcaaaaggattaaaattaagtatttactgggtaagttgatcttataggaaaagtttacacttgcattttcaatttaggagaaactcgttttacaaaagtgaacgtatttttatatactgtttttctcattgattattgtttcttattaagttactcagtggaactcttcccatttatcaggtttatctgggcattaatgtggaatatttgacatgtgccaaatgtgttaatgaaaattatcactgacacagcatttctccaagctgtaaaagacaggacacataaaaactgattagttgccatgacagaatgaacgcttgagaattacttttccttgcatatcatttaaaaaatcaattagatgaatgttagagatcaatattatttagtgcaggaaaacaaagaaaaagcacaattatgacaggtattgcctcctaaattttttt

SEQ ID NO: 44123 - DNA, 1659 bp, Bovine  19866880613948
  misc_feature (1)..(1): n is a, c, g, or t
nttatagatatgacatcacttgttatctgaatatggaccattataaaagtttaatcccattaaattgatagtagctaatacttgctgaactctgttcaaagggattgcgtgttttggtcacttatttctcacaataatagaatgagattagtactactgtaatttctcatgttgcaagggaggaccctgaaatctagagatattagataacacctccaataaggaagctagtgatggaagagggctgtgttttgtcagtttgtgtcaagatcatatatacttaagaaaaaaaaaaagatgatacgtgcttaatcatttacccgttggaaaaagagtagatgtgttacactgacagaccgaatgttcttgttaaaagcatgctaaaggcatgatttaataaagccaactatttgacaaatccaattccatttgattaacctaaaacatgacaaaccctgccttttttatgaaggagatacttcagaaataacttgatcagatatttgacaaagcattctcaaattgcataataaaggttaaatcacaatattttctaattagaaaatcttctttagctttaaaaaaattagtgagttctaaaatccacctaaacattctctgtatgtgcatcagtcttacaatttattcaactcataattcaacacctactggtaatttgtacattgaaaaaatgattagaaagtatcaggcattatcctcatctctatggaactaaaaaccaaaaaaaaaacataacttcctttagaaaggtgtgaaacaaaaggctctagggaaatcttgcaggagctaattaattcagtctgccacaaaaatgttgcaacatttacattataaggcttctttctgcaaaattagatgttagttttgaagtgttaatatattaaaatatatgcaaattatctcaaatagtcactaactactatggattttcattctgttaaaagttataggttttagctaatcaaatatgcaaacactgggtgatctaaggaaaaaattcttaggcatgattaattgccaaattcttttatctggaagaatctagatgaaaataattttattaagattatttgtgttcatttaaattggtgaattgatataatgaaatttaagtgggctaaagcatagcaaagtattagtgagaccaaagtgtttactatagttattcaggataaaacaatcccctgtaatgaatcctactaattaaagaatctaggagccttcagaggattcattatagtgtgctgctaaatttataacaatttgtccaaaaatgacaattgctaaagcaatggaaatatgagatattttaaatatactattattttaatatttggtgataatatgacatgggggagaaaattctggttttagagttagacaaaactgacttcaaatcttgattcttcctcagtgtgtaacaggaaagggaaaagtattaaataacagtcactgccactatcttattgatcacttactatattctagatgtcctaagggctttgtatatataaaagaatttccaataagcttcatgcaaaattgggaaaataaactccgctttaaggtgaaaaaactgtagtagaaactcaaagagagtaatcacatattgttttcacttgttgctttaatatagtt

SEQ ID NO: 44124 - DNA, 1832 bp, Bovine  19866880704192
  misc_feature (1)..(1): n is a, c, g, or t
naaatacatgaatgatacccagaagcattaaagaacttctttatggtcctacctaccaagggatgcaagtctagcctgtctcactgtaaaacccatatctttatcattacataaaacggcttttgcctaggtattttataatcaggattcttgggtttcaaatatgagaatcatcttaaactgttcctttcagtattaatttttccacacagattctaaatatttctatttttctggaagttttctgtgccattttgtgatgtgaaactttacttataccacatcagctactcacatgttaacatttagcaagattctctccactgaggttgttgagtttaaaatgagaaacattctctgagaatcatagagtagttgaagttgtcttcactgggagtaaagtgagaatgcattaatttataaatcctctgtttctctcttttctttgtgtatctccatttttactgccaagtcattactctaagagagtgcagaggtaacatatgtttggccttggctgccatcttctctagggtgtttactgttcaaatctgttccctgtcagatttgaatggtgacatggtgccctggcaatggatgactctggtacttggaaataagaggaaattatacaaatattttgtaactaattaaaaatctgtagtgttgacatctgcttaatatacatagtaattccagaagctggtaacatgccacctctaaagcaagggtctgatgcagcctctttaaataaagtaattatgaagtgtactggcatggatctaaactggaagatcatccaaataaagtcataaaatgtactgattggtactgaggatcagaatgcagtaaaaagaaaaaaaaaaaaaaacagatttataatactgactattttacagtagaagaacttttctactccagagcctaaaaatgtacttgagtattaaaaaagaagttattggctttcaattcttcttgcaattttaaagtaccatgtattgtatttagatttagacaagttacatcagtgattcttaatttatgtattcagttaacataaaagaatagtatccttttcaaactaataatttaagatttctacaaaaatgtagaataaagactattttatatataaggaagactattaaaacacttaagagactacatcaaaaccctgctattttagtcaaaatactgtcaaatgaaattggctttatgtgtacacatacatattttcatttgtctttgaccacatgtggctaaaaggttttgcaagggcttggtatatacctaggagtggaactgctgagtcatacatatagtaaccctggtttaacatttggaggaagtgccaaactgtcttgcaaagtagccacgttgccttctctctcccagcccacacgcatggcctcatgagtatgggcaaagaagagaagactcagtcctggtctgtacatggatggctctgtacgatgtgcaggcacctgaaagtaggcagctgcagcactgtggcccctcaatgggccatctctgaaggaatggtgaagggaaaatcctcccagtgggcaaaacttagaggagtgcacctggatgttcactctccttggaatgagaaatgacgaaacacgcaatcataccataattcatgagctgaggccaaagagaaactgtgagatagtaaaggtgtgctaatttaagcctcttagcttaagataatttgttagaccatatagataattaatactttagggacagagggtaaggagtattctgttaaattactgaatcatctttgcctgttttcagtaaatttattttctttttaattaaga

SEQ ID NO: 44125 - DNA, 1738 bp, Bovine  19866880878996
  misc_feature (1)..(1): n is a, c, g, or t
naattgatgcttttgaattgtggtgttggagaacactttagagtcccttggactgcaaggagatccagccagtccattctgaaggagatcagacctggggtttctttggagggaatgatgctgaagctgaaactccagtactttggccgcctcatgcgaacagttgactcattggaaaagactctgatgctgggagggattgggggcaggaggagaagggcaccacagaggatgagatggctggatggcatcactgacttgatggacgtgagtctgagtgaactccgggagttggtgatggatagtgaggcctggcgtgctgcgattcatggggtcgcaaagagtcagacatgactgagccactgaactgaactgaactgagagccctatgcgtgctcagtagatattgaaggaataatttccattttatatataagaaacataggtttaataggatcagttaattttggaaagcatacaatcaacttaagtggagtttgtgtgattatagggaatgtgatgctggggaaattcttttagtaaaaacattcttcacaaataatctcactttatcctaaaatatttctgaaaatgggaattattatcttcattttataggtgaagacaccagctcaaaaaggcttctaactatatagaatcaagatttgtatgcagaacaaccttaaccccaaatccaagttatattgacattgatgttttacatctcacaatacaaataggtaaaatatccaatgattcttaaaccaatcactaaaaatctaccatcttatctctaggtattaattctgcctcagcatcctaagcagaagtttgaaaaatcagagcacttttgagataatataatacactgactgcaaaataaaccatcaatctgttgctttgtgtggcttagtgattgaatcaaatcaactgaagagctgatcacattgataatgataaaaggagttactatgcagaagaatatattaaatagcaaaaatcaacttggcagcaactcagagatataatctggatcttttccaataatattttgagtacatttttcttgcattatgtatgttttatgacaattatctttcttattgtatcattggaatgaaagacatttctttctgttgccatgatgcaaatttccttagtgagagattagtttgatttgctggttatatccttttgctaagtgatggcaaatggtaaattaggctcagtaaggaaacggcagtaaaatgcattgcatcttattctatagctgagataatcaagaacatattgttgagaaaacaactaaatcataatgtttagaggagaaatatctatcagtagtcatatgctttttcaactagtttttcatttgtaaaattaaagtctctgaataataacagatggaatcaacaaaatatgttccatcctcaatgatataatttctgaaaactgccgatggaaaagttcatagacctaaataactccattttttagaaaccacttctcccatgttatcagatacatattcaaaaactgtgtatcagccaacattctgtcagctagaaatctcagttaattggcaagaacatattgctgtgatgcatcataaaatagtctaaaatgaagaactcattgcactcgaagaagttgtaatgcattctgttaaaattgatattaaaaatcaaatttttgttttgtaaagtgaacagttaaatattttccctgtgctcatatt

SEQ ID NO: 44126 - DNA, 2153 bp, Bovine  19866880954649
  misc_feature (1)..(1): n is a, c, g, or t
ngtaaagaatctgcctgtcaatgcagaaaacaaaaggttcaatccctgagtcagtaagatcgcctggaaaaggaaatggcaacccattacagtatttttgcatgggaaatccaaaggacagaaaagcctgtctagctacagttcatggagttgcaaagagtcagccacaactcagcagctaacaacatttttaattacaatagtaaattgaaaataaaatttaaaaaacaagtgaatcaactagttagggaaaaaaacaaaataaaacttagtaatacctccaaaccaggagcccatactgttacctaaaccaagaactgtgactgttgtatactgatatatcaggatttctttttttgtattattcagctgtcgggaaagagatcaatttatcagatttctctctttcctttaaactgcatcagctaaaatctgcactcaacatttctatcacactgtactaataagacctagtagcagagtatcaagagcttacctttcaaagcttttatctatttaattctgtttcccaaatcagccagtgacatgatccagatgaccattacagaataccagtctccttagcagtatacttttgtcatcaaagagtatccatatatgtatacagtatgctttaaatagtatacaaatgttttaaaatatacaaatatgttaataaactgctttggagtaaagttttacaaattaaatttgtactcctgcaacataagacagagtgcccatatagccatactaggaatactcatcaatattgtatatggtcatttttttaaattattacttgatatttaaaagaagattttgtcatagaacatgtattgcaaatacctcttttcattatgtggcttttctcacctttagtgatacctttctatgaacaaaggtcatttttattttaaatatttcagagctttatagaggcatatttgggacacattaaacagaacacatctgaagtgcatactttggtacacagggaaaagctgatttcctttcctgtcactctaaattagtttgtaattcctagaattttagataaatggcatcataaattaggcacttttttgttcttatttcagtcagcataattatattaaagtctatatattgcatacatcaataattcatttctattactgctggatagtattccctgagtgaacactgcagaaaccaactatctattcatttgttgatcgatatttgagtttgtttccagttttgactattgaaaataaacctgttagggatatttgtgtatatgtcatttatggatgtatatcttcatttctcttgtggaaatctctaggtgtagaaaaacttgcataatgtagtatgtaaatgattcagtgttaagaatgtgccatcctgttttccattggagttgtactattttgtcctctcttcagcaatgaagcagagctgctcatccttagcaacacttaggttcatttaggttagctgttgagcactctaagaggtacgaagtgctttgagcttacatttccctaatgattaatgatgtcaataacctcaccatgtgtttatttgacatcatttgaaatgtctgaatattttgctctttctttcattgggttggctgtttccttattattgactatgttaggctgaataatagtttccaaagtatgtccacatagtaatctccagaacctgaatatgtttcagttcagttcagttcactcgctcagttgtatccgactcttagcgaccccatgaatcacagcacaccaggcctccctgtccatcaccaactcccagagtccacccaaacccatgtgcatcgagtcggtgatgctatccagccatctcatcctctgtcatccccttctcctcctgcccccaatacttcccagcatcagggtcttttccactgagtcaactcttcacatgaggcggccaaagtactggagtttcagcttcaacatcaatccttccaatgaacacccaggactggtctcctttaggatggactgattggatctccttgcagtccaagggactctcaagagtcttctcaaacacaacagttcaaaagcatcaattctttagcacttagctttcttcacagttcaactctcccatgcatacatgaccacaggaaaaaccat

SEQ ID NO: 44127 - DNA, 780 bp, Bovine  19866881236477
  misc_feature (1)..(1): n is a, c, g, or t
ncatatgtataaaatttaatagctcagcttttagtgtgccttattttcaacaacactctactcaggaacatttgctaaatttctcatttaaataaggtgataaagcatccttaagccctgcagggccaaatgtgttgacttccaaagattgttccaacatttgtaaaaacgtcttatcactttcactatgaactcttcccaataagcagataaataataattcagcaagtaatctagacccattatctcttctcccttctgtttaatccaacctgttttgcttcttgggtacttaatcagaagcttgtaagatatctattacagattatgacgctataaatcatgtccttaaagtgcgaaacatccttgtcagaacattcaaagtagcttttgagggcaagcagagtctatcactttagaagtattgattgcgagaaacagagagcaatacaagctaacctaaaaagaggacttattggaaagattttgtatctcacaagggccagatcttgtcatagcagaacaaggtgtgttccagaggatcacagagcaggaagaaacagagcatttccctattgagaaggaaaggctcatcaatgtgacattgttgccaacgagactagcagcatggaaactatgcctcctctagatctgctgtttaggcagacctgaccaaagctggcaaattactgctatgtgagactggctgctgcttgacaggccagtttgggcagagtccacaggatgccagtactaagtacagttagccaaattctaggg

SEQ ID NO: 44128 - DNA, 1723 bp, Bovine  19866881811970
  misc_feature (1)..(1): n is a, c, g, or t
naacccagaaggggatatgataagagatagatccagaggagatttcatagtttactgtcttccattttaactattatactactctactgaaattgcactatggtaagcatgatagctcttataatctgtggtatttaacaaaggtgattttgtgtttttttcctgcctgtgtgcgtacttaattcctgcattaccatgaatttttcttttaaaaactcagaagaactaccttctttttttgcttcatttggcattatttatttgtccttttaattatttcacagtcctatagagtaatgcaattataagaaaaatgtataactcagcatcatagtttgtcattgtaaaaatagcatgagatacatgacaagtgaattctcagtaggaccttagataaactgagggaggcttctgcttagctgttgtctgtttcgtaatttaaattcctcccacagttctctaaaggacagtaatttagatgtatcatttaaactactagtgtcatactgtcttcccacaattattcaagttgaagtgaaaaattactccccagctattcttaacctgatattttatcaaataaaggaatttatggattgttctagtgagcatttaaataataaatgaaaagaattccagatgaatacattgtcctttaaagttagaagggtttcctttctcagaggagcaactaagatgccaaggcctctctatgttgacttattagtgtcaccaaaaggaagtaaattgttggaaatacaaagaaaatagacttatagccctcatgtgaattattcatgctcagtagatatataacagtttctcttgaaatgtaaaaatctgtatatagagagatactcacatactgtcacactcaacactttaatattatttgcccataaaatatttcatactggtacaattatgaataattaagaaaatagaaactaggaatcttaagaaggaccaggctgtttctcactggtaagtaaaagaacttaaaagtaatctgtgcacttatctaatccatcactcacatcctcaactgatatttctacaaggttttctcttatgcttatttttctttctcatcctttaatatagaacagtcagtaaattaatagtaagaactgaaataaacattttcaatcaattaaaaaaatctttgttattaactaatttattattgatcatcttattccctcagttagaagacatttcaaagaaactttggaaaagacaatagcagtttttcatcaaactaacacaattcataagacctgatgattaaatcctgcctggtctttttcaaatccaggaactagattgtatgttaccttgtatcacttatcagtttctttggagaagtatcaggtatccttgcagacaaattgggctttgagatcaaatgtacctggattggaatctcagttctctcaatgaatgctcatgtgaacataggcaataatttctgatctttaagttctccatctagattttagaggaaaaaaatctttttaatgtttataacctcattttttattgaggaataattgacatataacattagtttcaggcatgcaaaataatggttcaatatttgtgtacattgtgaaacagtcagcacagtaagtctagtttacattgtcaccttagttaccaaaattttttttcttgtgataatactactttcttagcatctttgaataggtaattcagtatt

SEQ ID NO: 44129 - DNA, 805 bp, Bovine  19866880360748
  misc_feature (1)..(1): n is a, c, g, or t
nataggtctcatcacactttggtatccttgcttctttatttgtctgcctctccagtagactctaagctcctggtgggcaggaaccacaagcttttatcctcatacctctatactacctggcatgaaggttgaataaatgaattagtggatgctcacctggacagaggcagctttttaataagatgacaagatgcttgagaagtgcttccttaaaggagtaggcctctccccagctcctggttctaggtgagtgttcaaaaagaggttcactgcaatccctggctataccccactcttccccctccccaattcagcccatgttatgagacagttggagttggaggcactgtgccaaacttgcccaccctttcctcctgggcttactttggcaggtgggcatagagttgtcaaggctccatttgccattggcctggcagtggatgaccctttggccggtgtagtagtagccagggtcgcagatgagcatcagctgggcctggaactggtactgtgtctcgaagatgagcctccatcgaccatgttccacactgacgctgctgatgtcaggacaggtcacagctggggaggtacaaagcagaaaggaggattcattcattaattacggacgacactggcgagagcccagcgttggggagtgggggaccataatgcagtcctgatgaccctcagaacattcagtccccaggcagatgtggtctatgagtgaagtgagctgggtggggaatgtggcacacgactggggtggcagatctgccaaattaaaaaaaaaataggggggaggtgg

SEQ ID NO: 44130 - DNA, 1897 bp, Bovine  19866880378450
  misc_feature (1)..(1): n is a, c, g, or t
ngtatttgtgggggacacaagcattcgtcctaacaggggataacttaaaacttaaaacttaaaaaaagtgtttctcaatttttaatgaattgtatatgaatcccccgggaatcttgctacaaggcagattctgattgaggatgcagcctaagagtcttcattttaaacctgctcctacgtgatgtcatcttgctgatctgaggctcaggtcttgagtagcaagaacctagttggcctggctaatggcccatgacctattctagggattagacacctgggagtttggagtaacattttgatttgaagctgagatctccctctgtggaatcctggtgcctcgtttcctaagatccttctctgctgaacagtgctgacaccccctgagctctactgcatgctgggctctgtgctgaacagtgctctgaatacattctcttaatcctcacagctcggcaataaagtcagcattgtgactgtccccattttactgatgaggacactaacccttagagatgttaaagtgctcaagatgacatggctggtaaggggcagagcaagcattccaacccagattatgattccagagcccttatcttactgctgaactaagttgcagaatggcattcttggttccagccttggaagtaaacaccacggcatcacatgtgtgcagaagcggacaccgttgtccatcagtgcagagtgtctcctccaagggaacacagctccacttgcagatccagcctctgcctcagattctcttggtaactccaaggaggtctgatggcagctatgtcagccaatggggtgggaaggctgctctcgccccaaggaaaggattccttggctgtgaacagcacttagatcatgtcatggtaagaccatggaccttaacaggccacatgcattttcatttaccttctgaaagaagattaaggagaaaattcaattttgcctaatgcttcccccaaatggctaatttatatgctaattagcaagataagaatcgatgaaactggtaatcaatatgatagccaaggcaccagtaataaaattcatctggagatgaactgccagtggaaaggaagcaattacacagaataaatggggcagctcagggaatagtggtccatattgctcttgacagcattattccccccattaatcctcccctcacgctctccccaccccattgaaatcaactgtccactcagatctttcggggtgccacacaccagcttctccctctctagtacctaaccttgcatgatccctgtggatttgtggtccaaccaggagaaaatgaaggagggaaaattatagtctgagaagatgtacaagccctggaggagaattaggggctgaataggggcttttaagtcaaatgctgagtcatgaatagcactttactctcatacttgctgagtgtagtttaaagctttccaattctagagcttaaatatagccactctattgcctagattttccagagctgtcctgattccagacattttgtctcatcacaccatatgtcaaatgatgtgtcctatttaagtccagtgtgaagtaggccatagggtttccataagatttagtctgactcttggaagtcttatttcaaattgcccatttgttccagggctctaggtatttttcttttctgtgtgtgtgtgttaagggtgtgattacagtcatctcagaaggttagtcacacagcattattcattttggacttttcaataagacatttaaaatttgtcttttatccccattgtctgctcactggtatcatctgaggatcttttttccccaaaatgtatttatttatgaaaaaattttaaatatgaaaaagttggaagaattgggaaaaccaagattatggcatccgttcccatca

SEQ ID NO: 44131 - DNA, 1897 bp, Bovine  19866880393190
  misc_feature (1)..(1): n is a, c, g, or t
ngaagcccagggaggaagccttcatccctctagctttctcaccaggtaggcaagctcatttcccatgttccctgatgaccagtcatcattggatcatctagtcaggctggaactggcttcctatctcttactgtccctagtcctgccccacagaatgatgccatttcctagcctggtacataaggaaggacccttggctcctgcttcctgctgccatcccatcatactgcctatgtagcattctctcataccagcccattcatgatcctggtttgcacagtcccctccctcgtccccggctcccctagcaacatttccacatccttgagctctcatccaagggctccctgattgcccgtcctctcttctccgtgtcaggacttacctgttgtgctgtgactgagctctttacctggtctcccactacttcatgaacttcctggagggcaggggcctggtctcatggcctttgacctgccagaacctgtcagcgtgccaggcacatgacgcgctcagaccctgctgaatgggagaatactttccaaacctttcctgagcctcaagcatggacggatctccaggctcttggatctctcacaggagataccatctagaacaaaggtcggcagactgttcctgtcaagggccaggtaataagtattttcacctgagcattttatatgatatctgttgcaaagacccctctttgctgctgtagcatgaacacagccatggctgcatatgttcaggcagcatgcacagccatgatccacgtacattgatatgcatgccaatgagtgtggctgtgtcccaataaaatttagtttacgaacataagcaatacactagatttggctcaaaggtggtagtttgccgacccctggtctaggagattctttgagatacttaatcagtttttgactatcttctcttgagagacttcatcaccacaagagcgacacctataatgtgtttggctgttctgagtattttacaaacattaactcactaaagactcatgacagccacggccactgtgaagccctccattttacaaatgggaaaggccaagcctaaagacgttaggcagctcccctaagatcacacagctaagcagtagacctgggactcatcaggcagaggccaggcccctaccaccctgctctactgtctcacagcatcccagggaggtctcaggtccatacgatgggggccgtgacttaccctctcaaccttccctaagctctttctctggatcccagctgctcagccaacacttgctcataaaatactctaaggccagctgtgccttctgcagacccaggggcccggcctccgcagggagaagtcagggtcctgcctgtacattcttgccaccctcaccccttccgggaagccccaggtcaccaagccagtgccaaaaaagggagtatgtgattactatgtccatgatgggaaaagttcgctttgcaggccagaacccagagccataaaatgtttcacatcaccgagtagagtaccattgatgtgagctgcattttagagcatctgaccccaatgtgggagctgattacaccaagcagtcagcacaaaacactcagtgttgaagccttgggacgggcccctggtactcagtgtgctggggctttcatttgttcccctcttctctctggcctttgtttaaagacacgatcctgtaatgattcattaactaacatgcagatgagtgaagctggcaaagtgtctttctaaggcaggagagtgacagcacatgaaacaggcgtgattaaagaggcacgtgtgtgcacagtcagacacccaatttgcacccattagataaatgaataaaagaacccttcgctaggatgtaattactgagcacccgccatgtgccgag

SEQ ID NO: 44132 - DNA, 1086 bp, Bovine  19866880397271
  misc_feature (1)..(1): n is a, c, g, or t
natttggcttcttgaagaacaatgggggtttgtcactgacaagaacagtggacatctcacacgattctagagcaagctccctgctggcaagctcttatagttatttccagcataacccttatctcactgcacagtgcgctgccttggggtatgtgtgtctccccagccagacagtaggtccctgagcgtagaaactgcacctcgtttcccttgcagtgttcaccagagtgcctgacacatactaggcatcacaaaaatatttttgtcccagagtgggaaggtctgaaagtaccgatcccataattacctttctccttatctgagtgcaaatgggcaaagatcatattcttgtctcttatcactggtttcaagtgtgggcccagagatgctgaaaatacatactctataaattgtctgctgaattgaaccaaattgaagaagttgctcagttggtaggcattaaggggatcttctgcaacatttggagttcatttgagtataaaaatcccaccaaaatgagctttgattctgttttagacaacatgccacagtttcagaatgatgcctttgaagtaaatcctgtttgagtaatgtttctcttggactcataaaatctttatggcaatcttttctcatctgatagactgtgaaaaggaagaagaagccagaaccactgagcaagaagtggggaatgcagtattttctcatatgtgggtcacacacttattgtaaatactttttaaatgcaaatacaatcctgactgcacattagctaaaaaatcctagctctgtccaaagtgctgaatctgtgagtactctctgattaaagagtaggtggtatggaaattatgtgtccattcagatagaaggtttaaatgtattaaaacataaatgaatagctttctgtcccccattgcaagaataaaaaagacagaaacagaaaaaataagttgataaagatgagttctcaatccagttgtgcaaaggagcactgacttgggagccatgcattaagttaacacattttttaagtgcctactgtatactaggcaggcttccttggtggtttagttggtaaagaatctg

SEQ ID NO: 44133 - DNA, 770 bp, Bovine  19866880445636
  misc_feature (1)..(1): n is a, c, g, or t
ncttaaaaaagagatacagacagagtcttgaggaaaactaagcactgcttggctatttggtgatatgaaggaatcgtttaaaattttaggtgtgataacaaaacagacatggtctttaatttttagaaatcttaaaaaaatccctccaggtctctgccccccttctgagggtaagatgatcagacacgggagcatcccaagagggatgctttcaatcacaggctcctgatgtaacctgtggcctccactctgggcaggacttagactaaccccgggggatgcctgcccttgttctgatgaataatgtgttctttcggcttcctagtgatctcttgcgggaatcctgggactccaagcaatgccagagtcctgttcagtgacggcctggttttctccagctccatcgtctacgagtgtcgggaaggctactatgccacaggcctacttagccggcactgctcgggtcaatggcacctggacgggcagtgatccggagtgcacaggtgagagcctctgggctccatggcagtggggctcctccacgccagaggagaaggctgtctgctagagattgggaagactggctggcgttgagggacttgaccctgaatgaggatcatacaagtcgcctccatttactgagcacgttctgtgggactgccactgagcaaagtgctttgttttcggatcttttgatgctcaccacaatcccctccctgtgaaagtaggaaagtgaaagtcactccgtcgtgtccaactctttgcgaccc

SEQ ID NO: 44134 - DNA, 1038 bp, Bovine  19866880448816
  misc_feature (1)..(1): n is a, c, g, or t
ncaccagggagtgtccaggaggtagagggacatggtgctggctcctgggagagcttccaaagcattaggggaggtgagcagatgcattgaaaagtcaaacacaagcataaatgaaaacaaataaacattccagagaaacacacagtcatctgtgctggcaggtactgcggctgattcaggcatctttgacttctgccaccccatcagaagaggtctcattaagggcaggggctgtgtcatgtccctcagtctggggcaccccccgaggtggagagttagggctgctccatcacatggggctcccaaggacagggtcattctgcagaatggggtcctctggggtcagggctgtcctttccacatccagtttaggggaccctgaggtcaggggctgctgtgttgcctgccatatcataaattagagcccagagctgtttatctccttctcagcagggcatgttcctggtaagtcatccaatttacaccttcagtgcatatggcaaccgggagcatctcccaagtgggcattcccatgatacctccaagcctgaggctctgttgcggggctggcggtaattagaggtgattataattgctatgcggtattaatacatacaaaacagaagacaaatggaataatgaaaatattgtgaggtgccatgaacaaacagtaattggaataataagttacagaatgaatttatggagcgagatcgatgaggtgagagcttagggcatgagcacatctgcggtcctggataatcccattcaggaaaaactcccctcagaaccactgagctgaagacattttttccagagaagaaaagagctgctagcagccaggttgaaaccgaatctacgcagtgggagctacatgtgtgcctgcttgtatgcacaggtcagggtggccgcatgctctacggcaggggtccccagcctccagggtctaaggcctgatgggccgaggtggggctgatgtgataataaccaagtgaacaacaaatgtcatgcatttaaatcgtcccgaaaccatccccg

SEQ ID NO: 44135 - DNA, 2350 bp, Bovine  19866880454906
  misc_feature (1)..(1): n is a, c, g, or t
naccccaccccagagcctccctctccccgttagagccctgagtctttcttgacaacttgttcatgctctacctcgctcccaggagaagacccaaagttccgttcaatggctacgctggccacgagaacacgaatgttcgggccacgtttgagaaccctatgtacgaccgcaacatccagcccacagacatcatggccaccgaggcggagttcacagtcagcacggtgtgcacagcggtatagcctccaggcctggctgccatcgccgccgccaccgagagccccgccccagcagccggtgagccccgcacccctgtagacgtgtccagcgtgagggggatggagtgcccgctcctgccctgtgccagccactgaggctggcacctccctacgcctgggacagggacccttgtcaccccctttacagatgggaaaactgaggcacagagaaaggaattaacttggccaagatcacaaagctagcaagaagtaggatggcaggatcagaatccaatcccaggcagggggctccaagactgtgctctgagccactgggctcagcaaaatatccaagcaggtgtattagtcagaaccctccagagagaaagagacatatatatacacaatatatgcatatgtatgtccatatatatatataaactctcaagatatgtgtgtgtatatatatatattggggtttgtattatatacatagatacagagaaagaaggagaaatttattttcaggaattgacttacaggattgtggggccagcaagtctcaagtccacatggcaggtcagcaggctggaaattgcatcaggggctgaagttgtgatcttgagaaaggcagtctggaggcagaattccttcttctcaaaggagaccacagtcctttctcttaaggccttcaactaattggtgaggcccacctagattatggagggtaatctgttttattccaagtctactgatttaaatgttaatcatatctaaaaaaaattccttcagtgcaacagctagactggtgtttgaccaggcagctggacccgagcctaggcaggttggcatatacagttacatcacctagaacatcatagacagatcgacaccatatttggcattaagcaagacagatgggcctccgttacatagacagaggggaggacacacacatggaggctcctaagggtccactggacgctgtttctcacacacacatacacatacagacgtgtgaccaggaggagctgatgaatctggaaggtgtcttctttccccgctgtgtcccttctcactgatatcccttcctctgggggctgagaacctgcaggaagggcccccacgaggtgtgccatgttgtcttccgcagacattgctttctggcggaggccgggccctctctcaggtgcctccccaaccttagcacacccagctctggagagaagcgtcccagggctccagagaggtggggttccaacaggggcacaggggtcatcaagcagagcctaggccagggacagctctgccttacaggcccccgtctgcgtcagcatttgcgatgggccgtccctggagggggcaggcgccgtgggcaagggtgtaggctgacaggactggcagggctgggaaatgccagggcagctagactagtgagagggattgtgaagtctccaccccgccctgactgcctcctcacaccagctccctgaggattttcagcacttcagccagaggcccagaccacacacgcagtcagggctgccaccctcaaacctccctgccttaagctctctgccagctgccctcgaccctccccatccctctctgggtccacttttttcctctagatcatttctgttgcttaagcctaagcttaaaagtgtaggtattaaaaaaaaaaaaaaaaagtgtaggtattaagataacttatacataaagaaataaaaattattttcagaatatataagtgaagtgaaagttgttcagtcatatccaactctttgaaaactcatggactatacagtccatggaattctccaggccagaatactggagtgggtagctgttcccttctccaggggatcttcccaacccagggattgaacccaggtcttccacattgcaggcagacactttactatctgaaacaccagggaagcccataaatttattattacgtggccattattattatatttacttctttccttctgattttgaaagaagttaaaaccatcttcctgggcccctgaaagagtagtagccccataggctcgggggatcctgtggctgacaggtaagtcggccctgcctggggaaaatgtgacattaggaagatacatagtctt

SEQ ID NO: 44136 - DNA, 643 bp, Bovine  19866880454907
  misc_feature (1)..(1): n is a, c, g, or t
ntagtagccccataggctcgggggatcctgtggctgacaggtaagtcggccctgcctggggaaaatgtgacattaggaagatacatagtcttctgtgtacatttcctacctgtatccccaccctcagttcaggaagattaaaaatcaaaggtaaggatcaaggcaactaattgttttccttctctcccctttgttccttctctgctttgcctccctcctcccgccttttttctgctgccatcccccacccgctgcccctcttgttttgcaaactctggtgccacgtgtttgcacgcagttctccaggggacaggaagtaagctcccctggcacagtgcccagtgcccatcttcgtctgtctctctgcccgtgtctgctaccactgggacttgggccctcgccctgccgccatctgcccctgccaccctggagaggacgcccactctgccctgactgggggccctaaaggaagaagggccaccgcgggaggaaggaagttgtggattgaaaagagcaaaggatgttgtgggtgtgtacgtgtgtgtagggcctgaacgcacacagacccctctcctttatgtgagtcctacggaagagaccacagaagcttcaaaaagtgaattgtgtgtgaaagatgcccctg

SEQ ID NO: 44137 - DNA, 791 bp, Bovine  19866880486676
  misc_feature (1)..(1): n is a, c, g, or t
naccagcccagggacctaccctctccctgcaggtgaaaaatagctcttcaggatcacagaaaggcatccccaggggagaaaggcacagaaggaatggattttacgtattttttttttttttaaaggtttaaaaagtccttcatttccaaccctgcctgggggtatgagtggggaatagaacgaactgagaagggcacccaccctcccctggggagagtccaactcttccccgggagcaagcagtgtgcagggcagatcagaggccggcccttgcccttcttgccctgcctcctccatcggcagctcacactgctgccagcaagttccagaagcaaagaagtgtgggagccgaggccgaaggctgccttcttcacctcggcggtcactccagctcttccgcccttggacgttctctgggccccaccactgggctctcagggtgagtggacaggcaagaccaggaggcgcagcttggcccagcccactggcagcttccttaatgccgtctgtgacacagcagggcagtcggggcagggggcgtcacagtgcaggaaagggctgcagagacaccacgacaatctggaaaggaaaatctcctgctaacctgcatcgctttctgatcctgcctctgcaccggggcagccctttttcctattccccatcccgaggctgagtggagtccaggacaaagcactaagtggcttgtttgttacaaaacacctggagatgccaggggggctctcggcctgtcagtcagtccaggctcccacacagtcacacacatagcgtta

SEQ ID NO: 44138 - DNA, 878 bp, Bovine  19866880524982
  misc_feature (1)..(1): n is a, c, g, or t
nctccactggaagttgggctcacattccagaggctccccgtcgctcagtgtgtagcctgagtcgcagctgaaggtcaccagggcacccacgtagaagtcattcccatgacgttgcccgttgacggggatccctggatccagacagtggtccgactgcaatgtgatagctggaaaagagagcccacggctggaacagacatgttccctgcaaccacagggggaccccagctgactcacaaagggagggagagagagtcctggctgagagaaggctggactgtcatctgcctgctcctgaaatgtggctgtcggtactgggtgagggtatctgaagacccatctgtcagggacaaccggttggctgcaatcattcgttcgttcatcatccattcagtaaacatcagcggattgacacacacggcttggattacagataggatcacgggtaagaaaacaaccctctgctcctagtgctctccgccataactttctgcagtggtctgcaaagaactcagtcaacagtctctttcagaatggatgtgtgtatacgcatgactgagtccctttgctgttcacccgagactatcgcaacattgttaatcggttacatccccatgcaaaagaaaaaagtttaaaaatataagataaaattgactttgtccgatattaatgcggatatatcagctttatcttgaccaaaaaaaaaaaaaatctctttcaattgaggcaccagcaatgaatgcaggcaatgggagagggtgaggggagtgtgaaaatgacatctcacttcaacatcaccatccatcaagcactctgttccccggggtgcccagcaggctggcgcccagtcatctgcacgcagaaggggacctttcatt

SEQ ID NO: 44139 - DNA, 7763 bp, Bovine  19866880664293
  misc_feature (1)..(1): n is a, c, g, or t
nggggaacaggaagaaagaagggaacccagacttaaagaggactcaccacctgtcatgcgctgcacccagcattctccacttgcaaattcaaaccaactttcatgttattgctatctcagaatgacccgacctgtgaactatgatctctattttataggtcaggaaacagaggctcagaaagatgacatcagttgcccagaaccatgtaactaataagaggcagaacttgattaaacccacaagtgttctgactctttcctctccacccgccaactgtatgatcaaccacgtgggtggagtgagaggcggcctgaggcaagaaagtgaagggaatggcttcagacagggttgatcccagggcacgtgaggtacccgatgtctattactgtcacaggatttagagtccagctcccctgcaacataagtgatcccctgtctgaatttaggggcccatagaatggatttgacattgaggacacagatctactcctttaccatgttgagcctcagtttcttcatctgtaaagtggggtgataatacccatttcacagaatcgatatttgatattgatgagctgacaggacaaacagcccgctgcctgacctataaatgtgctttagaatgaggttggactagatgctcagggaagaaggacatcgagttcaacaagacctgctttacgctcagtgtggcttagggcagacagctctccccacagcatgccggtcccttgggaaagcgggggaagtctaggattggccttcatactgaagcttcttttggttgggagtccatctgcacaccagctctgtctaatcacgtccttgactttcctccgcacagccttccgacacaatgagtgccccgatcctggcgtcccagtgaatggcaagcggttcggtgacagcctccagctgggcagctccatctctttcctctgtgacgaaggcttcctcgggactcagggctcggagaccatcacctgtgtcctgaaggagggcagtgtggtctggaacagcgcggtgctacggtgcgaaggtgcgtgcctgcgggcgggcggggggcggagctggcagccggagacgctgaggagggggaccgagcagcccgaaacccggtggtcctcctctcccgggactggcgaccaccctctcaccctcatcctggaatggtcgagtctttatagaacaacattgcacagaaaattgagttataaccagagattaaactggagaaacgctggatctagactgtcaggcatcaaaaaacacctcttctttcaactgggaatgctctcaataccacagcagttaggagccctgctctcagctccttcagggagtgccatcagcctgaagcagcctggcagtgctgtgagtctgcgtgtctttcaaaatgccttccactctttctgtctccacacgctgctgctgctgctgctaagtcacttcagtcgtgtccgactccacacgctaatttccctcaattccctaggacatctcccaggcttggccttggtgcctctgttaaacactgccttgatatccttgcagtcaatctccaggagactaggggcagaccagccagaaaaaaaaaaaaacacacagcttgaagcaggcacaagattgttgtgatgtctcctcagtcctgccttgccatgcagacaggttttaacgcaatttcagggaccagccatctggtctacccagcttcagttatggaacacacaaataaagtttcttgagggcaggaattatgtcagacgtgtgcaccaagcacaatgcctggcacagaacaggcccttgataaatacttgtgaacaacggactccttgaaggcagtgatggtgtctaaggaggaggcaggggctgtggctccttccttctgggagccagaaagcttcctcctctcatctcacatgatggacagagtgtgagacctaagggaactctccatacccagtccccagacccagctctgagcagcccagccagcaagagggaaggtcaggagcccaaagaatggggcgtgccttaaagggggcacagccccaagagctgacaggcgggggtggggaagggagactcccaagagtacagagcctgtggcagagggtctggcatcaaggtggggccttcaggtcagaaggacctgggctggaaccatggcaagctgccttttccctctaaatctctgttgtttattttcagctgaaaaaaaagtggggagataataagatgcacatgtaaagggcagttcccagcataggcggagcacctcgtataagtattggccatgctcttgctggttggtaagctccgtgaggttagggaaccttcctcggccttgtatccccacagctggcttatggtctgacacccgctaggtgctcagtcaacactggctgatgaaccactgaatgaatgaatgaatgaccttttaactaggctagagcctccctaatggcctccagagccctgactctcatcagactgccttgtgtcttctccctgaaacttaccccactgagtcgccccggggggtaagtgacttgacttctctgtgcctcaattgctccatctgtaaagtacaattaagaaggggagccctctcccagggtggtcgtgagcagagaggcagtgccccatcagtgttggcagcgagcgtgatgttcacctaatattaaccattccttcaccaggcccagcagagtagcggtccactttggggagcgtgtggtgggttcatccttccagatgcctgtcccgctcatgacagacaggtgccgtcctgccctcacagcccccagccccctctgccattttacccagcgagtgagctcttctggaaacagcataagcttcagtgtcagagaagcatgaaactcctgtcttcgcccccgcccagctgtggacctgatgggctgggtaactccctccctgtcagcaggggggtaaacacgagtgtctgatggtggtctttggggatgagacagagtccagggtctgggggcttgttggtctggggtctcgccttccctttaggctaggcccctcattctccatcgtgctcctcaacctcctctcttgaattttcctccggtccgtctggcccaggacatcttccctgctgtctcctgctcacctggtctctcttttctcctggctcccttgttcctcttaaaccagcagcagagaactcgatcagacactgggcctcaccatgagtacattttctttaccagttccctggagcttggtcctctttccccaccaagactgtgggaattctggggcagaagcccagaccccagcacccctgagcctgtgggggctcagtcccagtggggctgacccccctgagaggcagccttctctccaccacccaccctcctgaatcagctgctcctagaccacagttctgccggagcagtgagctactccagaccacgagtgaatgcccaagagaactcggccttcgttcgtggaccttaaagaggattactgtttgataggcagagtcttaattttgaaattacagttgtcttgttcattctgtccctggggagggaagcgcttagggttggggacagtgggcaaccagaaataaggggcactctggtggaaagaggctgacttggcaccagggaaagtctgctcggtcttcctagaattatgggcatttgatgccaccatggttttcggggacctggggagcagcagatcagagggccagggtgagagctggacaccacctaggttgcccaagtctggacttgaaaccgtggagtacactggttaagaagcccctggaatctggccctccttggcccttttccctcctgtgccaagtcttggaagaatcctgctttgtaaccagcatctttgtctttccattttttctagttttgtttttgattaagtatccccaccttgtggacaattaaacgtggaagctaatggtcttttaaaaagtcttttaatatattctgagagcctcttagcttttgagaggctgtaataggacaagggagaaaatggcttcttctcctaaatttagaaagaaggatgatcatctggctgatataaagcagaagtcagtcagcaaactttttcttaaagggccagctaggaagcgttttcagctttgagggccctacggtctcagctcaactctgccatcattatgggaaagcagctttgacaaaacagaaatgaaggggtcggctttggtccctgggctgtaatttgctgacccctgatctacagaacagaggacataagggatccgtgtatttaaaatcagaaatttcctaggaaagacttccaagtagtgaagcagctacaaaggaacatgtggttctcacccccacgctcgtctcttcctctgtcttttaagcagggaccgattcatacagcactatgatgggtgtttaaaggtgtcacctcatatcggccatgtaccagtctaggaagtaggtgttgtaattgtcccatttaaagcacaaagaagccaagtcacttgcccagggtccttccggcttgtaagtgacagaaccagaatccacatccaggttcttggctaccccgttactgtaatttccttgaattctatcactagagagaatatgatttcaaacttgtttgtcaaagacttaaaagcgtctacaaataggatgaagagcaggttttccactttccatatcccagtagaaaattaaaacaaaaggaaacatattgccaatcgcaaaagacaaagaaaacaagacccacagaagcatcataaattgacagcataaaagaagatgacagcagcaggacaaacacatcagttacgataataaaggtaattaaactccctattaggagacaaagactctcaaactgggttttcaaaactatgctgtttaaaagaaatacacaggggaaaaggagataaattatctgcagtaagtatgtattttcgtgtttaaactcatacttgatggttgtaaaaaatttaaatgctacacgagtgcaataaagttaaagtggaaatattcatttcctaggcccacatcccagagcaaaatggcctatgcattttgtgtagacacatctacatttttttttcctatctgtatgtaaaattaatgtgttaattttatgcttaaaaaaaattcttataaaaaaagaaaaatccgttctccccactcccacaacagggaactaagtgatggtgggatgtcatttgggcttctaaggaaggagggtagttattgagtttctaacagtgtttcattaaatcttctggccccttttgttgagaaaggtgtcactctctatgcatgagaaatctgcacagcagcaaggtgaactgacttgcctgagatcgcccagctagtaataatcgagcagttattatgtgctaaatattaggccatgtgctctacaaacactgttctattacgtcctcctgacgaccatgggggaggtactgttaggatccttcacagctgagcaaactgaagcacagagtgggcgcggaacttgcccaaggccacacagctcagtgagcgggaggatgagcatccaagtccaggtattttgataccggagcgatcgctttgaaccaccaaatgcagtctgtttgactccagagttcgagctccttttgtttgaccacagaatggtggaggatgagctgtgagggattcaggggctgtggggaggcgtggttggagggaatcgaggaaaaggcttccacggcttctagacagtcacacggagagccccgtgagggcagtgctcagggtgggcattctcgtgtccacccgcagtggttagaaatgcaggctctggagccagactcagttgagttcagttcagttcagtcgctcagtcgtgtccgactctttgcgaccccatgaatcgcagcacgccaggcctccctgtccatcaccaactcccagagttcacccaaactcatgtccatcaagtcggtgatgccatccagccatctcatcctctgtcgtccccttctcctcctgcccccaatcccacccagcatcagggtcttttccaatgagtcaactcttcgcatgaagtggccaaagtattggagtttcagcctcagcatcagtccttccaatgaatacacaggactggtctcctttaggatggactggttggatctccttgcagtccaagggactcacaaggagacccaaccagacttcccaggtttaaatcctggctctgccacttctctgctgtgtgtttctagactagttacctaagccctctgttcccatttcctcaacttggaaatgaggctgagaccagcacctaccctgaattctgctgtgagggtgaacacccaggaagagcagagcacacgtcaattggtggctggcgccctgtgagagctcagtgagcctgtgtttctggggtcactctactccatccccatcccatatgcccttcaccctggagcatctgaggtcaggagaggtggggcctccctcccgggggaccccagcccctcgtcagaagcccagcatgttagccatctcgtgctgccataacaacataccacaagccaggtgatgtaaacaacagaaatgtgttttctcatgtttctggctgctggaagtccaagatcaaggtgccagcagggctggccgctctctcccaattcctctctccttagctagcagatggccgccgtcttgctgtgtcctcacgcggcctttttctctgtgaacgtgcactcctggtgtctcttcttcttgtaaggacagcagtccttttggactagggcccaaccttgtgacctcatttcaccgtcattgtgtccttcaagtcccctctccaaaaccagtcacgtgggagttaagatttcagcctatgactttgcagggtcctaatgcagtattttattccttccatcaagcatttattgagcacctactctactgggcactgggataaggcaccgggtccctcttattgctgaatccttctccccgttcaaggcagaaccctctcctctttttttttttttttgtcttttccctgtatgcatgtgtgtgtgcctgtgtgcatacccttcttttcagcctaacattttgttaaaaggaagaagggatatcttctttctaagttttattttatttacttatttggctgcgctgaatcttcgatacagcacgcaggatcttggttgcataatacaggatcttttccgtgaggcacacagactctctagtcgtggtcctcaggcttggtagccgcagtgcctgggtttcactgctatgtaccatgtgggatcttagttccccggccagggatcaaacccgtgtcccctcattgcccaggggattccttaccattgggaaatcagggaagtcatcagcctaacatgtttaatggaagttttcaaacacagagagtagtatagtgaaccccatgtgcccataacccagctgcagcaattataaacccatggcctatttcatttcattcataccccagcattaccagtatctcccaccattaccctcctctgggattattgtgaagcaaatttcaggcataatatgtaatcaacattttagtgtgtatctctaatagaggaaaagaacacgctaaaatagaacttcaatactactgtctttaacattatggagatagttatttaacacaatcaagtttccttgattctctatctaatcctttctttcatagcattttaagtcagacccctggtgaggctgacgca

SEQ ID NO: 44140 - DNA, 1281 bp, Bovine  19866880738421
  misc_feature (1)..(1): n is a, c, g, or t
nctcttggagcccagattgctgttcccttagtgcctatccccaccaggagatgaaggtcagctgggtctgtacctgctcaggtcaccagtggagtgtgtctggccctagccccgtgcatacagtcactcatcaccatgacagccaaatagggtagcttgggaagctactgtcttcagtccagagatttcaaaaagtaaagcaaggcgtcagaaagtttatgaggacttgcaaaggtctacacaggccaggtgtgaatcaggggtggaactgatgttgtgcctggtgctgtgagccagcactttaagtgactggctccagataatcctcaaaacagccaaggagacccactggaccaaggaggaggctggggctcagagaagttgaataacatgtctaaggagaggaacctagtacaaggcagagccaggattcgaacccagggtttgctgactccaagcagaccccaggtgtctgactcattggctcccccacggcagtcagttaccttcataagaagccttgaagcccaaggagctgccactgccatctgtctggaagaggagccacatttgatggttggtgctgacgatgagatctgggaccgacgtacctgtcaggctgtcaggagagagagatttagaggtgtgaacccaccgtggaccccaacagaaagactgtgtgactacggcatctaaaggaacatcgaaggagccagggtcactcgggcaaatcctgggtcccagtgttgctggctcacgtgctgggagactcaggaccgctccccctctgcacaggccgagctgcttctgcaccgcggactccccctccccagaccccctgggctcaggggagagatctgtgtcctcacttgcatagggagggatggctggagccaggtccaatcaagtgggtgtctacactcccgcaacctcccatctttcatgtgaacaggactgtagggaagacacggacagaaacccatttccccaattggaacccagccactctttttaatgaggcatctccactctagcatgagaaagcgaggctttaagtgcagccccgacctagggcaacactcctttcaaaaaaacaagtttagacatggagaggattctgattcaactcgcattcaccaggcacctacccaagacagatcatttcccttccattatctcatttagtgtccccacagcccagcgaggtaggggacgtgttacccccattgtacagatgagaagacggaggtacagaatgggcagggctttcccaaggtccgc

SEQ ID NO: 44141 - DNA, 1906 bp, Bovine  19866880761161
  misc_feature (1)..(1): n is a, c, g, or t
ncctaatctgatttgtgggttcacagatccagcagctacaacatgtctgtccaacctgtgaaggtgaaaaagtgtaggtttcaacaaaatccctgacaaggaaatactcaagatacattaaggaaattaaaagatctgaaaatccctggatgtggaagaatgcaaggggaatcagagggcacctgggtaaagaggatgttggcacgttcacttccatcaggcagaaggaaagaggtgcaggttgagcccagagcacaagagccatccccaccctctgggttccagagatcatgaccatcagagaaagtgtatggaggtatcaaatgtttgtttttgatgagcaggtagaggctcgaacactatctttaaggtcaggcttcaagctcaggcccttttccctcacttcttgccagggccccagaaccctctcttcttccctatgaggtctctagacccttccaccttcagaacctctcccgactcctcacctacagagctttctaagaatctcctcactgccagggccttctacctccctccttatccccgacccctctatgaccctttccatctccggacgcttcatcctctgaccggccctcatcccccaccccccataaaagcctctttctcccgtctcacctttccccgaccccctgtgataaccaccacgtcctaagtctcctccagcccagagccttgagtctcagctgcccccgcccagccacccggactcacccaccaagacacccacttcacaacagggcggaagtgctccaggactcgcgcagggaatgctgggacgcggagtccgaacagcgccaccccgtgaatggcgcttctgtgactacaactcccagaaggaaccgcgcgagcgccagagtgtggccccgccccctcctcgcttgcggtcttgcaggtgtagtcagccaatagatgcaccatctcctccggcaccggaacaaatcggaagagattattacgcatgggggcggggtctgttgtgatcccggtcctttccacaggctctggaataacggcaccgcccagggggcgggcattcaagctcaaggagcggagtctattgaagctcagagcaagagcgggtggctggggggtatattaaagcagaaacaataagaaataaggagagagggtgactagaggtgacccacctggagggcgggagagagttggacaatggtaggttcaatttccagttcacagttaagctgcgtgtctttggctcaattgtgaatctcgctgtcttcacctgtgaagtgaagataataaaagcatctgtgtcgctgagtttttgtgagacttactgggataatacacgtaaaacgattaactcagaacaggggtcttaataatacacagggaatattagctattatcatgtaaatagtggggagcttggcacttcgtgcgtgctggaagagagttaattgttatcagagtaataatcaccagaataattttaatataaatgcagttgctttgctcccttatgaatactttggagtaagagcaatctaacatgggtttgagaatgtgggttttgtagtcagacatggatccaaatcccagcccagtgacttcacagctatgtggccttgaacgaatgactgcgtctcttttggcttcaggtttttagtaggtaaaatgcaggcgatagaacctacattgcagggtattgtgaagatagatgaaataatgcagggaaagcaaggtctctgaagtcaaactgcttgtgtctgacatttcttactttcatatgcaggatgtagttggtttcactagttgtgaaacctggggcaaattacttaacctctttatgcctcagttttcttacctataaaattggaattacaatagtgtcatctacctgctaggaataaat

SEQ ID NO: 44142 - DNA, 1643 bp, Bovine  19866880780823
  misc_feature (1)..(1): n is a, c, g, or t
ntagcatgcacaaaagataagatacattttcttccttgtggattagccatttttaaccaattaactctgtaaatattccacccattatcaactttgctgctactgctagctgctgctaagttgttcagtcgtgtccgactctgtgcgaccccatagacagcagcccaccaggctcccccaatccctgggattctccaggcaagaacactggagtgggatgccatttccttctccaatgagtgaaagtgaaaagtgaaagtgaagtcgctcagtcatgtccggctcttcatgaccccatggactgcagcccaccagcctcttccatccatgggattttccaggcaagagtactggagtggggtgccatcaccttctccgattatcaactttaaagccacctttattacatatatagttcaaccatttttggggtcaactttctatgctaccacagttatttttttgtctattcctgcacatgagctggacttctgaggtggtgctagtggtaaagaacctacttgctaatgcaggagacatagagatacacgttcaatccctgggtcaggaaaatcccctgcatgagggtctggcaagccattctagtattcttgcctggagaatcccatggacagaggagcctgtcaggctacagcccagtcagacaggactcaagtgacttaacacgcttgtacatgagctatactgttttaattatggtagctttgtaatatatttaatatttagtagggcaagttccctctcatttgtcttcttttaacttaagaaattcttctctcatatttattcttttagataaactcaagaattttctcaaattaagaaaaacaacaactctccgtactcccctcaaagacccaaaataatttctataattctcactgattaacattaaatatatggattgacaacagagaaaacatatatctacatgatattaagtcttcctatgtgtatatatgacatctgattccatttaataaagttgtcttttatatctcccagtaaaagtctgtacttattcctgggcattttaatattttttattgattttggcatttgggtctttgtatgcatttatttcctaacagaatattgcttgtccataagaaaatggctgtgatggtccagttcatcattatatataggtgatggatttatccctgacaaatctgagagaatctgcacacagccagtacatctaaccttcttttttctctattagatgcttccagttttttcagctttattgaggtgtaattgacaaataaacttgatttttaatgtgcatgaagccactacatctaataagacaggtcagcaagatggctgccttcaaaatgaatatgttaagtggatcgtgtttaacacacagttacaatgttacattcctatgaacactgcccctgcgtatctgtttacacagtattcaagtttctactagggcatacatgtagaactaaaatggagaagcaggtcacacagggaaggtacatcttcaactttgtcagacattgtcagtttgctcttcgaagagtaaaccaatttaatctctctaccagcaccacagactggttccaaataggaaaaggagtacgtcaaggctgtatattgtcacccgg

SEQ ID NO: 44143 - DNA, 955 bp, Bovine  19866880824453
  misc_feature (1)..(1): n is a, c, g, or t
nttgttttataatctgtatcttatctatgactatgtttctttttcattattaaaattatatatttgtggcttctttattccttgaccagtcctgcatattctgtctagaattctgtctattctattctgttatttatttttttccttttttcagtcatttttccttttatctttaaacgtatctttctcctacttcctttggattcattctattattcaagctacctaaatccttatttatttttaatctagatgatatgccagagagtaacagaggtatattaaatcttctacaatgactgtgactttattaaaattttttacatttctagcaatttttaatttattcatgctatgttatttggcacataaagttttactgtggattgattgtacattttattagtataaaagagctctctttttcatttcattatgagatgaaagaagaattttcaaatttatcttataataaagtgatttcatttttctgtggtttaccatcttctgctcattgcctccattccatttttaattgggtgatcatgtttttcatctctgttcaatctttcctcatctcagattgctctgttttcattattgcttatttttgtgtcataaatataatatcctctcaaatcctgctaagaatacaaattagaagcttttaaagtatttttttttttcctttgttgcttacagagggggcaattaagtctgactcctcagacaggtcctgtcttctgatctactaaatatttgtacatatccagttcattttcctgttagcaaatcacgacagatagagaagaatggacagtggaaagactcagtcatctctaaggtggggaagaagaattaagccagaagaggccacaacatagtaggagcctctcctggtgctaaagtgagtgtgtgtgaaggagtgtgcatgcctgtgtgtgtgtgtgtgtgt

SEQ ID NO: 44144 - DNA, 1404 bp, Bovine  19866880827585
  misc_feature (1)..(1): n is a, c, g, or t
naggctgcgggtgcactccaaggcatggggaagctataccccaaaacaaaaactaaacacgcgtgcacacagactcacagacccgctgggttcacttctaaattaggtcttgcatgtccactgccacagtaatgctgtaaagcagcgctctataatcactgccttttatttatttttctaattttatctttaattggaggataattgctttacaacattggtttggtttctgccacacatcaacatgagttagccataggtgtacatatgcccccttcctcttgaacctccctcccacctcccaccctttcccaccctttccagattgttacagagccctggattgagttccccgagtcatatagcaaatttccattggctatctattttacatatgttagtgtatatgcttccattagtcactgccttttagccaaagaaaagagattcagagaggtgaagagatgggcccaaggacacccagttaaacaatggtgatgactggatttgcacccaattctgtagggctttgttttccgggatttccccgcacttcccagggatagaggatgggatgggaatggatgtgaaaaagctcggcctgatgcttagtcaataatgtggcagggaatgcagaatccagtgggtcaaaatcactggaggggcttgactgggacacacaacacatctggagaaaaagatgagcatgttactcgactgtgaactttcttctgaaacaccagccctcccccaccctgggcttctgggtgtaaacacccagcattgctaagagaacaacctgcctccagtgaaaaggtcctggggagagatcagataccaccaccgcctgaaggcattgctgttctggctcctcaaaaggaatttggaaatgaccgactggcaaagcgtcccttgatcctcagacttgatgattctgtgcctgtctactcagcgggtgtctcggttccctggaaatggagtgttgtgctattcaaatttattcaagcatccattcaacacatgctgctgagcacctactgtgtgcccagtcctatcccaggcagtgaacaaaacagatgtccttgccctacagaggcattgctcgagcacaaggatatctattttcttgtccagtacttcccaattcataaagtgtttccatacccacagctccatttgatcttcaccttagtacaagatgggtcaggtaggagccatgagctacatttacaagtgaaaaaaaataagcccagggaaaataggggctttgctgaactgcctgtggccagctggtggcaaagctgagagcaataaccaagaactcttctttggtttgagtttttagaaaaaaaattagctaggtggaatttttgaaataactaaaaccagtcagggtgcaaggca

SEQ ID NO: 44145 - DNA, 893 bp, Bovine  19866880866233
  misc_feature (1)..(1): n is a, c, g, or t
nctataggggacatgtcctgaaaagtaatgtatacattcatggcagggaagagacatgcacagtaatattctacttcctacagttcttcacgttagaaaatgcttccaaacccacccccacatttgtgcgtcacaacattccactatagttgtggggggggctgttcatcccaagtctgctccagaggggctgagatgtagagagtttcgtgcagccagtggacgccagagctcacagccagggtcttctgattctgagtcaggtactcggtccattgtagcagactgagttataccccacaagagcgttgacctggcccagggagttgggggaagccttgtggaagaggcataatgtaagctgcctcaagggataagtaagatgtaatcaggcagagaagcagaagggtgggtagcagtagggtggtggggaagtaagcagtcgagggatgggtgtgaagcatcactggatagaaggtgatcctgggaccctccatcccgccacaggttggaagcaccgtgctcttccgttgtcagaaaggttacctgctccagggctccacctccaggacgtgcctccccaacctgacctggagcggaaccccgcccgactgtgtccgtgagtgctcccagataactcctctcagcagctcatagcctccccgacctgggcctccaggatgtgcttgaatgctctgagtgacagggagctcacagcttctcattgggaccgtagtggtctctttgcagtcctgatcccttgggtccccccacccccagaaggtatttcttcacaaatgcctttctggtatttgaaggcaattcctatgccttagcaaagaaaaagaaagaactttcccatggctgtagataccaacagtgacaaggcccac

SEQ ID NO: 44146 - DNA, 1435 bp, Bovine  19866880915763
  misc_feature (1)..(1): n is a, c, g, or t
nttcagggctgatgtaatgcttggggtcaacgggatcctttagccgattctaagaataccgccaaggattcatctgttagacttgtgagcaatactgttctcatactgggaggcggtgttgctgggtggctaagggcttggcccctggagtcaggtggatttgaactagcaaggatttgcatggattggaacttgctgctaccgtctactcactgtgtgagcctggcaagttacctaatctctgtgagctgcagtgtcttttatcttaaatggggttatggccttctctccccttggctcaaactttccatacctataaaatacagagattacagggatgagactgaatgtgtcctagggactagtttcactttgctaaatttgatgggagggctttgagtagcaggttggaaaagtaacacccagtgcagaaaagggaaaggtgggtagactcaggaaaaggaaggagaaactcaacagaaagaatcaccagttcctttgttttgtgttgttttatttttttgcaaacatggttttaatattatttttcactttcacttcattataattaataagtcaatatcatactttaatttcagtattattaatatccaacatcactataaatgttataaaggcatttaaatttttgtccatattagtttttatcttctttacactttatatattaaaaaaatgtttcaatgaccctatatcatttttgcaatcagaaaaatcaaatattgctttcacattgaaaaatatcacccccaaacctttcaccctaatacagtttttattcgggggctcatgtccagtctttacccatatatatatgtaaatatttattagctataatccaaagtgtacatataattttatgatgtactgtttgactttaaaatgtttaacattgttccttctacaggatcatatttatcactttaatgattgcattcaaaccacaccacattaaaggctataatttacctcacattattgggctgacatgtaggttgttcacattttttcctctataataaaattatgtcactgtaaacatatttgtccatgtggctcctttcttttgaattaattcctggagattacagagtcagaatatttgaatagttttgtggctgttgataagagctcattcactcccttccagaactatatcagctttactgtgcaactgacaagaaatacatatgagtttccatgaagcctcagcaatatgagttgttcgtttttccccctaggcaaatggactgccttttcacattaattctattttctctcatatgaatcctctgagcatattctttgctcatcttgggtgatgttcttgcataaattacaaaactctacttcagtattggagagttgctctttggcacatttgttgcaatatttttttcatgctatcattttc

SEQ ID NO: 44147 - DNA, 1136 bp, Bovine  19866880929139
  misc_feature (1)..(1): n is a, c, g, or t
nggtttgatccctgggttaggaagatcccctggtagaaggaaatggcaacccactccagtattcttgcctggagaattccatagacagaggaacctggcgggctacagtccatggggtcgcaaagagtcagacacgactgagtgactaacactttcacttttcagaggatacaattggatttacactttttctacaaaaacataattttacttttttaaaaaagcattaaatatgtaagtccacatcacccacccctcaaaagattaatttagacaaaatttaaggaacatccactatgtgcagtagaatatcatcaaattactatctcttataagcatatttcctgatgaataaatatgtgaataaatgaaaactctttcacacatggattcagagaagctctgcatttccagatgtttcttcagaaggaatgggtgccttataatagtcatctttcccctagagaaaatattcattcccacttcaagagggacaactcaactcctcaagtctttagaaaagcctagagccacctttctctgtatccacggtttctacattggtttcctcccccatcagaaagagaacacaggaagatcaggttacattggtgtcttgggcctgtataaattcctgggaggttctctcttctgttacgaaaagtttccctggcaaccatatttacacactcaattccctcccctcctctgattcgctggttggtataaaaattaatttgcattgaatcgctgaagcttacaagttaatcagtttaacagactcacaaaatgttagaatttggtttctagccaaagctcacttcttgcggggactgtcccctttcttttgaaatctaaattgtaattctgttcagttcaaatattttaaaacacatcaaatatgtgtgctggatatttctggctatagataaagaaaagaaaattctcctaatggcatctggtcaatattattagttaaggaagatcaagagaggaggatgtactttacttctaagttaagcgagatcagctatgataaagagctagaagagacgagtcaaggaccaagacaaagatgtctaagccctggaaatgagaattcaggcctaagactctggggatcagagctcaggacc

SEQ ID NO: 44148 - DNA, 803 bp, Bovine  19866880934736
  misc_feature (1)..(1): n is a, c, g, or t
naatttctcgttgtaatcctcaccatatgccgaaggacagagacacacgaggaaccagagaggttaagtaacttgcccaaggctgtgcatcaatacaagtggtgcagatgatccttcagccccgggtgtctgacttctgagccatatcagaaaacggcatcagaggacacagctcagatctatttccaatggtctgtgcggaaaaatttaccctgcctgaacacagaccccttaagatatactatcctcaaaaacctaagtgcttagcctggcttacagaggaggccgtgttatctaccacaagatgattcggcaacaatgaacttaaatcccagccactgctggagaatatctgcttctgaattcaatttggttcaattcgatccaatttaattcagtgcagttatcgagtgctcactattcacccagtaagggctggctacggaaggcccagagagaaaggcagagattccttttatttagttatgggaaatcataactacttgaggcatggggcattacacgaggacaggggagctgggggtgttggaagcagggttgaatgtagagaagattctaccagtttagtctaataggaagtctcaggcataatacatatgaaagaaattgggattaatgagtgcttgagggcaagactccagtgacggagaacctggctctattacttcctagtggagtcacctagggcagcttatttagctttctgagcctcagtttcctcgtctgtaagagggtaatgaaaataatacctgtactcatagaaggaaagggttaagagagat

SEQ ID NO: 44149 - DNA, 1759 bp, Bovine  19866880954754
  misc_feature (1)..(1): n is a, c, g, or t
nctagaccctggggacgggtgggacaaggaagcaagacctctgtgccaagtggggctgggtagagataagttctattaggaagtgccaaagggaccagctctgggtgtcctgtgtgcctggggcagggcttgcttggggacttgcatttcataagcaacctctgggaaaggatctggttaattgcccagggggacccagcttcagctccttctgacaattttccatcggccaagttcatcgggtctgtagctgattctaccctgctcagtgcctcttgctacctttggcagcttgctgtttccagcgtccaaacttctgccttcacccctaaccctctctacaaccccctgagacacagaaatgacaagaatcactgcttcagtttgcttctagagaaggggcccagggttaaaaccagaggtgacaactttgggactggggccgggaggaaatgaccccaaagcaggctcaaatgagtctcagagtcaaacagaaacactgttccagacccttgtttctgatttgactgtagggataggaattggcaaaacaaagcgtgagcggcctcatgggggatacatgaagtcagcagtgagaaggcatccaagggcttggaagagcacagcagagaggcgtcagtaaccagaggaggacggcagggcccttcctgattctagctgggccttctaggagggggagggggggggagggataaatggggccccaggctcctttcacattacatgacgcatctattagaaataaaggctcaaaaatgagtgaagccacaaaaaagagtgccttctgtttttcctgtcatgctggagccccatgcctggctctgcagtccttgaaactggtccacccacaccaccactggcctgtgccctgcactggacatcctcagagggacagtcagtgggggccacagggcagactcactggtaaaggtgatgttgaagcctctcttccccgtggagtggtcagtctggaactcgagacgggccacgtggccactgctggtgatggaagaggggagctggtttcctgagaaggtgcccaggacgggggcctcagccgtggccccatccttgatgaccaggaagtcaaactgaggctccacgtcgatgtcattgaaggccaagtggatgcggctctcgggccgggcgaggatgagccagacacagtggaggtggttgccgtagtcctctgggtagttgggcgacaggacgatcccagaagggctggtgaagttgaagaagcaggaaactgcaagagaagagccatggaggtcagtgagcgtccctggcgctgtgcccaggccactgagggcaggcaggggggcatgtccttagtctaaaagcaatagagagaaaaggtgactggggtttggctggactggctgggctctgagctctaggcagcagacgtgctgggttcatgctgcgtgtggtgctgggaagggtccctctggcacactgcgggcaaggcggagctgctctcctggccttcctgcccttgcggtgagccgatcccaggagtgtctgctgctctcaggccctcctgttggggaaaaaccaccatttaagctgaagtggagtcccagtgcctggttcctcttagctggtggtgatcccccagagtggtaaccagggtagagatagtgccactccatttctgtcctttaaaccttctcggtggggaaatgattgtgccttggggattctggcaactggaagctacaaaactatgctaaag

SEQ ID NO: 44150 - DNA, 1955 bp, Bovine  19866881036896
  misc_feature (1)..(1): n is a, c, g, or t
nctcattcaatttgcaatgctttatctcttcagagtctggtaatgactccacttatatccctttagtaaaaaccccagcccccagatgggtatttggggagtgggacgtttggttaggaggctgcaagagaagcagtgtttttcagcagcctgatttatgggctggcaggaaatgccagctctgccatattctgtccctgtgaccttgggccagatgcttaacctctctgatcttcaatctcctcctctctaaatctacctcccagggccagggagagaattaggagtcaattggtgcaatataataaagtgactaagaaccggcttttgactgcaatggcctgacatcaacatagaccagccggagtcctttgaccagttcacctctctgagccttggttttctcatctgcaaaacaggagagaattccctcctccatggcactgggaaatgagaagaggtgaaagcacttgctcatggagggcacttaatatgtgtttgtcaaactggaatcaacccactttgtatttctctcgaagaagccccacaaggatccctggagagagctgttcctgctcccaaccccccaccccaagaaaaggaagttcgttttgtcctgagtggggcatggatgttaagttccctgagtgcttctaaagtacaccggggctgaaactctgtggctctcaaaggaagcagtccagagaggggaggagtcacctctcgacctcagaggtcatcctgctccccaccccccgagcttgggcccccatgcccaaagtccacccaaccatatagacacgcttggtgtaagtcccaaagatattttatttgcattgttcaggatagcagccacagcctgtggattctagggaagagcaggccaggaggagcaccagaatctgaggcttccagaaagctcggaagaagcgtgctgttgcttcctgcttcattccatgggtaatgaccccgaaccccagcatcactcagcaggcacgtgccagagccagggtggaggcaggctctccaagcagccctgtttcatcaccgtggtatttccaggccgcctacccctggaccagcgtgtgccagccttcatgtgagacagtcacagcagcatcatcttttgtaagacgtgtgtccacacaaaccccgcttcacagcatgctcctctcccgactgtgtgtcccgactccccctttgcttgtgtggcactcagtgcctcaatttaccccatagaggaggccctttatctgctgggtcctcgtctcacctttccttaatattcttttgctctcagcactccattttatttttttaacttttaattttgtattggagtatagccgattaacaatgttgtgatagtttcagatagatagtaaaggagaccagccatacatattcatacatgtatccatttccctcccaaaaccccctcccgtccaggcttccacataatatcgagcagagttccctgtgctatacagtaggaccttgtaggtgatccattttaaatacagcagtgggtacatgtcgatcccaaactccctagcggtccctgcctcccacccttcccccactggtaaccagaagttcattctctaagtccgtccataccccactttaatgtccctgcaccctctgccctactcccttccccatgacccctctgaccttacctccctcatctagtcctgcagccgcactggcttccttgctgttgcgtggacaccaggtgggctcctcccacctcaggacctttgcacatactgccctttccacctgaacgctcttcctcccagatgtcaccccactcctccatgtccctcaggtgtcacctctaaggtcacattctcggtgaggacttcctgaccccctattgaaaaatatgagtgcttctttctcctctttaaaacgtctgtatttttctcagctgggattcccacacctaa

SEQ ID NO: 44151 - DNA, 1744 bp, Bovine  19866881099337
  misc_feature (1)..(1): n is a, c, g, or t
naacaacaaccatctccttctctgctccgaaaacaccgaggctttgttttacacatgtgtatatctctagggcttcagacattatggatcctcagtacatgtttgctgaaagaatgaattaatcatccatgagtaatcccacatttggaagtgattggtcctgggacaagcccaagttgtgggtaggacccaagcacccagtctcctctctcccaccagcttcttaccttgacagagaggaatggcctcactccacaggtggtagccctgggggtgccgggtacaaatggccatgctgtgtcccaccaagcggtagccggcattgcagccaaagtggatggagcctccgggctgggtgctggtctggcccagaaggaagccatggaggggagccctgggcaggctgcagtagggagctgcatggcaagatgagggtcagggaccgtgtgcagcgggaagacagaggtggcccttcttcatggcagcccccccaccctccaccccccgccttgcttctccccctccttcccatctttaccactgccaggtcaactgctagttaggacgtcgatactgaaaagcagtcaatcaatctaggacagccaaagaaacgaaaagaaatgaaaggaaaagagaagggaagagaaggaaaagaaagggggagaaggaaaggaacaacaagagaagaaagaaaaaaaggaacagttctatgaagccctgggtcacctttgggtctggaggcagcacaggttgtgcagctaagttcaggctctcaaatcctgctagctcccaaaaagacacagaaaacaatctgatgtgcttggtttcagaaagatgtgactgcagggctgaggcctctggagtcagggctgcgcttgagttccactgcccaactttccacaggtctgtgacgtgagacaaatctctcaggctcttttagctccactttcctcacctgaacgttgggattggcaatgtcttcctcataggttttgggataatttaaatgggatctcgtctgtaaagcccctagcctggtgcagggcactctgtgctccgtaaatggtccgagtcctgctttctgttgtgtagggggctggagggggagagggagttgtggcaatccaggacgtgaaacccacagtcctcgtttccccttgacatacaatttcaatttatttcattcatttatccaacagacagacatcaagtgtctcttacatgtcaggtgctgttctaagtgctgggaatacgacagtgaagagaatagacgaagaccccagcctcagagaccttgcaacacaaacctctgccagggagcctcagggggaagttctgtgaggccaggaaagagggctgaccaaaggagcacaaagaaaaagcccgttcatctgctttcagcatccctggtgcgggataagtcaggacgtagatgccaggacccttcctgtgtctgctggcctcttacgtgattacatccctcagctggtgaaactgaagttctcaaacctccccttccgaggcagatgccctcctttgcttctgctttgccgactgcatcctgtttatgtgggatccacaggtctacctcagtccccagcaagaatctcagttataaaatatacttagtcacggtgatagaggcgtgggcaaattacaagattctcctgtgtttccattaaggactcactgtttcaccatgtaattaatttactttctgcagtggcatatgtattataagtga

SEQ ID NO: 44152 - DNA, 943 bp, Bovine  19866881118476
  misc_feature (1)..(1): n is a, c, g, or t
ngattttcccaacccagggattgaacccaggtctcctgcactgcagacagattctttaccacctgagccacaggggaaaccctagaatactggagtgagtagcctgtcccttctccagcagattttcccaacccaggaattgaaccagggtctcctgctttgcaggtggattctttaccaactgagctctgaaggctggtggagaaaccccttactcagcatccagaacagaagtgggggcaccacggtcctggagaagccacagttcagcccacctggctgcctggtcagcccttgtcctgtttgctccctggccttccaggggccctcctgactttctctcccttccagagtgtggggtacaaatttggaggaaccttgagcagttgtctggggtatctgatgacagaattccttccccagacttttagatatctttttctggatgcaaagctctcactgccttcccaaagcagcccgttccattattagaaacttttccttagattgccttaaactctacctctctgtgcccttagattgcaggatctgattgctgctcttagccagaattttgcctcactactggaaggtgaataccagcttggagagcctgctgtccataatggggagatgaaaaagtcagtgccctgagatttcttctccacctactactcagggctccttctccatacctgggggcccctcatatcctcgattggcctcctgtcctgatcctgtcccctccccattcagtcagctgcccccatggcctctctctagacttggtcatcatcagtctgggccccccgccaaagttgcagccttcacatgtcccactctgggagcccccatccttccagcccatgtcctgtgattccacccccaacagcccttcctcagagtcctctggtctgctgacgctgccattctcagcatctcc

SEQ ID NO: 44153 - DNA, 692 bp, Bovine  19866881130424
  misc_feature (1)..(1): n is a, c, g, or t
nccaccctaaactctctgcgacattatctcttataattttcacaaaacccataaagcacgggcatcattattaatccatgttgcagatgtggactgtggggaccagagaggtttctcatgcaatgtcatctagagttagtaagtagaagagcctgggtcaaatcccctgtgtctgattcccaaacctaggcccttaatcatcgcactccattgcctcccctgtatggtcagaacagtgagctatttttcttccagagaatcatttacatgtatatgctgtaaagctggagttgaaagctaagtctgtttttaattgggaagggataagattgcttcttgtttggctttataaataaattcagtaagtgtctgatggtgacggtttgttcatttatttattcacccaagaaatatttactgaacaccactgtgtgccgggaccactctaggccctggagatacagctggaagcagaacagccaaggtctctgttcccatcataatgcacaagcgagctacaataaagaggaaaacacgtgaactagcaagatgattacaggttgtgctatgaagggaacacaacacggaaacgtgacaaatttgatgaaaggggtgaaagggtaagcccagaagaaggtgatcaaagaagcctgtctgaggagaaggatgttggagctgaaaaccgagtgaca

SEQ ID NO: 44154 - DNA, 1073 bp, Bovine  19866881162899
  misc_feature (1)..(1): n is a, c, g, or t
nctacaatgttggacagtcagtgaccttcgaatgcctcccagggtatcaactgatgggccaccctgtcctcacatgtcaacatggcaccaaccggaactgggaccacccccctgcccaggtgtgaaggtatgttcctcagttagtcctggtgattctttttcaggacagggttcacgcatgtgcctgctccgtgggatcacccatgctaggagatcctagcaaacattgtccatcatgttttcatatggactggactgagcctatccagactgggcgcagagctctgggccaacactagggaggacctggaggagacacaggtcaaagccaaaggaatacattcttagcccttgggaacagccaacctcatgggccagatgtcccagtcagaagcaaagacactgatatgctgagaggtagagagtcaatcatggtgctttcctaaagggagaagagaagaaagcatctttctagaaaagttttgttcctctcttcataccccccaacttattccccttctcctacatgaacctagagagatctgagttgaggatatcagagagctacaggggatacttccctgggccttcattaaccagaatcagggtggaggaggaccaggagctcatgctgtccctatccatgtctgcacatctccgttcaattttcccttcctttttcttgaggagaagctggaatttgtcttgaaagggcaaggtttagcaggaggacagtatgattcaggagaaagtgccccagctctggaatcagatcaccctaggctttatctctgaactgcttcacctctctgacctccagtttcttccttggtatgatggggcttctcttcgtaagaactgagaggattccaagatggcatgtgtaaagtgcccagcacggtaactggttcaaaatccacaagttggaaaagtattaactctccatagataaagacaccttgcttgcacaactgatctattctggtgttagactataaggtcgtaatctctaaaactattaaattcccagttagattttcaaattttcaaaatcatacccatgcataatcagt

SEQ ID NO: 44155 - DNA, 908 bp, Bovine  19866881198887
  misc_feature (1)..(1): n is a, c, g, or t
nacttctgcagcaaagggaaaacacttcgtagagcattgaagactttcctgtgctcagaggtcagccgactggtacagaactgcctctaccacccggcgcttttatggaaatgttgatggggctcccagctgtattccaagagcattttcatggagaatcgtgggttccctgggcaaattcttacaacactcaactgccttttgagctgtcaccaaagtattcattcccactcaatgagcaatttttgccctggctgaaacacttgctgaaatgatttcataaatcatcttttccttgttttcaaacactcacgaatcaaagccaccatcaaattcaacatccattccttaattcacccacggcttctattttctagctaaaacccattacttccttagactcctcacttactttttacttccattaccaccctgggcagttggctctattttgggaaatgctttttcacaataaaataaagattttcatcacttcaaaggaattgctgcataaacccaagaagagaaccccagagagccagagatgtccagtggtcatctagatttgctcactagctgagtgtctcccttccgtgcaattcaaatctaagcctcggcatcattaagaaagatggcccaaatcaaagttcactttatggagactgagtcttcgaggatttgcagccataaggacagtcagctcccatgactgtggttgagatgtgcaggtgggaccaaggttggcctggagttgagatctagaaggtttcatggctagcagactggctggagtctggggtcaagatgagagatccaaagtgtaacttaatgaaccagggaatccctgggagttcaggaacccttgtaggcttcctatcctataaaatccagatctgaataattttttc

SEQ ID NO: 44156 - DNA, 706 bp, Bovine  19866881206410
  misc_feature (1)..(1): n is a, c, g, or t
ncagccaggaagactccagccgttgttcagataactcaagttatgaggaacccttgtcccccatctcagccagctcgtccacctcccgccagcaacaaggcctgcgggacctggagctccctgacatgcacatgcgggacctggcaggcatgggacaccacttcctgtcaagtgagcccaccaagtggaacgtggacgatgtctacgaattcatccgctctctgccaggctgccaggaaatcacaggggagttccatggccaggagatcgatgggcaagctctgctgctgctcaatgaggaccacctgatgagtgccataaacatcaagctggggcccaccctcaagatctacatgtgcatcagcatgctcaaggagcagggccggtggagggaagggccccccccgctgtggggcgtggctggggaaaggaggtctcgggacctccttggtggctctcaggggcctttctttctgtgggaggggcagagaggtaggtggcacagaagatggggctttatgcttgtaaatatttgatagcactggcttcctccaaagtcccacgactctagccccgcttttcttcctctctttctgtcccccattttccagggggtatgtggtcagggcttccaagctgagttgggtcacttcccagggcagcccgtcgggcctggagagaggcttcggaagccctcgcctgcctt

SEQ ID NO: 44157 - DNA, 1048 bp, Bovine  19866881231309
  misc_feature (1)..(1): n is a, c, g, or t
ncgggcaacttgggtcaccaggtaactgcttctgtgtgtgatgggcaatttggcaggatgatttatggggactcaaatggttacagtattgccctttgacccagggaattgtacctctggaaagttctcctcaagaaacaagcatggccaggtacaacattctgcttataaggatgtgtcagaacactgtacttaagaggggaatgaagaggcctgaggcttgggacccttcagtagaagaatgtgaccatttgtctggtggccctcagctctggcaagttcctgtgcagtgagaagggctttgcaaccagggcactatgaaggatgggccttcaaagctatctttgtcttccagaggattcacgtcttcctgtggccctacagtaagtcaagaagtgacttacagagactgtgctggacaggggtattccatgaagtctcgctccctatcaaatttctcttctttatctgtcccttacagaaatcactaactaaatgcctactggtattggtcgcttacatggaactgcttcttttgacaggcaaggctgaaatgaagtgtctttaacctttttttcctggctctacaagcgggagaagccctactggaattgcaggcagagggtttcaggaaaaaaaaccctctgtaaggatacaacctaatctcaacactttaagaaagatcttttatataaattattgcttgtgatctttacttgaagagtagtcacaggagctattatcccacttttggtgaagaaattgaggcttggagagaggggaagagacctgtccaagaccacagggctagggtgccaagagtcaaaactagacatcagatttgctcaagctgtttcctctggggaatgtgttttgcaaaccccagcccttggtggaacaattatccacatgcatataactcaatacctgtatataaaagtcttgcctctcactcccagcctggggggtcggtttgggtctgagtctggccaggtgggaatcagagtgccctcctctttggggtggctgggcagctctaaaagccctc

SEQ ID NO: 44158 - DNA, 1984 bp, Bovine  19866881276828
  misc_feature (1)..(1): n is a, c, g, or t
nggtcgcaggatgggtactgaggagaatgattgacagagatactgatgaggaattgcagaaggagcttattcctgcctctacagccccaccctcacggtgggcctctgggacaaaggacgacctgctgccaagtgatcatccactttgttcccctgcagcttccttgacccctccccctcctcagaaaggtctcaacccaccgcaggaggctgctccagcccagctccagaaaacccctgactcctgccatcacttcctctttaaaacaggaaatgactggcctttgctgactcctctgcactccttgaagttgctggagaaggggcaggcaaggagcgggagaaggcaagttattttctggagcgtcacaacacctgcacggagggtgactggcatccccacttgacatatgagaaaacagactcaacaaaggttaaggatctagtccacagccatgcacagagtcagaaagggagctgattcctaaccagatcttacctatccgaactcaggtctctgctggccaaggagtcggtctgtgtggcttttagtgaatgctgcagggtaaggtggacattctcccaccagaggaagggatgtcagcttagagtcatcaagtaataacctgttctcgggcacacctggcctgttcttagctctaaccaagagtccaaaaggcctcctgggttctgctaatctagtttaggcaggagacactgggacctaggaactgctttggagaggggagatcatcatcaactgtgttgataaaatgtttgtaaaaatggtttgaaaaaatggttactgtgtaagccatcagagttggcttacagaactgttgtcccacctgaaaacagtggaggctgttaaaaattgaaggtctatgagaacattacagaaatggttcaggagacccggagggaaatcccaccctctccgggcctctagttttcagctgttaagacaatatctcagggacttccagcagataacttccccaactctgcacctatttcccggagggaaccacctttcctggaaggcctgatgacttcatgctcccattcggaacatgcatctttctctattgaggatgaagagtctggacagcagccacggataaggaaatttatctcccagacactatggctaaacagccgtgggtcccatggcgagtaaatttttttttttttttttttaatgaatctggattctccaggagaaagggccacaaggacactgtggagtaatgtattttattatcgcattgcttaaatatgtacaaaccctgccgagagcgggggaggtgaaccggatgccactgtgtttctccatctggggctcctgcccagcggcagctctatttggcctgtgggcccgtcctgactttccagctgctgacctcactgactgactcacagatgctctgggtccttagacagttacgttccctttttgggcctcagtcccccccctttttttaagtggggggtatgaggaaggggctaaaacatctcttcgggggtggggcctctgctgaactcagtaaggtcagaagtgaaaggtttccagggagctggtggtgcctgggtcgctgtacaaagttggggaagggatggaccgcccgcctcggagaggcactccccccaaggccgggcctcctccagccccctgtcccccatccccgcagccaggcaggttttcatgcagtctttccgtcccctccagcgccactccgcttgcagaaggggccccgccagcgtctgggacctccggggctcagtgcaccgctagcgacgtagcaaggcatactccttgggcgcccagagcaggcgcgggcggcggatctcggcccggcggcctatgtcggggctccagcagaactcgggcgacagcagcttggcgggcttgtgcagccagaagaacttgttgaggtggctctcgtcgtgccagcgcgcctccaggccgcgcgcgcggtcccgc

SEQ ID NO: 44159 - DNA, 1623 bp, Bovine  19866881287972
  misc_feature (1)..(1): n is a, c, g, or t
natgtgggagaaatatctgtgttttgatagcttctgtggagctttctgctactcacagccaatcacaacctaatgactgtgggttctgaagaaaggctttcattaccatagaaaaattcatcagctcttgaccctcaggataaagttcagtttcttggcatggaaaccctagacttttcatgacctgcttttggcccttcccacctagtcagagcccctctgcaatcctctgctccaggactgcttccctattcctcctcagagcactggctcctgaggggtgaccttggcttcctcaaccctccgccttgggttcctaatgccctggggcagcctgactcttagctccaagaaaggaggggaattccctttcccctggcatggactgcatggtgactcctgcaggggtcttgctgagggcccagggcggggctggagaactggttcttggcgggggagaaggggaggccggtggaagggctggcttgaaccctcaagaattcaagcagagagatcttcagcatctttgcgaaatgctttcgaggagtttgggtaagaaagcccaagggcaaagactgagaaggttcagaggttgtggaactttggccagtacctcaagttgaattttggtggctctgagagtagtaagccctttcatgcattcattcactcgttggttgatggatttattcaactgttaatatgcccttgccaagtactgggctttgaagaagcaacagagccaagacaaatgtgaataccaccccaagacctcactgcctagaggaggagacacatgggtccatggggaacacagcgcagggtggtgagtgctgacgtcagggcagctggggatgcagcaggtgcgaagggcacaaagtcccatccagaggagggagcacgctttgtcttcacagaggaaggcatgtggggacccatagctagctctaggggaagggggatgccaagatatgctgggaagtgaggacaactgtggaaaggaaagggatctgggtgaggacctgcaggaggccctgaaagggtccctctagagccgcccactcacgaggaatgagttgcaggggcgattagggaaaacctctctgatcaccagccggcatcttgcacggggcccagcatagaacacacaggagtaaatgtttgctgaatgaataagtgagtgaacaaatgggccagcacagaggttcctgacatttgcacgagagagtgacggctgcctggagagttctttctcagttctccgggtctacacagggaagagtgacagggctaatccccaaggagtgagtaatcgaaacactgttctcttcggcttttgaagttcatgaaacgcgctctccctctccctcccaccttgctcgttctctcctgcctgccttttacttcttttctagcacaggtggattaatttcctgatcaaatgcggtgaggatcgtaggcaaattgcctcacatggcctgatttcataccgagaagctgtgaaaggaaggcaggtgtatgcaggtagggggcaccgactcaggcctgggtttcagttccaaccatgaaaatttcatcagccacatccttttggaggctaagctggaaggtcctaacaggagg

SEQ ID NO: 44160 - DNA, 2029 bp, Bovine  19866881342740
  misc_feature (1)..(1): n is a, c, g, or t
ntttcttatttttatcctgcgctaagaatagttcgactaggttaaacagacaaggattctgccttttggaggagtgaagaccttggtcaatattgatctggacaaacaagttaacattcagctcaagggagaaaagtgtattcaaggtaccatctaaaaccaggatgaaaaaagctgaactaggtagagggcttggggcttgatgggtttgggggaagacagattgaaggaaccttccatgaagttcctcgggcaagggtccaattttaagcatgctgtgaaatgtcaaagtactgaaccccaagtaaacattttaatatagatctgcctatgcaaagactggctgcttgggatcactgcattaagatatgtgtgtgttctatttctccaccaaggaagccaccaggcagagatgaggttatctatgctgtttctgcaggtcctgtgcttccaatcaagcctcttatccagttctcagcttcacactcaatctgatccttggctgaccacagtctccttcctccatggacagcgctgcctaagttctccccataggcctgccagccttgctctgaaaggcctgacagagagctccaaagagtgtgaggggagcctccgcggaaccgcatgagggacctcctcgtctccacttcaaacagtacctctcatgagctgcttcactgtgagaaacaacttttatctcctcacttttgtaactctcttcccaccccttcccagggccattgtctaccaccaccaactgtgtgagctgaggctgcttttaaactggaacttcctaaaaaagaaaaaaagagaaagaaagaaaaagccatttctttattgcaacaagcctactgccagtaagcataactcagtgtgtatatgtgtacacactttggaaaacgatttcagtataattattaaagcaatttttgcacaaaatttataggaagatgctcttatttcatgttaaagatccaaaatccaccacagaggaggaatttacaaggcctaattatataggatggaggaatcaaagtaaactcattttaggaaaggtttataactggctttcttactagtagtcctagcgtacaataaaccaggataaatcttttttgttaaaaaaaagttaaccatgacatacatcttcagtactcagacttctataattcagctgtaatgaacttcagagctgagcaggagttacctgagagatgtgattaatgagattttaaaataattctttggagagatagtcataccaccaagttaagaaaaattcatttcaatgtttatagtctcctttgaaaaaaaatttttggacagttttgacttttctatagggacggaaattttctactttggattcagtgtttctaaattgtaaaggtgtttaggaagtgaaaagaaaatctttccttaacaatccatgaataactaggaggactgagttaactatgcaatcaattaagtttctttgcttttaaattttaaatacgtgaaaaaacaaatacgtatttttaaaaatgagtaaatgttaagatagaaagcttagtatttaaattaaaatcctgtttttacatggcagctatttccttccaattagagcctagatgaatattccctaggttcaagcccttaccagtgcttgacctttctcggtaacagccccacttagtgattttctggcatttgcttgaacacctctaatgacaaaggaactcactacctctgaagtagtttgtccccaacttggacagttcaagaagttcttccttacaatgagccaaaaatccatctgttaatttctatctacttatcctggttctattccttaagaccacacagaacaaggccaatcatacttgcacaatgggtaaaaacacagccttagacttggcttagagactggtctctatcactcaaggattagcagcatgtccttatctgtctctgagcctcggtttctccagctagaaaatatagatgataagacgacaactctatagccctgctatgagggcta

SEQ ID NO: 44161 - DNA, 1691 bp, Bovine  19866881358845
  misc_feature (1)..(1): n is a, c, g, or t
nctggataactgtcacctgactgccctgaatggatttctcactgagtttccagacaatggctgagatcagatggaagggactagataaaattccagggaagaaatccttgggcccaggaaggcaacatgggtgtgtctctttgctcactgaaggccactgatgcaccagttagaacaggcaggcatggtgacgcatgacatgcaggatcttctttcctcttgcagggatgggccacagaagacagccccacagcttggagccttcagccggagctttgccaagaagacaatgtacagctcatccaaccaggtgctgctccagttccaccacgagtcagccatgggcgggatcttcgccatagctttctctggtcagtatgaaagcctggtccaggaaggacgagagggccagacttttcagtccaggctgggcttgcctcctggctcctgcatttgccaatttggggtttggggacgagtgacatagcttctccatctcagtgtcctcagaagaaacaaagtgttagtcgctcagttgtttctgactctttgctacttcatagactgtagcctgccaggctcttctgtccatggtattctccaggcaagaacactggagtgggtggccacttccttctccagcggatcttcctgaccctgcgatcaaacctgggtctcctgcattgcaggcagattctttactgtctgagccacaagggaagcccctatgtttatttcctagatttttcactgtaaaaatgagatagacagcattatcttgcaatcctgcttgaatagccctgaaccacgaggctgactctcttctgtaagtcactaggttaaaccactggaaactggcatttccatgtattaaaaggagtcaaatgtcagaagcttcccaagggtcagccttatagcctagcccctggattcttttctggatgattctagacataaagatgagaacagtgggggacagcagagctgtctgcttttgtccatgctgctcacacctcttcccgcgttgggtaacctgcagagaagtgaggcactggcttctagaaattacagccctctggcgggggaaaccctatttcagatttttcaaatcagcattatatttccttttaaaattctttcggtgtagaaggcagtaaggttctagtgcttcccaggtggaactagtggtaaagaacctgcttaccaatgcaggagacatgagatgagggttcagtccccgggtttgcaagatcccctggaggaaggcatggtaacccactccagtattcttgcctgaagaatcccatggacagaggaacctggtggactatagtccatggggtcacaaagagttggacacgactgaagcgatttagcatgcacacacacagagagggggtaaaagaagcactggcggggatcgggaactcgaggatagaaaggaaacgtctcacacttatggtggatgagaaaaatcacaattgggaaaccgtaccttggctatcatatgtgtaaaatagccctgaagtgtggataagggtattttgtatttgtagctggatcactcaggttatacttttccatgcttatcacctgggagaggcaggtaaccaagctccattcacaggtatgaactcggaagtcatgctcttctcttctgcctcccaaagacagactgagggctacccata

SEQ ID NO: 44162 - DNA, 811 bp, Bovine  19866881458574
  misc_feature (1)..(1): n is a, c, g, or t
nctgcggaaggcgaggaagagactattgctgctgctttcgatgcggccgggaagctgggagccgtagaagcttcctatgagggggctgagagagtcccgtccgtcgtagatatggaggaagtcgtagccaggctccaagttaaagctggggaacaaacacatcccaaccccaccccgctgaggtcacataaaggctggtacccagcctcgggctcaaccaaaggacagggcccccaacacagcaagtcctccagcccccaggcacccaatccctgagacctcctggccccgcccgacctcccagtgagagagaagatggacaaggcaggcttggacagagcgccagattctagcatcagggtccagaaagctggagccaaaagcctaacaccctcttttttttttttaaaaaaaagaaggtgttttaaaaaattgaactatatttgacatggcatataaatttgaggggtacaacatgctgattgactacatttatatattgttatatgatttcctttgtagtgataattagcacctctgtcacatcatataattatcgtttctttttagcggttggaataattaagatctagcctattaccaagtttgatgattataacaacactgttgtctatattcactacactgtgcacagaagggaaaatcagttatcagctctacacatcaagtggtcagaacccacagagcaggcccagaagccaggcctcttacctgcctctactattctttacactgtcctaagctgcacccgcttctctgaggggtgagagccacccagggacgccattca

SEQ ID NO: 44163 - DNA, 1481 bp, Bovine  19866880430142
  misc_feature (1)..(1): n is a, c, g, or t
ntatttaataaaagatatttggttgactctacagaattaatgttctctaacagtgcctttgttttgagcaagatttattctctttcatattaaaaaaattggaattaatacgctctttctgaacagttcaatttaattactactttaaaattcaaagagaaacatcattaaatattaataggtcaatctgcagaaacaaatttcactgcaagtttgacttaggtaaatgggaatttgagaaagtatgacagagattaagaagtaatagaactaagaagcagtttgcattttctagatctccatttacttatttacaaaaatctgagtcttaggattatgattcctaacaattctataggtctgtgttcgtggtcagtaagaaaaagagctataaaagccatgcaggtgatattagtgagagaggtggtctggtatgatcttcagaagggagtgatggagacgaaggcaaactgcacagacagacctgctttgtgtaagtgggcagacattatgggagttgagttgaacatgtgacgcaggatgtctagaatgtctttttaaaggaaattagaaatttatatttttgtgatctcttctattaaaaatactgttttgattttaagcataatacatgccaagctaaggtctacatgctaaataaagcctcaggcttcaagtttgcaatttttcatctctaccaagtatccatgagcagtcaatcatcaattgcaattgaccgacagaatcaaccaccacccagtgcttcccagtccccaaagcattaggctcatttggagcacattttacatcagcaggacctacagtccacctgcagagactctgattcagtcagtcctgggttggcatctggcattagtaggctttaaaactccaggggtgattctaatgtgcaactagtttgagaactgctatctcaaggaaacatttccacccccccccatggatgccagaacctcttctggctcccatgactcctggggtccccaggggcttgtgtgagaccttcttcttataaactttgcctttgccatcgttctggagcttttattggtgatgagatgctgaagtcacaaatctctccttttttcaagaatgtcactgattttgctcaagagtggttcacagcaatgctgtccccaacctcatccacactccattgtttcagggtttcattttcctaccagctgcagagagggaaggagagaatcaaggaagatatcctcccactatttttcaattttatgctgcctaaacaatattcataacaaacccagtgggaaatctctcatttactgtcacagtttttctactgtttgggtgtactttttatatttttgctccctcaaagaattgaaaacaaattaaattcagcaaaatagaagatccagggaatacaggaaataattactcctgccaagcatgagtatttagcacctgcatgtttgggaaacattcaaatt

SEQ ID NO: 44164 - DNA, 1509 bp, Bovine  19866881106014
  misc_feature (1)..(1): n is a, c, g, or t
nagcaccagtcggctttcaatgggtttacacagggtttcaatgggttttcaatttttccttaaactcccatcaataagaataaacatggatgccagtactcagaaaccatcatgtttcatctaaaaagctcttctctgtcactgtacccacagtcagtgacttatttcctgggcaaaaaaacaaatgttttggttcaggcagaaattgctgaggtaagtcctcttcatcagcttgataaagaagtgaaacgttagcttgtagctctcaggcggccacgctcatagacctgtgcttaattttatatatgtgtcttgtgtccttgctcagagatatcttcatctaagtccttttgataaacagtggtgtgggagaaaggcagaggatgtctgcgtgacagggtggcccaggtcagcaaattaatgttcctccttggggccagagctggctgggagaaggattggctctgaccttgagggttttacaccagaggtggtccagcagacaggaaacagaggaaacagtagcgattttgattgagttattggatgcattcactttcctgtgcaacccatccatgtgattggctgaatgtctttaatttgcaaacacttatggagatatcacatctttgtcacatctctataaacctgtggtgtgactgccctgtcacatactcaaggggtctggcatgtgcacaagatcagttgtgtccaactctttgatactccatggactgtagcgccccgccctccccaggctcttctctccatgagatttcccaggcaaacccatgtaaatgcatcctgatgtgcaagaatctttggttaagatttcattcacagctacttccctggtggtccactagctaagactcagctcccaatggaggggacctgggtttaatccttggtcagggaactagatcgcacattccacaactaaaagttcacaggccacatctaaagtccccacatgccacaactaagatccagtgcagccaaaaaagcaactatattaaaaaaagatttcattcacaatttcttatacctatgcagttctttcaactttccaaaccccatatgcaacactgcagtcaccctctggctccagctagtttcttttcccatttcctttcaggcaaaaattaatgacagattaggcaaagttaaattgccttggaaaatcatctctcttcaattctgcaaatggaagggagtctgtggttgggtgaaggcagtgaagtacagtaaacagtaaaagatcagagcagcaccggccatctaaatggcgaggccctggggaaaaggaaaatgcaagctttttgtcaaaaaattattagaaagtatgaaatggtgaccacagcctcttaaaccaaacatgccttttgtgactgccccatcacatgcccaagggttctggtgtgtgtgcagctcagttgtgtccaactcattgccaccccatggactgtagcccaccaggctcctctgtccatgggggttttcaaggca

SEQ ID NO: 44165 - DNA, 832 bp, Bovine  19866881336214
  misc_feature (1)..(1): n is a, c, g, or t
ncataattaaaggatacgtttatattgtactttttatactcaaagtattggttaatccatatgttattcctacaagataaaagcatactgcactttgccccagagagaggtgttcttaaaaactctcttaatcaagatatggagatttgcatctacttgattatctacagcactgcagaaattatgaaactcagatacatttgtgtaaatgcatacatattcatttattaaaagtgccaatcaaaatatgagaagcaaaaacataagctatagtgaacatatggtgagttatttggtttttgtttgtttgttttgtgtatcatcagcattcattaatttcctgtgaagaaaaaaaaaaaatcctggatttcctttgaataagatgggcttcccttgtgactgagctggtaaagaatccttctgcaatgcaggagacctgggtttgattcctgggttggatagatcccctggaggagaaaaaggctacccactccagtaatctggcaaggagaactccatgaaccgtattgtccatggaatcgtaaagaatcagacacgacagcaactttcacttcacttcactttactcctcaatccaagctatgcttgcagctccagagcatcaccaattacatcaccaattacacggctgcagttatcaattccagagattaaattgccaacatctgctggatcatcgaaaaagcaagagagttccagaaaaacatctatttctgctttattgaccatgccaaagcctttgactgtgtggatcacaataaactggaaaattctgaaagagatgggaataccaggaccccctgacctgcct

SEQ ID NO: 44166 - DNA, 4306 bp, Bovine  19866880546157
  misc_feature (1)..(1): n is a, c, g, or t
naatgtacatctatatttttgtgcctgtgctttttgagaagatcaatccctagaactgcagcagtgattagttcattacactttatgttttacatacaataccgtgttcgtgtgctggtcgtccagtcatgtctgcttcctggtgaccccacagactgtagcccaccaggctcctctgtccacgggattctccaggcaagaataccagagtgggcggccattcccatactgccttctaaaatggctttctacctatttaccctcccaacgtatgaaaatacgtcacatctgtagcagtactggggatactatccataatgggtgtgctggtttgtgctggtggtaagaacttttaaaatttccatttatctgatcattagtgcaattaagattttccttgactgttttcttcatttagagttgctgtcatactgtgtattttatctgactttgtcagactgtgtctcttacttgctgctttacaacagcatttcttttttaacttcttgttttgcattggggtatagccaatgaacaatctgatagtttcaggtggacagcaaagggactcagccatacatatacatgtatccattctcccctgaactcccctcccatccaggctgccacataaagcaacagcactttttataaggactatatcctttgtaatgtatgtataaaatacctgtcatgtgtcttttcactttgcatacagtgtcttataccatggaaaagtttaaattttttacatggtcctacctaacactgtccctcttcataacttctggactctgtgtcctgcttactaaagcctacctcaaggtagatagaactcaaggggatagaaatattctacattctcttctaagaaatttaatattgtgtttcctatcatatctttaatctatatggaatgaacttctctgtaaggggtgaaatgtggatctgactttatttccagctggataattgtcaagcaccatttaagtaatctatctcccccactgacacatgaaaaataattacttttgcaagtaactaaattcatggggatacatttttcaaaaatttccttgtgatgctttcctatttaccattctacattgattttcaaaacaaaattgtcagtggaaaattatcctaaaagaattgtgactggaattgactgaatgtacagacatgtttatagtactaaaagttccttctagaaacatggatctccatttattcataacttctgttctccttaacagaggttagaagtactccaaaataatccatttcaattatttttttctgtactctagaacagcttaattatgactccttgaaggttcagcattaatctgtgaaaccaggtgtcttaaaaaagggctagactattcaagttcttccattttaaatattaggaatttttgctttttgcctttactaaatacagacttgcattattcccagttattttctaattcttttgttccagtcttatccagagttctagatacttcctaaaacatactctatgtattaggtcatgttgacttttctcaccaacaaaggaatacagtcatatatgtggtggtataaagctttaaacgtgttaatgtttaagctttaacacatgctaatcctcatcattcacattaagtttcagttttaaaaaccgttatgatctccaagtacatatactgtcttccagagttcactgcttaaaaacagctttcaagcagactctgaaggacactgaactatcattatagagcatttagtctgggtcaggcactgtgctaagcacttggtatgcatcaagtagtttaaattttcacaccaagggttttaagagagtcatataattacatttacatttgaacagaccactgggagtagtgtaaagaatgaacttggaggagacaaaagaggatgcagagagaccagtggttagacaattggaatagtccagatgagatgactacgttttggattagggcaatgaggatggaaagatgtggatgaattccagaaatactcagcagacatatccctaggacttggtgatgcagggggtggggaagagctgagggcttgagatgactctgtagcatgaattttatgatgatgagcaaggtgtgcgctttgtctgaagacttctccgcattctttacattcgtaagatctctctccagtgtggattcttctatgtagattaaggtgtccaatctggctgaaggttttcctacattccttacactgatatggtttttctccagaatgaattctctgatgaacagtaagcgactgtcgatggctaaaggctttaccgcatgcactacattcgtaaggtttctcccctgtatgacatctttgatggcaagtaagtgatgattttgttctgaatgccttctcacattcaacacatgcatagggcttctggcctgtgtgaagtctcagatgctgagcacgggatgagctgtcactaaaagccttcccacattcagtgcattcatagggcttctctcctgtgtgaactctctgatgttggataaggcgggtagcctggctgaaggctttaccacattcagtacaatcgtaaggtttctctccagtatgaattttatggtgctgtgcgagatgtgccctctggttgaaggctttcccgcattccttacattcataaggtttctctccagtatgaattctctgatgagtagccagctgtgaactgatgctaaaagcttttccacattccttacattcatagggtttttctccagtatggatcctcagatggctagcaaggtgtatgctctgcctgaaagcttttccacattccctgcattggtaaggcttctctccagaatgcactctttggtgctgggtgagtgaggcatgatggctgaaggctttcccacagatgtcacattcatatggtttctctcctgtgtgaattctctgatggacggtcagggatgagccgtagctgaaggttttcccacacacattacatttgtagggtttctctccagtatgaatcctcctgtgctgaataagtcctatgtgatcgctgaaggccttgccacagtcgatgcagtcaaagggtttctccccagtgtgataatatctccagtgacggataagcgatgtgttctgcctgaaagctttcccacattcaatacattcgtacggtcttttgccagtgtgacacctctgatgtcgggcaaaggacgagccatcactgaaggccttgccacattccttacatttataaggcttctccccagtatgaattctctgatgctgagcaaggtgtgcaggctggctgaaggcttttctacactccttacatttatatggtttttctccagtatgaattctttgatgttgaataagatgtacattttggctgaaggctttcctacattccttacattcaaatagtttttctccggtgtgtattctgtggtgctggacaaggtgttgactctggttgaaggccttcccacagtccttacactcatatggtttctctccagtatgaattctctgatgaacagtaagagatgagctctgggtgaaggttttctcacattcattacatttaaaaagtttctttcctgcatatactttcttgtgttttaataccatggaatttctggaaaagtttttttcatctgacttgtgattatcataaatattctcttccaaactgtgtagaggaacaaatttctcaggtttgttatatctgtggtctatttccacagtgaggttttctttaagagcgcttctttcttgcctgataaatgtctcttggcttaacaactgcctctcaaagagatcttcacatttccaattttctccaaaaataggacactcccgttcatagcttgcaattctctccattaacgtatcatcacatacacactgcttcagagctaattcttgtgtctcatgtatagattcccaatctgaaagattcaaaaaaccaaatgtttcctttatcatgggctataacaaaggaaacatttaacacagaagaggtgatttgaaaataatacactccacaaaatatattatgcacaggcatttcaactgaaaaaaatatgtaagcagaccccagagaatgagagctcacagaagaacatagaaatggcaatttagaaagttaaatgtcggataacagcgtcctgaaggtgtgggtggcagtggcagtaatattttacgcctgtattaacctaacaggctatacatgaaaccctgttcctctgtcctctccctcttcatgcctgtattaacctaacaggttata

SEQ ID NO: 44167 - DNA, 1115 bp, Bovine  19866880957131
  misc_feature (1)..(1): n is a, c, g, or t
ngtgtgcacaactgggtgtgtttctctagtgagagctgtaggtgttttgtgatgcactgcattatcacatttgaaatgctccctctttaacttaatagtggttaaaattactattactttgtcttttagggggtatggtaagttaacaactgtctttaatacttagtgatgttatcaagagctgttatgtaatcttttgttgttcctgattgttctctgtaatggcatacatttaagttgtacttttgcaaaatcaccataaaacttctttactgcttttattacatttctgtgtaattttagagtaccaatacagtgagcatcaaatatatttttatatatacctaattgatacagctggaacactgagcattcagttgcataatttgggaaaaagcacataaaaattgagcctaacccatgtttctgcctcctcctcgaggccttttttcactgctccagtctgtcctgattttccacactgagaaatgctctagcatgtagtttgagtactgaattatttcacatttgattgtttacagtgttctcttcttgccaattttcactttatcttttctccatcagttcagtctctgaaattgtgtactttccatgacagagtatcaagactaagcacagagaagtcatgttgcacagaccccaagatcctgacaggaaatttcactatatgcagtatttctaagaacacaggccatttaactttttaaactatactcatgtgagggtaagaacaccagtcgagcaggaacgtgtctgtgtcatttcaggatctggtgacatttagggacgtggctgtcaatttctcgcaagaggagtgggaatggctgaaccctgctcagaggagtctgtacaggacggtgatgctggacaactacaggagcctggtatcgctgggtgaggaagtctccctgtaaggcggaatccgcacggaggctgctttccagtgccacgtttggggagcctctgctgcacctcactactgctcccccagatgagtgtagctctgtggagttggcagcttggttggatgttcatgcagctccgtctccccacccccagaactcgtcaccttgccctcagctccctccccttcc

SEQ ID NO: 44168 - DNA, 1063 bp, Bovine  19866881237098
  misc_feature (1)..(1): n is a, c, g, or t
ntcttctctggtttccttctattctcctgtcggtgactctggcatcttcgtcagtgttcagtcctcctaggtggtctcttctgcctcaccctcacctgtccttacttactctcttctccatccttctcccgctctctccttaggttcccagaaaactcaaacctctgtactcttctgtagtttttggtctttttcttctgtttctactataatgatgtttctctctgagtaaaaatagtagagggccttttacatttcttttagattgggaggagcaatcagaaaccaaagatctaactccagagcaaagcctgcctgtagaaaaatcatcttcaggggcaggaatagaggatttggaggcaggtgattcctggtatacccacacaggagagtcttctgatgatcccctggagtcgcaacaggtcaagccagcggaagttttgagtcccacagaaatgagtgacccgaagacccttaatcaggaaggaagccacgagggtgatcaactagagaaaagcttggaacttaacaaaccatcggagagtcttcctggaaaggatccccaggagcacaccactcctgaagtctgcaccaggtcccagctggcccacaacttatttttcctccaagagaacaaacactacagatgtgaatttttcgacagaaattttagtacccgaccaggccgggagaaacaccagcagatccatacggggaagaagccgtttgtatgtaaacagtgtggggaagccttctacctcatgctacacctcaccagacatcagaagactcactcagatgggaagtccttgacccagcgtgcagatgtctacggccgcgtgagaattcagagtcaggactaccacgagtgtttccagtgcggcaaggcttttatccaggctgtgcatcttttccagcatctcaaagcccacgaagtagcgatggccctgccgcttgagttgccccgaaacaagatgtatttgattcgatataagcgacagcacgactacatggagaaagagcctatcagtgttgcgactgcggcagaaggttccgtcagagt

SEQ ID NO: 44169 - DNA, 1500 bp, Bovine  19866880489909
  misc_feature (1)..(1): n is a, c, g, or t
nctgctgctgctgctaatcgcttcagtcgtgtccgactctgtacgaccccatagacggcagcccaccaggccccaccgtccctgggattctccaggcaagaacactggagtgggttgccatttccttctccaatgcaggaaagtgaaaagtgaaagtgaagtcgctcagtcgtgtccaactcttagcaaccccatggactgcagcccaccaggctcctctgtccatgggattttccaggcaagagtactggagtggggtgccattgctaggcacctcttaccagctcgtccactccatgtggactgagccaccatacagtgattcatcagaatcatttctgccagaatcacagtgatcatcttctacctgatcccctggcttctagaccctccctcccaataaaaatgtctattcttaatgcagcaactagaggaatcctgttaaaatgtgagtcaggtcagatcttcatgagctcaaacctccagtggctctcacttcagtaaaatacaactctttgtaatgtcccatttacttctcagggctcagctcttgttgctttccctctagtccaggtgtcagcaaacattttccttaaagggccaggtgtaaatatgttagacttcatgggctatcctgaagatataggtccatttaatgcatattttgaatctaattttctaaagtgagctatatacttcactccactttggaccacacctcacctccagcactctattgtttttaatagactggaagtaattatttaaaaataattgacttttgactcaaaatctataaagcagaaatattttcacttaatgtcagctgcagtcttagaaagtagtttaggaatcaataacgtggttgtgatgtttcaatgcctcaagagggaagcaatgccttgcatatggaagttcttttccagtagtctctgtcaattctggtctggccagaatgctcagaagacacactaaagtctaagaagcatgaaggtgaacatcttccatctggagtgtgagctgttcaattattaacatagtttgccatctgtgcaaggtgtaagcaaagtgagtgttgagactgtctacacagcacagactggaggggacaggtgatcagagggtgagtccactgccaaaccaaaggcaataacaatagaaacaacccatcgtatcacacactcacttgctttctaatgtgaatgactgtgactgccagattcttccgactattgtcatggtttgatctctatatgtaacatgcacacttggtgtcaaaaagtggttactgtgtgagattatctgttatttacctggcacttccactcctgtagaagtgcctgcctacagctggaaaaaactgcatttcccagaattccctccttgattggttccaggtaagggtttgccagtgagaggaatttgggagatgtggaaagtagaagggaaggagatgccattattttggggagtgtttgggggtcagatgaggctgacttg

SEQ ID NO: 44170 - DNA, 1393 bp, Bovine  19866880632231
  misc_feature (1)..(1): n is a, c, g, or t
ntccccttctagtctggggaataaagacctattggaacactagcagcacgctcattcatttacacattgcttcgggctgtcttcgtgctacagcagggttgttgagtagctgcagcggaaaccgtatggcttgtacagtctgagatattcaccagctggcatttttgtaggaagtttgctgatccctggcctttgcagtctcagtccacaaactaacatattagacaatggcactaaacacaccatttgctcaaatgagtgccattaaaaaaatgtggacgccaagcttagtggattgagcatagaaatcgtgattcccaacgcttcttaaagatgagtgccacttggccaattcttttctaacttgggtgcgataaaaactgtgaaacagctccaatattcctgtccatttgaacatcccaaaaatgtaataaaaataaatagttgcaaagtatttcatactccttgcaaaaaagatactacaaagaagcacagagaaataggtcaacaggccatgggtcatgtgcttcaaagtaaagtgtcaaatgccattgatgttattctctcataattctctttatttctgaacatcaaaagacagtggagatttaccagcttaatgggatggtgtagatgcctggaaactatcatgtcagagagacaggggagatgttactttgatggttagcatcctcctcttcacatttacacagaaattttcataaataaatgactacaatcctcaatgttatctactaaaaagataagctaaataaaacaacgtactctctgaaagcattctaaaattcgagcgaaaccatcagtctttctcagatcagcaattaggtgctccactttgaatttgaggaaatagaaacatatttttatgtctgtaccattatgaaaggaatggtcatttcctatcctgatcaggtcagatcttcctgatttgcatgacctataggaaaggtcctacttgccacttagatttgaaaatgctacatgttctcccccaaatttctcattcatatattaatttctcagtaatcctggagtaatcagggtttgattcccagtgagggagctagatcccatatgccacaacaaagacctggcccagccaaataaataaatacacatgtatttttaaaatccagctcttactcctggatttcctctcactgaatggcatctccagagtcatgctaaatttcttcttactcactcctcactctttgaggctctgaggctgaagttccatcatctggtatctctcttgctgtctcatatgcatctctccctctctactaccacagcctcatctgaggctcattatcttctctgtctcagacccactgaccatctcacaaatggtctccatacccctggtgcg

SEQ ID NO: 44171 - DNA, 668 bp, Bovine  19866880688734
  misc_feature (1)..(1): n is a, c, g, or t
natccacctacacacaagctgtgttctcatcaacctctacatacctctataccctccttccacgccccccctctattttcctgtaactgaagtttccttgtctccttacaaccacctctgcacatccaaattctaccattctgtaagactcgtttcaaatgcttcctcttccataaaattttccctaggcccacaagtaattccttctctgtgaatagctagtggacctgaactatgcctttcttaaggcacttagtccatttccccttgacagagttactggcatttatgccatatcttcctgtacagagatcttaacagcacagtctatacatcctaagaagcccccagagcggattacagcagagccaatgaaaagacttttaggaaatatttgtggactgaatcttttccttccttatttttattttctcaggcaatgataccctcccaggggcccaaggaagatatttcagaaaactgccttcatctccaaatgttttggcccctagttaattgcaaaattgtatagattctatctcctctccatttgttctgacttatttcaggccctcatggataatagatgaaagggcaggggaatataaagtgcattcatggaattatcttctttgagacccaatttccatatctttaaattgcattag

SEQ ID NO: 44172 - DNA, 1205 bp, Bovine  19866880740245
  misc_feature (1)..(1): n is a, c, g, or t
ngggacgccagaggatgagatggctggatggcatcaccaactcaatggacatgagtttgagtgaactccgggagttggtgatggacagggaggcctggcatgctgcagttcatggggtcgcaaagagtcggacatgactgagcgactaagctgaactgaactcaatagattcaaaatattattatttaaacatacagtgaatataacagcatcactgaggctttttaaccttagtttttttcattctatgttttacaaatgagaagtatcttttacaattatagaacgtttcaattcagatggtaaaaatgttattggaaatacctgatctatatttagaactcataaatgtaaagctgtaaaaagacattcacatacccaagttgttccaaacacacttaaaagttttccaatcaccgaatgaagaaatcattgttaaggacttccctggtggtctgtggttcaacgcagggcacacaggtttgatctctggtcagggaaccaacaacaaagaacgatggggaactaagatcctacctgccgtggtgcgactaagcccacaggcaaaaccactgagcccgcaagcagtggagcccacgtgccacaactagagggcccttgtgacacaacttccgagcccatacagcacagccagagaagtctgcacagagcagaggaagaccctgcctgatgccacgaagcctgcacgtgccacagctaaggcccaatgcaaccaaatcaacaagttattttaaaatttagagtaattcaaatgaaataagaaggaaaagtcagaccctctgtctcatcagccacattttcaaaggtctgtggcttccctttaagggcactgggggtcgagataatactgtttagcataaatcagcctgtactgttaacggatctcctcactctccagtgactggtttcccatcgcactcacggggaaaagtccaagtcctgacaaaggtccacaaggcctacctagctgtctgtcctgcctaccattccatgctcagctcttgctctctcctcctcagctcttgctctctcctcctcgctgactccactctggccacctcagactctccagatctactcccacttcaagttctttgcccctacttgtgcctctgcctgggatgctctcaccctgccccagcatcatcaagtgccgctccctcacttcctcaggtctttattca

SEQ ID NO: 44173 - DNA, 920 bp, Bovine  19866880780058
  misc_feature (1)..(1): n is a, c, g, or t
nttcatagagttgcaaaagtcagaccccaattgagtgactaaacaccagcaaaattttactatacatcttaataagcagtagggtgactctccacttgcttttctttttcagaatcttcaaggcttttctggttctggcttgcagatttttccacaaaaactttagaatcaggatgacttgtttcaaagagaacctattggtatttttattggaactgggttatatccattaatgaacatagaactgacaacttaatgacactgagtttctatttaaaaaagatgtgtcactactgatttttctggaggggagggtccttagcagtatttgtttccttcattctggtcttgcacctttctttctaggggtacttttttgttcttactataattatgctatatttgctttcttatatagtctcattttgtggataatggattggaattaatttttcaatacttgaaaatgagattgctcttcagtattagaagcaccaaaggatgtttcagaaacaagaagactgcctacactgagttcagcctattcaataaaacactgttttcataaaatgaaataatttcactgaaggagttcaagctattcttttccatgatttctatcgttgttgttcagtcactcagtcgtgtccaactttttgcgaccccatagactgcagcacgccaggcttcccagtccttcaccatctcttggagtttgctcagattcatgtccattctatcgttaactcaaaaacctgggcgcactccttggctactcccgtctccttctgctgaccatctatgcataggtttttaaccaatggtgaacatcggactcatacttgtagcttttaaaagtacatacagccaggttgaaccttctgattcaggtctagggtaagtctaggcatgtgtatatg

SEQ ID NO: 44174 - DNA, 1345 bp, Bovine  19866880957280
  misc_feature (1)..(1): n is a, c, g, or t
nctctgtttaatcatgatcgcataagattggtatagtttcacagggtatgcaaaacagacatgccttaaatggttaaaattttgcttgtttgggctatttttaaaataattgaatgtgttaaatttgaatttggtgtctgtggacttctgagctagtgagtctaagcctgctgtaaagacataaacgactgggaaccaataggcagaggccgtctttggctcatttatatagcagcactgctttcatgttagctccttcctatgtctccgtccagcttatagaatggctatcctttgatctggtaccccagtcctgctccagtcagctgggatcaaagtaggagggtcaatctcctggatgcagtatctaggctcaagctgccactcagagggcagttacaagcttgaaagaccccagatagactttccctcaaaacctttgcctatcccatttatccatgaacaaagtcaaatgccatcccttacaggtaggcttctcccataacacctgcccatccattgcccccaccctcacgtctccactgtatcctatgcaggtcactgtcagatgtcttaccttgtcatttagagatttgttacatcactttatttcacctatgaaacacaaagtgtgaaatatatgatcactctcatgtccccaggacatcttagagttcctagtacaaatctgttcaacaaataattgctaaatagattgtttttataaaatataaaaactccacagaggaaatgatgcctaaggagttatttgggaggatcataaggagtgatcctcctatgaaagaggaaataacttctccaacggagaaggcagtggcaccccactccagtactcttgcctgcaaactcccatggatgggaggagcctggtaggctgcaggccatgaggtcgtgaagagttggacacaactgaacgacttcattttcacttttcactttcatgcattggagaaggaaatggcaaccctctccagtgttcttgcttggagaataccagggacggaggagcctggtgggctgctgtctgtggggtcgtacagagtcggacacgactgaagcgacttggcggcagcagcagcagcaggagtgataagggatgaaagggtaaattctaaagagagagagagaaaaaatcctggatataagcccagagacatgaaagcatgacatagtagagaaaacataagtaccaagtagcttggcaaatgggatgtgaatggatggtcacagaggccccccaagtataacataatctgggagaattcagcccaggccttcatgttttttttttaatgtattccaagcttctttctaatttagaaag

SEQ ID NO: 44175 - DNA, 1077 bp, Bovine  19866881154196
  misc_feature (1)..(1): n is a, c, g, or t
ngattccagacttgagaagccagaaaccagaataatcaattgaaccaatggacacgggaaagatggtttcaagcagggtcatgtgatatgtttaagcccagctttgaagaccttgttttcttaaggacatcagactggtaatttatttagactcggctctggatgttctgtgaaagaaaagaaatgaatttttattgaggaagaagtacaatttggtaattttgttctgaatatgttttctaccctgagattccttacccatcagggaaatagattcttgtactttgaacagctggctgagagtctgatggaaaatttatataaagctggggctccgaggagacctcagggagaaagttatatccccaaggctgtagttttatccatttttatctcttgtctggtggttatggatgcaactagccatgaatacaaaaaggcttctgtttggaggtgcttctggcactttctcatagaacaattttcttttttaaaaaatggctgaccactgaccactcattaagttagaatctatgtggtcatggtcctagtcactcgagtcaaaggggtatgcttctaaagatctctctgtatcacttatgcaaggatgctcctggtttggcacacaactgttttgaccaagtgaagagaattgtttttaaggacaccaataccactgtctgtttccatagacatgcaagacatgtctctggtcttggtgtctccagaacgcagttagatttttaaatcacctaggaacttccctacaggtgggctagcagtcaagaaataatgttgtttctggtttatagattgggaacattatgattagagttttgtttgtttgttttaatcagggggttgtagcaagttatttgtaagggaactgagtagcctatttttcttgaagagaaatagcaatgttttcagataaaactgctattatggtctatttggataaaaattccatttttccttctctctgaccaagatatcctgtctacagttctagaagtaatattagtttttaagccccaccaccaccaaaaatatagccaaggactctaaacatctcag

SEQ ID NO: 44176 - DNA, 2384 bp, Bovine  19866881457531
  misc_feature (1)..(1): n is a, c, g, or t
ngtttcctatcacttaataaggcttatacaactctgaaggatccagttcttgcttggctctccatcatcatctttcatccttctccctccatctgtcctagacttcttctagtttattgaattggccttgttctcttataccttcagattatttgtattagtaagtgaatgctgcataacaaataattccaaaactcagtgtcttataacagcaatcatttattacttcccatggacctatgggttagacgagtaattcttcgggccagattcatctgatctccagtggactagttcatttgtctttattcatttagcaggccaagtggggacttgctggtctagaatgatctggcttggccttatctggctctcctccacagaatgtctcacccccagtaggcaaaccctggttcattctcatggtggtgggagagttaaaaagaaagggaaaaaagagtgagagagagaaagcagatacagacaagacctcctgatacctagccatgaaactaacatatgatgatttctgttgcattctattagccaaaggaagtcacaaggttatcctagaatcaatgagttgaaaatagattccactacttgacgggaggagctgcaaagccacattgcaaaaaggtggacatgtaaacaaatggaaaatctgggccatttttgcaatcagtctaccacatcacctttcatgcttcttttgcagaggatacttgtaccccagcccttctctttaataactagcaatttcccctctggtctcagtttaggggtcacatccgggaagctttcctagatttctccagatgtctctcctctggacctcatattaaatatctgactacttatctgactctccgtaagtctttgaggacagagactgtgtcttatttggtcacttcctagtacaatgcctggcaacagcagggactgtgataggtaagtttaaatttagaatgtactataaaaatctatcaagcaaggtctcaataagtaaatttaaatggaaaatgcacaataaaaccagtcaatattagcatgtgcttccttgtcacttaaatctctgattacagatgaaatagcatcaaatatttccaccaactcacctttacccctttcctttcctttcttcttcagtagaagcaagggagaaggatttgaattttactgtgtgattctgcttatgcatggtggtcacaaaagtacaatataaacacaagagttatgggcatgaatctaccttactttcttagtgaggcaggagtatttatttcaacaccacccccacccctccgccttttcactgcactgttctcgtcactcatctgataagaagtaatgcactgttttatctataaattactttttctcagggctcagtaattttcattactagtctcatgtcttctacaaatccttgacgtctcacaacagagctaaatctggtattcagggtgcaatctctagagcagtgaggcacaagacgactccagcttccttcagtcggctggcttcctttttgccatcttatcacattaatttccaagttgttattgacttttcttaatcgcccctctcactttgtaattactttcctcttgctatagctgcttcctcaaccacatacctcacctcactccatacatagattctcatgtgttgcagaatcttcctcttaggacatgcaagctgacaatttttctagtcacctttccatctatctatttgctttcccatccacttatttttttgcttcacaagttattattttaagtgtcttatctaacaggaaatgctaatcccatccctatataactcatttgaatagcaagttgtaatgaaataggcagttgtcgctctcatatctttaagcccacagaggttaatattgtcctctcgtcacatggatccactctcatgattctcactattgctaacacatcttcttaatcttttaccaactgcccctgaggtcaactactgtttatcacatggatgagtagtacgaacaaccgatgcaaaaagtatttctcagaaattccccacaaagaacattagagttagtcaactaggactctgattcagcaagataactcttagattctcaaagtgacaggatgaacgctagatgagccactatttccagccagtaaaagattcagtatttatacagcatgctaaagtagctccgtttacctccttgacaaatttacaagaccaagacctgagtgaaatacttgacaaagcctccttggtagtcatgagaaccatgtgggagaatatattgggttggtcaaaaactttagttttctgtaacagcttatggaaaaacccaaatgaactttttgaccaacccaacagctaggatgatc

SEQ ID NO: 44177 - DNA, 1063 bp, Bovine  19866881562681
  misc_feature (1)..(1): n is a, c, g, or t
ntgagtatggaattatgtgttggtttttagcagttcttctccaagggagtggttgtccccccagaattcacttggcaatgtctggggacatgttggttgtcacacctggggtcggggtgctaatggcatctagtggggaaaggccaagctgctgaacatcttacagtgaacagcccccccacaacacccaaaatatcgggcactacagatcaataatgctgaggttgagaaatcctgccctatgatcacttaggtgaaagccactctctcagatgcaaagcccaaaaggaagtcactgccaaagtggctgaactgggttaactgagtacttgccaccctgccatgatttagctccaaaccttgctcccaaatgggttcataatggcgcttttggatcatactgcaatggaatagcaccagagcacttagagaagataaacagctgccaacctggctagagatcagccatcttcctttctaaatttatagcagtttattagtttgcctcatggaacacaggatgagtcagccatgtagtcccttccccaggttaaatgtcagtgacatccaggacagctttagcagcaatgagaagagctaaaatttatggggcgttcactgtgcaccaggcactctactcaacacttgccatgcattatctcaatttgcttttcttcaggggttccacttcttgcttattcttttacattcacccgtcctatcagttcagatcaaagtgttaacgctttaaatggtacaacaggaacattcacagggtgcaggcattcattacccaaaatggtaagtgttatgcagatactatgctttgcctgttctcttctttaattatctaaagagagaaataaatcattgactttcagacaattaatttgatgaaagtattgtccacatagaactgagtgaaaaacaacatctcagagttttcaatttagaaaattattttgcacttgtcttttggcttctgtattacaataaccgaaaagaaaatcacatcacaaatcttggtgaggaaagatcagaggcaccatgatattgtgtaaga

SEQ ID NO: 44178 - DNA, 985 bp, Bovine  19866880957923
  misc_feature (1)..(1): n is a, c, g, or t
ncccagtgactatatcgctgccatcttggagctcagtgcccttgtggcaaaacgatatcaacagatcttcctgcacatggacttcctgtactacctcacccctgatgggtggcgcttccgcagggcctgccgcctagtgcacgacttcacaggtgctgtcatccaggagcggcgccgcaccctccccaaggaagatattgatgacttcctcaaggccaaggagaagaccaagactttggactttattgatgtactcctgctgaccaaggtgggctcctctgggatctgaattcaagaagcagtataggccttgggaacttgatttaatcaaacttaaactggattgaactggatgcagagggtgctggggagccatgtgagattcttgttgaaggaagggctgggttaggggtaagttttaaagatgaccatgtggaatgcacagggcttccctggtggctcacacagtcaagaatccacctccagtgcaggaagcccaagttcgatccctaggtcaggaagatcccctgaagtaggaaatggctcctactccagtattcttgcctagagaattccatggacagaagagcctggtgggtttcagtccatggggctgcaaagagtcagacagaactgagtgactaacacacacacacgtggggtgcagcctgcaggggactactaagtctgaaattgtgaaggcctgagattttactctccttcccaattagtaagttagtctactgcagaaatagactgtatatatccatgtatacatacagaatactggatcttaagaatccatttattacttatagcagtaacagtaaccagagtagaatggtatctctgctcccccattcccaaattcctctgagatctccatgatttctttatcttcccatgtagccatacttgacattacagaaaaaaataccttcagttttcttttattttttttatttttaattaattaatttatttt

SEQ ID NO: 44179 - DNA, 707 bp, Bovine  19866881182512
  misc_feature (1)..(1): n is a, c, g, or t
ngatgtctgggacaagaacacctgcggggatgcccgcaagtggactcgatgcgcccataagggactcatcaacacgggacaggacatttcatcaccaaggctggccatcacgtgtacagagttaatactcatgtctctcattcttctgttttaatcctgacactctctacttaactgggtcgattgaacagtgccgcctgcggagtagacagtgtccacaccgagcatcaccacagagcccgagctccagtctcacaaagaaagaagacggggcgcccttcacaggggctggaggggccttctggtggtcaagaacgcaggacactcggcctggccatgcacacataagacggtctagatgactacatgagggactgtaaattccaaatcgaggaagacacccagagtgcacaagacgcattctcatcactcacagaattgatgaggcgatcggtttcccgagaattgattgctttagaaatccaattctgaaagtcttccaaactgtcaacagataaaaggcctggttaatttattttcttgggcagaattttcagaatattatgctgaaagaaaatgaaagctcatattctataaagtcaaagaatcaaacattttccgttttcaacgaaacagaagtagaacccaaagtttacagcagcggttctttcaagtgcagggcagcgggtgcctcggggaggaagcag

SEQ ID NO: 44180 - DNA, 1050 bp, Bovine  19866881562001
  misc_feature (1)..(1): n is a, c, g, or t
ngcttctagctcttccttctttcagaacatctttctgtgtcttccctggtctccatccagagacgccgctcactctgtctagacagcatcaccagtatccaactccttatttcctaacctaatggtgtttcttcattttacctaatctctgtaggctggagtacaaatttggagaatttggaaactattctctcttggtaaagcacatccgtgatggagtcagtgagattgtgtgtgacctggttgtcaacaaggagccagtcgacagtaaccttcgtacgtacatgctcttgcttgagtttgagagtttgcattttcaaccgtttcagtttttgaatattgtttgcaacatgttgtgtaattcaaaccctggattacaggttgtctgtctcattatggcatgtttatagtgtgtgtattgtgccattggtatatactaagaaaattacgtgatacataaaaatatttgatatatccacatattctcatagttggtttaattttgaagcataaataagccaaaaaaagttaatgcagtggaaagaaactagaaattggctagcaatctggcagttgactgtcaagtatctttccttgttttaggatttagaatacagtgttttctgtatgtgtctttgacagttcagacatcctcttgggttctgagggagttgttcagtctctaataactcctctggaggaaatgagtcattccgggtccccagtagatagtatcagaagtccctggggctgttccagacagtaagtactgttcgcagtgatgctgttgaagactggttggttgtgtcagaagaacattagtaagaggcaacgtgaaagggccaatgtgggaagattcagtcattaaaagaataatgaagtaactgatggaaacaccctgaacataacaaaaaccaatgagttcactatgaagctaaaaagcacaaagcccccatccccaaacagaaacaatattttggttgcctttgggagtgacaggggacacgtggtgttaactgctgcaattaaaatagtggaaaagcaggaaca

SEQ ID NO: 44181 - DNA, 785 bp, Bovine  19866881701514
  misc_feature (1)..(1): n is a, c, g, or t
nctgggcagttccttcctgggtcttagcagtgccatcctgagaatgagctgataaaggcataaacaaagctgttttcccttttgctgtggttattttcaggttttttgttcccctgtgctgctgaagcttcttgaattggtccctggactcttgcagagctgtttttatttgtggatagctgccaaattgttgatattcctcaagagttggaggctggggacctcctcatctgccttttgggtgataccacctactttttcttttaaaacagaattcacatatgtgaaaatctagatcatttgaaatttggaaataactaggaattaatacagagaaaatgcatgttaaaatgttgcagattgaaagggaacaaaaacattagcttttcttttaggtgtgtctgaaaaatttcagtgtttcagaaatactacaagtttgtagaaatactaaagcaactcaaaaagaagtaacacaagtgaaaatatcagttaaacacagtgcaaagaagcaaggaaaaatttcaaggttttgaaacagtatataaaaacccaaagttttcatctaaatacagaagctatgtgtaaatgtgccaacaagttgagggattcttcatattttacacatgctttttttccctctgttccttgcatttgcagaaaccttacatggaagtttcatcccttagggagaatgccatgtcaccatggatgaataggcgggaagagaggtgggattttgagaccccaacaaagagactcctataacaggaggaaggaagaaataa

SEQ ID NO: 44182 - DNA, 1956 bp, Bovine  19866880441931
  misc_feature (1)..(1): n is a, c, g, or t
ntaggttgtcacagagcactagatttgagctgcctgcatcacacagcaaatttccactggctttctaatttttcacatggtaatatatacgtttcaatgctactctctccatttgttccacactttcctctcatcccaccctctccttttcctgctgtgtccacaaatctgttctctatgtctgcatttccactgctgccctgaggacaagcttggatttattcttttattgaacttcaacatcttcaggtaatacattgattaaggctatatattcgcacgctctttttaagtcattgagccttgcataaaggataatattttcaacaaatatttattttacaaatatgcattggtcttctggaaaaacaaaacacatttcatgaaatccttatggtacgatatcacattacacagactgacatctgaaaatagttttaaaaagtacaaggcaatgagacataccacaagcaaatattttagagcctactgtacatgagagaaagaattgaaaataaataagccatatttcacagaaaagtgtttgtgatgggtaaacaaagctgagtagactacattaaataattatcatttctaaatatagtcattacacatttatatcatattttagcttgttacgtgtggatatatctaagttgttttgtctcaatcaaaagttgtctgacttttggccaatatttggaaattggcaaaacttaaagtgaattttttcattatttattaagcccatgtgaatttcaaagattgtttacaagcacagtctgattcatttagaagttttctagtgatggatttgtttacaaaagtgtattaatgcctagaaaatgtactccattgagcagatttttcatatgaaattttccatcaaaaggaacacaagttctgaacttatcctaaggacttggattctaatatctgtttggccagctttccttaaagattagccatttcctgagcactgtctgcatgctagggattttaatgtgtgccaaggatgaattcaatcctgaagaaatgtcttcttcttcaattgagagaagaccaattagcaactggacagggcttcatgtagccccatgtaaactagacatctgatgtcccacagatggtcttacttcagactaaatagcgtagattttaggaaaagaatctgacattcaactactgtgggtactgggcactgcattgttgacaccacgggtccaaactggagttttacccctaaaagttgattatgaaaatctagcattttctatagatcttgaaaccatgccttttatcctgagtgccaaatagtttaaaattgtgagcatacttcattaaaaattacctaaagacatggatctatgaataactgctaattcctgcaagcttctgaacatgaacacagaggatgcttagagccacatttaattattgtgtagaaaaagaaggtagtgcataattttaagaataaatacaaacaaatgttgagacgctttaaaaaacattttccatgaaaatgctatgttaaatttatgattcaactttcaatagaagccatctttaacattttttgttctaatttgaagggagttaattcaatcaaataccatgatctggaatatcttttgaccacttccctctccccacccaaactttttaaatacattagtggtattttattcaattctgaaacacatgtcagctgcaatgctctgactgttacactacactctgtatcagactcagagcaaatgacttccctgttggtccagtggctaagactccacgcttccagtgcagggagcccaggtttgatccctggccagggagctagatcccacatgccccaactaagagtttgcacgccagaagtgaaagatcccacatgctgcaactaagacatggaaccgccaaaaaacaatcaaataaatgtatccaaataatatgctg

SEQ ID NO: 44183 - DNA, 1025 bp, Bovine  19866880481547
  misc_feature (1)..(1): n is a, c, g, or t
nagagcttccacacacaagatggcattaccagctgctgtaatggttactgacctgagtgccccaggcaactagagtgacatcactcccttcttggatgacttcagcttgggaaagggggatgttgtatggctctacaggaacctgctccactgaacataaaacgagggggaaaaaatgtaaggttagttattcctatgtgacatttatgcaaaaagaatataagaacttcattgtggcaaagctttattttatttattcttcctccaaattccagaagttatttataactcaaatagaattactatatgacagcactacacagatgaaaaagtacaatcaaatcagctatagggaaaaactaagaaaattttaataaagtctgttatttagtcaataataatgtcaataatatcaccaatattggttcattaattataccaagtatatcatacataagatgcaaataaaggggtatatgggaactctgtagtgtcttcatactttttctgtaaacataaaacaatacaaaaataaagtttaaaaagatttgaatatgcctgctaaaactttattggactgaattaatttctcagataacttttctatcaaagagtaaagaaatttatgagtgcttgaaaaacagaaaaaaaaaaaacacataatatggcctactttctaagtatattttatttttgcatctttcaactatggacactttcaccaaccacagcagaagacaacacctcagttttcaaatctgaattctgtagacctcaaagagacaaactgaatcagctccaccaagccaaaggaagaatacatcactggtaccccagagaaaaccacttcatgatatctctgcccaacaaagtacaagtaacccgagagttgatcaaactcaagaggaaatggtttgatgaatttttaaatgaaactgagtaaaccaaattacccccatgatgatggggaaagtcttcttgaattaccacatgaagcaggataacaatggaagagataagaaaaa

SEQ ID NO: 44184 - DNA, 850 bp, Bovine  19866880554010
  misc_feature (1)..(1): n is a, c, g, or t
naaatttataatagagaatattaatttaatggaaaaatttttaatgtttattatccattcatttataatgagtatgaatgactttgtttccctaatagaaagtacatggtttaacattttctggtgaaagaaaggtatacaagttctagtttttactgatggcatattcacatctagaaaaataaatcactcaattgtgcattgattagactgtttctatgaattttagaatgaatcccaatgaataaaaatattgatacttttcattttgaattcaaaatgactacatattttaaatttctacttgttcattttctatttctcctctttatactaacactattttatatgtctattataatatttctctaatgtgttcaaaactcatttctgtctgtagattgtgaccttctgaaaaaactatagtacattataatggctcaaagaatattctatggtaaaaatgtttatttctctctttattataaaccctttgtgtaattgcttttgtcatgtttccatccttcaaagggcccaacattatgtcttgctaaaaagaatgtgatcttagtgattgttgaatcaaattgagtttaatatagagaacatttttaactctagcaaatactgctgagaagcagaaactagaaaatgagacatcggaagggtgaagaaaaatgacacacacatcaagctctaaatctcaattactctgttcacaggcagctctttgttcttaataaacatgtgcattcattcctttttatttggccacatagttagcaaaattaactgtctttttctagctcacagaagaattgaagcaacatattatgaaggtgctaatgga

SEQ ID NO: 44185 - DNA, 1568 bp, Bovine  19866880929504
  misc_feature (1)..(1): n is a, c, g, or t
ntggctttaaaacaccggataataaacagcacagaactatgatccctaagagaagggaaacacatgaggaaaactgtacaagtgctccaactagctgcctagaagtttccaggctgaagtacagagcggggaaatccaaatagagcctggcagtcttcctaagtttgagattagcattcaagaaagtcaaaatagatagaaattgtagaaaagagtactggagaggagaaaaagctccaaagaactacagaaaaatacaattgagtctatgactgagcacagttctgggaatgcaaaagacaaaactacccaaagctggggggaaaatcactgaaaagcagaaggtaaacaagttgtagagttcaaataggtctggaaatagttcatattcctgccagccagagtagaaaaattttataatatacaggaaaatgagtagagtccccttagggctaagttagcttgagacaagaggctttggacctcagaaagcctcaaaagaattaagctgttttcaaataactacacattagaacaaaaccaacactctttaaagacatttttaaaaaatctaacaatgaaaagaatagcaatattcaaatgggcaaaaaattaccagcctgcaaggatcaggagaaggaagtggcaaggcactccagtactcttacctagaaaactccatggacagaggagcctggtgggctgtagtccatggggacacaaagagtcaggcacagctgagcacacatgcagggatcgggaaaatatctgtcccataatcaagggaaaaatcaatcaacagaaacagacccatatacagaagaagtgataaaactgccaagactttaggacggctgttatgaatgttataaatgtttcatgtattcacaaagtagagaaacacattaaaatgatgaagagaaaaatggaagacataaaaaaatcacccaatagaatctcattaaagaaaagaaaaaaatagaagttcatgagatgaaaaaagcaattttgaaattgaaaaaaatatattggatgcaattaacaatagattataaaaaagatcagtgaatccaaaacatgggaatataaactattcaaaaggaagctagagaggtaaaaagactaaaaaggatacttgcccctacctggaaatagagcattagtaacctgtgaaacaatatgaagtggtctagtgtatgtgtaattgaaaccatagatatgggaatgtagggggaagagaaaatatttaaagaaataatggttgaaatttttctgaatttgataaaaccaattaacccaaatatccaagaagtttaatgaatccaaagcaaagaaagagaatctcacacaacagcacatcatacaacattactgaaaatcagtgataaagaaaagaaaaaagaacttaaaattaaccatgatggagaaaacatgtttttccaaacaaagatatgaattataacagaatttttgtcaagaagtatacgagccagaacacaatggtataagatctttgaagcacttaagaattctgtagtgagcaaaaatatctggcaaaaataaggcat

SEQ ID NO: 44186 - DNA, 1192 bp, Bovine  19866880958516
  misc_feature (1)..(1): n is a, c, g, or t
nttgcaatgtgcagaaacaaatctttggcttgggtgtacagtcctgttgaaatctctcaaagccggcattcccactgagacttactctgagtgtttacatgttaagaccagatgaaactgtttcccttttccaagtcagtactgctgtgctaagaggtcagtaaacagtgtttatcatcagcagtggacactgcaaccctcaaaaaactgggtaccggtgctgaacagatggagactcatttatcagcctctaggaggctgagtatccatacaagtagaccttgatgagggagtagtgttttcattgagtttgatcccagattacagcagcgcagtctcctccacagtgagctcctgagtggccagtgaggaccagcatgagatggacaggcacgccagttgggtttgactcagggtagggtgtggctttccatacacatccacaaagccggtgcagccagaaggagtagacatgggcttttgttgtatttaagccaatggttttttctcctctgaaaagcaaaaggagaaattctctgagtccttagactgaaggaagacagaaatcataatcattctttgagatctcctgaatagagaacctaaaggtctaaaatagtttatggtgggggaaaaaaaacatatttagctccactgttgacctagtattgaaacattgttcatctactctttatgtcaggctagaattaaaagacagaatctgcagacaacatccaagaacatcctaggttccccccgcaccccaccctggcaccattgtgctctctatgtcgttaaaaattttctcattgcataaaaagatctaagatcctccagaggatatgttttgctttttttttctcttttatttccctacctttaaagggagaaattcttaaccaatgttgacagttgaggctccttggaaatcttttgggttcatcctcttctgaaatgattagaagatctagattctcaagttccataaaactcagggtgtcctatatgctttgtttcctgatacctttggcatagagctctgctgctcacatgacgtgggtgtaagttcagatcttggttctaccattcctaattgtgtgaacctgggcaacctattgttgggagacagttctccgtggttctctgtgtcttcacatccttcaggcagaaggagtgactgtttttggtttag

SEQ ID NO: 44187 - DNA, 1101 bp, Bovine  19866881043311
  misc_feature (1)..(1): n is a, c, g, or t
naaactctgatgataagttcataataacttgtatgtggcttgaaatggaagatctattgaaagaagcatttttgctgcaatgaaaaataaatcttacaagtttctagattaaaatgaattaaggttttatgtaataacacaccgtaatgttgagctatattgttcattatttttagttttaggaaagttttgagcccatatgttctagatgctagattctagaaatgcactgaaccaaatacagtactggagacaaaaagaaaaccattttccgatgcctggggccaattcattgttggcttgagtcagagtgaaatgggaaagagtctagatatttttgtaaagaaacaaataataaattgtcaatgtcaaaatgaggtcagtgaccttcaacgtttatcatattaaaagaaggaccatcacttcatctgtagcctaacaccacattaattttcttcagagagcaaaagaatgagttggtaattccagaagggtttttattttcctgctaattccaggaattttgcttgtctgtgatgactgtgtctctgtgtgttacagtaacacttctgagaggctatccagactaaataaaattaggaaaaggttacagcttaggtgtgttatattggatttgagagaaaaatagaaacctgatcatatataacaaaaaaaattggggtaagtaagaatacatcgaagttgtgaatttactttggtaaatttttaggaaaggaaatatcatgttggaggtcaaaactcaaatgagagtcttgtttttgtttttgttttctttttaattatgtgttatttcagttcagttcagttcagtcgctcagtcgtttccaactctttgtgaccccatggattgcaacatgccaggcttccctgtccatcaccagctcccagagcctactcacattcatgtccatcatgttgctgatgccatccagccatctcattctgtgtcatccccttctcctcctgccttcaatctttcccagcgtcagggtcttttcaaatgagtcagttcttctcatcaggtggccacagtattagagcttcagcttcagcatcagtccttccagtgaatattcagga

SEQ ID NO: 44188 - DNA, 1283 bp, Bovine  19866881072827
  misc_feature (1)..(1): n is a, c, g, or t
nttcttcctatatatttgctgtgtttatggatgattgttgctgttaagtcactcaattgtgtccaactgttttgcgattccatggactgtagcccgctaggatcctctctccatgggatttctcaggcaagaatactggagcaggttgccatttccttctccaggggatcttcccgacccagggatggaactcccatctcctgcattggcaggtggattctttacagctgagtctcagggaagcccgtgcataatggtaatgccatttaaaaaaatgttgttcatgcctatcaagggcagtgcccagaacttcagtttgctctggaagcttgtctatgtgagttttcgaggatactgtttcctcaagatctggccactttgtctttctctttttgatctattgtctggggtctggatattatcactcagtttttctctagcctcaagtcatgagagtggggacggtagaaagttcagactctgctttttcttcttggatttgggtcaatttcctatttcacaatccattccatttaatgggatatgttctcttcctgagcctgtcaatgtgtgatgtttccagtagagagaattcctttagattttccttgtttcttgtacatgtttctcccaataatcttctgtgtattcactcctcttccccagtcagaataggaaaaaataatatttcctgtgggatttagcctcatcttatggtaactggggacccagaggggtttcaccttctgcttaatctcttaaacatttggcgcttgcagacagtttttattttttcttatttatctgcttctttgtattcaattctgcagctattgctgcagctctttcatgccctctttttcttctttgtctggaagaaggcatatggcctttcctggcaggtttttcctttatgagttccttcggtggagatgtttgcaaagatgtttgcttgactctcccatgaatagcctgttttcccagcttctatctatttttaggaatattagtaacacttttgaggacttggctgaatcatctgctttccctaccatttcttctgagagatgcagataagatgaaaggacttcttgaaccaaataagcatcttttgtttatttgcttggccgtgtcttttcaaaatctatgtcatgtatttttgttcctttcattaaatgttggacaggcagattccttcattgtcttttttaactggaagtctgaacttccggttcagacttttttgccattttttctttctttttcttctccctttaaaaaaa

SEQ ID NO: 44189 - DNA, 1238 bp, Bovine  19866881097079
  misc_feature (1)..(1): n is a, c, g, or t
nttggtaaagaatccggctgcaatgaaggtgactcgggttcgattaatgagtcaggaagatcccctggagaaggaaatggcaaccaactccagtattcttgcctggagaatcccatggatagaggagtctggcaggctacggtccatggggttgcaagagtcggacacaacttagtgactaaagagagagagactgaatttaataaaaacatagcaaaaaatatgtagaaaacatatgacatgtttacttttttaatcaggtgttagaaatttcctcaagcctcagaggattacactgaatatgcaaaatatgaaacaccttttctaagaatatagccattgctaataaaatagatgttatgggaattacagggctcaccattttgcaactcaggaaaatgaagaataaaccttataaaccttatagctggtggcaagaaatgtcctttaacagagaagtgatgcagaattcattttaaatatttggttatcaaaaataaccacagaagcataatttagtagaatgtttttagacataaaagctgttgaaagcatgaaacacaagatatatctcaatgaagatcaaggggaaatgttcttgttagaaacctgctgacctcattaagtgagtttaatatttaaatatgatggactctggggagaatgaataacaaacaccgtgtaactgctaaaagtaacagatggtgagaaaaaacctcatgcataaaacttgcctctgattgtggctgtatagattgtgaatgaaaggcgaattatatttaactgcaacacgaagaagggatctaatatattgaacacctggaatcatcctaattctgggtccagggttacagacatacattaacatttggttgttctatcctcggaggtgtcattgaccttgatgagatggggcatatccagtgtaggaagttactccttattcaaaagagatgttagaataacagtgaatgtcacaaatgcaggcgtctttacaacaggccatacgaatgaggtgaaatgagactagaaagcacctaagagacacaggggtagggcaggggccggggtgtgaaaaataattgtgtgttcctgaactgtatacctactgtccagaactaggatatcaatcatattttcctgatacagactgaaaaggaaaatggaaaactctctattagcagatgacattatcctgtatgttgaaaatcctaaggaatccactaaactatcagaat

SEQ ID NO: 44190 - DNA, 1465 bp, Bovine  19866881131491
  misc_feature (1)..(1): n is a, c, g, or t
ncgtgcgtgcatggaggtgagagaaggaacagcagaggacttgctgaatccatttacgggcctaaccatctgccttttcatgggatttgatgtttttccatgactattcatttctgtccacctcgactgtggcttgtagcaggatgggaaaaggaatataatcactcacttgttttcttatgtaaactgcagagaaattgtataaccagatgctttaagacactgaattcgggaaggaaaactaggacaggcatggggagaaggcgagttttcttctgtcatctgccagtgtttggaaattgactttgagctgcagcatacttgtcagtaaagtgaaaggagagcatgtgtttaggtattcttttatcttttttagaaagaggaacacatttgctttaggctttaatttcttttacattaagaggttttatgagtataataattatgccgtcttagaactgtggtctgctttgggcacttaattctctctttttaatattgttggggtattgttgatctacaatgttgtatcagtttcaggtgtacagcaaagtgattcagttatacatacacatatattcattatttttcagattctgtccccatgttagtattacagaatattggataaagcttcctgtgctatacaataccttgttgattatctgctttaatagagagtagttatgtatttcttaattttctcttaaagagtcccctttccagtatacgttttaaatgtggaggctgaaggcagagtcttttgacatgtctcatacttgtacctgaaataggaaattagcatctgcagcaggaaaaagtgagcttacattatatgttgctcctgcaaagagagggttactcgaatgatgaccattctcttggatcccgtgtcaaattccactgaagaaacggagtctgtgagatggggttcggcctctggccagttaaaactaattttgctgggaaaaaacaatttggtgaaccagtgacagttctctgggaatatggactacctgacttatctctgcgcttgaagtatatacatttaagacttcaggacagactgaataccagatttagactgtaaggtatcttaactgttccatgaatttggagcaaaaacaagaattcataagatggtgtaaactttttttttctaatatgcttaaaaaactgttttaaaaggattgctagtagttgtgcttttcttccttcctagaagtcaggcacttcacattgctcctgctattataaggccccttgtttactaaaagcacacatgtagacacattagttaaagaacatgtcaaaatgcctttctttttatccagttgaaggagttatcctcaaaaatgggatgaatgtattattagcatatactttacttgtattagtttcctttacatatttctttaatgtctttttgtaaatttttattaaagaaaaatatattagaatggta

SEQ ID NO: 44191 - DNA, 862 bp, Bovine  19866881138528
  misc_feature (1)..(1): n is a, c, g, or t
ntgtctgactctgtgcgaccccatagacggcagcccaccaggctcccctgtccctgggattctccaggcaagaacactggagtgggttgccatttccttctccaccttggggcacagagactgacaaaattaaaacagtaaagaaatctttctgtttccttagtggaaatttcctttttgattagctctcccttttcttatgtcctctgttccctttcaacaatcactttgatgaaaacgggtagaaaggagctaaattccttgatggaggaaagagcttgcataaagatttctaatgcagatggagatgaaggccagaggtattaaggaagcagtcaatgtttcagataataatagaaagccacatgtaaagcacagccaggaaatgacttgatgtattcgagtgttcaaacactcattttcttattaagaaacatggtctttactagccacaggaaaagctccatgctacttttgcctgctggaatgtaggatacacatttcattggtctctgttcctgaaatctgtggcttgaaacttggagagcagaaaggtcattagatttagctggcctaaaataatacttcatgaaccaattccgattgtcaagtaaaagcattggcttgggatctaaaaacctgtaagtctttggaatgaattaattgacatctttttaaaatgttaaatttatttgcaacatttaggaaaatgtgtagtctccatgaacacaggactgccttttaagtgaaagattttattttaagcctgatattgaacgttaaaagacattttgccttttgcgtaattgataaattgacagattatcagaagttatcccccatccgtatttcgtcaaggcat

SEQ ID NO: 44192 - DNA, 1506 bp, Bovine  19866881151021
  misc_feature (1)..(1): n is a, c, g, or t
nggtgttaaaggaagtagagacagaaataagagactcttttttatgaatggttttacaagtgcacttagctctggagagaccccctaggattagccaatatgatggaattattttaaagggtctgggaatataccaagtggcttgcataccagttgacatcactcataaaaatgtgttaaaaggtgttttgagggtcaaaatgaagaaacacttggaaacttatttgatgaaagaatgccaactgacttttttagatgggaaagagatgcttcattaacttgtcaaaatgtcagaaaggtattatttctgaggaaggaaaaaggtgttataacacatcctttgcattttgatagtggccaatttattgacatgctttactggggttaaaatgatcctttctcttaaaaatggcataatgggaaaatggatagattcaactgaaacttgcttaatgggaagaaacagatgtcatttgtcaactgaagcatcgctagttcagaaaatcactgtctatttctagaggactttgtttaggcagccatgggaacagtctctcctttctaaacatcagtgtagaatagatgtaagctccgtgtgtataggcagactcatatatactcaatgtgtgactgtaaggttcaaaaacttattttttaataaaatttcaaaactaagggaaagacagtcccatccgagacatcagtttggcagcctctatattcatttcagggatcctgcctttggataagtcattcttgtaatttctcttgtggaattgtcccacaagaccatggcaagcttcaaaaattatatttaacagagaaaaatgttcatactttgagtgcaaatattacatttgggagagatccaaagaaaacagagtctcagctggtaaagaaagtgagagattaaactgttactaattttttaaaaaatggggtgtgactattaagtcaagaaagggacattcttttgtggcttgtaatctggttttcaaagtcattcccaaagcatttgaaacatactttgatcagtgaggtatggttgtaacaggacaaaggattttcaaggtgatggctttgaaagataaatttagtataagttccagtatgttggctagaaagccagtttcatggtgtttatggttttaacttataaagagagagaagtagaggggtttgatgtctagtgaaaatttcttgatgattttaagacatgggagcaatacacagttaaatttttatagaacaataaagagtcaagtttttgatgtagtatatttggaggaaagagtatgatacctattggaaggccagagctggggctatgtgaaactcagatcagtcactttgacaaagaaggttggggtgggataatttagaagtttgggattaacatatacacaccagaatatataaaacagataatcaaaaaggacttactgtaaagcacagggaactctactcaatattctgtaatgaacttatataggaaaagaatctgaa

SEQ ID NO: 44193 - DNA, 1605 bp, Bovine  19866881152981
  misc_feature (1)..(1): n is a, c, g, or t
nctcttcttgattcatgctatttttgcaattttaaagtcctccctttgtggctatattttccagtaactctggttttcatttccacacaaatacaagtcactaggccaaagtcttctctagctaaagatggctaggcagatacccaaatcctaatggatccacttttgttcagaacacacacaccacaggctggcttccatggacctgaggacgatagctttatagcaaacaaaagagaaatgatggcagtattctacataaggactcgcctcgtaggctctaatcaatgtatttatacctgctttaatgttcctgttttacatagtgatgacccaaacacctctgcttgcaaataaatgctccccaaggcaggtaccattttctatccatcactgactccctagtgcccaccacacatggtccacttcatggaaatatctgctgagcttatttaaaattcaatgttcaccaaaattctatatgatattttatatatatatatatacacacacacatatatggtgagaagatacaagtgatttcatgactgctcttctcctactggaaaccccagatataattaattttataaaatgttattggtagtacagagaatcaggagaggaacactttatgttttaattactactgcatattttacatctcccagggatatgagatattagtttcctatttcttgagatacgttaaggatgatactccatcagaataaagaactatttattctttgtttaagtgtgaccccttctttaaaatttaggcaagctgggttctctgaaagtttccgaggattcagtcagttatggacatgttaatgaaaaatataaacatttttaggtttgaaaagaacatattaggaatctaacatcattctcacaaccacaaggatggcgacttgtctgcttcccagtagattaaattgccatgactgctcatttcccagggatcctattcagggcatcttccttgaggaaggctgtgcctacagaagtagggttttaaaggaaagagcgtccagcagaattggggaaaggtcccaagttacaaatcagaagatgaagatgagagggctactgttctctgcttcccttctcatttaaggatggaaaacacgtgccactccccacccagggctaacagtccacacccacggtggatgtcactaacagatccccccacccttcttctctgagcccgggaaccttctcagcccgtactccaggtgactcctaccacaagggctgcacatggtgcgggaaaggctgtctgccctagcttagccacagttgacccttgaataacagggggttgaactgtttgggtctacttatacacatttttaaataataaatattatggaactactacacataccctgatgcggagccacagagagagaggagacccacagacacagagggccagctctaagttatatgcagagaggcagcgcacttaacccctgcattgttcagggatcaactgtgtattgtctcattttttatctgttaaaagtgtcgccactttcacaatgtaaacttacgtaggtcacaatagactctatcctggggctactgtgtgcc

SEQ ID NO: 44194 - DNA, 1070 bp, Bovine  19866881243668
  misc_feature (1)..(1): n is a, c, g, or t
ntattcttgcctggagaattcctgacctgaggagcctggtgggctacagcccaggggatcacaaagagtcggacaacaactgagagactaacacagcacacatacacacacacacaatactatcagtgaagaacctatggagttggttatttatggtcaaaaataaatgattatttgggatataatggatccctcagttctctgaaaggctcttacacagcctgatttcattagggaacaccctggaaaggagactcaacagtagatttgttttcctaagcacattacctgttaggatctgtcaaacatgcttgttctccatacaagcccatttggaatgttcacttccaaaataactagactgaaattaggaaaaaatgttcccatcccatttcatccttttttcctgatccgactctccccgcaaagtgactaggcgctatgcctaagaaaatagttacacactcacaagctgtgaagggtaaagaaaattaccactcaaaatgtaactcacttgccaaccacaattcactacttgaacaaccagctactgattcatctaattttattctcacattcaggagaacatttttcaaaagtctgaagtttcttgagcagatccttcttaaacttgtacttgccattggcagatgaaccacagctgttagcctacagggctttgtacatactggtctttttttctgaaatattccctttaattcacatggctgatttctattgggccttaaactttcatcttaggtgcctcttcctcagacaactttctcactaactcttgactcgagtcattcctggcaggtgccacctagttgttctcaggtggttgttacactaatatttaatgttatacttgcattttagtcgttaattcatcagtctcccattgtgagctccttgaggataaatgctaggttttgcccatgagatcaacccttaatacagtgttaacccttagcacattttaaggtcaatacatttttgctgcatgagtaacttaacacaagaattattaacacactagtcaattaaggcagaaattatttattcca

SEQ ID NO: 44195 - DNA, 1981 bp, Bovine  19866881296599
  misc_feature (1)..(1): n is a, c, g, or t
ncagaaattaatatatcatttgttcaggttccaaatagagcactatgataaattatttgaaaagaatgtctttatggaaaagctattcagctaagaatcttttatggaggagttaccatgtatgaggcactatgaaaaaaagagaaaagtagtgtttacattttttatctagaaaagttaaatttggtggaatttactgacaggtgctgactttttgaaaagctttttattgaagtatagttgatttacagtgttatgttaatttctgctagacgtgataaatgttactttcagaaaaatataaaggcagttagccatttttggtagtggttttcaagactaatggcaaaatgcatcaagtacttgctcagaaagcattttgatgaaggttttaagcattcaaacagtggccaattttttggcaagaattatttgttgagtccctttcttacagatgacgtcagaaaaacaacttttgtaataaattacgtttaagggattagatgggaactctcagtgccaggggaagggagcagaaaggggaaatttcaaaagcaagagagtaaatcaccgaagttctcagaggctaggagtctcagagggacagccccttaaactcccaccagataaaaagatgtttgggaacatgagaggttggaggactttatttgcctctttcttggagcctgggaaaatgaccgtgagccctgcctgatgaccttgtcgtataatcaagataccagaatatttggccctcaaaatgaggcaagatttacttagaaaccagtggttcctgaagagttctctcagtggggatgaagggatgccagggaggaagtagggcaggagaggtggctgcagacacctcagaggatgctgaagtggaagggcgatcaagcaagaggccgaatgccaacctcactccacccccttcgcattactagacaccccatgtggtgtaaattgactaagtttgtgtctcacttgagtaagaaaactctaaagtgtctgaggaaaaaaaaaaacttggaatgggtttagctaagtttcagtcatccagcaactaagctccattagagagagatacgttatgttacacatctgaattttgttaattaaaaatattgtacttccaaagattaccatgacttcagggaatgtgctttatttcctgtgtatatgcagaaaatgattttggagcacttgcttgacactagagtcagcttcataattaggaatgtaaactattttacaaaagtccccttaatggattcagtggagagaagttaattaccagatgttgatatactcagaaatgttcatataatctatcagttgattgagaatatttaaagtggttaatgttttgagtaagaaatcaccaagatcaaccatctctttctctctctgcacgtgctcagtcgtgtctgactctttgtgaccctctggactgtagccttccaggctcctctgtccatgagagtctccaggccagaatactgcagtgggttggcatttcctcctccagggtatcttcctgacccagggatcgaacctgagtctgttgtgtctcctgcactggagggtgtattctttaccactgcgccacttgggaaacctgtatccatcacaaaatcttcagaactttgcctgtcaatttctagaaatgaccacttaagataatagattctgttttgtggacagtgtttggagttggttctgatatcctaactttcttcgtaggtataagaccaatgaaataaaaactatgcttttgaattaaattgctaaagttttttgcttttatgactttttagtgtaattaaataaaaaaaattttagtgagaatttcatttaagaatgcattttttcacatacctggtaattaattgtttcctagagggctttgaagatatcaaaattctgaataagacttggatggctttccctaatcacagaatttcaatgatcactataacat

SEQ ID NO: 44196 - DNA, 785 bp, Bovine  19866881438750
  misc_feature (1)..(1): n is a, c, g, or t
nacaaaggggaaagctcatttatttttcatgcttctttgtcgtgttgttccctctgcttctgagaaaagggcaccagcctatttagacagggacgtttcggctatttataaagtgaagcaggttaattgaaattgacagcttggtaatgtcctccgtggcttatgacgcacatggatgatgttggtgtgccgtgtggccttctagacaggaatctgccggaggaatgtgtgtgctttgagctctggttttgacgtaggtactgggtacggatatgttttaggaaacatcttatttccatataaatgaaggaagattaaaaaaagcttttttttttttctaagatggttttccctgaaattccagctgctatcacaaggatgatgaaaatatttcttttgcttttctggaaaaacaactttagttattattcatgcatagtgaagtcattataggtttattcagaaatacattttgtattcattcattggaatcttttttccagcatcagctatgtgtacatttttttgaaaaaatatgcattttttatgcatttctctaaaaaacactctaggctctcaataagttttagatagcttcacttagtatatttgtatagtttcatcaataagtatgtccattgattatcagaaaaagaagaaccaaataggtcattttctttcttacacgatggaaccctggttcttcttctgagacataataaaacatcagtttgactaaaatgagtttttgggtttttctttccatgtgtcacttaaagaagagt

SEQ ID NO: 44197 - DNA, 843 bp, Bovine  19866881518849
  misc_feature (1)..(1): n is a, c, g, or t
nccaggcaagaatactggtgtgggttgccatttccttctccaggggatcttcatgacccagggattgtacctgggacttctgcttgtcaggcagattctttacctattttatacatagtatcgacagtgtgtatgtgtcaatcccaatctcccaaattatcccagtccccttttccccttggttctctacaataagttttgaataccattaatgtacatattatatttctaaatttttacaatatttacattttaagtttactaaatcatgaatgttctctctttactaatgaacatttactctggcaagaaaatcatcttcatgatttgtgccaagtaatatggtacaaggagggcatagatcatttgtatataattaaaatatctttcacaaatgaatttcaaatttcattctgacaactcagatgttaacacagattaactcagaatttctttggtttttgctcctccttgtgctctgtaggtgtgattctaatcattgaaatgcccatggtagtttggaatcttcaaatcttataactaatctctgatattcttaagaacttttggcggctgggtggagagattttttttccccgtttttaaaaaatgtaaaaggtaaatttaagtctgtgtttatagtatgaaagtttctcaatggagagttttgggagcaattgtaagtgaaaatgagattataacgtaaattgtcttgagactgtaatgaggtaaaagtgttttgtacgacaaaagctgtaatcatattcatttgggcacggccagcatgtcaagcactttcaaggtaatgaatgcattccagaagattgtctgattttcttcaca

SEQ ID NO: 44198 - DNA, 3428 bp, Bovine  19866880658302
  misc_feature (1)..(1): n is a, c, g, or t
ngttaccatccttcaaatcccacttcaatgtcatttcctgagggaagccttttcaatacagccactttccacccactgttagctgtctcccagttatgtaccgaacactcaaacgcttttcacttatttgatcaaagtctgtctctccccctaagatgcaggagcttcaggaggatcgtacccgcttttttcattgttctatcccaggcacctgaacactgactcaatcagtaacttcagtctcattacatttgcttttcactctcttaccagttgcacgtgtgtgtgcttgtgcccagtggtgtctgactgttggcaaccccgtgggctgtagcccgccaggctcctctgtccatgggattctccaggcaagaatactagggtgggttgccacttcctactccaggggatcttcccgacccagtgatcgaacaccctatgtcttgggtgtcctgcattggcaggtggattctttaccactagggccacctgggagctcctacaagttgcatataaaaatagaaattcagatttaccttttcaaaaaaatacatggcaaaattaaccactaaagtgtaccgttaaggaatagcaagtactttcagagtgtttctcaaccaatctccagaattcattttatctagcaaaactagaagtccatacccactgaaccactccccatcctcccgcccccccgtccctgctctctactgctttcgctatgattctgactacttgaggcaccacaggtaagtagaatcacgcagtatttgtcttttggggactggttcatttcacgtagaataatgccctccagattcacgcatgtcataacctgggtcagcacttccctcctcctcaggctgaaaaccattccactgtaagtgtatgcctcgtttagtttgtccacttgtccattcatggacacttgggctccttctaccttttcactattgtcaataacgcgctaagaacatgggtgcacaggatctctttgagattgcttttaattctttggggataacctagaaacagaattgctggatcatttggtaattctatttctaattttttgaaaaaccgccaacctgttgtccacagtggctgtagcattttacatttccacaaacagcacacagggctccactgtctccacgccctcactaactcttgttatttagggttttgtgttttggggttcttgatagtagccaccctaatgagtgcaggtggaagatttgcttgtcttttggctgtgctgggtcttcactgctgcacggggacttttctctagtcgcggtgagcaggggcttctcactgcagtggcctcttttcttacggagtacaggctctagggtgcaggggcttccctagttgcagctcttgggctcaggagctgtggttccaggctctaaaacacaggctcaacagtcgtggcacgcaggcttagttgctccgaggcatgtgaaatcttcccagatcagggatcgaaccagtgtctcctgcgctgtcaggtagattctttaccactgagccaccagggaagccctagatttgcttttacataaattttatgtgctttctttctcctacaaacatgtgctaaaagccctctaaaatatgctccatgaactagcaaaagacaattccaaaaggtattgaaagtaattcagttcagtcgctcagtcatgtctgactctttgtgaccccatggactgcaacacacacacagccttccctgtctttcaccacctcccggagctggctcaaactcatgtccatcgagtcagtgatgccatacaaccatctcatcctctgtcatccccttctcctcccgcgttcaatctttcccagcatcagggtcttttccaatgagtcagattttcacatcaggtggccaaagtattagagtttcagctttaccatcagtccttccaaggaatattcagaactgatttcctttagaatggactggttggatctccttgcagttcaagggactctcaagaatcttctccagcaccacagttcaaaaagcatcaactctttggcgctttctttattgaaagtagaaaagaagaaatagtcttttaaagcaagatttaagggacaataaaattgtaatgcatgtgaaatggcaaaaaaaaaaaaaaggagaaaaaataatgggaaggtattcccattcaaatgtgaaatttccaaatgccacctgcctgcatgaccttctgaattccataagctgatgttcagccttctactagaatgcttcctttcccctcctacctgctacctgtgttctggaccagtcccttcctgtgatagtcttcctttctgtctcagctccacccagctactgggtcagtgcctgccttacatatgggatgactgagtggcagggctctgttgttcccaggcggcaaggtcactgtgttccttggcattggagggtatcagtgataagcacagacggtaggagagctggggcaaaacaaatcccattacaaccctgaaaacttgaattaaatgcctaattaaatttggaaacataaaaagcttcacacaaagcaatacatcaacacatcctaaatgggaaatatatcctggtcttgggattccttgggtctaaggaatccaaagggaaccttaattaagtagtaaagaacttgcctgccaatgcaggttcaatcccttggttgaaaagatcccctggagaaggaaatggcaacccactccagtattctggcctggaaaaatccatggacagaggagcctgaacggctgcagtccgtggggtcacagaagagctggacacgactaagagactaaacaataacaaagatttcagacaatctagaagattctctggacctagaagtcactagctaagtacctcccccagagatctaaagtatagccaaaaaaaaaaaagtttcaaaacaaaggtatgcatttaatactgaatggtttgcattcaaaaataaaagatctattaagatttgtaaagacacacccagcaaacagtcaaaacttatgaaatagttgttattgcttcatcaaaatttaagtcatcgatgctggaattatttttcaaagaacaaaatgttttatacttacagttatgaaaatgaacccatgtgtaaaaactaagtgggctagtcactcactcatgtccaactctgagtaaaaactaaaagggaatattaatgaccattaatcctaaaacaatcaccattctaccatatcacacaacagatatcacatgataaagtttaagtggaggctaaatagtaaactaaaaatttctttatataagttcagggtcatggtttttaaaacggtatgataatgacaccaataaagaaagttacaaaacagaaacaggtctctaattttattgactcttgtttcaatactcagaaaaggagagt

SEQ ID NO: 44199 - DNA, 1470 bp, Bovine  19866880998656
  misc_feature (1)..(1): n is a, c, g, or t
ngagcttttcgtggacagtgaaactgcggtggatcttcacggataatggaacggggttcctgcagggggttacctcatctgggtgggggaggacgatcaccgacattgtccccgtgtgaatacgctgcatccgggatgacagccccacctcggggattcgctgaacccggtgaatcccaccttcgtacttcaagtgcttatagacgttatcaccagaaattcgggccgctgcgtgatgtagcccacctatgaaaaaagatgttccagagtgataatacattctactttggaagggaccaggaccttaaatggcctccatgaaaggcctctgtgagcacagagcctgagatgagaacagaaagtagatcccaaagacacttcccagcctaagtatgtgcatatgtaatagggaacatgccaaacgattgcttatggttatctctggagaatagaacagcagcatgtttttcatcttaagtgtttttgttgtaaagtttttatatgatgaacaaatttcacttttataaaaatagtattataaaaaaaagaatactggggcattttctgcattgaatcgatgcaatcttaggctaatttggtgccatatatgagtgctcaataacacagcaatatgataatgatgaataattctgtaggttctcccaagctttcaaaatctattgaaatttaattcttgcttgtctgtgaagcgggaaaataagcacaatgcctaagctagcttcttattgaacatattgtttaaaaaaatatttttattgtaaaataatatacagacgtagaaaaccacatgaatcaaatgcatggttcaagattaagaaaaagaactttattaggcacctgcaaagccctcccataggcctgcctttcctacaatcccttccctttctcaggtaaccagtattttttatttccttctctactataattttattacctaatgtgctgccctaggcactacagtatagtcttgtccatttaaaaaagttgatatgtctttcaagcctctagtctataagttcatcacccatctcaagttatccattgaggaatcagggctgttgacatatagaaatttcccacagcttggttttgctgactgcatactcttggcatgcttcaatctcttttctgccctctgtactggctgctactgggcagctggatccagaaactagattgaactctggcaagacaacaggagacagacaatgtctggctgtctgtttttatggtgttgacaatgtttgatgcttcatgtaccacagaggttgtaaaagggtgatagtccaattctatgggcttcccttgtggctcagctggtaaagaatccacctgcagtgctggagacctgggcccaatccctgggttggaaagatcctctggagaagggaaaagctacccactccagtattcaggccggagaattccagggactgtatagtccatggg

SEQ ID NO: 44200 - DNA, 1959 bp, Bovine  19866881062951
  misc_feature (1)..(1): n is a, c, g, or t
nattttttttttattgaagtatagttgatttatagtgttgtcttagtttctagcatacagtgattcagttacacctatatatatattctttttcatattttttttaatttggtttattacaggatattgaatatattcaattctagtgtgctatacagtagaacgttgttgttgatcttttatgtatatagtattatatatctgctaatcccagactcctcatttatccctcctcattccctatcctggagaaggcaatggcaacccactccagtactcttgccaggaaaatcccatggacggaggagcctggtaggctgcagtccatggagtcatgaagagtcggacatgactgagcgacttcactttcacttttcacttccatgcattgaagaaggaaacggcaacccactccagtactcttgcctggaaaatcccatggatggaggagcctggtaggctgcagtccatggggtcgctagagttagacacgactgagtgacttcactttcacttttcacttccatgcattggagaaggcaatggcaacctactccagtactcttgcctggaaaatcccatgggctgccgtctgtgcactcacacagaattggacacaactgaagcaacttagcagcagcagcatcccctatcccctttggtaaacataaatttgatgtctgtttctgtttcataagtaagttcatttgagtcatagtttagattccacatagaagtgatatcatctgatacttgtctttcttccttttctgactcacttcattttgtgagataatctccaggtccatccatattgccgcgcagatggcgttactttgttcttttccaaggctgagtagtgttccattgcacatggatgccggaccttcttaacccattcatctctcagtggacagttaggttgtttccatgtcttggctattgtaaataatgctgcagtgaacactgaggtgcatgtgtctttttgtattagagttttctccagatatatgcccaggagtaggattgctgagtcatatggcaagtctatttttagttttttagggaacctccatactgttttccatagtgactctaccagtttccattcccaccaacaatgctggagggttcctttctccccacaccttctccagcgtttgttattcatagatttttaatggtggccattctgagcagtgtgaattgatacctcctttgtagttttgatttgcgtttctctaataattagtgatgttgaacatcttttcatgtgcccattgtccatctgtatgtcttctttggaaaatgtatagtgactgaatatttttttattttcttttaggtgatatctgccaacaatttacccgagaaatatttgatatgtaccagaattattcaagctacaaacactggagatttgaacttctgaattatacaccagctgattatggtaagtgtgtttgaggattttgtccatagacgatgctgaaaattattttttctctgcttttgattagaaccatgttgtcctgttttttaaaacatatggtctgtatctactaaatattgtgacatggactcatgaattacagtggcttactatagtagaattcttgctatagaagaagagaatgggagaaagagaagcatcctctcaggaaggaatatatgaattagcaaaacttttcctgtggagggttgataaatgccttgcctgggaaatcattgttctgttatacaaagccaagatgtattaaactttttactctaaagtacttataatgtgttagatgtttatgggaatgcagaaaaagttagtcatttatctttagtttcaaaatgctcccactcaagctggactgataaaaacttagacaacataaacaataagaaactagtgcaagtctttaaagttttaaatactcagagtatgttaaattagaacagctgataatt

SEQ ID NO: 44201 - DNA, 702 bp, Bovine  19866881162298
  misc_feature (1)..(1): n is a, c, g, or t
ntgaaaaacttaaataattagggaataataattacatgttttctaaatatttatgtaactgaaaattattaaagtaaaagtgaaaattagacagtcttcaccgctgctaaagtagcttcagttctgttttttgaaaaaggagagggcaagttgaatgaggtgatcttccaaagtaatgactatatttctaaaataatcatgataaaaccaatcacagtggagaaagtaaaaatgagtttcgaagtagaatttgtaatgcagtgtcacttgagaataataatgtacagctcagtatattatagaaacctctttgcttttccattgtattaatgcttttaaattataaaaaataatacattggagaaggaaatggcaacccacgccagtgttcttgcctagaaaatcctgtggggagaggagcctggtgggctgctgtccatggggtcgcaaagagtcggacacaactgaagcgacttagcagcagcagcagcagcagcatactaaaattctcaagttcagacagttcaccagcagactaatgaacagtgtcaggtacaattttagacagtttaaaagatcatcaaaagtactacttaccccctgtttctgtattataataataggtatagccatcttcacttaacccttctatccacacagtcttccctgttgcctaatgggagggaaaaaacccaacataaa

SEQ ID NO: 44202 - DNA, 1494 bp, Bovine  19866880128347
  misc_feature (1)..(1): n is a, c, g, or t
nactaggcagacctttgttggcaaagtaatgtctctgcttttcaatatgctatctaggttggtcataccttcccttccaaggagtaagcgtcttttaatttcatggctgcagtcaccatctgcagtgattttggagcccagaaaaataaagtctgacactgtttccactgtttccccatctatttcccatgaagcaatgggaccagatgtcgtgatcttcgttttctgaatgttgagctttaagccaactttttcactcttcactttcactttcatcaagaggctttttaattcctcttcactttctgccataagggtggtgtcatctgcatatctgaggttattgaagaaatattagacctaaactaatattggtacattatagtgttctctcatctaaccaaaaaagtgatttccaaaaagtattaacacttattatggaaaaagttatcaggacttttgttaatagcaggtttctggaaactaaaagaacgtaaacaaacattcaagtttcatcagattcatataggaccaactaaaaataaaagatacatgtgaggctggtgaacttaaatatattcaagcactgatgtctgttagacttgatttttctaaggtgaggggtatttgggttgtaattatctagcatgcaattttcatagtgttatcataatagtatctcataaccaaaatatatacatttgctgatgaaatgagctgttattttttcttcaaaatgggataagaatcagtgatttgcctttcattgctagattacaatgaaatcaacaaaagcataaattttctattttttttggcattatgccagatgcctcagttataagatcattttcacaagactttatttgccctattaaattcacaaatgaaagacttttatagcctgtatagtatccttcccttctcctgcatctgagtttgtctttcttttcaccaagaaagatggtgctttacaactcaaagagattaaatttgagggtgacatcttcttgggcactccaatccatcacatcagagaacccaattaccttagtgatcattgactaactagtgctaagaaaatctccaaaatgttgtccttccaaaccaaggccaaagtacaaataaagctttcaactaaccaaagcgccctacagtttcagcctctatttgcaaagagatcctttaaaagtctgctgctctgttttgctgcttgctttttcaacagaagaatcaatcccagggtgtgatccttgtccactgtgaagaggtgctagttgtctgtaatcactgctgggtatcaccatgcttatatgtactgtttcaccctggcctcacagagagggaattcaggaagtcagtcagggggagataacagagtcttcctacgtctagaataaaataagggcgagtcttctttatatgtagtcttctctagacttctctatgtttacctctaagcagagatggtaggggggagatttttcctcatgg

SEQ ID NO: 44203 - DNA, 2589 bp, Bovine  19866880442706
  misc_feature (1)..(1): n is a, c, g, or t
nttccttttcttttctaaaatggcggatggaaacaggagggacaactctctacaaaatggaaggcagagcccattgccatatttgaacatctaaaatatatgttttgtttaatttgatcagagcataatgaggctgggtccctggtcagtgggagctccttgggtctattttacagccttcattctctttcccagggccataaatgaaaccctttcagccctaatgaccacaatgactttcctcgatcatgttattgctactttggcacatttattgctttcacatgcactaatggatgagtttggatatgttaacaatttatatatcatttgatcctaaaaaagaaaccccaccgaactaacttagccctcacgattgagtagcttttaaggagtataaatgaatttaatgctttagaaagagcttctgtaaattatgaacatgacacctattacattaagctgcattaagcattaatacatcttcattactggcaggttgccaaaacctccaaggttgaaaaagctgcctgaaaatgttcaatgtgacagtcacctaggctaagattgatggttcttttttgggttatgtgagggatgtctattgaccaggtgcctcttccacttccagacaaagagatgtaagtggtgtcaaccagagttcctcaaaggctgaatttaatggccaggcaagaacttctgtaccttgtgctgttattattgggagaggttcttgagtagggagatgccaggtgttccaacctttcaagctaaaagattgagtagggggcacaatattcttttctgtgagagttacatgtaatgcttattatcatctcacagtacggaattgttaacaatacttattgataataatcggggctcccctcatggctcagtggcaagtcatccacctgtaatgcagtaaccatggagacttgggtttgatccctgggtcgggaagatcccctggagaaagaggaaatggtaatctactccagtattcttgcctgggaaatcccatggacagaggagtctggtgggctacagtccgtggtgttgcaaagagtcagacacaaccgagcgactaaacaacaagcagcgattgatactaattgctaccttttcttaaatgtttactgtgtgccaccaccgctaaacgctttgtgtgctttctgtccttgaagcctcctaatgaccctgagagttagatattattatttattccccatgggtacagcattaattttctagggtggctataataaaatatcacaaactggtgacttaacagaaattaattttctcacagttctggaggctgcaagtctgaaatggcggtgttggtagggtcacgctctctctgaaggctctaggggacagtctgtcccattcctttctcttagcctctggtattgcctgcacttgttgtcttgtagatgcccccctccgacgtctgcctccgtcttcacgtagctctccctgcatgtgtctgtcttctcctcttcttgtgagcacatccgtcacattggattaagggctcaccctattccagaatgacttcacctgaactaattacagctgtaaagatccagtttccaaataaggtcatattctgaggttgagagagagtgagagagatagaggagatgtgtcctgggtgggaaaccaccttaagcagttgtgacacttgtagcgtattctgtgtggcgagggcagtgactttcgtttggaactgctggagtcttactaaatgtggacaccccatggtcttaggctctcagccccaggtgattttagttaggccataggccaaagccttcagtaactgtggatcttgtgccttgaaaagtccaggagagcaccagttagttagtctgaccccaaatgtgtagtccatgagtaaaggaatgatttcttttgatgagggcaaaaatctccagcagtagttggccaagcagaggtcaggatatttgacaaacatttattcaacatttgtcccactgatgataagagaatgggttccctgactgacaggaagagacagaggaaaactaaaggtttatgggttcactgacagaagaacatggggagcttagtggggacacagagcgggaggtgactggtgggtctgaccagactgcctggactgccctggttaaaatcttagttctaacagcttctggatgccagtttaagctaagttttatatgacatttctaagtctcaatttcttagtgcctaagtgggataatagtatcgacttcatagtgttatttcaaatattaagtgagaaatcacttgtgaattagtaatgactatttttggtcatgagcaccaagcccattccagttagttaaagcgtaaaagggaatctgtcagctgatttgacttgcatgtccacaagttcatttggctgcagccacagaacgtccaggtgtttagtaacgatgctgccaagatactgtcttcatcttctggttctgacttcttcatagacctcactatttttcccagtgtactggcaaaaaaaggcttaatggcagttctagacttttaacctaagagtgggaagtgaatactgcccta

SEQ ID NO: 44204 - DNA, 2445 bp, Bovine  19866880487370
  misc_feature (1)..(1): n is a, c, g, or t
naagtataacattgcattctagtagaggaaacaggcaatcaccttttgctccctaatgtggatacccaagtttgtaaatttaataaaaagataaaaaatgtggcagtgtttttatctgaagcaataaactctgattaaatcttgccagtttaatgctaacagtctttctcggtagcatgaaggtgagtgagagctttggacaagataatagcgacagacaaatgtgaaagaatatgaagttttaaagagcctttcagaacactaaagagtttaggaaattaaaataatcaatatggcttttcatgctcctcaatagtcttaactgcctaggttcattcacttctctgtcattgagtaaatctatctcctccactgtaatgactgttccttactctgtaatgattatctttcatgttcgtttttattaatttttaaaaataaagataggccagaagtaatctgcatattatctactgagtccaccaggatgctagtcagctaacctcgttgttcttacaacaaatgagatacgtttgggaaagaagagatgtagacaggagtttataatgacacatttaaaaaattgtttttttcattgtgttgagcagaggctatagcatatagggaaaaacaatagtagatatagggtgttacaaatgcttggctatggagatacaactatattaatgtctaacagtgatcttcaaaatcagacactttagaaataatgctttctattaatagatatttggtgaaattcagtctaattaatatatgcatatttatacataaatttagagaatggtagtgtctttagttagaacacattggaacaaatgttgagattaatttcttttatataaattttgtttgttcttttatatctatcacatatgcatgaggataacattttgataaaagaagtgagagtttgggttatcattttagagaagaggcagtggttatcataatgattttgccttaatcatttgttctgtttaatgctaatagtaatcaaggaattccaacattacataatttctgacttgaagtatagcttgcatctttatttagatactaaattgagctggcttcttttaaggtttcagagttgtagttagactaaaacatattagtttggcacagctttcaaaagtgcaccctgtgttagatcacgggggccataatggcttctggaatgatctattatttttggcatataaaaagaagttataatgctgttctttaaaatttatgtttcataataaaatgaataattcattcactcatccactgacaagcagaatacttaaattaatgtctcaaagtaaaaaatcagcaccaaaccaaaaaactaggattgaaggtagagaaagaagcctggctattagggtataatacattttcagaagataacggtaatataaaatgagtctgaaagtcatttataaagaacaggatattaaaagctataagaaaaaaaagaccatttatctatttgtgtactattttgaagacttgagccaaatgtttcatcagcgctttgggtgccttccaataaattgggcagggttgatatgtgtgtgtgtgtagggaggggtgggagacagcaatctccttttcctttaagcttggtttatttcaacctccattcattaattcaacaaatgcctattgagtaggtgatatggataaggcaagcttctaggtactataacatacatacaaagatactaatatataaggcatggagtttagactttacaagtgcagatggcatacctatgtgaacttaaggcatggttaattttacaaataattgtgaagtaaatttttaaatgaaattaatttattaatgaccagttaaggataatcaaatcaatcttaattcactttcttttttacatgttcgataacacattatcattaacataatgagaatgataagagccacagaacatgtctggcactgttctatgtgtttacatgtgttttattgttgagtgagtaagtcatgtcccactctttgcaaccccatggactgcagcatgccaggcttctctgtccttcgttgtctcccggagttggctcaaactcatgttcattgaggagaaggtaatggcaccccactccagtactcttacctggaaaatcccatggacggaggagcctggtaggctgtgtccatggggttgctaagagtcggacacgactgagcgacttcactttcccttttcactttcgtgcattggagaaggaaatggcaacccacgccggtattcttgcctggagaatcccagggacgggggatcctggtgggctgccttctctggggttgcacagagtcagaaacgactgaagcgacttagcagcagcagcagcagcagcatgttcattgagtcagtgatgccttccaaccgtcttatcctctactatcccctcctc

SEQ ID NO: 44205 - DNA, 1491 bp, Bovine  19866880492869
  misc_feature (1)..(1): n is a, c, g, or t
nctataatcataccattctggaggtcagactgaaaaagtaggttttgctgagctaacttcaaaagtgtcggcagggctacattcttacagaggctctggggagaatctgatctttgccttgtccatcttccagaggcagcccacattccttggctcaaggccctttccccatcatcaaagtcagtcatcacatcactttaacttctgcttttgtcttcccatttccttctctaactctgactcctgtgcttccctcttatgaggactttgtgattatactaggctcacccagataatccaggataatcaccccatctcaagattttaacctaatcacacattaaaagtctcttttgccatgtaatgtgatatattcacaggttttgagtctcagagtataagcatctttaggggtcagtggctgagatggtttggatggcatcaccaactcaactgacatgaacttgggcaaattctgggaggtggtgaggttcagggaggcttggcatgctacagtccctggggttgcaaagagtcagacacaacttgctgaccaaagaacaacaacaaatctttgaggggtcattttcctgcctacaacagttaagaaaaataataaaatcagaagcgccaaaacttatgggggattgagccttaactggtgttaaaaacaagttatgtcaagttttagaaagcatgtaacattgattaattcaaggtctagtgtaaatgaattctctagaaagcctttctaacatttttacattaatcaagttttcaacaaaatgattgattaaaaaaccctccttgggctaagttctcatcacttttaacgattctattataaaacaaataataaagagccaaaaaacaaaaaatagtttattgaaaaatgttttcctacattatactgtcctgtgtcaaaaggttagagagattatgtgtgccagctgagtgtgacacctacttagcaatagaaatgtgcagcatagtaaccacgcgagcaatctgaaaactgatattgctgtgtgtttttttttcccccttgtagcatcagatcaaagtttaagggtttgaaattttaactaaaataacattttccttaataaaattataaaataattaaaatctaaaagtaaaatttcagccttattcttgtattctcaaagttattctataatcatgctatttgactgatgttgaatatttaacacttggccttttagtttcaactaaaatgtagattttgtgcactcttgctcatgtgctcagtcatgtccaatctttgtggtccccatggactatagcctgtcagactcctctgcccatagaattttccaggcaagaatactggagtggggcaccatttccttcctccaggggatcttccctgacccggggattgaaccgagtctcgtgtctcctgcattggcaggtggattctttaccactaacgacatctgggaagcccctcttgttaacccttcccca

SEQ ID NO: 44206 - DNA, 1427 bp, Bovine  19866880510734
  misc_feature (1)..(1): n is a, c, g, or t
natggtatctttaattaattctgtctaccattaaaagaataaggtcactcataccaaaaattgttgaatgaagcaaaaatgtaagaaagatatactctctgatgttactcataatgaagaagggttatctgctggtcaatacaccacccattatttcttagttagaggtattacgatggaaaagaggcaatggttataggaacctaatgtgattatcacataaaatatactgtattggacagaaattattccatcataagccagaattgtttctgtggagcaaaaatgattacttcaataagacatctttagagctagagctaaaggaccacctaagagagtgcctagcctgtttatttcacctctgagcaggctaacatgtatattgctttggaatttcatatatcatctgggtctaacacatacccatttgacatatgagaaaatcaggatgcccaaggacaaagtaataaataagatctaaacccaggtcttcagttattctctgccaccaactcttgtgccctctctatagtatgttctttccaagaagagttggggatcccttttgatgaattgcatgtataagaacattgcctaagttgtagatggagatagtttgaggtgggcaagaataacctcatttcatgctctgtttgaaattgactaagaaaagataaggggcttcccaggtagctcagttggtaaagaacttgcctgaaatgcaggagatgcaggaggcttgggttcagtccctgggttgggaagatcccctaaaggagggcatggcaacccactatagtattcttgcctggagaatccccatggacagaggaggctagcaggcctctatagggtcacaaagagtcggacacaactgagcctgtacgtaagaagggatgatgacaggtgaatgcccaaagatggctgaaatgttaatgatccggatgaacactgacatgtgacgtaagacaggagagactgctgctggctcccatagctgccatagcctttctgctccccgggcttcacggctctggaaggaagtatagcccccctggtgttctgagaacaagcatgccctctggacaggttcatcatcagcattattttcaactacataaatgcactgcctcttttttccccttagtatcttcgcaggtgtctttcatgctctagtaataatctgatagattatattacaggtcgttactctaggcagctgccctactagtccattccttaatccagtgttagatttaatagaggatattcttattctgttgttgttccctaaatgaaaatgatcagtcaagaactatgtatttatgcttattgtgggcatagtacttttgggggaattcagaaaatatccttattctcaaggagtgtgtaactcaggaaaggtagaacttttatatatatat

SEQ ID NO: 44207 - DNA, 3580 bp, Bovine  19866880547620
  misc_feature (1)..(1): n is a, c, g, or t
ngactgcagcacgccagacttccctgtccatcaccaactcctggagcctgctcaaactcatgtccatcaagtcggtgatgccatccaaacatctcatcctctgtcctccccgttccctcccagcttcagtctttccctgcatcaggggcttttccagtgagtcagttcttcgcatcaggtggccaaaggcactggagcttcagctttcaggcatcagtccttccgatgcatattcaggactgatctcctttaggatggactggttggatctccttgcagttcaagggactctcaagagtcttctccaaaaccagagttcaaaaacaccaattgatgaaggtcttaaatgccagcataaggttcactcacaaggtcttctaatacctggtcccactggcttttcactatatggcgccctgtacaagctgagctaggatcagttcttcccactgcttaaagtgaagagaatctctctcatgtatgtttctcttggtaggaagaagggtcactgaaataccctgtatgaacgcaggttcaagttttattgcatggactctggtatactcagccattgtttttgtagctgatgttaaagtccaaggacatagctaataaccacactcttttagaaacaaatgactggatatactccattcttataacaaccaggcagtggtaaagtaaacctcagccaaacaaaagaaaacacattttaaatgtccatagagacacagccacaaagaagttatgctcacttaacaactccagccccaagaaacctggtacctttcacagtcatggactcatttaaatgggggtttcaagaaaaaaggctaaaataaacattaatttaagtgaatccatttccctccaacccccactccccacaaaaggaggtaaaacagtcctagtgagatggaagtaaaaggatattaataaaaatacaaagataaatatgaaaaaaagaggaattttgttatttttgttaaggggtaaaggcagagaggggagaagagatctctcttggcctgaagccaggaaacttaagataaaacttttcttcccttttgcagaaaaagaaatgctctttaacaaagaaaaatgtcacccgaatctgaaataagagcagcccaaccatgtttatctttgacttgggatgctgacatcaacaatggtgttcgcctgttaacctggtgcccttatcaaaatagaggaacattttaatcactttgttcctacttttatcttggattagccccatttttagctttggtgaacttgaattaaagaaaaagcatgcagaaatttaacaagagttatgaatacctcttacaagaccaaaatccattatgtaaatcctgatttgggctccctgtcaaaaaatatctttaggaccctaaagttattccaataacatctgcataatatactttaaacactaaatgttctaagaggttattggagacttttaaaaaatctcaaaacagttcttagtttataatgttggttagtttataacaattaacaaaataaatatgcttgccagcctacccaggaaaccaaatataagacaaataaatgaacacgattagtaaattcatcttctggatttatgagtttttagggaaagcttgaaatgttttcaattttttaattcccacaaaagtgaataatgctgcaataaaacctcaaaacaattgatgttttaagaaatgaggcgttgctgctaaacttcctactactaatttaacacagatttcaagctgaaatcaagacaatatgctttcttcagctgtgtttatgtgacttcccacatccctgttaattctcttttggctttcatgtagaagtttttggaagaaagcaagcccagggcttcatccacccaccgtaaaagggtcaggtgttccagaacgcatcgaatggaataacagcacctatatttcttgtttaataaatatcatgagaggagtaaacaaatgctacataagagaacttctagtaatttgaaccggatatctctgccacataaatcttaataacttatcaaaaatctccttgtgcagaagacagtttattctttatatttcaactaagacaggatgtgtttaggtggcctaatcaaaagcctgaaggaatactgcagaaaaagagttttggtttctggattctgtctttacacaacttctttgacacaatgtctccctccagcacataaacagaaaaccctcactcctggtgacactcctggtgacagtacatcaatgcacgcgactcagcaatgggcagcagtaaacaggaattggatccgcccccgctccaccccgcccccacccccaaacgtcattgtcctgtaggggacgaagtggttatttggaagagccaggaggctgtttcaagcgtgtgtaatctcacagtgatactctcacttagtagtgaggagttgagttcggttagtcattctttttgagactgtgtgttatttcacatgttatttgttatttgtgcctcagtttccgctaggtgcaacagggctgacaaatatactcacctcatctgcattagatggatagaagagggtaaagctgagttgtcaaacgtgttcagctcaggatcgacttctgggcactctccaagatgctcagcttagggtagatgtaacacctgtgagcttgggctcacccggaaagagacggacacacacttggggtgagtattgccccacattgctggttcaccattctgaggactctttgctcttctctggctaactattgtaacttaagatggtggctcagatggtaaagcgtctgcccgcaatgcaggaaacctgggttcgatccctgggtcgggaagatcccctggagaaggaaatggcaacccactttactactcttgcctggaaaatttcgtggatggaggagcttggtaggctacagtccgtggggttgcaaagagttggacacgactgaccgacttcactttcaggactttctaactcttcacaggatagcaggggtctggcttgcaaatgccaaagccgggccctttccagagctcacattcatactgagtttcatttttttcccctctgtttgcagaggaaggtgctgtactcaggccttgacttggattggaccccaaagcaaaagaagttttgcagcttaacacatctctggcctagtttgtggctaaaatgatccaaaggtagggggaggtggcgggcagggaggttcagtaaggaaaagtatcaggaaccagtgatcaaaagagagtcgcaagcagagagccccaaatggagacccctttggcttggaggagcaggcagtcagctgtggcttgtcctccccacagacagactctcagtgctttccgaaagtgaccatgtgcagcacaaatccatccgcgttttcagtgaccgcagccagcaccttggaagcgaaggggcaacgggcagcgacagatggagggcttccgaggcgggcggcggcctttattcccagatgaaggctccctcttgtgtgagtgtcgagcggccatctccacttaaacaatccctttgcagtgaatggttgtacga

SEQ ID NO: 44208 - DNA, 1395 bp, Bovine  19866880667326
  misc_feature (1)..(1): n is a, c, g, or t
ngagtatagttactttacagtgttgtgttagtttctgctgtacaacaacgtgtattggctatgtgtgtgcatatagttcctccctgttgaacctgctttccactctcctcccatcctacccatctaggtcaaaaaaagcacccagctaagctccctgagctacacttcagggtctcaccagctatctgttttacatatggtaatgtatttgaacacttactgtgtgcttgacactgcattagatgagtaaataagacagtcagactccctgctctcatagtgcataccgtctggagaaagaataccaatattatttttttttaagttgttcaagtcaaatagaacatcagatggtgcaggctctgttgttggagatctcatagaatacatcgcaccacttttagtgattcttttccttggatgctttgttcatatttgaaatgcaaaacttacttaccattttgcaaatgaatcctaggaattcatgaagtagaagtccaaaccaaacacagagtaactttgggaacagctgctcacagtttgctttccttatgacttgcagcttcccctaacccaagtccgtagcatcctgcgtagacaagcgtggttggagtgtggtctgaactacctaatcactgcttctatggctgggtttctcacaatgagtggtttgtgtttttgaagtgactgctttatagaaaagaattaaattacataaagtcatcctacaagcttatcaagaagagtgtcaggccataaatttttttttcaaattgggaaactacttaaagttatagttaaatcccactattcagtctaaagggaacttaagtcctgaaaattttcttcatgtatgccatagtctatgatcaaaccatacaagagaatcacccctgtaaggttaaaatggtgcctctcaaactgattctttttcatgttttacctaaatcttctccagcatatttgcaataaattatacaaccaaatacatttcacattcattaactggccatgcgtggaaaactcagacactgagtccaagttaataaaatactcataaattaaaatttggccgcgagatgttttttttttccctaagactgacaatttattgatagctctcttaaaattcctgactatgccagcttaaagtgtcatattgttcatgtgatcctatgctgctttatactttataacacttctccacttgaaaggattctttttccttttgcatatccagaattaggatcattaattttctaaaaaacagtttatatgaagtcacattctaatatccaccttcccaatgctgaaaatcttgttttcctccaaacacgtcactttgattttctggagatgcttgtcctggcttagttttcagctgctttcactgtt

SEQ ID NO: 44209 - DNA, 3614 bp, Bovine  19866880673917
  misc_feature (1)..(1): n is a, c, g, or t
ntgtccttccccacctcacgttcctgtacttcctatcccctttctctgacctctgtttttcacacagcacgtatcatatactaaaatattttactagatcattatttactatgtttgtctgtctctttcaaccaaaatatatcaattccatcaggcaggactattgtctttattctctgatgtcttctaagcacctagaatagtgcctggcatccggtaagtattcaataaatatttgctgaataaatgaaaagagaatttggagaaaagcaattataatagggaagatagcaattgagctacacggactttttaaaatgtctgatgaatcagttaaggctggattccatatatgtggctggaaagcaaatgctacttgcttacttgactaaaggaccttggcgcttgtttagtgtaaacaaatcctagcttatttatcaattttgtccagtaaaattccacaatcattatgttttgactacttttgtgacttttgtaatgataaacaacattaaagaaaatagcaaaaacgatcttaaatagaaggcgcgaacaacatgcaaaaattctaaacttaagagttttacctgtagccttaggaatatctgtgtgaagggctccattctgacaaggtatgaagccacaatcatggctgatgaatagtgggtcccatagtggtaggctggagtttctcctggccaagaaaataaaagcacaattgaaaaggatgaactgggatatcgggactggcgtatatacactactgatactacgtacaacatagataactgctgagaatctactgcaccgcacagggcaccctactcagcgctccagtgacctaaacggaaggaaatccaaaaaaagagtgcatatatgtatacgtatagctggaagacgttgctgtacagcagaaatgatcaacactgtaaagcaactatacaccaataaaaatttaaaaaacaagaaaaatgagagtaaaaaagaaaacaaaagagtaacacaaaaataaaattagtgttaatcaatagacttgaaaatgctaatgtacatgataaccgcgacacgaagtacagtagttctggcagttgtagaataaaaactttatgataacactgaaacccctcatttatatatctggcaagtatccattttagtataattctgtgactttcccccaaattgagcacatccagcaaccccagggacgggggagcctggtgggctgtcgtctttcgggtcgcaaagagttggacacgactgaagcgacttagcagcagcagcaattcatgttttgaggctaactgtataatagataatccttactagcaagccaccttcaactaaagcaggatactgatgtaaagcaattctttattaggttctggctttgcaatagtatacatttctttgaatcgatgtctacgggtattatgcaatttctgttacacattctccttggcaggggaaaaaaaaaaagattccaaacagggaatattgttaggcttaattttttttcctcctttgtttgttttgcctatttgaaggggtaatatgataaacattgaacaataaatcatgagtatgtaaattgcattattttagaagggactcaattagtatttttttaatgcaaaagggttgtaaaaagtgctcaataaaattaaaagaacatataatggaaaacaatctgaaaaagaaaaatatgtatatatacatatacacatacacatgcacactgaatcactttttgtataactgaaacactaaattaactatacttcaataaaaaatattaaaagaatcaataaaggaaagcatagttcctggcctaaacacgattagggataaaggcgtattatgatgggaaatttctaccctagacaaagcagaaagacttagtttttgccaatacttgacaagctacccaaaaaacaccttccaagcatggccatcagttaacacgcaaaacctgattttcctactttgatagttgtgtatatgcttgcatatgtaacagacataatcatatacaagcaacttggggaaagatggaagggcgtcagaccactaaataatggcttacttttgaaacgtgggtaccaagtcctgcgacagggaaagttacttaccattaggatcttcccagtctttatatcgcttcttatactgagctaatcgttcatctgtctgtgctcccattggcttggccaggtttctaaatgtcttgggattagtaagatcgacctcctaaaatacaaaatgaaacccaattccaaaattactatccacactctattttcaccaccgtagacagaatggctatagccacgatgctttgtcaatgggctagtatccatggggtcacaccagcagagctggactccaagataacgccttgcacctactggttatccatattttacagagaggcacatggcagtttaactggttcagtatgaagatgtctgttttggaaatttattttgcacaggagaaggcactcagaacccaggtttggagataaggaataagagggaaaacccttcccagtcttgacaagggagaggcaggagactgtggacacaaaagctccatttcctctttaccctccgttacccaccaaaccggaggatcaaatctcccttctattctctccccctcctcccctctttcactccagcttcacttctgagcattttcttcctagaggtgaaagcgaagtgaaataaactagggcactcactaacttggtcacctccaaaagacaacatcataccaggccgtgattcccaaatgaggtggattcctccagtctgccagagatcattttaaaggctcatccttaggtgacttaattcatatatttaaaaggaaaccaaaatttacctcctaagcatattaaaagcagacatttgaactatgtaccaatgggatacctaatttgtgttctttttatttaaaactcaacattcaaaaaactatgatcatggcatctggtcccatcacttcaaggcacagatggggaacaagtgaacacagtgacagattttattttcttgggctccaaaatcactgcggatggtgactgtaggccataaaattaaaagacacttactccttggaaggaacgctatgataaaactagacagcatatgaaaaagcaaagacatcactttgctgacaaagatctgtctagtcaaagttatggttttttccagtattcatgtacagatatgagagatggaccatagagaaggctgcatgctaagtcgcctcagttgtgtccgactgtttgtgacccagtggactatagcccaccaggctcctctgtccatgggattctccacgcaagaatactggagtaggttgccatttccctcttcaataaagaaggctgagtgccaacgaattgatgccttcaaattgtggtgctgggagaagattcttgagaatcccttgaacatcaaggagatcaaaccagtcaatcctaaaggaaatcaaccctgaatattcgttggaaagactgatgctgaagcttcaatactctggccacctgatacaaagagtcaacccactggaaaagacactgatgctgggaaagactgaaggca

SEQ ID NO: 44210 - DNA, 1429 bp, Bovine  19866880687253
  misc_feature (1)..(1): n is a, c, g, or t
naaatattatgctcttattttgtgtcagatattgttttgctttgaattcttaatttactcatcacaacatgctatggcaaagacactattgttattattatctccattgtatatagttagtatgacctgaatccaagtgggctagctctgaattttatgattctaatcactacatgacattctctacatagtattaaaggaaaatataatgtataaattgtttagctataatagaatcaggtagtagatttattagctcactatttaaatccaatttctttattccatgaacccatagctcaaaaaactattatagattttaagcaatgcaaaacctcatttgaaaatatattaaaactgagggaactttcccccactcctactcccatcacagcattaatcaacagaaagttctactcaacagtagacatcatatttcatttggaaaattcagtttgctgtggttaattttttaatgctttagatttagcttcaattaccagtgaaaaattacagatcttgtatattaaacattaaaacattcctgtaagatcacatacagtttgtacttctattttaaaaaatagcatcacttcagtatagattgccaccatctatattttaactctttgcaccaattctttcttttgctgaaagcaaaatctttgtggttagcattgaccatagaaatcttaagaagcccaacaaatcaatatctttagacaataaatggttctgtaaattagtaatatgtcaaaagatgtaaggaaagttgtctcaaaggagaactaagaatagtacctcagagcttgcccggggttattgtctttaatgggcaaaattgcactgacagcctgaaatccttagttaatagcaaagctaaattaattcacaggaaatgactcttttgaagtggccagaaaaattaagaactggtatggtcaatttactataatagccagatatagagatgtcaccagattgacccataataatgaatgatcccctagaaggaaaataagctagaaattacctaagacttaaataaacaattttcagggccttacatgtaaggattttaaactctttgatagtactcacaagttatactttaacattctcctacagattctcacctagaagatcagtatatccaaaaataaaaattcactttgtattttaaaagttactaaagttccttgggttggatccaagatagcctgccttaatgccacattcgattatgtatcagatagttttattgcaaatttcatttttaatcaaattgttcattcatttcacaaatattttttacttactatggttcagtcagtatatttgacactgaggatatacaggggaataagaaagacaaccctgccacgtcagccaatcccatcttaaacagaaatgacatgttaaaggaaag

SEQ ID NO: 44211 - DNA, 1703 bp, Bovine  19866880754831
  misc_feature (1)..(1): n is a, c, g, or t
ntgggagccaggttaggaataattgcctaatgactatctaaagccctcacactgggccgcagttctacatttatattgacactgccaatacaaggctggttttcaaaatggtctattggaaccgaaagcaaaatcttcttagcataataaagaaagtattgactgaaagttcactcaataggcagaaatatgactaagtgatcagagtcctgtctttgtccgctcaggcttctacaacaaatatcacaatctgggggccttagagagcaggaacttatttctcacagctctggagactagaaactcagaatcagggtgccagtagggtttcactgtatcctcacatgcccttttctcagtgcatgcaggtagagagagagagagaataagcaaggtctctggtgcccatgtcttataaaggcactaatccaatggtaaggtcccaccctcatgacctcatctgaacctaattacttcccaaagaccccatctccaaataacatcaagggtgagagagtttcaacataagaattttgaagagtacacaaattggctagcaccaaatttgcaaaaaatactgcagaatggtatgcctaattttgtctaattaactgtccaactctgttttcaccaaattccagtaattgtatttttcaaaagataggatgaaattaagaaataccagcatttgttaaagtagaagacaaacactagggtggtatattcttgaacactgaggaccacgccatgcttgtgtgtgtgtgtgtgtgtgtgtgtgtgtgtgtgtgtgtgtgttcgttcctctgtccatgggatttctcaggcaagaatactggagtaggttgccagtcccttctccaggggatcttcctgacccagggatcgaacccacgtctcctacattgcaggaggatgctctactgctaagccactggggaaactatctttaagctccttttttcaattccgttcataagaccatttatagacttttattaagttttcctggcaaactttgaagagaaaggtggagaaaaaaatgtattcagtatggtttgctgcagaagcttcggagttacagaagttctattcacagtgggggactgtgaaagccttttcaaaggtatgtttgtgcagccttccaaacaaaaaaatgcaagaccccatagcctgcggttctctcacactcttgaggtgaaagacatctgccctgcctctgattatagcatttaagcctggagggctggccccagaatcctatgcatcatttagaactttgatgctgaatgaattcaaagaaaaaatttgtctctgccagtctggggttgctggtgacaactgggaaaattgattggggtgatgacagagttctcctggttcaattcctcctactgggaagctctcccctagtctttctaaaatagaggttacttttatgtgctcctgatgactctgactcgatgaggtgaaataaaagagtaaaagtgcaaagtgaaaatgaaagtgttagtcgctcagtcgtgtctgactctgcgaccgcatggactgtagcccatcagggccctctctccatggaattctccaggcaagaatgctggagtaggttgccatgtccttctccattggatctttccaacacagggatcacacccaggtctcctgcactgcagaggttttcctaaaaccgcaggtgaagtgttgag

SEQ ID NO: 44212 - DNA, 887 bp, Bovine  19866880791515
  misc_feature (1)..(1): n is a, c, g, or t
ntattgaattgctcacagagtccaggtattggttgatatctaaattgttagttgttcagttacaaaagtgatgccagtacagtgtataaaatcttctttctcttacagtgaagcttcaaagaatgccaagttgatgagggaatttcagctaatcccaaagctgctactgactcttcgagatatgtctctatcccagcctaccattgctgctattagtaacgtgctgagcttcttactgcagggttttcccaacagcaatgatctactcaggtagtgaaaacttctgtgttcatcggtctgttcactgaaagtaccaatgagattaagatgattgaagtgaatgtaattgcttcctatccctggataatacctgcaaagttaatactattcaggatacttgtgcatcatgagaaataggcatgtatcttgtaaaccatttgttgccactagtgactaatagaattttgggagaatgggtattagaattagttcagtgagatggattgtcctggacatcaaagtgttcagtgtaggaattcttggtccccagccctcttccaagaccaggctttgctgcttctccagggtatgtgcaggaacacatatgcacatgcatgcacacccgcagtggacatgccatgtcttttgtatttgttctttatcacccaaactgatgatagtatgttattgttgcatattctcaccttttctttaacatgagtgttattttgctgctaatgtgaaatacggcttcaggcacatttatggagtaaatgtagagcagttctaataggcacttgagaattctcatcttggccagaaaggaagaaaaaaactacctaagttattttccaaatagaaaatgcttttaactgcacttatcacct

SEQ ID NO: 44213 - DNA, 2266 bp, Bovine  19866880830129
  misc_feature (1)..(1): n is a, c, g, or t
ntgttacagttcatgggcttgcaaagactgcaccataacctggggagtaaataacatgccccaagccttttagatttatttgatgtaatttctacagcaacacaaagtacatattgttgttcccacttttctggaccaatatcacccgaaatagaaggttcccaccacacagcactactgagagcatcaacagtgtgaaaaacccctggaaaatactgcttcctcccttgacacaactaccagagcctcccagatggatggcagagatccttccattatgagaaaaacaagattcgtcaaggcccttcaagtcttcaaagattctaccccaggactgaaaaccaactaaccagatttcaagagttttaagatgtgtatattttttcatattctaacatcttaaaattgagacaatcaaagaggtgctttattcttctggtaaatcagaaggtccctgatatctacgtgtagagagaaagcaatagcttgcttcatgagaactgttaattttttgccaccatttttcccatcaaggaggctataatttgcaaccaaatgaattgtctccttaatgattaaaaagcaaccataaaattgcatcagagaattttgtttccaaccaactttttattatcacttttaatttattaaacactatcaagaaaatacttcttggacttccctggtggtatggtgggtaagaatccacctgccaatgcagatggcatgggttcaaatcctggtccaggaagatcccacatgccaaagggcaactaaacccctgagccacaactgctgagccaggatactgaaaccactgaagcccttgcaccctagagctttgctatgcagcaagagaagcccacaatgagaggcccatgcactgccactaaagaaagcttgagcaaagcagtgaagacccagcacagccaaatataaattattttttaataagaaactattttcttaataagtacaaaccattcaagtgttgaacatcacttttagagaagtatggtaatgactgtgccatcaaggtgtctttttgttaattttaaattgtttgctcacagtttgctcataaaattggtgataagggagtcttccgtatttattctctccacacatcaagtaaaattaggacattatggccaaaaccaactaaaccccagaagtttcatcccaaataaagtgagaaataaatattaacaattctccattctggaaagtgtcagattgagtgaggctgagagtggaggagcgacttgacacgtctacatttcacagcacaggtagccaactcagctttttaggttttgtttcactgccagtgcttttgcttggcacgacttcaagggccttatgtgtccaatccaaggcagcccccttcaggatacatgagccaaactaactgcatgcacaccaggctgggccttggaattagtatacatgggcatgttgtcagagaaagatgtttatgtgtgtgagagtcttaaaggactgaatagaaagatcagaagcaaggttaaacagaatggagctgggaagaattccacatgtccttagaggacaggcagaggataaaagaaggtacagtagggaggcaaaaaacagaagtgcattcttcacagtctggctggcaagccccgcaacagtgccattcttcaaacaaaacctcccttggcctcagatcctgcactggtcaagccagctctattgatttacacaaaaccttcaagactttgatcagttaccaaaatgcaaacattttaaacgatgccccaaagaagcttgtttaaaaaacagttgatgtaagggtttaaaacagtccattaacaatctcatgtagaaatgtgtatacatatatgcccacccttgcatgcttccacgcaaaagaacgtttttatagtctgtgaacaatgccatgtgcttattacacatattcacttcaagtccaaggaaatgttctttatttgcaaatctagagttcaaaatataaaatcaaactcttctttcactgaaccacatgctcattcccactcaaaaagaaaaaaaggaaatcatactctacccacccattggacataaatcaggtgatttacggttggatttattcagaccataaattttttcacaaggtagaattttagggtatgaattaatcacatcatttcagagccctgaaatagccaaatgatcatttccaactttttactccttattgagtgtcctgatgcttgtcaatctgatagatacccagtccatt

SEQ ID NO: 44214 - DNA, 3901 bp, Bovine  19866880855867
  misc_feature (1)..(1): n is a, c, g, or t
ntgggttgacttactgacgccttccaattgtaatgagacaattgactaggtatagaaccatagtccattacttatcaaatggaaggctttttgtgaggttgttgttgttttgttgctaagtcgtgtccaactcttttgttaccccatggactgtagccctccaggctcctctgtccatgggattttccagggcaagaatactggcatgggttgccattttcttctccaggggatcttcctgacccaaagatccagcccacatctcctgcattggcaggtggattcgttaccactgagccacatctcaggtagtgagggccaaaagatgtggactttcctggaaagtgggacatgtttccttgcagtatagaggggatgatttcattctctggcactttaacacctgcttcctggcccaaaggctgagtatctttgatcatgtctagtagggaagggttgacaggtcttagaagaactaagcagaatgacattgtacacatacttacccagggagaatacagaacctcaaatgggcacttttggacatcaatctagaaaatgcttggactgcaagatcattatctaatagtgagctagtacaacttctttgcacagatcttgtaaactgattggcaggatgtctaactattaaatcaggccagccaatcacttcatagaaaattgattaggaaagcaattccagaagactctggtcatgttgacttaagaatccacattatttttagctctgtcttcctgtgcaatttttgaaagctgatatttgaaatcagcagaagagaccagcttccttttcacaggtttcatgagctcagaatctcaaaataccagaatagccaaaacgagttgcagatagtaaagacaaagggaggagaaggaagagaaagcaaacagacagtgaagcaatgacttattgatcaatttcaataagatcccaggagtttatttttcctctgttattactaatattaaaagcaatcttataagacaggcattatgattctatttttaagcaataatttaggtgcagagatagcaataaactgatcaagcccatatagccaggaaacaatcaagatgggactccaagccaaatctcactatggactctacactctttccactacctcatgatgttcatgaaagcaaagaagtacaagaacagtcttttattgagcctctatatatacagacaattggatagtaaagaattgcctgaaatgagggagacttgggttctatccctgggtcaggaagatccactgatgaaaggaatggctatccactccagtattcttgcctggagaattccatggacagaggagcctggcggactacagtccttggagttgcaaagtgtcagacatgactgagcaactaacagtttcactttcacttatatatacagacaaaatgttttacacccattttccccattcctcccaacaattccaacaagtgtactgtaatgatatccatcttacagatgaagatatgaaggctcaaagagacaaacttcacctaacttgcatagctagtaaaaattgtaatagcttcattaaccaaattctggtccctcagaaatggcatcccactctggtggagggatcatgggagaaactgagaccaaaccctggttccaatgaatcctttactttccagaaatattcagatgatgccttccctcatgttgcccagtcttcagtttagcttctatttctggaggaccctccaagatgctccagcaattaaagtatccttgccctgcagcccttgacacaatctccaacttgatgatcagataaaataccaaggggagctggaccagaattagagttctgttccatgtatcagcagatcaactagcttgccttctctttcactattggattctgcagaatttcagccttagccactagccagttcattcagtcttataaagattccagcttaatctcagtaactttcttcttctctcatctaccacctgggtgatattcaccagtgactacccagcacaaattctctcaagatgtgttttacatcccatctatatacaagtaggagtgctggttaaaaatccagattctgggatcttatcccagatctactgaatcatctccaggagtggagctcagagacatgtgtatttaactatctctccagtttattctcattttactaagtttgaaaaacatgggttttgcagaacttggtaaactttaggatctgcaggccaagttcagtagtatgaaaatctttcatacagcctttgcagaccaggctcttcatataggacatcaggtctatctctccttgtctgagctctgatactagattttttgttgttcagttgttcatttgctcagttgtgttcaactattcatgagtccatggactgcagcacaccaggcttccctgtccttcaccatctcccagagtttgctcaaacccatgtcccttgagtcaatgatgccatccaaccatctcatcctttgccaccctcttctccttttgccttcaatgttttccagcatcagggtcttttccaaggagtcggctcttcccatcaggtggccaaattgttggaacttcaacttcagcatcagtctcttccagttaatattcaggattgatttcctttaggattgactggtttgatctctttgctgttcaagggactctcaagagtcttctccagcaccatagtttgaaagcatcaattcttcaacactcagctttctttatagtccaactttcacattcgcacatgactactacaaaagccatagctttgcctagacagaatacttgatacaacctacttgaagtgcatactgggaccctgaccagccactgccattactaactgtatagctttctccctaaagatgcttctctacacaaagtacaacaggaactgaattccatgcagtgtagggcttggcaaggatgatgcatgcttccttcacctacatgcactggatttgacggagaaccagagcatgccatctggtcctgataattccagtgtaggtgttgatgtctcgtaggtggggagaatggtggaaccaaaaggaatcagttacacacctatccaacaacctgatacccacattccactgtcatatcttctaaaatcctgtgttctgcttcgaacaaagaaagtagcaaagcctaatgataaaacaatagaaacagctaagtcacgtctttgaaataatactgtgtggaatccactagctcagggcaaaattttgatggcaggaatcaatgaatcatcttgtaagcaagcaaatacccatttttccctgttcctaagggtgcccttttgttggtgatctggggtccctgtgggtaatgattcttgggactcaatatttatgaagcaatctccttctcaaactgcttcacagctccatgatggaacttgctccctccctgtgcatgcctagttctgaccctttacaatttttacctccatccagatctcccgtcatgctggacatgtcattaatgctcattatctatattatctagaattttcttctgagtggtagaaagcactttaaatggcttcgtgtttgaacagctggattaaatggcactctaagggtctgaaagaaataatacatctccccaaactgtctccctccctcaggggaatagcttaatcaccttgtagaatgaacctattatctaatcaatctttaccaaaaccctacatttggtttaaaattcagttaaatagacacaataactcaaataacaaaaaggttaagagagctcacctatatcagtcctttctctaaaaaacaattactctcttagcatgagtggagcacttttaactctttacatatttccttgattctaccttccc

SEQ ID NO: 44215 - DNA, 1767 bp, Bovine  19866880985586
  misc_feature (1)..(1): n is a, c, g, or t
nctgtgtttcttttagttgttgtcgttcagtcctcggttgtgtccgactctttgtgacccccgggaactgcagcacgcgaggctgccctgtccttcaccacctcctggagtttgctcaaactcatgtccattgagtcagtagcgaatagaaatagcatgtttgaaatagtaaccagaaatgtgaaaaaagcccaggaacacttcctaagtcatggtcgtcactcaccttatgtttgtaaatcttatagacgcctccatggcctttctcttcaggcctgaggctattctttttgaatgtccattggcctgctgtgttcccaggggacggaagagttgtatccccctgggatgcttgaggacaagggaggctgaagaccaggttccatgggtaggtcagaaaaggacatgcagagagtctgtgtccttggtggggatgtatttatgctgaacttgcaaaatgcatgagttcagtgtcatctgttttcagtatttcctgaacaattgatttattccacattattaatgaactttgcagcagttccacttgtcagagcctactctgtaggggtcaataatgagaggaaacctgatgttagtgaatccagcttaagtgattctgtcatgctaacgattcaatatatcaggacaaatgtcagctccttccaatatgttaattcctctgatcctatttgcataaactacagtcaatgaaatacaggctccccctctaagatagttaatggaaatttgtaatgaatttttaatatatttttggggaatctttttcaacctaaattattgagttgaaaagtgatatggaacgcaagaatcacagattgggaagaggatgtaaaaatattacaggggcaaaaatataaaggaatataaaattcataggtataaatttcattgtttcttaagaatcccatgcatttgcacttactactttcaggagaagcaattactttctaaagaaacttgagaacaaagcactgatgtattctttttatagtttgagttgagttttcagtttctctagtctctggagttaaatcaccagttcattagttttcccaaagggcattaaatctgggtttcctatctctcctcctaacccacgatatttccatgggatcacccaacatgtgacagcaatgtttattttagagtcagcatttcttttgctctcaagtccaaggtgaatatatataaccatttaaaattaagattaagaagtcagattttattttatttccttttttgagatgagctacatagttatctgatttacccaacgaagtcattttctttctttctttttaaacaaactttaagatttctattcattcagagttcttaagattttatcaattgattgtcatctggggtttattatcaatagctttctgtatcgatttgcactattggcaactgtaattttcatttggactgcagacatttctcttgtctactaatttttttggctttgttttgtaatgtggctcaaacttttacttcttcgctcatgacattcaatagagagtactttattcatgtaactttggtggagatgaaaacaaacaagatagaccaagaattctcattgttaacatttgcctaagtggtttcacgcctccctggggtagttttcagtctcacttaaggtgagataacagtgatgttgctaatggcactcagtgctgtcagtcagcacagagcagcatcagcagtaggcctgtgttctccatccagctttaggcttacctg

SEQ ID NO: 44216 - DNA, 1500 bp, Bovine  19866880989155
  misc_feature (1)..(1): n is a, c, g, or t
ntctgtaatgggaagccccattgggttgtctctaagggtaactatgactggaaaagtgtctgcctttgtttaccttggaattcccaagtggcaataaaacagtgcactttgttcctcaggaggacccaattgttgggatgtcgtccaaatgcttccctcctggtggcgcctgtagcccgtcatgacaggacaggaatattgatcaaggataacctaatgaaatattaacgccagtggatgtgttggggaaagagcagatctggtcttgcgagagttacattgggtaagaattagccccattagatggctcgttgagtattcaggggagacaattcttgctttataatatatgcttgggtttgccttatggaaaatttattgttcattcatttgatgcactcctttaagaggtcaactttgactttcagtgctctcagaatttattctttactccattgttccttgaaaactatctttcattggatttctttgtgcattgagttgtcaaatagccagtgcaccctctaaactgctttctacaattaacacatgtgttttgtgattggggcaggaagaaaatcggacttattggtgctagtacttatcaacatggagagggcaaattatattcatcagcctcttcttttctttttttcctccatattaatcttttatttgtctatttataataattcctccaagttaatcatatgttgcttattttatttgtaaattttgtttgggccagtcttttttaaaaattttctttatctttttattgaaggataattgctttacagaattttgttgttttctgtcaaacctcaatgtgaatcagccataggtatatgtatatcccctcccttttgatcctccctcccatctctcgccccatgccacccctctaggttgatacagagcccctgtttgagtttcctgagccatacagcaaattcccgttggctatcttatacatggtaatgtaagtttccatgttactctttgcatacatctcaccctctccccatgaacataagtctattctctatgtctgtttctccactgctgtcctgtaaataagttcttctgtaccatttttctagattccatatatatgcattagaatacaatatttatctttctctttctgactcacttcactctgtataatagattctaggttcatctacctcattagaactaactcatgtgcattcctttttatggctaatattccactgtgtatatgatcaacaacttctttatccattcatctgttgatggacatctaggttgcttccatgttctagctattttaaatagtgctgcagtgaacaatgggatacatgggtctttttcaattttggtttcctcagggtacatgcctagcagtggaattgctgggtcatatggtggttttattcctagtttcttttaaggaatctcaatactgtcttgcatagtggctgtatcaatttacattcccaccatcagtgcaag

SEQ ID NO: 44217 - DNA, 2655 bp, Bovine  19866880996727
  misc_feature (1)..(1): n is a, c, g, or t
nttttgttttgaacgagtatttgataatacaacatttcagtaagtccttttcttttgacctggtttctttcatctacagacttggacacaacacgagtattccttttgtcactgttggccagggaccacatagtttggtaattttactgcttcttactggcattttaaagaagggctttacccttctttcacctgttttcattgaccagaggcaaggatggaaagctaatgtgttcttgcttccattttaagaccaaaatcaaatgtttgtctcttgaatttcatagtatgagacaataaaaaatgtaaataaatatatttcaatggaattttgatggccatagtatttagataaagttcacacatgggatgtggttattttaaaataacttgtatcaacatagttgagtctaaaggatttattcaaatactaaatattatttaaatatataattaaatatttaatattgaaacacaaattcaaggtttctgaccgtttagacaagagacttaagagtcatatctgtaaggaaagattcctcaggaaattgaagtaaaataaatcattttttcgtgtaacccttcaagaaactggaaaattaagatgtgtttaagactttgaatatctatattaatcccagtagttggaacaaatgcatatgtaataatgaaggagaatgtttaaaaggacagctgatttatgtcactgctagactccaaacatagaatttctaaagacaaacgtttgggtctgtgatttggctcacattgtattagtttggtaaaatgtaggaaaaattgagttgatatagattctctttgcctcacacacattcatttccctcttgctatcacagtgatcatttaattcaatgtaactctggaagcattgattgagtgtctactaagtaccagattatgtgccacgtactctgggtgactcagaattaaataagatgcacttaaaagtgggtaaggggggcaagacaggtccaggacaattcaatataatattgtctttgtactagagctatgaatggagcaaggacatctctcttcattaaagagagcttcagagagaagtggattttactaatggtaaaggaggtgaagttcactccaggaggaggcctgttgaccctggtacatcttagaaggcttagcatgtaggcaggatatgaagaagatgagcctggaaggtaagatcagggcaggtgaccagaggccttacctgcttgttacagggtctagactcttctgtgagcaatggaggaagaacaatgctaattgaagagtgttaggtgcatggaaagaatgctaatggtgttgatttctgaagactttcagtcttccagagaagtgaatggcaagatttctactgagtctgagtttagcaatgtggttgtgacacttgggacagtaagtgttgaatagttgctgtaggcaaagagaaaggaagctaatcaataatgagcaagaacactggcaaactgtatccagctaaagatagaaaatctcaaatttgtcataggatgattagcacagttatacagacttcctggggcaacatgagccatcaagaggaagacaaaggggttgatattactgataattgatcacctcatagacacctggtttttgatattcctcattccaccaaatgcttgcagtcgctcatttttcatcaagatctatgatgaaggccaaaaatgtgctgggtgtgtcctgaggggtgggagtggaaatactttaccaagaacagacattacgcctttttgacaagagacaaatgtttcattcaaatgctgcatttcgcatattggaaaccgtaatgaattcttgggcacctttctgcctagttcacaatgtcaggcccaggcattgaaacacctcaggctttcctcacaaattaaatgtaatgttacaccctccagtagaatggtgcataaatcaagcgtttgatttgcatggactgtagcaagcagctccctgctggacaaatataaacccaacgccgaatattatgtcagggacaggaacaaagcaatctaagactcccaataaaagcccagtaccaagtataattcttgctggtattacactgctctgtgtcaagcctgttattaaaactcttgttttgacctccttttttcatttcaaaagaaaatgtttttcttgaccttcctgtattcagaaaaccagtgcacaaaccagtactatttataaactggtgtctactactgacagtcacgggcatagttattttttttctccatctaccctcacccaacagagagtacaggaaggggtccatatgagtaatcaagtggaaagaaacaaataaagggcatgaaataaaatacaccacgggagattaggaaacatggatattcactaatgttctacctctggccacagtcccaagagaatgctaagaacaggttcagagcagacaagtttaaaaaatggctcaatagccaaagttaatgtacatttggatgcagaacatgcattcaattcaggaaaagtgagcctaaatatgcataggttgtctcatatctggcctctagcatatgctgttatattttcttcactcatatattccccatcacagggtatctgtactatttttttttttactaaaagtaaaatcag

SEQ ID NO: 44218 - DNA, 4717 bp, Bovine  19866881079493
  misc_feature (1)..(1): n is a, c, g, or t
naaaataggaaaaaataaactttaaaaatgctgtattatgaaaagaataaaaatacaagtgagagcttttgtttgaagaaaacagttttaagggaaaatgaaatatattaacagattgaatcaaataagatgattggtttcctgtctatttgagaggcttaaggccagacataatatggccatagttgggttattctgcagatgacaatcaaagaaggggcttcctgctggcactaacagtgtgagcaacagcagagatgcatgactaactgccacgcaggactcggggaagcagggagatttcactagaaaagaagactgcattctgactgtagagagtcttcaacatcttctaaggagtctgtgagatcacaggaagactttgaagaattttatttatttttatcagcggaatgaagtgatcaaaactatggcagtatgtaatcttgagttagaaatatcaaggtgagttggcagatttcaaagccatgggtaaaatggttgaaagtggggttgacatttacacacctctatttttaaaatggataaccaacaaggccttactgtataacacagggaactcgctcagtattgggaaaaggacttgaaaaggaatagatacgtgtacatgtataaccgaatcactttgccatacacctgaatctaccactatattgttaatcaactgtaccctaatataaaataaaagcattaaaaaaaaaacctatgttttttaaaacatatgtaaactaaaagaaagtccaataaggaaattctagtaatcacttaaatttaagagaaaagcactaccagggatggactctataagccatttttgcttgaagttccaagtcatcccattaaaaaatgctggtagaaggcacaaagggccagcatgtgtgtgacaaatatggatgcatatgagagagagagagagagagaagagaggtggtggaaaactctacggctttccgtgtaatacacagtccagcgggaggcaatttcactgtcactcagtcaccctctagccaaaggtagtaatcatttacctgcccaacagcccaggtttcaataaaactgaagcatacattacttttctgatgttgaaaggaggccgacaatccatgtcaagatttgattcaaagtgcaaagtaaagctgatgagaaacacacgggccaaatcactgcattcctcttgtcactgtccaagtgacactgtctatggccactgactatggcccctgtgatcccaatcatgttgctgcaggttgtaacactaaaccaaggactgccaggttgagtggataatgggctcctcttttctagtagacgtcatcctcaaagtatagtcaagaaatggtctgctttcaactcactggaatataaactccatgacagaagggtatcaacctgcctttgttcattgctgtatgtctgctacatgatgggtgctttgtgaacactggatagataaatgattgatttaatgaatgaaatctaaataagctctcatataaatatgttatattgagtaaattttatatatatatggacttccctgctagctcagctggtaaagaagccacctgcaatgcagaagaccctagttcgattcctgggtggggaaaatctgctggaggagggataggctacccactccagtattttgaggtttccctggtggctcagatggtaaagaatctgcctgcaatgtgggagccatgggttcaatccctgggttgggaagatcccctggagatcttgcctggagaattgcatggacagaggagcctggtgggctacaatccatgggatcacaaagagctggacacaactgagcaactttcacttcacttatatatatatacacagtttaaacctacatcattcaatatatataatatagttgacccttgaatgatgtaggtttaaacagtccaggtccacttacatatagttttcttcaataagtatggcaccttcatttttattttacagatcagtaagtatggggaaaagtttatgtttgactagagatcacaggatatggaatcagaagaatcagggtttgagtcttgattctatccaaactgtttcagcttcctgcccttgggtgagtcatttatcagtttctttgtttttgaggcagagatagcagaacatggattttcaactgcatgggggcaggaatggtcagcacccctaacccttgtgttgttcacaagtcagctgtattacacatcacacatcacatcacacgcacacatgcacacacacacatatcatggtaattatcatcattaaaacttagctcaaaactttttaaaccacatattgaaaacaggtaactaattatgtgaaaataaacattgaattttggacattaggagttttgtacttctagaaaaaatgtcaagtagagtcaccttttattgctaatgttagttttttagctttgaggtcattagatttcatcagtaacctcattttccgacctggctcaaagctcctgccctggtagcatggttcactgcaaagttttaggagaaagattgaataaagaacagcctggggacaagaagggagtttggcaggaagaactgaatgtggtcacttgctcttccatgaagtcagagagcctctcaggtctgactgactcatttgacttgaacctgaaaaaatgtgaggcagagaacactgcagctgtctcacagtgatgtggaacttaaaatgaaagccatacagtatacagagtacagcagggggaagcaagttctgaaatctgaacgcagccctacctgaaggcatatctctcccgagcgtgggtgcgtgctgtgttgcttcagttgtgtccaactccttaggtccccatggactcagcccacaaggctcctctgtccatggtaattctccaggctagaacactggagtgggttgccatgcccttcttcaggggatcttcccaacccaggggttgaacctgcgtctcctgaattggcagacgagttctttacctctagcaccaccagagaagcccatctctccttagaccttccactaatagaagccaatatgtttcctttttaaaaagtttgtttaaaccaagttgagttggacttcctgtcatttgcaatagaaggagtcctgtgtgattactgtctgatacactgtgctaagtttaaatacactggtgttaatagtttgtctcatgtctgggatttgagcctgacatagatatataataagcaaacacacttcacagacaccttctaataaactgctctttatgttaggcaagcatcatctttacctccagttcttctattaagtatcttactcttctgatgtgtttccccagtggctcagtggtaaagaatctgcctgcaatgcaggagacaaagcagatgtgggttctatccctgggtcaggaagatcccctgtaaggggaaatgacccttaagtttaatttttccctctcccttttaaggaaaatttagtatttcttaaagtattttctttactaaagcaaccatcaattagttatggtttgctcttttattaacccatacttcaactttgttgtgatagataataccatcttacctaaaaagttacacttcacaacatacagcagaggtatacgtttctcatccagctgtctgagatcttctgtcctttataattgtgggaaagagtccagttagtggaaacactaattgatccttaatgagtacaaagattgcttcgtcacaccatcttggagctagacttattttaaaatagattagcttcttgctgcttttctgttctttttgagaaacaaccaagcaaatcacgtgtggcacttctgtctttgtgatctaatttcaacctcattatagtgctattaggcaaaagcaagtatatttttaaataaatgtcacttaccatagaggctttctacctagatagttcactcaccctttagcaatgaagaattaagaatatttcagtagtaattacaaaaaaattaagaataagaaaaagaaatgtgttgttttttctatgaaatgatttctgtagaaataaaaaaaaggatcatagcaagtatatttatgaaatgtaaaggtgagagtcataattctcctttgttctatgaaaaaatattaataaaaactgctttctccccaaggaggaaatatttggctacatatagacaggcaaatattttagaatgtctttaaagtataaaataaacaaaacaattttctttctcaggaaaggttatttgatatagttctgttaccccttctatgcatatcctctttaatgaggtaatactgtctggtcacttcctgtctggggactttttgcagagatggatatattctaagcatgtttatttaccagctaccattactttcttcaattcccagaaggactttttttccactcacagactataataaggagacaaattgttataaaatacaactgtgtcccttataatcatacaaaaattctttgcttatgtgtttgctttggctaacacattttcagtttatatcaaattgagtctgattttttttcctttagatttgaggaaagcaaatgaaatttcaatttccctatcacagcctctgaccatatgacaaaatttgaccaataaagtccacaggaggaaaaagacattttttaagtggaggatttttgtgtgttacctctctcagccaggagt

SEQ ID NO: 44219 - DNA, 863 bp, Bovine  19866881149105
  misc_feature (1)..(1): n is a, c, g, or t
nagtatatatgtattatatcatttagggtagacccagtttgatcaattccagggataaattatattttcaagggaaaaggtacctttcgtactctgtcatcccaggatgtcggctttgttcttgactatctcttgctgaggccacaagatgatagtcaaaactccaagcacctcaggcagtcaaaaccatgtccacggtttatgtttattttttgagatgagaaactcatccccaaagcctgccccaaccccagtggccagcaaggactatggaatgtccagaagtggttttaccgaacagacttaccctgaggctttcattggcatttctgaagagtggacccctgaataaaactagattagggtttgtgaggaagcagagagaaatggctattaggcaaccagcagtgcctgctacatatgatctagtatgatacccagtgatgtagaaatatatgcgcttgtatattgtgtgaggacattcatgcaactaaattttgaaaggagagcaaatgtcctcactgagaaaaatgatagcatctgttcagtgtataattttagaaatgcagtacaagggtttctatttaaagctttcaaattttaacccaaatggagaaaatttgctagaaaacatgtaactccaccactatgagaaagaatacaatgtttttgtgttacttaactgtgtaagaggttaaccttttgctccaccccaaaacaagcaagccattaatcttcaaacagtacagatggtttcccctctccctcttttaaaatctatttaaggaaagtcttggtaggattatgctttgtgaacctattgtgtgactttaaagataagagctcttaaagatttttaaacc

SEQ ID NO: 44220 - DNA, 974 bp, Bovine  19866881157061
  misc_feature (1)..(1): n is a, c, g, or t
ngttgatttttaaaatgtggtgttcattttttaaaaaaagaaaactgaaaaaacacagcaggcttccttacaatcagcttcaggcccctggtcacatggaatagctctccatcactcgccggcagggagccaaaacttgcatggaggggtaagcaataaaataaaaatcacatttccaagatttcttttccctgctacactgggtcatatttgattaatggactgcatttattttaaaggtatgattgcacacatgttacctatactgtgccactgtgcgcttggcagacagaaagctcattatgaattctgagccaaggtgggatattagcgcatcattaatatgcataggtgcagatacctgtctgttgctttataatgctatttaatttatatagtgctggtacttgatggacataagagactccatcctcagctagagagattcctaaataaaactagcaaggtattgcagaagtaatcagtccgagtgaaggagttcaggttcttgtgtctctgtatataaaagtccagttcttgagtttcatttcaaatgtctctccatgtggactagcttaacatattcctttcttctctcactgacagcaaatacacctactttgacattttttcccccttaattctgtttaatctgaaattgtagtttgctgctgtttgggttctaccagcttgaaagcagcctcaaggaaattaaaccttatgaggtatggggccaaactgcttgtacatatttcttggtatacacatgggccaccctcagtggggatggcctacaatgagcctcaggaagaaatcagacacatggagtcatatttgactatcttgaaattattatctcactactccacttcttaccatcctgaataggaaaaactcaactctttcagatggcatgcagagcacagcattcaaggccccccgcccatctctgtaagcacaatcctgtaccttca

SEQ ID NO: 44221 - DNA, 1775 bp, Bovine  19866881170799
  misc_feature (1)..(1): n is a, c, g, or t
nattaatttatttttattgaaggataattgctttatagaattttgctgttttctgtcaacagacactgattgagaaccaactgaatgcccaacacagtgatgtaaacatatctaggtattgtctttgcccttaaaaagtttacagtttagggagagagagacagaggataagtctaaccaacacaggaatattcacagactgtgtaattggaaatggccagagtttaacaaataaggttagattcaaagatgaacttcttgatcatcttgatcattgaacttcttgatcattgtgaggattataacaaagctgtatggattatcaagagattgcagatgtgtgggtttttttaagaataaatctttagaatgcatgtgacttaaattacatacattgtatccatctgaagcttccagtaggattgggtctatgaacaccatgccaactaggtagctctgatctttcgctgtgaccttttgctctctggtgctgaagacacactccctagagcccattgctcagcccatctagtttctgcaaacatcaacactctcctctctctttgcagaggggcttcagccttatagacccaagtttatcttcacaccttgtgttcatcaccaatcagctcatttctcatgactataaatgattgggctcaggaatgttgagtggtaaaataaccagagaatagaatcattccttttcatctccctcctccatcagaaacttaaatgcaaaatatcttgaatcctgtcactggccttacagtttaagtggaggcaaaaaaaaaaaaaaggagcttattttaactcaccatgatatccatttatgggtactggataggtagagaaaaatgtttttcaaacaaaggtaatgaatgaccatttcagaaggttcatgcttattgcatgtttggagggatcactccaaacataagccttgaatataatgagtttttgaagtgaaacctctaacctctcaaattcagtgtatccaggattcttgtttttcttgtaaacttgtttctcttcctactctctccagcttggcatcttgtaggtattgtatgcaagagaactggggttttcctttgatttctttccttaccaagtatgtcaaactggtcaacaaaaccagtcagttctcccttctatgtctctaaaaagcttttccctcctccgtttttcccctttttatcttagttgtactagtcatgatctgtctcctggacttggcaacagccttctaaatgatctcttgcctccagctttctcttatattatcttcaccttccaccttaccagcaacattcccttgccaattatgctcagattctcagtcttgtccaactcttagcaatgccatggactgtaacccgccaggctccgtctatgggatttgtccaggcaagaatactggaatgggttgccatttccttctccaggggatcttccctacccagggatcaaacctgggtctcctgcattgcaggtggattctttaccagggagcaaccagggaagcccttcacaaaaacaccattgcttaaaaaccttatgatctaaagcagactcacagatataaagaacaaacttgtagttcccaatggggaggggaggaggaaccacactggggctgcggaggggaggtaaaagctcctgggtataagacaggctcaaggatgcattgtacaacagggggaatatagccaatcatttttaataactgaaaatggaaagtaacctttaaaaatggcataaaaattaaacgt

SEQ ID NO: 44222 - DNA, 1322 bp, Bovine  19866881221106
  misc_feature (1)..(1): n is a, c, g, or t
nttgcctgactccagaggcaatattttaaccctctccagtactgtctctctcaaataaggggtgactctggatctctctgtatttgttgttgttgttcagtcgttaagtcatgtccaaatctttgtgacaccatgaactacagcatgccaagctctgcgtccttcactatctcccagagtttgctcagattcatgtccattgagttggtgatgccatccaagcatctcatcctctgtcatcctattcttatcctttgtcaccctattctcctcctgctctcaatcttttccagcttcagggtcttttccagtgagtcagctgtttgcatcaggtagtcaaagtattggaggttcagcttcagcatcagtccttccaatgaatattcagggttgattaccttcaggattgacttgtttgatctccttgatgtcaagggattgtcaagagtcttctccaacaccacagttcaaaagcatcagttcttaggcactcagccttctttatggtccaacatacatgactactgtaaaaaccatacctttgactatgcagagctttattggcaaagtgatgtctctgctttctaatatgctgcctagatttgtcatagctttccttctatggagcaaggagtcttgcatagattactgattaaataaagttatacaacacttcacttaagtttagtggaggaacactttggatatgctaaatgagggagcagggtagtgcatgctcatgcttttctaaccacaggtagtggaattagaaggtacagaatataaggaaggagacttggagggagcttgctcagctggaaggaggagagtgaatggggagccatgtaggtgaatcaggttaggagaacctacactgacaagaggggagaccctagttgaatctttgttggtgtttcttagtctggagggtacttctcttccatgtgggtttcagagagggcttggctgattcgaaaaacagttcattcagtaaagaattgggaaaggcctgtgttatttgtagcccagagacagtctttaaaaattctcagcgtcgcttcagccctgaacttcagtgaagaacacactggacttgggatcaattagaacttaaagtcactgagatagaacagtgtttggatagaacagttttcttttgaggatgaaagaattgagattcagttgcccccttgccctgccttctcggctactgcatcattctgaattaggaaattctttgctgctgtttgactttcggctggaggcagccttagttaaagtcagtgaccaacctagtcactatcatatccgccataaaatca

SEQ ID NO: 44223 - DNA, 1430 bp, Bovine  19866881380943
  misc_feature (1)..(1): n is a, c, g, or t
nattggctggtttaaactaagggattttgcatgcacgggaacagcaggtcaagatagggaagggaatacctgacctttaacatggacaggctatgattaagcaggttttcaggggctgggcaattgcaaagagcaagacaagggtgagtgagataagctccagttcctagtattataagtccccactttctgagactacgtgacctacatgctccagactttgcaaggagcaagttgagtttcagaggcagaacgagcaagaggttttgtaaaattttaacttttcctcttcaataacagatgataattctaaagctgaagtggagagagtgaccatttaaagccaggcacctacttgacagatgcttttgtggtcctgccaacacacagccccattgctgctccaggtgggcaggaaggagagcactgccctctcctaacactgctctaggacttcagtatcagcatctccaggcatcacctcaagatttccagagcaaagtcttggttaacataacccaacattcgtcttttataggtgaaaaaagttgagactagaatatttaaatgatttgctcaacattacttaatcattagggcttcccatcagttggtaaagaatcagcctgcaatgcaggagaccctggttcaattcccgggtccagaagatccactggagaagggataggctatctactccagtattcttgggcttcccttgtggctcagtgggtaaagaatctgcctgcaatgagggagacctcagttcgatcccttggttgggaaggtcccctggagagtgggaaaggctactgattacagtattctggcctgaagaattccatggactgtatagtctatggggttgcaaagagtcagacacgactgagcgactttcactttcagagctaatgaggtaaaggcaactcagaagcaagactgagctgaaagtctccagaaccttcccttctgccaaaaaagacctttttggctctcccagcgcagccttgggaaattctcaatattattaattatgaattatctcctcacaaatactactccagcatgcatggttttcttgttcttgaattatataccatttacccttaagcatttcttcaaacaaaattaccagcagattcattcaatactttcctgatgatcattttatccaggacagtcttggcaattcagttttacctgatccaattttatggttaaatccaccagtaacacacagcattttagggtgctctaataaaagatataactatctgactcgtggatatattaaaataataccattcttggaatctgggggaggaggatgtaaactgttttcctaacatatctaaggttaaatattattgtcaaagaaaaagaatcccaagaagagacacatgcatttacttcttcattcacagccattt

SEQ ID NO: 44224 - DNA, 692 bp, Bovine  19866881406974
  misc_feature (1)..(1): n is a, c, g, or t
ngtttaatataaacctaaatattactactccctcacctcccccaaccaagctatccccacatggcaagaaaaaccaaaaacaatttaatgggaatgttttcatgtccatttttctctcaagaattctgttgtgcaatgtttaaaatgtctgagctcactttttaaatagtctgataaaaacaaaataaaggtaacatatacaggaatatgtcactagtttatgaatctgggtaagtcattctcatcagattatagccagtctcttacctcatagattattctcttctgttaattctcttccttttctctttccacctttcttttggttattgcactgctcattagcatttctattaagcaattctgaggctaaggaaaaaaaaaatcaatcaaggaaaagagcttcaacttgaggcttgatgtgtgagaagttgaatctattggctaaaatcagatgattttgaggttctctgtggatttcctttatccatgttatttctgccccaatagcatagagtaacagtagctgattatttgttgttgttcagtcactaagttgtgtccgactctttatgaccccatgaactgcagcgcgccagatttccctgtctttatggtataatatagaaagacacactgctaaagggtttgggagtacaggcatatttaaactaaaacctctgggtgagaaa

SEQ ID NO: 44225 - DNA, 1556 bp, Bovine  19866881731614
  misc_feature (1)..(1): n is a, c, g, or t
ntcattaagtggtgttaatggtcatagagatgaggctagtggtcataatggtgtactgctgagacctgagagagcaatgaagtacagaaattaaaaaaaaaaaaaaaaaaactggaatgtgaattggaaaaacttgagctttccagaaggttattacagtataattttataatgaactcatagaacatttacttggaaaatctagaacttttaataggcttaaatgcctccaatttagggaaaatatgagcaaataagctttgatgtggttccatgccaagtcatggtgccaacaaagcatttatgtctccattgtgagctttatccaacatccatttaccagttcctggtttgcaaatccaattgctctaggatagggatttgaacaacaaaattggcaacgttgtaagcttgataaattggagctgccagcatgatagcacaattgcagaaaagagttcagcttgcacattttaagagcttgttgtagatttacctttgagcaaattgactcatctcattgccttaacatttgggagacttgaaagaatgatatcctaattaagacaagctcaattttcttagattaattataaaaatgactaacattaatcaaacaattgaatagtctttgacctttacagctatgtttcctagactatgttctatggaacatcagtgttccttgtgatgtaatatgtattcctctcaaaaaagggggagttttgttgtcgtgaatttaaggtttcacaatgtacaatagcatatgaaagactgtgagaatctctggagttaaaaaaaaaaaaaaactcttaatcacatttcccaactatgttgactctggaacatttaaaacaaacaaaattctattgctttctcacagaatacaatgtttcatgtaacagctttgaaaagtttcacaaaaagtataaatcaactagggattcacagaattacatgatttataccttgagacatggaagagattttaataatatttctgtgctatatccttgaacatcccacacattttggaaataaatttcaggtagctttcagcaacaatttccacaatgatccacaagtttacttattgataaaatggtttattcctaataaaagttctctcttcattccattccattccattgctccccttcaccccagaccgtgctctattcctcaagaatcacttttctctttggggagagtttctggctcagacatttaaacaggccctctaactcatcaataagaaaaccattttcaactcctatgatgaggttctagatctgtgttaagaggaacacaagatatataagttcaggtgtgtggactcaagggccttacaacttggcaaagtaaaagaaaaaaaaacctcacatatgtaaagcaattaaaaataactccagaggttttcaatagggaaaaatcaacatgtgctgagattactgtggaagactttgtggacctggcatatgaataagatgtagaaaattgcagagagaaacaagagaagatttcagagtaagaggaaagcatggtcaaaatcaaat

SEQ ID NO: 44226 - DNA, 4261 bp, Bovine  19866881735140
  misc_feature (1)..(1): n is a, c, g, or t
naagggacactgcacttgagtttcttttgcctgcaatgtcttttcctctcctcttcactgaattaattcttatttatgcttcacgtctcagcttaatcatcatttccttaaggaaatcgtctctgacccccctgacaaaggtcaaaagctccctctcagagaatcatgttctgcttcttggtagaaaagatcacagtcacagttttcccatttcattgatttttgcctcctctctagactctacactgcaagggggcgaggactgtatcttttttcctttcaccattgcatcgctagcacctagcactctgcctaggacagagtacatttgctgagtgagtgaataaaaccatattttctgtgctgaaattgactcactgctttctgatgtttctctagacactgattctatgtccctcctgtttctttatccataaccagctgtactgctcaagcttcccactctagtctgcagagtggctcactcctttacttttgctgttttgttgcagttctcagttatgaccaagtgatgagcatgaatgaccatgagatactgaccagagactttggcaacatagttgggtggcttttaaaggactatatagtggtttacattttctaaaaaagctttcataatttaatcttcacatcaatcctatgaagcagaaagataggaatcatacttatggtgataaaaagaaaaaaattgaatacagacacctttattgaggaaactggttgaggattctttgcttctgagcaaggaaagaaactgtttgatgagaaaattgaagcattcctgactctaccatgccatataatgaccacatgtggcttctgaacagttaaggtgtggctaaatctaattgagctgtattgtaaatataaaaatatgtacacacaaacaccagatttggaagatttagtattaaatgttgattacatattgaaatggaaatagatctattggatcaactaaaatatattatttatgatatattttaatctatttataatagattgaataatgtccccataagatatcaagtgggcttcctggtggctcagtggcagccagtgcaggagacccagacactaaaaattacaggtgtggcttgtgttctatttgggttagccaaaaagttcattctggtttttcttactgtcttacagaaaaacctgaatgatctttttggccaacccaatatttctcttggacaattctgccttagaccatttgaaggataattgtaaagacggcaatgaccagctgtctctaaattctgtagtggacagaataaaagctaatgggttttgcatgcaaaaagagtttaaatatatgaaaaaggataaactagctttaatggctattaaatattgaaactggcaaacagaggccctggctaccaatctcagaaagtcaaattggtagccacatgtcagtcaatgttgctatagaattgtctggaaagtacgagtggcatcgggggacttggaaccttgtttccaccttgaatcacatgaaattattgaaattatacggcaaagtattttcagtgctcaaatttatattcaaccattcctacttctgtctggaaatttcatccttctaatggtgctgaacaagcagatggaggataatgaagccaagagtaaactaaagctaattagaggcctaatgtaaagagtgaaaagactagggtgataaaacctggatctcctgcattgcaggcagactctttaccatctgagcactagggaagccctaagatagcactagcgtgtgccaaactaattgtaatagtggaacctttgggtgaagatcctgaccctcctgagcctcaattttatcatctatagaatggatctagtagcatctattttcatattgttctaagaattggagataatatatgtaaagtacatgacaacataacagcaacatcataaatgggaatatttgtttgttatttttatgaaaggcttttcacattgatgttagtcaatgaatagagttgatcatttcaaattggacatttcaaatgccaagatggcatcatactttcttgtgtggttaaaaaaaaagttaaggagtattgtaaatgttataaaccagcagtttggggatttttaggagactagcattaccaatagacatgcaagaagtgcaaaagtttgaaactaaatgttttatctgtggaattcagatttttgatcagccttgagtagtccatgttctacaggagtgaaggtctttgaatctgtttaggagaagaatgacagctaatggttattgagagctaccattgagacactttctaagtgcttttaatgagtagattgcttcccttgtggctctggtagagaatctggcaaagaatccatctgcaatgtgggagacctggattcgatccctgggttggaaaggtcccctggagaagggaaagactgctcactgcagtattctggcctggagaattccatggactgtatagtccatggggtcacaaagagacagacatgactgagtgactttcacttcactaattcctctaattcttatagcaactctcggtggtagatactattctcatcacttccatttaacagataaaggaattgagatacagtctggtgaaggaagttgcctaatgtaaacagttatcgaagactaatataggcatttgaactccagctgcttgactttaatactctacttctttctaataatgtactctgtgtgtatttcttttctcagaatatggatctttcaaggcagaccaagacacttgcaagtgctcattgctgatggcttcatttcatccacatattgataatacattcagaataaatttattgaacacctactacttgcaacatattgtgaaagatgctgcaggcatacaaagacaaataagacagcatctggcctcaaggaattcatgatgtaacgaggaggacagttatgttactgataagctatgagacaaagaaactcaaagggagtgtgagccagtcagtgagtgttggttgctcagtcatgttcatattatgacccaatggactgtagcccaccaggcttctctgtccatggaattctctgggcaagaatactggagtggtttgccatttcattctccaggggatccccttaacccaggaatcaaacccgggtctcctgcattgcaagcagattccttaccattgcaggggaaccagaggtataagtaactgctgttggagaagagtttctctcatgggctccgagggccatgtgcacacctttgttacttgcatcacactccaatgcattcatctgcccagttctcagtcctcctcactagacgaggtctagggactgtgtcttattcatcttaatgtctaggcatctacccttttatcttaggcatctatcaaatcccctggtatctagcaggttcttaataattggttatggaatgcatgcataaatggagaaatgagtgcagaagaaaaggagatcgaatatgactgggagcttccagcaaagcttgacagaaacattggcttttgaactcaaccttggaagacaaggtggatttccagagaagaaaagatgagacttgaggaaaggaatggtgtacgactgatgagacagaaggaaaagttatatacagttatataaagtttcataaagagaagcctgggcttccctggtggctcagatggtaaagaatttgcctgcaatgcaggacacccgagttcaatctctgaattgggaagatcccttgggaatggctatccactccagtattcttgcctggagaattcccaatgacagaggaacttggtaggctatagtccacggggttgcagagtcggacacgactgagtgactaacactcaaagaaaagcttgaagatgtggaagtggctcattggacttagtgtattgttcagaaacaaaaatctgtgacttgatcaaggtcaaggttaagggcagagctgatatagttttccaaatgtggacaaattcctaacttgatatgaaggaaaaaagcttgatggatgcttgaattattctaaataacaaacactgtatcatttattacttatcccctgcccatgatttcatggatattagctaattctcagagcaccatgtttctgcttattttacagatgaagacactgagcttcagtgcaggtaagtgaccagcccacacggctagtaagaggtggagcaggatctggaacccaagtcctctgtgtcgagggcc

SEQ ID NO: 44227 - DNA, 1408 bp, Bovine  19866881760930
  misc_feature (1)..(1): n is a, c, g, or t
ntagtaaataaagacttagattaccaaaggattcccctacttttataaaggagtcccaggcaggaggaattaccgacatgtcagagtctctggggacttactgaattcagcatgcttcggagcatgcccagtaacaaaaaagcagcttctgtgcacacattgtggatagatgagaccacggttccactggaggcaggaactccaaagataaaggtccagatggaatctaaatcaaactgcagaggtgaaagcaaatcaggattaggtactgtcaatttttctcggtagagaccctcacaagttctaatgttctaaaatttctttgaaattattttctttcaaagtgagcaatgaagaagagatagagacttaatgctcttccctcctatgttttaaaactcattttcacatttacaagacaaagtgaatcttatgtatcagtgtcctagttatctatcttaaaaacatccttttcttttttttctaaggaaaataattagctaggtgatgaaattaaagaattaatggctttaagcaggatctattcaaaaagtacagtgaacttactccccacaccccactctcagcaatgttctaattcacttttagattacatatagatgaagatttgaccaaataaaaatcagtttgaggagattcattcatagtagttttatataacactttgcctatggcgtctgtaaccaaactctgctttgctcatgcatctgtagcatgatttaacgtagggtacagactcagtgttttcatttaaaaggttttgttgattactatggctgatttgaatagcaccttgggattattatggaagtgtaattcagtttaagactaaattcctacatctctgcagtgctacaaacataagctatatatagatatccacataatcttaagattagaaaatcaggtaaagccttactgttttcctaatatggacattacctatcattaagaattcagaaacacttttctaatcagaatttgcactaaaaatcctttcatatctacccaattaatttgtggaatgcacattacttcgtttttaattctacagaaattaattatatttctagataaaatcacattactcgaattcttttgatcatcattaaaataccatccaaaatcttcccatgtatataatcacacagaataatcataaagagaaaaagaacaacaggaacacagaacttctttttgggaaaattttctacagtattttcagatttctatgaccccagtcaaatcccaaatgtgagatagggatggaaccagttggtttttactgtgatgaactcaacaccctacagtgactttttggcaaatgtaattacacttacacccgactaggtaattcctacctggcaacccctgcttacatcggctg

SEQ ID NO: 44228 - DNA, 614 bp, Bovine  19866882093061
  misc_feature (1)..(1): n is a, c, g, or t
ncagttaaaaactggatcctgtgtaataaactacacagttgcatatccaatatgatttagtttctgcattcttcctccatcacacttccaaatatctcaacccctgggacaaactgagttttattaccatagatttattccttagaataaagacagggtttctctcaaaaaactgccaaatgtaaatatgttaaaagatctcaaacaattagcacacatatgtacctccgtagggattaagtgatcagaatgcatgcaattcttgaaaaatgcatatttccaaaagaaatgagatggaggactggatctaatgagatggaggatgaaacatctaagaaaagcaatatctaaagagggagaatcggcaccaaggtctatatgagaagtgtgtagagacgcagggcaccaggaagtactggtttctaagggagcaaagtgtcacaaggaggaggagagtgaactcttgtctaactctcagaaatgatttgtccaaggagacacacgtgctgacaaaataagagaatttattgggaaagggcatctggttggagagcaggaaggtgagcgaacccaggagaacgtctctaccatgtggctcagcgtctcaggtttta

SEQ ID NO: 44229 - DNA, 965 bp, Bovine  19866880393704
  misc_feature (1)..(1): n is a, c, g, or t
naaaaaagacaattgcattcaccaaaatgccaatgaggaagaaacagactcaatacccatggtcattcatctattcgggaagctctgaaaatctatttgggaagccaaacataatcagaaagttgtgcagcatgcatgaaagctgtggaagggaaatgatgcaaaggaccttatagcccatgaaacaaagacagcctcaggcatccactgtgtgcaccaatgcagttctgccaaacaggtcaggacacacatgttcactcgtgacagctgacgtgaactgatttcaaagaaacattttcataaactgtttcataaagaatgaattaatttttgagcaatttgaagtaacagtataagaactgcaattagaatctttacattataagtgagtttaagaagtcaaaggaatattttactttgttgaaagttcctgtttgttaaaactattctgtgaactctttccagataatttcagattaatctgataactgttgctaattagactaggaaggaaattagtgaattaattgtggttatcttgaaacaacaatctcccagaagaaaggcggcttgcttaaaaaggcttccttcagaaatacagacaatatatcaaaattgaacagggaagtctggagagagaaacacaacattatcagaggaaaaagcaagctccttaatactgcctccctaatttatggaagaatattagactaaaaactaaaaaatagatgtttcattcagtgaaatttattcaaagtgtactattaaaattaagagcacaaaagtgtacatcaaattaaaatcttacatagtctctgcacaacctcataattctatatttgaccaagttttcaccattccaaacttgacttggaaatttagatgttttcaaacttttcatctttcttattgaaacaagcttccattttatctaatatgataaaatgataaaaatatcaaattaa

SEQ ID NO: 44230 - DNA, 3169 bp, Bovine  19866880561754
  misc_feature (1)..(1): n is a, c, g, or t
naaatataatcactgacttttgacaaaggagcaaaggcaataaaatggagaaaacttacttttttcaataaatggtgttagaaaaactagacatcgacctgcaaaaaaatgaatctaggcagacgttataaccttcaaaaaaattaaaatgaatcatagaactaactgtaaagtgcaaaactataaaacttttagaagataacaggagaaagtctagatgactttggtatggtgaagactttttagatagaaccccaaaagacacaatcacccatcagataaataattgataagctggacttcattaaaatgagaacttctgctttgcaatagacacagtcaaaagaatggaaagacaagccccagactgggagtaaatatttgcaaaagatttactggtaaataattgctatcttaactatctgaagaattcttaaaattcaacaataaaaaaaaagtaggttaaataatgggcaaaagacctgaacagactcacctcatcaaggaagataaacagatagcaaataagcatatgaaaagatgctctgtattatatgttgttagggaattgctaattacaatgacaatgagataacactgcacatctactagtggctttatatataaattacccaaacttggaagcaactaagatgtctttcagtaggttaatggataaataaactgtggtatatccaggtgggcttccctggtggctcagaaggtaaagatcctgcctgccatgcaggagacctgggtttaatccctaggttgggaagatccctggaggagggcatggcaaccccctccagtgttccttcctggagaatccccatggacagagagcctggtaggctatagtccatggggttgcaaagagttggacctgactgaatgactaagtgcagtacagcatatccagatgatagaatattatataacactagtcaaggctatggtttttccagtagtcatgtatggatgtgagagttggactgtgaagaaagctgagtgctgaagaataaatgcttttgaactgtggtgttggagaagactcttgaaagtcccttggactgcaaggagatccaaccagtccatttctgaaggagatcagccctgggatttctttggaaggaatgatgctaaagctgaaactccaagtactctggtcacctcatgcgaagagttgactcattggaaaagactctgatgctgggagggttgctgggggcatgaggagaaggggacgacagaggatgagatggctggatggcatcactgactcaatggatgtgagtttgagtgaactccaggagttggtgatggacagggaggcctggcatgctgcaattcatggagttgcaaagagtcagacacgactgagcagctgaactgaactgagaaagaaatgagctatcaagtcataaaaagacatggaggaacatgaaatgcatattactaagtgaaagaagccaatctgaaaaggctacatactattccaattatatgacgttctgggaaaggccaaactatggagactgtaaaaagatcagtagttcccatgggttgagggacagggaaaaatgaataattggagcacaaaggaattttagggcagtgaaactattctgtataatgctataatggtgggtacatatcattatacgtttgtcaaaacccacagaatgtacgggcttccctggtggctcagtggtaaagaatcttcctgccagtgaaggagatggcaagagatgtgggtttggtccctggatcaggcagatgccctggagaaggaagtggcagcccactccagtattcttgcctgggaaaccccatgaacagaggagcctggaaggctacaatccatggggtcacaaagagtcagacacaacttagtgattaaacaataacaacaacagtaacacagactgtacaccaacagtgagccctgatgtaaattgtggactttcggtgatgatctgtcagtgcaggtttattgattataagaaatgtaacactctggtgtggggtgctgatagtgggggaggctgtgagtgtgtgtggggtcagagtatatggaaactctgtactttctgattaatactgctgtgaacctaaaactgctataaaaattaaagccttaacaaaattggtaacaggaaagtagttaaagaaattccatcctctatatttagaaactacttatgaagttaaatctgattatgaaaataaaatacaaaattattttaaaagattaatattgcattatttttaagtgtatatgttaattagagaaaacatcagaaataggctgagaagcaagtgtaatatggtgcaagttagggagagggtaaaagtgttttaaaatccttattttaggtagagagactcaaaatatactgtatcatgcttgattaaaataatttgaaaaatacataaataaggttttgtaaaacttgaagaaattggctttagataggattgattaatattataacaattaagttctctctaaatcaatatataaacagtgcaattccaaattatcagcagactttctgaaagtgtgagaaaatgactaaagattttctgtaagaaggtacagtgtgagaatgaaaagaaagttttaaaactggggaaatattaataccttgccaaatattataatatgttatgataatgtgattctgggatactccaaaggtaaatttaaaaaatatgaaaatttatgtgatgaagaaggcacttcagatcaatgagatgaagatggattattaagaaaaaaatagtgttggaaaaattgtctagttatttggaaaataatgaacctggattcactgatgtaaattctagataaaccacagagttagacatatacatacaaatagaaaactaacaaaccaaataaactaaaaaagcaatagtaggaagcttgaatttttatttatttaaaaaaatatattagatagatggtcttcctaattgtagggttgacatgatgtccaaaagccacaaaggaaatttgggtaatgatagacaataagacgtgataaagagttctgcctgccaatgcaagagacgtgggttccatccctgggtcagaggatcccctggagaaagaaatgggcaacccactccagtattcttgactggagaatcccatggacag

SEQ ID NO: 44231 - DNA, 1512 bp, Bovine  19866880678855
  misc_feature (1)..(1): n is a, c, g, or t
ntgagagccaatagcaatctaagcaagatatggactgtgagtgtgtttgtgtcagtgttcccttgaggagttgatgtagctcaagattaggcttttgagaaatttgacacatttcttagtttacacactaagagcatgaagcaggatgacaatcttgcataagtttatttcaggtaggatttatttagatcataggctttccaaaatgtcatatgaactactgcttctagagggactctgtttgaatcccatgcaataacttgatataagaacttgtagatctcttctgctttctttatgtcttcacacttagatgaaaatttgctggtatttttgtcttgtgctttaagctgtatattgcatatactttgttcatgattttatgaggggacttaatttgctaatattttcatttgcaattcaaggttctgatattataatttagtctttgatttgtatagaaaagcatagagttcaggcatcaaatattcctgaaataacagttccaattagttctttgatgaatttcagagcaaacaattacttattgtccttgagagaagagtgtgttgattccagtttatgctctaaatttctctggagagttggaaggggaaactctgtcatggtaatccaattacctcagttaatcaagaaaattgtcagcttcttgaagggcatcggatcagttcagttcagttgctcgtcatgtccgactgtgacccatggactgtagcacgccagggttccctgtccattacaaaatcctggagcttgctcaaactcatgtccatcgtgtcagcgatgccttccaaccattccatcttctgttgtccccttctcctcctgccttcaatcttctctgtcatcagggtcttctccaatgagtcagttttttgcatcaggtggccaaagtattggagtttcagcttcagcatcagtccttctaatgaatattcaggactgatctcctttaggatggactggttggatctccttgcagtccaagggactctcaagagtcttctccaacaccacagttcaaaagcatcaattcttcagcacttagctttctttatagtccaactctcaaatctatacaaaactactggaaaaccatagccttgactagatggacctttgttggcaaagtaatctctctgcttttgaatatgttgtcaaagttggtcatagcttttcttccaaggagcaagtgtcttaattcacggctgcattcaccatctgcagtgattttggagccaagaaaataaagtgtgtcactgtttccactgtttccccatctatttgccatgaagtgatgggatcagatgccatgatcttagttgtctgaatgttgagttttaagccaactttttcactctcctctttcactttcatcaagaggctctttagttcttcttcgcttcctgccataagggtggtgtcatctgcatatctgaggttattgatatttctcccggcgatctgattccagcttgtgcttcatcaagc

SEQ ID NO: 44232 - DNA, 1525 bp, Bovine  19866880722054
  misc_feature (1)..(1): n is a, c, g, or t
nctgctttactgaacccggcccctgcccccaaccccatggtaggcaaaataaatgggccccaaagagacctgtactctaatccctggagactgggatagtgaaaaggactctgcaggtttggggtgggagagtgtcctgtatcattcagaggagctcaatctaattacataagtccttaaaagcagagaagatttcccagcacttcttgagaggaagggaaaaggtcagagagttgttggatttgaggatggaggaagggaccaagaaccaaggaatgcaggtggcctccggaggctgcaaaggaaagaaaatagattctgtcctcacacccctggaaggactacagccctgccaatgctttgatttgggggctcccgacctctagagccaaaagataataaacttgtgttgtaagcctctaagtttgtggtaatttaaaatagtagtagagaaacaatacatgcaccactgaccagctgtatgactttctgagtcttgggtttctcatccctccccctcccaaaaaaaaaagaaaaaaaaaatatatatcataatattgatcttgtgtagtatatgcgcagacttactgggatgatgtatggaaaatccatcattaatcatttcgtaacttagtgtcaggagtccgtcctgaggagtcaaactattttctctcaggtacttagcctccgtttttggcctagctgccatcaggtggggctttcttggttggctcagtggtaaagaatctgcctgcaacgcaggaaacttgcaagagatacgggtttgatccatgggttgggaagatcccctgtgggaggaaatagcaacccactccagtattcttgcctgggaaatctcatggacagaggatcctgctgggccacagtccatgaggtcacagagagttggacacgacttagcaagtaaacagcaacagcgagccctcgggtgaatggctgcacgtggctccgtggtccacgccttctcgtcagagcgtgacgtgtggaccagcagcatcagcctcagcctgggaccttgttaggatcactgaatcttagaccgcgccccaggccgactgagtcagaatctgtgttttttaacaacatcaccagatgattcatatgcactttaaaattgaagaggcactactagactggtggttctcaaacatcatatatgctgacagaacaagtcccttggtctagcgtttaggagcatggtgtttcaatatttgtgtttttagtatattttctaagtatttctaatgcagagagctataatcactggaataaatccttagagatacacttaaatatatgagattcacaacagaattgtaaacttttcaattaatgtctttttctctaaggaaagcagctattctaggtaagtgttactaagtgctgcagtcttaaaagatccataaaggaataagcatcaaagaatagcagagatactttctcactagttcttaactgttcgattcctattcaggcttatcatatgcactgatagacttcatag

SEQ ID NO: 44233 - DNA, 2421 bp, Bovine  19866880757641
  misc_feature (1)..(1): n is a, c, g, or t
natgcctctcaccaacaagggatggggaaatggcagggtttgctcttacagttttaagttattttttaaacattatttcaaaaacttatcttttattataaaagaatatccttactgttaaaattgcaatgttcaataatgtataaatttaaaattctaggttccctatcatatactgaactccctcttcctctaatcactgctttctatacttctctacattttttctcatttacaaaaaatatgtaatgtacctacagtagttttgttcattttctccgtattttttaagtttgaagaagcagttttatttctacagcttaaatgaaattgatcttaatatatataaatacctaacatagtattatttccatgtcacttttgcaatttccgtttatattctagttcccatgtgaagtgctttacacatatatcatcttgcttaaacctcacaaaggcctacaaggtaggtatactaccattttacagttgaaaaaactgagactgaaaggtcaagtaactagcctaagatcacacagctagtaaggtcaggtacagattactgcactttaacaggttctgttacagactcacaaatcagcctccaaatttaaatactccagaatgcatcgtcagcttactttgaaataattcattctcattcttagaagttcatgagctgccagattcctttagagcttatgtgaaataaagtagaaataacaggcccttcacaaatagctttcaaaatgcctaagagtcatgctgccttttctggtaatgctgatgtatcctgaggtcctgctgttgccagactcaacatatattcatcagaatctctgcataagacaacattaagttattacttaataacgtagaagaattaatcccataaactggcatctagtgacaccagattttcaacctacttttaaagcacttatttatcaaggttttcaatgcaaattttgaactgggcaggaccagatatagaagttctgtttctgatccaatagataagtacctcattccaacaaagaggtataaaccatctaagtacagttgttcaaagggctgcaatctagaacagtgtactgctgctaagtcacttcagtcgtgtccgactctgtgcgaccccacagacggcagcccaccaggctcccccatctctgggattctccaggcaagaacactggagtgggttgccatttccttctccaatgcatgaaagtgaaaagtgaaagtgaagctgctcagtcgtgtccaactctcagtgacaccatggactgcagcctaccaagctcctcccatgggtttttccaggcaaaagtactggagtgggttgccattgccttttccttcattttatgtatgaggtaccaaaaacctccacccataaacaaatcaaaattctatcctatagttaagtagaataacattgtctattttgagagataacaacatttaagtttcaaattgccactcacagattcctctttcttctttttcccaaattatcgtatggcataggttattaaagatttaaaataacaaaaatacttatttcaagatcatgcttgttgaaagcaattccatgaatgattcaactatgtatgacttcattttgtattcttgaacataataataaaatttgattcaggcaataaaaaaataaaatttaaatacttcaaggttttttttatagactcattatttcaccaaattttttcgaaactttatttggataaagattttctttaatttaagtacataaattcttacctcttgattaaatttatgtgccatctcattaagaagtgaagaaaaaaaactagtgttttgtagcaggactcgacccataactccaagatatgttgacattactacaggatatctctgtgcaattaaaatacagcatatttaaaactgtgttatggtacaagtataaacaataataaataatcattgacaaagtaacaatcaacagggatatgaaataatattcttctttatactgcttctttagaatgaactgccaatattgttgagttctaactaacttactaaatatatatgtctcacaaggtaatatatacatattatgtacatatttttatggattatatatgtatgtatataataaagagaggaacaaagaaagaatatttatcaatggcatacttacacatttatattactttaaaagctcctaacagtagtagtatttagagtctattaaagagcttaagttagaagaaaaccagtattttcatagtatttcatacattacctagttttatgtaacaaaactagcactatttttcccgttcctatgcttaacatatttgtgtatgaacacacatgcgtatgagtgaaagacatgagatagcaaaggaaattcatactttcctatgtagagac

SEQ ID NO: 44234 - DNA, 747 bp, Bovine  19866880936968
  misc_feature (1)..(1): n is a, c, g, or t
ncataagacttctggctgttttgatgctaagaattgcagatttattttccttttagactatttcttaaatctttctaatgcatacatacattcacattatattccagctaattcttctgagcaatgcattgaaagtaattgcttctttgttgtctcaccctgtgtgatatgaataaagacatagttttatcaatagctaaggtgtgctattgtgattcaaaatcaaatgaagaaaatatgagaaagaacatatccatttgtattaatttaaaacaattaaaatgatttaattccgtataaagggatacaaataaaatatcctttctgatgaaagaggatttgttaactaaagaattaacaaattaattattttgtaggatttcattgtatcctagctacttgaattcatttttacataaaacacagcaaagtgaaatgatttaaaacagctttcacaattttatgctttttttatatttaacatgataatgtatgtgaagatcatattaataggtcgtctgattttttttggaactgtccctttgaaataaattactttaaaacagatataaaagaagaaagcttttgttacagaaagtagccaagtgttatttttaacttttttttttaacttaaacgagttaacttctttcccaccgctttcttactgagctggaagaaatgaagaaacagatgactttcttaaccctagtcaaaatggctttatgtcattgtgtgaattaggta

SEQ ID NO: 44235 - DNA, 950 bp, Bovine  19866880989234
  misc_feature (1)..(1): n is a, c, g, or t
ntatagcacttttttttttaaggaaacagagttttagcatgtaatattttcttctcatttacactgacatgattaaaaaataaattatctgttagtgtacagattacaaataaacacccttctaggctgttagtaggcaagcagctcagtggtctctaagacgatttctcaaagttctgacaatcctgtcaccttctccccaaactaagcatggttttcatcatgacacatctctatgcagatagacaccttgattgactttgcttttcctattgggggcaatttggaacaattaacaacatttttattcattacccatgaatttcattgtgctaggtgttgaggtcatatggatgaataaatagataagtctctgcccttgtatatcaggtgtgaggggtatggacaggcacgaagcctgcaggggaaagtcttctgtatctataaaactgagccaacctggaggtggaagggattgtcatactatgcttaacatgttctagaacatgacgtgtgtgtgtgtgtgtagtgcacactcagtcactcagaaatgtctctttgcgaccccatggactgtagcctgccaggctcctctgtccatgaaatcttccatggcaagaatacttaagtgggttgccatttcctactccaggggatctgcctgacccaggatcgaaccagcgtctcttgagtctcctgcactggcaggtggattctttaccactgcgccacctgggaagttggagaacataatccagataccttttaaaacatttgttaattagttcagttgatttgtgattgaaggaaacttaaaaagtgtcagacatagtcctttggagtcattccacccataaatattttatgatctgacagaaaattcactcatatgactttgacttcctcataaatttcaaagtttcctggaaagaaatcatttcagatgccaa

SEQ ID NO: 44236 - DNA, 1557 bp, Bovine  19866881213105
  misc_feature (1)..(1): n is a, c, g, or t
naggatgagatggctggatgtcatcactgacttgatggacgtgagtctgggtgaactccggaagttggtgatggacagggaggcctggcattctgcgattcatgaggtcacaaagagtcggacatgactgagcgactgaactgatctgaagtcaagcaaactgaaccaattaaaataagaaatgaagactgctttatgtaattaagatgatataagacatttaacagacaaagcagtggcacattggtcataattagcagggcaccaaatgccacatacttcctagaataagcttccgagaagtgcgttctgcagatgctggcgagggcaacaacctcatcttgtttgactagtgatgtatggcttataatatgtgagaacatcatgccttcagcagtatccatgatgctgatgttgaatgaccattggtggaagcatgtcaagctttgtgttaatgtggaatattgacttatgtcatgttttgcatgaattcaatgcctgctttgtgtttcagtatatgaattctcttaaagtattcaaccagttcactcttcacaaatactgagaatttagtatctattgatatatatattggtctccaatacgtttttgctgtaagtaatcattctacaatgaaatttaccatctatagaccttcatttaaattctaaagtttggtatcctattagtcactgcacattggatttgtgaaaagttaagtctaaatacctcatttttgacaatcaacatctgccacgatgtgccatctccgtatatggctgactaacaagagaagagccaagatctgtagttgaacctcttccaagtactgattgtgcttccaagtacacacttatgcctgaactgatgccaaaactgtttgcctccaaacatgtagaagcctgctgaaattaacataactggaaaatagggaagaatcaaacaattatcttagtactttccccattcgagtcagctttatctgtcttcactggtcatatatttgctattaaatattttgctattaaaatactcacagattttaaggtctgtggtgggacagcttgtatatatgttaattggatgtgtttaatttcaaaagacattaataaagctaagttaaaatcaatattttatgcctgctgatttttaagtttggctaatagtttttacatcacacaagcatgcacagttagcaagatgaagggaacaaagagttcgaaactaataaccttggaagaaattccagactaagtactctcagcttccctgatggctcagatggtaaaggatccacctgcaatgctggagacctgggttcaatccctgggttgggaagatccccaggagaagggaacggctacccactccagtgttctcgcctagagaatcccatggacagaggaacctgctgggctaaagtccatgggggtctcaaagagttggacatgacttcacttcactttggggattgccagcaaggctcttctgtgataaaatcattggattataattttagactttgccttcttgtgagtattagtataattaatttga

SEQ ID NO: 44237 - DNA, 2545 bp, Bovine  19866881257055
  misc_feature (1)..(1): n is a, c, g, or t
ntgcagtcgaaattgttttaattgacacggaccagaacccaaattcttagatttaacactcagtaatactaccaaagttttaatctcaccttatcattaggtcaaatacagtcaaatgtttttaaaaggccttgaccatgcagtcatataatcatctttttagatggtcagtgtatttgaaatgcacagagaacctcaggtaaaagcaatggcccatggagaaacttagagcattttattatactggactattaagcacattcacagttcataaagtttaatggtctgtctgtaatgatttatttttaagtcagccagaggcttctgggagaacaaaatgtgacaaaatgccatcaactactctgtcaagcttaatggcagcatttaaagcctcaccacagacttgcaaattaactactgtccccccacatgaaatcaacatctccccttaaataaattaaaatgcttctagacctaccaggaatttgtctgagctgaaaacctatattctttccaggtactaggtcagaaatgttatgaaagaagtcagactcattaacactattcatatacaggactctgcaccaaatgaacagcagatataagatggcatccctgaaaattaggactgttacttttactgatgggaagaaggatttaaaaaggaatgttagcaggaactacctctctactacagaggctgagaataaggttctaaatctgatgactgctgaccagaaaaccacccttcagttctggaatcacatgcgttagtgtttccatgtaaactgctgactaagggggaaaagccatttaaactactctatccgttaataaatcatctgaacaacacatacacattctggccaaaaatgagcagctaacgtgtcaggggactcactgtaatttctttccaagaccctcatttgatcagcatgtgactgaactgatgacacttacttttgtgtctgtatcttttcacttatccacactccagaaaagactaatgagcaataaaatgatcaaaagcacaataaaacagaagagaaataaagccctcaattaaccacccatgactgaaattcctcatatttaactgtaaagcatattatccctgttcctgatattgaatctgataaagtatctgaagcaggactaggcataggagagttacttgggaaatataactggttaataataaatggaggagagaaaatcataagcatagagaaagaataaatgaaagcctggtttttacaaagacccttattttcattgaaaagtatttcttccctctgaactcaagaaatgccaagagtgaaaaccattctaattaaaaactgtcaccttatttgaatgtctttgacatgaaacttttcatttgtatcttttgatgtcttctgtctatatcccaatttttcaccctagccctttttgtctcatctcttcatttcagttgttttattaactttctggttataagagtaatgcatgctcagttccccccccccaaaaaaaaaatcagaaaatatgaacaattacaaacagaaagcaaaagtcaatgttaatcccacaacccagaattaaccactgataacatttcagtgacttctcttcagacttttccttgttcatatattcaaatgggacaaactacacatactatttaacatgctacttaatagctttgtgttttattcttcaaaaacactttgacctagtactatgaaatgatcctatgcctcccaactgattgctgtgactgaaaacacttcagctgaagtctgtgaatgtttttatttttagtttattttagatttaccatacgaatgttagtattagttcaaaactcaaattatcagtgggagtttggttaaacccacacagtgaaggggctcacgctcttgctcagtcattaagtcgtgtccaactgtgaccccatggactgtagcccaccaggctcctctgtccatgggatttgccaggcaagaatactggagtgggtacaatttcctttcttcaggggatcatccttacccaggggtagaacccacatctcctgcatcggcaggcagattctttaccactgtgccacctagaaagcctccactgaagatatggcatcataaatagccattaaaaagactagctgtcctaatattttctcagtactcaataaaagtttgatcctttgataactttagcttagaaagaggcagagttactgtgagtgattttcacctttaaagaatttttttcttcatagactcttgacaaaacaagttccagaatagtatgtatttccagaaagaagttttagtaagaattcttaccttttcatctttctatccctcactgtatacttattacttcaaatttttaaaaagctctagtaaaaatgaatcagggataatttaattaagaaaaaaaaataggtcaagaactgtggcgaccctgacattttacactacaatctaacatggtacagtttcataaatacagacagaagacacaagactcctgggtcagggataaagaactgtta

SEQ ID NO: 44238 - DNA, 1537 bp, Bovine  19866881353918
  misc_feature (1)..(1): n is a, c, g, or t
nctcaaccttagttgttgctgttggttggtaagttgtgtctgactctttgtgaccacatggactgtagccctccaggctcctctgtccatgggatttcccaggcaagaatactggagtgggttgacatttacttctacaggggatcttcctgacccagagatcaaacctgcatcttctgcattggcaggttgattctttaccactgagccaccagggaaaccctaatcttctcttaaatgcttcctaaaacttttattcctcttattgtcctatgcccatcctataaagcattgagttaagattcctcgagtttccccaaatgtttaaaaaccacatattttagaagtcatttggggacaaacaaaatgttccagagatgaaaataatgtatgagatgccaatgaaaagtataatcatagaaagcaatgtcttccttaggcaagcatgtcaggggatagcatcttctatgaatgctaaccaagcccatcggtagaaccatgctcaacaaataactctaatgaagattccaatgtctgtctctctgtctttctttcttagttcatttgaggaatcggaggttccattctaaattgcaaagaactgttgctttagcagtatctttatttttcagtaatccttcagcttatatcagaatcacaaagattagttggaccgtcttccagaatctttatgataatgacttttaatactcccaggcatctgaattcttctgaaatggaaataccttctacattctctgtatccttttccagtgttcactgatgcttgtttctggaataaatattttaactcaactagattcagttctagaatgacaagatttaaatgaatccggaatcattaaatatcaacaacaataacaacaaaacttcagagtatgggaataatatctaactgctaaagttttcaaaatctggtgttatttattgcctgtctcctcttctctgggtgatggtttagtgtgccctatgaaaagcaaaggagaaacacagacacagttcctgcctgaacatactagccttcatatctaagttttgaagtaaatgagaattttttaaaatgtagcaacattttcctcagtaaatgttctaatttaatacctagagaggtttattacacctttcttccataactttgttttattatgacttcctcccagtccaggagaggaactcaatgtcaggcaatatctaaatataacataaaaacttcttttgtctccatttcacatgagatagggagccaagctaaaagccatgcatttgctgttattataaagaaagatgttttaataaactatgcaataaattggaaaagaccctggtgttggtaaagattgaaggaaggaggagaatggtatggcagaggagagatggttcggtggcatcaccgattcaatagacgagtttgagcaaactctgggagatggtaaaggatggggaaacctggagcactgcactccatgggatcacaaagagtcagacagacgaggacgaacaacaacagcatctaata

SEQ ID NO: 44239 - DNA, 2085 bp, Bovine  19866881399517
  misc_feature (1)..(1): n is a, c, g, or t
ncaaattactttagatctaagattatgagataattttattactttttgttacctgatttctgctataataataattcattactgtttctaacttttacatcaaaaatattttaaactatactttatttatatgggcttccccggtggctcattctttacctccccctggtaaagaatccacctgcaacatggaagacctgtgtttgatccctaggttgggaagatcccctggagtggggcatggcaactcagtccagtattcttgcctggagaattccatggacagaggagcctggtgtactacagtccatggagttgcaaagagtcagacatgactgagtgactaagcacagcacagcacatattgatatatatatatatatgttatatatatctttaataaaaacagtttatgaccaaaaaaagacaatttttgtttgaagctgaagaactgaggcttagagtaattaatttaaagataatctaatttggggtttggcatttatatttaacgtttccaaattttttttcaacaattagaaatccctatgtagtgttaaaatttaacagatatatctactgaattcataatatgtaaagccttaaaacaactgcagtttcaaaggctttgaaattagagagactctgcatcaaatcagcagagtaattcaaaggcaacacaaacccttgaacaaccccacatttgaagaattgcactaaaatctatttaaacaatgcaattatttttaagttggtcatgggaaaaggttaaaataagaaaagtaggtcagcctgattgaaataataattgatgtcttataagagaaaaatcaaaaaccattctttggggctatattttgggaggtttcagatattatttgttttttatttgagtgccttcaccccttttagttccttacaacagatgacatcctttttttttcttttttttagtggttaagagtacacttgtcaatgcaggggacacaggtttaatccctacctgaaaacattagcattttcagtttacacaacagtgagtctacaaaattttgaaataaatctacagcacaagaaactctagaaattggtaacatgcctggattacagggaagattctggaactggcttttccttaccctcccataaataagttcttctctttgatctaatatttcatactgtcttcaaagagaaattgaactatgtcttctctatgtaatacaaccaatggcagattcattttgatatttggcaaaactaatacaattatgtaaagtttaaaaataaaataaaataaaataaaaaactttaccagcacaaaaaataaataaataaataaaattctcaaaaaaaaaaaaaacaaccaagtattaagaaatggggataactttataaaaagcttgactccttagcagtatcattacatgagtttctctcctaagctcttcttaagttgaggtcagagaatgtagcctgcaagaaactgtctttaaaatttgttgaaatattatttatggctcagaacatgttcatttttggtaaatattccttgagcaaggaagaatatatacttttaaatatttataagtatattccaaatatatttgttgtctacatttgttagaagcagtctgtgttcaaaggataactatataatgacatggatgcatggggtgcatgaatgcatgtcattatatagttatccaaaaccaccaaaatatacaatatcaagaatgagtcatgatacactataagctttgggtaaaaataatacgtcagtatagcttcaattgtgtgccattctagtagagaatgttgataatgggggaagcatgcataggtcagtttttaatctaatcccaaagaagggcaatgccaaatgatgttggcattgccaagattgtcaccctgcttatttaacttatatgcagagtacatcatgcaaaatgccaggctggaggaatcacaagctggaatcaagactgctgggagaaatatcaataacctcacatatacagatgctactactctaatggcagaaagtgaaaagcctcttgttgagggggaaaaggagagcataga

SEQ ID NO: 44240 - DNA, 867 bp, Bovine  19866881563382
  misc_feature (1)..(1): n is a, c, g, or t
ntataagttttcccctcctcccttcgtggagagctgctgggtggaacgagaagggagcagggctcattagtagataacttcaaaaatcctcttaacatcctaggaataattgaaaagtgacagggattctcgactattttaaagagatactgagaaatgagatttgaatttaaagcaagtgtcattaaaaagattgaaatatttgggagcctcatggctgatttctgaggattagatttggaaaaacaaacactctttaagtgaagcatggactgaatttatgagttagagataatactttgctttgaaagataaatctcttcaaagtgatgacaaaataaaaatatgtttgcatttaattttcgtgtttatgaaagacactgtagacttacctacatagaactcaagctctcaggcctatgagttggtgattagtataatctccttccgaagccttgtcctcaaggcacctcaaacccatctgggcctctgtatgcaggggaaagagaatgacattagctttgtgtctacacaaagaccaactttgcatttagagacaggatgaaggaaccactgaatgcacaattactcaataggtttgggttccctcagtacagaaatgtgcttccttcaaggccatcagcaccattacaggggagtgtggcaggtactccacagctgcccacgctggggtgcaaagaactcatgcttggactcttcaggtccctctaattggtaaggagccaaattgaatgttttgtctatctgtttcccaacctcatacccccaaatggaaacttctcttctggattcagaaacaacacagatgttattgcttcccacattataattataagaaagcaagca

SEQ ID NO: 44241 - DNA, 711 bp, Bovine  19866880424077
  misc_feature (1)..(1): n is a, c, g, or t
ntctgagatgttatccctttaaaaatttagttttatgccttcaaagggaacactattatcaagaagactgccaaaatggattgcaaacacttacctggcttttctacttttggtacctgctgtacctcatacacacagttctgtgagatacctaggtttgggggccaaattggaatagataaaattctttgtccccgtgaagactgttcctggccagatacctaaacaaaatttcaacaggtatcttaggtaaatagattttaaattatgtactgaaaagtttatttcttaaataaaaggaaatccaagaatagtaaatattatcctttattcattatatcatttgtgcttgtaaaattttgctcaaatacagttcagaaaacattattacttacataaaaatggtaatcttttcctatgcatgtttttctcaaatttggaaatctaaatgatctatagctttggactaatactgctcctcctttttttcactacctgcattatagttcctgttatataaaatactaagaaagatcaactctcataaaattgtaaactatcatccaaaactcagtggcaagggcttactttggtcaaatgtactaaagaggaaataatctgaactaagcagaacagaacaataaaaataaaaacatggggataaattatactcagctaaagaattgaaatatgtatccttatggaaaggaa

SEQ ID NO: 44242 - DNA, 1927 bp, Bovine  19866880512087
  misc_feature (1)..(1): n is a, c, g, or t
naagaacttggcttcagcttgtattagagtgtgtgtgcgtgtgtgtgtgtgtagctgagctgtatgaagacagggtcatgaatgagttgaggctgctgctaactgggggcacaattgcaaaaagttaaagacacagtccctgcccttaggtgtttataacctaagaatgcaacacacacttgcttagtgaagcagaagtatagctacctggttttcaatcacagctcttattagcttgccatgccaaatgggggaaggcaactcttagggacttcagttcctccctttttaaaacacagcgcatctcaccgccctgttcaggtgtgtaggttgtgggggaagaaatgaaataacagaagcatatatgatctggtcattcacggcctgcgtcctggggggtggggggcagcgactgtgctgttcttcatccttgtctctgcccttcagggcctcacagagtgcttgacacactctgagtactcagtgcttgcatcttgaaaaacagtactaacagccctattatgggattattaatttaaagagttccttggccgcatcagcaataacaaaagttaatcagcccatgttagggactcgagagggtaacctccagaaggacccttcacatggaagaaatggccttcactccaaaaagtcaagcatcagaagacagggaagagctgagtttttaaaatgcatgctttattattcagccttcagcagaaatgtcacctttctaaagcaagctgttatcatgcactcaccgtgccaaacaggcgcctctgaggagcaggattttatctcaacattttgagtgatttgtgtttccctttcaaggagctccatgccttaaggcagctgaaacactaacagcgcaagaaggtaaggttacgggaggagcagactccaacaacatgaaacagggatttttgcaaaacaggtctaggatcggcatcaaagctctcgtctgcagccgccctgcccaataattcatgccctcgccgcgcagctcattgttttctggtgggctccttggtcgacaccatattctcaaagaaactccgttttgtgacagggcccccattagcaagctcagccacatgacaggcctcgaagcagccagcacaactgccggcgacgcttgccaataagccagatgctgccacatattggcatctgggtcctggaatcgcaaccatgttctcagtctggctagggattctgaccccagctacggaaggagacaaaggaaggaaagaaagagatggagcgcggggagggcgcgcaggctgtggaagagtctcttggtaatttccctaccatggatttagagcctccacaacaaaagactccttggaaagctgctaccaatgctgccatgggcgggagaggtagagatggggagcattttaaacccagcgagctgctttggcacctggggagtgggggtggctgattcaaaaggagacagctgcagcaggcagccacgttctccgggctctgggcactgagagagcccacagtggagaccagccaccggatggggctttgatctgcagctgggggactgggggcaacaccaggacggctatcgctttccattttctgggtgccaagaccgacccatgacggcaaggccaaagaaacagccagggcgagattcagaccggctgtcttcaggggatcctttcgatccagaaaggtgtgatcggggtggagggggtgccggtttgagcagacgaacggggtgcaggcaaaaagaagccctttgccttcaactgatttttgatgccacagtgacaccagcccaagtgaagcttcggatcctgccagagtcctatgaggtgaaggcatggcccaggagggctgggctgcatgaggaaaggatagggtccgaaacgagaggtgagaagaaaaaggaggcaga

SEQ ID NO: 44243 - DNA, 2111 bp, Bovine  19866880536449
  misc_feature (1)..(1): n is a, c, g, or t
nacaggcaccatgcgagttcctgtgagctgcaggcatcagcacttggaggagagcttgctcagcagtgctttgtaaaattctgttgaatgcatggattcctgccctcttcttccctgagcctagaggctgacttagagtcctgctcagtgcagcggttgagttctaagaagttttccaatcaaatagccatggcacacagattaaaaccttccttggtcccttcacaattagctaaatcataatgctctccctttaaatgttgcaatttgtatagaaaatataggtagattcctgggttactttgagctccataatgacatccaagttaattttatcttgttgttttcactgtggggcatgcagcttcacatatatttgtacacaacaaattctatttgaaatataaagcctatataataggtgctctcataagtcactatttatcgatgctgcttacacatatttaataattatgtttttctctaattactgtgtttggactatattttaagatctctctctctctctctttttggtaattcagatagacatcatgatgctcaaccatatttccagttctctttcctctctgaacatacaatcacattttcctaaccccaggtaatcaggtgaggtcacgtgcttgattttgacccaaaagctatcactgtatgtcactttcaggttgaagcacttagatgatgctcaattttctgtgtactcatcacttgccttggtcatcctgaaatcatgttttaatatcaaggtgccataaaatccaagcagcctggactgttgggtcatactccattgaacgacagccacctgagtgagaaagaaacctgattatgtaaaagcactaagcttttgctgctactggttgctatagcattacctgctgctgctgctaagtcacttcagttgcgtccgactctgtgtgaccccatagacggcagcccaccaggcccccctgtccctgggattctccagacaagaacactggagtgggttgccatttccttctccaatgcatgaaagtgaaaagtgaaagggaagtcgctcagtcgtgtctgactcttctgcatcctaaacatggtccaggagaggcctctgctggtcagaaaggaggtgggaaggaggttgggagcatccctgagtctgttgacatcttccctcctcatgcaaataccgtatcatcacaaattcctggagacacctgttaggaatgatctgttaaggacacagcccaggacacagcctgcacacagctctgtcctcttagggggtgtccacctccgtgatctcctctcaccttctgaacaagttcacgcagcaaggcagtcttacatccacctttcagcgcagagaaaatcaaagttcacagaaactggaggagttgtttaaactggaacaatggcctttagttagaactttctactggtttgctggcctctcaatcagctggtgataagctgatgttttgttttgttttgttttagactcacggaaagagacaaaagcaagagattacgtgctaggtgcaaagctggagctgaataaatactggttaatcaatgtagctctgttaatttgaagtctcatttctcagcctattgataaaatgcagacaggggctgtgtggagagcaagaagcacccaccagcagagggaaagaggatggcggggagagaaacccatccagttaacccaggggggcaactgactgggagcctaggatttagaaaaggcagaggaaccagagaccaaattgccaacatctgctgaatcatagaaaaaagcaagagaaaacagaaaaaacttctgcttcattgactacaataaagccgactgtacagatcacaataaactgtggaaaattcttaaagagatgggaatgccagaccaccttacctgcctccaatgaaacctgtatgcaggtcaagaaccaacagttagaactgaacatggaacagtgggctggttccaaattgggaaagaagtacgtcaaggccatgtattgtcaccctacttatttaacttacatgcagggtacatcatacgaaatgctgggctggatgaaatacaagccagaatcaagattgccaggaga

SEQ ID NO: 44244 - DNA, 737 bp, Bovine  19866880561519
  misc_feature (1)..(1): n is a, c, g, or t
naacctttccttgatctgccagagtggattagctttaacccagagtctcaatccagtccaaagcagtttcacccaggtcctccttcttgctctgtatgggcctccctgtacgaccacatgccagttcttcagcttcttggggaggtctccccacatgcctcgggagcatctctgatccacacgccttccccgctcagtccctttctggctttctttcctccactcagctgcctttgacccacttattcttctccaggctaaagtcctccctgagcaccccttgcccactgagctgtccccagcaggaaagacctggcagacagtgggtcttgcctccttttgcatttctcctccttgatgactcccctctggctctgcaaagggaaaactggccccagaaaactgcctctgtcctcctcccagctggcacacagctaacttgagtcatgcccttggaatacacataatcggatctcatttgttaaaataataaaacaaaacaaaacaaaaaccccagcagtgcaaaacacatgctgatacaggctttggtgaaagatgatacaaagtagactgactgttccttaatcaggagctcagtaaacacccctttcctgggagagcctcccagagggtattctgggaagcccggagagtttttaaccctcattagctccaactaaaaatggacccactggaatttttacaggcagctattaagcaggagtagaactcacagg

SEQ ID NO: 44245 - DNA, 1639 bp, Bovine  19866880612973
  misc_feature (1)..(1): n is a, c, g, or t
ncaaaaaaataatattgtttcatttgtttcattatttcataataataatgttgttatttgtgattatggtggtgagttatttctccactgcaacttgataccaaacctactggttcagttcagttcagttcagtcgctcagtcgtgtctgactcttgcgaccccatgaaacgcagcacgccaggcctccctgtccatcaccaactcccagagtccactcaaacccatgtccatcgagtcagtgatgccatccaaccatctcaccctctgtcgtccactgatctccattagcatattggacacataccgacctggggagttcctctttcagtgtcctgtctttttgccttttcatactgttcatggggttctcaaggcaagaatactgaagtggtttgctgttcccttctccagtggaccacattctgtcagacctctccaccatgacccgtccgtcttgggtggccccacagggcatggcttagtttcattgagttagacaaggctgtggtccatgtgatcagattggctagttgtaaacctactagacctctgtcttaaggaatgttaaaatttaaacgtacttttttctatttagcttaccacatttctgaaactgcaatctctatttctgcctggattagtttttgtggttaatatgccatcaagtctaaaaagttatagtcaactaattttttttagccttctattgtttatccataatgtgatcaatttaattcatacaaaccgtggtgaccatagtcacaattctaacttttaaccaaaatgtataataatgtctgtttcaggcacatggttatacatttaacatgttatgtgtttaaatgttatacatgtttaaatgtaacattagggcagtgtttctagtctgtggattctgtttagaaatataccagtcaccacacatggacattatttttgaaaaatgttttccccagttttatggaggtataattgacatatgacatcataaggatttgaatatacgcatatattgtgaaatgattactgcagtaagtttagttaacacacatcactttacagtagttatatatttttttctagtaataagaactttaaagttattcttttagcagctttcaaatatacaatatagtaacgttaactgtagtcaccatattgtatgttgtcattgttcagttgctaagtcgtgtccgactttttgtgaccccatcgactgtagccctccaggctcctctgtccgtgggacttcccaggcaagaatactggagtgggttgccattcccttctccagggaatcttcttgacccagggattgaactggagtctctgacattggcaggcgggtttttttttttttaaccactgaccccacctaggaagcccatgttgtatgttttatcccccaaatttattaatcttataagtgaaagtttgcattttttgaccaccttcaccacttgcctctggcaaccaccagtctgttctatttctttgtttggttctatttagattccacatataagtgagatcatatggtagttgtctttctctgacttaatttcacttagcatagtgccctgaagaatttattttttaggttgaatgatattctgctgtatattattcactatcta

SEQ ID NO: 44246 - DNA, 1739 bp, Bovine  19866880642339
  misc_feature (1)..(1): n is a, c, g, or t
nttattattattttttggccacaccacgtggcatgtggaattttagttccctgaccaggaattgaacttgtgctctctgcagtggaagcttgaagtcttaacccactggactgtcatggaagtccccaaaattatttaaaaggtggctaataaacaagataacctcgagaaactgttggccatctcagaaacacagggcacatggcaagagagagagagagacagagagagggaaaatgaaagaagggtcttgcatcccttatctgccttccttgcactgaccttcatcctcatgtccctggcatatttctccagctccttccttatgtcagccctcaacatttttgagacattgaggaccagctgcttccactcgatgggctggaagctatgaggctcgtgggggacatacagtccgatcttgaccttcttgactgtgtgaagatacttcttgtaggaatcttcgaagtcaaagatgaggtcactcagagtccgaaaggtcaatggcttgtccatcagctcagcccttcggctcatgcccagcgagccatagcggccattgcagtaaatccccagcacaacgtggtgaaagtaatttcctgagaagtaggttttaaagctgatggggaatcgctcgatggaaggctgtccattcgttaagtatcttaagacaatctgagtcaaggaagagaaaagaggccttgaagataccagaacttgcactcccaggaaggggaagtggaccacacggccaggggatccactcctctgcctctgagcagacccagacctcatctttccagatcaatcctcttataaaggattcactccctatctttgagatacctgctatctgctgcacatcaaaccaaattttatgggaccaagagtgaagacttcctttcttctttagtaattaaataatagaagctcaaccatcacaaggtactttttctttacctggtgctctacagggcatgacgagctattaaaagtcagcttatgccactggaatgatgttctcagtcattaattctgatttgggtatgtggggcagaccaggaatcgaaggcctctgcgacagtgcggggagaaatgatgaccagaatcaaggcaaggcagtggcgacggaaaagacacagaccaactgatggaaagggaagggacaggatggtgtcaggatgcgtcacacctgcacctcgcctgctcctctcactggccctggcacacccatgccagcagcatcgggtaccactggacagctgcctgcaacacccgacccccgggctcccctcagtccccagaccacttggtgacacagctcagccctctccacggactggctcactggggtcgagccatccagtctctgctaactcagtttgggctcagcaactccacagcacacaacttcaagtaactgccccacagactccaaacgctgcaacactggacaagaggcaccacctcctcaggtctatatccgagtctctggacggtcctggtgtggctatggtgactcacagatccagctcttctgaagagagacactaaaaatccagatacactctgttgtgtctggtgtcaccaggctttgctggtgtcaccaggctttgctgaagtaagtaacaagccaggctcttaacatggtggcttggtgcatgcatgcacgctaagtcgcttcagtcatgtctgactctttgccaccccacggaccgtagcctgcttggctcctctgt

SEQ ID NO: 44247 - DNA, 1838 bp, Bovine  19866880642412
  misc_feature (1)..(1): n is a, c, g, or t
nttgttaagaaccatcagtgtaattggccactaacctggaaggactgtgatctccagcagacagccccagcaaagaaaggagcagggatcctggggctgttcccaaccgtgctggtgactcacgggatgatacaaagcaaagcccttcttttgtgtgggggcgaaacggagaatggcacacacagctacttgcctgacagaagtgtgggttggtagcgagccattggcaggctcctggcatagcggaagcccaggggtctctgggtacacccaggttctcaatgaccgcttagcagtggctgcagggttaaccctgagctctgtctcgcttgagcaccagcctccattggagccactaagatggttgggcgggattatggcacttgcccttcgtgctgtcatcctcattggttaagaatgcaccctggttattcctaactccactttaataatgtgttatagatctgccctccaggaatttatttgaaactttctttaatctatttttatttcagcttgtacagcatgttcaggcaacaaggaggtttaccatctatgtaaaagcactaaagggcttccctggtggttcagtggtaaagaatccctttggagaaggaaatggcaacccaccccagtattcttgcctgggaaatctcatggacagaggaacctggtgagctatagtccattggggtcacaaatgagttggacatgacttagaaattaaacaacaacaacaaaaaacacaccaaaacacagaaggtgctatataaaggcttttattgtaatcataccaataatcttttattataatgttaaatgtaataaatataattggatgatgctaattcagatggtttcacaggcttatttttagtcactgtgtttgcctttgttttttgtctccacactcacacacacaaacacaccccagcaaaaagtctttattcatggagcggggcgccgtgatagatgtgagtgcatgcaaatttacataaacacgttcagtgtcctctagagactttccatctaagaccgacatataggaggtgctcagtaaatacttttgggtggttggaattaaaaaatgaaaagaaaacccgtgtggtaattcgtgagacatgttaggaatgattttgttggaggctggagggtaaacattgggctgaaggaagaagggaatatgagatggtttggccatgtgcatgtatgagctctcctcagattgccttagtgcttgttctggaggaatagctggttcccaggctgcaaaatgatgcatagcaagagagaccaaagcggcaccccctgacaggtgccatgtgggtgccagtagtgaggaggtaggtatgccgtccaggagagaaagaccagttcctgtggctatctctgtttttaatgtgaaccacgatagaatgaatggttcagtgggtaaagaatccgcctgcggtgcaggagactcaggagactcgagtttgatttttaggtcggggatgatcccgtggagaaggaaatggcaagccactgcagtattcttgcccggagaatcctacggacagaggagcctggcgggctatagtccaaagggttgcaaagagtctgagcaactaagcacgcacacatagaatgaaattttaaaagctaggtgattcggcaggtgaatggacagataaatggtagtgcttccagacaatggaatattattcagcaccaaaaataaagagagccatgaaaagacacagaggaacagtaaatgcatatcactaagtcaaacgagccaacctgcaaaggctacatactgtgtgattctaatcatatgacattctggaaaagacaaa

SEQ ID NO: 44248 - DNA, 1013 bp, Bovine  19866880645763
  misc_feature (1)..(1): n is a, c, g, or t
ngctgcccccccgcattcagggagtacggtgttagggcatcttttatcccacaaaattcccagactggggtcagaacgtcaagactaggggcccatttcctcctctgtcatcattatacctcccagagccttctctctcctctgtgagaaagaaggctagtaacaatcaccctgttttcccagagaattgggcaaggcgttgacgaaagaatacctgaatatgccctggaaaaacataatgcaactaggaaatatgttattatcaggcctcccagggatctttccagcccagggctggctctgagggggtccaggtagatgggtggctggtcactctctctgatctcaaacacttaatgaatagaacactctgacctttacatcccccagtggatccaagatccacagatggaggcaagaattccaggtcaacaaccaccaccattgctgactattcaaagaaacccaggaaatgtatgaatcgaccaattctctccccaaagccatatgtcatgaatcagaactgatgctctcctatcagtttaatcctataatcttaggatgttgggaggagacttttctggcaggttctaaactctgagaagccagctttccaaagccagaaagacttaagatcctcccaggcatttgtgttttccctacctttccaactttattaaaagcccaatagttcaggaatggaattcagagctaccactgggctggcctttgtctggaggactgcacggctcgcttctacagaggcagtttgaattccactgcagttgagtgtagttccatttcatctcccaagtttattaatgagctttcagggcttggcatctgctctttgggattttttctccccatcttagtgtaaagtcagcagtcctgatgaaagaaacggaagaatgccagtggtatgcaatgtttttatgaaaagcattgtgtgggcttacttgaagatgcaaacggttgtgaaaatgtttaaaagcttttcagaaagtaaagca

SEQ ID NO: 44249 - DNA, 1278 bp, Bovine  19866880724183
  misc_feature (1)..(1): n is a, c, g, or t
ntatccaccctatatatgatagcttgactctgctcatcccaaacgcctcatccttcccccctgcccttggcaaccacaagtccattctctgtgtctgtgagtctgtttctgttccatagacatgttcatttgtgtcgtattttagattccacatataagtgatatcacatgacatttgtcttcctctgaattatttcacttagtgtgcagaatcataaattcttacattgaaaggaagcttaacagaagacttctgagctacctgcttgccctgtgccccagaagatgctccatttgctaagatggggtcaagataaagaacagaggggtgggcaaccttttgggggcgtcctgactgaccacgtgcaacgtccccggagctgaaaggtgagtggcagaggggtgggaggcaggggtggtggagagaaccttggacctacactgctgtccttcccttgccttcctcttgaagcctatacatcataaagaaccctgatacatcagaaatgtctagagcccggtgaaaaacgccatctgtcaggtcgacttactgactgatttttaaaagaaataaaaaaatcaatgggaggctaggtcatatttagcgattactatatactgagcacacgctacacgccagacacaatggtaagcactttaaaaagtatccagtatcttgttttcatgccttgtactaaccccgtgaggcaggtattattatttcagctttatcgatgaggaaaccaaagctcagaaaggttgaatcttaggcacttgactcaaacacgggtctaattcccttcaaaacttctattaagttccactaccccccaaatcttagagagttttaaaatgtgctcattttcctttagacttgcctctcttgttgaagggcctccccccacccccccaccctcccaagtcttgttgaatgcctggaacattctagtgtggaccttaccgtactcctaaagtctcagaagtctcccatgtgacaaattccagatccctgtgccctcgtgatactatcctgtctgccaaatttgcaattattccataatttgctttaaccacaaatataagcccggctattgactgagtaaactgagtagggcttttcggacttttgttcagtttcccaaaatatgatgaactgaaatcatctgatgatgaacttgtacttgaaactggagtggctgagggtggagtgagtcactccggtgagttgtatacctaccagtcaatccttcagattctgtgctattgccagatcatgtg

SEQ ID NO: 44250 - DNA, 1825 bp, Bovine  19866880731501
  misc_feature (1)..(1): n is a, c, g, or t
ntctctgctccaattcactttctacacggcggccagaatgatctattgaagccaaaatgcagcacatctcattcttttacttaggttttcagtgtctctcacttctccaggacttagtccaaatccctcccaaagtctaccatgattcagcccctgctcaccatcctctgtactgtctcatctcccccacacgctgacccacagctgatccgtgataacttggttttttgtggctgcacagcttgcaggatcttagttccccaaccaggaattgaaccagcgcccttggcagcgaaagcacagagtcctaacccccggaccgccagggaattcccgacccgtgacatttttgcaggatataccctgagaccataaagaatccacagatctatgcccactgccctcagcacatgtattcccccagaatatgaggtcaaatataactgaaaatcttaaatgacctttagactacatctgactcattggaaaagactcagatgcttggaaagattaaaggcaaaaggagaagtggggagcggaggatgagatgattatagtatcaccgactcaacggacatgaatttgagcaaactctgggagacagtggaggacagaggagcctggtgggctacagtccatggcgtcgcagagtcagacaggacttagtgactgaacaacaacaaacacatttcaaagctgagaccaaagtgacctacgaaactttcaaaaagaaaccactacacccactgtgcacgacctcatgtccctatttcagtataacttttttggcttcctgcaggtcagccttatagcacaagggatttaaacctggcagagatcttttgggtctcccaagaatcatgagtggtaaggatgctatggactttcttgctttcacacaggccacaccctgactggaagagcctcactgcctgggttgtgataccttccctgaccttcctcagtgtggggtgaagtccccgcatcccctgcaagagctcccagcgcacttggcgcttattcgcccagcactgtgcgtgtgtgtttgtatcttacgagggcaggagctatactttgcatcctgggcctcccacaggccgagcacacagaagtgtctagttaatgcttgctcaaggatgaaccttacgttgtgaggatacatcttacgcttaaaaggactgaactcgacagagaaagataaacactggatatcactcactcacatgtggaatccaaaaaccacaacatacctgtatacataacaaaaaagaagccagactcacaggtacagagaagaaactagtagataccagtagggggaagggacaacatagggatgggaagtggggaggaacaagctgtcgggtttaagaccggctcaagaatgtactgtacggcactgggaatggagccaatattctgtaataactgtaaatggaaagtagcctttaaaattatattaaaatttttcaaattaaagtaatttttttaaaaaaaggactgcacagggtatagggctaatccaggtacccttaaaagggaagaagtcttgtcgtctgacctcaatttaatcacagatggctcctctctataaaaatggttacctgctttctcttcactttatcacgtgaggttaactggcagtaagggagtgaaatcacatccttctgggtcctcttacataaatccttccctgctttctggggcgagttctctggggctggaacaagggcactcctcagctaagtcagtgtaacaaacactacttcctatcccagccagactgctaggtagggctgtggagtcaaggatgaagtacacagct

SEQ ID NO: 44251 - DNA, 1266 bp, Bovine  19866880750319
  misc_feature (1)..(1): n is a, c, g, or t
ntgtttctgagtagcatctagattcccttagcagaggctgaagccaggaagaattctcactttcatttacagtggggcgtttcctgattcctttacttttttttctttcttcttttatgtcctttggccacctgatgcgaagagccgaatccctggaaaaaaaccctgatgctgggaaagactaggggcagggagagaaggaggtgatagcggatgagatggttggatggcatcatcgactcaatgcacatgagtttgagcaaactccgggcgatggtgcaggacagggaagccaggtgcactgcagtccacggggtcgcaaagagtcggacacgaccttcaagactgaacaacagcaaagccatagtgtagagactcagagctctccctcaccatatgttacaggtttctcacgggctctctctccatgctttacagagaaagcagtcaccgcttcagacattacccctcccgttccagactacctgctgacctttgtgttgtttattttctcctccaaattggtgcgtgaagcttattttaattcagtttcacctggatacaaatatcaatgggactaaagccctatttctggacttgaggatgtgggtctttccctccattccagatctagaacatgagggccagtagagacgcagcaggggacactttgctctgactgagctttccctagcaactctcgggtttgctccggccacctgatcaagtctggagttccagggtttcaccttgccacctatttcagcgtgagcttgataaatccgcatgaattctgagagatgaccatgtgtctcaggtattcagttactactagggtaagaggggggaataatgttcttcttctctcagggttgttaggagaatctcaagctaagatattggaaagtgcctgacacagtgcttcttaagagtttggcttttgtcagctttgctttgagctgctgaaagcactctttctcctgaaaagtgcccgaggatacaagttagagtgacacattctcttagtatcatgaggaacacgattaatgggaaatgacttcagtttactgcatcttctagtaatgctgtgatgccatcgcaaaacaaaaagcacatgactactcgtaagcccgtggtacctgaaaaagaaattggatttgactcagaaaatcaggccgtacagctaatcgctctgatccaataatgctgccctgcagaatggcatcatcagccctggggcacggggataggggaggaggacgagca

SEQ ID NO: 44252 - DNA, 1698 bp, Bovine  19866880769294
  misc_feature (1)..(1): n is a, c, g, or t
nctcatcaattgctttaggggaagtggtgttaagacctgccaggatctcccaaaggggctctttcttggccaggactctgggatgggttccccatagaatctgtactaggagactcaaagtgaaatggtaaatgggacaagagagccccagcaggacctcccaatgtctatttaccagttcctgtctctctctcccatcagtgttcctctggctggcccccagcctctctcattccagagagcacaggactttcttgggaccttctcatgttgctgtggccagcaagtcaatactgtgccagctctgagtagtaaagggctgtataatgaccatgggctagtgccaaaatttataaagaaaaaaaaaagaatttatttacaagggaaaatagtaagtgcattgtgccacatttttcttcatccttattatctatgtctatataataaatatgataagtctagggacagattttccaaaatcttttctcaactggggccatggaatattttgggtcttagttgtggcatacaggcttaagagcatgtggaatcttagttccctaaccagggatctaacccgtgtctcccacattgcaaggcagattcttaaccactggacaaacagggaagtccttgcatgaatatttagtactcataattataatacacacacataaagatttgcagtgttggtcactcagtcgtgtccgactctttgagaccccatggattgtagcctgcaagcctcttctgcccatgggattctccaggcaagaatattggagtgggttgccatttccctcaccaggggatcttcccgacctaggagttgaaccatggtctcccgcattgcaggcagattctttactttctgagccaccatggagctaggtgttaaaacaccacgcctatctgctaaatgatatttcagacccattatgggaaactttttaaagctgttttttattggggtaaggatccttttgttctctgagtattcattatctgagtccacagttgcatctggaaggaaaagccattttaacaaggaaattcttagtaataatgtgaccacttataaaatcagtcttcactcaaaccatcctccgtgtttaacactggagttttaaccttgcccattgggtcaatatctttaacatttttggctctcagttcatctcagctaatttcagggtattggaaacatctgacaaccctaatgcaaacaaaatatagactgcaaagtgaagttgcaaatcttgcaggggatcaagatttttaccaagttgttgatggcgacatggagcaaagcctttgataatggagaattggtagagctggattaattgaaaatggaagaagagacaactgaaagggatgatgacggtataggtatttgaaaagagaattctttgtgccataagaacacagacgccgtaactgagtgtttaaacaggatctgctttatattcttacctcatggtaaatgtgaagtgaaaaatgtcggagtccccaggaaatttagaaatttttagtcttgccatctgacttttgagatgaagaccctgagaggttgttcaaagtcatgcccgtggtgatggagcaggactggattgctgaccttgccggttcttccaggcactccagccagtcagtccgcctccttctcaccccccacctcccactcacaagcagtac

SEQ ID NO: 44253 - DNA, 1178 bp, Bovine  19866880811104
  misc_feature (1)..(1): n is a, c, g, or t
ntctgggagacagtgaaggacagggaagcctgatatgctgcaggccatggggtcacaaagagtgggacatggctgagcaattgaacgacaacagcatatatcagaacctactggccaggcactattttgaactaagacaccattttgcaccaaaactcctttggcacaacttgaccaaaataaaaagttcagggaccatgacttcctacgttcacatccatgccagttcctgactccgtaacaccaatggagaacccaaagacataagcctttatgcaaccagagtcctgtgactaagagccgactgccactaatccatatctacagctacttaaatacattcctttatgaaaaatacagtgaaatgttcttacaaaaccagtcatatgggccctgtgaccatgactacaagtggcgtctcctctgatatttttagaccccagcatcatcacaaacagcatcaccactctctctactatcactatttacaactcctcttaaaatgcgtcagccagctcagagcagtgctgtgcctcctatcacatgcccagctgagctctgcctgaggctctgctgaaggggccaccgcaaatggtttcccaggggagcagcagttcccacacagcattccaaggacatccatactttaaaaaatgggggagaaacattttcaggaattgctcacaaccactttctaagagggggagagaacacacacgcaacaaagatagtaagcatcagagtgctcagaaacacagaaaaggacatttctctatcagtgataatgcctattatatgacattcaaacaccagaagtgccattcagctgcttgtaagtcacaaaaggtgagtgaaaacacttatgtcctttgtcgaaagggaaaaggaggtggagaatccttcacacaaagatccactttgacttaaaatacagggtaagcagtactagagatctctgtgcacaaagcccacctattaagattctgaacaaacaaggagcctcaataccacaaggctctgttgttaatatgtggttggttatgtcaaggacagtaaacaaagctgcttttcaagtgtcagtttgagctctcccagttgataaccatggggactcctgggtcacaaccccaaataggcggccgttgttgtggggaaaacagcagacgggccccagagca

SEQ ID NO: 44254 - DNA, 3208 bp, Bovine  19866880864764
  misc_feature (1)..(1): n is a, c, g, or t
naaataaataaaagcaatcagttcgctttatcaaaggacctctctaactctttactatgttgatgaatattatgaatctccaagataagattctcacatacagtgactctcagatttatctggtcatacttatgggaaataataggaacatctaccatttattaaccacatacatcaattatagtgttgtcatttatagatgtagaaattgatgcttaaagaggtcaaataagaagtttatatgacagcagactcccatgtcttaactttataagatcctagctttatatttgttccaggacattgctttgcaaattccacttgcaccagtcagtgtgtttagtcgtgtcgactcttttgcaaacccatggactgtagccctccaggctcctctgtccatgggatttcccaggcaaaaatactggaggggttgccattccctcttccagggtccacttgcataaactatgcaattaatgcacatcactccacctgtttcacatagcaccagccatgcaggcctacagatcatctctccatggaacaggaagaacaggaacctacagaggatacagagaactctcttacagcccttgggaggcttctgtttccatgacaatagagagagcatcagtatttcaacgccacaaacaaaacccttcttgaaaatctcagcaaaggggccatgatgagacaccatgtcagggaacctaatacataactttccagtgataattatgaaaaatacagtagactactgtttaatttcttatgaaagaagcttgacttattttgagtcttatatatctgttaacctggatttattcccctggagaagggaatggcaacccacccaaaattcttgcctggagaattccatggacagaggagcttggcagggtataatccatggggtcataaagagtgagatatggatgagttttataaacattaagatatttatatcctggttttataaacattaggatattccacaagaatatccacaacattaggatattccacaagaatatctgggggagttgtacatctattaaaaaattgattagaatacccaccttacatttttatgtcaaatttaagtacataatataatttaaacttaggttgttttttgggtttttgacccttttttaatggttttccaagtagaagaaatccaaagatattttagtgacttgtgtaacttaaaataacagcttcaggcacaggtggatccaggggctcaaagaaaaccaccattaaacctgaatgcatggtacctgtatttttagggaaaataaatagaatacagtgctataaacctgtcttggtcccttgttctcactgacatagagagatgctgtaaataattacatagatgtgaagagtttgggggatggactcccacctccatcactgacccttcagctactcttgttgagacttgacttttccatctgtaaaaatagacacactactctcttttcacttcggtggaagcttaggtaagtagtaaagctttagacagcttatttaccttagaggattaagtgctgtggtatttatatatacacacatatatttgctattaatgtttagggagatagcatttacactggcaaagggttttccaagtatttatttgttttacaaatttatcatttaaagctccataattagcctggcaaaaccttcaacattgcaaccacagtttaaagccaatcaaggcacagagggagagcgagatatatatatatctccgtacccgtacccgtatttaaattcccattgtgcgtgtgcacgtgtgtatgtttgcaagacacatataaatggcaaataaggaaactttgaaaaaaaaaaaaagacagagagatagatagtcccagattttaaaaccacccccaaggtagaacaggtggtgaaaatataataaaacatgttgcaaggaacttgtcatgaattttaaaaacaaaaacgcctacagaccaaataaactgctctgacactcagctaaatctgaagttcccaaactattttaaatgacaaagcagaagttccccagaggagtccaacaggaatggtttgagggcgatctctgtggaactcaaacggaacagagctggaaacggagggcagacacccagcgcgctgcccctgcctcaggggcagaccatgtgcccaggggccaaggagtgtgttgatacaaaggcctctgggagcctcctgcgcccacctccctacctggttggtggctctcagtggatctgaaggcaaacatttgggtcacttgactggaagctgggcacactcccatctgcttgccggtgccctgtttgaaggcaggctggaggctctggcttgggagcagagttggggagttggtggtgacagcagacactccccctctctgcacaccccccccccattcattcatcacaaccacctgcctgtccttttgcctctgtccacagtttatgaagagctttctcctccgctgtctccttccattatgcagaaactcccggagccacacagaggtgatagcagcagctcattccgcagtgaggaagaggtcgcgtgatccacccaaaatcacagagcgggacccacagtgtcgggtgtgacgcctggtccaatgctctgtctactagaacgtgctcacgaagaccatgcagggataagattcaggggaggggtcagcgttctggtccctcaaccctaggcccacagactcacttcatcaccccagatcacgcactaaccagaaagcccgtcatccctgggcaccaggaaactgttgtgatttgagagcagtgcgtcttctttctcaaagtgaagccatctcttgatgtaaaatgtcctgatttgtagctaccggtttggttgaaaacaacaccattgccatctgaacctaacaaatccatttgcagagggcttcgggctgcagagcacaagtttgagatccctgcctgatcacagtacccaaagcccctgctccctcactgaaggccaggatgtaatccattaaaagagggccagtctggagacacagagggagtcgccaaacctgactctccatcttggccctgactcttgctagtggcacgaccttaagcaagtgactgaagcaagtctctctgaacctcagttttctcctctgttgaatggggctaataacacctccctggtttcttcagcccttata

SEQ ID NO: 44255 - DNA, 918 bp, Bovine  19866880964332
  misc_feature (1)..(1): n is a, c, g, or t
naattaataaacaaagaaaagaatgctgtggtttatacagctaatcacaaatgaaaggaaatgttgctacagatcttttgtctgctctctgatgtcttgtcactataacctctacatcatctatcacatcatactgcttcatgctttgcttgattttcctttctaacaagaacaataataccaaagggcaagagggtacagttatgtgtactcagtttcttggcttctgaccataaaaatctagtcacatagtcatatttcctctcactcttccaaccttattttattagcaaagaatcatgattacatgaaactagatcagaaaagtaagatcataaaaacacctagggaaaagtcagagagtaaaataaagtaataaacaaaagctctatacaaattgttccctcttcaaatcctacctaattctaaatgagaaatgtttcaaaataagcaaacaaataagaactagccggttaggaagagaaactttttagcctaagcaagagaagcaaaggaaacaacactacttcttctggtgtatggagggcaattttaaaatatacgtcagatgcaaaaatgcttatatctttaatccagaaatttagcaatatataccagaaacaatcagaaatgtagggaaaaaaagactgacacgtaagaatattcatcacaaaaactagtgcaattgaaataacaaattcctaacaattggagaatatggtatatcctatgaggaggccttacaaatagctgtgaaaagaagagaagcaaaaagcaaaggacaataggaaagatacaagcatctgaatgtagagttccaagaatagcaagaagagataagaaagccttcctcaggtatcaatgcaaagaaatcgaagaaaacaacagaagggaaagactagagatctcctcaagaaa

SEQ ID NO: 44256 - DNA, 2072 bp, Bovine  19866880989239
  misc_feature (1)..(1): n is a, c, g, or t
nttcacatatggggtcaacattttcgtctcctaggatcttcgtgttttctttattatggttacatatatattcccaatgccgttgtattgtgcctgttaaaatatattagacaaaatacaaagaattaataaaaaacagatcatatattttcctgcacgtaagtattttcctgcacgtaagtattttttgccttttaaaaattcttataagtgatgaacagaatgttttcccctagaaaatggtactgtagcacctcatgactagaagtggtcatcaaactgtttacaaagaccgtggaatgatacactgcctgatccaagaggcacaaaacatgtttaagagggttcaggaagtcattctggaggctctgagcgtgtgtcaacaaagctaagactacacaggtcatggcttctcacttccccatgattatggcatggatttgccagacatgctcagcaacttcatagccaggacaatatacttgtatggcacagctggtctttcaacaagataatttcatattgtattttatcacctactagtatgacaagatcatcaaatgcttaactgtgttcctgagacaattcatctgagaaatctggtttagacgtgaatgaagggtatataatgacagtaaatggaagcagtatttacggaagactgctaatgaaataaacaaaagaaatatttttaatgcacgccaaagcaaaaattaaatgtaacatagctatacaatgctagtaaatgctaatcctgattgacaaacctagcatgcaacaatcaggaatgtgtgacagtttatattctgcaaagacaccgtgtacactgaaaaagtattgagaacaggaggaaatagcaagagattctgaaattataagcagtctttgatttagacatgattacttaaaaaaatacatacacacacacgtatgtatctatagatacataaacacagtaccatatatatgtataaacactcatacacaacacacatactccttcgatcttcctctccccatcaataaagaggatactcttactgtcatgaaagtcataaagacaaatgtggaactttttagagaatctataagcttaaaagaagggaaaacaagaaataggatgaacttgggaaacaaaaagatttgaagatggactttcaagcacaattagatgatatgagaaaatctcagccctagaatatctcccttttcctgtaaggctttcatttcactgattcagaatccctaaacttctccaattaaaaattaaataaaaaataaattgaggaagagtattctaaacatgggggggaaagactacaaggaaatataccactatttttaagagtaattatctctgatatgaaggactgtgaaagatttttccaaatcttctgtaattatatatttacagagtatcaacacattctagaggggtgggggaactagctgcaggcagtcaaaaggtacaaactttcagttataaaataaataagtaacagggatgtgatgtacaacatggtaaatttaattaacactgtagcatgttctatacgaaggttgttaagagagtaaattctaaaaggtcacattacatacaaaatatttatttcccctttcttttgtgtctctttgggattatgaagttcacaaaacttattgtggtaatccttccgtggtgtagtaaggtaaatcattatgctgttcaccttaaacttagactgtgctggtaatgtcagttatatctcaaaaaaggtgaaagaaaaaaagtatcagtacactctagaaatgtcaatgaagtaaaaattttaagtgactttaatcagatttcatccctcaaaatctaaaagctgatatctgctgcactgaaggaataggaattctgatcagaggacagaagaggaaggcaatttttatgaatagcgaggtctgagtggaacagaggagttggaattatgataccaaaggtactaggagcctgaggagaaaggtaaaaactgatgaaggaaagaaaaccaaagtaacaaaagtattcaactatcacataatttagctcagtgcttgtcctatgt

SEQ ID NO: 44257 - DNA, 1054 bp, Bovine  19866880995937
  misc_feature (1)..(1): n is a, c, g, or t
nctatgaatgtgagggcaaagggcattagggaatttgtaacttcccctcaattttgctatgaacctgaaagtgcagtaaaatgctttaattttttaaattagtttttcattttcgttttatatttctcttattatctatcatgtttatgttcatttctaaaatagttgtgtgttttttttttttaacctctaagtctttcctgagttgtcacctcatttctgagttttctacttaatgatttctgtcattctttcatgtcatataattttcttaatgtctttccattcattttgaaattgtaaattttcatctgtttcgtgagaatgtctttccggaatgctctcattgtctctaaggactttattctagcctgaattctcttttttcttataataactttgtatgggacttgattattttctgttgtgtatttttatgtgaaattagttttcctaaactatgagaatgaagcaggttaaactttcaaaggctctaacttcacagagctccttctgttgtttttgttaaggtttttttattttctttttaaagtatgtcatcttgctttctgcaatttcctcgctactcttcctttcctttaaactggacctttcttttgtccctactctgctcagttttgattccattcccagcgatttctcctcattgtagggtcctggactagaaggcggctccggcaggtcaattttgaaagttccaggaacctgcccctttaatctcttgtcttgcaagctctctgcacttaccggtgtttaagcaggcgaaacaccttctccttcagctgctgttctcaacttggtccagtgagtaccagctggctagctagcaatctcctgttctctggtcccgtcagaagctagacttttgcttccttttgtttcccacacgaatttgcttatcacacgagtcttgtggttcttggtattttgtccccagctgcttgcattctggggtaccaggtaccttgttacctagttttattgtgaatgtcacccgtgaatttttgacctcgctaatctaattgcactggta

SEQ ID NO: 44258 - DNA, 1452 bp, Bovine  19866881015327
  misc_feature (1)..(1): n is a, c, g, or t
ntaagtattcagtaaatacttccctttgattgaaaattttaataattcatgcaaaaattaattttgatgataacattcaaaagactagaaggatttagtatgaatgaacttgtaaattcaggaaaaatattccagcatataaattataaatatttcctttgagaaataccagttttggataataagagggattcatgtgagtaaaggtcatggttttggggactgatcaaatttggagacattgatttgatagatttataaaagaaaaaattatttcaggtttcattaggtttttagaattttagaaacctatttttaaaacaaaagcaccagaaaattcatatttgtatttttttgttttaattcaagccattttttcttctaaggtactttgtttgcaagaagttcaagaagatcattatggaacccgaggatcaggccaagtttggaatcattgggtacaaatgtaacttttattttagccagatttacttagtgagttattaaagcatagcttgctaacaaaggtgtgtggtatatttagactaaaaatcttaattttgaaaaacagcttaatactcattttaagaggtcaagaaaagattgaagtatttcaaatgggtacttttgtgttgatacatattttaatataaatggaaaagtgtgcaaaaatctcttcatagctgcctttctaggagtctctttgcctactaccagactcctaggattctgagttccatgagattggggaccattgtatctagttcatcattttataacacctatgtccacggtgcctaattgaatgaatacctttagaaacaggtcatctctttgagaaatgctgcctacgttgcattcattcattcagcacgtatttttttgagtgtttgctgtacaccatgcactgttgaaggcaatggggatacagcagtgagcaaaacaggtaacaggtctctgtgcttgcggagcatacattctagtggagaaaggccaagaatagactgaacaaacaagtaaatagtacctcaggtaatgagagttttctggagaaaaacacaggaagggggaaatgggtcagctttcagttttaaacaaaatgaccagagagagcaacttttgagtaaagacctaaaggaggtgaaggaacaagtggtggctggagcattccaggtagtggagatggctaagaaggttgtagtgccttgaggcaagagaaactgctgtgtgtggagtggatcaagcaggaaagagttagaagcaaaaaggtaaagagatcgggttgggagagaggggacaggttactataaggtcgctgtttttgccttgactctgacttttgttaggatggaaatgagagtgtgataacacgtgtatgtaacactgcagtctgccggtaaaaaaaaatctatttgacccagaagtagacttttttattccaacactttttaa

SEQ ID NO: 44259 - DNA, 1505 bp, Bovine  19866881046103
  misc_feature (1)..(1): n is a, c, g, or t
ntcccgatcaatgctacacactaagaggtctggagtttgatggagttgctggatcggtaactacatttgtcactttcctcgtttcctcgccccaaagccagattacctggagaaaagcctgcttggggaaggccatgggtagaggctgggaagctgcttttctccagacacacctctaggaaccaggctgtcctggaccccagtctgttgcagtgacggaagctgggatctggagagggagggaggagcttggtgctcggtgcatctcgtggtccccacctcccacagccttcatgttactctcatctcctgcatctctcttccctctcttcttgcatgggggcccctgtcatccctcatcccgccctgcaatccggaagtcaggattaaggaggaaccgtggaagagacgctgccatccttgtaacgtctctgtgcctgtgtgctaagtcgcttcaatcatgtccgactctttgagactccatggatggtagcccgccaggttcctctgtccataggattctcctggcaagaatactggagtgggttgacgtgccctcctccaggagatcttcctgacctaaggatcgaacccgtgtctctctctcaagtctcctgcgcgggcaggcaggttctttaccaccagcactacgtgggaagcccttgtaatgccccctccactgtgaaactctagccaagacacttgccccccagatcctctcctggcctccaatccctgggagcagagaaaagcagcagcgggagcttccaccaccaagaatcaccatggtcttactggacttgctcacatcagagtgtccacaggaatccacaagccgcctgggctccctggctggtcaagcaaccaaggccacctgatcctggtgtgggccagaaccaccactccccaaattctggccctagggaagagtttatgaagacccctgggagtcagggcccggcccaggagaaggggtgccaggaggggtcatgagtctcaggggatccggggcctggttgcagcccctcttcatcattttggaaaagtctacatttacactgaaccaagagccatcacctctgtgctcctgggcctgcctggctggagctatgaccagttcagggaatgaaggggggtgatggacttgaaccgcacttccccgcaggtcttccttcctgatctctcggtgactactgccctctccccagtcttcctccccattcccaggccgactcccaagcctcgggagggcagtcaggggagggcagggggccctgacactggagggtggctgtgcactcacatccgtggcaatctaacagctgtccgctgcaggcaccggcatgctcacttgccttggctgcgtgacagagtggctggagatgagggcaggggcatggcctgggcgatgactgaggtcgggacttctctctctggcccccaggagaaggacccatcgggttcctcccagggtgacttcagtggggcccaaccacagggccatg

SEQ ID NO: 44260 - DNA, 4012 bp, Bovine  19866881057401
  misc_feature (1)..(1): n is a, c, g, or t
ncttattcagcttgattgattgacttggaaacgtggctggtgtatctctgaaaaccaggctctgcactaggagctgaagatgcaacactgagcagaaaagtccctgcccaccagatgctcacattccagcaaaggatggcaccatggaaaaatgaaccgacacaaaagagaggggctgctaagacagaaaaccacaaaagggatgatatttgagaactgcaggctggaggaggtgtctctgagatggggctgcttgagctgaagcctaaattaaaaaaaaaaaaaaaaaagaatcaccaaatgaggaaagatgggagaagcccagacagagacagcaggaactaatgtacagaggccccgagtcaagaaacacctggcatgtcccataaaacaagaaaggactgtcagggctgccacatactcagcaaagggcaggaaggaatagatgaggttgaaaagacaggcacaagctacatcagttaaggctttctagtcataataagatgcctgcttgtttgtcttttaaccatatatccactataatggggcttcccgggtggcgctagtggtaaagaatcagcctgccagtgcaggaggcggaggagacttgggttcgattcctgggtcaggaagatcccctggagtaggaagcgacaacacactccagtattcgtgcctggaaaattccacggaccgaggagcctgctaggctatagtccacgggacctcaaagagtcagacacaactgagcatccattataacaatcggagtgtttggtgcatcatgaaatcaatgtattgatctaaattaacttcttctgtatttggcaagttgctctgttggaacttcagacacacaggctctttactgattaattcttaaatctgtattaaatgtagttctgttaaattctcaagtatctctgttcaggaaacctattgaaatgggtccaatgagaatctgctgtatcgcacagagaactcaactcagtgctcaatgggaaggaagtccaaaaaagaggggatatatagaaacatgcagctgactccctttgctatatggcagaaatacaacattataaaacaattatactccagtaataaagaaaagaaactggcctatttaactccttcctgcttcagcatgggtttggccgagaatgaaatgacaatgagtctgaaaatccttcatgcttttccacagcttgaagtgagtcgcaaggtgaaattaattgaggttggcaagactagaagttggacatagcctcttagttccaggggcatgaagccttcccagtttggcttcctaatttggtttgaaataaattacatcgccatattcaaaggtaagtgcatacgtatattccaaagccaaataaaaaatgtcttttggactatctgccaccttctattaccaatgatatagctcccttcgtttaatgcctgtgatcaagaattaacattccacctccagtacaaatgaatgggaaaggcaacagacaggaaagcctttcgaaatagcctgaaacagaagcaatttgtctatatctacttcgttgggtaaaaggactttcacctattaagagaacaaggtaatctagtttgaggtcttgaaagagagaccaaatggaaggttctctttcttcataattgttcacatttaatggcattacaagggcacgttagctcttccaactgaaagcaatttagtgaatacgtatgcatttcggtggcactgatacgttaatgcagggcatgaaacagaaacctttagagaaccgaatgctaaagagggcaccaaggggctttgttcaccaactcacctggagctgggctccagagaagaataacctggaatacgttctcccctcctgcaacctataggctgtgggagcagggggtacagggagatggagatgggaagaagaccagctgagatctctgtggtctgaagccgccacagaaggcggccgacctcaccacccagaatttaacccgtcttcaacctcaacctgtgacttcacagtcctgaaaaagtgtcaaatgcacagcaagccttcctgatgaaccccatccagatcggtcgctccacttgagttccatctacgtgtgcacatgttgctgtgttgcttcaaagaacacaatttaccaatacattgttccagatcatttcatatgagtatttttgtgttcatctgagaaatcaggtgcctggaacttttccctctcatttgggaattcaggtataaagtcaattttctataattgtttgtggcgttattcccagaagggggaactgttggatgacatttccatcagagatgaaaagtgaccagccattttgtttaaacattgtttggtcactggaattccaattcagttggtataatctgtattgattcctcccatatgttccttcatcagttcccagtatctccacttccttctcctgcccctttatcagtaggctctagacacacagacatctgcccggaggcaatcaattctgctgccaatatggaattttacacacagacaaaagtaaaagcaaaagtctaaaagagatgggttaaaaagaaaatagaaaaagatagattctgactcatttccttaaggctcttgggcctgctttctattacatttgtggactaatttctcccagtctgtagacaggacatgtggttatttattttcacggcagactgggcatcttttcatatgaaaccaatgacctgcctgcagagaaaaccacagccctttcaacagtcctctcttatattcttacctcttccccaaaatctcaggagaaaagatgctaagactttgaaccagaaaaacagtattgctgatgataaagatacatgagggtgatgctaggccttacctggagcagactccaagccttagaagatcatgaaaagctggctgtgattttagcgtctattcatttcaccacaggaaaaaacaggaaacgtgtgcaaccagaagaagaatagataatatcggctcgtctcctcgttttccttcccacccttctggtgccaccgtgaactccatctcctcagtaagggctcctgtggcaaccccagggctgggaagccttcactcttgaggacacctggagctgtctgtctggagcatgctcctggtgtgccaggtcttaccaccagactgtgtagttcgagggagagagtcagactctcattcagagagtcagactctcatttttactcccagagttgccaaaatagcatcagtaaattttttttttttcaataaatactgatccacctaagaactttcaaagaaccagatctttgtttctcattttgtgagatgtctcaaagaactaaatagaaatgattacataagaattaatggatactgtctctaggccagtaaacagttagaatttgggtcaagtggaggttgagagctagggagtgaaatagcaaagagaatgaagaaatccatcctggttttcccccttccaacttctggacattgtcctacactaaggctgacccccaaatccctatcaaagcaaaagctttctttctcctctaagagaatagatggtccttaggtacgacttcagtgtaggcagtggagggtgaggatggtggtggaagaagggggtagagattgaatcctgggagctgtcagagtagatggcagctaggagattcttacagtccaacttccacagttaacagatgggaaaaatgagattcagagaggaatatatgactgactctaagttatagagctgaacctgggcaaaatagggattagtatacctattttctgatcctttggtcctatattttgaactaagtcaatcaactatatccctttaattaaaatggcattaatactggaagtgaacatctagaattcatcgattaaaagctggagactcactgagtttttaaagctacctacaacctatttatgagagagaacgatacagagtgacctatcaataacctctgatatgcagatgacacca

SEQ ID NO: 44261 - DNA, 1209 bp, Bovine  19866881163560
  misc_feature (1)..(1): n is a, c, g, or t
ncctgtgtttcttttagtggaaaatatattaaggggccacaatctgaatgtataaaagatttaaatccagaatcccaaatgtctacttctattattaatatatgtatttgttaatggaatataattaactatctttgatagctcaaggcatgaagctaggaggagggaagccagctaagtttgaggccattggctccttcactcttcaatggaaggaggagtgaaagaggaggaagacatctcttcattttcttcctcctcttcctcccatcctccctgctctgtcttcctcttactgcagctctccaagcatcatgagaagccaaacgtttcgtttttctaaatggaaaatcaccgttggtctgtcagatctagctgggggttgaaatggagttggatgtggagaattgattaaaggaccaccaaaagaaagactacatttttcctttttagaaacaaaacattcttccctatatttctctctctccattttttgggagattatggatagtattctcttgtgattgataccaaagagggaatgcaaaagtctagtttcacgtatgagatagcagagacttgtggagctgatgagctatagccctgggtgttctccagaccccagggaacaggagatggaagccatagtagtagttctccatttagacctggagctggagctggggtttccagtggatccagaataacctggggctctaacagccctctgctctttgagtgtgtctgcatcggagcagctgtacaacccgctggcatgtcgtcacccctcgggtcaggagcggtgtttgaaactggatggaaatagttacctctttgcgcttcctggaatcgcttttgttgttattctttcaggggaagaccgtaacagcatttctgaatgttgggtggttgtttcctttgctgttacctgatatttcttagttgatacatttttttttcccagcctgcttttccaccaaacttattgttcagggggagacacaattgaaatcaattgctaattaaatttgtgtctaaattaataaatcacaactattcaggtcatttctgtctgaataattcctattatggtgaacataattggtagattcagcatttaatgaaccatattggtagggaaaatttttatgacaattgggactaatagaatatattaaccctttattcttctcagcttgatactacatt

SEQ ID NO: 44262 - DNA, 1814 bp, Bovine  19866881173773
  misc_feature (1)..(1): n is a, c, g, or t
ngaagttaggattattcttttattgtaagtggtactgaaatatcccttctgtattcattgatcttttttgcactttttattatggtgaacagatgaagttttccacatcacaagtgttcaaatatttaaaagacattttcttctgtaaatcatctcttttctaggcttaaccaatctcagttctaataattattggttatgggatagagtttcttaattcttcaccattattagcaattctggttgaccttaaatttgccagtctctcttaacatacatagtatatatttaaaaagtagcattaaagaactgtagtcttatgatgagagaaaatgacttatgttccctctctccccaagtttatctattgttttttagtctttttcttctaaattgctcttgagccttctggggcaaatataaggctgtgattgattgttggttcagttatgcatttgttacaaagttgcattatagctgtacagttctgaattgaattgttgctctggaaactgtatcagctcattaatttttcttttttaaaatcttgtttccagtgttatcatgatttatttacttgggacttttttcttgctttttctttttgatttctttcattttttattttattttttactttatattacagacaaacagaaacttcctcgtttcatctttccattctctgatttatgataaatttagttcctttggcccggcatttgcttcagcaggcagtcttccttcaagtacctccctgattgatgtgtaatctttgatatcttccattagcctccaggatcactaagttcaaggcccccttggaacctaaggagccctgccgaggagctgaaggccttcagagtccttggggtgattgacaaggtaattcttcagtgtctcttcaagagttcagtaataaatcgactgcatgctgacattatgtctttgaagctttggatcttaaggatatgaaacaaaaggagaaaatgactcaaatgcatctgcactttaaaataacaaaagcagaaaagaaaaagcttttatctaagcaattcgtgtaaggtcatgcaaaatatgttatgttaaaggagaaggtgcttatttgttggcattcagtctagtaaagagtttgattttataaacctgttatagcagtaaagatactgtgtgttagttacaaaaactagtgagtcagtagttgttcagcattaactggtatagtcagtctagtggttaaaaagaatggtgctctcctaataaatactgtttcttgagtacctactatgtatcaggactgtgtattaggcattttatgtaatataaacaacataatacaatgttttatgtacgtttacagtataaacagcataatcctttttcagccctgttatttgcatcttggtggaaaagtgatgtttagaacagtttaaataacttgccctcagagtcacatagaactatttgaggtagtactggaattcaaaccaggatcattgtaacaccaagagctgtgtttttttccctgtacactaaatccccttttacacactcatatttttatatttgaaatccaagtactgcgatagcatcagatatctcagatatgccagacaacagtgctggggcgtcagaaagcttttgagtaattgtaaaatcatacccactaagccagttttaaatatttttggtcaaccaccactattttaatacctttaaaagtgaaagaaaatgccttaatattagatataaattaatttaatctttttaatgtcagtcaatcctttatgaagcaccttagtgtttatttataa

SEQ ID NO: 44263 - DNA, 1709 bp, Bovine  19866881248275
  misc_feature (1)..(1): n is a, c, g, or t
nctttgagaagcctgagcatcacagcaaagaggagcccccactcgccacagctagagaaagccagcaacgcagcaacgaagactcagagcagccgaagacaaatagatgaatgtttttttaaataaataaaatctaaactgaattttgaagacagtatgagaagaaagactgtaaaatatctcattagcagttttatattaattatgtattacagtattttgtatatattaaattaaatattagaattctgatagcagtcctcactaatgggtctgagactgcaatttgacaggagttggataatttgagggaacaagtcagaatctgatcaaacgataagacttatcctccctgttgacaaagaagaagaatcctaagagactctaagtaattaaaaatttcctgcagggccctcatacgtcatggtcctatagctgttggttcccaattcttgataaaacccgaatttcccatccaatgcctgttaaaccacagatctgttccttttcattcctctacttcctcccatcttactgatgctctggtcaatctccttctatacctgctgactggttttactgtctgaccactttgtcctctcgtggacaaagaatgcaaggggataatgaacaattgaaaaccattgttgtgttagggtagtgagactattaagactttttttctaaggcaattatattatcttagcagtaattacatctcctaatggaaaagggtaggcatgtattactctgttcttacttcccctggtggctcagattgtaaagaatctacctgcaatgtgggagacccgggttcaatcccaaagaagggaatggctacccactccaggattcttgcctggagaattccatggacagaggagcctggtgggttacagtccatggggttaccaagagtcagacatgactgagcgactaacacactcagaattataaccactctaagaaaagatttccaagaacaatgtaagaattctgttttccccaaagttactcaaggtaagtcttgagtcatctagaatattgatttttttttaactttttctttacttaaaaaaaaaaaaaatagcctgtttcttcagtggaaacatgaatatttggtttagaaatgaccagtgtctcaaaaagctttgatttcttgccacctactcttctccaaaatgccaaattaatggcatctgatcctaaccaagtaaggcatccacagctaaaaatgtctttataatgggggtagggagagtgggggggaaagcaagggtgatttttttcccaatatgtttgtcattattataggttatatatacagaaggaaagttaattaagctttaaaaaaaaatccatcacacatcaatggctgcattttaatgagtacaaaaagttgaggtgtttactaccaattaaagtggtttttaaataagcattaattaacacagaaattcagaagaaagttataccttgtcaaagaaaggccagtgcaggctatgcccacttgtgctcccattcatattcagatagtaattaccaccaaccctatattttccataataatgaggagatgctgtcatgtctatcaaacaacaacacacacaaaagtgggagaattagaaattctcaacctgaagtaaacttttcaaattttttccttctgggtttttccctcatctgtgtcaaagttattcaaagaggag

SEQ ID NO: 44264 - DNA, 1744 bp, Bovine  19866881310769
  misc_feature (1)..(1): n is a, c, g, or t
naaaaatagcctcttcgaaggtttcgggagactgcaactctttgaggtataactaaaataactggaaaagagactcaatgccaaagagaaagagccttatgattcactccagagaagagcaggttgagggtggagtagtttgtttagttctgtggaagattctcaggcaggggagacttgccagcgctcctctgcctctggtggggagagaacaagaggaaatgagtttgaaggacagcatgtggaaccgaaaataaacatgaactgctgaccatcagcggaattaggtcctggaacactgagggtgggtagagactcttcattaaaaacaaaagaaatctatcaggtatactttgtctaaacaggaatcagaaaggatctagaacaatcttgccaaggtccttcaatgctatcagcagttcttattgagtaaagggattatgggcaaattgattacaataaattattttaattattaattaaatatataatagtttgttattgattatcagtgagtattgccattgttattttctaatattctatgataattgtttcatttttgtaatgagataagaatttttattaaaattttattaaaattctgatcttctgtgacttaaatatttatagctcaatttttaataaaaactggaattgcttggtgtgtgaaattgcacacacaggaaatataaaacttcagttacttttatgtaggtaagtgtctgaaacttgcctggaacttcctatttactaaatactatatactaaataacatagtagatactttttaaagttcttttgtattatacagtttcctgaaacttccactttgcctgaaaaagtgaaaggttttttttccttccagttttcttgaagtataattgaaatacagcactgtataagtttaaggtgtaagaagtaaatgtttgaaacttagtggagagttgtccatttccatgcataagaaaatgcatcaggattttaaaaatacacttctcagctgttttgctactgtggggatatttcatgtgtcactgatgcagaaatcactttgtagcacgagtttatcagtattctgaataattcatccttccaatcttgtgtaggagatatttctgctcaacgaattggaagtttttctaatgtaccacttttgatgaatttggttgttcaagatggaattttaacaaatgttcactatgtgagctagaatgttactgcaggagaggcacatcgcctaccagccaagacacaggcataaagaaacgaccagacagtcctggtctgaatcactaacgggagagcccgtcactcgtttcccagatgcgtgcagttcgataccaagccacccatcatctgacacgtgttagagcacgatggaagagggccatcacttccacttggaatgattaagaacgtctccacagaggatgcatttgagccacatttcatttatttatttatttatgactgtgctgggtctttgctgtgcctgggttttctctagttgcgatatgcaagttgctcattgcagtgacttcgcctgttgcagagcaccagctctaggcttgcgggcttagctgccccacagcatgtgggatcttcttggaccagggatcgaacccatatcccttacattggcgggtggactcaaccattgggtcaccaggaaagtccctgagccacactttaaatgtaagtaggatttggtgacaaagtacattccaggcagaagcaatgg

SEQ ID NO: 44265 - DNA, 1100 bp, Bovine  19866881360864
  misc_feature (1)..(1): n is a, c, g, or t
naactcaagagctcttctgcacaacgaagattagcacgatgtgagcatttccatgccaaggtgctaacgcaaataatacacgcgaggtttgccaacttttcaaattgaatgtatttgattatttgcttttaattagtgtgagttttggagtatgtacaggattgtcagggatacacgcaaagcctcctacagcccatgaagcctcccctcggtaaagacgggccgggattgttctttttgagctgtggagaatgagatttaacagctctgttaaatgttttagcccatttccattgtgcctctgtttcaacctattggcaagaccaattgaagtgagaaaataaacctcttatctgatctgaatgctgagcgcagcccctaagaagaattttccagctcaacttcggctttccacgaacatccctgttttgtgctgtgctttctttttcttcctagaattggctattaagctgactttttctcttctccctttcttgtatgaacatttcaggaaacatctatacacatggggggaaagaaagtgggcatggagaggggagacggagagaagaaatgtgtttgtataactttagaagtgtttcgagggctctttctatctgctggagacgtgagaggatcctgggtttggtgtctctccagacagcaggcgaggctcgaggccctgggaggctgcagagaggctggtctcaccaggccaggagggagggagttggatttgagcctctgagccctgtgctgccatctgcaccttgggggacagtgctctcctggctggtgtaccacctacggcatcttttattccggcgttattttacccaagatctcagctgcccccgacaaccctgacccacttcccatgggagttttgcaggcaatggtcctttacaaaaagccaaacaaatccttctttagtcaccaacttcaagaagcagaataaggtgcagaagtcagggaagcagctctttcccatctctttatatttgctaaagaggagaagaatgtgatatgaggcttgtttcatccgcagtgctttttttttctccccagccgcctcaggccaggcactcagttagcctctg

SEQ ID NO: 44266 - DNA, 1193 bp, Bovine  19866881651664
  misc_feature (1)..(1): n is a, c, g, or t
naacacggtccagttgcctgagcgagagccttcagtagccccagcagtaagggtgcccctgctgttgggcaagggcagcaccagttcagcctccagtagacaaatgaagagactggttttcaacaaggaaagcaggctttgtggtgcagtcaggccaggaagaaggagtgggaggaagggtagggagtctcactgtggcagatgtcttggctgggagagaaagttctagagactgcgatgagggttggggaacagggggcttgggctcaattcagaacagcccagcttccttccagacgggaaaccagagtagcatccagagggatcccgggagatcccggcgtgccaggccggcagccgagccacggtggggcccgggtggggagaccgcaggctggcccggtcttggaagcgcggtcggttcacctgagagggctggaaaaccctcacccctggggaggaaaaagaagatgggatttctcctggggtcggaacaggaccctgccggctggagacaatggctccaggagcctccacaactccacccctgttgcggagggaactcaacaccctggagatcggcgtgtgaaatctgcgctggggaagagagtcctcatttagcagagaaagcgctgcgctatctatgtgtgaaagcttttttaacactgttccctgctctccatatggcgaacttcacccaaattaggaagaactgatgaacaaaactccagcaacttgaaaatgagagtgagcgagttccagatgcccatcccagaggcagccacagccggtgccccgggcggggctgcagggcagagggtccctgcacccctgccacctagccccatccccaagtgtacccgagtccccggggctgtgtgtgccctctctgtggatgaatcatcgtcacccgtaactaaaatcatcaccacaatatgtgtgtgtgtgtgtgtgtgttagtctcggtggtgtctgactcttggcaatcccatggactgccaggcttctctgtccatggggattctccaggcaagaatactggagtgaattgctatgccctcctccggggaatcttccgaatccaggaatcgaacccaggtctcctgcattgcagacggattctttaccagctgagccaccagggaagctcagaaatgcccatatggtagtcactcagtcgtttccaactgttt

SEQ ID NO: 44267 - DNA, 911 bp, Bovine  19866881657673
  misc_feature (1)..(1): n is a, c, g, or t
ntggaccatgagacttactggactctgcatgtagcagataggggaggggaggccatgattctagctagggaggccagcagtaggatttggaatacccaaagaaaagtgatgaatgaagattcattcaggacagacatcagaatcaaaaacatctgcttgccaaacaggtggtatttttatgcatcttggaaggttcatccagaatgaatgaggacacagccaggggctggggcacaggagacagggtccaacctccatggctaaacagggagctgggcactgcaagcaaagaagaccaaggcagaaggccaacaagaaggcatcttgtcaggaggggcataacatgcaaggttttgagcacaaaactaattccaaataccatgtactggcaagaatggggcacctattctgtattcagactcgcttctctttgaccatggatttgctgatggcagatgcttggtagggctaaagcagctgggtaggaggagttgtaagggacccactgtgaggagacttctatcatcaagtagcagatagtctcggagaaggcgatggcaccccactctagtactcttgcctggaaaatcccatggacggaggagcctggtgggctgcagtccatggggtcactaagagttggatacgactgagtgacttcactttcacttttcgctttcatgcattggagaaggaaatggcaacccactccagtgttcttgcctggagaatcccagggacgggggagcctggtgggcttccatctgtggggtcacacagagtcagacacgactgaagtgacttagcagcagtagcagcagcagcagatagtctcacagacttagattgtttattagagattattttgttcagtgcattttggactttggggtgagacccacttgtcacaa

SEQ ID NO: 44268 - DNA, 1579 bp, Bovine  19866881669116
  misc_feature (1)..(1): n is a, c, g, or t
nttacctgctttataagacctactttgtagatcgtttctttaagtgggtgtgaatctctttagctcaaaaaagtttatcaatatattttgggggtcttttatttcctctctagctcctgtagggagagaaaaagtttcaaagcaccctaaggagaatttaggatagagctcagggaggacttccttgcagaaggaggttgtagcgtgtttcctttaaaataatagcaataattttaaaaggggggtgggatggggaaggtggtcctgttctgggaggcctgagggagagttgaatgacttctcaaggtttgatccagctctaagattctttgatgtgattgcctgtcccttctagctgtctgtttttgatccaaggctttgcctgctggagccctgagctctgagtgagaaactcccagctcgataccaccctcggcagcccagggccttgcaccagctggctgacctgcgtgtgctccctaggaactccagaccagactaatgggctgctctgatttgctctgactgttgggttccagggaaggcccatggcatgtgcagctgatgagacccttccagggacctgctgcctccatgagttaactcattagaggggcttcccgggcattctctcacactgagcagagtctgcctttcacctcctcctgtttcatatttcactggttatgcatggttgaccggataactcacttctgcaaccaatcagctcgtcagagtccagcctaattactgagtcctcaggtgtgacttaggttaagtaggagtcacattaatccctcgttgaataccaagttaacggcaagtggagtcctctagatgtatttggggaatctagatatatactaaatgatttggggaataggatgattttaatttaatatctgtatatccactgcaagaaacaattggatcaagaacttctttgcagggtttgtatgttttaatgccatcgagtcctgcataggctgagacccatgtgaatccccatatacataaacatgaaaatgcttataagattcttggatttcttcttttttcccagtgtttatagcagctttgttcttaattgattcttgtctttcttctgaaccacattcctgttttgtgacttttcaccttttgtgaacagttagctcttacttgatgagatatttttataacagtacgtgtgctttccgaaaccattttacaaatagcttttctttgtgtgtgtgtgtattacatagaatatatatattataattatataaattacatatattctatgtagagaacttatcaacttattattgatatattatatattattgatatattattatgttattgatattgatattattgatattactattgatattgatatataatatataattattgatatataatatcaatattgatatataatatcaatattgatacataatacataattattatatacaataattacatttatttaaatatattatatatattctgaatatagaatatattatgtagatgatatatattataatatatgtatatatatcatctacataataattaatat

SEQ ID NO: 44269 - DNA, 834 bp, Bovine  19866881714093
  misc_feature (1)..(1): n is a, c, g, or t
nattcaatgcagtgtattaattatcttcagttctcttcatgataaatatacctgactgaatcgctctcctaattaccgggtaatagagtcataagtggattcccttaggtaacccagggaaggcatcgagttgtgggcaagaggaggccctccacttttccaggtacttccccaagcttagctccagtacttcacccaccttgcaccattcctctgagtacagcaaaacccacttgttagactcaccagaactcccagcctcgggcacctcaggccctaatccatccttccctcttcttcaccaggcagaccaactgttctagaagctccgagagtgctcagacacatgagttagagatatatttcaatctattgaacgactcttctgaatactgagtgttacctgtcaaggaagggccctctggggcaattaattcattcatcatcttatcatctcaagtcactcagtcgtgtccgactctttgcgaccccgtggactgcagcccaccaggcttctccatccatgggattctccaggcaagaatactggagtgggttaccatttccttctccaggggatcttcctgacccagggatcgaacccaggtctcccgcattggaggcacctccatattaattcagtatttaattgcattcagttaaaaatagacaagaattgaaacttgtaccactgggttggccaaaaatgtttgctagggttttgctgtaaactgttaaggaaaactccaaatgaacttttggcccaccaaatataacaaccaggaaaatacatatcgaaagatctggggcagtcgcagtagactgatgcttgag

SEQ ID NO: 44270 - DNA, 959 bp, Bovine  19866881864870
  misc_feature (1)..(1): n is a, c, g, or t
nttatttaaataaacatcattcatggcaaatgggttcctttcataccatagaaacccagaacagagttcaggaaaagaaagagtgaagaaatagtccccaaagtgggaatagattttatagcatgacagtataaatatagcactatctagtgcccatctgaggagagttttagatattaagagatgtctagacagattctcctatttttttaaacttatttatttttaattgaaggatgattgccttacagtattgtgttggtttctgccatacatcagtctcctgttttttgttactagagattttaggataatctggagtattatagaaaaactggagttaactagttactcttctccagagggcttccttatagttactcattttgtttctgtttgtatatacacacctacaaacacagatttatgtaaaagattttatgtgctttatcactggagctattagcttatcataatatagaataaaatttttgttacactattttaaatatagaggaaaaataaaatgtcaaaaaagtatttttttcttttaccagtatttttttcttagtggtctcgtcttttatcataaaaaggcagctacaaaatagtccttagaatattaagcacataaaaacacaaaagactggatttgaaagtttaatatgcaattaagacaagtgagtaaaatttgtttaatgtgtcgtttttctgctaacatgatcacttaagtttcccactccagtgttagcaacttgatatggtatcctgtcagtgtgttcttcacctttattttccagcctattatgagcctttataaacgcttgagatttacattgatatttctcattgaacacttttcacacttgagaatttataggtgaatgtgtgtgtaaattgaagaagtcccgaagtgctttttaccgcagcccaatctccacgctcccagatgtcaaatg

SEQ ID NO: 44271 - DNA, 981 bp, Bovine  19866881885566
  misc_feature (1)..(1): n is a, c, g, or t
ntgctgcaaggggtaggtcacaagataatttagtactctgtgtccccatgtgctcactgatttgtgattttaaccactgaaacgtcagcttcttatcactgcttccacccctctgagaagaggagcaaagcctacttgtatttttatcagcagcactgccattcagttttgaaagaaacagtaaatcacaaatttttgctccttacaaatgcaattccccttcattataagcaatgggcaggagtacacaaacttaactttgagttctgcaactctaggcttcaaatcatctgaactagaataccagcattacttttcaattaaggccattactgatctgagttttatcctattgacaaattaataggtccaaggaatgaagagacttctcacattgttcaatatatgcctcaacactataacactttggtaactcataaagcctgcagttcttttatataaataattaaaacaaagcccttcttcagacgacagcttttttcaaatgttagtgaaggacaacctagaccatgacagcaaaaatccattaatggtagactgccacctgctggtgaactttgggaactgcgatttctgggaaaaggcttaaaaattagaacttggaaactgatctgaattaaattcagtacacaaaactgtattcagctgcgtacagagcccaaagtatgtacctgctgatgaacgtcatatggctttgttccacatgtattagaattctcagggggtcaacatgctatggatgttaaacatgtctgtattttgaagaaaaataatctgctagaaagccaaagtacaacccttcagatagttttcaacaagaaagtgagaagaaaaataggaaataaagagtcagttataaacattaaactactttacaaacatctgcttttgatgtgagatttatactacacttaaggacttaacaggttttacttaaaaaagaaaaacaactcccagatt

SEQ ID NO: 44272 - DNA, 1288 bp, Bovine  19866881931480
  misc_feature (1)..(1): n is a, c, g, or t
naatgtgcatcctcggagtgaactgcctgtaaactggactttagggattatgatatgtcagtgtaggttcatctttgtaacaaatataccattctggtacatctaagttgagagtgtaggtgagggtgggtaaggggcacatgggaacaactgtactttctgctcagttttactgtaaatctataactgctctacaaaataaagtctctttttaaaaaattcaggtgaggtgatgacactcttctgtatgtagagttcagtccatcctggggacacagagacttggactggcgtctgagccccaccacgatcagctctgcaactttgggaaagtccttaacccctctgacctcagtttctctaactccacaggattgtgttgtcttcctcagagcatttggaagattaaaaaaccatatgtaaaatgtctaacagtacttagattatacaactaaatatatacaaacccctccccaattcctcatttaatgactctgattattaaacatcctgatggctactaatttcaaagtcaggccagtggaggaaagtcatctggggtgaaagtgaccttctcccaggaagtgcacctgtgtatgggactggacatgtgtgtgctcacatgctcggtcacagatgctgaccacagagtgccaggcatggacttgagccccgagaggcagcctcaagcccctcactcagctttctcctgtgaaaaggtcaggatgatggaagtctgtcatatttagctgatggctcgcagagaaggctcgatgagttagtcacctatgatacgacatcatattgccactcaatatagtaacagctgttggttgctttggggggcagggggcggagtcagctcttctctaccaaccatgcctcaaggataaattggatggcaccagaaggggagacatgtcgaggagaaatcctcctctaaacagggtgttccacagctccctaaggattttcggcacccacctcaaaatgtgagtcttgacttttctttgtctttggggccaagcaggggaaatgccatagcagaaaggtgcttggtcaggaaacctctagctagggggacatacccagcatggccaaggtcagcctcaccctggagaggagtggaaaagtgagttccatgcaccagccctgtgatacctctacgtcacccaaaggagtggtccaagggtaggtgatcagaaggcctagagtgagggtgctgaggaatccctaggttggattgggcattttacccctcataggttacataactacagggggtcaa

SEQ ID NO: 44273 - DNA, 2973 bp, Bovine  19866880183684
  misc_feature (1)..(1): n is a, c, g, or t
nttgtctctgctttttaatatgctatctgggttggtcataactttctttccagaagtaagcgtcttttaatttcattgctgcaatcaccatctgcagtgattttggagcccccaaaaataaagtctgacactgtttccactgtttccccatttatctgccataaagtgatgggactggatgccatgatcttcgttttctgaatgttgagctttaaaccaactttttcactttcctcttttactttcatcaagaggctctttagttcttcttcactttctgccatgaggatggtgtcaatctgcatatctgaggttattgatatttctcccggcaatcttgattccagcttgtgcttcttccagcccagcgtttctcatgatgtactctgcatagaagttaaataagcagggtgacaatatacagccttgacgtactccttttcctatttggaaccagtctgttgttccatgtccagttctaactgttgcttcctgacctgcgtacaggtttctcaagaggcaggtcaggtggtctggtattcccatctcttgaagaattttccacagtttattgtgatacacagagtcaaaggctttggcatagtcaataaggcagaaatagatgtttttctggaactctcttgcttcttccatgatccatcggatgttggcaatttgatctctggttcctctgccttttctaaaacctctgccttttctaacatactctcctctgtaagaataagaagacttgtgtttatatttataagtttattttttagaaggtatacaccatcagtgcaatggacatgagtttgagcaaaccccaggagagagtgaaggatgggaagcctggcatgctacagtccattgggttgcaaagaatcggacatgacttagcaactgaacaacagtacaacaaaagataacgtataaagcagaggagtgactcagaaatattcatcagagtgatctcatttggcagtaagatgttgagagaagcaaaaggccaagccagtgagaaagcatggaaagcagtaaaagtcgtgaatgaaccacatgcattgtatgcatagcagggtattcttaacaattcgatttccacacattctaagcactaacagaaagtatctagttgaagaaaggccaacccaacccaatactttgagccagagtgttctggtttttcacagttgtgacatttttttgaaataccagcacaaaatttatgtatttgcatatgtatacaagatcctcattaggtttcttgtcatgttatcatcagaagtctgtaaggaacaaagcagtcttttaatcacttttctgtaccatatagttggaatgccctcactttggggccttccatgaacctctctaagcctattcagtccttgacctgaaagtgaagctatagtggtcagcctgcatgccattctccctctttcttttacaaagctgtcatctgcccctttgacctccttttccccataccctataagtctggtgtttctttgtttgaagcagaatgaagaaggtttgatttgaatttggggaataataacaaaagaggaaaacaatcagctgccctgagtgtgttttcactgtgtgtaactgttttcacccagagtgtgttgccctccttgggcagagtcatgactatatagaactagcgctcatcacagcaaacttgacaaagcgtgtgtcactgaggccccgcagaaaagtgcttccataggactccacccttcctttcacagaagttaacagaatggagaggtttttgtaccaagaagaactgtgccatgttgcaggtgcctcagaagcgtcggaggggtccctaggggaagttgtcatggagcatgggagactgagatagcatttcagagaatcctgaagtgaagcttcattggaatctcagtgtctgtgcaggggaaggagattgctgggggcagagtaaagcctagaggcgggaaccagagctcattccggaacctaagagcaggttatggaggggctcatgatacagaggaggcccggaggaaacaggggaagacgccagaatgaactgcagagagagccattctttgagattcacctatcatcttaaggagttgtttgctttttgcttaaggcagtggggagtcatcagatttagtgtttttttaatctgtgggatggggataatgaccttggcattactgagatcttaagggtaatagtatagcaaattgtcatgccttaataaacatttcatcttttttttctgtcagataaattactggaatatattattcacagagcactatacttattatcttgtaatagcctacaatgaaaaaaatctgaaaaagaatatagatatgtatgtatatccctttactgtacacctgaaactcatacagcattgtaaatcaactatagttcatttttaaaaagagagaaatagtgccttttaaaaggaatatattctaaatctaatctaactagaaagcatattagggtatgatcataatttttaaaaatatattgtatgaatgttcaggctgtcctaattcattataggggctgtattaattctctggactttcccaagccgtagttttccacatgtaaaatttcttttccagactgataaattgaatttagtaatccatagatcaaaatgctacagcccataaagaagctttagagatggaagaaacaaaattagatttaatagaaacatttatttctaacagactccagagatagaatagtagtgagtctccagtgagcttccagattaacaatggtagagaacaattaaaggaaagaattgtactaatgtgacttcttttagaactacctaacagtaagattgagagaaggcagtggcaacccactccagtactcttgcctggaaaatcccatggacagaggagcctggtaggctgcaatccatggggtcgctaagagtcggacacgactgagcga

SEQ ID NO: 44274 - DNA, 1690 bp, Bovine  19866880367541
  misc_feature (1)..(1): n is a, c, g, or t
ncgtgtccgactctgtgtgaccccatggacggcagcccaccaggctcccccgtccctgggattctccaggcaagaacactggagtgggttgccatttccttctccaatgaatgaaagtgagaagtgaaagtgaagtcgctcagtcgtgtccaactcttagcgaccccatggaccgcagcccaccaggctcctccatccatgggattttccaagcaagagtactggagtggggtgccattgcctccagtttttaaaaaaaaaaaattaagaggtggaaaaaaagttctggataatccacgaaacagaaaagtacctccaggtaaacaggtctgtttaggaaaatctggtacagtgaagggcagctctctcttttgaaggccacctgtagacagtgttctagaattatacgtattttagggtttcacatttttctaaagtgagaatgatgctaacaggttaactttttttaaaagatgaggaaaatatacttttgacttcggaatgttgttgttaccaacaatttgtacttttcggtttccaggtgctatttcttcatatatttcagaaattccaaaatatcaggtgacagctgtcttagcgctaaggcattcctcaagtgtcctacttaagtgtcgttctgtactatttctctctcggcagagctgtatcatcactcagaagccttgtttatgcatatcgctgcattgctgtcttcacttctacatccccattacttttccaaatggatactagttctcccaaaactagaggaaaaaggagagaattccagcaacatctcaaactgaatcaatgttttctccttgactagaaagttcctttgtgaacaggaaaaatacatgagttagaagaatgtctcccctctcagcccttcttctcttgacaatgttgttttaatctagtcttgtttttcctttctaatgacacatcttacaaagacatgttatatcagcaaaaagttgattcctttttcagctcaaatcttggcttagtaacttttgtctttaatagccagttatacaagtataagcacaccatttttagctcacttccacagatatttactgagtgcctgcaatataccatgcaaaactcagactgtagtaggagagacactcatcacaattataattttgatgggctgtgcattgtaatatagggcttaacataatgctgtctgagtctactcaaactgcaggtcagggaagctgcacggggcggaggtggggtggaaatatttgaaccgaacgccctgggggaggaggagtgggtttctgccaggggcagggttaagaaggagagcattctccacagaggacacagtgtgagcgcaggcaggctggcaggagagcacgcgatgggctcagcagagtcgagctgctcccaagtccggagaacaggggtgtggtgtccagccttgtcttaggtaaagtggaatctttatttgggtccaaaatgttaagagccttgatgcgttgatgccagacgttataaccacacagacagtggggaaccaccagaggcattttagcagaaaattacggtcagagaggtatagtgggaaaccttcaggatttggatccggaagagctctgtgtgggactctgggatgtttctcctgaaaagaagctcagtgctcatctaattttagcctcatgttttattcatgaaa

SEQ ID NO: 44275 - DNA, 1618 bp, Bovine  19866880393794
  misc_feature (1)..(1): n is a, c, g, or t
nctctcttgttttaaatattctgattctttctcaatgggggtgggggtgaggtggatgtgtgcattctcagtcatgtccaactctttgagtcccaggggcctctagcccaccgggctcttctgttctccccagcaagaatactggaatgggttgccatttccttctccagggtatcttcccaatccaaggatcgaacctgcatctcctgcattggcaggtggattctttaccactgagtcacctaggaagctggggtgggttgggtggcagcaaaattcttcataggtgaaggtatttgtgaaggatctttgccttcctgtagtgaaaatggacctcactattggttgtacgccctcctctggcccttccctcatctactacggtactttcaagttcgactgactgaagtgaatgtgataggggaacagcagtttttcaaagatggatgactttcccatgatctatccacattctctgagatgactaatgaagccagcctgctgctgctgctgctaagtcacttcagtcgtgtccgactctgtgcgaccccatagacagcaggccactgggctcctctgtccctgggattctccaggcaagaacactggagtgggttgccatttccttctccaaagcatgcatgcatgctaaggcacgtcagtcgaagccagcctaggcctggctaactgctgacatgatcacagtgaaaagatactctcaaaataaaacaaggaaaacttttttaatctttctttttgattttgagtatattctattcaacaacatgcctgacaacattcactgtttggcatttcggtggaagtggtaaagaaatgactcagaataaaaggcttcattcagcagcaatgcctcagccagctcttatttgcctgagacccgttaccataaatgaagaggaggaggttgacttgatcatctgtgatcagagtcttgctgaggtttgtttagcagtgatctgacgtcactagcgagtggcctttttcaaaggccatggttttgagccacactatttgagaactcctttttaaatgagtttctctctctctctctaaagtctacagccagctcctaattttaattttgttggcacagggtaaaatggtcaatggttctgacatactcaccatttcgagtgacctggtctacccgttcttcttactattgaaacaattgacttcagtttcattgatttaactagctcttcaagtgtcatgtagatacaactttttaaactagtaaagaagagtcattgtgtggccaataaaaacattggttaatctaaaaattatgtatatttaatcttgggatgtgtgtattacttacatttgaacacgggtgtgtctgatgtcctaagaattcatttcaaacaaaatattgacactctaggtttaaaaaatcttccagacttttcatttaaacccttactggttctccctttttctcatgtccaatctctgacttgggacaaagtagatcagatttttgggttagaggtttttcttttcttttctctttttttttgctttttacattaccataataattttgaaatctctgaaagaataaagaaattacatagcaaacacaactccttta

SEQ ID NO: 44276 - DNA, 1547 bp, Bovine  19866880412316
  misc_feature (1)..(1): n is a, c, g, or t
ncatgctgctgctgtgctgcttcagtcgtgtccaactctgtgagaccccattgatagcagccgaccaggctccctcgtccctgggattctccaggtaagacactggagtgggttgccattgccttctccgaattatctgtgttagtatctagaatttaactatgaaatagtaaattcaccctttcaagtactttatataacattcagtagccctgttaaaatttaaaataagattttgcaatttacaaaaactagtgtcaaaaataattagttgtttgacaaataaaataacacacaagctggcagcttaaaaatgagcatatgcacaggagatttaacacattaatcattcagaaaaagcaaaacaactacattcttatagtaaattaattttgcgataatcaacaaacatggaggagacattcattccttgcatttaaaagggatcatcctctaacaaacagtggggttttttaaattaccccttgaagctgatttgcttgaaggatctctgacactgagatagccaggcaaagagcctgactcagatctgcatcgtcatccttaattcccaacaaagtactgccaaacagatggtgattatcctgtgtgaagaggaacttttaaaactttatgaagaaaaaaaataaaatcaagcttccctcctaaaactattctcaacagaccagataaaaggtaaaataattatataacatctttgagtcatatgatttaacttattatatcaaatttctaggctaaaagctataaaaaggctacaaacaaaacccatgtttgagttcacacaaaatgatagcctaattaaaaaaataacacattctacacagctattttctatactatcacatacaaatagcaaatttttaaatgattactcacacttaatgctttaatattgaataaaaattaaaatatggcataaattatgtaatatgctgctaataaaacctgctctaattagcaattgctagtgcagtttatttactatgtctgaagaataaaaattattctcttaaaaggctgggaagaaaaggataaaagttctttttcatctagtatcataaccactaccttgccatctaacttagtcaacactgttgggaactgaggtaatctacataaggcaattattaaaataactgaaattagtcctgagaaacaaatttcttttataattagttttgagggaaatgttcttaaaaagtttccatcacctgcctcctggacacactatactgaacataatttaatctcatcttaatatttcagggacatgataacttccaactaacaatcatgatggtagaatgccttaaaaataaaaaaaaaacaataatgttctcatgagcacttgaggtcacaaatagtttataaatggtaattccatgctgcctccattactagctttagaaatctagagttttaggtttctagaagttcacagcacttggacttctaatctgatgtcatttctcttgaaagcacttgtctgatctgagaaaggttcaaggtctccagggagctta

SEQ ID NO: 44277 - DNA, 846 bp, Bovine  19866880564624
  misc_feature (1)..(1): n is a, c, g, or t
nacatatttcatgggtgcacatccattaaccattgtaaagatgtagaactctccaagacatggatttagcaaaaccattttaccccactgggcattcattttcatacagtctaatgctttttagatgccagaaaagctgaggttcagcttattctaatataaagaaagtatactttcctggcatcatcttgcatactggtattctgaagactggaatagagaatgtttgagtcattgccatagctgatggtttttttccaatttcttctctagcatgtggtcattaatgtgctgtgataaaacatatggctctatagttcagcgtgctttcttgttattaaagacaccatggtgtttgagcatacctcaaattttacagtacgttatggtcccacccctacattccttcctggtttgctcttactatccatgtatattacattccagaaataacactaaattttccttttttccaccaaacatgcctcagtgcctttgtacccaccactctcctcctgaaaagccctttccctcctttgtgactgggcatttatgtcttattcttcaaaatttatttaaaatttatcacattatgtggaaactttcctgactctcatgggctaatttaatgaattgcttctttgggattgccctctctatatccttacagtagttttctagcttttctaactcagtagtacatcattggaacatatttaaactatcatatttccttaatgcagatacttatttaatgtgctatgtctaggaaaagcactgtatgtaacgtagacacaaattttaaatcaacaatactttattgttaaaagcaaatctacattacca

SEQ ID NO: 44278 - DNA, 1873 bp, Bovine  19866880624055
  misc_feature (1)..(1): n is a, c, g, or t
natgtgggccgagtcatgcctgaaagcacttgtatgctgttttctagtagaaagctgcacttgaatactgaagaacaaaacctgcccctggggcaattttacaaaataatacagacttggtatacaccatgctagtgaccagataattgattagttagggtttctgtggctttggatacatttccaggtaagagagatgttacagtgaatacaattatccatgtcccaagtggatggaaagctcaagattgccctgtttcaggttggaaagtagaagtgcttaagtgcagaccccctaaatgctcagagcgacagaattcaacaagattcctaccacctacaccaggttgattagtgtgtgtccccttctccctccattcatgttcactgaggacctgtaaatctgacttcatttggaaatatggtctttccagatataaataagatgaggtcatattggacacaggggggccctgatacaatcaatgactggtgttcttataagaagagggaattttggacacagacacacattgaaggaagacgaccatgtgatggcagaagcagattttggagttgccaccaccaccacccaaagaatgctaaggattgctggcaaccaggagattccacaagagtcaaggaaggattcttcccgcaagcctttgcagggaagaagcacagccctgctggcactttgatttctagcctccagaactgagagaacacattttctattgttataaaacacccagtttgtgataatgtgttatagcagccctaggaaactgaaaaattttttcaagctacttctggaatgaaaggcttgctgtggtggattatacaatgacttacaattatgccccaaactagagcaatatggagggtacaagataaaggcacaggaaacactctgccaacagagcatgaaaacccttgtttttggaaagaatggaaatgaggaataatgactagtaaccaaatagagagcaagagaacttccagttccaatggtgttatacatagcatttatcccagagttgaactaaatttaatttcatgtaagggaaactacacattacagattttaaagattctagtcatcttgtccttttccaacttagtttcctttctgtaaagaaaaaaccaagccctgaaaaataactacaagtcattttagttctttacatatctaaagaacaagattaaacactaagttatttataactttatcccacttcatatgcagaaagttttcctaatatacacttacatgattgttgaagggtggggtgcttttcatttgcctttgtaaaaattgaaagtatagttatttttaaatctggttatattagaaataaacatagtattgatttatctatgggtttgcagtgttactttttctttgcttttctatttcatgtctcagacctcttttctcatatcagctagtctaagccaagggaaaggaaggagaggcttcatttatctcacttagaggttcaattaataaaaccacaaaaataacacgaaccatgccattaaggcctatcgtccaactagatgtactcacccacattatcaccaccagctataattaccaccaccacacagatcttggaccaaaagcctctcttacaattttggtacatgtaaatgaatttcttttaaaaatgctgttcattaagaaatacccttcctaatgaacagcatttttaaaagaaatgtatcatatttgaatgatttctagactatgagtgtctgctcatgtaaaactccagggtagtacataactataacatatgtgtgccatactcagttacatatcaagaaagtttaaacacatccacctatttacatcatatgatcctgg

SEQ ID NO: 44279 - DNA, 1466 bp, Bovine  19866880633855
  misc_feature (1)..(1): n is a, c, g, or t
ngctcttctcacaactttgtgacaaataccccatgattaactccctcttgaattaccaggtacagacattgggctcctgactgcaccatgaacgaggctgaaatgtaggtaaaggctacatttgctccaccatgagcaagccattagagcaagtcatttaactgactgaggatatttcctcatccatattatgagattaacagggacctcctcaaattgtcagggagcctaaagagttctatcacgactcccagcacaaatacaagcatccaataaatcttagctcttaagcctatgatttaaaaaccagggcactgcactctaaagtctccaatacagagaatccgatggaaacaaaaacatcatgattgtatgagtaaaacatccatttaaaagggtgtgtgggttgttggaaaagtcatggaatacaaattggagttgtttggacatactgtctatggagaagagcagattatctaggagaaaaagatgagactagggtgtattccagggaaagagtcaactgggagacataagttggctaaaagaccttaaggcgtgactgtggaacaagaagagtgggcagcaagtagttataaaagctgagggcacataaggatagcttctggctgtgggaaccgtccccacattaatgcagatccaaagtacgagggaagaatactcttcaagtgaaagaaaacagtgctgtttattcccttttgcaaatctacatggaacatgacatcagagctcgtctataacatatttggtgattgaaaatgggcaactacttcaaggagaaaatacttccaagcttaccctggtttataaagccaaatccaaagaaaatcttagtcatccaaagcttgctagatttagctatattcttaacctcctttcttttactgaaagtgctatatagggaagtatagtttattaaggtgacagacatgagacttgtgatataatggacccatttgtctaaggttgtgatgaaaaaacctaattttggtttttgctagttttagtaaatatgtttagagtgtgacatgagcatggaaaatagtagatgttcagttagtgcttgtcgaattaaatgtgtattaaatacaaatattggcaacatgaaagacacattttccaaaatttgacaagataatcacacagaaatagcacaccatgaaataatgaatgtgaagtataacatgtgatacaagtataagattgttattctaaaagtaccttgtgaatcatttcaggagttgttggtattaaatcatgagtcaagttttaatcttgtaatgaagacagtgtccattatttgtacctctgattttatcttactaagtcatggaacaatgtagggggcctggaaaacataaatccaaagcagacttgaatctgcttttgatgatactgtatttgggtggaatgcaaataacccaggttagtagtattgagacaga

SEQ ID NO: 44280 - DNA, 1048 bp, Bovine  19866880716141
  misc_feature (1)..(1): n is a, c, g, or t
ntgatttagcagcagcagcagcagcaatgatatgttgaaagaatttatacagtaatgtttaaggggaagaatgaacactggtttcattcttgtagagctatttcaggaggtacataatgaccagaggagatatgattcaatattcattattcttactctggagtcaatagtattaataacaaaggtcaggtatcatgtgaggggaatgcattttgcagaagaagtctgatctaggatgataggtcagttggtcaccttcacatctgtgcagaagtcattcatggtctgcttttcatctgatatgcttgttgatcacctttgtggcagatcacattacctttcatgcattcatctgatttgccatatggctgttcagtttctcccattactttactaatgttcagtttactttcccaccccttgactttggaattggccatgagacttgttttggccgatattatcaggtacaaattcactgtgccagttctgagcttaggtcttaagagactttgtgtgtatccatttgctctcttgtatttctgctatattcatgagaagaacattcccagactgatgctagtctcaggagagggttgagaggcatgtggaataaaccgtccagccaagttcagtctggattagctaatccagtcaacctgcactgaatgaactaaataagtgcttattattgccactgatgttctgtagatctttgttaagcagcattattgcagtaggggcttcccttgtagctcagtcagtaaagaacctgcctgcagtgcaggagacctgggtttgattcctgggtcaggaagatccgctggagaaggaaatggcaacccattccagtattcttgcctggagaatccccatggacagaggaacctgacaggctacagtcctgcaagagtcggacatgacttagcaactaaaccaccaccaccacattattgcagtaatagttgactgacagaccttccaaatttacttgtggttttttagtgaaattcttggctttgtcagatttcattttttttttcttcgt

SEQ ID NO: 44281 - DNA, 1694 bp, Bovine  19866880758986
  misc_feature (1)..(1): n is a, c, g, or t
ntttttaatgtgttgagaattatctgtctcacctatacatggaagttagaaatgtaaaacataatttttgtcattccagattatctcattttcttggcataatatttgcaattttatcaaggtaatgcatacacatggttagataatacaatatttatagtgaggcttataaagatcatcatcaattctctaacctatccctcaattatcaccaccctctgagacaatcactttcaactctttaaagaatatacttctgataattgcttccatattcctaaataattatccttatatacagttatctattttagcctttatctattgattttctcttataataaaggaagattagatctttgacatgcctgtatttttaattaaatcagcagacagtggtcataccaataaaaacaccagaatagcaataacaaaaataatgcaaatgtttccactgttcttgtacaatgtattgtgggtgcatttactttcttgtgcatctttctactgttatttgagttaattatttttatttcatgctacacagttttttgtacctattgtttctatttcttgtttgttctatcagactggtcatatacccatcagtatattttcccaaatgttgaaacattttgattaatatacagcatttttaaaaaatcttttgggacttttctccttgaggtctctgtacttctgttccattccaggctggttattcttcaagccttctgcatagctgttatgctgggttttacctccatattagtttctctgtgttcaatgtctaagtgctgcatcttgtcttttcctcttcagctggagcacatccttaagcagctttccaaagtaggctttgagaagggcaaaacttatttttcctcatccttgattgacatttcagccagatataaaattctggattgaaaataatcttcccttctggcttacttcactctgtataataggctccggtttcatccacctcattagaactgattcaaatgtattctttttaatggctgagtaatactccattgtgtatatgtaccacagctttcttatccattcatctgctgatggacatctaggttgcttccatgatatgaaatttagaaagatggtaatgataaccctgtaaaaaaaaaaaaaaaaagaaaccatttatctgctttttaccattatatattagttttgatggtaattgttatttgcaaatggaatcacacactatgtgttcttttgtgtcttactagtttggcatgtttttgagatccatctgttttcttggtatgtatcagtagttaattcctttttattgctcaatagattccattgaatgacaatatacaaaaatgttccatccatttaccgactgataaacatctggatgtttatatttgggccatcatgaataaagctggtagggatattcacgtataaaaaaaaaaaaaaaaagaaaataatcttccctcaggactttgaaggcattttctcagtgtcttttaacatctgatgttctgcttgagaatttcaatacaattctaatccttttgcatgtactacacccctgcccctctttcctctctggaaatttctgcactctttatcctggatgcttgtggatatttgtgatgatacgtgctctataggtcttctcattgtgtgagcatttagtggattttcttaat

SEQ ID NO: 44282 - DNA, 3798 bp, Bovine  19866880806659
  misc_feature (1)..(1): n is a, c, g, or t
nttctaaaacacaaaggctaaacttcgtattaaataatttaaatgaagagcaaaaaaaaatctttgaagtgctaataattttaatcctttgtcttaaataataatggtctataatttaacacttttctttcttttgctttgggggggaactaactatagtttcacagaaaactatttttcattaagtgttcctactttcactttattacccagttgagtgcataggagtctggagtaattttctttgtatcaagaaaagaacaaagctcaggttcatggtattggatgagtaatcggaaaagatgaaatggtctccccttcagggaacaatccctaaaagacaagagaagcaaagtttcttgcattaataggtcaaaactgatcatatcagtaaccagtcttcgtgcaaaaccctcctcccctccttaccccagagcatccgacttaagagcattgatagcaagcctacctgacgcaacaggggacagacctctcttgcttacacctaacatacctgacctgataggaagaaatggcacgtctacagccaactctaggaagattctttccaggtgaacccaggcagcactcaggagaaaggactacagggaccaatgaaaacagagggaccacttaggttattttgataagctttggatcccaaagggagatctggagagccctgaggaagtccagctcccttctttttctgccaaataagaaagatctcccaggaaggcttcaggatagctccatagttaacgtactcaattaagaatcccttcagcaaagctccaagtctgaaatggccacagacgaacattccaaaagagtggacccagagctgtgactggaagtggcctggataccagatgctcagagaaaatcccaggaggtgccaaacactgaccctactgagtaactataatacttcttgccttgttccctggtgtctaataaatctgtctaataaaccattaaaaatatacacagctcaaattgcaggccatcttaataaaagtcagtatttactgaggaaacaccatgtgccagacactacaatacagtttacaatgttatcttactttatctttacaagcaactctatgaaagatactattatcaccctcaatttacagatgagaaaactgaggcttagctgtggtcaagcaggtcaaccaaggtcacgtagctaagaagtgatggcattaagacttgtacacagaaactgggtattaaaccattataccaagctaccctcccatatatgcaatttaatatttgaactagtggtattttggtagatttagtctttaaaaagcaaactgtaaaaaaaaaaaacctgaaataaggtgaaagatttcatgtaaaaacattaatgaaaagcattgataaagaatgtttcaaaatgctattcaagtgggaataatgaaaactaatctctgcaaaactaagatctaaggtcaatgtcaggatttggtataaccattcatctaccatttttaatactgcagataacaggggaagttttgtagaaaaggccctaatttgctaattcagatgtccaaagatagaactggattcatactgacaagactacctcctcctctgtctgaacactttccccactctataaaggcaaaacagtagattgctaaaacaaaacacagagacacagtggtaacgaagactaggaacatacactgtaaggacaattgcctagtttgtgggtctcatcctcggaaaaagtgggacatctcagggaatcagccattgcaacagcatctattcatttaatagctgtgtactgaaagttactctccactgcaaagcagtgtgcttgacagaattctactcatgttacatctgactctctaataagatatattatagtggagttgtttgagcaacattttgtggggctgagccctatgcgggggtattaacactgactctggctggagtacagtgttacatgtggaattcatggaaacagtaactggagtaacctggcaaagtatgttacacagctcagtgcaaacctctactagtaaacctctacaatacagcctgtactagtatctaccaccaccaacatcctgtagagacaaagctggatcatcatgtcccttgctattactagttttgttacactgagaggtggtaaaaatataagcagttgagagatttagtataacacagtcgctcagttgtgtccgactcttggcagccctgtggactgcagcccgccaggctcctctgtccacaggattttcctgacaggaatactggagtgggttgccatttcctcctccatcagtataacagaatgactcccaaatgtgaattctagcctctgatttaccattagcatagccctgtattctggcatctctaggtctgctttccttacatgaagccctatcgcttcaaggtcgcacccaggttctccactctggtatgtattagaattgcctgggaatttaaaaatcgacagggctctacacagtctacttatatttgaaacatcaagggtcagtatgttttaaaagttctttggccgaacagacatttctccaaagaggacatacaaactgcatctaggcacatgaaaaaaaatgctcaaagtcattagctgtcagggaaatgcaaacaaaaaccataatgagacaccacttcacactcagtctggccataattaaaaaaaaaaaaaagttggcaagaatttagagaaactgggatctttatttactgctggtgggattgtaaaatgctgcaattattgtggaaaagtctggcaattcctcaaaaggttaaacacagatttaccgtatgatccaagaatcccactcctaggtacatatcccaaagcaatgtccacacaaatatttgtacacaaatgttcatagttgcattattcataacagtcaaaaagaatccagatgtccagcaactattacatgagtaaataaaatgtgctattttatttcattgtacatacaatgaaatgttactcagcaataaaaagaaataaagtaatggtattaatatatgctataaatacatacagatgaatctttaaaagacaatgctaagtgaacaaaggtagtcacaaaagaccatatattataaggttctatttatatgaaatacccataataggcaaatccacagagaaagatgagtaggtgcctagggctgagagtactgggggaaaaagcagttgactgctagtgagttcagggtttctttcgggggtgacagaaacattctaaaaaggattgtagctatggctgcacagttctgtgactatactaaaacccatggaattgtacatattaaaggatgaattttatattatgtgaatgatatctaaagctgtaaaagaaaaagaaaacaaaaaccaaaaaaagttgtttagttgattctaataagcaaccagggtggagaaacttgtaaggtaaagcacaagtgtccaatcaaacttaggttcaaatcctgactcagtcatacaccagaagtataacgctgaataagtcatttaacatctgtctttgcttcagtttctgtagctgtaaatcagacatatctgccttatagtggtcactgtttaagtgagaaaatacaaaaagcacccaaagctaacccagtgcttttcacacgaaaagcagggggggggaaatggcagtcatttaactatcaagctctagaatagcagtcctcttaccttaggtgcatgctgcaatcaaccaagaagctctaaatctaaacaaacctcactgcaggctggcctcctca

SEQ ID NO: 44283 - DNA, 2243 bp, Bovine  19866880815674
  misc_feature (1)..(1): n is a, c, g, or t
ncccttgagcttgaggtcagaactggttagggtaaatagactgatgtaaaaaaaaaaaaaaaatttaaagaagagtgaactgatgtaaatttaagacaaattagaattttagaattgagtaggtagtcaaaagaaatgaacatttgtggttgccagcctgtcaattattcaattttttgtttaacttttcagtttgatgatattcacttgtcaaagatgataaagatggggtgaagtatgtaggctacataaaaaccagtgaaactcaagataaagatctgttacgctcagtctatgccaacatatgttgtaaatatatggggcaatgagaaccccaggctggcagctgagaaaaaagtacattagataagagctgctccccagaaataaaattttctcttgtaatttttattaggtttcaactgacaatatggctttttacatgaaaacaattaggaagagaagattcctttttactttctgtattttcctttgacttagcaatttattccagtttttgttcattcattcaacaaaagtttgcttagtactagctgtatgcaaagtaccattctaatttctggggacacagcaatagagaagatagtaaggtccttgctttataagttgctagaatttcatgtctttatctataaaaaatttatagctaattataatagtatccatcagacaagctaaaatgtggtaaaggaggcattctctgaaaaagaggggacctgacaaagaaaccatatttccttggaatttggggttccttctgtttactttgcatgtacatcaaataattccagtatctatttgaaaaatactgtctacttagttttgactttgtgcagattaatggcaattttggctacaccctcaaagcatttcctctttctggtaggctgcagtccatggggtcgctacgagtcggacacggctgagtgacttcagtttcacttttcactttcacgcattggagaaggaaatggcaacccactccagtgttcttgcctggagaatcccagggacgggggagcctggtgggctgccatctatggggttgcacagagttggacacgactgaagtgacttagcagcagcagcagcagcagcagcaatcatatacgggtgatgtcatggcactgtccccagacctttgtggccacgctcggtacgacacagctgcctcaaagttcaagactctggttctcacaaaagagccactggctcacaaaccaagcacatttcttcccttttttcactgtaacattctttcccaagggtataaatctcaggctgatatttaacattcctttgaactgaaccatggacttttaccttgtacttcttgaaagagtggagagctaagcttccattatgcatatttataaacatgtcctaaacggaaggcatgattttgtaattctctagtcatgggtctttgaaactattttataaaagaacatgtagaaacatcgcactggatcaggctgattgcctggtttaggattctatctcagagtggagtccacgtggcagtggaatgtcactgttgctaaacgtggctcaaccttgacaaggtgctgacatatcccagaacctctggaattaaaaattcctttcacttaaaaaaattaattctgaagttgaattaactaacacaagtagaggtttataagtttcggaaaattaattttaccctaggcttctctattttggaaaatgaaattaccacaagctcaaagtttaagagatgttccttttgtttgtttatttattttgcatcagaaattatgagagcctctgtagttcttttaaaatgtaatacttattttgataaatgcatagtttttaaatataagttttgaagaaagctatggttatatgacattgcatggatcacaaagaataatgttgaaaactaagtcctatttccctaaaaaaccagtatctcaaagttattagtttttaaagtctgccttacatggacagcaacaatctttcgttcctttcttctttcctcccccctttctttctttcatggtaagaacagatgacacaagatctaacctcttaagttcttaaagatatagtacagcatcattatggagtaggaaatgacaacccactccagtattcttgcctggaaaattccacggacagaggagcctgacaggcacagtcccatggtgtcgaaaagagtcggacacgactgagtggctatgcacacacacgta

SEQ ID NO: 44284 - DNA, 895 bp, Bovine  19866880823462
  misc_feature (1)..(1): n is a, c, g, or t
ncaaagcccttccaagcaataatattctgaaatttcactctacgactctcttgtttctttcttcttatcctagtaaggacttccacctgaacattctatgtatccaaactctgcagtctccaaaataccaactttctgcattggtagtaattatagcagtagaacaatagctaacaactataatgtaattgtttgctattataacataaggacagtacttgggagaaatggagcatatccttctgtcatcacgccttctttcaggcaacactgaaagtacgggtagaaaacagttcccactagaaaatctctgaatgttctgcccttcaaggttgtttaaaacaaaaaaaaatgcttaatgacatacttagaaaagaaattctggaattccaacaccatttttgtgtaagaaaataacaaaatcctttgttttgtgttagcggtgttgtaactaattaagggggaaattagctgccggtttacatgaaaagacaggcctgattccgctgacatatttgcatccacaagaagcaagctgatggtctgctgcctgtggtgtggtgttcagctcagcctctgcccactgggactcattagccaagggttacaaatatgtaaccagtgctttttccagatcttctaccgcaaagtaagtaccagggtgtctgtcgcctgcctcgaaggcctggatctgagccactcaggatgctcccagctgctcagcctggagccaggattttcattagatgggttcccttgcatgcaagcacatgctaccattgtataaatgttgctcttttcttcattaagaggtggaaaaggagacaaacatacaaataaatagctactttttaattttcattttttaactttcttaatgtttaataaacaactt

SEQ ID NO: 44285 - DNA, 1020 bp, Bovine  19866880828621
  misc_feature (1)..(1): n is a, c, g, or t
natatcaccttctatttctgataatatggtgggccaggtacacagtccaacccttccattgaaaactactaaaaatgctatgtaagggtacttaaaagcatctgtgaataagcaacaaaggaaggaattatcatgctaaaatcttggtaagtgaagacagagacccagagagctaagctagctctaaatttcgctttcattctgaggacagtcattgaacctagtaaccttcagcttcaatttcctcattgagttatgagacaggaaacaaaactcaggtgtggaatctaataaaggagcctcctccccaaagctgagacaagagcactgtgctctcatcataaagatgaactgtagatactacccctttacttggagagacaaatatagggaacatatgaaaaagattaagagacacgaaggagagagtgagatatcacacataaaagtattttagtttcataaagaaataataaagagaatgagaagcagtatccaaagagatgatggctgagaattttccagaattattgaaagacataaatcttcagatgcataaaccccaaagaatccaaggcagatattaaaaaagaaatcctaaccaaaacacattagcctgaaactagagaacatgaaagatgaaaaaaaaaaaaaaatctttaaaacagtcagaaggaataaactggccacctacaaaggaatagttgacagctggtttcttacagcagtaatggaagccagaagccagtatagtgatatctttagcacactaagcaaaaatagctgctaattaggaattcttaacttagtgaaaacatcctataaaatcaaaggaaaaatgacattttcaggcaagcctgaactgagtttacttccaaaatattatcataaactaatatgtaaaggacatatttctaaacagtgtatttcagaaaggatgaaaatgatcctagacgaaaaaaatctgagcttcaataagaaatgggtatcaaagataatggcaaatttaaataaaaatgg

SEQ ID NO: 44286 - DNA, 1656 bp, Bovine  19866880830575
  misc_feature (1)..(1): n is a, c, g, or t
nttgtttgttttaaatagtatctcatgtgaaatgaatcgccagtccaggtttgatgcatgagacagggggcttggggctggtgccctgggatgaccctgagggatgggatgggagggaaatgggaggggggttcaggatggggaacacatgtatgcccgtgactgattcatatcaatgtatggcaaaaaccactacaatactgtaaagtaattagcctccaattaaaataaataaatttatattaaaatgtgcaaaaactaaataaataaatagtatctcatctaattttcgcggatcttgttaagtctatgacagagcactgcgtatgagaggcaaagtcagaactttgatgtaacaagggagccgtaaaggtgtttactgattgccatgatgcacctcatcttgtgatcaaactgaacaaccaacccccagaccaggagggttgatcctcatggtgtgagactactaaaataagtgttgtctccactaatttcctgtccctctagccttcagatgcctggttccctcaagcaccagcctgatactaggcccctctctgtccatgtagaaaatagattgtcctatctagaaaacaaattccttgtagaataaatgtgtccatttatttgatctccttcattctacaataatttgaagattaatagttaaataatttacaataatatatgtgattataaagagcaaaggcccccaagagttacaagtgaatcccaacactgttgtataattgttcatttccctagagctgatggatgcaacattaagagatgcaggacgctgggtatctgaggtaatattcactctgattgtttcaacccttggttttgtttgaggtccaagcatccagttatgggaattgagggacttaaattatgataccagcctggcttctgtgtgcttttatgcaagtcccttcatgatcacatgcacttgatatccacaaagagaacataacatctgctttctctcaaaaataacatgtaagctttggagaacaatggggaaaaaaatctctggaacatggagctatcaagattacaattgtaaatttctagttctacctattgaattttaatagaaattaaaatttcataaaacaaaaattattggcagagaaactggagtgacatttataagtcctttatgtaatgttttacagttttgcacattataattcagtaataagagggggaaaaaaagaaacatcacatcttttctcataatattcagagtagcatattttcttaatagaattcttaggagaaattactggtttctatttttatgaaatgaccttagccataacccagtctataaggtaatatttaattatatgattatttccatatgattaaaattattgacaatagtgacaaataattcttgagaaaattctagcagaaaactttgaaacttcattctctttttttatatactctttagttatggctctcataattcaaaatctagactaattgctgtgattctggttaattctgtacttttcttcagtcaagatcccacacaataataattgccaaatcttttaacctggcaatatattttcaaatcctaaactgtttgcaagtgtgaaaagtgagcacttacttaatgtacagaaatatctcaaaaga

SEQ ID NO: 44287 - DNA, 1899 bp, Bovine  19866880833686
  misc_feature (1)..(1): n is a, c, g, or t
nttaaactgcaataatttctcacctgaaagtaattactttgtatatggtaacttgtactgaagagagtagatgcatgaattctcttactatactaaaacaaacttcatttatagtttttaaaatcaacaacttgaaagatcaaatgtcttcagtccacttctcagctgcaaatgcaaccaatagggggttctgatccagacgtgaaaccatgtaggatcaggaaacacagtagtagaaggttcagtaacaagaaaacaggagcctctagcttagctgctacaaaaaagaagttcagatgctttttactcatcctttccagggtaactccttttccataataaaaaaagtttcctaattccgcatgaacagtagttgtagcttttcctatccatagaatgaagaaagacataaccacaaaagcctacaacaaactcagaaaatctttaaatggcttgtatactctcaatcacaacagcctccattctggagatacatcacacttggtttctcacaatgcttttggaagatgactggaagcctccttagacaactttgaaagttcctaggggtttctgggttcataggctgagaatcactactgcaaagcatatgccacataaggaatctcaagaactttatctttccgatggctgtcactggaaatacagctatcaaccatcttcatgcacacactcacaaaagaaatacacgatttcatggtgaggtgctaagtggaggaaatgcaaacagccatgaatgagtaacatgctatgggcttcgaagtgtgtgtggcacttctgagcccaaggggttcttctgttggctctgtggcagaggtttagcatagagggtaggggctgagaaccgtgacagggaatttcttttctaaaaaatgcagggttttagttgccttctttttccttataaagccttcctgtgtcaataggctatccgcctccaaccccccagcaaaaacaagggtggcccctacatgccaaaagaataattgtctgggctttgtacgctgaaactgacttggcaagctctccatcttgcaaagaacacaaagagcttagtttagtctgtgtgttaatgctttacaatcattaccaaaatacccaaagcaacatgctcaagggagggtagtgattctttgtctcttcccccatccctccccccttaattttaagttctgacatccatttatgtacttatagctcctagcagaagctgtcctctttggtcaacacacactcttggctgccttaggcactttcaaacaaagggttatgtggaaccacacacagtgggtagaacctctgagctcagtctaccccagtcccatgtccccatgtctgaggtccaaatctattcaacaggacggggaaggggtctcccctaattaaaaagtgctggaaatgcacactttcataagattaatgtgactaggggcttgggaaggcttggtaaacccttcttggaggacacaaggagagtcctgacaccagttaaaagaacactgataatcagtccgacccaagctcatagcatgtaggccaggtcacactatctaggcccagcgcccaccctgctgcatgtggttgtctggatgcttttggatgctccctgatgcttcctgactaaagcagacttcctgctccataactcccaagctaatattcagaaaagtgaaagtgaggtcgctcagtcgtgtccgactctttgtgaccccatggaccgtagcataccaggctcctccatctatgggattttccaggcaagaatactggagagggttgccatttccttctccaggagatcttcccaactcagggattgaacccaggtcttctgccttgtaggcagatgctctgagttgaataatggagaactgtgaa

SEQ ID NO: 44288 - DNA, 1188 bp, Bovine  19866880877877
  misc_feature (1)..(1): n is a, c, g, or t
ntttgtgggaggagagaaaatggcttcaattatatttttaatattttgtttctaaagagctgaaaagaggctatgtaggtgttctgtattctttatagagtctatacttggtatctaaaatgtttcataatttttaaaactatttgattaaataagctctttaatttctaagcaaaaacatgttcattctcttccccaaaggaaagataacacagagccacattattgcatccacttctaagtccaggatgtctgcatgatgatcagtcctatggggaaaatttcttttaatgtggaatgagaatctagatggcagctatcaaaaagaataaaaggcatggatctgggtcaaattaccattccaatattcaggatgtctactgggtctcttcagttgttgtcagggggttttcagaagcttttccaaaaaaaattttttttaactgtttagccagtgacatgacaaacagttgttcatcggttaaggtgatcctacccctcaactgtaattcatcttgagagtaattaagccagtgactgctttatactccatgtggtaaaaatattattccactaaaaatgtatcacttgacattttcaagcattttttttcattctgtagaagatgaaacttccaacttccattctctttaatagggccagggtcagcttcaggggcgtgtagtctgtgcaacagcacaggactccatgccatctggaaatgctttttttttccattttatttatgtattgactgattttttggctgtgctgggtcttcgttgctgtgtgggcttttctctagtggtgagtgggggctactctctggttaccatgcacaggcttctcactgcagaggcttcttgcagagcctgggctccaggacaagcaggattcagtagttgcacctccccgaccccagagcacaggtggctcatgggcttagttgctctgaggcatgtacaatctgcccggatcaggaatcaaacccatgtctcctgcattggcaggtggattctttaccactgagctgtcagggaagccctggaaattcttaataattttggaacaggaggcccctcatttttattttgcactaggcacccccacaaattatgtagccattctcaataggatcaatatgacattgatatataccccgtggggacaagatttcaatagaaatag

SEQ ID NO: 44289 - DNA, 1741 bp, Bovine  19866880989406
  misc_feature (1)..(1): n is a, c, g, or t
ngctgcagtccatggggtcgctaagagtcagacacgactgagcgacttcactttcacttttccctttcatgcactggagaaggaaatggcaacccactccagtgttcttgcctggagaatcccagggacgggggagcctggtgggctgctacctatggggtcgcacagagccagacatgactgaaacaacttagcagcagcagcagcaaccaaatctcaagaatgagggtgaatgtcaggtcagtgtcagggtttaaggactgcataaccatggagatatctcaagggctaggaaatagaatgaagaagaattggaaactgaagagacagttgatagactgaactgaacctggggacaatccccgaatggccttatgagggagatggaagtttgactccaagatggcttcttctcactgatacacttggaaaacagagacggtgcccctgatagaaacaggcagtctcgcaggggagcctgctccaggcagggaaagaatagatgctcggtttatacacggacttgtgggatgtgtctgtgctccaaacatatatttgctgagaagataaagggtggagccatgagcctggagagagacctggtggcctagggtaataaaagggagagaaaagactcacttaaaatcagtggcaccatttgcagacaaaaatgattaaactgctttaaaatctcccttactcattgcaggaatgtatttgacaaatcctttcatcatatatacagcaaagggaaatgtcatcccaacccacatggaattacaatgaattccaaatacatacggccaccaaagagtgcaaatcaatcatgttttactatatttcagaaaagtttttctttttaatggtccttgtgactctaaaagtaaatatcatgctcattccatattacgaaaaagaaaaatatctatggaatacccttagagttatccttcttctggcaaagagttacacaggatttctgatgctttcattttcaaaaccaataattgtatcaggatcaattttattctcaagtaagctattctttatgatgtcaaatacctgttaatgacttttatcattagaagattattttttgctaattcctagagataagtgcactggaatttgaattttaaaagtggggcacattatcccattttaacaaattactcagaagtttcttgtgtatattactgaaacacagaaccatctaactgaattttccttcaaggcatccagaactttttcagaggtttttttcctttgctatcttaatgcaagtaaaaatggactattagattcaaaggcaccttctaaattaaagtttatgatcttgtggagacctacaattcacatgctttgttaaaaaccaccaagatctaaaaattaattctgtaatgatcatggccaagtcagttctcatctgacaagtgagtggctggcagcaacgttctcatctgctcttcatttgtgggtgacaaacacattggggaaagttgatggaatgcttaccaggctccaactgcctgctagtaagagctgcctttcctcaccaaggacaatgctgtctttgtcatttgttctgccaaaatcagagtcaccaatacagaatgtgttagggagaagtttccggggccagggtcagagaaccaatctcagctccaccagctgtgatatcttgagtcaattactttaaggtctctaaacttcagcttttacacttacaaaacagtaggtg

SEQ ID NO: 44290 - DNA, 1602 bp, Bovine  19866880991451
  misc_feature (1)..(1): n is a, c, g, or t
nattcttgtgttgtcagaacatagcttaatagaagcaagagttgatttttggtgtgttttaaactgtggccctccagaggaacagcaactcaaccctgcttgtttaatgtggtttgttctgaaccatatgcgtgtgggcttttaataaatactatttgatgatgacgatgagttcctggagacagagctgtgttcggcagagtcactacattatgcttggcctaactttctgctactcaactccaggaatgctcttgtgagcagtacagaaacttctgaaatttccatttgaggtgaagtaccactgccaaaaagcctcatgaagggagtcattaaccctcacccttttttcttgtggctccttccaaactgaccctcagaagggccttctctgcaggctgcctagttctcaattgtcccctgtgttcctagcagagctatcttctgtgagctcagtgggccaactcccaaagcccaaactatggagtgcagtttgctacaatcccagaaagaagaaaaacaaaaccaactactcacaatctgtagcccctaactgatatgaaatgagctaacagctctagtgtctgaaagagggtttaaacttttttgagatgtttgcattaaaaacagtgtaatgtgttaaaatatcaagcctgaaaactgaggtcaaactcagacttttttctccataacttacattaaagtgactgggaggcaggaagggattttcttccaatagggatcaggccatgtgaaggagcataagctcgttttcataggtaactcgctacctaatctgtgagggcctttcgacttagttttgtcttggtaaattctcctcactgctataataaaactgtatttatcatttgaatttgaattaaagtctctttcatttccaatgcacccccttatttttagaagaaaaagaatttcttttagggtgagatgttcacttgcttgcctaggaagcttctacccttctgcccaagcattatggttggaaaagggtctagtgacccctggtacaaccttcccaagaaggatgcttcagacagagtgctgtaagtgaacaatgcttcctttcagacaaccctgggttctctaaacacagagatagctgtgatgctttgccagatctagagagagcccatgttgaacactgatgacctagactggcagcaacgttatgagctttgcagacagtctgtctatgcggccttggacctgattttcaaggctcattgagtccattgcctgaaatagcaggaaagagtgaaaagagatttgagagagcagaaggacatcaagtcacatgtaagggcataggggacacagggaggggcctcagacaactgggcctctccttggaaaacaacaacaagcctgtgagttcaatatcacaaaagccacagaaaggagaaatcttgcctggctcacctaagtttatgtgtttgctgttacactccaagccagtctttgatccatttaattcaatggtatggccactggatcaatcatttcatcaagtttttaaattcatccacagagactttgcaacattattccaattttttcttcttctttttttcttttttcatt

SEQ ID NO: 44291 - DNA, 883 bp, Bovine  19866881017972
  misc_feature (1)..(1): n is a, c, g, or t
natgatggtctgcaatgtatttgggtttgagcaaaacgttcatcctaatgaaatgtaactttatgaaagaagtgctcctaatcctctcaagtactgagccaggtcatcacgggtaaatgggaggtatgtgagttttcttctcttctttttcttcccttttccttttttttttgttttccctttttttttcctcccccaaaacatgttgggtacaccagctgttagcaagaacattattaaaaatcatgtcagctcagagttattgctgtttctgaagaaaagataaatgtatttatttttaaatctggacatatgaaggtttaaaaaatattgttgtagagttctcctggctacttttacttagcttttttccaagttttgggctggagaaacttaaaaatgtctccatgccaaagttaaatattaaatgaaaaccttctgtctgaggagctccaggattaataaactgtgcaaaataggtaagatctcaaatcgctagagaaagaaatttccaaagggaatggggttgcattgtaaatggtgtcagttcagagctgtgggataaaaacccacagggaaaagatggaccatgtctcattttaggctcagaggaggcaccatttctttgaagttgcaggggtactacacttatcgttgagcttaatacatatttgaaggagttaaagaaattaatgctttatgcacatgtgcaatgtgatatcataagtctccctccccaggaagacatcatctttaactgttagtagcactggtttcctaaagtcaaatccaattattatggcgaatattaattttagtagccccatattttgcctcaagatttattatcttttttctcaaggaaaatcctaggggcaagtaa

SEQ ID NO: 44292 - DNA, 1281 bp, Bovine  19866881025420
  misc_feature (1)..(1): n is a, c, g, or t
ntttaagaaagagtgtctgatttttagtatttttaaattgttttttgtatattgaccatctgtatgattgtatacagctctcagattaaaaggaggtattccaaaagtttctttgtaagtcataagtcatgatctgctatagaaaacgtgttacagatcatgggtgaataggtttcaaatccctcacactgtcttttgaagattaaattattttggtttatagttctcttttttaattcatctatagtccattggtgtctttttgtttctctgtcattttttagttagattattggctaaatagacttttttatgggccgacctcaagagaaacattattgctaggcgaaggatagggaattgggtggtggagaatgaatcacttcccctcgcttcaacaaagccatagtggcagctgcccttcctggggcagaggatagtctttataatctgttatttggaaaacgcttttttgctttccggaaatgtgggtgatacctactttcctgcttcacattgtgcattcttttacacacacacacacagacacacacacacagcacacacacacacacacacacacacacacacacacacacacccctcttccctggtggttcagatggtaaagagtctgccttcaatgcaggagacccaggttctgtccctgggtgggggaagatcccctgaggaagggaatggctacccatcccagtattcttgcctggagaatcccatagacatagaaacctgatgggccacagtccataggtcgcatagagtcagacatgactgagtgactaacacttttacttttcactactttcatgtgtacacacatatgatatatatatatatgaaacatatatgaaggtccaatattaagctaataaatcctgaatagctagtgaatatgaataggtataaggaaaaatgtatttttatgtagttttattttgtcctttacatgctctaaatgcagtaagatagtatcatatattttgtaaacaagtattttgtccaatagctgagcgtctagcagccccttggtaattttgactcttattttttagatcacctttcagtgccagaagagaaggcagcacaattacttttggatattgaatctgtaattaccttttattgtaaatcccgtaacattaagtatagctcaacccttagctggatacatctcctcaaaccgttggtgcatcttcagctgccacgcagtgatttatacaactgcttttatgcaatcatgaataagtacattcccaggta

SEQ ID NO: 44293 - DNA, 1153 bp, Bovine  19866881027160
  misc_feature (1)..(1): n is a, c, g, or t
nacagggtacattattcatagtatctttaattgtaatagccccaaattaggagcaatccaaatcatcaacagggaataaatcaacttttgtatatgcatataatgaagtactattcaacaataataaccagtgaatttaaaaagaaatgaactattgacacatgcaacagcatgtcaacatagacaaatctcaaaagaattatgccaagtgaaaaaaatccatacaaaaagagcatacattacatgattcttgattcaaagacggtcattaatgttccttacattttttatatcaaaatgttaaataaatatgataaaagatgctaataatcccttttatatagagccctctttcatcagcagctgtttctctgttactcacagttaaccattagtcctcgggtggtaacagtcctgatagctttcctttccaatactagtgtattgatattccaaaatcatcattactcattgaccaatactaacgacagccaactctcagttttgatagtggatttcccagaaacctggctttgtccttgcactttcctgctccttgcatgtgggtcacttcactattcgttagcacctgcaatcaagggtgttcagtcatagagcaggtaaaactcaaacccatccaatattctgctgagaatcataaaatcttaaaattgaaagtaatctccaatgttatcttttccaattcccacccagtgctggaatcttctctggcctatccctgacagatattcacccaagccagatcttctctgaacattttgaataataacagacccaatgtccagttaccccagtaacaaattttgtagtccctggcttaactctttttctgtgttagcaatgcaaggggtaattggaaacaatatttaactttggtttgggagtagtaacatgttttttatttattacacacatacacacacaaaatatttctcaagcaaaaagaattctttcaaagtgttataattacctcagccccaatattccctatgagtcatggagaaagggtaacagaaagtcaggctgggagggaagaaaatgttaaagaatgaattcattcattctatggactgaattgtgtctcctcctgcctccgccattaatgtattaaagttccaacccctcaagggga

SEQ ID NO: 44294 - DNA, 995 bp, Bovine  19866881044653
  misc_feature (1)..(1): n is a, c, g, or t
nccccttagatgaaagttattcacaaagtcttcatttgtccctgcaggatatgtgtaactatgcgtaagacctagagccaacaatgaagctgttaaatagatgatgtagatgtggcatggacatcacccaggactatgagagctatgatatttcatagaccattgtctcctgtagatgtgatttttttttttccctattgattaaataaggggcagtttctatttgagatctgatatagtctctggtcacaaaatctgtgttttaaaccaactaggacaatttcagtggaattctttttggctttagctagatgtctaaagtgtttcataatgagcaaattatagtattgcactacaaaatttgagcattttcctcatctgttcttgagtagtcattctttcttttcaaatcctggaaacaaaagaattttctggctcatcctacacacagcccagagatttcgactcttagaacctatgtaaagaatttaggatctatgtggagttcattcatggttggtttggtcattgtggaataaaagccaaatgaaatggatcgtttattttctcagtttcttaaacttctggtgctagaaaacactatgtcgcaatccttacagacatagatacactgctttttaaagtcacatacacacataagagagctatagaagaagcaccactttcctcttgccaccccggattcccttatgtctttatttactagctttgaatgaagaaggaagaaaacagagaaacacttaacgttgtttattaaattgctcattaatattcctaaggggaaatacaagaaattttttctcatgtgttaatttgaatttaatttgaggtggttgaggatgttaatctttatattttaaattgattttctgccacatagtggcaaagtatacactatagaaatgtattcccaaaatgggcaatagaattgtacattggtttagaaagaatccagaataatattttattgattt

SEQ ID NO: 44295 - DNA, 3530 bp, Bovine  19866881094922
  misc_feature (1)..(1): n is a, c, g, or t
natcatatgatcctggccagctctgtgggagttgacacctcagaccacaaggttatgcctactggtagcctaaataacatgacagataacacatatgtcatgataatattatatcatttaagggtatataggtaaactgcatgtgcttcctgtgtgatatatttgtatttattatacatttataatatacatgtataaatatataacacatttgatatttcatatcatgaaaatgtcattaaacaaaatatatatttataaatacatgatatataaaatactgggactgacagagaatgatatccattcaaatttctgatttgtggaaagggtttcagtggtttcaacaactgtcttgaaaataagtagatgtgtgacaacctaacattaaatttagggtaataacatatcacttatgtgtattctctgtgttgaaggtagacagatgactgtttggaggaaagaatcttgctgcctagaacatttaaaaatgttttgtggagggcattcctgagctgcctttggaccaaattctgactctgaatactttcacccacaaggaaccacctctatgttccaagaaataagtctcagagaggcatcttctaaggtcttatgtgataattaacaagacccagaaggacaggaggaatttacagagacttctcttaaaaaaagaaaatcatgaaaatgtacctgatctaatttggatttatccataaacaggtaaacattccattttagcattaaaacatggctaaaatcaattttaagagatttttatatttatatacagagcacttcacacaaatctaataaagatatgcctttctctgaaattgcctgagagctctgtcattataagctcctaatacattagaaggtgctcaaggaatgttcataaatgaatgaatgggtaaaacaaccactgctcctgaacattaccctgtgatgtccttaataaatttattccacgggatgactctgggtgattaaaatggtatgctccctttcacgtaggccactaggaagcttagagctaaatttgtgatttacttctaacaaaaataaaggaccagagagtatatatttcggtttcccattcttatctctggttttatattccaattactgattccctcaactacttattttattcttctgtattgcgtgttctttagaagtgaggtataaaatagactaataaaaaaagaatctttcttaaaaccataacaccttactaacctctcctacaacactcagtgatttttttttttttttgaaagagctctccccaaagtaaccattctgctttgttcttagttgctcagtcgtgactgactctgtgactccatggactgtagcccaccaggctcctctgtccatggggattctccaggcaagaatcctggagtgggttgtcatatcctccagggttcttcccaacccagggattgaacccagtctcccacattgcagggagattctttaccgtctgagccaccagggaagcctgattaaccattctatctttggtaaattctagaaaaccctagggtttaatgggaaagttagaaaagcaatggcctaagcctctgatcgttgttggatctgcttgtccctcaaaagtgaggctattcctctgaagcagtgctaaacgaaacaagagattgagctgtttgctcttgtggcttatatttgccactttcctatagtgtacagaagctatatgttcccaaaggcttaactttaaacaccagggtgagaaggtaagagaaacaaaagaggagcgagaactgtctgtgtcagaggcaactctctacagttccttcccactaaatgtagacatcaaacttaattttggcctaacaaatttatgcttagtttttcctatgctcttttattctctttaagatgcaatccatttagatttcaaaatagactattgtgtaggtggcaactttcattccaagacacaaacaaaagtgcttttcaacaattgtccatgtccatatttaagcaattagtttagacaatcatgtcaagccttacacaattctgcacaatggattttctttaaagagtaagatacaatttaagaagctgaaagtaagcttaactaggagaaaaaccccagggggctagacaggaaattctggaaacccagtctctatccacgcatgggagttaagaagcataaaacccacctggacttgaaggctgccttcagctgatatgtcaaaagagaggaatggattcctgacttgggttttgttttccctgtctaaatggtagtccaagaaagtagaccaagaaaactgctgctttggttctctgcagccggctccactctcccttccttctcttcttccctgcgcccccaccccccgccaccccaactaatgcttcaggcagctgccacactaaggtggtggccgtgcccaaggctctgaaggtgagggaaggggagaaacaagggggagctctgtgactaagacataacccagcgcagggatgggtaagtgagctaagtgtaaccctgctgctagtcttcctggtagaatcgagaccatagagaaggtatgtggtccagacttgtctgtctccttccgtgagggctgcttagcagagcttgggattccagcgtttcaaaggaggacaggacaagaatggaggaagacgacggaaacaaaagtggacatggactgtggctaggtgctccacacatcccagtctgcctgagatagttctggtactattaactgtgtctccctttcactctccacagcttttgacccagtgtttcttaggagtgcgtatttgtgctgtacggagacaattcttcctttcaggagactgctttgctcagtgtagaaaatttagcagacctacttgtatccactaaatgccaacaggcattcctcccccccaccctatcattttttgcacaccctgtcattttgacaagcataaatgtcctccctcttttcaaatgccttctggggagagtagtaaagccctggtgaagtcactgcatgctttctcagtgaagaaataagtaaggtgaggttcagcgaggtgaaatgatttaaggccattgctagaaaatgacccaagaattaactgtttcttaattttacatactgtgctccatccaggacaaaatcctactgtcccatgacacacctgtagctgaatcactgtctgcagaagcccaaactgcagggaagaatttacatgtggtaaaagcagtgttttatttgtgaccacttactggtatgtagtcagtagtcaagcttcgtaaccttgaaaaataccattattattaataacctttgaaaccaccaagggttaggaagctactgactttagattttaaaacacatgacatttggaggtaagtcacaaatgctttccagaaaaggcgtaaggttgtcattattttttaaataaatgaagcttaaagagggatttatcagttaacaacaatggcacctataaatagctttgaagaattttttctttaagga

SEQ ID NO: 44296 - DNA, 979 bp, Bovine  19866881110569
  misc_feature (1)..(1): n is a, c, g, or t
ncttatatacctggctgtcttcttgaagtctttacttatttgatgaaatgttaaatggaaatgaggtccagctactgaatttttccccaaatctgctttttctccagacttccctatctcagtaaattcaatcaccaattaaccagttttgcagaggcctaggaatattctgatttattcatttactttttctacctgttacatctggtctatccagtcttgtctctctctccaaaacacatcctgaatttatttttccttttattattattttttgcgtgtttgtttacatcatctgagtatgtgctgtcattctcgcttgcctaaacctctgcagtaagctaacagggctcccagcttccgtcttgtccctctgttcttcactcagcagctgtagtgatcaatcacatcacatgcctgcttaaacctgtcagtggctcccccgctggattgcttaccatggttgctatctgctggaacctacttactctcctctaggttatgctgtaccagccacaccagcctttatactgtgccgcagctgaccaagctcattctgtcttatccatttgcagtagcttcctttctgggctgtcctgaattttgaatggttggccttttcttgatattaagacctaggttcagacatactaaataggaagcccttcctgttcagtcagtctagagtagctatccacttacattatcatgttatagtaatcctcagcagagctatggtcaccaactattattttccttattaaactattgcagtctccccacactagtacataagtacatgtgagcagagattagtttatcttgttctttgctgtatcctcagggctacttagaagacactcattaagaatttattcattaagaaattaactgttagtatttcccagccacatcttggagactttaacataggatttcgacatctaaagaaactggtccacggaagggttgtcaacat

SEQ ID NO: 44297 - DNA, 6193 bp, Bovine  19866881113731
  misc_feature (1)..(1): n is a, c, g, or t
ntttccagtagtcatgtatggatgtgagagttggactgtaaagaaagctgagcgccaaataattgatgcttttgaactttggtgttgaagagtcccttggactgcaaggagatccaaccagtccatcctaaaggggatcagtcctgaatatttgttggaaggactgatgctgaagctgaaactccaatactttggccacctgatgggaagagctgactcatttgaaaataccctgattctgggaaagattgagggtgggaggagatggggacgacagaggatgagatggttggatggcatcaccgactcgatggacatgagtttgagtaggctctgggagttggtgatggacagggaggcctggcgtgcttcgattcatggggttgcaaagagtcggacacgactgagcgactgatctgatctgatctgatctgagtgactaatacacacacacacacacctgtgtgcatgtatatgcgtgtgtaggtgaatatgtacatatacacgcgcaaagttgattcttgtttttcgtggcagttatattctataaagtccctggaaacattgaactagcaaatactggaaccattgcttctaggagaaatacaagattaagttcctgtgagcctccagttcattttcatcaactgatcaatatataaccttattttatgtgtatttttgtttaaagacatacacacttttcatacacacagacacaaacacacacacacttgataactcaccttgtgcttagaaacagcagacagcacctcaacactacacttggggggcattttaaacagtgaaatcacgaataaaaagcacacaaaaaagcaaaaatgtggcactaaatgtgttgcagaaagaaatgatcacacattaacttctccgtaccccctgccatttttttaaactttttattttgtattggagtatagctgtttaacaatgttgtgataatttcaggtcacagcaaagtgattcagttatgcactttcccatttaggctgtaaacgagcatggaaactgtatgagaactgaaaagaggcagaacattgccttgtttgacctcagttggggacaggcaagtcagattagtcaaatttttgccaccctctatgaatgactgtgaaaaatgctgtgagtattaatttaggggttgctattcattttaccaagcaggagaatttgtaaatagaggatctgcaaataacgaggttgaccctgtgtgtgtgtgtgtgtgtacacataatattagaaggctgatcttgtcacattaaaataagtcttggctttttttgagggtttatttttagaagtattctttctctgactcgtctcatttttttaattcctcagtgttttttttttttttttttaatgcttctcttctttcattttatgtatacacatagactaatcagctcactctagtttgtgtctctttcccaaggtgtatatttacttttctcagtaaatgtggaatggatgggtttataaatcaggggtaatggcttgcctttgatgccctttctgccttttggtggtgggcacagtccttccccgtatctatcactggtgggcaacttaatgggcacacgccctggtctacttctcagttactagtggtttttttttaacctattgcagtgattcccaatgttagcttgagatgatgtgttcactggcctaccataagtgaagaaaaatggccagcactgcattgagaataaatttgtttaattgagacaattttttatttgagattatttttctatgttttttggaattccttttgttcttattttcttgatggtttgacttgtaaaacaaagtaaactacaacccaatatgattcccaaaattttatttggaattttattactgtatggaatccagaagtccagacacagtgtactctgtcctagcagtgttatatcttttccttcccaaacatctttcttcttgcagatagataggatagtaataataataactatatgccagggacctatccaaacactcatatgaactcctttaatctctgcaataactcagctaagtaggtcagtactgttattatccccgttttatagatggaagaattaaggcacagagagatcctcaagttcacccaattggtttgtggcggattcaagattagaacatgggcagtttaggttgaatccactctcctgagcagcctgctgagttctctacctagaccgcctgcgttcctgggctcttcctgttcccccttctgtctttagtgctttccctgtaggcaatggcatttcccagcatgcagtgctgctagcactcctacccacctctccattcctgccctgttcctaacacgttcctgctttcccggatggactaagatggccaagattgaaggtcaaaggtacacaggaaggaatataatgttgcttgactcttaatacagtgcaaaggaaagagagcccatttcctgtttgctggagatgctgagtctctcattccaaataagactatggagcagacatggccaatattccatttttagactttcttttctttttaatgctagaagcaatctgacctgtgccatgcacttaaacctggatgtgttttacttaatccatctctttgtgtcttacacgtttaatatcttttgtattttaagacattattcctcagtttcaacttttaaggctgtttggagttttgtttttgtttttttttttgtctttatgagtatattggcaaaagctatgttagtcaacatttcaaattccaagcaggttctccctaattttttttccctgtttgctttagtaacatttttcccaaaataagctcttgtcctgaaacttgactgatatgttttccttcttttattttgcagcatcttttcactgcttccattttggttctctctccgttcagtcaagtagaaagagaacacattgtacacaagactgatgttttcttataaacaggatgggtgtatccttcttggttcctctctcatctctttttcccttccttccttggcttttagaaaccttgtctcagatccttaactagagggctgactatttttctagctctctgctatgactccctgatccaggaaggtaggcacgttggctggacatccactatgggacttgtccctgtgtttgctcctgccacacccacagctctttccctctctcatccactgaaggcacatgtgctcagcctgcctcctggtttgtgccattgcccgtgaccatgggggagcatccctgtctgaatgttctccttggtagcaagcacctctgcaaacctactttggaatgcagtcagtctgtagctttagatgggccaggggtgggggggacctgtttcctccctgtgctgtaatgttgcctgactgtgtcctcagtccttttttctaatcaagagagcttctgccaaggtttcccactgtgcttggtaacttcccttgttctggctcaactaacactcttccttgagaaatctctcaaagctcgaagaatgtagccaacaactttcctgagttttcaatcgcagtgcagaatagttggtatttttattttcctttggcttggtccctgggttgggaagatcccatggaggagggcatggcaacccatgctagtattcttgcctgaagaatccccacagacagaggagactgttagtccatagggtttgcaacgcctatagtccatagggttgcaaagaatcggacatgactgaagaaacttagcatgcacaaccatatttatgggcttcccaggtggctcagatggtaaagaatctgtctgtaatgcaagagaccagggtttgatccctggactgggaagatccttgaagaagggcatggcaaggcaacccactccagtgttcttgcctggagaattccatggacagaggagactggcaggctatacagtccatggggtggcaaagaatcggacatgactgagccactaacactcattgtcgcttttggtcatatcagtgggatttgaagagggcctttcagagacctgtgctcaagccatcatcttccattgacatctttaactcttatacatattttggcagcagatggggggaattgtgccaggcatgttcactttgtgtgctcttatttaatccaccacacatccctttagagtcttttatcatcattcccatttttcaggcaagtaaactgaggttcaaagagcatgttttaagtctgtacagctagttagaagtgaacccagtaggacgcagatcccaatttttctaataaagtatgctgctttttccaccaccctgcctggcgtctgcctaaattatcatgctggggagaggcacaagtcaactccagtctttgatgatatgtgatcttgtcactttcttgctgtgtgaccttgggccagttattcagtttctgcttcggtaaaatgggaataataatatatgtgcttttagaatttggagagggagtacatgtcagggctttcaaactcagatgcctttaggaacttggcagatggcataaatatgtgaggtggcctcatgtaagattatctggagtgacgggaactatgaaccctgcagagggcctgctctgaagacatcaaaatctatttgttaaaagtcactagactgactatatgcccaccagaggggctaaatgaaaaaaaaaaatgtcaaagatggggtgaaattggaattttcatagatggctggtgggaatgtaaattgtattgtataacatctttggaaaggcattttggaaaacacacacattctgacccagcgtttcaactcttgagtgaacacagaaaccgaaggaatacagatgcccaccaaaagttctatatgttcaagaatgtgcaaaatagcagcactaatcatagccccaaacaggaaactaccatcacctgacaatagatgaatactttgtggaatgttaacacaatggaataatacagagcaatgagaacgaagaaacaattacaggcaacaatacggacacatggccatgaggttgagcaacagaagctacagaaggaagaacataacactgtatgatttcacaggctgaaaagtacgataaacgaacccatgctgtggatagaagttagaggaagggagtttgagaaggccttctggaggtgtttctgctgtttactttgtgaaaatcaccaagctccacactttggatctgttggttgtgtgaagctacatattctttaagccacttttattcttgaaagaagctttactgatataagatcagttgaagtttcaatcaaaaggtggatgtgaccaagtaaaggtataatgcaggaatgagatgcagaagacagggagaccagtaaggaagcttataatagagtaacagaaagctgaacccacacgttgaaaacctactatgtataaaatagtcatctgaaaatatcaattactctcctatcatctgtaacatctttatcaatacagttttctttaaacaactaatttttcaaataaaaggaattgtccataatagtttttatgtactagctattttttaaatatacaataaataaaggattgtttccactttagattatgacaaactagcctttatgaattaattctcctgtggaaaatgactagtagcctggataaaaaatatttcaaaattggcccttgagggttcaggatcctaaagaaaataggaacacagagacattctgtgacgattttccccttgagggacttagcgattcataggtggcaggtgtgagtgttaagaagccaataagaacttttggtagcctctcaggctgaggaaaccgagtttgaggccttgcaagcaacctggcttttcagctggaactgctgaagggcccgaggcataagaggaaaacagaaatcaatctaccctctcaatgactgaaaccagcattgaatcagcctaatgtgtgatcccgataaagcgcattcccagtagcctacttaatattagttcagagacttctttctttccttggatcccgtaagtttgctctctccagaggcagatgagtggtgaggaaataaccacaatccccaatgtttattaaacatttgttatgtgtcagattctttctactacactaaaagagattacattataatcccaattctctgctaagaaaaccgaatctca

SEQ ID NO: 44298 - DNA, 860 bp, Bovine  19866881187641
  misc_feature (1)..(1): n is a, c, g, or t
nctaagaaataacatggtttgccatgtaagtggagactaaaaaatatagcttgtttcaatgaattttttgtcatggacccttccactcattgttaaacttttcttgtcatgataccctgaagacactgaaatttagacaacaaacagcaaaaacattttttatcttggtattttctttgcataatttaatctttccatgaattgtcaacttttgttttctgatgtattataggtacatttaatatacatttcttttatcccagggattttatttataagagcctttattttaggaattccctggctattcagtggttaagacttaagagctttcactgcagagggcttgggttcaatctctggtcagaaaactaagatcccacaagctgtgtagcacagccaaaaaaaaaaagagcctttttttttttttttttttaatttcatggtggaagtataaaattgttctctccccagcctgcggggaaaatatttcaagttttgcagatgtataaaaaacacaggcttgccatattaaatttttttaattgtccagatgctccaaaatccatccgagtttgcacagtctgtaaaatctctgctggaagcacagaagcagtccattgagtctggctccatcgctggtggggagcacctctgcttcatgggcagtggcagagaggaagaagacatgtatatgaacatggtccttgcacactttttacaggtatgctgacagattactgcagtttttctttggtttttgctgtcacttttaagaaattctcctaggcaattttgggctgttgtctaccttgttaaatttctttttttttttaaacactttattggtttgtgtcttg

SEQ ID NO: 44299 - DNA, 4385 bp, Bovine  19866881191447
  misc_feature (1)..(1): n is a, c, g, or t
ncagactcttgaccctgtgcccctcggaagcccagaagacagtttgcagttgtgcttgagctaaggatactgacatggggagactgtactggattatttgtgtgggcctaatgtgatcataagggtccttataaaagtgaggcaggagatcagaggagtaggggggacgtgtctatggaatcaagaggttggggtggtacaaagaaggagttgtgatccaaagaacgcaagcagcctctagaagctgaaaaaagcaagagacacaaactgctaaaagtcctactgacacctaactttgagagctcggacctctagaactgtaagaaaattaatttatgttgtttttagcacaagtatggtaagttgttacagtagtgatagaaaaccagtatattaataccatggactagcaatgctctggtcatctgaacgattgtggtttcttgagcttaggtgacctgtccaggtcagagagctagaaagaaacagcgctcacacaggaaccaaacccagcaacttcagactctgggctctcgccccttcagtccacactcctcagttatgatgttgattggaaaaagtcatgaagacatctgttacatctcagtcttgtttgtcagcttataaagtgctgtattagtcaaggttctccagagaaacagattggagatgtgtgtgagtgtgtgtgtgtgtgtgtgtgtgcagggagatttattttcaggaaatggctttcatgattatgggggcttggcaagtgcaaaatctgatggggaagactagcaggctggatatttaagaaatagtcgcagttcaagccagaagaccgtctgctagatctccaggaggaattggtgttgcaagtggagcccaaagtatgtcagctggagaattcctttgttcaggggaggttagcactctgtactacaggccttccattgactgcatgagacccactcacattatggagggcaatctactttactcagttgactgatttaaatataaatctcgtcccaaagcagccttacatgcttgccacatctactgagcctgcatgttctagagcctgtgctccacagctagagaaagcctcaacgaagatccagcacagccaaagtgtgaataaataattttaaaaaacagcctcccagaagcatccagaacaatgtttggccaaatatctgggcaccatggcccagtcaaagtgaaagtgatggtctctcagtcatgtctgactctttacgaccccatgaactgtagctcaccaggcttctctgtccatggaactctccaggaaagaatactggagtgtgttgccatttaccactaaagggatcttcctgacccagggaccaaacctgagtccctgcattgcgggttaattcttcaccttctgagccaccagggaggcccaagtaaactggagtaggtagcctatcccttctccaggggatactcccaacccagggatcgaacctgagtctcccacattgcaggcagagtcttcactgtcagagccaccagggaataaaagtgtagagttaacctttattggaaatttaaccaattacacccctgccttatgtgacaaatccacgatgccaaggataccaaaacgagccagctggggccatggtctcaagggactgttctcccatgggtctctctgtccttccaatcccatttgcccaactgagcgtggatcccacactcgcctaatgtgggtttcacgcagcttgctaagatgtcaatctggcctcaggactgaagagagactatgccccactcaggacagcatcagcctcccacccccgcagtgtgatcccagaaccccaaagtccacactaggcacacagaggcgttcttaaattgataaaaaacgtaatccttcccagcctgcactaaagtctttgttgcaaagcctgggttttcagctggtttctttcatgtagaggctttattaaccaagtgttaataaaggaaaaccagcttcagacagctgctggtggttttccttcacaggaccacgcggcagcctgcagttgtcaacatttcagcctttggatattcctaagtggtaggacagaagagcagatttcttgcggcttctctactgggtgcaacacagggaagcccatgcccctttcttgctgccacaagtcactcacgcgctcagcccagggtcccactcctcagcactggctcgtgactctgtagctaaatcagccttaatttggcaaataagcgcagcaccttgaagtctttatctctactaaccaggtttcacagagaaggcaatggcaccccactccagtactcctgcctggaaaatcccatggatggaggagcctggtaggctgcagtccatggggtcgctaagagttggacacgactgagagacttcactttcacttttcactttcacgcattggagaaggaaatggaagcccactccagtgttcttgcctggagaatcccagggacgggggagcctggtgggctgccatctatggggtcgcatagaatcggacatgactgaagcaacttagcagcagcagcagcagcaggagcaaccaggtttcaaaagccttcattctgctttcacctgtttacagtgtccgtatctttgacacttcttagataaatgcattataggatgagccatgttttatctacactcctccctgcccggccccccaccagttcccttaaaatagctagctatctggtaaatgattagaagaaagaaggtcaaattatgagatttggattgcaatgactcagtagcaagcaaaacttctttaggtgggggtaaaacttttcctccaaagggtcaggcttgtgcaatgtccccattgtaatcctgtagcaatcagcaagatgactcagagccactctgacaaacgtagaaactcttcaaagtctggggagtgaaatattgtcttaccctgaatcttccttttctgattagagtggagcctgtctcctgcttccagagacaggatccagttttcttattcattctcaccacagttagaatggaaaaactgaagtcattgctctgatggtaaggaacatcttgcggcacccacagagccagcagtctgcacagacaggcgtgggggtgcttttctgtatggaaagagcttcactccactgaaacaaatgatttttagtgcaggctaacatggcagaaataacttagagtctgtcaatttttttttcttttttgtttataaagatttctctgtttctttcttataatcaacatccatgggttgaccataaaaatatattcctgagtttgaggtcaggaactttcttgagaggtcggggagattccaaatggtttgtggaaactagagccacaaaactccacaaagtaggttggggtggacaagacaagcagtacctcggtttagggaagatgagcaaatcttttggatttccatctttcttctaaagctgaaaaataagctctcccctgatgggggagaaagaggggaaatgaaacaaagaattgaggatgtatctggtccaattagaagtcgctacctacattactgcatttcatcttcacaacaaagggatgagacaaatctgttaccgtcccatgaatcacttcccttacccttcttccctcctgtcaaagcccaccagatatattctttgcctttgggtaggaatggccaagggacccagttctgactatggggcataagagaaagactcttggtggaactgggaaagggagagctctcttgtcacttacctgccacctacttcctttatataaatgcggttgtacaaggacatgaggggcttccctggtggctcagaggttaaagcgtctgcctgcaacgcgggagacctgggtccgatccctgggtcaggaagattccctggagaaggaaatggcaacccactcctgtattcttgcctggagaatcccatggacggaggagcctggtgggctacagtccatggggtcgcaaagagttggacacaactgagcgacttcactttcactttcacaaggacatgatccctggaactgtggcaaaaggtaaaagatttgagggctctaagttttcatactgaggatggtggaatgaaggatggaaagagcttgattcttttttataaattatttttatttgaagaatagttgatttacaagattgtatttgtttcagatgtacagcaacatgattattatatatacatctatatttttagattattttccattataggttattacaagacattgaatactgttccctgtgcttcacagtaaatcctgttggttatctgttttatgtatattaatttgtgttaatccctacgcctagtttataatctttataaccattcattatctt

SEQ ID NO: 44300 - DNA, 699 bp, Bovine  19866881223250
  misc_feature (1)..(1): n is a, c, g, or t
nggatgtagtaggcaagagaagaaaacagacaaatcatagacgtgggaatataagatatgtgtgtgtgtggtgtatgtcagggggagggtatttcttggaagagtaatcaagaaaggttggatttataaagcagggccaaactatgattaactttcagggacattttgcaaagttaggattgcaagcatttgcagagagggtatttccaattttgcagtgtgcagtagattttgtaactaaaactttttcctgctgatttcaagataagtttgaaattattctgtttcattttacactgcagtgttgaggggctatgccgtttgtggagttctgtgaggatatgttcagtgatcattaatttgcatttgttaaatttgtgctaaatgctgtttcgcagtcactgtgttgggagcttggatacagttttaacactattgacttgaatgagggttcggcttctcttgtttaaattttggattaaagctcaatcaacagactttgggtggtctcatcttcacccctcagagaagcagatccatatgaccaaactccttaacaatttggcaagatggtaggcttctctcatgagacacccaagacaagaatagcaggggacattagaggtcatttctgaggtaggttgccagaccatggggggaaatttgtccaaaacttgctttcactctcttcagccttag

SEQ ID NO: 44301 - DNA, 948 bp, Bovine  19866881239861
  misc_feature (1)..(1): n is a, c, g, or t
ntggccaagatccacattaaatgttttatgtggatcatctcacttaaccctcacaaaaactctttgcaattggtattattatcatctcaattttacagatgataaaacatggttgattggggcctggaatctggggcttctgagtccaagtccagtgttctttccacattgttttaataatagagtttaaaaagaacaaagagaatgctaaagtttccagttcatttcgtatcagttactttcagacaaaaataaagtaagaaagggaccatgaaaagaaagttaaatttgcagcctcttcccaaaataaatacttacaaaaatgcagcaggcaaaaatatttgccaaactcttgagccttcgtaaatttcaatatgttgcaatcccactatactagcagctaaatgcaaaattctacttttaaacctgctactgaccaaaaaacaaacaaaaaagttttttaaaaagaaaataaagaagactgttgaaaggcctgacagtgtggggtggcctacgtgactgataaagctcttcagtttccaaaccaccctagttgcagcttggttggtcactggctacatcagagttgatttctactcagcaagcacttaatgagtgcctactgcatgttagatgttgagtgatacagtgaagaggacatttattgttcctaccttttaggagattatgaactgaaggcaaaggcagataaaagagattaattctagtgtagtcagttccacaacagaggatttatcctggtcttgggaatcatcagaagcttccctgaaaaaaataataacatttagatgaatctcaatggaatgtcaaagatcatctgatgaagaagtggcatgaggactcagggaagagagaacctaggcaccagaaatggagtcactcagaaacttggaagtatctgcatgagatgaaggtttccacaatcta

SEQ ID NO: 44302 - DNA, 1655 bp, Bovine  19866881267023
  misc_feature (1)..(1): n is a, c, g, or t
nattatcaccatcattttattaaagaaaggcattttaacactaaaaatgggaaaaggtcaccgtctcagaaaaataaaaacgtttctcaaagaacagtaagtaagcaagcttgaggggaaggccagaaggagcaggcttgttagaaaacagcccttcctgtttgtctggtacagagaaccttcttagaagccagagcagcccacccatcacagcttccctcacatctcaaggttattggagtgagtcccccatgctgcctaagctgaggagacatgcttgccacccttctgtcttagaggatgccttccatgagagctggccataggccacactgggcatgtcctgcaaaatgaagcttgcccacacctggagtttgttgctcctcatccaaaggtaccacacagattcttctttatgttccatagcctggggtactgtaagctccccttgaaaagagtctggttgagttcttgtcatgcagaaaggctatggaggtgtggggaaaagcctgagcaggagaacgtgggtgaaactagaaagtggtatacacactttgtatcatgtgcaggaatctgtccatggaaaggtttttaggtcaatcaccggtatgtgctccagtgtaatgctctaaaatcccaaaactagatattatgtgaacataattcttgaaatgtaagtcatttcttatacttattaaattcattttaacattcaccttgattgctcatgacaaattcattgtaaaatcaaagcctgagtggttaaatgaacttaaaaaaaaaaaaaaaaaaaactattttgatctaaattgctatccgtagaagtatcctaactctctcagtcctaagagtgcccaatcccatagtttttaccagaaagtggtaaaggaagtacaaggaatggatttagctccacagccaaagctttggttatgagaactggtcaattttaatccatacaagatcatccagaaaaggcagattgcatagctgcccagatccctgtgtaccaatgacatattgatgatcagtttctacagtaatatggtttatttaatctggtaacatttggtagctgacatattgcctttcaggcttcccttgtagctcagtgataaagaatccacctgcaagtacaggagacataggttcaatccctgggtcaagaagatcccctgaagaaagaaatggcaacccactcaaatatttttcttgtctaggaaatcccatggacagagaagcttggcgggctacagtccgtggggtcacaaaagagttgggtcacaaaagagttggacacaacttagcagctaaacaacaatattgcctttcacctagatttattgctaaataacacaccagctagagggaaatgtaacaagaaagttgggaatgtgaaatgtggtgaggtcaggacacacacacccacatgtccacaattcacatgatgttgcagtttcttctgtcacagtgaccatgattgccatttctatcaccaccactagttagaataaaaattctcaaaatttggtgcaccattcagctatagagctaagtaggattattctaagctttcggcccaagttttctaaaacctagctgattaaaaggcattaatatttatatattgccaacactgattatacttgttgctg

SEQ ID NO: 44303 - DNA, 951 bp, Bovine  19866881278980
  misc_feature (1)..(1): n is a, c, g, or t
ncatttgaattgggtctttcatcttttcctgttatccattgcctctagctttttcaatttttttggtatttgtgctcaaaacttatcattaaaaaaaaaaaaaaaaaatgtcctgacagctttgaaatggaaaggtccaaatctcagcatgagacttttctctcagaaacttctaggtgaaagccatacacactgggtctcaagtacctatagtttcagttgttacatcaagcaattgtgcttcttgattcaagtgttcctggttcagattttgtttcatgaaacttcattcacagcacttggcatgattaggagaaaggatcaatagtgtaccgggagaaaaggatccttctctcacagatcacgtagaaatagcctaagagaggtgctattcctctgaaagagggatacaatttttccaaaaaggaagttttaatttaagaagataattttcctttaacattttttgtttgaaatctgatttacttgctcaatgtgctttcagatttctaggttcctttctggccgagttccttaacagccactgctagaaatatgctttgaattttgtgttttgagaaatggatcatttgtttagaactgccatattattttgttagcaacataactaaggacagtgtgaaaactatgtttcaaatatcagcaaatatcaaagggcccaagatctggaaattcctggacatcacaaatttggggagtcccttccttcttggtctcctgggtggtcactgaatgagtcagatgtccttttctcatatctaatgcattcttctttttgtcagtgactattgccatgaaatataattatcatttctttttcctttattcttgttgcacactcatacattgcaatgccaattgacgtttcaagggtaagttgtttgttttgctttgctctctggtctggaaatagaaaatgtaagatagatg

SEQ ID NO: 44304 - DNA, 1855 bp, Bovine  19866881348738
  misc_feature (1)..(1): n is a, c, g, or t
naaatttacttcttagataataaatgaaagtttctttagtatgttgtttctactttaaattctaagcagcagagttaacagtcaatctccatctctcctcttctggtttcagttactaccatagtaataataaccaacaaaaagataatgttttgcattgaagtcctaaattcaattagcaactctacaactttttatatttgttgactcctttgatgaagacatgctctatgttctccaaagggacagttattcaggattaagatgagtctaacagctagagtgtaaaccaccttaagaacaaaatagaatatttttgggaagtagtcagtcatcattataagaaagaattcactatgtgtacatttatggaacaaatatatatatatgatgacaaataggggactgaaaattaatgtcctaagaaagttctgctttggcaagttttctaattcaatttagtatcatgagttcttgaaatatcacctaagattcttcaagcctatctttgccgacaaggtatcgtctttcaaccagcagtctgaagcaagatgtctaatagcctgaaatatcctttccatttttgaaagcttcaaatgtctccacactacagaatttatgactatccatgatatattccatcatttcccctgtattttttcctggcattaatgttgaaagggtgatttaaacattaagatttatgtgtcatttagagtaaaggcagtcagtttgtcatcagagagatgtgatctggctgccatctgactgaagtagtgagtttcctttttagtgacaaggcaaaaagaaaaaagtgaagaggaccatagaacagcattattgaatcaactctgaacaacagatatgcggagtcacttaggaacagaaaagctttggttttggtgtcagacagacctcagttctggtcctgagtctctttaccactgcataaactttgactgagtccataactactctgagcttcagcttcctcatcagtaaaatggaaagaataatagtgctgttgtaagatttaatgtggtaatacacatatagcagtaagtaagcacagaagctgacatatggcagacaagtccataaaattgtatgtttcattatcaaaatattttataagaaataagtaaaagtcactttttaaaccttctaaccactaaacaactctttctcaaaatgtggcataaggaaaatttacatcaacatcagagtgtgaggtgcttattaataatgtgcattctgcctcccacacagatctccttaattttcttaattcatttatctactgaatgaattaacaagtatttctacacccataatacatgcctgtcactgtctgccattgggagagcaatgatatgacagataatttccctgccattatagaacttacattctagtggggaaggccgcaaataaataaataagcaacaagtgttataaactaaatagattgataatatagggcataatctgggaaggtcaccttagatagggtggtctgtcaaaacctgttcagaggaggtggcatctgaactgagacttgaaggaggaaattgagaccaccatggaaaaagataggggaaaagcattataggcagaaagaataaaaaaattcaatggcctacaagtctgaagtcttggcatgttgataaaggagacagatgtaattggaatctagtgagagagaagaatggtaggaaacaatattggggatgttagagaagaaagaaattattccccattatgccattcatatccattttcttcctactgcaaattcttcccatctgggaatatcttttccagaattaaagcggtctctttttctatacaagaa

SEQ ID NO: 44305 - DNA, 1530 bp, Bovine  19866881479001
  misc_feature (1)..(1): n is a, c, g, or t
naaggaaccggttcctccaggaaatttggaaactgtagattggttaacttgtggcagcacacagagacagcacacactacaaacggttaagaagagttcagctaaatagttaagaaattgctaaagaacaagtataggttagactgagagtatagggcttttgggagctccaatcaccagggcattcaaacccactttccaccaggtgctcatgagaaagatgggggaagggtgggaaagaataggagagaagaagaagaaaacagtcaaaatcctccccctccaccatataattaaagacataaaaccacaggtccaagaaacttggagaaccctgagtaggataaataacaacaactacaaaatcatatattcaaatttcccaaaattaaaaataaaaaggaaattttgaaggcagccaaaaaaaggaaagatagtatatagagaggaacaagcataataattgtaccaaacttcttgccacaaattatgcaagccagaagacaatcaagtgacatctttaatgtgctgaaagaaaatcactaggctaagactttttcttgggagtctagcttagatcctggagaagggaatggcaactcattctggtattctttcgtgggaaatcccattgacagaggaacctggctggctacagtccatggcgtcacagagagttggacatgactgagtgtccacacacagcttagatccaacaagagtcctactagtaatctggctgcacttctcatgaggagttacttttcccaggttcattgtgtctatatatttgctttatatatttgctttgggcatggcttaataatttacctaaaatatccaataaatagacaacaccatagtgttgatgttgtttagtcactaaattgtatcagactctttgtgaccccatggaagacagcctaccagattcctccatccatgagatttctcagacaagaatactggagtgggttaccatttccttttccaggggatcttcccaatccagggatcaaacccatgcttcctgcattggcaggtgggttctttactgctgagccaccagggaattcatattaccatgttaccattcaattgtattctatatgtatggtttcttatgattgctttttagttataaacagagatgagtagtgtatataggttacagtatctttgtactatcctcagatagattaaaaacagcacatactgacagagcctcaccatgttctacttctaagtgtttcatatttaataagagacactatagtattactgttcacatgctagcccaaagaaaatatacattaatatatgttgttgatttttctaacctttctttctacaactcactgcatatttgatttctacatctgagtaagaatgttacttttggaatgactctgatactcagattgctgaaatgtctctttccctagactatactatccaaaatagaactttcttcgtcttccatgtctcccgatattacagtcactttctatctgattactctattttatt

SEQ ID NO: 44306 - DNA, 789 bp, Bovine  19866881569578
  misc_feature (1)..(1): n is a, c, g, or t
naatcgtatctattggtaagcagattcttatggcccccacccattggttactacatactgtgggttaattggttttataagtagttaagttcttattttcttacagtttcagaaactgaggcttccctgggacttgggagttagagttgattttcctagcacaaccttgccctatatacagggtgttgcccttctcatccactaacctagcataatattttccaccttcctaatctttgtactaacataattgcaataaattgctgctgctcttgaagataatctctcttctcacatctgggtttaagtctttctttaagtaaagctacttaagcaatggggaggaaagagcttttccataaagttaaggtctttcctgataaaggtaactactccacccctccttcccagttagatcccctgccagcaatagcatagacttgagttagtgccaaatgttttaatgccataaggactcacttgataaaggctatgcatggcagaggaaaaaacaaaattcccaaactttattttcaagatttccatatgagatgcagttagggcacccttcatctaatagttaccctgtgtttgccatagtcattggtaccctgcaattctcattcttcagctcttctagagattagaaattataggaagtgctagccatgtcaaaatgcatgtctactctagctacagagaatttgacagaaaggcaaagaaggaacagctgtgagattaatacctgggatcactccaaataattgtctgttagacagcagcactcaa

SEQ ID NO: 44307 - DNA, 1592 bp, Bovine  19866881593469
  misc_feature (1)..(1): n is a, c, g, or t
naggggaaagaatgctattaaaataacttcgggtatctcgggactcctaccaggaatcctacaggtcttttgattcaggtacagaagcagtaacattaagggaggtcaaggtgctgttctgttccgaagaggagactttccgtaggtccgcgcatccctcgtcagcccatggtgaaccagtgccaagtccactaccagccactgggcttcaccgggcctgtgcgttctttcttgttcctcaggctctgcctgcacgctggtaggcctggctctgccagaatgttcattctgttgctgtggaaaggcctgcagtttcaacagttgcaaatcctgttacaggaatagcactgagcctaactgggggaagggggagcctcctgtgcctcttacgttgagcctgagtattcaagagtccttcaaaacatcattctccatttattattccgttggcttcatgggtgcttctgtaggacagacataggtgaggaacatggagaaactgccaaaacccagggggaaggaaagtgagagagattccatgctgcctgagtcagctgtaatgggtagaaagcctaaagatcttttttcttcagtgatcatcatttgttttcatttgttcccatggttatcttcccctgtccaattgttatttttctactactttttaaaaaagcatcagtgagtgagccttaagaagcaaagaagattgaggtgctctaccagactctgagaaaattcaaagtttgcgactaaggtcccacctctgagctcatgtttttgttttgtttctcacctgtatttggctgatgatctgacaccagatgcattgtaaccattggaaaggcagtacaatctcttgcttcctagattgccactggcatttttgcctgttgttagagtaaccactggagaagcaatggcaccgaactccagcactcttgcctggaaaatcccatggatggaggagcctggcaggctatagttcatggggtcgctacaagtcagatacaactgagtgacttcactttcacttttcactctcatgccattggagaaggaaatggcaaccccactccagtgttcttgcccggagaatcccagggacgggggagcctggtgggctgccacctatggggtcgcacagagtcggacacgactgacgcgacttaccagcataccagcagagtaaccacacttttccttgagtttctggtgttttatccattttgaaataagaggagaagggacaagaaggaattgatgataaagagatgatgcctgaaaatggaaagttcacagatgaaagtgcagtacgtgtgaccttctggctcaagccaggtggttgggtgtggatgtcctgtgtatcccccatgcagttagcactgcagtggtaattctcccaacgcagccactctggagtactgttccttgtttttctatagtgcttgtcagaatgctatgacaactggctggttttatgcaaacagagcctggctctcaagagacagtgtgtctgaaagtcaaacatggatggcagccattggcacgcaaaggagtcagaagccacagatgttttctcgtggagaacagct

SEQ ID NO: 44308 - DNA, 927 bp, Bovine  19866881644481
  misc_feature (1)..(1): n is a, c, g, or t
nctcttttgcatacccagcatctaggctaatacttggcacaaacacatttgataacactttgacatatgaatgatcaaacaccaaaagataagtgtatgttccttgactattactttagactatgagctccttgacaaaaacatttaattataggacaaggctgcccggtggtgatgctttcctccaagtgtctccttttggattacccaaaattatttttccttcataaacttagaaaattttcaatctgttacctaaactttcataaatagtaggttggtgatcctgtaccaccaggaagatagattagatgacttattggaattttccagcttcacagcacaatttcaggagcattaataagtaaatattatactaactggcaattcagacagcagttataattttagtcctctttgtcatcactgccttcatttcattcttatgaaaatatcaatgtgttttgggaggtcttagggaaatgaaccaaacctatttagctagaacaactcaatcctcctttcttttaagtccatatccttttcatctgtggaccaatgtagaaaccatttccctcctgcaaaggagcctgcctttgccaagccaaacagcaggcacaaaggcaaatggagcgggtgccctggctcagcctctaggccctacctttgaggactggcaacaggcgtcttctcccttcttccaacaccttccacatgatgctcgctgacctccagtggcagttccaagttctttcacaagtactcatggaggccagttggatttctcttgaacagtttaaattgctccacctacctagtcaagaagaaattcagaagttacgaaagttctggaatcaatggcttcttttttatacagtcgccgactaaaatagcaaaaacgttaagcagaaggaatttcaacattca

SEQ ID NO: 44309 - DNA, 1524 bp, Bovine  19866881667781
  misc_feature (1)..(1): n is a, c, g, or t
naagtttaaataaaacaaagtaatccaacccaaagccagcattccaacccaggggacaagcctggagaggggcaaagccaggtcccctggggcgttctccacaccacctccctcatcctggaggaggcaatttaactttacaactttcgagaaacttcccattagaagtggttttaactttagatttattgcattttccaaggttacgtcatttgggctgtgcacaatccagagtgactccaggggctacactgtaaactgttacaataaatattaacgaagagtaggcctgataaaacctgtaatctgcacacacgcacccacacaaaaagggacttttcaccttatatggttactttaaaaaatcgacgctttttccgttccactttgttggtctgccaaacacgcagagtacatctactttaaaaacaccaattaaaaatattaacaacacaaaaatacataaaccgtggttcagagccaagggcacataaattgacatggattcggatggtaagtaaacataaaatgagtaacagaaactactacatcattcaaaaggaagcaggaacaatagccctacatgtcgagcccattccttcccgccccccacccccaccctcagtactccaactctcccactccagagggcaaggtaatgattaggaggcaggcaaaatgattgaatgagggagggaacgaggaaagacctgtaggaggtggggagaaaagcagacgcaacctcatttcacactgtaaccttggacagccccatgggcttttttactccttactagaaacactgcatctcaagtgctcaaaccctcaaacactagggtggtgtaactgagaagcagccgtggagagaaagctgggttgggagttatagtctttggattggcaccactattagcatctagttcctgtcacttaacttttctaagccttatcgttgttgttcagttgctcaatcatgtccaactctttgcgagctcatagtctgtagcatgccaggcttccctgttctttgctattcctcatcttaaaaatggggatcctaaaacccacctcattacaaccttgataggaataactaaaaccagatatgcaaaagtgaagaatctagctagaaaaatacaaatccctcaatgattccatttgtctgttcaaacagaaaagaactgtttccttctctggtacctgacaggctgagctatcactattttttcaaaactgaactcagcccaggacagagtgaagctcatcagtataatacgagaggcatgatgctatacacaccgcagacaattaatgtgtgatgataggagacagccagaagatgaaaggtgaaggaaagaactaggcataatcccaacatttctttctgcaagaggaacagacatgagccctcaaggccttttccctgcacttcctaggggtggtctgagccttactactaccacagtgaatgagcttgaggtctcagccagagaaccacgttcaatgttcataatcttactgctg

SEQ ID NO: 44310 - DNA, 1142 bp, Bovine  19866881832947
  misc_feature (1)..(1): n is a, c, g, or t
ntatgtaaaaccaattttatatagctcctagatttctaaattgaaaactgttcaaagaaattatctgttcacatatatactagtattccctctgttacaaattcaggatttttaaaaagaaaatgatccataaggatcatagaatcataaacatgataagctaaaggttttggagaccacctattacttataaaattccccaatagaaaaggaaactgggttaataagccaaatgctaaccttcaacatgacggactcaaatagaaaataaacctatcagcaatttgcttatgaccttttaaaacatgttgcagaatcttgctcttccattgaagtttcatttcccactaactacaaaaaagaaatcagatttgacatcttataacttgcacatttaatgtaagaagccatgtgtacactcagagattttttgctaattctgattctcatatatttttattactattttctcatccctaaagatctttttcaaagttgtatatgggaaatgtcgagggtgataagaacatcatgagcacaaaggaaatccaagtagatgcctctatgtgcccattggaagaaagcaaggactagtgtttgtggctgcatgtaaagaattttcactgttgaaatcactgtgatatttgaaggggaaaaagtctctaaatacctaagtagttttagtgaatgtatcataaattacaccaaccggttttgccctcttcctatagagataatgtattaaataagtaagcatgaacatacattagaatgtgccagcttatggagttcctttcacccaaagaagagactccatttggtaactgctctgcaccaaataaatccagatatgaaaagcatatctttcagtaaagttgaagggcagatacaaaacagcatggaagcttatctgtcaaggaactgcagaatcctaaagctcaaggccatcttattcaaaatcctctcttcaaaggtgagaagcctagagaagtgaagtgccttgctcaatggcacagacagtaaagtgtggtttataaccagaactctgaaggtcaatctactggagttctctactgattcttttattctgtgagaggacataggtgagggattgttcttccgaaatcagaatggaatcccag

SEQ ID NO: 44311 - DNA, 1590 bp, Bovine  19866881835633
  misc_feature (1)..(1): n is a, c, g, or t
natgaggaaaagtgttctgcttttagagacctatcttatcctggactcaagcagataatccaaaatgatctccccatcccagctttcttaactgcatcacatctgtaaactacattttgccacataaagtaacatgttcacaggatctggggattgggatgtggccacatttggaagcccacaattctgcctaccacagtacccacctattaagaatatggaagagtcaaagtatcaagaaacaagagtgtgggactgtcaggagaataacctcattttaatacactctgcactatagcagcccaatcctgtgttcagtggctcttgctctgagacccctaaagggcaggctcagtggtctaaataaaaaatgatagacctgtactttgcttgaggcagagaatggtatagacagtagtgcccatgatgacctgagattaaccctttccatgtacaaggtagaggcttgagtgaacaggtgaatgaatggaggtaaatgaaatattgaccaaataaacagaacttgaccaaagtccggatacaaaaggtgattaaagagagagaagaatgaaaaaagctgacaatcaaggaagcagctagaagttcaagatcggacagtgaagaaagcatggaggaggattgcatgggatatcttccccactgtgctctgaaatttcattgtttttcagaatttctgttacagagctgtagggttaaacatactggcaaacagaaagcgagagatgtttgagaaaatatattaattatatgtttagaaaaagactattgggcagatgtttttcagggaaccaaaaactagacataacatttgtgggaaagaattgggggaacttctaattaggagcataggatcatttttaaaggagattttatcttcaaataaatctgaagagatagaaccatgttttaattatgaaatgatggctttgagcatgtgtaccctagatctccccagccagaggtttgctgcatctgggtccactgacttagtaagatgtggtggaaactgaaaactatactaaataacaacccctgtgggcaacacccgattaaatttctttctggcttttgcacaatggtggcaatggctataatccagaacataaacaaaaagtcatatggaagcaacaaacacattaacaaaaaaacttttttattattcaccagtccaaagaactttttgtctaagactttgtctgtgacttatttatattaatgagtaactctacccatgaacataaagcacagatgactacaaagaggcagcatttacgtagtctaatgattcccatgtatggatgatagatgtgcatgccaagtttggcattccatttcagaaattgatttaataggatggtgacaagtgaagtgtgtacatgggcagtcccatgataacccagacatttctattctcatctctggaaaatcaagtcattcattctccattaccaacgtgtttcagagcaacatgtaaataagtggcaaactgccacacactgaatttgctaaaatcagtcccatggtataaatagaaaccagagctataaccactactaatgcattatgcta

SEQ ID NO: 44312 - DNA, 516 bp, Bovine  19866882182272
  misc_feature (1)..(1): n is a, c, g, or t
nactgaatgaaaaatatgttgggtttaagcccctgtgggctttccaagtaaataaatgtgacaggcattggaagagactctggactagaaatacagatttggaagtcaccccttatcaatgatatttaaaatcaagagctaaagaaattatacaagtagagtatgtagaatgagcagagtaaagtaccagtggagaagccttgacaaatgcattcaagggcaaacaaaagaagaggaaccagacttccctggaggatcagtggtaaagaacccgcctgccaatgcaggggtcatgggttcgatccctgatccaagaagatcccacatgtcatggagcaactaatccaatgtgccacaactattgatcctgtgctctagagcccaggagccacaactactgagcccacatactgagcccacataccacagctactgaagcccgagcgccctagagccagtgctctgcaacaagagaagcccccgcaggtgagaagccaagcaccacaactgggagaa

SEQ ID NO: 44313 - DNA, 1485 bp, Bovine  19866880417721
  misc_feature (1)..(1): n is a, c, g, or t
nattgactgatttgatctcctcgcagtccaggaactctcaggagtcttctccataccatagttcaaaagcatcagttctttggcactcagccttctttatggcccaactctcacatctgtacatgattactggaaaaaccatagctttgactagatggacctttgttggcaaactgatgtctctacttttcaatatgctacctaggtttgtcatggcttttcttccaaggagcaggggtcttttaattttaaaaacagatgatacttgaattggatcatgaaggatcaacaggaatttgacaagcagaaaatgctgatctctgagagaggtgcatgtgccagaacgaagagtgtcagcctttgggagccacagacctaacaagacacagtggggagctggtcagttcccctcctcaggacccaaggagaggggcaaatggggaaggggcccacgagccgtgtggggcagagtgaccctccaggaacagacaaaaaagcagatccaagctgaaggtcgacaagcatttctgtgtgacctggtcctgagacaccagcttggctctcacaggagatcagctgcgtgtgggatttcctctgagagtctcctaattgctttgcgggtctaaacatcccccatggtgctgtcgggatcgctgtggacagccaactccattctgctaaacaaaaccagcaatttggaaaaattacagccctggatgctctcgctggcaccacaaggacaccctccctgctaatggctaaaaaagagaaaaaattggctggcgcagcagagcaggaaggcctccttgtcaatgcagaatgtggtgctctactggaaagcaagtgagacagagcaccatgaacttgcacgagctaaccagatggtggcatcttacaaggcggtggctctttctttttgaacaaaattgggaccttccgtcctgcagtgccaatgaaccacatgtaagtgctgatgagcactgtgtctggtatggccatgccctctgaagagctggacctcatcagactgggggctcctcctcccagggactctcagaaacacaggcctgtgagtacccgaattgtcagatctgaagctggatgctgagcgttactcggatttttgtctccctgcctgaaactggcctgtgatttcagtttctgaaaatttcagtttcacatcttgactcaaaagttcttccatttgatcctttcttaacattctaaacatatatcatagctcatgcttcttctccctcacacgtacccactcccgtgagtcttggtcacatatgtggatacagacaggtgctcaggcttcccatctgagacaggagcgagcggaagaataatctgacagacactgcatttctttcgtaacaagtgtaataatgctaacagcagagtaagcagcattctcttgttctctgattccctaaggggcatggctgtgagcaggtctcagtattatctcaacttctcaaa

SEQ ID NO: 44314 - DNA, 1662 bp, Bovine  19866880539978
  misc_feature (1)..(1): n is a, c, g, or t
natggtcctatgttatctatgttctgactaaagcactatttctgctaaagagagaaagaaaccaggccccttttccatgactgggtgctgtcagaatcattggcaaagttctcttaggaattccttacatgaaacaattagataagaaagattcagtttatgaaaaatacttgaggagatggttaattttttaagatttcatataaaacatcatgtgtttcaaaatcgttttcttcacatgtccatgaactattaggagctctttgagcaggcaatgttccttctcattcatccatgatgttacccctggaaatcggaaatgacttctactaacttcctcattattttcacacctgtgtatgggacccgagagtttcaccttctttcagactgagtaccatgtggctaaactgctggttttcattacactgcctgcatcgtgtatcccaggcttaacagcctggatataccacacagaagatggctattctgaccccagaaccaaggttcctttcctatcgggattgccttgttaaatagcacagatctatgtgctcatgcttagtttctcagttgtgtccaactctttgtgaccccatgggctataacccaccaggccacagaatttcccacataagaacactggagcaggttgccatttccttctccagggtatcttctcaacccagggatcaaacccacgtctgctttggcaggtggattctttactgctgagccaatggaaaagccccaacactcaaactcaagaacagagcatgagtctaatgttgtttgacacctgaattccaaggttgttgatttttactggtctttgatgggatctggaccatattcgagattgagaacaaaccaaaacttccaagtcatttcaagtcactactaaaaaataacatgaataggagtcatttactactatttatttgatgaactctcatactgcttcctggaaaaagttgacagtcacataatgatgacatgccctacgcttgggaattagctgtacttagtagagtgagttaaacccaattgcaacgcttaaagttatttatccattgccatgaatgccttgacttattggaacctactggcaaagcccatgctattctgctagaatgagatattttcaccatggtcaggcagaatagtgctgcaagggatgagaactgaatattcagaagtcttatttctcatgattgaggctaaggggactcagaggaccaaatcaattttctgacctggtaaatgacttaatatcccttcagaaattgaagacattataaatgtaatccattttaaacttttttacagtaggaataaagtaagaaatataattcctttattgggagttcttacaaaagaatcattatattttcaattattaagttaaaaattagcatattttaaatgaaaatactagttataacaaataaaggtgactggttgtaataatccactctcctattcataaaatcaaatttgttttaatacatttatgatgcttttgatgagaaataatgtcaaactgtggtgaggaaaagagatcaagattactgtttagaataaacactgttgtaagaattttagcatctatttagagaaagacatgccctagcacttttacaaaaatttaaggccagaatt

SEQ ID NO: 44315 - DNA, 1192 bp, Bovine  19866880649794
  misc_feature (1)..(1): n is a, c, g, or t
ntagtgtcttgtaattttcagtgtatagattctttcacttcctcacttacatttcttttttataaaaataactaggaacaaatattaacctgctaattctagcaacagaaatataaatatttgaatttgtttgtatatttttcaaatttaacaaaatgttttccatataattatgaagattatttaaatttttctaaggatcaaaaataaatcttactttatgcttttttatatttgtgttttttggttcacatttgaaactaagctgatgatatgttatgtgagtttcctaatgaattttctcttcattgaattaatgaagtgataaagtaaaacctagtgagaccttatgtatttaagcatatttccattaacagacattgaattgttacagagaaggaagaacctatcaaggttctaaggcatatgcatgttggcttaagtggtaatgaatttattatagaagcaaggtttgataatctgtcctaatacatgtcctaatacagtcctaagaagctgtctttacaaaggcatgtggtcatacagacctcttttctggtttaggagtgtattttctaggcagggagagttgatacctacatggagagagaccatcatcctcttttgcccaggtatctatcagtctgagtcaaataaatagattgagaatcaggtgactttagatttagagcatttgcgttgttgaagccatactgtggagactctaaacttccaaagttcctgactttctttctggaaatgccctgagatggaactggggtccttctgtgtgacaatgtgtgtcaccggccttgtaaattaaattcctgagcattatcacctcccagctctatcccgcccacttggaaagattgaaacacaagtttgatactgcaaacaaaaagttccatcttggggcagagatgtcagcagatgtatttaaattcacaagacataaatatcatatcacattttcaaaagagccgtttgggggcctattcttctgtttcatttcataaattcccaaagacagtgaaagacaaagcagatgagcttaattattatcttctgcttgagcatgctgtgagaggagattagggggaggggagaaggaggaagaaatgaaaaatccctgacacaaatgagtatttagcttacattttgaaaccatgctgtttctgccagcttcagt

SEQ ID NO: 44316 - DNA, 1195 bp, Bovine  19866880989738
  misc_feature (1)..(1): n is a, c, g, or t
ngagaggtaagttaaaagactgaaatttttttatgttttaggggtcttctaaagcatcagtgcacatatctgtaatgtttggagaaacatgggaaacacttgtctgtcctgatatatgacactgtcataatatggtaatgccatctgccccatactctttccctgaaattttatgttttatttagttcctgtacctgaatgcttaacaagtactctcctctagctgtatttagagattacagatagacatgcaatccacaccaggattccattgcaatctgcactgtctcgtgccctccacatgcagctgccggagagaagagctgcccgtgcttagatttatgctccctcctctgcaagagactacatgggcaccgctgcacccaccttagactaactgtacaattagcactgtgatagaaagtccctgagtgaacacacgctccctcgtgacatgattaactccagggactctagacaacaggagccagtcacaaagtgcaaactaattaactttggaggacaggaatgaggacaagggaggtcaagcagttggcatgctggccacagagcccagagcagcagaaatgaaagttcagctgaagcagtaggaatagaaactgcttcaaatttaattttgtgatttttctctctggttcttttgtcattttttctggactttatatatatatgcatatggagtggtaagagtacaggagtacgggatattgccgggagaaatatcaatcacctcagatatgcagatgacaccacccttatggcagaaagtgaagaggaactcaaaagcctcttgatgaaaatgaaagaggagagtgaaaaagttggcttaaagctcaacattcagaaaacaaagattacggtatctggtcccattacttcataggaaatagatggggaaacagtggaaacagtgtcagactttatttttttgggctccaaaatcactgcagatggtgactgtagccatggaattaaagacgcttactccttggaagaaaagttatgaccaaccttgacagcatattgaaaagcagagacattactttgccaacaaaggtctgtctagtcaaggctatggtttttccagtggtcatgtatggatgtgagagttggactgtgaagaaggctgagtgccgaagaattgatgcttttgaactgtggtgtggagaagact

SEQ ID NO: 44317 - DNA, 1419 bp, Bovine  19866881037311
  misc_feature (1)..(1): n is a, c, g, or t
naaatttttattaaattactctctcgcacaaataatcaacttggttattcaggctatatagattttttcagtaccttaaagggctaaatgaatgcttctcttatcactatgctgtctctgacgcatcagctggaagactacattctatccagaattattttggccgtgcagcaacgatataatgatcaagctgagggttaattcaatccatatatcctgtgggactggcagtaggagaaacaggcaaaatggactttgacaaccaaagcacaatttcaaaaattactaactacatgtataattttattaaacaacagtgtcaagcagctggattaggaagagctaataggttattgtttgtaaaaagtcaattaggaatcagtggcatttaataaagctgatttttcaggatgtctatcaacatcatattttttataatttgggaaggtcacattttactcaccttattaaaaagattctaagtatatgaattatgatgaaggtattcactgtacaaatgagtcatcagtgtgaagaccaatcattaatatttcatgctccctaatattgaggaaggtgtaagttgtatgctggccttcacacaccaccttattttcattttatttatactgcatttatactgcctgattaaattattttgttatctctctaaacatggcaactttatgcaatttaattttgactaccacatccacaatgtatttccttgatgatgtggtctaagaatctgaatatattcatcgaatcctaaaatgttgaacatttaagttctccttggtatcagtagctcccaatgcaagtatctttaatttgctaaatgctttgcttgtgtttcctaacagtcccaaaccacagaaccagagcattcacccaactgtaattacaattcacaaatcatcttttgtagaacctgatcaagagacattgcaaaataattttcagaaatgcaatttttatcaccttctttactatctatcaatataattcataactgtcattttaaagctttaatttcctggtggatattgcattattgcacacccaggataaaggattaggaaaagccacatcccttagcgtgcacgttccagcagacaggcgtctgcttttcagagctttgcccactaagctgatctttctcaatcccatgccatcctaaagctaatttccacaccctctttctcatgcccatccggaaagaggtgcaagagcttaaaactaggaaatcatcttaagtgaatttccatataatttaactcttgactgctctgctgttcttacaggttttcataaaaattgacaggtcaagaatttaaataaaataaaggtatatatgtgaagcacacagtatcagtcagcgttttgagttttttatagcctgattttcctgaccagtgc

SEQ ID NO: 44318 - DNA, 1272 bp, Bovine  19866880111766
  misc_feature (1)..(1): n is a, c, g, or t
nctttgggactagaatgaaaactgaccttttccagtcctgtggccactgctgagttttccaaatttgctggcatattgagtgcagcactttaatggcatcaccttttaggatttgaaatagctcagtgagagacttcatttttgggggttccaaaatcactgcagatggtgactgcagccatgaaattaaaagacacttgctccttggaagaaaagctatgatcaacctagacagcatattaaaaagcagagacattactttgccaacaaaggtccatctagtcaaagctatggtttttccagcagtcatgtatggatgtgagagttgggctataaagaaagctgagtgctgaagagttgatgcttttgaactgtggtgttggagaagactcttgagagtcccttggagtgcaaggagatctaaccagtcagtcctaaaggaaatcagtcctgaatattcattggaaggacagatgctgaagctgaaatgccagtactttggccacctgatgggaagaactgactcatttgaaaagaccttgatgctgggaaagattgaaggcgggaagagaaggggacgacagaggatgagatatttggatggcatcaccgactctatggacatgagtttgagtaagctcccagaattggtgagggacagggaagccaggcgtgctgcagtccatggggtcgcggggagcaggacatgcctgagcgactgaactgagctgaacaagtggactagttgttatggtattttttttgcagcagtcagtggatgaaaacaggttcctgaaaacaggttcccaccttgagtgtgacacagcactgtggctcaagaaaccatagaaaagaactaaaaatttcatatccaggagctaataagattcaagctgaagaaaatcaggtcatagacttgagggaacttaacttgaactgttaaacttagatttctttttttcttttagttagacttgtaacaaaaaataggcaagagaaagtgatggacagaggccttcagaccttgtgtctaactttcctccctgatgctgcattgtgaaccccagattctttttttttttaaatttttatttacgtatggctatgctgggtattcgttgctacttccctggtggctcagatggtagagcctgcctgcaatgtgggagacctggcttcagtccctaggttgggaagatcccctgaagaaggaaatggcaacccactccagtattcttgcctgggaaattccaaggagaaaggagcctggtg

SEQ ID NO: 44319 - DNA, 3969 bp, Bovine  19866880350779
  misc_feature (1)..(1): n is a, c, g, or t
ngagacccaaatgcattatcattttaccactatccatggctgataaaggttgatgaccaactcaagttatcaggatttacacgagggctacagactttcaggttagaaaaagctctaaataacacatctgttcaatttcctttagatgatggtaagtctgggctagagtcaaggtagatacacacattatacctaactatatacatgtcatatatataattggaattattatatcatcatataatttccccccctaagtttctttctctggcaaggaggctgtttcttaacccctgctcccctcgccaactttggcatctgcatgggaattctctaataccttcagccaggtctccttcatctacatttcccacagagtccccttcactcaggtggtcaactggtggctgtattaacttattttcctactttctgtattttttaaaaaagatttattttattgaagtctagttgacccataatattgtgttaatttctgctgttcagcaaagtgattcacatatgcctatatatcaatatgttctttttcatattcttttccagtttggtttatcatgaggatattgaatagagtttcctgtgctatacagtaggaccttgctgttgatccattctatatatacatgatactttgcatctgctaatcacaaactcccaatcctattttctgtatttttcatgttctgacatctaaggccttgctgactgtgggtggcctgtcccttgcaggattagctaatttctacggataaaaatcaccccatgaggaagaacaccttttctaggcaaagcctccaagccaaagccacacccccaaggacctccccctttatagctcttacattccaggccaattctctcttgcactaattaccgttggacagtctctctggagaaaagtctctctatcctgaagcctgatgaaacattcaaaatagccagtcctaaacctgcttgggcttccctggtggctcagtggtaaagaatccacctgccaatgcaggagatgcatgtttgatccctggatcaagatgatcccctggaaagggaagtggcaaaccactccaagattcttgcctgggaattccatggacagaggggcctggtgggctacagtccatggggttgcaaaagagtcggacataactgggcaactaagcaacagaaacactcattcgttcctgtgaaatgaaggctcttgttctgctgtccctcctcgctctctctgcctcctgactaacctggaacttcctgtatggtatgctgggcctctgctccagggatctgtgagtataaaaccttcttcctcatgacagttatttctgtttctgtgtgttttaccacacctgattgaaacaaaccccagtacattttaaaacagcagaactgagtgccctaagtcaacagggccttgctccaggcagccaggaggctgttcacttaagaggacatgttactcccagcacctgagtcaccagcagtggaggacatgttaccgcgagcctggaggaattccggaaccagggggaagcaggggcttcctaagagtgggccaatgctgcagcaagagccatcaccccaggggccgccacccaagaggcagggacattctagtgggtgtgcatcctcaggctgaggaaggagcgggcaggacttaccttttccaggagagcattctgccagagccggaacatcatcatgtacgtccgatcccgggccccgaacgaagtgaaaaagtgctggattgaaagagagcgtggcaagaaatgtctgtgaagacttacaaaataatggatggagacatgggactccttcctttaaaaaagctaccgagggatcttcctggtggtccagtggttaagactccatgcttccaacacagggggtgtgggttcgattcctggtcggggagctaagatcccacatgctgcgtgacatggccaaaaattaaaaaaatatatatatatttaaaaagctactaatccatcctcaaatactgcacccacgatgacagcacagggctccgcagtgaaaggggtcagttcgctgagttacccactgtcgtcaagtcctttgccatggcccaggcacctgggacctctgagtcacccactgtctctaagtccttcaatgttcatccaactctgctcagtgcttctctttctggtttgaagttttcacctccataaaaagcttcctttgcctccatacatagattggtaagtggtgagctgggaaccagcccaaaggaaagagaaggtaaacccactaatcaccctttgattcattaattcagcaaacacttgaatatcagtgtgtgccctcttctacatgtacatacactgacgcatgtgcaaacacttttctacatattttgagctcagtaacaaaacagaaagaaactgctgctcttaagaagcctacacatttgtggggaccttttataatatgcgggaagaatgcgacagaaaaccagattttactgaagacattctaggtgcttcacaaatactacttcatttaaaccacactaaaaccttggaaaataaacacaacagctaatattcaataaagagaaatagggtggtgatggtaggtgacccctgtaattacaaagctacttcatgctagaagcagaactcgaagcagagactattggactttgaagtctcagggctcttgatcctgaagtgcctgaagtcaaagggtgttatagacctgtgttcagtccatctctagccctgcaagtatcagtcttcagggcctggttaaaggtcaaagatcacagtgctttctgcactctagattttatctaccacatcttccccatggcaacaatatagacaatccgtttcctatcagactcctcactccttttgatgagctgtcctgatacataatgacacaacttccgttgtttagagctttacaatttagtgttttcaaatgtgggaggtcattccaagattctgacaaataggcatcgctggctccatttcacacataagaaaactgaggctcaggctactcccgtagccacgggactctatttcaggtgttctggctctaagttcaatgtcccagcactccactctcatgtctgctagactctaagcacctgcccaccacagaggtggttcccacaatccacttcactctaccacctctcaccccaaccctactggtctccccattaatgcgactgaagggcaggaatccaggagtagagggactggggtttgggggagtagtaagtccaagatcagactctacttaccttttctgagtcagtgcaaacttggatggcattggggatgaggcgagctgtcttttctttagtcatggagcagatgtctttcaaacgcacagttagctggcatccacacagaaacagagaaaggaaaacaagaggcagcattaatagagtcaggtgaagagtgttctccaggtaccagttcacacagaggaagtcagatcacaggctatatgcttctcaaccgcgaaggaacctcctcagagatcacttggttgagtcccttatttcagaggctgtagagcaaccctcattgggagctcaagggtctcttgattcttggtccaaggagcttgctttctcatttctacacagcctgataaacatgcatggatcccatcagaatctgccacttacagaaacacagaaccctggcaccagatgagaccttacagtcacttatctatcatttctcactttattttgtaagactaggaaataggcaaatgaagaataaaggactagcttcaaattgcatggctaattggttgcagaacccagaaagtacaagccagttctgctgagttgcaaggtcaagtttcctctgactcttacgactctgcttctgtggtggtggtttagtcacttagtcatgcccagctattgggaccccatggactgtatagcctgccagg

SEQ ID NO: 44320 - DNA, 1735 bp, Bovine  19866880360109
  misc_feature (1)..(1): n is a, c, g, or t
nttggacacgactgagcgacttcactttcctttctcctgcattgtaggcagattcttcactgtctgagcccaaaggaagtccaaagaaggctgagtgctgaagaactgatgctttcaaattgtggtgctagagaagacacatcagagtccctgagactgcaaggagatcaaaccagtcaatcctaaaggaaatcaaccctgactattcagtgggaggactgatgctgaagctcccacacttaggccatctgatgtcaagagctgactctggaaaagaccctgatgctgggaaagattgagggtagaaggagacggggcagcagaggatgagatggttagatagcattgccacctcaatggtcatgaataaaaaaaaaagtcatgaatctaagcaaactctgggagatagtggaggacaggaggccctggagtgctccagtccctgaagtcacaaagagtcggacataacttagtgactgaacaacaacaacaaaatctcatcagctaataaccaggtatctgagacctaagagagactcatctaaactcatctggactttttgaggaagggcaaacaggataagggggcttctgctgataccaaagctcccgttctttgtagagttcaagagagagagagaagtctgtcctggatctctttgttggttgctgaaactgtcaactggaaaacacacacacacacaccctaaaaatgtagaactatattttgtactgaggactggagcctgggaaggcatcccctcaggaagctctgagggactattcctaagagggaaagaggagacaggatatataggagttttgtttctttcttctttttaagtaaaattaagacaatattctactggggaatatatgcaacagatttttttttaatctctccatatctacctctggtactagcgttttataggcaaattttaaatggacacaaatttttaaaaataatgaaagccatgttttgcttagggatactattatatatatactgtacaggttattttacagcagatactcgtctgccacatttcagatgacagaatgctaagcagtgagcttggcgctgtccagctagctgtttcttggcatccaccctggagagtctgtcggtgtgtaaggtcgagaccattttgtcaccaccaagtttcttctcagaggtgactccactgtgatagaacattcatcttcttaagatgcaaggcctggcaaaaagcctcccacgagtccactggctataacaatgttctgtctgacaaattctgttgctgcttctattacattactgacttcgggtgctgccttatttgctcgtttcttcatccgtccttttgctttgtttacatctttttcacgtctcttccagttgatctgcacatagccaccatcaccggccatctgaaggagaagaaagccaccacctaccgcagtggctgcaagttttcgaactttctggaacaaaaatcccgcacaccagccactcactccacccactgcaatctgggtggctactgagtatttttctacgataggtccggagctgtgggcaaacactcgattccactagtgttgtcttctggcacactcagttaaatccaacactttgtaagagtcaccatcactttcatattcttggggaggggaggtgccgggtcgccatgatattgccgctggctgaccgaagggtgggtcccaaccctcccgccgctccccactg

SEQ ID NO: 44321 - DNA, 2096 bp, Bovine  19866880411371
  misc_feature (1)..(1): n is a, c, g, or t
ncagagaggtggtctcctgagaaacggtacagtttagagtgagcgtctggccttcctctatggggacagtttccatgtggttggtccgaaaggcctctgtggaggaagagaattggggaccgtcagacaggcatgggccacactacacctgaattgagacaggggcttagacttgaggcaaccttgttcatcgtttgatcatttgtatacatttgttacagaaacagaagccaaagtcaacaccaaaaactgcaaggagaggagggaagcagtgtgctagagcaatcaagatgtctcttgaaggagcataagtgaaggtgtgggttttgatgaaaggaaagttgaacagcgtctatgaggcacttgccttgccatatgctgggaattgtatcttccatgttactgatattaaactcagctttcaaactaacgctctaaagcaccagttcccaacctttttggcaccaggggctggttttgtggaagataactcttccatggaggagggggcaatggtttcgggatgattcaatgtgcattacacgtattgtgcactccattattattacatcagctccccctcagatcatcaggcattagatcccagagtttgggtggccctgctctaaaggaagagtggttttgctcacttgatgatgaggcagtacaggttcaaggtcacagaggtcctcaagacggcatcggtgcccaggtctgtgggtgtctaagcccatgcttgtataactgggtcggactacctaagtgatgagagcccagaaaattcagcttttctggcctctgtttataaaaaggctgactcgtgttttcaagtacagttgatggggagtgggtttcagagtctaagaaagaatgttatgtcctctggggctcttgtgaattacagagctgctcttcctggggagtaggtaagcccctggggtggaagagcttctccaccagagagtggatgttcttggatctcttctgatctaatattccacagcagcgctttcctgggcacatgtaagagtctgtaatttccccaaatcataacccccagagaatgagaaacaatagttctaagcagctgcaaagttatcctcccaaagaagaaattgatagaagaataaattggctttactgctgatttggcacatttattgccatttgttattttttcaactttaaaattaaagaattctttttcctgaggatgaaaaaattcttaatgaaagtacaaaacatgtctataaacagaagaataccatggggttataaaatatgaatagcaaatgcaatgaattttattgtatcatattagctgttaaaaaaaaaggaaaaagaaatgactttatttccttgtgataaatttcaagtattaggaaaagcacattgaagagctctgggaattaactgttacagactttttagtttgttccattttgaagtcattaatttcaacctagcctccagcaataatcacccaaaattattgtattcttattgactttcatgggaaaagagttagcttgagtcctgatggaaaaatactcatatcatcagccaatactataatgaacaacaaggattcaataaaaagagattgttttcaaaaaaaaccattgaggcataggccagaattctgcttaggcaggtcatttggaaatattctcatctataaaatcaacccatgattgggtaataaggataatagtagaaatgcattgaaatgacaatggaatttcttctaagggtaagcaactcttgagccaagaatctgagtctagaccaacttgttctgtatcattccattatacgattcttgctttatctctagcccttgtgcatgatcttgcttcccacagattgaagctgcaagagggcagtgactgtactttatatttatctacaattctttcttaacagaaactgtcacagtgcaagcttggcaagtaatggtctaatgccagctttcatgatgacactgtaacacaggcaatggatagctatctttgctctcctgttgttcataagaatattgacagagaggaggacagttcctacagaaatatatgataggataaaaactaatgtta

SEQ ID NO: 44322 - DNA, 1696 bp, Bovine  19866880419158
  misc_feature (1)..(1): n is a, c, g, or t
nttcctggattgaattccaactctgggctgaacagaagcttcaggaaagccagggagtgggggagtggggtggatggagcctgtggccactgtgatgagaatctgccctccttggcttgtgttggaaaaggcaggcaacctttgcccagtctctgaccctctcttcacccatcacctctctgaaccagaaacaccagtaaaagggtaactgatacccttctgcctttctccttggccaaagactttccatggaccttgtctttttgttaattggtcaattaatacattcatcaacaactgaagtcactgctaagatcttctccacaagtacttttccaggcttaagttaactccctaatgagaatgtatctagtatgtacctgccgtgtgctcagtcgtgtcctactcgttgcaaccccatagactgtagcccgcccggctcctctgtccgtgggatttcccaggcaagaatactgaagtgggttgccatttcctcctccaggggaccttcctgatccagggatcaaaccccaatctcctgcatctgcaggtggatcctttaccccgcatcacctgggaagcctccatcgagtacctagaaggcattagacggctggctgcagatgttttggatgggctctgctacctttcattccttttgtaggattttttttttttttaattaacttcacataggtacttgaacaagatagggatggaagaatgagtcagtggaaattgttggccataaaaagtgccctgaattgtctacacagtagctacagagatggggacccagtgagggacagtgcagagagggggtgggggctgggccatgtggaccctttgagccaatattggggtgaccattggccacatagtgagtctggagaattgtcgagcttccgtttgtaaagtgtccctgcccttggtctgatctggtaacgatctagttctgcgttcttggttccaaatttcaaacagaacctgtccctgaacactgtgtctatttcacccaaaggcccaacttggaaagcccccagggcatttcagcaagttactagcacagaaaagagggaacgagctgttcatctctgtcagaatcttggtcttctggcagtggagggagacccactctgtgtcacggtctgaagttgtattgtatgaattgtggcaggaaggaagagcattatccttaaccttgctgaaatgtagcatgatgctacattctggccagagtgtggtgtgctggaaccaggctgagagagacctgctttagcgtaagttgggaagagagcttctatgccataaacaatgcatgctgtatatgctgagtcacttcagttgtgtcccattctgtgaccccgttgactgtagcccaccaggctctccttctgtgcgtgggattctccaggcaagaataaaacagaccagcaaaaagtgccaacagcaacaaaagggcatctctttagaggctgtctggcccttctcttcaaccaggtaatcacagtgtgacacataaggcaccattggctttttctcccttaaacaaggaattggacccagtggcaaagttgttgccaggtctaggttctaagtgctaggctctcaaagagtgagctctgtacatggtcaccaggcggtcctcttaggggaactgtactacattttctgtcctttccaaaccccaccccat

SEQ ID NO: 44323 - DNA, 2589 bp, Bovine  19866880434472
  misc_feature (1)..(1): n is a, c, g, or t
ngtttgcctgggttatgaacacattagccctcaatgagtacagctattgttgaataaataaataaatagctgactgacctaacagaaacaccacaaaataaaaccacccaaacatctccaaaaaaataggaaacgtgagaaactttggcaaagaagaaaaagtagatcaggaagcacagaaatggaacctgtggttcttctgcagtgggtagtggtggtcctgcggtccctggttgagaataagcaaaataagggttaaaaagtgttgagcacttactcgatattatatcacgccttgtgtcattgtcatggattgttgacatcatggcttttttatagatagagccgaggcgtaagtgacttgctcagggtcacgcagcttgttcaatacggatttgaactgaagtctagtttcggaatccttgtgctgaaccacaaaaccatatctccaggactggtgtcaggcccgtgtcagttaagaatgcagcttttctctgctggtccttgtcaacaagcaagcagtttctctgccagcaagagattcttgtcttgtccttggcctggagacttccactgtgaaaatgagttaacacttgattcagctgtctgttaatggcaattctcatatgtcacttagttgagaaaggagaaatctccatttggtgggaggacagcaggaagcagctggctgtgggtgtatgggtgctcgggctccctccctgagaaaacctgagaatgttgatgcgcatcctccagggtccctgacaccatcagtcaccccgaatttctccagagaataaaccaggaaggagcagggaggggtaaatagaaatctgccttgtttcttccatctggcagcagacatgtttccttttgttatgagtgtaattagaatgaggagtgaaatgaggccacgttcccctctcctggggggtgggatttctccgaggtgtgcgatgtctttcctgacaggagggcatttacctcctagaggccgcccgtctgtctagcagcagcaggagttgtgatccaggatctgctaatgaaagagttgttgttgtttcatcattaaattgtgtcctactcttctgtgaccccctggactgaagcccaccagactcctctgtccatgggattctccaggcaaaaatcatggagcaggttgctgtttcctccaccagaggatcttcccgactcagggaatgaacctgcgagtcctgcattggcaggcggattctttacctctgagccaccagggaagcccccgatgaaggagtcctacaggtaaagcagcactgagtcaggcaggcaggtttggaaagcagggagggactttggaggaaaagtggaaggcaggataaagagcaggagtccagtcccctttgggattttcattgccatacagagcagaacccaggatggtcctgtctcctttgatcaagccgggaagtaatcatggagaggggatgtcaagagctgcttcagcagacagggagggaaagcttaactggcttccgtccccaggagagcaggggaggcagctcccatcctggcctggattagagggagaagggcctgggctggagagcgcagatggttttgaggcctttgtggtttctgggcacagggctttgctccctagcttttgctctcttcaccaacccccaccttatctcagggttgggagtaggatcagaacgaggcctcccagggcctcagtttctccttccatccagtgtggtttagtcacatctcactgggttgttgtgagaaccccagacctaatgcacgggaggccgtccgaaactcacgtggacagacacccctgtgtggaatccctggccgcccgcctccatctcatctccctccctcctctctggtcctgatgaagagggggtgggatgaagcctaccagagcttgactttgaccttgtccatcctattggttgcctggaggaaccttctggattagcagattgtgaaggaggagcgaagaaggctgggggtggggggggaggtgagtctgtctgtctagcaccctaagcaaatccctggggtgcagaggcagaaggaagcgtccttcaaatgatcagagcctggctggccttccccacgaacctctctaccccagctactccgtggcctgagccgcccctccctagagtggcccgcggggcttgagggcagaggtccaagcactggaggggtggggcgggctcaggaggccccaggctgggtgccaaccagagggcaaggccaatgcctgcagtccacaccgtcaccccagagccagtgactaatagtggcagagggtggggagaggagagtggaggagggagggcagggaggaagggagaaggcacggggaagtggtggggagcacctgatgggcgcagctctggccatctgccgtcccctcacacagcctctgttgaccgcagcgtggaattctggctggaggacgaggtgtgggggcttgttgttcaagtgttcaggaggctccccctcccccactgctcctctccactagcttcctacctccaaaatgctccttaaatataacgctctgggcgccgacgactccctctg

SEQ ID NO: 44324 - DNA, 1775 bp, Bovine  19866880511788
  misc_feature (1)..(1): n is a, c, g, or t
ntgccctcagcttcctcatctgtaaaatgggtatggtatttaccacatcatggagccatcttgaagattgaaggagatgctggttatgaaaaactgtagagacttccctggtggtccagtggttaagattccatgcttccactgcaaagagcatgggtttgatccctggtcagggaaataagatcctgcaagcacatggtgcagccagtaaaaaaaaataaaatacacggtgttgcaaggatttcatcttagaaaacaggtccctggtctgtttcatcttggagtgcaggtgcaggaaaggcagaaaactaaatctttccctggtatgaaggagcatggctaagtaggtagcagaggacctaaagggtgaggtagaatagctcttaggggttagtcctggaggacttctggaagaggtggtttccaaaaaagagggggctctatgtctgcagacaagaaggcagagggcattcccttcttcctcagagaaaacccctcactgagggagaggtgagatttgatctgggtgaccgccctggccagctgaatggtctgcagctgctgcgccctggagaggcgggcccaggctccgccccactgcctggcctgagccttgtggctgcgaaggggatgggcacccgtgaggcttcccttttgaatccagcctgtgcacgtgggcccctcacacagcgcttgcctcagccacaccacccctccccgctcaggcttcctgttttgaaactaccaatagatggaaaatgtgagtgctgtcactttaacggctcaggctgtgtgtgtgtgtgcgtgcatgctgtgtgaatgtgtgaaccaagtgtgagtgggggcaagtgtgtgagtgtgagcatgcgttagttgtgagagtgtgattgtgtgagcctgagttgtgagtgtgagcatgtgtgcttgtgtatttgtgtgtgagagaagagagagaatgtgcatgtgtgtgccgcatggcctgggaaaggcaactgaggcccagagcctgcccttgccaggacacctgtgggaagaggcctgcccggagctgtaccctccctgcacacctatctgcccagcgacacgagggaggagcacgtaaagttagtgtctgcatgagttctggggaaggtggccgaggcccttcctgttaactctctaaagctcatctcttagcttgtagaaagatcttttgttcctcaagctttaaaaagaaataatttcttgtcagtccagaaatggcttcctaaggaactagttcatgtaaccaacctcacttaaaaggcaggcagtgtgtccagtctgtgcctttatccccaggcctattatagttcctggcaggtagcagagtccagtggattcattatgcagatacttatggggtgtttactgtataccatgggttgctcaaggctcttgggattcaacacagatcataacaaaatctctggtctcaggtagctgtgggaagacaattgcagttccacgtaaaaagtatggcaggtgctgttagtgttggatggaagaatggattcattttaaagctcttggtttttgctgcgttctgcagtgtgaaggtcataatcaatatacttttcttcatttactaagataataaaattgacccatgatattttgagaaaagatgaatggacaggtttctcttcccttccatgcccctcccccagcccactgttggccttcctaaagcttctagcaccttccctccttctctacgtcacacctgctggtccttctgtcttcttggctggatg

SEQ ID NO: 44325 - DNA, 1228 bp, Bovine  19866880524447
  misc_feature (1)..(1): n is a, c, g, or t
naccgacattgtgtcagaacagccagagcaacactaatggtgagcagggagaaaagacgagggagaggactgaaggcttagtcacaggctggtgaatttcacacccccacctttggccccatccctgttcccctctttctcacacaccaaaccacaggcccagaaacagctggcctggcgccgggagctggggtaggtccacaaagaaacttcaatcgtccagggcagttgggactgatttccacaacttacagaggaagatggaggggaagcggctggcgagatgacatttctggggatgaatgacatttctggaactttgctttctctctctctgagagaagtgtttattaaaaaccttttttccttcagcagtgaccttgcaaaggaaattggcctcgctgctctgtagctgagagggagggcacacacacagcccctttgtgctgtatgcctgccaaaggatgctctggagggtaggtagaggggggctgctggctgcaggctgtcctcccgaaccagcctaagagactcggatcgagtgatgacagcatgtgtgtggctggaaagagacaagaggggacgaaaaacgagcccgggctggatttttccgccaggctagcacttctgtcagaccgcgcccgccgctgtcacgttccctgccttgtaggtttcatatatttaacagccgggacttataaaacaggacaacagaggtcacaggaaaaggatgggtcaggctcaggggaagccctgcaatttcctttcctggagctctctgggaccgaaatgagagacgcctgcactggaggaatgtcctggtcttccccttggcttgcactgcccctcctgtctggagcctggtccaaaccactctttgtccaagtcccaccctttccttaaaagcctctcctgacctttccaggattttacactccctgaggtcagagactctgaccaatggagtcttgctgattgacaagtgagaaagcgtacggatgcctgagatgaccttgaatggtactcaactccggtgtctgctatccctgtgctgttttttggggggtatggagggggtcctcagagttatcctccaccttcaaacctgagaggctaaactccagcttgtgttggtagtggatgcggcccgggttccaggagagagctggcaggaggagaggggactcatctgggagccggcctgcctggggggggtgacacaccaagg

SEQ ID NO: 44326 - DNA, 1259 bp, Bovine  19866880588916
  misc_feature (1)..(1): n is a, c, g, or t
nagaaaattggtggcaccttggtgaagaatccacctgccactgtaggagacaggggttcaatccctgggtcgggaagatccccttggagaaggaaatagcaatccacttcagtgttcttgcctggagaatcccgttgacagaggagcctggcaggctacagttcatggggtcacaaagagctggacaccactgagagactgagcacacacctaagaaaattggtagtatcagcaggcatggcaacatgcgctgtgactaatacgtagagggagcccctccccagaaagctctcttcccagtgggccaggggatggatctttctgtcctactcgagtgcgtttgactctcgggaaagcttgtatcctgctgaagtctacctaaccagtgagcacggttttagtggaggtgttggtgtacggtagggtgtgagtggtgctggatctatctgaatcctcatccctctgtccccacccttctggccatttcttgcttcaggttttaattatgtagacatcactgtccctcatgtgagagatgcagtattcatgagaggtcttgggttacagctgggtcacaggcaatccatctactcattcagaacccccaacccagcttccctggattaaagtctgggtttgggacctcagggagggcagagtggggacctgtgaatcatccgttctcccacattaatggttcataaaacacggacaagcattaattccaaaagagatatttaatagggtctcctgggtatttgatgaccagggtacaccacgtcttttacactaagaggctgacttaaaagacctttaatggtaccccctcatattttgaattcttcagagatatgtggacctctccagctaacaatttaatttctttttctcttccaaactttgtggaagactgttgtgtttctatgtcccacttgtgcttccttgaccccctttctctctgactgcagccaactgatagcagcttggccaagaatggactgtggggtcagaaactctggtctctctttctgctgtgtaatccagggaaattatttaatctctgagatacctcagtttcctcatctgtaaaggagagttgatgtgaggattaaatgagggagtacacattaaatgtataaaaacgatttggctcatagaatgccctagagccatggtccccaacatttttgatgccagggaccggtttcacagaaaacagcttttccacggacaggtgcaggggaggggcatgggggggg

SEQ ID NO: 44327 - DNA, 3125 bp, Bovine  19866880597838
  misc_feature (1)..(1): n is a, c, g, or t
nagccctgaccggactttgaatgggagaccctgatgagcatcaaagcttacaggacccaagctgcagagtgcaggctgctaagaactttcttgttggagtagctagaagtcaaaagtattctcagaaacttttgaaaggacaaatggtaaattctctaatttattccatgcatatttatttatttaaattattcagttattaaaaatagtgtattgggaccttcagggtgacttgaaaagggctatttgctggcaataaagtggtggaggtaggcctgactctgtgggattgttttactttggcttcagctcacaggcccctctcaggcagaagcagtgacagggaactctgcgaggaaccctctggatttctgggggtttgggcaggagagagtgtgtacacatgggaagcgtctcttggcttgcctcatttctaagaatcttggatcatttataggcattttctcaaaccaggagaaaaccaacacctctgttcactcccagacaaaagctgttcccttttactcgataacctgtcaaagagaagggacctcactcttgcagatcagtctgggagtgaaacatgtaaatgacatggtaacttgtggctggcagcctggcttgtaagggagtgttaaaactgccgtttctgaggttatttctccttgccagggcttttttttccctttcctacataagaactcagttatacaggagtctttctgcatcatgtagtgagacatgtgagtgtttgcactttctgcaaaaggttttgcagtttctagacaggtgagaacaatagtaaggtttgcagtccactcccactgactggggggcgggaattgacgaggctggtgttggcaaggccagccatgtctgtgactctctgctgccccgtccccatcctgggacaaaggggtagctttgcagcacagtaggatcagcagttgggagctctcggtaacggcactggtctgagagggtcaggagacctgggcctgagtcctggccccacctttggacaagtcacacacacatacacacgctccctctaagcttcagggcctgacctagactatcctaaggtcagctctagctttcacatggtcttggaggctgggtcagagcctggccaggctgggctttctctaacttggaaggcgccctgccaagagaggacaggccttctggacaagagcttctctggtgtttagatgagttgtagggtagtgtcagggttcccgggaaatccagggtagtaaaactttattctaagggctaagaggactagggaggtccactgaatgggtgggagagggagatgagaaagagagatcaagcttgctgtgttgttcagtgttaacctgggagggtgtttcttcctctgtcggcctagtcttagtttccgagggttccttccttgtaacttttataagctgggaagaggaggagggtgggaagaaggacatcatcttggactaaccttgtcttccatccctgggccgtgaagcctttcatctgtccatccttctttctctttgctagagcaaaaggtggggagaagtcattcctgatttgaccacctctcttttgtctctaacctcattggggtttggattaagtatggagctttggctaaaatccttgggttgccttagaacactgacactaagaacctgggattaccaggaaggcggaggaccaagaaacctagaggaatgctttgagagaagtggattctcttcattgccgtgtccatgacacaagcttgaccgtgtctataagtttgcaggcagcatctctagggtgaaatcttagaggcgggattaagggaaggatctttctggactgtgtggtctcagcaggatctttcctgtgccctctatgcttcatctttagctctgcagagcagccaaggccagcccatcttcccaggggcctcaggagaaaagcactctcctctcttcccccaggtggcagggcatcccctgactgcacctgcccactccactaggaagcttgagaacctctcttcctgaccctctcctcctccaaccttcgtctctaggcgatgggacaatcaccgcatccaccacttgcatcctctgccctcatcccccaacttccagcagggctggccccgctcccctccacctctagttttcttccagaagattcggttttgggtccgggaggaacatttttctggaaggccgtcttttcacccccctgctttcctgatgtggagcaggaacttgcacatggtgtagagagctccccccgcacctctctgcccacctcgttacctcactcctgctccggccatggctgtgacgggcccagccagctcctggttccgatgttctgtgtgaagctcaggggtcttgggcattgttgtctgttgtaactcgaggccctcagcaggcctgggagcccggattggagccttggctgctggcgagaagcaccttgcctgctaggagtttgatgccggacgatgtacccgacgtgtgaaggcgtaaaggacgttgtcacttctgcccctcggccctgcctacttctctcaacacgaggagatgctgcagaagcaaaacaggggcctctgctccaggcgggaacagctgactccatctggggagtaggcctgggtgccgcgcgccgagattgctgaataaaagcagccatcgttgccagcaccagtgtgtggctcccacgtttctctgtcctgcactctagggccagaccactctctgcatggacgatatcatcttcccaaacccatggtgctttccccctgactcaacctggactccaaggtggggagggatgggtcagaggccaccgcggctcctggataatcctgacctggggtggagtggggtgaggcagagggagcagcccccaacacctgcactgggccatactagggaaggaatgcagttgaattctctggccatctgcatttggatctgtaacttacttcgcctggcgctgtgcgcaaggtctgaaaacttactgctagtacctagaaacattcaaggcttcccggttcaatcttaatgtaaagtagctagagccatggaagtacagtatgaattaaaagaaaaaaatgctgaactacgaat

SEQ ID NO: 44328 - DNA, 1660 bp, Bovine  19866880612104
  misc_feature (1)..(1): n is a, c, g, or t
ntatacctgttatcctttgagaagctgtttatacaggagaaggaagaagaaaatgaatgtccagtgagtaaaatccctgtagatatctacactaaataatttgggctccaaatggactctttcctctgtggcaaatttgcctcctaaattaatccttacactttcttttttgccatccagacaatgatcgaaatcactctcatgaaacctgattggccttaccccggatctccaacccgtcacctggcagcaatgtcttttcccatttcccctgcttccacacaatggtgacactttgaagcagtaccaaggatgccgtctctacttaaaattgataatctagcatacaaacctcaagcacccatttttaatgaaacctttagatgaatatcaaagaactatttgccatgtctaatgttttaattcgattatattctcaatttaacccattaaacctcctttgatgatccccatatttagtgtttagcctcagatgcacgaggtaatgaatactggaccttttgatttaatgagaatttcggctcttccagcctgcgcctctttgtataccttttattttgccagctatagaattcagttaattgaaggggtctcctaccatcacacattaaggagtataaattagcatgtccattctgattggaaaatgcaagcagacagttttgctttgatctgaggactgagctgaagaaggcagcagccctctgaaaatgagctgatggccttgttatcagggcaaaatgtagatgcgtccgtgtgtcacaaaacacttaatgtcttaattgatcaccttccaattctccctgtcctgtgtgcagcattctctttgtgagcctgtgcgcacacgtgtgcacacatgtatttgtgtgtctgtggctctgttttgctgtctctatttatcttttccgtttctctgttcagagatcagggacccaggtttcaaattaatccgaaaccaagaaaaatgaaataacaaatcctttcaccttgaaatttctaagaataccctgtaaaactattcaggacctttcacagacaaagattcttaaggactaactaacttccagtactttcaaatgggtagatcccaagccattggtactacattactgaatatgaggtaagaggggatattctgtgctttggcaacgaagtcaaccttttagtctgttgtaatgataatgctactcctgaatttaacaaattcagttacataaaagaaacatcaagataaaagatcagtacctccattgtaaaagccagaataaacaaacattaaattcaaattatgagaaatctggataaataccgtagattgaacatacacacacgtgcccatgtgcatatctgtttcactcctttggcaagctcccactaaaatcacagtaacagctttttgttttttaatggcataaacatgtaagaacagggagaacgggaagagggataccagtagcgacttttgtaaaactagaaaagggatgaatagattgtaaaataataatactaattaaaagcctcaaaaaataagaaattgtaaccaagcaatggggagatccaagaatcaatctgatttatactacagaatgcccccaaatgctcaggaactgatgaggtcaattaccactggaagtagtgg

SEQ ID NO: 44329 - DNA, 1312 bp, Bovine  19866880672117
  misc_feature (1)..(1): n is a, c, g, or t
nccccttcctcctttctaactccccaaaatatttgttaataagcatcagcctcagatcaaaaagaaccagcctgaactttgagttgtgatagacagcaactgagaattttaaatggatatgaaatcacataatacagttgtcttttctctttcttatatacatagatgcaatgtaatttccaaagaatttctcaaatagggtcgtctgagtttagtttttcaagtaggtaaatgtggaaaaggagaatttcatgtgaattgagatcattcaggccattctgatcaacaatctgggtcctcagaggaattaactctttcactcaaggttttccacctaaaattattcagaaaattatttcagatttctgccttcctttgctcacacataggactgcagcccacctaaaccacctaacaggtcatcaaaggcctaagtccacagagagggagagagagggtaagttctgaactgtcttctgtataagtacagatgctgcccagcacacactgctacacttttcaaggaaatcggagatgagatgttcaagcatcattctgagcactgaaagtccatgaaaatttgtggagaatctaataaacattatagatctggtgacagtggacttacctcagtacaaataaaagaaggactggccataatgggacttttctcttaacacctgtaatgtacttcccccgttttgagctgaaacttgtaatcaatcatgtcagcacagttacttctagatccagaagatggatcagtgtgcagtgctggaagaaatcaaggtttgtttcttaaaatataaaattcatgacatctttctctaagtgacttaaacccaacagtgatcctcttgctaattaacatgcgtagccagcatcctttcacttcctcctgttttcaaggatcattaaattctggtttcaaatgggagcgcagatctgtttttatataccatgtgttttctgcatttgggttttgaagcttatttaatgctacaatatacactgatctgttttacatgaatgctctcttcaaagggctgggatttcattttgcaggtatatcctacagagtgaactacaccgtgccagaccactgtctgctaccgtcgacagtcagctagtcacacaattaactaggcatcaataactgatgttttggtttgattgtcgtttatttttcttttaaataaactccctctaaattcaggaagcaggtgtgatgagctaccacaggatgtggtagctcccaactttcctcaagtagccctacctacctattttaatatcatagcaaaacagacga

SEQ ID NO: 44330 - DNA, 1865 bp, Bovine  19866880701838
  misc_feature (1)..(1): n is a, c, g, or t
nggttctatccctgggtcgggaagatcccctggtaggaggacatggcaaccgactctagtattcttgcctggagaaccccatggacagaggagcctggcgggcttcagtccatggggtcacacagagtcggacacgacttaagtggcttaggatgcacacgcacacatccatcctgaactccctagctatcccctccccacattgttcctcctggcaaccgtaagtttgttctcttaagtctgcatgtctgttttctcttttgtaaataagttcatttgtatcatttcttttcagatcccacatataagggatatcataccgtatttctccttctctgtctgactggcttcacttggtttgacaatctctgcatccacccatgttgtggcacatggcattctttcactctttttaatggctgagtaacattctattgtatatgtgtaccacacctttatccattccggggaagggtggttttgaacagtctacattaatacaaagccaactaaaatttcaggtgtgttagggaacaagagactagctgacagtggctggagtctggaacttgagttaggaaacagtaggagaggcagtggaaaagaccacgccaccatcccacataccagccttgccagggcaacaggaagcacatgcaaagtgtgtgtactatactggtcaatgccaagcccacaggagttgacagcccctgaggaagctggcaagagctgcctccatcagaaagaagaaatctagaaacatctgcaaggacccacccagcagtgatagaaatcagggtcattcagacaagcctttgactggacttgccgatttcatcacccagaggtagctgctgtcctccccgagccatttccagggacaccatcgtgcgggcagccggacgacagagcctaacctgtgattagaactggcaaagcaggaccttctggctggaggagactatggaccacgtggccttaccaccatgtaggggagatgaggcaggggcatttgtggtaatgaaagttctcgcctcctgatgaagcatctccttaggggaagaagctgtcctctagatggcgtctctccatactggctagttttgcctctgagctgtatgtaactcaggttgccttcctgttcagtagtagccgagtgttaatgaacagcaacagtaacgatacaaccatcttcataacccttctcattttgcagagcacctgcaattcatctcatttaagcctcaaaatagctttgaggtcagtaaatgaggcttaccacgcccatcttatagacaggccagcttaaatccagggtacttaaggggtacttattctaattaaacattagtgagacttactctagagcccggctcacctgcacccagccctgagacgtgtctacttccttgtgtgccccaccctcactcacagcctttctttgtcctcagcctctgaggatcagcagccagcctggccctcagaagagatgcctcttcgtgtgtcggcatggtgagaggatggatgtcgtgtttgggaagtactggctatcccagtgcttcgatgccaaaggtgagtgggttggttggcctgctccgcattggcatacctctcacagcctctagggggcagcggcaagctacatttatctagatggagtcactgtgttgcagaaagtgccccttactgttacactgtaagtccttcctgatagtctggagtgttaggggagagagaattgtcctcgcctccagtctatcaactgggacaccacggaccacaaaaggcagatgtcttgcccagagccacaggacaggcagacgcaggagtcctattccaggtccagaactccctccagtaagtta

SEQ ID NO: 44331 - DNA, 1133 bp, Bovine  19866880794650
  misc_feature (1)..(1): n is a, c, g, or t
nggtccagagagaatgaattttatccctgaatcaagtctttctcttcttgacacagtctcatcctaagaactttaaagcctgaaagatgctgaattcttctttgtccacttaggatgtggtgcagacttcccccactggtactaaacacacacacagacacttctccccaagccttcctcaagctgctgcttctcgttcgctcgcccggttactcttgtagcagggtctctctccagttgaagcccccggtcggtccatgggtcagagggagaattggcgggtctgtcagctgccagattccagtttctcctaattcttcacaggaacaaaacccccaagtaggggatctgaaggaagacagaaaaggaagggaaaatagaaaacagaggctgagtgctttactttttacctggatgaaggaaaattcaaaagaatgaatggggcctttgcaggcaagcatcccctccaaaatatcactaaagaaaatgaaatggatacaactgatccattagaaggaagagtattcacaatgcaagaggagtctttggaagggattcgttgaacagtgggctctcctagtatagataagtaactgtttatagatgctttcttaatagcgtgggagataaaagcaatcatgcataaagctaaggtgctaagaattccttcccgattgcaagtcaggctgaaaatgcagctcaaaagtttctgaaattatactcggacaatgggaaagattattcaagttttaaaaatgtttcatcctgctttatgtcttattatcatttttttttggcatgtgtatctaacgttcaaaactgaagctctgcccttcctaccttcagtaggcatggcatttcaaaacttattcgtgtgtgtgtgtgtgtgtctgtccagagctgcatttatgaataagacaaaagtctctgccctcaagcaacttacagactaacagaaaggaatgacacatgaacaatctttttaaaaatgagaaaaaaattgcaatcaagtttgaactggtttctctggggacagatacaggaagcatgtaactcaggctggagggaagcatgcgtgggaggatggctgatggaaaaccttccacaggcaggaagaggaggaatccagatgt

SEQ ID NO: 44332 - DNA, 771 bp, Bovine  19866880827348
  misc_feature (1)..(1): n is a, c, g, or t
ncatgtggtgcagagcatctctgcacagcaggagaaggaaacagtcgccaagtgcattgcagatctaaagctgctcgcaaagaaggctcaagctcagccagttatgtaaacacatcctatccctattaagacagctagaaacagttgactgactaaatggaaaccagtcaatgtgataaaatctttctgtattgctttctactgaagttacagtttacctttcctataaatgaaaagttttgagtctgatacaatgagagaattgaaacaatctattggccagtaagatctttctctaattcatcttgcttgaataaaatttggtacctggctaaaaatagtcaaaattttagtttaaatttgtaattaattcagccatcttaacaataaagtgacagttgaaacaaacaaacaaaaaaaataaagccaaccacacaagacggagtgaagtagattaagctattgtggagagttttagttctttttccagctgcgtagtatatcattatatgtatatatacacacacacatatataaatatttatatgacatcttctttatccattcatctgatttcttttttaaaaattatttacttatattacttttggctgcgctgggtcttccttgttgcacgtgggctttttctagttttaacaagtggggactactctctagttgcagtgagcaagcttctcattgcaggggtttttcttgttgcagagcatggtttctagctgcaagggcctcagtatttgcaggatgtgggtt

SEQ ID NO: 44333 - DNA, 1030 bp, Bovine  19866880839912
  misc_feature (1)..(1): n is a, c, g, or t
ngagttttaaccactggacaaccagggaagccccagtctttaccagagtttcccagcggaagatgttgctgtagaagcagatccagttttcggagaggtagagtcggccctgaagaagaatgtctctttggagtgcacaggagtaatctgtagcagaatatgggagatggagctcagggacagggaggcttctcagtaaaccgctacaattaagcaagacaccgcctccccccggccccccgcccgcagccccagggagcccaactgcccaccacagactaggtgtgagagataccagcctagcggcccagggagtccctagcagcttctgattgggaacatgaagggtgtgaaacaggctactgcctggaggcagaggcaaggatgagacagcagaggaagcaagaacattagaggcagaaaggccaacataattcagctaacgccactccccctccatgatttccccagtccctcgctgggccatctgcagacacaagagtagcaacgactcctcccaggcggggctctctggagaccatcacacacggggctcagccctgagcccccatcactgggtcagcactctggatgtctcctctcccagttcccagacagacactctcacttggggaccctctagtcagagaagcagccttccttcctgcccccacacccaggtcaccccgctcaccaacaatgaggcgctccgtgtctggaagttgcttaaagagctttctgaagtcttcatttctctgcttgtatgtggggcttaacacctgagtgacaatggccaaggttagcggatgctgctaggttcatgggcgggggaggaaggtgcaggaggagagcctgcttgcatatttaaaggcaaagttgaggttccagttaaggcagagaccccaggaggccaggctaggcaaagggggctcagtgtggaaaaacatggtggagagaatttgaagctgccaagggcttcgtacccagtgttacccagcgtctatcagtagaaaacgtcaaccctactaag

SEQ ID NO: 44334 - DNA, 1733 bp, Bovine  19866880874573
  misc_feature (1)..(1): n is a, c, g, or t
ntcacctgtataggtaaaactcagaatttctggctcttcaggctcctgaggctctgggacgtctgggaccagaggctcttcttctctgacatgggagatctcgtctagtctggggattggaaaggctgctcaagagagggaaacaggacatcacgattggctcaacagtcccctgtgtcaagagcagatcttttctgttcggtagactgaagaaaaatcccataggcaggccattcaaaccttccgtctctttggcttgagcccgatgggaactgtatctcttgcctttcaccggtaactcagtaatcacaaaactggcagtgttaccctcttttcctatattcaagtaagtagaatactccaaacttttattgcttgcttcaaaactgatatgcttacctatgcgcactaaactaaaactcacattaaaactataatattacagctctattttcttgttcaagtttccaactactttttaggcattttctcttccctttaattttgaaagctatcatcttcttcagctgtcctttcatgtcaccggtagggtcagtgtaagagaagtgtagtatgtgcaacgaaagtctaagacaccctcagtttccaacaagaggaagatctttgtgctcaggacactctagaaacacttgaaattccttacacagggagaccacgattccacagtcgtcttccaagacgtattccccatagaactctttctgggttggatccagatcgctccactggtcctgggagaagcatacggccacatccttgaaagcgaccaagccctgaaacaacacaaggattccattacaatgtgatgcttcatggagcctcatatctaattcctggaaggaaggtctttgatacaggcacagtccatccaagagacagagaaactcagatgggacacctggttcctttcaggacacctgtgtttcattttctgttgctgcttcccaagtttctgctcttgcaactgaccctcttcctgttccctccaatccaaccactttccctcagcaccagactacactgttcttcccaaggatattatttacaatatgagaaaggtcttggaagtcatcattctaatggaatctgtatctctgcaaaaattcatcttttctaggaagttcttcctaactacccttacccaatcatgtaccacttatacagtctacctagcatcaacaggacttccctcttcagctctacaatctaaaaacaaggatgagctctattcctttattctccagccactcagcttagtttcagggctcctgacctggtgagctcttcttgaatgccatggcctgaatgaaagagaagagaacagcaaccaaaatcagaaactgattttgcaggccagtcacccttacaaatgactatcaagtttatttcttaaaatcaaaaacaaatcctcctttgacaacttcaaagttgtaccagagttttcccaaaacaaccccattttgttagtccctcaggtcagtggcaaatcaagaagctctggagcctgcagatccaactgagatgttctccgtgagatgcagctcctccccttccagacatgcgcggaactcagagcttaacctggcaatggacagtggaagcctgtgtcctgtctgatctgttcagtgtacgggtaatgctcaatggttcctcgagttccctgcgatgcagacggaaatgagggcgcacctgtgatagagcagtaagaaggg

SEQ ID NO: 44335 - DNA, 1094 bp, Bovine  19866880882860
  misc_feature (1)..(1): n is a, c, g, or t
naagtgggatgctcaggccagtccaagagaatataatatagctcttctttttggctaggtgagtgatcaactctcccttccctctgcctgttccattaagaggtctgctagaacaagaaatctggaagagttctccttgccaaattggtataatcccttcctgataagaatctctacaagccctgtccggagctggcaggattccttgggtcatcacaggaagaaacagcagttagtgtgaaggatgctaagcacgtgcaacagggccccatgaggtcagaagaatcacgggttctgtaagccagcccccaaaggccctcaacaactcactttcctaacccatggccttcttcctattccttaatgatctcatacctctcttgggccagaggccagggaaggctttgctcctcctgctagaacttccattcctaactcagataaacagggtctggaacagccccgagtggggcagacttgattggctttttcctgcccaaacccatacactggggccaaattcattccttccaaggcttgggtcttctttcatgggcaaagtatctcagatagtcatctcccttgactaagtaggttcctcaacgagaggaaatgatgctggcagccagaaagtgcatggatgttggtgctcactacttaaacaggagctctgtggtgagaccctccattccgtccatggctaatacattcaccttctcaaaccctggaggtcctagaacaccctgattcaccctagaaatcaaaagacagctcaaagggaaggggttagagccacagacctgacttacttacaatcactgaaagagaagtttacaagatcaaaaacgctccaccctgactaataaacaatgtgctcttagggcacagaggaaaaatagggctttaggcactaaaaagtgacacttcacccagatccagcctgggaaaagaccagagagaaggggtggggtgggaaaggaaggaacccccacccttactgggtccacgccccacgcaggttagaggaaggtgcagggagtaatggaggaggatgcccttcatcagaacaccagcccttaggagcctgcagccac

SEQ ID NO: 44336 - DNA, 881 bp, Bovine  19866880898198
  misc_feature (1)..(1): n is a, c, g, or t
ntagggaaacccttacatcttacagaatattcttaaatacattagatgatgtatggtgtgaattcttatccttactttacaaattgagaagctgagtcttaaatcaaggaaatgactattcacacagcaagaagtaggaaaatggggactcagctgtgcggtgtatctcacccggctccaggattccttccactgctctacgacttcttccccaagccacccttctcccccatggtctccctccagaacatctgaagaaagttagtgagaaagctgacagacacaagagctggaggatattaaagctctttgataacttctcaagttcctttagaccattgcttatttaagacacctaaaaataggcctcatacatctcaaagctcagtgacggctctgggtttgttggactgcgcattctgagtctcattctctcccttgcagctggagaggacttcacctctgtggtctcagaaatcatgatgtacatcctcctggtcttcctcactctgtggctgctcattgagatgatatattgctacaggaaggtctcgaaggctgaagaggcggcccaagaaaatgcgtaagtccaaagatgccaaaatagggatagcctgcaccttcagagcgcttgctctcatgggtaaggtggtgagcgatttacacagtcctccactttccctcacaacaagctttaaggtaggcagcaggcatatacccattttacagatgtgaaagttgagcccgagaccctttgccccagaccattataagaagcaaagcaaagtttgacttcatgcctttcattcttagccatcaggtaaggccatcagttggcaccacaatcccataaaactgcattttacgaccattttctagat

SEQ ID NO: 44337 - DNA, 1017 bp, Bovine  19866880917275
  misc_feature (1)..(1): n is a, c, g, or t
ncaccaccccacccaggacctccggccacagggagcactcccaagcctcctcctcctcccacctccacagccttcaagaagcagctccatctccagccagggagtcttcttcctcggagctgcacacgccaccttgcagggaatggcgaagttttccgagcaaaatctccagttgctcaaccagagaaaaagccaagtcacccacccatctgattcaaaggagaagagggagaggtagggttttatttttaaaatggaaagcaaaaatattctgaggactttggcggctacagtacagatacccacaccctaagcaagaggaagaagggcttgcaaagccccaaggtgtgtccatggtgggcaagggacatcaggcacgttagaggggagaacctgcagcacccctgccccccaactctcttctcagagagaagcctctaagaggtcagagactgctcaccaggggtgagaatgccccaggagcagggggataagggccccctgggatgctctcgggtaaagcaagtctgcaccaccagcttaatgcggacatacgggatcctgtgaaaggtttctttctttatccagttccctcagcgttcgccagccctcggccccctcgaagttggagcctctttttcagctgtagtttgattctctccacagcccctcaacttccaacaaacgcctcccccaggaagaggctggcagaaaatactgcagcggtgcagaagctggggggtgagccagatagggcaacccaactttgcagagtgtgtggaccccaccttcacccctcgatacccggctcagaagagggggcctatctgaaggagacctctcctgaggtcgtggaggtgctgggggggagcaggggaaggggggtgggggcaggaaacactggggtgaagaaagacagcggcagggggagctgcctgttccctggtctactcaccaggacagcttgaatcctttcattagtacagtcacgataatccactgaccgtgtccttagca

SEQ ID NO: 44338 - DNA, 1394 bp, Bovine  19866880936307
  misc_feature (1)..(1): n is a, c, g, or t
nccggctgctccaatcagcctaatgaaacaggatcacggcccaaactttctcaaagcgacgattggccaggcagctctcactagtctttactccccctaggagggggagcggggcggggtggtggtgggggagaacccgaggaattcagtccggaatcgccagggccacctaaggatacagggttgaggtggggaaactaggagactcttggggccggatctcctctaccgagaaaggtgctttctttcaatcacttggggtacaggtcggggcacaggaagcccggacacagtcagaggggggtcagtaaggttcctagaggctgcttccaaaatgacaagctgagaagagaggacagctctgtggaataagctgaagacagcagacatgacatatgggggaaggacagacaacaggacctgagagacacagggcacaacgggaccagtcaggaaaaggggggtggtctctacatcttgagtgaccccctccatatcagagccccattccatgcacagaataaaatcagaggaagatgagcatgaagggtgtcccagggaattgagggtactccctttacatttctgggggttgggtcaattctgcttccacttgcatggactgggtcacaaaacatctatatgtccccgggtcatggaacctagaaagttcactctctagacccaggttccaccctaagagactggccctagaactgatccacctcactgaggagtcctctgtcaagattgagtctaaagagcccagctcctatagcaaagaagttaacatgtaccctccctcccagcccagcccatctgcctttccagtaagtcttacatgtaagaaccaaagtagagatgtgtgtatgtgtgtgctcggttacttagtcatgtctgactctgtgaccccatggactgtagcccactaggcccatctgtccatgggacttcccaggcaagaatactggagtgggttgccatttcctcctccaggggatcttcccaacccagggatagaacccacgtctcctgcactggcaggtggattctttaccactgggccaccggggaagccccaagtagagatgggagctttcagacagaccaggaggaacacagataatgcaccttgaagtccaagatgcggttcttgtcttttctgccctttctatgagtccaggatgtttctgtgccaggatgaaagtcacaacagcatgtcacaaatgtccctaaactgaggagaaaccacattcctaaagaccaccagagctctgcgagaaaacacaccccttcagtttgtgtgacagctggcccctggatccaccatgccctgcagtgacacctggggagtggggcatggctccaggcatcctgacactgcacaacctccc

SEQ ID NO: 44339 - DNA, 1498 bp, Bovine  19866880940727
  misc_feature (1)..(1): n is a, c, g, or t
ntttcaaagagaaagttttggggaaggataggactttttcctatcagatacaaaggttacttatagagctggactgacatagacatacaacggggggcaaacagaaaaaggcagagagcccccaaaaggttaatgcctatataataataataaaacccccactggaacttccttggtagtccagtggctaagacgccaggctcccaacacagggggcctgggttctatccttagtcaggggactagatcctacatgccacaaataagacatggtgcagccaaataaataaattaaataaataaacaaataaaataaatattttttttaaaaactgaaggaagaatgaactgtccagtaaatggtataaggacaattctttatccacatagaaaataaaacagactaaacaaaaataagttgtgagaggatttaagacaagataaaatgtaaaactataaaattctattagggaatgcaagtgcatgcatgctatgttgcttcagtcatgtctggctctttgtgaccccatggactatagcctgccaggctcctctgtctgggattttccaggcaagtgcagtgggttgccaagccctcctccagtggtcttccccacccaaggatcaagcttacatctcttatgccttctgcattggcaggtgggttctttaccactagtgccacctggggagcccatggggatataagaaaatatctttattaccttagaaaacagaatttcttaaaatacaaaagacaaatcagagaggggaaagaatgataacttttattacactataagtaaagacagtcaacagactgggagaagatatttttaggacatgaaaccatgaagaaaaaagataaatatctcagaagagaacctgggaaagcaaatgaacagtcatatcacagaagtacacacccacattgcttatatgcttatgaaaaagatgctcaatatcaccaatagtaagcaaaatgaaaacatttttgtttcccatccatccagtttggctggtttaatctaacagtattaagtcttgagaacaatgtggataaatgagaagactcgtgcattgcttatggaaggaaaaaaaccaaaactcttgattctagtctgctgaaagggccattcttcttttctcttgggtaacacggccaggaggagatgcagagacctcctgttcaagagggcatccttgttcctaggccctcgctccttcccttttcctgtttcctcttctgaatacaaaatgcactgatttttcttccctgtctctcctccaacaggtctgactacctggccatcccatcggagaacaaagagaactctgcagtcccagtggaggaatagaaggggtcaacttgaggtgatgtacagggaaaggaggggcaggtagataaggaggcaggtgtacaggtggccttgttacgcacaaaccaaggtgacttgagatttggtcccttagatttctactctacatagagtcccca

SEQ ID NO: 44340 - DNA, 1150 bp, Bovine  19866880966967
  misc_feature (1)..(1): n is a, c, g, or t
nttaaaacttaaaaaaaccccaaaaacctgcagagacagaacaaagactgcttcttgatcctgaagctttcatcaagccaggaatgcctggctcttcccctagaccctctggtcctcttcctccccgtctccataatcaaatattcttcgtcctcagctgttgtcacagtaaccacttgaatcacgtggctgtcaatttacgatcagcttatggagctgcttgtaattcttactccaaggcatagtgacagctcatttagaactaatcaaacatttattaatagaaaaccaaggggcacaggctcttgactgaaattctttggttccttggcaagggcaagagcagggggaagtaactcacaggcgggggttgggaggccatactgtgtctgggaaagagtcttggaagtcagaggaagcctgacttgactgctctttagctgtgctttctaggcaagtaataaaacccagctgagtctccatttctttcaagaggctgttgtgaggcttaaagataatgaaaataaaaggcctggctcctaggaaggagttaatatccagcaaccattgtaaatgaaagttataaagatggagtgaaacaaaaagaaaatcatggtttaagactgaaaactaaatgagtgggattatttaatccagcagctactttcaaatagaagtactttttaaaaacttaaaaaaacaatgcttatttattatttggctgtgtcaggcgtttagttgcatcatgcaggatcttaggttgtggcacatggactttgtagttggggtgcacaggcttagttgcccccatagcatatgggctctgagttccccaaccagagattgaacccacgtcccctgccttgcagggtggattcttaaccactgtaccaccagagaagttcccagaaggacttttaaaaacagaggatacatgataccaggagaaaacagagacaagcagaactgcagggcaccgtaaggggaactcatgacagtgagatttgtttctttgttttgtttgctttttgttaccagaagcataactaagggaatgtcttgcaagatcttctctgttctgtggtccagggcatgagctcatcttcagggtctaggtgatcctgccagaagcccaacagtaaccagtata

SEQ ID NO: 44341 - DNA, 1331 bp, Bovine  19866880985862
  misc_feature (1)..(1): n is a, c, g, or t
nctgtctctctggtccttacagcagtaacatgcccatctttcctggatgaagtgcaaacaccttaccatggtggtcaaagtcttccacaaacttttctgtctccagcttgccagtttctgctcacaatcgatgctctaggaacaagacggcttatttcctccgtactctagatgctgcttctcgcatctatgactcgatggtgatcctcccactgagatgccttcctgccctcctgctaacttctactctcttctgggcttatgtcttctttgtgctcccgtaacatttggtacatagttgcattcttgagtaaagcacactctatgatattcatccacttacaagcctccccgagggcggggactcatgcttagatccctaatacctggtgtagtgccttgcacaaggtaagtgatcaaaccctgtgtgttaaatgactgagtgggacgaggctgttggctctgcgtggcgggtaaggaccagacctgcaaacagctgagcatcctggagaccgattggcctctatactctcagccacccctgagtgcctcctcctcaccctcccgcaagaagctgacctacctgccatgctgagcctgaccctgccccatcactaggccacacacccctccacagggattctaccttgttcacgttgttaaaccaacccagtgccctgaacctaatagttacttaataaatctcttttgaattgagttaatgcagtgtaggaaagccatcagcagtgtccttggcatatctgctggagccagtctttgggaagaagtagccagaaaaggctatgtggtcactctgggacacttacccacaagtctggcttgcatacatccaaacaccgtgattggagcatctttctcgtaatcccggaaaccgccgctccgctgaggtaagctgtgaggcatgtttaggttggtgcgtatgtagcggcctggaaagaaatgtcagaccaaggcgacatgagtttcttgtttccttaggacttctagtgctgatcctgctggcccctccacttccattccctttcgccaaagggaaatggaactgagctctctagaaaatactgacactcttcctttggcagagtgtcttcaaatccatgcgtccattctgctgacaaaagtaagaagagcttaagtctttttttcttaataactagtattcttttttctttttaaagtctttattgaatttgttacagtattgcttctgttttttgttttgttttgtttttggccacaaggcatctgggatctcagttcctggaccagggacccaatttgcagctcctgcatttggcaggtgcagtctt

SEQ ID NO: 44342 - DNA, 1038 bp, Bovine  19866880989790
  misc_feature (1)..(1): n is a, c, g, or t
ncctgtggaggttttgagcagagatgtgacagatttaaggagctacatttgggggcgttggcagtctagtggttaagaatccaccttctaatgcaggggatacaggttcaatccctggttagggaactaagatcccacatgccgtggggcatggtcaaaaaaacaggcagaagcaacactttttatcaggcaagtagtagaagttacccatagctacaacttagagaaaagtgaaagtgaaagtcactcagcatgtccgactcttttcaaccccatggactgtatattccatagaattatccaggccagaacactggagtgggtagcctttcccttctccaggggatcttcccaccccagggattaaagccaggtctcccgcattgcaggtggattctttaccagctgagccacaagggaagcccacaatgcagagaaaagatgggtacaaatttcaaagatagactctgaagtgggagtcactgcaatcaatctacacgtctgtcacggctgatacgctcggtaataccaatctctagtaaccatcttgaagagggagattggcgtcatcttgggttaggtggggtaagacaagacaacttaggatacgttttcgggaggagggagatttatagaaggatttctggctctcactgctgtggaatctaaatggattagtcatgttacgatcttgaatgtggaactacactcaagagtcttcagggacccagggtgacaagacaactcgatttcagtgaaaaagcagcatgttctttgaccctgagtacaccgatgttgaactacaatccctgaacacaggtcaagaaagatgtgaaagaaaaggaaaatgaaggcatgaggaaagaggagagaaagggaggaaacaagaggaaggttatggagagaaaagaaagaaaaaagtggggcagatctaggacggacacgaggtctgctcacagcggtcaagcctagcactgcccaaggcgcctgagctgacagagcagagacacgaggctgaaagactatagtcagtttcat

SEQ ID NO: 44343 - DNA, 1325 bp, Bovine  19866880992070
  misc_feature (1)..(1): n is a, c, g, or t
ntgactgagcgttgatgaccagaagagccctgacgcctgggaaaagccggcaagtcaagtccactctaactcaaacagtttggaaggctctgctctggctggggatcgtgctgcgggtgttttctgctttggtcagggtagcatggggggctttctttggttcagaacttctggcctcgggccccaccgggccgtaggcgtgggcggccagcccctgccgccgcgccgcctctgcgcatggggtccgctggctgcgggagccgctgttggcggtggagcgcgtggaggaggagccggagcgagagcttcgcgagcccgaggaagaggagctgggcttcaccaggcgggccttcggggcttccgcatcttctcgaatttcatttggtctttcttcttcctcatatctctttttgtctttccttcggatcaacagccacactaagaggaaaatcagcagggctccggccaccatacctgtcactgctcctgcaatcatgcccacgctctgtacatctgttttactgtacggtcactcgcaccacacagctctccttcccagcctcattgcctgctgtgcactggtagagcccagaggcggacatggtgagattctgcagcaggacacgtccagggtggttgtagtcaatcttagatttgggaggcagacgttcatcctctccctccttctcctagactcgctgccaggaatacacaatgggctctgtgccagaggatgactcacactgcaaagtcaggtcgcttccttctgtcagctctccttccaattcacacttgggctttgatggtctcactaaaacttttaagatgacgtagctccacacatagcaccctcaattcctcaccttgcaggtgtacccgccctcatcactgggcttcagaggctcaatatgcagggaggcatctcctgccaggaaattggaagcgaaggccactcggcccttgtgttcctcagtcaagttattgtagacgtgatggctggagtaagtgatcacctttccaccgcatacctttcttctgcctattcctagttttttaaggaatctccataccttcttccatagtagctgtatcaatttacattcccaccagcagtgcaagagtgttcccttttctccataccctttccagcatttattgtttgtagactttttgatgatggccattctgactggtgtgaggagctatctcatcgtggttttgatttgcatttctctaataatgagcgaagttgagcatcttttcatgtgtttgttagccatctgtatgtcttcttcagagaaatgtctgtttaggtcttttcccca

SEQ ID NO: 44344 - DNA, 1719 bp, Bovine  19866880992897
  misc_feature (1)..(1): n is a, c, g, or t
ncttacctagatactcctccctaggaatcctggcctgatccgccaacatgaaataattacaccttctctgctatccaaagctccagtgtgcttgccttaactgtcccgtgttacagatagcagataccatgccctggcacctgccttggtctcaggactgcttcagagaactcacaccaatgatcttctcttctcacaacaatcccatttgacagaagtaacagagatcatgcccaaggtcacacagctgggaattgaaaccaggtatattgcactccaggtctttttctattacgtcaggctagcccacaaaagatggggcttctctggtggctcagaggtaaagaatccatctgcaattcaggagacacaggaaacatgggtttgatccctggatcggtaagatccccttggaggtgggcatggcaacctactccagtattcttgcctggagaatcccatggacagaggagcctggtggggtcgcaaagagttggacatgactgaagtgacttagtatgcacacacgcatcccacaagagacaaagcctgggcacgcttattcacactcattcattgagaagcatttgtgtgtatagatcaggtccagacatggtgctgagagcctggtgtgggaccagacaagtgctctgcggcttaggtaagaaccaaggcagcaggtatgaattactgttttcaactgtgcctacatatctcatctatgagtttataaacttttcaaatatgtatgtgtgtcccacaattcattttttactatgtgagtaaatatttttctctttaaagaaatggacttaagtttgtatagatacttcttatgctttcagatgctatctcctttgagaccatctaattcttatcttcttaaaaatacaaggacttccctggtggtcctgtgactaagattctgcactctcaatgcagggagcccagggtcaatccctgatcagggaactagatcccacatgcctcaataaagatcaaagatcttgctcaccccaaataagacccaatgttgccaaataaataaataaatatttaaaaaataaatatagaagcctagttctggagagggtaagccatctgcctagagtcacataatggattaggggccggggcaagatgagaaggtgggcttggaccctggctaggttattttccacctgtccacagtgaaggtaaagccccaagtctctttgctactgcttaggcagaaaagtttacatattttctctcccagagttagttgtcaacatttaattctggattgtttccaggttggagccttcaagttcaggtcagcagaagcttgtgagttacagtgagaaatttcaaatctgacacttgccagttccctttgagctccaggtgagaaatgtccctggcctcgtccattttaatgtcacagtcatcctagcggaagagatcacctccaggtaaagtcattcaaaacaaaggtttgtcattttggtgccattcaacggtggcgcatcacagggccactctggctcacctcacaggttctgggtttcccaagcagtggggcttgagacaaaggccagttttccttgcatgtcttcccttcccacccagtgtggtcagacatatacccatgataacatagccgttgacagagtttcaaagtgctcaacctctaagaacactggacttgcagttctagtctaactttaaccactcaac

SEQ ID NO: 44345 - DNA, 1707 bp, Bovine  19866881014353
  misc_feature (1)..(1): n is a, c, g, or t
naggaaccttacctgaactctcacactctcttttgtcttctccaccccaatatgctcctgtgttcacaaagctgaaccattaccacaaacccctatttgtaggacaaataacaatcaagttacagagaaagtgattaatagttcattttcagaaagtctggctgcatccaactctgagatgccaagaatctatgacttcaccttttttttttctgacgcactcctaaaatgcacgactgggcccagttccactgggaaactaaataaatcaagaagacagagttgcctgtgagatgctgagaatttaggattcaagatagctccaactttgatttgctcttctttttcttaatggatgttctctttatttttcatggatttgtgaaatacatatcatttgcggttgaatctaccagtttttcctgtaaagcaagaaaaatttatttttattataggaaaatagaagcctagagaaggtaattggcttgaggttccccagaacacatctgttcgcttctttttattaacatttttattttgtattggaatatagcctattaacaatgtagtagtttcaggtggacagcaaaggaaatcagccatgcttatccatgtttccattctcccctaaactcccctcccatccaggctgccatataatgttaggcagactttcctgtgctatacagtgggtccttgttggttatccattttaaatacagcagtgtgtacatgtccatcccgaactccctaactatcccttccccctatcttcctcagcaaaaataagttcattctctgtctgttttgtaaataaattcatttgtatcatttctttttagattctgaatataagggatgttatacatatttctccttctctgtctactcagtatgaaaatctctaggtcattcatgttgctgcaaatggccttatttcattcttttaaatgtctgagtaatatcccgttgtatacatgtgccacatctttatccattcctctgttgatagacatttgggttgctcccatgtcttggctatcgtaaacagtgctgcaatgaacactggggtgcatgtaccctttcagaccaaaatccatctgtgtaatcaatgaaataccattatcagtgaaatgcacaagccaacagtgaggtagaagacagcaagtgtttggccgtcttctctcactgcctttcttcttgaaccagtgaatgggctgattaagttgtgatgttaaaagcctggatctggcattatctcatgagggggacttagctcctggcaagtgcaattatgagtaaggatgtggatttaactgttagctttggggacttccctggtggtccagtggctaagaatatctcttgcaatgcaggggatgccaatgtgatccctggtcaggaaactaagatcgtacatgctgtggagcaactaagcctgctagccacaactaaagaatctgtgcaccacaatgaaagatcccatgagccacaactaagagctgacgcagccaaaaagaagatgttagccttggcataagagaaatgcaaaccattttttttttttaactccaacttaagaaacactctgataatataggaacccttatacagaacatctaagtatgaatgggaatgcaataatgacttgttctttttcacaagggtcgagaatgagaaacaaggcaccaggaaaagagtctaagt

SEQ ID NO: 44346 - DNA, 1802 bp, Bovine  19866881042590
  misc_feature (1)..(1): n is a, c, g, or t
nttgcagttattattgtagccatccttattcaaacaccctacaccaagcagtctgtttggaggatcccctcaaagccccacaggccagtgacatcggcatggagtacctggattcacagcacaacctgtcacttgtctccatcttgcaggtgactcttcctctacatcatgactgagctctctaaggtgaaggggtagagaattcctcaggtccttaggaaatttcactttgcttgcttctcctactcaatgatctctttggccagcaggtgttctcctgcgtcttcatcttcaggttggcattattgaagctggccatttcccccatgtccagcttgtctgccattttcttaaaacaatccaagaggttatgctccaagcctacagtcctgctgctctcactggtgttgctgcagcaagggacctatttcattctcttagcaaataaacatggcacacttcctgcaagcatagtgccaggcagtggagcaacaacagtgcccaaggaatccctcatttcttattctgttcactgtatgagtggttccttaaccatcagggtttccgtggtggctcaggtggtaaagaatatgcctgcgatgaaggagacccacgttcgatccctgggttggggaagattcccctgggggaaggggataaccacccattccagtatccttgcctggaaaattcctggacagaggagcctggcgggctacagtcccataggatcgaagagagtcagacacgactcaagggactgagcatgcatgcatggcccattattcaacaaattcagatttagttaaaatctttgaagtgtttgctatgttaaaaactcttttgttttccttgggggtgggcgtaggattcagagataagaccttatctttatcatccctaccttccattcttatccgaaacagcacttgagatgaacaagataccgtggaggcaccgacctttttatagcatgtgattgaatgggactggattgaatggaaccacttggttcagttggatttgcagatgccttaacttctttttcttcccccgatccctccagggtgctctctggaaagtgcttttgatgctgcacaaggctctcagaaaccgattttcctttcaaaaatagaaactcatgtgagttttccatatctctgagggaaaggtttaattcagaaaaagataccttactctctcctcagtgtcctaaattcatttacaaaaaagcagtttgggaatttaggcagcaaattgttcagcccttgaaatgtggagatttgagtcaggggcaggaatgccatctggggaagcccggtcagctttgtccaggtcactgccaactctctgaggttcagctggcctctttggaggttgcactgtgacttgaggaaggatgagcacagcactgcaaatctgtaaacaccatgagtatgaaaaggccccttcccgcctcatggcaagtcagtagccttctattcatacacaattaatggttgagaataggactcgaccaagggggcctaggtttcagaaacatgctctaatgttcattaaccttatactgttggttcagttgctaagttgtgtctgactcttcgtgaccccatggctcctctgtcctccactgtctccttgagttgctcagattcatgtgcattgagtcggtgatgctatctaaccatctcattctctgtcaccctcttcttttgtcttcagtctttcccagcatcggggtcttttccaatgacttggctcttcacacacttagccagagtattggagcttcagcatcagtc

SEQ ID NO: 44347 - DNA, 1637 bp, Bovine  19866881067844
  misc_feature (1)..(1): n is a, c, g, or t
ncatactgtctcccccctcctttattttccaaaaggcagaccctgaacctgttttactctgtctgtaaatactactgaacacagcatatatatatatatatatatatatatatatatatcagtgccctgggtattggaaataaggcattgaagtactatccgtaattacccatttggctttgtccaatcttatctgtaacaggctcttggaagctagagaaaggattccagtcatttgatttcctcaaaaaagctgcatttgattattcagactgtttatgagctctgcagcagaagtgttcctgtagatgcaaaaacacaatagtttttctgatagacctttctcatacttacaaaagggtgcatacaaaagcctgcagataatataatgaggttctcttacttatttaattttttgattaatattggaattagagattttaattgtcacagaataacataaatataatttttttaggcaaatgcttttgtgaaccacaactttaaatatccagccagctgctgccatccacaagagagaatccctgttcatttttgtatttttctcaagatgagtcatagtaaattcattcccacggtgtctattcaatctcctgttcatcacaccaacttaaaggtccagtccacagagccatcttttaagaaagaagacttacatttgatttcaaaagactctttggaatctgattcagaaagccccactcaaaagatcaagtcccagtctgaccttgaagaccaaattcaggacaacgacatggagcctgacagcctagaggaggagaacttgagtgagacggaagaggaagcaagcagaaaagcagctcagagggccaagaaggaaaacctccacacccaagatgctgctgcaattaacaggtaagaaattggcttgtgtaagaaacagtgggttctgagatgcataattattggtactgtcccaagtgaaagtaaggacaggctcttgttttgggattttttttttatagtggatacaattgatttacaatgttgtattactttcaggtatgcaaagtgattcagttataggtatacatatatctaattcttttttcattcttgtcccattcttttcttttttcagtattaccgaatattgagtagaactccctatactatacagtaggtccctgtttattatctgttttatttatagtagtgtgtacatgttaattgcaaactcttcgtttatccctccccctgaacaacctttcccctttggcaaccagaagttcattttctaagtctatgagtctgtttctgaacaggctcttgtaacgagctcctttgtaatgtgtgtgagacagatctccaagaagttaaggacagcttagagccaagatttttgatgagaatagttattaacgataaggacatttgtatttcttatgctccttacttcctgtccatattccaaggtgctgcgacctcaccttggagaaatcccagaaagcctaatctagaaaagtgccatgatcatggactcagatgttcttgagtgggtcgaggcaatggtgtttagtgtataatttgaaataagtcccttttagtcttctgcagctcatgttttctctcctgtgaaatgagccagcctgctt

SEQ ID NO: 44348 - DNA, 1462 bp, Bovine  19866881080464
  misc_feature (1)..(1): n is a, c, g, or t
natcttgcctgccgcaactgatggtggtgcatgccgcaagcagggcctggtgcagccaagtaaatattttaaaacaaaagagacagagatacacagaggagtgaaggaaacatgtggtggagaagcaggagctgtcaggttgggcagagggcatggggcgggtcttgtattcagagaaaagacagaataaagaatgagctcacagccaacacccctcgcctccctcctcctcctcaggagcacatcagtgctgtctgataacctgcccacccgcagagacagcacctgagtcgactcttgttgcgggccacgcgggtgagcgtgtagcggttgatggtgtagaagtagtcgtgatacggtacatcgtgcgtgaggacctcggcgtcgatcacatagcactcgctctcctggctcgccttgtacatggtctgcagggaagaaagggtgaggggatggggctgaagaggagcaagacgggagaaacccctccttcccgacgacctcccccagcccgctcctgacttctgaactgggacccagaaccgagggaaacgcagcatctaagcactgtttcaggctgaacatcactcccgcccagatgttcatcctgacgtctctctcctgaatcctttacagcagaacagaggccgtgcccgcccgacctcagctcacctgcgtctccctgacggtggcagttttgggagctagagggttggtaagggtgatggtgtaaaggatcactcggctctggtttccattctcttccttcttccacggatggaagatgatatctgaggggagaggggagccaggggatgagggaaggaaaaaggcctgctgtccccacctctgagtggccccctccagcgaccttctctcggcctggttgccgactggcaccccccaaaggaagtcaaagggccgggggaggaggctgagaggagggggcgtccgagcagaaagaggctcattgtagactggccgaggacctacacaggctccggaatgcggattgttctggactagggcaggaggtcctgcgggccacctacgggggtgctggcaacactggagctactgtgatgggggcctgggatcctcgggaagaagccctctcctctgagacgtgacctcccattgctctcggcacgcccctcctcctggcagagggctgtgctgatgcccaagggctcctccgcaggcctggacgctgagcagccttactggtctccggggagctgcagggcgggagcaaggagcatccggtgcaaggcactgactctgagagccctaggtttgaaccccggttgggccccttctcagctgcatgatcttaggcaggtaacaggggtctgagatccacctccctccctggtatcatggggaccacaacaccagcacccagggcagactggaggattgaatgagacaagacagggttcatgagcctgctgggtgcaat

SEQ ID NO: 44349 - DNA, 1501 bp, Bovine  19866881134261
  misc_feature (1)..(1): n is a, c, g, or t
nacctggatttgaatctcccaggtaatctactgagtatagtgaacccctagtttcctcatgagacactagaaaatggcagttgtttggagatttttcactgacacagtgcctggtgcacagtgcacagtgaaactctccctgttagtgtcacaggtaaaagctgtaacgcacaacacaactgcagtcaactgtgattattttctaggttttgggcaaatgttgtgtatgaaatgctttgcatctggtaaaagcgtaagtacctgctccatgtaattatggcatccacagagcagtaggtttactctggaattcagctcagagattagtatcatttacagtagcgacattccaggctgccagccctacagagtagaacaagtaaagacaggcagttcacggttcagctgcctctcgggggagggtttctggtgacagcgaaagccacaggagattcgacctgagtaacctctgtgtgtcagcagaaggctcttcctctctctcccagggaggatgaagcgagtgccatgtgtggtttggggcacacactgtgcagagaccgctctgggatcaggaaagcacactgctgttctgggctgtaaaagcagtcaaagctgagggctctcgccctcctcctccacaggctccatccctcactgagggccaagaggtttcgttaggcagtcaatcagcattaagcactgatgcgtgagagtgaccagagattacgacagcggcctgcaggatgagaatccagagctgtacctgctcttttctggcctgatgaatttcatcacttcccatccactgtgggagagccctctgcttcatcttatttgccacaacttgtttcttcaagcacaagggagggattcctctgtctgcaggggatgggattaactgggcagagaccctcttccaattcctgctaatggctcacagtcagtgctcatcactccctgtactaagctctttcagttcagttcagttcagtcgtgtccgactctctctttaccatcattcaatcgtcactgtttacatcatcattatgtcatcagcttaggatcaccatcccagttagataagaaaactgacgatttaaggagcttgcccaaggcctaggaggatctcaaattgtagagtcaggatttatttttgtcccctggcagcatgtaggatcccagttccctgaccagggatcaaatctgtgctccctgcagtggaagcccagggtctcaaccactgcaccgtcagggaagtcccaagagtcaggatttgaacataggcactctgcctgcctacatccacagtggaaaattctgaaagagatgggaataccagaccacctgatctgcctcttgagaaatttgtatgcaggtcaggaagcaacagttagaactggacatgaacaacagactggttccaaataggaaaaggagtatgtcaaggctgtatattgtcaccctgtttatttaacttatatgcagagacatcatagaaacg

SEQ ID NO: 44350 - DNA, 1509 bp, Bovine  19866881252519
  misc_feature (1)..(1): n is a, c, g, or t
ngtctaggtacagaggatgttacagagattaggggaaagggaacttgagttcgggactgttatgtgtacaggattaagactgagctcagaactgtgactcctgtgcttaccttcatgcttagcctgttgtctgtcttcacttctctaccccaggttccttgggaggaaactcctggaggcgcctaggctgatagagggggaacgttgtgagctctcgatggtttgaggccacctcagagccagacaatggctactgccttggagccggaggaccaggatctttgggaagaagagggaattctcatggtgaaactggaagatgacttcccctgtcggccggagtctgtctcacagagggatgaccctgtgcttgagacgtcacaccagaacttccggcgcttccgctaccaggaagcagccagcccgcgggaagccctcatccgactccgagaactgtgtcgtcagtggctgaggccagagcgcaggacgaaggagcagatcctggagctgctggtgctcgagcagttcctcactgtcctgcccggagagctgcagagctgggtgcggggccagcggcccgagagcggcgaggaggccgtgaccctggtggagggtttgcagaaacagcccaggagaccaaggcggtgggtgaggagggggagtcctgatctgtgtgatgcggagggggtctaccggctggaaggatggctagggctcacagaaatcacctcgtaaacttaactgactctgcccttgggttgcacctagatccatatgccccatgggacagtggagtgtgtgtttgtgtgtgtgtgtgtgtgtgacttcctggttcttgaaacacctgcctggggaggccatctttgcggcttcatcaccaagggtgataccgctttccttttccctttcggtattgaacctcattttcctggtgggggtgggggtgtgggtagagaattctttgacttcctcagaggttctcagcccctcagtcagagaggcctctcctaagacagcagagggtgatgggaaggatggcacctcagagccccagtgatgggcagggttgagggaaaaaagaaaacagggcggtatctgaatgtcccgcgcccccgtccccgcccccgcccgttgttctggcgacagtaacctgagcttcccctcgcacacaccagggagactggacttcccccctttacctgggcccccctgggagttttctgatggcagcttcttctgatgtgagatctgtgacacccaggactttatcctgactcagcggtgactggaagttggaattgttcccaggtgactgtccatgttcacggccaggaagtcctgtccgaggagacagtgcctccaggagcagagcccgggtcacctagtgagctgcaggaccctgcacagaccttgacccccgaggagctccgtgaggagaccacacagagcccagatctgggggcgtcagaagagcagaccctgtgccaggagtcggagctccagcccctg

SEQ ID NO: 44351 - DNA, 943 bp, Bovine  19866881263094
  misc_feature (1)..(1): n is a, c, g, or t
nttctgtctctcctacttaaatatgagcagacaatcaaggttttccaaatatctgaggatattatatggctactgctaaatattactagatattatactactaaaaaggagagggaaattaaagagatcttgagagttagaaaaaggatagctgaaattaaaaattcaaaggttataaagtaaaactgaagaatttttttcaaaaagcagagcaaaaaaggcaaaaatatagaaaagtaggaaaggaataagtttagaggataaatttggaaggttgaaaaaaatcaaaataataggagttccataaagaacaaatatagaaaaaaaagagagaaatcatcaaaaaattaattcaagaaatttccccataattgaaaaaaaagagttttcacattgaaagggcctattgagcatctgaaaaagtgtgtgaaaacagacctccaacacaggcatatcactgtaaaatttcagcacactggctccaaagagaggaccctacaagcttcccaagaggaaaacaaatgaataaataagacaggctatatcaagaatcaaaatggcattagacttcacagcagcaactggaagccaaaacacgattgaattcaaaattattcaaacgcattcaaaatgatttccaattgagaattctatacttacccaaaatactaagaaactagaataaagatgtttttacacaagaatgatctcaaaacattgacctttcactaccaaccaggaagctagaggagcctgtgctccaccaaaatagagtaaaccaagaatgaggaagaaagaggaaacaagagtgaagtgaaaggcagccatgggataaaggggaagaaagatgcattgacacagaattcagggtggacaggctagaggctgtgggagagcctggttcaggaaaatgaaatgttaagaatacacgcacagggacttc

SEQ ID NO: 44352 - DNA, 1261 bp, Bovine  19866881426244
  misc_feature (1)..(1): n is a, c, g, or t
naatgctgtacacccaggcggtggtattttatagatcctaatacaaaggtttttggtgagtcaaatgctaggttatttagaagaaaacaagccagtctcccgggcacgtctcatggatgttttccatcttgatcacaaatgtcagcatacagggaacccagcagtgggcagagttttcctattgcccactcactcccacttgagcatatttctcaaggtttccaggaagcttcacaggcgcatttctgttcttggtggggattctggtacctccggtgactctgagacccgcagtgatgggcaggaggtggggctcgggggattgtgggagacatattatcaacctctcctgagagaaggatttggccacctgccccattagttaacaagattgactcattttggaggcttatggaaatgatcctttggtttctttttcttctcttccggggaagctgcagaggaaatcagtgctttgggtgaaaaatcgggctgagtgagatcaaaagacctgctttggagattcttggagtctgttgttatgtctctggcccctataagagagaggagaccttccctctcaatctggagaagtatctatagaataagagcagatggagattccctactggtctccaggatgaaatcagaaggccccgtgctcatccctaccctgtaggctcactgggtgtcatctgtgacgggacattgctcagcctcagatgatgtctcagagttgggagttttcataagatcgtctggaccaacctggaggtcaggatgtgaaatgaacctcttgcctggaagcataccctctactctacgaaagctccctattccttcaaacccagttatgcaatctgataacttctctctagaaacacaaaacatgggactcttctctcctttggatttttctctctcttccttttgtcaaatatttcctgtcctgtttgctttaaggcatgtctcctttagtctaaacattcctggttactctacactttgtcgtaggggtggctgttcagacccacactgtcttatttatcttatctgaacaatggaccttgtaaagaggggtcctctttctaggtattatttgcaggggttattacctcccttcacttgcttctgtggatgaagcccaggtgtattgtagttactcttacgtgcatactgtccatgctaagtcgcttcagtctggtccaactctttgtgaccccatggactgtagccgccgggctcctctgtccatggggtg

SEQ ID NO: 44353 - DNA, 3219 bp, Bovine  19866881447364
  misc_feature (1)..(1): n is a, c, g, or t
natggatgctgtgaagaggggggggtcccgtttctagctctcctcctttgagggtgacaggccaagaggcgggagcccatacttcgccattgtctgaagggctgggggatggacctccagccaaagaaagcagatggagaccaagcctctgctggacacccagcctctacccacctggcccaggaatccactctgagtgggaattctaggtctgcagaaatctgggacacccagtttagccctcttgaaggggagggaatcacactctttgctctctttgctgttcaggtcagtggaaaaaaacaagacattttccttcccaccttgaggttttcctttcctcccaaatttaaacaggaaatacaattcaacatgtggagtgtgggtgttgagctcactggatctaattttggtcaggacgaaagtggaggatgcagggccctgcagctgcttctcaggccagattctcaaggaccaggtggtggctgctcggtccctgagtggcctcccatctgtgtgtccccagaggggtgtcatccatctatccttcccctcccatcttccccaggttagcaaagaagcaggaggcaaactcagatccagtctgtacagctttgcagcctaagtcactctcttctgaccccaaacagggatgatgataataccagcctcacgtgttgtgatgaggttaccagaaatttcttgtatgaaagtccctagcatgatgcctgctacataacaggtgctcaataaaacactgcctcagagtgaaagcagaaatgaaccaaactgtgtttgctaaggctggatagctcaagtgggcatgggcctcggggagcttgtgtcgggcagggcagagccggccccctgtgatctggcttcagtggacagtaagcagagcaggcgtttcttactcgggactgagtaacgcaaaaaattactctctcagagcagttacagaaactgtggtgcagacggagtctatgcacctcctggggtcatggggcagggtgacattccccaaaggacatctggggactcatctgcctgatggaggggcagcagtggtcagaaccctgaaggccggcatactggcctggtgttggctgatttcaagcaaaccctccaatccccctgggctgagcctctcccagcagggatagtcatttattagcttattatgtactgagcaggatgataaattctttgtatgcactgactcatttaattctcacaacaaacctatgcattattagttgtggtcactggtgagaaaaaccaaggtcgggaaggggcaatgcccaaggtcacacggtcatagcgaggcccagccaggaccccggggccgggtgctcagaggcggctaccctcctggtccacatggccatccctgtgcctgccccgactcttcccttgaagagtgattggaaataattggaactgtcactggaagtaatgagaagtgacagaagctgggttggaaggcttattgctccgagtcagaatgacccccacaaacgcaagcctaaatttaaacaatgaactcgcaaagcaatctccctctccaggatttgacaccccctcacccccaacaccccaacaagaaaagtaagggtatgtcaggggcttagactgttcagtacaaatggacttcttctggaacaaaaaatttcttcttggcttgatcctgtttgctttccgtgcggataaatgctattaaaacctcaggtgaacagactatcgttcttaactaagagatccaaattcacttgatgtatttctctttttcttttctttttaacgtcccatgagggacagggaaccagaggcagctatggaactggcaggctgagatggagaatgacccataactttcaataggtgaggacttcgggaggtccgatccctccaggaagcactgggctgaaagccaaggactcacaccgctgaatccatcccttctgatagcgatgggggtgatccatcaactcaccagctgtttatttagcacctgccccactaatgtgcaagtgctgctggcgaccgatgaacatcagccaccagcaaacatcagccaccagcctgaagatccacgtaggaacatacagcccatctcataagacagcacaggatcgagctgcttcctccctgggacacctagaaaccctggtgctttcctcaatgacagtcttgtttatgactgtgttgccccactgggctgacttcttagatggtgggaactgcattttgtattactggcacctgggagcctagcacagagcctgaactatagaaggagcaccctgccccgccttctctaattgttttgtgagtgtgggtgtatgaatgaagtaaaaaatgttatgggacacacaaaagagctcctggaagctcccaaaagttgtggccacccttcttctgtgcaatagaaagagctcagagaagctgctctgtaaagccagaaaggctggcttttagctttggcatcctctgctcttgctttttctatgccttcctcttccgcctgctcctccttcatctcccctgttgtaatggcctgagctcttcagatctccttgctgcctggcttcagaaaaagctcccatattccacacgggagtctgaaaatggctgcccatgttcccatctcagtgtggtcacaaaggcagtggcttctcccccgccttctgcaaagacaaagcagacctcagtcttatcaccagcagactctggctggggctccacaccactgtcactagcaaaatcaagactgtttgatttcagccttcttccccattctggtctattcagtgccaaaggaaacaaacttttattttcccaggatctagacggttaagaagctcagataaccagaatttttttttcttttctttttggtatagtctgcattcttctttggggaagggaaacaaagaagtcaaaactgctgaaaagaggaatttaactagaaaaggcaatatatagggcaagtcatagccaaacgtacaccatcatcacccagtcccagtaccaacaaggagcttgagctcacgcatccttctcaaaagcacagtaaggtctccacaacaatgaccttgaggactagaagagtcttctgattcattagcgtatgtaacttcattcattggcaaacgtaatctttgtatgtcatatgcagtaattctggattgtaaacaataaacattaacccaaacattt

SEQ ID NO: 44354 - DNA, 1709 bp, Bovine  19866881496679
  misc_feature (1)..(1): n is a, c, g, or t
ngagttttatgttttctgtatttttgattagcatagacaacactgtaatgaacttctctgggctctcagcttttactttaaaatcgtgcatttccttaggataaatgcccagcagtgggatttgtgcacattaccatatttgctttctaaagtgttgtactcacagtactaccaggagtgaattaggagaccaatttcactgtatcctccatgaaactggcctaatggaacactttcaaacaggaatataaaacaaatggagtgctattatgattatgattgaaacaaaagttattaccagaaatgaaagtgtgcttggagacttacacctcatttttccctgggtccctaacctgttgctctataacctcatctaagtcacaagtgacgagtttgggtccatcacagaacaccaccagtgacatgcatacaactggaaaaggccatctgatattcagataccaacagctggcactgcaattattccttctcttgacttcccaatttctatctccctctcattcgtggaaacaaagaaattgggagcatttttatttctacgtccccatttcctcatcggttcccatgagtctctcttccaatgttggtccaccttctccattcccaaagccactaaactgattctgatctttgtcatcactggtctgaatgcagaattatgacaagactcctttcttacctgaatccttcctacatacagctcccctctaatattcctgaagcacagcctctgattcagtcatctgttgttcagtcgcaaagtggtgtcccactctttgtgactccatggactgcagcaggccagtcttccctgtcctccactgtctttcagagtttgctcaaattcatgtccattgagtcgatgatgctctccaaccatctcaccctctgccacctccttctcctcttgccctcaatctttcccagcatcagggtctttcccagtgagttggctcttctcatcaggtggccaaagtattgtagcttcagcttcagcatcagtccttccagtgaatattcagggttgatttcctttaggattgactggtttgatctctttacagtccaagggactctcaagagacttctccaggaccacaattcgaaagtatcagttcttcagtgctcagccttctttatggtccaactctctcatctgtacatgactactggaaaaaccattgctttgactatatgaacttttgttgacaaagtgatgcctctgctttttaatacactgtcttagttgatcctggctttcctttcaaggagcaagtgtcttttaatttcatggtttcagtcaccatccacagtgattttggagcccaagaaaatgaaatatgtcactgcttccactttttccccatttatttgccatgaaatgatgcgacctgatgccatgatcttagttttcttaatgttgagtttcaagtcagccttttaactctcctctttcaccttcatcaagaagttcaagatcaaatcattgctctgcctcaaagtctgtaccagctatcagtcaactcaggagtggtgtccagccagatacactgatgacctagtgtatccagagtgtgcagcctccttctgcccagcctggcttacctccaccacccccattcagtcccctgaatgcctcaatccttggaatgtggtcttggcatgtctaataagatgcctctgcccgg

SEQ ID NO: 44355 - DNA, 790 bp, Bovine  19866881504413
  misc_feature (1)..(1): n is a, c, g, or t
natgggagaaaaataatatgccttgagcaaggatgtgggctacagttttagtagaagggggctgtgtgttcacgtacatccaaacatggagagaataacagggtcagacaggctggctcagatctgggtttggggagtcagaatgggaggagggaacacctctgtgagggtgggtggagagacactagaaggaaatcattttgaaatgagtacacagagtctgtggtttgggtgttgcagggatgaacattcagccttatgagcactgattgtctggctcagtcatttgatccctggctgatgaggacttagccccctcctgcccccgtagcatgagctcttcctgctccctcagcggccccctcacccaaacccaaggcataataataatagccatcatcacaacctacatttgcacagaaccttctcatttttctcaaaatcgtttcacatctatgacctcatttgagcctcactgttcatttgtaaggttgtcagggaaggtgtttctgaaggtaagagatttaagaaatctagagatttcactgactcatgatatacggagtttcattttaggtctctgggctgtggtgatcaactctgaaataggaattgtggtcactagtttcctattgggtcgtatcagctctcagtttatagcttcctttgccacctgacgtacagggaataagaaattcagagagaaaagctatcagcgaaatcctgcctcagagaaagggctctgcttttcaagggagccataataataaagaaaaagcatcagttcatt

SEQ ID NO: 44356 - DNA, 1326 bp, Bovine  19866881539648
  misc_feature (1)..(1): n is a, c, g, or t
nagtggatggtcagggtgtctaagctcaaaggtgaatgcctggagtatgttccagaaagtcctgggccagattctgctgagtgctttaaagataatatggagaaggaaatggcaacccactccagtactcttgcctggaaaatcccatggacagagaagcctggtaaactacaatccatgggatcgcaaagagttggacacgactgagcgacttcacttcacttcactttaaagataataatgactgcagaaacccatctacctagaagaccctttctttcacacgagccagttgaacaagccaatgaatggctggggaaaaatattttggtttcaattgacaagatttaaaaggaaatgaaatctttggaaaaatcatgttgtaaaaggagatcttaaagtgtttctgctcctgtttggacttgagagtgaggaagagagtaggtaagtatgaaagtcccagcttactgggatcattacatggggtaggaaaaaagaaagtcgacgtgtagaaaagagaaaaaagttgaggtgatatgggaaaaaatcattggatcatactattctcctcccataggaagcattctataggaaactctctagtgggtgtcctccaaatccaccccgttagtctgagtacacacttatgatgacataaaccagcctttcttgcctctatctcctgcttagtttaggcaatcagtgttcaggtgcctgttccaattctctatcaagggcttgccaggtggctcactggtaaagaatctgcctgccagtgcaggagatgcaggagacacaggtttgatccctgagtggggaagatcctccccgagaaggaattggcaacccactccagtattcttgcctgggaaatcccatccacagaggagccaggcaggctacagtccatagtgttgcaaagagtcagacatgactgagcatgcatgcacatatacccaatcctatggggttcacacagtatttggcgatagctactagcatgttggttatttatttctgatcacatgggtatcatcatatcaaagaagtgacctggtgtcataggtattggtcactgctgtcttatgttcacttgctcacaaactatgcagctgtcaaaccctgatgcgctcctcagagcaggcattgtgccatcatgacagacgagcagtcagaggaggaagtgaagtgtgtgtgtgggcatgaattgtgtctattagaggcacagtccccgccagaaatgctaatgctaccgtgactcctggggtattattgccctcggagaggaccatgagttcctttccagcttatttccaaatggggatg

SEQ ID NO: 44357 - DNA, 1112 bp, Bovine  19866881580944
  misc_feature (1)..(1): n is a, c, g, or t
naagctatcatcctagcatcaggcatcaggagactctggtgctaatgtcccagccacaggactctgctctgtgtgtgctggaaaaacctactgccattaagcagttattctgagtgcatgtagtctggactgattgtgagtgttgctgacaaaagaatcccagggagagggggatgcagtagaggatttcagtgctgatggagattaaatagcctgagaatggctttgtatattaacttcagggaactcaggtcttgccctaaagagtgacacctgatgcctcaattgtaggtaatacatctttagtaaacctcagatttcaagtaggctgctcggaaggtgagacaaatcacatccagcccgtaaatgtctttctttacggagactgaaatgccatccctgggtactcacatttacatgaatagcagatttaacacttgagacaattgaagtttctcacgaaatgatgagtccttggccttgttgacaaagtgccccatgaagagcactgctgtcgtctgaactgtcagcagaaaaggtataatgtgattaagaccaagtggtaagccaagactttgggtctggtactcattggtggaatgacttcgggtcatttctcattggtggaaatgagagagaactggaccaagcacagtcagatggtagcagaagaagaactcctggtcacttatttttccagcagttaaaaagctgaacaaacatggatggacctagagattagcatactaagtgaagtcaggaagacagataccatctgataccagtcacatgtggaatttaaaatatgtcacaaatgaactaatctatgaaacagaaacagactcacagacacagagaacagacttgaggttgccaagagggaggaggagtggagggatggctggggaatctgggattagcagatgcaaactgtcatagatagggtggataaacagcaaggtcttacactgtatagtacaggtaactatattcttgtgataaaccagaatggaaaaggatatttaaaagcatgtatatatgtatatgagtcattttgctgtacagcagaaattgacacaacattaaaagtcaacaaaaaaggctaaacaaat

SEQ ID NO: 44358 - DNA, 1034 bp, Bovine  19866881807307
  misc_feature (1)..(1): n is a, c, g, or t
nacacaactgaacgaccttcacttcacttacttgtatatatgtgtattaaaaacaaacccttggtgcactttacccacactgttttgcaacacctctttttccacaccatgtcataattactggcaagcattttccacatcccacctcccctcagactgtatcgtcatcaaggcaagatttctgccccgttcatctctgtcatcctgttacgaagctcactgctccacacggtgtatctgctcagtgaacatccgagagtgaagatatggtgggtggggcagtgctgggggtgtagggggggtggtctgaagaggcacccagttggcttcccacacatgctctctggggactgcctgcccttctagagaaacggaggctgaagaacacggtccgttgcagccccgcagtgtcccttgggacagctctgaccatggtcattccttccctgagatcatcactacactcagcctgcatcacacagagatctcaggagaagtcacctgggaggataaccctctccacccagaacattcattcctgattaactaaaagctcaggtttcttaggtaagggtgtttggactgtggatctctggagagccattaacggaaggaaccagaatgaacttggaaacagctgcttacctatcaactcttaagaaaacaccctgaaatagagtttaatcagttcttcctcagttactggtgaggcctcagtttaaccattgctgcaagaaaggaattcatcctactctcttccaaagatctgcagacaggccagcttccctgtgtgggaagcccaggccctcctgagctctggagctgccctgcgctccagaaaataaccattctctgccatggtttcctgtccaaagaatgtctgcccatcttgattataaggccaatgttaagtcacaatttaattccccttaaatgactactcattccatttgagttgcaaatcggaaaaaatactttgaagaaaccaacccccacattttatagataaggaacttggttcaagaagtgcctct

SEQ ID NO: 44359 - DNA, 1772 bp, Bovine  19866880419641
  misc_feature (1)..(1): n is a, c, g, or t
ntaatggcatcaagaatactcttaagtctacctgggtttttattttttcactctgcactcttcttttttcttcaaagcatgaaagacccctgtgcaaatacagagcctttgtttttccttccctgtactttggtacattgctttccttaatatagcagcatccttagcttttgtagtattttacttagtggcaactgaagaaaatcactagcctgggctttaactgggaacttagaaggttgttgtgaaactgtcaggaaggtggtgagcaaccaaaaaaactctcatagattgtgcacccagagcgcatccagctctttaaacactaagcagacttggttatctcacctcccagctcataacagatgaacacagcatattagaaggaagtggggagcctgttagaagcaggtgtattggtaagtgtagtaagaaaccactatataagcaaaacagactgcttagcagacataaaattttttaaattaaaaaaaaaaaacacaccagcaatctgaggcaaatgattatatataccttggggctaagggaatcactttataataatatcaatttgttatagccctttacaatttatgaagtattttacatacatcagagctctttagatatttgtaataacacatgaatatcacttacttttcatcatgaaaaagtgaattatactgagcatgctgtttaagaagaaggcaggtaaggtatactgacatatctgaaagacttgcatcaaaaataattacaggttttaaattttggcacttaaagagatatgcattatttatcccaaaattaatatatatgctttcttcataacccacatggtgttactgagtgagttttcatagctctcagtgactgctggtcattaaatggggatgattgtcatcagtaagttatcaaactatttatcctgttaaacacaagcttaacagatccttatggatgccaacaccatatattctaatatgggaaacactaggctcccaaaagattctctgagtgtttttcctatattgcactttctagaaaacagctttaacaataatgtgatgtgatcctggttctagatacagaagtgggaaacagatgattaaccttttccatgcttgttttcctaaagtttttggtatagcctctcttcagggatgtaacaaggagaaacaacaaaatacacatgctttttgggcttctgagaaaaaaagaccacagacattttcaaaagattaaaatacaggtctcttctgcatcagccatttcattttcacaactgaaaataaagaactactgtggagttgatgttcttaaagtcattcaacatagctttgccataaatatactactctgcagaaagcttttaaaaacaagtataatttatactatacttaccaacaattatacttatcaattataatacaatttaccagttatgaataaaaatgactaaaaattttgagttaaaaacaccagattagactttatactgaagtgaaataggacctcaaaattttaagtgtaatatcccccaatattaatagtatagcattcctgatgccttttaatttcttaatattacctgatgactttttgatcatgatcatacctcagagggggcttccctggtggctcagaaggtaaagcatctgcctgcaatgtggaagatccgggtttgattcctgggtcaggaagatcccctggagaaggaagtggcaaccactctagtactcttgcctggaaaaccccatggatggaggaac

SEQ ID NO: 44360 - DNA, 982 bp, Bovine  19866880696048
  misc_feature (1)..(1): n is a, c, g, or t
natctgatggtcgctgaatctggaaggcaggtcaggatggagggctggctgctgaggaggctgcaacagttcagcgaaggactcaggcagtgggagtaaacagaggtcatgtcttggtagaattgaagaggatgagaaagagcaaggagcctggggcctcgttccgatttctgaacggccgggtaagtggtggctccgccagctgcaacacagacctggaactctcagttttgaaaaacccaggaaactcaacataactcaagacgagttttcatccctgccccaattgctgccccaaacccagaggcaagaggtgcctgcactcacactccagcccgttgtccagagcacctgccagcctggcagcgcccaaggtgcccactgatggggtggggtttcccttcctgacctgccacgactcccctcccagccaggcacacagcattgccctttactcccccgagagctccctagtgcagtgtctgagccaccccgattacatttccagctggtttttaattatcttgtatcagccacataaatctgcctgtgtggctcgcctgccgagtggcagagggggagcggggttggggcgggggggcggttccaaatgcccattcattgccaggaagcctctcatgccctgggacagcttcctttctgaagcactggtctcaaaatgtgaaaaacatttctttccagtcacatttctaacatcttgttaataggatttatttaacaatatttttgcaaaagccatctgggaatggcttgtttgggaacttgggaggacacgtgggtactacaggcccaggccgtggtgacagattacagacctcgtacctgccatcagagaagggacagaaacatggagaaggactcagtcaggggccaggggaccagggcctgaatcccactgcttccaccggctgtgggggtcacccagcgaattatttcacgtctctgagcctcacccctgagg

SEQ ID NO: 44361 - DNA, 1190 bp, Bovine  19866880732794
  misc_feature (1)..(1): n is a, c, g, or t
ncccactccagtattcttgcctggaaaatcccatggacggaggagcctggtgggctgcagtccatggggttgctaagagttggacacgactgagcgacttcactttcacttttcactttcatgcattggagaaggaaatggcagcccactccagtgttcttgcctggagaatcccagggacgggggagcctgatgggctgccgtctatggggtcgcgcagagtcggacatgactgaagcgacttagcagcagcagcagcagcccagggttcgctgacatcaggcaaacattaggccctgagcaactgtgtgtggaattgaatccaacagagattcaacaaagccgggggtcttaaatatgaattatcaccttgggccttaataaaccacactgatgaggagccacagacatcccacatgcaaaagggcacttgtcacccctggagtatcattgcagactctcctcccagctggctgcctgcctttctcacttctctctgctcagcacccttcctatacgaggccccgctccaccacactgcagggaacgtttgaaaaacaaggcatacaggcagaaaacactgaaaccgcccaggtgacacttacctgggttctaatgccaacgactttgtgtgccaaactctaaacctgaggtctttaatctgattctccttatctccataatacactttggagttcctgaaaaggtacgtgtgtgtgtgcgtgctaagttgcttcagttgtgtccaactctttgcaaccccatggactgtaaaaggtatgatattactttaagtcctacagttgggaaagggatttatttcttcagtgttaaactgcacacacacatgttcttctgatgcaattttcatcctttcactttgattgtaatatttaaagacaaattttaaaagtcactttctttccatgcataattttctcctgctgcattttatttttttctggaatgaaagcggttgccatgctgccgtgtgagactttcctagggggtgcattgttcttagccaaagccaagaaagagttaaagttgtaaaggacagtctgtcttctgtctcagtttgagggtggggtgggggtggagactacccaattgtctgtccttcttttcccctccctggggctgagtgcaggatgttgaattctcccaaaataactcggaccctgtgagta

SEQ ID NO: 44362 - DNA, 1513 bp, Bovine  19866880784699
  misc_feature (1)..(1): n is a, c, g, or t
ngccctggatgtatgcaggccgtcgtagctgcacgacagactgattttcttctagtctttaaaatttccttccaaaatcttggcttcagtgaactagagcattaccaacaggaccaagacagagtcagacaatgagatcatctgggctgtctagatcctggcctccaggatcttcctcatctttaaagggcccagctgcactagaaaccctgtggcttacctgagcaggcagggacccatgcacttactccctttacacaggtgagtgccatgcaggtgagcagcctcctctgagtggggccgctggctccttacctgccagagctgggatagtgacccggttccactcccatggctgatcgtactcgtcagcgggcctgtcgtcatcctggggcagcttgctctcccgcagccgggggctgatcgtgctctctgagtccgagtccacgctttggccctcgggttcataaggggtgtcgtataactggatgcctttgtgctgcgaccggacgctttcctgcctctgaaattctgcagtcgaaaaggaaggaagcagaaatgtaaagtgtgcacagcacatgcctcctcacctgggatctgccggatgatacacatgggaattcagagccaccagccagggagatggggactgcacagaacagacccctcattgcatttaaccgctgccctccccttgagggcagtgtctctgcttcatggctcaaggcttcctcacaaagatatcaggttctggaccaaacaacagaaccagaatgcttccctgtcaccatccgctatcttcaagggcagagtccacacatgagtgtgatgtcctgggtgtgttccaacaccagcccaggacacacagagctctcagcaaccccccgcttacagatggggggggtggtcttcccactagggcagctccctggtctctggacttatcattctccgcctataagatgaggaaaatgaaagtgaaagtcgctctgttgtgtctgactttttgaaaccccatggactatacagttcataggattctccaggccagaatcctgaagtgggtagcattttccttctccagggggtcttcccgacctaggaattgaaccagggtctcctgcatggcataggcggattctttaccagctgaactaccagggataagatgaggagactgggccaaatggccctcaagtttccacacagctcacatatccatttacagacctacaaagccaagaaccacctccagagaacccagggtcgctgatttctcccctacaaagccccatgaatgaccctttgcctgcatttctacttccctcagggcctgcctgtctcctaacacgctgaatacagccaagacactggagagcagaggtccagtttcacttctgaataaggaaggaaagctcttaatcttctggagaggatgccagggcccggctccagtgtgggctgagcagcggccgcccatcgagatgaggcctcacacagggcacgatccttt

SEQ ID NO: 44363 - DNA, 1083 bp, Bovine  19866880809886
  misc_feature (1)..(1): n is a, c, g, or t
nctcgtgtgtacgccaaaaatcccatttaataatatacattctctttaaatgtatatgttgttatgcatgtgtgctgcctgcatgctacgtgcctgctaaatcgcttcagttgtgtccgactctttatgaccccatggactgcagcccaccaggctcctctgtccatgggattctccaggcaagaatactggagtgggttgccatgccctcctccagggcatctttccaacccagggattgaacctgcgtctcctgtgacaggcggggtctttaccactagtgcatatactccagtaattcatttcctaggaatttaatggacaaatatagttctttcagtgtacagatacctgtagtaaaaatgtacactgaaatattatttctaatggtgatagattgaagacaacagtaaattcatgtggtggaaaactgattgaacagaccctgctccactctacaatagaacaccatcctgcttctggaacaaagagtgatctcagtatatgctggtgaggaagtatctttaagacacatcattgggttaaaaaagcaaggggcagaacagaatgcactgtaggatcccacgtgtctatttttaaatatatgcacatatacacttacatatgcatgaaaagtttttggaagaattcctgagaaaactttaaaaagcacttaccttgaggaaggcagcctgaaggaaaatgaagaagacttttattttacgtctttattcctttctgaattatttaaattgttttatcatacacaaatgttatttttgtaattaaaaaattaattttaaaaggtaagtataaatactgtaaggcaaatgggaaattcatatgatataatattgtcaccaaaacaatttttaaaagataaatagtgcactcctgtagcatggctgtgtgcaggaggtcttttggagacaaaggcaatcctgctgcctctgtccttagttccagccctgcccatctcctccagtatctcctccctgtccccaaactttaacccctcccttctgttcagttcagttcagtcgctcagtcatgtccaactctttgcccttgctgctgctgctg

SEQ ID NO: 44364 - DNA, 1122 bp, Bovine  19866880824958
  misc_feature (1)..(1): n is a, c, g, or t
naatgtcatttctgctgcattcagttggtcaaagcaaatcacaaggtcaacctggattcaacagggaaatggactccatctcttgacataaggagtgtcaaggtcgcatttcagaggagtatggacatagggaggcaagactcattaggggccatttttaataatttgtaacactctcttttgaggatttctatgatctgtagaagtacaatagaccctagatctttctcccacaattcttatctttttaaaaatttgagtataattgctttaaaatgttgcattagtttttgctgtacaacaaagtaaatcagcttatgtatacatatatcccctcctctcgagcctccctctcaaccctctaggtcatcatagaattcgcatctttttactgtgcttcacttcatttttatttgctttctctgggttcttggagaatatatcaagcacaaatatatatatatttgttttacatatatgttttatatatatataaaatttgctcatttgattttctacagtatccaacctgagttttatggactttgtaaccttttaatttagcaattatgcttttcttttgaaaacaaatttatattatttcagaccaatccttttcatagatgcaatgtcttcctgaaagcaactgaaaatgcatattagatttttatctaagtttccttctatttcttgtagtaagtctaatttgagggagcaattttctcttaatccttcagatagagtctttttcttttgaactattgaatctcttttcatatctgatgaattttctctatttgctcatcctaacagatggggaagctatgttttgttcagaattgggagctgagatgagtttgatcagagattgtgtgactattttggttaaatctttcagttccagatgaactaaaaaggaagaagattagctttgctatgtttttacctttccagggtataatttccataggatttgagagaaacagccaaaaagagccccatggcaacaaatcttttctgatctgctgttgctgttgctgctgctgctgctgctgctgctgtcacttcagtcatgtccaactctgtgcgaccccagagacggcagcccaccaggctccccca

SEQ ID NO: 44365 - DNA, 1275 bp, Bovine  19866880838927
  misc_feature (1)..(1): n is a, c, g, or t
nacctttatcttgggggcccttctgcccccctcagtacctgtgcccccttctgacactgttctcctaggtgaatcccggggcacatgcacacctggctacatataccctgctaccagccagtctccagtttagggtagtttcccttttagaatcacgtggaagagagagtctgttttcaatttaaccagcttttacccagcacatattttgcgctcagagatctctcagtacaaggacaagctaggaggaaggaataaaggctgcaaaaagacttggcagtaatttttggcctaagcctctgaaggttgctgacacccgtcaccttttcatcatttgtttcccagtgtttttgtcttcgggaatttagtgagatcttcacctaggaggcagctttgagttggatctagggatggaagtggaatttcagcgcaaggaaaggctgactgcagcctatgggagcccttaggtgtatgtgctgtgtacatgcatctgtgtgtgcatgcatgtatgtctgtgtgttggtgtgtgtgtgcatgtacatatataaaaccttaatgtggagagtgtttttggaaatgaaagcttccttgcagtgggcctcacttggaaaatgagagatgacagtgtgagataggtggaggcctgagtttggaccccacagggaaagcctggaagactgttgaatcaggaaaataatagactcagagccatggttgaggagcatcccaggctggggttgatgggtttggagttgggaggcaattacaatatagtcccagtgagagacagtgaggacttgagctcctggaaagaaaatacaaaactttagttggtggaaatattattccctcaggttgtctttataaaaaaaaataatgatgacaaagaggccagtaacttggtaggtctccttatgtgcagccagacaagtgttatccacttaggttttctgctgaagtcttgtttcttttatcataattaagtaaatgtttccactgcaactgagaaagtcgagatgcaccatgacatcagtttcccaagtttaaatacatgccgatgtgtaccaacactttgtattttgtcagcatccacagagttgagttaaataacatgcttccaaagaaataaataatatcatgttcaaatttttttttttttaaatactcaggaacagtttctgagcagcatacgaggcaggggggacctcacagagaataagtggtggcgagttgagggaagcttcttagtctgcagttaacatgagctttttaagg

SEQ ID NO: 44366 - DNA, 1523 bp, Bovine  19866880895437
  misc_feature (1)..(1): n is a, c, g, or t
nccagggctgagagtaattgggtaactgaaagggtctttggtcacctcacatctctccagtgcatttcacagcctttcctactctgggcacagtgaaagccaaggactgtccccctggcgtggttgatcccggggtgtgggagaagctagaatgggactgatgctgttccagaggtggctcttcgcaaacaccagtttgattaaagggctaaacgtttcatgtaccaactgttctagacaccaaggggccatggcaagagatgacactgcaggcagctgtggcatctcaccctctcctggactgaccaccttgcaggtcatgttacctctgacgttttggtctagtctggtgctttactgctcaaaatgtggtccctggaccagcagcatcacatcacctgggaactggtgagaaatgcagagtctcaggccccagaccagacctgcagaaagtgaaagtgttagtcgctcagtcatgtctgactctttgcaacctcatggactgtagctgctaggctcctctgtacatgggattctccaagaaagaatactgcagtaggtagccattcacttctccaggaggccttcccaacccagggatcaaacctgggtctcctgttttggaagcacattctttaccatctgagtcatcagggaagcccccagacctgcagagtcaataagtttcaaaagacccccaggggattctcaggcttgttaaaatgaaaagcacttaccccacacgacatcatctcttcagaaggctctcaggccagaacttgcccaattctgcccaaagctggttttagaactactatacatttcacaaaggatcacaaggtctcagaactggtccccacataagtttctgggccacgggtctccattctggatttggttttctgttgctgagttgctatcacatgtgtcattgtaggtcaacttcttaggctgctgttaggaggcagatgcagaatcctgtccccacctgtgtctcatcaagtcacttacctcatcaactgtgtgtcctgctctggagtggatactcattttgggtgtgtgctaaggcactcagtcacgtctgactctttgagaccccatggactgtagcccaccagactcctctgtccatgggcttctccaggcaagaatactggagtgagttgccatgccctgctccaggggatcttcccgacccaggattcaacccagggatcgaatctcctgcattgcaggtggatttactgcttagcccccagggaagccctggatactgattgtgctttccccaagaagcttttggctcagttctgatttctggggcatagaaggaagttgtttcccttggctgaagggatgctgtgagcaccagtcttgagtctttgaccagatcccctccccacatctagacagaagttgtcagatgaggagcaccctcctgtttcctagcccaccgtgtaggtggagtgaagtggatgcaccacctctcgggtaaccagaacgagtggaaacagctcgactgg

SEQ ID NO: 44367 - DNA, 866 bp, Bovine  19866880973287
  misc_feature (1)..(1): n is a, c, g, or t
ngacagaaggaagctaggaggtggggctttgtcatccctctgtgggagctttctcagagatgcaggcctggctgcccaggagccccaggaatagtcctgcagcccccaaggagagattcacaggagcgagttgtggggtctacagagctgcaccccctgaactcggggcacccagcgtttcaccctcattttggatcttaacatcaactctggatcaataaggaaaagcctattcactgttctgttacctatgtcaaaagatatgtcccctatgaaataaaatcataggaatagagagacagacattctttaaaaaccgcagaatgagaattttttttaaaaaaattaaatgaaaaaggaattaatgagaaaaggaaactctgtgatagaaactaaaaatgtaatcacagaattaaaactcactattaatcccttggtgagattaaagaacagagctggtgccgtgaaatattaaatcagtgctgtagaggtcaaggttgaaaactctcatcaaaaattcagaggtaaagataaagaaattaaaatgactagaggaaagtttataggtatggagaccagagaataaagcagtgccaagcagacattccatgcttgtgtgggtgagattggagagaagcaatcatccagcagacaagagaacgccacacaaatcctgggtgtgcagctcagaagagatccacatatgccaggcaaacatcactgagatggaacaatacctagacatctcacaaaatgtttgaaggagaaggattttaaaaatcctacaagtatatgcatagaggaagaaaaatcagacaggcttcagattattgtttgtcgtcatttcaatggagtatctctataca

SEQ ID NO: 44368 - DNA, 4266 bp, Bovine  19866880990863
  misc_feature (1)..(1): n is a, c, g, or t
nccgttatctcactgagaagcactccatgaaatgctggaaaacaataccctggagccagtcatagctgtgtccagccccctgaagaatagagataatctctgatccagttttgggtccacaaaacctagcacaggacctagagaatagtgtttgcggaatgaatatatgagtgaattaatgaaatcaggtgaacctaggagttatcgctgtgtgtcaaactcacttccagggcaattaaccctatgaccaatgcatagcttggttaagaccaagcatttttatttcccaacacttacaccaattacaaactggcaggctttgaaccaaatctgtctaacaaatgagttttgtttggctagcaaacaaaactgacttttttaatgcctcaggtagagtctgaatcctgcagcacagccatgttctgcttcttcctgtctcaccccagcctcttcccacagtctcatcacctgagaactcctgaaagctttgagtttgccgtctcggtttaaatctccctgggaagtcactttttcaatctgtccatgaacatcacaagtttactttgaaagggatattcctgggtgataaatcatacagatctttaaactttagaccctctacaatgaaagagccatagagcccaacatggcccaggccctcatacacttcaggcaactccctgagccaaaccaacgatatggtggggacagcgtggtccatgtgctgtctccccagagaggtgatcctcaagcttgtcactgggagagtttgtgaaagcccactttgccaggtccacctctagagcttctgggttagtgggtcatccacggagccaagaatttgcattcctaacaaattcccagatgattctgtggttggtggccccgggaccactcttcaaaatctactactctactgtttacaaatctctctcacaactattatcttattggaccctgacaaccaacctatggtgtgaccggggtaggaatcactactcacagaccacaaatgaggaaagggggactcagagagattagctgatgaccctaggtcatatagcttgatgtgaattggagtcttccaatgccaggtcaggcagcctgaggataaagatgtggtcaagaggccatcccacatcattctgctttaggacaaggcgattggactggttaacaaccgagctagtatttcaggaagttactttcctgcaggagagagctctgcctcctgaatggaagctgacagcctttctcgggacccctcccaggactaggactccatgctgtggctctatgcgcacaaggcttgagagggtccaaaacagcccgctgcccgcattgctccaggtcctgactgccccggggttctggccctatcgcagtcccaggccaggcaaggagaggagcagagatgccccacccactggagccaagatgcccctcactgaattagctgtgtagcaaccaaaggagagtgagagacgggcacagactgcagcttctgggagggaagacggggagttgaggggggagcacagaccatatggagcaagagtgacagaatttggcagtgcaggctctgcagatgggcttacttatgtccagacgcaatctgaggccaaagactgaatcatctctctagcaatttcttgtttccaaacacgtcttttgaagaacgcagggatgctctgcacagatatgcagacaacaggaaagaaaagttgcttttgctggcagcagtgggggtggcggggatgggggagggctgcaaaatgtccccttgagtggggtggatgtcagtggatggtgagaagggcacttgatggtttgggtagcatttagaaagtccataacaagttttttacatgtgttttcctgtgtgatcctcacaacactgtaagagggttagcattaccatccccattttataagagggaagactgagattttagagggtgatttgtcaaggtctcccagctggtgagggcagagttgtgaatgaggaagaacaaatgggacatccacacacatccaaggattccccccaccccttgtgcccaataccataatccttgtaccagtctcccaggtggccctgtgccccagctgctgggtggccttccaagttactgggttcccagtagggatccccaggttctgtcttcagaataaagtctggctgctcttcctggcatttgaggtcctgtgaggccaggctccagcctgcctccctagccttggccactcccgacgtggccccaggcttgggtccatccaggcaacttgccgttccctgaaggcattctgcactgcccggcctccagtcttggctttagtgccttctggccacatttccccatggcatttctactttgttatcttttctctcatttaaaggtctggtcttccaagactgtcacctccctctcctcactgctcatccctacaccataacaaacatccttcatatgtgcattctggtctgtgcttagtcacgcagctgtgttcgactctttgccatcccacggaatgtagcccttcccaggctcctctgtccatggggattctctaggcaaggatactggagtgggttgccatgccctcctccaggggaccttcctgacccaggaattgaaccaggatctcccatattgcaggtagtttcttcaccagttgagctgccagggaaaccctcatgtatgcataccaccttacagttcccagagggccatccccctgcaaggtgacaaaagcatgtcagccccatttccacactgaggccagagaagggacgggacacctaatcagcaaggccacaggactgaacccatgtttccagagtccaggtccagtctcttcccactgtgccccagtatggggaaggggactttatttacttgagaataagctgctgccatccacaaggaggtggtgcccatgtgcctcggggttgcccttggggagaaagtggaccgtattagtttcttgttgttgctgtaacaaattaccacacacttatggctcaaggccttccctagtggttcagacggtaaagaatccacctgcaatgtgggagacctcagtttgatccctgggttgggaagatctgctggaggagggcatggcaacccactccagtattcttgtttggagactccccatggacagaggagcctggcgggctacagtccatggggtcacaaagagtcagaaacaactcagtgactaagcacactagtggctcaaacaataccgaaggatgatgatcttacagttctttaggattgaagtctaactcaagtcttgctaggctaaagtccaggtattgtggagggctccaagagggctgcactcctttctggaggctctgagagagaatctgtttcttgcattttcctactttctcgaagccacttgaattttttggcatgtggacccttcctccgtctttagcaccacaaagaaagctggtcaagtctttctcaagttgcacctctctgaccttctctcctgcctccccccttctactcttaaggatacttttgactacactggacccacccagaatccaggatactttcctccccctttttgggtcacctgattatcaacctaaattccatctgcaatgtaaatttccctttatcatggaacctaacatacactcttcagagattagggcgtagacatcttcgggggcattattctgcctatcacagggcaaagagaagattcctgcccacagaatccagcagtggtttacttggcagagtaggtgactcgggcttggaccagacatgccagagcttcagtgacctgtcctgggagtgcagttctgcaggaccttggagagttcatggatgagtgctatgctactgacagtctagtcctttaaaacctggagcaaaccccctagtgccaagtggctcagggaaacagaggctaccctcataggcatttagcaagtttcccacgtcttattaatctctcatccatgacttagcctaatatcaggacaaggcagcatctccaatcaaactcctactaccactctctacccaccacacactcagaggtctggcctgtttacaatgagaattggatcacttagaataaaatcccaagttcttatcaaggcttccaaagtcctatacactctgacctcaagatactatccccattttcactgaactccaagaagactggcctcttttccctcacctgagtataccatgtgccttcctgtctcggggccttgcacat

SEQ ID NO: 44369 - DNA, 1258 bp, Bovine  19866881206721
  misc_feature (1)..(1): n is a, c, g, or t
nactgttgggctagggaactggtaacaatttagacaataattccgctgcatagcagaatcactgaattcccagttccctgaaagatacagataaaggcctggcacacagtcctaagttgtttttacaggaagcagaccagatgaaaactgcttaccacaagaacacagaccccagactggatgaaaccagaaggttgatgaggcttgaaacttcaccttgatgccaaccaatccaagaactgtccatgagcttatcatgcccctgctccttgaacactataaaactccttgctaccccctccaaggtgggtcacatgatcttgagggcattggcccactgtggagaaggcgatggcaccccactccagtactcttgcctggaaaatcccatggacagaggagcctggtgggctgcagtccatggggtcgtgaagagtcggacaccactgagcgacttcactttcacttttcactttcatgcattggaggaggaaatggaaacccactccagtattcttgcctggagaatcccagggacgggggacctggtggtctgctgtctgtggggtcgcacagtagtcggacacgactgaagcgacttagcaccagcagcagcaataaggaaaacatggagacactggttaaaaataaaaacaagagcaacaaaacatttggtttattcaactcaatggaacagaatggagtccatatatagatacaagtttagatgcaaatttagtatatgataaaggcaaatttttgaacatgtatattgggttttcaggaaaatggactacattgtaagtgatgtcaggactgttagctaaccattttgaaaaaaaatcctttttgagaaaaatagcataaaccaaaaaaaatgttcatttgttgacaaagtctaaatggaagacatgaaatgacaagaaaatatggctggattatgtatattttcctcagatagtttaggactttaagataatatctgtatttttttagggatggacaaatcatcattttgctgtgtgttaagaaaaaaatctacgaaactcctaaatattcctaatttataatttttcaaacaagtggagcaaaagtcccactgaagctctcatgaaagagcagtttataagcaaaaacacaactttgttttaaagggtcgtacagtactctttaaaaaattggcttcattgaaaataatttgcataaaataaaatttcgtgattttacttctataatgagtttaacttttaaaaattta

SEQ ID NO: 44370 - DNA, 1430 bp, Bovine  19866881222310
  misc_feature (1)..(1): n is a, c, g, or t
ncgctgaggcagagatttaaaactttactgacgcttccagctggtgagtgcccaatactggatgggagcccaggctcgacccgctcccgtttcccctcactccctgcccagctgacctgttaaatgagcctttgttctgccacgttgtgtagctccctcgtgatcaccgttaaaccagaaagtcttattgggtttatttcaaaacggaccctaggaagggccggggggaggatgtggaatggggatggcccttcctcccgccaggaggagcctcagcacctttgaaaataattcccccaaaatctcctaaaaccctaggtctctacccagcagccctggcctgccgaggtaatttccaaagccccagccttgaaggctcacaaatcctccgttcatgttcagacatataaattgcattcgcagagagaactacgcatctggtggtgtgatcgtgaagaagagaagatgctggagttcaagtgcacacacgtgagcacactcggggcctggcccatctccagcagagcccagcaggaaggctgggcctctccagccctctccaggctgagatgaaaggagtccatttccctcctaagagtgtcctaggagtaggggagagggatcctcctgcactaacagactcacacacaacttcaggtgattgtcactggaattaacaggttcactcaagaggctcagcccagagcatttgctggtgtgaatggggcaaatttttcctgcagacagcccaaagactctggatttttgaattccgatgaacaaaatacttttcaatctgttcacatttaccttaaaaccttgatctgttttaggctctatgctggattctaaggacccagagattgcacctgaactcaaattctcagtccagggtggaaaccaaacagtgaatgaggtcaaggacttgaaaaggcctcttggcgggtctggaggcaaacagacctgggttcacatctcagtcttcatacttgctagttgtaaggtcttaagcacgtcatttcaataaaggagcctctgtttcttcatctggaagttagaatctatccagcagagttggtatgtggaagagagagagaggattggtatagcacccaggatggaaaagatgtgccatatatgctactgattattaagagaagagagtaaatattttcagtcgatagaattagtgaaagtttcctggaggaggtagtatctacataagatcctaaaagatggatagattttgacctggttttgagggattaaagggaagagtacaggggctttttagggcagtgaaattgttctgtatgatatagtaatagtggaaacatgtcatcatgcatttgtcagaatgtacagcacaaagagtgaaccctaatgtaaactatggacttaataataatgtatcaacattggttccttag

SEQ ID NO: 44371 - DNA, 4200 bp, Bovine  19866881334699
  misc_feature (1)..(1): n is a, c, g, or t
ncttcctttgcaaggacatggtgaggcttaatgagcatgtatgtcagagcgcccacaaaggctcctctgccaagagagatcaggaagatgggagagggcataagaggtggccctcaggagtctgaccagttgcttcctgactcagcccttcacaaagcagcctggtgttctggagcctacacaggtagccagagaattgctttccgtgagcaggaagaacatgaggcagagtcctggaagcagggcctggactgatactcagattcttcaacaattatcctagagggtctccgcagcccgagagaaacattcaactcaggcccagcatgtgctaagagctcagtaactggtgcttcctttccctttctcctcctcctccccctccttcttcttctcttcaatatgttcttttattttttattttactttttggccacaccacatgcaggatcttagttccccaatcagcggaagcacagagtcttaaccattggactgccagggaagtccctcccttcctcctttaaattcagaaggaatcaggagaacgtgctcaaaaacatgaacaccaaataaacaataagagggtcacagaaggaggcacctgaatcccaaaccctgagacatatggggcaccgactcaacaggctcagaattcagggccacctgcctgtggtctgcagtacatggtgcccctgctcacatcactgtcctgctcagggtcagagcaggccaacccacgagcgttcttccatgcctggaccatcctcctgaaccagggggaccctcatggaggggttctcccctgcttgtgatctccctaccacccgcccatgcctggggtctgtcaagatggctgctatctgatatctcttaattctttaaagatgctctggaacttccctggtggtccagtggctatgattctgtgctcctcaaggcaggcggcccagttcgatccttggtctgggaactagatcccacatgctgcaactaaggatctcgcatgctgcaacaaagactgaagatcccgcatgccacaattaagacccggtgcagccaaataacctttttttttttttttaagatgttccaagtattattctggtgaaaacagacccccccaggataccacatacccggccacattcttctgggccccacactgctgctctgacaggtttcattatcaagggtcaataggaaaacagttataggaggaaagtctctgtgtttcctataaacctgccacaaagaccatggtgctttaagctgcttcctgtcctaaaacaaagattttcttggatgggggcagggataactttgtccctaaagacctagtctgcccccttctactaagtaataaaagcaaggtaactctgcctgtttctcttattgccctggatgctaggaagctccaagctttccacctcaaaagctgtatcttttttgaattagaaattcctaagggaaactccccccacctccccacttacttcttgatgaattcttgatgaattgtacttagtaccctactatctctggacagtcactgtgccctgccgggttcttcctgaggtcagtgaaacctgaacagataacctgtggtaaagattcaacacagtgccaccccccaaccaccacctccaaagtacacaccttcccctgcagaggctggccggtgaccatgtgacccatccacctccccgcggagttgcaagtgtctgtgcttaccagtcatgatcctctgggcctcatagggctccatgtagcctgcgctctctccctttcctgttttgcttttgagatcattcttggcatcaaaggggtccgagtagtcatcagcgatggtcacctgtagagaagatggcaagggtgtgagtccacctggggctttctacttcacttctgttcacagccaggctttgcttcaacaaatataaaccgagtctgtgccaggtgggcaaggaaggggaggtggaggcaggagtctgaactggtacccaccagcagggagctctgattcttgcaggggtaacagggaacctacgttacgttgctgtgctccatcctaagggagggtcctgggcctgcacaggtaggatggctgctccaggcacagtgaagtgagaacagaagcacagaggcaagaacctggagggcgtcttcgggggatgtgacttgcttagagtaatggaatgaatgtagagggaggaaagttggaaaggagctcgcagaaagcccagaaatgctgacatgctcctggtgctggctgaggcatagaagagtttgtctcgagataattatgtccagcgttccactttcccaaatctggaacacaaccatgccttgggtaatcagacaacaattcggtgagatcaacgctctgcaaagatgactgaggccccagccgggcccagtgaaaacacaagagcagctcggggatggccagacagactgctaagggcagcgagggccttggaagccacatatcagaagactctcctgtgacagatgaggaaactgaggtctagagcgggcgggggctgaaccgagacccttggctggttcctctgcctccttcctggactcctcatttgtctgtattccagaaaacaacgaaagttccacaacaaacagagcagtcacctggagccaggtggtgggggcagccaggggagtccccgagatcataaaaaaatctgagttttgaatacttcaaagctttctcttttcccaggagaaaggtaaaaattcccagttgcatgctaaaagcaaacacagcaacttttcttctcattggaggtgcccccttggggcaccctcacccagagggaaagcacaggtcccttttcaacgcatcctcgctccaccaaaactcactgtgacttgggctcctttggtcccacatctagcaaagggcaagtcctcagcctcccagccagggccacccagctgcctcttttgggaggaggggggcaggttagcctgtctctcaacccttggggtttcatgaattgttatttaaattgtaggtttaattagaaaccacaggagcctccactctcacccagctcctggaatgtaaggcatttgaggggcctgtaaacccaggggaagggaaaaatccccctttgtctgccgggtaagtggcagtttgtggcagcagccctggccgggtgagcagagtgacctccagctgcccggaatgtgatgcccacgttaggaccgcgggcagctgccctgtcaccagcatgtggccaggacggccggcgggaggcattgcacacagcagtcactgctccctgaacaagggcaggcttatccgtgaaagacccagggctggagcaccatctgagcatgtgcagggcccgctgccaccgctccgaagcggctgtgggtcaggctctagtcccagtggaggcgcttccagatgctgacattgtaattgtggcctttctggggactccctgagctcaaatgacacgggcagggagagatgggggagaggagcggtagggcctttcatgtcttccatatgatatttctactctaccatttgcagaacacattagggagaaaattagacacgtgaaccactgtcctacagaacagctcagatgcagatctggggtgcatagggttttgtgtctcagaattcaaatgatgaacctgctgtggatgacatgtaatctcatttctctcgtcctagccttccttgcagtctcttttcttcgtgaacaccctccgactattctgcaacgaggaagggagcaaatatttccctaagagaacaaaatcactttggggggattagctggggagggtgctcggctgcgtaatctagaaatcaacattccagctcctcccggaagtgctcagtaatttgcaaacacggaggcaagaaggatacaaaccaaatctttgttcgccctgggacaggagctctgggaggccttcggttcagcaggcgctatctgtattttctaattaaaatgagatctgagctcaggctgtcatgggggccctcaggctgcctgccctgcttgcttccgtttcaataagaatttacaaatcccgaaaccagggaaagctcctggtctctgctgacatatggttctagttatacctgctgacagtttgaaaatccttccgtttacaaaaaaacagtttagaattctgttagtttaagaagcaaat

SEQ ID NO: 44372 - DNA, 1823 bp, Bovine  19866881448239
  misc_feature (1)..(1): n is a, c, g, or t
ntctacacgtcttgcaaaggaagcacctggaaaccaagttttgctgccttagcccagcatccacctcaactatataatagggttgagagagaagagtctgggaagggacatttctttgagacagttcttggaagtatttaccctcctctcacctgggagcctaggaatatctcccctcatctccgtatgtgtcccctagagcctagcgcagtgaactgggaatgactgactcctggaacatgcaaagccctgaggccaatactgcccacctgagggagcagaaagagaactgcatagaaatgagttcatttccaccaacagagagaggcaaagatgcacatgcttcctcatggacctgctgcaggtcacatgggggaaacaacccggggccctcttggtaaggattttgcccccagagtccccttaaaggattgatgtcccagtaagaagtacgtcggaccactggatagcacagggctcaggattgaagacaattggagtcagctggaggtgtgagctacaggtcagagatgggcttgactctgtcctggagactgtagcgggagggtcgcagttggggagatctctgtgaaacccaacaagtgccaccaggcccagagaacactaacactgacacacacagcaccaaccacaccagactgcaatttcgccgacacctgatgtgtctgggcctcacctgaggggtgaggagccacaggccaggaagctgggggcgggggtcgagtaattaggggaagtgtgacagaggggcctgtgccacctccactgaacaagggaagagaggagctttttggttctgtttcttggagaatcctgactaatatgaggcgaacagaagaggcccaagaactttgccaatttggacactgccaagtggcctggatgcctcaggtctcctccacccaccctgctgagacgcctggcacaggtgagtgtacaccttggcctctctgggcctccactgtcctatgtcatctgggaggacttggactggatgatccctgaggccctttcagctctaatctcctgggtgccctgagatgcctagttactgagaagtgaacagaaccaagcctctgcaccattttctactgccctaatcagaaggggcaatggtccactctgcctccaccccccaaaaaaggataagagcagatgttggcaaggataggcgggagacggcattcagagtaggggacacagcatgagccaaagcaccaagagggacattactccttgtattcaggaaaggcaaggtggcctgggcgataggatcactaggtgcacagagggagagatattgatgcgtgtgcagccctttgtggtttctgaatccccttaacaccctcagaaccacactatgacatcagcacttgatgctgatcttacaggaaaggaaactgaggttcagaggccagtagctacttctatagggtcagacacctgaaaatcagcagaactgagatttgaaatcaaacctatctgtgcttttccccagacaccacagagctttaaaggctgtatgacccagcatatctagtcaactaatttcgcactatcctaatgactagtgagggtgtaattcattagaccagccatatagccgttctgatttcactgtcaaagtggaggaaaagcaaatccatcatatttttgatctgaggtgatttgcttgtgattctgcctcccacccaccccctgcagagctgagggggagacatattttgattctaacagcctgtgtacatcggtgctagcctgcatgtgtacaaggtgaaggagagactatagctttattcttg

SEQ ID NO: 44373 - DNA, 700 bp, Bovine  19866881819667
  misc_feature (1)..(1): n is a, c, g, or t
naagctggcccttcggctcccattgccaagcatagagatgaggataaatgcggctgtcagcggcttcctgcctctttgttttttaatttacttagagttgggcaggagagatggcaggagaggaagcagatggctcagtgtgacagatgggctcctatccagtgacacaaggacaaggtgagagaaagcatgatcaagagaaaacacaggctctgcatgagagcacgtgttcacggctcctgtgccaggatgccagtgctccggccagctcgctgggctcagggtgttgggctggggctccaggcggcccagccccacagtgtcacctgacagtgaggaccctggggcccagagatggtctccaggtgatgcgctcaaagggcacctgactgcatgcggtgaatgtgtgcattcacccatcatgtacgcatgatgggtgatgcctgtggcctggctcccaggcttttcccctctgccccagtctcaccacacgttcttacagaagtctaccttcagccctggcttgcctatgctaacaattctccaggcaggctttcaaaagagtgtttcatgcctagaacatcccaaggtccccagcacctgaatgacagtgctagggctccagtccaggactgggggtttgggaagggcagctcccctccatctctgtccctgcaccctgaggaggtgcacaggtaga

SEQ ID NO: 44374 - DNA, 1574 bp, Bovine  19866880492462
  misc_feature (1)..(1): n is a, c, g, or t
ncctgatgttgggctcagaaatttcactcctgtgaggaaatttctgcaatataattattttccagcttgtgggtttcccacctgcgtgatatgtggtttgattatattgaaactgcttccttcttacccatctctttgtgtgtgtgtgtgtatttttttttgtctttgctgcgaagtcacgtcagtcgtgtccaactctgttctaccccatagacggcagcccactaggctcccctgtccctgggattctccaggcaagaacactggagtgggttgccatttccttctccaatgcatgaaactgaaaagtgaaagtgaagtcactcagtcgtgtctgactcttagcgaccccatggactgcagcctaccaggctcctccatccatgggattttccaggcaagagtactggagtggggtgccattgccttctccattttttgtctttagaacttacccaaagagatactctatatcctgtcttttttttattgattgtttagtgttaattgtaatttgctgttcttgtggaaggaggtgagttcatggtctttttactacacttttctttaaaatattattttcaaaaaatgtctgtgtagtttttatgttcatctatattataaaatctaagtgtcatttctttactaatatcaatgaaaaatagaaaatgttcttaacatagttttgttctttatttttatatgaaattatatttgaaatactacaatagtatatggctagttttaatgttagaaacatttaactaatctactgtgtttcatcaaataaggataaatattttaaaaaattaagtttaaaattaaaattttaaagtttcttcataatgcttattataaatatgatgtccaccatagaaaatgaacaatataatgattctatttaaacagtatccatcctattcaatttcttatgtaacttcgaatttttacctgagaatagtaaggaaaagcttctgcttctcagtttctatttgtgtgaaaattttattttaaatttaaattaaatttaaattttgctctgtccaggttaggttgggcaacttagtaactataatttagaagttgatcctgactactaagtacaggatatgaaatgttaattaatttgcataagctttcagtatttctctgaaaagaattttttagcactttttcatagtgaatagtattaccaaaaaatacattagactgaatgttttcagatattctgttccaatacagagaaatgcttattaactttgaagtgtttctaagcttcattttaggttttgatttgctgtgttcaagttaattcccagataataactcgaaaacttttccaaaagtaatttagaacttaagtaatgaaatgcatctcatgaaaattgatgatgttttagggtgttgatttctctatatggtggctaaaagaatgtcaagtatattgtattttccttggttttcaaaatatgttaataccttattgaccagagattttcatacatcttttgttacctgaacattattgtccagagaggaataacggccacaggcattagttttaacaaaaatcc

SEQ ID NO: 44375 - DNA, 1929 bp, Bovine  19866880615512
  misc_feature (1)..(1): n is a, c, g, or t
nttggcacatattcccttagcacaacttctagaaaattagttcacattaagttgcatttaagtaatttagtatagttatattcttctcttaaaatatatataaaatatgaatataaacataatacccacatatccaactatttcaaagagattctgatccatctattgatcctttgagggcaatcaaactagaaattacaatttaaaaaacactaattgcaatagattttgtagcttgttgttgatattgttgtttaacaatatttacagggaaaataagaaaagcataagcttaggagtcattatttacctttaagcttgtttgccttcttagatgtcttctacttattaaaaacacagaattattttttaaagtagccttactcaccttctcaccttctcccaatatttagtcgagggcttccttggcagctcagatgggaaagaatttgcctgcaaagcaggagactggggttcaattcctgggtcaggaagattcccttgaggaggaaatggcaaaccactccagtatccttgcctggagaaatccatggacagaggagcctggtgggctacagcccatggggacacaaagagtcagacacaactgagagactgacagacaacacacactcatcttagtgtgcatatccaataagctattaagtagaaaatactttaaaaacatggaaagtgacatgaaatgtagcatattattaaatgactgatacttatatatgctataacccaatccatgaccactgatggtcatgggaggaagaaaaaaggttgcttattttttaacttagctgaatgttgttacattttttaaaaattaatactatttaccatttaacatttaaaaagtattttcaggagttgatttcaggtataatcctttttcttcaaactgaaataaatttgtcccattcagaatgtattcttagaagtagagagatacttactactctcaaacgatattcagttcagttcagttactcggtcgtgtccgactctttgcaactctatgggctgcagtacgccaggcctccctgtccgtcaccaactcccagaattcactgagactcacgtccatcgagtcagtgatgccatccagccatctcatcctctggaatgatttagaacagcgaaacactgacttggctagtaaggatgagataagaaagtaggtggggcacagtcacaggaaaggcctgtttcaggcaagctgacttataagaaaggggtaaatacttaggctgatagttcaagtctggtgattaatgtagtccacaagacatatagaatcgaagaaaatataattagaacagcaataaatgtggcagttttaagtgtggcgtgaggcatgtggaggtgatgaatttttctgtggaaaattttctgctcttttctagctatttctcaggaactatcagccacctaagttaagtgataaaacaacataaaagattaaacattgcacttatcagcagtattttccaatttaatttagagtgtggcctaaggaagggactgaataaaactattctctaaaagcactgtacttggaaaatacgactaaatgaagttaaaatctaagctctagcaaaagctgtcccatatctaggcagtttaaagaatcacttttcttcccttctaaaaccagtaatagtaacaacagtaatagttaaatgataattattgaaaatagttaattgaaaagattaaatgtgataaatttacactttgcttaaagtaagcagaattccctaaacagaactaccacagcttgtggtaagagaaggcaatgctgttcccatattgtgtcttaggcaggtgttctgttgacaggatggttttattcgttttgagctagaaagtggaaattttattaggagaactttattaccttgaagtctgtaaatttaa

SEQ ID NO: 44376 - DNA, 1528 bp, Bovine  19866880666124
  misc_feature (1)..(1): n is a, c, g, or t
ntgaagagcatcatctaggaaagattcattgttctagtggaggtagcagtaattcccagcataggtaaccaaggttccaatagactctgttgagcaatgcattgttataagagttgtgaaagaatttttcctggcatacagttctcatataagtgtgatttatgaagattcagtggaataaaatcaccataattctttgagggccaagatcatagttattctagattctggatagtagctgacattgaaatatgtgctttctttatttaatccttgagtaaacaaacaaacaaaaaacagtaattcacagttcagttagtaaaaacaaaataaggcattatggtaaacaaaattctaaaatgatcacaaggattcttgcaccttcatagatgctccttatataatttcatctcaagtttggatgggagtaatcaatatgattagacaaaattcctatgatttaagtgacatttaatagaaaaccaaaggggttttgcaatcagttgttttgaattaatcatgtttctttttaggtcaggtgggcttgacctaatcagttgtggttttaaaaaatactggaaacaacaaaagatattcctcttgaaagtgttcaaaagcaagttgctgtgagaaggggcaaccatgtggtaaggaactcaggatggtttctagaagctgagagggatcttcagttgataggtggcaagtatataaggattcactttatacaagcttaaggaaatgaatctctccatggccttgaacaagacttgaaacagaatcttctatagcgaagcctccagatgagccagtaccctggcagacaacctgaattcagttctatcaaatgccaaactgtttccagacttctgatctgcagaaactttgagatacagagtgttgtttgaaggtgcaaacacttttggataatttttaagtaagccatcagtaattgctaaggtatattataaatgtatttagcttattattaaacaatgttttgaaattctcatcattgccttccttcttaaatgaattaaatatgaaagtcagaaaaatctgataatttcatttctgtatctgttgtggtaaagccatgaaaatagtccctacagtatcataatactttacaactttgtaatagatttagatattagatatagatttggaaattcaggaggtatcaaaacaaagcacatgaggagacaggtctgaaaatagtaaatgctagccctgagagtgtaagaagtacacatactagtgagaagtgcacttactggtattgaatatcaatgaggcataattgctggatgctttcatattcaagcttagcaaaataaagctgtctaattttaaaatgttgaaaatgtcaatgtatgcaaatttgaggaagggttggaaatcatagggtaacagaagggaagaaagaaaggagatgaaatcctacaattagatttccctgatatgaatatgaaatgtaaaatgcatataaaagaacccagtagtaacttttcaatgccaatgtcac

SEQ ID NO: 44377 - DNA, 1895 bp, Bovine  19866880734359
  misc_feature (1)..(1): n is a, c, g, or t
nataattattttagttagatgccttacatcctgtgaatgaagggatggatgaatgaaagaataaccaacaaaataaaccaatgaaataaataggatagactaagaattatcagataacatcctctgatatgattttttttaatttgaatatgggccataatgcatatgcattttaaagagaaattatttttatagtttagtctttgttaatatctttttaaggaagaaagtgtggtagaactttcaaaaattcctagatgaaattttttaaatgttcaaaaagaagcactttacaacatggaaattatatctgctcaaggacttacagcttaaaagcggctcggttaatgctgaaaagaagatgctttgaggaaaaaaagaattctaataaaaatggaaatgatgacctactacattcctatgcttcttcaggcaactgatcatcttgccattgtatgcaccatcactttgccatttatcactgtagggtaggctggaggacattttctagcagataacaactcttaatattgagaaagttatgacttatctgcaaccttcctctctcatctgcaaaggatactggcatttatccataaggcaggcacacaagcaacatcctgagtagtttatttctttaatgaaagtatatgcaatttgcaagaatctaaatcaggatgtaaaatttaaattctgtagctttctttaaagaagagattaatgtgattacaataatcctaattgattaataatgatggcttttgtttgcattctttgaatattaaaatgagtaatgaattgctcaattattagggagagcactaaaatagtttttaaaagttacatagccacactttagggtgcttaattttcacaaatgcaaatgaaagtgagattttaaaattgtgttccttattttgttcaatgagaagaaattttgagtacagtcaaaatttttaatttggagttaattgtttttagtaacaattttgtggttactggtaattttgtgctaccatgtaaactttaatgttgatataagcaccatttatatgacaggaactacatattcaaaaacactttagtttaagaatctcagtatttttcataactttgcctgattcatattcgatcttatataagcagtgtcactggtggcttactctgagggattttaaaggcctccatgtagatcttgctgctgttgctgctaagtcacgcaagtcgtgtctgactctgtgtgaccccatagatggcagcccaccaggctcccccatccctgggattctccagacaagaacccagtgttcttgccttctccaatgtagatcttgatgcctaaattaaatcactcatgattactgcaacatttccaaaaatatttgacatgtcaaatatttataacaattttgtttgaatattgatataagatgatttttaatctttgtgtttgaaactgttaggaaatgtactgaaagcttctttggacttcagaatttatagaaagattatcagacaagaaaaggggaaaatggttttgatggaagaggtacctttgatggggaagtgaaagaaaaagtgaacaccattaagtatatactttaagtaatatataaattacataaaatataaataatatatatataatataaaaattatatatgaaacttatttgtttatattcagttcagttcagttcagtcgctcagtcgtatccgactctttgcgaccccatgaatcacagcacgccaggcctccctgtccatcaccaactcccagagttcactgagactcacgtccatcgagtcagtgatgccatccagccatcttatcctctgtcatccccttctctccctgcccccaatccttcccagcatcacagtcttttctaatga

SEQ ID NO: 44378 - DNA, 1497 bp, Bovine  19866880770781
  misc_feature (1)..(1): n is a, c, g, or t
naaggcaagcaaacaacagtaccattagtgtgaaacactaataaactctgtagctgattaaactattgaaggaatcaatttcactctcctttagttgtttgaatctattagcttaatgtagaaaagcagcctatgttgttgtgcatattggagcaattgcttctcttgaatttaaaagctctttaacaattctaatcttacttcttaaatcactcttcaaaaatgtgtgttgtttagttttcacagcttctgagcacataatataattaattcaaataagcctgcaagtcaacaggattttttttattaatatgagattaaagtctggaaatgatggttgctgtgtgaattattgagtcccatttattttattggaccagtatgcagacttcaaagcatgtaagaaaatctcttcttttctcttttttttattgctagccatatttttctccataatttatctcttctctaaatataacttgatattcactctatactttaaaatatgcataagattttactactgattttgtcacagtatcttttttttttttttgaacaagtgttttattttatttgtttatttttactttacaatattgtattggttttgccatacatcaacatgaatccgtcatgggtgtacacgtgtttccaatcctgaacccccctcccaccttccttcccataccatccctctgggtcatcctagtgcacaagccccaagcttcctgtatcctacgtcaaacctggactggcgattcctttcttatatgatattatacatgtttcaatgccattctcccaaatcatcccccctcatatcaaaatgcaagttagttctttcccagtttactgaagacaaagatatgattaactatgactatgattcatagctaaatattataaaattctctatacaagtaaaatatactgaattaattatatgtattaattattgtattaatcactaaaagaaatagaatattttaggttaaaatgaaaatttgtcccatttgtcatttctactcattctgatgcccccaatgtaaagatagaaatgagtaaaagaactgaattcaaatccccaaatttatgaaatctatcaaacctacaataagtataaagaataaaataaatatatacacagtttagtaaatagcaaagggctaataagcatctaccctcactgtgtacttcacttatcatacaggatcacattcctatatctctccatactccttcacatgcagatattatcactacattaaattagatgattatcatttccatgtatgatttcatacttttttattttatatgtgttagttgctcagtcatatctgactctttgcaaccccatggcccaccagacacttctgtccatggaattttccaggcaaagaatactggagtgggtgaccattcctttctcaagaggatcttcccaacccagggatcaaacctgggtctcccacattacaggcagattcttta

SEQ ID NO: 44379 - DNA, 1531 bp, Bovine  19866880940931
  misc_feature (1)..(1): n is a, c, g, or t
nacagcatttcaatgaagtgccagttcgaagcaccctaaaaaacacacacctggacattcttaaagtgaagttaatgctgagaaatatattgtattaaatatcttgtcattgttgaagaccccaatagcaaggagggggggcaatactgcctatcagccacctaattatctgcaatgtataagcagatattcaaagttagaggaggtctttacatttcacctctaagtaccacattagtaattcatgaatccgctactaatgtttctatggcattcaggcagagtgaaaaattaagcaataatgacttcaaaggtagaagaaccacaaaataactctgtacttctgaggtcatttttaccatttgaacataaattatatgagtgcacatcattggcttcagtatttgcaaggcattgctaatgaacagggaagttatttaggaaatggagtgcaggaggtagatatagatagaacactgaagcttaacagaattgattcctaatataaaaagaaactcatttactgctcttaaatggccataagtgcaaaatctgcaaatgaaacaaattttcaaaaattccaggaagtgcaccagagttgttcaatcaacatgatcagctttaggttcttgctttatgagaatcttctctggttcagtgggaactcacagtaatgatatatttaagactttttgttctattcagtagctgtttttgcaaatgcagtcacacaagacaaattatattctccttggattgcttaaaagcaattttcctccagctgactaaattgtacattgatatataatgtcattgtgttaaaatattaaaaatggtccagtaaaaaattatctcagccttaattgtacaatttcaaaataatacaaatgataagagaaaatttaactggtaaagtatccagtattggacatcattatgcaaaataatgaaaaataaatgtaaaacttagtaatagcattttgaaaatattctagatttttagttccatgcatatcctaccatctgatatagattaatccttttaataggatgtgtgtgacacatttttactatctgttttattagccacattgtactgacacacataataaaatattcaaatcagcaaatatgcaatgactagggactagatgtgttcaaaggattataattatatttgattcattcaatatataaatgatagctacaaaataataaaagttccaaataataattattattccacagtatatccaatattatgtctgctcattaatgtaacccagtacaactaaatttacaatgagttaaatctgatttaatatatttgggtggtattttaatacgattaaaatgatcaagtgtccaaataagattgtgtaaagtcaacaacagtcttaaaatccatcctgataaattatcaaaagaaaaatgtgtttcatatattggtatctttagaaaatattcaataggatatggatcaaatggtgtatatatatgtatatgtgtatacgctaaatcttattatctg

SEQ ID NO: 44380 - DNA, 1331 bp, Bovine  19866880991643
  misc_feature (1)..(1): n is a, c, g, or t
nacggcagcccaccaggctcccccgtccttgggattctccaggcaagaacattggagtgggttgccatttccttctccaatgcatgaaagtgaaaagtgaaagtgaagtcactcagtagtgtctgactcttcgagaccccatgcactgcagcctaccaggctcctccgtccatggggttttccaggcaagaggagtagagtgggatgccatcgccttctccgtataattacagcagaaagctcaattatacaatcctttcaagctttatttttcttaccacctagcaagttgagtatacaaaataaatatgggaagaagtatgaagccctgtgaggaaactttaccttattatgaagactgagctctattgctcataatatattccaatatcacttttatcattcatagtcagtgaaatataacttttctgtaagtaaaatttaactttgtattatcctcctattcagttgataacccacataaaccttaccttgaaagaaatacatagcaaagagaattcaaaatatactgttgagaacctatctactatttaagatgagagtatagtctataaatataagaaataattgcaatagatgcaatatcatagctctcacatggctccatatattatgaatattagctgtaggttcttaaaatgtacattgcttttggaaatttaactgtaggaaagttagtgttctttgaacttatggtaaaaatattcacaaagtttttgatgtaaagtttcatacaggatgagataaagtttgtttcattaaaaaaaatgatttcaatattgctttctgtttaattaaattgcatttatagcacaatattccaaagaaagtagatctgatgatcagaaatcaagaatatttgtattcaacaaattaacacttcactatttagttcatgaatattcaataaaagattaatttattttaaaatgtctctattcctttactcactcatgtgaaaatacattgaatcatacgtctaagttcttgacaacaataaactagatttttatatggtactttccagaaacaaacacaaataaaactaaaactatttgaaaacaatagatactctagagaattaaaataatttataatatttaagcaaaataacaatatcagttgtgaaaagtaaatgactacttccagaatataaattttctttttaaaaatgtttgttcagaaaaacagttgacatttttaccaatttatgagctttcagttgagagttttcaaaataacattgcatccaaggaaacattaagtaggaagatatatcagaaatgcttgcgcagtcataaatttatttt

SEQ ID NO: 44381 - DNA, 1216 bp, Bovine  19866880380480
  misc_feature (1)..(1): n is a, c, g, or t
ntaaggctaatagtctatatgtatatgtctgtattttatcttttcccatgcttttttggttattatttctgaaacataatttttaaacttttttatttaatgaaagtgcctttaagtcctacagtgccttacaacttcagaagttttgcacacgattccatataatcccataattcctctttaatcccctactcctttactgtcccaccccttcctctcacctctggtaaccactagttctctgtatctgtgagtcacctttttttttgttatatttactggtttgtcatgttttttagattctgtatacaatatttgtctttctctgtctgacttatttcaattagcataatccattccaaatccttccaagttactacaaatggcaaaattccatttttttttttttttatggctgcaatggcaccccattccagcactcttgcctggaaaatcccatggacggaggagcctggggggcctgcagtccatggggttgcgaagagtcggacacgactgagcgacttcactttcacttttcattttcatgcattggagaaggaaatggcaacccactccagtgttcttgcccgaagaatcccagggacttgggagtctggtgggctgccgtctatggggtagcacagagtcggacacgactgaagcgacttagcagcagcatcaatacacacacacacacacacacacacaccatcttctttatctattctttatccatttatgagatgtaattttatctagccacatcttttattttacttatttatggcttctgggttttgcgttgcttaaaatatcttccaaacagtaagatggtaaaattgttttcccagaatgttcatgtgtgtgttacgtgtgtgtgcacacacgtatttgtgcatattgcatttgggtgaatatgttttcaaacttttatctatcagtattttatttttgcctgtgttataagatgggactctaaccgatttttccatttcattagcaaattttcccaatgctatttgttgaatcatttatcatttcctcttgatttgaaattgatctttattatagaccaaattcctatgctcttatatgtctgttcctgtattttctaatttgctttcttgaactatttttttcaatccttgtgttaatagcatagtatttaattactgtaaactttgaattttgtatctgtgtttattggtgcaag

SEQ ID NO: 44382 - DNA, 1436 bp, Bovine  19866880498620
  misc_feature (1)..(1): n is a, c, g, or t
ngggcaataattaatccagagtcttttaagcatcgttgagctatagtaaacatatgttgagtctctaaaacagatggggccaaaaacagtatatcgtccatataatgaataacaagaaagtcaggaaattgttttctcacaggttcaagggctttggctacataatattgacacatggtgggagaattcatcatttcttgagtcaatacagtccattgatatcatttatgaagcctgatatgattaggaaaaggaagagagaaggcaaatctttctcagtctagaggatgtaaagatatagtaaaaaagcaatcctgtaaatctataataataatatgccagttttgaggaatagtggtaggtgatggaattcctggttgtaatgcacccataggtttcatagatgcattagcttttataaggtctgttgctgctgctgctgctgataagtcacttcagtcgtgtccgactctgtgcaaccccataggtggcagccaaccaggctcccccgtccatgggattctccaggcaagaacattggagtggggtgccatttccttgtccaatgcatgaaagtgaaaagtgaaagtgaagtcgctcagtcgtatccgactcttcgtgaccccatggactgcagcccaccaggctcctccatccctgggattctgcagacaagagtactggagtggggtgccattgccttctcctcttcttcatctcataactccccgaatcagtgctggcataaacagctcctcctcaaccccttgctgtgttccagttagcagaagccctggctttgaggtcaggtccacccaggtttgaatccaggcatcgctttttaaaaacacgtgatactgggcaagtaacctgatcttgccgagcttccgtttccttctcttcaaaataggcatcatattgtctgcttcacagtgttccaggcaggactaaatgctaaaatatatagagagtaagaatctaacccaacacctggcacaggaacccaggctctataaatcttagttcccttccttgttgctcttactttctgtccctcagaagctgctccatcttctgctggggtgtaagtaggaacagctgggaaatacctggtgaggttttgcttcattccacatgtccttgaaatgaatcttctgtcctctgtgctcctcttctcaccattaaacccccttcctttcatctctagggaaatctggaaaccagaagatgctctagcctcccatggcaaaggactgggactgatctggttaacaatatcccagagtgatctgcagtgactaatatccttatttcctccaaagtcacagtgctgcactcaaagtcccgtatccctagaaacacttcatcccaggtaagccagagccactggtcaccctcgctgtctgcagggcagtttcagagacaaatagaaagct

SEQ ID NO: 44383 - DNA, 2625 bp, Bovine  19866880512257
  misc_feature (1)..(1): n is a, c, g, or t
nttcaagccaaatgacactagtttggctgttaacttcccaagatcctcccacccaccaagggacttggggtgagtggtaccaagatggggatgccgtctttggcttcctcattggaggagggggtcctaataccaactccctgtagcttattctccctaaccccagggtgcacacaggccttagctcccctcctccccgaagcctctttctgctcctggacctccctgaccactcatgagagagccaccgggctgaggccagagaagtgggggagggaagcttgtcccacaggactgaagggcagctgtttatattataattaaggttttatagcataagctgaaatgtagcttgactattccaacaaggcgctggaggtaattaccactgctagaggcgttctccactgccaattatttccctccttaattgaatgactcaggctgcattgtagaggggcaggaaaaggcagaggttgctctggaggaggagggcaaaaaacagaggctgttccttcagagaccatagaacagctcaaaatttaacacacctttctcctaacatccttttccaggagtgtggtatggaggaaaagaatgtaagtcttctagttccaccattgactgccttgggcagattacttaaactccttaaatctgttccttcatccataaaatgggtctaattgaagagacttcacagtactcttttgatgattaaataaatgataattatccgggcacacagagaatatcaaataattctggcttatggaaatggcaccaacaaagggtgttgccatggagggggaagtgcttttgtcttctctaaccagaagggggaaattgaggcagaaagcacatctcagtccctgcgaaagtgcttagtaagtgagggccaataccaggcagaaagtgcttacagggagtaaattcctgtgagttgtaaaggaaagggcccctcccaaagaggttagacaggtcccaagatgtcctgtccccaggagggtccactgccctctcccccttctcctgtggctacacaaagtgcccagcattgggcacagaaccctggtcacttccccagatccaagcaaacctgtgattaacatcacatacatttgcagaacactttctccttttgaaatattattcttcttccacacatgttatctcttttaattctcataagcaccttgaaaagaaaagtatcattcctggttaataatctaggaaatggaggccaagtgagattaaataaagagcataatcaatcaagggctaaaacacaggtcttctgcctccaactttcccgctgctccgtggggggaggggcaagtctcctcccactcccttccccgcgtccagattcgtggccagtgagatcatagagtgtgtttcaaacatctcaaaaatcagagatgagagtgagtctcaaaatttggtgcatgttggagtctcttggggaaatgtgtttgcaaatacatattccaaagccaccctcctagggattctgactacctgggtctaagaggggcccaggaatctgaagttataatccctgagtctttctggtttcagtggttcaaaggtcaccctctgaaaaacattggatggagagaactcagtggatatctaagagggtacctctgaagtaccttatttgacctcagttagttgacttaaactttctgaacattagtttccttaaatgcaaataaagacaaatatttacctatggatatcttgtgagaattaaatgaaataatgcatgtaaggtgctgagcatgatggccaacacatgtaaagtgctcagctatgttagtaattattgacattactggggctgttgtcattaatattgaaatacagctaagcctggtgctactcaaaggatatgttactatagcttaaaactatcatcttaaaggaaatcagtcctgaatattcactggaaggactgatgatgaagctgaaactccaatactttggtcacctgatgcaaagaactgactgatttgaagaccctgatgctgggaaagattgaaggcaggaggagaaggggatggcagaggataagatagttggatggcatcaccaactcaatggacatgattttgagtaaactctgggagttggtgatggacagggagggcccggtgtgctgcagtccatggggtcccaaagagtcagacacaaatgagtaactgaactgaactgaactgaaaactttaccatttggagtcgttaagtctatagaaaattgggatatagaagggacataagtaggatttgataaacttaaatcatttttaaattagtgactcagttatactcatttagttgcctgggggtgcgatgctggtagacaagcaactattcggacaaacacgtggtttgttctctgatttgccgatgctgatgaacagtaggaaagggaggcaattggtggataagccaagaaggatttcttgagaattgcctttcaattgatgtgcttggcactttcaatcaacagcagacagcactaatgtggacaagaacactgggacctgtccccagtcacaccaaattcctcctaattatccccattctctgacactttagcaagtgcctctgaggacc

SEQ ID NO: 44384 - DNA, 793 bp, Bovine  19866880889981
  misc_feature (1)..(1): n is a, c, g, or t
nacatggtgagagagtcagtgagctctggtagctgagaagggaggaggcttggaagagaagaggaggcggtcagagagaggaaacaagttccctgcccagtgtcacctggggccagccttgaaatcactgtcagatccactcactgctgtcccattcgacaagagcaatcaagcaccaagttctcccagccacggccagcttcggggacataagcctgcactgtcccacagctccctgcactcaggagggccctatgctctgttcaatgctctgatgtcaccatcttgatgttcttaaaactgcttaaaccatttgcaatttgactgcccctcgaaaattctgagttagtcctgctcctaactactccctagaacatcacaaaagccctctgaagggaggtcaggctaacctcgcaattctctcttcatcacacatgtgtttccttcagcctctttttacacattgggagacatttgaagaaatgtccttaattccgagcactttaattcacctccaccaactaagcctcttcggaggtgacttaggtatcatgtgacccaccctattattagcacacgccccacccccaaactcctgcttcccttgcccttatacatatctctctctcagcagaaaagtggcacatgacctcctagcctcaagaacacttggcacaggtccctgtttctcagccgtgtctattgttcgcgtccagaatgacactgattctaagagtctcgctgacatttctgacttttagtggggagcgccatttatcaatggctgcatctg

SEQ ID NO: 44385 - DNA, 770 bp, Bovine  19866880966338
  misc_feature (1)..(1): n is a, c, g, or t
naaggaggggcccaaaatgggagggagaagatgggcagggaggagccctggaaataacctggctgacgattgccccaggtcagccattcttggctctaggagattcaaagtctaagaacaattcccctcctccccaaagttttcctttccaagagaaatagattccctctctgcatgtctctttcaactctcagcaagaccagtacaaacacatgaaggctgtaaacctgctacttcactggggctgtttatttccagtcgacaaatattgtgccagtgttcacttcaattaggaaacacatttgacaatctgactactccatctgatgcctcaagggcaaatttcagctctttcagaaagttagggccaataacggatccatatgaataaaatatacagacaaggaatatttgaggcagtttggggaaagcaccttctgtagcaaggagagtaaaatgtctacatggaaaaaaaaatcgtataaataaagcacggggcttaaactggaggggagctgggaattcagagtgaaggctacagtgcctgctcgcctttcacctccctggagttggaaatcggtgagaatcagcactgtggagcctaagacgtgtaattctgtagaggaaatcattgcagcagagctgaactcactaacacattcactaaagttattccagcttttaaaatcatcctagaaaccagaagctcttctggttatctaattttcagtccttctgctaaatcccatctcttctttattacccttaag

SEQ ID NO: 44386 - DNA, 2595 bp, Bovine  19866880992046
  misc_feature (1)..(1): n is a, c, g, or t
ntcaacttccgtttagagttagacaggatccccacggtaaaatattagacaaataatgtctcagggttttcatttcctgttacataaagtgggcctgataatagcaggcatgacaatttcccaggtccctgatgagaccccaggcaggcctgggtgtatatgaaacatcgagttctattcaaaagcaaggtatcattgtagcctttgttataatgcaacttaagcaccccaaacttccctttagcatatgctatcaactcgagcatccctacaattatgaaactatatatggtttcacccccatgtcatctcttgagactgcttgtgtctcaaagtaggattaccttatatttgtcctgaaacttcctccttcaaatcagaagctgtcccctgggttcagggttttgggatttgtgaacaaacctgttttcactctgcctgcccttttcatggttgtttaagtctcccctcatattccctcaaggtttgcttttgtagcatgagacctaattccttctggaacaaagtttcctccataactatgatcaatggtgggttctctctgaatcccctgtccactggaaatccatgtgtatcagcagctgtcttgtcttccttaactgtaagcctaaataccttctgagtaatatctcagcccaatgtgtgccagaaagctgtcttcataaacacttagaaaattgattttggtgaagaatctatggctgaggaccctaagaaaagtcagttactttcagtgtctctggctcttcaagacttaaggcttaagaaacctctaggaagacaccccagggttgctgaagattttggtaggcaagcagggaagagatttcatcatgagatttaagaggctcaggaaggtaactgcctagaaaccctttcaaacaagtccacacagttctttgagacacatcttttgttaaaattagagggccaccctgtctagtaggtaacttctaggctctggggctgggccatctggttggaatcttggctctgccatttcctaaatgtacgacttgacctctttgtgcctcaattttcctatctgtaaaatggggacaataatagccacctacttaacaggtttaagtagaaactcttaaccctgcaccctcggaacagaactcattcgtgtgtagaggacttcctgtattacatatggggcacttaccttaggctgaaccctgtgatcaaggtcttatattacctacttcagttcttacagcaagcttgtgagaaaggtgctgttttttccctatggatgaaaaagcagaggcttggggaaactggttaacttgctctacatcacatggttagcaaaggcagcaccagaagtcagagcccgtgttcttcaccacttgatcgtctgtgttttcatctatgtttccatcaagggaatttctggtcttagtttctttcctcaagtaggtatcatctagaatgctagagtttatattatcagctggtaatttggcttatggaaagggcactggattaggagtcaggagacctaaattctgatctaactctgccactgactacagcagctgagacaaagtgttttcttctgctgggctaccaagtgggaactgataatgcctgctctgcctatctcagggactatggggagggtcactttcaaatttatccaataatgagggctcactggaggctcaagctcatgtgagctgcatttgcatgtatttttcattattgttaaatcaacttgtgctgtgcttaacttaggagatgcttgaaatgtaagataccattgttcctatgagtttggacaatatgaaccagttttcctttggggtctgattgccctcagacaggctaaccatcagctgggatgaaccttatatttcagagagtgaacctcactctaggaccttccctggatttcaaccttcctctttcaactattccgtgatggggcatgtggagagctgctttggaaccaggatgccagcaaagtcaaggaggtcaaactgaggcctccccatgaagatctctgcgaacctgagatcctcacgaagtgcttctctccctgcatccatccagttgctatggtgggatgttgggttggttccattcttcactaagagattaggtataaacatgcggaagaaggatttgaccgctaaggcaatgagaaaaaatgaagccaggattcatattcagctggtatgtatcaaggtgacagatttttcccagtcagaatctgctctgatcggtcagtgcccacagagggctgcttgttatacgtactgactctcactcctggataaagctcatttgctttctggttttgcagaggctcttcttggttctgtgctctgcctggtcaactcttttcccatctgcctcttgggaacatagaggtagcacaggaaatagtacaggggctcagggaggtgcctcacaggggctgacacaatggagcaggtccccgttgccctgatgtccccaagagcctgatgggatgtgtccattcagctggctcagctctgagaacaggagccagatcttcttcaacccttcatcgtgacagttctgtgctgatgtttaaat

SEQ ID NO: 44387 - DNA, 947 bp, Bovine  19866881019423
  misc_feature (1)..(1): n is a, c, g, or t
ngattttcctaaaatcctgcaaagggaagaaagatccttccggtcatatttagcaccatggtcagtagtgtggaacgtggtctcagcagaggaaaagcagtgggtcctgggccagtaagcaagcctctggtctaacgagagagaaaacccacagagcacgtgctaacttgacttcacttctggtcataaagcatccgatcactttactagtgaaacggtaaagtaaaacagcaatttttttctattctgctctcaaaatcatctttcttccctgttactaaaattgatttcattcccatttagctataagccaaacagagccctgcatccaccatctcccagttcattttccgtcgtgtccttttattttagctttagaacctgaatccttgtttacacgtaaataactcagggttacttatgctgatttaaaaacaaaaagagaccactaatcatcgattgtttgatatataccatttacagcaaaagatcctattcccactgatcattttttgttattaaaatgtagtttttagctctttttctctcagggactgggtttagataattgagctctgaagaaagattgaaaactctttccgtataaatggaggggaaaagtctgaaatgctaagtactaactcgtagtccactatcgtccttatctttaataatggaaacacagtttagcacaccatgcaaaagagcatccttatatttttaaattgcaagtgtccaattatgtacaagggtcaagacaaaattgatctgaaggagctcaattttaaaatcattttaaaaatcaggacaaaggatgccacattattcaactaaaatgttaaaaaatgaaaagtattatgcatgccgcatggcggaagatcagatttttattaatgcaagttttaaatgctgattaatcctctcgagagtcagtttcccaaagcatt

SEQ ID NO: 44388 - DNA, 1195 bp, Bovine  19866881058994
  misc_feature (1)..(1): n is a, c, g, or t
ngaaagtctctaaaaagggctgaagcagtccagcatatcaaagtcaccacagctaactcacacagcggtcaacacacaggtgggtgatgggggccagatggggtggggctgggtgtggttgcaaaccacattccaaattggctaatcgtgacttcctattagctctaacactggatcctgaatatttgcttcagcttttaatccatcccatggtcgctggatcaggtgagtgatctttaccttgacagggtatgtgattagtggttatctatgactttctctccatcatcatgagtgagcaaggcttagggaagatgagtagaggtctgacagagaatacaaagttcttttcttgaggaatatgtagtcagaaaagatatatggcaaaaccaatacaatattgtaaagttaaataaaatcaaattaaaaaagaaaagaaaagaatgtactattttgaaccacaggtactttgtgtgacaggaaatgctaagtttaaaagagtggttggtgtaacctcagctaaaaaggagaagaagcacaccgtgatgattctaagagggaaaaagagagaagatgtgttttgctatagcatcctctatctagggtttatccatgaaacacaaacaccccaccacccagagagcagagcagctgctgtggagattggcttctgagtcactttcactgaagtggaactatttgttcaagttcaaaggcaacaaagaccttggcagtcatctgccctaggaatgtcaagacataagatgacatcagtggatactggtaaacctgaggaagattttctatttgaaatagggaagctctgggggtaaactaagctttgttccttctttgaaataatggcttcatccaggagtgtctctgacccacgacccttggtgatgtatcacccatctaatttagcacattgtgaactctctagagagagaatgtgctttttggaataattgttgttgtttagtcgcttggtcacgtccgactcttttgtgaccctatggatcatagcccaccaggctcctcagtccatggaattctccaggcaagaatactggagtaggtagccgttcccttctccaggggatcttccagacccaagggtcgaatttgggtctcctgaaatgtaggcagattctttattgtctgagccatgacggaataaaacaaactataaaaa

SEQ ID NO: 44389 - DNA, 881 bp, Bovine  19866881072261
  misc_feature (1)..(1): n is a, c, g, or t
ntcctatttgtctctctttgcttcaaggaccaggcaacactaatcttccgcaatattcttttcccaataagagctcacatccaatctgaatgctaaataatgttgtcacgaggttgcatgggcactggttaagatctatgcccaaactataatgaatctctcttctacataactgtgattgtggccaaaattggtgagcaacccatcctcaagggagcagtgggaggagaccagaatattgtgttggattctgtcctggacacatcttcagctagactcctggagcagtttaaatcaagggctgggctgagcaggcctgaatggcttgcaaatgacagatttatggagggaggcctaattagatcacggtaatttgtagtacgacagtatcttttgctcaagatctcaaagcaaatgtctgccttgataggtgggcaaaacaaagacccacaaatgtcaagggaaagtctcaatttcacaaaataaatcctgggacagcccgggataagagtcgcacatcgcatttggaaaacattttacagttttgctctgcattcatataattttgcctcctttgagtggcccaaattcctgccgtaaaagtaggagtggtggtcggtgtttctctcgttttagaaaaggggaagatggagacactgactggctgagtggcctgcccaagatcagagtcagtagtggggttgacttttggattccctgtgtggagaaatgaagtgacttttagcaggaaaagaagaagaaggtcttgagataatgagattctgtttctaacgacttggcagaaaggagcatggttgaggaatacaagtcccagcaaagattcatttaggtcaaaggcttagaatggattgcaaacctgt

SEQ ID NO: 44390 - DNA, 850 bp, Bovine  19866881083710
  misc_feature (1)..(1): n is a, c, g, or t
ncttccccctccccgacccaccaccgccgcctccttctatgacaaaggtcatctgctccttcctgactcaggtactcttgccatttatttgtgcctcctggacagacagtcaccccttctgtctgattaggcagcagtctccccatgatacccttaagggatttggttgtcatcttacggaaggggaaaacagcaaaaacagtagcacatcaggaaacacggttttccccagagagcaggtgggagttagaaaggacccttttccccatatcatctctctctcctctaaaagataccaattcccaatctctgcatccagaattataggttcagtcgtggtattggtgagcctttttgaatggtttgcccaaggtagtaattttgtaatccaccgtagctgaagtaagtatagacctgggccgacacagcctccttccttctcctccatccagccccgcgtccccacttaggtgaaaaactttgcatataaacaaactcctctcaaagacacctcaaccttgacatttctttctcccttttccaaacttgcttccttttaaaacacctcgcgctctgccctgctcccacatgaggcccaattatcagaataataattaacaggttctcattatttaggatcaaacaatgcccccctaatgaagccaagaatagccaatgtgatcccttaaaacggggcggtgagtttttccttacaccttggggcgtctaatccactgaaaccattaggcaccgagctgcccataacggcctggataacattgagtcaaggacagttaatggatgccagagcacagaccaaagtgctccaagcatgtcagtcaagactaac

SEQ ID NO: 44391 - DNA, 1054 bp, Bovine  19866881087547
  misc_feature (1)..(1): n is a, c, g, or t
ncaacagcagagtattacaacatgtatgtgactgatgccttgttagcaagcattaacgttagaagcagtcataacaggactaaactgcttggactccaagcaattactaacctcaacaactctgaattaacttgaattgtctcctttttttcactgtcttctgacaataacaagctggtccttttctgtcaaattccattttaaaaacacatctttgttgttcggtcactaagttgtgtctgactctttgcaaccccatggactgcagcacgccaggcttccccatccttcaccatctaccagagtttgctcaaacgcatgtccattgactcagtgatgccatccaaaccatctcatcctctgtcgctcccttctcctcctgctctcagtctttcccaggatcagggtcttttccaatcagtcggctcttcgcatcaggtggccaaagtattggagcttcagtatcagtccttccagtgaatattcagcattgatttcctttagggttgactggtagacttataaactgttggcctgccaattacatgtatatattatgtgtcaagcctatgtttttgcatctaacccattttgcagagtccagcttgactctccagatctacctttcggtcttcttttgccatcttcttatgtaattcatctacaagcttgttattgtccttgactatataagttccagatcatgtgaaattgggatgtgactcactcagcaaggccacacttggaattcactcagtccttcagtgttaagagcgggcaggagaggtttgatctgaaggacaatttccagagcctgaaggaagtgccgatcataggcatgcttccttcctctaagaacaagaaaagttggctctgggaaaaccccagacagatctgctctggtttgtttctggagccttgtcttctcaatccagaggcttccagaaacttcccagaagcaacaggactaagaatatagacctttctcatcatttaaaataattacagttttctctctctgaaactccacatgctctttcaatgaactgggctg

SEQ ID NO: 44392 - DNA, 1515 bp, Bovine  19866881159624
  misc_feature (1)..(1): n is a, c, g, or t
naagctctgaagttctagccgaacctgcctactgtgttggtttcatcctagaatgggatatctgcctcttcaaacttaggaggaagaagccttaattctctttgcttcccttgctgaggactccagttctaggaccagaagacacacccctcaacccaactaaggcttatgactcccccttgcttttatgccacgcatctcttttctggatttatacccttccccatctacctcgagatttaactacatgcattagccaccctcagaaagattcctggatgaaaaccaaaagccagttcaattcgtaggatttgactcagaccttaatgccttgcttttatactcgaagcaattatcagatatctgagggccaacattattcagcgtgagggctgaggttctcattctccactagtgtccctggaccactgaattatcctctctgtatccaccttgatggtggatttccctcagatcaacaagttcccattctggagactcctgtccgcatgttctaggttgccagtggcatatggtaatggtagctctgagttctgattcttaaagagaaaggtaaataaacacttgggccatggcctgaacattgagtgcgactactcagccacaaaaaggaatttgaatcagactgtagtgagggggatgaacttagagcctcttatacagaatgaagtgaatcagaaagagatacacaagtattgtatattaacgcacagatatggaatcgagcaaaggcactgatggaccccgtggggaacagacttgtgaacatagcaggggaggccagattcagcacgcagccttgacatatacacactgctgctgctgctaagtctcttcagtcgtgtccgactctgtgcgaccccatagacggcagcccaccaggctaccccgttcctgggattctccaggcaagaacactggagtgggtcaccatttccttctccaatgcttgaaagaaaagtgaaagtgaagtcgctcagtcgtgtctgacttttcgcaaccccacgggctgcagcccaccaggctcctgcgtccatgggattttccagcaagagtactggagtggggtgccattgccttctccggacatatacatactatcatgtgtgaaatagtggaaagttgccgtctaatgcagggagcccagcctggtgctctgtgatgccctagacggttgggatgggggaagggagggaggctcaagaggaggacatacacataattatgactgattcgagttgttgtatggcagaaagtaacacaacattatatagcaattttctgccaattaaaacacacacacacacatacactgactcagaaactcacttcactagagaaatttattaaaaagcaatacctagagcaagcataatatcaatttctttaacactgatctattttaccatgaaaatgtggtgtgaatggccacggcatagcttttcctggctcaaaaggattcatgctaggtggggtggtttccattattctcag

SEQ ID NO: 44393 - DNA, 907 bp, Bovine  19866881238214
  misc_feature (1)..(1): n is a, c, g, or t
ngatccggtgcacacctgaatttccctctaccgtaactgttggcatgactgagtgtacatgtgtgtctgcctatgtacacgtctgtatcttgagctgagatcagaaaaccatatgtgtattttggggtctctgtgaagttacataagtacctttgtatttccatgacctgaatctatctcccaagggatgtttagttcaaaatttacttcttttaggaagactgtcctgattatccactcagccttagattacttccctctgaacttcctgagcacatgtgtttcacatctaaacttgcaaatgcattgctaaaagcatgtcctcaataactcatataaagtttttctcacatgagaaccctctgcctttgcctctgaccacttggaaatgagttctgggctttatcacatcccctgaaaacagatccaacccacgaagcattagtgagtaatgtagaactgactacaattttatggggagatgaaggagaaagctacatgatacaactcccagcaataaataaagacaaagatctttgctttctcttgtcagagttcctctttagtcatggggagggtgagatggtttgaaggcatcacccgacttaaaggacgtgagtttgagcaaactccaggagatagtgaagaacgggaaagtctggtgtgctgtagttcacggggtcgcagagagtcggacaccacttagtgactgaacaacaacatgggcctctgggtctcctccctccctctgaatctttccctaaagtagccactgaacatctcctcctttcctggtcagagaaattcagctcacttctgaatttcttcatcaaagccctcagctgattgtaatgtccaagaatgccagcattttccccataaaaatgaacctctctctgtaggagaa

SEQ ID NO: 44394 - DNA, 935 bp, Bovine  19866881267564
  misc_feature (1)..(1): n is a, c, g, or t
nttacatattgcatgtaaacattttgacagagtcatatacgaaacctgttttcattgcagagtatataatcaaatgtattgtttatcatatagatttttatcactcatagtgcaattttcatcattccctagagtagtatctgaagtgataagttatttctcaagtcctatcaaagtttttggaagttaaaaaaaatttgatattttgctcaacttatataagtcattttttaattgcaactgtatcttgtttcttcttttccatagtcaggtaaacattttcctttcctgttctattttccctgtttttaagttgaaatgtcacttctgttgcatatgtcccatgtagtttctctacatgtttcccatgtggagaaaaatttcttctctgtaattaaaaatatttttagccatttaaaaactgaaatagccaagcatatctatttgagtgttttgtaaccttttatgacagtaatagcaatttataatttataccaaataaccatacctagcaaaaatttcaaatcaatttcattttctaccaaagtctacaatttgcttttcatttgaggatttggtattgtcttcctcaattcttttagtgaatcttatatcctgtataaattaaatgtaattactttaacagcatttggttagcattcccttcatgagtctaagagtaaatctaggccaaattttatattttctaccaagatgttttatcttcagacatctagaaatttaatagtacataatctttgaagtgtttcaaagaatatcattgtcatcagctgaggtcatgtctcttagaaacaaattcaagctatataaactgcacaatacagaatgcatttgaattttcaaaaatactggcttgtatactttttcctagaaaactatattagttccgtcctaatgggcttccccttgtgaat

SEQ ID NO: 44395 - DNA, 1149 bp, Bovine  19866881315877
  misc_feature (1)..(1): n is a, c, g, or t
nctttgacataaactttgtcttccttcttcccttaaaagcaaaatgctcttaacaggaattaacaactgagcatttctagccatttattcttagacaggatgagctgaaaagattctagtcctacatcagcatttgaaggtaggtggaacaacatggagaacagaagactatgaaagcaccaaatttagaaactggaagaaaacagagatactatcaagagaggaaaagatacagaaagagggtgctggtgatgtcttagagcaaataatctgcccaatgactttgttacccttagcacaccaacttgcccctgccctgccattgactcgtcaagctcagcattttggcaaggattttctgaggcacaggcttatgttctttttcgttctgactttcactccccagcctcctaacagctaatgcattggctttatagccagggtcaggacttgcagctgggactatcagccattggtttgcagtccatcggcttgtctgcccacctgcccttcaccgatattccttggatctccacccatctctgacatttccagaaccgaactctctgaggtgaaggcttttgtcgccagccagagtttggggcacggagcctggcatctgcggcccttcagatatactccactgtttagatgctttcatttccaggaacaaaggcttccacccccacctctcctctctgtcccctcaaagggcacccctgtgaggcagcagaagtgcatcgtgatatcatttctgatagccataggtttcagcaatcagtaactgggttttattccaggaaaaagcaatattctttgacaaataagccatttgccgagcagtttaaatgacattgcaaagagtgacgctacaaaccaatgagcctgttttctctctgctcctattcaccgagaagcagctaatgctccagataaggagtgtagatcacatgtggcttataaacttataacgtgaatacagccctacacaaagagccccagaaggagaccaccctggtcagccactgcattcatgagagacccaaccaagccgactctgctcccttcctatcttggaatgggaacatattcccattacccccatgtccttgaggattttcttaaaggcttccattccttaaacacgcc

SEQ ID NO: 44396 - DNA, 917 bp, Bovine  19866881522416
  misc_feature (1)..(1): n is a, c, g, or t
ngctgagtgcggaagaattgatggttttgaactgtggtgttggagaagacccttgagagtcctttggactgcaaggagatctaaccagtccattctgaagatcagccctgggatttctttggaagaaatgatgctaaagctgaaactgcaatactttggccacctcatgcgaagagttgactcattggaaaagactctgacgctgggagggattgggggcaggaggagaaggggaggacagacgatgagatggctggatggcatcactgactcaatggacgtgagtctgagtgaactccgggagttggtgatggacagggaggcctggcgtgctgccattcatggggttgcaaagagtcggacatgactgagtgactgatctgatctgaagaattaggaagaggaggaagactcagcaaaggagtgtctgggatgtcaggagaaaaccaggagtccctggaaaccaaataaagaaagctcttcaagcaggacaggagtgtgtattgtcaaacactgttgagtggtcagaggacacacagtggatgatgagacattgacccctgggccaccagtgaacgttcctgaccatgagcaactgtctgaccaacaggggcacttcctgtgcccagcagtttttcagtgcctgaatgcacccttgatgttttccttttggaggttaacaactcatcaagagcagacagacctatcatggagaagtttcttcttgacagaaattaagagaagtattgccttctattccccaaatgatcatattaaatcaaatataacattctccatcgagggcagcgtctcccagctccacgctctgggtgaagcaggcaacctccatcctgcccacccctgtcatgtttgaagcagcaatatcacgtgtgcatttcctattcctgatcgtttta

SEQ ID NO: 44397 - DNA, 1192 bp, Bovine  19866881550635
  misc_feature (1)..(1): n is a, c, g, or t
ntctgtgagcttagaccttgtgttactctggtcaccctgtggaaaggcagtagcagaaacaaaataagactccaagaaggatgacggtctcctctgcctcgtccatcttctttctccaggcattgggatctcatccaagcagccctctttcacagagaggagggagggaatcacttcatttcacaatggacaaagaaggttcctttgtggaattttgcatggcatggggtctcaaatacgccactgatgaaaagacttaacagatggactctgagaataggaatacgttcaagaaaaaaaaaaacatttaaaaaaatcagtggaagggggttgagtctggccactgtagatgctgagtgcgggaagcgcactgagcaaatgctttggaccttagacagggtgagttcagctggtagagacgaatggaagcatctgaacacagactgtgcttgggtttttagttggcaatgttgtggggaaaaaaaaaagtcccaagatgcacggtgccaaaaattatatgtgccttcaaagagtatttttttccaacaaattgatcactttgattactcagtcacaaggcttgttattttctcagaagtgccctttgcatacatgggcatttttgcctacatttcctcatttgttagggaaaagttcaaagcagacgtggttgtgctactctcatggcataaacccttaaacacgaagggcctgccaaatcttttctgaagatctaagctataaaaacactcagaatgtatccatcaagactgtcgacagtcggcactgcgcagggttttgttttctctcaaagctaccattgctggccgtttatcacgagcatgggggcccttgtcctaatctgcaatccacatcaagtgaaggctcacagacatttgagaagaaccttgaacctagctctttggggggcactctctgtggcctttagggaaaataacaacaagatgacagctcttcctcaccactttgcaagaaagctctgtatgtgggggccaccggagggtctgggagggactggggagttcttatacggagcctgtgtgaactaaatatagtgatgaggtcttcgtgacagggagtcaacctcttgaccacagggaaattatggtgttggctcctgggactttgaggagccatgttaagaatatacaaaagggacttcactggtggt

SEQ ID NO: 44398 - DNA, 884 bp, Bovine  19866881551552
  misc_feature (1)..(1): n is a, c, g, or t
ngggtttagggttaactttgctctagatgctgacatagaaagtgactagggcctatgactctggtatttccagaagaaacaaatgaaaaaatttctctggaaggacataatctttctcaagctggaatagtccctcagataaatgtccactacccatagtcactatccaaatttacgaaggacagaaggaagcaatccacaatggactagagtcatcaaattcagcaaatagcagaattttaacccctgataacacacacctgaaataaactattaggattaagctaaaaactaaagatgtttaaaattattaaatacataaaagatttttttcatttttattggggtatagttgcattacaatgtgtgtttctgccatacggcaaagtgaagcaggtatacatatatatatatacatatatatattttttagtaagggcttcctaggtggcacagtggtaaagaatctgcctgcccatgcaggagattcagcggactcagttttgatccctggatcaggaagatcctctggagtaggaaatggcaacccactctagcattcttgcctggaaaacgccaaagacagaggagcctggcaggctacagtgcatggggttgtaaagagtcagacacgactgagcatgcacgtaataccatatcaatctccccttttttagttttccttcccacttaggtcaccacagagctttgagtagagttccttgcgctatacagtaggttttcattagttatctattttatacatagtagagtatgtatggggcgtccccagtggctcagtagtaaagaattcacctgcagtgcaggaaacacaggagatgcaggttcaataccttgggtcaagaagatcttcagaaggagga

SEQ ID NO: 44399 - DNA, 1442 bp, Bovine  19866881636740
  misc_feature (1)..(1): n is a, c, g, or t
ntgttagagagcgtgttgaaatctgtcccttttttcatgcctgttaagcacacacttgctgcaggtacgctctgtgccagccacagtattggggccctcctatgcattctcatttaatcttcacaacaatctcaaaaggcaggtattgttattcttcccaatttgctgacaaggaaactaaggcagtgacttgcttaagatttctctcaccaggtaccagagacacagactcacttcccttcctctcctaaggccctggtctgattcatcgcttgcttatgttcacctcctcccagaagacttccttgatactccaaactgccatgaagaaaagcctctgagctctataagtgctttcataactaacttgcctaatatcttcccaaccactatgaatgactctgatgggtcttctttatcttgtgctcaaccagtgttgagcaccatgtctgacacatgagtgtaaacgagtatttgttgaagaataaatggatggataaataagtccttgcaagaaactcattaagggacttccctggtggtctagtgtctaaaacttctagctcccagtgcaaaaagctcaggtttcttccttggtcagggaactagatcccacatgccacagctaagactggcacagccaaataaataaatatttttaaaaatataagttaaaaaaaatcttgttaagaaaacgtacacaaattctaacaaataaataaaagaatgactatcatgttaacaagtattctacagtttctattcttccccccctccccatctaccattatgctcctttacatattggtttcttgaaaatctggttcattttcaaattggagacatttttctgttacaaaaaaggagaaaggggaatcatgaagacatgtgcatgactgcacatgagtcctgggtccacacacaagctgagaggaggtccagctgaggatgctctgtcacttgcctctccctttcgagcacagagaaagctatacctcatttaaaagggcagaaagataagacagaatgccttttaaacttggaatatagctcatggaaaaatttaacccagaccttaaaaagctgaaatattccaaaccaaccacaattcagaacttgagatctccctgatgagattactatacccagaaacaccatgtttcttgtctcctaagagatatgacacctaacaattcacaacaggggggtctgagggaaataactcacctattgtgaagtcaatgttcaaatcaatatcccttggggagaaaaatattgttcattgatggagatggatttttcttcttaagaaattctcgaggggtaaacacattttttttttgtagcgaatataactaaacataccactgtcaagatctatagtttcctatcatcattaacatgatgctcaaaaatgagtagtgtaattatgaatgcctttt

SEQ ID NO: 44400 - DNA, 1411 bp, Bovine  19866881735490
  misc_feature (1)..(1): n is a, c, g, or t
ngttagctttttttttttttttatggggcttggtgcaccagtggctttttttttttttttttttttgactgtgctaggtgtttgttgaggcccgagctttctctagttgtggtgcgtgggcttagttgtcccttggcatgtggggtcttagttccccaaccgggggtcaaaccccatgtcccttgcatcacgaggtggattcttagccactggacccaccaagggaagtcccatcagtggctatgtgcattcttatccaatagagcccttgcatatgccttcaaccattaccagcttctctgaagcagggaccgcacccaggtttgcttctacgtgagtttctggtgtgttcaggccagaacagagaggttatcgaggagaggaaagtgcaatggcacacgagcccgagattgtgggttgttttttttaattgaaagatttatgagtgctaagtcatcatctgtatataaacatgtatcatgtattgaaattccattataggacttatgatgcctagtattgtccagcttggggtcttagtcaggaagcagtgggaggcactgatgcagacactatgaggtaaatgaatgagtaacactgtgttgtcagacccagggaaagagatgctatatatatttgtatcttgtttcttatgaaatctactcataagagatgttatttccttaagcaggtaaacacattccccccctgacaggctctttttttcttgttgggagtaggctgttcactttagagagctcttcttcttggaagaaaactctaaaggacaggattttgatatcatttcaatatgttaattcattgtttcctttccccagtgccttctgagaagacaaactgaagctcgcctcgccactttgtatgcaccagacctccacacccgaggcttatcacaagcaattatcttacccaaataaaaaatgaaaatggaaaagttaaataaataacaggacatcttgatggaatcgcagtaacgctcatcgtggttaacattagccctgacttttggacagcgagatttgttaatgcgcttgtcctttgtttaggcatctatctctgggaatctcatgactttccaaaatgatggatggcagccctctctgctctcccctaaaaatacattctccaggaaactgggagaggcaaaatacgggcactgtagccctaagcatcactcagatcgggcaaaactctcaaaactaaattcacctaaaatgggtggcggttttctccaccccaagttggaaccttcccttgttcctgattttcctgctctgcatacctgcatgagtcaggcctcactgaacttgaactggaaactgtaacttggcggagcagccaggataggaccagtttgggctctgggagcaaactaaaattcaggaactta

SEQ ID NO: 44401 - DNA, 882 bp, Bovine  19866881796436
  misc_feature (1)..(1): n is a, c, g, or t
ncccccgtacatgggtttatgacactattctgtccacttgtctcttagggttgttttgaaaatcagtgagatgatgatggtggtggtggtgatggtaaagcagcaacaacagcaagtaccttttatgtcagttgtgtgctacttattagctcttttagaactgcaacaaccctatgaggtatcactgttatgtccccattttatacccattttacagatgcgggagctgaggcacataaaggttagtaacttgcccaagaccacacagctagtcaatggtggtaatgtgatttgaacctgggcagtctgacttgtattttataaaccacaaagtatatcctgggtatcttgccatgtttttcctatagtctgagaaggtttcaacctgtggatagttgttatactgtatgtggcatctacatcattagcttgatggcagaattctggtcttccaactccttacgtaagagctggggctatgtgagtttatggtaccctagctgtcttggctgagctcatggtgtgtatagaaaattaatcacgaaaacttcagttatcattactgccttgtaaaaactattcaaaggcttgactggagatgaatatgatctatgtgttagtataaatatcacagatcatgtcgttcaacaagaaaattccttttaactttcaagtgatctcaaggtctactaatttgatttggtttgtacaagaaatagaaaaatattacaagatgaaccaacgacaaattagataaataccaattacaaatcagatgagtagatcaagaattgtgagggatagcgatcagtagtccttgaaaaaaccccaaatgtacacaatacagggcctaatttttctaataaaatgcagcaatgaata

SEQ ID NO: 44402 - DNA, 774 bp, Bovine  19866881828934
  misc_feature (1)..(1): n is a, c, g, or t
naaatctggtctttgacaaagaaacctagttggaactgaatttgctgtggaaggctcgggttttctccctcctctgtgctccaacaaaagctgccaactgtcacacacgaatggcttattcctgtgggaaggtcaaggtcgcacccattgtcctggcgaagcccacagctccttgagagtgaacaggacatcaggtctgaacccacagtactgttgtgtgatattggctaggtgaggacaggcccaaagtcacagagggaaggagcagaaatgctggaactggaagctccccctctcccaccccatccctcagccaacccacaagcaggagggaaggaaggatgcagagatgtgcatgattcagcgggaccatccccaccgcaaacgaacgaaagggaatcagaggagcaggtgcaccccgctgcttccaggtcagtccttgcctggcagatgtagcccagccagatgcagatgtttgcagacacagccagccagcccccaccctatccagcctggggtggtgtgggggtggccactcaccttccattgttatgcttggctcttctcgaagagggaatctgggctgtctgttcctgagagcaaggagcttttgattctggaggagctgtgcgttcccgactttgatctcccacagatcaggtctttgcacactcccaagaggccattttacatttctgaggctcggagctggctatctcttctgctcacctgtggagctgctctcccctccaccctcactgtggctcatcctcc

SEQ ID NO: 44403 - DNA, 734 bp, Bovine  19866881889960
  misc_feature (1)..(1): n is a, c, g, or t
natctgctgggatggcatgatgcccgctcacaagttggttggagcctatggaggtgccaggcaacaatgtgttttgatgggcagcctgcagtaaggtgggaattgccatctctggtgagtgaaggccataagcggtgccagccctggcatgccaggtctgtacacttgttcacacctgttgactctccagtgccaagaaaagcatacttgagtgagggacaagggtaggggggagaagacattcacagagcaccagcatcttcgggtatccttgtgggtacagacagaacctaaagagacgtggacagtcagacccaggaccacctctgtgtcagcactggaatggttttgtctggccctagaatgtgtcctcaaacacaatctgtgctaaggaaaaggtacccagcagggagactgcagcacagacacaattcagcacagagacaggcctgacctccaagccagaccggagagccagagagaagggcaggctgggtttaggaaagctctttccaccaactgaaagagctttcagaggacttccctggtggctcagacggtaaagcatctgtttacaatgcgggagacccaggttcaatccctgggttgggaagatcccctggagaaggcaatggcaacccactccagtactattgcctggaaaatcccatggacagaggagcctggtaggctacagtccatggggtcgcaaagagtcggacacgactgagcga

SEQ ID NO: 44404 - DNA, 1468 bp, Bovine  19866880362458
  misc_feature (1)..(1): n is a, c, g, or t
natgataaagaatccacctgcaatgcaggagacccagtttcgatccccaggctgggaagatcccctggagaagggaatggctacccactccagtattcttccctggaaaatcccaaggacagaggaggctggtgggctacagttacggtctatggggttgcaagaagtcggacatgactgactgactaacactcactttcagctggagagtaaaccagtaccctctagtctgtgagaagcccttctgtcctctttggagggctgtgcagctctgtgacaggccctcagtaagaagggaaaaggtctgatagggtcctcctgccctcatcgtcattctgcgtcaggttcccaactatatcacccttgagtcagggacctcaacctggggctccataataacctagaggggtgggatggggagagaggtgccgggatgttcaagtgggaggtgacatgggtaaacctgtggctgatccatgttgatgtttcgtagaaaccagcataatactgtaaagaaattatccttcaattaaaattaataaaatcaaataaatacaacataagcttgattcaataattggtgagatagccacgtctatgtactcatcaataaaagcataaattcaatagtaagacaatatctataccagataggctgtgtgcttagatgcagggggagttcaaggcctggagttggcagaaaatgcttcctgggtatacagccataacaccctgaacacgccccatctcgtctgatctcggaagctaaacagggttgggcctggttagtacttggatgggagaaaagcttcttggacacagaggtacttgacatgcatcttgaaagctgctttgtattaaggaagaatgagacctgaaaacacttctagagtgaggtccttgggcaaggaaaaccacagaaattcatgtatgatacattcaggatgagcttggtggctgggggtgattatgcaggcagaagtggagatgagaaaaggcaggtcaagtgggattagaaagtggtattgcttttttgctggtgataggaagtcagtgattgaaggcttttaaggacaggaatgacatgactagactagggttttagaaaacattattctggtaacagtgtttggaaaatgattacacaggcaaagagtagaaatgggaaatgaatatggttggagtgtgttacccacctaagctctggaatgcattcttggaccaaaacatccctggggtcaaaacggtcaggtcaaggcacgtggtcaaaacatcctggtcttattatacaacagttgcttgggaatccaaacgatgagtcagtcgttactggaaggagtctcagtggtgatgtttaggaaaattctctgcacacaatctgtttaaggagtgaaaagggcaaaacacttggaataatgatggctgtgaagttgtccaaaaaagtgatcagataaaattgggtctgggt

SEQ ID NO: 44405 - DNA, 2136 bp, Bovine  19866880389194
  misc_feature (1)..(1): n is a, c, g, or t
naaatgcctgccatctataaaggcttgagcatgagttaaggtggggggtcagtgagaaatgatatgaaggcagaaaacagataatggggattttaggttactaagaagcttgtccttaaccctatgaaaaatcatacaattgataggttttcacctgaggggagaaggaaatagcatagtcagattttcagtttaaacacagcgtcctgtctatgttgtgggaaatggtttgtaggcaacacactgatggcaggagcagaggaagagaatgctcttgaagagttgatggaaagatgagctcaggcaatgagatggggatggagaggaaagagagagatgagaggctttggctgtaccttatctggactcgatccactcataggatgcgctttgtccatgaaatgatacatgaatactagtaaaatgtctgttttatttgcaaagtgcaacagaggagctgcataaatacttgctgtcaggctctgtgtggtttctgagatctgtgagagattttgacggcttcatggaggctcctgcaggtgcagttttgatgagagatgagaaccacggccagatgtgctcagcgcacaggacccactgaaagagggcccacttgtttgtgtagcacatcacaactcactaactggagttgtgccagatgtagaggctttgcagggagatagacctgaaatccgggcttccctgtggctcagacagtcaagaatacgcctgaaatgcaggagacctgggctcaatctctggatcaggaagatcccctggaggagggcatggcaactcattccagtatttttgcttggagaatcccacggacagaggagcctggcgggctacagtccagagggtcacaaagagtcagacacgactgaaatgacttagcacacatgcagaactaaagttcaggccccatatggctactcacaagccagtggaacattttcaatttacatcatttccatgaactggttttctcatctgtatgggagggaggagatgggttggaaaataaagaataaagaaaaggatattagtcagagttcaccggagaaatagaccaaaagcagagagagagagagagatttactgtgaggaaatggcttatgctactgtggagacttggcaagtccaaaatctaatggagtgggactataggctggagatttggaagagctggaattcaatttcaaaggccatttgttggcaggatttttttcttgttcagtgggatcagacctttggtctattcaagccatcaactgattggctgaggcccacctaattatggggagagagcaatctgccttactccaattaaatgttactcatccagaaaaagaacacttcatagaaacatccagaataacatgtgaccaagtatctgagccaatgtgacatataaaaataactttctagaaggaaaaggagaaaaaaagaaggaaaagaaaagttttaaagcataatgttctctgttaaaagtccaggaccttgtagtcactcatcaaattataatttattttagtattgttattattatattatttttactgtccatccttctttcacagacaaagagactgagattttgagatgtgaaatccccctcccagatatatgcaggttctttctttcctctgttgaagtcattcaatcaatcactggatgttcttgatcatttttccatctgtggctcattctgagaagggcacaatacttaggttttgtgtctaactgacttgatttcccattcagcaggcaccaatcagaacgatcaactgagaggacaattgaattcatttgtaaataacagaaaaaactgacctaatttacattgttgagacaggctccagggcgcccagctctgcttaaagggagctaagtttgccaatgggctttgtttcacgtggacatcatctattcatttactgattcaacaggacattatgcacatatactgtaatgttatatgcctaacacagggcttaactttgaaggaacccagaaaagtggagaacattaatgagggttgagttcttacattcacctcattatattcacatgtatgacctcattttatcctcgttttattttaagctgggctcaactttgggagatatgagt

SEQ ID NO: 44406 - DNA, 3923 bp, Bovine  19866880395878
  misc_feature (1)..(1): n is a, c, g, or t
nctgtgatcattgtgtgaaggggtttattgtacactgttaaaattttacggttgctggtgattatcacataatagtctgtgctgactaaaccctctctcattctgaattaggagacccttgttttaggactcactgtgccatgtactctatttttattacagcgcttatcatattaaatggcatttgattttacatacttgtcttccctgttagttcgacaagccctccagggcaagagattgtgtgcttgtttaccagttttcctccagtgcccagaacacagtgccatttggaacatgtctaaatgttttgaatcaatctcttgacccacaaatcttgcttgatactgatcaattgaattaatagccatcgaagagattattatcaataactaagatcagaaagacatgttgagcatgcagttaagatcagaaaggtaggcattatagaaataaacagagcttggcattttccagtagtaattatggtgtataatactgagggaagaattctgtacatgatatattagagtcaatacgagactttggcattcagaggacttttccactgaactcctaaaccatgtggattcactttttctttacggttgccaagaagaaaagtcacattcacaacatccttgcatttaaaggaggatgagattttgttgtaagtaaaacatatcataaaaaggtatcaactctccttcagtcggggattcataataaccccctggaaccttgtcattctgccttagttgtgtcactttctgatatctgctgctaattctgttctctttttgtacagctacttgttttaatgttatcctgatgctggcagtttgtgttgcccatattggtagacaacaggacacataaaatgtgtaaggagcatccacaggaagacacactttgaaactcaaaccctacttaaaatgcaagaatggaaaactgattcatgaattcatgaattgatttgaaaatgaatattgaggggtgctgggtgctgaccagctgaccccattcctgtctctggattctttccattctaagaactggccattgaaaagataccctgaattttttcttttttttaacttgagttttgccatctgctttcccataacagaagtcagtcagagacaggtgtatttttgaaattaagctcacaaaccttatttcactggggtcaagtctgctaaattgactcactcaaggtcaacagtgcatttatcaccaaagccaggactaagaccagagtatcttcagttctaagttttattttcctcctttcccccttcatttaaaactattttttgaaggatttgttgaaaagagtttcaagaagagtcaaggagcttctataaaattttttagtagtggttgaaatgatttcttactgccgactagaacagagtgcacagtgtgagagctgcaagttaagttttatttggggccatatgaagaccgcagccagggagacagcgcctcagacagttctgagaaactgttccaaagagggaggtggggaaggacagtatatatgcaattttagagaagggggaatacacgaaataaagcacattctttagaaagtttctactggtcttgtgagctttctgctagtcataagaaacagttgtcaccatgaaggattctagtgcttttctacatatgagcagatgtaagaattgggctcataaaataatttcctgagaatatccaactgtctgaagacctgtcctgacaattttcctggagcacagagtgcctcatttctgctctccatcttgaactccttcagggggtgttggaggtcagcagccacagcagcacatgactagtccttgtagaggtagagggcaagtgcccctggccagtgccaatttgtggctgacagtactaacctctaagtttatttatttggatttcaatacatggtatacatacacatcaccaagaggtatggctctgggagcagtgagaatcagacttgggcctgatgtcttggctctttctgcatcattgtgtgttctcagataagtcacttgacagatcagagcctccgtttccatacctactaagtgtgtgaaagctacctacccattgcagggatgagaaatcacctctgacactgacaagagacatacgaatgcaagctgttaacatgtcgaatgcatttttatccactgggggttcagatcattaccatctttctgttcagctaggtcaggtgtaagcttagaatttcctgagtacattattttattgttaggcaatctgttagtatgtgagctttgaaaatatatatttttttcctctcctcattagttacagcatgtaatttctcagtaaaaacatttcctttgtgactttcataaaatcactgtgatttcttaataaggaaatatgttcaagtctacacaaggccccaatttcctaccacttaggggttgcagaatctggtcataatcactggggctgtcatcctaattgcccactcaagcttctgatgcacagctcaaagcctctgaaaaataaaagaagacaaaaaggagtttttgtgagttttaggtttatatttataaaggcttttccttccaatcgacatcatgacaaatttcaacataggccagaaaaatacatggttgtttagccaaaggtctaatgcttttgtggagaaggaaatggcaacccatccagtattcttgcctagagaatcctgtggacagaggagcctggtgggctgctgtccatagggtcgcacagagctggacatgactgaagtgacttagcatgcatgcatgcattggagaaggaaatggcaacccactccagtattcttgcctggagaatcccagggacagaggagcctggtgggctgctgtttatggggttgcacagagtcagacatgactgaagtgactcagcagcagcagctaatgcttttgacacttttgaactgtggtgttggagaagactcttgagaatccaagggacacttcaaggagatcaaactagttagtcctaaagaaaatcaaccctggatattcattggaagaactgatgctgaagctgaagctccaatactttggccacctgatgacccaactcattggaaaagtttctgatgctcagaaaaactgaaggcaggaggagaaggggacaacagaggttcagatggttggatgacatcaccaactcaatggacatgagtttgagcaagctctgggagatggtgatggacaggaaaacctgatgtgctgctgtccatgtggttgcaaagagccagacatgacagagcaactgaacaacaacaagccaaaggtaaactgtgattgactgatcgattcattcattcatttcttcatccagcgcacatgtgccagatcctgggatgtaaagatgaattggaacgcttctgcactcaaggtgctcacaggctagtaagagatgtacgagcaagtaggtgcgaaggtgattctttcctggaattctgtacaaagacttgaataaaatgctcttgaggggacgggagaagaaaataggtcaagaaggctccttagaaggctttgcaagccaaatagatgtttgtgagacaggtgtaccaggacagaagcgggagttagatggtcccccagaaagtaggacacctgcgatcatggccatgagtgtacagaataattgaggtgataagaaacagaccccaatgtctgagggggtatagggtcataaggaatggaaggggagatgaggatggacaagaagaaaagctgaagaggcagataaaggccttctggggaagtgaagtgaggaatcagaacccagaagggagagtaagttgcttaggaagtaaagtcataggacatgtcccaggggaaaggagtccggacaactccgtagatttccaattgacctactat

SEQ ID NO: 44407 - DNA, 1269 bp, Bovine  19866880452775
  misc_feature (1)..(1): n is a, c, g, or t
nctgggaagccccaattatctgacataatcatcaccagaggtcctttaaaagagcttttattaacccctagccaaccccaataagttaaaaaatgagattgcgtacaggtcagccttaggctcttttactaggatattatttctgtagcttaaaagaatgcctggtggtcatgggtgatgcattttggtaccaagacacaacaatagatcatctttagtaggagggatttgcacctcagtaaataagagaaatacattcactacaaactcactcatcttgcctacatagacatgaccatataacaagcatcaaaacttggaaaatcagataataattctcttctgggcttgaacctgcagagtatactgattctctgccaagtttttttttcagaatgatcaggagaagttgaaaacagatcaatttattcattttaagatcaaaagggtatgctatgacatgatttcattaagaattaaataatgcacatgatttcaaggttaagagcaaaaaataactactccatataatggcttaaaactcccagaaggagtctgaatgaggaatgatggcctttaactaagagcaggcccgtctaggtttaataacaagtgatttctcttaattgcaattgccttgaagaaaggtattcaaggtctcagaatctaacaagttgtagctagaattcactccaggatttaactgggggaaaaaaataatttttaaaaatactcaaccagctctaggatctcctgacagaactgaatgattttactcttcttagtgtagagcctcaggaatatcaagtcaaactgaggaagaataatatgtgggaattactgaattcattgcttgcaatgctttttcccattagtagagggcgccagtggtaaagaaaccacctgccaatacaggtagacataagagatggggggttcgatccctgggtagtgaagatctcctggaggatgtcatagcaactcactccagtattcttgcctggagaatcccatggacagagaagcctggcgggctacagtccacaggatcgcacagagtcagacaggactgaagcgactaagcacgcacacacaacccaagagcctatggattaatgtctctgcatgagggggaccttatggaagccaaagaaaaacttgaggagctcagataacagagcccgacggtgagaagttctgagaagaggatactgagagaccagcgaccactcaaagcaggagacatttgggcaagacagatggactctg

SEQ ID NO: 44408 - DNA, 1435 bp, Bovine  19866880529809
  misc_feature (1)..(1): n is a, c, g, or t
ngtgtctgttttttgggagagagtggggacagtttccactttggggtacatagggcagagagatggcggagcctggattgtgctaatctttggtgaaaaaagctaattaaataagagacttagtaatcacatcatctggttaatgcacttcagcgtgcgtcccagatacttaggtcattatgctgatggaaagctttttgaaaagaaaaaaaaaaaaggccatctccctatgctcatcctgcaattatccatttcttgcctacctcttgctgtttttgataagaaccattaggataataatgacagactcgactcgtgtattaataactctgtcggtgtacacttctttctgcctctgtgaaagactgaaatgtgttaaccttttaaacatcatccattgcaggcagtgtcagacctttattaatggtcggcttcagctgcccaaactcctgctcgctgcaaatgcgtgtgatgtgtagaaacaaagccttttcattttgctcatggtcatttccctttttaggagcttgaaatgaaatactgtgtttatcctgtatagcctaagaatgtacgtcagctgcacagcctgaaatagacatggttttgctgccctaaatatttgattcttgagtcaagttattataattgctagacatccttctttaaatatagaaggacagtccatggacctgcacatttgaaataaacatcgcattcagaggtagcactgtttctatttgattttttcataacatcttcggtcttagtgagtgtagtgaaacatgtaatatttaattcatctaaagccttgcagctttaggaagacaagatcgagaggccttgggccatgagaaggtgtttcttgtagtaaacgggtgtagttaggacaggacagaaatgtcaacatgcccttttgtaaaaccattgttcatcagccattgctccaactcaatggctgctgtttcactgataagtagtttcagattaagcgttgaaggcaaatacatttactgcagacaaaagaacataggaggggacctaactgcctttgaactgtttgataacttatcttctacaggcagggccttaagcttaagttgcaaggctgccctgacatctgcagaaatagccttgggataaaaatattttcaagtggtcctgcttggcacagtctcaagttagagaaaaaaagataaacaagagactccaagttcatgtgtacacttggagtgtgcttacgtatgtgaaatattttcactgttcactcttctgaccttataacaccaggttcaacctacctttagacagtgtgcatttgaattccattgttaatttggaaagggattgatatagtttgatttcttgaaattaaacttgaggaggagatctaagtatgatttatggaagaagtccaaggaagggacttttctaaagg

SEQ ID NO: 44409 - DNA, 1169 bp, Bovine  19866880628067
  misc_feature (1)..(1): n is a, c, g, or t
ncctgtattctttctattaaacccacaccaggtttgaggctcttcagccttcaagaaagaagagtggcctctgcttgaactgagagaacgtgggcttaaaataaccgtgggtcacggccctctctgaacctccttccttcctgtaaggcccgaggttgttcccatagtctctcccagaggacattagcaatgcggcttgtatttgagggtccctgggaagacaagagcttgcattcctccgggtgtgagaggagcccagtcccagggcctgtcccatgtgacttgaggaagtggcctggctatttccagaagggctgggtcaccggagtcatgtcactgcttggattagtcttctgttaatgacaaagacggtgctggcaagaagcactctttgcacgattcactgtcagctcagggattcactgtgctaagttgcttcagtcatgttcaacactttgcaatcctgtggactgtggccctctgtccacgggattctccaggcaagaatactggagtgagttgccatgccctcctccaggggatcttcctgagccaggggtcgaacccatatctcttacgtcccctgcattggcaggcgggttctctaccactattgccacctgcaaagaccaaaatgttagtcgttcagtcatgtccaatttttgcaaccctaaggacggtagccctctgtccatgggattctccaggcaagaatactggagtgggttgccatttccctctccaggggatcttccagacccagggatggaacctgtgtcccatgcatcacctacattggcaggcaggttctttgccactgagtcacctgaagtccaaaatgttagttgctcagttgtgtccatctctttgggaccccatggactgtagcccaccagactcttctgtgcatggaattctccaggcagggatactgcagtgggtatcatttcctttctggaggggatcttcccaacccagagattgaacttgggtctcctgaattgcaggcagattatttaccatctgagccaccaggaaagctagttcctgcccaaatactgtgtcctgttctaatgctattctaatcgtccttaggggtgtgttcatctacccaacaactatttatttcatacctactgtgtgctccactctaggctaagtgagggctc

SEQ ID NO: 44410 - DNA, 1300 bp, Bovine  19866880665955
  misc_feature (1)..(1): n is a, c, g, or t
nattttaaacttctgattttcctatttgacatcttaaatattccagctgctctcctaaccaccatgtctcatgagcacccaaccataactagaaaagtgggaccagatgccctgccaagtggttacagtttaatagtaaataaatgagtccctggtagttttcttatagctggctggggagcccgatcccagctgctgggtccactagcagctgagtaaatacattgccagaagctgcaacctgagaattaccattcagtgcccacagcccaggacacactaggactgctgttgtttatccattaacaggtgggaaatcaccaaagccgtaaccactaaatccccttttaagttgtctgtaaaaaaagattgttctgtttattgaactggagaacaagaggcaggactattcatttagataaaattaagttaaaatctttaagttgtactcagagcctgtataaaggcctcataactaagcctgggcagcttgtccattgcagtccacctgacgcatccatcaccagcaggtgagggttcaagcaacaagccatcagttctgttttgcattcttctaatcagtgactatggaccaattctgcgttaggccctgggcttttacgctcagtaccagagtgaaatgcactgtccctggtttcatggtaaatcaaggaaagccaatatctgaagaaacagttttgattctacaggatatacacggcagtagacacatattccagagaaggcgatggcaccccactccagtactcttgcctggaaaatcccgtggatggaggagcctggtaggctgcagtccctggggtcgctaagagtcggacacgactgagcgacttcactttcacttttccctttcgtgcattggagaaggaaatggcaacccgctccagtgttcttgcctggagaatcccagggatgatggagcctgatgggctgctgtctatggggtcgcacagagtcagacacgactgaagcgacttagcagcagcagcagacacatattcgggccaaagaagcagtatctccaaacagggaacatgtgtgtacagtttcaaggatgaatttgagtgagtgttgtatgtgctgggaaagggtggtgtctgatgagaaatgtcattccacgtagagaaagtaacacacagcgaagagtggtggagtaaaccagaagcagtgtgttccaggaagtcaaaggagttgtgagtggcacaaaaatgaggctgggcagtgcctctctttccagcagtgccctttgcctatctcaaggctgagttcagcccctgcc

SEQ ID NO: 44411 - DNA, 1032 bp, Bovine  19866880727475
  misc_feature (1)..(1): n is a, c, g, or t
ntcgtattatgcaatcctgcgtccggccaataattgcctctctgacatgctagcctcccgcattcctgagattcatctagaacagccagaagattagattagtgtatattttcagctagccgccatcactcctagctgttgagtctcctgtcagctgaggcactcctgtttgtcactgccctgtcagagaagtccgtccctagggcaacaaaatctctctgtggaaaggagagagagaacttcagagaaactctgttttatcccaagcccttattcaaccaaaaaatgttgagtggtagaactgcatgaccacatagcaaccaagaacaaagagaaaaattcaggtgaacaagtcattctcccacctcagagatatccatgaagtattatgtcatacaaagaacacaagtggatgtttaggaaaatggagatctagctttgtgcctgccaccaatcaactgtgtgattagacatgttcattcatttttctaaatcttggtctccagattttaaaatgaagcatgctaacaacctcattggtaagaattaaatgagattctgggtataagaacgcttggactatatttgcctggcaataaatgtcagtatcctaagtctttgtcaagtgttgcttcactgtatggatggggacccccatgtgcccagagcaatgaccacagggcttagcacagtgtgctgtcattgtgcgtaattgcatcagctcctcagagacaacaacctctctgagcccatcagagggcttcgcacccaggcggtcagtgcatttgtgctgaatgttgaaggaaggaaagaaaaagggaggaaggaaggatgaaaccagaagaaagaacagaagacaggagggagagagtggggagcggggagcggggacggggagggaaggagggaaaggagttcatgatttaacacccaagctaggggtagagtacatgtcttaatcttcagcggtcaattttcccctggtcctgatgacccattactctaaacagagctaaatctgccactctgttt

SEQ ID NO: 44412 - DNA, 1168 bp, Bovine  19866880771888
  misc_feature (1)..(1): n is a, c, g, or t
ncagactgtaatatgaaaaacccacaaatacatgtgtataatgtatattttctaatagttatgtaagattctataacactcctgtcaacattcatcatttttgtccgcgtcttccttcagtatcacctcttctaatgtcatgccctctgtattgatcatggcctttaaaaacaacctgaactctgctttaaaggatagagtaattctttggggaaattttgtcttggaggttaagcacagataccacgaattttgtaaaacctttctctcctattgctaattctggagtctcaaaactaaaacagcaggacatttctttttcccaggctagagagtatctttattaataagttcacatgtgctaacacttcctggagttcagagactgcagttcctgggagacaagaagcagctttcatcaaaaatgctctgcttggctctgcagacctctctgaaattaacttcacgtgttatccaggccacccaaggttgctatggaaaccaacatgtcagctcagcaaaaaataagataaagatttggaagaagtcactgatgctgcaacctccttttcagtatctttctcattctctctttgtgcaggcacgtgtgtaattgtgtgtgtgtgtgtatgcatgcgtgtgtgatcgcatgtgcctgaatgagagcttggtgtcaaaaactacactgtccttttccactgagtgtacatgcagggttgggactcccgagcttatcttaactgctagggtgggggcttcttctgacaggcaccccggcctggggaaccataaagagagtactgcctttctaaatagacttcagagaagaaatagttatgtaaggagaaataaccaccgtcagtcctgaggactaagccacattccacagaaaggaaaataaaaaactgcggtcagtgttttgctaatgtctctgctgttaaaacagagccccaagccagagccagggaaaacatgtcattcagagcttggaggaggctcttgtaaaagtccctgtttgggcttggagggggaacccacccaggcagcacagtgggaaatctttccagtgttagaaattccagctggatgctgcagttgctttgggctctagttgggaatgaggtagactaacgagagaagcccaattgcaggcttatattcactcagg

SEQ ID NO: 44413 - DNA, 1051 bp, Bovine  19866880807342
  misc_feature (1)..(1): n is a, c, g, or t
ntcaatggacatgagtttgtgtaaactcagggagttggtgatggacagggaggcctggtgtgctgtagtcaatggggttgcaaagagtcggacactactgagcaagtgaactgaactgaatggaagtagaatgcactgaaatttatttttcttaaaaggggtctttgtatctatatgtagaaaaatattttgttttctcttatgctgttaccttcccaggtgatgccaatggtaaagaactcatctgccagtgcaggagacacaagaggcacaggttcaatccctgggtcaggaagaccccttggagaagggaatggcaacccaacccagtattctggctgggagaatccaatggctagaagagcctggtggagtccatggggtcgcaaagagtgggatacaactgactgactaacacttttgctgttactcagttccaattaaataaaaaaaaaatcgttattaaacgtattattcctgctgtgtgagctgctaaatgcttactgtgatacagggctctggaaataatgtcatgctgaatttgcccttttgagggaaaagtaacttccagactgtgctgagatgaagatatatctctttctctctctcctacccagcactttgggacaagtgcacaatcaccatgatacttttgcatgctcctactgaataaagcaattttaggtcatttctcatttaaccatggacctgcatcattttacatgtggcttatcaggatcaaaaggtagggcaaggttagaggaagaaagacagaaaactgaaccagacaagaaccctaccttcaaggtaagtgtttgtttatcctacacatattggattttattatgggtcttcccaggtggctcagatagtaaagaatctgcccgcaatgtgggagacctaggttcaatccttgggtcaggatgataccctggagaaaggaatggcaacacactccagtattcttgcctggagaattccatggacagtggagcctggtgagctaccagcccacggcgttgcagagtcatacatgactcagtgactgaca

SEQ ID NO: 44414 - DNA, 1408 bp, Bovine  19866880816901
  misc_feature (1)..(1): n is a, c, g, or t
ntgttttccccaaattgaatattccttggaatttcttgattttaagaaaagtaagaaagattaaattctcctctgcttgtaggcactttgatgagatgttttatagttaaagctaatgacccttcaatatttctgcagtaaaacagtcactgatttaaaaaggcaagaatgatgtctttgatctataaattagtaactgtcatttaaggaagacatggccagacagatttacacttatgaaaagtgttcattatccccaaagtgacaggacaagagatcttctggtgatctgtgggtaatcaatttcaaaaataataccacaaagaatacatcatgatgaaataatgcagcgagcccatgaatgaaaacacatgttatatacagtgtttgtccaaaagcacatgcaacatctactatactggcctccctgaccttcttccactgccagtgctgaagggttgatgggaataactagagatgctcttgttttggttagacaaatacaaataaagcaaaccacatcattttctgcactgagattattcaggtcacattctttgttttcatgttaccatgcatgttgtgactatttcaaattatgctcagagtacatgaagaggaaagagcaacaatgacataaaatcagtacgactaaataaaaatccctggattatatatatatatatatatatcccaaggctcaattgtaaagaatctgtctgccagtgcaggagtcacaggagacatgggttgatccctgggtcaagaagatcccctaaagaaggaaatagcaacccactccagtattcttgctggagactcccatggacaggggagcctggtgggctacagtctgtgggattgcagagttggacatgactgaacgactgagcacatgtatatacacacatatatgtgcgtgtgtttctcatatgtatgaaaaacccagcttcgacatctgctcagcacttaatgtcagagttcagaaagtgtgagctattctatagccttaaaacctccaatctccaaattctattttcctgggacagaaatatcagtttgcaattgtctccttttcctttgctccttgtgaaaggaagctatgaaaaccaccaggtgaggaaaataggaagcgagagcctgggttctcatcaaggtctcccaggagagcaaagggtgggaacagggccacaggtgatctcccaggggagaaacaccacaagtactcaacttactgggaggagagggcatccccaaggatgttttacactttctcaggaaaacttacatttcttcacagcctgtcttctgtctgcttctcagtcttatctcctgtccaccttctcccctcatctacactctagacacactgagttacttggggattccaaattccctcatgtatatt

SEQ ID NO: 44415 - DNA, 1592 bp, Bovine  19866880819387
  misc_feature (1)..(1): n is a, c, g, or t
ntgaagaattatccaaagtttgttgtgattcacacagtcaaaggctttgactttggactgcaaggagatcaaaccagtccatcctaaaggaaatcagtcctgaatattcatttgaaggactgatgctgaagctgaatttccaatactttgtccacctgatgtgaagaactgactcattggaaaagtccctggtgctgggcaagattgaaggcaggaggagaaggggatgacagaggatgagatggttggatggtatcaccgactcagtgggcatgagtttgagcaagctccgggagttggtgatggacagggaggcctggcatgctgagtttatagggctgcatgtgtccaaagagttggacacgactgagtgactgaactgattgactgactgtctatccttcagagcttggcataggtatttcttgttaaaagctcttcctgacccttaaacagagttccctgaccctcctcttcacttctatagcaagaaataaacagggatgaaaaaagtccgaaggagtccagtttttactgactgagcacctaacatggtgtagagttagttgctcagtcgtgttcaactctttgtgattccatgtactgttgcctgccaggttcctctgtccattaaattctccaggcacgaatactggagtgagtacccattcccttctccaggggatcttcctggcccagggatcaaacctgagtctccagcattgcaggcaaatcctttaccaacagggccacctgggaagcatgatgtaagaactggtcttttcagtttaaatgtactgggcaggactagaatacatcactgtcttgctaccaggaagtactttttctgaaagaccagagttttatgctttcttcctcagttgtatcaagtggatagtaaaagctataccacagaaacataagagccagtagcaagcatacctagctgatcacaggatccctaaaaatggaggcatgacctcagaacttctctgctgcctaatcagagttagacaattgttgctggcactggctgtcccagtggaactgtccattgatcctcatttatctgtccaacctgtgcccaaccttttctccaagacctatttccacatttgcagctacctgcctgaagtgacaaacgatcaagaacagaagttaccaccccattacagttcagttaagtagaccaatgtttactcagtgcagatgacacagaggtgagtgagacgctgccgtattgtggtaccttattgcttcaaagtgtggtccctgggccagcactactgacatcacttggtagaaatgaagattcctgggcctcaccccagacctaatgaatcagaatctacatttaaacagaaccctcagaagattcttacccaaaatgaagggaaaaggatgtatttagtcatcaaattcacgaacggctgtctagggagccaaagcagtctatggtgggtcagggctgttctctttggatctgcttcgtgccttgtcaatactagtgataaatgcttctcttactttttacatacctaactcacagtttattctgactactgatgctgaacatttctatggcttccttg

SEQ ID NO: 44416 - DNA, 1493 bp, Bovine  19866880829424
  misc_feature (1)..(1): n is a, c, g, or t
nacatgtatgtcttacttaaaccaaagcaaaggcagtattagagctccagtttatttactaaaaatagaagatatctacacaaatccctcaaattctacatgagcggcatgcaaatgtagtgatatgattgcatcttttggtaaggcccaaagaaaggtctcttgatattcaaacaatacattcctgagtatgattgtagagctcctcctgtttacagagagaatctatttttctatgcctgaatattctaccaaacagattcaacacaatattcaatacaaataccaacataatagtctactctgtgtaggccaataggatgaggtaggtgtgtctacagggcagttgagtacccaggccaatatgctcacattcctggatgacccctgccacaccctggaaacaagcccaggttggctccttgaaggctcacaggccacacagtaatggggggtgatctttccagttgtgtccatccaaaataggcctgcccctgccaacccagctgctgaccaatgacccagaaatgaactcagccccagccaacagagcctggtccaaatcagtagaacctcccagcttgcccattgactaggaagcgaaaatgagtatgctgggtatttgtcactgaggttttgtggttgattattgtgtattgcctttcaggcactagaaaatgaatgtggttttggagtccaaaaacatgatctaagacctggtacctccacttgtgagatatatgttcttgtaaaaaaaaagcattgcatctttctaagcccccacggtactctttgtaaaatgggaagaaccacacccaagagcagaattgcgtgatgatctgagcaacatgtaaagcactggtatttaataagcacttggtacctggaactttaattagtactccccctgctctcacaacagtcctcatccaatgattctgacagcacagacttttaaaaggcacattctctgttgaggctggcaaaccagcatgatgaggtgaaagcggttcgggggctctgagcacctcttctttaaggccaacttgtgaaaccaccagctaatttaaaacaggctcctgcggacaacagatatccccacaaccatagtgaccctggggctgggagctcacagctccctctacttagtgagatccttccctgccgggcggggcctgcccatagctcagagctctcccagagctcagcgatggtggacaactggggagtcccactcagaccacccaggagccttagctgatgcacttggctgcctagttacaacatgcactgatgagaaggcgatgttcccgcagcctgtgcttgccgctgccctgactctggctctcagggtcaccccatggggggaggcaatgcctttgatctacaaagcccatgtccactttgatcctggtcacctttcgggggtcaatctgtcagcagctggcccttcccaccatgtcagtcacctgtgccctgagacaggcatttaa

SEQ ID NO: 44417 - DNA, 968 bp, Bovine  19866880842527
  misc_feature (1)..(1): n is a, c, g, or t
ntggggttgtaggtatggttaaatacaaattatgtagctatgataaaagatgatatggcaattaaactagggattatataattacagaggaatagtaaccagtccctgggcttcccatgtggctcagtggtaaagaatctgcctgccaatgcaggagatacaggttcaatccctgagtcaggaagatcccctagaggagtaaatggcaacccactccagtattcttcttgcctggtgggctacagtccatggggttggaaagagctggacatgacttatcgactgagcacagcacacattaaccagtccactctgtggaacagtcagatccagctgccctaggttgctaatctgctgtgcatgttttccagagtgtcctctatcttgaaatgcatgtaactgctccttaattcacttcttctctcattagttcattcatctagtaaatgttcagtaggtacctgctaaatgtgaagccctaaactaagtgatgtgtttgttgatcagataacaactcttgagactactatgtcacttgaaggctgatatataccatggatgatgatagtcttctttcttaactctcacatcatacctaggctcaaaaatctgtgacaggcttccaggacaaattgtagatgtggctaccatatgctgatctgcacaaatgcagaatgttccattcccctctgaggtctttgtgagtgtcacccttggaattgtgcaaaacatgaccttcttggccatacctgaaaacctgggcatagataaagggagttggaatttaagaaattcccagcaacttcgtctcccactcctcttggttctgtgcccactggcccactcacaccactctgtggactctacctctatgtctatgacttgacataggtgtctgtgacacctgcttgatgactaggacctctgtatttccctgaagttactcctttccaaggtgttccttctag

SEQ ID NO: 44418 - DNA, 1013 bp, Bovine  19866880877447
  misc_feature (1)..(1): n is a, c, g, or t
ngactgagcgacttcactttcacttttcactttctgcattggagaaggaaatggcaacccactccagtgttattgcctggagaatcccagggacgggggagcctggtgggctgccgtctatggggtcacacagagtcggacacgactgaagcgacttagcagcagctgcaggtatcataagtagtctagagatgatttaaagtatacaaggatgtgtgaaggtcatatgaccactccattttatgtaaagaacttgaacattcatggattttgttatccacggaggttctggagtctatcctctgtagataccgaggaattaccgtgttcttttctgtaagttaactggggttctaatctacttacaaaagcccacaaagatgagaataaaatctacttggtttaaaaactggtgcctaggatcttagtctataccatctgtcacccagcaatcttcctctgacgtcagcactcacatttattgaaaaatttctaagcttcaatcaatgataatcattttgtaggaaaaatcatctcatttaatctttgccacaagcttttaagtagattctcttcttatttacattttcagatgatggtcctgagatttaaagctgttaagtagtttactaaatccctacagttagaaactgaatccaggatttgaaccaggttctgtcaagaatcagagttcaaattctgaaccatgacatcaaaatttccccattacttgctaacaattttcatcgtttaccaatgagagaagtccgggatctctgtgcgtactcagatcccaggtaaaatgcctctggtgtttgtgatgctttatgagctgggcaatgtgaatttgttgatttaagaggaaagctttaagttcttctaaaagagcattgctaactcacgcactgaaaaacacagagcagttcaggaattgggcggtgcagtccccagggagaaatgaaaactacggtagaacatgaagaagcaatgtcatggaaataatgaaggctttt

SEQ ID NO: 44419 - DNA, 1539 bp, Bovine  19866880898732
  misc_feature (1)..(1): n is a, c, g, or t
ngattctctttctctgaataacacacacaggttcatttttaaatttttatgtcctgagtatatcaacattgttaaatattttaagaatcagccttcctgggtatctggtttttcaagcttattttatgtcaaagtgcagttccttaagttgcttggcatttggtccttcctaattttctttatatctacctctcttttaggccttaggggatttttgtttttatatttttggtagtgccatgaagcttgtgggatcttagttccctgaccagggattgtaccgaggctgtcggcagtgaaagcttggagtcctaatcactggaccttaccctcagtcttttgacactgaaacggcagccggcagtcctcaaattaggcttgtctaatttctccaacaatacctgcctctcctgctcccagaattgcccctccttgagttacttgctcatcttttgatttgaaaaccaaatcagggtggagcggatgttcagactggccagggaaacatctccctcgagaaccagaggtcagggtcagcctttcctaacactcagacactgagaagcatcaaggaagctcccaaagaacagctaaagtgacgctacctgaatgaaaacagacagtgggcaggcaaaaccccacgcaggacccctttctttactgtctaagttgggcggttttctcctcaatttttttacattctgggattctctagtgcaccagaccctcctgtatctctgagccttcacacacatttgtatttcatccccagattcttttccccatccctttttatttggcaaacttctactgatgcctcaggacccaaatatcacctcttctgtgaagcttcccttttcactgcctccgctaaacttgtccctcgctcctctgtgcccacggagcattttgtacacgaagagctggaactgaattaattagcaaggataagaaactgaactacccacatccttttgaaaatggaaagcagatgatgttggcttagataagatcaaacaacatcaaatcaacaaaagtttattgagtgtataccaggcacaggggtccccaagcaaaatcctgcttggtgtgtgtatgtgtgtgagtgtgtgtgtatttagaatcacaggctttcaggatcttggttttttaaagcttatctaattcaaccacttccttattcagatcaggaaactgaggctgaagtgggtttctctgtagctctaacaatatataatctgagccaccaaaaggaaggaaaggttggcccaattctaggctaagaaaaccacagctattatcttaaacttcctgttctaaactccaggccaggacaaagtccgtgtctccagtgacaatggccactccagacagagaatccaaatcaatctgtccttgtctctctctctccctgttctcacttccctttctctttggaaaaatggaaaacaaagagaagtgagacagttggggccagggtattggaacactgattcagattttttcctttttttttttttatatgtttatataaggaca

SEQ ID NO: 44420 - DNA, 1847 bp, Bovine  19866880930433
  misc_feature (1)..(1): n is a, c, g, or t
ntgagactgtgaattctccctgatggtagggaaaggctccagcctaaacctccccatggatacacatcctttgttttctgcgtctgggaaatgccccaggattccctgctgtgttaccccgggagactgttgctcaatcccagcagctgctctgaaggaaaagaaaaagcagacatgctgaatgtatcatacacacaacgtaatatggaattgaagatctctaatgagcgagaacactttgatggtacagtctccctccagtgaggtctagttcttcatttccagtgggcattgcaggaagtcctctttaaaaaaaaaagaaagaaaatatatatattactaatgccgtggctatatgaaacaatatttggccaagatggctaagatatgattcattctttgttcatcgagttgctaagtattattcagagagtggagtcaccatatggtagaactgagtttccttgggaggctgggtgaaatatggtgttggctatagaatgtggaaatgtgcgtgtctctggtggttagagtctggatcaagctatagatggctaattccattaagtccttgtgcaaactccactgcacacggcaattggaaaaggcatagcccagcacagatcactctatgaggctggattctctctgaaactgataaagagtgggcaagccacacagctagacccagatgtgatcttgaaagaaaaatgtgtgtgggcaaatgcagtaccggctgggaaagtctaagtggctgaaacctatgactcagaaatcttaaattgccttgaaattaatgaagctctgtggagatgactcagttcattcatgtccttagcttgcaggactcaacactggcagaagggaacactgtccaaaacttggaagatcaccccttcagaggaaacaaggccaggaggtggtctgggatgtgttgtcacaggagccaggataggcaggtgagctggttttattcttcccgtgggcaagctcattcaagtgccatgctgtctggacctgatttctgtccctgtaaaatggaaaggagattagatgattcctaaaatgtggtcagctttgatattccgattagctagggtcccagtaagaaacagcgtttaccccagatgttttcaaatgaggaaatgttaacacagagactctttacagctgtctgtgccaggttaagagaataaataagaaagaataaggcccccagagacccataaagtccggaagccattgtcactcccacggcagaaaggatgcaaaggaaaaacagtattactggagcctattgagagttggaaccctggaggaacccacccaggggtctagaggaggccaccagtgggagccatagtccccagcagacacagtccctcctacacacacagtggtgactcaagagggaatagaaaagaaatgacttatgctgtgtcttatccccttcccgctctagtttcccactggtgagtctcattggccaaacccaactgggtgccatcaggcaaaggaattcagatccaacaggccacaggggttggaacagtgcaaagaagcctgaagaatgcagctggagtgggtgaaaacagaaataccagcacatattctatgactttatacatgtgattatgctctcacattagggaaaagggcagagcacacatttttaatttatttttctggagtgattgaagaatgattctcaagtcacagaattcctgagggcagggaccaggttttgttgatttttttttttttttttttgaacctatcagaatctatcaccacatctggcacatagtagaaaatcaggaaatatttggtaaattaaaggctgatca

SEQ ID NO: 44421 - DNA, 1575 bp, Bovine  19866880936723
  misc_feature (1)..(1): n is a, c, g, or t
ncattttaaacctctgtttggagggaagcatcactttatgattagaacctgaacatgtggaccccagggtacttcctctgcaacatcattaaacatgaaccaagagcagcggcagctcaatagtagtttgggggtattattgtttatcacttcatgcctggtgtcatctgggctacattagcagcggttggaaagcccccaagcaatgcctccatcccacgggtctctggccacctttaggccagatgtcattgcattatctaaggtcttatgtggtacaaatgcaaaccaggcagccatgagctgtaaaactccagatgatgggcgtttgtcctgtgtgggtacaggagttatgcatgaaaaagaatgaagacagaagctctgtagccacaacctggaatttatactaggtgactgcagccttgggcatgaaggctagaccttgtccatgtagatcagggccaaggatgctaaggggactggtcaacttttgggagagaaaccgcctctttctgatgccttgcagccaattgaccaacttaggggatgcaatgatggttcccctggtccttcacccacactagcaaaggccttggaatcagtcaaccaccccccacccccacaagactgtctgtcctcctcctgatggttgagcatattcccagcaccaagaacttgcttttttcttctgcatgcaaaatccagctaccatcagctggaaatatgatgagccatcttaggggacatgaggctttgttctacaaggtaaagttaatgtactctcagcttagtctgttcatggcagacagagctttgcctcatttgcagaacaaatatatacctttgaacttttggaagatccttgcatatagaagaaggactggattgatatttttatcactatgttcataagtataaataagtctctgtttattacagcattctctttccaggcccagcacacgctcatttcaccagagaaagcaaacatctgaaagatttttaatgactttatcctttgaatctctggccacagaaaggaaatggaaaataaatacgtcctgcttattacttcagtgtatggttaactctgaactgcatttaatttgattgttagatgtacctctatgtcactctgagtcagcaagcacacttccaaagttatatatactctctttttccaacctcagaattcagtttttcttcatcttaattaaaaatgtgatatgagctagcaggaaaaacatcagttttggaatcatcagacattactttgaatctcagctccctaagttatcatagggagactagattatttacactttctcagcctgcttccttgactaaatatagagatacacactcacgttttgtgatgattatcaaatgagattacagtgccaactgcaagttcacaaaaggaatcttagttcagttttcctctcttccaaggacctcctagtagagttacaatatgaagatttatctcaattttgctttgaaatgcttactgatttgctattaaaaaaaatacagccttttggaattactgcttatttcttaatccttcaatcc

SEQ ID NO: 44422 - DNA, 1109 bp, Bovine  19866880992303
  misc_feature (1)..(1): n is a, c, g, or t
ngtatggatgtgagatttggacttaaagaaagctgaatgccaaagaattgatgcttttaaactgtggtgttggagaagactcttgaaagtcccttggactgcaaggagatccaacccatcaattctaaaggcaatcaaccctgactattcattgcaaggactgatgctgaaactgaagctccaatactttggccacctgattcgaaaaactgactcatttgaaaagaccctgatgctgggaaagattgaagcaggaggagaaggggatgacagaggatgaaatggttggatggcatcaccgactcgatggacatgtgtttgagtaaactccgggagttggtgatggacagggaagcctggcgagctccagtccatggggttgcaaagagttggacacgactgagcgactgaactgaactgaactgtattctctgaatttttaactattttaaaatcttcatctttgtcttcccttcaagcccatgtgttcagggaccaactttgcagcactgagtgaagtcacctatagtccccaagaaaacctggtaaatcctaatgttcagagatgaaagaagaaaatgagccctgaattcctttgtcattaaaatttcttccttgtcgactgagtttctgtggatttgaatgaattatctaagaatcagtgttagcgtttaattggaagacagaggaaaccacaaagagtctgacaagaaagggcagacaaaataagaatgtctctaggcattgaaaagtttgacaggcgagaagagtttgtgatttgcaaagcagctggagaacatgagtcagcaggagataactaaaaaaagttaaataattaagcttacataatagctatctgattgactatctagatgtggttttaattaacacttttaacctctctttgttggtaactatatattatccaatctaaaagtggagaactttcattattaccaaaaatcattcatctacagagtgttgggggatttatttccaaacttagcaaaggagctactgtccttccaactcccttccctctctcctcctccccacacaaactcccttacaattagttctctgagtggaaattgaggacttggctcctc

SEQ ID NO: 44423 - DNA, 2360 bp, Bovine  19866881046353
  misc_feature (1)..(1): n is a, c, g, or t
nctgaggatgttctgaggttatctcattctctgagatagctgctgggagctgaccttcatctttaactgtcagtttcctctgaacagttatccctcagaacatcacagttcacgtaagctacggccaaactggagggacactgccacatggagtgtgacgcttgattgtatctctcgattcagaagctctttgttggcaattaatgaaatttaactggtaggaacatgaagaagaaaggaaaagaaacacacaggcacacacactgcattcctcttctaatctgctccaagggaacatcttccagagaaggaactgaatgttctgtctcagcatcagttaaagtcatcaggcactcctgaaggatattctgttttgatccttgaacaccttctagtaaaagtgacggattccattaaacctccagccagattttggtaccatgtcttcatgctgactggccgtggtcagctcagctctggtgacaaagcccttccatcatataggccccaagaagaaacagcatttcaagcctgtccatttgcatgcatctgactgaagtcagatttaaagtcttatctctgattttcttctttcaggaagctgtcctggacctcccatctctccccagtgattcatttcagcatccccagctgattctgtggattagtggttcattctccttttgaatcgaggctcttgaagttgaaaattatctgtgccaaatgcagatgccttggacagaggtttgttttttgtggatctggaccactgcacgctctctggcatctgtcaatgtgatgccatatttcagtggttcaaacaacaacaactaatgtttccatttatttcattcagcaaactgtgatgagagcttactgggtatgattctgtgctaagctgtgtagtaggtcaggacaacagggacaatgctaactatatatatatcccttaccctagaagagatgatattttaagccctgtgactagtgatggagatccaatagagtctctgtcctaccctgagcttactgcacaatgaggacataacgagaggcaactaaataagcaaatgtggtaagtgccacagcaggggatgtgttctaagaccacgtagcaacttgtggatttaatctatagagtccacgaatgaaaactgggagggttgaccatttaagctgagacttcaaataagtcagcacaccaaaggaagtggtcaaacatattttaagaacagggaacaatgtgtgaaggacggaaggtaagagagagcttgagatgattatgaagctgagctggataagccggatggtagggagggaagaaatgatgctaatatctgaggttaaaggactagcaaggggccagagcatgaagatccttacaaatgatgaagatcctttgaaaggctttaatcaagacattatctcgtttatgctttagaaagatttatctggttagtatgtggagaatgagttgaagggagggcaaagagtggtatgtgtatgtggtagcctgggcaagaggaaaaagtggccagataggttggtgctttccaagacacaagagagaagggagagatggggaatagttaggaggcagaggcaatcagattttgtgattcagtataggtagtgactgagatccaagtaaaatatgcaggcatgatgtcactgatagatgtgaacttgaattagatagaatggacactagtcttctggtatcaccactctggggacagcctcaatccaagctgtctagtgcaagaataccatgctatcttggaacacatggttctttctcctggttgcactttcaatccctggttggggaactgagatcccacatgccatgtggcacagccgaaaaaaaaaaaaatatctgtaagaacagatgacacatgaataatttggacaagcagtttaaactctctgaattacaattttcttatgtttaaagtaagaccaataatgatataaatgtataaacattgataattattctcattagggtgttagttggagtgtgtctatatgaaaaaaataagattctcatccactagtgttatggctgcccaaaatacaaaggtgaaaatgtgtatttgataagatgtatgaaaacagctgataggaagtgttaatccattaaagtccaaggccttggactacttcatgtccagagatagtctatcctatgcatgttctctttaattcaaaggtagatctatgcatttcctcttttattcagccctgacctctaggttctaaggatgtgctgtagatatacttcctcttggctttcataatgtgtatctagtacataaatctactctgcatagcataaggctgactgaaattgggtc

SEQ ID NO: 44424 - DNA, 1302 bp, Bovine  19866881050103
  misc_feature (1)..(1): n is a, c, g, or t
ntttaacctcggacacttctcctaccctggtgggtctcagttttcttctctgtagaatggacacagtgattccggttctgcttcccctgcaaatgtaacatcctaagtatactacagggcatgtttatgctcaatttttttatttatctgaaattcagatgtcactgggtatcgtatatttttatttgctaaatctggtgaccctaaggaagacaatagggatcaacagatgtcagatggaagactttctgagtcagagggataagacctgggaattttcagaaggtcacattaaaggtgaatgaatggtgatctgaaaatagagattctcaccagtttcccatgggggtggcggttgggtctgggaggtaaaatatgcatgatgggtgaggggcatctgggagacagcagagagaaatagacactgaaggcttaaagctggggtggcaagaacatacagacggtgctcagatggtgtcttatgaaaagccaagagcaagtcaccaaatgcatgtctttctttaaaaaaaaaaaaagcaaagaagtgaagatgtctaagtgagtaatagccgcaggaagagaacccaagttgcactgagttaagaacatgttccaatgtttttcaataaatggaggaaaagctgcaaattattcatttgttatttttgtaagattttcaaatctgtgatttttttttcctgttttgtctccagtttttgtatccacaaaaatatttctcctccttcgtaagtgacttctttttgcaaatgcagtctcaaaccacaccaaaattgcaaatgtaaagtttgtttctctcctctcaggtccccgctggatagactcccaggtcagcactgggcttaatactactcccttgttccaaggagaaggcagcacttgtgtgctgtttggtttgtttggactttagaagctgctaaattcgggtctttgatatttgaccgtgtttctgagctattgaaatagacttgggttttcgtcagtaagaactgaatggcattcgtgttttctcagaacacactcagaccggtgattgaggtgcctggggttacgattcctggtttaccagtggggagactgagtcccaggcctgtgatgcagcagcccacacccttgccctgggtggatgacagctgaatgcaggcgctggtcccctccttccccactagctgtcttgccacttcagttaaaaaccatatgggcctccattgccttattgaggaaacacgatgaatatatcctttgtgcaagattattcgtgaggatcatatgaaataatatgta

SEQ ID NO: 44425 - DNA, 639 bp, Bovine  19866881076261
  misc_feature (1)..(1): n is a, c, g, or t
nccgaccgaggaccccccgggagtcgggctcggagcagacgaggtgcccggcgtctcccttttggggggcttctaactctttctccacgtagcccccttcccgtccctcccctctcgatcccttttaacatccgtggcactgaggctcctgcagccgcactcgcccgcgactcatctctccagcggtttttttttgtttgtcgagtgcgatccccacactcatgaacatacacaggtctacccccatcacaatagcaagatatgggagatcgcggaacaaaacccaggatttcgaggagttgtcgtctataaggtccgccgaacccagccagagtttcagcccgaacctcggctccccgagcccgcctgagactccgaacttgtcgcattgcgtttcttgcattgggaaatacttattgttggaacccctggagggagaccacgtttttcgggccgtgcatctgcacagtggagaggagctggtgtgcaaggtaaagagcccggggtttgcttttggctgttttgtcttttgaaaagatgccccggcctttgggagggggcgggaggttaccgagccctgcggtccgggggagggagattcgcctggttaattatccggggctcgttaaatggggttct

SEQ ID NO: 44426 - DNA, 2062 bp, Bovine  19866881158606
  misc_feature (1)..(1): n is a, c, g, or t
naaatatttttcatgatattaatatacaaattcatttcttgtatatattgaggaatggttataaattactttgtttggaactttactaagacttcgtcccgatattgaaaaatcatgtcaccaaagacatctctgataatgaaattttcatgtctgatacaaagcacagaagcttgtttgtagttatcacatacatagttattttatataaatgcacaagtaactgataccattatatctattaggatagtcattctctgtatttacctcttgaagtatctattattgcaagctccatttatttctccatgatatcatatgaaatagttctatctgcttgttcaaaaattgtgtgtaggtagattatgtaatttgtgaatttatttccagatggtcgaaaaagcagtcaaccatttgttataaaataaggaaatttgaatctgatagagttgagaaccactaactcagtataaacagacctagggtggaatctctgacagaggcaattaactgtctaccaaaattttcagctacttttctgtactggatatccaacctacaactacattttcaaacatttcaaactatatttgcctctacttaagactttgtgactagtttttagcacttgctattgcaagatgaccaagttttctctaccttctccttccctagaaggaactaactccacagacttgggggatgatcagcctcaagctagaaagaactaaatctaaaagaagaagatgaagaatctctgatcaccagaaatatccatatttgactatgttggagggagacattaagagtgatgccattgacatcatgggatttttgttatagcaactggtgttactaaactaaccagaaaaccagcctcgtcactcactcagttaagtcatttaaccaagtgaaggtccttcaaaatatttacaagcaggttaaacttagcaacttccttttactgatggaggtcttccctggtggctcagatgataaagaatctgcctgcaatgctggagacccactttgatccctgggttgggaagataacctggagaagcaaatggcaacccactccagtattctggcctatagaatcccatggacagaggagtcttgtgggctacattccttggggttacaaagaattggacgtgactgagcgagtaacacacacacacacaaacttagtaataatcttagtagagttattgtgaggtttaagtgagattatacttagaaaatcactgtactcaatgagctgtaattaagttccttcattctttgcttttttatttcaacttttgtacttatttgcctgtcatttgactccaataataaacatccaataacatccagtaataaactcctaggcctcaagttcatttaaactatggcagattgtgactagggctctaagcaggtctttttaattcagagcttcccaggtcacattctctgcttcctcactctttatgttaaatgtgccattcaaaaaatatatagccattactttccctctgaatcaagtcttacacatcaaagattctcttagatagtttgcttcattgattcatcagaaaaatatagtgtttttttcttggtgaaaactattgctaatatccatcacacttctccaaaagggagaatttgcaaattaatgtagtagaagttcagtgttcaaatcctgtttaacccccttgtataagttcctaggggggcttccagactttgcattttggcccttcataaaatacgggcatttgtttaaaaatcttgtagaaactatgaatatggaaatgctgaggctaatgccactgggtgcgtcagccgttcaatgttttattcaggggcatggcccatagacccaaagcacttgcgacaatccttttccccaaatgccatgcttcctatacgaacgagtgggcaagacttttcaaatagaggactttgtttgcaaataataccttgtttaagacttcccagatgacccattttgaaaaaacagagacattgccaaaatttaagaagggatatgcatatcggccaaaaatcttta

SEQ ID NO: 44427 - DNA, 1255 bp, Bovine  19866881180531
  misc_feature (1)..(1): n is a, c, g, or t
ntttggttgtccacaagcttctccaactcaaaatttccaaaactagattccttatacccacttccttcccatggggaaaaaaagcctccttctgtgtctttctttataatcaagtagtcactcaaccaaaaacacattgaaacccagtctcaaatatcaccttcttttactcaccaaatcctagcccaccaagccctgtcaattttacttcttaaatatctttcaactctgtccatccttcacaatctcaggtacttatccttgcctggcataccttccgtaaaaacctcctcacttatcttaccagctttggtttcctcttgttaaaaaatcctccactctgtccttactctgacaacttcaggaggcaaacttgaatgagttatcctcatcttgatttcctctattgaaactataatttccagcaatttaattttagctaaagtggcaccacttttgatatgacagtgtaagcttttaagatcaacatacatgtacaaagatgcaccagacaacttttagaaatctcgaatagagaccagaagcagaaagattcttgagaatggtctccttttcttggttcttcttatgtcagacaatattcaattgcgttttgagcactgtgaatgatttgtcaatgagattgtggaaatgtatacaaagtctctgctggtcttcaatatgctttgacattgatctgtcagttgttgagcattttaaatcagagcatgaattttgaaaagcagtatcccgttgtgttcagtaatgtatgaatgtcatccaatcgccaccgctgattcaaatgaaccttaacctctcatgaagagatttaaatcaaatctcactataaaagaaaaaacattggtttctaactggataactaaatgcacagtcatatcagttactaaaatacatcctattgattttaaaacattttatccctaattatttttcttaaatttattgctatattatgattggtggtaccttaaagtcaagaatgatgttacatgtaaaagtgttgcatcaaacacctggtatttaacagatctttgattatttaaagttttataagtaaacatttaacatttgggaaaggagaaataaaattccattttataccagtctatcaaaaaaatatagttcaccagaagaggctatcctaaatgttctgtcaaatcagttctactgagtcttattctgtggtaacttatggccccttttccaagcaagaactttgtagcaacagagtttg

SEQ ID NO: 44428 - DNA, 763 bp, Bovine  19866881197126
  misc_feature (1)..(1): n is a, c, g, or t
nctttctttctgaggcccacacagcagctctgcagccatggaagaaagatccattctggggtgacccctgcatgaagtggttttctgaaggcactcttcctgctgagagtccgagggccaggacctgggtcaagggggcctgaggcactttgtcatcccgagaaagctaactgcttcacctctgtgtgtcttcctgctcctgattggccagtgcaaacaggaatcccttccctgcccacctccctggactgtttggaattagagggaacgtgtctcaggtagaaatcctccccaaaaggtcagtggcacgtgatggctaggttactgttggtgatgtcatttgtttttgcaggggcctgaataggtttattctggaggtgataattgggaagggctgtccccaagccgccaggcaccataggtaggtgggttgagctcttaaaacagaatttaatgaacaaggcagaataagacatttaactcctgtgcaggcagggcaagacaacggcgttcgctgatgtggcagaggcaagatgggctcctcgggtcttaattaatggaccctgtgaacactccttctccagcatcttttgagcatggagagcagcattgtccacggagggaacggtccccttccccgtgtcagccagctgactcccaaccctgggatctggggttcaggaagatcaggtttacatcctaatccttaggaaactttgcctcagctcaccaggtcccttccaactgaaaggtaaaggaaacg

SEQ ID NO: 44429 - DNA, 2489 bp, Bovine  19866881205195
  misc_feature (1)..(1): n is a, c, g, or t
naacatgttttacaggggatttcgtccagtcctctcctgacaattcagtggacacaggcatgaagatgcaatttagaagggaagtccaagttgtcataattccaagtcctctagcaatagatttacagtctaaggcagtttggggaatgctggtgcccagggtgcagactgtgatccataaattaatgggtgattgaaaccgtactaaggcaaacacagagccaccaatctgaatgatgcacgattattaccagccatagccagcatatgtatagaaataattggcttttaatgctcattagtcagttttattacaaataatgcatttgcatgatgtttgtaaatttatgctctagtgggaagacatggtgacagcacatataaacaagcagagcgattatgaaaaatgcatccaaatgtatgaatatgccccaaattacatttatttgtatatttatttgtttttaaccttgcttccttccaaaacaaaataatttaaggcaatttgaagaaacagaaccattatgagaatttttcaatgaaggcattatgaagaaaagaaaaatgaaggtcagaaaatacaatgaaccaagcagcgaattagtatgccagatgaatatcataatattctgtgcacaagataaaaatgtaattcaaagtaacctttgcatttattagcattcaaagcaaaggagtcaaaactgattagtgtaagattcatgtgttcataggggaaaatgtaaaaacaaaaaatatgtttttctcaagggaaatataacatttctcagttaaatgaccagaagggaaatttaccttatagttgttcagaaaggtaacatgaatataaaaggaggtgatcttcaaatattctctaaagtaaatgcaatagagatttttttttttctgataagctccagcaagtgagctgataacattttaccaaatcacacattaggtaaaaatcaggaccttgaaaatgagaatttacctctctttccaacccccttccctgctctcttcatacacatttcttggcccatcattgttccaatcgcatgcatgcttagtcacttcactcgtgtctgactctgcgacctcatggactgtagcccaccaggctcctctgtccatgggatttcccaggcaagaatgccagagtgggttgccattaccttctccacattcatctataattttaacttgataaaaatttagtatttaccttattgtgactgtaaaaactgttcacagtggaatgatatatgacactttgatgaatttcctcgcatagctttgtttttcctaaattgtcctatctctatttattattgctaattcaaccctcaaatctttaccagaaagaaaaatctccccataatgtagttgggcacaggcttctattcagagtggcagcttgttgagcctgggattgcttctcaccatcacctgggagacaccctccatcccgcctcccagacccactcccaccccagccatctctcttgtactgaattcttattttaatgaatccaaagtttgttgatgccttctcccttttaaagtaaaatacctccttgaatagttatctagaaaggagtattgggttgggggggggtagttttttgagcctgcaaacaatttcaaaatgactattttattatcatgcataattgatggtaaagatggcagagaataatggctggaggtatttctctcggaattcttaaggaggtgccgctttggcttctacctcattgctcctggaaccacattttttcctgttaggagcatagcaccatctagactcccaattcagtgagtctaaggctggatcatcgaaaaagcaagagagtttcagaaaaacatttatgtctgctttattgactatgccaaagcctttgactgtgtgaatcacaataaactgtggaaaattcttcaagagatgggaataccagaccacctgatctgcctcttgagaaacccatatgctggtcaggaagcaacagttagaactggatatggaacaacagactggttccaaataggaaaaggagtacatcaaaggctgtatattgtcaccctgcttatttaacttatatgcagagtacatcatgagaaacgctgggctggaagaagcacaagcttgaatcaagattcttgggagaaatatcaatcacctcagatatgcagatgacaccacccttatggcagaaagtgaagaagaactaaagagcctcttgatgaaagtgaaggaggagagtgaaaacgttggcttaaagctcaacattcagaaaacgaagatcatggcataaggtcccatcacttcatgggaaatagatggggaaacagtggaaacagtggccgactttatttttttgggctccaaaatcactgcagatggtgattgtagccacatgaaattaaaagatgcttactccttggaaggaaagttatcaccaacctggacagcatattaaaaagcagagaca

SEQ ID NO: 44430 - DNA, 710 bp, Bovine  19866881238614
  misc_feature (1)..(1): n is a, c, g, or t
ntggtttatgctgggctttcctggtggttcagatggtaaagaattccctgtaatgcaggagacctgggttcagtccctggatagggaagatcccctggagaagggaatgggtacccacttctatattctggcctggagaattccatggacagaggagcctgaaaggctacagtccatggagttgcaaagaatcggacatgactgagtgactttcacttaatggttatgttagtgaagtcaaagtcccagaggaatgaattatgcataactgtttccaaatagtttgtccaaacttctatcctagactcacccttcccctcaactgacctttgtcctgtgtactcagttcatgactgtagccccgaccccacaataaccatccaggagaaaacagatgaaataaacacgtcccatcaggtacctgatggaaaatagcaaactgctcgtgttccctgcacagttagctttatttttaagttctcctgcgcagtaagagagccacagcataaacttcccaaactcacagtattaagttactgttaatagcgctgccttcagacaactgcgctgtggactgaccctcgggtttgtgggttttgtttttaaactccaagctcaggtcgggagcaataaggttagccacctgaaacaacaacattggcctaatctagaatgatctatttccccagcaaagattggtttctgggtta

SEQ ID NO: 44431 - DNA, 1004 bp, Bovine  19866881280526
  misc_feature (1)..(1): n is a, c, g, or t
ngaagatgtctgggttgatgattacttacttttatagcttcggttttacgggctttgtttttaaaaagcaatttgtgtgtatgtgagctttatgatttgcatgtatcctcagggatacactcaagtctatttttgcccatatagactctccggatgcgatccaggggatgggtgatctgatttgcttcagggtcagagggtgcccatgtgattgagcagagtggacacgcccgttccaatatgccaaccccagactgtgccaaggatgaacagaccaggaaaaaaatattgtgtcataaagcccagaccttgaatttcctccaaaagtctcaccaaatggtgtaaggctgagtgtgagggccagagcattctgtgcaggatgtgaaagttcactatggaaggactccaaaatctatggctcgtctgaagtcagaggaaaactaccacgcaggctgcgatttgattaataccgggggatctgtttgcaaagagaggagggatttagaagttaggagaagagactctcatgcaggtgtccaaggacagtagcaatgagcaccacaaagaagcagtgatagtcgtcagagaagcccagggtcctcagagcttcagtctttacatgttgacttgagctcacttgctatccagccctccttccttgggcttccctggtggctcagatggtaaagagtctgctcacaatgtgggagacacgagcatgatccctgggtcgggaagatctcccagggaagggaatggctatctgctccagtattcttgcctagagaactccatggacaggggagcctcatgggctacagtccatgggggtggcagagagtcggacacaactgagcaattaataggttcagttttcagtttcactccttccaaacccagcatgtgatatccattggtgactgtcaaccctgcttatttaattcctcaggcccaccctctctgcactccctcttgcacttttgccaagtggggggtcataattt

SEQ ID NO: 44432 - DNA, 1621 bp, Bovine  19866881372333
  misc_feature (1)..(1): n is a, c, g, or t
ntttccaactcgctgaaaatgttcttaacagtccccatagacatcattctgctcttgtaaatgtgtccaactagttttcatcagtgagtggaaaatagccaagatacaatattctatgagttctcccttaacactcagaatccactggtaacggttgccaggcaaaatgtctcatgttaaaattgcttgtcttataagatgttaaaacagttttaaagagccttcgcctctcaacatgcaagatattgttaaatttgctctttctctctctctctgaaatacaatgtggaaaaaaaatccatattttaaataagaaactttgatgttgaaaattgcagttgaatcctccaaaacaattggggaaggaaaggtgccatcagttgagatgatctattatctttgcagaatccattcggaaatgcacaggcatggaatatgggggaggaaaaaaagattgtgtttttgtccttttccttgtctcacaattttgtcttgtcaccattttcaatcgaaggccctatgtgagaagcatgatggcttagactcaagaacggatggaagtgtatctaagaaatataaactattttaattggagtataattgctttacaatgttgtgttagtctccgctgtacaatgaagtgaatcagctattcacacacatacatcccctccctcctggggccccatcccaacccaccccgcattgcaccatttaggccatcacagagcaccgagtgagcttcctgcacaaacagcaggttcccactagctatctgttttacagatatacttcaatagaagtaaatatacttcaattaaaaaagttaaaataaaaaaaaagtaatataaaaaaggaaaattccaaacagtttctgtccacagtctaccctcaaggaggctgactgtgctctctaaatgtggggttgtccatagtgacttccaggcaggcttcagtacagaaaaagaccatctttaaatggagacacccaactaacaccactcagctgagtgaaaaaggtcagcatcgccagtgatgagtcataatgatcgaaagcacccttaacacgatgtaatgaagatggcactttatctccatggttttccttcccaaatcctataactccagtgcgatgagaggaaaaaaaaaaaaaaaaaatcagatcagtcctaattgaggagtgttttacagaaggcctgactagtagtcctcaaaactgccaagactcttaaaaattaggaaagtttgagaaattgttataatcaggaggagcccaagcggacctgacctctaaatgtaacatgatgtcttggatggaatcttagaatagggggaaaaaaattgttaggtaagaactaaggacaaatgaataaatttggagtgagtaataaaatgcaattttgcttataattgtgacatatatactgtgtaaacatactgaatttacaacagaggaaactggatgtatggaaactttctgtactatctatgatttttctggcattctaaagctattctaaaacttcaagagtttatgtaaacattttgactctaggagaccatatgacttaatgtagtggcttttgataaggaatacatcagtccctggtggaattttgta

SEQ ID NO: 44433 - DNA, 1571 bp, Bovine  19866881398129
  misc_feature (1)..(1): n is a, c, g, or t
ntgctagagcctgcattgcgctgaggtcgatgctgcagttccaggctcctttctcagctggctttgggctctagtccgccgacgcatatcctggaggagggacaggaatgctaggggacgggaatgctggggtgttttccctctctgtcttcgctgcagcctttccagcccagctggtgacctcgcccctggccttgggcaaactcacctcaccccactgccatccagtatcagatgacactgactttccttcttgtgtgaatctctgggttgctttgttctatttattacttatttggcttctccaatgtagctaacaccctagattaaattcctcccattttaaacaccgaaagtgacttctgtttctcttgaatgacagacagacatcctttccaccaacagacaaccatgcaatctcaagtgtgccatttcaaaaccataggagacaggacttcagttttgaagtacctgccttaaggatgagttccactgcagattgataatgctacccgaaaaaattccctttgaatagaagtcaaactgtttgtagtgagaaaagcaattttgaaagaatgatcatcagtgcctttaaaagttttcacgatgaattaagacacattatcatccacaaattttctaaaagattcatcaatatttaatttgcttctccaaatcacattaggattaacattacaaagcaaacaggcttttgttctaaggaaaaatgtatcagggctatgcagtggttttatctgacacctctgttagcataatacagtggaagggagtatatttgtgtttgtactcacaacagattctgtttctgaatttctgcccttggctacttttacaaactaaacatcatttaaccagcgggaagacacggtacacaaaactttacagcagcaggatatgttccctaatatttggctaatctttgggtgatctcaagaggagctagtggaagaatgttaagagttagcagggggtatgtgaacctctctttttattacctggctcagctaacactttgcaagatgtcatggcacaagaatctaatcattgcctccagaatctcttcactgctctcttcagaacaaatctgtgtcaggttcctaagtgctaagcttgaatagatctgctcttaataattaatcctttccttaaagtgctttgatttttcagattcggctgagtatatatttggcaactctaagcctgttgtgccaaaacaaaattgtaatgttgatggggggtgcttagctgctcagtcgtgtccgactctttgagacgccatggactgtagcccgtcaggctcctgtgtccatggaattctccaggcaagaatactggagggggttgccatttcctcctccaggagatcttcccaacccagggatcaaacccagatctcatgcattacaggaggattctttaccatctgagccaccagggaagcccattggtgggggatcaggtgtaagattccaggccccatgaaattttagggaagaagctcagatgtgccgtcttaaccctgaagagaagctggcagtcgtcacctcccc

SEQ ID NO: 44434 - DNA, 748 bp, Bovine  19866881628660
  misc_feature (1)..(1): n is a, c, g, or t
naagatagagggttctacagtattagaaaagcaagctgctaccagatctcaaatagtaacacttacaattgaaagagatttttagtgattttagtgactaaaacccagtatgtagtctcagttgaactaaactgctcaaatctagagtctttcatgaatgtcatggctttcccagttatcatttcatatagcctcaaggtgatcaccattaagttgagaagaaaaatgggaggagattggaaaaaaagaaaattatgtccaagaaagggcaaattgcacttaccttgtacttcaataaatacatttataagtgcaaagcttattttttaaaatccaggcactaaaaataatattcacttttagcgatatagatattttgtaaaattttactgccttggtaattttcaggaggccatattcacatatttaaatcttcagttttctaggagtcttgttactgtctgaacacatgattaatgactaccctaaaatagactgcaaataaaaatattatcacaatggaattgagttttattggtcactgttcaaagagaaaattgtattatgtaggatcagatctcatactctaaatgccatttcccataaaagctcattgctctccttggggcactagctctttccactttaaatatcctaggaacactctgcttttagaggactctccatgatagagagtctgttcctttgtcatgggtcagagaaataaaagaggattctgatcacatgg

SEQ ID NO: 44435 - DNA, 686 bp, Bovine  19866881690018
  misc_feature (1)..(1): n is a, c, g, or t
nctatgcctcctctatcttcctcacctccttttccccaactacactccctaaatggctttcctgatttaatgatgctaccccatttctcttattttgaaccttgatgtctaccaacagtgattctgttagttcgattttttttatccagaccccagaaactccagaacctactcactgaagagaatcaacaactctgatctgggcaggactacattaaactagagtcattacatccccttctccaggggattttcactacccatttaaaagagtaaaatgattctcttttatgtgactcataaaagagaatcacagcaggtaaccaggaaattcggactctggccccactgctttctttggtaaaccttctatcttaatccatgttttcttcatctgttaaaggaggcagggaaacttgaatttttgctttaatattggatgaatttatgaattggaggagatcagacaggtaaagaaaggcttttctgaattaatgatgtctcctgtaaaacccatcacaaagaaattaactccctgagggagaattattcagctaagcaaatgctgtgtaaatatgagaaatagcattgattttcttaacgtcacaaactaatttataaaaaaagctaatttattaaaaaaaaaagaaaaaatgaatcattcttgtttactgggagtcatttct

SEQ ID NO: 44436 - DNA, 1234 bp, Bovine  19866882149582
  misc_feature (1)..(1): n is a, c, g, or t
natcaaaagtctctgttaagaatagagttcatgttctgtacaaaatggactctgggggtaaaatcccatagacagagaagcctggtggggtttagtccaaagggtcacaaagagttggacacaactgagattacctgttcacacagactccgaaacagcaatggtgggtacaggtgctgcccatgagccacatggccaagcgaaggccatgcctggctacacagttctttggtctggatgcttctttcctaaattgcctgggatattcaagccccttgcttttacttccacagcattctgcttttccctctgactttttactaacctcaaatgctgctagtatttgtctataattctgctaaagataaaaattctaccaaataagtcatttctgtagacactcatcttgctcaaattgcccctgcaaattgctggctgcctgtcttgcttgttagcatggaagacggcaatgtgacgctgtagctctgacactaacctgactgtcacctgtacacattctatctgacagatgcattttttctctaactgcattttcttagtgtgctcaggcaatgcagagtttagaaacttaaaatattctcagctccaataatatggcagataatgtaaaaagaaataaaaaaggaaaaagtaagaatcattgtcttctctaaatcttagggaaaaaagaaaacagaaggataaaatatatccttgactccttgaattaataaggacttgaaaactagaagttagagcaagtgaactcatgatgcaaatgacgttggtgattcactaaacccagaaacataggatcttgagtgtcaacacttgcacaaaacctggagatgagatcttggtcaactccaaataagccaggagttggaaaggaaactcctactggtccccccagatatcgcacgataagtgaaagatgaagcagaaaacaaatctcccctctgccctatatgctagcagaaaagcatatccgtctctacaagcacttctggtgagtttggactctaaatttataccaccggagtcaccaggcagcaataaatatgaaaggctttggaggcacttcaacaacacaggccacataggatttgccatgggacataagagtggggaaagaggctcttaatttaagttcaaaatcaaaaattatgaagcacatgaggaaaccatctgtcctgaccagaatgaagtagacgcaccacgaggatcattaaaa

SEQ ID NO: 44437 - DNA, 3608 bp, Bovine  19866880700624
  misc_feature (1)..(1): n is a, c, g, or t
naaataaagataaatatagtttaaaggatgggcttatccctccttctttagaaggctcttccttgctaccaagtaaggtaaaaatgctttgacttgacagacaaggccattcattctccagtctgtgtccttccaacctcatctcttgcgctttctctctctcttgcttgttcctgccgcttgccctgctatacttcatcacccaggctcatgggctatgagctgtccctagacatgttctgtacttaaaaactctgtgtcttcattcttggtgctttcttctcttggaaaggtcatttaaccagtcgctgtcctttggaattcttctcatgtatttggctgcaccagttcttagttgtggcatgtgggatctagctccctgactagggatcgaacccaggcctcctgcactgagagcatagagtctcagccactggcccaccagggaaaccctccactgaagttcttatttctagtttcaataaaacttcctagtaggcccttattacagctactagtcctgttattttttgagatatttgttcactctttcaaatttttcttgtctgtctactatttagcccttattttatttagattttctgtgaagttgtccacgtgacccaacaccgcaccttattaaggttccctttagggcaggactgtgtcatgatcatctttatggtccctgttggctagcacagtgacttacataaaattgggacattagagttgttagaagggagagagggcagggaggccgaaaaaatggcactccaatctgctctctgtggacctcgatctgtgatcatgataagtattagccctgtattctaagcaactgaactgcctagctttgcaagaatatacagaaatggataaataaagtcctcttctaagcctgcatagagttgttactttttccatgctgtcagactatagaatctcagaaaatcataagccttaagggacctaagaataacagtatctccatattatagtgtctgtgaccacccatgtccagactagcctttcatcaactcctacctgccatttccaggttttccttggctttcactttcttggacttgaccactgacttcatgtccccagtaccttgatagcccaacccagggtgatagtggctcattccaggatttgttgctgagaaaagagaggaacatagactaaaagaatattgccaatgcaaggagtgagggaacccacaaagttaaagcgatggacccacaagtccatcaagcccacctgctcctcttataccaacttcaagtttggaggttcccaagaccaccttcagtgttgatcattcactggcaggactcagagttcactgaaagctgttatattcaaggttgtagtttacagcagggaaaggatgctgaggaaaatcaatcagccaaggaatcatggggcagattccagggaagttccaaatgcagagttcccattgtcctcttcccatggaactgtggacagtgttactttcccagtatccacgtatgacaacatgcacagagtattgccaaccagagaagctcccttaagccttgtgtccagagtttttactggggctcaatcctgtagatacagctgtctgcccacatggctgacctaggcccctctggacactgagctgacactacatgacccaaagcgtccaccctagatcatgttgttagtctctctgacatgacccaacatccccaggcaaacagaaacactcacacatgacattccgagaccttcgagattatttcccagaagctgaggacaaatagctgacctctttggggcaagggtatattctgcactctgcagagcccagcatagacacccttcctgactgtcattaccccccacttcagcatgctgggaaatgcatgaacttggaaccagacaggcctgtgctggctgaccatttatccttgcatgacctcaccagtcactcacatctctaagcctcagttttctcttttagaaaatggaggtaaaaatgactgtgcctcacagtattttaaaggattagaactgatgcttttagggaacttaatataattctgatgtgtagtaagtacccaacaaatgtaatagccttttcctgttcttcaattctttttttatcctccccttcctctttctttttttttctcttcctctctctccctccttccttccctccatccctctccttctccctctactcccttacgctctctcctcttccacccttccatcttctctcaggatagcagaatgtcacttcaacttgctgtgactaaggaaatgccacctcaagggacccacgttcccgcagcagctttggtataccctgctgaaatctgctgatcaaagctagctgtcctgggttggaataaacaggacttaacacattgtaatgacttagctccattccagatctggtgtaaactaaagacgaaaatgtgttttctaaaaataccgaggctgctacagatgtctgggcctgtttcacctctggttacacaacagtcctgcctggacatctctacggagttcacgtgccaggaaactaccctaagaacagccctgcctcctcactagtgttagcagtgtccaccccccacagagacagagaggttcaagcacccaagacggacactaagtgagttatgaagcaaggtcttagcaagaccagaacttgcatcatctgagttaggcatgtgtgacctcaatagctctccggatgctgcctggaattgttctgtggtttcagaaaagccaaacctctgttctgtgactgagatcgcacttccaatgacactctccccccagacactttctcctacagagctggtttagggcctccattttcagactgctgaagatctgtgtcacagatcttgccagtttctctccctgcacctctcccatgaacgtggcattgggaatggccagtgataagctgcctgcacatttgctccctgagactcccgtgatcaacctgtgacagccccagagattagagctgcatacgataaatgctgcattgaccttatttttcctgccatgtttagagagagaaagtcacttcattgagttctcaggcatttttagtgagcatagagagagactgatgtgggtaatccatgaagactgaactgcagagcatgaaagcaaacatattgctttctgtacctgcaggctatgtttatgcctgactcttgtttagtgtcaaagtcagcttcccctgtaaatatttcttccttcctcatcttgtctgcaaccattcctcctattcttcctcttctagatcaagcatcactgtccttttcaatcatgatttcttttgaatgatcaagtcagaggaataggtcctcttccttcattcattaactcaatatttaccaagttcctcttacatacaaagaactcttctaggcaatctaaaaaatgaaatggacagaacagacaaaaattcctgccttcatgtagtttatattttggtagtggggaacaagcaataagtgaataaaaattagtaaaaacatgtatcaattgatgataaatggtttggaggaaaaatgtaaggaaaaatgatagatttgggg

SEQ ID NO: 44438 - DNA, 1319 bp, Bovine  19866881056622
  misc_feature (1)..(1): n is a, c, g, or t
nccaccagagaagcccaggggagtaagaaagatagaccattggctggggatttgaactgcagggaagacaaactctttatcataaagcttgaatccaagctctaataacaaagcaaaataggtctggggaagaatctgaaaaatgcacataacagagaaacatggtgtcactggaggcatgactattaaacgtgccactggctggagttgacagaccagccgaccgctgcatccaccctgaggctctttgctctgcatttggcaccagtcaaatagacgccctctctcctctctgaagcattgcttttgcaagggctcaccccactcccacagcctcaccctgcactcacagcaggccatacactatttgggccaattcagcttatcatgtcaggtttgaatgcatcaggttctcccccaaactcagtcggtagaagaatcataaaacaagaatcccggtgtccccagacctctggactcctgtcaacaggcatgatttttttctgagcggatgacgatttatagcctctggctcgccatgatggagctcacaattccaaaagctgaggctcctgttttcaacccctgttcttagtttcatttatgtcaccagatgctgaggcttcatctgctctgtattcactctccaacagaaccccaggaaaccacgtggagctggaaagcccccacagctgtcattcctgtgtcctggtagatgtactgtgtgaccttacacaagttggataacctttctgggcctaagtttcctcatctatgaaacagagatagcagtaataatacaataaaagtaggcagttaaatggtaatataggttaagtgccataggccttagtcttttaggaaaccaacaaattgtctttcagagtggctgttccattgtaccattcaaaatgcctgtaccattcctacaaacaatgtatgagagtgcctgttgctcagcttcctctcctgtttttatttaaaaacaaaaacaaaaaactcttcttttggggcttggggaaaatgtttggatttttaaagtttctttaaatgtgtttgcacattatgtgtctgaaccaaattcatgaaatgtaatcacagacataaagtgggcatcccagtagcatgaagaagaaaatgctgtgttgttagtgttcgggatttgtgtatttaaatagggatgtatgatatctcattttaacttgcatttttctgatgacatatgatggggagctctttgcctgcttatttgacatctgtatatcttctttgttgaggtgtactgtttaggtcttcttgtccattttttagtggggttt

SEQ ID NO: 44439 - DNA, 1100 bp, Bovine  19866880699946
  misc_feature (1)..(1): n is a, c, g, or t
ntgcctgatttccctctgaagtcttgatgttttccttacttactatccaccccctctattagaatgcaggccccatgccagccgggaatttcgtgtgttttcttgaccctgtggacccagcacccagcatgtcatctggcacacagtagggcctcagtgcgtagctgctgagtgactggataaaacggaaatggaaccaacaaaaattggaaggaagaaagataacagaagaatttcccattctttcattatcaggagtcagtaaacactacctacagtaaatgaactgataaagcgaggtccaggtatattatttaaaatgacagtaacagcccctagatggtcacaggggagatcagagcagtctgtagtagtggatacgtgacccctgagacaagtctgttccctctctaacctcagcctccggtgtccggcgttgtctgggaggatgcgctgtcgtccttctggagagacggcaggagcgagtcttctcccccacagtctcctccgcagtcccaggacgcggaggaaggtgggtcacctcacagccgggtccccccaagcccacgcgtctggggacacccccagctggcctctcccagagacgtcccccgactgctcacgcccctttgatggagagcgctttgttctagagctttggggtttccttggatccgtttttctaaagggcaacataagaaaaaagaaaccagatcaaggcctcaagtctccacggatctgggttttatgggcagcattgcaacaaccctcaggagggccgcggcctgcagctggcccgcctggacttgctctgggccggtcgctctccgtggaaatcccctcccacgctcaccctttaatcgctttccagcccagtgactttcctgattcacccaggctccctcgtctggagagcgcccactgcccctctcccgtctgggcttgacgcctctgatccccgctcgggtcggcggaggctgccctcgggcgtcaggccccggcctgctgggtcacctctcccacgtagctgtggtgtctgggtgcccctgccggaggagcccggagcagctctcccttggggcctcgggtccaggcgaccc

SEQ ID NO: 44440 - DNA, 2162 bp, Bovine  19866880741158
  misc_feature (1)..(1): n is a, c, g, or t
ntgcctgtggccaagttcagcagctcaggccacatctgtgatcatccccaggatacatttctgcgtctggggccattcccacggccgtgtgccagggctctgccctcataccacgactagaaatcacaattttccaggagatagtaaccttgatagtagccgatgttaactgacttaattgcgtctcttcgattctcacggagcccttggtttttgctgtgttccggctaaccgtatgccttcacgaacgtcttgttcgagcttttggccgctgcttccagggggtgttgctcttgatccatgtggtagagccccctgggcctcaccgggtggcgagtgtgcttgcagtatactggtggcctgaacctgggcaagcgctttcctgtcccccagggactttaattctgcgcgctccaacctctcagcgtcttccttcaggatccctgccttcggtgcaatgctataaaggcttttcccacaacagagttgcgggagcatccatgcctggcttctgctaattgttgcgtgattcactttccacaccgcgcctttcctctgaagttgactgtgtgtcttcgtagccgacttcaaatttcctttgaaatgaaagtgattaattgatctattagttcattcatagcgtgctggggaggatacgggagagagggggtgactcacagatcgaggtccaggagagaaggacaggtgctggtggtaggggctgcctagagggctccgcccttatctcagggtgggaccctcgtctctgaggccagaggagtgggcggaggaacggttgcctggggcaggaggtgggtagggaaagggctagagaagaaggctgtgggctgggtgcccatatctccagggatacgtgggtgggcacagcaggaaggagctgggagaagggcagtgatgccaggcaggtgcaagccggacggcaggagcctggccaggacaggtgcgggcaggctgtgacttgcaggggctgcctgccggcgggccagtaaaatctggagctaacaccccacggccgtgtccaagggaaggtgggtgtcaggcagagaggccacagcaggagccagccgggggcagggagttggttccccgggggcagagcattctggattcgagaagagactgaggcggggagtgcctgccccatctgtggacaggcgccgggacaagcgtaaaccacccaatcacacagcacatctcagtgcatggcactttctcctgaatttgcaagaggcagagggtcctccctgagccgggtgggcagccaggacacgaccgaggggcgccggtgcccccaggacagggcctaacggtctcccgtcctctctccacagctcagtagccctgccgcaggcccgccggccatggacaggacagccagcctgagcgccgcgggccgcccccagcacacctccgccatccccgtgccccgcgctgcctcgcagagcaggacccagaccccagtggcatcaccccagctgcggccgcgccaggccggcctggccctgagcccccagcgggcagtctccccaagactgggcaaggccagcggcccttccaggggctcgtcccctaaggccccctggggggaagaggctcccccaaggccacgggggcaccgagggagctgtctgagggggtgggagctcccactggctccccctggagcagcccccgcgcggcccccaaggtggccctggccagccggcccaggtcgagaagagctggagagacacggggcaccccagggcagaagaggggggcccaggaggggaccgtgacccgccagacccgcggcaggagcccctcccgggccagctcccatggagacactcagataccagggactcctgaagctcaaaagccctccaaccacccagggaaagatcagagagacgttcccggcacaagttccggggtgcctaggcctttggagcctgaactgcagttggcttcggggcctccctccccgtcctgcagccccgtgcagagcccacgcccggccctgggggccgtcagctttggctcagcccacacgcatggccagcctgtcacagccactgtggcccctttccggtacaggtaagctgtggggggcagcggggggatggagcctggactcgggggcccatggaggggagggg

SEQ ID NO: 44441 - DNA, 1608 bp, Bovine  19866880875768
  misc_feature (1)..(1): n is a, c, g, or t
ncgcgctcctgctctttgtccctggggccctcagacagggaccccccgggcctgcgggtgtgatggccttggcgggcgtggggcgcggtccaagtagagacgggtcttgtttctctcactattttgtgtcccagctgcggggaaaggcctgccaggggctgcacacaagctggtgaggaaacactgaccactgggagcctggggaggggagacagggacccgggtgtgggcaggatgcagccgcagggatgtgctggggacgcctgagctctcggcgcggtctcagttccatgggagacccaggtcggacagctgggctcccccgggaggaaggcgagagaaaaaaccagcggaaactgcagacacggccactctgtgcaaacgcttggaaggctccgtagatccggctcagctgttgtttacagcttttgggggaaaatggctcttatgttctctgtttgcagcttggccgctggggagacgctgccgtggccttgctcggggctgctctgtttctccccatcgtgcggggtggaaaaactgaggccaccagagactcggtctaagtcggcggactctggcaggctgagggaagggatgagaaggcgggtccccagcaaagctcacgtcctgaggagttgaggccactgtggccaggggtgggggctggctcctaaagcctcaccagctggagctccagcgcccagcctggggcggtgcaggacagggtgtgaacagacagggcacgccccaggcggggcacagggctcccgggaacctccgttaattctgacccatgactaaccaccactgtctgagcaaggctgcttcctcctgcacacacagccactgatacaatcctttctccagcgagttcacaggcatcacacgggcactcgtccacgcccgtgagttagggtgggggtgaagtggctgtttacaaacccacagacttgggggaggagaagccagcccccagtcctccgcgcccgtgtaactgaagcccaggggacacccggggagaccttctcttcggatggacttgtccaactggggctcacacagctgccaccacccgggcccacctctgggcactcacattggccgagagctgagaggtcaaggtggccactttctcctgggacgactccagttccctgcgaagctttcggatttgctgtggagggagagagaggcacactcacgttggcagaaggggtgggaggcgtgggaggaggcggtgcggggtgttaggaggcagaggcagaggtggggaccctacctcagactgcatcctctcctcagcctggagaaggagcccagaagcgggggagagagaggaggtggttacacggaggagagagtgcacagatgcgcagcggcaggaagcggggcgccaggccctcacaggctcagaccccaggccagcgtttagtctcctgccagagccgcgtcaccccgggggcccagagggagctggcctgaagactgacctcgtctccaccgaccgcaggacggcccagccccgccaggagctgccgtctccacacacccagagggtcccggacgctagggttgcccacctgccctgcctggcacagaacccaa

SEQ ID NO: 44442 - DNA, 2176 bp, Bovine  19866880969331
  misc_feature (1)..(1): n is a, c, g, or t
nttctctggtaggagtaatccagacaacgagggaatttgatagctattaaaaccagggttctgcagttggcaggtaactttgcagtctgaagaggtctgttttctgagactgactgcaatacagttcaagtcagagcaaaagaagacacctggaactccatcatgagtgaagccttaacaggagccatcctgagagcaagaaaggggtcagaatccatgctgggtaagcctcaatgggtggcattctcctggctctcatcaaaggaactggtatcttgttgataagatttgcctctgcccagtttcccaaggattctccttttgctgaaaaccccttctagttgccatcagcccatttatcatcctcaccttttggagactactgacaataccagtaggacttctctctcaggatttcttcaacagaatgagctgtaggtctaggaaggatttcagaagatcaagttcagtctgtttttaaaactgtaggtgggacaactatggccaaataggctatgaagaaacattcagaatctttttctgtttaaagaaacatggcggggaggggggtgcattcttaaaagataatacatttatttattcacacttggattgcatttgtgataaaataaatgtctaaaatctttaaaatgaaacacagtaagtacttagaagatgaagggctacacagcaaacagtcttgaagcatgactttcctcggggacttctctgcctggttttgttttcttagtcaaacaacaaaaaacgcctggagactgctctttctttaaaaaaataaataaataaagcaaggagttgctggagaaagttccagctgtggtaaggcctgcagggctctgctctgcccaacaatgactgcttggggacccagtcctgtgacttctgagctgaggaaatagagatgaagagaacccaatggatgcattcagactcgcacaaccacacagaacactgttctaacccccaggcgagtgtgtcaaactgggaaggcgcaggaagctacacaaaactcacatggttgggaacggttttgcatgatgctagctcatgttagcatccttttttttcccctccatcatcccctaccacatctctatgaggaatgcagccttatctctcttgttccccactctacccctgctaggaattgtgaatggtcaggcatatgcactcaaacagcatcagctgaatgagttacatgccagaatgatactaagatcaacataaatatattagggaatagaatggaaaactgacaaattttgaagttgggatgctgaacttcaaaagaaactaaacttccccatttctgatgagggctttaaactctgtgtccagaaattagagatcaaaggctcacacttcttagctgtgagggacacttagatggaaaagtttcagaagcctggaacatgcaataccatgatgctgctcttcctcctgttatttctttctttaaaaaatatttatttatttattatttttggccatgctgggtcttcactgctgcacgctggctttctctagctgtggctactctctagctgccatgcacagacttactgtggcggcttcttgttgcagagcacaggcttagttgcctggtagcatgtgggatctgcccagaccagggatggaactgatgtcccctgcactggcaggaggataaccactggaccaccagggaagtcctattatttccttttttaaatgcattattacctctgtataactatgagccagaacttaagagaggggatggccatgttggggaaaatatcttgcatccctcagtttgtatgtagacctagatttgctttaactttggatttacattgctgttttttttttttagctgtctattgcacaccctcagaagggtttttcctgtcatactgttaactctctaaaatagttgtaaatatacgtaatataaaatttatcattttaaccatttttaagtatacagttcagtggcattaagtgaattcacattgctgtacaacaaacaccatgatccatcacaggactctttcatcatcccaaactgacactctttacccattaaatcataactccccattccctcctcccctcagttcctggcaactaccattctattttatgtttcaataaattgactattctaggcccc

SEQ ID NO: 44443 - DNA, 1602 bp, Bovine  19866880997158
  misc_feature (1)..(1): n is a, c, g, or t
ntgggccagtagtggacgcacttctgggcggggggagctgggagtcaggggctggggtctatcggctggatcagggccccccccaaggcatcccccctgccccccggcgggcttgacacctgcttgacacctgcctcccctcgccctggcttctggctagggtggcctccgtgccctgtgactcagggactgacaggtgtcctcagcccccgggggcccagcctggagctgccccacctccttgccctctcggagctgtgtgagcatgatgatgaggggcgcctcttcctgccacaccatctcccagaagtccgacactgtgttgggcatggggccctgggtggcaatgtaggccttgtcctgcccgtcgtagccctgtaggcagggaggcaggcggtgagcgcgggtccgtggcggcccggacacaagcgtcagggacgcacgcaccgggagccccgagctggtggcgacggccagcagaccgtgcgtcgtgcccacccagccaccgcggtgcgggtcagactcgacagcgtgtcgcgttcagtctttctgggcctctgtgaatggtcccttccttcctctgccttctattagccccaaaggcggggaaaaccattgccctttgacatgctactttgtggagttagcagcgaggcgtagcacacccctgccagccctttttctccccctcagaatcctcctgctcctcaggggatgggggatccagaccattcactggcccgtgcttcaccccccaggccctcagttcagttcagttcagttcatgtctgactctttgcaaccccatggaccacagcacgccaggccttcctgtccattcccaacccctggagcttactcaaactcacgtccactgagtcagtcacgccatacaatcacctcactctctgtcatcccctgctcctcccaccttcaatctttcccagcatcagggtcttttcaaaagagtcagttcttccgcatcaggtggctgatgcgggctcttcacctccgctcccggccactgtcccacccactcagagccactagagggctcacgtctgcgcctgccgcctcccaccccgcaggctggaggctgggcgctgggcactgggcactggagacaagtctaggctcggagtccacctggcctcccggcctccggttccttaattccttgacttaagctgcctccaagaaggaggggccgcctggagcagcgcaggcagagggagggaaccggccaaacgcctcactgggctgcaggcctgggagtcttgggctggggtggccagcgccgctctccatggagaggctggcaggtgtgggggaccagggggacaggagactggggtcttccttccagcgcctgacgtctgctgtgtgcatcctggcatcccggcctgttccaggagctcatggggttggagccagggcaccaggtgccccgctgcgctgggaggtgtcctggggtaggagtgtctctggacacagcgcccccttccctgccagcaactcacccgaatgtagttggcattgatgtaatccccatcctcctggctctgtgcccgacccagacagactcggctctggggtctagaa

SEQ ID NO: 44444 - DNA, 1455 bp, Bovine  19866881807659
  misc_feature (1)..(1): n is a, c, g, or t
ntacacagcagtgcaggcggtgagcgaagcacccggtcaaggctgggaccgggcgtgataagcgtaactgttgtgagtgggcctccacggccgtccaggggctccctgcaccaccacccccgggacaccccagagggagcctggcaggccccgaacggggagatgggtccctgcgactcaccaaacagaacggaggagatcctcctctgggcgtacatggtgaagccttcgttcagccagaactccccccagttggcgttggtcaccaggttcccaaaccagctgtgggcgatctcgtggatgatgacgtcggccagggagcggtccccagccagaaggcagggagtgacgaaggtcaagcaggggttctccatccccccgaacgggaaggacgggggcatgaagagcacgtcgtacctgccggggcgggcggtcactgggggtggctccctcccgtcaccaggcggtccccagtgccccgtgccagggactcctctcccagcccttcccagggggatgagaccggctccctcgcacccagctccccacgcgggactggcaggcctgacggggcctcttgtcagggggacctcaagtctgaagacggcaaacagagagcgggtctgcccccagtgacgggaaaggttaagtcagccacatccgcacagcgaatcccatctccgacccagcacccgcctgctcgccgctgtcctgaaatgcccaccctgggcccacctcggtcacggccacggccacggtgggtcaggctggctgtcctctcctccccgcccctgcaccccagggtgcgggaaccgcagacgtgaagctcccgtgacacctcaccttccccacacatagggtccaaagagcttctctcccgttgccagaaactcctctatgactccgtcatactcctccttggcagcgtcgatgaggcagggctcagcccacacccggctcctgcggacaaggatgcagagagggtggcgcgggggttagagcccggagggaccagccggcttcagcctcccagggagccagggagcccatggggaggcgacctgcagcagagctgaggcccacccagagctgagggccagccccacccgcagagtgggcaccgggagggccctgggggcttctgcaggcagcaggcctcccccgcactgagccccagctccccgtctgcccagtgtcttcagaaacgactgttcttgctccgcaccagcagctcgtccgcttcctaacagaacctggcaggaggaaacccctggaagatgtccctctccttctctgctctcctgcagctgcgggcttgacgtgcttccggtcacccactgccctgtcccccaggaagggagcccttgtctcgcaggcccggggctgcccggagcccgtggctggaagcggaggccgacgggcctgcccagcgctccctctgacctcggagcggag

SEQ ID NO: 44445 - DNA, 1702 bp, Bovine  19866880402706
  misc_feature (1)..(1): n is a, c, g, or t
nccccttgacagggagtattgcagttaatgtaattattagtcagtatggcatcaccgactcgatggacacgagtttgagtgaactccgggagttggtgatagacagagaggcttggcgtgctgcaattcatggggtcgcaaagagtcggacacgactgagtgactgaactgaactgactgaactgattatgatttgattgtaattgttacatttgtataaacctccatggggttgcccctctgctctctatattgaggtattgcagtttttttcactttgtttctatagtgaattttctcttccttttgtccctttaaaatagacaagataatttagcctaaataaccactttagaaaatagtcaagtttaacgactacatttatttctattaatagctctctcaactttgggagaattgtgcttaaagatcttccctcctcttcacccactctctggcccttgaatgatcatctggcagtttgagtctctttcacatggttccttccttcttaaagtgaagttgcttagtcatgttctatctgcaaacctgtggactgtgtccaggtattttccaggcaagagtactggagtgggctgccatttccttctctaggacatcttcccgacccagggatcgaacccgggtctcctgcattgcaggcagacgccttaccatctgagccaccagggaagtccttccctttatgttacacacaattttgatgatgtgatgactgacatgcaggcagaggaaaccttgcttttatcatggattggtttcttgtggctattctctggtctcttaggtggcaccggctttttgcctgtccaattccttgtcatatcatgctttgttctcaagttcctctgatgctacatgttgacatctttgacctggcaagatgtatgcctcatcagctgagtatctttcagttcaatgcattcctttaaattctgtgtaaacctcccttccacccccgccgtgcctccaacacagactcagatgttgcctctttgaaaggaaagtcaaaagctgttgctatttttcttcttttgccccagcatttaatacattaaaccatttaaaaattgttttcatttcattattaattagaaaaatacacacacacacacgtagaagaaaaagagagataaagataaaagatttagaaatcactcaccatttaaccgtttgaatgcaaccagcgtttggcatatggaaattttttttctaggttttttccttgtgtgtgggttttttaatcatatttgaaatcattctgaatgtatagttctgtagtttgtgggttctttatttagcgtagtcagcataaacataatatagtcaggcaaaaattttccattgagtagatttaccgtagtgaaattgagctcttgttgacatttaagtgaatgcatgtattttttgctatgagaaaaagatgctaaagtgaccatatttccgtacacattttttcctttttttttttttgcataatttacttaaggtaaatttttagaatcactgaatgaaaccttaaaaaagatttctagggcttgtaatataagttatcaatttcccaaagttgggtacatatctgtatgctcactagcatattgatgattattttatggaatccttgtcagcatctctagataatataagcaaaaaatttatttcttcgtaaatcttatgggaa

SEQ ID NO: 44446 - DNA, 3347 bp, Bovine  19866880593912
  misc_feature (1)..(1): n is a, c, g, or t
natcgtgacattatgtcccctgcagaaaaggacagaaatcatgaacatgaatctagcagagcaaactacaatttctaagtactgcactagaaaagaatttggtgattagtttgagagtatagttcataaaatctaatatgaagtcactggaattagccagtgatctatcaagggtctccaaaaggaaatgttggactcagggtaatcgaaaacttctttacacacacacacacacacacatacatacacacaaacatacactaggcatttttaaaaaactaagcctgaaggaatcagaacttgtacgttaaattaaatattaatctatattgtacactggcttttaacgtacaaactaaaagtaaaattttagtacatgtcatacaacagcataagacaagaggtagatactgtttgcttctttttgtctttctgctttagtattgtctgaacgcaggtagcaccaagattaactaggcttgtgatcttatacaaatcattttacctctaaaaggttttttttgccccattggcaaaatgagagtttgaatctgaccatctgcactagagcactaccatgaaagaagaaaaattttaatatcgaatccttgatttgatttaaaaaattttttggaggaagcataatatataaaacaaatcagagctaattctattaaattagaagagattttgggcttgaacctgacctattaatcgaccagctgccatgtctcctagactatcccctgagggagtatagagaaatacagtttgaaagccagtaaagaaagaactaaggtccaagtgtcagttagctacgtctttacaggccctcataaggctgagattctaggatgctctggaggttgcaaacatgaatgtctttaggacaggtcaggtaaacaaatgagaaagcagtacggttgaagcaaacggaaaagttcgtatcatatttaaagaggacatgttactcggggtgtaggtccatggtcatcatgtaattttgtttttaaaagtgcacttgaatctggatttctgacaagtatttgcagattttgctaggcaggcaaaaacacgtgtttaaggcagatatggcccacgggctactgtgttgcagcctctggtctacagtcacagtgttagtgttggaccccagaactcaagatgtgaactttgtacttcatataatgcagcctatgaaaacagggcttgtttgcgcctagtcaacatcctaatctgaattccaattgtggatctccattgtttgattccacttcatctcagtatctcacagatgtcttcacattttgcttggaatcaggaagtgaatacaaacttaaaccaaaaagcattttaattttttgtaagaatcagggttctactgttcaaccaaataacctagattttttcgttactcctttacagatatttcatttacaattttacctagaaaaaatcaggtatactttaaatgtatttttccaacaggaatgagttctacttttactgttggcttatattcctccccattctgacctcacattcacagaatgcttactacggattgagaattctgaacaaaatgctgaaaaagattccaagcagctccaatctagtgaagatggataatttgataattaaaataaggcataaaagtattacgacagacataaagctaggcccacctaacccatggcagaggctgaagagggtagaagggaaggaaaggcttcctagagaatgtgatatttgacctgttttgaagctgaatttccttttatttcaatgaaatctatcttcttcagacttagaaactaaacctgctttttgttctaacagtgtgagattaatataaaacaaggggaaagtttattttactggatagtatttgcacagttttataaacttcaactataaactttcttaatctccagcttttctccatgaagagactaaatcattgaatgagttctcataaacttcaacttcactcatttcttttgaagtttccctctccggattttctctattaccattaacttctgagacaaatcacagtactaaaattttttctaaagcaaagtgaaaaagggaaaggaaataattttatgctcctaatagtgaacatggcactacagaacttttaataacactaaaaagaaatggaaagaagcactaaaatttaattggctcatcacagatcaaacagacacaaaaaaagtggcagaaggagagaggggttcaaagaggaaggaggggaaaacacagagaggacttctagtagagatggcagaataaagctaaaataaagaattgttctctccccaattccttaacaaatgactctgatttagtaaaaatccaatgaatgaatgagtaaagggttgaaatgtaaaatcataaaattcaaaacaaagcagctaaaagaaaaaataaaagattatggagtggtaaaacgttacttctaaatcctatttaaaaaccaattaccaaaaatagtcaatctgaaaaggctatacactgtatgattccaactgtataacattctggaaaaggaaacactaaagctaagagatagcaaaaaagattagtggctgctaggggactggagataggagggagggagggatgaaaaggtagagcacagaggatttttaaggcagtacaactattctgtatcatactgtaaaggtggatacatatcattacgcatctatcaaaacccacagagtgaacctgaatgtatactagagactgacaaaatccagtcagttaagtgtcaagtcttagtatagataccctggaaaaagcagcagcaaaaaagaaatggtggtaagcaagaattcatttaaacatgaatctaagactaaactgagaactataatttcacaagagaatgtatttgttatgagccatgacaacgaatcacaagctggaatcaagactgctgggagaaatatcaacagcctcagatatgcagatgatgccacttaaatggcacaaagtgaagaggaactaaagagccttttgatgaaggaaaaagctggcttaaaactcaatattcaaaaaaactaagatcatggcatcagatcctatcacttcatggcaaatagatgtggaaaatgtcaagagtgtcagattccattttcttgggttccaaaatcagtgcggatggtgactgcaaccacaaaattaagagatgcttgctccttggaagaatagctatgacaaacctagacagtgtattaaaaagcagagataacactttgttatcaaaggtccatatagtcaaagcaacagttttttcagtagtcatgtacggatgtgagagtggaccataaagaagg

SEQ ID NO: 44447 - DNA, 792 bp, Bovine  19866880638974
  misc_feature (1)..(1): n is a, c, g, or t
nttcagaggttaatatatttcattaaaaaaatctgtattcaaggcaactaatgaagaaaattaattttacctcaaaaacacgtagataaatgcaattaaaaaaatttataaaatagcaaaagtagaatttaaaatttaggactgacaagcaggtaaagttcctcacatccatgtaatagtgacaacagagtctctgtcagagacacttttaaactgaagtgggagcctacgagtacatttacctaagaaactggtcactggtagtgccgcagtgcataaaagagtttgctatgacagttgctgtatgacagacagaattccttactgcatcctaaaaaacaaacacagatatttatcatttgtattcatacaaatgcaagcttgcatgtaaacacacaataagaagcactattttgtggtgaaaacatgagtaaactgaatcagcatttaaaatatgaatcttggaaatttctttataaagattaaatagctagcttattaaaaaacagcaaatcaaaagttttatttgtggtcttaacttgaggtcaatagatttcaagtaagaatttaatagtagatattctaattgttagtttctaaatagtttgccatttctctttgatatcctgctcaaggtctccaagaatggatgtaacttgaggaacaatggtgtacctcttctggcactgtacctctggcagcaccagagcaattctgtttaattcaactgcactataaagataaacatcagaaaactgtcatagatgcaaatttttctcttgcacacttgta

SEQ ID NO: 44448 - DNA, 1548 bp, Bovine  19866880662107
  misc_feature (1)..(1): n is a, c, g, or t
natttctatagtcatgcagtatagtaagaaaaagaaaaacaccacaacagcagacactgaccgagcatcccatgacaaagcattctgtgaggaaggaaaacaaatgaccaataacaaacggaaaatactcaaccacactaaaaatgaagagagtgcatgttaaggcatcctttaaaaaaggttttttgtagttcaatttaaaatgttatgtattttaattttctaggtctgatataatttttaagagagagatatgcatagaattactctatttagataaaactgtattacaaaaggtgttaacgcatgcacagaaaaattctggaaatgtatatgttaatatttataagaaacattttaaagcaagaataaaaagcaagatattcacatgaagatatgagcattttgaaaaacaattagtttaaaaggcattaatctttttcttattaaaggtacggaaaatataataaattttagcattaaaaaattgttcatttgtaacatgaaaatcgagtaaattcttatgcagtcttacttcttttcccactgtgttttcccaaagtagaattgcttccaatatccgtggaatctagaaagtaacaggtggtggtcagaaacttaaaaaaactgtaaacctgaaaaatctcttcactacttatgtgcattggtttcctcatttatgaaacagggatagcaacacgtatgccactcaggttttacattttttgtgaagattaaataagatcttatttgcaaaagctaatgagaaatcactatataaatcagcaacatgttagaaggcctcctccaaaactatctaatgagtttacaaatagttgtctgaggtcttttttttctgatagggtaaaggactgtttgtcttttgaggtctttccaaggttgtgacaaaatgacgctattatcttccagcagaagaacacatttctttgccccatgatattgtcaatttcaccagtgatttcaactacatcatccaggtataatcagttggccattctgttaaatagaattctttcctccctgcagttccccgaagggtcaggtcaggtaagtgcaaagaatagggttgtgacgtggactgagtgcactccctgtcaaagtgtgtttacacttcgagtgcatcaggagtgggagctctgatttcagactcctgacaccctgcagcccaaggtcctgtgacctgcaccttctgtaactggtccaccccctgttgggagctgcttgaggttctccttgaacactgatcaccttccacagctactcctgggtctggggtatctattcaaccacctctatcccgaccttgggtggccttacccatcctatcaatgcttggtgactttcagtcattgcttcttggcctcttgaacactttttgaagaatacatgacacaggagcacttctaagtccttggagctctgctcctaagttatggcttataaagaaattttcacttacacctcctcccctcctctttccctgactcctacatcacaggggtgactctgcctctgacatctctttct

SEQ ID NO: 44449 - DNA, 1088 bp, Bovine  19866880671206
  misc_feature (1)..(1): n is a, c, g, or t
nagggcatccgtgatgaagggtgggagaagatcaactaattgattaacccagactgaattatccttgaccccctatgactacggcttccccagtggcttagtggtaaagaatctgctggccagtgcaggagccaaggagacatgggttcgatcctgtgatcacgaagatcccctggaggaggaaatagcaacccaccccagtattcttgcctgggataatcccatgggcaggggagccaggtgggctgtcatccatggggttgcaaaaagtcggacacaactgagcatgcgtgcatagcctagcattcactccctaggactaggtggaaacacttggtcttaatgaacagtgcaaatagcatctctttctccagaaaacccagtggatgcagatcctagttactgaatctttagcgtatagtcagtggagcaggtatccccagaaaccagctttgtgaagatcatgacttcctggttttgcagagatggccaaggttacctctgctggaagttaggaaaatggaagcttttctatttcatttttttcacctcttagcttctctctcacacactgtcttggagaggaagacatcaactatctgatgccttccccagaatccacacaacacagacagtgctggtccgtgaatgtcacgttactttgttttttaaatttaaatttatttattttaattggaggctaattactttacaatattatattggttttgccatacatcaacatgaatccaccacgggtgtacacgtgctccccatcatgaacccccccttcccacctccctccccgtaccatccctctgggtcatcccagtgcaccagccccaagcatcctgtatcctgcattgaacctggactggcaattcgtttcttatatgatgaatgtcacatgttactttgaagaacagaatttgccttcataggcggcactaaggtctgcaaagcccctctctgatggggttgaagggcctctccacaaaggaaaagattttccaagttagcagcctcttctaaagggcacccctgcgtcccaatcactctattctttaaagtgtcatctccataaagaa

SEQ ID NO: 44450 - DNA, 1761 bp, Bovine  19866880672130
  misc_feature (1)..(1): n is a, c, g, or t
ngcctgggtaatatctgatgccacctctgctcttcccatcttcctgtgaatggccctcatcctcctctggcaccccagaaccctaaccctttcctcagctcaggatggcagcaaagcctcaattggccaactgcctttgtatcttctgtctttgtggggctccagtatgcacataatttgtttttctcctattaatttgtcatctgtcaacttaattattacaccaaccaaagaatctagaatggaggaaaagaatccttttcttccccagcaacgaggagatgagcttctagcacaagggagggaggggaaggaggaaggaagaaaagactgggatgaaaaagagggagaagagaagagaaagaggtgccagcaactcaatcaacattactccttgatttctaaatcagcacttttctatcactcctcctcccaagctctacttgagcaaatacgtgtgctaagtcgcttcagtcgtgtctgactctttgtgaccccatggactatagcccaccaggctcctctgtccatgggattttccagggaagaatagtggagtgggttgtcatgccctcctccaggggattttcctgactcagggatagaacccaggtctcctgcatctcctgcattgcaggtgaattcagtaccactgagccccgggaagctgagcaaatataaagaagcaaattgtttcagaaatcctagtttcactttatgtctccattgctaaaccagagacataagagcaagcctgtttgtttcatgatttttagggcatgaacagagggaaggaagaaatactcttggcagcctaccgctttctctaaggccttcgtaatttcctgttaatttaagacctgaacctttgccaggtaaataacacaggtaaagataaacttcactggccctggactctgacctttgttgaacgccccgccccctctccaatctggcctccatcccaccgctggaaagtttggaactgttacctggaaattttgagcagagaacaaatagctgaagagacagagcatattgattttagaccagtgaaagtataaaaacaccagcacatctgagagttcctctccagtcagctgataagtttccctctctttctcaaaaaggtaacccaatggagtcaatttcccttccacgttcttgatagggctcccaccgactctgccacctcccagcttatacccacccaggctgtactttgccagcattgcacagaacaatttacttagacaagagtaatttaaataagtatttaatcgctttttctccctattgttgagcacacttatatttctcttcttgttggaaggcttcctctaacagtgatttcaaagaggggctgtatatgataaaggggttataccctttatatagctgataatctagctagagatcaaaatctaggttccaagttcttctctttgatactttaaaaatatcattcaactattttcttaaatccagtgttactgtttagaaatctgaaggcaattgatttttgttccttcctcacccctccgctaccctgttgcctggagcatagaggtaatggctggagctttcactgccagtttgaatcatgaggacaagatggaggaatagtgatccagaatgaaacctgtgtcttcaaagacccagtaaaacagagctacaacatcagccatgaactatccatctttaaacttctacaacagagaaaaataaatgttcattggtttatacagttatgtgtagtcc

SEQ ID NO: 44451 - DNA, 888 bp, Bovine  19866880728267
  misc_feature (1)..(1): n is a, c, g, or t
naggaagcacagaggagaaggaacctaatggaacatggttatgaagaaagtgggagaaaatggtgtcaagagcaaaagtttgtctttatttggagaatatttgtgtgatgatctgttacttttgaatgtacagtatccttttattagtgacagtaccccagtcctgcttggggaattttcctccctactggttcaaatcttggtgagactgtcattgaaaataaactctcatattcccctggggaaagtgtgggcctgtgactctagacaggccaatcagatgctcctctggaattttaatctttcttaagtggaaggacccaaggaccaaaaacatttcaagtttattcatcctgacagcagagtcccgacgagaccattccattagttcctattaccaagattcccagaatcaccctgctttaacctttgtgagaactagttcaccagcttttcctttaattatataagctagttccaataaactccttgtttaagctggtcagcagaggtttttgttgatggtaatcaaaaagctttatctggtaagaaaatttttacctgagatcaccagaaatttaaggcagtgatatctataaattatgtaagatttgtggataggggcatattagctgagacagaccatcctactgatctccgtcttttcgctaaagtaggacaaagttttctggctcactgagctattctcccgatagctttctaatagagactaccctaacataaaactttaaaaagtctaaaatcctgtcatggctcctcaaaataaaaacagggatgcttaataagtttttctaaaagagttacatttaaaaatcaccaaaaagattacacaagcaagaattctgactcccaaaagagtacaggcaa

SEQ ID NO: 44452 - DNA, 1913 bp, Bovine  19866880898964
  misc_feature (1)..(1): n is a, c, g, or t
ntgagatggttggatggcatcaccgactcaatgaacatgagtttgggtaaactcggggagttggtgatagacagggaggcccggcgtgctgcaattcatggggtcgcaaagagtcggacatgactgagcaactgaactgaactgaatgatcctaaatggatagtaaaaccattaggtaccggacatgactgagcaactgaactgaactgaatgatcctaaatggatagtaaaaccattaggtacagggttgatggacaattttataatggacaggctgacatcatctgcatccactgatcaatctaacatcccagaagaaagacaaccagcaccgcccaacagaagcacacagtcccatccgtgaagaatcctgttcccacgccctcaactgaggctgaatctaaccaaatacaaaagaacagaggatagaggaacgtggttatgtgtgaaaccacagcatgaaataccaaacatgagagttttctacaaaacaaatggcccagttgcttcaacaaataacagtattaaaagaagagggtaggaactattacagattaaaagtgattaagagtcatatcaaccaaattcagtttgtggactatgcttgaagactgattcaaacaacctgaaaaacgacatttttggtagaaatcaaggaaatctgaacacttactgggtattattttatgcttaggtttttaagtgatattatgattatgatatggaagtgatgttgtacatccacgaggaggagaaacaggaggtaagaaataaatgaaacaggaatgttaataatttgttaaatatcaacaagatgttaataactgctgaaacttggtcatggctaggaaagggcttgctgtattatccccagttttatgtatattttccacaataaaaactaaaaggggtggtggagtggggtctcaccagtggcttctccatgctgcttctcctcacctccctaagctgaggtttctgctctggccagctcagttgagagctttaaacctttttttaaatagtgcctcaaaagttttacatgacattcagcaatgttcctctcatacccctgggctacttgacagtaaacacaggcagagctaactaattcacagattttaataatcactgctttctatgaaaaaaggaataattggctttaaaaatacacaaaggcatccggaagctgctccaagaacaccaaaatttcagactactcactacatgttcatacaggcagctgtggattgatacaacaaaatactggatgccaaaaattccatacagcaacatctcaagaagcaacatggacagttataactagaaagaaggaaatggaatgctggcctccaacacaggcactgacgcatgctctgtctaaacaagtctgaacttggggcaagtgttaaaccacagagatatgaatcagagtgaggcaagctataaggctgaggtaggacagcaagctgattcacgccaacagtcatgccaagaaaacgcttgcccaccaatttaacagaaccctgccaatgcacacgtacccagaggtggcaaacaaccctggtgtgaaacaacaggaggctaccttgccaatcagtgatgagggagaagagctttttctttaatgttttaattttaaggcttttttggttttttatttttggaaactgatgtctatccaaagataaatgactactcagtccagcagtaatgccaggaagatgcattgtggattaccaaactaagtgggttagtgggtggacacacacaggtgaaaagcaaagcgaagtacgtcataaacatgtactctgttgttgctgactgaacaaggctaagtgctacagcatccatgctccattaattgggcagcctttactgccatacagggtgcgtgtatgtccaaagaaga

SEQ ID NO: 44453 - DNA, 737 bp, Bovine  19866880969533
  misc_feature (1)..(1): n is a, c, g, or t
nccccaccccggggggtaccttagacgctcttggtgggggagataaggcacgataccaggaaggaggcgatagtcctgtgaaagacctacaaaatgctaagaaaggtacccgggaaagaccgggaccgattgatcacacccttccgcctagtagaaatttggaagacttcctgggcgaggcggtacacagccgatcttgaaggcttgtggggatttgggagagaggagggtttgcagaagagaacagtgtgtggaggggcagcaaagctagaggaggacaaaggtaaaaaggtacagtctaggaatagtagataatgcagttggttgcgtaaggccacggtgaggagtggtgtgggggcggggggcggtcgccacagtcgtttggggtccacatcctggaatactgtagaggagctgtttgagtggcattctaaggaaaacttagagctcatttctcggtgactcatgggcctagaaatggaagctggggaatattaaaggcgttcctgtgaaagaaagagaaggaggcccagtagagagttgacattctgtgccttgaatataacgtactttgaggtagattttgacagctttctggatgttcagataaatccatgtccaggctaggccaaagtaccttttgcaaaaaacttcattggatgtcagacttttaagaagtaatggaaaggtgtgtataaaatgaagtgtttctgttggtgcggttcactaaaatgcat

SEQ ID NO: 44454 - DNA, 3301 bp, Bovine  19866880997581
  misc_feature (1)..(1): n is a, c, g, or t
ntaagaagaaagaccccaatgccaactcttaaatcctctaatcttggctctctctaataaagccacttagcccaatcaaaaaaaaaaaaggccataatattcacattcagtctgcattatctttagcattgttggtaaccaaattcctgtcaacagtatccagttgtgcttttgttataaagaagataaaacttgggagagttgactcagtcagaagattcccctcagttaattctccaggagtccagcttgtctcatcctttttaaagaaaagtgtggtatttcaagccagaccctatactccacatatgatctaaccaggcaagaccatctatccacagatttcataatacagtcttaaactccattcatagttttgatacgttacatggcagttctctaccgagtgacttaactgacctgtctgttctgtagtgaaccacatcttcctctattgtttactactgccttttgggacattcctgctgggctgaataattattcctatcaaattgcttctgatttagattcaatatacttctgacatttcaaaatttttcctgagtttgttatccagagcagtactagctttccgtaccagattcccgtcaactacaaacctgaccagcaaagttcttcctttattccctgttaaaagtaccaatactggaacttcccaattaaagctggccatcagtctgtattgtatgtacagtcatttaaacaaccacaaggaaccacctaactgcattacccctagtagtgatagcttacaaatttctctgataccaagatactaagatcatggcatccaggcccatcacttaacagcaaacagaagaggaaaaaaatgaaagcagtgacaggttttatattcctgggctccaaaatcactgtggatggtgaccacagccgtgaaattaaaagatgcttgctccttggaaggaaagctatgacaaacctagacagtatattaaaaaccagagacatcactctgctgacaaacgtccatctagtcaaagccatggtttttccagtagtcatgtatggacgtgagcattagaccataaaaaagaatgaaagtcaaagtgttagtcgctcagtcgtgtccaactctttgcaacaccatgactgtggccctccaggctcctctgtccatggaattctccagcaagaatactagagtgggttgtcatttcctctgccaagggatctttccgacccagggactgaacccaggtgttctgcactgcaggcagattctttactgtctgagccaccagggaagcccatagcagaaggctgagcaccaaagaaatgatgcttttgaaatgtggtgctggagaagacgcaagagtccatcggacagcaaggagatccaaccagtcaatcctaaaggaaatcaaccctgaatattcactggaaggactgatgctgaagctgaagctccaatactttggccatctgatactgaagctccaatactctggccatctgatacagagagccgactcactggaaaagactgtgatgatgggaaagactgaaggcaaaaggagaaggagatggcagaggatgaaatggtttgacagcaacaccaaaactcaaaggacatgaatctgagcaaactccaggagacagtgaaggacaggcgagcctggcatgctgtagtccgtgtggtcacaaagagctggacacaacttagtgactacacaacaacaacatgtgctcatacacaaaaaataatcatcacatacatggggcttccttgatagctcagttggtaaagaatccacctgcaatgcaggagactctggttcgatttctgggtcgggaagatttctcctgggtggagaagggatgggctacctactccagtattcttgggcttcccttgtggctcagctgataaagaatccgcctgcaatgtgggagacctgggttcgatccctgggttgggaagatcccctggagaagggaaaggctacccactccagtattctgtcccggagaattccatggactctatagtccatggggtcataaagagttggacacaactgagcaactttcacttcacttcatgtcacatacacacacagtatcactgaagagcatttccctcactatgtacactacagtgagcttctccaccctattttattctctcctagcctcctgcttccttccttctctttgaaaaatgctagtcatagcccactaagttgatttcataaccaactgatagaatgggacctgcagtttgtaaaagagatttataatcaacctgagtagttcacttattaatggaagctattgtattcacaatgctgaattcatcatggggtctcaaagagtggggcacaacttagcaactgaacagtaaaacaacactgattcattcacagagattctaaggaattaagttacgttatcagtttaagaattagtttcagaaaacacgaacttcaactatttcttgacaaaccagcactgaacttagtaatatgaaaggttaatcagtgtccacatttaaaaatatgaagccatcaatcttcaagggtaaaattataaatccatttttcctctggttaaatttactactcactttgccacaaggttgtggaagcatcgtccatacgatcatgatcaaacatcacagtctggcccatgcttggtaaataagaaaagcaaacagccaatcctgttctttttaaaagatggtaattccttaaaaagaatgtgtatttcaaataaataagtgaggaaaatttgaaacaagattcaaatatgaaaaatagaacccttttagaaaattatttttttgggtcaagaatttagatagaaaaagtaagcaaatactgtggttctaaaatgttacacctgagagtgttgaaatgatttttcccccttttagttattccagtgaaggactaaattttgggaaaaaaatccttttaaaaatttataaccttaaaaactatttctagaagatcagatctaaacctggaaaatcactctccttcaaggtccagcaccgctatttctgctctggctaaatgcccaaaaaagcacaaacacgccacaaaaccagcctgagccgaagcaccatagttggagattcagtttgtttcctttttaaacggctcaaaggccaccgtatggtggtattcagtgtaaataagactttttccagcagaaatatttagagtcacagaactgcacggccctttagaggatcatttagaacatattacccaacgggatttctctgagaattctttacccttccaaatcagca

SEQ ID NO: 44455 - DNA, 1007 bp, Bovine  19866881024419
  misc_feature (1)..(1): n is a, c, g, or t
nccaggctattgaggacatggttggctatgcacaggaaactcaaccatgagaagattctccgtggtcttgcagttggcattgcgttagtgatgtacgggaggatggaagaggctgatgctctcattgaatctctctgccgtgataaggtgagatcacatattattcatccttttctccctccttttcctcacccttcagttattatatctaacatttacagaaacacttaaccttgactagaaattatctctattcccatcagaactcctaggtacatttattgatgaaacttctcgaaagatatataaagcctaataaaatttaggcaagaaaaacactgattagaagaggtgagcagagctaatttgagattaagacttcagtggttttcaaataagcagatttagaaaagatctttagaaattgtaagttgatttattttagaaataatgttttgggcatgatttcataaacatttaataggatacaaagtttacttcattgttttttcatcacaaaacagtgcccatctctggacttttttatttggatgagtttttttttcctttgccttttgtcttgtttttgaaaaactgaaaagtgaaagtcacacaatcgtgtctgactcttcacgatcgcatggactatagcctgcccagctcctctatccatggaattctccaggcaagagtactagagtgggttgccatttccttctccaggggatcttcctgacctggggatcgaacccaggtctcctgcactgcaggcagattctttaccaactgagtcacgaggaaagcccctgtcttgtctacctaccatatacaatatagtaaaaatggttttactgttgtaaaaacaaaaaacaagatgtgtgtgtgtgtgtgtgtgtcttgtttttacaacagtgaaacgatttttactgtattgcatatagtaagtagacagtggtaaacagtactgtcctctgtaatctgataaaaaaaaatccactgctacagtt

SEQ ID NO: 44456 - DNA, 1814 bp, Bovine  19866881110917
  misc_feature (1)..(1): n is a, c, g, or t
natgacttgctagcaaccctcatcctctagaagtctcatttttttgtaaaacggggatggtaacatttagaattgtaagggttgaaaatggtcatctgagtaaaataatgtgctgaacagagtgcctagcacacagagctacctgttttcctctatttctttgcactgatcattcaagaagccttctcatctctccttactattctctggaactctgcattcagttgggtatatctttccctttctcccttgccttttgcttctcttctttcctcagttatttgtaaagtctcctcagacaaccacttgtttagtctgaagccagtaggcatgctgtctcaaacactgtgacagggacttggggagatacgttggaacttgcccttaaagagcttatttataagctggctgggcagtaaaaatcccatacacacaggaaatcactcaagaacaacgaatcgcctgccaaccatgtgtcatacgtgcctgggagctgctcagagagactgattaccggggctagcggtgaggtgtaagtgaggaactccaccaggcttctaatccaagaacaaaggaaggaatatgtttattccttgttttggaggggttggttcatacccagcataagcagagagcctgggatgcatgtaaacctcctaaatctttagaacataaaccagggcttctgagagaagatcacggcatgagtcagaggctgctcacaccaggtcatgggaacacggcttggtgggaaactctttctctctgtccaaccacttgccaagtcccagctctgtgtaatgcccaagatctttgaaggtaattatctgctggatgcaattttattataaataaataactcactgacttgacaatcactgaacgcatgcacaccaaagaaaggactgcccagatcccagcaaacagatgggaaatgcccgtcagcagtgggccgtgacgtagaggcaacgggtatctggaaataatgcttttgttgacaatctctttcttaaaaggcacactggtttaggagaatggaagaagacacagacttggagcagagtatggatgtagaacgcgcagagaaatggctattaggaggtctgctgcctttggatcaaataagctcataaaacaaataggccagagacctgctttgtggaaagatgaactggagacacaactgtaaaaatggcgcttgatgtagacttcactcttttgagtgtcttcatgtgtaaaatgaggggtagaccacaccattctgactcagctaaaaattagtgactacctgcttagtgctaggttctttaacctagatagattctctcaacataatagcatctacctcacaaggtggttgtgaagcataaatcaatatatgtgatttcttgatatctagcatgtagcaagcacttactaattagccattatcatctaatccccacaaccttgaggtaaacattatttcctctgtacagatgaagaaaccattaagggacaagatctggatgtgaaccaaagtctgaagtcagggtccaccgtcttcccattacgcagtttgctttggatagggccctcccttctagctcttcactgtgaaaaatgagagggtggaaaaaaaaaaaacttgagtgctacaaacaattgagcttaggaccttctaagggattttctgtgaaaagctgaagtgtcatctcatttatgatgaggataataaggaggttggggaggggactgagacaaagtcatgaaaacttcttggcccaagttcacttatcatcatctcatgccagttagagactgcagacacatta

SEQ ID NO: 44457 - DNA, 667 bp, Bovine  19866881697720
  misc_feature (1)..(1): n is a, c, g, or t
nctgtcctggggctgtccccaggactctagtcagtgccttcagcccacctgtgggagcctggagtttggggtggggggttcagataagtccgtcaagcacaatcaatctccgggtggaaccaaagaaggaaggagccaggtctgggggcgctggccccccaggagcacatgtggggtgcccaccagccacagccacagagcaacagggtgggggtgtcttctcctgtccaggggcgaccctgccagctgagcactgagcagggatgctcaatccttcggagagaggggggctccctgctgtctccggggtagagctcttgtaggaagccatgggtgggtgggtggggggagggggagggagagccagctggtacttgggaaccctgcctcctctctggaattccagttccctctgggggaatgcagcgtttccttttccttctcacttttgcatgtttttactgattgttcgatatgctaaccgttctcagccctgaagagaagggctccgacacctccagtcagactttggtgctctctggagatgaaactcttgaagtgctttgtatattttctcaattagatctcttttcaggagtgtctgtagaacaataaacatcttgacttcgatttggctgggagagagggggggggggggggggagggg

SEQ ID NO: 44458 - DNA, 1313 bp, Bovine  19866881812749
  misc_feature (1)..(1): n is a, c, g, or t
ntataagcctgcaatgattattggtgaacttgaagggatttatattttttttagtggtatctccaacccataacctggcctgccctctgaggtggtttgtggtataatcatcataaaagaggcctggactattcatacttgggatcaactcagatctacaaagacatttcaaacactttcaatgacaatgttacattgttgataccttatgtattttgaaaataatttttatctcttttcatttgaaacttctgtactgtatagtggggtccctagccctggtctggtttccagaaatttacttgcatgattctgggagtggctagtagggtgttctgtggaattggtatggctggatgcactgggatttgcagaagccacaccagagacacacagatcctcagcctggaagaaaccaagtttcagtttgatgaatttgccctggaccatctccagcacactttaggtactttatgtactattcctcagacactgtggtgatacaaataacatcttctgtatccaccctaaaatagctggagatactgcagctccttcttgggggctctgctggcaagtagaggccaggtgccaagaccatcagctgcatcctagctgccccagctgggcctgagccctggagtgctgtcacccagcctgtgcctggactggagggagtcttcttcacccttctaggtctgaacaatcctttctggaaacagtgggactaaaccacagtaactgacaatttccctgggctctcttccactgtagcagagtcttggggagtttggattccagcccaggctactgcttcagtgagggcttcgtgcctcccttccagtccctggaaggctctgacccctggattcttctggcagaggtcatcagtcacccttcactatgaggtcagagaagaaaatggcaactctccacagttcttgcctagaaaatcccatgaacagaggagcctggcaggctacagcccatagggccacaaagagtcagacacgactgagcccatgcctgttctgagatttgttctacctgccaaactcaacccattttgggggcggggggatgggtaaggggagttacctggatagaatacaacaggttgatagaactctacatctttttgcctttctgaccagcccagcatgcactgcctgaggtaggtcagtgggcttcctatgtaagtgttataagccacctcctgctgtacctccctgacatttttacacagtcatgttcactctcacctatactcactcacctgtatgcactacacaccacatcagccaagtggacaa

SEQ ID NO: 44459 - DNA, 1627 bp, Bovine  19866880362654
  misc_feature (1)..(1): n is a, c, g, or t
ngggtatacttgattcttatgattctgctcaggaaggaagccaaaaaaatagtggacaatgaggtattttcatggcagcaagtcaacacaaaggttcagaagtgtcccttttgcagagaccatggggacagttcttttgaaccaagggtgctccagacaaaatatacaccatccccctgagactgagcaatgtgttcttgtaacctttcaatgtcctaaaagaacctccataatagggtcttaataaatgtttgaatacataaataactacctgcatcttaaatttataaacattgcaaaataacatcattgatataactttacatctaggtacaaggaaactgtagctttaggaatgaggcctaccttgggcacggtcctcacatgaaacagtatattttggaaggagtgtccatcattggcctgcaagactgtgatgtcagaagtgctatccgagccatcgtgaacatactggacaaggcccctagagagctcgtccagacgaaactgatagataggggccgccggggactggagcgtttggagcaactggccgtgaagtggaggatcgagcacctcgaccaccacatcctgtgggttgtcatcatctctgatgtcaagcagctgggtggtgatggttcccctctctcctctgttgatatggaggacctcattcctcagaacatagggggcctgtggagttgaagggaaggaagagaggaggcactattagcaggaaaagagaggacaatctggtggaccagaagtcagttgtgtgtagcctgattgctctttctgtgatttttaaggaaatctagatgctcctgccagagaaggcgatggcaccctctccagtactcttgcctgggaaatctcatggatggaggagcctggtaggctgcagtccatggggtcgtgaagagtcagacacgactgagcgacttcactttcactttttactttcatgcattggagaaggaaatggcaacccattccagtgttcttgcctggagaatcccagggacggcggagctgctgtctatggggtcacacagagtcagacacgactgaagcgacttagcagcagcagcagcagtataatcaaactgatagtcaattcctatttggaaacccaaagcctactccagaataatctatatcagatatatcagagtgccatcattgtcttaagaaactgtttgctatttattgaacgcttacattcaggcaccatgcttttatccctatacaattctacagctaaagtaatatgattatttcctctcataagcatttaacaagttaataattttaaacttctgtgcttttctcattaaaaaaaaaaaaacctttaattgaaggataattgcttaacaatgtcatgttggtttctgctgtacaacaaagtgaatcagctatatctatacatagatcccctccctcttgagcctctctcctgccccacgcccatccacccctatagattatcacaaaaccccagctgagctccctgtgctgctagtagcttcccactagagctctatttcacacatggtagtgtatatatgtcagggctgcatcccaccctctccttcccccactgtgtctgcaggttcattctctactt

SEQ ID NO: 44460 - DNA, 1340 bp, Bovine  19866880389517
  misc_feature (1)..(1): n is a, c, g, or t
ncccttcatgggtttgttgaacagagaacaaggtatttatgaaacaataagctgttaagtcttgccatttacatttctaataataataaagataatttaaatttgaactaggttatgttgcaaaggaattaatcttctggcctttctgaataagctgtgccaaggacaatggacacgaagggacccacgttatccaaagcctccaatgtacatctaacagctttcttccactacctactcaagagagttctttttaaaactttttatttatttattcttgctgtgctgggtcttcattgctgagcatgggtttcccctagctgtggtgagcaggggctactccccagttgcggtgctcgggcttagctgctcctcagcatgtggaatcttcctggaccagggaccgattgaattcgtctccctggcaggtaggtggattcccaactgctggacctctagggaagtccaaggcactgttaaagtgagaacagactgtggatttgtagggaaatatctagagaaattaagtctgaagaaaatctctgatttccaaaattattaaatgcactcatctcagtcaaaaaccattgattgtttcctgggtgccagacgctctgtggagcctgagtctcactgctttcagctctttctggaagaacatcattggtgcaatgagcagagtcagaaccactgggctgtttcctgagcgtgggcaaagcaccgctgtgcgtggctccctgatggtggcagaggtgtgcgtctggcctcctgactctctgaggacagcaacaacattctgaacctcttttcatatcttcccaccaggcttcgaaaaatactgatcacttaataagcatactctcattttatttaataactggtccccactgcgtgccaccaatgtggcagccactttgggatggatatacaaatatggtagaaccctttttcttaaggaatttataccctactccatattgaatgatttaagagatgtgaaaagagactaatcattattcgtacttacctagaatatttgacttacttcatcatttgtaaatcactttcctatctgtcaatgaccttgtcaagtggattaagcaaaggaggtattattttgtagatcaggaaactgagactcagaaaggtaaagtaaacacttcacatcacatagttcagaacaggcagaatcaaggtttgtaacaggttgttggagtactagcctagtcctctttctgccacaccacattatcttttctcatacgtaagaacaaaaggacagtgttgtacccgcttaattgtttagtttataccaaatggcatgcagggaccttaaggaa

SEQ ID NO: 44461 - DNA, 1509 bp, Bovine  19866880391692
  misc_feature (1)..(1): n is a, c, g, or t
nctatacatcctgaggggcacacatgtttagaacctgaactacttgggatataagagtagagcattctaccatgacggcatggttctagaacagtgctgtccaatacaatggtcactacccacatgtggctatcgagcatttggtaagtggctagtgttagccaatagctaaattttaaaatttaatcttattttattgagatataattgacatactgcattagtttcaggcatacaacataatggtttgctatttgtatacactgcaaagtggtcaccataaatagctataaaattttttttcttgtgatgagggcttttaagatttacttttttttcctactcttttagcaacttgcaatatgccatacagtattattgactttttatcttttttatttcacgaggttctcatggcaagtatactggggtagtttgccattccctcctccagtgaatcacattttgtcagaactctccactgtgacccgtccatcttgggtggccctaaatggcaaggctcatagcttacaagcccttttgccaccacaaggcagtgatttatgatgctaaagcctttgactgtgtggatcataacaaactgtggaaaggtcttaaagagatgggaataccagaccatcttacctgtctattgactcattggtaaagttcctgatgctgggaaagattgaaggcagaaagagaagagggcatcagaggatgagatggctggatgtcatcaccaatgcaatggacatgaacttgggcaaactctgggagatggtgagggacagggaggcctggcatgctgcagtccatggggtcacaaagagtcgaacagacaacattattgattttagttactgtatttaattttaatgaacttgtgcttaaatagtcacatgtcaaagagctaccctactggacagcaagacagcaaatgccaggtaccgatacaaaagtcctcttacttaatgccacactcagctggaaaaatgattagtctctttgggaaacctacatcagctccatgccaggcattgtactaggcttttcttttatttgattcaaagtcaaaacccagcaaaaccaggcaggtggaaccaagaaacctgagtggttacctcggctagtgtttacaacgggtttcaagcacagatcttcactgctggatttctctgtgtgggcttagtcaggtagaggaagatgtgattgagaaatgcatgtgacagtttaaatccagccctttcagatgcatttatatttaaataagaaaaaaagcgctactttaaaacaaccacttatgtctaggaaaacatctttgaatcctttattattagaaaattttccttttccttagaagaaaaaggaattttttgtgtgtcagtgttcagcttgcaaagatcaaacctctggtttcaaagaagcttctgaacttggcaagccctgcttcccatcactaataataaaaaatgctttgtgtgcatacaccttgttctgtgtggttaa

SEQ ID NO: 44462 - DNA, 1494 bp, Bovine  19866880422002
  misc_feature (1)..(1): n is a, c, g, or t
ntgctgcaagttgttcgaactaatttgccaaaagtaatctggcaacacaaggcaagcctgctgctgctgctgctaagttgcctcagtcgtgtccgactctgtgagacccaatggacggcagcccaccaggctcccccgtccctgggattctccaggcaagaacactggagtgggttgccattttcttctccaatgcgtgaaagtgaagtcgctcagttgcgtctgaccctcagcgaccccatggactgcagccttccaggctcctccatccatgggattttccaagcaagagtactggagtggggtgccattgccttctctgaatgagccctttaccaacacctagattgatggccatatattcttcaggtctaaaactttaggaatcaatttctatggtaccataaaattgctttatgaaagaagggatactagagttcctcgattgctaaaactggataaagccataaagtccaaagaaataacactgtaaagtaaattttacagattttccatgttaccattgcaattctgtcgctttataatcctctcttccaatctaacacactctgcaaaagaaatagtcttaaaatagtttttcactagaatgtagattaaaggattagattacgataaacctaaaaagcaacctaaatggtttttaatatttctagtaataagtgaataaagtgttcttgcagataatacagtgcctccatccccagacatgttgaagtaatagcaaggtgcttcaaaaaacaacaaaaactatttcactcggttaagtatttattaaatatttgtttaatgccaaaaataaacaatgactacatccctcatgagtactcaaattgctggggaaacattatttatgatattctataatagtttatcaactgttgacataatttttttatctgaatgttataataaccctattttaattattgatttatttatcccattttaaatctccttggcttgttaggccaaaaatgagaaagaaggaataaaataaccccaaaattatgctttcaagttacaaaataataagcagaatataatgtgtttttataattaaaatatattcctgtgcttggtgattcctgggtagggattcttggtgatttttgtctctttccattatccttatccatattttttgttatttcaatagcaaaatatatgtaacttatgtgatcttttaaagttaatttcaaaatataagacagagaaaaacaaaaatatggtacccttttctctacaaaccacaggtagaaagcaactgagttttgaagttgaactggcatggggggaggggagttaaaagcacccaacaaatacctaagagtgagccatttacctaaacctttgtgttattctcaaacatttcttcttgtgctcagtaagattttaaaaaactaactgtgtgtctatttgtcctttaatgccagaaaggactgcaatattccactgggcctcgtgtctgcattt

SEQ ID NO: 44463 - DNA, 1984 bp, Bovine  19866880423447
  misc_feature (1)..(1): n is a, c, g, or t
ngaggcaaccatagatagatatggaggagacacacacaaggcagagagcatgacaaatgccaagaccctgacatgggtagacgcttggagtaatcaagaaacagaaagacagctgatgtggctaagccgtagagaacaaggctggggaggaaaggtataacttcagtgagttaggcaaggctagttcctatcagtgttatccactgagatgactgaaggcaggatgcagagcaagactgggatgggaggtgaccaaagtgctgtttactgtggacgcagctttgaaagggcacgtggacttctacaggaaatgtccaggaagaaactgaagtcagcatcttctgcatgccaggctcactatgagggtctgaagatataaacaagaaaggactgaacagattcacagagctccccacccagaagtgacagcagatgagaaaacacagggtttctacatcctgaaaggcggctagctcagtgtaagtaagtaaggcagcttgagaggccactggatcacgtttgagggctgttgtcctgaaaccaatcaactgcccacattactgtgaagtgggagaaataatttagtcagcacttcagcgcacctacctctgtaatgattaggaaactcattatcaacctatgagccaaattagcagacagattagctacaaaagagaactctatcaatatggaaaagaaacaggaaatgccatcaatattaagtaatatttttacattttctttgagggaagctaagaatataaatgaaatttccagaccaaccttcaaagctcggtacagtctttcagctaaaaaggcaggcgtgttccttgcacaacgaactgttacaaaaaagcaaagtaatgttcagtttcatttaatagaaattgagttaatctatagtaatacatttttaaaaaagattctttttgggtaaccataccattctcctcctccccactcctagcttttctttagaatgaaagaatgaatgaatgcttaacctgaattttgaagccttataatgtcatatttgcatggaactttaacacagtaattatccttagccacagggaaaataaaattacctgccaaagatactcccacagtagctgactcatttccagatcccagacacaccaacacctacgcttacatttgataattccctagggtgtaccgctgctccatttctaacatctttgactactgatgaatagcttgggtctaaagattgcagagatgttgctccaaataactcattaggtaaataggggcactggagctcagcttaaaagtaatttttccaacagaaagatttttttcttaagtgactgaattagaatttatagactgattaattacattataaccagtgcgtgtaatctaaattcagtcattaaaaacaaacacattaaatcgttcaattctttattttgaaataatgagtaaagcagaaacaataataataaataactgcaaaaacatgagcaaatgaattatcctttaaagtgaaagtagccaggagaaaagtctgtagggaataagtctgtttattgcaacacaattacttgtatcatcttaaatttgatctctaggtagaaagctgaccaaaagtgaatgaattttataatgaattttggagatcagaacaagaacagtggctttctcatagtgcctttcagactcttttaaggaaagtgaaaagaccttttgtgtctgtgtcttaagggaaacagagaaatgtattaggaacatggaatctgggacaaacatgataacagctacagatttgaaactgtctgagaagaaatcaaggatgtgaattggtattatctatattttcctcaaacttacattcagcaagccttaatccttcgattgagagtttttgtgcccgcttttatcctattaactctttcaatcatctcgctccccacagactaaatgcagggaatcctttctttccataatcctttatcct

SEQ ID NO: 44464 - DNA, 1362 bp, Bovine  19866880498529
  misc_feature (1)..(1): n is a, c, g, or t
nttgtgacacgcgttcttacacatctgctcactgccttgctaacctcattccttccccgccctcatctgactctgtgccagcattagtaactcagtacataaacggcttttttcttctcttcaaggaaagcctttctgaaaaaattaaatcggagaggattagaaatataaaagaatgtgctggcaagcagcacctggttcatgaaccatggtgaactctctgttcacacatcttgaagggaaaaaggagtaccattggttactgtcagtggacacttaacctggagcctctgggaatatctgtctgggttggactttatgcactgatattcaaagacagtgtctcctgacttacagtgatgttgggagcaatgtggggtgggaggacagagagggaagggcaaggagtctgttggtggtggagcctgcaagcttgaaagtgctattgggacagtgtaggtgactacccggcacagagtaggtaccaaacgaaagtgacttcaacaaattgagcgaatgaatgttctgtcttgggagtgcccagctgaaccaaaagaaggttacattattctaaagcaaagaatctatcaaaaataaacccaactacttcccttgcttaccagtcattctgaggaaaagtaaatagaaattgtgatttttgactctcagcagagaatctggaagggtattaggggatgaatgacataaattctagatgggtcccttgaaggctagatgaaaacaactcatggggaaatgatttttctatatactagatctctgctgtctaatacagtagacacatacatgctggattatttcctcctggaaggaagagcctctacatctgttacggtgtttcaggccgccagcaacagaaatgctcctctaaatgtagctaagatgaaacacttatgacctcacatagcaggaagcccagaggtgggggaagtcgcagggttggtcaggtctccatgatgttgtcttttgatctttgcagtctcccgtcctcagcatgttggcatttgctttctggcttgtcccctcatgttccagccgttgtatcttccacggcttcaggcagctcgtcctcacccactcattacttaagcctgatggaagaaaggggtgggcttttcttcttttatggggtgaggagtgtcctttcctcaacctctagcattcttcccctgcggtccccttggtgggggactaagtctgtgggctggctgcaagggaagctggaaacgtgagtatatggccatgagaactgggtctctcagcaaagagctaaagaaaaaccatctattagccagcaacactgactttctatgacgctcagtgttcccaggcctctgtgta

SEQ ID NO: 44465 - DNA, 863 bp, Bovine  19866880578383
  misc_feature (1)..(1): n is a, c, g, or t
naatactttgaaagactaaggacaagagtatggaaaaaggattcaacttaattgtctacattttacaggggacggaccaaaaaaagaaaatcaaagtatgtgcgcacaattttttaaacattcctgtgttcctcctagagtggcccgcttctgtcactgtaaatgttccaacagcttctagatgactgatcatctctaactggaaactgcagagagaactgctgctttgaataagcacttgttagaacatctgaccttcaaaatctcttccaagtgcaatgatctaagatcatacacagggtagcctggcagtggttttgcaagtgggccaacactcctaattcccttgactcctgaaggtttaaaccaagaaaaggaagacagtctgtgtatttcctacacaacatcaaggaaagtgatagcagcagcggtagtggtaggggtgataatagaagtagtagaaatagagcagctctatttattgggtgcttactctaagccaactctattctaagcacttatacattctcacttatttctcccaaatatcctaaatatgggtcccattatcattttccttttacaattagaaactgagacttagaaaactttgtaacttattcaaaagcacccagatgataaagagtggtccagcagctatgtgcatgagctctaaaggcagagaaatgtaactctgaaacccacttccaccgcttactagcttgtgaccctgagcacagctagaaagtgatggtaatccttatgaaaacgtaagtatcagttctctggaaaacacaaatgacttgttataaactaaggaaagaaaaagaggaaactaggtgaaatatgaaaggaaaagaata

SEQ ID NO: 44466 - DNA, 776 bp, Bovine  19866880737851
  misc_feature (1)..(1): n is a, c, g, or t
ntctatggaggcatgtagcccagtgactgatgattgttggaacaggcataatattgctttcagcaaggcatgacaaacgccctccatgatggcttgatgggtagataagatgaccagaactaagagtcggttgaatgacagtacccattgatgtaactggctggtttcaacctggtgaaagcttccacagacaagctaaagttctcttccctagttcctatcctgtttaagtttaacccacaacttggaaacagtatgtgagtgaaacttctcctcaacacatttccttctctcttgtgtctgttaagtgcttatattcctcttccccactatgttgtacgcttagtaggtataccctcctagatcctggactaagtgcctagtatacagccaggggttcagcaaatgtttattgaattaaattgtgtcatacaaggacaggttgcagaaaatgggatgcatagcctagaaatgagaaaagatggctgtcttcacataattgaaggatgatgagatttaggctatgtggctctgaaggaaaaaaattagaactggtgaaaggaacagtgagttgatttctgttcagtagaaggaagctctttctaacaattacatctgatggaaagggaatggatggagtttcaagtcctcccacggatgattacagagggccttttagaaagaatttctgctctgagtagacaataaattaggtacacttctccacatccaagattttaatgatattacaggcttctcagttctgagtctttttt

SEQ ID NO: 44467 - DNA, 1541 bp, Bovine  19866880787855
  misc_feature (1)..(1): n is a, c, g, or t
ntttaaggtgttactactattcctattacataaaggattactctgatggtgaataaaatagcattaaaaagctccagtacagaactggcccacagtagggattccataaaagttaattcacttacttattccactctatgtaccataatgccccaaactcaggatttctgattttcttgagcaactgaaaatttgtagaactcagttgtttctgaatggttctgatattccacccatcttttcacatccacagtggggaagccgtttgcaccgtccccattctcagagtcagggtgaccttccactttataatttgtgaatctttctgtatttagccaagagtcattcagaagtcaagttgcatatccaggaggctacaaaaaacactcggctcaggttgcaacgttagcatacaaaacagggcccgaaaggaaaaagggagctggagctactgcttttacttaaaccaatttattattctttttgacagtaatgataagcactagctttcaggtacggtgagcccggtcttcccttgcacctttaagcatacgctctcacgggataaaggggactttatctctggtgggaactcctataggacaggatgcacccacagtatccaagggaggactgaatggatcatcctgaagctgcagacttttgaacgttgatgcgaaggaaggcagtcctcctgacgtgccagctgttctaaggtgggtgattagaatgggccagagctgctttataaccagatccatcatgggaagaagcacagctttgaaggcaaacacggacatcactgcatctgagcacggctctgagagatgctgaaggatggccgggccccagaagctggctcattcctcatcttgtctgtagagatctgcctcctcgaactcatggaaggtcaccccaggcagcagttttcgattcaatccttttttactgcagtccgcgtaaccgcccaaggactctctccaatcttttctttcttaggttgacgagggagggaggaccccactctcttttcaccatttcttcgctgctgctgctgaggacagtttccaggaggatgccatcattaagctaagcgccctgccccagtacggctgcatcgagaacacggggacaggtaccagcctggctgtagaattgtaccagacctggagagaagaggcagggtggcagggtggaggggggtcacttcctgcaattaacctggacaaggagacccgaagaggggtggaaccatttccaagaaatggaaggaaggtcttgttgactcaacaaatattgactgagcatttcctgtatgtgaagcacttttttaagcactggggatagatcagtaaggggcttccccggtggttcagtggtaaagaatctgcctgcagtgcagaagacacaggagacatgggttcgatccctgggttgggaaggtcccctggaggagggcatggcaacccattccagtattcttgcctggaaaatcccatggacagaggagcctggtggtttcagtctatcagttgcaaaga

SEQ ID NO: 44468 - DNA, 3240 bp, Bovine  19866880822581
  misc_feature (1)..(1): n is a, c, g, or t
ntgggataattgttttagatacatttttaggtatgatgttgaaagatgctgtctcttctgttctgatgagagtagtcttcaattttgatccacattctggtactgtgctaggaccatacagatttagctattaaacagtctttatttgatggttggcttatataaacatagtcctatcctttggagtttgagtaaggtctgggagttggtgatggacagggaaccctggcatgctgcagtccatggtgttgcaaagagtcggacatgactgagtgactaaactgagtgatcctttgtcaaatcattggccatgcaatattatctttgaaaaaagtcaatgttaagtaatatatgtcacacatgaatatattattctctttgaaagaaatattaaaattctggtgtgtatccttatagacatttctagacatttatatataaaaattaaatcagtagaagttttcttggcattgtattactttgcatatgtgttttatgttttttctaataaaatacatccttactatattattatctaattattaataaaatgtattttattattatatattttctactttttcctcacccagcagaatgtctcatatacctttccactttagcatgcatatatcttttttcttttaaactatggcatagacttctgtgaaatggataaacatttatcattgtttctgatattataaacattggcataattaatatgtttgctgctttaagcagatagggctgatcccaagaaatagaattgctgggtcacagggacatgaatgttttaaattttaaaagatgatgcccatttgtccatccagctataccagtgtatattcccaccagttgtatgtgcaaatatctatttcttatcaccttcaccaaccctggatataattaaacctaaattttttttgtcaacctagataaagacatgctatctcatttttaagtttttccttgttactggtgagatacagtatcttttcctatgtttttgttcttcagttattttgggggaatagtgtatgttttacttacactgttaaattgggctgtattaagatatgggaagtgtcagaatgttgacatcacttttattttgataattttcatgctttctgagtttttaactatttgctaataagaatcccagcagctgaggagttctttgtttactctccattatatttatataatgaacttctgttttagagagagttgccatagttctggaacagcactcccaggaggcaaggttattttccaggattcagtgtgttgaaccagctggatggtttgttatcttatgatgaccttcattactttcttggcaagatatggactatgcaaaataacattcatttcactttgtgaacagtatggcttctaaaagaggcatcctttagctagacttttggaacgctaaaatggttagtaaaatgacacttttttaaagatcttggatactttgttcaaaatttctgagactgggtggtgatggagtgtttctgcttaaatgggccccgtttcttagccactaattcgctgggtaaatctgcaaacttgaatcaaactgtcctgtaattgcaattgtgtttaaaagtgagaagaaaaaataggtagttaaatcttaacttagtgcattttctttcatctgatagtttggtagaatttagttccattagtattgacagtcatatctgagcaattaatgtttaaccagtgccttccttttttctatatgtacagtgtcattctaatctctgaccttgtatcaacattataaaagaaagaataaaattaggaaaagaaagccctattagaaaattcagtagtttttattatacatgcattttttttttctgttttaaaaatatttgagtaattttgttcatcagtgtgttgaaacttcacgtagctttcattttccctctgggaacaagactgagtcagtacagtttacgtgtataattaagacataagcctcttacttaaggatttaaataggttctttttaaaataaataccgtgtaagtataaatgccattaatgaatttctttgtgttgttttcagatgttagttttgtgttttctgcataactcttcatcaacttccttcagcttttaaatcttcattgtatttcagtactaggtttttaagaccatatggatttcccaggtggcgctagtggtaaagaaccccctgcagtgcaggagacataagagacaatggttcagcccctgagtcgggaaggtcccctggaggagggcatggcaacccgctccagtattcttgcctggaggagaatcccatggacagaggagcctggtgggctatagtccatggggtcacaaagaattgggaggactgaagtgacttaacacaaacgcacatgggcttttatagctgaagagaaaacagaagctgatttgacattataaattagtaaataatactgattttggaaatacaggaaattacattaaaaaaatttttttttccagttcatccagagcagcttcctccgaggccatggattacattaaaagaacgagaccaaattctgccatcaggtaaaatagtttttcttattctttcttgacttttttcagatacacttgaaatgccatttgggttttgtaatcgaattaaccttcaaattaggccttcattttacctccccctgagtttagatgagtttagaaatactgatgggtagagttaaagtcctggagaaggcaatggcatccccactccaggactcttgcctggaaaatcctatggacagaggagcctggtaggctacagtccatggggtcgctgagagtcggacacgactgagcgagcgcttcacttttcactttcctgcattggagaaggaaatggcaacccactccagtgttcttgcctggagaatcccagggatgggggagcctggtggttcccgtctatggggtcacacagagtcggacacgactgaagtgacttagcagcagcagcagcagagttaaagtccaccctaaggcttatgtacaagaatctcgtctttgaccatgatagggctcttggtttgaaaattatttcttataatagagctttccaaatggcatcttcacataaggtttggtgatttaagaaaaatgaggagtaatgaatttttttctgaaaaattttgaactacttagatttatctttctttagtgggtagactgataactcttgta

SEQ ID NO: 44469 - DNA, 1879 bp, Bovine  19866880839505
  misc_feature (1)..(1): n is a, c, g, or t
nctgcaggtcaaattcaattcctccgaggtggtctggagtcagtatgaatgatttcacatcagggagggtgtggtgctccatcacaaactgtcctatttcaaggggaaacacacagacacttatttgtaagtttgcttgtggtcaatcccctataaaagccttgaaactgaattaatattcttctataaaaaaatcaaggttatacctacccaccgggttctgagaatatatcccacactgggtgggacagcatggcctcttacctcagtccatcaccctactcatgatcattgttagggttacatatatttataaataataatgaatgtgccttgtagaaatggcactaatgagcatattcacaacaatatcagtacttatgtgacaatgaacattgaacacacttagctttgaactataaccaacatgtttcttggaggcagaaagatctcagtagttcataaatagaaatatcaatttcagattttaaaaatctcattaggaccactcaagtcctttgtggaaggaggcaattgtaaacatccttaaaaaggtaagggttactcagtaagacacctcccactcttttaaagtacagtcatttagtgtcatgaataaataaaagtagggaaactattctgtatcgaaaaaataaaaaagtaaaaaaaagtcagttgtgtctgactctgtgatctcacagactgtagcctgcctgggtcctctgttgatggaattctccaggcaagagtactggagtgggttgccatttccttctccagggaatcctcccaagtctcctgcactgcagggagagtctttaccaactgagccactagggtggctcattctatattaaaagagactaaagaggtataacagccaaaatggaatgtatggatcctgataggattcacttttgtttcatataaacagatgcaaagcaaatataaacaaatataaaaataggtatgaaagacatttgcgggacacaaatggagggaacacgaatagaaactagatgttattagattggtgtgaaatagctcggccacagtaatgctattgtgatgtgtaagagaaggtccttgtttcaggaggtgtctactgaagtacagtaagcccctgcatacgaatgagttctctttcaaaactgtgatcgtaagtccagtttgttcctaagtccaacggagtcagcctaggtatgcaactaacatgataatcggctacatagtattgtactgtaataggtttataatacttcccacacaaatagcacataaaacgcaaacacaaaacatagaaaacatttttattcttacagtacagtaccttggaaagtacagcagtacagtaaaacggctggcatcaagtcaacaggcaaaaagaattactgattggaggacagagaggagatgggagacgatagatctaaaggatcgtcagcaataggagacagagggcaagtagcaatgtcactcatgcctgatattgatggtttaagttttggtttcttgctggaactagacacacgtttgcatcttgaaaggttcgtatgtaggggcttactgtgtttagggtaacatggcatgatggctacaattatcttcaaatgcctacaattatcttcaaatcaaaaaaatgggaatatgtgtgtgtgtgtgtgtgtgtgtgtgtgtgtgtgtgtgtgcatacatgcacatagcaaaatgctaacaattgttggctttgttcttcattgtcctattctctcaacttttctctatgtttaaacatttcttagtaataataataattaaaaaaaaaacttgaggaaaagaacagcactgatattacctcgaattggcagggtcttaattcaaaaccagacggccatcctct

SEQ ID NO: 44470 - DNA, 1957 bp, Bovine  19866880849813
  misc_feature (1)..(1): n is a, c, g, or t
naatatggactggaaggggacgggggaaagctggagccggagtagccacaggcagaggcaggttacctaagagtgcttgaaatcccgaggaagttacatgtgattccctgtgggtggactggcaaatgaaaataacaagatgaaggaaatgaggctagaaagattgacaagggccagatattagggcacgtttgaagaacttcaactttttatgaagcattcatcaccattattcttattttgcagaagcatcactcactgatttgtcccacctagaaaacacacaaagcacagctggggactctctgccatctcctcatggagggcactccccgctgacctgttgggatgctccttatgtttgacgtccaggtatttcaaggtcgcgatgaaggactgagcctggaagcctcgggctgtcccagccaccactggagtgtggcagatagcactgtctgttccgatggtgacaacgttgctcctcaagggggtccccacgtggcccaccttgtccacagccttggccacacaacgtacatggaacctccggctgaagtaaatgctgtccaggacctaccaggaagaataaatcacctcagacacgtggtgcctcaacagctcttcatactgtgtcttctggatgataatctgtgaagaccattgtcagctgaaaacactgcacaacctaaaagctgagagttaggttttatacagcaggctaaactgaggacttgagcctgggatacagcatcttaggtaactgtgagagactgctccaaagaggaatgggaagagccgggatacatattaatcacgagtttttgcaacaaaggccaggtagttggaacatcaaaagataactgttaaaactggatatctcaagttaaggaattgtgcacttttccatgtatgggaagatgaaatagtttgctgctgctgctgctaagtcgctcactgaaatcattcctttaataggcatctcagctatcaggggccagtatcctgtgttttctcatcctgagtctctttaggatgccccactggctgcagtggctgatgctgcaacatcctttgctgactgacatggcaggctgcattcttagcccacaccatccattatccatccatttatccatctatgtgtccattgatctacccacctctcaccacctaagtactgactttctaccaggagccaggcaccatggacagagcactgagtacttagagcctagggtggtaagccaggtaacaagcaagtagacaaatgtggagcaagaaactagagatgactgattcccaatgacacttgttctctttacatattaggttcagaagaagtacttaatgatttttcagcccttccagcaagactcattgcctctaagtcacttttgttgaaggcatggtatcaggatatagaggaaagacacttttttcctaggagttcttagttttctttcctccctactgccattccctcccttaactcccctctaattactaagggttacaataacgtggtggagttaaagttgagaacttggcctctgacacctactggccttgaaagtctttctacagattttctcatgctccagacacacagaatccatgagtgcttaatgcaatctatgcagaggtaacctaggtcaccaaaactctctaggttactagtgcattgacatagggaagtatataataagaaaaactcattagtagttctatgtgcagcagacttcccacaaagcaatcatacaaacttataaattctaccatggaaacaattttcactgaagtccattaaaaattgaagaagatttttccattaaaatttttttaattagctgccacaactttatttatttatacatggacttcattcagaagggatttgaagcatcttacaaaaatgcacacgatacaacagtattaaataaataattgaagaaatgaa

SEQ ID NO: 44471 - DNA, 1964 bp, Bovine  19866880893041
  misc_feature (1)..(1): n is a, c, g, or t
naatgggtaaaagaaatgagaaggtaatgcccccttattaaactaatttccaaagattcatttttattagtcttcagttattagcccgatactcacaaattctgcattttcttcgtaaacacaataaccattccttgaaatgcattcaggacagcattttccctctaagtgaattaattcttcaccctgcagaataaaggttgcagaaatacacatcaaattaacatctccaggtagcagcactaaattgcgaagtggctgaattccctaagtagaatgaaaagccataacacacccctctgctttggcttatgacttactgcatctcccctgtgctatatccctatgaaaagcctagtcagtacagctcatcttccagaagtgtttttttctttccagttctgatgatctttgtgtatgatttcctacccatgaccaggaactcccatgaagaagaaaggccacaagtaatcttgtagtcatggaaagttatgagtttcagaaaaggaccttaaatttatgttcaaggtttgaacttgtgatttgatttcattaacagtgctcaaatcacaccaacattttcccttgaatacaaaatcaggcacatccctatatgcacagatgaagtctcagacataaattaaacagcagaaaactaatttctattcaatattctgaaactgttatccaattcacataatcactattttaaaaattaaaggaaagaaggaaagaaatgccacactaggaaggcagatattaaactttcaaagccatcattttatcacttttaacttatcaaaatcaatcatttcaaattttttattataaaataataaatgcttactataaaaataattctgaattctataacttagaaaacataatttcattaaacataagtcctacctcccaggaaatctgctattaaaaagacaagctttatttacaacttttcatatgcatatagtatctgtaggctaaaaagtattctttaaaacacttcccactttctaaagatgtatctactttttaaaaaatgatgatgtttctttacatgaagacattatttaatttgtgatctatattacatttgaagtgtaaaaaccatgtttaggtaaaaacagaataatataaaattgcataaacagaataatcacagtatttatgtttaaaaacactgtgcactaaataaaaatatgaaagaaaagctttggttgtctttcaattgtagcatcacgaattgattttaaagtctcttttttacttctcttgagccttcaattttctaagtgaatatgtattattttaatgaaactatcactttaaaaagaaacacaaaaatatatgaatgaccataatttttataatatctaaaaagttatttcaaaaaggaaggggttagatagatcaccattcctcaaaatctcatgccagtcagagggtgctacagggagcagacgtatttacatataaattgttttgcagaaacctgacagatcagttggtagtgaaagcctaacccacaaacacacagacatttgctttccaagcatataaaggggtttataaacatgtaatctaagtcacttaaaacaatgttttgaaacaagacagagtatgcgtacttctgttaaagttcaaatgcatgagacattattgagtgcctgctgctgttgctgagtcgcttcagtcgtgtccgactctgcgcgaccccatagacagcagcccaccaggctcctccgtccctgggattctctaggcaagaacactggagtgggttgccatttccttctccagtgcatgaaagtgaaaagtgaaagtgaagttgctcagtcgtgtccgactcagcgaccccatggactgcagcccaccaggctcctccgtccatgggattttccagcaagagtactggagtggggtgccatcgccttctccgtcttgaggcctactacaatacagac

SEQ ID NO: 44472 - DNA, 1052 bp, Bovine  19866880913389
  misc_feature (1)..(1): n is a, c, g, or t
ntatcccacctgcagtcccattcctccctacaggtgatatctggaacaagttcacaggatacatcagaggaagtttatactgtcactgcttaatttgtaccagaaccacagttactaaaatagaggaactgaatttccaacccaccaatctaggagcctctgcgaggattaacggtccattctcaaagccccatctgtgcagaagggcattttccgctgaccttcccgtctgtaattgaaagaggagactaacctcaaatatgcctaaatggtgagcgcgtatcccttaattgcttaaaaacagcacagttcaggaggccgtctctcaaatcctcccattgctacttagtaagtaaatccttatttgtcactatttcaattacagtaaagagtctttaaataaaagactcattaaggatgacagcggagacagaggagagagaccccagatacatttacgtgtagcctgtttcagatcatacacattacctccatttcagacttcatatatcactatatattaaataggtggagcgaggagggtagctggaattccagttatttgtttatgtgtctgcttgctcacaaacccggtgaagtagcacgttaaacccacaaattaatgaacacatcataagggagcctggaagcagagtatcggctcacgctgaaataaatacatttcttatttttaagcaagcagtggattccatttgttttctaaatgtgcacagcatgtgcacatgctaaaaatgtaaatatgtaaaaaattaatattttgactcagcagtggcaatatcctctaatacttcatcctgctgctgtgaggaaattatatgaggtcatcacggtgtgaggctttcttcaaatcacaaaggctctgcttcgaggatcagtgaggattacccacaatcatgatggatggaagcacatggcagtgaaatgacttatttcacgtctttggagccaagtcaaaaaagcttgaagatattaaagtaaatgtgtactgtcgaagcaaggctttgcatgttggttttatggggccatgactc

SEQ ID NO: 44473 - DNA, 810 bp, Bovine  19866880939168
  misc_feature (1)..(1): n is a, c, g, or t
ncgattgggatgccggtgagatgaaggaagtgaccgaagaaaatgtttcctggcatcttctgtggtttaactttttttttaacgtgtaacatctgtaagttgcattgtgagaggtgaataaaagaacctgagacgctctacgttaaccctgtcttatttattttctgaggctcccctctcacggtagaaatacatttgcttggccgtgccagcaacatagtgaaaacggcaaagtgtaaactagaaatatgaatgtgtacttggcgtatatggccttgacattttaagtttatgggatttaattttgtttttgtgggtcagcttcagcttttaccacgagcagtcaaaaaacacaccagctctagtggcaaaatactgctcttacagagttttgcataatctctttcccaatgcatgctccgggcttgcgtacttaaccagtgtcaagggtatattagcagtgttcaggattccccacgcacccacccacccacagggggcgggtgtttagcacactaaacacgtggtgttggttgcaattaatcttaggccctataatgaatgtaaaatgtcttcatctcttggggtaaaagttgctgtaaaaatgcaaatcatcatttagccacaacgggagcagttattgaaagagtccaccaaaagaagaattgcattattttcagctttgtcaccaggaagtgtgagtaattagagaagcccctcaagacgtagaagaccgcaggctactttgttttccatctgtgttgtttccatttgcctgcctagcaacatcacccccaaaccagcttctgt

SEQ ID NO: 44474 - DNA, 1902 bp, Bovine  19866880961390
  misc_feature (1)..(1): n is a, c, g, or t
ntgggaccagaaggctagttacatttggccttgcaaatgactcctgaactcagagttcttaatcaatcacccagtccaaaaatatttagtagccttggtcaaggcaggcagttacagtgtgcgagaactggcttcctgtcttcttgggagactgaaaatgtatttaaagatttccacacgtgagtgtcacatgtagagctcaggtgagaaattaactgtgtgtgagaaataaagggtgattccactggcgtggaaaatcaaaagaaagatcatatggatttacgattgtgaaatattgtgactttaaaaacacatggaaattgagggaggggctgtatgaatatggacttttggttcactttgctgtacagaagaaactaacacagcatggtaaagtaattacactccaataataatatttaaaaacaaatttttttaaacacttggaaattgatccctattcaaagccacaaccagactgtaagtgatgatgtcaggtattttgttgtttctgctgatggtgtgttagtgtggccaacgctgcaggtaacaccaacccttggtgatgccactcagaggacagataaggcttgttggttgctctgagtcagctggccgagcccaaatagcctatcacccaggtaagtggcagtgctaataagtaaagtcgtttgttcagagaggcagggtgtttttgttttgttgtgtcttccttttttttaaacaggcttgtttctccctgagagctaaagtgcagaagtctattcagaaaggcagtcaactgtgctcatagcactgtcttcaggacacaattacttttctacttaaagtaccaagtatgtctcttctccctccacccgctgtggtcttagatggcgggcaatgagtcttgtgaattaatagagcacgaaattcacagaataggaaatccattccaggttgtttggtgaaggatctgggatatgtgaaatcctcaagtggcttagaccacgggcttaagacactgcaaagcagggacatttccattagagtttgaatggaatatgtcaaaaagaatcatacccatcaaaattacgagattttaaaacttgagaaatgctcattcaactactttggtattcttgccatttgtgtttcaggggattcaagcagcattgtatctgtgatttgctacacggtccccaagtcagctatgggcagtagcctctatgctctagaatcgggctctgattttaaatctagagggatgtctgccgagagtcgagtgatatttgggcctggtgtcaccatgtccacctgtgatgtcatgctcatcgatgacagcgagtacgaagaggaagaggagtttgagattgccctgacaggtgcttccgacaacgcccgcatcggaagaatggcatcggccaaggtgctcattgctggtcccaatgatgcttctaccgtgtccttgggcaacacggcttttaccatcagcgaggatgcaggtaatggagagcatctctgggctcccctcactcgtctcctgatcccttccttaaatagtttcctcttagttttgagaatgcccttaggatgttgagaatgccattcctcagtgacacagttatcagtgtgaggcaggtaatactcagcatcaaaaccaagaatgaaaggtagtgaaggttaggaaactccattcacttatcttgctctgcttactggtggcaggaaaagacctgacttagagctcactggctgacctctgtggtccaaagggagggtgtagtgctaaacatttggcatgtgaaggaggggggatgtgatctgttgaagatggaggtaaattatttagtgtcctgcaactgccataacaaataaattcaaaatttccgtgttttaacaatggaactctcatccccataa

SEQ ID NO: 44475 - DNA, 2244 bp, Bovine  19866880969925
  misc_feature (1)..(1): n is a, c, g, or t
nggattctccaggcaagaagactggagtgggttgccattcccttctccagggtatcttcccgaccagataacgaactcgtgtctctagcattgcaggcagattctttaccatctgcaccaccagggaagcctacagatgagttaattgagattaaagtgtggggctcctgacttccagtctaatgagggtagtagatgaggcaagcgtcccgctgctcctctttctggcctcctgggagtttcctgcctcctttatgaagagaagctcacctctctcagttgctaccatatgtgatggtgacattgctgagggctatgagcccaggaacagctccgactttgttaaggagaggaagggggtatgaagaaacaggcgccaattggaataaagtattttaaaaaattattccaaatgcatagttatcacgacagaactgcagtgtatactctgctgttttaagccttcattacaaactgaaaggagttttcttcaaacccaaccattaagccttgaaacccaattcctgctcatcaaatgcagtctggaaaggaaatggaatgccataaattacctcaattaaaactttttcttttgttctgttctttcggagactaatccagggaggacaagaatgcagcagaaatccaacttgccaagatgattttaatactcccagacctgagcctaattataacctttgtttaccttcttagactgctgtctcaggtaaaataaaggttcacgaggaatttagatatagggaggcttttaaaatagatattttttccatgtaggtatgagctacacctaggaatttaacaaataatgtggaattactaacctgaagtttcctgtgttttaaagggcaggagggagctgtaataacattacacatatgcttctgtaatcctggcaacaacctgtgaggtgcatgttgttattttacttgtcaagaagctgtagttcagggagctaaagtgattagcagagttacaatgagcaatctgaaaagaattcaagtctcaaaactctagagtgagaaagcaggcagttctcattccttctaaaccagcgctctgtcctccacgtttgaggcctgcgcagggcatctgagtgcatggggcaaacgtagcatcaagtcaagcttctcaagtcaagcttttagatacctatgcctttgttgatgaaaaattttatttgtgtaaatgtctttttgaagaaatgcattgcagatttccttatatgaaaccttcctccatttataatttattatgaaagtaacaacacactcacttcaaggtaaacaaagctaaaagcctagatattcttctatagttttctccaggttcatacaaaggagaactgtcatttgaaggaaaagtattgcctcattcagttcccatagaacagagagagatgaattgctgtttgcatacctgttattcacatgtaggtcactgcccctcaagcgctgcatagactttgatctcttctgaagttaaagcatttccctgcagttttgtttatcctcagcctagtctggggtacctcaaatttgaacgaagtcactcatgaatgactgaggttttgatgttgacaattctctctactgcaactcaggcgtatgtaactccactaatctgaacatttttgccatcaaaatggctaaggatctaagtatcagagtccctgaggaagaagctcctttcgttcttgggaagacatcttgtgctggctttaggacttcttcacataggagggtgttgccacgcttgtggccaacaggcccacaatggcctgttgaaacaagcagtaacccactcaggaattcaccctaggccatactcaacttcccaggaggttcatggcttgtgtctctggattttggtcttcaggtacccccttggaattgccctcagcctctgagagttcctgtgtcatcccccctctccctgtttactcttcctctgaaactgcaggaacaagcccattcttgctccaacattcctaacccagcttatcccctacctcatcacagcattgatcccccctgcagagggctggtggtggtctcctcagggtcctaatacatcatccctgcctattttcaagaagatagccacagagaccaaattgtgtagccaacagtgtattttggttggagatcttttgtttacccttccaaacctatggctcctctctggtctgaaaccctggaggctgcatgcaggactggcgcttcc

SEQ ID NO: 44476 - DNA, 1844 bp, Bovine  19866880972147
  misc_feature (1)..(1): n is a, c, g, or t
naatggatttgttcatgtatggcttcatcaggcatttattacccacatgctccctaccaggcactgtcttaggctctgaggaggcccagatgaataaaatatagtgcttgcattcccagaaacacactgtgtagtgaaggaaggagatgtttgttgaatatgacattattgtgactatatgagctgagggacagcaccctatcccaggctggaatgtgtgtgtgtatgtatgtgcattcatatgtgtgtgtgtgtatgtgtgtatgtgcacgtgtgcatatgtgtagtgggtggtgaaggccttctggaactagtcataacagatgatttggaaacatgagtaagaatgagagggctttggagatttggagaggagagcattccagaaaacaagtcaaagaatgttttctattcaggcatcaacagagagttcagtagaatgccaggtccctccaggtgctgggccctgaagcagaaggaagcaggccaggtcatgaggcctttgtgggttctgtttgaggagaacatgccctggtatcaaggctgtgataggtttttaaggaaggaagcgttttaattacgtttctgtaaagagaaagttgtgcagaagattgcgtagaagatgggggcagaaagtcctttgggagggagttgtaggaatccttgtgagagatgaagccctttgatgagaaagttgctgacgggatgaagagcagggcacagcttcagtaagcattaattgtacattaggttgacccatctgagattgctgttttgtgggggggaaaaaaagatcaaatagtgtcagtttcactgaggctaagggagagtgaatctgggggatgatttctaggattctggtctagtaagttcaaggaatgagagaaacagttgtgaaggaccagaataggaagatgatatatttgaccttgtgcaggtgggactattgaacaatctggggtagctgtccaggaggaggatggaggtctcagtgagccataaactcatctgttatcttcctttcaccctgagcctaaagtcctggaactctttttttagctcaagtgttgcttcagtcatgtcataagttaaactcctggaatatttcagtggcttttatctaaacgctggaaggtgttaggaggagccctggtgatagcaaagcagaagagagtccacccacgcagtgccctcaatagagtgtatttccaaagtccctgggaaaatctgacacaggggaagccctggagaagcaccctctcttctgcttttgtctcgtgtgaactttagaggttgataggacttactcacaggatttattctatctctgagctgtacctaacctaagatcatcatcagagacctcttaattgctcttagctgtttaagaaagaaaattacatctaatttatcacacagacaagaataagcacatcctgggaacaggtccaataacctcactgtgttatcacatatggagatgtcacacgtatgaggtttttttatccctccaagtctatcaaagcaaatacagtttgtgagatctggggccagagctgaaggctttcaacaaagacaaatgaactgggatgagaggtaagagtggataagattgcagctgacatggtgaggtgttatggaaaaccagttgttttcctccatagatttttgttttttatactttgctcacatctcaacagtgttgtccccaaatttcaaagcctggggtgctccttctctttgtctttctcagctaaaacctttctctttttcatagaaaaaggatgagaattaaaaagaaaacagaagaagacatattcaaagaagatgcattaaaaaagaca

SEQ ID NO: 44477 - DNA, 1108 bp, Bovine  19866880990972
  misc_feature (1)..(1): n is a, c, g, or t
ngaaatgccacttaattcttgaatgaccgaaaaaggctttttctaagtgaataagagaaatagactctaggaagagggcctagcctaagcgaagatattagccaatgcaatgtgtgcttaataaactatccaagtgtccagacaagaagaatctagggagccaggggaagtgaaagtcgctacgttgtgtttgactctttgtgaccccactgactgcagcctgtcaggctcctctatccatggaattctccaggcaagaatactggagtgggttgctatttcttcctccaggggatcttcctgacccagggatcagacccgggtctgctgcactgcaggcagattctttaccatctgagctaccagggaagcctgagccaggggaggggatgaataaaaagtgaacttaatgttggctaggagaaggtagaagctgcactaaaagtctcactttagcttgtaggcactgtaaagtcaacatgaatcaacagggaaggaaaaggatgatcaggtctgggttttagagaacctccaacagcaagagatggtagggactagggctgggatgaatctggggctgcagaaaccatttaaccagttcttgtaacggcttaggtgagagaagacaaaggtgattgcggtgggaatgaatagtgtttttaatttctatctcctatactttaaaaaaagagcaacagattccggaaacactgcagaggccaaactgatgagcctggatgactgatggaaagtgaagcccttagaagcagcagtagggaacagctgactggtagaaatcacctcgttagtgctccggagaaggcaaccattctaattgctaaagctaatgtcattaaaaagtgctgccactcctgatttgcaggcgcacacctcttccaaagcttcctaatagacattttccacaggatgggattagtgagacagcctgtgttctggtttcatttttcctactttcacaatctgatatttcaaaatagggcatttcagaagggatgttattttaaatgattgctatttcaaatatgccaataaataggacagagcaaacagcatgcccaggaggagaatattcggaacagaagacaac

SEQ ID NO: 44478 - DNA, 824 bp, Bovine  19866881031121
  misc_feature (1)..(1): n is a, c, g, or t
nctcttgcctggaaaatcgcatggatggaggagcctggtgagctgcagtccatggggtcgctaagagtcagacatgactgagcgacttcactttcactatgtatgtgtgtgtgtgtatgaatgacatattattcattatttttctaagcccattttccttctgggtccttcattttttgctgaggggacttttatagctatatgatttttaggaatgtttgggctgagttatagaactgactgtatgcttaaaatggttagtttttaaaatataaattatactacattaaagttgattttaaaagaaattaataattctgggtaaaaactatttaagattgtaaattgtagtttcttagagtaacaaattattgtattgaacagaatgattttgaaaacttactcccttaaaagagatttttaaaaatctatcacacccttttctaatgggtatttaaatctattttttacttcccctgaacttatataaatccaatttttctctaaaaaatttggattttttttcttttaaattgttttataaaatgcttctgcctttattgttattatttaaagttttaaaaagttactgatgattggaaatatgtgaccttaaaattctagctgtcaaccatgtcaggttaagagagcatatttacatcacttgtcctttattctaaaataagtgttttccttatgttcatttaaaaagaaagggttggtttcaactcttactgttctcccaatattgcctgtgaagtagaaagcaattttgcataggttaaaagcctaaattaaacctaaaaaataagcgggggactgtc

SEQ ID NO: 44479 - DNA, 919 bp, Bovine  19866881224672
  misc_feature (1)..(1): n is a, c, g, or t
ntatgtgaggctcattatgattttgtccccttgtacctttccagttttattgtttattactcctctctcttcaaacatgttctcgagcctagccaaaatgagtgacttttacgtagtctggtttgtgctttatatgtgcttacaataccttatactttatgatctcacggacttctttaataattcacgttaggtgctccaactccaggaaaccttgcctcccccttctagtctttgctttatgctctttctctgtgctcccctagcatctgtgcatccctcttttgtgacatttactataccgtcttgtatttacatggtttatgtctctgctttctcattagacagatttttaaagaatatttatttgactgcaccaggtcttagctgtggcatgtaagatctttaattgcggcatttgggatccagttccctgaccaggggttgaaccccaggctccagcattatgaacatggagtcttagccagtggaccaccaaggaagtctgtgtgctaagtcacttcagtcatatccgactctttgcaaccctatggactgtagcccaccaggctcttttgtccataggatcctccagacaagaatactggagtgggttttcattccttcctctaggagatcttcctaacccagggattgaaccagtgtctctcacatctgcaggcaggttctttaccactggcgccacctgggaagccaaaaggagtctcctagactgagatttaagtatttgttacaaagtaggagcttaatccctactatgtactaagtgtttagtatattttaggggcctagtaactgtttattgaatgaatgaatgaatcaaatgtcattgcaaatcatagaagttatatcagcaaatatgtagtagcagaaagtcatgcatccagattccaggaag

SEQ ID NO: 44480 - DNA, 1537 bp, Bovine  19866881235395
  misc_feature (1)..(1): n is a, c, g, or t
ncctgaagttccatgggcagaggagtctggcaggctacagtccatggatcaccaagagttagacacgactgagcgcacacacacacacaatttcccacaccaaaaatcatggggctaagcccagtgtttttagcatgtcatatgaatatacaatgattcgagtctcctccattgatgaaaatggttgattcaattaagcagtaattgctgacagcaaaatccactagagttgtaaagtttacatgcaaagcattaatgccattgctatatagcagtttctagctcagatcatattaaaatgttctctgaaaaatccacagtccttagcccattttagaatgtgtcctcctgtttatactcttgccttctcaaaatcactcatgaagaagagcttggtgggtttctggggggaaagagcattggctcatataggtgtgaacagcggtaaaggtataagcagaaaacaagatcacctgtatagtaggcatggccgatctcctgcatttgcttgctcgtcctagtggttagaatttcgatcagtgcatcctcatttgtccccatgccctagaaagaaaaaggaaaactatttttttttaatatttatttatttgactgcactgggtcttagttgtggcattcaggatctccagttgtgacaaaccagcttagttaccccacagcatgtgggatcttagttcctcgaccagggatcaaacccatctccctcgaattggaagacagatttttaaccactgaatcaccagggaagtctcatggaaaactatttttagaacactttaaaaactcagctttatgcacttccatcttaatatcttgttttacatggaagaaaagaatcatttttagtcagtcactttctctaaaccagtatttaaattttctgtatattttagtattaaaataacaggaatcatctaaagttaactgacattaaaattttaaagaaaatgtcctgctgtagtgtaaaaattcattgactaattccaggagtaaagagtatataaagggaaagcttacatcactcaggatcggaagtgagcattcaaatgtgtcattgtatttagagagggctctgcaattcttttgaatgagttcatccttgtgtcaatgcaccgcgttggtcagcaggcatcatcctcttcattggggaggtttttaaatcctccatattgtatgggaccatgagcccagctggtttagaggctagtgattcctgagtcttggtttatattgaggtcactgagtcacactgtagaagccatttacactagcacttgatcaaagcaggtcaaggtagtgtaagaaaagaggctgaattgtgtacctctgtgacaaagattcctagtggttccccaatagatctccttttcaaattatttattatttttaaatagacttttttttgggggggtgttttccttctttttaaaactttattgaagtatagttgattacaatgtcatgttagtttcaggtgtacagcaaaatattcaggtatacataaacatatacacat

SEQ ID NO: 44481 - DNA, 1523 bp, Bovine  19866881242831
  misc_feature (1)..(1): n is a, c, g, or t
nttgctgaacttctatgaagaattttcctaccataaaagatcgccaactcagcaatctgtgcctacaaattaattgataactacttgcagactgacatctatctggtcacttgacatatccaggtttgttatttttatctcaaaaatgttctccctttctttatctaccttaatttcaaatccactttttaggaattcaagcattttgtggatgtcacagccaacgcaattcatatctaaagggttcaaagtgatgattttatatattaatatattatgaaagaatccccattgcctcatcattgatttaattaacatatccaataccttatttatttacattttttgtgtatgaaatatgtaagttctactctctcagcaaatttatattatacaatacagtgttcaactagggtcactgtgttacctattagatttgaatagaccttatttatcttacaactgaatgtttgtgccctttcaccccattttcttttacccacctcattcctgaaacccaccacactattctctacttctgcaagttcaactttctaagactctatacatatgaatgacagcatacaatattttcttcccctgtctgggttatttcatttggcatagtgcaatgcaggttcatctatattgttgcaaatagcaacatttccttcttttataagactgaataatatttcattgtatatgtgtgtgtgtgtattccattgtttgtgtatatatatatttcatggtatgtatgtgtgtatatataaatatcacatatatgtatattccactgcatgtgtgtatatatatgtatataatcaaattttctttatccatttattcattgatagacactaagattgtccttataccttgaatattgtgaatacaactataataaacacaggagtacaaatatctcttcaaaatagtaattatagtaattacatttttttggatatacaggtagtagtgcagttgttggatttgtatcatatggtgtttctacttctaatttttcaaagaatctccatactgttttcaatagagactgtgcctaccagtttacattcctaccaataatgtacaagggtgctcttttccccacattctcaccagcattgattatcttttgtctcttttatgatagatatgctaacaggagaaaatatctcattgtgattctgatttgcattaccctgatgtaccttttttgttgtcttgcaaaaattccttgtcaacagcaacagcaagtagcctacttcttatattttctcctagtagttttatggtttcaggtattgcagtttagtatttaaacatattttgagttgatttggggatatggtgtaagacaagagtctagtttcattttcttgcatgtagatatgcagttttgccagcattatttatttaaaagactatcctttttctactgtgtattcttggattattttggtcaaacttaatgaccatatacacgtgggttatttttgggctctgattcttcttttcca

SEQ ID NO: 44482 - DNA, 1414 bp, Bovine  19866881289810
  misc_feature (1)..(1): n is a, c, g, or t
nagtgaaaaccatgaaattcctcttcaggaatctttgaaaccagacaaacaaacagaaaagcaaaaagctttgccccatttgaccttgaccaggctagttggattcaatgtcttctctgctgaggtccaggcccttgtgtagttggatctagaccaggtcatacactttgtcccacaggagacaaaaggtctccttatcccttttgattttataggcattgccccatgtccttcttaataactctgccaacttaccccctcagttctctaaccacattttgaagcttgttgcctggttcatatgtcagactcctgacttccagtaacctattgagtcacgccagatacactcagccaggtgtctccttggacacccagaatcatcatcattatcatcatcacaataatatttcatactgatgcctaagtgccagctaagctgtatgctttatgtaaattatctcatttaaatcttaaaacaaccctatgaggcaagtatttttctgggctcaggttattaaagaaaacacatagcaaacaagtggtagaggcaggacttgcatccaggcggtgtctttgctatttctccatctcctcccaaatcttacccaaatggagaactgaatgcgagctgcttgggtaagatccagacttccttaccatatggtgtgttggccaatcgaggggagggtatagcgccagctgcacagaacgtttctgccttctcatagtcttctcttcattcttagtggcaaggggctttattcatttcttttgtgttcaaaattagccttttacttttcatccacacaatacgccacagagtgcccagattgcattcattatgagctatcatgtcccttgtcacttgtttacaagggctctggcttggccttagcttttaggtgaagtcatcatagaaaaagtcaagagccacagaactagggtttaaaaaatgacaaacattgtaagcattcattttctactcccacaatctttattttcccatttttgttagttgaaaacaagaacagtaagacttcttagaaaatagcagatctttagaaatactcacaactatctatacacaaagggcaaatatactcacttctacatcctcactccacacaaaacagatagtagtaaaaaagacatggaaaagtgctttttatctataggtaggctacaaaaacatactcacataaatgagcaaaagacgtgaatagcaaacactcgcttactttttttagcttataaaccaaaaacacaaaaagactaaagtgggggattcagttaagaagcttgtgctgacttttaacaggtagcatttttcagtaaacatctcagtcagtctgaacagtgatattacaaaacaggagaaagtccctctaagaaactctcttgcctcatggga

SEQ ID NO: 44483 - DNA, 880 bp, Bovine  19866881324293
  misc_feature (1)..(1): n is a, c, g, or t
ncctcgttgcttgctgctgctgctaagtcgcttcagtcgtgtctgactctgtgcaaccctatagaccgcagccccgccgtccctgggattctccaggcaagagcactggagtgggttgccattttcttctccaatgcatgaaagtaaaaagtgaaagtgagttgttcagttgtgtccgactcttagcgaccccatggactgcagcccaccaggctcctccacccatgggattttacaggcaagagtactggagtggtgtgccactgccttctccctcattgcttaagccagtttaagtcggattttatggttagtggctgaaaacattctaactgatatcctacagtcagatactgaacgcagttgaaaacactttgggatcagtgtgattgagtgcagccgcatagttaagggtgtgagctttaaatccagacttcctaacttggagtctgggctcttgactgttattcagccttgggctacttatttcatcttcaagttggagattttttaaaaattaatttttaaaggaatatggttggtttacagtgttgtgtttgtttcaggcatacagtactgagaatactgttattaatggtggacatcacttttcatcttggcctgcaaatatgggtcagtttagaattggaagagatgagagaaaagcccttttgatagaggatcagtgtaaataaaagcacgaatggcaaagacagtccggtttgagtaaagtgtgaaaaatgatgggataaaataccgcagagggatttttcaactccaaatcacagagggcttggaataaagcatgtgaattacattctgtagaccaattgggaccctttgaaatggaaaccatttgctcttgaattctgactctgtt

SEQ ID NO: 44484 - DNA, 866 bp, Bovine  19866881348711
  misc_feature (1)..(1): n is a, c, g, or t
nagatactattaatagtgttaatcaatgtggcagttacatttatttatagtgcttgtgattttatagtttttaatttacccatgggtaaatttttaataaggaggaaggcaagggtaaatgaagaaagtcgagttatatgtctgtatctccactgaccataaaatgtttgaaatgtttctcttagtgaaaatacgacagttctgtgagtcataaacccaagaactgtaggtcaaatacatcaaatagtatctattgacatgttttatttgtctctcatggtgttttaaaagaactgcgtctatttccaaaatgtcagtttatggagatttcaaaagaaaatctgaatttctaaactgccttaaagagttggaaggtttggaaacactggcagcatattcctatggccactgtcatttgggtgttttcagaagttctgctcattaggtgggccctgtacatgtcagtttcttgttgtctccacaatgctgttttcttagacacttcttttgtttatatagactttgtcagttcagttcagtcactcagtcgtgtccgactctttgcgaccccgtgaatcacagcacgccaggcctccttgtccatcaccatctcctgaagtttactcagactcacgtccatcgagtcagtgatgccatccagccatctcatcctctgtcgtccccttctcctcctgcccccaatccctcccagcatcagagtcttttccaatgggtcaactctttgcatgaggtggccaaagtactggagtttcagctttagcatcattccttccaaagaaatcccagggctgatctcctttagaatggactttgtagtaaatgctattcctaactaatcactaaat

SEQ ID NO: 44485 - DNA, 863 bp, Bovine  19866881872285
  misc_feature (1)..(1): n is a, c, g, or t
ntgaaatgagatttgttcgatcccatagggtgggccactcataggatcgcattcagtgtcctctgctttctcatgtacatcatcttgccgtatccccttgagttaagtacaacaaatattattattcccactttacagatgaggagagcaagggccagtgaagttgagtttaagatgggaaaatttttttcatccaacaagagtgtcttactagaaatttactcactgcctcctgataaactttaaaacttggcaggtccttcctagtcatgtgtgagtcatgaaagatagttagcagtggccacaatgtggataaggaccaggatgaagaactttaccttgtgtatggtgtcttgcttatgcctggagtttaggctgcttcatgtagttgagagtgaaaacttcttggcaatttggaaatccaaactacaccctcactgatgactttaaaagggccactaacctagcatgcttattttctggttatggaggggagacattccagaattccatggaatggtgagaatccaagattccttctttttcctggggggcagtttaaacttgaaagctgagggaacaaggatctatgtccactacgtggggtcttttaaaggcttcctggaaaacaagaagtggtccctaggaggtattttaacatttccttgggaaagggctgcattttattctttgagtagcacaggttgaattttttttttttttacaactttctatttcaaaattatcaaatatgaaaagaagtttgttatttttagagtagggtttcaatagagagttgccaaaaagaagagtatttcatccctttcattttgaaaggaattgctcggcaagctaacacatgt

SEQ ID NO: 44486 - DNA, 626 bp, Bovine  19866881967039
  misc_feature (1)..(1): n is a, c, g, or t
ncatgatctttctaaggcttttgataagagcttttactctggatgtttcaaaccaagaaaatagttacaagtgatgtctccagttagtctccagttaaaatacatctactttctagaatgcttaacatctttattggggtctgtatttacaaaggattctctagccctagtaactaatgtgcataatgacacattataataaaatgataagatataggaagttttattcaacagaagtagttgaaaatgttttatttgtgtaaaacataaatgttttaaatgtgtttgctgaagtaaaaggtggtctcataaaggaacggaaagccactgtgactcttgttgaccttttcctaaaatggcactgcaaaactaggcattagccaaaaggaagggataaaaatacgttgtactaatgtcatttctttactgtttggacttggaacattgatggcagagctactcccctggattcaagtaggttcctaaatttgtggtaaagtagggttaaggtatacctattgttgaataaagccctctccctcaaaagaactatttggttgttttggtcttgattgtgtccaaattagcaaactaaggtaattgtttacagaatttcacagtataat

SEQ ID NO: 44487 - DNA, 2780 bp, Bovine  19866880195955
  misc_feature (1)..(1): n is a, c, g, or t
ntattttatacaagtctacaaaccatactactttatttattagacctttaaggtatagtttaatatctggtagacttgtgttattctttttctcctagaatttttacttacttttttttcctgtacttcttttatatcttctaactcatttatttgtatctcatgatttcaaactattttcaaaccaagaggtcaatcatgaaggaagcaaataatttactgtgaaagattgcaaattacaaggtcataatttacttacagatacaggcttggaatggacaggggaaaagactaagaaaaaggaactttggctttatgttttatggtgcaaaattacccagtactaaagagtattgatagctctgggtaccataaaaataagaagtagtcttggcttcataaaattgcaacacacacacaccagaagtaggggcctggtgggcagtgctctcaagggagtgccttctggtcacagagataagagctaactagtaatccaactggggagccaaaccagtttatggtggacaaacaagtgaaaagaacacataaatgaaacctaatgctgcatccttgttttcatgactattttaagttctcatgattatttcttaaagactcaagtacccagaagaatatgataaataggaatacacaaatgtaaagaaaaaaatttctacccaaagtttaaaagacagggaaagctaacctagagtaaaactaacaagttaattttttctgtgtttactatacaaacaaaaacaacctttgcttctactgttggaaaagaaaccgtgggtttacagggaaaaggaagcataccttgatgctggtctcacatcaacagtcaccttccccagaggcattagaacctcaaatgagaatgggccatgtgtgaagattagggaggagctgctgcaagaaatttgtctgtattccagttctattttttaaataaatttaaaggaaaaaaaaaaaatttaaaggacctgatcatttaaaggatcaaaatgttcaacaacgtttgttaaaaaacccaggaggcttccacccacacggcaaataaattcaccccatttatcttattatttagaaatgtaccttcatatctttaaataacattcatattggcacttctcaatttctgtttcaggcctcctctattgtcttcccacagagagggatgatttaattttctttgcctcttcctagcccacacccccagaagagttaaactcttcttttggttagtcaacatttagtgttcacctaattatgattatgtaaatcctattcatattaaaacccagagacattactttgccaacaaaggtccatcgagtcaaggctatggtttttccagtagtcatgtatggatgtgagagttggactataaagaaagttgagcgctgaagaattgatgcttttgaactgtggtgttggagaagactcttgagagtcccctggactgcaaggagatccaaccagtccatcctaaaggagatcagtcctgggtgttcattggaaggactgatgttgaagctgaaactccaatactttggccacctgatgcaaagaactaactcactggaaaagaccctgatgctgggaaagattgagggcaggtgagaaggggatgacagaggataagatggttggatggcatcaccgactcaatggacatgagtttgggtagactctgagagctggtgatggatagggaggcctggcatgctgcagttcatggggtcgcaaagagttagacacaactgagcgactgaactgaaatactattcataactctgattatttttcctttctatttttctggagttaataattattttatttgcttgcttagctttctatgtatttttgcaatttcaacaaacagcttctattccagttcctcacaatttgaagtttaaaggtgtatgatttagtcaaaatcttattcactgtgatattctaatagtgaaaaagtaaaaatgaaaaaccaggaaactggtaaatccattacagctttccatatcatgaaatatttggttgtttagtcactaagttgtgtctggttcttctgtaatcgcatgtaccatatagcccaccaggcttctctgttcatgggatttcccagagaagaacactggagtgggttgctatttccttctccaggggatcttcctgacccctggaacaaacccatgcctccgacattggcaggtggactttttaccactgatccatcagcgaagtccctagcagaccttaaaatgaaggttaattaacaagtctagatacatgcaccaaactgagcctttaatttcatgtcattatatgtacctgcaactctattttcaatgagcaggcatttttataattataaaaaaaaaataatcataaaaagtaatcataaccatattttgttggtggttattcatttatggccagtcacattaaaaaatttttttccattttattcagttactgggaaaaaagtctgaattttttttttttcagctacacaaatttgaatgtaggccaatcatctcagatacctaaagagattcaactttggaagaaggaaatccagaattttcctacttccaaaggaaaatgctttcagaaagtgagtttaaaggggtgactgtaaaggaagcactctttaacttgaaccagatactacatgacagacagtaaaatgcttcatttagtcccaggcagcagcaggactgagcggcacctaagggggtgagcccagggaggcgggcctggccagggca

SEQ ID NO: 44488 - DNA, 1046 bp, Bovine  19866880200992
  misc_feature (1)..(1): n is a, c, g, or t
ntctgtcaaacgctcccacttctcttcagataattctcactttggaaagaaactaaagcactcagttcagttcagttcagtcgctcagtcgtgtccgactctttgcgaccccatgaattgcagcacgccaggcctccctgtccatcaccaactcccagagttcacccaaactcacgtccattgagtcagtgatgccatccagccatctcatcctctgtcctccccttctcctcctgcccccaatccttcccagcatcagagtcttttccaatgagtcaactcttcgcatgaggtggccgaagtattggagtttcagctttagcatgagtccttccaaagaacaccaaggactgatctcctttagaatggactggttggatctccttgcagtccaagggactctcaagagtcttctccaacaccacagttcaccactagcaatattaaattcttgaagaaataataggacaagtctaagcaaaaaaatctcacaggatttggggtcaattcaggatgtgtatttgtctcagggctcaagtaatgtcttctctcatattgaagttattttgttgttattttgatttgcatttctcttcataatttattttttcatataggtttgttatgaacatttaaaatgacctgacttaaagaaacttattctttaagcagcttttcagttgtaaatagtggcaagtacttatctttctatccattcttattagtttgcatgatttgatgggctattttagaaatgataagttttaaagaacatagtaattcacttggtgaatactctgtgttgtaactttgcatttaaatctgtactttaatcgaaaaagagaagaattgtttggaagaggagaaatgaccacaagcacatggaaaatattttgttgggagtagtgaaatatagacctaaaatgtatttcaataatatgtagcattaatttaaaatatatgtgcactcagcattgatatatcctaaaagaaaaaaaatatcccatgttcttctcccatctgtttcttcttttgttttccaaaaa

SEQ ID NO: 44489 - DNA, 3091 bp, Bovine  19866880351341
  misc_feature (1)..(1): n is a, c, g, or t
naggaatgaagacggttgttaaccctctgatagtgaatcagtgaaggagttaaaaattggaccaaagacccctgtttccctttacagagctggtcattgtgtcctagttcgaagtatgagtacaccatcttacacctggaagaacttagtatgcttcttagtggagagattcaaagctcattaacttacaagcatgtttgtcacctgatggtctcgatgtgcaatgtctgtcttctatcataacctacctttttttttttttgccacattgtgcggcatgcaggaatcttagttcttagtcccccacccaccccccagggatccaacccatgcccagtgcaccagaagcacggagtcctaaccccttaaccaccagggacttccctttacctaccttcctgctgtctttttccagttcaccattctaatcggtttctctggctgatgacattgtcacgttggactgtggtaagggcgctgtatagttttcccatatgggcatgtcttgacctctcttctttgctaggatctcagctgttctcttcatctaaaacccaattctaggttatagtaactaaacttatcatggtaatcattttgaaatgtatagaaatactgaatcactatattgtataacagaaactaacctaatgttgtggtcaatgattcttcaaaaacgaactcattaaaaagagatcaggtgattacccgaggcaaggtggagggaggggaaagttggatgaagtcagtcagaagatacaaacttccagttataagataaatgagtactagggaggtaatgtacaacatgataaatataattaacactgctttatgttgtatatgaaagaataaatgctaagagttctcatcacaggggaaaatttttttctatttccttaatttttaatctatatgagatgagagatgttcaacaaatttattgtggtaatcatttcatgaagcatgtaactcgaatcattatgttgtacaccttaaacttatacagtgctatatgtcaattatacctcaataaaactaggagaaaaacccacttctaggttgctttcaaaataggagtatctatgagtggatttcattctgagcacaaacttcacactaactcggcactgcaaagtgatcctttagggccttttgatggagaacttggctgttgactacttaaaaaaaaattccttctgccatgtttgaaatactagaaagcagatgggatggggcgggggaagcattcaattaagtaatcagttcagttcagtcgctcagttgtgtccgactctttgcgaccccatggactgcagcacgccaggcttccctgtgtaactttatctttgaggaggaccacggcttcttctaaaatatagcctaaagcttatgcccaatcaagatagcaaaatatagcagagctatacagtatcttttttttcccctcgaacagcagggagataggtctgtttccgtgtctgccctgctatggagtatagtgaaagcgatagaaaatttagaaacaaagggacccggtttggtgttaacccgggaccaagtgtctaggaccacggccacatttgttttctgtttgcctccaacgtacggtgtgctgtgattgattagacttaagtgtacaatgaaccacattgggaattaatatatgtgactattaataaatagtcaacatttatgaaaaaaaccttattttacaaaaatgttaacctccacgatcttgacgcacgaaaacgccctttgggaacgcgcaagtaaagcgcgaccacagtatacttgcgggccccgccccgttggccccgcccccacggaagcccgcctgcttgctattggtcgctctccctgggccgtcggttgccgtggagatcacggctatggcaaccaggagaagccatactaggtcgaggctccggaaccgccgaggggccacgaccccgcgagccgctcatggcgctctatgagctctttgcgcacccagtggagcggggctaccgtgcggggctctgctccaaggcggcgctcttcctgctgctggccaccgcgctcacgtacatcccgccgcttctggtggccttccggagccacggtgagtctgccccccgcccgggccggtgcgcgctccgcagcgctacgtggctcccgcgcggcctccctgaccccggtctctgcgccccgcactcttgttacctcagggttttggttgaaacggagcagttacgaggagcagccaaccgtgcgcttccagcaccaggtgctgctcgtggccttactaggatccgagccgggaggcttcctcgcctggagcacgttccccgccttcaaccggctgcaggagggtcatctgcgcgtcccgctcgtctcggtgagtgcttcccgcctgcgcccggccgcgcagactgggctgcggaggggatgggcggagggcgcgggcgggctggaggctccggcccctgaatcgggggggcccggtgtgcagctgaaggagtcacgaaccccagacccgagcttctgtttcctttcctgggggcttgtttgttggtacattcggcttctccaagccgtcccccaccccggttaagctggctgctgctgtcagcgtctctgttctctgcagagtctccagcccctggcatttccgtgggcctggcccttcctgagggaatggtggtcgcagagtttgctgtgtgagttgcgttgttcatcattccctaagtcgtgtccgactctatggtggtggtggtggtggtggtggtttagtcgctaagtcgtgtctgacccttgcgaccccatggactgtggccaaccaggctcctctgtgcatgggattctccaggcaagaatactggagggggttgtcatgccctcctccaggggatcttcccgacccaggaatcaaacccaggtctccggcattgcaggcagattctttaccaactgagctatgagggaagccccactctgcgagtccgtaaactgcagcacgcaaggcttccctgtctcacttcaccatcttcctgagtttgctcaaactcatgtgcattgagtcagtgacgccatccaagcatctcatcct

SEQ ID NO: 44490 - DNA, 1820 bp, Bovine  19866880490145
  misc_feature (1)..(1): n is a, c, g, or t
nggcagcctgtctttaccagcttgaggcccggacccctctctgtgtacctgctggccctggttttactgagtcctgcgtggaggcatctattgtggcctttctgggcttagtgacctctgatgtctcgagctggctcccagactgctgggttgacaccccccatctcccccgacacgtagtcaggcccctgtttagcccatgtctggacctcctgctcgtctccagtagtgcagtcaggtggccagagctcaagtgttcctagtctcaactctggagccagtgcagctcggcttcacggcagagcacgctcaggtctcctctgctgcagtctgttgcactgctaagggaagccagctgtcctcccccgcgtgcctagctggagcagtgtctgttcacggaggcttcttaggcaggacttccttggctcccgatacaatctgagagctgcttgcactacgtgcgaggagagtagcttccctttgatgacgccgatgcaggtcttgggcacaggtttctggcgggggaggttccataggaatcatgtcaggttctagctataaatcttcagaggccagctggaaggaggctctcttccccatctttgtcctccattcccacagatgggctcttgggctcttgtttcggttttctcccctgcccctggcgttcaggaagcattgtgaaagcactccttgggagctggggctggcttctgaaggatttcctcagagtgagggtgcgtcagatggtcttgccttgagataggaggctgattctagtctaatccccgattccccaaggcttaattacttttatcaacctcccaccagaggtgttacagagagtagctagtttaagtagtgggctccttatcctcaaaccatttttctcccaacagctggactcagtcatcaaccccagttctcagtgttctttctttgtttctctccttcaagcctaactatgggacagctttacgagaaggaaaaagatgaagatggattcttgtacgtggcctacagtggcgagaacactttcggcttctgagggccggcgctgggctggtgcagcgctcccgctgtggatcttgtaaatagccggccattttcagttactctaccagaacctcttcacatagacctctcagtgcatttgtaactggatttacttcttaatatattggaaggttttgtttccttagactagtaaattatcctgcagagttttattttgagtttttcttttgtgcactgtcctcatggctgtaccctccagagaacctgttcctctgggaatcttatttaatgaagatatttccatattgaagtgagggaggtgggaattaaagtgaaaggggagatgatgcatttattctggattatgtttgaagtgttagatggtgaagtgttaaaagcatccaaattaaatccatagcaatcagaacacttgctttactagattttgccaactgccagtcatggtggactgagctaatctgttcctctttctgaaactattaaggtaaataattaacaataaaacttcctcttataaaggcactgcagtgtgaccttgtcctttattcaccttgttttagatgggtgagagaaggagctcctacgtccgccaggccaggaggagggtttgtggggcccacggcagaacagctgagcacaggaagcctctgtcaggagggacttgttttaagtggtcaatataatctctaaaaaggtatatgtcaagaagtcctttctcccactgctgttttctgactaccctaaccctccaccttttggggaacttcttttactggcacatt

SEQ ID NO: 44491 - DNA, 637 bp, Bovine  19866880581278
  misc_feature (1)..(1): n is a, c, g, or t
ntgaactcccgcgttgtcatcagtacccctccccacacagtcccctcaaaccagtcacatccctcagattgagccctgaacctgcagtcactccaaagaatcctcccgaaagtgtcaaagccctaagtagaccccttgccatcactggccaccagagcaccctcttctgtcactgaaacctacaaaattgccctcttgtcaccaacgccccagtcagacttgcctattgaacagtctcctgtaagggctctatcctatcagccggacccttgctcacctcttccctttactaatgtccaccgagaccccacgcctgctaccagctctcgaatacccgctccgcagtcatcagtatccctcacatacctccctgtcgcccactctatcctctcccggcgccgagagcccctctaagcccggctcctgccccgccccttgccacacggccccgccccttgacgcggagtcccgcgagtggcgccggaagccccgcccctcccggttgctaggctccggcagccggaagtcccgcctgccgtgtatcgcagccgccgccgccgtcgttgttgttgtggttggtgcgctgagctccgcggctccgagagccggctgcgtcccttcttcgccgccgccatga

SEQ ID NO: 44492 - DNA, 1710 bp, Bovine  19866880587477
  misc_feature (1)..(1): n is a, c, g, or t
ncccacttgcacacacacaaagttttgtagaaaaggcataagtaatacatcgtccaactactgaagttcagtaaaaaaggaagcactagaggtcactcttacaatggaaagcacatcatgtgaagcgtccttcccttaagaaaagcagagctgaagtctggcctagaggcagtgttgtctttacagtacactggctgtttgagtttataatcagttaatgcaactgattgggctacttgtttacatttgtttgctttcttgaagtccaataaaaggcagaataacatccagtagctttctttgtaatgtatcttcttcaaaggaaagatgagctgctgagaagatctgagaagagtagaatgtttgtgggtgcttaccgctggttgggcttatttttcaagaagttgtttaatgctcttttacacattcgataaacgtaaagaacctataggttcttaaattcttagggacttttaaatattaaagttggaattcttggttaccaatatattttcagagttggctgttcttgaagtgtcataaatacaggtaaaatgacttcagataattaaaggtgcagtcagcaatttcttattcctatcacattgataatacaatttgttgcaatagatataaaagaaaaattcatttcccaatttcatttcactctttaacatttggtattttggtgtgtgaaggaagcaaggtctacatattaccaagtcagggtgcttcctgtgttgtatcttttttggaggaacaagtatacatgtttaccagaaagggtgaaattcagtgtgtggacaagtgaccatcaaccagcatgccagcatgagtatttttaaagtattgtaactccagtaattcttttggacaagacttttatattaaaacacgaatcaatcttgaacaccaatattaaagtcagggagaactgaatggaaattaagaaaattaaaggtcagtctctcaggtgaatacaaagacatggaacagctgattccccagtaaccaagtctgcggtccattgcgtcggcccaagactgcctaaggctgccagtgtgaaccttggcacaggacagcgtctctacaccagggacagctccgggatgaggcaactttaatttgaatgttagttgatgtaattaatcaacaggatgactttacattagaaggattccgtgcgaacactcacacagatattcatgtccatgtgtatgtatttgtgtgtgtgaacatatgtttatataaagatgcagaaaccgctgggcccacacgcttccacatctttggtggcttgcttctcctcttctacctaaagatgaaatatgtggaactgaccaccttctttgcctactggcaccgtacttgacatttcagaagtgttgaaccagccccaggtctttgctccttgttctggtcaaggtgtttgttattgtactgaagggctccctccacgaaagtttagagacagactcttctagaagggcttgtgctttgataagttgcacaggctgttattggtttcctcacttgctactaagacacgtgcactgagaagggagtcatctattttcaaattgctctcatgaacccagttttcttctgagcattaagacattgttaaggagcggggcgttgatgtggtggaacagctgttagtcttgaggcaagttaagagttttgctttttactcctgcacatcatgtg

SEQ ID NO: 44493 - DNA, 951 bp, Bovine  19866880603650
  misc_feature (1)..(1): n is a, c, g, or t
ntttatatttaaggttaagttctgtaatcaaatccgggtcgccatcaaagtcagattccctggggatacccagtcccttggctggatcccccattctgggaagcctgccgtggggctcagaacctttacaatagtgggagaacatctttggtattagcgttctccagtatctgggtcactcacctggcgagtgtggaatctgattttatcatgattgcgtaacccctaccatcttgttgcggcttctttggacatggagtacgagggcaacttcaagtgcaaacccctactggtgtacagagcttcaatttcaccagcacttgaccttcaccggaaaagtgtgaaccatttgcagtccattggaggtggaacaaaaaaggctggatgacatctgattgattccacagctgtttcaaaccagaagttgaatactatctctagggcaactttggcttcaagattttgttaaattttgcataatgccctagtccactgctgtgaagaactcaaaaatgcccacccctatgtaaaagttcttttcacgcccccaaatactaagtctctcatccagcccctggatcagggcataataaatgtcttcaaggcacagtacacaagggagctttgtaacaaggctttcgaagttctcaaagccaacaaggaaactaccgtgatggacgaactactggcagtcagtcactatacccaatgtgattatgttggcacagcctgggacaccaagcacgagcctgttaactgttgggaaaatgtttggccaggctgtgtggaaaatttcgaaggctttgaaggtgctgcagaaagaatgaagaacagtgtcaaaaacataatgcatgctgcacagcaaataagtgaaggctttggtgacatgaaggaaaatgtggaggaaattcggcagagaaagcaatagacagtataagtcagccgaagagt

SEQ ID NO: 44494 - DNA, 1394 bp, Bovine  19866880604028
  misc_feature (1)..(1): n is a, c, g, or t
nggtaataattttcttccccgtttgggttgcctttaactctcaattcaaaactatattccattgattagaaacatacagaaatcaaactaattattcacacacattttataatagatataaagccactttatactttgcctttatgaatgacaacttaaagaggcttacaggtgatttgatcacctaagccaatttacataaatgcaatgtgaggagggctttatactgccaaattggatgaggtattttttttagtttgcataaagtattctgcaaatggttccattttcttactctgtatccaagatttctcaaaacagaatatctgttggatttacattctctgtgtgggaactaactgatggaactgaatgaaggattcagtgtaaaagatgagcctcactgagcagaaacaggcatcaaagtgacttgccttatcagaagccccaaatgactaatctataataattaaaacagtgcgatgctggcataagtggatcaattaaccaatttacattatctttaaagagactcttggtatgatacatataataaaatgaaaaggaatagattattttaaaattcactgggctaattatctatctaaacaagcacacacacacacacacatgcacagtacactccttggaatttttatcaaacctcagaagaataaatattctgaggtgttgtaagtatctatgcttatgcttatacttcaattgtagatatcacaaaagtctacaagtatattaagccaataaataattaagaaagatgtttataatttttaaaaaatctccagaggaaataatcagtcctagtgtacttaagccttccctcatagctcagttggtaaagaatctgtctgccgtgcaggagaccctggttcaatccctgggtcaggaagatcccctggaggaggaaatggcaacccactccagtatccttgcctggagaatcccaaggacaggggagcctggcaggctacagtccatggggtcccaagagtcagacacaacttagtgactaaaccaccaccagtatacttaaccccacaaaatataacctctgtacatcaaaggcactgcagaaaattaaagatcaaatgacaacccaaggaaaacatttagagcatttatgacagaataatagttaatatagagttatatttaaagtgtgtatatcatacaaatcttgagaaacaagagtaaaaaatgaagtaaaataggaaaaagatttggatggaaaaagatttaaagaaagtggaagaccagtaaatgctaaactttagaaaagataaattatccagtaataaaaatatgtatcaattaaacaccaggctgcagtgaacactcagtctttctgcagactgagtgcattgtggaacaga

SEQ ID NO: 44495 - DNA, 3504 bp, Bovine  19866880662633
  misc_feature (1)..(1): n is a, c, g, or t
ntgattttgcagtgcgtttcctcaggcacttttctgcttctaatccgtaaaacccagagcacacgaattctttcttttttttccccctggcatgtcttctatgtcgagccaaagaacaaacaaaacataagtaaaacaaatgaacaatcatcatcctaataacttctttaaattcaatttaaaatttgtctaatttagagtttgtgggatgccctcctcgtttggaaaactgggacagatgtttgccatacactgttgcagtcaatcttaccgcagcatctgttcactcctttgcgtgttttcctatcctctccagtgcatttctcttgtggcgaaatagtctttgtctttttaaacggttcttcataacttatcaggtggatgtgctgttatttaaacattaagaaccaattggttgttcattgatttttaaattttcttaggttgccagtgtccacttctagtggtatatggctatctttaagatgcctgtggttctctaagtatcttaatccatttacctaggtcagtgtcatgaagtgctcaatgtctttgtcctactttaacaaaactctaaatttattttggaaggcgaaatttaaagcagtggctgtcttacacccttctcttccctgctcaagaatttataacacttaaagacggttctgtgtctcttccagcagtatcatttgttcagacatgaatcagaggtggtgggtagagatgccacactgacagatcgcagaagctcatctgtcaccctccgggaaacctgctcgctcatcagttggtcttgtcagtcacacacacagccgtgtcgtctctacagccttccgcggcatcaccaatcacccctccgtgtgtcccccttgggagctcggtgcccctggcctctgacgggctgctgcgagtgcaggtcttcaggtatcaccatgagcctgatatctcctccagaaggcacaagtctctgtttatgggaagaacctcttaactgccgtctcacgcctcacttgctactgattttgattttcctctggcatcttttgagttttgtcttccttttaaaaatatctgtaactttttccatctttttgagaaaattttaacatctcaagaagcattaggattcctccatactgtcgttctctccttaattagcaaaagcaacctatatttaaaaatgaagaccacagtgaacaagaaaagcttaagatttacgattttgaatgagaactctgtttcccagagtggatatgattctgtgaaaaagctgatacgtgtttgaatggtgttcattgatcccagtctctttctgaaaaagaaaaatatcagagacattgaggacactttgtgtctcactctttgagtgttgaccctgtttatctagcccagctctctttaaaaggttcatcttactttgctcaagcaatacactacaccttaaaatttttactctattgaacaaagcaatgagatcatcattttaatattatctttgatgtaacaatatcaatattgatgagctctctagttctaggtacaaccgtcttgaatgcttcccagttcttcatcttcccaactgtacaagtaaaaaatattaagggaaaatgatttcctagggcattaattaattggttctaaaatgagtttcttcttagtttgtacaatctaccttttgggtggacttaggtgacctgcacttaaggcaacctttcacaaaatgtatcttcatagtgttatggctatatgcttggaactatttggatactgttgaaaataaatgtattcaatcacccatttcatctgccaggcaaataccaggtgaaataccacaagcaaatgggctaatccaagaagtgaaatctattgtatcttcttgaaagtgctgtgttgttgtttttttaattaaaagatacgacttttatgatgcctggaactgagagtagcgtttttagcagagtggttggaactgaaagttgtgatcagtttttattctttatgtctttataagacaatttcttctgtcttacattcttctaaaagtaggagatgtaaactgaccaagtcccagtctgcccagcagttgccatttcaggggagcttcctgtgcgacgcccagtaaaagaaatatcctgttaccctggagttaccgtagtttggagggcaagtagaataggcaaagaaattatccattcatctcctcagcttctaaaattacatctgagtttttgttctagttaggcaggtgaaggtaaaatcataaatgcctgccactcagggacccaaaaccttttgtggaagacagaaagacatacctgaaagtaattcagatgaaaggcaggctctgatacatacttcacttcaatctagatttctgatgtaatgccattatgatttatttggtaacttagtgtgtttcctctcatttccgttaaaaatcaatatatgaccggtaatattattggagttgataagagatgagttattatatttttttactgactgtgagtttggaaatttatctccgtaaattacactgggtgaaaatgttccatattaagtgaactccataattgcactctttgggactctggctgtttttaggttggcactgatgatttagagaattatacctaagaaagaaatactagctaagaatattataaaaattcttagtgaaataacatttacattggctggatgtgcttggttgcatacaaacaattgcttttcactgggttgggtggttgttcattcagtctattaaagtattccttgctcttataattgttgaagcttcttctgctcacctcattcacatatttactcagtgaatatttagtgtgcctctgcagtgtgctgcctatcattacacatgtcttcagcatcagtggttttgaaatgttataatggtcagaatcactaacttcttgctgacaattgagaatggaagttttgactcctggattcatgaagcttttgaaaccacgttttatgcctaaggttttgactgtcttacaagaaaatgtacaatactgttcagggtactcacaggatggatgttctgtggcaagcagtgtgctcagttgctgttttggctgactctcaaccagcccacgatgggctgacgctcagtactgccatttgctagttctgtagaaaagcacactagtgtgtgataggcatgatgagagagaggaatacaaggcatttgggctgcttataggcagagcatcagagaaagctatttcttgaacaaatagaagagcctggagggggaagtgggggaagcacatttcagttagaaggagcctcacaaagcatggagcattggaatgcaccacaggcagtccagaaggactggctgaaagtgaggcccgacagcaggtaaaactaatgaaatacatagtcatgaagcatcccaggtgacgagtcttttacataaagcagagacctcagtattctccaggggatcacattattgttagaagggttatatgtaca

SEQ ID NO: 44496 - DNA, 1821 bp, Bovine  19866880689906
  misc_feature (1)..(1): n is a, c, g, or t
ntgaagtattaaaacagatgtctttaaaggaatgattgttgataatttataccttgatcatttgcagatacctttccctgcccaaattgcattttgaccttgttaatttgttgattggaaaattgcatcccacttcttacttctcagtaggatggtatgtcaacggttcagtggaattctttaggattcacagttcctgaattgtcttccagataaaattggaagtgtggtttttctcagtgtaaaatatcggaatggtagctagtctttcagtggacaccttctgaaagctgaaacaagacagagccacgtgtgtactgatggtactaaagtctctctgatgggagactttttgaagcagatcccagtgtaaaactgatatgagttgggtattcttattggtgcgctgattcctcacctggccatcagacatcttctgttgggacatttcatgttgccaccgtgttctctgtattggagctccactggtctttgcaggggcaggagggcctggcgagctgactgctctctcgtcacttcagcacactttgtgaattgttctgtcctgccacttcctgtcccacagcagttataagtatttgaagtgaccttattcactcaggctatgtgtattttctctctcctctcactagagtgtaaaactgcatcaggtcaggggctgtgttttccttcttaatcatcctgtcaacagtgccaagacaggccttggcacaaattgagtgatcaatacaaaatcattgattatgtgagtgaatgaatgagggtaatattacctgatgtcatgtccatcgttgtcatcatcaatatcagaaagaatttatttaaagagtatctatggttaataatacattattgtgcgtgtacattaaaatattaagaggctccatctcctattaaatgttctaacccctcgcaaaccaacaacaaatgaacaagaaactcacgaaagaatacaaggagaattttggatatgttaagagctttggtgtaacaggtgtgagtatatgtccaaacttatcaagatgtatacattacacgtgagtgatttttttgaatatccattatgtctcaataaagattaagaaaagatgcatttgttaagcaggaccacagtattgcacaaccccagtaggctccatgtgtgtcaaaggtcaggtcttgtgcaaaagagactgaaaccaagaaagacctgattaaatacaaacttgttacaccaaagttgctcatggataatgatatatgaaatcatctcataatgaatatctctggatagttcagtaaataaacccctgtggggaaagacccccatggatccacctgtaactgaatacaaatcttgctctgtgataaacagcatttaaggcaaagagccttgaatctttgaattctctaagattcataatcacagcaaggaacttttttttttcatagaaacaagaatatacataaagtaaatttttttttatcaagttgggattaagtgctatctaacactaatttggagagagagttatatttaattgactgatttggatagtataaaatggtaataattgttgaacatggaatttaaatttcatgacttgaatttcttatgacttctttccacgtgaggattacctttgcaaatacagcataatagaaagcttttcaggaagcttttacttgcattttctctctagtgtgttgatgttgaattcaggcgttggtgacttaggagggcacaatgagaagatgaatgtgcctcccctcgggaagtgtctccagctactgactttgttctttccctgaggctgaatg

SEQ ID NO: 44497 - DNA, 1300 bp, Bovine  19866880694569
  misc_feature (1)..(1): n is a, c, g, or t
nattttgaatacattattgtgcttagtcctgtgaaagcaagcatttccccttttagttgatgaaatagtctactgtttaagcacacagtggcaacatccaatagttttaacactttaacaaaatagcttcactgtgcccacactttatcaagcccaggaagcatagatgtatttaagagaggagaggaccaacagaatgcaggataagaactgcttgaagttgactttgaatggatagttgaatacgaaacaacccgcgttgtcattataatttatttaatccagagcatcatctagcggtttactcccggtagcttttaggagtttaccttcaaaggtacgctgggttagtattctttcatagggtatagacatgaccaacactgagaagaatgactaatgcttttccaaaagtgctgaatgctgggtccgcttggagttcatcttggtgaaaaatattctgatcactgaaaaactaaggcaaagtgtgagtcctgagactcatagcagctttaacaaagatagcatgagtcacatttgtcattcttagttggaaattaaaaatacatttgacatttttgtgaaacaaattctatgattttttttttgtcctgaggaagagtaaaacacttctcacctttcctggccatctctattttgttatttaaatataaagagtaaaaaatattttagaccagctactagtggggacttggatagtgctccagagatggcaatcaacagagattcagattaccctgtgacttcagtgtttgaaacatttaaaggagaaaacaatgtgaaattaggtaaactagcagcatttgtaacagagggcagtttacacagttcatttaagacagaccatggagtcaataatgtaatgctctgagtttttgttggaacctctctctagcttttcataagctcatctctgctttgcaataatttaactgttttttccctgctacaagccaatagggtatatcagcaaatgtgcagataatgaaaaatcaatgcactctgtcaaacgctcccacttctcttcagataattctcactttggaaagaaactaaagcagtcacttcagttcagttcagttgctcagtcgtgtctgactctttgcgaccccatgaattgcagcatgccaggcctccctgtccatcaccaactcccagagttcacccaaactcatgtccattgagtcagtgatgccatccagccatctcatcctctgtcgtccccttctcctcctgcccccaatccttcccagcatcagagtcttttccaatgagtcaa

SEQ ID NO: 44498 - DNA, 1800 bp, Bovine  19866880698916
  misc_feature (1)..(1): n is a, c, g, or t
nccggggggttggctgtgctgggtcttcctttgcggcatatgggctctttgatggtgtgcgtgggcttctcttgttgcagagtatggactctagagcactgaagctcagtagttgcagctcgcaagctctcaagctgcatgtggatcttagttccttgagcagggatcgaacccacatttcctgcattggaaggtggattcttaaccactggatcaccagggaagttctggtttccatctttaaagattagtcaccttccccagaaatgagtttggcaaatgtcaaagttgcagagagttggacacgactgaagcgacttagcatgcgtgcatgccttggaaaagggaaggaaatggcaacccactccagtgttcttgcctggagagtcccagggatggaggagcctggtgggctgccgtctatggggtcgcacagagtccgacacaactgaagcgacttagcagcagcagcagagttgcagagggaggaggtgattcttctgtaaactgttcacttttccatgcccaacaccattgacccttacctgaataatacattattttaaagggcaacaaaaagaaatattgttttacctgacaccaaaaacaattctattaatgtaaaaaccatcagattcattatagaaatccatgaattaatatccctacttcttatcagatacatatctgaggtacagtttgcacaactgttgatatgacaagaataaacacaaagaaaaatgcttttaaaacctcataagccatgttattggaggtttttaacctttttgtttatttccatattcctgtatgtatactatacacagataatattccttattgtttaaaatgagaaaattaagagcaatttttcattatctttcctttttctgttatcagtttgttactctattaagagttttgaggataacttttgttgaggcatcaaatcaaactaattactcagagatagcttaaagataaagtgaataggtccaaagataaaaagcgcacccacattctctggagaaacctctgttgatcagatttgaactgactcttagcaataacaaaacaacatcctgaaatagcaacagacaggaatacaaaagatagcagatcattcatggaagggtcttcctttgagatcactctcaatttatttctgaagcttaggcaacaataaactgctctttctccccatatttgcagtagcattaactccaagtccccaccacaataggatggtgttacaatcataaattcttttcattaaaaagctctgattcaactctgtgggggaacacactgtatatggaagtttagttctcaattctctctcaaaaaaaatatagcaggttccaaggacttttcttggacttagtagctgcagacttacaaaaactagctctattcaccatcttaagagataggtaaaagcaaacagttgtaccttgaaatttataaatttagtattcatgatagacctgtacttatggatgagacacaggaccatggctggcagtgacttgtaattttgttgaggtgtaaacccttcaagtacaacagtgggtcattctccatctatcattggatttacaaggtatcatatgaagtaattaaaagtctgttacttcatctgaaaaatgaccatgtgggaagacggagaaccaaaataaatactttgaagcagctatttgtgaagaaaagattatatagaagcaatgcacaaatctcaattacacatatggtcctagaaccaggaacttgtaacactcggttcatgtttgtgaaatccta

SEQ ID NO: 44499 - DNA, 1256 bp, Bovine  19866880721403
  misc_feature (1)..(1): n is a, c, g, or t
ntgcctcccttgcaaggctcccacaccagacctagctttccagatcaggaaactccatcagcaacggcctcctcgaggttctccaagcaagtgtcattctcccatctcccatcccaccctgtgataaggtatcctttccgcccggagtgctcttctctgagaaagctggggctaacatcattgctaccatcaggtctgctcagatgtgatgctctcattcaagcttgtatctcctaaccttccctattaaaattccttccacccagcagtcctgctccaaaccacttcatccaaaccagttttcttttttttttttttttctggccagacattgacatatttacacataatttcttatttactatatttctttatcatttatcttgccctattagaatataagctcaacgaggcctacagtctttgcctgttttgttcaaagatagatcctatgtgtctagcacactgcctgacacatggtaggagcttaacaactattcaatgcataaaggaattaagtaaatctgtaatgaaagtagtaagactgtataaatttatatacaaaatctgaacatattatacctagtggtaaaagctaaaactaaataagagcacaagacacttctctttgcaaaatggcattttcaatgaggtgttcaaagagaaaacttaaagcacttggctgagacacacatccacacacacacaggcacgcacatacatacacacaatgtctaccaatcaccccaaaggtacctagcttaatcacttgtgaactattatttcctagatatatttattgctttgttttcagctttttttgatacagtaaaaaaagagacgcttttcactttatttccccagcaaggttctaaattaataataccttactaaattctcctaggttttagtgctttgctgttgatcaatttttcctcccagcaaattggcaggctgactctcagccctacttcttgcattgccagatcaaacatttctgaagtctttaataattcagtggattgatcagtaaatatttacatcctttctctgctcaggcattttgattggtatatttgatgtgcaaatttggggacagccaaatttcatcttagaagactagaataaaattgcaaaaatgccaaattctgtgctttaattccactacagtcagttttatttcactcaaattagtagttttggaaaaattactctgagcacatgatgtctgaaaattcagatggtaatcaggattt

SEQ ID NO: 44500 - DNA, 4397 bp, Bovine  19866880722076
  misc_feature (1)..(1): n is a, c, g, or t
nttctacagcatacattccaattcttgttcttagagaagcataaaatacaggacgcacaccaaggtcattagcaagatgctgttttagcagagagctacttcagtcaagtactattattgttcagttgccaagtagtgtccgactctttgcaatcccatggactgcagcaccccaggcctccctgtccctcaccatcgctcagaatttgcccaagttcatgtccactgaactggtgatgccatccaaccacctcatcctgtcgccctcttccccttctaccttcaatctttcccagcatcagggtcttttctaatgagtccgttctttgcatcaggtggccaaaatattggagcttcggcctcagcatcagtccttccaatgactattcaggatttacaatggactggtttgatctctttgctgtccaagggctctcaagagtcttctccagcatcacagtttgaaagcatagttcaatcaagtatagtttgtttcatgtccaaaattccatccatctgacatagaagagatctaccgctctggtagacggcagtctttcttcctgatcagccacaagaaaatctaaggcctgttcagcatgtaggaagacagtagtccaggatgaatgaatggaacacagctgttgctcatttaaactggtgatagtctgggggggtttctgatccaggatccaaacgcctgcttccggagcgcactccaggcctgctggtacgtggacgcagcctccttgtactcttggtacgtcgctagcttctgcgccctaatgcacacacaccaccaagcacacacgttctcaatggacagctcaccaccgcggccagagagatacctccgcaactggccagacagatttattaggagagtcttaggaacagaaggattctgttatgctgtcctagagtgactcttagctcctttgtaggaaattcactagaaaacaacatgggattaaaataggtaaaaataaacagtctgtttttttttcttttctttttttggtcctggtggaatcagataaaaaagagtaactgttatctactacttggtttaaagttttctacatggctataatcttcactggtaggatccagccgttagacacttctcaactgcattttcccaaagtacttttcatcttagtcatattctcctttgtaatgaaagccaacaccccttcccaaatccttcagtgtctctgactgctgaagaatggctaatgtgctgagtaatgtaacacttaacactcagataaaaagatttttttgagacaaagattctttcctttgatcaaatttgagtcaggcttctcaaagtcctcttcctgacccagccccgaccttgaactacgtccttgtcatctcacagctgaagaaactgagactcgcagctcactgagtcaggttttaccctgcttctactctttcgttctttgcaaagatcttaggagacccctgttgtttcttcactcgctacagcgcagagccgagttgctaattgtagcagacactgattctagttctttgatcaatttcccatagctttttggtggttaatggatgggagctacacgcatgacaaagttaaactttacctgagccctcagttcctaaaacaagcgatgagttaagaaacctccctcctgtattcctgtgtgtgggaaatggcagactggaaagaatcacctttcttcatgacttaagactcatgggtgcccccctggtttacctgtgacaaggccagacacaaccctccaaacacctgttttttgtctcttactgattagctgaactgtttgtacccactgacaaaatctcatcaaaatgcctgataatttgaccaaatattaattaccagttatgcttctctccttcctgcagaccccaaaacttagagccactctttctgagccggcataggcaggtgtaccaaccctttcttttaaaagcccctcctgaggactgacacttcctgttcaatggtcctgtcacactacctgctcacctcactcccacatttccagctctaactttgcttagacaaaacttctcctttgcgcctgctcttcgagaggcttacagaccttaagattgcgatgctcttgctactgcattagtccttctccacctgctgaaacaggccctgtctcttactgcaacaaagccttcaaatgacgtctctccttacctaagtccagatttgtttttaaggcatagaatgtatagcaacccacccagttccaatctgactgatttttccagacaagaaacaagcaaactgaccatggatggctggagggcatcgacaccgactgcaggatacacgatgccgcaaacaggcagcagcctcttcatacgagtgtccagctactccctggcttccccactgttgtataaagaaggatttggctggtctttgttgccacttcctaggagggaacctataaactttccgaacttccttggtgataggagtgtctttgttattcatggtggaccctttggatctcaactttttacttaacgaggtgactcatggtgggccctagatagtttcaggatgggctggctgtggctgagagatcagccatgagattacaaagctggggccctgagtcatctgctatctgacatcctggggtggggagaggagaaggtggagattgagttcagtcacatcgtgtggccagtgattccataactcatgctggatgaggaagccccagtaaacactgggcactgaaacgtggggcaggttcctggtcggtgacagacagtgatgtgctgggcaggtgatgcctcctggggacacagaagtagcaggccggatacctttgcagaccttgccctgtgcatcctgtcttttatctggcccttatttgtatcttttacaataaaaggcattcaaagtatggtgctttcctgagttctgtgagtttttctagtgaattattgaacctgagtgggtagttggaacctgagtggctttggggccccctagattgtggctggtgttaccaagtgaggtcagtttgtgggcactgtgcccttacccagtgagatttggcctgactttgttagcgtctgaactccccccacccacctgctcatcaagtggttttatagtctctacattcctgtttggaaactaatttaagtcctcgagctttagttcacaaccactgattgaacaaaagaaaaagagaatgatattcccaacagcatacactgacacctcagcgctcacattctcacagtgctctccacctggagttggactaaaggagggcctgagatgggccgggcccaattccacccacaggctctgtgactctgtcccaccaactatgtccccatcacatctcagatcacacacatgtctgcagctatagggactgaagagcatgtggtcagtactaagtactcattggcctactgaaacatcactcctgccaaaacttccagccattcataaatatgaaaaatgtaggtcaaaggcatcacctgagtgagtctggccacttgtcctctgaaatactgcttagcagcttctggaatgatctaaagagctctactttgctgattcgggatctgtttgaaaaaagatcaagaggatttattaagtgtttaatatgcaccaggccaccatcaaagatattgggcttcacatggtatctttctaggtctgaatgtcctgagcccccattttcaccaatgcttggcaagaaaaatccagatctgagagtctgattaggttgagacacaaaaatgattctcatttcataaacattatcagcagtgaaatcatcaaggtgacaggctgaaatgggctaaacgcagagggaattactaaattctgcccccaaggatacccatcagctgttatttggctaccacctttcaagggagctggcccttgggtaacactgcttacaagacattgaaaggtttgtttcagagacttgagtgttgctccctatatgaactgtggttataaagtccattcagcccaggcacctgaggaagaatctctagattcctcctatggggattacagtccttgggaggtaagtcctttgcttctgaatcaagcttcttgatggtcatagtttgaagtagtgaaggaagtcagtgtgaattccttaccagttacttgggtcttcctggtttgtctctttcataacagctggggcctagagtgtacgtgcctccttcctttccctaatatacacaattcatgggctgacttagaagctgggaagcgttgtgtgtgccaacaaggtacagtcttattttacgtaccatacccgtctcctccttgaaaatcgtaccatcagctgagacacagaggccatcgctggcatatactaaacagggaa

SEQ ID NO: 44501 - DNA, 1545 bp, Bovine  19866880730629
  misc_feature (1)..(1): n is a, c, g, or t
ncacaagagggcttgcaaatgggtcacataatcactgtgtcacatccaaacccaaaagccctatggaattgcttccatctcaatgtgtctaggactctgcatttttcaaagcaagttcatctattgtctttaccatcactagcagcaagttaagtattgttattaagtccactttatttgtgagaagtgtgatgttgattgagtttatttcttacaactttatgaggtataattaatatataaaacccacatatttaatatgtacaattagatgcagaaagagtgccaatgtctttctcatgtgtcaagacagcacttaggaaaggccttctgcccttttctttgtgggaaaatcagatcccgtgcataagtgcatgcgtgctcagttgtgtccaactctttgcaaccccatggactgtagcccaccaggctcctctatccatgggatttcccaggcaagaatactagagtgagttgccatttccttctccaggggctcttccaaacccagaaagcaaacttgtatctcctgtgtctccagcattggcaggcagattctttacctctgagccacctgggaaccaatcagatcccaggagtgataaaaagtgatctctgattctgtatgttcccagaagggtgctgggactgaaatgcatacaaagggataaaagatggacataacatcaccaggacaaccaatagggttaaactgagtttttaccggattccccagagcagcaggtaaacacataacataggcttagagcaccccactccagtacttttgactggaaaaccccatggacagaggagcctggtaggctgcagtccatggggtcgctaagagtcggatacgactgagcgacttcactttcacttttcactttcatgcattggagaaggaaatggcaacccactccagtgtttttgcctggagaatcccagggacaaaggagcctggtgggctgccgtctatggggtcacacagaatcggacacgactgaagtgacttagcagcagtagcagtagaatgacaggtgcttctctgtacagtcacagggacataaagtccagcggggaagactggtcttcttggacccagattcctgaaaacacctgcctgcctatggagcgcctcatcacatacaggcagtgtcactatctaaggtcacggaaactgcccctccagaagaaagaaaactcctgaatctccaaattggtaaagccatcaccatgctgttaaatcctttattcttcatctacactaaaggaatctgtgtcctttgcctgtctcttgatatttcactgccaatcatcttctcccttgtgaaaaacatgcagagaatcaaaaagcaaataaatagtggatttggtagttcagaaattccaattacacatccaatacccttctgctgtctccttaatatgtaaaggaatcccataatataaactttataaatcacagaactgatcccagagtttataatcagaaaataataaatgctttaaggttgttgagggagttctttttctgattaggat

SEQ ID NO: 44502 - DNA, 879 bp, Bovine  19866880752863
  misc_feature (1)..(1): n is a, c, g, or t
ntaatctagtgggaaaaagcggaaatactgactgaaatacttgaacagtaaagcttatcctaggtgaaataacgaactaattttaacagcccctttgtggcgggtttaagttttctgtctcacacggcatattgagatgttttatttttatgtctttgttatggtctaggatgatggactggttttcaataattgctatgcccctccttcttcagattcatgtccccctcccctctcttttagggtcacagtgtttcttataaaatttctccttagagaacatagcatgaaaacaacctctggagacagatttgttttcctgcctgctcgaatgagagttccttggtggagagctgttgctgtgttcagagaggcttcgggctaggatccttggaggcagaggctgagccttcagggctgtgtgtgtgctaggtcaattcagtcatgtccgactctagattgtagcccgccaggctcctctggccatgggattctccagacaagaactctggagtgggttgtcatttccttctccacggaatcttcctgacccagggattgaccctgcatctcttatgtttcctgcattggcaggcgggttctgtaccaccagcgccgccttggaagcccagggctgaggctcacccatatctgcctctcccaggtggagggctgccattttgcaagaaaaaaaacagttttcagtgaggaaaccctgcaggaagccaagcggagctaatgaaacagagctcattggaaaaataagaaggcttttggaagcttgactgagaaggggatttgaagactagcctgagggggttttgccttattttctgtgcgtattctctcctcatctcccgtctagatatagaagttccg

SEQ ID NO: 44503 - DNA, 735 bp, Bovine  19866880772063
  misc_feature (1)..(1): n is a, c, g, or t
ntctatataatcgtctattatttgccagaagataaagtgccattgaggcttgtgtaatcaaaggcaaatggttccaaatctaactttagcattggctggtgttaaaatgttgaaagaaagagcttttcaaaaataagataaatgtatatatttacttccaaatatagtcaaggtggggcttaaaaaccacagtctttcatgtgtgaatatgattttattgacgtaccatcacaggggtatattactggaattctgttttgtaggagtgatggatttttcttcagatatttcttcagtgcagctggtgtgctctggtgcagttgtaagctttaagtgattcttcctctggttggtcacaatttttcttctttcacccagtcaatatttatggttcagacagaaattcagagtcacttctccagggacagtttctgtgacctcaggactggattaggccccttgagtggataattggagctgctttacagttttcctcagctctgcttcttacactagccaggtaaagtttgtgtttgacatgacttgtctgcctcacacaactgcaagctccaagtctgctttgctcaccgttgtaaacacacttctgaccgcagctgctgaaattctgttgttgttgttcagtcgcccggtggtgtctgagtctgtgaccccaaggattgcagcacacgaggactccctgtccctcaccatctcccggagtctgcccaagttcat

SEQ ID NO: 44504 - DNA, 1656 bp, Bovine  19866880811830
  misc_feature (1)..(1): n is a, c, g, or t
ngatttctggccacacaaaatccacttctaaaagtgttgccagacattgcaaacatcaatttaaagtactatgtggtctcttcagatccaatgttcttactgttattaagaacataacagcataatgattcaggaatattaattcagagatacttaatttcttcaaaaaacagaagtgagtaaaactttggttgctgaaatcttttaaatgattttttatatttgctacattaataaaagtacttagtaaaaataaataaataaaagcttgctggaaagtttaataataaacaacagcagtctcctgttttagccatcaggttaactgtatttctgcctcacttcttcatcagataaatggagacattaaaaagtctctgcctcatagaactgttgtgagcagacgtgtgaaacaatgtgcacaactcccggaacatgctaagagcaaagtaaatgttttgcgattgtcgttcagtctccatatcgtgtccaactctgcaaccccatggtacagtactccaggcttccctgtccttcactatctcccggagcttgctcaaactcaagtccatgcagtcggtgatgccatccgaccatctcgtcctctgtcgccccctctcctcctgccctcaatctttcccagcatcagagtcttttccgacgggttggctctttgcatcaggtggccaaagtattggagcttcagcatcagtccttccaatgaatattcagggttgattaaaagttagttattattactacccctaccttccctatcctaattctcttggcaaacaccctcaatctttcctctagcatttaccttcatattttaaaaagtgatgtacttttgtacattattcgcttgcctttgactctatagatggtaactctgtgaagcctcaccatcccccagtgcctcacacactcgccatgtagtttctatttcatactttttgttaactcaagactcatccatgtttacattttcattacatcagttaggaatttcagacacaagtaatagtaaagtcacccacagtgatttaaaccagccgaggttctacttttatctattgagaactttggaggtagatggttgctgttcttccctgctgtcttcagtactttgctttgtattcttggttgtcaaatcatgtggcatgacggctaactcagctccaggcaacagggccaccttcaaaagcaggaagcaggggctgaccacggcggcaaaatcttttcatctcccatggacagctcttattaggaagagaaatgactctctaagatgttacacagtacaatttctcctgcatctcattgaccaacactggatcctaaggtgactcctaactccaaggcagggtggggcagttaggattttacacaaaagaatggcattgctttaattggcttagaccaaagggtcccaaacttcctcagatcacagctccattggtgcatctgtgattatttccacagtgcccctaggcaaaagaaataaccaaacaatccccctcttttaagttgctgggactgagtaaacaatatctgtcaattgtagaaaatataataatagcttttaatgaaaagtgagtgtgtgcctgttatggctcagtgggtagagaattccccagcaatgcaggagacaca

SEQ ID NO: 44505 - DNA, 1191 bp, Bovine  19866880876565
  misc_feature (1)..(1): n is a, c, g, or t
ntttagagcggtgcctggggacaggagaccccggggaggttgaatgaacagaacatgtggtacaagcacaagaactcctgaaatctggttgactcaaaactgttactgtgaccagaagcctgtatgcatcctcagcactgaatcatttgatacattactgaggacagttagagacaaggaagtttgaattatcttacaacagacctatgagtagactgggaccccgaaccaaacctgccgcactcatgccctggcatactgactccgggctgcctgggtgacgtgctctggccggtgggacatcagcagaggcttggtgtgtgtttgcacaccaggatttattctttcagaataattccacgtggagccctggctccgctgccagagaagaggctctgaaggaggagaattgcctgcagggggatgcaaggcacgctggtcgaattcccgggtgaaaaagccacttgagctaccctcaccaacaccacatagggcagacagacaacccttgagcccacacactcttgagaataaactgctttatgtcgctaagttctgaggttatcatgtagcaacaggtaaccgagacactgcactctgtcttaccatttggccagagggctcattatctgtgggtgatcacagatgaaggtaggattgatgcacgtcacttccaggaactccccaacaagctgaaggaaaaagcagagcacagctagagcccttctaaatgccattttgattggctcagtcctggtggcagaggactcaactcctatccacacctgacactacagaaatttatcttaagctgctgaaaggttggtaaggattaactaaggtaacaaacgtaactatttggcagagagcttagcacagcaggaatttaaaacttgttctttcgtttctctctctagagctttcctgtgaagctagggaagttaattctctgccgtggcgttctccttcatagggggcagggtgcatttccagtggatgtgggcatctactgccagtgcccggcctctcaccttatcaaggagcctggcagtggtccggggtggagggcactcgacatcttttgccacacagatatcatcaaggattctgcgagtttctgtaatacaaacatacaagttgggacagaagacatcacaccatcacaataccaccccaatataaggagaatta

SEQ ID NO: 44506 - DNA, 2302 bp, Bovine  19866880900863
  misc_feature (1)..(1): n is a, c, g, or t
nctgtggtacttctgcatcttgactctgatggctgtcttgaaaaatgcatatcattaaacttgcaatagtagagaaagacagtgcatatttcagcaaaataactgcttgaaagggatctgacttttgaaggaaagaaatgcacatatttaaacaacaatagcaaagatctgaaggtacaacagtaagtaaaatacattcagtgtaacagaatatgcctttagctcccatgaagctatacctctggaggattcatgatatttctttcaaatgttttctatatacatcttccctctctaaaaaatatactccctctaactcacagaattacttcaaaatgcaattctttctctctttcttcattcattaatcaggattcttgaaagactaattagacttctgcttaaaagaaaaagactgagagaagagaaagaaagcataagcaagtgcattagaaacagagaatcagagcaagacagagagagaaacaagaggaattgctttaagaaattaatgctttctttctcatcaaaaggcaggtgggaatagtgacacagcagaatgggaaagctgaagtctctgggccgcagggcatcacagaaagagaagcagctgactctgcagacacctgagaggttctgcagagaggagctccagatgtgtcaggggtaggctcctccagaaatcagggtcttgtttgaaagtttgtgcatagtgcaatcagaccttaagattttctcctccaaccaaggcagcctggttcttactttcttttaccccacaatagtcacaggtctatgcttgggaaaaactaaacccaaaaggttccatgaaatgttgagttccttctggactgaaaatctatcgcagtgcttctctgctgcctttctgagcatcagaatgtacacatttctggtcctaagcaaaagcaaacaatactcctcagagatgggataaatggaagggggggttacgttctatttacgtaaatggtcagctggccagttgctggctccatattcttttcttaggatttcattggttttcgtcctttggaagtaaaacttggaactttttctacctatcacactatttttagataaagaatccgaaatcacatatctctacactaacctgttttccccattaccaccttggtccttctgtttaagggagcattttctcttcctggttggcataaagtttttgaacagttctactgtgcaatatgaataaaaacaaattgcaaaaatctatatagtaataaaatataattaaacaactatccaggtgtcaagatttccactgagaatgaggtgctccttagcccagtgtctaggaatttcaaagagggcacccaggcagacagggtttgtgctcgtgtgttcatcagcttcatatttcaggaattacagaagccaaagtgtttcacattagtatgcatttaggatatccatcttcagtttacattacgtaaatgcatgttaaagagagtgagagcagattttacagaagtataaaggactctgaagaaagaggtacatcaagacattaaaccaatatttgcaaaatgtcactgctaggggaaagtcctgggaattttagctcaaatatgaattcagagatgacatctgtgagtggatcatctgcagagatcaatgggttgattctcattatggacgtgagcgagtcacagggggaaagctggtcatggcatcaggatatagccattgctattggaaaagaccctgatgctggcagggattgggggcaggagaagaagggcacaacagaggatgagatggctggatggcatcaccgactcaatgcacatgagtttgggtgaactccgggagctggtgatggacagggaggcctggcatactgtgattcatggggttccagagagtcggacatgactgagtgactgaactgaaccgatcctctgaatgtttggggctcccagccacccaaaattcacatgttggattcctaatacccaatatgatagtattagatcaggccttcggcaggtgaagtcatgagagtggaacccttttgaatggaattaatgcccttaaagaaaccctgtaaagctccctagccccttctgccatgtgaggatacactgagaagtccaccccagaagagggccttcacccattcatgctgggaccccaatctcagacttctagattccagaactgtgagatatgtttgtggtttttataagccacccagactgtggtattttgttatagcagcacaaacagactaagacagtcactataaactttaccatca

SEQ ID NO: 44507 - DNA, 1562 bp, Bovine  19866880969981
  misc_feature (1)..(1): n is a, c, g, or t
ntggggggtataaaactgggcgtctcagaaacatcagggtccttgttggaaactgattccccttggatcctctggcataataaactttactccactgtcttgagtgtcctccgagctgtgttttacgactctatatcctacaacatattcagtgccgaagaagaaaatgggatgcgaatatccatttgtcccaattcagggctccattagggtaattataaaccagtgcccctggtgtgaatggaatacatgacactcaaaatgatgctcatttgggggaaccattatattcattttacaactaccccatccacataaagaaaacatccttcctcttgctagtctgagaaaacaacccatcaaactcttcctcagttgaaccaggggaaacattttactctaatatgcggtctggacatcttcacctgtaaagctttaatattttcctgttgtgggcactcatgcactgctggcttccgcatccttgtgtatccctttgtcatatcagggtcatggcagctcctcttgtaaacaacccataccgagctggagcaagtttggagaaacaaacagatatagctggcaaacaggaattggagaagttcgttttctgtgagttagtgagatccatgtaaggctttatttcctttttactactcgcatgttttatctatcaaacacaaagtgggggaagttccctagtgatccagtggctaagactccatgctcccaaggcagggggcctggggtttgatccctggtcatggaactagatcccacacgctgcaacgaaaagatcctgcatgccacagctaagatctggtgcagccaaataaataaaaataagtaaatatatttttaaaaaatacacaaattggtttactgcctttctttggtagccagaaggaagttaacatacaagtaactccattacttcactgcctttgcctatatctctaatgattgatccgaggagaattagttctggggacattactagacagggtcctaggcagaaccatccccccaatggtctctctctcttcgtgtgtttgccttttttaattttatagaccagccaatccccaaagaaaaactccttcagaaatgagtgggcttttttccccacggaccctgtaatgttctgcagcattttaaagacattaaacccctggcttctatttattaggatttactcttacacatgggcttcccaggggacactggtggtaaagaatctatctggcaatgcaggagatataagagacacaggttcaatccgtgcgtcgggaagatcccctggaggagggcctggccacccaccccagtattctggcctggagaatcccttggacagaggagcctggcggggtccatggggtcgcaaagcatcaaacgtgactgaagcaacttagcacgcatgcacacgatcttatacatatggaaatagtacctccaattaattctagttccttaaagatatttgggcattttgttcccataatatcttcttcagtgcagagtattaggtaggagttacataaatatgaaagaatgaagga

SEQ ID NO: 44508 - DNA, 1263 bp, Bovine  19866880970493
  misc_feature (1)..(1): n is a, c, g, or t
nattcttgctgtgtcgaaacaagattcagagtcctttaaaaaaatgagaaaggacaaaatgctcaggtgtgaaaactcaaaacattcttattctcaaacaaatatgaaaaagcctcttccttaaaaggtaaggagaggaacataaagtaaatttttgatcttgttgtagagataactgttctatatgaacaattattcataaacttccaatgttctgcccacccctcccctgtaataactccatttaattaaagttgtcacttatttgtaaatgcttttttaagaaacagaaacaagaacccaacaaataaataaccaaatttggatgatttgaatatgtttggaatgttgagaatctatttacattttaataaggtatttctttggtgcaggtattagataaatctccatagagatgaggctaggacacagaattaagaagaaagaagcacccttgacaatttggagaaaaggaaagataagcagagtagtgtttaatagaaacagatgtggatgtaatccctttaggaagaaaaaaaaagccgtacaaatacaacataagagatgggaaaatggctttaaacacaaagaatgaaaaaacctgggagagttttgagaaacccaagctcagaatggcttcatgactcagactgtcttccatttcacatcccaacatggtgtgttatgtggataacttaaagaaagacacagtgttacgcacattatattatttataagaaagattaacacgggtttctgaaagtggcaacagagggttgaaaagagggtttgtcagcctaaaatgaacacatcattatatatatatagagagagagtcacagacacatattctggttggcgcatttctaatctacaaccagtgacaactgttttctagtccagcaagaaggatttgaatcaaccgtaaggataaacctattgactaaagatagagcattaaaatacattaatgggagtcaagaattctattaactctatttccttttaaaaatgattgcctgtacttgtgcaatgctttgcacactttgttgttgtttagtcacgaagtcgtgttcaactctgtgactccatggactgcagcccgccaggctcctgtgtccatgggatttcccaggcaagagtactagagtgggttgtcatttacttctccaagggatcttctcgacccaaggattgaactggcatctcctgcactggaaggcagattctttactgctgagccaccagggaagcccttgtgta

SEQ ID NO: 44509 - DNA, 1260 bp, Bovine  19866881005047
  misc_feature (1)..(1): n is a, c, g, or t
ngcccaccagtgaatgacagcagggaggaagaaattaccacatccccctggaggctggccagaaccagaaaaagtttgattctacttgtgcccttcttggaagaagcctgaattccatcaggcaaggtggttctctggggcatgagtccaccatctttttggtctgccagcttttcaaataaagttgctattccccgccccaacaacttgtctctttatatactggcctgttgtgcaggaggcgcttagattcaggaacatcattcatggtgtcatgtgtggtcatttatctgtcagtaaaggcttgtgttgtatacagattcttagaactctgatactgtctctactttttaattatttcttccaccctttcacctttggatggttttgtttggtgaatttgtaggtctccttgtcctagtatctggacttcatagttgctattaaacctctaaaatcaatcagcctctggctgtgctgtcattaaaagttaactgccttcccattaatccattaactgggaaagctattcaaggctgtaacttggggtatgtaagccaatgtttgcctccaagtgaaagtttatcctattaacatcaaagagtatttatatatatattatatatatatatatatgcctagacatatatgtgcatatatacatatgtatacgtatgtgtatatatatgagtatgtatatatgaatcacccatggcttatgtagaagaaaatgcatagaaacttataggctgctactagaaatgaattcttgaaaactagaaaatcatttttgtctttgactcagctctagaaaaaatactgataaatatttacttgttttgagttgcagcagtatgttattttttagatttaagccactgattgacaaggttagaagctcatgcttgtcttatatctaacagtgggatcctcagtgaatgttaatcttcatgtcaaagacagatcactatacaagctaaagaatttagcagtgatctatactcagtggtagctaattgagttgaaatgttattttaggtaacgatgagagagaaaaatcaggataggcccatattttgtcacctactcttatgaaaacttatattttattcatgcccagttgtatcatcaccactccttaaactttcttttttctcaccagaatgtcactatgtggtagctgcctccacacactgtcagttgacatacttacacaggggagaaagggacggggtgtgataccacagccatttcttcaat

SEQ ID NO: 44510 - DNA, 717 bp, Bovine  19866881103774
  misc_feature (1)..(1): n is a, c, g, or t
ntggaagaggtccgacaggttgcgcctccacggcaggtaggcctcgaacacatccatgtcgcacaggaagactgagcgcaccaggtcgcgcactgccatgtgcagcgccaaggcgctgccctgcgacagggcggcccacacgtgccacgcgggctccatcaggtagaagacatcggggtgctggctgaagagctggcccacgaaggacgagcccgagcgccacgaggacagcactagcacatgcacccgctcctcgctgctggccgcaggcggcagtctgggccgggagatcaggaagagcaggaggccggtctgcgccagcaggagcgcagtcaccgccgtgctggagacgcgccgcagccacatgccgccggccggagacctgcagagggagcaggcagtagcagtcggggatcaggggccacttgcccatcccacatcccacatcccggtctggggctgccggagagcagctctggaacttgcacaccgccccagggagatcaccccactgaggacctcccaagtcaggagtgtgacttgaaggcatgagcagtctttgcagagccaaacgccagttgcacaagactatgggcaatgttcttccctttgtctctctttctctcccctagcccttttctttctcagggggaacatatatgtaaacccggaagtcctgctttttgcttaaaattccttataggggagcaattttag

SEQ ID NO: 44511 - DNA, 1046 bp, Bovine  19866881127085
  misc_feature (1)..(1): n is a, c, g, or t
ntgaaaagctcagattaactgacaattttcctacttcagaatttccctatgtatttttctccaatgacctttctgatgacaaagcctgaaatgatagtcaattaaatttatatcccaaggcacactataaatttgccagaaccaaaatgagtgcactgtgaagttcatgaaatcagctcctggtaccagggagtggaggtagatagagaagaggtggcaggtcagtccgtggtggtcaagctgacactgttagaatgatgctcagatctgcaggatctgcatgaggatgaagggcaaagaaagccctcaaagctccctaatagcaagcatttaatatcccaatttgtttcaatatcagttcagctcagttcagttcagtcgctcagtcgtgcccccatctttgcgaccccatggactacatgcagcacaccagtcttccctgtccatcgccaacaactgcagtttactcaaactcatatccactgagttggtgatgccatccaatcatctcatcctctgtcatccccttctcctcctgccttcaatcttccccagcatcagggttttttcaaatgagtcagttcttcccatcaggtggccaaagtactggagtttcagtttcagtatcagtccttctaatgaatattcaggactgatttcctttaggatggactggttggaactccttgaagtccaagggattctcaagagtgttttccaacaccacagttcaaaagcatcaattcttaggcactcagctttctttataatccaactctcacattcaaaaatgactactggaaaaaccatagccttgactagatggacctttgttggaaaagtaatgtctctgccttttaatatgctgtctaggttagtcatgcgttttcttcaaaggagcaagcttcttttaatttcatggctgcagtcaccatctgtagcgattttggagctaaaaaaaaaataatggctctcactgtttccccatatgtttgccatgaagtgatgggaccagatgccatgatcttagttttctgaatgttgag

SEQ ID NO: 44512 - DNA, 1594 bp, Bovine  19866881177621
  misc_feature (1)..(1): n is a, c, g, or t
nagaactcccagatttgcctgaagaagaatttgaaaaagaagagatcaaggagaatgaagcagcagtcaaaaagatgcttgtagaagctacccgagagtttgaggagattgtggtatgttaattagaaatcactttttccctgcgtaattgcacctcactccagtactcttgcctggaaaatcccatggacggaggagcttggtatgctgaaggcataggtcttttctcacataacattctttgcaatgtgcctaaatgtagtggagcatggaggccctaatatattcatactgcagtgttttttgagtgcttattatgtgaaagcattggtaagcactgaggatgtagtgataagcaaaatacaattcctgaccttatggagcttacaacttgagagggaagtcaaatttttaacaaataatctaatgcatacatgtatactcatatatatgtgcatatatatgcatatcggagaaggcaatggcaatccactccagtactcttgtctggaaaatcccatggacagaggagcctggttaggcctgcagtccatggggtcgctaagagtcggacacgactgagcgacttcactttcccttttcactttcatgcattggagaaggaaatggcaacccactccagtgttcttgcctggagaatcccagggacgggggagcctggtgggctgccgtctatggggttgcacagagtcggatacgactgaagcgacttagcagcataggcatatatttttaacattcagtgtagcttctaatgttctttggaataccatggttatacatacacatatttatatgtatacatgtgcacacatacacacatatataccctatactcacactcctggttactctatggcatatatatatgtgtgtgtatatgtatatatgtacacatacatctagcatgactaaatgtaagaaggaacataacacattagaggaactgaaggaagtccagtggaatgaaagggaaaggaggtggtagttgggagagaccagatattttaagagtaagtgtttgtgacttcgttattatgaactggttctattcttcactttgtctaggtggatgagagtcctgattttgaaatacacataacaatgtgtgatgatgatccatgcacacctgaggaagactcagaaacacagcctgatgaggaagaagaagaagaagaaaaagtttctgcaccagaggtgggagctgccattaagatcatccggcagttgatggaaaagtttaacttggatctatcaacagttacacaggccttcctaaaaaatagtggtgagctggaggctacttcctcctttttagagtctggtcagagggctgacgggtatcctatttggtcccgacaggatgacttagatttgcaaaaagatgatgaggctactcgagatgcattggtcaaaaaatttggtgctcagaatgtagctcggaggattgaattccgaaagaaataattggcaagatagtgggaaaaaaagttgggcagataagacattaacatttttttgtgtgaccattggacttcagaaatttttacattggaaccgacactaatctttt

SEQ ID NO: 44513 - DNA, 1359 bp, Bovine  19866881220679
  misc_feature (1)..(1): n is a, c, g, or t
nccgcacgttattcacagcaggtttttcagtgtcagttttgaacacaagtaaaagcaaagtaatttctcctccttaatttgtatttaggaagaagatacgcacacacacacacacacacacacacacactactcaattccaaatgtctatctgctatgtatagcagtttcagctttataggtgggaaccaaatgtttactgtcccttctccctctgtcctcagagtcctgcccagtgagagctcatatgcagatcaaccagaatcctcccacaaacctgtcattttacccgtattgttttcataaatttgctacctcccttggtgaaaacgtatgattttcttcttcagttcacctgaaaattgcttcttcaggccttcatttggaacagtatagatttgggtattgtcagcggttcagggatatatttgaatgaagtcacactccctcgatctagggcaatgtcatcaatcacttgtgtctcaggggtttgttttgtggccccatagatctttggctccaaaatgagataaatccctcacttatgaacagggtctgcagctgcacttgatggagtctttctgtccgtttctagatgattggaccaagggtgttcccagatgaagtttgtatgtgtggacgtgttcactgaatgtatagctttttcctaaaagcttaagtattctagcaaaagagaattttatctaagaatatctatgctaggaattttatttaaattttatctaagaaactaagggtcaagtttaagaagaaaatatgaaaaatttgtattcctcctcaagttaagtgtttgaaaaaacacagaagagaaagttccaagtgtggacaacagttctagattgagtagatttgtgctaagcacaaaaatttcaattatgaaggaaaatcgcattatccagtaaaataactttttaaattatgatggtaacatagttcactctatgaaaaaacattcagaaaagtagaaaattccaaaatattggcaaagaatgtgtccattagtttctttccttctcatgtcatttacatctatatgtttatataaacatacctttatatgtttatataaaatccattcttacattatgtaatagtaatactaataagtaatattaagcactcagcctaacgtgtaccttccaattactttctcattcaattctactgaaaaaaactgtaatgcatgtattattacattcattttatagatgtgaaggctaaaacttaaagtggtaaattttccaggacacaaatttactaaggtttggtcctttgcctatgcacaattttgcatcattggctctttcaatctgcactttgcaactaacataattatgtt

SEQ ID NO: 44514 - DNA, 708 bp, Bovine  19866881273884
  misc_feature (1)..(1): n is a, c, g, or t
ntccttgaatttttagcttcataaatttgtgattgaatattctggttctgagttaatggtatgagggaggatttatttaagaccttatttctaatgtaagtatcatccaaaataatttggcagagatctctccatccaggttttattagagagaagaaaagttttaaaagttgtatttggcctaaaatctctaaatgggagaatttcccccttcttgatgaatgatcaacaagctcagcaaatatgactttctctttcttgtacttcagaggaaaagcttatctgctggtaaggtctgttcaagactttgtgtcatattgttaggtttggggacacaaataagccagtaaccagatgtttgcttgggcacatcccttgagtgcactgaagcactctgatgtgggaagaacattagagatgaccttactggcacaagtcaaatgctcatttacacggaatggccactgtgctttcatgcttccattcactattaactcatttaatgggtgtggtgcctctaccactctgaaggaaaaggacttcacttgggcgctgtgctgtgcctcagtctctgttttcatttgtgggtgtaagaatgccgtgagtcaataaaatgtgcatgttttcacctagtcaaaatcttgggaggctgtcaaagtagcctttgcaacaaacaataataacacagacccacttgcacacacacaa

SEQ ID NO: 44515 - DNA, 1280 bp, Bovine  19866881274241
  misc_feature (1)..(1): n is a, c, g, or t
ngagaaattaaaggggcatgttttggaaagcagctagaccatgtatttacagatccttttaagattattttccttttcctaattatattgtgtaccagcatcattattttggtggtttggtagtttcccaatttttacagagaaccatcaggctctttatgtaatttctttatgttttgttatgtgaggagatgacgcgtccctcagtcttctttaccacgtaacaggatgcacagtttcttcctcttcatatcaggtcatccatttattttaactggtggctttgctatcttcaggaatgctctaatcaataggcacatattcctaacctttcgacagtttaataaccttatggctcaatgctattattagcatgtatccctttcagaggccaattatcccagcagatgattaggttttctctgaagtatcccaggtggggattttcccagcctgctttgtggcagtcccccaggtacctcacaatcacatcttctctgtctggcgcttctgtaaggtactgccaggtgcagcttactcttccagaagaaagattagcttatttgcatccatatgtgcttcgtcatgtggaaggattggcagggaaaattgctggtggtacagtttcttgccccagggtgaggccaagcctcccactgtgaagtccagtgggcatattttaagtaactgcctgccaaagagagggctctgctgttgcactgttctcagcaaaaaagtacatcttttctggaagagcctcagaatttacagaatttggttaagaaaattgaagaaagtggtggttttggggagaaatatgtcaccatgtgtgtttcatagaagacccaggtgagtgcagccagtatgtcttccagtgacatatgtcttgggaataacgtttttgtgattgttgttgttattgttgttgcattagatccatatcctttagtcagcccctttgttagatcttttcttgagagcccatcccatggggacccacgtggtactaggttttcacagcatcttgaaagccacacatctactgctatgagctggctgggaagatttccacagtatctggccatatgggagagatttcagaatgtagatgctgttacaaaacaatgtatggtgttggttaccttatattaattcccaaaatgttcatcatgaccattctgtaatatcacatactatggtgaaaagtcagggcctgtgacagaaagggctcaggcatgaaggcagtatccggtttgatttcagattcatctatttctgca

SEQ ID NO: 44516 - DNA, 811 bp, Bovine  19866881406035
  misc_feature (1)..(1): n is a, c, g, or t
nttttaaggaattttgtttcatctttgggttgttttaggtacagaacaggagccttctttagagtatcccaattgtttatactgttgcttttctcctgaaataatgccagtgtgtttctcccaattactccacgtccctgttcccactttgacttaagcgtgagcactaatgtgcacgtgaggtgcagtgggagagcccttcagtcttcaccttggtgatctcacgtgggctctgattcagggtgacggtcatgtgacagaagaaatggagggggtttgagagacagcagacttccatctgctgctgtttccttttttgaattaataagggctaatgtctgtctagaactgttgaagtaaattttaaccataacgctcagcagccagagtttacagaaagcccagtgattttttccttggttctttatgccttttttattagattttgtttctctccttttcttccacttgtaaacttggtgtcgtcccttggtacagggtgattaaggaagtggatgccacatctaaagaagccaaatccttcttcaagcaaaatgagaaggaaaaaccccagtctaacgtccctccagcagtgccatcacttcctgccgggtcagggtgagtagtctagtctcaggccgagacgcacctggcacgttggagaagctgttttcacaacaagggcgccttgcctgtagctctcgtggctgctttcctgagagcaggaattctgctgctgttctgtctttgctgaaatacctgccaaaatggaggatgcagagaacaatacttgcagaatggaggatgcagg

SEQ ID NO: 44517 - DNA, 1226 bp, Bovine  19866881407112
  misc_feature (1)..(1): n is a, c, g, or t
natgttcatgctttgtaaaagaagttttatttctttgtgaccacgtaagttctaaatgcctatgggaggaaacgtgtaattacagaaacctaaagaaaatgagttgtctgtaaattgctctcttggcattctgatacacatccttttaattttttgttgccttttttttttttttttcttgctgtcataaatgacatttctatcaaccgtgcatataaatcctttctgttacttttatttccttaacatagagcctagaaagaaattacgatttcaaaaagcttatgaccattcttaaggattttaattcatctcgccaaaccgaatcctggaaagaatgcactaatttatagttccagccgcagagatttctttttaggtcgcaccacggactacaagagatcagaattctccatcttgttcagatgcttggactttgttatctgtagagggaaataacatctttctttactgaaagataccggtaccaggacctgctatcaagcctgagtctctgggttgaggctggagaagcggggagacagccagctgcaggcccagctcctgagggccagctggtgtcccggcgcctcgcagcccagctagtacgcgggggccctgacatccaggtgacccaggcttggctggggccgagaccaggggcttgggaagcagtttggattcctttggctgcgaggatgccaccgagagcgagcaggggcaaaattaagattcggtttctttcacaagggccttttgtgttcccaggagcctcccttctctggggattgattggagggcaaaactcttggtcaacgagtgggatgagaagcgacgcggcgggcgccccccgacaccccgcgccgagccgcgctcccccgggcccacctgcgccctcctctcgggggctcgccctcctctccggggctcgcccgcgcccgcccggggcggccgcccctcccccgaggcgtggcccctcgtcccgtggtgggcaggctagcccgagcccgggggccaaccggctctttccttcctcccctcccgccccggcgcccgcccgcccgctccgggaccgcagccacgtctgaaagcgcctcattgtgcgcgctccgctccagcccgcggctccgagcggccgcacaggtagagcgcggcgcggggccgggcgcccggggtctccgaggctgcttggtgtcctgccccccacccggggacggctccctcaa

SEQ ID NO: 44518 - DNA, 2143 bp, Bovine  19866881487049
  misc_feature (1)..(1): n is a, c, g, or t
ncaaagaattgatgtgtttgaactgtgattctggagaagacacttaagagtaccctggactgcaaaagagatcaaaccagtcaaccctacaggaaatcaatcctgaattttcattggaaaaactgatgctgaaactgaagttccaactctttggccacctgatgtgaagagcctactcattggaaaagtccttgatgctgggaaagattgaaggcaaaagaagaaggaggttacagaggatgagatggttagatagcatcattgactcagtggatatgaatttcagcaaactcttggggatagtggaggactgagcagcctggcgtgctgcagtccatggggtcacaaagagtcggacacgactgagcaactgaaaacaacagtgaccgttgttggcatgtggcatatgtacggttacgcacagtacgtgtattataatccgcttccttggggaagagtctctactatgaaccctgccttcagagctcatgtcacaatgcttaatttcatatttgcatgaataattattgggtttccctggtggctcagatggtaaagaatctgcctgcaatgcaggagacctgagttcaatccctggggaaaatcccctggagaaggaaatggcaacccactccagtattcttgcctgggaaatcccatggacagaggagcctggtgggctacagtccatggggtcacaaagagtcagacatgactgatagactaacacacttatttaattattatacgaccaccctctactggaagcttcacgagggcagggatccatttgcttcgtttctgttcttcagcccaaacccttggaatagcatctggctcattcaatttgctcaacaaacatttttagaatactgtattttgtttaattataatgatgggtgcttttataattaacataatgatatttgaagcaaatgttcaacaacaaaaaaaaaacctttgtgcatgaatatataatctgagaagatcattattgtccctcttgatttccctagacactgattgcactgaagttttatttcatgtgtttagtaaagtatacttagatatgctacaatttctatttgatcatatgcacctgtacaccctgataaagatccagtatatgtgagtgtattatacacagatatgtaagtgaactctttaaactattaatttaaatcagtggtctcatgggcaattttgtcctcctccacaaagggtatttggcaatgtgcagagacattttggttgtcacaaaccagagacagaagctactggcttctaaagagtagaggccaggaatttgctaagtatcctccaatgcacaggatgtcatctccccctgaaaaataactattaaaccccacatgttaatagttctgagactaagaaatcctgacttaaaccctgacctttaaattttaatacagaaaaagtataatgcatgttttctccaagttaatatgtgtgatgtaaatcattattcagaataagtaatatgttggttccttttgttggaaatgaaatgtttagcttcatcaactgcagcaatccataaagtctcaatgtcacccttgaaactgggagaaaatggagtaagtttatatttctagcatgtctcttagagctgggctcctcacgctgtgttctcactaagctccacgcacttctccatggtgtgcaggacccccggccttagctgctagggtcagctattagaagacagtgaatgggagctactgccccaatcccagagcccctctagaatctgcccctataaatcctcattcctggtgtgtttaggtaagagctccctcgtcttctgcattagcagcaagtataattccctggtgtgcccagaatggacaatgtgaaagataaaatggtgttttctgttccctgggggagacgatcatttttatgatgctctaagctactcgattagccttttacaagggaacagagtaagctgttctatgtgtgcctcaagcggaaactcttttaaaacacatttacctaaaacactttgaaaactgaatttgaccattccttcacagccttggaggatttaataatttataggtctgcacattgaccataggaatattttgtcattgatgtttccattaaattatacttg

SEQ ID NO: 44519 - DNA, 835 bp, Bovine  19866881517225
  misc_feature (1)..(1): n is a, c, g, or t
ntgcacactgtgctattaatactaccctctgagaggcatgtgctcctttgggcctctttgtaatttatctccaaaaaaagttggagattggatcagaagaagcttaaagaacttgaactgggccccaaagtgggatttggatgatgaagggaagatagttaaaagcaaaccagaaggagcggcaaaatgggaagggaatagattgtatgcactagagtcaaagaaggatacaattactacgtgttagatagtctctgttttatatacacacattatttcatttagccatcacacagcattgctattataccaatgagaaatctgaaacaggtcctgggggctaataatccagttagaaaactagagcagaggctctctaaacatagcagtaggtgatacagttaaaaatattgtttaaggccagttatggaaactccttaatgcagacaggagaaaattagcctccccaccgccttatcacaaaggtttcaccatctacagaacacagagaaactaggccaccttgtccccaaaaaaacccctgaagtcaaagagacaggggaatttctgcttgaaattcaaagtttaaaatcacagtgaaaaaaaaaaagttacataaaccgagaaaaaagtctgaaagcatataatgaaatgcaaactgtggttaccacacaggaatacagtaatggagaatctttgtttttgctttcttataatttttaatttatataaaatatacatgctatttttattttgttatgagcttaaaaatattctcagccctatgacagaacaaaagctgcacccccacccaaaagataccacacagataaaa

SEQ ID NO: 44520 - DNA, 1818 bp, Bovine  19866881551725
  misc_feature (1)..(1): n is a, c, g, or t
ncaaagtttgggttttatggtgatgggattagtttccaggttgtctctgaccaatcattctgactcaggggccttcctggtggcacatgcattgctcagccaagagggatgtcaggaggattctgggaagtgacagacacttggcatctccttttgacctttcctgaattcttctgtttggtggtagcttgttagttctgtttcttaccagtaccttctgtcctaaaataactcacacaaaggctactatggtgcctggccagggtaggctgtttgttcgtaagtttcccctaacactttctgaaaccacccatgggtggatagggtcctgaacaaagactctttggtttaatattcagtcagagggacagggttccctgaggccggctgttatgtataaacaatatccttttaatgaacaaaagcaatgggaagcaaaagttagagaaacagatctaacatgaagtccgttattccctgtaacacccctagttgtctgtcacctagtcttggggtgatgatggtaggggaatactggcctgagtgtgagtgcactgtgagagccacataaaggaggagaatgggctttggaattgtgttttgcaaatgaaaggcagagtttggtagggttgttgctgtttctaggaattggtaaatcctagaggaatgtctttaccagtgtcagcaaggccccagatgtcaaagtatcatgacatacagaaaacatgactaataaaaggtgcagtagtgttgcaggaagggcagccccttccagggcccgaaactgggctcttgtctaacacttggaattgaagtgttcaaggagacacgtctccttttgacctttcctgaactcttctggttggtggtggcttattagctctgtgttccttagcaggacctcctgtcgtaaaacagctcatgcaagtggttactatggtgcctggccagggtgggctgtttcagtgtgcttcccctaacagtttatatctccttgcagtccaagggactctcaagagtcttctccaacaccatagttctttgccgctcagctttctttacaatccaactctcacatcccatacatgactattggagggctcttaatagtggtgctcttaatagagctcttaataatgagggctcttaatagacagtgaatcacagttctaaagaatggtttgccatgctttgccaaaattatcatttattgtaaccatgatgcaatatttatttaattaaagcctaatgaagttacattgtatattatcagtagatcattgagttacaggggaatacgctttcaacaattttgtgtggaagtgtccaaaaagaagtttgtttttcttaaaattagatactctacgaatgcgctattgaaaattttttatcttcaaggcagaatgttggtaacgctgcccctgaatttgtatttcatgctatgtaaattaacacctgaacaaagaagaaatacacggatggatatattttcatgcatatacccacagagacttcaggcttgtaagagttttcacataattggaacccaggatgtgtgaaaatatggataaaaaggaattttggattccagacaaaaaggaaaagacaaagggaaggagtatttattaagtcagtgggagaacttttcatccagactcattaacataactactaaacttacgctaaaacaggttttttcttttgttaaaataaataccaccattggtattgagaatcttggaaaggatcccatgcagtggtagaaaaggatgagaaggaaaactaattcattttgcagaaaggtggtcagtttacagc

SEQ ID NO: 44521 - DNA, 1099 bp, Bovine  19866881618099
  misc_feature (1)..(1): n is a, c, g, or t
nctgttttgtttctctatttattaacatgcaaatgagattctgaagtttaatattgtgttttaccaagagccatagaaacgaattgagaatgaaaatgagtcctactgatgaagattcctgatgagtatataaattaatgaaaaaatatgatttgattcaacaaataacacatcatatatatgtatatatacacacacacacacatagagagaatgtgtatgatttcttgaaccccaacaaatgaaataaagataagtagttacattaaattttgcatctcttttcatgggccaatcctatgaaatgttttattactcaaatggagtggtggtaaatgttaaactgctttacttttaaaaagaagtacaagatagaaacttcattctaaggtcactgttttgatggcagcattctcacaggagggaccactggctcagaatctggactagctgccttagtggcgaggaaagcccacttgcctgtagtaagggattcagaactgaaaacaagagaaatagtccaatgtgacagtaactttcactataaggcaaataaaagtaacagcaagaattatctacacaaaagtattcaaagcccacaaagttctccttgtaaactgagtaagacaaggatctcagttattactccccaatgatagtctcacactaagaaacacacaaagttatggcaactgcacccaataaaaaagaaacacacatagaggaatgtatcaaataatatcagataaaatcttttgaataaactcaaactcacactgcagtgttaggtatttataatacttatcatatagcaaaacacacaaacacacaatccatttgttctgtccagtgttcaacgtactcaaacattaaacaacagaacaaagaataagaccaaccagtaaactcagaagtggctgagcgcttccctggtggtccagcagttaaaactccgcctgccaatgcaggggacacacgttcaatccctggtccgggaagatccacgtgcgttgcggcagctaagcccgtgcacagaaacgactgagcccgtgctctgcagcctgtgctctgcaccgagagaagccaccacagcgagcag

SEQ ID NO: 44522 - DNA, 967 bp, Bovine  19866881643310
  misc_feature (1)..(1): n is a, c, g, or t
natttaacatacagaacacaatggaaaaatgaaggtatagtttgtgtgcatgtaagtaggaaaatgccacacaactctgtttgaagtcagcacttctttttcagtaactgagcatcagatttttttatcctagaaaaatggaactcttcttgggtgcttttcaagtcagtcaataccacacacactgactgaacagcatctatgtatgtgccaagctactgttgctggtacggtaaattattctatctctgcaacatgttatttggagggaaattggcactatttgcaaggaactttgggtttaatttgcatctaaaaattttaaatacccataattgtatacagccaggaacattatccatggttaaattgcatattgttcctattgttgctaagatgtgaggacatttaacaattactcccttatgccacatgacgttgcatacccgagagcaaagatcactcagggctgaggacttggcgctgaagactttaggggtcatgatgaaccaccaaacagattaacaccctttcatctcttgcccactgaatttccctttggagagtgcctcctgcccaggcttttgcagactcatccaaggactgtctggctcaattatcttggtcctagctgtctgtaagccgaatcatacttcagaggttcaaagggctctggggctatccatcaggccaattccatttcaaatataaaaaaaatcatgtgcagtctgatcaaactgacattttctccttccttatgtgtcagtagcacaaaagctgaagctccttccattttgagattctgaactttgttctccttttaatgtaacagtccttccactaaatcctttcttgggctcagtggctggttctattgataatattctgaccttgtatcccttttcttgttatgaataaaacagttattcaaaccctaatgctgagaaattttttcacagttctccag

SEQ ID NO: 44523 - DNA, 735 bp, Bovine  19866881880250
  misc_feature (1)..(1): n is a, c, g, or t
ngatggtggtggctttggcctgtgggcccggtttgccatctctcagctaaaataagccccccaggccacctgtagggagagattttctttagggttgctataaggtccagctaactccaaggagtatcagccactggattctctccaatgttaagcgagaagacaagaaagatgcacagggcctgtgccttcaaccagatggagtggtgggcccccctcagcagtctcagtgcctgtcccagttcctgtttatgctgccagtcactggtccctcctactgtctcttcctggggaatctgccctaagtctcatcagaagctgccccaagcccagggagggcagtggtcctgagaactcacatttgggtccaagctctcctcctccgcagccacgccatcttcagcactgtgattgctggcggcggcctgactcagctgtttctcactgagctccttctgcttggcctccttttccgctattttcttctcagctttcaggcgtctctttagctcactgtcaggaaggtgaaagtgttcaatgtaacagatgcctgaagagtcccctacattctgccccgtcaccaattatcaaaaatatcaactgcccagagaaacacacttgtccagttccacacccccacggttatctcttagctactaaactctatacatgaaatagagaaaaaaataaacttagaataaagatgtgaaagatctttttctcagtctctatttt

SEQ ID NO: 44524 - DNA, 1091 bp, Bovine  19866881894989
  misc_feature (1)..(1): n is a, c, g, or t
nctatgatgagataccacctcacacacactgaaatggttataacttttaaaattggcaataacaaatattgacaaggatgtggggaaattggatctttatgtattgctggtggaagtgaaaaattgcacagctgttgtgggaaacagtttggctattcctcaaaaaagttacaagaagttactgtatgatagcaatttcacacctaggtgtatatactcaagagaaatgaaaacaaatgttcatagcagcattatttataacaaccaagaaatggaaacaaatggtcatcaacttatgaaaggatagataaaatgtggtataagtagctatacagtgaaatatggttcagttaaagggagtgaagtactgatacttggcactgaatcttgaaaagtttttgctaactgaaagtagtcagacacaaaagagcacacattacatatcattttatatgaaatgtccagaataagcaaatccatagagacagaaagtacattagtagttccatcttctccggattaatgaaatattctggaattagtcctgatagttgcacaatcttatcagtgtactcaaaacacctgaaatgtacactttaaaatgatgagttttatagtatgctaattacatatcaacaacacaatgaagcaagacacaattaagtcaaatattgctgctgattccaaaaggctggccttaaacatggggcaaacaatctacaccaagaatgaacaggacaccagcactgtggctgctctgggtttgacacatattctcaaccttttcaaagcccaatagtgttgccaagaaggcattttcattttaagcttcataataagctgctccattgttaccattattccttgcctggcatgtgattttattttatctccacaacaaagtaattcttgatagatcgcagtaatttcaatccgtgaggatctttcaactgtaggagtgaattagaaagatatttttatattgcctatttgagataacaggtcctagcaccacgcttcgggcaaaatacatcaaaagaatgaactgaaggttaagtttccttttagatcacaatttttataacatcaca

SEQ ID NO: 44525 - DNA, 1205 bp, Bovine  19866880155748
  misc_feature (1)..(1): n is a, c, g, or t
nttggttaaaggacctttcttttaaccctctaaaatgtctacaaacaataaatgctggagagggtgtggagaaaaggaacgtgcttgcactgttggtgggaatgtaaattgatacagccactatggaagacagtatggcgattccttaaaaaactaggaataaaaccaccatatgacccagcaatcccactcctaggcatacaccttgaggaaaccaaaattgaaagagaaacatgtatcccattgttcattgcagcactatttacaatagctagaacatagaagcaacctagatgtccatcaacagatgaatggataaagaagttgtggtacatatacacaatggaatattattgagccataaaaaggaatgcatttgagttagttctaatgaggtggatgagcctagaacctattatagagagtgaagtgagtcagaaagagaaagagaaataccatattctatacacatatatacggaatctaaaaaaatggtactgaagaatttacttacaggggcagcaatggagaaacagacatagagaatagacttatggacatgaggagaggggaggagagggtgagatgtatggagagagttacatggaaacttacattaccatatgcaaaatacatggtcaacgggaatctgctgtatggttcaggaaactcaaacaggggctcctgtatcaacctagaggggtgggatggggaggcagacgggagggaagttcaaaatggaggggatatgtgtacacctatggctgattcatgttgaggtttgacagaaaacaacaaaattctgtaaagcaattatccttcaataaaaaaataaattaattttaaaaagagagacttggaatggagaagacagagatattgtttaaagtagtatgactgtagttctctaaattggcatcaatgaaatatatcctaaataccataacagatgcagatcattcatcacatttagagaatacattgttcaagggaaaagtacatacaacttttacaacagctccaaacatacttatatttaccaatacatggccaggcctgtggcagataatcaggtgagtatccagtgaatggagaaaaatgacagattgattaggctccaacagctgctttgaatcaaataactttggacatggcccatttcaagctaatggtggggaatattattctttcataaatcactgtat

SEQ ID NO: 44526 - DNA, 1699 bp, Bovine  19866880507878
  misc_feature (1)..(1): n is a, c, g, or t
nttttaatttgaaccaaaaaaactgaagtcagtggtatttgtgtttaacataatttatttccacatctgagtgtccaaaatgttttagatttttgttaaatatatcattgttttttatatgctttctcctttcagttttttactaaaaggaaaatgtaaattaaaatttaaaaatgaaattaaattaaaaatttaaaaagaaggggaaattaaatcatgtaaaactccaacatatatatatatatttgtccttttgctcttctttttctttagttctgcttgggaatttgaaggtccaactatcatctattgtccttccagaaaaatgacagagcaagttacagctgaacttaaaaaactgaagttagcctgtggaacataccatgcaggactgagtattaacttacggaagcaagttcatcataggttcatgagagatgaaattcaggtgtgaagatggatcgtcatgactgtcttttccccatactggaaacagatatttctataatagctatttatgaagtctttattgaatatctttgttgtgttccccaacttccttgcccctgcccctccatggagggataatgttttttgttttctaattaattttttttaaagtgtatcttatagttgatttacaatgtattgttaatttcaggtatacatactatatataaaataggaactaataggaacctatggtacagcacaagtaactattcagtactctgtaatgacctatatgggaatggaatctaaaaaagagtggatatatgtatacctgattcactttactgtacagcagaaactaatacattataaaaaaaaaacattgtaagtcaactatattaaaaattaaacaaaaatttctttaaagttggaattgaacttcataatttaatcctgaaatattatttgtttaaaattgcagtggtaaagaatccccctgccagtgcaggagacgtaagagatgcgggttcgatccctgggttgggaagatcccctggagtaggaaatggcaacccactccagtattgttgcctggaagattccatggacagaggagccatggggtcgagttcaacatgactgagcacgagcacaaaaatggaaaaacagcaatgtgtattaaaaaattttaggtgtacatccatgtgattcattcatgcatatagatttgagtaccgttttgatgagcataaagcagtcactctgatagaattggtgtagaatatgggagatagataggtaagaaaactgttgcaggcaagtataaatggcagcctgtacatagaatggtgtttaggttcacagaggagggaacactagctgttaagatagattgtcaaatggagttgtacacccaggaataagcagtttgagtagaatctgaacaagtgaatagaagttcatcaggtatgcatggctagggggtgatgaaggataaggaattgattatacaactcctgaaagaaggactgatatgtgcaaggcactttggcataagagagcatcctgggttcaaggaattgtgagtagcttgcaatggttggagaaaagggaagttggagtaggaggacgcagagtataggtaaatggcaggatctggtgaagacttaggaagagagttgaattggttgtttggccaggttagagaggatcttaaaacttgcagagaggcaagctggagttggta

SEQ ID NO: 44527 - DNA, 1959 bp, Bovine  19866880512309
  misc_feature (1)..(1): n is a, c, g, or t
ntctttactacttggcttctttccctgaatctgtcttcgtgttcatccatattgcagcatgtgtctgaattttacttctttttaagactgaataatattccattgtatatatgtaccacatttgtttatccattcatctgttgatgcatgttgggttgtttctacatctggggctaatgagaataacactgttaaaaacactgatccaaatatcttagtccctcctttcggttcttttgggtaaatgctcaaaggtggcattgggtcataaagtagtttcattttctgagaaaactccatatgattttgcacaacacctgcaccattttatattcccaccagcaatgcataagggttccagtttctccacatcctcaccatacttacgattctctcttttttattcaatcgtcactgtaatgagtgtaaaatgatacttcattatggcttagatttgcattttcctgatgattagtgatgcgtgggccctgtatgtttttgtttatgatgtgtctctctgtatcagtttgtcttttttttttttagagctccttctacaatgattttgttataaatatgttcttttggaataaacaaatatcgtcttcaagactatcagcaaacttgttctaaagtatcaaaagagtataaaatagataactaaggagaacctactgtttggcacagggaactctactcaatgctctgtgataacctaaacgggagggaaatcccaaaaagaggggctataggtatatgtacagctgatccactttgttgtacagtagacactaacattgtaaagcaattatattccaataaaattaattaaaaaaaataaagtatcaacagaggaaaagatagaaccgagaaccactcagaggtagagataaatagcaaagatacctgcatggcatactgagtgcctttccctaaaaaagaggaagagttaacaggaggttaacagtggatatgatatttctcattagcctattaattacaataagttttgatttttgctaatttgcacttgttctgtaaactgaactgctcctgtcctcagtactaaggagtagaagacgctccgtctcagcatggtcccagcacaaacaagaaagatcttgactcttaactctctgttctaggacaaaaccgttcaccactcttagtgtagtccactcaccagggggtgcttttgacttggtgggcaggtatagctcccctgtttctttccaggaggatttcatgcacctcagttattttttgacagttttgaggaggcaattcagctataggcacatcattccatccctttatttatttatttaaatttaattttcattttatattggggtatagttggtttacaggggcttaccaggtggctcagtggtaaagaatctgcctgccaagcaggagatgcagattcaattcctgggttgggaagatcccctggaggagggcatagcaaccctcttcaggattcttgcctggagaatcccatggacagaggagcctggcagtttatagttcatggggtctcaaggagtcggacataacttagtgacgaagggacgacgatgagttggcttacgacgtgttagtttcaggctacagcaaagtgattcagttataaataaacatatatccactctttttcagattcttctcctatgtggttacaacagaatattgagtagagttccctatgctatatggtaattcccaaagaaaacatataccacccatttcctgccctttgctctttctctttaagtacgatcattagggtaggcctctacctggttcggcagcagcagccacctgcttcagccagcaggaaagacgatgagatgggctggaccagcttctgacaggtagacaattaacccccaagctcagctccgagatgcacctgtgtatcactggcaaagcgaagaagctcaaatgtgtgtctgg

SEQ ID NO: 44528 - DNA, 1204 bp, Bovine  19866880516519
  misc_feature (1)..(1): n is a, c, g, or t
ntttcacccagcgttaaatttcattcagttcactttttacaaagcctgtgtttgccaggatttgcaaaatttcagcttcttgaagacaaactactttgactttgtacctgacatgtacagagcttatacacttcagggcactcacgacacgacgacagaggcactatgacagtaacggtcaggaagccaatctgtgttaatgtaccaccaaaaagaatatacagtgctacatacacatttttcaaagtacaacagaattgaaagtacattaaaacaaaatgtaactacttccttttactaaaagaaacattacttgagctatattcagaggaaaatacctgaataaaaactcttcaatgtgtttgtttcaataagacatttctactttaatccttggcgttccttagctcagtgctattgcagtatttaaataatacatctactatgtaaatgtattacagctgcataaatatttaaaatgaacactggaaggcagggcctaaaatagagacagaatctcacaggattccaaatttaattactttttaatgtatgtagggacagaaaatgctcagattttctgtcataggtacaaaaaataaaataaaataaactggtataaattttattaaaatcatttcaagaaaagaaaaattaaaatcaagataatctttatgttctgtgagtctggcaaagtcaactaaaaacatccagtattggtgaaggtaaagaaatggaaacctctgtgtaaaaactggtcccccaaaataggttgggcaataggcaggctattgaaatttttttaagtatgccttatcttttgtcccatcaattatactttaagaaaacaacataacataactacgcaaatatatttatgtacaaggattgagcattatttataaagcttataataatagcacatagcaaaaaaattaaatttctctctgtggagcatcagaagaagtgttttaaagtgtagtcatacctggaataccatatagctattagaaaatgaactaagacagcatcagggccccagggacagtggctggccactgggaggaatcctggattctaaggataaagttgaaattgctgatgcttccaggcagaaaagaacaatttactggcaatcagaaggaacaaccagattgtcatcggacttcctccaaggaacacctaacattacatcactgccaca

SEQ ID NO: 44529 - DNA, 2935 bp, Bovine  19866880655390
  misc_feature (1)..(1): n is a, c, g, or t
nattagagaggtctgggaatagaagcacctgtctggttaaggaacaggatgtgatcctatgtgattgtggctgtctgaactaatgtttcttgattgctttctcaaattcagcgtcctggaggaagagggaattaaaaagcaataagcttttgtaagacacatagaaagcagtcaatggtcaaacggattattcaattaaaggataattttgttggtttaagtttctaacctctcagttctacagagcagccagtcttggcttcttaatgatcttccatttgtcaacagcgatagaaacttctgagccgataggagtgtttctgtggattgagcacgccacccagtggccaatgtggaaattgcagagacacgccgcgtaaacagtgcaaaagagagcttttcatccaacagtgcaacagtcactgctaattaccacttccacctcccagaccagaaaccccttctggacttgactgtgtttccggctctcctgccttctgtgttgtgacgatcactacagcctgaattgattcttctgtccccattcatgtcccatctgcatccctccaacccattctccatgtcgctgccaaaaaaactctacaaacttgtactcctcgcatacattttcggagcgctatattagacaatgcagctaggcataatttgagaatattgcttataataaatataagccaaaccaaagaacaaaatgaatgtagatgataaatatgagtatgaatgtatatttatatatatatatacttacaatgcataaatacacacagacatacatagatacatcaaagaggagatctttctaaaaataatacaaaatccagaagtcacatggaaaagatcaatttgactacagacaagcttgctgctgctgctactgctaagtcgcttcagtctcgactctgtgagaccgcatagacaacagctcaccaggctcccccatccctgggattctccaggcaagaacactggagtgggttgccatttccttctccaatgcatgaaagtgaaaagtcaaagtgaagtcgctcagtcgtgtccgactcttagcgaccccatggactgcagcctaccatgctcctccgtccatgggattttccaggcaagagtactggagtggaaagttttgataaagaaaaataatgcaataaatgtttgggggctttcctgaccaaagatcagggagcatcccctttcctttggcacatttaaaacaaatacaaatataacctgtgatggaaaaattcagaattccaaaagacagatatcagtcagaatctactactcaaatgattaatatccactcaaatcattatataataatcaagtatcacaagatctgctttctcagaccaccattggtaggggggtgtttcctttcattcaactgtctaaatggtgtagaccttcacccacctattttaggaaggatcagctgacaagtttgtccaccaacaagccccatgtatgagaactgcttcctctaacccaggactgaagctacctgatgcccttttacatccaaattgatgagaatgatgagatgaaattataacttttcttacttgggtcacgttctcaaagagcaaaagacagaaaaaacttagaatatactttgttcttctgttcctttctcttctcgcaacttggataaattcacttttggcaatgaaagtcctcatgccttgttttgagaacaaaagtcacagcctatcaggcccctgtgtctccaggtggaagaaagaatgtcagacgtaaaaggtagagcaggagtcttcaccctggacgtgcaggattttccagcaaagtctcctgatgcaggtatcaaattatcaagtttaataatcacctccccacgatgcctgatggccccagcacaggtctgacctgactcaaccagccgctgacttaacatgagaaatcagagaactggaggagcccagagctgggagacctactagaggaagccaaggagtgcagtgcctgatgggaatatcttacaggatgcaggacaaggaaaccagtggcacaagatcagtgacctcgggcatatttatcaccccctgaaagcaggaatcatggcagagaaagtcccttcacaataagcacaaataataatggataagccttcccttttcaccacggccagtaactcacacacgctgcctttactgtgctggaacaaccacattcacagtgaactgggaacatggctcgcactctccctctctcaaggaagaaagcctgcagcgtaccagagtagttttgcttccacttccatgagcaactcagttcacacctgttactgctctttatcttccttgggttcacatagagaggatttttgtacctaaaggctctgaaatggccgaaacggaacatttactgaattaacttcactgcccaactgcaccctgagcctaaactcacttcctacctgtttccatctcaaatgctgccaggctgtgctgtaacagctccccagaaggacacaaggaacaaaacggacattttttaatccccagacccttcagcagtaatacaaacatgcaccaaatttcgacaatatgaatcccctcagagtgagtgctgagaaagaaattggactccagaagtaaaatcatcttatgtacgacagccaaaaaaaaatcagtccccaaatctgttcccctcccacattttcagtctgttttgtcttaaagaatctcacctcctgggtggattcaggcccctgagtcagtagctataggctaacttttacagaatgggttccttcaacacctccaagttgaattaaccagcctcacatctctgccttaaaccacttgtccaaagatcagagtaaatagcataaaagagacacctagcattagcactggatgggaacccatcgccaacaacatccctttcagctttt

SEQ ID NO: 44530 - DNA, 1301 bp, Bovine  19866880759504
  misc_feature (1)..(1): n is a, c, g, or t
naccttaatatccaccattgtatgttgccataagatctctttcttgaaaatgaagtgggaatatatatatttcatacaaattataattaaatagtgtatagatgctaaaggttaacaaacatagatttaaaagtcacctctgtgattaatttatgctcctaacaagttagttaacccttaagtctcttcaaccgtaaaatggggacaaataatagtagctaactcataggttgttgtaggcattaaatgactataaatgactatatgactataaatgacattaaatgactataaagactatataaagactagcatttagcacaagcctggcaaacaatacccagaagtgttagctcttaatattaaaactatagttttaatattaaaactataattttataagtctgccttaataattgtaatactggaggcttatgtttgaactttcttctgccaatgaaataacccaacatctgatagagctttctctctcgaaaagaaagagaaaaagtgctaacacagtgattatagagaataaaaatgtgaattctgtacctgtttttaggactgttactcccagaagaaattttatcatgtgctttgtaagaatacagctgatccaagttaaactgcttttaaacatataaagatccatttaaaaaaggagacgtttcaaaaatcttttaaatatgcagaaaataaaatacaaaatattacaatgataatttttcctctgactaaacatctcatcaaagaaatcagctgaaaataagctcatgaattatcagtttctaatgttctaaaggcagttggaaatacagtgtaatgtcccattccttccaaatctagagaatatgtggtctaaagaattcttagagacatggaaagagccaaagtcataaaaatgatttaattacattctgcatactttaataaagcagaaaagattcaccagaaaatttaattcatttgtccatcaccccatcaccctagtattctaattagtggaagtctgcctgtggataagtatttaatctgtaatagttacctaagatccaaaacaaagcaagaaaatctgtgtgtgtgtaactttaatgagaacattcaggaatcaagcttgttcttccatcaactaaaagtatcataatcgctaagaaaaaaaagactccaaaacaaatgagttatgaagtaggcataaaagaaagttacttgctcaaatacttataactgttctattaatcccagaaatcatatattgcatattttattctgttcaaataatttctctctccaaattttat

SEQ ID NO: 44531 - DNA, 4158 bp, Bovine  19866880896509
  misc_feature (1)..(1): n is a, c, g, or t
nttttctatttacattttctaggaaataggatgacatattatgtaatttttaaaattaatcgtactcactgacaaaaaatagtcaaaggtactgtggtctccaacctgaaaaatcacacatcagaatcaccagtgaaaagactacagcgtgccacaacctcatagcaggtgcattaaatcacaattttcaaagttggaggatctgaaattttctaaagtttgaaaggtgattctcatgaacaataagagtagagaaccactacattgattaagattcagaatatcaaaaaaaggaaattataatatcatagaatccaagattcaacatttattcaataatatatttaaatgcctactatgtgccagtaacatactgctactgctaagtcgcttcagttgtgtccagttctgtgcgaccccacatacggcagcccaccaggctcccccgtccctgggattctccaggcaagaacactagagtgggttgccatttccttctccaatgcatgagaatgaaaagtgaaagtgaagtcgctcagtcatgtccaactcttcacgaccccatggactgcagctgaccaggctcctccatccatgggattttccaggcaagagtactggagtgaggtgccactgaaggaaatataaataaataagaagagcattttcccctaaaaagtttatagtccagtagaagaaaacaggtatacaaatagacaattataatccaggagcttactttctagggcaaaaggaattgtgggacaggacaggagagacagagatttgctggatccatccacaagtttaaagaatatctcactttaacaagtacttataaagattctatcatcccacttaccaatattagcctcaagttgccgaagcagctccaagttacctgaacagaattctggagttaggtatacaatccggtatttgcctctgtaaaaacaaacaaagaaataggaaatgtaaaaacaatcacacaatgaatataactgaaaaccataacacagtataatttttttaaataatgcattacaccacttaataaaaacaaaatgcatattatatgtgtggacatatacacatatatttgttctctgatttcatttcaattcatcaaaacaaacatggcaacaccagtcagagagtactcagtataagatgccattagaagccagattctgatttccagcagtctagccccaaaatggcagtgcttgagttaactgatccagcctacagtaaaccttctatatgttagcaatccacctgcatgtcaccttccttggagaacgacaaccccattaccctacacagttgatcccatctccacaattatacctgcagcacccacgtttctcctgtatattctgctctgttgcccacatcttcttgggccagtgatgaaaccagactaaggtcaagttagtcagtctctgtcctagaatttggagggtctaaccaagtaacaaccagtcagtctccaagcagcaagatctgtaacatgtacatgaaaaatacctgcaatctattttgtgactagaaaaacagagaatgcttaccttctgagagaaagcaagagaaagagaatttagattaaaaaaagaaggccctattgtattttcaatactgattccagtctcttcctgagggctggctaatttcttttcattgggatccacaagccattcctgtatccttactataaaatttgatattcgtttaaacgtttgattgatttctattctgtgcagacagaatcctaattaagacaatgtttgcaatgaaggttagggctagggcaaaataggtacagagtctcttttccattctatcaaatgatgacatagatcaaattaaataaaataaaataatgttctttatgaaaccacttaaaaatatttaatccactgtgtgctaggcatggtgctttcactacgaatgggtagaaaacaactaagaaaaaaagttatgcttttcatatcatgaaattgactcagtagtctaattagttctgatgccaggctatctaggtttgaatctcagttctatttcttacaagctaagtaatcttaggcaagtatttaacttcagtgtgcatcagttcttcagggtaaaacagtgataagaactataaagacagctaattctttagatagctactttcaaagtaaacccaatcaaatcccaaatcgcaatttagttgaaaaggtgatatcgaaatacaaagaacctagaatagacccaaaaaaattgaaggaaaaaaacaaacaaaccctactttgaaagaacaagaaaacaaaagtggaagacccgtactacctgatttcaagatttattataaagctatagtaatcaagacaccaatcaaggcagacagtgacaaaatagaaaataaacactgcagcaataaacccatgtatatttactcaatttagtttttacaaaggtgcaaaagcaatacagtggaaaaaagataatctccaacaaatggagctggaagaaatggatgtgcctaggtcaaaaaaaaaaaaaaaagaactgcagtcaatacctgatataatatacaagatttacacaaaatggatcatagatctacatgtaaaacataaaactataacattttttgaagaaaatataaaggaaaatctctgtgaccttgagtgaggcaccaaaaagcaacagcaaaagcaaaatccataaaaaaacacactgacaaactggacgttataaaaatgaaaacgggagaatggtgtgccttcaccaaaatcttgtatgttgaccttcctcccactgcctctttggagcagtttctaagaactgagatgctgcctcccatgctgcagtcctcattttgccccaaatgaaacttaacacacacacacacactaatctgttaagagaatgaaaaatggaatgataaactaagagaaagtgtctggtaaccatatagcaagtgaaggatttatactcagaatgtataatataaactatcaaaattcacaagtgaaaaaaaaagaataagcaaaagatggatataaacacttcatcaaagatacacagattttttaaaaaaacataaacagatggctaataagtatataaagagatgctcaacataattagtccttcagttcagttcagttgcatccgactctttgcaatcctgcaggctgcagcacacctgtccatcaccaacttccggagcttgtgcaaactcatgtccactgagtaggtgatacaatccaaccatctcatcctgtcatccccttctcctctgacttcaatctttcccagcatcagggtctttcccaatgagtcagttcttcacatcaggtggccaaagtgttggagcttcagcattagtccttccaatgtaaatccaggactgatttcctttaggattgactgattggctctccttgtagtccaagggactctcaaaagtcttctccaacaccacagttcaaaagcatcaattctttagcactcagctttctttatggtccaactttcacaaccatacataactactggaaaaaccatagctttgactagacagacctttgatggcaaagtaacatctctgcttttttttttaatatgctgtccaggttggtcatagcttttcttccaaggagcaagggtctttaaatttcatggctgcagtcaccagctaaagtgattttgaagccccccaaaataaagtctctcactgtttccccatctattctccatctatttgccatgaagtgatgggaccagatcccatgatcttcattttctgaatgctgagttttaagccaactttttcactcccctctttcactttcatcaagaggctctttactttttcactttctgccataagggtggtatcatctgcatatctgaggttattgatacttctcttggcaatcttgattccagcttgtgcttcacccagcctggcatttcacatgatgtactctgcatataagttaaataagcaggatgacaataaacagccgggaaatgtcaatgaaaaacacattgaggggcttccctggtggctcagtggcaaagaatttgcctgtcaatgcaagaaacacaggttcagtacctggttctggaggattccacatgccacagagcaactaagcccatgtg

SEQ ID NO: 44532 - DNA, 2291 bp, Bovine  19866880909122
  misc_feature (1)..(1): n is a, c, g, or t
nactgagggcttccccgatggctagtggtaaacaattcgcctgccaatgcaggaaatgcaggagacgcgggtttgatccctgggttgggaagatcccctggagaagggaatggctaaccagtccagtattcctgcctggaaaatcccatggacagaggagcctggagggctacagttcatggggagcaaagagtcagacacagctgagcaactgagcatgaaacaagagatcagcagacaaggatttcttgtcccaatcctgcaactcactacatatctgttcctaagctttactgttctcctctgtgcttcaggaagggttaaggctgtattataaactgtgcctttctaccacttaatttcatcttccctgtagttccatatatatgcaagaaattgtacactgtatgcaagccaaagccataaaagtttgatagctttgtaagttaaacatccctgagccctcctctaactttcaagtgacttagaaaatttatttgcctcgagtacttccgtctatgactatggcacttttttagtttttaaatgtgaacagttggttcaatttccatcatctgagatgttttgtttttagaatcaactaaatatcacttaaaccccatcggattaatatgtgggtgatgaaatgtggcaataccatttttgattaaaaatacgtaaaaatagaaaaaatctggatgcaaaagaactaaatttcttattctgcttatgttctgattcaaaagacagttccaaaccttgaataccacaaatcttccaagtgatatttgcatactgacctcactttccaacttattaaaaaatgtatatctttgctaattaaagtcatttttgtatgggccagtcttctccactgaactacaatttacccatttttctatctctagcaccaaccatagttccttacaaaataagtacccaataaatatttactgcaaaagataaatgcgtataaactttaacatactccaacttcaggtatctttttttattgccaattacccaagtgggttcaaaaaagtagatacagtattaaaagtaatagcagtagtgaagccgttatttgaaacacttatcactctttaatggaatttaccatcatatggttatgattgagactcagttcatacatgaaaaatgacaaaggggtatctacaaaaaaaaaaaaaggcagaaatatgtagagaactacagtcataaactccttccagactcacctcttcattgtcctcttcattcacttttttccttctggtttctgcttgcctttcactcctgtttggggagaagaggggttgatgttctgcatgtctcagtgtcttctctctgagacccttgcagcctcttctcctccctcgttcgtctttccccactaagtctctctctgcccttcagtacattctcacctgcttttcagaatcatctcaccaccagccacctagtagggaaaacgacactgcgacaacagatgagctggcccttggatttttacaaacagcacaaaacactaaataacatagatagttttatgtcacaactgtagttaacagtcactgtgaacagttgtgatacacgctgtgctctgtgtaggtattttagatacagtatctcatgcaatttccactggttgtagtattattcccattttcctgctgagaaaacagacactcagaaagttaaaatacttgcctaaggttacccaactgtgaagttggttttcaagtccaggcttgatgtctggattctaaactactacattatctcaaccagttcttaaatttctttctagaggcatttaaatcctaatttcaagataatactatttatgcccttactatgcaataccaacttatgcttggatttcaggataatactactgattagatagcatattgaaaagcagagacattactttgccaacaaaggtccgtctagtcaaggctatggtttttccagtagtcatgtatggatgtgagagttggaccataaagaaagctgagtgctgaagaattgatgcttttgaactgtggtgttggagaagactcttaagagtcccttggactacaaggagatccaaccagtccattctaaaggagatcagccctgggtgttctttggaaggaatgatgctaaagctgaaactccagtcctttggccacctcatgcaaagaattgactcactggaaaagactctgatgctgggagggatcgggagcaggaggaaaaggggacgacagaggatgagatggctggatggcatcaccgactcg

SEQ ID NO: 44533 - DNA, 2175 bp, Bovine  19866880935536
  misc_feature (1)..(1): n is a, c, g, or t
nctctttagaatttcctctctctccgggacttctctgccctgcctggagttccatattcagaaaccggaaagtagagtagcgtctggaaagccagggggctgcttggggcaaacctaaaggttaagagtctatatgtaaaatagatagccagtgggagctggctgtatgatgcagggaacgcaaagcctctgtgacaacctagaggggtggggcagggagggaggtgagagggggttcaagagggaggggacatatgtatacctatggttgatttatgttgatgtataacaaaaaccatcacaatattgtaattaaaaagagtcctgggattgcaccctagcttcacctataacctgctgtgtgaacttggagcagctgctgtccctcccttcaccaaagcctcagctcaaataccagcttctcagagaagccttcctgaactcgccttgcaaactagcagcacccctacttctgtctgtttcccatgttgttttatttttctttttaaaatcaccagtggcgtagcactcacgcatatttctacacatagccccacctagcatggcagctctagcagaaaccttccttgccttgcattctgttgcatccccagcacacacacacacacacacacacacacacacaacaacaactaatatttattgagcacttactatgtgccagacatagtctcatgtattttatagatagtagttcatgtaatccctttttctgacggagatattttaaccccattttagaggtaaggagagtgaggcacagagaaggttattaatttgcctgaggttacacaaagtggcagaaccgagattcacacctggaaaggtggacttctagcacccacaactctggacttcttgacttctgtgctagtccatcaaggtgctccctaacaacggtgcctgaatgcaaactagatggagaggaatccaaaagattcttcctcccatccgcgctggccctactttagagaaagcacttgttccatctgggttaaagaaaagaaagaggcaggaggggcttcacgtggcccattttgatcagttaaatcatcaggccggtggctgccttcagttgcttcaaatttccccactgtgatgttgtgatttataataagaaatatacatttgatcttcatcctccatcctgggctcacaactccagaaatctttgaaatttcctaaatgataagagtgatggagcatcttttgttcaaataactgttcttgtgttctcacttctgaaaaagctccagagccataaaggcaaaacctgtgtcttattattcatatcaaatcccttgcagtcacacccaagtttctgtcagtaggtggcttttggaaagaccccaagaatgggggctggttaccagggaaatgaaccatgtgattagagggctggaactttcaattccaaccacttacctctgggttgggaagaggggctagaggttgaatcaatcaccagtgaccaatgattctatcagcatgcctgttaaggaagtctccataaaacctcaaaaggatgggattcagaaagcttccaggggaacttccctagtggtccagtggttaagaatttgcctgtcagtgcaggggacaccagttcagtccttgatccaggaagattcccacatgccttggggcaactaagcccgtgtgccacagctactgaagcccgtgtacctagaattcatgctctgcaacgagagaagccactgaaacaagaagcccacgcaccacaactagagaaaagcccacacgcagcaacgaagactcagcgcagccaaaaataaaaataagtaaataataaaacaaaattttttttaagcacaggtaacacctgaacctgtgactggtatgtgaaattaaggcagtcttgtaggagggagcccttaacctgtgagctctagtattacttcccattgtagacaatgtcggaattgagttaaacagtagcacacccagctggtgtcactgaattttttggtgtaggggagggaaaaaaacccacatttggtgaccgtgtcaggagtattgagagtagaggcaacatgtgggaagagttttcctttatgcctctcatatcacatcacctgttattacccacattgtgtagagagtgaaactaacccaggatgggaacttaggagg

SEQ ID NO: 44534 - DNA, 1974 bp, Bovine  19866880971018
  misc_feature (1)..(1): n is a, c, g, or t
naacatatggagaaggaaatggcaacccactccagtattcttgcctggagaatcccagggacaggggagcctggtgggctgccgtctatggggtcacacagagtcggacacgactgaagcgacttagcagcagcagcagcagaaactaacataacattgtaaagcaactgtattctaataaaaattaatttttgaaaaagatctttggtacatacataagcatcagtggctgcatagactttctggtcctcagtgaggggaaacctactccagtcgctacagcggatagaccggtctttcagaagctgtttaccaaagaggtatttaaccaaaccattgaggctccaggtctctatacatttcagctaaaaataatggaaaaatcaactcaggagaagttatttctttccttttattcttagatatttctaaccgataccaaacgaccatgtcacatgtaaagttgaaaatgttacaccaaaatataaggcagagatagtccttagtagatttccagtcactaaaaacctcatttgcagtctaccttacaagaatgtaattctatcatttcctcaatgtaggtattaaaattctaggactgtcaaagtatcattcatggacaaaagttgaataggttggtgattttcctacttctcagccaaatgaacacttggctaacgtgagaatgtaacttaaatgactacattaataaaatatatgaaatatgggccatggaaatgatggtcaaacttccactaagaggatcacaccacaaaagctgcattatgttcacgtcaaaaaaaaaaaaacaggggatatcgatatagatgggttaaagagagaaactttaaatataataattaaattcacaaatatataaaacaaagtgaaacagtactaaatatgggagagggtgtttgcttaaagaaactatttgctaaggcaacccattagaactgaaagttttcattatgagacatgcattagggacttctttttttctaaaaacattacgtagcttaaaatatgctctcaaaaaaaatatctaacagtcagaagggacattctgtaaacacaaatttattttgtttttattctgaaaataatatatgtattatgtctaccttttcattggcaacatctgtcagctccacaatactcttcaagttgatatcaaagtcacgtagaagtttccactgatcttgttcaattcccacacctgcctttttaattgcttcattttcaagcaacatttttagtccctgagggaaacctataattttttatattaatgtttatataatatttatataatatataatatttatttccataggttctatcaaacatgacagatttattatgttctacttcatacacattttatgtttaaatttgtgtttaaattcagaaaccaacgcttaccttgaatgtttttgagagctttttttttcacctaaagcaaaaagtcctgactgataaatgacaagaaaaacaactaatttaaatgctaaattatcactaacatttagcccctctgcacttccgttctccaccctgtgaaacaggaataatatcatcattgactgacagatatgacatgaaaattacataaaacagggatatgagtgaaaacttaaaatataaatacttaaatataaggtgatgagagaggcacctgttaattcaagagcttaatttcatatggacaaagttgacataatacaattatctaccatataaaaatgaaacaaatacaagagataccaacctgacatagaagaaatatgaaacaagtagcacttgctctctgccacacacagctgaatgagggccactctgctcagtgtccctttcttgaacggtggcccctcgatgtcaaatccgaccacatctccatcagagagactcatgctaaaggggggaaaataaaataagttatttaattaaaattttaatttctgcatcactgga

SEQ ID NO: 44535 - DNA, 1557 bp, Bovine  19866880994317
  misc_feature (1)..(1): n is a, c, g, or t
ntaatagttcgtattgcaaatcagcacattgcgaacacttgccatttcttttttaacatctgtatagtagcattgatatgctgtaatttaataagtcctctgttgatgggcccttgttgttcagacacttagtcgtatccaactctttgcaaccccatggactacaggcacgccagggcttccctctccttcactatctcctgtggtttgttcaaactcagggtccattgatgaccacttgaggttgtttctagtattttccttttaaaaggatgctgcaggcaacctttctgcttttctatgttgtagttcttctagggtaaatgctcagaagtgggtttgctgaatcaagggcttctgtgcatttctgttgccaaattcccttccaaggaatcatatcaatttgcattgtttaccagtggtgtgttagagggcctgtttgcttatagccttaccaattgagttgtcagataaggatttttgccagtgtaatagatgagaaatatcttagtggaagttgagtatcttttcctctgttgatggtcattggcatttctttttttgtgatttatatgttcctgtttttgggtccttttcttgttagctttttggaactgttcaaatgttaggaaggttaactttctgtgataagaattgcaaatgtttttttctcattttattgtttgattttatgtagcttcaagtttgaactcagttctgattttatagtccattctcttcatcactataattgtactgcctcaaataattacacattctgcattcctgaaaagattcatttagcctattatttaatacatctagcattttaaaactgtcttcaaatagcaatttcttccttcaatagacacggcatcagcgaggagatacacatcctcttactttagaagaaattttggatgaaacgcaacatttagatattggactcaagcagaagcaatggctaatgagtgaggtaagaatagtcttaaattattgtaaaaaatgtttttactgtcagaagggttttcatatgctgaaatctgataagttttttcttaaaagaattggtatagggtttgttttttttaaacatacacattttgagattgatttgttttcatatattctgtgtatctatttttaaatgtcagacagtagcattaaagttgtaaagaagtcagtcactactaatttttcagtttttacagaataattgatgcttattttgaattgctaaatttgtatgtattgacagattgtattgtttctatgttttgggacatttaaagcatgaagtattatagggaaagcaagatatttgttaagaaatgtatttgttgtactgctactgctattatgagttgatagtgatgttcctgcctctggcaagtcacttggaaaaataaccacgaatattttgtatatatacacacaacattggaagaaaatgaatctgaaaacagtgactgtgttaatttggaaatgagtagcactttaaaaattgagatattcgtctcttttcggttaagtataaacgacaattcagtaaagcaa

SEQ ID NO: 44536 - DNA, 1566 bp, Bovine  19866881009282
  misc_feature (1)..(1): n is a, c, g, or t
ncgcaacttagcaacttcactgccaccacagcataagataaaattttgtttccttcccacctaaatgttttaagttcatcgacctgctgtagatattagtggtcactactattagtggtcactactgctgcacctgcattcacacttccttggggaaccaaaacaggattgaaggccatactgccatgattacttttaagcatttgagccaaaattttaatttattttttttctgtgtgtataaattagtattttcacatgaataaatctgacttggaaaacctttcacattctaggagtttttttgtttgcttggccataccaggcggggcatcctggatcttagttccctgaccaggaatcaaacccctgccctctgcatgggaagcatggaatcttaaccactggactgccagggaagtcccaattctatggtgtatttgaaacagatgttttatatcttttcttagatataaagacacatttactgtggtcaataaaagaatgtgtcttaatttttctccagttacaaagagcctgtttgggtttagtgtgctgatacaaaatccatgtcgtctgcagagtacatcatagaccccattctgggatatgttgctctctgtggggaacggtgagggtaggagttttgacatgaaaaaagagaagtgacaccaaccttcacgatggttcttcagtgggtatattttgcttagtcgtaatgctgttgaacgttttatattcaagtttaatttacatacagttcttataccagtcagtcagtttgggcaagtatcaatacatagaacgttttcctcacgccagttcccatgtatcccttcccagtcaccacgcacaccgtccccccatcctgacttccagaagcagtcaccagtctgatttctcaccccataagtcactttcatctatcctggaatttcatataagttgataagtattttttgtttgacttccttcactcagtctagtagtttcttgaccatccctgttgttgaatttatatttcctttttattgctaatgattctttttttaaacaggcgaaaaataagcagatcttttctgagtatcttaactgaatcatggcagcaaccctgtagtaaggatggaggggacaaaatatctgctaatattaaatgatagtgctcctaacattcaggcaactctcctatatcttagttatattcgtactcttttgagagaccctaaattatgctattgttctattaaaagcagaagtaatgggcttgtgcagttcaacaattcaatagccagtgaaccgttactgcttttttttttttttttttactttatagctctgttttgagctcagaaagtaatgtgaaaaataattccaggctaggagacacttcttatgatatctctatatatctggattatcaaaacatgcaggaaggaatgctttcattgtttatcagtatggtgatgcctcagttgcttgtatacacttttaaaattatatactgtaaaccttatgaactcagttttattactggaaactcacatgggtccatattttatgtaatga

SEQ ID NO: 44537 - DNA, 749 bp, Bovine  19866881049881
  misc_feature (1)..(1): n is a, c, g, or t
nctgtcaatttttaatatttataacattaagtatagccttgttgtacagaagctattcagtaaatacttagtcactcactcaatacagctcactcataatatagactttctcttaagcaattattaaaattcacaaccttccaagaagcgttttctaataaaaaattaatttgtaagtttaaaggtagacatttgttaaggcatctctcatatacacagtcattcatatcattttacagataatatgaatggtttaatctaaaaggttaattagtaaattcattttgcaaggcaacatttaaagcattctcaatttttacaattctgtaaactacatacttgtttgcttcaacaagttcgctctcttagacttacaaaactcactttaaaacattcattaccttttgttttttacaactgggaacagcagtatctttctcttgttcctgagagtctccacatttgtctacagtgataggtcgtttttgagaggaatttgaaacatttttaattgtgtactctgaaactaaaggcaccttcccacaggtactggattttttgatactcttcctacattttatatgactattcgcatttttctttctctttggttgggaagtctttctgttgtgcagcatttggcaaaggataaaagaaatggttaactgagcatttttaacacatattatcttcatatgttcaatcgttttcatgactttcgtaatatggaccattttccctaaatcctt

SEQ ID NO: 44538 - DNA, 731 bp, Bovine  19866881275865
  misc_feature (1)..(1): n is a, c, g, or t
ngctgtacttttaccactacactaccttctccctatgcctgctgcctctctactttcctctggggatatatacacctgggatctgcaaaaccacaaagataagcatcatacatctttttggagcaaaaattcaactcaacgtataggcaaaaaaatttggttaaaggcaacattgatgtgtttttagagtagaatagaaattttgcttggggttttaaagataaaactgtaaacttcaacgaaatctgtttttgatgactgcttcaggctatgcccgtctgaagtatgagttagcatgcttcagaagcagtgcttccaagggaaaaatggaaaatcactgtgttagatggactccacagggatgccagtttccatgtatgacagctgagtgattccttctcaggcttctctggcccactgaatcatacaacacaaagtcaaatcctgttaaaactcctcaaaattggataaaatatttaccttttaagtccaacaaaagatagcaaacttgccaacttgaaaggatgtttttcatcctgtggtttcttagagattcaggctgaagaggtgcctgaagtgaggcggatccagagatatgagctgctgtgttttatagatggccaaatacttacctgatgtccctctacaattttaggggattcaaactgatgacaaaggtcacatcatagtagatgaattccagaatactaacgtaaaaggtgtctatgcag

SEQ ID NO: 44539 - DNA, 1392 bp, Bovine  19866881289667
  misc_feature (1)..(1): n is a, c, g, or t
ngaaaaaaatctgacaagttggtgattccctgagaataaaaaaaatatatatatatatatatagtcactttgtcattgttttcatctacaaaacgcaatgatatgctttcaaaagagattccataataatatttcctgaaaaaagtataaacccgaaaaataaggatgttcaatgaggactgtggttttttaaaaaacatttattattttatctatcacatatttatctagctgttctgggtcttacttgtggcaggcgggatctttgatctttactgtggcatgtgggaccgagctccctgaccagggatcgaacccaggccctctctgctgggagtgcagtcctagccactggaccatcagggagatgaggactccctgaagaggaggaattggagcacaaaaattatagttttagttccaactaaactaaattcaactaccagattcctcatcttttataccttagacttcattaacacatcagtgtgaaatacagcttcttagggtaaagaaaagacttggaagtactctagaaaggaataaccgactgggggtagatgtaatctgtgttgatagaaccagtgagatgcaggacagacggatgaccaagggtggtaagctcgcccagggctcggtcgtacctgggagtacttcagcacctcaatgccagcgttctccagctcttcggtacagttggaactgattattgaatcaaaagttctaagcacctgtatacagaggcagccgagggatgggtggcaggaaagaataaaacctgattaaagatacgctacaaacctgggaggaaatttcagtatcagtccccctttcttcttcattcatggccacactgtgagtttttttaaccattttaaaaaactaaaacacagttaatttacaacgttgtactaagtttcaggtgtacagtagagtgagtcagttatgcgcacacattcttcctaaatatttatttggctcttctgcatcttttaccatgccatgtgaactgagctgtagcatgtgggatccagctccctgaccagggactgaacccgggccccccacactgggagcccttagtcttagccactggaccaccagggaagtcccagtggcgaaaaacacagaacattaaatttaccatataaccatttctaaggacacagtttgattggtgttacgtatattcgcattgttgtgcgaccagaatcttcccccttgcaaaactgagactctgggggtggggggagcgataaattaggaggctgggattaacatatgccagtagtttatgcaaaacagataacccacaaagacccactgtataacacagggaactacacacagtatttgtgtaataacctatcagggaagaaaatttgaagaata

SEQ ID NO: 44540 - DNA, 721 bp, Bovine  19866881324711
  misc_feature (1)..(1): n is a, c, g, or t
ncatgagaaaccaaaaaccaaaataaatggtatctaaagtaaatatggctgaagacatatcaaaacttgagagaactgaagagaaaaccaaatcatcaacgaacaatattttgaaagtgtttcacaagatctacattacattcccagtatagtgctggtttagttaaatcttcacagtaaaacatgtatagatgaaattagttcatcgcggtaactcaccacaaatcttcttaaacatcttgggttttcttttggttttaaatgcacttacacatattagtttaaattttgaatgttgcctccaatactttaagaaatctgcaagggtgaaagtaatgaatgtttttacctatttaggttcatgtctgctggagcccaaagaacgtgacaagaactttgaagtccatctcggccagctctaccaatctcctggtaataggattccatttccttaggagcaccataatgaatgacttggcgaatgtcagccttattaatgcccattccaaaagctacggtagctatgacacactgagaataaataacaacatagttaaacatttagcagaattaaaacatgtttccctttggtaagtacaattagttcattcattacagtccctggcatgctactaaatttaatatgaaagtgaatttagaaagatggtaatgataaccctgtatgcaagacagcaaaagagacacagatttatagaacagt

SEQ ID NO: 44541 - DNA, 677 bp, Bovine  19866881613030
  misc_feature (1)..(1): n is a, c, g, or t
ngggctgaggtgggaacaggagtgactccaattggcacaaggaatcttttgagggtgatggaaatgttcaaaaattcaatgcagtaacagctgcacaacactgtaaacttactaaaaatctctgaattatacacttaaaatgagcgaactataaggtacgtaatttaaacctcaatgttttttttttaaagataacctaaattctaattacaaaacaactattaacatcttaagagcaaaagaaactcatcattccagcccttatacttaacaaactaagaatcaatacgaatgttgaactaaaaaatgaacttaccatgactaagtggttccctgaaaaataaaactaaatagtcaattctactaaccagaattttgtttagagcctgatgatcctccatgttctagctttgcttttttcttctttgatgatgatgcctcagaagacacagaacgtttttctactacaggattggaaagagctcgttttttgaacagctcccgttctctcaaaaggcttggatccataatgctgcaaaggtaaaaataagttttaatacagattcaagtcactcaatctatatgccaaatccacaggtctcaacaaaagttacttcccaaacaaaactgccttttattactagttctctaggacttgtattcatttcacttactca

SEQ ID NO: 44542 - DNA, 1310 bp, Bovine  19866881633079
  misc_feature (1)..(1): n is a, c, g, or t
nccttccctggccttcaattcatctcttgctccacactccgttatcttcactcttgtttccaccgctagcacgtggcgcttcagagaagtgccagctacttgcttccacgcaccctggacttgagatgcactatgactatcctctctactgtaaagtacacagacgcacagccacgtggagaagatgcacgcacgtgacggtttactgcagacacgtgaccttacctgatgggacatcccaactggcagaagttcgagtataggggacttaaactgtatgtgaaatgacagccgcctcccatatacaaacccaaaattctagtccctttcctacagtcagatttatgcgagtctcacctattggtaagaaaagaagggattgggtagacgatagtaaaatgagtaagaggaggacacttaccaatgcagccttgttgcgtgcttagtcactcagtcgggtctgactctgcaaccctctggactgcagcctgccaggctcctcacggatagagattctccaggcaagaatactgaagtgggttgccatttcctcctccaggggtcttcctgacccagggatccaacccacatctctcatgtctcctgcactgacaggtgggttctttataagtgctacccaggaaatttggacacagaattgagacgtgtttaagaaactcctgggaccaaggtggggctctggcagaggcaaagtcttgttgattgtccaaaggcccttttttctgccacaaaaaacgagtgtttcctcgcaactgcaggggaaagacaaagataaatagaaattaagcacccactgtgaggccaccgaccctctagtgcagggtcttgctgtggagagggtcagtgagtgtattctgtgtttacacagacgagcacatggacaactctgaaggggagcagccagggggttctcagccgggacttctatccaccggtgcctccaaacagccctgaggctcagagaaaggattgtacgcggttatgagatcagctcctcttaaacaccttctttctgtttcaggcttgaaaaacacctcgcccagttttgagcccttcaagactttgccacagcctctatcacacatctgtttttctcgaagaaaaaaatatataataaaaaatgttttactcttttacactgtataattgtaagaaatagtgtgttatttgtgaacgcatggtctgccatttctgtacagtttggagatattttcaaatgaaacataaaagatgtcaacgataaaaccaagagagtgagtatttttataccaaacattttaagtgtgaca

SEQ ID NO: 44543 - DNA, 988 bp, Bovine  19866881858991
  misc_feature (1)..(1): n is a, c, g, or t
ntacttattttctatttcctttgcctttctgcctgccgctaaatacacatactttccttcttgtctctgatagctatttttctccttacggttcctaaattattttaccacattcatatttcattctgattattccagaaatactgaaatgaaactcccctttaacatgacctactttaatgtagaatttggcccaagtcttatttctcataaaaaagcagttacatttaaattaccaaaagagtcttattactgtaatttaacccataaggaggatttgaagtgctatcatactcagcttcaaggatatatgttctacactatgaagatggttaaccacttttgaccagtatgcatgaattctctaagcagttcaccatttttttggttgtagtaattaattttaattaactgtcaatatgtttgttgccacgtggagaagtgaggatatagccctggctcccgttttggtatgcgcgaggacatgcttttaacgttcaaagtgtaaagtggtcttaggttgtgaaataaaaaatggtatgcctgatttcccagtgagtacatgcagtttaaagagttttggaagtcctagcttagcagaaattaaagttcatagtaaatcatctttcttccacccatgtatttatgttctggctaataaaaattagatttttgcttcctaattttggataagtaatgtttttgcttctctgtcaaattaattaatctagctattgtatagtgctgtttttattaacatgtacagcagcttagagattcatactcagtatgattatcatttgtgatttaaaaccaaaagtcttaatttttacaaaaaacaatttcgcctttctctccttgaaattgaacatgaggtcatgagtcgcacttagtgggtaagacctattcagagacattcatgtaaagttatggatgtaggagcaagctcttagctgccaattggctataatagtaagtattataatat

SEQ ID NO: 44544 - DNA, 2478 bp, Bovine  19866880406327
  misc_feature (1)..(1): n is a, c, g, or t
nctgctgatgttaagcacatcttatttttcttttgtatcagtaaagatttttaagtattaacctttcctacagtagtcagatgaaatgtttcttagttattctaagtagattagcaaagaaagacaagtgtgtgtgcctgtccaatttctaacttattttagtctgaaacaaatccaaatgtaaaccagatcctgacaaaaccaagagtttttaagtaagccaattcattcttagtgttcccccagggatctaccctcttcaccatataattcctaatctgtttgaaaaccacccaacctttagttcctagctgctatatttcattgctggagacagctgtagagtaaatcaagcatcaaatagaatgtaattcacccacctttacactggtgtgcctttactgcaaggttatatagatgtcatgaaattacttgattagcattctttgagggtgagcggtagttcagtgtaaactcatgaagctgaactgaatcaataaagtttggttgacataaaaatgaactttattgaaccctatagagtagtgcctatgacaaaattgagaaaaggaaagaaatggaaaatatattattttgtattttactgtgaataatgttgagattgaatttgtcatacctttctttactggaaaaaaaaaaaaaggtactgccatacattcttatacagccctggtatagacttcaggaggtagaggtgatgatatgcctgaagtgttggaaatatttgataagcaaaactcctggagattaagaaagccaaagtgtggtagaataattcagaatacctaattcatatctgggcttgccttgtggcttagctgttaaagaatccacctgcaatgcgggaggcctgggtttaatccctgggttgggaaaaccctttggggaagggaaaggctacccactccagtattctggcctggagaattccatggactttatagtccatatggttgcaaagagtaagacacaactgagaggctttcactttcctttcaatgtatatttatataaaattgcatcctcttggttttctttgcatattggctctgttcactcatttctaaccaaatttgtcaactgatggagctcaatgttccaaattatacatattagaaatccaagcagagaataggcaatctaagcttcagtttagaagtttccaggaaaatattcccacaccaaatcaataatcccatacctaatcaactgtctccaataaatagttgaatccgaaagtaacagatcatataggaaataattggacttccctggtatggggaaaagaatctgcctgcaatgtgggagacctagcttcagtcccggggttgggaaaatcccctggataagggaatggcaacccaattcagtattcttgcctggagaatccccatggacagaagagcctggtaggctacagtccatggggtcacagagtcagacatgactgagcgactaagcacagcacacatgggaaatattgatatatttggagcaagaagaaagcacaattaccagaatgaaaggaatactgctgcttcaggaaagaaggactgtagggtagaaaaaagaaaaagcatttgttctaaaaggggaaaataaatttaaatggtctatgtacactggtgctacaacaagttgaatccatagccacatgtacattacttgtggattctaataacagttgttttcagtcaaccttttcttttccattctcctcgaagtataaagtttaagtctttcctcatagttgttagtcattccattgttaccattctttttggagttttatttgaatcccactttatagaaattgaggaaacaagctagaactgtattaatcaaaggtgtaattgccatttgccacgggcattgtttttcttcttccagtatacctctcagtattaacctggtccttttcagttatagagattaatgaggagttaattttcttgaaccaatggaagtagtaaaatagactacacttcaccaaagataccttttgaatgcaatggtatgaacattctttggcattgcctttctttggaactggatcaaaactgacattttccagtcctgtggccactggtgagttttttaaaccagttggcatgttgaacactttaacatcatcatctttaggatttaaaatagctcgactggaattctattatctctactagctttgttcacagcaatgcttcctaaggcctgcttgacttcacagtccacaatgtctggttttaggggagtggccacatcattattgttttctgggtcatgaagatcattttttgtatatttctctgtattcttgccacctcttaatttcttttgcttctgttaggtgcttaccatttctgttctttattgtgcccacctttgaatgaaatgttcccttggtatcttccattttcttgaagagatatctagtttttcccattctattgttttctt

SEQ ID NO: 44545 - DNA, 1430 bp, Bovine  19866880631066
  misc_feature (1)..(1): n is a, c, g, or t
nccatcaagaaaaaaaaaaaaaaaattaaaaggcatcccacaaaacaaaacacaatttggagagagagagcaagcatcagcatcaggggtagcagagatgctggaatagtcagaccggagattcaagataatttaacagaagcccataccattacaaataaatcgaggaaaaaataaatggaatagattagacatatcttctgtgcaagcaaattccaaatatgaatgtagatattctgttcttatagaggtgaagaataactccctattccttaagtgaaggctgcacatcctgacttacttgtaaaaggtattaataatatatggaaagaggactgagttaactcggcagaacagaaatttgacaaacactacctcatccaggtgatcaaaaataaacatcaaaggtgaaaatatttatagtatgtacttcatatgatataataagaattacactttacttccctggccttccttccaaaaccattactacagtctaataacaagacaaaaatcagacagatcccaattgagaggcattctgcaaaatatttgaccaatattcgtcaaaactctcaatgtcataagatacaatgaatgtcccagaaattgtcagagcgaagagtagtttaaggagacctggtaactaaatgtggtatggtgtcctggatgagatcttggaacaaaaattagaactttaaggaaaaattataaaattctgaatgtagtctttaatttaaaacagtacaccaatattggttcattaattatgacaaatatagtatgctaatataagatattcataataaaagaaacaatgtggggtatacagaatgtttctctactatattctcaataattttgtaaatccccaagtgttctaaaattaagtttattacaaatatataatttgactaattttattaagaataaaatgatatgaatcaatactgtatgtatacaaatgtgcttttttcagtaatttaactctgtcatttcagcatttattttttacatttttttaattttatttttgaactttacaatattgtattggttttgccatatatcaacatgaatccaccacagcatttcagcatttaatgtcaaggaaatttgtaagccctcaccatctcccttcaccttgaattgttgatggtttttctctttgtttctattgcttactaaacaatcttgacctctgcttactaaatctaatatatccacaaaatgcagttattcagttattaatcatacccatcaatttatctaagagttagataaaacactaagtgaaaatagatttaataaggatagacagtgactcacagagttccaaatatgcctttaagataaaaaataatgcatgtctctttgaatagatgaaaggaaattattaaaacataaataacaggctatattagttttgg

SEQ ID NO: 44546 - DNA, 2338 bp, Bovine  19866880635079
  misc_feature (1)..(1): n is a, c, g, or t
ntgttagaacagccaaaaaacggatagagacatgatgtaacacccattgcggtgactgatagctttgtccttcagttaggtggctcaaaacattgagaacagatagccatatggttaatatcagttataagacatgaagtgaagtgaaagtcacttggtcatgtccgactctttgtgaccccatggactatacagtccacggaattctccagaccagataactggagtgggtagcttttcctttctccaggggatcatcccaacccaaggatcgaacccaggtctcccacattgtaggcagattctttaccaccgagccaccaggggagcccaaagaaaaatgatggtgtagttataagaatggctggaatttggatacaaggtctagtggtattatggaaagtgaaagtgacagagaagaagcctagtacactaattttgtggatttatgagaggtattttcataagcacagaaaagaaggataaaggatttgagtagcagattttttttttttttttttgtgattaaggtattgagttgcaaacgcattttttgcttctattattatcattcaaataatcaccagatcacaactattgtatctatgttttgcaaaaggtcaaaccatatgtgatctattaaaatatttatctaaaattctgtacatgtaacctagttttattcctcactcataattataatcctcatagacaaaaaatctccagctaccaggaaattatttgtctaatatgcattgcagttaggtagtgctaaatatattaacactttagcagaggttagcaaagataataacacagtaagtaatagcctcaaagtttcaaaaagtaaaatttccatttaaactgtttcttaggatgagcagaattttttgaggaaaactgataggaaacgacagcatttgctgcagatattactccaaggaccaatatagcgatttagagaagagcactgcagttaaaggaactgatggtggcttggaaatggcagagatcatgtggtatgttgaagttttgtaagaaattcacttaatcatgtaagtataggcttatacttggcaggtggctcagtggtaaaagaatctgcctgccaagtaggagaccctggttgaatccctgagtggggaagatcctctggagaaggaaatggcaacccactccagtattcttgcctgggaaattccatgggcagaggagcctggtgggctacatttcatgcagtcacaaaagagtctgacacaaccaagtgactgactaaccaacaaaccaaccaataggcttatttagtacctttaaatgtctgaaacattgtgaatatttctgtaatgaggaagaatcagagaagcttgtaaaatatcaaaaataccccatgaaatatttagctaaaacaaaaataaaatttttatatttttataaaataaaattttgtgattttatatcagcttgtttaaagattatggaaactttattataataaatttcctactgttataatttcttattgttactatggtccaatggtctccctcactatataaataattactctgatatcattaggatttgttcacaatttctcaagttctgtggggaaaaacaagccagaataatgactgttcacccccaagttattcctttatactacagtagagcatgaatagcaataaaatcactccaggaagatgtcagcaagccacagttctaatatagttgactgaacctcttcaatgtggttgaaaataataatgaaacattgatccaaccatcctattctcatttccctattttcttcctctttgtagacaagtgtattatacatcatgatcaaggtactgaattatctatagaatttttcaaaatgattaataaataataacactaatttcttgccatgtaaagcaacgcctatttgggtaagggagcccatttttcttagtctgaatgagaacatctgtaattgaactatatctttggggtctgacatgatgcctatatttcaccttgtgtcttaagtctagtttattttttatccctttagagaatatattgtgtggatactgaccatcatcattataactttcagtttactcctctaaggaataataaacagccagaaaattgtcttactttgtgaacttgctatattatccaggtaactctgagtgagtaaaagtcactcaggtgtgtccaactctttgtgaccccataggttgtagcctgccaggctcctctgcccatgggattctacaggcaagaatactggagtggggtgtcactgccttatccaagagattcttctagccaaggaacaaacccaggt

SEQ ID NO: 44547 - DNA, 783 bp, Bovine  19866880692858
  misc_feature (1)..(1): n is a, c, g, or t
ntcccagatttgttttattcctaaaagtatgagttttgtggtcacccatttaaatagatgttgaattttcttcatacttgatagtattttcgtttttcactcttcagacctttataaccttgttcttttttttttctttttctttttcacctttcatatcttggtctgtttatagaccatggaaaaagtccacaaatgatagtgaactcttcccttcaaaacttctgctatgtaatcccaggatttctgcttatcagaaatgacattttgtatatacatcttttttgtatatatctttcttctcagttatggtctgatgctattttctcccagataactttgtttccaattcactttacatataggcaatgctattttattacaatcccattctttagaatctcttcatgctgcctctattcagctacttcatcagttagcttcctttcagaacagtgaatatagaggaaaattactatagaaagcaattgcatataattttcatctgagcctctttgctagagtaaaatttagatgtgtgtgctccagtgatgaagtcatggatctcctgaacctagcccatcttcatctgaggaaattgggccccctcagttttacttgtcagctggttattaatttggtggtatccggatttatgcatactcaaagcatgtcctgtaggttcttttgttcctgtctcctgttcttgctcccatagctgtcttgtctctgggttttgtgagactgatgtgttgtcgtacccaaagagggtcacagggatat

SEQ ID NO: 44548 - DNA, 1951 bp, Bovine  19866880701809
  misc_feature (1)..(1): n is a, c, g, or t
nctataatttttataattatatatttttacagttagctttccctttgtcttgaatcatatattaaataggtataacaaaatgcatagaatatgtaataatttatgataaaaagacaaatgccaagttttatttatttaatcttaaccattacacagtttatgtcataagtaattctttcaggtatgcaatcatctacacttacattttttaacacaagttcagagccctcagaaaggtttctgctcagtttagtcattttatcctatttttacttacactatttattttattatcccattgttcttttggcctctatacccttattttacatttatgagttcctttcttccacaataagttttaaatattccactaccataaatagtctgttgtacctaatcgctctaaaccattgctgccttatttaacaacttttccattaccctttaggcatatcctcattgcttctaatctaaatggtactattgtttccatcaattttccacttaatttctaagcagtctatcctgaatagaagtcctccaatttgctgctgttttgtttttcatcctggagattaaatacaattttatgttaaatacagtaaaaagatataaaagataaataaaagataataattaatacttagagaaagccatgcaagtacaattattgtgtgggataaaatatttttctttagatattggccactttctttgtttgtattagtaaaacatcttcaaccaattaataagtatttgtgtgtcaagtcgtctgttatacgctgttggggaaatataattaaaaacaaaatttcctcccaacccagaaaaaatgtcccatgaaggcagaaagaagagaccgaaaacagttttgttttaaataagcactgaaacagtgctatgcacatcacaggcaatctgctaagatattgataaaaggaaaattctcacttttttatagagtcaggtagatggaaaagcattgaatacatgttctcaagataaataatcactggtcctcaagtaaggagaattgacacacttgttacatatagttgatcctaaattcttctggaaatcagatgatctttgtgttgggtaatttatccaaaaaaaaaaaagaaggaaaaaaaaaaaacacatatcattatggcaggcagaaattttggagcaaagagctcgctgaagttagtttactacccttccataggcactgagagataggaaatgattactttacagaaatggattctaggtccttgaaacaagacattactgttttataacactgacaagaagcttatttaggcttcaaaatgatttcatacatcttcaagggacagagaaagaatttacaactgtaacttttttgttgtttttaatgtaattctctaaaataaaaggggcagtgaaaggagtatcttttcctttcaataccagggattctatttttttcctctgatttatatttacctttacaacactctgggttgtaaagttgtattgttcttgaacatatgttagttaacttacgaggatgactttaaaaagattttcacacatacacacacacacatgcacacacacactcaagtagctaggtgctaggaggttttgatctccatttctgatttttttacctctttagatgtcatttatatattttacttagtgatgttttattgatataaaagcaatttaaaatgtactgttcttaatttttgcaattctgttcaacaaataattggagtgtttctttgtacaaaagattgttctagatggtataatcatgatacaattcttgctgctgttctctaaagtatcatacattcttctaaagcttaaaaaatatatattttaaatctcatacatgcacataaagcctattttaaagttagaaacctaaataaatgatcttctcaagaatctctgaataactgtaacatca

SEQ ID NO: 44549 - DNA, 1962 bp, Bovine  19866880757191
  misc_feature (1)..(1): n is a, c, g, or t
ntttaaatccgttgacttatcaaagtagtttgtaaatgaggaaagaataactctacatgtaatcatcctagtttggaagtggaagaaaatgaacactctgtaaagtcatacttaaactatccatgtctgagaatcatgcagagaaacattgccaatggaaattcagtgaaaaagagctgtgcacaggggctaagctccactttagaaaacagcatttcctgattatgcatttaggaccacattttatagagtaaattatacaaatgagattattccatctaaggtttctgtataagttccctatttgaaatgtctgatattcactggttttcatacagcaataagcagtagaatgttgtatatttacatggttttaaataaaatttcaattttttataccttgataccctaattataaagtaagtctgataagatatataaaagtgaggtaggacttagtaggaagatatgtaagaaatgctgaaatatgtttgtaaaactgttatgctggatatcaaaaaaaaaaaaaaatcaatagattcctaaatgtcctcttggactcttgtcttcaatacagtcattatttaattaatagcaatgactgcttctctggttctatttttagattatcacggaaaaccacatatcactatattattccattgtaacatgatttacttgctaaattgtgcccgaatcttgcgaccccatggatatggggatctttctgaccaagggattgaacccatgtctcctgcactgcagacagattctttatcaactgagcttccagggaattcccaggttcaatccctgggttgggaagatcccctgcagtaggaaatgacaacacagtccaatatcctttgcctggaaaattacatgggaagctatagtctgacaaagatatgtggcaaagagtctgacacaactgagcacacatacagagtaaaatgaaggaaattgaaaagcattttaaagcaactttaaaataatattaagctaatgtgggatgccttaagaaaatttctgcctgatagcatggaaatcatataattgattttataatcaatcacattgaatgccaaataaacaattcagcttcagtattatgctacacgttgtattttctttatatattaatcttctttttaggtgtatctcttaacaagatttaaatagaagaatgttcaaaggggaaaaaaaaagaaagataaagcttataagaaaaaacaaaaaaagagatcaagaaatatgtcttaagttaccatttattttcatcatctactacatgtagtaagaaaagtaaaaacataattttcttttgagagattttcttatgaagatattaactgtttaaaacaaaggtgatgttatgtgaatttttagcatgtactgaatgtgtgtacagaaatgtgtgtacagaaaactacaagggattgaagagtgtaaatgagagtatgctttgaaacaaactaatattttatgaagataaaatttaattattaaataaggatatcttaaaatctatggcataattagttttaaaaagtgatataaatgataacccaacaatggagataataaaaatctttaaaaatactcagtgtaaagaagattgacatagagggaaagtaaagaaagatgaaatggaataaataggaaacagccaaaagatagatttaataaaactgtaataatacaattgactggttttattccttttgcagtccagggattttcaagagtcttctccagcaccatcaattctttggcactcagccttctttatggtccaattgtcatacccatacatgattactgagaaaaacatagctttgactacacagacatttggtagcaaaacgatgtctttacattttaatacactgtctagatttgtcataacattccttccaagaagcacacatcttttaattcaatggatgcagtcacagtgtg

SEQ ID NO: 44550 - DNA, 1727 bp, Bovine  19866880971277
  misc_feature (1)..(1): n is a, c, g, or t
ntgcatacccatgttcattgcaacataattcttaatagccaagacataaaaccaatgtaaggatcaatatgtgaatggagaaagaaatgtggtatagatacacaagggaaagcttttcagccataaaaaggaaggaaattctgccatctgtttcagcatgcatagactgtgaataaaatgcaagtaaaataagttagagagagaaagacaaatgctgtatgatttcacctatacatggaatgtaaaaaaactgagctcatataaatagtgtataatggcaggggctgggggctagctattcagttatgcaacatgattaaattctacaaacatattgtatgagtttatgcctataattaacaatactgaaattgtgcacttaaataactattgaagtagatcttaagtgttcatatatatacaataggtagggtctgagatatgcatatgccttctcattttgtcttacctgtagaaatgaaaaacaaatgtttattttaaaataatgcattaaaacattatcgttaaataatataatacagtttggataaaatttaagactattcttattcaacatgttctaaacatacacacaatacaaggacttcatagtaattattgagacaaataaatgacattcctgccatggaattattagatcactaaaaggatcatgactacactgtgctcaaaggtcaattatagcactgggggaggttgcactgaatttatgtcaagctgtaataggcaatcaggaaggtcaacccttgatgaggactggcacagagagagattagcagtgacatttcaaatgggcttgattcaaacctctccctttgtctaagttcaatgttcttatgaatttgcataaacaggttagtataacaagtagaatttgtatacattaagcatatgtcttattagcaatatatttattgtatccatcttatttttatatcacatcaagcagtacatctcagatttgatgaagactaacttgataaacactgaaataaatgtatttaattcagaaaattgggcattttaacagatagaaataataaatttaataatgcctgctaaaatatatctatctgacaaatatgatgatttttcattaaaaaatatttgagatgatttgacatataacacatatgtgatgcatactcagtcacttagtcatgtccagctgtttgtgaccacatgaactgtagcctgccaggctcctcttgtccattgaatttttcaggcaagaatattggactgtgttgccattttcctactccagggggtcatcccaacccaggggttgaacctgcatctcctgagtctcctgcattggcaggcagattctttacccctagcgctaccaaggaggtccactcacatattatatcataacaaatattttaaaatataaaaaaattccccccatttgaaattcaaccaattaacttttggcaagaactgtacacaatagcataataatatcaaggatactagatagatatctttacaaaataattacataagtattgtaagtgtgcccagagtatcaatatgttaaaaagttcacacgtgattttcacatgtcacctaacatgagaatcaacattctgtaaaaatatagaaatcatgaggaatccagaataaacaattgtcattttttcttaagaatcattcttctcatcatttttgtactcaaagtgagactggtgggtttaata

SEQ ID NO: 44551 - DNA, 1706 bp, Bovine  19866881334078
  misc_feature (1)..(1): n is a, c, g, or t
naatgagtaaggctgagtagggtggggaaggtggggaaaggggggtcagaaggtgaaagacagttctgtttccagaagtagtgatttgaacctcactcactgtgacacagctatcttctatgtgctccccggtggctgaacaatttaggatccataaactctcacactatagctggcatattaagatactattaattttattatattttaaacattatctttcttagatgactttgcatctagttttttttaatctattctatttttctttaagtcaacaatttcaatcttaataagctatcgtaacttttttcttacttctgaaaacatattttctttagattaactgaacataaattaccattaaaaataaattgcaccttatatttttcaatggaaacaaaagacttcaccttatcttctttctcctctaaattttcagctggctcatagtaacatatgcatctaaaaaatttgtcaactcacatgtcttctgtgaaaagattgacagtatcaatagtgacaggttctgaaaaatccatataatactctaacagccatgtaacacagaaatctagtgagcaggtggtaacacacaacagctaaatgtgcatctcaaactcattaagaatgttaaggatgggagagaaatcaagagaaaaattatagataataaacaaaaataaatgaccattgggtgtaactcttctcaaaggccagaacaacttattgtattattgaaatattttgctatactcaaaaagacagtgttttcaaattattttaatagtgtattaatcacagattaatactatctaagttccccaactaaaagtagtagtttaagtagtgttcattatttttagaagtggcatctctagcttttagtaattcattatttaaagctattgaggttagtcacttttgcattttaattcaaaatagcaattgttaaaataattgtggcatcaattacctatacaatactgacaaatcacataatagcattgtcattttaggttaatttaagtcattgaaatttttcatatggtggtttccacacaataatggcaattaccattaagtattatggttaaagttgtttaggataaatttcactttgtgcagaacaagtgaattcaatattctaaaacataagttccttaaacaagggtactaatattttagagtatggttctagtgagcattacatggaaatgcatgcataaagcttaatagactgaatagcaaaaacagtgaaaatattgctcaaacaaattaatgcactgatccgctaagtgttgtatttaaagttgtcctcagattctgtacctgtaaatttccctaatttattacataatgcacaaaaatttttcctgaatattgaatttaacttaaattttcatttatatttatttttatacataaattttgattttattgaatacttatacatgaaatcttgcctaatttgaatactgttatctctgttttagctactgagttacttaaggtctgtcatttgatactacacaatccttgaaatgttctttttaaaaaacatatttttggcttatagttgacacattatttttttaattttattttaaaataatttcatacttactggaagaatgttacaggaatatacatatatatagctctcacatagtcagaattctgagatcccactcaggttttgcaag

SEQ ID NO: 44552 - DNA, 759 bp, Bovine  19866881615545
  misc_feature (1)..(1): n is a, c, g, or t
nagatgctgaaaagtggaactagagaagattctgctagtgattttcattatagctaggtaatcattttcattacctagagtgaaagtcactcagtcgtgtccgactctttgagaccccatggactatacggtccatggcatcttccaggccagaatactggagcggatagctgttcccttctccaggtgatctttccgacccagggattgaacccaggtctcccacattgcaggtggattctttaccccagctgagccaccagggaagcccaagaacactggagtgggtagcctctcccttctccagcggatcatcccgacccaggaattgaaccagggtctcctgtactgcaggaggattctttactggtagctgagctaccagggaagccaaagagttaaacaggagccatatttgctggccatgttttatttgtcctttttcttcaaacaggataaccaaagatacagacagtattccataaagtaaaatagatgagacaaattctaagagactgcgatgccacatgctacatttaacctaattttattcatgcttgctttgggatggggaatagatcattcagtaaaaacatacagtaaaaacaaaatatgtcttatcatgtacaacttttaaactacaataatgatgtaccttaattacttccatgcacacaagtctaacattacagttttttaaaaaataaacacaattaagacttctaggagcattttataataaagtaattcctaattttt

SEQ ID NO: 44553 - DNA, 1374 bp, Bovine  19866880366363
  misc_feature (1)..(1): n is a, c, g, or t
nctgcagtcaccatctgcagtggttttggagcccaagaaaataaagtctgtcactgtttccattgttttcccatctatttgccatgaagttatgggactggatgccatgatctgttttttgaatgttgagttttaagtcaactttttcactctcctctttcactttaatcaagaggctctttagctcctcttcgctttctgccacaagagtggtgtcatctgcatatgtgaggttattgatatttctcccaaaatcttaattccagcttgtgctcttgcttcttcaatattcttgccttgagaaccccatgaacagtatgaaaaggcaccctctccagttgtgtcaatgaaaaatgtctctagacagtgccgatggtttaaagtcacgggaatagagtaatcaaaagttccctttggggctacttgtgaagtctacccctcctaaatatatagccatacagagccaaggcaatatctcaactaacaagtttctttcagaaaagagacttgtattagagaaaataaccttaagtaagcaattaacagtatttagttcagtaatcctgtaaaagggatatgtgtgttagtcgctcagtcacgttcaactctttgggaccccatagcctgaagcccaccaggcttctctgtccatggaattctcctggcaagaatactggagtgggtagccattcccttctccagagatcaaacctgggtctcctgcattgcaggcagattctttaccatctcagtcaccagggacataagcaaatgtaacacaaaattaaaatcttgtattatctgaaacaaaacagaggaaagatgaacgaagagctttagcaggcctgaggatgctagtaccttgtttactcatcaagcacacaaaatatcagtccctattagaagaactataatatgcaatttacttgccttaaagaaatttatctttgaatattaattttcattgtggatctgtatgtacaatatttagccctaagaaccgtgaccaagaactggctatgtgaaggggaagatcagctgtatccttttcagggaacacgcctcaattaattccttttgaagttatactcaaagatgtatacttcccctagaaacctaatttattgcttgtcttggtgctttcaccactgcagcttataaatataatttagattttacagatcaaaccataagctgtgaaactcttatttatcctattacaaacattatgtttgctgtcttaagacccttcgtcctgtaatctcatgataataaggccatatctgcactttctccagtttttcaaatgaagccagctctcctaatatgatccaagagctctgcccccatccaccccagacccattggttactt

SEQ ID NO: 44554 - DNA, 1144 bp, Bovine  19866880598153
  misc_feature (1)..(1): n is a, c, g, or t
naactttctattgggtggcatcgacctagaacgttattttgagaaggattgtgaggtcgtgtccagcagcaggaaagacgtccccagtccattagcaatgcctccaatgagtgctgagagaaccaggggatgcacatcccaagtgtattgaacattcttgagataatagtataaagcttaatctgctaagtcacttcagtcgtgtccgaccctgtgcaaccccataggcggcagcccactaggctcctctgtccctgggattctccaggcaagaacactggagtgggttgccatttccttctccaatgcatgaaagtgaaaagtgaaagtaaagtcactcagtcgtgcccgactcttagcgaccccatggactgcagcccaccaggctcctctgcccatgggattttccaggcaagagtactggagtgggttgccatcgccttctccaaagcttaacctattaagtcttaactttgggctacttaaaggcagatattctgcacaggtaatatcaccatgccttgtagaaaaggaatttaataaacattggaagagatctggattataatgaaagccatttcacgtacttttagaaaaaatttacaagattaccaactattcaccctatgataaaacagcacctattaaaataagaaatagaatactagagtttagggataaactataactattaatataattctgatgatgtgttgactcttgtaactttttcctctattagtgcttgacaacatgaagaaagctctcaagttgctgaagactgaactctagagaaaacacaaaatctacaagatcctccctctgtgttgggcctcgagactgagaaccagaggaggttttgaaaaactttggagaaggctgaagcactggtgaacctactgattagatgatggtttcatgttacaacagctttttttttaaattggttttacatatacatgtatgaaaataatatcatatgcttccatagtgagctgtgatttttaaaaaaaataaatccttttagggggtgtttaaactgttcatttttttcccaacctggtctttcacgaaaagctatttggtttactcaccaaataggatttttaaacacaaaatgttcaaaaaggggacaagacaaacc

SEQ ID NO: 44555 - DNA, 1966 bp, Bovine  19866880699092
  misc_feature (1)..(1): n is a, c, g, or t
ntcttcccttggaaatttaataaactttatctaaaaggtcatgagtccttcctgaatagcactccaaaggtatttgtatagcatttaatatttagccaatcctttacgatcagactgtttattttcctcctagcaacctaaagtagttcattactatcacattctgtatagaaatgaagaagctgaggccccaaggcatatacactttattatacttactctatcagtcaagtgagaatcaagtcatcaagttgaataacacttttaatttcttttttattttatctcctaagtataattgaccatacaaagaagatttaatcctagcaggaggggaaaaaaatctgagataaaatacgaatctggtgctatacaataaaaaatattactgtgcttttttccttttctctcttcaataacctttccctttatcccaattatctgctaaattacccataaaatatgctatcagcttattttagactaataaaatattgcaaaaaaaaaaaaagaaaaacccacaggtgactaaaaccttaggttaaaaagaaagggtaaagtcactgagattgaattgcaactccagagcctctatcctgtgaacttctctagttcaaaagcaatttgtttttctaaagaaatagcataaacccctgactgtctgaggaaacttcaaaagtcatgttctccaacctcagctgggccgttactgtctgacgattctttcatacatctttattaagactcttgagagtcccttggactgcgaggagatccaaccagtccattctgaaggagatcagccctgggatttcttcagaaggattgatgctaaagctgaaactccagtactttggccaccttatgtgaagagctgactcattggaaaagactctgatgctgggagggattgggggcaggaggagaaggggacgacagaggatgagatggctggatagcaccactgactcgatggacgtgagtctgagtgaactccgggagttggtgatagacagggaggcctggtgtgctgagattaacggggtcgcaaagagtcggacacgactgagcaactgaactgaactgattgagtctcagcccattcacaactttagcttcatcttcaacacatagattccacaagttattttgatttttggtaaatggatctattaccatttatgaatgaatgaatgaatcttttcctttttcaattcccaacttcacttaagcaaacaaaactatcttctcctttaattcttctcacactttggggcccttttcctgttatctctaacaagcttagatggactccattctaaagtgaactttcatcagccctgttatttcctcaaattatctcctctcttgatcctaatttcttgagctatcagtatttggttttccatagcttattctctctccaaccataaccccaacccctaaaaactggcttttgctttcaattacctccttttatgtcatacacagggcacatttattcactcagcaaattcttttggagcatcattatacttggtgcaagaaacacaattgtaacttggattttacaatctagcagggaagacaattaagtaacaggtgaacaaaaaatacttggaaataacaaggtatgctacaaaggagatgaacaggtagactgctgggtgaaagcaagggaagattacctactggggtacccgtggtcaggaaggcttttctgacacggtggcaaaaaaatagcccggttgttccatagcctgtagaatgaccctttagaacagaccaatctataaaaatctgaagcaagaaagaacttggtgcctttaaaaatggagtcagttctacacagtaagtaggatgtaaagtaagggacgatgaatcctggaaacagactcaccggggtcaggagtcattgcaggctcagattctgaggctatttctagtaaaactccagtctgctagg

SEQ ID NO: 44556 - DNA, 2052 bp, Bovine  19866880796306
  misc_feature (1)..(1): n is a, c, g, or t
ntttaatatactctgaggccgtggaagtaaaagcaagatggagctattttaggctctatgaatctgttcttgggaataattactttgtggaagaactactatgtgattgatgttttatttcttaataacctaacctgactcatcttagtttcacagataatcctttaaagtttgtttccttggcattagattcttttctaaagataaatactttgcattttctttctttctttttttaaggtactgtccaagaagctggaacgttgttaggcagcaagaatgttcgtgtcaactgcttggatgaggtaaaattttaaatgtttaataagatgttttacttcttatgagaatagataatgtataaaatctaataataagagttgttttctagcatttgtcctcaagttatattaagctctaaagcaaatatcagcaagacaggttgcaaaagacaaatagcatgtaaaaaatgtttaattttactggcaatcaaataagtgacaattaaaccaatactatatcatttcttatgaagtatgggaaacactggacttatatatgctaatagattaggtataaattgacatcacattctgaaaaaaatttttagaatatttctcgtttttaaacatgcataccttcgatccagcagttctcctagggaaggttaactgaatctaaactctacattatagaacagttgctgtccaaaataactttctgagatgatggtaatttctcttccaagctgtccagaatggcagccattagccatgtgtggctagtagctacacaattatgcagggcagttctagtactacagacagttaactgaatttctgtttctcacgcagaaaaggaagtgttttgttaaccctttacccacacatggatagcaaaattaatatcagacaaaataaagcaaaagcaaaaaacaaacaaaaagatgaagactctttgctatagatcattaagaatcctccaagaacatgacagccttaagccttcactaataagcctataagctttgaggttcaaaatgaaaaagacagaaatcaaaggagaaatttgtaagaccacaaaagcatcttctggttaagtagaagtattcaagagttggaaaattggataacctaacagtctctgcattgtgtataagacagaaatagtacatccccattttacatggaacactggtaaaaatttgcctgtgaatgatactaatttgtacaggaaaattgtagctaattttgaacaaggtcaccaaatgtaatataacactgaaaataaaaatttgatccaaataataaaacatataacctgaatgtgtgttaaaattctgaataattcttggctaaaggaagaaatagaagtagaatttacctactatttacagctgaaagcacaatatttatcaaaagctactgttgatcaaaaactggtgtcatgtggccaaaatcatattcagaggaaatttcgtagcatttattattgtactttaaatctttgtggtggtctgtgctttcagctcatgaaattagatgaaaaataatattctcagaaaatacaggaaatgaattaagaaaaaatcgaaataaaaaattttaaaagtcattaaacataagcaacaaaagaaaaaacaaaaatgaaaacctttgtacttcaaaccacaccatccaaaaaagtaaaaagaaaacccacagaatgaatggttttacagatcctatctggtaagggatttgtaaccgaaatgtgttaagaacccctacaactcaataataaaaattacaaatcaccctatttaaaaatgggcaaaggatctgaatagacattgttccaaagaaaacatacaaatggccattatgcacatgaaaaaaggctcaaaattagctgccaggggagtgcaaatcaaaaccacagtgagaggctactttatacccactgctactgctgctgctgctaagtcacttcagtcgtgtccgactctgtgtgaccccatagacggcagcccaccaggcttccccgtcccctgggattctccaggcaagaaca

SEQ ID NO: 44557 - DNA, 1024 bp, Bovine  19866880844628
  misc_feature (1)..(1): n is a, c, g, or t
nttggaacatgactgaagttttcagggattatttatccgaaattaaatattccaaagataaataatgtaaccctacttcattcatcactagcttcaagatcatctgagctttgtatggcctctcagctttcttttggtttctgtggttttctcttgtgttgtgtagtcgggagatgggttgtgtgtgtgtgtacctgctggtacctggtggtaaaggggaggaaaatgtgtccttttgcattagtttagactaagatagcaatttagaagccagtgtagcttgaaaatacttctaaacatctgttcttataaaaatatattaccacttggaagtgtctttttttcagaagataatgtatttacatttgtgttaaccagttactttgtagtatcatttacttttcgtacaaagtcatcagatctacttattctagtctgttttgaaataagcatacacttgcggacacatgtttctgcctcattctttgcttccatcagtagacaagttcagacttaggaggcaaaagtccagcggaaagtaccagaactgagggaagaatatttgtctaaccacccacgccacagaatgctttcttggaatccgctgtgtgtataagatggtatcctgtcccctcaatatgtgacctttgcctttctgacaatcaaatctgatccacaaggaaatcacaaaaacagaaatattgtttgctcaagttataccagatttgtttttttaaaaaatcagtctggttttaaaaattgaaaactgccccacaatcatttatggaagtttgctttgtgacctcagtttttagcaaaggtggtggagactttatttataaggaaaaacaattcaagggtgactaagagctatagaaattaaactggtttttgtttttttaatgtgtatggaccattctttattttcactccttaacagctttcctgagaatcttaagccgaaacttggtttgctgaggtagtctcgacctcggctgcccaaccaggattcttcatagggcat

SEQ ID NO: 44558 - DNA, 1905 bp, Bovine  19866880913254
  misc_feature (1)..(1): n is a, c, g, or t
ntttctggttagaaatgttattccatggagctgaaaatgagagttagagaacaatatacttactacaaaaactatacataattatatgcacatatataaatttagttaagagctaacatttgctgtttttattaattatctgcaacttcttgcctgggctactgaattgcctttgaaggtacatgtgataaaaagagtgtgtgcccacaggactggaaaaggtcagttttcattccaatcccaaataaaggcaatgccaaagaatgctcaaactaccacacaattgcactcatctcacacgctagcaaagtaatgctcaaaattctccaagccaggcttcaacagtacatgaactgtgaaattccagatggtcaagctggatttagaaagggcagaggaaccaaagatcaaattgctaacatctgttggatcatcgaaaaagcaagagagttccagaaaagcatttgcttctgctttattgactatgccaaagcctttgactgtgtggatcacaacaaactgtggaaaattctgaaagagatgggaataccagaccacctgacctgccccctgagaaatctgtatgcaggtcaagaagcaacagttagaactggacgtggtactacagactggttccaaatcaggaaaggagtacatcaaggctgtatattgtcaccctgcttatttaacttacatgcagagtacatcatcagaaatgctggactggatgaagcaccagctggaatcaagattgcagggaaaaatatcaataacctcagatatgcagatgacaccacccttatggcagaaagcaaagaactaaagacccccttgatgaaagtgaaagaggagaatgaaaaggttggcttaaaactcaacattcagtaaactaagatcatgacatctggtcctcagttcatggcaaatagatagggaaactatggaaatagtgaaagactttatttttttggctccaaaatcactacagatgatgactatagccatgaaattaaaagacacttgctccttagaagaaaagctatgaccaacctagacagcatattaaaaaacagagacattacttggccaacaaaggtctgtctagtcaaagctatggtttttccagtagtcatgtatggatgtgagagttggactataaagaaagctgagtgccgaagagttgatgcttttgaattgtggtgttggagaagactcttgagagccccttggatggcaaggagagccaaacagtccatcctaaaggagatcagtcctgaatattcattggaaggactgatattgaagctgaaactccaatactttggccatctgatagtaagaactgacttcttggaaaagacccttaatgctgggaaagattgaaggcaggaggagaaggtgatgacagaggatgagatggttggatggaataaccaactcgatggacatgaatttgagtatgctccgggagttggtgatggacagggaagcctgacttgctgcagtccatggggtcgcaaagactcacaaatgactgagcaactgaactgaactgaaaggagaaaaaaaaagtcttagtccaatgagtctctttcaataagctcactgcttggtgcaggtctttagatgcctgagccagaatatggggccctatttaatatttcactaagtatcttcgatggttgacaaatctttctgttgctatgctcctgtcagtttgtgatgaaagttggtttctctgagtacataaaagacctccaagggggcagtgtgacctaatgccatgccagctttccagtatcagttctagccttatgaatatatattccaaggtttatgatgtcatcattactactgtaaatttttttttcacatatcctgctttctttttttttcttttttttt

SEQ ID NO: 44559 - DNA, 1120 bp, Bovine  19866880971961
  misc_feature (1)..(1): n is a, c, g, or t
naattatcacattactactgggaatctatgattcatctttatttttttatgtgtcattatatttatcaagtgttaaaataattcttgctggaggtatatcatcactattcctgcatttaaaaagccaaaatgatttggacaaataaaatacaaaaagaaacctactttttgagatactactactgttctgaaactattgctaaggagaatttaaacatgggtgtctttttatgctccaataatcatgagtatttcataatggcttttaaataatctcatcaaaacatgaaatagcattatgaaaacaagtcatctttcatatcctccagatgtaagtactttctgctcatacactgtgattcctggaatttgttatttagaaagattggtagattgcagctgtcaaaaaaacatcagatattatttgaacttgtacatcatcatggactgtatcagagattataagaaatgagtaatgatgataactgtaaagtgatgggcttgtctaaaagatcttatcttttccaaagctctcatcatttttagtatgaatttgatataagtttagtataaacatgtgagttagagtctgatgaccagacattttaattttatagttatagtaatgttttcttttttaaatgtttaggcttaacttttttttattacattgttaaacagttgtgagaaatcactaccctactttgtttaacaattgtttgtttatataccctgttttaaaatagtctataaagaaaaaacaagaatatacagattggaacaaaaggtagtcactgtcttttccagattggaggcttactttattggtacatctaacctgggtctacttaataaattaaatttttttttcagtcttcctgtttatgttcgttgtagttccttagctaagattaggtgaagtgaaatccttaacattctaaacatattaacttgtatataaacaggaagattcaaaagaggctagcctggatgaagggttagacctactaatgaattatagccatagattgtaaaagaaaacatcattagatcttggggtgtttgccagaaaaatctctacagctttatctttctcagtttttctctcatgaccatgcaa

SEQ ID NO: 44560 - DNA, 771 bp, Bovine  19866881334409
  misc_feature (1)..(1): n is a, c, g, or t
ntttcttcagtctctgatccttcccatctctccattctcctaactacacggtgaagtgcgatcttactttcaagatgagattagaaatttcgtgtgctatatgaattggaaatagtcaaaagcactcttgataattcctctaatgaaccattagggtacgtaataggagtatttaactctgatctgaattcagaaatgtttgttaccctgcaaggagaatcccactactttaaagaaaaatattgattttataaccctgataaaatttgacagatttgagttatgaggatgagatatggtagagtcacagggtggggcagataagttctaaaagcagtgcttaagttaaatgtgaacaatgctcactttacagcttaatacaggatgtagcagggagaagaatctcatgaaacagttttgatcaagtgcttactggtttatatatacagaaataagtgctcatgattgtaaattagttttatatgtttattaaaatctatcacgggaaatactgtcatcagttaaataaaactgttttaacttttgatggattgatttaggtagacagatgccaacttatctgacttagtgaggatttattagaaattttactcatgccctctcataactcagaaaagctattttagacttatattctaagtttgaaaatgggtttccttagcaaatttaattttttcttatacttgcaacagtcccaaattatgaatctatgaaatgcacatgttctgctcaacctcattttctctcagt

SEQ ID NO: 44561 - DNA, 1168 bp, Bovine  19866881359973
  misc_feature (1)..(1): n is a, c, g, or t
nttgcctggaaaatcccatggatggaagagcctagtaggctgcagtccatggggtcgctaagagtcggacacgactgagagacttcactacagggaatttttgctgtatctcttaatgatggtggctctaaattaagttcatggtgagatctaatctaaacctgccctaccagctctttaattcattacataattcttttggaaatttttaaaaagcgcagtacaccatggctgctcttacatttttacctcatttccatttcaccttatacagcttggcaggggcttaggaacacttagtcatgttctaatcctgtgtgactcccagcactcaactaagaaagcaaggcagttttcaaagctctcacatttttcagactgttgaagagtctacaaaacagatccagacttttatgatggctagatttgcatatatatattggccaatggctgtatgggcttcagtaaaaatctctgaagaaagatctgtaatgagtttgccaccaagtatagggacgtggccagatggcttctgtcatgattcaaatttcaatattctgtgcaccatcatcccataacctgccttgagctgagtcatgagtttcaaaatgtcagaacagagttggtgggagcagcattaaaacatacatccatgttaggcaaacatttcaaaactgactgaagttctgtcattgatatttgtcaagaggtcttctgaatttgttgggggcaggggactaatttaatttttactttcttctatgaatccagatatgaggtattttgctaataattgtacacaacagaaaaataaactgaacctcaacaaggttaaacaactaattaggctgcatgactccaaagtcagtaactattcgtgccagcattctgtattcaatttaggaagaacgtgactgcaaagtctgatccgcaagttctgttcagagtaatacgtcatcaaaagtgattttctacttttatgaactataaccataatccttatgaatgacatgtaatatactaaattctctcttttgctgttcccaacatgccgtgcctcaaaggctttgcctgaaatactcttcctgaatatatctagatagttagcttcctcatgcacgtcaccttatgacaggccttcccacaccacagacacacctcactgttt

SEQ ID NO: 44562 - DNA, 1969 bp, Bovine  19866880276694
  misc_feature (1)..(1): n is a, c, g, or t
nctatttgtaaggcctcctcagaccgccattttgcttttttgcattctttttcttggggatggtcttgattcctgtctcctgtacagtgtcacaaacctccatccatagttcatcaggcactctatctatcagatctagtcccttaaatctatttctcacttccactgtataatcataagggatttgatttaggtcatacctgaatggtctagtggttttctccactttattcaatttcagtacgaatttggcaataaggagttcatgatccgagccacagtcagctcctggtcttgtttttggtgactgtatagagcttctccatctttggctgcaaagaatataatcaatctgattttggtggtcaaccatctggtgatgtccatgtgtagagtcttcttttgtgttgttggaagagggtgcacattaataatttttattcactgaaactcacttttctaattggcctcagagacatgtctttctctattaatgtaggttgggaggaaattcttgaaatagatattttttataaaatatctgggatttctagaaaatattgttatggtctatgatataccaaacatgatttacataacatttatcttcaagtattagagtgtacaaatatgcctaagctttagataattcttcacaatattttcatatctcagtttgtaatgatgattatctgtgtactggaaatatttagaaatgccagttaacagaggattctggttagtaaaatgctgggtagtattactagaaaatcagtataactatatttttcctttaaacattaatatttgcaacataatagaaatgtgctttcaataaaattgcctttatatcaagaaccaattaatattttcaccttgcttaattatttcatggtaaccaaagtctcttctatacaagtttcatgccaagatgattacatcttgttagtcagtttccattctgtaaaagtagttgctggatcttcatcttgttctgccttggaaaaggaaagtgatacctcatgttggtcagctgtttggatatgtatgttgtattcccttcccttataattagctctttttattacctcatttcaaaagattattaagggcctgggtgacagctactgtttctgaaagcatatacctgagattagcatttatagaaacatagcaagggatattaacaaagaaaacactaattttagatgagactctaagattctgatcttcagatttgctactctctgtgcaaatttttttcagagtgcttttaaaaataattatggttattatgataaacagttttagctggaagttgaacttgaaagaggactaatatttttccttctgtgtttatcacttctctatttggcctcaaaactcaaaataactattctccccacccagtaaaatggtaattctttagtcagttgtttgtattaaatattatcttggctccaagttaagcacagaatttttttcaacagaatcactgccattgctccattaggcctgtccttactcctaaaagacatttgattgtaagttcagtgagcctgaattctaaaattcaaagcagaattttaatagctgaaggcaaatttattgggggccaaaccccatccagccttctccagagtcaaggtgccagtgcccctcaggagtaaagcactactcctcttccttctcaggggcagttttggaatcagaagggccagtgaaactgattatcaagttttctgtcttcagatcatataactcccatcccgtggtggtgatgaatgatgtcccatttcctttgaaaggggaacacagaatttagtttttgcttaaaaggatgataaatttggatctgactctggagctatttgggagagggaaagtttatattaccagtaggcttttggaggctcctcttagtcattttttcaatttcctaagaaaaagccactcttattctcctcag

SEQ ID NO: 44563 - DNA, 1507 bp, Bovine  19866880440786
  misc_feature (1)..(1): n is a, c, g, or t
naataagttattacctcacactgttagaatgactatcatcaaaatgacaggagataacaagtagcaagcacttgccagctcccatgatagcatgagccaattccttaaaataactttctctctctctctgttttcctcttctctccctcctcttctccctccctctctctctctctctctctccctctccatatatatgcttccattgcccacctcacagggcacgcatccaagaattctcaaaaagggaagagagagggttggagaaaggagggctgggaaagaagagacaagagtgaaacctccccttccctcccttcccctccgaagaaaattaccagccagggaagtgaaaacattgtatctttaaatccagttcaggattgtatcctaacttggaactgaatatcttaatttctgaattgaaacaaattgtgattgtacaattatggtttattgttggtatgtaaaagaaaaccagggcagggaaacacttgctccaatgaatatatttgaaacagacaaaaaatacactttttgaatatatcccaagagccctgttcttcaaggtaccaattacacgagtatttctttctgtgattaaaacacagccaaaagggacttccctggtggtccagtcattacgaatctgctttgcaatgcaggggacacaggttccatccttggtcaggaaactattaataagatcctccctgctgcaggagcagccaagccctcaaactacaactactgagcccatgtgctctggagcctgtgggccacaacaaaaaattctgaatgacacaattaaggcctgatgcagccaaataaataaatatttttttaaaagagccaatattcaattttaacctcaatttaatgaatatttccacatttcttataaatctaactgcatatattattggttgcactgcctaaaaatgtcttttatatgagaacttacaggataaattctttaaagattccccctaaaagttagatttttcagtacacacaaaaaaatgtatatttcaacttataatgaaaattatactacctttatctcaactgacgtgtattaccaatgtaccatgtgctaatgatagccaagtggatactgcctctggcctctagagtcactggctggtaggagagacaatgactgcataagtaagtatgaagttaaaagttttgctaagcattatcaagaaaagtattgtgtgagactacaacagagggtgacaatttagatcaataaatttaggaactgtccctctgaggaagtgacatttaagcttagccccaaggagtgggagttaattagttctgcagagaacacgagaagtgcatcctggcaaagagcagcacgtccctcactggaggtaagatgccttgggtatatagaagaaaacgtagctggagtgtaaagaggaaaagggagagctcttggtaagggattctgggaatcagtgagatgataaagggctttggagggcacagtaagaat

SEQ ID NO: 44564 - DNA, 1482 bp, Bovine  19866880462295
  misc_feature (1)..(1): n is a, c, g, or t
ncatccatttagcacttgagttcagcaaagatggcatgaggcataagcacatctatccaccactctggagttgaaacatcccccatgaagggagtgaaaaactagagaaaaaccccagaccatggcactaaaaccatcaataaggaacatagccatttgacctatgactgatttgcaagtcatagtcacaggccctaatgacagccctcatcaatgtatggtctttctgacaattgcacttacagcaagaatctatcatctgaatgttaacataatatcaaactttaaataatatttaaaattttaagtggtaatgattctaatttatcacccaaatctgaagtaataatgagagcatttgtcttagaaacacagtggtctcttgctttaactatttttaaagttatgccactcattttatcaccactgtctggtccaaactcagatgatgccctggtgccagaaattgcacagatgcataaatcagacagaaaagtacaacagaatgtcttggtaattggctctgaagcatgccagagaaacctgtattatagctggaataaactttaaattgctgctttaaaagagaaaataaggggaagaatgactcctgaatttctgacatgagcaaccaggtagatggagttagcatatattaagacatcacaggcccaaacgggcagatgaaagaggatgagcaagttccaaacatgtagcatttaagatgcctgtgaggtacctgggtgaggtgatcagtttggcagttgtatgtggggaactgatgtttagaagaaagatccaagctagaaacagaaaaaaaggttacattgttggatcataaattataggcaaaactttgttaggagataagatttctcaacaaaataagtgtaaagtgaactgaaaagaaggtacaggactgaaagggagacaaacagtagaaccaggactgtaatgccatgaaatccaagaagaaaacaatttgttccctatttacttttaagaactagatctggttctcagcagtcagagctcactcaccccacatttggcatacactcaaccccacatctgggtacaaatacacatcactcatcccacatctgggtacaaacacttctctactctctgctctcctataaatcttcacatttcactaatttttcttgctctttcccccattgggttcaaactacacaagttatgttgggcatttgctcaagaaagcagataagacaccaggaggtctaccagttggcccaagacaaagctcattacttcaaatcacttccatacacagattcttaattttaactttgtaacttccttaagtgaggagttggtgcaagaaagaaactaaaagagagacgttggaaagcaaagattaaaagacaaagaaaaagagaaagagagagagaaaaacagagaaatactttagagagatgtctcttctaccagagaatcatcttaaaaatctttagc

SEQ ID NO: 44565 - DNA, 1118 bp, Bovine  19866880465773
  misc_feature (1)..(1): n is a, c, g, or t
nagctgaggtcagaaaagtaatgaggagctgagtggtaattgaaaggtgaaattacatatttccaggttagtactctagtgggaatggagagaaaggctgaataatgtgcacactccccaaacacaccacatacactgttttctgccaggtattatgctcaggaagtctcatacattagttatgtgaggtgattatttcatttaatctttgtaacaactctataagataggtattattatctcagtttttcggatgataagtctcagagagctgaagtgatttgccaagatcctaattgttttaagcaacagagctagaattcaaacctaaatcagtctaactccaaatcatagccttatataaaatattgtacataatataaaaaagcatggagtaaaaggtaactctcaggttttgaatgtagactactatgcataaataagacatctggaagcacctatagtaaaagaagagaaaatatagatgaaaagctgctttaaaaagcacttcatgagttttaattcctttatagtagtttcttataagaacagtaccttctgtgtaattctggaccctcttctgtcctcatattttgactactgcattcgaattttgaggaataattctgaccagatggagtcccaaattatagggttctttttgctctaggagagatttgtctagtggagattcttttgaagaatgcatggtaaggctataactatttggaccaaatcacaattatttagaatatcctactttccttattcaacaaacaatgttggatcacttattgagtacataaggccttttggaatctttcctccttccttttgatccgctgttcccttcccatggaaagagccctattttctttttctgcccactctctgccctatatacacataaatagatgaaattcactgatcatttcagactcatctcaaaagaataccttcacttctgcctatttgagaactcttagagtcataaataattctctttcttttatatctaatcacttagccaatcattctaactctccttttaaattttatctaccatctaactacctcttaatactttcaaccattaccaccctgggtccacaccccat

SEQ ID NO: 44566 - DNA, 734 bp, Bovine  19866880595878
  misc_feature (1)..(1): n is a, c, g, or t
ntggaggtgagaatgagcttagcaaatacatatgaaatcagggcaacagtcagactgaagtgaaaaatgtatgttgcagagtggtggaaatatagctgaataatagcagaaatggattagaaaaagcctggataaatcagaatttggactatagttagtcagtgatagaacatggaagttgaagcctggaggatgttatcactgattatcatgagaaaattgtaaaaaggagctgatttggaggagagataatatgttcagttgaagacatgttgtgtttgcagtgatgacataatacataaatcaaagtcctaacataatatcactcgggactgaaaataatttatggctagtggtgaaaatttaggacacagtaatgatgctaaagctgaaactccagtactttggccacctcttgtgaagagttaactcattagaaaagactctgatgctgggagggattgggagcaggaggagaaggggacaacagaggatgagatggctggatggcatcaccaactcaatggacatgagtttgggtgaactccagcagttggtgatggacagggaggccctggcgtgctgcaattcatggggttgcagagtcggacatgactgagcgactgaactgaactgaactgaactgagtgtgtgttaaccactatattcctagcctttttgaccactgtatacaccctgcatctttctaatcttattcaatagtaatagctatc

SEQ ID NO: 44567 - DNA, 1539 bp, Bovine  19866880597935
  misc_feature (1)..(1): n is a, c, g, or t
nctaggaaatataatacaggtggttccccaactattttatgtacatgcttacatattctcttacctaaataagtggaaatttgggggttcaaatcccaactttgccacttctgattcttatgacttttggcaagtcgctaatgtcaatgaatctggttctctctccactgtaaaacagaaacaacaatatctatctcaaaaagtaactatatagatgaaaatgaagtagtataggtaggatgcttagcacagagcttggcaataagatagtcttaatatagagttgtggttactgtttagtagctaagtcatgtctgactctttttgtgaccctgtggactatagcctgtcaagcttctctgcccatgggatctcctgggcaagaatactggagtgggttgttatttgcttctccaggggatctccccaacctagggattgaacctatgtcttctacactggcaggtggattcttcaccactgagccaccagggaagcccttatatagagtagttattgttataattattattaagcacataattgtttgggcaggaagctgacacatagcttaagcatgagtaaatgatggactatcattcaatggaagacaacatgtagccacagtggaagaattcttgagaggagtctagtctggccgtgtttgtgaatttaataaagacttcgtttttgtgcatgtgggtacgaggttttccaggcatgcaggaaagatgtggagcatcaaacaagttttgttagggaccttcacatgaactatctcctacattgcaaatgattataacatctttcatgagtcagctctcagaaggctcaaggttgtcctggtcctatttaaacctgtctagcagaaacctgggactttccactggcatttgcatttggtttataatctcaaagcaggtttaggtacaaataccacttgaagaatttatctcagtcttatttgcatcttaactgtttttttttccccctccaattctgacatgaattggaaaactagcattcttgtaggcattatttttcaaagacaaattcataagagggtagacaaattcataaaagggtttactaattcctgcaagtgagacagaaaaaaaaaagaaaaaagagaaaaagacaggtttggctgaaggaaaactgcaaaacagtcaaggtcagggattaacagagatttggatggaagacagggcttccctggtgctcagacagtaaagaatctgcctgcaatgcagaagacctgggttcaatctctgggtcaggaagatcccctggagaagtgaatggctacacaccccagtattcttgcctctagaattccatggactgatgagcctggtgggctacatgttgatcaacggatcaaaaagagtcagatacaactgagtgaccaccactttcacttggatggaagaaaggaccagtctcttaagttcatctatttgcccttggtcctctgtagtgtgctgattgttaccctaccccttggccagcttcagaaggggaaagtacagagctgat

SEQ ID NO: 44568 - DNA, 712 bp, Bovine  19866880678385
  misc_feature (1)..(1): n is a, c, g, or t
ngagatggtgaaggatggcaaaggctggtgtactgtagtccatggggtgacaaagagtcggacatgactggatgactgaacagcaacaacaaattgtttcattctatcacagcaaacccaggacctgcaccctgcccaaagcatatattcaataaatatagattgaatgaatgaatgaggtttctgattagctgactatctgtaactaagaaccaatttattgtcaaccagagaaagaattttcttaatttgaagactttataaattgacttatattgtttctacatatccatattactaaatcaggctctgatttttcaaggcagggattttaaatgatgaaaccatataaggaaacactagatatcatagctttggttaaaattaatttttcttcttcttccatttcattttttcatatataagattcaaccaaaaagcaaaactctgtacagaaagtatttgataattcttattaagcaagccaattaaattataattaaaatctggacactaaaggtaagattgttgcaaggacgtaacaacagagcaaaaaaaataaaacactttggacttccgataattaactagataccaaggaaactgttatgactctaggaaatgtagatgagatagaatgcatgggttatgttctgccttgtgagacattaatgcaaatattataaaagttctatcacatttttataacaca

SEQ ID NO: 44569 - DNA, 2225 bp, Bovine  19866880703523
  misc_feature (1)..(1): n is a, c, g, or t
nttttattgtagaccttgcccttgagctgtgctctaaataaaataatgctctcaaagaccctcaagcaggcaggtgatggttcccctgcctgtatcactgtcacttacatttctggccgcatctcctcatcccagtctgttcttttctactgagaaagagaacttgcaagggaaagcagatcctagaattatattcatagaattttaatagttataaaactttaattctaattttttcattttacttatgaaaaaactatgccccaaagaggttaagtgtatgaaatctgtaagctttacctttcagatctttctaaatccgtacatttagtgcttctctcctatgaagtaaaccgcgtacattttatgaaaaatacttttctcaacttcattttgtcctagatttggtcaaagtttggttgccagttaaccttgacattgttgtaccttgcctgttttataattaatagttaatatattttaagtcttcacagttctacctcttcatgtgaattttaatgtttaaaataatttaatgacaacttgaaaatgtttgtgggttttttttttatgaggatataatgagaggaaaagtgacaaaaccaaaaagtataaaaagaaatatttttaaataatgaattttggaacattatagacaattcacaaaataattcaaatttaattagaggtttttaaagaatatttcagttggctgttcagatgattacttcttcttgtttattcttcatttaaatcaaactctgtgttttaaggaattgaaacatttggaaaaaatgttgttgtggctggaagatccaagaatgtagggatgcccattgccatgctcttacacacagatggagaacacgaacggccaggaggtaggtgccacttggagattctatgcactcttattaatacaatcttctcacttcctaagctcttcaaataaaaatgtatttggaaatgtgatttagcatatttgtgggtttagctgggagggattgagggcaggaagagaaggggatgacagaggatgagatggctggatggcatcatcgacttgatggatgtgagtttgagtgaactccgggagttgatgatggacagggaggcctggcgtgctgcaattcatggggtcgcgaggagtcggacataactgaggaactgaactgaactgaactgaatgcaataaaggtttcccttattcttttcccttattcttcatctaatgacatgtgtgcacacgtgctcagttgatcagtcatacctgatcctttgcgaccccatggactgtagccagctgggctcctctgtccatggaattttccaggcaagaatactggaatgggttgccacttcctactccaggggactttttccaacccagggattggaaactcttgtgtctctgcattggcaggcagattctttaccactagtgccacttagtaagccccaggtgctgctgctgctgctaagtcgcatcagtcgtgttcgactctgtacgacctcatagacgacagcctaccaggctccgacgtaactgggattctccaggcaagagtactggagtggcatatgacatcagttcagttcagttgcttaatcatgtccgactctccgtgaccccatgaaccgcagcacaccaggcctccctgtccatcaccagctcccggagttactcaaacccatgtccattgctttggtgatgccatccaaccacctcatcctctgtcatccccttctgccttcaatgtttcccaacatcagggtcttttcaaatgaatcagctctttgcatcaggtggccaaaatattggagtttcaacttcaaacatcagtccttccaatgaacatccaaggactgatatcctttaggatggactggttggatctccttgcagtccaagggactctcaagaatcttctcccaacaccacccattcaaaagcatcaaatcttcggtgctcagctttccttatagtccaactctcacatccatacaagaccactggaaaaaccatagccttgactagatgggcctttgttgacaaagtaatgtctctgcttttaatatgctgtctaggttagtgataactttccttccaaggagtaagctttttttaatttcatggctgcaatcaccatctgcagtgaatttcgagcccccaaaataaagtcagccactgtttccccatctatttcccagaaggataggaccag

SEQ ID NO: 44570 - DNA, 2314 bp, Bovine  19866880714935
  misc_feature (1)..(1): n is a, c, g, or t
ntatactgaggtggagaaatccagtagaggcctgatatatgtggatttggggttaggaagagaactctaatcaaaattcacaatgtgatgtttaagagtttttaaataaagacattccatatcatcccgtgttagcctgatgtatttaaattttacatattaataatattaaggcatattttatgctttacacaagtgttatcaaacaacttttttatagcaaagttgtgtggattgcatagttatgtcacactcggtatagtagagacaaaattatactctaaaaacagaatgattatcttaaattcataaatgttgaatctttccacatagatacttaaaaatcattaataaatgtttctcacagcttatattttatgttcatgcttgtgtttctgttatgttcacagtaaatttgtcataattattctttatcattcaatgcatttgatttccattatatagtttggttaagtttcccagtggacctgctttttccagtcttaattctcacagcctattttactgtcaaataatttttttcatcagagacagcctaatttcagtacctgcatttctcatgcctatttattggttaaatgctttgtaaaaataggaacaaatgattttctcagtactttatggtctgattatctgttttctgagcctgatctgcttaatttttgcttgaataatctattgacttaaattcatcctttttttaaaaaaactaggatctgaaatgaaagttctacatactttaaatatactctgtaatttttcctatccatttaggctctttttctgttcatccagtatatttttcctatttataattctactcctatggtgtccattcaactctggagggtctgattaaggcagacatggtcatgacattcataaccatggtagtaactattaaaagtcctttatccctctgttgggtttccctggtagctcagtggtaagtaatccacttaccaatgccagtgcaggagacatggattcgatccctgggttgggaagatcccctggaatagcaaatggcaacccattccagtattctacctgggaaatcacatggatagaagaatcggactggctacagtccatggggttgcaaacagtcagacacaacttagtgactaaacaacaaacaaacaacagcaaattcctctcttaacaaattattgcctctgcattaaaagacaatagattctagggcatctaatccatatttagatggatttaggaatggtgcctaaaatcatgatattttccttgtatatcagtaaataatttaaaatctactctacagcttctgtgccattttgaatatggcccttgaatattatgactcacttcaacaactgactccagtaaactgactctggactacagaggaggtagaaggcagtttttaaaaccatgccttcagtgggcttatctctttctagtttattaattgtttagtaggcctaactttatatgaggctgtatcaagtctttgtttatagttgttaaaaaaaagctgtctagcaacacccatataaggcataaaatatgccttaatattatgtgaaatttaaatacatgatactaacatgggatgacagtggctgcctttatttaaagtagaaaagtctctttcaagcatcatgttgaaaattttgaagtgttaaccaaataataaaagaggagaaggagaatggaaatacagaggacctagatgagatgtgatgagtaaaaaacagtatgaattacaagtgggacagtactgacgttattcataccatctcgtgatctccagtagccgggaccatgtcttatttatctttatatttcttgtacctcgtgaagaaccttacattgggaactagaaaactcactgttaaatgaatacatttccttctttaaaagtcaggtgcttttcttggtttaagggttttttcccctaaaacttgaagagagctttcatcggggcagatgatctcttcaggatccattcagactctgattcttcttcaaaccttgtttggggctgttccacttcatgaagccttaatatggcattgcatcagcaccactgactcagagcttacacctgcagaattcaaaggtaagatagggaggaggccgagaaacatctgagaaatgatgactgtcttcaatgaaagaacgagaaaatgctatctctttgctctctattgtgggtagaagtatgagcccttctttggtgaagtcatcattcctgtggtatattcagatttgtggtactgctgaatatttatcccaaatgtattaggactgg

SEQ ID NO: 44571 - DNA, 1758 bp, Bovine  19866880716586
  misc_feature (1)..(1): n is a, c, g, or t
natgatctttctctaggtcaattgcaaatcttatatttgaatttttgatcttgaccatgggtccctgatgagaaaacataaccctatggtattatttggatatagagtttggataatgtcagcaaacagattggtggccagccctacattggtaactaccatacagaggaatttcacgctaaatggtaatttgtaaacacaaaaattagccattggaacttctatgtcaataatgttaagaaaacaaaaacctgtctttggagcccattatttctgtccaatttccaaatgggtttcagaaatttaaagctcgcctattcatctaccttcacctttcagagatttgtttcagtgaaatctcaaatgtgccagcaggaagtggcactggtgactcacaggatacaaatcacctctactctgtgagtcagggccgagcctacaccttacacaatactggggacagctcgtgggagaggttgagtgccctcgctccactggggggtggggggggcactaaatgtcctgggccctggggcattaagtgaaaagtgcgtgcctgacagtcagaaggaatgctaaaggtagaaaatgtccttttttttgcatacggtgtcttttgtccttgcttccttctggccacactgaggggccatctagatggagactgagatttggtgactggttaaccaagcctattctgcaatcatcaactgcaattctcagagataaaatgactctcctcaataacaatcaagtcaaatacaaatgacccaaaataaaatgagatgggttacagaatgaaaggaatgcaccttattttcctaatttaaccttttcggatatttagaccagaacagccaactcattatgaatcacagtaattgcccagcccaaacaggcagcaaaatcctctttgctcacactttctgcttggtcacatgcctacctactcacaaaactgttagttttctactttcttccagggcagtctgtaattttaggatttgtctttaacatactaggcttgttaggtcttgtatactttctttcaaggagtgaatatgccttcatcatttccagatgtctttttgtcttaaatgccactattagataaagttaaaataactgtaagctctgttatcacatcagacactgaaaagcactactgaaagactttctagtaacagcctatttctcagaaaatagcatatataatagtatatacatatcataatgtatatctatatagcataaaccttgcttcttgccagcaatcattttctttctacagcttttaatgttaactttaccactaagcatcatttaaaaataaatgtaaaagccaacagtaactatttagataaaaacaggataacagaatgaaaccagaggttgatataatgacaggttacaaataagtcttgaattttgaatttcaaatacagccataagatcttctttgtaaagtatcaggagaagatgtaataagccatagtttttcagttcagagacattaaataactcttcaaatctgtggcaataatttctaaatcatacttcaaaatgctcatatattttggttatcatacaatactatacttaaaactattcaaatcaagaagtgtgtgtcaaaatatgaaactagagcttattttatcataaaaatggattttaaagctgtctatcttattcataatgggaaatgttctcataatataggagaaggcatatccattactgtataaagtatacaatttt

SEQ ID NO: 44572 - DNA, 1634 bp, Bovine  19866880728851
  misc_feature (1)..(1): n is a, c, g, or t
ntttgttgttagttgctagtcgtgtccaatcccatgaaccgcagcacaccaggcctcctgtcctccactgcctccttgagtttgagctttcatccccttctcctcccaccttccatcttttccagcatcagggtcttttccagtgaatcagctcttcacaccaggtggccaaaggactggagcttcagcttcagcatcagtccttccaatgaatattcaggattgatttcctttgggattgactggtgtaatctccttgtagtccaaggaaatcaaaaaaagtcaattatttagccctagagtccatcacgttttatgtaagtttgttaatagcttaaacaatacttttcttaaactataccgtgacacaaaaactttgaaagatagaaacaaaagtattttttattagtcacattaaaataatgaattttatttacaaaagatgcctgcactgtttctcctgtctttattttttatatacctcaactttgttaatcaagaaaatccttgttttttctctgagatagaatggcttagtacaatgctttagttttggaaactcatcaaattttttatcaggccagaactcccacacagcatgctaaaaaagcattttcttaaaatgctaccttcatgtcttgagaagcctcctgaactgtactttggactgtggttctcattacaggaaggtgttacaggagtcctttctttatagcattcttggtagaaaagcgttaacacaggctaccagctgtctagagagatgtttgtcccagctgtgccatcaaacacttttgagaacttggacaaacttcttaatctctttaaactttaattttattttctgtaaaatgagaggattaaactctcatttacaaataatctgtaggattccttctagctataaaattgatagatatttgtaacgttttacttcctttatggcaaaaaggaattttagaatgccaagtttggggcagagctgggaaatgctctattttattacattcattttgtatcatattttaagaaaactggactgcgctacagaatatctaatacgttttttgattaatttatctggaaacttaattaacatattcagagattaccctcattctcttagtcttatgttggcttccattttgtactatcttttatttacatactaaataatgcttatcagtctattttgtaaaatgacttggcctgaaaggttttcttgtgctcaacaagctctatccacaatcgagtactacgttccttctatgtagctaaagctacattctctctgtactttcgctattgtagctatttgagcctagagaaagggatggttaagagagaacctaaaaaaatttttttttcatgaacctgtacatttttaccagtctggaaataagatcttaggctttattgatgtttaattttgtgactgcagtaactaaaaggaccactctaatttctaacactttgttttccaagtcctcttcggaaacgtcggaaaagaagaaagaaggaagaagaaatggaaactctgggtaaagatataactcctataaatgatgatattcaagagactagtattgcttaatggtaagtgtgataaacttagtagatggggagctcttcag

SEQ ID NO: 44573 - DNA, 1871 bp, Bovine  19866880742708
  misc_feature (1)..(1): n is a, c, g, or t
naaatcaaagggctggcagcctgaccttttgtccttctgaaaaaccggactctgattcctcagaaaagtgtcaaaatcagtttaacatcccttctgactggtgataatgggtgatttttccatcttatacttttttgtacatcttgaaatttttgacaatgagtggtcttccctttcaaaatcagaaaacagtaagaataaagggggtgacttaaatcacattcaatttgtatttatgttctaaaatgaaaatctgggccctggtttcttctcttcagtgcttacttaccatcaaagattcctcctttacattgagtcctcgacttcatccaaggtttgctggtaaacagcttggtggcatagagttagttcctttaagtctgcatgactcttctctggagtcctgagggctgcgaagggcaccttacattatgacttattcaggtctccataacagtgaaactgagcaagacaattcctgatgtaacctgccatttatacagcagcatctttttagccgagactaatttaattcgtaatctccctttggcttgtgaaatgacccaaggaaccttgttttggctcaggatgaattctaaatcactataaatctttattattcttatcaagcccttgcacatgccctcctattcaggcagagactaatccacacagtttggaagcttacacatggtgaaatggcatttacctttctaaagtctttcagttttatcctgccaagcacccttatgtttaccactgaatataattaagttgaggctcacccagcagataattcaaaatccacagactcagccttgtgtcctttctagttctttcctctcacctccctagctagttgtgaaaaacaacgcaccttcccccccccaaaaaaaatcttcaaaatctgtcacagatcattgtcctccaaaaagtactgttgccatggagatagattcctatcatatctttcttttcaactaaaggcatgactggaatatttttagctgtggacagtaaagtctgtttattaaaagttgttattaatttgtgcaaacaagtttctgtaggcttaaagcaactgtgaatcacacatatcctgtgttggcttgatttttttttttttttttaatttgagcttctaaattttttcactatgtgagttacctccttccagagctaattagtaaaggaagtaagacaggacgagaatagagaattgagctaagtgagggggaaaaaggggggaaacgaaaagacaggttaagtatttttcttgggatcagagagatctcaatcacataacaatggttttttaccctgctctgagaaaaaccagcttcactgacttaagagagatgcttaagaagagaactgggtttctcagtaaatcatgactggtacccagtcctgcagctgtaaaaggggccttggaccagctcggtgaattccatgatgcacttggaggagtttggagggttctaagcatgggccttagaagcagcctgggttccccatcccccagtttttaactggtatatgcattcacccacataagattttgctatagagacataggatttggggcaggaggttattgtttgtttaaaaaaaaaaaattgaaaaatgagactggtttaatctcaaatgagattaaaatgagactgctttaataataaggtatattgtatatattatataaactgttgccctatcaagactttatttcaacattcattacttcatagtcctcacaacaattctgccggggagacaatgttatttcctttttacagatgagattaacagctatacatactttcccctcccttctccaggggatcttcccaactcagggatcaaaccccagt

SEQ ID NO: 44574 - DNA, 3458 bp, Bovine  19866880851990
  misc_feature (1)..(1): n is a, c, g, or t
naggagttggtgatggacgggaagcctggcaagttacagtccatggagcccaaagagttggacacgaccaaggaactggactgaactgaactgctctgtggagcttatattccaataagcaaaccagatgtgaacctgcaaatttaaaaattgctacattatctgcaatttattttaaattgcttatactgtgtggtatatagatagacattttaatttatatcctgggagtggctggttaatattcaaacaactctaatcagaaatacacacttcaggcatggtacttgaaaaactctaatcaaaatccaccctccagggacagttatcataaagtaacagttacattaatagttgatcaatagcagaaaatgtgttacttggtataatggatattggagataatttttcttttgtcaaataaaagattttccaattttaggaaatgactaagaatgttgtacaaactctaccaccatcacattaaaaactgtaggaatctagcaaatctagtagccttctatcatttgaaatgatgccttaggccttggtatctcttctggttgcatggtctaccatttaggcagtgtttgatactgattcaaatttagctgaatcctgctgctagaatattttcacatttgcctcaaatgaactctttaattaagagctggtctgggtgcatgaaaagacagagtgctaggatttcattgagcttaccgaacaggctgtgtgatgagttttgtgccttcctgatggtatttgttgtgcagaaaccattagatttgccttcagtgtaatatccctgctttttgtgagttctggagaagatataataattataaatggccaaatgagcctaggtcgttttacaacagtaattaatttcaaatgttataaatgccctaagggagaagtatgggtaatatggaagtatataatatctattcctgatttaatctaataaatcagaattaggggttacatgggaggcggggggaattaatcaactgtaggtaaaaggccaaaaatcaaggacggatggaatatttaaggctgaaagaaggccacctgagctatgtcaagaagagaggacactcgttaagacacgaaggagccaaattccatgagtcttgtagctaaagatttaactatcaatagatggaattaaaagaggcaaatgattgaaggaatgagtgagtgagtgaatgagactttccaaagcagagatcaaagaaagaacgctaggtccaaacacacaaatctttcctgtttgacagaaatcaaagactaagccaaaaggaagtgctacttgaagaagcgtgatcttgggcaatgtggtcagccttcaactttagcaaggaagagtagctattctgatcaaagctctgccctagtgttactccaaaaccaggtttgcctcttgatggatgtcaagccaatagacaacgaagccaaagatcagaagaaaggatttactacttgcagcaagtaagacaccagagagctttcccaaagtagtgtttctccaaacactacttggggaagtttaagctaagggaacatgcatattgagcagaggagaattcagcacagaattgagacaaaggttcacagtgtccaaactttagttgactgaagtcaggaggatcaacatcattatctcttgaggaagaactaggactctgctttatcactgcactgctgtttgactgcctttttctctgttcctatactcctttgttccctgagaccattaattactgagacctgttcgaggacaggcattaggattaaagaatttgcttaatttctgttagctttttagccatatttccttctttaaaatagcagtagtattggatcacaaagtggctagggcatggcagagactggtaagtccttttactcccagctacatttgcatctccttgccatgtgatatctaagcagtctctttcttctggttgcagtagactattccctcttacacacataatagtcagtttccaatccctcaggttgaatgtcccaattcctagaaggtgctatcagtcattccttgatgtgccaaattcccagatatttgaaagatcaggcttagatccaaaatggcctaggccaaaacgacttgtcttgtgtccagaaaaccatgcccagttctcttttcctggggacctgctaacctatctgtctatactaggtgagtttttctggcattttatctttgttcttggacaccaagtttatcttgtagatactgctgtgctgaaagagatctcagaggtagagattagtgggattctttctggcactgtgtttggcagtggtgtttttgtaccagtgtccaattagcccacaactccacagtgaacagcaaacctcattcatttgcataattatttcctttgctgtttcctttataaaaaataatgagccattatgcacataattaaaccacgcttaacaaatgagggccaggctgacaagaatcacatgagaaggccaagagaaattagcatcaaggcctgtatgctaagcataaggccaatctaatctgcactgtctcctgggagcagaaggactccttgggagtctctgcttttggattttcactgaggtcaagcttccgagagaaaacatgatttgatttcatccagcccttctcctctgcttctctctttctcctcctgtctttctcagtgagaagtatctggcttgcttgttattagggccctttgcaacaaatcctttgattcctttccccctctccctgaatgagacattttcccaatgaaccttactaaaaaactaatagaaataagtgaagttctttaatcctagaagtccagtgataagctttatggagaccaatatttccttctttaaaatagcattggatcacagagtggctagagcaaggcagagactggtgagtccctttcctcacagctacatgcgggtctccttgctatgtgacttctaagcagtttctttcttctagttccagtggattgtttcatcttacgctgatcctagtcagtttccaatcccttggactgaatgtcccaattaatagcaggcactatcagtcgttccttgatataccagaatcccagatactcggaaggtcattgatgagtgatgcagtgaacattccaggtctccctggtctggattctattttccttggggcttcattattcactggatggtctgaggagcagcagcatcacatgggagctttttacaaaggcaaaatcttaggctccactcaagaccttctccagacctactaaagcagaacagatatattaagaagatctccaggtcattgtttccatattaaagactgagaagcaatgatctagggtaaccagtgggactcattcggttcagtttcttctagggttttggactacctcgtattcactatgtggtaaaagaggaattccagt

SEQ ID NO: 44575 - DNA, 1353 bp, Bovine  19866880857279
  misc_feature (1)..(1): n is a, c, g, or t
naaactaacccaatactataagtcaactatacttgaattaaaaaaacagaaatacatgcaaaaaaagcatctaacagtgtatagtacatagtgaatattcaataaataacagttataattatgaaaatccctacttttcagtgattaaatttcattaaaagaaaataatcattaatacaaatcctccctttccccagtaaatagctacttacaaggaagcagtcaaatttatacccatagaattttaatgttgaagagataatcacctaacattcttattctataaagcaaaccttactcctttagtggcaatcataacaaagttgcatatttgaatatattttacagtttggattcttctttgaacctagtactcactaggcaaaaagatatgtttagagcatgaattctgctttcctgaaagatgaacttttggattcctctctgtttcagggattatgaaagttctagtcagcaaacattttgagtaaactggctctattctgcatccctcattttctgtggcattaccaggaattcatgcatgtcaggctgtgctcatgatggagtttaaatgagtaaggaccttggtttctcttgaagggaattcggtcctagaacacatgtgggaggctgatccaggatttcatttcactgggcttaatgacgttcattcaggaagcaatggtgctggacagttcccttccaaacaagctatgaatgaccaggaccatgtccaggatttggtggatcagaataattaaaagggtgatgttattatggtcttgtgcagtaactttcgcctttgattcattatccatttccacatgaagtgatgctttttcatttttatctgaaactgatctatttttgtaatcttgttgaataataaaacatttgaatgttgaagctaggactttggaaatagtgccagctgtttctggagtggccaggaaatgagatttcttaattcaagctcaagttgtcctaatgtccagaaaatgagatttttaattcaagttcaggcttagcccacatataccactagtcttctccagggcagtgattccaccattgctttgtgtttggcatagttgttccaggaccaccgtgtgtgtgtgtgtgtgtgtgtgtgtgtgtgtgtgtgtgtgtgtgtgtgcgcgcgcacgagcactcatgcgtgcctctagaaatttgaattttaacaagcatatcaagtgtttccaatgcaggtggtaactgagaaacagtgacatttaaagaatgagcttctattttgcatttgttctatcaaggaggctgttctagttacttcttgctgtgccatgtgtgtgctaagccacctcagttgtg

SEQ ID NO: 44576 - DNA, 1739 bp, Bovine  19866880971047
  misc_feature (1)..(1): n is a, c, g, or t
ntgaatgtctgagggaagaagaaagaaggaaagaatgcagtgcaaataccaggaataataaaagcaaaggaactttggacctgacaacaaagccgatgcaatggaggagctcaaaaaagtgcattatgactgaagcacatggtgcaagcagagaagagacagagaagaggctaggaaggtggtcatgggctgcatgaccattaagtgaagggtcaggacagctgtagatactgtgttcaagatgaataagcttttgaaaaaatttcttttgcgaataaacctaggcatttatgtatttaagaataaccagcttttcaaagtgagaaattggagagaaaaatgtatggtggtttagtcactaagtcgtgtctgactcttgtgatcccatggacggtagcccaccaggctcctctgtccatggcattttccaggcaaggatactggagtggattgccatttccttctccaggggatcttcacccacggattgaaccccagtctcctgcattgcaggcagattctgtatactgctaaataattttcagaagaaaattaaaataaagaagaaatccaagttttattttcataaagttttaggttcttgaatgctattcaattatttttcaagaaatcccttttcagcatgaaatatgtatctaatctgctatgcttccttttctccaatatgtagacatctactctttatcatgttattgatttcaaatttctaaagggaagaattaacacaggtttggcttgacataatttccatcatttcttacttgaagtcaaccatctttcagtttgaaggtaagaagaacaggcatggcgcagaagtttaaaatttgaggtaatggagggatgatgaaagaaaccaggtgttcagattaggtgtgccttaaaaaccaggggtgacacatggtcacaaggtgtggaagtattgctaacgaaggatacttacagctacataagggattaacagttaccttttaacaattaaagtaagaataaagaagaagtgtgtgatcgttaaccttccggcaccagcaacccatgcttcatgacagggtatctctggcttgtgtgttgtgtgtcattatttcctctggaaactttactttcccaggttttcaggatctgggtttaataatccagactctcattttaaacacttcgttaggaagactcactaatttttaagcagatagggaatttctattgctgtatgatgtatgcgctcattcactcagttgtgtccgactctttgtgactctttgctcaccaggctccctgtccacgggactttccaggtaagactactggagagggttgccattcctactccaggggatcttcccaactcagggatatcaaacccatgtctcttgtgtctcctgcattggcaggcagattctttatcacggcgccacctaggaagcaccatagtatgtgatatactgactccaaagttcccgaataattgaatttacatatatacctaaacagaattaatttcgctaatacattttgaaaattgtatattctagttaagtcaaagaatgtatttgtgctttataaatctattcttgggtagaagagaaagaattgatatgttaaattcccacagtactgttttatttccatttgtattttgtccatttctctctcttgcaaaagaagtactctatggcccatatcagatttccagcaatggtacaactaacttttaaaccaactcc

SEQ ID NO: 44577 - DNA, 1454 bp, Bovine  19866880972803
  misc_feature (1)..(1): n is a, c, g, or t
nacgtaaatcccctgttctagagaaagaagactgcgtctgtgtgtgatgctcaatggctcggtcgtatctttttgatcccacagactgtagcccaccaggctcctctgtccatgggatttcccaggcaataaaactggagtgggttgccatttcctcctccagggcatcttcccaacccagggattgaacatgcatctcctgaatctcctgcattagcgggtggattctttaccactgaactgcctgggaagcccaccccccgccccgcccccgccaaaagactatagatagttactgaaagagtgtgacgcatgtggtaagcatttaatactgaaaaacaggaaggatggatgactacaggttaatccactgcaggtctttggagttcctagatcctccaggtctactgacgctttcttccctgtttcttactatgtgtgagtcagtatcccccaaaatccagctgttccacctggtaaagtgagagctctggatgcaaaatgcttctgaaattgcccacaaagtttcttctattttttatgaagagatggtacagagatttcaatagcattttcagtgaaagtcactcagttatgtctgactctttgagaccccatgaactatacagtccatggaactctccaggcctgaattctggagtgggtggcctttcccttctccaggggatcttcctaacccagggattgaacccaggtctcctgcattgcaggaggattctttaccagctgagccaaaaaaccattttttaaattgttgaggaaatctttgtctgggctgatttccaagcctcctttccgtcttcttgactccctggagctctgccctgcctggtcagacttttccctggaggggttgcagggtttctggcattcctctgaagacagagatggataaggtgtgcaggtttgttgatgttcacttggtatttttagtccatggttagcaaaaggagagatagcagcagaatggcttttgttgactatgaaatctcacatctctcctgtaaaagtcccctttttttggagaatcctttttaactggctgcccctgccgccaggattgctgcctgaatcctgggcctcactgttgccaggaaactttctactccctaaaaggtttggtgtgtagtctgtcataagaatgggccttaaagactgtcatgataaacaatttagctacacgtgtctctaaaggtgtggatttttgtccatcttaggaagtctctgctagagtacttcttagctctgtttcttccctggtaggttcagagtccagtgtagaaagaagttcatctgcatcctcatgcaaataacacgtggctgcaaaattggtttaaagtctccttggctacagttaaaaagaaaaaaagaaaaactggataactgcattgcaaaagaatcaaatggacttgtttctcacactatatacagag

SEQ ID NO: 44578 - DNA, 589 bp, Bovine  19866881241855
  misc_feature (1)..(1): n is a, c, g, or t
nggatcaaactgggtctcctgcattgttggcagattccttaccaactgaaccactagggaagctcagcactgttataagggtttagaatatataagtgaatcaaacaaacaaaactcttatcctccggagctcacattttagtcaatcatttagctgtagcctcttgatgagctgggcttccctagtggtggctcagatggtaaagaatctgcctgcaatgcaggaaatctgggtttgatccctgggtcaggaagatcccctggagaaggaaatagcaacccactccagtattctggcctggtgattccatggacagagaagcccggtggggttacagtccatgagatcacaaaggatctgacatgacagagtgactaacacactttcacactcttgatgagttaattattttcccggagtaaatacagctttggaagctgtgttcatggttctcaaaccaatacataatattatttaagttacaccctctgggttctacgtcaatgtttcaagacacaaaatacgtatcaggtgcttacctcttgcccaatatcatttaagaattgttggatcatcaagcagtgacaa

SEQ ID NO: 44579 - DNA, 1364 bp, Bovine  19866881257539
  misc_feature (1)..(1): n is a, c, g, or t
nagggagagaaaacccaactgctgctgcagctgtatgtgtgtgtgcctgtgtgtgtgtgtgtagtgcatgcagatgtgtgcttatgtctgtccatgtgtgtgtctgtgtgtgtctgtgtagtgcatgcacatgtgtgtttgtatatgtgtgtgcctgtgtgtgtgtagtacatgcagatgtgtgcttatgtctgtgcatgtgtgtgtctgtgtgtagtgcatgtagatgtctgtttgtgtatgtgtatgtctgtgtgtagtgcaggcagacatgtgtttatgtatgtgtctgtgcatgtgtgtgtgtacaaacatatgcatatgtatagcttgttattataaaaagataaataccatttttaactttcaatcatatgaacatagtctttaataaagattataaacattatgttgatgctgcaaaggatagccccctttcattctttcctcctcaagttcattgaactccaatttgcagtgtgggtgttggagatatcagttacaagccattctggatgaatccaagtgtaaagaaaataatctttgctcctacttctaaatgcaagtcttctaaattgagagtattaaatgggctactttctctgagttgaattttttatggaggaaaaagcttcaatgaatttaattggttgtttagtggagtgagaaatattaaactgctaactccatggagacctagcctttctatacagctttgggaagtgccttgaatataaaataaaactcagttatactggattgtccctgattcaaagtataagattatttgaataggtactaagtaaacctgtccctatttcatatcagttctagtgagatctagttaagcaactaaatattttaagtttttaagaaatatatgattgccttatggggagaatgtgtcttatctctcaagcaagtagctcaaaaatacagttgatacaaacaagcaatactcactccaggtttctgaatataaagtatgtgtatgtaaaatgcatttaataacaattgtgctcttaatttaaaagtttcacttaatgggtttctaaaatctttaacatcatcagctttatgaatactacctcaaaaagattatataataatttgatgaggctaccactcttttcttgcataggctacaattactgagactttcataactatgaattcagaaggggaaatgttttcaacatcaattgacttcatgcataagatcctagacattaatttatacattcactaaagttgaacaacaaaaacaaagtcttattgacagactactatttatgagactgagagtcataaaaagcagaccaaggttccactaatattttttagaagttcatcacctatgaaag

SEQ ID NO: 44580 - DNA, 1060 bp, Bovine  19866881314276
  misc_feature (1)..(1): n is a, c, g, or t
natatgtttaccacagctggggatttaatatttgggattaatatcccggtaatccttttgattgacttggaggtttgtccaagaagcttccatcctgcaggaatgacttggatgcaaatatcaaatgcaactgctgggtggagaaaccctcaagagccaaccgtagcctgattaattagaatcaagtctctagaatcacatctacttcagacaaaatacaagctgtatcataaagcaccaaaactaaccactaaacaatttatgactgttgatacctacttagaatcaggtttttaaaatgggattctaaatgccttttgcaaagttataaggagtcaagtatattacacaaccaccttcacccagcactttcataaatcaatgacttcaagtgggagcacaggactttaaattataagcaagaagataatgatagaattaaatcctgacctttcccataaaagcaaccatcctcttccccacccccactcttctctaatttacagtaatgtagtccatatggaagaagtcagtgtgtgtttgggaaccaagtcttacactttcttttccatcacaaaagccagttgttcttcagaaccatccatcaggatcatattacattctgaagcattaaaaaggaggcctgagctcagacctcctgctgaaaagttaagttgtcagttgttaggcagaaaatcaatcagaaatgcatttgggacaatggcctgctgcctggaattacaccaggctagacaaaaatcaacccagtggcagaaaaacactaatggttggagatatccatgctatcttagacaaggcagatcaatttatttagacacatttgctaaacggaattgtgccagtgccaagtctcggatttacatataattatagcagaacagttgcaagattttctcataagcatcaagatactctgtagctccaacatgtgccaggaacttcaaaattgttatagattgctttggctaattcacattcctatccccaggtcttgccgtagacacagagactttgccacagtttgggtaatcaatcatat

SEQ ID NO: 44581 - DNA, 775 bp, Bovine  19866881396535
  misc_feature (1)..(1): n is a, c, g, or t
ncttcaatatcttaaggtacacaattatcaaagctgatatggaacacaaaccaaattgatacaattcagtactccggataaaattcattgtcaaataagttactttaaactgcatgtgatacaactttatgttctacagcatctttaatataaactgtataccaaaatggctcttcaaacgtaaaaagtgcaattacagagtgcaaaaaaagcagagagaaattcactatcttacatttaacctcatccaacttgaataacaggcatgtgttagataaaattattcttcagtcaaaacattaaaatttactcaagcaacactgtttatataaaggttgttactccccttttccccataggaataagagtagacaaaaatcagaaattattgggcagcaagttaaacacattttttcccaaaagtctacatactgactgttgcagcaaaaatagcaaaatggatcagacatgagtttttactgaattcaatagaaattagaagctaatatcatgtatttggtacatagaaattgatctgacacctcagggcagttgaatttaactaatcctcttctcaggactcagaaataaaaatctgtcctcccaatgcaccatctctctccttgctttgactttggcaaagagataagaacaaagaatgtccaaaagaacagtggcatttgattgtattttaaatatttaataaattacacaaatcttgatcatgaggttatctttagcatcaatcttagaccctcttggttatagagtatgt

SEQ ID NO: 44582 - DNA, 593 bp, Bovine  19866881526078
  misc_feature (1)..(1): n is a, c, g, or t
nttatgtaataaacctggaaaaacagaaactaaatgactactcatttcatttttaaggaaccttcctgggctatcaaaatagaccagttcctattttaaaagttggtgaaaattttgccaattattctgaacttcttcaatgctatccttgatctttcttgtaaattatataacaaaatagataactatgttagtcggatttctgactttctttcttggtacattgtcctaatctgagcaacgaagatttgggatgtagtctaaaataaacataaagaaatatatagtactgaaattctgcagtggttttaaaataagtataattgtctcacatagaaaatattagtgattaaaggtaaaatcattgtgatgcataataaactcattcacattagtgattcacgtgtcatttttgtatgtcttcaaaggcccagtgaacttttgcacaaaaagaatttttgcctttaactcacttctctagagttcattgatttcctgttaaccgagattttgaaataccaactgaggtttgctctagaataaacaatttgaggaggacccaagccagtattcagaatgctaaaggggtcaaa

SEQ ID NO: 44583 - DNA, 1134 bp, Bovine  19866881783767
  misc_feature (1)..(1): n is a, c, g, or t
ncacgcttattataaatgaaaatataataactacaacaaaggaacaacctagcagacacctctataaccaagtgatgcacgttaacaagactggtcataggacaaaccaaacaatacctgtgccctctggggtgctgactatgaaggacactgtgtcctagtttgtgggattcttgccaatagggcatgatctgattctaaccatcaacaacattagacaaactaagtcagaggacccaagaaactggtctgtattttaaaaacgtcaacacactgggagacaaaggaaggctgaggaactgttccatattaaaatagtttaaagaggcatggcaacaaaatgccaagactgagtctgcctttgttttaagggacactactgggatgaaatctaaataagcctgtctaaataaggttagttatcaagtctcatactttctagcctcagatgcctccttactctcaaaaattgaggaccccaaagaatttttgttcatgtatcaatatgtaccatactagacttaaaactaagacatttaaagatatttgattcactaaaaatatacccactataccttaacataattaaaaatgactaaagtttctaaataaaaaaaatgagtagagtggttattttttcttttcttttacaatttctttaacgtctgataataaaaggcagctggattcgctcatctgctcctgcatacactatgttgtgatatattgttctggttgaagaaatacatgaaaacaaattttgccatatacagctacgtggttaaaagtgaagactatttaatggccttttaagataattgtggatattcttctttgatactataccaaaccttgacaagtggttgtttgttagaggttaactatcatgtggaatatgaactgcactctgtacatttgtgagaaaaagtccttatgttttaagaaacacatagaaatatttaaggataaaaaggcatatatctgaaacttactctcaagcagtttatgaaaaaatgtatacaacacatgtaagtatgtatatacatatataagtagaaaagtaaagcaaatatggcaaaatattaatatttgtgaaatctaggtgaaagatatataggaactcgtgttactgtt

SEQ ID NO: 44584 - DNA, 1089 bp, Bovine  19866881865126
  misc_feature (1)..(1): n is a, c, g, or t
nagttttctaattccactcctggcttttcctacagtctcataatgcctcttgagtaaaatttctaattaacatccaaaggtattgtcttagctgtgttaagcctgagccataaattatttctggcttcatatacgggtcataacaatacctcttctgaaatcagttatggaaaacaatttcctttccattagctacttaaggtccacagatgagcaagggcagattctcatctcactcctctggggagtgaagagaaatcaaattcattatctcacaagcacatatccacatctccctaagtgcttacttctcaggtatatgaaagtttctatatttattagcatccaggatacatttgggaagccttgtttaagacaccatactgactagtatcaatgctgccaccttttggcagacttgtatctatatcttataatgaaatttctaaagaacagaatgataatcagtccacctccaccacctaatttattaatgtgtctagataatattaacctaacctttgtatatgtaacctgccaaaggaatgaatcaatagttcaagtggcagagcactcaaagaatattcttaaaatgaaaggcctttttgtatatgtgttacgaatctactatgaaagcgtgacccacttcatctgttaatatagtatctcctttttctagctgactacacagaaggacccatagccttgaagttctcacatccttgcctggaagatcaccacagttactgcatcaatggtgtctgtgcattccaccatgagttggagaaagccatctgcaggtagttgcaaagaacttcccaagtcctagagatgggagaaggagaatgtatggtgtttcacatggtacctttatatacacctctattttacccagtaaaaaaggtacatgctctgaacatgattcaccaattctctttgtatttgaatatctaaggagtctttttctaacctacctaattctcactgcttaaaagtatggttcctagattagcagcatccgtgtaacctgggagcttgttagaaatgcagaagctcatgccacacctcaaaactacgaatccaaaacaa

SEQ ID NO: 44585 - DNA, 1779 bp, Bovine  19866880415813
  misc_feature (1)..(1): n is a, c, g, or t
ntttcattttcatcaagaggctctttagttcttctttgctttctgccataagggtggtgtcatctgcatacctgaggttattgatatttctcccggaaatcttgattccagcttgtgcttcatctagcccagcattcctcatgatgtactctgcatataagttaaataagcagtgtgacaatttacagcttaatgtactcctttccctatttggaaccagtctgttgttccatgtccagttctaactgttgcttcctgaccttcatacagatttctcaagaaaaaacttgcatacagatttttcaattaaaacttaaggttttaatgtgcaaatgttcttgcttctaacttcactgtgtgattcatgccatgtctcatttagtttttaagaaaaatcacagaaaatcatactaaaccccaaatcttctgatggagattttgtgagaagggatcactatggagaaaagagaactaagagtctgtgtaaagataattagtattactgaaggaaaaaggaaagaattagtaaaggaaaaaaaaaactttcaaaaatttaataaaatattcttgaaacattagaacacctgaacattcagatatcagttactcaatatataagaaaaatgacagggtataatgattaagaagtatcctgatgaaagtactatcctatgttaattagcaaaagaattttatagggagttaccgtgtccatggaattaaagaaggaaaataaacaaaaaatagattacctatctagttttgatagaaaacaatattcctcatattatatgactaaaacataagaaatatattctctaatactcaggaattatgaaaagatagcaagcatatattttacatataatatgtatatgtattatacatataattatacatataattttatatataatctagccaatgacctgttgaatcaaaattaagaaattacaataaggtagttgcatcataaaaaaacctgatggcacttattaaattttttttaacttcttataattgtgtatgaagtaaagtgaagtgaaatggtagttgcatagtcgtgtccaatgctttgtgactccatggactgtagcctgccaggctcctctgtccataggattttccaggtaagaatactggagtgggctgccatttccttctccagagtcctcccagcccagggattgaatctgggtttcctgcattgcaggcagattctttactatttgagccaccagggaagtcaatcacgtatcagtctctttaataatatgacctttgtgttttttccattatatgtgatgaagctacagtagtctgcagaatttttcataaggatatgtttttgttaagttgaaccatatgaagctgtaatttttgtaggtcaaaaatggttgacataagcaatttcataagattcaatttcacagaaagaatttttagttacaatgatggtaaaataattctaagcatcgttttctttgatgatttaggtcaaaagtttttaaagtttatgtttgtaagtctattcatatgctatcatatttctcttaaatccatgaatttttattagatttcctagtaagctccttttttcagattaaaaaataaatcttgccagaacagactaattagtttaatctttatttgatcaaaagttcacttgtaaaagtccttgtgataatgacatcagtgtaccttctcaatgtttaacaataaatttattttccttatattgtacttaaaattgatcattttcagtattccaagaaaaga

SEQ ID NO: 44586 - DNA, 1491 bp, Bovine  19866880458485
  misc_feature (1)..(1): n is a, c, g, or t
nattttatgttctttgattgagataacataagacattaaagaaactttcaaatttggcaaaacatgaagatagaaaattactttactttttgaatgatttacaaggaatttatttcatcctcactataactgctgattttactctaatttttttttaatattgacctattttttgttaaaaaataaattatgtatttccttctatgggtcctaaatttttctatcaaagaaccactgaaacttgtttcatagttgagtttacttgagaaactattttatcttgaagcatttaaataaatttgtattttctcatccataatataatagcatttcttttgttacaatcttggtgaaggaaatgacaacccactccagtaatcgtgcctggagaattccatggacagaagagcttagtgggctacactccatggggttgcaaagaatcagataccactgagagactaacactttattacattccataatgcatactgatattttaaagatattccatggattaaaattgacacttttggataaaacggtacagatttatcctctggcttcttatatccatggacaaatatctatatgtctgagataagatatattgagtttttatagaacaatctgtttagagatctttatacttattgcagtaatattcaggaaaaaaacaaccaaaattgcatacctctatagatgtcaggctcaagagtatttttcctgctttaattttatgacttaatctttatcaaaagaatatttttgctatttttgtgttaaaatttgtgttagagcccatgtaaagtggaaagtagtattaattaatcatctctctagtttcagtaacttgaatctatttttgtgtttgttgtcacctctgtcaactcaaaaatgttcaaatcattgacgcagaccttatgtggacaaatgttgaaagtaaagcagagagcacaaaatcatttattaaaagagaaaagaaaagggttgacaatattttcctttcaggaccttaatttaagacatcagacagtccttggttttcacaatcatgaagtttgtaacaaatttattatatcattatgatacagaaggaagcacataaaaagatctttaaaaagtttagggggttagagtaagtctaatctgaaatgtttgtcagtttctaagcagtgcgtctcttctacattttcctcatatcctttgttgtctccagagagggacctgctagaagagatcagctgggggagccgcaggcatcacagtttggtcagcgtgacttgtttggtattcatggcttttgtaggttattgctctgtaacctatcaaggctctgcagggttcaatatctgacccaggtccacctgaaagcttctttttgctctctgatttgaaaaaattgacacagcaagctcttactttttatctacttcaaattcacacctatagaatctgggaaattgattgagtttcatggtccaacttttt

SEQ ID NO: 44587 - DNA, 2157 bp, Bovine  19866880463944
  misc_feature (1)..(1): n is a, c, g, or t
nacactacctttgcttttctcctcaaaattacctgaaaactctctactttgtatagaccagtctgttttctaataacaatagagaatgatattttagaaatacttgaaggagcttcggatccgccatctgtggtggaaccaccgccaaggtgcagattttcgtggagacgctgatggggaagaccatcactctcaggtcgagccctcagataccatagaaaatgtaaaggtcaaggtccaggataaggaaggaattcctcctgaccagaaaagactgatctttgctgggaggcaactgaaagatggatgtactttgactacaacattcaaaaggagtccactcttcatcttgtactgagactttgtggtggtgctaagaaaaggaagaagtcttagaccgctcccaagaagaacaagcataagagaaagaaggttaagctggctattctgaaatactataaggtagatgagaatggcaaaatcaatcgccttcgctggggagtgtccctcagatgaatgtggtgctggaatttttatggccagtcatttcggcagacattattgtggcaaatgttgtctgacctattgtttcaacaaaccagaaaacaagtaattgtatattggttaataaagatatgagctaacatttaaatgttggggttttattgcactgcctttaaaagtggactttaagcatcagattttctaaagtaacctgtactttgcagaattatgttgtatttagtatcagttgtttagatttaagccagttattttggccttagcaggattgacatttagactgataattcttggttgtaggggccttggtgtgcatcagtaggataatgaacagcattcctggcctctacccacttgatgccatgagcataccacccctccccacagccaaaagtatccacattgccagatgacccgagggtgggcaagaactatatatgctcttcctcacccctgcagattgggaaacacaggtttgtgtgaattggtattacaaccttgccttaaaaagcaacaaaatacttgtttcctacaaatgaagtttaaaggctgagctcatgagttgccaattcatccatcccaagtctctgggtggtttggctcaatatttgctgttggcaatgcaaagggtacatgctattattcagtgctaagtgtgtaaattctaatgtttacttactggtagtgttgatgctaaaaaatatggtttcctagtattggtacctcattttgtctctagagcacagttcaggatcactgaactaaagcacctgaaacttaaaacagattttaagattcagtcatacaccagtaatagtttcctttagccatattttcccatacgaggatttctagttgtatgcattcttaaataaggtttcctaggactgtagtattttaacagttaaacatcagttaaagcttggtagagcttcttgaccagtagtgagtggtgaactatactttcagtaaaacaaaactagttgctctataataagacaaaaacatttaatcatttatatatttttaaataattttaaaatcctggatcccaagaagtcttggctggaacttctttttcttcgtaacaaataatagcatctcccactttaaattctatcttttcttcatccaaactaagaccacagtccattccagttttgacaactgcagtatcatctttatggtgtttcagtgagattaatgagcctttaggggaaaaaagaaaataaagggttcatatagtcaacaaataagtgtccagcaagtactgttgtctgctacaacagcagactacaaggaaaattacacaggttttacacttcttccacgttacatgatggggctaaataccaaggaaaagggtagaaaagttacgtggcttgtagtaatcttcctttttaaaggtaacactgcaagggatgggggtggttctcaggacttggatgagctaaaccaggatgacactgcaggcaaaggtggttagaggatggaaataagtagacatggctcaaagggcttcccaggtggccctagttaagaacctgcctgcctggtacaggatataaaacatgggttcagtccctgggtctgggagatcccctggagaagggcatggcaacccactccagtatt

SEQ ID NO: 44588 - DNA, 837 bp, Bovine  19866880780166
  misc_feature (1)..(1): n is a, c, g, or t
ntacagattcagggaatttctcactggtagcacttgtataattttttaaaaaaagcaacttgtgaacttggttctttgttcctattctgccattggtccaataaaactcagatttataatacactacatgagcaaattaatcatcaaatatggcaacagtaatttattgctcccctcagggtcagagacaacacagataaatgaaatatataataatgtttaaatatcactttaataattccattaacattgctggtagtactaataatactatcactgtgaatgtcatcattgatatgatgacacacacatatatatatgaacacactcagtgtgttctaggtagtcaataaatgtcaacatgtgaattctcccagcagtactcatacacaggtactattatttgtccccaatttaaagaaacagcctcagagaaatcaagattcctgtctaaagatacacaactatcaatggaagaccaattttaaactcatgccaagatttttagatgttttttttttttttcctcttctatttcagggctaagacattggttctctcaatgcttgatccatttaatatgtgttttaggtactgtctgtgggaagaagagcttctaaggtaacaacttccatgaccaaataaatatgcaaaacactgtgtactattactctttgcttagggaattcaaaatgtatcttaccagagtaaaggcttagtaaagttttgcagtaaacaaacaaaaaaattaaaactaactctctaaacaagcaggattatttaatattgttaaatatagtgttttctagagttagaatattctatcagttaggacac

SEQ ID NO: 44589 - DNA, 3515 bp, Bovine  19866880928085
  misc_feature (1)..(1): n is a, c, g, or t
nttgttttcttctacttttttagtttaaaacttttaattcctttctgtatagtactcaacaactctgaagtagcagaaaatttaaagttagttctccttagagagaacattaagcacagctttctgacttcacagatagcaagttcctaactaaaccaatattttaattcaccattaagagagtgcactgctctacaggaaggtatgctgaatcagttctctagactataatatttatctgtttctgctgtgcatttgtaacccgttcttggcagcaattccaagataaaagttctaaataagtccttgaacaagtcatttgatgaagtttatggaaaaatcttccccaactaccaaattagaaccaggttacacagttagagctccactggtcaaaagctaaatgtggatgataaatgtatgcatgtgtccctatgcaaatgtgtttctctgggtgtacatagctcgatggaaaagacaaggaaagaggatctccaggaaacataagattcagtattattcagtgtctattgtatgttaggcactgtgaaatgctccatatttattatataatttgatttttctacaacacttaggaattattattattattaatttacagataagagaactgagttgaagttaattaaacaatgcccaatctcagcaacacaatggagtaagagaattgaatgccggtaacctaactttggagtccatttccttagctttttttttttactgcatttcaaaactaaagatgaacatttttagttaatagtatctcaacactattttctctcacttctcctacttagtggaaagaaaaataaaaacacctctgtacacaattttgaataatactgaaacttaaaaatactatttatgagactaactaatattttattattcagttcagttcagtcactcagtcatgtctgactctatgcgaccccatgaattgcagcatgccaggcctccctgtccatcactaactcccggagttcacccaaactcatgtccattgagtcggtgatgccatccagccatctcatcctctgtcatccccttctcctgccctaaatccatcccagcatcagagtcttttccaatgagtcaactcttcgcatgacatggccaaagtattagagtttcagctttagccatcagtccttccaatgaacacccagaactgatctcctttaggactggttggatctccttgcagtccaagggattctcaagagtcttctccaacaccacagttcaaaagcatcaattctttggcactcagctttgttcacagtccaactctcacatctatacatgaccactggaaaaaccatagccttgactagacagacctttgttggcaaagtaatgtctctgcttttgaatatgctatctaggttggtcataactttccttccaaggagtaagcgtcttttaattttattattaatattatggaaataataaatattcatataacaaatgtagaggcagaaaagttctaaatctgtgtctttatttatatcatcaatacctatatctgtatcatgtcaagggatatctggctagaatacaactcaagactatgtaatagctcattttaataaaataacaagaatgatatttacaacactaaaagtacatctgcactaagcccagagaagttctgcatccaaattagtagctttactccaaagaaaacattcctcatttgtgcaaattgaaacaacttggggagtcaggaaagtcaatagatatttaactcagggttttacatttgttggggaaacaaaagaacagaaaacacaaagacttttgagacatgtttccttgtataccaatttctacaagattttggattttaaatacacagcttcatttattaagaaaaggaagccaaaatatcagctatacccccaaacaatggaatgcagaagtctaagcaatgcttcataatgaaatcacaaaaatcctgtcatctgcaattgttcttcagtcgctgagtcatgtccaactctttgcaatcccatggactgcagcacaccagccctccctgttcttcaccatctcccagagcttgttcaaattcatgttcattgagtcagtgatgccatccaaccatctcatcctctgttgtccctttctcctcctgccttcaatctttcccagcatcacagtctttactaatgagtcagctcttcgcatcaggtgaccaaagtattggagcttcagtttcagcatcacttgttccaataaatattcaggatttatttcctttaggattgactggtttgatgcccctgctgtccaagggactcgcaaaagtcttgtccaacaccacagttcaaaagcatcaatgcttcgatgctcagccttctttatgttccaactctcacatccatacatgactactgaaaaaccgtagcttgctatacagacctatttctgcaaagtgatgtctctgctttttaatatgctgtctaggttagtcacagcttttcttccaggaacaagtgtcttttaatttcatggcggcagttaccatctgcagtgatttgggagcccaagaaaataaagtctgtcactgtttccattgtttccccatctatttgccatgaagagatgggattcaatgccatgatcttagtttcttgattgttgggttttaagccagctttttcactctcctctttcactttaatcaagaggctctttagttcctctttgctttctgccataaaggtggtgtcatctgcataactgaggttattcatatttctccctgcaatcttaattccagtttatgcttcatccagcctgacatttcacatgaaggattctgcatataaattaaaagagcaagattacaatatatatccttgatgtactcctttcccaatctgcaaccagtccattgttccatgtccagttctaactattgcttcttgacctgtatatagatttctcaggagacatgtcaggtggtctgatattccatctctttaagaatttttcacgttttgttgtgatccacacagtcaaaggctttagcatactcaatgaggaagaagtagatattcttctggaattctcttactttttctatgatccagtggatgtgggcaacttatctctggttcctctgccttttctaaatccagcttgaacatctagaagtcttggttcacatactgttgaagcctggcttagagaattttgagcattactttactagtgtgagagatgaatgcaattgtgccgtagtttgaacattcttcggcattgcctttctttgggattggaacaaaaactgacctccagtcctgtggcccctgctgagttttccaaatttgctggcatattgagtgcagcactttcacagcatcatattttaggatttgaaataggtcaactggaattccatcacctccactagctttgttcgtagtgatgcttcctaaggtccacttgacttcacattccaggatgtcggctctaggaga

SEQ ID NO: 44590 - DNA, 2270 bp, Bovine  19866880973216
  misc_feature (1)..(1): n is a, c, g, or t
nttatttttatttttaaagagagttgaatgctgtggggtaattctctgggcctttaactttcctcaatgtataatagcctttttgacttttaagaaccatgtgctgtaaaatgataagacaccacatacatttttctcagcatcattctgacacaagatcaagaaaaaggtgtaatcccagtggagaatgatgcctccttacctatcctttgagaagtcctttgccttctgttattgtctcatgacttgagagttcaggaaaagctgacatcatttaaggtctctgggaacgtggcctactcattaatagcagtgtctggaggtacagtgcaagaaggatgggagtgaggaagcaggacggaacttaagaataagacttcacttttcatcctgatggaaagtaaaaccaatatttttaatttttaataaaatacattcatattgtgacaccagcagcagaaagaatgtgctgcatataaatgaagatgactccctagtttgccttgagctgtggaagacaggagacataaagatgaagagggccttttacaagtagtcagtaggaagaagaataagtgcttggtgtcttagaaagcaaagctttcatgattccagagcatatttgagaaatggcatgatggcttgccccgctttaagtttggcatcagcgagattttcgattgtgctaaaatcatccttaatgtcctttctgcctcatcagtggggggccattcaagtaacaaagtgccaatcaggggctcctgttcctctttagcttggagatattactgtagagatctttataagagcgtgatctctccgcttgagatgccctttattataactagagttaaaggtctgctgacttagcccattataaagccctaatgttctccactacaaaattttactctaaaataaagcttagcatactaagttggagcccagggaagctctgatctttccaaatttgaagggaatagagtagtcatttgaggtaaaatgagagtaacaaaaatataaatatcaaactacgtgagttgtgtgtcactactgtcttcaaaaatagcattgttaattaaaatgaagttggaaaataattacctcataatgtaccataatcatttttgtaagtttagaatataaaaaatgtaattaggaaaaagaaaaatgagttatagacaggatacatttcttgatccagaaaactgttaaaatcaagtattttctgaaaatgtgggacccatattgctattatagaatacttgcaatcctttaatcaatgagtcagatactcctcatgcttaagcctctgcctgtaagtttcttagccatcatatatatgtatatacatatacatatatatatgcacatatatatgcataaacagcagcctagaggcagcctgttagaagtaaatagatctctacatttttattttaaaactattattaaaaacataaatttctaatgtctttttaaaaattaagtaatttattttaattggaggataataacttcacaatattgtggtggttttgtcatacatcaacatgaattttaagagaaaaactaaaatgtacttttctagtgatgcagaaacttttcagaattaaaaaaaatcaaaacatgttaattataagttcccagcacatcaatgtttctgcagataatgattataaacttaagacaagattaaaaccaaactaccttaagtctctggagagtaaacagtggcaggcagactctggagaggcactggtactggaaagaggagattttcacagattgcatttgcaaagaatttatatggaaataaacaaagtaataaagagtgaaaggatgcctctttttagatagtgtggtcaggaaagaccattctgaggattcatattggagctaagaaggaatatataagacagccaactaataaaatttctggcaagaaatactggagtcaaaagaaagaatgattgctgaggtactggggcaatgcttggcatgttccagaagcaaaatggagacccacggagctgaatgctagagattaagcggcaaactggtgagaaatgaagttggagaggaagacaggagccatatcatacatcaaaatgaaaattacccagggcttacattacaccagggattacatatagaaatacaaataagaaatgattcttgctctaaggtatctcccaatctagtggtaaaatgaagtttctgtatttgctgtcaaagcaacttgttgtggatggatcctagtcaggttt

SEQ ID NO: 44591 - DNA, 924 bp, Bovine  19866881073893
  misc_feature (1)..(1): n is a, c, g, or t
nttttgtgttgattatgacctagtcttggaagttatcctctgtgatttccactatattctctttgttagaaagagtcataaagtacagcccactctgaaggaaaggggatctaaacacaatctttggaaggaggagtgctaaagtatttgatttgtggctatataataaaacactacagggaggaaaaaaaacaggaataagacacaccattttaaagcttttataactagtaaaagtaacaaatacataaaagaagcatgatagaacataaaatatacttgaatagatttatgggaaatattttttaagatacagaggaaggaataatatatgtagcttgaatgagtttgtaaactttaaagatgaatagcaattcacaattcagagaaatgggaaatggtattttatgcaaagagaacagcatgagatttcagagatgaactctgggaagtttgaacatgggaatgttgaacatggaaacatgggaagtttggggaatggtactagtggtccgtcagagatagctcagagaatgaaagtggtaaggagttgcaggatatggtgttagctggtgtccaattgttaaaagaattatacactatgataaggagattgaacacaaaatccaaagaagattgattttacaagcatgacatttctttgaggcttcttctcttaatgtgaaaatcatatggcatttcacgctattctataataaatcagtatttttttgtttaaagagtttatccaacttttaagtaaaattaccattcccggaataggtgcaattgtttatgatctggcttcacatactgttcacatattacagggaaatcttaatttccctggaacatcttaatttccctggaaaagccacagtaaagctgctacccaggcacagacagccagcaaggctaaaacat

SEQ ID NO: 44592 - DNA, 1754 bp, Bovine  19866881297291
  misc_feature (1)..(1): n is a, c, g, or t
natttgcctgttctcatccattttagttactgattcctgagatgttgatgttcactcttaccagttcctgtttgaccacatccagtttaccctgattcgtggacctaacattcccagttcatatgcaatatttttctttacagcatcagactttattttcaccatcagacatatccacaactgagcttcatttttgcctttgcccagtcacttaattcattttggagctattagtagttgccttctactcttccccaggagcatactggacaccttctgactttgggagctcatattccagtgtcatatctttttttccttttcatactgtgcttgggtttctccaagaaagaatgctggagtcagttcccacttccttctccagtggaccacattttgtcagaactctttcctatgacatgtgtgcctagagttgccctgcatgacatggctccataacttcattgagttatacaagcctcttcaccatgacaaggctgtgatccatgaatgggtatttctctataccctgtatatttgtcctagtatatttcttgacataaagtagatataaaacatatttataaaatgaatactatcacaaattattcaaaaccatcattcacttaaacacgattgtactattttagcaagtgtaatatttacaaataaaaataccacgcacacaagttatctaattttgatatcataattttgaccaaacttgaaaaaaattatttatttgttaatttatagttgctttctcttttttcctctgtcacagacacaatatatgtgttgttgagaaaattctgattttttaataattgaggatactggtctctgtttcatcatcaactaaataatatttgatcaagctccttctactttagaaagtatatactaaatttctaacttatgaaaaatggactattaagtcatatatatgtctttacatctcaaagtttgaattaacattcaacagcctacctcaccttttactttttcctcagtgccttatttttgtaactttattgccattcattatgtatctctttggattttaatcctcttacagcctactcatttctaaatttgtcattgcctaaatatcataatttttttcttcttaactctttatccctataaataatatttcaatccattttattatgctatattcaaatgcatcttattaatcttcctcactgtaattctgtggtgatgtaatataataatctgatgaggaaaaatgtagtagaacatagacaggacaagcttaaaaattgttattgacttgtaggagaacttaacaaaatgattcctttgctttatctcccttgtttgtcaaccctcttcatttgtatcttagggagatgattttcagatttgatatgaatccaggtcagtctagatacttgacaatttttcatactgcatgattgcagcctgagagactctccttgaagaaggctagaatgagtcccaccaatatatatatattttcatctctggtgatactgttcttataaaaacactgacaacatttgaaaagtgaagcttaagagaaaattatggattatagttcacaacttaggaaaattcttgctgctcattgttaattgattttaccccaaaacaagatgttatacattttttcttattccccagaacatggaggcagttctaaccagaggtctttccttggttaaaaattattgggaaatgaatttcactctattttgcatatataa

SEQ ID NO: 44593 - DNA, 2206 bp, Bovine  19866881372984
  misc_feature (1)..(1): n is a, c, g, or t
nattgaatggttttatctccttgctgtccaacagactcccagaagtcttctccagcaccacagttcgaagccatcaattcttggttccaaagtagggtttcttattctctgataccctgaacagaaaataagttaaagtgcagagcaagaccaaactgattatccattcatttccacgtttcaaagctagcataaaaatagtgtgactatttcataagactagactgtgaatgagatgtccacctaatttaaggatgttcctaactatggtgaaagggagagagagagagaaagaaaataaatgtcttccaagtagaggtataacctccacagaggatctctgttttgcccactgctgtatttcaagttccttaaacacagaggatgcttggtgaatagttacagagtgaacttcataaaattatcaccgccatatgtaaatacacctcaagtttgtaaggacagggtctgttaagatttgttagttaaataagaaaagactgttcctcaactgaacatcaaagaatattctgcaagtttccattttaataatgagcagcaaccctctgctgctgctgctgctaagttgcttcagtcatgtccaactctgtgcaaccccatagacggcagcccaccaggctcccccatccctgggattctccaggcaagaacactggagtgggttgccatttccttctctgatgcgtgaaagtgaagtcgctcagtcgtgtccgactcccagtgaccccgtggactgcagcctaccaggcccctccatccatgagattttccaggcaagagtactggcgtgggttgccattgccttctccagcagcaaccctcactgagggttaattctctttctagttaactccaacttacagagtgtgtcctctggcagcagaaatccacaattctgagctagcccagaataaggattgctacacctggaaacaattaagctccaaggccatttgacaagcacaggtgttctggcaagcagaatactcccattctctgtaaccagctgaagctcctgattaattgacttgattttaacctcaagtaatgtccactgagttgctgaagagaaatgagatgacaatgaaccttagtcacaggggagaagtaagagcttttacatgtttgtgtgaaaaataaacctaattcatctcaacaggacaggtaaaaagacattagtattaataattatttagattttatggatatgcttctctccaattctcagtatatgtaaatgaaaataatggctcttatagtggagtggtgaaaatttcatttattggagggaaatataataatttcaaaaatctcctcttgaggaaactatatttcactataccctggattcaagtttctgcttttctcttgtaaactatggaaaggaattgaggataatatttctagatacaggagattaatgcagatctgtgatattagttcatcattatttccctttctagacaacattatgtttagattacatatgcacatgctaaaaagagtgacattccaaaattgtggctgctggtagatgcaaagtctactaacgtaacccatgatggctgattatttgaatgatacaacatttgaatttttcatttgtgtttaatttttttttttcttgttaacaggtctggatatgatagctttccagagctattgagactactaagaaccagttcctgcaaattaattggcaagcttttgttcacatgcaacatacttttaaaatgtatctatggaccactttctatttttctccttttctttttcctccaatggtcaactacttttgtaatattataataatattcaagtcttatttttgaataatctagatgctaccaactaacaaggagacaaggttatgccataaaaatgtttcagagcacaaaaacaaaattattcaaaggttgtctgttacttgaaataaaaaatgtaatttctatggaaaaaaaaacaacaactctgtctctatcagcgcagagatgtattctaatgaccaatatatttcctgtgacttcatctctgaaatcataaagtatatacacgttgctttctgtctatatcatgtaagtagggtagtgacagtaaggaaatgttctaaatataaataaatcaatatgaaagatacaaggtattaattttaaaagttccctattctttatagggctctgtgtgt

SEQ ID NO: 44594 - DNA, 1158 bp, Bovine  19866881417933
  misc_feature (1)..(1): n is a, c, g, or t
ncaatgaaatagttaaaagcttccctgcttgagttttcatttttatcctgttgtacagtacagactgtatgcagtagtccatattttcatttagtgatgttcataacgttgacacataaatgaaaggagttagaacccatatcttgtgtgtatttgacaagctctaacagaattgtttgcaaaattttattgcaattcctgctttcatttatctttgttagcacaagcttcagaaatcagtggtatggaattcttgtataatttaactctaagagaattaagtgtgcaggtgttcagagaatagcctatttttctaagtaaataaaatcttttggaagaaaatacattatttgtattaccttatgaaagaatatttaattggtttgattcatttctaaaagaacaagcaaaaaatgtattgcaaggaagggattgagaaacccagaaacaaaaatgcaattagttgccagtaatctcaagaacttaaattcgtaagcaagataaaattacttgaatagctacaccaagaagttttagagttgcagttcttaagtttgctatattaaacaagggtgtgtgcacacttaagctatatgtaccataatgaatccataatgcaaatattcaccatttagagtggcaggaagcttggaaaaaacagtccttgtgaagacttcctgtgtttctttttactcctcacccactgggctgggcctcatgtaaactttccgagacaaataagtttcaagtgcattttgaaaggtctatacagaaagaaatttagtactttccattttaatggcttgcagtcctgatggaagttctttcttttagccaacctaaatcactttatacaacatttcaagctcacttattcttgttctgccctctgtggcatcagagtacgatcagcaccttctatgtaataatccttcatgtaattgaaaaccaacttgtttccccagcctattttccaacttaaataatattagttcccttaacctttcctctgagattctattttccaagctattaatcatgtttattgcttgtccttaaaccttcttcaagttttccaaggtctttttaacttagtgagtgcaggcctgtacagagcccctggattatgctaggagaattacttttcactgttgtacg

SEQ ID NO: 44595 - DNA, 893 bp, Bovine  19866881643874
  misc_feature (1)..(1): n is a, c, g, or t
ngagtttagctttagcatcattccttccaataaatcccagggctgatctccttcagaatggactggttggatctccttgcagtccaagggactctcaagagtcttctccaacaccacagttcaaaagcatcaattcttcggcgctcagccttcttcacagtccaactctcacatccgtacatgaccacagggaaaaccatagccttgactagacggacctttgttgacaaagtaatgtctctgcatttaacaccattagaagttatctattcaaaattgttaatttgagaatgaagtgttttttacagtaaggagcccaatgggaagagtgactgacaatttctgcgaagtatttactatgaaatgtggtatctcaagaattggtgagaaggatgaaatatgatatctgtgctcttggcaatcagaatgaagtcccaaaatctctaaactaggcttttctgaggtcacatctgagtacttttcaaaaagcacctttttgtttgacttaaaaatcaaaacattcatatccctgtttcactgattcctgaaataccaagataatatctgggaaattttccattttgttaagtcagctaagaattataaaactccagtatatctcttagaagcacattattaaagggcaactaaaatgaggttttccttttgagttcttattaccttatctttggaaatcagtttaagtaatatgaaaaagttgtaagatgcttttttcaaaaagagttgaaaattatgggagaacatgaattgataagaagaggtaatataactttaaattactaaatttttaaatgaaaggaggcatttattctaaaatatccaatagataaaagagatcaaatttatccttcagctatgagtagtaaatcaaa

SEQ ID NO: 44596 - DNA, 1651 bp, Bovine  19866881701139
  misc_feature (1)..(1): n is a, c, g, or t
ngactgaagtgacttagcatagcatagcatagcatagcatatatgcattcttgatatgaatggattctttgttagatatatggttcgtaaatattacctcccacatataattatactcatatattatgtgatatacataatcttctatcttgaattttaatattaaatatgcatttttgcttctatcttgtaggaatgcaaattcttaaaagtagaaccaaaggtatttaaccttccacctatcccccaacaagcgtttatcacacaaagacatctaataacacattactgataaagtagtgaacacagaaataaaaaataaaatagacattcccaaaacaaactacctcatgagactattatagtaaattgatataaagtaaaatcatactttccaggtgactaaatattttaatatccaagttttaggtctcctatcttctatacaaccacactttcttcaagttgaagcttttttctcaacatatagaaatgtggtctcttttaccatataaacctttaggatgatgcaattctttagtttatcctggtgtgaattttcctaacttctgttcaggacttttttttaagcataatttgacagattaaggtatggcatctccatatgtctatatagctacattacagtttcttctttggtatctaatatttagatggtgatgtaagtctctgttttactgcctttatactgttagccttttattgattcacttagggtgtaattgcttgctctctgtaagcattctaataagaacagcaagatcacttcagtattcccaattcgagtgaggtcacagaaattagagatgcaaataacttgctaagtcacccttttaatttttcctctgggtaaggttattccctatggtatatttttttcttgtttctccttttttttttttggtcaatctgagcattaaagagattcaataagtatgttttttcctagtgcttccattccaagactaagcttgaaatctctctggaaggaatgaaaatcatatattctttgatagcagtatcagtatccagtatctggatatccagatactggatatcagtatacagtatcttccatgcatgaaccgtgatggttcctcttgccattattcaataagacttttctcagttcttggttgcaagttcaatgatgagagaacctactgcttctgtgaagtctgcctttccttgctactaactggtaatttcatcagaaacatgattaacagaactgttatagcagttataatggtgatgaagtcatgccactatgaagaaaaggaaaatgaaataattatgtcaattatattcatcatgaattccccatcatgagtcacttttcttaaaacataggcctaattttcctatgaaagtagaaatgtaggaagtcaagattgaagtaatttgacttgaaatacctcacttgggaatggtataacattattgtttgcaagattctgtcaaatattttattatacttagagtgatgaggtgaaatggaatgggttattacccacattttatacctcattatattgagggtctgatctagttgatttaaggtacacaattcaacatgttctcaaactcagtactttttacaatacatgaaactcacaatcacatacag

SEQ ID NO: 44597 - DNA, 2157 bp, Bovine  19866880877281
  misc_feature (1)..(1): n is a, c, g, or t
ntggcatttgggacaacttaagttctttcacagatcactgctttctcaatgtccttctcaattttgctgaggcaagagaagctgctttgtaattctaccagtctctttgacgcccccaaccccacacatgcaccctcatgtatcacccaggacgatgacaccttttttgtttattcttttttttttcagggaagctgaagattctctctcaatcacggttgttcgctgcacatcggtaaagctctttctatgtcttgtgtgttagttgtgcccttcttggccccaagaccctgtaccaccagcagaatattcctcagagaataaacggggaaggcaaagggcatcagagaagctgtcaggcagtcagtgttgcttgacgaccacatatgtgctcgtattatggagaactcgtatgtgggtccaggcttcgagaactcatggtcttgcgaaggagacaggcctgtgattatgcaggtgaaagggcaccaagctcagagtttcaagacaaatctgagtggcatcactgtgcagaggtcccttagtttcagttttgaattctgtaaaacagagatgaggacaataactgccctatctatctagtggggtgttatgaggacccagtgaggtgttggatgtgaaacgtgttctgtcagccacaaggcaaggcacaggacaagaaacagatgatgcccagggcagcaacagccatcctaaaccaccgcacatccaagagcctttcgtatgtggtagagggaaaagtgtataatcaaactgtaagagaaaattaccaaggaggaaaagttgacagaaaattctcattctgagagaccttagtacatacttcttagcccttggtcactaatagagaaaaaaatataaataggggcatagagaattttaataatgcatttaataatctaatctaattgatcccatatcaggctacccaaaagctaaatttctcaaagcaactgtgtaagtgtcttctctaaaatacaataaagcacaaattgataactatcaaaagcttaacaccacccagtcatttggaataaaaatgcaatttcctaagtaaagatggaatcaaatggaaaattaaaaattatcattatatactagctagaaaataattaaaatttagagctctacttcttagaacttattatatacagttgagctatactcagagtaaaatttgtaaccttaaaagtgatttcattatttaacaagaaaaaagaaaacaggtcaggagaatactcagtgccagaagcataaagaaagactaataaaataagcataaagcacattaaagaaaatgataaaaatttaaatctaaatgatgctttgggaaaacagaaaaattagaaagttggtaaatccaagggctagttctttacaggaaaaagtaaaaaaattgaagaacttgaaggaaaagaactatgtgggccttatgtgaaggaaactagagtaatactggaggaaataaaatattttctttaataaagaggagatacatattatattctttgataggaagactattaatacatcagattttctcatattaatgtatatgcttaaagcaagttcaaactccctgtaggaattttatttggattttgacaatgtcaaggtgagacttatcaagaaaatcttttttttgaaaaggataatgaggatggccttgagatacaagattttaaaactaataaagctgcaataattaaaacagtatgatattgatgaaatgttggatgtatcaatctaatcaaatagaaagtccaagaatagatactagtataagaatttggtatatgctaaatatggcatcccaaatcaatgggagaaaagatgatcattcaagaaattgtactgggacatttctttaggtatttggaaaaaataagtctaatcccacactatttggtgttaaaaatttaaatataaaaaacaaatcatagaaatgtcaacaatatggaagggcatctatttggccataagttgcagaaggaattcctaagcacatagggagtgggaggaagtacagtagaacagacagctctttgattatgtgcaaagaaattgtctcttctccttatttaaccagtgttatcttttttgtgttgtttcctggaaatagaacaggaaataaactca

SEQ ID NO: 44598 - DNA, 677 bp, Bovine  19866880949816
  misc_feature (1)..(1): n is a, c, g, or t
nagtaatatttgtatttattttagtgattctttgtgttttattataccttttctacttttcttccctttccctttcttgtcttctagaatatgttttcctcattctaaaattttttcttcttctagtcctgaaataatacacttgtcttttggtggttaccttgtacatttcagtatgtacacattaaagcctaaagtgaatatatcacaattctccctcaaaaaaataaggaacttcgaacatccgttcataatttatatgctattgttgtcttctattttagctacatctttgttaatcccaaaaaacaaaatcagattgttttacatacaaatttcccaccttctttgatcttcattccttctaatatctcaagaccttacagctgaaaacactttcttctctctgaacttagaattccattactgaaggtctggtggcaaatttacagagctttgattggatgcttatgtatttatttcatctttgttctcgacaagaacaaagaacccatatttgctgggtatagacattcaggttggcagtttttcccagcatactgaattgtaatcaccactatcctctaatttacactattactgatgactgattggctttcacttgcatagttactcctttgaaggccttttttcctctggcttttactattttatat

SEQ ID NO: 44599 - DNA, 1451 bp, Bovine  19866880952080
  misc_feature (1)..(1): n is a, c, g, or t
naactgtagcttttttattgtctctggtgctaaaagaacactttaaccttattttcctgaccatgtaaattattcttaggtattaaattcaatacttggaggagagtgttgactctttcaaaccacaaaatgttgcttggttaataacatgcttctttaaatgtcctgaactaattctgcaaatctgcaaaataagtagcaaagagagatatggaagatagctgcgaacctcagctttaggagtaaagccctttaacagggcatagctttgggtaggtgaagatctaaacctaacaaagagaatctgcctctgggaactattaaaagaacagtaaagcaggagccttttgtaaatgtctgcataagtctgagggtcaccatcactctagcttaatttggctcccattataagagaaatatgattttgtattaataaaatacagataataaattgcatctgtattcaagtaacttagaagggggaacgccagttttcacatttggtctgagtatatataaggaacaactggcctatcagcagagaagtccagattccatatcaatacagaaactataatgacaaataggtctgaattttatctattcacattgagaggatggggctaaatgcaaatgcaagagtttacaactgtgctaaaatggatactgattttaactttgaagagataacagccattgttatagccaaagattagtcagctttctaagaaggtataatataaaagacaacaggcaagctggaaagcatcagacttactttctaattaagcccaaagtgactttaaaaagcagaccatcctgtccaatcacacccattccattggctcgtccacagctgtcaatacagaccatctctggttccatgtctttattagcaaccacaaattggccatagatgagatctccgacctacaatgataattaaaaaacatcgtttcttctcagcaaactatgctacaggtgctgctattggctgttttcaataggcgtcaatgccagtcatctgcaattctgtggctaaataacagactacactccaggattctcacagtcctgctggagttgtgtcctaaaagaaggcaaattaaagcgtgtaccctcacccttcccttcccagaaaatccccagactgggagcctcagcaaagccagagtgcccactggggttacactgtcaactacagtagccactactcacatgtaattatttaaacttacatttaattaaaacgatgtacttaaaatgcagtttttcagttgcattagccacatttcaaatgctcaatagccatgtgtgacttagtggctcccataatactcagtgcatatgtaaaacactagcatcaccacagagttttattgcacagcactgctttagggaactacacaagcaacaaccccggcatgcaaatgttcaaagcaaacagaaca

SEQ ID NO: 44600 - DNA, 1942 bp, Bovine  19866881132302
  misc_feature (1)..(1): n is a, c, g, or t
naacgctatgtggcagcctaggtgggaagggttttgggggagaatggatacatgtatatgtatggctgagttgctttgctctcccatctgaaaccactataacattgttaatccactatactccaacacaaaataaaaaggttttaaataaaaggaatgcacaccgaatgcatattataacatggatgaacctcaaacacattacactaagtgaaagaaggcagtcacaaagacaatatattgtatgattctattcacaggaaatatccagaacagacaaatctagagaaacagaaagtagatgagtggttgtctagagctgggggaggggcaaatacggaatgactgttaatgggtatgggatttcttttgggggcatcgaaagtattctaaaattagattgtggtagattgttgcaaaattttatatatacactaaatatatactgtatatacactaaataaatctgtacatttttaaatgggtaaattttatgttatgtgaaacatatctcaaaatagatgagggaaaaaaaacttcctagatgttgccttttatttacactctgagagaagctagatattagagagttacgtgggaaaatattcaggtaaggccaagtcaaagttacacaggtctttttctgcaggacttctcagagcctttactgtgccaaaacacactatgaattaccaagagtgggtgggtaggaatcggatataggttgcatcacacacacaccacaattaggttttgcagaacccacttcagaaaacaatgtacctaggacttttcccatttattcaccaagcactacctgagtccttgcagtctcctggaactcaatcggggctatgaggtgaggctgactactttccctgccttccactgagcttgtatagaagctcagaagaaagaaaagggatgtgctcaaatttaagctgaacacatcgggagaagcacaatgctgatgctacaaactaaatactatgggaccccttgggagagatgaattctggctgtggactgtggaacacttcatggaagacccagcatttcagccagaccctgaactgtgagtggggtctagacacatggagatgggaggaagggatgtggcacaggaacccaggtctaggtggtggaaggggaagttgggtgcttgggtcggggaacagcgagtaggtcatttcagctggagtatgatgtgaatgaagcagaagagtaagacagacagctgtaacagattgtgggttgatcatagagagccttgaatatccaaccaaaaatgtttgaactcgtcctataggagatgacgacccagcgaacatttcagagcagagcgggtgcggatggctgtgaacgagatactccctgaacctcaggttttcatctgtgaaatggggctagtcctcccaacctcatcctattgcagtgtgcgaggacccgagcacttggacacagggcagtgcagctctgagcaagtttactgctcggcaacaggacagctgttcccagttcctttggaagagtatgtgtatcagaaacacctgacacgtgatatttcatctccatgtcagggccagacaggaaatctgagatggaaaatgagcgctttcaaacagaacatattttaagttctcttgtagcagtcaaatcagatctgtatttgatttcatttcattttgtttagaatgaaatagggactgcaaggaaggaacagctgctggaaacaaagacggggaaagagtataaacagcagattgcctgacatcaagtactaagacaaggggtgtgtgtgaaacagacagaaacagtgagcatgtgtgagtgtgtattcaaaactgtgtgtgtgggtgtgtgtttcagagcatataggcacatggctgcaagtatgtgggtatgagtgtacatatgtctctgtgtggcaatgtgtgtctct

SEQ ID NO: 44601 - DNA, 1122 bp, Bovine  19866881286392
  misc_feature (1)..(1): n is a, c, g, or t
naatttacctttaacttttttttattacaattttgtgcattccttttctttctttactagctcctattatttggaagctgaatatcctcaacctgattctagctctgacagtttcacttgaattggtatctgaagttcaatttagtgtaagtgatttttagctcttcactttatcttctaccattgctgcctcctttgatgtttttcattactcattagcagttaatggtttcttgaagttctttattatcaccccttatatcccttttgaagggtttatatccttgtctgtttgctttataagatgattatcaccctagtgtgtttggtcttttccatttgcaaaatattttgagagagtttgtcgcttcacagtgctttgttccagacaaccagaagtgtgttccgtttggagattcatgctctttttgcgaagctggcgtgtgcccctaggaggacgatctaaagtgatcctgttgtgtgacgaccttttgaatgaactgagtatgcttggtctgggacagagggggcaagattgctctgttcaagtccagagagactgatgtatagaagagggagctgctttattctggttggtgtgctggtgtggggtgtggaattcagctttatgtaaagcaattttctggcagtaagatagttctaacaataaatgacagaacaattagaggctggatgacttcttagcaatgcggttgcagagaagattcaagtgtatggaaattatctgggctcttattttcttctattggctcagcattcccaaggcaaatgttaaaaccattagcaggtcattttcttgactttaaactttcctgctcaggctttgctgagtcagggagcacttttaatggcttgattgatgtcatttgtttggtctttggggatccctagatgaaggcatgtgcctatccacagtccagatatatacttcaaattaattactttaattagagctatatatgtttatagaaatcaattagctagactatatttggcagcatttgtaacagtctcctgtaagttaccattgcagtcagatgaccttgaaagaaatggagcatcattaggatgagtcgagatccttagcaactctgcggtcat

SEQ ID NO: 44602 - DNA, 1682 bp, Bovine  19866881306496
  misc_feature (1)..(1): n is a, c, g, or t
ntttatatattctagataccaggtccttatctgactctttttaacctcatggactgtagcccgccagacttcccatggaattctccaggcaagaagactggagtgggtagtcagtgccttcaccagccgatcttcccaacccagggattgaagctgtctcctgcatcacagacagtttcttttactgtctgagccaccgggtttgcaaatattttctcctattttgggcattgccttttcactttttcattggtgtcctttgaagcacaaaattttcaattgtgaagttcagtttatttatgttttcatttgttgcttgtgcttttagtgtcatatctaaaatgacactgaagtcacaaaggaatattcttatattttctactaagagttgtataattttagctctcgtatttagatctgtgatcccttttgagttaatttttgtttataagaagttaaaattttttcacttaaatttctctttgtgcttttctatgtagttatccaattttttatttatttgaatttatgtattggttattgaaatttcacattcaaaccatcccccttatatcttatgcctatctttaattcttcaatccttagaaatgtatctcctctccagagctggcacaaagggtccgcatttatttccagtttttgtaattctctcttttgacctttttgaaatttaatactttgtataatgcttagtaccacagtgtgatgattttgtcaccatgttgaattatttctggctgctgctgctgctgctaagtcgcttcagtcgtgtctgactctgtgcgaccccatagacggcagcccaccaggcttccccatccctgggattctccaggccagaacactggagtgggttgccatttccttctccaatgcatgaaagtgaaaagcgaaagtgaagttgctcagttgtatccaactccagcgaccccatggaccacagcctaccaggctcctccgcccatggcattttccaggcaaaagtactggagtggggtgccattgccttctccgtatttctggctagccacaaaatattttaaaagactttctggaatttctattcactttcattggtaaagaccaggcagttttgatcattgctggcctctgataggagcataaaaataaattagctcactgcctggtacatagttagtgctcaatggatgttgcaagtgattattgttgttgttactgctactcttactgtcatcaatttattagattttttttttttaatctggaaggattttgaaccagtgttccatcaagtttatattttcatccagtacttatgttcattgttgaatctgtaatcttcccaaccaggactccagcatcagtattatttgtgtcttctgttattacatcaactttttaagaaaacctagttcctgatacacattcagctgttctgtctttaatggattataggatggtttttgtggctgtgttttatgtatttatcctgcaactccactaaacttattttttaagtactagcaattcttttttgtggatcattttctcagtgtacattggcatttgtttgagaaaaaaaaaaaggtatgcttattactcctcttatcatttttctttctccaataactattccaggcatttctcctgccacttaaataggagtagtgtctagggtg

SEQ ID NO: 44603 - DNA, 1437 bp, Bovine  19866881350390
  misc_feature (1)..(1): n is a, c, g, or t
ntaggttggaggagataatagtaagttttttaactttttccatattttgatgtaaaaaaattttatataatttatatattttcactattacagtcttaaaaaatttagaacctctccatcggttcttatatttaaaaattttcatccttcccactgcattggaaaactagtattaccagtatctagggctgtattttgtatctggtgtattttatactagactgcattccaggaatgttttagggaaatgccatgactccttgttcttaaagtgcagaatttggaaacatgagttttgaggggaagagagaatccttatggaagtaatatggatttaagatgagttttagggagtattaagttattttcagtactttccttaggatctcttaaatgtagacattggtatacaggtaggaatctagatcagtgcctaagaagtgactctaaaagtgcccttgtgtgtttgcatcgtgtagctgagactgagtagtgtgacctttcccagggaggtcctcggaggccccaggtgtgaaaagtgccgtttgcattgctgcccaattagtcatggtgctgttaccttcatatccctcctgtaacgcgccattcccagctttatttctctgtacatgttttgtgattcctgcatatgagccaaacagatccactctaaggcccgtgtagttcagccctcttgctttcctgtcttcgtgcttttcttagatgattctctccagtttgaataccttttccttttgtctgtgtcagtctcacctcttttcagaaacccagttccagcattcccttcactacaaggtcgttgctggtgctgtcattctctctctgtagtcccagggcgtgctccctgtgtgtcagggcctcattaccactttctgtctcattttgtaaggttgaatgtctgtgcctttctacttctgctccccaactgagccctttctgagaacaggttgtcagacatgtatccccttggagcacctggagccaggcctgatagaaaccactgcgtgctctgtaagtgactgggtgctgcagtgtgggctgtgtcttaatctagttaacgctacattggattgtttacatttttcagctagacagaacagaagaagactgctttagtttatttcctctggaaacccttgtgtacctgactccggactcagaccatggtatgttctttatgcagtcattgcttcttagccctttatttcattattcctggtgtcagaatttgttaaagccacccatggtgtatccaaggtaaaaaaggaatgaacgttaattgcacacctcttatggatagagacctcactggatacattgtatttgtcctgccatgtgtacaaagctgcacagatttagggtctccatcctcagttggaccttgtaagctacttggtaatcctccgagttttccgg

SEQ ID NO: 44604 - DNA, 2961 bp, Bovine  19866880470104
  misc_feature (1)..(1): n is a, c, g, or t
ntgttattctaagaattaaatgtagcgactttcctggcagtccagtagttgggacttggccttccaatgtggggagtgtgagttccatcctagggttccacatgccttgcagccaaataaaaaaataagaaacatagaacagaaacaatattgtaacaaattcaataaaaactttaaaaaaataattaaatgtattgatacatatagtgtggttggaagcaaacctcgcagatatgaagtgctgcactgatgccgtgtttgagctatcaatgttcctcaattctttaattaaatagagtgatctgaaaataccttatgaaaaaggatattgaaaattaattgtcctcctattaaaagatttatctttaaactactgtatttcaaattttagagcttctttcctaactcttctttattcaggaacttaaaaaagcataagaacttaggaaagaaataatattagaagacaacgatcaacatttaaacaatacaaatgcaaaaatataacccaattaaagaagtattcactgttcaggcaaagctaaggcaaaatgaaatggtatctaaaaataaaaatgttgggtaagttttggctcttgataaatatttcattgagtacatttaaattaactgtggtataaactgatgaggagatctctcagttttaaagtaattatcaacagttgctaagcaatatagaaaatagacaacaatgtaaatttgctattaaaaatgtcatcattgtgtgggaaaaactacttttttacaatttcttgctatgtttctatataggagaatatgaagtcattattatttctcataaatataacatacggttatttatttttaaaataaatttgctcagcttctaagtagcaccaacttatttgttgacttaggtccttaacattcttgtgtttgggtaaaatgtcttttttctttatttgtttttagaaacaagtaaaaagtatattttaaattaactaaataatattaaatagatgtttactgctaattagtgtatggtttgaattgtaattatgtcatccaaagggactttataaatacagtctagttaaagcatgattcaatcttcaatgattcacagaggcatacattcattattattcatttagtgctctctgatttgagctctaaatgtaatccaagaaaagatggagggattttacttttattgtcatgatttaatatagcaggtcccttagttatcatcctgtactaatccagggattgttacaacttcttagagtctgttatttgatttttaactcagtctgtttatcatactagcagagcagcatgtaaattcaagaggttagaggaagataacccatctcattacaagacaataaccatatatttttctactgtccaagttttagtttaactttgctctttgatatattactatgttaaaactcttaaccatggcttctattcatctaaactataaagaaactaccaacttcatttatccaacactctttattaagtcctgagtccatgttgtgtgacaggcatttgctaagtgctctgaataggatacaattatgatctgccctgagagatcttacagactagaataaaacactaaaacactgaaaaagtactgtttattgtgaaactgttgacttttacaaaagtttttttaagatttatcaatttagttattattactattttttggctgtggtcggtctttgtagctgcgagagggcgctctctagttgcagcgagctgggactattctttcttggtgtgtgtgggcttctttgtggtggcttctcttgttgcagagcacaggctctagactcaggcttcagcagttgcagcacgtggactcagtagtagtggcacataggctttcttgctctgtgtcatgcaggatcttcccgaaccagggatcaagctggtgtcccttgcgttgcaaggcggattcttcaatcctgaaccaccagggaagctcccaaagttttaactgcacagagtgctcaagagaaaaggcagccagagaaacccatctcactcccaaatcctcgaagtcatagaacagcattttctaaagctcagaagggagagaaagaacagtgaaatcaaggaactgcaaggtgagaaacatggaagagcagagagaattgtgaaccagcagttaatagggaccagcctggggaggcccttgcaagcttgtttgaaactgttggacttttcttagacttgtggtggttatgggaaatttgatgtgattggatttgcatttttactagatgagtttaggtgtaaggtagaagatatgttggagaggaaccagactagagacagagagatatgaatagcctatgacagtgatctggagagagatattagtcacttaaaagcagagccaatttctaatactgggggacttgagggcaagaaggaaactttggtggaagagtgggcgcataaagaaggggtttccgtatgaggacctctgtatgtcccagtcttgctttcccattgccatccttatgacttttcatcttggtcttaaaaaataccatgttatactaccttcagataaccacttgaataacctttacagaaaggacactgcttttggaaatcatgttgaagggaagttgctgctgctgctgctgagttgcttcagtcgtgtctgactcttagtgaccccatggactgcagcccaccaggctcctccgtccatggaattttccaggcaagagtactggagtgggttcccattgccttctccatgaagggaagttatcattcatcaatttctattttatcttatcttgctctttctcttatcttgctctgctcaaagtagagttatagaggacaatagagtcagacttgagagatatttaggacagattaatgtgacataatcttttgctggatttggggattattcctaaatttctagctttggagttt

SEQ ID NO: 44605 - DNA, 1337 bp, Bovine  19866880633272
  misc_feature (1)..(1): n is a, c, g, or t
ngaaccgtgtgcctccgggacctgactggtcaggcagcacgcctgggctgcagagaagaagtattcttctgtctgagaaagcaggagcctggattatgatgattaaaagagagcaagaaagggggacaaccagacaatactggtttttgcactttgctgtgactaaattaattacatgggcttgattaaccattaatttttagcagttcttaagtgaaccactaattgtcgcagtgccatagagaaggcaggccagaggtactgcgtaagctgggggaggccgccgcacagaccagcagccagtgccacacacactggagctgcgcagaatccgagaaaccatgagatctgcatggaaatgaaggaggaatattcagggtgctttggtggtgtgtgtgtgtgagagagagagggggaaagagagagaatatttctgcaaagaaaggaaaatgccagtactatatagctctacgcagccagcttgcagggttgagttggcatttggcaacttggtagcggctgccagtgtgtgtgtggtgggagaagagggaatagacaacaagaaaaacacatagagcttaaaaaaagatgtaaaatgattcacttcatgccatatggacaaaaatgttgtcacaaaaataaggccaaaaaatagtgccaggttagacttttagttcaaaaacatatgtataatcatccccatgaacatgaattttaattagtattttgatagagagaaaccagatatttttttaacctgctctgttcttgttttctgttcctctcccagttttagcctccattaaacattcatatactgtatgttttgtgtctgtatgaggaaaatgccttatccctggattggtgggaatgcaaacatcttggttttctgtggcatacaaaatatcttcccagtggcgctcgcaagcagacacttatcacagggaaatctagagcgctctctgagccctgggtacaccaggaaggaaggaagccatatgccttttccctttgtcaatggaggcatctgcacccatttggttccccagatccgttcttcacacccgtccacatctcgtctctctgggatgccttttaaaaaagaaataaattcagtgtatgtacatatcacgatgtgacagggcagttccagagaaaaacggatgagatggtgactttagaacccttgaaaaatgggacatgttacgttattgatgaataaacttaataaatgttcacactttattattagttacatctccacctattcctaaaagggattggagatgacagtactcatcggaagagactgtgttgaatcatcttcccttagcaaa

SEQ ID NO: 44606 - DNA, 4543 bp, Bovine  19866880696299
  misc_feature (1)..(1): n is a, c, g, or t
ncagtgttttgcagttgctcttatcaattttaaactaatatatactgagcccttgaaaattcaaatagagattaaagatacagatttttttgagttacccacaataatccttaaacctgattgagttcaccatggaagatagaagagctatgaggccaaggatactttgtcccacagttagatgaccagaaaagagcctgcaaggattgcagattttttaaaaagaagttagtaagatagaacttcttatttagtgctcctgaacaaagaagaggagaacgttcccaggagtatcaggaaggaggtctataggaaggtcaagaagaataagaaccaagaaaagaccattagaagttcacaatttcaatagaaaaattaaggctgtagaacagctgagtgtagaatagccagtttttaaatggagacttttgagaatcccaattgaaaatggaatgaaaagtagagttactcgaatcaatagtctttttaaggttgactaaacctgaaagtaaaatgagtattgtggtggaaaaaagatgaaaactcttaagagagatgggaataactggattggacatcagaagaaagattatccttcaaaaagagtgatactgtacatttattctgaaactggagctttggaaaactagtatcttacgtggctaaatgatagaggtcatgcagaattaacattgctctctgttaaaagcttgaagttatttttaaatgggtaatataagaatagtatacatcatgtaatacagtatacagtagtgtacatatactactggaactagcaaacagtagtatacatcatggaatcagactccatcacttcagaattctacttgttggagttgggatccagctgaaaccttagacctgcctgtggatattagatttattaaaatactaaaactgaagacctgcaaaatttagcggtatcattttctaaatagtcattaaaattgtccttatccacttaaaaaaggatgggcccaaggaccttttcctttctttttttttttttaatttttgaaaatttttattgaagaatagttgatttacaatgttgttttggtttcaggtggattgcaaagtaaatcagttataggtatacttatatacactcttttttagattctttccttatagaggccattacagagtactgagtggagttccctgtgctatacagtacgtgctttttagttacccgttttatatatagtagtatgtatgtgttagtcccagtctcccaatttaatcccttctcctccttaccccctcaaatcagttcagttgctcagtcgtgtcctactctttgcgaccccacagaccacagcacaccaaacccttctgttcatcactaactctcggagtttacccagactcgtgtctattgagtcagtgatgccatccaaccatctcatcctctgtcatccccttcttctcctgccctcaatttttcccagtatcaaggtcttttcaaatgaatcaactcttcatgtcaggtgcccaaagtattggagttttagcttcaacatcagtccttccaaagaacacccaggactgatctcctttaggatggactgattggatttccttgcagtccaagggactctcaagagtcttctccaacaccacagttcaaaagcatcaattcttccgccctcagctttctttatagtccaactctcacatccatacatgaccactggaaaaaccatagccttgactagatggacctttgcagtgcaagagggttcccttttctctacatcttctgcactaacaatgaaagatcagaaagagaaattaaggaaataatcccatttactatagcaacaaaaagaataaaatacccaggaataaacctctataaggagacaaaagacctgtacttagtttagaaaactataagacactgatgaaagaaataaaagatgacacaaacggagaaataaactgtgttcttggattggaaaacctatattgtgaaaatgactatactacccaaagaaatctagagatttaattcaatccctaacaaattaccagttaccagtggcatttttcacagaactagaacaaaaaattgtacaatttatatggaaacacaagagattttgactagcaaaagcaatattgagaaaaacaaaaccaaaaatggagctggaggaatcaggctccctgacctcagactatacttcagggctacaggaatcaagacagtatggcagtggcacaaagacagaaatataaatctgcagaacaggacagaaagcgcagagataaacccacacccctctggccaccgagtctatgacaaaggaggccagaatatacattggagcaaagccacagcctcttcaataagtggttctgggaaaactggacagccatatgtaagagaatgaaattagaacattctctaacaccatacacaaaaataaaatggattaaagacctaaatgtaaggccaaatactataaaactcttagaggaaaacataggcagaacactctgacataaatcacagcaagatgttgtttgacctacctcccagagtggtgagaataaaaccaaaaataaacaaatgagacctaattaaacttaaaagcttttgcacaacaaagaaaaccataaacaagatgaaaagacaaccctcaaaatgggagagaatatttgcaaataaagcaactgacaaaggattaatctccaaaatatacaaacagccatgtatgggggggtcaaaaaaacaaacaaccaaatcaaaacaaaggcagaagacctaaacagacatttcttcagagaagacatatagatggccaataaacacatgaaaagatgcttcacatcactcattattagagaaatgcaaatcaaaactacaatgaggtatcgcctcccaccagtcagaatggccattatcacaaaatctacagacaataaaggccaagctctcatacctcaagtgagatcaactctaagggcccaagtgtcactaatggtaaagaacctgtctgcagatgcaggagacataagagaagcaggtttgatccctgggttggaggaggaaatgggaacccactccagtattctcgcctggagaatatcatggacagagaagccttgtgggctgtagtacatggggctgcaaagagttggacacaactgaagtgacttagcacaccccctaagggccacgcagtgcccaggctccctgcaggatgagctgaggccttagccaaggttgtatctcagcctacctcctcaccctgcctactgctggggccttttttccctcgtaggtgttgatccagaacacactcccaatctctgacccagcacctcaggaaacctgacgtaccaaacagtataaaaggagcaggagggcaacaaaaaaatattacagttcaaccttacttcttttgtgcaagtaaagaaacttcagccaagaacaattatatcatttgcattgaattaaatatctagctagtcccagggccagatcctctatctcttgacttaaaagtgggcattctttattagaaattattttccttaacagactctaactatacttcacctaagaaaaccacatctgagcttaaatctggcaaagtaacagttaatagttcatctcttttcagcattcaacatgccatattacatttctagaaactctaccaaaggaggagaaaggtctcaatgagttggaggggttcagaggaccagggtgattaaggtggaaactaacttttttctaaatatctaccagcaccatgggcttctcaagtggtgctagtgataaagaacctgcctgccaatccaaaagatataagcagaagtaggtttgatgcctggatcaggaagatcccctggaggagagtacggcaacccactccagtattcttgcctggagaaccccatggatagaggagcctggtgggctactctgtagggttgcaaagagttggacacaactgaagtgactgagtgagtgagccagctgccagcaccatgctaggagctttccatgttaccttactaatcttcacaataactcaatgatagaatattctctttctcattttagaaatgaatgaacctgctaaaaggaggttcagttggctcacatgagatttgactatgacgctgttgatgtgtccctttacccaaggcctcaccaggactgcaaataaacaaggtctgtcctcccttgattcaccatgtttgcaagtgtgaagctttcattatcatttgtctttcagattctcactaattaggtagagcttcactacataatatacctgttaacttgactcactacaaataaaaatcaacaacgccacaagtttcagaatgttgattagcatttatgatttccgagtgccaaaataaatcaattattttgaaggactagtaaagctaaggcacattcttatggtgttttcatcagtacaaaaaatttacaatgacatctcttaactaggcacttaagaaatcatttggcagtttactttggccaaatgccata

SEQ ID NO: 44607 - DNA, 1978 bp, Bovine  19866880973361
  misc_feature (1)..(1): n is a, c, g, or t
nttatgggcttgtagtgcatgggaaaaactgttaatttattaaacaccaaaaataagtacagtcattgacaactataggtggcctatgtgatctagtaaaataaaataacatgtcttttgccagtcacctcctctcctgaaattctgctatcaggtggaggagagcctggaggagtctgtattcaagctcccttcagtgagtctcatactctgttccagaactttttaccattaaccttgacatactatcatgcatacatttccaacctgtgaaagtcatgtttcttgatcttccatcacaatgtgagaatatgtgagagctgacctgtaagaatcagtgacaagggaatatgtgaagcccagagttgtcctcatccaggatcatgatgttgtttgtgccttttaactagataaaatcaaatacgccacagctggtgaggtggagcatctcttagattggaggggtccactgttgaggggttttgaatggaaactaaaaacaaactggtagctaatggcacttgtaaggaaacaagtgcacggtacaaagcaattccctggctagaaatctagccttgatacgcacaaggcatcattgctattttggaggccactggtaggtagaactgtgctttacatctcattgttcaagatcaacttttaactaaaccttgccacttaaaacagtatcaaagtttcagtacaccaactgagaaaacagaagcacgtcacttgtttatccttgtgtttcatagcagaagcaccaaagcaaaaaaggaaatgtgcttgcttttgacaattgaatttttctcatgttcatctgctaacactttcttacattgtaagtttgcatttattttgcaaggactatattgatcctacacacagagatgacaccactcccctccaggctggcctgtcaatcagcataccatctcttcacatacaacatgttccatattttctttgctaacatagccagtggtgtttgggtttagttgtgcattaaattaatcctacattttcatgaacacttaagtaccaaatctaaagattagatggagaatgggcatttaaaatcaaaacccaacctttgtagatagtgaggggtcgggatgggaaaacatggtcatgggacaggtaagaaaacacagtttcattttaaacatatttactcttaaaaatactagtctaaaattctcctcatataacacggccttctggtctcagtacatgcaggtgaaggagcagataataatggatacacttaagagacataaaaatttatcccatcaattgcaactatgtacaggatgatccgagagatatttcccacatttaaaaaattgctgtagatgtttcagctattggaactgtgtgtgtcccaggcaacataatagattatacctcgactccttaaagagcaccctgataatatgcaaggctaaaatgtcagaagctattagaaactctcagatgcacaatatatctccattcctgagttttccccttacactgcgaaacaccagacaacaggcatgcaaactgctcagctgcaactgttccaagtcgaataattacaacttgtcagaaagaattaattttcccatttctcataaagatgtgtaaaaattaccatgttattatacactgacactctctggaggcagacacaaaatttaattttgaattctttccgcatattaaattaaatccataaataagagtttaggcattcactcggaagcatatgttcattgggagcgaaagccaacacgagcccggctgaatggctgttgtaatgttttaatagctcgcttcttctaagcaccaataaatttacatgatcataacagtcgtgggcatacaagaagcccattactgtctgggcacaggcagcagcgttaacaggatgggaaaaatgggaaaaagggaaaaaaactcttaaataaaattaggcaactgcacttgtcagctg

SEQ ID NO: 44608 - DNA, 821 bp, Bovine  19866881000064
  misc_feature (1)..(1): n is a, c, g, or t
ngaccctgcttggccatgaatgcgtcccatcggccagacccaaccccaaaagtcagcatcgtgattctgcagcagctgttgccgcagaaggtaaatgccgtgcagatattgatgagcttgctaatttgtttagtagacagaatttagaatggggaacaggatttgtctgctagctgtcatcatccgtcagccccaggctgccccaggcaatgggtttgctttttgccagcttctaattttgctttatttttccttagcttcaatctactttattcatttattataattgggagagtggtggctgagataggggaaaaaaatacttatggaccacactggagattgaaggctcttgtgtgctgcggttccctgatatcggcggcttcagaccagacctgttggtctcttgattgatggagtttgtgaacgaggactgtgctctcatgtgggtatcttgtagcatagtgtgatgggaagatttaccaaaactgctctcagccctgcgtgtttctcctggtttctaccaagatcagaatttatattattagatttgttccttggggattcttattcaatttatttaaaaaatgtgttttgggggcacactaggtgttggttattattacaggcagctgattgtggattggtgaacaagatagaaaaagccctgcttcaaaagtacttagattctaaaggtggagatagaaataaacaaataaatgtacaatacttcaagacagtgataaactgaatgaaggaaatacagtagagtagagagtaagactgaaagtgttattgtagataaagagagcaggcagagt

SEQ ID NO: 44609 - DNA, 1916 bp, Bovine  19866881007483
  misc_feature (1)..(1): n is a, c, g, or t
nagcttctgatgaatagtgaaaaatgtacttataattctctgaatttttcctattggaataaaacaaatggtactccacattatcatcaaaatacaggctagtgttgagaagctacagcccttggaagaacaggagcaactgtttggatccttcagcagatctcagaaaccaaaccaaaccagatgacaaaagcgctaagaaactcctgaatgctcacaaaatccaacagaagagcttcaccatgatgccaggcaaaaaatgtagcagttaagaaatattttctttaaagaaggcttgcctccgttaagtcattttgtgtaaagtaacagttcatttcttcagattctttcagttacaaaagagagagcatcaggaaatttctaaagtccaggcatttagttgcttcatgttgctctttagaaggaatatattttgctgcttagaagctcatctatgctccctgaacttgctgaggttctagtaaacaagtcttcaacaaagacaccatccatttaactaagttcaagccttctctaccagtttggcccctgacaggctctgtgtcaggataaaggtgaatcaggattggttagagttacataaaggattggggagcagggtcacatccactcccacatggtaccaagaacagtgcccaagtgatcaacactgctgctgctactggctaagtcgcttcagtcgtgtccaactctgttcgaccccatggactgcagcccaccaggcttctccgtccatgggattctccaggcaagaacactggagtgggttgccatttccttctccaatgcatgaaagtggaaagtgaaaatgaagtcgctcagtcgtgtctgactcttagaaatcccatggactgcagcctaccaggctcctccatccatgggattttccgggcaacagtactggagtggggtgccattgccttctccaagtaatcaacacacatcgacataattaacaccagcaggggaagtgggtaggatagttaagaacttattaaaaatgaagcatcaccaaacgaaaatctaagttcattcaactcaacacaagcaggtttttttgccaagccacaagagaaaactgaagtagattaattattagtttgattatataactgagatatgggatcagtttctgtaatgtgtcctacttttatacaaactgatcccgtgtctcagttatataatcaactataacttaacctacttcagttttttcttgcctagagaactccatggacagaggagcctggcaggctccagtccatgggatcacaaagagttggacatgactgagcaactatcaccagccattagttaattatagttgatgattttttaaaaaaatatttttttctcaggtttttctcttttgagataagaaccattctatactcagaacatctaatacagagttggaggaattctttacatgttaaaattatgttatcttctgtagtccaggaagtatcattggaaccttcagtcccatgattaccctgtcaaaatcatttcctttaggaagcaactgccaaggctaactttagttttcctttgcttttttgtttcctgtggcaacccactccagtattcttgcctggagaatcccatggacggaggagcctggtgggctgcagtccacggggtcgcaaagagtcggacacgactgagcaacttcgcttgtttaccctaattatatgaggcatttttcttttttacaatttttaaagtaagactgtaagcctatagctatgttgaatctggttattaaaaaaaaagttaagccatcttattggatatattcagattctaaggttttatttacatatgataatccagtctattaatgggatgggattagaaagaaaatcggtctccaggagctaatgtttagtata

SEQ ID NO: 44610 - DNA, 1233 bp, Bovine  19866881149050
  misc_feature (1)..(1): n is a, c, g, or t
nccaaaaaaagctcatgcgtctctcttgtgtttagtaataaattgccactaacccatcaggtaaaagttcattttacaggattccagatggtgcatttaacaccatttttaaggcttcctgtaactagctaacgtgtacagtcaatgaagatatatctgaattcctggatactttaattcttatatgtagggtctccccttcatctttcttcaggtttttcccttttttggcgtgtttttctatttttctgaacccagaacttaccactggcaggatttcagtctcagaattctgtcaacctttaaagatacagcattgtggctattgtgaaagttattttaaaataagtttaaaattgttgatgacagcagtgtttgacttggtgctcgggtattccctgaaggctaacgttgtttctttctcactgaagcacttaaggaaaagtttgtactaacctttgttcctttaggaaagcgcctctggatttttatttacctttgagattgtcttcggaaaatgaagggtttttatgccctctttagtcttagcaaattaaatactgtgtggaaaggagaagaaggagtcataaaatcaagggaggcaaagatgataagcatcaaatcagaggagataaatttttgctgctaataataaacctttgtttgaagcaggactttggaagcatttagttgacacagtaaaaaacaatgacattcactagggataggtttgttttctttttctgaaattaatttattaaatgaattcatgttcatgagtcagttggaaaggcatatcaggaaaatcaaaagtgtgaccacataaactgtctaggatttgtttattttgaatttatatagcctcttttctccagagatttgaagacgctgtggagaaaattttaaatcttttaaacaatagacaataagtcgtaaaatgtgaactcctgcctggataggctataatctctaaggttttttaatgtacccagatataagcacttccagttatgaaggaaaaatacttaaaatatgagattctcatctggctggataccaaaaatgagagatactttgtgtaaaccttcattcttttagatttaggtctgttttttcctacttattctgacatttgaagttaggggtttaacctcaaatatgaagcatgttgtaaattactaatatgaaattactctttcatgttcggaggaatgagagtcaaagcactcaggc

SEQ ID NO: 44611 - DNA, 1806 bp, Bovine  19866881152135
  misc_feature (1)..(1): n is a, c, g, or t
nccacatttaatctcttgtggaacataccagtgagtaggaataaatccaaaatttccagggaacttgtccgtaagtactgcaaaataaaatatttaatttcaaggtctttaatcagtaattttactgccaaaagtagcacaatttgtttgaaagaagacataatgccacactcactgatagctcagttggtaaagaatcctcctgcaatgcagaagactggtttgatccctgggtcgggagatccactggagaagggaaagactacccacgccagtattctggcctgaataattccatggactacagtccatggggttggaaagagtcggatacgactgagtgactttcactttcacactttcactccatgcctgacttggatcaaggttaggaataggtgagaagaaccttgttcgcctgttttcaataactctcagttggaattgctatctgaatacaacagtttttacatgtcatttacatttttataagtctctctattcaaagacccccaatttagaagtatcaatctcagccatgagaaaaacatgactcctttgataatccaggtacttttcatttctgatggagaaagtaaaacattcccaatccactgatggtcacagaaagttttgatctttggaagaagacaaaaaaatttccattcagcttccagagaatgagtgaataaggaggcgtttcatcttcccaaactcccttctctccaatttctctaacacaatgcacttgggaaacaaaaggcagattattaagttttcaaatgaagctacttgtttctctcttctccctggatgtctcagccccggtctccctggccttgcctttcggcacatctggtaaccatgtgtggtggtgctaatgaagactttcctgagtgagttacaattagttccgactgccgtgcagttttcctgggcaggaccaaagtaaaagacaggaatgggggtgaggggaagccaataactctttcacttcacaaacccacattctcccttgctcctgggacgctcatcaccaccactccggaggaatttttgaaaaaaggtgtaagcaaatactttcagagtttccttctcccttttctccaaagcagcattttccccaagttgattgaatgcgacaggcaggcaacagtacttctgtgatcctctgaacaatagggaattgttaaacggatgccattcctccttctggtctacgtattctacttacctaacaattttatctactttaatagaagaaacttgtgtattttactatttgatggattagaaggaactgcggaagcaaatgtactgtatacaattaggctgtcttgaaaatgcacacttttgtttactctagccttcttctcccacttctcaatcaagctcctaatagagctgttttaagtttcaacaaggaccatattaactgcgggtctccacatgaaacagaatgctaaaccccagcgtctcctgacgatgtaagctcaaagtctcccaaatcctgttttacatttctgtctgaaatcatggttctgtctttccaatgcttttttctgtacctcgcaaactgtgacttctcaataaatactatatggtggcagaactggccgttgtgagaagattctaagtgactccgagggtagaaaagttaatataattacttttggcaacttgtacctatatcttatcctaatgccatctactttttaatttcaccaactccggacttagaatatgcagttactcagtaaatactaaccactgataacaaccacagcttacactgcagccctgtcg

SEQ ID NO: 44612 - DNA, 1077 bp, Bovine  19866881152616
  misc_feature (1)..(1): n is a, c, g, or t
ngaatattgatagaaaatattgaagcagaatgttcctaagtgtggtataaatccaaagagaataaaattgttctaactactgtgggtttggtgactttaacacatttagaaagaatcttcagatttatgcgatgagcattgctgttcaaaatgctgcttttctactttggcaagcaagcaggatgctactcctagggataaggttctagcggtgatgcaattggacacttcctcccagcaactctaaattgtatgtttgcatctatcagttattgtgttgattccgatcatttgttctgtctatggaagaatgactcaactctaccagtaaagaggagctgaacaacgtttgaacacagcttttctctgaaatccttaaatggccatgaatgtagtaaaggttgcatgtattgactagttgactccataggttggaattggtggttcacataggagagttgtggcactcactgttttcccaaggcagtgtctaatctcactgtagggcatctactccaagcaacgagggcctggtgggattttaacagcattaaaagcctgcctactcacacaccatttattgttctaaatcccacaattaaattcattcctttgggttatatataaaaaaaaacacacgacaattttcttgatataatcaaattgcgtagactagttaatagactactattaattagcaaccatttattcatttatttatctaatgtttatttctgttaactctattcctttgtaaaatacacttcataaaatgtaacaaaatccatcagttcaggactgctcattatttcatttcacaaaattctttgcataaaatatagatatatctgcttttacatagcagtttttttgcttttcttgactgaatgcctgctttcttcaccagatcaattccatacattgtcttcataatttcagtgaagaacagaactcacactcatatccaatccatttgcaaatcctatctctaaaaaatatgtattctaatttaccactctcactttagctcaagatgacataaagtatggaatattaaaacagactctccactaccat

SEQ ID NO: 44613 - DNA, 2639 bp, Bovine  19866881165939
  misc_feature (1)..(1): n is a, c, g, or t
natcctctcttactttagtgttaaaatccttggcagttctttttactctaccattttctgtgggctgcagcttaaaacacccagccacattaaaactcgcagtagagttggcagtgtgtcttttctggatactctgagaaaattctcttaaccacaccggtggcctaggaccttgtagtgcttagtatgtgcttagtctctcggtcatgtctgactctttgtaactccatggactgtggctcaccaggctctctgtccatgggctttttcaggcacaaatactggagtgggttgccatttcctctcccaggagatcttcccaacccagggatcaaacccacgtctcctgtgtctcctgtattgcaggaggattctttacctgatgagccatcagcgaagccccaaagcctcatatgacttatatttatgcaagcatcaccttgaagttctttgaaaacattttccaagtcctttcttacaaagtgattttagtacaaattatagtgaaaaatacttgtataaaattattctctatgggtctttgcagatatattcagcagtccaagaaatcaagatatttgtgaataaataaacaatgaagctaaatttacatatgcattttgttattttgttgtatcttcttttagttgaatgaaccctacagaggcgcatatgtaggagtgtgtgtgtgtgtgtgtatgagggagagagacagagagaaagagaggtgtgggagagaatgggaatgcatatatacgatatagaaatacctgaggggatattttaggacatgtctgaactctcttgcatctgactggaagatgtaagagacagctgacatgtcaaaaagatgagaactttcaaccagttggattttcatattttattttggggcttaaataacaaagacttaacagaggaaaaaattattatactaaatttactgagcttttatgaagaccttatgaatgtatatttgtatatgtggatatgactaactgtatatatataaattacagcaaaaactactcttgcttctggttttgctgaaactgatccagttgacatatattgcccaaagaacagcactgaagaaaaacattttcgatgtgttaaaatcagctttgattgcagtcattttatccctcatatctatagagttattgacttcttgtagagacaggaaaatgcctctttctccatcctctacccaagactgcatgagcatacatttgctcattcacactggtttaaaaaaataataggaacttccctggtggtccagggttaagaatttgcctgccaatgcaggggacacgggttctacccctggtctgggaagatcccacatgccgtggagcaaggagcctgcgtgccacaactactgatcctgtgctctagagcccgtgctctgcagtaagagaaatgaccctgcaataagcctgcacaccacagcagagagcagcccctgcgtgcagcaactagagaaagcctgtgtgcagcaacaaagacccagggcagccacaaataaataaaatgaatagttttttaataacagagaaaggataactttggaaataaatatgtttaggtcagaaccactcattgttagagggactgaggaatttgaatgttttttgtttgtttgctttgctttagaacagtattttattaactagctagtcaattgttctatcattgctggaaactttctagagagttacattttggcccttgctcttttacttaattgtggagatgtggcatgtgcataattcatggttagcataatatatcttaccatgtattcatcattatcattagaaatttcatggttattataagatagagccactgagactgatgctttcagtgaataatccagacacttagggcattttgagcaacttttttaagacagctgtcatggcatctcagtacaaagtggactatatctcagtgaattaaattgcctcttgaagtgaaatacttttttcaataactgatattggcattagactgtcaggatcagcagtgacttcatgctttcatttgggggtgaattaggaagccaagcctgcaggttccttgtgtatccatcttccacgtggcagaaggtgacagttgctgctggctcatgacaggaagtactgaggcaacctctaggttgggctaaaagtctggagaccctgggcttttgttacttttggcatttgtagtggcagggctgaggaggaacatttttctgtataaaactttgccaggatcatttgaaagacggaggtcaacatgctgataaactttcagctaatgtacgcatatataaaatatgcataggcacaggatggtatagcagaaagaaattttcaactgagtgcctgattcccatcccctcctgccccagcattaaaatcatatctctgggttctcacaacttgtgggggacatgtagactctcggttacccaggaatttaggactatatgaataggcagtatattgattttaagacccaaaatatgaaagttgaaagttttggaagaactattactggatggcttcctggaagaaagaagttgtaaggagagattaacagaaggaataaaaagtctctcggttcacagactgaaatccattatg

SEQ ID NO: 44614 - DNA, 1090 bp, Bovine  19866881218691
  misc_feature (1)..(1): n is a, c, g, or t
ntagatatttaagtgcttaaattaaaaaaaaaaataagctcttattttggtactacatgtaaggcggtcatactttccaaattgataactagcttgactcaggatctgaaggtgatgctgagtattcaaaactgaaacttctataaagaaagtttgttaccatgactctgaaccatagccagttaatgctgttgactgattaccaaggattttcgaagtagtggtcagttttatcgcccttgtctggatgccctggagtctggtggcaactatgttccatttgtaaaattgaagtgctacattcatccttgaaacaaatggcaaagctatttaggattggttttaatctaatggctctggcagggatcccattgggacacacaaattaaaacatagtcttgggtcaattatagcagtgtatcttttgaacaagaaagactcaatgacttttttgacaagagtctggtaacctgctgagtgttattaattttactgtcccgagagaataatgaaaatagaacctattgtttagccctccagctacaattgtacaccattgtatatatgaataatatcttaagtaaaccccacagaatatacttatgggggagggagataagcacagtcattcttttaatatagaaacaatcattaaatacagaaatagtgacatggctataaatcccaattgtagaatctgtggaagagaatattctggagacagaaaccttgaattttatttcaagattatcctgacactcgctgtccccataatcttctatttaggaaataaccataaagtatcacagtgaatatgacaaaatatcacatttgtatttttccagggtttttatgatgatttttctgagtgtgctctctagaaaggcataacagtgcaaggttcagagaggtttttagaatcagattgcctggatttgaagtcaggcgccaacatttattagccagttatgggagcttaagcaacttacttaacctctaggttacctcactttcctcagctaaaaaaaatgggataataataaaacctttgggcaccccactccagtactcttgcctggaaaatcccatg

SEQ ID NO: 44615 - DNA, 1781 bp, Bovine  19866881356554
  misc_feature (1)..(1): n is a, c, g, or t
ntaccttggctcatgcttatgttggagacaagactctaactcctactaaagccaaatgatggcaattcaattcctgcctgccagttgcaaatccctacactaccactgcagtgctatcaaaagacatttgcaatccagggcacctctcaggagagaagtgatttctcaggttagtcacttaatggattagcagttcaagtgctagcaactcaaaggtatgcatatattcgttctgagacaagaaaggattttccaatcctatgggcagaccatcaaaaaaaaaaaaaaaacacacacactaatagaaccttatctatctaaggtaggcagagaatattattcatttattaattgcagtgttaaacaaaaaataatcaaggagggaataaactcactctattcacaaaacatcaacaaaagacccgcaacacttttcatgcattgcaacaaatataattttgctctaatctcatacatgtcataaggcaccacgccgtagtgcaaagaaagctgggcctgaaatcaagaaatctgggttcattttctggctctgtcgcttattaactgtgtaaaatgataaaacatttaactttgctgagcctcattccttgtctagaaaatcagtgacttattaataggtaagcatcatccagcacttagattcagtattaatctctaaatcagtgattagactaaagtttacattttatatggtctttataaatctcttaagtctttaataaatcctagatttgggaagtcaaatatatgtaacagacaaggaactcttcagaaaatatgttagtcactcagtagtgtctgactctttgtgattcccctagactgtagcctatcaggctcctttgtccatggaattatccaggcaagaatactggagtgggtagccactcccttctctagaaggaactcttgatctaacagtaaagaactaaatagggttttgttttgttttttaatctactctgtcatggcaatacacaaattcctaaataggaacaatatttgtgtgtcttagtagataccatcatctttttggcaaatgtcagtcatataaagcagagaaggcaaaggcaccccactccagtactcttgcctggaaaatcccatggacagaggagcctggaaggctgcagtccatggggtcccacagagtcggacacaactgaagtgacttagcagcagcagcggcagcagtcatataaagactctgacatcactcaaagtattcttcaaagggaagagagaggaacttcttcaatgtcccagagtactttaggaagctaaaactctcaggggctggatgagataacacactcagaatattcatcccaaggtctctatcagatttcaactgcttttcattctacataggtaagaatgcttttcattctacataggtactattgcttctaactctactcccaggattctcaagcaaccctacagaattttattcaaattaccataatgctcaaaatgctaattaacgtcacaacagagcatcagaactccactgcttgctgttcaggctcctttggacccatcctcttccagtgagtgttacctagcctcggaagcagatatctagtctccttggttggtgctggactatcaaagaaccatcttcactgaagacaattcataatctggccaaaggataatctctatcaggactactggcaacaaagttcacattttattttcagcacttactcttgggattctgggcaagtactacaatctctgtgttaaatgctatt

SEQ ID NO: 44616 - DNA, 889 bp, Bovine  19866881366298
  misc_feature (1)..(1): n is a, c, g, or t
nataagaccactgccaagtatgcattggtatatttctatacactgaactgctttagataatagataaagttagctttatctacttcatggtcttacccattcagggccctctgcttcaactaacataaaaataccttcactgcagggtcccagtccagagggctaatacacagcacaccttctgtaaaatacaccattctaaaacttgaaaaatggtcagctaattaaagaccagtgaacggttttgagacaggaagaattctcctattcaaaactgaaacagaacctgaatggaatcaaaaagttccaaagtaggctgatattctccatgacttgtaagactatctattatcatttttcaaatgtctcacactgtacctgagtttttttgtttgtttgttttggtcacaactacaaatgaaacttcaaaagccaatgctgttttacgtgtgtgcctctggagagatgtgtatgagagagatcccttagaaataatacaaaaagtctgtccttctgcaaagttcagcacagatttcacaccagagtattttgattaatttcacttcagaaatgcataagtggagtgtatgctcaaaataacacccccaaatacactcagaaattctgaagcttagcacgcttcccaaaacatctctgaaaaagacagcactccaataaagactggttttctgctggatctgagtccatgatcctgggatgctaggaaaccagtctaacctcagagagtagaggctaggtcagtgcccctccaggactgaaaactgaatctagctgccaggaagtctggttgctgtgacctcccaagtgactcctcctcaggacctgctctaagaagaagaaggggggctgcctgcccaaagttgtgccc

SEQ ID NO: 44617 - DNA, 1303 bp, Bovine  19866881430934
  misc_feature (1)..(1): n is a, c, g, or t
ncctttctttatttttaccactgtatgtatatgtttgtgctgtcccttccgctcccgcccccgccatttccactccatcctacagacccgatcctaaataaagcctgatgggaagaagtcataagttagtcctcatctcagataaatacatgaagaaagaggccagaggattgatcaggtccttttgaccaggccctcataaaaataatactcaatgatgcacagttttgtctgcaccaggggaaagaatagatttgagaagtaagcaggcaataaatatcctaaaatatggtgtgccaaattgaaacaactgggtggtgaaatgcatagaaccactgagtgttgctccaacaacttccaggcaccaggggcttcaaggaatcatggtgctctttttcacttttatgtattgttgaaaaaagtattgtatgagagtaacatgttagctatggcattagtaaaatatgattattaactgatattttcctagctataaaaattaatatagtatttatgtgttgggataaaatgaatatttttaggtataatttacattcaggacaatgaaatgtcttaatacagctaaaagaatttttacctatgtacttatctatgtaataacattcaggttaagagataacttatttctgttgccccagatggtttatttccgctcattctcaagtcaattctccaccacaggtaatgaatacatggatacattttgtctagagcaaaactagactaattttgcctaattgccacaggtggtagttgttgggttagtccttcagttgtgtctgactctttgtgaccccagggcctgtagcccaccaggctcccctttccatgggatttcccaggcatgaatgctagagtggttagcctttttccttctccgggggatcttcctggtccaggggtcaaaccagggtccccagcattgtaggcagattcttcactgcctgagccaccagagaagttttgcctaaaacaaacatcttcaagtgttacatgccaaatactatgttgcaaattttcttgccttatctcattttaacttcagttaatcctaagtacaagaggagacaagtatttctgtaccaggtttccaaaagaaaggataagaaactcaatcaacataaaattgcatctgaaattctaaatctattacactcaagtgatgttctactatatttatattgtatagaccattaaatatgccctgtgattaatggtttaaaattaaatgcacagcataaggcacggtaataagaatatcaatcccattctattggcagga

SEQ ID NO: 44618 - DNA, 1555 bp, Bovine  19866880462228
  misc_feature (1)..(1): n is a, c, g, or t
ntgagttagtttgacctcagaaatattggtgttggaaatattctggtaagattgaggggaaaaatgttcaggtaaaattatgtttacagccatcatttaaagtgttgatcctgttattgttttaaacgtcttgacctcattgtcgcttataagctgagtctcatttttagaaggtgaagggatgaccagcttatttctcccctctattactaatcatcataatatgcttgcatgcgtgcatagtcagccacgtccgactctttgcgaccccacggaccaccctgccaggctcctctgtccatgggattactggagtggcttgccattttctcctccagggaaatcttcctgatccaggatagaacccacatctcctatggctcctgcattggattctttaccactgagccattatgacctgtagcactcattaaagtttataatatttaccttccatagtgcatttccaatccctgcatttctgaatcttagtttcatatgaagattgtcctgcttcttccatccctgactttggattcatctgctttccaccttccagaggagttttcaagtgttttcttaatctattgtgactcctcagccaatccccttcaattaacttacagagagagatttcctcatttcatcctttcaccatttttacgtggcaaaaaggagatcaaactgtatgttcaaaacattgttttgggttggaaaactcaaaaagctttttcaaaagatactatgtagttataagggattcctattcaacatctgtttaataaccactgattggtgtcctgtgtgccaggctgtgtgcctagtaccatgtttattgctctgttgttggcatctgcgagctcaccgagaagtgtttcctgcccgctaacaggcttctccttctttctggtggaaatttctctaatgagaaatgaaggattatttcataattaaagtctgagcctaaaacactgatgcccccagggcaagtaaccgccctcatttattcagcatttattcactgctggagaagttctgcattctttccaaaaggcagaaagaaggaaggatgagggatatttagaaaaagaagaaaaccatgtattgtatgaacctcagggccgatttcctaatctgttcaatctccccagaaacatatctgcttctgaaaaatatttacctttggtaggtgagtcaccatttgtacattgtacaaccctcgtggttgccagcagggagggtttgggggaagggaggggagggaggttggggttagcagatgtaagcttttatgtatagacaaggtcccactgtagagcacaaagaactacattcaatagtgataaaccataatggaacagaatataaaaaaagaaatatatattatatacatatatattaatatgcatatttatttatacacataactgattgcatatatatttatacacataactgaatcactttgctctacagagataattaacacaacattgtaaatcaactatacttcaatcaaaaaaaaaaatgctattatctttccaggggagggaag

SEQ ID NO: 44619 - DNA, 1748 bp, Bovine  19866880864471
  misc_feature (1)..(1): n is a, c, g, or t
nggctctgtgccatgtgaaattgtaaatagcactgacaatgtaatttgtactcatttatgacacagtagctcattatggctccaattttcatccccttcattaacaagctcatctgtttctctgatagaagcctgttttgtgtgagatgtggttctttgctcagagagaggtgagtggactgatgagaagtgggcatttgtgttgctgatggaggggggcacaacacagtggtacctcaaagtatgtcttcatggcagctaaagagcagagggtatagtgagattgggtgtaaatctttaacgtgcattttgcttgcttggatccccaggaattcttacattaaataaatgattaaaatagactccaccagggtcttctctggtggttcagtggttaagacttcaccttccaatgcaaggggtgcaggttcaatcccccggttggggagctaagatccaacatgccttgtggccaataaaccaaagtataaaacagaagcagtgttataacaaattcaataaagactttaaaaatgaaaaaaaaaaatctttctaaaaaatacaacatgctaggctgaggagccaatggggccaagctaccaactgtgggattatgactgaatgcctctaaatcagaatcgcgcccaggcccctggagcctcggttggcctcagatagcctgtccccagccatcctcgctgcccctgtccagggtctggcgtggagagcccttcgtcctgggacactgggcatggcaggaaaggcgtccgcccccttgcctgtcacacaccgcacattcgtggggaacctggtgctaaaccgttagtagatgacctgcttctgggtcggggtttagtaggtagcagagcagctccctcactgccatctattgaaagtcagccctcggacacaagggtttgcaaagaaaataaaaagtaaaacagagcacacaaaggaaaaaacaaagtactagaaaagaaaatgaaaagcaaaaaaaaaaaaagggaaagaaaaagaaaattaaattaaaaaaaatatagactctaccaccaacaaaataataatagtaataataatgaggaggaggaagatgaggaggagaaacatacagtcaagtaccatattccttgtggacctgatcatagatcaatttcagtttcattgtaattcctcagaatcctctgctgtatcactttgctgttgttgttcagttgctaagtcatgaccaactctgcgaccccatggactggatgccaggcttctctgtccatgagtatctccctgagtttactcaaactcatgtccattgagttggtgatgccatccaaccatctcatcttctgtcacccccttctccttctgccctcagtctttcccagcatcagggtctttttcagtgagtcagctcttcgcatcaggtggccaaattattggagcttcagcttcagcatcagtccttccaatgaatattcacttactgcactgttttaaatcttggatcctattgttgttcatctttcgaaaggcatcacttccactctttgtttgcccgcagcatccctagcctattcctgctggaccatgaaatagtaacttccctcctccaaggactgttgagatggtagttgtccttcctttcctgcatccctgtgggagtcctctctgaaagggagcttgttaaagacaaattgctgcctttctggtgcatcttgattagataaagttctccctgctccatgttgggcagt

SEQ ID NO: 44620 - DNA, 1864 bp, Bovine  19866880973603
  misc_feature (1)..(1): n is a, c, g, or t
ntttctggagagtgatactgcttaatgtggataaagcctagtaattaatcttcttctagcactagagtaattagtttcaaataccttccattgaagagtacaacaccatgaacaattttcccttaaagaccataaattaaaatgttgatctgtgttttctttggtggccagcattcagtgcaatccactgggataaaattggttgttaagaaggcacagtgaatccaggctggatacctgaactcaatgacaaacaaacaaacataaattattttagaaagttcttcaatattccataactggatttcttttattccccctcctgttagccagaaagtattagttttcatagcatttctttttgccatgacataactataaagctggaatattacatttgtgcatataattttatgtgtaactaaaatactttcactagagctggtatacttactacattttgttattggaaaagtcgaggtttacttttcattctatttcttctcttatatatcttctatctgtggtctttgttttttctttattccacttgttagattctttatctattaaagacatcaaccaagagtttatagtctaaaccatatttgaaagcacgtaaaattccatcttaacacagatttcatatttaaccatatggacataatatgtcttacaatgattttcccctcgttgtaaatgctccacattttgaaatatatgacattccattccaaaacacgagcacactatttgagaatcaggccatctgcgtacgatcaaggatgttcccattcacataccagattgctatttgcacagggtgtatccatcatgtctcaaggatgaggaaaaaaataagacgcgaagcataaagacaaagcactaggagagtacaaaatcagattacagtcttgcttccaccagggagtagctcaatcttctttattctgaaattagcctgtgcgtcctgaagagggcgcacgcacattccccgggagtgctgcctcttcacacaacagctgttaccaagttgtctaaagtctgggataagttcttccatcagggcttctcctccctctgtgagggggtacaactttctctttctctgcctccttatactttcgtgtccttggttaatcgctctgactccccgtttggagacctgatccaagtgttctcacctcaccagctcagtatttctcatcaattaactacctagccctttcccataggaatacactgttaaaaaaaaaaaaaaaaaaaaaaaatatatatatatatatatatatatatatatatatatatatatttatttatttatttgtggcggctcagcaagtcatgtaggatcttggttctctgatcaggggtggaattcaagatccctgcagtagaagtgcagagtcttaatcgctggactgccagggaagtcccaagagtccattcttcaccttcagctgaaacatattgtgaaagtgtcagttgctcagtcatgtccgactctttgtgaccctaccaggctcctctgtccatgggattctccaggcaagaatactggagtgggttgccttttccttctccaggggatcttcccaacccagggatcaaaccagggtctcctgtattgctaaggcaccagggaagccatctttagctgaaactcttccccaaatccacctcagcccttctcccaaaggggagcctacgacagcattgcatcactggtttctatttattccaggtgacttggtttctgtgcaagacgtcattagcatcaggaggagctcttttcaccggggcccctccagagagatgtctccttgatagccaaggcatctacactcaccagactcaagtccaa

SEQ ID NO: 44621 - DNA, 3054 bp, Bovine  19866881095103
  misc_feature (1)..(1): n is a, c, g, or t
nagagagagagtgggggagggagagaggtaggaaataaggaagaaaggaaggaaaaagggaaggaaggaaggaaagaagaaagaaatgaaggaatgaataagggaagaaagaaaggaccttcccctatgacattttgctctcataggggattttgtcaataaaaagcatataattctttaatcatttaatattaatattgcaaatcttaataaaatatctttatcctgtagagattgtatcatttgctttgaagttagtgacagttaataagatggaaagagtaataaagagaaaaatgtgaagagagtcaaggtatacagacattattttaatttacaagctacaatggtgctttcactcactgggtgagctgaatatcaaaagcactctcttatttccctgttgggttggtggtatatagaaaatgaaaacctcacttatatttgcaaactcattaatcatggtatagtgttaacatgttacaatctagggattaggcctagttatcattgttcggcataaaataaattcaagaaatatatctttagaataaaaagtgtacattatgaatatattttgaccttttgcctgtgttccataggacttcagggaggaaagttatagaggtgtcttgattaaaatggatttttagtgaggtcagagctttgaaaggcatgaagaattttacatcaagcaagtctaggcagaaaaaatatcttaatatatttttacattcttttcctccctccttctctataaaagcttgttttacaaactactaggagaaaatattgatttttgtcatcataaaccttcagtgctgaatttttatgcattttattggcaattagaaagcactaaaagctgagaatgcaccataatgggataatcaaggagttgacagtaatcacagggggcagaaaataaattaaaagcttgcattgtgcaacccattataacatggtctgcacaatattaaattattcagctaaaaatgtttaacactcagtgaattagctttcagtaaaatgtgaaaattgacagttttttttcctctactccttcccaaacaccactaaaacaagagtattggttttatctttaaggcaaaatccaggggacaaatgggaagggagacgatgtaataaaaaaaaccacaacaataatggaaagttcgtgataataagaaaacaaaatcctatcctaacgaggaaagagaagggagccacacagaaatctgatttatttcacagagttctacctcctcccaagtcccattcttttgggtacttggccctcgatgatgctggaatcttctctgctgacagtcaaacagagtcttggaaacaatgagcatcccataaggaacacaagcttgggtatctgcatgccaagtggagtcataaaaaaggtgcacttaattcctccagcaatatgtaacatcacttctgaaatgctgtctactagggaagctcattagaaaatcattgctcaggtgtttttaaggggttggggggagttggtcacataggcatcctctgcttggcacataccaaaatcccagactcccagaaggaaagcaaattgtcaacaaactgtattgtatacataaataattttgacagtgaactattcttatcagggaatggtgagaaccctcctgaaatccaagtttcaacatactagcccagggtcaagcttgtaaactactgacctttcaaaggtcggcactctcaggactatgatgttaatttttttcttcatccaagatacgttcaaattcagggaagaaaaataattttcatttccactaaacatgtgacctgaggaatgtgagtctggaacgttaggcagtcaatgttgccttcactgaaaagtgtatttccttggaattgacacaacagaagaaaaaaattgagagatggcaaagagaaaccatattcttctgagcccctagatacagccataccttcagcttgaagcttctctggatatttattttgtgagccaataaattcccttgttttgtctagattgaatgagtttttttcactggcaaaagagacataatttgtttatcccatatagtcaggacctactattgttaatcgtgtgtgtgtgtgtctgtgctcagttgtgtccaactctgtgacctcatggactttagcccactaggctcctatgtccatggaatttttcagacaagaatactggagtgggttgacatttcctactccagggaatcttcctgaccctgggatcgaatctgcatctcctgccctggcaggtagattctttaccactgtgccacctttttaatcatgggatactgttttcttagaaaacagcagaagacattgaagacagatttgaaggaaaggaggcaggaataagatgagtggtagagatgagagtgagaataaagtttaagtttgagttgaatagccaatctgacaaaccaggatggtttaaaggggaagcctaaaattctccatggaaatcttactcttctgcaccaaaagatgccacccattaaataaaatgcatcatcaaatgcattgatatatctgaaaccaaaacaatacctgtacagtatcattagtatgaaaaaagtaaattttaattggattgtgactaatacaaagcagtaggctttggcaaagaagcttgttctagggaaataatttctaaaaaaaaaaaaaccaataaattagatttcctgcttcaggataactcttattcaaagtctcatattcagtctgagatggtggatatttataaccctaatacaaataatctattcattagacattggttctgaatttttttttctgtcttgccatgcaagacaggaaaaaaagaagagttaggggcctggttttaaacaaaacttcttttaaggaaaaaaatcaaatggttaagccatcccttgcttttgaaagaagctaatgttcagaaatgcagtcttggaaagattaagaaaactactgtgtcctaaagttgagaaacatttagactccttttaaagggtagaatagaatttgatatcagaa

SEQ ID NO: 44622 - DNA, 2197 bp, Bovine  19866881372021
  misc_feature (1)..(1): n is a, c, g, or t
nagcccaagggaagagtctaaggagaaacctttgtgagccatgcacagaaagtcatcgcataagagagactttggcagctgttgtgacatattgtgtatcattgtgggtctttaaaaacatgcttgctgtgataacaagcagtctgttggaacagctgccaagaaatgttaaggttaatctcctttattaatgaagatgaatgtgtctctgtgtgcctgtctttctgtctctatggcatcagaggcaaggaagtttgtagttgtgtgcccacctgaacggagactggtcttcctttcacaccctggtggctgtgcgtgttaaggatttattcgtcacattacttatgtgcagcatttaggcgggagggttagggttttctgccccattgaagagagaagttgcaaaaggatggtagcaatccccttcttcattcatattcttcgtgctccgggggaaaatagtacaaagcttcagaatcttccatagacattgatcactcatcaccgttatctaaaggatgttgagaaaggccgacgggatggaggacattaagctctgtcctgggaaacacattttatgtttctctccttggctgaactggtgtatgtttgggggcatattccttaacctcatagttttcacttcctctgtaagaaactgaatttctaccaagtttagcagttttcaccagttagcaaatgctgtcacacagagcagagttctatcaattagaggctaagaatccacagaatggggagcagcccacagacctactggtgcctaaagattgataatgttaactcctattatctcatcatcacttcatcagagaattgtgcactgatcacataccctgggactccacctccctcacatggcttttaaaaatgctttcctgggacttcccttgtgttccagtggttaggactctgcactttcaatgcaggggtgatgggtttagtccctgatcagggaactaagatgctgcatgcttgcatgaaatgtggaagtgttagttgctcaggcatgtctgactctttgcatccccatggactgtatgtagctcatcaaactcctttgtccatggaattctccaggcaagaatactagagtgggtagctattctcttctccagggatcttactgacccagggatcaaatctgggtttccctcgtttacagttaaaaaaaaaaaaaaaaaatctttcctgaaacccactggggaattcagctattttgacaactagctgactgaactccttatttggtgcctgcaataaatacctacttcccttccattcaccacaacgcatcaggaaattggctttagtgtgtgcaggcaagtggatccaaattttattcagtaacttcaacgttgcttcatattgcaatctaatttttttgtaaaattgatggcttaaaaacaactaaaatcttagacccttagcagcttcagttttcattgacttgctatgaaaaacttatactttataattccaaattagggttcattgatttccattacagaagaactgtttcctttgaaacagactcagccttagatccttaaataatagcaatacacagttcttatgcactcagctcttagagtttgaagcatttagtgtttcatctaaatgaaggaaaagggggcaaagaaatgtgcatttaaagcatgaaaagctgataagaaatataggagaccagcagtatttttattagaaaaagtaagagtttctttaatgaacacacgtttatcacatgagtcttacaaaccatgcacagtgcattttgtattaagagttttttccttttattttttagtttatttctttcatttaaaaggtttgctgctgaggtagttgggtagttttttgttgtactttgaaagagaattagatcattagtggaaactagtgcctaaaatctgagactagtgaagacatctgatactgataaatatgctgaaggaaaaaaaaaaaagagtcatgtcttgcaaatgacagttttctaagagaagtcaggtgagtggtcagttacaacttctctggcaggtgacctttaaatcaaaactaaaaataaagaagacagtcatgccataacctgagagagaattttgcagagtggaaacagccaaggcaaataagctgctcatgtatactcccattacaagaggaccatagaaaatcaacacgg

SEQ ID NO: 44623 - DNA, 1960 bp, Bovine  19866881488023
  misc_feature (1)..(1): n is a, c, g, or t
ngaaccgtttgaaaagtgaagtttggaatccgatcccaaataatcaatcgagcctggaattattttggccttttctgattgtttcaagataagcacctggctccatttatccaatcaaaatggggaatgggattctcattctaacaggaaagaataagtctgatccatattggatggattccttcagctgtaacccttgtgttctgtggcctgtgctgagtcatgctggttctgcacattttgtaagagaatgttgcctgaaacctgaaatatacaagaaagcccattctcaaggctctgactcccaggcttgactgtcaaagttatagcatttcccattcatacagagagaaaaagttgcagaacagagaataacaactgtcttgttgaaaatgtgggggaacattatgaccagataggcagatagctgcaaaaacaaaggattatttattacatcttctctgagtctggctggcaccaagaagtttgcaagaaccaggcacactccttccccttttaatataagagaagcctgaattctaactcagggaagatggttctttgggacgttagtacgatgtcttctctgtgtctcctggttccaaattaagtaccattattcctttccccaacacctcatctcttgatatactggcctgtcacgcagtgagcagtaccagcttggacttggtaacaccatcatttgccatccaagccttcctgcccaaggaatagaccttgaacagacactgcatcctccctacatgccccgccagagatcccactgtttttctatgatagaatgctgaagatagaccttgctgcccaaggccatagagtcagagagtggcagggctggaattcactctcagagattctgattggctccaaagtgctgtcgattgtttcaaataccagcagaaccaaatatgtcagcctctgatccaatttgccagcaaacacagggaaacagccttaacaagtactggcaccaattcagtcactgcctaatttaaaatagaatcttcatttagaaagtcagtttcatttagaggcaagagcacttctcttggtttgctgtgagtccataccactggagctgcatgcacaaacagctaccacccattccctgacctagttacatcgtcacacctcccaccttctgcaaagaccatgccttcagttgcacatgtcagacttgtctaaacaccttcccatctatggatcccacaacaacaaccctgggaggcaggtaggaaaagtgctattgtaatttactaggcgacaacactgaggatcagagaggttgcttggtttactcagagtcacacagcgggttcagtgcaattttgccaagacaagagcatccttatatgcacccctctgcaaccatctgggactctttatcccatcactttcttctatcacttgtttatctttggcaagtcctctcccaccatacccactgtgagcaggacttcgtgttagcatctaaaacatggaattcagagccctgaggtcaaatctgtcctcctgtttcctgtgacccaggaaatgagtttatgtagcacctcactcttcgaagacaggcttatccagggctggtcttgttgatcacaacagagatcaattgtgctctgcggtctcaaccaggggtaaactgataggagctgaaaacatcatagattttaataagaacagaagatgttttattcagggttgaaatacgtgctcactaaatattttcacttctacccctgtgaattagtcctagcatcattactatagtcctaggcaggtgacactctatgaacacaccttgataccactatttgttctactgaacatgtcgaagggtgaagggacttttagctctccataaggctgcttcccacatgttccttttgcctagagtaaacctgagttcatgaccacaacccacaaagttctctctcatcta

SEQ ID NO: 44624 - DNA, 1029 bp, Bovine  19866881562249
  misc_feature (1)..(1): n is a, c, g, or t
naaatgaatttctcctggggtaagacaatatgacatacttggcagaacaatcttagcatagcaattattagtaaaactcattatcaaataaaacatattgagacgtttgttgttttttagtcactcagttgtgtccaactcttttgcgacaccatggattgtagccagccaggctcctctgtccatgggatttcccaggcaagaatactggagcggcttgtcatttccttctcgtttttgaagggacagataactttatagagggcatggggttgtgatcattttcaatctaatagaacgttaaggagtcttcccaaatttaattgaacaaagtagattatcacaattggattggacagaatgattgaaagataatcttccttttaaccaggagaatcatcatcacgttacatcattgcattaaaggtgagaaatctccatgagtaatatgaaaggaagattctccaatcaaatggaaagtttggcaaaagaacctatcaactggctccccttaaaatgagctcatcatgttttctgaaggagaattgatgcagaaagtagacaggataaaaggccagactttggactaacttgcaaaaaaatctgcaggcaggaagtaacatctgggccaataaattacccagacaaaataagtggcttggttgatgtggagagatttaaatggaagtaaacaaacataaataaaccaggagggcactcaaagagtttggagtagggcaaggaaattaaagtcaaatggagtaagaaaaatatgcaagaggcaatgagtgttcagatctctcggagcatcccttccctgatagctcagttggtaaagaatcagcctgcaatgcaggagaccccagttcgattcgtgggtcaggaagatcccctggagaagggataggatatctactccagtattcttgggcttcccttgtggctcagctggtaaagaatctgcccacaatgtgggggacctgggttcaatctctgggttgggaagatccccggagaaggaaaaggcta

SEQ ID NO: 44625 - DNA, 1971 bp, Bovine  19866880352657
  misc_feature (1)..(1): n is a, c, g, or t
naaaatgtgaaaatggtggcttggcttccagggtacatatcataatcacaaaacttcactcatttgtataacattacagagtgttcacaaatccatttggcttactgaccaattggctcatctgctaattaacaaacatgtaccagatacaaggataaggtagagctccatgctccccaactctcagttttttggagagggaccaaggcagaaaatttcagataatgatttgttagctaaggaagctaacataatgacatggagagcagaggaaggaaagagaagccagtctcttttataattgcttacagttttattgcttacagtcttatttaattcttacaacagctttatagaataggaaatgcagataagtctaaattttacagatgaggacagcgggtttaaacagatacctgaatggtgtacaatcacacaattatggctggaagctaggacatgaaataaactgccttttccagtggattcacttcttctggttattattcctgtgtatagttccttcttttgaaggtcaaagaaaagctaattcttttttctcttgtggccattgtacttccttctgctcactacacctaatctcatttcatttcaatgcagctgcacgttcagtggagctttagatcgaatgtaattctcatagcacattgacgtggcagcgcagtcagtgctcactgagtaatactgtaaagtcaaagtaacagagctcttatatattcgttcacctagatgaaatgcctgttcggaatacaaacttgcctttccaacccaggactgcagcaaatttgttgttgcctgactgtgtcctggttttgcttcactgcatttgattagtacacaacagaaacatacctaaggacacaggtaactgcaagaatattacagaggagatgtgcagaacggattacgtttgatagaggaataaaaaatccagggcagttagcttcttctaaagaggcctagtccctctattataggagtaaatataatcacctagttgtcaaagtaagagctgtaatcacaaatacaagagactttcactttccattaataagtcatgaaaatttaagtattttaaaatttgcttttttattcaagttatacatgtttttgctgttcagttgctaagttgtgtctgactctctgtgaccccatggactgtagcatgccatgcttccctgtccttcactatctcccagagtctgcataaattcatgtctactcagttctgatactatccaaccatctcatcctctgttgcccttctcctcctactctcaatctttcccagcatcagcgtcttttccagtgaattggctcttcacataggtggtcaaagtactggagcttcagctttagcatcagtccttatgaatattcagaattcgtttcctttaggattgactggtatgatctccttggtgtctaacggactctcaagagtctttttctccagcaccacaattcaaaagcatcaattttttgggcagttttctttatggtccaattctcacatccatatatgtctactggcaaagtcacagctttgactctatggatctttgtcggcaaagtgatgtctctgctttttaatacactgtctaggtttgtcattgcttttcttccaaggagcaagcatcttttaattttgtggctacagtcaccatctgcagtgattttacagctcaagaagataaaatctgccctgtttccactttttccccatctatttacatgaaatgatgggaccgaatgccatgatcttagtttttttaatgttgagtctcaagccagttttttcactctcctctttcaccctcatcaagtgactctttttagttcctcttcaatttctgtcgagtggaatcatctgcatatctgaggttgtcgataattctcctggcaatcttgatctcagcttgtgagtcttccagcctggcatttgcacgg

SEQ ID NO: 44626 - DNA, 947 bp, Bovine  19866880376176
  misc_feature (1)..(1): n is a, c, g, or t
ncctactaattctgaccctttctttaactttagatccatcaggcttgatacttaactgctaatatttaattctgctttaactgtatgcctaaatgtaaaaagaaaaaaaaaaagaggggaaaagagcttgggaatcaataaataagaagtatagatgaatgtgccacaaactgcaactataaggaacatacaatcaagaatgaccatcatgacaggcattcaatcaggaactacatataaaatggcatgtaataaatgccacaagtcctcctataaacaaagaattcaaaagacagggatcaattttcaaaggtggaaaatagtgagaaattacagagtattacagagggagaaattcaagtttttgtcttggaagtctgtccaaataggtaataaattgctggaaaaccaagactctaaacagctatttaagaaaaatctcccacaacattgggttttagtaggtatacagctttttgatgaattagtctccccactgctctttttcttatagcttagacacggattgagaagtgtggaaagaaaaagaagtgaaacactaaaccactgaatttcatagctgagcagtagattaaaaaagaagtatgactgaattctctaaagtacagaaggcataatcacaaatttctgaatcttataccatcatccatgatttattaccttctagtcaatcattacacacacaaactaaagtagatcccgttccagagaaatgaacttcactatgatgttcttagttaccttgtgaaaagttgggtgacacagcttgattgacagcaaatacactatttgaccttgggggtgtctgtaattgagatagtggaggttgagcagtcataggtgcagaatttccaggcaacaccacaacatttgactgactgacagttgttcctaaggctgtggatcagtacacaagagctatcaaa

SEQ ID NO: 44627 - DNA, 3227 bp, Bovine  19866880400813
  misc_feature (1)..(1): n is a, c, g, or t
ntggaaaactcagcagtggccacaggactggaaaaggtgagttttcattccaatcccaaagaaaggcaatgccaaacaataaactactgcacaacctgcattcatctcacacctctagtagagtaatgctcaaaattctccaagccaggccttcaacaatacatgaaccatgaacttccagatgttcaagcctggatttagaaaaggcagaggaaccagagatcaaattgccaacatctgttggaacatccaaaaagcaagagagttctagaaaaacacctacttctgttttactaactacgccaaagcctttgactgtgtggatcacaacaaactatggaaaattcttaaagagatgggaataccagaccgttttacctgcctcctgagaaatctgtatgcaggtcaagaagcaacagttagaactggacttggaacaatagactggttccaaatcggacaaaggctgtatattgtcaccctgcttatttaacttctatgcagagtacatcgtgaaaaatgctgggctggaagaagcacaagctggaatcaagattgccagaagaaatatcaataacctcagatatgcagatgacaccacacttatggcagaaagtgaagaactaaagagcctcttgatcaaagtgaaagaggaaagtgaaaaagttggcttaaagctcaacattcagaaaactaagatcatggcatctggtcccattacttcatggcaaataaatggggaaacagtggaaacagtggcagacttcattttttggggctccaaaatcactgcagatggtgacttcagccatgaaataaaaagatgcttgcttcttggaagaaaagttatgaccaacctagacagcatattaaaaagcagagatattactttgccaacaaaggtctgtctagtcaaagctatggtttttccactagccatatgtgggatgtgagagttggactataaagaaagctgagcactgaagaactgatgcttttgactgtggtgttgggagaagactcttgagagtcccttggacagcaaggagatccaaccagtccatcctatacgaaatcagtcctgaatattcattggaaggactgatgctgaagctgaaactccaatattttggctacctgatacaagaactaactcattggaaaaggcccctgatgcagggaatgattgaaggcaggaggagacaggcatgacagaggatgagctggttggatggcatcactgatttgatggacagaagtttcagcaagctctgggagttggtgatagacagggaagcctgctgctactgctaagtcacttcagtcatgtccaactctgtgccacagatggcagcccaccaggctcccccgtccctgggattctccaggcaagaacactggagtgggttgccatttccttctccaatgcatgaaagtgaaagtgaagtcgctcagttgtatctgactcttagcgaccccatggactgccgcctaccaggctcctccatccatgggattttccaggcaagaatattagagtaggctgccatttccttctccaacagggaagcctggcatgctgcaagcttgcaaagagttacacacgattgatcgactgaactgaactgatctctgccttacagaagagacatgagctggttaaatatgatacgttatcgaaccatgttagtgacacatgactatactggataggaagagacaatgcatatatgtggcttacaaaagcgtgaaatagaataacaccttcatatataacagtgtcagctgtggtggaaactcagggctcccaaaacaggtcatttaccaggtttacaaattctcacttattctgaagaggaatatatattcctgtcactattcatggtatatatcatgcattaaatcaactccttcctttccccattctaagaaaaggcacaaaggtatgtaagatgcagtgcaaaatcctgccacctggcacgcagctgaaagggaaaggacagcaaaatcctagaggagctggaatggactggaaacaacaggcaccttaaaatcttctatatcagctaacagtagagaaattaggctttaaaggaagttgcaaagaaaaagctggatcttattcattcattaaagcaacatcaggcctcaagggttagttaaataaaagcaatctctcagacataacacactgtaattcatacctggttactcatgatttatatttagctccaggttgtcagtctttgacattctacccacccgcatatttgcatattcagaaggtgtacaaaccccaaaaaatattaaaatgaaatcctactatacattatagtagaatgacaggtaatttattcataactgagttaggccgtactcaaaattcacttaaaataagcaaatgattacacaaatgtctaataatactaaaattgatagtcagaaggtataaaataccatggggatgaaatgccatggtaaatactattcaacagactataatcataactctgaactaaatcatggtttttaaaatgactttaagcagtttcgaaatgatttgattttgttcccctgccaagcaatttacttcttccattgataaaagacagggccattagtttcataagtcaggttcttctcttgcaacacattttcttgcaaaaaatttttttaatattactttttgacatagacaacaaaccagccagcactcagtgccccaagcaaagatgcttggatcacaacagggcctgggtttaactctgagttcagcaagaggcaggcagtgaaaaagcttttgcagcatttgcagtatgcatacttcttttctgaggctgaagcatcataaatatatttaggcatccaagccagaaaaattatgagaataaaataatatgatgtccagatgacaatgccacaattacaactgggggtaaattataatataattctgtagtacttcagacaaaaacaacacctacctaaatttgcttcttgtaagccttgttacattttcatgaagtgcaggggtgtttgtaataatgatttatcttatcatgtgtctgtttgtatcattttaaagtcttatactttattggaatgaggtccaagcatgaacctggtctgaagagctagcagctgtagtcacaaaacatatcaataaattaaaaggctttcacagaacaaaattcagctaaatcttttacatataaaatacagctaga

SEQ ID NO: 44628 - DNA, 1039 bp, Bovine  19866880525847
  misc_feature (1)..(1): n is a, c, g, or t
naccaggctcctctgtccatgggattctccaggcaagaatgctggaatgggctgccatttctttctccaagacatctttcccaacccagggatcaaacctaccttttctgtgtctcctgcattgcaggtggattattttccattgagctgtctgggaagccagtacctcttgtgcacatctctaattactccttaaggtaaatccctaggaatgacatttctggaacaaaggttatgcagtattttaatgctttggaaacatattgtcaaattgccctccagaaataatgtactaatttacactcacagcagcagtgggtgagagtgtctgtttcctgtacccttgctaccactggaaattgttattttaaaacatctttgccagttcccacttaatatataacgatgacgattaattcactgacaaaggtctccttggaacaaattcactgacttctagcacacattgcccttggtaatcaaatattaaatgtagttgattcttggttttgtgtgctagactagcaattgacaaactttttcttttgccagatggtaaatattttatacttgtggaccatatgatctctgtcacatccactcaattctgccattgtagtgcaaaggcagccacagataacacagaaatcaatgagcatggctgtgttccaacaaaaccttatttataaaacaagaggagggtagaatttgacatagaggctggagtttgtgggcccctgctctagacatactgaaaactcattacgggttagcagctactgtcctagaaaccatacgagaggctccagtgagcagagatgataacagcataccgcagtgagatgataaaaagatgcctaggtgccgagtcagagaacaggacaaagcagattcttgaatgccaggtcggtgttagtcaaatgaaagcagaaagatttggaaagtggggagtggaataaagagtaccaaagggagagaaaataatatgtgcaacagcccggaagaatgagaacaaattcaagaagctacatgtagtttc

SEQ ID NO: 44629 - DNA, 1026 bp, Bovine  19866880542546
  misc_feature (1)..(1): n is a, c, g, or t
nacgtagggctcgtttttcttcttcttttaatttagcatctgcctgtccagaagcaaaatagcaatcattttaagaacatcaagaaaacagctcaaatgatcacatatactaggttctgacttacatatttcatataattctgtacaccattttgttgtaaatacgagggtgcctgtgttctataaaatctctctgttgaatccaagtatgccttctcaaaattgtccctataaatttggagcttatcctctggattagaacaaaggttaactgaaaaacagaaaataaaattttactctaattatgattgaaatcagtattttgagtacaataaatgaaaaacaaatattgaggagtcatgttcaagggactgtgaccatgcccataagaacacacagtcatataagacaaaatccttctctataaaaaacttgaaaaggtaaaaacacaaaggagtaaagtgacatatagtacagaaaatgtgaactgtttttgaataggaacaagactgatgaataactggatgatcaagaaaccattcacagaaaagatgggatctgaattcagtcttttggaacaaattagtatttacactggttagtaaatcctcagaagtagaacaatacaagatcaaaccaacataaaacaatgaggttatctgaatggattgtaaggttaatagaagataaggcagaatggcaagctgggaatgcttatggagaacctcaactctctggctaagtaacctaagatttagcatggcataccactaaatgggtaataccaatacaacagtacttaaaaattaatcttgtgaaagtatatgggttcaatgatagcaatagtatcactataagaagactgtttcaaaagtctagaagtagaaattaaagaagtctaagctggtggcaattgaaataaaaaggaagaaatttcagggacatggctaaagaaaatatagactttatatctaaagaaatacaaggacaacacagaaagcaagtcaaagataaccaaaggttcat

SEQ ID NO: 44630 - DNA, 1373 bp, Bovine  19866880556443
  misc_feature (1)..(1): n is a, c, g, or t
nattctgcagctgttttatgatcctcttgcggaatttctctcgcacacgattaaattccattatgtccatagggtcctcttcaatccaaaacttatgaaactcgtgcatcagataacctgttagagataagataagtgacaagaatgcaagaggaaaaaaaaaatccttaatcttattcaaaatcaccctgaatgctgaaagagatgtcaaaccaagtatcagcaactatagagtgcaaatgcaataaacactagtgttaaaaattattctttaaaactagtgcaagtagaagctaccaatctacaagatttttgcacctggtcccagaattattctcactcttcgagagctgctgctaagtcgcttcagtcgtgttggactctgtgtgaccccataagacggcagcccaccaggttcctctgtccctgggattcccaggcaagaatactggaaaaaatcaattctgccatttctagaatatgaataacatctggaacatattctgaaaggtagacagtaactacttcattcttcccctcctagttaaattaacataatggtctgatttttcaaaagtactccacttagccttttttctcttgaaatttgatttgaatcaagttttaaattaccctgacaagtcaagcaattgcattttgactattatgagacaatgaaaactataaatcaactctgaacaatacagactggtcattaaactacatgaaattgttaataagacacttttgctttgaaccataatttcatattcaaatctttttgtctcaaaaacgttgtctagattggggacattttggaataaatgctaagtatttgacatgagaacttacttactgtattctgcttcccaactgtgacctccttctaccacatttaaaactgaaaggtgaatcagttcagttcagttactcagtagtatccaactctttgcgaccccatgaattgcagtacgccagacttccctgtccatcaccaactcctggagcttgctcaaactcatgtccattgagtcagtgatgccatccaaccagctcatcctctgtcatccccttttcctcctgccttcaatctttcccagcatcaggggcttttccaatgagtcagttcttcacatcaggtggccaaagtattggagttttagcttcagcatcagtccttccattgaatattcaggactgatttcctttagaactgactgggttgatctccttgcagcccaagggactctcaagagtcttctccaacaccacagctgagaagcatcaattcttcggcgctcagctttcttcacagtccaactctcacatctatacatgactagtggaaaaaccagagctttgactagacagac

SEQ ID NO: 44631 - DNA, 1890 bp, Bovine  19866880834522
  misc_feature (1)..(1): n is a, c, g, or t
naatttgaagttagaaaaaattacgtaccacttctttaagctttgcttcaatctcttccgaggttagctttttgcttaatggcgtttttcttagcaacatgtcacagtaattggcaagcagctcagggcattttgattcaggctgagtttttaatcctaccctaaaaaacacattaaaagcaggtgattaaaaatgattgaatctgcaaatattttttctaaagccaatttttcacagatttgttatgttctataaatccagtgggactagggtgaggaagtctacactgaggttgcatagctcaagaaggcactcactcttgggctcctgtaagtacacttacagaacactgacagagatctccttgaattttgtgagctacatgcttcctagcctcattctagaggcagctttgccaataatctttaaaagattttattcagatgctgctaaaatagtattgaaaactgtgtaaatccttgtatactcacagcaaaagtcgctcactcgtgtctgactttttgtgaccccatggactatacagtccatggaattctcaggccagaatactggagtgggtagcctttcccttctccaggggatcttcccaacccaggatcaaacccaggtctcccacattgcaggcagattctttaccagctgagccacaagggaagcccaagaagactggagtgggtagcctatcccttctccagcggatcttcctgacccaggaatagaccccggggtctcctgcattttaggtggattcttttaccaactgagctatcagggaagccttgtatacttataagttaacaattaaaacttttttgttttaaagcactcagtgttcagtttattagcaagatgtcacacaatatcctcttctgcttttcactgacctgactcagaacatcaattaaaaataggttaaaataaaactgttactttactctttgaaacatatcaaatgtaacctaaatttcacagtaatatatctatcattatccattaaaaaaaaaaaaactataaacaaactttccttaaacaatgaacttatatcactatttcactttcccaacaaaactttaaaaccagtgtattgtattttatgcttcaaagtcttttattctttaccctacttctctaagctatatatgtaaataaaattcaagatttaaagattgtatatatataaaatttaactgttatcagaaattataagtacacaacataacaaaacaatgtaattatattgtgtatgtgtataaaacatgcatgtgcaaaatttttttgtctaatgaagtagatgtaacgttttttccccttccaattataaactcaggaatgatcaattttacttctacttaaaaaaaaattatttatggctgtgctgggtctttgctgctgcacacagcctttctctgattgcaaggagtgggggctactacttagctgcagcatgagggcatctcattgtggtggcttctcttgttgcagagcatgggctctaacgcatgtgggctcagtagttgttttgcattggcttagttgccccatggcatgtggaaatcttcctggaccagggatcgaacctgtgctctctgcattggcaggcagattcttaaccaatggaccaccctggaagtcttgctgctgctgctgctgttaagtcagttcagtcatgtccgactctgtgcaatcccgtggacggcagcccatcaggctctgccggccctgggattctccaggcaagaacactggagtgggctgccatttccttctccaatgagtgaaagtgaagttgctcagtagtgtccaactctttgcaaccccatggactgcagcccaccaggctcctctgtccatgggatttgccaggcaag

SEQ ID NO: 44632 - DNA, 1613 bp, Bovine  19866880874043
  misc_feature (1)..(1): n is a, c, g, or t
ntattggcagggttgatttcttctgaggcctgtccttggcttgcatatgaccatcttctccctgtgtcttcatatggtcttccttttgcatatgtttgtgtcctaatctcttcttctcataaggataacagtcatattggattaggacccatcttaattacctcattttaatttaacccattttcatttaacccatctgattacctcttgaaagaccctatctctacaaatataaccacattcctcaattaaaaaaatatatatatagttgcatcccaagatactggggattagagtttcaacatgtgaatttagagtgggggatacaattcagcctatcacacatttcccttccataatgcttctatttcttttgaggaaagaatgctcattaatttcttatgttttctttgttactttctaataggaggtaaggacaagcaggaggtctttggtgtgccctcagaagtttgccttcagttctcaccaagccactctgagaatggaacgatccacccgggagctgtgtctcaacttcaccgttgtcctgattacagtcatccttatatggctccttgtgaggtcctatcagtactgagatgccacagctcctggaattgactgcaatgctccagggctgtcttctgtatgccctgacatcccactgctgtcatgggatgccttttctggcaccccatggcacttctgaccagttcgcacaatatctggggtgcctccagagctgctctcaatggcttcaaaatgtttgccagtaagcattagattttttccccatttcttactgcaaatgtgttagacaagccgcaaggttaaaagtaaactggattcatgatgacatagaatgttaacaagctcctgatctgtctcaccacacatccctccaacccacactcagcaaccaaactctaaatcaacctgccagaagaaagaaatgttaaaggaagtctttgtcagcccctataactatcatgtgaataaagttaagtcaaccaaaaataagacttttagaatttattttagcttctatttgtgatactgcatttaatccttgactgagactgaagtgacaaatgttataatatttctagcatttgagataagccaagatcttccaactgctgaggatttgaaaccaagtcaattaagagtgtcatatttcaaacaattccattggttgagtgttcctcaaacttgccttctgaattagtcccaagggcaaagggaaaataaatccattttcactaggaggtctggaatacagcctgaactgttcactaaaagcacaaaatttctttgaagccttgttttatcattaaaattgacaaaggtatattttattctgtaatatctccatttgctttaatatatatatttacattatttccccttgagtaaaactgaaacatgagtcatgtccctatgaggtgcatattccagtttggttatactcattatgcaaatagagctagtcactaataaactacagttgtaacagagaaacattacaacattcatgtttgtaaatacatgaaatagacatttcttaagcctgttgctagaaaaccccacactagatagatcacatttgttct

SEQ ID NO: 44633 - DNA, 1698 bp, Bovine  19866880904329
  misc_feature (1)..(1): n is a, c, g, or t
ncctgtgcagtgtaacatgtattttgtataagagaaatgtgataataataaatagatagatgccactcttaccaaataatttcatttttattcaattctcaggttaagtctcaaatcacaacattatcatgggaattaagtgagctacacaaagcatgtaacccagtcaggcacaaacatgttgcctaaaattttgaaaaaattaattaaccattctttttagtagctcaattttaaagttcctaagtaagggaatttaagaaagtaacacattattaataaaatatgactgaaaagtgaaggaagacagtgacatttctgtatttccctcaagtatgttcagtaagttataaaaagaagaataaagcaaatatccaacttaaaaagaaaatttaaaagcacttagttccctaaaatcataaatttcaaaaatttgactagtttacttagaagtagacaatactgttcttaagagtgctcagaactctcttcaaagaataaataagcagcattattgtcaaaagatgctacatccccatagcttaggaactgccaaaattacttgtaagaagttaaatatttagtaattattctccaaaagaacaaaatataagccttaccatatttcccatcatctctgccttgataattttggctcctaacttgttcttctcatcaacactcaagacgtggatagactcatcctctggactacttctgtttgaacaggacagacaaagagtatatgaaatataagtacatattaacaacaagtaagctgttgtaaataacaacaccaagattcaaatgttatttcaaatgaccttcacaaagcaatcaacacaaacagaaataataaatataaaagcctcaatgcttccctaaaaatcactacttaaagatactgtgttacaatgctatcatggccaatggcagtgaccaaagacctatacctgaccaaagacccagtagcagtgagaaaaataataaaagtaatattcatcataacttaatattcctgtgaagtgaagtaaaagtcactcagttgtgtccaaatctttgggatcccatggactatacagaccgtggaattctccaggccagaacactggaatggatagcctttcccttctccaggggatcttcccaacccagggatgaacccagatctctcacactgcaggcagattctttaccaactgagctattagggaagcccctaatattcccatacttattctaaaaaaagaaacaaaaattaacactataatcaggtcataattctacacatctagagaaattcttcttattcaatggataacttactgataatctaagaaactataatcagaaaattacatttacctacatttgaagaataaaaatagtgaccacgtgctcttttgcaatgacaacccacaattagacaacataaacctaatttacagctaagatgatgtatcgaacctatagtgtgcaagcctcaaagaagaaaagataaatttcctgcccaggtcagattcctggcatatacaaagttctcctaacaaactttgccttactgccacaagaaagattcgagactacaatacaagggagggtgaacctacgcagagcatgaagggactcctcaatgaaagagaaatagctaagagtccaaggcagctaaagagggggagagctgcacagtgaaagaat

SEQ ID NO: 44634 - DNA, 1252 bp, Bovine  19866880939215
  misc_feature (1)..(1): n is a, c, g, or t
ntgctttgtacttcagcacaaattggtgtttctggcaaggctgcagaattccataatgttcatctgaagttgcatctctgatatgaaattgctatagtgtttaaaacagcagttttaatcaaaagttcagaatttactgatattactgaattccattttatttttcatttaggatacttacaacaggagaaccttacttctacctgccaggcttttattttggaaagttcagacttaaaagaatatgcagaacactgtacagatgaaggttttatcccagcctgcctactggtgagtgatttgttccttaaggaagtatttcatcattgaccaacataagacactataaacaccgtcttaacaaacattgaccataggatttttgcagaaactaattcctttggccagcgatttgttatgtaagtcaatattgaaacgctcctgtcaatagtattcaggtaacaaaatacatgttaatatgagtctgactgatattgtgttaaaaatcaactcattagcaaaaaccaaatgggcagaaatttgatagtttgtattcatgcgtaagtggaaagacccaaagaagactagcttcttttcccacatttatgtcaaagctgggaagtgaattacaactttgatttttgagaatcagttttaaagtgacaccctcatttctaattagtttcacaactgcttgtcctggggctcacttgtttattgcctgttaggggctaaatatttgtatccctgcataattcacatattaaaatcccatccctcagtgtgatggtacttagaggtaagacctttagaaagtattaagttttggattaggtcatgcagttgagaccctcatgatgtggtttgaaaagtgaaagagaaatctctgtttgcacacaccaaagaaaggccatgtgaacacatatcaagaaggggaataaggccaggaatttggtcctcaccaggaagcagatcatctggcaacttgatcttggattttccagccttcagaaagaacaatgagaaaaaaatgtctgttatttaagccacctgatctatgacgttatatagcagtccagtctttcctatatctggctttcctgtagttgcttacttcagaaaagtataaaacagatattttgatatctagtcacctgttttttaaacatcactagaccaatagagcattgtttgttggtattggtggatatatgctagaactacattatttgaaatggtattttgtcgtttt

SEQ ID NO: 44635 - DNA, 1334 bp, Bovine  19866880975974
  misc_feature (1)..(1): n is a, c, g, or t
ncagtcccagtgaatgctggcaatatccttatattcccccaatcaatctgtgatgaaaacaagaggtcacagagacatctttatataaattttcactgttttataaacaagtaagttgcttcaagctttaagtacttcactttaagtgcttcagcttttaaggtgatgaattatgttgacttttggttttcataaaatattaaaaaaaaaaaactatctttaattaaatgacaaagaataaaactcaaaggagtccataaacacatgtttgacacccctagaagcactgtttagtggtagtcagctacaggagggaaacatgatattatgaataggaagttaatattttccaggaataactgaaaaagaaagtcttcactggtaatataaagtctaatgatattataagcagtaatcttaagcatcaaacgtgtaaaaaaaaatgaggcataattactgacatttcaacaatcttctaatagatatttagcaagttactgatttcaaatatgaatttaggccaaataaacaatgaatgttagtagctggaaactaatcatctatgacatatttgctgattttgtttttaaggatatgtttagaatcttacagctgtatgccactgataattgttccaaataagcccaccattcctaaaaactcctttctgctcagcttcttcacgatgtattcttcacacacattagaaacagcatagagggaagctccaagaaggaccaagatgtcaccaatcagtacattattacctatagagagataagccataaaaagggatacattgtcactagggaaaactctccagcttgcttccagaagtttatctggctcataatcatctaaataagattttacagaagaagaaaccctgatttttaaaagtttaaagactcttactcttctcattttctggcacaattctgctttcatttttcttgttttggatcttcaggagactaacaggttggaagatggtggtgtataccataatgtaaggccccagaaaatgattctatgacatgggaaattaatggaatttattaataggaattcactgataactacagggaagcaaggtgattttctcaattaaaggagacactgaagtcgcttgcagattggggaaattcatagaccttatttggattttataatatgaactatctcaaccttgacataaagaatatcaaaatgttctcatctacagagtaactgaaatagaagtcatttagtgaacacaacatctcctttttgacggaaacaaaatctacagtagggtttccggcaactaatctaaatgtatgggccaaaagaag

SEQ ID NO: 44636 - DNA, 876 bp, Bovine  19866881094647
  misc_feature (1)..(1): n is a, c, g, or t
nctacagagcgaagggtagtaaattacttaaattaatctttctttgaaatgaatgtgtgattggtaactcattattttgttctttttcattttcagagagagattgagaaatttaagcgcctgattcaggatcctgaaactgttcgacatttagatcacccattcagattccaaacaagggaaatatttgaattgggatgctgtttttaggtattcgattctaattttttttttctgtcttacttttctctttcctttttatttctgttgtgatatttttgtgtgtatagaggtcaacttatctttgctccttgtatatcgttgtgccttgcataggaaattgatgctcgatatttatctgaaacataatttttaaaggatgttcatataaaaaagttaagatttttgaattatttgttcaataaaatgtctttgacatatctcactcaagatgagaatttctttcatatcactttttttataagactttatttcaaattatagaataaaattaagttatattaagtcctttataactttgacatctttaaatattgctctaagtaactgccatatataaacataataaaaaagtaaaaaggaattttagaaaaattccatatgatttcagttaacaaacaaaactcatgctttggaaagacacaattcattacttgactggagtggcaaacagaattgatgcttttatataaaggcataattttcagttatgaaatccattcataactagaaataggtggtaagacttaggaaagataaagtattttaaagtaacgtagaatactgataaacttgaaagaacattttcagtctagtgaaatatgagtatatattcattcttgagtgtttagaata

SEQ ID NO: 44637 - DNA, 908 bp, Bovine  19866881095611
  misc_feature (1)..(1): n is a, c, g, or t
naattagtgataataaagtttcatgccaagacttgagatatatagagagaagcagaatggccagaccccatcaccatataaaccttgtgtggaagcttaatttagacagggttcccagaatataaatagttaagacactaatacctctggggaatgcctccggggataaagctactatgaaaagaagaaaagcattcatagttaaaaaaagcttcaggacttacttcccttgaaatagctgacagtgcctttccagaatttacttaaacaaaaggttacttatttataatctctttaaagcctttgagattttgaaggaggcttgagtgtcaaggctgaaagggctcttagaaataatctaatgtatcttttcttcctttaacagatgagaaaactggaaatgttgtctggagtggaagaagtatttgaagcttacatgtgaaatttcaggcttattaacatgctttgaaaaataaatgtgttgcagaaatgaacgaagaattataaaatatctttaagatttggattcagatttttaaaaagaaaaagcacaatgaaattgaagatgctatgttaccttctcttatcttattcctgttctttcctagtggaaaccattattatgaatttggtattcatcccatccatactttcacattttgcttatacatgtgtatcaaatattatcaaaatgtaagcatagtacataatattcagaaatttgctttttaaatttttgagtgaacctccttgtacatacctctgtgagtatagaaataaaccctcattattccaatgtccctgtggctattggggaatgagtaatttagcacaaatgttcttgtaattgggacatactgtaataattagcagtgatcagtccatatcaggtgtcaggacactcttgc

SEQ ID NO: 44638 - DNA, 822 bp, Bovine  19866881161981
  misc_feature (1)..(1): n is a, c, g, or t
nctgtatctcaatcatctcccttcactactagtcccatacctatacaatactaggcgtttaaagaatgttaaaaaaaagaggggtttgcttaaccccaaaatgggatgtcctattttgtttcacaataactaaaactttcgacttagatatgaaagaaaactcacacaaaagcaaaaacatttttaaaaagatacctgtctgatatacctttttccacaaaattcaagtacaggatgatcttttgtcctaaatcatctactatttctttaccattgagagtatcataggctttcttggattcttctacagttttgtatcttacacatgagtagggtttattaggtggcattaagagagcatccaccaatccacatttctctaaaaccggaagcagttggttcctactcacttgattacccaaaccaccattggcaacaatcagactctaaaaagacaaaaaaagaaagtaatatgagcagttgatatcaacctgttatttttaaataacattttaaaataaaatattgtaaatgatactgatttttaaatagccttttagtgaccataaacacaaattaaaagataactttcactgttcataaatttaacataatgaaacagaaagaagaggtagagaggagaagaaacgaggatttacataaatcttgctttttggctagacactgtgctatatatttttatactcaatcttcattaaaacaatcttcacaacaatctttgtatgtgctcagtcacatcgacttctttgtggccccacagactgtagcccaccaagctcttctgtccatgggagttttcca

SEQ ID NO: 44639 - DNA, 1495 bp, Bovine  19866881201578
  misc_feature (1)..(1): n is a, c, g, or t
nctaattactttacaatattgtagtggtttttgccatacattgaccatgaatcaggcatagacaccattccattgaagggacatgaagaagatggtttagaaaaagagaaaacttttcttctctcattttgagatctgtagaatgttaggaaaatactgttctatatattttactctagagaggattataatagtgactttttaatagtacaccaggttctctgcttttaataaaactaaaggagcaatctttttcagtaattccatgaatgtattattaaagaatataggctacattctggttgcctattcctaaaatgaaatgctgcttgatagaaaatttagcaaaagctaaatcatttcccccaagcatttagctctgatgaggtgaataggtcctgaatactctttggtagacttcccagaaataactggcatctgaaaaggcttagccttggaagagagccaattctttctccttcttctccctcaataatattgatttctgagcattgtaaagcaaaattttctaaatgtttcaggtttgggattaaagcaaaatatatttctattttcaaaacagttcaaaaattccaacaaaattgctttctctaatgatcttgaaattttttgtgatggtttataccctgacctttgggtcctttaatttccaatgatggggaaagaaccagagtgattgatcatcaagttagtcactctcagtaaaattgtcaatatgaagataaaaattgcatatcatcgatttaatttgcatctctttgattacaagtgagatagggcatttttttttcagtgcttaacagccaattatatctcttcatttttaaggtacccattcattagtagaactggtctcttgataaaacagataacaatttccagtacagtagacaaaatatgttctggcccctctccttttttaatttgtattttaatgctatactgcacttagatgtcaataacaccccactccagtactcttgcctggaaatcccatggacggaggagcctggtaggctgcagtccatggggtcgctgagggtcagacacgactgagcaacttcactttcacttttcactttcatgcattagaggaggaaatggcaacccactccagtgttcttgcctggagaatcccagggacaggggaacctggtgggctgcctcctatggggtcacacagagtcggacacgactgaagtgacttagagcagcagcagcacttagatgagtagattacaggcctcagctataaaacaaaatgaaacaaaaaaagttaacctttatcttaaatgtgaatcgcttttagctatttctgctgtaactgttctattttctattttcagacaagaaatgtttctaaaaagtcaactgttctaaatatatatttttacccttaaaagacagatatcagtgtttaacttgcttatcaattgtaaatttatacaagttaactcactgaattgcctccatg

SEQ ID NO: 44640 - DNA, 1370 bp, Bovine  19866881243777
  misc_feature (1)..(1): n is a, c, g, or t
ngtaggacccagactctgtctctactgctctactgccatcctctacatttggctttcaccttcaaaacagctgcttaagtaccagccatcatatctaagctgtagcaagccataagagggaggagtggaatgtgcatcctccaaatgactttcagtgagtcccaggacttcattgaaagctattaataaagacagtctctgtttcagttagatgtggatttttgaagctaattactgcagccttcttgccatcaagaggagagatcctgcctgagagtaggaaccaatcttgaggaaacagagcctcttaaactcagaaaagaaacagctcttttgtcaatctgatccccaacatcaagctatagctaaaacaagatataccattgggtttttaaatgacatgaatgattattaatctaggggcttccctggtggctcagctgttaaagaatctgcctgcaatgtagaagacctcagtttgattaatgggttgggaaggttccctggagaagggatgggttacctgctccagtattcttgggcttccctggtggctccagacagtaaagaaactgcctgcaatgcagagacctgagttcaatctctgggttgggaagattcccctgcagaaaggcatggcaaccgactccagtattagtgggcttcccttgtggctcaggaattaaagaatctacctgcaatgtgggaggcctgggttcagtccttggtttgggaagacccctggagaaggaaatggaaactcactccagtattcctgcttgggaaatccccaaaacagagaagcctggagggctacagtgcatggggtctcaaagagttggatgtgactgggtgactaacactgtaaatttcggccatggtacctaagatggataaggaagaaagtgaagattagaaaaccttgacagattgaaaattgtggtggtggtggtggtgtcaatggataggtgctcttaatgagatgaagagtggcagtgtgcaacttgacaaaaggagctgggtgtatagcaaagggattgagatacttgatttatgagtttggaagcagtgcagtttcttctgtgagacatctaggatgtaactttggaaagtgggtacctcagttgattgtgtagatgagaaatgtcagtggagatgagaaggtcagtgaactgaaagcgccagtgagtttaattgttttatataaatatctcttagagtaggataatgacatcatgtctgggcttaattaagcaagaacagatgataagaggctgagatctagctctcttctggtttggtctttcctaaggatagaccttagtataaactagaggaatagagcattcagtcaatcttccatttatatt

SEQ ID NO: 44641 - DNA, 1711 bp, Bovine  19866881341167
  misc_feature (1)..(1): n is a, c, g, or t
ngttttttcctcttggcgagatgggtcgactgctttccgccccgctgtggctcctctgaagttcacggttcgctctgtctcttctgcccagatccccgccgccacagaagccttcgcagggtagccctgcagccaggtcccactccctaccttcaggggaccgcgtcccaggccccaccctagccagagccccagagtcccactctttcgcctccggcaggccccaagccaggtggggacgaacccaggccgggcgtttgctcccagttccgcgtctgcgcagcggacgtggggctggagcggggccggccggggaggcgcaggatgcgcgggagccaatgggcaagctcggggaagccgggctggcggcgacggccggaccggcgcgcactctcgggatggagggcgagtgccgggcgtctcaggcgcgctcctggggcctcccggctgggggcgccggcggggacagcccgggggggtgacgcccccctccccggcagcatcagctcctcctccctgctgcaggccgaggtgctggatctggacgaggacgaggacgacctggaggtgttcagtaaggtgagggctgcgcggcggcgcgtcccgggaaagttccaagtcaactcccagagttggccccgccgtgcggcggccgccctagcgcgctcacccggccccgccggaggcttggagccgagggtgggtgggtcttcccaggccgcctgatcctgcctggctgctcgccgcccccgtggctgactcccagcacgtcccgaattgcagcagttcactcttctgcactttgaccttgcgttcggcagggccatggcttcgtggaatctgcaaagttgtgccatttcccacttttctcttctttccttctctgacgcggatatttccagggacagtgctggaaccgggtaggctgtggcccgaaagtgcccccgcccctggcagcttcttttagggcgcagccagtcctgaaccctgggagcgaaatcacccgagtctagggaaattattcttgatttagtgttgttgctggttttggattggagacttgggtggcgccggaggttagtcttaagtctagtgggaagaggcgttagggaatccctcttcaggagaaaacagttggtgtgtccaactaggaagctcctgcgctgcggagctcaggattttttagatagctcctaccacccaactcagcaccggcgctttcatttttaaacctaacccagggaaacctagagaccaaaggggccctctgaactttcaggattgttggagagaaattgactcggtcactggcagacttgtggtgcccgtaggctgatggttgtaattttgttatggaaaagaaaaataccattcttgggaggccattcaatgccactgcagcttctctcagttgctgctggtagaagagttgagatgggaacattgtattttcattactaagaagcctgttcagtaggtgtgttaccttgaggtgttaagtaaagcaacagacttcaccactgctttattctgggagagaagttataaagtggacaagcatactcagaccacaaagaggaatatgcaaaactccccgccttttttccctataggattaagtgaagtggtaggcacaggtgtattggggaagttcagacagagtatctggtttatacacttgagaaatcacatgacctttcagtgtgtttaa

SEQ ID NO: 44642 - DNA, 1384 bp, Bovine  19866881496974
  misc_feature (1)..(1): n is a, c, g, or t
ntctaataccatctatcaataatttcagcagagaatactgtaatgttgccccagatttcttggaaagctgatattcagagtcattatcaatactatttctgaattaagtccttgcatttatgtattaataatgaaaaattttttgaaattttaagtttgaaaacacaatatgagaaatatatgtctttcattcggggattccttttcttcatcaagcacagtgagacatactgtcctcactaacaggctggggagaagcagacccggaggcggaggtggagcctgtgatgtaactgcagtggggctttgctagaaaagtcttctctaaatgagaaatatctgtacaccgaattgtttagcgtcaatgtgcatggtcttacaagagaaaagacttgtctctttcagcataatgtaaatcttagaggcttgaaatcttggtcaacagaggaattcctcacattgtttagagacatactaagagtctcactaagggaggaaaaagcaggtttcttcagcaaaggagtaccactgtagcgcattaatggtgtgtgtgttatagtggaagttataacccaaagtgtgaggaaagatgccctacagcttcttccaatcctgaaagtttcctacattactgtgttgtttccttattcttgacagtgattatggaaaagaccttcatttcttattcccacggaagaattcaggagagagaaatgtctcccagttgtagagggatacaaattttgcctttcttaaaatttcaactagatctcagattcaacttctagggagacaatgactaattctgtgtaactacttggtgtcttaagatgataatgaattaagacgtttattccaacataagcatattacctgctttccaccatattggaagctccggtttgtcaagctccaggctcaacacgcacactgcagagatgcagaacaacgcttggatatctgcccaagactggtctctccgaacgacagactcaaatttacggtaccaatctaaagctcaccgtggggttggcagtatctttttcctagttggtataggaaagggatgagatctggcaaactgaggcacggggcttctacctgcctgtgcggagcataaaggctgacaaacatattcattaaacttgatctgaagcaaccgagcctacgaggtcgttcctgaaatatttataaggtgtgttaccggactctgccacttacaggtggggaggaaacacggtgaatagaagcacccacacttgaggggcgggggcggggacggggtcggggggcggcgaaaggcactcacaatcgcacagctcaccaccacacttaactgttttgcttttaatagctctgtcagccgtcgctccccagtcgcctg

SEQ ID NO: 44643 - DNA, 2234 bp, Bovine  19866881520653
  misc_feature (1)..(1): n is a, c, g, or t
nagggggagattttggaaagtttaaatcagagaatgttggagaaccaaagggtcaacatgcttgttcagtgagctgataaggaggcattctggcacatccaagaagtattgggattggtcagcagaaaagacaggtggccacacaatcgagccttaaagaggacaatagtaccaagacaaaagcagaggaaaggagaaaaatgggagcaagggaagaaataaacagtagccaaaaaaggcaccaaggaaaaactggaaatttacgagggtgagctgagaggctattcatggaggcagaagatgagagttgctatagcatgttcttcccatggctataggagagacagcttctaaaacacaaggattctgtattcaaggtactgattggttttaaaaatatttttagccaaaggtaggaaaagaaaggattcccatgcttcaccctctgttggtgtatcaaatttactagaataggcattctggagcttgctgtcatagtaggtatgtccttacagacctagggcttcactcctgatgatggattttgtagctacctcaaataaagtaacatgggattgaaataaggaaatatgcgtgtgaacccaagaagtctaatggttggttttcttctgggcttgttgcttgctggtggtggctgctttctattctcttccagagttctgttggaagagtgctgtcttttatttttgacagaatgctgatccaggtgtgcctgtttttttattgtaaatttttgtggcgttgcctgaaatttgtaatgagaaaactgactggaagatgtgaactgcaacgaatctgttataataccaagcctggagcttctagaaccatgaaaattggtaagcatgaaacaaagaagtaagcacaatgtagactttctgtaattgaagatacagtgttatatttcagtacaataattgtaaaccacttgtaaaagataatatttgaatagcttttaaaattatctcttttccagaaacatcactgagagattcaaaaagtaaggtaggtaaaattgtttctgtatttttcagcaacttctcacttggaggcttacctccaatcatccaaaagtaaaaattttcagaaacaaaatatacctctggctatgggcttccctggtggctcagatggtagagagtctgcctgcaatgcaggagacccaggttcaatccctgggtcaggaatattccctggagaaagaaatagcaaccccctccagtattcttgcctgggaaatcccatggacagaggagcctggcaggctacagtccatgcggtcacgaagaggtggacacaactgagcgactgagcacatgtatactaaggcaaactgagaagaaagaattttttcccatcacaaaccactgtgctttttatctaaaagcaggtactcatgaatttccagacagatttatgctgcacttattacttcattgttgaattcatccctttttatatctcattccaaatcataaatattccatggaaataagagaagtgttatctctctgctacttcctcaatatccaaatcatttaactttatactcaagattttccaaggccactatgctagcatttctagcacgtagttaagcacccgcataagaaagaaaaatttgtttcttaagattcttgaatatttaactttgacatccttaagactgtatctcctatgtacttcacacagtcatagacatatactcattaacaatgggaaaccatgtgtattcagtgagaaaaagaaaatataatatttctatgtgagtaacttgaaacagatggaagtggtaaaaaaaacaagcttatgtatttttgttttatgtttattaccttattcagaaaaacaccaaatttactagaatttaaagactacatgaatttttgtttttaagctttaaacaaatatttgaagccccaatttaattagaccccacttaagatactagtgttcatgacaagggaactgatttaaacttgttttctagctattacagacttcagtgagtgttcatcctgatgctattgaaaaaactatagacgacatcatggaactgaaaaaaattaaccccgacataaatccacagtaagaatatgttcatcatgttataaatataaaacagaagtcacatgccacatacttagtatttctaaatatgctgtttctaaatactttctcacacacgctttctctctctctctctcctttct

SEQ ID NO: 44644 - DNA, 1118 bp, Bovine  19866881662546
  misc_feature (1)..(1): n is a, c, g, or t
ntgactgtaatagataccagattagaagtcatggaactttagagtggccaggtaccatgagatcatttggtctgacttcttgatttcagattttgactcaagagttgactagctggagatcacacagctggtcaatggcagggctggagcctgaggccttgggagctcttaccaagatgtaggtgcctcctttatatggccagtcattgcccaccaaaaatggtaaaaatagaggaggtttaagtttgattttaagacacagtttgaggatagagagtcttctgtgatagtttttagagtgatgtttgtctactttttttgtctaagaaatatagtttctattttattacctcactatggctagattcttttggtatcttccaggacaagctattatcatttgcatcgtttaatggtttgttattcaggcaggctcaataaagcacttaagagattagagttctatagatggaataaataacagaaggcaaagtgcccattcctatacttgacattgcaatgaaaggcaatcagtaaacaactgtggacaggatcaaacaagctgctgagatttaggggcctgccttgtcctagactaaatagatacagagcacatcagggacaaggttaaaaaaagaacaggatgagcaatcaaatagcaacatcaggaacattattagtaaaaggaatatattttatccttgaatgcagtctacaaatgtgtgcctttgagaatcgaatgaatgaaatctctttttcctttatcttgcaaagattttggatttactataattttggcactcttaatccccctgcctttcagactggcaatatcaggggtgtagcaagtattttctggacccaggatcaacaggtggtggaggagtatatgatgaagatgagcgagagtatttgctgtgagcaagtatctgtcttacatggtggggttggacactttgtcagggaaacggtgtctgtttgctttctcataataacctgctctttctgttgttcttaagcccaactgcaattaaacattggttatgctatttttctctgtctagtttctaaatcctccactttgtacctctctgttctctacattccacctcctccat

SEQ ID NO: 44645 - DNA, 945 bp, Bovine  19866881706863
  misc_feature (1)..(1): n is a, c, g, or t
ncatttatagaattgaaacctgtgcgatgtgtgaggatatttatgaccctgtttctcttgccatggactggaaagtatgttggcacatcatcctaactggatgctcaggactccctatttaatatccagctttataattgaacagttacctgaaaagagtgggctcagaggtgcttgaatcagaagtttgttgaatctctcactctttttttatggttgcttaataataaacactttaaccttcattatggctggaaatagaacaaaaattttagcaagggttgaaattttagctgtgcagaggaataaatagccctgtgacctctgagatttccaacaatatcattggatggtttccctgagaactttctttacaactctcagatgctaaaaccagttgcttacagatctctttccctactctcaaggaacatgatctaaatatgaatcatcataggatcttggctagacaatcttcctagtgacacaatatccttttccttgagatatgccaaaggaattctttccacagtttcttcctcagaagagaacatagtgggaaaacatgggctttgatgacaattagactgaagttttaatcctgactcagacacttactagcaatttgttctatgacaagtaaattaattccctaacccacagtttggcagattaattccaatgaatgaatggcagattcattccaatcccaaaggaaggtaatgctaaaaaaatgttcaaactaccttacaatagcactcatctcacatgctaaaaagtaatgctcaaagttctccaagccgggcttcaacagtatgtgaactgagaacttccagctgttcaagctagatttagaaaaggcagaggaatcaaagatcaaattgccaacattcattgtatcatctaaaaagcaagagagttccagaaaaacatctacttctgctt

SEQ ID NO: 44646 - DNA, 1387 bp, Bovine  19866882110470
  misc_feature (1)..(1): n is a, c, g, or t
ncacgctttctctctctctctctcctttctctgccccagtataattatctgcatgttttgactttcaggtgaaaaataaagaaaaaagatgcctttttcatttttgtaaatagcagcaactttgtaattctgttgtgatttatgtttatgctttgaggtgcaatgaatgtaagaaatctgatggacgcccttgatatcagaagatgaaataaagggtgcccatccatcaacagtcactccatatgctgcctatgttttacattaacagtaaatgtacaaattgtaaatgtgcctgagctgactctgctctatgaagaatatttcttcagttcatgacagactgttaatcttggagacagttattacctgcttgtgaagaagacagacatgtgtgggaggagagatgacttttatatgaagactttagaattttgtaattagttgtcttatcttggaagtattaaaatgcatttggcaatgtacatgatatttaaaattagctttatattttccattgggtacaggaatttttctgtaaaattttagtctaaggatattgggtagaaataaattctgtatgcagatacagtcagatacagtttaggtaggtaacagtcaaattgtcttttagatgtgcatacttaagaacttcagatgttacattcagggtgcacttagcataggtctcttatgttggagggattccaggtactagctaattgctcatcacaaaactccatttccacatggtatccatagcattcttctgcagatgcttcagctaattagctgctttcccttattcagctttattaaatatgatttaattatatagtaaatgtctttttgaaacctactgacttatttctctgaaatggtggtaagaatgcaattcatttaaaatttaagattacaattaggcatgagagatatattagacctatagaggttgggttagatttaatagcaaatcttttctgtctcttttatgaaagttatatatttcattcagaagtgtttccttaccatctattcttttgatttcctttaggaagaaaaaacttttataggtagtatttaattgtggttttggaccgtgaattttaaatcattataactgggctcaaacacagcttcattaatcaaaataggaaccattacaatcaacacatttttgccaatgagaaatgtttgtttattcctgtagcatacaaacccatgctttgggatttgacaaacccttggaaagcattttctgcctcctgctgattgtagaagtgttttccttgcaaaaagttgttgagttgcttgagaaagtagtagttgtactttgagaggtcaggtgaacatagtggatacgcagaacttcgtagcccagtttgttcaa

SEQ ID NO: 44647 - DNA, 1993 bp, Bovine  19866880922651
  misc_feature (1)..(1): n is a, c, g, or t
ngaatggcccgtaattgctggtttgctaagaataaatggctggttttactttgtgtctatgttgtaaaaagcaaagctgatttcagaacaaataaggtaaaatcaattcaagaaagggaatcagctccttcttattgttcttttttgttccccattagcataaacaccactattcaagtaggctctatattactgaaaataaagccctggattggggtacgggactagacagattaggtgacttctaaattactttctaatcctaaaattttattccttcaacaagtatttactaattgcatggtatggatgccaggcactataccaggagacaagggcccagcagtgaacaagacacacaatgctgatactgtggagaaactaacactcaagctaaagagacagagaataaataaataaatagagaggatacagctaagttccaaagaaaataagaaagataaatgatagcgaataatagaaatgacctactattcttatctggggcttcccaggtggctcagtggtaaagaatctgcctgccaatgcagaagattgatacaggtttgatacctgggttgggaagatcctttgaaggaggaaatggcaacctgctccagtattcttgtctgggaaatcccatggacagaggagtctggcaggctacagtccatgggcttgcaaagagtcggacatgactgagtgattaaacaacaactattcttccctattattattaattatactacttcttccctgggggctcagcagtcaagaatttgcctgcaacgcaggagctgcaggagacttggatttgatccctgggtcgggaagatcccctggaggagggcatggctacccacgccagtattcttgcctggagaatcccatgaacagaggagcttggcaggctatagtccatagggtcgcaaagagtcagacatgacttagcaactgagcacacacacaaactatgatccataacattcagggcactcactcttcccagctaacacattgatttgtatttatccagttaggtctatctttaactacaagtgaatgagtgcaagcatcagccagatacattaaaacatcatcagaacctatcattaattagtcctaattgaatcaattgattaatggaattttccagtggaccacttgttacagataatagattagttaactgctttatcaattgatttaattaattggattcattgcttttgactgtctaatctcaccaaacacaaaacagcctgattataggacaaaaaaaatgaggcactaaaatggaaagcattacccaacagctccattgagaaatggggagtttcattttctttttttttggtgttcttttcagttcatattaagcttcaatttcctttgttgtagaaatcctggctcagacacatgttattacattatacatgggcctgaagcccatccactcatactccctgggtgtagtcatgtgtaaactggtgatgtcataatttaaaactcatgtggaaataagtaatataggattaatagctcatattatatcccccaatgatttctgtgtggactaaagacttaagcatgaatatcatactttagtattttcagggaaatgatatgggagacaatctttatgatttctaggcaggaaatgactttaacatagatataataagtacaaaccatgaagtatgtttataaatttaaatggtctcatcaaaaagtatattaagcaaaaagtaattaaaattaaaagattcaaagactgggagaagatattagcaatacaaatgataaatgtccagaataaaaatggcatcaacatattgataacaaaaatacagtagcttgatcacaagaagaacaagtgttagcaaagaaatgtagaggaggaaaaaacttggattccaaataaatatgagcaaatgtagtccacctcactagtaataaataaatatagttaaattcaattagattctatgta

SEQ ID NO: 44648 - DNA, 1849 bp, Bovine  19866880643675
  misc_feature (1)..(1): n is a, c, g, or t
ncacacactgactgtgtggttattccgttactcccttctctgagcctgtttcttcttctgtaaaatggagatgatagcagagcccatctcaggcttcttgtcagaatcaaatggaaaacaggcgagagcagtggtatctgtcatcgtgaggagtgtttctggagttggggctggtgttgttcatgtccaggcagacagtgagacaggtagagcgctccctcctgccaccagcctgctgaccccctccagatatgcaaaaattcatcaggtcctttgcggctctgggtctcaggttgggtagatagagaccacataattgagggtgctacgagagaccagaaaggccttgagagctgcctccatctggtagctgaggctgtgaggatcactcttagcagcagaatgtgcccaggccaagacccatggtgggcgagtgcacttcgtgggtgtgatggggtgcctggggccggggtggggcactgctctcttctctgtcctgaccttctctcctctcccctctcatctcctagggcccgggagacaccagcgggggctgccgctgccgggtgaatgggattccatgccaccccagctgtcagaattgccactaagctgaggatggtctggtccccctgctgacccagccccacatctacaagcttctgtgggacaggcctggtgctttggctctgatttctttgcgctcggccgagacaggggccctgaagtggccaaggcctctgagctgcgtggatggccttgtttactgtgggcattgcaagggccctgcctgagctggccgttgtccatggctgcatctgccccggtgcctttgtccttcccctggggctcaccaaccagacctttcatctctctgcggctcccatctgtctgacccagccttaaatagagccccagccagaggccttgctggatggagcctctgagagccctggatgagtccatacatccctcatccaccacgctcgtctgctgagcactcagcctgcggcctctcccattggctttctgggggtgacttttctctggctttgctgtttggaggcctgagggcctcttagaattgctgctaattccacttagagccaggagggagacctggcatcctgaagcccagccagttctgcttctgcactccctcttcgctgcctgtgtacactgattaaaatggttttccaggaaggcctgagtgtgatgtcatgagagagagcggaggggtcatgggctgggactctgcacagagacaggcaggggcccaagctctgggaattgcagtcacaagttgatgtgtcgcccctgtcagtgtagaacgagggtgcgaacagagcacagggatccttgctccggacttggcacccctgcacccacttgagggcagcatgctctgggtcaaccttgacctggacaggcagcttgcagtgtgttgagagtctgccagctggtgtttgcaggtgtgtgtgggcttcaggcggggagggaggggctggggcagcagctacaggctggcaggaaattcttgctctgaatttctagcctctcagtgggcatccactgtcagggaacagagatatttcaggaagaggtgaacgtgccgctgctgcagggtgatgctgtgagcacttttaacatctgagataagatggcatattattattggtccagtgctgtttactagacctattctgtgctggtcagatgaataaaatacggttctgggtgttcattctagaagtttttacctcctactcggacccctcctactcccccctgcccccaatgaaggccagcacactgtctgagccaggatgtggacatcattacaacaggt

SEQ ID NO: 44649 - DNA, 1417 bp, Bovine  19866880694383
  misc_feature (1)..(1): n is a, c, g, or t
ncagcttaataaagtttaatagctattagaaactataagtaacaggatatatatagctaacaattcaattattagtctagagaaaaaaggaaaggacagccgactccagtactcttgcctggaaaatcccatggaaagaggagcctggtgggctatagtccatggggtcacaagagtcagataaggcttgatgactaaaccaccacggagctgttaaaaggaccctggctccttatgttcattctgtcttggctctgttgtcccaggtaactgtcacctaagacacacccatgaccacaggaaggaggagggtggtacctgagaactcattactctagagtcaggctgcctggaattaaatcctggttccaacactcactagctgtttgacccttgacaagtttcttcaccactctatactgcagagacttcatctataaaatgagagataatagtacttaacccaagaaagttgaatgggttattttatttaaagcacttagaattaacagtgcctggcagtggcaagtggagaaggcaatggcaacccactccagtactcttgccgggaaaatcccatggacggaggtgcctggtaggctgcagtccatagggtctctaagagttgacacgactgagcagcttcactttcacttttcactttcaggcattggagaaggaaatggcaacccactctagtgttcttgcctggagaatcccagggatgggggagcctggtgggctgccatctctgggatcgcacagagttagacacaactgaagtgacttagcagcagcagcaggcataacaagccctcaaagttaggtatttctctccatagcttttccatgggatgaggaaagctttcctaggagcattctgaacagacttgcccacattcctcactggccagacctgggtgtgccttctcctgaccaatcaccagcaaaggaaatgcagttatgttaattatcatgtcaagtctccagcagtttccctgaggctcatgctacatattgggagttgggatggtgggggaaagatacctgcacaaaatcaaattctgagagggaggtgtagtggggaaaagtgcagaggaagagaactgcagaagctccctcaatagcttgctaactgcagacaggtgagggtggctatcctagattgcccagccatcagttgaccctccagctgactgaaaatgcagagttcagttaggttgacccagaccagaaaatttccccaactgacccacaggatcaggggctaaataaaaggattgttttaagccattgagttttagtgttttgttacacagcaaatgctgatatagacagggacaagtcagcctcctctctgtgcacccagcatgacccagaagagggcccagctgtatctagggtctcatggagctgc

SEQ ID NO: 44650 - DNA, 851 bp, Bovine  19866880977014
  misc_feature (1)..(1): n is a, c, g, or t
ntagaagctcccacaactttgctccaaatgccccccttccatggagacctgcctgctcacatgttcctgaagccctcagagctgtgtcttcatacttggtcctgagtggggatcatgggaagtagttctggggactgactcatgacatatccctggaatgtgagaaataagtcagatcaacacaggtcaggttatctctcacctgtaaccctggacttggctcacactaatgttctctgcagagaagttattctgtcttctgttcattggactcctcatcctttgagtataaatgatgccctatcttggttttaagaaaaattattctccttccttattgtctcaatagcctatttttcaaacccaaagagtagtgttccctcctctctctgtgatggaaagagtagtctttctatcattttgcatccttcccaaccctgttgctcatgataaatacactatttccagaagcctggagtcatccttgatttctctttcttttatatcacatattcagttctgtctttaaagtgattatgtccagtagcgtgatggtaaatctttaacaactgactgttaagaaagaaaaaataagcctgattggtagtacatgtcaaattcttgatgtaaaatgctttcaatgtggtcaatttcaagttcacaaccatttagcaacttaaataattcctgaaaatgtaaatgttgtctctcttgagccagtccaagcttctcacagctcaccactgaacataatctgcacactctcttccccatcaccactccctggtcccagacaccatcatcccttcctgcaccactgctagagtctctaacggctttcctgtttcagg

SEQ ID NO: 44651 - DNA, 1377 bp, Bovine  19866881929644
  misc_feature (1)..(1): n is a, c, g, or t
naaattgtacatataacttatttgtttttactgctgtaaattttttattgttgatatttgttttaaatattgttttaaatattgttaaaaataaacaatatttaattgagcttaacttgggtttcgatatatggaggctgaaacatgaaggcatctgacatatcacttgttgattgacaggtctgctttcttcatgtttttatttaactagagtccaaaatacagaattatttagagaaactaaccctgggcatagcctacctgtcatggacctgtatgtgattttctcttcaaatcatactataaacaaagttaatctaagtcacccaagactaatctatgatctttctctttactctggcaactttcatcagccagtaaatgtcaggcagacatgggcagacacacacacacccccctcatctcattttgagaaaattcgtactttgttacgctatggaattctgcatcaaggccaaggtgctatcttttctattttagatccacctatcatggtattacttaactatcaatacataagaaaaacaaatcaaacctttgattcattttgatttaatgaaataacctgaaacccactgtagcgtggagacaaaaccatgacattgtgtatttaaaatagtttaatccttcaatagctctggatgaaaggagaacaatagttaaatggggtgtggtgtgtgcacagtcacttcagtcgtgtccgactctgtgtgaccctatggactagagcctgccagcctcctctgtgtgcacagtcacttcagtcgtgtccgactctgtgtgaccctatggactagagcctgccagcctcctctgtttggaaagataacatcttaagtaggattcagagaatatctctgagtaatgaaacacattaaaggtcatttataagtaaggtattaaaagcaatttgtactgctacggattacaatgggagctacagtaaatgtgaatgggtgattttttttaactgatcatgactagaaagcaacgtttcattatccattccagcctactcaaagggaaagtctattgtttagccacaaaggaccttgaaaatgaggagactatgggctttttgtgcctagccaagattgcataaagcctcttggatattaaagagttgacacagctgaacagatcaacagacttagaaatctgttgaagtaggtaggtgataccattttcaggaaatagtaatgtcatctttggaaatcataaatgttaattctctcaatacagatttttctctaaagataggttcctctctgagttgtgagtaggatataaggagacggatgggggaaggatgtcccgccaagtgcattaccaataaatttcggaacaaagcaacat

SEQ ID NO: 44652 - DNA, 1179 bp, Bovine  19866880115602
  misc_feature (1)..(1): n is a, c, g, or t
ntgttgagtttaagccactttttactctcctctttactttatcaagaggcttttgagttcctcttcactttctgccataagggtggtgtcatctgcatatctgaggctattgatatttctcccagcaatcttgattccagcttgtgcttcttccagcccagcgtttctcatgatgtactttgcatagaagttaaataagcagggtgacaatacacagccttgacgtactccttttcctattggaaccagtctgttgttccatgtccagttctaactgttgcttcctgacctgcatacagatttctcaagaggcaggtcaggtggtctggtattcccatctctttcagaattttccacagtttattgtgatccacaccgtcaaaggctttggcatagtcaaaaaagcagaaatagatgtttttctggaactctcttgcttttttgatgatccagtggatgttggcgatttggtctctggttcctctgccttttctaaaaccagcttgaacatctggaagttcacagttcacgtataggagagcaaatggattaaaaaatcttggagggtcttccctggtgatcaaatggttgagaatctgccttctaatgcagagaacttgggtttgatccctggttgaggtattaagatcccacacgtcctggagcaactactgagcccccacacataattagagattccctgcatgctacaactaagaccagatgcagccaaataaataactttaaaaaaaagaaaaaggagtcttggagaatctttcatcctgattttaagatgagaaatcaaacatttgctggtggagactagattccatcctaggtttgcaaacttccggtgtaatgctcattcagaaacatcaaacttgccccctaaaaactgaaacagagcagggacctgtggcactcctgggcatagaagcctttctatgtcccccatttcttgtttgcagggtatagactcctgtccccatgactttccctgagttctaaagggcagagtccaacagctgctaatcagggaaaggaggagatgcagagaggagggagcagcagtcaggaaacaagagcgcagcttgggggccagggcctgactccatgtcaagggatgcacagagcaatgcctttgagctcttgacagaactaaaactcccaacaaacgga

SEQ ID NO: 44653 - DNA, 922 bp, Bovine  19866880344151
  misc_feature (1)..(1): n is a, c, g, or t
ngtagactttcttgtcgtttaagaaaccattgtttccttaactggacctgattttcctcctgattatgtgtctaatgactgttacatagaaattcttctccaaaactctgttgtaatattaggttttctgccttccttaatggcaagcaacgtgtcataggtaaatttccgtggtaagagtgtccttatcaattctgataaacagttcagactccaaattccactgccgcgtttcccctgccgtcctgttggccaattataagcctccccgtggagccacaggcttctctctccctggtctccttcatcctcaccaagtccatatttttctagtctctcataagccttgcacagctttcaatcttagatcacaggtgagccccccgagctgtagatgcacccaacagagaaccagcagatcctatcacatggccggtgtctaatttagtaacagtcaagtactgagaagctttgaacgaagaataagtatgtgcagacaatttcccactgtcttaggaggatgtgaaataactgagatctttcttaatcttagtgtcacaaacccttatctggaacagtgacagccccgaaaggtcaaagtcgaggtgaactgttacagcaggggaaagacactgttctcagggaagatgaaataatgaggaaaggcctgttcttcgtgctcttgagcaacactgggctgtgtcctctagttttcaggggcttttgcccgcctcaagaggattgtgttatttggtgttccctgaaagtaaaggcagtgagggatgcactgcaaaagtgtgcactcagtagaccctgctgagtatgctctgctactctgcatagactctgagctgctgtgaaactacaggcaaactcggggctgagccagggtcccagggctctgtgcatcccattctgtccc

SEQ ID NO: 44654 - DNA, 2319 bp, Bovine  19866880513237
  misc_feature (1)..(1): n is a, c, g, or t
ntcctcaggaatgtctttagtgtggttttagcttcctcataaactcacccattattcagcttatggcagtagtaaccagctggattctgaattatgaaatttatataacagaatagtttccaaaggcatactcaagtataaagtggatttaaaaaattctaaccagttttactggcttccctggtagctcagctgctaaagaatctgcctgcaatgcaggagacgccgattcaattcctaggttgggaagataccttggagaagggataggttacccatttcagtattcttgggcttccctggtggatgagatggtaaagaatctgcctgtaatatgggagacctgggttcagtccctaggttgggaagatcccctggaggagggcatggcaacacaccccagtattctcaactagagaaccccatggacagaggagcctggcgggctacagtccatggggtgactaagagtcagacaatgactgagcgactaactacatccagttttacacttcagaatgcttttgagatgggaacaggggtagatttgcttcattaagtttatttttgttgagattatattaacactcatatatttttaagattaataaataccagctggctgaaggagtttagatgtggcagttaaggatctaatttgggaatttataaataactactttaaacaagtcacaatgtatgtcagttacctacagaatttagagttgactttgttttttcccctcagaagaatcttgtctaatacattcgtgtggaagaaaatggttcgtcctaaagtcaattccatttcaactctagaaaaatttcccattctaattgcattttaatatttacatagagcttactcactcaaatttttcagtagattatttttctacaacaaaatcaagcatcatttcttatagtcactgatgtaaatctaccccagtttattcattactgtaggatctccttgctctaattggagttgcctcctaggatcatctgacatgtagctcatccttacttttttgcttttgataatggtgcctcattcacttaggatgatctcttatcttcatccatccattgatgtttatcacttctttcaagatacagatgatgtctgacttttgccaagaaatttttccctactgatttctgtatcttgttcagtcactcagtcacgtctgactctttgtggaccacctggctcctctgtccatggaattttccagacaaaaatactggagcaggttgccatttcctagttcaggggatcttcttgatagaggatcaaaccctcatctcttgtgtctcctgcactggcaggtggattctttaccatgaacaccacctgggtattttgtgacaaatcagaaactatgtactagcttcaggggtaaagaaggaggatgtaaaattgaattgaaagacagaagctttcacttctgctctaaaaaatatgttccggaatattatctgagctatattctaaacttcagtttctgtaaaatttaatttaaggggaagattgtgttcttgagcctggaaacactttactgattgataaaaatcctttttttatgggtaacttacacaattaatcctttattgtttaaaaacatcaataagtcatttcatgaaaattaagaaacagtaatactgaattcataatactcaagtgtttttcaatttatatctatataatctcttccaagaaaaataaaaaatatttcttttcttaagctatgctcccatctataatttctctgcaagctgcatttaatatacctcaccaggatttcactaaaagggcaaggaaacctaatcttgatttaaagaagagttttcattatgtggttttaacagtccattgattattaccgcttcatagatactattatgataatttatcttttaaaattacaaccctttgttcaggaaaattttcaataaaaatcataatctaacagagatcatcacatgatagattatttttgctcttttattcaatgaagaaaaaagaaataatgcactcttctttaaagtctattgtcacattatgcactcattgagagagatattgaaaaaaataacaggaaaaaggaattaaatgtacatttacctgtattagacatatctgaagggcctgttgtctgaagaagtaattggaatctggttctgttttcttgtatccagtttttatctaaagaaaatgaggaatatgaaatgtcattttctaaagtaggtcaaagaccagactaggagtttcatgttaacataaaaagaatgattaatgagattaaagcaatagtc

SEQ ID NO: 44655 - DNA, 2173 bp, Bovine  19866880597802
  misc_feature (1)..(1): n is a, c, g, or t
ncagagcggcttgagtgtatcttagtagggaagaaggctgctcaagagaaagatgaaagccaaggactgtactttatcaaatgaatgaccattcattttagatgcgattgcagtctgcttaaacaagctatagatgagcagaagatgctgctgtttgccttggaacctataacctgattgcttggtgagatgcagacggctgatttccgaggttaatccaggtcgatttaagtgtagttcatgtgtacagataaggattctgtttgtgcagagctgctttgttgtctggaaaatcaggagacttagggggcatttgcagggatggttttagctgtcatcagagtaacatccaaaccttttcgtttttttcctctgttgacagaacaacacggatggacttcacgaacttgcctgcgggggcttaatttattgcctgggagttgtgttcttcaagagcgatggcatcattccatttgcgcatgccatctggcacctgtttgtggccacggcagctgcagtgcattactatgccatttggaaatatctttaccgaagtcctacagattttatgcgacatttatgaccaatctgtactaggtctccaaaccagtattatttcagttatggcacttaagagtgggataagagctgaaaattgcacagaggaagaaaagaagacaactgcactgactttcttgatatcttttgaatataattactgtgaaagttatgaaagctgtgttctgggattttccccctcacagcaagtaaataaggtagtgagttaattattcattccattccactatcatgaaggactctggagagacttggccaactgatgtttacaaaccaggattttgtattttaattttacagattttactacatgatttttctaaattactaggtcagattgtaaaagtcagtgcaataacaaaacttcctttttaagagaaaatgatttctatcactttcccattagctgttaaaagaatcatgactagaaattacactactttttaccatgtttcatcttggcatacgtagttattttttaaatagaaacttcagttttttgtaaattttttaaaaaatacttcattgaagcacatctgtgcggttcttcattcatgtgaatttttgcagcagtctgtcaacattccacaaatgaacaaacattatacctcttctctgatagttttattaagcatggagagattgccaatttttaaaagctgcaacttttccaaaactttcctgccaacctctgactctgaattccatgctgctttgggccacatatttgacctagtttggtttcccagcgatagaaaagcattttgatatcactaactttttcaaaaggttgaactttttctctatgcctttgccgtgacttcttcggggtcttttcccacagaggagtatccagtctgtattaagacaggattgctggcttggccgtccaccgaacactcctgaagagcgctgtgaattacagtgaatagtggtcatacctgtctggtgcccagtggttaagttattgtcacttagctttatattatcggtttgatagtcattttaagttgtggaactcaatgcataaattcacatttctccctttcttttgcatctcctgatacactttttatcttagaaaagtatctaaagcactgtttgacaaactcacgtgtctattgtccatcagttacagcctggctcagtggagtgatatttaatatattgtttttggcttttcttcaatgtcttatattaagattaacatattagttgctttttggttaatctcctgttggtgttttaataaataaccttgcatttagatcgggtgctgatattgcctgttttctagtgattgggtaagatcactggaattgttagtttgacagtatattgaattcagttcattgaaattttgtactgatgtagccttaaaggagggtttattttgtgtgtgtgtgtatgcttagaactctgactttgataagttatatgggaatgaggagcagaagaactgccttttgctgatgaattctgaaacaggcaaaagtgaaagttatagttgctcagtcatgtccgactctctgcaaccccaaataggcgaggtacccagtgaaaacgccaaccagaccatcccttctgcatggct

SEQ ID NO: 44656 - DNA, 912 bp, Bovine  19866880691573
  misc_feature (1)..(1): n is a, c, g, or t
nctgagaaaataaaggtgtgcgagggtccaagcgggctgtggttgacacaggaaggcttcctgggagaggtaattcttgagcccaaacccaggacaccgatagcggacctgccaccaagggcccgcgcgggacacggccgcgggcagccgccagggcgagacaaagcctgctgggggctggaaatttcagggacacaagccatgtgatgatggagtgcacgcggaggagcgcgaggcgttttcctgaaagtaagttaaacaaatactggaggaaagcgaagtgggaggaacagttattaacaaaatcgcgaacttacccggccaccgggcctccgtagcccgaccgcaaaagcggctacctgagagccgtagcctaggcagcggcgggctcaacccagagctcgcgagaccgaggaggcctcgcgagatccgcccccttgcccctgaccggcggacgcgctttccgggcgtcatgggagggctctggcgtccggcttggagacgcgtcgttttctgcgggtggtcttggagccaccttgggcgcccaacccgggctgctgagagggcagagccgtgtctccggccggggaggagcgggccggcgggtactgagcaggggctgaggcggcttgggacatggaggcgcccgagcccggcggagcagccggctcggcggccgaagagcacgaacccctacacgcgctcgcaggaggaggactggcggcggcggaacaagacggtcctcacctacatggccgcggcggcggtgggcatgctgggcgcgtcctacgccgccgtgcccctttaccggctctactgccaggtagggctggcgcggcccgccgggcggcccttctggaggggcggagggccggggaggctccctagacctcgaggctccgcgggccccgg

SEQ ID NO: 44657 - DNA, 1397 bp, Bovine  19866880708820
  misc_feature (1)..(1): n is a, c, g, or t
naaaattgaatttgccggataatttttttaaaaatcttaaatacgtttaatacagctaaacacataggaatgtgaaagacaaaccattgacacttgacccctacaaatgttaaaaggaaacaggccaaaatactaagtatctagatcattatgactggagaaggcaatggcaccccactccagtactcttgcctggaaaatcccatggatggaggagcctggtaggctgcagtccatggggtcgctaagagttggacacaattgagcgacttcattttcacttttcattttcctgcattggagaaggaaatggcaacccactccagtattcttgcctggagaatcccagggacggggtagcctgttgggctgccgtctatggggtcgcacagagtcggacacaactgaagcgacttagcagcagatcattatgagaaagttaacaagtatattttttaaggctttcataatggcatgtatgagttaaagcccatgttaatgtttccatagctagttttcaccttgaactcaaagattatgtgatctaatcaaatgataaggctcatcatgcagagacatgtaatatataacccttcaagaatcattgttcttctgaataaaacattcggaggcagttaatggaaaggtagtaagtccattgactttgttattattaccataattaaggcaaaatatagctagctaaaaaggtcttgccaagttaatgaagatttcttaattacccgagtctttgtagcaagccaactttatgttaaactaaatttccccttgtcacactaaacacttaatcagagagaagctcaaagtgggaccctggaattggataagtggaagaaaatacagaaatcacagaatcagactaaacccttcatttcacaagcatgaagcatagcatcctaccttgtagaatggaatacagaatttaagctcttataatgatgatagatggtttcaggctagaatatgaagtgcaaaatatctgtatatgacataggcagagggaaattaccttaataatcttaaaatatatgaatctagctcctttgagaatgcatgtggattttgttggagggtttataattagttctggctttgtagattgactgagaaataccctgaaaatagacacatctaaaagtctcactcaaatatctcaggaagtagagggtgagcattaagacaggttaatactttccttcttaaacagacagagaaataacatttaagaatctatcatgtgcaaagtgctgcattacacacttcatatttgatacatttattttctattacaattctgtgtgtctctgttagtatattttccaggtaatgaaattgaacctgggctgaaaatcaacagcagttcagtagtggaggca

SEQ ID NO: 44658 - DNA, 779 bp, Bovine  19866880723739
  misc_feature (1)..(1): n is a, c, g, or t
ncttgaatgtagagagctctttactcagaattggtttttgaccttttcaagaaggtgtggacccttggctgctctgacatgcaaccaagttgttgctgaagttgtgatctaagctcaggttggaggctggcccacgtgcacttgctgcaggtacgagggcactgcagcagtcttaggggagtgagtcatgagccaggaccagagacggttgtgcagagcgttgtggcctgtggcgtcaggtttcctttacatttatttctttacatgcatctcttgtgggacccagagtgtgtcaggtctaacgtgtatctaggctgcctaacggaccaagccccactgaccttctgcttgacatggaatccacatagaccctgatgatttcaccaaatgatactgactcgccaaaatattagagtaaaaagagtctgtgtacctctagccagtctctgtattcattacggtttcagattacaatgcattaaggagtattctccagccaggcttccctccagttactcccaaaattgcaactgttattcagcagagatagaacaagacagacctttgttcttctcttctatgtggttctagttgtcctatactgacaagcctttgggatttgcctgtacctgctagtgctgttaaagacttcccccatttttacattccgtttaccatttccatgggaaggaaggtagaagcctgtgcttatgctgtcgatttaccaggaagtcaacaacttctctttttataaaagacctcctatggacacccagcca

SEQ ID NO: 44659 - DNA, 3798 bp, Bovine  19866880735702
  misc_feature (1)..(1): n is a, c, g, or t
naccaacatgaactcaatctgcatttgtcaaactataagtatggtcataggtgcttcacccacaaggctcccaacaccctaaaaggctggcatctctacctgcaacaggtgatggaactggctggccctaaatcccgtagctgataaaggcaagcaagcccttaaacgcagagcttctgaccagccccactgttctttctgcccgctgaaccatcttcagtgacacggccgcaggaggcgggcagatatgagaaggaacgctgtgaaagtacagtatttgtctttggctcgtgaggactggggagtaggtttttgttttagatttttgttttttaagacttaaattggtcagtgtggtcagttgcagttcctccctttgctgtctcagaacactcaggggtatctccctgatgacctcatttcccgcttttgttgctgtgcattctcatgcaggagagctagtaatcgtaactaattagcttgagaattgccttgagataaaaacaaaagtgcttacattacagaattcagtggcttggatgtaggcagaacttgtctcttaaggaaatccctgaactttggcttccagccattgcacctctgacatcatcaagactgtgatctcaagactattgcttttcacttgagcagatctgtggatgcttcctctactaccttgaagaactacctatgtgaaagtcctcactttctttccacataccaaggatgcaaagatgccttaaaaacgtatcacggatctatcaccacacattgtccaactgatggtagctcagaaatgaagaaaatacaaagtgatgagtcaagctataggttccaagatggtgaactccaagaggaatgaaatacagcatctggaactgcctttcttcacccttctagaatgagggatttttgcaacttcctttgtgtcacatttctcacagaaccctgcctgatacaacctcaagcttccatacctcacacctaaaactctccacacactggccctaacttcactccaactagactccaaccacccatctacatgaaacatccgttcgaccccaatactgcaaggtatgtttggcactttttttttttaatcttcctgtctccttgctctcaggagcttgccacaagtaatcccatcacagtctaatgtagatgcaaagggacccatcctccagtccaaagggtctaaattgcctgtgtaggtactgactttatcagaaacacctgaagtacttaagagatccctgagccctgatcccagatgattctgagacacagccaagtttgagaacctaaaagcccaaactcattcactcaatataggactcccttctgtaccatcctaaggcatggaagtcagcacctgcctgaacattctggtatgatcttgaattgcattttttaacagtgctatttgttaaaattttctgccatatgtttaagacagtatcatcttcttctctgcaaatcctactatttgacctaattctgtcatgagaatcacccaaaagaaatccaataactcttcctaatagcagttgttcaaatgtctaaaaatagatctcacctccctttcacttccctcttcctttccccatcaagtcttcaattttctggctaaacaattctaattccttcaaatatagatcatagtttatcatcatcctcatcattcttgccatagctcaatgagacaggtaccgttaattatttccattgcctgcatgaagaaactgagcttatgagagattcagtaactttcccaaagtcgcacagtgggtgtcagagcttggacctgagcaggtctgtctgattgcaaagtggatggccttaactgataggcagccaccaacttgttcattattctttggacagtctccaactttaatgtctctcattaaatgtgatatccagaatgggatgcaatgtttgtgaacgtgtctgcctagcacagaatacagagttctcttactgcccactgcaaacttctgttaatacaggccaagatgatcttagtatttcctggcagttctatcacacgattcactgatatcaaaatccacatggactattgtaaaatcaggcattattttactgcattaattgcctaaaatgggattcctctcctcatctactgcatctagggagggctcggagtggggccctcattccgtttctcagtgcccccgtcccctgggctggagggctgcacctcctttggtacccaaataaggagcaaattttctctggaaaaaataaaaaattgcctgttataagtaaatcaaggaactatggaccagaaatgcaggtgtggatacagtgttagataaggcacaccctgctgtcaaaggagcaaagaaaagaaaggggatggaagtagaagagatgatagaattggtgcccggccacatcgctggtgttataaaactatcaagcacagagatccttcagttcagttcagttcagtcactcagtctgactctttgcaaccccatgaatcgcagcacgccaggcctccctgtccatcaccagctcccggagttcactcaaactcacgtccatcgagtcggtgatgccatccagccatctgatcctctgtgggccccgtctcctcctgcccccaatccctcccagggactcaattcttctccaacgttgtgactaatgttactttgtgactctttaacctttggaggctgagcagaaaagtgtatcagatgcttaaagctaccaccccaatacgtcttatcctgtacctgcaaatctgatttattttaaaccttagttaaggattttctatctgtacttaaattgtaccttatatatttatcttgtgagttttggtccatcttcctaaattttaaaagtgattacttttttgttgagcctgatacttgaagaatcagattctaccatgtcaatactcccaactctgaactctccacaaatggaatgaacatgccctagaagtcattgattaaagtgttaaacagaaattgaccccagacatgaagcattgtgacagagatacaagctcaggctgggagtgggctggcctggcttgttcctccctgtctgcccggaacacagcacaggcctccacatagagtggatgctctcaagctttgcattgggttggctaaaatattcattcaggtttttctataatattttataattatttatttatttataataatttatttattataaatttctatattatttatttatttataataatttggttattttatatattttataatgttataataaattataatattttttatgaaaaactctaaagaactttttggccaactcagtagaaatcaaccaattaagatcctcctccagtttcaaactatagaatattagaatatctttaactggaaaggaccttaaaagtcatttaattcaacattctcccttcatacagtaagaaaatgaaacccaaagaacaattatttacctcaaatcatctccttaaaggaaaaaaacagataaacaaaaacagctcaatagctcaggcttcttattttctaaggcagaacacctcccaacacgccaaccagcagacttaccaatcgacactcccctgttatgtgtgttgaccccataactgcactactgtcaagcctgaggggatccttggaagcccccattaaggcagaagagagatcctttccttttgacttagagatcaaatgctcctgggtgaattcaaataaaaccccagttctttgggtactaaatttgtcatcataaggggaagacttttaa

SEQ ID NO: 44660 - DNA, 1805 bp, Bovine  19866880738073
  misc_feature (1)..(1): n is a, c, g, or t
natatatgaaaaaatagtcattttcactatttgtcaactcagttacatgtcttatttatgttgaatggaggacctgttaatattaaatagggttttactctcagacaacttgtgttctactttcatcagtcaagatcttttttgtcattagaaagtttgggagtaaaatattattttcatgacagtttaacagagcagtaggaaatgctaaatagcctgtggagtaattacagacaacagatattattaaggataaaaggaagggaggacttccctggtggctcagaggtaaagaatctgcctgccaatgcagcagatacgggtttgatgcctgctctaggaagttttcacttgctgtggagcaatgaagcctgtgtgccgcaactactgagcctgtggtctggagcccgggagccacgactactgagcccacataccacagcttctgaagcctgcgcaccctagagcctgtgtgccgcaccaagaggagaacccgtgcaccacaaatggggagtagcccgctcttgctgcaactagagaagaacccgctccacagctaagaccattttaagcttaagtggtctggaaagatgagaaaagataaaatctaaagtagattttgaagaatagatggcagctggatgaaggagaaaaagaggaaaaatatattcacctagtggaaggaataatgtgctcaaaagtattttggaggtgagagagtttagtctgggaaattggtaagtgaacgcacttggatatgttaatccataagagagtcagtgtgctaaaactggaaagactgatttggaacaaatagtggagaaccttcaagtgtagagactgagaatatatttatcgtgtaccatgttcttagcaacattttatctaggtttgtttcctaggcaatatttcaggaaaattgatccttcagaagtatgcagagtacattatagtgaagaacagagtatgcagtgtgcacctatgtgtgaggtgttaaagacatgaataatagcttgatggtaagaatggatattaaggagtggtgcaaacatcaccagtgaagaattcacagtgcctgataactggttaggtatggaggcggaagagagggatggatgtacacccagagaaggcaaaaggaaaggaaggggaagaacacacatcagagacatacataaagttctgtgaattcattttctcctccaacaatgtcatggttaagggatgagttgtagattccttttttgaaccactagcaaattatttgagatcatcccttgagaggaacattaagcatattttaataaaatcaatacttaaggaaactaaatgtagcttgcttttaaacatttttccttcaacatccctcttcctgcagtaacccttaatctttttcacaggctgtaatgggaccaagaccaagaagggttttccaatgagtggatgtaggaagctgataagagaagtattcttttgggcttggtagcataagttacaatacactaaaacatatatctcttggaggcctcctttttctcctgtcagcagttgacattgtgaaagatttactgattagcttaaaaattacagaactttctcagtttagtgatgtggatgtgctgcctaattacaaatgagcaactgcagttagtgctttttccttctactttggggagccgttaaaactcacaactagagaaggggaaggttttacataactgttgctaacgttaaaaaagacgtgcacgttttacttccaaagaactgcttgagtgcctcagtcatttcatccagtctagccctct

SEQ ID NO: 44661 - DNA, 1386 bp, Bovine  19866880751754
  misc_feature (1)..(1): n is a, c, g, or t
ntgcaggtgggctagaatcatttaaaagctcagccatatggggaggccatttgtgtagcgccagtcatatgccagaatgcatgaactaggcacttctggggtatcatttcatcctggggctgcagcccgagggaggtcctggaccccttctgcaggtgggcatggaggctccaaggtcacgagggatttactgaagctcatcttcactggcaatctgtcccaggctggctgatccatgccaactcagtatgcagcttgcagatgagatcagaaaacactcatgttttaaaagaaccaaatcttcttgatggatagcatttcctgaccttttcggtggctgacattgtttgggtgtcgtaaatttgatctggcacggaatagcagcggtagatgcaacctctcccaggtggggctgacagcacgtttcccaaggccctcctgaagcctggccagttgtttggccttggcttccgagtgcaggcaaagtctgagcgacagtgaattgtgtagaagaacgagagagctgttgtgttggacaggctcctgatggcaatagttttgactcgctttgcaagcggctagactgcacagtggcactgcttcttggaaaaatcaccccgctgatacatcacagggaagcatgtagggggaagaggcgcagaatgtaagaggttggcactgtctgttccaactagcaaaagcagcagaaagactcgaatgcagtaattctaaccttgttaaactaaaaacatttctcaggtcctcttgggaaactttattttgcttcccaaggaagggagtgaatcggcttcttcgaggtcagtttcatttggaaattttcctttttcactttccatctaattggcacacaagaagagtagacataacctgaaaatgtcaagcaaaaatctggaggtttggaatgagtctcatttttaaaaggtcttcctttgggcttcgctagtagctcagtgggtaaagaatctgcctgcagtgcaggagaccccggttcgatatctgggttgggaagatcccctggagaagggaacggctgcccactctagtattctggcctggagaattccctggactgtatagtctgtggggtctaaaagagtcagacaggacacagcgaactttcactttcactttgggtaaacccattaagaaaactttgacccagggattgcactcttgagaatgaaaactctaagactccaggatccctgggtttaatctggctctgacacttatcttgagcaaggaaattcatttatctgtgcttgttttctaatctgtaaaatggagataaaactgtctacgcataaggttttttgtaaagagtgagatagtcccatgtaactagcacagtaccagtcccccaga

SEQ ID NO: 44662 - DNA, 915 bp, Bovine  19866880763052
  misc_feature (1)..(1): n is a, c, g, or t
ntttttgaccggcaaaccctttaagaagaaagggaatgctggttgtccctgcagtgtgggattttagggaaggatgaaggcactaccctgaagagaaaaaggtaaagaagtcagttggataccttttctctttaagttgaagagttactatagttcatcccaattctgtctaaacattctcaccttcaaagctccctagataataaataaatcgcatgatgtgaagtacaaaactaaccttgtcattcttttctaagaatgctaatggattccttaccattcagctatgaggaaaagtgttcaaattgtacaaaatgcattctctatttagtatttcaaccaagaatttcaactgtccattgcctagttttttataatatgaacattcaagtcttaaggttggatactccttcatctagaagtgtgggggaaaatggaagcagtgacagatatcattttcttgggatccaaaatcactgtggacagtgactgcagccatgaaattaaaagacacttgctccttggagggaaagctatgacaaacctagatagcgtgtaaaagcaaagacatcattttgacgaaaggtccatatagtcaaagctatggtttctccagtagtcatgtacagatgtgagaattggatcaaaaagatggctgagtgctgaagaattgatgcttttgaattgtgatgctggagaagactcttgagagtctcttggcccataaggagataaaatcagtcagtcctaaaggaaatcaaccctgattattcattggaaggactgatgctgaagctccaatactttggccctctgatatgaagagctgactcactggaaaagaccctgatgctggaaaagtttgaaggcaaaaggagaagggattgagcggttagacagcatcaccaactcaat

SEQ ID NO: 44663 - DNA, 944 bp, Bovine  19866880766454
  misc_feature (1)..(1): n is a, c, g, or t
nagaagcaacatttaaacacttttgaagtacttgtttttgttataaatatttaacatttttagttaaaggtattacaaacaatcattaaaatacatcattaaagatcattatgtcaaatcaaagtgtaaatgaaagtgggaaaataaattttcttaattagaaaatctctttgaaagatttcactagttcctccttttttcattcaaatttgagagtttttaattccttaagtttgttatccatcttcttttctgttattaattaaaacagatacataattttagaaaggtttgctgaagctccagtcctaaaaccccagattccaacatagtatttggcacgtctccaacctaagcacttttgttatcaggatccccaaatataacagcttttctttttgttcagtaatttagtatagttaaatgaaggggaaagaaatgcttgggggcctaaagctggatatgttggtataaagctaaggggagatttgcagaattgacatctgatttactgggtatggttgtctatatcagtcaaaccaaatcaatatatagaaataaaaattgactgtttataattgcaggtgtttttatactgaattatcagaaattatcatcatccctgatcaaatgagagacaattctcatatttcttagcttcttttgatactgatgatcctttactaagttctgttcgattgaaaaatgcaaataaggaatatgtgttcaggccttactttttacatgacacctgtttacctgctgttttagaaagtatgactctataaggcattttcagaatagactctgattcattttaatagatagatatagatgcacttaaaaagaagctaggaaaaacaataggataaattgtcttagaaacactttttgccctcccatctcacagaagatttacctaaagtgagggtttagcactcaaa

SEQ ID NO: 44664 - DNA, 1494 bp, Bovine  19866880778159
  misc_feature (1)..(1): n is a, c, g, or t
ntatacagattcttaggtatagcacaagtctgttgcatcttaagttctatggaactatggaatttctatggtagatgtgtgaaacatcatctagtcatataaaagacactgatgtttcttctcacatattacctatggtgccttaatgttctttgtgtataatgtgatatttgtactagattacaagactgcttagggctcaggacaaatctttgtctctgtatgccttccatttctcaacacagttatttgcacatactagatgcttaatagggcttccctgatagctcagtggtaaagaaatgcctgcaacacaggagaccctggttcgattcctgggttgggaagatctgctggagaagcaataacctacccactccagtattcttgggcttcccttgtggatcatctggtaaagaatctgcctgcaatgtgggagacctgggttcaatccctgggttgggaagatttcctggagaagggaaaggcttaataagtatagatagaataagtatagattaaatagcatagatgcttaaggagtatagattgaataagtaaataatatagttcccagaaatgacagtaattattaaaaaaaattatcagaaacattctagccaaacctaatccgttcttgactttaccatctttttctaaaaatgtctttttatcatatgctgatctctctttttggctgacaaaacctgtatttccaggtttagtcacaggttacaattaatcttgtgtcaatatcttttatttctgggaaaccctatgcctgaatcaatacaggtacactatgtttgatggaggaaggagaatattattcagtctaaaagaactgtgagcctagagtatggtatgaaaatcatgactataaaattatcttccccatatgtgtgaagacagaagatatcgaaaaggcctgtgtagttcttacaattgctcatgggtgatttattctacttcaaaatcccttctaagtttttctgaagaaagataaggccaaattacctgctggtgcctaatcttttagtatgattacttaagagaacactttggggcagttttgtgctttgatgatattatggctcattcaccatttaacaatggtgagatgattgtcatttacaggacccatcctccctacacaatggtttctgattaggataaggctgaaattgttgctgattagagtaacacactgtggttggctgtttgtgctccatatctccttctaaaaaggtggcacctgtaaaaatcaataatgcatgagttgagaagctgagatggcatttctgttaagtccagaaggaatgacagaatccaactttctcagcctccaagtttctcattttattcatatcagagggtttatatggagcacccgtgctgggcttttcactctgccagctgttgtggattagacaagagaaatgtaagtcattattcctgccctcaagtagtttagattttattgggtagacaaga

SEQ ID NO: 44665 - DNA, 792 bp, Bovine  19866880824703
  misc_feature (1)..(1): n is a, c, g, or t
ncttctgacggggtgaggactccccacccaccgcctctgaggtccgattaatatctgaagccgaaaccagggctggttgatttcctttgagatgggactgcctttcctaaacgtgcgtcttcccacctcgatcctactgcttgccctctccctaacttttctgctcacagctgaaggccggagcagggccctttgatgggcctctccgacagcacagggccccctcccggtctccggcgcaccccctcctcccgggcaggcggcagaacgcgggtcccccttcctgcaggtgccctgccgcctgctgcctccctggaactacagaggcaggcagacgcgcacagaggcctcatgaaacggtaccttaaaagaccaaagggcctttctttcttttgacagaagatgaatctcagaaatagaagagtgattttagaaggcgatggggggtgggtgagcagaaagggggagctggggtctgcgcgtctgcgccctgggcccttcccctcctcggccctccccctgctccgacccgtggtctctcctcccctccgtcgctgaccctctgccctccccactccctcgtctctgccgcgtttctcccttcccacccgcttctctcctcctctctggtgtgctgggtcgagaggggacgtgaatgagcagaggggatggctacagggaatcggggccagagactcaaggcccccagcagacggatggcacggggaacgcccggactccccgacccacctctgcgaccccatagaccccgcagctggtgctctggagcca

SEQ ID NO: 44666 - DNA, 1485 bp, Bovine  19866880934202
  misc_feature (1)..(1): n is a, c, g, or t
natttcagattgaagtaaatgtcttgatggagacaaatagggcgaggtgatagggagcagtgaggtggacgcacttggggtaggtggtcagggaaggcctctctgaagagatgatatatgagatgggccatgaatgatgggaaggaagcagatataaacaaactaaggttcaaatccctaaggtcatacaggctcaagatagtccaagtatttagagaccagtgtggctggagtctcctgactgagtcaaagggataggaggaacagaaacctggtgggcctggtggggagactcaagagttttcagctggagttggcattatctaagttttaaaaacgccactccgggaattcccagtggtccagtggttaggactcagtgctttcactgccatggcccaggttcaatccctggtcaggaactaagatctcacatgtcacaagccacagtcaaaaaaaaaacaaaaaccactctgatatttttatatcaaactgggtgaaaacttgggtaatgatggaaaacaaatgaagcaaagacactgttaggtgttaatagtgtaatttgaggtgactaatggcagggaaataggctaggatgtgtaagaaaaataagtcacattgatttttgaatcagaaatatcataattctttattctaaaactgatggatgctgggaaaaaaaaaaaacaacagagactgaactagtttccctccactcagaaacttctggagataacatatgtttggaagaagaaaggaagcaaaaagtggagggaaattacatcaatgtcatttgcaacatagaaaaagaagagcaatagtttaggaatcaacaccttttctatgttttatgattccacctactcttctcaagaagagatcaaaggttacaatgcaaatgcttaaaggcaaactcacataaaaagaatttgacaataaaacttgatttatgagagatgaaagaaaatcttaaaagaggaaatctaccatttgggacaagaagaaaaacagataaatctagtcttattgggacccactctcaacttgaataattggatactaagaacttccgtgtagttctgctttcttatcagatcaaagtaaagtctttcatgaacagcacctcaactgtataaacaaaattgccccagaattttctttcagtgaaggattctttgttttacacattcccttttcaatcaagttgggcaaagaacacaaaattcttactgcggcttgaattccacaagtgtgaacagtgatgatgtgaaggggatagattcagaacacatacaagtgatgagatggtagtaatgagattttgctactggattagatataaagggtaaagaaatgggaagaatcaaggtaaatgcctcaactttgggcctgagcagtaatggtagatctttatgaaagtaagagccttagaaatgtactgctaaactccttagaaaataagggaatcttaacagttgaacttta

SEQ ID NO: 44667 - DNA, 1303 bp, Bovine  19866880964347
  misc_feature (1)..(1): n is a, c, g, or t
natgaggatgtgatgtgaatgtgtgttaagaatatgataatgcttatgaatgtgtctacagctaagcaataattatatttctgatcatttttcctttttatatagactttatgagctatgtgacttgaatagacctggtgtaagtagaaaccaaagacagatcatttatctgggagagaggaagatggaggtcttaaaaatccaaatacatttacatcagagcttactctgaacctaaaccccattcctatcactggatgaaaggatcaccaacaagcatctacgagaagcaggctgaccatcactgccctagatctaagaaagataaaacaagtccatggtcaagttacaggtcccagctggaagtagaaagcttaatgtggaagagtgaaggctgagttatgaagtggttctgaaaataaatctatacaaggaattaaattcagaatctctctcttctcaaacattgatgagatctgtagcccctattcagacaaagctgctgcctcaaggcagttctatgtaggcagcgtgattcgatacaagactgactgtaaatttagctctataaccttggtcataccacttactctctgagcattatttttgtcagtagaggtaataccacttatcattacatgttgttgaaagtaggaatttaataaatattactttccttctctccaggtaattggagagacagtatttggccactagagaaaaagaactgagagggaaacttcctaaactggggagtaattgcccaaatttccaactggggaacatgcactgttgaaataagctgactgtaaaaaggatcataaaaagtgggaatcctctttttatgccaaaaattggcatctatatcaaatcactcactttaattccatagatattttgttgcatacctactatgtgacagatattgttctgagccctccggatatggggaggataggagagacaatccttgctgtcagaggtcacatagtgaaagtgaaaaagtgaaagtgaagtcactcagtcatgtctgactctttgagaccccatggactgtagcctactaggcttttccatccatgggattttccaggcaagagtactggagtgggttgccatttccttctccaggggatcttcccaccccagggatcgaacctaggtctcccacattgtaggcagatgctttaccatctgagccaccagggaagacataagctatcaggaaagatacttgttcaagaggtacacacatatgagggactttcctggcagtctactggttaagactgctcttccagtt

SEQ ID NO: 44668 - DNA, 2324 bp, Bovine  19866880977992
  misc_feature (1)..(1): n is a, c, g, or t
ngctggtgatggacagggaaggcttggcgtgctgcagtcctggggtcgcaaagagttggacatgactgaggggctgaactgaactgaaccatcaataaaatgagtgtaattattctcatcatcaattccacaactagatttaaagcatcttagaaagaaatagggcttccaggtggcgctagtggtaaataacccatctgccaatgcaggttagacgtgagactcaggctcgaaccctgggttaggaagatcccctggaggagggcacagcaacccactccagtattcttgcctagagaatcccgtggacagaggagcctggtgggctgtggtccgtagggtctcaaagagtcaggcacgactgaagtgacgagaaataactatgtcttacacttttcccccatattttatagcattgaacatattttctttctattcttacttccaagaacacagtttgacttagtctaagtatccccttatcttattcctgatgctatgttatccttgtcctaaaccatcttgggtcttatctctaggcaggtcattttgaagcttaatatgtccgagtaccttggagcagttagtgaacaggtattgattgattaattataaggatgattgccattgtcaattatactgaatattttcttatgtcaatactttctatgtcagtcttaagggaaatcaatcctgaatactcattggaaagactgatgctgaagctgaagttccagtattttggtcatctgatgcgaacagccaactcattggaaaagtctctgatgctggaaagattgagggcagaaggagaagagggcatcagaggatgagatggctggatggcaatgccgaggcaatggacacaaacttggtgagggacagggaggcctggcatgctgcagcccatggggtcgcaaagagtcagacatgactgggtgactgaacaaccacaacgacaacattatactgaaaggcagcagagtgagttagcctttgtttagaacacaggacacaatggagatgtgagccattactcgtcactgtaattcaagaatatggattgatggtcaagcaagagagagagggtcctatatagtcagaatcagagactgagatagacccagcaagagactagaaaagacccagacaagggtgagaagtgagacagatgtactttaacagaagtcttcccatgacccacgaacatcaaagggaaaaagctgacacaggtgaaagttgttgagggactgctacttggtattttgagaaagtaagaaggatcacccactgtcataaccatttgaaataatttcttctgggagacacagctatgactatggtttcttgtgaagactgcctttctccagcagcagcagcatgaagtcagctggaaatacagactctcaagccttgccccacattatgactccaactctgcatttgtgactcccaggtggctcgtgtgcacattatagttgagaactgcctgaggacatccaaagatcgggaaagggaaaatcagaagccttgagcgctgatattcccttcacccctttctggcacgtgactccagaaatggcttcttctgagtctcagcttccccatctgtatagtgggaatgacaacacatcccactctttgttttcagaacttgttgggcagaaccaataaaatctgtatgtaaagttattttgaaaactgcaaagggccccccaaaagtaagcttttccattacttagtacatgaggctcaggaggaaacactggtacttcccctggctatcacttgtgggtcaaatttcgcttctgcagtctttctttctagccctgagtaaacttcaccctgtgtgaaggagatgtgaacaagtcagcagatgatgcgtttgtttttgaacacgttaatttctttatcagctctatttattttccgagggcatcactgtattacattaatgcctcaagttgttaacaataccagctggcactgcaggcatcacttatccttatagtgtaaaagctcagagggtagaatggaaattgccagccaaagcccaatgctgaatgtccttcttggtgggcttttaatctccccttgggaacagatccaccattccctgctatgtttccaaagcctttgattcatgatatcaattggcatctctgccatttattttgttttttctctgatagcttttgaggtttgagggagcagagactgttcacagcttcttttttatttctgtctccttggggtttagcacatagtaagaatgcaagaaatatctaggtaatgtgagggggaggaaaataaaaaatcaccaa

SEQ ID NO: 44669 - DNA, 1237 bp, Bovine  19866880980310
  misc_feature (1)..(1): n is a, c, g, or t
naatgccacggatctagcagttcaaataaggaactggaaatacaaaacaaaaaatccaaaaacctttttgatagctattccaaaaatatcatgaagccctgactgtcaaccttgctgattgctcttttgcatgataagaattttattcattcagtaaggtgtgacattctgcagataccctcaatttggagacagtaaatttcttcttttgacgcttttatttcaggggctgtaatagtatttacttaagtatttatccccataattttgcaggtccttctttttcatccaggaaatgaccagcacatcatttctgtctctaaatgggaagagttaaccttgctatactttctggatttactgttggaggccccagcatcagtcccctctgtttccagatttgcaaatgagacagagctgagcattatctcacaactcatgcaaattagatgccagaaaggctattgaaaaggaaagatggtatcatctgtcttgcaaggacattgctcagattgatagccccacatttaacctcctcttttccttcccatgaattaatagctcagctcaccctccctaagaagtcatctgctttattgaaattaaattccagctacattgggagagccactagataaaatctgtcacttatttcctttgttctcctcgactggaaaggtccacagcctgagggagagattgtgctaaagaatgtttaaggaagacttttgatgtgagtggtgaaaggggtgggggctaaaagggtagtaaatactcttccctgattttcaggcacttacgaatctgtggccaggtagtaaagcactggtctcataaactgaaggtcatgggttcaaaccctgtctgtacctggttcttgagcctggatttagtagtgggggctttgctcttcccatgtatactgcccatttcctctgcagtgtggcattttttttcagggcttcccacatggtattaagagtaaataacccatctgcaaatgcaagagaagagacgtgggttcgatccctagatcgagaagatcccctggaggagggcatggcaacccacgccagtactcttccctggagaatcccatggacagaggagcctggtgagctacagtccatagggttgcaaagagtcagacacgactgaagcaacttagcacagcacacatgtatgggcttttagtcaatgatatccctgcggtctctgccatctttactgcgtttcc

SEQ ID NO: 44670 - DNA, 1320 bp, Bovine  19866880991330
  misc_feature (1)..(1): n is a, c, g, or t
ncttatggagacactcctttcatgtgagcctgaccccctgttacttaggacatacaggggcgttctcccagcaacagactacagaataaataatcgtcagagcgagaagagagtcaggaggaagggcacagaggcccggtgagaaggcttagctgtctctctgtcatctgctcacagcagtgggactttacaaagtgctgcagcctttctgggcctcggtttcccttttgtgcaggagggtatcatttctgttcgattgggtcattgtgaaaattagagataatgtgtctaagaggtcagatgactagcgctagatatttcttaatgagagcagttatgatcattattctgttcgtgtcagcttccatcatttcttccaatgcttgtcttctgaaataccttcatagagtaactaggtacagtgtataaccctttgttatgtagagaaatgttaggagattttgaccaatagtttttggcttgcagtgttctaagcctaacacttgcactcagttgacaagttatttctcagtcctctgttcatgtataggatgtgtgtcatgtcagaaatactacatttttccccccaaaaggcatgctgattgtcgggtccccacccttaggttcctactgaaaaatcaagaattgggattttggagcttgaaagtcatttgaatcagtattgatcaatgagtttcagaaacttgtgatgccctcctcaaacttgcagtccataataaaggactcctgctttcggttggctgtcattttgttaggttgtggagttaaagatgcttggatcaaagggtgccctgggcatgtaagttcttcacttacatgccttttctcataatggaagcacacttcataaataatactcttcagttcatttaaactcaatgatattcctgacaacaaatggaaaataagttagagctcttcttgaaatacccagggcagataaaataacactgctgttcttacagaggtgataatgcaaggtgaattctagggaatgtggaactgatggatggtaaatcacaggcaaacctgaaaaaggagaaagtccttcctgattctgtgtaatcacagtggtgacccgaatagaaataccaagtaaaccttgaggaaaacaaatcctgagaagggaagagcacagaggtggctgtgaacattctgggaactacagaatctcagtctggagcacgatttctcagctttggcactcttacttttcaggtcagtctttactgtaagggctgccctgtgactttgtgggatgtttaagggcatccctgccctctcttccatagaagccag

SEQ ID NO: 44671 - DNA, 811 bp, Bovine  19866880997764
  misc_feature (1)..(1): n is a, c, g, or t
natagcaatttatatctctggcagcccaaactaaaaatagtcaggctataacagagacagggatagactttaaaagcaaggaagctgagtggccatgtgtgtaacatgtttgtgcccacctggaatcactcaggttaaaaatgaactcagaagttgcagagaaaaagattccttccatgtgacttaaagtagtttctctctaagggcagggtcaagattctggcaataaggaaagggaacagcaagtatgtcaggcaccgtctggggccccatgggatggcacatggttctgccaggaaatttacattttccatttctctctgatacaatcatgcctcccattgcctcctgaagaaatcattatgaagaaattagtcacccaagacctacatgaaaagcagatgtaaaatgcaaataaaccccccaacactgaggctattctcttcgccccaaaagaatgaggaaggttctcaagagttatgggaaacagcacccacttaggccagacacctccacttaaagcaaagccattctgatggtcatccaatgctagaaaacattctaacactgggtgtgtcgcccatgctgcaacaacagaagccccccaaacaagtgccacaactagaggaagcccacgcgtgtgggctaggtcacttcagttgtctggactctttgcgactctatagaccgtagcctgccaggctcctctgtccatgggattctccaggcaagaatctggagtgggtcgccatgccctccagggcatcttcctgacccagagactgaacccgtgtctctttaggtttcctgc

SEQ ID NO: 44672 - DNA, 1682 bp, Bovine  19866881006962
  misc_feature (1)..(1): n is a, c, g, or t
ntgtaaatcagggattttttattccatattgcagcacagattccctgtgtggggtgggaagccatggatcccctctacagaaaactgtttatgtacaaaaaggttgcatgcaattccaggtcattacagaagttttgaagcttctacatggattcccccaaggtcatgaactcagatgaaggtcaagtctgtaaatccttgggctccagttacttggccacacatgcaagttagctgggagtctttaagcagttcagatttccaggctctatcccagatgtactgattcagaatcactgagtctgtggtctagtaatatgtttccagatgattctcaaatatatgaccagaaaacagcctttggattggttttaggggaacaccactctaaataatgcccatctaatgaaccagaactcattgctgtcacttctaccagctacataacctctccaagcttctaccttctcttccatagacggagataacaattgtccctatctcatgaggttaatgtgggattaaatattccttgcaagtgtttagcactgggtctgacatgtaagtacccaataaatgttaatttctcactaattatattattaatcatctatgtaattaatctgtcaatggcttcttggtgatagaattgggaatagaatccgatatccagcagactatcaacaaaaatacatgaaagacaggaaacaattcaaattttattaaacattaagaataacagacaaagttttggacttaacagcataaacagcaaccaaaaccatggtgtacaaacacactgacatcaagtgaacttgtacctgtttaacagatgcaatctttgtggtgttgccaaaaggataatggtgattattgttacgtttggtaaggtgctccacatgaaagattttatgccttaactactctcacacacacatacacacacacacacacatacactcctctacatacacttagccctcagcaaaatgtactgcctttagttgccaaatccaatgcatcatgattaaaaacatggctttgctcatttaaaaaatggcattaattgtagagaaaacctagaggagatcttagcctcctcagtgggggcctaggagcccttagaaggaagctggcagactgagagcaggtgtctatcaccttctggaactgctctgattaacacgaattaagttttcctaaaaggaactttaggaataagggaggcaaactcctttgcattttacagaatgacctttgttttaatttgggatgggggtgggagtgactctacttaaaattcttattgactcttctccaaacagactcaagacctttcaaacatatatttagaattgagttcctcacaaaaccggtaagttggaaggaacctctgggctttctagcactgcttcctctccacccagtgctagaattccatctgcatgctcatgaagcaaacggtctttctgcttcaaacgatggtttcacagcggcctgtcatatgtgaagatgaaaggcctgtcactatcctgctcactgtgggttttggaatggtcaaaagcgtccactttctcaagaggaggaagtgattgcttacagccctcccattccctacctatgtcctccaggtgtcacaagcagaaccataggctgatcaatttttgcctttctttgcaagt

SEQ ID NO: 44673 - DNA, 995 bp, Bovine  19866881126859
  misc_feature (1)..(1): n is a, c, g, or t
ncagagcaagaagaattcctaatgaaggaaccaatatctccccctctccttaaagaataagggatttgagcctcacagagacaaaatttgaaattattaaggaaaaggcaaagagaagaattataatggattctcagatattccacatgctgaaaaaaacagccatcctaatatttcaacctgacatgtcttcaaaaggcagtgggtgcttaaaaggtgatggaaacactatttcaacaagaaaaccaaagtctgcaagagaaaactcaagtttgcaggagaaaacacactatagttctgatgcttcttacgagacaaaccacatgaaccacactctgaactcaccccatcctgggtggtgttaattatgtcacagatgtgcatgaactggccccagtcttccgtctgcactccaagcaaatgtagccttttctgcaaagaaaaagttaggttgagtttgagctataacagaataaaacatgtctcaaaaaaaagtaaaagtgttcatcagacactcagtcacgtctgactgtttgtgaccccatggactatagcctgccaggctcctctgttcgtgcaattctccaggcaagaatactggagtgggctgccattcctttctccaagggatcttcccaacccagggattgaacctgggtgtcctgcattgcaggcagattctttactgtctaaagcaccagagaagccccaaacatgtctggttttctagaaacaatctgcctggggttccctagcaagcaccattaagtttacatcaccaaaagacagacagtttttttttttttcttcgcacaattcccagtaattcaagaatcagtcaagatccaggttcagagtgctgctgttgccacagtaataaatgacctattaataaaggcttcagggccagaacagcccacctaaatctccatctgcctgcctgtctttcagagaaggcatactgctaagtattttatgcaatttcatttaaccca

SEQ ID NO: 44674 - DNA, 791 bp, Bovine  19866881241333
  misc_feature (1)..(1): n is a, c, g, or t
nttgattcagaaatctagacagcaaagccaagtcagacaaggcaatcacaggcactgcactatgcccaaaagataatgaagagctctggcctctgcgacagtgtgtcctgaagagtcaggacaggtacttttgaggcatgcttctgagtatgtccctgggctccttcatgattcaatgctgtggttttattttaagctcagggaactgtcagcttctgggtgaaggtagcagactacaaactataagcaataatgtgaagggtgtggtggaagtaaacctcaggaccggagtcagaggacctgggatgatcagattctgctgcaatcgatgactcgggcaagtcagggagcttctctgggtctcagtttccccaggtgaaaatgatgggtcttggattagatgttccttaagaatccttcttggagaaggcaatggcaccccactgcagtactcttgcctggaaaatcccatggacggagaagcctggaaggctgcagtccatgggatccctgagggtcggacacgactgagcgacttcactttcacttttcactttcatgcattggagaaggaaatggcaacccactccagtgttcttgcctggagaatcccagggatggcagagcctggtgggctgccatctatggggtcgcaaggagtcagacatgactgaagtgactcagcagcagaaaggatccttctggttctaaaactctgatctttaaatgtgaggaaactagtaatcatctcatcactagcagaatcccaaatcctgcttttaaataaagca

SEQ ID NO: 44675 - DNA, 1754 bp, Bovine  19866881247617
  misc_feature (1)..(1): n is a, c, g, or t
naaggaaatgttcacagggaggactgagataagtagcactgggagatctgctctgtttgtatttgcttcctcagcagttttccttctctttcaaaattttgagcagagagccagctgcaaggctgagcatgcataaacacagttaactgttgtctccaaatgcaacttgcaacatatttcatctgaagcatttcataacgttcagaattattatgctacagaatagttagcataaatggtaaacaattcacatcaagtgtggaattacatttacattgttaaatcaagatgttttcttttttctcttgttcttgagtcttcagtatcatttgtatttgtatcaataatttatatttaactcattcaaaataatcaagacacccagatatagacatgcacacacacacacacacacacacacattatacacacacacggtgacggagtcagttcaaaagctaagacacccaatgcttcagatccaaatcctcttcatgacgactcaagtcctgctcctctcccaccaactcagcccttttcacagtctgcctttgaggtccttcaatcttgggaatacctgatctgtatatacacaattagacagcatattactgtctaataaagcagacattactttgccaacaaaagtccatctagtcaaagctatggtttttccagtagtcatgaatggatgtgagaattgaactataaagaaagctgagcgccaaagagttgatgcttttgaactgtggtgttggagaagaatcttgagagtcccttggactgcaaggagatccaaccagtccatcctaaaggaaatcagtcctgaatattcattggaaggactgatgttgaagcagaaactccaatatctttggtcacctgatatgaagagctgactcatttgaaaaaaccctgatgctgggaaaagttgaaggctggaggagaaggggatgacagaggatgagatggttggatggcatcatggactcaacaggcatgaatttgggtaaactctgggagttggtgatggacagggaggcctggtgtgctgcagtccatggggtcacaaagagtcagacacgactgagcgactgaactgaactgaactgatatacacaattcttaccttcaggcccgatctcttagatacttgagagtccaagggaaaaacaaaggaaatctaaataggtattgagtataagaagtcatggcaggtgtttatctatggatgatttgatttaaatctttcaagagtctagccagtctgatactgtacatacttgtataaacacagtaacatccatttctggaaaacgataaatagaccataggtaaaaacttctttccaatgagtttgctgagctgggacaatgtaattctggacctgctggaacttatatttcctagctacaggaagaagttcctctgctgtagttgtggataaggcagaaaggccagctggcatgctttcccttctgtatgcttttgcacgtgttgttctctacatctagaacacctcttttgcttttccatacaaaaagaatcatatagctaattcctatctcatttcagatatcagctcctgcaggaactccgtcctctttccccatgttggggttacatgtccctgctctgtactctataagcatcttttacttacacgtataattgaaatcatcaacagcactgcaattaccatctactgtttttcccatcctctacttgatgggatgtcatacagaggagcatat

SEQ ID NO: 44676 - DNA, 3004 bp, Bovine  19866881364767
  misc_feature (1)..(1): n is a, c, g, or t
naggctgatcatttttgcctttctttgcagtctagtcaaaggaggatgtgaccttgtcagaagtcctaggctgctcattccaaatcatgtctaaatgatgttggcataatatgatttggattcatttttaatggccaagtaattaatctctgaaagatgcttatgatgaaaaggtgaaaaatgacaacaggactcttttaatagctgcagtctgcggaactcatctgaccctggatgatccaagtcattccaaatcgggccatgccttctcatgtcatttagcaggactgctttatttactagctgactgccctggacagaaggcagtgagttcaggggttgagtgcttgtgtgtggtgacaatgacctacatataaggcacctgtacagactccaaagctttaaaaaatttaaaacgaggtaggtttctgaaacctcccctggcacgccaaagaataagttttattatgatctttaaatttcttctgcagaaaacatctgtgatgctcatcagatacaagcaacctaatttcagaaagactagtactcaaatacagttttttcagttaccattttaaacttcaatgaatttggattgtcttcagtacaatccttcaatacttctccagctttcttgctagacattgaactatttaacaattctgctgcagttagtctctttacctataaaaaggccaactccatgcttacttgtgtctctgaataccattaaattcagttctgcttaagtttgatagaggttttgtttattttattagttatttacccgaacaaggttatttcaattccaatatgcgtccatctcccatcataacctgtagcttcagataaaaagggatatctgtaggaatattccactattcagattccccaagactataacagtaagagagaagcattgctaacagattgataaggagatcaccattaaagaaccaataaaggtcattaaagaatcacatactctggacacaggaaactacaaaatcccactgataaaagggtattttaatcttgcagaaaatgtttctttataacaacagcaaaatctcttaacacaagttagtgaaacaaaagaacaatcacctttaaagtcaagacagcgatcaaattataaatcatacacatagcaccgatattaaccttatactgtgtaagatgcatgtgcccacagagaagaacagaattttgggggatgcttgcagtgatattcatttttagaaactcataattttgaagtgaacatttctgtggcagatgcttttcctaaaaatcactgtatcatccaataaatatttgactaacatccattttgtggttttgggttttctttctgagacctaataggaaataagaaaactccttagatattttagagcagaattcgtcacagcaagcttcgatactgttgtaaaattttaatttaaagcagaaaacatgctgatgtgtcagtgacaaaattaaaatatttaagacttcaaaaacccccaagcacttctctgtacaacattgatgaatatatatctttgctatataattttaaaacatggaatagttttccttttctctttgctatatataatatatgtcttccaaaatacatcgtcagtatttatatctgaaaaatactgtacaaaaagaacttcctataattactctgtataaacattaaacaatttaataatctctccttttggtctacagtaaacacttaaattgatcggattaaccacagtttgtgacaacaccatcccctttggagatacaccagtgtcttttacattcatttttcagaagtccacttaataagagcacatacgttcaaaagaaaacagagaataagaaacataagctccagaatcattaatttatgaagcattcaaatatgacaccactaagaaaaaggggttttacgaaacatcaacttattaacttaactgattttttaaaacaacaaggtataattcacaaaaatatatacattaccaaaaaatggggaaaactgaatcttaagtaattgaattgtattgaatatcaagagggatgtcgaaaaagttaactagaaaattggggttgggagcatgggaaaagagagaaaacaaaagcaaacacatcaatgtcaaaagctgttccaagatgcattttttggctgtacactgataagttaaccccttgttcttagacctggcgtttccctctgcttcccggtcctggggatgttctgggcatgctcaaatacattactgtaatttttgctttttaaaagacagtgaaattctcaggtagggaaaatatcctacttccactagtaatactcaggcagcatgctctagcgtacaataggattattgctttaggtacagacagtgcaaaaacacactctgtgttctataagagtactcttactcgctggagttggtagagttaaaaggaaacttagtagagagcagttaagtaaatatgggatctagtaaatctaaacagcactttgaatttgaagacgattatcaccaaaacttaagaagagaggaaagcaacctataactgaatggagctgcagtgtagtgctaaattactctgtgcaccttattagcatggtaacttacagattaaacagaaacaagagcctgtggtcttgaaaaccgagatctactatttcagcagggccctttttagtgaacccgagaaggtcctgaaagagtgggcaggagcacacatgaagccacaggaaaggagtggggtgagggggcggggaccaggaaacccgcgcggtctcctcagtccagtaaaaacatggcacctttcgtttcaaaatggcgggcgcaaagggatgtacaagcgcgcacacacactcgctgaccacacaggggcacaaacacacacacacacacaccgcgctgaccacacaagagcacaaacacacacacacacacacacacacacacaccccccccccaaaacgtgagtccgtcgtgttgctgcg

SEQ ID NO: 44677 - DNA, 872 bp, Bovine  19866881369415
  misc_feature (1)..(1): n is a, c, g, or t
nttggcagttttaccatcagcaaattctgccttttattcagttgaaaaatttctctaactgcagtgggccctttacagcattggggaatccctttgtccctggctctgcctcttctcctagtgttctgaaaacctgttctgaatcttcacaattctcttcaagtcctccattccacttgtatttcccacactcagaagatgaccttccttgggacattctaacttctcaggaagcgtctgctgggtgaatatctcttcctctaccaaatagttgacatgaatgccctaaggattccagattctatcctaccaatgatttttaattttagtcacatgtcagaatcacctgggagctttaaataaagatgctcagaccagtgaagtcagaacttcagagggtaaatgtgggaaccagattttggtatcattcctcttgggcactggtatttttaaagctcttcaggtgattctgagataggaggggggtagggcacaaccttcaaaagaatgacatagctgttgagggcactacagaaactggttagaaccaactaggtccaagatggtgaaagattcaacttcccgtaaaacttaatcctcattgtactcattataatattgatccattagctaaatgacataaccacatagccacaggccctgtggctagccatagaagaccaaaaagtggttggtggctcaattcttggaaattcccactccttctccaaaatagttggaatgaactgttgaaattacccagcccatataaaccaaacaccccatatttgggggcgactctcactttctgggatggacagcattctgtctgtggaatgtgtatctctctaaatgctgggctaactcttaaa

SEQ ID NO: 44678 - DNA, 1156 bp, Bovine  19866881529154
  misc_feature (1)..(1): n is a, c, g, or t
nccaattacgacccttaatagtactcgggtggagccaagggatggaaaccttgtgttctaaaggagtacctcccatgtatgagcagtaaaccctttgcaaccccatggactgtagcccaccaggctcctgtgtccatggaattttccaggtaagaatactgaagcaggttgccatttccttctcctggggatcttcccgacccagaaagagatcaaatgtctcttgcaccttttatattggcaggcagactctttaccactggcggcacccgagaaggccgacctacccgtaactggaatgtaagagaaggggctgcctcaacctgaacctgttctgttggcatgatgaggataaaaatgtactcatttatagaaatatggtcaaataattgcttgcttacttcaacctgcatttctttacatctgactaattattctcaaccccattacagaaatggaagctaagtttagcaaattatttggccatttatgtttagtccacaaaattcttaacaaaataaaataccacaatccaaggtaaatcaatttactaagctttcaaaattcataaggtattttgttttgtgcaagagctacttgcaaacccctgctgatctggcactcatatagcaattccctgtagaactgagcgaaagaatgtaaagggagccaattaatgaaactttgagcccaaatagataagcagaggccatcttgtccatccttctacctccaggcaaaaaccatccgctgcaccacaagttttggcgtgaatcctgctgacaaaaatgctcaccacatgtaaatgacaagtcataatccatttaatgcaactaaagcagattgttagctgaagacttatttattgtgttctaagatgttgaatatgaaagctcatctgaattgttttaatttcctccttctcgacaattattttatacaagaaacatgctcaaataattgtaaagcagtgggaattctatgcccaggaaataaagttatctttaccatcttattaaatgtattttttgtttcctttcactgtaggtctaccttacgggtgggaggcagcttacacagcagatggaatcaagtacttcatcaagtaagtacaagcctcccaaccaagtaagcatttttcttcacatctggagag

SEQ ID NO: 44679 - DNA, 1026 bp, Bovine  19866881629263
  misc_feature (1)..(1): n is a, c, g, or t
nctattacttaaatagtccacatttaacctagtcttagaaacattgctgtcacaacagtctgcacataacatgactgtgatgtggtgcccgaagggacatcttactttaacagcccagccaggcacttgattatcactgtatggtaaatggcttcagaataataactctgatacagacaatcaaatgctttcattagtttactgtccttttttatttagagcagagtcaggccatattttactttaacatgggggtgcagtgcaactttaaggccattgtagacaactataatcctcaactgggttcctcagtttctcatattagcttagtatctaggagaggtggctcccaacctagattttatttggaaacagtatttgcaccttaaaaccaaggacaaaagtacaaaacatcagaaagtgatgagaagtcttgcaatgagtgccagtggagggggaaaatacaacaagtaagtttggaaagaaaggtggaaagagtatgggatcaactctgttttatatgccaggtatcaggacaaattggcttataaaagaattatttgttcctgtactttataggtgaagagactgaggtgcagactggttatgaaactcatcaagatcatgttgctgataagaggcagagatgggatttgaacccaagtaatctgattctcaagctcttgcttttagctactatattcctccttctattacgtaagaaataacataaaagtgttagaagttttaagaagctgaataaaagactgaaagtgaaaatgtaaacaatgatggcctcttggtggtggattatgagcaatttctcctacttattccttcttttcaaaataacaaaaataaaagttcaacacatttttatgtcagcagacaataacataaaaatcttgctgtcctaactaacattttccctttgatcttagaactttgtaatgtaaaaaaccgcacgtgctacatcgacactttgttgacagctcacagagcacgctgcatcccgcaccagaaagg

SEQ ID NO: 44680 - DNA, 3863 bp, Bovine  19866880394578
  misc_feature (1)..(1): n is a, c, g, or t
ntgggctttaacaagatgggatgaagggtactggctgccttaggaagcagtgagcttcctgtcattaggaatactcacaaataggctatttttgtctcttagccacgacattgtaagaagtgagtcaaacatcagaaaggtggttcaactaggtgacttttatgatccctcccaaccctgagagtgtaggagtttgtgagtgagacagatgtttaacttcttgaaaggcaaactactgcatgggtgaaaaacaagtgaggaattatttttctgtctcacacacacacacacacacacacacaccacacacaccacacacacacacaaacaccctgtgggagtggaatggcctaagctcagatgccaacaaaaggcaagtgtgtgtgtgcgcgcgcctctatgtgtttttatatatgtgaatgtgaggaatggagataaaggaaaggtacgtgaatgactaaatagttacacttcagtgtgttgtaacattttttaaactgggggtataattacttcacagtgttgtgtgagtttctgccatccagtgaagtgaatcagttataacacacacatatcccctcttttttagatttccttcccacttaggtcactggtgagcactgaatagagttccctgtgttatatagcaggttctcattagttatctatttgatacatattactgtatatattaacattttttttcagtgtaaagagcattctagggtggaaagtcaaaagaagtctattaacaaggcaaaaagggagatagatgtacttccagaaaaaggaaaaacagaagaaaagacaaagacagtaaaacaagtgaacactgttctcacatctttctcctcttccttatctgtaatttttgaatcattgggtaattgttcaggtctcctttgtctagtttcagagagacagcagttataatggaaataaaattgttaataggtactgtttatagaaattgacccaagtgtacacacaaatacatatatacacataaacattttatttccccaactctatgaaatagaggctataattaagcccactttacagataaagaatgaggcacagagaaattaaataacttaacctaaatcacacagctagtgtgtagcagggtcaagattcaaactcaggtagccaggttctacaagccagcatccagccaccacgtgccccctgcctcttagcaagcacactgtgggaagctggctttgaacacctgccttcaaatttatgtgtcagcgcctaaaagctgtgtgattttggaggaaccatttccctgccctgagccacagattcctcatatataagacggcagggctctctttcttacagggcacttatgaagatgaaatgaggtcttgttggagtctgaaacgtaggaaaccctggtgaaatcacagcgattggtacttacttgcttcagacttaaaggccatagaattttgaggcaagaagcctgctaactgcaattaagctgtgttataaagctgggccttttagaaaagttgagagccgatcaggaaaaataccagggtggaaatgaaacctcccccaagccttcaagtgctgtgaaggtgataagaccacttgctaccagaaggtcctgttatcctcctcagagatccctaagctctggtaggactgggtaatcttaggtgataagagagatgtaaggaattacaactcctgataaagcactgtggtttcgtttgcccatgcttgggtgagatatgggtgacagagataaagagctggcagaagccccaggtgggctgaaaatgactcctcatgcctgggagggttggcggggggtgagggggcggcgggcggcctgctactgtatttattctgcttatctcagagtgtgggcagagccttccagggcccgcttaggtggatgctcttgaaagactggagggggagcttgagggcgtgttagtcagctaggctctctgcagggagctccgctcccctctggtctcaaatgccaaaccaagtcatcatttgacggcattcctatatggaggctttacaagatatgaccttcttccaacagacaaggatcagatagtcacgtggaagggtcaggcatactcccaactggccggacctcaacgcagggtaaatcagaccagatagggtgactggtgacgtgtggtgggaatgctgaaaagagtggttaatcctgcctgggtgagatgcaggctggggaagagagatggggaaagccttctgaaggaaaatggcctctgagcagatccttgagtgaagaataggtggggtgttgataggagaggaggaggaggaattctctaggctccagggacagccatcacacaagtgtggtggcattaaatgcccggatcccttcagtatttcctggagaattcattcagtagcaaggaagtttgtaattttaccagattttttctagtctcctttatcttcctccttccaaactacatacaacagaaaactacccctgcataccagtatatatgttacttaaagaagtgcagataatacaatttgctgaaaattgaaaaatatttctaaaaatgatgctggcaagagcgagaggaaacaggaatgttcatgggaatatgttattgtttagttgctaagttgtctctgactgttttgtgaccccatggactgtacagcccaccaggttccttctgtccatggaattttctgggcaagaatattggagtgggttgccatttccttctccaggtcatcttcttgatgcaaggatcaaaccgtcatttcctacattggcagaagagttctttgctgctgagccaccagggaagccacatcagtcagtttagttgctcagtcgtgttccaccttttgccaccccatggactgcagcacgccatgcttccctgtccatccccaactcccggagcttgcccaaattcatgtccatcaagtcggtgatgccatccaaccatctcatcctccgttgtccccttctcttcctgccttcagtctttcccagcatcagggtcttttccaatgagtcagttctttgcatcaggtggccaaagtattggagcttcagcttcagcatcagtccttccagtgaatattcaggactgatttcctttaggattgactggttggatcttcttgcagtccaagggactctcaagagttcaagagttcaaaagttcaaaagcatcaattgcatttgctttaatgctctgttgtcctcttgaaattcttaatattttgaatgagaaacgtttgcgttttgcattgctgctgctgctgctgctgtcgattcagtcgtgtctggctctgtgtgaccccatagatggaagcccaccaggctcccctgtccctgggattctctaggcaagagtactggagtgggttgccattgccttctccaatgcatgaaagtgaaaagtgaaagtgaagtcgctcagttgtatctgactttgcgaccccatggactgcagcctaccaggctcctctgtctatgggattttccaggcaagagtactggagtgggatgccattgccttctccagcattttgcattggggccctgcaattatgtagctgggtttacttggggcactgggccatctttggagacctgagggttgggataaacttcactgattattcctgacccaggagcacttgtgaatagctgtaatcagcagtcacacagtctggaaagattagtagagagctgctaccctacctgagcaggagtgcccctccccacacatgataaggttggagtaaacagttgggctcaagttttgaatcttgaggtggtctagtggtaaagaatctgcctgctgatgcaggagacacagaga

SEQ ID NO: 44681 - DNA, 1165 bp, Bovine  19866880415790
  misc_feature (1)..(1): n is a, c, g, or t
nactaaaatcctgctattaattttataatgcacaaattttaattatggagatgacatatttattgggcaataacttcaaaaatggatctctaacgaagacctggggtttctagcagtgcatttggaataacttgagaatcagggtatggctcaaaactcaaaatgctgagcgtctagtggaaatggaagaaaggaatggggtatgccattgagtttaagactgtggttttgcatctattctcggagtttattaattccatctttgctttctgctcaaataaaacttttctaagacatgaacaacatcttttagaaactttagttaggcagaaatttattatttcattcatcttccaggacagttttgttatatgagtctacaacacgtatgtgacaagccgtgacgttgtatgtgatgccgctggcaaaactgagtagattagaaatgactgtagctactggcagagtaaactcagagctgtgggagcctattttctgtcatggttctgaaggacaggctggctgtctcaactacttttccatgtattaatagcattgctctatttttacatacggagtgaaacatccttctagaccagaggctacaaaatagtgacagacagacaggcagattcacacaaagtcatactttgatggccagcacagtgtttatcttttcaaaattgaattggttattttaatggaaacttgacatgctctttatcatccattcctttgaatcctcctcttgttttgttttctgccttgtaagttcttatttctccaggatagaagacatataatccttcccccaggatgccttgaagcaatagtatgggttcacccggtcagatacactagagtgaggcttcagttcaaaagtaagcgctgcaagccgtccgctccgaggaaggcacaacagcagcgacagcccttctcgcgtagtagttagcatggatggcgggagttttcgcatcagcgcttattggtagctacagtagtctcttcactagcccagcggcagcccttctcgcgtagtagttagcatcgatggcgggagtttccgcatcaacgcttattggtagctacagtagtctcttcactagcccagcggcagcccttctcgcgtagtagttagttagcatcgatgggcggggagtttcag

SEQ ID NO: 44682 - DNA, 2508 bp, Bovine  19866880419811
  misc_feature (1)..(1): n is a, c, g, or t
natctatgaaccgagcagaaggctctcaccagataccgcttctgctggcaccttgaccttggacttctcagcctctgaaactgtaagaaataaatttctgttgtttatataagtcacctggtctacgatattttgttaaagaagcccaaacagactaagacatgggggttagtcaacatagttttggatcaccctattcaacccacaagtgccttaatatctttttcctttcttgagaagaattgaccaggtgtggagaagccacgatccattccagttctaaggacggcgtctgaaatgataccatatgacagtgctttttggtgttattattggggtttggcacatgcccgttatatacttttgaccgactgtgtggacaagtaacgtggcttcgaagagccttgccacctttatctcatctgggcatcattgaggtgtgaaagctggatttgtgagctgaagccagaaacagcctccttcagggttatgtcacctctgaactgtgtaccaaagagcacagcaaagcaggggaggctcgaggtgggagaatgtggacaagataccttttgatgacatcatatgtcttattagtgaatttatacaggattcagaatctttgatgccagtgctctgggagagttgggaggagcattaatgatccatctactggtttatgtttctctgcccaagttcccaagttttcccactttttagccttttctggtccctgagatgaacatcatgtgtgcctgacccactgtctacccaggcgagcctgcctgtctcccctgcccacccacttctctgtccattctaattcctcccaccaccaagctctaccctcattcatttccacagtaggaattcctcctcttatgatatttttgcagttctggtaaagaatctttcaagacatccatgtgttccacctcctgataaacttattttattattgcataacccctgaacatttttggcattatatgtgatatctccccaaccagattttgagcttctggtggccagggacagtgtctttctctggttccataaagactgagtcacagcgggtactcagtgtaactgaccaatgaaattgcaaaaggctacttacttccaaacaggaattttctttgtgattagcttcactaatacatgcgttcattaaaatggaaatgtggtcttcaaataaaaagtcacgtgagaatctcatctcgtattacttctgttaatcatatcaaatgaatccttagaacattctgccaacccaggaagagggcatgtctacctccctgatttttataaaggacaatcttgtgggttgtgattccttgccaagatcctatgatacttaaataagtacaaaagtaaaaccatagcatactggatgcggttggatgtcttgtgggaaccagtgaaaaggctggtttcatatcaagattgcgtttagggctaaaacagaacagtgcaagcggacaagtgacctgcaacatctggatgagacaccccataaagctgtcaagatggttaaaggtagtaatgtatataaagctctagggctacattgatagtgatcatcatcgtggaggaagtgccatttactgactgtgtatatacctatatgcatacatctacacagtggaattagacactattgaaatagatttttaaatttccttaagtgtgcctatctggagactcacagaacaggtaatgttggcttgatggtcctcaggaaattgaaagaatagaatcttttggtagcatataagtggacctggtgtgtagagggctgaacctaaatgccaaaatgaagaataaattctaattctttgattataaaagccttctttctgagcacagcaccttgccatctgtctttttaatctctgcagggaaaacctgagcccgattccaaactctctctctccataatgggaaatctctctgtgtttgatgaacctaagtgaaaaatgcagtctcatatccatgtatttattaaatctctggtttcataaaggcctcactccgaagtaatgttcaaaataaattgcttccatgattgtattgttagaatgcacatgtatgatttcttctccctgcattctaagatgacaatgtatcttgaggaacgttaatgatgcaaattcaaactacctgggcaatcagcaacagacagatcagaaaattgtagtgattggcctaaagactctttctgggtccttcttagtgccaggagagctcagaggcctcctcaaggagattcagctcatcactttttttctcctgtatggagactttaagtcagaagaaaatgatttttgttcagggtacagcagttcttccctgtgcttggagaggggttcacccaagtgcttctgcaagatgttaaatctgccatcacagccaacaaaactgcctgtggatctcacagatataccacatccctgacactcttctcttttgccaggggttcatgggggagtgtggctctctggttgctca

SEQ ID NO: 44683 - DNA, 1519 bp, Bovine  19866880437826
  misc_feature (1)..(1): n is a, c, g, or t
nggatgagggtcccttttgctgtaatcacaacagaatcataaccaaacacgctaatttctgtcttctcctctgacatcagacctgacttgagtgtcaagatattcaccaacgtgttacaaatcacagtttgaactatcagtctgcccgctactaagatacaggtaccgtgttttcaagtgctgtggaatattgacactaccaacaggctcctgcttatttccagagcggctcagctcccccagcagcaggaattactgtttgaatcaaagacggtaatgatacttctcattcttgctcatgcaaagcagcgaggcctgagcccttctgttttacactgcacactgatttggaagcaaatatttttccaacaacatcaccaaattgaaagcacttagaaaaatctgaagccttcacaaaattctgttttggaaaaaccaactctcggggatctgtcactgacataagccattcccctcagtttagcttgaaaacgagaacgtgctctgtcaaacagctctaaataatatatgtatttgcagatgtaagctgagcacagggcattccaagatccagtagaaaggtggggagtgagggcaggaaaaaaaggtgtactttccattattctcttcttaggtaccaataagaacaatgatatgttccagctttcaatgtggtttggagcacacttactgtgaataaggtatacaattgggagtctaaaatgtttgatcagatatgcatgtttaaagttataattcacccaatgggcttccctggtggctcagatggtaaagaatctgcctgcaatgcaggagacctaggtttgatccctggagaaggaaatggcagtccactccagtgttcttgcctggagaattccatggacagaggagcctggcgggctacagtctacagggtcacaaggggttggacacaactgagtgactaacacacacacacacattcctaaactttgctcactaaagctgtgctgattcacactcccaaccagtagtttatgagcacgtacccttcctcacactttccaaaactagaggttaaaagatttcattttcatctatttagtaagtaaaatctgatatctatctaattttctatttccctgagcactggggagttttaataatttttcatatatgtattggccatttgtatttcttctcctttgatttgccccttatgttctttgcttggttttgttcatttttttttcctgattatttataggagatttttatatatcctgcatgttaatctttaatctgttcaaaatactgccaatattttaattgtgaagcttctttttaaacttagtagtgtctttcatgagagaagtttaatgcaaagtcaaatcagtttctttcattatgtctagtagatttgcctaagaaagcttttcttatttaaaaagtattaaatttctaaatcatattttcttctattatgtttataatactttttggtggtttgaatcttcaaatcatcttacattagttt

SEQ ID NO: 44684 - DNA, 1493 bp, Bovine  19866880512199
  misc_feature (1)..(1): n is a, c, g, or t
ntctggactccaggtgctcagagcacgacctggagggggcagggctccaggtggccacgccccctagtcctctctgcctgcccctggggagggtgcaaccacaggaggacagagcagggactctaaaccggcgattctctgactctactgtgagcaggactcacctgggatccagagatcctgagtcagtgggtctggggtagagacaaaattccaactgcctcccaggccagcctatgctgccagtccacatgccacacttagaatagcagagctctggggcagagtgggcagaggtttcctatagaggaccaggaaatacatttccaggattttcacatcggatgatctctgcaacccctcagctctcctgttgctgctgctgctgctaagtcacttcagtcgtgtccgactctgtgtgaccccatagatggcagcccaccaggctcccccatccctgggattctccaggcaagagtgctggagtggggtgccattgtcttctcccctcagctctcctagtggagcacaaaggcagccacagacaaatattagtgaatgaggatggctatgctccaataaaaccttatttctgaacactgaaatttgaatttcatataattttcctatgagaaaatattcttctttggattctttcaaccatttaaaaatattaatataaaaactgttcttagtttacaggccataaggaacagatagtgggacagacttagccccaaatctctaaaaccaaaggatgttttaaaataaccacagcatcaatgtccaacctaaaaacaattagcaataatttttaacatcatcaaatacccttgtcgtcttaatatataatcactgtttaatctgtccttttatcttttccctgtcccacagtagttcagtatcctgcactctgtaaatgttgtcatactacttaacaccagtagatggcactgataatcttgacattagctaacagtttacacaacggagaaggcaatggcaccccactccagtactcttgcctggaaaatcccatggccggagggcctggtgggctgtagtccatggagtcgttaagagtcggacacgactgagtgacttcacttcatttgtatgcaatttgcaattataaataaatatattaacgcaaaaattgaaaatagcctgttgactcaatttttttttaaagaggtaacatgggaagctcctgtcatctttactaggtcaacaatttttagtgttaaataatggaggcccttatgtttttataattttctgtttaagaaaaaaagcaaattgaatctatttgcacaaatgatctaagttaaaactcattataaatgtactatctgaataaaaacttattttccaaacttgctccagtctgttgtgaagaatgaagacttaggatgtgaaatttggatggaatctttaagcccatctagttgacccttcctcagctaacagcagacttatatcacattatgaaa

SEQ ID NO: 44685 - DNA, 1017 bp, Bovine  19866880591040
  misc_feature (1)..(1): n is a, c, g, or t
nttttcttttacaatggaaggagggcttaagaatggagtgatatccaaggagaaccagacccgttcttagaacagtcggcttcagaaaagaatggatacagaaagctgatgatctgcaggatgcttcccactctgtaagcccccattcctacgccccaggccccctgacaaacctttgctggctcccaggaagagatatctaagtgtgacaaaattaagcacagtattgtcggagaaaggagagaaaaaggtcaccccttgaacaaatcattcagattgacatggttctactttgcctcagacatgacttctttgtcaaagctgctaacaccaaatagccaaagaagcctgagatacagttcagaacatgaaactggatcttttgtatattctaagattgagtctacacaagagcgaagtgtcggatgttttgtctccacgttgccagacatatggattgaatgaagattcaactaaatggacttaatgatcgtcttgttccctgtcttgaggtttgctgtgactcctcctggctgtgaaagcaccctttgatattaggagcagatctgagcatgaaatcaacagtctgcacagaagaaaagcaagcaagctttgctcactctttccatgagtgtcctttcttctttcctttcttcatctaagccctctcagagactgaggcacaggccgcgttgctccaaattaatctatgcgaaaaggacaaagaaggtggcccctacgtccaccgcctgacataggtcttcaggtcccatgtgggcgcatcctctttcctgctcactctccctcctcaagacggctgagccccgctccgggtaatgtctcgacccctgtggtctctccccgagttaaaggaaagcaggctctatctgagcgacaaagcaacataatgagctgcgtcttgttgagggctctccaggtcccctaaaatctttctcaaatgtgattgtttataaaatgtttataaaaataaatagctttcaattaaacaaaatttca

SEQ ID NO: 44686 - DNA, 2360 bp, Bovine  19866880601667
  misc_feature (1)..(1): n is a, c, g, or t
nctagggtattttccgtgagttggctctttgcacgtatatataggcgctagtggtaaagaacctgcctgccaatgcaggagctataagagacacaggtttgatccctgggttgggaagatcctctggaggagggcatggtaacccactctagcattcttgcctggaaaatgctatggacaaaggatccttgtggcctatagtccgtagggtcacacagagtcagacacaactgagcaacttagcacacacacacacacacacacatatattcatgacggccacttgggttgtttgtgtatgtacacacacacacacacatatgggttttgtgtatatatatatatatggattatttatttataaatacattcagtggaatattacttatccataaaaaatgaaataatgccatttgcagatggatggacctagagattatcatactaagtgaagtaagtcaaagacaaatatcatataatatcacttatacgtgagatctaaaatatgatacctatgaatttatttacaaaataaaaacagattcacagatatagaaaacagactaatggttaccaaatgggaaaatggggcgggggtgggataaattaggaattcggtattaacggcccggctatacataaaataagcaataaagtcctactgtatagccctgggaactatatttaagatattgtaataacctataatggaagagaatctgaataagaatatgtatgtgcatatgtatatggataaccacctcacttggctgttcacctgaaatgccaaaaatgaactatacttcaatttaaaaatatggctaaaaaaagcagccattagatggtctccttggtcgttcatcatccgcacttcctgacaggaaggaacagatgccgcgtgaagatcacgctgtcgtgcaggtcgtgggacgattgcgcttgatggatgtcacccctcatggaggctccaggcagacaactggccatggcaggtgcggggatgtctcttaacgtggcctcgtcaatctagacgtcgcagactttccaggagtttagccacctctgaggaaatgctttcagtggtaatgccgtgtttgggaaaatttggggagtgatttttttgggggggtgtaaaaatgaatgccacagttctggaagcaccgcaacattatttatctatcaacctgatgaaactcttcatgggcgagcattttctcttcttggaaatgaagagccatttgtttgatgaagacattggctacagcctctgctctctctgtggtgactcaaagggagacagtctgtgtgggaagcagtgaatactcaacagtcttcctggaagagcctgggacccccatcacggagctcctctgaaattcgagagttcacggttggtgtggtcattggagaagaaagcggtttccttttctatataatttgaagagtgcttcaggccctctgtgtccccactctctagccaactaggcttacaaggtatttactctgcctgccattggagctctgaccctttgggttaagacatcacaacttcaggagtcccctcctttataatgaggctcacttgggagcctgttaggtgcatgtgtgtgtaatataatagtacgtgagctattgtgacattactatcacttactaattctaaagagaaatcatgaaaatggagttctatcgaatgacactgaaaaccttgtgttatctacaaagtggactcatgctagaacaagggtcattctaatacgcagggatctgaaggaacgtgggagtgagacccaccccgggagagaagggaaagtctgtctgtgtgaaggagagctcgcttgagaaggatgacctcccaccatggcattttctatggagacttgaaatatagtgaccccagaaaacagagaattagaaagcactgtcgtgtctgaaagtgttccccatgggagacgggacatctgttcatatgattacaaactcagtttgggtctgtgcagggggtgtatattgtagtgtgtaggcatgataacttaaccttgtttattaagggtgtgataactacctcagttgtgtgcctggtaaatatgccttagtgaatagtgaaagtcactcagttgtgtccaactctttgcgattccacggaattctccaggccaaaatacgggagtgggtagcctgtcctttctccagaggatcttctcaacccaggcatcaaacccaggtctcctgcattacaggcagattttttttaaccaactgagctatcaggcaagccccaaatatgccttaaatgaacataactgaattcgtgttttagttcagactagaagacactacaccgttccccaggaggctcc

SEQ ID NO: 44687 - DNA, 1636 bp, Bovine  19866880627872
  misc_feature (1)..(1): n is a, c, g, or t
naaaacaggcctccctgggcagaatcattggcacctagtgacttataaaactgagatgacaaaaagaggctagacagttataagacacacttaccagtcacccatgtgtgatcccaaaataaagcttctaaaaataaatcacaatgctttcccatgaaaaataatttgattaataatagatattaccactagtcattcaagtctttaaacaccatgagccatgtgaaaggtctaagacgttggatccactcctagctcagtggactcgatctaaatggtaaatgtgagatattattatctgagcctccaggactgccttggcactgggaggaatggtattgcaatctctgatttaatcctcccctattttttttttttttttgcagatatttataacagctgtggaaaggtattcctagcagcaagctggcatgcaatttctcaggctgagagcaaataaatagaaaaaaaaaatctaagtggatgaatttgttcaagttttagagctgaaaaaaaaaaaatcacagaagagttgaagctcagatctagagagcattaagtgatgtcagggaagaggtaattatctgaataatccaagctccaagcccttttttcttcaattttctaaaaaacataggccaaatctaatttgctctcatgtatggggttgccaatcactccatttgaagacactgcatacaagattaccaagcgtggacttggctttccagaatcagatgtatctgattacagaagcctttggtatttaaatagaaaaccttcatttgtaataaatttagctcttttcttttcagggggagatgaggggaggggaattatgtactgtgtgtttttcataatttgaaaacatattgtaagaatgtaattaaaggactttaggaaagatagtgaaggtacttatgcgtcatgggagacaacctgacctggaggggaaacggtgcattaagactggaagacttcaccattcatttccacatgcaacgtcagatactcaggaaatagcgattaatgggaaagcttgaaatggaaggcagtccttgaaacatgcattctggccagctgaagagttactagcaatgacagcatcttccactcaagccacgtagctgggacagtgactgcatccacccagcagtgctatgcaatgccctacaattatccctgggttgggaagatcccctggagaaggaaatggcaacccaccccagtattcttgcctggaggaatcccatggacagaggagcctggagggctacagtcgccagagtcggacatgactgaagcgaatacacttcacttcacttcgcttcatgtctacagttgccaagccactctaatagaccccgtctcatctgattgtcatgttttccttttgagaggaacagacagaatttacttctctggagcatagaaccagctttcacacctgacctgtgaatatcttcaaataaaccaaaccagtcagtcatatgggccagggtaagaatcaaggctggaaagtctcagaatttcaaaatccttatggtcatatgagtgttgtatggatacacttccatagccttcactgcgtctacatttatattttaagaataagtcattagttgctactctgcta

SEQ ID NO: 44688 - DNA, 1750 bp, Bovine  19866880660006
  misc_feature (1)..(1): n is a, c, g, or t
nggttttattatgctgtatttgttctttatgttgttgtttttattgtttagtcgctaagccgtgttcacctttttgcgaccccttggattgtagtccaccagactcttatgtccgtgggatttcccaggcaagaatactggagtgggctgccatttcctccgccaattgttctttatacattgatgatattaacagttggttagtgtttgtttccaatgtttccccagtttgtcatgcatcttttacatttggatgcttttattgacatacataaattgtgccaaattgattgagttttcttttgttgtttcttccattgcttttaagttttgaaagtcatcactccaagatcaataaaacactcacctaactgttgcttactcttttgaaaaagactatggagaaatacaaaataaaaacagaggtgcttttctttcccatcccctcccttctatcaatctgaatccacagatgcacctccaatttttgatgatttttactttttacatttcattacttagtatcagctggaatttattttgttgtgtggtctgaggtgaaaatctaacttgaggatttattttcttccagataatgagccaattttcccaacaccattgttgaataattcattccttcctgctcggcttgtgaagacccatattttttgagttacaaagacaggaaactcacagtgacattatgcaacagaaataagctgccttcagtgcttgaatacatgactagctaagctcgcggtggcttatacacctacactctgtacagagcagagcatgtcgctgtagggcaagcgattggattgtccatttttaacagaatgttctaatttgttgaagcacacaagtctttaatttttcagttcagttcagttcaattcaactgacttaatttccaccagtgtttattaaatgcttattatatgcattcactgtagtatgtgaattatggttgatgcagttttggatttcaacccagcctatgagtaacatgtctaataactcaggcaaaagccaaataaaattccccaaacaattctgaaagaagaggaggagcctttgccgaaatcattttaaatgacaatccctcgggtttaactgatgtgcttttacggctgcagagtgtctttgtgttctcatctcaaaagccgacaatgacaaatagttcaagtcatttggattatgccatgggagcagacagaaagctcataagcacatgactgagcaaaataaataaataaaacaacatgtgtaagtcaaggagacacgttcctgtcccagtataaaaacagaggaagacatagatgcccgctattctcagataactacccatagttcaccaagtacagaggagtgggtagaggcaacattcttatcacagatgccatatgaagatctaaaataatcgtgtccacaaatattctatgttacttgtatttctgttgcttatcttttcttttcatcatgttagcgttcatcttttcatagagtaatataaaaacaacctgatggggattgtgtattttttcggggcggggggggtgggttcctatcggagaaaacaaaattattcatatgatcccagtagagtatgactgaaaagtgctgacaggatggaaaggtaccaaacgtgtgtttcttctgtttgtagttaccctgctatttttctctatgactcctgacatactgcctgtcacaccaggcacagtacaggagactgggggagtgttat

SEQ ID NO: 44689 - DNA, 1532 bp, Bovine  19866880726958
  misc_feature (1)..(1): n is a, c, g, or t
ncctttgcacacactttggactggctggtccccttccttgggggctgctcttagcattgggtcatatcttcttctcccttcctcctggcagctacccccgtttcacgtaatatcttgtttcaaggtctgccagcaagattcaggtcaaagtcggctcaagacagccccacccgccatgctctactacaggccctgtacggccatgatgcttgtgaatacctctttcggcagaaaaacttcctttggatgtgcttcagaagggaggaaggagttcttgcttctgctggggctagcccagatcctggacctactactgtatggccattttcagatttcaccctgagaactaaaggaagtccagtgggataagacgtgacacggaccgattcattaaagaagctgaaagctctgtgcctgcttcaagggaaagtataaaactgtggattcagtgacttgatagaatatatatagtgttagtggatgagttggaaaaggaaatcagtatttctccatctcttatgttaatccccagatcatgttaataaatcctgacatagtagactttctggtgtgagaagatatttcatttgaaatatgacaaggtttaaaaaaatgttctttatgtaatatcaccccttaatttaacaaagctttttggacgactttgttgttaaactgattcgtcaatttgcctcataagattgtatttctctctctaagaataactaaaatatgtagagatatcattcttgcctggagaatcccagggatgggggagcccggtgggctgccatctatggggtcacacagagtcggacacgactgaagcgacttagcagcagcaagccagggggaacccttcaaacttatattttggataaaaatagtgagcttttctgaaatcagagtactgcagtcttcatttccagtcttcaagtctgttaaaaaaatttgaatatatgtatatatatatatattaaagtagggaaaaataacttatttattgtaaacagagtatcattgaaaatgcaaatttttgagctgatagaaaaaaagagttgcaaatcatcagtttgtcaaacatcaacatcagctcaaacctgggttgacttttcaataggtttctgcaagccggagcagtggttgctaagaggggaggagccggcaaagatgcgttcccagttcaggatagcagggataacagcatctcgctgctgaaacaagcttcacacgttagccggcaatcattaggttggtgactttcctgatacccaggagatgcttgctcgaggaataaatttctatgttgaagcatttgacaagccccagttcctgatgtctcacactcaagccttactttataggcacatctgttagtttaaagcatttttagtttattgaagaaggcttcacaaagaaaaaacagatgatgaaaatctcatctgtcaaaactgttattaaaaccagtaacagtgtgaaattttgtttaaatgaaagcatcatttatttttatcaaacattttataaacaat

SEQ ID NO: 44690 - DNA, 1627 bp, Bovine  19866880768416
  misc_feature (1)..(1): n is a, c, g, or t
nggactgaaaggcacacaaccccaagggccaggccctctcccctgaaaccaccccaacagccagcctaactcttctagatgtctttacataactgtttgcacaactgcggaaagaatatcaacaaccccatctgtcctacaccgaggcattaacttcccaccgtttcaaaaaacgaacgtttgtgagtgatgtgctttacatttttgccgtctccttggctgtttaccaaatctatcttctcccctccttctttcctgaggacgagatgagtgacagaggacatagggtcataactcaacaaagaagcttcccctcttttcagggacttctgactgagcctgggccccatgtgctgtgatgtgtgagtttcacacaccaggtgctctgcagcttctggaccatatgagactcctgtgactcaagagcgtttttcaatcctggatacatttctgctatggcagcagtcctaaagacatggcttaaggtttatcccgggatgtgacctcatccttttttttcacattgtatttgtaaacatttcaggatgacagttgacaacaaggtcgtgcacaggaggaagaccgttgtgcaaggagactcagaaacaggaaagactaattcaagttcactggcctttcccagatgtacatcttctggtcctcaggcataaaaagctggattagcttactctttttccaaagaaattgaggaaaacaaatgtactgaagacatctactaggcttagtagaagtcaggaaacaaaaaaaaaaaaacacgctttttttttttttttggtagggtcatgtagaaatccccaatataaggggatttatattgtctaaaatatccccaatataaggatactttttaattcaacagatgtggaaatattacatagctttttcaatataggtgaagggaagtctgcaggggtgatttcaggaaacagtgtcttaaattttaaaaacagatgcaaggaagagattgtctcccctactcctccagcatttctagctattggcgggtaaagatgtgatgcatggagctatagcagtcatcatgtgataataaggagaactaatgaacatacatacagatggtagagcagaaagaactttgatcttcattatactttgagtgactgaaataatccagccttaaacttcttcgcttctgcaattcatgtgaaattacagggatttttaaaagaaaaatatgtttggcataagatcaaacttatatgtgcttgagaaaagcattttccaactttttatgaagtagagttgatttgcaatattttatccgtttgaggtatatagcatggtaattaaatattttttataaatcacactccatgcacagttattaaaatattgactgtgctgcctgtgctgtagtattagtgtcctcagtaactcgcttagttgatacccagtagtccctaccttagtcccctagtagtttctgcctctcctaccaccatctctcctcaggtaaaccaccaattctctgcatctgtggatctgtctctatttcattatgtttttattcatttgttgtattttttagattctacatataagtgaaaacttacagtatttggctttctctgtctgacttttttca

SEQ ID NO: 44691 - DNA, 877 bp, Bovine  19866880790021
  misc_feature (1)..(1): n is a, c, g, or t
naaaaagtgggcattggttgggtcccatccactcagtagagctggcaggcgtggagggtcttaagactgcctgtgtactcggagcctgccagttctgtgactcatgacatggcagaggctgagttggcagtgcaagcctgtccccaccaaatgcctcctgcttgcacaatcgaagccgctacccgctgctgagggagggaggtctctggaagcacgcgcagtctcttccccacttggttacctttgtttgcttgcagctgtttatgcttgtggatgtataggatgcattttaaacagcatatgccacgtgcgagtttgatgagagagccttcttctcatgcgtgatcgtagtgttgtttcacacttggaaaattctttactgagctttctcttcaacgccggctctgatgttggaatataagcaaagctaaagttcgatctgaattctaggatacttctcttgaacccaaccactttcggacacaaatgctctgatcacggtagagtgacccctgagccttcctgcccattcctagccttgtacttatgctcacgctattctcgcccggagtcccctgaaagtgaaaagtgggggtcactcagtcatgtctgactctttgcaaccccatggactatacagtccatggaattctccaggccggaatactagattagttaacctttcccttctccaggggatcttcccaacccagggatcaaacccaggtgtcccacattgctggcatattctttaccagctgagccgcaaaggaagcccaagaatactggagtgggtaggctatcacttctccaggggatctttctgacccaggaatcgaaccggggtctcctgcagtgcaggcagattcctacctcc

SEQ ID NO: 44692 - DNA, 1024 bp, Bovine  19866880798355
  misc_feature (1)..(1): n is a, c, g, or t
ntgtcgagacttaacggacagtattgagctcgtgaggttctgtccgtcttaaatatattcactaagttattaacacatgccagacatggcagttgagtacagattacatttttacatcctaaacattgattactaagaaaagcttgtcttatcaccacacttggagctcaccagtcagcttccatctggttaaaaaaagattgatttagctttagggcaaaaagctcaataatgcatatgctgagcgtaccaaattttcagtcttaaactacacatttctttccattttctgctttcttcaaggcccatttcctgctttgtctgtcgataaagttttgtcttgtaactaatcccatgacactatgccctagtactgaatatcctgataccgaatatctgcctatgtcaagttacaccattctacaccagtttatacaatgcttctcatatgggatatcctggctccacaagcaaattatatgattatttattggcagaagcatgtcttatgtttattacaaattcatcttggtgcctggcttaatgctgagcacatagaaaatacccaatacattctgttttaacatctaagcaaaataattgctgaaaattttttatcacttgagaatgaaatgcagcaattgaaagaagaatgaaatgtagtcttctctactataccaagcagagaacttatgaaccttgtcactagtcaatgaatattgagtccctttggtatacagttgtctgcttgggagttgtaagacagtgttgctctcatgacggctgagatagctatttcccttttgcttcactgtaagggcatccagtttgttgtacatttataaaacacgcagaggccatgaagcagccatacatttaaactctggtaacattttgatctggagaaggaaatggcaacccactccagtattcttgcctggagaatctcatggacagaggatcctggcaggctacagtccatgggtctgaggtggcgacagaggatgagatggttagataggat

SEQ ID NO: 44693 - DNA, 2378 bp, Bovine  19866880802022
  misc_feature (1)..(1): n is a, c, g, or t
nacttgaaatttctaactgtgagttggatatcatatttgtatgtatctcattagctcactaaaatgccctttgttctatgctgtatagcaaatgaacccccaaatttagtgacttaaaaaatgacaatgttcattttgcttaaaaatcggcagtttgtataggactcaggcaggttggtttgtatctggggcagctcaaaggttaggagataaaaccatctctctgggagttgagccatgacagggaaactaccttacagtatggtgaccaggtacccagggtgggcatacctatagaggaaaagagagccagaaagagaaccaagatggaaacataccacattgttcgctatgacttggcctcctaagtcacacagtatcacaatccccatattctgtccatggaggcagtgacagggtcttactcaggggcaagagataaacttcaccactcagtggaaggaatgtcagtcatactatgagaagagcatgtggtatgtatgtatgtatgtatgtatttttctgatattttttattggcatatagttgatgtacaatattgtatattacaggtgtacaatatagtgagtcacaatttttaaattatgcttcatttatagatcttccaacccagagatccaacccaggtctcccacattgcaggcagattctttaccagctgagctaccagggaagtcatagttatgataaaatatcggctatattccccacgttgtacatatatgcatctatttttctatttctgcatctatttttggaaaacacaatctgcagtgcattcttagaaagtcacttaaacacggtatccatgtgcagagggtggccaaccaatcattaagatttttgcacacattctgaggtgctgagcatgtgtgcagaggtaggtagggaaaattgcgaaagaaatagatgtggtccctggcttaagaaagtatccagtttaaataaaaggtaagaaacacaatcattatccttttcaccacaaaataaagaagcaggaggaaaataagaaatcacatttacggtagtgtaaatgctttatcagtcacaaagaatttttatatagattgcccaattataccttcataaaaattttgtgagaggtatgttaatatatgtatcatattcctaacatttagagctttagggaactttagattggagataatagaattgggaatggttaacatagaaagattttatcagagatgtttatttagcaggatctccaagaaataagaaatgacttaaagtagaggcatttgtaagacctttagagggaaataagtgacatgagtggaaattagaattgaggcaaatagttcagttttagggagaagcagggagatgaaaaatgtaggttggtctgagcagaaaatacggaccccagagagtaaagtgggaaggcatttaaacagcagcccacactcctcctgaggcttccccacgaactcctgaggtggttggacatctttgtaggctcgctcggaggcccatggtgtgaccagagtcgcagctgagggactgaggatctttcctggcagggacagggcaggttgaaatggggggctcagaatccttggggttcagtcttgctggggagttctgagggacacacagagaaggggtggggtgttacgtaccctcagcctttcatcattggtgagagttgctcctgaggcattaactctccatattcgtaatctatctctctgctgtgaccagaataaagccctaaggtaaaaccaaggagcagacctcaaggtgtgtagaagtgaatgccgctcagtggccttggtaagcgtcaacgctgtctgccacagtaaagatggaaagaatcgcgacttccctggtggcccaggggttatgacttggccttccaacgcaagctcgggtttgacctctgactggagagctaccatcccacatacctcaaggccaaaaaaacaaaacgtaaaacagaaacagtattgtaacaaattcaataaaaactttaaatacggtccacattaaaaaaaaacttaaaatataaactgaagagaaaaaaaaggtggaaagaataaaagaaagaaaaagagaaccaccccccccccaaaaaaaaaaaaaaacaaaacatgccaggggtttatacggcttcctgcccactgtttccttctaaaatatatgcgtacttttgacttcttctattcaggcctctccctccagcctctcaaggtgccttcctgttacttctctgtccttgagcatgtttacaacatctcccaatttagtctcatttgcaaatttaattaacaggctatttacccctcttccggatcattaatggagatattaaataaaaccggatcaaacatcaa

SEQ ID NO: 44694 - DNA, 1636 bp, Bovine  19866880805666
  misc_feature (1)..(1): n is a, c, g, or t
naatgatgaaatgcattatggagctcatttttgtaacgtggctccgtcatttctttgaagaattgtaaatttctagaagttaagatactccaaaaataaacatgactgagaaatcgcccactctttatattatctgcatccccagacaatcgtatgcgtaactaagagatggccaattagtatcaggaattcactggtgcctaagcagagagttcattcttgtactttaacattttaaatgtcactctttcaagtacagcttatgactagtttgttatgagaatctgagggcataaaaagttcaggtttatttgaaaaaaatgatttttgaatggagggaattccgaaagctgaggaagttaaaaaaaaaaaagtcagaaatattgcattttcatgaccttttctttcatgagtaactcagaaaatttgattcaaactttccaaaataaatgtttttttggcttgagactaaagcttaatcattttcggttcaaaaggagctgttgttggacttctttttgacaacatgagaaaggaaagaaattaggacccccaaaagagtactagtttttgccttaattagtgaacagagacagtggcaccataattactggaaatgaggcatccacctcactcatgttattttgccagtaaatttttgactttctcttccaaggaaaaatgtgtattctgaaacaaaaaatcccttttgatgtcattaaacctaccatccatctacgctttgtctacagggaggaaagggacatggctgagtgagatagaatatatgttttaaagcatgagatggaaatccagacagaaaggttggaaggaagcggagggtctttggaagattaggagaaatcgtgaagagacaagagaacttgggaggtcacggccactttgcagacacctctccacactctccagttccaaaagtaagacacaactcctgagatctcatggatggatgagagcataggaagaggacccaagaggaaggagttttctggaagctctgcaaagaagggggagggaaaaggggctggaaaatgttaccagtgttcattggtggtgtgtcatttagtggcgtccagtctccccagcccaccagtctggaacaaaagtcagcctccagcgtaacagcagacaccggtgagcgctccagcagatcacctccctgagaacagcatggcgcgaggcctgaacgccggccccgggagtcagaaacgctgcagggcctgccagggcccacgggtggctcctcactgcctctgaatgaactgcgaaagagaccaaggatgagctgagagaccagaggccggagaactgggctgcagtggggctgggaagccccaggcacgtctctggccgcccggggctgcgtcctggcaggaggggcagtccaccctcggcgccatcctggagagagcggggccgcgactcagacccgcaggcggctggtgggtggtgggcctctggtttcctcctgggctgggggaaggctgaagcagtctgtcaactcttcagctttgcaccgtttcctcaaaactgcccccaaccgtgggcagctgggatggtggctaggtctccactaactacacaatatgagttataaaaggttcagttcagttca

SEQ ID NO: 44695 - DNA, 911 bp, Bovine  19866880806441
  misc_feature (1)..(1): n is a, c, g, or t
natgtttcctcttaggcaatttattctggtgatgtggaatctttgaataaatagtgacgctagtatttttaatagctgtttcccatcacatattgcaaaggaaacattaacaagggctgaattcataactcagcattgtacatgtcccagatttcacaacatttatggtgaactataaattattttatatgcgaatgttctgccacttggctaatttcacttggctacatgttctccaccttatcattttgaacagaaatgatatcctgtctatgaaacatcctcgaaaactacagggtattctaatagaaccgcttcagaggataggatggcacatgtctgtaatcattttaccaagcttttttttccctttgataaaatgtgtttctgagataacagtgacaatgaggctctagtaaatattcattttcccccttcttccctttctagtccctttgatctgcttggattccagtctagcaagaacccattcttgtttcatgcttttctccaaatattttttaatactctgaaggagtatttgtccttctgattatctttttttttgatagtctgatctcaacaaagtcttccaacaaaagagatcattaaattttaccgtttttctttcaacggtggaaataaattgtactttataaaatctctttacattagttttgaagtcctgaactgcaaacataaattttcttaaattaatgcctgtagtgcatgttttccctcacaaaatgtttgttactttcctatttgagaatatcaatacagtagagactatcaagacccagtgagtctcaggcagggaaatctttttaaaatacacgtgctaagtttcttgcccctagactcaggcttaacagtgtgtgtgtgtgtgtgtgtgtgtatgtgtgtgtgtg

SEQ ID NO: 44696 - DNA, 1442 bp, Bovine  19866880978036
  misc_feature (1)..(1): n is a, c, g, or t
ncttcctgaaaagagtttgcctgcaatgttttgcagattgggcaatctcttttttttttttaaattattcttaaattattttatcagcttataaagtaatcttcagggatttctcttagtagagatttttaagtgtcctttgcatgtaagtatatgcagaaaatatttatttattatttttaaaattaatttttactggagtatagttgctttagagtgttgtgttagtttctactgtacagcaaagtgaatcaactattaagtgtccttttttcacaattttatttacttgcctattgactgtggtgggtcttcatcactatgcgggctttttctccagttgcagcgagtggggcttctctctagctgcagtgtgtgggcttctcagtgtgttggcttctctcgttgcagagcaccggctccaggcgcttgggctttgggagttgcagacgtgggctcagtagctgtggctcccgggctctaggacatgggctcagtagctgtggtgcatgggcttagtttctctgcggcttgtgggatcttccctgaccaggaactgaactcgagtctcctgtattggcaggcagactctttaccactgagccagcaaggaggcccaagggacctttttaacaagcagtcatccgtaaaacatggcaaacaattcttggtcaaagtttcctcctgattattataatataaaattatgatggtggagaatttgaagcttagagggatttgaattccatgacattttgtctccttaaggaaaaaacagtccagccctcatttaacaatgtctcctcgttgctctgagccagttcctcctcggcattatctgattttggcagattcaccaggaagacaagattccagtgcccacactcctcaatctttctggagccttatttatatctctatatcaacagagtgaagagaagatgatgtttcatttggagtcgcccacagctactggcaggctccttaattagtgtctgtgaccagttagcattgtttagattttgctcaacacgcttacccagaaactccctccttctcggctgctgtggtgggcgccagctgtctttaatctcccaggacccaattcacagatcaaaaactctgttatgagcacaaatgtctgagagtgggtatttgtttattttctgctgaagagacaacctttatacatctctgccattaaaaataaataagtcgataaataaatacccagacccaacacgacagacaaaatccggaacagctcacttccatctaaaccagactaaaagtttggttcatgtggaaatggcacctcttattggttaagaaaatactcctcttctcttggaaataataagctcattgcagaatcctgttctgaagactaaaacgtatccttgacaaagaaggaggacaaagaagcttacagtttcagacaa

SEQ ID NO: 44697 - DNA, 990 bp, Bovine  19866880991345
  misc_feature (1)..(1): n is a, c, g, or t
ngaagaaatgactgaatgcaaatagcagggcatgagttagtactgaaagcttcatatattgccaggcctccaatgaatgtctcttttgaaaagcagtcaagttcacagcaagaccaccatctactctacattctccatgatggattgtacgtgctgggaaaatgtagagatgctctcctcaaggctattttaagaactgttcttataacatggttcatcaggtattaaactaggtagaataaatataaggaatttttctttcttggagctttttctccaccggctgtcagtttgctgaagaacatcataaatcaccatgacagctctagtggctggtctagagttggtctgacaaaatgaagagttagaaatttgtttgtaattcacaaaagattgtctcatttctactccctgtggtaattgtactcagatttgcaaatgacacgtatatccaagaagtggggaaggaagagggaggttgtgttggcaaggatacacatccttctctgaacgttgacggggctaggcaagttaatagaataggaggtgccgacatgatcaaaaacaattcccactaaacagtactgatactattactattattagtaattgatattacattacattttggatgttagagcatagaatgtttttatacatcacaactcagaattctcatatcaaatccattctgcacagatttggaccacatcacagctattgcttccttgtctgtgtgtaaaaaggatgttcactggttcacactggtgttgccagtgtgtgtgttgtggcccttcctgttttcaaagactaataatagttcacttgagaatttaagatgtaccaggctctactctaagctctttacattaaatctatgtgggaagaactattataatcttcatattagagatgagaaatctgaaacattgaactttccaaaagtcatatacctagtaggtggtgggagtaatagattggacacacgcc

SEQ ID NO: 44698 - DNA, 757 bp, Bovine  19866881055988
  misc_feature (1)..(1): n is a, c, g, or t
natggaactgaattgatgaggtgatggatgctaactaaacttaactgcagtaatgtttgcaatatatacatatgccattgtgctgtagatttaaacttacagtatcaaatgtaattttatttcaggaacactggaaaagaaaatgaactaaagatgttcaggcaaaagatctcttgggaggacagatagaccgccatcaaatattagaactgtgctgtgtggaagagattagatgacgcccaaacagttccagagaaggataaatgaaagttacaggtagattaatttcaaaatttaagagaaagaattttttctaagtatcctttgtccaccagtggaatgggttatgttgggagcaccagtcaacaagctcagtagaggctggaagacacaaagatagaaagggggactgagacaccaggacagaaatttgtgtataatttaagatggctgcaaagcccagattacgatgtcccagactgaggacttttaaaaaagaaactctagggtggcgccatgtagtctgttttaagaagccctccaggtgctgctgatatgtatattgtcagaaataacaagagaggagaaaagagtttggggaatggtaaaggggggtatgcctggaagttctctgctgaggcttcagttttgtcagtgaataaggaactgaagttacctgctgaaagttgacatggaggggaaggttcaagaagagccgatgaaagttttatgtaggaaaaataagatcagattttca

SEQ ID NO: 44699 - DNA, 1316 bp, Bovine  19866881112493
  misc_feature (1)..(1): n is a, c, g, or t
ntttgcggcataaaaacaacttgtgacttcccgtaagtctgagtgaccttatcaccattctctaacattgaaaaacgttaccctcatcccctccgcaccaccccacctttgctctgtagccctgtaaagtccatagcccttgactctgtttttcagaatacatggcattggttttaagaaatgaataaactacttgtcctagatctttagagggggttctgaagctggagcacgtactgctgtctggggaagaagacatactctgctttgtgattaaaaaaacaaaacaaaaacccaactctttaaaaactccggtactcagaggggctttaaaaaaatgtgtatgactctttgttgctgtgtttgttatatgttgtaagtcacaacagcttggactttatcttctaaattcttctgtgatttcctaaagatttgacccaggacaggaagcaatctacaaagccgacacatgtaataaataatatcttatgagttttcaggcctttatatgtgttttctttcttagccacagcagatttccttttttcagctgcagtagattcaaaagtgttcccttcagcaagttcttctcgtgccgtggaagctggttgggtacatccaaagggatgatggatttctcctctcacttctaacacaaataatgcggtttacctcttttaagattttatttctgaagataagatgggagggacttccctggaagtacactggttaagaccccatgcttgctgtgcagggggcacatgtttgatccctgtttggggagagaagacccccatatgccacacagcacaaccaaaaaaatctgtaacaataaaaattaaaaaaagataatatgtgaaatgatgggaaaagagaatccagaacacttttacacattgcttctgctcctgctaagtcacttcagtcgtgtccgactctgtgcgaccccatagatggcagcccaccaggctcccccgtccctgggattctccaggcaagaacactggagtgggttgccatttccttctccagtgcatgtaagtgaaaagtgaaagtgaagtcactcagtcatgtctgactgttagctaccccatggactgcagcccaccaggctcctccgtccgtgggattttccaggcaagagtactggagtgggctgccattgccttctccattttacacattatgggatttgatatgtgtacagggactctttcatagcttaatactcaatagattagacagttgggacttcacaggtgacccagtggtaaagaatcgacctgccagtgcaggagatgcaggagatgtgg

SEQ ID NO: 44700 - DNA, 974 bp, Bovine  19866881113968
  misc_feature (1)..(1): n is a, c, g, or t
nctctctctctccccctttctgtctgcctgtttatctacaatctgtctatttaaattctttttaaacaagaagggaatatctttatgcctgtttgtaggaatattctacatccatctgttatttacatcattcgttttcctgaggtgtctccaacaaatcctggctggatgcactgtatgtgttattaataaaacagctgtaaaaatattaactgtacggcctaattgtcagccctgattaggagccaagtttatccctggacggatgcagagactcagaatttgggcttcaatccagatctgaccctcgcagctcactttacatttgattctttgaccatttaagctgctctggcttcttctctccctcccccgcagggatctgtgcacatccggccactgatctcctgactccttcaggtgggcgctgttccagcttctggaatgttcttccccactccactccctcccctgcccttgcctctccctgccacctcctaccaccaccactttagttaaagttagcagccctatgctatataaacacctttcagggacttaaaagatgagcagaaatactatcggcattgtgttaccacatgcactgataggaaatcgcgtttggacagtctgcattggaaagcatgtctctaaaaccactggaccctggacactggagagcttagacactagagagcctctatggattggccacagagagatagtccatgagtatcaggaattagatcaatctttcagacaacccttctggatacgtaagataaacgaagagttgataacacattttctgtctaataaagtgtgcaaaagaaatcaaatgagggcagaagtgagcaaagtgaaacacttgtgttgctgtcccctttcttagtctagttggagtgagcccagagtgctaatatctaagtgaggccaaggtgtttaccgggaggataaaaccattcagaaaaaaa

SEQ ID NO: 44701 - DNA, 670 bp, Bovine  19866881146731
  misc_feature (1)..(1): n is a, c, g, or t
naaataaattaaagggatggatcacaatgtttaccaaggatgaaaactccaaatcgagaatggtaagaagaatgaactggtgataaaaaaactgagcattgagaaaagtacaagtcttagtccagactggctcctgtctagagacgttactttcattctctggattttgtattcttatctgtaaggtaaactgagcgtgatttcatactgccaaataccataatgcaggatttccaggattatcaggttaaaataatcttccagtctcactccaaggtcagcagaaagctctgcttaatctccagccagcggacaatgttcacttgccctttgtaagaatctggtaagacatgagctagaatatttccttaaggaattataaatgtctacatatagagtaagaccctctatgtgcttggggctcttgcatcttgagaaggagccaccccatcctacaatttagaatcttagccttagtcacacacacacacacacacacacacagcccgaaattaagtatttaaaatattatagttgcaataacaactcttaaaatgcatgaaatataaaaatgaataaatgcctggtgtgagctgttttacaatttcttttccaaatgaaagacacctcctgtttcttttcattggtaactggcttacactttcaattt

SEQ ID NO: 44702 - DNA, 2373 bp, Bovine  19866881228461
  misc_feature (1)..(1): n is a, c, g, or t
ntgctatttcaaaacaagctagagaccatttttaaaatgatactcactatgaaagaacaccacagataagaattagaaaaatcagaaatgaaatgactgaattcaagaaagaattaaaaataaaacatcactttgacaaagaaacctaaacagaaagaaacacgagaataaataaacacaactgatcacacctaagagaagcagaaggtggagagtaaaaacatactaagaatcagaaagaaaaggcttctcctttctgggaggtaagctgttggtcagcacgcctgagaggagacttggggtgggcaggaaattgtctacatgaagggggagctgagcaaatcaatacactgaaagttctgggtgaggcttctcacaggtgagaggagagttgtaacaggccaacgcggggggcctggaacaagcactgtggtatctgcttagaactggaggtcatggggttagcccaaggtatttcatatatttaggaagacagaaatactgaaaagatacctttgtttgcatcactgtatatgccttgtaaacatactgtccagctctgttttctgagagggactggatgcaatgtcatcgcaggagccatgagcgtacaaagcatccaggttcggtttctaattattattctccactaaggggaagcaccggtcacgcaggcactgaataaatcttctcctacagtgagacactcactcccttgttcccttaaggttcagctgcttagctaggtctccctaactttatttattaacaattagacagtaattagtgtaatataaaaattttaccttaataaccacttagaagaacccaaagctgaactcatatataagtatataataaatatacaattaacatattcatatttttctgttaagatattcattaaagtttggggacagaatgttaagcatgtttaattgattctccaaaggtcagatatatcataagaatttttctaaggctgaaaacagttcatcagaaaggcctggtatctgtacataacgtcatttgacttgtccctgtctgtactggacaagtgcccttttcacaatgaatcataaagtcaattcgatcagtacaaattttttttgttttacagaatgaattctgcaagcaaaagacacagagtatgttctcagtaggttatatttgacttctaaatcccattctatggcctagttacacagaatacaaagctactgacctttgcaaatatagcccattcattttttcagggttttgacaacagagagagacatgcagagagagacaacagagaaatgcaaggtaaaagataaatcattctggccacttttcaatttcttaaacttcattctttttcaacataaatagggtgattctgattgatacaatgcctaagatgtgaaaagtgaaagtgaagttgctcagtcgtgtctgactctttgcaaccccacgggctgtagcctaccttgctcttccatccatgagattttccaggcaagagtactggagtgggttgccatttccttctctagcctaagatgtaaggaggcccaataaaaagttacacagagtaggcctatgaaatgaattccatggccacaagggttttctagcttcacggataaaattctactggcccaaggcatccatcaagatcgcctcaccaagaaccagtgtctgacaaatgctttatgggaaaacttgtcaaaaaaatcaccagatatgcccagacgtgcttcttgacatattcatttatgcattcttcaaatatcactacacgccagttacggcctcctatttatttatatcgtacaagtcctctaactcctaacccagcagagcacctgttctgagttgaatgacggattaaaaaaaaaagaagatgagactaccttcaagggattattaccacttccttttttttttttaacaaatatcactcttcttccactgaaaatgctgctgctgaaaataacttgttatattcacctccctcttttcatcattacagtttgtaagggaagagtttttcagaagggtgaactcttcaactctattctcagcaccatgtcctcttccacggccccaccgataactccctccaccagcaaaagggtcagtgagctcccaaagcataaactctgatcttaaccctgcaaccaccgacaaagctaactctactctcttcttttcctctaacagcaaacttcttccacgcactgcacctccacttgatctcatgctcattcctaactcatcgtatcctgacttctgacccaattatctctaccaaaacagctcttaatgatgagcaaggactttattaattattaactccatatgctcttttttattccacagtcttgg

SEQ ID NO: 44703 - DNA, 872 bp, Bovine  19866881250368
  misc_feature (1)..(1): n is a, c, g, or t
naaattgtttatagatttgaaaactgtttggggtttgtgattgcttctgttgtttgcctctttgtatcgtctcgtttttcaaaatttaataaacactttgcagaggagcaaaataattggtcacacacttgtgagttcccagatttgttttacatgtgtatgcaatacagcgtaactcataaacatgttcaagcctagtacatcacaccatctctgatgctgtggtcgagaccaaaacagaactccgggtgagcacccacggccccggaccacgtcccctccccaggacttttgaccacagtcctcgggggccggaccctggcctcagtgacacgtgtggtcactatcagggcccgcggccggaagctgctgtgacaggcttgcacagagggcagaggcctcggttcgggtccattagtgttggaggctctgcccaggttgtgccgcagaagggcgcagcagcctcttcaggatgccagcaggggcagtgacctgtctgccgtgttcctttcacctggccacgctcctgcgccacagtgggctgcgaggcggggtttgtcttggacccacttgtaagataagttcgggctctttatctctttatctggggcctccaagaccttcttctttcccctgtgaaccatgttgctgttgttctgttgctagattgtgtccacctctttgcgaccccatggatggcagcacaccaggcctccctgtccatcaccaactcctggagctcactcaaagtcaggctccatagctatttgtaaaacggaagaatgaatgaataacttaatgaatgaatgtctctctgagccaggagggggggtctcctaggagaggaggcaaggactggcaggaagccctat

SEQ ID NO: 44704 - DNA, 1812 bp, Bovine  19866881270650
  misc_feature (1)..(1): n is a, c, g, or t
ntaccaaaaatagcctgcatgtattttagttttaatttctagaggctgggaggggagggagtgtcacggtttgcttcaacagtgaagatacactgcatgccaaagaaatgcaaatacaaaaattaatataggttttaaaaatgataacagtagtattttgaaaataactcgtatgtctaaatcaataagaggtatatataaagttatttttgttcttcctaggtagttggaaaaaaaggagaaagccactaaaggtacagaagacactggaagaccatgttgcaatcagagctacagctcctggataattgcttgattctcgccagagactttcaatatttcattcatttccattaccaataaatcattgcttttgttcagatggtatcactagtgtttctcttgtaaccttaatacatgcagttgtaaataaaaataactacttttgccaagcttaatttttgttgttctaaataagtattttctctttccatttatgtgaaaattggacaccttctgattttagcagacttcagtgtctgatagtgtgttgatcaaaagcctgtttccctccttagaggagcagaagtgctttaggaactgaggcgtgtgtgtgcgttcatgtgcgcacagcacgtgattctgacaggtggacttggaaaggctaactgtgttagactcatagtttgttcaacagcagttgggcatctgggctatagaaaacacccacattataaactaccagaaatagattagtttaacgagacttaactgttcccgcctaagactgtcagagggagtacagatttgatacccttttggatagacttaaaacttgagtcatctttatcaacgtatgttgaaaggtatgttgaaaatatatgttgaaatccaacagtaggaaaaaataaaagtactgtgcattcatgaagcagcaggaattgatatcttttaatgaagtatttattattttaactaccaaatgatgcagtgtaaatatacagagaacttggtttaaggttgaaaatgaattggccacgtgtatgtttaaaaggtcttttacaaaaggctggcaagaccatctgttccgtatgacttaagaatcttaaactgtaatctagaaaggattaattttttaatttttctatttttaaaactaaaatttgatttttaaatttctctgagtattttaaaaattcagtgtttgaaaagaatatataagacttaattttgattcagttaatagtaaatttgagggcctatttgtctaggactatgatcaagatactgatttgcctttgagacaccaatgtatttatacgtgtttctgaaaaataaaaattatgtccaagtttttgtggtaatcactttgtgaaaccctagtgtcgctaagtaatgtttagtttctttgtatggaagcacatgagctggtctgtggtgatgtctacgtagtatctgtatttcctgattatgttgccttggatcaaatggaaacagaaaggcaagaagtaaaataaataaaagtttataaaacactgcttagtagagaccatctcagattaatcatgtctggaattaagggcgagattaatatcagaagttttgttttacagtttgtacatttaacaaaacctcttcgggtaattgttgaaactgcctcaccttaagtattgctgacctcattttatttatacttaccaatttgaaagtccagtgaaaataatttcatatttgtacaggattggacatcagatttatattgttcatgtgaatttcctataactcagttgattgcataatacaaacatttca

SEQ ID NO: 44705 - DNA, 821 bp, Bovine  19866881323785
  misc_feature (1)..(1): n is a, c, g, or t
nattttggtgtttacatagattgttgtgtgtttgagcccctcagtctaatgacctcttgtttaattaatttaacaacttataatctcttgggaatgaagcagcgatgtttgcattgtttcatatcctcatagcacccagtaaaagccttatctacaacagttactcagtaagaaaaagcactgaagtgtctctaagttcagaaaatacaactgtatagtataaatgtcttcaacaaggtttttctagcagtcaccagaggctaatcctacacctaaaccttaggttgatacagctttaaaatattgaccctaatcctcctatatataaatagtattttccaaatggtgggttggtgtttttttcccactttttctgccttagtgaggttcccagctggcagtagtggtaaagaatctgcttgccaatgcaggagacacaagagacttgggtttgatccctgggtcgggaacatcactcggagtaggaaatggcaacccattcctgtatacttacctggaaaattccatggacagaggagcccagttagagtccatgggattgcaaagagtcagacatgcctgagcaaatgagcgcacctgagctccataataaatacatacctgcttccgttcttgcgcaaacggaatgaccttggaccagattaagtccctttgggactcagtttccttatttgccaaattaaaccattgaattaattcatctctactgtctctttcaacttgaaaatgccagttatttatttatttagagtactcttttttttttggctttaatcacaacaggagtggggtatacaaaa

SEQ ID NO: 44706 - DNA, 1542 bp, Bovine  19866881416624
  misc_feature (1)..(1): n is a, c, g, or t
ntgctcctaagggaactctttcttcaatttcattcatgataacagctttcttcactctcctctctctcctaatcatccatttcattggtctctctctctctctttcacacacacacacacacacacacacacacgaactctgcaacacctttagtccttgaagctttgaagttactaacatgttctgaaaggaaagtaatttttttctgttttaccacccagcctcacaggtgactggcctaaagggagtttgttctccatcccctgcttaatgtggctggcttaccacagcccgagcttctcagaattgaaatcacatatggacatttgggagggatgagagcttttatgaccagaaagaattgaagccattgtttcgtcttcctcctctctctctcaaagtggggtcagaattgattgtttcctctcacctgtagtcactgtcttattttagtgcattgataatatctagacccatgttgtgttcaagttttctcaaccttaatccctagaaatcccgtagagtgtgtcaaattagaactccattcccacaaacacttcttcacgttgctgtgcagtgaattcaatacattccttagaatttaaggctcttaagcatttttgctgaagtggatcgatgtcctccttgccccctgcttttggctttcctctgcttcttccttcccaccgtactctcctgatatatttcaaatccttatactctacatccccccaaattctattggtttcaatttatgaacgatctctgtaacatggctcccctggagaaggaagtggcaacccactccagtattcttgcctgggaaatcccacgaacagaggagcctggcgggctatagtccatggagtcacaaagagttggatacgactcagcgactaaaacaacaatgacaacaataacatggccatcccctcttttatacaaaacctgatgttttggctttggatgctgtaaaacttggacaccaagaaatatgcagaaatccaaagtctaacaacaaaaaaagttactagatgcggatatatagtatgctcttctgttggttatgaaagtaaattatttccttttctttgcagattctacccaaatagcacagacagcaaacaatgtgaaatgatcaaatttatcaaatatacataggtacgtttctgactgcatgcaggcaaattaagtcagaatttcttaattgatgctttgttttttgaaatctccaaaaacagcaagcagcttttcttaccaaagtgcatttgagccagtcctaagacggtctagaacccttattcacagaaaccccaaaatctctaaataattggcaaacatttcatacgtatgcatgcctactggtttatgacaactgacactccttgaggatatgggaggcatgtaataaatatggttgtataatcatcaaagccacagttctaagaatctcctaccgacatgatggataacatggattttcaaagatttgggtaaaaaactgtatgtattttctttctgtaggaacaaacatctacatg

SEQ ID NO: 44707 - DNA, 937 bp, Bovine  19866881466039
  misc_feature (1)..(1): n is a, c, g, or t
ncttgagaacagcaatatgccccagtttgcccatctcgaaactttcttagatggatttgtcaggttgacaaatggcccccactcagggcagacccggcagacgacaagcacaggcagggctcctgcccgcacctcccgtaagccaactgtggaatgcagggagcctacactgggcagaaccagcggactaaaaataccgcccggcccatctctctggggattcgcttccaggccacaggggccctgagccctggccctgcctgggggaagcgcaggggcctccatccgccccagagctaattgccaaggacccggccaggcagttgctgggccccggctctcggtttgtaagaaccttgcaaaggcagtggttctaacttcagatcttctctccaaactttgatcttccagcgctgcttggctttaggcaaaacataaacttgagagctgcaacatgtttttcaaattttattctcctggcagttttagaataaggacaggaattattttcaaatgagaatttttgactgcataacacaggcttccaaaattaagcagaagcacatggtggctcttattattaaatttcccctggaaaacaatggttcagattatgggagggggaagcagtttgataaaactttgaaatgtgaagcctaaagtttaaaataaaataaaaaatagctctggcctttttttttttcaaagatcatcacagagtttttccagccctgccattattattctgtatctgccaatggctcaaaaattgaatgcttggggtttaaaatataaatgacagtttgtcaagctgaaaaccgggtgctaaaggggttcctgaagtacagagaataatttgggctgcccgattagagtgtctccccagaaagcatgcttttaagaaagtaaagctagagcttaactgtattcctgtctg

SEQ ID NO: 44708 - DNA, 1493 bp, Bovine  19866881598475
  misc_feature (1)..(1): n is a, c, g, or t
ntatcgtttactctgactcctccctcccccaaccttttctctcttataacaaacgatgaaagtgaatttccttgacttagtgccaaataaagtgttgctgaaggcattactgcctgacttaacactttgtcactgaaaagtcctctttcttccaggcggcttctttgcctccagaaccgaagtctagtgttggcctttcaactcaggtaagattgaaaacaatccttatgtggcacagtctgtgtcatctccatgttaccatttggtgtcacgcatcacgggtcacatcactaatttgatatgtagttgttgtttccaccccttttgcgtcctaagttgtgtccacctcttttgtgaccccatggactgtagcccgcaaggctctgctgtccatgggatttcccagacaagaatataggagtgagttgccatttccttctccaggggatcttcctgacctatggattgaacatgcatctcctacattgcaagtggattctttaccaactgagccaccagggaagctctttccttacttttattaatgtccatattcatgctttgagatgagtgtatttctcatgagattgtcagctctacacaaataaggcttttattagcccttttgtaccgtgctttgtatatacaattagaaataatataatagaattataagaactctattttctgagacatgcacactttcagactttggtttactgagtgagcatggaccataacatattaacaatgtgatgtgtatatgattttagctagtgctcagtatgtgtgaaattataatacaaaatttgaatggaaaaatgctaaggtctcactgttacctgcttcatgttagaaaataatatcagaatattagttccaatatgtatagcctacatctgatagagatcctttaatttttgtttctcaaattaaaagcattcaattttctctagaaaatgcttgtttctctcaacctcattatgaaaacattttctgcatactttgcctaaaattaccttgttttttgttttaattacacaactccaaatcacttttcctcattagtatttgataattataagcaaagaagcaaatataaaaacaagaagtccatgagcagtgcagtcatgcattttctccttctctctgttgatagcactgatgaagtgtatttaatttcaatctgctgaatgaccacattcataattcgtgttcatttccattccaggatgatttctttccagtttgattcaatatacataatttttccttaagcatacatgtccacattcctttgaacttgtttttgtctggggaaggaggaaagaaattaaccctcattttgtatctccttttgacacagcctgtttttggcacttgccacatattatctcatttgattctgtgtgcaatcttgggaagctggaattattattcttattctaaagatgaaaaactgatggctagaaaccaacgtgccaaagattgtt

SEQ ID NO: 44709 - DNA, 1348 bp, Bovine  19866881631801
  misc_feature (1)..(1): n is a, c, g, or t
nctgaatgaagtgatgagcatggatttgacaactgtttgcgaaagacatgaccttcttggaatctgattgtgatgaacaggtaactgaatgcttagggcttgtagagattatcagtatttgtgtccacacacgtttccatctcatggtttcatgtctctcctttccagatgatcacttttttcttactttttataaccacctctgtcctctgaccctgtcacctcaccccctttcttcgtttgtttatgccagctgcgctgcagagaatcacagaagtcttggactgtccggaagcctgggttgagccttcactattcttaagtccttttgttcattcttgagctgccttcatactttctacccacctaaatgagtacattccttttatgtctagccctcactcccagtgtaaacctgttgtgtttccctgtattttcctgcagtgttgtcacagaggaagtggggtagtgtagttctgccttgatcacgctttctctgtcttagctgttatttaaaattttattgtcttaaaaatttttttcttatttaattactgtaccattgcctctgctttgtccccattccagtatatcttttatatgttcacaaaagttacttctctaaaatataaattgtatttatattctgatttcttaaaagagtcagatgattcttcagtggcttcaggaagaggatgtaatatgcttactaactttatctacttccagctttctactctcatatcctcttcacctatggttcaggtccctaaatgggtcatgtttatctcctgacacccaaatacaggtcaagtattaaaagtacttacataactaaagagagtagtctaagtattttcttaagcaaatagaccacagtgatttgaaataaatctaaatgccatcttcctttgctccaagcagaactatcttattttattgcttgaaaataccgccatgttgtgcaccttgtaaatggtgccctaaacgtaatgtgatgatgtgtatcagaagggctggctacagcttccctgaaatcttcctgctgaggaaaccttcttcccagggtggaaacgtagaggtatcttcatcagacagttttggtggaaggaagattgagtgaatgaatcagagagaggcgtctcagcagttttgtatttcagttccctcgggtggctttccagattcagtgagtcagattcatttaggatggcagtttagaggtgactgatagagctgtgagtcctgttgtcttgagttttgaatcaaatagagtccatttgagatctggtctttccacataacctgtgtgcatcgtctccagattgtcaagtgacatgggtagata

SEQ ID NO: 44710 - DNA, 1291 bp, Bovine  19866881639347
  misc_feature (1)..(1): n is a, c, g, or t
nactgagcgactgaactgaactgatatatccttaaaatccatatatatatatatacacatgtgtatatatctatatttaaagtatacagcttccctggtggctcagatggtaaagtatatatatggatttatatatacttaaaaattgttccctaagtggtaaaccccaaacctgcacaatgatttatttctaattaacttgctaataaagagacattctctgtcttttggcaaattttgacccaacaatcggctggatattgtgtctggacttgactccagcttctacccaaaaaagtcagtgccgagtctcctgatctgacattttgcctgggaacagaaagactaaacataactgcagttctgttgactcctggagtgaatcaagaaaatggtggcaatccattcaactttctgccatagattcatttgttgattcatttataataaatttggagggacttccctggaaattcagtggtttgatctccttgccatccaagggactctcaagaattttctctagctccacagttcaaaagcatcaattcgtcagtgctcagccttctttgtggtccaactctcacatccatacatgactactgaaaaaaccacaactttgactctacggacctttgtcggcaaagtaacatctctgctttctaatacgctgtctaggtttgtcatgacttttcttccaaggagcaagcatctttcaatttcatgtctgcagttactgtctccagtgacagaactttagctaaactcaaaggaaagtgatttctcccggaggaaacagggatggctttgtatggctagcttcacattttgggccctggcagaggagttgccccaggaatctgggatgtggggcctttacttagagatgtaacagtgctcctgccacactccactcgcttagctagtgccctggcccggagccctgcctgcttgaaggactggacatggaactgtgcaaccccaaggtttgtacaccgactcttccctctgggcaactctccctgatgcacacaaagataacctatgccctcctggagctgtggtgtgtgttacaaaggagacagatgagggctttcctggtggtccagtggttagagctaatgcagggacacatgttcaatccctggtccaagactgttcaacatgccatggggcacctaaacccatggggcaaataagcccatggagcacctaaacccacggggcacctaaacccatggggcaccaaaacccacggggcaactaagcccaggagcacctaacccacggg

SEQ ID NO: 44711 - DNA, 788 bp, Bovine  19866881770203
  misc_feature (1)..(1): n is a, c, g, or t
ntgcttcggtcacctcatcttgcgtgtctgtaaacgtggaagcagatcagaaagcctgtctgctctcaaagcagagggttccaggctgggagctaaaccccagatgtctgttagcatctacaagctctgtgggtgaagctctgtgaagctcttctgcaatccaggttgaacagaatcgtgggaggcaacgcaacctccttccttgcccaagggagagatggagcaacctctgatgaggaacactgccgctccacccctgtgtgatcactcccaacttcgcttcctgttccctcctgccctctgcttacagaagggtgtggtggggctggggtctgattgctctttcccttgttaacacctattgtttttggctgggggcctggtgctgatcccatggcaaaagttgaagccccactccatgttctggtatgctaatttttacttctacttccttgcttaacagtgagattggacatgtttcttgtgtttcttaatagtcttatttctctttttatgaattgcctgttggcagcttctttcttattcttctgcctcttctcttggtctgttgaagctttctccttgtgaagtagtctgaccagagttctctagcttatatcacatcacagccccactggctctgaatgtaacacaactgctttccagttgcagtatctgcctttaggggggtcagtattaatattcaagacacaatgagctaagaaacaggatacacagatccactatttgatattcatcagctggtttatgaatttatgctaaatatg

SEQ ID NO: 44712 - DNA, 1161 bp, Bovine  19866881989803
  misc_feature (1)..(1): n is a, c, g, or t
ntctggcaggtgacagtccgtggggtcacaaacatagaagtgacttagcactcaatcacacgtaaaggtctaaatgattgacagaggttgtcctggccgaacttcacactaaaggttttatgactgatggcaagtgggttcctgttagaaccttttctgaaagtgcagaaaagatgaactgagaaagatgaagataaacgtatgtcaaagggaagctgtgtggccctatgtggagaagagggctgagaaaggggagacttggcacagaaacagtaatcaacagagagcgtcacctacctcgttccaggcctgccctctctcacttactgatttgactaagttgaaaagactgttttgggagggctgttagaatcccctttccattctctcttctcatattcctgtgatggctccccatgaaccctagaaataattgacactttcaccaacttccagcagcctggtgtgaatttctcttttctcaagtgctcttaccttcccgaacttattttattcatctgcacttattttcttcatccttccctcttgtcaacctgtgcaacccaggaaccagagagtggtttcaggcagcaaaccctatgcttgacatagagttcaccaaacgcaatataaatataatgtgtaaggataaaatgcattacctctctatataagacaaatattaacttgatattacaccactgtcttcaggatgctttataggaattaattacatgatgtctgcaaagcagtttgagaacctccggggaaaggtgctatataaatacaaggtatgattatttttaggagcttccactgctgacattcagcatagcatgaaagaatgaaaaattatctccatgttccccgtcgtggtaacaacttcagcttgaggtttagaaaacccatttatagaaactgctaaaattaaaataacgcattccttacatgagctcatccatggagcttcatctatgagagaagagatctttctaggcacagactttttaactttaaagacgatgactctgtagacctaagtcagaaatttagaagtttacaatctttcacccaggttctcgggcctcctggctccagtccaattcccggcctccacgaagagactctgtttggatgaatgtagacttcaccactcctaaa

SEQ ID NO: 44713 - DNA, 716 bp, Bovine  19866882176402
  misc_feature (1)..(1): n is a, c, g, or t
naatctccccagaaggatattgccttaggacttgggatcccccaaggctgtcctttcaagcattctcttcctttaccagtggtctctctgctttgcttggcaactcaattctctcctcgttaacaagctacgtgatgaaggctggaggtacctctgtttatttgagaaaaccaaattagttcacctttcctaaataactatcttctggacaacttagctcaacacttcttgactttaatccacagaattagaacatctgctttaaattgaagatgtacagagggaattatacctactccatctagaaattgtttgcttctgatgtcattcttgattagatgattttggaattttgattgcttcacattagatcattatgatttcaaaatgcagcttgtaaatgtattcagttcatcaagggctataaatataaactacaggcctttcctttgcgtgggtcctcttagaagcttgtaggttcatgggaaaccaaaagaaatatcttcaagaaaaggtgagaaactcctacattaaaaataattttctgaacatctggcctcagattcaagagtttgataatcgtgtgctttctctggttttaaatttaaattaatgactacagggtaatgaaggctgactctttggaaaaaaagatgtaaaaaatttgaggactactcatgttcagttcagtaaaacaattacatgattaggtaata

SEQ ID NO: 44714 - DNA, 2442 bp, Bovine  19866880355641
  misc_feature (1)..(1): n is a, c, g, or t
ncttgtccctttgtgggataccacgttttcatagctggttaacacaaaatccgcatatggcccttagaattctcactgtgatgtcggatgagtctctgggtctgagcgccctccttggcagagaggccagggtcagagactgtcaacatttacgactacagcaatgttaaaaatgttttcaaccacattttttgtttggtgggtgttcttgctttgttagattttatctggttgattgctttggtaaactgtgtgtgtgtgtttggcataaatgtggcattttgacatagcatatgttcctaagatatttctcacttgtgttgacattaaccactttataggaattgcctgaggcaccccgcccgtacacaagtttatctttcagaaaagtttacaaaatatgttaataagggtagaggaagggaaggatagtctaaattgaaagtcatctatttaacaagtgggaggataaagggcctaactgacaaaacagtctaaccagcatcatggaccagaaatagcaattatcaagtacattcgatagccacaaacacactgctgacacagagcaaaatctaaaacctgagcttttcagaataaactgcagtttctgaaaagagaccaaatttgtgaaactgttaaaacctagattagaatagctctctacagagaaggcaatggcacctcactccagtactcttgcctggaaactcccatgcacggaggagcctggtaggctgcaatccatgggatttcaaagagttggacacaactgagtgacttcactttcactttcaccatcaattttgtcaaaagtaataaaaatcctcaagcatctttaacttgaggtaaataatccattctcaaatggtggaaatattgacatgcaaatcaatgctattaaagattgggctacgaaagtcctagctgaaaacgtacaggcatagtaaaacttaaagaataaaggccattactttctaagccagaaataatctgtgactgccagctagtctaatgtattgcatttggataactgtggcttcatcgaagcttttcaaacactgcccattaagttgggcaacaaatgtaaacataacctcagtcaagcagacttcttgccttcctgatttaaggacttatctcagaagttattgcagaagtatggcaaaattaagttgaaaatagggatgtaagttgaagaggaaatattcttttagtaagtggtatgaggattccctttgaggggagagccatctttgttgggaaaatctctaatttgaagagaggcagaaacagtaatacccaccaactatgctagggtttcctggtatttctcagactctcaacgttagtggagccatgtgggacgttttctggcccgtgggccatagacctcagcagtgaccacagcactgtgtgaggctttgaggtagtagcttgcaggagtgcttgatgtcttgaaatggctgtgctcctgtcacctggggtccctgagtgattgtggagtaggtttccttgataacccatattggacatccaccaagagttggaggtaatcttttgttgtgatagcctctaagattttataattagatttgttacgggagctttctctcacctatcctgttatatacagatcttgaaaagcctgggggtgcacagaactaatgtgcatgaagaacttggaccttgttctaagaaaagaaaagaaagagagtaatataggcaagaagtgaagggaggctgtgaattatacaagggaatccctaccctataacttccaaatctcgagtaaatgctacaaaaactcattaatacttgttgtgagtagatgatcagtaaagctttgcaccaggatgatgcaggaatagaagaagaggcaatacacttgctctcagaagcaatatcacaatagcatggggaagcagcagaaatcttgggcaggcttgtgagatcttcaacccatgaaataggcgggctgaggccctcctgtgtccaactcaagggtcaagggaagcctgagctttcttgtttttgtttgggccattaaaccatttcttatagtcacaggaaaaggtttttttactattaaaaaattactttcattctattcagtaaaatccaggcagtcttattacataatcaaagaatttcaagatctcaagcttacaaaaaaatcagtggtcacctactctaatccttccctttccctctttctggtctaatcccagaaggtggcttctgctctctgcttggacacctccactggcagagaatgcactctcccccaaagtagctcattccatctctgtgtggctctgacagtccctaaattctcccttacattgaactgcagtccttctctctgccactttaacccagcgacatacaaaacaagtctaatctctcttccacaaaatagggcttcaactactctgacag

SEQ ID NO: 44715 - DNA, 923 bp, Bovine  19866880376750
  misc_feature (1)..(1): n is a, c, g, or t
ntggatctgaatccactgggctgtcttttacattcctcaatgttagggtgagtcaaaggcatattcagtaaacacataattttcagggttgtatgaactcttggactgtcacacttcacaatatatacatgcataaggaagcacgacactatcaaagaactaggatagtttgcgggcagatgatgacaaaaatccttctccctctgtgcagattgtctggaaactgcagccttcagggagctctatggccatgccttatggtcaaccttgtgagctacattatcttcacccttttggaatacctaagttgttaactgtcatggtcccacacccatacaaaccctctccaggcaggcctcaatgcagaagctccgtgaaatcttttgctcatcttaagctatttttaaatgacttataatgaaaagttttaaaatcccgactgttagcattaaaaagtaccagggcatgctgggaatcaggggcatttagtgctgctgccttgtataaaatgaaatcctaaatggtttgtcctaatggtattggcagatgtggttttatatttttaaatttcttggagttgctggaaaggaaaagagaacatatagatatgcctatgcagatgaaatgacatcataaaatacctgactgggaaggaaggggacttgctgtggctggattacttgttactaaaatagggaccaagagcaaagagaaagtgtatcatctgcaactgaatgttttcaattactttttactgtgctcgatcattctcactgtaacacatacattgggatgaaagattattttacatcctaagtaaaagaaatgcacatgtagtttttcctctgcaaatggagaccctgttgcctctcaccactttgaaatctgacaaatttgcagccgtacctgtatggtcaccaaaa

SEQ ID NO: 44716 - DNA, 1294 bp, Bovine  19866880433649
  misc_feature (1)..(1): n is a, c, g, or t
nattttgttttaagactggctctaagtgaatcataattgctgacaaacaccaaattcacctttgtttaccaatgctgccaattatacattctcaagtaaaacaattaaaatcccaagagactttcctggtggtccagtggctaagactccatgcttatactgcagggggcatgggtctaacccctgatcagggaactaagatccagtatgctgcagggtgtggccaaaaataaaaacaaaattccagaattattgttacttcttccactccccttcactcagcaattttgtctctttctgatattgccaattgtctgttcatgtaatctttctatgatattagtttcttcaactccattctttgggtcaggctctgatcatctcccccctggatgattacaatgttccaccaccaaggttctagttattttctctggttttccctgacttaatctttgcaattattcaaaagctacagacacctcctctggaatcatcaggtgactcttctgctggttggaaggaagatggaggccccctccaagcacagcttcttctcattaccccctgtgtatttcctggactaccatagaaaagctgtgttgttccactgaaaccagaacactaaaactaactttcaggaaaaatgtttttgttttcagaattttccaatatggaaatggagcaacttttatccagacaagagtacacgaataacctttaactcaatactgccctgaatctgtcacttctcaaatgatatccagccatttgtattttgggaaagactgtgagttcacagcctcccttgtctattttaacttcttagaaaaactaatcttttcactagccctttcattctacatcaactagttctttcactgttaccattctctgtccttctcagcacaagctctattatttgattgccatgtaggaaacatacctcccagatggtcagatatggtaattcccaatggtcaatgtgaaataaaacacgtggctcccaaatcttctttttgttaaaaacttccactgaaatatcgaagcaactgcaccgtcgacagtagagactacaaatgggatcagtcgctttttaaagatcagtaagtctctttctcttccatgtctcaaaaactcccattgaagtagacggtaaaatccacttagatgttttgagacacacgtaaagggtcacttcgctttgcaaagagaggacatgcatgcagtatctggctacgtgaaaaacttacatgaaaagtccattagttgtccatctttcttatttttctcc

SEQ ID NO: 44717 - DNA, 2643 bp, Bovine  19866880437016
  misc_feature (1)..(1): n is a, c, g, or t
ntggaagacagggtatacccccataaaaaaacttaagaaggaatgccctccttcttaccctcctcatcccttcattccaccacacaagcacacccagagcaaggacatttgacccaggatcagccaaacagacaccctcacccagactttgaatcatggaaacaagagatccaaggacaaagggatagctgattggtggcccaaccagggacgatgtggtcaacagccttgacagtgtgcggcaggcccaatgataaggagcacactcacccctgcccctgccaagtttagataaaaatgtctttgataaggtgggggaaagtggctcttttagcattaagatgttctacaattatgcaaaaaggtagacaatcttaggaatatttgataaggttcagcaaagagacaaagactcagctagcatattaacacaccaagattatgctccgcgcggtcagtcaatttttgcaggagggaggtttgcttgtcttgaagatgtgaagatgtttcacatctagtatgggcaatgccactgtttttgacccccttctacttgtaaaacctgaaaacaattctcagctcctactctaggtctatcaaggtaaaatcagatagaaataaatgcctggacttaataagaagaaaaagaagcagaacatggggtagtaaaagaaaagactataggaattagaagaaagacaaaggccaccgaggcctctggaggtggacatgggtggatgcagaggctgctcagtgtaaggaggggctgtccattcccaactctgattctcgtgggagacactgagctagaaacaagctcctttctttccctgccctcccacattttttgtcctcaggagcaggaaggacttcagtgactgggagcttttctggcccactcttctacaatgcagaatttttgtgggactcacacgggatcttgcccttcaaaggaaagatcaacagattttggagataagttccattgagaggtatgcgttaatacttttggctaagatagtgacaccaaggctcatgctctcaaagtactaggagagagcaaggctttgatgatctttatagtctggggcttgtctggtcggtcagacagtaaagcgtctgcctacaatgcgggagacccgggttcaatccctgggtcaagaagatcccctggagaaggaaatggcaaaccactccagtactcttgcctggaaaatcccacagactgaggaacctggtaggctacagtccatggggttgcaaagaatcagagatgactgagcgaattcactttcactttcacagtctcttctagctagaacattctctgttctgtgaatattcgtacacacccttcataacacagcttttatccaccgtggctctgccgcttcttaggcaatcccttaacctgtgtgtttgtctcagtgtgtatctgtatctgcaactatgtattttttttctacctatctatatggtatagcggacactatgagttactacactgtgtctgttccccttcttttaaacatacctcattccgttctggtattctccatctacacagccatgtacctcagggcaccctgaccccagatccagaaacagacctgattagcgtaaaagtaatcctatccctcttgtcaatgaccagttcaagaaatgcatgcaatgtaattctatcctatgaggtatgaagggaagtctgcaggagggcttttggaaaaaaaaatttcacactcctaagacagagagtcacgggggagaaataaccttccattttcctctgaaaatattggagttttgcctagaactactatagtcatcttcttaccagcttgaggtaagacaccaatgacagcatttggtagaaataattgcaggtcttgatgacaatgttgagctactgaaaaaccaaccctgaaatctgtccctagctccgacccaaaagaatgtatttgcttgttgttaaagacatttttgagttgaggtttctgttactatagcctaatgcaatcaaccaaaagagataacactatcatattttaagggcccagagaagtaaaatacattaaaatgtattgtaaaatatttagtataaaaatcaaacatgatttttatcatgaataaatgcttaattctgtcttccacaacttcatgaagttttttcaatatccttaaaacaatttccaaatataattcaccttatttcaacataaatgagggtgagaagatggaaaatgggaaacagatgtgaggtgctctgtgacaaccgcaggactgggtaggaacggtctggtactcctgttgctctacttgataggggttctaccctggcccttcaacccaaactcatcaaactagcctagcttttctcaagcagtttactactttctttgtgtttctctgtgctattttctttccgtgctccctttaactccctgttgtcatcccattgactggaatgacactcaatagcaaaggcaggcataatcaatgtcaaaatatagtctgaaatcggccctggactcttgcagctgcgccactttctaattcacttggaactttatggatggctttctctctcccatcacagagcaaataacaatgctgaggagacagagacaggactgcactctgctc

SEQ ID NO: 44718 - DNA, 2811 bp, Bovine  19866880519581
  misc_feature (1)..(1): n is a, c, g, or t
ntcagactccctaaccagaggccggttgccgctggcagctcgctgggcccacgtgctctgcgtctgcaatgtcctaccatcaccctggccagtgaggcttcaggcctaggacctcatcaccagcccacctcctactccaagaggaaaggccctccggctaagtgcccacagttctgggccagcactactcttatagccagattttattctttatttgtgtgtgtgtatgggggtgatcttttgagatggttttgagctgtcataggtgcttcactcaaagaaatacggagcaagtgaggagagcaataatgagggttcatttgggagtggatcaggtgttgggaggcagtgaaggtggctgaaatctggatgggatgccacaaggtccctactgtgtcgctctcactactcagcaacgttaaagagcatcacacaacgttgagcattttggagttcttaggtcagtgcagaagggctggagcttcaccctgggtctgatccacactcaaaccaaggagactgggactcaggagcacagaaggcagtggaagaacacagcggaagtagtggggaggctttcaaattcaactcctggaatttgggttctgtccaagtttcatcaagatttccagagaaacacagaggccccaagcaatgaagagtccaaggacatttcttgtagtggcctccaaaattagcagaagtcttggatcacagagacccagcaggaaaaagacagtacacttgggttatgtgaggagcgtttaataaagagactatgtaataatacaaagagcagcacggagatcctacaagttcagtaacgggtgagagttgctgcgagagcaaggacagtgagaagttgctaaaactcagagaaatagagagagctgtgtcacggtgaggctacctgggggaacctgggaaattcagttgagagctgcagccagcccccagtgaccccacaggaagggagctagacgaacaaatatcccaacctttctccaccctccctccaatctcctgtccactgtccaaactcagcgagaagccagaggataaagaaacctgtccatccagtcaacacaagtcaaccccctggggcacaatacaagatgaagacttgtattcttcttgggtggacactgggcctcggggggaggaagagagagcggaagatgtgctacacaactctagcacattggttttcaggcagaaataacaatgaatcggaaaggatgcacttgtacttaatctctcctatttatcaagcattctgtaccccaaacttcacaaaatttttttaaaaaagcttctgttcaccataacaactctagcggtgggggcggggcagatattggtattacagagtgaaaaagccaaggttcagagaggttaagaggctggcccaaagtcacagagctggtaagcatcaagtttagtgttcaaacccagaatgcacacagagggaaagggaggctttgggttgatacataaaatcctattttaccacttctgatgagaaagaaaaaaatgtacttcttttacttaaatagttgttctactggcttagagtaccttcataagagattaaccatttcagttttcaacagagcgcttttagtaatgaatttacagaagacccggtatgtctagcatagaagtgacaggcactattaaatggaactacaagggccactaagcatctttggtttaaaaggcaatgtgattttttttaatatgaaattttatttctttttttggccacaccctctgcagtggaagcgcagtcttcaccactggaccaccagggaagtcccaaaattttaatttttttaaaaggtttaagaattgcaaatacaaagtgatttctcaatcacgcatacattcatatttctttctcagatgagacctgcctcctgcatcactcccttcaccaggtcctttgaaggggacaaaaagaaggaccccctcatctccatttcctttaaagacaagcaggaccgtgcgtaacacttgagaaaagcaaagttctcctttataccacagctggtctagaaaactggaatgagttggaaagtaaatattagcactgaactgcagctggcagcgtgtttacttttcagtgcatttccttctgaatcaaaagaaattttacttttgaatgaattgaacaaagcaccacctagtggtagtcggaaatatttaaaagtgaagagttcagggaacacaagaaaatacggaacgaattcactatcggtttactttaccaggtaactttcaatattaaaatattgaagggtttacatagttggggttggggtggggggctataactgtaaaaagtcaggcagataaactcctgttgaaccaagtatccctgaatactcctttcttaatgcacatgctgtgtcatgtacacagccaatggcacacagattctacttgtgtagagaaatacaccctccccacatttcaaaattttcatttcaaaactagcaggctacctgaatgggaaggaagtccaaaagggaggggatatacgtctatgtatggccaattcatttcgttgtacagtacaaacttacacacagttgtaaagcaactatactccaataaaaattaatttaaaaagaaaaactagcaggctatgatcgcttgcttcactagatgtgtcaataagcctggcagtgtcccttctgtgcgtagcctccagtcacctccactcttctcaaatcttgatccattcacccgtctctctgaaggagctgctgtggcctggacttcacacagaagaggggagccgtcaca

SEQ ID NO: 44719 - DNA, 2244 bp, Bovine  19866880521909
  misc_feature (1)..(1): n is a, c, g, or t
nctgccgtctatgaggttgcacagtagttggacactactgaagcgacttagcagcagcagcagctaaaatttaaatccaaacgtttccagaatttatgtttttaacagctattctgtatcattactttaaactttgttttcttccttttgtttatcataaaatagtagtttttgatctcattttgattctctttgattcattttgaatttaaaattgggctttccaagtggtgctagtggtaaagaacctgcctgctaatgcaggaaacattaagagatgctggttcaatccctggttcaggaagatcccctggaggagggcatggcaacccactccaatattcttacctagagaatcccatggacagtggggcctagcaggctacagtccatagggtctcagagagtcagacatggctgaagcgaatgtcttcatacttagtgtgatttttattgaattattgattggtcattgataaggatatcctctagtcaagaggtgactttatgggatagtccttgtacctaacgagacttatgtagagtgcttggaaaatgttgttaggggatggtattttacgtttgaatgtgggaaatgttcaatatatccaatatgactattttgttgagtgagagaaactttttaagagatttaataatacaaagcatttgtaaatggcacatagctaaaagtagataaatcttagctatttttcattgagactaccagaatattttatagtactttaccaaatatagatttggtattgtattgctagctgttttcaaccatagtcattgtaactctttgttaccttcttttcctttgtaaatactgaaactgtgttttctccctttcctgactctcttatatcagttttcccttttgtctgcctagttttagatttagaaataatatgaagccaagtctcttttatggaatgctggatatggtgttccttttagttatagaccttacctttcagtagcgtatgagtgacgttaaaagtgtgctttagttagttttcgctgggtaaatgcatgctcagaggaaacggtctcaaatctttgttcaaaaagttaaagactaaggtagtctaataaatgttaagcatttatctggaagaaaaatacatttttgagttgaaagtgaagtgaaagtcgcatagtcgtatcctactctttgtgatgccatggactgtatcctgcccagctcctctgtccatggaattctccaggcaaggataccctcctccagggaattttcccgacccagggatggaagctgggtctcctgtattgcaggcagattctttaccaactgagccactagggaagccctttggagttatgttttacctaaaaatctgctaaagaaataatttaaaatgttgatgccttgttttttaaattaattccagtaatcagatccttatatgatttcactgatttcagtaccttttgtagaatttaatggctttcctaatgtgtaaccatcttttaagaagttccttgtgaataaaagataattaagtgaccagttaatttgctggaattaattaggatataattaatctaggtaaaattcaaaattttctataaactgtaaggaaaatagccaaatataaggacatatccatttatatagtgatgacatgcttgtaatttattatcgcagtggctaggttagagactcggagaaggcaatggcaccctactccagtagtcttgcctggaaaatcccatggaccaaggagcctggtgggcttcagtccatggggtctctaagagtcggacatgactgagcgacttccctttcacttttcactttcacgcattggagaaggaaatggcaacccactccagtgttcctgcctggagaatcccagggacgggggagcttccatctgtgggatcgcacagagtcggacatgactgtagtgacttagcagcttagcagcaggttagagactaaattaacaaccaatggaaaatttgttggtcccagtaattacagctaaatggtgatttgaaaatacttaattgtatgaaagcactgtcatctgaaatctgtattcaataaatgtgatctgtcaacttacagacattatcttatttaattcttttaacaattctgagttaggatattattatcctaattttgcaaataaatagaggcttaacaaagttaacccatctggggtcatggagctgtagctgggattctaaccaaacctttttgac

SEQ ID NO: 44720 - DNA, 1024 bp, Bovine  19866880534939
  misc_feature (1)..(1): n is a, c, g, or t
ntgtccctaaaatatctgtcctcagcacaggtgggacactataccttcctgctggataccagcagggttcttctgctctccatgtcaccgctcactcttgtctcctgttcttcatgagccaagcgacagaagacctgtcctgggtaactgcctggtccctcttgtgtttcttgttcttacatgcttcatccagctcctggcctttgtcccaaagctgtctacagttttcaccagcgctgagttggggtactcactggcattgacttcacctgtccaattcccctcgtttgcacctgtgctaacgtggccaggcccagttttcactgtgacactgcctgccttgtttattgatatcaggaactggatcaggatgttcatatatcagatgaatgacatgtttggtaggaaaacagttacaaaatgagaaatatatagatttaaaaccacatgtcaaatacattgatatttgttcttaatctttattcaccagggagcagtgattgaggacccaagcagcagaatattaccccctgaaaaacaagggttccaatttttgactggttcaaatttaatcctctgaaactgtatggcatctttcagattcctgtagagtgcctaacaggcaggctgtttgggcaggagacccaaagtcttgaaatttcagaagaggatatgctgaaatccaggcctccctccttctgtggaaatgttcctccctgtatattgcaacactcttgcaacagtcctctagaaatgtctcctttaggcaactctggtttagagcttcctcatgtttgtgattttctttggaatcctgtacttccacctctttgggacgcttattgtcttgtatacaggcaactcatttttctcttgaatattattatcacctattagagtgggggtttggtattttcagctctgatgtcctttgcctgggacctgccaatttactgactaggttccagcatgtaactgaatctctactaccagctgtggaaacctaatatggagacagaggatc

SEQ ID NO: 44721 - DNA, 977 bp, Bovine  19866880560444
  misc_feature (1)..(1): n is a, c, g, or t
ntactcttgcctggaaaatcccatggtacagagaagcctggtactacagtacctggtactacagtccatgggattgcagagtcagacacaactgagcgattgcttgcttgcttgggctaagtaaataagcagccatcatctcagagactaatggtattagcatcacacaaagacaataagcacagttaaataaaagaatgaatctaagtccataaaagttttgtgcccccctcaaagaggtgccacaaccacctatctgaaagacttcaaattagactttttaaggcatatccatatcaagtgtactcaagggatgaagcttggcagacaagatgatgccctgttctttgggtagaaagtacctcagttgcactcaacagccctagaggaaaaagaacaagacaggaagtgagttcatccaggaaagtgtcctaatgagtggttgtctcctctccattctctaatccatctcccgcttcaacttggctggcatgtcagggggggtgggagaggtaccaccgctgtaagagtggtatctggagagctctcttcacacttcacattatcatcaatggtcctttcacaagattcccgtctcataaggctaactgtctcttgactcctattgaaccctgggtaagctgccttcctgcagcacgcccatctatgtaaaatgctgcaaagaggatataagcagtataaaatcttgatagaacaaaataaaatgtgcaccaatgtgcatctgatagatgtagcaattgatttgtggattaggtttttattttcagcccattgaaaagaaataatgtatggaggcaatctagtactaagcattttagaaaatctatttgagatcatttcagcagaagctctggcagtttgtcataagaggggaggagagcaaaggataattgtctgcagtctagtaaaacacagaataactgccatcacacttgagtgagcttatagccagccgg

SEQ ID NO: 44722 - DNA, 3207 bp, Bovine  19866880582640
  misc_feature (1)..(1): n is a, c, g, or t
nctgtgctttaataagttccccaggtcattctgacaccactgaagcctgagaaccactgacacttgtttttaaagtagttgcccagagtcagtgctagataaagtttcgctaagattatcactaagaataatgtttactcaatctgtattctgtgggcttgtcctgaaaatcagccataaattcataagctcttagtaggaagagtagtatttgacattgcttttatatccatcatgtgccaagcacaagttaggtgctccgtcagcattatttgaccggccgaacaatttctaaaaatggagttgttttcttgggatctgtgaagccactcccagtggctcggagtatgtgggtgcaccacaatgaatacttgagtccttgaaattaggtgcaaatgtttgtatttttagttatatatctctctctgtagatgctctaatattttcaccacattctcaaagactccccaaatttagacactactgctccagagctcaggcacccacgggttaaggtgaaggatggcaagtgccatcacactggagtggggccagatgggtggatcctcacccattggtggtgcaggatgggagcctgaacagaaatatggcctcctctgtttcccctcctctgcccctggccatctctgccctgctcctccccgattcttcttctcccagaaaaactgcttctctaattccagctgctgaagaaagtggggtcgacaaccctgcatcacatcatggagatggctgtttaatttgagatgagtgttacattactcattgcccggggccccctttgatccaccagcatttgcttcttttatccccgtgtagtgcatacattagtgccctgaatgctccgtggtcttgttgtctttcagatgttgtcagagattatttacttgggaaagcagatggatatcttgtttaatgtcaaaataattactgttttgttggcctgatagcttatttactctttcaatgtttttgtgtttacatcaaaagagcattgccaaaattatattttatctgttaaagtaaacaggatatgacaaccttttttaaacctgatttttctgtttgaggagttgggttattaaaatggttaaaagataaccggaaccaagtgggaatggtcactccagctgcaatgcaaatgcatatctgcctgctttttatttgtaaaaaagctgggaaaagtccgtaaacaatgctttaaatgaggagccgtataatgcagtggttgaaaacagacttcagttcgtttcaaatcccagctctgctgacgatgacttgtatgaacattaatttttcaaccaatctgtgtgcctcagtttcccaaccagcaaaagagatgtagtgatggttgtgaaagttaaaggagttcatgtacataatttctaggcatatataaaatgctgtttaaatattggctattacttaataaacttaagttgaaagtagttctatgagtttgaagtggagagaggaacaagctatataatcctacgagagattaaaagacctggaatgagtctccatgagttaccaccttccagctcctcagactggtgatcgccttgtctccatactgtaaagcagggaaccttttaagttctgaagcctgtcctgatgctgttcctagttcttaactgagctgagctagaaaggtgttaaaaatgaggctccttggagaaaatgtaccctccgtttctctcttcaataaatcactgtaagataattcatctacttctaagagtttctccagccacacccttttactcattttcactgagcaacttttatttcagcttgctagtttaccaaggaagtacaaggaagcaaagttctctggaaggttgctcccgccgaaccacctgggaagagccataggggctaggaattctgtaactcaacctctggtggaagttaggttattttgacctaactcttgtgtgctgtgttacttctttatttttcatatgatcagccttctattacaataaatatacactgctgctaagtcgcttcagtcgtgtccgactctgtgcgaccccatagacggcagcccaccaggctcccccatccccgggattctccaggcaagaacactggagtgggttgccatttccttctccaatgcataaaagtgaaaagtgaaaagtgaaagtgaagtcgctcagtcgtgtccgactcccagcgaccccatggactgcagcccaccaggctcctccatccatgggactctccaggcaagagtactggagtggggtgccattgccttctccgaaatatacgttactagatgctaattcattcagtcagtccaaacacattgtttctagttgcaaaacagtagttttgctagctgtttgataaaataaatgtgttggtttaacctcaggtctgctttctcaagttcaccatcttttctcaagtttattatggtgtattagagacttgtctttctttcggatgtcacttcatagagcaccagtctcccatcctgggaggaatgaattcagaaattgttgcattcatgtggtaagttagtaggtttggtgtctgttccaagtctgtaaaacccttgaagttccctttttgtcctgtagtgatgggtaagatgactagattcagggccagaagagaaggctgccagagcccactatattcccagaaagtaaagagattgtggctggctccttaacttcccccaagtcctctcacaacagtccagggaccccatgaaaaatatgtcttgtcttgcactagatggtgtacctatttcttggcccatgtagcaggggttattcatacttactgtactgtaaattccctgagtgtacctggccttaaaagttggcaatgataatttcttacttttgtaacacccggaatttcaggaatatcagcactgagaagtctgagatgggcacagtactaggcaacaatataagttaatcactaatgaaacagcaatttcatcaagaagagtcatagtgggatataattctgtgttgggaataaataattcttagacctaaaagaggggtttccctgatagctcagttggtaaagaatctgcctgcaatgcaggagaccccagttcaattcctggtcaggaagatctgcggagaagggataggctacccactcccatattgttgggcttcccttgtggctcagctggtaaagaatccg

SEQ ID NO: 44723 - DNA, 1239 bp, Bovine  19866880633193
  misc_feature (1)..(1): n is a, c, g, or t
nttaaattttattcttttcatttctctgattagaactaatttactaattacataggacagcagctaaagtaaaaagagacacactgaaatctgttagcattaactgttatagccattctctagataacatagtgttgccatatatagtttagatatgagtaatgagaatgtgattgcaagccaatatttagggaaaagctaggcctaagggggccacaattctgatggaatgtcttgatgacggatttagtcttgtcctttctcaatttatttttctctgggatgcgtttctatttggggcattaaatgacttacatttcatggacagaggacacttactaattgtgaaatattgggtgagttatttaacctttctaagactccttatctttgaaatggggataataatagcatctacctctcaacagttatttatgagaattaaatgaaacatattcaaagaattcagaataatgcctgatacagtgtaggcactcaataaagtggtatgttttattcttgctagaaaagaagctaagaaataaaagatcatctcaattgtcagccaaaagtaatcttatttgaacatttcctctcataaatcacagctgatactagatccaggagaagttaatggtgccaacagaggaatcactgaaagtaggaagaataatttatataacagaaggattaatggtattcacggcaaatatagaggtcttcacactctggaatccaagaacttccgctcctccaagaccaatggagatgatagtcataaatttaagcaacttcaaatgggaaaaaaattacctaaagaacattaaatgggagaatcatcctgagaaaagtaagagttgttggaacctgatcctcaaaaccttgatatttcacatgagtgggtcttcttctcagaaatgggaaaatgggagagctactggaaaagagggagacatctgaacccaaccagcatgaagcaaaggacagagagccaagaagagagagagagaaatggttgctagggaaaatcgagaacagcttcctctcattgacttggagaagatcctgtacccttccttcagcgtcagagtatcctgctttggcctgtgatgtgggtgaagctgaaggtgtgactccatgtaaagaattgtgcaaatgtacacattctctagagagaaatgtaaactcacaggggaccatgttgctaaaggtggtaacagctgactacaagacattact

SEQ ID NO: 44724 - DNA, 683 bp, Bovine  19866880638309
  misc_feature (1)..(1): n is a, c, g, or t
ntttggtggtttctttcttgattttttttttttgccttgcaacagaaactactgcttaaaatgttttaaatttgtattaataacacatgtaactgtgtagcttactgtgactctgaaaactgtagtgttggtgttgtggaaatgtatgttatttccaaagtcattttattgaaggtaaaaacaaaagacaaatgaaggagaaatgaggatattcccagataaacaaaaaccaagagaattagttattagtagacatgccccataagaaatgataatgaaagtccttcaggatgaaatgaaagagctgctgctgctgctgctgctaagtcgcttcagtcgtgtccgactctgtgcaatgccatagacgacagcccagcaggcttcactgtccctgggattctccaggcaagaacactggagtgggttgccatttccttctccaatgcatgaaagtgaaaaatgaaaatgaaagagcactagacagtaactcaaaactatatgaagaaataaagaaaaatagtagaagtattgacaaaggtaaatgtaaaagtcaatattattgcaagtttggtttgtaaccttttcttcctatatgatttaaaaagtaaacctatggtgtaaagtaataactataaatctatattaatcggcatgcattgtataaagatgttccgttcatttca

SEQ ID NO: 44725 - DNA, 2108 bp, Bovine  19866880705710
  misc_feature (1)..(1): n is a, c, g, or t
ntcagattggcaggaagccactcttctttttctgaaattctcctattttttgttatgttgaatccaaactcattaaggtaactgatatcttctgttaaatacagaacacttggttactcctttttttttaagtacatgccaaactctccctatccctactaagtctcccccttgaccccccaacctctcacccctccccagcacctccctcccacacaaatacagaaattaccatatttaggaaaggtggggaaagtactgtattttcaaaaaatgggattttctggttaattctctgatgaactaaaattgagcctctgtgtttcatgctatcttcattccttaacaagttcagcatagtgcacacacatttgttatatgacttgaggttatggggacatagggccgtctttccaaatggcaggtctcaccgggcaggattttggacacaaacaaagaacatataggatattggggtcaatgtgatctgagaacacaccctaggaggtagtttggagaaccaaaattctctttggttgtcattttatcatttgacttatgttcagttaaaagcaaggagaataaatctggctgtctgaggattgctcttagttgaacctgggatggattctagaaacttagctaattttatctccattgttgtttatctgcataaacataagaaaatcaagacaatataatttcagctaacttcatacaaaatttattctcccccatctctcttttctagtttctagaaaactgaaccaaattttagaacattaaaaggaaaaaagtagaccatatcagccattctgcttacattagtgtttccatccttaagcttcttgctctctttggatgtgataatcatctttctctctctgcattttccatgggaccaattcttgggaaacacaaacctcagtattacccatggctgcaaacctcttaccagttttatgaccttaagcaagttactaaacatctgtctgcttacctgtgaaacagttattacaataatctgctagcgttgggcttccctggtgagtccatggggtcgtaaagagttggacaggactgaatgactaacacacacacacacacacacacacacacacctggtagagttactgtgaggttgaaatgagataatcaggtcaatgcttaatagagaaagctctacatacttaaatttagctatatttattgttttgctgaccacttctctcagtccacacatagcagtgtttcttagaggagctctcagaccaaatacatcgtaattatccagggagtttatgaatatcgctgattcctggtccccaggagagtctcattcaacaggtctgtggtgaggtttagaaatggggtatttttactaagtactcttcaattatgcaacacccaaaagtttgggaaccactgctatagttgttttaagtaacaatttgtcaccagcaaagcccacaattcccagggaagaaaaacagaatctgagtaataagataaagtctaacctttttctccctttgtgcttagtctgttttacttgctcatgggggctgagtgcagaggccttgcccccagcccttcagaccagagatcctcacaaaacatgcaacacctcagctgcatggaccctgtgctgaaagctcctcacacgatactcaactcaagatggcggtgggccatgtgcacgtgccgacgctgcgcctgcgctgctctctggagcctggacagcacagtcacacctgtcccgcaagaacaccaacccctcctgctaacatatccctgtaaagcagccccacccacagcctgaggcaggtgggaagcatgtgtcctagagcttgcacctctccattccttgataaaagataaagctttgctttgcttcagaaccaaacttttcttattctattggtgtgagttacaccaggcagaaggacccttgttggggaccaattcaggaggactgataacaatttgattattcgatttgttctgctaactagtaggttttctttaatttgatcattctgttctgattgggtctgagctctactctagaaacccatgcagttcacacccctatatcatagactctg

SEQ ID NO: 44726 - DNA, 2598 bp, Bovine  19866880726436
  misc_feature (1)..(1): n is a, c, g, or t
natgaaagggaataagagaatcttggaatttgaggccttgtaggtaggcttgcccataacatttttgaggtctgaggccagagcacaaaaatttatattcagttgtctagatatgtgaaagtataaatggagataaaatattaaataaaatatgttccaccttcctgccttaacaaatatagttccataatgaaaaaataaaaactagtttaaatctattttttatgactgagagtcaacaaaatgtcacagataattattgcacatattttaggtggtctttgttgggtcaataatattacatgagcaagaatattaagaaataaaatttatgacatttgatataattcttttatgaaatcactaattatagatatagtaagattttatattcctgttcttttgacagtagtgatataaagggttaaaagcaaagtaattattcaaagtataaaagtttaagtagaattttatcaaaatggaaaattatatagatgcaaagtcaaaatcaaaaattaaaattattttgttttcaaaaacattttctcccataaatagcaaaattttcaatctatgaaaaggtaaaataatatataattttattgtaatatatggatattaagcttataaatcaagttaataagtgtaaataactttaatattttgaaatgttaatcttattgctattttataatttttattgcaattttagtgttcagtgtctatccagttgccaatataaaggaaactggcatcactttatgcatgcatctagatctgatatttacaaatttaagagtaacatgaaaaaaaaaagagtaacatgaattattaatattgcacaatgtttctctggcactatgtacatcttttgacaatactacagattggaacaggaaaagaaaatgagcatttgacattactgggaagtcgtactttgtgcatgaatttattgcattcatgttcagagaagagatttgacaaattagtcttttttctttcacttccataacttgaatcttcatccactacaaattagtgttcatctctgatatcagcagtgacagcccacaaaggtacatgtcactctgatgtagttactttgttttgatgatacatgaaagagatgtagagaagtgtattcgtggggcctgaatggtgtaagttgtgaacagctgttggtgctgtgccagggctgactgtcagatcttgagtgacacagagactcgctgaagtatggagccgagggcagtagtccctcttgtctaggtctgaggggacagagtggcagatttgagaagctgctgctgctgcttgctaagtcgcttcagtcgtgtccaactctgtgagaccccagagacggcagcccaccaggctcccctgtccctgggattctccaggcaagaacactggagtgggttgccatttccttttccaatgcaggaaagaagaaagtgaaaagtgaaagtgaagtcgctcagtcgtgtctgactcctagcgaccccatggagtgcagcctaccaggctcctccatccatgggattttccaggcaagagtactacctactcctaaactccaaagaataagagacctgaagaaaaagtttgaatatcaaaggccaatcagtaataaacccagcaacaaaggattgagtcttctcactgaagtctgatggcatcaaactgccagtgattagagagagagagaggcctgggagtgagacagtaatgtagtaaagtgatgtttttggaaagctaagaattggaatgaaagttgggtgtgcctactggactcatgacactaacttgaaacaaaaagatcataagccagttgagattttgagaaagttatattgcagaagaatctctgagcctagactaaaaagcttttcacagattgaaacactctctggccccaaaacttgcagaggcaggaagtaggctgtgaaatcaacaacacccaccatgatgtggccaaagaggatacagaacatggaagaacctccagaaaggtgatctggggccacagaaaaaagggaaattccatcaacaagtggcatcaggcctcatccaggaaattccccaactgccagcaaaaaaaatcctcacaatgcctgtcccatcagactctgtagttgctgcggaccagtgattgctgtgtattctccagtggtcctttttctggagggaagtatctgtagtagttgtcctctcctgaatttgcagtggtttagtaagagtactaaacccactccagtactcttgcctggaaaatcccatggacagaggagcctggtaggctgcagtccatggggtctcgaagagtcagacacgacttccctttcacttttcactttcctgcattggagaaggaaatggcaacccactccagtcttcttgcctggagaatcccagggacgaaggagcctgatgggctgccgtctctggggtcgcacagagtcggacacgactgaagcaacttagcagcagtagcagtaagagtactggggggtctgagggaagatagcatgtccactagttcatgtgttgtgaggtcacacagagccaaatccagatctcagagatacgggtgtgctg

SEQ ID NO: 44727 - DNA, 848 bp, Bovine  19866880748919
  misc_feature (1)..(1): n is a, c, g, or t
natagtcaaggcttcttaagcttattggaccttgtttcctgctttgtatcctctttacagccattacagggatgggagtggcagttccctttgagggtaacgagacacttggaaggtttaagcagagcctgagtgaccagttgacccagagttgtgcaggggattcatgcatcaggtagaaagaagcttgacaaataggcctccaggccctttaaacaagtttctattacttgggggagaacttaaaactttcaagaaaagttaaaaatattccaaatgtctgtggctgattctaaagaatgtacatctagccctttccccagctccagttaatctgttccagtttatgctagttatgctctcattatttgggaggaagggaaggagacttggaccctgtccaaggagtgggggtgttgagctgcttttgcagtacactggcaggaggcagcatgtggcatgatgggggacctccaagtgtccacaggactgaaagggacttttctggtctgtattcaggtcccatggcaatgtgggcaggttctgaaaccacattacaccagtttgcagaggtttagatttggatggctggagaagaaccccaacctctaagatccacagggtttcttctgtaggtcagaactatgggtcaaagaactctagggcttcaggaattaggggagagagaggcaagggtgtgattgcataggtaagggcacagtcacagtttttcctaacaatctatcattttctttctctgttgttgaaaagttcttaaatattggtgtgaggtagggatcaattcacttgtattgcaactcaaaagtgcacagaaaagcattttaaga

SEQ ID NO: 44728 - DNA, 1193 bp, Bovine  19866880786348
  misc_feature (1)..(1): n is a, c, g, or t
ntttattgggtgcttaccctgtgtcgggatcctcttaagatctttatatatagtaattcctttaacccacacatttcccatgtgataagtacttgtattatcattctcattttataactgaagacaaagagactcagagaaagtaactgactgaagttcaccctgctagtaagaggcagagccagtttttgaacccagactcactccagagtctgtatatgaaaccatcttcaatgtcatttctgatcttggcacaaaatgataaggacttgattcagggcttgtatgttcgctagggaagtggaaaagagggggagatggaaatgcaaagaactctgcagagaaagactctaagaccaagatggtggcatcattgtgggaatgaaaggcaacagagaatctggagacagtcatactataaggagtcctagaggtcagtctagccttgtgactagatgctccagacatggctgatcatcagaatcaaacaggaagttattaaaatacagatgctaggaccctccagaaaatgatcaaatcaggcctattcaatcaatgtctttagagctaaagaacttctaataagccctccagataattttgtatctagcctggcaaaaacttaagtctgatactaccgacttttgacaaagatgtataacaaacatcaggtatgcttacacactgtcagtgtaatttgggataactattttttgggaaaatacatatacataccctatgacttaggacctatagtccagagtatataaccaagagaaactcttacatatatacacaagaaaataaaaacaaacaagaatggataaaagagcactttttgtgttagcaataaaaatggaaacaaatgtctatcagcagggggaaagataaatagtggtgtattcatacaatgggctactactatacatgagtgaaacgtaaaatgcagtcacatgcattcagcatgaataaatctcataaagtatggcacaaaagataaagtcacagaagcatacatacaatatgacttcattgatatacttgtatgaaaatgagcaaaaccaaataatttttaagagtatatttatctgtagtaaaattatgaagaaaagcaaagggatgataaaattcaagaaaatggatttggaaagaaggagaggtatgttatgtgttaatagttcagggggttttaa

SEQ ID NO: 44729 - DNA, 3523 bp, Bovine  19866880790666
  misc_feature (1)..(1): n is a, c, g, or t
ntttctatgatatactctgcatataagtaaataagcagggtgacaactatacagccttgacgtactcctttccctatttggaaccagtctgttgttccatgtccagttctaactgttggttcctgacctgcatacagatttctcaggaggcaggtaaggtgatattcacatctctttaagaattttccacagtatgttgtgatctgcacaaaggctttggcatagtcaaaacagaaatagatgtttttctggaactctcttgctttttcgatgatccagcggatgttggcaatttgatctctggttcctctgcctttgctaaatctagcttagattctggaagttcatagttcatgtgctgttgaagcctggcttggagaattttgagcattactttgctagcatgtgagatgagtgctgtgaaagtgctacactcaatatgccagcaaatttggaaaactcagcagtggccacaggactggaaaaggtcatttttcattccaatcccaaagaaaggcaatgccaaagaatgctcaaactactgcacaattgcactcatctctcaaagagtcggacacaactgagggactgaactgaactgaactgacacttacaggtgacttctctgaactttcctgcaaccagtaaaaatgttttttggtgtcaagaatatagtttgcttaacacgcaatgaagctcttttctaaacccttttcagttacaaaataattctgtgttttccaagtgggatttttatttccatctccccgcccccagccctcccctgcactcaggcctcttgctctgtcctgtgatgtgttcactcattactaactgggcaggtcacatggacatgatctcatggatgctatttcagttcaataagcatatattgaacacctaatggcaccccactccagtgctcttgcttggaaaatcccatggacggaggagcctgttgggctgcaatccatggggtcactaagagtcggacacgactgagtgacttcactttcacttttcactttcatgcattggagaaggaaatggcaactcactccagtgttcttgcctggagaatcccagggacgggggagcctggtgggctgccgtctatggggtcgcacagagacggacacgactgaagtgacttagcatagcatagcatatgacatgtagggcattctgctaaggagtttctgttaagtctcccagatcagaaattggttatcttagagaccttctaaaaggcaattccttaacccaagacagcaaccagatgaaatagggcctcaagtattcctaaaacatctccttaaatctcttcagggacccaccctggtattttcctggatgacctattcggtatagtgtctgcaaacaagctaggagccaagaaaagtggggagcgatgggcatccatacttcagaagctattcctttattcaataactggtttcatccatgacattaatttaatgatttgtgtgtgctgggcaggtatatgttcaattattccacaaaggaccatgaaaatttcagtgtcccaacaactaaaattctctgtgttgcaaagccaccaagctggcctggaataatgaaattcccatgaaattgaattgatcctcaaattattgcttaaatgatgagacagtagaacttgagggaatattaatgctaatgagagttcttcagcgaatgctatgagaccagttgcaaagtggattaggcatactatgaaaaaagccattatgctcatcttttcatagatgcatgatttgttttactcttaaaacatttgaggtttaaagtttttataccatgctctatgaatagaagtgtaatgaggttgaaaaccaaaaatagtactcaccactattagaaaaagaaaaagaaagaagctctggttgaatgctgcccatttgaatcccattttctaaaaatctaatttttttattacttgtctcattaaccccaagatttagaaaattgaatggtgtccgagtaaaatgagtgacagtgtgaaatatttttaaagggcccgtctttctgttgatcttctgttaaacattttaaaattaaaatgttcttacatgataaaactatttggatatgtaagtgatttatcccaaagtttgaatccacctgtcttaaagtgtatactgagcttttatttatgctttgaaaatatagtagataaaaagcataagtgtttctgatattatgttttgccatctccagcgaagaagattgaaatcttgagaaacaattttctgaagaaatgaaatcgtatgccctcctgaacccttgggggaaaatagcctctctgtttgctcagaatatgaaacagtaaaacagtgcaagtaaaacagacagccatgccacgcgtgtcacatttccatttgtattgtttgaaatgatgttttaaaaagattttctggggttttatttatttatttaagaagtaactggtacaaataatatttgcacaatcttgctggtgtaagaatttccaaatcaaatgtatttattttctgggaccagaagggattggtttgtaacccttgtgatctatgactaagcagagaacatgtagaaaaagtttcaaaagtgctctataatagtaacatttctgaaaagataaagagaagcttccaacatccttgtctcctagactgttaggggagtcctcagtagactcagtgacctcatagggtaggcagaaagaataacttacagaggaaggaaactttttaaaaaggcaaaaaatgaaaaaaaaaatttaactgctatgcttctcaaagagaagattatcacatttagagggaataatttagagtgaagaattgtcctttctcatccctcaaagtcataaatgtcccccttgggcctgatgataatctagataattcagtacagttgaggctggaatggaagattctgtaaaagtctaaagtaatattttttgctttttaaacaagttaacataatacatccaaacacttctggggacacatcccttgttatcagatcttggacttagggggaggagatgttcttctccttataaatttaaaagattaaaaaattttactttgcagttaaactgtattataaaattataacagtacgtaactgaggaagatcacttgtcagaagtggtttgtcaataattaaagaagaaatctatctccatatttatattcaaatattatttctggtgccaagtagttttttaagctgggtcactcaccttaatcaacaatcttggctccagatattttgatcattccgaaactccagatctacctccagtgattaatgtttggtaccattaggaatatttagaggataggtggtaagctgtgaaggccatctccctaatggagttccaatgctgcgttgagacagcctcgcagactaagtgtgtggtcctaggttgatggctttaaatgaaaaagcacacatttgggctttatactctggtatatttatttaaaaatcagtgctttactgggagtca

SEQ ID NO: 44730 - DNA, 1599 bp, Bovine  19866880813263
  misc_feature (1)..(1): n is a, c, g, or t
naactctggccacagtgtggaaactggacaggaaggagagaaggggagccaacatataccagtgctggggaagacaggggctggggagcatttaagaggttgggttttggatttgggaatttagataaaactgagcatgtgggcaaatgtaatgccatttacatgctaggcaacaagagaaataaatactcatggtggactttcatttcttgtaatatattttcaattatgaaaaagtcataggcttatgtatctatgaaatcacactggagccaatatagttgtgtgtgtatgtgcgtgtgctcagtcatgtttaactctttgtgatccccctgaactgtagccaaccatggaattttccagggaagaatactggaatgggttgccatttcctcctccaagggatcttcctaatccagggatcaaacctatgtctcttatgtctcctgcattggcaggcaggttctttaccactgccctacctgggaagccagaggctatatagggtagtggctaagagtttaggccctgggtttgaatcttaattcttaattagtgcagagatcttgggtaattatttttatcactttaagttctaatgtcttcccaaggtcatggtgaggattaaataaaatgttgcatattaaaggacatatcatagggtttaataatcagcaagctatagattaaggtcagctactatgaccatagtgtttgggttaggtccagctgcaatctcaagctttcagctgttttcattccagaaagaaacatttagaagactcagactcctctgccagaactggattttttaaaactctagatgactaaaaatgcttaaaaccactattctaacatgcgtttaatccttgaaacccagaaacaattcaatgagctatttggttaagttaaatgcagttctttgaaatctgcttaaatgcatggctcactacccaaaggttccagagaactccacttgcctgcttgggaagcagcaaacaaggtcagtattgatagcttacgcttcagtgagtgtatcaatttaaagcttcatcagtgattctcactcatctgcacccctgcatggctgttgtcttgcaagaacggggtgacttacgaacctattaagtaacttcttcacttgtgctctaatgagcctattgtttccctggaagaacacaaacacctgagtacaagccacaaacaagaggctgaaaatttcagccctgcttttaccgagagacactttttgttttgattctctgtgcttttgctttgccaacctagccaggtacaattttatgccaagtcctgagtagggctattggggtcccgctgtccaaaagagctctggtcacagctgactcctctgctgtgcaggacgcatgtgtgtgatcttttggaatttaaacttcagacacttgttcatctactgttcctcctgccaccagaaagtgcatctgcagtgaagatgaccacttttcaaggagcatgcatctgctgcagtagggagggggcaccaagcccacccataaagagggcatccatggttgtcacagccaaggaagttctcctcgtgctctaccctgcaaaagaagg

SEQ ID NO: 44731 - DNA, 835 bp, Bovine  19866880813499
  misc_feature (1)..(1): n is a, c, g, or t
nttctcagtcataaattacagaaattgcctatggctgactgaccaggaaaggtatttattaaaaaggtactggggagctccttgacatatctcaataaatacactttattttgcaaatatatgcaaatattgtttcatatacatacataactatttttgtttacaaacaaaaataatatttactgagcacttctaatgtgtcagacactgtccatattacaaaacatgacctataagataaatgctctttcaaatactcctgaatcccatttttaaaatgagacgattatgattagggggattaagtagcttgcccaaggtcatacaagtaataagggactgagtgttcaaagtcaagttgtgtctgacattaaagtccatcatcttcacttccacactcttatatggctataacttgaaacctttcccataagatattagctagaagataaatgatctgtgataacctgaagtattaaatattatttcagtaaatactagattataagaggtgcatgctgaaaaacatacacaaaatatagcttttttccatcttaaaaaacgttccacagacatgacctaatgctagagttgctggccagaaaatcctcagcgtgcacatcaaaatgtacccacttgggggcacccacaatgcagcttttcggcttgttttgctgtccagaagctgtaagccttgcagagctgcagctgagccagctgatgagctcaggctgctctacaggacgcagacagccacatctgatgtctcaaggaagcgcctcctgtatctccaactgggaggaatattttccttagcatgttgcccgcacaataa

SEQ ID NO: 44732 - DNA, 1670 bp, Bovine  19866880978364
  misc_feature (1)..(1): n is a, c, g, or t
ncaagctaatacccgccctctatctaactccaaaagataaatcaatgtctgaaaagtgctttgagcttctcgatacaaaggcgagtgttccttaccgtcattaattagcatgtattaatagaaagagtagtacagaaaacccaaaggtgatccaaaatagtgatgaacaaacctgtcatattgtattagcagctgtcacagagcaggcagtggaaatgaacagctttctctccctaatactgcagagtttttctcctgcaaactgattcctatgaaattcaatttaggggaaaaaaaccttgtatgccaagttatattcacttggaaatttcttagcaagtaatatagttttctgaaaaggttgtgggtgggaaggcttacctctttcctaatttaatgactaccaagtgtacatgatcctatgatagagaaaggaacatccattgaccaccattacaaccaagatttaaatataaggacacattaatttttttaatgcagtacctattttctccttcatcgggctattttggctgaaataatttgacagcaaagcaacctttggtcttgtttgagaggttttgctgcttctctccacgcacctgtgtctgtctgtgcaataaacctgactgtaggactctcatcacaaatgaactgtcagatcattactacagttgatgcaatataatctgtcttgaaattagaatcagtctggccaagctaggcgttcacttgccatagaggctaattcacttcttgaatatgcattcatggagatatgcctcgatttggaatccagagggagtacacgttaagagcagattttctgaattagcatggcaagagggaagggtccttcatttagacggctgcagatgccgctccctcttgttcattacaattgcatttcatcagctttatgatgtccacatgtcaattgagtgtgaggatttttcacacaaaagagcctcagggaaaacgactccactagctaatcagctgattatcatacctcaaatgggctgcagtacttgctactcccaacctgtaatgggcaagagcagaattgaagattaagactgcaaagaaagagagctcttcagcctgtttaaggaaattaaagaggaatttgtcagcaaggagaagaaagaactacaggagcagaagagaaagcctatgaaatagatgggttttcaaaataaaatgactgatgttttcctttaaaatagcattggtgggagagggtgaaaggttaattaactatattatctgcccatatatgcccagctatataaagctctgtctgcccctgccctagattttaaaaccaatattcaagaacccagcccagtgtcgagaagaatgtttcagagtaactgagttaatttccaacaagtcaactattcacaactgcccctggacacctccttatggatttccttggatcgtttggaaattagttgattaatatcaagaaagtgatgatagtaagagaagaaaaacatacccacacgacctcgtaaagaatgctagcttggggaacatttatgaaagtcactaattgagatttttattaccagagatgtatttttatattctttgaggaaaggaaattaacgggggccttttttctgttttgtctaaatttaccaaagttttctcccagctcc

SEQ ID NO: 44733 - DNA, 1595 bp, Bovine  19866880997592
  misc_feature (1)..(1): n is a, c, g, or t
nttgtctctgaaataaaaaagggcaaggatctaatcctgttttattataggaatatgattcctgccatcactgtgcactctcacttgggtgaggcatatttttatgtgtataatttgtttttaacccctttattccacatgtattgtgtccttatcataagaaaggtactgagataggtcctggggatagcccagtagtaagggagtgcttacttagtgcttaaaatccaggtctggtggctaatgttcagcttcttgttatcactaccatcattctagatgttcatatttgaactacttctataatgatccctaggttgggaagatcccctggagacgagcatggaaacctactccagtattcttgcctggagaatcccatggacagaggagcctggtgggctacagtccatggggtcacaaagagttggacacaactaaagcaacttagcacatacatactgacaaataactccttctctgagcccccgaaagtagatccccatctgcttcctcattgatttccctgatccctacctcatgagtccttcaaattcaccatgatccagcaacaaaagagtaaatgaatccctgaaatatcagggtccctgggatcctggcccagcattctatgcagtatcatgtctgatttttcttctagattttcatgtctaccagttgcaaaagagtttaaataccactgttgatggagcctatagttgaaaaatttatccccaaatttcaaactctctttctagttatctacatttactctttcaaaagtcttctcaagaagtttacttctaacagttatcccacatagaacttctttgggagtcggatacataatttgaattgatgtttgagtgtgcacaggtaattaagaatccttaaaatttcactgggacgacccagagggatggtgtggggagggaggagggaggagggttcaggatggggaacacatgtatacctgtggcggattcattttaatatttagcaaaactaatacaattatgtaaagtttaaaaataaaataaaattaaaaaaaaataaaataaaaaaatcattaaacacaaatatttgactatttaaaaaaaataataataatccttaaaatttataacaaggcaaaacttcagctccaccaacaagaaaccagaatttgcttttagaaatttggatttgtctatatgacttccatttaaaatggcttcatgtctgatgtggcttctctcaactcatctctaagattattcataaagataccaaaaaagaactaaaatttataatagctccctaattttagcaaagatggtatgtgaaaataataacctcaaaactgtagctcccccagtggtgctacaatgaaaaacaaaacggaggaccttgcagtggaatgcagctgaaaaccaatgacacctattgtcagaaaggtaaatgggggaataacatattctcctccatccgtctgctccatgattgaaaaacataaaaactccaccaatcaaaacactcaacagccatcccttcattaaatgaatgccactttgtaagttgtatcgttctaacatgctgtactcttatccttctgt

SEQ ID NO: 44734 - DNA, 1126 bp, Bovine  19866881004142
  misc_feature (1)..(1): n is a, c, g, or t
ntaggtattatgctgtcactccagtataaatgaatcgtaactttggactgcacctaggaattactacacatttggagaaaatttatggtgcaccaagctttgaatcatgatgtgatatcaaaactaaagtcaaaggaggaaaaaagctgggcataaattattatcctcaatcccatatgtatcttctgatgcaacaggtaaaagtttgaggatttagtaatactgccaataattatcatgggtgctgaagcaaatttatccttctgaaagcaatttgtagtaaaaaacaaaaaaacaaaacttccagcagaaggtcagtcttgcatgcatggcaggggtatttaatttctcttttgtgtgtgtgttctctgtccagctagactccctcctagagagtaggagcgtttctgcaatctcgggtacctctcaggggccacacatttctatttcccatgaaaggactggtctttggaccaattcattcactgaatagattagtaaccattatcagtcaagcttattgtctctaatgacatagacaaaattctgtacctcttgatttttcaatgaataattggcatggtcttaaacattgccttgaagtctgtgactagtcatagaaggaagacagccaaaggatatgccactttgaaaagagaaaattgtgaatggttaacttgatattctgagatttcaaatgtatcaacagaaaattgttaaatgttcatgtgtttatttggttgaaatatccgattttaaagagaacagtgcctataggtatcagattcagacaccaggagaaaatttttatgaagtgcttctactgcaaaatagatataataatactgtacatttgtatggcatttggcatttttcaaagctttttcatcaataatactttattctgtcttctataaagcagtaggactggcatattatgccattttacgtagaaatggagacagaaaggttaactcagtcagtgagaaagcagatacctagagtgctggtctttgcttgttggaccagtagactttctagaagttgttttttttgtttgtttggtttgtttaacttgggataactagaataaaatctaatatttgcataattctgtacagttggg

SEQ ID NO: 44735 - DNA, 1162 bp, Bovine  19866881015332
  misc_feature (1)..(1): n is a, c, g, or t
naagtaggaaatgtggagaaggcacatccgtaattgacagagctgaaagagacacacatcccttccaccgcttcctactggtaagaactcgtcacatggtgccaccaagatgcaggggaggctgagaaacagtccgtggctgtgcaggttgattctttcgaagggggagcataaatgttggtgaaagttagctattcttgtcacacttaggccagatagttcaacactgtacctcagttcagttccctcatctataatgcagagacaatagcagtacctactttatagagttgatgtatgaattaaattagataacatatataaaatggtacacaggaagtacttcataaaagttggtaattatttcaacagttgttattgctgttaatttttccttgagtcacttttaccactcaaagactctcataattaatatctcacatttctctaattaaaatagctagccaaacaggatatgataaggctcgtggctatttcatgaacaaagagaatctatttgatggaatataaaactaagcagtgtgacagttagacagtccctgaaagatatgaagcctgcctgtaaaatcattgcccctgttcccctcctgctgtatgttctacacacgaaaggaaaaaaaagttagaatttctcagaggggatgacagaacagttcatcatttcattgagtacatgttatttttcagtatttatttccacactattttcattagaaattataggaagccttttctttgaatttatatttacttaaatataaatatatatacttaaatatgtgtgcttaaaagactcaaaaagggcatttttcaacctctggtatgatccatttctattttgacaaatcttcttgaagagcaactaatttagtaaagtcaattttcctagctactaaattcctctttcagagtgcagaaaaagtctgtggtcaccagcaagaatcctgggaaagtaaaatgaaatgaatgaagagataatctagacacagatttatacacagagtggggaagacatgctgttgatgagactgttatacttcctgaagggctacttacttttattcagtgtcataaaccaagccaggtcaaatcacagcacacttgacccaacctgccctggcagtggttggaaagctgaaag

SEQ ID NO: 44736 - DNA, 1669 bp, Bovine  19866881037421
  misc_feature (1)..(1): n is a, c, g, or t
ntgcgaagagttgactcattggaaaagactctgatgctgggagggattgagggtaggaggagaaggggacgacagaggatgagatggctggatggcatcactgactcgatggatgtgagtctgagtgaactccgggagttggtgatggacagggaggcctggtgtgttgcgattcatgaggtctcaaagagtcggacatgactgagcgactgaactgaactgaactgaattatcatcttgtacaccttaagcttgtgtgtgttgcatgtcaataatatctcaattaagctagaggaaaaaagaaactatggagatgaggcctggcaatctgtgttttaaccagccctccagatgattctgatgtatgctaatgtaaaaatacaactattctggaaaacaagcaggaagacttcaggtcaaaggtgaggtttaattttctggcaggatgttaacaccagcatgggccatctcaaaagtctagcctgggatctccttgtttggctctgatggatgggagggatcctgtgtctctagaaagctttccacctttatggttcatctctcaagcatagagcaccacacacggaatcttaagagcgacagctcagcattctttaaccacactaaaaaaaaaaaacaaaaacgacccacacttaaagtgtaaactaataaagaacaggatattctgttcccacgtgtaggtgctgggaaagcaatcgggacgaacagggagggtgccatggtcgctttctcccctcgcactcaccctctgcaggggcatgccatatattagcgggcacttcacatcagctaattcagattcccctgtcagacaaatcccacccgtgagcactgctgtctacaccacataacaccacatagatcaagagtggggagaggccgaagtcatgaacaccatagctttccataaaagttaattaatgacagaagcatattgctgggaatggcaacacggctgttatttatggctcaggaaaccccaactgtagggatttgccttttcctttctcccagtcccagctctacccacgagtttactcaccccattacagtaacttcgtgactcatttgccaagttaacaagactatagcatggaatctataaaaattaatacaacagttggacatccaacacgcatcccaggagaaacagaccaccctatggatgccgccctgttcttctctatccccacacctcaacacttcttcacacttcacatttctactgttggcaacagttcccacctgtcacccccaagaaaaggatttccccgaggaatccttggtgctgaaaggcttctagacacctcctttccccacttcccagccataccgccccacacaggcatgggccaacccgttaggtgttaggaaaacggctcaccactgacagaccattaccgctttgagaggctgtgtagcaccatggtgaaaactgtctctggctgcaaattccagtaaactgttcatggtgtcctcatctataaagtgggtccaacaatacttgcctttgaaggttgctgtgaggttcgaaccaacctgatgagaactgagtgactccaggtgctactggggcccagcaaaccttcatggtacaagggcttctccttcactctttccccttctcaggccacgtgcccctacaaac

SEQ ID NO: 44737 - DNA, 2045 bp, Bovine  19866881049156
  misc_feature (1)..(1): n is a, c, g, or t
nttctttcatcactaatgataacctaaacgtgtttttggaattcttaccattgctgaaattaaagcctagttataatatgtcgccagaaaaaattggactatatgggcaacatgcactaagcattgtaatcatattataaatattaaaaccaatgttcttgtcaggattaaaacaaatatttaaactggctacgtgttctacttatgctatcctcttaatcttgaagtgttctggaaaaggaatgtatgagtccatttcctgagctgtgaaaaggatcgtttctaatcttatataagacttcatgcttttattttgctgtagcgaagatcaattaagcaattggaacaattgtttttctccactgcaagcatgtctttcaagatcttttttaatggtgcaaggtgtttagtttaggtagatgcattttaattaaatcatggtaaaaccccagttgttcaggcggaatggagatactaacttagttatgataaactgggattttagtataaaggatgcctatacagagggataactttattatggatagcagagtgaaggtgtcaataaagtgtttattaacagaggttttactctgatcttgcaatattagtggctgtttttggaaaagagagagctttttaattccttaaacataatctgctgtttcttcaacataaactaaacagaatagaaaataaagctatttaatagacccttaataggagcattgtaaagatgccagtagagattcatgagcagtttttaaagctcaacacccagaagtcaggatgctctttgaaaagcatgaaggattggtaaatgaagcttacaataattaaatacataaataagatactattttttaatggattttagcagaagccaatggaggcaggggccaaaggttaaagttataaaagacacacagtctttttcttctattttacttatttgtttaatatttatcgatttatttgtctgcagcaggccttagttgaggcgcatgggctccttgatcttcactgcagcatacgggatctcttagttgcagcatgtgagatctgttccctggccagggatcaaacctaggccccctgctctgggagcacagagtcttagccactggatcaccagggaagtccctagcactgatagaacagaatctggggatctttggatacgttgtgccttgctgagagactgacgcaacctttccctgcccctggtaggcctggcaaaccaaatggctgctctaattttaagaacctctccttggcacctctccatatcagcagtattatattctcctctggttgccacccaggtggggagggatcaaggaggcggtgagttgctggaataggaagtaggtaaaagggaaacccaaggagagaagggaatccattgggtttggacttggccacctcactcatgcgtatggaagcttctcaatctggatgaataagggcttttagagttcacaataaatggatagtgaatctttattcctttcctgtaataacatgagttgccttaataggtcataaaacagataacttagtttaatctgatatttcaatcttagcactgtgtgatgccatacaggagaaagtcatctctcctctcccaaactccagcatttccatggaaagaaaaattgcaccaataccagcccctcccataaggcccccaactaggaaagctaatcactatgtaaaggaaagagaaaaggaaaggtattcccatcagattgcagagttcaaacaatggcaaggagagataagaaagccttcctaagtggacaatgcaaagaaatagaagaaaacaatagaatgggaaagactagagatctttttaagaaaattagagatacccaagggaacatttcatgcaaagatgggctcaataaaggacagaaacggtatggctctaacaagcagaaaatattagaagaggtggcaagaatacacagaagaactatacaaaaaagatcctaatgatacagataaccacgatagtgtgatcactcacctagagccagata

SEQ ID NO: 44738 - DNA, 1749 bp, Bovine  19866881085063
  misc_feature (1)..(1): n is a, c, g, or t
naacaagcgtcttgtaatttcatacagatggtagtctgatttggcctgtggctgtggtttgccatctattgatttaggatctagagcataacttctcccgttttaggaaactctccaggaatcagtttggtgttgaacatacactgggtagtcaataaatattaactaacactccagggtacctcataggcatgtggtagagggaacaccatgacctggaaatagcatgatactagggattagaagaccaacctggagtcccagatcttaagttacttatcttaagtaaacttaagatagttaataacctccaaccaggccttggtttcctgctcatttatcattgccaaagacaggccatggtatccctataagagctctatttacttgtattgtacttataagtatggcactttgcatatgttaacttaatatttaccacagtaatatgagatatgtacttaaaatgttcccattttgcagatgaggattagagagactaagtaatctgcccaagaacacacagcaggtaagtggcagggatagaacttgaccccattatggcttcagaatctagctcttgaccccaggctataatactttcactttataaatgaggaagatacattcctcaacaaaaaaaaagtatactgctacaagccccattctacctttggagtggggtatgagggatatcagcaatgaatttgagacacataagctcaaatataaagtatggaaataaattttttagtcctacctggcatttagtgaacacttgctatagatccagatcaaatattttactctgtcttgtttcatttaatcctattaataacaagtttatgaagtactattatcaacccctcacatagatagaaaattgaggcttagagagatgaaatacttgttcagggtcccaggatggtaaatagcagagcagagatttgaacacatggcacccgatctcagagttcaaagggaacagtgacactttcagccatacttgtgtgtgttactattagtagtgcattcagccacatggtaggttaaatatggctttgacagctggcctgagaacctaaccatcacttagaactcagtttccatagaaaaatgaattgtgagtttgaaacaactcatttacaagcagatttgggaaaacactcggtgaactgggagatgagtctgtgccttcgtccgtggctcagcggtaaagaatccgtctacaatgcaggagacatgagtttgaaccctgggtcaggaagatcccctggaggaggaaatggcaacccacttcagtattcttgcctggagaatcccatggacacaggagctcagtgggctgcagtctatggggttgcaacagagttagcaactcaacgacaatctctttattgtacgtgaatgttcagaacttttgcctttggcaatgaacttgcctcattctccttacttccctgaagtgtctgcactgctttgcccacactggacagccagtgatctcctgagtaactcttgatctctacaagaggagctatgcagtgacagctctcatcagacaccccaaattttgcctccaaacatactggagggaattattgtatccacagagacgtggtgccccattcctgggttaccctgaattgaaaggctatagatgaaggtcagtatgagttcagaagagaagcatagagagactgagaagtggctctgtaatttcggaaatgcagctccttggacagggac

SEQ ID NO: 44739 - DNA, 965 bp, Bovine  19866881090600
  misc_feature (1)..(1): n is a, c, g, or t
nttttctgtgtccttactggtatttcctttaaaatatgcagctcttctgaactccattgtctcttgggataatgccttactgggtcttcagtcttactttgatccccaggatccttgagagctggtggggacctcagctataagctgatacatcttattttacagaagatgatctattaattcaagttgaatagaaattattttatagaaaattaattttaagaaattaatctggaaaagactaaagatgactacctcctaactgattaacccagctagttagggtcacataaatggattgcaaccactactctccccaaacctgaaaagaagcagattggctacagttaaacgtggaaaagtgaaacaggtggtgctgtgacacggggttttattaaatcagcctttacacagccatgtacttcttgccagtggggtcacttttgacagtcccctaagtttcctgactctgattctgggaaattaatattctatatttacctggttttctttccatcccatcacaaccttgaattctgaattcaattcaccttcaccaaagctgtctttatcctttataatttcacctatcttccgttgtctggaagagaaagccaacacatctcttactgtttactccttttctgtacttacttgtcattgcatgaatagcctccaagtctttgcacatgaaattatcttctctcccgcactggccaccacagtcctaaactccatccacaacttatctcaaaggccaactcattttttaaccacacacaacccccctctctcagaattaatcatttaatcctcctttctctctcactgtcttacttttgcctcaatgctagctccttcctcagtctgtttttctattaggatttcttttttatttatcatttactagactgcactccctaaagggagagattttcctttagacacgaggacttcacaacaca

SEQ ID NO: 44740 - DNA, 797 bp, Bovine  19866881120460
  misc_feature (1)..(1): n is a, c, g, or t
naatgagcttgttgagatattcagtatagacacatcagctgttggtgatttcccccaaagttgaaggttataatttttctacccttcctaagaaataatggtctcttggaatgtgcaactaaattagtcatactgtgtcctgagaattggtctctgtaatacatcctggcctttgaaaaagagctgcagttgtataatggattttagaagtctccaaagctggttcaactaacatatttgttagtctaataaatgatattgctcttgtcaagatttttccatatagcacaatttaatagaggaatcaatagtttctcagacatgacaaaagggcctgggtgtgttttgatgggagacacaaagtctcttgttgttctaataaagccaaaatggaaaaaaagttttttccccttcactttcaagtgtatgtttatgaagctaaaatatacataccactttctctaggaaaatatttgtttatcaatattttctcctacagtgtctttttactctgttattacacatgaatatgcattttgtttccatcttacttcctctggtttgatgagctgtcactggtacactcttcttcaggaaaaactcaagtctgagggtattttaatccactgaacataaggaattttctttagaaatcttttaagaaacattttgggcaaacattggcatctacctacatttcttctcatcatagcttttttaaagtcctcagagtggtttcgtacagtcaggagccatcttctctagtggctcctgccttcactgaacagagattttaa

SEQ ID NO: 44741 - DNA, 1211 bp, Bovine  19866881140112
  misc_feature (1)..(1): n is a, c, g, or t
natatatgtttatgtgctgtttatttcagacattgatttagattttctgtgttttttatgttgttcaaatgttttaaaaaatcagtcctgacctaaagcttttcactgagtccacacattattaccatttctaaactgtaggcttggctttctttgaccttttctgaagggcatactctttgaataccgtgttgattcttctgtatgtatcatagacagttttgatagcatatggattctttctaatacatacacaaactaggcagaacacagttttgatttcatattctatttttccccagtttttattcattttcattttgttgttgtaccaaccacaggtattaaagaaagaattccaggtattaaagaaagaagaaaataattgacaggttactatataactattttagaatataggaatttgacatgaaaagcacccttttaaattgctatcaactgatcattagtttctcatcatttcttctgggtactcagaaaaatatggccagatgtaggagaggaattttagcacacagtaccgagtttgtgttctttattctacaatatgattttcacccagtcacagtaacactccagtgaagtcctgtgacttgaagaacaaaaggactcatgccctagcacagcacaatccttaaataggggactcccaaaggtgttattaagcctggttccccaccctcatttctctgcccaaccctaacaaaaccaacccaattatgttcccagaaaggtggagagagaagcgaccttccagaactgaggctttcatggtcatctcccaaggtgttatctgagaccccaatgaaacaccagaacatgcctcaaagttggggcaaatcaaagatgaggatcaaaagctttggagaaattccctggcgtagtgaacaaaccatgaaaagctgccacttactgagagcttgaaatacacaagcaggcatggcagttgtcacaacaagcccacatggtagataaggaagcaaagatataggtatttacctggagctaacaagtttctggagctagaattcataccctgtgtcagctgaattccagttttggacagtgttgcagagagcccatgcttttaaccactattaatatagcaccttgcccagcagatgccaaaatgtcacactatctctgaaacctaaattatgattctataaaataaaaattttaatctataa

SEQ ID NO: 44742 - DNA, 1001 bp, Bovine  19866881164870
  misc_feature (1)..(1): n is a, c, g, or t
naacaaatgttgtatcttcccaaatggaaagtctattagcaaaattacatttagaaggaaagtcaatagttaggagttttttataaagcttttttttttcccctgatcttaagatcagacgtgagggtgaaggagagggagggatgaattgagagagcagcattgaaaatacacattaccaaatgcaaaattagatagccaatggaaatttactgtatgatgcagacagctcaaattcagtgcccagtgatgacctagaggggtgggagattgaagagagaggggacatgcatatgcctgtggctgattcatgttgctgtatggcagaaaccaacacaatattgtaaagcaattgtccttcaatcaaaattaagtgaaaaaaaactatacttcaataaattttttaaaaatgtatctaaatgtaaactggtatatttatgttgtacttaatgactagcaagcagaagccactaagaaattcactacaaaaatactgtatggaacctgataaatattatgaaaatattaaaatcatgatttacatgctaattacaactgtgcaaagagatgcataggataagatgaagtaaacattttaaaaggaaaatgtttctgttttcccagtgatttaacttttatttatttatttttttttggaattttgcattttctttttggatgtttgctgttttgggagaacttaaggatggagataatgcggaatgtaaccctacctcctccaaacacataaaaatgctatatataatatttgaaatatttcaatgtacagctgagctataaagcaagaggagtgccataaataaggaggacacccacagcagagagttggatttgaagttaggtgtcctttcgcagtgagagactgccctgggctcccattgtaaagccagagccaggaaaacatgacaccaataaaactaatccccggcagaagaactgattatatgtctttccagcaatgtctctacactatagggaag

SEQ ID NO: 44743 - DNA, 1286 bp, Bovine  19866881166785
  misc_feature (1)..(1): n is a, c, g, or t
nttgggggagtacaggttatgtacattgcagactgttaggtaaaatgatgacaaaaagtccttcagtaattttgataatactactactgtctgaggtaggcctatattatatctaatgtgtatgacaaatagatcattttagtgtaaaatatttatatgtagtaatactctgtgtgtacgttgggttgagggtgatgataaaacagtaagtaatgcccactctaggaacccagtagttaacaaatatatattttaatttcacagaaggttttatgagtattatatcttaagccaggagtcatccttatacttttatttagtttaggctagatccttgatgtaacttatgaagttgatgccctaaagtatataaaatgtgaatagaattgaatgtgctattaatcctaatcaatgtgagcaaatagccttgaaaataataaaacaggcaaaattcataacttggctgtttttcattcagtgtagaccttaactagctattgttttgtaattaatatgtgctcacatgtacacccagtttgtgttttagtgcagcattgtttcatcttaagcttgctttcataatagattatgaatactagtggaagggccaagttcaagcaaatatacatgttctggtcctagttttccccaaattgcatgtattttaagcattagtaagttttaatactataaattttttttaatttgtgttagataatgataatagtttatctctgaatagaggatgcttatgtcactctactcagaacctgtggaataaggaacaagaagaaattcttttcatacttttattgttcataaagttggaggaactaccttaaactgcaacaagaacttaaccaaattttgtttgctttaaaggaagaggtctttccaaagagaattaacagctgactgaaccagtcttgctaattcattagtttactagctaaaatactttagagtcctgtatgatacttaaatctgtgtaattgcttattgacatttatttcagatcagaccccaacaccaacaagattcttgaaaaactgtgaagaagtgggtttgtttaatgagttggcaagtccatttgagaatgagttcaagaaagcctcagaagatgacattaaaaaagtatgttattaaccatgaaattaaaagagtgcttctgacagaacagttttcacttgttgctttcttattttagataaactgattggctgtttttaaactaacactttctctaatttgcattttagatgcctctagatttatctcctcttgca

SEQ ID NO: 44744 - DNA, 870 bp, Bovine  19866881177495
  misc_feature (1)..(1): n is a, c, g, or t
ngagtggggtgccttgccttctccttgcttaattctaccaggtttctagcatcatcccctccctgctccaggaaaatccaatttaattcttctgtatttactgcaccagatgagcctttcatccaagacagataaaatgcctgtaaacccattttcaaatggcatccccagatagactattcatgaaaatgcatgtgtacacatatatgtacacactcaacaatctagaccacatttccctgtttgcttatagccccggggagggcagaaacacaatttccaagggtgatgtcaactccatacatcatgctgaggagaacataactagggtataaagcagcttcctcttgcccagaagctgctcccacagaatactccatgtgagttctgctgaagcaccacaggggtggttgagacaactcagtttctggcattgcaagccaatgaaattcctgtcctctcactctcaaataaataaagctttgaaaactatcattattactgttctttaaatgagtctgcattgcctccgcactacctccacccactgatttccatttgttttcctgtctgagccgagtgtttgcatctagtgtctccccgagcagggcgaaagatgtagcaccccttctctgctgggctgaccctccctggagagcccagtgggggtgaggtactacctggtgggaattttctcattagccctacaagcagcatgtattccagcccagtcagcctgaggctctgagcagagaactgcaaatattttactgagagaggagctcaagagtgtgacaactagtgtattaccactgaatctgttctgtatgaaactggcagaaatgggaatgcggagactgctcccctcag

SEQ ID NO: 44745 - DNA, 1561 bp, Bovine  19866881275930
  misc_feature (1)..(1): n is a, c, g, or t
nctgaaaagtgaaaattttcactgtatattttaatttgcatttctcttattaatgaagttgaacatcttttcatatattatcatgtcatatatatgtatctcttttggtgaactgtctatgacttttgctttttaaaatcatgatttaaatcttctattgatggaaaaattacttccataatgttacaatgatgccttcaaactttgttttaagaagtaaagaataaaacagtaagaaatggaagaatgtataaattcactgaaaagaatactaacatcacttaaagctatattgtcttattctatcctgtttcaaacagcctattaaaaagtgagaagaatgttaagaaaaatgcattcaagttacaattttatgatgttaagtagcattaacagttaatcccacaaacaaccacaccactgaaaaagttcaaagtttgggaaacaaatgattgagagacatttcataatggtttcattgcacccacctcattagtacaggtaattctccgaggatgaggggcttcttgttgcagttgatatactgggaagttagaaaataaaagatgtcagtttcccttatgcagaacatctgaatatattaggaatcaaaacctgcctgctttttaactttcataagaaaactgtggtacagtcctatttgctattaaattaaattttgttatgaaaaaaataaagtaagccaaagtatatttagtgaaagcccagaagcaaacaaataaaaaaattataagccacagagtgttacaacaactcaatactggatatttggctctgctctccataatctggtaatttattttcctcaatttttatggatatattacataaagaatgtctctgttataaacaaataatatttgtgtattttaacagcacattattaagtgtcaaacttgaaactaaaattaggatttataggctagatgtaacacatacactgttccctcccccccatttatcttgtgaacatatatcttcaaagataatctctcctagaaacagtttctaagccaaagttaccaccacttatttaactaaggtaaatgcagcaagagagaattccaacaccaaatagctagccagaggataattttctggacatctgaaaatggactcatgaaaaactttatcaataccatgaccttctaagggcttcccaggtgtctcaatggtaaagaatctgcctgccaatgcaggaggtgcaggttcaatccgtgggtcaggaagatcccctggagaaggaaaggcaacccactcgtgttcttgccaggataatcccatggatagaggaacctgaccggctgtagtccatggggttgcaatgagtcagacaagactgagcacacacacacacgtcctctaagcctcacttcaggctttttgacttgaaacaaagaaaaaatcaaaagaatgtatggttatcagagaaagtgtgtttatgtaggtctaagtttatctcttggagaacatctgttttctatttctacacatataatcaacatataactgaatttaatagtgtatttatatacataga

SEQ ID NO: 44746 - DNA, 762 bp, Bovine  19866881308235
  misc_feature (1)..(1): n is a, c, g, or t
nattaagctagtgtaggcagagctggggagggggaaagactgccggaaaccctcagcccggaggtgagtgcctgaccctgtgatgttgccttgtctatataatttgctgcgtgttgcatcatacagaatatgccaacctttttccgcctgctcaaaaaaaggtgatgctaattagatcaggcaaatagctgctgttgttgattcatttgaaaatgattattccaaggcaatgtgttattacccagcaagccacagctttgcctattaatgctctgaggtggctgccagacttcaaagtcagaggtggaatctgaggctagcagtgcctgctgggtcactatcagagccttcatctgaggacaaggaacagtctattgacatttaagaatttaatcccttctggttagtatgaacactactatcaattcagtgctaataaatatcagttgggacacttcccatgtgcaaagcgtaatacagtagattacacaaaagcaaatatgaagttaaggttcttacattctagtgaaagagctaagatgctgagtcaagtaataatacagaatcttgcaagtagtataattaagcgaaataagtaaaaatacatttgataaagtggcaagttctccacatgctgtttatttatttagtatattagaaatataaagtgctgtgggaacactaaggacgtaaagcttcattttgtagagggtagacttaaaggaatcaagatgaggaaaaacttcaggaagcaagcagcat

SEQ ID NO: 44747 - DNA, 995 bp, Bovine  19866881401033
  misc_feature (1)..(1): n is a, c, g, or t
ntcattagctacaagtggattttccagattgtggattttgagacaaattccttctgtgattccctctgttactcagctcagactaatttggatgtgcctgagcaaaacacaattaggtaggagaagctgctaaaaaactaaaaagaaagaaaaagaaaaaaagtgtagcctaggatatctttagagttagtgtgcatatttatcttcagaaactctatgttcgttttctaggtaaatatccatggctatttccaaaaccattcctaggattatatatctatgtgaatttgaaaacttttcaaagattcctggctacctgagaatggatgttcagaaagtgggggttttatttagatcccaatatttcatatgtggtgttcttggtatggggactatacttgaatcagtcagtaagtttgccttctaattctgaactcaatgaaaagagatccaagaaacaggacacttggggtagccgaaaagaaagggaacaaaaaggattttaatgactcacgtaaccatgatggtgtgatcactcacctagaaaccagacattctggaatgcaaagtcaagtgagccttaggaagcatcactacaaacaaagctagtggaggtgatggtataccagttgagctatttcaaatcctaaaagatgatactcttaaagtgctgcactcaatatgccagcaaatttggaaaattcagcagtggccacaggactgaaaaaggtcagttttcattccaatcccaaacaaaagcaatgccaaagaatgctcaaactactgaacaattgcaatcatctcacatactaccaaagtaatgctcaaaattctctaaactagcagtaggtgaactgagaacttccagatattcaggatggatttagaaaaggcagaggaaccagagatcagattgctaacatctgttagatcatagaaaaagcaagagaatcccagaaaaatacctgcttctgcttcattgactacgctgaagc

SEQ ID NO: 44748 - DNA, 1030 bp, Bovine  19866881408010
  misc_feature (1)..(1): n is a, c, g, or t
natttgtaaaataaggaatgggactagttatccctaatgttccttctaggtttggttgtcattctgtgatattttaaaatatttaaatcaactggattatggataaaacagaagacgacttttatttgaatgttcgatatattcaaagtgttggtatatctagtaaatttaagtatcttatgttacagtttcataaatatctagtgtgactaagaagtcatacttggttaaagcattgatatgtgatttcatctgcagtatgctatactggtgtatttatcgtatagagagcaacctttttttcagatttaacaagactgaaattaagagtgcactgaacaatccatttcaactgtactaaaaaccgttttctcatttttatttgttctgttgactaaacaaaactcagaaaaccctttgagtttttttcctacgttttaaactaatgacttatcacaagtgttttgggttttcattttgttactcatttagcttcattcccattggtaaacattgattcgtttctcagtttgaatgaagcagaaattaatgaggcagtttctgcctcacaatcacaagttaaaattatagcactttatcatgtcagcacagctctaaacactaggagtaccagtggtattagcacagttcccaaaatagtgcagaatgtttgccgttgaacaaaaatatcacagggtgtatttctgcgaatgtgatagaaaattcgattcttcagttatactgataaaggttcaaattatttatttaaaatattcacaatatgtaacattctctcctatgttcgttaccagttgaagtatttttttccacagtgtgaatttacttcaagtatatttggtctgtttttaataatgttttcctaaatacttaatctagatgagtctccccaccctccttttctctgaggcttacctgatgtttgtgtggcattttatgattcataaatagcactttcactggacaaagccgtttgctttataatggaggcagcatttactttgaacttagg

SEQ ID NO: 44749 - DNA, 1229 bp, Bovine  19866881414789
  misc_feature (1)..(1): n is a, c, g, or t
ntgatgcaggaatagcacaggacatggtttgtccttaggaagatgtaagagaagaggaaatgggcctggtacaggactaaggaaaacaaaagaagggcaattagaaaaaagaaatccgtatcaatgatgtctaaaaaaatataaaagtatttttactattataatttaaaaataaattttccagagacatctaaaaaattaataaacataacagaagagaaacagagaacagacaggtggttgccagagggaagggaatggagggatgagagacattaagaggtacaaacttccagttgcaaaataaatgagtcacaggaatgaaatccacagtgtgaggaatataatcattaataatgtaatatcatctctgtatggtaacaaaggtggtcagaagatacaaacttatagttagaagatatataagtactagggatgtaatgtggtgtgctcagtcatgtctgattctttgcaaccccatggattatagctgcttgccaggctcctctgtccatggaattttccagacaagaatcctggagtgggttgccatttccttctccagaggatcttcctggcccaaggattgaaccagcatctcttatgtctcctgcactggcaggtgggttctctaccactagcgccacttgggaagccctaagcgttcactgtacatctcaataaaactgaagaaaaaaaacgaacaagaggtcagcccaaggaaaatgcccatgtgacagatgcaaacttgataccatttctcataaaatgaacaaaatacccacaaaaaatcatacatggtatatatacactgctcaagtaattaaacaaaaatttctgaaccactgcaaagcacactgtaaaatttaattagttttaattgcatcttaaatgtacaatgtatgtaagcagtgtagaaaaaaagaaaaaaaatgggaaaagctacgaatttacttagagaacaatctgcaatatattaactgagaaaaattcttgtcagaaaactcttgagaactccctgtaaaaactgaaagaaatgttttgtgttagtcgcttagttgtgtcttactctttgcaacaccatggacaatagcctgccaggctccactgtccatgggattcctccaggcaagaatactggagtgggtagccattcccttctccagcggatcttcctgacccaaggatcaaagccgggtctcctgcattgcaggcagattctttaccgt

SEQ ID NO: 44750 - DNA, 639 bp, Bovine  19866881444407
  misc_feature (1)..(1): n is a, c, g, or t
ngtttgcttatacctaacggggagcaccagtgtaacctctagagaggagtttgcaaagttctgcctatggacacttttctctaaagtctagactccaagctccaaaagtagactggaatctgaccagccactggagaaaagcaagtcactggattccagtctttattctctgagatttgccaacttgtcaaaagtgagagcaagaattttatagtaaaggtggagtacatgattcaggaaaatctttgatttcaagaaataagagtttccaaatttgccacaatcccagtgggacacgatttttatgagctaggaggagagagagaaaaaagacgtacaaagatttttgtacctttgttctgtctaaaataattaataccaataataatacaattccaaaatgactcactcctggagagtcaacaactaccatgtccaatgaagaataaaagtctgttactaccatgttttctatgacaaggaaaattagcctctacattacattttttaaaatgaagcctcttacaactttttttttttttttttgcgattgaagtgttgaaaatccaatacactctttcaagagggaaatctaaacagttttctgtgtaacagcaacatacagtagtctggaacctc

SEQ ID NO: 44751 - DNA, 1334 bp, Bovine  19866881607430
  misc_feature (1)..(1): n is a, c, g, or t
ntgtaaatggcattattggtaaatgtagaaatctatttgaattcagagcacactgagtgaactaaacccatatttcaaagacttcttttatgttgaatattttctcctgtggtcaagagtctctggaatcaagaattacactggagagggagtggggtcactggaaaactctgcattattttcagttccatgttatacactatgacttaataagccaataaacattcatactagatagaatcaaagatagtattaacctcctggcatgtgtgagagagaagctttggccccagagttaacgacctttgcattattttattaagctcttacagatctttgacgattctaaatcacagtattggagagttatattaaaagtatattaattatattatattaaaagtattatattaccattatattaaaagtaaaaattgtatatacagaatagtgacagatgaacccaaaaagggtagattggatgccttatttggtgtttggcttaattggtaatattcataatattaaatgtttaggatattacaaacaatgcaagacttagctatacttttagagatccaccccagatatataaagaaaaacaagagtgaactaatataactatcttaaaattctccaaaaggctttaagtttttaactccaagcagggatcctaatgaaaaatataccaatgccagatttagttcatcagaatgcctccaaaattaattgagtaaggagggacctaatgggtttttaacagttatgaagttgtgcaaggcacacttcatatttctttatttaatcctcccaataatcacaggaaataggtactattgttatgctcattttatatgaagaaatataggcacagaaggctttcatggattgcatcaaattatactgcctacatgtaaccatcaaagtcaagttctgattgtctctaaaagtgctcagttaagttgtacctaatatcctcctccatctttgctcttcctctctccccttctcccttcaaatacttctccatcaggattaaggggtcatccacaatccacactattaagtcttaatgacagagaaaagtttctaggtgcatgtggcttccctgacattcctattctagtgtctcaaaggaaatatctgctgaaatgttaatggctggtcttttatcacatggtaggaaatctgtacccatccctaccactattgcaggttccctgaggccagagtcttactaattctgaatctccttaggacctgacaaagggcctcactagcagacacttggcaaatgtgttgaactggatgactgatacaagggacaggcaaac

SEQ ID NO: 44752 - DNA, 890 bp, Bovine  19866881608439
  misc_feature (1)..(1): n is a, c, g, or t
nttcatgtatattcatcctcaaagtaagcaggaattcataatctgtcctttgcatcctcagtcactcagtgtgtctgactttttgtgaccctattggactgtagcccactaggctcctctgtccatggatttttccagataagaatactggagtgggttgccatttcctgctccaaatctatccctttggaatcataaaaaaataatgtgaaaatcaccctagcttatcttcacttctgacaggagtttgtttgtaatatctttattttccatattcattttgccttggattttgacattattcagtctttacacttaatgtcttcccagccaccatccattccaccttctttcaacactttactgacctgtggacggcgatgttaccttgacttattctcgacgtgatcttcaatatgtggtccacaggcaggattttctgctaaaagcattttctccgaactgctgaaaagaaagctaactctagtttcctgtgggccaagtcccctgtgaattccaacagggagaaaaaagttaattgctaacaggtctgtgcatgtgtcacttacaactcgccactggatcccttcagtctcacaccctttcagcagtagcgtttagcgcaatgagaccagacggagttgttcgttttattttattttttttttttttgctttcttcaataagatacagaatgagtttaaagaaagctatctttaagctttatctctgtgttctggcgtaagaattcaataattcctttaatccatgttgtcatctcccttggccttttcctttactttagtcttttaacatctcaccttattttaatagcaattatcagaatccatatactaattcaacctaacaagaacactagtagtctgaac

SEQ ID NO: 44753 - DNA, 1184 bp, Bovine  19866881912870
  misc_feature (1)..(1): n is a, c, g, or t
natgttgcaactttactataatttccacctttgaaaattttaaaagttttacttgactacataaaatggtttgacttgatatttcagatgtaatatattttacttattccattttgtcctttccctatacagaggtggatttattcagataattagaaattgttccaagggaagatttccctaaggttgcaatggaatagtaatttagcctatgaacggcgtaacatctcatctgagaagtgtatgaaaagtatacctaatgtgctgatttcctgctcaaaaactcttgtgtgcagatgattctccacttttgaacagattgtcttaaggtttttgttcgtttctaggctgtgtagtcctctcttgggtcatactttctcaaaggagagatgttttacaagctggacttgtccataggctcattcccttaatcctatttgagaatagtgacaaattcaaccttgaaaataaaaaggaataaaaaaatttttccttgaaaaaagagctaaataataaagacaatagcattgaattataataaggtttcttctttaatttgtctttagaacttgcccttgagagaaagaacttgtatacagaatttggaaggatggtcaatggagacctcagtggaaattctgaaggaaacttcgagacacttccaagggctttaaaggctaataaggaactgttatttctaaatctattttcctcattcaatcaagtagagagaggtgataaaaatgattttctatagtcacaattcattattctgctttgctttaggtcttatggccagaggttcctttccctggaagttgaggtaaataatgcttcagattctgacacctctttcaagtccacttaatcaaatataaaatcgaaaccacaggaaagaaagagggctatttcttttcacttttccctgacccttcattctcccagcaccagtttcccttgtaccatcccagcataatctgtatgatttcttaaaagattttgcagcccttataaattaatggggttcttcctaaaaattaataggtttctttttttattgttttactttgtatttattttcaagagctagcatactcaaaagcagagacgttactttgccaacaaaggtccatctagtcaaggctttccagtagtcatgtgtggatgtgagagttggactgtga

SEQ ID NO: 44754 - DNA, 1106 bp, Bovine  19866882178852
  misc_feature (1)..(1): n is a, c, g, or t
natggctgaactaggctcttaaaatagaaatcagccagagctctgaagatggactcctcaaagttaatctgaggacaaggaggaaaggagggggcaggagagcagaatgagcctttctcagttagcctaatagctggatcaagtccaggtacaaaaattggcttgtgtgacaactcagaccagaacaattctctctgctcacaatgggaaaaataaggttatctttactgtgggtttttgtgcttcttttaaaatgaagtatcatttttgtgaggctaatagacttttcaaatagtgcattcttaaactagaaagtcaaagttcaatcacagcctattcatttgtcttattttacttgaataggaaacataaaagccctaatgagagaacacttgaaaagacaggtaaactcttgttaataattcaagcaagtgagaggatttacccgagcatcctttctcccttgcttgatttcttctggtgcttttagaccaacggtacagtttagtagtgtttcccatcttcctaagcacctttcattcggcatatgccaaaaatagttgttactatgcaccgacatttttgttctccacactaagcctacagagcagaggtgaattatgattaaaaaggaactgttttgcctgtcagaccattttacataaaacagcctttgagttctgaaggattttaagactgagctctaaaatcctacaatatgcatctaaaataatcttttacctaaaagcaaaagtactggccaactgacctccagcttttactatgtggaaatattccttagtgcataacagaattcaatgtaagtgcatttatttttaaccgtgttcatttttaaatcatcactctaggtcaggtaagtggattcaataaaaatgaacataccattcattattttttgtgaacctgcagtagctgaacacaataatattcagtagtaattaggctgtctaatatttgcttgaaatgtgtgtcatacattatcatatgctaattgtgcataattaatgttaactattcatgagcatgagatcagttaatgagttttaaagtaaaactcatatacaaaaaagatgaaaaaaacctcc

SEQ ID NO: 44755 - DNA, 1108 bp, Bovine  19866880446235
  misc_feature (1)..(1): n is a, c, g, or t
natgttcactggaaggcaaagttaccgctcctgttgagagccactgatctgtttgtcggtggggaaactgaggcacagagaggttaagtaagctgatcaagccccatggccatggccagtgtgagctgagccaggccttgaaggtaggtctgatccactcccaagcctggggctcctctcccatgtcagctgccctgaccaggcagagtggaccacaccatgatgtaaacacctgtcttctttatcttgaaggggcgataacccggaagataacccgccccctgcagctgcttctagaaagtgatcttttctccttctcctccttcccctcctgtgcaggatgcccgagttgatgtctttcgcgacgtcaccttctacatttactttagccttgtgctgatccagctcgtgttgtcctgcttctccgaccgctcgcccctgttctccgaaaccatcaacgaccccgtaagtgtgatcacagatgagcacagagacacgcatgtgtgcatgtgggtgtgtgcagaagacacagtatagcttacactgatatgagccagtaccgtccacctgggagctcatcctctcttccccaaacacttggccataggtaacgtcttcctccctgctttaccaatggaaaaaccaagccgcagacgtggctggagggtacttaaggagggtgtcccattcctagttgtaaacagctgtgtcttccggcccatttggtgggcatagtggttttagacagtacgaatgaacatttaaatatcaggaaattccacaggcgttcttaactgtccaggttttctagaaaagtgttgtggcagcgtcaatgccattagggtggccgctcttctgttggtgggaggaacgtggctgttcatcaccctggtcctcctcctttcttcctccccgcttccctccatgccatttcccttcctcctcccccgcactcccttcttccatccaggctgagtgccaggctctgacctgggcacagggctgtagcagtgaataaagcagaattcttgccacttggagctcatgttttcatgggcaggggcacaaacagtagcccaggacccaagtatatatatcctaccagtta

SEQ ID NO: 44756 - DNA, 2011 bp, Bovine  19866880515351
  misc_feature (1)..(1): n is a, c, g, or t
nagacactgctataagaacacggaggagacttgagagaaattggtggaactttgtacctgtaaatatatatcgtatgtaatatatacaaacacgtaagtaaacatacattttaatagtggtaagactctgggtgatctttttcttgtatttttaaaatttgctcttattctaaaactataaataattaaaagtagtgaaaataagtatttttaaaagtaaaaaactgaatttcacactttaaatgagtgaactgcatggcatatgaattatacctcaaaagctgatataaataaatcaaggtagggtgggaacctgctggtgtaatgtgctcttatgtccacagggggcactcacaccattctgaagaatgctctctgatgaggtgggccctggttcaccgaatgcaaggacttggcacaggtcacttcagtgaatccctaagtcagactctaaccagggtccctttagtttcattcctggggggcatttttttggaatgcagtgatagtcactcatgtccaactctttgagactctgtggactgtagcacactaggctcctctgtccatgggattctccaggcaagaacactggagtgggttgccattcccttatccaagggatcttccccgacccttgggaaggggatcatacccctggtctcctacattgcatgcagattctttaccgtctgagctacagggaagcaagcccatgtgatcttatcctctctgtgtctgtttactcacctgcgaaatgggggtgatagtagaaggtgagttgcaaggttgtataaaggacaaatggattattctacacagagtgtctagcacagggcctgacaccacacaagggcacaatgtgtgtccctattactcttggtggtggtgggatggagttatcgccaggcattactgctactgtcattaacacagctcctgctattcagagatggtgtgcagacagaataaggcagttattaggggcaatgtgacaccagagccttgggtcctactcccagctgtcctactgaccacggacttgacctcagaccagccgtcgtccctcactacgtgcccttttcctccaaccataaaatgaggacttgggttaaataactgcagggtttcccaaacttcagtgaactccttgccaataatagcatgatttgtgcaatatccatatcctgactctcttgttactgatacctggtatttttaaatgactcacttgtacttaacttttaaatctaaagagaaaattagtatgattcattttgcgtaatggaagtccccattcaaaacatgtaacaaataacagaggggtttttttttggtcaggtggaggctgcctgcaggaggcacatgctgcggttcagaggattcttctgcgtcaagttacactgaagatcatggtcaagacgtcaggccagggggcttacgttacctccttctcagtttccgaatattccttgagtctctccacggccacaatgttggtctccatctcggacgacatccgaacgagccagttcaaatatgtggtgacctgtgaggggaagagtcatccgatggagcgtctagagtgagcatgagttgttttcttctcacgaaggcagcatgaattatgaaatgtttcagataatgaaggcccagaagacagctacctcagataccatggccagacctgctactgtgcgtctcttatcccagcgccacatttcaaaataacccgcggggctacacaagcaatcagaaaggaaacgagatggtattcccaaccaggtgatagttaagaaaacacaccacgacgaaatttgggagatgcagctaaagcagggcctcgagggaaatttatagtattgagtgcattcttctggtagctggaggcatcctctcaggccgtcagggacgctccttggctgatggggggagttctggctgcacctctgatttctcccctgcttcagtcagtcactgggctctagagctgcacctcaactccacttag

SEQ ID NO: 44757 - DNA, 1515 bp, Bovine  19866880544206
  misc_feature (1)..(1): n is a, c, g, or t
nctgaaaggtacattgtaggtgctcaataaacgtttggtccctcctccttgctttgcctaatgccagcttccgattagcccgaaggcagcagggaacagcgggacagtctgaaatgacccgctcttcacgactcctaggagcagcaacaagggccacttcccagccagagtgacaccaacgcaacgtgggaactagtccagggccccccaggggcagtcgccctgcaaacaccactccccacacggctgcattccagatgaaacacacagagagcagacctgctcggctgtcaccactgacagaggctcaaagtatggtgtgcatctgcctgctgctcctgcccctgacagaggcacagacaaatggggcttggaggaaagaagattctagaactaaggttgcatggggggaagggaaatccccagggaagaagctggacccatgtggtagccattctctggttcccaaggaaatgcatggtttccatgcgagaaaccatggaacagaaggaacaggcatctcccgggcactgctaaaggaagacatggaacgaggtcacacttacctcttttaaggcagtcatgattttggatctcaggatggcaagggcacacagtagggctataagccagaaagtgagcatgatccctgaggactggactcccctccttctctcgatctgaattaaaaaggtagcaagcagctggaagagaaaagcatgcgacaagagttgtcaggagaaggtcgggtccccacggcctccccagtctggggcctggcagatgcagggcccagaggagggctgcccccaggacggtggtagcagaatggcctggctccagtcccagctctgctctcgcctcgctgggtgaccttgggcgtgtcaccaaacctctctgagcctctgctgcctcatctgcaaaacagagttgacaacagtattcatctcgaaagccatgagaatgtaacaagatccaggaagggatggaaaagttgggagcgggaggagagagggtggcacgggcagggagctcagtttatcacagaaatcagcacgctttttcttaaaggaccagagagtaaatattttaggatttgtgggccatggagattctttcacaaccactcccatctgcagtgtagcatgaaagcagcctcccatgagacagggaagagtggttatggtcacctgccaataaaactttatttacaaaaacaggctgtgcgccaccccctgctttagagaaggaagtccagcctgatgcagtgggctcgtctgcctcgggcagcagtggtaaccgctctcctttactgagcctctctttgctctgcctctaggacgcactcacctgcactgactcagtgcaacctgttttcagccccagtttgcagatcaggaaacttactcaacctgctacagacagatacatagttgtcttcacggaacttcattagaatgacggtgagggggggattcatttcctggtaccctgagctagacttccgttttacat

SEQ ID NO: 44758 - DNA, 926 bp, Bovine  19866880561272
  misc_feature (1)..(1): n is a, c, g, or t
ntggacaggtcacacacccatgaatccagcccagcttggggctgagggattaagcagccattgggtagcctccttccaactgctgagcctggactgattaaaaggacttggcagtaaggtaattacaaggccaggaggccgtatgtggtcatgaggccgagtcttcctcaaggatgagggagctggacacaaagtcccctaagaaacaggactgagagacttccctagtggaccagtggttgagaatctgcctgccaaagcagggaacacgggttcaatccctggtccgggaagatcccacatgcctcagggcaattaagcccgtgcaccacagcaactgaagcttgcctgcagcaatgaagacccagtgcagcctaaaattaaaaaaaaaaaaaaaagtaggactgaagtttagggtgcactgaccgagaaggcatctttattcttagagtctggggtcagaaaagcaaagatattgatgtttctgaagcagccctgagcacatcaatcttcagatgcccatgagcctggagcttgggttgtttactttggcagaacctcccaggacaatttatttttatcaataaaacttggagactgttgagccaagcagccacgtggggagaagcaggttcccagagtctgtatgtcacttcctcgcccttgcgaggttaaagaccaggaaatcatggcgggaaaaggaggggctgtagtgatccagggtcaatgtgtgcacagctgtcctgactcttgtcttggatatgaatggactcaggaccagctacataggcggtttcccacactgagattttctttccttcttcttgctctgatcagaacctagccccctcagtttggggtgatgtctatcagaggttctgacattatcctaatagaagtaattcatactaaggtgtaaatgactg

SEQ ID NO: 44759 - DNA, 1273 bp, Bovine  19866880748313
  misc_feature (1)..(1): n is a, c, g, or t
nttctgttacttacactactctgtataacgggctctaggttcatccacctcattagaactgactcaaatgcgttccttcttatagatgagtaatattctaagtgatgggtatttttaaatcgaggtgtatacactgttgttcttagatataacactgttgcacacttagcagactacagtatagtgtcaacataactttgatatgtactgagaaaccaaaaaatttgcatgatttgctttactctaatatttgctttattgcaatagtctggactaagtccatgctgtctctgaggaacacctgtatcctgcccaccccaagagagattttcctgaatactgaaaatcctctgagtgattctaaactgaatgtcttctgactatgtatccaggtcttcaaaaaaataatgatacctaccaccaaatacggcacaatgtggctacttgtgaaattttagggtaaagtttaacacaagccaagacttcctcactgatggatatgccttctattttcacagagctattacagaattacatgcaattctgtctgtaaattatttagttcagggcctggaacacagtgaatgctcaataaatggtagttttaaagaggggggcagtgcagaacaagatggcaccaggtaccacctgcagtttaggggtgctggcctcagcatcagagcgtttgtacaacaaatgaccatctgcgttgtgctggggatacggtggtacatggaatatcaaacaaatcaaaaggtccccatggacctttttcttcaataagttgggtcttaactcagaaaagcagaagaaaaagcagctccacttacgtgcagagaatggactggtcctcccgatctgagaacaaaaacaaacaagagccacgagttagaatcagctctgagttgagggtcaggacatgctgccgcccagggctcccatttaagctcacacaccctggcccctctgggggtgacaaggggccagctgagctcattgcccagggcataggggacaaggccaaagacaagagggcaacaaagccctggaggcagccccagaaagatgctggaatctgacccattcaggaggcagtgagcatcccgggcccacccgctcggagtggaggggggttcccaggagacccactctgtacagatgaagtcacagacagaacaccgactttggatccagacagactgggtttcctcttggccacttcccagctctgtggccttgggcgaatattcttaacctctccaagcctcagttt

SEQ ID NO: 44760 - DNA, 1716 bp, Bovine  19866880779179
  misc_feature (1)..(1): n is a, c, g, or t
ngcgcttcagctgccgggaggaggccacgtagaacctctgcgggagagaacggaccagaggtgggcgaggggcccctcatcccatccttccagggccatgctggagaaagtctggacgtaaatgacccctctgggggcggaatgctggaccggggctgctttcacccgaggaacggcaggtgtactgactacaagaataaccagggcggcagcagtgatgataatagctcacgctccagtggagcccggatctctggtagctcagctggtaaagaatctgcctacaatgcaggagaccctggttcaattcctgggttgggaagatccgctggagaagggctaggctacccactccagtattcttgggctttcccttgtggctcagctggcaaagaatcgcctgcaatgcaggagacctgggtttgatctctgggttgggaagatcccctggagaagggaaaggctacccactccagtattttggcctggagaattccatggactgtacagtccacggggtcgcagaaagtcggacacgactgagtgactttcactacactacacgtggagcccagcatcccaggactgctttaagcaccttcacagccatcagctctttaatcttcatcaaaaacctataaggcgctcaatcctgtttcacaaggagtaaactgaggtcaacctcttccctacggccatgtggctaggaagtggcagagctgggattcaaacaccagcagtccagcctcaaagtgttgacctcaaacacggcatggcctctctgatgccacggacctcgagagtttatggaccccacagcgttgctttaggacaagcagagctcagcataaaccctgcctctgcctatccccatggacagagaccacatccaactctattcctgccctaacccgggtgttcagctcgttaagagacagaacaagagcccactgggagcactgaggagctgtgacagaggctggactggccatctgaagacacctctattctcctggcttcagtttctgcatctgtacaaaaggacccgctgagaccgaagttccctctcccggatgtgctgaagatgtaacatgtctgcactggcttcaacagcagagcagggcaaatgaacacaggtgctgagggacatgtcttctgcctcctgggctgttctgggtgccctgggccatctttaggggcagagacctttcatggagaacactgaacagagtgggtggctcttacgggttctccaaacttttttctggatgtcagctcacatgagaatttgaaccacatgttggggagccctctgggggccccataaactctgagaactaacccaggggtcacaccaacccgggccacctcagatcaggggttctgccaatccctgcacatggtcagatgccacctgtcctccggcggctctcactgccttgggacacagtccagaccccgtggtctggctcaaggaccctggcatctgcccccattaccctctcctgggatcacctcctctcccgactttctttcctcctgggtggaaactgctctaaaatgtctgacctgctcaacttactccaattgtcatgtcctctgaattttatttcctctaaaaagtgaacccaagacttatttttgttatggaatagtctcatttttaaaaaataattattagctttccttttaagctctattcctggagagaatcca

SEQ ID NO: 44761 - DNA, 1162 bp, Bovine  19866880978451
  misc_feature (1)..(1): n is a, c, g, or t
nttaaagagctcagagcccaaaccttggtgtccttgattctgcctttttcttacacccatgtctaatccatcagcaaatcctgctggatccccctttgaggtagacccagactgttccacgccccaccccaacatcagctctccccacataatagccaggcagtaaatatgagtggaatgatgaatgaatgaaaataaggactgaaaagttcccactggattaggcaacaggggagtgaccagtgtccatgaggaaggctttatcagtggagaaatgggaatagaatccggactcaaggggagggagaggcagatgcaggaagcttggctggaaaggggagaggccaggcaggtggaggctgggggcatgttgtcttgagagcaagtgcttcaggtcggaggtggccatggaggacaggcactgtgagccatagctcgctctggtgagcaggcgtgtcccccatcacactggcattgtagatgtagacccaggttcctgtccgtcccttgtcaccacagggcatgaatctctctgggggccagaagcagcggctgagcctggccagggccgtctacaggaaggctgctgtgtacctgctggatgaccccttggcagctctggatgcccaagttggccagcatgttttcaaccgggtcattgggcctgatgggctgctccaggggacggtaagtttggaaaaatgtctcagaggccatagtgcaaaggtagagaaagttctatcctacatctgctcaccaccaccctcctggaattcagttttcctctttgtaatggtcagcctttgctgtgaccacgctgcgtaacaaacagtccccaaatctcagtggcttacatcttcagtcaattcttgcctacgggcctgtggttaaactaccacagctctgcgtcaggtcactggccaggttcaggtgaactgtgtcttctggtttcatgacaggttgaaggagctcctttacttctctgttgggacatgccattttcaagaaacagggcagtagcacaagaaggggaagtcttcccactctgagccccaggacattcccccagccagccccctcccccagctctggaacagtggtcaagtgcgtgagtgtaacttccatcccttcctgccagactcggattctcgtcacccatgca

SEQ ID NO: 44762 - DNA, 3196 bp, Bovine  19866881311602
  misc_feature (1)..(1): n is a, c, g, or t
nctttctgtttgtttattgtttatgttttctcaaatatttattttgagtgttgtgacatgactttgtccctgcccataaagactttgaggtcaggtagcaaaaacttgtaattgcaggagctcagagattcttcagcctagcctagggtccatggctgttttcagaggagctgcgaacttgcgtggggagagaattacctctttattttcactaacctctcagtatattcagcagagtacgcaaaccacagctgcattagcaatgcttgtgttctgtcttagtagaaatcagggattttcacatcatagcagtcgttggatgttgtattgtttcggttcccaggtggcgctagtggtaaagaaccggcctgccaacgcaggagacataagagatgcgtgttcgatccctggatagggaagatccactggagaagggactggcaacccactccagtattcttgcctggagaatcctacggacagaggagcctggtggctacagtccgtggggtcgcaaagagtcggacacgactgagcgacttggcacacacgcatactgtttgcattcacctctgcttcaaactctaggtgttacgaagccgacggcttggacttgtgcttgttaattaagaagcactgtagatttctatgttaccacgtttgataattacatttccagataacttctttctcttttgatcaattttatgcatttgaaaacatcatcttgatacaggggctccaccagactgctggcgggatccatgggccccagcagtgcagccactgctgcgggtgtgatgagggaaggcccacgggggtggcacagtggggccccaggagattctgcctaagtacccctccggtccttcctgggggctcgccggcaacaacagggatctgtctgaccccatctccctcttgcagctgaactccttcgagcagctctgcatcaactacaccaacgagaagctgcagcagctcttcaaccacacgatgttcatcctggagcaggaggagtaccagcgcgagggcatcgagtggaacttcatcgacttcggcctcgacctgcagccttgcatcgacctcatcgagaagccggtaagagcctcgaggctgcgcctcgccccacctgttgctccacccctctggggacggaacccatcagtgatcctaataccgaatggtttactttgatgatgagttttttgtttaaatcagttttgttttccaacaaacaagttggtgtttggttcccaggcctgtcagccagtcccacagtgcccgagtctgctctcttataaactcagagtttgaaaggctttggggctccggggcgcttcctcttcctcaggagccttatcctcaatgtccccgctcaccacatagttgtgtggacacactgtgtgtcgagtggggtcccagagggactcgaggggccaggacccctgctgaggggcagcctctggacgtgggtcaggggtctgcatggcccatcaagccaccacgtgatttccagtgttctcatgggagaatcttgcaatggatcatcggattaaggtgtgttggacatagcctagacctcagaaatttctttttcagctagaacttgtaattggagtgctttcagtcatgctccttatttttttcttgtgtgaggaaagcactgcccaccttctggtgagattcttgagtttctgaaaaccaggctgtgacttctttacaagggtgagagtcggtgggtttccaggtcaagctgacctgcgcgatgctatgctccctccaggcaggccctcctggcatcctggccctgctggacgaggagtgctggttccccaaagccacggacaagagtttcgtggagaaggtgatgcaggagcagggcacccaccccaagttccagaagcccaagcagctgaaggacaaggcagatttctgcatcatccactacgctggcaaggtgaggcgtgcacaccctggtgtcatgcggtgttattattaagcgtgttttcagggtgtagatgtgctgtttgtgctaaagtcatggactttgcagtctgaattagggctccgctcctatgtgactttgggccagttacttcacctctctgaggcttagttgcctcatctggaaaatgtgggtgaccaccactgtactggggaatgtgtattaacggagctcacaaagcccagtgctgggcagtcagtgctcttgggcagggcctctcagcctccacactgcccacctcagtggccagatcagtctttattgtcagggaccctcctgcacgttgtaggatatttagcagcagacctggcttctccccaccagaggtcagtagcaccctccctacctgcgacaaccagaaatgtctccagacatcctggaacatctgctgggtgggattgaggggtaacattgtccccaggatgagagtcatgcctgtaggtgttgttggctttgttattgccaagaccaccggccaggaagtagcagagctgtcttcataccagctgtcagacatcctccagtgggcttgatcccagggcttggacctgaacaggtgtgtcctgagtctgcagaggtccaagcttagactataagctggttcttctcaggaagttgtgtcgcctgcacagaatgtctaacacttggacgtgtgatgagctggtcggtcctcagccttcccgtcagtgaggatcggcgatgagtgaggatcggtgatgagagacttgctgtcacagtggtgctcccaagccacccctggtcctcccccacccttctgcacgtggccctgcgctgttcggcctcccctgcttagctcctttgtctcctaaggctgttgaagccactcttgattttaaactacgtgttaaggagatctcttttttctagttacctgaggccatgccctcttccgaaagcccacgttctcccgccacctttgttagaaacgcaggcaggcttctgttgcactgttgtaggtgatgccaaacttgggcacgcctgaaagcccaggaagggctgaatggtgaaactggcatcgccgtccggcctgcactgcagcagctcaaaggacaaggattctggccgtgcccagggggacacatgccaagacacccaactctagggttcgtcctctcccaggaggtcattctgcctctagggagaaagacgccaccatctgcacctcat

SEQ ID NO: 44763 - DNA, 1281 bp, Bovine  19866881380883
  misc_feature (1)..(1): n is a, c, g, or t
ngggacacacatcatcagatgcacctcacaggtctgcagcgagagtaagggtttcggcaccaccgagggcagcccccgcagcgccttaccagcatctgctgggccatcttcttccgttctgcctgcagctgctggctccggtcttcctcctcctccaggcgggcctccatctcgtgcaggatctcctccagctcctgcttcttggctgccagccggacccgcatctcctcggcctcggcgtacagctccgtctccgcctgcagctgctcctgcagcaggttcttctcctccgtcagctgcaggcagggggcggggagacaggtggtgagccccacgggggcaggcggcctgccctctgcagcgtcagccaggctcccgggccggtacctgcgagtgtttctgctccagctccttgagttcgctctcggccttctgctgccgctccttggttttctggagctcatcctccttggcttgcatctcctcctcctgccgagtcacctgcagcaggggcttcacctgcacacagagggtcagcccatcagttgtctccatggcacaagggatacactctcatagtaagtaaatcaatggttctcggccagggacaattttattccacctgcagcccctcaggatatttggcagtttctggggacggtgttagctgtcacaactaggtgggcagggggatgctactggcatctggtgcgtagaggccagggatactgctcaacattctagaattctcaggacagcctccgtgacacagaattacccgtcccaaaatatcaacatatgccaatatcaaccaatatgccgagactgaaaaatcctagagcaacaggaaagaggtgcaaagtgacaggagaagtctcgcctccccccatttagtcccatcctgagtgagaactgctgctgacaaactgctgtgtttccttccgaagagaaaaggagaggaaagtcccccacatcctgcctcccgttactggccctatcagcatctccttctagccctttgtcctgcacactaaaaaaatgcaccgagaccacactgcccagcgttacatgtacttaaaaaaaatgtttttttaaattaagaaagtttttttgccatgccatgaggcttgagggaccttagtttgcggaccagagatggaacccaggccctctgcagggaaagcatggagtcctaaccactggaccttcagggaattccctacgtgccgcttttattactaaaaacgacaggatactgtcacccctgcggtcacgtcagtg

SEQ ID NO: 44764 - DNA, 762 bp, Bovine  19866881381823
  misc_feature (1)..(1): n is a, c, g, or t
ngagttggctcgactgagcactcatcgacaacatggtgaacgtgccactggcttctcacagcctcttgggagtcaggaggactgtaattatcactacctccatcttttgtcatgaaacccctgtaactccacaggcccagagatatattgcattaaagtaccgggacttgtgtcctgttctgctgacccagctctctaaagtattgggactccctctcaattcagccctgaaagtccttccagatggttcctgagaggccctggcctagccccccacctgatgccctcctgagcttccagggcagctggtgggaactttcaggggagacctggggccgaccgggcaccacccacaccgaaggcccacacaaccctaccgtcctccggctgcccctgctcctgctccgcgctggcataggtacgcaggaactcggcgaaggcgccgtcccgagccaatagctcctggtaggagcccatctcggagatcttgccgccactcatgactatgatgacatccatctggggcaggtagctgatggcgtgcgtgaccaggagccgtgtctgcagggagagcggagacacggccacattagcgcatgcgcacaaaaggaatctccccctaccccccgacctgtacatgcgcctgggatgcaggcacacagaagcattgcaatctgcaggctgggagctggggccggggtgggcaaggagtgagggaaacaatgatccttgctccagattctagggtccagacagatatga

SEQ ID NO: 44765 - DNA, 855 bp, Bovine  19866881469808
  misc_feature (1)..(1): n is a, c, g, or t
naccccagggtcttagttccggtgatctgtccctggcaggctggacgacgaaatggctcagaagaacaatgccctgaagaagatccgggagctggaaggtcacatctcagacctccaggaggacctggactcagaacgggccgcgaggaacaaggcggagaagcagaagcgggacctgggggaggagctggaggcgctgaagacagagctggaagacacgctggacagcacagccacccagcaggagctcaggtgaggagcccccacccggccggccggccgctccgatgggtcaggacggctggtggaaaggggcaaacccacacagatcctgagtcacggggctcctcaggccctgcgtttattcgtgctgattgcattttgctttaactgatgtaagcatgcttaattttttttttaaattttgttgaaatatagttgatttacaacgtcatgttagtttcaggtatacagcaaactgattcagttctgttcttaacaaaaaggacatctcagaaaactgagtaataaatatttctgtctaattaagccacatggatacctaaaagggcccacatatcttcctaccctggagatgattagctacttggcatttgggagtttcctgttacccaaagagggtaattggaaaaactggattttttaattatttgaaaatactaataatttattatagatgttataaatactaacatcaaatctaaatataataaaacattttaatatgtcggaaccatgaaaatcaactggtaaattaagcatgcttattttttaaatttatttgtttttaattgaaagatgattgctttacaatattgtgttggcttctgccat

SEQ ID NO: 44766 - DNA, 2800 bp, Bovine  19866880370228
  misc_feature (1)..(1): n is a, c, g, or t
nggaggccccagtatacataaagcacaaaaagactatagccctaacagttattcctagagaaatttttccttcaccatttccattccttccaagttttattccagaaagagagggaaggatgattaatatgtccataaggagtaatcgccatcacaatattaacttggacaaaaacaataaggacccaatttagctggtaccatcttatttttcctgggcttcccttgtggttcagctggtaaggaatccacctgcaatgtgggagacctgtcttcagtccctgggttgggaagatcccctggagaagggaaaggctacccactccagtattctggcctagagaattccatggactgtacagtccatggggtcgcaaagagtcggacatgactgaacgactttcagtttcagttttcagtatcctattttcccaccagataagtttaaaaaaaagtcaaagttttctcagtgtggaagagtaggacagcttatacactgacatggtaccccagatgagttataaaatttctcaaaccatgcaaagtatactcatacaaaaacaatttcttgtcattaatgtccttttcaagtcctgttatttttctcctctctaacacaaacttatgggaagagctgtcagtactcacactgattccacttcttcaactttctctcactttatgatctaccacactcaggtttctgtcattaattgaactttgaaaatgctcttaccatcatttctcttgtttaaggtcttttccccccctaaatccaatagagattttcttggccctttatatatatatagctgctccatttttagtgaaaaattctctttcacttgctttcttgttctcccagtttttcttccatttgtcctgccatctcttcttacactttttttcaggctccttttcgttttgcttataacttcagatctagtgtccttcacttttggctcatttctctcattgttctaacatgttctttctgggtaatgttatcccctttggtggcttctatattccctggtggtctaggggtaagattctgaactcccaatgcagggaacccaggtctgataactggtcaaggaactacatcccacatggtgcaggtgagagttcacacactgcaactaagacccggcgtagccaaataaacaaatgaataaatacataaatatttttaaaaaatagacattataatgatttgcaaatctacagttttatctccattctatctcttgaacctcagccttctacttcactacatcaaaatatctttttattggcttccttgactgttctaaagataattaaaacccccaaagaacacaactaaatgcatttttttttctcttgatttgctacttcctgtgcatgcatgctcagtcactaagtagtgtctgactctttgcaaccctatggactgtggcccaccaggctcctctgtccatgggatttttcaggcaagaataccagagtgggttgccatttcctcctccaggggatcttcctgacccagggatcaagcccacatctcccatatctcctgcactgtaggcagatgcgttatcactgtgccaccactatgctgctgccgatgataagtcgcttcagtcgtgtccgactctgtgcaaccccatagacggcagcccaccaggctccctcgtccctgggattctccaggcaagaacactggagtgggttgccatttccttctccagtgcatgaaagtgaaaagtgaaagtgaagtcgctcagtcgtgtccaactcttagcgaccccatggactgcagccccccaggctcctccgtccatgggagtttccaggcaagagtagtgccaccactctactgaactgtatttcctcatgctctctcacctctgcttttctatatgttcctttctccattctttccacctctatccacccacttgcccaagctttatcacattctcttttctctactcatttagggtagtcagtgtgatatcaagagcagagatcatttattcactcatatctagtagagtagttttactcaataaatatttattaataaaaacaggtctgatttcagatatagaatacattgatcttctaatggaaatatttttctctgtgtagcagttttatgcatcattataaactagttgattagcaattttgatctctacatgttgttctcttgtgaacttgtttaataatgtatcttcaagaaatatatccatattcagagagctgaccaaatcaagttttttagtttgagagtctgaagtcaaatttcagaccgtgcagaatttgtggaaggaaatctgaccttcattggtttttgccaactagtcagttattcttctcattttggcaacattttgacctcacctcctaatggttattaaacttcagtagtaggcagaataactccccaattagtgtttgaaatgtcaccactagctaattattcccttgtgtttacactgtcatatccttgaaaccctcatttgtaattccaggtgtgggtgacatgcttaacgctaatttcttcttgtggcaagatggttttcactctatgagaaacatgatccagtgtcaatggaaggggaaaaaaattaataaaaatgatgataggatgggaaagttgatattgctggatttcaaaataatcaattaaattttttttcacatttgactttacttgtgcgcatgtatcccacagctttttagcacattgcactactggagagtttggagaattatgaaatgttagtgctacgattgctttcactaaacc

SEQ ID NO: 44767 - DNA, 1821 bp, Bovine  19866880470708
  misc_feature (1)..(1): n is a, c, g, or t
natgtaacgttaaggaaaactaagaagatgatggattcaagaacggtatttaactgtccattaatttctagaaggattctgaaacctatttattgccacatttatgtacgttttaattttagggggttgttttggaaattttttttggcgcaccacgcagcttgcaggatcttagttctccaaccaggaatcaaacccatgcccccggcagtggaagttcggagtgctaaccactagaccaccagggaattcccatcaaaacttttttttttacatattctaagaaaaaattagcaatcttaatttctaaaattacatttagggaattagcacctcaggaagccctggtggcgcgcagcggtaccatgcgccaccaggcatggtgcctgccctacaggcgatgtgggttcaatgcgcctgcccatacaggagatgtgggttcaatgtgcctgcccatacaggagatgtgggttcagtccctgggttggaagatcccctggaggaagaaatggcaacccactccagtattcttgcctggagaatcccatgaacagaggagcctggcaggctacaggccatgaggtcacagagtcagatacgactgaagtgatttagcagccacacagttggcacctcagaggacaggcctaatttaggttttctttgctcagactccacatgaagcctttagtgaccagtttgtggaatctgttctcagatagctgctccttgacacctctaagaatttccttaagagagtgataaacacattctgtggtcagacaagctgatggatttacaagccagcctgagttttcagggcctttctgctgtgggagacttagactttgcacccactccagtactcttgcctggaaaatcccatggacagagaaagcctggtgggctgccagtccatggggtcgataagagttggacatgactgagtgacttcactttcacttttcactttcacacactggagaaggaaatggcaacccactccagtgttcttgcctggagaatcccagggacgggggaagcctggtgggctgccgtctatggggtcgcacagagtcggacacgactgaagtgacttagcagcagcagcagtcctctggttacaatgagaaatgtgaattaagaatgagaaggaaatcctctatttttcacactttcatctaagatccatttaattcaaactgacttttcaccagtctaaccttggtcttcttgggaagattcccagaggatttaactcacttccccaagtactctttagaaatttggactgcaaaaagacttttacttttcaccttttttttaaacttttcatctttataaattctatttatttggtatgagataaaatgataagaaaagactgaaaagtacaacaaatgatgattattcttgaaagatactaaagtacaagtacaaagtatatcccccaaattctgacaatacttaacttctgccctgggttctttccaaaactctagcaactccacaccaacatcctagtcagtcctcagcagttgagtccagagggcacaaaacacctatgcagtctcttctgtagatcttcagttcagttcagttcagttcagttgctcagtcgtgtctgactctttgcgaccccgtgaaccgcagcacaccaggccttcctgtctgtcaccaattcccagagtttacccaaactcttgtccattgagtcaatgatgccatctaaccatctaatcctctgtcatccccttctcctcatgtattcaatctttcccagcatcagggtcttttccaagagtcagctgttcgaatcag

SEQ ID NO: 44768 - DNA, 1392 bp, Bovine  19866880494677
  misc_feature (1)..(1): n is a, c, g, or t
ntgcctttttcatgtatggtgcacgtggaagagtgaccgcgggggagttccctcgtggtgcggcggccaagactccatgctcccagcacaggggcctgggctccctcccctggtcgggagctagatccaagaaaagcagaaggacaggatctgtacacaccctgacagaaactggaggccatgctttgggggcatctcaggccctctaaggactaaggcggtgtctgtctcatacacctggaaccctttcccagcccacaggtgtctgttggaaagctgctcacgatcctaccagctgtggtataagttgcatagaattgtgttgagtaggtggattcttaaccactggaccaccaagggaagtcccagtgatgggtttttaatcaagatatttccaagagtaacatcaaagaaggctctgtattcatacttgcccaaaatgcctcaaacctgagaaagagactagagttaagtatcaaattttctaggtcgttttataaacatttggactgacacatttcaaataaaaatatgtgtttttgttgtaaacagacatatcctggcaccaccacctaaatctatccatttagattttttatttattgctgaagtgaattatgaaaatagtgtaatgcctgaatcctgtgttctcgtttttattattataaaacaatggacctttcatagtgctttataattttgcaattaactggaacccaaacctgtattacctttcacttcaaagaaggaattaaagcaggaagagaagcatttaactgatttccaagtaaattattaagcatccctcacatactaattagtctttctcttgctctgattccttaaaaccaaaatacatcagctattagaagcagttccttaatgctgcctagggttcttgtagtagtcaagccagaagagaattactggattgtccttttgtttttgtcttttcaagaacttaagcatgaaattccgaggtctcatagagcattatagtttttgttttcaggtcatattgcattgctttaatttgaaagctgttgtataaagttcccatagcaaaaactaagtagaatgtgctctttcagtgtaaattatagaaacgatcattttctatgtattaaaatataggtatttcatgacacaaatcaacctatctaagacacagactcacagacgtagagaacagacttgtggttgccaagggggagaagggtgtctgggagggatggattggggagtttggggttagcagctgcaaactagtatatatagaatggataaacagcaaggtcctactgtgtagcacagggaaccggtaatatatacaatatcctgtgataaaccataatggaaaagaaaaagaatgtatgtataaccaaatcacat

SEQ ID NO: 44769 - DNA, 1534 bp, Bovine  19866880590857
  misc_feature (1)..(1): n is a, c, g, or t
nactgaattctattagaagtctatttgcttctctcataagtgctggttcaaagaggggagaaaaatcagtctaactcattgttcgaaataaaacagagcagggacttccctggcagcccagtggttaagactctgctttccactgcagggtgcgtgggttcaattactaggtggggaactaagatcccacttgcctcatggtgaaaaactaaaaaacataaagcagaagcaatattgtaacagattcaataaagacttaaaaaatggttcaccatcgaaaaaaaaatccttaaaaaataaattaaaaaataaaacaggggagatttgtggagagattatgtgactgtgctttaaaattttttaagtgaagaaaactcagtgtgtttcattgtgattattttccttatagaacatgtctcattcaaactttcgtttctcccatgatgacacgatctcctggttcaagctctatggatttttactcaacttgtaagtttttttacacagtgcagaactgaaataatagtgtgttgtataatgatcctgagaggtcaattagtctatccctgtgttgtcagggacaatcattttaactgaggagagaaattaacatgtactttaattttaatctattcagagaaagctggactattcaattttgagtggagggttacataattctgtgtcaatgaccttcaccagcaggaagtggcaaacccatcatgtggtattttttacctgctgcttctgtttgtaaggctggaaaacaactggtcactttcccctgagaattacagaaactcttttcacaagacactgtcactgggaaaagcagaattgcttatgccaagttaaaaaaaaataattttttaaagttcaggtcaagggattgagaaataggaataagacttggtgctgaaagactgggctcttaagatgcaggcaatgtgaccacaaactatgaggtaaacctcaaaatgtcagagacctgtttatcccagtgccgcgagatacaggagtagttcaacttgatattattttttacgtgtgtctaatggactgtaagtaatgacaacattaaaatgagaatacatgcataaaatccagctgattaaaggttttggtagtgttgagaatgagatgcaaaaaacaagaagataagcaaatataacccatgtgacagatcatacttgttctgggatgtcataaggcatttgcctaagttaaggggatagtggtgaactcatatacacaaaccccagcagcatgaaatggagattttccttggaaattagagcttttccccatttcttcatgcacatcatgcttctgatcacgtggtgagtgacttgctggagccggaggaaaaggacagctagttttcatttcatcagcctaccagcaggacaggacaggctaatcacaccagcccagctctccttgcctcatgactcccttcggtgtaagtcttaattttagttctcaatagcatgatatcctaaccagatggtaaagaatctgcctgcaatgcagg

SEQ ID NO: 44770 - DNA, 1768 bp, Bovine  19866880699177
  misc_feature (1)..(1): n is a, c, g, or t
ncttgggataccatgatcgcactgtcccctctttctctgtcttgcttcccaccaactcaaattgccaggaagtagtagctttttcttttgccacattctccttgcagtatgccacatccaccttcctacactcctgtttactctaccatggataggcgtattttctgtaaatactgtggaggacattaacatctgagccctccaagctcagttatagccctcttcttttgcattctggctgaaactaatccaaaactttccccaagaagatggatgcttcagaccatttggggcaagattatatactctgaaaggtaaaagagaaaatcacagaaataagtttcaaatctttatctccattgagttaaagttaaaagttaaactaaaagttaaacttctagcttgctaatatactgtgggcttccctggtcactcagacagtaaagaatctgcctgaaattctggagacccaggttccatctttgggtcaggaagatcccctggagaaaggaatggctatccatgcctggagaattccatggacagaggatccttgcgggctacaatccatggggtcacatacagtcagatgcgactgagcagctaacactttgacagtacttttgctaatgctggtattggctaatactggtccctggtattgttacgccaaaaaacaaacaaacaaaaactcaagttcttccagatgaggtgaggatagaagaaaaggataaaaatgactcgaaattcatcctgctaaaacaatattcttgggttatataaaaatatctgcacagtaatgcttaaaattatacttccttgtatactttctaatagtatcttttgatatgaaagctaaagaagccaagcctcaagaagctaagggtttagaaaactttatttggatttttttcctcttactttgcatatttgtccattaaatggcaaggtagaattctatattattttccaaagacttgcttaatgaattaaaattctatataaactttaatcttgttgactttaagttctacagttttaattttatgttaatcaaagactgttttcagatcagtagaacattttaatcaataatcttattcatatatacaagccaggtatagcttgttttttaattcctataagcctctgtgaatttggatgttattgaagctgttaaaaactatccatgaattcttcctgtctaaagtctttcctgtattcactctcatttactatggtaatttacaacataggtttaaatattcagaatatgaataatctttctacttatgcataaagaaacacttcctccatgaagtcccacaactactttgatctgcaaatcatatgctaatttaaatcttttctttctgtaaatttagagctcatatctttaaagatgcccaaggaatttagtcaccctatgaagcaaaaaaatattcctaagagttattaacatctttattaatttaaggcagtcataactccaagaatataaacttgagattcttagtcccatcttgtaatcagcattgttggaaattaagagtaaatcctacctgttagaaaccattgtggaaacagttttctcttgtggaaaataatgtaggtataccgtgcatgtggtataattagaaacgaaccattcatcagtatctagacttgtggaatatcctatttctcttttaactactgagtggagctactgaaatagctaattgtggtggttttttttttttttaatttataaatgatagtaccttcc

SEQ ID NO: 44771 - DNA, 2096 bp, Bovine  19866880728862
  misc_feature (1)..(1): n is a, c, g, or t
ncttccatttctcctcttacatgtttctatagcatactttcttcagatataaaaatcagtccctttacattatttatgtaaagatttttttgtgaaacgacaatcccataaattattgctcttccagtgctacactctacgttttaatattctgatgcccatcttgtagtgctgttagattgatctttccatatttgaatttgatagtgggtctctataatgtgcgtagactgggatacaaaataatggatgtaggtggatactcatacttactttctattcatggcccacctatcatgtaaaatgcaatgattgtggagccagatcagcttccttttgtttatgaaaatagaagaacaggttgaggtcctactctggataggggtgggttgggaactggtgagtctagctgtattgtaaaactaagttagcatttacacacacatgtacatacagtagatagtagaaagggctatgtaggagtgtcagtacctggggctttgaattgcatcacctttactcactaactttattgttgcaatgaagaaattggctatttcgctacctggtattttgtaaagtttgtggtagtagtacattcattttctcttattctcttttcttccagccataatgaaaggaaagtgacctgtaaacatccagtcacaggacagccatcccaggacaattgtatttttgtagtgaatgaacagtaagtaaagcgtttcatggaacgcctctattcaaaacggggtcagcattccaattgctgttatccgtatttaatacagtacaattgaacagtttttttatctggacatttgcagtcaagggtagtaacagaataccatctatttaccatgtgtggtttagaaacatggcttagaatttttttcatgaggaatgtaatttcaaaagctatttttacaatagctcaaacacagagaataaactcaagatccctggatgcaaggtcagggggaactaaacttggtcaaattattagactaatttgaacttaggtttctcatccttaaatagagatactgggaattaccatttctcaggatttttataagcatcaagtgaaatttatttgaaaatagtttataaatctgttcttcaaaaattagttgttggtacccttgttattattttcttttagggggttgggagagggctgctgcactgcctgtcttatgggatctcggttcctcaaccaaggaacgaacccgtgctctcggcagtgaaagtgaggagtcctaaccacgtgaccacctgggaattccctatcatttttatggccttcagtattataatagcaaatcttgtaattaaaacgttccagttagatgaccaagtaacataactgtatgaaagcttattaaaataaacatgatattaacttaagttgtgcttagttatatttcaagtagttataaatattaagctggaactatagagcttattaagctcgaactaatacccagctgtttggaaaagtcagacagacaccagcattattagctccaggaaaatgtcattataaagtggtttacaaaagtagcacgttctgccactcttgacatgttatattttcaggactgttgcaaccatgacatctgaagaaaaaaaggaacgacctataagtatgataaatgaagcttcgaactataacatgagttcagactatgcggtgcatccaatgagccctgtagggagggtaagttattttgcttactcttaattattgataactgacatagttggtagtgtccattattattactcttaatgaacttagaattatagaacaatcatttcatttttgctattacatgaatctaattgcatttgaagtaattggcataagaagcaaggccttagaatataaagaactaagattatattttaataatttaatgagttatagtttttaaatattatagagttatgattttgaattgttttacaaatataatggatgttttgtgtgagacagtggcagtttattgaatctacttaagttttaaaggtgacgattaattcaatgacctagaaatcctattattaagtatgcctgggaatgatatatt

SEQ ID NO: 44772 - DNA, 851 bp, Bovine  19866880922831
  misc_feature (1)..(1): n is a, c, g, or t
nttcgaatttgatatcgtaattctactgcatataaacggtcttttttggctgttttattagaagtctttgaaatggtcaggcttgacataaggctgatccctgtaacaagcaagacctgttcctgactccccttactgctgactttcatgtatgttttgtgtacaggtgattccaatcctatttccctccctggaagttattaggaaaaacatttgtattgataaatgccaacagtatctcttatgtaaaaatctatgctatgaaacacaaaagtagccccaaacaaattctgttggtggtttgtgctatttgttttactgcctcctgtgtttccatctttaaacacttttttttttttttctttcttcattaagcaggctcagaaaccagctccctggtgtttttacaactatggataatgcagacagaatatctctctctagagaaccatcaaaatctactaaggtgctgttgacagtctcttttatctcctgcaacataataagctttgtccttaaaaaaggttctgcttagacctagttagctctgttgtctaggttactaatgaggccaggatcaaggaacagaaccttagcaaagttaatcaggtttgtatcattctgtagtcatccattgttcctaaaccttatacagtagttttataaatttgtgttgtcattcacaacaggaacctggcaagagaggaaatggatcaggaataatttaccattcaatggagtagccatgatggtcaacaaaagagtccgaaatgcagtacttggatgcaatctcaaatatgacagaatgatctctgttcgtttccaaggcaaaccattcaatatcacagtaa

SEQ ID NO: 44773 - DNA, 2651 bp, Bovine  19866880971456
  misc_feature (1)..(1): n is a, c, g, or t
nctggaaaatcccccatggacggaggggcctggtaggctgcagtccatggggtcacgaagagtcggacacgactgagtgacttcactttcacttttcactttcatgcattggagaagaaatggcaacccactccagtgttcttgcctggagaatcccagggacggtggagcctggtggacttctgtatatggggtcgcacagagtcggacacaactgaagcgacttagcagcagcagcagcagttgccgtacacttctcttcataacataaatacctaaaaatgaaagtctgtctcaattgttattgttccctgaaatgagtcataacactgaatatcccaaaactataaaacggggtgttgggacccaacaaatgcttgctacaggtgatcttaatcctaaaaaaatgaccgtttcacataaaatactataaaccactcttattctcttagatcatcctataagatgtatgacctctatccagaggatcagaaagaaagctcaacactttttctctttgattctcttccctcttccttaatagacttaatgaagacatctggctgacaataatgttgtcaaactagacaagaaacagccaaatttgccttgtcatctgcaaaaaaaaaaaaaaaggaaaacaaaaaggaagtcagaactatatcgactttatcttgccttcaacccattccttactaattataagaagaatgaaggatgctgaatgattttacaattcttttactatcgatgctccctcttgaaaaatgaaactttattactacttattataccataagcagcatgcataaaaccgggaaagaaattgccacagagaaaagtggatagtaaatacatgtggctaaaatgctttatccactgtgcagaaaactctacctgttagaatggaagaagaaagttgaatataaaaaaagggaaaggaggtttcccaagatctttagaatcagttccaagtttccacaaataagtagatctgcaaatgatgtatgtaaaatgctgatccattcatatctattccccatgtagctctcttgtctttatccttgattcagatttattctttctcttctctccttcttttctataacaccccaacagaagcccaacagataatgtccatatagacaaagctatggtttttctagcatcatgtacagatgtgagagttggcatgtacagatgtgagagttggaccataaagaagacagcactgaaaaactgatgcttttgaattgtggtgcaggagaagactctttagagttccttggacttcagggaaatcaagccagtcaatcataaaggaaatcaacccctgaatattcattgaaaggaccgatgctgaagctgaagctccaatattttggccacctgatgcaaagagccaacttattggaaaaaaaccctaatgcttggaaagattgaaggtgggaggagaaggggatgacagaggatgagatggttggatatcacccactcaatggacatgagtttgaatgaaatccaggagatagtaaaggacagggaagcctggagtactgcagtctgtgggattgcaaagagttggacatgacttagagactgaacaacaacaaactttttaatgatgggcattctaactggtgtgagtcagaatgtgagatggtactacactgtaatttcactttgctgtagtgtcactttgcttcactgtagtttcaatttacatttctctaataattagtaatgttgagcatcttttcacatgtatattggccatctgtatgtattctttgatgaaatgtctattaaggtcttctatttttcaattgggtttttgttgttgttgttgttgagttatatgagttgtttgtatattttggaaatcaaggccttgtcaattgcatcatttgcaaatatttactcactttctgtatgcggtctttttgtaagattattaatttcatgaattagacaaggaacatatatgtattaatataaccagtgttatagaatgtagaaattgactttcaggtgaaataccattagaacattatattccaagggaagttctagcacgtgttgcaaacctcaaaaaggagatggctaaaacttactaacacaactcttagcctctcatctgggtaagtatataaaatagtctagaggatttagaaggaagtagaggaaagctgttgtgtagtgcacctctctcttggtccataagaatctgaagtgtgatgtacttctgtggtaagctgaagtcaagattgcagtttggtcctgttggcttagagagcataatatgtgtttcctcacacgagtgggacacagtgtacaggtttctgactccaccacttaaaatggcaagaaataagccctttataagagcaagaaattaaaagggcaagaaattagtaggctaaacactttgggtagaggaacagacgtcactgaatgggcagcttttgcctctaaatttttagggcaagatgtgtgagtttttcttgtagactagacatgagttatacaacctttccaagatgttgttcactatggctttctttggggagaggggtcacagatctcagtggagagagactggtgatatcatcagatcagatcagatcagtcgctcagttgtgtccgactct

SEQ ID NO: 44774 - DNA, 723 bp, Bovine  19866880978527
  misc_feature (1)..(1): n is a, c, g, or t
ntgagtcaccaataaactgagacttttcctcctcccccgtactttgttcccacagtggtcacagctgcctacaggttcctagagactggagttaccgaagagtgaccgaggcagtgacctctgaggtctcattgcttatcctcccccattatcccagaaatgaacaagctggcatccacaggaattagcaggatcataccgggacaaatagagatgtcaaactgattctgtctctggttctccccctcaaatctctttcccatcagtttcaatctcattcttggtttttctctgtccctttctattctcctttgatcagtgcttcctccctcgagctgttattttcctcctctttgttctcctgtgtgacatctaccatcgtcatcctatccccattctcctcctcatctcctcctccttcctgactccattcaaaaataatgataatgataaagataacaacaacagtaataaacagttgtctgctgactgtactgcaggaacacaaagtactttccgttagtgatcactggtggctcctcaagtcccgccagcctggtggtggaactgatggccatagtgaggtaggtaggggagtgtgggtggttcccagtaagcacccacttgactcattccattgccaatccttctgacaatgtctaaagcaggcaaatgcacagcagctaattaagtaccgcgttgttactgcactcccaatcacaa

SEQ ID NO: 44775 - DNA, 1167 bp, Bovine  19866880996548
  misc_feature (1)..(1): n is a, c, g, or t
nctataattttgttactgaggaaaaaaaaaaaaagtaaagtaattgatctcttacttcaggctgtcaagtttgaatggaaccttgagagtcctctagtgcaacttctgttacaccgctcactacaaagtgtccagattgcccatcgtctttactggtaagattaaccaaagtagggcaggatgccttttttttattgtcaacttctttttgtggggcagcttttccttataaacctgattcaaacttccacttaaaattcagccaaatgtgagtctttatcagggttatttttacttatgagtataatttaactgtcattgtcttcaaaatcttccttttgtactgttgctgctctttaaatccaactggaatttgaaatctaggtgatccttttccaatagctttaaatcgcaaggtctacatgtggtcacatccacttgttgaatatttcagtttaaaatctagttataagatcctgtatgttttggaagaatgtaagcttgaaaagtaacttctgtaacaatattagttacaaacagtgggatcgaggccaatatatactgtcttaagcttataattcctggagcactaaagttttccaaaaacattaactttgaatattattagtgaagaagttagatttgtttaagatatatcaggatttctcccatcactgcctgctcctgatcctactaaacaacatgttctttcgatgctattctccctactgttattactaaatttgcacaaaaaatttagcaattacaagtgtcagtaacctaaggatggaattgaatctatcttttatcctcacatatgtatgacaagcatcatttattggcttcaattgctagtgaagaactttaattaatgggaaaaaaaaagtcaatataatttttgaatatcatgtttttctacttcaaaaaacattgttcttgttgacatcactcttcccatgaaaatgactcaaggatttcatataaaaatagaaatacaaggaattgtcaagccctaatgtttgattagatgcagatttccatttcaagtgtctaatagaaaagccagatcattttcctctagtatgtcagtataattaggcatcagatacattggccaacagcaggccttccactaagtagactctcttcatcagactctgaattaag

SEQ ID NO: 44776 - DNA, 823 bp, Bovine  19866881113591
  misc_feature (1)..(1): n is a, c, g, or t
nttcattctccaggcgatcttcccaacccaagggttgaacccacgtctcctgcattggcaagtggattctttaccactgagctaccagggtgccccagatatgtattaaaaatatgttgattgcatccagttatttaaaaatttcatgtaaccaacatattttcaatcatcatgttactgcacgtgtctttgaaaatataattgcctgcaataatcactgacagatctcccccagcaaccaatcagtcttcaagttggtgattttctaaaataaactttcggggtgtaaaagttttttttgcgcatcaaaagtaataacacaatttgtgttctaaatacctttaatcctctgtatctggccaaattgttccccatctgtgtgctgccaatttaaaactcagttgctggattagtctacaaagcaaaccctcccgtgttttattattttttgtgtgaaagaccccaagtttagtatgccttgcacagagaatgacacccctcgtgggctgatggacgagctttctgctgggcttgcaaaacagtcttgagaatgaaaatgcccttgattactgtcaactgacctagtcttacagagtaaaaaaaattaaatcccaaaggtgatttaaaatctatattcagctgttaagcccttttggactcaaacagcagacacacataataaatctcaaggctgacagtgtgagatttgcctactacctgacactcccaagctcttaaaaaaaaaaaaaaaaaattggtatacagcactctagttacaaagcataaaactaagtataacattaattatagggagaagagggag

SEQ ID NO: 44777 - DNA, 1491 bp, Bovine  19866881203404
  misc_feature (1)..(1): n is a, c, g, or t
ntttttctttgacttttgacttgtcttctgagcacttgtgctttattgtcgactaccttctggctatttccaactagaggtcctcttcatcagtgagaagagtgtttgagaaagatgatgggcacaggatcacaatgtataaaaatcctatctggtcgctgcagtatcttgtaaagtctccaacagaaatatgcacacaaagaaaatgtcatactcctatcagtaactggggatctgtatgaaaccccaatgtatgtagttctctgctggaagtggaggatgccttttacttttaaaatagtggaattggccaaatcccctcatcctggcccaaggtgtgcattggtaggtagccaaaagtcatgtctcagattgtatagaaatatggagctaagtgagtatcgtagaaactattctgaaaccagtgaaacttaaagacttcatcagcagaaattataaagttggtccatatgggtaaaactctgtaacctaggacacatgtgactgtctatgaaaatcatcataaataatgcaatgagataaagtcagcagactaaacaaatgtgaatatttatacatgaggggaataagacctatctaagaaaagctctgaaagaagtatgtctaaaatgttcagttatcttttgaaaaataagttaattgacaaaataatactgcattgaataacaacaggaagattgaaaataaccctccaaacattatagaaatagaaaatgaagttattgaaataaaatatttatagatgaattaacagtagactcaacaagattaaagagagaattatttaattgaacaacagctctgaggaaatcatccagaatatagtatagtgagataaaaataggaaatattttagagaagtttaaagatgtgaaagatagatctaaaagctccaacatgtgtttgatggggagggaggtgggaggaggattcaggacggggaacacatgtacacccatggctgattcatgtcaatgtattttttaaatataattttttaaaaaagaaaaaatatgcaatgcataagagaaaataaagaagtgaattaaaagacacaatagccaaaaattcttaaaattgaagaaagatttgagcagtcagatagtaaaagcacacagagttgtgagaaagataaaataaattcatagttagtttattctttcattcatttagcagaaaaaaaattttttttggatacctgttatgtaccagatactgtttgcagcccagcgaattgatcacagcaggcatactttgtgccctcatggagctgacattgtagcgtgtggcacttgtatgcaaattgcaagtgaagaagagaggaggtatccagcataactggggaacagcaagggtccattgtggctggaatggagaaataaccctgaagtcagggattgataaataaaactatgctaatattaagttcacttcctcagaagatgtcatttggtgaatgaaaaggcaagg

SEQ ID NO: 44778 - DNA, 1186 bp, Bovine  19866881249303
  misc_feature (1)..(1): n is a, c, g, or t
nctacacactcttatgaccccatttaatcttagttacttccttaaaggcctgtctccgaagacagtggcattgggagttagggcttccacataagaattcagggaacacagttcagtccataacagacacatagatctgatgacaggacactcattattatcattttagagatgggaagactaaggttggaacctctaagttacttgtgcatacagagagcatgagagatggaaaaggcttagtactcttcccgcaatcatacagtatggtggacaggacagttacccctgcctggcaaatacaatctgaaccacagcaacaaaacaacaagaacatcacctaaatcaacagaaaattaaccaggtaggttggatacctcctggaacacctctaaggctttattgaatttccaaaaggaacaggattaaactgcttgccgacttcagggaacacactctttcatgatgctgagcaagaatgtcccagaaattttctcaggacatcaaacacagctccaaatcttatagatagcctcccagggaacctttaataccttcacagaataaaccacgctatttgtgcctctgaaggatgaagggtgaagcaaccaccccagctgtgacttgaaactggggttctgatgcgtttgggttctggggaagcagggtatttcaaagccagctttgcctttagccttgtaaaccagcccctctggctgtgttcaaacacatgacttgctcactgcacagtgtaatgattatccaactttcaccagagggctatgcaagaacaaaagactgaatggtaaagaggatttttattattaggttgctgttcttatgaaacattcatatagcaaaggaattgctttgccgttaaaaaatttttgtgaaggaagctttatgaaaaatgtgcttacctggcctttaaagtaactatacatgtattcagaaaaaaaaaaatatatatatatatatatagaaaaagaaaacaaaaaggctgagtttagaaactcagttcagaaccatattttaaaatataagtaagggaaaatgtagacatctattggactagtttaaaactccacaggcatggatttgaacactaattatatgtcaagtagaatttattttattttagcacatgtgctattggtaatgactccccatttctcttctgccacag

SEQ ID NO: 44779 - DNA, 1621 bp, Bovine  19866881258515
  misc_feature (1)..(1): n is a, c, g, or t
natgtctctaggtcaattggtcatagtccatcctgttttaaaagtttgacactccagactgatctcgctggttaacataagcaatctttctacaacttgtaaacataaaatttgcctggaaatagactgtttgtttttcctttgtaaacgttaatcatttccaagttaacaacgtgaactttgaaattccggttcagtctggttagacatgaattaagttgactttaaatttttaaatgataagaaataatacaaatacaaaagaacgtaggcatactgttttatcagcatttaaaatggatttttgcaaatgtgtttattcccaaataaaacaagttgcaagggtttgatttaacggtatttaatagtttaatttagcaatctgttctatagctgctttatattggggaattacatacatagacaatttcagggccaaatgttttgcaatgtttttatatagttaaatggattcattaacaaaaagatatttatctttcttcttgagaatatgataatttagccaagggacttccctactggtccagtggttaagaatccaccttgcaatgcaggagctgcgggtttaatccttgctcagggaactaagattccatatgccttggaacaactaagtgcacacgcagcaactactgagccccagctctggagcacgtgtgccacaaatagagagtgtgtgtgttgcagctactgaagtccaaacctctggagcacacacaacacaaccaccgagcccatacaccacaactagagagtccaagagccgcaggattctgcatgacatgatgaagattccctgtgctgcaacaaagaccctactcggccaaatcaataaataaatcttttaaaagacaataataatttcgccagaccattatcaatccttttgatagttatttattggctgctgctgctgctgttcctggtaagtctcttcagtcgtgtccgactctgtgcaaccccagagacggcagcccaccaggctcccccatccctgggattctccaggcaagaacactggagtgggttgccatttccttctccaatgcatgaaagtgaaaagtgaaagtgaagtcgctcagtcgtgtccgactcttctcgaccccatggactgcagcctacgaggctcctccgtccatgggatttcccaggcaagagtactggagtaggggacctatgtatacggaacccccagctagggcctgaaaatcatccctctgtgtgtgtgtgtgtgcgagtgtgcactcagttgctcagttgtgtccagctctttgtgaccccatggactatagcccaccaggctcctctgtccatgagattttccaggcaagaatacaggagtaggctgacatttcctccttcaggggatcttcctgactgagggattgtacccgcatctcctgagactcctgcattggcaggcagattcttgaccactgagccgcctgggaagccctaatgatgaactgaaaatcaccatagacaagatcagtatgttccaaactcattacaaggaaaaaggagcttactgcagcagagacctttgctttcacacaagtctgctttttgccatttctcattttactatatcatggcttta

SEQ ID NO: 44780 - DNA, 928 bp, Bovine  19866881289567
  misc_feature (1)..(1): n is a, c, g, or t
natatatgtacattactaagtgcttaaaatcttaattataattgtacctgaacttttgctgaatacccagggacagcaaaagacatgtttaaacaggtatatcagtacataattaaatgacatctgtggcctgtgtattgcaatcttataaagctccaagtatgactggtttctattgcacaatttttagagcagtgattttttttaatgttgcacaaacatgataaggacacaaaagacttattttttcccccctctgaccactgaactttcatgagaatgttatgagaacttcatgtcttaccacaccagcccaacccttgtctgtattgcccaataaaggccagattttccgaatattatgttttagctgagcttgcagcaatcacaaatcagtcattaggaatcacatgcatataacaacgtttgtcttcatagtattttgaactaaatataagcaagcatatttaaaatggtaatatccaaagaatcatatctcaagacttccctggtcatccagtggttaagactcggccttacaatgcaggaggtgtgggttcaatccctggttggagaaataaggtcccacatgccatagagtgtggcgaaaaataaaaaagtgaatcagacctcagcaacttggttttatttgcacactccatagtgtctagtattagcaattaacttgcattgtccccccacagtccatctgggggtgaataagtcattctctaagaaaaagtttgtgggcaaaaaagaaaaaccttaattaccctctatgggaaattttttcttctgcttcaaattggacaaaagtggctcttagatataattttacataacctcagtggcatgttgaagtatgggaggcaaaagacatttatgcaattaccaagtctattgtttatgtgtgtaagcagaagataga

SEQ ID NO: 44781 - DNA, 1351 bp, Bovine  19866881291558
  misc_feature (1)..(1): n is a, c, g, or t
ntttaaattataaaccatgagagaccccttttaataagacttcggtcctgcaataaaccagttcatcacatatctgaaaataaaaaccctggacaaacagtaaatatatcccaagtgttactgcataatgacacaagaaaccaagaaatttgagattctttctttgtcatttatctattaaagtaaccaccttatctttgttagacaacacaactcaagccacatcagatgggatacattgaaatgagaaggaggtccagctcagcggaataaaaccagcagaaatgagggaagaatgagatataaataaggacgttagtgatgtaaaacacgattaacagcaataacaaaaggatgcagtgacagaatttctcgaggttgacacttttctccagatgacagttttactttgtctctaatccttcataattttatatcagaaatactctttattttcatttaaatgatttctaaatttgttcaactgctaactatgggggtggggtgggaagaggacaaatcagggagtgagggatttaattgaatctaagtgcaaaagaagaaaatgttgtttatttgatgtcattttggagggcagaacaggaagaggaaatcttttttgtcacgctatttccagtgttttggcagagcgttgattatatattcatgctaatacttacatcaatatctacttcttcaggtctatatttgtataatgtgcctctgcattcatcctgtgacagctataaaagaaaatgtcacacaactttaaaaatgataaaaaatatacatttacttagtctatagttaatattttaatttaaagaacaataacagaaatgggttttttaatgattctatacttttaaaaagtttagttcaaacacagatcattacaaaaatagaaaattattgaacatcaatacaatcaatatgcaagatacgtaagaatgatgttaacttcagcttgtcagacaaaataagaagctggtcaaatgaaattatgcagaacctcatgttttccatttgcgagacacacattattttaatgaaaaaaactgacaaatacaatcagagcagctgtattgaatcaaatctcgaatcaggcattatttcagcagtcaaaaccgtgctttcaacggtatacacataaccacacaactgtgtatgtgtacattcagatgccaacacatctttgtacaattttattaacaaaacctagaacacattgtatacatatacgtaatatataaacacacatacacagtatagacttatcttgttcctctgtcttaagaactaaaagaatggaggaaaaggatgggtttaatcgaaaagaggaaaagcactc

SEQ ID NO: 44782 - DNA, 784 bp, Bovine  19866881326317
  misc_feature (1)..(1): n is a, c, g, or t
ntgtaacttgttttaggatgagttggtatatatattacacaactactctaacatttttgttttgtgtattttttacatttgaaatgtgagcccaccagtaaatttttttagtaggataatgacaggctgaaacaaggaagaatcaccatagaagaatttagaacaatttatcgaattattacatacagagaagaaattattgagattttcaacacgtattctgaaaaccggaaaattcttttagaaaagaacctggtcgaatttttgatgcgagaacagtatacacttgacttcaataaaagtattgcttctgagatcattcagaaatatgagcctattgaagaaggtatgcttgtacttcaaagttttatcaaatatttatatgcaaactgttttttattaatagaagttttcaaattcaatcttgattgggccagctttcttctaggtaatattatatattgacagttataattttgtaacttacagacagtgtacataccttttagaaagctatgttgtgtaaccacgactttctttcattgtccagttccttccttttaactgtttctgtatctttcaagtgttcagagatgaacttaggcatggaaaacaagatgaggatcttattattataaataccataatggaagaaagggtcctgatattcattagtaagataaaaacccaggtgtaggcagttttccgtttttatatattattgacaaaatatagaatattaaattagctaaacgaaaacagttctagggaagagataaaacat

SEQ ID NO: 44783 - DNA, 2751 bp, Bovine  19866881499406
  misc_feature (1)..(1): n is a, c, g, or t
nttggtctttgtctttcctggtatctggcttctggtacttcatacatactggtaaattcagttaaacaagaaaaagttcacaaattattctatttctctattatcttgaatatccaaaaatgtggggagaggacttccctagtggttcagtggttaagactccatgcttccaatgcaagggacatgggtttgatccctggttgggagaagttcacatgagggaccatgcagccaaaaaataaaatgtggaaagaaaacaaaataaccatccaaaagtggtgttctaagttactactgtgttgcttttaaggaatagtataataagggatcaaatggaaaatgatgtggacctaatgaagacaagagtcattgaaaggctcagtgatttaaaaatagcttaaatattttctctgcagcaagttttatcatgtagatatatatattttaagtatacaaattaccccaggaaggctaatatattaaccaatcactaagagggggatttattcttttgtaatgtttagatgaaatgcttttctcctaataaacaattttttaaaaacctgttgtaatggaccattgctcttttattttcttgcttctttttttggtcattcataatactctttccatgatgattttttaatttaatttttaaaaatttatttatttttggctgtgctgggtctttgttgctgcgtgggctcttctctagttgcagtgagcagaggctactctttattgcattgcgaaggcttcttattgcagtggcttcttttgtttcagagcacgggcttgagggcaccgagcttcagtagttgtggcatgtgggctcgatagttgtggttcccgggctctagagcacaggctcaatagttgtggccaatgggctgagttgctctggggcatgtgggatcttcttggatcagggattgaacttgtgtctcctgcattggtgggcggattctttaccactgaaccaccagggaagtcccccatgatgatttaatattattttcatgttacttcatgcactgtgggagctagcgacttttaatttactacttatctcttttattatgctaagtaaacatggggtaaaatcatctttattatcaacatctataacactgatggctaaaagtcatggtactgatcaatccactcggggtcctaagacaggaggcaaaataaggaggagaggaaattgaacctggattacatgacctgggcgtgaagaaatgtggtctaggtttaaaacctactgctccctactatataccatgatgccttaggtgaatttcataacctctctaaggtttcagtttctttagagcagggataaatatgtctgtcctggccatctgccaggctgttaatcaaatgagataatgtatgtgaaggtatttgtaaactataaaacacttcacaaacataagattcttcttatttttgttatctggtaaaagatgcttataaatcacatccatagttgaagaaaatacctaagaaaaatgtcattgttctattgatggttactatgagctagaggtataagctataaagatagaatcaaagaaaaataatcatcctaaaatgaatattacttttgtgccatctttaagaacaaaactattctcagtatttattattatttataatgtataatttaagatgaatggaaaacacaaggcttgggagaaatatgagccatagtgtaaagtaacatggataacaaagctttcgtggtgaccacaatgtggtttgcttttatataaagtatttttgcttatttttaaaaataattttatttgtttattgaggctaccctgggtttttgttgcttccatgggatttctctcattgcagtgagcaagggctactctccagttgaggtgtttgggcttctcactgccaagacttctcttattgtggagcagtggctctagggcacacaggctcagtagttgtgacgaacttggcatgtgggatcttagctcccagatcagggatcgaaccttggtcctacacactccagggtggattcctaaccactgggccacgggggaaatctgcccacattgttaaaaggtagaatctttgaggctcccctgtttgattcccatcccatgccaccatctctcttgtccttatttggttggaatccccagagagaaggaagaacctagctgctagtaaatcccctgccccaggcagaaactttaacattgtatctgttctcttcttattctgttttcctccatgatcttaagccatgatatagtaaaatgagaaatggcaaaaagcagacttgtgtgaaagcaaaggtctctgctgcagtaagctcctttttccttgtaatgagtttggaacatactgatcttgtctatggtgattttcagttcatcattagggcttcccaggcggctcagtggtcaagaatctgcctgccaatgcaggagtctcaggagatgtgggtacaatccctcagtcaggaagatcccctgaaggaggaaatgtcagcctactcctgtattcttgcctggaaaatctcatggacagaggagcctggtgggctatagtccatggggtcacaaagagctggacacaactgagcaactgagtgcacactcgcacacacacacacacagagggatgattttcaggccctagctgggggttccgtatacataggtcccctactccagtactcttgcctgggaaatcccatggacggaggagcctcgtagg

SEQ ID NO: 44784 - DNA, 717 bp, Bovine  19866881511038
  misc_feature (1)..(1): n is a, c, g, or t
ntaagaaggcttctctggtagctcagtcaagaatctgcctgcagtgcaggagacccgagttcgatccctaggtggtgaagatcccctggagaaggaaatggtttcccactcgtatccttgcctggaaaatcctatggacagaggaccctggtgagctatagttcgtggagtcacaagattcggacacaacttagcaaataaaccaccaccaccacatcctaaggacgttgactggtgcgaattgagagaatcataggaaagtacaaagaatactgcactgaacaacaaaagcagaagtgtttactatgtacagaagccctgagctctacccacagcagaaatttgatcttgctgtgacatgtcatgaaagtccatgcaacaagttgtctatttccaacttaaacaggatactcacaaagacaaatgcctacctttttgtctcacttactgcaaatttctgttcacttgtccttccccttctcaaatcattctgactattattgacagccactgttcagaggtatgttgaatgttttgctgttgcaacaatttccatcattaggtgggagtttccaaccatgctgacagctggtatctaaacatcttttttagtcacagttgggtaacataatgtcttagagtcaaggtggtactttttatgcagtgccccagagaactctgtgatgaatgacgtgttcaaagcgtacagcacaaaca

SEQ ID NO: 44785 - DNA, 1130 bp, Bovine  19866881525091
  misc_feature (1)..(1): n is a, c, g, or t
ntctattcctaatctcttactatccaataattatagtaattgtactgtcattgccaatcatttacgcataagaaagatggctcagtggtaaggaatctgcctgccagttcaggaggtacttgagatgcaggttcaatcctggattgggaagatcccctggaggaaggcatggcaacgcactccagtattcttgcctggaaaactccatggacagaggagtctggcaggctacagtccatggagtcacaaagaatcatcacgactgagcgactgagcacacaggcatgctagcacaggcataagaaagatccaaggattgttttaaaataggacagcaaagtttggatggaaaacattttagaatgtaatgacttcccctggccacccaagagctgtttatttacacagttgccacttctgcattcctcgttcatgaagcattatgtaactatgcagatattcacacccggcttgactcctattcctaactctcatatgttttttaatgtatttcctttgataagaaacaaataccagttatcatcttgtccatcagaaagtaccaaagcactattctcttacaaaatgaatacacaaatgaagtaatggatgtaaaagctctcccattctgataaaatctatacacctattctccaaatacattatgagccatcttccttctataacattatgtttgatcttcaattccactccctggaatgacctcttgaatcatgatctttacttcctgagtcatcctctttaacagttccacctattaatataaaaatattgtcatacttgaacaaccccaatctcgagaatttctaactctgctgaaatcctatatcacattttgtctttatcaatcatttgataatttatgtttcagtcttgtatatagacctgaatcttatgaatacttatggcctaatacatgtagcaaatactaatcaaaattttaactgtggtgatgtaagtggttctggtatttcctagatgtctaatcttaaattcccctgacctcaattttcacaaagtaaaatgggtataatgatggccaggtcctccatattatagtcaatacagggatatttctattgccactgctgatgatagtgacaaatgat

SEQ ID NO: 44786 - DNA, 1064 bp, Bovine  19866881929133
  misc_feature (1)..(1): n is a, c, g, or t
ncttatttgtagaactcttttataaatgaaatcttatcagctcagttcagtcactcagtcgtgtctgactctttgccaccccatgaatcacagcacgccagggcctccctgtccattaccaactctcggagttcactcaaacttatgtccattgagtcagtgatgccatccagccaactcatcctctgttgtccccttctcctcctgcccccaatccctcccagcatcagagtttttccaatgagtcaacacttctcatgaggtggccaaagtattggagtttcagctttagcatcagtccttccaatgaacacacaggactgatctcctttaggatggactggttggatgtccttaaaatacatagttgtactgtgctgtgcttagtttctcagtcatgtctcactcctttgcgaccccatgggctgtagcctgccaggctcctctgtccatggggattctctaggcaagaatactggagtgggtaccatgccctcctccagggtatattcctaacccagggatcaaatccaggtcttccacattgcaagtggattctttaacatccgagccaccaggagaatactagttgtactggttgtagtttatttctataaatgttttacataaatccaagcttgtaacacttggaataaatttaatcaattaactaataaaaagctattttatgaagagaatagaaaaatgttagtaccttcatgaagcttaaacatttattggctgatgtgatgactgaatggatggatgaatttatttagagaagcttgaaatgttcaagaactagcacatggggaaaagtcaatagcaaaccactttactccaacacagaaaggagaaagctctgttaaaatgaccccagagtcagataatcaacattacccttccctaaccttcatctgttgcaaacttctaattcaatcacacatgaacaaagtattaacatttgacacaaatagaattaataacctcttttttccctttgtatgttcctatttaataaaaataatacaataaggaagaacacagctctcaaaaagaaaaca

SEQ ID NO: 44787 - DNA, 1002 bp, Bovine  19866882016451
  misc_feature (1)..(1): n is a, c, g, or t
nataattttggtatatatgatactgagcaaaaaagttccccagatcatttgctaaagataattatatgcaaatgacttagtaattcgattcataagaatgcacccaatagaaacatgtacatatttgcaccaaaagatatatactggttatttatagcagtgtagttttgtaaatagccccaaactggaaattatctaaatgcttgtcaagaacagaattgataaattgtggtatattcacacaatggagagctatacaaaaataggaataaaaaatatctgtgtaccactataagaataaattttataaataatgttgagcaaaacaaaccagtcataaaaaatacatattgtgtgagttcatttatgtaaaacgcaaaaactaaagaaaacttatctgcttctagaagccataccattgaatatacttggcagttgggggttggggtttggaggaaaactagaaagttggcaggcagcagtcttctggggtgctgtcatcttctgttctttgaccttggtgttggctacatggatggttcacttgtggaaattcatgaatctacgacacgtgtccttttcttgtatgtattttaattattaaaaaaatttttctaacaatagttccttgttggttattttaaatatagtagtcttgtatatgttttttaaacattaaaagaagagatgattaagtaatatttagtcttgaaagaactaaaaataaaaaccttagaaaaatttgtttccaaagaaacttagatcagtattaattctaaatgaatactttagaatcatgctctgctactatgtttaaagtgaaatgtaatttttatactatttatggtatttctgcattctttttattttttaaagttaaacaagcacaccagatgtcatttgaaggttttagaagatacatggattcatctgaatgtctgctatttgataataagtgtgatcatgtttaccaagatatgactcatccattgactgattatt

SEQ ID NO: 44788 - DNA, 1947 bp, Bovine  19866880168542
  misc_feature (1)..(1): n is a, c, g, or t
nagtacatcacaagaaatgctgggctggaggaagcacaagctggaaccaagattgctgggagaaatatcaataacctcagatatgcaggtgacaccacccttatggcagaaagtgaagaactaaagagcctcttgatgaaagggaaagaagagagtgaaaaagttggcttaaagctcaacattcagaaaacgaagatcatggcatctggtcccatcacttcatggcaaacagatggggaaacagtgtcagactttatcttttggggctccaaaatcactgcagatggtgactgcagccatgaaattaaaagatgcttactccttggaagaaaagttatgaccaacctagatagcatattcaaaagcagagacattacttggcaacaaaggtccgtctagtcaaggctatggtttttcctgtggtcatgtatggatgcgagagttggactgtgaagaaagctgagcaccaaagaattgatactttagaactgtggtgttggaaaagactcttgagagtcccttggactgcaaggagatccaaccagtccattctaaaggagatcagctctgggtgttctttggaaggaataatgctaaagctgaaactccagtactttggccacctcacgtgaagagttgactgactggaaaagactctgatgctgggagggattgggggcaggaggagaagggggacaacggaggatgagatggctggatggcatcaccaacttgatggacatgagtttgagtgaactccgggagttggtgatggacacggaggcctggtgtgctgcagttcatgggatcgcaaagagtcagacacgactgagcaactgaactgaactgaactgagactcaatgtccttaactaccatgttatattatatatatcttgaatattctacttaaatattttctataaatcaagcctttaaaaattgcatttttcagttctaagaagcaataatttacatataaagatgtatagtctaacatacatgcatatacacccaacccctattttagaatagtgtaggccaccctccagtactgaaacttaagcatctcaaaaaagaaatgcttcatacatagcaagatgcaatttctacatggtatcagatacttcccagtatttcacaacaaatttggaggctcagagtcagatatcatgggaatattccatacatttaatgatccaacaatccttcacatacagtactttctgcatttgtaaaccttagagacctgctatgattaaggaaatccctccccattttctatctatacataaaaatcatttactgaggtaggctacttgcagataagctaattgaagctatcttcctattttcatataaacagtgaaaaatgagaacatttcaatagatttagtgcctcacttaacttttcagcataaaatatattcattaagcactcatttgtgtataatggctttgtcatatgctacactatcattggtttaatataaataccagattctgccaagtaaaaattgtgggatgtaactttaggagcttttcaactaagtctatttctggaagattttatgtgtcaattgaactcaaggttttatcatttgcaaatgattatgggtttcaaagtgataaggttctgatatcagaattgtcagttaccaagtccttgggatattataactaacccctaattgatacttcatttggaagtcttgttgcttctctggtgtttaacttgttcatacattaacttaagagacgtcttttaccctcaaatgtaatgactagttcagttgttttaaggatttttgtatgcttttttttttcctgataccttatttgaatcatttttccacacagtgtttgttctagtaaatttttctttgtttgtttgtttttaattactaaggaaaaaaaacatactcaagaacagacgaagcaaaaataa

SEQ ID NO: 44789 - DNA, 1731 bp, Bovine  19866880179732
  misc_feature (1)..(1): n is a, c, g, or t
ntctaatgaggtgaatgaaactggagcctattatacagagtgaagtaagccagaaggaaaaacaccaatacagtatactaacgcatatatatggaatttagaaagatggtaacaataaccctgtgtacgagacagcaaaagagacactgatgtatagaacagtcttatggactctgtgggagagggagagggtgggaagatttgggagaatggcattgaaacatgtaaaatatcatgtatgaaacgagatgccagtccaggttcgatgcacgatactggatgcttggggctggtgcactgggacgacccagagggatggtatggggagggaggagggagggagagttcacgatggggaacacatgtatacctgtggcagattcattttgatatttggcaaaactaatacaattatgtaaagcttaaaaataaaataaaatttaaatttaaaaaacaaaaacaaacaaacaaaaaaaactaagcatccatactgcttacactgaaatccgcgaaagaatttgtaaccagagcaaaagccctctagtggaagatctgtttgtaactctattacatagtatgtgactattaactagagggattctaaatagttcttttaggaaccttttaatgtttttttttttttaattgctgagttccaaataatacttggtgggtagtctaaatatttaatgttaacataacaaaaaagaacaccgcttttattgttaaacaacacataccaactacatagaagggaacaacagaacaactgtatctgaatttccattttagaaaactatcactaaatgtgtaaacgtgccattctcacttaacttatagctgaaccagataacgtgaaagaacttagaggaaaacagcaaagaaaagctgaacttctgttttatcctttacatgggctcctattctatgcacagcagggtgatcatagttcataaagcaggaccaaaagcttactagggtttaaatatagcctgtgacctcagggaatttctggattttagttcttgttctgccagctcctgttagttctttgtcaattaccagagcttcaaattccttatctgaaattggaagggctattgcatgtaataataatacccattgctatattgagtacttgctatgtgccacacattgtgctaagcactttatatgtattatttcatttaatcttcacaacaacccatatgttagagatgtgacccaactgattctaccattagaatgttggtctgccggacagcaaatctatatacctgaaaacaatataaatcttaaaaaccaaatctaggtctaaaattttatgagaaattggccttggactaactaatgtcaattacacattgaattctctgtttctgatgaaaaccaccaatgagttaattaaccatactgttcctgggtcatttgatttaattctggtccttaggtttagtctcctccctcattcctctttctgtggctgcctattttgctttctcttattaagaaattttcattttcactgcatttaaactgtcagtattatcctttatctggttttatgtttagcaagttaaactatcctcataattttatcaaatttctagaaaagtcctgttggtatttgatctgcattgcattttaacatacactgtagtttgaagaaatttgacatctatagctattctttaaatattcagtctcatggcacaggagtgcaatatatct

SEQ ID NO: 44790 - DNA, 1313 bp, Bovine  19866880451790
  misc_feature (1)..(1): n is a, c, g, or t
ntgtgataaatttatgcatgatgctaatatttgcccagttttctggaggtaggattagccatttgaattatagtttaatttatattaatatatatttttatgtataatgccatacattttatttgatgatttattcctcttttcttgggacaatttaaaagtatcctaggttaggaaatagtttgcttttttggtagctagcattttgagcctggattgtggatcatttgagtattatccttggttcctcacgaataatatgttaatattaactctgatttcttcctgctcaaattgtactatttatcattaaaaatccatatcaagctgcactccagtgaaatcttttctgtcaacaacaaattctaagtgggagctctttttccttaaattcctatttctttaaacgtaggttaataattaattgtttcttaatatctaaatatttatatgtactagtcttcaccactatacctaattataaatttcttaaggtgaggtaattttatttcatatcacttacccttagtacctagcttagggctaaaagaatataaagagcttaaaaatgcttattttatttaaaaaaaagagtgatttatactttcataacacacacatacatatctattactttcagctctagtggacacagctttcaaaaatcctcttgtatagggatatgtgcaattgaacttttaatttcccaaagtggaatttaatatccacatacacacaaccggccagattccttgcaaaaccatcagttacttccaaaacatagtggttcctgctggttttatagtaaattttatcctagtgcaggacaacttgctgcaacatctataactgggtgaactacagaggctactcaaggtcaagcctaattatccacatttgcacccacctgtgtgctgtgctcagagactctttgtgaccccatagactctagtccatcagccttccctgtccatggagtctcccaggcaagaatactggagtggataaccatttctttctccaggggaatcttcctgacccagggattgaacacatgtctcctgcattggcaggcagattctttaccactgccccataggggaagcctggcagatgtgaaagtctttaagatgagcatttgttcattaatggaggggcatgctgttctctgcagaattcggcaaaactccagctgaaatataagggtattcattttaaagtcaagttcccaggtcattaagcactttgagaatcgatagtctctgtagtggagaaggcaatggcaccccactccagtattcttgcctggaaaa

SEQ ID NO: 44791 - DNA, 1067 bp, Bovine  19866880477558
  misc_feature (1)..(1): n is a, c, g, or t
ncataagatggtgttaagccagtggctagaatgtggtctactaacatctcactaatttatgtacttattattctttcttttttaatttcctgttttgtttgcccttaattcccatggttccatttcatcttcattactttttggtggactacttgattttccaagttaaaagaacagagaccaacttggaaaatttgggcaaattaatcacttcagatatgattcattttccttattaagaaaatcacagtgaaaatatttgcctgaagagttatgggatataaaagcatatctacaaagtactgtgtatggtagctcctcaatcacttcttattaattttgaaaaacgtcctaaacaactgctgctgaattcttaaggaggaaatgataggcctcccctctttgtttggggcactggttgtagagatctggcaaagtaggaataagtcagagaaatgagatgagttagtagagatccacttcccatgttcctaggagctcacgtaatcagattcagtgattggccatgaattttattttttgaaatagtataatttttgtgttaactttgggatgttcttgatttactagctctgtgatgttaagtaaattcttcaatacttgtggaccctagaaaattttaataaaaatgttagttaccttatgggcttggtaggtagggtaaatgagaaatgtgtgtaattcacatataactgtacataatatcccatatgtcatatgcatggcagcctgattgtgtcatgtctaccacataacaaatgctattattattatggtttcccagaatacatatctgagatcccaaaaggatgttttatttcagcgtttttccctcacctccccattcctcaaagagaacaatgactacagaacatcagttgggtaaatagtgcattatcataattacaatttccctgagaaaagtggcttgcagtttgaatattcagtgtcacaattgcaatttccataaggaatgtagaacagttattataaacaacacaatgaccacttggtccataagggagaacagattatcgggggaggag

SEQ ID NO: 44792 - DNA, 1222 bp, Bovine  19866880483475
  misc_feature (1)..(1): n is a, c, g, or t
nttgtatctcagtggaaggatttgggggtagtcattcatttattcattttttgccatttttcaattattacaccatgtatttcttatgtttttaaagaagaaacaaacagaaatgcaaagtaagctgaccaaaagacaattagtaaggttcatttatttttgtaatttgtacaactgaacaatatttttatatgttcaggaaatgtctcagaggttcccagggaaaataaaagagcttataggattcatacaagtcaagtagagatacacttacaaaggcattgccagtggtgagaaagtttttataaaaaaataataaaatagtctaatcaatgtaaagtctgaaaattattctcaataagaaagagtggatgaaattaggggtgtctgtgttcagtgaagtcagatacaattaacacagtgttaaatacagcaagttatcagtctaattttcacagtcacagaatttctgagaagttatttgcttgtaaaaaatgtccaataatatgtgacttgaatagtaaatggtttactcatttaataaaaatgaataatttacttttcatcaaggaaaataaatcagtgggataatatgttcctttctcctttgttgttagagaagagaattttatagaaagcatgttaactaaaaatgtgtgatgcaaatggacaaaatcaatgtccaatacctttgtaagggctctgtcttggctatgtttctcaatggtcaatgactaggcttgcatcagaaataacctgatcaatttgacctctgaccaccaaatcaagctctttggagtcacagaggagtctgaatttttaataagtgcccaaggtaaatttgacgttcatgaggtttgagaacattaaggtgaactccatcaatcattagcaaagatttcacatttctgtttaaaagcaaaaagcttctttatttaactgaacattgttttaatggtaaactttctgacgaggatggactaatatagcacaaaaggccaatgagtttataattctgtgcgtatatatggactttttgagatatgccctcgaggtcattttcattcaaattatttcatatattctgaattaatatgtgaactgggaaagccttaaaatacctggtcctcaatttgcataactgatagaaataaaatattctttaatcactgaggcatatgtaagtagggtttcagctgactaattttactttaatgtgatt

SEQ ID NO: 44793 - DNA, 2139 bp, Bovine  19866880506504
  misc_feature (1)..(1): n is a, c, g, or t
ngattgaatctgggtctcctgcattgccaacagactctttaccaactgagcccaatagtgaagcctgttgatattctaagttcttcttaaattgactcacatctagttaaataatatggtttgccatctttccctaacttggaatccttcactccgttccttttggtcttcctggtgtccttttatgctcacgagctttccactacttataaaggctccccacttcttctttcaagccatacttccgggagtatacttctctgtgaagccttgctaatttcacttgagtttataccacttaattttttcatcaagtacacctttcctctttacagcttcctccatttctgaatttgtttctcagctaagtgataaactgagttaggatactgaaaatggaatttttttcccccttaactatttctagcatctaggccatattagatgcataatttgtgaaaaacattaatgttttatcatttccatgatgtaactaaatgcattttctttaggaaaaaatacagtaaaaatccagaagcaaaagaacaatgagactagaaacgagtgaaagaacactttacaaacaaccacattaaaactgtctcactgtaaatatgacacattagggacttattttttctcttcccagtttataagccttatgtactgcactggtaacttctatgcttcttttgaaataggcctcttgtgaaatattatgccataccatgtctcatatattataaaaagttttgttttcctaccaatattactatatatttgaaaattgcaatgtaagtatatgtaaattaaaaatactagtgagaatgggacagccatttggaaatctaacatgttttaaatgttaaaaaaaaatactatggagacgaaatacataagtatacaggaaaatatgggtaagaaatggaagaaataaattttttttacattattctatctagaacattttcttagctttttaaactcaagtaagaattatacagagtgaagtaagccagaaagaaaaacaccaatacagtatactaactatatatggaatttagaaagatggtaacaataaccctgtatgtgagacagcaaaagagacactgatgtatagaacagccttttggactctgcgggagagggagagtgtaagacgatttgggggaatggtactggaacatgtataatatcatgtaaaaaatgaatagccagtccaggttcaatacaggatgcttggggcctgtgcactgggatgacccggagggatggtatgtggagggaggtgggagggtggttcaggatggggaacacatgtatgcccgtggtggattcatgttgatgtgtggcagaaccaataaaatattgtaaagtaattagcctccaattaaaataaataaatttaaatttaaaaaataaaataaacctttaacatataaataaaataaaataaatcagaagaaaactttgacagcctagcaaacaaactgatccaaaaaatatctacattaaagacatgtttcaagtttaaattatttcaaatccaacttcagcattaaagaaaatatcaatgaaagaactgtaatcactgagtgggaaacagaaacttctaaatgtaagtacccagcacctaggaaaattatggatatgatttcctacactacttcaagacagacctacattttaacattaaataattcaacattttataaaagcagtaaatataaatataggtttataaatacaaacgttttgggtgccttctagcattttagttcacgtcactaattttaatcttttactacaaaaattttgaagttttcttaagaatttactctgtgtatgtgaacatttcaagggtatcagtggagtgtctaagggataactgaaatgtctagaatttagtgaaatatgcacctttgctttcatgttgatgaaaatgggaacccactctagtattcttacctggagaatcccatggatggaggagcctggtgggctatagtgcacagggttgcaaagattcggacacgactgagtgacttcactcactcactcactcagattagttaaccatgttagtgctcattatatagttctgagacatgtatattctatcttgggaaatgtatttta

SEQ ID NO: 44794 - DNA, 1611 bp, Bovine  19866880535837
  misc_feature (1)..(1): n is a, c, g, or t
ntctggcttaaatgatgcttccatttattaatccgtcattattggcattttacagaaaccattaaatttcaatcatgggagactacacacacatgtatatacacacataggcccatacacgcaagcacacgcacacagaatgctttttaagctggtgagactgctgtattattcaaggtgtggtaactgtgtggtgtacaatggcctacaacgaaatgtgctaaggaaggtctgaagagaatgtggagcagatagctggtgacctcgtgcacattctcctgaaagtcaatttcattttattacagcggaaataagctgctgtgaaaagaacatcaaagtttacatgactgattatttcctcaattttgctctctcaagtaaaatgtggtgtgggagagtggtgtgggagaaaacaaacacaaataccatgttcgttgcccttctaccctctttccatcctcatactgaaaattcaggaagacacttatggtcaaaagagtcaaactcaagatttcatccaaaggaacttttctgggaaaagttagaaaaaaaaaaaaactatgaatacaaactcatatagggatatatgcacatttgaaacatggagaaatcgaaaaggaaaatgatttaaaatggtgaggcaatatttagaatttatagaatcaggaaccacaaaagaacttatcttaaaataaagtttgttctgttaaaaactgatatgttaattatatatgcattcattttttaaaatttatagtcatagaataatttcattaataatttcatttatcaaggttcctttttagcctgggcagcaaagaattcaacactaaatttcttgctaaatcacagccattattggtctatgtttctgaatacttcttttctcattttgtatattttcttctttaactgtcttttggtctatggtttaggtaataatctaacttaagtcttttggaaaagcaattggggcaagaataacaaataaacaagaaatgaaaaacaagtagatttatacatatcttcccaggtaattctgcttctcaaatcatgtatatatgtatgattttattctatctttgtgaaaacaatatacctgattataccactctattctgtctgatgtgtggtatgtagcaatcttttcaatcttttcacatgcaaagaaagacatgcaaatatgtcacttcttttaatgaagacaaatgttgcttgcatagatcatttatatcacagcacacccagggtttatctagcattttacgtactaatgcttattgtagcttaagtaaattaacacagttgtctctaaagttaccattctatcattacaatgatgaaatgaatgcaaagcaattctatagtgcaataatcagttttttctaatttttacttagtacattggtaatatgttgtgtttttttttttctaagtaagatacagtgattactgagtgttaagtgtgtgattgcctatttcctacatttgcaaagaacaaatggagtacttaaactctcatgctccactgactcttgatttcagaacaaaattaaggataactataaatgtatgtcagtgtctggccttcaatatcaaagctcacgcata

SEQ ID NO: 44795 - DNA, 3927 bp, Bovine  19866880545522
  misc_feature (1)..(1): n is a, c, g, or t
naaccctagttgacaaatacagtgtgttcatatgtgacagactagttatatcatggtgataatgatagtaataatagcttatcatatgtcagataatatgtcaaacctcatgtatacattatctgattaacaccttcttaaaacacacttggggatagtttttattatacaggtcaaacaggaaacttgccatctctaaacagtgaactcctgtcatcccactgtagtttggttccatgcaaccgtctgcaaagagcttaactcctctgagctttagtttcactgtccattaagtggtgaggatatgtctgctgccctcttcagaggattatttgcaggacttaactaaaatgacttaaagaaatccattatttgcagtctggtcatgaatatcagcatcactatcaaattttggtgacttttttctatactcactcaaatcactgacttttcacaagacatcttgacaccattgtcaattttttcctttggaattttcctatgtgtgtttttcttctgactactgacttgtcattcaaaaaaggatttgaacataaggcttttaaatgatgttcttttcagatggtgggggaagtttggtttcctaatgatttcattgaatttacacctgaaggatattaatagaaatattgtgaaagcttatttttattgactagttaaagggactaaaccatgaaagaaacttctaagtcttagtattaatcttattcctattgagcaccataccattttctccctcttgctttctgtttttttctaacaaagtctggctgtccctcttttcccatgtaatgatagatttagaaaaaaaggtacttcaggcggacctttatttcagcaggtttcctaactatagagtcaagatttcagtttctggcaaacgtctgaattgtaatcagaaagcttaacaataagaaataactttgaaagatgttaaaacaataatgaagattaaaaagtaaaaaaatcacacacacacacacacacacattgtaattaaccctgttttcctccagaacttaattttatttagctcacttaattttgatacatttgctgattgatttttgccaaataaatgtgaataaacttctcactatgcatattttgactcccattattatgtatatgaaaatattaatatttaagtgttctcagttattatataaatataaaaaaggagttcaagtgtttgtattcatcacggttatcatattgcattatttaacttttatattgcttctttcctactgtcccaatcaaaatctttttctaaatattaactataggaaagccacaaaatagaataagaaaaaaaaaaaaataggtcatataacaggagcaccaagagccctttttagcacaaaatgtttgacagttccatttttgagattaccagtaaggattaaaaaaaaaatgtgagagatgggatatgctgttatcacatttgatgttctcataattgtaaagctattggaacattcaaaaaatttaaatctttcatcatgtttaacatgttaatccgtttcttaatgtcagttgctgaaaatgtctcctaggaattttgaggtcataatatttagtatatcctcttttgtacttttttttttttttgcatttaatcttgggaaaatgtacttaaaaaaaaataaaactaaaaaccagatttggagaggtggtcatcccctcaaacttcttgaattcatatggctggactaataataagacttaacacaagacacattaatgggaaaagaaaaacaaattttaattcatgcattgaaacatgtctcataaaaatgggacctaaagaagtggccaaatcaggcagttcttatactttttagacaaagaaatgatgcatttgtgaggaatcgacaggacagaaacctagggttcagatgcttaattggtgaagaatataaagagtttggccttggggtagtaagttaaagaagtatcgaggtttcttcatatatattgtaaagtaaaaaaagaaacaagaattctagactcaaattccttgtctttggtgatacaagtgtccttctacctcagatgcaaagaatgtacctttcatatgagaaatgtatttcctgatttcagggagacaaagaggagggtcagagtgttcttcttgcactagccatttctaaattaacttgaattcaaaataagcaatgtgccattgaggcacattttggtgtggccagccctcggccctgataccagtagtgatgagtatcattctcttggatttttgtcacaatttctcttaaagaaagataattttaaagcaatggtagaattctttaccaaaatcaaagccagtatcaaatctcagattgcagaaaacagagaacattcccctttaaatgaacctcattgttatcgtgatgaatttattcagcagacaatagctctattagcaaggcaatctgaactaatctgaaattgaatcacccctcgaacaaacattgggaaaattgaagcaatttgagattaaacttataaatatcacgctgtaaactttaaattgaattcaaagcaaattgaagtctttgtcttacctttattgttttacctttttaaccctttgttacaaggagcaaagttacaggaagatttttttccttattttagtgtgtgaaactgtacactggaataccaaatacaaatatatggagtaaaaggtatctgtattttttaacaattaaaattatttccttctcctttaataaagaaaatattttttttttcatattcagcatgaaattgtttatagcttgtgacagaacggaagagacataagcccttgacctcaaagttttgaatcactgtgtcagtcaaaatcaattaaagaagatacagaaaagtaggcatttatctgatggacccttctggcttgcattagtcatttagagtctctttctaagagactcattagcttgtctatttgcaaatgactgctgctatctgggcatactgcctttaggttccattttgctgcaggatagtgttctcttgaaagacagccatgttgatcagcataaagtaatgtaataggagttgaaagttgtatgtgggccaaaaattattcaaagaaaaggcatgcttcagtaacctatttaaaaagctggcatcttcagagacctaaatatatttttctccccaaatcttcacattgcccagtaagaactattgtattccggtcagtcctccacttctctttgccccccaaatatttctacatctttgtaaaatcacgggtacctgtgtgtggatctactctataccatgtcagatttttgtccatgtagcatacactgtattgtcttctcctgctgccatcttgctgatgtctgaaagcagaaggaatagatttgttcacaccaagaaatatgtttagtgatagctagtgatgggctaataaagtattcttgtgcagtcagtggatgaagctagagactcaggggcttttaaatcttgcagaggagtttgggcttttaggaggaaccccgtgaaccagaggaatgtcatgttgagaattatcttttagggaaaatccctctgccagtaatgtggggaatagtttggaaagaaataaactaaaggcaaataaaccacatataggaaagttgtaattaggtgtgagagaagtaattagggtttaaactaaagctatagcaatgaaaatggagaataaataatattgttgagaagtatctttacatttgtaaagctaagttaaggatattaggcaggggatgagatgggagaacagagtaggtccctggttctttacttagcttaggatgctatggggaaaacaggcttagttagagaaaggtttcattggggcaggaggtttaaacaactagagaaaatactgggaactcaggaagt

SEQ ID NO: 44796 - DNA, 1874 bp, Bovine  19866880587447
  misc_feature (1)..(1): n is a, c, g, or t
natctttatctttgctgagaataactactttgtaaggacagtatatatgcccacaccatgttggattaaaacacccttgctcccatcagagctctggtccccgtgtctgtctttctttctctttctctttttcaggctgatcccctggaacgcagaggctctctgagttcactttcctgccccaggtttctaagaccgtcttgagaaggtgctgtgcgccttcacccccattcaagagggcgctcaaggccttcgtgaacagagcaagccctgtgcaggggctttattggctttctgtgtaaaccaaggaatatcagcttctttctctcctttactttcttatcgtcaactcccgaccaccaagttctagtccattaaaagacctcaacacaccacttccatgtaggatgtagttgccacccagaaattatagcaaaataatctaaagtctttattaaatcatttgtaaaagcacatgaacacagttggtgtccctgagcatttgaaaaattaaattattctttacaattagtctattgagctagaagaaaataaagaacactcatgaaagagggaaaaagtgacaaaaattccaatgacgaatggtttttaattataattgcataatagtctcttgatacaagtgccacttagtgctttgaggatttctgccactgatccattagtccccttcatacatgttcaggcacccagagtggagcacagaagaatatcagaatattatttaactgcactcaagtgccttgaattacatcaatttaatggcatgcctaaccatcctactgttagcaaaagctgggagaatgagaaatgataaagtcacttctaactaacattctagtgaatattctagttttatgctgggatagaaaagaagtagaatataacataggtaacatttactttatggtaatattttactttttaaagtttctgaggattatgaatgatgctgctacaaacatttgagtactagtttttatgtcaacataaattttcatttctctggatcgaacctggatctactgtattgtaggcagattctttaccatctgtgccaccagggaagcccataataaattcttagacattggattgttggatcacatggtaattgtatgtgttgagaaagtctgactgaaaaatccccatgacatacttttgtctgtgatggtagttgtatttgttgcatgtgttaatattcatagaactatgtgtacacttggaatccacaatttttaatggagaattatttaaatttttaattataaaagtatgtaagacaagtgaggcaataatgtattgaaaattttatactgaacaattttttgccaccagagatcataaccatgagagggcagagtagagtagctttgcttttaatcaacagagtaagtcagattaggcattttcacaaataatatgcaatttcacagcaataatcacaaaacttgagctgttttagtaccttttctattttcaagaggagctgtcatttagatgatgagcccaacttccaaaaatatgctaggatgagagaggagatgtgaagaaatcttgatcttttagttttcattcattcattacttccgttaacaaatatacattggatccaactacagagcacaaactgagtgtttgggattcaatggtgagcgaactgaactctgaagaagtccaataatcacaatagaataagccaaataatcacacaaatatttaagtagaaattgtgttagccattttcaagggaaaagaaaagaacccctccactacctccgccaaaagacatcagggatatttcaggggaatatatttttttctgaagttcagagaaggcttcctcagggaag

SEQ ID NO: 44797 - DNA, 1343 bp, Bovine  19866880611125
  misc_feature (1)..(1): n is a, c, g, or t
ntttggggtttggtagaggatacagtcaacagaagggcttccctggtggctcagactgtaaagaatctgcctgcagttcaggagacctgggttcactccctgggttgggagattcccctggagaagggaatagcgacccactccaatattcttgcctggggaattccatggacagaggagcctggcgggctacagtcactggggtctcagagtcgtacatgactgagcgactaacactttcacagaaacagaattactgactttcaagggcatctagcatatgaaaatttgcattctgtgatccgcctctctctccctagtgtctcagaacaatctgaaattagcaagccttgacaacagctaatgaatatgaacagacttacacagattccccttttacagtattggattcagtctcttacaagacaggcaaatcagcccaagtaacctcttttttggatggatgaaaaaatttcctagccttgagcagttgtgtactcagaagagagtcagctgaaaaagttgggcctatagtaatgataataatatagtaagtcctttatatacatacaaacgagttctgtcctgagagcatgttcgttaagtccaatgaacttaggtatgcaactaacacaattagctatatagtactgtactctaataggtttgtaatttcacacaaataataaataaaaaatcaaacaccaaaaataaagaaaacatttttaactttacagtcgcttgaaaagttcactggtaaagtacaacagcgggcatccagggtctggcatcaagagaacaggtaagaagagttactgactagaggagggagaggaggtgggaaatggtagagctgaaggatcatcagcaataggagatggagggcaagctgcaacttcatgcatgcctgacgttgatggcacagggtctggttccttgctggaaccagatgcacgttcacagcagacttactgtacgtaggatccatagagtgtgtacttttgtaccagacatgtcttcttcacatcagtccagtggcatgggcatcaccaccaccaccaccttggtcagcatcttcctcaacttataaattaggaaactaacaggcagagaagttacattttctaccagtggcccgtgtccctgctccagggatatggttccccctgctgtatctctctcctgtccaggtatgaactgcaaggctcctttttgaattccaagttgcttcactgaagggttctcatcctgaaacccatgggaaaaggtttggttacatttcatcacacattgctatagtatctggtaactattctttccaggcatgactgagcagttaaaaa

SEQ ID NO: 44798 - DNA, 5972 bp, Bovine  19866880658793
  misc_feature (1)..(1): n is a, c, g, or t
nttagtatataaacaattacaatgtgatgggatgaatgtaatgatagaggcttgcaccaaattgcttgaggtatagaggaaggaatggtcaatatttttattgcttgaggtaagggacttaggagtttgacttaaggatgatacttagggcagttttaaaaaaattcttgggcttccctggttgctcagcagtaaagaatccacctgccaatacaggagatgcaggttcaatctctggatcaggaatattccctggaggaagaaatggcaacccactccagtattcttgcctggaaaatctcatacacagaggaatctggtgggctacagttcttggggtctcaaagagttggacacgacttagtgattgaataacaatgacctttccatgaaaaaagagcgaaagggcgtggaagatgcatagtgcaaaaccagacagatgtcaaagacgtgcccatctagcttttggtatgtagttgacagggacatgacagccacaaaacctgactaaaaatttaggaggctcatttgccttgctagtggtgattacctggaacctagagagggcttataaggccagaaatgcctttcagtcagtcctgagattaaattaatctcaataagacaaggtaccagcgcactggtttaaaatgaagtattggtacgacagtggggcgaagtgttggctataacaacaaagtgtcggatgtaacatgggttggttcagtcgctaagtcgtgtctgatactttgcaactccacagactgcagcacgccaggctttcttatccttcactgtctcccaaactcatgtctattgagtcagtggtgtcatccaaccatctcatcctctgtcacctggttctcctcctgccctcaatctttccagcatcagggtcttttctagtgagttggcttttcacatcaggtagccaaaatattggagcttcagtagtagtccactcaatgaatattcagggttgatttcccttaagattgactggtgtgatctccttgttatccaagggactcacatgagtcttctctagccccacaaatcgaaagcatcagttctttggtactcagccttctttatgtcccaactctcacatgcagacatggctactggaaaaaccatagctttctctatacaaagctttgtatacaaagctatacaaagctttgacctttgtgggcaaatagatgaatgctaggaaatatataaataattactgtaaatactgggtcaagccaaagggacttttacagaagacatgtttaaaaactgaagtagggatttggaacctttgaattcaatcctgcctatatcttttgatttgaataactactatactaaggtcattttcagtttcatgatttaaaaaaataaagtataatcatcgtttacaaaagaaaaatgtcaggattagagtatagtgtgtttaactattgggataaattctttctgttagtatctcaggccagagggaggtactcaaaatcatttgatactcaaatcattctttctagctattctccagtttttaatcacttgaccacctaattgcataacttatatcagagaatatgtgttttgccacccttattcaaaggcatctccctgtaacagctttaattaaaatttaagtttttttttttttttcctgttgggcttccctggtggctcaaaggttaaagcgtctgcctggaatgtgagagacctgggttcgatccctgggtctggaagatcccctggagaaggaaatggcaacccattccagcactcttccctggagaatcctatggagggaggagcctggtaggctacagtccatggggtcacaaagagtcggacactactgagtgacttcactttcactttagtttctgtgtttttaaaataataaacactgatctgctaaataaatagaaccagctttctataatataagcatcttcctatattcaagttataaaaacttatagatttttataattaatatattaatagtttcataaatcattaatagtttattaacttcaaatcatattgctgagaacacagaatatagactcatgactgtagaattatgtcagtaacagtaagattgtctcataaaggtatctggcaaaatgaataaggatgtaaagaaaagtttcaggaaaataaattaaaacaacctcaagatccctaagcaatatccttttttaataagaactatgtaaaaagcctaaagaatgacctataaaaattgaatctagacttagattataactctatcattagtagattactttgtaagaagtggagatttttagggaaggtttgacaggagcacagatgtgcaagaagacacaatccacgggatgtagaacaagttcaggaaaggccagggtacttgggtttcatgagtccctttccgcctacctttacatcatttccaaggctataatgatgccccagtgttctgggaactgagcagcatcactcagagaggctgtcatgagtccccaggcccgtttcttacaagggactacacctctcctttcctgagcagcacatatgttcagggatcagccgttctagaaaaggacaggaaaaactgactcaccatgcccaagcactggcaacagtgaaagagagtgaaataagtcagagaacatacactatagaatctggatacctaccatctgctcccagctctgctcgctgttggcaagccattcagtccctctacatctctacttcctggtttgttcagatatgacttgaagttagactattttatgggtccttctagactaaaattattttatgggtgagtaaatcataaactttatctgagaagagtctatttctctctagtctgcactctacttcctaatctctactagatttttctttcaaaattcttcagatggtgcttaggctaaactagtacaatttaaaggaattcattttggaaaggtatttgaatatgttgtggtccttcagcaagcatatgactgtggttcaggagttgattcatccaatgcaggttgaaccctctctgtgtgggtggtcagctccatcacctagacatgcctttctctatgcaaaaacatcccagccatgaccacatccctctcttcttcctgctttccatttcccccctccatttcccacttttctctcttctccattggtctctctaccacctctctgaggtggtggtgataagatacagagactttgcacggctggctgaaatgcctatcaccactggtggggggtgaatcctgctatgttgccccttttgcagaagaagtcattgaaatgaaccatcccctacaactgtatggttaccagcttttcatcttctttgttagaaaaagcagtgattacagagaaagagagactgagcacagcaagcttaggtttggagcagaaagcacaaggttcaaatcctgggtttgctccttattatctaaataatgtagggaggtttactttgaattctgagcccaggtgtctcctttttggtaacttttagtatcatgatatctacttaataggttcatcaataggcgaggtatagagtatctggttcacagctacacattagaacaagattgaaattctcccacatgcaacttacgtatgataaaggagactttctaatgcatctgaaacggctgagttggtgatctgtgaatttttccagggcagcagctttccctattttttttttttttccttcagtctcagtcccttcccaaggtatttgtttaataaatgtagagtgaataagtgaattgttgaacaacactgttcaatactttttcaaaatcttataaaaggaacacaattttttgcagaagaagctagaattgatccatgattcacattgtcttcaggggcttagttattaagttacacacaataatacctctgtcctggtattagagaaggaaactgaaggttcaacacaaacattgtcaacagagtgtttgccaagatgagtcaatatctccaagacattaaaagaccaaatgagtgtgtctaagaaagcaaaaaaagcagatcaacaggacttggcatatatacgttccttttatacttttatctgcaaatctatatcaaaatagaggttaccaggattgtgagctcgagggttgttttgtgttttttttaaagatatctagtcatattttcttttctgaggaggagggtagcaataattttctgaaaagcatctacatccttgttggttatattattagcaggtttaaaacaacttaaggagatcagaaccaaatgtggaagatgaattatgtgggaaagtgggctttaaggtttttgatgtactctagtcctcaagacggagaaggcaatggcactccactccagtactcttgcctggaaaatcccatggatggaggagcctggaaggctgcagtccatggggtcgctgagggtcagacacgactgagcgacttcactttcacttttcactttcatgcattggagaaggaaatggcaacccactccagtgttcttgcctggagaatcccagggacgggggagcctggtaggctgccgtctatggggttgcacagagttggacacgactgaagtgacttagcagtagcagcagtcctgaagaactgtattggaactttgacaatggtagagatttttgtttgtgtgtgtgtttgtttttaactcagaaatactgtatcagaattttattcctgagagtcatcaaatttcttgtatctgctaaaaagcaatcatgacagaaatgaaaggggatgaaacaacctccctttttttttttcaggtgttttaatcattcttcaatacatttgaattgtgaaagagttgtatagatataaataaggtttctttagatctagtcagctttccaaacaagtgaaaccatcacatattatcccaagtctatattgtataatttcatggacagcaaagtcccacctgcccaaagatgcttgatccatattctttcctttttaaaaattctttcttttgtgcatttatagattcgtgtatttattcaactgattcattcgatatgtatttgtattgagctctttctaagttaagcactgttagaagcaccaagtttatggtggtaagaatattaccatggttgctgatttcctcaggtttgtgtgtttatgagaaaataatcaaataagtacacagataattacaatttcactgaacaatgatagctcacatttattgggtacttaatgtgggcaatgttataataattattgggcactattctcagtgtttgcatgtattaactcagttctcatgactcactttaggtagataatattgcatctcattttataaataaagaaagtggagcatagaaaaaataagcagcttctccagtgtcatgcagactagcaactatgcattcaggattcagtcaaagagtctgggtataaatcttgtactcaaacccactacttattctgagaaatgacagggaagaagacttgaggaagccataatagagtatgaaagttttcccatttagcataaggcatacatttggaaatgacatttaagctgacctaaaaagcaaatggctagttagagtggggagaggacagctctaacagaggaacaggccatgtgcaggctttgcaactgcaaggggccaaactttcagcacagatatagcctggtgagtgctgaagttagactggagggttcaactgtggctagaaagataagaagacagagggcaggaggcaaagagagagactggaagaaaatgaaaaatataaaatctccaaagtgcaaagggaagtcatttatggagagatgtgatccagttgatcttttaagataattctgattgtgatatagagattacattgggagggcaagaggataagtaggaaaactgattaggaagccctgagagtaatccgagagatagataataa

SEQ ID NO: 44799 - DNA, 1578 bp, Bovine  19866880675352
  misc_feature (1)..(1): n is a, c, g, or t
ntggggaattactggagctttttaaggaggggaataaaataatcagattgacaccttaagtaaaacagataaagtcagagcacttgggaggctattgcaataatccacaggatgatgttaccctgggtaaactggtgatggtaaaaatacagtgaagatgaaaatggatttaagaaacttacaggagattatttgataataggtttttggtgatgggagaagagggagagtggatcaagggttatctctaaattttcagcttatacatctgtacagttattagttgtcagaaagaaaaagatctctcttttggtttgtttatttggatgaagggcagaattcagtggaggtgattctgcactccagtatcaatatgttgatttagagataactttaagggcttcccttgtagctaagctggtgaagaattcgcctgcaatgcaggagaccccggtttgattcctgggtcaggtagatcccctggagaaggaataagctactcacttcagtattcttgggcttccctagtggctcacctggtaaagaatctgcttgcaatgcgggagacctgggttcgatccctggcttgggaagatcccttggagaagggaacggctacccactccagtattctggcctggagaattccatggactgtatatccatgaggttgcaaagagtcagacacgacagagcaactttcactttaagtcatctaaggagatctgtccaggattttattagatacttggatttgcaaaagagaagtctaagcctaagattaaaatctgtgtattactgtcatggaagtaggaactggagcccttgtcactgaaagaatttcccagagaaacttgaaaaaaatcaacggagcctagaactgaatcttgattaattctgacattcaaaagccaggttacaaccaccaaaagaatcaggaccagtaatttttgagctcttgttatgtgctactgaagcccttgctgtagcctatgtaatgttcataaaaaccttatgaggaaattgttatttttctattttacaggtgagaaaacagcagaacactgaggatatgtgagcagacaaaggacacacacagctactgagtggtaggaacaggcctcaaatctaggcagtttgatttgagaacacatctttctaactactataatctgccaggttcttttttttttcccactgctgttttaaattttgttgtcattttaaaattttgtatgtgcattcctctttttttattgcagaaaaattgctttacaatgttgtgttagtttctgctgtacaacaacatgaatcagctatatgtatacatatacccccttcctcttgagcctccgtctcactccacacccatcctgcccacttaggtcatcacagagcactgagctgagctcgctgtgctatgcttaggaaaactgacaagacagacttagctaggcatgtgagaatttcaactcacattcgcatttgtcctctatatccgaactatgcaatgccatagttactagctacatggtgactctctgagcacttgacatattgattccctggtgtctcaga

SEQ ID NO: 44800 - DNA, 1453 bp, Bovine  19866880700808
  misc_feature (1)..(1): n is a, c, g, or t
ncttttctgctgttatagcctctttccttttctttgtcctttctgggtttgttcctgtatagctaaattaatgaagttttaagagggaggaaagataaatggatgtgttccatatgccaactttcttcttaatccatttatcacagagtgcaaaactcttaataagcttatgtaagcttgaaagcagttatgaaattgtgctgccaatctccacacactatactgacattttttaaagctttctctcatagatcttatatatccatcttctaaacatttcctgatgatgttgattttagttttaatacattagagattttcatatatcaaacatacattgaatacctgatatatgtgatacatggtttggtgctggaaacattctgttagactcactgtatatcttattctttctgtctcactctgttggtgtcatctgtctggagcttataaatctaaagaactctttctagtagctcttagcttcagcttcctttgggaatttctgttcatactgcaattggtctcatgacattgttggtacttcctggttatagtgctcatattttctgaactaaaagtcaggatgtattgcctgatggtcttacaaagaatttttgtgtcctgacttgtggatttattttaaagtataaaaatcaaatcactgttagtaatagttcagtttaataaaacttttgaattataggccaacattaagctaaaatgaaaaaataaagatatctttgtcttggagaaacttaaggtataagttcatagttaataaatttactgttcagaaagagtacatttatagagaatcagaacaattctagaacatttcaggagtatggtgaaataatggtgtggcttgattaataagtaatggaaatattttagtaaatgaacaccttggtgtattttatattttacttcaactgataagaaaacagattcatcctctcaggcttataatcatgggaagacaagctataaagctattcacattaaaaaaaaaaattccaacaacttatctacttagctttagggctataagcataaataattcaaaagaacttccagtgagcttactctaaagctattttaatcaaacaaaaagaaatcctgaatgaattttgttccttctataaagtcagaaacaatccatgttctgtatggcatgagatcacattaactttgtttgtactaaactcaaggcccaattattttcaatgttttttcaagttctaatggctttgggttctttggtggtggctacatctccagctgtgtttctcagtgactttaggcattgaatcagtagattataaataaacaaaaaagctgaagacaacaatttgaacaatttccctacactttagtagtcactggaccacagatttctaaagtagaacttaatagagtaattgggaattgggttattttctatccttga

SEQ ID NO: 44801 - DNA, 1169 bp, Bovine  19866880723501
  misc_feature (1)..(1): n is a, c, g, or t
natcttgatttgggattcataaaattttgatataagagctctgatagtcttaaaatcagaagataggaataatgtagttgccccaagtaactgttactaacaaattttaattatgttatagaggaggaagaatgttaaagagaaagatcagatctgatagttgaaaagaggttccagaatgaaacagacaaaagtcccagagacaagttgaataagagcatgtgttacattttaaattccaaaagccacaatggactaggtcattatgttaccatatcaaatcatacttagatgaacagaatttagaatgataaatactttcaaaaaataaaaggcaaaataatggtataccttctaaactggaataactttgaagcatatatgtaagatcatatgctgtaaactgcaacactttccctattcaaccttcaaaaagtacaactgcttattccattatagttcagagtagttccttaaagaggaaactgccttagcttgcaatttggggctattgcattaaaccatcatccatagtatcttgtgtctgctttacgttgtcttaactcctcccctcctcttgagaaaaaagaactcaatcattactatatccattctcctgaattcaagggagcaccattcttcaacaacctgttgagtggacttagaaagcaaacagagaagttacgcattattcaatacaccttggcagcactctaaagcccttagaaatgcctaaacaaatgataaatgatcagatgactccctcaaatcttacctggtttactctttttagaaatccgacccttgctgtctaccatgcaaagctcttgaccactggatgaaatccaaactgggtagtagatcatgataattccaacacgtcatgggcagcagcatctctcagaatcccacatgtcatctccttgaaacaaacctgcaacaaacaaggcatttttttcatctaactgaaaaatagggaaccatatccttggtccaggaggcatcactacttgatcaataagggaatcataaaggagtgtatgaggagcaataaatgccactcaagatgctgataaacattaaagccaatagaccaacatttatgtgctacagaaggtgttttggcaagagtgcatgttcctcttcatgttaccgtagatctatttaag

SEQ ID NO: 44802 - DNA, 1837 bp, Bovine  19866880754623
  misc_feature (1)..(1): n is a, c, g, or t
ncatggaaggtgtcatgtgccacactcagcaaggccattagggaccctttagagaacattcaccaggaaagaaaagaagatgaaaataacattaagaatccctaggccatcttattacaacattccaaattccattatagatgtgaagaagatgcaaccaacaaaatggattaaaaggcacatgtcatccagcgctacacactgacctctatcatgcaccagtcaaggtcagaaggctgggaaacagatctcagttccactggaacgatggggtccatttacataagtccacagcattgatgatttaaaaattgaggctggaccactttaaaaatgacttgcaaaaaaatggcaaatataaacaggagaatataattgatctctcatttaagattcagttgaaaatagcagtcctggggccattgttaggtcacccagtgggcacagaaagtgtgcctttggaagtctacccagtttttattccccgagacacagtgggggtcttggctaatagagctgtgaatattcagcgaaagccaataatcagtttaccacaaaaatagcagccatcacagctctgaccacgtataggcttgccaagaagggcagcccgtacccacgcacatacttggtaagacatggaggaaacaccatcccctaagcgagccttcagggtttgctttttgatgattctgtcacaggaaggattaacaatgcaggacttccttcactgctgttttcacggttcgtttttaatacgcctagaatctctaaggaagctgttagcatctaaccaaaatagaaggcaatgatttacatgtgttgttgggaaaaataaataaatccccccaaacagcacgttggttacatgcagagagccctgctgctcagagtgagcatcacatgggggcactgactaggggccaccttggagaggccatcagtcatactcaagtcttgttaggctcagacaaaatgctatgactcctaagaagtctactgaaactgtgcttctaatttcctggggactttctacccttgaggatcagggagtaaaggaaagaacaaaggctgaactgaaagattcttaagacaaacagggggagttgtaagaacagtctttctgatggaatgttcatcccattaagggccactgatgcagaagagtcacagggatccactgtgcgcgtgctcagtcctgtccgaccctttgcaaccccacggactgtcgcccgctaggctcctctgtccatggggtttttcaagcaagactcttggagtgggttgctatttcttcctccagggatcccaacttgggtcacatctacatctcctgcatctccttcagtggcaggcagattctctaccactgcaccacctgggaatcctgcatacaaaaccagggcagtttgcaaaaaggaaaaaaaaaaaatagagcaggtgaaaatctgaatcttggggttggatgcttgcagctgtagctgctacaggcccacctcaatactgccatcaaagcagaccatcgtgaaagagtgttagggaaagcctactgtgtttgccctggagttagggaacaatgggcctggcgccggcttcttaaccacatgttactgaagtggctgcacttgctatggcacactatgcaacagagtaaagggaaacatgggataagacatggtacaaagacagactggaatgaggtgcttgggaagcagagggtggaagggcatatccattctgtaccatgatccccttagtggttctttgggcttccctgatagctcagttggtaaagaatctgcaggagaccccaattcgattccgggtcaggaagatc

SEQ ID NO: 44803 - DNA, 1146 bp, Bovine  19866880765455
  misc_feature (1)..(1): n is a, c, g, or t
ntgtgttaagagacagaggtctcagtaagtgtcaccttaactctctgatcctctgttgcgtgtaaagtggagatttgaaagcccaacatatctacctactagcattgttgaaatgatcaaagaagtttatgcattaataaatgacttttaaactatcaattgcccataaaacgagagatgctagcaatagtatcatgtcattaaagactcatggtttgtgccacatcctttgcttctcaaaattaaactttttacccaagatttgcttataatctaggaattcttagcatcctggcatttattgagagtgctaaggtttggatccacacaaacctgtaagccatattttgtaggaagaaagtggcccattaaggcaaagtgaattttccagggtcactggcttgttgatggcatgactggactcccaacacccattcagtaactccagatttgcaactttttccaagaaaggacaaaaatctgagcgctcttgttttcaaatactttttttttgtcaatgagacctaatagtccttagtatcacattgaatccagtaaaggtaacagctgagatttttgtggaattttctagtacctttaagttttggtaaatgtgcagtattcttaccggaaacttactttttcatggtgcaatttaatggtgaatccctagatatccgattggcagttgctgacatttaatttttcacaaagatttttaaatggcccggtactgtgaaaatattttatgcttgtaaatatttttttaagtgtatgatcctgaatattttaaaactgagtgctggcataaaataagatgactgaggtcatagtccatatctacagatattagttattaaacaagagacaagatgggtggagaggtctaagttgtatttaaacttctggaggaaggatgataacgaggtgcagaactttacaatagccttttgactctagcctgtaactaggcatatgataggagttaaaaagaaattgcttcactaagcaccattatcctgaagaatggtaagaatagcaagcaaagacactgatgacctcagagaaacatgaataacacattatggctcagattatattgacagcctagcctgactcccaggaatttagagcaaatttggcatt

SEQ ID NO: 44804 - DNA, 1409 bp, Bovine  19866880782863
  misc_feature (1)..(1): n is a, c, g, or t
naatttcatttttcccaataaattagatatgtggtgatttagattaaacttgcagtgtcaaataaactgccaccatgtccccagacatatacactatggtatggatgtcagatcctttttagtaagttttcgaaatgactctcaaatatgtaaggacatcattccagattaaatgacagttctgagcatgggaaaaccctaaacagcatttataggagttagcgacactaatataaaacagtgaataaccgtgccatgcttaatttgcagttctttcatttccctgcagacagctcggtgtctctttgctgtttagaagcttgttttacagcacctccatgagcacttctgcctccacctgggcaggtacaatccattttgtctgctactgagtttctcaccgtcacacaaatttgcaatgtaaggacagaccagttcgcctgatttctttctaataaaggtgtatggctgggatgtgggactgtactgtatatgactgtgcttaaccactcagtattttgtcaggggccacacagttcatagggtaaagtgaagaaaaatgactactcttgtcagaggcagggttcagtataaaatctcttttctatctgtgggcttcccaggtggctcagtggtaaagaattcgcttgctaagacaggagcctcaggagatgtgggttcagtccctgggttgggaagatcccctggaggaggaaatggcacttcactccagtattcttgtctggagaaccccatggtcagaggagtctggtgggctacagtcacggggtcacagagttggacacaacttagcgactaaacaacaagaagcttaggctgaggaaacacagggctagaatataacatattagcaagtatattattggtcaataatgtcaaatgcaaaacggttttaggctgacactgacaaataaagtcaatacaaaccaaataagtgctcaagaaaatacaaagcctggaggagaacctgtcaatataatggattttcatgaagcaagactgtatcatattcaagatatattttatgaacacccattcctttttctggcaatctcgaaatcatttttccttaatttctgatgtagcatagttcccagaacccatcattttaacatccttttctgtaccctaatctcttcctctctatagttcttgttcatctgagtcaatattggagacaaacttccactgtagatcaagcacaatattcagattctttattccatcactaggaataacagtcaccactgattgagtgcttaatgtatctaaaacactatgctaagcatgttagacattatttcacttcatattcagagaaattcaatgacatagggactttcagatctttacctctattcagaacttcctgagttccacagtatttt

SEQ ID NO: 44805 - DNA, 1130 bp, Bovine  19866880793494
  misc_feature (1)..(1): n is a, c, g, or t
nataggctggtggacttcagagcccactttcataatgatctcattattgcaaacatttatctgtgcttaaaatatgtcagagtctgtgctgagtatttatgtcatttcattgatcttgcatcaaagtatcgtatggaatatcattgtcctcattttatagacattaaagctgaggctcatagaggttcaacaactggccttgggtcacatacataatatgagatctgaattgaggttttctttctccacaggctgagttcctaacaactatattattatcctatcatatgcactctttactctttaaaaaaaaatcaaccactttaaaatcatctttaccaattcaatatacattctcaaactgatctgaaaagcaaggttgtcttccctgaatctaaatgaactccagaggaacttgcttattgtaccttccagggataacatttctcaaacattatacagcatgtcaagtcaagagattatttgaaactaagcagattaacaaatagattttatcttttaaagaatgattttacctaagggagagctataaaatgaaaatgaaaagtcctaaaatgtattgcttattttatttaacctgcttatgaaatagtaggaaaacttatctatttattgtcaagttcctctttaaaatagtctttagttagctacactcaatatttccccctataaagtcactctcagctaagtcttagagcgagattctactattgatcatcaataatgttgtcctaaatggcattctggtttggtttctctcatagtttgtaacttcttgaccttatgtttaacagagaaaatgaggcaattttgataatttgtttgttttaatattttaatgcctaaagggactttggaagttatttaatccaaatccatataggaggctgagccatgaagatgtctgggcaagtcaataaactgtacaactgatgctagtgtttctgattccctatccatttttttcttatcatgtagtagagtcagcactgcacctatgttgattgtaattcttaatttcatcctatcttcaggtgtatcatcatcatcatttactccgtggtgtggtgaggagagaatgggataaaaataggtgtaaagtactgtgt

SEQ ID NO: 44806 - DNA, 2825 bp, Bovine  19866880908620
  misc_feature (1)..(1): n is a, c, g, or t
naatatttaatgataagctcctaaagagaagtacgctgttcctgttttgttcgttactctacgttcagttgcaggaatagtgcttgagagtatcgcacagtagttactgaatgaatgaatgaatgaaccgattaccaggcaccatactgattgttggcttttggctgcacattcccattgatctgtcaggattccactatccttcctgattccctgactagcatcatgaacatccatgtccctgcacagtgtctgatattattcaatctttaagttcctttctttctagtgtctttaggtggggacttcccccaaccagccctggatccccaaaatcacagtcattacatctatagctagactaatgttctggacagagattaaaaacagagggcaagattagtaatataaatacataatacctttataaaatgaagtaatttctattaggctctaagttttataaatatatctttgtttttaattataacaattaactgttggtaccacttctctagtacagtcaattgtaccttagaataccagaaccacttgaaaaataatcttatagcaagtaagggaaaaagattggggtgcgtgatgttaagaatataattaagaagaaaaaaatgtttgcagtgcactttaatattattatctacagttatttttccaattaatgtacaaagtatataataaatataactatgatttttcaacaagtgacagaagtatatattttatacacaaactcactaaaaattacttagtaccagtataaactaaaagatagtatttgcctcatttttgttgattaaaaaataaaagacaaattgagtgaccttcctaaagctagaaaggaaaccagttattacaatttcccatctctattcatattgcaaatggagtgagaaggattcatatatacaggagccagctagtatagaggataagttatccagtgagatgcacttatatcttagtcaaagtctgtgagaatattaaaaatgataattcagaactttttatcactagctatttttgaccattttattacattcctataaagatttacatttaaaattgatttaataatactaaaatccattcttttcagttaactactggtcaacaagtagtaatggttttcccaaagtgcaataaaagcatttcactgaagtatgttagaatgtatcatcaaaacaacaaaagtaagtgttggcaaggtccctcaaaatttagaaaaataactgcctatgacccaataatctcacttctggaaaaacacctcaaggtaattagttcagtattttgaagtggtctctgtaccgccatgctcactgcattatcattcataacagacaaggtgtggaaacaacctcagtgtccatcggtgcatgaacggataaagaatgtgtgtaaatgtatgtgtgtttatccataggtacctatatgtatacacacgcagtggaatattgttcagccttaacaaaaagaaagaaatcttggaatgtacaacaacatggatgaacctggagaacatgatgctaagtgaaataagccagacacagaaaaacaaatacagaatggtctcactcatacgcagaatctacaaaagtctcacttataaaatcagagtacgatgatggttactatgtgaaataatggacatgttacttagcttgactgtggtaatatctcacagtgtacatgtacatccaaatatcacctgtataccttaaatacacacaactttgatttgtcaagtatactttaatatcagtggggtaaaaacatgctccaacaacatgagcagcaacaactatcctattctatttctattaatagttctatttctattctagtaatagaaaagtagtaaagttgaagtcatattctgagaaatctaggaagaaactgagtcatctgctgtgaattcaaaatttctttctagttttatctcagatcctacaatttcaaaaacagtttgaatctaattccacaatacatttatgcttttttcctgcacctttttttttgtgacatgatagaaaccaagatcaaactaattcagacaaaaagaaaatcttcattactatgcaggtgcttgaataaattaagtgcctcccttcccttctctgcatttatgtgcatacgtatctatcacgtatatttcaataccactggatgtatttcatataccagcacagttgaaaaatcataagaaaagactgactcacctggcttaggtgagatacatactaggccaaccacccgaagctaacgatgcagaaatacagtgtaatatggaaggcttctgagaaaaacactgcttccacaaagttgtaagcctttccccactcaagaaagaaatgctaacgagaccaaagagcaattctatgacactactgaaaaatatgtaaatgtatttactgcaggttaaaatttgtgttttaggaatgcactctgcatgtttttctgcattattttatcttcttgtgaactactctgttctggacaagactcaacagtggcagtcttgatggggttctcggatcccagtatacagcagtagaggcaatcacttacaggagtcttaattttgatgtgattgttcattcatgttagcacaaccataatgcattagagcatagtgaacactctcatggggatatggggggagtgcactggtaaacactggtgagaatgagaatgagaacggggcgggggggtgggggcgttgctcatgggaaaccaagagctgagagagactctgagtaaacaggttgaagcgtttagattttattccttggcaacaggaataa

SEQ ID NO: 44807 - DNA, 836 bp, Bovine  19866880928659
  misc_feature (1)..(1): n is a, c, g, or t
nctattaattctaactcaaagaatagttgcaaaaattaagtaagtagagctccagcagtcactgtagtgtcacagatctcgtaccaattactttttcttgactgagaatcttagaccacttgcgtcaggaagatcccctggaggaggaattggcaacctactccagtattcctcctggagaatcccatggacagaagagcctggcaggctacagtccatgggttcaaaagagtcagacacaaagtgttgttgttgttgtttcctaaaccttgttttttattaggcttgcataaactaacacatgccatctctccctataccctgtgatcccagatgtaagcattaataactaatccgcatgctgtgctaattcagaagatagggactatctttttggacaccagtgccaaatgttcaatactcattagagcaattgttttgcatattttgagaatacactattcctttctattatttttaagtttataattgtttttgaatctggagaaaaggctatatgcccagcctggtcatgagcactttatttgacataaaatgtgttactatctttgacagaataaatgaaaaaatttaggacgccctacacggctggaacatactatgttccagaagtcctccaaacaactgacgatgagggataaacgagtgggagagacattagattgtgaaaagagggcttgtgtagcacattaggctcctgctgaggtagatcaagaagtgtcttaccatctcgagattgtgtaatacatttcaaaatgcccatctggagcatcattttgatttgtattcctataagtcaacttcaatttccagta

SEQ ID NO: 44808 - DNA, 899 bp, Bovine  19866880979336
  misc_feature (1)..(1): n is a, c, g, or t
nccagatttcttgctaatgctagaatagatttattcaaacgtatgttgagtcctctattttactgatattcctgttactcaagatattttttgaactcctctttggtatctaacttcagagctcatggcacattatttaaataacttcctaattctgtgttgagcatcagtgagattagagggtttgtgtgtgtgtgtgcaccattttttttttaatccttcagatgacttttctgaccaatgcagatataaatattgaccaatgccttcaatctttactctagctatcccacagtctgcctgtattcatggcagcgtggataaaattagaggactgagaagactaagatggactaagagcttggaactaagctcttcataacacttgtagaaatcattcttgtgtacacacacacaatacttagtgtagatttctgatcatgaaacttcaagataaagacacttgtattgcatgagataaaatgaaagtgtgggaagcaatactgcaaaaggaatgaattcaaagcagtgaattatcatggctaattcctttaaataggtttatacacttgacagaaatcatagaaaatggattttttcccccataataaaggatcaaaaacatttctgaaactactcttttccctttgggacaattttaatacagatgaaggagctttagaagaatgagttaacaaaaaacactacttaaccatctgctagaacacaatgtggaatgttttcaatacctctcagcttgcttaactgaatttcagaatgcaagcattagtattaagaataagaactaaggatttcctgaaatcatttcgtttttatccttgctgcccctagtatactttccaaccccttcactaactctctctattgcttttccattc

SEQ ID NO: 44809 - DNA, 1780 bp, Bovine  19866881019368
  misc_feature (1)..(1): n is a, c, g, or t
ncttcttgtcttgaagtttattggtctcccgcgtaaaccagctactcagcctcttttctccctgaatttcctcactgagctatcctcattctattgctctttatatctttgataaatatttaaataaataggtcgcctatgccgtctctccttcaaataccccggatcagccggggctggaccccggcagacacatgtatttatttcacatctagtacaaagaatatatcatcatgacactcaatgaagaaaaatcatagagtttgtagcaattgatgactttcagcaacactttaaatcccatgagagggctcacttccaatatacccaccttgtaacttatctataaaggttccaggatatctgcccttttactgaaggacaattttacttttggctagaagataacgttccctgaaggctgccactaaaacaacaactttacaaacaaccaataggaacaccaagtctaatacatacgttcatgtagaacctaacttctacagtttgccactgactacactccattatttgtcctggacaatgatacttcttcctctcaattttatgtcaaaatagttgtgaaaataggtttatatacagcctaaggaaactaatgaaattttttggtcttgttttagaggcactcgagattacttagctatttctagatttaaagtggcatctgtacaggtgttacagacaggaatctgttgcctccttaatgcaaggtagagttctaggacgtgggaacttaaagtaggcaagttttctcatgcagatttctttagtaatgtaataggctgaaattaacaaataaatagatgaaataataggttaataatgtaatttcaggtagtatcatgaagaaaaggaagcaacaataatgggataagaatgatgaaatatgggggaggggggctgtacatttaatggggtacttttggaaagtttcactgaggaaatgatgtttgagcataaatataaaatgatataaagcagccagccacaaggataggaaaagaacattccagacagaaggaagaacaagcatcaaagaacatgatacacttgagaaactaaaacaattcattaaaatgaaactaatagagtaaaaatcttaattcttttaggttaattaagcaatatgaaatttttattgtagaaaatttggaacatacagcaaaatataaaaataaacattttacataaactatttaaaaagttttcatatttgggtatatatctttcaagaatttttagatacatagaaaagggaaaagcataaaataccctactgtgtataatttttattctaccttttttcaaaacttaattgattaggaggacctaatctattcagtcattaaagtaattcatagacatagtttataggggctgcatgttattccctcacacaaaagcagtgtcttttatgtaatcaaccatccatgttggatctttaggttgtttttattttatttttctatttatttatttgctccataagaaattctgtaatcagtatttttatgaaaatatctttgtcacaattttatatagtttcttggaagttggaagtaagattcattttgatctttaacattaaaatactaaagagcctgtcttagtctcattagactcaatacacatttaatataaaacaaaatcttttaaagagactttttaaaacgtattattttggctatctggcatgtatatacatttgtatgcccactggtcttttaaagaattcatcaacacacaagaccattctaat

SEQ ID NO: 44810 - DNA, 1278 bp, Bovine  19866881030917
  misc_feature (1)..(1): n is a, c, g, or t
ntttctttccaattagaacctgtacaatagccagccttgtatatttagaattccccagtatgtctatgctttcccatctttacattgattgatgtttcttccttatcttcttccgtcctgattgtcccacccatccctacctttctccatctctcctcataatgaagattaaaaaaagcaaaagagttttgctctctgttgccaattctagtaaattgacagagtttggggagattaatgtataggcaaagattttcaagtcactttcagattcagaaaaaaaaaaaaatccacgattgattagtgaccaaggtgtgaccttgagagtagtggtccagatgctctttattttgcccacactgttgtttaaggtctagaaaaagtaaccatctgcattcttcttcttctgaacattttcttccttaaaatttctaccgcattttctatttattttattcacttaatctcccatttgatacgcttgcagttggctcatcactgactaaatagactcatactccttcaaaagactatctcactcaatatctcttttttatctcccccaaatgctagcacagtaagtatagtaagtatatgcttaacaaatatttcatgaactaaatataatataggcaagaaggaggatctaaggctgaaaaagcaaatgacagatggattatacttatagaagcataaacaaaatagttcagctggtaattgttctaaaatggtttcatgtacattggtctgttcacataataatcagatgctggagggcagaagtccttaaacacaacctcattcacagattccagtgatagtcggtagatgacccaccctctgggggatgagtccttctattggaaagagtcaaaagcaacaaaatttgttaagtgaatcacacctccaagaggctttcagggaaatttgcatttggggagtgaaaaggaattgagcaaagaaagaaagatagacctaggatgaaaactcctcaaggaggagagaaagggcatagatttgagggacgaaggcttgaaatccaatatcagatcttagccctattactgagctctgccattcaatcattgtgtccttgggcgaactaggtaacttctctgaacttcagtctcaaccactgtaaaagaaacatggttatactagagccaaaaagctcaaaaataatcagtccaatgttagtaacttatttactaacattagactgcaaagataatattagattgcaaatataactgtaaagtttgcctgtgtatatatgat

SEQ ID NO: 44811 - DNA, 1004 bp, Bovine  19866881089249
  misc_feature (1)..(1): n is a, c, g, or t
ntaataagtaattctaggagagactcctttagaagtaaattctaacaggtagaacctgtttgtctatttttagccacatgctccatgtcgctccagagtatctgttgcattgaactgcagttcagctcaagactgctcatttagaggctcgagaagcctggaaagattttagaattcaggttggaatcaatgtcaaagctgaatctggagatgaggtgttcttacatgccatcccagaagcaaagggtacagagacaaaagagtgtagccaggtgggagaagctctttgatgagatgtcctttctgtagacactctccaggaagagagagctaaagaacagtcaagtacgcacttgacgcccactggggcttgtttgcagagcctgaatctggggcaaacagcttgccgcatctcttaatgcctagcctcagcacttatttaatttgagatgcatttatttcctgttaaaaactgttgcagtcactctttggcatcaactgtttgctggaaagcaaggtgagactgtcagatggttgtattggctggtgacatattcaggctctcatgtgatagggcagccgttcagataatcattttaaatatttcactaacacagtagtaaattttttaaaagtatacagtgatagtgcttctgttcgtcatattcacactgcctttttatttctaataaactttgtcttctgaggatatgttgttgagagctctccctagaatattatcatttgtaatagatgctcccgaatagtttatttttatttatactaatagccagggagtcatggtaacacctgggaaagtgcaaaagcaaaacggaattttctttggaggagataagaggaagccgcagagaaaaaactgttgggcgcccttagagtccttatctcctgaagtaatgaattagtcatccagaggggcaggaatattcccagaaggaagcttccctggttgtctgggaggtttaattctcactaaccattaggag

SEQ ID NO: 44812 - DNA, 727 bp, Bovine  19866881110258
  misc_feature (1)..(1): n is a, c, g, or t
naactgaactgaaccttgattccagcttgtgcttcataaagcccagcatttctcatgatatgctctgcatagaagttaaatcagcagggtgacaatacacagcattgttgtactcctttcccaattttgaaccagtcccttgttccgtgtccagttctaagtgttgcttcttgacccacatacagtttctcaggatacaggtaagatggtctggtatgatcatctctttaagactataaaaagtataaacacaaaattcataagaaaagccacgtatctaggctatgtttcatgatagctttttgaagcatgttaaacttatttgccaaaacagaaccataatataatcttgagaaaggtctatgtgacaggtttcctgtaggaaaattttaatttaaggaatatgttttcacattgcctccaacaagaaaaataaatatattgacaatttgacagtgataatatgaaattttacttggtactatttttcctattatgagaccttaaaaaaagaaactctaaaataaggaataaggcaagcctatttatcattttgaaatataaaggagtataacctgagccccaagttaaacatccattctttatgtaggctgaagaaagaggaagtgtgaggaaaacagctagtggttctgagtattaagcttcttgaaggcacagattatttattttctacttcccttctatatgcccagggcctacgaaggta

SEQ ID NO: 44813 - DNA, 1834 bp, Bovine  19866881110504
  misc_feature (1)..(1): n is a, c, g, or t
ncattacattgagtagagttccatgtgctatacaacaagtccttgttggttttacattttgaagatagcagtgtgtacatggattgtcacataattataatgcccattggtgggcattataaaggagaaattatgtgtattctcaatggcagagtctattaaatatcagaatcctggtaccaagactagggggaccaggaaacaacactcacaggctagtacttggacaaagctttttctcaccaggacatgctgtgctttgcacatgtgtacagacaaattctaaaaaagcacaagcattttaaataataaaatgaaaacaaaacccattcatatatacccaaaagacaaataaaggtgatccgggaccaatcctcctgcgattttctttaaatttcttatcttatgaaatattcactgccttgtttgaaaagttaaagccatgcatgcctaaacttccaggcttcagaagaaaaaagtaattcctcttggatatgacttctacacatggtaaaagctttggtatggttggcaagtcagtgaacatacagatgagaggaggaaaaataaataccccaatggctgtgaaagatgttctgtggtatagttcacagcttccatcgtgctatggaattcagatttatttctaaacctctctgggagagttctctggtgggatagttgttagtctcaaaagactgggaagaaattcctagaagatatttttaatgaagcatgcataagaagcccaagttgaacagaatattaaaaaaaaaaaagagtcttggggtgtgtgtgtgtttgttttcaatgatttttaggtcgacacagttttctgtaatggtcttttaatatgtttatatgaaaataagttgtctaatttgtcttcagatgtatttatcctagtacctgtacatgtcttgctcagttctcacccttggcaaaaaacaagggcagagtgacagaggtagttctctctaaggatggaagtgagatatttttctcttacaacccttagttagaaatatatttttcaggaacatttttattccagtcagcatagcagccttactcagtatttttatagcctttgtatttgtgaagtgctttaaaatgagcttgattagacacatacttcatcatctaaggaaaaaatcaatacaaggcatcattcccacttgacagagaacatagatgcatcaccataagagtatatttcttaggaaggaggttaagttgcctattcaagttggtcttccaaatcaatggaagacaagtggatcaaatctggtgttctttaacttctagagtactgccttggttgcttagctatgtgtctgtttccatgcattaatcaataacaccataattatcaggaatgacaattgcacatcaatgattcatcctccactgtaagtacaaaaaaggattaatattacattggctctagaatatagagaaggaaaggtcactaaatgacgtattagaaccaccatgatagcagaccaacaaattaaacccaacaggaaaaatcaacatttgttggctaaacctaataaaatcttgcagtttattgatgttgttcctccagtgggcagaaatagctctaggataagttagaaagacaataaataagcatgtggatcagaaagagtcggtgaaacacatgtggagatcaaggtagctcaaaataaagctgtaagtacaaatttcaatagatccatcattgctaaaatgttatcttacctttagaattattttctgttactgaactgtaaagaaactaagatttttttctaaatccgagtcaaagacttctggtagccataatttt

SEQ ID NO: 44814 - DNA, 1236 bp, Bovine  19866881251998
  misc_feature (1)..(1): n is a, c, g, or t
nttttttatattctgctatggtttacctttgatggctatagccatttctttttcgcccaagatgtaaacatgactactctttgaaaggaataatttaaaaaaaagataagccacagactggataatttttgcaactatatatctgacaaaaggctttaatccaattttaatgaactgtaagtgattaatttttgagttttcccagagtgttttctgggctaaccactcgaggtgcctggtaaggtctacattagggccgacccttctgttcccctgaaagatgtagtcttggacagttcttgggctgtacaatggaggaaagagaaaagcaggcaggaaagaggagaatgaggggaagaaaaaacatgaactttaagttctcactggtttgagaagcacagtggattgggaagaacctaaaaagggattttaaaatttattgctagggggatttcctgtccccttcataatattgagtaatgctagtttgagttgttttaaaatttttcttggttgtggggactgtgttcatttaagcacaatattgctctgaaattgatttatgaaggtcacaggtttatgagccttgaacagctattgccttcatcttattagcagtggaaggctgcgtgtggaccttcccagcgcatctcgaatgtgagagccaaccaggctttaataggtgagcaatgagctgcaacacatctgctgaaatctaccaggggaaatggtgtcaggaaatggaatcgagtctttggaacaattgtcttgttaagtacaaatgttcctacttcaaaacttccttcaaagctctaagtacaaggaaaacacacaatttcactttcatgccacctggtggtagaaactaacagttcataggcctgcacttgggctctggcttaaggtctgggaggagtatataaagagcattgcttatttcatatgtagaaatttttctctctcaatccccctacctgtattaggtccccctctgctttccccaccaatgggctgttctctacgtaagctacaaggatatatgtacaatgtggggagtatagctgatcgtttataataacgatcaatgggatataatctttaaaaatggtgaatcactggggttgtacacctgaaacataacacattgcacatcagttatgcctcagtttaaaaaaagaaagagcattggtctcttctgggctaaggagacagaaatccactacagggcactgacaa

SEQ ID NO: 44815 - DNA, 1738 bp, Bovine  19866881270886
  misc_feature (1)..(1): n is a, c, g, or t
nggagccctagtatctgcagcttgatttcccccatggtttaataccctgaagtgtcaggctgatagccaatgctgtgccaatcagtttccacccagtaaagctcagagagtaaggcagagataaagtgatggaaggctgatagttgatgatgatttacaagtgggcttcatagctcttaggacttcagggtccctccagagggcattaaaaggaaaaaaacatctccatttgcatagttttttgcatgacttcaaaataacaggtggagagtgggaagtctaaaacagatgccccgtgtaaagaagactaaaaaggcaaagagtaagcagttgactgtacaatagtgaattactggcagtgtcacctatgagagataatagtgcctgagtaagactccaaattggggcttcccagttggctcagtggtaaagaacccacctgccaatgcaggagatgcaggagatgtggattcaatccctgggaaggaatccctggaaatggcaactcactccagtattcttgcctgggaaacccccataaacagagaagtctgcagatataatccatagggtcacaaagagtcagacataacttagagactaaacgataggaaagacctccaaatcacccactgtttagactggagtttccttgtctataaagtggagatgctatagaaactgacttcagagtttttgtaaaaaagaaatgatatgtcaagcagggtgcctggttccttggcattatgaacccattccctttatgctgctctctttatgttattttattcccactatagggtatcataacagtattaattggacattgaatatgtttcaggcactgtgctaagctttaccttctccatcatatggcattcatgaaagaaccctaggagaagagtacttcttttatttccgctttatggaggaagatgccagtgctcagagaggtgcataaagatcaatactggactggagatttgaacatgtgtccattaacctagaaggacttccttggtggcttagcagtaaagaatctgcctgcagtgcaggagtggcaggagacctggattcaattcctgggtcgggaagatttcccaggaagagggcatggcaatccactccagtattcttgcctggacaatcccatggacagagaagcctggtgagctacaatccataaggttgaaaagagttggacacaactgaagtgcattaacatacagagcacatgccattgatcaagaagttcctgacgcaactgacttgggaaactagaaggcataaatactaattcctctaggaatattcaacgtgtctgggctgcagagtgacagtcttttagaactcaggccagtttttattcacaacctttttgtatgccacatttcagcaaaatagtcatactcaaggttttctggcctgtctctattcatatgtatactcaaatattccatcctttaccaaaattataggcaaccaaagttgcctataattttatctaaataaacagcaaagtaggaaaatcttatcagatgacaacagagggaatctttcatgttgaaataagaaacacattctgtagctgcatccccatctttttacaatggcatttgcatttatacagcccctaaattttaagggatgcctaaaacttggtaaatgctatttcaatcttatcaggattcaggagacttgacaagtgcatcagtgttatgatactaactttacaggg

SEQ ID NO: 44816 - DNA, 934 bp, Bovine  19866881338350
  misc_feature (1)..(1): n is a, c, g, or t
natctactaattaaaaacaaataaattgtttaaaaatataaccaaaaaatggactatgatttggaaacaggtattcaatttttaataacttaaaatctagaattcttcacaacacattttggggaaaaaaaatctatgcagtaggttaaatgatcttttttcaaaacggatcttattgtgtgaagtaaaatcccattttcaaaagttgtactcagtgccctgattgtgaaaaatacctaacctattccaagaagacagactgaccagaaatgctagggtactatgacaagtgagtatagagaaggcaggtctaaatagaacaccaggaagaagaagaaataagggcagaactgggcatcattatcttatctcagtgtctctggttttaaattgaatttccactctacttgccttataagttcacatggagttctaatcagtccaggaataaaaagtgacttgaatagacagaaataaaatacatatatacatatatttataaaattttgaaagactatgacaccctacttctgaatcccagaagatgaagtttggaaattatgtgaatcattttttatatttccttgagaataaagccgaaataatagtaataaactcagggatgctgcagctgagagtaatagaagtaaactcaccatgacaagggatacattttagatcatgacacttttataatgcaaagtttatattgtttctgacaggaggaaatccaacctctttagctcatctcagtttcttttcaagctagacatttaattaattaaatggtttttggtttagcattaatgatgtctagcttcctgctacctatctagcatatttgaattccacttgcatgtaaaaatcattccctagtctgaatttccagtaatacctcatctctgcccataaatgaactcttaactcctcctat

SEQ ID NO: 44817 - DNA, 1588 bp, Bovine  19866881380900
  misc_feature (1)..(1): n is a, c, g, or t
naagttatgaaaacaaagctgcacaagtttggcatacactagtttgcttgggcacaaactgaataatgtgcctgtgtttttttgttttttttttcccagtgcctaaacataatctattcgcctcaggcttttctagacctaaaatctcctgctgtcaacattatctgtaaccacactgctttaaatggagacgcgtcactgcttccgggtgacatggtttcactcagggaaattgcccgaggaaggatgcaggtgtatttgctattcaaaagcccaaaaggtatgttcctcatttaaaaataaactcatttaaacaatgagaactaattaccacattaatttattgtcaacacagctaagtacaggcaggcatatataataacgtgtaaactaccaagtgagcagaataaaagggaaatgtagtggggttcacctccatgatactgttcatgtaactcactaaagctgtatttgaggttctgttttgtagtttaattaatatcattatgcaaaaatcggcgcccatacatttcccataatactttatctgcatctctttatcctattagttgatgttgatttctccgtgtgtataagggaccaactccagggtgcccacccttgatcctcatcagctagtgtttatgtccttgcaaactccccttctgttgactgtgaataagacttatgatttgagtcaaattgacaggatatgtcatgtctcttccacaattatataagcctggatcttgtagcggattgcctctaatctgcagtagtccttgctgcttgacaagtatgcagttctattagggaagcccacatggtaagaaactgtggacagtgtttaggaaataagaaacagacttcaggagccgaaggcagttgacagaggcttaggatggtctccagttacagccagcaaaaagccagggccctcagtccaacaactacaagaaaatgactctgtcagccaactgagtgagcatagatgtagatctaccccaactgagcctccagattaagagctcaggccagccaacacttttgctgcagtctttggggcttcccaggtggcacagtggtgaaaatattctcctgccaatgcagaagatgcaggggacaagggtttgatctctgggtcaggaagatcccctggaggaggaaatggcaacccactccagtattcttgcctggaaaatctcatggacagaagagcctggtggcctaccgtcaatgggatcacaaagagctggacatgactgagcgcacacacatacacaggtgaccctgagaagacccacctagactgagctgagactcctgactcacagaaactgtgagattaaaaatgtgctgtattgcttaaaactgttaaatttactttcctgtgtagcaacagaaaactaatacaacatatatcaagataagataggatcattcatggccagtgccatccactcactgttcaagatggactttctttccagccctcctccttcagtcaattagtcatcaaacccaattctctgacttgtcatttgtttatttttatccttccatctctacctactgccattgtctttgc

SEQ ID NO: 44818 - DNA, 1128 bp, Bovine  19866881405834
  misc_feature (1)..(1): n is a, c, g, or t
ncctttgagagatgaaaatggtttttgtgtagctttgagatgtatctctttgaaattgatattattaaatgtagggtagttggctcaagatgcctgatggtctcagaaatatattatgaagtgcttcaaatctatacggcagtataagttaatggctaagaacctaggaatgcaataataaaaatgtgtttataccttagccctttcttagtctcagttttcttacctctaaaatgggaataattgtaactaaacttgggcttccctggtaacctagtaggttatcataacagtaaaatgtgagactgtatacgaagtcggcactccatacacgttaactaatattattgttattattcagagaaagagaaacattattaagtgatatctcctagacatgtaaactctcacctgaagagagtacttacaaacatttccccagtaaagagttgccttcagggacatgcaatctgaaagcactggattagtttattaaggtagacattcatgtctgttaagtatctcatattacaaatgagcaaactgagggtgaccacaatcttgggcaaaaattcctattaataaattacttcaacccctctgacaatagagttaggaagagctataaaataaatgcctccctatggaatgaaaaaacggttggctgcctttctgtggtaattatccctcaggatccacctaggccaatccctatgaaatatgtgaccacaggggcccatttcttattattaagaaattttacttgggaaaataacacaattcttctctatttgatcttaagatttaaggatctgaaggggaaactacttatctattgttccatgaaaaactggactctttgaagtgtgggtattcctggatgaagggactccctctggagattacctggttttaattagttggtgctgcagtcaccaagacctttttgaaagctcctcagacaagatagctgtctcaaatcccatatggaacactctggaaatgaacaaatataaatttcttctagctgttctaacacagtagtttaaaccagtagtttattagttctggttcaagaaaacactaagggacttgtaccgtttaagtccttgccatgctccattttca

SEQ ID NO: 44819 - DNA, 3960 bp, Bovine  19866881407125
  misc_feature (1)..(1): n is a, c, g, or t
ntgaactctctatttccctcagtcttgtgggattccccaaattaagtaccactggccttccaagccaaatgctctgagggctcatcttcccagtgcaggactcctaggcaggggaacctgatgtgaggttcagaactctcacccctttgggagaaccactgtagcataattattctccagtttgtggttcatctagccattgccatggggcttgactatatggcaagttcacctctcctattatctcattgtagttccatgtttttagttttagaagattttttctggtagattctggcttccctggtggctcagacagtaaagaatctgcttgcaatgcaggagacctgggtttgatccctgagtcaggaagatcccctagagaagggaatggctatccactccagtattctcacccagagaatcccatggacagaggagcctggaaggctacaggcagtagggtctcaaagaattggacaacactgagtgactaacactttcacttttttttctggcctttttaactgaaggttgttctgcaaatagttgttttttggtgtgctctggagaggtgagcttagagtgttgctactctgccatcttggtcaatctctcaataagctgaattttaacactggatgatattgtcagggatgcatgcatttaaagacatgtttttatacagtttttcattctctaaagaggaattttagatccctttagactgaatgttcattcagtgaaggttaataaagttaccacctttctttatacttcctctaaatttccacttgccttttaattttggggtatctagggggattgttcatctgaggtagcaaagacactcttctcagtcaccatggaaatgctaattaaaactataattagatagcacaacacattcactagagtgctaaaataaaaatttcttgtaatttcaagtgttggtaaagaggtgaagcaagtaggactcttatacgctgtcggtgggaaagcaaattagcacaaccaagtttgggaaagttgcagtatctactaaaaatgaacatatatgcaacgtataattaataacatatccaagagaaatgtgcatatccatgttcccaaagacaagaatgtaagagcccaaagtggccatgataaaatagtatatagcattgaaaggtaaattattactgctacacatagaagtctcacataagtaatattgagaacaggccacacaaaaaaacatgtacaaattctatcattctgtttatgtaaaactcaaagaaaggtgaaataactaatggcatttgaatttaggaaaactgctatcttattgaggattgggatttataattttggaagaaaaagagcaccttcaactacactgatttagtactatttcttaatttgagtggttaacacacatgtctgttggttttgtgataatttattgagctgttcacctataatttgtgcactaagcatatttaacaaaaatctttaattaatcaattatatatgattataccatatgccagataacatatatgatattaaaatagaaaaataaaaagcacttcattattccactgatgcatagacttcaagtcttttttttctatatgaatattcatacattggcacttacttagcatttatagtttttctaacagaaattatcaaaattgtttaacaaaaataagaaaatctgagtagaccaagcttctatagtcctggaggcattaaacattaaaaaataatctaccagttccaataacctttcacattaatttaccactaaattttcctaacttttaaaaaatatggaatttccacacaatattaaaaatatctatcttagcaagtaaatttgagagggataagacatgcttttcattttttttttccttgagcaacacttctttcccttgtgatttgttgattaggacttcttttttatttatttgtttcctctcttttcatgaataattaccatgttttatttgtttgccatattggtcattatttttttcctcataattttcatcattgtccttatcttctgcattctaaaagtgcttcttcagtctgctttccataaatctaattatgttagttgttgcctacaaaagtgagtgaaagttgctcagtcatgtctgtttctttgcgaccccatggaattctccaggccagaagactggagtgggtagctgttcccttctccaagggattttcccaacccaggaatcaaacccagatctcccacattgcaggtggattctttaccaactgagccaccagggaagcccaagaatattggagtgggtagcttgttccttctccagagcagatctttctgacccaggaattgaactggggtctctggcattgcagtcagattctttaccagctgagctaccagggaagtcccttgcctatgaaggccaatttaattcttctattatattttctgtttcctttcaatcctttgcatttcaactttctcaatgttaatggcttgtatttctaagttaatcaatgcatatgttaaaaggataaaatataattttctaagatatcattctggttttcatattaactcattgatccacatatgctttacctcaggttttcattccccacattaaagtaatcattatcaagatcatggttgactttgattgtgttgttgctattgcttctgtatttgagaatgtgagaaaaatccattgaagggtagtatttctcaacagacaaggcgtaagactgaccattagcccttggtcctactgacaacttgatttttctgtataaagcctctaagcttcacagttgagtagactgtgaagaacctcaggcttaaattccaatgagtatcagacattcaaagcctctgttagaatgctagtgtaccatcctctctccacactctgtcgttctctgatcacacacatacacagtactattactgtcgtcactaatcccattatcaccacatctgcaaaacctatctttctctttggttacaatgtatttccataagtcattccttcctttctacccttttcagagggatcaggaaagataatcctaaaatggatacagatatgaaggcactgattgagggaggtgccaagatacggcagcttaactctttaagtcataccaatcatggatttctgagttagcaggcagaaagtaagtgaggaacacagagtctcgctctctattacttaaggccatgggcttcctctacttcagattgcaaattttttttttttaattaattttattttatttttaaactttacataattgtattagttttgccaaatggagtcttcccagaagctaaaaatagattggttgaaagtctcagttttgaattttgtcatgaatttttcatctttatctgtgcccttatagccagtttaagttgcattaaagactattaatctggtagaacttccaaccaacaactgacatcttaaactgtgattaaaaaaccaacccctcagcatcatttggagaaaaattcaatcttcctctaatatttactcacaaccaaaagttattcctgaacatctgtgcaatattactttgacacagatggcaaaatagttattaataacatagcacatgtaaatatttggatccatttcagtagaactgagaaagccacaaaactgtcttatgaagtaaattttcattgctgactcagtgttcattttactttgcccccaaagtgttgtaatcttctttggtactttttgaaataaacaagtaacatttattttcagacttttgtagtgtagtggggagaagaattcatttacatttcatagctggcccagatcgactttatttcttagaattatacaaggtctatacactgttcaggaagtgacaaggcccagccttctaaatacaacttaacttcacttttcaaagaataaataaaatgaa

SEQ ID NO: 44820 - DNA, 870 bp, Bovine  19866881502863
  misc_feature (1)..(1): n is a, c, g, or t
ngaccctgacaggctacagtcccataaggttgtaaagagtcagacatgattgaagcgacttagcacacactcacatattgtttaagagcaacagatttaagatattaatggtcacagggtctgctcagctagttacggcacctgtgaaatttggcaaattggtttgacccttccgagccccagactccctagatgaaagtctagattatcatagtactttctctttgtgtcattaaataggcatgcatgtaaattgtaagcctagtgtctggtacgcagtaagttttcaatagacattaggcatcaatattagtaatatgatcactaattattatcttccccaccagaacaaacccaattcaggaaggaacggttggcagagccttcaaaacatgttcgtgatctgacgctcacgtaccagcctctaatttgcttgtttatttcacttggttttcctgagctgcacagaagggaggtgggtggcagaagcttaatttatttgttccttttttttttttctgaaaatgtgggttttggctctcacgctattttgaggcatggccttcccatggcattgtggagaggcacgcttgagagaggtaggaggattctgtagctcttctggtggtgatagcatctttctttccccaagtgatcagcataggtgctagattgccagtgctgccagccaaaggcctctcctcccacagacctggaagcacatgaaaagagccatgactcacgggctacaactttttcagctgcttgataagagcactcataggctcagctcccatgttgccatcaccctgcaggctggctgaaggggaaaggcctctcaggttttcaaataaagtgctccccagcgat

SEQ ID NO: 44821 - DNA, 637 bp, Bovine  19866881517995
  misc_feature (1)..(1): n is a, c, g, or t
ngcatgaataaatatgtttattttctatgatgaatttattttatgcattcatcctttagaaggacatccacaagcatcctaaaaagagaaaagctataatgtttaaattatgtttttcctctgacagttcctataacttgattgctgtcatactttctcttatcatttatatgttgttactaatatttagatcattcattttgaaacagattgagtaaaaatactcagtttgatgtgaaagttgttttatatccctatttttattttctaatatctacttaagaatatctgttggcttacagaaacaaacagaatgaatttcattatccaaaaatgcaagcaatattgtcatatgggatagatacgtcagatgagattgtgaatctgcagtctagaaatatatatgtgatctttttcagaattggagcaaaagcagccagatggaaaatgacatgagaaatttgagatgaacactattggaaggagctaagttttatttttccatattcccaagtgtttttgtttcatttcatttagagaattcattggagaatgtttcaagatgtagagcccttgaatgtaagtatcccaaatgaagttggagcattcgtgctgaaattgtttcctgttgtggtaa

SEQ ID NO: 44822 - DNA, 1193 bp, Bovine  19866881693595
  misc_feature (1)..(1): n is a, c, g, or t
natgttatataacacaggggatatagtcaatacttcataataattataaatttaaaaattgtggatcacttctattgtatccctgtaacttgggcttccccagtggctcagtggtaaagaatctgcctgcaatgagaagctgtaggagacaagttcgatccctgggttgggaagatctcctggaggagggcatggaaacccactccactgttcttgcctggagaatcctgtggacagaggagcctggcaggcaacagtccatggggtcacaaagagtcagacacaactgaagtgacaacacccatgcacacatacctataacttatcatatagcaactatgcttcaataaaaagggagagtttgtaccttttcttttcaacaagaaacagcattttttctagttgttgcaaaaaacgactccaggtgaatgaggcgttgtcgtttaatgggtttaggagttcattccaagataaaaagagttctgcagatacacggtggtgatggcttcacagcaatgcgaatgtagttaatgccactagtgacttaaaaatgaactgtagacccaaatggttaagatgatcatgtttatttcatgggtattttttccacaattaagaataatagttaaaaaaagaaacaagcataattttatattgcagtttttcattgctggatggtcctctttttcccacttctctacattcttcctcctcccttttttataaacctgttttaagataaaagattaaaattttgacctctaggatattatttctaataacaattatctgctgatgaaaattgaacctatcaattttgcccaacttttaatttcccattagccaattaaaggattaccatctatccattttgtctggtttcattgggtacaaagcaatcttatgactgtagaatcacagctaaatcgtgctgtttagaatttattgcagaggaatgattgcactgtccatttctcagttgggaaaactatctgtccagccatttgaaactggggatggcagtgggtagtaggcatgagagtgatccaggagggcagcaggatttggacaaagtgcctacggctctcacccacgcagcctgtgtgaagctccatcactccaccagccatttcctctggtgggctgtgtcatggttcctttgcttccactagtattagtttccaaactgtgtg

SEQ ID NO: 44823 - DNA, 714 bp, Bovine  19866882021677
  misc_feature (1)..(1): n is a, c, g, or t
naaaactgaagtactaaagtctgattaggtatgcacttataacgcagactgaatcttcctggaacccaatctgacaataggggccaatcagcttcccagctggaaaatctgctctcccaaggtcatcaaaaccaaggctgttctgaactgagttgcacgtacaccgccatgaagaacagagataaataagaatgtcctctagttttctactatcatttcataccctgatacctttggccacaactctaccttctccaggaccttgggtgaggactataagatcctgatagattaatgtcctctctttcccttttgcaggctgaagtctgccttgagcctccatcacttcacaggtagatcatttatcattacagatacaggatcaggtttctacttctgattgttacttatttcaaatatcctttgactacactttgcacattggcttggacaacctgaaacttttcttcactggtgaccatttaccagagttctaatcatttacctctctgaatgccattggagtcaagcaggcagacactcaggtctcctggtggcatctacaatggattggcttttgcagagttaagatgacctgacccaagggctactggcaagtcagtggccccatcttattaagtaccccaggacaattcttgaaattccactgaagtataaaagtaatattttggatgactttatatgcaccaggta

SEQ ID NO: 44824 - DNA, 1369 bp, Bovine  19866880130610
  misc_feature (1)..(1): n is a, c, g, or t
ntgtttctttcttatccatattttcccgtaaaatctattgttcttatcatcaactgcattttttcccttggcctattacactgttttcctcttatattgctgttcaaaacacagaagagaatcatatcctagaatctcctctgcttaggggtatttatcttttcttccttttttttttgggtgggggtgggggtcttgatgaaaatatggccactgcttataataagaatcagagttactctgcctttgatggttttttccaactgagcaccacattaaaatctataggacaataaacttacccaatcagatacagtccaagaaagaaaaacattcatattgctggggcctgggaaatgcagtatgtgatttgccatttcaatatgtcaatagggtgataatttgctttcaccagatttcttaggaggtgtgatatcttttatcttcagtggctgattcttcctggggttggggagatgtggggagagagatttttttttttttcctttagacaagcctcaaagaaaagtaaaagatgcatttctatactgctctctacaaatcaatgtaagaaggggtagacttacattttccatgataggaaatggcttttgaaatttaagattagatccatacaaacaaatggtccttgcaaactgtcagtcaaagtaaactcccccaaatatgattctgaagcagagggtgaggtgctaatggctgtcgattggaatatcggtttgacaaaacacacctagaaaagatattgacaagctcttcattgttctagcaggaaagagactcttgaaatcaaccccattgctcctctgcctgccttctgctgagaaaccaaggattgagcgaatttatcacccgggattgggggcaggaggagaaggggacaacagaggatgagatggctggatggcatcactgactcgatggacgtgagtctcagtgaactctgggagttggtgatggacagggaggcctggcgtgctgtgattcatggggtcgcaaagagtcggacacgactgagcgactgaactgaactgaagtgaaaaccgatgagtctgttggcttgatagaaaggtaatatcctgttcatggtgattaacagctcactacaatctatactgtcaccctgcttatttaacttatattcagagtacatcatgaaaaactctgggctggaagaaacacaagctggaatcaagattgctgggagaaatatcaataaccccagatatgcagatgacaccacccttatcacggaaagtgaagaggaactaaaaagcctcttgatgaaagtgaaagaggagaggggaaaagtggcttaaagctcaacattcagaaaactaagatcacggca

SEQ ID NO: 44825 - DNA, 4153 bp, Bovine  19866880373525
  misc_feature (1)..(1): n is a, c, g, or t
naaatctatctgctttctgcaatatttttctctctgtgtatctatctatcatccaacatttaatctgggtatctagcatctattaatcatgtctgccatccatccatctctgtgtctatctgcagtccattatcagccacaagttaatacagtgagtagtcctgtacttaagcctggaccatcttgttccaaggggaagggggtgggaacagtggtgatttcaggagggctctgtggtaagaacaaagatggataggaaagaaactgcagggttgatgaaaggggtgcctgggacctttctctcacagctgggctggcctgatggatggaggggagagaggcacaagagaggagagaaggagggagggaggcctcctaaacccgctaatccctcctcatcctaccttcctttgagtgtgtgttaagtcacttcagtcatgtctgactctttgcaaccctatggactgtagcccgccaggctcctcagtccatgggattctccaggcaagaatgctggagtgggtcgccatgctttcctaccaacccaggggatcttcccaacccaggggtcaaatctcttacatctcctgcattggcaggcgggttctttaccaccagtgccacctgggaaccttcccagattagaacaatgtcttttcaggataaccccatgagggatggcgggatgcccaggttcaggtcagggcagaggaagtgggtgctaccctcctccagcaccagcacacacagaaccctttattccaaagggctgacctcctgcaggcaggctgagagcagagatggggagccagaggagagatgagcaggagcagtctgaagaagacccatcccagcccttcccaaccctgagtttgtgctggtatcacctgcatagcttttgaaaaacaccataacaaaaatatggatgcatggaccaatttctgtctcaggggctgactgggaacatctgtgttttgaaaccccccaggtaaattttatagcagccagggctgagaactagcatcttgcaagatccaagactcctgctgttacccttggaaggctgtgctttaagcggttcttcaggggcaggacttgggctctgtctgggcagggactccagggagcaaaagagggaattttcttccaagctgcctcctgagcctgacatggggaggggtcagaggctggggtcttctgccagggtattcaagcagtgtcatccccacccagggtcaccagaagtccttgtcatagcacccaggagtgggggctgggtttgggggctgcagcctctgggttcagctgtgaccctgctgtactagactagcgaggttgaccctcaggtgagtgcacctgccggagaggacaggcagctcttcccacatcccaagagaagttaagccccaccctcagtgttgaaaaagtgccatgagtcagagagcgggaggtttgctgggcactgcacactgcattctgtctctggcagtggcaggggtaggggatgggggtggacccatgagcaccactctctccatgaggctgtgggaagatctgtgggcaatgggaggggcagcccgcagccaggcttagaggctgtggcctgctggtctgcaggcactggaccacggcacagttctcccactcagcagacacgagccccctccacagttaacagagtgagcgctccaagtgcacactgttacttcttccccaccatctgcagctgcgtctgattctctgccccgcaacaagatgttccttggtctctcctcctcttgtccctgctcccctgtggaccacccggcccctgcccaccccctgcagaagcctcccccctttgctggaataaagcccggctttgtctgtctccttgagagctgaggacaaactggccgtaatttatgctcccgcatgatataaaggaaaaaaggcgccattatgctataaattatcctgtgatgggtgaaatgctggagagcgcgccagacgccagcggaaaccccaccagacaacaggattcggctgcagaagtccccacagaacgcggggccgtctgtcgtgcgccgcgcctgggaaggataaggtagcagatcaaatgtataatcagctacctggagagctggccacgctgccgcccccatgaaaggtgacttctactcagcaccaccccgggccccaggctcctgctgggagggcctggcgcagactcacaagatacgggggtcaagggcggaggcccagagaaggaggcagcgagggatgtgggtatggcctccagaccttccacccatccccttgcagagggcaaaagaagagggtgcaggggccatttgtgccccctgggatggtgacggcccccacattccacagttctgcctcctcagatgtactgcaagcacacaagggcacagagccatccctctgtcccaggcagccaccagggcccagagggatgtggactgcaggccgaggggatcttgtcagcaggtctgattctctatgtgatgagggaagaggaccttgaggcctagatcctgggcagaggaaggcctgaggactcatcaggacagagctgacttcttttgtcacccaggagacttccagagggccctattctaggcggaggagtgagggaagccggggaggggctgtgagttgtgtctaagggtctctgggcagttgggactcaccagagcctgctccatctgagctgagcagcggcctctgagggccccaccccaccccacttcgggctccgatcagaagccctgatccacatagatcaatgggcttattaggcctttgcccattatctgggcagacccagaggtgtggagagtaaagagagacagagatctccaggtagcacttcctggtcttctaccaagaaggagggtgacctgagagcttggctcctttcagaccatctgggtcctggcttcccccagtgactggctgtgtgttcttgggaaagatatttaactttcctgagcctcagtttcttcatctgcacagtggaaataataaaacattcattatacctgcaaagggcttatttccgtgctggaggtacagtaaatgggcttcccaggcagcgctagtggtaaagaacctgcctaatgcaagagacctaacagacgtgggtttgatccctgggtcaggaagagcccctggagaagagaatggctacccagtccagtattcgtgcctggataatccccacggacagaggggcctggcgggctacagtccctggggtcacagagtcggacacaactgaagtgactgagcaaacacgcgcagtaaatacttgataaatgagaaccattctgttagtactgtggctcgtataaccatctcctggagtgagtcagagttgtggcctcccccggacaggggcactgaggagccccgagaggggggtggcagaggctctggtagagggagttggggccactggctcttgtcatgaagacacttgggtgaccattgaggtgggtggccctcagtgtccagcaggaccacagaagaacccctggtgctacaacttaggagctaggctgagccaagggaggacgtggtgggcagtgaggatggacacgggtgaggaggagcctgcgtgcagagtctgagtcccaggctaggcttcctgcggtcagtggtcagggtccaggctgaggtctcgggggaagtgttgagaatgcggtgggcgaggaaaaggaaggagggaggggatgtgtgtgtcgccccggctcttcagcctgtgcctgtcacactgcctgcctctgcacatgccttttccatgctgcaagccctgcgtgtgaatcctccagtgcccggctcaagccttgtaaaccccttcccactgccatgcccgcagagctcctcacgacaggctgtgtgcctgcaccatggctgctgcccactcatccccgcttttggaggattcctggagttcagtgtcctgcagatgccgagcgcacgatcttggggacaagaggaggacgggcagtgtcagtgtcctggggcagggcgtgcaaggagcatccctgagacttcacgagacctgtgtgtgtctgagcagagggatggagggattaggggagctggagtgcggggtgtccctaaacccctcacaagcttgttctcg

SEQ ID NO: 44826 - DNA, 1116 bp, Bovine  19866880468953
  misc_feature (1)..(1): n is a, c, g, or t
ncctgggggtggagaacaagatgggcttctgcagggtttgggggtcagggaggctttgacatcagggccacctcactgccatgcttaccattcacttggtcatttttcaatatctgtgttttcacacctagaaaacagatcagctctgtgccagacagtgggcaaggggctggagagctgaaccaagcaagtcgatctggccctaggccccagggtgccatcctttaactccctgtttccctgacattaagtcccagtgaaccagcttatacattttcctggctggactggcctaatcttaaagcagaagtacccctcctcccagttcagggcttttcttctttactgattgagttgaataatttgattaataaatcaggagaatttgcagtgggttttgcactttcattagggaagatgtatgtggtgtggctgctgtttggccgtgtgtttaattaaattaatgaattaacatctttggtgctgtggactccaggtgcacagacccccctgttctttagtccccaggctttattcagtaagattcctaaatttaccataaatagatttagaggaaagagttggaacttacttgttcttacactaaaagaatggaacctagtgatcccaaagtgaagagttttcaccagtttgtgcatttgaggttaatcctacctagcccacccattcccaacctgtacctgatcctgaatcactcccccttcagagcccttactcactcctcctattcacagggggacactcagtcccacacactcattccccttgaggagaccctgcatgatcatagcttgaccatggagttcttctagtgagagggacacttcaatggggactaaagggatcccttaccagctattgttgctgttgttagctgctcagtcatgtctagctctttgagaccccatggacccagcacgccaggcttccctgtccttcaccatctcccagagcttggagatggacatcaacctcatgtccatcgagtgggtgatgccatccaagcatctaatacactgtcttccccttctcctcctgccctcaatctttcccaacatcagagtcttttataatgatttggctcttcacatcagg

SEQ ID NO: 44827 - DNA, 776 bp, Bovine  19866880480509
  misc_feature (1)..(1): n is a, c, g, or t
nacttaccctccagggtgccctagcctctcccatgaccctttcctgggtcagagctttgaagcctcccaaaggcttcacgtgccaggaccccacctcactttgggcccccttgggagcaaagcagagtgagtaaggcagccgtgaaacacgaaatcagctgtgccagggcgtgtttgtagaattccgagaacactgccgtgatggactctaaatctcacaactgagagtgctcgttttctgaaggttctgaggaccgagggccgaggccgggcggcagggggcaggcccgcggcctccctcagcctctcggcgctcttagcggggaagcccttccctggggacggtggccactgcgggcccaggacagggtgggaggccgggttgtcgtgagtgtggaccgtcccgggcagctgagtgttttccagacggacccccagacacagcagtcaccttaggcagcctctgacccaccaggcaaatgggagccagccggtcaggctccccttgctgaccacaggctgcagccaggaaggctggggaggtgaggcacgctcagcccctgggggagaaagaaccaaggagggggtcaaagcagagagccctgttcccctgacctgctcgccggccagggtggtttgaggggctgttttctttttttctggccccctcgccaaactgcctgcgccctccctcctgttacccggagcgtgacggatgcccgtagtggccctgtgtgaggttctgctgttgttcacagtgtatcacctgtctgcat

SEQ ID NO: 44828 - DNA, 1771 bp, Bovine  19866880488392
  misc_feature (1)..(1): n is a, c, g, or t
ntgcaggaagcctgggtctgcaagagacgggagaagggagaaagcccttaatgggatggggtcctccaggaaggaggctgggccagggagaagtttggggggcagagagaagcaagtggccagggaggagaaagacttgttgcatcagaaagtggtgaaaagcagaaaaaataaaaagactaaggggagccacaggggaggcgagaggagcgtgatctaaaccacaaatccgcctcctcccggctccggcaggcttcaccatactgtaagacccactgccgaacagcaagcctgctcgatgacaaagagagataattggttctcatgcagatttaagcccaaagttatcaaataataatggcacgcagaaagagacacaggcaaatgggcctggagtgcccgcttcttccaggggaagagatttgttcaaagtatctaaattatgctcctgcaatggaacagggaaatggcgcattttttttttttttttaagatttttctggtactgcttggatacatttttaaaagttcttttataattagggccgtaatttatataatttattttaaaaatatccttttcttaatttccacccggtccagttaaagttgaactgaaaagcccagagtaaataatttttttaataaaaccgtttaaaggagccccaacctgaagcgaaatagatatgtggattttcagaggagaaaggaaaaaaaatcacatattgaaaaaataaatttcctaacccattttacactccagattttattaccaccggaaggtttttaaaattctaattccctttgctttccttaagctgtttattcaccacagggcctcctggggcctgggcctggggcccagtgggtcaatgtcagatgagtggccaacacagtttcactaccccattcctcctacgatttgactgttgatgcatcagctttgctcttcaggtgaactctgagctccctgaggtcaataccatgcccaaggacaaatctccctctccctctctgtagcatctagcacagggctatgcatacagtaggtgctcaataaatgcttgtcactgatgtgccacgtgtagagaagctaggatcatgtgaacacaggcatggtggtggcaatgagcaggtatgactcaggagccaaatttcacagaataacctagtagatcaaataggagagagaagtttggtcctggttaagagtctgggtgagtgaatgtaagaacagagaaaatcagacacattgagtaagaacggtcatcacctagctcaatggttctgggagcctttttttggagggaggctgaaaatgtaggaatcccacaccacgacccgaccgtggacacatgtttgctgaacagccacgtgactgcagagaagcccatgaggacaaggctcggccccactcccagcctgctcccaccctgtctgggggtctccccacctcccagatgacggacaggccctgagtgagaaagcccggcaggcagaaggggaggatgggccgttagagttgactcagccagagaagacttcctggaggccagaagaccagagcttacctttggaagatgaagggatccacatggggggccaggcagggaggcctttggtccctctcagtccccattggaccacacgcagcctgtccactggttgggggatggcgaggaagatggacgttcccacctctccggtctggggaaggcacttttttcacttttgcttgggtccctgtgccagtgagctgtaccaatcccag

SEQ ID NO: 44829 - DNA, 1755 bp, Bovine  19866880489881
  misc_feature (1)..(1): n is a, c, g, or t
nggaaatgaggcctctgcaagggggatgggcagcggaactgacgccaggtgcaacaaagatggcggccggacagctgggaagaggcagcctgagcagacgggcgtgaggacttggtcttctatactgatgcgacagccctgggggtaaggagccctgagggactgtgaggaacagcagagaggcacgtcaaggtgttactggctgtctgggcagatgggtgcctacaatgatcctaactggcgccatcaattgaattttcttttaagcccagactagagcagttcggagacatttaaattagaaatgtattaaataaacgttattaattatattatttggaaccttccactctttgctggcaacatgatcagccaaaacctggtagaaatgcgtccaacttttctgtgattactgcgtggctctcaaagttctcattttcagagattctgctttacatttttaaaaatcttaatattttggttcatttttggctaagtcgggtcttggttgcatgcagcatgtgggatcttttcctgtggcacacgtacttctctctagttgtgggtacaagggctcttcggtagctgcaacgtgcgggctctgtacctgggggctctctggtggaggcagctgggatcggtagttgcagcctgtgggcttagttgccctgaggcatgtgagatcttagttcccggccagggatggaatctgcatcccctgcattggaaagcagattgttaatcactggaccaccggggaggcccttgctttatgttttatgatatgcaatgaagatacacatttgttgtatcctaatcgtaaacacctacaatcaatttaaaatgcccctcttggcctatttaatgctttgtttgcaatttctatccctgttccctttttgtgtacatatatcttggctaagcatttaacctttatttctgaccttgtttgagttgtatcttgtgtactgtgagcaaacataaaaagcttttgtctattaatgagggagttaattagattgatagcttttttccaaactgatacatgtagtggacattgctgtcctctgctcggtatctcttctctcttgctttgtcctaaaggacaccagatctttccaggaaatcacccgcggtttggggagaacctgactccaccctcaacgagatgggcttgactggtgtaaatgtaaccccatcccgtgccagtgattgactcaggaatcggtgggtaactcaattctggccaagactcggaaaaggaaatgagattgagggtttttctggagaaaatgtctttgtctctaagggagccacagcaaagggcaatctcttgtcttctgtgagtcttcatcacgtctggacgctgcacgtggagctgccatagggcatgggctgtcgtcttgctgtctgcttgacaacggagccctcacaggaattgcagaataaagagatgagaagaacctgggttcttaaagacaatcccaaacttctgactcaatggccccgtggctgtcttatgtcttgcattcctgtcacataaaattaggcagatcttttttgtttttgtgcttcaagccagtttacatcagagtttcaatatgtgtagctgagagcactttactgacacatgtgttcatttttcatctttttaccttttatgtttctatttctttctttctttctttttttttttttttggttttctgtcattgatctttatgttgtattttctttggttttgttttctcttga

SEQ ID NO: 44830 - DNA, 2045 bp, Bovine  19866880513019
  misc_feature (1)..(1): n is a, c, g, or t
nctgctggctcctgccccctcctggcagcccagttactcacctttctctgcacacagaggctcctcaaacagccagggccaggcctccagcaatgcccccgccatgcagcggggcctcatggaggcagcagagaccccggccctttgggggagagccatcaagtaagggagggagctcagacggcaggcggcacccacatgcccagaggaggggtccccaaggtgggggcagccagaggcctcagaggaggtggcacctgagctgattgaaggaagggacattccacacctagggaggtggagtggccggaataaggcccagtgcggggagggccttccaccacaccaccagctcagagtcccgccggttaacaccaggctcacagccaggtgtcgcgaggcctgccttgctgagctccaaacacaaaccatttctccctcacttgccttggaggcagccaccttccaactccaagttgctaacctcatctcctttctcccatatatctcccgcgttgacacttgccccaaaccagattaatcagcttttttatccttcctgtggtagcaagggggtgggggtgggcaggggaaagagagccaaacctaaacatctatctattaattgcacattcaatattagacagtgagatgatcctgagtcagcatcatcaccaagctctttggaaaaaaagaaagtttaaaataatttaatatccattaaatacttcttctgtggagggaggggaatgggggagaggtgggtgttaacaaagatgaaagaaatgggaacaggagacgggagatggaggcaggggtaggagggggaggggaggagaaatccaacaggaaaggaagagcccagaaaggagaaggggaaggggcagaaggcggaggggggcctggggggaaagcaaggaaggagggaagaaggccgggagccggggagacttgggggcataggtgtgggggcgagaggaaggggtcctgcagggagaggcaggtttatccccaccctggctctctgcatcccgggttacacaggctaggtgcttggccggggctccccaggaagagtacaggatggtggttcttgttctggtcctgggttctagccccatctttgtgcaaaatgagctctggcctggacaccgcttctctgggcctcctcgtcttcacccaaggacgagagagctcacttcccagggaagctggtgtttacagagcacccactgagggctggcatttatttcattttatttatttttcttttggaggcaccttgcagcttgtggaatcttagttccctggccagggattgaacccagacccttggcagtgagagcagacagtcttaaccactggactgccagggaattcccaaaggctgggattttaaacgcacacatttaacccatacaacaactttgggaggtggaagtttggccccgtttaaaggtataaacgaaggcccagagaggccacgtaacttgtttcagattacatagctatgtggtggccgagccaaaattcaaagccctgcctgtaagtcaccagaacccagatgctctgcattcctcagactcctaggataatctttcggactccggggacaatgggaaggtgccacgggcatttgtcttacctctgggctcattctcaaagtaaataaggggcaaggagcagggtcccaggtgagggaggcaggtcccggctggacaaggagctcccggacgtacccataagacgcgagcgaccaggactgcaggggtcagagataagagagctcattgaggagcaagcagggagggcttcccagaggtgaaaactggaccaagaggtgtagatgtggcaggagacagggagggcacgaagtgaaaatggagccccgagctcagggccagggtggggcgcgtgtctcggtcagaaacaggagccactaacgccgtgtggggaccaggcagagagagggcatcagagctctaatatccctgggcaggagaggagacagccccaataccaagagccagggttccagctgtgaa

SEQ ID NO: 44831 - DNA, 1036 bp, Bovine  19866880526529
  misc_feature (1)..(1): n is a, c, g, or t
ncccaagacctgaccctgcccatatccttgtgttccagcaaagggaacatggatcccctgtggttgtttggagaaacaataaaattgaaaaccatctaaagatgtctcagtgccataatgcttttatgtttaaactgtggaataccctacaacagtcaataagacgaaatggttctaaacgtccaatgtggaaaggcgcgttgtcagttgggagaagcaagttgcacagtagcggacgccacgtgtgtatatcagagacatctcagagactcccacacgcacccaaatctgtgcctacgccatagcataagggctgtgaggattcccgccaagctgaaaacagggacgaagcgggtagcggggtgtctctcatgacttcaacattttttgttttgtttgacacatttagacccagaatgtattcataatgtcacttatataattaactttaaagaaaagaaactttgctgaaagaggaagatggagtgcaaaggaggtgggtagaaatgggtgagccagacaggatgcaggacctgttccgaggagatggacaaagtcctctggacattagcctcctggcaggttcttcacgagggacattattttggtgggtcctgcaatggccctgggtcaaagcctcctctcagctctgggactcgaagcggattctctccgcccagcaagctgtatgtggtattcgtttgggtcctgtggcccccgagtctcagaaggtatctgggttggggtgagaatagactccatgctagaatggagaggcctccctctccccatacctatcccactctccagtttatctgagacccaaccggatgtgtggcgctgatggcgggacctgaggtgaaaagttgcgggagtgactgggaacatcttgggtgaggtctgacctcctcacccctcagcccccgtcttctccatcccccggtcttctccatccctcggcgtgcgatgtttgtcccagctccagctcatcacctgagtctcccacccttcaggatcggcactttctagccaccgc

SEQ ID NO: 44832 - DNA, 1044 bp, Bovine  19866880546085
  misc_feature (1)..(1): n is a, c, g, or t
nttacaggggggcatgaagagagagaagaatgtgtgtgtgcttggggcaggggggctggggggccattattactcatccacagttttccacacgtgctaatttgtgtttgtgcctgaaacatcagaggggggacatccgcatattttaggcttggcacagacctcagaaatcagccatgccaactccttcgctgtgctgtgaggaagccaggggaaagacagggccacagtcactgggtgacttggtggcagaggtgggctagagccaggctttgtgatggccatccctgcctttctgcccactctgtgccctgggctccagaagtgggagagggtcattggtggaagccccagagctccctggtacactcccatcccatccccagcacccaaacccagtgtgggaggctgcctgggcaaatggtctcttaaactgtttcaaaggatcccaaaggtcccctgatcctatgaaggactcatccacatgacctggggcctgaagggctgtagaaatgtgattgtagatgggccaggaaagcccccaagtcccagtgctcactcacatgcatcccaacacctgacgccttggcattgaccctctacttgttcaaaccctggactgaacattcactagcgctgtggcagcatgatggggaccaagtgcccccaagaaatgtgtgatgtcataagactcttgcctccgagtgggaagggatgatcccaaagacgttgtaagattgggccgaagcctctgccctagcccaggtttgtgccagcagctctaggcagccccgagatatttgaaaagggtttttgggttccagggagccggccaggctagaaggtatgaacagagaggaccaatgacctctaggctcctgctctgctctcagttcctgtcaaccacctgcccacccaggcccagctcgcttcaattattcagggaaaaaatccaaagtccgtcaccctccacctgccaggtccataggtaacctagaggcgttctgtaccagagaaaccaggtccaaagccagatccaaagtt

SEQ ID NO: 44833 - DNA, 1286 bp, Bovine  19866880578588
  misc_feature (1)..(1): n is a, c, g, or t
ntggtcgcctggctggagccccccccaagatgcaacaggggcagagaagagggtatgtgaacctctctcaggccacccagccctgccccctgaggcgagcccacacccacaggcggccggtctggctgccaagcgtggcaggccacaggaacacgaggctcctaaaatttatggctagactttatgacaatggaaatatttttttaattgaggtttgcaccaccattacactgctaatttaattattccctatatttcatccgtcaccatctgatcctcaggaagcaactagcttgtcttcttgacaagaaagcaccaaattgattaaaagcatgtgtgggagccgggggctgggctgtgatttgctccctgtggccggacctctgggtgcccaggggaggcagaaggcagtggaaagcagacagcagatgtctcctccccaccctgcccagcgcggtcacctccggtcaacccgcaccctgccgtcacggtcacacccacgcccacgcgcacacaggcgctcaccctcacgcacatgctcagacgtatttacagacatcgcctcaagtagaacagcaaaacactcggccccgcccacacccaatctgtctccctggccacgtgcagggaatccaccctggtcccaaacacacaggcgtgcactcgtgcacacacacacacacacacccctggagagtctcacatggctgccttgcagaggacactgtcaggacctcgtcaagagccctcatccaccctcaagccccatggatccctctgggcaggcccatggagcgttctggggatcggggttcgcttctgcacgggactcggggccttgagcctgccttatgccctgggtgaggggtggggtggaggtggaattggctgctctggtccaatcattaccccaggatatgccataagatgcctccgctgcccctacgggtgagctgggggcacttgtccacgctgcgtggctgggcgggtgcctgccgtgtggcaggtgaggtgcccagggcagtgtggcagtttctccaccagattctttctcttcttcattcatgacaccctgatgctcctggagccctgagaatgagagagtggccggtggccgccccacagctctggctggcatgcgcacacagcatctctgggccgtccctggccgggcttgattttccaacaaccttgtgcaggtgggtcttctcgccccacctggagggcaactgttcccaggctgttgccaggggcgggggcggggggtgcattattgccctcttttc

SEQ ID NO: 44834 - DNA, 3441 bp, Bovine  19866880633912
  misc_feature (1)..(1): n is a, c, g, or t
natatgggacatagaaactacctcggaaaacataagacctgtgattgccatgctcactgacacactgggggaaagacattttccaaaagttggctagatcattttcaaaaccgaagagaaggtaaggatatttgcaaaaattacagtttaatcacagggtaggaaagaggctgctgaggatgctagtatcttccagaggaggttgtattccttcagtgagaaatcaaaagtgccagagaagcatttggaatgagggagatagcttatccattgggcggtccattaacctcgttcttccagttccatgatgttaaatagcaattaaaacatcatgcacttattttctgccccaccctccaggacacttgaaatcactccatattttaatcataatgggacatgatgttagagccaagaattgcaaactcaacagattagggaattttggggggaactcacatgaaggacacatttttactgcaggatctgaaaattatcttcaaagaagtttcaaaaactatcctataaatgtaacaacccaatcacatccttattgcttaaaggaggactaggaaaattcagttaatgttgctgtcacttctaaggtattttcatttgaaatgggcactgaagacacctctaggagaaaagcctcctggaaacacacaacactctggtcttcatgagtctgaacctgagtgaatttctcgccagcactgcaccagcacgggtctggatcatcacacccctgctgttgctttgcccatgtggaacttcattccctgtttagttctgcaaaccctaacatctctcaatgtccagatgaatttgccctcattcaggaaaacatcccttgcttctttagcccattctcatctctctttcttgttttccttttctttctaaacccatttagggacttaccgggtggctcagtggtaaagaatcctactgccaatgtaggagatgcaggttcgatccctgagttgggaagaccccctggagaaggaaatggcaacccactccagtattattgtctgagaaattccataacagaggagcctggcaggctaccgtctatggggtcacaaagagttgaacatgacttagtgactaaatagcaaacagcagcaatggcatttagagcttaagcctcctaattaaactctgaattatagacctttctattgacattaataatatgattttaatgtaacatgttagacactattgctccaagtacacaaagctcatatcccaactagagagtgtaataaaaagagcctgataagaataactagtggtagacttttctgaaattgtattgggtcttcatgggtgatatttgggctacggttcccttaggtgacatttctgtctcaagaataacttgcacatctacgttagtgtgtgtgtgtgtgtatgagcatttatttagctaactactcattaccctggagaagcacattcgattaaaattaactttaaaatatgaattgaatgcatactaaatgtacactatggtgctaagtttgtgggagatgggtggtaagggactggagacagacacttaaaaaatgaagcagaaattccactggagattctgacttttctgcatacgcttcttgtgaattctggacatacaatcatcccctagtgggcacaggagttgtgagtgtagagacctcttagccatgcgggcatcagcacagaataactgtgatgttagatcaaatcacaaacttctttggtctttagatgtgacacactaaaaactgatacagagcaatcgtttccagagtggtgttcacaatcagaggatggataagatgattcattggggtgtggaaagagaatattaaaactgatactaacaaaaggataaaactactaacatttaattttctatttgacctgagagccctctctcggtggtttagtcacatgactcactgtggtcttgagatgtccagagggattggtgagaattccatacttcagagggtttggtggggtgccatcgcgtctttattctcttttggtttatatatggccaggtagtggatttgtgtattctgttatcttttcctagctaaatcacccttcattcactagagaagtgacaaaataatcttgtgaggatgctgtgcactaaaggcaaggctaacagtacaaacccagagacctgcacagtgagtgcttggtggagccaacacttctctttatgcctcaggctcccatggcacctttattaggggaagatgtaaaaatgggtcaggcaatgagtggcaaggtaagtcacttctgaaaatgggtgcttagaaaggtttccttccctgtgtgatgttgtcaccaaaagtgatgattaaagctctcatacaaccacattgaaaatatatatataaaattccctaacctgcttgacattagataagctagaaattgactagtgaaattccatagttttgctcactgggtatgtaggattgaaaggtgaactcatgacacattcgaaggctttggcatagtcaataaagcagaaatagatgtttttctggaactctctggctttttcaatgatccagcagatgttggcaatttgctctctggttcctctgccttttgtaaagccagcttgaacatctggaagttcatggttcacatattgctgaagcctggcttggagaattttgagcattactttactagcatgtgagatgagtgcaattgtgcagtagtttgagcattctttggcattgcctttctttgggattcccatcacttcatgggaaatagatggggaaacagtggaaacagtggctgactttatttttttggactccaaaatcactgcagaccgtgattgcagccatgaaattaaaagacgcttactccttggaaggaaagttatgatcaacctagatagcatattcaaaagcagagatattactttgccaaaaaaggcccatctagtcaaggctatggtttttccagtggtcatgtatggatgtgagagttggactgtgaagaaagctgagcacaaaagaattgatggttttgaactgtggtgctggagaaggctcttgagagtcccttggagtgcatggagatccaaccagtccatcctaaaggagattggtccctggggtgttcactggaaggactgatgctgaggctgaaactccaatactttggccacctgatgcaaagagttgactcactgggaaagaccctgaagatgggaaagactgaaggcaaaactcgattctgctgcttgatccaaccatccactctcaggtattcacccaagagaaaacaaaaacatgggcgcatacaaagactggaaatagcccaaacgtccaccaacaaatgaatacctaaacaaactgcggtatgtccatacaacggatatactagtcgggaataaaagtatactaacat

SEQ ID NO: 44835 - DNA, 1793 bp, Bovine  19866880645858
  misc_feature (1)..(1): n is a, c, g, or t
naagagaaatctttcaggctgggcaccagggaaaagtgatcttgatgccgtccgtggcgtgagccgaggcaattgatgacttggcattctgtctccgagtcatcaatcatacagaatcaatctcggctccctcaggagctggcccccggctcacataattctctctccctgccaccaacctgaacagtctgatcccagtggtgggaactgttttgttctgcgttcagcattgattcacttggccttcagtagtattttctacattccccagaaatgtcacttaatttattctctccaaggtggctaagttgcctgggtctcacggcatcaactggggcaggcaagcagagaaaagtgtctgcttttttgtgtcaaaggcacaggccttggacccctagcctgaaagtcaggactctgctcccaggctcctgtgttcttctctgaggatgggcaggggatcaagcccaggggatatggcctgttatgtcccacagccttgcgtggtttccgtgaattctaatacttccaagctctgtgatcttgaacatgttacctaatcacttaatgcctcagttgtctcttctgttaaatagtgataggaatagcatctacatagcatctacatggagttttaggattaaattagatccaggcaaagttgcttagtatggtatagggcagtatgatcagtgtctcttctgttaaatagtgataggaatagcatctacatcatggagttttaggattaacttagatccaggcaaagttgctttgtatggtatacggtagtatgatcagtgagtgtaagttattaatactgtgattattaggaaacaagatgtatagggttgattgtatttattataatgtcagtggccatgaggggaatgaccttgagaaagtgacctgtgcagaaagaactattcttcttttttttaatcacaaataagccttttcattatttagcttcttgcactattcacataacagaaactgataaacccatgttgctatttaatcactaagtcatgtctgactcttttgcaaccctatggactgtagccttacaggttcctctgtccatgggatttcctctgtccatgggatttcccaggcaagaatactggagtgggttgtcattgccttctccaggggatattccccacccaggggtcaaacccagatctcccatattggcaggctggttctttagaactgagtcaccagggacaataccaacatatgctttagggggaactcaatttcaacctagcacaatagacaatggcacaagttagagaaattatacagaaaagaagtatgacttaaaatcacggagctcaaatcatagaagctacttccataatccagtctatgataagaaagaggtgaggaggttatcagaccaaaaccttaacttcctttattgtattgttgctctttgtcaccatgtgcttggaaatgtgacttaagaaactgggtcttctgctcttaagtttcttgttggacctcacagaggccaggagtgcctactggtctgggggagcccatttacattcttttaagtcagtcaattcttgcttagatgatgcaggtgggaaaaatgatctggacctacaagttttagaaccaattccagtactgttgtgccaaaactcttggataggaggagggatacagagggaaagaaagaagaaaagtggagtcttctgaaattctaaacccttctaaccttggggaccccgaagccatttaaagatgcagcttgcagtgatgacaagcgttgctaagaa

SEQ ID NO: 44836 - DNA, 1371 bp, Bovine  19866880647596
  misc_feature (1)..(1): n is a, c, g, or t
nctcggtggccggtgagccagcacgagggactggcttgattttgcccttgtctgctttactggttcaaattgaaaaaaaaaaaaatttttttttattattattcttttgtaaagccaccatcaaaagaaataaagtccccgagtcgctctccgggctgcggccggactcagacacccgctgcgtgcgctgccccacacgggcttcgtttgcagcacttcccgctgcagaagtgcggggctgggcggcacgtgagggagagggccgagggtctggccgcccagctcggactccgccgggttccccatcgggcccgcggtggccgggacgtcggctgcgccggagagggagtggctggcgcgggagctgggttcgagcagccccgcctctgggggccaaggctggtagtgaacttgatttgggaaagcagattttcctttttaatgatatttacctgctccccatgctctcctatattggcgtttccaggacagcctcttctcggcttcagaaaccggacaaataagataacgcgccgctccctcgcgggttgcggggcagagctgatggtgtgaccctggactggtccccgtcggtccctttccggtgttttgcgtttctctctccttgccctcggcttacgtgacgttactagacgatatgtttaaaatttaaggttaaagaaatgagaccctagctgcctgaaaaccgagacccagcccgtttggtacagccacgacgccgccaagctctccagcgccggaggaggccccgaggttcgctgccccaggcccggagtccagccaggacacctctccctgacgatcccgagcccaaccctaacagcaagtacagttctgagaattgtggaacttcatcctttcattttaagacactcctgcctttgcttgatggaatcttgtgtaagtagagtgggttcataactcggttcagggcttacattatccagtgttatctgatggtctaaaaaacgcccaagttgaaggactgcaacagaaactcacacggagagcttccctgacatgtggctgtgggcttggtgtgcccatgaagtgctctaataaagccccgtgtcccttgtagccacacggagggcttgagctggtggctgggagatgggtgcgtatgtctgtcaggattatgggtgcttgtgtggaggcagtgtggttatgtacctagaccctgtttgtatctatactctgcgtgtgtgtgtgtgcatacacccactgggctaagacctccctgtcccctttcccacaggacacatcagcagaggccaataactttgttcaaaacctcacttccaacattatcctgtggcgctgatacttactcccagaatcacacaacag

SEQ ID NO: 44837 - DNA, 1149 bp, Bovine  19866880656419
  misc_feature (1)..(1): n is a, c, g, or t
ngcaaatgcggtgccatggtttcttcttctatccagtaaatgctgatcaaatttaagagaaggagcaggcagcttccaataaagaaaaattaaaaagtttttctctcccggtaaattgtatcattggattttgtgataattagcacttcatactgtattatagtgatggtgtcagatcaacagccaaacagaattaatgagttaaatatctgtcagcaggaagcttcaggtctgattaagggtgctgcaggtgtgtgtatgcatccatttcttttctttttctttcatcagggtcagtatattgaattgtcagagagaccatcatactattagcatcaattatcaatgagtcaagaaattatgatcccttatcttgaccgtgggagagaataatcactgacataataagaagacatgcaaaaatgaaaacgtaaaacatctctttagtgtcaaagtgagtaattgaatgaatgatgcctcaaatcactcattctagtccaaacactgcttcaatatagccatatagttttatgacataaaaatttcagttagtgagttaattctggggaaagtgaaatttaccaagctatgcattttatgtacatcactcatttcatccttacatcagcagtgtgagtctatctttttgttctagtttcatctgaggaaatgcaacatcaaactgaactgcccatcttttattctaacaactaatatttatgaaacaccttctctgagtctaattacatactaagcacagattaagagaagatatagcagaagagggaaatgtcaccagtactatatggatgtttgagtgaagttacagttataaagaaaaatatgagaggaaatagataaaaaacgaaaaacagaagagggaaataacgaaatggcacaatgtaataccagagctgtcacaatgcattatatagttgattgtcaaatgagtggcagagatagaaactgctattagtttaaaaaaagaaagagaaaatcgtgggctaaagtggcctgagaagattgtaggataagagagttgacccttggtcaagaagaatggtcaggatttggatacaacaagaaggtcagtaggacatgacagggcatttcagatggggaatggaaaagaaatgtctgggggcagca

SEQ ID NO: 44838 - DNA, 2446 bp, Bovine  19866880669423
  misc_feature (1)..(1): n is a, c, g, or t
ngagagggagcaggcggtcacatggctaaccatcaccaccaccaccttcccactgggcactccagtgcccaccctgggggaaatagagggataggttttgtcctgggcaaccccaggtgggaaggagcctgcatccttacccatctttagctcacccctctgagtgtgccctcccccaaggacctctggcccaggactttcccttgcccccctgacacccagtgctgttgttctagtgtgactttactgagaggttcaggggagggagctcagacaggaagtttgggcattctccctggtctactggccccagagcctggcatggccagttagcttggctagcttgggtcaccaggcagataaacctggatggtttcctttctatctccctgtgttctccagctggcctcaaaggtaatgaggctggatatgtcccccccccacgtccctgggcccccaaggccagcccactcccacttcagtcatcaccgacctgcatcaccaaaggcaagttcaccaccggtccatgcaccatccagccttttgcccaccacgtctgcagacaccacaaaggcaactgaagtgaaccgagcctgttccccggcccagcttccccgggttgcttgccaaagtatcagcctctggtcctctggcactgggtggtgaatacccagtcatgagatcaggtgtgataagacccttggtcttctggttccctggtgtctgtgggcactgtggggcagatctcatttgtgtggtcggtcctaccacgggcgtgcccgggaatggacgacctctgtgcctcgtgcaaactcctaaagaatttgggaggaggtccctctacttgagcaggcgtgggtggcccagagagaatggcagcatgaggcctccatgctctttcagcttctgcccccagttgtgctgggcactaggaataagtgaggaggagaccaccctcctgacagcctctggcctccttgcctgctctcaggcagcccttctccagggccaggtccctcgggtgtctccccacccagcccctcatggtcgagccctcctctgttgtctcctccccaccctccccagccttctgcatgagccccccaaaccagcggcagcctacatcccccaaccagggggagcagcctaccaccgtcctgagggccccagactggggaaagggcccccctcccagccattcagggggcctgcctcagatgtcctgccccaggacagggaccgcggtggccgggaaggcagtgtggccgcagcagcatctccaggggcgtggcgggggaggggctggtttgggcaggcattgctgacctctgtcctttggctcccctgcagcgcagagccccacagccgcggaccccctgcagcaggcctacgcccggagtgcagcagtatgcaggtcgttagtatccacgcgtccccacggtggtccccggctgcgtgcacctccccgtgcctgggcatcgccccacccaagcctgggcttagcagtgtggggggtttgggggattggggagggaccgacagggagccgtggtcctcctaccaggctgcctccttctctgcaggcgtcctttggtgatcaggcagagcttgcctcaccctaattcatcctggcagtggtggggggcgttcagaactccatttgagctggtgagctgggctaagctttagccttgctgtgaagcggcatctctgaggccagatgtcctgcccccatggtgctgccagggcgggtctgtccaggggcaccaaacctcccccagcaacaccacgtgagactggagctggggggccactggcccagaaagcacagatgccggtttgaaggaggagaagcagcttccattcccctacccccagctacacacaggcaacaggagtggggcccgagctaggaggtcaggggaggacagaccgccagaggcagaaaaaaggagaagcgggcaggtggccttgggtcactgaatggggaggtgatgagctactgtaggaagcccaaggccagctgtcagccacacttctgtctacctctgggctagacaacacacacatgtgtacgcacacacacacccacagtcatctctgccagccagggtcctgctgtctggccccatcagggtccctcctcattgtgttcagatgagctggcagtgtctccctggagggtaacggggctgcctggtacatgggggcccgcatgagctggctgtcacctagagtccaggggaagctctcttcctcacctgctgacccccctgaacccctttgggagtcaggccaggctgaggagggtctagccagtcctgtgcctcctctgaccctttttccatttgaatatagaaagcatcagatttgttcaactcagtcttcggcccttggggaaccagccactagcagggtcccagaggccaagctcacacctagggtg

SEQ ID NO: 44839 - DNA, 997 bp, Bovine  19866880697990
  misc_feature (1)..(1): n is a, c, g, or t
naactgcgcatgtgccgacataaaccctgagattagagtctctgttctccgggtgagaacagccatctctgcagtttgcagctctcctgccccagggggtcacctctcctgcttccccaacatctctgctgcctcctgcttacatttctcctgctctgatgtggtcttcccaccccagagccccgttttgtgttttctgggataccagtctccccctccttcctactggtggggcagaagggatcagccattgaaatggacttcagcttagctttccccaactcacttatacaaaaataaacttgatggaagaatgttatccatttcacatcctctcttccagttaaaaacaaattagcacctgtctatggaatctggaggatactgatttcatatagaatgaaatatttggacattttgagttctggagtgagcactgtgaagctgggacctctaggtactaggtactaggtggcagtgtggaagagccgtgtggagcagctgggaaatacaggaaacagtacctaagtgtctggcaccccacagacctgatctttgctgttgctcagttgctaagttgtgtccgactctttgtgaccccatggactacaccgcgccaggcttccctgtccttcactatctcccggagtttgctcaaattcatctccattgagtcgggtgatgttatctaactgtcttattctctgccacccccttctcagtttgccttcaatctttcccagcatcagggtcttttcagatgagtcagctctttgcatcaggtggccaaagtattggaacttcagcttcagtagcagtccttccaatgaatattcaggactgatctcctttaggatggactggttggatcttcttgctgtccaagggactctcaagagtctccttcaacaccacagttcaaaagcatcagttcttcagcgctcagccttcttgatggcccaactctcacattggtacatgattatcagaaaaacca

SEQ ID NO: 44840 - DNA, 2681 bp, Bovine  19866880738613
  misc_feature (1)..(1): n is a, c, g, or t
nccgaacaagatggcccagggctggcagggtcagtgtgctctcccggccccagcagccgtcagaggtcagggggctccctgccctggaagggaggccaggagggcatccaggctggctgtggctctgggcacgtgggttcctggcatctctggtcttccatcccccgttgcctgcttagaggttattttctctccctgaccctgtctgtgtatttctgtgtcaccaatatctgttttatgtattctcgggccctctttcctccatttcctccattaatacttctcgttcagggcaggataaatagggtcataatcacaccataaagtgagccatgggctgtgtgtcgcttattgcccaggggtctgctaattggaatttataaagttcaataaaaactataatccaataaggcctgaaactcttcttcatttatcttaggggtaatattcagcctacccgcccacccgcctgcctgcctgccagccagcagtgggaggccggggaacagccaccaaaaggaccttccccaggggccacagagtccccaggagtggccagcactgagtcaagagctcggtggccaagcaagggagagtgggagggcctgatggggccctgtgatggccatgctctagaggcctggggacccccacagtcctagcattgtctcttgcatcattacaaactctccctcagttacggcccccacctaagcttgtaattgccctcccccatgcaaacccccctgaaaagcctctgggagactcagggggtctgtttcaaggaggcctatgtaagggtgatggatctgaacctgggattgcaggtgccgtccctggccccagggtgtccacagagcaggaagtcatcacaccgtgtacatagagctatgttccgtcacccagttgtgctccatcaggcacccatgacaagccgtccctcactccctaccagtgagggaggcaagtgaaagtggagaggaggtgtcctcagccccgctggggagctggacccagagacacttaaaggagtgtgttggacaagagggtgaccagttgtcctggtttgcctcaaactgagaaggtccctgtacatgtgacattctgtgttcaaggtgcaacagaaaaatgtgactaaagaatgatccttgaagtgggctgagtggtggagaaacccagtggagctcacctctcctgggcagttcctgggaggatcctgccggtccctttctggcagccactctgagaacaatacccttttccccaaaacacctcctgcaaaaattgtggtttcccatcacctcccaggaagccctcatttaaaacctagagtgtattccctccagcaaaaacgcacatgagcctgaatcccaaatgcaaacagctggccccttgctggacattctgagtggtgagagggagcagggcactcagccagccaattccagccttccaacacggataaggggggagtcactcattttcagagcattcctggcttgctcacggataggtggaagacagagacctccaaaaccagctgccccgccctggtccccatgctgggatgagatgtgtatgcatgcgtgtgcaccccagtccccatgctgggatggggtgtgtgtgcatgtgtgtgcacatgcgtatgtgaggggtgtgtgctgggatgggtgtgtgtgcatgtgtgtgcacatgcgtatgtgaggggtgtgtgctgggatggggtgtgtatgcacacgcatgtgtgaggtggccgtgatgccaaaaggagaactcacagtccccacagcctctcaggcctccgcagtctcacatggagacgatacaggcctgtgattgtcctaacacatcccccgagggagggaaggttggtcaacaggtgaagttgctcaggtgccaagctctctgccaagggcggtaggaggatcccaccacccacgtcacggccactgcagcgtgagccgccctttccgagtcgaaggccttcatgaccagaagtttaacggaaagctttggagccagatctgcctaggttctaaatcagcttcctgccttgtctatgatgtttagccttgagtcagtcatttaccagctccacctctcagctcttacaaaatgctgactgcagtgcctggtccacgtgtagttaattctagctactcttgagggtcatttatgttttgtgtgaaatgccaagtgggataagggttcatctgtggccacagtcagggcagcccctgtcttcccctgggctctttactggccaggagccaggttagggtcagcatggggatagaatggaatgaggactggagtcatctaggtatctgacttggactttgagatcaagcaggaattccaagaattctccaagtgttggaagaaagatccagatgggtggagacagagtcctccagcaaaggaaatctgagtacacaggcctggaagggagtagaagggacggcctggtgcaccaggaaggcagggtctgggggccctgtgtttagggtaatgggaagtcagggaatgtttgtttgtttttgtggaagaggcagtttgccatttggaccaggaaaggtctaacacacccgaaccccaccaatccatcttcagcctccccgacctcttcccttcatagcctcaatcattcattcattcattcattcactccaccaaagtgt

SEQ ID NO: 44841 - DNA, 1183 bp, Bovine  19866880740927
  misc_feature (1)..(1): n is a, c, g, or t
ngacagaggagactgtgggctatagtccatgaggtcacaaaagtgtcggaatgactttgcaactaaaacaacaacaataacaacacacacacatacattgatccagaaaataagatgaaattgatgtacagggttaaattgtagaggctaactttatgttcaataaagcattttaattttcagaaagaagaaagaaatgggaaaataacaaggaggcttccgtctgagatcccaaggcagaggtaaaaggctggaagagaagataaatgtgagctctctgcagagaaggagaattgctctccttaacccaggcaggggagaataggtcctaaggaaagaaaggtttagtaagactttctgaggcttcttagtcttctatgagttttctttccttttcttttttttttggaaaacatcgaccagaaagctttgttgtctaggaaagggtaaaaggatgtctggttgaattggaattgacaaaactaggcaactcagagagggcagtctcaggagcagcctttaaccacaaaagagatattgaagacgatgcgatcgatagaactggagcgggcacgggaggaagatgatgaaacccatcaaattcgatcactgggcagaagtggtcagcgtcagcttcctcttcaagggtcactcgatgtcagcctccattcaggggctttcgcctcccctgctgattgcattcttaggaccataaagttggaacgtcgagagggaaaaatgcatgctgcctgctccaaacttcttgaagtccctttcacagtggcctatctgggtaggttttctggattcctgggttacagagactcaactgcccagactacacaagaggcaggaccactctacctgaagacacattcatcattcattcatctgttcaggtttattcctatttgcagacgattttaagaaatatggctataaatcctttgcagcttcttccatcaagaggtggagtctatttcccctgttagatcaagcactcttcttgatctaacaaaacagggagagacacgtgactgccccagacattgccatcgtatctgagctgagacaattgtgcaaactccgctgaatgtgtgtacagaaatgggctcagctgggcccaattccaaatgctttcccacagggttcttagcaaacaaaggggctcaaaataagtatt

SEQ ID NO: 44842 - DNA, 1910 bp, Bovine  19866880812226
  misc_feature (1)..(1): n is a, c, g, or t
ngcaaagtaatgtctctgcttttgaatatgctatctaggttggtcataactttccttccaggagtaagcgtcttttaatttcatggctgcagtcaccatctgtagtaattttggagcccagaaaattaaatcttactttcaaagaacactttggaatatactcctcacttgatgttttttaagcaaatcagctttaatagattctctaataataatgccctagaaagtttcttactgtaatctggatgtttgataaaccatttcatgcatatatgtgtgcttagtcactcagtcatgtctgactgtttgtgatcccatggaccgtagcccatcaggctcctctgtttaaggggattctccaggcaagaatactgggagtggtttaccatgccctcctccaggggttcctcccaacctaggtatcaaacctaggcctccctcattgcaggcagattctttaccttctgaaccacatgacagaagcaaattctcctacctagtgccactgcatgaactgtgaacttagctcttcatttttagttttttagtgactgaatcaacagcatttgtaagctgagtctacaaatctaaagttaacaataaatgacaaacacaggaatttgttaatgaatagatattggtcctttcattaacttgttctctggtttactcagttaaattttggagattggagtccttgaaatactgactcttctaggtattaattcctcatacactcccccctacccccgacacacacacacatctctcttaccatccccactagcttttacctgtatgaaggataaatatcgttacaatattagcaaaactttcttaaagcaagttgaccagcatttctctgtctccaaggaaataaaacatttaattagcctttgcctttcaatacaataagtacagagagcaataataccatttttctaactttgagacaatagcttgtgtctcttgtgtctcctgtgtctccagctgacagtgtcactcctgcaaaatgcatttccctggaagataaatgaaaagtcagtcttgttgtatactggaactatttgttaaagcaattatgatcatggtctaagacattgcccttgggattaatgagagtccaggaggagttgatggtccaaaatgcaaagaaaagtcattataccccagataactattaagccctgtggatggcgaggcaggcatatcatactgatgggcctgggagggacagcaaaagcctggtggtttagtgaagatgtgaattttccagttcctttgaaaaggactgcttttctacagctagttatttaaaggcatatctcacattcctgctcctcatcagcagtatgaagctgaatgctttttactttatagcattcaacagaaccattcctactttgatggaattgacactaacttctcttttttagggcttccctggtgattctgatggtaaagaatctggctgcaatgcaggagaccagggttcaattcctgggtcaagaagatcccctggataaggaaatagaaacccactccagaattcttgcctagtgaattccatggacagaggagcatggcgggctacagtccatggggtcacaaagagttggatatgactgagcaactttcactttctttttatttatcttcattcccttgcttactacttacttctattctgtaaatagccattagtatccagtacttgattgcttatacattggaagggtaaagcagaagcagcagacagtaaacacttgttctctagggtctctggcaagatctttgccacttcagctgaactttatgtgtatataaatatgtattattttctgagagaaaatataaataagtctattcatctaaagaagtatgtgccaacagagggttcaaatagaagg

SEQ ID NO: 44843 - DNA, 1346 bp, Bovine  19866880884207
  misc_feature (1)..(1): n is a, c, g, or t
nctaaagtcaagcagccgaaactcaatgattttgttacgtcttacacaaaaccttacaagacataattttatgaagctggtcacaaatcacccaaacataattcataacccttgccctttccctttctcccagttgcactccaaatcaaggggcttgaggaatttcctactcagataccattgaaatgagaggttgtgaatctgacgatgagtatatttcaaaatgatatactctccggagctcaattcacagaaggttccattactctgtcccctccctccctctggatatagtatgaaagtatgaggggctgaagtctctgaagctgtggctcccggactggcagcccctggggctgctagtggagtatagtttcctccatgcagttgaggaaaatctcaatgcagaagggttatccaggccacagatctgttctgactggttaacaagagggactgtgatgaggacttggctgtttagattaaaatgcatcgccggctctgggaacaagcacacatcagtagtaaaggccgtttaaacctttggggacagccttatgtttagattacattaattcataaatattatactaaataccacttaaattggacttaaatgacttcaaagataatgcattataatatggctatccagagagcactagtctttatgtctcccagtaactcagtctttgctgcctcctatcctgctagacaagaccaaagttatgaatggattgtggcttgttcatgtgtgatccactaactgcatgtgtgtgtgttaacggtcacgcctatgtgtgcatatgtattttcagtcctgcctctcttctccaggaaatacaaggaaaaaaagagaaataaataaaaagtgagcgagggaaagaattagactagtgggtgacctgtttcttcctccaaaggagaaaatttctacaggaagaggcaacattggtcctcagctcacttttgctgctaccctgggagtttacctctctcttctttaatcaatagcacaatgtctttctctttggagcctggaaaaacaatctttctcaaagtgcttctaacgggggagaaaaggagactctgagttggctgggagagtttgcattaaactggattgtcttccctaggtgttgtttcttcagattgttctgggctttttttcttcctttctctctctgcctggcacccagatctccctttgcccatttgctttcttgtctccagggggtgaatttacctttacagtaatcaccccagtccacaactgctatttgctgcctccccagcccaacagcctttctctgatacggctgagtttgctccacaacacccaccta

SEQ ID NO: 44844 - DNA, 739 bp, Bovine  19866880906938
  misc_feature (1)..(1): n is a, c, g, or t
nctatgctgggagcgcaaactaagggtgggggacaccagaagcactgttggggtcagagagatggcttgtttagcaggtacttggactctgttgctggtggaggcagttgaatggggactgtctgtccttatgtcatctgcctgagcatgttgtacaaacaagtggattatgtgacccaattctccccagaacctgttagcaatccactttccagtgatactgctaaaccatttctcagcccatgactcttcacaggcacatttcccttcgtaggagagctggtgcttcctcatcatatttactgcctgcaactggccttctacctaccttcttgagccaatgggatctcaggagccaaaccctggcttcctttgtttgaggaacaagtggaagccagcagaaatagggggcttgcccatctctctccatctgatgcaccagccctttgcaacagggagtggcccagatgtaccactgaaatgtggggtgaggtctgcaaaagtgggcatgagagaggaaacgtggcttctgtttcggctttgaggagccagcagtgtgatgaaacgcttgcctctgttccaccgaattcatttctctaaagttccactgtgcacagaaccatttgtttccacattgtttttattaaacaagaaaggcgagctttattactgcgcaaatgaaagcagccggcaaagacagatacttcccagattcttattaatctccaagagttatggg

SEQ ID NO: 44845 - DNA, 1595 bp, Bovine  19866880922790
  misc_feature (1)..(1): n is a, c, g, or t
ncaccactccctcaacaggcatctcctggtgctgacacccctggctcactgccctaatcctcttcaatattccttccatctgggcttcaatacccagaacactgaacttaagtcaggggtgggtctttaactttaagttgttcccccctccccaagcaggagaagaaaccatatttcaatgacaaatgtgtctatcccttgcttaggaattttaaaggggaaaaaacacacacagagaaaaaacaaaacaattcccacaaagcaggcaggattagctacttaatgactcagtggctgtcattggcacatgcctccctcccagctaattcttttacactaatggctgctttgggcaccataaattatatacctgttttgactgaaaggagtggcgtgacaagtggtaaggcttatcaaaatcaagtcaacattacaaacgctgtcagcacaatagacagagaggcaaggtgcatcctgatgactccctgatgaaacatatacagaggcttaacctaatccctgaaggaatgacaaggaaaataaggtgaaagaccaattagtctctttccatataatcttaaaccgactggttggctgtttccatttcctccactgcctgactcaccaagtaggagccaagaggtgacagaagccagttctttctcagcagagccaccacctgacatttcctggtggacgatccacctggctttcactggattttttaaaaaatgtgtcctatctacccacaccctgtcttttctttcagaaagctgaaaaatcagcacatttgtctccattttattctaagtgggagaaagtagtttttgaagagaagtattatttctctctaatgccatccatcagttacggagtgccccctatgtgttcacccctgttagggattgtggaaaatagaaggaaaagaaaagcaatattccttggcctctcagagttgagagtctagtgtaggggggacaactctactttaggaaaagaaagtctaaatattgctgctacttttcatatatgatcaaattaccttttgtattttagtagtaatgtctttggggtttatctagctctacatatggacatgaactagacattcatctccctagagtcttctatttagtatcctttgtaacaaatgggatatatttaaaaggatactggtcagggtttacagtagcatctgcagtaatatttagaggctgagaccagaaataagtaagtatatggcttgagtcatactgttctgctgcagggagattatgtgtccaaatggaaagttgacgaaaggtcaatgagactgaaactggtaaaagattatggccaagttggtagttttagaaaaaaaaatatttgttttctgcaatggcaatgatgtgcatgattctcaaatggacaatccacttttcctaaccaacttatccatataacccgctctgaaagagttaggaaaccaccagagattattcacccctgggatatagatcagtcaccaaaagtcctgggcattccagcaacctaagtcacttccctagaagtggagcaagtacatttaggagaagaaacccacattcatcatttta

SEQ ID NO: 44846 - DNA, 1822 bp, Bovine  19866880931990
  misc_feature (1)..(1): n is a, c, g, or t
nctagctgttggcaccagatgaccctgaagacccaggaggtctgatgtcacataaacctgtttaccctttccctctctctaaacagctagttagtgctgacctctggcctcctttccttacctgtgcctgatattcacgcttcataaatgagctatggaaattcccaagggctctgaaatttaggactgaaaagcaatgctctctgtacaaggtcagggaagtagaagcccactgccttgaagcaggtactaaaaatgctgcctcggggtgacctgactggtgactggtgactgaaggtgacctgactggacactgacttgacagatcatcacacgaggaccataactgggattctggatgcttcaaaaaagatgttggaaaaacctgagaggatgacagagaagacttactgacccgaaggtgggatctttcaagcagattgtatatagagagctgtgtctgcttgaatttgatccctctgctgggccactcacaaggttgctatccttgggcaaattactctttcttaagttttggttcttcgaggtaacttggggttataaaagcaacctcagaggattgttttacagatatacttagctgggtgcctgccatagaatgttttcaatacggtatgtctgtttaataaaaatagacgacagatagatagatagtaactcagcaaaagcagaagagaaaggagccgaggaccaggtgaccaagcatcagcacgcatgcataaagggcactcacatatgtacacaaacatgtacacaaacttaagcatgtacacgcatacaagcgtcatgtgtgtacatatacccagagcaaacactcaaacacacacatacatgtgcatacatgtccaaccttgttttgacattctgagtctccaaaaattagcatcagtctccaatatctatacctatagccaatagtttcctgctctaatacatcccccttctttatgacctcctggagtattgctgcctcctgtgtgcgctggctacaactttaggaaaggaaaaactgtgacttggctggaaaagaaaaaccataccctttctccactcagcggaggcatttgactctggctacacaatctcttaggaatggattttgccacttgtatatgaaatagtccatcccctctacagatagcatctagaggcccttagtagaaatggtaaattattgttggctgaaagacctgatgctctggagtcgtcaaattctccttcctcattcactcacttcagaagctgcatgaaccatgtggaattaatgccatgactggattcactgctacgtttattctcacaagtcaaggagggtgcaaaggggcctgtacctgaacagcagagcaggaggcaaggtgatccatcagaacgtgtaagaagaaacaagagaggcaatttgacaagaaatttctagactgatggtgtgttggctgccgtggggtccataagcaaaagagacatagaaaatccatgcaagtggaaaaataatgctgacaatacaataccactccaaataagcctactgatctgtattgagtggttacaaagtacctgactctgtgatgagttgtttggcatttacctaattgaatcctcacaacaaggtcagttaaatattaatatctcactttacagatgagaaatagggaattaaatcacttgccccacatcactcagctgaaagacatcattcagtgtcttaaaatggtaagaagtcaaaattccaactgagtgtgactgatttagagatgatatatttaacacctacagagcctgagcttggaatttctcctatgcgtat

SEQ ID NO: 44847 - DNA, 898 bp, Bovine  19866880939137
  misc_feature (1)..(1): n is a, c, g, or t
ntcaagagaaattgctttggctcacatgatattttttcagccgtcagtcatttcttggcatttgatcacatcattgtctctgctcccatcatattgacttcgttgtctgttattaattgaaggatgacttttctttcaaaactacaacaaagtgcacaaactctggaagatggaaaaaaattcacttttacttttactacctccttgactgtctggtcctgtccagagtcacttaccttccttactgatctacttcgaatatcacaaatagatacgttctgcttttaaagacatacactatgaaaggacacttcccatgatgtgacttcagtcacgacgtcttcaaatgtccttatgaaaatacaaacttaacaacaaaattcccttaccatgaagtgagaatactccatggtacgagaaataaaaactgataacctgtcacagcctaggtgcatcccacaagcataatgttgagtgaaaaccagacttacaagatgcacactgtatgcatcaaattatatacagtccaaaatcagacaagactagtcaccaatcttagaagtcagaggactggttaccactggaagcagtgactgggaagtggcaggtagactactatgctggtgaagttctgttctttgatctgcatggtgattattcacttttttaaaaatcccatcatgctacacacttgtagaaaccttttgcatttttgttgtgttttaataaaaatggactaatttaatttttttttcttttttagccttcaccaattagatgttaaagtaagagacaaggagactgtagggtgatccccaagtttctctcaggcattgctggatgagtgtgaagaaggatgtaggggaccctttttgaggggagaaggggtttggtttag

SEQ ID NO: 44848 - DNA, 673 bp, Bovine  19866880957041
  misc_feature (1)..(1): n is a, c, g, or t
ncagagagagagagagaggaaaaaaagagaaggaaagaagtcagcaggatttaaaaaaaaaaaaaaggctgataagaatctggtccaggtcttagaaccctgagttaccagtggtatctttcagctcaggagccggtgggggaggggagctggtgactgaggccctaggaccctcagcctcaggtcaggccaggttccagcctgaattttggcccaggaaggttctgagtcctgggttgcctgtcctgaacaccctcccaagttggcaaaaactcttctctcccagcagctagtccccgctgttcaggagccggatccccaagctgccatctcttgcgttcccaagatccctgaaggggtgtggaccctctggctgagcttagcaacctgcagccccagggtccaagctctttctcagtatttcaccaagcctaatggagactgcacatgtccccttgatgagtctgctcagggaaaacaaaaatagcacctcgctgcttttagcgagaattatatccactccgtggggctaaccctggttgccatgtgctgatccgcagctctgattagcctttgattaataaaaaatggggataggaatcaattatttatttaataacagcagtttgttttaaaggcaaaacctttaagaaagtggaagactctggggtgg

SEQ ID NO: 44849 - DNA, 1081 bp, Bovine  19866880974133
  misc_feature (1)..(1): n is a, c, g, or t
natgccagttacccagtaatctgttaatctagactctttctccaaaatcagtctcaggtctctaattcttgactaaagggttaaatgaatggcatcagttaagtatagtgctactcagttttcatgttatcagagaaatcttaagttataaaacaaaacatctagaggggaatcttagaccttcaactgaagtggactcatattgagagtgaaggactagaaaggccttgttaaacctcatcaggaatgtggtcccctgcctttcctgtgcagtcctaacaaccagcaaagggactaaaccattgcaacccatgtcacaatgtgctccttagcaatacacttgactgctgggtcttattcttttactttccctggactcaactttcccagatggacatcataacaatccctctttctcctgtcaagggtgtgtcctaggaacatttcatttattttcaaatcaagtgtcaaaatccttcagagaatagtaccatgtgaggttaatacgactgccttgtctcccaggaagtcacttctctgaataatacagtgaaattgactagacatttccaacggagaaagaggtgtctttgggttagatttaagcatacaggagaattaatataaagcagtgacggttcagaggccagctcacccctccttgaaatttcagtgactggaaaaattagcctcctgtttcttttctgttccctttttttaattataacttgctgaggcactagctaataccctttaatctcttttaataactaccctatcctcggtttctccaagcatccttctcaaggcatccacaaatccaagaatgctcttaagattgactgactgactgagctctcagccctgttgatttactgacatgaggtttatttctccagccctagctcagccgggatgaaatacagcaaggatgtgaactctttccagacccagcaaagggctagccctcaggaaatttgggagaaaggcaaagtgtagttttagctaccccttccctatatttccttaatgttctctctcttacagctctcccctctcctctttatcatcttccagcagc

SEQ ID NO: 44850 - DNA, 1343 bp, Bovine  19866880979489
  misc_feature (1)..(1): n is a, c, g, or t
ngaggcggctccagttaggcgagggtccggcccaggtgtggcccctggcctggggcacttagcagaagcccatcgtgtatgtggggggagggggtcctgcacctgtgcaggtggggcctgtgcagggctggggctacggggacctcgagcccgaggtttccgtggggctgcagggggcacagagcagccccgcagtcaggctgtatgggtatctgtgaggctgggccgatgggctgcaggctgggagtgggccaggcgcctgctcctctgaacacacccctctgcacgcgggaggcggaggcacttgtactggctctgggacccccggttctcccctcaggcaagaaagaccaccttgggacgggtcacctgtgagaggcccggggaggaaggacccaggcctgggcactgcgactattttttgctgctcccttattaccttcttttttttttttttctggttgtcaaatgatccttttttttttttttcctttgcagttcttaactagcggggcactccactgcgccactgttgatatcatctatgatgtcatgagggtggcggccatcaacattgcagcccacagactgggcggtccccaggatctctttaatggttctagaaagttctctagctagagaccgattccgcatctgccaggcaatgttgacaatctcatcaaaagtaatgtttccactgtgcttaatgtttttctgcttctttctgtcccttggtggttccttgagggctttgatgatcagggcagaagcagaaggtaccacctcaatctgggcttgtctgttctggtcagtttcattgtaatcctcagacccttccaatcaccagttgccttggcgatatcatcaccaaccttttttgtagacagacccagagggccaatcttgggggccagggcagatgtggcaccgacttccccaccggtgcacctcgggtacacgactgttatctcgctggggtcgaacttaggcggcatggtggaggcggctggtgtcagacgaacccggattcgggacgaccaaagcaagttgcacctttgcctcctcccagcccaaagccgaaaaagctagcgtatcctttttaataacacaattaaatcttttagaaatacaagataagaaggaactacctcagaagtgaatcttagtgaacactagactttaattaacaaaactagaaacttgctttagcaatgaaaaaaagttaatattcagtgaaacataatttttccattatgagggcattaaccctgtagccaggggaaggctttaacccatcaaataaaaatgaaggtttgtcaggggagcccagaaaagccaggcag

SEQ ID NO: 44851 - DNA, 1982 bp, Bovine  19866880988197
  misc_feature (1)..(1): n is a, c, g, or t
nacagtcttctgtgctctctttgcctctgtagtgtcataaaggataaatccctgtgtcccattcatcttagatcgataaaaagtaaagttgatccatttgagatgtccaaacaaagacagataaaaatctattggcaaaaaggtcttattaaagaaaaaaagaattattttcagctaatatggctttccatatggatgaatatggtctcaaggcatgaaagaggaaaaaacttctgtgttaacattggcctctggtcctatttcattattacagattatcttgactttactgattgaaacacaaggtatcctcaagtgtttaggtatcataaaaatcaggctggggccatgatctgtttttaaccagtcactgctggcaaagaaattaaaatttgaccttcacacaactgtttatttgaaagagagaaggaaacatagtagtagagaaagctgtcagtattaggaaatgtcgggaataagttaatagcaaccaaggtagaaacaaatcagaacttattatttaaattgactatttcattaaaacagaatctttaaaatgaaataaaaaccttacatatggaagtttgccatatcagaggcttaagatcaaagataacacagaattagagttaaagcttaatatcataaattgtttaacattaactactaagagatatattcatttaacctttacaaaaagtatgaaatactgtgtggcctataaatttaccttcttgccaccaccttcagcctgtggccccagtaagattgaactgccagatgagctcaattggctgtgatgcaggcatccagctctcactccctcatgataccacctgtcttccccagagggcagttgtgtaggggcagggaaagccatttgagaatctgtttgctaattaatttttaaaggaactgacaccagtgattggcagcagtcacttcaacatttatgcttagttgggacagttgtagtgataatatatattttttaaagtgacattttaaaccacctataatcctcccacccactgtacatgccactgtaaatattttagtctttcgtgtatttccttccaatccttttttttcttttacatcttatatacttctctttttttaaactaactttttctaaattgtgaaatatctggaagtttaaaagcaaaactcttctttgtgttgatcattcccatgagtaaataagaaacaggtaagtgaaaattagcagtgctaaataaaatcacctggatagacctatcagcagcgttgattgttggaatgagaacgtacatgtttctctcataagttatcttagagatgctatgatatgattgtttccaataaaatgtctcttcttttttcttctttattggatcaaaacacaaatttaatgcaaagtataaatcactactataaaatatatgcatattctaaacatgactcttaaatctgtccttaggatgaaaaaaatatgtattaaagttaaatcatacaattagaataaattgctttgtaaaggaaaaaagattgatcaagtgtaatctgcctggttaggagtactacaagacaaggtttgctggagtataccactcctatctgggcttccctggtggcgcaggtggtaaagaacctgccaatgcaggagacatgagatgtgggttcaatccctggatcaagaagatcccctggaggagtgcatggcaacccactcttgcctggagaatcccatggacagaggagactggcaggctgcagttcatagggtcacaaagagtcagacatgactgaagtgacatagcacacacacaccattcctatttgcccactaccgttctgctttgacagttttcagaattagaggcagctttgacaagccatattgctttaccttgtggccatctggagtttgacgtaagaaacttaagctaagctccaagcctctcttaagacaccaaaataaggtttgatttgcaccttag

SEQ ID NO: 44852 - DNA, 1471 bp, Bovine  19866881004663
  misc_feature (1)..(1): n is a, c, g, or t
ncctctttgctgctatccctgggttaaagctttgctttaacccatcagtgcacgagtatctccgcctgcaaaggaggaggcagccctgggagtcctctggctctgatcgacggccacccctgctctccgattgtgtcatgtgtgtgagtcatgtctccccagccagacagtgacctggccgcctgccgcagcagccacgtgctcctttcctccagagccccatggcccgagcgcacagtggggactcagagggagccactgagtgataaatggattggagactcaagcatgagggtgattgaggtcaacctttggtctctgtgtagacagtgcgctcctggagcaaattaacaggctggcaaacctaggacagtcacgtgcagcccatggaacgtgaactgtcaacatccgatgtgaattcaagcctccctgggtctgtgtggatgagcgtggcctggttctctccatggaaagcaatgctcacgcctcccccacattccccggtcacccacgtcagtgtcttttgagaacctagcagagtgtgagcaaacagggagaggagatattcctggatccttgcccttaagagcttttcatttccaaaagctagtcctttgtgtctaattcaaagctctcttgctgtaagagatgccactatgccggggacaacaaattactatgcccattagataggtggggagactgagtctgggggcaagtgattccctcaagatcacagaaggggctggtgcctaagcagggaccagactctttagcacccctccctccatctgcaagtgcagggcagagcgcctggcaggctgcttcaccgggggatggccgggcagtggtgactcctgtggcccattaagaaaagagttgttttttccctgctgccgccagcccgcccgtgaaacaaacaggatatttaccagggagaaaggaggagccttggctcccagtggcccctacccttgcactcctagtagctttgactccaaagccctgccttatgaagggcaccattcaaaaggcaaagctgctcctgcaagtgtcaggaataagtggggaagccgggagtggagactgaagcctgggggagggagcagctgcagccaaagaacgtgagaccgaatgtgtattattgcacgtgggagcatgtgagtgaatgtgtgcgagtgtggatgtgcgtgttcccgcacgtggggaggggtggtgagggagagtctgtgactaggggatgctgtcttttacagctcccctggtgatgttcatggccacagagaagcctgtatcctgccatgttttgtcaaggagactgaccagagccacccgcatgcctgactctctcaatgggaaaggctcccttgctttacttctccagcagaaacgacccacacgtgcccctgctccttctcgcttctgcagtgagcacagccaccctgcaaacctcttctggcttttcacggga

SEQ ID NO: 44853 - DNA, 2226 bp, Bovine  19866881039747
  misc_feature (1)..(1): n is a, c, g, or t
ntgcatacccggacaaaggagagcacagacaaggataattttttttttttgggggggggtgtctgcctccctgccaggctcccctgccccacctctgccctcgcccgtcctgctccagccttcaccctcctcacctttgcactggttattccctcacctggatgcccttcagcagactgcgggccccaagttcagacctcagctcctctggaggcctcccccgacaccctcaagccctcccctaaggctctcgctgggtcttgcacaaacctccatggtccccatgggtatttcaggccaaaaagacatcagaccacaaaagcacacggtttgacccagggggaccaatgactggagcacagggcaagtgggagaatagatgggagatgggctgggggcagacgggccgggggtccagcgagaggagcatggaggccagcaggaggggcagacgggggtcagaggacccgcgaggaggctgctgtagccactcaaatgacctgtgtggatgggccgaggccctggggtgcagagcagaagtgtggggtgtggatacccgtgcagagagcctggcacaggcccgggtgccagccggcggagaaacgagggtcagggtcggcaggagcaaagtcagaaggtggcttagctggagacctgagcgagtcgccaaaactccaggcctccacagttctcgcctagattgatgcctttcaggaccttggagaggtttctgccagaacaggcaggacatgcacagcctctgctgggcctcaggggccctcctgggtggggcccttccagactcgggggtctcccgatgtgctggggtccgggctctgtctcccccactcccttttctctctgtacctctgtcctgtccttgcctccttccacgtccatctatctgtctgtcgatcctctcccccggcccctgctccacacacctccctgcttttctcttcgctgcctccctaccctcttgtcactctcctttcaattaccataacccagaacagaagaatattttattatttggtgtctttattaaatcaagttttatgtcccctgtttttcatttttaaagtggatgagtaccacactatattttcccattaaaaagcaaaagctgaacagagtggtcaggatggccccaaggtggtttcacccacaggtcggttctccttgagaaggtggggggtgttctcctgggccacggggatgctgcctgaatcagaaaatccggagtctcagcacagccatggcaacatttccagagaggccctgggacgaggccctgtgcagagctgggcaccggtggccaatggagacggactgcagcataggggggaaggcctgggtgggccgccttcaccctggagccccggcctgggacctccaccaccatcacaagccacacaagtcagggattcagaagccaaatgattccttgcagcctcaaatctcagcacctggccccaaaaggcccaggggtttgctgggagagtaggtacatttttacctactcatggggaccaggatgttttctggtttaccttgtgtgttaccactcacaggcccatggaagaagcatcttcacggaggggtctcaaagttcccccagatgtaggtggaaatgtccaggtctgctgcacccccacgcagcccgatcacacacccctcagtctgcagtgacgcatctcccccactgtgaatgccaagccaggctgcatcctgtgagaccaggcttgttctctctactcctcaagaccttcagaggctaatcaccagactcagtttgactgtctgtaaaatggggcaagaacaccacgtctcctacagttatcgggaggggaattgagcgcttggtgtactgcctggaatgcaggaggtgctcagcaaagcttgggtcctcccctaagagtttgtcttaaaaaaaatctccaaacccacatccttcattccaatcaccatcctaaggaaggtccagtctccatcacccacctggtccatttgacatctgcaccttaaatcttagcaaaggtaaactcaagctcgtcacctccccctcctccctaatcctcagtatccaccctcctgataccctattactgtcaatgacatcactgccatcaagcctttgagtccccttagatgacccctggtccctcctgctcgtgacccatccccagtggtccttcccccgcccacctcattgctgtcagccgg

SEQ ID NO: 44854 - DNA, 595 bp, Bovine  19866881068883
  misc_feature (1)..(1): n is a, c, g, or t
nacctcctcggctctcgctgtccgccggtttcacctggatcggccggttcatctgtaacagagcacaggagggcagcattagagcaggcgcgccggcaccccgaggtgcgccggtgttcaagggacacagcacactgctcactccacggacgccgacacccacggccccagcacccgcgcgggacaaacgtgagggtctcactaaagccccgccccctcccctccccagtgcggtccccacgaccctcctgatttcaggagggtgtctcaggactgaagaccctggggtgtcccctgccagccgttagcggctcttgctaactgtgatgtcggtccacccaggacacagctggctttgccgagctgctctctggccgaaactgactcccgcctaggttggggccctgcagcgagtggcaccccacccctgtgccatcgacgcttggcggttggtcccaggggtgcctgaggctccgggtctcgcagttcccggttggagcagagctcagggctggggctccagacggcagcctggctgtcgcctcggtggggtgggggcggtatgtgcggggtgggcagctactcgtctcctgtg

SEQ ID NO: 44855 - DNA, 1671 bp, Bovine  19866881130809
  misc_feature (1)..(1): n is a, c, g, or t
naccctgctccttggcagtaaacccccgcttgcctgtgctatctttgggtctgagcccggttctaaaccgaagtcttttgtctcctattgcaacagtcctggaaataaaatctgtttttactgctttaagcactgtccagctccagttttattttgacagcccttctcaatcccaatcgggtttccacattgcaagatccaccttcaaccaacccctgaccttataaatgcctcccccttgtgagacagcattaaggccatgaggatgatgggcagtagacttggctttgcttgatcagtgggttattctgctagtcttttaaggagacaggctgaaatcacatggttttcaaggattctttgccatcttggagtccagaagatttggaatgtctggttctggggttgtaacatttctcatctgagactctaggattctgggatccccatttccagggttcatgctgtgtctgacctgagtcctgagggtcacccaggggtaggaggatgggtcaagattctactccagcaaggctgcaggccagatctttgatcttaaccacctcctccagggagcccccacccagagggctcctccctactgccttcaaggtgacctgagtcttcctgtcggtcacatccttacccatttccccccttcttctttcaatattttatttttggccaggtaattagcatagctcttctcattaatattatatttaaaaaagaaaaggtgacggtgggggagagaggaggttgggagggtggggcttgcacatgccagtaattgtcttgacagccggagatcccggtgcaatgaaagtctactttaagtggcccaattagcataagaaacggctcgccaaaagttctgaaggcatcgtgttgattaatgcaatttatcttgcaaaccagcggcagacagctgaatcgctgctaatgattattatatacatttatacacattatgtacatgtggttcctctccaagaagtggcgcctcccccctctccttctgcctgtgcccctggctcagtagacccctgcactcggctcccgctgccccaaacctccgcccaggtctccaaagtgtctcctgcgtcctcaactgccattgaccagttgccgaaatgtgattcgaagggactggttttaccctgagactgagcctgtgtctagaaaaagtattttcaagaagaactttcactgctcagggaaagctccaggtggccaaaggagtggtccccagattaagtcagactagcgaaaacagtctggacacaaagcaagattctaaaggcttggccggcggtgcagtctgaacaaggggcgtgtgctctctggtgctgccagtggccctcttccttcctgctcaaatgtccagctgtggactacgatcctgggttccacatcagggtcctgatagctgcaagggccaggccagggctctgtaggtggggggttgtgtctgggcaaggccagggcagaacaccaacgcaatccaccagacagaggggccatgacagctgtcagttctgagtgttcatctcattccaggaccgtcctcagagcttacacattccactgttcagtctcccaacacacctcctgctcgttctacagaaaagcagcgtggagcccaggcagcctggctccaaagctggtgcg

SEQ ID NO: 44856 - DNA, 1419 bp, Bovine  19866881143573
  misc_feature (1)..(1): n is a, c, g, or t
ntatattatttttacgattttgcccattttcaagttgcaagtaaacacactgtgattaaatcttaatatttttgtttgtataaattctataaatatctagaaaatttccataagaaagcatattttcaaagcttaaaaattctacttagatatttttccttctcatatattcttcaactttcaagatttttgaaaaaagaaatttaaaaatgtactcactgtataattttcccatcctcacttgtatattgttatgctttagaacagcaactactaagagcaaaaaaaaaaaaaaaaaggttgttgttttagggagaataaattgttattcaatgatataagaattaaaatttaagactagtttactgttggttgatgataaaactgtccagattcacaaagtttccttattttttttcttctaccttccctaggtaggaggtacagggcaaattgtccttccaaaacacaagtaaccttgcttaaactgtcttggctgcttttagcaccaagtaagtgatagaggtataattatccattatgaaaactagattcagatagtgtctttgagttctatacaatacataaagtcacaggtattttctacatggcaaagaaagataacaaaaaactacaaaggatgttgataggctgaatccaggtgatggtattatacccacctatattttaaaagaaaatatcaggaaattgggagttatgcaggtatctataattatactttctaatatgcacaaaaattgtgtattatttaaatagaaatttctacatgtataaaggattaataccttcttataaaaaatagagagactagctactcatttatttatagaggatccagatttagggggaaaaaaggatgcccagttacatttttttgaaaaaatttatggttgcgctggatcttcattgctgcacatgagttttctctagttacaccaagtgggggctactcttcgttacagggcacaggcttctcattgcagcggcttctcttgctgcagagcacagactctaggcacacaggcttcactagttgcagcatccgggccagtagttgtggcttgcgggctttagagcacagtctcagtggtggtggcacatggtcttagctgctctgcagcatgtggaatcgtcccagaccagggatcaaatccatgtcccctgattggcaggaggtttcctaaccactgtaccaccagggaagtcagttgcatttaagttgcaatcaaattgttgagtgtaagtatattccaaacattgcatgggacatacttatactagaaattattcattatctgaaaatcaaattcaactagacatcctgtattttatttagcaatcttacttactcatcctaaaagccctatgaaattgggttcatctttccccagttacaaa

SEQ ID NO: 44857 - DNA, 1963 bp, Bovine  19866881157045
  misc_feature (1)..(1): n is a, c, g, or t
naggggagcattaagtaaaataagtatttccacaaaaaaatctgatatttttatttacttagttatagaagaatagatagaatgtttattactgatttggaagtgccatcaccacaccctggaaaacttagctgctataactatcgttaaaatgctaacatttgaaatatttcagttaaatatagttaaaatgctaacattttaactcataccagctgctcaccatttaaatgcaatctagccttattcctaaaattgtcattgcctaaaaattggtcatcaataaggacatgaatttagttttcccttcatccatctttcgggcagaagtctccgtggttggtcctacccaccttccttttctggcctgtagatgtgcctgagagcttgccttaacgcacaggtgcaggcggtctcttcatctaagtgtctgcaaggttttgttggtttttttttttttttctgtcaaactctttgagggcattgggctgacagttctgggtcggactgagcttaatcttttcctttcaaatcaaattatggggaaaatgccagggaaatggctccctaacagctggcattgttcagaaatcaccgagcttggtgaatttgtaagataagtgtctaaattgtggggaaaggcagacagcttcccctcttgggctgatatccaagggactaatggctaaatgaccccgttttgctctccacacaatggcttgtcccagaagatgtgagaggctctcggggttcagtggcctctccaaaaatcagcctgcctaaaagctggtttagggtctttcctgctgcctctgctcccaatttagtaatcttataacttttaaaactggtgaagagaggagagggtagattctagccttgagtaatgtgaaatcattgaaacctccctatctagacactaagaaaaatggccaagaaaatagaaagtactcaagtactcataggacaaaagccaaaaagggagaaacaaattttaaaatattattggagagccactacattcacattaaatactaaaatattaaaattgattgaggttgtgaaataagtgaattacttagtcttccatgcattaaaattaatttttcatctccttctccaggccacttcccactggctcttgttgagccctcttaatattttatttgctgaaaggaaaaggtttccttttgacatattggtattcctggggttggttgactatctcactgccaactccataagcggatttctcagcaacaataaaacataaaaagatattgtatacctcctaaacttaacaaatttttcaacctgtcctccccaaaatacctttatccatgaaaccacccactttgcactttacatttccacctttctaattccctttcagcctctccaaccaatagcctcttggcaattcattaaaaaaaaaaaaaggcttaagaaaagaggaaattcgaggtcattgcatttgagctgtcacagccagcttttactttcctttagttgtagttccgggggaggagttggcctctttggggaattagagcagccactgcttgatgggccctgatttctggagttcaggaattcacatggtggatcctcttagttaggaggtgaactcaaagctggtacatagacatcaaaacagacacttaaagcagacaaatggtgcaaagaagtgcctgaatcactagagatgggtttaccagaatgttaatctcaaaaacctccacatttcctatctgacattcacatgctaaatttggactcttcactgtaaggaaagttgatacatgtaaggacagaagtaagaaacagaaacactcagtatctcttcacaatgaaatgggatttcaaactttcctttacatcctaatgttcccttctacatgatcgcaagagcaatatttttgcacgctgagagaaatttgaccccggtctagtctaaaatcca

SEQ ID NO: 44858 - DNA, 892 bp, Bovine  19866881184004
  misc_feature (1)..(1): n is a, c, g, or t
ncagggtaagaagttggaaaaaatatacaagttggataaatgctagtttgataagtgagaagaaacacaaacagaactgaaagccccatgctccaggtctaatctttaaataactagtcaggagagaaatcttgatttaaccagcctgggtttaccatgtgacttggataaagtacaagccagggggagtactggctaagtcagattcctagggaatctagaaagaggtttgaagtctatggatgatctttaaacactttgcatcagtcttaagaatgcatttttttattggtgagggtaaattttaggtatacaaataatgaagacatatttgcatgctacctcaatgaaatagatgtctatatacaatgtatacatctcagaaggaagcagaaaaaaaaagattagacaagtgtcagctaagccattggatctcaaagtttaaattactcaggtgactaggcgactcctcttctctggagctttatagtctcatctgtgaaaggaaggactagatgaaatcatctctgggctgtcttttttaacataagaatccatgatcatgaatatgtgcacatcatatacatgcatgtcaatgcactagctatgttatgaaaagtaatactataagacaatttcattagtaacaatattagttttaccagtgtgcaccacatttttcatccctaagactctagaagatgaaaatggtaaaagaagaaccttggtaaataccttgattcactaaagagattcacaacataagcttgatatttcttcagttttaaccatgctgagataatcccagtatctctattcttgcgttacagttgtaaagaaaacaatgaaaatcttcccaaagacttatttacatgtcttgaacacagaatca

SEQ ID NO: 44859 - DNA, 799 bp, Bovine  19866881198158
  misc_feature (1)..(1): n is a, c, g, or t
ntggtggtgctcaaggagcagcctggggcaggggccctatgcctttggggaggactgaggatcagagatctcatcaccaggccaagtagcccacccaagggcttggcttctttggtggacaggaagttctaccacatatctaaccgtaatcttgcctacttttgtttaggaatttccaagctgtctagtcactcagtcgtgtctgactcttcgcgaccccatgaactgtagcacaccagggcctccctgtccctcaccagctcctggggattgctcaaattcatgtccatcgagtcggtgatgccatccaacaagcatctcgtcctctgtcttccccttcttctcctgccctcaatctttgctggtgtaaggtttctctgttctggggttttattctccataacccttgttccttctgacttaaaaggatctctgcctcctttctctcccaggctgcttttaaaaagaaaatttaaaactccagaaaggtcctcttgtttacacaactgaacccaacagcagctgcatgaagacaggtctttgtggctggagaaggaagagtggctgttgggaaaaagggtccctagagagggcccccgtggggcagaagcacattataaatacctcagtaactcctgccataggtgcgaaattataattaactgcaaacctgctgagcttaaatggactttaggtttgcagctgggggaaggggtgttgattgatctgcattttgttgttaaagttcttttaatccattcggcaagttaagggagagtcgggctcctcaccaaattcc

SEQ ID NO: 44860 - DNA, 1182 bp, Bovine  19866881333635
  misc_feature (1)..(1): n is a, c, g, or t
ncatcgcttttttagatggtgcttcctagtttctggagtttcttcacgtgtgccctcaaagtggtttccacatcccatgtgcctaccatgtgaccaggtagagagcagagggatcctcaaattgtccacaaagagcagcatggctgtttgcccttgcttgtttaggttagctgtaccgctgagcgtgtggacacagcacaggcttgtttggttggaggtagaggacaggtagagcctatggctttggccagagggactgtcaaaagagtaagatatctgtggccattctccagaagtgtcaaaggcagtgtattccaggcctaagtgactcactcatttatttttccttcattcatcagctgtttaccaaatgcctactacacgccaggcactgcatgctgtgtgagatggcatctctctgcctcctgaaactggcagtcgggctgggatgtcacgggcagacagagacagtgcatgttagcaaataaataatttttatacagattctagtaagaatgacagtcaatagagaaagcctccaactactcttcacactgtttggattccactcaaccctacctgggtcagtgggtgtggccacctgcatcccgacacactgcccataatgcctgggttttgctcagctctccatcctcctccatctccctcactttctctatgtaatttgcattttaacgtgtgctaatgctaaatattttacagatgaggcagctgaggtctgaagagcacatggccagtgagtggggtggtgggcttggcttcgggctttgaaccccaccttgtccttctctttcaagtctctacccacctctcttcagtccccagagtagattgcctcagttccttctctatttaattttctttattatagtcaagacttcaattaacttttctctgtagaacgactgtattaggcaaaagtttgtgtgggatccaataaaacgtcagatgatattgagcctacgtcaggcagagcctgcagcgtgataagttattatgtgtaaatgttacaactttattttgaggagaatacatgtgtactatcaagctgttttatggatacacagcgtgattgattacagcacgcagatctgtcgcaacaagataaactcagatagaatagtctggatagttaggcctcagcagtatgttatcagaaga

SEQ ID NO: 44861 - DNA, 1174 bp, Bovine  19866881570802
  misc_feature (1)..(1): n is a, c, g, or t
nggcccagacagaggggaactctgttcctccccacctaggatgccggaattgtgattattcccattttacagatgaggaggctgagccattgagcacatgaggaacctgtcttgtaaacactgggcttgagaacctagttcttaactctgtactgcacctcctccacgtggggtgtaccaccctagagcttcagttccctggaaaagcacaatttggggcttaaaaagtaaagggatgagctaagagcagatggattgtttgttgtttattacctgcttgaaactgggcttccctggtggctccaacagtaaagactctggagatcagggttcaatccctgggtcaggaaaaccccctggagaagggaatggctacccactccagtattcttgcctggagaattccatagacaaaggagcttggcaagctacagtctatggggtcgcaaagtgctagacatgactgaatgactaacataaacacacacctacttgaaattatgacacttaggctccaagttaccaatttacagagtaacagcaagagaggcagtttgctacagtgaagggaaacactgaactgggagattgcgatgttgaggttttaaatcattattattataagaataacacacgcacatcgtaaagactgcaggggatacacaatgcaatgacattcttcctcccactcgagaccccatcccacttgtcagaaggagccctttcctgtgtattcttccagaagtatgtcaagtacagtcaagtaacgcaaacacacccacagacactttctgttgtggagactgggatgtgttccccacaccgtggtgcaccttgatgtctgacttcacagtccatctcggctctttccagatggacactcatgtggatccactgtatcacatctagtagctgtgagtattcagttgggcttttcaggtggtgctagtggtaaagaacctgcctgccaatgcaggagtcaaaagagacatgaatttgatccctagttcaggaagatcccctggagaagggcatgacaacccactccagtattcttgtctggagaatcccatgggcagaggagcctagccagctatggtcacaaagagtcagacaggactgaagcaacttggcacgcatgccaagtattcagttatccagatattcactaatt

SEQ ID NO: 44862 - DNA, 698 bp, Bovine  19866881893165
  misc_feature (1)..(1): n is a, c, g, or t
ngaactgtcctgggccacgcacagacgcacacccgcactcaacattcaaaggtgcccacacacgtacaccggggagcctggcatgtgtgtgtgtgcaggaagctccgtgcacatatgagatgtgtgtgtatgcataaacatacccagggaggtgtgcacactctggcacccaggcgcacaaacacacatgtgcatgcacgctctcctctggctccttttagaattaaaagggaaggttgctctacagggacagctgaagataaactcttgatttctgatttccagagtagtttggacaaggtcctctgaaatgcattaaaatgctaatcacagcatctgtctgaaccctggcagctgtgtgacttggggggaaatcaacgcagaatggattccgaagcctgtgatgactcctcgactctccttgcctcactccctcctttgtctcctgctccctgcccttgcctgtcgccccctcagccttcacccaacaccaacctccctgccatgtcatccccggcctgggccacaaggagattttgcctttgctggaatgtgggtcccagagtgtcacggctccgctgggctaacaaataaagcctccactaagatagccgggagccgaaagaaatggcctccctccacttgggcccacggctcccctgggtaccacctcatagctgccaggctccaggcctctg

SEQ ID NO: 44863 - DNA, 1870 bp, Bovine  19866880187904
  misc_feature (1)..(1): n is a, c, g, or t
nattttggagcccaaaaaaaacagtctgacagtgtttccactgtttccccatctatttcccatgaagtgatgggaaccagatgccatgatcttcgttttctgaatgttgagttttaagccaactttttcattctcctctttcactttcatcaagaggctttttagttcctcctcactttctgccataagggtggtgtcatctgcatatctgaggttattgacatttctcccggcaatcttgattccagcttgtgtttctttcagtccagcgtttctcatgatgtactctgcatagaagttaaataagcagggtgacaaaatacagccttgatgtactccttttcctatttggaaccagtctgttgttccatgtccagttctaactgttgcttcctgacctgcatacagatttctcaagaggcaggtcgtggttggtgcaaaagtaactgctgtttggcatggttgaacgtcatcatttgatgtcagaatacattcttaaataaatgtagttgttatacatcattttaatccacatttcttgctttattgctttttgtttttcgctaatgacttattacttgctgtttatatttatttgatgtgtttgagccttgttacaatgatttaaattcatggtctaaaacatttgtaactgcatttggtgcagttacatttgcaccaacctaatatctaattttttaaaatgcaggtctactaaggggcctagaactgcagttgaataacagtgtctacttctctacccggctagggggaggggtggtctggcagcagtaccacacccccacatggtgtctctctgagcaaattctatcgtcctgctcctattcattctgctcctgcattatcagggttctttctccagagaaatagaaccaataggctctatacagagagagaaagggactgattataaagaactggttcttgtaactgtggagcctgacaagctccagtatctatagtcagcagtctggagacttgttgagagctgatgaggaggtcctgtctgaaggccagcagcctcgagaccaaggaagagccgacatctcagtctgagtcccaaagcaggaaaaagctgatgtcatggcaggctggaggagtcctttcttattagggaagggtcagcctttttgttctcttcaagcctttagtgaggggtgaggggtgaggggctcccatcctagagggggccatgtgctttcctccatccaccaacttggatggtaacctcattcagaaacagcctcacagacacacccagaaatgtccaggcacccgtatttagtcaagctgacacagaattaaccatcacaacacccctgtccccttccctaaataaggcaccaaccttagctcctacaagatccaatttaatttagccttcattggtagagaaatataagaaccaaaagagaaatggaatttcaagatgcctgtaaatgcctctctgaggcgtacaggtagatggaggcccaaagtcaacacactccgctgcgttctgtcctcagcaggtcagttggagaaagcacggacgaagttatagtagtcgatcttgtcttctccgtgagagcacattctgatgagctgcaggggagagacaggaggctgctttcagctctgcagcagagcctctttagtgaccgccccccacactctaacagctcaactgtttataccctcagctgatctgacatgatcttgggagccttccccaatcttaacgcttcatgaaaagaaagctcagatggtgtaaatggcctgcccgaggtttcaggtctaacatttataagaatactgtcattttcaaagcagtttgttcttatattcagttacaagactatccatcagg

SEQ ID NO: 44864 - DNA, 1242 bp, Bovine  19866880553541
  misc_feature (1)..(1): n is a, c, g, or t
ntactggagtggggtgccatcgccttttccgagatgaagcacaaatacctttatttttggctttccctcccttaatccaatccaatggtttccaactgacctgtcaaagcatcaaggactcctcaggctcagcttgtgcaaagcggaggcccacttttcctgtcttataactgtttttttctctgttgttccatatacatttttttttaatggtcccactatcatttaggtcattgcctggaaaattccatggacagaggagcctggtgggctacagtccatagggtcgcaaagagtctgactcaactgagtgactgagcatgagcaccagagcctaaagttttgcttcctccaacttctatacatcatatattaaagcaaacaccaaatccaatgaattaacccttgaaatgtccctgaaatcatccactgccttttcactcttatcaccaccatcgagaagggttcctttttttttttcttgactaggctgttataatagtttttcaattggtcttccagataccactctttttaaataaaaatgatctttatattcctgatggtttctctaaagagagattcagttatgctaaaaaaaaattcccactgtttgcagagtaaagtcacaattctctcttttttaaaattttcagttttactaaggtataattgacaaataaaattataagatattcatggtgttttgataaatgtataccttgaaaggtacaattctttatcatggcatttgaaatgcattacaatctagttccatcttaagtctccaaaatttatctcacactgctcttctgcagtctctattaataaaatagagaatggacctactgaaggtccagcctgaacgtcctcttcccaataccccaaccagaactaagttgcctttcctttgtcctcatagggtacatattttaaactgttcttagagtcaccatcatcacactgaattgtaacgatgcctctgtctcttctaatagattgtaagctgcagcatacctcttgctgtataacaaataacaaccagattcactgacttaaaacagcagatgtttattatttcacagttgctgtgtgtcaggaatttgggagtggctaccttgctggttttggctagggatatctcatgaagttggagtcaagaggtcagccagggctgcagtcatctgaaggcttgatcagagctggaagatttgctctcaacagggctcatgcagaaggttg

SEQ ID NO: 44865 - DNA, 1976 bp, Bovine  19866880657258
  misc_feature (1)..(1): n is a, c, g, or t
ntgcttttgaagacgttcctctgccagcttttatagttcctgacttacgcgtcttcctctcctgcctctgacgtggcccatcagtggtgttctaaagaaatgagtcaggggaagccgagaagggctgtctctggggtgcccttgttctgtgattggatttctacccgcatttcagtgatctgaacaacagaacagagatttggagctagagttcctcctggtctacctgaagtgtcaaaccctctcctgtgggacgtaagggttcctcagtgatccttacttattcccttggcaaaaatgtgacggccagaaaggaggtgttgatcagtgagtgagtttttaactctcaccacaggataatgtgtaaatgtctcgcactgggcctggcatgcaggcactcagttgatggtctcagcaaccacgctggtctctgttactggcgtcccagttgggcgtgtgagcacaccttccgccatcatgctggccccaatttccatttagatatgacctatttttccgtgagacatttcccccgagttctccagtgccagccgtctgccccaaaggggacaatcacaataccccaggtgcctctttccccggagaacatcagttgtccctcttccatccatcttattgaaaggtgggctgggggtactagagggtctcagatatgtggttgtcagctgccctgccagccctgaccttgccacttccctctcgcctgctttgtgtctgcaccctccggctgctgcttctccggaccactgtccagcccagtcacaacagagcgccttagtcctgcctgtttgcagagtcccatgtgttgctatggagaaaacttcagtctggcaggcatgagctccttttttgatctgcttcatcgtgggcaggggcaccagaaatcactctatggcagatgtatcccccgttcccaccctgataaatgcctaagctgaagggttgataagaggggattagagttcccaaactacagaagtgctttctaatcaaccagagtgcttttagcaggccgtggtgggaaacttcactgatatgatctcgtaacctttttatccagctctgtgtatctggtgtccattggtacctaatggttaaagaaaaaggagttaaaaaaaaaaaaaaaagctggggggagaaagcagtaaagctaccaccacgggtcctgacacagcccttctcatttcacgagcacacctttatctcatatacagcttcgacttgctccctcgtctcaggtgtctcgggtggaaagaaacccagcctagcttactcacagctgggtaacgttgggggttgactgtgaggtttaaagagctttgcaagcgggtctcctggaccgtgcaggttcacgtagctttcctgcacgaaggaacggagcccggtcatcatgagtgggggcctgggaggcccctggagggaatttggggacatgcagggttaggtgaggtgctgctctgtggttctccacccgagccacgttgcctctcgacagcttccctcatctgtctcgaggggttggcagcagtctccatctgtgaaatgctttactggcctcaccctgtaatctggatggtttatgggggttgtcatacccatccagagcctggcttctagagcagagacttggccaaggaccatcctctccgagtcagagccaagacaagaagtcagccccgtctggctcacacttagagctcagccctgatgcttccatgaatggggcgtctacggaatgtagccaagggctgctttatttttctttgtctgagtggaatccgtttattacctggaagtaatgtctggaggtcattgttccatgtggagacttttcttcctggaacagtcattgcaatttgcgaatccctgatagagactccagagagtaacccgaatatgtgtgtcatatgtgaccaagggtgagtgggcagaagctttacctcctgttaaagtca

SEQ ID NO: 44866 - DNA, 1568 bp, Bovine  19866880901658
  misc_feature (1)..(1): n is a, c, g, or t
ntgggtggtagtcatgtatgatttttatcttatgtttacctgtattttataagtttcctgtgagagtcataaatgtactttggaaaccatttaaaactaaattgtaaccaatcacacacaaaaaaatactatacgactctacttataggaggccctagaagagtcaaatttatagcgacagaaagtagagtggtagggggcaggggtggggcaggggagaatggtgagtcacttaagagctacagagctccgttttgcaagatgaaacagtgctagagatggatggatggtggtgaaggaacttcataccactgaactggtacactttaaaataactaagatggtaaatgacatgtgtattttatcccaattttttaaaaaaccaaaaatacttttaaaaatgttaaatgcataaatcataagtatagctgggtccagagttgtcctagttattacaattttcaagagacataggtacataaggtcaaatttgaccctggaccacatggcaaggagcaagatggtccgtgagcccaccaggctggcatgtgccttgggacgacctggccgtgccatttcctgtctcttccgtcatgagtatggtgttttctccctctccaaccagctctgattctagatgaagggctgagtaagccgtccccagggtgtgacttcccctagagcctagctacagggactgcaggggcaggcgagtctgggagagacgccagccatgtcctgcagaggccacggtttaagagttttgcccccaaagcccttcaggtagcctctggtggagccaggccaagaaaggaatcttacctccatgtccagacaactcaccacctcactgcaggatgaggagggaggactagattcagggaagaacgtgtccccctttattcaccaggagggccccagagatgcccacccagttcctggaggtggacctcagaaccccaagcttgcagagcccctggctgagcactgcatgtggccgacaccttttcagcaacaggaagtgggatgctgagtctagatatccaaaatgatcatacatggcacaggaaaaggaagttttccaagaactttggggttaacagggcccgagaaagatagagaccagtactttccttacctgctgtaggcatgctaacattgtactgaggtaagataaataggaaggcagtcttggcggtgacctgtgaaacagagggaaaagttccaagttagcttcttggccacatttaaaaaaaaaaaacaaacaaaaaccaaccagcaaagcctgcgaccagccctggagtccatgcctttcacattctcagatccacaggcctctccaatgaagggtttcacctggagctgagttagcaacgtttgtttttcttccctattttctttaatggcatccctctcaatacctgtactgaaaacaaacgaaaccaccccaagtcctggatggtatctagactggtgctcgctgcagacagaatgcgacaaggtgtgctccacccaccggcagagagctcaaaggcaaaggatacacatttgtctgtgcatcattcatt

SEQ ID NO: 44867 - DNA, 1967 bp, Bovine  19866881302623
  misc_feature (1)..(1): n is a, c, g, or t
ntcatggacaggggagcctggcaggttacagttcatggggtcacaaagagtcggacatgactaagctctcacgtacactgggcagagtaaaacttaaatcaactgtgctaagcaggagggctcaaagaaatctgtttataagagtggcattcaaacagcaaagaaagtcattcagtaaaagcaattcgtaaaatgcaaataccatattatttttaaaaatgctatgatgggctgtgcatggatgggctgtgcacggatgagctgtgctcgggtgcttagtcgctaagttgtgtctgactctttgggaccctatggacagctatcagtgggattctctaggcaaggatactggagtgggttgctatgtccccctccagggcatcttcccgacccagggatgaaactcaggtctcctgcactggcaggtagattaccacctgagaagctcatgacaggccacaccatagtataacatagttcaagcagcacatctccacttcattggaccacagagttttctttcgagggggagaaggagacagtagtctgaagtcatatgatctttgagaaggggaagaggtgagaggtaattctgaggcttgatcacttgagggagcccagtgaaccatgggctgagggctcagagcccaccaaggagaaaacctcagcaaacgtaccccatttccacatttcttagcagtcttggtggcccaggcagcaaatggtgtatctggtgtggcgtggatacatcaagactatatataaatatatatgaaaatgagagacaacagaaaagcagctgcctgatgatggcttgtgagggtcacagaattaattagtattcatgaataatgaacactgatggagtccttgatatcaagctctgtgaaaatgctgtatgtacacgcactattagctcacaaaaaactcaatgagataagcacaattattttcattcccattttactgagcttgtgtggggcacagttgaggatcttaaattagtgaagtggaggagccggtaaagaaccaggcagtgtgaaagcaacgtctgcactcccaagctgtacatgctctggggtatttacaagcccggcacgacctggcaacatgacgttgggaaacagggtgcccacccggatggcaagggcagccgagcctcacaccagcagtctgttttccaggagaaggagagcctgggagtgaaccatcccaataaacccgcacaagaacaccacaactgcctttcacttcccggaggtctccatggaaatgcacagaaccaattgcgccctggagccaggcctctccgatctgtttggttttatacatgcccctcatctgggactttggccacgtcaccatggtctttttttttttttttagcagtaaagtggagcgaaggcacttgggactaatcacagctgaaagatcgtctatttagcttcagcgtgctgggaggaagggcaaggagactatatttgggcaaaccgttgatggggggttcagtggagtgctggctttgggttggcagtgcccttctcccacccgcgcctgcccccacccaagccatgtggctcgagcacttggctctgacacaagcacatccctgaatcctccctggggctccgaggagcagaggcagcaccgccactccaggaagtgatgcagtgagaaaaccagcacggagccaacaggaagccagggagccctgcagcacgaggtggtaacgtggcccccgccccagctgcagaagccccccagcgatcaagctcagacagagcccctcacaactctggccacaaggaactgtgaccactggttttcctatccctcctccacatgaggcagagcactccacgtgagtctcaatcatctccaggtcccaggcaccttcaatcagcaggggctcaataaatatttgagcttccctggtgactcaacagtaaagaatctgtctgccaatg

SEQ ID NO: 44868 - DNA, 864 bp, Bovine  19866881349206
  misc_feature (1)..(1): n is a, c, g, or t
nctgggggcgctttcccttctggaatgtgataaaaccgccccacccgactggtactttttcttcagttactgctctggctgtgggtgtgggcagggaacatgaggagaaaggacagttacttgctcaagcccagttgccctggactgttttgaactggaagccgtctcagggccccaccctggcacggggcagagtccagttttcgcagaccttagttggagccttggctgtgccctggtctccaccctcaactagtttttatttgtttggccttctgtatgagcgagggaactaagacattgtcagacaggggaaagaatattgaagtctagttaccagctctattcaaagctcattagtagatgagcatattctttttattagcatcctcaccaccattctagaaccaattaaaagtaaagcctgggactagactccagcagtggcgtgctggagctagctcaaaccagttgtgaacctaattgttaagttttcaggaactttgcaagcctatggttaaacacaacaattactaaagattaatttatatacaattaaaatagaagcaactagatttaaaacaaattttaagaaatgatcaaaacttattcacttcttaaggattttactgtatttgctgttatccgtgttcttgaggttgaaaaaagagtgaaactgtcagttgctcagtcgtgtctgactctttgtgaccccatggagcccaccaggctcctctgtccatggaatcctccagggaagaatactggagtgggtatctgtgttcttgagattattcacatctattgtatctgtgggcttctctggggttcagatagtaaagaatctgcctgcaatgcaggaga

SEQ ID NO: 44869 - DNA, 1658 bp, Bovine  19866881545520
  misc_feature (1)..(1): n is a, c, g, or t
nttcccgtggcaggtggtccacgtggtagcacagtgttcatcccacttatctttgtagttttctctcctactcgtcggagaaaaagtccggtaaacataaagcaaccatccactgtccatgtaagtgttcccaggtgtcagcatggtgcttggcacaccgagtgtctgatcagtgcctcctgattgaatgacggtgtggagaggggcacaaacgtaaacgggcggggagacctggcccactctgggtcccactcactttaagaggtatgcgcctgctatgtggaccaagtacaggcagatgtactggagctgccgcgggatctcctcctgcaagagagagacacagatggcacatgtgccgactccctgagacgcaggagcaggggaagaaggcgcaggcggagctgcagagcaggcaggaggggtgcagagcgatgctgctctaacacaggcagacgggtgcccccagagacccgtgcaccaggctgtacaaagtccaaaggtaactcgacggtcagagggcgggcctgggttgaaaaaggagagacagggactggggaacaagggcttttggaaaaaagtcagagagagattacaaaaaaaaactctgtggaaaaggcaaagacctctccatcagctcccctgaagatgagtcaggtttcccccagagtcgcacatcctctggggggaggaagaggctgatctggcagtgcccccccgccaacaatcctggaggatgtcagggagactctgacaggcgcttgctcagcatctcacccaacacacacccatctccaccccccatgagagggtagccagagagaggaacagcaggaaggtagggggacaggtggtatcagagaggggcagcgagtactcaccttccgtaccttctggaagtagagctcgggaagtgcatgcagccagtaggccagctggcacaggtagaagaacttcacctggaagctggagacaagggggccagtcacccagagggatggagagaagtccctaccagggcgggcgggggcaggctgtgtgaggagctgggctgagggaggggcgggtgggggagagctgggttgctgggaggggcgggttggggagagctgggttgcagggagtgggggtgggcagctggcatgcactagatccctgggccaggacactgctccacatgtggagggacacaggaagcccatgaaaagacacaagaaggatgaaaagagcagaggacaggggtcttcagcccagaggaggaaaggctaaggagaggcctgattccagagccctgtcagggaggaggtagtgggcagcgggtatgtgccaaggaaggcaggggtctcagccacagagggtggatctaactctgctaagtctctggggttgccgttctaaggatcttaggagagtctgagagtcgtctcgggggcatgcgggcccagctttgccctcttggtatcccatcggagcaggagaggagggggtgctgctcagagaggcacaggtgtggatgtgagcaggtgccaggaggcgcagcccacggagctccaggcagtggctctgcttcccgctccctcccggcagtttaggaacccgctacagacccaacacttgcggcccctacccttgaaattcacatttaaatcctaaccccg

SEQ ID NO: 44870 - DNA, 1437 bp, Bovine  19866880385141
  misc_feature (1)..(1): n is a, c, g, or t
naaaacctgttttccttgaaatcgtctctatgctaagaaggttagggactgctgttttaaaggaagaggcgggagtaaggagggaggtaggcaggggcttagtagggtcgggaaattttaaaaatcgcaaaaagtgtgaaaaaggggggtggtgcatgtgaaacccatttggcctagtttgctggtgcttattgcttaccacttatgaaagttccactttatttctattattattacatcagctccacttcaaatcattaggcattaggtctgggaggttggggacccctgctttaaaacacccagccacctctgtacaaagtgaagttgagttcagtccatctaggactcttttccctaatgcctataatattactgctcagaatcttccccctaccagaggctggaagtcagggggccctatgttcagattggttggaacaaatagtaaattctttggcagccttgagttttcttaggcaggcactttaagggggactagggaagcagcttgagctgttagaaactaggtgagcgttttttcaaatatctgtaggctaaggttgaggccaagtcaggaagagggctcagaggagcctggctaaagtttgatcatagagatcatctttatcatgggagagagacagtaaatgaaataaatttaaaaataatagaggtgataataggaacttcccttggtggtccagtggttaagactccaagctcccaatgtagggagcgtaggtttgatccctcgtcagggaactagaacctgcatgctgtgtgttttgaattagagtccgcatgctgcaactatttggccagtgcagccaaatagatttttttttttaatccactctcttggggggaaaaaaaaagatggtgataataaagtgcaagagggacagggaatactagggtggaggtgtgcagattgcaaccttagatacgatagtcaagacgggcctcactgagaaggcaccatcggggaaagctctgagaagtgatggtgagatgttctgggcagagggaacggacaggatgaaggctcagaggtaaggatattttctgcgtctgaggaacagaaaagaggcctgaaggatagagtgagttgggaagagcgatagcagcccatgggcctctatagactatttcactgatgtcagctttttctctgagcaagatggtaagtcagcagaggactcagtcagaggggttccatattctctgatgaagtaaatgtggaaagcggacttggggagacagctgctttgtaccaatatctgatgaagagtgaggccacagatctgaccgggctggggtgtctgcctcttcttttccactccccttagttaatgggcagtgagaaatggaatatttcctgccatattagtaaacagagaatgccacagttatcagagtttgcagtcatcactg

SEQ ID NO: 44871 - DNA, 1589 bp, Bovine  19866880443358
  misc_feature (1)..(1): n is a, c, g, or t
ncttttcaccttcatgcactggagaaggaaatggcaacccactccagtgttcttgcctggagaatcccagggacaggggagcctggtgggctgctgtctatggggtcgcacagagtcggacacgactgaagtgacttagcagcagcagcatagctcacttagcacagcaagacaatcaacaccaacaaaacaatctacatcctaaactagaaagtgggaaggcaagacactgaagattctaagcacccaccaagaagtagacatgtgaacaataatgttagaagccaaataaaagggacgccagagatgaccaaggtatctacctggagacgatgagaggtcctgcccctaggtctcaacagtttattctcttccctgctagatacaccatctgcttttctgttgttcacaagaagatggctggcaagaggggacacatagagaccttagaaggggaaactgcatgcacttatattggcaacttgttattaaaatagaggccctcagtggtttcaaatgatttgtcttctgtgattcaagcatttctgagcagtgtcattcagttctcctgactcctagtaagttatcaaacattaaaaacacaactcaaaaggtccaaagaaatttcctttgcatacacccacattcatacccacaagtgcctccccaacacatacttccacacattcaaaaatattccaactcatttagaggaataattcttttgcaggcaacacgttgaggagggaaaaagcacttagaatagcctggttattgcataaatatcttagcaaattaatttttgctaatatgtaaatgactaccacctgagtcttttcaaaagagtgctaaaaggatcctgacacagggtgtcacttgctgcagaaagggttgtagccaaagtggtttgaggatactgaagaccaaacacccttgccttgtaactgtgcagcaaatgagcctttaatatggagtgacacagggtagcttgctgttttcagaacttcttaggccacattccctggggccacttctacacctgcttggcactgacacccagggagctatacccaacaaagagaacctacagacaatgggttatgccttagcctcttcatccaatcactcaagagattattggcagagaagtgaagtccatcaagtttagcttctggcccccaattttcccctcctgattctcccagaatcctgccccactctggtgttttttcttcttgctctctgccatctggctcccagttcttgctgttatttccccttctctctgttaaaaccttctatcagggtggatttggtgtcagtcatttaccctgtgggacagtgcagattggcttgtcttaacatggctgtctagttgtagaatgaaaggttttgtttcctattgcaggtttcctagagcttaacctaggggtgaggttaggtgatgggaaatgtttctgcgagttcctgaaatcaaaccctgcgaactctttactcataaccagtccactaattgaagggtttgaatatcaaagggtttggaaatctgattagttggtttttccattctcttcagacgctgactttta

SEQ ID NO: 44872 - DNA, 4296 bp, Bovine  19866880474405
  misc_feature (1)..(1): n is a, c, g, or t
nccttgtaacccagtggactgtacctgccaggctcccctgtccatgggattctccaggtaagaatactggagtggtttgccataccctcttgctggggatcttcctgactcagggatcaaaccctcatctcttacatctcctgtattagcaggtggattctttactactagtgccacctgggaagctcgtgctccataggcatatgggtttaaatttcaatccttgtgctaccactcatgaagtgaatgtcttttctcttttttccattgacccaagctgtataatattttaagcctcaattttcttatctgaaaaatggggctaaaaaatactaatctttagggtagaatataacacacattgtgtatttggtttagggccaggcatagaggaagtccctgatgttttaatagctgccagtccttttctgtgctaaggggcattatgttgagggtttcatgtgctcccaggcccactctccatgttcttctaccttttctggaccccagaatctgtcctctttggacagtgacactgggctcccttgcctctggtcacctgttgggtttggtcagtgggaggcactggctgaagattggaaggagcaagaagagaggcatggcatttatttcctcctccacttcttctctgccagcttcagggagtgatgcttgaccaaggggataactcatctcaggctgcccgctctgtgagctacagcttcctgtgggccaaacacactcctccccatctcttcaggcccagcatggtgacagcacccaactgttgtgaacccttggggattgaatagtcctttgttggtttccctttgctctctttcttccctttgtaaatagtttattctttaagccctcttcaaccacccattttgaatataccgtctcctttttgctggctttttgaccaagtacacgttcattagctcatttagtctttacctcaactctcaaataaataggaactacaatcattgtttacaagtgaggagactgaagctcaaaacatcaaataacttgaggacacacagtggcaagaggtggcatatggaccttgggaaaggacatgacctttgaacattgctttctctccttggtcacgttgcatctgcactctcgctgcaatattagtttaccctgcctgtctttcccctcacctccaccgttgatgcctcttccttcccataaagatctgtggaagcccaggagaccaattcttaccagttctctgggcactcagtggaaggctgctggagactgagatctccggtcagaactctcccagtcacaggaacttgctgtcccagaatctcaagacgtggaaaagaaaaagggaatatggtccctcgggttttcgtcctgggggatgtacagtgattcactcaccagcttggaagagggccttcttccactctgaaagaaaggagacacaaaaaggaatgctccttaattctgatctttccctcacccattctcctcactgagcttttctgtgtccctttcttcagtctcttccttcatctacagcttgggtaaatcaggcataaaacctctcaaaaatggtggattttcttcactctattgtgctggggctgcaggtgacatggccaggctatactagggctgtgtgtgggtgtgtgggtgtgtgggggtgtgtatgtgtgtgggtgtgtatgtcggcagggcagggagtggttaaactgcccagacactatatctgaaggtcctctctgaggctgtagaaaagcagggatggtactccccacagaaaatgagcctctgggttagatctgagtattcctactgcaaatgccagtgggtcacgcagcagggaaaaggtttaaatgtttatctacctgtgccaggaaactcagagaacatccaggtcactcacctggataggtttgagacttctcccccacctacaatggaagaaaggtagagacattacctgaactctgtcatttctgagtcctttctttttacttttgcctcatctcaccttctttttgaccactccacccttcctaccttctgcctgtgcctgttcaactctcacctcccctctcttctttagggaaggagattgaaggcccctttctctattaaaaaagaaaacactctctattctccctaccaaatacttccccctctccagtcacccatatttcttctcctgggaaaaaggatccagaacatttctttatcccagtgaggaacctggctggaaaatatatgggcagagacagtcttatatgtgaattcagagaaaatgtcagagccacttacgagttatgtactggacctttctccactctgaaatggaagaaaaatggtgagtcattaagttgtaagtcataggaagatgagcataggtccctgggggaatcagaacttaccgagctcatactggagcatctctggaaaagaagcagaaaaaaaaaaaaaagtactgttatcggggtggaaggaggaggacctctagaaaataaatcttaaagatgaccaagtgctgggttgggtgcgagaggtagggatggggtgaggtgatccagctccctcctgcaaaacaggactccctctccaggtcagataccttttattctttgttcttgctccttttctgcccaagctgtttctttttcctttttcgctctttctttctccgtgaatagagtctctttttctttcctctgtagacacaggaagtaaccagctccagcaagaagcagcagagagaccgtcagggtccctgcaaaggcaatgatccagcgctgggccctgctgaagaaggggtctgcaatgggatccaggcttagcttctctccctcaggacagggttcatggcattcatctcctgatgttaaaatctttctcttcctaagttctcagagacctttaggtaagactttgggaagccccgcaaaggttttatagatacaataataacataataccagaacttgtcttgaaatgtctgtctctcacatgtaaatctgttatgtaagcatcataatcaagtttttttcttcttaaaatttataataagttacatccacatggttccactatcaaataaatgcacataaaacattatccgagtctcctgtccactcatacaagttttaatacacatttctctagtgagtgaggttggacactctttcatgtgttattccttttctgtgaactaataattcatcctttgctcttttttctactggtttgtactatattttaatgggattagcatttactctaaattatgagttgtacatggacccacctgcccccaactttgtcattcgtctttgcttaaggatccaatcttcgccatttctctccagttcccattgcctgtcaccattcctggcacataggaaatgctcagtaaatccttgtgaagtaaacaggagaaaacaaaaaaaaacctagttccattaaaggctctggaactcagctcagtgactcactttcactgtataccacagagacacacacatccccctttcatttcttttttcaaaatttattacatttttttgtttttatacttttctcttttttaatatggctatactagatttcaattggttaatgtttaaattgtcattttgtctaattttctatagattaaattttacatatgtctcttttaaggaatttttttaaactgaagtataattgacttccttatattatattagttccaggtgttcacatccttcttcttccaacagccatggctcctcacagtacacctgcaactaagcagggtactcacttgcaatggaaatccgggctgtcttttcctggttgaggaggggatttctgatgatacaggacaccccttccccagagccacctttcacaattacagatgatgtgactgcatacaggcccgctccatctgcagccggaggtgccgtcacagctggcatgttctggccctcggcatctcaccactgaatctggggctggggataccagctggtggacttgcacccctggtggatctctccattctcatggcccatcacttgaatgtgaaggtcagagcccagtgctgtggaaaggatgaatgagcctcagttcttgggagtgtcctgtggtgagggtctcaacaggagttgtatggcacactcagataattaaactcgagttttctaagaaactgtttgcaaaagggtggtcataatgaggagaaaactacgtggaatagagcagtactccagggccaggaacaatggagtgttaccacccacccctaaacccaaa

SEQ ID NO: 44873 - DNA, 1347 bp, Bovine  19866880736476
  misc_feature (1)..(1): n is a, c, g, or t
ncattgggtggtcaaagtattggagttttagcttcaacatcagtccttccaatgaacacccaggactgatttcctttaggatgaactggttggatctccttgcagtccaagggattctcaagagtcttctccaacaccacagttcaaaagcatcaattctttggtgcccagctttctttatagtctaactcacatccatacatgactactggaaaaaccatagcttcgactagatagacctttgctggaaaagtaatgtcttcgctttttaatatgctgtctaggttggtcataacttttcttcttccaacgagcaagcgtcttttaatttcatggctgcaataatatttaggtcgtttttgaaaactatagatcaatgttggaaaaaatcactaagtctaagggtctcttatactttttcctaagaattttattctttttgatactattataagtggaatggtattcttgctttcttttttggttggccattactaatatatagaaaaactgaattttgcatatgaccttgtacctgcaatcttgctggagtttttaaatgtctacggtgactactaaatcctgtgaaagtctttcccttctttaatttttgtactgtataaattcctgttttccaagcacatatcctattctgcagaatataacttggaaattgcctgtcctttcctcacacttgaattatacattttacttctaattcagagctgaaagatcatcacatggattacattttttgtttttgggttttttcctgtttaggattctggctcttcaggaaaacttccttctccaatttaaaatggatgtaagtagtgacacttctccggatgggtttgtatcatttatgtttctccacagatttcagaggaagggaagatgggcatgtaattctcttaccttcagtttagagactgacaaagctcagtgctggaattaaaagagattaaggattgttgactcaaagtttataaaagttgcctaagaccctggaggaatggtaccacagaagtttcacattactgactgacatactactttctccatacataggcctgttcctctgaagaaagaaaaagggactttgagaaaatctttgctcactatgatgttgtaagtgtgcctttttgatatactatgctggccatctttaggtaggaagcttgtttagtccctatgtggtgtcatcctactcgcagaccctaaccttgtgtaatgaacagcaatcacacatgtgtgttgctacgtcaaggcacccttagcttctctatagtaaaactttgagaactaagtacaaacagacataagagtattaaggagaagagaata

SEQ ID NO: 44874 - DNA, 803 bp, Bovine  19866880790012
  misc_feature (1)..(1): n is a, c, g, or t
naaactaaagtggttgcccataggggcttccctggtgggttcagtggtaaagaacctgtctgccaatgcaggagacccaggtttaatccctggtctccgaagatcccctggagaaggaaatggcaactcactccagtactcttgccttggaaatcccatggaacctggcgggctgcagcctatggggacatgacttagtgactaaataacaatgaagttgcccatggaatcttgatctctagcctgcattctcagaaggcagcagttctctggacctcacagggctctgggcaggctggtattctctgggctccacgtccctcaccctcccctcccattacattcctcagatacctgccttcctctagcacatgctaaggagtctgttagctcaggagcagcctaggtcaacccactgagggagcacattgagactgggggccacagtccaggctcaacaccaagggcttctttgcgtggttttgtcccatgggcagctctccctgggggagtgggcaggggaggtggcagccatggcaggtgcctgggatcctggcctccatagagatacaaccaaatgctcacccgcataaactccacactgctgtccaagggggtttcctggcgaaagagcagaagaaagttttcatcctcagataagaacatgccggcaagctaaagaaaaggggagaaatagcagttggtgacactgaccagtgctccctgggtaaaaggcacagagccacatattagagagcagaacaacttagaactctcagggtggtgagcctcatgttgcagtt

SEQ ID NO: 44875 - DNA, 1630 bp, Bovine  19866880875518
  misc_feature (1)..(1): n is a, c, g, or t
nttgtctccatcatttatttgaaaaaccattctaattgggatcatctttaaagtacctcttgccaaacccattaataaattctcagaatcttacataatttgaccccttgatagcatttgccatggatactcattcccacctttttcacttttcttctgagataccacattctccaaccatccttcctactttatcaaaggcccttctcagttcccctttcaagaaaccacctctcttcctcacttttaaatgttagagaggcccatactcccaaatttctatctctagccgcaacatctctcaagaattctagagcagtacagccgctgggctgcatgccatttcatcaaggtgtcgaatagtttcagactttacttggccccctctaatcccctgaacctgcaccccttattttttaccatctcagtcagcaacaccacagtttgcttagaggccatttagcttctttctatcctgcatccagagtttcaaaatctgcccttaattgaatcacttcttaccttcagagataggtgttttgtctttctttagcccattcttgaacttctgctttagcaaatataaggtagaagattaggcttatcatgttattggctatcatcaggaggaagattttaagccagggagattctgcatcctgaggaattaaagtgcaaacaattataaactattgtgttttgtaacatttaaaatgtagtattaaaattaatataggcttgatgcaggtcacttaaacatggcaaaacattttaataaggaacaaaaagttaaatttcactctacaaagataatcaccatttgacttatggtttgtgtctatgtacatataacttttcatgtataaaattgcatgaatatagtgctaaaagccaagaatgcatatggttttatattccgaaatatcccataaacatgtttgtatattaggaaatatttgactgtatcatatctgttactgacttgtaatccagagtttagatttataaaatttataagagcaccccttatttgtttaaagttgtttttcactttttgttgctataggcttgaataagttggtgattaattacaaacacagcaatgcttttgaataagatttatcaaataccctttccttatttatgaaaatggttgatacattttctatttcagcctattaatatgatcagtttcattaatacattttattaataaatagagccactttactttcttagaaaagggcctacttaattatgatgttgtacatattttaatatattgatgaattctatacacaggtaatttatttttggcatccatactcaaagatgatattaaatttcagttatatttcagattttgatcagctgaggttaaattttataaagttaaatgtaaaatgcattgtgattgcattttggtctctggtgtcatgcttttgaaggatggatgtcctgtctgaagtttaaataattattaactcctattttactttagtatctttattatatcctttcttcatttacatttgttatcgtccataattaacataagggtaaatatgagaacagaatgtaattattttttttttcaagtgggctcaccactgtgtttttaaagaaatca

SEQ ID NO: 44876 - DNA, 1804 bp, Bovine  19866880912192
  misc_feature (1)..(1): n is a, c, g, or t
ncatggattttctaataatcagggctaatggtaggagacgaagataaggaatggtgaactttataacagggtgacccagcccacaagctggagtgtcggctacaattatagttagctgtccattggttacctgccccgaggcgcaggataatgctcttatcgagcttgctcaccagccccaagaggacattaagacggccactatgtacggggcccgagcccattctcagcgttacacaagggaacagagaagttgcctttagttacaaacccaaaactggcatgttctcaactacttggatctggtagctgtgaattacacaatgcagtttcctgaacagggtatttatactagctatgggtagcctagagtagtccctgtgattgggtcaaagcaaagtaacaaagcagccaatgaaaaggtagacctgttagaataatttacattcgtgtttatgacgccacaataaaattaatccaatcctgagcgaagtcttacgaacctcatttgaataccgcgtctataaataaatgtggcctcactggaagcaactattttctcagctgtcagtgtaactgttgcagtttttatcggtaagatgcctgaacccaccaagtcagctccagccccaaagaaaggctcgaagaaggcggtgaccaaggcgcagaagaaagatggcaagaagcgcaagcgcagccgcaaggagagctactccgtgtacgtgtacaaggtgctgaagcaggtccacccggacaccggcatctcgtccaaggccatgggcatcatgaattcatttgtcaacgacatcttcgagcgcatcgcgggggaggcgtcgcgtctggcgcattacaacaagcgctcgaccatcacatctagggagatccagacggccgtgcgcctgctgttgcccgggggagttggccaaacacgccgtgtccgagggcaccaaggctgtcaccaagtacaccagctccaagtaaacttgccaagtaagcgtccttacacctaaccccaaaggctcttttaagagccacgcatgttttcagcaaatgagttgtaatcctttcattacaaaggctatattccgatttctaccaaatttaaattttcactagcattctttaaggttgtattgcatctgcgtaagaattactgtgggcaagctagacaatacgttccattcattgcatgcccactacaagcaagtagttacatagaaccatgatactacgaaaccatttatcaatttgccctgaaaatgccgtttaaggtacagctttcttttccgtacgtaggtcttcaagttgatcctgacggtgatccggaatttggcgatgaacccttacccagaatgtaaaagagcatgctctaatcaacttcattctactcagagcttttccacccatttttattttccttttttttttttttccattttttaaaccacatatacatgtatttcggggagggggacaatgctgaagacaatgaattttcgcaaaaatgttacaaaggttttttctggtttccttgctttgtaattggtgcagtttctgtggtgaggaggagcctaggctctatcctgaaggcaccgaggaaaagaaaaaggaagccttcaaatcctgtcagctgctataatttctttcccagaaagtcctatttaatttgtagtcctctgggggcagcattcagctttaaagtattctgggtctcagatgtccggttatcattctccccatcggtaaagggagtctgtctactcggctcaggcccccttttgagcactcctgctttcccggatgt

SEQ ID NO: 44877 - DNA, 939 bp, Bovine  19866880964051
  misc_feature (1)..(1): n is a, c, g, or t
ncagagtattggggaataaggaaagttctcctttcttgttttgaaatcagcataagccccatatccagacataacactcatgcatccagagtcaatgtcatataccagtaaagcagtagaagtcctgaagaaaccatcagtgaatcaaattctgtggtcttatcaaaagaatactcgagaaacagtttgctcaacattaagaactgtattaaggtacaatatttaataatcaaagagaagcagatcatctcattcaatagatatcaatatgatttttgagaaaagcaaattaatttacattaaatgttagaaatgaatattagaaaagaatcattaatgttagaaacaactctttgggatgggggagatggattagtgatgcttcctatcaaccacaatgcatctattctgaagaccttaggaaatgtggagggtaactgtttcagaccatcaaatggaaaaagataactgaagtgtctctgacacacatatgttatttttcagcaataatcaaagcaagtgctcagaaagcctagaaatgctgagcaattgttcttacctttacctccgaagacaaccgatgctttcagggatagggtttcttgggaagcctgagctcgctcattttgctgttcaagaacttagactttaatccagaatctgacaaaagagactgccctgctgcctcctgctctgatgctggtggattgggcaaagaaggaggaagcagaggatcagggagaatgggaaagtagagaccagggctccttcccaggtgtctgtttgtcagacctaagctgaagagagaagagaaacttttgaagtgggtgaaacatggagtttaagtaaatgttttattttttatacacataaaaatgtacaaatcataaatgtacccttttcacaaagtaaaaacacccaggtgactagcacccaagt

SEQ ID NO: 44878 - DNA, 1169 bp, Bovine  19866880980698
  misc_feature (1)..(1): n is a, c, g, or t
nctgagctggaaatctgaacttgtcattcaattctgcttgcatggtaagtcgcttcagtcatgtccaactctctgcaaccctatggactgtagcctgccaggcttatttgtccatgggattctccaggcaaggatactagaatgggttgcatgccctcctccaagaccattcaatcctacatgtaacttcttttctttttcatggagtgctgggaagcagaaaggccttaatcttcatgactgaagccatttttgctgtgtggactagtcactcatcagctacacagtgataacaggtctgagtttctctagtaatgggaacagatatgttacaatctatactttccatttagttccccttatgatcaatgcctgaatttcaatcctaagagtatattactatttgattctgaagcacatgccaaaagaatccagcaggactgcagacatatcgtccaagtgcactgccacttccagtgactttatggacaacatctgtgtgttatttgaaaattaatccttttccatctgtgtaccctatgttttggattccctttccttcacaaatatcctgaattcaaggtatctaaagtcctggagcagttgtccggaggaagagaagcaacagccccgcccccaacccttgggagcagaaaggaagagaattatcctaaggaattatttaaaaatccagacgcggcagacacaaataaaaccatggctgcataggttgatgtcccaggggtccaaaatttaacgtcacttgtgcaataatttgtttagcattaaactaaaccagtttgatgaactcaaatgccctcggctcaataggcaggactctccgaggagcctgtgttacttccctcacttaagcgcagatttataataaaaatcttaatgccagtgacatggtttttggacacataagaacctaagcacttggagaatcatatttgagaggtcagaaaactccacagttaaagatcagtgtataatttactaagaaaatagaaagttttgtttctctgagtcgaaatttgacgagcacggcgggaaatattgcaggtttttggcataaggttttgtgctttcctcataatttgagacctgcgtaaagcctgaggcttcggggatcactttctgagaaaaatcgggcaatttgatgcaga

SEQ ID NO: 44879 - DNA, 1044 bp, Bovine  19866881113480
  misc_feature (1)..(1): n is a, c, g, or t
natgaggatcctgtagtcccctccctccggtgagctttcctcttttgttctttaatattctgcttttgagatgatgagaatgggttttcccatagagagctgcttggtttgctgttttgggggtggggaagagacttttcctgagataattctgaaaagtgagaaagaaaccagggtcccagaactctagggagtaaaactctgggaataaaattatccaaaaggatggctacagagacctggaggcaaaccaataatttaaaattatactttttagagttaatatcacccatttattagaattagactagatagcctgtagtttaagattcctaaactgggcttgtttttatgggatgcattaattaaaaaaaaatcagtcatatctatagtgagacaataaatgtaaattctggcagagggagattttcataggggctaacagatcaaataaccaaaacagatttgacctttctaattaatttatgcatgagggaaaagtaaaacaaaatgaaatcccacaatgctttgggaagtaggtaatgagtgaagagtttggggctgagaactttaatttggggcctatgaataagagccatgaactgttcttatatataggaaatgctcagtgcggagaccagacaaagataacatttgtgctattaatagctctgcctggtaccttaaggaaaagtctcattctacagtgaactaatcaatggcagatgaccaggatatatttaatgcaaaggtaatagacacagaaacagtcttggccagagaaagtgataggaaattgatacaggaatgaatggcccaatttttttgctggttcttcctcatttcctggtctccaagtaaatagataaggcaaatttatatatctacttgagccctctgtcctgaactaccgactcatagacacaatgcctatttggcagtcttcccttctggatcaaacagtcaactcaaacccaacatgtccaaaatgaaactcctgtttttcttctggaaacttgctctcctcttgcttatctcccactg

SEQ ID NO: 44880 - DNA, 2576 bp, Bovine  19866881161001
  misc_feature (1)..(1): n is a, c, g, or t
nttctgaaaaccttttaaagttattagcatgcatgtgtatttctgagagtaattttgctcacataagtgtattttttaatgtgaattgtaatttaaagaagaaacccactctgctgcattgcttccctcgtggcttagctggtaaagaatctgcctgtaatgggggagacctgggttcgatccctgggttgggaagatcccctggagaagggaaaggctacccactccagtcttctggcctggagaattccatggacacagtccatggggtcacgaagagtcaggacttgactgattttcacttgcactttctactgcattggatgtacatttgtgtgtttgaattctatcagtgctgttgtcccagcttagctgttgtatgacagtactcacagcagtaggcagtttcccctgttttgtgtggtagactgtttagagcatgattgctcacttaacccctcagctcctcatgtacccacttaagtagaggtacttatttccacttcaggctttagcatcaagcctcatttttccttgtttcacctgattcttttatctttcaccccccattctctccaatttttccactgtccaattctggtggagtatgaattcttttcctaagtatttgctgtggctttctgaaattataaatgaaaaacagctatcacgtaccgaagaagcctgatttcattttactcattaaaaagcagtttgcacaaactgagattaacaccagcattttgaagtagttataggtaacattacactgaatataaatgacctatgaaatggtatttttttgaaacttgaccacagctccttctctgaaagatgacacctaattttattttccttcttttgctacagcagaattctcttaatatctctttaatgatttgtctaacatagtccagaataatattaaaatatagtgataagaaaaagtctgctaacagtaatcactagttttccactaagaaacaaaaactattcagttaaacatactagcaaatgttaagtgcctcctgagtttaacataagactttattttccctttgtttggttttattcagtgttgaaaacagacttacattcttgtttggtaagcttgttaatgtgttgccaaagttagttattcatatttaatggaggtttatgtattatttaaaatttatattgcactgcatttagtagcatgctttcttcattaaattttatcatatttcttcaaaaatataaaatgaaacttttttttcacaatttagaaccattttattagccatagatttatcttttccttaaatgtagaagaacacactcttggaagcctcatctttgaggatggtggctcattgatgacttgttttccccatttatcttagtcctcactgctttctaggtttaatttaagcaatttataatttttcataaactcttacatttcatcagaattttttaatatgttaacataggtttttaaaaactatattagaatttttaaacactgtaattctatgtataggtttgggtctacttttatagacaaaaataatgtttaaaacctttttaacttttgcagttgtttaaggaattttcaagttataaacacgtagatgtttgttttgtgttgtgtttggaaatttttaaaaatcatttcttaattttttaattggaggataactactttacaatgttgtgttagttatgctgtacaaaatgtgaatcagctgtaagtatacatgtatcccctctctcttgaccctccctccctgaaaattttttatatgagagatgaaatttttcctgccatttcagagaacaaaggatatcacagtcatcagcagttgcagtcaccacagatggttgatgagccctaggaggactcaggagaaggcaatggcaccccactccagtactcttgcctggaaaatcccatggatggaggagcctggaaggctgcagtccatggggtcgctgagggtcggacaccactgagcgacttcactttcacttttcactttcatgcattggagaaggaaatggcaacccactccagtgttcttgcctggagaatcccagggacgggggagcctggtgggctgccatctatggggtcacacagagtcggacacgactgaagtaactcagcagcagcagcaggaggactcaggaaggaaagaatacctgccatctaacagccatcatactgcagccacaccctacagtgagccctgaggaagcttaggatatggggggaaaatgggatactggccccagaaagctgaggtatatatcaaaggaatgatttcattgagcccagaccattgcaacttcccatgtatagaaaagggctaacttccttaacttgagatatctggtttcctttaataatttttaatgttcagattacatgccctttgttgcaaaactttatataacctggctcctccccatataacctggctcctcccctcctcctggagcagttctctcagggttacttgagatgctgtctccagggcatgaagtcctaaaaagtcccaccaaataaaacatactctcaacttttaggt

SEQ ID NO: 44881 - DNA, 1979 bp, Bovine  19866881180853
  misc_feature (1)..(1): n is a, c, g, or t
ntttgggctttcctgccctggccttcactggactcttcccgttgtctttgcttcttttagctttccgcccgttcctagcagctttctgagccgccgtggccctaggcttcttagctcttttgttggctttaccattcttcggagactttgaatctctggataaggccagcttcctactcttcgcagcagcaggttttttgacttttcccttacaagctcaggaacagccttcttgctgagctttaaagagccggacgcaccgatacccctagtctgtaccaggattcccttgctcaccaggcctttgagacccagcttaatgcgactgttgtttttctccacatcgtaacctgcggctgatagtgcttttttcagcgcagtcaaggacatgccagctctctcctgggagaccgaaagtgcctcagtaatcaacttggacactgatgcgcttgctgtcttccgatttacacccgtcaagccaactggcttctttacccgcttcctcgcttgaggtttgtccatggaagccggaacctggacggctggagcggcaggcgccgtctcggacataacagcaaagaaaaacagaacacatcattcagccagtactagctaaagtgtcgctggttgtaggggaggagaccctcagggccttatatagggcagggcgcgctgtgattggttcatcgctcaggcaccgcccccgccccttgggggaggagcatttgtgtttgtttcacttccaaaaattgaatagttcaaaaatctcttgcacggaattgcccaggttctactgctgaataatccatagagatacagatttcagatgccttttcagtttttaatgaaaaatgactctgtatgccaaagctattcaataaagctcgcaattgtcaccacaatttaaagagaagaacaaaacttcctcttttccttataactataaaagtaattttaaacgaaagacttatctcatgtttcctgagtggttttccatatggttggcttccagtcggtggaaaaaataagttattcacacctttattctagttgaaaattatttatgtgcatgagggaagtaacacagatatcttagaagtctcactgcagacttgaaagatgcttttagaattgttgaaaaaacttcagggtaccaccttatttgggcaaacacaatctagtaaaccatgatctacaggcatgtggattgtgactaaaacaactttctcagtctctacagcttgatagcagaccctcaagcatgaagtaaataatatggatctcacgcatgatatctgcttggccaaaatcaggtccccttgtggcttggcgtcctaaactgagttttgtttctggtttcattagttgaaaccttacccctatgtccacccccatctccttgacacttcactgtaaaaaaaaacaaaaaaccctcaaggaaacagatacaatccctccccttaatataaaatgtgaggcaggaaccctgataagaagagctcattggaaaccacagacccagatctctaaaaggactggcctggcatgtgtgtctacagagctgtggggaaagaatgactacgataatgtaatacttcttcttctgaaatacttcagaagaaatcagatggtgagacttgcaaacttctaattgcaaagtaaaatagaaaaatctctttcactctctttgcttcacatccatgcacccacatgtgcacatacacacaaacatctgaaacaaaaactctgaaaacaatgctaccttaagggttctctgatatattttaatcgtttattttattttattttttaaaaatgctagttgtaaatcatgagattgatttcacagcctacataatacattctgaccctttgaaaattttttctccttagattacagcttactgaggactctcttttaacgtgtatttggtttccctgaactttggtgatcccttagaggttgtgccattaattgt

SEQ ID NO: 44882 - DNA, 2544 bp, Bovine  19866881280403
  misc_feature (1)..(1): n is a, c, g, or t
ntctaagggcgttccaaactgagagcttccagtagtactcctccagcggagtcaccaactgttaacaataccttcctgcaatgatgtgtgaaacacaatatgtattgctaactagggaaactcaatcaagccttggtgtccagactggatctttacccactccctctggatctagtatagatacagcatgacccaaagaacccaacaaaaatgattctattagactacccagtgtagctcaaagcctcatggtacacaaagatattcttatcttttatccagcacagacataagaagcaatacattccaaaagccaacagatcacgttttagcaaagggaaaaggccatatctcttcaaataaggctacttctgcacacagtcacaagaaaaactatatttttacaattttgaattgataactcagttggtaaagaccacctgccatgcaggagaccccagttcaattcctgggtcaggaagatcccctggagaagggataggctacccactcctaaaaacttgggcttcctttgtggctcagttggtaaagaatccacccacaattcgggagacctgggttcgatccctaagttgggaagaagccaaaggctaccaactgcagtattctggcctagagaatggggtctcaaagagttggacacaactgagcaactttcacttcacttcatctatcactgactataactcgagttctacaactatttgcttcttatgtctgttctgtcatatacttttgcatgtttaaatcaactatgaatccagaaattgtctcatggaagactattttttgtactttattcagatgagcaacttcagcagtcttccccttgacttataccaactgctctccaaacacttccagcaagaataatagagtgggttgccatttcctgctccagaggatcttcccaacccagggatcgaacacgtatctcctgcttctcctgcactgacaggcagattctttactgcagagccacccgggaagccctatgttttgagtcattatctattaatgctaataatgacttatttatcctattaatgctaataaagtgtaggtaacattggagtagagattcctcatagcacattatagaagcatatgtaaacagaaccctcttttttgtatagcaaatattaatgctgacggtaaaatggcacctaacatataaaccatttttgtttcttcaatcaggggtgagataagagtacagagaagaaatgaatgcaaacagttaacagaaaatgaaaatctggccatagaagttatgaagtatgatgtctgatctgcctgaagtaattgattattgtgtatatcccattaaaatcctacccatcctgatttattgcacattgatttacctgcaaaggagaaggagatcattacctaggtgaaagagcctaaacaaggtgttttagctttgtcattttatttaaatcatgaagatagaatttatttctatcataggcctaattactggaaatttattatttaccatctactcacttaggtgggggaagtctaaaggagagaatggcaaaacatctgtgagattccacatttaataaaatctgtggataactggaattcaccttttgttaattcaaatccttctccttagataacccttttctatacaaacaattttttcatttttctaccattaagttttgagtgggtaaggcgtaagaactgttttggctttggtaacaatctcgaaggtaaacaacttagtttatctaagctgacaaatggtaagtcaccttcaacacctcaattaacgggaagacattactttgaagcactctgagttaagtgtgcgctacttgaagggctttgaaaagcagattgctaggccccacctcagtttcactagattgactagatctggagtaggggccaataatttgcatttctaaattatcaaagtgatgctaatgcatccggggatcacacttgggagaaaaaaaaaaaagtgaaaccccccttcagttgtgtcagactctttgcaacccaacggcagccatcccgttttctcctgggatcccaacccagggatctaacccgggtctacctgcattgcaggtgaattctttaccactgcgccacctgggatgatactaccagtcacacaaaactggaaaatcgccttgagtttcaactgagtgtcaagccctaaaaattagcacctccttctggtgtggccatacaaaatagcatgggccttccatgccccacctctgtctgtcccgcctcccatagccacggcccgccgcacagtctccctcactgggtcttcccaacccacttgatgctccgctgtttttcctggagccccacgttacgtgtacatcaccttcggctcccctacgaagtcgccagtaagttgtaggcttccggccaccactctggtttctcatgaccaccccctactgctgcgcaggtgcagcctacccccagcctcttattggatctgccagggaaatgagagaccctaacagtttaagggggcattca

SEQ ID NO: 44883 - DNA, 1270 bp, Bovine  19866881731892
  misc_feature (1)..(1): n is a, c, g, or t
ncaggtggcatcaggagtcaggatgtattagggtttatcctggctaggtatgcaagtggagcttgtgtgcgcagtcctgtctgactctttgtgaccccttggactgtacctcaccagaagcctctgtccatggaattttctaggcgaatactggagtgggttgccatgcccctcctccaggggatcttcccgacccagggactgcacctgcacctcttactgtctcctgcatcggcaggcaggttttttaccactagcaccacctgagtatcctggctacctgcgaagtgggggataatgaaagaataagctcataaattgttagggcattttagcaaaataatttatttagagacaatctcatttcttgttgctagtatgagaggctttgtccctaaaggcatttcagatttctgtcatcagttgaaagaataaatttggagaatctggcctttccaaattccccaaattggcagtgatcttctccacctcaggacaagaccagtcttgactgtgagacttgagacctgccctcatatccttccattgttgtcctctgttgcacagtgtcagcttaaataatgaggcagcctgacttcattctatcaaaaaataatgattattttctcctagacagtaaaacaaaattttatttctctagttatgtgaatgcagatggtaaaattgagtgagaatgttgttgtatatttaatgggggagggagaggatggctggcaatccttgcttgacacacacttttttgtcttatttataaaaatctgtgtcattctgagtcagcactgattaccatagccacaattatagtaatctgccgacaagcgctaatattgctaatgatattgctttgcagcataattatctgaaaaccactctcagctgttgcatcaggattacagcatttggataactccaaattaagccaggggtggaaaaggcagcacttgttcagtcaaaaagagctggtgaagaggacagcctgcaattagttcaaacaggctgtcaccagggggctggcaggcctggttcacatgccctaggataggtgatgacctttaacagatgtagattctcaatataaaaccctccttgagtctcaagcagataagtgaagaaagctttgtgcttgactgcctcatcttttcatctatccttggataagtaccctgtgttgaaaactcttcaggaactaaaccagcagccccacctgcagaacttgtgcttgggtattcccaaggtcaaatcaaccaaa

SEQ ID NO: 44884 - DNA, 932 bp, Bovine  19866881854441
  misc_feature (1)..(1): n is a, c, g, or t
ncttcatttgttgataatgcctcaaataatcaggtagtcatgaattaaataatttcttttatatgtttctcacacctgttttgttccctccctcacacccaggctagaaggtcattaaggtatttctgtttgttttccagagaaactcctggaagagctcagtaagttctatatcctttgtcttttttcatccacaaagttgtctctctcttattataaaacatgtcaataacaccctttccctctccccaccctctctcactacagaatggaaaagggctacattgcatgcaggtcagtgactctgaatatcttaagggctctgaggtgctaccctgcaggtactgaaagtcctccaatacttggaaataaaaaccactaatatatagaggggaaagatgatgacaaatggccccaacattatccttgaggcacataaagggcccttggaagatggctagaaggcaagccccctctgacagggtcccatggggtactggggacagtcagttgatacatcaccctatggctgtggatggaagaggggaaaagagacagctgagcaggccaagcagttcccttcctgaggagatctgtcaactgctagagcaggtctccacttcttcagagaagaaaggatggttctttcaacctgtgacattcactgataatcagattcactttctctctgtctctagtggatgtgactctggatccagatactgcccacccccacctctttctgtacgaagattcaaaatctgtccgactggaagattcacgtcagaaacttcctgagaaaccagagagatttgactcctggccctgtgtgatgggtcgtgaggccttcacctcggggagacattactgggaggtggaggtgggagacaggacggactgggcaattggggtgtgtaggggagaatgtgatg

SEQ ID NO: 44885 - DNA, 1215 bp, Bovine  19866880369697
  misc_feature (1)..(1): n is a, c, g, or t
ncaaatttgtatctttcggggatggctgagtcactctggaatgccggatatgggtgaggctctaagaaagagggatgatctaggccattcaatctcaccaaccactccctcccagcttcacactcatggagcacgaagaaagaattccagatacatttagtcttaatcattgtttgaaaactttatgtctgggcaccaaaatatgaaattcacaactgtaataccctactgccatacctcttcagcattatgtgaaaaaaaaatgcctaatgtgattttcatttgccttttgatccttcctagcttcagactttgttcttcacagcttcggctgatactttgttttcatggcatttcttgctcttcgtcttctcgctgagtcagctgttcctgggacggttttcccaaggatgaccgttcaactgattcctgcttttccggtttcacgtctggctgtcttggtgatgactcttgtgactgctgtcctgttggtgggtctctctggtcttctttctcagctggggtgtctagtagtacaggtgtgtgtttttcctctagaatgtcatttggttccttttcttgttttcagtaaacaaaacaaaacaaaatcaccagtaaacatagtagccatctaaaccacgtgatctacatcataaaataacaagcactgatactatatcactgatttcaaaatgacagtgatgatattagaaagtagttttcacatatgacattacactgacaaattgcttttccgtgttttatcgcttttactctcatttagcaatgtgacccattcattgtttaaaagttgacaagccactgggaagacttgctttttctaagtcacagagagagggaaggcacattcatgaaaattaaaaagaaagcatcggtgcaggagaatccagagccactgttctccagaagaggcagcgacacatgaagaaccacccaagcagagcaggaagagtcctatgcacttatcaacctcccagcagccaaactgtgcttgccaacgccaagcaaatcctacagaaataaaagccctctgtcgtcagaaagcagaggatgttcctaaaacctgaaaacaccaccgctggaaacagcccgaggaaagacaccttcagctggagcttcgcagaacccaggaggagccaggcgcctcacagcccggaaccctgataccttccttcccccaaacctgctcccgct

SEQ ID NO: 44886 - DNA, 1216 bp, Bovine  19866880469313
  misc_feature (1)..(1): n is a, c, g, or t
naggcggccaagccagacaggggaggggcgggggcagggccaggccaggcgacgggcatccgagtcccggcaggtgaggcccgcggagctcggggccacggagggaggcacccgccacagtgtggggtgggaggccaagggtgccatgggccccaccgggaccctccccctgctcctccgcctcccgctctgccgagcagaggggagatggcggacaggaccatccagacaattaaagctggtcagaggatgtgccacgaaccatccagagcacgtgggaatccaggcgagcaggcgcagctggccgcgctgcctccaaagtgtaaccttcagaatgcaccttcgtgtgcagcaggagcgagtcaagggcctgggtgaccttgggaaggtcacttcctgttccaggtaaaggcaagccccgcctcttcaacccagacagagaatgcttctaggattatatttttccagtggctttgatgggcttcagcaaacttttcaggacagtagactacgtatgaagtgctaaagtacctctgaaggcacagaatacccgatgttataaaagtatcagtgtcttgtacaactgtttaaaaaagtaataaagaaaccctgctattgcacagccacagccaggctttgaactaccaagtgtcccacgagtgagtggtacccgactctgtggtcccatggactggggtccgccaggctcttgtgtccatggggtttcctaggcaagcatcctggagtgggttgccaggccctcctccaggggatcctcccaatccagggatccaactgccaagcactccattaaatgacattaaatgacactaaatgtcaccagtgtgtgagagtgaccactttattaaatcatcaggaattacattgaccttcaaaacactaattgctagaaacttaagtttcaggtgttgaaaatacttcagaagaagagtctgagtcactgtacaggttccatgtgggttagaggttcgccctgaaccccgccttcaccgagaacctcatcatgggcttctcgcggggccgcaagaggcagatggagctgggaaagcccttgagtcggaggcgactcacgcccccgtcgggggtgatggtgaacttggcatgggtgatgacgtcctgcagttcgggggtcaggctgtccagcacatgcatctcatcgggcttcagcggaaagagaggggaggcggaggtcctt

SEQ ID NO: 44887 - DNA, 3049 bp, Bovine  19866880551251
  misc_feature (1)..(1): n is a, c, g, or t
ncccacgttgctgtgctgtgatttcctgagtgctctttcgacactgctttatttagtgggaacagtccgctcaaacaaaatgaatcatccaggtttattctttacttctcatgcttctcgtgtcttgtccctgggtaaagctcgggggacatcccttgctgtgtgcggtcctcattggagcgaccttgagcagaaggggactctctgggtttcagggctctcagccctcacgtcctcccactccagagtgaccccttccgccgcctcctcttgctaccgggtggccggtggataagcctctgctctcaggagctgtcatcagttactcaccgcacacagtgaggttaaagcgctgacttggctttccttgtgggtggagccaccttttctttgaagactctggctgttagtcagcagccgtgggggcccagtgagtgaagcaaaagccactcagtcgtgtctgactctttgcgacccatggacttagtccatggaattctccaggccacaatactggagtgggcactctttcccttcttcaggggatcttcccaacccaggggttgaacccagggattgaatcgtgcattgcaggcggacttttttaccagctgagccacagggaagcctgagttctaaattccgttgctctgtcttcccgcgtaggcttgtgagcacacccctgctctgtaggtaaggaggttagccgcacagacgattactccactgaatacacaccttgttttacccaagaacgaggacagctgaaaacaaaccaaccacttcctgttggctcggtggtccgggccccaaccttgtgctgtgaacgccgtgcatccaccatcacgtctccctgcccgttctcaccagtgcgcagtccaaagtcactaaccagctggtgcttccttctgttcatcaaagaccttggttcggtccccgggttgggaagatcccctggttacttgacagacctgcttagtgatattctgtgatcctttacttcgatgtaaagtgatgcttcggcttgctacatgggacagaggacagtaagcactgcccctgcatccagagtctgctaacagccctggaccacgggctaagctggtcccggaggcagggtgtagctactccagggaggggaagtgggcagtagagtctcaagatgtgaatggcaaagaggctgagattgttttaggggcgaggagggataaaggcctgggaatgcgcccgcttctaggagtgtggcagagtgagcagccctcactcaagaagagggctgctggagaccgggtccttgggagggtgtgacttgggtcgtctctcctgcagggcgctttgcagtatgcgcgcctctcagccagcagtctacatcgcggagtttatcttgaggccataaaatcagagataagtgcttattttgtatctccagacgtcatctaggttacaacttaaagcaacaagtggtgggtctatgacttaaatttactttcattttgcgggggcctattctctgttttccaagttttctgtgatgaccagcacgtgtgaatgtagaaaacagaattattttaggaataaaggccctcaccaattgcaggagagcgcaccatgttgatctgtgattctcggtctctggttgggtcttctgtcactgtcagagtctgtgaactcaaactactttctgatttgatttgtaaaagggcttggtgcttcctgggtggctcaatggtggacgcggctttgatccctgggttgggaagatccccactcccatgttcttgtctggaaaatcccatggacagaggaccctcatgggctacagtccatggggttgcgaaagagtcataaacaacttaacgactaaaacaacaacaaaacagaaagacttggtaaacgtctttgctgatttatttaaaaatgtggctcgctcacagagaaatcagatgcctacacaattgttaccaaatgcaaaaattaaatgccatctaacttagggtttctaactttcacaaagtaattaccgcttaaaccaaaacatcggattcattttcacaaatttgagcctgacatcttaattcataacaagcagctgcagtagactccggcagtctcaaaaatgagtgaagatgagacaaggttttgaagcaagtaatgaacacaggacgtaacagaacattcaaatcacacgactgtaacacgggcatcagggggcttcttcgtggacagaggcaatggtttttctgatttcctccagctgttgtggtttgtggtggcctctgacctcccacaactgtcaacgaaatcagccttctcttgaagatctcagttcttattccttttcctctctgctccaacgttcagattctctcaactgctgttgctggtagtttaatctctccaatcatctctcctaacagcttctccgatttcttcctttatgaccggcagctcccccagctgctctcatatgtctttttcctctcaatttgccaacatgtcaggtctgcagagcagccctccgtctagttctttttggcccctgagttcaatttaactggagtgcttattagcaaaaatatttccgtgttaattatgtcagcggaaacttggcatgccgatgtgttaaggagcacatatcagcaacagcatgaccgtttccatgccatgttggcagagatgctcatgaactttaaaatgcctgaaatcaaagcagaattgtcagatgagaggctcagcgggtggatcggcagaagttttattgcatttgtttgcgttgtgcttgtgtgtaccagcactttgtaacttgcaagtgttggtgtaaatctcgcatttctagttttagcatttttcactggacactgaatattgtaattttcctcccctttactgttgaggtttttgatgagcagctgccgtggaaacggagcgacgttttctgattgttggtgggtacatccaacatgtgcactttatggtttgctggtcggctggagagtcccggccccctgggatcccttgtgggagagaaggaaaccagcacgacccccca

SEQ ID NO: 44888 - DNA, 902 bp, Bovine  19866880622265
  misc_feature (1)..(1): n is a, c, g, or t
ncttccctccagatcacaactcctgatgttcataataaagtgacaggagagttactgatgagtccttgagtgtaaaatgaatttatggacctgcctgtctgatcaagaattaatggactgaatttaacagaaggttttctctcccctccacttatagctggcaggatttttattgtattatctatcagccagtgtaaggagcacgtgaatgaaataaatgtggaagcctgtaatgaatgtgaaaatcttatgcatttaattgaagcaaggtcactggcttctgctggagagtctcaaggtcacttttcctgtattactataggtggcctgtagaaatactggtgaactgtcagtaggcagtaggtgattgctgagatattaatctctaaattatagaaatattaatacatttgacttttatcacaaactaattatttgcgcatcttcaatatatctcatcaaacgcaacatcattcttcccaggcatcttcatgaaacatgcacgagatgaaaagaactggtgcctttgcagacatgctgtgtatcgaccacactatgcacacggagtcagtggatattcacagcccctggacacagcagcatcatctccattttccaaagtgtataacagagactttaagcaactccccgaatttatacagcttggcagttgtgaggctggaatgttcagtcaacattgtgaacttcacagctcaggggcaggagagcagcagaactgggggattgagtcacaggaacacttcattacttctgccactcagccccaccccccaccccgaggcaaatatcccctggcagtatcttccgactctggtccagggctctgtaccttattgagaatgagccagtttttgcccagagtaagtaaagtcacacacttg

SEQ ID NO: 44889 - DNA, 1897 bp, Bovine  19866880682469
  misc_feature (1)..(1): n is a, c, g, or t
ncataggatggaaacctttaaagtaggtgtattaatatctgggttttcctttctttcttttttcagcatctctcaagaacctcagcaagaataagaaagtggttccgtttcctggtaagagaatggttatcctgatgttttatggggcgcctgtgagacgggtccttggcagttacccgcgaaaatgtgtgcacagcgccccccgctggggcagcccggaacttccatttgggggcagcgcctggcttggaacaaaagctgaccctccccaggactgtgctctgacctctgcaagccctcttttctatggcaccatatttaggcggattgacaaaggaggattttcactcagcaacgtagtcacactgtctgtccgtcagccagcgattcagtccaggcagactttgcattgttgaactatgcagttattttaagatttcactgtatttatagcattttataagaaaaaaggaaagaagagaaaaaaaaagcttatacttggggtaagaaggtgcagttttcagacaggagactccagacaaatacggaaattcttgggggccctgaagtgacacgttttagccacatttaggggcctattggattatggattcaattctgaagggaaccaatatagaataagtgtgcaaggtcagagactcctcagcgatgattgcatctaagcagtgacgtgaactcaggggctttgaaatgtgttttatcacaaaccaatgcagcacatacattgctggacatgaatgtctcatgcagtttcatgttaaagagcgtggtggtctgttgttcacatctcactaccatttttaattttgcagagtctaagtttatctgtctttaggaatgctttatgtgtgggactgggcactgctggtccatttattatttattccctttttttcatttatcaagcattttccaagtaccttccatgtgccaggctgagctgagcacttggggaaaaaaggtacctaggacacaacccctgccctcaggcagctgccaggtggggactggacccagcagaagtcagcccgcccgtaggtgcaggagggagcctggagggcgctaggccggctgcgagtggtgcagaggtgccccttcctgggggtttgccaagcgcggtttcagctcctcctgcctctcaccgcctcggcctttcattttcatataatcgataattaccttgtgaaggtttttggtctttgttctctaataatcccctccttcgttttttctctttaaacttgtggtaacagtaagtgtcatgtgtccagtttgccttctacatccatggattcaaccaactgtggatcaaaaatattaggaaaaacattccagaaagttccccagagcaaaactttgccagtgccggtgaccgtcacgtagtttctaactgtactgcgtaacggctgtgacatagcgtctgcaccgtattaagcgttccgagaattgagacgtgatgtaaagaacacgggagagcgtgcctaggttgtgtgcagacaccgtgtcccgtcacgtgagggactggacatccgtggggtccttggaaccgcacacatggagagatcagtgtccacagttcactgtggcctttgaccccttatcgccatgatctgacatttctgaagacccacattcacctgtttttttcaagaaagaaataactgagacccaggaagagaaggcagtctgtccaagattattctgaaagtaggtagacgaaccagcactcgtgagtcacttaaaccatccttcataaaggagacagaacagtggggagctgcccaccccgagctgggcaccaggtgctgagagagtacaggtgagctcggagcggctctgccgctctctggaagctcattgctcccaggttgggact

SEQ ID NO: 44890 - DNA, 1352 bp, Bovine  19866880797369
  misc_feature (1)..(1): n is a, c, g, or t
ncgttcgccccgtgtcatgttatgtgccggccagacaacacgcttgcaccataaggccttcctcaaagcacaggagaactttggagatgtaatcacttcattcaacataaagatcagcttctgaggcctcttcctcacagcacagctgcagggggcaacacagggcactcacaacacatacacaaataacagacctcgataacgcgggggaagagccctggccctggaatcgtaacacccgggttcaagacctccatctgtcacttactcgccccgtgaatttctgtaacacagtaactacacccaaaaatgagaatcccatctaactcacaggattgttacggggatatgaacactagttgacaagaatttctctttttaaaagcagaagatgagatcaggcgttgagctccattatgtgtcaccgtttggaaactctttccgtgcaacagaagggaagaagtgaagtgatgtcactcagtcgtgtccgactctttgtgaccccatggactgtagcctaccaggctcctccgtccatagtattttccaggcaacaatactggagtgggttgccatttccttctccaggagatctttccgacccagggactgaacccgggtctcccccattgtaggtaaacgctttaccgtctgagccaccaggaaggattaaatagaagcaagcctctggccatccgtgactgtaagcggcgtttctgatattcccagcaaacacgaagcggacccgaggcctacaacgtcaggacccccgcgcgcctaccccaaggtggccaagagggccgcgggctccggtccccaagcgaagccgcccacaccgccctggatcggcgcgacttgctcaccaggtcaggaagaccccggccttgcggcccctcctcacggcatagaacatggcaagactgcggcatcccacaaaggccaaagccactctgtgcaccacgcccagaagccgggtcatcgctcactccttgccaccgccgagccccttagctcccagccaagcgccgccatcacagagcccgaacttccggcggcggcgcagggagatgacgcagcccggcgccgagggtggggcccggagccaagtgctctcctgactcgtcagtatcccggatgtccgtgaggacgcggggcctgggcggaagtctcggagtccgggcccagggggcagaggcggggacagggactttccggggcggggccccgcggagacggtcccgggggggtggggccctgccccgggggctgtgccttccggctctcgcccgcctgcgctcctggaaaccgttcccgggggtctgcggggcttgtggtgggcgctggaggctgtg

SEQ ID NO: 44891 - DNA, 1383 bp, Bovine  19866880981002
  misc_feature (1)..(1): n is a, c, g, or t
nttcatcaggacagtggatgccagctcatgattttatgagcattctaaattgtagctgaaggaaacatttgattgtaaaacatgtttaacttatttttcacccaatacattgggattgtggtagaacctggatgaaaattgtgggtctggtgctgaattactttttctttggcctgattttcctgatatatattatgttggtaattccttgtttgtgaatgaaggggatgatttttttttttcttcaccctttcttagagagcagttttccagcctggtgaagtgaattaatgagggtctgacctccatcaaatctgaatttatgtgcactcaaatgtaaagatgttggaataagatgtaacagtgattctgcacaccaaggcatgccagaaaatcaaaggccttgagttattcttctaaaaaagatggatcaggactctgaaatttaatcccatacaaacagagcatgacgctaatttccactctctctgcttgtcccaacttggtggctccaaaagctacctgtcacaaacagattttaagttgatttttcttctatctctgcttccatcagattaaaatatggcaccttcactgccaacgttctagcttcttttgggaccaaatcacgtattgtcatcagggtctcagttgagagcaaagagcaggaacttcttgtaaagcgtgatgtggatcaagggtaaggttatttagcactagaaatctttttgtaatccaatcattccagttactggaagggtggaagaaaatgtgactgtgaagtgggtcacttcttaatatccaagcattaaaatgccagcttgaaaaattagtataaaaacttgttatatagtttaatttcctgcttgtaatggcgtgaaaaataaatcagtgagtggtcggtgatgcaactgcaggcggggtgcccggatgtagacacggcataaggtgctgtgttctttcccctccgtctctcaaatgtcccttcatattttgtttatggaattaaaagtgttagtctgcactagcgtctcctagtcttgcaaatgcaattaccaaggcaattagtgaaattttagagaaatggaaatatttgactagagcaagtgtatcctgcgatttgcttgtgtaggtgtgtgtgtgtctatagctttacagttataagtttctgaaagaggtttccatgcaactcttacaacaaatggcgcgattctgagaagaaaataagactttccccctttacacaattcttatcaccataggcccttaggggccttcacctttaattagaaatggccatgggcttgtgaatgcaggtgccactcatgatgacaaaatcacttcatacacccaaatccttgatggtttcaaattgtggtgttg

SEQ ID NO: 44892 - DNA, 799 bp, Bovine  19866881045373
  misc_feature (1)..(1): n is a, c, g, or t
ntcatcagcctctgtggcagcgaggggggcctctggacgagactgtctgggcgcgaagtgagccatcaggggcccccacaaagctccccacaaaggtcccccaaggcaccttcttcgaagtttgccgcttgaatcgacactcgaggggcgtgatctcccgtgaagtaggacgtgtccacgtcgaagccccggataactccctggatgcccagctggaccacgcaccagtcgtgacctgcggacgtagacaacagggcccccgcggctgaatcccgccgccgagccgcagggctgagcacgccgacagcggaagtgaaacgccggaaacgaccttcgcgcatcggggaaaacggtgcgggctccttctcccgaggctgcaaggtctcttatgacgtggctacacccgaccgccactcgccacacggaccctcacttctaatctgaccagagcgtacataagccctgggtccagaggggccacatgtctgactccaaactggccacctcctgtgggcagcattggcagacgggcatctctgagcttcatttcttttacctgcaaatcagagatgagctcagcttccaaaaagttcagctgtaactctggtatagggaccaccagcccagctaggccagggctcagtactgagctgggtctcctggaacagcctaagctttgccttcagggccccagccaggactaccccaccctgcatcggatgacatagaagaactcccagtatgacactgtgtgattcttggtttccagcagtcagattcaaatccaccttaaaatgtc

SEQ ID NO: 44893 - DNA, 709 bp, Bovine  19866881154251
  misc_feature (1)..(1): n is a, c, g, or t
nacacatatatatgtgtgtgtgtatatacatcaacaacctgttggttctgggtcttcctccatttgcagaaagaaggtgttagagaacttccctggtggtccaatagttaagaatctgcctttcaatgcaggggacacaggttcaattccgggtccaggaagattccacatgctgcagggcaacaatgtcggtgccccacgactactgaagactgagtgctctggggcctgtgctctgcagcaagagaagccaccgcaatgagaagcctgtgcactgcaactggagagtagcccctgctcaccacaactagagaaaacccatgggcagcaacgaaaatccagcaccgccaaaaattaaataaaaatttaagaattaaataaaaattaaattaaataaaaattaaataaaaatttaagaattaaataaaaatttaaaagaagatggtaaagcaggtatcacagagtccattgccctcaacagtcaccttatcaagtgtattttctggtatgacaatgaatctgactattgtaactgggtgatggatcttatgatctacgtggctctgaggagcaacagtccctggaccaccagccctaccaagagcacaagaagagagaggtgctcagctgctggggagtccctgcctcaactcaatcttccaccactctgagaatctctccttcttgacacactttccaccccagaccc

SEQ ID NO: 44894 - DNA, 775 bp, Bovine  19866881631331
  misc_feature (1)..(1): n is a, c, g, or t
ncatgccttttcctcccagctgctgctgctgctgctaagtcgcttcagtcgtgtccaactctgtgtgaccccatagatggaagcccaccaggctcccccgtccctgggattccccaggcaagaacactggagtgggttgcccatttccttctccaatgcaggaaagtgaaaagtgaaagggaagtcgctcagtcgtgtgcgactctttgccaccccatggactgcagcacgccaggcttccctctccatcaccatctcccagggcttactcaaactcatgtctttagagtcggtgatgccacccagccatctcatcctctgtcctccccttctcctcctgccttcaatctttcccagcatcagggtcttttccaatgaatcaggtcttcgcatcaggtggccacccggcaacagtaccccctctctctttaacctggtgcaagcggcgaccagtgactctaccaacacaagccctcactccagcgacccaacacgacgtgccccgcggacgcacctgggcgatgaagacgacgtgcttcccgctgaacttcttctccagctcgcgcaccaggcgcacctggattttctggaaagacttcagctgcgggacggggacgaagataataatagctttccggccaccgccaacttcgatctcctagagtcgaagcgggaagagaggcacagatgcagttaggcggggagggggaccccggcactaccggcggcccgagcacatgcccaagccccgccccgtacctgggggaacccgaag

SEQ ID NO: 44895 - DNA, 749 bp, Bovine  19866882079006
  misc_feature (1)..(1): n is a, c, g, or t
ncctggtctgctgcagtccacggggtcacaaagagtcggacacgactgagcacttgaacaacaacaacaagggcttcagaagctcccaaggggcttccccggtggtgttagtggcaaaagaacctgcctgccaatgcaggagacacaagagatgtaagtttgatccctgggtcaggaagatcccctgggtcaggaaggaaatgacaacccactccagtattcttgcctgggaaatcccatagacagaggagcctggcgggctacagtccatggggttgcagagggtcggacacaacagagcaaccaggcacacgcaaaacctcccctcttcctggccagccctctggatgcactgttgcagtgcacacaggacaacctgatctgacagggatggagttcggatacatgccttttattcacagaagcaccgagtgagtcagcattcatgtgaaggaggatggtgcatctgttctgagaggcaggtcataaaccagcctgtgacaccacagcgcaggacctcagctctgacaagtgtgagtggggtgactgtttcagcgcagaggactcaggaagtgcccacggctggctccagaatgctagaacacaaacatcaaatttatgtagtgcatttaagggctttcataacagagattatttacgtgtcagggaccatcccatcatcagagtgcatatttacaaaactttaaaaatgcacattagctacctgagagcctggctgcaatagcaat

SEQ ID NO: 44896 - DNA, 969 bp, Bovine  19866880555391
  misc_feature (1)..(1): n is a, c, g, or t
nggaagtcattttaaactacttctaatttagttctcttaaataggaggaaaaagtaattcctaaattagagttatgtgtttgtatattgttaaaatatacttcccctctcctcaaattttcctttgttttatgaaggtcatcagcctctgaaattttgaaagacttgcttaggatagtttcagataagaaatataacattgtgaaactcttattttatgaccatgggttaaaaaaaatatattttcttattccaaaaatagttttcaaacctttaacagagatgaccatgagtctcagctactgcttttagttttaaaataagaaatgagttatttagaatacatttctctcagagaattatttctctagaagctaaatttttctttagatggaagatcaatgacataacttagtatcctttttactttctttatgcagattgccagaccagctctctttgaccagcatgttgtgaattctatggtatctgatattgaaaaggttgacttgaatagcatcggatctcaggcccttctcaccatttcgggcagcacagacactgaatctgatatctacactgaatgtaagccttctctctctatttagagcagggtctctcaatctcagtgctatccatgtcttagactgcataactgtttgatggggcagagactgtcttgtgtattgaaggatgtttaacagcatcctgggcactatcccctgcatgccagtagcagccaccccaagttgtgacaaccaaatatgtctccagacattcccaagtgtccccttggactacacaatcattgagaaaccttagtttatagaaatacttttaatttgaaaaaattgttctctattttaaaacagttgtacttactgattgggaaaaacctggaaaatatagaaaatgttaagaggaaaataaaagccatctataatctcattggctagaaataacccaaatg

SEQ ID NO: 44897 - DNA, 3571 bp, Bovine  19866880635948
  misc_feature (1)..(1): n is a, c, g, or t
ncgcaagcaagcctgtcctactttctccgcaggtgggtggggtcaagtgactagttctagccagtgaaatgtgagcagaaaccatctgtgccatttctgggctgaggtggtagaaagcccactggtgtttctcctgtcttgtctgtctgctcctgcagcaccagaggagttgtgtggtccagatgatgcaaccacaatatgactgagttcctgtccactcagatcctttttccctctgattctggattcccttctctcacctgcatgtaaccataatcttgaatttggtaatgtcctccacacctgtttttataagtttacaccatttatatttgtccataaacacatcgtaatgttttgcatggatttaaactttaaacaaatggaatcttattgtataggtttatcaatatgtgtgttgcttttcaattaatattatgtgtttgacatttcccatgctgttacatgtaattcttttaagactgagtgaacacacccaatttacttatctattttcctcctactcatttggatagtttttgctgtaataaacaacactgcaataatattatataggccccctgagaacatgtacaagagtttcttaagaatttgcacttcaaaatgcagtcatcagattgaagtatttgaatgactgtttagatattagcatcgttagtttacttttagttctactttagatattgacaaataaaaatgcctaacacgtataaagtattaatgctggagaaggaactatttaaagcttttcatttaatcctcacaaaaactcagtgaggtcccttagaacagggcctggtttgatataagtaagcgctccttacatttggctctttctgtcatttgtggttcacagatgaagcagctgagatatgggtatttgaagtaacttgaccatgtcacatagccagcgagggagacaggcttcctcaaaagtccacccttttaaatactaagctctcctcccctggactgcaaaggtcctggaaaagagttcttatttctccaaagatttgcagaatttgctatattaagcatttccatttttgccagtcttaggtgtttaagatattatttgactattgttttttttttcaagtccctcactagaaattgagtggtttttcatatgttcactggccagtcaggtgttttctttggccagtgattggctattcacacatttcttttgcccatttttatgttgggttgttgccttttgcttattgattcattggtgctttgtatgtatcctagaatgaattctttgccaaatatatttatctcaaagatctttccagtctgtagattgtaattgagccctttaaacctcttatgatgaaaaagctttacaatgctaatataattaaattccatccagcctttttttggttgtgttttttcaagtcttttgttcagtcgctaagtcatgtcggactctttgtgaccccttggactgcagcatttcaggcttccatgtccttctctatctcctagagtttgctcagacttaagtccactgagtaggtgatgccatccaaccatctcattctctgtcaccctcttctcctcctgccttcaatcatgtttttgcatttacaagacccttccctatacagagataataaagatatttatctattttctcttctaatagttttaaaattctgtcctccacatttgtctaatcttcctggaatttatctttgactttatctagcattattatattatacagacattatttaataagacccatcctttctctgctgatttatgatggtatccctgtcatgtatcaagtgctcatattagtgtgggcttttgctgagctctattttctacctatctgttccattaatctttttgtttatctctggaaaaaagcaccaccttgtgttccctagctttatactttgcccttatatctgaatggcaagcctctccttcttgctttcttgaaaattgtcttagcttctcttgcccctttatacaaaaggcctcttagcctttttcatatgaatttcaggatcagtttgtcaagtttcattaaaaactctattgggattttattggaatgttattgagtttgtaagttctttcaggaaagaaataacataaactgcaatatcaagtctttccatctattaacagtatatacctctatccgttccattttttccttaggtccttcagtaatgtattttaatattctccatggataaattgcacatatttttctgttgctcttagaatgaaatttttttcctacttctactcttatttgcttattgctgatatggcaatataaattacttttgtatgttaatcttttacatagcaaatttgctgaactattttattatatctaataatttgtctttaaagtcatttggatttttaaatttataatagagtacaatttatacggtagcaccagtggttaaaaaaaaaaatcgacctgccagtgcaggagatatgagatgagagtttgagcccttggctggtaagatccactgaagtaggcaacccaccccagtattcttgcctggaaattccatggatagaggagcctggtgggttacggtccatgtggtcacaaagggttggatacgactgagtgactgagcatgcacatgctcaattcatatagaaaatgtctttttctcatgcttatactctgtcttttatgtcttataacattggctggaacttgcaataaagtcttaggctcacaaagagagagggacaacctcaaagttacccagttagataatgcaagctaacccaatgttgaatacccaagtcatgtttccttgtcactctttaagcttttttttctgaaggagatttttcccttggtcttctgttagattattagatcagttttagatgactttacacaatttttaattaggtaaggggggaagacgcaatcacacaaacatgaaaactagattgattatgaagtagtaaacttaagatagtacttttttacttttaagtagtcatgggaaagcttcattacatgcttcaagttacatcacttagcaacagctctttcagaaatttcagttatcagcatgatcactaaaaagagaataagctgcaaaacaaatctaaaaaatgagatacaattgcagctagaaataaatgagtaaatatctaattgtgtttcaaaatatggaatggtcctttccgaatctatcatttttgaggcattgcaatgctaattcttcccagcatgggtcatttgctttcattttctccattcgtatacagcattatatatggagacagtggctttaacgttgcggtcttcactttccaaatttggggaccgaccccttttccttgacttgaaaaacagcaggggagtccagtgttttgacgaggggaggccagtgcttcccttccggggagctgcttttggaataatgctggcataccattagtattcaacactggaatgaagagagcaagattgcatgtcttaatcttccgtggatgcagcctggggtgcatttggaagaaagagaaaaaagaaagc

SEQ ID NO: 44898 - DNA, 3019 bp, Bovine  19866880659867
  misc_feature (1)..(1): n is a, c, g, or t
naggcatgtaagtaatctgtggtcacagaatggactgtagtgcttgtcatacatttttttgacacttgtcaccaagagatggcatgtgagatccatggcccctctcccttgaatcttggctggttctagaatttttttgattgatacaatatcacagaaagtgacacaatgcaaatttccaggcccaagtctttagaaatgggcacttcttgattcttggaatagtctgggagctctgaggctccatgtaagactctccacaccaaatattaccctatatgtataattgttcttttcatggttgattctatggttcgatacaagcaccagatttcttaacaaagcgttttagcgtatctgttgaatatctagtttgaaatacattattaattatctttcttttaaatatgtgtgtacttatctctgaacttctctagtaaagtgagtattacaaaatatttcttataacaatgggatgtggaggtatgggttcatagggctgagagccactggtacaagtgtgtacaacacagaccctttactgctaggaggtctagcaagcttgctattgtattgataagactgtgaacctttaaatcaagccaggctggattcgatcctgattcctcatttactaaccatgagacctcaggcaagtaacttaaattctttgaatatcagttttttcacctgtaaaaaactcatgttttcctctatctcataggatcagtgaggataaaaccatgtaacaaagtacttaacacagtggtcaccacattcgtgtttggtatgcatgtttgtgtgtgctaagttgcttcattgggtccgactcttcgagactctatgcactgtagccccccagcatcctcagtccatgggattctctaggcaaggatactggagtgggttgccgtgtcctcttccagggaatcttcccgacccagggattgaatccagctttcctgagtcttctgcgtctcaggcagattcttcaccactgagccacaagggaagtcctggtatacaatgtagtattattaaaactcccaaagtttattaatccctataatgaatactgaataccaattataagcaaaatgctatgtactgttaatgatacagatattgacaaatgttttgtatttattctttcattcccgaggaacctgtgtctccattctggcttaaaggattcaacgtgctgtccttctactgtctgttttttttccaagtacaaacaattctacccctttcagtttatcctagttatttcttctggatcttgaatttgcattcaaatatatcttagtttggggatttttttgtatttccttttccctcattctccatagtctcattagcatctcttatttccctgctggacatcaggactacacacaggtgaatgtgaggttcagctctctatgtcattagtctgtgcacagaagagatcactctgttgtgtgaggctaggcagcctgcttcctcagcaagtctgggtgtgtcctcttaaggcaagaatcaaagtgcatccctgagaaggagggagccttgcttcctacaaaagggtagggtttttcacaaagctacccctacagagagggcttcatgcctgctgctcatagaatgaagcagggaaaacatcatatccttccattctctggcacaatgaatctgaaaacttcagaatgtcatgaatttgaaaaaaatgacttcacaatcttaacttttaagttaaactcaggattacattatccaggacatgtattcatatccctacagattttcattttctagcttaaaaatttgggctcattcccatcaaagtggatgataaaataattgaaagtctaacatatgcctgcagttggcaccatggaattactttttcactctataggcttgtaattatcaacataccggaacagggtcaaaacagaaatcatccttactatgaccctgactctactcaagtccatctttttaccttaatcacttcctgtctcaactattggtatttctttttttatttatggtcttatttgatccttttatttctaactaagtgaatgctgaaggcagctggtaattcatagattatttaatggaaactctttgcaggagaattttccattagtttaattctccttacgtgatcctccaccaagtcatataatgaccttgacgatttgcctagaatttctggagggaccaattgacttttatgtctcctatgtctcccttcagaattaactcatgattagaaacagataatcaaccacctttttagtagttacagtagctatgctgtgaggatgaagtggctatttattctgttcataaaagtgacgcttatttcacatttactctaagtttgtgactaggtttaatatacactttgcttttacgtcagattttatgttgccttacttgttaatgaattaagtttctagagatgtgaacaaacagaaattactgatagatcaacctaagatgtgtaatggtatgtaattgtgtgttttccatgttagtgtaaatgttactgtagtgtactttactactgtgccatttaattttttaagttgtattattttcaaagtggtagattttctgatttacttttatgcatacaatttatgttgaaagacatattgttaaaattcaacatagttgacttaccgtgtatatagatatacatttttagtactacagagtttaggaaaatgatccataaggctttgtatttgaaacattaatcacttgatgtttttagctgttttgattttataaagttaatatcaaagccacttttttgcttctctttctctgattaattcctcctccccttcacctttatttatttattttaacctgaaatgcatgattctttgtttgtttgccaacatgattagcagttttcatccaaggataaaaatgggttctatcacctttatatgtatcttgcatttttaacgctatagtttatacttctttattttatgtagaaagtaaaaattct

SEQ ID NO: 44899 - DNA, 735 bp, Bovine  19866880670883
  misc_feature (1)..(1): n is a, c, g, or t
nggctttcctgtggggcttgtgtcctgctccctggaggaggtgaggcccctctgcagccggtgtggccccaagactgtgaagggagggtcccagggacccacagcacctggaggggagtgcgcactgtggggaaggtggggtagaaacacgtgctctggaataccgcctgcaattccagtatactgggctctaacagtttcatgtgtggctgaaacagctaaaatagttttggtttatccagctcagttttttttcaattaattgctaaaacccattgccaagagattttaagactcgacactgtcagacttttaaatgtggagttaatgttttgaaaaagaattatgtcttctggcattcgtgtttggaagctctgccaagagtggacatagttggaatgtgattcattaaccgctgtgaataagctgaggttgtagtttttaatcattgtgcatttaatttgtaatggttctccctgcccaccccacacggattctgttttaaaggtttggtgcatatactttgattgctttcattcctggtagcaaaatatactgtaaacaggtgtgacccacatcagctttcacagtgatcaagcaaaatgtacacctgagctcactggttgttaagagacctgatacaaacaaggtggaatgatttttctgtttgtcctgtattataattatggccgatatttcagatccaacatcaattagaagagtgtacttatatac

SEQ ID NO: 44900 - DNA, 1737 bp, Bovine  19866880792264
  misc_feature (1)..(1): n is a, c, g, or t
nttcatactaataaatactaaggcattgtttgtcctgtgttgatacttacactgatggtacagaaccagtggtggtaaaaccgttggtgccttagtatgagtcaaggcaagtagcactgctttactagtgatcactgtgttcttccttgtcatctgctcagaataaaaaagaagcaaatgccagtttcttaagaatatcctctgtaaaatagtaaaaggtattcattttattaaatgttgagtatatgactttttaattattctgtgtgacgaaatgggaagtatgcatagcattgagtttatatgctggactaagatgctagtcttgaggaaaagtacgtaagtgattaatttgctagctgaatgagccattcttttcatggatgacaatttttacttgaaagaatgacaaattatggttgttcagactatttggtagctgttttctttaaaatgaacaaggtgaatccatcacttcaagaacaactgacagtatttattgccagtggtaaaatgtgaactttcaagtggaaatcagaattttgtaaaacacatatcaaccaccatgagcttgacagttaaagagcttttctaataagattggtggtgatattaatgagtatgatttttttgatacagtaaaatgaaatgtgtcagcttttgcaattgttgcataactcagggatctaatacttttgaaatgaccagcgtgtgatattactgaatcctgcttgggtgaaagagccattcaaaagtgcaaggcagacaaatgattttaatgcatccgagtgtgaaagttctttgatatagttttagattctatattgtaaattttggtataatatcaaagaagaatattgacagttatttgaaaaggctaagttactctcccctcttcagagttatacatctacgagaagtgaactttttcacgtgcttctaactgattgagtgaaagcagatatgagaatctagcagtcttatgtaaagccagacattgaagatacttgcaaaattgtgtcattcctctgactaagtttttagaaattagaattattttcactaaacagatacttatgttaacatttatggagtttattaccatttttaacaaagtaatttttttttagatttctcaattttaatcactaatgtgataaacggcattacatcacttactattaaaaacctacatgaaaaaaaactctttgcagttctcagttcttaagagcataaaggcatcctgaaatcaaaaagtttgagaacttgtggcacagagtgttacagcagactgatgaactgttgtcctttcggtgagcctatgtgttgtaaagtatctgtacaaagacagcagtcgcatttggtctccctgtgcttcttgaacaaaaccattgtgtcagtatgccaaaaccttgcactattgagctgcttttcttttgattttgttttcttttaccttctggttttttttttttttggtcaggattagaaggcttatcccttcctttttgcagcggagccttttttaaagggtttccctgtcacgtatataaattgcaaaccatttaaaatgtgacccaaataaccaaacatgtatactcttaggatacgttactattaactgatcacaaatcacaagaaatgtatccattggttatctttttagcatgtatccatgtttcatagctcactaagcagatttcatagtcaactttcatttatttgctagtctgttat

SEQ ID NO: 44901 - DNA, 1131 bp, Bovine  19866880981226
  misc_feature (1)..(1): n is a, c, g, or t
nttgtgtgaacttgcttacagggcttaacgcactaaacaactttctcatgtataaaatgggaacaataagactgattgtgctggatctgagatgagatatgtaatctggtgagacatactaggaacttaataaacagtagctgctctcataagtagtaattatgatagtttaattattggcccaatgtcacacaataatgtccatcatgagaatgggcttgttctccagataagccgcgtagaaactgtgagcaatcctctgtttcaaggtcacagattactcctctcatctaggagaaccagcacaaatgcatagttgagcctgtactagctgcaatgatttctacatgaaaaaagccagttggagtttttattaggaccatatggaaaaaattcaaagtcccttcctggaggctatattcatatgtctgttccttactatttccctgaaattaccctatttcaagcctttatcatccctatctgacgcttcccaaacttcccatgtctccagccccctgtgctttaattagcttactttgttgtgacccactgcctgcagaatctactagagacccctgagcacagcctccgtggaagccccaggctgcaccagcctttcctcatatctatttattttccatagattctcctcccacaatctgtgcttcggtcacactgggccatttgcagctccttatacctgctctgcatttctcaacctctgtacattattcctgctctcatttctggaaggccttccctatgcttgatttccatcaacatccttcactgagcatctcaaaggattcacaaccttgaaatcccttgattcctcatagacgggtgctcttaaatattgttccctctgccgcctctgataagctcatgtcttgtccccagagtaggaagaatcctgatgatctgggactcagtattgccatgatcccactcaaccacacctacatcttataactcgacccgattttactcccaagaatctgtctgtgcagccccttcatggtctaccacatgcctgtctcacagccttgtgtctgagtcctgctgggggtcctctcaggttcactggctcctcgacgaacagaactgctttactcctggcaaaaccta

SEQ ID NO: 44902 - DNA, 1134 bp, Bovine  19866881029296
  misc_feature (1)..(1): n is a, c, g, or t
natgaagtaaaaattaggcccattcccttattccttttctcaaatcatttgatttctcaaatcaaaagtagtattagtctgtcttttgagaattcagtgctttttttcttcatgatctatcttttccattttcttttctcttaactttctgaggtcagctcaacttaagtcttgtttgttttacaaagccttttcttaaccaaagagactgctttttatctttgaactactgatagacccatactcaaccaagttggcattatacagcatattcagcagattctgtgttactgtatatatatttatttattatgttctgtctcccagttgatctttgagctgttttgttaaagacagagctgactgagagtacagagaaggagcccttgataaaggtctaagaggcaatgaccactagaaagctggcctctctgaaaatagccaaattgttttttattagagctctctatgttagttaagtttgttaatagttccttgatctttctcagtgatagatagtaactgtagtttttacttttatgtgcatggttggaggatcagaaagagttttatgtagtatattttcatgctttacttgaatttactaaattttgatttcggcacttttgtctgttctctttgttgttgagtcgctaagttgcgtctgactcttttgcagccctgtgaactgtagccccccaggctctcagccccttctgtttttcttctttttacataattcatattattcttactgttaaaaaaaaactaatcaaattgaggtaacagtattgcatgcacagagtgaatccgtaaagagagtagtctgggagagaggaagatagaaactttagaccgctgctgcagtttctaaatgctctgacaaatcccgtaagggtctttctgagacttgggtcttagtttcttaacctgtaaatgaagatgtcaagtgaatggtctctgaaaagttctttataggtctgaatttttctcatatccatattgacacggaattgttactcctgtcctttttttgactttagtccgaggccagacttaaaataacagttttgttgtcatgttttccttttagattctagtttaggattagtcatcattgcttcatttgggaat

SEQ ID NO: 44903 - DNA, 1848 bp, Bovine  19866881153795
  misc_feature (1)..(1): n is a, c, g, or t
naccttaaaaaaatttcctgctcacactagagaattatgtttgcttatttctaactgaaaacttcttgaaatgtctggtactttttaaaaacaaaatgcagagtgaagtacattctgacctgtagaactgtcttggtggtctatgactgtagttatgttcaccaaccaggccaaaccatagccttgctaggagcactgcagtgtattcccctaagtaacatgtttagtgcatagctccgtaaatactctgcatttccttgcccccaagtctctactctcaggagagggactgtagaataatataaagtgtcatctatctcagaagatctcatagtatctcagagtaacttcttcggtcaggacatttgtgtgtatttgctcatggtgtactggtggtcttagtgcaaagtgcatgcacttgggagctgagtagattgcatgagtttcccagggcagccagaacaaagtaccaccagctaggtggcttaaaacaacagatatatattctctcacagttctggagactggaagtcttaagtcaaggtcttggcaggatggattctagggaagcatccttccttgcctcttctcagctttcggtgatgggccacaatccttggctttccttggtttgtacatgcatcgctccagtctggctctgtggtctcatgtgttctccttgtgtgtgtctcttcttaagagggcactggtcattggatttagggcccaccctaaactaggaccatctcatcttggcttaattacatcggaaaagactctgtttccaagcaaggtcacattcacaaggtctgggtggcatgaattttgagggggattagccaacccagtacatagactatttaaaatccttgctctatttcttttttgaacttgagctttctcatctgtaaaacgagatgatgatatctacctcttcaggttgttgtgaagattcagtgaaatgatacagcataggaaaagcccctgtatgatgtgttgtgaatagaaggtactcaaccagtataaaaagtcttccttctcttccttagtggccaatgtctgtgaagagccactttatacgtttaaaaaatgtatttatttttaactgaaggataattgttttaccactttatacatgtttaaaggtctttcttttggatcagagttgtttgggttgaaaattgaaattgccagttcccaacatgaggcttcacatgatgcaggagaaacaatgtcccacagctttacttaggatggtcccaaggacacttagctgctggtcacagttgtaaccatcgctgctgtcttggtcctcctgatgtcctagctcatcctctgtcccttggaggctcagctcttgctgtccttggtactctttcaggacactcattcagttagtgggagcagaactggcttccattatttatcttcaagctgactgtgggttggtaccatgccctaaaactgctgtggtctgaaaagttttagaccttctcagacttgaaaaggtcattgtcagaaaagacataatgggaaggccttgagcttaccttcagtctatgattctgttaaaagtcattttagtatgtcttttgaacccagctctgttctcttcccatgtttcattagggagagtaatgaggactgatactgaggtagggtgtaggctaattggaagcaatgaggctcggaatctcagatacaatgataattttggtagccgaactattttattttctttttcaattttatgttctgtattttatccagatatggtatcagtaaatgataggtagcataagagactaaaattaagaaaaatttaaaaatttccagttaaaaagtata

SEQ ID NO: 44904 - DNA, 988 bp, Bovine  19866881258133
  misc_feature (1)..(1): n is a, c, g, or t
ntctgtttaatctacttatctagttttctgatctccagggaagacgtaattccccatatttgcagaaatgtctttgtcttatatacacttgtatatggtcgttttaattttatatggctccatttcataactgagagtgtttcatgaatatacctagaggttgtgtgtaaatgatttttatggagcactctattcttgaaaaaaggaaaaaacaacacttttatttctgatgaacatcaagaccagtgaatgttaaaggttatgagttaagaagtccagttcagtttcgagtgccagtatataaaatttcctacagggaaaacattaaacatttctgtgggtctcacttaaattctaagtggctgagtaggttaatgcagctttcttattgcttttcacgaaagcaggttcacttcagattgaagtgtggttgatttcagtcccaaggaggaaactgttgagacataatagctcatgggcccactggaacgtgagatctgtttattagattgctcctgctctgagtttagaatggaggctgctcactgtgagaatcacatggaccacgatttgccttttcttccacttgcccctagaaagccactgctttgccaagagtctagaatagaaggtaactcaactcaacaaagaaatggccctgtacctgctgtcagtgctagctcagaagggtcgaaaaatctttgagaccctcttgccttttgggtaagaaattcctttttcttccccccaacccgtctttcttcttttcctttttcatcctctttgctatagttactgtgctatattattaagatcttaacaaacacactgcttttcccctgaggtattcaagtatattaaagacttcaaggcatttctcccctaaagatttaattcacatctattaacattttcttacatggccacaatggcttgagcacacctaaaaatactaatggtaatatcttaatatcatctaatactcaag

SEQ ID NO: 44905 - DNA, 938 bp, Bovine  19866881295281
  misc_feature (1)..(1): n is a, c, g, or t
nctacccctgactgcttacctttctctctcacagcatcttttctgtcacacagatcattccctcaggcccctgttctctgtatctagcaactcggagatcagacagtcatataaataaatgttcagtgaagaaggggctctggagggtaggagtcatctcttcattcttttttcccactgtggttaaaaaaaaaaaaaaaaaaaacctacaaaccctggtgttgactgtgactctccagaactgtctgatccacgtaggttgtctgacttgttggaccgactagaaatgacagctctggacagaaagcagggggtctcccctctcacacacactgaggcagctgcccacctcgcctgcacccacggctgcaacagtgctgtatagcacctctacattttggatccattgaaaactatctcaaagcagtgtgcaaccccaggataaataaaggagacaacttgtgcattttaaagccttcccttggttaacaactttgactaatgatggcaacaaaattattggagcctgcaataagccatccagtggtcaaataggtcagcttatgagcagtattaagatttaaatatcctttaaaattaaacactttggggttattaatgtttcctttcctctcaaaatttttctgttgagaggtggtatgggaggaaatgtattagcaacagtaggatgtggagaataactccgagtacattaaacatctgttgatggagctattagcacagtttgtagatactgccacctggcccttattccattttgctccaactttagtgcctgaaaatatactgcagcaatcatgttccgcttctattaaatcttttactactgcattaggtggaacgtaagcatcaatcagtcctcattgagataaaaaaaaaacacctacttaaggcaaaatcaaaatgccaataagaaa

SEQ ID NO: 44906 - DNA, 1259 bp, Bovine  19866881397572
  misc_feature (1)..(1): n is a, c, g, or t
naatattgatgaggttataaacacatggcttcctcccttgaaattatttatctatgcaaacacacctctcaatagcctagcaactcatctgccctctgctttcaaggatatatatgtcacatgttctgttatataaaagagatgattcagacacatcttctgaatgtctctgtgaagaaataaaatccagtttccgtccaagtcagtgtaagcaataatgttcaataatcaaggacttttctaagttatattatcatagttttattaatatgagtatatatatattggcaaaggaaatggcaacccactccagtattcttgctggggaaatcccatggacaggggagcctggcagattacagtccattgggttgcaaagagtcggacacgactgagtgactaacacacacacacacacacacacatatatataaaacttttgcctcagaagacagtcttctgaggcagatctgtgggtttctgggtctgctagagtaagggaacttatgggaggaagccccatgtgtcacataggagctgtgcctggaattccctggttactacaatctgggtaatcaatgaggaagatattacaatattccaggtttaaaaagatagctaaggcctcaactcttgtcattaattcattaggttgaaaacaagacaagacttgattaattagatatggaggatggaggtggcagtaagtgtgatgggagtgaaaaggtctgacgcagaagatttgatatgtggtgatgccattaaccaattaagaaatgtaggagtaaatgcagtgcttatgtgagggatatgaagttgaagtgtgacaagaaacataatcatcttatgcacattagttttgaggtgcttttggagtatgtctaggttggcttatttctggtctaaaactcagggcaacaggaaagcctggaaatatgcccttgatggtttaagataaggtgttagttaaaactgtgtcaggatgattgcccagggagaatttatagactaagcagagcagtgggcccaaaagaaggtcctcaagaaaatcctgtgcttaaagcggagacacagagaaggcaagcatgaagaagactgacagtcagagctgagggcagagaaaggggaaagtcaggaagtggagagtttcaagactatgtaatgatcaataggggaaacagagcataaacgtatgaacacatcatgaacatgcaaacactgcataaatgctctactaagaaaaggttggataatatcta

SEQ ID NO: 44907 - DNA, 1686 bp, Bovine  19866881463282
  misc_feature (1)..(1): n is a, c, g, or t
ntttctcatacttttcctgggtgacttaatcaatcccatggcttcaacagatgatttacctagtaatcttcaactcaagagttctctctagaattctagagtcatatatataattggatataaactggctgtccactggcacctcaaacactacatgtctaaaactgatatcatctttctaccaaaaccttcctttccctatatttggtttatcaatgcatgccatcatctcactcgattgcccaaaccaaaactgagactttccttcttactcacctacttaaccaaaagcaactagtcactaactccttttgattctaattctctcaaacctgttcttcttctgatccctttctcctcattatctttctacatgtatttctctgatttcaactaggccctcttccaatatatcctcctcactacccaaagcaactgtcaaacaaatgctaactcttattaagtccactattttattttaaaatcctgaccatcaggttaagattcaaatgcctttatttagcataagataacatttaccatctggccactgcctagaagttaatgggaaccaagagaaccccaagaagacaatggcgcgagcgcttactgcagtcaccactcctctcccatggacgccacatacatatcaattcttcttacaattatcttttcaaaggcaacaaataattttactattcgaggccaggctttacctgatactaaaatatgtgatccactggacaggaattagatacgattttattatattaaggcttataccattaggctgctgttgcagtgaaatttaatacatttttatgtaggtagaaagaaaagctcctgtacagtggtggctacagaaacagacaactggacacagatctcaaattccagcttaatccaaaaccaaacaggtataaatgttagcttggaaacaatatataaagctagttaccaagagtctccttataaagaactaccccccaatttttgccaatttatcaatacactctgctaagcttagaacttctgtaaacatgcctaatcgagatccaggaaaattctgaaatatgagctgaagcaacatgcatctgctatcaatagttcagtgtcttcagaaataccatttttggggtattagtgtaggagctatatgggcagctgaaaccttaaatatgtatctattttaaaataagtttaatcccactttcacttttaaataaaggtttcaaattctactagaattcttaaaaatgcaacggacttgtgattaaagaaaggacaagactgagtgagaaacagtagcaaagcaaacatacatggcctggtggagcatgcatcggtcgcttcaggtcattgcgtcctctacaggctctgatcacagttttgtgacgatgcaagtgtatttcagcttccaactggttccaaagcttatcatgagcaggtcccttcatatctcgtccaagtagctgtatttgttggactcttcatttgggaaaagaatttagttagtttttcattatatatatatatgtatatatatacacacatacatacatacacacatatacataaatatatataaagtgttcagaagaattactgaacacaagtagctttcacataaatttaatttagtaatgaaactaataggaatttcctgatgtctctcagatttataaa

SEQ ID NO: 44908 - DNA, 906 bp, Bovine  19866881518332
  misc_feature (1)..(1): n is a, c, g, or t
naatggttgtcagtgcacataagggcatgcctgagggagctggccagagaggaattagacgagacaaggtagtttaagtttttgacgtggagcagcccctaggcatgtttgccactctgaaaggttgatctgaagcagaactaaaaatcactcatgaagtgagtagtcaaggaactgctagtgtttgtgttggacaggcagagctagatgtctcagattgtccaggatgggcccactttacacctgtttccccagtgtgtttattaacagcacttcccatactttcaaatgcattcttttacgtttgaatgatgattaattccagtggcagcagcagcggtggcagcgatgaccgtggcccaggggtgaggaggggatctgcacgggggcaggcctggggcctcagccagaggcacctccctggggaatgtgcacacatatggattctttgacttgaactcgaggacagaagggcttcccagggggctcgggggtaaaaaatccacctgccaatgcaggagacacaagagacgcgggttcgatccctgggtcagaaaaactccctgaagtaggaaatggcatggagaaggaaacggcaacccactcctgcattcttgcctggagaatccgcgtggacagaggagcctggccggctgcagtccatggggtcacaagcagctggacacaactgagggcacgtgcacacgcacagcggcaggctctgctcctcctcaaataactttgttagctgtaaactgtacgtttttagaaaatacagatgcgacacagacattgcagtaaattgtatcagggtattattagagttcttcaaaaagtttagaataccctggttttgaaaactgctgtgacatggcaaagcaaatatctacaagcttagaaattaag

SEQ ID NO: 44909 - DNA, 816 bp, Bovine  19866881670582
  misc_feature (1)..(1): n is a, c, g, or t
ntgtgtagcccatggcaccgacatcgccttctgccgaaaacgtccatgcgacctgatttcgatccatatctaacaaagctatcttgttgtcaacgagagttatgaggtatggaaatgggttaatttctaaaaacaaacatgtagataatatgtatgagaaaaagaactttagcaaaaccccttgtatcagaccattttgaaacccatgagtctctgggctcatggattacacctatacctgtttcagtggagactgcccaggcactctaagcctaggtttatataagcaggttaggtgatgataaaagtcgattactttgtttgactttaatttcagctcagagatagtacgtgggtatccctgagaatactaagggtcaaaatgtttttaaatcactagagagagagtgaagtgaaagtcactcagtcgtgcctgactctttgtgaccccatggactgtccatggaattctccatgccagaatactggagtgggtaaccattcccttctccaggtgatcttcccaaccctagggatcaaacccagagctattagggaagttcctgataattaaatcactaattgttattaatatttgataatcaaatcaaatttatattatataaaattaatatactattaatacttttataaaaattaatattgatattttataattaaatcactaattgttattaacatttgtacaggtttcagataataaatacctgatgttttggactttactatgtcagaaaatggtccaggtcctttggatgtgaagactcgaacctaaagaaagaaaagaatataaag

SEQ ID NO: 44910 - DNA, 1480 bp, Bovine  19866881678368
  misc_feature (1)..(1): n is a, c, g, or t
naacgcatgaaagtgaaaagtgaagtgaagtcgctcagtcctgtctgactcttagcgactccatggactgcagccctaccaggctcttccgtccatgggattttccaaaatgctctagttatatgtatttcaaaatagattgctctcaagaaggctgtctaagacaactgtaacggaatcaacatttaaaaagaggaatacttggacccaagagccagtgaaatctgacagccaagaaatgagacaagagaaagacagcaaatactctagagaaaagaacaatacaatctggggtcatttaacacagaacaaaagagtcctatccaatcccaaaggctcttacaggcatcacaggatgtggtgcagaactacgatatgagtcataatgaaaatgataaacaatgattactgaaaaaatactttaaagtaatacttaacagttattaggaagatttccataccaaaaaaaaaagtgtttacacaaaagtgctattacccatggggataaatttagttatttagaaaatatattcggaatactttatctcccaatgatgttcaacaaaggagtgtgattatactagagaagtgtagagaaaaggagactggaagcactacttcttactgtaattgaaatgccaaggccttcatgatcttccttaaggaggagaacttttctaattggaccaacaccttggcttttctttaaagagtcttgatccttgttggagaaaaaaaaaagaagaaaaattagtagtacttaaactatataccatatagagtaacttgcttttagaaatgtttgttttcctgtaatggatacacagtataatgttaagaaagtaatcaacagataacatggaaaaaacaaaaacagataacatgggaaagcaaaaatagtggttctattaatatagtgaatgtacatgattttctcaccctcttgttaatttctttaatatttatacgtgacattacaaaagaaactactgccatgaactgataaataatatctttaagaaataaaaggaggcaactttagcttcactggaaaattgctttaagatctataaccatttcaactgatttacagaactgaaaaaaacaaaatgtcaattggtcattaactctttttcatttctttgaactctggaatctacctcttaactaaaggaccttgctccaccaataattctttctctgggacctttactttttacctctctctacaagctcattccctaaaatgaaaaaatgccaagcctaaccaagctataaaacacaaaccacgtacaaacacaaaacatataaaaacccttaaactatccacaatcgtggctaccttctatccaccctccatctttcctgaacctttacacaagttaatcctcactgtcgttacttccttgcctcccatattcagtaagtactccaacccgtaattagggttctgctccacctgctccaccgaagctgtctt

SEQ ID NO: 44911 - DNA, 1335 bp, Bovine  19866881694202
  misc_feature (1)..(1): n is a, c, g, or t
ncagaatatttgtttaattggaacacaccataattcttaacaaataagaatgtgtattatctctcacttttatgtataatttttattagtatatattaacctattataaaaataattgttgaattaaaattttataaaaattaaatagatcttctggaaatcacaaatctctaaaactctccccaaaaggatggaaaataactctaaatatgcacaaccttgtcactagtctgatacataatgaggatgtaaaaatcatcaagccatctaccataaggggaaagctttgtcatattaaattaaaaatgcccaaacaggtggcagtagctttttccttttgactcctactctctttcactttcttctctctcagcagccaggtgaaaaatgtgagatgtcaactacctagaccctcagcttttatttccttcgataactggaagtaagggcatccccacttgctggatgcctcccaggaattgatgtgatgtgatgtgatggagaggattctagaagccagaccaaacagcacactacttcccaaccacacagctctggtacctcaccgatgcacccagggacatggctttttcttcacagacgatgtgaagatcgaatgagataatcaatataaaagcacctaccgtgatacatggcctttagtgatggagccaaaaataatgatttgttctgaatctggaagcaagaaagtgtcaggatgtcctttatcctagctgtaccctctccctgctttatatttgctgcccacttgacctctgtgagtacagcatacatcaggttattaacagagcagacttcttaacctggtcctttaatccactctctgtttacactaagacccccgtatccccattttcactctcgtacctggaaggcaacactgtacccaggactcatgccctcaagttgaaaagacatcactgagggagtgacactgacagcaatccagtcttcaactgttttgtttgtgtcgttttggttggatatttggtagaaaatttcgaatcttgtcaacacaccattttcatactgaggcttattccacctaaattccaccacaactacattcttgttacggtgtttttcacttggtaatataaatattctgggattctctggtgctgatggaactgaaaagcagagatacagggcagaaaagagtataaggtcaacttctatcactcacgatgagggtacggagcaacacagtaataaatatttctcattccagacagttaaggtgcatctatcttgtccttaaagatcttctggagagaatatgccatagatttcttcaggaacctatcctatatt

SEQ ID NO: 44912 - DNA, 683 bp, Bovine  19866881769545
  misc_feature (1)..(1): n is a, c, g, or t
naaatattctaacataatcagaatacatacaggtaaatgttgaataaaaaagtgaggtttgcctcactatgggataaatagtttttttaacttatataccaatagacaatgcctatcctgtaggttactctatttccaaatatttcacagttctttctccctatatgatttttatccatttttatcctaaaagatatatgatgactgcttaagaatcctgggtatgattacctaatttagctaataaaacatttgcataatacaagtagtccttgtgattaacaaaattgggttcattcattagcatcaactgtcctttgccttgtattaggtgacagacatcatttacattttaggaatgatgaaaaattattcattaatttttatgtccacattttaaagtgagtgcgttatattttaataggacaaatgaaattattgctcctgtttttagtactaaaatatttactttgtgtccaatactttccttcatttgatgatcagtttatacctacacctataagtcttcttttccattttgtcattatatagaattcctgaaacatatgttcccactgagctagtagccctgatgttagtttacattagacaaatgataactgataaggaaatgatgggattaagctgttcagggccttgcaataacttactatataagagca

SEQ ID NO: 44913 - DNA, 964 bp, Bovine  19866882175461
  misc_feature (1)..(1): n is a, c, g, or t
ntgcatctacctgggacttatacccctggcccaaacctcccaccccctgttcaattacaaatgccatctcaattaaaaattacccaaaatgtcctgcctgactaatgtttcccttatcgcttccacaaaccttcctttaaatatgaaacctccctgatccctctctcgcttaccctgatcattaggccgactgattctccttcttgcctgaataaaggtaacctacctctattgaggtagtctctccttttctgcctgggcccaaactataccttacacttggacttcctttgtggttcagttggtaaagaatatgcctgcaatgcaggagaccttggttcagttcctgggttgggaagatcccctggacaaaggaaagactatccactccagtattctggctggaagaatcccatggacctatagtccaaggggtcacaaagagttggacacaaatgagtgattttcacttttacttcttttaaatacaagaatatatatatacatataaaaacttcttttagactttttgaaaattgcctaagtccaatatgtcaaagcattttagacgtctaattcttatccagaatatgatttaatccaactctgatttatctaactctatgcttctttttaaacattttatatgatatcggtaataatcagaataaacaaggcagggagcggcgaaatctgatagcaagctgtttcacaatgtaccaggatttgttctaatcagatatggtgagagacacagacacggaaatgactgtcatgaggggaagaggttatactcacaggttcctggaaggaggaggcacagcacgcccagcagggccacacagggaagcactcagtataaaagtgagggagagtacactgcctcagtcagaagtgaagagaaatcacgggtgagcctttacgaaggaattgctttgcatgagaaggaatgggctgggcaggg

SEQ ID NO: 44914 - DNA, 1710 bp, Bovine  19866880523960
  misc_feature (1)..(1): n is a, c, g, or t
ntgccgaccttatcccggccgctatgttgcagtaactttggctttcctgtttctgagacatttaccacgtggtgacctattaattgtctgccttcttcagcagccacctctgctgatgtcacataaatgccacctgctcctcaacaatgagaaaaacaagtgcctcgtcagctaaggtttatcccaggcttctcggtttcactgagaactctaggaactttccagttattttatctccgagaagttccttgaacctctccactttcctcctcttcaccactacagctatcagttcttccctgaattatttaacaggtttctttccggttttccctcatccattcttatctctccctctaacttatccaggcttcccttgtggctcagatggtacagaatccacctgaaatgtgggagacctgggtttgatccctgggttgggaaaatcctctgaaggagagaacagctacccgctccagtattctggcctggagaattccatggactgtagagtccatggggttgcaaagagtcgaacacgattgaatgactttcacatagccaatttaccctccacagtacagcaagaggaattttctttttttatgttcatacagtcttgttatctctttgcttaaaatactgtaagaacttgctctgacattagtataaagatcaaaagagattttcagccttacaggagccagacccaccaacctcatgggacacttgctttctcaacttctgcctcctggcctttttcggggttctcacacacgctgggctttcttcccatcctaggaccatcacatatgctggccctccttgctcctacctacctgtctcctattcattcttcccatcacagttcaataattacctcctcacaagttttgcccttactacttagccaaatcaggtctctcaaggtgtcctgtgtttttcttttataacacaaatcacaatctatgagtatacgtgtgtgtgcatgtgtgcacgattattgggttaatgtctatgtcttctactactgtatcaccaatactagcacaatgccactttggcacttaacagatatttgttgaatgaggaaatgaatgattttgccattttaaaaaacagaatgtgttctctgggagaagaatttacaccacgcagaacccttggaaaagaactttcagatttgaatcattttgtaatactatctcttgtttggcattcagggagtaattttattttaaataaaaatattctgtggttgataagtcaaaaaattagtatgaatcacagcaggaacaagaaaaattaaacctcgtagtattggttacattctgttctgagtataaaattgtactatttatataatatttattagcaaaaaggtgatcctttaatgtgctcttctgctcatctagatttacattatttaaaagtctttgttcatcaagttttatttttcctttaagaattttcaatccaaaggtttagtaaatgaagtatatatacagttcatgaacatattttaagacttttgggaaatactctaaacaaaagctattttgaggattaggaaatagcttgtctgaatattgccaagtgaatctggaataacgtttctgtgggatgcaatgaaaaaagcaaggcaagaacttcaacattctcagttcaaggttagaagaaaatgtgaacaaaaagtgtttctcatcctgt

SEQ ID NO: 44915 - DNA, 1290 bp, Bovine  19866881235827
  misc_feature (1)..(1): n is a, c, g, or t
nattttgagataaactctaccatttaataatgactattcatgatatagctctgagataatatttgtatctttttctggaaagtacgtatgctgttttctagtgattatagacaagtatattttatactatcattgagggatttttctatgatttaacaactttatcagaaaaccatcatagttaatagaaattcatattttaatcttaattaaaatcttaatctttaatcttctttgctttttccttcctaccttattttttggggaggctttcctggtggctcagagggtaaagcgtctgcctgcaatgcgggagacctggattcaatccctgggtcaggaagatcccctggagaaggaaatggcaacccattctgatattcttgcctggaaaattccatggatggaggagcctggtaggctatagtccgtggggtcgcaaagagtcagacacaactgagtgacttcagtgtcatgtcattttcagcagtatctcacttccaggtaacaattctgttttagttaccactgctatataacaaactacctcctacattcagaagcttaaaaaaatattctttttgtcttgctcacagtttttggctcagtaattcagaaagggcctctaagggtcagttcttgcttggggtctctcatgtaggtgttgccagatatcagcgggggatacagttgtctggaagcctagttgggctggaggcccaagatgcattacttgtatggctagcaattgatgtccctcattcacttgtagctcagctggggcttttgacatggcctttccagcatagtagaaattgacaattttcatggttgttggcttcttccagagagtatctcaagaaggctggacagaagctctatgcccttttttgacttagccttgaagttcacatcacttacaccttattctattggctgaagcaatcataagtctttctggtttcaaggggatgagacatagaccccaccttttggtaagagaaatgtgaagtaatttggggatcacatgttacatctaccatattagggtaaacatatcaacaaattaccttgacagtctgtttatttactaatttgacagcagagtaaactgctcatttgaacaatgtcttacatgcaagaatgattaaattatttctgcatctaatccaaatgtggtcagtatagcagtccatcttctcttctaaccacaagactgctgaaaaaagctggctgtaaaatattagactcgacatctggcaaaagaaaacagggctctcagcaaggcat

SEQ ID NO: 44916 - DNA, 1352 bp, Bovine  19866881365475
  misc_feature (1)..(1): n is a, c, g, or t
natggtaacgatgacaattaaaatacaaagagtcatccatataggtcccgagaaaaccatccataaagatgcaatctgattttcagtattctttcttgacagatgaatatttgcatggtcaaagtcgccaaagttttatggtgcattttttgggggtgaaattttaaatagctttcattatggactcacacatgaaggctgatttgaactgtcccagaattcaccttagtatgttatggtttttgtttttagtatttagtgggatccccaagcagcacactttcgcattacaaaacaagccatttaaaccaaattgtgaattttatcacccgttaaccacatgaaaagaccagatgggtacaatttttgatacgacctgaactgattcctttctactatgacacagttatggaatcttgttttttcacaactatacaaacatactccatttttcttctaaatcaaaggttgtgtcacaatacaagaatcaaatttgtctacatggcctgtgaagacctcagataaatatactcttttacccttttgaaattactcaaagtgacagtcatgggacaagagcaaatactgtatcaactcaaagcagtaaaccattatttttattatttgaattggttaaaaaaaaaaagccctaatcatgtttgagaaattttgttgcttagaatatacagccaatataaaagtttaattttaggcatcaggattagattcctaattagattagatgtctaaaagttcccttcatctactagataagtccctgaaaggaaataaataaaatatgtatatcctttaattaatgttaatcttcaaaacacacacacacaaacatacaacaggatggcaatttacagtcctgatccccaagaaacttctaatttaccaggcatgatgaaatccgtacaccagtaagtatagcaccaggaagcatgtaataaaggctttaaaatccagatttgtgtttgtcatgttttggggtctacctatgtcatttccctgctatctacaagtgcacaaaaacgcacctgatgagagacacctttaatacagctttacacaccatggcatcagacatattaaaggtgcaacaaacatgggtgtaaatttcaggaaatctttattaattcaaatgccacaatacagctaaactgccaaagcactacaggttttgagaacactgtggaaacattctactattatcaattctaaaatccatttaacaattattcatcacacgggctatgatgcaacagaaagaaatcaatcactagataattataagcctccttcaccaaaaaacagcactgatacccacttaactaaattatacagta

SEQ ID NO: 44917 - DNA, 1382 bp, Bovine  19866880487802
  misc_feature (1)..(1): n is a, c, g, or t
nagactgtggcagggaggaagcaggtgtgccagaccttaggctaagagaacctgggtgatagtcaataaagctccactattttaatccgtgattcttgggaccagcccctgtcattgaaaagtttatcggttttctgtgggcctttgggttttcattaactccttccctgctcccatgtaccaactctgccctcggtcatagagcccagtccttctctgttggtgactaagtatgatcatcctgaagaaggtttaaggctgtttcttttcccattagaagtgcctttcagagctgaacaaagagctgcagttggtgtgttagcaggcagaaagaagtgtggaaaatgtaaattgcaaattgaatttttcttgaagggacagctatcagttcgaatcttcagataatcagttatgatgctgtcaaataaaatcactcacaataggggccatttaactctagcaaatgcagattaccccattcactcttaactcctaaaaactctggctgtggtgtcaggcagatctccagtgagaaaaacttgaaaaaagattcgacctgaaatcaatgatgaaatcttgggcagcattttaagagtaactgtataaaaagaaagcaattattgtcattcatttaatacacctctgaaagttagctgaattcttcatgtggaggtgaaagaatctacttgaaaattctactttgcaatagattgtaccctgaatggccccagtagcactgtctgggtataacaaactacccaacacttgtgaatattttaacttcaaccaggtgacttagtggtaaagaatccccctgccaacgcaggagacacaaaagatacaggtgcgatccccgggtcaggaaggtcccctggagtaggaaatggcaacccactccaatattcttgcctggaaaattccatggacagaggagcctagcaggctacagtccatgggatcacaatgagtggcatgagactgagcgactgagcacacgcacataactttatacggtgaactttctttaggtcaagtggaaggaagcattatgcatattataataataaataagaatgcaaccagtcagtctttggaagattcaaaataatgcagtagaaccttctatacatttatatttgtcaagatatcttctttaagggaggttagatttttttttaatttataaagactaattttgagtgtgcttcaactgtactcaagtatagaaagtcaattttaggcattacaaattattcacattcatatattataatctttataattttagacactgatttatttattctatttgacaacaaaaacaacctaaaataaaataacctggtattactttgatgaaatgtcctattatctttcaactt

SEQ ID NO: 44918 - DNA, 4342 bp, Bovine  19866880547884
  misc_feature (1)..(1): n is a, c, g, or t
nattattgttttttatgtgtacgaagagtgtgccctagggatcattaacttactgagctcactgggcaggatgtgagcctcatggcaccattgttttattatttgggggcatgtcttgtgcttctgttgcatggtttattgctaagcaagcctgattggttttctagttaagtaaacctactttcttgaataatcattaacttacaggtatctccttttttttttttaacttataactccctcatgggattaactatttaacctcctattttgtttcctggtggctcagaggttaaagcactgcctgcaatgcgggagactgggttgggaagatcccctggagaaggaaatggcaccccactccagtattcttgcctggaaaatcccatagacagaggagcctggtgggctacaccccatggggtagcagagtcggacacaactgagcgacttcactttgtccctttactctgtctgcatcgttaggagtccactcaaagcaagaaaacccaaccacccctcaccacagtttatttttctcagacaagagcagaggtgggcagttcagggctggtgcaggagctccacaatgccatcagggacccggcatttccatctttctctccaccatccttagcttggaggcatttgccttcatgctcattgccttatgattgcaaaatagctgctacacttaaaatatcacatctgtccatgttcaaggaagaagaactggcaaaaagaagcacactagcccgtttggtctcttttttatcaaggaggtgtggatgaagaatgtcatcagtaaatagagggtactgaaatcatcaagccatcagccactgccactgcccccaagaaaaacaggatattgtttccctacatagttaaggtgctttcagggatgacagcactacaattatcccctaacttactctcaaataggaacatggccttccttaggcattcattgtactttagccactgtgttacactcctttaatcttttaacaatcactttatgagaggtactaaggcacacaaaaattgagttaactgcccaagtcgtcggagaaggcaatggcaccccgctccagtactcttgtctggaaaatcccatggacggaagagcctggtaggctgcagtccatggggtcgctaagggtcggacacgactgagcgacttccctttcacttttcactttcatgcatgggagaaggaaatggcaacccactccagtgttcttgcctggagaagcccagggacggcggagcctggtgggctgccgtctatggggtcacacagagtcggacatgactgaaatgacttagcagcagcagcagcagcccaagtcatgggactcataagtagtagagtgaggattcaattcagacagtctgcctctcactggaagactgagtagtcacttcagtagcccaaaactatagcccaataagagggcatggcacgcccctccccctgccctcccacttataagccttaggacactaagtcacctctcctgatatagagggagattacattctcagcagttcttcaagctacagacgtgagacccctggaaagtgaaagtgttagtcactcagtcatgtctgactcttgtgactccaggcccttgagagtcaactgtgagcaagacagtgtagaccctggcctaagagttcatagcttctcaagaagacaagcaaataaatgacatttaatgagtgatacaataggaaaaatttaaggagccataaaatagtacaggggcatcgtttttattttaagagtggaagtgggaagtgatgcttcaggcctctgaaaggttgaagttggccaaagaagctgctgaaaggaaaaactgttccaggaggagagaaagagagagcatgtgtgttagggaggggaagggctgtacatctactgtcaggaaaacctggtttattggataattggaatgaattacaaaacccctggggcaaaagttcaaggagaaaaatggcagaagagtcatgaagagctctattacctaaagccaatataaggtcaagtgctttgtttatggatttagtttgtcacaattagaactgtaattataattacaaactgtcagcagtaaagaaaccataatatagcttatgtcatttttattccaaacgagcttgttaacttcatggtacattgatcatttttaaatgagttttttttttctccctaacttaaaaatgtttggaaatgaaatgcttagcattctgaaacatttcttatgctttataatggaggaaaatagatgtctgtgtgctatctgacaacacactttggtcttagttctccttgtttcatgcccttgggtaatctgggttggaagccagtgaacaagtgactcattgatctgctaaatcctgggtatagaatgtaaggggtctcaacacataggaaggacagggagataggaaaggaagcagagcggctttgagaagaaaccatgaaagaaggacatacaactctggagttgtgtggatatatgctctctagaaagtggagtaaatgtagtgccgagtcctgcagagaagtgacccttgcaccgccaggagaaatagtgccccccaccccacccagaggctcagggctctcctttcataggcagaatagaaaagacacaattctgagggattctttcattcaccaacaaatattccatagtaacgcagcagtgaataaaacaaacaaaaacctctgccttcttgaaacttatattctagtgcggcagagaaaatccagtaacatgcaaaaagtagtatttcatgactgtactgctgggtgtgctaagttgcttcagttgtgtccaattctttgtgaccctatggactgtagcctgccagcctcctctgtccatgggatttcccaggcaagaatactggagtcagttgccatttccttctccaggggatctttccaacccagggaccaaacctgtgtcttttacatctcctgcactggcaggcaggttctttaccactagcgccaccaaactggatttttttccaaaaatgcaattttgaattttggtcttacattgaaaactaaatcaatatcagtataattcactgcatttgtagagtgaaagaaaaagcacacatcatttcaatagtttcaggaaaagcatttggtaaaaatctaatgtccattcatgattttaaaaagcaaacattccaggggacttccatggtggcccagtgcctaagactcagtactccccaacgcaagggcccgaatttgatgcctggttgggaagttagtcccaaatgcagcaactaagacctgctgctgctaaagtcgcttcagtcgtgtccgactctgtgtgaccccagagacggcagcccaccaggctcccccgtccctgggattctccaggcaagaacactggagtggggtgccatttccttctccaatgcatgaaaggggaaagtgaaagtcatgtcgcttagttgtgtccgactctcagcgactccatggactgcagcctagcaggctcctccgtccatgggattttccaggcaagagtactggagtggggtgccattgccttctctgacttggtgcagcctaattaattaattaattaaaaaaaacaaaacaaacactcctagcaaacttgcactacaaggaaactttcttaatttaataaatttaacaaaagatacttataaagtaaatttaatgaatgtaataatggtaaaatggtgaaagctttcttttgagatctataacaagacaaagattcactttaattcaacatatagcattgaagtcctagccaatgcagtatggaaagaaaaataaataaactgcatcattagtggaaatgaagaaatgaaatatcactattcacagatgatataattatgtgagtgggataactgaaaagaaaccacagccaaattaaaataataaatgtgtttagaaaagtcactagaaacagtatttttaaatctatttaaattctatatattagtaacttaaagatcaaattaaaagataccatttataataacttcaaaaatatcaaatataaggaatacatctaacaaaggacttcaaagcaaaaaataataataactgtaaaacattattaaaacaaataaaattatatctaaataattgatgagaaatatattcatggattataggaatcaaaattgtaaagaataatatcagggacttccctgtcggtccagtgccccaaggccaaaaacccaaaacgtaaaacagaagcaatgttgtaacaaatcaaataaagactgtaaaaaggtccacattaaaaaaaaaaatcttaaa

SEQ ID NO: 44919 - DNA, 1798 bp, Bovine  19866880779002
  misc_feature (1)..(1): n is a, c, g, or t
ntttctcgaataaagttgtattccttgcctcaacacctcattcctcagattcattggtctgtaatgtggtgagcagagtgagcttggactcagtaacaaaagtacacagattgctggactccacctgcagaatgtcacggccagtcactctgggtagggcctgagattctgcttttgtaacgagctcccaggtgatgttgataattctggttggggaaccacactttgagaaccactaaattaaagagtcactgtggccttcccccacttaaggtaaaaaccagaatttggctttttcctcagtgattcttttcacaaagacttgaatctctgggctgggcttctgaaaggccaggtctttgaatattgcccaagacatgtgttttatggtggctttggcatatccagtaagaacaagagtgctcaaagtgtatagtagtatcagcattatctagagacttactagaaatgcacatttggaagcttcaccctagatttaatgaacaggaaactccacaacctattggttctgatgcaggccaaagtttggggaccacaggattacagaggttgttgggaagccatttaggatctttttagtaaatattaacaactgtgattgggattcccaggtgccactagtggtaaagaacatgcctgccaatgcaggagacataagagaccagggttcaatccttggattaggaagatcccctggagaagggcttggcaatccactccagtattcttgtctggagaatcccatggacagaggagcctggcaggctacagtccgtagatttgcaaagagtcagacgtgactgaagcaacttagcactcaggcaacaactatgaagggctttcctggtacaactatttcaagacaagatgcggcaaaggaaaaaatcaagctgcagtcttcctagggcagtggtcattgactttcagtcttttatgcgtagatgcaggcagcagcactcttgcctcctccacagctagtgctggtctaattaaccaattaagggatcatagagcacacagaaagactaaaacccgagattaacattaagtggcaattagtggtattaggcagtgcccattatatgctcataaacatattaacatgttgctcttaaacagaaatgaatgcagccagacaccattcaaaagtgccaggcttccaggggctctcatttatcgcaagtcacagaatcaactgacccttgatcaatgacatttcacataggttcattctgccaacccagactttaatctttcagctgcctattgaaggccttgtgctgcagcgaggtttctggaagtagtgagtggtatctggtttctcagtccccttctattcccagctgggattttagacgtggctcactgtcaacattcagaaacacggtaagtcactggggaccacagctcagggtgcatgtgtgagcaaccaggtttaattccaactctgtgtgcttgagtcatcactgctctatttgtggaacagagcaaacactgccagcgatcttcaatgcctgatggctcaatagatatctaagtggaggtgaagttggaataattctacccgtttactgtactgttcgcaaacgaatcagtaaaatgtctacaacttgcaaccttttttttcaacatattgttaggggaggaattgaaagctctcaaaaatactcctttgttgggaactttccccaaggtcttctgaaatgtctcaccaaattctgacttcataaagagatgatatggtatagagaaagaacctgggtatgaaatcagacag

SEQ ID NO: 44920 - DNA, 1640 bp, Bovine  19866880818517
  misc_feature (1)..(1): n is a, c, g, or t
ngttggctgggattaactggacacaaaattcaaaatggaactctggtgtacagttcttctggtaccattgaatgtaggctgtggaatcaatgtcagatatttgaagacttggatagtgggaccaaatcagagcattcttgaagtagaccagaatttaaagaggttgtgttattacagcttaatatgttaatatgagaacacttaatgcacagtatcctgtacatttttccatgtaaatctctttaaaatgtttgtcttgctgtacaccattttcttttaagaatacaatgtttattcatttctgcagcaatttctgaggatttatctatcttgtctaccttttcctcttctgattaagataaataatagaagtcagaaaaataattccttcttgaagagttccctaagagaagaaagtataaatctttaaaatatcaaaagcccattcaagagtatcaacctgataactctggatagaaaatgttgtgattttggctcttaagctcagtaaatcagtctgcaactgtaccctgccaaaatatcaagaacaaaataaaaaagatggtcactagatgtttccacagattgggatatttggcatgatgaatttggaatatctgcacaattgattgaattcttcatctggatattttggcatcatggcaccaacagctttggaattctttcttttccactgcaaatttgggcagaaaacacacagacccacatataattcagtgcttgacttttgaaagataagaggtgttgcaatctcatttattttctcactgaaatctttttcagaagttaggcagagcagatgagttaatgcacctccacagttctctaagtgaaaaaatatacaaaccaccacgtttcccccttatccttcctctaccttgtcagtttcatcgttccaaagattctatcatcttggtggtaaggaccttggatactggagggtgagagagttggggaacacacagggccactgaatcatcccaaatatagatgtttgtcaataaaggaaaaaataaacttggcatggcagagagagtttgttagcttaggtggggaacagaacaatcttttctggacaggttctcaggatttctttccattctattgcacaaacatgattctgaatttcaaacctatctcagggtactcagttcaaggatcagtatttagggagcaccagctgcaaactcctcttggagtttgaaatccagcacagagtcaagatttaggacagaaaagagtgaacaatacaaatttgaagttctatgacaggcggtatactctgaatgttccaagtcgatgaataacaatgaaaaccaggatttgggggaaagtacatggagaaaggagtattgagttgaatcttgaaggatggccaagatttgactgtgtataaaagaaatattgtctaatggaatcaacagaagcatagaaataattaatttatgaactggattaaagaagagttctatgtggtcaaattatagaaaggaatagtggaagctcttcaaggccaggttagaatatttacccctatgtcatgagggtcagggaagcatgtgagatggttgagcagaactcagcaactgtcacttctatctctgtgtcttcctaccaca

SEQ ID NO: 44921 - DNA, 652 bp, Bovine  19866880864256
  misc_feature (1)..(1): n is a, c, g, or t
ncgacgaacgatctaccaagttctcccttggtttttcataaaagatttcctcatttcattgtccttagagaattattgattctgtggtttctgttttttgaggcagatctttcagttggcggaatacttgcacttgtcttttatgcctaagaaataattgatggaacttgtggaatgtgcatatttcacattgcctggttggattcctgaggatgctcagttttctggtctatgttttcttttgtttttgttctgagtgaaggaggtcagcagggcacagaaagccacttctttgagattactagaaaataaagaatttagaatgaacagctccagagagatttatacaggtcccttaaaaaaaattacactctgaaggtttgcaggaaaaacaggtccaagcagggaaaacaggcagattagtttctcaggaagaatttagatgtgtcttgaatgttatggttttaggataatctggctccaccataaacacaataccaccatatatttttctacatagtaatactctggtggagctcagcaagatttatagatgtttgctgatttctggagagacagagcagctattgagtcactcgcccataaatccttaaccctgtctaggagcaggacagtacggggagacactttt

SEQ ID NO: 44922 - DNA, 1897 bp, Bovine  19866881257398
  misc_feature (1)..(1): n is a, c, g, or t
ntcctattttgatacttttatctaagtattaatatttcactatctagagtgaaaaagctcaatctcaataatttttacattcctacaaaacagagaagagatagttgtggccacctgtgcaatttgcaagaaagggatttgtacacagggtggtgccttgcagctcctagttttactctatgatacattgccattgagtgcaacttaagttttctcaagtcccaaactaaagactattaaagaaatcataaagtcacaaccatgccatccactctggtttgcatacaaaaattacttgcacatctaaccaataaatctctggttatggaactataggggttttttatcatctcttccatgaaaaccatgtttggtaaacttcccttcttggtttgttgtggtataaatcaagtttgaaagttaatataaactggaaactagtataaactacaaaggactaatggagaagtgatttttctgggtgacctataagaagtcactcagctcctggcctcagtttccttctttgtaaatgttaaattttatgtctttagttttctcagtcctaagattccatgattttttgagaatctctggtaaatagcaccacaaaacgttaaaagttatttcgtttatttataaggaatcagatccattttatggaaaccctttggtgaaattccattttgagtagttttgaggccatgaccatacagtagatattgtccctgctgttatgaagtgctcaagagaagggagaggcatcattaaataaagactcaggaaatccacaatgacgtttatgaaacaactttttaatttcaattgtatatttacaaaaagacagagaataagcagcgggaaggcaggaatgatgcctggccacctcccacctgagggtgcagaaaggggccatggacaacatgtatgtgtcagactgatcttccctgccattattgataacagcaatggacaaaaggcttcagtgaaggaggtcagtgtatttgggaagaggcagaccatctgttcagtccatgtgcctgagaaggaagaagacccaagtcagtctattgaggccttggctctttataggctgaggcccttctctttggaagttttaggccgccttctccagggcatgtaggggtcagggggatgatacctgggaaaacccctatggacctcagggacccgttgctgataacagggtggagggaagcggggcataggcggctggggaccatactgaaagtcaccttggacggcaaattctgtttggatagatggggggacatctgaatgtaaatagtttaaggagaattgatccgattggaaaggatggtctgaagaaaaacaggtttcctggggacagaatgggaatggaggcatcacctggtgtaaggggatgggatgaacgttgtggggacaagagcggaaacaggggtgggcagggaggcgtggggagcaggggttggcgccctgggagaggcaaaggtctgggcagagggcaagccggctgatctccgcagaccaggggctgcctctcaagcctccggccaggtcttcttctcccagggccatccgggatccacttgtccactgggtcccgccggggcagctctaccccccaagcgtcggccacgtgggccagcaggagctgggagaggtggcggtgtgcgcactggttccagtgcactccgtccgtctgcaggtacttccctgtgtggcggcggaagtggaagtgcaagtccagcacatcgaagccgtgcttttgggcctcggcagagctgtagaaattggcttcgatcacactgattttcacggaggaggaggtaaactggacctcgggcgggacgaagcggcggtattttgtcgcccacgggcaggccgtttccac

SEQ ID NO: 44923 - DNA, 1187 bp, Bovine  19866880469424
  misc_feature (1)..(1): n is a, c, g, or t
ncacatggtaactctgttaaggagacataggtagttagaaaatctgtaacattttcattaaatagtgctgtttccagagatgaaaaaggcagtttcgcctctattgtatgcggttttactgtcatcatcagcaatttgaagaccgtagacacagaggtctctatgtagaagatttagtgtctacggaacatctataggagagtaattcatttgtgctagaacattaagtcccaaaatactcctcaactattttaaataaatggaaataatacaatggatatgtatatattattatattttaattacagttccagtgaaaattaaaccagttgcatctctgatgttaggtgtgctgttttctagaaaaaagacctttctttcagttacaatgatgaatgtggaaaatattgaactatcttaataattgggctcagaaaagagctgatgatagattcaaatcctagggtacatattcaaacaaagcatatataaataatgaagtcttacttagctataatctctttgggagcatctttacaaattcagaaatgagaacctggaaaacacaagctgatgcaatattctgaaaaatcctccagggaaaagaacatctacaaaacaagcatagcaaatgaatcgtattcaagaatttaaaccaaaatgttaatgctaaaagagcaatacaggatcatgaaagtaaaattatttcacattatcattttaaaccattctctctgtttggggactgcagtaattactttcaaggatatattcattactgggaaattgaaagctatagttgttttgtcttgttttttttttaaaaaaagtattgcttttataatagcatttgatttaataaaagtgatgaaactaacacctgtcactgcaccccaaagtgtggtattattttaaaagttccctctttggctacattgacctgaaaaataataagccaagtttaatgttcatgataaaccccatgagatttgagaatattttatgaatatgaaagctcctttgagaaacatttgcattttcccactgcataaaaaacaaagcaaattgcaaatgaggtagaaagaacttaattaaaaacattttaccaaattttaattctcaagtacttaccgaaccatcatgataatattctcattgactggttaacatagaaaaagcctcttaat

SEQ ID NO: 44924 - DNA, 2287 bp, Bovine  19866880907361
  misc_feature (1)..(1): n is a, c, g, or t
ncttttgttattggagtatgccaagaaaatagtaaaaaaaaaaaaaaaaaaaaaaaaagtatatttcctacattatttttctctaactgtataattgaagtaaaataatggataatcagaaatgtagataataaaagaaaagctgaaacattaaaacattcaacctattgtgcaataaagaaatttacaccataaagtaaaagcaatgtaaaaaataaactctattctctcatcaatcaaaataagagtcattttaaaactgtgaacatgtgaaacgaaaattagttatttagaaactccactggaaacactttatgaaacccattagtccctggggttaccaattcacgcaatgatcatcttaatgacttatttttgtttgtcattaatgtattttctctttacttttataattttgatcaatttgtcttatctttctaagtaattttttgcactttactaatgtatacttgacaaacagtaaacttcacatatttccggtgtacaatttgacaagtttggggatgtcacctgcataaaagtatctcaacaatcatgataatagacattttttttatcctccaaagttctcatgtttctttgtaagccaccccaccttctacccacattcacatgtaaacagtgatctgctctttgtgactttactttaatcttcacttctagaatgttatataaatagaatcaggtattatatagagttttgtttctagctttcttcacataacatgattttaagactcaccatgttcctgtgtatatctgtatttcattcacttaaatttatgagtagtatttcattttatagacatcctagctgacttattattcactagctgatgaacactcaggctgtttccagtttggggtaaataatactagtttaggttaataatactgccataaacattcatatacatgcctcccatttttcctgaatagagacctagaagcagaatgggtacttatattgcaactacactgatcttggtatatttttctctgaaggtcaaaaatctccaaaatactaagaaaaaagattagaacttaatgattaatcaggggagaaaaagggattcatcatgatgttaaattacaagtagactatgcacataagtgggaaaagaattgtcccagatgatataaaaaacacaaactatgttgctcagaatttgttttcaaaggcattaattctacttttggatgaagttcttctggaagaaagatcatagctatcttttatcccaaatactatcacagtgattagaatacatcaaggtaataatagtgtttattagaattagaataatgaacttagatgagctcataaaggagacaaatgaacagaaattataatatgtgtaaaatgttaacaacttacaagataaaatgttttataaccacaattggactctaaacaataatctgttttacttctattttctagcattaagtcttcagaccaacactgttttgtaattttacagtcttgtaaatatacaatagaattttattaaagtatttgagatatggcatattaaaaagagaatgacaactgaaaaaaataaaataaaggacactttgagaaacaactgtatatacaaaataaagaaattacataagaattaaagtaaaaagttaacttcattaaaaatttagctggtacacagttcatctatttcactgtggcaagccatcaaaataattatgattccggaatgcaatctaatctcaagcgaatgctaaaaagtctgtcttccaattagcacattagtgtgacttgcctaattaaatcaacagaataccagtagaagataagcccctaagtgtgcactatgagactcatatgaagaaacagatgtaatcatgtatttacaatgcacattaggaaattgttgaaaagtgtttaatatggtgatttttttccttcatatagagcaaatcaaaggtctaggaaaggtattaaaccctagcgaaatgctcaaatgtgcaaaatcagattttaaaaatctactctgttaatgcttcttttataattaagcaatgatgtcttaaaagcatacttctagaattggatgtgggaccataaaaatgggtaaattaatttttaaatataaacgccatattagaaggtaattagaaagtcctcagagatacttatcattaaattacatgctgcttcctttgttttccactgtgtagggaacagcttttcttttctatgaatctcttttccatactaatcattacatacatttaaaagctaagg

SEQ ID NO: 44925 - DNA, 2707 bp, Bovine  19866880967280
  misc_feature (1)..(1): n is a, c, g, or t
ntctgtgaataccctaaaaacacctgagttgtacattttaatggataaattatataagatataatgcacaaaattatatctcagtatgctgggagggattgggggcaggaggagaaggggacgacagaggatgagatggctggatggcatcactgactcgatggacgtgagtctgggtgaactctgggagttggtgatggacagggaggccaggcacgctacgattcatggagtcacaaagagttggacacgactgagcaactgaactgaactgaactgatagctgatatatacatgagaaaagaaaagaaatccaaatattaacttttattcaacctgaatgttttccacaggaatatgtcttgcctttggcaatgaaaattcttgttagtattctctttaatattaacgaagtctttaatatatataaatacttaagttatttctattgagattctttgacttggtaataaaagacttaagaaatttctgtaaatagctcctgatcagttaaaaatctgagtaaaatttcactgaaatgaagtcactcagtcgtgtccgactctttgcaacaccatggactatagcctactaggctcctctgtccatgggattttccaggcaagaatactggaatgggtggccatttcttttttcaaaatttcactaggtggcgccaatagtttgagtctttattgacagaaaaccttgtttatttgttaatttcccatattcattaaaataaatggttaaaaattatgtggtatgaaaatttgccttgtagttaccctgagcaaacctaaattggaagttttatttgtttgaaagttctgtcagatagaaataacttggaaccatatattttaaaatgttatttaaattctagttgcagactgagttatagatttttcatttcatttatctatcaatatataaatttatgaaaactgttagaattttaaagttattttaaagttgtaattaataaacttggttttcctatagattagaatatacctaaaaataatatacttgtctgaagtaaatattaggtagaaacatctaccctaagatattaaatagaaatcttcaagtagaaagttgtagtttgaaataagtaaaaatatgctaaaaagattaataacgacataagcggcagaaataatatgtagccttttgtgactacttttgaagtccatcattacaagtaattctagtgattttcttttagggtgaatggttccagtatttctgaccccaaatttcaccttttcatttttcattgctagcctttaagtatttattaaactacctgattagtggacattataacagatacttggtaatttattgcagctagcagtatgtagtggttatcttgaaagaaatgaactttgaggataaacatttaggaagatttgcagaaaattattttctccccaaacacaaattaattgtttgaattatggttgctgtatctagaaatctgagtgatcacttttcttattttttaagatatcttttctaagttttaagttatggatttcaaagagaaagaaaagatgtcaagaaaggttggaggaaaagagaatcattaaaatatgaactgagaaaattgtgtgagaaaagcagtgaagttgaagttggaaacatttttttttcctattgcttaaacagtgattcagtatcttttaaaagagcatctttcttcaagtgtaattgtataatagtttgtactattattagtgagttttatatatactgaagtcatatttgtggtaaaaatgtaagaactatgtaaaataaataaagcattcttagatttatttgtattttagtggtaaagagttcaggttttagaatcacactgcaatttcttgctccattacaactagttgtgtgagcttgggcaacttactttgccattctaagcctatatacttttccttctaaatctctaatgctattgctaatgctaagtcacttcagtcgtgtccgactctgtgggaccccatagacggcagcccaccaggctccgccgtccctgggattctccaggcaagaatactggagtgggttgccatttccttctccatctaaatctctaaagtatgaataataatatctataaagacgtcattgtgaaaattcagtgaaatgtgatcatacacacacacactgcttaatacagtgtttggcatttaataataccatgctgtggctagaaagatgatgaatagtacaaagttttctgaatcaaaggacttacacattgatggatgatacaaatatataaagaattataaaatgatatccaaataaggtacagtgagacttcagaagagaaagtcgttgattctgcttggggaatgacacaagtcaggaaagaattctaaaatgtgtttgtgttttgagtaaagagtaggtgtttgtcaaatggagtagaacattatatgtaaagaggatgtgcaaagccatgaagtttcaagcaaagcagtttttatctgggtgataatgaactagtatattttaaatggaagattcatgaacagttttgtaatttcaggaaaataggacagtaagctgtgaatcaaatggatggaatgtggggaaagggaggacaggagaagtcatgaggtgatatgtagtgattcacatagtggatggctgtgttgagatagtgaaatgagagggtagtgatatatac

SEQ ID NO: 44926 - DNA, 644 bp, Bovine  19866881005030
  misc_feature (1)..(1): n is a, c, g, or t
nttctattcaaactgatctaggactaactttcacaaaatcattacaatatgactccagttagttaaatttgattattatttcatgtgagacatatttctttctctttgctatcaaagaagtagacttttacttttgatgcttgagcttttcatgaccacctctgacactggttttacagaaaaatatatctatctcagcaggttaaagtaaaacatgtgagcagaaatagcctatataacctttttgttcctataaatgctaacactactcaggcagggaaaaagcatagattattaccagataatcctttatctggtataaatcattcatctggtataaatttatctggtataatccttacattatttctacagagttttatcaattcaataaaaatccaaaagtaatttactttgtaagcagaatgtggaaagaaagaaagttagtgtaaatgattctttaaaaagaacataactgctcccagagccagttgaacagatttggataaggcagtaaaaatcatcttgataaagctagaaaacttagaagaggtaaaatttcaatatgatttgtgaggaaactgtgaatttgaataatagagttgtaaaattgtacattaaccctagagaaacatctataaaaa

SEQ ID NO: 44927 - DNA, 1462 bp, Bovine  19866881045434
  misc_feature (1)..(1): n is a, c, g, or t
ntgagaaggataatattatttgcaatttttcccccaagggtagctctatgcagctcaatggtggatagcttaatttataatttaggttatatttgcaattgatctctccatgctggcttctgctaagctggaaattttaaattcacaatcatagatcattataaatggcaccaagtgtttagtggctgccagataaatatagattttcatattaacacaaatggcccagaaattatggagaaatggctcactgaagactactttcaggactcaaatagatgataagttctaacattttatagccaaaagctggaaggctggctgtttcgacttggaagacaacaataaatgtatctctaatccactcttgttttcagttctcaaaattatttcttcatgctctgctgcagtatttggatgtggtttatatattagctaaataatatatcatcagtttctttttccagactaaaaaagacattaagctgggaaaagatccaaatgtcagtctcaagctatttgtatttcagtttgattgcctttaaaaaattctgagaaaataaccttaacactaaaaagaacagtattttggcttggaaatgacaagttcagaccactcaagatactaaaatatgccacctgaaaagaccacatgaaatcataatggtcttactggcagaaaatgtatattttatttcaatagctcatatgatcatctgtcccttgtcaacattcttacttgagtgtgatcagaaagttaaatctaacattacttatttcttcatgatccacacttacagtacacatgtacactgactgaaatttgaatatattcatgcttttcactttctgattcaaatccaatttaaaattagaaagctaactgacgattaccaactctcttctatgaacaaagcacagaagggatcgccactcaggtggaatctctttgacttacacagcactctcccatgttgtgaatacggtttttgctgctataacctaatgcaagtttccaagccaacatgtctcattaaatcaaagaagcaccacttccccctttgctagagttttcaaagataaatagaagtaaatgttggcaaattcttccccacatatgtatgtagcacacataagcaagagttgattcatattctgcaaatcagtagtttaacaaagaataaaccaaaattccatacatctgtacagatattactacatgtttataggtactctcatacacatatgctactaatattatatggcatttgcttatatcatttaatgaaagagattattgtgctttctgtgcttttactgtgctttctctcagcataattattgtctttgacttttcatcttattttataagaatatcaggtaggagtgaatccagtcacaaatagcaacaaacccaacactgtctttaaaaataaagttttatttgtctcataaagtagta

SEQ ID NO: 44928 - DNA, 1045 bp, Bovine  19866881402363
  misc_feature (1)..(1): n is a, c, g, or t
natttggtttcaagccaactttttcactctccctctttgactttcatcaagaggctctttagttcctcttcgctttctgccataagcgtggtgtcacctgcatatccgaagttactgatatttctcctggcaatcttgattccagcttgtgcttcatccaacccagagtttttcatgatgtttcatgactggtttgatcactttccagtcatatactcattagcaaaatatatttaaacccagagtaaaatttcttaaaagataaactgaactttcacatatgcaaatttgcttagtagaaaatgtttaataaaaattacaatttgaatagtaatctccgcaatactcttaatattgtaatcttacgtcatttaagtctacccacatttttggcaatatgatttgcctagactatgtcggttcccaacttgtttatgtaccacttttctttttataatctccctaacgccactgagtttgttgctagtgtcaccttttgcctattatcctctatctgtgaaacaactgaagaacattacctgggattgagaaagaaaagcaggtgatgcatcattcacatttgatgtcacacttttattcttctgaaactgactcttaatgtcatattttcctggccctggtactccctaaattacagaaagaaaaagacatgctctcattaagaaagtatctatagcacctaagggaacagttggttaaatatctgaaccaaagctacagggcttttaagtgatattaccaaagctcttcattaaaaagcaagccagaacaaacctaagagcaacaaacaaagaaaaagagagaaaggcttttccttcctttgcaaagcctcccaggaacctaaaaacacactgcttgaaactttgctgccctctactgatagatctcaggaaaaaaaattatctgagcccttcacgtgattaagcattacagtaaataaatatatttcttccatttaacttatacaaccagctcttctattttaactacaaatgttagaagatataagacattaggcttttaa

SEQ ID NO: 44929 - DNA, 1531 bp, Bovine  19866881713083
  misc_feature (1)..(1): n is a, c, g, or t
ngaacatgtacctataatagaataataggcaagttaaaaatttattactgtctgatatttgtaggtaaaagtggtaagaactgagattgataaatgacataatatgagtttggttgacatatgaatagtattcttgggactcacaaacttataggatattcaatcactgaacattctatagctgtgtatttatttcaaattattttagaacttttattaacactatggaagtggattttgttttattcaaatgaagtcttttcttttgaagttattcaagaaggataaaactcattttcattagtctaaattaaaggagaagtagtatagttgcagtcagtatactgtataccattaaatgttgtgtaaccaataaaaacacatttgaatcatttaatgaggaagttattaaatgaggtgtatcacattataaagcaatctactcttacacaccacgttttaattcagggatatgtaaatgactttgtgattaatccagttcaggtaaagtaaaattgttaagtgtaaagagaattaaacattattttttctctcatatttaacctgtttttggacatttggaggaggaaaatactcagcaaatttaaaaagaaaatgaatgaaaacattgagaatgtggaaatttggggactcttgtatcacagtggaagtataagttgatgtcagtgattctaaaggacaagctggcagaatgtttcaaatatacatcccatttaaccttaacattctacttctgtgattcctctgtgaagtaattgataatatgccctgaagttttacacatcaagtatattcatccaagaatactaaaaatgaaaagttttaaatatattaaatgaaagaaaataggtaattctgatgtaaaagctgaatagagtcctatgaaaaattttaaaatggtatatatcatttaaacctgataataggataggattaatttgatcagtcattcaacaaatatgtaccaagagcctcttacatattaagcactgttccagggacttgtgatagagccgtgaacaagatgtaaacattgtttcatggagcaaaactttaggcgtgagacatttaataaataaatgaataaatagatcaataggttgataaatgagggaaggaaaagaaagaatacaagatggttatacatgctatggagaaaaatgagaaaaaaggaagaatgggagttcattgtgggttctgcatcagtttaaaaagtgttatcagtgaagagcttacttggaaaataatatgtgattaaacaaccttaggctcatgaaagattttgttttgcttttcaatttttgctttctctatatgaacatacactgttttatagtaagtaaaaatgatttaaaattgtaataaaacaattgaaatttaaagcataattttaattaaaatcaatgtttaagtgaataatagattaaacaatacatagtataaatataacacttgtaagctgaacataacagatactgagactgtttttatatagaaagcatagatcatt

SEQ ID NO: 44930 - DNA, 712 bp, Bovine  19866881908883
  misc_feature (1)..(1): n is a, c, g, or t
ncaccgaggtgttgtgctaagaaaggaggcatgttttattctagccacaaaagtacgaggtggcatgtatttatgttgaatttgagacatctcatatgatttttgaacatcataggcacctggtgctggaacaccctgaaacagatttcaatgaaccagcataaacatgtaggaaatttccagaaagatgtagcatagatgttcacactataaaatgacatacgtagaaaaatacaaaacttttacttcattattaaaaatagaaatttaaaagagtatccctaaattatcctctcctaaacgaactataaactgactcacaaaaaattaatatgaacagaatcatgaagtacagattcacattcttaaaaaattagtcttcataatatagttgttattgttgtttagtcgctaaatcgtgtctgactctgcaatcacatggactatagatcaccaagctcctcatccataggatttcccaggcaagaatactggagttgtcatgtgttgtcatggccttctccataggatcttctggacccagggatccaactcacatctcctgcattgcatgtgaattctttaccactgagccactgggaagcccttcataatatacatcaaactctaattttcaaatttcacaataaaaatcaaattttttatagaacaccgattatttatctttttaagtagcaaaactattccgctt

SEQ ID NO: 44931 - DNA, 1947 bp, Bovine  19866880365510
  misc_feature (1)..(1): n is a, c, g, or t
ngattgtgttctggaaaggagaagactgccattgctcttctatcttaatgatgtgttccttgagtgtttctcaacaggggcaaatgagactcttcaggaacattcatgtgatagttttgatagcaaagcagtcaagtaatagttggggaaggttagggatccatttcaggtggggatttcttcctctctgtccctctgggagaggaaggacggagctctttgggcttcctaccttacttggaggggacacctgctcttggactttcttctgagatagggcttgagctttgctgcctgtccctagccaatataagagatcatttagggccaggtatgtgaccctaccctcagccaggccctgtatcctgtctctaaggcaccactgggaggcaatatagcacagtttgaactagtttcaaatcctggttcttctgctttattgctctgggactttgagcagttttaacatttctgaaccaccatttccttttttgtaaaaggaaaacatcccacattagaatgttgtcatgaggagacaaatgagaaaaatgtacgtcaaggactgggcagtgcgcttggcacatgtaagtagtgaattcatggcaggtgttatcaccatcatcatcattgctggcgtgtcctgtggttcctacctggcttaggccagtttggttaagctcaatttagtttccaaaaaagatgtgctaattggattattatattttcatgtttttatatttatgtatatatatatatgtgcatggatttggaatctacacatgtatatatttatccattcaagtttctcttttacagatctgtaagaattatatttttgtgtcattgaaccatgagaaaattgtttttcaaaagaagatttcattagggatcattatgtaggccatcaaaatggagaataatgtacaaatgaaagttagaagaaaacataaaagcaagaaagaagcttggtgtattaacagggccactagtaagagtacttactgttataacctggatattttagtatctcgggacttgcctgtcttattttggtgttggatggcacagaccaggctgtttcaggcttgtgataaatatttctttttatttaatgctaccacttgtaggcttgtaatcaggagcggcttatcagcagcttttcacaatctgacattccacatggaatgccccgatggaggaaagttagcactctgaatgcttttacagttgaattccacacacatgaattatgacaagtgaggcgactactctgtggtttgttgtgtctggtctggttcctacttttaaagttgcagttgcgtttggtcatttgaagcttattttcacagtctggccaagccagcagggtcccggggctctgtaggggacataaaccgccagcctttaagtttgagtgctcagtagataagcatttcaagacttcattgcatcatacaaaaggacttatgggcttacttaacatacactatttgacttcatttagatatttaatggaaagaaaagccttttattatcactgaaggaaagaactgccaaacgtagggaggctgagttgaagtattgtaacggatatacagagcacaaatatatttcactgccttccataatggggtatttaataatagttgtttctttaaatttagcacatgtatcttagatatttgcacttggtaaattacaggctgtggttcaagaaactccattttgtttgtgtttaaaaatttgcttgaataagcatggactgattcttaaaaatgaccatcagtggtgatttatgtttatttctcgaactcagattagagcgtccatgcgaggaatgagaactttccctcctgtctttgaacacacgtaaatgtgagcagtaggtgagattgctggcccgcttgaccacagagttgttgagtgttttgtttgatgggcattggt

SEQ ID NO: 44932 - DNA, 677 bp, Bovine  19866880448554
  misc_feature (1)..(1): n is a, c, g, or t
nagaaagattatggtgttttcaggacattgagatgccagggaaaaaagcaaaaggactttgtgtgtagctttttaaaaaaattatcacacacctaaaaatgcagatccccaacaatgtaggcactgttgtggtttcttttttgttctctttataaaaacatgtttgtgcttacacctcccggcacttgttcagtgttaaataaaaacaactctggtaaattgctgacaaacaggtaatacaagtagaaagaattccctaactttcaaactctctgctcaagggaaaagcaaaagctgaagtaaaagatgtccccaaagtcatctggtaaacatgctttcccgaagagaacgtgaaacgcatagcaaaacagacactaactaattttaaacacctaattatatactgcctaaacagaattatcaagagacttgattgacttctacagagccgtgattgccatcaagcaaacccagagaaatcataaataatgtttgaccttctaacgtcctcaaaaattattcacaatattcgaagtatgtggaccgctggcattccattccaatattgtcagggaacacagaggtcacagattaattttgaagttagtgactcagactcgtttaccctgatttatggaaagggtacaatttgaagaaacacttaaattggacaaaca

SEQ ID NO: 44933 - DNA, 1353 bp, Bovine  19866880578390
  misc_feature (1)..(1): n is a, c, g, or t
ncagtgtttacacccgtgagtacaccttttgctccatctcacccacaactggtggcatttttttttctggaatccatgcatgacaattaaaagcaactgcaccctctctgttgggagggggaccacaaaagacctccgcaatatttctttacaatgtctatatcactgatgagcattagtttgagtgacaaaggtcccaggctaaatcaacattcttaccttaatgttcctagtaaaaggctccaggaaacataactcatgagacatgtatgcaaagatatgtctcaaggaattaatccagagccctcagatgaagtgaggagaaaaaaaaaaaaaaggtgggggggggcagaaaaaagaaaatgcggtggcttgtttccaaacaaatgcagctcagcctgggcagcgaaagcataaaaacaggtttgcatatacagagctcagtggcagaagcgagagttctgtaggatttatttgacacttattttccgggaagccttttgtggagttgtaccgtttgtttcttattgtctgggaggcagtgaggagctttctcccggagggggcctctcaaccccgggcctggccgcctccgacagggaggtgaccatattaggctgtgtatggtaaagtaaacaataacagagttgcaatgaaatggaatttttttccccagctaatggtgttggggtcagtcctgtctttttagtcattctcactaattctgtatcctagtgcaaacaggccctcctcctcctctttttttttaagtgttagatgtttccaaatatctgactgtaaattcgttgagaatgtttgcaatgtaagaaaaagcttttaacatccaaataaagatcctgccagtttaatcattgaaggggatgtgaattttcaagcccttgcagaaatccaagcctcctttcctcactcctcccatgccccccaccctaatctttctcccaaggttaaaattacttggtcattgaaaagtaccttctaaataaatcagatttttaaagaaagagaccgttaccttcataaaaattccacagtcacatactgtgttactgagtgaggagtcttaaccgttcatgcgcctgaaaatttattacctggaatttctaggatggttacttttacatgataaagctctttcccaccttctccaaccctcctccccaaagggaaaaagcaggcaaaaaatactgtggtcaagtcatcctacagaaattagctaatcaaaatgaaaaatatcagatatgagtccccaagatgttacacattttaaaaaagttctgcacacctaaagacaacaataaaaagtatggctgctctctggccattgtcagtcag

SEQ ID NO: 44934 - DNA, 1156 bp, Bovine  19866880672190
  misc_feature (1)..(1): n is a, c, g, or t
ncgctgtagggacactttcctcccgatggtctccaccacctttcttcctgttgagtttggggcacggtgagggtgtgacacagcgcccgcccccaccccgggcagggggaacctcagagaaacagagtaagatgctgcatttctcccccagctaataagtacggtcaagttcaaggagctggatgcgtccttagtccagtaacattctcaaattctgaacacttaaatcccttctcatttccatacaacttttgcttccaagttcgtttctaaaaagctccaagaaactgtaaaactctcataatcaaatgcaattgaaccatcataaaataaaaactctgagacttgtgtgtaagctgtcaggacttggctcattattctcatttacttaataaaacacacttttaaaataactctctattcatatatttatagtaaaaatataacttttttgatttaaataattacctcaacaaaaactatttggaaatatacaaatcatacaacctaaaaacaaagaatcattactaacaccctaatgctatttctcttgtagtatttatttagccttgcatgcataatgttgatttgaatattagtgaaaaggccgattcaggtaaccatgacacctccaaaataggcacaagcaataaacatgactgaaatcctgtcagattattcaagtgaaatcagaaaactaatttctaatattgaaaatctgtatccatacataaagtactaactgaaacagatcttcagaatgaaatttccccaaatgattaaagtaaaatgtgaaacctcacagtttatacaagacaagaaacatttggctgcaaatggttttataattttgctaattaaaaattatcccattttcactttggattcctcgtgtaacagaaacaggaataaccttaccatgccagaaacacaagcaaatgattaaagttctgctctcaaaaaaatctttaaaagttggcaaaacatttcattaggctacaaatcaaaatccgtctgtccttgacatctctttaatgccttccagattccacatctactttttttaatcactcactgaattactcagaaattaaaataagttaaaaatacaactcatcttggaccttcagaaaagtctcctgatatggtacaatct

SEQ ID NO: 44935 - DNA, 2023 bp, Bovine  19866880677853
  misc_feature (1)..(1): n is a, c, g, or t
ngagtttttgggtttttttttttttttggatacagatagggctaaaaatttgatttttgttttgtttcgctttaactcaacgtgatgttggcaatttaacttccacaaaaatcaagttagttggttctttgcaaaaaaacagacactgctcattggctgtgcaaagtgagaagttactctgtggttgtgggcttgggggcaaaagatttgaaacgttctgttaaccctcagtgttgctgtgtgattcttgaattctcatgtgtcttggattccttcctatggttactacttaacagaataaaaattagtcacatgccatctgcagttttaagtctacgttcagaccttttctggaaggtttctagaatagggtgggggtagaatttaggttgtttggttcccagaactgtttgtttgttggaagctaaacatagaaattacgtttgaaaaatctccattcaaagaatgtttttaatttgaaaaaatgattttcaaaagtgtgtaaatgatgattccagtgttgcttcagaaaagtaatttacataagcatgcccccaaatgttggcagggtatcatgtgtagatgaggctattacagttgactttttcttttctgaattaacttaggcatttttcgtatcttctaagaggagtaatcgtttttaagtgcttttctaaacttgaagtctagctgagtttcagtgttgcgcttgtttcaggtgtgcctggcagtgactcagggctgcacagaacctctctacgcacacatatatatgtatgtgtgcatgctttggacttcccaggtggtgcaaatggtaaagaaccaacctgctaatgcaggaggcataagagatgggagcttgatccctgggtcagaaagattccttggaggagggcacggcaacctactccagtcttcttgcctggagaatcccatggacaaagcagcctggtaggctacagtccatggggtcgcaaagagtcagacatgactgaagccacttagcatgcctgcacatgtgcatcctttttccagttcctttctactataggttatgacaagatacttaatatagttccctgtgctatacggtagatccttgtttgtcttcttatatatataaaactgtgtatatgttaatcccaaactcctaatttatccatccctcccactttgctaatcataagtttgttttctatgtctgtgagtctatttctattttataagtaaattcatgggtgtcactttttaaaattccacatataagtgatgtcatatgatacttatctttctccaacttaaaaacttaagtgcttattcgacatcagatcctaggctatgcacgttgtatatattaattatgatatagggactgttatttcttctcattttaacagccgaagaaactgaggcacagagagattaggtaacttgtctagggtcacacaggttgcaagtggtggagctgggattcaaatcagccagaatgactgatggacacttcacgaccatgtgctgcttctctagaagtacattaatgttttataaagtaaacctgtctttctttggaagtgctatgcctctcccaaggtcagtaattcccccaaattcccagggaatccctatttcctcatgcctggagactcaagttccaccttatgctgcagtgaccagaagttcgaaagatcactgttaccccatgagcacaagtctgtgaatactattgtccatctgatgaacacagttttgtttttaacctcccttttaagaaaatatttcttaatttcttgaccagagttatcagatcttccaaaaggtcactacaaagttcctttgagtgttgcttagattaactcactgtattcttctagatatttctaaatttttctgtaatgatctgtcctgtctagcatgtgaatgcagctcccatgtgaatgcaggaattccaagtccatggatgtgtacattaggggccttttgagttatgtcattctgaagtaaaaaggaaggattctaagctaga

SEQ ID NO: 44936 - DNA, 1691 bp, Bovine  19866880690294
  misc_feature (1)..(1): n is a, c, g, or t
natagacctgttagaaaacgctattggcctacgccgatggtatatgtgagggctctgagtccactccacgtccctggagctccatgtggtgtgatcataagtctaggtccctggaagtaggacaagtggtcccccatcctctcacacttattctttctgcattttccccatgtcttttcccacctttaacatagcttggagtattctttcagcctgttttcctccagtctaattattctttaattttaaataatataataactttgacattttcatttctagttaaaccttgctaatttgcaaaaatgatgggtagacacagcacaaattagcaagcctaaaaaatcagcaaacataaaaaaagccaatgattaaagagaaatcaaataggtgcattatgaaatacacatttatttttaaaagcaaattcctcagacttgtgaggaaatatggagcaatgatacttggctgctttctaatactctctcttttctaagctatagggttacttttttctccccacatggtctccagcagtgatattttctgaacaaaatatcagagcacatggtaagcctaaatgtttctgagcaactactacacaattccaaagacagtccatgggttcagttttgctcctgcaagaatttctgaactctctggttacaggaaagaaaaaacacactatcttagtccactgaggtggctataatagaataacatagacctggtggcttataaacaacagaaatttctgttttggagcctgggaaattctagatcaaggtgtcagcagaactggtgcctggtgaggatgtactttctggttcagaaaggatcttctatgtcctcacatggtaggaaagggtgacagatctgtctgataatctcttttaaagggcactaatctcattcaagagggctccacgcccccatgacacattcacccctcccaaagttcccacctccaaacactatgacatcaggtggaaggactgaatacatgaatttgagtaggacacaaacactcagtctacaacataaatgaaagtggttccaacctgaacaaccaaagatgtttccaacccaaacttgacactgctctagtttatatgcttactgtctccctctgtaaggccataccagcgggaatgcagcctagggcctacagagctctgttctcagggtctcgatttgtgcctggcatacagcaacacacgtcttgtgtgcacatgcccatcaagagtatggaatcttttcctcgtctccttgagcgtggactggcagtgctttgacaaatgcaaaggagtgactagtgctatgccaggtctgggcctagaccctgagaaacctggcagtgtcctatttcatgctaagtctatcatgatggtgcagtcaacctgagagccaagtcatggccagggccaagtgtcaagtgtagacatgaaagccatgctgaatgttccagtcaaagctaagctcccaggtgaatgcactcctgagtcagcaccgcacagagcagagaaaaaccacccctgctaagccccgcagaggagaaggaaatcaatcctgaatattcattggaaggactgatgctgaacttgaagctccaatactttggccacctgatgtgaagagcttactcagtaggaaagaccctgacgctaggaaggattgaaggcaggaggaga

SEQ ID NO: 44937 - DNA, 1110 bp, Bovine  19866880716303
  misc_feature (1)..(1): n is a, c, g, or t
ntgtcttactctggctaaaaatattagcctcccctgaaggtgaagtacaaaaaaaaaaaatagacctggctgtgcaaaacacagctgacaatcacaatccatctgaagtccaagtccttatagactcacgggcatcaacaagagggcaataaccaaatgctttcaaatgatggaaatgctgtctagtcatgtgtgacatgagttaaataagtaacaacgcaagaatgcatttgtctaccattgcccaggggtttcctgagtttagcagccaaattggcaactgggatcatattatcaagtagtatctataccactttattaactgtcagggaaatgtctattataataattgtcagcaaaataacgtttattttacaaccgccagagcaacctggccaatccgaatcaagacttttcatccgatcattcccagagaatggccagcattctagaaacattgagctgataatattgcttctctcttaagtttgatgttgctcatatcagagagatgaaatactggcttattagcaggctgcctgctcctactttaagatcgtccacttacttagctaagttatgctgaataagctaactaaccactcttggactcagtttcctcaactgtaaaatgggcagagagttgtagtgagttattgcaaatataaaaaggagctattaagcaaagtgttggaagccaccattaactacagagtgattgtttcatcttctatcacaatcttctggtatataagggacaatattagctctctaacatttttcctagaaatacattaagtgcactggatggtacctcaaattttcaaatccaatcaataactagctatttaagaaatggtacattcaggtattctgtccatgttttaattgggttttttgtttttctgatgttgagttgtatgagctgtttatatattttttatattaacccattatctgtcatatcatttgcaaatattttctcccattcagtgggttatctttttggtttgttgatggtttcttttgttgtgcggaaccttttaagtttaactaggtactatttgtttatttttgctttgctttctttcaagggaggatccaaaacaa

SEQ ID NO: 44938 - DNA, 1358 bp, Bovine  19866880742569
  misc_feature (1)..(1): n is a, c, g, or t
nagggagtttgtagggaaatcacgggaggcctagaatgccaggcaaaggagattagtgtctgttgtcaaccaacggggctactgaagattctgaaaaacagttgtgatacaattcaggctgctccaatagaggaagaggtatcaagctgccaaaataataaggacaaaacacactgaaggcctgaatgagagagaaacccaacaaagagaatggacagaacagatgatgcagaaacgacacaagtcacagaccttagtgattaaggcaacacaaggattgaggggcaggagaaccaccctaggtttcaggcaagacaagaagactggggatgaaattagaagacacaggaaaggcaggagggtaaacagaggggaagaaaagacaaattgtatgctcaaatgtctgctcagagatctgagatttgaggtgggctggtggggatggtggtctttgtgaaaataaattccagcaaccagaaaacaagtacctggagtcttaaaaaaaaaaaaaagattagttcaaaatagggatatcctggagccttccacattgaggtgaagagcagatccaagagagagaagggggaggcctggagggttcattaagtttgagaagaagtcccacctctgtgtaccagtatcacagcttttaaccaagctgaatgctatgtgatggaggtatagtttttttcctgcaagaggttgagactgtcccatctacattcaaacttcccagctggtgtagtggtaatagtccggcagccaatgcaggagacacaggttcagtccctgcatcgggaagataccttggagaaggagatggtaacagcccatgggagtcggacatgaatgagcacacatgcatgcatctacattcaaagtcctcatatctcccggaagatgaagacagcagcaaaagatcaagcaatttcacccaacaggtcttcagcaaccagggaaatcttgtgaaacaatttagaaaattgttaggtgtctccagcccacctccaagtgagactcacaactcccttttggttttaaaaaataccctggttccaactgtttccagctctaaccaatcaatggaacagtgcagatacaaatgccagtgcaaaatatggcagcagtaaaagtttacagagctaattttccattgttttggcaaaacagcttggtccaccccttcaggtctggaaagcaatcagcttattagcagagaacgggctactgtatcttaacaagtcttgttcagaagcctgctttatggttttcatctcatgagaagttcctattgaaagcacattgttctgaagaggctcccatatgaactggctttttacacccaaggtctgacacca

SEQ ID NO: 44939 - DNA, 811 bp, Bovine  19866880780663
  misc_feature (1)..(1): n is a, c, g, or t
nactctcagaaggcatataggctcctgagtcttaagggttaacttggttgcctttagaaaaaagaaaatgacacatataatttccttttatcataaaacaatgcatttattcttttctgtatgtctgttaaagggcatggctttctgagtggaaaacaaaacagaacttggtcacatgtttatttgcttcagctactcccttccccttctgataaataatcaaacatgccatccagaaaaaacaaaaccagcgagctgggaaatttgatggtcatcaaatagactgcgataccaagaaaagcagcccactgttcccacactgggttttcggcccccacacctacactaacatctgagtaaatatctccagtcactctttccattttccctgcaattactcctactgttatacaaattgtccttaaggcagtctcaacataatttttttttttcctcacaaagtagaacaacttctgaacatgaaaaagtcagcctagcaagagccatacacatatacacacacacgcacttacttattttatatatagaaatgtttcttccttgagaggtggggggacaatggccgagcctacttctttttctgttctaatagatggctgatttagaggttaaaatttaagtatattcagtctggggactaacaaacaaggtttagagtagtaacaattcccttcagatcaaaagagctaattttctacttcctgtctattccctgaccagtacatagaaaaaaaaaaaattagcacctggcttaccaattataccaaagttgggggtcagggttggggga

SEQ ID NO: 44940 - DNA, 1907 bp, Bovine  19866880785316
  misc_feature (1)..(1): n is a, c, g, or t
ntctttaaactgtacaagttccatatatgaaagttgccactattcttctccaagtgtgtaaaaaaaaaataaagttgcttttaatacttactcaccaaaagtctgccaactaaatatttgacgtagctataatggttccctttaccccaaactgtgaggtttaccatgtaaagtgcaatgcaaattcctttatatattataaaatgcatctttgctctgcaaagaatgctgtcacccccatggtgatgcaaggaacaggaacacttcatttctcacgaccattaaaagtctttttaaaaaatctgccatgtataaagaccttcattagtataattaaatgactgttggggttttttgatataaacaacttttgatctgtcctttaaaaacctcataacaatatcattaaagagttaccatttttaaaagagaaattgtctgcttagggccatggaagagtagccatgctctgggccgcttcctctctctccctttcagacttctcctggacttgaatgtcaccatagaccttgaatccttgaatgtgaaatggcttcacgctaattgctctaattgcttgaagatgtgcaggcaggtgaaacctgatccccgtggccattgtagagaccaagaacaacactggaatgtttacacagtggtttgattttaatagacagaagggctgagtttaagacagcaaaaacacagctaataggtgaccccttaatgtagtcctcctttgaaaaaaaagaaaagaacacacaacaaaaaacaatttcatgttctaaaaggcagtgtcctaaatgccaaggttatttgcttgactcttgaacacacgttacgttgcacctgacatttacacccgaaactctaccccgaatacattttttttttttttaccttaaaacaaaaaagcactttatatgtcagtcaccttacaaacagattatgactgtatggtatttccaagtaagtgcattcatttaaattttaaattgaatatttttcgctcttgcaaaactcttggtcccttaaaggagaagccttgtatctcctattttatccctttggttcttcggctgtccctctgccccccaccgccatttatggtatccctgacccatgtacattcctggaccgcagttaaagttgactccaaaccccctcctgttggtcctttagacaaacgtgcatcctttcggtaccttttttctttgtaactactatgtggggctgtggtctgcttctcatccggaggggctaaggcagccaggggagtggctgacacagttattcagtgacagtggccattctccctggatattttaatcaactgagatggatacagaggtttgacaatggctccccagagccctctcttaacagagcacaaatgtaaccaatgctggacaggaaatacactgcagcaagaccaagataaaaatacaacagcacctatgaggtgtcattaacaaaaggaaacccacagaagttcggggtaggtttagacaggtgttgagacagacatatatgtacatcaaggatctgaatgtgcaggaatgtttcatatagagccaagcaaactgtgaaacaggaagtaagaattaaacgtgttacagaataacacaaaacagtggtacgattctaaggctaagctgggcaattaaaagccatacatacataatataccttgtaaataagaaccgaggatagggaacaccccacagagctaggagcacattcaaatggctattctctaagttatgctgtgtactaaacttctaataataaatataaaatgtgcaagaaaggggaggggggggagtccttttaaagttatgaaacactttttagttatataagctaagtaataaatataggagcttgtatcacctggactgtttgtc

SEQ ID NO: 44941 - DNA, 1177 bp, Bovine  19866880983000
  misc_feature (1)..(1): n is a, c, g, or t
ntttgtgtatttctttaattggaataaattgtatcataatgtgcacaggcacaaacttctgtaaatgtccaatgtccagtgtctttcctagaccctggaagtccatttctaaattcctggtttggaggaaatttgttcgtgaacccaggaagcaggtttgagaagttatgggtagggtgcagccggcacgtggacttaatggataagcaggaagggagggtctcccaaggttgtcaccctgcctggggtgggggtaccgtccccagatggttgagaagctcatttgcagccatcactctttgcagtgtctttcattttgcatttatcgcgtgcttcctctgagctagttattgtttctgatgcatacgtcctgctgcttcacctgaactgtaaacgtcttcaaatcttactcttaagtcttcatctctttgcctctcctcttgctgccttacctaagaaatgcttggtgggttcttgttgtccccccaccttttttttttttttttaagtgctgtgcggtagaaacgtttattatggtgttaagtctttaaataattctcagcaactaaacttgaggcatgtgaagataaacgatgacaatttaagccagccaggaagctgtaacgtgggctcggactgtcgtttggcacaggtctatgtctgctgacggagcttccctcctgccatcagggcatggcagacagtgcaggtgagtgcaggcacacctctgctcgcctgcacatcggagctgtgtgcactcctccagcccgacagtcaaggaagcgaaagctcacataggggcttggcagctgcttcttggagtcaagggaggcagggccaaacaaggatccgggatgcacagccagcaggagagagcttatctcaccagagaggaaactatcgccccgtgaacctgttttattttctgtttgtatagcatgaacattcttaatgtatgttttattttagtttgcaggcctttctccctgcacacgcagagattattccaagtttcctctgcctgccctccctctgatgtgtgatgtcagatacctaatgtgtcggcagtcggaacgttgtcgtcactcatggctgaccccgtaaagtctttcccaggttgactgtgcgtgcctgagagtgacaaacactagacgttgctctgttctgatggacacat

SEQ ID NO: 44942 - DNA, 1243 bp, Bovine  19866881005057
  misc_feature (1)..(1): n is a, c, g, or t
ntggcacttatttactaggaatgggaggcagtgatgagaatgaagtcatctggaaccaaaagaatgaaaaatgcatcaaaatcgtccaggtccccagttagggtgaaactgactagcatgctaccaaactacaacccagccccagtccccctgagtctctgtgcccagcgtaggctgtggtccccggcgtgcctaccacaaggtgcctccaagagactgaggcctcaacgacaaccaaacaagagagggaggcagtgtatgtcttctgttcctgttagctcgcagggcgattgattttagcttttgaagaatgataaatagaattgtgtgcagctgggctgtaagtggctggctttatcagttgcctccatgctgacatcttcaacctgtatctttactgtaacccacaggcctggccttcaagtacagcaccacgttatccaaggccaggcgattgtcacatctgttctaaagcaagtgttgacttaacccagcccaggaaactgccaccgagagaaaaaggtctccagagattgtatgggaccttttaagttacttacgccaacagttggcctgcaacttgagtcacagctgaaaccagtgttttacaagttcttatttattcatattctctctctcacacacacacagtagctatgtgtatctttatttggaagcccaaagaatctacttgtatcttgaaacaatatgtcttaaagagacctttcttcagtcacgactgagatgctattataaaaatataaaaaaatccatcctcatttcttagctgtgttgggacacatctctgaggttcaggcagtagaatctgagatgaaagacatgaatctccttttcatgattttggtgcatgaaacaggtaaaattcactatcaagtcagcatgtgtggggaacagattgcatccaggtctccgatgcagttcccaaatgggattcgacctgtcattcccatgtttttctgacagtgactttgacagtaagcatcttagactctgtacacatggtagatactggggatttgtatgataatgatgataatgtcaaatacatagtctcatacacaaaggatttatttttcttctttttgggtgatttaaaatccagattacagtgatttaaatatcatgggaatccgaaaagcaaataccctttaatgattgatttcattgcactttataaattctaataaattaggctttcacattctggctgagacctcagtga

SEQ ID NO: 44943 - DNA, 1230 bp, Bovine  19866881120371
  misc_feature (1)..(1): n is a, c, g, or t
ntgactatctcgctttaagaaattgcgagttttggtgtgggtaaacaaaatccaacgccatgcaaatgaaacatttattaaaatgctaaatttagtaaagccctttgagcttcctggatcaaagcagctatgtaaatacaaatagcaattactacttaagtaattgcctgaattaaaattctaaatatcacattatattatgatgcgctagggaaggggaagaaaactcacgtttaatcttttttgtccctgtgccaagcaactggctaaacttgcctttggagtgacgtctcattttagccacgtgaccactgggaagcagcagggtttgttatacccattttccagatgaggaagttgattcattaagattaaataagtgacctagggtcatagaactggttagtctcatagttgagacgcagattcaaggctctcttttagtttgtaaaactggacttaagagattcctttcagcacagaagtgaatacttaattatgataagttaaagtcagtgctcctaaaggaaattttaagttggatttaaattcacttcaacagtgtattggcttaccttctgtgtgcacatcagtatatttaaagggaaatcccagagtttcctgtgtaaggtagacaagtagttcctgggcttctcttaaagggagggcaggtagggaggatttgcaaaatataaatcatttacagtctgaaacagcacataaagagcaaaaatggaccccatgcaggatttgcacacaggcaaatgtaaaacaaggcgcgctcttctttaactgtatcctgactttccttcctgccttataaatcttgggcttcctcattgaacatcatctggtctctattctgcttcagctgtccttctgtagtccgtatcagagatggcccttctctctgatccttcccagctttttgcttttagttcaaccaccattagtagatgttttataactcgaatatgtctcagatgcatagcccttctaaatatttgttccagggtttccttaaacgttcggtgaaacgtttctttaaactcctgagagatcctgggttgggcagcctcttctgtgattgaagctgctgtcacagcctcaggtgacccaggtcaaggaacctctctctttctgaggcctgacctgccttctgtcctcaggagataccttccttttccttctcattcattgacacagccccgtgtatttcagttgctcgca

SEQ ID NO: 44944 - DNA, 1769 bp, Bovine  19866881126302
  misc_feature (1)..(1): n is a, c, g, or t
ngtggcattctttggtggatataatttaaaccttacatatcctagaagcattttttagggtaattattaaaaacactttaaaaatcagtgttacgagttttttatgtaggtatatgaaaaagaattctgtcatcaaagtgtataagagttgacaagtgtaaatatgcagttagacagtttcaaaaaacgtgtattatttactgatcaatgtagtgtctcctctggagccattacactcagtcatttcctgtcaatctctccaggctgttataatcagactatggatatgcatattaaaatacaagaaagttattgtgcatgtgtggtggcagctttttaattgttaataatgttgctgctttaaaaagatatcaggatagtattctcttatgatggttaatagtcatcagaattgaaggagggcttaggggagctgaaactcagggtgggcgaacatgaggcccacaggtaccgatcggtatctgtgcttccaggcagtgcctcgtgataaaaaggaagagctttttatctgattttggtgctgagtacatggagattcctttttctcttttttctaatgtgtttttggaaaagttttataattaaaaaaaaaaaatatgcttctatatgtgtgtgctggtaaaagagccatctaacttctctgttgataacagtgatcaacaaactttctgatccagagaggaaatattttgggctttgcaggctacctggtctcttgcaactacttgctgtgttgtatgcaagcagccataggtgactagacagcaaaggtccgtctagtcaaagctatgatttttccagtagtcacgtatggaggtgagagttggaccgtaaagaaagctgagtgccaaagaattgatgcttttgaattgtggtgttggagaagactcttgagagtcccttggactgcaagatcaaaccaagtcaatcctaaaggaaatcaaccctgaatattcagtggaagaactgatgctgaagctgaaactccagtgctttggccacctgatttgaagagctgactcactggaaaagaccctgatgctgggaaagattgagggcaggagaaggggacaaaagaggatgagatggttggatggcatcaccgactccatacacatgagtttgagcaagctcagggagttggtgatggacagggaagcctggcgtgctgcagtccatggggttgcaacgagtcagacatgactgagcagctgaacagactgatacttcagtattgcagtttttgctagaaataatataacattgtaaaatccaaaggcaattctctttctgtggttgatgtttcaatactcccatctctcagtgttcagtgttgagctgcatgtgagttttttctagttggtcgtctcatgatttgaacactgttcttccaagtgatgtgatgttatcctctctttccagctattgtagatgatgaaagactctctgcagaggagatggatgagaggaggcggcagaatatcgcttatgaatatttgtgtcacctggaggaagccaaaaggtaagagtcagacttggtctatttgtgccccttctcttagagatgagctttgggtactatatttttaataactcatttgcagccttgttaggactaaggtaatgggagaagaatcaacctgtgtgttgtcagtggaagaattgagaaaaagttgatcccacagccagcatcaaggcactagggaggcagctgttccttttcttcctcagagcctcccaggaaatct

SEQ ID NO: 44945 - DNA, 742 bp, Bovine  19866881165614
  misc_feature (1)..(1): n is a, c, g, or t
nttggaaacattggaccaaatgtgactttttttgtttccagtgaggataggtttgtatgtctggagaccagtcttagctcttgctgtataaggtcttagaatgctttgtaattaaaaaaaaaaaaaacaaaacgctagaccttagatagcttttaaagaaaaggttctaggttgtcgtcctttgctccacttgcttttggtgtcctgaggttgatgctgtccatttacagcaacatctttatccataggtagcaaagggggccatacagggaaaaacgccagctgatgcacttggagcattgattgtaatctcgtcggctgttgtggcgcctgcacagatgtcctgggacatagaagtttctccctgtttagatgcagtgtgctcagtttcattctaaaaggttatatacgtggggtcaggtagtagattagcaaggaggcaaatagagaagaatagcccttttcatgtcttaaggtgcatttgaaagtaaatggatctcagagacagtctaattccaggagaataagttggttggatttctcgttttatggtccttatgtgtctgcacaaaagttgggcttaatcttcattgtactacctgccagcattagaataaggatcaggaaagaattcagatttcattgagcattaatctggatgtaaaaacaggctgacttctccaactgtacatgcaaaggagaagcaactatgaaattatatgctactacttaatctctggga

SEQ ID NO: 44946 - DNA, 988 bp, Bovine  19866881229950
  misc_feature (1)..(1): n is a, c, g, or t
ngagatcagccctgggtgttctttggaaggaacgatgttgaagctgatggccaccccatgcaaagggctgactcattgtaaaagactctgatgctgggagggattgggggcaggaggaaaaggggacgacagaggatgagatggctggatggcatcaccgacgcgatggatgtgagtttgagtgaactccaggagatggtgatggacagggaggcctggcgtgttgcgattcatggggttgcaaagagtcagacacgactgagcgactgaactgaactgatggctagttttgtgctacatcagcagaggcagctagctgcaaaagagactctatgtgagactcttctagctgcaagagactgtacaacatactaatctctatgctgactacagtccatgaggttgactatatttgctatctggccctttagagacaaaatttgccaacccttcattacatcacacttccacagatatgatccaagttacaaatcctacactgcaaagccataacgctatcatggaatgcaataaacctattcctgctggttttggaactcatgattgataatggggcattccattatcttctgagggattactacctgcaatatcatgtcatctgcaagggtggatggcaatttttgatcagtacacaacgcaagtgttgtttgtcacttaccctgaatttttaatgtgtctcacagccataaaaagtctggaggtcactggttgaaggcatgcataatgccacaggactgcaacatacagaggaacactgaaaacaaacaaaaaaaaaaaaaaagaagaagaggttaaggaaaggaagtgacaaactttaatgcttcaaaagtaacacattcatgtaagcccttatgtcttccttattgatgcatgacttttacgttcagtatataattgagtatctgcgtatataagcatctattttgtcctttctgttctagaatcagcactctgttagttccta

SEQ ID NO: 44947 - DNA, 943 bp, Bovine  19866881238660
  misc_feature (1)..(1): n is a, c, g, or t
nttttccaccaatcagactccaacaaatacctattcaacacctcctagatgcctgtgatgagttcagagtattatgtgtgtgtgtgtgtgtgtgtgtgtgtgtgtgtgtgtgtgtgtgcgtgcgtgcatgcgcgtgtgagagtgtgtgtgtgtgtgcacgtgagtgtgggtgcatgcacatgggcacatgcacatgtgggtatgtgtgtagagcaggagagactgaagggtaagaggctgtcttctgactattactgacacatcatagaatcctgaggagaaattaacataaacatcagggtttactgcatctggaaaattattctcgggttgacttgtgtgttcattttccacaaggctcagtgttaatgagctaagaaaggaaagaaagcaggcagaggtagagctggaataagccagcaaggttctgatactccagctgccggtaagtgatgatgaaccattaaacaagagagaggaaggacttcgaaggcccaatcttatttgtcagtgccttcagccatgaaagacggcgagccttaatgtaacccactaattcctctccccaacacagtcaagattcatttccacaagcaagtccagtatcagaggctactgtggtcagaactggaaatataaccatgtatcactacactaaattatgcttaaataaaaatgcaatgcatccatcatatttgtataataaaaggattaaatcagttataattttcaagctttaaaagaaaattccaagcttttaagtctatttctagaaaaagataatgtgatgaaatgtcataataaaaaataactttgttggaggaaataattctttatcctttaaaaattttccttattaaatgcatcattttaacttaatgcatttctatatacttatccttaaatgtaaattttgttttgataaaatgaagagcctttttat

SEQ ID NO: 44948 - DNA, 785 bp, Bovine  19866881289058
  misc_feature (1)..(1): n is a, c, g, or t
ntgctcaataaccatacaccttttcttcattactactagaacctggaactgatctaggacatcaaattcctcaagtctaaggatgtaattatcagatgcccttatgttaacggtgactaaaatgatgtaagtagaagccatcgagtaagacttcatggaaagttatctaaagagggcttcctcagctgggaagattactctttttatttcttgtaatgctgcctctttcaggatgtagaagcaatggctggagagccagcagccataatgtgaccttgaaaataaacaacatttgaacaggcaagtagagatcgcacaaagataggaaacacagattgctctccccttgatatcttttatgagagagaaaacactactaatcttttaaaacttacatacttgcatctattaccagaaaatcattcttatctgatacaaagacataaaaacatagctaaagattatcctactttttgtcaggaaaagaaaactagaaaattcatgaattgagattcctgattacccctttattcatcaaactgtttgttttaagtatgactttccctcttaatcagtaccactagtccaggggaagcatattttgcttgaacctatctctatgttttgacatgcaagacttgtgaaattcaaacacacttgtagacatccaaagctattttaaatgaggaagatctgaaaacactctccaaacctgatgattaaagggaatttaatagttcctcattggcatttgatctttagcctgccataacctatccatatag

SEQ ID NO: 44949 - DNA, 1067 bp, Bovine  19866881591574
  misc_feature (1)..(1): n is a, c, g, or t
ncaaatccatcggtccatcctcaaggcagcaggctgggccggggaaactgggcacttatcccactgacaacaatgaacacatctgcacggtcacccgaaacaaagagatgctcccaagcaccgccacaacgttcctgagtgatcacacctcccatcccactcaccagcccccaacctctcccgattttctgattccttctgatttttgtctgagggctgggaaaatcttaacagaggggagctgctaacttttctccagaaaacaactttccccagctatttgtcaacttctgtcattcagagggctacaacacaaatgtatatctttaatgaaattcacagtcaagaaaagttgtcatcatctagctatatctgttatgacatacatttcattttgttcaatacataacagagaagttatttaatcaaacagaagattcttgctaaaatgacagtccaagcaatgtccaaacaagcatttattatgctatgggaaactgatcagaattggattgttttcagcagaatttttttccttcctcttccacagagaaaatagcttgaggggtgggtgcagaaaaacaaccccagacaatagaggtggagtgatgctgagtcagtggtaagtgtaggttcttaagccccacccttaagtcattggggagaaaactaattaaaaaaaaaaaaaaacctcctaccatgtggacagtcataaaagggtctgcttcgaggagaggctgggtcttccgtttcctcaccatctaacgctacagaggagaggttctggcccaaatataatacacaatgtaaggaacgataacatctgtgtttctcaatgacacttactcgtggatatattttgtctttacaattaaatgaacacttagcttcagtgagaaaacttatgtgactgaagaagaatttagtgggttgtagacctagaaagcccaaggccaaaaatacaaggggaaaataaatgttagggtggtaactgggtatctgggctttgggcaacacacatggtgtgaatgtgagggaaagaaaacaaaagataccagtcacgctcg

SEQ ID NO: 44950 - DNA, 982 bp, Bovine  19866881596325
  misc_feature (1)..(1): n is a, c, g, or t
ncacatatacacacatgtattctaaagattagcattccaggccatagacataggtttgtagtcagaaataagtatactaaaccactgcccctcccccagacattcataaggcacacatgtatttcagaagctctgagaaagaagccaagcatggccctaactggtttgtctatagaatttttttatttactcagtaatcatctgatttcataaaatctcatgaaaaatcataaggatcccaatgaagagtgagtatccttaagcaggataataccttttcaatttgttaattgtgagtataattttaagtctttattgataacaaagaatgtttcaagcatccatgaaactttgtaggatgtatacataaaaagttttctgaatctgagtctttgatgtaagagtcagtatttatacatataaaacttagaatgtcagagccagaaggaaacttagttatcatgcaattcaattctctcatttcacacataaggacactgagcgatgttaagtggcttatgcgtgactgtggggccataaatgatcccaaaacaccaagtgaagagctagagagaaagagagagagatggagagggtggggggcaggcattattaggaaaacaatgatccgagaaaaactcaaatattagtttttctttttccccccattatgggcattagtaactaatgctgaggtctttgactataaaataatcatgaccgcaaactagccctaacccaaaacacagaatcacacccccccaacaatacagaacctcagccctgtaacataaagacaactttagaaaactgataacatacaccacttaaagagcaaccacttagtttatagtaaaccatttggtttggttttaaagtaggacttcaaaagggctcaaaataatcaaaactttagattatagcatgtttcaaaatagaaaaaacagaccaactactatagccatttgcccaagtagtattt

SEQ ID NO: 44951 - DNA, 730 bp, Bovine  19866881616959
  misc_feature (1)..(1): n is a, c, g, or t
natacactgctgactgatggcagcgggtgtggcccaccccaggtgcgcacaaacctgcgagcatggcagcccgacggctgtgccggccatcggggcgctgtggtgcgcgcctgcgctgccttcccaccctcgttctcggcacaacaagtggatggtcaaagcccatccactgctgtgtaaattctccctgatgcagttttcttttacttccaaacggctttataaagcagctgaacgctagaagaccactgaaataatctggcttatttttcccctgcatcctcaatggggaaaggtaggtgagggggaaggggatagtgtaaaaagcaaacaaataaataagaacacccacagaaacaatactttatttctaatcccagagacaataggaggaattgggtgggaggggagatgacacaatataaatactgaaaataacatgtcatcctttttttttttctttctttttagtttatactcaatgttaactctaagtaaatgctgccaggtataaatacagagagatcttggacatgagcatattctcataactgctatgggtacaaataatgcaaatgtaaagataaacacatttaaagtattgttgtatttccatttctctggattaataatttagaaactgttgttcatctctggttattcacttcatggatgtcccaaggaactgaagtcctttctagatctaaggctctacctggatgataactga

SEQ ID NO: 44952 - DNA, 1098 bp, Bovine  19866881806941
  misc_feature (1)..(1): n is a, c, g, or t
nacctcattatgtgcagggaggattcataatgaggaaagagccaccgccattccatgttctaacataaatccctgtaaaatttgaatatctccccgtctaattaaaggctactaattccaatcacccccttcatggccccaaagtaaaaataaacctctttaaaagcacagactacagttatatttctaaaacagccctcgattctgtttggactcagaaccttccactcagatatgttttacgacaagcataattagcagctttctaagatacaaactttgaggctgttcgagctcattttagttaaatgcactggatttctatttttcaaagagcgtcaccttgacggggctacagtgcatgcacagagatgatccacagccaagaaaccagcaggaatgtgcgagcagtataataatgtaaaataaaattcttagcactcgagttccgtgctgaagcggagatgctcagaaaaagccaagcaatcgtggcatgaacccgagattgcatttggacggggatgtattcagatctgcttgggaacaacgtacttgattctggaacaaactgctcacttttaatgcagtttgaactaatgaacaagtacagcccagcctctcacaagccagagaactatttcctcttctaatcaccgactctgatttttttttaaactgaaaactatagaatgcaaacccaacactgccaaacatatttattatgattaatagcctgtaatatccctcaccaaggcttaatttgctcttgttttccattatgaatctgcacagtctattccagtcccttttcaggtggagatgaatttcctgtggtctgtactctattgtattgccacccagcaaggcacaattagttaaaaacagccaacctccacctctacagcctccacagagcaccagattacgcaaaatgagagaacacaatcattgagaaataagtgaaggtgtccagggaattaaagcaattaaaccaaaaaaaaagagaaaaagtacttatgccagtcacccaaacacacctttacattaaaattcccaagaaaagaaagaaagaaagaaaactctagttcctttctttaa

SEQ ID NO: 44953 - DNA, 829 bp, Bovine  19866881853784
  misc_feature (1)..(1): n is a, c, g, or t
nttccatctcaggttaagccacaggtaaagtttgggctggatgaaaaaaagaaatttgcaaggaagcatagcatcacagagatgttagattccttttgagatctagtgagtctcatcttaagaaaatgcatacagaagcacatacagtccagccagcaggcccattatttattttttagtgttttaaatggcatttcatttctcatgaggaaaagcaatatagaagcaggaagctttcaggtcatatagaactttgttcttttcagacaaataaggtattgtgtgtttgaacaataggaggaatgtctaattgatcttaattaaattcagtgatgtccaatttttgagatgggtcaagacacatctatgtaatgtcacaacccaacaggctagacctctggaatcagggagctcggtggcgcactgttttctgacactctttcttatccattctctatcacattgccctgccaacttgttctgccctccagctttcttctctctgcctcatgctactcctgactgcttcccggtttggcacatattcctttgctctggccagccttctgaaatggcggggccccatcgtatactccctcatcattgtcatgatcacctaccaaacaggaatcctattatatacatataccgctgcatatggaggaggttccctggaatttgcagtgtgaaagatgtgggtttgcatcaaatcttctctactaaccagcaaactaggtaaatcacaaaagtccattttgtgtgtatttcctcatctgtaaagtgggagcaattcctctgtctcacagagcgtgtttcttttagtattttc

SEQ ID NO: 44954 - DNA, 702 bp, Bovine  19866881895778
  misc_feature (1)..(1): n is a, c, g, or t
nttttcttttccagtactttccatggagcaccccaggaacatattcagagatgacagaacttaaagagactgaacccgactgattctgttgctataggagaaaatgaagaaacaccaggaatacaaaattgtatgccctcgctccaggatgggcttcctgacctgcccagggaagagaagtctctccagagaagcccgggtttagtatttctcatgtctccaaagaccgccaactgtcagccaattagagaaactaaattgcaacagccatgcctgattcctgagatttgggcatttgtctccaaggacctgccattccttcttgatttaagtggtgcttttacttaaaaacataaattaatacatcatccatctccagggagcaaaggtggttagctccatattgacattgtttatgtcattgttatgtctatatggacagtgaaagcaattatgttttcttctgacggtgagttctcactcttgcataggagtttaaatttctctccctgacatcctctaaattgccatgagcatctccatttaatgcaacattttactatgcaattgttcctagttaatttcctggatacacaccctgacacgtcaacattcaggtaacttaggaatacgatgagcacgaaaggtatagaaaacatttaccaccctctccaaaaaaaaaaaaaaaaaaaaaatccctca

SEQ ID NO: 44955 - DNA, 753 bp, Bovine  19866882182454
  misc_feature (1)..(1): n is a, c, g, or t
ntactgacataacattaacagatttacatatgcaaaactgtgaagcaacaggcattccccctcaattgacccacagcttgtagtgtctgccgagttattccccgcttcggctctgtaaccaagtgggcggcatgcgaataccatctgggtaccacttattgaaaactggcagtcgttctgtaataggcaagctggcaataagagggaagggaataaattgcatcatttagttaacatccacttgctttgcggctgttaaaaacccatgactgaataataatttggttatttcttttgccagaaactgccgtcagccaaatcgtactacgcatgcttgcagaagtcgacttgcaaaatttccacttgaaaagggattgaggaggatcagggcgaaatgggcacctcgctctggttgtgaacagcagtgactccgggtacatggtatctctatgcccttcaagtgtcctcgtcaccctaaacatggtcaacaccaagccctggtcagccaccagccacgctgagccacagaaccaggctgtgatgtgcaacagtgcccctaagaggcacagactcagggcgtgtgtgacaattgacagctacatgccgcagatgcggctgagcaagtcttgtctggacagacatcccctagtctctgcctcagaactaagtgggagagcaggctcacgggaagcctgagtgctacctgcccaggtcccctaactccatgcctgggagcagtcaggcggcatgttt

SEQ ID NO: 44956 - DNA, 1088 bp, Bovine  19866880187990
  misc_feature (1)..(1): n is a, c, g, or t
ncagcacaccaggcctccctgtccatcaccaactcctggagttcactcaaactcacgtccatcgaggtggtgatgccatccagccatctcatcctctggcgtccccttctcctcctgcccctaatccctcccagcatcagagtcttttccaatgagtcaactcttcgcatgaggtggccaaagtactggaatttcagctttagcatcactccttccaaagaacacccaggactgatctcctttagaatggactggttggatctccttgcagtccaagggactctcaagagtcttctccaacactacagttcaaaagcatcaattcttcagcgatcagctttcttcacagtccaactctcacatccatacatgaccactggaaaaaccatagccaccagggaagaccccaaaatatttttgagtgttttccaaagggtgacccttcatcccttttagagcagaatctcagttcttttgcttctttaacttgtcaatactttctccctccatcaatttcagcccccttcctcttgttctggctttagcaaaagtaaagcccaaatgctccactccacccacaagagaaacttctgatttcagttttgatcccttcttgttgcttaaagccaccaagaaggaggctccctagcttgcattactgctgtagccttcagagacagagagcctggaaaagacaggttggccccacgtttacgatgtgcccatggagttatttacggtttgtttatccactcaatgtggagcatttgtggcctatgaccttcagctccagggtgcattaatagatctgggggaagaattggtagtgttaaactatacagttgcactgggcttttcagcctccccctgaaaagcaaacccagcattaattcccagacactcaggcataataggatttctagaaagatcccaattaccccactggccaacatggtgggagaaaacttacaacaggtgagaagcagatggaattagaatgaagttctctgctcatcaggctcagagatggaaacaagcatggccagagtaaaggtacagatgtagaatgtaagacatcatcatgattt

SEQ ID NO: 44957 - DNA, 2444 bp, Bovine  19866880345575
  misc_feature (1)..(1): n is a, c, g, or t
ntaacaatactccaactactgaactaggcattgcattcgactctgtacatatggatctcgatttttctggatacccaatgatagatgataccaagtcgcttcagtcatgtccaactctttgtgaccctatggactgcagcccatcaggctcctctgtccatgagattctccaggtaagaatattggagtgggttgccattttctcctccaggggatcttccagaaccagggatcaaacctggatacccaataggcattattaactctgttggggcgatggggagctgtctgaggagttaaccaacaaagcagggccacacagttagtcagtagagaaactgggatttgaatccaagcttatctcagctttaactactataatagtctactggctgagcccagtgttggcagatgtaccatagaggccagagctggggagggagaaaaggaagggtcctgtgtgaaaactgtgctctggttgggaaggaatctgagttgctctttggtaatttttcccaatagagtgagatattcttccaccaccaccattcttctctccacccttctatcgactctcttcctgacccagactaacttcagcagtcaatgggtgggtcgtgtctggattcctaaagagtttgttctactagaacattcccacccagagacgtctgctcactaatgatgtaacacagcagcaagagggacaggaggtaggcttggaggtcatgggatcatgatatgatgtataatagagcctcatagcaggcacattgcaggtgatcaagtgattaggtgttctcccctgctcttaaaatctcttcttgccagttttccacagtctccctatttccctcctctagtaactcttattttatcctggaattattttctatttctaatcatccataagaaagttgctccacagaagacaccattctttaagcccctactctcatgatcggggcagtatgctcctgatactcacctcccacttcaccttgcacttgtgcctttcatcatcaccatctgattcttcctccttctctgtcaagcacaagattagagtgtgacgctctgatcccccttgtttcattattagtggaagctgatatttggctttttgcttcagaagccacattgtaaatgaagacagcggcaggaattgagttttgagttgctggctggcgccaaagatatggttagatctttgaggccagtttccaagtgactttggattgaagtcaggatacatgtttgggataaatggagaaaacacccatctagcaagcaggaggatctcagagactggtgtcttagagggtggcttactaactaaacaataattccttccacatgttcagtatttcacagctcaccaagtgcttctttgtatattatcttttttgatttttgcattggttctcttgggattaatgggaaaataccattgtcctcatgttatacacatgcagaaaaccttagtaaggagcatggaggttacgtgattcctctaaagtcattcaacacttcgtgtaagaaagttcaaaaccttaaagttcaagttgtctgaattcccaagctcaagttgggaatactgtatgaattaggtggatagataaaacacctcacaaaatgccttgtgaattttctgtgttcaaaaagcattagtctctttcctcatttcctttctgaatcttgcttttctgctctttttccatccaccatgctggaaacatagataaaagggagtgatctggagagcagaaacggaggaaaatcatagcacttgaacatggttctaagacaagcttatgaggatgagactgatgctattatgaagccccagcatctcgcaagaccttggtaggtcccaccatcagggaggatgggaaacagtgcccatctctgtgtcagctccatccctctctccctccccaccctaattttgtggtttgctaattattttgaggccagagaatgtcaaggctctgctttctgattcaattttacctctcccctgcattcagcatttctcagaggccatgtcactcagagaataagaggcagacccggtatcttgtcctttccaggctggcacataagtttctgaactatctcccctaccaatctcccccagactctcacccaccaagccaccctcactcacacaatttactggaaacctctgttcttctgaagcaggctttggctttgttcccagaaccaggcagaaggaaaatgctttctaagaaaaacatgagcaagggaattacattctcatctgatatttcttcaccaagatgattttgtttgttcttcatcaagattgccttatccatgttatttatttatttttttttctgtaaaacctgctcttgatggggcaaaaaatcaactggaatttatttttccctagtagttaaaaaccaaaatccaatcca

SEQ ID NO: 44958 - DNA, 1898 bp, Bovine  19866880369852
  misc_feature (1)..(1): n is a, c, g, or t
ntactaacttctcttacttatgtgggagtaagattatacaatgggatccccttatttgttcaagttaagcctccagtgtttacttaccacttcgttctacttgtattgaaaataccttcactatgtttttagctcaagcctttatgtttagtcacaggactgctagcggctctgaggaccctgcacaactgttttacagggcttaaggatggatatgaccaaacctggaacctttttctgggccaaaaccacacaaggaaagaagagaaacaactcaataggcaagggtgctcagttaagccacatagtttggattcttagaatctggtatcatctgcgccacccatgatgagtcacttctgcagtccctgccttcttatgggctggagcttggtcttgacagtgaggaatttctgcaggaatggatgtcaccagctccttatacagtcacaaaatcacctctgttggattcagagccatggagcacccacactgccttccttcttgcctgtgaagctcccatggcctccccaacatccaaagtaagagagggggtggagaggggaggtcagagaaggcaaagggagaagagaaaaggagagaaggaaaggaaatcctttcattaagtccccaaatataccgtcaacctctggactgctctttctaacttccttccaatatgtatttcatattttgtactgtaaagctcccatctaaactcagaattctgctgcttaagatgctccatgacttctgattgcctcaagtttaagtctaaactccgaagcatgggggacaaagttcttgataatccggtccctgcttggtccttctattttgcctctcaactcttttcgtattcctatattctctttctccttgcttcatctccttctcctcctctttcctccttccttctctcctcctgtctctgtttgtctttctaccccagcctacctcccctctgcccctcttccccttaccctccatccatgttagactattattctctaaaacaactaccatcccttttgttccctgatcctccctgtgtctgaaattccttctcctattcctttaatctgttgactaactcctccttgatccctaggaccccaacaagctttcctccaggaagcctattccctgaccccgcccccgttctgcctcatgtttagtcctgcatattgcaccacatggtattttattttccagtcaatgttcttccctccctcttttcaaaggaagggatggcatccttgtcctgctatctctacaaaacacagtgtctggtacatggaaaacacaagcaaatattagttgaataaatgacatcaacagtccatagctgcttaagctggtgcccatcccaggcaagggtctcagtctactttcctcatggattagaagtcaaactcaaaagaagttcaagtcatttgaacagagcatgaagctattcatattacagctaggatgagaacccagactcttgggctatgagattcttgatgatgacgaagaagaacacgtcttactcatcttgtgactccagcgcagagcatcaggtctggaaagtagcagctgcctaatgaatgaatgaatgagtacaacggcaccaagttctttccactgcctagggcaacatggaacagcaactcagcgatattacatttggtttaatcatacttgacaacgaacctgaacaattagagccctaggattcagactggcatgcaagttacctgctggcaagatttaccagtcatgctgacaactgccaaattgcttttactttgtccgatactgacataaaatgcctttgcttcctgcattgatgcattgcaatggttcatttggcatcatattcagaggggcccagatatactgttaccaccatt

SEQ ID NO: 44959 - DNA, 1743 bp, Bovine  19866880373662
  misc_feature (1)..(1): n is a, c, g, or t
natgtgctgtacagtaggtccttgttgttcatctcttttataaaaagtagtttgtatatgttaattcctcatatcacacacacacacacacacacacatcccattactatcccctctgataaacataagtttgttttctatgtttgtgagtctatttctgttttggaaataagttcatttgtaatatttttttcaatttcacatgtaagtgataccatatgatgtttgtcttcagcatacttcacttaatagataatctctaggtccatccatggtgctgtaaaaggcattatttcatttgtttttatggctgagtaatattccattgtatatatacatatatatacaccaaatactttttatccattcttctgccagtggacatttaggttgcttccatgtcttggcaattgcaaatggtgctgcagtgaacatcggggtgcatatatccagatgaattgtggttttctccagatatatgtccaggaaaggaattgctgggtcatatggtaactctatttttactttttcaaggcacctccatatcactctccagactaattttgttctctacccagtcttcttcatgcagtaacaacccagtgctatatgggaatctaaattgttggagcttggtaggagataccccacccaaaggagattgtgcatgtgtgcgtacgtgtgtgtgtgtgtgtcattgtgaagagagagaggggaatttttgccatcctagattttctggaaatgccatgatctgtttcgtcctcatcttaaataaactgaattacaagctggaaatatgtcagttccttgagaaaggagatgtacaaggtacattccattcccagatcaaattaaacaatttgctgcaaagagatccactttcacacaaaccaaagctcatctgagcttccctgcaataagcaaggactgtaggcaggaaaagctacattttccaaatgcccagtccctcctctgaatcatgttcattttccctaaatattttgcccattcttacagttgaaggattattaaactgatgttttctcctgtttcctttttctccctcactctacttttctaaatcacaaaggagaaatatattctcacaggtcagagaaattaggcaacctgaagaaaattcttttgactttggaagctatgccatgggcagaagaattctaaagaattttcaccagagttggattcacatgtggctagagttgagtgctccagctggcttcacttgccttcactctgggtttctcacatttgagtggccactggaatgtaggagacttctccctacatgtttgaaaaccaggtcttctgagagccgggtgacttacaggactgctttacacagctgcactgggacatgcaaaactccttagccatgtgtgattggctccatcattttagtacttttgatggtttttaaatctatgttcaaatatctttccaacctaccagtttctaaaattgaaaatttcagcattagagactcaattatactcaacaaatcatgtacatacattttacatcctcaacacctgaaatcttccctgctggactatgaccaatctgaagaacgagagcatggttttcacctctgtatcaccagagcttagcccagctactggtacatggctgctgtttagttgctcaatcgtgtccaactctttttgcgaccccatggactgtagcccaccaggttcctccatctatggaattttccaggca

SEQ ID NO: 44960 - DNA, 1565 bp, Bovine  19866880566421
  misc_feature (1)..(1): n is a, c, g, or t
naactcatttaatcctcacaacaaaccctgtaattatctctgtgttagagataagaaaggctgaggaaagttgagcagctggcttttctgagtggtgggcctgtctttgaacccagacagcctggattctaaacccatgcttttaatcactgagctgtacaagaaaaatacattcattcgcatttataccctatctcttgatctgtttgaaaatagatatgaaaaaaatttgtttttattccattgccaagtggggagattttcctatattttacatcctaagctataatgttaggccaagcacaggactgatgttggcagtcagcttggtatatagagttgttggatgcacactgcagagaacatccttgggaagggatctactgattaaagatgaaatgaggctaatgtactgctcttgggaaaagattagatgtgctcacaatgaaagagcagacatgaccataattaatgaagtaataatcactttggggcttaagcaagacctgattctttgattacaagtgtttccatttgaagtgagctggaagaaccctctggtctgccgtaaatatcagtaaaactgtttcatcttagggttgcagttatgcttaatcaatttatctgtcatttccaaagagcttctgaggttttttttctttccgtctttgtgctttcaattggttttcatcagaggcaagatgctgattcagcttctagtctgaatttattcagctggtgcaaagattcagtgacagggttacatttacatttttatcactgtctcttaaacctgaataatttatcatgttctttccagcccctcacccccatcgttttacagaaccagagtgaaattcttgcttttgtaatcaagcttagtttggatatgccggccatttctcatagacttctgacactcttttctgtgaactttgggggggaaattttttcctactgactgattcattttagatttgtcagagagttctttgtatgcgttgcctttcaaagtatgtggattctgcaataaattaactggctactaaattaaagacttctggctaagaatctgatatgttctttataaatgcattttttaatgaaaagatcaaaaggtgacagtgaactccagggtgataatcttacagacttctttcattcaggcttttttcttggacagtttcactgttcaaaagtagaatgatagtcctgatgtaatcaacaaattctgatcatggacattatgtgcatgtaaatacacatacatgctatatactggtgtcttagatctgaatgaaataactttatctttttgtcagttaagaaataagaatgaataaacacaagttcatgcatacacacaactcaagtcaagactttttagtatttgacttagaaacacacgactgtttcctcaaactaaagtatcactatataatttgtcattttatgaaaaaattcacataaggttcattaaaaagcaagctcttttgtatatttacaatgattattttttaactataaatttatttattttaatggaggttaattactttacagta

SEQ ID NO: 44961 - DNA, 1027 bp, Bovine  19866880603513
  misc_feature (1)..(1): n is a, c, g, or t
nattttattcttgtttgaaatgttaaacaagtcccgaaaggaatagctgcggaggcaactcgtggcgtctccagagagcagttgcaccgccagcattttctgcaggggctctagtgggggctgcctctcccctgtatgtttgcccccatctctggagaagcccccaggcacccctgctgggaatccagggctccctcatctgacccatatccatgaggctcatcctcctccccctcaacagagaccttctcatctatagggtctctctgcaggctgatagaatgattaacattctaacgacagcatcagcaacacccggaatgatgggtaatatccactgctgtgctgtgctcagtcctgtccaactctttgtgaccccgtggactatatagcctgctaggctccactctccgtgggattagcccagcaagaatactggagcaggttgccatttccttctccaggggatcttctccacccagggatcaaacccacatctctttgaatcacctgcatggcaggcgaattctttatcactagcaccatacctggtgtatgagtacttactcatttcaaggagctgctgaagataaagaggaagaacatgttttgacatatttcaccctcagcacaggtctgtctggtaggtgacattattattcccattttccagaagaggagcctgaggcacagagaattaagagacctgattataagaaagcaagccagtcaggcacctcaagcacaaaatttaagggattcacaaacaaattcagtaatcaagatgcacagtattgtaatgaaatactttaaaatctgtactaatgagaaaaatccacggtgaacaaaatatcaaactttaaaataaagacaggaccagttgattccagtccagtccagtgagtgtggctgcagctctccaccctgtactgttcagccgtcatttagggctcaggatgtgccaagccagggtgtttgttttttgccgaagttatctctgattcattctcatagcctggtgtggtgg

SEQ ID NO: 44962 - DNA, 1113 bp, Bovine  19866880658785
  misc_feature (1)..(1): n is a, c, g, or t
ntattgtgtagactatttgcacaacaccagtccttactaaaattaaaagaacaatgaataattgctttgcctacttttaaccctgaagataattctggctaagtagcctcaaaattagcccaggtatttatttggttgtcctcctcatcggctatttttttgtcttgatttatttctggtttccacttggttttgtttggcttagtttgatgctggtgttcaagtttgcaaagcccacttccctgcatcctctctgtttccatgtgaaatctgtcttgttgaagcccatctgagcggccagtgcagccctgagtcctgtcttctagagctcacagtatctttcttctcttaggaaagttaagtgttaacattgccctgaccgcatttgcctttcaggaagattaatgaagttcagcctgcagaagataagcttgtctgggaagagtaggcaagagctaagctgtgtcaacacggcctaagggcaggagagaaccagattgattacttaggttatcttcactctcctcctccctcccccatccatttataattctaatacaatttgatgtctgtataaatgtgaagaaagataaagaagcaagcttatggaacagctgcttacagtcctagtctttaccaggtgctaaacgcactagaaatacagcaaaatggataaaattgagttctcggggatagcactccttaaatttgtggaggattgggggagaggatgtaggggcaaacagacaatatgagacccccctcaaggggtctgcttgagtgctaatgattattaaaaaattacttccaaggaggataaatctgttcatgtggttaatttttctaaaacaaaataaagcaaattgttttgcaaggggagaggcagagggaattcgctgaggattatcctcctccaacctttctccaggtagcaatgactttcacctttaaaggagagggctgcagtacttggctgtctgggatatttgcatagaattgtattccagcgtctttcctgtatgggagccttttttggctttaaagtagatgggggaagctttaagaccttctatatagtaaggcctctgcaaagctagaaaccaagcagaatcc

SEQ ID NO: 44963 - DNA, 974 bp, Bovine  19866880767649
  misc_feature (1)..(1): n is a, c, g, or t
ntgcatagtaagagagtgtttgcaaacgtaggtggagctgagactctcttagaagcccgacaaaattactttttggcttgagtgagcttgcaaacctcttcttgaggctaagcagtgctatttcatgcttctaccgcaagcattttctccctgaaaaatcaatgatgcaagaaagcaattgctgatgggaggggtgggggggggtctctgagctaatccttgaggttgagacagaaacgcggctgctgctgcggattcagcctggggagatcaaggggaagcgtgactgctctgtttggagaggcctctcttcagttggcaccatcctgagcactcaagttttctgtcaataagcactctacgggggagataaatgcatttggaactggagatgggagcagggtgtctgggaaagaataaacacattatctgagcccctccaccaagttccttcactgaaatgctcaaggactcagaccacgtgtttggcagaggctggcgggaaggagagagattctctctactcttgtgggtgaagtaagccgcaaagatctgacctaataatactagacaaaatttgaagaccagacctctgtagcttgcttcatctacaggggtgccaggtactatgctgtgggattattaaatgactacttcactgccatgttggcagcaagactagaaacaactggcttgttacaaagacaggacatgagtattggttctactggggtaggtgacaatattctgcaaacgtggaaggtgaactcaaatccctggacagttttgccatgtattctatgatggcatcccttcctgacacagttttaaatccaaaaagagtccttcctaaggaattatttggggcaatggtaaatctaggcataaacagctctcaagataataagtcgttcgctaaggcctttgttttgttaaacatggactcctcacagagtacaggtcaaggaaacagg

SEQ ID NO: 44964 - DNA, 1298 bp, Bovine  19866880776847
  misc_feature (1)..(1): n is a, c, g, or t
naatgatatgtattggagagaagaaaggaaacagcatgtacaattttttttttttttttaaatcacacgtgcagagagtggaaaataaaagaaaccaaccaacccaactcgaagtcagttctaaaggagggtgatgtgaacttgagctctggaactggagccaggacaggaagtgggcttggcctacatgaggggcatatgccacatggaaaaccaccctgggcccaggcttcccatcttcctaattcccttcagcctccagcccctcctgaccctgggaacaatgcagctctgtgctgaaggctttccagccccagcagccgagactgtgccttttgtgatggcctgggagaggaagaatggagaagctggtttggacgtctgcgcgtgtgaatcactcacgtcacatggccgggccggctgtagcaactccctggggccaccccagggcacacggggagcatggcctgagcccacgcctggaggctgccgagccagctgcagggtgccctgctctgaaccgaataaccagggagaggatggagaatgggctgggggtgggggcaggtctggctaagcaaggccactgatgacatcggtgccactgtgtgggctctgggcccccggatctctccctccaattcccaggtcactttcaggtctatgtctgatgattttgagtcactgaaggtctggttcatccctgcagcctgcagggctggttccttgattcaggcaggtcaggactccctccacagggggactttctccatggactggagtaggtccggagtatggagaaaccaccgcactctgcagcagagaggacaccgtgagtcaggggctgctctgtttcccagaactgtctggattctggcttcaaaatgagaaacgcccaggcctcctgcctgctggctcctcagagtgctgatgggagaatgctgagcatcaggatgggtggaaaactcaggccagctgaacagattgctgagggttaggtagggtaggtctctgtccctgcttcaacttggagggggcttgcttgcgctgcatggaggcaggggaatggattccatgaccctgcacggtatcaattgatttcgcctgccccagcccagcctgggtacctctccctggtgccctgcagagggcagtgtggtaccgcaggcaggactctgctgcctcatcaacttttctttccactccactgccctcctaatcttttcaaatcaaagctgcttagacacacacaacctgagccctgcttgcatgacatatttagcctggtgtattgggct

SEQ ID NO: 44965 - DNA, 720 bp, Bovine  19866880861089
  misc_feature (1)..(1): n is a, c, g, or t
ntgaggctgagaactgtgtggggagggactggaggtggaagtgttagcagggacccccaccagcatttccatgtcctctgctactcaagcagagagagggctagctgctgggcaggagacctgtggaagccccaccatctctctccttcttctcagctcccctggtgggctcagccacccagtcggagaggcacagctggatatgaggaaaagtaggtgaagctttgtagacaaagcattttgcagtgaccccagtgtgtcccctaatctctcagtaagacttagggagcaagaaaatgccatctagtactcaagggaactcccaggtcatgactataggatctaatgacacgtggtcagtgacgatgtgcaaactgaggccgagggaatggaactggcttacctaaggtcactctggcctctcgccttccagcccagggcttctcttcctacaatgtgaggctgtgtgcttgtggaatgtcctctctggagattggaggtggagtcatgttggctcctggtctcagttttgacctagagactttcacgccactttgaaatacagtttatttggctttctgtaaggtaaattacagccagatccttttctcgctctcttccagtgctccagccatctgctcatccaccctgaaactcagaaaagaaaaaaataaatgctgtggatccaggaaaatttcatgaagacaaaaccagccccaa

SEQ ID NO: 44966 - DNA, 858 bp, Bovine  19866880920847
  misc_feature (1)..(1): n is a, c, g, or t
nccatctctggaatattattcttcccctctttctgccaagccacactctccacagggcatgaacatttaactctacttttggcttttccagaaatcttcccaaatcttctgttttcctcatccttcctcatctcttccacaccacccacggccccccgtcaacatctggcttttactcaccatgtgtctaattatgcgagtaaatttgtttccttttgcattttcccaacctgcctgtattttcctaccctgtctccctctaccatgggatggaatactactccccctggatagagtcatggttttcccttcttaagtaaatcccaagtgcctaagctgagctcagcccacagtaaattctccagtaacacagtttaatggactccctggttgaagggggggaaaaaaaacccaccaaagtgcctttctgcatctcttcaaatgcaaatgcttgatttgcattaagtttctgggcacaggaacttctgcaaaatttgcagcatttactgtccggtccccactcctctaacgcttgtgctttatcgcagaaccaaattaggagtggcttaaaggtagtggtcagaacacaatgtttcctactgctcactgaaacatgcacagtatgggcacctcgtaattgctgaagaagtccttgctgcacgaagtggaattttcctaaaatgaatactttgtgccttaggactgcactttcatgataaaacaatcaggagatttggctgaattttccactatttaactcgctatgttgaggtcatgtagaaacaacctttaagaacacaatgacctttaaaaaaatccatctctgaagtcaggctttgtcactagtctaggacagat

SEQ ID NO: 44967 - DNA, 1325 bp, Bovine  19866880962082
  misc_feature (1)..(1): n is a, c, g, or t
nttctgggagatgttctccaaatggacacggtctccaattttctttccctaataacagtgcgggaaataggggtgagggagacagagagagggagaaaccccaaacctcagaaaaggatgaaaacatttctaaactctatttcaacaatgacaaaatcaaattcgccaagtcacagtacatggccctctgctcttccaatctggtcccctcctctgggcaggctatggataaagagacactttgggaaagtcataggtgtccgctctgttttcatggcatcaaggatatttggaaatttgcttcccagagagtctaaaattcatcaacatggcttcagtggcaacacggccaagtggctggtggtgggctcctggaatgctgtccaccaaaaattatttttcggctcctaaaggacacgggccatggctcaaaacagaacaaagaaaagaatttcttttcccaattcttttctctcctccacctgacaaatgcatcagccccagtccccaagtccattctttttcatggccatgaaagaagtgtagagattgagtgtgcctattttaaaggtcttcagagctgccttgctttaggatttgggatgaaaagatgaggatatgtccatgtgtacctgaggatatgagcctaagcgtgtccatacttttacacgtgtgcataggagcatacattcgtgtctacaagagtgcctgtcatgtgtgagtgtggatttgggtcaataaatgtatccagaatatgcgaacttggtacaaatgcccatgtgagcccataagtgggcatttgctggtggcatgtgagtgaagcaattgtgcatgtgtgtgcatgtgagtacacgcaagtatgtacacaccccatagatatttcccctgacatgcctgtaggtctgtgttccgggtgggagtgcctgtgggtatgtgctagtgcacgccagcctgtgaaaaagtgtgcctgtgtgtgtgcacgtgtccttcacacaagcagggcccctcatccccctcatctcctctccccttcccgcaaacccacagcagactttgcctgccttcttggggatctgccagctgatggcaagggtccctctcctgggaaacagcactcctcgcccgttcatttgtgtcccataagggctccgggctccaggctcccgcccttaaatggcagcccaggctcacaacggacgactttcttaattgcccatgatgcttgcgggtgcagcacaaacacaacagtagctattaggctgggcgcactggagcagggctgcattttgcgcctgtgtgaatttagtgttcctgggagttgagag

SEQ ID NO: 44968 - DNA, 1239 bp, Bovine  19866880983850
  misc_feature (1)..(1): n is a, c, g, or t
ntcagtatcaaaataggcctcatgttaggtaagaatcgttctctcaaagtatggagataaatataattttaaacaataagatattactactttctacttttaaaaaatcaaaagtattaattttgcttgaatataaaataagaaaaaggctattatgaaacttaagaaattgctgaatagcagaacaatgtttcttttccacatgagactttaattcataaaagaaccccttttgtttagggaggtgggaaaaaaggagttgctaaatgttatgatatgagaatcactatctgttaaaactcttatttattttagactctgtcttttcaggctagagcttgtattttacatgtgttttaagctatgttctttaaaagtaaaatcaggactcaccaagtgtttgaactattattcacatttctgctttgaaacttttgcattgtgcttgctgtctaagtagcactaaaactcccctggcacagctacacagtaagagaaaagggtaagaaagagactaaaaggatcagatctctggagaaaacccagtggaaggaaggtagtctggctttctgcctaattccctgtttcttttagcaataataacttgctttagccaggcttctagaaaattagtctcctcaccaaaatctgtccagtaccttgtgacttttaaaatattaacccttattttattggcatttatttatgtgtgtactaagtctcttcagtggtgtccgactctgtggaccccatagacggcagcccaccaggcttccctgtccctgggattccccaggcaagaacactggagtgcgttgccatttccttctccaatgcatgaaagtgaaaagtgaaagtgaagttgctcagtcgtgtccaactcttagcgaccccatggactgcagcctaccaggctcctccgtccatgggattttccaggcaaaagtactggagtggggtgccatgtttgaataaaattacctaaaaccagaaggaggtaggtgtcagggtgagtaactgtaatgattaaaaagcattcagggaaatggaggtgggggatagttagggagtttgagactgacatgtacatgctatatttagaatggataaccagctgggacctgctgtgtagtttcctacagggaactctgctcaatgttatgtggcagcctggatgggagagggttttgggggaggtgaatacatgcatgtgtacagctgagtgctctgctgtccacc

SEQ ID NO: 44969 - DNA, 1549 bp, Bovine  19866880989729
  misc_feature (1)..(1): n is a, c, g, or t
naattgattttattttgcatctttatctaagttgttagatttaacttcaaacttgctttcatatatcaagtacagtaggagaaacaaatatggatacaggtctcttcattctatttgaaggagttgttacagtgaccccgaaaccaggagatggaatatttccacagtgaagtattttccattacgtattttatctagatgggaatttatgtggtgtggattcaggggatattattaagacaactgatgatggatggaaggaaggaactgacgagctgtgtgtaaagattcctgtgcttccgaatgctctgccctagggaggataatggttatctattctccttgtccactgggaatgagcaagggaatactggttaataacatggctgaggagatctaggatacacaatgaatttcataactgacaagttccttggacactggaaccactgaccaagtgctctgtgagtggggtgaaatgcccttctccaggggccatcaaatgcatctgtccagcagaatataagtgcagtgctacccagagagagatgaatggacagttgatggctggattcttgctttccagtctggcaatatttattttaaatcccattccagtcctgagaagtaaatgtagatattccaccataattttgaagatgtcctcttttcatttctttcttttaaaaaaagagagaagagtgaagggaacttttatggaagaaagctgtgatttctttacagaaaagggcatgtggctcatacttcagttatttacatgaacaccatgtatttaaagacacaaaaattcaccttggaaatgaacaacgatcacagttttttcccttcacataatgtgtgtgatgtgggtagttttgaattttatctgaatgaattttaataataactaaagaaaacagactttaatcagaattatagactggactggcttgaaaacaccttgaaaattatctggtggataaggaagctgagtcacagagggtggaataaactgaggtcacaagaatgattcaaagttggtgggaaggcattaaaaaaatcttgactttttacccagagtgaggaagagtagcaagaaatctagtctcataggaggagaattaaactgttgccttaaagaaccaaacgggagaaatggtccagtggatagcagtgatttccagtggatagcaatgatttgcagaaactgtgacatagcttcccagagattcaagatagagaaaaagtaataaaagcaattgaatcatgtgtcatttacaattggaggtgtcctttaaaaattatttttggcttagcatggcaagagtttatttttttaattggggtaaagttgctttacaatgttgtgttagtttctgctgtgcaacgaagtgaatcaactctttgtatgcatatataccctttcttatatatatctacccttccgttccaccttcccctcacctctcagcccctaggtatcacagagcactgagctgagctccctgtgctatacagcaggttcccactagctatttattttacacat

SEQ ID NO: 44970 - DNA, 1016 bp, Bovine  19866881025382
  misc_feature (1)..(1): n is a, c, g, or t
natctacatggacttcaattttactttcctcgtagtgaagagagccaaccatgtttaggatctactgaagacttggtgccattcttcaaggaaattttcccccaaactgaaataacccacaggacaatggtgctgctatgtttgatcctacgcgtgattccactgccttcaggatgtgcattctgggctgctcttctgttcaagggtttggaactgagctgattcatccacaccttattctcccctccccacagagaccataacagcatgccatgtgcgttacaagatgtctggccagaatttagagcatggactgcagccacagaacagagcaaaactgaatgaccacacacagggtctgagtctctgaccacggcccctttgctctgcctaaaaaccaacccagctaaatgaaagcttcctttctgccttgtgcacgtcaaacgtgttccaaaggaaggttctcaccactcactcccaagctgctgccgcggaaagaattcttcacttcttgcacaaccccttgcttaaagagcgcagccaaattaaccacagcctgatggactgctaatggtaactttgtgcttcagagctaaagacaaagctccggtggcgacaggggctccatcaagcaccagggtcaagcaaaaaccaattcactcagaagagaaaacggttgtaaatgctgagctaagccgcttgccggttggcattctctgctacctcgcaatcggtgtcctgcctctccttggcttttcctttaaaactcatgaacaatgttttccagtattggttgcccctggttcttcaccatgtccctggctggctgccttctgtccaggtgtgagaggactttgcattttgggagtctccgcactgtggtagagaagataggctgagaacaactacatatgcatattcagcctctcccagttgctgggcaaccctaagcagttcattcaatccctgttagcctcaacttcctcccctgtaggagtacttgcctcataaattta

SEQ ID NO: 44971 - DNA, 981 bp, Bovine  19866881077881
  misc_feature (1)..(1): n is a, c, g, or t
nttagtcattccggtcactctggagtctgaaaatccctcacatgagccccgtcctggtccctcctttgccacatcatcagaattcaataagtccatactcagttcaaattcaaaaatctttttttttcctttttttcaatatcctgaattattttctagatcaggggtccccaacctccaagatctcatgcctgatgatgctaaggtggaactgatataaaaataataggaataaagagcacaatgaatgtaaagtgcttgaatcatccagaaaccattcctcctgacatcagttcatgggaaaactgttttccatgaaattggcacctggtgccaaaggttggggaccgctgttctagaccacagggggcagtcattacccaggtcttccaaggatgatctgaaaatatcgggacagggacttaaactaaacacgagaaagaacttgctgatgcatttggcacagctcagacagctctgatcaatctctgagctggcattcagcagattgttaccatagctgtgctaggacagagaggctattgaaattctgaaggtatatctggtcctctctgggactcaactgaatcttaaagaatgacctcactatcctgtggactccccacatgggtgtaaaggcattaaaacatgtacggggagaatcagtgtattcctccaacagagcaggacttctcagggatggccactgtaatcgctaccgccaccaatgcctcgtgaggaactttcgggaaacggcatagtgctcctcctgtaaatgagaattcttggctccctgggattcacagtcaaaaacacacacagtggaaaactctaattcaaaaggatacatgcaccccagtgttcatagtggcactgtttacaatagccaagacatcggagcaacctaaatgtccactgacggacaaatggataaataaaaggtaatgtgtgccttgtacatatatatttatatatatatga

SEQ ID NO: 44972 - DNA, 2042 bp, Bovine  19866881082330
  misc_feature (1)..(1): n is a, c, g, or t
nagctgtttatgtttctgtgggcaattggaactcagacctgttgaagatcctctgaacagctatgtctcataattgtctgaaactgcaaaagagaagtatttatcccccagctctggtcccctgctgctcatgtttgccccatagtattcaccccccagcacttcagatttcctgccgacactgcagcaggaagcctagggcagaaggcaggagagaagtgatgtagctggggtgaagcatggccaggccatacccacacacactgtgctaaagcaatggccagaggagaaatacagattgagaggatgtgagctggagataaaagatggacaacacgaatggttagatgaatatgcatgtttatttctagctacgtcttatttccccttcacagtcccactttccctcacttttcccaaagtcaaaaatgccttgggtgagggggataaacttagaattgggggttaacagatatacattactctgttattattgttcagtcactaagttgtgtctgactctttgcgacctcatggactgcaggcacgcccagctttcctgtccttcgctatctcccagagcttgttcaaactcatgtccattgagtcggtgatgccatccaaccatctcatcctctttcatcctgttatcctcctgccttcaatctttcccagcattaaggtcttttccaatgagtcagctcttagcatcaggtggccaaagtattggagcttcagcttcagcatcagtccttccagtgaatattcaaggttgatttcctttagtattgactggtttgatctccttgctgtccaagggactctcgagagtcttctccagcactacaatttgaaagtaccagttctttggtgttcagccttctttaaggttcaactttcacatttggacatgaatactggaaacaccatagctttgactatacatacaatagataaacaacaaggacctactatatatcacagaaaactatattcaatatcttgtaatagcctatagtagaaaataatgtgaaaaaggaatatgtatatatggtcaatcaactatacttcaataaaaaaattaaaaatgaaattaaatgaacatgtctttcctattctaccctgtgccagttaagctctgtccttacatgaccaccgatgtctgatgctgttggcatcgggggctatatttcaggtggcaggagtcacatctgtctttgtcctctggtgtggcagccaccatgactctgatggatgatatttttcaacaaaagctttgttctggggatatggaggaggtgactgtgaccccgactgggcgtactcatctgcaggcaatcctttttgacactgcttcttccattctgatgtgtatatataaacaagcttctctctgcagcatcattttctaccagtcatccctgaaaaagtgcttggagggaggacactcaccaccgtttgttgatctcaattttccagactctccctgtccctgggaccacaaatagtagacttgtctgtacgaagtgccttataggaatcaaagctcttacacaatgcagaggttctcagggaagtgttgatgggaatagtagtagccttcttttctccacttgtagtcatatgtacacagaaggtgccaaataaatatttgattagaaactgaaaaaatgaaatcatccatctccactctcacaggaaaaatgttgatcagattataaacattttaaaggcaaggatgactaatgggatttttaggggtggagaatttgagagtttctgaccaagttctcaaagggtagtgcttggaccagcagcatcagcatcagtagaaaggtttagaaatgcaaaatcttaggttccatccagatttactacctcagtgactctgtggggaggactcggtaatctgagctttaacaaaccctctcagtggtcctgatatatgttaatgtttgagaaccacaggtctaaaagtattctggacccctttagttttttgttttttgttttttttgtagatgaggaaattgaaggcaaaa

SEQ ID NO: 44973 - DNA, 750 bp, Bovine  19866881143346
  misc_feature (1)..(1): n is a, c, g, or t
ncttccctctccttggcccccccaccccacccccgttgcccttctttttttcccttgaatttcagcttccaatgaggtcagatcccaaagcccaaataagtgaagtcgggttcacgtcttctcagatgaataattccagctcacccaagcacacagtgttcacacataatgattgcacattaggtttgctgcctgctgggctgacttctctctccctctccctctcttttcaaatcaagggctggagatagaagagaaagtttgaaccatattcaaaacacagagtgaaaaagactgatttcaaaagaaagaggagaaaataggagaccgagccatcttttcttttccttttttttctccctaggcttctttattattaaacggcctttacttcaacctctggtattttgcttcatcaaactctgttgggagaaaaaataaaataaaagcatagaccttttcacaactgtgtaaccttatagtgatgagttcatatttatcattcatgtcttctgtggataaggggaaacaaaaattgacacaaagaaagtgctcacctagcttcattcctaaatttagacctcactgtatccatcagtgttcaaccaaaagtaatgaaagtcatacctgagtatctaaaacagggattttgggaccaggaattagttagccaggacatggaagaagagctaacagtcagacaagggataatgaggcagatcagaaggtaataacagcaagatgcagctg

SEQ ID NO: 44974 - DNA, 941 bp, Bovine  19866881205750
  misc_feature (1)..(1): n is a, c, g, or t
nttgaaaggcatgtctgtttttaaaacttaaatcaaattaaaaactcagtcctcagttttgttcaccacatttcaagtgctgaatagtcacatggctcatgctaacatactgggcagccttaggtagagtcctaggattatctctgagttgtttgaccacctacccacttcctttggagaatatttagttctttagtccaaagcatcaaagtattctagcatagagacactagcacttggagaaaggtcataaaagaaagaaagaaggatcagtttcattgtggtgggggtaaggatgggagctactgaaaaagaaagagtgagggtggcatggcctgtggattatcagggagaagtgaaagatcaccatctctttacctccaaaaaagttattgtcccatcatcagaataattttaaaaagatataaaatatttgacaaatataaaattcccaaagccccaggttcctgtgattaacttatatatcctttacctgtaggcaatatacatcaacatgatatgtttctactttcaagaaattacatctaaaaacacctatcttcaaaaagaaaaacaatctttaaaactctaaagggaccttacaatgtgatcaactacatggtttccttaaatatccaacctccctctcatatttagactgtgattatattaatgggggaaaaaatggtggcgcccaacttttgaagaacatacccacaacagagagcagagaacacctgttgttgatcttgtcttttgaatcttaatttcaaaagttgttttcttagctaaatctttgcttacagaatggtcccacccaatgttcttgggtttaagactttggacatgtggatgattacttaaaagcatcctgccttgggcctaagtgtctgaacaattaccctaactctgccctctaggcccatttcaacattattaag

SEQ ID NO: 44975 - DNA, 884 bp, Bovine  19866881291930
  misc_feature (1)..(1): n is a, c, g, or t
ntgttcttggcaaccaaagctataaatgtacaaaactttatctctggcaagaatgttttaagaaaaagaaagacaggaaatgtctatagcagaaccccagccactggttaacttgactgatctctctggagccacatcaaaggcccagttctgtctgctccctgtggcctccatgagtcctgccctaggagttcagcagtttcttggagccaaggagggaagaaagcatatccactgtaagtgctccccttgtcaagacaggggtgacctggggctgcagggaaactggtctccctctccctagtctcctttccaggacacttcttcaccatccagataagatacaagtgcatccatgtggctgaagcctgatggatttcataataggagcattgaactggaggtcaggaagctaaacctatagtctgcaacaaataaagagttgctgagcacggagaaggttgattccttccctaagttcgtttccttataaaatgagcaggtcgaagatgaattgatagcactctttgtgattccctccggtgactacagaaaagcaggatcagcttttaaatttcaggaaaaaaaagaaatctctttttcaagggaatttcattcagaatgagaggcaaatcccaccccttccataagttacttctaactgaccacactgatgaatgagaccagctgggatcaaaaggaaacagaaactagattccctagggctgattgaggaggtttgtctcacccttaatgccatcttcctagagtctataaaaagaatcaatctgtctttaatttcctagaggtttcatcccagacattttgttcttcctttctctctcatccttgggaacagttcattgtaaataaagtacctaaag

SEQ ID NO: 44976 - DNA, 974 bp, Bovine  19866881341069
  misc_feature (1)..(1): n is a, c, g, or t
naaaataatgagaccaaggttcaaagaagtaatttaaaccaaatacggcagtggaaggctgagccagcaaggggcaggctctctctgcagggagcagggagcagcaggtttggagctgagcagagttcagtttaggacattccttgggtcagaaatgagaaaggagctcatctgatggcctggagctcccactgcccaggtcagtgaaaggggtgggactagatggtgttctagagcctacccggtagcaaggagactgggtcgtggtctctgcacccaccattggcaagactgcttgagtttgcaaggcttgtcctatctgggtgggctgcccttgcaagagagagcccctgagaccaggcaaatgaaggagaccttgcctgtttggagccaaactttttttaggcactattttacacttcatttcatcaaagaattacagggacactagtatggcagtccactccagtactcttgcctgggaaatcccatggatggaggatcctggtgggctgcagtccatggggttgctaagagttggacactactgagtgacttcactttcactttcatgcattggagaaggaaatggcaacccactccagtgttcttgcctggagaatcccggggacgggggagcctggtgggctgccgtctatggggtcacacagagtcaaacacaaccgaagtgacttatcagcagggatggtggatactaagctcattaactgcctgattaattttggatttggactcttgctgatcctacattctaggtaattgagtgagtgaaagagtgaaagtcgctcagttgtgtctgactctttgcgactccatggactatacagtccaaggaattctccaggccagaatactggagtgggtagccttttccttctctaagggatctttccaacccagggatcaaagccaggtctccttcactgcaggcagattatttatcagctagccac

SEQ ID NO: 44977 - DNA, 1060 bp, Bovine  19866882017059
  misc_feature (1)..(1): n is a, c, g, or t
naatccccttgaaacaagaactctggcttctgttcccaatctattttaaaggcacagcaactggcacagtcaccaccacaggcaatggcaccatcattgaacagattgcttcactggcttctggaattggcaatgggaagacactcattgccactaagactgagcactttgtgtgcactgtggcaaaagtggccacttcaccagcatccttttctttcttttttcttttgaatttaattggaggctaattactttacaatattgtaagtggttttgccatacattgacatgaattaaccatgggtgtacatgtgttccacatttctgaacccccctcccacctccctccccatcccacccctctgggtcatcccagtgcaccagccctgagcaccctgtctcatgcatcaaacctggactggcgatgtgtttcacatatgataatatacatgtttcaatgctattctcccagattatcccaccctcgctgtctcccacaaaatacaaaagactgttctatacatctgtgtctcttttgctgtcttgcatacagggttatcattaccatctttctaaattccatatatatacattagtatactgtattggtgtttttctttctggcttacttaactctatataataggctccaatttcatccacctcattagaactgattcaaatgtattctttttaatggcagagtaatagtccattgtgtatatgtaccacagcttttttatccatttgtctgtggatggacatctaggttgcttccatgtcctggctattataaacagtgctgtgatggatattggggtacacatgtctcttcgtgtcaattctggtttcctccgtgtgtatgcccagcagtgggattgctgggtcatatggcagttctacttcttaattgtgtttagacctggcgactgtctggccacggcctccggggcggcctctaggcgtgggctgagcgggggcagcagggggcccgggattgcaccggccaccaccgcccacctggccatggccgtccccaggggagttcggggagcatggg

SEQ ID NO: 44978 - DNA, 999 bp, Bovine  19866882105379
  misc_feature (1)..(1): n is a, c, g, or t
nacttcagtagtgttcaactctctgcaccttcatggactgtagcccaccaggcttctctgtccatgggattctccaggcaagaagactggaatgggttgccataccctcctccagggatctctttcccaacccagggatcgaactcacatatcttgcatctcctgcatgggcaggatggctctttaccactagcgccacctggatctgacaagccatggcaaaaccagaccaaagtgttttctgcagccattttagaaaagagagtgaaagcagagagcagagggagctcagaaacaccccttttgcagggtgttttgttttgttcccgataatcttacttatctgcggcacaaaatcttggattagtgtttcacttaggctgagattggtgtttcactgtcctgggctggcggacatgtacgactttgcatggctatccaagttttccccatccaactttgtcaggggctcactttctgtctagtggaagctattctcagcccacagaagcttgagatttttcagaggcgcctgtagatggacttgcctcttttctgctatactcattcgaagccacggcaaccttctctgggccaaaaccacttactaattaatacatttcacagagtgaatggagcgctggcaccactgccaggcctggggcagctcccaaagccacgggccttgcccagtgcccagaaagagccctggctggaggcagtcagtgccagttttcctctaagccagcatctcagccttctcacttgaactcagaatgcatcgctgccagcgtcccccagggcccccagctgtgtcatcctctccttcacctgcttccatgtccaaggaagcaaggtcacggtactatggcacctgatctatttttcatcctccccttctctgggcagaatgatagattgactctggaaaacccattagggaagggctgggctgtcctgcatttccgtcaggcctgtccagggactttagtcaagcca

SEQ ID NO: 44979 - DNA, 4720 bp, Bovine  19866880485429
  misc_feature (1)..(1): n is a, c, g, or t
nctgcttctttttaagagaggacaataatacgtatctggtgacacactgaagagacacgatatttgaaagttgctgattgagtgctactttgcacttctttccctgtcctagacccaatttgcaaccacagggcatacacaccactcactgctaccacagccccacgccacagccggggccccagcctggcagaatatcagcagttgccatgcttaagtcagagaagttaggggactgtgatctcttgtgcctgaagggtgagggctctggagcgctaggtacccagcctctgactgtcattccaaagccctttgattcttggacagattatgtagcttatgtctgagaccttcctggggactagcagtgacacacaagtctccagttgattctgatgagaaaaccagagtggtccaaccaggatgccgtagcctctactcttcggggcaagcgtctccatcttcccccacctaattatccgtggagctggaatagacagtcctcacagtaaggagtctttacttggggatcacactaaaacaaaaataaaaagaacaagggattcatgtctgtttcatgtgaaatgaatcactgctcagtgataaccagtcactttgaggtggatgcagctatgattacatttgggcaaacgtgatttagaacttccctgatggggacttccctggtggtccagtggttaagaatctgccttccagggcaggggacttgggttctgtccctgctcagggaactaagatcccacaagtcacgtggcaactaagcccaagagcctcaactagagagaagcccgatggccacaatgaggagcccatgcactgtaacaaagacccgacatagccaaaaataataaatgtaaaagaacttctgtgaaacagacctgtgccttcaatcagaggtggcccaaacgacaacactgcaaactctttccatctacagtggctcaggacatgacgtgtgtgatgttaagttgctgcagtcatgtctgactctttgtgaccccatggactgtagcccaccaggttcctctgtccatgggattctccaggcaataatactgaagtgggttgccatgccctccttcaggggatcttcccaacccagggattgaatccgtatctcctgtgtcttctgtgttggcaggcaggatctttatgactagtgccacctgggccatagcaaacaaccttgaattctgttaagcttctgtttatctaccatgcctacactttgaggccaaaatctaaatccaaaccgtttcaggtgattggcattgctgtgtcgtacttttccaaaggaggatgattaatttctcaaaatccatcagtgctgattcctttgttagcaacagcagtctgggtcaatacttaaaactggcatgggaaagatgctttcaaatccagctctgtgctttgtggtggttctataccagctcccgtgtgaagaatcattacaaatgtatgcatttctctcatgctgaggcagcattttatactccaggggactattctggaggaaggtggttggttaaagacagacaaagtagaaaggagagacattttaacaacatttttatattgttttggtctcaacatgtagccttagtatttttttttgtccacagagcattttagcaatgagtatcttttggtgtgctaaaaagtggtatgctaattaaattatgcatacattataaatcacactaatataacaacatgattttggagtttagtgagatctcaaaagatcctccatcaccaggcagattattttctcacagataaggaaatagagctgtgaagtcaatcaaggcccctccatatcctcttcttctaggtagcccccaatctttagtctggttgtagaaaatgaaaagacttcttttctcaggagtcaacttctttggactatactgactctccgaagagaattccagaagcagctcctagattcaactttttctgtgtattgccatcatcacatccacttgccacatgacaagagtaacgagcggtaggcagaaaaccaggacgtggacagcaacagcctttccataccttcctcccctcgcacactgtgttagcctggggggtggtgtgtggccacacagaacaatcctcctgtggccaaggtggctggcattactgatcccgctccatctgcagcccaggccttttccctttcccagcatccatgagaatgcaactgtagatgagaacttcctctatgaacagaaacacagtccattcccaaaaggtcctggatccggtgtcaatcctgccataggcaagactagaatccacttagagatgatcaggggcatggatgatcagagacaatcagatgatcagccgtgactacttagtgaagagggacagaagtctcagagcaacatggggatgggaactggactagttaacaccagtcactttctccctgccacattcccttcttcaagaaccttaccttgcctgctgtcgctgagggacaaccacatgacagatgcccctgccatcagtaactgaactaggagcagacatcgggcccacttggaaccaatcagactgtcttctatagtttttggagttgggacactgagagtctggggttgctagttttctgtgggtgctggatccatacaatcctgtcgcaggatcctgtgaagcatgtagctctcttaggtcatgtgcaaataaggaagctggattagagggaggagatggagacgatgctcagagacaaagaaaactgagagaaagggaggaggaacagtagctgcctgggactcttcagtgctccaagagtaattctcaaaactgggtttcataatagtgccttatacatgtacaagaaatccccatttccttaagttagtctgagtgggtttctgattctaagcaactgaatgctccctcacccaaagatgagatggctgtagtgtaagtgggaggcgggggatgaagtgaaagaaggatcgaggaggaaaggtaaatctggcatttttctggagagaataaatctcagagtccaagtgcatgcacaatatccatatattccaagttttataagacagccctatttccagcgtgtcagcttccccaaatttctgttgagagaaatatgatgtatctgtttaaatatataatcttagcattaggcaggtctttctacataagacacaaacctgaaaaccattaaagaaaagattgacagatgagactacccattcttcaaattctaaatggactttgacaagagacgtcggtgacaaaattcaaagtgaagggtctacatgagatctgaggaccccattgtcattccagactccctcccactgaagaccagatgctccctcaaggctgctagacagggcccaaccctggcttcctggcagccatgactatggagggtgttgcaaccattggcagcaagactgtgacctctcactgttccaaaatgaggaaatgaaagggaaaaaagaggaaatgggatggaatgaaaaatggatgaccacaacagagagggagcaagaaacagtaagaaggataaaagaaataagctgtttatcttgactctgtttctaggccttctccttgttgatatcccagtgatacatcagcttgaactgttgttactcagtcacggattcctgcagaaagggaggtgtgggacccaaacttgaccgtgtggccacagtcatggtttaggaattcaacccactccatctaaccaccaacctgtggtcagacaaattaagtccatggattagccaaaaggcttctgaataaaagttttaggttgaccattttctcctcgttcttatcatttcctcttctcctaaattccctttattcttaccacccaccagaatggagaattgaaattaggttcttttacttaatagcttgccaaaatataaacaactctctcaaactaagccacatctcgtctagggagagggcaataaaaataatgatctatgtggtcaagagcccagtgagacatttttatagcatcacagatggttttccaaattgtggagtggctttgtttctgtgtatctcagtttctcagtccataatttgaagataatactagctgtccaccgctgactttttgggtgagttggttggatcatgagagtctctgtgtaaaagcactttgaatcttagaaggtggaaagaccatatgggaacagcacataatgagaaggttaggcatattgcagtgtttggagggggggaaatgatttgggccaagaacacttgaccccacgcaatattaagctgtttaagaggactcaaatctaaacagagcaccattattccagatatgtctctggtagttctagagctatggaagctactgaaagtgcctaagaggtggcatggtaagagaaacaaggtttgcattgacaccttactcctcttatcaattttaaagtcaaaattacccaactttggcttttgtcatggtctctattcagctttggcctcaaccctgactctgaacaaagactctgtttcaacttcagtcattgttgttcagttgctaaatcatgtccgactctttgcaaccccatggactgcggcacacccagcttccctgtccttcatcatctcccagagtttgttcaaactcatgtccactgagccagtgatgccatccaaccatctcatcctctgttgtcctctttccctc

SEQ ID NO: 44980 - DNA, 1570 bp, Bovine  19866880523409
  misc_feature (1)..(1): n is a, c, g, or t
nagagctgcttaaccttcccctgacatattcttatctatgagttcagctcctgaatttttctgaaatttgtagcttatacatcccttaacctttcaaactcttaaatataaaatgtataaaggagaaggatgctgactgaaatcttggtggtttaaagtttcaaatagcactttacactcactcataagaagacaaaagtatcccacaatacactagcctgggcaaaaagccacaggagtgtccattgatctaataagaccatcccagctggaagatcttttggaaaataactgaattgcattttaactccaatgcttctccatttgaaaaatgggaactctgaggcccagagggattcaggaccagccccaggtcactaaatcagcaaaaggcacagtagtcagaagaccgaggatccagtgccctattttctccactacagagttgtttgttggaaaaagtatatttctgttttggcattcttgagtctacagattcctagcataagttttggcataatgaagtatggtgttgtaatcttcttcctaactgtaacccttcttcagtcctaaaaaccatataaggaatttgatctctatcatagtttccaattagctttgacaaacttgatgtcttgccaaccagtacactacatcacacctactgagtccaacagaaaaatgattctattaaatacctagacttaatatctcagctaaaaatcaccatctgttcacacttaattacaatcttccgaaaacatatttatttaacaatcttaaagaaaaattccacttgcagagaggaattaggatttgaatttttagtctttgtgccgaagagctgtcaattaaacttaatattattctcaatcctggctcaagtcctactggaaacagaagcacacattttttttttttcagatggtttccaaaaacacactcttgcatttatttctgaaggaaaattttaagatggtgaaaaataaataaataaaacaggatgcatttcttgctctttctttcttttcagctttatttcttaagtatacctttcttgaaaacaggaatggaatggaaaaaactcagcttccaggtgtactttatcactaattggcttaacatgccagacaagaagccagccagttattttcacctcctgtcattgtacttatatgcctctcagaaggactcttctgggttcaatcaatataaagaactgtatgtaagcggtcctttattctgcgacactcctgtagagatctgatttgatgtcattcagagtctcttttgaatggtttcaatagccagaatctcaggcacaaggtgcttttacgaagttaaacagacactaagcttgaagaaatttacagaagaaaaaggaatgccctgcccattcagaataaacttataaaaactgatagtcacaacattcataaccaagacttttatggttgaactgtcagtcacctcacaagacaaaatatccctcgccaaaaaagtattctatttcgggagttattttctgaaatggagaagaatgaattgaactgcctctggccatctgtgt

SEQ ID NO: 44981 - DNA, 1361 bp, Bovine  19866880614842
  misc_feature (1)..(1): n is a, c, g, or t
nagtgcccaaatgtcatctatggacttgggtggcaatgatgtatcaatgtggattcataagtcataacaaatgtgcaactctgatgggggatgctgataatgggagaggctatgcttatgaggaggcaagacatatgtgggaaatctctgtatgttcacttcaattttgctttgagccaaaaactgctccaaagaaaaataatgtctttttttgaaaatggtttttatattcacagttaccaacagaagaaagcgtgccataccatgagggctaaacacagaagcacaggcttggtcaggaagcaaaaagagaggatgtaactggacaagagactttattgtgttttccacatggaataatgagcagggcagactaagcaggtttaggattggctagtttgaataatttcagctggttctggaacacaagggctctccccagttgtatagaaaccgaatttggcttagttagggcagatggatagtggcccagagtttgagagcacagtaaacggggttgttgggtgtatgggtccagtagtggttggtttgcatttgaagctacactcataaatgaaggaattcatcacaactaagcctgcttcataagaaatgctaaaaagcgttcttcaagctgatgttcagttcaattcaatcgctaagtcgtgtccaactctttgcgaccccatgaaccgcagctgatgaaatggaactaattaataacatgaaaatgtttgaaaatacacaagttaaatgtaagtatatagtcaaactcggaatactactatgatataatatggtggtatccaagccactaaactctaatatgaaggttaaaagacaaaattattaaaataactatagctacaatattgtgttactggattattgttgttagtctgtaagtagtgtctgactctttacaacccaatggactgcaacatgccaggcttccccctccttcattatctccctgagtttgttcaaattcatgtccattgagtcaatcatgctaataaccatctcatcctctgtcactcctttctcctgttgtctacaatctttcccagcatcagggtcttttccattgagtcagctcttcgcatcaggtggccaaagtattggagttttggcttcaacatcagtccttccaatgaacactctggattgatatcctttaggatggactggttgggtctccttgcagtccaagggactctcaagaaccttttccaataccacagttcaacagctttctttaaaaccaactctcacatccatacataactactggaaaaaccatacccttgactagatggaccattgtggcaaagtaacacctctacttttaaatatgctgt

SEQ ID NO: 44982 - DNA, 1847 bp, Bovine  19866880725399
  misc_feature (1)..(1): n is a, c, g, or t
ntgagctggtttcatgattgtgagcacctgtttcacaaatgtacacgcacacacataccccagtatgaatgaatttgtgtgtgtttcaaagctctaggctcctccttctatttcaaccaggattccttttgtcactggtgagttctcaaacccagtgtaacttcagtccacatttctggggagacagtctccctaatactgctacccaaagtagctagtaccttccaccaaggtttctgaaaagcggcccctcccagttcctctccctcaaataagaccaccagggacccttcccttgctctccaccatcactctcggaatgcggagaaaggagtgaagggaaggagcaggatggtttgctgacctacagctcttctcaaatgccctttggcagaaggctcacaggtggtgtgacattctgtagcagttagagagaacacctccagtgagcttgacccaacccctgatgagctccagggataggagcgaggagaggcctgccagccaagttccctctggctgttagctgagggtagaaacagggaccaactgcctgattctgcagacttaggtttcatccttactttcagagatctggatttcttctgacattaactgcttcctttcctcgaaggttcctgccagcccttttgtctcaacatcttaaaaggcttaaatggaactaggccagggcttgtatgtttacattctcctgtgcctgttccctctgtgtcctggtggcactgctcccattctattgttattctctttgttacagcccataaattctgtgctgccagggcgttgtctttgggggtttaactctaagcttcaccacatacctgtaaatgattagtaagcagtgtttggttaataaataacattcaggtctgatattaataacagacttcttcaagcacgacacagctggtgacgatttagtgacacagggtcaccttagttttttggagcgttagcttggaggagagactgaatgctgccagatgtcaccaagctgaaaaaaaaataaacatatctgggtcctgagagagaaccctggaggatatgtgcacgtgtgcacaccccgcccccccgctccacacacacacggaaggagattcctgctcttttcaacgtcatatctattgttgcctcccaagatcctgtgggtccatctcatgcattatgattcttcccatccctagagtgagcacattttctgagctaaaaatcagtgtttattggttggccatgagtcagaaattcagaatggtctggaaaagttggggaaaataggtttctcaatagtgaggcatccagcagccttccttatggccatagttgttcagtgctattgaaaaacttactcactctctaagtgcttccagagcctggagttacagagaagaaagctgtcctcctgaaactttgctcctttatgaagacactatggatgggcgctctattctggcttattcaagttccaagcaaatgtttgaccttgcttggctattgtcacagctgatgcccacccctcctccattcaatccctccccaacacagacatcacttcttatttcttcctttttaatgttttttttaaaatatttatttatttttggctgtgctgggtctccgttgctgtgagcagactttctctagttgcagcgagtgccgtctactctctagctgaggtgcatgggttttcattgtggtggcttcttttgtggcagagcacagactctagatcgcaggcttcagcagtcgtggcgcacaggtttagtagcctcgaggcatgtggaagtttcccagaccagggatcaaacccatgtcctctacattggcag

SEQ ID NO: 44983 - DNA, 933 bp, Bovine  19866880745408
  misc_feature (1)..(1): n is a, c, g, or t
ncttgggcttcccttgtggctcagctggtaaagaatttgcctgcaaaggagacctaggttcaatccctgggttgggaagataccctggagaagggaaaggctacccactctagtatcctggcctggagaattcccatggactgtatgtatagtctctggggtcatatgaagtccaaagaggcaactgtgttgaaaattagcaattttaatcaatggtgaaagcacctcttttttttgttgttttaacaaagagggttactgcagaatgaatcttcacaaacagtgctttatttggtcacaggatccatgatccactatgaggatgggagaactttattggatgctaatctaacatctaaaattatatttgtctgctcttctttcttgccatttatggtgaaaaatctgaagccagagcaccgtaaatgttttgcttctcatttctagtcccatcccaatttcattttcttgcaatgagaggaagggttggaagataattagcaatgtccttctcccacatttaacatctctacttactgtgctctatgttaccgcttactctgaaaaattcagtatgtagcttgaatgttgttttaggcttttctaagttttgtgtgtttctggggcattactaatggtttaccttaaaatgcagaaaaactattatgaaggagactttaggataaaagcataatcccctctaggaaacaaaccacttcactaaaatgccgttgttaagggatggggtggaagaagcagaaggaaggttagacagtgacttagaaataaatatcaacatttgatgtcaaggcattaatccctttatacctggtgatctgtagggtgaatggaaccatgttaatcactgggagctttatattaatgttctcttggtactatctaatttgcatcagttcagtgcgtacgtgcgtg

SEQ ID NO: 44984 - DNA, 1670 bp, Bovine  19866880783526
  misc_feature (1)..(1): n is a, c, g, or t
naattactttctactttctgtcaccctggatttttatattctgtgtatttaatataagtggagctgtataatatatgatcttctggcttctttcaactgaaaaataatggcaccaaagttcacattttagcatgctacacactttcattccattttatttttgaataatattttgtgatgtgcatataccatattttcttcctttatttatcattcagtgggaatttgtttggtcatggctgttaggactaacactaatgtgaacaattgttttcaccttgtgtgtctgctgcggtccgtggggtcgcaaacagtgagacacgaccgagcgactgtcgtgaactgaactgaacagtctgttatctactcattgagtcgtctggtggtgaaaagtggccgtgaaagtagttcagtcgtgtccaactctttatgacctcatggactacggtccatggaactctccgggccagcatactggagtgcgcagccttttccttctccagggaatcttcccaacccatggattgaatcggagtctcctggattgcaggcagattctttaccagctgagctgagggaagagctatgagggaagcccgagtcatctggtaactgcacgttttatgggcaaatcacatcttgctcaacttcatgctatgagtgttaagtagacatattttcatttttatattataaatactcaggaatataattgcgggaacatatagcacatattcagctcaataagaaattgctaagaatatataattggacttagaaaacccaggaattagttcttcagccttaaggaaatgttgcaaagcttcctgtgtagctgaggacggtatttttccaaacagagtagcggccatgcttttgctcaacccagttcagttttgagagtgtaacagtatctccccttgttttatctagatgtttctttaagtgttgttggtatttgattttgttttgtaagccctcacattcagatacacagccacacaaaaccacatgccatagacgacaatgtccatctttgagtgttctcttaatagctttttcaccacgtctttacaatatttgcataacgcttcttttcttgtgtgtttgtagatagctcatacatatctccagaagcaggagcaaattcccaaataaacgccattgcatctctaaacttttcttctgggtcacaaaagtagttcaaactctcaaacttgctgaactcattcacatgtaaattatcagccatctgaagaagggcatctaaatttaattcctctgcatgggtgttggatgtcttagggactggaaaagaacttgctcttcaacaaatcagatgtggtctaccgcaaatttaaactaatcaaagtttccttttttttcaattatcttttttttttttttctttttttatgtgagggtaatgtgctcagatttgaaggtaaaatcatgtttctgcaggatgtattccactagtagaatgacaaaactaatcatgttattggagaaatctatttcccatatgtcactacaaaaagatctttaaatatgtatgtttatattcttcccattaataatgtaatcttcagatatttctttaaataaaatatttagatcaattcaatgaaagaactactagtgagtgcaaaaaaaaagaaaaatcgcca

SEQ ID NO: 44985 - DNA, 2533 bp, Bovine  19866880851972
  misc_feature (1)..(1): n is a, c, g, or t
ntttatttctatacatcttaggtccccgtctaaattaagttccttgaagataaggatggttttttatttaccttctggccagtgagcacataatttatgctcagtaaattcggatatgtgaaaaaatcctctcacaaaacagagagcagtgcatcaatctagggtacacgggtgtaggtggctgatcaccatctgagaaagcacatataaagggaagcactgtgactacttctagggaaaagggaaaggcagtaaagaaaaaggacatatacattgataagatcaaacagcgtatgtggcccttcctactggctcagcagtttagaatcgccagcaatgcaggtgattcaggagatgtgggttcaattcctgagtcaggaagatctcctggaggagggcatggcaacccactccagtattcttgccttgagaatcccatggacaaaggagcctgatgggctacagggcatggtgtcgcaaagagtcagacacaactaaagcaaccgagcatactgtatgtaatgcaacatatatttatataacatgttaaatttataaactcataaaatatgtactgatttcacaattttctccatagcaggcactacataaaacaagagtaagccactgaaaatctatcatataatcatagtatattcaaataagatttacagatagaagcattcaacttacagcgtaacagtatcttcctttgaggtaatacaaaaagggttcttcaggtaaaaattcgattgctttatctagatgttcctgaaagaaaatttaaaaaaaaaatttcatctcccaagtttcaggcagtgctgaatggaactctgcctaacaatttcaaagggactttatgatgttgcttcttcctttatcattaatagaactaagcttatcaataatccaatcatcaaaatgctcacaactagaagtgtgattatgatttaataaggctacagaggatgtcactttaaaaagagaaaacatccaagtcgcatttttgtctgcccatgacttgcctacctaatacttactgattgtcaaatgatgtgggtataatggagaaaaagaagagcagaactaggtgatagaggaatctacccacttaacattgtcaaatggttatagggagctggaaaacaaagaactctttgcccatccttacaattattgaccctgaggggttatttactgagtgactataactatttactgttgctgttcagttgctaagtcatatctatgctttgtgacccatggactatagcgtgccaggctcctctgtcctacaccgtctcctggagtttgctcaaattcatgtccattgagttagtgatgctatctaaccatcttatcctgggctgccctcttctccttttcccttcaatcttgccaggcatcagaggcttttccagtggagtcagttcttcgcatcgggtagccaaagtactggagcttcagctccagcatcagcccttccagtgaatagtcaggtttgatctcatttaggattggccggctggatctccttgcagttcaagagactctcaagagtcttttctaacaccgcaattcaaaagtatcagttcttcagcactcagccttctttatggtccaattctcacaaccacacatgactactggaaaaaccatagctttgcctatacagacctttgctggcagtgtggtgtctgctttttaatacgctgtctgggtttgtcttagcttttcttccaagaagcaagcatcttttcatttcatggctgcagtcaccatctgcagtgagcccatttagagccaatctagagcccatctgcatttagagcccaagaaaataaaatctgtcactgtttccattttttccccatctatttgccatgaagtaatgagatcggatgccatgatcttagttttttgaatggtgagtttcaagccagctttttcactctcctctttcacccttatcaagaggctctttagattctcttcactttcattagagcagtatcatcatatctgagcttgtagatatttctcccagaaatcttgattccagcttgtgattcatccagtccagtattacacatgatgactttacaaagaagttaaataagcagggtgacaatatacagtcttgatgtactcctttcccaattttgaaccagtcagttgttccatgtccagttctaactgttgcttcttgacccacaaacaggtttctcaggagacaggtaaggtggtctggcactcccatctctttgaaaactttccagttgctgaaccacacagtcaaaggttttagcacagtcaatgaagcagaagtagatatttttctggatctcccttgctttctccaaaacgtaacaaatgttggcaattcggtctctggttcctctgcctctttgaaacccagcttgtacatctgggagttctcggttcacgtactgctgaagcctaaattcaaggagtctaaacataactttgctagcatgtgaaatgagtgcaattgtatggtagcttgaacatt

SEQ ID NO: 44986 - DNA, 1579 bp, Bovine  19866880869476
  misc_feature (1)..(1): n is a, c, g, or t
ntgcagtcttgattgtgggagcatccctccagaggggtatgaaggggagtagggggcaacttgcttctcatttgcttctgcaggtgccccataggcctcactagctatagatttggggcttctggcccctgaaggttgtctgtatttgaaccactaattttccaggagtgcaggtcaggggtctccatttccctgaacacttccactcactcagagcctagactgaattggatgatctccttgggccgctgggcagaatgttttctagtccaaactttcactggaatccattaaaagtccggacttcatacagacatctcaactccttatatgagaatctttgtcccttcatggttattaaaatccaacctatggcagtgcctgaccaattaccatgccctcctcatcgtggctgtggcacatatacacaagcctgccctcctgggttttcattttctctttatttttttggcatccaggtatctctgtattgaaaattaaagcagacataagaaagaacactcataaacttccactccacatctacatatctattagcaactaccctctactttttctccagttaccatggaagaaccatttgtgccaaaaggccagtccctccacttgggctccagctcccatgcctctcacttatgcaagaacatcatttcaggaattctcctctctctcccctgccctcactttctctttttcctggactattcgtatcaacatacatatggtgttatttcttctatcttaaaaaaaccagcaaaaacctcagtcctcttcctgtccaactgctgccccactgctctgccctctttagagaaaacttctgacagtttcttcctccaatttctcttctccatatcattccaaccaaggctttgtcctcaatatttcaccaaaaccactgtcttcaaggtcaccaatgacatccacattgctcattcaatactcggtcagcatcttacttgacctagtagcagaatttgatgtggtaaatcattcccttcccctggaaatcttttatctcttagtgttccggactcctcattttatttgtttttcttttttctcatcagcatttctcagcctcctttgctgattcttcattttccttccaaagagtaactttggaataccccagagttcagtatttgaacgtctcttttctagccacattcagtctatggatgacctcattccaatctcaagactttaatgccatttgtatgctggcaactgtgactatgcacctctagcttatctttctcctaaattctaaattcttatgtcaaactcaccagtcaacatctccaaaagtgtgtccaggggacatatctatcatatctactccaaaactgacctcttgatctttcctatcagtcctgctctatcctccacaaaggctaggactagagagaatacaggaaaatgaggccaaaaatataatacccagatcaggctactaaatgtggagtcaagctaatgcaagcaacttgcatgcatgctaagtcacttcagtcatgtccaactctttggactatagcctgccaggctcctctgtcca

SEQ ID NO: 44987 - DNA, 822 bp, Bovine  19866880953736
  misc_feature (1)..(1): n is a, c, g, or t
nctgaaaggccaaacaatggataaaatacagtgatttgaatttcacttcctctaccttattcagccaaactctgggaatcaggaatacgcagtaggaggtagtaagaagcgaaacacaatctgaaccaccacaaaaacaaatggctttggggtgaattctaaagtagaccacaggaaacggaaatcattaaagtatttgtgtttagctgtgtgtaagtgtgtgtgtgtgtgcgtgtgtgtgtgtgtgaacctctatctgaatcccactttttcaaataccatccagtctctttctgcaggtgctgccctgctcataattcctccacgtcttgaatgggccccatgttcttctctgaacattatttttgtttgaaattcaattctttttcttcaacttagttaaatagcaaacacttttgaatttctttcccttctctactccagtttcaaattttttttttttgccagcttttgagaagtcagtcataataaaaattctgaactccattttccttacccctccaatttctctttctcaaagttcaaattttggtctactgctctaactcattctgtgtatacagaggctttttttttttttccccttcttttttcgtcatgcatcatgtggaatcttagttccctgaccagggatcaaacccacaccccctgcattggaagctcagaatcttaaccactgggatgccagggaatctgaggcttttttgtttgtttttgctgtgatggatcttcattgctttgcatctcgggtttttgttggtgttttgttgtggtgagcgggagctactcttcattgcagtg

SEQ ID NO: 44988 - DNA, 2234 bp, Bovine  19866880984581
  misc_feature (1)..(1): n is a, c, g, or t
naacagtcagaaaatgaagatcatggcatctggtcccatcacttcatgggaaatagatggggaaacagtggaaacagtggcagacttttttgggggggctccaaaatcactgcacatggtgattgcagccatgaaattaagacgcttactccttggagggaaagttatgatcaacctagacagcatagtaaaaagcagagacattactttgccaacaaagatctgtctagtcaaggctatggtttttcctgtggtcatgtatggatgtgagagttggactataaagaaagctgagcgctgaagaatcaatgcttttgaactgtggtgctggagaagactcttgagagtcctttggactgcaaggagatccacccagtccatcctaaaggagatcagtcctgggtgttcattggaaggactgatgttgaagctgaaactccaataccttggtcacctgatatgaagagctgattcatttgaaaagactctgatgctgggaaagattgaaggcaggagaaggggaagacagaggatgagatggttggatggcatcaccaactccaaggacatgaggtcaggtaaactccaggagttggtgatggacagggaggcctggtgtgctgcagtccatggggttgcaaagagtaagacacgactgagcaactgaactgaactgattgtgtgaacaggttcaggcaaggtgatgagggtctccccatgccatgtaaaaactttgggcaatgggatgccatcaatgtgtttgcaatagggcaataaagcattgttaaattgtttccaaaagataaaaatacagcagagaaaccaattaagagggcatgaaaatagtctgggtaaggaatattaaagacctgaactagggtaggagtgatagaacagcaaagatagagttgagagagaattcagaaataaaagagaaaagatacatgtagagtgatggtcggccaaggttaccagattctttgttgaaagtcatggatcctgtgcattccatctgatgtaatgagaaaattattttattaaataatgtaagaacgcctatatagtcttaggggagagccagagaatcagatttgcaggtgttgaagctcagagaagaccttgagttgtgtcaaactattctagtgagcccctgccactgccatgactgggcttaagaacttccatgcgccactccgttatgcacgcttagttgctcggttgtttctgactcttaggaccttttgaactgtggccctccagactcctctgtccatgggatttttcaggtaagaatactggactgggtcacaatggcctcctccaggggctcttcccgacccaggggtcaaacccatgttgtctggatctcctgcactgcaggcagattctttacctgctgagccatcggggaagcccaggaacttaggtaccttgtactcatttcctcttgccgctataataattaccacgcatttatagtctaagacaacacacatttattctcttatagttctgaaagtcagaagtccaaaatggatctgacggggctgaactcaaggtgtcagcagggctgcattccattctgcaggttctagggagagttgttctgcctttttcagtttctagggaccacctcactccttgacccacgccttcttccaacatctcaaagtcagtggggtgacatcgtcaaaactctctgcctttcctttttttttggccgtgccctgtagcatgtgggatcttatttcccagaccagggatcgaacctgcatcccctgcgttggaagcatggagtcttaaccactggaccaccagggcagtcccaaatctctttgcttttcttgtcacatcttctctccttcagcttctgtcatcccatcactttctctgacactgatcctcctgcctccctcttacaggggcactatggatatgtaggtccacccccacagtccaggagaatctcccatctcaggcttctgagtgcaatcacatctgccctgtgaaatcacatactcatattcaggttctgaagatttgaacgtggccatcttcagaaggccgttattctgccttccacagaattttccctcaaattctggagtcaggcctctattcgaaggacctcagcacccctgtctgtaaaatgctggatggatgtcaccacacccgcccttatcagaatggcctcagcacaggccttctttctgcccagagctttcaaatcatag

SEQ ID NO: 44989 - DNA, 1415 bp, Bovine  19866881051007
  misc_feature (1)..(1): n is a, c, g, or t
ntctgccttctaacctggtgtttgcctgtcttatgtttgagcattgcttcattcccttggttgctatgccctacttgtttgtttgaatttctgtcgtcaccctagcccctacttgtcccagcagttccacccctgctcacaactagtcccgatgccatgccttactgaagagccatgacatttgatagggtaaatagtattgttacttctgttgctttactcttaaggaaactaggctcagaaggattaagtgacttggccaattaggtatctaatacacagtagagtcaggccttgatctaggttccttgtctccaaattgttggctctttgctcatatctgtgcttttggctctaaaaatcttaaggatggttttaaaaattagatgtgattaaaaggtaaaaatatacagaaataaatgttttactgttattgtcatcaacaaatgggcttcctccagtgtgcagcaatgcatttttttctgagtccttgaaacagaaaagctgcggcttcttgcattagacgaagcttgcacgtggatggcaaactacagcaatgtctaccgatgccgggtgtggaacattcgtgcttcaaaagttcatttgtggttgtttagaatggaggcttcattttcacaaacgagtaatgttataaatggtggctagattcttgagttatctcacaaggctgtttaattaacaatgtcttagagtacatttctagtttatcaggtggctgaagtaatgcatatattatgccagccactgcaacataatcatcaagttcttgatcaattaaggagtgtttactttgagccctgagaactgtctcctgacagcagtactgaatctgtcactataggttctagagtatgtaggagttgttggaaaatttcccatattttaatagctgagaaagctggtttgtcagatgagaagtgagagggtattctcgtgagaggtcaggtggcttgaaaaaatgtgcagatgtggagtccaaaaagggcgggaaaagagaaatcccaggaacaaaaaatgatgtgagtagagggggtggaagaaatcagttatctgaggatgagaagtaaaatctgacaaggaaatgggaactaatacagggatttagagaatgtggatttagaaggttagggatttataatgtgagaaacagaagatgacttgggcagaagatttcgaatggcttttgatggaaccacttcgattttagagaaatgtaatagagaaaagctatgggcttccctggtggctcagatggtaaagaatccacctgcaatgcaggaggccagggttcaatctctgggtggggaagatcccctgactgagtgactaacacacactaaagaaaaagtcgtactgatgaaagcttgtggaaagtgaaagtcactttgtgaccc

SEQ ID NO: 44990 - DNA, 541 bp, Bovine  19866881185648
  misc_feature (1)..(1): n is a, c, g, or t
nttaaagggtgaactttatttcttttgaggtaaagcgatgaacccaggcaaagcactcactctatcagatatgatttgaaacagctgaaaaataaacctctgacaataagattttaggacagaaacgctgccagagctctaagtgccttcaagaataataaaaagaaagtaaacaatgccagaggccagacgaacaaaaggaaaattcttacttcgtttgttctcatcaaataccggagaaaaataatctgtgcttaggcagttctcctggagtccaaattcctgccctgtgatcatcattctgtttaagctctgtgctttcaggctgtcataaaatgccttacgctgctggaaggggccaagatggttttcgatctaaagccactgagagcctcaaggcagattctaaaggccttcaccacctgagccgggccatctgggctcttccttccacccgctgtgacattgtcttggcgtctgacccctgagggagagccgagtccattagtggaatcctcttgccttcagcagcttcaattag

SEQ ID NO: 44991 - DNA, 1300 bp, Bovine  19866881418927
  misc_feature (1)..(1): n is a, c, g, or t
ntccattcacgtcgttgtgcaaccaatctccagaaatctttgcatcttgcaaaactgaaactatacatgacatcccccatgacttattattttacagctggaaatttgtaccttttgacccccttcgttcatatgacttggactgttgactcatgcagacagcttcacaggcaaatgctcttgttcactgcaagtcaaaaccccacctgcagagcccaccaggagctcttcttctaagcctcttctagacatgccgactcacaagactgccatgtcacatggggtaccatctgactcagaaggtagcatgggccaggatgcacagtgagctagctggacacgtctggcattcctctcctgcaggacctagcagctgaccacaaaaccatccgtctatttccgccagttattctcctgggccccaggtgagactcagatgtaaagcagtgagactcacatcaggaggatatggaagccaccctgaattggaagacttgtgctccatagcactcaatatcttttggaagagccccatgggcatagcttctatggtccccagagtgtcatgccagtgataaaagtcactgcccttaggggaaaccagaaaaagagcttccaacctggtacttacattgtcccagtccagatacagtttaccaatcagggccatttttttactttcttttatcaggtctccagggaaacagtgctaggaagtttaccaaaaattgaatgttcaggctaaaggggaaacaattttaacatgcttttagtcatagtccttcaaatggttaaatgataatttctggcaaaacatctggttaaattgaaaggagtcagaatgacacactgatatgaagaactaaattacacaatgaaatctgccatctcttatcggctacagttctgttccccaactcacaggttggtaatgaaagagctataattagaagctcagatgcctgacaacacgcccatcaaacctcacagtctttcctaagagaaggaagaggtagcacgtgggaagggaagaaaagggatgttgatctaggaaggaggtaacagagaaaggggaaggcaccaggcatgttttcctggcagtggctgctccccagcagcaaagagtagctctttgagatgctggatgagattccacaggggtaggaaggggaattaggacagtaatttgtgaattctctgctcttgctaaagaagagtctcttgtcttcaaaagaggaaagtaattaaccggactgtcattctgcaggggctttgaattgcaaatagacaaactgtggac

SEQ ID NO: 44992 - DNA, 1059 bp, Bovine  19866881595339
  misc_feature (1)..(1): n is a, c, g, or t
naagaaaagaaagtgcagttgctagtctggctgagtctttgtaaccccatggattgtagcccaccaggctcctctttccatgagattctccaggcaagaataatacagtgggtagccatgccctcatccaagggatattcccatccctgggatagaacccgcatcttctgtgtctcctgcattgcaggcagattcttcactgctgagccacctcgaaagcccccatcaagttagtatcagacagcaaatctcagacccaggaagcttagagaacaccaagcattataaacactgggaaaaactacatatggaacctcaccatcaaactacaggaaatcaaaaatgaagaaaagaccctgaaggagccagaggggagaacacctcacccatggaggattaaagataagaattacatccgacttctccacagaaacaattcaatcaaggaaagagtggaatgaaatatttaaagtgtagggagaaaaaatccccaccagactaaaattcaacctgtgaaattattcttcaaaagtgaaggagaaagaatgattttctcagtcaaacaaaaattgagggcatttgggctggtagacctgccttgtaagaaatattaaagccattcttcagagataaggaaaataatataggtcagaaactcaaatctacatgaagaaagaagaatgttgaaaagaggataagtgaaggtaaaagaaaacttatttttccaattcttctttgatctaagagataacagttgcccaaaataataatggcaaaatgtatttgatttatgtttgcttacatatatatatttgtaactgctaagtcacttcagttgtgtctgactctctgcaacactatggatcgtaacccaccagtcttctctgttcatgggctttttcaggcaagaatcctggagtggggtgccatttcctcctccaggggatcttgctgactcagggactgaactcacatcttttttctctcctgcattggcaggcagggttctttaccactagcaccacctgggaaagcctatatatgtatgtttatgcttat

SEQ ID NO: 44993 - DNA, 1060 bp, Bovine  19866881763273
  misc_feature (1)..(1): n is a, c, g, or t
ntactttggtctttaaaggagggaaatttcaaatgaacttgggaactattattttcaactctgacacactagtgaaatattcagttctactagaaagcatacttgaacttcaagtcctgccctcaaatgcaacttgctcaggggtggatataattatattttccatcctctttggaagatagacaacaaatactgagtaaaaataaatatatttatttatattttgtacatatgtgtatatatacatatatgtatacatatacatgtatatattaaatatgtatatttaatatatgtgtgtatgtacacaccccacactcttcattgggaccacctagggtaccttttcttacccatgatctccagctcagccttggtagcagagccttctagtaatgttgacaaagctaggcatccagacacaaccagcttatccacaagacctgccgtgtagagttaatttcaacctgccatctggtcgccagctgaccactgctacacgcatttccagcatctcaacttgctattgtcagtgccccaaattaaagcagtcaatacagctgcgccgtggctgctcttagtagagggtgttttctgactcactctgtgaaatcactgatgaggagggaatccccaccgtcatttcagctgccaagacatttcacaccaacaagctgtgaaaggaaggctgctaatgacacgaaagccctttttatggccagggctgggccaaggccaccagaaaggccatgctttccccatactgctggaccgctcagaggagttcttaacaaccaagactgatccgtctgttcatggaaggtaggagaaggacaggccaatccccaagccatgcccaaggaccctgagaaaactggcaggattccttatccatatccaatccttccttcacacctcaacgttttagaagggaacttaggtttagaggtaaaataaaagaggtaatacttttggcagatcacctaggaaaactaaaagtattcccacggtacctgtttgagttgcggaaagtctcataaatatgctaccccatcaatgt

SEQ ID NO: 44994 - DNA, 1002 bp, Bovine  19866882019676
  misc_feature (1)..(1): n is a, c, g, or t
ntgcttgggcttcctgttgaagtgtgctggcttctcttgttgcggcacgcaggctcctcgagctcacggcctcagtagttgtggcaggtgggcttaactgctcccgtgagatgtgggatcttagtcccccaaccagggattgaacccgtgtcccctgcatggggagaacaaagtcttaacccactggaacaccccaaagtcctgtgttctctatcttgacagatgagaaaactgaaggcgctttgcaagtctcatagttaactcagtgagagggcaggaactagggttgagtcgtctggcttcagccccagtgccttgcacagctgaagagatgctgttcctgctgtgcccttgcacagctaggcagccgttaaggacagcccagggcccctgtttcctctgtcttcaaattgcccctagatcccagaataggaggcagaactcagtaaagcctgctcatatctgtctttggggaattcaggccctaggcttaaggaagggaagaacctccagaaacgctgctgctgaaatctggttgttccctgcctccactgctcatttgctttttattacttacaaaagattgattgctggtaagaataaataagaatccaggttattcggaatatttcttaaggagatggtggtggtttagctgctaagttgtgtccgactctttgtgaccccatggactgtagccttccaggcttctctgttcatgggatttcctgggtaagaatactggagtgggttgccatttcctgctccgtcttaaggatatagcaccttttaatttttttatagcacctttttaatcccaaagaagttaatatattgtccagctgtgccagaggcacatggttgcaggaggtggaagccaactggcatctgatgtggaacaaatggaaaattttggccgcggaaaccagagggaattcttcaccttaattaagaaagaactctgcaatattaaagtctaggtagaggaggcccagacccggt

SEQ ID NO: 44995 - DNA, 1616 bp, Bovine  19866880394998
  misc_feature (1)..(1): n is a, c, g, or t
nacagcttctggtggctcgtaggcagtttgtcccagtttggcatacccacagctctggaaaaaataataaggaagccaggtaatgtgggaagttgaaagaaaggaagccaggccagtaaaagaaaaaaaaacctggcagaaggtaagagtaaactcacctctgttaggtcaacgtgtcagtagaaagaagagaggtggcaggggtgggaattggagcctcctgtccctttaaaaatggcggcctggcacggaccaacaataccattggttgcgcgagcagaggggcgggctcgggggcggggcgagcggagctgcggagtcccacctcctacggcaagtcagaggtggcaagatggccgcggctgagggggacggtggtgtccgggccgaagctgaccgggaattggaagagcttctggaaagtaagagcccgtcatgggaaagccccaaagagggcggatgtaagggtccattcaggggggtaggtaaacctgcgatgtttggggcggagcaagtaaggctcgccaaaggctggccgggggcggagagtctgactgcgaccctcgagaaaatctctgggtcaccctctccttcctctacagcggtagttgaggagttctctctgggtccctgaacggcccacactgttgatcactctgccggaggggaaactaacccagaggacgtttcacgctccctctccaaactccccttactttagtaagttctgaagtcctgactctccccaccagcagcagcatttggtcctcggggggcagcgaaccgaacaaccacggattgcttccattaactattagcaaacctgtagtgcgttcttctgtgcacgctcctgccctccttaatagaaaagacactcctttctttctcccagtcctttcatccaccaggcccctttccagttctttcatcatgtcagagctcaaacccttcccattattttgaaaaacagggtgagacagcctcagggtaagacagttctcttttgaaaggaggtggctgtacttttccttctcagccctgccatccactcctctctggtttggtttcttgtccagagtggggctggtgtcttactcctaggcctggcaaatatagtggtggtgagaacagaggtttttcagggtagaggtgaatactttttgtctcttgctcagtcacagagtgggcaggtggaaagataaacagaaatggtgagaagtgctaagtgactgtgtgagtctgcagagatgaggccacagggagctctagcaactctggggagggagagctaaattgaaagagaaaagagagttcagggccctccggtggagtataatatggagtccctcagtttgtaccaggacccatgggaagctgggtgaaatatcttaaggcttctgctctcttgccaaagattattccttgtagggctccagagtgagttctagggaggttaaggacatctgtgttctctgttccccttgaatatctgtatgggatttctaggaaccattaaagtatggcaaagaggcatcatgtagatgaactgtcgtcttacagctttgagagatgttttttccaccttaagagatttcttcctctatgattacaataca

SEQ ID NO: 44996 - DNA, 1405 bp, Bovine  19866880412463
  misc_feature (1)..(1): n is a, c, g, or t
nacatcttgttggagaaatgaatgaaattggaaatgcaagaaggagttgatcagacaacaacagagtcttagactagtttatagaaaactattaatagagctgaaggatttccctgtctaccttaaatatcctcagtaaagtagctttactctcttggagacacaactcctccctaactctccccctccaaataaataaacaaaggagaaaaaaagatgaacttgtacacttgagttactgtctttacagtctctaaatagacaaagtagcccataggagttgatacaatgaggaataaggaggaaaagcataaacagaagttcacaaaccttttctgtgatttccttcagtgacgggtacagcacatccctggacagtaggttctgcatgatactctgcatgatggggaggatggtcccttccccatccccttcgtccatgcccagcccttccatggccttggtcagttcctcttctgacatgccagagttctggaaaggacagaagagaaatgagcaagtataccaccttcttgggacacttaccaacttttcaggtgggaaagaactatttaaacatgcctgtagcaaaatagtgaggcaagaacagacttgagatgatagccaagagagtctgtcttttgagactctgccggtgaagtctctgtgagtgggacccttgtggttccctatctcttccccctcacctgaaggtcagtggcattcttggctagtccacttaacgtctcctttaggcaagaggtgaattcttgttgggaagtcgcatcactgcctaggagagatgaaaagagcctaagtcatttaggattttaactgtttgcttgcttagactgacctggttaccagcttggacatggagcatttattagtgaattactacactccaaatctttgaatactctacgtttatcttcatagttatttccacaaatctacgtggactgtgtctcagtttgttctctacaatgacacccacattaacactgatctttaaaattatcccttttcaataatcttttctgttactttccaacctatctcacccctttcattaaacagggtctcctttttccttccatctcctcccctataccatggcagtggtatcataattcctgtcaacttttacaaaaaattttggtgttgtcaagggacaataacccaagaggtttgttcagatatttcccactgtttcccctccttacctactctcccagcagcctctgaaagcttttggaactgctctaccaggtggggctcttcctcagccaactctttcattgctttctcaaactctgcagtggcttgggaagccagctcgctgtcaaacagttcctggaaaaacttctcctgggaggcaaagagggcatcctgcaggcgacaa

SEQ ID NO: 44997 - DNA, 1233 bp, Bovine  19866880625780
  misc_feature (1)..(1): n is a, c, g, or t
ncagagagaagggagagtccaagggcacactgttaagatgaaactgcagaaagattagagagatgggagatctggaatccaactgttttagcacgcagtgaagggtggttggaaggggcagctcttgggaatcagagctttctgagtttaccacatcaccccttctcttccataggctgagtcaatgcttttctcccttcatccaagattattatagacgttgccaccattttcatggagacagtgcatttgcgtggtccctcttcatcccctccccccatcagaaccttgaaagggcagagagaaagggattatgggaaaaaccctcccgtgggtgtcaggcagctgggagctggatttgaggtggtggggagaagggaagggggttggctatggaatgcaggagagaagtgagaactgaaatggtggcctggagaaggaggctggagaagcatgggcttgagagggcttaattagcacttcaggtccctgaaaaggtgtagtattcaaggagtggatgtggccaatggcagaagacctagggaaagggttggggctgcagcttgaaggacttaggctagatttcaggaagcatgtccatagaaggaaagagatctggagtttggaaaagagagggagaccaccctgtggactctagcaaaaacaaaaaagctcccaaacaacaaacaaaagcccatcattaaggcttgtgaggggagttgtgaaactcagagaaatgcagggattactgtatcaggccaagaggcctcttctggaaggaaggtgcgacccacagcatgtcccagggtgcatttctgttgcctgaaaggcagaggcatagcagttaggagcacagccttggagtcagacttcctgggtttacaatctgtcttctgccgctttgtagctgcacattccctcatccttacaatggggctaaaagttatagttgtggattaacagagtcagtatttgtaaagggcttggaatggtgctcaacaatcggaaactaaaacagtgcagttgttggctatcgtggtgtccccacgtctgtgactctttctactccatcatcttgcctggctcctgggcctgccgccacagccctggggctttttctgaggtctgtcctaggtctctatctctccacccttctagactttggaagggtgggagaattatcaagttgttgaagatgagcttcctgtcttcattccaacagtctggccacag

SEQ ID NO: 44998 - DNA, 999 bp, Bovine  19866880629141
  misc_feature (1)..(1): n is a, c, g, or t
nctctgtttgtgcccttgctggtgggcacgggggttgctctagtcatcggagccaccatcctcggctccatcacctgctgtttcatgaagaggctgcggaaacggtgattcctcgcatcccaggtgaggggtgagaacccccagccctgccttccccagtcctccctggccctacccagccgctctcagctctgcaggaccctggcaagggccaggagggagtcacgctctccctagccccctcgccgcgtgctctcctgttcttgcaggtgtgactgtcttccagcccagccgcaagcctgcctctggtgtctgaataccctctccctctgcctgcccttcctttaatttatttgaccgacccacccagagctggggacgtggccccccaccccccacgccttccttcccaagctcgtccctctggccttctcttcatgatctcatacccaacccaaagggaggcagttccctgtcctagaattagtttttctaaaatgtgaataaacttgttttataaaatccgggctggctgtgtcttccctgccgtgggggctggggcgggtggcagggagactgctggggcctgacagcctcttctggacaacccaggctgctcttccccctacaaacaccatctggcctccgtgggccatgccacccaccccaggaggggacacctgggtcccatctgctgtccgagctgtcagtgcagagccgattcctgttgggattcttgcttggggtggggagggaggaaggtgggtgagttccagctgagcacaaccttgcctcagacttctcccaggttgccgggtaggggcttccagggcccagtgcccccctttctgagttcccgagctactctacaatctcagtctcttgatcaggctaatcttggacctgactcctcccctccaggccctggggcctcagcctttccctcctgatcttcattgtttggtctgacagcagaatggaagccccagaacacagccg

SEQ ID NO: 44999 - DNA, 1594 bp, Bovine  19866880818694
  misc_feature (1)..(1): n is a, c, g, or t
ntgagtggtagtggacataagaggtgaccccagggccccctgtacccgccttccactgggaaggctgctggatctcctaggcttggacccaagggattggggtggagaggtggagggatgcagcccgttgaactcgagtactgaagaggcagcagcctgggtcaaaacggactaaccaaacggtgaagggagtgggtgagagaggtctgcgtcagccccttgctgtggcctgtgtcctgtgcagctgtacgagtacacctgggttcagggcccattgaacgccaatgagacggaccggctcccccggtgtgtgcgttccacggcacgcctggccagggccttgtcccctgcctttgaactgaagcagtggggctctaccgaatactcgacgtggaccgagagccgctggaaagacatccgcgcccggatatttctgatagccagcaaagagctggaggtgagatggggagggtgggtggcagaggtctctttgacctctctctattgcctcttgtctcttacccctgctagctcccatttgcccccaaaacctgctgcacgtctgtccctggtcagccagcatgcaccgttaggaagcttgtccccacggacagtttgcgtatgtgttcgtcctggccgtgtgcacccatggagacccaaggggacagtatgagcccttccccagctccactgctgcccggcatacccacctaccggagctagaacgttgctctaatgcctactgagcaccggtcacaatcacgttattggccaccagagaatcaaggtcatggccctgccttcaggatgcttaaaatctaagtaaaaaatgaaaagcaaggacagaggtattttactcctctttccaaatggggaggctgagtccccagactggggagatgttgcctgtcatggttcagtacttggtgattagagccagctccaggattctagtgccctgcctccccgccccgagcagttaccacagctgcctggagttctgagaacacctttctcctcccctgcccacgccctcctgcagtttatcaccctgatagtgggcttcggcatccttgtcttctctctcatcgtcacctactgcatcaatgccaaagccgatgtccttttcatcactccccgggaaccaggatctgtgtcttactgaagaggaccccagcttttccctccagctctgcagttcgcttcctagatcatctgtcccactgggacataaaccactagtttgtcatggaacctctctgggcctggctcagacttgacgttgacataaagcggaactgcccaaaagagaccgtgagagataatcgagtcacccaccgcccgcatctcccttttcctgtctgctcttccctgttccttcttccttgcccctgcctgatcctgggatgatgaatagaagcctcctgctcctgtctgactcctgccccatggtggttcagagctgcctgccctaacttccccttcttcagcgtctgttttctctctccttcctgcttgtacctccccatgctccctgctcccccctctcccttcctgaccaggaaggacatgaagggttgaatgccaggaacaa

SEQ ID NO: 45000 - DNA, 1305 bp, Bovine  19866880827062
  misc_feature (1)..(1): n is a, c, g, or t
ngtaccttggggagtctttttcccgggaaaaggagacgggaaggggctatcatagtcagctgggactcagaatgggaccatggtttaacctggcttgccaggggcctctgtccctgccgcctctggtgtgagagactgagggggttcatctgtgatcctgccctggctctcgccccagccccaccccttccccagctctccatttcttgcttatgaaatatgcatggagaacagatgtcccttgctcccccactccccgcccccctcagggccagcccccgcccccagctcccaagggggttcccagatctctctgccaatggctgcctggcctgactgtttaatattgatgagaaaggggggctgggccagccaatggagagctgggggtgtgtgtgtgtatctccatatatatacatagggctgggccagctcaggtgtgtgtctgtgagtgtgtgtgtgcatgtgagtgtgggtggccccagtacctggctaagcttaccacctgggccctctatccccaacatgtgtacccctctcatctgccccggagcctgtacagccatgccacgctgccctggagaggtctagaaagctggtcagtaactttgcagacggatgagctctgagcagccagaggagactggggctgtcagcgctggccccctgtcctgccagtttggatcccctcacagggtcctcctaggtaaagggggaaccatgggctgggaaggctgggcgtgtccctcccactctctggctcaagtcccctcccagagcctccctctagttctgtctcgtgctgtgtctctctgcatccctggacctccctcttacccacttctccccttggactctttgtgcctatcattctcagtggggctggggatggcagaagcggggcaggaagtccttccccggatgcttggaattgcagatcttcggagcctggaactttgagagcagaagtggattttggggcgaggactgacttgatgggtaaatagacgctgctgtgcagattggagttggggaggacagtggggcaggtggaaatgggactggggtcagattggaagcagatggagtgggctgggggaaggaagggtaaagtgatcagggatgaaggaatgtgggggccagggagagggggaaccgggctgtgactggtgtggagaacccggcactgaactcctggagcatggagtggggagttgcagcattaacacatactgggaggtgctgacttcagggcctcctacgctgtcgcctaaatttcagcactcaccttcttctgttttgtgt

SEQ ID NO: 45001 - DNA, 719 bp, Bovine  19866880937293
  misc_feature (1)..(1): n is a, c, g, or t
ntggccaattaaaaaggaatctgaaaaaattaccaggaaaacacgttcaagagtaaaatgcaaagaagaggacactaacatacaacttatttaaagctgtatcaatgatgtgtaaagaaaaattttttagtgtctatcttgtgctaggcataatgtaagacctttatatgactttcctcacacaatactgacaaggactctaggacataagctgtattattccacttatagagaggcgaaaattaagaaaggactcagaaaagtttaagtgacttgcccaaggtcacatggctaataaatcttagtacagtatttaaacccagacctatcaagttctaaagactgtatttttcttttattttattgatacacacacatactgccaatgaccttatttcagctcctaataagcaatttctacacagaacaccatgtggaataaaactcaccagtgtcacactcaacctcttcctactacaaatcataaacatattaagaatcagccagggtctaccttccagagccactcaactcttccatcacattccatgaaactcaaccatagtactattctctgctaccaggaatccaaaatctttacaaaaattacatttaccactagtatgtcctaactccctctgtggcactggcccatgctgctgaatgcataggatgattcctctgctaaataagaattcttcagaccagatataaaagag

SEQ ID NO: 45002 - DNA, 907 bp, Bovine  19866880969467
  misc_feature (1)..(1): n is a, c, g, or t
ncagctttctcccctctctccccagtgggtttaaaaggtaacatgattctcgctcaggtagcacttaaaccttcaattgcctactggctcacctaccattctattttcagtgcctcaaatggcacctggcactcaataagccctgcataagctttggtgaaggaatgaacgcatgaacagaacactgtcactgcttccctggagaagagcccacatccagccactggctagagagataagtacctctagtacatgcttcaccactgcatccgtagttccaaacagatcaacccccgtaattcctctcacatccgactccactgcaccaggggacaggttttttttccttagacctttgaaggggtgaggagtgggatgaaagatgtaaacataatgttaccaaaaagagcacagtaattgaagcacccaaaggtacagtgatacaccaaaattaaggaaaaagaagggaaaaagaaatttaaggagactgaagaaagacgcaagagctcttatgtatctcaaatataaaacagtttatttggtggatgatattgtaaaactataaactgcaaaaagtgtactcttatttccttcttgactcttgggcagtggacaaaatgattaaaactctcattattcctttaaacacttgctcaagagactggttatagatctgaatatatgtattttgtcattaaaattttcagaggctacagggagaaaccagcctgtaatttgaaaacaacagaaaaaagacaccaggataaggtcagtcttatgtgtataggaccaacacctatggctcaacaacaatctgtctttaaaatctgaattatctgtgctatagtcagaacccaaattacgataacacgaactaccttacaggtgaaaagcatcttgcagtttt

SEQ ID NO: 45003 - DNA, 1352 bp, Bovine  19866880984626
  misc_feature (1)..(1): n is a, c, g, or t
nctcagtttccatggggagaattccatctaggagcctagatccccaatttcatagcttgaagtcccaagaggtttgctgttctgagtgctggttttctccatctgtacaaaagggagaagagggaaatgctgacgtaaaggcactgctcaggaattccagtcccacaggaagcctttagagagacaccttagatttccctggttctggggtattctggggtagcaggatcttgccctttgctgagtccctcacctctgttccagtcactccatttggaagccctcttaactcagaaaaaatagcaagtgggaatgtaggtatccgcattgattttgattataggcttgaagcggcattcaggctcatgtgacctgccttccttgttcctagttaagccttcatttctcctttaccccagtaacttcaccttggcttatatgtagtggtgtcactttcactggtgtcatatgctatagttacttagaatactgcagacaactcttccactggctcatggagtcctaggttttaaattacatactaaccaaactagtaataaccaatcaacttgtctagagagtttactatgagatgtctcaatccaggagtccctgattaatccttcaaatctactacttcccagtgtattttcttctgtttcctcccattctccttctaatcctggtgcagacatgctggctccctgcttctcacttgcttctccatccccttttcccctcctcctctttcctcactcattttcttccttttcttctctctccttccatctttggtccttgaggaagtcaaagtccttctgtcttattctccagggcacttggtttatcttgacattcaaactgaaactgacctgtgcattgagttcccttatgaccttcctacttgtccagcttacagatgactcatagaatcagcttttaattcttattcatgaatgcatttgcattccattttgacatcccaatatttcctcccactcgtcacttgttatcattatcatccctttctccccagacatctgggttcaaatttatctttcctggttagcttcctgcctattaactcagctattagacagaaacacttccaaaaaatttgattcacccagagaccccaaagctgtcctgattgtggtggaaacaaggactttcagatagtaacaacactgaaccaggttccccaaactgaaagtcctgtcaaaggtcaggacctaccttccctctttgcatatttgagagaagcatgctggggcacagggaacatgagtatcactagagcactacaaatgcttgtacaggtggcacactgtgaaggtctgctgagggaacca

SEQ ID NO: 45004 - DNA, 1230 bp, Bovine  19866881060901
  misc_feature (1)..(1): n is a, c, g, or t
ntccattttctgaattctgtataatgtggttttaccaattaaaaggatagtaagaataatccagaggaaaaattttaaatgacagaagcaaggaaacggaagaggtttctaagctgctttctgaatggtttcaaaagacaagaaagagcacagaggcacagatgtaaacacagagaaagagagagaaaaaaaatccaacacagtccttgtggtccagtgggggaactgaggcagcagcaggacctggacaggctctttgcagctctcagcccaacctgcccaccacaagatcactacaacctgtgaggagagagggctggagaggaggagggagaagaggcacctttctgggacagcccaggcttgccctgctccagttcatcctgtcacccaagacagcctcccagagccaggagagctttttcactcactcccccaagaaggccccagaagcctggcagtggtgacaagaccctgaagagcaatgggagggaaggggagcagcggggaggggagggaatgacggaagggagaggagagactgcctggagcgggctgacagagggagaggaggaagagcaagcaggactggggagccagggagggactggggcagagaagtggggtgaggggtgggcacagggccaggggcggcagtgacagcggctcccagcgcttcctgcctcccactcgccctccctcgcgctctttcatgatcttgaaacaaccttcaagtctgggctggaggccccaggaggccagtcacttaggaaacaaaactgtttcttggagaccttgaaagcccatctgcagttgagccggtgtccccaccccctccccgtgcacacacacattctcccatggactctcacgtacacccacccgactccacacgtgctccgccccagccacacacgcacagcaggaacaccggggacggggtgttgccacgctgacgacaccttctcctcaggagttcactcggctccttcccacaggctcttccccacacacagcagccctccgtcacggactagcacacgtctgcacccacgcaagaatataccctcctctgcctgtctcctgtctcgctctcacgcacacacctccacccagaccctcccatactaacagaacacttgattcaggaccacacagcctctccttcgtgggtctgctttctgatttaagactttcagatccagcccccagcccatttcccctggactt

SEQ ID NO: 45005 - DNA, 1146 bp, Bovine  19866881078736
  misc_feature (1)..(1): n is a, c, g, or t
nccatctcccgctccaggaaatgggaccagtcctatgcaaatacgttcttgcccaggagtttcgtttcttctccctgggctcctggcacagtggcaccaacgtgagtggctgtttggcaggacagagaagggcgggctagcagtcctgaggctcaggtgacagggctaggcccaggagacagggatgctgacggggctctagctaccctcctgatgccaatctcaggctgaaaactcgatatttccacttagaacaagaaacacaggggagaaggctagaagaggagggcagtgtaccaggagtgccccctgcaggtctcactaggtggcactagatcaggcgaaggtggcgctgggtgggcggggatttcaggagccgcctgggtggaggataatgagaaggaagaccatagctagcatcttccaggtggcgccagtggtaaagaacccgcctgccaatgcaggagactaaagaacgcaggtttttccctgggtcaggaagatcccctggaggagggcatggcaaccaactccagtattcttgcctggagaatccccatgaaccaagaagcctggtgggctacagtccatggggtcgaaaagagtcggacatgactgagcgactaagcacagcacaggggactacgatcccacaagctgagttggtggccaaaaaaaaagagaatactttcacgttctggtttttatgtaacagtgtgcctacatgcatgtttacatgtatgaacatagtaactgcttatattgctttgccatagatgttgcattaccaagggagtgacaagatgtgtgagtgtgaccacttctctgccaatatccaactctgtgacattcaggaaaccatttaacctttctcacttttagttttctcatccataaatagagaaaatagtacttatctcatagggtatcacccagggtttttaaatgaggtgtgtctagctcagagctgatactcaaagaatccttaatagtagtgtcagtattcagagaaggcaatggcaccccactccagtactcttgcctggaaaatcccatggacagaggagcctggtgggctgcagtaccatggggtcgctaagagtcggacacgactgagcgacttcactttcacttttcactttcatg

SEQ ID NO: 45006 - DNA, 877 bp, Bovine  19866881081469
  misc_feature (1)..(1): n is a, c, g, or t
ncttcaattacttctctcactctcctctctacacacccgaggcttgaacttggatctgttttctccttgttgtttcctcccactacctgatctccccaggtccaaagtcaaggtcggtggaggggccggtgcagagaagggagttgcccccttccactcacccttcctgctgtaacccaggaagagaaggagggcagatgctgggcatgacctaccggatccctgtaatggaaaatcccaaccgctggcccggagggggtcagttatttggggaattcaaacatgaaccctgtgctctgagagtggacttgctggaggagaggtcgataatccctctgtggggcgttccctctggggccagcaaggaccagtcccgccagcagacacctcaggcatcgggctggagggccccactcccgcccttctctcctaacttcctttgacgcttattcgccagggctcagacctgaccccagcgcactggcttccctccaccaggagaaccctgtcctctggcagcctccacgtgaaggcaggactttttttctttctgtgccccttccagtttccctttcctcctttggcccccagttctttggctcttttgacagatgagcagcgacaccacggcgtcctgtcttggtcacctcccctacccctgtttctggctggtgtcagcaaccagagccctcccccctccccaggcactgcctcagtttctcccaggcttccctgcagagaggtccctgtgtgctacctgccatcctgcctgctgcagactctccttcctttcccctccacccgccccccaataaggaagcagctgccctcctttctagttcacaagtctggtacttgttagcatgcgacctccaca

SEQ ID NO: 45007 - DNA, 895 bp, Bovine  19866881126311
  misc_feature (1)..(1): n is a, c, g, or t
nttaataaaactggagacagttcaatctcccaggtatcttggctttctccccagcacccactttcctagaaaggctagtctcagtgcttacaatagtatttccagacccagtttgtattgtgaaataactggatttttttcactttcagtgaaaaaggaaacaaacaaactaactaactaataaaaagcccatacttgattaagaactgtaagatgtaataggtttgctgtgaggagtctctttcagataagctcctgatctctttgagaacaaggaccaaacctcattcatagccacatgaatgtcacataaaagtcactaagttagtactagtttccttcccttctaactttccttctctttctctattccacatgcacatgtgtgtgctaactcacttcagtcgtgtccgagtctgtgcaaccctatggaccatagcccgccgggcacctctgtccacaggattctccaggcaagaatactgaaatgggttgccatgccctgctccaggggatcttcccaatccagggattggcccacgtctctttgtctcctgcattggccagagggttctctaccactaacaccacctgagaagcccctctgttcctcacctatccccaagctttactagtccctatgcgtccaatctttatcaagtgtgagcttcctcagatcccatcctattatcaccaattttaaaagttgcctataattaaaccagtggttctcaaccgtgactgcagattttaatcaccagggaagctctgaaaacataccaatacccaggacccatgccagactaattaaaccagaaacttccaggttgtagcccagctatcagcacttttgtgtgtgtgtaacactggatatttgttgctgcacaagggcttt

SEQ ID NO: 45008 - DNA, 1506 bp, Bovine  19866881132435
  misc_feature (1)..(1): n is a, c, g, or t
nctctctatttctgttgtttatttccctctcgcctctccttttttcttcccaccgcaccccgcccatttcagccctttccttttcacttcccctccccacttcagtcctgttgccaaccctgttgcaatacctgtgatgagacattgggatcccttctcatttgaaacagctgtttcccagagttgaagcctctgtccttctcttctgggcctggatgagctccctttgcccctctgtggtgtctgtcagtctgtcttctctttcttctgccttccccacggggcagcatctgctgatggagttggtcctggtgtgtgattgttgtgatttgttcttttgtgtgtgcaaggaagggggctttttgagttccttccaagtgagattgtaaatgtagaattttccactgttggatctagatttttttcccccctttttttgggttacagagctgagaccttgtgcatgcatgtagaaagttgtaaaatgtaaattcttttttttttaatatataaaaagcttgtttttacagtttgcagtggatctaaacattatggcaattttaggttttttttttttttcttaaacataggaattaaaactgtacaaatttttttttatatataaaataaaggcatttgacttttgtgggggcattctgttgtttttttttcctcttctttttttttttttaacaggagtgaaaggggcctgagaaggtcagggagtgaatgtatgttccttgttagggagtgcgtgggccaggagggggcagtgtgagctcgtcactgctccacccttctcagggtgaatgaaaaaggaagctgcttattctgaactctgatactgagaagagaaacacttgggaacgtgaagacttagctgttctctggggtggttgtcaagataaggaggagggaaagattcctttctgggtagattcatgggaatttcagagaacagttgatgatttcattcgatagtgacagcctctcacatgttactaagacacattcctgaagtgtatctcgtatttctaaggattgctttatttctaccagtatctctctaatctttcagatactgtacaaaagaatattccagcaggagtcatttatttaaaatgggaattttcagttgacactgtgcttgtaatcaagccctggaattattgttgagagatgaggggctttctctcagctctacccagacccaagcttctctgtgactttggccaaaatgcttagcacagaaaattctttgtaaggttaaaaataaacaaaccaacaaatgtaaacatccctgtgtgaagttaacccatttactactagattttgtcctcttctcccctgccccctccttttccatgctctgaggatgcaaagaccagagtcttgtccttgtcctggaggaagatctgagttacagggaggtgacaagccagataacctaacacaagactgtgtggtctgttctcaagcagagcacaggttagccctagcaggttt

SEQ ID NO: 45009 - DNA, 1065 bp, Bovine  19866881204705
  misc_feature (1)..(1): n is a, c, g, or t
ntcatccaaataatcttggtatgttttgcagaggtaatgaaagtgccaagttggctgactttaaaataaggagattactctccagctggtggcagaagtcagagacctggtcttgctggcctcaaggaaaactgcctatgggtccaggtgaccaggaattgattctgcctagcaaccagtgagcttggaaggggactcgggctaaaactagatttgctctcgatttcagcccgtgaaccctgagtggaggagggttcagctcacctgcgcctgactctcaggactgcaagacaataagtgtgagttgcttcacagcgcccagttcatggtgacttgttaaggcagcaacagaaaacgaacgcacacatcacatccacatcatcatcggttacagaagctaggtggtcctcctctccccagcctccccagcagccccccagccccactcctccccaagacccacctggccctccgcttgcgcaccctccgctcatgctcggcctcctcgtagtagtactcattgtggctgttgtcccgcctgcgggccgccgctgcgatcacagctcgggactgacccgtggagttgttggtactgttttctgcgcagaagcaggagagagagaggctggtcccttcagagcgccgccttgattcccactccaggaaggctggggccagccccccgacatgtccagaggaagccgtgtccacccccagaaacacccccctttcccatccctcctggccacaacgtctgggcgaggcccacaggaaggccgccaggagggcaccagagagcaggagtcccgcacgggcttctccccagggcgggaggttcgggcctccgagagtgagggctgaggagcagacacagcggaaccagagcaagggacacaccgtagcataaagggaaagacagcagactcagcagctaaaaccagccacctggtgtggagggagaggacagaacaggaggggctgggacacagtccgaggaaggagaaagcacgggaagatgggagaaagaggaacgggaggcaggaacttgggagtcctgcttgggag

SEQ ID NO: 45010 - DNA, 1308 bp, Bovine  19866881374432
  misc_feature (1)..(1): n is a, c, g, or t
ncacacacacagcagatcagaaccaccacttcaaacacagccaggagggaagctgatgccattgtgcttcccctacagataaatttcaaaccagacagggtgccaatcccctcccaaccctttgttctaaactgttccagcctagagctccctaccttcctcccagctgctgattaaaggcccaacataaacctggctcccctggcctgcttctcccacccctaccaacccagctcaaggtactcggaaagcacccaaacatgccgctccctcccctaccaaacagagaggccaaaaatgaacccagtttctgagacctttgcctgctgtctcatggagcaccccaggaatctaacccaagcactggagaggcgatggggagggaccttaaggtgagaaacgagaagggcagaagttccccttgtttaatcggacccaggaatcaggggtttggagggtctcccgggtgggcagcattcccagggaagagggtgggggagaggatcactggatgggatcaacaagtggaaatatgggaggcatgacggaccgggagggaagtccggacttcgtccagggcagggagggccctggtttaaagggtgggaggctgtaaaagggaatgtgttccgttgcttttcaccatgcccccaaccccacctcaggcacaagaacacagagactcggtcccctgctcaagccaaccgtggattatctggggttaaaaacaggccagagaggagtgagcaaaggaagagaaagtctgtcacaaaaagcagatccttctcccctccaaaggcctttcagaaataaaattaatggaatgtgtctcagtaccatcccatgaggattggggtgaggaccaggggggagaaatgtgggggcttttgtccccgctgcccagcttctcccacattgatcaccatggcaaccaaagccccctgttgcctaggtgatggcagccaggtcctggaacccatacccagcatccaaagcgagagaggttatggaggtgggggggtagggacagagcgggagagaatggggtttctcctctggcggccccagcttttgtataagctctgggatcaggtttcttcaggaaacaatcagaggcctttggaaaaaatacactcagaacctggcaacaggcagagggagtaaggccctgggtagactgggaggcatgggagggcttggtgttggccaaaaggcagaccaagactagacccttccccactgccccacctggaggagcagcctaggggatgagacctggacacagacccggcagctcggccaggcgcg

SEQ ID NO: 45011 - DNA, 803 bp, Bovine  19866881445936
  misc_feature (1)..(1): n is a, c, g, or t
ntagaattcaaggacagtatattgtacagaaactaaccactaacattcactagaaaaatgattaaataattatttcaaaagatgttagaaggttatcagtgaaatttaatgtttattcctgattaagatgtttgaggaaaaagcattaaggaaaatataattatgttcagagaagcagggaaggatgtatgaatctagaaaactataataataacaattataacaaaagcaatagcagcaacatttgaaatcttggataagaagtttgtatttatatggtctaagtaaagggacaagctggaagaaataaaaacatagttttttgataatgaatatggttaaatacctaaaagtatccaaggaagtcaaccaaaagaaagctatagcaacaacaaaaaagtcctataagcaatgacttcaaaattataggtacaagacattggttttttaaaaataaaatttatctctgtgtattagaaaatacagtaaaagagctctctatttacaacagaaccaaaacaaattacattcaagacttagcgtttgtgacataaggtacttattaaagaaaatctaaaaacacaatgagaataattttaaaaaaaccataaatgcatggaaggctaaacttgactgttgtttgggaagacggaatatagtaaaggtaaaaataagttgctataaagagccaatatcataccaattaaaagcctcactgtctttttataaaacatgacatgtgggttgtgacattcagctgcaagagtcatcaggtaagaatatcagagggtttttttaataag

SEQ ID NO: 45012 - DNA, 1011 bp, Bovine  19866881663685
  misc_feature (1)..(1): n is a, c, g, or t
nttcctacatagagaaaactgtcactggtcaaaaacaagggtctctgagtggttattacattctgctctctttacgtttcgtttgtacaagtgaggggctcctactctgaaaaatctccagattccacagttctccagagatagccaattttattgcctaatcgccttcaccgtcaaggtcttcgtctttgttggcactttaatctaaatatctcctgttgcctgcatgtttctcattttgtcctcggcagctgaagagtttcctgagccccaggaatagtggttacccttctgctggaatccagcgttcccaaacccccccatcctctaacccagggcttctcaatttgcacccccaggactcatctggcagcatctgagttgagaccgagatgggaggggttgctactggcacctaatagccagagagcagggtgctgccagacatcctggcactcagaggacagccctccttcccctaccagcaagaacgctgcccaggtgtcagtggcgctctgcctggagccccctccctgctttgctggctggagccagtctgacccctgctggctggcacaggccataacagtggggcttctgggccctaagtcaggaggcaaacttcacacacaggatgtagaacactcaggcatgcggcttgaaatgaaggaccccacaaagttctttgcttacaataattcttcttaccttaccacaatgactgaaattcctaccattaaagttacagtcagaatcacccagaaaagcaacatattatagagatagctcttattttttaatcagaaagactcgtgcctgaaagttcaacttttcaacgtactagctgtttgctctggggcaagttcagatttctaaagtcagcaccctctcttgggatgctgagggagaagttagggcttacttcaggagaagaatgaattagcaaggctgaataattttcttctcttctatgctattttcagctcatagagcacagtccattcactacat

SEQ ID NO: 45013 - DNA, 822 bp, Bovine  19866881741820
  misc_feature (1)..(1): n is a, c, g, or t
nactgttagaagcctcgttatataggaagggtgtttggaaatcatcaggaaggcactaatgccgtgctcggaggcatataatataagaacagaaagaggctcttgaaccagactactgagtttaaatcttggcccaaacccttaactagctgtgtgattatgggcaagtttatttaacttctgtctttcagtttatttgcctttaatttaggactgataacgtacagggttatgaagattaaataacaatagaagctaagcagttagaaccgtgcctggtacttaataaatcattgatagataaagttagcatttttattctctggaagttttacttagcagcacatccatcatatagtactagacctttatccctaagcatgttctctttcctttcccagtatcccctctggtttcctttatctttgtagcaaatttttgttgacttcttgaatcaaggaagattcttctctgtttttcccttacctttctttcttactgggttagtcctagttcacctgagtacttaacctaaaccagttcaaccttccagaatcaacagaaatgctctcatattagaaattctttctcttctcctttaaccctcggaagaaattgaacttgagccagctgtatgagagcaggaggtctaagtttccagctgttgtatagcaaaaggggatgatttgggattgtcatcatgtttttacctctcggattcactccttcaatttctcttggcctggtttttttaattaacatccaggccaagttccttcctaacagtggtgattccaccctggccatgtgtgcccgtgatgg

SEQ ID NO: 45014 - DNA, 734 bp, Bovine  19866882078847
  misc_feature (1)..(1): n is a, c, g, or t
ngacaaggtggggctgggcactgtgggagcaggtgttgacacctggacccgagtctcccaaactttaagcctctagctgacccctcgcagccttagacagcttgctttttagactctgccagtagctctgacacggcgccctcaccttgcagccgtgagaagagatgatccggaggtcagcgggcacgcggtccccacccttcacctccaccaggtcgcccaccaccacctcctccgcgttgatctgcatcttctctccttctcgcaccacaagggcttgctgcagggaagttgtgctcatctctaccccgaccttcctcttgcacccgtctcccccctcacctccaatcccatcaaggagaaggacaaacccggcacccttagaaacaagataggtcccagtgtggagaactggagggtcttttctgcccaagcctccttctctgagcacaaggagttgagaagagctaagccagactctcccagaaacctaacgccccagcccccagcccagcccccagccatctacctgaggcaccatgttcttgaaggaatccatgatcttggagctcttggcctcctggtagtaggagaagcagccagtgacgatgaccacagctgccagcaccacgcccagataaagctggtaaggacaaaggctttgagggacctgacttttcccagccctagagggacagctgccactcagggtgagagtttagtgcccctttgtt

SEQ ID NO: 45015 - DNA, 1417 bp, Bovine  19866880124944
  misc_feature (1)..(1): n is a, c, g, or t
ncgtgtccgactctgtgtgaccccatagacagcagcccaccaggctcccctgtccctgggattctccaggcaagaatactggagtgggttgccatttccttctccaatgcatgaaggtgaaaagtgaaagtgaagtcgctcagtagtgtccaactctgagcgaccccatggactgcagcctaccgggctcctccatccatgggattttccaggcaagagtactagagtggggtgccatcgccttctccatatgtttccctaaaaactgaattctagacttttcacacatgtcctgggttggaaaggtattttacggagtctcttttttatgataggaaggcaagtgtaatactcactttctgaattacccctttacagtcatgagacaaggccaggtttgaaagaatcatgaacactgcctgctgaacagccgtgttctctggaggcacctgggaagccatcttcaggatacacagcatcagggagctgccgggggcccctcggtgtgcggcttgaacaggatgctgtccataacttgaccaacagagggaactgcaaccttcaaaaacagcagccgttacaaggtggctcagcttcacactttggttcaaccacctgagtggtgagctcatccgtctgtggaaggactcggtcattaacctgtcaactgcaattgccctaaaggctggtgctggtgacctaatggactgagggcctggcgatctcaatacagcactgaaagcactgtggctcctgcctccattttacagaaggaaaaaatcaaggaataccataatctggggcgggggcagggggaggacaaacgccaccaggacgggaggctccagagcggagggcgaggtcagactctgaggagtaagccaccctcagcacagcagtgatgagatgggctgtgtactgtccccagttctggtcccttctgtcttttgatatttggaaaagccaactgctgagctgctgaatgttgctagacttgctggttaaacctcaactctgtgcccctaagtttacatgggaaaggcatactgcccacaggcccccactttcctttcttttgctcagagagtgtttttcacagcttctcctcccttcccaagtcgtcgcctgcctgcctttctcactctcagctgtcggccactaacaacagggcccatgggaggcgctcaataaaacgcctgtcagaggcattagaaaaagaggcaccccagtgacatcaactgtcaccaagccacccgacgccaggaccacctgtcatcacaccagtctcctgctctagaatctgtaacagcttaacctatacctggtttttaaggtcttccatcacacttttccctctcccaattctattaaatccagtgttctcctgcggtatcatcaggacagtttctccctctgt

SEQ ID NO: 45016 - DNA, 2611 bp, Bovine  19866880245003
  misc_feature (1)..(1): n is a, c, g, or t
ntactcaaactcatatccattgagtcagtgatgccatccaacatctcatcctctgtcatcccccttctcctcccaccttcaatctttcccagcatcaagggtcttttcaaatgagtcagctctttgcatcaggtggccaaagtattggagtttcagcttcagcctcagtccttccaatgaatattcaggactgatttcctttaggatggactggttggatctccttgcagtccaagggactctcacgagtgttctttaataccacagttcaaaagcatcaattcttcagcactcagctttcttcagagtcagacacgactgaagtgacttagcagcagcagcagctttctttatagtacaactctcacatccatacatgactactggaaaaaccatagccttaactagacagacctttgttggcaaagtaatgtctcttgacttaggcaatggtttcttagatatgaaaccacaagtgcaagcaaccaaggaaaaaataaactagacttcaccacttcctttttataaaatatcataagcttaggcatttgaccttccaagtaaataaatgtggacctctgtaaagtcccagctgttatagttgatggtttttgtatagttgaatgattttcatccctttcttctaagtatacttctgtcaatcaagagacagaaaggacatgatttttaacgtagtttaacggaaagaatcataaactatggggacttccctggtggtccagtggttaagaccctgtgcttccactgcagggggcgcaggttcgatccctggtcagggaactatgatcctttgagcttcacagtgaggctgaaagaaaggaaggggaagaaaggaaggaagagactattattcactgtgtctgaagtgctgaaaaggtaaaaaggagaacactaacccaccaccacagtaacaactgcagggtgttccctcctctttgaggaactaaaaagaaacttggaaggagggggtcccttagagctgacgccctgaagagggtttgttcctcagcactgggattgagacttctgcaagctggctgatgctggtgcgtcttgaggacgtactttgaggctagcccttcacgggttagaaaaactgcagactggttcaccttctgctgttgttgctgcagtggcaacagagtaagaggagcagactggaccctcaggaaggggggtcctcgtcccagcctgccagcctctctccagcgccccccgccccgccacaggcaggatccccagggaaccaatagatggagctgacacatgggttgcagagaccccaaccccatgtcaggaagccttgtagagagggtgctttggcactgagagccaatgactctgtaactagtaccactgttacagagtcattgtaatctgttacaatctgtccgctgtggttagataatttgttatatgttattaattttattccttggagaaggtaataggaacccactccagtgtttttgcctagaaaatcccatggacagaggagcctggcaaggtatacagttcatgagggtcgcgaacagtcagacacgactgacggactgagcacaatattattatttaaaaacacatggcaattcctccctgacatcagagctgcatgtgtactgaagtgatgagggccaatctttatttctatgtgtgataaactggtattctagtgtaggtgaagcctaagaataggtccccaaaggagtaatatattttttctctcttgaatagggaaactatcatgaattgtcagttaatggtgaattctttatcctcctgaatatttaatttataacccatttttacttccaggctttcagaaaggtttattattggtggctcttgtagaatataatggtaaaatacttctaagcattaaaccactagtaactgctccattttctgcaaatctataaagggtagctctccattgctgtgtgaatgtttctctatcccatgggctattacctctggctgtcaattctttccttgatgccatccttcgactgaaatgcttagactgtgtttcaaaaggaattccattcaaggtatattattacactggttatgtttagttacttctgtagcataaagctcagtttaatgatcgaggaaactatatcagtatcattaatcacagatttgcagcttgagggacttcccaggtggtgctagtgctgaaaaacctgcctgcctacgcaggagatgcaagagatgtgggtttgaaccctggatccgagagattcccctggaggagggcgtggcaccccaccccagtattcttgcctggagaatccctggacccaggaggagcctggctggctacagtccgtagggtcacacagagtcggacacgactgaagtgacttagtacacacgcacccatgtagcttgaattgtttttaactagcagtagaaattcaagactatattgaaattttaataattaatcagaaatatgcaatgttaatgaagccccatatactctgtatgagttctttaacacagaagaatatgcatcatattgtttaaatgagaccacagagttggtggaaaaaccccacaatccatcgaggtaacaccttcc

SEQ ID NO: 45017 - DNA, 987 bp, Bovine  19866880346479
  misc_feature (1)..(1): n is a, c, g, or t
ntctgtgctaccccatagacggcagcccaccaggctcccccgtccctgggattctccaggcaagaacactggagtgggttgccatttcctcctccaatgcatgaaagtgaaaagtgaaagtgaagtcgctcagtcgtgtccgactcttagcgaccccatggactgcagcctaccaggcccctccgtccatgggattttccaggcaagagtactggagtggggtgccattgccttctccaaatgaaagccttaatgagtcttaaaatagacattgcttcaatagttgtttactgtctgaaatatcaaaatgggtcctgaagattttgaaaaattaggagcaaaattgttactccttttggcccctacagtggactttttgggaacctcatactttaaattttccttatttaccaattattgtttatttttattttcttttcccttcatctttatgccactgtatcttgtttcctccatgacagaattttgaattgctgtttagttgaattattcctgtggcattttgcatggctagttaatcacacatgtattgattgtaccctgttttcctagaacctgtcaggatgttagaagcgggaggtagatcttaaaatacacgggtcctgccttgagctgcagttaatagggagacaagggcacaatcgagccgtcaaggaacatgccactcagaggtaaatagaataaagtctcaggtggtgttgagttgggcattctctccacatttttcctctgaggctgaccttttcggtctgcttgtggagatggttgacttaagcagatgtgaacaggctcagggcctctggatgatccagtttcttgaagctgctttgttagctgttgagaatcttactgtgtatgaccttgacatttactgttgcattctgcgtcttttttagggagaaaagaatctctcagagttagtggagctggcagatcaagccttacgagcttttcctaccatcagca

SEQ ID NO: 45018 - DNA, 950 bp, Bovine  19866880369500
  misc_feature (1)..(1): n is a, c, g, or t
ncaagaatactggagtgggttgccatttccttctccaggggatcttcccaacccagggattgaacctaggcctcccgcatttctggcagaccctttaacctctgagccaccggggaagcccaggaaaccttaattcctctggaatgggtggctgtgtgtatgtgtgtgtgtgagttgctcagtcatgtccaactttttgggacccctgtagccctccaggcttctctgtccatggaatttccaggaagaatactggagtgggttgccatgccattccccagggggacgggtggctacttaggtctaaaaggacctgagaaatcaggccgatggagagtcacgtggacagtgagaagaatggtaggaatgagcaaagggtttacaagcagagccagggtcttcccagtagaggcaataactgaagtcagagtgggtggtgacatgacatcttggggaaagtacagaggagagagagctgaagaatgtttaaagtaaaactaaaccaaaaacaacaccagacaaaccataaaccatatgtttctaaagggtccttaaaagatcagaagacagatcttagggtgggttcaagttctcagaaatgagaaccagctcatagctgagcagaaataaaagtgaaacataagctctttccacagtgttttcaatttagtgatcatcctatcagttcagttcagttcagtcgctcagtcgtgtccgactctttgcgaccccatgaatcgcagcacgccaggcctccctgtccatcaccaactctcagagttcacccagactcatgtccatcgagtcagtgatgccatccagccatctcatcctctgtcatccccttctcctcctgcccccaatccctcccagcatcagagtcttttccaatgagtcaactcttcgcatgaggtggccaaagtcctggagtttcagctttagcatcattc

SEQ ID NO: 45019 - DNA, 1268 bp, Bovine  19866880456665
  misc_feature (1)..(1): n is a, c, g, or t
ntttttaaaatatttttctttgattttgggctgtgtcaggtctcatctgtggctcataggaactttttgtgggaggtgagatcttttctgctggggttcactggcgctcgggtttctcttttgttctgtagcgtgggctctagagttcaggctcagtcgttggcaagtgcacgaagctcagttgccccagtatgtggaatcttcgttccccaaccagggatcgaacccacgtcttctccattgcaaggcagatttttaaatcctggactgccaggggagccctatatccagttaccatctgattctcttttcacattaagatggcttaattggctcatctatgttgaatatcaacaacatgtgtgcaatatttttttttcctgtttgtaaatgagttcttggcaaacacttttatgtttattgatatgctatcagaccctggcaatttgaaactggattagaatacggcgttttgctaaaaagtattttgtattattggcctacgagaaagcacactacagattggctttctgaattagaacaatatcaagaatcgccctccattaaaaacatgacgcccaatttttaagacatttatgtagaattcagaatgtgtttaacttgaaaccaaatggctagatcttaaacaaatggtatcatgaggcaggtgtggggaacaggctatgcccacataagacggagttcagggcagtccaaagatctctgtgtaccttgaattcacaagcagtacatgtcaatgcttccagaaacacagagaagccatctcaacagttactgttaatacacagagactgtgacaatgggcttccccggtgtctcagtggtaaagaatccacctgcaatgcaggagacctgggttccatccctgggttgggaagatcccctggagaagggaacggctacctactccagtattctggcctggagaatcccatggactgtatagttcatgaagtctcatctaatatagatgcacagggacttttatctcaccctagatatattttaaattgtttaaaaataaagtattttgcaaaaaaaatagtttaaatgttattaatttaataacaactttacaactctgcaatagttcttaatccaaatagcttataatgatcacttatattattagagtatactccacattccatcttattaggtgaaaacatatcagaaaatgaaagagaagtgtttgctgcaaggtacaatcaaacattccaccaaaattaaataccttttcctcttga

SEQ ID NO: 45020 - DNA, 1381 bp, Bovine  19866880457039
  misc_feature (1)..(1): n is a, c, g, or t
nacagtgcttctagttatattgttattctcttcctggctgtctttcctacttatgagcacatttgattttttggtggctgaatagtgttatgattgaaacagaagcctaatagtgactgtatactgtggcttccctagtcatctctcttttaacagttctaaagacatcaaaaaataagaagagaaataggaatttggggggcattagttaaccagaggattgagcagtatgctattcacctttacccggaagttaacttttttcccttctctctcctgtttgtattcccaggtagtagacagatgataataagagttctggagttgctcgcagaagttgtggtgcttattggtgaagcgatttcagcacatctgtgggatgacagcagtctttttgcaatagatatggtgagactcaaggttttccttgcagcgtgggtaataacatcagtcttttgttttatcttggtcctttcaagctggcttcattgtctcattagcctttgaaatctttctttgttttagatgcaatagatcccaggcttattttgcactgtgtctggaatcggctatttcttcagagattctagttacttttaatgcgtgcgtccatgtaatggaaaccatatcatattttacacttcccatatatcataaatcatttgcttttttatatcttttattttcaaattatcatctgatgagcttgcttttctgggcagaactggtgttctgtttttctattaatgtaaatttgtaacttatgcctcacttttcctttttttttttccttcgtcagagaattggaagtaaaatttattagtcataaaaatatatattgcttcctagagttaccattttttcctctttatgttattttgacctacctagatctgtctacattttattaaactttgctgtaggctgcttgaaatccttgtgcatagatgttaaaacaggaaaacaaaatcctgatgtttactttataccagtatctatgtgtgaagaattcccccaatttttttatatacacaaatctcttgagaagaagaaggatttaaatcttttacaataggtttaataaattgtttcatgtccttcaatttccttgtttataaaatagggattatagttcttaatcttagttttctgatagttcttaaggttatcccactattttgtagtacttttagaagattttcacatattgaagattttcaacaagtgagtttttcctgagaagtgtgaagaatgttttatcagttgcttcttaaaatagcttgaatttcttggccagaacatttatctgtaaaagttagtcattcacttttaacttttggctgctgatcttttatgattcaatgaattatttttactttaa

SEQ ID NO: 45021 - DNA, 2459 bp, Bovine  19866880560761
  misc_feature (1)..(1): n is a, c, g, or t
naagaagagaaagagaatttttcagaatttggagctaggaaaatacttacactacttgcatccacctttgttgtgggtttttaaccagacagcactgttgcaaataaatcttctgaaaagagagcagctccagaaagactgcagctggatggacaccagatgtttttctaacaggcagtttaactggattacataaatcaaatataatgatggtttttaaatctctattttctccaggtctattttactttatgattctatcatctgatttctttggtgacacccaggcttcttgtcttgtttcctgtcttctttttattttataccagctttattctttaatttgaacttgaatcacaatcttctttgtcatctgttctttcctttttctccttttagttctgtctcttctatagtctttctaaaatattttatacacaaatagcttttattagaagtaggactttttattggaacctctaacctaaaagttttctttactttagaatatgatccaaaaggcatctagttgaatggaagcagggatgaaaaaggctgtgattaactaggttaacttaaatgctgatatttgaaaatcagaggtgatgagaagtacaataaatttatttggtgaataatttggcctcttctgccggaattagaataaaatttgagttggctaattaacagttttttgaagtgtattttgcatgaatgtggcatttaggaatgtcagagacataaatattgttatgctagaaagagatgctgtgggtctgtttggttgctgtatacaaacttatttagaattttaattcaacttctgatatgcttgttatagctgttatcattgttgttttgatgctaagtcatgtccaactctcttgcaaccccatggattgttgccccaccaggctcctctgtccatgggatttcccagacgagaatactggagtgggttgcccattttcttctccaggggatcttcctgacccagggaccgaacccatgtcccctgcattggcaggcagagtctttaccactgagccacaggggaagcctagatgacacaatttttagcgtgcatgtagatctgagtttttccggcaacacctcagtggagatttaaggctaggtttgagttgtaaagaagagatggacactttctgcttgaaaatgtcatctgacacaagctgttgtgtcattcgtagaaatacggtccatttctcgggaagccctttttctgcttggatggcatgtttcccttttttctgtcctctttttctgtttagtcaactcctccacattgagactcagcctcagtgacgctgtcctccaggaagtattatgtgactgtttcacccgcccttccccactccagcctcctcctctctgggtctggattagatgcttctctgctcgaaacaccatgagctgctgttgcaagttcatctgtcttggccatgacacagtcagcttcctgaaggctctggaagcctgaagccttctggaagctgatgatgtctcaccagctctggttctcagcataatgtctgagaagtactggcgtttgactagttctcttactcatattcgctgctaaactgggcaattaattgtatcttggttgttgttcaatcgctcagtcgtgtctgactctttgtgaccccatggactgcagcacgccaggcttccctgtcctccactatctcctggagcttactcaaactcatgtccatcgcgtcggtgatgccatccaaccatctcatcctctgtcatccccttctcctcctgccttcaatctttcccagcatcagggtctttttcaatgagtcagttcttcccatcaggtggccaaagtattggagtttcagcttcagcatcagtccttccaataagcattcagagctgactctacaaaaacagagatgtactgtaatatccccgcttgcttggaattgttctggctcataaagaaatgctgtatgttgtgttcttctagtctgcaattttttgatatatacaatatgcgcctgcaatccacctcatgggagagtgaaagagtagtttgatcacagatattatagctactaggatagctcttagaaaataaataattaaaagcaaaatgtggctgtttgaaaacaagaagaaatattgcagttattggatacagtaatttgaaaataaagcactaaattataattgctagtgggagaaagaaatcagattttccctggatatgcagaaaacatccactgtggagtttgtcatgtaagtgttttcagctaaactctcataaaataaagttgattcaatactcataagtcaaaatattttgtaattttaaaaggtggcaatttcttgttgtataaggaataagtccatgcttattgaagcaatgatcagacttgcttcaagtagaataaagttacaagaaggcattaaaaagtatataa

SEQ ID NO: 45022 - DNA, 1141 bp, Bovine  19866880647580
  misc_feature (1)..(1): n is a, c, g, or t
naaaagcatatgttaacatccctttgagttctttagatcagctaaaagatgaatttgccattttaagaagataatattgcaaagatctgtcttcaaagtgaacccatgctggaatacatttttatcttaggaaatttatatattttttaaaggaaatagcaaccaaatttggaaaccaggtgtgtgtacccaatggatcaggtttttcaaagaaccgtgtgctcaaaaaatagagcttttgatttcttaaaatgatctctgaagtcccatcctaaaatacataaatcaacaaattgaattttaatggaaaatcaagggtgtttttcaaaagacagttgaatgcagctttgaaaaatgcgaagacagagaattatcagcttgttataacggcattgacttgacactagagtttttatgtttaagtaagaaaggatatgacatcaaggacaaatgaggaaaacagcttgtttaaaaacataagtggcacagcctaccttccccccacccccacctgtggactttctcatcagctcgttgaaccacctgctggagcaccagctaccagaatcataatcacacattctgcatccagctcatttcagcgtagctgtgcattcgtgctcagtcgcttcagtcatgtccgactctgtgtgaccctgtggactatagtcctccaggcttctctgtccatgggattctccgggcaagaacgctgcagcggattgccatgccctcctctgggggatcttctcaacccagggatcaaacccatgtctcctgtgtctcctacattgcaggtggattctttaccgctgagccaccggggaagctagttgcctctaataaaatagaagatgaggtcagcatgttgtagagcgcattcagtaaaatgttctagaattcctcccatcactttgtaatgtagtgttcaaaatataaacacacatggacatcatgtacatcagatctctgcagagtaatgctgtgagactgttattttattgttcccatgtccacggggaggacctgagatggtggggctggacgggaggctcggttgcagttgatggcaggatattcctcaggtttggatattagctacgagtcacatgtgtgttccacctcactgggctgcaaattt

SEQ ID NO: 45023 - DNA, 1785 bp, Bovine  19866880663595
  misc_feature (1)..(1): n is a, c, g, or t
ntgtctctacatatttgggatgcggtgttctcagtgcagtttatggagacagagaacaaacatgatcaaggctaccgctaaagtcagcggtcacactcccagagctccacgcctggagggaaagagcaccttggtacagcatcctgtctcctagcaccagggagagccttccctgggtgaatgttctggaagcacagatatgaagcacagatttttctacagatgctttcatcacagtccccaggtgaacaatgtcctagcctgttaccattcacctgaaccagggagaggggtgtttagaaccagtcttggaacccagccttagtcaggtgccaaaggctacatccatgcctgtgagtcttcctggtggcattctaaactaccaggctcagctctgttcatgtaaaagtgaacagtgtgggtcacgtggctaaaggactgccctgtgttagattcaggtcctggctgagtctagtgagtcaactgatcctaccctggctgctcactcaggtttttcattcagatcctgtccaagctcctggcagttcctagagcattcataacattttcatcccagaaatcttttcccagtaggacatgtttccaccgttgattgcttagttccaaacttagatgtaaattgctcattctcattgcttctgttgtatctgactctttgtgaccccatggactgtaacccactggagtgggttgccatgctcacctctgggggatcttccagacccagggatcaaaccctcgactccttcattgcaggaagattctttactgctaagctactggggaagttctgtatgtaaatttcaaaaatctttaatctcagacagtggtctggaggacccgaggcttctaaaatttgcccatgaatcctgctctttatagttcctcctggcaggtaaaataaagtgtaaaaatgtaaatttcacattgtgagattgcccactgtgttgtttctctaatttaaagtggcttaatgtatgagatgaaggagatgtaacacttcacttaacgctttttcagagtagttgcagaacgaacatcatcgtaagactatccatgagaaagaagctgacctattttttgaaatcttgcagaaatcttgaatgttccaggcaaacagggagtcagaaacagtgaggcttaaaaaaatatcattggctgaaaaaagatatttgttgttgttcagttgccaagtcatgtctgactctttgtgactctatggactgcagcacatcaggctttcctgtccctcaccatggcctggagtttgctgaagttcatgtcccttgaatcagtgatgtcattcaaccatctcatcctctgttgccctcttttccttctgccttctgtctttcccagcatcaggatcttttccaatgagtcggcttttcgcatcaggtggccaaaatattggagtttcagcttcagcatcaggccttccaatgaatattcaggactgatttccttttggattaactggtttgatctccttgttgtcctagggactctcaagggtcttctctagcaccacagtttgaaagcattaattcttcagtgcttaaccttctttatggtccagctctcaacatctgtacataattactggaaagaccatcagatcagatcagatcagatcagtcgctcagtggtgtccgactctttgcgaccccatgaattgcagcacgccaggcctgcctgtccatcaccaactcctggagttcactgagacttatgtccatcgagtcaatgatgccatccagccat

SEQ ID NO: 45024 - DNA, 1904 bp, Bovine  19866880687326
  misc_feature (1)..(1): n is a, c, g, or t
ntgcagatgaatgttcataacacccccaattcaccacagtgaaaggaggactcagtgtctaccagcaggtgaacagataagcagaacatggcatatccgtccatggactatcatttagtcgctgtcatctgctacaacgtgcacagaccttggaaacatgatgctaaatgaaaaggtcacgtattgtctgactccagttatatgaaatgtccagaatacacaaattcatagagaaagaagattaattaatggctaccaggggtctgggtaagggtgaatggggacagactgctctgggggtaatgaaaatgttctggaattaaccagtgatagttgcacactggatatatatcaaaacccactcaattgtatactttaaaattaaaattatgaatttaaaattatggttaaaattatgaatgtaaaatttttaagtcagagctatagacatacatttgaaaatcatcagtgcaaaaagttgtaaagtcatagaaatgggtatgactgttcagtcagatgtgtagaaaagtaagagagaactaagacctaagtaaaagtcaaagtgttaatcccttaattgtgtccaactcttttgtgtgtgtgtgtgtccaactctttgcaaccccgtggactatagcccgccaggctcctctgtccatggaattctccagacaagaagactagagtgggttgccattctcttctccagatcttcctggatctccaagaatcaaacccgggtctcctgcattgcagacggcttctttaccatctcagccaccaggaaagccccaagaactaagccaagagacaacaaaatagtgcgcgcgcgtgtgtgtgaaattacaatcaggactgatataaaaacagaccacaacaactgatttttactgaaatctttcctcctcttaatttgaaacaagtgaaaagactctttggaaatcaaaagaaaactaggttctacataaatgtccccaaacctccaacgatcccaatggtacctgtcagtaacagcctcaaaactgagcagcaaggtactaaagagagcaatcagctctttctggagctgctgcctgaccgcagtgcggacatcatctgtttcctctcgtgtctgggactccgtcagaaccagcaggtccaacagtggatttggactctaaaaaatgaagtttgtaaaacatgtatttactctctaaagctatatgttgttcccctaaaatgttggggtttttttgttgttaatcatgttctggagaaactaagacttaataatttaacataacacttaataatttaactcttgcagcatgatattagagagtaaattctccttgagttactttgctcatgtttaaaagtattattatttataacactagggatgataatatataagacaagataaaaagctttctaaagcagctttaataccatacaaagtcaaacaaataccaaaaatccttttctaaaactgcattaacattacagtaccatcatttacaactctgaagaaatttcattttaaaaactatgaataaattatggaatatatatcagtactaatgacatactataaaattcataattattgaaatataaagttttaattgactatacttgcacaatttaggtaaatatattttaatttttctactgttatatactatttacagccttatttacaaacattcaactattgtacagcttttcaagaaaagattctaaaactaaagcccggtatatatctgctattttcacaaaccaaagccaccacaactcccagtgtacaagaaactctaacaaaagaaggagattgttttaaagggtattcttttcttaaaatgagcaaaaatattatgaagttataaaaaagtttatagatcaaaaatcaagttatgaaaaaa

SEQ ID NO: 45025 - DNA, 1159 bp, Bovine  19866880812756
  misc_feature (1)..(1): n is a, c, g, or t
ntcatactttatgcatacctttcagtttaaaagatacaactactattggagtcgtaagctatctagaaatttatgatggtggaacatttgctctgaattggccttgttacctgaagagagattatataatttaatatttcatttttttaaaattatttgtctctgcctgtttcatgtcttaagtaaatttgggatccctttgagggcagagatcatatctctaaaactagtgccttttcccccacaatcttaccactgtgttcaggagacaataagtccagtaagttactggatgagaggtttatatgtaatgttcaaagttggaacaatcaagcacgagaaactaggaggaatttatggtcccttaaggttttatattttgtttatttattattagagtttatcatgttaatttcttaaaacttgtagcttttaaacaatttaggtgtgctgcttattctcgcctaccattaaaagaatcttgtttattcttaccgggaggaatacatttgagttatttaatgataacattttatgtcattctccatgacgtttgcatactggcccctgcagttgactgtggtcccctgattggtgtttaaatgtttgcagaaagagaagctgctcgtggtgttggcgtcccttggagacaccgtgtgctaccataaaagctgtgtcagtctggagcagccggaggcgctggtcgtgcaccacaggatggcctttgtcagcatctcgctgtttgctgtccggctcctgcagacgctgctccctgtggaaaaggtaaggcgggtagtgtggcttatttgtagtttaccgggtgttacggtccctgttgtaattccttctggtcatttcacagtgtacagagattttattggaaatgcagaagttgagaaatggctaattttaacatatttgactagttttgaccagttgacagaaaaaagcactcattttgtaaagttctttttttttttttttttaaggtgatttttaaaaattcttgtgaagcatgtttagaaaagtccattcttactaagtgactagttgttgttgttcagtcactaagtcgtgtctgactgcagccgcgtggactgtagcatgccaggcttccctgtccttcaccgtctcccagagttgctcagattcatgtcca

SEQ ID NO: 45026 - DNA, 4460 bp, Bovine  19866880897029
  misc_feature (1)..(1): n is a, c, g, or t
ntggtgtacgtgtggaaggacagagagaagtgaaggagtgtagtagcatttgtttcctgaaggggactgtggggagacagtgggtctttttgaagaaataatgtcgtaaattcctgtctctctctctccctcttttcctacagggcccctgtgtccatgatgaggactctgggctgtctctcataggaaaacctgccctccaggctcttttataccactgccatttttatgaacatttgaatcagatggtaaaacattgttacctgggacggtatgcatttgatttcagtttttcagctcttaatggagctcctgaaggcaatgatttaaatggtaagtgtattatgtttatatttttaataaaatatatttcttaaattgtttaaaacctttgtgttggttacaaaatatttgaaaacaatgaaaaataccaggaaaacattcatatctagtcctactacccagagcttgtagtgttgcatttagggtgtgtgtttccttccagtcttctttctctgtatagcttttgtttgctttatataattgtgttcatatcttatgtacatttttgtatttccttctttcactgaacattgcctaagcatttttctatgttataaattcttcatgataaccatttttgacatcttattaatgtttcataagttatttcatgcccttcagtaaaattttatagtttttccctctatttatgtcttaaatttttttttggaaggctcttctcaagcaatcaagaatgagacttttcctactaaattttctaacttgttttgctaatatagtgaaaacctgttttggcatattactcatttatcaaaatatttgctgaaatcttttaatttctacttgtttgtagattctcttggatttcctaagtataagatcttagtgcctataaataataattgtgtctcataaaaagaaatagcaatttaatagtaataatttaataatgaaaaatagttttaaaatataaataatacaaattttaaaaatttaaattttaaaataatgttaaaaaaccttgacataatttcccacagaagaggtttaagagtagaacaaagaattcccaaatattaacattttactgtatttaccgtcccatgtgaatgtatgtacatataagaaaaatttatttatttatatgcatatattttttttctgagccatttaagagtaaattgtaaacatgaaatttctttaccctgacatacttaagtgtaagtttctaactcacttttctgctcacttcctgaaggaattaagaggagaaagacatttgatgacgtttcttgaacattctaaacaaatgtccctgtagaaagctacccctttgattgtttgggttttctgtgctgatgtcactggatgcgtggccccggagccagcagcactgacatctgctcccatcttgttagaaatgaaaatgtatgccgcccccctcaccccccacccccggccccaccttgatttggggaatggaatctctggtgctctccataaattatgttagattaaactattatgcatattgaaacatgctgtatatattaattaattatggatgataaaaattaggcatacttttttctttagttctggactggtttcatgtaaagactactcctgctgttaattgttaagatgcccagaagaccgttgatgttgacagttttcctgttgtcacaggtttagatgactcgttcaagttctggagggctccatctcgaatgtccagtcaagatcgagatccaagttctctctctacctcggaaacaatggtacttccaaagaacgcataagtgctgcattttgaatttctgcaaaaatttgcatttacatagtggagggataagaatggatgtgaagaatcaggttacgaccaccatggcaactgggatttagttgaagtgctgtctgcctagaactaggttctacctggctcaaataagtgtactaaatataattttatagatgaattttcaaccctgttttctacctttttttttgttacagaagttcaaaagttttgaaatatttatcagtagtagcagaagaaagggcttcccgggtagcgcagtggtaaagaacccgcctgccagtattataggagatgtaagagatgtgggtttgatcctggtttggaaagatcccctggagaaggacatggcaacccactccagtattcttgcctggagaatcccacagacagaggagcctggtgggctgtagtccatggggttgcacagagtcagacatgactgagcacacagtagctgaagaagagaacagaccccatgtgattagcagtgcttgattaccctgaaattttgcttaaggaccagacagtttgaagaatgttgacccattcaggtgattccagtgtggtactgatgactttaaacacatttctaaatacttgtatcagataggagcttgtcttaattatctgaaatgcttgaaatttatgtacatctgcctgcctttctttctttttatttataagtttctttgttctaaaaagtttgagacactatttttgaataatgacatgctaggtttcatttgttttggaagcatacaaagttattctcaactggaaaacattgcagtgtttttttggaataatcgctgtgtcgtagaaccaattaggaaggcaaaggtttgactccgctgcttccaggagcaaaaataatatgagaattaaataattatacaggaattaacgagattcacctcctgcagtttctcaggagaggggtactttttgctaagttttaagtctcccttccctcccctgcctccagactcagaagagtttatgtttagtgctaaattgaacctttatttagaaaaatggaataattaccccaattctagtaggagtgatgctctcttttgcacgctagaaatagtatgtatctttgtttcagtaagagaaataatgatatgactcagtgctaaagggaaccatagtaattggctatttaaatagttcatagaaggacagtgttaattatgtgcttaaaaatagtaattcttaggtttaccctttttgtttaaagggctataggctaactttgaaatctgtacatacttcagttctttgtttatagaaggtatgtagtaaatagtaattgctctaagtaactttgagttatcttagctgcttggtagataaccaagttgtattttttctatataaggagacttaaaaaaaacccaaagtaaatcaagcatttatatttctctattttataataatatataaaccttacagattaagatactagttcttctgagaaacactttgtaaatatgtcacttattataataattaaaatagaagcacctctattaatccaggacagggaagcctagcatgctgcagtccatgaggtcacaaagaatcggacatgactgagcaattgaactgaactgttaatgcaagtctttaacttgtttatgtgaggatatcacatagactttgagaagtatataccaatgttgttaagaattcttctgtatagtcctatgtaaaacttacttctcaaaagactaatagtacctgttagaatttttacagtcagctctttatttcttttttggtttccaaacagaagagttttgtttttggtaacttattcaccaaattgctaacttttattcacaaaaattagtctaattactccagttctacgaattgtcttgttttccttatcatatcagaggtactatatctttttttttttttccagcaggagacaaatgtggagagtttttattcattatgtcagtgttactttaaacctaagcagtccgtacccagaccaactaacacttcctcagatataagaaaatgttgaggtatcagttaaatggctgtaaatcttgctaataagcttctctggttatttaaatcatagttttgtctgtcttccagaattgagaaaagaaacagcttgttgatgggtttgtctttccaaggagagcgctgtcttttgctgtgggccacgccacgcagtgcagtgtggccggaccgttgtctggtgctggtgccgcactaggtgcctgagtgctgttatctgatgaacactggtgtaggtgactgcagctcgtatgctttgtgaattacaggtagagtaaggagtgtcgtcgttaccttgggggatattgccctataaataaagcctttttagagatggcttcctcaactcactgtccccttccccagggcaggggtggcagtggggggtcaggcatcagttgttttccctcttggaatcacatttctacttctcagagatattcgaactagatgggtgtttatgccttagacataccagtgtgtatcaacagctttaacacttaagtttggtcttttctggatcttgagcagaattatgtctgtttatcagttttcaaagtaaaggaca

SEQ ID NO: 45027 - DNA, 1357 bp, Bovine  19866880984810
  misc_feature (1)..(1): n is a, c, g, or t
ngaaagcaggtgctttgtatacaactggtattaagagcacgcctcaataggtctggctgaacaccttccaatcccaaagaacataagagttatttcaaataatgacggtgccatattggttcagtgaatgaaggcaccctgcccggaaactgtacgcttttccatgaagtctcaaaatgttgggccaagtgatacaatgctcaaaagaagttaaactagtaaattagaatgatcagctaattaaattatggggcaaagtctttcatttccatcatgaagttagatgcagaaccctattccaattagggagtcatgacatttacaggatgaagagctcagatacgctccaacctctgcacagcatcagctcagaggattcagctagtgagagatgagttttaaggatgggggagattcaagcaataaatcattttcctgtgaaaaaagtgctagtcgcttagttgtgtccgaccctttggactgttagcccgccaggctcctctgtccatgggactatccaggcaagagtactagagtgggttgctgagccctcctccaggggatcttcctgatctagggagggaaactacttctctcgtgtcccctgcatggcaggtgattctttccccaagggccatcagggaagccctatgcataactataaatctgcttcaggcgatgtggacagcaaatataagagacattggtttgcttttcctcatatgcatgaaatgactagtcaggagttttgaggaatcagaccgtcctgataatgacctgaactctgcagccagaatttgaagtatttaccccaagagaaataaaaatgatttccttccatgccaaatgcataatttgctgctcataaacttttttaaacaacatacactaactattgagtaacccaagtattctccatagtcatgtatagcataagtaagctttaatgaggaataaaaatgaaactgaaacctatgtggccaaaaaagaaaaacaaaccaagtaagtagaatagaaatgatttgaatctaaacagtatataaatgaatgtgcctgagctactaagcattagaaatcgcaaaaaaaaaaaaaattatacaattaactgatgtcaatttgacattaaatgcagcagctttattttcagcattgtagaaacaaacatgcagtaagctcttgaaaagaatgaattgtcctttttatagttcagtctgggtattttaagttcccaaatagttctagatcattggacttttaaaattatatacttggagctttcactttatagcagaatgattattgtcatgaaagacatgtttgaaattgcaaaaaggtagaaaaagttaaaattatattt

SEQ ID NO: 45028 - DNA, 1024 bp, Bovine  19866881081619
  misc_feature (1)..(1): n is a, c, g, or t
ntgccccccgggggcccacttgtgacaggcacgatcagagctgccccgggtacacacagcgaaagagacagaaaccgcctgactcgtgagaccttctgctctagtgcgggcacaggaggaatgcacggatgtacactgaacacacagcatatcagctggtggtgactctccagaggaaaataaaacagggaaaggaggcagagagaaagagggtgggggaggcaggagacgggcatggggagcaccaaccacgcggacaggccatctggaaaggctccaagggcggggctgtgcctgcctaaaggcacaagagtcagaggatcgggaggctggacaggggggaaggaggggcccaaactctcccaggagctgcctcctgcgcccagtgtggccctcgtgcggtgacccgtgaacgccgggcgagagtcatgcccgatccgttcccacagcctccgcctccagcagagccttgaacatggctggtgctaaatgaccaccaggcggactgtttataaaactactctgttttaacctgaacggaacactgtgtggataagcacgtgtatcagtggattcgtgcggtgcacgaggagaagactcaccgttagccaggatcttgggcttgttggcaggactgaagcagatgttatggaaaataagaagggggatggagaggctgctcttgtgcttgaacctgctcatctctgtgagcaggtctagacagccgtccagccgcaggatcacctgctgcccatcttcttcgaaggacatgttcagtagcagcttcagccagagcacgctcaggttactcagatgtttgtttccccctttcggcaacgtcagagacagaaagttctgcaggaagttactctgtggataaatgcagagaacgttactttactttctccgagtctttcagaattactttctgagtcccacagagatcaattagccagcattctgctcctgttttcctttaaattaaagaaacttaatttctccttcctcccaagaccttcccaat

SEQ ID NO: 45029 - DNA, 713 bp, Bovine  19866881174509
  misc_feature (1)..(1): n is a, c, g, or t
ncatcgggcacagtacctttcgttggacgagagaacgtgtctgtcagctgcggtcagggggagccaggggaaagtagaaaacttcaaacactttgcggtcggatttgctgctgatggaagagcaaaacataaggcagggaaggaggcaacgtggacagatttgcaatgtcccgaggaacgctttgccttcaaaacaagtccccaaataaagttacagctcacggttccctgaagcatgtcaaaaagatcagctgcaaatttgtcttctcaaagaataaataacagatctcttttcacaatttaaacagaatgcgtattatttttagaaaccaataatgaatgacatttatagcatcaattatttattctaccacgtggctacccagaacagagaccttaaacaaaaaagaaactggtatttggagatctctaactatagtaattaaaaatgatataaatgtaatcatacactgtatttagtaagtcaagttcaaatatcataaatagggttcgacattttaacggttacactttgaggatgacttgaagaccataaggttaaagatcaaatatcagtgctcaaacaagattaaaagaaatccgagaaacccgaatgcaattttatactaccctccttcaaattacttctaaacagatcttctagtgtacaacttaaggtggcaacacataagcccttccaaatggcaaatagt

SEQ ID NO: 45030 - DNA, 1032 bp, Bovine  19866881201616
  misc_feature (1)..(1): n is a, c, g, or t
nacacacacacacacacatacacacacatatatatatacatacacacacacacacatgtaatttatttaaaagacctcttagaaaacagaagaattggagaatgattatcaaattcctttcttccattatttaaatggtcgtaataagcattgttttttaattcgaatgactgaataaaattcttacaagaccaagactgaaagtaaattatttaaaaactaaaccaaatttaaaaaaatcaagaaacattaacctgaagaatgacttcagtaagtcgttctagtgagttctgactttcctgggttttgtcaagaagtgaagccactgttggactgtggcataagcttgttttctcctcatcctggagacgcctttttgcttcttcggtcaagagaacagaaaggaactgcagggctggcggtgtacagagcagggcttgtggtagacaaacgcgcacacctgcagaatgtatctgaaagatagtttcatgtgtaaacaactggaaacatctttcaaaattaaagaagtcagtcaaatttatttgagtaacaaagtttataggttttttaatcctaatgaactttattagcacaacaataactgcagtgtttaaaggtaaattaaatagtaccaagacaacctattgatcaagaaattgatttcattttcattttgttcttttcacataggttcctgtttataagaatgtgagtgtgtgtaaataagggattatcttaattttataagcaaaaacaccctgagcccagcaagaccatctccttaccgatcaccgctgcccaagaccgggccagacccagggtaacatatgggaaagaggcagggccagctcgcctcagcagtgcggccagaaggttgaacagatgagtccatgtctgataaaaagctgaccttaactctacatctgtaaaaaacatcaatcaaaatgtttcgacttattaacacaaagaagaaaaagaaccttttaaaaataaacctcaccaagacactttactacacaacgtaaaaatcac

SEQ ID NO: 45031 - DNA, 1105 bp, Bovine  19866881320859
  misc_feature (1)..(1): n is a, c, g, or t
ntcccctagcactgggtgacgcaatgctgatgagactctgcagactgcctttgctgggcattgtaaaccactttcacctaccagacccaaaacctgcaaagcgataaatgcaaaggactaaacaagaatgagctaatgggcaaagagaattaccaaacgaatgattacttcattataaactctttcagacaactatcatattttaattttgataaagaagttacgttgctttagttttccccactactaagctctatattcagcatttcattagagcatattttttaagaattgcagacctttggagatttctgatattatattctggacttgcttatacttgttatttagccatagcttataagaataattaacacctaacactcactgtactttgtaacattacataaagaactttaccctcatttaaaatgacagcacaggggaacggcccttcactatactgcgtacttgcctcaaacggtctcctggagccacttaaaatatccaacctgtaagacactttatgaaaagtcttccaaaaacactagcaaagaacaacccaaaatgtgaccttgatctgaatacttggtgcaaagttaagactttttcctcagtattatttactgtccttctaaaccaaaaaaaaaaaaaaaattaaaaataaagctcactatggagggaggtgggaggggggggttccggatagggaacacatatacacccatggttgattcatgtcaatgtatggcaaaaaccactacaatattataaagtaattagcctccaattaaaataattaatttaaaaataaataaataaagctcacctaatatatctttggtgcatagggtgagaactcggatgatgtttgggataagaggtttcagaagctcatcctgaatcacaaggtcgggatccaccaataaacatgactgcaggagccgggataaggaggacaagtattccaggagaaaggacacctgcccgaaagaggagatcagtaaaaacagagcacatcatacgaaaagcccatctcagtgatgaagtatcacttctttataatacaagttaataaaaagtcataaaatattcatcataattt

SEQ ID NO: 45032 - DNA, 1385 bp, Bovine  19866881357588
  misc_feature (1)..(1): n is a, c, g, or t
nataaagcgtaagtattcagtagcacaggatcagtgatgctctcaacaaaatagggcttaactatgaagcatgacaagtcactgtaattaaacattcaactttcaatgcatactgcgtaagaacacagaaccctgaactgaagtgtaggtgtggcaaggccagcccagtactcctggtggccattaggtggtgctctttccctgagaagtctggcactgctaccacattaacagaaaacaccgcctacatcacaagttgcattaaaatagtttctgtaatacagacaggtatttttcaaaccgaacaatttcttaacacaatgtataacttgctaaaatgcccaaagccccacgtgatcagctggacttacaatcccagtcctcagttgtcgccactgcatgcatgggagaaaaacaccgtgcagccgtctcatatcaaaaaagaggacgcggggacttccctggcggcccaagaatcacctggcaatgcagggacgcgggttccctccctggtcgggcaattaagatcccacatgccagggcgaaactaagccagtgtgctgcaagaactgagcccgcaagccacaacgagagcgtccacgcactgcgacaaaagatcccaaggtcccacgtgatgaggaaaaccccgcgtgctaaactacgaccagacacagccaaaaaaacaaacagaaatacagctacgaccagacacagccaaacaaacaaattaaaaaaaaaaaaaaagttaatgagttctttctgtttaaagaaaaaaaagaggatgggctcatgagtgctttcctcattaacacgctgttttcaaagattatgatttgataaacactcaggatgggggcgtttccgctttgtacacacacagtaagcctgacagtaagtacgacggggagctcttggaagaatctacaaataccgccagtgcacaaggaataaacaaacagaaataccttgtttattagagaagaaacttggatctctgtggaaattgagtctgtttcttaaacacgtgcacagctgctgcaggcaggacactgactgtaatgccagacgatgcttcccgtctcctccaaaggccagtttcaacagagataaaaggctctgaaatgaagagtgaggaaaatgaccatgggaacaaagtgctcgactgcaaagacggacgtggagcttacgcaaggttaaatggacaatcaaaggaatcacaataggtgccaaatatttataggcgagaagcagcagaaacgggtaaaaacgacttagcatactgctggaagatgggtcgaagatcaaatttaaagggaacagtcagcgtttctcatatctaaactgttagttgagtatctatcccgaagaacacaggaaacagtccc

SEQ ID NO: 45033 - DNA, 1253 bp, Bovine  19866881411573
  misc_feature (1)..(1): n is a, c, g, or t
ntttgctgagtctacagctgtcacatatgaaatttgcattcagaaaacttaatttccaaataatgcacacagaatttaagtggagtatgagcttataaggtgttgcacaagatacacgttttagtagttaataaaaagtcagagttcatataaagatgaaaggaacactataccttgaaatagtaacacaattgaaaatactttagtcttgagaaaagtgtatttttagaattaaattattcaaatgtctaaaaacacatcgggtgcaaggatttggcacagactgttgctactgatttagtggccactgttaataaaatgtcttcgaaccccacaggaacctgaagtctggtcattccaagccacagacttcagccctaaataatgaataccagttcccctgcctttcacaggcaaaataacagagacagcaagagacggcaagagtaattaaattgacaacttgaaaaacaaaataaaatattgtttagaaatgaaatttagcctctccttgtctttgcaatttttcaatttagaatgatgacatgcacagaaaggccacaagggggtgctgctggtaaaccgacaagagccctttcttgaccactccagcatcgaggaaataatcgctcaatgtccaccctcctgagacatcaagatgaactcggacggttcacaacgacgggagagatcttcaaagaggagaacggtcaagaacatttttccagaaacagagcaccaggccgtaaagacaggcatcgaaaggcaaacagaggtgatgtcaggtctacttcccttattttctcatcacagattagtcatttgaagaaaaaagcaatctctgcttctcttcaacggagcattaagcttgagatatatttattcttcattctctttggggaaccatccactttaaaaacagctccaaagttcagtgtcctgggggagccttccacgggacccccccacccccgcccagccagcctccagttaccctgcacatcatttgggttcaaagagctgtcctccgtcacattctcaagggctaagtaaaaaaaaaataaaataaaataaagcaaacaaacagaaactgaaggttttaaatgcaaatcgaatcctgaacatctgagtctggctttgttgtgctcagaattaattccactatttctaacttgccctgaagtgaagttgccaaagaatttgctgaaacgaggactcgaagctataaacctcatgatgatttagcttaaaag

SEQ ID NO: 45034 - DNA, 1416 bp, Bovine  19866880151855
  misc_feature (1)..(1): n is a, c, g, or t
ncaaaggttcgtctagtcaaggctatggtatttcctgtggtcatgtatggatgtgagagttggactgtgaagaaggctgagccccgaagaattgatgcttttgaactgtggtgttggagaagactcttgagggtcccttggactgcaaggagatccaaccagtccactctgaaggagatcagccctgggatttctttggagggaatgatgctaaagctgaaactccagtactttggccacctcatgcgaaaagttgactcattggaaaagactctgatgctgggagggattgggggcaggaggagaaggggacgacagaggatgagatggctagatggcatcactgacttgatggacgtgagtctgagtgacctccgggagttggtgatggacagggaggcctggcgtgctgcgattcatggggtcgcaaagagttggacacgactgagcgactgatctgatctgatctgatttaattagtcacaaatacagaattttactgaaggagtagtgtctgcagttggcagaagcagatgtagtatatctcagaagagctctcctcgggcctctgtgtccctaaacaaaggcaggtgttaatgacactatctgtgcaaggtaagaacttgagatctggaaaagctcaattcttttacctcacggtctcctcataatgatgctgtgctgcttatcgcttggcactattcatattttacttaactacttatcacacttttggtaaataaccaatatacaatggagctcagtgtacctgactgaaatttaaagtgaatgaatagtcattaaatttttctcagttaagagatctaaatgcagctgaaaccataaggacgcctaaagtttcttttcagtttcaagaatattattaacaacaaatgtcaattaaattcacagacctggacaaaaatattttatgtgtattaagactgattcaacaaaacacttgcatattcagccttctctagcaaatccttaagacagtacataatgctttttggtcaaagcgttctatcagtttaaaatgttaaaccatcttgaattccaggcttagaaataacaaaaggtacactagagtctcactgttgaagtttctcaaacagaagtacatgaaggcagtgcttatctgtagaatggaggagaaaaatttcaagtgtttaaaatgaaaccaagtattgtaatttagtctgaacttaaaaaagaaattcagaaccactgagtatgatattatagcagtagtattaaaaactatttattctagaaaaccctacagtttagctcattttaaaaagttatcttttataatataattacaacagttattcaatatcagtatttggaatagtttacttttgcaaatcatatgttggaaatttatttcatttcataatagcaatcgat

SEQ ID NO: 45035 - DNA, 1758 bp, Bovine  19866880523426
  misc_feature (1)..(1): n is a, c, g, or t
naacagttagttgctcagtcgttacagctctttgcgagccatggactgtagcccatcagtctactctgccatgggattctccaggcaagaatactgtagagtgttgcattcccttctccaggggaccttcctgacccagggatcaaacccagggtcttctgcgttgcaggcagattctttactgtatgagccacctgtctccatgctgaacactgcccagcaccaagaaagtgtttcatatgtatcatcttatttttcctttcttgaaagcaaccccttgaagaaggtaatatttaaaaagttattttatagataagacactaaagcttagaaagattaagtaacatcaaatgtaggtctttatgacttcaaagcttacactttagaatttgcatttctgttttttttttttgtgatgctaaaactactggtcctgggacagtttgagaaattctgctgtaatatctcctcaaaccatagttgagttgctctaaaacccacaaaaagtgcatatgcacacctctaaaatgtaaacataacactttgaaaggaaattgcaaataactcttcaccaggaaaacactgatgaccccagtcttcagttacatacaggtgttactgagttcggcctgcttgatgcatcgcaggcccataattgggagatgagatgttgaggcaagaaacagcgactttattcagaaagctgggcatctgggaagatggcagactagagtcctagagtgccatcttctcagggtctggatgctggtttgtttaatagaacagagagggggagaaagtgaggaagtaaaaaggtcctaagtcttgcagaatatctcctggtttggccagcctcggggagtggatttgttcatttcttctttcctgcagccattcataggtggagagggacagggtgtttccctgcgagctgagcaaaggtgctttagtttaacattcaggcagatggtcagggttccctgaggccggccattttgtaggtttatatctatatatagcgtctctttagtgattatagtaactgaagcaatggaaaacaaaggttaaagtaaaagaacagatccaacatggagtcagagtttgttcttccctgttacacaggtaaaaccactcctgtgttagatgagttcgccagtggctgaaggtattttgtggtgaactttgtatttctcgttgttcccatggcacataactttggtcctacattgtctaactctgatttattgttgtcatttcaaataaaatatttctatgcatagtaaaacaaagcaggaaatgaaggcttgaaaacggccgtggtttatcaatggtaatgccattggtctaacatttgtttgtttctgaggttttagaaaattgctttagaaagccttggggcagaaagcttcacttaattaaaatattttaaatcaaaccacaggaacttcagttcataaagcctcaggatacagccggcaattgtaggaaactcaaatggaatagggtagatgaatataataatatagggtataatgttttattatttctatttgctatgttgaaataattaggcagcagaaaatcttggttaactattggtattctgaggatattcattaattgccacataactggtttagtgttttctaaagagtatccatggagcactgggatatgttcccaggttgctttttgaagaaaggacttcctcttaaaagtaactttagaaagtattgcaccactcgcttaaagtagaca

SEQ ID NO: 45036 - DNA, 1769 bp, Bovine  19866880587528
  misc_feature (1)..(1): n is a, c, g, or t
nagagatgcagcctaattagctcttctgatggcctcttgaacaaatgtcagttcagaaacccgaagtgcttgctaatgacaagggcaaaactgtcccacaaaactcaaaaagtggtgtttgttatctatttcaagaactagagatgaaagtcttaatgatacaggaaatgctcttcaaaggccaagaagtcttagtgcaaggtaagaggatcaatcagtcttaaattcgagtttactaagagtaagagacggatgctgccagcatggatatgcgtttcaaaaggcatgaataaaacccagaaatagtgttaattttactttgaagtatataatgaaacccctcaagtactcagacttcaacacccctttcccaaaatgaccgaaatttccatttttgagcgtttatcattccgcctttttccgttctccgcgtcttaacagaattttaaaagagcagctaataaatgaagtatacttcagtttcatgtaatgggttggatcagaagggaactgataagatgatattggaaaagcaggtgggggggtcgaaaagcctcacaagtgctgagctctgcgggttcaattgattcctggtgtgcaggctgcagtccctgggttattccagaaaatggaaggagaaccgtccctgctttattacaactgagactcttctccagggactggttaccagcagggccagaggtgatgaaggggagatgaggccaattaagaattcagactggggaagctggaaacagaaaccatggggagaattccaaaagggaaggcgggaaatgagactttgggtcactgtaggaattcaaggtagaatacaaatatgagctttaaacccgctcgagagaaactcattttagtggaaggaaggatcaaaggaggctgaagctttgcagtgtggtttctaaaggcaaggcacaggggcagaatacctgagtagaaacctatcagtaaaacctagctggtgtttatcatcctttctgtgttcttggcatactttgggatattagaaatgttggtggtatgcatgaaggaattgaaaagctcaaaacaaaacagagaagcaattcagcaataatttcaacacaatcactgctacagtttaatgataatggcacagtgtctataatagctccccagggacagaaagctgaggctggggagtggtaatgaggtgatgagccagagggaggtctggattcatggctccatgatcttgggcccattccttaaggactgcatctataaaatggggaagaagagtaggacctttctcatgggatgttgctgctgctgttgctaagttgcttcagttgtgtccgactctgtgtgaccccatagacagcagcccaccaggctcccccatccctgggattctccaggcaagaatactggagtgggttgccatttccttctccaatgcacgaaagtgaaaagtgaaagtgaagtcacttcagttgtgtccgactctcagcgaccccatggactgcagcctaccaggctcctctgtccatgggattttccaggcaagagtactggagtggggtgccattgccttctccacatggggtgttagaaagattaaataaaacagcagtggagaagtcacagcccctggctcttatgaatgctcactactatcctgtccccttgctcctcaggccctggcacagtccccgtgtcctgacagcactctcttctgctccagaggccaacttctcatctgcttcagtcaacatgaactctttttgggg

SEQ ID NO: 45037 - DNA, 1194 bp, Bovine  19866880633717
  misc_feature (1)..(1): n is a, c, g, or t
ncttctaacatgggtttaataatccatgcaaaaatttctgtacttcaggtagagattccagtacggaatagttgtcaaaaaccacttcttgaatatcttctaatacttctaatatttcttcaaatatccgagcactaaatactgatttcccaagcctatcaaatgtgatataacaagtaaatattgaagatcaaactatttgatttaatacaatcacatttagggggcgattttctgtctacactatttcccttaactttctggatgcctctgggcatagctgaaataccctgttacttttcctgtaccatgtgttaaagtttaagtgtgttacgtaactgattaacaatttttagaagattaattagcatcccaacagaaatttaacagagcttttcattaataccttaatcttgatagtaccaatttccccctcaaaacactctgaattcccagagatggcttccaaatacagagcctctatttacttaatggagctttgagcccctgagaagagctctgcagggtgctggggaactcagaggaaaatgttaaaggggcagcttacaaataagaatgcaaagtagaccctctcagcttagcaggtttcaagtattatctatcctttaccctgattgcaacttcagcagagaagagtggtttgtttgctgaaataatgaatagtagatggcatccattttagtggaaagttttaatttgtgattccctgaggctgtgtgaaatgaaacacccttattcattcccgtaaatgaagccaaattgtttctggaatttcttctgaaaaaggccatctaggaacactgacctgacatattggtctgtgaaagaaaacatttaatgaatgcccttttgtagtgaaaagcactatttctatgaagaccaattttatttctgaagtatgttgttatctgattaaatttctgcttttaaaaactgatgctgaggtacaacagaatgtttaagcttgcctcagacattcagagaataaaaatgtctatcctgtctgattttgcatctgttttagttaaaatacaagttacgtctgaaagcaatcatcagtgccacaataacaccttattactaaacttcaataaacaaataattcaaagggattaaatagtagtgagtattggggaagaagaagaactaaagttaccctgcaaaacacacaag

SEQ ID NO: 45038 - DNA, 712 bp, Bovine  19866880695183
  misc_feature (1)..(1): n is a, c, g, or t
ngctggtgattctctctgcatggtgggaggcaccctgggcagtcagtactctccgtggttttggggacattcagaatatgcaagtgtgagagcaggatgggtctttgtgggatcctttccctgcaaatgagcctaggaagcatggtgaagtggaattgttttgtaagaaaccagaaatacaaacatttatggaattactaggcacaaattacttggcactgcaaattggaacaattagctcacctttgtgaggaaggaatgttgaacgtgaaacaacttgagaatggaataaaaatggacctattattctttgactcaattaagggcacgtaatatattcaatatgcatttgccaaaccatatacttatctgtgctgtttgaggctgaaggtggggctacttctaagcgagactcattcacatcagccctgccactcacccaccttggaatggcaggaaataatggctcctgttaaacggatgagaactagcccagttacacaatatattgaacaaaaatgatgccaataacactgttacttttcataatgggcacagatttttataggaattagtgctagagaaacggaccatctgaaataatgccatttagtaatgtgactcttttcccttccagataagtccacattatggacatacccttccctgtattcgcccagatggcaaattaaatgtgttggttggaagtgag

SEQ ID NO: 45039 - DNA, 1148 bp, Bovine  19866880705054
  misc_feature (1)..(1): n is a, c, g, or t
nttctgacaagcacttgggtgggaactcttcttgcatgtagctctcatcagacttatcctctggcactgagggctaactgccctctgattcctcatttgttaaatgtctttgtcgggcagtgtattgctcccagtgggtaatgcaattttgtagttccgtttattaatatacttgttcttacaaactgaatgttgattgcattctcagtatttcagggaaaagagcagatctctctctttggggattggtttatgaaattgtactgcccagagacagaatattaattagaccatttatgaggaaatatataaaaagtaaaactctggcttctgtgtttaactgaactgttcaaataaatcaaacaatgaccctctgagaaatgtataatattttgcttatcattttagacttgatttcatacaaccttgtctttgagttggagcaagaggtaaaattctaccagtatttggaaaatcagttggggatgctgcagatagcagtactgatatgtgtgcttgaagaaaatataattttttgagcctaatgtaattttcatgaacttattttgaaagtgatttataagactggattatatggttaaagctgagatctctttaccctaaagaatgggcaagaaccatatcagtccatcgattaatcagtcaattgatctatttagttttcacctccttccactgaaaattttcagtagccctcagacctttaaaaattctttctaggggtttttctgaattcaagatgttttagcaaacccagtctagggagaaacacagtaatttctgccgtgagagaatgaggggattctgagagattgtgttaggctaggctggtaacagtgggtcagctaagcctttcttcctggaaatttgaggactctagagtacttacaggagaaggcaatggcacctcactccagtactcttgcctggagaatcccagggacgggggagcctggtgggatgccgtctatggggttgcacagagtcggacacgactgaagcgctttagcagtagcagcagcagcagagtacttacaactcaggaattgaatattaatggttctggaattagctacatattctcaaggtattagcccagcagctggaaaggatgtttatcagaaaat

SEQ ID NO: 45040 - DNA, 1957 bp, Bovine  19866880772730
  misc_feature (1)..(1): n is a, c, g, or t
nctcagaaacaaggcaatggcaaggatttcaggatgcttccatctgcatcgtagtttccaagtttcactttctctcctctgaaaatcactgggccatttcagagtttcagcattccctgaaagcaagtctgaggaaccagcccatgcaccgccaccatacctgaacacaggtaaacagcttccattcatgtgagtgttgatgtgtgtaatctacatgaccctcaggaaatacattaagatatatacacatatacatacatttggatgatctaggttacagaaaaatgcagttacctgattaagaaatagtgttcatagccagagacaaatgagattttaagattagtttgtgcttggtgtttattctccttttcctgtgaaaacattctttaaagttatgatcagacaccaatccaatccggaagacaatttgttactttttttcttctagcccagcttgtcttaagtgccaattatgtcaggcgccttgctgcttttttacattcctttcctcactgacagctacagttgacttttcttagttagtacgtaaaatgatatattctcctgtgtgttcaaaaacttggctctgtaactgccagctaacttttgaaataatattgtcatgctgcccttctttggggaggaaccccgagctgaggaatgggttggttctgctccctggctatcaggatgggggtaaatattatccaaccagatcctgtgccatggaggaataaaaggagagcaaaccatgctcaggggctgaaagtttgccacggaccagagatattaatttcgcaaaacaaagggtaaatggaactcatccaaataggtcttttgagaagatagggttgaaacagccatcagagtgaagagtctggatagacacaacttgggctgtttgcttatacttcaactggtaaagggctgggatcaaatacaaacagctttacaatgaatgttagcatttattgagaacttgctgggtctgtgcagtgaccagagctgggtacttggcatggatcagttcctctgtgtttcaaccatcatcttactggcaagttcctaattgtgttcttgttttaccgataaggatgagccttagacatattaagaaacttgcctaaggtcaaacgttcaaataagtgtccttactcaccatgatacagctctgggaaaagggatttgtataacacgtgcctaatgctttatggtttattaaacttctttcactggtaccactggattttactctcatcttatcctatggggattggtggcattgtccttattttgcagatgagaaaatagaagtttaaagaagttttgtggctcactttgccatccttaggtggaaaggagtctgatcctatgttaactagagaattctctggggcaaatagctatgcttcctgtctagggtgagttgtcttagaggatgctgaatgaagagcactaagctgacagtcctagctccaacaccttccatagaacttggatggggagggaagtgcgaggggggttcaggatgggggacacatgtacacccatggctgattcatgtgaatgtgtggcaaaaaccactacaatattgtaaagtaattggcaaccaattaaaataaataaattacttaaaaagaaaaaaaagaggttacaccagacaatacagaaatacaaaggactataatagactattatcaacaaaaacatggctacagaatggataacctggaagaaataagacagattgttagaaaagttcaatcatccaagactgaaccaggaagaaatacaaattatgaacaacccaaatacaagcactgaaattgaggctgtgataaaaaaaaaaaatctcccagaaaacaaaaccccaggaccagatggcttcacagaagaattccagcaaatatttagagaagagctaatgcttatccttctaaaactcttccaaaaa

SEQ ID NO: 45041 - DNA, 2301 bp, Bovine  19866880790037
  misc_feature (1)..(1): n is a, c, g, or t
nctgaatatctgaggttatttatatttctcccggcaatcttgattccagcttgtgcttcttccagtccagcgtttctcatgatgtaccctgcatgtaagttaaataagcagggtgacaatatacaaccttgacgtattccttttcctattcggaaccagtctgttgttccatgtccagttctaactgttgcttcctgacctgcatacagatttctcaagaggcaggtcaggtggtctggtattcccatctctttcagaattttccacagtttattgtgatccacatagtcaaaggctttggcatagtcaaagcagaaattgatgtttttctggaactctcttgctttttccatgatccagtggatgttggcaatttgatctctggttcctctgccttttctaaaaccagcttgaacatctggaagttcacggttcacatattgctgaagcctggcttggagaattttgagcattactttgagatgagtacaattgtgcggtagtttgagcattctttggcattgcctttctttgggattggaatgaaaactgaccttttccagtcctgtggccactgctgagttttccaaatttgctggcatattgagtgcagcactttcatggcatcatctttcaggatttgaaatagctcaactggaattccatcagctccactagctttgaatgtgaagtcaagtgggccttaggaaaagaaaaaactgctcacttatccaggcccagcctctctcacctgggacacaggtagagaagaaaaggctcacttccaagaaatgctttgctctcactttgccttgaattcatgaggccagttgcattagaagaagacctgtcgagtctgatgatgctcttttatctacagcaggttgagtaaaaatgatgttcagtttgagagtgtcttaaattctgtaattataataccagtttacttgaattctgaaaatatccttcttctaaacccacgctgcactgaaaatgacgtgcctttctcatccctcctcccgaccccagcagaccagatgagcagaagtgcacttccacagtgttcctctgcggtggtaatgtggacaaacatatgcagcaaggttcttttcaagaagattaagtgaagggggaagtttaacacagaagctcagcagttctgccaggatctcacttgcaaacagtcattaaaaaaaaaaaaaaaaaaaactatgtaggagggaacgggttgatgcttgctgtttgctacagggcatctcagaaatagcaaaggaaaccacagaccaggccaaggattgctgtgtcttaactagcttccctggggaaagcagcccccgatattatctgggaactggatggaaaatggcaagcacatgacactcctttctaggtatagagtgtttttcatattcaaagctctttaatgcttccctcaggagccttgtgagataagaggggaagtgattatatcctcagtttgtgaaagggagaatcaaagctgaagggtcaagcaatttgcacagaaaataattggagtcagtgtccaaccaacatcaggcctcaggggctcctggtgttgaagccagagctcagaaaaatgaggcccagagcctgagtttgaaaagaatatatcaaaggaaacaagtacccaagtacagcctcataattaaaagtgattggacaaaattcagtcacggtgcacaagaatgcaggcagatttagagctgaaatgacaaataagtggcacttcactgaaaattaatttccctgagcttatttctgtaggcatattggcatttgatggacttcagtacgcattgataagaaagcagagatgaaaatcaagaaacctctggatgcctgaatttgtctctaaagagtcagttgcaacatttcaaaaggagctcgagttaacttgaattaataaaagcttaactcaaaatctcctttcctccatatctagccttttcattgctttctttcctttaactcttttttcctgcagtgctgttggcaaaaagaaggagatttggggggaaaaacaagttacatcatctttactcaaagaatataagaaattttacagaatatataccaagcactcctatttcttttctgatagaagctcacacatgaatcagaatgtcttctccattcatgcttcctttgatatttggtttttaagaacacgctcaggtgagtcctccaaaatcaaacctgtgagaatatatatacacacgcacctggcaaccaataggggtgtgaagaagagaggtcagaggtcagactgcatgtgtttaa

SEQ ID NO: 45042 - DNA, 948 bp, Bovine  19866880803467
  misc_feature (1)..(1): n is a, c, g, or t
nacatgccctacaataattgaacataaggaactgctcaggactgacagcccagtctacagctcaacccagacctctctccagactcccagtatcattatatatccaacccctcatctgacaccagcacctacaatttagattgacctaaactgaaaccattatcttaactctcaagtttggttaatactgctatccatactgttcattcattagacaaatacttattatccttgaagtcagaaacctgggacacatcttcatctcctcctttaatctcactgactgcagccaattagtgaccaaatcttgtttgatttctcttcctatttctctatccttattactgccattgtggcttagacccttgtcatctcatgcctgatttataactagtctcctaaatagttccactttctctaccctggattccattttagcctttctccacataattattatgtgcttagtcactcaatcgtattcgactctttgaggccaaatggactgcaggccaggctcctctgtccatgaagattctccaggcaagaatactgggagtgggctgccatgccctcctccaggggatcttcccaacccagggatcgaatccaggtcttccacattgcaggcagattctttaccatctgagccaccagggaagcccatatacttattataatgattttctaaaatgcaaatcagatcatcatgtattctttagttactattttcatggtctatctagaatttaaggtcctcaaaatcttatcctttttgccttaagagttccaaacaatgaaaatatatagcattgtctgaatagtctattgggtttgcatctcagtatctttgatagggtaactcactgcttggaatgcccttctctccatatctcccctactcatactttccacctcttccatctactgaactcttatttcaaaatt

SEQ ID NO: 45043 - DNA, 4940 bp, Bovine  19866880829587
  misc_feature (1)..(1): n is a, c, g, or t
ntgagctacatacatctctgaaatagaagggttttgtaaaatatgaccaaacttcattagcctttgatgtgctcagatgaactaaattactgcaaaggcacttggcccctggaggtgttctcaaatgactaccaaaacttcatctgaaaatgtgtgtggaaattacacatacccattataacataaacttatgagtgggaagagatagttaagtaccatgaaagaatcaatatacacaaaattctagcattcccaaaccccaggccagtgcagctacataatatgccaggcaggtactaaatgaacatgtaggttcccttcctcaagttgcaggaaaaaaatttccttttttttttctcttgacctatcatcaggcttcccttatgactcagacagtaaagaatcgcctgcaatgagggagacccaggttccatccctgggtcagaaagatcccctggagactggctctaaagttgtattaccttggcttggagatactgttgtggagagtgcagtccctcagaaatgttccaggttcacatccagcaacttggtgctcatggcacaagtacagaccctcccaggtccaagcaccacctggagaggagggcggcagcaggagctggcaggatgaggacgcagcagggccgtaacttgttctggggaggcagaaagtcaaggcaggcacacagactgtgagccactgacgctccaggtgcatgctgcattttcttatcaggtttcgcttattaaaacacagcgtcagagataaatgattaggaatttcaaggtagccaccattgagcattaaaccctatgcccactgagcaactgcaagagttgcttgcccatgaagccagcactgtattataagtaatcaagccagaaaacaaaaggaaaaagataatattcacaacaaaaatacaactttgagttacctgcaagtaactctctaaccaaagatgtacagagaacattgtgaaatgctatgttgttcttgctgttttcattttgctgctaagttgtgtccaactcttgtgaccccatggactataccccaccaggctcctttgtcctaggaatttcccaggcacgaatgcttctctagggaaacatcctgacctagagatcaaacctgggtctcctgcactggcaagcagattctttaccactgagccactaggtcatgctatagagagacataagaatacacagagagatgtattatattaatgagtgaagatgaagatgaagatgatcattaacacatgcagtcttctcccaaaccagtctacaaattcaaggcactgccaataggatttttaggtataattaggcaaatcaatttttaaaatttatatagaagagaaaagcctgatagtatcaaagttaattcaggtaaagaacaaaaggagagatttccagatcggattttaagacaaggttttattcactcagagaaatagtgatagatcaatgaaaccaaagatatacagaaaattgtcatataacaaaatggcactacaattcagtgggaattaggcaacaaatagtaatgagatgattgaatttttgtctagctaagtgtcaatttagatccttacctcataccattcactagagtaaattgcagctattcaacagcctatgtctcttaaaactgagttcaggtgacgttggctgtaccattgtctcaatactcagttttgatgaacatatgggataagggaatagaagcagcaagggagtactgaaccaagagccagtcatcagaacaagaaaaatacaatttcccaatggcggcaaaaaattacaggagagtaaagttataaatcagtgtattaaatgatttttaaataaacacacaaaatactaattcatcagggaaaaattaacattggaaagttcaatatttgagatcagagaattaagactcagactggggtagatatttgcaatgtttctaattaataaaggatcagaattcagaatacataaagaactcctatgcatagattcaaatatgaaaaacaaccaacagaaaaatgggtcaaatgatagaaaaaggcaatacacggaagaggaagcccatattgatgataattattgaatatatatatacacatatatatgtatatatacatgaactcacttctagtcaaggggtgcaaattaaaacagtaatgagacacatcatttcacaccaaaaagaaacagaaaaaaaaagttggtaagaacatgggtagacaggaattctatacctatggggtaagattgtaaattggcataagtactttgggcaacaatggaaacagtgacagactttattttcttgggctccaaaatcactgcagacagtgactgcagccatgaaatcaaaagacacttgctccttggaagaaaagttatgaccaacctagacagcatattaaaaagcagagacattactttgccaacaaaggtctgtctagtcaaagctatggtttttccagtagtcatgtatggatgtgagagttggactctaaaaaaagctgagcactaaagaattgatgcttttgaactgtggtgttggagaagactcttgagagtcccttggactgcaagaagatccaaccagtccatcctaaaggaaatcagtcctgactattcactggaaggactgatattgaagctgaaactccaatactttggccacctgatgtgaagaactgactcactggaaaagaccctgatgatgagaaagattgaaggtgggagtagaaggggacgacagaggatgagatggttggatggcatcaccaatgtgatggacatgaggtttgagtaggatccgggagttggtgatggacaggggggcctgccgtgctgcagtccatggggtcgtgaagagctggacacgactgagcgactgaattgactgaataaagacaaaaattcatatgtcctataacttatcaattctaaatatattttggttacaatcattgcatatgtgatctaggactcatgtgcaggatatgtattgcagctctaattctaatggcagaatgtggaacctactcatatagctccttctacccattggatgaagttttctttatttcattttgtctcaacctcaaaagttacactttctgcttctactgctttagtagctggtctcaaatttttttgcaaatatattctatttttatttttttattgaagtatagttgagttacaatgctgtgccaatctctgctgttagagcaaagtggctcagttatacacacacatacattattttttatattattttccattatggtttatcccaggatattaaatatagttccctgtgctatacattaagactttgctgtttatccattccaaatgtaatagacatagagaacagacttgtgcttgccaagggggatggtgggaaacgagagggatagactaggtttagggttggtagatgcaaattattacatatggaatggattcaaatttctaatgtgctttttaatgtgcttactcaaattaaaagaatccttttctttttccatgttgcttttattatgttttccaatttctttgttcatctttgcttactgaaatatcacttatcccttccttgtctctaattttttgacacttatggttgcttatcagaattccactaccagtctaacagtcatcctcctattaaaagaaaaaaagtctttggtctcattttcttttcattctgttttttgctttaacggtctactgcttatctgtgacatggctaaaagaatatttgttttttatgtatcttcctcaggacttgatatgctccattagctttagtgagaactcatgtcttcattcaagctgagaaaatcctcagctattatgtcatcaaccccttcttgtccctcgttttctctagttcttctttttggaagcagtacagagtctccaacccatgagaaaggatgccacaaccaggtggaatcgttgccatccataaacaaccagcacatccaaactgatgtgaggaatagaatgtcactgctgtgtggaagcagggctcagagtcccagctgccagagccctagctccggtctttgcagatcccatatggtgtaaactgtttgagcttcagctgctgcccactgttctcactttatgtttctctctctgtgtctatcatctgtgaatattccactgtatgttccaaaattaattatgaaataaaaattattttagtatactttaaaagcacatgtatatgttggatgagcagaagaatttgtccttctactcactcactctatcagaaagacttatacccatggttctgaaatgcacagatattaaaaaccagatgcaaaagctagttagaattgtgtgctctaaggtacgaatgaatatattttgtagctgagaggtcttaaccatctgaatgatccctgaggaattttttctgctgtgttcaatgccatgttaatcggagaatgagccaagaatcctcatatcacccttgggatggtgacttacaggtgaagcatggaaagtattttctccaactctgcgtaaacaacttatggcccttggtaatttccaagatctggcctcccactcctgcagctcatcagcctgtcaggcatgccccgggtctggcctgaaggaggtggagttattagatttgcactcctttgaaaggccaggtggtcctcggccaggagcaggcttcacagtggacactacgcagtgtgggtaggagtacaagcagggggccacagggggcatcgaggtgtccgtgtgggtaggggttacaggggatagaggagtatcaagtcggttgctattaaatttgataaattaacctgaatattcatatctattttattaaggtagctcttcctatttgaactagacacttactatctcaactcaaaaactggaaagat

SEQ ID NO: 45044 - DNA, 1234 bp, Bovine  19866880912961
  misc_feature (1)..(1): n is a, c, g, or t
ntaaacttgaatatcttaaattgctgtgctttcccaattcttcacttagtatcaaagacaataattaaaagggaagaaccagcgccatgtgttgagtcctccccagagactagctagcactgcatggtattccttaaatacattatctcatctgctctgaattagcttagtttttggagttatttgaaaacacattctcagtggctttaaaaaaacaaataacaaaactggaatatcagtcagcagtaacttaggttattgaaccatctaactgtcttagttttttattgtatttgaggaagtgcctggctgtcttcctgaccttgccttcatctacaccactctttcctggagtctctaacagaaaaagggtgaatagctcacatgcttaactcatttattctctgttaatactggggaagcagctacttctgaaataggaaagtctctattacctcccagttatccttcctgctcctagaaacatatatacatgttcatattgggaagagagcgacccatgcttctctagcgagttgttgtggcagttttacctctttttgaaatacaaacaaaacttgtgtgttcagatattttgataaattggctggttggttgttcgagttaacccatttaattgttttgacattaagtcacacttttcttgctgtccatgtgtgtaatacactcctatcagtaacacctctcgttctctgcagtgattctcattgggaggagtgggatgggcggctagaatctttgctaattgaggctgacctactggaaaagaatgtacctcttgctttccccctttccctgtgaaggaacactgataattgctgagttggcacagccttatagtaaacttaatgtgatcgaggagagaaggaatgtgaggcttgattaggtagaagtccataagactgaatttaaaatataaaggtcccatatgactgtttttgattttaattaaacaagggcttacatgctttaatatatggtgttcagttcatagccagcttaaatttaggcatgagagtatggttgtactccaattatctgtaattggatgtcctctgtttacctttagaaataaaaaattaccagtagcaataacttttttctctaggaaaaacaatcatctgctttcttgctttgtttttaattatttatgacagcaaataaataaaacacatgctgtaattccagataccaatggatcagataattccat

SEQ ID NO: 45045 - DNA, 1233 bp, Bovine  19866880916330
  misc_feature (1)..(1): n is a, c, g, or t
ntctctcttactagctgctcttgggtatgtctgtctttttttatccccaatatatcacaagtagaaacccatattgtaagagcactatgcattacaattattattttgttctttttctctgaaaaacacaaaaaactgctgcccttttaaattaaaaaacccaatgaattaggttgttttaacatatgcacttctacatttttttcttggtcagtgggccttgaaagaaaaaggttttacctgtctcttccctacaatttattctgttagcttcagtatcaatatttttcttagaaacagtgcaaagctgaactttattatttacaaacttaaaccagattctcaatacctaaaattatattcaaaattatttaaaaacaataaccacacatttatagtatatttcacagcagagatgaaatttagttgatactgaaacctggacttatgtatgatgcctagctattggtgttttgtggtattttaggttccagaaaaggaacaaagagagatggaagttggaagaagaagaacacataaaatggaatcacagcagttaaatgagagggatgtaggagaactctgattttgccctcatgaattcgctatctgccccactttgactgggatgtctaggttagtccaggatgaaatgagaagacccagcaaatgctgtaatgccagggcaagtataccctcattgaaggatgtgtgaatcaaagagagctaaaactacctgaatgtcaacagtcaaatctgtcaagatcatttccctgtccctttctgaggagaagcctgtcatgataaacatgtgctgagtagtgggcaatgttctggaaaattggaggctgggctgtgatgggggtgaaatttaggagtttctgccaccactaaatttaaactttctaaaactagggagtacatccaaggctaaatatagttctatcttacatgacacagagaaaagccacccagttaattttttttaattgcattatgaacttgacgataccatgtcaaatatctataaatacttataagcagaatttcagtttgtaaagacagaaagctgactttttaatttcaatttaattgccattattaataccattgttgatctgatataaaatcccaaatggtttagtttttagaggtctaagagatcatcttccctctctgacacaataacatataaataattttcatagaagaatattctgcatatttatcaag

SEQ ID NO: 45046 - DNA, 1932 bp, Bovine  19866880964368
  misc_feature (1)..(1): n is a, c, g, or t
nctaggatgggcttgcaaggaaaatcatcttccatatttataaataggatacttgatgaattgagatttattcctttaacttcctcactaacttgtcctgatttgtcaggttttttactcatttgctatcgtaaaagtagtttaggcctaagccttttagctggagcaattatttccattttccatgatttatcttcagttttccaaatatacagtaaaacaatacaataatcactgcaggaaggaatgatcagttacattggatcatgttcatttaccttttaatttcatttaagggatattaatattagtcataaaagctttacagtttcagcacacatacatgcaatcacagaattaaaaatctttataccttttaagaaaagggttccactttgttcaatgtatcaaagtcaaatttaagtctaaagaaatacacttctattaaatacagcggccatcacttaccttaaagtttatggataaagttcagtactgatccaaggatgctggcatcaaagccctccctctcaactatccctagtttctgcatttctataatgtaccaccaattattctagatttataataccctgtctttaacttggtatataccaccttttggataaaaagattattggttgtttgagatgagatacaagaacaaaatcattcttgaggttccacctcgaaaaaaagacgatgtttgctcatagcagctagtttgacacccctgttttccttaggctagccttcacacaacgagcatgcatatacagccatggttcactgcatctgttctgaagttgagaactgctgcttattcaagtacagatgcccccatgtgatgtaaggagacagttgaattgcatgtccaccatgagaaaaggaaaataaacgatgaaacaaatgcagcaaatataggcagctggcattcagaacacgccaaaaagctaacactcatgaattgtcattataagggtctttctttcctttaaaaaaaaaaaaaaaaagtctttctttgcatattttgaaatttaagggtcccagagaatcatgaagtgccttgtcgtttttgctgctgactcctgatgacctctagctgttttttgcattgctgatagtaagttgaaaggcttttgttttcatctaaaagctttttatgttcctgcaccagacgagatgtattttgctggtccttttcatcctggtccagttctgcaactagttcctgcctaaaaacaaataccatacattacataggatggaaatattcctaccttaacagctggtgataaaagctctaaataattagaactttgattctgggtctatcattatacatcttaggtacactgctgctgctgctactaacggagaaggcaatggcaccgcactccagtactcttgcctggaaaaccccatgaatggaggctaggtacactagtcggacacaattatgggctggaatggaaactatcatctactcttctagcatacccatacaaatatcatactccttttaataagtgtaactgtacttagataagtagtgaaaacagataaaatggtataataaagttccagaaaatttcatttgttaccccttgtatgtaggaaggaagaaaaaaggctgggaagagcttactctggctccacttaaaagtaacccgtgaagttttaatcattcacatttgactttcacattcccgttttcatatgcaaagttgaagtcacaattgtattcaactacaatgcagtggtagctaataaaacattgccaagataattaaaataggtgctatccaacttaaatcctacttaaatccaacttcatttcctactttgaaaataatgaatgaaaaaatgaatacaaagtaccacccttgcaattatttttgagaaaaaccagagtcttttacagcctgataa

SEQ ID NO: 45047 - DNA, 1480 bp, Bovine  19866880982754
  misc_feature (1)..(1): n is a, c, g, or t
ntctgcaaccccatggactgtagccccccaggctcctctgtccatggaattctccaggcaagaatactggagtgggttgccatgccctcctccaggggatcttcccaacccagggattgaacctgagtctcctgtgtcttctgcattgcaggcagattctttaccactgagccatcagggaagtcccatttaaaataattaatcctcatatatgaaaaacatattcaaactttttagaactctgaacttttcttctgaacttaataaagacaatgacattgacaactgtggaattttatatgaacctactggccatgcatgtgtgctaagtcacttgagtcatgtccaactctgtgtcaccctatggactgtagcccaccaggcttctctgtccatgggattctccaggcaagaatactggaatgggatgctaagccctcctccaggagatcttcccgatccagggatggaaccgggcctcctgcattgcaggcagattctttactgttgaggctccagtgaagcccccatgaacctactacttttggaataaattatccctggctgatagataagcaaccgttatgggttgaattttgtactcctcccccaaatacacatgctgaagttccaagctccagcccctgggaatgtgatcttatttggagatagggtcactgcagatgtaattagttgagatgaggtcatagtggagcccggtgggccccaatccaatatgactgatgtccttatcgaaggggaaacttggagacagacacatacagggagaacacgatgtgaaaatgaaggcagagatcctggtgttgcttcttcaagtcagggaacagcaccgtttgccagcaaaacaccagaagctagaagagaagcataagccagattttccctcacagctctcggaaggaaccaaccctgctgacacctcgatcttggacttctagcctcaaggactgtgagacaataaagtgtctgctgtttaagcctccgtgtacagcactttattatgtcagccacaggaaactgaaacaataaccaaatttggggattttctcctctaggcttatttctaaattatcaagtccaaatgactcaaacaatttgtataaggctgctttgttcattctactaactgcacacacacagccacgtccatacacggagaggaggggctggacctggccctgtcgagagccgttgctgggaatgccccacagaccatgccgtagctgtagacgtcaacaggggtggtgttttcttactctcagtcttgaatcagtaaaagaagaagaagaagaaaaaaaaaaaaaaaaaagcacacttgcgtattcactggtttgggcccagtcatgattcctttaaagacgctgccaatagattttagtcattctctggcaaaggtttctcttcaaccgcaaacactgcatagttgcggaatgactcaccactttgagtaatctaattc

SEQ ID NO: 45048 - DNA, 939 bp, Bovine  19866880985368
  misc_feature (1)..(1): n is a, c, g, or t
nctgtgtctcctgtatctcctgcattgcaggcagattctttaccactgaaccatctgggaaaccccaaataataaagcctaattttgaattttaaaaaactatgtgaaactaagatgtgggcaataacagcatgcaagctattccagaggtggtgagcgctgctgagttcaagggttttttatgtctttggggaggagggcaggactttgactaatatttggtattattgagtcagaagcatgtgttaaaaataagagccactattaaggaaataaaaagacaatataagggttccaactaggaaggggctataaacaaaaccccatcatcctatagaaactaaagaaggaaataaaagaaggataaaggaaaccatcaacagaacccaagcagacctaaaccaaacctgaatcttttggaagagctacctcccaaagcagattgcttctttcaaaatgcaaatagttctctgttcgcacacagcacaccctgttgttgtcattatgatcacaaccactttttatttcagagactgccagatttaagctgccagggtctaattaggaagccccctccatccacaactgcagttatgaggctcacccaccacaggtccttattatcccagttggtgctcagtttaagaaagcatcggtttggaagagcataacaaaaaccatccccccaaaagagctcacattcgtaaatacacatggatacactccaaaaccctagagctcatcacggtcttttttgtcttgatcctgagtatgtactgtacagacccctgaagtcagatcttcccactataatttagctaaggaatctgttacatatgtctgcaaaaggaatttaatttttcagaacagaaagtcatagagttcaccagaaactgaaattgcaagggttggaacctccctgcctcttagcatcagtag

SEQ ID NO: 45049 - DNA, 878 bp, Bovine  19866880995257
  misc_feature (1)..(1): n is a, c, g, or t
nttcaggcattttagacatattatatttgtcagagagcaagcaaacaaaccagccaataaaccaaagcagcaagtcacactatcaattattaataacttgtaaaatgccattccctgtgccaaataaggattttatataccttaacccatttaatccttacagaatcctattctcagaatgatttctatataacatattaaaaaaaaaaaaaaaaaaaacttccaagaaggcaaatgactgaaacaagttcacagttgttgtttagtagccaagtcatgtccaactcttttgtgaccctacagactgtagcctgccaggctcctgtgtccatggaattctccaggcaagaatactggagtgagttgccatttcatagagctagaaagaaaagtttagactgaagttgtattaaaccagtacaactatttactatttatctatgagaggatttaggtgatttttttttaaaagtcaaagatgctttttgtgagcagttttctatttgtattattgaaaactaaatgtgtatgcgaaataccagcattttaataatttaaaaaatcattaaggaagtgaaaggtaagagaagttagtgcaccaccaaaaattccacttttagctctttcttcagttgcacaaacttctttcccaccttccttgacacacatgggctgtctcctgtgtaacaaagaatgataaaagaaaggatgctatcccaagacgaggtacagcctctctcaacacctttcaggttattctctcttctggaatgacaattccttatgcatctttccaatcatctgtctttttctataaagattctgagaatgcctcctctttcagacccatcagcttggtaactcccatcagtaaatga

SEQ ID NO: 45050 - DNA, 1453 bp, Bovine  19866881030841
  misc_feature (1)..(1): n is a, c, g, or t
nctctgtccttactatctcctggaggttgctcaattctgttcattgagtcgcaatgctaactatcttatcctctgctgcccccttctctttttgccttcagtctttccagcttcagcatcagtcattccaatgaatattcagggttgatttcctttagaattggctggcttgatctccttgcagtccaagggcctctcaaaactcttctccagctatatgcatatatatatatatatatatatatacatatatatatatatatgtgtatatatatatatatatctccccttcttattgggacctcccaccctaccccacccatctaggtcaccacagagcaccgagctgagctccctatataaatatcattgccctgtgcacttttaaagttttcagatactcaactgacgaactatgttagtaggttacctagtttatatgatttacatagcatttacagtctgcaaaacattttctaccatcttatctcatttgggcattataaccactgtattcaatagaaggtaagttaaaatatattctcatttgaacaaactgaggctcgcgggcttcatttccagcaaggaacgaagccagaacataaatccagagttcccattttaaatccagagtcttttctcaccaaaaatgaaaggccatcaggtgggaagctatgtaattatctgtcaaatgaagaaacaatcaccattagggctgtctgaaggggcactctgaggtatagtggttagaaaagctttatttaaaaaccaaaccaaaaaaaaacgaaagaaaaaactggtgtttgagctgatttttgagggaatttgtgcagaattgttgaaggtcacagtttgagttagtgcaatggtagaagagagagaccgaggaagagaatttaatagcctgtagtttatcagagaagaccattatagacaaagcttcagtggaatcacagatggtggcaaacacagggttaaccagcagtgaggatcatcagaccagagcagacagattgcacctctgacctctactgtgggaaggcctacgtatgtgtgccatggcgcatggtgtcatgcagagagccccagtcttcaaactggaagtccaaagctggtccaaatatcgtctctgccactgacatattcttttgggggaagcaagctttttatcctctgagagcttcattttctatgcccacacggctgccttgcctggttcacaggaaactggatgagtaaataagaaaacactctatggaaggcctctcgtcagccataaatacatgaagcagcacctaggaagaatggagcagaatgctggctcatgaaggggctctgcgtgatgatctactttaggtacttactacagagcaagtgaaacaaaactcctgttccatttgtagtcctgatgaaatccctttcccttttcaattatgaagtcaataagcattca

SEQ ID NO: 45051 - DNA, 765 bp, Bovine  19866881053817
  misc_feature (1)..(1): n is a, c, g, or t
ntatctaagttcttgatttatgggatcctggagaataatgcatcttattttcaaacagtcttggggtagggcagctctggtccctctcaatatgattctttccaatatcttaacttccgtcatcacgaaatatttaccatctaatctaaatcctgactgctgtcatgtaggcatatgtccttttggtcagtagatgctagtgtacaatttttatttatacctttggaagcgaacaggaaatacatctgaatgatttctgactgctgacaagccctaataactgatagttccagacattgaactgaatgtcctttgacagggatggctattttgaggggaaaagacagaaactagcaaaaacttttttttcaagcaggtgtgattttatgatggcattttatgacagaaactaaccaagtgtcctgtatatggtttatgatgttataagctcctggcctgagatttctttctcattattcatgtttatttgacttaaagcaaattaaaaatcagacaagaatattgtgatataattttgattttgcagatgtaataagacacctgagcaacttcagagaagttggcttcttttatttgtgctctttagttctgttctgaaaaatgcatttgcattttcagaggcgatattgtgcttcgcagtttggcttgtgcaattttgagcacttgatccgcacttgatattaatggcaaacaagaaacctctgtaggttataattatttttctagctgcaaagattttaaaaa

SEQ ID NO: 45052 - DNA, 1479 bp, Bovine  19866881053895
  misc_feature (1)..(1): n is a, c, g, or t
naaatattaaataattagggttatggctatggaagcccagccaaagctaagtggcattttcaggttgtaaaacatgttagcaaggaaatctgggattgaaattaagagttcttaacctcttcctggggcttggatcagtatgtccctctgtttccttaatcacatataaccattggattccttggcaactcctaatccagtgctcagttaggcaaaatttggaagcctccaggcaatgacctgtttttcaatgggagaacatatttacttccagctggaacacatcaagacaagccatttctcttatagccccgttcttgccaaaagactggaaaataacttattagtgagtctaacatctcaagagccacaacaacagctgcactgaatatagaacacacagaatgactgaacgctgtgaaactgggatgactgagaccaatgcaatgataattccaggcctcactttgatcttttcaaccagagggcgagtcggaaggaaactttaacacctacatgatcagattgatttagctcgtctgttcatttgtacactatttttgtagcctttgcatctgtgctccttcagataatatctaaattaataatagagacttatgactgaattttatttttagaacctctctatagttcacattttaagcttcttaattaggccaaacatcatactgggaatataaactcagtttaaaaatatatgttattagtcatgaaattcaaatgctcaataagttcaaaggaaaccaggttcaaacaatatattattttgtaatatgcactcccatcacattactgaatatttagagatctactgaattgagtgaattgattagaaattatatcatttacgaaatatatgaatttaattgcaatggtatttgcttttcagccagttggcagcagcatttttggaaaaatctcctatatcctggacaagtgtaaaaaagaaagagagaacatttcaatcctttagtgtttcatttctttaaaaatctcattcttgtagtttaatacaaagatttaaaagttgaaagtaaatgcttatcacccattcacttaagtgctgctaagatactagacagttcaatctttgatcatttagaagaggaaaataggttatcttttatttgaaatttgaatttgtttccaattttgtccaattatggcaactggtgggcatcctctcagcagtgtttcagtggcatatacacagtccgaatgttgagcagacatttaaaaatatttattgaaatacaatgatatatattgtatggcatatgagtactagttacagagatgctgtaaaactaagctgctgctgctggctaagtcgcttcagtcgtgtccgactctgtgcaaccccacaggcggcagcccaccaggctcccccatccctgggattctccaggcaagaacactggagtgggttgccatttccttctccagtgcatgaaagtg

SEQ ID NO: 45053 - DNA, 1491 bp, Bovine  19866881080196
  misc_feature (1)..(1): n is a, c, g, or t
nacatttttgcacattgtactcaaagcaatgagtgcaaaagtgatcattttcttattgtttgtgtttctcattggaagaagtaattatcagtgaacaggagaatggataaatatatgatagcatatgtaggcaatggtatatgatacagcaattaaaatgagcaatgatatggcatctccaataacctatgaaaatatatcaactccaaaagtatgctaacaataataagagcaaatacagtgtttacaatgtgtctggtgttggtccaagtgccttacatacattatttaattttcttcatatttatatttaatacctaccacaagcagaatagattgacactattacaaccccatttaatagattaggaaactgaggcatagaaggagggaagtgactcactttaggtcatacagcttgttagtgtcaaaagagttttagaccagtctagatcttaatttcttaatttcattactataaactccttctgaacttttttcaaaattgcatagtataataccacttctatttatttagaaatggtaaaaccatatcatgtaatgtccaaaaatattcagatatattatagaattatagaaaacataaatcataaatatttgcaatttaccataatactttataaaaattgagtatatttattttatatttatttaaaattgagtatatataatctgcttagtatatatacacaaatcctatattctaagtgttttactctatcctttacccctgattcaaatccctcccaggtaaagaaacatgaggtcatcggctgtgactgaagacctcacaatgcacttcccgcttcagttcactcccctccggcagtgaacagctgtggtcggtacagcagtcactttcagcctcagtgtcaccacagccatagtagagcgggctttgatatgtctgcgactatagcaggagtgtttgaagagactgagagtggagagaggtggggggtcaagaaagggaagccaataccaccccttctcatatcccgcttcaatccaccccccacctccaccccgatcccagctttaaatgggcttgtgcagtcgaaaccaccagtttgggcttcaccacaggttcagcctacaatgtggacacttcaaagacttcaaaggtaggggacacagtaccgtgtctggagtgaaaccaaaaatgtgggatttagcaaagcttccagagggtggttcaagggcttgaagtgatttccacttaaatacagtgtaagtgagtgaacaaaaagagaatcaaaaaataataggcccgaggaagaaaaaaaaattttcatttttctcttttgttaatgctatagaaatatcaatccagagggcttggtgagattttataaagcctgatccatgaatctgagcctgactttcagcagcaaaattcaggaagctctacttttatgcttttctactcggttccatttttaaataatgataggtaaaaaaagaaaagaa

SEQ ID NO: 45054 - DNA, 831 bp, Bovine  19866881099621
  misc_feature (1)..(1): n is a, c, g, or t
natgaaattgtgctgtacttaagttggtttcctcaaacattaagagttaatgtccatcctgtggagatggaaagtgtgaggaggaagggggcaaggcaatgaatgtttagttgaaataagaaatagataaaactctgaataagttggtgctttttttccccatagaactcatttgggttcatcttatatttaatgcttttagtgttgcgttatagataaacagccatttgaaaacatttatcagatcggattttcactcaagatggcagaatgaaacaattggaacacgtgtttttactgctctgtattaacataacacatttgaaatgttccaccaactcttttgaaaggagactagaaaaagggaaaaagacaaaagcagtgctctgagagacaaaattaaaacagagaactcccttcacctggttgattatttcagggcaagagataaggctcctcattaagtacacacatcaaagaaagtactgtgtgaggaaactacacagaaagaaggaagggaaagcaggaagcaagggctgtggaaatgtttctccgtttttctaattattcgcttcacttcctagaaaagaatggctgcccacaggtgggttggtctagtttaacatttacctcaaagtacaatgcttattgctggtggtggtttagttgccaagtggtgtccaactcttgtgatcccatggactgtagccctccaggctcttctgtccatgggatttcccaggcaagaacactggagtgggttgccatttccttctctagcacaatactatcgcctaagctttattaacaaagtcaaaattatcgaggaaa

SEQ ID NO: 45055 - DNA, 737 bp, Bovine  19866881102691
  misc_feature (1)..(1): n is a, c, g, or t
ngcagtgtttttcatcttagcctgcctggcctcataaataaacaaggatattgtgtgcatgggttggttgtggctcttaggacttgagaggtaaaggaagcacaatttctatatgtgaagggactgtgagggaaatgcaataaactttcaaacttcagcagtggaggaactgggtttacttttaatatttatgtgtaatcttccaggattctgtgaattagtcttttctttctattctgacctttgctttaaagggaatgccagtttgtgtctgaaacaaaagttgctgtcactatctgtttttctttctctgtcagataaagttaagagaaccagcttttaaagtgagtttatacaatcacaatttccacacattcattcaacagccccatgcaataaaacagtgataattcaaattaaatatgtcaaggcaatttaggtcagaaaattttgattttcttctgtgaatgagtaaggaaggaaatcctagatatggcatataaaatcttcaattctctttatgaactgtgctattcaagacatcttcctgacaagtaagaaaaatctaaatttgaccattttcattgatctcatagatttgtatctgcttggctggtatgatcttaaataagtagaagcagcaagtaagtgggtggaaagtttagaatacctattctctctctacatattaatgctggtgttgaatgcaccagtgttgtgctcagttttcttgaaat

SEQ ID NO: 45056 - DNA, 4080 bp, Bovine  19866881106088
  misc_feature (1)..(1): n is a, c, g, or t
ngctatgacattgggtaaaaatgtctttccctacctgtttaccattccatgttaagagatctcatttcttcttattatttaaaagacatgttactatacaaagtagtgccatttggcccttataggacagggtcatacaaaattacctatataaacatttctagctgtagaaatcatagctcttattcaataattgtcagagaataatttatagaatggtgttttgggagatcattagtcatttgacttctggaaaatgggttcatttggaggtatacccttcccttctccactttgtccttcatttgaatctttatgttgcatctgtttatttgatcactgctttctagtaaaaacgtgttaacatggaatgtgttttttatgtgaggcactaggaacaaaaagaaaaggagactaagaaaactaagatgaagccagaaatgagggaggtatacaaaataaatgccaggggactttgctgtttgctagaatcttgactttgaacatcataataactaagaaaaagagagaatgtcttcctagctattctttgactatgtaagatttgggagtccttttctagtcttcctctaagaagcaggtgactcaaagtagccaacttgaacttcctgggctactttcttctcagcaggtccattggacaacaggacaaatgacaagccctagcatgttgggctttctgtgattactccctagtctgtcttttgggctttgctcccacatttctttcagattccagttgagtgggatagttcacttctccttgagtacattctctgactcttccttttgatacactgtctctcctaccaagcctgctctctatttccatcctccaaggctgagcccaaatgccacttcctccatgaagtcttccagaatgcccacaaccagaactgacttttcccaacttctcattcttgcttattttccccctagtacatttagcttgctatactttctatataagcagcttagtacatttagcttattatactttctacaccttcttattatactttctctctctatatatatagctagtagagagtataataagctaaatgtactaaaagaaaaaaaatatgtatcttattgcctctgattataaaatactggatgggaagtatgattcaatactaatacactcaatattaagacatctaattcaatactttacatataattggtgcttaattcatgattcttggaatgagtgatgaatgaatgaatgaattttagctggtaagatttgagattcttcataaactgaagtggtttggctttttccccaacttggagtgagctattttttagagttgtatttgattttaaaaacagaattaggggactataaaaatagcctgcaatgagttatttgagcagtctcactgttttttaagagtggtaatgttccttttatgatgcttttcatttatagcatggccttatagctggctcttttttgaaacacaatcccattattatggctgccttttgcctcaaacaacttcccataacattagaggtataatattgcaagaatatttttctgacagagagatttctggtttgcagtcaggggggatacgggatgtcaaattgctcatcatttctggatctgaggggaagtagtttgaagattttattttacctatgtgtttctagccaaccatatcatgaaaaacatatttccctatataggacaaggaaatggctcaaataattctcacactttgctgaaatccaaacatgaaataggattgattttgttttctttcatttctttggatgatccaaacagaaaagagtgcatgtaagaagaaaccaaaaagctcagattcattttgagagtttgttgttgaacttttttcaaagagtggtgggtacgagcctcgaagatttctatgtctggatattcaaggatggctttggaggtgttggaggagctggagagaacagtgggtggaagtaacaagtacagaagactggagggtgaagcctgaaaaaaggcaaagtctgcatttaggatcctccttgcctcattggaaaagactgatgcttggagggattgggggcaagaggagaaggggatgacagaggatgagatggctggatggcatcactgactcgatggacgtgagtctgagtgaactctgggagttggtgatggacagggaggcctggcgtgctgcaattcatggggtcgcaaagagttggacacaactgagcgactgaactgaaccgaactgcctccaagtgctcggcacctcttaccctgtaagctcccttggcaccatcccctctgtttaaactgacttattctccatctagccccccaggaatcagattctttttgtcctccaggacaggactatttcttacctgataaaccaaactaggataattggatattgtgaaaaagttgaaacccaagtactcttctttgctttctgggcaaatcagaaagtgtgtgtatgtctgtgtgtgtgtgtgtgtgtgtgtgtgtaacaacgctgttaaggcagtaacaagattggatggaaagaccagaggctttggacttattcatccattagtttatgctcatattctgctatgtggcttaggtacagtgctggacatattcattctcttctcagaacacctgttgccccttgccctatctggaagactgagaaatggattaaatgagctggtaggaaagggctgagtatagatgagtacgtatcggccctaaaaagtagagcccgtggaacactacttttgatggttaattctatgtgtcaacttgacctgggctaagggatgcccagatagctggtaaagcattatttcctgatgagtctgtgagggcatctctggaggagattagcatttgaatcagcagactgagtagaaaagatttatcctccccaatgccagtgggtatctttcattccactgagggcttgaaagaacaagaagacagaggaaggataaattcactctttttgcttgagctgggacactcatcttctgcccttggagtcaggactcttggttctggaaccttcagacaggggcttacatcatcagccacctaattcatggacctttgcactgggactgaattacactattggctctcctggttctccagctcactcacagcagatggtggagcttttggcctctataatcacaaggactcattcctgtattaaatttcctcttatgtctgtatctacgggctttccagatggctcagtggtaaagaaccctcctgccgatgcaggagatgcaggagacataggtttggtccctgagtcaggaagatcccctgggaaggaaatagcaacccactccagtattcttgcctggaaaattccatttttccaggcaacagagggacctggcgggctacagttcatggagttgccaagagtcagacatgactgaggaactaagcacaagcacgctatatctatatcctatttgttctgtttcagtggagaatgctaatacgctgcttctctccactttcctctgcctttcttaatagagacctggtgtatcttgcttacctgttttttttggtgtgtggtcccacataggaaacaacacctccttgcttagccagaagtggggtattttgtttcttagctcacactgtacaaagagccagctattctgcactcaaatgtggctcttttaacatgtgatttctgcagtttgaggttaaaaaaaaagcaaaacactagatagctaggattgttattggaaaataaactttatgataacgaactgtatatttttatatctattttgtgtatgcaagagataagcttaaaaatacaattattaataattatatttcaactttattataataatattgcatacatccaggaagaaagcagagaggtatgaaaaatgaatgaataaatggatgggtgaggcttatccctcatttgtaaaagaagatacagcaattcagcaatggaggttactgcagcagtattgagctcctggggtatagtgtttactcagagataagtcagggagttttatctacta

SEQ ID NO: 45057 - DNA, 1228 bp, Bovine  19866881107589
  misc_feature (1)..(1): n is a, c, g, or t
naaaaaaaaatcagatgttcaaggtaggttatatagcagccaagaatagtagttcatatcagcctcaagaaaggccgagcaccttagagcaagagccctttaatcaaaaggcaatcttcagggatgagttagtagtactttgcctctggcactaacccagatcccctagtttcattgtatatttccacaggagtctaacgacgaaacacattagatcttctcacaggtgcagtagaaaaagcattgctttccaagggtcacatgactcttctaaaaacaagggggtgaaggtcaacagcaataagagcatccaaaccaacaatgaattctgcagctaaagtctcaatgaagaaggggagagattccccttttcataggaacgttcatgggaaactcacaatgtgcaattgtgaagaagagcaacaggaaacagtttggttttttcatgggaggggttggggtgcagatctttgtttaaaaattaaaaacttacccttttagtcaggaggatatccctgatctttaaccagaaaagctttaaaactgtaaggaaaaaaataaaattcatttgagggcaaaatattctggtactgtaaagatttacattgatccagtgggttttatctgtaggtctagatctataaaggcacaagcctcacttcataggaatgtggttcttcatcatttgcacaaagaaaggatggattgcatctaattgagttattttatttatttgtattttatttattttcacataggcagaaaaagaatgcacacacatatgcagaaacaaatagcataaattttcacttttcatatatatatccgtgtgtaaacacagaagcaccctcacatacatccagttttgtagcacacgtggaagacacagtaactctcctccccacattacggtctcatgaccactcccccaacatgggaggcgtccccgaaacaggacaggaggtaatatcttagatatactgtgcctttgaaacagctgcctcttccttgggttctgcaaggagcctctagtcaaacaggtaaaaacatatcagggtgaatcaggatgaaaggcctataaatatgccatatttgtgtttttatgttgggtttgtgttttgttttgttttgaaccttcactgatttgggggaagtaattaagtgctttggcataaaagatctcatgctgggtgataggctacatgggaaagagaaattagacaaaagg

SEQ ID NO: 45058 - DNA, 949 bp, Bovine  19866881149998
  misc_feature (1)..(1): n is a, c, g, or t
ntaaggcaaacctggaataagtttcacacagactcccctttcccaactcatttggcaaaattagaatagtttctcaggaggagggattggaagccaaaggcattaggatgcttttataagtcaccttggtagaagtgagttttttaccatgaataaaacacctgagaaagtgctatccctaagcctttaaataagaaagcttccaaacatttggagaaatcatccgaagacagaccatttcaataaaagttccctgattcagttagtttcatctttgtctaccaaagtttttttaagctttttaaattctcttgtgacaacaaataattatatcatctcttccctgactcctcccaaattataaatccagttgaatagatgataaatacccaagcctgtacccacatgctgctaagtcacttcagtcgtgtccaactctgtgtgaccccatagacggcagcccaccaggctcccccgtccctgggattctccaggcaagaacactggagtgggttgctatttccttctccaatgcatgaaagtgaaaagtgaaagggaagtcgctcagtcgtgtccgactctgtgcgaccccatggactgcggcccaccagggtctccgtccatgggattttccaggcaagagtactggagtggggtgccattgccttctccgtgtacccacatattcccattctaatatcctctcctgggacttttctcttgcctttccttctgattacttgatcacttgaccaaccgatttcagcaaacttccccatttacaaaaaaaatatgacactggtcagatcagtgatttcagttgggggttatggtaatttctctaaaataagagttaccttaaagtttgatttccaagtatataatttagaagcagctaaaacaaaaggaactctgccagggtaaaaaagaaatcaacttaacagcatag

SEQ ID NO: 45059 - DNA, 1053 bp, Bovine  19866881240829
  misc_feature (1)..(1): n is a, c, g, or t
ncacagatcagataattcaggcacaaatcatatgaattaaaactatctaagcagacaccatgttggtatgtgggaaaaaaattatattttgcacctgatggtctgcaaactagcagtttgccttccagaaggggagggaatttcagtgacaagggtcttctgaaaccgtctgtgtctgcttccctgagattcaaaaatggccttgtacattctctccgagcctcaaggcttgaaagtcatccaaaagctggggaccaatctaaagtaaattggcttatacccaaatttaatgaaacttccttagaggaaactgatttccctcattatcctttatgtagataatatgtggaattaattctccttcactaagttatcattacatggagcagacaaacacagatataatattattaaaagtaatggaacgagttcatccagtgttaactttaatggtttgaatcttctcaagtgtcccagagaaatgcctctgtctcatcgctttagcagattaaaggtcagggctaaggttaccacatttcatgctcactaaagaaggatctgcactctctcaggccttactcccttggagctttgaatgaagctggcctaagagcaaacataactcgtctaaagacttctttccaaccatagtggtgaagatgcagaattgtatttctctatatatattttgcaaagtaattccaaaatattttatttttataatgaaattataaacagacatatatgagatatctaacctttgttatagattcttcctttctgcatcttggaagtagtatttcttagttaatattcaacaaacatacttatatgcttattaatattcagagtgagtaaaggctgggaaggtaacacctttacattttaagcatcaatcttgttgttcattttgctgaagtgaaacctaatcaaccctttctttgctgcaaaaaagcttttactaagcatctctcagctgtataaaaaaagagaattccagaactgtaagtgcaatggaaagaatatacacttacacacacatattcatacata

SEQ ID NO: 45060 - DNA, 1049 bp, Bovine  19866881295614
  misc_feature (1)..(1): n is a, c, g, or t
ngtttggtcgatggagatagcactgagtggagactttatctagcacagctgtgcaaatatcctgggtaaaccaggtcacataagactcatattcctctggcagtactcatggttgcagaaaataggtctaagagccatctcgttctggcccttttccaacccagtgatgaatccgtttatcaaaatcactgtcacgtaaatgttgaaatgttctaagaccttgaccagggtattccttaaactttaagagatggaacactttgtaatgtattttcaaattgaaagtcacttatcctcttagcaccccaaggaggtttacgaaccaaattcatgctaagaaatattttgaaaagaaccagttaggcttagatggaaagcatcaacacagtggattgcagtgtatttccaattctatctaaaataggttttcataatttaaagtttagggttttatttactcaggggaaaaaaaaaaaagtaaatctgaagtactggaaacgggatgcaataaaactctaggatttcatccaactattgcttggaaatgaaaattccccaatgggaataggtctttgaaatgggacatctgggttttactaagtgggtaattaaaagtttgaagtcttgcctggaaaatgggacaaaagctcaaattaccaagataggtgagacattccccactgcctttatcataggaatggcaggggtccaggctctaacaaagcaaggcagagaatgtgtggagcgttaagccacccaaggataaagagaactttgaaatctgatttctaggggatatttttcagaaagcatgctatatttcccgcagctaatgacacatcctctgttccaagtccagcacgtggtgactaatgcacagccaggtaaactgtcatcttgaaacaccctctgctctttagcgactcactaccaagacctgggctttccagggcaatggccaggcaccagctcagaatgaaagtcaccagctagccgttcacctggatagcctcctaaggcatatagacgcacgccaaattcaagtagaa

SEQ ID NO: 45061 - DNA, 799 bp, Bovine  19866881341634
  misc_feature (1)..(1): n is a, c, g, or t
ntggtgatctgggttttatcatagttcatctcctcaccagatgagtttatgttttctgtgtattatctctgggtccttctctccactgggggtagtgatgcctgcgttgctgtgatgccaggatatttgagaggatcccagaaggcagcacatgagaaagcagctcatggaccataagcacaagccaccagttaggtatcatcatccagttggtgagacggtagcaactggtcttgttgagtgagaaggcacctgaaagccacaaccagccagtgttatttttaaatcctcaaattttcttcatatacatagatttttagaactttgcatatccagccatagcaaaaacacacagctgatactttagatgaaaggtaatggggacagtctgctttatggctacatagggggaaaggtgggggtgtgtggacccacagcaatcccaggagggaggaagaagatccttcccgggccaaacatcatacccctgcccctgtgcttcccagcttttttgtgttcttgcccatctttggggggtggggggagacatcctagctagtataatttgctgtggatttgggattacaaaaataagatcattcttggcaaaaggttccagatgctaggaaaactactacagaataagccggctctgcagagtgatttgattcaaaatgtgtccaatttctacccaggagaaggctcctgaaatgtctgtagcatctgcgggctctgagttactcccgtccagggccccagatgctggcaggcatttccctctattaaatcagtcttaaag

SEQ ID NO: 45062 - DNA, 927 bp, Bovine  19866881343913
  misc_feature (1)..(1): n is a, c, g, or t
naaaagtagagaaaacagcttggtctccataatcaataccttaaaactttggattactataaattattcagattttgattgtgcctatctgtgctttgtctaatttgagaagaaaacatttctcttttttctccctaaattctaatttttatccagcagatatatccagtattttacctctggttcatagagtgacagtcataatctatccttgatatttaaaatgtctaacaaattattccatggcataccatctctgttgtcagactaggtcatttcaacactttaggagatttgcatcactgctatgagaacatgagtaatgtctcatgtaattatgaggaatgatactactgtatttcatatgttcctctagaggaatattggctgttttcttcaagattatctaggctctgtgaaggtagatacatggcattgataacagttgaaattcagaagagttagcacatctttgtatctacaaatttccatatatgccttagtgaaaataaagcagcatttttgctgcattcagatctcagcaaggaagtaattcaaacatactctttaattttcacatgatttgatttgtattaaagaaattttaaattgttatttacttttttatatatagtactttccaggagcagatgagccgttacaatatccttgtcagtattcagatgaaggacagagcaactctgctaccagtacaggtaaatggatagattggaacgtaataagctaaatgtttgtgtctctgttcctgtgaagtgataatcaagaagcaatgactgatgtccctttttgcattttaatttattcctttaatatgattgcaatttgaatttttcaggtgcatcattcttcatgcaggtacccagggttagttaattgaaaacccacttccaagttttgaaattctta

SEQ ID NO: 45063 - DNA, 758 bp, Bovine  19866881371470
  misc_feature (1)..(1): n is a, c, g, or t
ngttgtatctatacaataaaactcaaaaagacgtggtttgagtagtggtgaggatttctattcatttgtgccaagttccacattatatttatctccttgctatcactcaaacacaggcttgattcattaaaaaaagtggtctttgtgttaccctgagtccattcttccggctatataaaattaactcgagttctccttgcctttgtctcaaagtttttttgtttctttgtattctctagctgtatttcttctattgctcaatgaatgaggggaaaaagcacgtaagaattcaatgtgtaaattctgagtctcaggtcctcagagagcctgtctctgcctcaggttccttagaccaagcaataaaaatgctgcatgaggtggatgtttctagactgtgtgaaaatgcctcttttctcttagtcttaaattacaggattatgagtcaagttaattttcattcagccttatctatttggaatggaacatttcaaatttaaaactatttttcttttcataagcctcaaatgaattatatttccatgtgttcaagtaagtggaaaaaagtaaagtgacaattgattgtgtcaccttagccaagaaacagcagaggttgatgggctctggtggagatccatgattgggtcctgtaataggatgacccaacctgtcatgagaaccacaaaaactgccagtttggcaaatcaggatgatcatgggaactaagtcagatggaaggacagatataatgccatttatag

SEQ ID NO: 45064 - DNA, 1263 bp, Bovine  19866881375974
  misc_feature (1)..(1): n is a, c, g, or t
ngtataaacccacaacaatcaaaataaaaacaagttttcacaagcccattgcgaagctaaatatagattttttttttttcagatggaccccactcaccttcaaattcatgacttttgagaactatttcaaacattattttcaaaaagaatgtcagtcaaaagaaaaatagttttgcgggggagggagggtgaggctgggcttgtacgtgtgatgggggagcatttctctgacttagctccccctgcaaaaaccatcaagctgtttttaaataccatttgtggtcacctgccctggtaatattttctaattgtggtcaaaagaagctgactaaatgtttgtgtgttcgctccagggggaaactgtcagaagccaggcccttagtggatggccttccgcggtgttatttctcacctggttcttgggtgcatctgtgtgagccccctctgcgttctgccactgtaaagagcgtaattcaaactggaaaccaaagcactctggctgcagcaggggccatgcacacggctttttccttttcctgttcctctggcctcacctctgtgcccaggaggaggcagatggcaggggctgggatcacctggggcctgagggttgccccagaaagatggccccttgggtcctcaacgtgcggtgagggctttgagccaggacgtttgaactgctgagcaatttcttattaagacgtgagcacccaagtgtcagctggagccctaggcttttatttgtggtgggctgttttcctgtcacggttgttgtggttcaccgtctacctgagtgttcaaaactgctttgcagaatccagtggctgagctccagatgggtactgctccttccccacccaccggtggccccccgggacaacaaaccccacgtgcatctcctcctaggccccactgcattcccatccggagaaaaatcgtgagaaaacaggcatgagaaaacacattgtcagatcttcagtgtgtatttccaggaatggtactttggggaaaactgagacaggtctccagattgctgtgccaaagaattcagactgtgatttcccgaaacagacgatggaaatcaattgtaaccccatgaagtccaagaatggaactgggacttcaaaagccttagaatttggggaaccatgcctcatttatgctaaggaaataatcatgaatgtgtaaaacattttcaaaactaaagatacagggatatttattaggagttcacctagataacaaaaaaggaaaaaaatctaa

SEQ ID NO: 45065 - DNA, 1157 bp, Bovine  19866881457003
  misc_feature (1)..(1): n is a, c, g, or t
nttcaataaccaagttggggaccaatgaacagacatgaaggattaggaactcacagactggcctgagcaaaaactccccaactgattccaatctcaatagcaagtgtttactcaaaaacactaattagcaggcaaaatgtgggttcatgaaacagtactctccagaaagtgaggaaggatggagaatgtggagtgggggcagtggggggaagtaagaccatttcccttgtgcgaatgatgagagaattgcttgctcaagggcaaattttatggaaaatcatgatccagtgctaacagaggagaaacctttccaaagagttaatggagcagttagagaaattcaggttcagtaaatcatgaggactgggagtattgatctgaacatcctggtggatgaaaatatggagctgagctgctgaccaaactatataatagaacagctcttccacagaggatggggatttttagttgctgagctgatgctgcagtcttgcccacccggctctccctctcaagctggttctctttaaaaaaatgctttccactctgttctggaagttggtcgactaacctcccactcacataactgcccttctcatctctgatgagttccaaatccacaacctccaggccaagctctcatctgacctccagggggacagttctgggtatctcagggaatcgggtaactcactgtcacaactaaataaatgctcatcctgcccagagccctcaccaccatcatcaatgaaaaaacaaagcaatcaaataaaccataaatcatttcaatcgtgtttcctatctgccaactttgaaaatatgggtttacctgtaatccctccctttttcagctcctttacccaaactgtcaataatatcagcatttcaccagttattccagtgatttctctaattctgttgtgccatctagagaatgagagtaagagactgacatgaagactgaccaaaaaccatgtgtgtggaacattcagaatgataccaggcatttcgttattacacacaagccatcattttgaccagcactggcactgcaggaaactatttgtccaattctttcctctagacactccaccagcatcacatcaacaccttcattgcctcagccattggagtttgggatggttaagtttccaagc

SEQ ID NO: 45066 - DNA, 1335 bp, Bovine  19866881563981
  misc_feature (1)..(1): n is a, c, g, or t
ntggagggaggtcctgccctaggcagcgtgtatgaaatgtgatggttaaacatctgttgtggctgcactgcagatatcttagggaaggattctgagagctccagcaatggctgtcaagcttagcagatggcaggatggctgtgggaacagactggtgattctagacttggttcgtataaaacagtctgaggagggaaaaaaaaaaaaaatgtagccaccttacagcattcagaaggttctctgcagactaagttttgaaaagctcctccaagcataatgccatccacatttctctgccttctgaagggacagaggcctgagtggcttccttgctggggggcggggagccagaactggcagctttgcaactgactgaaaatgtgaatggaaggaagagaaaactataactgatatttgttaatagttaggtcagatcctctacatttttatggatttttttttttttggtgtagctattctactattggctgtgggtgtgggtgttaaaaatctccagctatgattgtagaattttctatttctccctttaattgcctattttatttcatgtattttaagctctcgactgaactgaactgattttaagctctgttattgggtacataggtatttataattattatatctttctgttgaattatgagttcttcttttcctatggccaattatttgtaatgaagtctactttatctgatatcattatagctgctctagtcttcttttgcttactgttggcatactttttccatccaattcctttcaactgatctgaatcctttatgattaaggtatatcttgtgtaggcaatacctagttgggttttactttttctgtgtttttgaccacctgttttctaaataaagtccacttaaaattgaatgtaattattgatatgattggatctaggtctatcattttcctattcattttctttagaaattacaaaatgtaatgcattttatttatttttaattggaatataattcttcaacgttgtgttagttttttgcttacaatgaagtgaagcagctgtatgtatacatagattcccactctcttggacctccccaccccacccatctaggtcatcacggagcaccaagctgagctccctccaccgtctagtgtgtatatgtcagtacattctagcagtttgtcctaccctttcctcctgccccctaccctcgtgcccacatgtccattctctacatctgcatctctattcctgccctggaaataggtccatctgtacccactattcagtttctatttgtcccaactaacacttactatcgagaaggcaatggcacccca

SEQ ID NO: 45067 - DNA, 943 bp, Bovine  19866881625925
  misc_feature (1)..(1): n is a, c, g, or t
nattatcctcatattctaagagattgtactgtgaatgcttaggtatgtgtctagagatccccaagaaagtaggaatcaacatcatatatgttaaaagaaattagtcaaaggaaaaatcttacctttgtttgtgcatgaaagatggaactaaattgaaaagaaggagataaattttctatttctgtggtggaacgagtcaaaggtaaaccatggtgattctgtttagggatccatatatatgcatatcatgtagtaagacacaattgcttccatagcaataagctacttttatttgttcttgtttgttatgaagtaagctttgttgttctccggggccccaagagattttagaagacgataatatgaagatggataaagcatagtctgtatcacatctgtaccgagggaagtcaatatatttttagtgtaagaaaattggttgtaacttgttgataaagacgaaccagtttgcaaagaaagactgtttgaaatctcagagaatgagtcttgaaccttggagagctgatataggatgggtaagacccgggacaacagttagttgatagcatttctggagcacacatcaagtgcagaatactgtaaaggatgtaatgttcgttccaatattgtaccgtgtgacatgtatagtttgacaaatttataaattgatagagaaatatcattagggccgctggtttgactgcagagaagtagcataaatgatcctctgtccaagtggaaatgttttctgctgctttttctttcattcctacttagaaaaatcacatgaaaactatagaactggggagtaccttggatatccagtttctgctttttagaaattaagaaatggggaggctcagagagggtgtctgagttgtgctaggtaacccagctagagagtggtctattcaggatgggaaaccagatctgtggtccaatt

SEQ ID NO: 45068 - DNA, 759 bp, Bovine  19866881725660
  misc_feature (1)..(1): n is a, c, g, or t
nacggcctccctgtgcagtgtctagcatcaccttgtatgcttggacagcataggccagaaaattcatttaaagttctctgatgtactaagatgctgactctacaataccctctcctgtcatttccaagcccagtggatttgcagtgatagatctatgtcatttgggtttcgtcatcatgagtgtggcctccacaaagaccacttcttcgatctttcctgggatttaatcattcagttctccagtcccatgtgtaacccatacccagggagagcctgtacctctatcttaatctaggcaaaaaataactatagtaatatatactagacacttattgcatgattattatgtgccagtcacagcaccatgaaatttatgtatactagttcatttaatccataaaatcatgctgcaaagtcacacttttatctctgttttatggataggaaccaaggctcaaagagtttaaatgacttatccaaggccacttgaagtagctgcatcatatttctagttcatttctgatgctggagctagcataactatagggcattgtttagtgatgaaaaccaaatctcccttgttctttctcttgcagaagagtgcttgccaattttctgtctatcagagagcaccataagacacttaagtgagaatgttgtttctgctccatatactctgaaaactatggaaagcccttcaaaatcataaaatcttaaactgaaagagacctgaagcattaactagccccaaacccattg

SEQ ID NO: 45069 - DNA, 1275 bp, Bovine  19866880420889
  misc_feature (1)..(1): n is a, c, g, or t
nacaattagagttacaacaatcattagtagaccagattaataactcttatcattagtcatctcctgaaatgtgagattccgtcatgactgaattgaagccttttattcattatacctttgtattttaggtctcactgacttaagatcactttatagtgtctcaaaatgcctttagcacttactctttgtcctaaatcattaaaattgtaattttatacttcagcttctaactaggtattacagttattcatgaaattcacgaagcactttttaaaaggactgcttaggaggttaggttgtaaattgtttagtaatttacatcttaatgttacagggatcaattgtctttccttctttggtcaaaatttggaagtttcctggccgttggaactgttaaaggaaatttgctaatttataatcatcagacatctcgaaagattcctgtcattggtaggttacagctggaaacactgcttaatatttgggatgctttaacataaatgtaaattttatcacctcaggtttccctgatactgcaggggaaaatttgtagtttaaaattgacttcccttgtcaagccatacctctgtctaactagaagatccatcttcactacctactaagaacttcccaggttacatagaacaagttgccctcaggtgagtgagcctgtgcctctggacaccagtacattaatagcatgatttccatctgtccctttctcacccagattatgcctctgctatggagtagctcatgtgcctatcaacacattagtagatgggctaaaacatttggcgacttcttagacagagtatatccatattcctaattctgacccctcactgtctccagtcactaatctaggagtgaactaggagttatttttacctcagggtatatgactggaaggtatgcgtatttattccttctttgaccttcttgattcagcctctttgattcccccagcctctggcacttagcatctgactacctgaaggaaatagtattgatttttttcaattgttgtaacatcaggctggtgaggggtgaaatgggtaggcttaattataatttactgctaatggaagaattaaatgctggagataatagtgcccacagaatacttgagaaagggcttttcagttaaagacatttattcatttcaagttattttcacatatatgtatatctttcatatgtgtatttttagcactcggctatacagttacaccattgatccatttaaaagtgaactaaaaaatcagctttcac

SEQ ID NO: 45070 - DNA, 1284 bp, Bovine  19866880427468
  misc_feature (1)..(1): n is a, c, g, or t
ngccccagccttggatctgtactcatttctttctaggcctatcacaaagcagtcatccttgaacaatccagagttctgaatctgatgacctacactttcttggtttactcttttattttgctggagtgcatcccccagtagcatctggagcaacggtaaaaagaagataaacattttgatactatgcatgcctaaatatatctaagttaaaaatttgttttctaattctgaattttgacaacaattatccattgtcttctagcatccattgttgctgagaaatttaatactgtttaatttccaattttttgtatgtgatcttcctttgaaagctcctagaatcatatctcattgcattctgaaatttcaagttcatatgtacttgagttgctattttaaaaatttattataatgggcactcaatgtggtcttttttttttcttaaaaaatgagatataattgacaaataacattatattagttatattaagtatacaacataaggattccatatctgtatattcaatatactcttaaactggagacttgggctttatttctggtaaatgttcttgtgctgttttcttgataattttgttccatttaactcttggttaaatgttgaacttcctggcttaaccttttaattttcttatattttttacttcaccctcatttttaatttgcaaaagctccttttgttttctaatgtttcttccttctccctgtcatttcctttgctctctccctttccttccttccttcctgagagaatttcagtcttatttcaggaatacaaaatcttagcgtcttgagaatgttaatttacttttttgaaatgtttggctacctctgcattatctgttcctctgggtttttctttacccgttctgggtttatttgttttggtctctgtctgtactgttggaaactttcctcaaagatctggtgatccttggatgtttgttcagattttcaaatgaatggctgcaaagctgactggaagctctgtgtgagtgggtaggttttgtcatcttgtgggcttatttttagattaaagaggtagccagcaagcttgtgggtgagggtgtggtcccccaaatgtcagtgtgtaggtactttctctgtagcaagttagtttatcaagaaaaagtgcctttaatccgcagggaaggataaggctggctgttggcagctgtagcacagagtgaggtaagaggactggggaatctcagttcagaatgcagactttcattttcattaaatcctcacctctgccctctt

SEQ ID NO: 45071 - DNA, 1440 bp, Bovine  19866880460133
  misc_feature (1)..(1): n is a, c, g, or t
ntataatgactcaggaaacataagcttatagtttcactcattgtttcaaatattgattttactgattttttgatgtttttattctaggactgattctgctaaatagccttgatttgtgtaagtctctcactttaaactttttttctgtgtttaaatacaggaaaacattacaaatatttaatcagtttattttaaaggggatatttcaaaatataaaatatatcaaaaagctgaatatttacaattatgtcataggttactattaatagtacagagcactgaatgtgtaagactcagaagaggaaatatacaaagtataaaaaatagcatgttatatatcactgtccctctacagaagttgaaagtggtgacctggagatgtgaccttattttttctgtatccaggagggaaccatccttaatctgctaggggcagaaacacagcctcttgtggaaaaatgctatcttctcaggatcattatacctaaaaaggccaaaaaataaataaataaataaaccccatatgcttttataaaggtttcaaataataaactggcatttagtaataaaagctaagcatgatattttgcgcatttctagaatgtgaagcaggatcactacatgtaggtgagaaattttcagtctgtaattagtactgagtttcagtcttggcctttcagttgataaaattgtatgggcaggttgttgaacctctgttataaagtgaggatcatgttgacaacagccaccttactgagaagaataaggaaatgcaaagttagtgctcagcagctcaacccaaagagacccatgccaagacacattacaattaaactgccagaagttaaagacaaggaaagaatcttaaaagcagcaaaagatagcttgttatgtacaagggaacctcctccccataagaacgtcagcagatttttcaggagaagctttgacaacatcaggcccttctcttctagcctgtaaagtgctgaaagaataaaactgcccgtcaagaatagtttatctggcaaagccatccttcagaactagaggagagagaaagaattttccagacaaggaaaagctaaagaggttcatcaccactagactggccttatagaaatgttaaagggacttctttaagctgaaatgtaagggcactacttaataatagggagatatatgaaattgtaaatctcaatggtaaaagtaaatgcagactaatgaaagatacttacaactagtgtgaaagttaaacgagtaaaaataataatgttttattatatccattaagtgaataaactatgtatataaactattctatggatacccttctcataatgcaaaggttttataactacagtaatttgttaatgatacataaggttcagttcaattgcttgggttgtgtccgactctgtgaccccatgaaccacagcacgc

SEQ ID NO: 45072 - DNA, 1938 bp, Bovine  19866880501902
  misc_feature (1)..(1): n is a, c, g, or t
nttgcgacttaagtgagatttccctggcgcctctgaaagccgaacatccccccaggaagtggtcctttgcttagggaccccattttggcctctgaatcaaagtcttttgtgtttagaattgctcacatggagtgctgctgcttttctcccttcactgaccgctgttcttaagaaactgacaagaaaacaaaccagagagccttttcgaaggcgaagtcctaaaattctctgtcgtgacatctatatagctgtcctgaaatgcattgttggctgccacaccatataatggctttatttcatgttaagaaaggcctttcttgagtgtttcaggagatcgtgtttgtgtgagaccttgaaaaattataccttcttgtatataggaaaataattgagtaaggtcaagaattctggtgtatagaaaagaaggattcactgatagggaacttttcagggatatacagaggaggaactgttcattcactgccctcaaagacacagcgagtctgtgagtttattcaaatcccctaagaaatggacaactgtagtctggtctgtttcttggtgggtaggagggtggttctggaaatgaaagaggttactgtgtgctctgagatgtgcttggtagtgcccagcatctagtttaaggtaagggatagacaaccctgatttaaagagtctcatttcttctcctgttgctgtactcctttaataggaaatctgcacccaatactcatactccatctactctcttgttgtttccacagctttacatgaaacccattagatataaagttaacagtcttattcattgactaaatatttcccccaggtcaggcatttgttagtatttaatttctgaaatgtctaaaatgatgtgtgaagttgatgtgacatccattgccttagctttgttgttgtttagtcactaaactgcatctgacttttttgcaaccccatggactgtagcctgacaggcttctctgtccatggcatttcccaggcaagaatactggtgtgggttatgatttccttctccaggggatcttcctgacccagggattgaacctgcatctcttgcactggcaggtggattctttaccacttagccaccagggaagcccattatactgggtagttatagagtatactgaagaggggtggagatggagggattatattcaccttagattgtaataggaggtttgctctttgttagccagagcttgtaggttgaaatattgatctgaatttgtaaaatttttaaagaaaaatagtttggaacagcttggattgctgtgactttcccaaaacacggggtcaaaagtcatttcaaactgactcgttcttaagcaaatattaccatttcccggacagcacagtagaggatcagaaggtatataaaagtagaaatttaaagtggtaccagaagatatctgtgtcaggtaaagtacatcactaacactgtatcaagcttcatattaaagcttattgacgattttgttgaaacttccaagtggtaatttattggacttgcaaagatggtacatcgggcttcttcagtaatttctccattgtcatctgcgagccatatgaaatagcaacacaggggtaccccaaaacacatgtagttctataatacaggcccacctgccatcagcagtttaccctagctgtttatatgaaaggcaagctgaatatggcctggcaaccaaggtggataagaagtaactctgggggcttccctggtggctcagtggtaaagagtcacctgccaaggcagggagcacaggttcaattcctggttcaggaaggtcccacatgctgcggagcaactaagctggtgagccacaacccctgagccagcgctctagagcccaggagctgcagctactgagcctgtgcgtcacaagtaataagctcgtgcgcctagagcttgtg

SEQ ID NO: 45073 - DNA, 1449 bp, Bovine  19866880514530
  misc_feature (1)..(1): n is a, c, g, or t
ncaattatattaggcacatactgactggcacattactggctctcaatatatgtttaatgagacatatataactgctgacgtattccattataaattttgttgtgaaaaaaaaattttttttgttgtgtcaccagttcttccttatcttgatccagggttgacatcttgtctggccatggaggtagttaagaccaaatgaaaatttcctgtggattatttgttgtaaagaatatgatttgttttacacagaactagtaataatttccccttaattatatgccatgaagaaaagcaagcattcttaatcccatgacattgggtagaactggaggaaaacaatagttgtggaaaattttgccagagtatttcttccttcgccccccatttattataatttaagaatacactattatcagtagtttgaaggatgttgtgattagaggatggggaaattgaactgcagctcacaaaaacttgctgacgactgaggtggagtcctctagggttgccttagattacaccatcaatgatacagatttttttggccatgtcgagaggcatgagggatcttagtttcttgagtagggatggaaactgtgtgccctgcagttgaagctcagagtcctaaccactggactgtcagggaattcccaatggttcatattttgaacctcaacttttctagttcaacaacacagtcaagtcagttaaatgaatgagttaaatccatgaattctcatgccaacaaatttcttgtgaaaataatatgtaaaccaggatgctttaatttacaatgataactgtaaccagagagcaggttgtatgccttatcagctgcttgatacactctttcttggtaggaaaataggggaggccatatagctataattggtcttcccaggtggcgcctgtcataaagaacccttctgccaatgcaggagatgcaggttcaatccttgcgtcggcaagatcccctggaggagggaatggcaatccactgaagaattcttccctggagaatctcatggaaagaggagcctggtgggctgcagtccagtgggtcgcaaagtgtcgggcatgactgaagcaacttagcatgcatgcacccatagttataatcagaaagtttcctggtgaaatgaaatctggagcaagaagaattagatgggtaaacttctagtttttatttttaaaaatgtaattttttttggctgcagtgggtcttcattgctgtgctcgggctttctctagttttggtggtggtggaggctactcttcattgcagtgtgaaggcttctcactgcagtggcttctcgtgtggtggagcacagggtctaggtgggagggctcagtacttgtggaccactagctgcctggacgcatgtagaatcttcctagaccagggatccaacccggcaggtaactctaaccacggaccactaggaaagt

SEQ ID NO: 45074 - DNA, 1403 bp, Bovine  19866880573864
  misc_feature (1)..(1): n is a, c, g, or t
naacagtgttgcataggtcagttattttatataatgttctctcagttcgggttcattcagtgtttcctcattactgggttgagattatgcgtttgcagcagaaagtccacagagtaacataccctattagaagacatcagccatcattttaaggatttgcaagtagttcataacgttcactgtagatagtaaattccaggccagaggtcttgatctctgtttatatttggcaaagagtactcagaaataaactaattttgagcacctgaaattacagagtgggtttgtaagagaagaaaatctgctatcacggagagaaaagaatccagagtaaagaaactcaatttaaatttggcatgttttgaatccacatcatttccaagaaattcatttttgaagtcatctgcactatttcatgcatacctccttagcctggcctttcacgatctgatccttttctataatactttccagcttccttatgctcccctactcacgttctgtcctccaagcctataaatttttttcacatccctgtgtgtgccgtgtactttaatgacatttttctctctgtttgtagcagaactttctggctacctctgcttagaatgtctgaattccttcagtttacttggcaagatcctattcatccttgaaaacttctcaaatattttctctcataagaagccttatgtttactattgtaaacccaactgtcttaatcctaataagtaaattttctgaagctttaaattttaggtagatgtagaagaatggcgtatctacaccatgcagtgagaaaactagtaaagttgaataattaccagtattgttatattatgtatatttttcatatttataactatttacagagctctcaatgaaatgtggaagtgtcagaacatgcttagaagtcatgtacgagaactgttggatttgcacaagcagcctacagtaggttcatgatttgtttaaattcacagttttagtcattgttaatttttctgtataatgaagcaagcaaaaggtatcttagctgttttatattctaaatgtcagttagtttctgtggttatccaagataaatttacatttcacatgaatattaaaaaaatatttttcaccatgagcacagaaatggtgttttctagtatatcaagtattttgacactaagaatttatagtttatcagttttcaaataattagaattaaatctcagtataaaattgtattagaagtcaaatttttttcctctttgacttttggtctgtcattgtagtatcagtatcaaatcaggtatcaatcctttgaagattccaaagtcaaattaacaaagaaatgctgcccagcattttctgaaggttaaaaaagaaacataaataatataaagcttctaaacata

SEQ ID NO: 45075 - DNA, 1291 bp, Bovine  19866880581573
  misc_feature (1)..(1): n is a, c, g, or t
nttggcaatgcatgcttcaatagtctggactgtccttttcaataggacttttgcgaggtcaaacgactgtttacttaagttctgaaacacaaaaaatatgcaaagttacaaacaaattaatgaatttacaagataataccactagatcatcaaagtcttcaaagttcagaaaatatgaagcaaaaaatataactgaactgcattcaaggttttacccaatatccactagtcaagacgtcataaacgcagaagttgcaaatagcacaaccatgaaacaaaaactaaaatacaaaaaaaaaaaagtaggtaattagccaaaagttcaaccctatattaagtttagttttactaaatctaagaccttttaggttttgttaaccgggagctggtgatggacagggaggccaggcgtgctgcagtccatggggtcgtaaagagttaagacacaactgagcgactgaactaaaccaatctgaattgataatcacacccattaatcccttaacacccacacattatcctcagtatttcactgtctaatcaatgtctgttctgacgaagaggagacatgggaagtgcttcaagcaaaattctcaatcagttgtatttctgaaatgctaactactgccttcattcctcaagattcccaatgcgtggtaataaattaaagggtctgaggaagtctgcaaaaagatatatttaattttttaaagttattgaaaatggaatccttgtgctgaaaaatacctattaacatctctacactttgcagttttagaccaaacagattcattcaccatcatcttgcacttatctccaaaaaaaggcaaggatatcctataccttaggttgctgctactgctgctgctgctaagtcgcttcagtcgtgtccgactctgtgcgaccccatagagtgcagcccaccaggctcccccgtccctgggttctccaggcaagaacactggagtgggttgccatttccttctctaatgcaagaaagtgaaaagtgaaagtgaagtcgctcagttgtgtccgactcttagcgaccccatggactgcagcctaccaggctcctccatccataagattttccaggcaagagtactggagtggggtgccattgccttctccaataccttaggttagtagtcagcaaaatttttatgcaaagaggcagatggtagatatagattttaggctttatttattggccagccatatcgtcactgctgcaactacacacctctgggttggtgcagcaggaaaccaaccatagacacaatgaaaacaa

SEQ ID NO: 45076 - DNA, 1343 bp, Bovine  19866880627307
  misc_feature (1)..(1): n is a, c, g, or t
nctcattttcctccttttcccttggagtaaaccaagaattcattaaatattttttaaagtcagaaagataacaagactctaaaatttttcttccaaaaaaaaaaagagagtaagtaaatagcattcaaatgtcagtaatcaaacaggcccccaagacagctttaagatagtttcatttaacagggaagtttacaacacaaaagcagcttcctgagaggcacccactttaaaaataagttatagcttaaattattactgtatagattatacctggcaaaggtagaaagaattaaattttttcctcctttcatgaactgtgtaataaggctagtgtgcagaggcttacaaatttcatataatggactgtaaatcatccaccatatttaaatcatgtttatttaaagttttcttaatattagacattttatgggaataaaaacttagtaaagagttatttcatttcttttctcttcttcttagccacataaatcatctgtagtggataatacagatttcagctgtaatttgtaaaatattccaaaagttgtcacagtcctaagaactagagaaaactgccatccacaaataaaccaccaaggtaaatataaatacagtgtggttctaatcttctttcatacaatctcaggtaaccccaaatatctttataaataccttattaaaaaaacaatttttaaacccattgaaactacttaaaatatttaaatgtagagatctcaaatttccttctatcaggccggaaattaccacaaaaattatgatcacagttataaacagaacgaatggaatgtttaagttcaggataaccaaagaagccccatgtaactttttaatgtaatcacttactcaaatataggaaaggtgatgacacaggaagcaaaaataagctcgcaagtgaaatttctagaagctcatgaaaacaataccatcccatactgcagatgcaaaagaaaaaacagttctaatggggttaagactactctggtcatcttcgttcatttggtcgtgcaaggtgttaaactattttcacttcccatatccacaaagttagtccacaggaggggctggtggatcttgtccattttaggtccacaacctaatttaaaacctaaaggaatcagacccagaacaagcaaaatccgatgtcagcagaaggaagaaaatcgtaaagatcagagaggaaataaaatagaaaccaaataaacaatagaaaagatcaatgaaacaaagactttttcggtaagataaacaaaattgataaacccccacccaggctcacaaagaaagatagtgaagtcattcagtcatgtcgactctctgcgacg

SEQ ID NO: 45077 - DNA, 950 bp, Bovine  19866880661024
  misc_feature (1)..(1): n is a, c, g, or t
nggaacagctataaaaatgcttcagtaataggtaaaatatttttaaaagcaaagttttgtactaaattgcttatgatgtagtttaataaattaaccccaaaacactaacttgtaataatcatgtttaacagaactaatacataaagacaatgtcagggaaattgaggttctgagcaagaagaacaaggaacagaaggtgtgatgacaacatggcagagaaaaaagcagaattgatcagctcctactttgcttccattttctatcactgagaattatcatcaaattagaaaggctaggacctacatgggaaagagggttttttggggtttttttttgactgagacacatggctcacaggatcttagttccccaaccagggattgaacctgggccttcagcaatgacagctcagagtccttaccactatattgtagataattcccttcattttctataatgagggggaaaaaatactataagcccgtgagcacagatttccttgggaaactataagcccaagagcacttttttcctcgggaaaattatggaataagtaattaaacaaatgatatgtgaatatttagaaaagtgatgaacatgaggccaagactgacttcactaagaaataagtgggtcttcctgataggtttcctattctccctggtctgatcccaggcccacaagggaagaaagtgggccttgaactggaatgaggctgaatttcaatcctacttccaccacttaccaaaattctctgagcctgtcacattacccaaatgtaatggagctctttggggctagctctattctcacccagggccttcctggagaatagtctctacacatggccttatcacaatgcaacaataataatccaaactttgaaggcatgataaaaaatgggaattatatagacaaaacaaaaactccacaaaaatccccttacttaa

SEQ ID NO: 45078 - DNA, 1591 bp, Bovine  19866880674674
  misc_feature (1)..(1): n is a, c, g, or t
ntactttatctcattaggtgcggattttatctgtcatgttttaaaaataaattcattttccagtcttaagcattctgaaacttttttttatctgaacatacttttagaaattttgacaagtaggtgaaaatatgaagaaagagaaagccatatcccataatcccattaacaggagacaataatggtgaatattttctccttgcttatacctaagaaaattcttcatgccccaccatctccccaatttcattctgtcttttgtccagacttcttctttccaaattagtaagttaagatagcacaaaagcatgcaaatataataataacataataacacagggaaacttcaaattgcctgttgacgttggggactgtatcttatccacctctgcatcctcaacatttactattagaacctgcacacagtaagtgctaagtggatcaaggtagcaaaacccaatttgacagaggttcctaactggcctctcctgttgtattcaaagcaaagtcaaataaaaacctcaatacatatacagagatgaaactaactttcatggaaaattctagtctcagtacaccatgtgccgggtactgtgccaagcagttcaggtactttatctgattaggtgtggattttatcgcatacacatttggttcaatcagtctctgattctacacccacattttgcaaatttaagtgtttttcagattatcaacactgaagcactagggggttatgttcaaacaccaaatattttcctttatgttcactatcctattcttcctaaagaatgaaaataaacctgttgtattctagtaatatagtcaactgagtgaaaaggagttttctgattaagtttcaatttgtcaaaaaattcaattaacaagaaacttcctatctcctgaaaatcataataaacctgtattattagaaggtgaaacagctcttattaaattttctacagatccactatttaattttctttaatctctggacaagtctatgcataattgaactctgaagagtttttccaaaacagtatttatctaggtagtccacattccaaaaactattcagtttctggaactacttggaaaaattcagaaggcaaaagttacgcaaattcttgacacattccttggacaagtaaaatggtgctggtaccagttctgatgtggttacagttccagttaaactagaaatttgatgttctgttacttagtcttataatctgccaattagagtaatgacatttgatggttctaagtcagaaaatactgcattgatgaaaattcttagttaataaagtggacataatgaaaagaaccaattgattattaaacaaccagacattaactttagtccattcacttttgtacaacctcatttagtacattatatattctcatccctgtactccttttaaaatttccattttgtacttttctgtgttagccaatgaatactttgagccaaagcttggtggagctgtctgccaagcaaaagttccatttctgcagtttctacatcttagttgtataattacttaaatattttcttgcatattattatttcctaagaatgtagaaa

SEQ ID NO: 45079 - DNA, 1391 bp, Bovine  19866880684810
  misc_feature (1)..(1): n is a, c, g, or t
nggaaatagatggggaaacagtagaaacagtgtcagactttatttttttgggctccaaaatcactgcagatggtaactgcagccatgaaattaaaagatgcttactccttggaaggaaagttatgtccaacctagatagcatattcaaaagcagagacattactttaccaacaaaggtccgtctagtcaaggctatggtttttcctgtggtcatgtatggatgtgagagttggactatgaagaaggctgagcgccgaagaactgatgcttttgaactgtggtgttggagaagactcttgcgagtcctttggactgcaaggagatccaaccagtccattctgaaggagatcagccctgggatttctttggaataaatgatgctaatgctgaaactgcagtactttggccacctcatgcgaagagttgactcattggaaaagagagcaatatgcttagcaatatgcatactctgatgctgggagggattaggggcaggaggagaaggggacgacagaggatgagatggctggatggcatcactgactcaatggacgtgagtctcagtgaactccaggagttggtgatggatagggaggcctggcgtgctgcaattcatagggtcgcaaacagtcggacacaactgagcgactgaactgaagtgaactctactgaatatttagaaagtcaagcagcacaataaaacctttactctctaacacagtagcataacttttattgccaagggaaaatcataggtgaacacacccgtgcaattcttgcttaactaaatgttggtgtacaaaggtcagctttatgacagatttagactaaaatgacagatattaagattagttctaagcccagaattgacctgagattatattccctgcacagtttggcttcagcaattctttcctaggtactggacaaagatcttaaactctatttcaattttaatcagaaactatgaaatagttaaagggaagtaatttctgtagttgggctttcgtagctcagttggtaaagaatcagcctgcaattcaggagacctgggttcgatccctggattgggaagatctcctggagaaggaaatggcaatccactccagtattcttgctgggagaatcccatagacagaggaacctggcgggccagtcaatggggtcacaagaattggacacgacttagctacttagactaatttctgtagttagcaaagctatgtcacagattttgatgacttttcaagtgattaggtgaactgattcacactaatcaaaatgacaagggactgagttatataaaagaatgtcagtttattcagtaataagaacaaaaataatcaaactgatcaaattcttagaaattttgtccttgccaaggactaaat

SEQ ID NO: 45080 - DNA, 3735 bp, Bovine  19866880689685
  misc_feature (1)..(1): n is a, c, g, or t
nctagtaaaattccattaaaattctggactaaacagaaggcatgccctcccatttaacttaccctgctttgtatgaagaacgcacccagggggccacttgcagtataatgaaatccaagttcatttcctactttttcccagtatttgaacttttcaggagtaatgtattcttcaacctagatttaaagaattaattctagattctagaattttccgaaatcattttagttctatatgaaaatctacttgttggctacttggtcagaacatgatggtagtgaattacagcgaagggaaaacatcaattttgtattacactagctattccaaaagtgaaaggatcagtcacgcctataagattcctaaggataagattgtgttacttatcttgtatctgctgctcagcactgtgtctggcacacggttactactcaagaaaagttttctgaatgaatgaataaatgtctgatatagaaatagggagactggcttttctttctttcttcacctctggctctcatataattctaaaacaaatcacaagattggtaggagtgatacgaatgtacttcccaacttaaaagtttttttcctataggtcattttagtaagacaatattgagggcagcaaataagtgccagcatagccgctttatgcagataataaaatggaactggaactcagaaatatacatggaacattacactaaaaagccagcagcttctgaattctacctatagaaaataaagatgtaatgcaaaccaccaagaaacatttggcgacttatggtagttgtaccttaaggtggcgctttgttggctgcatatattgtcctaaagtcaaacagtccacatctgcctcacgaagtgctacaggaaaagaagcacacattatatgagcagattttttaaagtgctatctgtatgcattgctgtaaaaagtagcttttaattatcatttgaatttattactctttgaaccgataactgcaagttggccaaggaccttcaggtaaaagaaaagcttttatattttaaaatttaagaagctcaagaattgcaaagtaaacagatttaatagactaaaagtcaaaagcacaccacgttatgtaacaatgctataagtaagcactttctcaaaggcctggattcatcttagtcatctttgagtcgtcagtggttgacagagctcctggtacctggctggcactcaaaaattgtcttgactggacaagaaaagcagacaaaaaccatgtttttagttgatgaaagggtaaggaataaaatgggatgcaaattccatattctaagcatcctgtacatcattccataaagttttaagaacacattcttcctttcctttctatgctgctgtttataaccatatcctgaatttttgttctcactagcactttcactgagactatggagaaagcataccaggttttccaaagtgggactcctgctatcactcaagttaaatggaaaagagttttcatttttaaatttctttacctttcatcgtggcatatacttgctcatcattctcacctaaacccaacataatagatgttttagaaataacatcaggtcgaacctccttggcatgttttagtacacgtagagactggtcaaaattggcccggggatcacgaactttccttgaaaacagcagagctgttgtcagcaagaataaccacaagctcaactaagtacataattatacaagcaacctgaaagaccaggaaggtacattctggacatcacgctgcatcatatgggttcaatggtagcatttgtgcacaaacgtctaactgttactttgagaaagaaaataagccttcactaggcccccagttctgttgacttttcaggcctttcaagcctggggcacagaaaatgagaacagaagtaatgaatgaagtaattcagtttatgaattactcattgagaaactaggattctgaagccggagaatgagtgattataagggtaattgagagaagggggaaaacatggaagaaaatttcgatactgaacaaagaaaaaactgtttaacctgaaccatttaagaggattgaaacttttatgttcatttcttttctaaagactaagctgccctctgctggtaaggatacagcattgacatttcttaggttaaaaaaaaaatgcatgattctggaattttcactggaaaggataatgttttttaaatgaaaacagagaaactggcacccactggtggtgggatcataagatatgacaaggctggaacagactgtgtgcttgacttcaacagggaacaaaccaccaagttttaaatggataaaggcccaaaggacacagttgctgacgttaaattgcattcatttgaactctaacgtacctttcttctgtgtaactgatctgttgttatggttgctatttttaatcagagaccagttcacacaggaggagagggaacaaatttatgaatttaaaagtaaccacaatactgataataaggaaaatactttttgaaagtatttctccactgaatttaaattatgctccctaataagttatgatttagcagaaattctggctattgtttatcatacttctttctgtgatacagaataacgtgtagaacctaataaaatcactaacaaatgctttactaaactaatgaaaatgaatgtataatcttgcctgaaattttttatttttctgaaatatgaatagttattgatacagaataacaatgtgtaattattcctaactactaaaattacaaggaagagtaagaaagcacagtacctactttttttaaaagagatttaaaatacatccggaatgataccatttttttcttcagcatcatttactgcatatattattgtcaaatgcattgttatatgtccttttttagaactacaatcaattgctcttttgtaatatttttctttttgaaaattgttctttggggaaaaaatcccagctcatcagcacttgcaatactttaccaaaaaaaggaaagcaaaaaagatgctagttatgtttgtatgcgtataccaaaacatatacacacatgtataaatatgtaagtatacagacactgagatgtaagtaattgatattaccaggtggaaatacggatgatgtttatactctttttgttgtctatattttctaatttttctatactagacatatatattttttttaaaaatgcatttttgttttaaaaagagagttcactttatagaattacaacattctcccctgaaaaaaagtatagcagatttgaccctccaaacttcccaacattactcaacacgcgaaatcacctctgtaattctggaactgtttctacattatgtgcatatacatctaatcctgacagggcaactttttctattgctttaagatctcctcggaaatcaggggtgagacattccacaagaatttttggattcctatagtgaaaaagagataggtatcaatcacagtgaggaaaagaattgacaaaacttgctcaaaacagaaatcatcagtatgcattcagtatcagtttcaacacagtaagcttcagaatcttgccaagaacagcacgagcagacaagtgcttatatatgaactgctaaatgaaaacggtgacaacctagaacatcagataacatgtacactgtggttaaaacacatctgcttgcaaacaatgatgagaatacattttgggattacaaaaactttcaa

SEQ ID NO: 45081 - DNA, 962 bp, Bovine  19866880877671
  misc_feature (1)..(1): n is a, c, g, or t
naaaaaaagaatatattgatgttggagaaaaatgctatcctcaaaactttcaaaatgcttttctgttgggtttcaaaaggataatatcatgaactctttttactatgaaaacttaaaaaatgaaaccttacttaataaaatagagacacattttcctaactatgagttctctaaattaaagaaatactgaaattccaatttaaacaaatatgtgatactgaacactgaacatgaaagacaccatttattcattcaaggtttatctgatataaatacaataatccaaaaatataataggcttacatgaatcaatattagaaacaaccagttttttaatttctattttcacagaatgccactttttaattgcactattataatatggttgccatactaacagacaaaattagaaaatagagaagaaaattactcgtcatctcactccactaatacaacaattattaatattcagtaaacttttttctacacatttttcctaggcatatctgacataattataatgttcataatatgtatttagacttttccattttattcctatcagttacagtcatagagttttacatcaaattaaattagcaaaaaaaataagaaagcaaagagcataagaacaatgcattgtttaatatggtttacctcataaataggaagtgtaggagagttccatgcattgattcttgattcattgatatcaacaaccgtcaccctgatttcggggcacatgtgagcaatgacactacacgtgggtccaccaacatagcctgcaccgatgcagcagatcttcttaatttcaaacatgactgtgctagaagagaaacagtaagactgactactgagagcagaaaatttaaagaaaccacactgcacattcatcacactttataaaaactgtcaaggtgacaggtatagggaaagatttcctacattcagacccattaaga

SEQ ID NO: 45082 - DNA, 1904 bp, Bovine  19866880891826
  misc_feature (1)..(1): n is a, c, g, or t
nagttgagctgggcaggacagttgagcgatgcacatcttcactctttctttttgtggccattcttgttaatatttattaacacatgccaggctctgtgctcagcttgtccatcctcacagcttcccctccaggcacatcgctgttgtttccctcatttacaaaggaggaaacagacagggttaagtcacctgcagttctcccaaaacccaggtagtctgctcaatgacctatgtttttgtaggaaagaaggctcataaaattattgtttcgaagtttttttatttgagtgaagatgaggtagggagtagaatttcactaactgctccggaaactattgcttaaactttgcaaaaaaaaaaaaaaaaatttgcagattttcagtgaaattggaggactgctcttgatgctaacttaatgcacagttattcctgtcattcctgcatttctgttaggtcgtagaggttaacattctggaatttctttttccctagcggcaaaatttggtaaatttgctggcaaagatgatggctccagttttaaagcggcattgctctcaggtcctcctggtgttggcaaaacaaccacagcttctctggtttgtcaggtgggtattctgtcattacttttctaaaatctaacctctgcagtttgctttggttctgggcctatttgtcattttcacccttttaaaaatattggtaattataataataggtgatatttacttgtgtgccaggccgtgtgcaaataagcccttgggtgcataatcttacagataatatgtcttacagactgttacagatatcttatatgcccctgtaggaaaaattctgtgtaccgaatatatgtactcctgccgtcgtcatgtgacaaatgaaacagatttgtagaggagggtggtggcacagtgtgaccccaggcagtctgactctaaccactgtagggtcctgcctttcctcttgttgtctctacggttgccacatctctggacagtgagagcatgaggcactggagcaaaccaggactcgtatcagaatgcgtgctaagccacttcagtcatgtccgactccttgtgaccccacagactgtagcccgccaggctcttctgtccatgggattctccaggcaagaataccagagtgggttgccatttccttctccaggagatcttcctgacccagggattgaacccaagtctcctatggctcctgcgttgcaggcagattctttaccgctgagtcaccaggggagtccagatgtatcagaatggtgtgaaacaatacatgaagtagtatcagaaaaattaaatgagagattttaaactcactttaaatttattactggatttcccaaccctttgtcccataggttgatgtttttgtttagtattttttattatagaccagaccataaatttttagctcttataataactatgtattttctactctattatttaacatttaaaaacaaaaacaaaaaatgttttccctagtttttacaattgtgaaaatgatgccttttttcccctttattattatcattacttttttgtggaattaatggttttgcataatgccttaacataatgatcccttttgggaaataagcccaagttagttgatttttcagtttgagagggagattatatattgggataatttgacacagaacaatttatagtttatcttgaagagtcaatgattactttttgttatcttaatgtactttttgatatcttaattctacatctggtattgaaattttggggtagttatatttaattcttttggggactttaagaagtgaactttaagaagcgaactagtaaaattgcttgtcagatatgctcttccagatatatgtagcagttgaggttttaagaccacatttgtgtgtgtat

SEQ ID NO: 45083 - DNA, 1971 bp, Bovine  19866880893524
  misc_feature (1)..(1): n is a, c, g, or t
ntataccagtataccaatggattgttggtactttaaatagacaaagattttctggaacttaatataagaaactcaaatccactgggaggaaatgggctaagacaaggagtgccagaggaggaaatacagttatgaaattatattttatacagatacgaaaaagttccatctcactaatagtaattaaattaaagcaacagcatatcattttaactcatattgggaaaagatgtattttaaactaataaccatattgtcagaaagcacttgttatgcatgactaataggactgtaaatttctaaagtctttagaaggttatttagcaatatgtattaagagatttttaaaggttacttccttctacttttagaaaagtaaccttaagaaagagatacacactaaatgtcttgttaaaatggaaagagctagagagctcatggagactgaacaaaagtcttgagctccatctagaggtcaatacacaatgattttatagattactgttaaattgtatctgtaattgtgaaaaattgctgattttctgtttgctaaaataagcctgtattactgttataatctttcctctttaacaaaacagtaaaatataaaaaattgtatatatatgattcagatgagaaaacacagttcattattggtattttactgttagtttatcaaacctgtaaaaacagcatattttaatgaaatggttcatggtattctttctgataaaaaaacaaagaagagcaagaaaagtgagcaatcaccatcaattaaaaaaacaaacagtatcccaagcattaattgacatttttctcccaaatgtgacaaggttgagaaagtttgtttgagttaagtatctcttatagatacaaagaagctgttgtggcttatgagaatgcaaaacagtggaacagtgtgatccgcatctacctggaccacctcaacaatccagaaaaggctgtcagcatcgtcagagagacccagtccctggaaggagccaagttggtagccaggtaatgtaatgcgttatttttggacttccaaaaactagcctttaaagaaagcccccacttccccttgtcaaaaaaatcatttcaaatggaatatttattctttcttttcaaaattatatcttctaagtgtttaaattaaaaggctgtttgttatggtcaacatacgcgagtatgtttaccaaatgtaaacatatggtgtagaactacagtttacccagtatgtttttactttggaatggtttctcgggcttgaaaaagattttattttgtgaatgacagacttcttttaaatgagtcaagctaattaaagtactctttgctttagattttttctacagctcggtgactacgggtctgccatccagtttcttgttatatccaagtgcaataatgaagctttcacactggctcagcaacacaacaaaatggaaatctatgcagacattattggtaaatatcattgttttccccaatttctcttaaagattttatctggtctaataatcagactggctacatccgcacgcacgtgcacacacaccattccatttgtacacagacacatacaactatatgttacttgtcaggtttcaagatccctactgtcaccttcaaggtgagatggaatcgtaagaccactttgaaaaattaaggtgtttcaggtgacttccatggaaggccagatttcccaaattctcctaccgatccaccagtggtaaaggaaggttccaaaacgaaagtaataggaaatgcagagtgacttttcaaaaagtaattgtgttcatcaaacttaaaaattgagttgtaaattaagaatataggatgtggtttttaaagattttgaaagtccgaaagaaaattttatattctgagaataccagcttacaggttatcttcccctggttgtaattattcttagaacttactgaaataactttcagatttttcacttca

SEQ ID NO: 45084 - DNA, 1654 bp, Bovine  19866880986221
  misc_feature (1)..(1): n is a, c, g, or t
ngctgctcgggaagccgctgccgccgccgctcctggccgccgggctgcctcccctcctctgttttgattcgactgaccacgtcctcttaagccacgagacccggatctgccggctcccgcgggcggaggcgcaacagattgcagcggctcaacacccaaggcagccggcctgccgagcatgcgcgcgccccgcgcctgcccaagtgggtccggaggggcggggcggccgcgaagcgtcacgcggttcgagggggcgcggagcaccggagttgcagttccggttgggaggggtggggcgcagcgttgtgtgatggagagggcgaggccccgcgtttgttgaagtggtctgcgtaggttctgtttcgtgtgtcgtggacgtcctctgcagtgtgtctccctttgccgaagctgatggctttcctcagctggagtcttgagaatagcgggggtagtggtgcccaagctgatggctttcctcagctggagtctttagaatagcgggggtagtggtaagtgggggcgcaaggtggtgtctgatgagacttgtagagattgttttggatcacttaggctcaggtgaaaactggagatcgaggtttggtcttatatatacaaaagtatgacagacgtggcagttattgatcccctgtcccggaggcaaactgcactcggaaagctggctaaattcagttcaagaggagtgttaaagggaatgtgggactgatagagcgataatggggaactgggagaggaaagctgttgttaggcagtcagctcaaacctttgttgctttgaccttcgggattgaaatacttatggtgtgagaacctcatttcttctaaaccaaggtgatgcttcctactctctcattctggccttcttagtctccccactgaacaacgggcccgagaggtttcccactttgggaaaacttcgggctactctgttttcttaggtccataaatggaccgactttaaagcgagactagtgtttaaatgaaagtgtgagttccaaagatttcacagaggtgcttatttgcctatcgtgcaggagaggtgaaagttagctgtaagaaacggccttccttattctgagttgaccttttcgcctaacctggacttctacctcagtgtctggtttatcacctcaactagctgagtcactttcagcgaaattagtataatctgcgagagctgctttttttttttttttccccaatagtacttccctggtggctcagacggtaaagcgtctgcctacaatgcgggatacccgggttcaatccctgggtcgggaagatctcctggagaaggaaatggcaacccactccagtattcttgcctggaaaatcccatggacaaagaagcctggtagtctacagtccatggggtcacaaagagtcggacacgactgagcaacttcacttatttaacctaatttatccaaaatatggggcttcccaggtggctcagtgataagaacccacctgccaatgtaggaaacttaagagaggcgggttggatccctgagtccaggaggtcccctggaggaggccatggcaacccattccaatattcttggctggagaatcccacggagaggagcctggcgggctacagccaatagggtcccaaagagtccaacacaactgaa

SEQ ID NO: 45085 - DNA, 1078 bp, Bovine  19866881016915
  misc_feature (1)..(1): n is a, c, g, or t
ncttccacagtgttaactcaggctattctgtgcctgttttgccaagagttaaacaagcaaagtcttagtttgtcacacagtgcatactgatttcataaatcttataatatcatcatgagagatttgagaggaaatcttttaaaactatgattttaatcattatggtttggcaaacatacagcgaatactctataaaagttaaggtccaagagtatctattaaaattgtaatgtgttactcaaaaatgaagtgaaaaaaatatgaaaaagtaggttacagaagaacatgaggtatgataccatttttgtataaaatatctaaatgcaaaaaagtctggaaggatataaaccactgctgacattctggtggtctctggatggcaagaatactgatgacttatttcttctttttttcacttatctgctttaatcaacattttctccaattatcacaaattatttcatataaacaaaattatttaggtatagattagcttaaaaaataaaaaaaagagaaagaacttcaagaaaacataatttcatttgtttcgatcagcggcattccaactgtggtattaagaaaaaaagatctcgattgcacacgctgaaggaagaaatttgctaggaagaggtccattttataccacacaaggacataatatacccttcaagggagtagttcaaattcctaagatctcttcctggatttgatatatgacaatcaatttaatacatagctctttttctttcttgccgtttgctaaagaaacacctcaattaatgaattctctggaggaaaaaaaaaaaaaaaaactttaaaaaaactaaggacaaaacagaggtttggtcttctggtctcattcatgcggtggaaaggcgcggagggtggcagggctcgaagcaggctaccccagaggaatctgcgtggcgggtcatctaaagtggaagggaacacaaaccctctgcaggctccacagactcggcagtgagaacacctcctaagggtctcaggacttcccctggaagggctgacgccgtccaagttattctacgctgccaacggtttccgacaaaacaca

SEQ ID NO: 45086 - DNA, 1225 bp, Bovine  19866881045786
  misc_feature (1)..(1): n is a, c, g, or t
nacagttttagtggtagtagcttttagagtatctggaaaaaactgcttcacattatataaacctgaaagttctgtttgactattagcaagtacttcattactattatttagctctacagtaggaagtatacttgttactaatccatgtttttcagtagttatagctcttatttctgcctgctctaagttttcctttttggaattacaggtagattgtacattagtgttattgatatcaattccatggctaaattctggcacagaaaaattagaatcctctaagcttcctctttggctaataatttccttcaaattcagtcccagagaaaatggcccaatttgtgcttcatcgtatgatttttttatattctcaaattcagtatcctcacataatttggtttcagaatccaataaaaggcttgtggcccaaataatatctttgttacacctctcatataagtcttttagggcttctaatgaaaaagatccaaatagtttacaaagaatgttaagattttcagattcatcagcattggtgagctcactttcttccacatatgtgcttttgtcatacattaccctatatggaattgcttcttgaacatccaattttgtgttaatattgaaagttttgggtttaaatccatctaatcttcctgttaatactctcagagaatcagaaacactaatcttatttttttctactttccataagagagcaaaatcctgtggttcagtctgggtacacatgcctactcctatttcagggacttctttagtcttttcttctgaaaattcagctaaagtttgtggtcctattttttcagggacagttggcacactattgatataaggaagagacaatgtgtgttccctatgaatctttttacttggacaagtcttactctcataggtcatttcattgggcaacatttcagaacttcctcgagtacaaccacccaatgtttttagctcttcagggcttgtgccccaacaggcctcatgtgaagagtataaggatatttcattcatactgctgttggttccaaattctaggctgggttcatttaagccagcctttggtattcttgatctgtgctctctctgagctaacaaatcgagggaaggccagtcacccacaatgttgaatgaatctctttccgggtttttgtaagtatcatattcacagctactgaaaggttccgaggcatcactacactgtgac

SEQ ID NO: 45087 - DNA, 1820 bp, Bovine  19866881068400
  misc_feature (1)..(1): n is a, c, g, or t
nctgctgggaagctaaaaatatatataaagaataggaccaacagcaacttccagggtggttaaagtagaataatatcatttgaaaggagtttttgttggttttttattttgttttgttttttggtaaggcaaatttctcacttttataagtaagtgaattataaacttttaaatttctttaaaattaccagtaaaagaacaaagccttagattcagatggatttggatattatcagatgataatatggttaggttcttatcagatttagataaagcatgggacagcagggattattctgtccattacttggctaggttatgagccttgggattcttggtgattatgtacacatcacagtcgttgcattctactcagaagatcccctggagaaggaaatggcagcccactccagtgttcttgcctaggaaatcccatggacagaggagtctgctgggctacagtccatggggtcacaaaagaatcagacacaactaagtgactaaacaataacattaagatgacagagaagttcatcagactcctcatgttgggcctggagtactgagctctggcgttaagcactgagctgtggtgtaacagccagagactaagtggaaccttaagacctgaaaagtgaaagtgccctcctctaactagctaatttagtgcacaggcacatcttagagtgtggagagaatgcaagcccattataagtgaagagctcttgctgccctagaggggaataagttaaagagattccatcaaatgaatttgctcaactgcagcaaggtctccattttataaatatcaaatctaggctaataatgtagctgaattgctctctgaaataaccgtgccaaccaacagcaatactttatcagtgatgaggaatagctactgcacataaagtagaataaatgcacataaagtagaataagtgcaccttagatacgatagggtcaccctttataatatgttgagttactcaaaataaaaatggtagaaattgtagtgatagaaaaagtcttttaaggataatgatcgtcatggttgaggaaagagccaaagatgtgtgggatctgtggggttagaaacttgacattgagaattgagaaggaaacaccaataaatacagaagtcttctttaaagggaaacacagaagtataattattctgaaatctatacctaaaattgatactaatatatttttttatttttcctaaataggtgaatttttcctgaaaaatctagtggctaaaagaaaaacaaaagccctgtaacatttaacgagacattcaagatcatgataattttggaagtttcactccagttgttaacagaagtgatggtataatgcctagaattcagtgcatatatcctaatttttttgttttaagaaaaatgtcaataagatatgcatatttaactataataatgcattcgtcttttagcatatcttgtttgtcccagtaaacaattgcttgttatgttataatcataaaatgtctttgtaagagtttatcattaatttaaataatacattaaaaacttagaaaatctttgagcctctatacatcattgtcacctttcatttctggaaaatgacactgtgatgaaacagtatagacttgagattatgtccgtttagcaaaaacattactggaataatttagaaaggcttaagaatttcagtgtagacccttcatatagataacaactgttttagacctacaacataattctacattgattacttgtttaggacttctatgaaaccaagaccatgatgttgtccaagatggggaaataaacctaaga

SEQ ID NO: 45088 - DNA, 950 bp, Bovine  19866881231375
  misc_feature (1)..(1): n is a, c, g, or t
naggcaacgtgaagaaacctggagtgggggactgatcaccacccatcatgccccagacctaatggaacgtctgtccattactttcttgcccagaggcgtatggttattgtcctgttgcaccaaacgactaccttctgacaaagcttctactttgagccaggcaccgtactagcttctatttctctaagttgttgcatttacagaatttgatgggatgcccagttcacacagtattaacagtaattaataatgtagtaacgagcctctttataatgataccttactgtgttttgctttagcttcatatacataataaagcagcactcagcttcagagatatgaagtacaagcaactagcctactaattagtgcaatttggcaatatgtcaaaagccttaaaatgtacataaggatgtttatttaaatattatttattatagcaaaaatatattagtaatctaagatcccaacagaagggaattatttgaacactggtacatcctcataatgaattattatttagtaaatatttttaaggtaaatacatgttgatatagtcacaacataatagtgaaaaccaacatatacaaagtgatcccatttttgtaagtatatatgaatggaattgtgccaggcttcaccatcctgtgaatgtcatacttccattcctatggtcaaattattatggtacaggactggtttggctatgatttcccctcaaagtatccctcaggttatttctgccctgaaaaaagatgcctcatattagggccaccaaagtccgccagctacattcaccatgcaggatccaccttcctacactgattctcactttatcatcaccactgcctcaaaagtcacggagaaacctccccactgtccataccctcttgagactacgaatgtcagagccaagggaagattccaacggctcccaaagcttccaaacc

SEQ ID NO: 45089 - DNA, 2232 bp, Bovine  19866881347042
  misc_feature (1)..(1): n is a, c, g, or t
ntgggacaagggtcacattgctttttccgtgtaatttcttaatagtcactggcctaatatatatcttacttcatttgtcttggattcatctggagactgggcatcttttgttagcttgatattctctgccatctttttcataaaggcatggctattattttcattttttgtcattaaaacttcaagcatgaaccagaggcacctaaatgaaacatattcacttaataaagagactaattgcaggttcttttgctgagtggataaaatagtttactgggaagttctgttgttcgagtatacaaagaataaaactctaatgattaatagaaatatcttgttaataacattcaattaaaataggatataacatcacaaataacaaacatgaacatatagcttaatatgagaaagcctgacagtttcatgaggcatacatatgaagagtcattctataggtatttaataaacatttagataatataatgtgtattaatatccagcaatgacgagcaaaccagcatacagcatagtcttgccattttgaccatttgtaagctatttatcctatgacctagggctcatatgtaattctactgtgacataactctgaatttcatgtgttatgagactggtgtgcatataacgagtaattcagcgaaacagtcacatttcaaatcatttttctgttttccgcttgttatttattttatagtcatttaatacataaagtgtctggtgacacctgaatttctaagtaaattgggatgaagattagaatcatctgaggaacttacattgccaaatctagaatcaaaatctattattaagttcccatgatgattttttaggcaaccccccatggacttactgctttactctatcaagaggagaaaaaaatcacttgaagataatctgtgtgtacttctttgcctatagtatatatatatgttttaaaagactactgtaaaggaaaatttagcattaggttaatggagtttgcttttagtagacctgtcttgcaaaaataccaaactcagtccttcaggtaggaatgaaagaacactaaacagtatcttgaaaccgtaagaaataaaaaaaaaaaactggtaaaggtaacaaagctaaaatataaggccagcattactgagcttctgatttgtaactcctttttaaatatatgatttaaaaagcaaatgcagggaattccctggtggctcaatggtaaagaatctgcctgccaatgaaggagacaagggtttgattcctgatccaagaagatcctatatgttgcagagcaactaagtccttgtaccccaattgttaagcctgtgtgccagagcccaggaaccacaactattgagcccatgtgccgcgactactgaagcccacgtgcctcagagcctgtgctctgcaagagaagccaccaccataagaaacctgagcaccgcaactggagagcagactccgctctctacaactagagaagagcctgccagcaacaaagacccagcacagctgaaaacaagtaaataaaccaaaagcataaaaataatcacatctatgtgaaaagaaatgatatataaagatataatttgtatcaattacaatataaagggaatgaaacagagatgtataagagcagagaaggaagtggcaacccactccagtactcttgcctgggaaattccatggatggaggaggctggtatgctacagtctatgcagttgcaaagagttggacacaaaggagcaatttcatatttcacaagagcagagtatctctacactagtgaaactaagttgctattattcaaaataggtcgttacaactttaagatgttaagagtaattatgtataatcggttcctctgtatatgaagtttgtctgtatctgtgggtctacccgctgtggatcttaaagcactatagtatttattattgaaaaaaatctgcatgtaagtggacctgcacagttcaaacctattcatgctgtaaagttcaactgtaaatacaaaaatgagaggcagtaatggagcaattaaataacaaaaaatatataagacacagagaaaactaatagttatatggcagaattacgtatcagtaattactttaaatgaaaatagattaaatctcccaattaaaaagcagacaagcagagtagattaagggagaaaaaagatccatatatatatcttgtctataaaagactcatttcagatacaaaaacac

SEQ ID NO: 45090 - DNA, 1262 bp, Bovine  19866881377254
  misc_feature (1)..(1): n is a, c, g, or t
ngagaaggcaatggctacccattccagtattttcacgtagaaaattccatggacagaggagcctggcaggctatagtccatggggcttcaaagagttagacacaactgagagactaacactttcactttctcatccaggcaaagttcaaatttatttacagggtatatatgacatatgacatcacaatttggacttcacattccacttacacattgcactagaacattggtcatctttatttttacacacatcatgtttttacatggtatatctgctatctggaatgttgtttgcatcttgacttcttgctgcatacctattcattctttcatatctgtgactgtaacattcatagtattctgtgacacttttctgaacctcacaatgagagtgtcttcctttgcactatttcactcctttgcatatgtttcccttgtttcacacatcacacatggttgtattatgttggccaagaagttcgttcgggtttttctgtaaggtgtcatggctaatgccaaactaactttttggccaaccagtatttttattccttttttttttttaattgatatggctatcttcccaactaggctgtgagtgtcttaaagggagagactgactcatagttgtaatccaatgcaaataacaggtactaaatgtggcagctgttttagaacacttcattgaagtgaactgaaaatcctgccacattaaaagaatttagggaaggcagagaagacatgaaatgctgaacataaacccttgcataaattttacagtggctaaatcctaagatgccgacccaaagagtcatctctgagtcacctcttttgaatttcaaagtcacataaatgaagcaactgaacatagcatctaaccacttactttgaagaggatttcttgctagctatttggggaagtacaaaattatgcaaatgtctttttttaacggaaaatctatggaaattcaaatcaagtataaaaacgcaaggccagcttacctctccagagagaatgagtaacttggaaggggggaaaatagtctaaacaaaatttgtgttattaatatagcattttttattttttcctgcattatcattttgtactttctgggagatggaactcaacttctattcctaccatttaaacaggcttccactttaatttgaaaaagctgaacgcagagaaacagagaatagaatggtggttaccaggggctgggggaatgtgggaaatggggagatattggtcaaagggtaca

SEQ ID NO: 45091 - DNA, 2292 bp, Bovine  19866881521194
  misc_feature (1)..(1): n is a, c, g, or t
ntttgctactattatcttatgatacaggttcgattttctcagaaaataatatcaattcctatagtaaagtatttctcaactttttctttattatctcccctctaagaagaaatactagttttaatttagttgattgaattaatttaaattcaatttaattttttcctattgagacaaattaaatactaaagagaataagattttgtttaggattgagttttggagggccaggaaccattgtaatagccacgggccctggagtgcacaggctcagtagtggtggctcaccacttaggatctttccagaccaaacccatgtcccctgccttggcagtggtccactgagccaccagggaatgtaatcacttttattaaaaccagcactatatggtaactgtgcagaataatttgctatttgaaattaatatctttctctttctaatagatgagaagggatctgcagcactgggacagcgctctacaattggcaaaacgtttagccccagaccaaataccgtttatatcaaaagaatatgctattcagcttgaattcacgtaagtcctcatctttatatgtttcagtcagtaactaattattgaatatcttcagttctaaactcctattcattataaggccattgatttaataattaaatacatggatttaatagtagcttcttaggtggaaaaaaaaccatattaattatacatccaaaaatgttttattctaactaatgatgtcttatccatgtatctatccactccctttcagcatcaaaatctcagtttgggtctaagccttttccatatttagaattgttttgaattgagaaatattgttttgaaacacatttggccaacaacagttacacatagtgtcaaggtgactctgcttttcttaatctacgatcatgaccttgaccacgttgaacactttgaggatttgcagtgtgaattcaaggcatggtgaaagataccaggctttgttccacaactctgtttgcttcaacttgtacttctgctttttaaaattgaattgcacgtggataaaaattcatcagttcatgttgcaaatcaagccagaagcttttcaaggtgaaggtgcagtgcttgagtaataagccctgctgatgcatgatgaatatgcttcacagatcttgcctacctttgaaaatgccataatctcttctgagagatttagaaatttctagtgttcttaattgctgctgctgctgctaagtcgcttcagtcgtgtccaactctgtgtgaccccatagagggcagccccccaggctcccccatccctaggattctccaggcaagaacactggagtgggttgcccatttccttctccaatgcatgaaagtgaaaagtgaaagtgaagttgctcagtcatgtccgactcttagcgaccccatggactgaagcccacaagggattttccaggcaagagtactggagtggggtgccattgccttctctggttcttaattactagacagtcttgactgtcaatagtcttaattgatagactatacatttttacttcagtcctgcctaaaagtgtaattttagagggatttcaggatccaatttgaaactcccattcagctgtggttaatgtcactaatgcagatacctgcagagacaagcaatgaatcatttattgacaaatgtaagtttgcaagtatatgtagttgcaatgacaactacatcataactgggtgatttattataggatatattccattttcaaaaattataaaatgggaaaaacactgcttcttgaacaaagaaaatatggttctaacattaaaaatcatttttatgtagttccattttattttcatatagactttatagtcattgagaatattgacagataataattgtagaaattactccatcaaaaagtactctttcatttctaaccaggataccttatttaaaagttcccattttgcaaataaaagctttttggagactttatttcttcttagtcaatcttaatctaaatttatcacatttctgccccttacaaagttatgttgaaaagaacaaatgggaaccttagtgcataacacaagagaggaggcctcagtgccctggccctgcatctgtgtcctgagagtgactggggctgagagtaaagagaagagggtcactgcactgggagatgacccaccctccccggtctaagcacaggcacttgaggaagctctggaactatccagaaaactttcactgttcctcctttcaggagaatcagtcttgtagcaaaccctcaaaag

SEQ ID NO: 45092 - DNA, 802 bp, Bovine  19866881665380
  misc_feature (1)..(1): n is a, c, g, or t
ncatgaccgagcatgcctgccagcatgggaaatgaagtggggagaaaatgctggagcacactgacccccagattcgtgccacaccagcctgcgtgccagtttggggaggcactggatctcgccccacgcatgagtgctctatagctgtgtggtctactgtggtagccactggcacatacggctatttacattgaaaagtggataaaatttaaaagtttctcactacccacattccaagcgctcagagctctgtgtggctcctagctaccatattggtgagcacgcaattagaacactgccgccagcatgaaaagttgtgttgcgcagccctggacagcctttaccacttcagtacacaaagcgaagtggcgggctcactgctccagtgatctgggagacgggatacagccagacccagccatgctttccgcacatactgtgctgtggcctctacccacccccccagcagaggtggcccatgtaatgctatggtctgagccatgctcattcctcttgctcctcgctgggctggagcatgggcccacagtctctagcttgtatctctatatatagtctcaggaccatcatgaagaaacaggtgcatttcatgtgattcttcctcacaggagacctgatacatcagagacagaagaggccacaacccccgtgtcccttctgcgaatttcttctcccagagtgtgaactcctctgtcctgggtgtaaaaataacatcccatattgcattgcaacagtaagtttctttatcatttcccttctttgcatatatataatctatagcccg

SEQ ID NO: 45093 - DNA, 685 bp, Bovine  19866880163912
  misc_feature (1)..(1): n is a, c, g, or t
nattagttctagtaattttctggtggagtctttagggttttctatgtagaggatcatgtcatctgcaaatagtgagagttttacttcttttccaatttggattccttttatttctttttctgctctgattgctgtggccaaaacttccaaaactatgttgaatagtaatggtgaaagtgggcacccttgtcttgttcctgactttagaggaaatgctttcaattttttggttcaattctgacatctgtacccaattgatttcataaagcttttaggatcttcaactaagcataaataattccctcaacctctgactttgtaactcttggccttaaagttactcagcaagaatgcagcatgattttcctgtcaccactgtcaatccactgacaaacatagcccatgaatactttttggcacttagggacttaagagtgttaatacagaactaccaagattttatttttagctgaatttttctgtcctcactctttgtgcacaagagttaagatttgggggagagttcccaccatttcttaagttataggagtaggccactgggcttactttagcactttttatttgtaggtgcttggtatttttgaatattattctggagatttctttttatactgtcagatattaaactgctagaacgcaacagaagcgcattcaaattcaacaa

SEQ ID NO: 45094 - DNA, 2184 bp, Bovine  19866880454691
  misc_feature (1)..(1): n is a, c, g, or t
nagctggggtggggtttgaataattaatataaatagagagggggtcttggacagagtggtccacataggaccctgtcatttattagagagtggacatttcgagctctcgctgaggtggaggacccctagaacataaaagaacccaggaacataaaagtgtatggttgaaataactgacaagttctcaggtgtaaaggtaaagagtttgagtgtagaggctgtgtgtacttatccactatttcgtattatttttattttcttaaggttttttataactccttccattgtttttataaagggggagctggtgtgagctgaggatatttaaggactggcttgtttgaggtttgtggcataggatgtgatgatgacaataggttacacagtgggagttgatgaatatttgctagggatgatgtgcagtgggaatgcagttatcttaggataaattatggaattggacttactgtaaaagatgattgtgacagacttcttttgagctgggcttttttgtttcttcaaacgaaaaatattggcttcaggaattactgtttattttacttgacattcgttttaagtagtttttatgtacagtcagatgcattttactcagcctagttagttttagaatttttgagagattgttttctagaagctcagtgaatcatataaaatacccctgatgtcagcttaccaataaatcaggccatattttttcttcactgttagtattttctagggatctgttagggaagagtaaatggaagtaatggtttctgtaagcaatagaactttgctttttaaaacaattgatttttgggaaaaagaagttgctttaggagaagtgccaaatttttatggtgtgaagctccagaggacagaatgtaccaccataacccagggtttattttgtactctagggtgttcagggtgcccatgctagtcttttcatgttaacgtatttggtagtttgtaggttgcaggaggcctggtaacagctttttgaataaagaaaggaagttatgcactggagtttaagccttcagtttgaattcttgatcttacagaatgtatgaaaaaaaaaattgaagtttcaaactgctactcttccatagaacaggtatcatttgtgaatgagcatggtccctggtatttagtagatgcttaaatataaactgttaaccagcatgtgccagctactgttggacatagctccttgggatctttcagatgtttgatatgaactatagtactcaaggcattagcattgtttctattgatcagttggttatgaaagtaaaggtgtgtttttatcttctatgattattttggtttacattcataatcagagatcccctcaggatattaggctgttgtaatacatgactttataaacagtgcatttaattaaaaccaaaattaaacatatgatcacttaggaaatttcaaaagcagtaggtaaaaatcaaagtactacaatatttgattttactttttaatcaatttcattgttttaagtaattttttttttaatattcttgagcaagttaaatgaacagattcaagcaggttgcagagagagatgcatttgcttgagtcatgacataacacatgctgccaagtcgcttcagtcgtgtccgactctgtgcgaccccatggactgcagcctaccaggctcctccatccatgggattttccaggcaagagtactggagtgggttgccattgccttctcccgacataacacatatatgaaattaaaattatcttctttgctatttctataaacaaaatgcacttatcacagtatacaaataattttgctgttgaatacctcctttgatatacatgcaagtcatttttacttcctctgtgtaaaactatcaaatttggtctaagttgcaatcattgttattaacaaaatgaatgttaccaattaaagttactatagaaattcaggaggaatgcagtattgtacctgttttgttactttttgtttaaatttcttttagatgtgttattgagaagctcttgatatactgtctaatcataatattctgtaaaaaaacaaaattatgttatacagggcttcctaaccagagtgtagtgcataggaaggcttgcagtgtgctgtttgcaaatgttttatggttttgaatttttaaatcatttttatgattttaa

SEQ ID NO: 45095 - DNA, 1641 bp, Bovine  19866880489889
  misc_feature (1)..(1): n is a, c, g, or t
natttcagtagaaaacatcaattttagctatgtatctttttcttgggcacacaagttttatgaccgaagcagttggaaatggggtgctgtaagttttgcaaggacttagtaaaagtcttttccagaaattggcgaaagagaagttaatgttgtgctactgagaatttccaggtagcgcaaagcaattctgtttccttcattttcacttttttagattccctgttttgtcagctgacagaatccatattttctggatcaagcattctgtttccatttatttttataaatactcaactaaaatgattggttttattttttattctagttcaatttaaatgttagccaattcattaatgactagcctaagtacacatatttatcttatccctttactatgagttaaaaggggaaatttgttagctacaaatattactaaaacattattgaatgctaacgatagttcaggtactattttaaactttacatgcattacctgtttaatcctaataaccttacgagagtagatactattattcatatattgcagataaggaaatcaagacacagaggtggcaagtgacttgcccaaggtcataatggtcataccctgcaaaaacttgaacctggaaaatctagctctagaatcagttctttcaaccactgcacagtcctgtctacatcagattttttttgcttcctaaaatgactgtttccactacgatccagtaaggttcagtatctagcaaatacatagctactgatagaaaataagacttggtttggggtccactgtcttgtagggagagcctgtgtgcaagatgcagtgacagatctgtgaaagggaaggcttgctgctcccatcagcttcaaaaaacttgcttttctggccctcccaaaactcctttttaaaaatattatttttcttcaactttttaataaaatgtaaccaatttttgtagaatatatttttccttttgagggtgaggtagaagtaggctttcttaccagctacagaaacaaggtaggaggcatccatgatgtttatccccaatgttttggctctggctaccaggtgaaaggtagggatgaaatatgccagctgactgagaacaaaagaccacgtaaatatgtagaaaaaaggattcttaaagagagaaaagtcaaagagtttttgtttacagctccgtgaagtagtttttttccaataagtttcttcattagtttttcggaaaagtccatttctgttatattcattgttgaactctttgctttgattttgtgagacagttaaacttatacctggtcgtcgttccttctgcataatactgtcctcaatggccgactcttgtatctcattgcagcatgatgtttctgttccacatgctgcctctggaccagttggagacaaactactttcatctttaatatcagaatcgctcgtgcttttgatatgaatgggtcgcaagagcatactagaaggaaccagatgcaatatgatagctccaagtaatataagagcacctaaacaggagagaaaaattgagaagttaaactaaaattacctctttgatttcacaatactctgtatccttagactcagaagaggccccaccacgaaatattcagtcatagtacaataat

SEQ ID NO: 45096 - DNA, 1469 bp, Bovine  19866880560508
  misc_feature (1)..(1): n is a, c, g, or t
ntctcccctcgctggaactctggggccacagctctgagggagcctgggtgccccaggtagtgggggctgaggccagagcccccaatgtcatgctccacattgcctgcaggaagattctcgggatcacccccctaccctttgccagcttctgggatggcattcccccaggctgaggagaggagagggttcctggtgcccacgtggagtgacccagcagtgctgaggtcatatatgggagggcctgggaaactgtggggcgcctgccgctgtgcaggggacaatggttcctgggttttccctgcaggaagcaggtgacaataaccagttttgctggagaaacctcttttcttgtattaatctgcttcggatcttgaacaagctgacaaaatggaagcattcaaggacgatggtgagtcagcacagccagcaggcatgagtcccagagcttaaaccagagtgccacacaccatcctgtccccttcacatgggggcagagagtccccagggttgctggagcagccacatcttcctcacctaactctcctgtagccacatccttacatgttgagggcggatccctggttccttgatgagttgaactggaagcggcacagtcatgcactgagacaaattcacgtgtaatatggaaggaattttgtatagcctcctaatctccaccggtaacataaccagggttctgagaattgtcttaactctgtggatgcctcgggtggggaggcccactaaccccctgaaatcgtatgtacctgcacataaggatacttcgggtggtggaatccgtagctttcttcaaattccagaatgacccatacttgggcgaccaaccgtccaggtttgcctgggacttgcctagttttagccaggagactttagtctaagtcatatgtcccaagaaactcttcagtctgaggaagactgcgacagttggtcaccctacccagatgatagagcagggttcatttctgccctcaacacagcctcccttgtgcccatttccagatgctggtggtgttcaagtcagcccccatcctgaagcgggccctgaaagtgaaacaggccatgatgcagctgtatgtgctgaagctgctcaaggtgcagaccaagtatctgggacggcagtggcgaaagagcaacatgaagaccatgtctgccatctaccagaaggtgcggcatcggctgaatgacgactgggcctacggcaacggtgaggctccgtgtgaggcgagggaggggggggtggggggcaggcgacagctctccctttgctcttaagtttccctccgagcaaccaaccttggcagtgcccagctcctgcttctgtagcatcagagagggaagcccaggaaggacttggagaaactgccaggcttctgtctgtggtcatccctgctcctctttgtgcctcctctttcctttaccagaaattgtcacaagactttctccgacct

SEQ ID NO: 45097 - DNA, 1036 bp, Bovine  19866880685171
  misc_feature (1)..(1): n is a, c, g, or t
nacacacacacacacacacacacacacagacacacacacacacacacacacacacacacacacacacagagcctccaggcctcctaccagtccctgccccacgctggccccggagtacacacaggccgaggcctcaggcctcgagccctatttccagctcctcttccttccttgtcattcatttccctgccagttcttttcatgctaacgagaggaagctctggccagggagtagcttggaaaggaagtctttgaaatggaaatgttatgacaaaatgatggattgttttctgagctgtgcagtttgtttctcccttgcagccgcagaaggcgagaatatctcttcaccgggagtgctggaggttgcccacatcaggaagccctagatagcaggaactgcaagtgaaatacacaccaagagcaggtagcggcagggggagacctcgggcaggcagaagaacacagccgggatactgcccagagccctagttggagcaggggccctgaacgaccagagaaggcagtggctccctgctgaggccagaagaaacagtggcaggtcctctgcgcctttgctcctgccattcgctctgcgccttgtccccttcttctttctctgacccgtgagctgttcttcatccctcaaggtcaacttaaatgtcccctatctgagaagcccccttaatgcacacaatgtccaccttacccttcgaacagtaggagtaccctggccactcctttatttgaggctaattagaattgtcatcagtcttgtttattaaaaaaatatatattttgagtaccaactgggtgtgaagctctgtctatgcaccatgtccttttgtgaacacagcacacagagcctccacccccaaggatccctgtagggaatatggactgtggagacaagaagtgtgtaaactgggcagcatgttggatgatttaagctccactggagaaaatggagtggggtgagatgactgagcgctgtagaaacgaacagtttatgttataaagcaaagtggaagggtaggct

SEQ ID NO: 45098 - DNA, 808 bp, Bovine  19866880702256
  misc_feature (1)..(1): n is a, c, g, or t
ncccatatctattactgtgtccataggaatactcggtaagggctccgtctctgtcaagccatgtaacaaaggacactgtgggaaaatgtctggcatcagagggagcatgtggagaggaacttaggaggaacaagtttattttgtattgaatgatttttaatgaatgcaatattaatccttgcagatgagcaataatcattaaagtcaattaaaatgataagaccttattggaatcctgtgtcattcttggttgaacaacaccttcatttagaatctgttttccaagatgagagaagtcatgggtcagttaacaatatctaagagattttttaggacctagtatgtagaggaagaggctagatgcagagttcctcagtaatatcttaaattttgtgtctgctctgtgcccagcattgggcctgcacactttcactttaacttcgttcctgcaccttgctgcctaaaattcaggcctcctcaggtacacagtccccttcataagaccctgtacctaattcttaaaaaatgcctccaaagttacataagctttagcccatccccaccccacaccatacctgtatccatctctgaagtagtctccatattttctgatttaacagtgtatctgttaatattgttcaaaagtaataccctttctattttattaaactgatcccagtgttgattttgcagtgcagattggtaaaatgagtgtttttagttctgcaaggttttatccatgcaaataaatccaaatataagataaacttcatgttgcctagagttaaactttaaaaaaaaactgttt

SEQ ID NO: 45099 - DNA, 1237 bp, Bovine  19866880771668
  misc_feature (1)..(1): n is a, c, g, or t
ncactgtcgcctgctaagggagctcagtgcaaatgacactcattcctggtctgcttggcccctcaccccacttctttcccgtaatcgctgcacatgtcactcagttaatttcctgcatttcccaaagcaggaagctgtatagtgtttagagcaagcagttcatgccagggctgctcttaaaaagcaggtgtcacacactcagctcacggtcccagctccaacaccgggcccctccacaaggcagataagcctcagagggagggagaaatggaaagtgaccacactctttgggggctgttcttggatatacagtaggtgctaagcagggacatgaagagcccacaagagatgcaccaggtcatgtgaggatgccgccataaccctgaccgccctcctgagcctcagggggtcagatctggcagctgattggttggcttggagcagagagaaggggcggggctcctgggtgccctccccacctcctaccttcggccacatccttcgggctgtctggctgaaaaagtaaccgtgtaacttaattctctttttctggcagagccgctctggatatgcccagtggaagcacccactgcctgaggcagctgtgctcctggttccctgctgcaattccaggggcaaagctgccaaggcatctccttctgccttggtatttggcgagagcaggtctcagatggttttcctttcccctcttgctgaaggaaggatcctgtggctccctggggactggtctagaactgatcacttgcctcttctggtacctccctgcagggaggtggcacagggttctgcagagcaagacctggcatgaacgcttgagggctgtagggagtgtcccatcttagaccaggacctcagcctgccttttgttggattcactgggggcttcacttgagctgcttcttaccaagatgccctcagagccagtctgatgacaccctcagcaagacattagcaggacccttctcatggctggggctcttgggatgcagaaagaaacagtagagaaacctcagctgacccaggataccactccaggaaacagatgatcctgtgtctgtggcctgacagaggaaagagccttccacatgggaagagaaaatccaggtcccaatccagctcttcaactagccagctagttcccacttttgactcaagctgccctcagagccagtctaatgacaccctcagcaagacattagcaggattcttctcatgg

SEQ ID NO: 45100 - DNA, 1742 bp, Bovine  19866880886911
  misc_feature (1)..(1): n is a, c, g, or t
ntaggtgccaggtctaaaaagtaacttacttaagtttacaatactctttctgtatataaaggcaacacaagcccctctgcttgaaactaagtcaggtcacagatatgccactatggcagggatgatggatttattattattatgtaaaacattaatcggacatacagtgcagtcgtttgggccttgaaggtttcttgaaggaatacatttagttttagatttctgcacttgaatttcagcctttccatttatgaacgtgggaagcacctcaaaaaaatctgccctttttcctccaaccaaccagtctgtgtgcaaaatctaactgggtgacacagactactactttcaattactctgccagcaacaattctgagctttaaaaagccccatagtacagaggagtaaagaacaagatgtcctgggtttacttgttctgacatgacttagctgaagccttccattgtttacttttctggatttattttctcatgtgtaattgttaccatttactgagcattatgtctgaactctgtgttgagtgtattatatatataatcttatagtactgtgattaaaagactttggagccagattcaaatcctagctgaaccatttactaactgtgtgaccttaggcaaatttactcaacctctgtgcctcagtttctttacctcatagggttgtcatgaggattaaatgacttagtgtatgtaaagcacttagaatagtacctggtacacagtaagagctcatggatgcaattccgtaatatttattattaaaaaacaactcagtaaagaaactgagcctctgagatgttctttttggtcccagttcacactactagtaaatagaagagcaaggggttgaacctacgtgtgtccaaccctgcatcccacatttttattgcctactcacttaccgttaagtgaagttgaactgaaaaataacaccatcacacatttagcagggttactgtgaaaattagagataatgtatacagagcttagcagccccaacatctattcaataaatagtaactactgtcattatcttaagtcctttctagacccaatttaaaatgattcaaatactacttcagtagcagcaactgtgcagtgccagaactgcaaggaacatttctacttttacaaatgtcaattgagaagtttcagttttctaatcttgttatttggagatgatatctactctcataaaagtccccagaaagggtccggataacaagaaataaaaactagagaacaatagcacactaggctctcagtccggagaacgcaatgcaccctactccagtactcttgcctggaaaatcccatggacagaggagcctggtagactgcagtccatggggtcgctaagagacggacacgactgagtgacttccctttcacttttcactttcacacattggagaaggaaatggaaacccactccagtgttcttgcctggagaatcccagggacgggggagcatggtgggcttccgtctatggggtcgcacagagtcggacacgactgtagtgacttagcagcaggctctcagtcaacatcaagtgctatgcagtccaccaaaagggatgatgtgagatacttacaacctagattgagtccttgcgaatctgtgcacaggactccaacaatggatggattcttcattctaattccaggaacacaggaaaaaggaagaaaatgatgtgggaaaatgacattaattataacaca

SEQ ID NO: 45101 - DNA, 600 bp, Bovine  19866880938159
  misc_feature (1)..(1): n is a, c, g, or t
nctatctattgttagtaataataactattaactggaataaaaagaggaacttggggcattgttacaaagatagaaatacacatgatattcatttactcgacagcaaagaaattaaagccagatgtgcacagaacttttctaacttgtttgaagatcttttaaatgagaaattgccataggttttgacttcatgctattaaaattattgcctgtgtgcatgttcagtcactcagtcatgtttgattcttttgcaatttcacggactatagcccaccaggctcctctttccatgggatttcccaggcaagaatactggagtgggttgccatttccttcttcaggggatcttcccgacccagggatctaacccgcatcccctgcattggcaggctgattctttaccactgagccgtgtgggaaggacaattaaaattattaaagtgtaataattatgtaatatataacaaataatttagataatgtttctgtttgcttaaaagaacagactgtgagtgttagagcaattatgtgatgctttttgaatactgccttatactgatgattgtcttatcccacgggaagtgttctttgtcttctgac

SEQ ID NO: 45102 - DNA, 859 bp, Bovine  19866880986721
  misc_feature (1)..(1): n is a, c, g, or t
naaggtggtgctgctcatcagtggtggctgggactgcttctccctactgcccaggctcttcccttcctgatggacatgggctcaggacacctggacctcagaagccaggccctcagggaagagaaggaagacactggggtcctcaggggcggggggtggtggagccttgtcactgactaggcagatccatccatccgatggatctgcgccctcctcgggaagaagcacagtgctggccactggagtctttgtgtgcttgggtttctctgcgcctggaggaggcccaggatgggggtagctgggctgctagctgaggccaagctgctctgagcaatgtggttgtgtttactgggagggtgggagggccgggcctgcttttttcctgccttccaggaagataaggcagaaagcggggatgaaggatagaatgggtaatactctgaaaccacaagaaagggtcctggctttcgtctctgccctacagctcagacatgctcctggggcatctgggagcagggaatggccccacccccactactctggggtccctgctcagggaagctcagaaccctcagtgggctccccagacttccatctcccctccagtgtcagttcacccacaagctgtttcagctctctcactccccttcggagccctagttttcccttccaggtgagcccagcaaccctagagccaggcttttccccttgctttcctgtaccagctaaagccacagggaccctgggcaggtgacatgacatgcatgggccttgagggctggctgcaggttcatcttcccctaccctctaggatccctgcctggaccccaggcacagatcagccctagagcaaccaagg

SEQ ID NO: 45103 - DNA, 1118 bp, Bovine  19866881064690
  misc_feature (1)..(1): n is a, c, g, or t
ncatccagccccagggcctgatttctgttgggaagagtttgttgttgtgggcaggggcttcccgccaggctctcccagccacggtctgggaattggcaacactgaggtcactggctcaggctggctttaagcaccaatgatcctgagacccctggcagggaccctccccattctgggcagctaccctgggagcggccctgagacgtgtttagcatttcacatctaaaatgctgtcacacctgtgatcctccaagatactcctcatgtggtagtactatcattctcctttcctaaattgggaaaccaagactgtgacatgccccaagtcacctggtcagctagtaagtggcaaagttaggacacccacacaggtcttctgactccaggaggctatcaccctcatcccatacaggagcctcaacttggactgcaagcctgtggctgcagctgagctgggcgtggaggggagcccgggagggctgacagggcaagggaagggcaacgctgtggtgccagcatccacctctcctggcccccatatggcctggctcacggtctgggtggtcaaggcagccagggagccctgtggccaaggtgccctcacctgtactcgggcctcggtcaggtccgtgcgcacagccagctgttcccgggcatatacatcagggtagtgggttttctggaagactttctccagttcctccagctggaacgtgctgaaggttgtgcggttccggcgcttcttgctcttattcttggccagctccatggagtcagggagtcccggggacagagggacacgcaggctggccaggcaggggcctggggagcctggcaaattagaggtcccgtctcgggggccccctcggcagtccaggggtagctgggggaagctggcagctttggaggccttctcctcagctgcaatggaaaacacaaaaaggaggatggaaaccgaaccagggggttttgtgggtggaatggagggagggggaagaacgttgacgcttcagtccccgcctcccccttcctttttcctccgtcctcccagcagccacccttcaagggagcctggcattcggaggcctgcctgctgagcctacagctggggagggggc

SEQ ID NO: 45104 - DNA, 1222 bp, Bovine  19866881066424
  misc_feature (1)..(1): n is a, c, g, or t
naaagcattatgccagcccccccatgagaaataacaaaaagatctgccatcccaagattacccaaaagacccaccagcagagcttcttgggcagtaaaggcactgtgcatccaccaatgcctgaaaccaaaaggtggacttcacctgggctactacatgccagacgttgttttatgtgtattaatttagctgaatctcacagcagggttgtgacagatgaactatttatggatgaagaaatggaggttcagagaggttaggtagtttgcccaaggtcacacaacttgcagctgagcctggatttggacccaggcagtgggctccagagcctgtgtgctgagtcactgtgctgtggtccctcagaaagattaagggataggctcaaaatgacaagctggtaaatgtaaactggacaccaagccttctaacaccagtgcaggcctgttccacctttctgtctcttcttcgtgctgttatgcaaatagatcacctatttaggtgatgagggcaaatagctgggacagttccctctctctgcattggccccttgggggtgagaccttctctttcctccaggccagggccctcctaggtgcctgcacttctggttggagttggagaaaggagccttcccttgttagtcaggtcagggttctgttcctcaagcccagtggtactgagacaagcccccagctgtgcccttaccctagcctttctcacaggtggccaggtgtggggaggcccagatggagtccagggccgtgtcgaagaatctcaacgccaaggatcagtcactgagcaaaaccatcctgactcgatcacccatttatgggcaaaatatcctacaagctgggaataatatggggagacacaaactcaccgccacccccctctgtgcctacatgttatcatttgctcttaggacactgggtcgaactaatccagcctctggggtcagcatctgatccgcgcactgtcaggtgagggccattatttcaccaggtttgcccctggtgccctgcactttgcaccctgcccactaaccctcctggatcctctctcaagcttcctccagaggcacagacagccagggcgatcctatttcataggatagcatttctgaatcccaggcatcagctgggcaggctcctcctgccagtctgcccgtctgcccggagaccagcaaatcccctcggccaggagagcgacttagcggagcatc

SEQ ID NO: 45105 - DNA, 1894 bp, Bovine  19866881114367
  misc_feature (1)..(1): n is a, c, g, or t
nagaaagaagtgattcacccacagtcacatggagccctaaggctgctcctgctctccctggggccacagcttacactctggctggctttcccacagaactgccaaggccctgagtctgggtggggaggggtctcacctggggatggctgtcggttcggggcagcatggagatgtcataggcagatgtgaaggggttccgcccctcctggatcttcccataacgctcacgcttccgccacttggctctgcggttctgaaaccagacctggggacaggttgggagaaggttgacgaggtgacaaagcagccacgaggcatggagcccactgggtagagagttgatggctgtatcctcctgtgggtggtggggagctggctccaggctggtgactctgaattgcaggaacttataaattcacgtcattctcagggcctgggatggggcctaaaagaagcccaagcccagagagggtttactggccctgtgggccctcccctaccccgcaggctgagtcatactggttctccagtctggctgtgtctggtaagggtagtgttggggtctgtggcctcagagccccggggcgagtatgcgtgttgggcttctagtcttatctcttccccaatgtccgcacctgagaaatgcagtaaggtaacctgaaggccacagcctaaagcccagctccttaacacggtcccttggcactgacccctgcccctccctacagcctcatctcctgtcgggcaacaacactcagttcttcctagcagcctctcaccccagctgccgtctcaaacactgctgtctcgctcctcctgcctttgcctaggtttttccagcttgcgctacccgtccccccacacatacatgtgagctgggcaccctctactggacttcctgaaaaacccagcagagctctcacgatactcatcgcatcctactgccaccatcggtcttggaaactcttccccactcattactgagctgggaggtgaggggggcacatctgtgtgctgcccacgtagctgggctggatttgtcacctggttatgtcctgtgtgtgccggtgcacgtgtcaagctctaggctagatatcggcactatcaaaaccaaaccaaacacattctcctgctttccagggattcggctgggagccacaacaaaaggagctgcatgtgtgtataagcaaccctatctgagtccctcactgcccaccccctctcacacagaagggaaggcccgatagttaagaagttgggcgtactcctggcccttaacccagggttgcagatcccagagcaggcctgggtcaaggctagggagggcccactaccggttcctccttgatccttaatttgctctccctcccctgcagtccatggggttgcaaagagttggacacgactgagcaactgagcaacaacgacctctgcagacagatggaggagcctggatttgctgatcacttttcttgtaattcttccgtcaccacccgctctcccctgagctctgaacctgccccctgcactgtcccatgggtggtcgccttactcctcccaccgaggtggggtctatgggtggtgtcaatgctcctgtcaagcatccctggtcttgggcctcaggcatcatggaagcttctggactaggtctgggccatccctccacccctttagggttgaaaaggcctagaagggcagtgaggaaagtgtgtactgcctccccaaagcagttccatgggggtagctattcagagcatcccccgccacaatccccactgaggcttgctgggctgtctggaaatgtgacatttggacttccacagcttatgtgatctggaattatctcgaaagctgggcctcttaccctgatggtcccatgccctgaggagccctg

SEQ ID NO: 45106 - DNA, 954 bp, Bovine  19866881127653
  misc_feature (1)..(1): n is a, c, g, or t
nactctgggatcaaaccactactctcttttctttttatttgccatacctttattcctactgaggaaagcgcactgtggctgacacctaagcatgaactggctcccagatggatgtcatttccagccagccagaagaaacttgggcgtccagggaaggaaagtggagaaaaagtgataatgaagggaaagaagtttgtggaattcagaatttccaactgtgactgctttgtggtcttgcttaaaactgtcagttatcaaggtcttagaacaacggaaaagggagagagcaagctgagtcccagatgggagagataatctgaggtcctggaattgagggaccctttttctcccaggaccacagccaagtgaggtctggagcatggtatcctagcaccaccagggggcagcacctacccatctacagtaggctgtcacatggttggctgagcagggggctctctccttcctgggttctgagctctgaggaaataggaggtcctcatacacacagaatagagggagacaagccctgtgaggccaactgccacatgctcaattctccggaaaatttcagagaggctcaggtaacagattagcccagagctctaggataaaaccttcagcaagtggtgaggtcttctctggaggcctctggcctgaggcagagtcccctactccagaagctgggcagtgtgctgagtcggaggccctcctacccagttccctttctccccactgcctctcccaggctaggccctctgttttcggttactccttctgggttcccctatctccatcccagttttctgatctccaggcctcctttttccctggtagccttctccctccacccatctccccacaggcttctcaccatctacacaccctgcagtgtggaaacaccaagagagcagagatttaccagggcgaggctggagacatgttttgttcatt

SEQ ID NO: 45107 - DNA, 1040 bp, Bovine  19866881173151
  misc_feature (1)..(1): n is a, c, g, or t
ncagactgcacggcccgcgtcccccgggccgtctctccctagcagcccgtctctatagcagggacgcaagccacccgcccaccagccgagttcaggctagggcactggggaggccactggcggcccggggctctacccagtttcggctcgcatccgccgcgcctccatttcgtttggtctgtcctctgctcaacccgcatggttagtttccttctcctacttgtgcccattttgctattttctgcacttttaggatgcctctttttcttcatattgtctgctgcttctcttttcgtccgttcccctcttctccatttaccctcttccttcgatcctcctccgctttttattcgttcgttcttcatttatttctttccgttttgcccagttcgctgatcgccttttacctttctttctttcctctctccactattgttttgtcgaatttcctcttccctctttttggttgtttacacttttgtttttttttttttccccacgcatttcgttgttgacaccgtcgcggtcgctagagtcctcctcgccgctctttctgctccagcgctctcagcagttagctcggcgccagggtcggtcgcaatcccggctgtccgtccgtgatccatcgtgcccagcagggaagctgagccgcagggtgcgtcatccgaacgcggcgcgtcgagccaggccaggtacctgtgtcccgggcggtgctcacggcgctgcgcggccgccgccgtctggctgggatcagaggagccaggccaactgcttctcattaagtcccaactgtggtttttatcaggagagcctctttcaaagggcacagacacgaagctccgcggactcgctcatttcctccactgacccccacacacctccctgccctcccttacacgttctcacagccccgactgggcgaaggctggagccgcctggccactccgcagaggcccgcgaggcgccagcggggcggaggagagttgggaggcgatctctaaggattcagctccgggcctaagcttcgggatgtggcagca

SEQ ID NO: 45108 - DNA, 1082 bp, Bovine  19866881200627
  misc_feature (1)..(1): n is a, c, g, or t
naatttggagggagcacaattcaactcctaacacatgtgaccctccatggcagtgggcagcccaggagaatgcacagtggggtcaggtgcaggggatggggtgaggcgggtgaggttctaactcttttaggtaggttcagtgctcagctgaattgagatttccaccatctcttttatgaaaaacttaaacatttattaaaatatattctggatacagaggatataaaaatggatatagaaatgaatagataaaaatgagtgaatgtagtccttgactacaagggaaaagagaaacagacatgtaaacaaatcattgaaaggcaatataattcatgcagtaagaattctatatgacaagaaaaagggggtctgggacaggattgtcctggaagtttcctgggaggcggtagcattagcatggaatctttgaagatggctagtgttccaggcagacaggaggcaggggcatatcagtcagaggacaagcaccacagcatacaagtgtgtgcccagcttgatccggctagatgtgtaagctagggagacagaggtcaaaggtaagttgggtcacattattaagggggttatccacaacctaagaaattgcactttttatcctatagctaagccatgggaagctctttctctactattaacctctgaccagacaatgatttcactggtgtagaaaatgaggccagaggggtggcaggagctagtataatggctggcagatatcaggcgcttgataaatacgtgaatgaatgaatggcttttaagaagcagagtggaatgagaggagagacaagagtaggatgaatgagaaagcagaaaaacacagtcgggataatttaccatagaccaggtatagagttgtgaaagtctgaatgaacctcaaagaagaggaggaatatctagggccttaaatgggttgaaggaaggtgggaaaggtgaaagatggccctaaggcttggaagtcaaagggagttcctgcccactgagctccactgtctctctgcagtctggctcctgagggaaaggagagaccaggctgtggaagcaagcagtgaggtgtgggagga

SEQ ID NO: 45109 - DNA, 813 bp, Bovine  19866881203452
  misc_feature (1)..(1): n is a, c, g, or t
natttgggtttggtgtatggtgtaccccttccatcaggcttgcctttctgatgatgctcagctgagaaggctcatggggaaactgagggtgcagaccttgaggccctcagtggccctcactggggaagaaggcaagcttgaagttcaaggccactgaccagcttctgagtgtgcgagagggagttgattgggtcgtgtccactcggactccccacctctctggtgtggtcagcaaatcctctcctgctcttctggtttcagaggtccctggatgagaaggagctgacggcagccaagtcccaccttctccacgtgctgggaagcagggctgcgccacccagggggcccaatgccgaagaacagcaaggtgacccagcgtgagcatagcaatgagcacgtcacggagtcggtggccgacctgctggccctggaggagcccgtggactacaagcagagtgttttgaatgtggccggagaggcaggcggcaagcagaaggcagcggaagaggagctggacgcggaggatcggccggcctggaacagcaagctgcagtacatcctggcccagattggcttctctgtgggcctcggcaacatctggaggttcccttacctgtgccagaaaaacggaggaggtaaggggcagccctgcttgtcccagagtgccctgcatgtgggctgggctgaggggagaaaagaaacacccctttatgaggcagagccaaggcccttgtagcctggaactcaggactccagagtgagactgagactcttccccaggaatggctaacagctcttaagaggctgcaggag

SEQ ID NO: 45110 - DNA, 1958 bp, Bovine  19866881207438
  misc_feature (1)..(1): n is a, c, g, or t
nttaaaagttttcaaaaattttcaacagagcctccattctgtgaagctaatttttgtttcctaaagctggccaatgatgcaatacttcaaatctcagcaccaaggacagagctcactatattagggaataatgcactgtttttcaactctgcagatgggaaatttctgtgagttcaagatgaaaccacagagtattgtgttaaaagcaattaagtagctcaacattttttcactctacagatgaagaatcaaatgacctgcttaacatcctagagccatggcactagaactcaggttttctaattcccagctctgtgctctcactgcatgattctgagacctggaatcacaaacggattattaccatgctcctctccagaaagcttccatgacctttcagtgttcagttaacattagtgccaagagagaatatttggggtgacagggaaatataggaaaaaaaacaaaggaaagagaaagctccatgactcctcaatagggaaagcttttcttattaccttctgggagtgtgaccagttggaaagagagtacaggtaatgaagcacacgtaagtgaattgctgctgccaaggtcacagcttagaagagtggatggcagacgggaagccccagccagccaaacccaggactggggaacaaggtttagagactattcccccaaccccaaatgtcagccagtcagcagcacaggttgagaccccaatagacatacacaacaccaggttcttggagtcaaacacaagcatggttcctgacctcagaggtgcactcaggccagcatgccatatctctgtggaaccagctataccagtgagaacaaattcatgacccccaaatgtgaatccacccatggggaggggctgtgtgaatctggacaacttatccaaactctctgagcctgagcattcatttctatagagtgaaagtttcgattaaatgatctggaagtacacttcctgaatcactatcccatgattgtctttctaagcaagctatatgggactaggaggatactgttaggcagtgagtccctgcatctgtaggctaagctcggcgcctctctcccccagcttcccctaccagtcaggagcagtcactcccctgaccttgccctagacttataaatgccaggataacaacatcggccatagaattggaaaggaaggtggatattaatgcagaggttacatgaggccggctggctgaacatcaaaggcagctttttattttgatgagctctctgctgacaagattccagccctcatccttacagattgataaactcaaactctatcaagattccaaacaaaatttgatcagatttggggatactgatatacactaacaaatcttacatgaagaagaccaatgaataagaccagaatgccaattaaatcacaatgagaaatataactgtcaagtgaattggaaacttactcaagctgaccagtctctccatgggagtcaaattatagaaacattgaggaactggccaagacaagttaactaagtcatttctttgtttaatggcatcaggctctctgatcctgccatactcgtctcaataattgggcttcacctgacgacaggaaagttcctcccaataactacagggtgttagatgaactctgttgcttttacctggctaattccctttccttctgcttcagtttctaatttcccttctgactggtacttcctgtatgtgtgtgtgtgtgtgtgtgtgtgtgtgtgtaaattcatttaccatcaagtctttctggtctcattggcattttctttctggaagtttatctttgtagctctactctgacccattgtatgttggtgtttactactcatttgccaagtttagggattagaggagggacactatatcagttagatttgtaagatcacagacaactctcaaactcagggttaaaaccacaatcattt

SEQ ID NO: 45111 - DNA, 1127 bp, Bovine  19866881279846
  misc_feature (1)..(1): n is a, c, g, or t
nctgcaaagcaaggcacctgtctcccagggctctctttcagcaaaggagaaactgaatgtttctactggccccagtgctgagactccttccccactggctctgagcgtctcccctctggccaggtccttggacctaccccagcatcttagggcagtttctctcttcagaaaagaaagcacatttttgtttggtttttggaccacccttcccaacggtagctgcctgcttgatgaggcgtgagatagaaggtgtttatcccaaaggaaggaagggctaggatgaggctgtctgacctcacacagggatcctctgaacagaccctgccccttaactttgccaaaactctgggcagatctgatctcctggactaagggcttcaggacctcagaaggtcaattcagaggtacttcagtccctagattctcagtactggtgggtgataaccagagccatctctgagctttggccctgtgatttgggatgggtgtggtcagagtcaggcctctgggatgtggccaaacacctcccctgcttagcaagtggtgggctctccccaaagctggatgtccccgcttctacgcttcctcctaaactgccactaaccatttcatcggtctggagcagtctgctgacactgcatctgtggagagctgctgtggagagctgctgtgaagatctgggggatttgcacaaactgtgggccctggtggaggccagagatggagcctgggaggggggcggggcaggcacacagacagcctctgttggcctgggaggcggagaacagtggccagcgcagacactgttgtttgcaaacaaacgacctcaggctggggggaacagcttgtctttgttctggttggtgctgatgtgggtcctgcagccctcacccctcggttctcctctccttgccgactgcagccttggagccccggcctgaggcacctggtccccagaagaggatgtggttcctaagtgtgacccctcttacctagtggtcacgggaagtcatgtttagggtcacaggccccacttccatccctactggcctctgcctccacctctgcaagctctccaggcccttctctttgtctagcacctgggctgcagctctgtgccacatact

SEQ ID NO: 45112 - DNA, 1765 bp, Bovine  19866881320703
  misc_feature (1)..(1): n is a, c, g, or t
ntgagtcactgggcacggccctgtcctggcactactgcatggctgactgagggacctcaagggccacaagtgcagacgaggggcttagagagggagctggagccagtcctggtgctgaggaccacctggctctaggcagtgcttcagctttagggggacctgagccctgtagccagctggagccccactcgctggcagagaactactgagtcacagatcactgggactactgcccaggctgatggagggggacccatcagatttatggggaactgaatctctaccatagtacagcatggggcaggcgccacaagaataagcatcaacaggccctttccttcctccccaccagaggcagccccagagctgaggatgctgagactggggtgggagtgggtgggggaggggcaagggagggacggagtttctgtccgtctctccatctgtttctcactctactgtttcctccatagccccacagttcccctatgtctctaacccactcctagcttcactcacttgctgccccattgccacagggtccctgtcctgcatcctgccctgccctgccctaccctacactggccctgccttctcatgcctcgttgtcccagccctcatgacccaaagaccagaagtagacctagaaagtcctccagttctagattcagacttctggttcctttgcccccaagctcttcacagcaggcccctgagactctgggcaggcagcagctgatcccaaacaaactgaccccatggaaagtatggtaaaagtaaaaaacatcatcctctacctgaacactagccagcctgggtgagagcagccatctatgaccactccccaggaaatggcaccccaaaaggtcaatgcagaaatgggctcctgctgaggtgctaccccaagaaggcctcaagtttgcagagctattgacagcttgcaaagcacaatcacagctgatttttatagaaaccccagagtcacagtgatcccattgtacagatgaggaaactgaggctcaggcatattaagtgcccagcccaaacttggcagctaagcaataaaacttggactggaactcaggcctgtcatattctggtcctcacactctacattaaaccaagattcttgctcactcttcatctgacatcaagtccagatgacaggttgtgataggtggtgattccctcctcacctaaagcaatcactcctgcttattcacatcctggcattcatcaccctgcaaacattccctccttgtgcctcctttagttaccctcacctaagtgggcccctgccctttgcccagaaggttctttcccatttgctccttgaaaccagtcaccaccctttttttaggaaatgtcacctcctctgtgaagccctcccatcatgactgagcagagccaccccttctctgcaggcccccacatctctctgtccctggacttctgcaggctctgatgttaacccaccatgagagaatcacccatctgtgatgtgcgccctccactccccccaccagcacagaagccctgctctttgttctcagtggctgctggtggaaggaagaaagtagggagagaaggagggaaggaaggaaggttggctgtccagggagtctgatcatgtgtctgtaagaggggcttgcatcaggagggcacccagtcatcttgagagaatggagaagccgaggccaggagaaaaagtgacttcactggcccttgagccacccaagggtcacatgtcctcctcatttctggc

SEQ ID NO: 45113 - DNA, 1078 bp, Bovine  19866881411033
  misc_feature (1)..(1): n is a, c, g, or t
ntcctttcctcttcagtgtcaccgcctgtaggccaatgacaggaaatcacccttggtcttatccattcccaagtgagctgccctcacaacaccagccctaccccaactcacacatattgtgcttgcgggcgatgtagcgcaagatggcattgctctgggtcagcctgttcttaccgtccatgagatagggcagctggaaagaaaaggacaggccaaatgaacaacctctctcttgcctccctgcctctctctcctgggaaagaagacttgcagggaagagaacagtagagaaaaaatgctgtgttagaagaaagaagaaagaaagtaaaaggtagcaactgagtctacacttaattctagacagggtgctttactgagtgtgtgtttgtgtacgggtatgtgcacgctatgcactttctctccgaataaggcttttaaatgcacaaagcaaattacacatattacataatttatataacattaaaagaacaaaattttaagagtaatatgtgcctatgaatgcattaaataacaagaagatgtaacgactatcatactttcaaagtatgataagtgtaaataatatttatttatatttgcaacacatgtaatgcaaaaatacccagtcacaggcttggctaataatcaaggttacattgcctacattcacaacagaaagaactgttaacttttagctagtggttagtagaaatgcaaatgtaattttttcttcatccaagcctaaggacaccctgcattctatctattctatcgagatgaagagcccttattctacaaaccgctagaggagagaggaaaggagcaaggatacagttgaaggccttcccttctgccccctcctctaaaaccacctacgttagggaagtccaggtctagtttgaatttcacatccagccactggctcttatcatagtcaggagctgtaagagaaagaatgaagtgggatccaaccagcttaatatcccacctgaggagcgtggaaagatttagagacacaccctaattccaattcctcacaagcgtgctaagtcgcctcagtgtggccgactctttacga

SEQ ID NO: 45114 - DNA, 838 bp, Bovine  19866881630722
  misc_feature (1)..(1): n is a, c, g, or t
ntactgtgctgagcattgtgaaatcttggtgagaatggacactaaacagatgcacaggtgcacgtataattactagttatggtaagtgacatgaaggagtagtgcaaggtactctgagaaggcttggtagggagagccaaactaacccagaagacaaaaacgttgagataaaacatcagaaaagtgaaggcagtgatgtcctataacacagtggtgtctctggaagcatgtgtgtttgttcctttggaaaacactcatggtgatcttttatataaccctttttttctcaacagggctattctgagtctcctgacctggagtttgagtatgctgacacagacaagtgggctgcagaactctcaggtaaggcagaggccttctactacttggtctttaataaaattgagagtgagtgtcattttggagttcattttatctcctagttagtactagtaatgatatgtatatatgaaacttattattagattcaagcccttcatatctcataactttgacttgtcctttacttttatgaaacatctccgcatggtcagctcaattggctgtggcccagtcccactgtggacattgatgttctttggccatacacaatccccctgacagtggtctctcctcaaacaaggagtcctgaggaatgccagtgagtgggtctatctctgtgtccatctgttgttgccactgctgctcatgtatagtatgcaatcagcctgagctgcttctcaagcctccatagtacaggccctgttctcatgccacttgagagagacatgttcatggtggcagttagcctttggcatagcatggtgggatcaatgcg

SEQ ID NO: 45115 - DNA, 869 bp, Bovine  19866881859190
  misc_feature (1)..(1): n is a, c, g, or t
nttcagcatcctccctgcacgtgttaagccattccccaggctcacagcgggagggagaaggtgcctgagtgtgcaagtggatacagttataaagatggcaaggaaacaagagacaaacagtgagtagtacgactgatgagaatgagtgaaccactcattcagcaatacctgatgggggcattccacgagttaggcctctcaagatatcaaagagaggagtgtctgcccctagagagcccacagtccttgagggaaacagagaagaaaataaaaatgccaagtggaccctaggtaaagggctaggcccagcaggcgccacaggagggcgccaaacccttgtcatgaatcctaaagaggtctggaccgaggggagatctggaggacaattaaaagttggagaaaggaatagagtgtggagaacattccaagcagagatttctctgcagcagggagaaactccaggagcagactgtgaggttgccatctcccatgagcccaagaggggtgctgcccgctcaggacaagggtcaccacccaggccaggtgggcagaggttgcaatgggggccatttggcccaagcttcccatttgtgaaagtcatcatatttaggactttctacattacctccagttgaggtctggatatttaaaatacaatttgttaagtgcaatccattgaaatatatctcaatttttatgagcctgttcagtttttttttttttttttttaatctaaaagaagcctaacaatactgaaaatggcccagttctgtctcgttcttggcaaacaggcagcactaattatagataagagaagtgaggacttagactagccacctaatgcgtgctagaacttactcagcatcgca

SEQ ID NO: 45116 - DNA, 416 bp, Bovine  19866881910081
  misc_feature (1)..(1): n is a, c, g, or t
naaataaaataccctctaacccaggagaaaggatgggcctgcctcacagagtgctgatgggctggtaagcagagcgggtatctgggatggtccacgtgtccccagaggactctggctgagatgttccagacctttcctccttcataacaatcccaaatattacatcattcaggcagtggtgccaacttccagtttaggaagtatgtggtcctgagacaccagttggatgcagtactcaggatgagggtctccctccctgcccttcacccctcccaggactctgggctgtaagccctgtgcccgagagcagccccgctgcctcccagcctgtgcccgccaccggcccccaacttactatacagctggagaagccgatgccacccaggcgggggcacacatagtgccacacgccgatg

SEQ ID NO: 45117 - DNA, 1336 bp, Bovine  19866882013499
  misc_feature (1)..(1): n is a, c, g, or t
naggatccttgtttaatgttggcagttatcagtcaaactgaacaagtcagccagttcttcatcttccctgggtattcatccgtctttttctgctactttgtattgcaatggtaatatttgtccttggacctttggaaattgagattatgtcaaattggattgttggtttttttaatttccccccatagtgtaaacccaagtttgttgaggaagcctcctgagatggacacgtttctttggaaggcctgtcagaacacctgtacttttgaacatatagagtgactctgtagagtgaaacattaggcatttgactaggatctatacagtcaaaccttaccaccaacatagtaggaagaagagaaaaagaacacgacagaactacttttgcttgtaggatattctttgtaggatgtatttgaataaagcatatgtggaactaattcatcagaagggtcagctgagacttaggaagcataccagatagagacccagtaagtaatgcttagacatttaagtgaaatacaggatttttttttttttttagtcagggttttgttgtggctaattcttggtgcagttttataaaattcacaccagtacttcttggattccctgagaagtgatttgatagattggcatttcctatcctctccacatcattagtatctgttacttctctttagaatgaccactgttgtagtgcagtctttgaacaggagtcagaggtgtaagaagatcctatctcttttagatttctctacagatactgattagctctctttttcttattggattctgtttagtttgtcaggcacagttttcatattactttgttgtaagttcctttagatttttagcttgtaacagaaatctgttcattgtctacattccttgctgtcagtgttataaatctgtaccttttgtttcttgaggagggtgtcctcgggctccagtgtgttacccagtgtattattcttgtaaaattgtttgtaaaagatattttgatacatagaatcatatcgatctttagttgcctgtgactcctaaaagtttattctgccacctcaagtagttataatctgtaaataaaccctttaatgctctcttgaagctgttacttaaaggaactagccactaaaggagaatcatgtatacctgactgtttctcaagtttggaaatttgaatattaaaattttataaagaaaggccacccttgtactggatataataattcagaatacatcacattgaggtgggtcggaagcacacccctcttgtatgaagaacaatccattcacatagaatataatttttttcctgaaatccaagaatcca

SEQ ID NO: 45118 - DNA, 1628 bp, Bovine  19866880360932
  misc_feature (1)..(1): n is a, c, g, or t
ncgaattgttacctaccagtgaaatagaatttcggtgatctatttaggtgggacatgacttccatttgaagagaatatagaaatagaagagcagttctttttttttttcccttcatgtcaagaaaatagtttaactattatgtctattttaaataacagcaaaaatgcaaattacaagtgcatatattttcttgtgtccaaagttctatttcagaatagaattgcaaaaataatgctatcccactgtgtaaaggaaatgagaaatgcagagaccattaaggaggattgtgaatgcatacagtgcattagcaccaaaggaaacagcatggatattttgtaaaaattcagtgtttagtggcacttggatttgtactactaactgtcagatgtcaaatccatgatgaggtcagtatgtaccttatcttgcaaagagatttgaggtgacttttttttccttatcagtttctcactttgtttatgagttttatttatttaacaatgaagaaatagtttacgttatggcaacacactccagtattcttgcttggagaatcccatggacagagaaacctggcaggctacagtcaatgggcctgcaagaattggacatgacttagctactaaaccaccaccaccaaactctgtgaacgcaggaaacacaataagttctcataagcacataagttctcatctgactaaatcatatcaaattcagataaaaattatgtgtactgtttgagggtgttagttccatattttttttgtccaggacctattatgactgacaattaaatgaacacactaggattctgtctcctcattttttcactattcactttcatattgtttagccactgcacagtaattatatatatatatatatatatatatatatactcaaatgtgacttttaggtcttttcaggctttattataaaaacaacatttgtgtttgtgtgtttgatgtttttagtacccagttgttgggatttcaaaaattaatgaaaatggtttttaaaagtctttgtaaatgaatgatatcaaatttatgatgaacaggtccaatttcagataaagaatactgtgagattctattcataaatttgtttatttttctaaacatgatggtgaaatttaatcttctcctgtatgtgaggctcttggtacttaggatctttcctttttaaatgatacatgttggtatttatattgtagaggagcaaaatttgccacaccaaaaatgtgtttctttgttttcagtgtttaatttatttattggctgcactgggtcttagttgcaacatgcagaatctttagttgtggcatgagaactcttagttgtggcatgttggatctagttccctgaccagggatagaacataggccccctgcattggggagtgcagtgttttagcactagaccacagggaagttccaaaaaaatatctgtctttgacatgaatgttaatttaactgattatttttaagaacagaagactaaggaagtttgttttttgtgtgtgtgttacctctctcttaactgcctaaaagattttagagagagggacaagtagagaagaagttctacttgttcccaagtagagctatcaccagaggtatctgcaaaga

SEQ ID NO: 45119 - DNA, 2811 bp, Bovine  19866880597940
  misc_feature (1)..(1): n is a, c, g, or t
nctctggtgctgggagggattgtgggcaggaggagaaggggacgacagaggatgagatggctggatggcatcactgatttgatggatgtgagtctgagtgaactccgggagttggtgatggacagggaggcctggcatgctgcgattcatggggtctcaaagagtcggacacaactgagtgactgaactgaactgaactgatagctgattcatttgctgtatagtagaaactaacacaacattgtaaagcaactatactccaataaaaattaattaaaaataaaatatacatactgtaaaattttaaataaaacttttataagtaactaaaaaacagtttagctttagttctatgggatgagaaggcaaatccatatctggaaaaggcatctatctctctgaagacaaaccaatggcccttctcaaacagaaggggcataataaccaataggtaattagtctatccttaagaaatgatgctgtgttaggggatcaccatgtgtctctgtaccttgcaggtttaatgttcccagacattagccatatccatctgagaaaatgagaatggattctattgaccccactcatatactctatatctgccaccatggccactttgtatgcaattatacccgatctgagacagccaatgaagataagctgatgttaattcttcttgaatgttgactgtctattatctgatgggtgcatttttggagacatttacatgtaaatacagtatctccatacttcatgtccacatgtctgctcacatgcctacatcctaattcccttatctctaagcctccagccatttttcttttcagcctcctgcctttaaccactttccaggcatctgtacatagtattatcttagcccatttctctttgaacacaaaatggattaccagatatattgcttacagctctgtccactaggaaacttctcccatcttggcttttagggcctctctgaatgtgacagtaatgcaactgtcatctgtttttaacttgctctgcctgattgctcaaatggtgaatattgctttgcagtggcattattttggagctgtttgtcctccacctcccagcactgacacactgcaagccaagcacgtgttgggatgtagcttgggaagaattcatgggttaatgcacacagaacataccatcttctgcaatcattgaaagactcctggtagttaccagagtataatcatataagtttcatatagatcagaagagtagacacaaaatggggtagggatggtttttagttgaggaattaaataagagcttgtcttatttcaaataataattctacatttcttttatggtacatttattatccaccaattgaaattgtttctttgagcaaagacaatgtacctctgggaacctcctattaaaataccctaaaaaaagaactatgccattagcaacttcaaggagatcaaaccagtctggaaggactgatgctgaagctccaatactcaggccacccgatgccaagagctgactcactggaaaagacattgatgttgggaaagattgaaggcaaaaggagaaagggggagcagaaaatgagatgaatagtattaccaactcaatggacattaatttgagcaaactgtaagcagatagtgaagaatagaggagcatggtgtgcttcagtccagtgggttgcaaagagtcgaacatgatttagtaactgaacaacaaataatgtaatagtttaataagttatttcccaaaaggatgtgcctgagtattaatatgggtagccatgcattttgggataagaatgggaaagagaaatttatatattcaacctttcttaaaaatattacaatgtgatttaccatcatctgcaacaaaataaaatagatgctcttggcatggactctaaaatctttcctaatttaggttttgcttactctgatatccttttttatcactgttttctatttacacataattattcagcaatatcagattattttgttaccattgcctcaatgaatcccctatcaattaattgaactctattcattctttaagatataactgaggattatttccataaaggctttcatgcccaccttccctcagatattccctcaatcttgattcatattttcctataggttttcataacatgctgtgcaaatttttttctaaacacttactgtgttaccgtacaatgagactcaagtacagagctagcacataacaggtactcaataaatgaccacagatccggggacctcctacaatgaccagaccttgaacagctccacagtgaatgctccctgcactgcaaaagagacataaaaatactgcctgctgagaatcaccctggtgcatatatacaaatgtatatatacacatccatatgtgtgtgtgtgtgtataggcataggcatataccctgtacctcatgggaaattaagttatcttcagagatttcttggaaattacttgtataaatcactagaggaaagatttagaaatgataactaagtgtttggggaatttgcaataggcagtaatacaaaaatagagtaaactaagtggtgcacatcattaaaaaataaaattctttcttcttcaagttttaaatcctttaactgcatttaaatatttaaagcttagactctttggaggaaatgaaggcaccactgatgtctccagaggaatgcttctatccagtgctcctgaactaatgtcaatatttaaatgttttaaaagtcatctttgaacagcagagatttttcatcttgaaatagtttgcctttgttgcagcctaaga

SEQ ID NO: 45120 - DNA, 1664 bp, Bovine  19866880620334
  misc_feature (1)..(1): n is a, c, g, or t
ncatagggatagtagaagtcatactattagacatagaatggacacgggctaagggtgggcatatacctagttggccttgttaccataccctagttcacaaaattgcagtgaactaagtagcaaagtagttgctactgaaccctggagagttgggcatgtgagagcacaaaatttagacacatgatacattctcctagggttggtgatgaaataaacacagagtgtgcaccgagtggcctgataaccctagtgatgaggggtggatgtggtgcttaggtcagtgataagtggaagctgaatccaacatgtgcattccacctgtatccatccccaagggtgccaagaaaaggcctgctatggggaggctgtctcagctttagggagcacagctggatgtgttgatggtgtcagaagtgcagtcagtcttcacacggaagccgcctcaaaccgagaaagtagagaggctgggagagttgctaattcatgactttttgctgaatgaatattatatttcattcaaagtctttcagaaatattttcaggagaagtgcatgaaaaactttcaagaactttctttcctccttcacaagacgagtttcttaatgattaaaatttgggcacattagagggttttctatggaaaccagaagacgggcaaatcttactttaggcgttagatgtgactagggaaacctgtttagaaacatattttagcatagagagtactatataagaactacttatttacaagagaccctaagaaacccttcattaatacttttcctaaaacaaactatcccttaattgatttgcttttcttgcagctacaaagactgtagacatggaaaaatacactgtgtcttaaaatcttgtgagagatagattgatgatttcatctctcccgttttctggggtctgcctttctccctgtacctctgaaattttgtcttaactcagaatcaggtcttttcttttacgttctctacctgattgcattcagtcaagtcacatactacatgaacctttgaagagaagaaagttccattttctgattgtctggggtcacttagaatttaatcttaaaagtgctgattaccagttccttgatttctccctggggctctaaaaagacctaaatatagagaggttttttttgttttttgttttttttttttttgcgtttgaaagggtcctcgaatgtgaaagcaatgattagcaactttaaaactatttttctcctaagtcttaaattcctatttacaaagcccaggttagttttgttcccaaagaattgtgattgggggaattcttttctcattctctcatatactaaagctattttaaaagaaggagcctaaattgtttcgttttccttttttttaattttgaattcatgctgactggtcacatcttcttcctctcctttttttctcccttttatggcttctggctccccccagatcatatctggaacaagattattatcttgagtgatcttcttttatgaggttttcttgtcagcagcttcagtggaagtcaggcatgcagagctgtgatttatcgccaccgagccccacgtgatttaatgcattcacacatctagaagaacaaggctagtagatgaatggacagctacttgggaatgagactagctggttcactca

SEQ ID NO: 45121 - DNA, 962 bp, Bovine  19866880776553
  misc_feature (1)..(1): n is a, c, g, or t
naacaggatttattaattttggaataataaagtgtagcaaagacagaatttgtaaaagatgggctataagaaattatgatgttacaatagtcctattatcctccctcaacttttattttgtttaattgagtttaacaaacagggtgaaagggtaactgcattcccttcaccaacacccttgtagttgcagtccccagagcatggcactaaatttaagaactacactaattgtattagtaatgaaagtgtatttcccagacagaccattatcatctttcttccacactgaacattagctaaaatgtttaggcaccaatcctttaactctttctgactctgtgtgttagtacaattattatttgcctgtataccctcaatgaactaaatatgatcttcttctttacattttatcttaaaatgtgtatttcaagtggtttttaagacgtatattattacaagataaaatggaagtgagaatttgaagaaaagcaagatataagatgaaactaacaggcttcctaggtgactcagtggtaaagaatctgcctgccaatgttggagatgcaggttcaatctctgggtcaggaagttctgagaaggacatagcagcccactccaatattcttgcctggaaaatcgcatggacagagaaggctggcatgctacagtccacagtgttacagagttggacatgagagccactgagcacacatgcgagatgaagctaaggttaggaatttgtcaccgaaaattcatgccatgtattttttaagtcaaataaaagaagaaaacaggataattttatctctttttataaaaaaaaattctccactgaagagtgtttacatagattcagtgatgctatgaggcaggagcaagaaaaaattatctcaagtctcatgtttatcttaaacagtcctagaaatttgttttctccttcatatacatacagattaacattt

SEQ ID NO: 45122 - DNA, 1418 bp, Bovine  19866880837545
  misc_feature (1)..(1): n is a, c, g, or t
ntcattacagagcactgtgctgggctccctggttacatagcaactttccactagctattttacacatggtggtgtatatatttatcagtgctactttcaggttcatccccaccctctcctccccctgctgtgtgcacagggccatcctctacatctgcatctctattcgtgccctgtaaataagttcatcagtacatactagattccatatgtacgcattaatatgatatttgtttttctctttttggcttatttcactctgtataacaggctctaggttcatctgcctcacttgaacagactcaaatttgttcctttttatggccgagtaatatggctgggtggcatcactgactcgatggacatgagtgtggataaactccgggagttggtgatagacagggaggcttggcgcgctgcaattcttggggttgcaaagagtcggacatgactgagcaaatgaactgaactgaactgaactgaatattccattatatatgtcctccttcattcttacccacacgatgttgttactgtctgttgaattttgttttataagaatatctttgatttctctggtttctcctatcggcaaccagtaagtcctattgatttgacttgcataatgtcatttatatttgtcactcagagtcccatatgcttaggctctcgttatctctcatttagactgatacttttatacaagtgttatgtaattgatattcttccctttattgtttacaatttttaatccatcctaacttgtaaatcaaacataatctttctaaaatataattttacaatgttatttccactgctcaaaaaagaaaaaaggaatattaacaatccctccttatcactgaagaaaatataaactcttcatcctggtgtataaaacttcaagcaaatgctccttccttatttaccctcatcccattgtacatgcccttcgcatctaattgtaatactctcaggcctgtggtggagaaggcaatggcaccccactccagtactcttgcttggaaaatcccatggatggaggagcctggtagctgccgtctatggggtcacacagagtcggacacgactgaagcgacttagcagcaggcctgtggacacactctgcctcacatgccacactcatcaatatcagactctaaagtccatcttaagaagtgtcagtaaatccattttattacagaaatacaaaacctaccttggaaaaattaaaaaacttccacctttactatttcaggccctttctttgtagcggtacttgtagtgtaatactgtattgagtattgttgtgtaattatctaccttcctaaatcaactgaagttttgaaggccaacatcaatatttactcatctttgcatttcagttattatccagctcaattactgccacaaaaagcatt

SEQ ID NO: 45123 - DNA, 1944 bp, Bovine  19866880962205
  misc_feature (1)..(1): n is a, c, g, or t
ntggatactgctgctgctggtctaggtaccaaactttgaagagcaagagtctggttatgtaaggagtagctcttgaattaaatagcctgagtttgtagctggcttgcaacttaactatgttgtgatcttaggtgcattatttaaccctctccctgttcaaaattgtctgtaaggcagggctaatcagaatgttgtttcataagacagtgtatgtgaaacatttatcatagtgtttggtaaataagagataattagaagaaggagcaggaggaggaatgagtgaagaatcaatgtattttcttttaatgtggctgtttaacaggtgcaaagggacaagttttcagccttatggaaataatggaattgtgtgtgtgttcactgtttcacaactatctcattatatatgcatatatattcactgtttcacaattacataattatatatgtatatatatatatatgtgtgtgtgtgtgtgtatatatatatatatatatatatatatgtaggaaatggcaacccactccaatagtcctgcctggaaaattccatggacaggggagcttggtgggctatagtccatggggccacaaagagttgcacacaactgagcacatgcacacacacacacagttttagtgttgattcacatatttacttaggctttctccaaaatgaatgagaatacatgataaaatgatgagcatgcctcaggatctaaagagcagatataaattggtcactgagtgtgagcttcttgaccaagctcacaaccataagttcgaagttgaagttgagtcactcagttgtgtcccactctttgcaaccccatggactgcagtacaccaggcttccctgtccatcaccagctcccgaaacttactcaaactcatgttcatcgagtcagtgatgccgtccaaccatctcatccgtcagccccttctcccaccttcaatctttcccaacatcagggtcttttctagtgagttagttctttgcatcaggtggccaaagtattggagtttcagcttcagcatcaccctaaaactggctcaaaatccaggagattcagggaagccctgagctcatgaaacagctaacacaggactaatttgactactgaaaagctactgagaaattttgatggccacttggaactaattttccagccggaggaacttctggtcagctagtgacgataaaaggtttttccaggggagtaaaagttagcttgactagtaggaagagaaaaccgcatgttcaaaggtcggacatggtggagcatggtgggaaagaattgttgaaagaagataaacattctgggagagcaaatggcaagaggctacatggcaagaaatgagggtagatactggggcaatgccagatcatggctgacctggagtccatagaaagagatttatcttgctcttaagagcaagcattgacatgatcagatttcaaaatatcacactatctttagtatgatataaggtctggaatgaggccagagctgatactgatcagttggaagactattaacaatcattgaaaacaatgatagtagaatgagagagggggaggtgattcactgaggtgaatcaagaaggtaaggttgtcattttagaaatatatatgataaattaaccattcagcagcttaatgtatgtcttccttcaatcctgccaccctcttgctaataaaatttcagagttgtcatagttctgagaataacactgtaagtcaaataatatcatccaagtataatttcccaaatattttcgtaagagggaattgtgttctgaccaagaggttgatatgcagtgatttaaaagccagaccgcacatgtcacatttaatcaactgtaacttggtgtgtgagtacgctgtatgaatgaaaaccattttgtcaagaggcaatgtctgagtctgcaaaccggattgaacct

SEQ ID NO: 45124 - DNA, 1917 bp, Bovine  19866880986783
  misc_feature (1)..(1): n is a, c, g, or t
ntattgatttagtaattacagctatgttacagtagatggaactgaagatctccacactaatgctgtttgatgaagaacagtggaaaagtagacacaaacattgttaaataggagtatatctttcagtccatcatgtataggatattccattaaaatttcagtgagctatgcacataattagacattcctgctgtcacaaagaatttcctttatgaacactctgatgcaccttgacatggaaagctcaagctggctggcttgcctctaaataaggatctgctgactaattcacattaacctctcttgcatttctaataggttcagtgagactcctttttaacaagcagcttctgaaaataagagatgctcctgtttcagatactgtttctcaatggaaggattttggaaatgtcaggaggaatttcttttttccacaatggttatcatttcattccatgtggtggggcacagagatggagtgggtaggagtgctaaacatccttgaccatataggatattccttctcagtaaataattggcctgctaacagtgtagataatgtcctgtggtaaccagcctccaagatggccacagagagccccacctctcagtatttacaaatgtgttcccacctcacattatacctggattgatctgagtgatcagtatggcagaaaattggtatgtcacttccaaggttaggtcataatatacaccaccttctgtcttggatgtacattctctctctcttatacctcactctgaagaaagccagctgtcctttcacaggatattcaggctgcctaaggtgaggtccacaaggcaaggacctaatgtctgtagccagtaggtaatcaggcagtaaagtctgccaacagcaatatgagtgagctgggaaagctgccttttggtcccagtggagcattcatatgactgccatcccatccagcagctgtatggcaagttcatacaagaacctgaactagaatcagttgagctaagcctctcccagattcctgactctgagaaactttctgagataagtgattctttatttaatctgataaattttgagaagattttttatgcaacattagataactaatacaatgtccctgatgacaggtctggcggcaaatattttattgatttatctgaaaaatctcatgtatatgggtaattagtctaattgtattttgtactgaacccaaagagaaggaaatggcaacccactccagtactattgcctggaaaatcccatggacagaggagcctggtaggctacagtctctgaggtcacaaagagtcggacacaactgagcgacttcactgtcactgaatgcaaaatacttcctcctgaccagtaaaattttgattcttttaatgtgatcttacaagttccatacagtcaaacatatggtttttccagtagtcatgtactgatgtgagagttggaccataaagaagactgagtgccaaagaatggatgcttttgaactggggtgttggtgaagactcttgagagtcccttggactgcaaggagatcaaaccagacaatgctaaaggaaatcaacccaaaatactcattgaaaggactgatgctgaagctccaatactatggctgcttgatgtgaaaagccaactcattggaaaagaccctgatgctgggaaagatcgaggacagggagagaagggggcaacagaggatgagatggttgcatggcatcactgactagatggacatgagttggagccagctaagggagatagtgaaggacagggaagcctggcgtgtgcagtccatggggtcacaaagagttgggcatgatttagtgactgaacaacagcaacagtgcctacctgacacattgtatatgttcaataaatatttattgagtgaatgaaaggaagtatat

SEQ ID NO: 45125 - DNA, 850 bp, Bovine  19866881019054
  misc_feature (1)..(1): n is a, c, g, or t
nctgaatgaacttattgagaacattattttttaaaacatgttaatgtcaactagattatagggatgaatctgatctgggttctaccttcagaatgtctacattcttataaagaatgttcataatttgtagtcattacaggggaattcatgatttatttttattaaaatattcactcaggtagaatttaaataacaatttaaattctggcctacagaatactacagtattctggatactacagcaccctaaaagtccaaacagacatacaactggacatttccttggagttttaaatattttagcatgttaaatgaagaaattagcaatttgctaatattggatgaacaaggcctctgagaccaaattagatattgtattgctttcagcagatgttctctatggcatcaagttggtttaaaattatgctatttaaaaacagatgtttgcatgagacggcagttcagtggcatgctaggaccagtagatagtaggtcataagagctaggtgctaaacttttaagaaatctgtaagttggttaaccatgcactcatagcctgaaatcaacagttgtgggagtatttatatcatggaaattgatgaatggtacaaatcaggaatcttcaaaatacttcacgaagagatggtcattaaacagaccccaaaacatctctgcagcaatgtttctagtcttgagtgtgtgatcaaataagacagaaccactctagtaccacactcaatatcaggttactttcttgagttgcatggccaagtcataatcctggccagccaaaaggataatggttttcagtccaggagaacaaagcattccaacaccatccagattatat

SEQ ID NO: 45126 - DNA, 781 bp, Bovine  19866881050486
  misc_feature (1)..(1): n is a, c, g, or t
ntgttgacaaagtaatgtatctgcttttcaatatgctatctaggttggtcataacttcccttccaaggagtaagtgtcttttaattccatggctgcaatcaccatcttaattgattttggagcccagaaaaataaagtcagccactgtttccactgtttccccatctatttgccatgaagtgatgggactggatgccatgatcttagtttctgaatgttgagcttaaatacatgattaacaaaaactaagttttagaaagcactttattccagagtttgttatatgaaagtgatcatacttcatcactttttattgggaaaatatccaaaactatatattatatacagaataatacatttagaaaacaagctgaaggggattaaatggaaatataatctcaacaacaaaaaattcaaaataagaatggcacaaaatatcatagagcaattggggatttccttctctttccctaaaaaagaacatcacatacattatttcccttgttttgttttctaatgataatcacactctatttacgtgttagatactgactcagtatacattcattgccataactttcacaaaccaagactgtataatagtcactgatatcatccatggtctcagcatggttcatgtgattatttcctgggccaggtatctgaaacatggacctcagggagttggatcttttgatgtgacagttgtgcaattttgaggtaatcccctcagagaacacttatgggaaaattttctctgtggataaaatgagttgatggg

SEQ ID NO: 45127 - DNA, 1160 bp, Bovine  19866881060359
  misc_feature (1)..(1): n is a, c, g, or t
nttcaagtgtggcaagttagcagtctcataacatgacatgggaccagaagtgcaatgatttcctccgttccctaaaaaagaagcctaatgacagaaaaaacagctatgggttgtcatgctaagcaggttttctagaagaaggtcagacttcaaaaaggattgttctggggtttactggccattaatagatatataaatttttaactggaaggagcaagaagagggaaagccaaagtcatctcgttctaaccttcatctttttttagtaaaattaagatagtaaaactgaagttatttttaaaaaatataatatatatatatatatagttgtttcagtaactatttgaaaggtctcttttcatccaaaaagagaaatattttcacaaagtaaaacaaactggtatactataaccagaaaaaaatcagattgattattttagtagccagtagagtctgatgtagatgaaatatttacatgttttcccaccacacagttatacacatgaatcaaatcaaaatctcacacacgtgaacacctgaatactgaaggatcatacatatgcatacttcaatttttcatttaaaattttaagtctatagcttatttcccattgaacagaaaagctttctgccattattacattattactagctatacagacacaaatattctgtttattattcaaggacattgtattagaaccctgtgcatttagagcagaggaattaagaacatgctagaaaatcactgataatgcaatattcaaggaacgtggtgcattgaataggataaaaacttttagaagcaaggtaataaatgtcaaaacttgctgttaaacaaaggctgccctttatgggtctcataagattaacaaaaatagttactggtgtgtctgctagcatctctagaacaattactgcaatgtaactttctatctacagacttcattatattttgttggatatattttgttggatatatttttattcctataatagatgttaaggtaaatgatacacaataaaagataaaggaaaaaataatccctagcgatctggaaaactcatacccatcaaatatctctttctctttccctagtctaacttcagaaaattctgttgtagcatctaatatttagaatggacatgcaagctacaca

SEQ ID NO: 45128 - DNA, 916 bp, Bovine  19866881089965
  misc_feature (1)..(1): n is a, c, g, or t
nataaaagccctttcattttatctgcagtataaggtgatcatgtagtctcaagcaacccttgagaaatgttcttcttgaacaattgttcgttaagtctggctgtgagcagctgagcagagtgttttgaataataatgatcctgatgataagaaaaataactaccatttatcacacagtttctgtacatggctgacctcccatggagagttttacaatgaaggtttctggcattgcactatgtgctttgcacagattacaacatttaatccttataaagctcctaatgaggccatttaacaggcaaagaaactggagtgctaaaaggttaagtaacttagaaaagatcacaagtaagtgattgaatcaggtttaactgactccaaaccttcagctcctaaatggtacacgagaaaaccaaaatactggacttctatggacatgatgatttattgggagggtagagaaaacttctttgaatttatctccactggaaattctgagtacttgctaacatcagaatagcaaacattatttgaatatgtgactgaatatttaaattagtcaggaaataattatggatttcaagggggaagtatagtagaatgacactaaactaatggtttaattggtcatctttttttaagaatgaggctgcctttgtactgacatagatatatacagctgagaaaatacatacatctaacaaatgtgtgttcctgtcaggaatgtagtcatgtgtactgtttctttgacataatgggcattatttctaccacttaattgattactcagttgtactttgcaaatacttgagtgaaaataactgataccagatatagtaattcagaagtaagtgtaagaatatcttatatctaatatgtgggtagttactaaagtaactgctgccaacagtta

SEQ ID NO: 45129 - DNA, 1155 bp, Bovine  19866881127956
  misc_feature (1)..(1): n is a, c, g, or t
ntatgttccctcacacatggaaacatactttacttaccccatgtaaagaaagtagaaaaatgtgttgacttaaaatttaagatatcatctatcactatgagtatattgttgttagcagtaaaaaattacatgccattagtttaataataaaattagttggcccttgaatttaaggattctctaacctaagacaaacacaaaattttcaaaaattactgtcaaaatggtcacaccctttccaggcataaaatgtttacttatttataaatgatctttaccataagctatgatggtacaaatggttttttccctacaaatcctaaaatctagacttgcaaaaatctgggaataaaaatcaatgggacgaggaagggcaatacagtaagaaaagtagaacaccaggttacagtgtatcaatcattcttagcaaaaccattacctttaatttctactttaccagacaaattaaaggaataaaagggatgggttgtcacatatgaggttgtatagaagatggagagtatctcccgtgttgtgagtagagttaactatgtggttcattatggttctcaggtagcttaccagaaaagttgccctagctgaatccacctactgagaaaagaagaaaataatacaaaaacaaaaccctctctgttgcctctttcatctcccagaagggaacagccatgtctgttcataaacgaatgccttccctgggcataaaccatagactagatcacgttataagttacactgatttgaatcccacaatttaatactttctgagagagaaggacctaacagaagtctgaggcaaggacatatctggagtctcagacagtggttaagaaaaaaacaaactttactgtttctgttttccttctctgagaagggaaaagcccccgaggagtacaatgggagtaattctgtctgtgatagtttacaatcatccagaagcctaaggttttacaataaaagatgactcccttgccttcactgatgaatggctataattttccactggacatcctgaatcagctaccctgccagaacaggggaaaaagcactctaactctgaactgaaggtataattctaaaacgtgagcctttactgtgcaacaataacacacatcttctaggaatctttatatgcaa

SEQ ID NO: 45130 - DNA, 1200 bp, Bovine  19866881561045
  misc_feature (1)..(1): n is a, c, g, or t
nacaatttaaatatcattgtaataaaatcaaaagaccctcatttttgtgttttcgttctttagcacagaggaaagatgttttgctggtaaatcaaaacaagtaggaatgatcaaggctttcggtcatgcagaataaagataactaaaaatttaacccccagtttttgtctctttcttattccttaaaatgagaaagaagaagaagattaataaataattaataattgtcactggggataaagcttatttaaatcccacttcttcgaggatgggagaaattggacataacctaatgctcaggatctgggtaaagcctccattgctagaagagttaatctagagaaattaataattaattaagaagattaataataaacaagaagaagattaataacatcacagagtggtacttgtaacattttagggatgactgagaggatttttttttataaaccttttatccttatatttggaaaactacttcttatgagatattataaaaatgtttttctatatttaaaaaattacctgtcccctatttctgaatttttcttgttttgtctattccaaagtattttctagcttttatgaagattttactccgagactcttgcaatggtaatgaaagagagaaatgcccttgataatggttagatttatttttccaccatttctttcttgcattgtgaataccaaaagagtaaagcccagtgaatgtgtcaacatatttcctggaacacttgaaactgctattattatctatcgctgaattaaatattttctgtttgcaatataaaacattttaattacaatacaaattacatggtaccaccatgtagcagtaaacaaagaactaatttgtgttctttctgtacttatcatttgttgactaattagtttctctatgagacaccaagtgactcttataaatgcaaacctcctgaggatataaaggttaattttgaagtgattacaaatattccagtaacattgtaattaatagttacatctgtgatgcataagtcttctaaagcagcagtgagtaaccctctgtaaattagtacacatagttggcatcatttaggatacattattccttttgcattatctctttcattcagtcaagtttcagggagcagcagggtcgcatattaaaaccatcatcattctaaaactatgacccccgtgtgcttgcatctg

SEQ ID NO: 45131 - DNA, 868 bp, Bovine  19866881743346
  misc_feature (1)..(1): n is a, c, g, or t
ntaagatgttaaactcggagttttttttaataatagtttttgcataagtatgtgctgctggtaatggtagcatgtgattttgatatttctataggaaaaagaaacaagatatgaaaggagtaatatgaaaatataaattacttacaagaaaagatgtttattaagcagtcatgctgaggatctaaaacaaggatatttgatgaattgtcaccatctctttttatatctttaatcaatactctattaactagtgttaccttttatatattaaatttaagtcaatcaactttattttgcatttcattttcaccttcactagccagaaaataacactatttgctttttgtagatgaagttttttatgcatagtctacactaaaatcctcattaatcacactactgtgtttcactgttataaaaactcatcaaaataataaatggaataattggagccttttcaattttccctttcaattcagcagaatgggccaaagagcccagagcactgtgttctgcatttttcatttgcatcaagtaatagcctctacagaagaacttcacagtctgtctttctattaacattccctacaatttcaattctttatcaggcagtatgtgaatgaataggcagagagtgacacatgttctcatcactcagctaggtaaccagggcacgtttctgtctcacagcttgtatatgttttaagaaaagaaaataatggggaatcagtgatttaaatttctgatatttttgaatattgctgcctatctacgacaatttaaattcacttttccacatgatgtcacaatcttattctctattcctctccaaatcaaagcccactatatagtcagaggtgtggagtat

SEQ ID NO: 45132 - DNA, 1046 bp, Bovine  19866880155756
  misc_feature (1)..(1): n is a, c, g, or t
nccactccagtactcttgcctggaaaatccccatggacggaggagcctggtgggctgcagtccatagggtcgctaagagtcggacacgactgagcgacttcactttcacttttcactttcatgcattggagaagggaaatggcaacccactccagtgttcttgcctggagaatcccagggacggtggagcctggtgggctgccatctatggggtcgcacagagtcagacacgactgaagtgacttagcagtagcagcagcagcagcagagcagtatttgggcttccctggtggctcagggaaggaaatggcaacccactccagtattcttgcctgggaaatcccatggacagaggagcctggcaggctctagtcaatggggttgcaaagagttggatgtgactgagccaataacactggtggctcaggtggtaaagaatcctcctgtaatgcgagatacctgggttcgatccctgggttaggaagatcccatggaggaggtcatggcaacccactccagtattcctgcctggagaatcccatggacagaggaacctggtcggctatagttccatggggttgcaaaaagtatggcaagactgagcgactaagcacagcacagagcagtatttaccacccatcatgtatttactgaatgaaaggattcacaaatggcccagcaatccaagatgtgaggtaatgtaaaccataggtcctccttcccttgagtcctttagagtctataaatataatgtattgaaaaacagttaatgaaagacaacagggttattaaagcatgattaccatcatttaagatatagtacctattctatttttttccccatggtagacagcttggtaaaaagcctaatcacctaagattaatggaaattattttcatagctcatgtcataatagagatcattagcctggtgcagtctccttttgtacagctccaagtaggaaaagattaataaaataatttgaaatgtagagctatttgatgtgcctatagggctataatttagttagggaagtaacagcaga

SEQ ID NO: 45133 - DNA, 1896 bp, Bovine  19866880459018
  misc_feature (1)..(1): n is a, c, g, or t
nactggctgtcccaagcacaagcactgttgtctgcatggctcagaaaggatctcttgtacaggaattctaaccgagttattccatgttgcctcacagaagcataaatccattcttttaaccttctaaagttcaaaattgcatggaaaacacaactgggaagttctaacaattcagtgggggcttccctggtggctcagtcaataaggaatctgcctgcaatgcaggagacctgggtttgatccctgggtagagaaaatcccctggagaaggaaatggcaacccactccagtattcttgcctggagaatcccctgtacagaggagcctggtgggctacagttcatagggtcatgagaattggacacaacttagtgactaaaccactaccagccaacaattcattgagtctaaactgcttcccttcagagtcatgggaagagccaagaagaaagaggtaggaactgatgtaaccaaattgggagtttctgatgatacccatacaggcattaagtccaggaaagcagacagaacagagtgataccaaagtaaagtggtgtgttctcctgacacaggggaagagacagcaagccaaaggggtcagacaaatacaaagggattcaagttaatttcttaaaagaactgactctatttgagacttgcttgcatgtgccaaattttcaacagccacaggctgagtggataatgatgctgactgccttgctgtgctttccagagatgggcagcattctctggccagctccatggcagatcggaaatgaggaaccccgggatgttagctgtgaatgatcccagtgctgaccggcagatcacagatttatttaagatcagcaggaaatgaagtgggtatcatggccccctaaggctttctgatcagcttagaaggcaggacgacaatgcgatacagtagacagcccttcgaaatcagtgaagtgctatttgcatctctttggggaataagagctggtgccgatggggaaggacaggaggttctgtctttcattgtcaagctgggaagcgcctaggagcttaatcccagcctcccttgctccaatgctactattggaatgagatcttctgcaaaaggctgctttggcaaaagatgctactaatgtttctcgttgagtttaaagaaagagagtcaaaaaattgctttatctcctatagcctcttcgtcagtgaataggattcatgaccctggagtgagtgagatttgagtttcttcaggtcaaatactatccatgagagcaggcacctgggttgccccaagctatcgagaaattcttatggacagaagcgatgaactgcagttcccagctgcatactgaatgtttcctattaactcactatcctttgcagtaaatcaacttactctccattacaatagatggcaatagtgtattacttgtcagcaacaagctgccataataaggctctttcagacagcctctcagatacagattgtgatgtctggagaaatagaattgcttttttaaaaaaagtatgagccatgactgtgtaatgaggtcagatccagtatttcaacaggagggtccctgaattttcttacatcacaacaagaaattgactgcaaagagcatgatgaacattcattattttaattgaaaactatttatgaaattgaggtcctatgaattcagcaacagaaatatcttgtccaaaatgttcaaagcctacagaaactacaaattatccagtggattctggaaacagccagaaggcttggatccattgattgcctctgcagcttaccagctgtgtgaccacaggtagggtgaaaggggaaagtcgctcagtcgtgtccaactctttgcgaccccatggactatacagtgcttgggaattctccaggccaga

SEQ ID NO: 45134 - DNA, 1867 bp, Bovine  19866880589916
  misc_feature (1)..(1): n is a, c, g, or t
naaaaactttaaaaataataacaagaaacccaattctttggcagtaaaattaatgtgttagctctttaagaaaataataaactgggtgaagaaagacaagatgtgttaattcataaaagatgtggcctctgatgacagtgtcacatgcaacccctgagtcacctgaccttggcacagagcatcagaaatgtgccagtttctcagcccagcaccttgtggtagctcggggagagcctggtatctttccatgttgggaggaaaggctatgattcttaactgtcaagtggaagattccaccaaacctttgtggagtctgtgtttgtgacaggtttttactgcccaggttgtatctgtgtgttccttccacaagctgccatggaggaccattcattcattcattcactccttcttcttgatctatgctggtaggtatatgcctgctggtgaatagagaaaataggggaagagacttccagagataaagtaaatgtatatttcaggtcacatgactgccatgtcaccttcactacaccacacacctgtctcctgccaactgaaaaaaaaaaagcagaatctagaagtcgagaatgatgttttattcagtggacttgctgaggacttaagcccaggcagcagcctgtcaagtagctcggagggactgctctgaagaggtgagtgaggagccagtatatatgggaatttttgtaacaaaaaccaggtagctggaacgttgaaagattactgttaattaaagaaaaaactcagatgtctcaagtcaatgaacttagcgcttttctatatatggggagatgcagagtctgggctcattgaaatcaatcctttgatgttagtgttaactatttcgggccagtgtccttctcttttgcatcctgaatcccctcagggtgcactgtcagtgactgatgtcatgacggctggcgatgtcctttgtttactgagctggtagatggcattctttcttcacaccccaaatagaagacagctgaacccatgaagagatgactgccctgcaggttctggtcaagaacagaatcaagagtccaaaaatatgacaagcagagcaaactcatattctaacctctccattccctcattaatattacaagattcagagctgctttattttcctggaacccaaagtcaattgttggggaaatataaggttagatgcacagtttccgggatccagtgatgaacagagccagtggctttctttctacactaaagttgcctgttttcctgcagaacaagggctaaggaatagatggctgcaatctgtcagagttggagactagaaatgtcaatagtgcctgtttgtggtaccaggaccaagagaagaaaaaggagtctagcctctgggacaaattatgatgaacagaatggtagtgtatgcatttgggggtggattatgctatcaaagaagtttctcaaagagcctttgatcttaagaagccacttgtaccaatgccagtcactaagaaaaatatggcttctctgagaagtaaaataaaagaaataagcaaaataaggtttcttttcattttttaaaattttcctctctcactttcttttttccttcagttcccttgacctcccttctggaataaaacatcataaatgactacctgtcactaatagagggatgacaacttctttggacccttcaaagcactatttaagtaactgttgcatgattccaatcaatggtgtacaaagagaaaatgctagcttaacacacaggatcatttccaattttcaaatacagctttgacttttctgacccaaatcctactatatacctgcttccttttatccatctttagggaaaaaaactagaatttataat

SEQ ID NO: 45135 - DNA, 1370 bp, Bovine  19866880641281
  misc_feature (1)..(1): n is a, c, g, or t
ncttctaaaaacaaatagaaaattatgaacttttacagttcccaaaaagtgctggtatgttgttgttgttcattcactaagtcatgtctgactctttgcaaccccatgaatcacagcacctgaggcttccctgtccttaaccatctcccagagcttgctcacactcatgtccgttgagtcagtgatgccatccaagcatctcatcctctgccaccctcttctcttgtcctcaatctttcccagcatctgtattattaataggtaaagagttgtctttcatggaatgacatctcatttgcctaggattcactgcattgatacacattttgtcttggtgattcccagagcccctggtatcacctagggagatagaattggtgggataatctcaggatgatttattaccaggaagttgttgtagtgtctgcaggaatgaaaagccattgactggggcaacagggttggaaatcatgagtgggttacccacaagctgtgagtgtgaggtctgagtaagtcattcaggggtcctgtcctctaaataactctcccttccctactcctgcctcttaagtttcccttctgtctgttatcagaccacactatcgagttaatttactttcctctgccagacacctctgtgatgattaattctaatctccggtgaggacgaaactggagagcttgggtgtattcttagtttctgtacttaagactgaacttgccatacttctgagggatacgtggagtggttattatccaggggaaactaaagagtattcattaggcatagtgcactttcaaagaaggatttttttttttttttatcaaaatacattttaatcttgttgctaggataaagtggcaaaagacatttagccctaattaagcatctgccagtaaaatgaaatatggatctacctctcaattagctccatttaatttgctactttcagtatagcatgttggcctgaagacgtgtaagctcccttaagaaatggaagcacagttccatctaaaggcttctttgcatctcaaagttttaaaacttcaaatacggatcagattcatgtgtctttactagagccttgccctagaccccgagctaaatactgggccttcaggttgtaggtagaatggcgcccaccctagaagcttttggtggtgctatagagaggttaaaagcttatcttgtgtgatctttggccacctgtgcttctcctgttgtagaatttgtcacactccaacatttgggcaggttgaagtgtctcctgctctatccacagctccttgagaacgagaatcttcatcatttgctttgtcacagtatcttcagcgcctggcaaagtagcaagcatatctgaggcctcagt

SEQ ID NO: 45136 - DNA, 1372 bp, Bovine  19866880649592
  misc_feature (1)..(1): n is a, c, g, or t
nttaactgaagaaaaataaaggaagaagacttccccatatttccaaatgaaatgaggcagaacaaatgaaaggggattgcttggcttgtgtagagaactacaagtgtacattactaagaggtatagccatgtctgtgcaaacacagtaactcatgtcaaataaattgtgccttttgcaggaaagaactcttgctctgggttttccaagctaaattgcatgaaaacacacaatcctttttcttcttatttgaactgttagatgacggggccaaattaccagaaaagaccaaaggcagtttgcagcctttaacaactgaaaggacttattgcttccaatttggaaatacaaaagattctatgtggactcccagcactcccaggtcctatgcatttcccattagttcagtgaagaaagaaaacctgtaagtaaaaaggatatcaaagttctctgggattaaaaaatggagaccatgttggccaaagatattgaagcagatacttttcaacttcttaacagcatggataattctctgctgctgctgctgctgcgtcgcgtcagtctacccctggtcaaatgtggtcccactgttcttggtctcctggtgtcattcactccccctggactggcaggaactatttttcagaccccatcaaaagccattaaggctgtaaggtagccaactcctgttctccagctccacagtgaagaaacccaagggaggggtaatgcatctatttttcaatacctgaggccattttgtttccaaacttaattgcacttatgcattagtttggggtctaatatctccactcatcttgctccagtgtccacttttccactgaatacagagctttggaaacataattgcagtgttcggtagacagcgattttcattaagcacacagaagaaaaaaacagttttagggagagacatttcttttctattgattcaatcaaaataacttggaagaaaaggttgtgcttattaaattcttttcaaaaggtagttgttaaaatttaagttctttctcaaacacttgttttttaaaatcagtgtataatctcttcagattttgtcatttatgattttttttgttcttccaagttcctttgaaatttgtgacttttattggtcttttttaattttatttgttttttaaaggaagcaaaggcagagcccttttacatggaggcagagaatgtaatcaacgccgctgtcttcaagacatgggagttgcctagcaatgagaaaggaattaaaagcaggaagcaatgacaaaactgaatgttgtgaaattacaagagggtagagtggtaaatgggcctgcaatatttatcaagaggtttttaaatgagaatggatataggatt

SEQ ID NO: 45137 - DNA, 1468 bp, Bovine  19866880672886
  misc_feature (1)..(1): n is a, c, g, or t
ntgctgtatgtcattcaggagtggtggtgactggcagagtagtcagctgggcaggatttgtctcttgcagccttgggtttccagaggattattctcctaattgtatatttttttccataagctctttaatcagcccttaatcctccttccttccattgccagagctaattaaatcctttatggaagtgggcagtctccatgatgtcggcaggatgggatcctggggaagcaggcctgggctcttgtggtggggatgcccagagaacccagtgcaagactggtgaagactggttcattgatcctggggaggttgccaagctacaataatcttttgaagaaggtgggatttctccatcaggaaagagggctttttctggaagagtattcaatactgggaattacataggaagctgggaagggcttcctatgagaccaatgctaaatgcgatttcacccctcctaccatcttgttgggacttctccgttgcccttggacggggtatcttttggtggtgggatccaacattctcctgtctgtggttgttcagtggttagttgcagtttttcacaggagaaggtgagcacattccttctactccaccatcagaacaattcaaactaccacacaattgcactcatctcacacactagcagagtaatgctcaaaaccctccaagctaggcttcaacagtacatgaaccaaaaacttcaagatgttcaagctagatttagaaaaggcagaggaatcagaggtcaaattgccaacatcagttgggtcatagaaaaaataagagaattccagaaaaacacctacttctgcttcactaactacactaaagcctttggctctgtggatcacaacaaactgtgggaaattcttcaagaaatgggaatactagaccacctgacctgcctcctgagaaatctgtgttcaggtcaagaagcaacagatagacatggaacaactgactggttccaaattgggaaaggagtacctcagggctgtatatcatcaccttgcttacttaaattataggcagagtacatcatatgaaatgctggactggatgaagcacaagctagatcaagattgccaggagaaatattgataacctcagatacgcaaatggcagcacccttatggcagaaagtgaagaggaactaaagagcctcttgatgaaagtgaaagaggagagtgaaaaagccggcttaaaaaaatcaacattcagaaaactatgatcatggcatctggtctcatcacttcatggcaaatagatggggaaacaatggaaacagtgacagactttatttttgtgggctccaaaatcactacagatggtgactgcagccttgaaattcaaagacgcttgctccttgaaagaaaagctatgaccaacctagacagcatattaaaaaaaaaagagacattacttactgacaaatgtccatctagtcaaagctatgtttt

SEQ ID NO: 45138 - DNA, 936 bp, Bovine  19866880702664
  misc_feature (1)..(1): n is a, c, g, or t
nttgatgcattggagaaggaaatggcaacccactccagtgttcttgcctggagaatcccagggacgaggcagcctgctgggctgccatctatggggtcacacagagtcggacacgactgaagtgatttagcttagcttagcttaaaacaatgaaaatgtaaaatgaaaatttgcatttagtaaaaaattaaaatgtaagacaagtttgttctattttcatgttcttacatataaaaaattaaaatgtaaaacaagctttttctattttcatgtgtttttgctgagtataatatcatagtataatgcaccaattgttaagcatatagttcaatgaaattttctaaaccaaacacacccacagatcaagcaataaaatattcccagtacttcacaacttcagttcttgtgtccctttatactatcctgacttgaagctccaaaacgcgtttttaatccactggtatacacacacacaaaactctaaatgcatatgattttttatttgttccctttgtcaacattatgttagtgatgttatagctattcctatatttgtgtgcagccatttgtgttcttttccactgctatgtagtactcctttccatcattataccatatgatatatttatctattctacttttggaaaatatttgggctgtttctaaatggtactcatatgtacattcttgtacatatctttcggtgagtacacacacacacaacgtctgtcccagtatatacctgggaaaggaactgctcagtcaaaagatccaaaattatacaaatttaaaaataacagacatgaaagcatatttaggaatgaagaagaattactaggcatttataagattcaaaatggtctccccagagaacagattttctcaagtgtgtagctcaaaccagttggcaaatatctacagcagcttatttgagca

SEQ ID NO: 45139 - DNA, 654 bp, Bovine  19866880714228
  misc_feature (1)..(1): n is a, c, g, or t
ncccaacaggattagacctgctaagagtaactagtgtttcctatctgataaatacggggattatagcaataactgctgtcagcatttttctcatttaaacaaataacggtgacacatgatgaagctctgtgcggctctgttgtgtttagtacacgccgagcaattactcatccgctgccagcattcgtctctctacaactaaaccatccacagcgtagaaagcttattagcatttcagttccatagtcatatttttatcttctgtaagactctcctccataacaaaggctgatggttataatttgcacaataatttaaagggttggacttttccgtgcctattagagttgcacaagttatcaggtaccaggctcgtcttatttatgacatgccagcttccatttgcctgggatttttgttcccctgtagcacttcctctgaacaagttagctgtcatctcttgagatggagaagtagatgatgatctctacaacagtattcatttgaggggggctgggggggtgggtaaaaggtgtccggaaatagagctgctttcaacgaatgtttctcagatgtgatttctcatgtatatatgtaaatgcacacatttatacatttatgtgtatacgtttattaatgcatgtacacactgtg

SEQ ID NO: 45140 - DNA, 1304 bp, Bovine  19866880715333
  misc_feature (1)..(1): n is a, c, g, or t
naccaaaaaccaaaccttgaatcctacatactctctccagcaacagctggataacctccaattctaccaaaagctgctttgtcaacgcaaaaggaataaatcaaggaagatgcatccacttttagtggagccaggtgattgccagaatccacttgcccatcatcttccatcattgagaaatttagtgaataggagtcaataaatgggcttaaataaaaccttggcttttacttgctgtgcttttaattttgtaaataaatgccttccactggcgcgcaccctagagaccaggcaatgatgtggactgagcagtctgttagcaccacgcagctgaatgcatctcagaggtctagctcacgccaatggtcctggaccattcagctgaaatctccctgctgcttaattccaaacactagaaatgggtatgtgggggcaacaaaactctgaagttaaaaatacaactttttaatagttttaaggctgctcactatacaaataagagaaagatgtcttcaacttaagaacataagcatatggatgattatagaagaccatcatagggtagtttacttattatatcaacctgaaaacaagtctcctagtgtaatattagaaaggaatattgagcaaaagaaaggtcacactgtcctacttggtttcatagatcatgtaagacatggaaaatataggatatcatctacattgtgaattctacgatcactcacagggagaaaaggaaaccttcacataggttttcatttgctcctttattttctatacttcatccatcttttataaatctgtgttggtcagattatagttaaagtatcacactaaacgtacagtccttgaaacccattcagaggagaataaagaaatttagaacgttttctgacgaacacttggaagaactctgaattagcccaaaaaggcaggtggactatttgatggacggtgaaagagccgtagccagtcctgttcagatgacctacacagcttcaaagggtggaagttacagaaataaacatttcatttaaattaaaggggaaaatgagctgtttagacatgaaatggactgccttaggagacggtgaaatgcccattcttggggtagctaagaaataaacgaaaggattaagcgccaggagaaacaaaaagatgtgcaaagatcatattagaggttcaccaaatggttctgaggtttcttccaaccctgagagggttagaaaacaggtcacagaagtgggccagaaagcaaaccttcacagactcacagcctggcgaacctctcacaagggcaagcg

SEQ ID NO: 45141 - DNA, 1146 bp, Bovine  19866880716582
  misc_feature (1)..(1): n is a, c, g, or t
naaaaaacataccaaaataaaataaatgaaataaaaatcaccctgtccttgctatcaacagagtcttactttagtgtcagctgtaggctcttctttcaataaaaggctcaaaaactgccccccttcaggttggcaaaggagaaatcctagttctgaacaaagatctgagacgaggaaactagtcctttcatagtggtacccttttccagtggtagttttgttacagggacatttttttcgatatttccattttagaaatgtgccttagaggttcttgcagtttgtttccaaaattgattcttggtctaaacacaacataaagttctttggcctcggggaataaatatttaatttttctatgaaatttgaacatgcctgtttgacctttgttgtcatttattgttgtttttatgagaaactttaaaatttaagacatgcttatgaaacagttacaaagagacctctacaggatctcaagttcagaggccaagagggagattatcaggaaagagaaattggtgtcagcaacaaaaacagattattcagaaacgttaaaggtcatcacttagatttaccttgtgatatcccttctggtttcaattcttttttttttttttagtaacaaaacttttattttcatataaatacagcctattgaaggcttgaactttattttaattggagtgtaggtgctgtacaatgttagtttctgctgtccaaggaagtgagtcagctgtatgtgtacgtatgtcccctccctcttggaccgcccccctcaacccatccacctgtgtacatcaccacagagctctgagctgagctcccggcactgcaggttcccactagctgtctgtttcacacatgacagtgtccgtacgtccaccccaggctcccagatcatccccctcccaccttgttcacatggcccttctctacctctgtctgcatctctaccccagccctgcaaaaaaaataataataataaaggttcttctgtaccattttccctaggttccacattcacgtgttaacatgcagcattttttttcctctttctgacctatttcactctgtatgacagactctaggtccatccacgtctctacaaatgacccagtatcattcctttttaggcttcagttctcg

SEQ ID NO: 45142 - DNA, 1618 bp, Bovine  19866880759201
  misc_feature (1)..(1): n is a, c, g, or t
nttcaaaagggcaggttctgcatctttacgttttctagatcctacgtttccaatcacagattctttttctaaggggtcacggaagagtcggacatgactcagcaactaaacaagaagtgaagccgctcagtcgtgtgtgactcttcgcgagcccacggactgtcgcctgccagtctcctccatccatgggatttttccaggcactaatactggagtgggtaaccatttcctcctccaggggatcttcccaatccagggatcgaacccgggtctcccacattgcaggcaaactccttgatgtctgagccaccagggaagtaaacaacaagaagggtacctggtaaatacggccacctgctccctacacatgggcctcctatccgtcctatctcaccaggaggagggcatcctacatgtgtgaaaaaagattcttaccacgtcctattcatggaggaagatttagagaattggaaatttagaatacaacatcattattgggtctgcattggagggctgtttccttgaaattaagtttttaatgaaccaaaggatatagggaaaccaatcatcaacttggaacaaacgcaggcacaagtcactaatctacctagaaggtcaggcagtagaacagtagcgtctgactagtccaactacagaattcactgtacaagataaaatgcttgatatttgaggtgggtttgttctaccctacagagaaatctgctaaggccctgctggtcccagctcaatgctatccagatctttaacaacaatggcagatctggcattttccctctcttctcagccaacagcgatgatttagagcactccctaaatctcgttgctcagatagtggggcgggggggtgggtggtgttggggattgttctcttcctccatcccacatcttagatggcagctctgaagactaatgcataggtagagtcaaagttatctgggctgtacacgtcaaaacaacatgaaaatcttccaaccaaaaggaagaaaacactcttaggcagtcttgaactacatagccaaggatccgagcttgaattcagaacagcaaccccaaaaggaaccctcatcactgctcatcataaagcaacatgatagcaggggtgatggacgctgattattcatcaggtcagttactgaggaagttcgggtgtcatttcactcatctatcaacttgtctgtaaaccacgcttcactataaacacagtatttggcagtcatatcaaagaatgttttcagtgcttcctgaccgtgttctaggaaatataattcaaggggcttaaactctagggaccacccaaaacttccgagccagcatggctgtcagccctaacagggcatctgatggagtgtatggtccatgctgagatgcagacggcaaagtgtaatgtcagcgctgcttctggcttgccgtgtaaatcaagccaacttccggagctatggtggtgttcactctgacaccggaagagtcaagatcttaaaaatggaccttacgggacatcatcatgtaaatataatacattcaaacaaacgctagaagatacacaaacgcacacttaccacccacctgtatttggcattactaagcgtcctcccaaatg

SEQ ID NO: 45143 - DNA, 1442 bp, Bovine  19866880852957
  misc_feature (1)..(1): n is a, c, g, or t
nactatacctagccatggccacactgaacaatgcaactgaaaacagctttcatctttatctaagtcaaagaggaagacacgaaagcttgcaaaaagctatccttagagttgtaactcattttaagcatattcaggcaaaaggaaatcccatggcgggagaaacctgtctatctatctcaaagcctagagaagcacctagaaaattagaggcacccaatacatgtatttaaatgagagaatctgaaacccagctctcgcactctctttaggatcagtggctctcctatacgtacaattcagaattcatgaatctcttaaaataccagcggtgtctctactatatataaaatagttaatcagtaagaagctactgtagagcacagggaactctgctcagtactctgtaataaccaatatgggaaaagaatctgaaaaagaatatgtatgtgtataaatgaatcactttgctgtatacctgaaactaacaccacactgtaaatcgactatactacaatataaaatttaaacgagatcactggtatttattacgacatttgtgtattttacaaacaaagctcacccaaacagatgtgtactactgatgagaaatggcaggaggccatcctcagtgacacagtagtatctccataatgcacctcaggggcacatttcgatgttaaaagttaaagaaagaaatagtgattttttttttattgcagtcacaagtacagtaccataagttggcaactgcaagaaatgactgcctataaatttactgtatgttatgagccactgttttaaatggccatgaagcaggtgtctgctggagactggtacaaagctaagaggttcataaaaatataaatgaacagtgcagctctgtcttagatcttgtaatttaagatctgacaggacacaaggttttacttttaatttgaagaatatactaaatcacaccaaccactcccctaaggacaattattacacagtctatcaatggatcataataactaattaagtacaacaatctattatattattgttgttgttgctattaaggttgttcataagaaaaaggcaaaaaggaactcaatatagccagaaccaaaatcagcaaattcataaagttttgtgtgcgtcctcaatcccttcagtcatgtccgactttgcgacctcattgactgtagccctccaggctcctctgtccatgggattctccaggcaagaatactggagtgggttgctgtgccctcccctccaagggatcttccagacctaagaatcaaacccaagtctcaggctggttctttaccactagcaccacctgggaaaccagttttatattaatacatggcccctaatacctcgacacttcccatttagacgtgggtctatgctcctgttttttaatttaggtgggcttctgatggcttccatccaca

SEQ ID NO: 45144 - DNA, 1540 bp, Bovine  19866880860421
  misc_feature (1)..(1): n is a, c, g, or t
nttggtcccccttgaagacctttcctggacttggactggctcattgctttggagtaatcaggcatgaacattttattttctcccagctaaccagaatatcaactcctgctaagaaatcaagaaagaaaaaactggctccatattgggctgacctttgtcaaattctcaagaggttggaaacctacctctttctgctactaacctgcttccttctatgaagaaatagtgcagccttaaacctatgaggacattgaaagtagttttttatttcttacaaaccactgatccagagagactgtctacccttagtcactaagaagctgacttattcaaggcttatgtgatgtatgatgtgtgtgtgtgctcagtagctcagtcatgtgcgactctgcaactctatggacaatagccctccaggctcctctgtccatgggattctccaggcaagaatcctgcagtgggttcccatttcctcctccagaggatcttcctgacccagggattgaacccaggtctcctgcattggcaggtggattctttgaaccactgaaccacttgggaagccagacttgtgtgacagaaggggctttttatacccagagagcagggagggaccagttatggttctcttagtcagaaattcctcccaaagtttgcagaggccttttgataggagggggtgcatccattgtccagacaagagataaaagaaggatgccactgagtcaggattctactaagatattataaagaagattgtggctggaaaagtagaactaagcaaaagcaaaatgacttcaagtggagctatcagctctttctctgtatcagcagcacacacagagagctggggcatgcttgtcaccatcagtggatgctctccatgttcatcgctcaggtaaggaaatctcccattagctacaaagtgtgtttcctcccattttctgcagcacagagtaatatcagattttgtgtcagtagtgctaatggtgacagatgtccataactgggtcctgtttgtgggtgaagaagggttattactgtcattattccttcctcgtcaagtgcttgctacaaactaggggccatatgggatggcgagctcctccccatcctgccagggcccagcaagattgtgcgaggacgatgctgaatggagatgctccctggggtggctcaagccagcgaactgctttgatgcactttgggctgacaacgtgatttgcagccattctctgtgatgcctccgagccacttcaaatctttgtcagatgccaacccagtggggacaagctgactttggtctctttatttgttcctttgggaagctcaacgttcaacccccatggaatatttcctgagagttcaaatctgcgctggcatgaggggaagggcaagagataaggagcaggcatgctctggttccttgaattaaatggagcttctgactgtacagacttagaaacactgggcataagacaacactaactgacgttgatctgatacctgtgttacagggatttgtgggggcacattaagg

SEQ ID NO: 45145 - DNA, 1542 bp, Bovine  19866880968161
  misc_feature (1)..(1): n is a, c, g, or t
nattagtttgtgatgaatagtgtgaagaaaactagccagagagatgcaaagcctgtaaagactgctgggaggacctattttgaataggatggtcaagactgcctctctgaatagatgatctttcaactgagatctgaaagagaaggagactgttgtacccagtggagggaagaaaatttgaagcagaggaaatggcactggtcctaagactggatagagagagaggtaaagcgttttcaaagcaacaaaaaactagaatgctacatacagaagaagagtgactcaagaagaggccgtattagtaccttaaagtcccttggactgcaccatccaaccagtccatcctaaaggaaatcagtcctgaatattcattggaaggactgatgaagctgaagctccaatactttggccacctgatgtgaagagctgactcattggaaaagaccctgatgctgagaaagactgagggcaggagaaggggatgacagaggatgagatgattggatggcatcactgcttcaacggacatgagtttgagcaaactcttggagatgctgaaggacatggaagcctggcatgctgcagtctgtggggtcacaaagactcagatacaacttagcaactgaaaaacaacaaggagctaaatcatgcaggcagttgagaggcagggtattcctttcactgtaaagtcaagagaagtcatcacagaagaatgacccaaccccactggtcttttaagcagaccacttttctattgggtgacgaatgaccatcagtggtgtgcaggtgagaagagcaaaccaagaagctgcttcaatgacgggaaggaatagatggcgcccagcctaggaaatcagtgacaaggatgaaaaaggcaacagaaacatattttagtgcataactgataaagcttactgatagactggggtagagtgaagaaaagagaaaatgtgggtaactggagactctggctttaagagctggtcaggctgccccagtggaagcccaggcagtgagttgtagcagcatcaagttttagctcaatgggaaggtttgacaagagctgagcagttccatggggttgcagggtttttcctttatttttttccccttcctttcctcttaacaggcttttgacaaggagcttgacactgatgtcttggtgattgaatataaatatgcttaattcattacaggcagagataaaggaacccagcttccccttaagggtcattatctagataagattatattgtaaattgaagccaggtctctggaggcagcgatcgattggctggttcacaagcccctccccgcctcccagcattaggatgcagcacaagttccctgcctagaatccaactccagctgccctgtgttaaccagactctgagcctctggtgtcagaaaaccagagtaagtgactgcctaaagacaaaattaattataatgtttttatctgttcctgagactcatcctaggctaatgtattgatttaaccaccgctcctctgaatggtgcttatgaatcaatatctcctag

SEQ ID NO: 45146 - DNA, 591 bp, Bovine  19866880987030
  misc_feature (1)..(1): n is a, c, g, or t
natggtgttgtctgctgcaggatatgataggggagggctgtctttcccattgctctccagattgatgcgcatttcaagctgtctgctaaacttgcgataatagccaatgggtttcagttttcatttttgtatttgggatgggtgggtggcgttttatttttatgtactctttgctccaaggtgaaaaaaaaaatgacaaatatttttaaaaccattcttcctttaaagcaaaccccccaaacacttacatcccacccacacacctaacactgacaaaacctgtgaacctcctgattgcctttttttgtttttgaagggagataacttgggaagtttcctgatgcaagcttctggcaatcactgaggctgcaggtctgtaggctgagggagatacaagggttgactattcggatgaaggacagttacaattttcccagctcctttcaaaaggcttacaacatacatatttctccagcaacaatttcattttgtggtctgtatttttttcctatttctttttcaaaaatagaggagataattcttaaagacacattgatgaaaattattattgcaagtccaaatacacgggtt

SEQ ID NO: 45147 - DNA, 1421 bp, Bovine  19866880987313
  misc_feature (1)..(1): n is a, c, g, or t
ncttcccactttaaggattttttttttttaaagctaggtatcaagaccattaataattgataaagcatttgtaaaccctttgcaaatgaacagtcaagggacacattaataaaacatctttaaaaatctccatcgctgtgctgattctcatcacacttccccaaagcagagtaaatgggcagctcatcctccagctcaaagcaaaggccagcgcctctgacaaggtgacacaggagggtggagggcactgccttttaggaaaccatggccatcttttacttttatccacacccctccagctaactctgagcttatgaaccattcccccaataaattaattcttgggccaaatttttctgctgggtcacttctagtgatataaattcataaataaaccttttgacatttctatttgcaaagaaaacatttaagatgctggaggaatggagggttaggcatttaggaagggtcaatgaaaatcttcaccttgaggtcactgcacatttagctcaggctaagagagcggtcagggttgccgaatgccacagcttcaaggcagttaagtggcttggctcatcttattctcgctggataatgcaaaaggaataaaaacgtattttattgacatggcatctttcttcttaggattgaatagtgaaggcacaagaaagaactattagcttttagcatatcagcctgtcactgcccttggacagagaagagattgtcaaaaatgctatgtaaataagaccagtggaccagggtcaagatttccaagcaggaggtcatgggtaataatcctttagagagaactatccacctgcgtgtgatttgagatgacctagtaagacttccttcatcaggtaaaggcccttccctcatgtcaaagtacagaggtcattttagaggtggtgattttctcattagaagcaccctaaaacatttattgaacactgctgtatgcatgacttcacaggtgttgagagtacaatgttaagactccaactatgcttttccaaatatttcatttgaatttttggaggcaaaattcatagataaacagagaagtgatttctcaaggggacaaaaaagcccaaggaaaccaggtaaatagaatcctactggagtactgaggtgggtatttcaaggatctgcaactgatgtaatcaggggcattataggataatgaaacataggttctcttgattcctgtaatttctggactaattaatttagtactgcatctgcctagattctcagtagttgattcagctctgttcagacaaaaagagagaggagagccccttacttggggaatattaattaagacatagagtctgttttttctgctccaataaatttcagagtcttcggtccatctttaaaattgcactttttttcccccaaaacctgtatcaaaa

SEQ ID NO: 45148 - DNA, 1649 bp, Bovine  19866881009345
  misc_feature (1)..(1): n is a, c, g, or t
ntgacatgctctgttgttctctgtgtatcatgtacactggtaattatcattaccaagtttgattttttttccagatgaattcatacccaggtggtggtgtatccctctggtagaaggtgcagagtttcctgttttcccgctcattatgatagtattagcaaccaaaaatcactaattgcattaattcattagaggttagagataggtaatctatcattctttctttgatcattagtgtgaatacttctttaaagagagatttgtcttcatcaactgtttggttgccctaaggtatagctcttaaaggttaaatgcttgactttttttttttcatctctgagctttcaaaataatgagttggtcttaatatttttcaaaactgatggctgacttttttgtatcattctgaactcatggatttaaatagtttaatatttttcaagccactgcaattattttcttgatcaatgctcaaactggctcatctgtgaacaggcagtactacctaagttggctcccaagttctttcgacccaatgtgatcctctctgatggcttccttgttcactggtgtggaaatgctcatcttgtttcctttatatttccatccacttttcaaggcaccctgtctttgattatttggaaaagtatctaagacattttccttccgttaatagctatttctttgaggagtcctgttttgtttttgtttttttccacttggttttagcatgtaaaagccacaattaggcactagggattttagccactatttagtcattcattgtttttaggcagaactagaaaacacacattaaaaaaatataagacaggggacctccctgacggctcaggacaactcccggcgtcccctgcagggggcgcaggttccattccttggttggggaactaagatgaagcatgctatgtggcatggccaaaaataactaattaattaaaaaaaataaaataaataagatgaatttttaatttatacttattttccaattaaaaatcaagactatagagattttacttaataccactgatcttacatcaatatttcatttgtcccatgcctcagaatcttagttctctataatgccaatgtaattactcattgctcatctcacattatacacacaaagttctcctaagaataatatcacattaccaccaatgatatggttagcgaaaacagccacattttttattttgcacttcgtttcctttgggatctattccactgtggatgtacggccaaattatcatgttttaaagtcccttgaaatatttcctctctgactggctatgccaaaaattgaatcacagttattttttatttcattttagtttttatttctaagttctttcaaaaatttttgttttagaattacataatacatgtccatgatttcaaagtctaatttctaaagcaaagtatagtcaaaaaagtttagcttgaatttctgttccctttatcgtattcccacctacctaccatgggtacccttaacaatatcagcaaatacttttatatttatatgtatatacctgtatacccagatgtatacacatatatactacacacatatatttatattcccttcttccttaaaacatgataaactatacatactttttctgtat

SEQ ID NO: 45149 - DNA, 1174 bp, Bovine  19866881021600
  misc_feature (1)..(1): n is a, c, g, or t
nattctccaggcaagaatactgaagtggttcgccttgcccttctccaggggatattcccaacccagggatcaaacttggatctcctgcattggcaggcagattctttaccattgagccatcagggactctcctgttctcattagttatttgttttatacttgtgtgttagttgcttagtcatgtccaactctttgcgaccccatggactgtagcccgccaggctcctccgtccatgggattctccaggcaagaatacttgagtgggttgccatgcccttctctgaggctttatacatagtgatatatatatatatcagtcccaatctccccactcatcccacccctccacatgatttttgtttttagttaactttggcgactgaaaaagtacacaagtgcctgtgtggtttttcacatactactagtcagatagaacctgcccgtttctccttcatggggtacttacaggcccacagaataagcacctgcccccaggtactatggagatacgcccagctgatcttacagcagtttcacttcagatccacaatctgcgtccgctgcaagaatcctcgatggcctctttcatcgccctgtgtagctctcacgcttctccactctgctaaacgttaaggagccctgatcttcccacagagccgtcttaggatcagcacagtcagtacactgagtgcgagagcgacttcatgaaactccctgagcctcggctggtgcaagtcatggtggcttccgcaccacagatgacaggcccgccgccccagcttagcacagctcacatctgcacgtaactccgattcacttggccttgtcagttaagcctccaagaaaaaaaacatccagcattcagagctgagcagctcatcatcccctgcccgcggtgaattttgatttaaatgtaaccgagtctctcttggctctggcttaactgaattggaactgttcttttaattgttgattcagtcttgccttacagatctggctgtcagtcctcccatcagagtctctttcttgatgtgcttattcatcatgcacgaggatgctcatcctccgtggacaccagcaccagcctttgctagtcagacgagatggtttaaatgttgacttctgtgtgcagggaagtgtcacatggggtgattcaagagccagctccatagt

SEQ ID NO: 45150 - DNA, 1692 bp, Bovine  19866881028269
  misc_feature (1)..(1): n is a, c, g, or t
ntttaaaaacaggtgctaatgagccagtttgttgtgatactcttggctgtattttgggaaccatgcagagctgtgaattcttctactaacaagtgattcttgaagacttctggcagcttctgccactgcacccaaacagcgggttcacattttcaaagtcccaatgcccagcagaagtcagtgaccatccaccatcccgtgggctttcaggctatgtccacatgaaaccaaatatgaaaatattaacacctgtacaccttcatccttccaaacaccttctcaactcaaccatgaaaattctagcaatgtgtattcaacagttttggacataatgtttaagacattgtagagacagagggaagacgaatattccagagtcggctggtgagaagactatttaatatgttagatttggtttgcttttatttttattaaagtatagttgatttacaatgttgttagtttcaggtacacagaaaagtgatttagtcatatgtatacatatatccactcttttttagactattttcccatataggtaattagagagtattgagtccagttccctatgccatccagaaggttcttattagttctctatttcatatatccatgctaagtcgcttcaaggtgtccaaatctttgtgaccccatgaactctagcccaccaggttcctctgtccatggaatttcccaggcaagaatactagagtgggttgccatttctttctccaggggatcttcccaatacaggaatcgaacccacagctcctccattggcaggtcagttctttaccaccaccaccacctgggaagctcattttatatgtagtcatgtgtatatgtcaatcctagtctccccaatttctcccaccgcctgccttacccactggcaaccataagtttctcctctacatataccatggtagtcttatatagaaactgatactattgatgagatatgacatagcaatgggagacggcttttgttcctatgaattcccaccttttattgattttctgttttggtttgtttatttgttggcgtcacaatcaggaatcctgcccagactatgaatggcattctatcatatactgtgaagacaggagataaaaagcttttagcatttattcaattcagcagaggtacttctgtgctcaaccagcctgtaatggaggtctatagcatgtggaaaagctggtctgcaataaaggatttaaaatcatcattaatgtctattgaaatgaacaatatgccccaaatgccactacatgtcaagtatgaagccagcttctggcacctgcagatgggacaaaaatgaaatgaaattctggcagcaactctccagccctggaagggaacaggttgaatctccgataacaactgctccccagaggctgtgaggtagctgttggaaaactaaggggggcagggctaactacaataaaccactgagattagttctgaacaccgctgatgtgagccctgggcagtgagaagcaaaaagagcaggaccgactggcttttaattaaatagaaataatatacaacaccaaatagctttaaagcagtttgaaccccaactctgttttcaaaactcgacactctcagcagcaggcgtagggcttggaaagaggagagctccgggctttccagaagaaatgaacgcactcacctgattaaaactacct

SEQ ID NO: 45151 - DNA, 1190 bp, Bovine  19866881041548
  misc_feature (1)..(1): n is a, c, g, or t
ncctatttgcacttctgctgtcaagtctaattacttcttttgaaataaaaactttggccttcactcgggtctgtggtgcctgtcagtgaatgatcatctgtttgcatcttctcagctatgttcacatttcacaggtctgccatctggtcataggaaccgaagctccatcagtatttatacgtacaaaatggcaattcctgagaaaggatggtttcaacttaagtgaatgcatggtttaacgttgatactagaattacacgtggacaccatgcttcgccggtcaacagcgattattccacgccatggatgttttcgtctttcataggaaagagccattgtgctgtaaaacttacaggacctgaaatctgtgcttttagtgcttgaagaggggagatgaggagggagagagctgggttggatagatgacagcccccggccacagaggggtagtaatggcacgacagccttgtctgtacatcacttgtttcatgcttgatgtttccggaacaactgctcagctgcagggacgtgggctgagagctgatccctgctcagctgggctcttcttcctcaacatgaaacgattctgagcactttgaatgtttgggaagttcccccataacaattattgccctcgcaagccataatgtttgccagtgaactgagctctgtttcaacctatggatttagacacccaggcatgatgaccttgctacccaggatcatatagttttagggtagaaggaattgcagttaaaagtcttaaacactcatgttgcagacaagacgctgagtgcagaggagttaagctgatggttagatgccctggtcaccgcttcctttgctcagggacaaaatcctgaatcactcggttgcatgttgtgttttttgcccatagatcattcaagttcttagcctttgtgggtctttgattatattaatgggagatgtgcatctggaaaaataactttttaaaaaacattttattttgtattggggtatagctgattatcaatgatgtgatagtttcaggtaaacagcagagggactcagccatatgtatacaagtatccattctcccccaaactcccctcccatcccggctgccacataacattgagcagagttccctgtgctatacagtaggtccttgttatccatttaaaatatagcagtgtgtccatgttgat

SEQ ID NO: 45152 - DNA, 1252 bp, Bovine  19866881057783
  misc_feature (1)..(1): n is a, c, g, or t
ncagggcttttattgttctagcttcattcaggcatctagcacaagtctgctgttatcttaaactatattgtgcccctaccttctcacttaacaatgacacaaagatccaatttataaccagcagagaggagggggtgtttatctcgtgtgaggctacacacaagtgcaggaggcacaaatgggttggcggcacttgtcacagtccactggaagctgaagatgaatcaacaacaaagaggacattttaaattatcattttgatttcaatttgctgctacacccacaagtaaaaaagcaaataaataatcattctataacaggaaaaaccatccatcctttacaccaaccaaaagggctgtaatcattacaggagacttaagtgggatgatattgtgaattaaaagccagaaaaagcaacattaatactttgaatacaaacctgagctcagaagatattttattttactttattttgagtttactctgctactgaaccatgaaccaaacaaaagttttgggggtttgcttctttgttcttaatgtcttagagaaacaagataaacaaaatatacatatgcatatatacacacacaatatagtttctatatacaacatatagtcacatattcttgtttagttgctaagtcatgttagactcttcatgacccatggactgtagcccgccaggctcctctgtccatgggatttcccaggcaagaatactggagtgggttgccatttccttctccaggggatcttcccaatccagggatcgaaccctcctctcctgcactgcaggcagattcttaactgcggagccacaagggaaaccatatatatatagtttctaaaatgattcacttagaactaaacaagaatataaaaacagtctctaaactagaagaacattttctttcagtacttccaattatatattatataatcagagacacaaccctaatcatatgcagaatgttgggtgtgtgtcagtgtgtatacatactacatgagtatcagctatttgaagattaacttggggggagtataaactggtatccatatttttctgtcttacaacataaaaacaaacagcatgacatggaaatgttttttcttttaaattaatgtatttttttaaattgaaggataattgctttacagaaccttgctgttttctgtcaaagctcaacatgagtcagccataggtatacatatatcctctcccttttgaacctccctaccatcttcctcc

SEQ ID NO: 45153 - DNA, 1180 bp, Bovine  19866881101126
  misc_feature (1)..(1): n is a, c, g, or t
naaaattatatatagaaggctgggttccatggaggtggtgacaagtgtcattaagagaaataaagcagaagaggctcaggtagggatggagggagtgttgcttttttgtgtaagctgttcagagaaggtctctgcagtaaaatcacctttaagaagacacctgaagaaaagcaagggaacagacattctggatatctgggaggagaatatccagggcaagggaagagtgggatgccaaggctgtgtgatgggaggctgctgtggtatccaaggaacaattaggctaggtatctgagcagagtggcaaaggaaagaggcataatagctcaggtcacagaagtggggcatggggggaaagtaccaagtgtattataggccatggtaacgactttgacctttactgtgagtgagatggaaagctattgaaggtgtttattcatagtaacatgacctaatattttcaaagataaactctacccactgcgtggaatgtaaacatacagggaaccagagcagaaacaaggagatctgttacaatgatctgttataacaagagtctattccgataatctaggctattacaatataacttatataataacctagattcaagatcagtgtggcttgggccagatagagaacattggaaattgtagaaaaggtccataatctggatatctttgggaggcagagtcaaaaggagttgccgatgcattagagtatgagagaaagaaaagcattaggaatgattccaaaatttgagctatgcaacctgagggatgggctggccattactgatctggggagaacttggtttagcatatctggagggagactcaagagttcagtgttataagtgctacatttaagatacttcttaaacagtcagttgaatatatgagtctggaggtcagaggagaatcctggcagtgacataaatctggggcttgtcagtgtccagaggatatttaaaaccaataggttgaatgagatcactggataatgagtgtgaacagagaacatatctgaggcctcggccctgaaagatatccacactgagatatagggcaggtcagaagttactgcacaggagacagaaaagtaatagccagcgaatgagagaaaagccaagtaaaaggaaaatggtgtccagacaaaactgaatattcgggacagcttt

SEQ ID NO: 45154 - DNA, 1617 bp, Bovine  19866881117934
  misc_feature (1)..(1): n is a, c, g, or t
natttcatgccagagagctgacatcactaatgaagatgggtaaaaggctttattaaatcaatggataatttcattttaagaaggccctggatgcaaatctcataattcatgcacttaccaatgttcttccttgccatggccgttagataatgacatatcttagggcaatagtcagaatctcaagtttggatttttggccttattttatttttttattttttgccttattttataataatcaacacggatgggttcaccacttcaaaagtttttgaatttttattgagctgtttttcacagtgtgacagaaacaaagtgggctgccatgaggaagccaacacaggggccttagtttaaatgttgatatacagacttggtttagttgtcaacctagaacaatctgtaaacagattaacagtccatacgttagaggcacacacaggaaagccccctttccttcaacagcttctacagaaagtgacttgttggcataaaattgttgcaaccttgtacttcaatattctgatacaaataggaaagcacacttcgccttcaacatctgttctcactagattcttatttcaaaggcctgtatttcttaaccctcactacttgctgctgttatttgtccataaaggaaccacatttcaagcaggcacccgtgctcgacttacaggcatgtgtctgtgaaaggagaagccaacattgagttctcatatttggttagggttttattttcaatgtttttgctgaagctgatgatacgtgatgtgataacgttaaacattctatgcattttgatcaagtgtgaatgatgtatccaaggaagcaaaaagtcaagtacaacagttttgtaacctgcttttaatgagatcattagggagttaaggctctgttggttgagttgcactgcagttgtccatcttagctactgagtttatttaaattacatttcaaactagtcattgtagaagagtgttttggaaaatgagtgaaataaagggcaggtctttcaagagtatgatatctgattagattgggaggtttagagaaatggtgtttgtctctggacctcagaaagaggaatgttgttgatagaaatatcttcagtactggactgctgcattttccttcaaatccagactttgctcttagaggctttgaaaagctttgtaccttctgattttgaggatacaaacacacaaaccaggtaagcctgctttgctcaaaacagggcagaaagtcacctggcatttctaataaatgatttgttagtctttgagaggctttggtttttgatgagggtattctcttttgttagagaaggaacacaaaggcgttgaaatcagctgatggctggagccaaagtgtcagtgttatgactgtgcagctttccattacccgtgtgtgcgttaactttgtagggaatccatccctctttcctctgggagacactagctgttgactcgcctgttctatgctgttttctaagagtgatccctgaccaacctgttactgtcttccgtgctgctcactgactcagctgagcctgagtcttttgcagccccacagactgtagcccaccaggcttcttgtccagggatttcccaggcaaga

SEQ ID NO: 45155 - DNA, 1462 bp, Bovine  19866881134198
  misc_feature (1)..(1): n is a, c, g, or t
nctccttgtggactccgatcactggggaagtcccgcgtgcctcataccacacccacgctcgtcaccagccctgccattgttacctaatgggtgttggcagcactaattttctggatcattcctgtgaccctcccaggtagatacttcctttgcatttaagatatctcccttgggtgtactttccttaatttatttccatctgtattatacctataaagtccttgaagtttctggtgtgaaaaccatcagcagattattctttatttaaaaaaaaatccaactaatggtcatttcagtgcatgtctaaactagggaatggagtttcatgggttcgaggaaatgtctgcccactccagtgttctagcctggagaatcccttggacagaggagcctgatgggctacagttcatggggttgtcaaagagttggacatgactgagcaactgagcatgcatgcattctttatttttaaaaaacccagttgatggtcatttcaatgtgtgtctgaattagaaaatggagtttcatggaatttctttatattacctggagaagggtcttttcaaaacaatcccctaaatattaaaaatttttttgctgtttttattgctattactttttatagtttttattttattggggtatgattgattcacaataatgtattagtttcaggtatatagcatcactcaattatacatagacatatgttctttttcagattctttactcatataggttattacagaatatattacaaatgaacttgtttataaaacagaaacagatctgcagattttgaaaacaaacttacggttccccaaaaggaagtggggggctataaattaggagtttgagattaacatgcatacagtattatatatcaaacagataaccaacaaggaccttactgtatagcacaggggactttcctactcaataaatgttaagttttgtacactgtgatagggtctagttattagtaccagtagtgagtgattatctgccctaagaaagatacaggatttacagccttggagaaatccaatttctgctttatgccgggctccctgctatgagcccaggagactgcagagcctgccagaatctcctgtaccctgctgagatgctctgaggaggacgggggcatctcctgcattctaatgatgccctcctttcaacgcctgtgtgctcagtcattttgtaaatagtgactcctgcttacagacgtacagcattctttctgcaagagcaaggtaaataaactcaaaaggaatagttgggacttcactcagttgtccgcccactggcaacttggggtgtccgtatttacctcggagagaggtggtgctgggaaatgagggccagctgttttgtgagatttaacgatgaacttgtaaactattcagagaatgtaaacacagtataaattttatgtgggggcaaattgctcccaagccga

SEQ ID NO: 45156 - DNA, 940 bp, Bovine  19866881155925
  misc_feature (1)..(1): n is a, c, g, or t
ntcatggaagattataatggctggagtcttgcctacaagaaatgggggacagaaaggcctcctagccctggagccccacagggacttggtttcaagcctgccaagccccacttggtttcaagactgccatcaccaataaagaaaaggtatgatgttcaaaaatatatatgtatgtcaatgaccagcacataacagttgccacttaataaatacatgtgtactaagttgcttcagttgtgtctgactcttttgtgacacaatggactgtagcctggaaggctcctctgtccttgggattctccaggcaaggatactggagtgcattcccataccctcccttcagggtgtcgccccaatccagggatcaaacccaccttctcttatgtttcctgcattggtaggcaagttctgaaatacagtggcattcaaacaaataaatgatcatgaaaggcaaatacaccctcagaggtagacttgcctgcaactcaaggcaactcatttgcttaccaacctcaaggccaaaactgattcattttcttctttactaactttttctctaaaccaagtaaaatctgattatcaactgttatatatccaagacatgcctccacaggaaagataagtttacccttctgtgtctacatttttctgaagtttgagaatttcccactaacattttgcaagaaacagaggggatataggtggctgcttgatggtactaagacacatccgaatatggagactcatggggaccatcttgcaacctgcatcacgtgacaatcaaaacacatggaaataacatggcatgggctgttccttcatgttcactgagaacagagaccaactcaatgtgagagcaacttggcttaccctaataggagttacagagtaattaaattcttccacatcacatgtaagtataatgtgttaataaaaaagt

SEQ ID NO: 45157 - DNA, 1421 bp, Bovine  19866881202115
  misc_feature (1)..(1): n is a, c, g, or t
ncagtggtgctgagttctgttggctgcgtccatccatagatggatcctggaaaactcttcctttctcttctggtttgattttgttgtttgcaaacagctcccgctggaaacaggcatgatggttgctgtgggatggtatgtatatatagacaattccaatttcccctctatttttgtcttctttatttgcctcagaataagctataatgagcagacctatgtctctggcgcttttgtttagtaaggatttcattaggactttcttggcatgctttcactgtatgttgaggatttatcatcagtggcataaggatacatttttccgggtggcagttttgtatcgttttgctttacatttggaacgtctcttcttccttctttttgtttctgactcttaaagagtattccaggtatgtttccctttcttcatttttcttaaagcttgagaccaatttatgttttaaaactttattttttattttgtattggggtatagggggttaccaatgatatgagagtttcatgtgaacagtgatggggactcagcaatacatacacatgtatccattcttccccagttgagaccagtttagagagaaacttttaatccagagtttctaagaggctaacgtgccttgtgaggaagaaaccttttcctagttaaactgtatctgtggtcttcctaaaatgacctggtgaaatgtaactctcacgtaatctgtagtgtagtagtataaatactctgtatcaactatgactattcatttccagaagggttttcaaattgaaaattaaaaaaacaaaaaagcttgggtttctgtcatgacatatggcagaatgctaaaataaataaaaaatatagtttgtagtaacagatggatttgaaccgcacttggatctgttgaatacttttttaaatatttaatttacaatgaatctttaatataacatttaactaagtgttctgtcatattctttttaaatgtatgcagtcttttcaatgtaattgtgtctagaaaatttcaaaagaatattgagtgttgaaaattaaaactgtctctgaaggaaaaaaaaaaaacagtaattttcctgagatttttatggttcccttttatttgcactgctcagaatgttgtatattttttttaaacagtctgtcagcctcttctttattttcagtttgctgaaaaaaaatggaaccaaacaatgaaagtaacttttagtcaagaaaatcaaacatacatgctgaggccattgaatccattctgtttgttgggatggagccaaatactacagtagttttctagtagaattacggttgtgatataaccatggttactatccttcatggagataatctgaataaatgaaatcactaagaaagtataaagcaactaatcaatcacatctaaagagagcca

SEQ ID NO: 45158 - DNA, 889 bp, Bovine  19866881207064
  misc_feature (1)..(1): n is a, c, g, or t
ntaactttgcctctgtcatgctccctttttcaaggccctcaagatacaatcccgtttgctttacaaatcttaaatctccattttgatggataggatgcaacagaatggatgccactggtaatgattcaaaaagaactctgaaattctgggatgataattcacggctctcggtaccagcaaatgctactggagtcaggaacagaaattcaaatagaaagaaatacaactttcatcctcatgacatccacttcaggtcagtaattaaacagatttcctcactttccaatgaagacatccagattcacaaaaggggctggtgggtattctgattttgtgtaagagccagaagcccgcaggacaaatgcattatttaattctctactatcacacactcaacagctttttttggactctagacatcaatttgttccaatattaaaggccccagtggtaaaaagatatgaaaatattcaaagtaaactaatgcctctgaaactcttggatcagaatactaatgcctccatctgaaggggcctaagtctgttatctttccattagaaacctttcacacaagtccatttggacaataaatacctgcagctcatggacagtaatatccatttatttttctatgtaatgcccttctttgtcggcatatcttaagcagaatcatcagtgacacttttttttttttagccttaaattctaaagaagtcaaagaaagctactactatgtctctttttatctaactttggttggtaattaggataacatcatgtggattaggtgcttgaaaatgtggttaataaaggaaattagaaatctcttctacacacaaacacacgaaacggaagcaactaaattaaatacttatggggcattgaactc

SEQ ID NO: 45159 - DNA, 1891 bp, Bovine  19866881256764
  misc_feature (1)..(1): n is a, c, g, or t
nttaattgaagtatagttgatttacaatgtttgttagtttcaggtatacagtaaattgattgaatctatctatttatctatacatatatatacatattcttcttcagattctttcccttagaggtaattacaaaatatgactgtatttctctgtgctatatagtaggtcatgttatttatctattttatatacagtagtgtgtatatgttaatctcaaactcctaatttatccctcttccactttccccatcggtaatcataagttctttttctacgcctgaggccaggttgttttttcttttaaatagtttactaaatacatatcaatcattggccaacggatgaagatcaatccttatttggaaggtggattatgctcaaaaagacaatcagatgtctttatcttcttgttaacaagtcataaacggagaaaatccacagggggtggataacaaagcagagacattttacagtgatttgttgtatatggttcattcttttgccttttttatgctcaggtccacttaggatgtggtacttgagttcaggtcctcttatcataaggcacaaatagaacagttttagccttgtagaatcttttaaaaatgccttcactaagacacgtgagtattaagctatctctattttcttttttaattaagcacatgggaaacttcagttatgagccacttcagtctttctcattaaagactgttattctctggtcttcttactgggtctcatcgtgggagagtttttactggggcattgggggaaggctgtggctaagctgctaatgataccatatgtgtccaaatctacattcttattactcctgtgggtgtgcaatattatatctgcatcttctatgcagaatacataaagacaactctgaattaatcaattgtttgttatgcacagaggcagttattgggtatttctaggagaaatctttatgtaaaaagggatacctactatatactataaatggagtgggaatgggcttttaatattaaaactccttgggagaattagcaagcagtaggaaacttcatgacgacttaatgcactgtgctagtatgttatcttgctgatgccagttttatttttttgtgatactacaattttgtgatactacaattttatgatactacaatcaggcagctgtgtagtgcagtgggccctgaaacatgaacttatccaacaaaaagttgaagaatgagtcctgtgagtcctgactctttgcccaaaggatgtgtggattttgttttaataaagggacgtccatctgttataatcccatatacaaagcagacattcggtaaaccaccagcaaaaactaagagttgtttcagatgcactcagccaactctggaatgaacattttcttattcagtgccctagaaaatacagggaaggaacccaggtaattactgtaatggataacaatgaggtttagaatgatccaagggaaaaatgcttaccaaagcaacctttcctttgatgtgattacaggttcaccttttcggtcatgtaagtagatagctcaacagacaatgtggatagattggagatgcagcttggggatgtttatttgaacctgctattgtatgggatgtctttatccttgatgaggtttccaaaccgtcaactccaacttttcttatcagcgtacccatcagaaatgaaaacaaagcaccgtgtaactgctctttctgtttctgaactgtcaatgttgaagtgacctatctcacatcctgacaagaaggacggattagccaccaggtagctcagccacgaagcttctctttcaggcccctgtggcatttctctgggttcatcatcactgcccatctgggcactaatcctgtctgaagcgaattcacttaa

SEQ ID NO: 45160 - DNA, 884 bp, Bovine  19866881356913
  misc_feature (1)..(1): n is a, c, g, or t
ncgaccctatggactgtagcccaccaggctcctctgtccatggaattctccaggcaagaatactggagtgggttgccatgcccttctccaggggatcttcaccaccctggaattgaacctcggtctgccgcattgcaggcagattcttaccgtctgagccatcagggaagcccactggagttgagtcccccaggagacctagtcacactattggggttgactgatgtgccacgctggctttctaaagggcctgtatctctgggagatcctgagatggtgtttcctactgatctcaaagatttggtcagagctatgtagtgatgcacgcatcagactcgagtaagacaagagaaatcataaacctcaaaccgtgatttttatccatggcgatgttagcactgttgatcagtgtgaggatttcagggaaaagagaaaaagaataataacagttaaaactctgtatcatctcaggtagaaaagtgtaggaggctggagccagctaagtatagctttcatctatcagctttttatgtctgttccattaaaatatgatttaattatggatcgacccagggtctggcatagtaaaactatcattaccttcctacctgcattcctgagtgatgctcgggtaaaggtgatcaaaaacctacattcatctgtaatgtagaccataaggaggaaaggagagagtgatgattaccaagcacagcatggcagatgacaataacagtcaaaaccatgtctttaaaaatggagctgagtgttttgtttgaaaagagtgacacgctgcaagcctagaatcaggtcaagagatgttgaaagcaaaagccaaatgtgcccggatgcagctccagacctgccatgggcatgccgccttgcaa

SEQ ID NO: 45161 - DNA, 1102 bp, Bovine  19866881395304
  misc_feature (1)..(1): n is a, c, g, or t
nctcggtacccaaacaccagagctctctcccctacacttactgtgttttgagagaataaaacattgatgcacactcagattaatgtcataacctttcctgaaaacaaatcttactggaggagaaaggggatggtggataaagtagccctttgtggcagatagtccttagacggggttggcggggaggagaaggggactctgtatgccttcacaatgtagcccagatccagccttgcagagaaagacagcagagaccaggctctaacttcagtcagtcttgggtaattccaaaacaaaggagtcacacatcgtttctgagctgtatcccacttgacttgtcagacattttatagaatgctgatttttatagctctcctgggcctaccctttctatactaaggcacgagagaaatacacactcccttccaacgtactgaaatagcagcctctccagggaaaaattctccatattaatggatctgtttaataggacatcactttgacttttccactcacttatatcctgaactgtaggctagtacgggaggaagtggaaaacaggaagcaccttctgcttcctaagggggaactggtatcttcacaaatacacgtgctcatctgttcttgagttgtaacttctcagactccaggctaattgtattcaaatggatggagctaacaggcatttcatcctgggttccgtgttcacatctaactttgagatatccatgacgcaacaggcacagcatcacacaggcaactacctttaacaacagccagaagggcatcagtacaggggaaagaaacagtaagagaggatgctgtgtcagtagattctaatgagaagtttcctaggaggtcagatcttgttcttcaatctccaatcaagaggatgtgtgtgagttatttaccaggtttgtgaaagctattaaattaaatacgtatatataaaacctgcacagcttccacaaggttctttaatttcaaattttttccttataaaacaacaaaaaaagggagggaaaacgaaaaacacagttactgaaatgatccttcattacctggccacagagatgcaagagattcctccccgcaggaagtc

SEQ ID NO: 45162 - DNA, 1404 bp, Bovine  19866881566259
  misc_feature (1)..(1): n is a, c, g, or t
ncaagttgcctttcataattcatgaaaaaagtctgtttcctcactctttgttttacttgatggtataaaaaaactatggttttaaaccagcctttaaaaaagtggttataatatttctgtaaattcttagctcatttctgagccagtgcttaagcaaaatatgatgatagttttttttttccaaattgtttaccatgatttgagtcatcatattttgcttaaccactgggctcaatgcactttaaaggctgtcatttctctaccttgatttgacaccttcaatttaatttcttaagtgttagagaacaaagcataatttaaaaaggggtagaaagggttcctctagaagactgtttcttgcatacagatgagtaattagagtgacctcaatatggtggcttcccttcgttgctgagaggcaaatagttttgtgtggcatataaacaagcttccctctacaaacccttaatgtgaactaaccccctggatgtgagtgagacttcggtgtctttgccgatagatgaaaggcagcagaacctgcagtgaaacaagagtagggaagtttaaagtttgactttgttgttatctggccgtgcaaagttaactcattagaagtttgcccctgccagaaatccagtcaagattccaccatatttcctttaaacatacacagagggggagagagagagaaaaaccgaaataattctttgaaagttcaggagaaaacaaggtatggtttgtttgggtttagaatgtgtcaacttaaaaacaaacttttctaatggtgagagttatgagcaattagaatttggttttctgtaatgtgagcagtggatttttgtttgctttgtctcttgtttgtttgtttgttgccttttataagggtagactgtatataacacagaaccgaagatgtgattattaaaataatgtgattatttcagaaatagtggcaacctactaaaaaataaatagattggaagttatagatatatctaaggaagaatattaatcttcattctgtgtctttaaacagatgtagaacagtcttcagtctggaattgagcatggcaggaccccataggcagcagtagagccttctaatgacttagcaactgggagtggtatagggtggggtgttggaattaagcagttgagtctcaaatcttggctctaccacttaattacatagtgactttaaatgggacagctgaccttgggctctcaggtctttcttgaataataaaatttataaaagccctactctaattattctgagatttatgcatctgtatctagccagagtgtagttcaggtttaatactcaaaagctcttatttttcctcttctgggatcactcccttttatctctaatcccaggccaggaacacagcccaactaaag

SEQ ID NO: 45163 - DNA, 2704 bp, Bovine  19866881621469
  misc_feature (1)..(1): n is a, c, g, or t
nagcctgttgggcctagtccctggggtcacaaaagagtcagacacgacttagcggctgagcacgcacgcagtagtaggtattagatgttcaatccatacttattattatggtcttacatcttcccactaactcctcactgaggcttttattgttaaggtgaaaataaagactttgcttttatgtatttattttaactcattcgtgtagtagatatttattgcacaattattctgtataaatagtcttggccccgtgaagcgtgaaggaaacaataagaaatgtttctttcctacaacctcagtacaaagtacaagatgacaagtgatttgagaagaggggaagtgaggaggcagtatttaataatcatctatttggtgcccagtgctaggtgacagtccaaatgggaagtttcccagaacatttctatcaaagaatgaccccaatgtgtccttgtgtgttggtcgctcagtcatgtctgactctttgcgactccatggattgtagcccaccaggctcctctgtccatggaattctccaggcaggaatcctgaagtgggttgccatttccttctccagtgtgtccttacagactagaaattaggtatttctcatcgccttactgacagtccactctacatcttttcccctaagtacactgctttcatctatggtggaataatgtggattctgggaatacacattcttgggttagagaactcctcaaaagatgcagagtccatactggcaggttggacattctttttcatgctgtatagacttgaatggtaccttgaacacatagaactatctgcaaccttgaaccatgcaggcatgctcgctcagccacgcactcatgtctaactcttcatcaccctatagactatagcctgccaggctcctctgtccatgggattttccaggcaagaatactggagcaggttgccattttctcctccagggaatcttcctgacccaggatcaaacccacatctcctgtggctcctgcactggcaggcagattctttaccactgagccacctgggaagcccacattgaaccatcagttcagttcagttcagtctctcagtcctgttcgactctttgcgactcgatgaatcgcagcacgccaggcctccctgtccatcaccaactcctggagtttactcaaactcatgtccatcatgtcactgatgccattcagccatctcatcctctgttgtccccttctcctcctgcccccaatccctcccagcatcagggtcttttccaatgattcaaatctttacatgatgtggccaaagtattggagtttcagcttcaacatcagtccttccgatgaacacccaggactgatctcctttagaatggactggtcggatatccttgcagtccaagggactgtcaagagtcttctccagtaccacagttcaaaagcatcaattcttcgatgctcagctttctttacagtccaactctcacatcaatacatgaccactgtaaaaaccatagccttgactaggcggacctttgttggcaaagtaatgtctctgcttttgaatatgctatctaggttggtcataactttccttccaaggagtgtcttttaatttcatggctacaatcaccatctgcagtgattttggagccccaaaaaatagtcagccactgtttccccatctatttcccatgaagtgatgggaccagatgccatgatcttagttttctgaatgctgagctttaatatctttaaattctcagcagacttctaggtctttaaactaacattagggtgattggcatcaatgctaatcttctagccatgctttacaggataatttttttttctattttacctatcatttttcatctcctgctgattattttccatcacataaatatagcattttccccaaattgcatgacttgtttgtcctttagaatcattcctactgtgaatcaattcaacttgagcatatgtgcaacatttgtaatcttcttactgcttgcaatctttttattatctaatttttatcccatcataagtgtatgccttttcttatgaccatttttaagaatatcgttgaccttattggacatgatgaagttttcttcactaaataccctggaactaagcacagccacagtgaataagtgatagaatataatgttcttcagcatcagaataactcagggtacttgctaaaaatgtgaattcacaggtcccatctccccacgtattactatattcaaagttagaacttatatcctgaattcccagagtagaaaatgaaagtgaagtcatcttctcaagggctggatttcaaatcctgctttttgagtctctttctcattttaccttggtcttcctgatggggaaaaggacagttcttttgcaatccaaaggcagaattaccggataaaatagagaacccttggttacatttgaatttcccatcagcagtgaatacatttttgacataagtatgtcgcaaatatggcatgagaaatacttctactcaagttatacattcttgatcagaaattcaaatttaattcaaattcaaatttaatcgtatttgtagttgcttaatctggcaactttactgaaaagaataaaacatgtctgaatgtgcattctcaagaaacattttattaaatagattatctgtactgtcaatctcgggagaatgggtagaattaaaa

SEQ ID NO: 45164 - DNA, 1577 bp, Bovine  19866881663321
  misc_feature (1)..(1): n is a, c, g, or t
nttagcactaatggtggttactctcttgatggtggaattaggcagggttttcttgcacttatctattttttttgatataataactgcagtaactataaataaaaaagttttgaagaaagcataacaatttaaaatgctattaagaaacacttttttgcatctttagcttttacatctttagcaaaatcattagaagactgagttataattccttattatcaatttccatttacccagtagatattcttggtgtatatgttagaccctgtgaaaactggtaggatttccccaaaccacagatcagctgccactggctcagaattacatttctctgcctctaagatccttctggacccatctgtacactccagctgccccagagcctcttaaagaggcagagaggaaccagagtagagtacacagagccttggattttattaggaagtgggggtgccctcagtaatcacaaatacacaaatcccagttaattagaagttcttggaggatggcccaggcatgggtattaaaaaacaaaaacaaaaacctcccagataattgtaatgtgcagcccatgtgaagaaccacggctttcatagattaatttactaaaggggtcatttgaaccatggccttggagagaggtgaaattaaaacacgatttggttgaccaaggccagtagctgcgtggccctgagccttgtgagaaaatgattatgcaaagagaatgaaaggacatgacccgtgaggtgagctgttcttgcataacaccatgaggtctgggagcggatagtgaggagccctctctggagttcacggtagaacaatctctaatcagacatttcaagctaggaaaacggtctctgagagcagcttgctgatgagatactggcatttcacaaagtacagcagaacccagtgttgatgctgatgccaggggactaaagccctcatgggcaccagtgacttccaacctttcccatgagaagatgcaggcgaacacatgtgccagatcttagcattgtcaccaatgatagagaagcagccatttgaacacttaactctgtttctgaaattcattttatgtggatttgtatggaatgtctttggtagttattctaaagatttataggggtggaagctagggcacatggaggtcttcttgtccctgtcctttttatatatcagagtaaagttgcaacttgcccttggtgccagcaagcagaggccaggagtcagcacacattccttttgtgtttgggggttttgggttttttggctgcgccgggtcttagttttggcatgtaggtcttcgttgcagcatgtggaatgtttaactggggcatgttggatctgagttccctgactggggactgaagctgggatccctgcattgagagcgcagagtcttaaccataggaccaccagggaagtcgttgggcacatgtttctttatgtgttcaactacccctgaaattcactagagtttctgacttggagctgtgcctggttcccatgcagcagcacgtgggtcacttgtgtcctctgaacaagtatgatgatcatatttataaagttaa

SEQ ID NO: 45165 - DNA, 743 bp, Bovine  19866881818458
  misc_feature (1)..(1): n is a, c, g, or t
natgccatttactttatatgtttaaatgagggttcggatggggaacaaatgtatacctgtggcagattcatttcgatatttggcaaaactaatacaatattgtaaagtttaaaaataaaataaaattttaaaaacccagaaaactaaaaaaaataaataaaataaaatgaataaatacaaatgtactgaaaattacaaaaggtctttaagcttgaaagtataaattaagaattatctgaaaataggagaatcatgcccaatttttggttcaatgttcaaaaattaatattcaagaatttgaatattaaaagtcttaaagaagaatctatattaacatgtatataacatattataacttaaaataatgaaataatgtgttaacagaccaatttaagacagtaaatgactcagaaataggcaagaacacattggatttattgaatgataaaactgacatcacaaataaagatgtttagaaaatcttacttgactgaatctaggcaaaatagtccattgtttggaagaaaaatgaactccataactcacataaaaatgagcatttaagaagtcagttgtaaaaagtaaactgtagaaaatagaagctatcccaaaagaattacttttttttttaatttggtattttaatataggaaagggacgttttcagtgacctgataggattgacattttaaaaaggttactgaggctattgtgtgaagagtgattggggaatgtaagatgga

SEQ ID NO: 45166 - DNA, 1182 bp, Bovine  19866880247263
  misc_feature (1)..(1): n is a, c, g, or t
ngagggcatggcaacccactgcagtattcttatctggagaatcccatggacagaggagcctggggcgggcaacagtccatggggtcacaaagagtctaacatgactgagcgactgagcacagcacatcccccacacacctgtacttcccatgcgtcttatcccaagtcaagcatcagtaacacatgattttattgaaaaccccatttatttaaggaaatcagaagtattttttatatcttattaaatccctaagtgtcattatgtggtgactgtaagtaaccattgatttaattttgccaccaaatagaatttagtgccctcaagttcacagcgttggatgaagtattatacagaaagtaattcacatagcatctcgatcttaaattacatcaatgacatgtattattagccatttccaaaaaaaaaaaaaaacgtgcaccatgcaagcagacagtcaagcccaccctgtaagaaaagattcatagtaatactagtaaaaacaataagagcaatactcacacggtgagcttcccaggtacaggacctattgtaaatcactttacccataatgagcccgtttaaatctctcaacagctcttagacatactctcaggacagctcattttatgggcaggaaagatttctgttgtttttctcagttgtgaaaaaataactgagtaaaagtaaacccgggctaactaccaacaccgacttaaatctaggtcaacaggtttcccaatctctaatccccagtccaaataactgttctctcaagtccaaaacacagaagtgaatctcattctcaacctaaaatgtgcagttctgggtttgtaacatcacataatgccattttcattagccatctggaaagcggggaggaaaactctttcttaaactgataaaactatactccttcggggacttgccttgtagtccagtagttaccactctgtgcgtcccctgcagggagcgcagtgcaatacctggttggggaactaagatctcacacgctgtaccgtgcagccaaaaaaataaaaattgtacggcttcaaagcatcaacttcgaagcgaggtgacccaactgctagagaggcctcccagtctcttccttgcacaatcctttcccctctcgtgactcgccactccgcgtattctcccataaagaaaaaaacaaaaccaaa

SEQ ID NO: 45167 - DNA, 1126 bp, Bovine  19866880265711
  misc_feature (1)..(1): n is a, c, g, or t
nctgtgaacttgagggcactaaattctatttggtggcaaaattaaatcaatggttacttacagtcaccacataatgacacttagggatttaataagatataaaaaatacttctgatttccttaaataaatggggttttcaataaaatcatgtgttactgatgcttgacttgggataagacgcatgggaagtacaggtgtgtggggatgtgctgtgctcagtcgctcagtcatgttagactctttgtgaccccatggactgttgcccgccccaggctcctctgtccatgggattctccagataagaatactgcagtgggttgccatgccctcctctgtgggggtacctagcactttttgtcaagggtgtctttttctaataattaaaaaaagaattttctgatgagtagtgtgacagaggagctctccttgtcagacccctttgagctccgttcctgattaggaagtcttaaataaagtctttcttgccatttgaaaaaaaagaatcttttacaatatcactcactgaggacgagttaaggggttttgctcttgggtttggtgttctgtttcatccagctttgatgtcctgtcacctatgtgacctctatagctctgaaagcagagtcttagaaggccattactaactctttgtacctccttcaccctccctcgagttctggatgagctattttgacccacccactgggagagcactcctggcactggaaggtcaggagccctgaaaagaaggcaggagatgagaaggtctcattcctcctgcattagctgtgagtcagcaaaagaaaccccctgcagggcttccagattttaaaagcaccctggtgcttaatgacaattgtgtgagtgcagagcaaatgcggaaggactctgcccctctccagccttattcctcattccatttctgtgaaaatagcaactagtcaaatgtgctgaccagtggtagcctgaatttttactcctagggctcaactgcctgccttacttttggcaatgttgagtaagttccagcttgtgtttggcatctctcctaaagggctctgtccgggcacagatttgtaaccctttcttggcatctctcctaaagggctctgtccgggcacagat

SEQ ID NO: 45168 - DNA, 1814 bp, Bovine  19866880382733
  misc_feature (1)..(1): n is a, c, g, or t
ncctagaaagttccctcatgccccttttagtaattacatccctctgccctagagacgaccgtggttgatttccatcccccttgtagcctgggtttggatttagtgggcttgcaatctgtaactgtggtcttaggtcatctggacaaatcagcaagaaaatctcatcagcagctcagatgtctccactttcttagtgctgcaaaaggtcctgcccctgagctgccagtgcttggctcctctgtccccagtgtgccatctgaccccccagggctaccctctgagccacagcccttctcccaaagaggttagcacctgtctcccaggtaagtgagtggtgaagctcttggtaatggtgacgatgcatgctttgttgattaatacagggacgtgcaatgcacagagccacggcatgtcaagcagcatgttgatttttactgaagcaccatacaaaagggagctcttccttttgtgcatttccttttagaaacaaaggattccatgaccaccttcttccaggcttctagccatcaagatggctgcagagctgaaatgattagtaagcgaggaggctgggaattgaatgtgtgtgggtgtttgtgatcccaagtcctgagcccgtggtccatgaaattgaaggatcccaaaattctattggattaaacttagcctaatgtctcgaaggtgaaaagcgctttgtctgaatgcaaagctttggtgtctctgaaatgtaccttctgcagctcagttcttaatcaccgtatattttttcacttggacaaaggctgccggctaatagcattttcaaccatcttcagctgcttcactcaactacgccaaggcctcaggctgagctggtagcagtttcctggcaccgtgatccattcccaactgaccagcattgaggaacagcacacattcacaccctgaaaaaaacgccttccccctgtaactatgcaaaatgccaggcagaggcagaatgactgctcccctccctcagtgtctcctgcaaacccatccaaactggaggatgggggtgaataggagggaggaaagagccctagatggtgcagggcgggaactcttctctctctctgggcagtgaaggtagctgggagctcccagcaagcccatagcagcacagaccttgaagcagctcatctctgaacacctctgctgtcagatttcactttgatccctgaaaattataagaacctcagctcttcagaagagaggcagctgctgagccagggtgattgcaggatttctttcccccaagccggaaggcaggcatgtagccttgcctgcgtcctgcatgagtaaccaccttccagcctcacccgcgaggtcactgcctagtgaacagattgcagttgggctgggctgcccctggaccgccctgaatgctcacgacctcctttagcagcagaactggcatttggtaaatgcacaggtgcaagagcaggcaagggaggcaaaaaatgccaaggagcaccacctggatggctagaggttgggaacattctccacgctggtcatctgcaccccacccctcacccgtgaagccccgagccctggaagcagctgggggagaggaggggaaggagggatgggctggccacaggtctttggagtcagagctgtgaggctgagctccaggacttaggcaggaagagattaattagcgcctcccagcccagccagctctacagaacagggaggtgtggagggtagggatcctcagggctaaattcacctccaacagacagacacacagtcatccagaaacagaatctctaactctctcagccacagcc

SEQ ID NO: 45169 - DNA, 2137 bp, Bovine  19866880417984
  misc_feature (1)..(1): n is a, c, g, or t
natagaggtagtttattttgaaggtagttattttccactcctacccaggccccccgtactcattcaaactgcccacccaatgcccactccctcctgctgaaaggcctgggctccagggagctttattgataggcttgtgttaccccagtcctccctgtcctagggagtgagagggtggtgagcagtggccatgtggctggagagtctgggtcacatccaagcctggtgactgtgggcaggatctcttacccctctgtgcctcaaagtcctcatctgtcaagtgggagagatggtgcctgcctttggagggttgttggaagaatcaaacaagtttatatacattcagggttagaagagttgggcatcttaccctcttaatattaatagatgttggcagtgactctgcttttctatctgcaaaatgcagacacactagctgatattttcccacactggcatcttaaggaaaatgagatagtaagtaggagaagctcgattttcttagcagaaagaagttctagaattcaatggtgttactgtcagtaactcttggaaccaatgtgccaggagagactttgagagggatttatctctgggatgctttgtccaggagctcaggttattgcatgctgctggacaggtgctgatcttgggtctttctgagaaggaacagaattgcacagatgcagaaatgctgaggtgagctgtgctgtgaccgaactctgggctcctgcttctagtcactgctgcctcctccaagggggaggcaagtgcttcctgcctgaatgggctctgccctggaaaagggcttgaacagccttcagaccaaagcgggtgagggtgggagcgggtctgtgtgcttcttgcccgtgtggcctgccgcccctttgtcagacaccttgctcatcccggccctcctgtccgcggtgggtgtgtgtatacatgttcccagcacacgctttttgtaggcagcgatctctgcttgacaagctggcattccaaactccagatcttccaaacaccagacccctatgttatttttaactgtccaaagttttttccacgaggtgtaattgatgagactcaatagcctggtcagagactctaaacttgagtttgttttgtctcccttgaacgggcctgtgtccgatgaccaggcaaaaaaacactgtttcgaaactgactggtctaaatcttcccacccgtcccatcccccacttctctttagggaacagaagtgaacaccaagataacctgggctcgcctgtttctgtggctccagataggagagaggcagatcccttccgtctgtgaccttctcctccctgctctctctctcggagtcccgatagtgagggacaaagctacgttttcagagagataacaggaagggcattgaggagttgggcatgcaatctcttctggccttctttttcagcccccacattccccgaggggtaagtcacattctcctcgtcctctggggacagtcctggacagatgctgttatttcagcgtgcccgacatcttgtgacatcgagtgaccaccatccttataacactggagaagagtctcagctctgcacacccaggacaaagtggcgccgtctcacactggcctgccatttgcatcgtgaatttcttcagcctttctgtttttcgtccacacatctctccaggctgtggtatacttggcactcaagttaatcaagtgtgcacaaggtaccagttattgtggcactgggtatacagtgataagcaaaaccgatagaaaccccatctttgtggagcttgtggtccagttggggagatagatgttgatcacaaaaatatgtaaataaaagttgaatctgtgttatgttggaaggtccaggaggatagaagagagtgtgatcgagggaactgttctggtctggtatgttgagggaaagtttctttgaagaggcagtgcttcattgcacgcagagggggacaagcatgtacaagggtcccgtggcatgttgggacaaccagggaaggccgctgtggctggagcgcaagagagaaagggaaactgcggcttaatgatagggtaagagaggtcaggagggaccagaacatgcagggccttgatggatattttaagagtgtgtacttt

SEQ ID NO: 45170 - DNA, 1095 bp, Bovine  19866880420781
  misc_feature (1)..(1): n is a, c, g, or t
ncaatagccatcctcagataaatctttgcatgggagtttgtttagacagttcattcgtggctccccttcagaacccccaagctagactctgaaattagatgaactttcataatttgctttgattatatgcatttttttaaatttcaagttcaaagtcaagctgtcactgagaatttcaggactacaagcaactacaagatttcaaatgaccatatagattggttggatacatttttattagtgtagaagcttccattttaccagtgggagcaagttgtaagtctatgaatccaatgcccaagtcaaagtaacagaacagatgaagtaaaggggtaaagaatgacagcaagagcaggttgcaagcccctcagcagaaatcaacggtaaccagctacattggctttttcccatgtgagcatgcaggaatattacaacgttggaggtttatgccatattttctaagaacagggccacatacagatcaggcagaccatctcccaagtgggtgaggtagttaccctcattctctcacaactgagcacaaacgcccaggaaagcacttacatatttaaagcaggagaaaagtggaagccctttctgtctcaggctaccagaaagggaagcataaagagtccatttgtgggtttctttgcttggtccttgcttctgttgggttggtatattagtttaatgagaggtctaattcatgaggctctgcaaaggctggattgtcaaagcagatcctcccagacacttacagcctattgcctgggtggcctcttaggtctcccaacccaagccaaggggcagtgcctacgtctctgcacctacactttcatgaaggccggagaccctgaccacgcttaggggggaattcagaatcttcacatcaactgggttaaatgttgtacctaatcagagatcttcttttaattggcacctagagcaaagaattccaccctagacatgcagtcccctcactcctaccccaggacaacagccaactccaacctcagttccctgggttctgcttccaggtgtagccaaaggaggcagttagctaagcactcccccagccatttctctgcagttaaa

SEQ ID NO: 45171 - DNA, 726 bp, Bovine  19866880435657
  misc_feature (1)..(1): n is a, c, g, or t
nccgggcaaggattttgcttctagctgaaatgaagtctgccaggttattttggtctttggaatggagtagtcggcacaaaggaataagcaataaaaccaagaactatcacatttcaccccaagaagcagttcctgagggcagagatgggtctccccatggtgtccagctcactctgactggtgagaggaggagaggggagggttcaactgtaaagcggccaagccagcagggaacaaagttcaaaatctaatgagctaaaaaaaaaaaaaaacccaaaaaaccaaatgagctgctcagcctcttccaggttttacctccccttcccatcccccatcgcttctggtacccaaggcatcactggtcaggggtacaggactggatttgatgcacttccaaagccaggactctatccatccaccaatgcttttaaagggagattgagaagggcctcatttccacctgccgccaagccctccctacacccctgttcctgaatctttcctctgcatcccatcccatcccactgtccccttctcagatctgcttctgtgctgtcccttcccaggctcccctcctcactctcccctgtgctcatctcttcactgttccatctcctccagccccttcactccagcaacagaaccagctggcctctctccagagcccccagagagcgcttgccaagttgggcatccatcagactttcaccctctgccaggagtctt

SEQ ID NO: 45172 - DNA, 1357 bp, Bovine  19866880468088
  misc_feature (1)..(1): n is a, c, g, or t
ntcttgggatgatcccacttaaataaagaccaaatctgggttagactttccagagtttctaatttggccaatattaaatactgtgagggacctccctggtggtacagtggataagaatccacctgccaatacaggggacacaggtttgatccctggtctgggaagatcccacataccttgggcaccaaagcccacgcaccacaaccactgagcccacgtgctgtagagcccgtgctccgcaacaagagaagcctctgcagtgggaggcccgcacactacaactagagagtcgcccccactcgcctcagctggagaaagcccatatgctgcaacaaagaccaacgcaggcaaaaataaattaaaaaaataaccccgtccaaggcagtgctgccaaagcagctccagttatactgcttaaggaccactgagaccaggggcgggtgacaacttcctgctacaagttgcctccagttccacaggccgcccagttggtgacccaagagaccaaaggaggtaccttttaacacagcagacaccccttatctgacacagagcagagctgtggctgtttgtttcactggaaaagttggttaggagagaatcatgaaaaagtgatacatgcataccttaaccacttcaaatgaatggagaatataccaaggaatattcattcaagagccttttgaggtaggaccaaagattctctttgattttcggtccccataatttgagtttctttcttaaataaaccacacttgaaataaaccacccagttttgacctccttaaagtacatcaagaatttaaaaaatacttttaaagcaactgtatgttgacctctttcatatttttattctttttttcatggttttttttttcaattatcttacccataccaaagttatcagcaattgtcttagctgactctcctttatcaagttgttccaaaccattcagctaggtcttcgtagaaacaactgtactctctcttttcacattaatttcatcagtgtgtgtaacatttagtgaatgtacgttattagaataacaggtatgcctgacataagcagattcgagaacaaacacaactgaccctcactcgcaaactcgaatgatgtgagaaatgtgggcatacagaggagatttctgccagaaggctccagcatattgtagtctgcatcaggaaaattttcagaccacgtgagcaggttggttaacccagcaaggagttgactagagttcctgatataattaggttgtcaaacagcagatcagtcctggtcctctctgaccttctctcctagtcatcctattactcattcataccatttgtctattgtctcccctgggtcattcta

SEQ ID NO: 45173 - DNA, 1248 bp, Bovine  19866880499446
  misc_feature (1)..(1): n is a, c, g, or t
ncaaggttttggtaatgaaagagtggtcaggagcttttcatattatccaacctcaagtcaatatttctggggatacctacaatagaggcaggaaaagtatttcactcatctaaaagaagtgcacctttataaaaagattgtgattaaatatgaggctaaaactcccaagagaaatttcattcttgaaacttaaatactgactcattctgatcctagaaatttctcctcaaaatcatgattaaggctgttccttttgaaaacaactacctataggatcaaagcacttaacagactctgtcgctttatttcccagactgaaattctctgttccttgagttattagattcagatcgaaagcactaagcaaacagtccttgaagggacaaccgtccctgcactccacaattgggagaggcgaagaaagatgcctgtaaaaagctacagaagcaataataataaactctagctccatcaaagtcctgggcaggtccaaagacccttgtaactgggctgtttcaactctagacagatgcctattaaggactctcaacctggaaagagtcaccattctacggtgcttaaaaacaactattgtacttcctttcatccttttctcaaattgcaaaaaaggagcgacaggagacagaattccttcactatggcccactgcaaagccaggcatgcagtgagttaaataatttttctctttgtcactcaaaacccaactttaaaataacttaaaaaaaaaaaagaaagaaaaataagtggagcaagaaaggggcttttgccccttctacaatcatatttctaactccccttcgcctggatacccattctaatgctccaacgaaatgtaaagccctagcttttaggtattcaactcctcccatacagaaatcaatctatccttctaatttttagataaacagggaaggcgaaaggaatgactaggagaccttatttacaccctaatcacagacgtgcccaagcagctcccgcaacgttaacaaaaatcaaaattgtcacaattgattaaaaatgtaaaaccaaccttcaaaaggctacctctccgcccaccaagacccaagcaaacagtctgcccactcggcctcccacctcggcgcctctccccagccggggatttctcacccttccttcctcccaggcaacaccacctcaacccgaggggctggagcaggatctaagacaaaagagggtccccccaaatcttccccacgccggcagagg

SEQ ID NO: 45174 - DNA, 1371 bp, Bovine  19866880512348
  misc_feature (1)..(1): n is a, c, g, or t
nctcatacttacatcctattccttgttactttcccaagctgagagtttcatcttgcattagtcaccatatgatctctatcataatggtgggggtcaatgaatagattagctttatgggaatttacagttcttccatgcatctaaaatttggtaagtctggtaaccactgacctactttttaaaatctccccctctcaacttaaatctacacaaatataatcttaaattttaatctcagctctaaagaaaaggttttcctaagattaagttaaataactgcccccagaaatacactacagtgtatgttattctgctgcccccttgaattgtttaaatctgaccttgatgtttatgttgaaatctaaaaataaaactagcttttattcatattaaagtgagatgactgcagagtagtcagtaactgagaaatctacatacaatatgccaagaactactctaatatggcactggtcttctgtttctttgtttctatctaagtataaattaaacctagacaaaaaagcatttaaaatcatattctactgtaaggttgattttttttgtctgtttgctttggattctgtaaaaagtctagattggtatcaagtgaaaaaacaagaatactaccttgtgtgtgtctctgaatttgctgatctctcgcgatatcaggtctctcttgtcttcttccatttctatagcatttatatcctcctaaaaaacaggggggacaggtaggaatacataaagatcaatctatattgatagaaattaaaggctagatattctatacaggctttacaaaacataggagtaaagactttatatagtaacgaatctaagttaaatagtaaagaacacaagaatcacacatctggcaagtagcagtaaacatttttttaaatttattcattttagttggaggctaattactttacagatgtaaacgaaccttagtgatgagtggataagggatcagtggggccacgggaaatcggcggaagatctgcggaaaaatccacaaagattaaaacaaacagttcatatgactctgaataacagttttctgtatgtttacactataagcaatgtcagatttctgtaacactttcttgattttaaattacttgataacaaaagagatttcactcaatctatcacctaccacttctactccttccaagacccccaaccaggggaataaagaggatctcacactagcagtgtgagacctttttcatcctttccaagagagagggaacaatcaaaacaacaaagtttacctaataattcttgccacagagcagaatttttgactctctcacctcaaaccatttcaaatggaaggtgtctaggtactttctcctttgccat

SEQ ID NO: 45175 - DNA, 3139 bp, Bovine  19866880554433
  misc_feature (1)..(1): n is a, c, g, or t
ncagcttttcaggccatgagccaccccatctgcaataaccctttctgtgctgctgctgcaaaggtaaacaattacaggtaaaattctaatgaagtttatctgcactgtgcctgtgatattacatatactaaagtaaaaccatatttttattattcagcccacgctgctacattcactcattttcttttttttaaatttcttcattcatttttgactgctggggctccgttgctgtgtgagctttctctagctggggtgagcaggggctgctctctagctggggtgcacgagcttctcattgcggtggttttccttgttgcagagcgtgggctcaagagcacaggttcagtagttgcagcacacgggcttagttgccctgcgacatgtgggttcttcctggatcagggattgaacctgtgtctcctgcattggcaggtggattctcctccactgagccaccagggaagctctactcattttcaaaaccagtaaaatggagttggatcttaaaaagagggcattagattgtagaaaaggcatctgatcaaattcactcctaaagccttttggggaaaactaagctgttgtttttcaatttatccaacgtagcttgcttgctttctttcagtgtcagaataattctttttttattcgataaagtgtttttctgcatttctatcttgcttttacctcagaatactagcatcacaatcttattttggtgagggtgcttatgagagctgtgaagaaactgtgagaatggtttgagcaccttcccttttgtgatctggttaaatttgatctttaaattggaatttgtaaatcagaaaatatagcacatagagtcatgtgcttcttaaaacaaaactcaataagaaagttaagtagataaggttttctcaataatcaataattttagaagaacatagaatattcagctaacattgtaagaagtctaaatacctttgtagaagtgtgagcctttcagtctttattgttcactgtttactcaggttctctctccattgatttggttagaatcaatcttaatttttcccctattgatctgggatttatcagtgtttgtcattttttttttcttttccttctcaacccagggatcgaacccacattacatgttggattctttaccagctgagccaccagggaagcccaagatgtcgtttttaaattcactaattttcatcacaaaatatttgtgactttcttgcattcagcctttaatctgactagaaggagaaaagtttagttacttggcaaaagttaaaacaatttatttagatgtcttagcatttatcgctctctcgcatgggtgcacacacacacagcacatatgcacagcctctgccgttgtcttacctcctgatttctttatctcctatcaaaagagagaaattttttttcaacataaggcagctgtgaagggcatttttcccaccagaaaggagtttaaccaactgttttactaaattaatctttagatttcctcctttccagtagttgccactatttcataaaattttcctacagtatgaaattgtgtctattttgttactctcaggataccattcttataaatctatacatataaatatagcatgtcatttttaaaagatgttattgttatataagcagaagtaagtttatttcatcactcatatatataaaaggcaaaatacaagtaaataatctgttttggtatttagctccagacttcttaaagttcaaacaattgtatgtgaaaatgaaagtcgctcagttgtgtccgactggtttgcgacccccatggactgtacagtccatggaattctccaggccagaatactggagtgggtagcctttcccttctccaggggatctttcccaacttaaggatcaaaccccagatctcccacatttcaggcggattctttaccagctgagccacaggggaagcctgagaatactggagggggtagcctttcccttctctagcagatcttcctgacccaggaatcgaactggggtctcctgcggtggtaatcacagtagctgtgtaataggaatcttttagcccttgccagttataactagcattccccacattgctgtgtggcctgcatgatggccacgtgctgtgtcaccatgaggctcatctgagcagtcctctgggtggacgttaggactctcccacacccagttgagtgaagtcagacttgctggccgtgcccctcactgccgtttttgcctctgagttgtgagactagatatctgttagttttgcccggtgatggctacaccacataggggcaagtcaggtcactccacattccctcatggacaggggccctcacctggtgggaatgcacagagaacgtggggactgggcagttggtcttaggcagcccacctggctcagcctgggcagtcacccacagtccacctcccctctccaggcggataccaacagtgaccggctcttcactgtgaacgatgtcaaagtcgggggctcaaagtacggcatcatcagcctgcacggcctgaagacccccacattcagggtgcacatgcacgaaaacctctatttcaccaaccggaaggtatgctgccctgcgctatagccttggcagccgctttgcctttggatccagggcactgtggtagttggtcacactcagaggagaggagagcttggtgaaggaggcagggctccattacctcattttcacaagggaaaacgttgtgttttagctcctgggaggtgcgccacggtgggcagagggtcctcccactgcatcatcctgtgttccatctcccagccagtctagccagcactgaaatttacataaatgtaaagagccttgcttgctgactagcgggcagcctttacattgatttggggtgatggcatctgtaagaagctgtgatttcctcttcggttgagacctgggccacaagacagacacagcttgaaaatggtttctgggttaagtgagatccgttgcagagaatccatcccctccctggacgggataccagatgcctcattatgaggcccccatgctgatgatgaaggaccccagcccaggagttgcttcctacccttgccctcaaggttctacgcaggggcagggagctt

SEQ ID NO: 45176 - DNA, 1153 bp, Bovine  19866880607853
  misc_feature (1)..(1): n is a, c, g, or t
ntgattcatgtaagtcctcctgatgcttgtcaaggtctgattcattactgactgccgggctcttcggtgaggttgtgagagaaatacgatgcttgtgttaccagcatttgagaggatgggtggccagcatctgaagaggtgaggctggttggtcttggagttctctttctgatgtcataagaagttactgttgccttggcaaacgtaagccaacagttgtctagggccggtgacaatggaggttctatggggatttgtctcatggtgatcaggctgcagattgtttcatgctaagccttgagatatttagaaatgtcctcatttttctgaagatcttccagagaagtgaatcaggccacttgagtttggaacagaaaaaaccttatgctgtcactattattgggctgcaattttacatttactggggagtgccatgccttctgagttcaacccagctgttggattcatgctaaatttgatatttttcctaagaaaaagtattacttaggttatcctttcagttacctatttaaaagagaaaccgagggctaaaaatgctcttctttgggtttcattatacatctttagtagcttctgcgttccttttttagctctcttttttttctttcttattttaacactgcatttggtacttaagcatctttttgcagctaaatattcacccacaaatgcaaccagccatgaagaccagggagctgtcatggaaaggagagaagctcttatatcccttctgttagctggatcagttggtgagggtatctgaaggataaaattaaagaattctcagcataaaaaataaaaatattaatcgtggcagctcacggtttctgagctctcaatctttgccaagtgctctatggagtaacttcatttgatctcacagtgtaatccatggagacccctgctccaatagccacccccattttacagataaggaaattgaggcacttgaagagctaccaactacaggctgaaataattttttgtggggggtcctcacatttatgcaaattttccatttggtttcatgctatacccaagtttattttttaagtaaaaataacttcctgggacttccctggtggtccagtggttaagattctgtgctttcactgcaaggggcagggttcaa

SEQ ID NO: 45177 - DNA, 961 bp, Bovine  19866880623299
  misc_feature (1)..(1): n is a, c, g, or t
ncccgcccccccgcctcccccaccgccccggctcacaccgcctttcccgcttgcttcccatgcattatgaaaaataatagggggcaggagaccgggcgaggttattaccaactcataaatcaactgggaagctctgagggttgtggtgaggtgtctgagctgggctccccccggtttgttatctcacccggggcccccaccattgattcataacctcataaccctccgcgtccgaatcccaagtcttctatctaattgtcacccgccgagtacatgatttgcaagaggatgcgggcggtggcagaagtgggggtggaggagagattagttttgtcaatcaaaagcgtccagggcagggaggtgcacacccgggatttagctcaacgatcagcttattaaaggggaggctggctgtgctacacatattatacatttcgcacagggagacggaggatctcggcctctgtgggggggcgggtagcccctgctctctgagggtggctgccgcccaggcccgccttccgccccatccgaaggcagaaatgaaaaacagacaagcatatttgcagctttgagggagaagtgagctcatgccaggtgtccactagccacattggagagagcgtgacaaacgttctgaggactgtggctcctttccaggagggctggaggggtcccaaggctggacggtgtcagggcaggtgctgtctactggtcacctcatctgtgcgcctttgaacctgaaatgtggtctgaggatattgaaattaatctaagaggctcaggctttctggaagggagtaggagaagcagtctttgtgacgcccaggtgtgcaggctgcaatcactttacctggaatctgatccatctgactgcactgtttggggataatgctgacacgcttccacggcactgatctaagacttacgtctgcaaagtgctgctgacacctgccatcac

SEQ ID NO: 45178 - DNA, 1205 bp, Bovine  19866880689756
  misc_feature (1)..(1): n is a, c, g, or t
ncggacgcgactgaacaacaacagaataatttataaattcttcaatattctcaaacactaaatagtttttttctctaggttttgaaaaacacaaacagcatcaaatatttccacaaaatgttttcaatttaagctagaaatataataaggaaagtgggtagttacatagtaagactaagcttatttctgctgccaagtttggtgactctagctttgttagacttttaggtaaccaccagcttttaaaaggtacaggcgatgttaaaagattcaccattctttaaggacaggaaggtaccagaagaagattcattaatatttaatttagctcccagaaaagctcctgttaaacatggagtttgccttctttttataaaagacctcagatgttaatgaaaaaagatgacgtgcaaaatgcatcaagacagttattagattagagaataaaactaatttaaaaaacaattatgattcttttacctgctaaaacaagaacatatattaaaacaaatatatcaaatagtgaataaaaaaccaacatattagaaactggtagtataatgaaactagtctaaaaccaagacagagtgcgaaagacatttacagagacaatgggaagaaaagacattttaaaaggtcctcttgcaccagtatcaagcaagataaccaaaggcccaaaacgctttttataaaattggtactcctcactctgcaactatgtcatcaaggcactgaaaatgggcaacagtcctttctttcatttatcttatacaatctacacccctaagtggctaagtaaattatgccacaaagtaaatgaattgaaaacactgtacctaactttatgaatataatgtaaaaaaaaattaaacatatctagtctctgagaagtatttgtttaattatatcttttcctttgagaatataaagtatgttgataacttctaattgaagttaaagtaatcataaattttaacaaatcacttggaaggaaaataaaaaaactgtacttgcaaattatcctgctacttcaatcccccacaaatttaaaaaacactagaacattacatttttagttcaacaatgatttgagtgataggtttaagatgtttgttttcctatttaactggtacatttgagctacataattctttatattttaaaactttttggcattcaaacttgttccagatatgctatttctt

SEQ ID NO: 45179 - DNA, 1167 bp, Bovine  19866880733604
  misc_feature (1)..(1): n is a, c, g, or t
ngtgtttggggacttccctggtggtccagtggttaaggctctgagcttccacttgcagtgggtatgggttccatccgggtgtgggaactaagttcccgcatggtgtttgatgtggctaaaaaaaaaaagctaaaattgatgttttaccctagtgttatattaagtgtgaccgcaaatttaattgcaagttcaaatgttattgtctttcttcactttaggtcttagtacccacagtgtccatggttggaaagcatttgggagcaagaaaggatcatccaggcttgaaggctaaagagaatgatgaaaactgtggccccaccactacagtttttgttggcaacatttctgagaaagcctcagacatgcttataagacagctccttgctgtaagttaaactgtttatttttcattaaaaaacttttttgttgttaatttcaggcttaagaaaaatcagagaagactgaattattgtctcgcttatattttgaaaagtttcaatcctgcaaaaaagttgaatagtgaacacctttgcaacacattttgccacatttgttttctttctctctctccacacacacgcctctcagtttttttctgaatagtttgggaataagttgtggctttacatttcacctctgaatacttcttatatctcctatgaccaagatacttgcctgcatttttcacacttaggaaatttaaggctgattcagtattgttaattaaaatacatacagctcatatttttaccaacagtttctataataggtgttttttgtttttggtctataatccaatcagggatgtatatacattgcattaattgtcatggttctttagatagcttctttattataagttccctgcctctttttgtttaacttgtttttgtttttcgtgatattgatgttttgaagtgtctgggtcttttgcagaatgtctcacccgatttgaatgcattttttagaatggccatgtgtgatgactattctcaggtgcagcataggaagaaacaccatgtctcttggttccatttttgatggtattaagttatttgttaaggtgatctgatctctccattttaggatatcttttctccctttgtcattaatgagtaacctctgggttaatattttgagactgtgtgagttcttttctttagaagc

SEQ ID NO: 45180 - DNA, 1242 bp, Bovine  19866880762568
  misc_feature (1)..(1): n is a, c, g, or t
nggcctcaaggatgtcctggaagttagcaaactttctggctggaagatctcagagaaaatcctaacccagactcacggaggacttgatgacctcgccttgcgcacggccatttcctgacatctcagtagcatccctcccgacaccccactggccccgggagctggtctggactgtgtccccagttgaggcccccagttgttccctgcacgggggcttggctctttgaaagcaatgatcaggcatcgcccaactgttcccaagggcctggctcccagctcggtggctcccactccagcccagaagcaagatgaatgactcttctagaagcaaacacccctctccccttgctgctctgaggaggcagccccatctctcttgggcttctgtttcttgtctctcccactgactccctgcatacagctctggctgcttctctcttcctgtttttttttttttttcctccgccctgttttgcttttgttttggttcattagctgcggctgctgctgtttagaatccatgtgttatctgaagaattttttttttttctgtatttttctccctatcttttttttccctaaagccagaaagtgagcaaggtcgtagaacttccttagaaaagttcactcgcagtgtggtaagttcagctggttttctttggttttttggctttctttccgtttttctcggtggtggttgtcgtttccttcgggaggagagggagcccagtgctcttccctcagcacacccacccatggtcttctgtgagtgtcggtggcttctgtcctagggaccagtttgcaaaagacaaaaggcccagcagctccccctgcagacgggtgcacggccctcccccgcctcacccagcccctggcccaacatttgctctcctgtgcaagggggcttcgagaaggaaggaccacccctgccccacccttggggctgctcggtggatgcaccttctgcagcagcccagggagaaggccatctagctggaccatgaaataaattggctcagaactgtagctcataaaaaaaaaaaatccaaatttccctctgggactctggcagccacgcgggtgcgggaggctagctgctgctgctgtgccggtggcttttgtgtgtgcaggaggcggccgtgctgcatgggttctggcggtgaggtccagctggcgtgtgtgcgtgtgcgtgtatgtgtgtgttggtggcctctgcatgagttcccatgtccctgacagccc

SEQ ID NO: 45181 - DNA, 1245 bp, Bovine  19866880777112
  misc_feature (1)..(1): n is a, c, g, or t
ntcaacggggcatgaccggggaccagcgctgggtccagctccgagtgctgggtgaggcgcagcctgagtgggcgggtgcgtgtggccagtggcctctggggtcaggaggggcaccgcggggcatgccgtggctgacagtgccccctccttgggcccaggggagctgactatcacagggctgccctccacaatggaggtgccggaaggggacacggccaggctgctgtgtgtggtggcaggagaaagcgtgaacatccgatggtccaggtgaggctctgtccctggccctcaggccctcaccctgagctccacagcccaaaccagggccggggggcccacctttgtgcagaacgttgctgccacctgcacccctccccctcacgtctgctcccggctcctggcctggtgccaggggaaggggctacagcgcccgcctcccttaatggggaagccccaccaggaccactctcttctctgctggtcgggctacacaccagagcttctcaggctcggcactgtcgacgttttgggctgatggttttagttgtcggggtgcattgggggatgtttagccgtgtccagcctcggggtgcctgtagtactccctcccacgtcatggccacagaaagtctccaggtgttgccagatgtcccctgggtggcggatgctctgctaggctgagaaacactgggctccactcagctctgggggctttgggtggtcttttaccccaagtctgctgggcttttattcattcagcaaacagtttgatgcccccttcctccttgcagtatgtcaggacgacgctaggcactggggatcctggtgtaatctgagcccccccaacactccaggtgggaaatagcccagtatcccccaggctcggaggaggtttgccctgagtgtgtctgggtcagtgggtggctctggagggagccttagacggcctcctccccggccctgggagaaccagctcagcacccgccagggccttggaggttctcccagcatcctttcccctccaggaacgggctgccgggtgcgggccgacggccaccgtgtgcaccagtccccggacggcacgctgctgatccacaacctgcgggccagggacgagggctcctacacgtgcagcgcctaccgtggaagccaggccgtcagccgcagcactgaggtgaaggtggtcccaccgggtaaggaagggccaccccaggcagctgcttgtcttcgggagctggccgtgtg

SEQ ID NO: 45182 - DNA, 1389 bp, Bovine  19866880832540
  misc_feature (1)..(1): n is a, c, g, or t
ntgtgcaagataccaccgcaagtaggggactaaaacatcatggaggtgggagcagaatacggcagggcagcctggcctgatgggaggctggagggatgcctagggacattggtcttgagagcagtgggaaaacacactggaggttttaaataggcatgacgtgatcagatacgaattttgagaaggtcactcagggctcaatcagagaaacagaagctctagaacataggactctgtgtttgaatatcactgaagtataaatatgaatatatgtgggttttttttttcttggccgcaccacatggcttgtgggatgttagttccctgaccagggattgaatctgtgccctcagcagtgaaagctcagagtcctacccgttggaccacgagggagttccctgaacatatgtatttgctacaggggtttgatgtgacccaattgtggttgctagttgagcagtctctgtaaggctattgccttcccatctagtcacctgatgttggatctcggagtctgcaggatgggcattcaggagggaagatggatgtaagatggagagagaggaatcactggggtcccccacacactggaacccataagactggaaacatgttagttctcgtcacctcccttaatgacacagtagtcctgctggccgatgctcccatcatcagagagatgatcacttggaccaggagtcagaggagctaaaggaaaatctaggggaatgtgggagttgcaagcctggctgctgtcccccctcctcaatgatgtgcacccccagataagggccaacgtgtatgtcctgccgctgcccttccactctcagcacagggagtccccaccctagctggaaaaactggaggaaagtagcctggaaggtggttcagcctcactaagatgacagagctgcccaggcagcctggctgcagtgtagagactgtgtgcaaaccttctgccttcccctctggcagctcccaccctgcctcctgggtcaagtgtgcactttgaggggacataccttctccatctgcatgccagttggttggggggaaattcagaattcccaggtgagctgccaacaggcagagattggaaagaagcagctaataacattacaagtccatttggcagcaatgcacactccctccatcacaacgagagcaagtggaggggaagagactctcctaatggcccaatcaaataaggagtggcagcttctcagaaacagagacacagactagagaaaaaaatgtatggacaccaaaggggaaaggggtgggggggtggacatgaactgggagtcatgctatgtatatatactatgtatgggtatatattgacatacatactatatataagatagataactaatgggaactactgta

SEQ ID NO: 45183 - DNA, 754 bp, Bovine  19866880839518
  misc_feature (1)..(1): n is a, c, g, or t
ngcacctggccaggagcctgccctgggtagggagatgggagccggaggagggggcgaagccctctctgaatgcttcagctgtcttggggctcagtctgattctgcacgacagataattccagagtgagattgctgacgtgataaaaggatagcagatggttctaatactttattttcagaatgtatgtttcccaacattctattttcttgcaactccttcaccccagacttcagaggagaaactgctagttcctctcacccacccccaacctcgccttgagggtttattccctttgtggatccgcagtgtggacgatggctgatagcggctgaggcttactgcgagccctgcactgctttccatgtattctctcacatagcctcccagctgtgtggtaggtgggctgccgtgatcgtcctgttttcccgagaggatgctaaggcacagagagattcagccactcgcccaagatcacacagtcaatcagcagcagagcttggatttgaacccaggcagttcagatcagcttacccatattccaagacagatcctgtctctctgaaggaagggttgccctagaagcagggccagagctgtcgctggcactaaaatgcccactgttgaatgactaaccactctggccaggtttcctattaatagttacctcagaggggaactttactcctgactagagctggctgggtcctgcattcactgtggcagctcttacatgaccagggtggctgtttggaa

SEQ ID NO: 45184 - DNA, 2418 bp, Bovine  19866880852955
  misc_feature (1)..(1): n is a, c, g, or t
ncagactaattgtttagagatttaagttctagactcaacccttcaaatacctgcaagactttgctaattttcttaatcaccatttctacctctgtaaagtgatattaaaaagaaaacgacctttccctgtcattccctcactgggttgttgtagcaaacaagatagagtgtcaagtctcctgagtgctttccgctatcgataattctacttcttaacagagttttacttattgacagtttcaagtgcttttataaatatatccttctatgaggtctatttaccctttatctatctgccttctcacattccgctgtctggtcaccatattttcaacaacaacaaaaacaaggtcggaaacagttaaagttatccttgatggcgaggagaaaactgttgctcaatccaagaggtggtatttctggcactgaggattccatgtgactaaggtcggacccaacatcagcctgacttactctctgggaccaaagtcccaacggagaactctgggtcctctctaggctgcaccaggggctgccagctgctaaggatacagcctggtcctgctcctcttccagcagcttctgcccaggatggaaccaaaatctccatattcctaagaatgactcttccaacagcctcagttcctgccttgggccacgtcatgggatcagcctagccaagttctgagcccaaatcaagcactgctgaaaccagtctcagcaactcctcctacaacagcaggaccaggttggaagattacagagtgctctgagcactttgggaccctcttggattactgccctcttccaaactccaaaacctttggaagtcataattctgaggtgagtaccaggtttccttgggcttcccaggtggcgcagtggtaaagaatctgcctgccaatgcaggatatgtgggttggatccctggtctgggaagatcccctggagaaggaaatggcaacccactccagtattctttggaaaatccaatggacagaggagcctggcgggctacagtccatggggtctcaaaaagtcagacacaaatgagcacacatgcacacacacacacacacacacacacacacacagacatatcaggtttccttagagccaagagtctcagagcagaggggaggcagagcaggagagccgctgcccacgaagcccagggctaccctcatcctgtgcctgatgagggcaggacagaggggaggggtggctgctactgaaaccagggggctagagctgaaggggctagcagctctggtcctgctcagtgtcctgagtcttgcttacagtaagggcccagtctgtgcatcagcccatcctccctgtctatggtggccatgggttatctgttgaactgccatgccacctccttccagtaacaacacctcaattttcctccagtgaaccagctctccccaccatcaattgagtaaaatcaactcatttccatccctcagctttagggagagggttgtgacccagccctggccaatgagaaaaccacctccccaagccttagtggttgcatcaaaggtaaatgaacatgtggtgcgaggcaggcaaattcgaatcggtcttggaatttctgagggaatgaggcactttctcttggtatgaaaaaaaagctaataaaaatgtgtatctgatgctgctgggagactccacgaagcaggcctctctgcaaaggaagtcagtgtagaagaaagcagaattaagagagaaaggagaggtggagggaatccagatgaccttgttgagcccctagattcagtcccaagtgaagcagatatactcctgaactttaggtacacgagcccatacattcctctttatgcttaagcagtttgagttgagtttcttgccgtttgtagcatttaaaagccctgactagtgcacagtccagggtttggttttaccgaaagaccctgcacaaggctgaggaagaagcctggggccccatccaaacagatctaggcgggcaacctaagtgcttgtgagatgaggatggttcactggagccatcagtgttgccatacatcaaacctgagaggaggtcagagtcagggaatgctgtatacggcagctcagtaaactgcactctccagcttaccacagtccccaccactgccttctgtatctaacaagcccattttcctctttgtactttacctttctggtcccataagtttaccatccatcactggatgggtgggcagatggatgcatggacagatgaatggatggatcagttaatcaatcaatggatcaattaatggatggatgagtggatggggccgacaggcaagtggctgcatgtgtaagtcacttcagtcatgtccacctctgtgcaagcctatgcaccgtagcccaccatgcttctctgtccacgggattctccaggca

SEQ ID NO: 45185 - DNA, 1062 bp, Bovine  19866880871551
  misc_feature (1)..(1): n is a, c, g, or t
ntgtctggcctacactgaagcagctggtcattaaaacttacatctttggatggacaacgtgaaatgctctttattaatgagcacacatcttttgccttagaagaaacactgttcttactggacaatgaatcactgaaatttactgagcaaaatcttttgagaaagtgtttatagcatacagatcaacactggcaaccatcaaatacatacagctttcagtctttttacagcatcttcacagatgtgcattcctcttgattcatcaacttctacatgcccaaggtactgtagaaagaagataagagttagggatattgctgtgtttactaagtagctactatatggtaggtattatgtggtagaaaattgaatactaaaattccactcaagaaactcatagcattacacaacagttaagataatgtgactttacttattctcgtgtcctcatatgaatgagatttagaataaaggtctcaaagagttgttaaaggggagtaggtgaaaaagaacatgataaggaaaggtaaatgtcaggtaaacattcaggtaaatgttacctgaatctagtgaatctgaggcataaaagcttgtgctagacactgtttatctctagacataaaaaataatcctaaaacaaagcatgtgtgtgtgtatatactgaaaaggtacaaaggaaaacaacagctattcaaggcctgaagagatcacatactctttttatgggaagcacataataagagggctgaaaactaaaagtttaagacagtacatttgagctttaaaatatgtatagaacttgaagaagccatatgggaaaggctggaaaactattttaggcagggagaattaaacaaaagctataggtgtggaatagaataataattacatcagcaagtattcctcatctggcaagaatatgaggtatatgcagctatgaaacttgaatactgaaatgagtctgtactgaaccccagagacaatggagagctaaaaagcgcctttttttgcaaggcagtattattattcaaattatatcttagtatgggaatagtcttgggt

SEQ ID NO: 45186 - DNA, 1499 bp, Bovine  19866880872573
  misc_feature (1)..(1): n is a, c, g, or t
ncatctgcttgattttatgaagaaaagtattccacattcagatttgatttgagttttagagcagaataacattatactaatgctgcagatttttatcatttctattgctcccctgtgatgtgttatggttggatggcatcaccaacgcaatggacatgagtttgagcaaactctaggagacagtgaaggacagggaagcctggcgtgctgtagtccatggggttgcaaagagtcggacatgactgagcgactgaacaactcatgcgttatgagccatatggtaacccggcaaattcacttgagttgctgaaactgcttcttttcaggaaggttcttgaaaggcttagaactgctacctgaaatggaagttttagggattcccctccccaaagcatctccttttttcaggaacagaaaatcctaattaccacatcccctgcaaaaggagtacatccatccccaccaccttacactttttattgaatgcaatttagagcttagggagcttttgagtgaaaatcagacatcagtgagatttccgattttccacaatctgctcactggacgattcctcttataactccagttacagctgctcctcttcagaatgtgacaaagcctggcgggtggagactcaaaagtccttccagctagtcctgactttgggttgtaaacaatcgcagtgcaaggtgcttccggaaggcagagagacagaggccttcccatccagtcccagcaactttctaaagaaggacctccaagtcttagagggagttgaattgaaacagttttggctcgccctcccttccttgactgccagaacaacaagctagaagcaacatcctatagaataacagcaaaaatagcacttcacacatggctccctcacaaaagcactcccgaattctgcaccaccaggcagttattattttactttacagatgggaaaattaagacctagagagttgacacagtagagttggaggtcagacccaagcctgcagtttgcacttctaagagcagaggggtcctattctgaggggacttttaaggatgatgtgacactattggagctcatgaccatgtcttttgatggatgactttcacatcctgggcttgggcaatttgtctggttagaaaatcatcttcggtgaggacatgtgtacaaggagtttattgctattttgtatgtaatggccaagaattaaaactcagtgaatacctgtcagtaggggaaatggtctgatagcaatggtaccttcatcctgtgggtcattacagaaccattaaaaggatttgagcaacatatgacagaataaacaagagggagaagagcatatatctctcccaaaacccctatttatgtatgtctgtgtgtgtaaaattacttacatggtatgaggaaaaacatggaaggacacagactaaaatattaacatgggccgcatggggaaagcagggtcagagttggggtgctgatgtggaagacagaatacagg

SEQ ID NO: 45187 - DNA, 2320 bp, Bovine  19866880890338
  misc_feature (1)..(1): n is a, c, g, or t
nacaaccattttgacataaaaccttccagcagtttttgggtagaaagtggaaacattcatagaacttatatgaaagagctgggtaaggaaacttcatatatacattgtatagctgcttgcatttatctaaatttaaattttcttcatattagagaaaaaaatgataatagcatttagtccaatttgactcgagttcagtattttctcaatttgtccaccatatctactattcattcctgattagtacctgaaactgcactctccacaaaataatcatcagcctctactatcacagatcaggaagtgctctgataagattcaaaaatgagtaacaacataatcttctctaagatgttctaaggctggctgggaataaagtctcgaatattggagctattcttgggcatccttttggaagattacttttatgttcttaatataaatgatacctatcatttatcatttgcctcaaaaagtgttttttaagatatacttaaaaagaaaataaaaaaagaaaaaaaaattaagctgcatttatgcagtctgttaggacaaaataccagtactgacactgaactgccaatcaagtagtccttatatcacttagcactggcaccatgtgggagctggtcagaaaggcaaagtctcagggccaccctagcccctgctaagtctgcattttaacaagatccccctggtgattcaggcgcatgttaaagtttgggaaaaccactttcttctttcttcctgttgacagatggacacatttaaaattattttatttacagggtcaaatgcagaaaaagcatatttgtttcctagctgccacatcagaatggctgtcaagactttcatgtaattttataacaacttgaaggggcaatatatagattaactaagggttccaatttgaaattaatctatggacaaatggtaaagacaacccagaaagttcaagcgatttagtaaacattttgttaagagtaatattactgacactagaatgtgccagcttattctcatgcttatacatggtcggttctttacatacaaacctgaaaaattctgaagatcctgaagtttaagctttgtggcaaaatctgacttgaactgacattaaacaattaatgtagcagtctttaactcaatgatcagtcagatcagatcatttgctgcagaaatgttaatatataaatctgggatcctgacacccatctcactggaggtattatgcagtatatggtatgtgccctcaagagcttcacatgagggcccttttaaggtaaatatgattgaaagagcagaagagaccaaagcggggaaaattaaatctacctgaataaacttccatgctaatgctggctaaataaaaccaacctaatatgatgtctcagaagcaataatatgtaagagaagatagagaggcataataaactgctcgaacaaggagttacactgggggattaatctgagaaaagactggcaaattaatttgtaaatggcaaggaacatgtttctacaactttcccttcagaaactacaacttaaaatataacactgaaaggggctatatctccatagatgtctagattaatccaaaataagggaaatggcctcttctcatcttcaggtactaatacttaaaaatccagtccatcaaaaattcagcccatattttcaagttaagtttctactatgcaccgcataattacaacatgatgccatttatttaacaagactctgaaagaatgagtccccaagatcaaatatatacatttttaatatttgatatatttacataatggaaccatgcacatcatggttcaatgttaagaacagtgttttcaaatgtcctcttaagatgtaaaaaaaaaatcttgtaattcaagttcaattatgctttttatgttttgttttttaacacaccccctcagtctttttaaaaaataaatactcagacatgggaatagctgcacctaatttctgttaagaactgtttaaaacttggtacatttttgggtaattttgctccctggtgaagtcctgatctataataaagaaagcctcatgtatatctctaaggacacgatcagtacagttttgaacgttgatgagcagagaagtaaacaaggtgtgtgcctgcatatacacacacaagatataaacccctgacagacacacatgagtggtaactgctttaaacgacttactttatcctcagaaatcagatgtaaactttgtaaattgccatgctaaattgctacagtattttgtcaaatgttttctagcctgtgaaaattgcctaattttatcttttgat

SEQ ID NO: 45188 - DNA, 1064 bp, Bovine  19866880893911
  misc_feature (1)..(1): n is a, c, g, or t
ntttccattttcatgcgttgaagaaggaaatggcaacccactccagtgttcttgcctggagaatcccagggacgggagagcctggtgggctgccatctatggggtcccacagagtcggacacgactgaagtgactcagcagcagcagcagtaggtctactgacccccacaccgttcttctgttctgatttaaatcctctgaaatatttaatactcatttcttgatttccaacccccatattcactgagtcaccaaggggctttgtagtctaccacagcatcctgtgagtctgtccgctccctccctcctcactgccagggccctaccctggtttgaggcatcacgacatctttctttggtgtctagctctgacctttctttttccttcacaccggctctagtcctccatactctgcacgcccaagtcatgggggtccactcgctgctccctgaacaggtcagccaccctcttcttcatctcttctcagacagaatcagttgcttcttgcaatgtgtgtgctttttgtacttgtgcgcttggctttgtgtgccacttggttagttccatgtctgtacctcccaccagaaggtgtggtcttcgaggacagaaccacttctcctcaactctgtaaggctggcagccagccccacacctgccacacggccaatcacaataaatatttatagacgcaaatttcccaggacgtgccttccatcagaactggctccctgggtcgtttatcaggtcagccaccaaatcctgcctcattcccacctacattctttgggggcagatgcatgcctgccttctgccagttactccttcctctgtggggacaactggctggccattcctcttctgccaagcctgaggctgggctgtggagggggcgggagggggcaggagggaccggggattgcacagaacgctgtgtgagtgaactggcagaagttctgtgggctcaccagctggtaccgtgtgggagagagccaaaaggaaagttcatttttttcctgcccaaagctcggagtcctgagtgcagtcacgagtctcagtgctcaag

SEQ ID NO: 45189 - DNA, 2839 bp, Bovine  19866880933064
  misc_feature (1)..(1): n is a, c, g, or t
naaaaagttgtatgagttgtaagtaatcttgccaaaggtaaaagggttagctgtaagaaaatgtacataagattgatttatcattgatgcctattgaagtaaaagagaggaagggcctggaagttgcaggtgggatccctagctcacttggtatcatttactgtaagtagcacactgcaacaacaatcacgcttatgaccagtaccgtcagctaggtagtagttttaaataaagagcaagcagtattgtcctggttttacacctgtaatgaaaaattctaatgtcattattttaatgggttcaatctaaatagagaatgtcttttcttttctatactgctgcagtttccttatgttaatcctttaacactaaggtgacaatgatgtaatcatatccatgagacgggaacgcaggttaccgtgttggtttgtcatgtaggtcttggtgggttttgttttgtccttttaagttttgttccgagttttgtggggatggagggcccagtcttgttaggactgcgtgtgtgtgttatgtgtgcgtgcgtgcgtgcgtgcatccctccctcttgtggtgagccgaacatcctgttttcagttgtagccacttgacctctggtaaccacgtaagatcccatctcatttttactttcgaatgttggccttacaatcagatgtaagttatatatatatttgtactgatgagaatttacaatctgctttaacaaaaataaatgttcgtggtagaagcttttgccatgaagagctgttctttgcgcttttctctattagcgaatgagttttagttccttgtcttgtcctctctgcattctactactgccgcagatctctagtttgatggctagaaaaatctttcactggggctagtattctcttaaagttcctatctgtattcatactcgagcctccggtcattcctaagcacatctctgatgtcagattcttgctgctccaagtgcagacttgaatttggcagttgtgtagagacacagaacttctgccctagcccagacctagttgtcagaatttgcattttaacaagactcacattctgagaatttgggctgcagcagtgactctgaactgtggatatatatgagagtcatctgggagcttttaaaaatcctcatatccagcccatactccagaccaattaaaatctccgggcagtagacccccatcttcatttcttgaaaaagctcccagtgtgagaaccactggtctagactgagttttactctcaccataccccaccactctgtgactggttccaagagctagctaaggtctggagtatgccaccaatttaacaaatagtgatttaactagagaacagtggagtccaagaaagtagtccttaccttccaatttctatagccaaaccagccatggtacacgggaaggggatgcacctcaatggtttttaaaactggaaagaaaaaaagacctctgtcctggcccatgtttctgttgctgaatgagaggtagaccaagaagtatcactcaaccatgaagcaattgtttcttttccagctagagtgttggtaatagaaatcacctgtcccggtaatgctggtttttcctgtgccccagaaagacctctgttactaggcccagcccgtcctctggggaattgggagaaggttaaagtggaaagggacgtggaagctcattgaaaccaggcctcttgtcttagcatcaaggccttaagaggctgagaggaagaatgacctaactctgaaaccacttccctcttctctttcttaacgtcgccctcccttccactggtccccctatcctgttggtactgtgttttacaatagcctggtttttagttttcattatctcccactttgctgagggctttcaccaactttgtgctagtatagcaaccagctaaagctggtcgccatattccctaggaagggctagagagactgaagcgatgaaccatatctggaccccagatgagacctagttctagcaaagaatgtttccctaacatacacaccaggagttagttaccttccccaatcagataggacacacctccccacccagctttcagcaaagtgagaaccctggtagctggctttaagaacacagtgagctgatcctgtataacaaattatagagagaaactgtcaagtgaaagatgtccttattgcaaacaagtggccgcttcttgacatcccagcaggcaccggtgaagccagagaagcggacaccgctgggaccgctgctgctggcactccacggcagggggcggctctgaccaggccagtgtctgcggaggagaactccctcctcagccagagaggggagaccgagagccttctcctcccagtgctatgagctgtgtccctgctgccagacgggctgcgcgggcggctggacacgggagcagctggcacagcaaaagctggagtagtactcgttgccgcagagccgggcctgcaggatcaggtcacagttggccagctccggctggtcgacacagtccctgctggggtcccggggctgggtggccagcactgtgagacaccggggggggagagggtggtgagaaagttccgtgtggctggaaactcacctgccctgtcatttccctaaaggagagcagcgctgtaaccgccaggttcccagagatgccggtcactgtatcccggtaacacctgtgtgtccagctgagggcacacggtctgcactgccctgggccccgcttcggcatgcagtgggcctcctgttatccttttatagctctccccaacccccaccgctcgccccagtgcacagcccatcgcagacccccagatatgact

SEQ ID NO: 45190 - DNA, 4396 bp, Bovine  19866880993653
  misc_feature (1)..(1): n is a, c, g, or t
ntcttaggaagcaggcactgttaactcttatacaggtaagaaaactctgaagagtttaagcaacttgcccaagacctgaggcatggacctgggtctgtccgtccaaatgaacctgggttcaaaaaggaagtgtgaaaagcagccaggctgagtagttgggagggagagggctgggcaggtaacaaaagacctattctagacccctgtgtgaagagtgtggtgcggatcctgtaggtgttggggcattatttagggtatggcaggatggacatttgagggtggttaatttgcaggatggtgtgagtggggaagctgcggcaggaagtgactgtggtctacgagggggtggcggtgggaatgcgcctggtcagactgagtaatgaaaatcctcacagcccatcaaacttaattaaaatcaaataaacactccggcaaacccatctcataccaagtagggagtcaggtgagctgcagggacatagcgcttcgtccttatgtaatacctgtgaagtatgcctgtgctttgcgtcgacaggcccccttacacagtcacagagtcagcttggtccttggtgccccttctcttttctcttttctcacccctttccgtttcttcctgacagcagttgtttcagtattttgccatttaacccgaaatccctctccatcctctccctctcagcagatcatttcccccagacttgttcaagaaaatcgaagccaaaaggcaaggaacttccttgtcatccttgccctcagcctcatcatgatgaaagccacctcttctgaggaccccccgccgctagcccacccctcttcctctcccattaccctggtatatttttttcacagtgcatacaaccctcagaaattatctttatgcatttgtttacctgtcttatgtttgcctttcctcttggaatttatgtgccacgagagcacagaccgtacctgtcttgggcactgcagcatccatggtctcagcacatagtaaatgcctggagcaatggaaggtgctcagacgtggaaacaaataagtggattcgcatgacttccgctggcacgcatgagttgatcttcttctctcctcctgactgtcctactgcctatttgactccatcaggttgtccctcctcaaatttatgttctaaataaaattttcttcttccccttatgctgcttgttcctcttggggttcactatcgtttaaacaaaaacctcagggtcatctttggctcttctctctcctcactcctatatacacttagtccccaagtcctgttgacttaaccttggcaatacctctggactccatcccctcatccattcgcctctcattcaggcaacagaagcactcacagggatgctggcaggagcttcctaattgacttcccaacctgtaatctctccccatgtcaagttgtccctacccacagggagagctctgcactgtttggtttctctttacttgcaccagcacctactgattgtagatccatccatctgcccatctgcccaaccgtctatccatccatgcctgcatctgcccatctatccatccatccatccattccatccatccattcattcatccatctatccatataactactcatccatccatccacctatcctttccatccacccatctattgcctatttactgagtgccaattgtgtgcactgtgagaggtgctgggtagagaactgagagcacagtctttcctttcatatcaattttcaaccttgtaggtggagacaggtatacacaaccttgaccttcacgtgttacaggtgctttttattcattcatcaactatttattgagtttccaccatgtgccacacactgcaggtgctggggatacagccagtccataaggcaaggtcccagccttcgtagaagccacatgccagcagtggacagaaatgcaggtataaatgctgtggggaaataaagtgagggtgaggggtgcatgtgtgtgtgttgccccctggagagggtattcaaagatggcttcatagagagggtgatgtttgagcagagacctgcaggatgagaaggagtggcatgtgcatacagctgggggaaaagtattccgagcagagggaactgctgatgccctttgctgaggccctgctgggctgggagtgtgctttggggagtgtgtacagggcatgatgagatacaaaggaggggaggaattgctctgctggacgggccatggggcactcctcagaggaggtactccctagcatgacgactcagcctcacattgcaccacctgtccatgaactctgagcttgaatcatgctagaccatggactttccatctccgggcctttgcttctctgaccgtctctacctcctctgtctcctacgcctcttcctggtgaacatctggttcccactcacccttcaagaactcagccacctccaaccagaatcagttgcccctctgtgggtcccagtggagcacttagcagagtgacatctggtgagctgagtctgggctggtcacttccacctgttaaagctcctcgcatgaaggaaccgtatcttggaccttcctgggtccccagcaccttgcgctgtatgggcacacagtaggtggtttgatgcgtgttgttttggaaagcatcctgttttgtcaccagacctctctctattgacatatgggcggacatacatgccccctttctacacatcagttacttaaagttccgcagttcctaatgaaagcaagaaggtcatgaaattaatctgtcaccctgatgccagcttcactcagctgactcatggcttgggaaggggtttttaaacatgcgtttctaatctctgtgctaatttctcttccctttctcagtcatctccccctcagacttggaggcgggagctgcctttggatctggtggtacctgcacctccttttgaatactttgcacagatgttttccagctttgggcctgagaagaggggaggtggtctctgatttaggaagggtaagagggaggaaaaatgaaatgaggtttcctcccctctcgaaattcattagagcttatttatttgcttgagaaaggcctgaaatacctatgttttgctatgaactggatcatatgtctgtaaggggattccaagatttttccccttgtcatgtggagttaagaatatttccaggtgtcctgggattaatttattaagtcagcaaatagttactgggttgttgtttagttgctaagtcgtgtccgactcttctgcgaccccatggactgtagcccgccaggctcctctgtccatgggatttcctaggcaagaatactggaatgggttgccatttccttctccaggggatcttcctgtcccagggatcggacctgtggctcctgcattgctggctcctccctgagccagcaggaagtcccatttactaagtacttagcactattctgagtaccggacatcagcaatgaaaaacaagagcaaaatcctggccttcttctagcttccattctagtggaggcagataatggtgatctaagtaagtaaatgactgggatggtgattaaatctatgagggggatggaatagggggtttggggaggacatttaaggtggccaggggagatttcactgaaaaagtgacatttgagggtcatctgggggaagaagattcagggcagagagcagtgagtgcagaggtcctgaggtggtccttacttaatttgcctgatgttttgcagaatagcaagaatgccagtgtggctggagtagaattagagagggggagagtagtgggaaaacttaggcttatttttggagttgggaacctgctggagggtttttacagcatcaacctagctgcccagctgagggtaaacagatgaatcaggggctgagcagggaaatgggtaaggaggcagcggctgggaccagggtggtaattgtaaaggttgtaaaaagtggctggatttggaatacatattatagataggaaggcagtttttgcagaaaaattggaagtggagtatgacaacaagagaggcattatggatgacttcgaggttttagacctgagcatgtaaaagaatggaattgctgagatggtgaggatcgaggggcagtgggcatgtgtgggcccagctttgcccttgttaggctggagatgctcagtcaacatccaggtgaagaagtccaataggcaagggtgtggatgcacctgttttttttttttttttctggctgcactgtgcagcatgtggaatttccctgaccaagggtgggacccaagtcccctgcagaggaagcgcagaccactggaccaccagggaagtcccagcacctgcccttgctgacctccacctggggaagagagtaggatgggtccagggagtcttat

SEQ ID NO: 45191 - DNA, 4215 bp, Bovine  19866880996765
  misc_feature (1)..(1): n is a, c, g, or t
nagtaaagcagtcaggtggacaagggctcttggagccagattttgtctggcatgcatcattcctgggagctctcctgtccatgcaaagactgcttagctgaatgtctcagaagaggcttctgtgagaagagatgaaagaggccacagagaaactggcgctttctttggaaaggagtggttttacaaaatctagatgtgcaaactccacccgggtcattaatccactgtgctatccatttcagctggacccaggtttgcttcagaaacatttgggggctttgttttttgtttctcttctctttaaaaaatgtttggaatgaagggaaaagacatcattattttatatggaaatcaaatcgatgtttacagatagagaatgtaaagaaaagctgatcaatggtgacaaattagaagccagagatggaaagagattctctataaagtccctaataccacaggcaaatggggtttccattcagttcaataacgatatttatagtaacagctaacacggatgcagcgtttacacatgctaggcatggctctgaatgctcacatgcattaacttattcaatctccatctataaggtaaagattgtacaactcctactttgcagactgacatcgaggcccagagagattaagaaacttgctcaaactcacacagccagtaagtgacagactaggctgtctggctagaatctgccttcttaaccattataccatggagctttctaacaagcattttgttgttgttgtttagtcactaagtcatgtccgactcatgcgaccccatggactatagcccaccaggctcctctgtgcatgggatttcccaggcaagaatactggagtggattgccatttctttctccaggtgatcttcccaaccccaggaatcgaacccgtgtttccgtttgccaagcccttattatgtgctgggcactatactgggcaagaggtactaacatatacaaaacaccaactcataggttacaggattagtctgtgcagtgataaagctcacataggcatccagaggtctaactcaagaatggaaagttagaaaacactctccaaatggtggatgtaagttttcaatgactaaaaagcaccatctgttttctcagtacattctaagaataaaattccttgatcttatcttctcagtaaattataaggatcaacattccttgatgccccaccctctcttgggtcatgaaactcaataaaactctcttcattttgattggagggggaaaaaaaaaaaagaacccgtaaatatgcttgtttacttttcctgaattgccctcttgtgtaaaatggattgctcaccactaatctagcaggctccaatacagggcctctcagacggtgcccaggttattaaaaaatcaaagaaatgcaaagcaggattgctacacatacagcacatttttaatgtttacacaacaaattcacactcttcacatatatacacacacaaacttaaatacaatgtaaaataattatgatctcaagagaattacaagacctgtttcttttaaaatattattaattcagagagtgccccatggatgctgtggtcaagccacagactgtacagtggatgtcttatgatgaacaccttgggacctacacataaaacctcatgcagagataaccccaaagtttcatttgaggcctccaggaatgggagaccaagtttaatcaggtcccactactgctctatccacttgataagcctttcttaagggaagaagaataaaagattgatcccaatggtaaggatcgatgaaagcctagctaggaaccagtaatagggaagaaaggaggttcacagagctgaagactatgtgggtgaaaactccaggttgtggccaataaagtcacaggccagccaggtgtaggatcttcataatacccagaggtcaaatccagaagttcaacaaaggttatgagcaacaggcaggaacacaacctcctgcctacctgcccttgaactagctctgacccaggcctccagatgctacactcatgcccctggcccatctttgctggcctctctacaaggacaggggttcctaaaaacatgtgaaacttccaggatgtgctcccttctcccatgtccatcccatttcctgggagtcaaatgtttttagagaatcaaaaatggtgcccattgtgacatggcatcctatgctcctttccagaagagtgtgaggtccaattctaaatagatcctgtcttagaaaaagacctgaaaaaggtatgagagctcctcagacccaaagatgagacagtacagaaagctggttgaaaaccattttccaatgtctatttatttttaagctaaaatctattcactgtgtgagttgccaaggaaagttaaggctcttgttctgaagcaagagaggttctctttccacatgacacctgtagaagatggaaaatgtgataccctctgcgtatcacagaacaccagttcccggtaagaagataccccaatttctgccagggcagtacccagtgggggcagcttttccacttttctcctcttgctgaaagggccctagaaacgccaccagggccttccccaagggcaaagtcctccctggcccccagtgaggactcactatcccttttatttagctaagcagcagagtttaaaaataatttctagagctctttgatcttccctggtggctcagacggtaaagcgtctgcctacaatgcctaccatgtgggagacccgggttcaatccctgggtcgggaagatctcctggagaaggaaatggcaacccactccagtactcttgcctggaaaatcccatggatggtggaacctggtaggctacagtccatgggatcgcagagagtcggacacgacttcactttcactttcactttcattttcaagacggacaaaagctaaggttcattatctccagcagaacacatactgtaaggaatctgaaaagaaatgtttcaagcaaaattaatgatgtcaaatggaatcacaaatttccgaaaagagttttaaaaaaaggggtaactatttaggtaaaacatatatgttatatatacatgtattatatgtgtgtatttatgtaaaagcacaaaatcatccaaaaaacaccccaaatttctgaattagttaacataaaaacaataagactacatgctttttgttttgttttcttgtttttttttctttttatatattttttaattagaatatgattgctttacaattttgtgttagtttctgctgtaacaacatggatcagctataagtatacatatcccatccctcttgagcctccaactcaccctctccacatcccacccctccaggtcatcacagagcctgaggtgagctccccgtgcaataaagcagtttcccaccagctatctattttatgcatcatagtgtatatatggcccaccctctcctttccctaaagtgttcacaaggccattctctatgtctgtgggactagctatatgtcgtttacaaggaaaaagatttaggtatgaagaactagatagttttaaagtaaagtatttgaaaaagaaattcacactgaaaatctaaacagagtttcattttagtcaaaaagagtagacaaaaagcattaccaaaaattgagaaaaacattttctaatattttaatttagttattcataaaaaagacagaaaattgtttgtggacctctatatttatggaccaaaaagaggatgtttccaaatatattaataattaacatgactaaagggagacgtagataaatccaccaatatttggagagtctaagaaatgttactgtcaaattatgaagaacaaatataaagaaaatcgatcaagttatagaagatctgaaaactaccaaccaacttgacataattaacatttatatacagttcagttcagttcagttgctcagtcatgtccaactctgtgaccccatgaatcgcagcacaccaggcctccctgtccatcaccaactcccagagttcactcagactcatgtccatcgagtcagtgaagccatccagccatctcatcctctgtcctccccttctcctcctgccctaaatccctctcagcatcaagagtcttttccagtgagtcaactctttgcatgaggtggccaaagtattggagtttcagctttagcatcagtccttccaatgaatactcacgactgat

SEQ ID NO: 45192 - DNA, 907 bp, Bovine  19866880998147
  misc_feature (1)..(1): n is a, c, g, or t
ncatctagggattttaggccattggaacatcaccacagaagcaccaaagagcctcagtatttaaaaaaaaacattttgtgtgatgtttacattatgtatatactgtgccattcagtggtattcaaaattaaataagttaataaacacataaaattgttctggaaattatgttattgagtgtaatttatatggggattggattattgtttgacatatactgtaaaattgaacatggaatttaccattgtaaaactagaatcagcaagcatgtgtattatagaacatgaagatgaggtgagggaaagaaacatctgtggagagtgcctctggggatctcttctaggtcagatccttagtattccaacttctggctcagataagcttttccgcagccctgatgcattagatgtagggattctgtgttgtgaaatgaacatcccgtgtttcttctgagaaacttgattgacctctcaagtccactgttcctttgtgtttccctttttctaggacctcatagttgaccagacaatagaaaaagtttctttctgtgccccagataggaactttgatagggccttctcttatatatgtcgtgatggcacaactcggcgctggatctgtcactgcttcatggccgtcaaggacacggtgagtccagtagcctgaattgcatcatgactagccacagtcatcaagcttcttcccggttggctcagccagtttccactgcatttttaacaagtatatgctgttacagaacttgtaagcgcctaaacgagcccgctttcaccccttttattcaagcagttcacactcttgatgtaaccccaccactcacagaacaagatagttggctgagatccaagattattaaaggaaagtaaaagtgctctggggatggtggctg

SEQ ID NO: 45193 - DNA, 1781 bp, Bovine  19866880998431
  misc_feature (1)..(1): n is a, c, g, or t
naacgaaaatcaggggggggaaaccactaatgattcacactcccttaaggagaggctgacacagccagctatcaacagaaaaaacccatttcattcaatagactgttacttgccacaagagaataccatgctctgggagagtaataacctaattatcccagacatctggattggcacaataccaggtttcctttacaattctattcttgaattaggaaatgtttaagggaaatttccaaagcaaactaggaaaaaataagacttttatacatacactcacacaaacacatccatacagagatacagtaggaatggattgtctgctaatttccacactctaaatctcatgccatcatgagggcctgccatttttgatcaaggaggtaagggtaataggtatgactggttattttttaaatttaaaatcattcatgttggtgcctgtacagttcaatattaagtgcaattctgcataagaattggggagtcattttaatatttacaagaaacaaatcagcagaacaagattatatcagatagggtgtgtacagtagctgcggcttataaaacataccagtaatttgtacctggtgagtataaagagaaccatggtaggattcagatgtctttacaaccaagggagtacacacagcatcaacaaattagaggacaaaaaaattcacattttctacattaaaaaaaaaattacagatctcacaaatgtctttgaagacgaaaaaaaaaaatgaagtcctttgaaggatgggaaagaagaaatctgaaatggaactcttaatgtaaaagagttttacttcacaagaccaattttcttggcttctgtttcatatatcaataatctccacatcttgactataaaaacttctgcttcttcatcaagtacctagaaaaggaaaaacaaaaaagccagttacacgtgtaagaaaagcaatcaccagcatctcccaacaaggcaaatggaataaaaaaggcttttctctacgaacaagcatttactttatttatacatgtcttgaataactatttcctaaggaaaccatatgtttgttataaagaatatagtcattcagacaaattagttatataatcacctaatacttagtacagagtatctcacttaccctctccccaagaacctcataatcttaacatttactgagcccttattacatgtaacactgaaatattaaatgagaatacatctgggatacagtaaacaaaataaacactgtcattcccaagggacacaagactactgaataaataaaaggtcctttccccttggcaaatcaaatgatcgtttttttacatctgtgtctcctttgctgccctgcagagggctagggtggggaaggagatgcggcaggggggttcaggatggcagggacacatgcgtacctggggtcagtgttaatgtatggcaaaaatcatcacaatattgtaaagtagttaacctccaattaaaataaataaattaaaaattacttgggattcaaatcccacttctccctcctaccagttacatactcttggttgggatacttaattacagtgagtctccgttctcttatctgaaaacggaggatacagtagctatgtcatactggttctactatgggaattaaaagagacagtatgtaccaagtgctttgaagagtgcttagtaagtacctagcacaagccagaaatttgatttttctgaaaaatttcccagcatttctcagtgagacaaaaaaagaacttcaatcagacataccacgagc

SEQ ID NO: 45194 - DNA, 1574 bp, Bovine  19866881003818
  misc_feature (1)..(1): n is a, c, g, or t
ntttatcttgaaatatgaaaactgtggagagggtctaggaatgcagtgaacatgcacaaaggtttggaaaaagacttttcatggaaggaccagatcgaggcaaggtgaagttcatacagactagcaattagaagaatgggttccgaggcagactggggataaggcgggattttgcccctgaccagctttctgatactgggcaagttctaagtctccctaagctgcagcatccttatcttgaaatgggatgataactgtactcacctctagggcggtggtggggattaagtgatacacggcagtaacagctgacacagtttgagtgtttactacctaccaggcattctgccacatgtagattgtgtttttatcttcccttgtagttcagtcggtaaagagtctgcctgcaatgcaggagccccggattcaatccctgggtcaggaagatcccctggagaaggaaatggcaacccactctagtattcttgcctggaatcccacagacagaggagcctggcaggctgcagtccatggggtcgcaagagtcagacacgacttagcgactaaaccacgaccaccaggcattctgtgtgtgcacaaacacatcagtgctcgttggggctgagcctgcagactactgctaattcaatgagtggggctctcgtcaccatctttactgtgtctaggaaacatcatttggctgcgttcttgtcctgctgagtggctcctggtgaagttacttaacttttctgagcctcgggtgactcgtttataaaatgagataattaaagcagatgatctgtaaggccttctcaactgtaaaatactgtgcagttctggaaatagaatttatttagtgttgagaaggctgagggggatactaaaatatgaacttcatatatatataaatatatatatatatgattcttataagtttgaaggatggtgaacagctgttctcttttggctgaggacagggcatgaggcaacacattttaattgtttgagattagacatttggaagacttgggagaaagactaatgtgtcactggagcaggctctagagctgcacactttgaactcatcaaggcagacggttggctatttttctgacactgagacgtaacttcatcacacagtccttccctgaagccttgatcttaaatagataccccaccccccacagcccccagcaccatattcttccttcacatttcaccctgttgttttcctccatagcactcaggacactttgcacatttattttgtactttcctggtagctcagacggtaacacgtctgcctacaatgcaggagacccgggttcgatccctgggttgggaagaatccctggagaaggaaatggcaacccactccagtactcttgcctggaaaatcccatagaccgaggagcctggtaggctacagtccatggggccgcaaagagtcggacacaactaagctacttcacttcacttcatttagcacttaatgtctgtccttttagattgtaaaccatgtaaaagttggattggtcattatttggctcatcgcctgtgtacctgttctagca

SEQ ID NO: 45195 - DNA, 2967 bp, Bovine  19866881013684
  misc_feature (1)..(1): n is a, c, g, or t
naagaagctcgttagttgattttgtttgttctaggttagtcttttactctttcccctccaatatttgttatatactttaaaatgttagagactttgtaaattgaattttttgttgggacaagtcattgataatttagttttaattacaagattcatagccacttaagtgtacccctctatacaattcgagaccccacaccaagtactttcatttcagagggtcaaaggagacacagttgctggctactaccaattttgctctctccttaccccaagaatgccttgtcaccaacttcttgtcttaatggttaggatgttgctgaagtatagttgaggtttagtggagacagccagtcacttatgtcagttttttgttagtcatccattctttgggaagaagcaaaacggtgtccttcatagcataacagtggtgttaactgactgattactgtgtgcatggcttctttcctggcaagtcctgtgttaagcattttccaaaactttatcttctttaaacctcccaagaaccttaggaagtgtaagtttctaacagtgtccccattcagtacatgaagaaattgagacttggggacagattgtgtcttgaccgtggttacataataagcagtagagccaagcctgtaaaagtcatgctcttgaccaccaggagatacctcatcctttcattgtcctctgaaggcccagtcttacctttaataagatagttacaggagaagcactgtatttctacaaaggaagagctaattgcattttaaggaaatgctatttttctctcattattgctcctttaacatcaggaatagcaaattatcttttccacttgtgattattgtagcataaacatttgtaagtctgggtttgaattagaagacagatatgtagtgattaagatcttacgttttagtgtcaaactttcattgaaaagagagagattctggaaatttagaaatttatataaaaattcttcagtcaaaagaaattttcatactagtttgaggatatattaaaaaatcttttatcatattgttaatgttttattttcaaattgacattaatttttttttctattaggttatggctcatagttcacctcagagcattttagatgatgttgccatggtaagagaaaatttactgttatttatattttaatttaagatcagtataatcaaatttgctcctctgaatttgattgactttctagaacctgtattggttctagactctttataggactaaattaaaatttgaatatgcattgagaggttaaaggtattcacagtaagatatcattagacatcagtagagttaaagttttctttatcagtctcttcctttcacctgtctttagtgtttgtgtgtgtaaatataaattctgaatctatttcatacatttagagaacatttattaagtgttaactaggtagagcagtgtgcttaaaagcacaaaaagatggaataactacccttaaagaactagcagggacacaggtgtaccaatattgatatgacaacatatttaatataatgggtgtatgtaaaaaaataatggaggcagaggaggtagagcagttaggtgttgagggtagttagagaaatcatcacagaaattaccatctaaactgaggcttaaagattgtgtaactcttttgttacttggacaggtgtctgttgggttggtagtagttcaaagaatacaagtggtgaattggtccagataatggcaagatgcagagtatggccatggaagtttctggggcagaacagatgtcattgtttagagtgtcaacaaactttaagctgggttataacacatagaaattgaaattgctgcatgttgggactgggattggagagaaatacaagaaccagctgccatagcgctcatttaatgtagatgaaagactaggtatttcctagacagctgctgttggagtgaaggggtggtgttgtgaggtgttatgaacgtcattggagatgctgtttacgaggagagaaccagtgaagatccagcaactttccctctgttgtggagacttaaagctttgaaagtgaggaacttcctcagaaggccacaagactgtcagggtcttcaggggtcacatcaggttttcagttgaggatggttagcataaagtgaaatagagtctaaagggctgagtgggaacgtagcaatgggaagaagagccagggaggaagaaatgtcaagcatggtacgagatgataggtgatcagggaaacttttattttgagctacaattaaagttgtaagggagtggcatagggggttgcctaaccaaaaggagctctaaagtcaagatattacatgtttaagcacttcatgatgtttaaagccagataacattaattttctgcagcctagctagcctaatgtatctatttaaaattcctggggggaaaattgtgaaaagcttttggttttgtaatgctgagcctcagatgaaaggagaaatgtgaatagatccttaagggtagaatgtccttggccttccagcctttctttatagttatctttcgggtaaagagagggctttgtagttactcctgagttaaggaattaaaaaaaaaaaaaaacagggaattccctggcagtctagtagttaggactccacagtttcactctcaagagccccaggttcagcctctggttggggaactgagatgccacaagatgtgcagccaaaaagaaaaaaactcagtgttctggtttgccttggcaaggatatagttactgttggtgaagatggcatatgtcactattttgatcagttgaaatagtttgatttttggagtataattaaactaccatttaaacacgttgtttttgattattttctatttcagtgttgatcatagtgggaggaaaccaattgggctagtgttgtcagctcgttatggtgatagctcatggaccctctaaatatt

SEQ ID NO: 45196 - DNA, 1315 bp, Bovine  19866881044590
  misc_feature (1)..(1): n is a, c, g, or t
naaatgcaaggcttccctgggttgttggagccctgagctcattaacaggatgcaggcaagacaaacccgaaagtgcaacatgggagtacagtgagtaattaaatcccaggtcatttaaaaatgctaacgctcagatgtcatggactcatggagcctccgactcctcgtgcattttttttttggctcaggatggaggactgggaacctccaagtcatatatggattataataaaatatgccatataaaaaaacagattaagacagttcttctttggggaaatatacaaagaggggagctgtctgttagctgtcgagtttgcaagagataccatctttggggaggctgtgctctgccgacagacaggctgccccaagggaaatcgtggtgaaacaccccgacaagccacatccatccgtccatccatcacgggctctctctgactcaggagcctggagatagagccatggtgcaaaggagggagaaatcccacagacaatggcagacagtcctcctgctgcatcatgagcgctcagattttttttcccccacctgactcgtttttttaaaaaatacaaacgtgcagtcttctattctggttgcttattattttgaggagttaaggtcatcacatttccttggatttatacaaggagcaaaatgcttaagagtcattatttcatttatgcccaccagactctcaggctcacagggaaggaggaggaggggattgctatcactcaccccatgggggaggagactggaggggactgaagccctgatttcctgagatggtggcgggcccccggaatccatctgctcattccttaggggtgccattttcttggctgcatttgactccctgctttgtgattcataaagctcaaaatagatgaggttcacaatgaggacccatcacccaggctgcaccctgcaggtccttgttaccacttgttttagaagcccaggatatccacaccacaggaggactgatcatgccccccagaaggcctgtggtgcccaccctctgctctgccaaccccctcaccccttgccaacacgcaaggatgggcccctggaagcagcacccagaggttggcaccacagataagcaatctcccacctatgagacacaggaaaacacccacgctgttgaaggaagctcaccactctgctggttagtggacgaaccaagttgatagaacttagcgggaaggtgcggagaaggcaatggcaccccactccagtactcttgcctggacaatcccaggacagaggagcctggtgggctaagtccacggggtcactagtcgggca

SEQ ID NO: 45197 - DNA, 1778 bp, Bovine  19866881051697
  misc_feature (1)..(1): n is a, c, g, or t
nctgaaaaatggcagagaactgtgctaatggaggctgtatatccagaagcacgtcaagggcatgatgtgctgacttcccaagctttccccatcaaatacttcttgacttagtaacaatataaatgtcaagaaatatttgataggcatattgactaaatttcaatagtcagttgactaaactgtggtgcttccacacttgaaatgtgtgtgttaagtcacgtgcgactctctgagaccctatggtctgtagcccatggggctcctctgtccgtggggattctccaggcagaatactggagtgggttgccatgccctcttccaagggatcttctcagcccagggatcgaacctacatctcttctgtcccctgcattggcaggcaggttctttaccacgagtgccaccaaccaggcaatgactgagtactactgatatgattatactgctgctgctcgttggcattgtgagtttgaggctgctctgtggtgatgtaggataaagcaaatgacatgaagaactaacgctgtcatcgatagtgcctttgagaatcaggtttctagaaaaaggggacacagacctaagaaagaagaggttaaataaaatcccctgtagttttgaatttgaatgcagagtatcagtatgattcatgatgtattttcatcagaaacaaccaccacctatttcctagttttggccactggaaaagtctaaaactgataaccaacccaggaacaatgagtgcccccaaatgcccagattatcgtctctaaaaatatttcccactaacaaaaacaagggattcttagattcttgaagaactagctgattccatatctggggaagggctggatcatcttagctttcctgatatttggatcacatgaaagactaccagggtcatgtcagaaggagccaactggccagagatggcacaatgcaagcagcaataacaataataaacaaaatgggttaaaacatagcaaatatgcttaaacccatgggtttataaggatactaacaaacacacaaaaacaccctaattggtcatcattggaagatgacagtaaactattcattatttttaaaattggcaaatagaggaaatgattcaaacatatattccatccatcttatgtgaattgcattactaaataatcaaacagtagatatatttgactatttgtatttcacttaataaatgaagaaagaataacagggttagaacatcattttgtaacccctaattaactgacggatctaaactatgagcatcagtggctgtgaaaaccgcaaagggagatggctagacgtcatacgccttctgacaagagagcacagcacagtctaggaagtagttttgcccacaaaaatcaagctaaaatctgattaaatatccaagtcaaactagcaatttataggaaatgcagatggtaggacacattaaatagcaacacaaggttgcaaacagaaaaatccggactgcgggatctctccagcacaaaagacccaacttcttcccttcaataaacttcaagggtgaggagaacataaaaggagcctgtagattacaatgtacttaaaagacaaggcaagctacatgtgtgggccttatttggattctgattttgaataagaatttaaaaatggcatttaggaaatactatgaacttgaacagttgcacgacatttgatgatattaagagataattgctaatttcttaaggtattgcaggaatgttaagaccaaagggtcagtttctgttagagatatataccta

SEQ ID NO: 45198 - DNA, 1143 bp, Bovine  19866881058502
  misc_feature (1)..(1): n is a, c, g, or t
nactgcaggcccaccaggctcctccatcccatgggattttccaggcaagagtactggagtgggttgccattgccttctccatctctccctctagccagctctaaactctggaaggttaccacctgggaccagagctcttctggcggtttcctctccgagtgttctgtgaggaagaccatggatacagtctctatccagctgcagctgggttctgaatctggggtccagttgtctgacaggcccccgacctccctgatctcttccctccctcctggcatccccagcttacccgtcctctggtccgattcttccgcttgggaatatcctcttctaaatcctcttcttcattcccttcttctacattttcatcattttctaaaaccctctgaaataagaagaaaatagaagcattgagaaatgaagcacaaaggagaagatcctcagagggtaacgaggagggggttgtgttttgttatttttagcacagtgaagatgctgccgtggctgggcctccaaaacactggccaggagttggagctcctgtgtaccgactctctctcccagacccttccagccaagtcttcccagaataccgaccttttcaacactttttgcccacaaagtgttttctaaaaagagaatactctagtaagggtactcttctatgtaggcccaagatgtctggtcaaaacttcagttcagttcagtcactcagtcgtgtccaactctttgcgaccccatggactgtagcactccaggcttccctgtctgtcaccaactcctggagcttactcaaactcatgtccattgagttggtcatgccatccaaccatctcatcctctgtcctccccttctcctcctgccttcaatctttcccagcatcagggtcttttcctaaagcttactttaatgtaattttccttttgtccctcaagggccacctcaaagatatgaaaatacgtctctcctttccctggcattctggaatgctgcctagtttgatgaaaacaagtaacttcctatccatctgaccagaatttgacatgcatgtgttattcctcatctcccattgttatttcttttaagagaattggattgtcattacagcactgaatagagcttcaattaattctctctctcca

SEQ ID NO: 45199 - DNA, 1723 bp, Bovine  19866881073681
  misc_feature (1)..(1): n is a, c, g, or t
ntgtcagtgcaggaaatttaggcagtagggtaacatggtcatatttatgaaaggtcgcactgatggaggatgtttggcatgaagcagagtgaggaggatgaagggaggttgtcaggatcggatgggggggtcctcatcctatcctgacctatagaaatattcctagaggtcagatggcatgcatccacagaaaaacatattcttcaccacacagtgctgggcatatagtgagggctggctggctggatgagtggatgaacaaatgagtgggtggattatgattccaccatactgctagtcttacatgtgctgtaatttctcttccttcagccatctacctctgtaagaggacaatgcagaataaagcaaggctggaactggcagattatgaagcagtaagtatgattattttccaggtacggtgtaggaggagagtataaactaccttcagctctgactcagcttgcatttttccctttttcttcccccaactccttcagacagtggaaaggaagtctcttctatttccctttttttgttctcagctcttcttaccatcacaatataatcatatctttatataaaggactctcaaatctcagcaataaaaaaacaactcagcctaaaaattggcaaaggactagaacaaacatttcaccaaagagggcttaagtatgacaaagaagcatatggaaagatgttcaacagccattagagaagtacgtactaaatccatgatgagatgccactacacatcagaatggctaaaattaaaagtactgatagttcaggtgctggtaaggatgtggtgggcaactggaattctcctatattgctggtgggaatgcaaaagggtgtggccactctgaaaaatggtttggcagtttctcatcaagttcaacgcacacgtaccatatacaaccaagtaatcccactttaacataactacatacatacccccagagaaatcagaacttacagccacacaaaaacctgtacactaatgtccatggtagctttatgtgtgatacctcaaagatgaaaacaatccaaatgcacttttacagatgaatggttaaatgaactactctacagccttggaacagaatactattctaccctgaaaaggaatgaattattaatccaaccacttggatgagtatcaaagacattatgttgagtgaaagaagtcagtctcaaaagattgcaaactgtgatgttccagttatgtgaaaaagctgtcatgagggaaaacagatcagtggctgccaggatacatgcagatataaagagatggcatgaaggaatttgtggggtggggggcaatgatggaaccattctgtatcctgattgtggtggtggttaaccatgcatatacatgtgttaaaatttatattactatataccaaaagaagaaaaacaaatttactatatgatctttttttttagcttaatatatgataatttttaaaaattgcatcttcagacccaattcaccaggacttggcagtagatgcaaaatcttaggaccaaatccaatccagaagacaagacggatgtcagatggagatatatactcccaactttcctcctccttctttcacaaggcatgattgcttgcagaaactggagaccccaccgcgctcatatccacccccatttaatagagccaaagcatagcgaacttggaagagtcacagataatgttttaagtatttaaaat

SEQ ID NO: 45200 - DNA, 1454 bp, Bovine  19866881126466
  misc_feature (1)..(1): n is a, c, g, or t
natgtgtaaatttttaatcaagtttgagaaaaaccctatattaagtttctttcatatttgtatagaaagattttagggcatttcaatagttccctgtgctgtgacatcaccctgaaatacttttcaaagtgagaattggaagtaatcttgcaagggaggggccctgaagcataaagaatcatgggaaattagcctccaccccgttccttatgtaatgtttatctgatgaccttttgtgtttaatattcgtgtagaatttcattggcttctcttttcgtctctgaagtgcacagtgacttgtggccgagggttacgttatcgagttgtgctgtgtatcaaccaccgtgggcagcatgttggcggctgtaacccacaactgaagttacacatcaaagaagaatgtatcattcccatcccctgttataaaccaaaaggtaaatttgtggtgcattttaaagtgaaatcaggtggtgctttccaggtctcttactaatactgcagcatttgcatttaaacatactaactttcttgcaaaaactgttcactgacagattgacatgtccacctagataaagaagttaaacctatgtcattaattgatcttgaagagaaacttagatcttgttgattcagtgcagtaagtcccctacatacgaacgagttccattctgagagctggttcataaatccaattgttcgtaagtccaacaaagttagcctaggtacccaactaacacaatcggctctaagatgctgtactgtaataggtttatatactcctcacacaaatagtacgcgaaaacaaacacgaaaatagggaaaacatttttaatcttacattgcagtaccttgaaaaggacagtggcacagtacaacagcttgcatacaggggctgacattgagtgaacagagaagaagagttaccgaccagaggagggagaggaggtgagagatggtagcgttgaaggatcagtggcaataggagaggaagggcaagttgccatttccctcacgcctgactctgacggaacatgtcttctcatctttgaaaattcgcaacttgaaggttcatatgtaggagatttactgtggaacaaagattcaaagcggggtcgtccggcccccaagtgcagccctcctcttcctcatcctcttccttttcctccatactacctctccaacaggaggtccgctgtgattcaaacacacctggaaaaagtaaatgcatttccccttagctatcgactgtgaaggaaacaaaaagcctaggtccaactgtgcccttgggcaaactcctgacagttcttcagttagctgattgctttccccagccttctagaaagatcttaacaagttctatttatagctgacccagagagcacggattctctccttctttgggctcccgaggcccctatcattaagctatcgcagttctgatagtctgagtgtgg

SEQ ID NO: 45201 - DNA, 1718 bp, Bovine  19866881206092
  misc_feature (1)..(1): n is a, c, g, or t
nttcctcctacccggtgtctcatatccgtctcatttcctggggccaagactacatgttctcttttaggagccccagttacacgtggccccatgagggcgtatgcccagtaagtgctcagtaaacactcacgtttagcttatgtggaaggattcgtgcaccatgtctaagagttagcaaaggttgtgccaggactgagtcaggctctgacagtttcgcctgaggccagtgagacccccataggcagtcagcttctcagcatcacatagccacagacaggccgtgactcagatcatccatctgtggtctgcacatgctctgctggcccaaagggcatggaggcgggatgtaggcactctcgtcaagagggccaggtgccagacacccgaatcgcctagagactcataacaaccccacaggggcagcaagatggttctctctgtttcatggatgaggcaacaaaggagcagagaagtgtaacctgacccacatccacacacagaagatggcaaggtggccaggtcatgattcgcacacgggccaggccaactccagtgccattttctcagccacagggtccagagtgtggatgatccaccggtttggagagctgactccaagtatatcttcaaggtcagagcaacccctcagattcttctttgctttggaatctataaactgttcagtaaaataataattcacctaaggaacacccgtgtcccaaatttgctctttagggagtgggcagctcactttttcagacacagccctggatcaaagcctgaacttcctgtgtcaaggttgggtaagtggtggggtgggttgtgtgggttataaagcttctcaggcacctttcagagtgatccaaaattcttaagctcatgcaaaacataactttcactctctctcttgaagctgtatctgctgcccctgggccatatgctagaggacagagatgtcagaagactaacatctgttccatcttccccatcagtgtggcaatgacatcatatgcttcttttagataatttgcacattatcagactaattttcagattatctaatcagccgacattacccttaatcaactcagctctcctctttcagttctgcagagtacagcgtgccctccacaggcacactggggtggggacttttcttctcttgacagatattgagagcctagctatatgccaggccaccgctattaaacagaagactgagccctcttgggactgagggcaacccgacttccatgccaggaacctgagacataggcttggaataaattttatagatccatatattaaaacacatttccttcatagaagctccaagtatgttgtagagagcattctacaatcatttatgctattaaataagaaagagatgccataccaccattaataatgtgtgtgtgtgtgtgtgcacgtgcgtgcatactgttgagtccaactctttgcaaccccatggactgtagcctgccaggctcctctgtccatgaaattttctaggcaagactgctggagtgggttgcccatttccttctccaggagatctttccaacccagggattgaacccccatctcttgtgtctccaacattggcaggcaggttctttaccagctgagccaccacagaagcccaacagttaataatacgccacatatatttctctataaatcatttattcttacttctagtgatgactctccttttc

SEQ ID NO: 45202 - DNA, 1272 bp, Bovine  19866881209324
  misc_feature (1)..(1): n is a, c, g, or t
ncagtcaaatgctatggctcaaattcaaattccaattaatgtggccaaggttggagaacaaactttatgttcaagctttattatcactggatgagcacccaccaacaccacagtgtttggttctttaaatccagatgacatgtgttcaagctattggaaacatgtcttcaataataagtcaatggtcgaatggatttaatgacaccatccttacactaaaaccataaaaccatggagctccatggcagaaagggagctcagagacctttccctttaaaactttccaatctctggggtcctgaatacttgacaggctaacgagaaaaaagaggggtcagtgggttcacttcagaatttcaagaagtcacagttaatactgttcaagaactggagatgtaactctaaaagctaatcaaaatatacttttctttttggggggaattctagcaactccatgtagtggttgctttggtcacttgatgccagtgaaaacattgattgttctattggtctgtgagtaatcaagatggggaaaatgtactaatgtgttgatagttactgtctagtagaaaaaaaaaaaacttttaaaacatgggattcattgtaagagaaaagaaagggagcttgtaaaaaggggtagggatggtggtcatgcaaaactgagtaacccgggatttattcaggctttcattgtattagatgtagaaacagagacatacagaaaatgtggcttatctaagaccctgactcatcttggccaagtgttgtcttctcagtgggtaagatggaaatctcagtgttttctgggcaccaggatctcttttacatacaaggttaattcccgtcttccaatggcatttttccaaagagtgactttattaattttttttttactttaaaaagaccatatgctgtgaacaaaagactgtgtgctatagtgttaatgcgcaaaatccatgttatatattcggagttggagaccatatcagttctgtacatcaatcaaatgatatttatcacacacctatgctgtctccagcccccaagaatctgctgagggggtgtaagaaagacaagatgcatgatctttgcctgcagcaaccttgtcggtccttgaagaaaacacacaagaaatccttaaatcattaaatgaataaaaatgagtgtaaactctgagaaccattttggtaatgttttcaaaacatcctaccagactaggcacatcataagctgggctttgaagagtgtacaagatactgatgtagacaagaa

SEQ ID NO: 45203 - DNA, 943 bp, Bovine  19866881226165
  misc_feature (1)..(1): n is a, c, g, or t
ncctgaaatagcaccaaaaacaagtctccataagcattcattagaaaatactttggctcaaatttctagcagttctctatattcatacacacatacaagttctaatatttacatattgcaaaaatacataagaagcttcagctatagagaattcatgcacagtgcaatcaaatctgaatcatccacgctaaagagtaatttgaggagaaaaaatactactaccccacctggggaaaccctctcactccaatcagacccattcatttccccttattctctctctctccttccctgtctctctgtctctatctctcccattctctctttctctccttctctttcaatccccctccactttgagacccagtttgtcaaaaggagggaatgtggctctgagtctttatacttagtctgtaaagggggatggagaccaattctgagcagtcaagaattcaaactttgtgcacctgtattgtgacaagcttttactcaggcactgcttccccatctagattacttctccagcccttctttgcaaaccttctgcaatggtctcaggctcacctctcatctgccccagatattacttctaacactaggacatctacaaatctatggccacaatggcattccagagacatctgcctggctccctttttctcatcattttgatgtccttcaacaaggatgaagaggagaaagaaagtagaaaggataagaccaaagtaacaaaaacacactcaaaataaatgatggtgaatgccatggctacctcttgctgggctaaaacactaccatcagcaagttcaacccatcttagaggtcttcttatcctctctcaaagctgtcaaactcaaggcacacaggtgccacacaggaggcaagccacaggggattgtaacttcaatcattgtcatcaataatcatagaaaacacattcatg

SEQ ID NO: 45204 - DNA, 1737 bp, Bovine  19866881244108
  misc_feature (1)..(1): n is a, c, g, or t
naaaatattacagtaaatatctcagtggtgaaatatgggtgattttttttgtcttatctttccttttttccccacccaatatggtttcttcataataagcatattaaaccaggtttgactggagaactaaatttgatctctccattggcttcagaccagaataactatgtaatacctctggggtggcgctgacactttgaaagccctcacacttgtggcattaatggaactaaatgcaaatggggttctctggtgactgcttcaattgagcctattggcttcggtcacccactcagcattcatccagtgcctactgtgtcctttgacttgcaggaggggctgcgtggttgttgcaaacgggaggtgctggcagactctggtcttatgtagcagcggatcttcccgacccaggaatcaaagcagggtctcctgcattgcaggtggattctttaccaactgagctatgaaagaagcaagtgagtgaagtctctcagtcttgtccgacgctttgcgaccccatggactgtagcctaccaggctcctccatccacaggattttaaccaggcaagaatactggagtgggatgccatttccttctccaggggatcttcctgacctaggaattgaacccaggtctcccgcattgcaggcagacgcttcactgtctgagccaccagggaagttcccctatgaaagaagcaaagtaaatataaaaagatgttaagttgaaagttttgccagaagcaccatgatacaatagacatgacatcccaatttggtgccaaaagaagcagcacatttttaagggaagatctaaaaatttgttatggaactcaaacttctcacctacacccacattgagggcataaaatactctggcttttagaaattgaaggagagaatttgtagagaagattaatttaggaaaaaaaaaaaaagcattgacgtactgtgaacttcattcctaccaggagggacagtgagaagttcccatgtctcttctcaaatacagtgaagggaacttcaggggaaaagcttggtaagcatcctttgtgattcaggggacagagtgaacccgcgttggattcctgcctggaaagctaaaaggcagggagacatgggctggctggctgctcccaccatggctggaaggagatatttctgcagctttgggactcacccacaaactcccagagtgggtctgggcagggacacctgggtgtctcccttggaccagatgtgagccactggtgcaagagagagttggtgtggtcaccttggaccaatccgagagaagccttcccaagaggtgaacagtcctcagcagggagaagctgaaatgatcaccaggtcctgtgagctatgggaagatttctgtgatgagctagaggagactgactgccctggacaagagagctgcagcagacagtcctggtgatggagagcctcctaaggaccaatcatgaaagaacatcagtcttccttacggccagtcaagcaagagcctccctgcccctctcctctcttctcccctgcctgctccatttcaggaccttaattctacctgggggactagaggaggaggaaccaagaaaggaagaagaaactctccgttcccacacttttatcacccacaggcttcccacctgtagtagccctggctattgagctgtggggtttggggtaattgcatgggtctcaacattctaatttctgggttgagacactatccaata

SEQ ID NO: 45205 - DNA, 1786 bp, Bovine  19866881334929
  misc_feature (1)..(1): n is a, c, g, or t
nttgagacttttcctatagcagcaataataatctacagtctcatttttaatggctgtctagtattccatggtatgactgtatcatgatttaggtaactgcttcccagttgactgacattcaggctttaccagctttgcttcttgtgaacagtgaaaaaaacaaaagtggaaaaaaaagtgaaagttgctcagtcacatccaactctttatgaccccatggctatacagtcagtccatggaattctccaggccacagaactggagtgggtagcctatcccttctccaggggatcttcccaacccagggatcgaacccaggtcttgaacccaggtctcctgcattgcaggcagattctttaccacctgagccacaagggaagcctaagaatactggagtgggtagcctatcccttctccaggggatcttcctaacccagggaatgaaccagggtctcctgcattgcaggcagattttttaccaactgagctatcagggagaatcaaatggttggttttttgaaatgtttacacagcaagccttggtaataactgagtttacatgcattggtcttcaaccaaagctccttttatattaataatccactaatgagggtaatcaattagttttggcatgagctctatgaaaacacacagcataatgtgggctcttgccttgcattccatcagaattaggcgagtcattaagggacctgtcagacaccccgcctcactgtcctgttgtgccactaggttgagcaacagactttgccaaaaggcttcttccctctccctctaaaggtgacccagaatgccttttctttcctatggtttttgcgttttcctttcatgaacatcacaaacctgggcactcccttctttcccagttttgaatctggactttcaaagtgattaatgcaaggccctctgggttctccttttctgccaccttctagcccctgattgctagaagacaaatcttgagaattccattcttggtcttgcagtcagttgcaaagacccctctcgttccttccctaaacccagcgtgtttgaacaatcacatccagtctcccctgtcttcagtggcctttataaatgctgtgtgagtcatgttcctgtaaaacacataagaaaagaagaatcggggaaccacacagacttcagccttaatggacgtgtaaatgaatattaatagttatctgtacaacagggtctggtgcaatgtcaaactgggttcatgtccggtggatttaaagtagggccctgctgttttgttgcaagtaaccaaaatagatggctgccttgtaataagtatcgatgtgcaaactcacgatgattaatgccttcttgttgattttcatttctctttaggaaaacttagcaagactccagagggcctttgcaaggaagtgggaattcatctttatgcaagcagaagcacaagtcaagtaggtgaacttcacaggaccccttgcaaagagaaaaagactctctggaatttagaggtggtatgagagtggggtttccttccatccagccgtggttggtcactgtctctctcatgacaacaactgggcagaaatcaaggtcaggatggataagttgcatttctatcacccacgataccctgaaataatctccaaagtgtgtgttccagcaggtaatggggtccctcccaaatgtgtaactctggttctaagaagctgtacctaattcccaaggagatttccaaatcttctgtgcttggaagctgaaaaacactagacccactttatttgttggtctg

SEQ ID NO: 45206 - DNA, 1215 bp, Bovine  19866881372362
  misc_feature (1)..(1): n is a, c, g, or t
ntccccgcattgaataaggttctggaggccttggagaggaaggtggggaggtggggaaccagccctcctggagcattcctggctccgttctcaatctcagtcctcccaccaaccttccagccacagctttaaaataaaaaaagaaaaattggctataccatgcagcatgcctgatcttattaatatttccctgaccagggatcaaacccatgtcccctgcactgagagcaaggagtcccaaccactggcccgccaggaaagtccccagtcgcagcttctctatctccacttttgcagattaaaaaatgagtctcataaagattcagtgccttggccagggtcagtggctagtgagtagtggagctgagattgccgtcgggcccccagctccccttggcctctccggcactctccccctcggctcggagacgacttcatttctgaggaaggcaggcacacagacaggaaaggaatgggtgccagggggaggtcaggatgagatatttgtgagtggggtttgttctgatttagcaaaaacactctgctctgtgggccgggctgcggctgctggctgtgtggtcagggtttgcaaagcttccaaagatccttttgctagaagggctttaaaagctgcaagctctcagcagtttctatcagttgggattttcttccctgcagactgaatcctgtcagggttttactggcttctgtgttcccagactgacctgtggtctctgtcatctgagctgcacggctctgtcctctcaccagttcctgtccccggtatctcctcgggaaagggttcttcaccagctccatctcctggtccccaacatccgcctcgtcactctgtcagaaccctctggtttctccaagaagttgagcacatcagggacaaaggaacgccaggacctacttttgatccagatttgggggtttgcttcttttcctggtatcatattttttaaaaataattttgcaagttttttaatctatttaaattaatttttttttttttttttggccataccctgaggtatatgagatcataattccccaaccagggatcgaaaccatacccccggcattggaaggcagagtcttaaccactgggccatgggagaagtccccaggctcatattttaaaagagctctcaaacaccagggcgccgtgagaaattactgcttgaggggctggggtgagatccgaggtca

SEQ ID NO: 45207 - DNA, 1393 bp, Bovine  19866881385670
  misc_feature (1)..(1): n is a, c, g, or t
ntatgtacctctttgtctggctgttcatctgtatcctttaataaactggtaagtgaaagtgtttcccagagttctgtgagacactgaacaaattaaccaaacccaaggaaggggtcgtgggaacttctgtttatagccaagtcagacaaaagttgtggggaacctacggactcgttatgactggcatctgaagcggggtgagtgaaagttgctcagttgtgtccgactcttcgtgaccccttggactctacagtccatggaattctccaggccagaatactggagtgggtaccctttcccttctccaggggatcttcccgaccaagggaatgaactcaggtctcctgcactgcgggcggactctttaacgtctgagccaccagggaagcccatggtggcgtgagagtaaagggaaaacacagggaaaggaagactgtattttttccctacacagcatcccaagaatgaagtatatacatagtacatagtatatgtacatatacatatacatataagaggtacatagtatatgaaggggaagaaggagagatgctgtcaggctccaaggaaaatgggcagtgagggctggcttgcagctgtgggaagtgattactcaaggggagcaagggcatggaatacaaagcattctgggagagtgaccatcattctgactttagaaatacaacgcaaatgtgctgctgcattccctaggagatcagggcctcttgcgggaaggaaagccggagacagaatgtgagaagggtgaacaggagagtgagtttgcatcccctttggtacgtgtactttcaaaatgatgatgcacaaggggggaccgggcaggaagaggatctgaatgggaagggaatgaaaagcagagcagcacagcagacacagaagaaaaaaggttgcttcttattaattcattcatctctctttcttcacgtgggagaaaaaggggaggaaagacaatataaagaaagaattccttaattatgggccatccagagaaaagatatgcaacagagaaactcaggttgagggaagggccatggaggtgaatgtggccccttagacagaagagcatacgccaggccagctatcacggcctttctaggtcttggtctggatacaggcaccctgtctacagtgttacctctggtgttttctttcctatcacctaacatgagctgggaacgagaagcaaggactctgaggcatctggaatcacataaaagcactgttgtaatgacctccttcggtccccattttttcctccctgaaactgtcattagacagtaagttcacagacttctatcacctcagcaggtttttaatagacccttaggatcctgcagtcccttgctcattatctcatttcatgaattacacttca

SEQ ID NO: 45208 - DNA, 1277 bp, Bovine  19866881415794
  misc_feature (1)..(1): n is a, c, g, or t
ncccaaggaaggttagagcgtgcggacgccgggatcctcacccactgctggaaggaagccgggtcgggggtgaaatgcagcggccattctgactctgcgccagcagcactaggcaattgtgtttttaggaagggaagtgaagaacaacttatccagctgaaaccgtgaagaccagtggctttaggggagcccctgcccagacgcgcacccagcagcagcaggggcagcagcagcagcagcagcagcagcagcgggcaggcggtccccccgcggaggcacaggcaggtgtgccgcgtgtgtgctgcacacaccatacactggacacggaagcgtgcagcggccaggcagcacatgcactggtgtacgcagccgtgcacacgcccatgtgcgtgtttacaccacaggcacttacaagagcgtctcgtgcaaggttcataagcaaccacgtgtttggctgtagagctttacctcagactcctaagatgcccatctaaagcatttaccttaagagacatctataaacccgattttcctcaggacaaagccatttgtgtcagaggaaatggcttctgtgcttctgtttctgtccatactacaagtaggggggagtgtgctccccggggggctggtttacgagggatttcaaggcatccctggatttcaaagccacttggtcctaactcctccgacaacccctctttgtagtacagcacttaaaaaagagaagcctctgtttatctggcagaggaaacaaccacgcacgggaggctgcgtggctcagggcggctccagccgggcagcgagcggcgaggtgagggtttctgggaatgaggctctgccatgtagggcgcctcctctggagaactggagttcacgctctgctaggggagaactagctttggtctgggtctggaagcaggaggcttcttagggtcctgcacctcaggggacgggagcaaatgccagatcctggcaacataggcagtgcttccctggtggccctccccatgtcctggcaccatgctgctgcaagccccggagtcctacagcttcttgggaagagcaaaggggccctgggaaatagaccacagggcagaagccggtctgcttggtaccacagtccctccgttctgaggcaaagcagagaaaccagctctctgagttgactttaaaaataagacagtaataatagctaccatttattgagtagggtcacgagctggttgctctaataaatggatgtgctttgcacatatctgtgtccccatcctcaactg

SEQ ID NO: 45209 - DNA, 1382 bp, Bovine  19866881473657
  misc_feature (1)..(1): n is a, c, g, or t
ngaggggatgggaggaaatagcttgataaaatagaagcagcaagaagcccattcaccacaactagagaaagcccgtgcacagcagcaaagacccagtgcagccaaaaatgaatacatacacattaaaaagcaacaaaacagttgtatatacatgtatatatatccacgactcacacacacatacatgcgtacagctaacatttcctgagtgtttactgtgtgctcagcactgtgcagaaggcgttccatgtattatttcatttactccttgcaacaataattctgtgaggtatgtgggttgaagagtgttcccccaaaattcatgttcacttggaacctcagaatgtgaccttacttggggctttcctggtggtccagtggttaagactgtgcttccactgcagtgggcacaggtttgatccctgggggaggaataagatcccacatgccacgtggtgcagccgaaagattaaaaaaaaaaaaaaaaaaaaaaggtgaccttatttgaaaataagggctttgcagacgcaaagaaaggtagcatactggatctgaatgggccctaactcccgggagagtgacttaataagagacagaaaaggacatagagacacagggaaggcgtatctggaagaaggatagaggcagagttgtggggccgcaagatagtagctgctgctgctgctgctaagtcgcttcagtcgtgtccaactctgtgcgaccccatagatggcagcccaccaagctcccccgtccctgggattctccaggcaagaacactggagtgggttgccatttccttctccaatgcgtgaaagtgaaaagtgaaagtgaagtcactcagtcatgtccaactcttagtgaacccatggactgcagcccaccaggctcctccgtccatgggatttcccaggcaagagtactggagtggggtgccattgccttctccgttcacccatctactgttatgcaaatatgtttggtggaaactcttgataactgttggaccattaaaacatacataacatgaaggctaagaaagtatcaaaatttatgaggagttgcactagataaaaactccctaacatactgttctatgagattcttcatttttagctttcatcaaaacacaaatgactgagcaaactcaacaaaccaaatccctttcaccagacgacttgcagattagtgttgaaagtgagttaaatgatggcaacttgaaaagtataaaaggctccaaattcaagaaaaattttcatttacacataaatttctggaaagattatgggtgatgctttcccccaccttggcttccaaactctctgaatgagttaactgtaactaaaaaaaaaattgtgtgtaagactgaactgcctgggaaa

SEQ ID NO: 45210 - DNA, 1384 bp, Bovine  19866881474705
  misc_feature (1)..(1): n is a, c, g, or t
ngcaggagcgaggctcttccaaatcgtcctcgtcaaagccgtggaaagttgaggtgtcactttctgacgtggaaccgaataagtcctccgtggtgcgtgccgcggccgctgcctccttctccttcctgcctttctcctcccaaatgaagctgacatgtatgatgaatatatcagcacatgggttaagcaacagacagcattattaatattcttattacattattacagtgttattcttaatagcaagaccatacatcattccacaccaaaggcattaactgggagcgtcacctggtgacaggtgtttggggtaagaggacaaagccaacatctccaaggaaaagggttttcccctccccagaaaggcattgtctctactacaatatatttgtccgcagctctgacagcgccagattcaaccacgatctttttctttcttctcttcggaaggcacacattcacatgcacgctcgctccacccgccccagacaatgagttttcttggtggtttttaagcctggttggtatttctttggtgttttcagctggcggttctttgcacaatgtttgtccttcattttgacagtcagctttacaaaggtattactgtcagataacccggtcaaggtggttaagcctccatccgttttatttttatttttacccgtttctaatcccattcttcccaagccctttcaattctgcccttacaacatgtagttcatttgcactgaaagcaaaaagaagttggaaagtctgataagtggtaggtattcaaagagcctcttgctttgtttacccctggaggacatgtctgtgtgctgcacccacacacatgcacactcacaatcacgcatgtgtgcacacaggcatgcaggcacgtgaacgcacgctccaggtcttaaacacgcccaggtctaagttactccacaaagtctggggttgttcagtctaactcagagcactcagaaagtgggaactaggggtggcaaagctgaataaaagacagtatcctgaaatctataaaacttgggtacaaactctttcacgttctaaatcggccccaggactgccccctattgaggtcacaaggttccacttacagtgtcagtttcaggaatctcattttttctcccaggagaagtaggtagtggagtagatgggaaggaaaagacggctttcccaagctccacactcttccttggaaggactccagggaggccctagagaagtattcacccacctgccttcacaaagcatatcccatgggctaatgccacctgtttattccccaggtgtcaactatttcaggaacatcagagtcagacctagactaaattatccaccaaaactaattcttggcaaatgcaacgagaacacctag

SEQ ID NO: 45211 - DNA, 945 bp, Bovine  19866881890435
  misc_feature (1)..(1): n is a, c, g, or t
nctgtttttgatgtggaccatgttaaaactctttactgaacttgttacaatattgtttctgttttatgtctttgttcttttggttgttgtttagttttggtcatggggcatgtgggatccgagctcctggactggagattgaaccggtatcctctgcattggaaggcaaattctaaccactggaccactggggaagtctcctggctgtatttaaatgtagagaattaggtttcttctttaggaggttttgttcaaattatctgggacttaatcacagtagaccactctttcaaactttcaatgaatttgctcagaaaattttcatagcgatatgaatttcatatgcatatgaatatagaattctgggcaagagaaattgctcttgagtcaggggtagtttagggttctgttgttagtgtcaataatgtctctgcctgttacagccccgtgttgggaagttcagtacagatatgcaggaaggtgaccttaatagacaaaaggcgggcagcctcaggacgctgggggcccaccagcagcctcactcttaagatcatgcctgtggctccagaagcgaggtggtctttaaaccaagttcagcgctgtcgcaaagcccatgtgtttattttacccgaaggacataaggcatgtcagagccttaggctctcaaaccagggccctggtttagaattcagtggaaattactatcatgaatgatacttgcttgatttcagatctcctctgaaaatctctcattctctccaaggcagagtggacagcaggttgagggggcactgagggccaagaacagggccgttgagaagccccgattgatagtgagaaagaggggaggtaggttccccctctcccagcctgcttgcatggttgagaccataccacggtctaaggacagccctgtagcacccacctatgtgttccagatactca

SEQ ID NO: 45212 - DNA, 766 bp, Bovine  19866882050605
  misc_feature (1)..(1): n is a, c, g, or t
nctgagagacttgcctacccccagggcctaagttccatctctgacctggaaccgaggttccagccttgattccacctcaggcatcagaggccaagtcccatccctctctgttccacgggatggaccatcctcatcaaaacggccaagagctgggatgcttctgtcagccttgtactgatcctgatcactttctggagaggacagagatgatgagtgaggcagggaggcacgagaggcagaagaggcatgagtgagagtatctgctgtgcctggttgttcctgcaattttatttggagtgatggagaacgagtgagttttgacgcctcctccttgacagagagcaccccaggtaggggcactgctcccgatccctctgctgtctcagcagcagcctttagctcaccaggaggaaatgaggtctgtgcaacagtacgaagcatcattttgcccttcgactcagagtgcttcataagtgaaaaagggcttttgagggaggcttggaaaaaaaagttttcagcgatgaggtttgctcactgtggttaacgataattattaaataggtagggtgagctagtgcttgttttccttattattaactgtatttatgggtttttattaagttgtgcccagctgagataattgtaaaactatctgcttaagactcttagggttcccattctattttctttcatttcaaagatggagtcttttcgttactcaaggctcatgctataaaccaggagtcagcacacttcttctgtaaag

SEQ ID NO: 45213 - DNA, 1736 bp, Bovine  19866880294021
  misc_feature (1)..(1): n is a, c, g, or t
natagcaccacccttatggcagaaagtgaagaggaactaaagagcctcttgatgaaagtaaaagaggttcattccccggcaccttcaccaaaagaaaaaagaaaaaaaaaaaaaaaaagaaagaaagtaaaagaggagagcgaaaaagttggcttaaagttcaacattcagaaaacaaagatcatggcatctggtcccatcacttcatggcaaatagatggggtaacagtggaaacagtgagagactttattgtggggggctccaaaatcacggcagatggtgattgcagccatgaaataaaaagacacttactgcttggaagaaaagttatgaccaacctacacagcattttaaaaagcagagacattactttgccaacaaaggtccatctagtcaaggctatggtttttccagtggtcatgtatggatgtgagagttggactacaaagaaagctgagtgccgaagaattgatgcttttgaactgtggtactggagaagactcttgagagtcccttggactgcaaggagatccaaccagtccatcctaaaggaaatcagtcctgaatattcattggaaggactgatgctgaagctgaaactccaatactttagccacctgatgggaagagctgattcatttgaaaagaccctgatgctgggaaagattgaaagcaagaggagaaggggacgacagaggatgagacggttggatggcatcaccgactcaatggacatgaatctgagtaaactctgggagatgctgaaggactggggaaatggcatcctgcagtccatggggtcacaaagattcggataggatgtagcgactgaacatcaacaacagcaaattccatttctaaattcatctcatcagtaaacttcccaggtggtgctggtggcaaagaacccacctgccagtgctaggagatgttaaagacacggattcaatccttggtttgcgaggatcccctggagcaaggcatggcaatccacaccagtattctttcctggaggatatccatggacaagggagcctagaaggctacagtgcatagagtcatgaagagttggacatgaccgaagtgacttagcggaagaccataataggggtttggttttggttaaatttgggaggaggaggacaagtggcatgctgataaagtcatttctccataaaatagaaataattttattgttggaaaaggaaataaagtgaatattcaaaaggcacataatggtcacaaaaaccaaggtctcataattcctatacgcaagaccaggagaaaggatgaggaaataagttgagcaagttttgaagagtataatttagaggcctgatgatataaaatagctacaatcattttcaaaacatgcatagacaaacactgcagccagggattgtagtcggcattgcatttttccagagaccacagggaagtaatatgagagtgataattaattcttgtattaaaaaaaaatgtattccctgctgtttctctataggaagagagcaagagaagcaaaggatggttttaaaagaaaaaaaaaagaagtagcaacatattttcaattcagtacagcacttttttttcccttttggtattggaaattatttttcagtgtgctcactaaatttgacttgttgaagcactactttttcttccctaaagagtgaacagacatttctaacataggagaagaaaagaagcattaagaaaataagtttttcaagag

SEQ ID NO: 45214 - DNA, 812 bp, Bovine  19866880367522
  misc_feature (1)..(1): n is a, c, g, or t
naaacatttatttttaccagttatttataacttgcaatagcatctccttcaagaatatggagccccttgtttttcctaaaattgagcgctttctctggacggcaggttttggccgggtatgtgctgcctgaaacaaagtttttcctgaggtttttgtgcattcaatatatttgtggtttaatctgaagaaatacggcttactgaatcttctgtctccctcagcactaccttcttgccaactcttattttggactggaatgtacttcaaaaggaaaacgtgtttgccacagttgaaaaatgattgctgttaatgccagggtcttggtatcagctcttcaaaccactatcattaatcttaattagaaaactaaagcaaaggtttttaccatttgcaattaatatgggacctaatttggattcagattccaagctgaactcacttgtctgcctgtgttggacagcgtgttttatacctgccagtaccaatattgttctagtgaccgaggagagagcagtgccttgactgacatcagaataatctgtgtcgaccgtaagcattaatcttatttagaaagtgaagctgaactttgtcaaagaagaaagatctagggggaaaaagaaagaggagagaaattgacttcaaggctccacatagtatcaaagcaccaaggtttcatctttgacttttttccgtgggagaggtggtagatttggccatttgtaatgaaggtcttgtcctgcactctttcgtgtgttattcctcattcttcagaggagacatgtgacacttgagctcttcatgggaaaactgt

SEQ ID NO: 45215 - DNA, 2098 bp, Bovine  19866880423727
  misc_feature (1)..(1): n is a, c, g, or t
ncagctttagcatcattccttccaaagaaatcccagggctgatctccttcagaatggcttggttggatctcccttgcagtctaaaactcaatgatagatgttagctgaacctgttgagaaaatcacttcacaatgtatatacatcaagccatcatggtcaaaccttaaatctatatggtgatacatgtcaattatttctcagtaaaactggaaaaaatagtatgaagacagtaaagaaaaaaatttcctcagaataagtctttatatagcaaaactgttgcctgtctttctgattgaaagtaccataaaagaagtaattttttcttctttttattccccacgaactctgtgcctttcattgcagacagcaccaggtgactctaaattaagctggaatgaaaataccgagtggacatagggtatcacacagtgtttaagggagggctggggacatcggctcacaatagggaaaggaagctttcaagtctcaagggcattaattgctggaaaatttctgcactggtaggaagcaggaacaaattccagtcatttgtctcaccttgtcactcccctcatgattcaaaatgtgagagagaggattgattgacgaagcttagtttaattacctacccacatttactgtatctcagaaatgaaaagagtgatctgtgtgtgatggaaggatcctctgggattttttcatagcactgtattttactgtttccccagatcattcagaatgggagagaaatatgtctccttcccaagacaaagagtaccattaggaacactggtagtggttgcctggtaaccaaaaaccaaaccaagggaaaaatgcacataaccagttttcttatattgcatgaaggtgaagtgtttgaggaacactctggacctctttttgttattacactgtgcaatgaaaaccaaacagagtagcagctaagagtttcagggctctatagggccatgtctttggcaaaattgccttctcttctcccagatttagtcattctccagataactggtagactgatgtgattttctcagtgcaaatgaactaatttatttgagcctttttctgagactgacagttaattcttggtggaggccagaccccacagttggtggtgtgatggtagtggagggagtgaattatgactgtgctgatttcttggagttttctgcaacatgtggaaggattacatgatgccttgtcgttgcaaataagctagtacagaaccaagatgtagtattcattagaaccataatgcaagtattatagctaatttgaggaaagttccagaaaaagaaaggaaactgttctctgctggcatgagcgacggcaggagtaagctattctgacaggcattgtgtttgtgtttcctgtgctttttctatttatgtgcataaaaaattaaacctttgactggatagcagttggcaatggttcatttttattcaccactgtccaccgactggattgaataattacaatttgtcctaccatctgagactttccctgacatttggctgcctctgccctgctgctcatttatgttgaagtttgtacctgctcattaaccgatttgtcctaaaaataactttgaaagtctcagatcctgagctgttagcagttagcccacatagttcagactgtaaaatctagcgtctggctagagctcaaaaagctggctctgttctcatttttaagactaaggtgaagacatttattttgaaactgcttctgattacctctgaaaactataaaatactgaaaactatcatgagagatgtgcctcactgtgctgcagtgttcattacatcatcccaggcatcagaattcaattatgatatctatcttggacatgtggtgaaagataccatcgcttgtattttccacaaaaccttaagcccaagcacttagcaatagcactgtgtttctctattttttggttaaatatttccatgcaaacgttttgcacttttttagaaataaagtgctaaaattattgacatttttagagtgccagaacttatttggtaacatttgcatttgatctttgagttgaatatttttcaagtttggctaacccaa

SEQ ID NO: 45216 - DNA, 745 bp, Bovine  19866880461487
  misc_feature (1)..(1): n is a, c, g, or t
naaaagaccctgatgctgggaaccattgaaggcaggaggagaaagggacgacagaggacgaggtggttggatggcatcaccgactccaatggacatgagtttgagcaagctctgggagctggtgatggtcagggaggcctggcgtgctgcagcccatggggtcgcagagagtcagacatgactgagcaactgaactgaacctgaacctgtgccatttgccgttgattttagctatgaatataagaaatagagaccttgaaacaatagttcttattttatgttcgtgataaaagttttttgaggagaaaggtgttttaaggtttgatatataaatgacttacttattttatatgattatatcatgagacagcatttatattttccttcttaaaggtgtgtttatgaacgtgtgtcctcgtgattgtgattacatttttttcttacttttttgctctctcttactgtatcaccattgttatactttaaataatagtagttcaaattatcaaatatcccaagggcattgatattctttcagtgacttcaagatatattcccaacttacaacacacttgtaatgaattccacatctgtgtagctgaaaggcattttatgtatcagggtctccagggcttttcaggtctggagattataatgcagcaattaaagcgagggttgtagtagcattctcatttttgaacagagctccatcttcgatacgacagaaaatgtttaattcggacat

SEQ ID NO: 45217 - DNA, 831 bp, Bovine  19866880545464
  misc_feature (1)..(1): n is a, c, g, or t
nggaagcataaaaatgtggaaaccaattaaatctacttcgaaaaaatgttgaaatccaagtaatttggatcccaaaaataatcagtggttcatatcctgttccaaatgagaagtcatcttctcagccaattgctgctgtaacattcagtgagctcagtgtcagaccagctctgtgtatttttgccacaacttaaataggtttagctttcaagtatggatcgagagaaaaattatatggggggaaaaaaaaaacttatgaacaactttgaagcattacagctcttgttttatagcataatgataaaaggtgcctgaggtgagatcctgcactgctacttactggctcagggaccttgtgaaaattacttatatcctctgtggctcaggcttttcatatgtaaaatggtgataacaataatcattcagggttgttaagataattaaatgtcataatacacaggaagtgtttagaagagtggtggcagagagtgagggctgtaatagcattacatgcagtcattatccttggatggtttccctttatgttccacctataatctatcaccgtgttccaatcacatccaagaaaacagcagaataaatacatacacacacctgaagcttatattgttaatgacaacagtacagttgatgtcaagtaggagacaaaaccgttgtgaaaaactcaagaaatgccttagcatggaggaggaatttaccattttttattcagaatctcgattttacttctatttaccccattcaatcttttcaccaagaactgtccagataattgctcatgggctgctttcagaaatatatatgccaggg

SEQ ID NO: 45218 - DNA, 1127 bp, Bovine  19866880590364
  misc_feature (1)..(1): n is a, c, g, or t
nagtcagtgatgctaattgtcttaatgtactaataatctgatgaattaataaatcaatgtttaattctatatttggaacatacatatataggcttagaattattacagtgagagcagattggtattgctcggagatacagagcaggtgcataagtagaaaactgtagacagagaccagtcgggaggctactaaaatactcctggcaaaaggtcatgaacaaatacatgaaaaagtatgactcttatctcattgtattttactattcagctgcttaaagagaaatatccttattataaattgcctcataaatttaaagaactgaaatcattaagcgtggaaagttgactctagtaaattacacaggtcctggctgtcattctaagatgggaagttctgaggaaatgccatattttctgaagttatatatcttagtaactaaatgaggactgcagtgggaaatcatcactctgtctcaaactctgtaactctgtatagcctggctcatctttttttttttttttttttgcatttcacagtaagtaaaaaaactgaaagactgggttgatgactgttatatcacaaccattaagaggaaataaggcaaactgtccatcaaaggagtgacaacaacaaaaaagaaattatcgagtttcaaaacgtccaaaactgatagccttagtagcacagtcattttccagtggtctccccttcaaatttcatgttctaataagtaaaaaggccaagcagatggccactggtctggaaaaaaaaatcaccctggaagtttcataagtgtgatgtttctgagttgtatatattatctacccacatttttcatacagatagtgtaagatcaagccactcaagatggctgttctcttgctctctatacactccagtgcctcatctatatcctactcacctaactaatcttttacatacttgctccagaccccaactaatgaccggtctaacttcagccactgtgatagaattgtgtccccctttctggtttcccaagaaaatgatgagctaaccctgacattgattcacatataattggttaccttccctgctccctgcccctgagcgaaggctgcccccatgccctgcccaccttctgcag

SEQ ID NO: 45219 - DNA, 774 bp, Bovine  19866880738144
  misc_feature (1)..(1): n is a, c, g, or t
ntgacttgttttaggtggccttcttgttttagctttaagtaattatgattcaacatcctgtaagtatgaatagaacaacagtggattttagaatagatgatagaataaagtcaaacattctgttcagctctcatattttacaatattgctacacagaaggttagtaggtcaccagaacacagaaatcaacatgagacaagatttgtgtcagttctcatgtacaaagatccttttttacattacctgttcatctgacaagaagatgtgtttgcagttatttgtatacttttaattgtgatacaaaataattgagtgtctactgtgaaagttctgtggcgatctaggcatgaaatgtctgagtctcaggaacctatagatggagccttcagaatctctgagaagcatacatgccatgggaattggaatttgaaaactaaatatttaatagaaagtatgccaataacagatcaaataaacataaatgttctattccagttcacaattttagtgctccatgaaacaattttctaaacttatgtttaagttagtaggccaacactgcagctgttgcttttagacatgagtggattgacttctggcttattcagtgattggtaattatataacatggttttatttattttatttttttaacatggttttaaaaacgaccttaatttctcttttctatcctgaactatgggaacattatttaacaagattttacatttgaattcttagagagaatactaccctaacataataatacttatt

SEQ ID NO: 45220 - DNA, 688 bp, Bovine  19866880753810
  misc_feature (1)..(1): n is a, c, g, or t
ntcaaaattacacttaatatggcaccagcatgtgtgatccaataagattactgacatatattaattactgtaaaatgaaacaaaacactgacttagactgaataaaacagtagttttaaaaaaaacctagttccagttctattcaacatgtcttgcttttcattatacagtgtaaactgataaatagacattagtccatattatcaaaaatgtattctatgagtggaaattgcatctttagaaaaacacaaatatatagttaattgccataagtatataaaataattggagtgataaaaaattttaattaaaaattatgctttcaaaaactgaaagtaatattgggacacactcagaataatggaggaatttccacaaaagacaaagacttttggggaaaagagaatattttaaggaatatgaaaatagatataataaaataactatcagagataggttaggagttcatattgcctgaaacaaatggtacttaaagagaatgtagctcattaaaatgcaaaggacatgaagacagcaacaaggtaagctccttgacatctctcctggcaagatattttttagatctgactcctgaagtcaatctaaccaatgcaaaaataagcaaatgagactatatcaaactaaaatatttctgcatagtaaaggaaattatgaaaaaaattaaaag

SEQ ID NO: 45221 - DNA, 1344 bp, Bovine  19866880809412
  misc_feature (1)..(1): n is a, c, g, or t
ntgagtagaaacaaagatattgttatatgttagaaatgtatataggtgttacatcactggggtggaaactaagtcattaacttgcgaatggaaagaaaagggaaaatatcaagaaatattcataatggtgagttgaattgtagcatttggaaagtagggaatggctgtttctagttttctaatatgatcattacattcccttgtattgcaattaaagaggacaaaagtgtcttgcacgtaggagctaggtgggagtttggagaatatgcattatttacaggagagaacaaagtttactagtgaccaattagacttaaaagtttttatgccttctgatttaatgttattttgttagaagtattcatggcatattttttactttttaagtgtgatgatcaaaggaatgactttgataagttaaattcacaaaacagcattaagcaatttaatatatttaatcaaatctaagtgaccttgtccaaggtgtcttttctttcattgatctatttaattcttagttatttgccttgaagtcatgttttggatgtgcacacaggtactttgctttttcctctgtggcaatggtaacattaggacatgaaagaagacattaaacttgaaagaacacaggtagtagtttaaaggcaattttatttttcaagtccccatttggtagtcattctccctgactcttcctgaaccacaggaaaatgcccaggtgtaggagatagcatctgtgaaaaatcaagggagagtgagtgaggacgtgctaggtagcttacggaatgcatccatcctcagatctacagtcagggtcatattagcagaatacaacctagggcttgtcagaagcacacgaacttttcattttgtatttgcaggacaaataattctattttttgttgttatttagtcgctaagtcatgtctgactctttgtgaccccatggactatatagcctgccaggctcctctgtccgtgggatttcccaggcaacaatacttgagtgtgtttccatttccttctccaggggatcttcctaacctgagttaggcagacaagcttcggcaggcagatccagggaagcaccaattctatttttgtatcatttatttatttaggttctctttcatgacattcatgagagattataaattcaatagcgagtctggaaaaatagcttttggaccaagaaacattgaagtacaacctctctatgcttattattccattgactactggatgaatgtttctatttcaacatcaaataacttgaaagtaagtctgaggagcacctgattagttggctagttaggtgattgttgcaaagtaagtttccattca

SEQ ID NO: 45222 - DNA, 1800 bp, Bovine  19866880938368
  misc_feature (1)..(1): n is a, c, g, or t
ntttgcctatattagcaacccagttatcataaatccattttaatttgaaactttcaatcaccacagcactacttaaaactgtatgtctctttttaaactttattgtattatggttgttatacagtaagaaacatttaatcacagtctatgctcactgaatctcctatcagtgatgggactgactctctgctggactatgtcacttgagtcagggtgctaatatgatctccttcagttttcagagcaatgcctgatggaaaacctgtcaccgctcaggaggctgaacaagccactcgattcctatggattcgagtctatggaagaggttcaaaatctttttatttatttatttttttaaatataacttttagacagaagtcaacttgcccatatgatattgtttgtatagaaatcaaatagtatgtaagatatacatttggtttataaaaagacttaagatgttctgactgagtaaagaagtagggacatacagacagcatctgtgtgatttctgcctaatccattatgtaggacatattgagtaagaagatgtattgtgtctgtttttcctatcaatattctgcaactgagacacagaaaagccaatagacttttttcaaagaagccatttaatgccttccaagtagatacaggacataccaaagggaacacactaagatattctttcttttgctgagtgtagaggtctctcttggtggatgcattattttttttcatgattgtgacgggaatttccacttggatgtattatttagaagaaaacaaaataattttctataaagaatgactttaattttaaactgcttgtatagaaacacaaagcaaagggcagaacacctagaataaagtcttgcaattgtgaatatcataaaataactctttgaaatagtgtagtgtgaagctaaatgagtgtgataaccagttttgtgcgttttaaatgatggtgtgtgtttttggcacttgctacttataaatcatactcagtgtaatgtgttttatttttgtgcccttgaatatcaacacaaacgtaagtatgaaggaaatcttgatgataccttttctactcttgtttcagtggtgatactttgttctcaaacttcttctctgcaggagataaggaggtcaatcctaggactgagttggatatcacatcagcacactgaccggtgtcttctctctgaactggtgaagcactgcttgattggcagcatagggctgtctcccatgctcattcttgctgttcgttttgtttttccgttttatgtgattaagcttcattatgaggattttcaggtcacccacagttaaatgttattctagctgatgggcactttgatcagcttgtctcacaacttttctttgaaaatcgcatgttccctttcagaagatttctcggcaaaaatggttttaaattaagtcatcaaagaaaaaataatgcacagaggccaattaatatgctcactgaaatggactgtgctccttcttctttctttaatcctgacccacgcagttaatttagaggacacgtatttgacatgtgactaacggaaaaaaagagaaagaaaaaaaaaaatcttctaattcagagtgcctatgcattggccttagaaattattttctgagtagttcagtgggatgagaaaaccataccacttgctgtactattgttactgttgaaatgtgtgaactttctcctataatctattgattgttgcgagttgtgcacttgccaatgaataaatcagtcctgaatattcattggaaggactgatgctgaag

SEQ ID NO: 45223 - DNA, 858 bp, Bovine  19866880967447
  misc_feature (1)..(1): n is a, c, g, or t
nactaaaggtggaaatgttacttaacactttgactactgttttgttttaaagaatgaagattttcatcattgtgtgcagagggagaaaagaacatagagaacaaattctttattcaggatctagaaatacattctgaaggggaaagaaagaggcgtgttttgaagcaaagagatgtacaagaaattttgacaaaaagaattctcattcatatgcctaaagggtaaagtgtaaagtccctttgccactttgttcattaaaaatgattctgaaggtctactcagtctccagccacttcagattagctctttttcatgtcaaggactcacctgctgaaatgactttttgtttactcatttatttttttctcttttcagtgtctctcctatccagagtacttttagctcttagaaaagaaagcttcatacactattactacagtattcatgctctccccagtttaacaattttaagactcacaagatcaaaccttcttcctcaggtttagatattgccttttttttttttcctgtcaagaatgctacttattccagatatactaccgttagaataacttcctccctagacaatgataatctacaaggcatagagatcaatatcaattatctcaattcagatgtgaataataaatcagtaagccttaaaacaaacaaaatctgtctaagcttttaaaggtaacaaaaagaagaaactgaatgcaaactgtaagggaattacctcttgcttactcagaataccctttttctcttgattctttgtgtatctgtgtgttcggatgtgcagataatcagaaatgtctcaaaaggcaagacagctacaatcacagaaatactagatta

SEQ ID NO: 45224 - DNA, 1051 bp, Bovine  19866880968364
  misc_feature (1)..(1): n is a, c, g, or t
nctaaattgaaattaaactagattttgatcattccttgtttacggttagatcaaatcatgacaattctgtttttttattccacctattcagggcaaatatatttatatatttatgtgtgtgtgtgtgtgtgtgtgtgtacacacatatatatatatacactatatatatatagtgagtctacttgaatcattgaaaatatttagatatcattgtttcctttcttcctctgttatcccagctagagaagattacccacttaagaattacaaggcattcatgtgtataattatatacgtgatctcgtcccttagactgtatgccacagtgacagaacttccctttatccttttcttttgtaaatgtgttcagaaactgggaaagtagaataatgataaatgcataaattactcaaatggctacatttgatgggtgacttttgagagaattagcaatactttagagttcctttttttcttaaaaggacagggtctatgtttcactcatcctgtcttccgtagagcctcacacagtgctattgaaagttggtgtcaagaaataatttcagagcacaaggacagtgaagaaattagattgtccttcagactcaaaatgaggtaaaagtgtgctcattagtagccatcccctatgtgtttccaacttgtatatgagcaaacgttataaaaattagaagaaacattcaagaaacaagttcacacctctgtcaaaaagggacttaattattgaattatcttcatgtttctttccaacttcaaaacttttaattcttaatttcagtgattattcatactatatgtattccagtcacctaattaaaaacactctatcacttaacaaaataggaaaaggttgaagaaaagaaacgtagtctactcttttaccctggagaaacaaaccaaaacaatgataaaaatgttttaagaggggggaaagggtattgcattgaaatagctatcaaatttaggacttagagatacaagtgccacatgaagtggaaatttgtaaattgtggaaagagctgcttgtatcttg

SEQ ID NO: 45225 - DNA, 1152 bp, Bovine  19866880993776
  misc_feature (1)..(1): n is a, c, g, or t
naaatgttttattcaacttgcacatctcttctccacaatcgttgatttagaattcagctctctgataatgagtggaaattggggtctgaaagagaaaaacaccattttcttaaatgatgaatgctgcaggcacacattgtcttcaccttaaaaaaaaaataatgaaaccctgaaacactttcctaactgctaaaatgcttgacctttgaaaacaaagaaaaaaagagcaaattacaactacatatttaaaatatccaagatcgcatccctgacattacagcataatgacaagaataacatcaaaacctggtctgaaaggatttcagtggtattctctaggcaaatgtgtgacctgatgaggcaggcattgtgggagtaagtaaaaaacagacaatactttgtctttctgtggtggtggttgctgttattgttgttgccgttgataataaaaaggcctgatctcttcaggaaggctgtgctcaatcctttccctgggctgtacttcgctctcctattcaacctaaggacactgggcagcctcttcagctctgtaatgaaatctgagcaaaaaagcttttaaaataaatcagtcctgtttaaaccgcagctcagagagttgggacaactcattgtgagacttctctgtttttagctgtggagcaagctgttttgttttgactctctcataaacccaggtctaacacacatttacttggccattcttggaaaaagaaatcaaaagagccagtcctggagcgtctgagtactggtaagttcagagagctttcagcgtccaggggaggcaacagagaactcccatctgaatgactgcttcttaatggagggatgaaaggatatgatggacgcaaaggccatgttggacaagcgtctcggtggggaaatctgccaaccggacaacgcctcgcccagggaataaggatgcagttagaaccaccttattttcaaatggccaccatgacaagagctgttaagtattaaacagatgtctgctatccgtgattgcatttggatctcacaacttagcggtgtcagtagaactaatgactgagacagataaagtggcttacttcctgcatggattaagaattcggtataaaagccaaaataaagtgctgcacacctgccacattt

SEQ ID NO: 45226 - DNA, 1118 bp, Bovine  19866881027111
  misc_feature (1)..(1): n is a, c, g, or t
nttaaaaatacaataatgtaaactcataaattttgaaagaggatagattataatgtgatgtttgctattggctttatttctaataaaacagacaggaataaacctgaatacaatttatcctttaaactagttttttttctggagtgtgtgttacttttgaatgagaaatatttgttttatttaaaagaaatcaaccacattttagtcaataaataagcattgagcaaagcattatactcaacactgagttgctataatccatacttgaatttatcagaagcatgaagcagttttgaagagaggcaatctataaacactcataagagatactgaaatttttccaaactctgcaatatattattatgctggttaaaaaccagaaaccactttagtctcatccttgcctttaagattttaacccattgatttaatgtgagtattcaatgacccatcaatattcctttttaaatatttttctgattcacgtgtataggttcaatgttaatcaatttaataaatacttattagaaatctataaccatatgttgaggactgttttataaatgcttgctttattttttattgcaagatttaagcataaagactattgcaactcaagtctgcaaaaaaaaatctcctgtcatttctgttgttatctacctaattctatcacaaataaatcatgattcatatttttactgaagcagaaatatctttaaaatgatttctttataattccatactgaaaacaaatacagcagcttacaagaaaagtgtgtatgtctatgtatgtgtctgtctgtgtatccatcttgaagagttagtatactgagcagggctggaaaaaagtcgtgtggaagtcctcagagtggaacatgtcatcatgaaggaagaccctgccactcatcagagggagtggaggtgaaaggtgttaggagaccagagcaagcctgattcgtactggtgacaggggctgatggtggaagtaaacccaacttgtattacatttgtcctaagtcttctgacttttcagttcagtccctgtggtgaaaccactctctccttactgctgccgttgccgctctgttatcatgtgcagaagattaaaaacgctgtca

SEQ ID NO: 45227 - DNA, 1416 bp, Bovine  19866881079366
  misc_feature (1)..(1): n is a, c, g, or t
nttccctcaccctcctttccttatattttatcatatgcataaaggaatacaaagctgcctccatggtctttttgttgttgttgttcaagtttccttctgtccacaatcatgatcatgagtatggcggctaatatttattgaatgctaactctcccagatggctctatggtaaagaaccttcttgagaatgctggagccacaggagacactggttcgatccctgcattggaatgatcccccagggtaggcaatggggacccactccagtattcttgcctggaatattccatggacagaggagcctggtgggctaaagtccatggggtctcgaagagtcagacaggactgagcaactaacactttcactttcatacatactcagattccagagcctgcaacccagaaaagagaaccgtgacatgatttttcaggtagcattttctaataccagttttgaatgggattgagtggaattcatatcctcccagagaaaaataatatggtattggtaaactaatgactatatcacatcacagcccttaatgaaggaaaaaaaatgtgagacattggcacttaaaacaactatatatacatactgacatacaaatctaatagcctttacaaaaaaaaaaaaaaaaacaaggaaaacagtctgatcaatggggctgccaatctgatcaagatggcttgggctacttaggaaattgatagttgatgaagcaaaaagctctgaaacctctgccaaatctggcacagaattctactctgacaaccacagaacagaggatttgcaagttttctcttgctgtaacattttgccaatgtcaaaacagttcattctgcaagcctgccagtctcccacaaagctcttcattcagtttttaagggaagaacatagatggtaatcaaatgtctttgattcaaatggcattacagctgacacatgaaaagatttaaaagaaaggaaaaaataaactgacttcacaactcccatagtcttaaacaagaaaggctcatcactcaatagaatgagcacttcctatggtcttgacagccagaatttttgtacagcttattgcaatacaaattctcttgcatgcaattaaaaatgtgaatctaacttcagttttctagtattaattaataaagtggaaaataaaccatcataaaagttctcagcattcatgagaagtcatccagacagggtgtctatggtggtcaatgatatagattctggagtcagaagtcctggatttaaatcccagtaggttaggtcttaatctcctggcactgttaggaattatatatatatatatatatagctaatgacactagattcttgccttgcagtctaactgaaagggctccattctatgaccaaattgtcccccttttttcccctctgaacctctcaaa

SEQ ID NO: 45228 - DNA, 798 bp, Bovine  19866881147127
  misc_feature (1)..(1): n is a, c, g, or t
nttagaggtagcagaaaaattatcctaaaactaacaactgctctgacaatttctgatcagctcaacataaaattaatcaatgaaaatatctcacagcatagtcaggtattcaagttgtagcattctgtgaaacaaggaaatttttcaggttccattattagaacctatgagtgagttaagttcacttcttaagcatttttgaaaatggaatcaaaacattgcacttgggtggtttccaagactattttaagagataatggtggaggagtcagatttttcaaagtagtctgtgtgtaaaaagttggaaacctatatgtgtttgctttaggagggagttgaagcaagaaggagaagggagaagcagaggggagttgaggacaacaacaaaaaaagaagcaatccactattcctcaaagcatgggcctgtgtttatgaataatgtaaggagtatgtttaacattcattcacaagtgaaattctccacaaactctagactcaatcactactttcttcttgagtagcactcagtctttggaagtacaaatagaaatcacctaaaatcttgttaaaagtgtgaactcccagactgcactcctagagaacttacattttagaaagtatctcaggaaacttttctttagaaggcgtaggacccacaacttgcaaaatactgctttagattcttttatggagaaaaaaaaaaaaacccaagaatctaagatagtttaacctaacaatggtggtaatttctctttttgttgctatcaacaaaaatcaagctagcaatttttttgaaat

SEQ ID NO: 45229 - DNA, 1062 bp, Bovine  19866881148717
  misc_feature (1)..(1): n is a, c, g, or t
nagcctcctaggtttctttccttctttactttttaaaagccgctctggctctttttaatgctacagaacagaggttaggtcaggggtgcttttttctagctgatgttgccctcacagggtgattcagggaagccagctggccaggtgcaggcctctttgcactccttcacctctagtaacagaaagctgcagaattctcagctgagcacatagagtgaactcgctcaaaaggtgtcactggtcacgtgcacacactttgtggcaagcttcccattcttcagctagagatgatggatagtcttcctaaatggcttcgtatagatggcggcagcctggcaggaagacctggggaagagtacataagagtattagaacttcttgagtttcagttttaaggtttgtaaaatgtactaactgaccctaaactaatagggtttatataggatttctgctttatagaaacatgggggctgggggaatgtctttcaaatattgctgcaggtccattaaactggcttagctgcacattacccatttctgtatatttgaaagagtagaggaccatttatttgaacatgagttgtttcattatgttattgctgtgacataattttttttgtaggtgtctgatatcttttaaacccatactgagaatggatgcttaaagtttgaagaaatatcactttattttccattaagttaaagaaataggaataataagaatgaagaattcttactgaggaaaacaaattaatagataaatgggtcaattttaaaatgtactttgcagtcaccattaacagaataaatcgtttcttagatgtttttattcagcaatatataaacattgcctctcaccttatactgtacataactggtggtaaatggataataatagagtgttacttcacttgttaataatccaacaaagagaatgtgacttagtgatcaatggcaattacattagaattgcaacatatggtaaattgaatctttttgtacagtggcatttagttgtttgggaccacgtaccaaattaatgggaacatcaggtaaatttaa

SEQ ID NO: 45230 - DNA, 829 bp, Bovine  19866881169468
  misc_feature (1)..(1): n is a, c, g, or t
ngtcagtaattctacaatgtgagtctatctgctactccaacgtggatagtgattcactttgcagaatgatgtgagagcagggcacaggtgcgtttgcacaactctttcagttccatcaggagcacccttcagcaggcaaaacatgtctgttgtcaccggggttgggggagggagtaagtatatttgggaactagcacccttgggtagtataaaggagcatggttcacattgtctgaaattgctcatgccctggttcatccagctggtaatgaagcagtcaacatcccatctctggagtggaataggcaattattccagcttgaaactctgcccttgcaaattgagtgtggcaacaattcacattggctgtcattacaaagtctctcaaaacagggtagctatccgtatcagatcacaaggaaaaaccagagatgcctaaaaagtttaccttaattccaaatagattatcgtgtgggctgatgatatggatatttaagctgctttcgaggagacctttttgttcagttttattcttcgatcttactccaaattgctccaaataaatctaaaatcctagtcacgtagaatatttctgtagagtctcattaaccaaaacctcctgtcttgcaatacagttagagaataaaaacatctctcatttccgtctagttacattttaaggctgttacaagaaatcaagaaaagaacaaactcctctgggaatttgaaccttaaatgtgcaagtaaaacgtttgtacttagacctctcaaagccagctcatgtatgtatcttctggggagctctcaaaatagtatctgcgcctgggcc

SEQ ID NO: 45231 - DNA, 1747 bp, Bovine  19866881254055
  misc_feature (1)..(1): n is a, c, g, or t
naatgtgggttgaaaatgttttccttcttatatattgttttatataatgagcaattcactatcttaaagaaaaaacttagagaaagaagttggcaaacacaaatatacaaaatgattattagatattaagaatgtgtcatctttctaccacagaaaaaatctaagtagagttttaagtcatctgcaaaagagcaaacaaaaaatctagacttccttcctgaagtcagcatagaggccgtctaggtatctaggggtaaaaggtagaagaacagaaatctctctcttccacttccctatgaaaatcgttcccgtctctgaggggagccggtgcagaagccttccgccgctattgtgagttcgtccattgtgcttctcttttccatttttttcctccaacccaacagaattgaagtttacttacaaactgagcccccgcccccgcccatatatctgagctttgactgacagcaagtttattccgtaactgaacttgaatggcactgaacgcttcagatactctttcctcttgccaggtctcttcttgcaagaagacacgaatctctgacttgattctgagggaagtgctttctatccacatgtgacttttcactcactgaaatgcatgacaagagttgaataaataacacctacagatacaatgtgcgcatttgttcaatgtatacaaggctctgaaacttctaatatcattatggttcttgagcatgtttatgtacaaatgaagcacactcagtccatctcagagaactgtttatttaacctcaaaagcttgactgcagccaatacaagcaagataattcacaatacatagcgaatctccattctgacacttctattcattcaatggtattcaactttcctttttcattttactttttgaagtagagttatagaaaggtttgcacatttaaaattccccacagacaatagctctaaaatagtcacaatacaatcaacagccaggaagttgaagcacacttcccctatagtgcaggtaagtcagcaaatagaagattaacatttaatgcgacagatccgtatctgtttactgtgctttagagggatggtactttaagttaggatttattttcttcagtacactttatgcagaaatgtctctgaaattttcgtattttaacaagaagtgaaaacagtaacctgggttaatgtgaaactttctgccaactttgtgcatttcttagagcacacagcgttgcaaatattcacaaagaacattttgtatgcagtattcaccaaactcaagtgcagaagaaatacctttttaaaggagagagaataccttttccatttcagtaacaacttttacctaaaccattctgataaattttgcataattacttcactcagttcttggtaaagatagtgaatgatgtttcattaaactacgttaagttaaacagctctcaccagaggaaacatttctacaaatgcaaagcactgtaactcctcctgtacacttctgtttggagaagggaatggcaacccacttcagtatttttgcctggagaacttcatgggcagagaagcctggtgggctacagtccctggggtcacaaagagtcagacatgactgagtgactaagacagacagacacacacacacacacacacacacacacacacttccgttacatctagtaatggccttggccatggagggtggagaagagactccagttcaatttgaattcttttcagagttagatgt

SEQ ID NO: 45232 - DNA, 1042 bp, Bovine  19866881417227
  misc_feature (1)..(1): n is a, c, g, or t
ncttattctctaattgtccctaatgtaaattttggcacaagacaccttactagaaactttaacaatttatatatttatagaagttcattcttctaaagccatttctataaagaaaaactcatttaaagacaaaatagctaatttgattctgacatgattttagatgttgctcacaggaggtgaaagctctggtatggttccaaagtaaatgtattatattgctccctgaaaatgtacatttcctgcttttacacatttcaattcatgtcatttagaattgctctatatatttcattagggatgtgaattgacttcaacatattatttatagaaaacacctttagcctacaaatttctattgtaattacttattaagatgttacttgcattgttaatctgagctgaaacaaattaaatgagatacctaatttacttttccttaaatcttttcttaggtgcacttaattcctaaatgagtatttttattcttccacaacagagattacttcctagaatattatatatacggagtgctctttttctgtttttgtaaatattgggttaataacatttctgtcactactatctaacaattgttcagagtaaaattgattttaccgtccaaactgtgcatttataccaactgacataaatgactcagggtcaaaagaatgatatacgctttcaaaaatcagaaggattcagctttaatcataaagacatttatatgtaagttgtctgattcatgatgactaaagaacttatttagttctcagatttcaggccaataaaaatgtgagaggtgaagaataagatgatattcattaggaggagcaacattgataatcctaagaacccatagacattggaatcaagtttgcatacagctctgctacttaatggttgtgtgactgataaattcattttgtgatctaggcttaatgttttataaaacaggaatagtgccttgcatgtcttaaagggatgtgttgaatgctaagtgaataatatccataaagaacctagcacaatgtctggcata

SEQ ID NO: 45233 - DNA, 1074 bp, Bovine  19866881472589
  misc_feature (1)..(1): n is a, c, g, or t
nagaataataacagcattttatacttctgggtgtgccctacatctcagtgtcccttactaacatgaataaattcctgtatcacttctgtgcgatattggataaatattatgacatcaagttttacagatggggaagttagaaaatgaagcacagatgttacatagttttctccaatcccgagtcaatatgtagcacttttccacaggctgcataaataataccaaggatcaaaactgatgtccagggaagtagagatgggtggcgggaagtggggctcatttaagccaattgaatgtggaaaagccacagtgggaatagttaaactaagaaggtgattaaaaaaaaaaaagaggtattaagtcactgtgatttatttatagcttctagcctagtgacttcccaaatgaatttccagttagagaattaggattctcttctcctctaaggtatttctgcaagaaaaagaatgagaacagacactaggaagaaaattgtattagactcctaatgagggattattgttcagttggtctggactgataatgaatttccttagatggactaaggaaataattgatcgaggactcatatttgtgatgtctttagcactagaactctcatctttgctcttttctgtccccttaatctttatccacatctgttcatggttacatacttcctgtctttgcacaaaatatattgtatatgtaatatatttatacatatctacattatttaatatatattgaatacaaactggatgtattcttctatatatagacactgttttttttttgttttgttttgtttttggtcattttttgtttggttttgttttgggtcattgttttttagacaccacttttaccttcttaatagttttgattttctcaggatctcagattaaatcaaagtttcttgtgcatgcagattccacaggattaaaagaatcatttgtatagttatgtctttaatatccatctcccactgtaaactccttaagaatagcaaccatctgtcaggtttccaccctttcttctacctttggcacataccagagggtctacatatag

SEQ ID NO: 45234 - DNA, 1891 bp, Bovine  19866880374222
  misc_feature (1)..(1): n is a, c, g, or t
ntggcgctggactgtggcggcgaacaggatgggcactgtgcgtcgctcccgtaggtaccgtcggaccttggccttcaccctcaggagcacggtgccgccactgggggaggggaggaggagcaagggagccgtgactgccggacttaggagtagggggtcccaagaccctggtttgatcgcttgcgacacccctttcccagcacccgtgtgcggggcagcgttacctgaagtggctcactgatgatgcatgataacaccgggcacccaggtgatgatttcctccccacccggtacagaggaagacaccagtgcccagcacctgccctgggcttcaaggtgggacgacgtggcagtgctgacatttgaactttagtcccctctgactccagagttcaacccctattgccctctaagctctgctcggagtctgcggctctgtcatggccttccacgattccagggaccaagccaaagtccaaactcctcgtcttggacctggcacacccccggatcatccctctcccctcaccactctggtaaaaaaggacaagcttgcaatttgtccggtctccctccctgtgggcccagcaagggtggggctctgtcctgcctcaccatcttgctcctgggccccggtcggtgccaggcagggcattgatgttcaacaaatgtttgtgcaacaagcttttggcaacatccccctaccttgccctgccacctcggacccctgaactctcctggctccccagcctctccgcctttgctgctgccatgccctccgactggcatcccctgcttccacctcctggatgtgactctcaagcatacctgcttctcctctcggaggcctcctctgatttcccagggcccaggcctgaagccgtctctctgcttcacgcccccacacccctgggctgctaccatccttcctgcggtggccactcaacacctccttttgcaatcagctcagattgacaaacaccgagctgcctgttctgggtgcgggtcacactgctgggacactaccatgagcaagacaagactgccaggggctctgctcacagggccctgctagcctgcgggttttctgtgttccctgccagtctccctgaccagtctgagcctgtcccaggtccaggactgccctgtccactcaaccccacacccagagtcagcccaaggtctggcgcagagcaggtggcaggcagggtttctggtacagaatatcctccttgtggaccacacctgcccttctttgtggagcaggttctttgtgggcatgattcagggtctgctccagaacccgtgccagctggaggacagggacttccccatagggttcctcttcaccctctcacaagctacaacatcttctcgggaccccttaccaaggtctcctcaacatgcctggtgttcagtgtatggaccaggaccccaagtctgctctaggccaaggggcaccaggttagggatattccctgggaagagactttgaccgtagcaatggagataccacgtactattgcgaggggaaggatgcggagcgaagactgctcctttggggcccaggtgctctgtgctggtaaaggccatgtggtctggtttggggaaattaaacccagaagagtgtaggagacccaggaagggctgttccaagtactcacaagatatcacgcctgacagtcttgataaagattcggatgaagcgccagccgccagaccccaggtagaggaagaacagggagagccccacttgggtccagggcagtttcagcaccagccaggagaacagcagcacccccaacagagacgccccaagcagcatcgtggcctgtgggcacaaggcggtcagtggacccaagtgcctgggtcccctacctcctggcccggg

SEQ ID NO: 45235 - DNA, 1411 bp, Bovine  19866880386503
  misc_feature (1)..(1): n is a, c, g, or t
ngtctggggactacacgggcctgcagctgcttctggccctccgccccaagtctagatgacagctctgccaggccccagcgaggtgatgcgggtataccactttaggtctcttgatcccaatttcctcatcagctcacgggtggggtttaaggactcagcagatcacacattctaggtgtttagtgggtccctgacgtctcacagtgcccaatcgaaggcagcttaaaccctaatgataaaatggttatttttgcaattgcatttctagccaggtgacacctccggatggccgagaggattaacagacactctgtgtgcagaaacactcggcgtggcacgcagcacagaacctggtaaccatgaggatcacggttcgtaaggaggcctcagagaggtgaggctggggaaacagtgcaatgaaccacctgttctacctgctcaaattgggtcaggctggagctgtgtacccggctgttgccatggcacccaacacacagggaaacactctaagctagaagtgtggttgctgcaggagtggggcctcaggcctgcttcactcagacacctcccatgctgccactacccctgctttctggaccacatcagggatccctgaggttggggcagtacaccgaccacctaagcaggtctcatacccctgaccccaccccaactccaaaacaatggggctttggccctctgggcagagtggggggcgctgtgaggaggggctcccaggctgcagaccagggtgagtggaaggggagtggatggggtaggaacctaggagccctcatctcctgagaaaacgccaaagcgtctctaagcagcctcaggtcccaacatgtctgttccctccagccacacctgcccagcagcgaacaggtacccagagcccacttcgtgcctagctgtatggggttcagtgccagctcttccctcctcatcccactcagctttcatccagggtgagggttggcaaaggctgtcgagactcagccgggtttagggaatccatggcccgtggccaagagggaagaaggggagagagaggagaaatccagatgctgcaggctgagatctggaatttttcagactttcccacatgagggggcaggtttggggcaatggaaaggctgacaggtagggtggcaggggccccagggcctgggaagcccagctgagactttagcctggggctgaatactgacttctcagtagaatccaagactgtgcccgcaaccctcagctcagatgagagccccccactgctgactccagctggtacccccaagatggaggaggggcctggggtctggacccctctaccatagtaactgcagcggctgcaacgatttgcctggccagacgtggtacatacattatccattccccgtcacaactgtagtag

SEQ ID NO: 45236 - DNA, 4961 bp, Bovine  19866880388815
  misc_feature (1)..(1): n is a, c, g, or t
nctgacgctggagcctcccaggcccctcccgggcaactgtcggcttctctcttccctccaaatacgatctgtgtagctccctgcctctgcctcaggtaagagtaacgacaacgacagtgagggtgacagcggggacatcgactgagcacccaccacgtgcgagtggctgtctgagcccgttccacactgccactgatttaatcttcacagtaagcccgtggaggaggtactgttttcactcccatttcaaagatgaggaaatggacgcacatagatgttaagtaatccagcccgggacacggagctggctccaacagtgctacaagctggagtcttacagtgaagccacttgactccagtctctgctcttaaccacgcacaccctgggtctcctaatgtggtatctctgcacacactcgtgaagccagaccccacggctcagcagggatgcaagctccctgacgccaagacggtggtatccacttctcagcactgcggagagaatgcagtggtatcaagatcaggctctggggtcagacagacccaggttcaaatcccagctctgcctccttagaggccgtgtgaggaaattccctggcagtccaatgggtaggactctgcactttcaccgctggggccaagggttcaatccctggttgaggaactaagatcctgcaagcccagtggtgtggccaaaaaaatttaagaaataaaggctgtgtgaaccagaacaagtgtcatctcctctttggggcctcattctttcatctgtaaaatgggttaacagtagatcccatctcacagggatgctgtaaggcatccatgacggggtccatacacggctaggcacagaacagtcagcatgggacaacgccagctgtcacgatgatgctgttgttacagcttcccctagcacaagacttgccctgccccaaaatgccgtctgatgtccggggtatcccttgtggaatcctctccgcttcagaatcctaccagtgacccccagggaaagggcggagggataagcaggtggtccccagcccccgtaccttggtgaggtgagcgttgtacatgtcagtgaggagcctgcgtccatgtcccacgccgagcactgaaaggtaccccagcctgatcttacactgggctcccccttccggttcccctgggctctccaacccccaccccgtctagcggaacactcccactgctgatgggtgtggcagccagggggcaaggagagcatcttctactggaagcaaggtagcctctggacacgtgtgtgaaaaggcagatttctgggtcccagccacatatactgactgactcaaagtgggagtgggggtggagggctaggatccttagcaagctccctggggatcctgacactcaaaagtaagagaccaccagcccagtcacacagacctatactcccatctggggatggttctcagcatgtcctttaacgtcctggggtctcaggctccgcatcagcaaaatggggataaaattactgtctgatccctgtgggtgttgtgatgaccgaggcaatgagcaggaaggaagcggtgagcacaaaggacaggcccaataagcaggggcattgtggccactccctgtctttcctcgggtctgtttctccctctggctgaaggaaagaatgaccctccattcactcctggagaggctaccccgggaggggtacatgagatcacgtccacccgcctgtgtcccaggaagcaggacaagttgctgtgactattgtgcatggagaacgtggccaccgcctgaccctggggacacagatggctcatgactcagggctttgtgtgcccagcgacatctagagctctgccagcggggccagggtcaggcacttggctaccccacacaagcaagaggctttccctctctggtccagggactcactcgctacatgacccaagacaaatcatctgtgctcctcgaggctaacttttcttcctaaaaccatacggtatctaccaaacaacactgttatggtgattcatgtgtacaaagggtttcaaaccacatgtcacaggcaagggtcacttgataagggtggacgatcaggacatccctcttcccaccagtttcttcctagacatcagacttgggagggatcaggggaggaaggcaggagtgggaagtggcagtcagttgagaagtggactgggctcctcagaactccccaggcctctatcactgcaccccaggctcaccataccacctaccaagcaccccagacgcctgggaatccagccggtgtcccacgccaaccttcaggctggtgaatgcgagtccacgaactggaaagaaacaaatgaggtctttatccaatgaacccagcctccaggatggctttaggcccacatggcaatctcattcctagaatgttgcctcatggagcccaaaccagcatcaagctggactttcaggcttccccaccaaggaacctggggtcccaaaccattcatcagtttccggggcccagagaaaaggcaacccaaaaggcctgttaagtctgcctgtcaccattccctcaatgaagggctttgagtgcactgggcagaacactggaattaagactggggggttccccatccagctcctgtggaaggcgggttctggacagtctcccagtgagaaaatggaggctgcgaattcctgagtgtgtgtgttcacagagcccagaactcactgactgctcaggaaataacccatttcccaaaagaatgaatgactcatcaaactgatataattatgtacaggtttttgtacataaattatacttcaggaaagatgtccaaaaaaaaaaaaaaaatgaagaatgcaggaatgagctagaagcttttacatttctgaagatcaagaggaacctagggtaacagtacggggtagttaagagcctaatgaatccaggctacatgatttaacatgagccaacactgaacttccatcttatcatttgtgaaatgggactaggacccacttcacaggtttcagtgagatggtacttgggaaaagcctaacatagtacttagtacagagtaggccctcaacacatcatacttcctattgctgttgttatactgtggactcattgaatatttctgtccaaggggttttggaaatggtgggaaattcttagagatgagaataccagaccaccttacctacctcctgaggaacctgtacgtaggtcaagaagcaacagttagaacttgacatggaaaaacagactggttccaaattgggaaaggagtacattaaggctgtatattgtaaccctgcttatttaatttatatgcagagtacatcatgtgaaatgccgggctggatgaatcacaagctggaatcaagactgccaagagaaataccaataacctcagatatgcagatgacaccatccccatggcagaaagcagagaagaattaaagagcttcttgatgaaagtgaaagaggtgagtgaaaaagttggcttaaaactcaacattcagaacactaagatcatggcatctagtcccaccatttcatggcaaatagatggggaaacaacggaaatggtgagagactttattttcttgagctccaaaatcactgcagatggtgactgcagccatgaaattaaaagatgcttgctcgttggaagaaaagctatgaccaacctagacagcatattaaaaagcagagacattactttgccaacaaaggtccctttagtcaaagctatggtttttccagtagttatgtatggatgggagagttggactttaaagaaagctgagtgccaaagattgatgcttttgaactatggtgtttgaaaagactcttgaaagtcctttggactgcaaggagatcaaaccaatgagtcctaaaggaaatcagtcctgaatattcattagatggactgatgatgaagctgaaactcccaatactttggctacctgatgcgaaggactgactcactagaaaagaccctgatgctgggtaagattgaaggcaggaggagaaggggatgacagagtatgagatggttgggtggcatcaccgactggatggacctgagtttgaaaaagctctgggagttggtgatggacagggaagcctgacctgctacagtctgtggggtcgcaaagagttgggcacgactgagcaactgaactgaatactgttgactcactgaatatttctgtccaagcagttttagagcttcctggcctctaagctccttagccttcctatagcctcccaaacatatactttaattatatctaataatgggggctcattatcgaaactagtttcaccattggttagcttcattgactataaaatgtcactcttcacagacatagagaacagatttgtggttgtcaaaggggaagggaagtaggggaatgatgaattgcgagtttgggattagcagatgcaaactattttatataaaatgggcttcccaggtggcacagtgggaaagaatccacctgccaatgcaggagacacaagagattcacacttgatcccagcgtccggaagaccccctggagaaggaaatggcagcccagtccagtattcttgcctggaaaattccatggacagagaagcctggctacagtccacggggttgcaaagagtgggacacaactgagcgactgagcacgcatgcacacacacacacacacacacatacacgtagaaaggataaatatactgtgataaaccataatggaaaagaatgtgaaatagaatgtatacatcagatcagatgagatcagtcgctcagtcatgtccaactctttgcaaccccatgaatcgcagcatgccaggcctccctgtccatcaccaactcccggagttcactgagactcacgtccatcgagtcagtgatgccatccagccatctcatcctctgtcatccccttctcctcttgctcccaat

SEQ ID NO: 45237 - DNA, 999 bp, Bovine  19866880430202
  misc_feature (1)..(1): n is a, c, g, or t
nacaagggccacgggtgcagtcccttcccagctccccaaagtagttcctgatctcttagcccatcaggaactgaagtcaggacagaactcccaggctcagaggtcaggggtgcccccaggcatccatctccctcacacacacatcgcactggggttccatctcccctgggtgagggcaggtgccacaaagcagtaaaaaggcacacggctcctttttttttgagtattgagaaattagagttcgtcattcagcaaatgttttgcaagtactaactaggcccaagcaaacgcattctattgcttcaccagcaaacgccagctcaacttgaaaagcccagttcaaacatcccacctcaggacatgtcttccgtgatccctttcatctgtacctcagatccttctgccttaactatccattttttcccactagatggagaatcccaagggtagtgcccggcataagtgcagtacagggttaacaccatggggaaggcaatgcatttgttttttaactgctgtaaccttaaaggtcaatacacagcctggtacatagtagctgctcaataaacaaatgaatgaacacatgaattcggctgagccggagaatggtcactgttgatagtccaccagtgacgaggaaggtgtgttcagtcaccttcaacttaaggccacttgtgccccctactcccaggccatacctctgacctactgactggcagacaaagagaagctgagagaagacagggtgaaggcagaaaccagctgccctgtcccccaagaactggaaggaggacaccactgaggctgggcttgtttccttgctgtgcaggttagggccccgctctggcccaggtttgagcagagaaggcccctccatagtgcccaccagggggcaggaccctgggacagggctggaaccagggcctacctcggccagtccagtgcagccctggaccagaggagaccagatggcacccgtgtggcccacgcaagctgcct

SEQ ID NO: 45238 - DNA, 1236 bp, Bovine  19866880449940
  misc_feature (1)..(1): n is a, c, g, or t
ngcatcccaagtctcaacgcacaaacctggaggagagaggagagtggggacaggttaggcccaaccccccgaagatcgaagggctctcccacgctgagagaagccagcttcgatcctgaatagccatgacgacacagtctggttcaggagaggccagtcagtaggatctgggcagacgtaaggcagaagcagagagcaggcctaactggtccacgcaacccactaccgagctttaccaaggatgttggtgggactgctgatgtcattctccttaactggggaccactgcaagcaaggccatgggaaatctatcaagtccttcagactggcaggtttgagaagttatccagagactcagacatccagggcctgaaaggtcctgagtacactcaggttcaagagtaggcaggtgatttcaagtactaagaacgtgggcttggggaccagacagagctggctggcttccagtccctgttgagaagcattagttcaggagagtgtgacctgtgacctcaggaaatgacttctccccctctctgcccttggctgctttttgtgaaatggggaaaataagaccctttgcaaagttactgggagaattaaatgagagaatgccggagcacagagcacatgctcaaaaaatggcagctacttccaccgttactgcaaggacgcaggtgtagacaggggaagggtctcgcccaaggtcacagtgcagatgagaagcgtaccgtttcttagaccttgccggcttggttccaggcacccaaaggcagattgcctctgggagaaaagcagtcctctgttgggacagaagctcaggcaaggggtctattcagactagggaaaggcagctaaagcaagagaaagacggagacaaagaaaacctatggcttggtgtccgctggtggcatgaggcttgaggacagcagcagagcgttgaagggcaaggccggcggagacttggagcactcggggagcggcgagagcaggagggcccggcagctcctataactacaatcactttgtgcaaacacaaggcatttggcacaccagacttttatttcacagcactgatgatagctcactcctttcagaaagcggcagccaagaaaaaggaagtggtcctcccttggggggggggcggcgcgcgcgtgcagctcatcttggtaagcgggcccctgctcgggccagttcgtgggaccctttctgccagtcccttacccggctgcgcag

SEQ ID NO: 45239 - DNA, 1072 bp, Bovine  19866880453102
  misc_feature (1)..(1): n is a, c, g, or t
natttgaacccaagtctgtttcttaacttctgctcttctctgcaccgtgggctttcagctgtcttctacaacagagtcgatgagatgttctttatgtgtattcaggtctcaatgctgggaagcctcctgcccctaaacagcgtgttcgcttcctgttgggacccgtggaaggcagcgaagagaaggagctgaccctcacagccacctgtgtgcccacactcatcgaccatccgctgggtagtgcacattcgggaaaggggctgggtgtcgcttccccgggaaatccctgcccaaagtcagtgtgtcccagccagactcctcctgtcccagaccaatgtaggaccacagtggcaatgaagtatttgaccagagattggcagaatttcctggaaagggctagatagtcaatattttaggctttgcaggtttctgtcgttgtagtgcagaagcagctatcgacagtgtgtaatgagcctggctgtgttccagtaacactttacctgtggatttgttgttgtttagtcactaagttgtgttctctaagtttgattcatttgggaccttgtggattgtagcctgccaggctcctctgttcataggatttcccaggcaagaatcctggaatgcgttgccatatccttctcaaggggattgaacccgcatctcctgcattggccggattctttaccactgagccaccagggaaaccaggcatcactgactgaatggatatgagttagagtaaactccgggagttggcgatggacagggaggcctggcgtgctggagtccatggggtcgcaaagagttggacacgactgagcgactgaactgaactgaccgtggaagccccttacttgtggatactgacatttgaatttcatgtatttttcatttatcatgaaatagtattcttttcatttttttaaaaccacttatcattttaatttgtgggctgtaaaaaagcaaaacttgaggatttgacctgtggactgtagtttgctgacccctttattattctgggattccaggtaaaagttgagaccctaaggtagaagtcttaaggacagaa

SEQ ID NO: 45240 - DNA, 1801 bp, Bovine  19866880455053
  misc_feature (1)..(1): n is a, c, g, or t
ngacatgagtttgagcaaactgcaggagatagtgaaggacagggaaggctggcctgttgcagtccatgaggtcgctaagagtcggacaggactgagtgactgaacaacagcgggggtccggggcccggtgtgcccttgccttgaaagccaggccattgtcagccattgtcaaagcctccgcgtttgcttggttaactgtagattagactaggccagggtacccaaacctggctgcaagttataatcatccgaaacattcataaaaatgtagatgccagggtcccaccctaaatttacacaattggaatctgccaggagtgggtaggggaggatagaaggaaagtgggatctgagcttctgcctttttaaactgcttcctgggagattctgttacccagacacacagaacctctggactagataatttatgagcacccatcaaatgataacatcctgttagcatttgggatcatgcatggcacataataaatgctcgataaatgtttgctggatgttttaatgggacactttgggatcctacagtgtttttctcatgccctctaggattcttagacctgaaagcactgttattctttccagtaaaaatgatagtgctgactgctcactgagtccttattttacttgctcactgtgttaagtgttctatatgtgcaaccttcttgacttttaacattaaccgtaaaagaaaggtattacgtgcacttcacatattaggaccctgaagattggaaacatgaagcagttttcacacagtcacctacattgtgatcaaaatggggcttgaaccgagcactgtctgataccagagtctatccatccacagagacgtgacattctgtcctgatgatggatgtgaaagtgatttattaactctttggaacatggtgctagccagagccacctcaccccattagactgataacagtaataactgtagccgtactgagctttactgggtgtcaggtgattcactgtttaacttgaatcttcataactaagagctagatactcttatcatatatgaaattaaggtttagaccaggtcagataatttacctaagatcatagcctccatttgtccccattttttttcctttcagacatggttgcagttctgggagagaccacaggacgccgtaccctgaaggtcctcagggaccagaatgaagagggatccagagggtgcccagatcctgcagtaggtcccagctctgcctgggggattgagggcattctttggggattctgatttctctggaatcacatggtgttcctctaagggaactcttcttgataccatgcgccatggatggttgcacaggctgggcactgcccaactccatggatgtcattcacatagacaactctgatgacctctggacagtgcagtatggtggcctcagccctgttccaacaacaagggctcttgtgcgttcactaatgtcccgtagcatatgctgcctgtaacccgcacccctgcagtgccctgtgtgaatacccagatcacgtctgaggcctatttacctaaggcaggaaccacagccttagcttgtggtagtctcttcagtccctgccactggcctggccagtagtagaggctgcattaggacttgaccccgttgctgccctctgccccttcacctctcacacccttaatctagctggacctttcacctgcctttgctgctgccttcccagtatctgagtcctgccttctgcttcacagggagcgtccccggatctcgctgtccaccctcgacagggcaagctccggagtctg

SEQ ID NO: 45241 - DNA, 1535 bp, Bovine  19866880488724
  misc_feature (1)..(1): n is a, c, g, or t
ntggcaggcgagacccagccgtggggcccgggggctttgcccccacctgtccctgcctccccgtccctccttcctggccccccctcatccctagactagcacgcggaaacccttgaagaaaggggtataagccccccatccaatgaggggagacaaacaggtgcagaccccttgccatcttggccagggctgtgtcttgatatctggactgttactagttccagagaaacaaagagccagaggctcagttaaaggcagtttatttaagaggcgggccttcttggggagcaggggctccctggtggcctcctcacccctaccaagcagtcctttcagaggggctcatccatcctctattcagaggcactttggggccaagtgccccctccttgcccagcttgacaactgggcagcactctcacaggccttgggacagttgggcaaattgaggctaggcaaggacataagctggtggcggagtgggctccctccccagtgtttatactgtaactgtgtaacattttgtatattctggaggtagggcagcacccccgtatctcagcagaggttggagctggtgaatggggaggaacttctattaaatatttggggctggggaaacttatttattaatagtatagggtagagagagaaggtggaggcggggacgggtttgtgcccgggtgattcgactcctgtttcgtttcactttttatttctgaataaatgaatttagccatactgcttgtcctggtgtgtgccttttttatgtcactgggccctgaggtctgtgccatgagcactgaacagggagcaggtcctgccaacagagggcaggcttctggttgtgcccacctccagggtgtctgggcacgtccagcggggctgagatcttttgaggcctgtcacccactgccgcctggtgaagcctgggggaccccagggggactcccaaggggctctcaggggccgtcctgccttaatagcggagtgactcagaagctggatctgatctcagggaggggaagcagagtgccacagcaccaagtgctgacttctggctcaagtgttgtccattccatcaccctgtccctccacagtgcctggctggctcgtgcctctcctcccgggccccctggtggccagagcagggttcgcaggatcagctgactccaggtgctttcccagtaggcctcggaaaggatggggctttccctgcccccaacatcttaaagcatcgtatcaatagctgggcccctcaatccctcaccccaatgttgaaacctttacctccccccaagcaccacagcgaacacaaggctgcagaggacacgctgttccccatcgtccagaaatgggttttattctcagctgagagacagcaagactggtagcagtcagagaaccatacagctgccagcacggtacccccacgctcgaggagggggttgggatgggaggatggcagaggggggcttggctgcccacaggctgggcatgacactggggctcattggaggtggcacgctttggag

SEQ ID NO: 45242 - DNA, 597 bp, Bovine  19866880589873
  misc_feature (1)..(1): n is a, c, g, or t
nggcggagtttgaggctcgggctccacggtgcgctgctgcctgctggagggctacgacacgaagaacactcgacaggacaactccatcctcaaggtacggggggctctgggccttgtctgcccctcccacccaggggcaggggaagggcggaccacctccctgtcagagtcccctggggagttgcgaagaacacaggttctcatcccagatgggcagcgagagacgctgggaagacgtgggccctggggtcaggaaaccccccttggaggcctgactcagccactggcctcagttttgccctccataattgggcctcagggagtggaccccgacagtctcttgcagtgagaccagcaccccttatctcgtggtgcccgaccacagcctggcagggagtggtgtctcttcctgaccccacttttgcacagggctccaccttcgggtggtcatccacccaaagacacagcaaagctggcacctgaccctgcagcccagctcctaaccactgccgtgcatgatgcgaggccacctgagctccagagcaccgggggtgtgggacggaccttgccgtccctgcacctggcagacctgggcag

SEQ ID NO: 45243 - DNA, 973 bp, Bovine  19866880660907
  misc_feature (1)..(1): n is a, c, g, or t
ncacagcggcggcactcacggcagtgccgagcccgcaggggttgctgtgggcacagagggagttgggcctcaacaccgggctcccctctaggcccagcaatgaggacgggaggtcagggctggcatctgggagggcttcctggaggaggggggtgaggccaaggagtctcggccttgcctgagtcctcccaccgaggtccccgcatcacccaccagcaccatgcagtatctgcagcgccgaagggggatggcctgaggaaccatggctgtctgctcttccttggcctcctcctgaaaaacgggggacagaggatgagatgggggtcccttgggaggcagatgagacttgtgggtgtctcccttgggggccagcttagctctgggtgtgcacatttgggggcccatcccatgtgtcatcgaggtggtagagtggggcagggtgccctggactgcgaggttgtgtgacttttgccagttacttcccctctggaccttggcaattttctcattgtaggacggggccctaggtctggcaagacaattccctgggattccctaggaaagctctcagctaggtctagcatgagactccctggagtcttgagttccctggtggagggaggagggctttgggcctcctcgttacctggggctgaggcaggacattcacgtagcccggatccatgagtgacacggtcaggtaaagcagcagggaggccagcatgagcagcaggaaggtgaggggcaggagcagctccccctgctcttcccactgccgaagtgctggagaggccagagggggagagtgaggccaggaccatggaccggcgtggcgggggagggtgcaactggaggggggaagtgtgtccctggctgaacaaagtcctggaaatggggtttgatgaatggtcgggtgtggccactacatagggtgcaggagggagaagttcaggttgggagaagagaaaaaaag

SEQ ID NO: 45244 - DNA, 796 bp, Bovine  19866880697681
  misc_feature (1)..(1): n is a, c, g, or t
nctctgtccccagctcagccaggctctggacaaaacccagatggactcccccttcaagattctgttgaatgtcacctcttccagaaagtccaccatgataacctctatgtcccctcccccaccccctgcaacacacaccctcttccctcaccaaactggactgtaattgccctgaaggcagaggcagggttgggcacaccacggtgctcaaagagggcaatgttgaaggaatgagtgaatgaatgaaggatggatgtctctgccctccttgccaaggtgagcagacatgggctcctttcccctgtggctcatgaaccagcaactcctcagaaagggggactcgctgcactgctgaggacaggagtctactcccagggacctgctcctctgccgggcggggctcaggccgggcaaaactagacccacaccttgtccctcttcctatgcctggctcaggtctctcaggcggatccccctctgtgggaagagagttgaaggttagtgtgcctgggtcacaagtagggattctgagggcaagaaggaggccaaggagatggggtgaggtcttccggagaggcaggagggtgggggaagaaagcagcgtcctgggtgtcagcccaggagaagcagccttgagaggtgccacatcctcccaaccatcccatgactgtgccaagggtgtggcttcatgtggccaagctcaggggacctgggagagaggcagcctgagaccaggggcttaaaaacaaatgctgctgggagggggtcccggtggaccctgctgccccacaaagct

SEQ ID NO: 45245 - DNA, 867 bp, Bovine  19866880748086
  misc_feature (1)..(1): n is a, c, g, or t
ngaggctggcagcgtgtctctgcgtatgaaacaggtggaagaactgtgagtaggccggaagccctgccgagcaccacccgccgcccctgtccatcctcccttccctgcttctcttgaaggcgctcactggtcaaggaaggcgaggtggcgggagggcccgtctctggcagcagctttggctcacgagggaaggggttcgggtgaagccgtgtcagctgtggccgcttctctcgttggtgcttctgtgcagccgtgcgttcagagcctggtcggttcgcctgctgttagctttcttactggactagccactgtcagcagactgggcggccggtaccctagtgctcctctcttggcaggaaaccaaatgcctcttaaagtctctgattcttggtaacacgttcctgttttatttcgcttttggagacttagattctattttagatctttttttaactttcaactcagttgtattaagtttgctattttcacatctgcaaggataccaggagttcagcctgttgtattttggttcccaagggttcaagtgttgttggattcttcataagaaatcctcagctaatgaaatgtgctttacgtgatttctccttccaaagtggccaaaacttcctgagaaataagtatattaacgttagaaacagtaggaattccctactgttccagagatactaacaccctgaatgaggctgttgtaaagctcagcgtgcctttccccaccacctgggggctgctggcagaatcatacgacgggagaacaggccctctgcatacaccatgcccagcaagtccatctcatcgggcagctgtggtcgcatggagcctgtgttgtgctgaacgcttggttttggt

SEQ ID NO: 45246 - DNA, 924 bp, Bovine  19866880763090
  misc_feature (1)..(1): n is a, c, g, or t
nttactggagtgggttgccatttccttctccacaggatcttcccaacccagggatcaaacccacatctcttgcattgcaggtggattctttactgtctgagccatcagggaagccccctcaattttcagatattataaaaattcagttgttggggaggaacctgaggcacactgaccccctacccaaggcctctatttgccagtccaaggtctagagcacatcctcctgctctccaccttcagtggaatgagctgtatggtctcaggagtccatctggtggcctgtgtcaccacaggagagggtggtcagggtcaagggctgtgaatgggggagcagaaggaggggtgtggttggaggagcagttgctgtgtgtgtgcatagggggtggtcagcactgaataggggatcccagcttgggttccataatgatatcagtgggggacaagcagagccctctgctgtccagatggagaaactgaggtggagactcctccagtgtttgagaggggaggggcctgccatcagctattgaggttcattcatctttcccaggaaggcacctccacccaggaattgcagtgtctcgtcagtcactcagtgggacacaaagagggacagtagctgggtcacctggctgctcagacccctccactcctaccacgttgaggggcactctcccccactccttctcccagcagctgaggctcaagtgcctgccctcctgccccctttcccctgctcaggtgcctgagaaaggatcatttttagcacctggcctctttccctgcctggagggagcccaggggacagagtagggaagaaagtcgccaagggggacagggagatctggaagtagggccccaggggatatctgactgttctgttctgcccactccaaggaggcccaggcatagagaggagcc

SEQ ID NO: 45247 - DNA, 1478 bp, Bovine  19866880778319
  misc_feature (1)..(1): n is a, c, g, or t
nacaaagccacagtccctgcctctataaggcccacacgcttaccctgggagacagagatgcagggatcatgaaccagggtgacaagggggtgagaggtgatggaggtgtgagcagaccggtggtggtggtggtggagggagcaagaaagagggagacatcccattagattccagtgagcctgaggcattgggaagactgacttacagccctgaagaatgaacagggaaaccccaggacgtgagctgggggtaaggagcctcaagcagatgtacagtgagtgatgaagtgtagcagcatgtttggggttgggagggggtcatggagtccccaagacaccctgtccagggttgagggaacttacccacaaacaggagcagcaggaggccggcggccagtgggatagcaatggcataggctcggggcaggaaatacttgtggatgacatgctgactgtcgatgaatggctggcatcaaaggcagagctctagtgagtgttcctcgctctgctcagctccccaagtccaaacagcccacctcctccatctcaggggttgaccccatcaaagcactgcatttgcttttctctaagatgatagcactctgggtgccttggtttgttcccttccttcagttatctaatggttgtgtactgggcacttgactggtgctcgcccaaagttggggctagggacctggcagggaacagaagacaaaggacttgccctaaggccctcacagcttagcagggacaaagcggacatgaggaatcctcgagtgattcccaaccaggactccaaggttttctttactaacatttgtctccaaaggatactgacttctgcaagattttgccctccaaacacacacttcacttttaaagcagtaaccaaaaaaatttcccacggggaaaaaaaaatgctaaacactctcacaaaatccactgggattgtcatgcccaagcgcccgcaggataaccaagactagaactcccatcaaaagcaaagcaaatcaaggacaggactttgcagtggagtggttaaggattccaccccgagccttcccttgagcttctgcttcctcgtctataaaatagggacacctgttaccatcttcctcatagtgctgtcctggagctttcgtgagatatgcagtgacagcacctagcacagtgcctgctaaaatgatgtgaggagttggcttcgagatccagggatgggaggtaagagagggcggggaagcgcacataccaagagaattacccaggcggtgtaataagtgaagatgatcaggctaagggcgacgaggccgaggcccaccacttggtctgttcccgtggcctgcagaaaagggaggattcaactgaggaaaagatcctccatttgggaaggaggggggtagtcgttgcggcccgatcacgtccatttactcagctgactatatgtgacgtgggctgactaggtatcttttctaggtcggg

SEQ ID NO: 45248 - DNA, 1158 bp, Bovine  19866880796310
  misc_feature (1)..(1): n is a, c, g, or t
nggctgcctcccctcagtgggccctggctgcgtgcccccacacaggtcaagatgcagaagggagagcgccagatggccaaaaggttcctggaggagcggaaggaggagctggaggaggtggcccaagagctggccgagaccgagcacgagaacacggtgctgcggcacaacatcgagcgcatcaaggaggagaaggactacaccatgtgagcggccctgccctgggcgcctgcccgcacgccggcccggtccccgggtcactaaagcactcctggttccccgcagagtgcagtgggggagggtatcggggagacctttctggaaaaaaaaacaggagtcccgcaggacagctaggagccaggcaggtgggtgcaggggcagaagacacggctggtcgcaggatcgtgtctcaggaaggccccaaggtgggaagagtctgtgactgagaagtgaaaaaagcaggccagagcgaggggaacagggtgcaccaagggcagggctgccacagaggttggcaggggctcttggtgcccacttggaggcatttgcattgagggcgcttgggagccactgaagggtgttggaagcaagggagcggtgtgaccagacgcggggagagtggaggggagagctcagaagtggatctgaagatggtggctaggtggccttggcagtggccgggggctgcggtgacactggtttctgagagaccagcaggtggcagcacgtcaccggtgtggaggccctgctctggtgaccgcatttccttgcagaaggccacgcaggcctggagggccatcccgccccctcccccactcctgtgccctgaccaggagatgaggctcgcagggcattgtgaggcgagcctcggagtgtcaggtgggcagggccctggggggcggctcacagggtcctgttctttctggccccaggctgcagaaaaaacacctccagcaggagaaggagtgcctcatgtccaagctggtggaggctgaaatggatggggctgctgctgccaaacaagtcatggccctgaaggataccatcgggaaactgaaatcggtaagcggccgccagagccgcccagcccggtgctgggcccagagaggggccacttgaaggggccacgcagtcatcatgctgactttatgacatctt

SEQ ID NO: 45249 - DNA, 1737 bp, Bovine  19866880808893
  misc_feature (1)..(1): n is a, c, g, or t
nctaaacgatgacccccttggctgcaactaagacctggtgcagaaaaataaataaatattaaaaaaataataaggtgtcccctggcaccttcgcactggagattcgggcctgatctggtctcccgccagagccacctctgcacctcccactaagctcctggtttgcccaagagaggacagaacaggtgctcagagaaaagtgtgccaggcccaccagcctcgactgacgtgtgggaggggtggatggggacatgccagctcctcccactcattttggacagatggtggtttcctggggaggccttgccttgccatctgcagaggtaccttcaaacctgaagcacaggggggatgaaataaacacatctcaccacctccaggcaccacatacggcctatctgaactggcactgtcaccccagaggggcctggaggaattatacccagagctgccactcctagtctgacaactgctctgggaccctggttcccaagtcctgctgagctcaaataccaccagaaagtagcatgcttgggctggcgtgcgcccagcggtggtcatccttgtaagtctcttgtttcctggactctgatgtcagacaggcccggcattggatgtctgagctgtgtgactatggataaatcatcagacgtctctgaatctcagtttccttatcagcaaaatgggtttctgcgaggcctatataacttaatgtctgtactcaggcatggtagcaatgacgagaaataaaagttgagggagctgagcacacagcctgggttcccaggaccatgtcatcaattgatgctgcagggagggagctggaagataggtttcctgggggctggccagaagagtgggtggaggccagaatatttccagcccaatcttgccttggaagtggaagggaaggggcccaacagactgtgaggtgccttctgaagcagggagccagggtggaggcgagggagtgggtgggccaagaaatacagtggggaggaggtgagactgcccccaggcaacaagtccctctctgttcctgccgccccaggaggccctgggctggcccatgtcacacagcccatgaatttccagctgaggtttaaagatttcagggcagccctggccttagcttcccctggtattctaatgtcctgagagcagggcctgggttggccctctttaccacggtattcccagcacccagcttggagcctggcacggagcaggcgttcgggacacccttgtcggccaaaagactgattggaaggagtttctccaattttcccatcaccgccctcattgtacagatgtggaaactgaggcataagaaagagggtcgcccaagctcacaatgcgagttggtgacagggtaagactggtgccctgggccctggattccaagcctggcactctccccacaacaaccattcttcaatattaaagaaaacatgccatcttgcttttcaccttatccttccatccctcctaccattcttctttgcctctttccttcctccctccctgtcttcctcccccctccctccctttctttcaagtgttgatgactttatactttcaaaacggaaacgatttcttctgctcctgctttaaaaaaatcatatgctctctcattaaattttttttcagaaaatacataagatgttgaaaaaataaaaagccaccatcacccccaacacctgggcctcagcattgtaaacatttttatcacttata

SEQ ID NO: 45250 - DNA, 1890 bp, Bovine  19866880814458
  misc_feature (1)..(1): n is a, c, g, or t
ntcttagaggtcgagaaatacagtgttgggacactcctggtggtccaatggctaagactccttactcctgatgcagggggctcaggtttgatccccgatcagggaactagaacccataagctgcaaataaaagcccaaatgctgcagttaaagatcccgtgtgttgcaactaagacctagagcagccaaaaaaattttttttaaaaaatatggtatattcctactgggtgaggctcaaagctgtggaagcccaaagatggcccagtctcacagagatgggcactggagatggaagtctgtcctaccccagccccctaagatgtcaggtcctccccatatatggccctgctgctgacaaccgcccctgagtccccatccacccttgctgacctcgccctcctcctgagaactcgcagtttcctctgtttccccatatggcctgtgacgtcagagatactggcatacatcagaggcgtgtgtatgtgtgtacatctgtgtgtgtgtacatgtgtacaatctctgtgtatacctgagtacatctgtgtgtatttgtacgtgtgtacacacgcctctgccttgtgctcatgagtctgtcggtacttgtgtgtacatgaacctgtgcttgtatgtacctgtggtcacctacctgtacatgtgtgtgtttgggtgaggtgttcccaccctggagaagatccttctggagggcactcatgccaggcagcccagagccctcctcttcaaggctgtctctgtccagccagacttcctgtggtgcctggaaggggactagactccccccatggcattcaagacctcagccaggcctgcacctccctccccacggtactccgagttgccctgccccacagactctgttctccccacaccccctgaccttccatgctgcttcctgcccctctgactgtgtgttcacggggtgccaagccccacttttgaaggtgcattctctctaacccccatgctacttttcaaggatactgtctgtccccattttgcagttggagacacggaggttcacaggcagaatgattggcccaaggcctcaaacagctgaatgggaacccttggccaggtttgtgaactccccagcctgctgcctcctcttctactcattttcctctagacttcagaaaggcctccaaagagtcatcctgggcttcctccttgcccaccctgccaccctccgatggtcagtctatctctccctcgtctcaaaactgcccatcacggcagctcctgcctgcccgctctgtgtcacagcacccccaggttgcacttaccctccgctcaaactcctccccctgctgcacctcccgggggtagccgtcgatcagaaagcctttggaagtatctaccttggccaccatggcgtctcggagcatgtccagcactgtctcctgggggtgcagcaaaagaagagggggtcatgagcccctcttctccaggctccgctcgagcctctgcacaagccagcccacagttagaaatgctctctgccctaacacagatttcccaaacaagctgccctctccaggaagccttctctgaattgcgaatacttaactgattgatcaggccattcattcattcatccattcatttcttcattcactcaataatatgattgggcccctccttccagcctcctgtctgagccctgaggacacagctctgaacaaagtagaccttccctgtcctcagcacactcacagtctgctgaggggacagaccaatacacagttcatttatagtttccaagaatgacatgggctatatactggcaaagaagcaggggcgggagtctaaagtggggggtgggagtctaaagtggggggcgggtgctggcccaaatactgagggagtcagcaa

SEQ ID NO: 45251 - DNA, 1225 bp, Bovine  19866880824631
  misc_feature (1)..(1): n is a, c, g, or t
nctcccactgcgaacacagcaagaacagctcctgcttgggccccttctctgggcatcccctcatgaacccccagagcagccctgggaggtgagggccacttcaatcccttctactgatgatgcaacaggtccacagagcggaagggattggccctaagtccctctgctagaaggtggaggaggagtggggaatttgaatcccagaggagcagggaaaagcagcagaagctctggctggagggagtgtctgccctcagtgctcaaaggtccaagcctgccagggtcatgggcagcaccaggaagagatggtagaagcagacatgggacctgatgggagcctttattcagacagcagagacccgcctccccctctgcctccctcttcctcaggccttgggaataaagggtagcccttccccctgtgaagactcccccaggctggcacccagagaatgctggcaggcagggaggggtcgggcacatgggttgtggacttgagcaatccctgagcactcgaggttcacttctggctccccaggagctccactggctgctccctctgataaattatgatgagtgacgtccaagggtcagagttcacagaggaacctgggtgctggcacagatgtgctccacccccggaggaagcggggggtggggcggggcctcaggcgctcagggtctacaccaggccctccacacgcaggggtggctccgtgatgcccagctcctgccgcagagcctgcagaggctgttcccagcgccgctcgtagtacacgttgaggacacacggggctctgcggccattctcaactgcccatgggatcagctccgagatcagcaattgtaggctcctgtgaggccgcagaggagagagaagacagagcacccggggtcctgagcgcggggcacgccacctgccctgagccgacgggcgtgtcctcagttaatccgcacagacaagaggaggcagttcccagccccacttttcagatgaggaagcagaagctcagtgaggtaaaagccctgtgctcaaagccacacattttgaacacaccaaagcccagctttaaatcgagggctcccccaccttcagaaactaatgccagactgcatccccaggaacccacaccccccacgcaccgccccccacccctggccccaggtttcctgacccggctgttctcacttgataactggggcctggcccgagaaaccctcaagt

SEQ ID NO: 45252 - DNA, 1747 bp, Bovine  19866880972390
  misc_feature (1)..(1): n is a, c, g, or t
ntggtgctgaacggcatggagtcctaccaggaggtgacggtgagcccctgcccgctgcccgctctggcccctcgccctgtgtcccggccttgccaacaggctcgccgatccctgggatgccatgcttgctctccccctttctctcctggctctgtcccgcccccctcccaacccccctttcccggggcatcactcccaaactctgggaccgggcattcagggccccctgagctggccccacccgagtctgtctcccagcccgccctcccccagggccccaggcctttgctcctgcttgttcctccgcccttcttcccagtaatgctctgctgggtgggtgtttttttttttttttttcaatagctgcttttgttttaaaagtaatcaagtttttactggagaaaaattacaattatgggtataaaggaggggggggaaagccataatttcagcacacagagatagccaccgttaacatccttctggcttttagtctatgcgtaattattgagtaaacaggaccaccctgtttgtcttataacatgggttttcatttcagcagcatcttgtgaatatgaatatctcccatatcaacaaacactttacaacaaaatttgaaaagtcatgtttcttttcttgatgacaaaaagtgagctccctgatgcttggaaaacaaatttaagtaacagaaaatgtctcagactaactagaaagtgaaagtgccaatcctagcgctcctcccccagggcagctggttttaatagttcagcttcccaactgttgatgtcagcacctgtgcagcgcctcccccagggagaggctgccctggtgctgactctgctggggacttggaggccgtggccaagctccatccccatggagtagtgggagaggctcccctgacttcgtgggctgcactgactgagtcagccccacggttgaacattttaggttgctgttaacgttttgttatttctttttttttaaattcgaacatgccagctcttagttgtgattaagtgggatctcatttgctgtatgtgggattcagttccctgaccagggattgaacccaggtcccctgcattgggaactcagaatcttacccactggaccaccagggaagtccccatgttttgcactttcaaattaggctttgctgaatacatgtaagccatgcttgttatgagacttgtctaaaaggagaatggctggagcagtgggcctgtgtatttttaaagcatttggtatatactcttgcatcgtcctccagaaaggctctggtggggatgcagcctctgcaggaatgaggaggccccctttcccactgactcccaactccagactttttcctttgttgagatagaatttatcatcaggtaaaagggttgtttctttcccccttggccgtgctatgcagcatgtggaatctcagttcctcaaccagggactgagcctgtgtcctctgccttggaagcacagattaaccactgggtcaccggggaggtcccggggtgctagttgaagattttcaaattaataaactcattcaaagaaatagaaattaacaaaaaccactattggctggggagattgatgatacccattgacgaaggccaggggaagaacacattcccgatttccacaggtgaggtatgaatcggacagcctcttcatggggcagctggcagaacctggcaaaactgtaagcgcacttactttggcctaggtattccacagttcagag

SEQ ID NO: 45253 - DNA, 1138 bp, Bovine  19866880991341
  misc_feature (1)..(1): n is a, c, g, or t
ngctactgggacagggagggctccagcagcttcaggacaccgcccaccaggtgcaggctgcctgtgaccagcacgtgaatggcggcagcctcttggagtaccatggccccactgtctgccacagggtgggcgaggaggccccgtgggggactgggcggctgaaagagagggtcccggccttgggtgatccactgcaaggcatgggagatgcagctgaagacgagggagctggcactgtgggtgtggggtgggtgaggcgccagcagcagagatgcgggcccatcctgctcctggccgggggtgctccaggggtccgggctgacctgctcctcatgcaggcgactccagtgctgttggtgggcgaggcagcggagcagcacctggtccagtgtcactgtgaagttctgttggtctgcggggcccagggacagacacatcagtgaggcagcccaggggaggggtggggaagcatgccgtgagcccctgctcaatgccaggctctatccaagcaccgtccgtccttagctctgaggagacggaggctcagaaagttcggtgactgccctttgtcgcagagctggtgagaaacaggcccaggcagtttagcttcaatgccggggcttctgcccacggagcacctctttctgtcctaactcactgccttcccagactatccccatgccatctgatgtggggcctggagatctgtattttttagattatttttaaaaaaactttttacataacccacagtaaaaaaggatacattttataatagtaacccaggactcacatgtgtacgcgtatacgtctagaagagaatgtcatcagacagtacctaccctcaattttgtgcaagacacactgacactctctattctattttatttaaaatgctagttgagactaagctgatttcaagaaccatcactgggttgtaacctgcattttgaaaactagtttccccaataattcctttttagtattgcagtcacacgcaacattcaaaacgtaccaaagggtattgatttatatgataaaacaaatctagttcctacccaagacctccagtttaaaaacccccactgtcacccacacagcaatccacctcagggccctctgccgcctgcccacccca

SEQ ID NO: 45254 - DNA, 1420 bp, Bovine  19866880994136
  misc_feature (1)..(1): n is a, c, g, or t
nacacgttcagagctctttatgcttcagaccacagtgggcacacttcacccctttttttgcagatggggacactgaggctcagagaagttgcaagccttgccaactgctggtatggatctctttccctgggccatgatgcccttccatccacccacatccaatctcggccaccctcaccagccccaacgccggcctccatccccaggtccctggggcccagctcaccaatctggttcctcagttcggccaagctggtctccagctcctgagcctgacacacgctgcgctccttttcttccttcaacttgctcatctgctcaaagcaccaagatgggggtgggggcgcacatggaaggagaggtcaagtaagggctggctgaccgtaggcctgtccacccccgcctccagatacacacgtccacctccagctatgcacagcaaatgacacgatgcccaggaagaccaagtgacctatccaaggtggggggcgggggggattgaaggtcacacctcacctgttccaacacctgctgcatcttctgctgccatatggcattctcctccttcagatttgtcgcatactgatctctctctgcctgcagctgcctcagcgaatccttcagctgcaaaaggagtgcagaagttagcaggggctgtcacgggggggcctcacctactcatggtcatctggggactcctgtacccctctgtgtgtaaagcctcacctgctccatgtgggtctccagctgtgccctctcctccagggcctgctgtaactgctggctgctatcaggggtaggttgactagaaaactggatggtgaaaaacaaagttagattggggggcccaggctgatccacacaacgcccacccccaaaaggtcagcatacaactcagggttatccttaatattgttagtaccatgtctactttattttcactaaaaaatagctttattttcactaaatactcaatgtaaacaattctgatagtaagtgttcaaagttctcccagcctccccaatccagtgtgtatccttcttgacccttttccacaggtatgcaaacatgcttcattgatgcacagtgccagggatagtatcatatatggttctgcaacttaatttcactttgctgaaaacaagataactttaagtttttataatggttacatagtactccaatataggaacgtgtcatacccttacaggtggcaggaaggcagaaatttgctgggcatgccaaaacaatgaagaagaaactgacctgggcactctgtctacctggaggcttggcattcaagaggaaggaagcggaaactcacgggctggccttacaactattggttggtcaaaaagtttgttcaggtttttccatgcaatgttaggaaaaactcgaaggaccttttggccaacccaat

SEQ ID NO: 45255 - DNA, 1676 bp, Bovine  19866881049465
  misc_feature (1)..(1): n is a, c, g, or t
nagactcctcagaggctccctggacagtcccagtggaaggactcatacgctgagggcacgcggcaccagggcagggagatgagcacaaccccatgtcgggtttcccgtgcaggaggcctcaggacctggcctgctcactgcaggaagagcaagcgatgggacggggctgctgctctcatggcggagtgcttatgagtctgggttctggagctggaaggccctggggtgtgtgctaggcggccctgggtagaagtcacttcgcctaagtctcagcgccatccttggacaagggagggataataacccaggtcttgatgccagcggcaggcctagcatggtgtcaaacagacaagacgaatgtcagtgattcaggattccttatcccgggggctgccagaaccttcccctaaaggccgctgggaaagggcaccatgcacacccctcttagacctacagaggctcccaccagaatcccatgccccagtggatttgtccttgtctggggacaacgaccacccactgtggcgccccccactcccagtggtgtcaatagaacttccggtctcatctgatgtctcacagccgaccctcatccaacctcttcttgcaggcatccaaggggagattttctcccagcctgaaatctggcttccggtccctcccacccacagagcctagctgggcccggggaccaccacgccaacggtgcagactcgggagagccggtcccctatgtcttctctcccccaggttaagctgctctggtccccaccaagtccaccaggctccaggacaggactctgggagtctaccccaggcctcagctgaaaggggagaagaaagagctgggatggggggagaagagaagagagggtagagggaacatcagagggtctatttacaagtgaatggaggtaagaatggagcagtttgtgggctaaactggcctcagaaggaggtttacagatgtgcgaggggacgctcctcattgtttaattaagcagaaagtggatcttttcaaaagcaattttgcacagggactgggaggggtgagggggagaggagggtggtggggaggggatcagcaaacaggccccagagcggagaaaggaacagctggccccagagaggctgtgaaatgcatgctaagcagtttaaagcgcctgggagcgcccaagccacccctgcctcccgcgccagcctccctttaatacaaaggcagggctgagaagcagggaaaggtgaggcggagtctcctcctgggaccagggcaggtaaggcccatgctgggaccatcaaggttcgggatttgctccaggcccctgaccaagcctggtcttcgagccttgagttgaaagaatccttgatgcattaaaaaccaggtcccagttgccaggccccaaagccagtgggtgcctcctaaactcagccactcaaggcctgttccgtggagctggctgttaagaatcctcacctccctgcacaggcagccgctcactggatcaatgcaccctgcttcccagaaccatgtgcttagatctggaagcaacttttccaaactgcaggtgtcaaactgataaccgactcgtgcgcgctcgcactcagttgtgtccgactctgtgaccctgtggacggcagcctgccagcctcctctgtccacgggatttcccggtaag

SEQ ID NO: 45256 - DNA, 1925 bp, Bovine  19866881053861
  misc_feature (1)..(1): n is a, c, g, or t
nctgtgaggttcagaagggcagggctcgcacttttccttacaagaggtgcttaataaatgggcactgagggagcgcgggttcagttccttgtcagggaacagagagctcacatgccgtgtggcatggccagaaaattacattaaaaaaatgggcgctgaggacttccctggtggtacagtggataagaagccgtctatcaatgcaggcaggagatacaggtttgatctctggtcagggaagattccacatgccacagagcaactaagccagtgcgccacaactactgaagcctgtgcgtctagagcccgtgctccgcaacaagagaagccaccgcagtgagaagcctgagcgctgctacgaagagtaggcccttatcactgcagctagagaaagcccgcgggcagcagtgaaaacccaatggaaccaaaaataaataataaaagcgaactgaatccccaagtcctcaaaaagtgctctcatatggagaagataactttacggatgaggtaaccaaggcctcagagaggtgaaatgactcattcaaagtcacccagtcaggaatggcagaaccggggaatcaaacccactgctgtcggaccccagagcctgggaactttcccatcaaactctgctgccctctaaacctgaggagccagacttggctttttatgtaattcaattaaattcagtgtagaacatatttgggagcagctgctctgtgccaggccctgtgctgggcccgggggatgggaggtgatgagtcagacggttcccaccccaaggcactcacagcgtggtgggagagacagacaagtaaacagataatgtgatgcagtgtgacatgtgctggaatggaggtgcaccaggcagcacagagggggcggtggttaactggggggggagggacttcctggttctgtctttaccccttactcgttgacttctttgcaagggtgaccctctagtacttgggacccgccccccaggactagagagatagggcatctcagctcacagaggctggggaggatatggggacctggggtctaccttcttccccaccttctcctcacccagcaataccatggcaacagtggttgccatggaaactgcaggcagggctggaaaggatgggactccccacagagagcccctccccaggcagagacatgaaccttccctggagctctagcctgagagcaccaccccccctcacccctttcctgcacagatggacccacttggccctggcaggcctgaggggtggaggtccctgaggtgccacatagagggtgtggggaacccagagcccagctggaggggtgatcaggggtctgggccagcctgctccgagttgctgcctcccagggctacttaaaggacaagcagcttatgggaagcagagattagagcacagagcatgtgtgggagcagtgcctactcagacccagatttcccaggctggggtggggatgggtgcccaggtggcgaggggccccatcttggccctggcccaggctctcagaattccctgggtggcttgttcaaatgcacattcctcagacaggctgggttagaatcttcagggttggggggcgcaggggaggggaggagggcatctgggattctaaacacaatccccatgttcccatcaagtttaaggctcctggctcggtgatgaggaaccagcgccaggcagaggccctgtgttcgagtcctgacttggccattccccagcctggtgcccctgggcaagttgcttcaccctcagggcctcagggtcctcagttgtaaaccacatgatctaaaggaggcatcataaatgaccacacgtggctgcacaatgattcctagagccttagcccatgcctggaacacagtgggcactcagcagcggagggggctgccaaggagagcctcctgt

SEQ ID NO: 45257 - DNA, 1593 bp, Bovine  19866881075244
  misc_feature (1)..(1): n is a, c, g, or t
nacacacaaaacactgccttattcttccttcccccgacaacaaggcctcctctccgttaggcatttttatccctgctgttcagatgaggaatgaggtccaaagaggggaagcccatacctgtagtagcattgaccagctgcaggaccagggggcgtcgcgtgacaatgccagatcctcggggcaagaagtccctgcagtgaattgagggtgagaggagagtcaaggtctgaggaggctccctgtgtcccagggacgcctgtcctgccaccgggggcctcaaagctccccggaagtgcctcaccacacctcagcccaagggattcatgaaggggagagggcagctgagaaaggtggaaaagaccaccctcaagtcctctgggtcacagaatttgtgagtctgaactgaccctcagacctctctcagtctgccctgtgttggttctgagccaacaggaagtccctgccccaactcaatcactgccattcaactcaggagaaactggggcatgaggtgccccaccccaatgcccaaatgtccggtggccacagagtgggtgccaaggaaatggagctgcacttcgtcccctcctttccgctgtggggaaaggcaggatctcacttccccttttctggccccatctggctggggttgaggatgagggggatgagggaaaggaggaaacaaggaaaaggactcatgcttcttaagtgcctaccacatgccaggctctttgtgggcaatatttcatggactctacacaatagcctcactaggaagacagtattattatccccattttacagatgaggaaactgaggctcagagatattcatgttgcccagcctgtatctactagaccctgcagtagatctgtttgaccctctggtgaaggctttctgcccatcatctcccagcagacccagatccctttgaatgactggactgagggggtctcaaagtcacttcctgcctgtagacctgatgtctattcctcagacatctgctatgtcaatttcagcctcagcagtccttctggctaactcttcagggtgccacttctctctgtcctgtcagctcttttcatcactccacctgtttacccacagccccacccaagccagcacaagggtgatggtggaggcctcttcagggatcaggctactgggattagaaacagggggattgccaggattcaggaaagaggggagctaaggggccacagagatctccttcatggtgaggcacatgaaggcccagggaggggaaagcatacactcaagatactatagggctgggacagagccagaacagaaacctggatgccctacccggagcccagagcctgacatggactcacaaagctttctgtgcctcaggttaagggcagagtgtccccggaacaacagaatcagcccaggcttctgggttcaaggcctcatctgggggccctggggagggctcttccattctctgtcctcaccctgccccacctctggggagagcagagactaatgaggaggagtcagccactttgtggggaaggagcatgataaatcctgcatttatccatcatttctaggtgccaggcaaa

SEQ ID NO: 45258 - DNA, 1008 bp, Bovine  19866881117085
  misc_feature (1)..(1): n is a, c, g, or t
ncgggtgtggggagccgcccacagccacagccccgctttggggatgggcctccaccccctcccgcccactgcactaggacgtggggctgcttcctcaaaaagagtcctggtccccaggccgcccgctctatccagcggtgcccaccccgggaagctcccccaccaccaggctgctctaacctgcccacacccgccgttcctccagcttcacctgccccctttcccagcacgcacatcactacggtcagcgccctgagactgcctgcttcacccagcctcacgtcctgaccaggctgaacctccgtgtggcccgcaccgcccaagactcagctgaggacctgcctcctcctccatgcccagtgctccgacccgagcccagggctgaggacaccccgcggtccctgcttctggccgtgaccaggggctgagggccaaatgctgggcctcggccacctgctgcgggatgcggagcagagacacaggctggaaggctcacctgccacatgggacggccgcgtggggtggaaggccaggcacatggcggcgctgggcacctccaccaccgccgacggctgctgggggctcaggcctcgccggtccaagttccaggcacacacaaaggacctcagcgtgctccagtccccgtcatccagcctgcggggacacacccgcacgagctcagcccgaggcctgggctccgtcccaacccgcaccaccccagcccacctgctcctactgcctgacccacctcacaatcaccccaacacagatgagtctctgttcccatcacacacagacacttgtgctgggtacccaagtgccagaggcgcctatatggcaccccaaggtcatgactttccccagaaaagggtttccaggaaccaggcacggggccacatgtagcagggggaggaaactgggcatgtctgacgcaggctgggagagacgaggcaggcccagggctcacagcccgctgctgatagcgggcactgggagaaccttccttgt

SEQ ID NO: 45259 - DNA, 745 bp, Bovine  19866881137602
  misc_feature (1)..(1): n is a, c, g, or t
nacctgggttcaccttcgaaggttcgctctgtggcccgcttgaagtccgtcctccctgagctgtttaaaatgctaatacctaagacaccctgtaactgtcccttcctttcaaatggctttctggggccacagtgatacatcctagggtttatctcccattgcattccaccttccttcctcaaatggccactgaagtggtcacataaggtaatcaagctggtgcagcagccacaggaaaactggactaaagttgggcttctttactgtctaacacttctcccaggcccctggtaccacatgaattcattcataagttttctcttcctcccccactctccagctttctccaggtcagcccctcacctaggaggtcctctcgacattgccattaccttaggaaattgctctgcaggtccgaccaccagcaagatggtgggtctcttttccgtggcctcagcccttccgtcctgcttccccaaaaagcttggcatctggtctctccgagccggggccggggtgcctctgacttcattcccgctgccctctctggagccttggcacccggccctggggaaaaagctagacagaaaatgccacagcatctgaaacattccggcttactccccacgttgccgccagtgaccgctcacttttgagggctgtgatcacaacaccgaaggtctctggctacacagctgcttggatgactagcctgagaagttgggagggcggcagctctgcctgc

SEQ ID NO: 45260 - DNA, 1050 bp, Bovine  19866881165324
  misc_feature (1)..(1): n is a, c, g, or t
nctgattaaatctttaaagaacaacaataaaaaactcatattttaacaactttttttaaaataacaacattttcccaaactgttgttaagcagcggcattgttttccctatttataaaattttttttaatgtgtgacttagaagacagctggattctcctgtctaactacttctgaattcaatctattgcaatagttgaatttggttgtagtatatgaagaaacctgagctcatacagatatgtagttggaaaatgaagaattgatgattaaaaatcttctttgatacttactacactaaaactcaacaatggcaattttctaagggggtttccaatgtgaaatctgaagacataatggtgaacttctgtaacctgttatattaaaatccattggcctatcttgccttttgaatggactttttattgttatgcatgattttgtaacatcatgcatttcatatctgaaaaatattggctgactgaataatccaagtcctccaaatgctgacacatatcattgtacagtattaaaagaagataatcacattcattaaagtcatcaccaactccatcagaaaagtcttttaagtagttggagcctgtcaagaccatgatggcaaatataagttttacaaaattctaattttctcttaaaagcttgaattttatcattagcaacaaacagtcagttgtttaccaacccttaaaggactggctcatttctttttttttgagaaaatgtatgccaaacaaccaagtctgaataatcataatcattaatcatagttattttttttcaaacgaaaaaggtgttgcactaaaaaaaagtgacgaattcagctgagaatgtaaaacgattatacaagtgtttttcctcaagataactgttgtacctcagtatgcagcacaagtgctttctgggtacttcctgttaaatcacacagaatattaaacagaatgtatttaagatttaaaataatcaatactttttactacttcatcagaaaatttttaaggaacaggcagattttaaaatatttcacctttca

SEQ ID NO: 45261 - DNA, 2099 bp, Bovine  19866881202018
  misc_feature (1)..(1): n is a, c, g, or t
nagctgactcgcaaggtgctgagcctcttcgtgcagaagctggggaacctgatgtccttggacatctccggccacatgatcctggagaactgcagcatctccaagatggacgaggaagcaggacagaccaggtggggccccacctgccctgtttgcgagtgggtgccatccaacaagcattgaccaggcacccctctgccaagtgccgtgctgacgaggaagaaataaatcaggccctctcgagtgggtatgagctagtggggacaggcaggttatcactggggctgcggtaggggcaacgcggggctccggagtggcctcaaggatcagaaggaaggaggaggaggcaaggcatccaggctgtgccgaaagctcactcttgagtttgccagaagacgtttaccacggcgctctggcagagggaacagcatgtgcaaaggctggaggtacgagcacggggagtgactgggaggttgcagcactcaaatgggctgagccgtgtggtggtgttcacgggaggctgccgttcccaccactcgttgggtgttaactgctgacaggctggaccccgggttggtcggatgagagagctgattcagaaccccctctagctgtctttgtttttttttttttttttttttaatatttatttacttatctggctgtgttgggtcttagttgcagcatctgggcatgtgggatcttagttccccaaccagggatcaaaccaatctcccctgcactgcaaggcagagtcttaaccactggatcactagggaagtccctggtgtgttttttttttaaattgtagtataattgctttaaaatgttgggttagtttctgctatacaacaaagtgaatcgctgtatgtatacatatgtcccccgttactgtcgttggtcttaagccctccccccaacctagactggaatggagtttggttgatgggcatgtccattcatggctgttgcgggaacctaaaggtgacacgccctccctggaatggcaagcaggattggctgcaacagttatctcccatcccacgtgttctctacaatgtgaccttgtcaccctcccatcaagaggtggggtctatgtctgtctcctgcctttttttttttttgaccacaccacgagacatgggggatcttagttccctgaccagggatcaaacccgtgccccctgcagtggaagcgcagaatcttaaccagtagaccaccagggaagtcccctatgcctttaaaatgaaaaatagacaaggctagagggcctagcagagggtcccaaggaaatgtgcttcaccacccccagggagaggctctcctttgtgctgaatccagggcagccacaggccccacaccactgatgccagcaccctctcccctcagcatcgagccttccaagagcagcatcatgcctttccgggccctgaagaggccactgcagttccttgggctcttcgagacctccctgtgccgcctgacgcacattccggcgtacaaagtgagaggggggcacagggaggggaggaccagggcgccccaggacaagggaggggggtgtctgtcctgggattagagatagaattaggatcagaaatcctgcccctcagccacttccgggatgttttgagcatcctccatctccaggtgagtggtgacaaaaacgaggagcaggtgctgaacgccatcgaggcctacacggagcaccggccggagatcacctcacgggccatcaacctgcttttcgacatcgcacgcatcgaacgctgcaaccaacttctgcgggccctgaaggtcagcaccaaccctggagggccttccaagggtctccagttcattctcccccatctcctcaaccatccccctcctccttcccaggatactggccatcctaccccccgaagcccaaccccatctctcagcacctcccttggcccagccttgaccctgtcccaggaccatggccgaccccagtttctgtcccccaaccccaactcctgccctcagggagcaggatcgggctgagccctgccccagaggacctgtccaagcccccgcaccccaccccaggcctgtccttgcatacatgcggcag

SEQ ID NO: 45262 - DNA, 577 bp, Bovine  19866881205840
  misc_feature (1)..(1): n is a, c, g, or t
ngcacagtagctccccaaacgttcactcatctcagggtacgctttgcttttcaaaggcttgcagacacgctcaagtggggaaccaggcaggtaacagcctgcagattactgtccggggagaatctggggagggcagggcccaaggtgccagctggcctcctgagtcaggctggggacaggcaatgctccttgtaagagctgggggaggggaggtaggggaaaaccaacagtcacacaagggccatgcaggaggcacaggcatgcttggggggtggggcggcatgcggagttgggggggaaggcagcagcatgagcagtaccctgcggggggcctggttgggccccaggccttcatggtagaatccacccaactcttcttcactttgcatgccttggcctggcactaccaccccccagacacatttgcctggctccaagctggctggccagcttgcctgtgtctgccccactcctttggggtagaagttcagcagcacccctcttccgctcctagtttttaatcaactgaggctaaaggggaagttgttccaaatccttggcctatgaactctgtccc

SEQ ID NO: 45263 - DNA, 754 bp, Bovine  19866881250629
  misc_feature (1)..(1): n is a, c, g, or t
nggggaagatccccggaagagggcagggccccgactccagtactcttgcctggagaatcccatggacagaggggcctggcaagaccatctataggttcgcagagtcagacacaactgaagcgacttggcatgcacactgttactgggtggcacaaaagaaggacttaagatgagctgaagccacaacccaaagcatcccaggcccgtaccagcccatccctaccgtttgctgctgctcggcccagttcacctcgaagccgtcaaacgcgtggctctgccaattcttgttcagctctcgggtaaccatggcctccactttccggagaaaggccgcgagctgggggccgttgtaccgaggcacagacggcaggctgaccggctcgggggcctcagtctgcacttcagcatccacatgcttccgggcctgcacggacgcttcagccgtggcaatgctggccgtctggcaacttttctggagaaggagattgaaacgcagtcaccagccagctctcctcacagcaccactgcccaggcactcacccacctgcagctgctgtttatccttgggcaaaagaaccactcctcactctgtctgcctgacgaccgtccccttcctctagcccatcttccttgggaggaacccaattggtgtggtgtgggtgggagatgacccacagggagtaaccctgtccagccagagaaatccactcacgtggtgtcaaaaggcaggggaaacacttcaaggtcatgagtt

SEQ ID NO: 45264 - DNA, 1345 bp, Bovine  19866881326362
  misc_feature (1)..(1): n is a, c, g, or t
naaacacacagcccagaggtagcgtccccacctcagctggccacctctgaggccagctggtccaggagctctgtctcccgggctccctgttcagtgaactcactgctcagctgccacacctttactgtgcccttggcatcaccagcagccaggagttgagtctgctggcagttgaattcaagacagtagacagggctttcgtcctcggtttgcttgactgaaactgtgggcttctgggagcttttctggagatcaaacagctgcacgtcaccttcagggagagtcgtggggtgagacaggcccagagccgcagcccccgagccttgcggcctctgagcctcttcggttcccgaagacgtgagaaggctgtgactcagtgcagctctccatcccacgtgagggaaggcacccttgcccacagcctccccagcccacagttgcagggacgcgctgggctcatgccccttcagtggatccaagcctggggcccgtgccttaccttccccagaagcagctgcaaacaccagggggcgcaccggggaccagcgcacagcaaacaggtacttgtgggagagctgcagggaggtcaggggctgggcctgcagcatggagtacaggtgggcgtggccatctgtccctgcgctcaggaagagattcctagatgggacacacggcaggcggggggtgagcgctgggggtccaggtgtggctggggcctttccaccggactcctcatgggctggtgggctccccaaagtaaggagccaattccctggagccaaccacgggagctctgggtactggagctcggtggggaaggcccagggcagactgcaggttcttcaggcagttctgtgtgggtcctggtgggactcccccgccctccctgtgccagacgccctgtgggccctcccctacctgtggaagggggagcagctcacagagtagacggggccgccgtggggggcgaaggtgaactgcgccggggcccgcaggggcacagagctgggcatccgtgtgacagcggcctcctctgccgacagggagcacttgagcgggaagccgccttctgtgcccagcacgaaaaggctggggtcgaagctggagaaagccaccgctgtggcgcccacctcagcctccccacgggaaggctgcggaggaaaacaacagcagggcagagctggggggagtctgctcggtgtccccaaggagccccgggcacgtgcgtgaccgctgtagccctcagggactcccacctgctcgcctgcccccaaggcgcactggctcgggggtcccatggcccagcgctgccttgtggacctacgtacaggctggcagcctcacc

SEQ ID NO: 45265 - DNA, 848 bp, Bovine  19866881405133
  misc_feature (1)..(1): n is a, c, g, or t
ncattcttgtctagatcaggggtctccaacttccggccgcggaccggtacctcctgtcagatcagcggcagcattagattagaagtaaagtgcacaaaaatgttgtttagccgctcagtcgtgtctgactctgcgaccacatggactgcagcacgtcaggcctccctgtccttcaccatctcccggagcttgctcaaactcatgtccatcgagtcagagatgccatccaaccatctcgtcctctgttgtcctcttctcctcctgccctcaatctttcccagcatcagggtcttttctaatgattcggctcttcgcatcaggtggccaaagtattggagcttcagcttcacaaaaatgtaatgcgcttgaattgtcctaaaaccatccctcccgcctccagtccgtggaaaaattgtcttccacaaaaccagtcccagctgtcaaaaaaagttggggaccactagtctagacctcatccagagtgcctctgggtggcctgaaccactgcccctgccattaccccagggccctgtatcccctgcccgtatgcctcctgcaggctcaggcccagctccaggagtcctgccagaaactggacctcctgcggctggccttggagcagctgctggagagactgcctcctgcccaccctctgcgcggcagagtggcccgggagctgcggactgctgcgtctgggaacccacagccttcagggacgctcgtgaagcccactgccatgacaggtacctgggagcccatcatacttcaaagctctccttcccttccagggaggagcctggaactcagtggggaagaattttggagaagatttctaatcccggtttcac

SEQ ID NO: 45266 - DNA, 842 bp, Bovine  19866881488898
  misc_feature (1)..(1): n is a, c, g, or t
natcacaggattcacatagaggtggggccgatgccaaggctaagctgggctcttccttggtgaccggaagtggctcagccctgccagcctcagtctccccagctgcccagtgaggggacttactacctgctgaggtgggctctgaggatgggctgaccctgccctgcagctcacttggggtgctggtcaaacatgatgggcaggaactcatccacaggcagcattcggcgcagcggctgggaggccagcagcttgcgggcacccgccaggctcaggacgtatgccagtgtccagtaggagtagccggccgccaccaggtgcggcagcccctccacaactgcctcctcctcggggttcacctgcttccggccgaggtagctgcaggtgacaccaggggtcccagggatcactgttgatgtcccagggtcctccctgtccccaactccatctacagagccaagcccagggcggggcgagggctggccagggcttcctgcaggagaaggcagaccccgggaggcccacccttctccctggcccctggggccccgggctgcctacatcaagtcccaaggaagtttctccgcctccacctcctccatcagctgctccagccgccccttgaaattgctctcaaagcgtacatcgtcctcaaataccacgacctgggccaggccccgggtgacgacctgaggcacaaggtgggggtgggagggtggctctttagacctgggctgtcgtcccctcccacctggctgacactgacagacactcctggcttcagttacaggccaagtgctcagccctggctatgtcgctcagctgctccaaagcctgctggg

SEQ ID NO: 45267 - DNA, 1025 bp, Bovine  19866881544881
  misc_feature (1)..(1): n is a, c, g, or t
ngaccttcgacaaggacagtctggccggctgaaccccaggagttcaaatcctgtctgcgctccctgggctatgacctgcccatggtggaggaaggggagcccgaccctgagttcgaggccatcctggacactgtggatcctaacaggtgagcgtgagggaaggagcagaagtggctctgcccgaggctcctgctgcaccctccctactcactacatcttgccccccaccccagggacggccacgtctccctgcaagagtacatggcctttatgatcagccgtgagaccgagaacgtcaagtccagcgaggagattgagagcgccttccgggccctgagctctgaagggaagccttatgtgaccaaggaggagctgtaccaggtctggagctgcttctggggccagggggtgggtgtgtcctttgaaaggcaaaagcccaggcaaggctggccctgagcttgggggcagagctgtctagagtcgcagcccccacccagtcttgagcctcagctgctttgtgcagaccctcttacccattttcaagtgaaactcagcccaggccaaaggctgttaatggcagagatccagaagctcgggcacgaatgtttctgaagtcgggcccactgcccccacagcacagttggtgtggctggtcggggctcggctgacgtgcacctttccctccagaacctgactcgggaacaagccgactactgcgtctcccacatgaagccctacgtggacagcaagggccgcgaactccccactgcttttgactacgtcgagttcacccgctcgctcttcgtgaactgatcctctgctcctaggttagcctggcccacgctgcttgccctaccgtcgccttgctgcatgtcaactcctctctgtgctcttaagaaaaatactccagacagtgttgctttccagtgtaaccttaacttgcttagcttggtttaagatttagtagaaaacggtgcttcagtaaccggctttaggtccagtcgccattgccacgttgctgcggg

SEQ ID NO: 45268 - DNA, 1180 bp, Bovine  19866881564683
  misc_feature (1)..(1): n is a, c, g, or t
nacctagcacagccgaaataataatacaaattttctttaaaaacatagaggctgtctagttcatgagttcctgccttacacccctcgccaggccattttacagataaggaaaactgagggcccaggccacacagttagtgaagaagtatttgggagagggcgatcttaatgccttaagaccttgtggatggtagatcaggggtcccctatgcctgggctggcttgtgagaccacctcccctgcaccatcccgagcctctgagacccccccactcactcgtcctctctctccaggacgtcccggggcacaggcagcagggacagcaggaaggcttggctcatgtgctggatctcgccgagccgctgctggtgctgggctcccgacatgtgttcctggaactcctgcagcaggcgggagcgagaaaggggcgtgaggagtgagcccctgaacactggggctagaggaggcctccaacctgggcttcctggccaccccactgctgccgggaggacttctctctcatgaccctgtatgggccagagaaggatggtaaactggggcccagagtgagcacatgccagccagagcctctgctcccgctggagaccatgagcacctccgaggtgaggagcagtgtgatcaaattccaggtccccgtggctctgctcaggccaggcacagaggggcagcgctaacaatagtgacagtaatcacaccagtgtgatgctgttactaaggctgcactcgctctgcgctagcccagcgactcatgacttcaatgtcaagttgctgaatccccagaacccctctgggaggcagtttttctttttctagaggtgggttctaaatgtttcttctgatgcatgcagaaaccgaggcaccaatgcctcagtttggaaggtggaattcactttccaaaacccacatagtcaatcagggctgatttgcaccaggtccacccaactctgaaaccctgccccctgggctggtccggagatgttttgtgatctaaggtacagctgccggaggtggggcttgggggcccaagtggacacagaggcagccctgggaaaggcaggctgggcatcacatacagcccccaaaccctccacccgcccacgagatctcccacccccccaccggagggtacctgctggctactgcagccggccttgcagat

SEQ ID NO: 45269 - DNA, 690 bp, Bovine  19866881572604
  misc_feature (1)..(1): n is a, c, g, or t
nctggaagacaaagtataaagggtggaaactggaacagttcctagaataaaaacttgcaggaacctgactcactagcagacatatttaaaagagggaagtgagaattaaacagagaagcaatgctgggaaactgagaagcctgagaaccaaagtgaatgtctccaccaggtttccatgcagttgcggcagcctctgcctgagagaaatggcagaaaaacagcgagccaggccccaccggccaatgatcacaacccctaaccctctaccttcaagagcagctgcgctggaagaggacacactgctgaaccgctattccagttcttagttatctgcctttaaagggtccacactgcccagctgtgctttcctgcttgcttcaaatcaaaccggctgatccacctccctcttggggctcccccgagccccagccagctgattcatgtcccttttggggagaagtgccagtgagaggtgtgggtcttacattccagcccgccttgctcccaattctgtaggtcagtaaagaagctgttcagaacagagttctaatgccagccagcccaggcagaggggggaggattggcaaagggtgccagttatgagtctgggaaatggagcagttaattattaaagtaaaaagtaggtgaatttaaaaaggagccagccaatcccatatccctgactgtagg

SEQ ID NO: 45270 - DNA, 860 bp, Bovine  19866881702528
  misc_feature (1)..(1): n is a, c, g, or t
ntgtactggaatgacctttagaaagccttccactgcctagcctctgtttcctcatctgcaaaaagggttgatgaagtccttggagctgatacaggtggtcaggggtattcctgggtggaggagaaggcagggtggaagctacgtgcccaggacttcctttctttctctcttcctccccctgcagcctctggtccgagagctgtgccgcagctgcgccgtggtgtccagctcaggccagatgctgggctcgggcctgggcgccgagattgacagcgctgagtgcgtactgcgcatgaaccaggcgcccaccgtgggcttcgaggcagacgtgggccagcggagcaccctgcgggtcatctcccacacgagcgtgcctctgttgctgcgaaactattcccactatttccagcaggcccgggacacactctatgtggtgtggggccaggggaagcacatggaccgggcgctgggtggccgcacctaccgtgcgctgctgcagctcaccaggatgtaccccggcctgcaggtgtacacattcaccgagcgcatgatggcctactgtgaccaggtcttccaggacgagacgggcaagaaccggtgagcatgagccggggagctggcctgctggggatctccctggcagctggcggcctgccttctccaggagcctctggtgcactaagggtctgctctgtctggcactggggctcagcagtgatagaagcaggcatggtcctgccctctgatggggacaggaatcagagagactgtcatcatcgaatgaccatatagatgttccacacggcggtgaaagggcgttcggcctcaccagtatacactgtggcgggggtggtggcggg

SEQ ID NO: 45271 - DNA, 932 bp, Bovine  19866881841835
  misc_feature (1)..(1): n is a, c, g, or t
ncaaaaactcctggaaataagtgtggaccagatgtatatagaacagtggtctctaaaattttctctttaggctttctatactctacactgtctacagagactatgactaactccagcttcctggcccttcactgtcctatttccacctgggcgcaggcttgggggagcggcctgcacacaaaccctaccacctcctcctattcgcattctttgcggagacaagtgatccagatctacatctcacacagataagctctctcttctctacacgttcccttcctctgcttagaaacccgccggagcacacagctcacacctgacaaggaagattcctattaaaggggatgtcggcgagagccctgcctgttcacagaagcccctggggggaagggagccgcagcgtcacctcagaccccccctggtgggagagagcccggtgtcacctcagagagccagaagtcgaagtccttgatgccagtgttgaagttctgctgcttgttggcttctttcagcttctggctcttctcagctgacttctgcaccaggaactgccactggtcagctaaggcggccagccgggcctaggcgagagaagcaagtcgtcagagacaggcagcccccacagccagcgccctgttgggaagccctcctcagcgaggttgatgaagaggctcacaggcgctgctctcgctagcaccatcagcagcgcagactgaaacctggatactttcctaagactgagtttcagagtcaccatcaagcggactctaatgctgacagtgaagtccagcacctcttctttcccggccaggaggaggggagctggggcccataccttgacggcatcctcgctgccggcgcaggccccgcggtcaatgagggagttgcccatgtcgatgaccccacggatccggtccgcatggcgtgcagtt

SEQ ID NO: 45272 - DNA, 1121 bp, Bovine  19866881960821
  misc_feature (1)..(1): n is a, c, g, or t
nagtcggacacggctgagcacttcactttctttcacttcctagtctgaggtacacggtgtttcggcagggactcctatgaccaccctgtgggaaggggccaccagccaccccgaccccacctttgccctctatcgggttgactggcgtcctcacagcagcacctacgagaacagaagccccaaaggacaggtgctttcctggtttgattcactgtgtcccagctgctgaggacactggtgtgatttttcttcttttggctgcactgtgaggcatgcaggatcttagttccctaaccgggcactgaactggaaggcagccactggaaggcagccactggaccacgggaaaagtcccatctggtatgttttaagtactaaataaatattttgcctgaattttcatattaaagttttcttcttttactgctttacggtctacccgtcccccactagaatattagttccatgagggcaagaccttgtctaagttgccacacttggatcagtggatggcgcatgactgattctgaagaaatgaatgagttcctcagtagttgggggtcctgacgccctagtccgtgtcctctctggctggggttggagagtgtcacaacttgtcacacccaaggggcacactgtctctacaacaggggacacgatgtgatagttaaaagcataatcctgatttgaatattgcctccgttaatactggcctgtgaaatcagcaagttgcttaacctctctgagccttagtttcctcattttggcagagttgttcgggtggaattcagtgagatcacatgtgaacccgccatggggcactcagtagaggttagtaagtgcagggcagtgtaattgcttggagcgatgttcctggcccacgtgcctgtaccacagaaaatgccaatgccttggcacgagagactgcaaggtagtgctgcccatggtggaagcacaggcccctcgttcctcaggacattactcatgtgccattcatctgccctccctggtgactgccaaacgcacagaagctggtgactcacattcacatccaggaaatggagatacgcgcagccaaaggagccctcgggcagactccggagcttgcccatgtcgagggt

SEQ ID NO: 45273 - DNA, 3274 bp, Bovine  19866880456228
  misc_feature (1)..(1): n is a, c, g, or t
nctgctggccccatgcaacacctatcaacacggtgccaaggcttgattagtgggtttcctagtgggagagaactagtcagagtaaagctttagcagcaggatgtggcagaaacaactgggctgtgaggaagcaagagacctcttgtcccggatgcaccaactgcagccttaaagcaattcataatctcgccaatccacatggccgccctggacttccccccatggctggtaatcagacctggccatggtcccctgggtatacagggccaccaaagttcaactgaccccaaatccaacctgctcccctctcttttggttcagggcttaccatccaggtatgcaattttaacactctcggggtctgaactcaaaaaagcacagatccgcaaatgtaaaatgaggggagttagccgaaggctttgtctagatcattccaaattttatttttctcatgtctttctaaaatgactcaatttagacgcagctcaaggtggtggttgggaaaataacctttctaggggcagtgggtcccttctgccaatgtaagatgggctcctcttactggtagacccttactcagctggacatggaggtggcagacagcagagtctggtgggtaggatgtaccattttcactcacctataaacactttccctcactcacctcccaaccaagtacactcttaggtctcttctgctggaagagggaattcccagtggcccttactgggcctaaaaagaatctgatgaaattataagggctggaacaaataaaaaggtccttggaacagaggtgccagggctgaagacaggaggatcaagaccacagtgcttgaatcaaccatctctcactcctcccagcccgcagtgtgtccactcttaaaactgagacggttccagataattcatctgaccaccagccaggacaccttactgagagcagcccctagaagcccacaagttgtcatcttgggcttattcgcccaaacgtatccttcttcggcaacatgtccaactctgttctccccgcccccctcaaaggcaataagggcccctccactgggttcccacaagcaggctcaggcctttattacaggcacacttaacacactgcaccacggctactcatgttcccatcttactcctgcttcagactcagcactcccaagggcagagacctgctgagttcccctgggtaccatcccttcttctctccatccccaaagcacaggcctggctggcacccagcaggtacaccaaaaatgtctgctggatggatggatggatggataggggatgtgtagggtctagggccatgaaatggatcttctggaggggccaagctaaagcacacaaaaacagactgatatttcccaagcagcagacctaaaaatgagaatacactcattaaaatcttttcaaattaagttttccatgaacaagcatctggggaactgtcctgtacttccaaggccatttacctaaacacgattttgtggctattacattaagtgctgtcgagtgaggacacaaggagatcagttaatgtgacaagactagaagctgatcctgttgcctcatcattaactaagtcgccctctctgtgatgaagtcactcactcattcaacaaatgtttatcaactgctcatcaaatgccagtcacccttccggcagtggggtacactggggtcacaaagtctgggaggagcagctacaggaaactacagaagaacagattcttcgtggggaatgaagtcagcctaaaaagcttaagacccgagcccacaggtcgcagtaccaagtggtactccatgccttcccaagctcagtgtaaaatatactcagtgtaaaatctttcaaagttctaagcaccatcttgaaatccaactacaagacacgtatggagagttgccccacacacagcaggatctagagagctctaccctcaagttcttgcaccacatcacctagtttttcggcctcccatctcaacacatcacttttcacaaggaccagcaactagtggtttggagatggtatggctctctatagcagctccttctgatctgacaggagctaaaaataaccatgcacattaaaaccatgtgaaataagaataccgggttgccagctaaagacagggccaggcaggcagccagcagggaaaggtatggacattgtgataccttcgctggccagtcagaggttccaatttagtctatctgctggttcccagccaaggtcccgataaggaagactgctggacagctgatgtcttaactgtcctgcagataaatgaaccagcctgaccctctcagataagatgcaatgggcaacatctcactgcagcctgacccacgtgcaacgtaataagtcaacagtggtcctggaagaacaacgaagatagaaggccagccatccaaatctcattagtctccagagcattcaatgctgtgcgtcccaggtaggtttgaaaggaggaaataagccgtgtgtgagagtgccagtcaagcgtgcacatccgaggtggtggaaagcatgccatctgggcagagaaaggacttcaggagccttgaaggcacacgaggctctctcccttccatccaccggctccacatccatcagaggctaagtccctttgcacccatcttcagaaggctctctccctcctctccattacggctcaggccacatcacctcatctgtgggccacagcaagagtcccccgagtggtcccagattatcattccatttatcaattattgatcttaagttttataacatatggaaacttgataagcagaaagggacagagggtggaggtggaggagagggtgggagaaggggtagagtctttctttagctctaagtattaaggtgcccatctgatggtggcctcaaaccggttataaatacacacagttgtaccacggtggagccatgccctgggactcttagaggccaaaatgttgggttggaaaaccagctctatttcttttctagcgatatgactgtgactttaggcaaccccccatgccgagtctcagcttctccgtctgaaaaacaggtactctcctctactctgtccaccctgctaagtcacggcattaataaaaaagaaagcaaacaagcatccactgtcaactgcagtgtcctatacacacaaaggaattattatcactttcatccaaactttatttctctcacatctccacaggaataacacaatgtgcttttttgccaaatgctgaacaagtgccgacaaaggtccgt

SEQ ID NO: 45274 - DNA, 1012 bp, Bovine  19866881028515
  misc_feature (1)..(1): n is a, c, g, or t
naatggctactgactaaatgttttcttggtctgtgtgtgttgtgggggggtgtctggggcgtgaaggtgtgacactaccatgtgtcatgaaatcagtacaaccccagtgggctggccactgtgatgacagaccaagttctgaatcttggctctatcccctactttaacctttgtgaggttccgagtaagctgtggcttcatcgtctgtgaaatgggtctgcctcacagatcgatgatgaataattaaacatgagcgctataaagccttcggtttgatgccagtctcaggtcagagtggggactcagtaaacagcacctaccagaccagccaggggaaagctgggtgggtgcaggccagagcccgggctctcagaagacacctttgatttgtaaaaatagagcccgtgcccctgctttgagctgtgcccagcaagagctacagatggattcctgggtggctttcctgctttaacagaaaaaggaaacaggaggccccagtcccaactgctaaaaataggcgatgccaatagactttgaccttgcttcagggctgggcagcgcactatggaaaccaggcttggctctttgcagggagctggggacgcagagagttgtgccaagagccctgccactgccagccctctgatatgaatatcaggggctgggtggggatgtcattcttggcaggagcctctaccgtggtgcagtaagccactggccaagtggaccgtccccttcctggcccccatctattacacctgccaccaactgcttcatcctagaccctagggaaaaaatcagtggctcagcaaacctttccaaaaggtctcatctaaattgctaaggtctctcctacaggcaaggcagccttgagattccagctaagctcagtgcatcacctctgggggccctgatgacttatgagcctgcccacctggaagaagagacccacagccatgacgggttacaaagccctttctcctcccttaactcacagagtccctcaatttcc

SEQ ID NO: 45275 - DNA, 1134 bp, Bovine  19866882122887
  misc_feature (1)..(1): n is a, c, g, or t
nctagataacttgctacttttctctgaacctcagtaggaaagtagctctctattacctgcacgtgcacacagaggggccaggggtctctgttcctactgccatcactactaagtcatcacaaagaaatatacactgtttacaccaggatgtcgtaaacacaaatatctgaaattactgaataaagttaccttgaaatttcaccctgagtgagaaatagcagctcagccctcagcaagatctggtgactcaaaactgaaatctattggtgcaaagacaatgcagaggatccctaatctgctggattgaaggccaggctgtccagcttataaattccacctcccagttgaagaagacttccatgtttaccaaggttccatgaccccagttttcagagaaagcctgagactcagagagatcaacatgaccaagttcctattgctcacaagtagcagaccaagaatcagaacccagccttctgggttctaggacagagatccttccatctcatcccactgcttctccagtcggctcattcacctgtttggctccaaacacatgcaatgtgtccagccagcaaagaagaaatatttcttaagcccaattcaacacacagctgcagaaagcgtgcttcatgcgtgctcttggctacaggtgggagacacggccacccggtcaaacaccagcagacctcctggtgggaggtggggggcaattcccattgtttggaggaagggaagttggggcagaatggaaagtagttgattcattcaaacactaacccagaaaccacaacactttctgtgggggacaccaagagtctgggcggctcctagaaattcaattctgataaaacagagtacgtgttactaatttcctgacctgcctggctaaccatctcttagaaatcggaggaagcaaccaataccactgcccttaattttggtcaacaaggaagtgagaagagtctcagaagaaagtgttgttttggtgtgcgagtcagtgaaaggagacagtgtgaatggggtcttcttccaaccaggggcacagggctctccacatgggacacgagctctgggcgggtagagggtaggcttaacggttcccgcacatagcaccaccacactggcttccag

SEQ ID NO: 45276 - DNA, 843 bp, Bovine  19866880621471
  misc_feature (1)..(1): n is a, c, g, or t
nctaaaggagatcagccctgggtgtactttggaaggaatgatgctaaagctgaaactccagtactttggccacctcatgcgaagagttgactcattggaaaagactctgatgctgggagggattaggggcaggaggaaaaggggacgacagaggatgagttggctggatggcatcactgactcgatggattcgagtttgaatgaactccaggagttggtgatggacagggaggcctggtgtgctgcgattcatggggttgcaaagagtcagacacgattgagcaactgaactgaactgaaactgcataaacgaaatttataaataaaatgaatcagattaccttgatatcaatataaaatagatatgaattactggttataaaatactgaataagtatttctcccaatctaattaaatattatagattttatagaactggacacatacactaatgttactatcatcttttaaaaaattcaagaaataggtaaacaatattgaacacttctatatattttccatccttacatttggctctaaagtattcatcccaagttaagccaattataaaagatattatggggaaaatataattggagtatcttataattatatttttgatataatggcttatagtagaattgtattactgctctcagtaaagattctaataatgatattcagatcaaatattctttcaattaaaaaaaaatagaatccacatcttgttaactagcaacacattgccctgttttctaaggcatccctagcatctaacatacattatacttccaaattaatgcaatattgtgacaagattacttgaaaattactttgtggga

SEQ ID NO: 45277 - DNA, 1965 bp, Bovine  19866880689690
  misc_feature (1)..(1): n is a, c, g, or t
nattaagaaactagcattaaaccccatattacagacttgcatgcatgcatttgcacacaaagtttaaagctattgagatgaatttacttttgaaaggaattaggtagtagaagccaaagatgaaataatttggataaaattataatttctaaaagtttttaaaatagttgatttgttaaatgtaacttttagccatcaattgttaaatgtaaacccaacataaagatatggaacataaaatagtaaaattaaaaaaaacccttcattttgggaataaaatacaaattttcagctaaaaagtataaactataaatataatattggatatttagttggaactaatacagaaagagcaaatttctctgtagtacaggccctaagaacagatcgatcaatgcataactgagccactaattatgatacatttgtgacagaataaaatgaacattttaattgcatatctgtaatttgttttaatgattcaaaaatattttaattaaacaaacttaagtaacatgatgaaactgaatgcaataagttaattacaaaaataaatgtgataaaattaaagtgcttgtattaaattagaaaatgtccaaaggaaatatatggttttgtagttacaaagtaaaattggtgttttaatgccattatggcccttttagcaaccatgagactttaaagaaaaacaaataaagtcttataaaagccaaatgaacaacagctatctaagatgctctttaaattctacaaagtagttatagcatctcttatacagtgtaagacatttatacaaatttatgaacaaattttcaaagaaggtaagcatttccatcatttttttcactgatgtatcccagatgtctataacaggtactgtacctggcacataatagtgatgcttaataaatatgagtaaatttttaaaagtacgtttcagataataaaaatgaaataaatgtctacatttcttataatgcttagtttgttggtctgcatgttcagaattttagagtagattatactaaataaaagtatttttagggataatgctccaaaaattaaatatattcaatttattgcctcaaaatctttgaaggtttataattaagtcaagttttagcaattgaataaactgcccctaaaaggaagaatgaaattttcaggaaagccatcttcagtaatcttcattagtgctgtatcactataaatatattatacatatatttttctttgagttcatgttgaaaaaaaagagtcaatattctatttatctgcttccaatatatcaatttaaaatatttactcaatcaagccattttgggggtagggaaatggcaattctaaggaaaacagtttaacatcctgagctgaaattgaaccatgaataatatttaaatcaaatacattaatatttagctattttcatctcacttatgtgtcatcacatgtgcactgaaatataatctagagctcaaatgaatactctaggggaaaaaaaaaaaacaacaagtaatactacttttctgtctaagggaacagtttatatccagataaaaattttttgtcccattcaacattactgttaaacattgaaaatagttactgctaaacagtgcctccagctttagatgagaattgttgcatgaatttgaaagtacatagctctatcctggaaaactttccccaggtttctctatttgtcagactataaaagtaaacatttaatgtttattgagcaggatttatgaagctgtcagagaattgacacacggcaataaaacgtattgaggctggagtctagataatctgcagctgaatgaattacactaattctggtgcttgcatattcatgctatggaaataattcttgtaacagatttcttcattgtccacaggtgccacagcatgactagaagtagagttaattggcactccaggacatgtgggaattcacacatacat

SEQ ID NO: 45278 - DNA, 1214 bp, Bovine  19866880943686
  misc_feature (1)..(1): n is a, c, g, or t
ngcagacagaggccaaagttggtgtgccttgtggaaatgaaccaaggctgatgattcacatgaatgttgtagtgagagaaataccaaaaataccactaattcagaacacaccttgtatttatatctatacattttctagattggagcatgactgctgtctccaccccagtttcttcaaactttggtcataaatattttaggacttcccttcatagttgcatccatttaactaagagataaatgatttaaagtagtttgatttataacacatttctctcatggaaattcaaaatccattaactgtgatcaactcagacacagaagttgtagattttaggcacccatgtttttttcttctgctatcaaaattgtgaggaaaaagaaaaaacaaaactttaatgtgttttttaaactatggactgttggatgttggaattatgggtagaattggagcaatcaaagcaaaatggcatcacaattcacccactgcaatataacaatatgtgatatatgaaaagggtttttcctaacaacaccatgacttaaatgaagactgaaaataataaatattataacctgacatttggcaattaagggagatagtttttggactctgagaattattaattacattgaaaatgtgccataacctccctcccccttttaaagaagaaaggaagacacaacataaaatcttcaataggctacacagtgttaggatgacatattgtaataagatatagagcctctcataaaaaaaaaaagtatcaaaaggaaataggaaactaattatgaagcagtgttctgtggcattttctgtgctgtgtcatatgaaaaatgcttgaaagatgaagtaaaatgatgtagtgtggcaaagctagcagttaaatatcctcactttctctaggagttgcctgccagtcaagttactgactgcaaatgagaataatgtctatggctagcaaacctgacagaaacatcctggcacttcaataatgaatatcataaacttgtcaaaataggaaaatgttttcttgagttccataggtcttaatgaccataacccatgcagtgagtttcatacaatgtggcttttaaaagcataaatacactaatgatctttctctgtgtcgtataaaggatatctgttaagtcagtgttgtaaaatctttaataataattattcttagcatcgggatgtatgtaggaggaaa

SEQ ID NO: 45279 - DNA, 1380 bp, Bovine  19866880994650
  misc_feature (1)..(1): n is a, c, g, or t
ntgctgctgctgctgctgctgctgctaaggtgcttcagttgtgtccaactctgtgcgaccccagagacaacagcccaccaggctcccccgtccctgggattctccaggcaagaacaatggaatgggttgccatttccttctccaatgcaggaaagtgaaaagtgaaagtgaagtcgctcagtcgtgtccggctcttagcgaccccatggactgcagcctaccaggctcctccattcatgggattttccaggcaagagtactggagtggggtgtgtaactatcacacagggatttaattccttgcatgtgtggctgctcagtggctcagttgtgtccaattctatatgaccttttgggctgccaggctgctctgttcatgggattctccaggcaagaatactggagttggctgccatttcttcttttcagcccaggggtcaaacccaatgcattggcaggtggattctttaccactgcaccacctgggaagcccttaattccctccatctagttaaaattctctcttcatttcattgacatcccaactctatttcctattgtcctttcagttttatttactttgattccctgtagatcatgtgtttatgccctgttgacaatgatatgttgttgcctaatattgtttccttcctatcgtttttttttaaattaataagttagaagttttttcagagcaataaaaatgatttatttcttttatgtagaggtatagcatggatcctacatattgttatagtttacacaatatttgatgaacttattatcctaccagtaattggtgaatcatcaaagttaactttacatcccttggcatgccacttagtaaattagaaaaaagaaagttgtagagaaatgattctgtactgatgtgtgtatctcttccacaataggttatgatatttaaaagaaacagatgagcttagaaggttaagcttcttgagagctgacagctgccctgtcctattatagagagatttccttggcttgctagaataagccccgagagtcagtggactgacttgctcttgtcacacagcgattgaacaagctgagttagaagacatgtgtcaaattacaaggggattcacacagcgcccatgtgccaagttttccatcatagcatgacaaaaacaccatgagagttaatgaggagtggaccatttctttacaagcgtgtgagttttagtttgaggcaaacaaagaatagagtcttgggtcaggagaaaagacttgtgacttcatatgtagataagaaatcccatacattcatgaggtttaagcattctatgaagataaattaatagctgtgtcccctaaaatttttagtctcattgctggttgtaaatctgtaccatccat

SEQ ID NO: 45280 - DNA, 1131 bp, Bovine  19866881134100
  misc_feature (1)..(1): n is a, c, g, or t
natctaaaatgttcttctttccttgttattaagaaattgacatttctaccattgaaactattaccatttttcttccaatctgcctgcaaccttgtttagctaaatagtaacaagtaatttgagataaaattagtctaaatctttgctgtaatttattgataagtgtgtattatacactcatgcacacttaaagttttttgttatttcctactcctttttgcaaagaggaattcagaactaaagcttttccactctgtttattttaaaaagctgttcttggttgctagcttcagttactgtagtcactgccttgggccatctgtgattgcctttctctcacagtatgccctaatctatccttttgctagatttattcagttttctggatcttgagtcaaactattaaataacaatatactatattatgaatattatttaattggaaaggtatatatatatatatatttgtccaagcaaaagacatttcattttgcattgaaaaatacttctttgggccaatttactaggtgatttaaatgatcaatttcactctattaacattagttttcttatatttttgctctgtggagagcaccatcaaattgtagtaacaaatctattacatcatgatgacaaatgataggaagcattacagttgatcatcacatgagagcgtctttcgtgtgataaattacactgatacagtggtaaccttcacattcgctctcaaccaggttcttccagaggttacaaatcagtaaagcctgttaagagcaacttaagatgcacgaataacatggtttacaaatgaacttaaaagttgtggcaaaaatctagggggaggagaaaggataaggcagcacgctgagaacagggtacagatgtggtggaaggggctccctagctgggtccttgttccaccaaccatcttcacatgtcctgtcactttctcacacataagcagtatcctctgatgatgaggttgaaataaggggggttaacagatagaaagtgcctggagccaatacacacttcctatatgagtaagatgcaggagagaaaaaaaaggaaaaacatgtgttgaactgttatggatttctgtagtgttaagggcactggaaccagaatcaa

SEQ ID NO: 45281 - DNA, 3323 bp, Bovine  19866880207619
  misc_feature (1)..(1): n is a, c, g, or t
naaaaaccatagccttgattagatagacctttgttggcaaagtaatgtctctgcttttgaatatgctatctaggttggtcataacttttcttccaaaggagtaagcatcttttaatttcatggctgcagtcaccatctgcagtgattttggaggccaaaaacataaagtctgacactgtttccactgtttccccatctatttcccatgaagtgatgggaccgcatgccatgatcttagttttctgaatgttgagcttgaagccaactttttcactctcctctttcactttcatcaaaaggctttttagttcctcttcactttctgccataagggtggtgtcgtctgcatatctgaggttattgatatttctcctggcaatctcgattccagcttgtgtttcttccagcccagcgtttctcatgatgtactctgcatataagttaaataagcagggtgacaatatacagccttaaggtactccttttcctatttggaaccagtctgttgttccacgtccagttctaactgttacttcttgacctgaatgactgaatgcattacctccagttaaatggtgcttcacccaaaccctatacagtggattcccacacggtgagcattccattcacgcatttctagagtaacagataagactcttacttgaactaatttaattgtagagccagggccagcatttgtccatgcaaccaatcgcacaacatgtcagggcagggattcctagaatctagtttcaaatagagtgtggctctgtgttttccacagatgctgcttcctttctggggcatcctcaggtctagagtccactagaaagctttctaccttccagaggagagagggagtggggggtggaattcataggtagtgaatcaagcagaagtccaccaggctgatcttttggtgactctaccagacactaatagtctctaggaggtgtgagctcagggagaagctttccattcatttcatgtgcccattcctagagtcgggagcatgaatacctctcagagaaattgtaagaaactaattcgccagctgcacaatgccactggagaaggagagagagatacacccaacctggtggccctgtggggttcccaggatgtagcccacctaccttctcatagttagagaagccccccatgacagctgggtccacgatgccattgagcagcatggagaggggatgcacagagagggaccggtcccaggcatgctgctggacacagttgctgatcttctcattggtgagctccatggtttcgatggcattctccagaggactgatttcctcctgtggacagagcacatgggagaagagagacatcgagctccatggtcacttctgggaagaagcccaagccttccactcaacaggaacacaattcccaccaagctatggaggagtgatgttctgcttgttaagatcacgtttattaataaggatagaacacttacttgaaatggtgttggtaagctgcaagataagctactttgtttctcaatatagtttaacacttttgcatgacttcataaatgacagctatttttatttatacattataaatccactgaacactcagaatgtatggaatcagagagcaagatgaaaacaaatggctaaacagtaaaaactaggagtaagtagaattttaatttgtgatttatttagaagacactcattttctttgctaagctgtttaaaatctcagaaagtacaaggatgatttatatattggagttatggtaatgattatttcttggggcaaagtgtctacggaaattttgagaagacaaaattggagctgtaagaatggttgtttcttaggcaaatccttcttaagagattcttgagatgatcaacaacaagaggggagcaatatatgtgacccaagacatttgggcacaaccaacaatactcactgctaagaggtttcatgctcctttcatgagaaaagctaagagattctggaagtcgcacattcagacctacattaactcaccttagtatgggttctattgttcatagaagtcagaaataataagatgtattagagtattcaagctggattttacatgagaatcaagtaagatataatatggattcagaaagagctccttctgtggaaatgtcttccaaaccagattcaagaaaaattgccttcttcttcactttacccatgatcaaccagcatgacctcctactccaaacttgatacaagcctctgtccaaaatcacattcacatttcaaaaatagcaatttatcactagtgggatggaacacctcaaacttcagatttgttcaagacctatttcttaattgcttattttctgcaagcactgggctgagaaccattgttacaaaagtgattaaggtacaattcggctggaagaagctttggacagaggagcctggtgggctacagtccatagggtcgcagagaatcagacacgatggagcaactgagcacatggctggaaggagcatgtgatttttatagggtcaaggtcagaatgcagaggtctcaagacaagtgagcatgggaggtaactctttaaaataagcccaggttctgatagggcatagaaaaagggcatctaactcaggttgggagtttcagagatggcttcctggaaaagctggtatctaaactcaatctcaatgggagttaggttaagaagtagggagagggcattctggatagaaagaaggacccaatatcatagaggactgaatgagcacagaataagcaatttagttccaggcacagaagaccaagtagaagaggcttttagtcccaaagaccctgtctacatgtgctaggagcatgggctttctagtctaggcactggggagccatggcaaggttttgagcatgagaatgatacagctggattttcactatggaattcacattctgaggcagagagggaaagacctaagaagccaccaggcagggtggggccaatcaggagcctttttcaacatcatcagccagagatgaatgagagtagaaacagcgcaccatagtaggactgggggaagaaaaaaccaaaacggacttaataaatattagaaagctaaaaatgacgagctttggggagtgctgaagatggatgtgagagttggactataaagaaagctgagcgccgaagaattgatgcttttgaactgtggtgtaggagaagactcttgagagtcccttggactgcaaggagatccaaccagtccatcctaaaggagatcagtcctgggtgttcactggaaggactgatgttaagctaaactccaatacttggcca

SEQ ID NO: 45282 - DNA, 1340 bp, Bovine  19866880518750
  misc_feature (1)..(1): n is a, c, g, or t
ntccacccttaagtttccctggtgcctcagtggtaaacaaaatgccagcagtgcaggagacacgggttcgattcctgggtcgaaaagatcccctggagatgagagggcaatccactccactgttcttgcctgggaaatcccatggacatgggagcccggtgggttgcagtccatagggttgccaagagtcagacaggactgagcaactaaacaacaagtccactctcatcttcagctctgaagttctgaaatttgacagttccatgatccaaaagctcaaagagctgaacatgtacacaaggaataagaaaaaaatactgtcagagagggtggagagcatcaacatcgtattaccatcaccattacctcaagtagagtactctagattggatgatgaacctaaacaagtactttaaggctttcaaagcagcaaaaagcaattccgtcttgctggaatcatctgcatttgccacgtaaaagttcagtaccttggagagtttcctgaaaaagaggagaaagagaaaagcgtcagtgggcaaagcggtattctggggcccaaggtgcacaagacaaaagggaacctggcttctgaggaagaagtcgtaactatagtaactatttcttctagaaatttcttcttcactgcagtctagcttcccttctgcttataaaccaaggatagtttcttttcctttgcaggattcttttttttttaactttttattttgtattgaaatatagtcaattaacaatgttatgatggtttcaggtggacagcaaagggactcagccatacagatacatgtatccattctccctcgaactgccgttccattctttttaaaaggatcaagaaaaagagctgaagggacgcgaattgcgagggtattttaatctctagtatgttacacagggggcttcccaggtggtgcagtggtaaagaatccgcctgccagtgtaggagacatgggttcgatccttgggtcatgaatatcccctggaggaggaaatggcaacctactccagtattcttgtctgggaaatcccatggacagaggaacctggtggcctacagtccgtggggtcgcaaagagtaggacatgacttattgactaaaacaacaacatgttatgccgactttttcaaatgttcttgtaaggatggaattgtctgcctaagtagccaccttaaaagaaatcaaattccctccaatctgccccaactttttagaatctccaaattggagccagatgaaaattttattgtctgagaagagcagcccagagttctgagcatcgaacagataaaactgctctgggatgctctttagcttttctaga

SEQ ID NO: 45283 - DNA, 699 bp, Bovine  19866880612409
  misc_feature (1)..(1): n is a, c, g, or t
nacctagattcgcttgacttctgctgtttagacccagaattattaacatcaaaggctttttaaaaatcagctctgctaggtactgaaaaatagaaaggagtttattgatcatcaggcttaagctgggagggacccaaagcaaaaggccagatggaggctcagacgacgctcccaggtctcatgaacttgaatccttttaaatccaccctcacatccacaaggtttgaaggaaaaggcaaacagatatgtgactgtgaacattcacccttgttttcgctgcttattatctgccaagaacaagactttgggtgatacaggctattagctaatagctcctgtgatccatcaccttcttcaagccaagtcaattcctcttaacaaattgaaatttcagcgtggcctctgcagcatgtggggcccagactgcagggagatctgctgctgaacgctaatgcatgcagcaaaacactgccgagggccgggaggttgtcagggagcgactgttcccagtagcagcttttgttcagaacacaattcagaggagccttgcctttagaggttaactcttctgtacataaaaggagttcatctctgtattaagtggcactttccccaggatgctatttaccggaggattcttgcatctaagagacatttaaataaaagccaagtcccagttatcttttttatacccaatgc

SEQ ID NO: 45284 - DNA, 1776 bp, Bovine  19866880674228
  misc_feature (1)..(1): n is a, c, g, or t
natataattttatgcccaaaactatagaataaggaaaaataacagtattcctattttacaagttagaaaggtgaggcataagggtcttatgtgatgccctgaaattcacatggctggttagtgacagagctagtctagataatttattataacttctgaaattattttctctcttagtttgttattcctatcatttttttctatttatataaaaggaatcattatgcatccattcaacaaatatttgtcgagcacctattatttgaccaccccactccagtactctattgcctggaaaatcccatggatggaggagcctggtgggctgcagtccatggggtcactagagttggacatgactgagcgacttcactttcacttttcactttcatgtactggagaaggaaatggcaacccattccagtgttcttgcctggagaatcccagggacggggcctggtgggctgccgtctatggggtcacatagagtcggacacgactgaagcaacttagcagcagcagcagtattatttgacaggggacatctgggaggcaaagacatattgttgaagacaggtaatatctccattcacgtgaagcatcctttctggtggggaaagaaaaacaaaacaaagtaaattgaaaaatcagggacttctctggtggtccagtggtgaagactccacacttccactgcagggaacatgggaatggcaacccactccagtactgttgcccggagaatcccatggacagaggggcctggcagcttacagtccataggggcacaaagagtcaggcacagctgaagcacgcacacacacaatgtccctcactagcctcagcttgtcggctatgtgcctatgctcttctgccttcctgtccctcagtgcaaaggcaatttactccaatcatttcccagctgatggcaccttcctccaggagttggccaagctctgaattcagaccttgtctgcaatgctttgggatttccataaaactcaaacagatctctatattcatgtcctttcagagcctcctattgtattttttcctactaaggctcagcaaaaatgctttcaagagcacgtaaatgaaaggacaggagagcataacacatagtttctatcagaaatcaatggaaactaaaaatagttcatatgaaacaccctgaatgaagcatttctagtctcagcggaagtctttgtggagcacataggctttggctgtgaggtctcctggggacacttcctgaagtgaaaggtatttttctttcaggaaaggacattgcttaaattatgtgctgcactaatacttagatcttctctcagatagatatatgctgaggcctacaaaatgctgtattcacataaccattgatacaagaagactcaagaggaaatctttaatgccaacatggttgaaaaactgccaatacttcagtggttgtcagtggctggtgaatgtcaccgggtgttgagaacccacaaggggaaaaagagtggaaatttctatcacaaacatatatagatccatagagagtttacaatgtcaggcttgttcatctcctaatgatgcccctggttttcatactggacaaaagggagctgttgactagtgtgattatagtcaccagatcctcatttctatgtctgtaatccatttatttccctaatttacatgctctctaagtctccacagtggctatttcaaagcttaatctactctcattatatcatctacctgcttcactctcagcacccatcttttcagttt

SEQ ID NO: 45285 - DNA, 2404 bp, Bovine  19866880751681
  misc_feature (1)..(1): n is a, c, g, or t
naaagaaatgcagtgtttctagcacaatatatccagcacaggctagactgacagttattccaaagccaatctccagaacattcatcagatatgataggttctgagttttaccctcttctcaaaagctgtggattatcgtggaatttttgtatttggtttgcaattctcctgactagaagtcctgattaataggggacatgaagccttgtttagaaaaattcaatacattatgctctagtcgaagacatcctgagcaactcttttgcaagctccacattgtaatgttcacattgactccctcctctgggggtttgaggggccaggagttgagaaggggggtggcgggtgaaaagaaagaaaccagcttcttggcagcttctcaacaatagctccagctccccatcccctccaaaaaaaaccttttttttttccatagttgctctaaccaagaaaatatgcatagcttcctgacagattggataatgcggagatttgagaaaattgtgcaattcaccttattttcatttcacccccaaatacttcgggtgcaagtacagcttccatccacacataacagtagtttcagtttcttaaactggcgagtggggccaggcagcagtagtagtgcgtactaagccacctccgtcgtgcccaactcttcacaaccctatggactgagacctaccacgttcctctgtccatggaattctccaggcaagaacactagagtgggttgccatgccctcctccaggggatcttcccaacccagggatcgaacccatgtctcttaagtctcctgcattggcaggcgggctctttaccactagcaccacctgggaagcagaggcatttttttttttaaggcaagggacattgcaatgacacccaatcttgtttggggattgccccctcttggtccctgttcaactggagtcaatcaatcccagcaggagaaccagctgacccagcttcactgagatgagatattcctggacaacacaaggaagtcttccaacttgtacgttggagaatcagaaggaaccagaattctggccggcggttgccaagaaactctatatgatgcaggtgcaaatcatttttccccctcttttaaattcagactcattaaaatatgtattttgcgaggggattaaattcaaacatctgggaaaggcagggggggggggggtggaatatccacaactcctgaactacttttttcacttggtttcagactttgattgtcccgtttcttagaggcagcgggtgagaggctgcttgcccggtgggatgacagaaaagggcaagaagagagttagaaaatgacttccaagggccccagacttcaacagcagccgtaattgtgggaaagtaacccgaagatgccaaacaacaggaaattaccagaagaatctgtcagcacaatcagctgctattttcattgttctttggcaaatttatacacagtcgggaacacctgggctggcctgaagcccaggtttgactaattgccaggggagaggagtcgtcatttgtcttcgaagggatttcctccgttcgctcctcaaaacatgtggtttcacttttcccctctctccgcaggaaatggcaggacagtgagacgcaaaataaatgagttcacttccaagaggttgcctcctaagaggccactccaaaaataactgtcttgtgagaaggttgttaataaccaagattctatagactgtcctcagaaaacaacatttcaaaggcacaatgatttccacccccagcccctttccttccaaacgcagcatacattaaaaataaaagtcatgggagacgagaaaagtaatcaagttttctggactgagtgaatgtcactcctctcgctcctctgcaagacccctctccttggagggtaacctcacccaaagcgcttccttgacaagtgaaaggtggaattggagtagtaagtgatgtcagtctcccttgctcttccttgctgcccatcacccccttccctctgacacgcagcatctcagccttccaggggggaccaaggggcgatgcctaagacatggactgagccccgttcacctcggctgccctgcgcctggcatgggattggtgctagtcagtatccatcgaatgaagaacactgggcgggttgcacgagtcacctgctttgtggcaagcttcccaggagtaggtgtagatatttttcaatttcttgaacttcaagagatcacctttttacaaaaaccacctgccagagtgacagccttctcccctaacctctttccatagttttatacacacacaacttctgctttatacctcctcgcattatttcagactctggccaagataccttacttgggtagcaaagtcatcttgatatcccttctggaggcaacagag

SEQ ID NO: 45286 - DNA, 655 bp, Bovine  19866880778413
  misc_feature (1)..(1): n is a, c, g, or t
nttgtagggagatgagtaagtcccaaaatgaaattatttccatacatctagttagttttgtattgttctagtaaaggtgtaccttgaatataacttgttagaaatttggacaaatttggacatgtcacttcccaacatcccacccgctataatctgttactatcctagcttgagacggaatttcctttgctgggcattattgcccagcctgataatcaccatgttgctgtgaaagcagttaaccatgtccacccactgagctcattcccttggccattataactagaagcaaattatgtgtccataacatttggagagctgatgcccattttttattcatcagccacccatggaacagccaccagtgtttctaaagtgatcactttctcattagcaattagcaagttgctttggcttatattcttgatgagaaatttgcttacagttctcaggaagacatgtggatctcaacatcctcattaagagatgcaacatataagatccagggaggaaaagtgaaagctcccaaagtatccaccttctccaccaatttggtagaaagaagtaaactcttgatggaaaaaggagaaaagaaagaagtcgctcagtcgtgtctgaccctttgcaaccccgtggactgtagcccaccaggctc

SEQ ID NO: 45287 - DNA, 2803 bp, Bovine  19866880800272
  misc_feature (1)..(1): n is a, c, g, or t
nccatcccttccccatttcccctcccccttggcaaccatgagtcggttctctgtgtctgtcttgacacctgttttgaattgattttactaattgaatcatatcagtaggcagccacttactcaattagaagggcagtactgatacttaggacaatgctgactctgttacaaactcaagcatgttttgtgattccagttaccacttcttgtgcctctaacacaagagagatatgatgccaaccacctgacttacattttttcatagaggaaagtgaaagtgaaagtgaagtcgctcagtcatgtccaactctttgtgaccccatggactgtagcctaccaggctcctccctccatgggattctccagacaacagtactggagtgggttgccatttccttctccaggggatcttcccgacccagggatcgaacccacgtctcctgaattccaggcagacgctttaacctcggagccaccagggaagctcatttcatagaggactactatacaaatgattccaggtccaagtgaatggtgtcctttggagtcgtgctgtgcacaatctgcttggctgtccatggaggacctgctcgaaaaatccatatgaagtatatttgcagactttttgagcaatctaagttaatctaattgatgaatgaaaaaaaaatgagatttggacaaatcaagtaacactttcaaataataaagccaacaagtagagtcagaatcctaaagtctatgcttttctcactatactatatgctatcactatttcatgaattttgtgaaattctgatggtctccagccaaaaaaaaaaaaaaaaaccaaaaaaaaacaccatgagcatacctgtagttgcacaagttgggttgtttgatattttgcgacttggataatattctcatattgcttttgacatgactgtggaatggtttgtttttgtctcagtgcattgcagcctcagaatggcttgtctgatattgatgtttggagaaattgttcatgtccaacgggagaactgccaggcctagctgtgaggccaggtcaactcctaatgtttttttcttcctcaaggtaaaaggcctggagattgctagtataaataccatttgataatgctttaagccttcactgtgtcgctcaaaattgaagccccacgttttgcgatgaaagaaggtgaaggaaatagaatatacagaggtcttgcggagccatcactttgtactttatatgctaagtaaattattgctggttgtaggtattttgtttaattaatttatttttggccacaccacatggcttgcaggatcttagttccctgatcagggatggaagctgtagttaccccctgcagtgtacctccagggaattcctctagttgtaggtattttaagagtaactttgtatagtttattataattaacgctttttctcaaagtacaatttctggtccagatgacagttcctatgataaggtgctattttatttctcttgaatgattcaagtcagcctggatgggagaaagtagcatgatatgatggggaaaaaatgtatgttgggtcatgcagccattgggttgaggtccatgcataacacaaggggatttttctggatcaaggaaatgtgggagagtgctccagcaaacttgatttaagaaggtcaagaatctatgagacttccatgcagagaggttgaccaaaacaagaatttttgagcagagaagcacattctagtaatatacaagagtgggtgcaatagtcttcaaagtatagtcatcatgaaagatataatgtttgtgaaagaagtgtgagctctctgagaaagtgtgtgccctgttgtgtcaggggttagggatgaggcagtgagaaatttttaaagatgagatcaccaacaagctatgggtttaatttatctgtagtttcagaatagtttgtcttagggaaatggaggcagacaagcatcagctgtaaaataaattgagtttagcgaagtccccaaatgtttttaaaatgtgacagccagactggaatatatttccctgggaccacactctaaaatagttatctagtctgcccattgtggataccaaatccttattgcaactgtcaggactcatcttgctctaaaatataattataacagtagtcaaggttttttttttaaattggaactttataaagatgacagaagacccatagaataagttaacagacaagtgacagactgggagaagatgttcacaatgtaaaagtgacaaggtgttaatatctagaatataaaggaacttcagaaaaatcagtaagaaaaaggtagaaactcctaggtggtttaaagaaaagaagaccaggcaatcaaagaagaacaaatatgaattggttaacacacataggaagaaaagatcgacctcatttgtcatccggtcgctgcaaactgaaataagatactatccaacatatttaagttcagcaaaaaaggactaattatagaacacagagttaatgaggatgtagggaaagaggaagcactcctagtgggagtagaaaccgatgcagccattgagaaggggctccttcaggatttactgaaatgaaatacacacacgtctgaagatccaaaaatgtcacttttgtttttgcttcagaaaaactcatgggtttatagaggacctatatgagaatatctgtggaagtagggtaatctgattgtctatcactagtggggtggataagtgaaaagaggaaatgccttctgaggagtattgtgcaatattcagaagaagtgaaataatgatatgtatggca

SEQ ID NO: 45288 - DNA, 924 bp, Bovine  19866880848878
  misc_feature (1)..(1): n is a, c, g, or t
naaaaagcatatcaaaaaggaagatttaacaggaattgaagaaaaaaggtcttgactataagtcaatcatatctaggtaccacccctggtggtccagtggttaagaatccatcttccaatgcaggggacataggttcaatcctgggctggggaactaagatcccacatgccacgaggcaacgaagcctgagcactgcagctagagagaagttcaagtttaagacccatcacagccaaaaataaataaataaaaaatttaagaagtcaattgtatctaacattacttctgggaatgttgcctcaagaattcattagagagatgtatataaatatttatgcaggaggatattgtcaccattatttataatagtgaactatcaaaaaccacaaagttgtgagaatgaacactaggttaacatgcataattgcttaccagtgcatcaaacacgaggaagtcatatgtttcatcacctgacatttccatcatgatgttaaaaagtgcatctagtgtatcttgcaaaaactgaagacaagaaacagagaggttatctggtgagtgcagaaatatgaggagaattagatttcaaaagaagaggtttaaaaatagcattttcctaaaaactggcacacttgcttcccaatgcagactaagggttatgtttacacccactgggttcatttaagatgctgaactaaggatgcagtggctgtagtcttacctgtgaataaataaacataccttcacaatctctcctccatccacctccattaacttcttcaagttgtgtttaatattctgagggcttgagcgccaatttaacaagcctaacaggtcaactgggaagaacaaccacaaaccataagcgttagacacagatgtgcagagcaacccacacacacagctctgcagaggagatcattgct

SEQ ID NO: 45289 - DNA, 1038 bp, Bovine  19866880890821
  misc_feature (1)..(1): n is a, c, g, or t
ntaataatggacatgaagacatctagcatagtgtcgggcacctgacaaatgcaaaaaaaaaaaaaaaaaaatactgattgaatttaaatgtcaattctaagattactcacataagccctcctaggaaggataactcagtttcctcatccgaaataatcagaagagccagactagctcagagtgtgtagtgcagactatcctagagggacgtgaaagcctcattgtagagttgcaatattaagttgttcttattaaaataagctcaccaggctgcatggggacagaattaaatccaatccacctacagcagggcaggaagcaatcagtctgctcctgagcaaggaacaataaataattcaacaagatggaggcattgggagtcttctgatttttcttctggctggtgataagtcctgctcctagttccaaatcataaatggaatataattccacagactgaggaggaaataaagcatgttggaaatgcaacgacattttgacaattcttttcccaactaattccagtcctcagtgatcttttccttgacttgaatttcttcagcgttgggcttacaatccacacctcatgactgaaggaatgatccgacatcttggaatgactctctttctaccttgagatcaatttcttaacaatcataacagttaatatttattgaccacttactctgtgccaggcatcattttatcatttcattttcacacaatcctccaaatcggtgctatcattatgctcatttcaagggataagtgctgaggcccaaagaggttaagtggctggtccagtgtcacacagctagcagtggcataggaaagacttgaccgaggactgtctgactccagagcacagactctttatccttctctggtgcgtattcccagggtacaagcatctcaaagaccaaaggctcaccttccacctaatttcctaccccatacttcctacaatagcactgagaaggaaaaggtgtcaagtagggactttcatggcaggccactggttatgactttgccttccaa

SEQ ID NO: 45290 - DNA, 1876 bp, Bovine  19866880973637
  misc_feature (1)..(1): n is a, c, g, or t
ntttcagtagtcatgtatggatgtgagagttggactgtgaagaaaagctgagcaccaaagaactgatgcttttgaactgtggtgttggagaagactcttgagagccctttggatggcaaggagatccaaccagtcctttctgaaggagatcagtcctgggtgttctttggaaggaatgatgctaaagctgaaactccagtactttggccacctcatgtgaagagttgactcattggaaaagactgtgatgctaggagggattgggggcaggaagagaaggggatgacagaggatgagatggctggattgcatcacagactcgatggacgtgagtttgagtgaactccgggagttggtgatggacagggaggcttggcgtgctgcgattcatggggttgcaaagagttggacttgactgagcgactgaactgaatattctattgtacagccactttgtcacaaaagtcaatgttcttcaacatataaatttgagctcaattttactaccccccttttttttcaacccttttaccctttgatatacccatttcttagtcttcagctatttctttgacaaattcttctaataaatatgtaatcttatttttagaataagattacagtatataaaaatattaacattaccctttctcatttaatcctctatattcttcccacttgaggaaataaaatgttagcaaagctatgagaattgtccatggtcacacatcaaaacaggacatgagttgaggtgttctccatccaaagtatattatctttcactggtccatgttgctacatctaagacacagactggatttgggttcatttttactcatatatttaattaaggataatttaattccttgttttatttcatttatttaacattttcccatgagtttgaatttgtgatccattatgatcaattctttttctttggcatcctgagcaatggcagacttggcagaataaaggaagtaattgctataaaataatgaatgataagccttttttccacatgtaggttgtgcttgtctgtgctgtgcttgagttatggatatggttaagcggcaactggcacaacttcaacagccataatatctcttcagtcacagctgtctgaaaattacttagagtttcaaatgcatgatgtagcaagataagactgtaaggaagagcgatcagtcacacgaatgaatgctactgacgaaatgcaagcaagagaaatctccttgtgctaccaaagcttcaagaagagttgagtttactgtaaaggcaagaaagaaagataaagaagatgacttaaagctgatcatgtgttcggaacaaattgtatgtttctctttttttgatgtacaccatttttaaaaaaattatttatttttaatcagaggataattgctttacaatattgtactggtttctgccatacatcaacatgaagtcagtcataggtacacatatgtcccctccctcttgaacttccctcccatctctcacctccatcccacccctttaggttgtcacagagcactgggtgtgagctccctgcgtcatgtagctattcccactggctatcaaatttacatatggtaatatgtatgtttcaatgctactctctcaattcatcccaccctctccttcccccactgtgtccacaagtctgttctctatgtctgcatctccattgctaccctacaaaagggtcatcattaccatctttctatattccatatatatgcattaatatatgatatttgtttttctatgacttctgtataataggctctcggttcatccaccctcactagacctgacttacatgtgttccttttgatgtggaccattcttgctactgctgctactgctaagt

SEQ ID NO: 45291 - DNA, 1002 bp, Bovine  19866880994981
  misc_feature (1)..(1): n is a, c, g, or t
naaaaaaattatacagacgcagcaatttaattagtttaagaatttttcactctaataaactacatccttaggttaggagttctaaaacaacagaaatatatttggttattcatttttagaatatgtgtttcctcacatctatttctcactcagggtaacaatagatggcaatagttgtcaatagatggcaaactaaatatgccaaaaataacgtttcctaattgcttccacttcagaagacaattacaaggtggtttaaaaagaaaagtaactctaaaactgacccccaatcatcactaccttggtatctagattttaactattttcccttgttacccgaattaaaatttagtttcaatcagcaaaactaagtcaacaaaatgacatatggaggtatgaaaaaatgattggctggaaagcccattattttatatgaaatcatattcatttacatgactttggtctctctcttcgcagtttttggaaatgtaatgggataaacctatacagagagtggaacataattatcttcaaaccctttttctttgtgccttaatttagagcattgggatcatagagcagacaaaagtgagacttatcagatgagaattcattctacacaattcacaaaatacagctgcgagacaatgctctcaagtctgaactgccgtcagtgtcagtcggaagttgaggtgggcagtccccagcagggtctgttttatatcagagaaagataatgaaagggccagagtccaaggactcagctctgagcgccaccactcccgagccccaccagagccccctccccgcttggtacacagggccgagtaccttgtcctttgtgattcacttctttggttgctatcactttattcaagactgacgtgagtggttcattctccccgatcacgtgggatgttatcaggggcgacatgattagctgcctctgtcggatatatgtttccatggcaattctgggaaaatgagaaataactggtaaga

SEQ ID NO: 45292 - DNA, 907 bp, Bovine  19866881077916
  misc_feature (1)..(1): n is a, c, g, or t
natgtaaagtgttattcacatatagaatctgatggtgatgattatgatgatgatggctttgggattcaggatcccattagaatacaaagaatacagtattcagacctgacgaggccagattacaggtcaccatttctgactatcacatcaccgcctccaacttcatgatgacacttctctcaataaataaggagacagaaaggcagacagaaagaaagagaaagagggaaattaatactcagacccaattagatatcctgatctattattattactctattattaattgttaatattatgttatcattcttgatctaaatcctttcttaaagaggaaaatgaaagtcaatgtttagccagaacccagatctcatgacagaactacattctttcctctaaaatagtaagttacatattgagatacatttattttataaagtgggatatgaaattccataaacagaaatatcccctctatatttaaattacagaggaaaaactagaagaaaatacttcaagtactatttctctgaattttaaatttctacaagtataagttaattttaaccaaaaaagtgagttaaagtattttaaaatattatgagactcttgacaatctaagtgaaaagagatgcctgtgacaagaagtccatttcctgaggataatgaaagaatactgcttttttagaatcgctaagatcatggagaaagaatccagtcctggaacaataagacttgttaggtgaggctgctttttgaatttatgtcctgggcttaggtcttctcagaaatttgttccaaagataatagatcattgatctacttcagttttgtaaggttcattttaattaagagtttctaataaaagaattatgcctcttgttaagacaagcctggtaagctaggg

SEQ ID NO: 45293 - DNA, 1256 bp, Bovine  19866881101001
  misc_feature (1)..(1): n is a, c, g, or t
naaaggaaggggactagagagatttgagagacccatcagaccaggaagcaattacttctttaaggaaggaatggagaaatggaaggaagacatagcagaagcaccttagacttcaattcagtttaaagaaattttgacaagttcattggccagtgtccatcatcacaagtcctcgttttctccaagaaatggacataggggttattggccatctaaggaagcagccctaggaaacgtcagtggatttgagcacacagccacgggagcctttgaccaatgacactctgtagtgagaaatcagcaaaaaacatactctcatgaccacccaaaggctttgcaaggtctgctcacatcatcactcttgacccctctgcctgcttccccttacgtcttgtgttccagccacactggtcttgccagtccttggtgacactgagcgtgttcctactgtagaacctctgtgcatgttactgtggctgaacgttctcctgggtttcgatgtggtttgcctcctcacttccttcacgtttttacccaaataccgttttcccaattaagcctgctctggccacactatctaaaattttaatactccttcactgactctcatacacatactttctatctctcttatctgctatttttttcttaccatttgtcagtttaagacataatatactcatttatttatattattagtttcctatctctcttattagagtgcaaatttcacatcaacgggaggtctgacttgattggttattgttgtttattcagcaagtagaatagtacagagaatatattaagcattcaataaatatctactgaataaaacattgaacacacagaagaaaaaaagattgaaaatactaatacttctattgctgatgtgcagatgagtcactacaagaaatccagagggacatcttcttggcaacattttgttcacagttagtccaaattcccatgcgtacctggaaggaagagacttcatgaaaaatctataattcaaacttttctcaagttcagaaagatttttcatgacaaaaaccaaaagcttttaaagatgaaactacgacaaaagggtcatcatcaaagggcacccaaaccaacatgaagtgactccttttgattaagaatgggataatttgtgcatctaaaaatttactgaaagcaattgatttaaacacattgaatttttttaaaactcatagttcttaatgatataaagaaagaaaaggaaaattaaaacaaca

SEQ ID NO: 45294 - DNA, 1350 bp, Bovine  19866881168552
  misc_feature (1)..(1): n is a, c, g, or t
ntatgctttaaatactaagctaagtattcatgtttgtgacaatgagaggagcaggaaccatcaaaacagtgacagttgaacttgcaggaactgtgaggcaaatttcttctgtgtctgggacctcgcaaaaatttcttttccaaaaaatccaattttgttacttttattaaagggaaaaaaagctgcagtttggagtggaaagagtagtattgagagaagttcttgtctatgagaccttgatgttgtcatccacagccatctccaggattggcttgggactggctgtcgattaatcctgttctctgttcccacctaacctgttgattgatcttgtttgtacttttgagttctctgaggcagggtcgcttacgtcctgattccctaacttactggatcatgatgagaaagtaagatccagtaagttaaggaatgataaaggagcttgcacctcagtgtatatgaatgcccttcattctttcattttcttgccgtgagaaataccagctaacctaagcagcatgcccagtgacctcatgaatttccaatagggtgcaaactccttatctccttgtggatcggtgtagaccttgcacaagagttatcatccctagggcaccctcttgagaagcattttgacttaactccccaaataaactgtgagctctttcagatatgacggttgctgtgagcacgtagtaagtgttcagtaggaacgtggtggcgagggaggggctgcacttagcctggggaggacggtgacttccttgagacttgagtccccaattgcccttcactgttcatatttaatgcttctccctgcgtgtcctgacctgcagaacaagatcttcatctaccgggggaaggagtacgagaggcgagaagacttcagcctgcggctgctgacccagtttcccaacgcggagaagatgagcagcaccacccccccaggagatgatatcaagtcttcccccaagcagtgtatccttgtctcgcactacagcttaagggctctttttttttttaacgtttattatttactaatttatttggctctgtcaggtcttggttgcagtacatgggatctttagctggtggcatgcaaactctttgtagcacgtgggatctagttccccgagcaggtatcaaacccagtccccctgcattgggagtatggagtcttagccactgaaccaccagggaagtcctggcccggggctctggaacctgctacagccccagcccagccacagaagggggggggttcagtcctgtgcctgcatgcaaggtaggtcctgtcctcagactcatttaaccatcctgactcagtgtcccgtctgcataaaagcttcg

SEQ ID NO: 45295 - DNA, 1420 bp, Bovine  19866881176273
  misc_feature (1)..(1): n is a, c, g, or t
ngtataagtataactaaatcactctgctgtacacctgaaactaaccacaatattgtaaatcaactatactccagcgtaaaaaaaaaatctaaaaaagaataaagattatctcaggtcccagaaactgtctgtttctgatgctcagaccttctgcgtttgtctggcagtggagttccttccattcaagccccaggtgccctgctcatctgtcatctccttgagacccgagatccagcacggggcctgtgctggcccatgaagggcactggcagtttcttctacacaattaaatggctcccaaggctgaaagaaagcagtacacactattcttttgtgactccaagatcacaagcccttggggagatatgtcctctgcctgaatgtgactgggtttttccaagttctcagtgagatatatgtcatccctgatttacctgttcccatgatcaatcttggctgtgaccttcttcttgagctctgccagttcatctttcgggagggtgccagacaggatctgggaccgccactctatcaggctgtatgtcatctgctgcagctggcggaagagcgtgaccttgttgttctaaggtgggaaaatgaggcagaggaaaggaccaaaaaataaatggtgtgatgggagatgagaacatcttttgccttgatcctttataaagtgttatttaaccaattattctgccatataatgaactgtgcactttgaggggacctcttttggctcagtggtaaacaaatcacctgccaatgcaggagatgtgggttcgatccctgggtcaggaagatcccttggagaagggaatggcgaccataatccagtattcttgcctacaaaatttcatggacagaggagcctggtgggctacagtccatgaagtcacaaagaattaggcatgactgagcaactgaacatgcatacacagagcaagctgtgcacttggaggcgacctctttacatcactagggatggctttgccctgacccattcccactttctcctctgctgcaacttcagaaacagataaccacttgtaggatggacaggatggagggttggtcctaactcataagtgtaccaatcatccaagtgccttaaacttctgcccatgttcctcctgtggttgaaaccagccacttgggacttccctggtggtgttaagaatctgcctttcaatgcagaggacatggatttgatccctggttggggaactaagatcccacacactgagagaggggcaactaagcccaggtactgcagcaaagatccagcacagcccaaaatagaaagaacaataaaaacagccagcgatttccaccgtcctccagacacactagatcactttgtaagtctcttcccatcttggctcctacccacattcccagccacaccatacactgatcacta

SEQ ID NO: 45296 - DNA, 1961 bp, Bovine  19866881212895
  misc_feature (1)..(1): n is a, c, g, or t
nattttcagtggtttaaatagtttggcaatggcttacttaaataaagcttttatctatgagaatttctcagaattttaatgtgctaaagtatattgtgagtttttatattccaaaaaaatataaacaaacactcttgtctaaacttattttactacagaaccattttgtgcgggggagtacttcaagagatcaaaccatcatagattatggtttgagaaatattatcttaatgacactattatgaaagcctgtaaaactgagctatacagatgttcataacaacactgcatataagagcaaaggtagttaacatttcataaatgtttgagtaggttctctataaataaagaattctagatctatttaattaaatactgtagtaataaaatatggtttagaagagtaattaatgtataaagtgtttgtaatattttataaagtaaaaaatcagattgtaaagcattaactatactatcaggatactttgaggtagatgcatgcatagaaatatggaaggagaattgtcaaaatgttaataggtgtaattgctattttgtgattatttgtgactctgactttctttttctcatttgttcttcttataatatacacaaatcacctctactgtaagaaaaatgtttttatgttattgcaaaagatttgtcttttatagctctgtaaattaatgtcaaatgtgcctcttgcacccctccatttcttttttttttttttttggtgtttttagtctctattaaattctttctcactgatatttttttttacttgtgtcttcatttaatagtgtgtacagctgtcctcatactttcaaggtgacatttcatacatgaatatttttacttgcactttatctttggtgcaggaaataatacccttttaaagcatctgttgcattttaaaatgtgtattcagatcatatcttctgctttaattattaacctcgtaactgaggttgcatgaaatttgaacactccctagttctgaggacattatgacatatgtagagcaggctgacaagggctttgactcaggaaaaatgcatattttgtggtaattctttttgctttccaactctattcataaaactgtggatgctctttaaaggaaccactatgcaattgggcaactgggcaactctttgaaggcatcaccaatctccttgttttctttttgaactaggctcacacatgtaaaaggcttcctcactggctcaccgataaagaatttacctgcaatgcaggagacacggattcgatccatgggctgggaagattccctagaggaggaaatggtaacccactctagtattcttgtctggaaaatcccatgaacagaggagcatggcaggctacagcccataggtttgcaaagagttggacacaactgagtactcactcacgcacacgtttaaaaactccttttcactgtttttgcacttctgatgtcagcttttctggcctcattctcattccagttccttatacagtccccatgtccttatcagtagcaactcatgttttgaagtttccttaccacacttctctctcccacgtataattctgtcttttctttcattatcatgaagcatttccctcagttctttgaccgttgggaaccaacctcataaacttctctgttctagtgttaactctcaaggaaaccacaggacaactctacgtttagtgtcagggacatgtctcaggccccagagaatcttctttctctgtaggcatcccagttcgggctgctgctttctctttttagtgatcaaccgtttactgcagcctgggtttcttcactcctcaggactcagattcgggagatggggaggactttccagatttatttaattattgtaatataattgctttacaatgttgtgttggtttctggtgaacaactacatgaatcagctctaagtgtatatgtatatattaatata

SEQ ID NO: 45297 - DNA, 1461 bp, Bovine  19866881285723
  misc_feature (1)..(1): n is a, c, g, or t
nacgttccttgctgtgcttgttgacttaattcagaaatcttaaagagggcaccaatagcagacactagatgtagactatagacttccaaattttttcaagtcaaaattttaacaattacagtgcatttccgccccttaattggtaattctgaggatatgattaggtcatgaccattcataaaatctctcccctcgaaaattttactgataataaacttgaataaatgagaatccctggggttccttttctttggtaaatagcaatatactttgccccgtaagtgaactgtataatgctgggaatggctttcttggaggcagtctgaaatcgtgtttacctttatggtaaacaggtaactggaacactaatatataatagtaaaagcatatgggtagaatgtgaatcccactcatctgtcactgtcaccacatttaaaaagtatagcctaactatcatgagcagaagttgaagcccaagcaaatgatgtaatcagaaggaataaaattttctcaatgtgtaatttttaagggagttaagaatattgaagcttatttgccattgcaaacatgttgcctgcaatcctgagctcatgattgagtgtgtagttagcttaattctgttgcctcaagtagccttcaataccacctatttcaaactttttaagaactacagatatagataatgaaattgtgatcagtcactaaaggggggattctatacttgtgtgttacattgccataggtctgcatgtctttattgggaactatttggatttcagtgatagctccaactggttggacactgcatcatatacacacccccgcccgtccatcccgttcactgtaaaggtatgaaagctcttgcacttgcacttgatgtggaatgtcaatgaagttgctgattatcctgtgttgtgcttctgttcttagataattgttttgtcagctaagtttgttcaatatttgttgtttagagacctcttaaaggtcatgaatttaatctggaagcaaagtggtctccatttaaagtttacagatcccatcacaccacatattttgagttaaatatatctcaccaaagcaaataggtaaaatattgctttatctgccctgatgctatggatttgaaccacaaggattctccatacattggcttctgtaaagactaggagttgcctcagaaatcaagcttttcacatttatgttccttatacatgggatgctgcacatggtcaatttcagacagaagcaaattatatgtgaaaaagtaaccttagccaaatggaagtggttggttggagaatttcttgaagtaagaacactgtaccatactctatcctgtgtgccataataaaatactgaaaaatctaaaccgaatggatttggagtctttttaaaaaaaatattcctcaaatgtgataccttggccaatctccctctcccttctactcctctcaaact

SEQ ID NO: 45298 - DNA, 1363 bp, Bovine  19866881592237
  misc_feature (1)..(1): n is a, c, g, or t
ncctgaagaatcccagggacgagggagcctggtgggctgccgtctatggggtcgcacagagtcggacacaactgaagcgacttagcagcagcagcagcagtagctgcccaaatgggccaacaccaagtaccagctcaggatgaagtaacccaaagaaggctccactcagaaagggttctggggcttccctggtggctcagtggtagagaatctatcacctaacaacgcagaaaacacggggttgatccctgatccaggaggtcccacatgatgcgaagcaattaagcccgagcaccacaactactgagtctgtgctctagagcccgggaactgcaaccactgaagctcaaataccctagaaagccagtgcttcacaccaagagaagccaccacagtgggaagcctgagcaccacaatgagagtagcccctgcttgccacaacttaaaaaaacctcgagcagcaacgaagatccagcatagccaaaaacataaaataaaaaattttaaaaagaaaaaggtcctcaccctgatcctaaaagatcctacattttcctatatgccaagaacatacgttttcaagatggcattttagaagcacgcttgaatatatctcaaaaggaaaaagaagagaaggcagtctcttttaaataaagatgaaacctgaggtaggggaggtataaattgagagactgggactgcaatatacacaccagcatatataaaacagataactaataaggacatactatatagcacagggaactctactcaatattctgtaatgacctgtatgggaaaggaatctagaaaagaacggatacataatattaacaatgggtaactgattcactttgctgtacagcagaaactaacacaacgttggaaatcaactatatgccaataaaaacattaaaagatgaaacctgaaatgagacttttcaccaactctactttttaattagtttttcttataaacaccctcctactgccaaacatctatggaaaaacacatctcgggaacacgtgtccccaggagtagtagctgaccaggtggccttaaggtgaaggtcaaacagatgtgggaaatgaccggcacactcatcaaaacaccacggggcttattttgcgttcaaggctggaggcaaaatgtttgcacgcaatccttgtcgtaaaatccaagctgttgggcacactgccatttcacgtttgaggaaaggtgattgttttcctaactagaacctggtagggctatggattctgaatgccaatggaagttcccatttactgtgacaaacagggtaaccgaaagtaaacgaaacttacaaatacatcgaatgccttatttcagcttatacccagtcaa

SEQ ID NO: 45299 - DNA, 712 bp, Bovine  19866882213810
  misc_feature (1)..(1): n is a, c, g, or t
natcctaggatagaaagggggtattaggtaaaaattaagaaaacatgaataaaatacaatatatgcagattactttaggaatagaataagtggtatttgatttagtctggtgagttggggcggaaagatttctttgacaaaccagtatataaactaaagcctgaaagatgactaaaaaccacaagagtgggatgatccacatgctaccagaaaaaaaggcatattctattgaagaaaagtaaaccagcccaatatcatatgaccatcatcccactgcttctccagggcagcctcttaagaggctgtgattaatcccagtttatggacgaggaaatgaagactatgttcccagtgccacacaaatgaggaaatagcagtcatgttcccagtggcacacagctgattggtggttaaaacagaattgggatcccatcagactctaaaacctaaatcctttcctcttgtgctcctttccacttgcctataaaagtaggctgtggtcaggcaatttctcactttgggaaacgagaatgcatggagttaacatgcagatcagcaggaattctgggaacggctggccagagcaccgtgaattctaagttgctctcacgagaagccttctcgtacttgccaggaaccagagccctctgaatccagaggtcacattccaacctatgaacccgaggggaattatgtatcatgaaaatatggc

SEQ ID NO: 45300 - DNA, 3565 bp, Bovine  19866880420802
  misc_feature (1)..(1): n is a, c, g, or t
ncacttagtcttagggtaatctgtcatgcagcaatagatgatacataggtctactctccctaccagactgagtacctggccttcaaattacatgttactttttctgtccccagcaagatgtacaaagtctgagacacagggtaggcatccaagatgcaggacagaactgaatattaatcacagtttccttatatcctgctaatacctcttacaaatgctatataaattcaatttacaacaaataagatatttaacaaagtataattattagtttataatatctcaaaagtctaaaagcatttctatcaatgtttactaaacagacttcttaaaagacgcttgctccttggaagaaaagttatgaccaacctagacagcatattaaaaagcagagacattactatgccaataaaggcccatctagtcaaggctatggtttttccagtagtcaagtatcgatgtgagagttggactacaaagaaagcagagcactgaagaattgatgcttttgaactgtggtgttgaaaaagactcttgagagtcccttggacagtaaggagatccaacttgtccatcctaaaggaaatcagtcctaaatattcattgcaaggactgatgctgaagctgaaactccaatactttggccacctgatgcaaagaactgactcatttgaaaagacgctgatactggaaaagtttgaaggtggaagaagaaggggacaatagaggatgagatagttgcatggcatcaccgactcaatggacatgagtttgagtaaactctgagagttggtgatggacagggaggcctggtgtgctgcagtccatggggtcacataaagtcggacacgactgagcaactaaactgaactgaactgaaatacatgtgtttggaggatgacaagacagcacatcagttttgtctgctctaagatgcagttgtaggatttctttccctctaaggcggggccgcaatgttatcacttcctaaaaggagccccatccagatggagtcaggatgtatttcactgggtgctcatgttcaccgtctatttattcgctacctagtcaccactttttaaggcctgtcctatggcaggcctcatacatggagatggtagttttggtcactaacaagcttacctgtgaatatgatgtgcatttcagctcctttcattcaaagcacacacagctcctggaacttttcttgtaaataaattgccagactgatgaggtataggaaagagctggtcttttcttggaaggtttcgatggcctgtctctaggcttctgggatttggattttttagcagaagagtagagctcactggagagactgagcatgtgctggagacagttatgtctgcagacaattttgtcatcactgctggagggaggatgggccaatagcatctaataggcagaagccaggcgtgctacctattgtcttatagtgcgcagggcagacactcaaggaagatggtccagctcagggaattccctgatggttcagtggttaggacactgcattttcattgtgggggcccaggttcaatccctgatcagggaactaaaatcccacaagccacacagtgcagcaaaaataaatacataaatttgattaaataaatttttgaatttttttaattgaaaaaaagattgtccagctcaaaatgtcagtaattttgaggcagagacctctgatgtagaggattagcactgagtcatgcattccacatagctacagtctgccgagggtgacatttcatgcaacaaggactccctgagcagcatccaccttcttatagtctcaccctgcagggaatggggagagacaggttatttagggaccatgcgtttagccctcaaagtctgtgggagacgagagtaaatggcactgggattcctcctcctttaatgctcctcttaactcagcatttccctggtgctcacatcagttgatgatgtaagcaaggagactttgaaaggagaagacacgctggaaagctgacaggtgtgtgcagagtgaaggactcttctgttcacttcaccttgaaaagggcctgggtagagggcaggaccatagctttcctgtgtctggatcatagcctttgtctgagatcagctttctgaatcatttaccctccatgccagcaacttggagtttatcttagccaaagcttgggttgtgagctgatggaaccaatagagcatgcttttgtggaggggagggcagaaagaagagattaggagagagataaactcaacacaaatatgtggatttagggaagcaaagtcaatagacctgctccccctggtgggatagatgctgtgatcatgcgtagatacagtctccaccaactcgtgacaagagctttcactcactgggttctatgatgacatgaatttataccaccaacctgaagcactaattttaaatgagctggcagtgaggagtgttttggagagcatgagaagagaataggaaaacactacagtttctaggtaaatgctgaacagtgcttgatccggtcgccatgcctagtcctgctacggtaatgtcaactagtcagcacttccagcgtaaacgggcctagcgtttgctttttggggcagactgcaaattccttgagaaccttcagtctgcctctttctcctcttgcttgtacttctccttagtcctgtgtgcacctgacgttttgatccattcatttggaggcaataaatggaagcctttcacagatatccttacggagccttttggctcctgggagttgatttttgcccctttagaggcctctccaaaccgtcggcggtgtgcatagactctcttttttgcttttgaaacagtggtggtttttatccacaagattgctctcccagttggggcagtctgccccgcagcaaacagatgttcacatccacatctcccctctagatgaataaaatcctcccagaggctacagctggctggaaaaagttcttttgtgcttctgtgaagcgtaactgagccctaagccatcacctttgatgtatattttgtgattggggaagaaaaataaataaataaaagcatttttatttgccatactctttcttgcagataagaattttttgttgactgaagcctgtatccaatgagagctttgcccttacctaataagcaaagggttaaattgagtcgtgtctctttctttatgtggttcttcagttctctatgctttttgggcataatactttctcagcaaaatgggtctggtaactgtcttccttcctaatccccatcttgttggtttgctgagagagttttcattcaagcataaaatactttgttcagagtcacccttcaaaaggtggaagtttaagtctatgggcatgctaaaaacgaaatgagtatacttatcttttggaggacattagttttgcctcagtacctcggatccccatctttcataagatataagatcaatgtactttaaggtagcaacatttgtcataattgcctgatgtattagcatcctttagtaccaaatattaactttgactgtgagatcactaaaccata

SEQ ID NO: 45301 - DNA, 1803 bp, Bovine  19866880449389
  misc_feature (1)..(1): n is a, c, g, or t
nccacaggaaatccggagcagaaagcgcccacttacctgtttctaatcactgagaagaggcatgggctgaatcactacagggctcatgtctctcctgtgcccagaggtcctgctgctcacctctctcataaaatatgactttgtatttcctgcaagtttgccccttgaatcctccaaggccatggggtgttttatccagacacacactccctgccccctgcaggggatcaatgagccctcactcttaccaggagtaaggagtagatggctgtcagtggatgagaggatggacttgcttagtttcacatggcttcctcccagaagggagaagctcaggctagtgaacaaatctttgcttaaaatcctacaaggcatttgaaataattcattgtttactacatttctaagtgctcttttccttatcaagcctaatatacttgggaaaatgtctgggtacgagtcaaacattctttacatcttactaacattgtaactgatggtaggtcatttttgccttgtttgccaaaatagcaatttctaaattaaggaaatttttgaagttggcttatggcattgttgtatttcattttcgattgtaaactccgtggcagggacactatgtcaataattatgtttttacatagcaaccagtgcagtatactcttggtgcttaataaatgttcataattgttaagaataactgttgtcttttgcttaacttgaacggctttgagacatggaaccatgaggatataggactaatgcttaagaaagccattttggaaacaaccgaagtgtccactaatggaagaatgaatgagaaaatgtggtctgtgtaacaatggaatattattcagccacagataagtcatcttgctatttgcaacagcatggataggacactgctaaaaagtcagagaaagacaaatattgtatgatctcacttacacgtggaataatttaaaaaaccaatacagagaacagattggtggctgtcagcggcaggggacagggggtgggggggtgagggtgggcaaaatgggtagagagggtcaagagtcacaaacttccagttataaaataaataattcatagagacgtcatgtacagcatggtgactatagttattaatatgtattacatatttgaaaattgctaagagaatagatcttaaaagttctgataacaagaaaaaattttgtaactgcatgatgaccaatgttaactagacattgtgatcattttgcaatgtgtacaaatgtggaatcattatgttgtacacctgagactaacaaactacatgtcagttatgcctcaacttaaaagtgtcacatttctttttttaaaaaaaagccactttaaactattacgtttgtagttttttctgtaacaaagtttaagtagtgctgtatctaaatccatgttaaaaaaaaaaatcgaacagcctctgtgttcacagggtatcttccttgaggtgacaccatgttacttaatcctgacacctgctgagggctgtgatgtcaaggccttttgaggttccatggcaatttaatggagaaggggtagtgctgaagatgcacaaaaaaggctcctgacataagccttccacttactgaaaagatgaactcaaagtgggtcatgtatctaaatataaagtgtgagacaaaagaaaacctttgtgacctggggtcatgagttcttctgccacagcaaaagcatgattcagaaaacaaaagaactgacaagttgcaatttatcaaaatcaaaaactgtctccttagcggaagatgctggtgagttata

SEQ ID NO: 45302 - DNA, 815 bp, Bovine  19866880484787
  misc_feature (1)..(1): n is a, c, g, or t
nctcgtttatgagcgagtttaattattatttaattatttacaagttttctcataatccaataacttatttgtgggcacttctgtgtgtatatgtaaaatgtcctgttttaaacacataccactaatcaagctaagcccatcatttttgtcttgttttcattttcttctaaaattttaatgtaccagcgcattttttttaattcctgggctgtttacggctgagagtcacatttgcttaccttcagctgctcaggaaagacagcagatactgcaaatatctcaagtgatattattgtgctcagtttattaaatcttcttgtgctactctttagggaattctagcggcaatggctttggactttttatcaacattcgaaggtttagctgctaccctctgatactcacttactgaagattttattgctattaagtgacattaaatcatgcctttttataagtgcccacttcactgcatgcatatgaatttcttttctcaaaatctatttgtcacaagcatttttgtcagatattacacgctgtgcagttctgctaatgtctttgttgtgatgccagatatttttttttaattttatttttaaactttacaatattgtattaattttgccaaatatcgaaatgaatctgccacaggtatacatgtgttccccatcctgaaccctcttccctcctccctccccataccatccctctgggtcgtcccagtgcaccagccccaagcatccagtatcgtgcatcgaacctggactggcgactcgtttcatacatgatattatacatggtttcaatgccattct

SEQ ID NO: 45303 - DNA, 1427 bp, Bovine  19866880486560
  misc_feature (1)..(1): n is a, c, g, or t
ncacaggctgaaaactaggaggtaggctttaatggggaactggacagaataatgtattttgtgagaacgaatatattccatatttacaagctgatgggattacatagtttaaagtgatcaattgccactcagaacaaggacatgggaatctttaatgactgttttttgaagacagtagttcaatgccccactgacagcagagagacaatggatgtattgaataatggttaactcaggagaagactcagggctttggagtatggcagaagctcagccagcatgctcccaggcatgacggtgtggtgcatgacataacatataatatttggaggctaagaagaactttgcttaaagtatataaaagcatgaatatacttttactaaatgttcaatgaagagaccttgaaatttgtgaatgaataaaaataagcatattaagcaatgaacatggaattcaatgtactctctgcatatgaacaaaactgcctaagaaaatgttaatcactaaagaaccatggataccatatccattcatattttaatgaagcaaatagttccaaagtacttgccttccaagttcattctctgacattttctaggtttgtattgaaaaacatattttaccttttcagtgaagctcacagatcaagtgaaaacaggtgtgaacctgtttcagttgacaagtaaatatttttcttagacttctgtgacatctcacctctcatgcttcctcataatatactaaacccgatgaaaccactgctagtgctgaaaatcttagaaaaatggtaaaatgctgtttaacaatcttctctaacaaattatgccctgttttcctttcctcgttttttttttttcttttaatcagctaactataatctgatagcaatcagtaaaaggtgttagtctctaaagcccatggcttagctctgcagaccaaaaatgaaagggtgatagataggaatgacctaaaatcttggttttcttaacaagatctcatcagagaaataaaaattaaatacttgaaaaaattagtttcccagactatctaactagttgtgttttatgccttcctataagtcattgcattattttattcctgaaaacaaatctgtatatgtcatgtgacttgtatcacctatttattaagcaatgtctgatatattttgagatctgaacaataaatgcagagaatgctactgatattgcctaagtggaaggcaggctctgagttctcctgttggtcatccccagttaaccaggaaccacttacatgtgacttagagctaccctggtgccatgaaaggaacaaagttggactgcaagacaacagcccaataactacagcttctgactctgagcacatattcttatataaagttttcatgcaagactcatgaaaattcacattcattagataaacagca

SEQ ID NO: 45304 - DNA, 1378 bp, Bovine  19866880617041
  misc_feature (1)..(1): n is a, c, g, or t
ntgcccccttctccttctgccttcaatctttcccagcatcagggtctttccaatgagtcagcttttcgcatcagtactggagcttcagcatcagttcttccaatgaatagtcagggttgactagtatgaactccatgcagtctaagggactctcaagagtcttctccagcaccacaatttaaatttagtgattaaacaaccacaaaaagctgtttgtatgctcctttgtctttttttttttttaagtctactctttatgtttactgtaattacaaacagctagaaaaggtcttggctatgccgtagggagggataatttgttcccaatggtataacacttgcaaagacccagtgggagacaaccaacaacagccatagtagctcttctattgaatcctgaaaagcaaacactacaaaagtcttttgagcaaaacgtttttcttccaaatacaactcaatgcttttcactagaacttttcagaattttgggtagagtctcttttgatctgtcagccattttaaagataatttttccattcctgagtttctatgcaatgacttgagtaaaatgtaatacccttgcatataatccacacaactgaaccatccagcctatgcttatcataccttgtctgccaaatgacttgaaaagttttaaaataatacacacttgcagcttgggtagacggattcatgaatttgagaaacattttgagatattggggaaagtttaaatatgaaatatgggaggtgactgcatccagtttctaggctggtgttcatgctgataggatagtttttagggagcattttgaattcaatttcctttattttaacaaaacctatttcatgcacattgcttacagatggaataacttgcaaaaacacaatcagttttatagaccacattctcagagatttgcacaattcctgctccccataaatgctttcctggaaagcataacatcacacgttgctttctttatgtttgctctaggtcactcacttcagacaacacacagttttgtcatgacactaatctctcctctaaaggaactttcactttctttttgggatgctgtttgcgatgccctagggaccccagtgaagtctgagtaattcctctatcccagtgatgctgttttctcaaatatgttcaattcggtccttgagaggagcctccgttagtgctcttgacattttaatatgagctgacagaacatgctccctctgtattcggttttgcccattaaggacaaccctcaagtctttctgggttaattccacaataaatttatcaaacagccgcaatgctacaaattctgaaaggcaatttttttaaagaaagtaatatgcaactatcataaatatatattca

SEQ ID NO: 45305 - DNA, 2119 bp, Bovine  19866880619733
  misc_feature (1)..(1): n is a, c, g, or t
nttatcaatttcagcccccacttatcattctgatcagcttatgaattcctcctgcaaagagctgccctaactctgtcctaattgcagaatgctgcttcttgaccttgacttttctcagtctttatatcttaattgccacccactgctttaagaaaacactagtgccactgaatcacactctgacatttaaaatgtttataaagtaaataatttagcttcagctacatgttttgtttaggtggttactcttttacacactctcatcaggtatcattttcctgcacaaggtttgatgaggacattttatttaaaatgcacatcaacaatgaattataagtataattaaaactagactgtagtagagtataaccatgtctcatgtctatagcactgtctagcaatttataattttaaaggttctttacaactgtttcattagttattgaacacaattattcaacgacttgggtcaattgcaatttggagacagtgaaagtcttaaagagggggcaataacataattcatttccttttctttaggtctttaattcaaattcaatgtggtctgctcttccgctccatacattgctagctcctctcccaacattccctatcccttctcttctggtggctcagaaggtaaagaattcacctgcaatgcaggaggcccaggttctatccctgggtcaggaagatatcctggagaagtgaatggatacccgcttcagtattgtctggagaattctatggacagagaagcctggggttacagtccataggatccgaaagagtacaacacgactgagcaaccaacacttttcttcattttatttctctttaagaaaggtctcatcatctaacaaactgcttacctagtggctttactctctgacttcacttcctacaccccctgcatgattgtaaatgccatgaagacaaggatttcctgagggcttcaatttcagctgtgttcttagaacccggaaaggtgcctggcacacggtagacactcaatgtgtatttgggaattaataaataaaaaggcactaactatcatcaagtttcttttgaatttaatagaggcaagaacaactctgtttctttatatttcaaatgtaattttcaagggtaccatagggaaaccacatttgttttgcttacagagggacaaaactcacacctgacaaatttacatctcagctgctgtccaagtgaaaaaaagaaccgtccgttgacttatgcacatttcaactcatgggaaaagcagggtggaccttacctttctcatacctagttatgtaaaggggtttctaactgcagtttccttctgctccacctcacctctgacctacagattgggtaaatggtcagaatgatgtcattgtattgctactgaaatacatataaaaatacatatatatgtatatgtgtaggtctatatatgtgtgtatatatatatatataacacaaagtattactggagggtttaaattctcattgggagatcttgtggaggagagacaaataaaagcagggtttaatgaactggaagattcctacaacagtgactgaaagtagagtatggggaagaagcaagaatagcccttttattaggaatatcagagtccctagactctacaggtgctttcctctctttccaactgtccagcccataacctgaaactctgacaagcctcctcctgagaagtacttgattttcccttctctctctcctacaccccttcccactccttgaccttggagaatcactttttataatgggacgtgttgatgatagaaatgcgtagtcatgagtaccatactcaggatgaaaaactgctggcaatctctctagtgctgttttaaagtcatttctaagtaaatagatgaagtggttataatggattttaattttgttgtaaaagtagcttgagaaaagctacactgttgttgttcagttgctcagtcatgtccaactctttcaactccacagactgcagcatgtcaggcttccctgtgtcctccaccatctcccggagcttgctcaaactcacgtccattgagttggtgatgccatccaaccatcttgtcctctgtcttcccctcctcctcctgcctt

SEQ ID NO: 45306 - DNA, 1659 bp, Bovine  19866880625801
  misc_feature (1)..(1): n is a, c, g, or t
nccgtgtttccctgattacagtaactgtctcaggtgctctgcagaatgaaccatcacgctggcaggtaaaagtcttgtccttttttagcgttcctgtgttggtaaatgattgttccctaaaaccctatccccaagattcagtcaaacataatccagtagataaaaggagtattttctaaataaaaacatcaacatatcagctccaatttgattccacagacaagacttttctctcatcaatgttagtctgaaagaaaagttaattccaggtccaaggacctctaagagggagaaggttaatgaggaagagtcagatcaaagcttctccggcggaagagggtcgttgtcctcatatgttaagagtgtgactcctgataaatagaaagatggagaccatcatgtggggatcatgacagggaagaaatggttttgccaacaacagaaataattctggtaggaggcaggtcatccgactagccacccttgaaaagttgggaggatggaggccactgaatgctcccaaggaactaaagcaggtgtaggggaaaaaaggaggaaagaggagatgctataaatctgcaaaaaggcaaatatgtgaccttggaagctttaaggaatcttctttgacatacccaaaggaaagaaaaataggacttcatatgaggttctctaaacctccactctataatatgtggtcaaggtcaatatgtttcaacattgtttgggtgaacttttccccatctggttcgggttacagaggttattggcccaggagttttaaacaagctggaaactctaagccaagtttatggccgagaactgaaactgacaaagagctttttaaaacagtctggtaggaataggggagaaactcttaaaggtctgacatgaatgcaaggacataaatatgtcactgtatcacacacaggaatgagagagttcaaataaagccacaagaagaaaaataaatagcctccacaaatgggcatttgtttgttagggcatttgtttgtaaagcacatgcagatagatagatggataaggtcttgattttgcttctaagttcatctattaatattagcatccatgaagtaaagggtagcctggaatacccaaatctaaagacggaaaacttcagttaggaacttaaattataattgagtgcattcaattaatgcatcctgatttttaaattcatttatattttctactggctaaaaatgtgctgatttgcttgattatctaaataaatggaatggagtgctgttttgattttgaaagtaattatctcactactaattaagttattgaatagtacatccatggaaaacactgatttttatttttttgtatcttactaatgtctgatttttttttaattttattttatttttaaactttacataattgtattagttttgccaaatatcaaaataatgtctgattttaaaaagaaataactgattaagcacattttagaagctttgctcacaaattaattaggacaagggagaaacataaagtgcaatgatttgatgactctgataatcgtcactgataatttgtacgtacagggttgtgataaactataaccacattgggatgaaatggtcagatcctcaccaggcagagaggccttgacatagcacattagaaagg

SEQ ID NO: 45307 - DNA, 4106 bp, Bovine  19866880632161
  misc_feature (1)..(1): n is a, c, g, or t
ntgagctacagtccatagggttgcaaagaatcatacacaactgaagtgatcatgcatgtatcatgggcatgatctacaaaatctcaaaaatcaagtgtctctgtggaacaccttaaaaaattgagcttaaaactcccctctatatccttttaataccatttgtatctgatgttgatttttcagattgtgaaacctagatgggggagggcctatgatctgtacaagggcccaagcttgaaatgaacaaagctgggtcttcagtgtcatttgatgacacagtccatagcttttctctctatgaaaacacccaggagtggccatttaaaatttcagcacaatcatggtgtgtttgagcccacctactgcccacaggggattggaaggaacaccgaacaaggagccacatacaggatctgggcctttgtgcattctcttactaattccatgctgcttatgcttctgatctttaagattcaaacttttgccatacaaacctgggcggggtgggggggggggcggggaggagtatatacacaggagagaacctgcaattttaaaaggcatatcttaatgctttacaatacttttaagcggatagattttggagagctgattgaaagtgaaagtgttagtcacttagccttgtttgactcttggtgaccccatggactgtagcccatcaggctgctccgtccatgggattttccaggcaagaatactggcgtgggttatggaactggtgtggccatttccttctccaggggagcttcctgacccagggattagaacccatgtctccaacattctgagccaccagagaagccagattagttgtaaaaaaaacaatcaaaattaagaaatcctcctctaagtagttaatgcaacctgcatggaagaatatgtgttaaactgacacctgaatgtaaatttattttcacatctggggtaagtactacacctgaatggagtctactttgattacctttaaattcccaagagctccagtgtcatttatatgcaaatagaggacaaaatgcaaatataaatggctgagttagtataaatgagaacaattattgttttataaagtcttacatttacatagtgctttttaatataaaaagtactttcctgtatatattaagtaatctacataactctatgagttaactggtatccagtttagaaatgtggaatatttttagactaatgcacatcagacttaatgcacataagaattacctgcaaatcttgttaagctgcggtttctgattctgaaagcctggggggggggggcaagtctttgcataaatcacaggctctcaggtgatgccaatgctgctggtctgtggagtacattttgagtagcaaggacctagatatcgttgattcttgggctattccatgctattcctctttgtgactatcaatttgtaagaaataacacagagaggatgtaatgtacctataggggatatatcactaatgttgtgacaactttggtgatggtcttatgtcagtggttatttcattatgtataaacatactgaatcaacatgctgtacacctgaaaataaataatattatatgttaattataacccaataaaaaaataacatggcattttttttctcctgtatgacatttttaagtggtaggtaggacataagcttttgatggatcccacatctaccagctaccaacgggatagtcttgggaaactcatccgtcctcatccttttccacttttgggagttgctgggaggatccagtaagttatgatatgttcgtgtgctctataaagagttggtggtgtttatcatgccttgtgtttatacacaagagtctgtccaaattctcagagtcctaattcacgcattttctgagactgagcacagcttttgtcttttcagtatttgctttcattgataataacgatgatctttgttttgctaagcaaaggatgtcgaactatttacaaggtgaggagtgaatggtgagtggaattggtttccttgatgagctgtgctagaatattaatgaaggggaagtgaaggcaatctgctgtgggtgtgctgctagggcagcaatattcattaggctcaacttggcctccctcatattttccactgagaaaatgatttctcctttaacactaattccaccatggctgcacaacacatatttcatttgacattacatggggtcttgtaaaatccctttatgtcaatcacttaaaattttctttgcttttaaaatgtagctctttaatagttactattctgatatattgttttcacaaacattttatggtagattttggaactcctgaagatggggattgcatcttctgaatgacttaaagcacagttgttgttgctgatgttgttcaattgctaagtcatgtctgactccttgtgaccccacggactgtagcacaccaggctcctctgtccttcactatctcccagagtttgctcaaattcacatccattgcatcagcgatgctatctaaccatctcaccctctgcggtccctttctccttttgccttcagtctttcccagtatcagtcttttccaaagaggcaggaggccgaagtatagtaggtcctttattggttgccttaatctgacttcattagagttaaagctctagttttaaaatagtacggtttgggggggagtattcattcccccctaggatgaatttctgttgtttaattaggtaatcaaattgataccttaatgagaattgcagcactgaaggaatggggaatttcagtttccacaggggaataagatcatttgagaaaaaaaagcagcctgaggatgtagcaatatgtcctgagtgctgatcatgaagcaagtactgtatgaatgcatcctgtatttttttcctttaacttcatttcactatgctaggcctaccttatatatttaccttattttcctaccattggagtagatagcattttttatctttaaaaatccagctctaacacaatatctggcatgaactaaggctccaaaactatttgtttgatgaatgaatgaatggctttctatttataggttggcagattgagaagcagcagctttaagggaactgcccaagtactgactgactggactggcctccaacccacatctctgtgtctccaagtccaatctactttctagtctgctacagtcagtaggggcttcagacagccaactaacgctttatcgatcctgggtaaagaaaaggaggctgggaagggaataagccggattgacattgtaatgctggctaaagcctggggagtgttagaatggtcttgaaattcatccatttggccagccctggggctgctggagagagccaacactggcattaataggattctttgggcagcctgagagcctgaggtcaccccaatttctcaaatcaaaacaagcctctgtagatggctctgttctgtgctcatcctcctccaaagaatggagggaacaggggtcaaaggagaaagaggtaaaaaataggaagaggaaaacaggaatggttaggggaaatgaagtatatcatacaattgatcctggaatactgttctcactgatggactttaaggcacttaccctgcctgcagtaagaaaaaagggtattttcctacttcgagtgtatacccataatgtacacacagccattattgtgacttaggttgtctggtggatgcccttttaaaggaaggctccgaaagcaccccagaggagctctggattatttgtctacatgtacgacactggctgtaacagaggtgtctctttgccatttcagggcttccaactcacccttgtaacctgcagtctccatgacctgcagtgctgagcagcttcttctctttcattttggctctgcgaactccaaaagaaaacactgttgatcccaaacaagcatttatgtttattgtgcgacaaaagcattctggttcaccagggcccatcaaacgtcagcttctgtagcatcctgctcagttatgagagaagccacgagattaggaaaatataacaacaggagagctttcaatggggtcatcaaggggaacagatagaaaaaatctaacgtttt

SEQ ID NO: 45308 - DNA, 1771 bp, Bovine  19866880695765
  misc_feature (1)..(1): n is a, c, g, or t
nttcatatatattcagtgtgagaaatggagacagtgaaaagagaaagtagttagcaagcagtttgccaattagcaaatatggtttcaccaagtacctttgtacaccaggccccgtgaagacagacatttccccccatcgttaaaaatagctatttaattgacttttagagcgaccagagtgaccatgctacagaatagaagggcggggtgctctggaggcctgggtcagtaatggcaagagcccagtgttgaaggacagtttacctggggaagtgatgatgaagccaggtccagggctgaatagggcttggaggggtatcccctcagatccaaggaagggagaacaaacaaggggtcattgaaactccaggttcgcattcttgcaagagaaaggattgtggtgtcagttatctcaacctggtcactttcaggtagaatgtgagagctccatgggaaacagaaaaaaaaaaagaaaagagagggagggagaggggcgaaagaaaggaaggaaggagggaagaaaagaagaaagaaagagagagaaagaaggaaagagacaggaaggaaaaaagaaggaaaggaagggcatgtattgattagtttacttagagactgatacagatgttaattcatgattagcaaaagatgcctgcctactctaaagtatttagcaatatttttgtctggtaggctgtttttaatttcaaggagggaaggctgtggttacctgatttgttgctctcagcttcagtagtttgaacactctcttagagtttgcacaatgagactaaattggaagtatagccaacaggtgatccattaaggacttgagtgcagctaagccttcctttgggatgtatacttttacagccaataaacctggccttactagctcctagtcgctttgcttgccaataacacagccttataatgtaacagagtccagtagagccactcctcttaggtttccaacctgattattgactctgagaagcctcttaaaatggcaaaggattcagtgttcccccagactcccttgtgggactcagagaagaggtgatgatatagttgctatgttttagttagtttgagacaagtgtctgcaggtaatattaattttgaagatatttaaattattacctgaaatcctttaaaaattacattcaaaaatattaattgtctgacaataatgaatatatgttactgggagttataactatgacttgctgttagtcgctccatcatgtctgactctttgtgaccccatggactgtagccctccaggctccaccatccacggacttctccaggcaagaatactggagtgggctgccattcctttctccagtggatcttcccaacctggggatggaacccatgtcttctgcattgcaatcagattctttaccatctgagccaccagggaaacccataactatgacttaagtcctgaacaattgattgacgcatcataaaaattatgtctgagagtgaatatgacatttgccagcagggatgtaatgatgaataatagtctgggaaagctaaagtgaaagaacagtgataataatctgtatgaaagataattcagcattaatattttaagtatgttgtgtgatttttaaggatacatttccaaatgtaataaatgcttgaaagtgctgtgtttcagtaatgggtttacaatctctgcttgcttcattagaatagctcaaaatacgggagccttttaaaaagactaaatgcacttcaaagatcaaaatgtttatta

SEQ ID NO: 45309 - DNA, 739 bp, Bovine  19866880740470
  misc_feature (1)..(1): n is a, c, g, or t
nttgctgagtgaatatttaatatactcgcatgcattggggcaccagttattctataacataagacagcctatctaagaaataccctccagttcactcttttcattttggtcctccattttttttcaatattttgctttactgctgtttgtgtatgtgtgtgtgtataacttaacaacttaacagagatgttaggaaaagaaaaatctgacaaaggaacaactttcaattcacttgaaggaaaatattgacattcatgaaacccaacaaagctcttggtgcccctctatctttaacatgcctctaccagcaaagaaaagcacaggggttaacagatttagcagggaaagcagattgtagttccattgacagctaggaaatgaaatgacatccagtatttgatgactgccctcaattagcctatgcaaagcaagaattaattaccagcattgagaaagctcacctctgacttttctttcaagatctcgcttacactgagtgttcctctggtgttataaatgtaagtctagtagacttgataacttgcttttcccttaaaatattttaatttgaagtagtttttatttaatatggtaacccatatttgatggcagacaactcttagctaacctaagaaacataaatctatatatagatgtagataaagataaataatatatgtgcttagtcctgactctttgtgaccacaaataaggtctgtagcctgccaggctcctctgt

SEQ ID NO: 45310 - DNA, 1567 bp, Bovine  19866880761428
  misc_feature (1)..(1): n is a, c, g, or t
ncattgcaggtggattcttcacccaactgagcttacaggaaagccctaagtattgaattttgtgagcatttacatagtttctctttcttagaagttattattaaaaggtaactgtttagtccctaagtcgtgtcagaccctttgccacagcatggactgtagcccaccaggctcctctgtctatgggatttcccaggcaagaacactggagtgtgcttccattttgaaactgcttcaggcgatcttcctgacccatggatttaacccatgtctcttgcacttggcaggaagattctttaccactgagcccccaggaagcccattaatataggctttatataataaatttaatataatattatattttatataaagaggcaataatattatatataaagatagtttaaattttcagagtatcacaggtaggtgaaaacttgtgctctcgaggtagtttttaaggttatcacataaatatagagccagttcagaggtgttccagttaggttccaaaaaacattcttttaaatgtctaatgacacaactgatttgataactgacaagtaatttgtcaccatatagctgacaatatttgtttaaaggctgttcttgaataaagtgaatacttggctatcccttgaaattttcatcccaatcgggatactaacttgaaattagaatcctttaaggataatttaaaaaataaataaatatgaaggaatacaatagtttgacatctaggattttagcaaagtcactgtcgcatgtaatttataacaggaaagaaatcattggaacagaaaacattcaatagcaccatgcggagctctgacttcaattcaatgtcagtctctgactttaccttccttctacttcttacaattttactaccatcttttcatccattctttctattaattccttgacccaacaaaaaaagacactggttttgaataggattaagaagcatctcggagaaggcaatggcaccccactccagtacttttgcctggaaaatcccgtggacggaggagcctggtagactgcagtccatggggtcgatagagtcagacacgactgagcgacttcactttcacttttcactttcatgcactggagaaggaaatgcaacccactccagtgttcttgcctggagaatcccagggacagggaagcctggtgggctgccatcgatgggggttgcacagagtcagacatggctgaagcgacttaccagcagcagcagcaagaagcatcttgcccacctgataactacaacgtatggtttctcagcttatgatgttgcaagaagcagtaaactgtaacttacttctaagttatatatactgtatgttaagcattgttgtgagcataatcatgatgctatttaatcatagaaggtaacttgtacagctgaaaacctgctcatggtttctactgaatgagatttctaggtagggctctcattttattcttatgagtttccctagtgaattttattttaatgcattgggaaaagtaaataaaccatttcatttttatttcccatttcataaaatgcttctca

SEQ ID NO: 45311 - DNA, 1171 bp, Bovine  19866880792586
  misc_feature (1)..(1): n is a, c, g, or t
ntgacggacagtcctgttgaagatagtatgagccagcagtagtgcagtagctgatctgtctgatgaagatagaagtaatcttgttgaatttctgggagtgcctatgagtaagggacacattagaaaaaaatcttgtttcaagaaaaagcccagagtcctgtctgtttcttatttgtagtgtctcagtataatcacagatattagtaaacacttccttccttaaacatcgatggtgaaaatcgctcaatatttttgctgaaatatgcagattttcttcctcagcctccagagaagaatgttttcagcacagcagcatgaaacagtcttcctgtctttaaaaaggaggcgggaaggaggtgggggagatacagagtaggcctgtgaatcactgctgtggtctggagatgcagaaaccactcaggagactgtactgcctaaagatagttcccaaattgctatccaaggataaaaggacaaatttcataggcaggcttctcccaggaaaatacacaggccttgaaagagtaaatgtgttttctccccctctgtcaaatggccttcaaatagaagtagttttcaactgcatttactggggttgcattgtgacaagcagagtggggtcaataacagtggcattcctcagagggacttcatcatttatgcaaccctctaaactagaaggcttgagtaaagtcttctgacatctcagatttgggtaggaaaggaaataggtgcatcagaatgcaaagaaaccttaacaaaaatatgcagtcagccttggcagaaaaactcattagctaacacactgttttgcttatgaaggccaaagaaaatggttgtaaagttttagaaagattttagagtgggtagatccaaatggaagtaatctaacaaagatctcagaaatcgttacagagagaataaattgatgtattccactctttctcttcagggggaggacaaaatctatttgtataatcttgagttacttcatttgagaaatgagggggttttaaaaaagttaatcactaaggtacctttctaactcaaaaagatgtggttctttgctaagatttttgtcctttgctaagattttggagaggagtatgaattttttagacacgtaagcctaacttctaaaatataagtttagataatttagcaaagacat

SEQ ID NO: 45312 - DNA, 3427 bp, Bovine  19866880823721
  misc_feature (1)..(1): n is a, c, g, or t
ncgacttgatggacatgagtttgaacaaactctaggacatagtgaaggacaggaaagcctgatgtgctgcatgcagtccatgaggtcacaaagagtcagacacaacttagcgactgaacaacaagagcacaaaaagggaattagggccaggatcattttgaaggtgaagtgaagaagcaggagatgggtaaatgatggaatcttaagatgcagagatgagatgctcaagaagttcacaaaagaggacctttctaaaagagagaggtttggaaattggaaacagagagccagattcatatatagagataatgttcccagaagttgttgtagccacacacaggcacccagtgaatggtggcagcagtttacaagggtggcagaatcctcataataatcccaaaactttactttctcaagtctaactctaatattattagattctggagaacttaacgattgttattcatttcaataaggctaatcagaaaccgatttatcttgtggtcctcactacatggtaaactttgtgagccaaagtttaaattttgaaataaactcctagtctccagttcagttcaaggacagtggacattcagtaaatacttgccctcaaggctggccttgcaacaccacactacgtgcattaatgaaagataaaatatcttttttgtgtgtttttctaattcagtaaacaatgaggcttctatttctggaaatagtttctgcagttcattatggaaatcctttcaaatgtggtcagtacctacaaatcataactctgtgtattagggagaaaaattagttgtgactctaatagaggtgtgttcaagccaagatgtctcttggcttatttatacagcttgtatttacttttgctaaaataattaaatttgtaacaattatgaggctgcccagatctctttagcagtggatattgattgttaatgtagaggagctttgcctcattaaaaatgaagtattttagtcattgtggctccatcaacagaacctggtgtcattgttacaataatcatgtgtttgatggatatattagtgtctctttaaagcttcagttgtaatataatgatttgcaaggctttcaacagttaattatcttgtatgtcacagaaatgtctcttaccctgatctaaactgaaatgaaaggtgagattcctctgaagaaaagcatttacagaggctttgctggcttgtttttttctgtgactctgtgtccagtggggtagaagtgcaacccacttcagtttcttgcctgggaaatcccatggacagaggaacctggtgggctacagtccatggagtcccacaagaatcagacacgacttagtgactaaacaacaacagatcccagatagcctctggtctttcctctctcctgtccactttgtcttgaaagatcactcctttactagtgggtgccagttaatcgcaaaacctttctgtgtgttctagttgcctccagatatttttcttgccccctctttctctactttactccctccacaacccctaactccactcactctaacagccagattaatcctgctaagccaacacactagtcccctgctcaagaatcttctgtggttctccaatgactattagagaactttcacatccttcatctggaaatcatgattttctaaaacctggccctgcttaagctttcagacctcattttctgcttttcatgacaagtactcaaatattccataattattaagttactggccacgtcaaatgtttgaataattactctgttgccattcccttctccagggtatcttcccgacccagggatcaaacccaggtctccctcattgcaggcagattctttaccactgtgctaccaggggaaaccccatctgtttgtgaccatatttgatgaatcattaaatatagcgtaggtagggagagactatagtcaaagataatagagtcttgcatttgagtgatatttaaatcattaatgcaattaggtaaaagatatatattttaactagttggtattatgaatgatttggacttgtagacttgaaaataccagcagaaaaagccaacagtcatactaaacagagaattagaatatgttattctacaatacatttctctttgtgaaaatgtacaagggattttatatttgttttgcttgctttttaccatagaattactggatcacacagtatgagaattttcagggttttttgttttgtttttttttttgacaataccaacttgctctctgaagtgcttgtacaaatttaaatttccctcaggcctttataagagttttccttccttaatacttattatcagaatgtttttacctttttgctaatggtaaaaacattagcaaatgtctctttaattgacattccctgattactaataaaagtgagcattttaaaatatgtgtaatggtaattcagggtccttgttttctggatgtcctagtcatattctttgtcagtttttcctatatattttatttttcttattgttcttataggtattctttatttaaaacgatgctaatcctttgtttgcttatgtgtcttgcaaatatcttttctgagtctgactcttttaatttcacaaatgttggtctgtttctaaaatataactttaaatatattgccccaaactctcttcagttatggacattttatcttataagactcacctaatatgtcactccttctatgaagccttctctgatttcccacgtgaaattttctgcactttaatatagagtcattgtagcacctctgatagttatattatatttaccatctcaatctctagattataagttcctggtgactctcttcacctttgtatttctagaagctgacccaaagtccagttttcagtgtgaatccccttgggaaaatgagtttaccatttccacttatttctgagggattttcacctctttaaagccatcggccctatctcttcatgctcatatcaccccacaatgtcaggcctcatatgagatgatgaataagcatataatcttatttaaagctaatcagtacacttgaagcactgtttcccttgactcatcccaaggaaaataagcattagaaaaaatattttttcatgtatatatgtgtgtgtgtgtatatatatatatcttgctgttaaaatataatcagcatattcactagaagtttactataaatttcagaaagaactaaaaagtttatcatgagctttggcagttctagtttttaaatgaagaaatttgatgatcattccaaagtaatttagtcagtttttattcaataagtatttgagatacaaatacatgcctggagagcaaaccattgacaaaatatagagttatttcatttgttaaacttcctgtccttaccctcttaacaatccagggccttccttgctg

SEQ ID NO: 45313 - DNA, 1304 bp, Bovine  19866880903776
  misc_feature (1)..(1): n is a, c, g, or t
naggagatgtaagagatgcaggttcaatccctgggtcaggaagatgccctggaggaagcccggcaacctactccagtatgtttgcctggcgaataccatggatagaggagcctgatgggctatggtccatagcgttgcaaagagtcagacacgactgaagtgacttagcacacacgcacaaggacagcactgtgatttcagcagaaaatacagatgagatcatcacaatgttgctgtcacctcactaggaaatgcacactcctctggtcccagtaaacagatcgaggatccctctgctctcatgtgaacttcacatctgtcttcctcttcactgtccatcctgagaccattttgtacaaaagaaagagactattttcagcacagttaagatgcccacatgctgatttaccaagcagaaaatgaggaataataaagaaaacatctgccatcacctgggcagttgatgttggcatagtgtcttgaatttctaccagggatcatgcctcttgatgaagtcataggacagagcttctgggtgatatatggtgaagccttagcaacaaacattaggaacattcacatttgcaagggtgaacaggaaccgtgggggcgcttactattcatgcatggactgtggttgtttctctgtctagtaggaaagaaagaaacaactacaggatcaaaaggaccaaagggagagaggatggattcagagtcacctaccagactgtgatttggaggaagacccgctggcctctctaagcctcacttcctttatactaaggggctctgataacaagtcataatgaaatgagctaagcatgcacgctgcctatcagaggtctgggcgacacagtgggtaaatgatgcgtgtttgttcctgtctaatgacaggctcccgggaagcagagcttgagacacagattggatacacatgatgtatggaggaaaggcttttaggacatgcagagaggaagatgctcagcagggttgtggtcttggtagggacagagtaaagggacaaagtaggtgattaaatagttaatcccactaggggactgtaagcaaagaaaaaggtatgggagaatcctgttaagttaatgatcactcaggaaagcaggtttgtttaaccataaagccaagcaggcttgcttagcaacaaaaccatgcaacagaagtctgagacatgcacccaaacaataaaacaatgggagcctgagacccacatcctgttcagcaagctcagtaagttaatgattcctaggacacgcttctctgggcactttaaaaacagaatataaggg

SEQ ID NO: 45314 - DNA, 898 bp, Bovine  19866880921195
  misc_feature (1)..(1): n is a, c, g, or t
ntacagatatgggtcatatcagagcagtttttgtgaagtgagagatggggtggctggatgggaggggcatgagggccagaggacccccagaattgctcatgatgctaagaatattcaacttgtccaatatattgaacttgtccaatgctgttccagtgcaagttcaatgagaggtgtggtccacaggcctatttcaggaattttaaaggaaaaacacttgatacataatctaagaatgtcatctggatgaccaacaaataactggattatttagaatatctctgtgcccatgttttgtttgggttcacaatcatgttagcttctagctctcatctaagttggtaacactctacagataatgtatcattaagcatcgctgtgtacactcatttcaaggataatagtcatccagtgtttattatagccctgttacattattttaattttcagttataaaaatgaaacctctttctcagggataattactgatggaaaaatatttttatggaatgactttcgtttctgaagttgtttaataaactgagatctggatgtgacattctaaatattgcagagtgtgataaaataacatacacatttaattatccttggctggagagaaaagaatggaggcagacttaatctgtgcttgtgtgccaagcaaatgccaaacaaccacaaggttggccataggaagcaagggatggagatgagcagtggttacaaaggggaaaggaggtggggttggcagaaaggtgccctaaaagcatgtgatggaccttccaaaggggtttaggcgttacctggctctgaaaaactctgatttagagctttaaacaacgctgacccttcattacattttcctgtctcatttcctctgggactactgtcccttaat

SEQ ID NO: 45315 - DNA, 1605 bp, Bovine  19866880944509
  misc_feature (1)..(1): n is a, c, g, or t
nggaaaaaaatcaaaataatatacacatataaatatattgggcaagttaacgtttaccttttttgcatctaaagtaagctggctgagatttataatttatctatttaattgatttatttccatagtcaccactttaaacattttattgagcacagaatcctatatttgtatatattgggcttcccaggtggtacagtggtaaagaattcgcctgccaatgcaggagttgcagaaaacatggattcgatccctgggtcaggaagataccctggaggaagaaatggccacccattccagtattcttgcctggaaaattccatgtacagaggagcctgacaggctacagtccatggggttgcagagagttggacacagctgaccacacacatggttattatacatgtatgcctatgcataaatatatgtgtgtatacatatgcatttatatatctcagtaaaataaataaaaattataggcatggtcctagaaaaatcataggttgataaactgatcataaaaatagtatcaatcaagaattatacagctaaattcttccctaatagaaatttctcagtgaaatcaatgaggctcacatactcatctcaattggaagagctttcattgtactgggcttaggagagagtagcaaaagtgctttgataaaatgtataattagggaggcaaagatcaaggctttaaagagagggcttagcaaaacagatgtccaaggagccttagtaaacccaacctccttaattaccctttggctgaaggaagtttgaaaattcttgcctggcaataaccgcaagtctgttttactctcaaaatgacttgacagttgtaccatgctccaaatattttaattaactatactaagatttagtgaaaatgtttcaatattagcaccatcaactggaaaatatcaggacatgtttaaaaattaaggtggacaaggatttatggatttgagtagtaacaaatctttcattatccatgctgtatccttgtgaaagagggctgatttgtatagtgtttttacaaggtaacaggcagagtttgaattacgggcatatgagttcagctgagaaacttcatcatctgaggaatagtttacatgtatcaaatgtatggctgagtcatcttacttcctgtttttccattaatgattcagacattgaccacgtggattattgtaacaggagaactctgtttcacagctctaaaactgaatgcatgtagtagataattacaagaggggggaaaagtttatattccttaaatgcctttataaaaatccatcctgcagtttagtaatgctgatttcttttggttttcaatacagactacttttcggtgtgtgtctgtgtttgttttattacaatatatttcttatgttttatgttttcacagtataacagggggggtttctctttaatatagggcttgactatgccattgttttatattgttgtttagtcactaacttgtgtacaactctttacaacttcatagattgtagcccaccagactactaaaaaaatggatttttgtccattgttttacacaattactcaatcacatattgtgtgaaagcacagtcacta

SEQ ID NO: 45316 - DNA, 1423 bp, Bovine  19866880988238
  misc_feature (1)..(1): n is a, c, g, or t
ncttgctaattttgggaaggttccaaaccattttatagggctctaccattttatataattccatgttcttcatggccccttagccagttttcttaacaaaaaacccaacaaggtctgtgataccttagaattttgtttcttactgtccatctgccaagcataaattatgaatactgatatcactattagcagtaattttattttttaaagaaatatgatgcatttgtattaaaataaattccatgaagttcacagttatatttataacctttgtaaaatttttgaattaaatattctataacataaatgcaattctcacactagaaagcgaacttttaatatttggatggtattctttgccataaaaagaaaactaaactcatttaagaaagcaagttccctctgtgttgttacacaatggcagggctttacaggtgtcacctaacattttcaggttccacttttgccaggtgttcgcaaaaatactgactttactagctgctggtgtgtcgttccccctccacattttgttgatttgttagtatatacatagattttcatagtaggtttcctattctttcccctgtgcataatttccttgatatagaagttccacaaccatagctgtaaaaaatgtttaaagagagaacattttggtatgtttgaaactgggatccatcattcattgacattccaccaagaggctatatttaaacctctacacgacttgccttatcagaggagcagtttggcatttggtatttggagacagctataaagctacaccatctgtaccactctgtttcaagagggacatcaatttttatccttgttatatcctgcaggaatattctgctaaaactcagcacatgcatgactcagttataattcagtcgtctaactgtggccaagggtatacgtggcagacagaagcacttgtgttcatatccttggtttaaaaaaaaaggcagcagttgcctgatattcaatcacagaggcatgagctttctaagtcacactggctgataaaatatctggttttgggtggtgtctcaaaatttacttttggcagtttgcctctaaagaaatattacagacaaaatctgacaataaaacattttctgttcattgataagttttatttgggaaggcaaaatgtagagttatggattacatttgtcaagtatagaaattagaggtccaaatatagaattaaaaattgagttatttttctttcaaaataaatttttaaaatttttctttaaaaaataattgcttaatggaatctttaaaaaatgggaaaaataaatttatttacaaaacagactcacagacatagaaaacaaacttagttaccaaaggggaaggggatagggataaattaggacttggagaggaaaatacacatacttgtgcatgtgta

SEQ ID NO: 45317 - DNA, 1766 bp, Bovine  19866880993427
  misc_feature (1)..(1): n is a, c, g, or t
naatgctggccgctgaaagccagctgaatccaccagaagctgaatgtccaaggcaaggtccccacctgaggaatggtaggtgcctaggggctggttggtgtgctggtgaatgcacaccattctttgtgtgtcacactgctttgtgtgtcacactgctgatcaagactcagctcacttgcctcaaggatggaagggccaactcagcttgaaagcatgcagtggatcacttggggccattgtttcaactgatcagagttcaaatcctcctgttatccttattccttcataccctccataggtattgatactaaggacaaggcccagtaaatttacaacaagcatgttttcatcctatgagccatccttaggaaaccctcctaagataatgagcttggaagaatcctttttactccagtatgcccattactcccacaatctatttcagtgaactagtgatatttgtagctaaacttctcagggcattgctagttataagtcaataaggtcaatatttcctaaacaaaatatactaaagtgttcttctctaagttataactgacttggaaaaaagatcaatacaattaagtggctgtcaaaagggcgataaaagttaaaatcaaaagatagaaaaatgcatcttgcaggaataacatagataaaaatcaatgaaacctacagcatatatcaatagataaaggcgataaaataatctggttagcagcataagacatcatgatatctttgggtaatagtaagttaaaagttcaagaaaatttagacattctctgtgatttccaataagtcagcttatactttgaatatttcttgccttataaaatatttttaaaatggattgctttctttaaagcccctgaagaaacattgaaattgctatgataaattaccaaacatcaatttctcattgatttcatgaacatgttttaccactctaggtaacatatatagatatatgagtttagttctcccagtcacataatgcagttttatttactaccacaagacattcaaattgatttctgtgtattattgcctccagtttttttgatggctctcctcatatcttccttaatcagttctacaagcattcacaaactggtacacaaaaatcccatgttatgcaattaaattgtacatcagtagtcaacacttttcaaatagcagaagcatcaaaaagttaccaaatgttttgcatctagtcacagaagttctgtaaattgtcaaatatccatttgaatatctataatcaaattaccttgagtttaagaaccactgttcctagaattacacaatagactatttatgtgtttatatattatggcaatgccatacaaaaaggagttaggtttcttcactgctatctcattctgagttaccttcttccatactcatcagaaggaaaaagatggaaacacacacatttacaatcacaaagcaaagcccccaaaaatcaatgtgtgatttaatgtagagataagacccagccttaaccccccctctcataccactgtcactgcccaaattccaaaccttattatttcttacctggattatcactactgcctccccatcagctgccccgccaggcacgcttttaatcaatccaagttaatcatcctcaagcgcagctctttgtgtgtcacactgctgatcaaaaatgtttgatgactccctgttgcctccagtaaaatttccaaatagggtggccacaaaggaggatccatacggaggatagtaatcctctcagt

SEQ ID NO: 45318 - DNA, 947 bp, Bovine  19866881011259
  misc_feature (1)..(1): n is a, c, g, or t
ncctggaaaattccatggactgtatagtccatggggttgcaaagagtcagacatgactttgcaactttcactttctcagttttagtctaaagggtaaaaaaacaaacaaacaaacaatgaaccgcatgcctaagtgtgaaccaagacaccaaacctgtcatcctgagactcttcaaagcccacagacttctgtctggcctttaatgaagccaaattgcagcagatactccctgtcacttgtgagacaatgagatgatacgggagacaacgccaaaaagtagcactgccccgcatcttcaattagccatgaagggaaaatgaggcaaagagtcatgtataatttagaggctagctctctggttcttcctgctgtgggaagtttttcactgaggaaggaagcgtgatttagtgcaatgaacagacctgggggtcagtcgtcttgggttgtgtttccagtcagctccctgacttactttatgaccttgtaggctgcttcatttctatcgaagagacgaaaacaacttgtatttatagattacatgtttggttatcctgggtaggggcaatgccaacagtcctttgatatatgttactattatgtttagtacaaaagaccttggtgataaacaaagatgttggtgtttgaaaataaaaatgagtttcaaagcctgggaggaaaagatgacaaagagtactttaatgaggttacaaggtatctccttttctacctagagagttgtgctttgttttgtgttttaattagtcagcaaactgtaaaccatgctcacgatgagagctgtttaagtaagtgtcaaataagactgtaaccttatttgaccaagaaagtatgtgggcataaaggatttattttccagtagaagtgggtctttgtctactaagaaccttaaggtgcagtgctgagaaaacttaagaagttggaaagctga

SEQ ID NO: 45319 - DNA, 1290 bp, Bovine  19866881014074
  misc_feature (1)..(1): n is a, c, g, or t
ncctcattttctttatctatatggtaaaaatagcaatgtcagaggctcatggtaaatccctggtggctcagacagtaaagaatctctctacagcgcaggagacccaggttcaatctgtgagctgggaagatcccctgaaaaagagaatggccactcgctccagtattcttgcctggagtactccatggacagaggagcctggtggactatagtccatggagttgcaaagagacatgacttaaggactaacactttcgctttcacagaggctcacagtgaagacaggataaaggaagtcaagtgattactattagtcagcaaacttttgaaaagtgtccatagcaacaaaaataggcataaacaacatcttgaaattttcttaaaagacaatagtcaggaaagaaatcaatagccaacaaagggtcactggagctaattagaagcaagggataaaatgatggacatatttcatcagaaatcttcaacctgaaataaatgggttgtgttttggatgattgcttctgagtcatttgctttagagctgagaaatacatttttccatagaaataacatgctagtcgataactcagtttttgaatagccaacagagtgttggttcctgggaatgtggagtaataaagaatagtccatttcagttatcacatctacattttcctatagggtagtgcattctgtgttcataaatcaagcttccaggaatacatgagacactcatacagtagcagagtcactggttgaaacatatgggagaaggcagagaagtttagctgttgagcagacccagaaaatagaacttactggaatcaggtaataagattaaaattgtttaaaatgggcctttatgtccatttccaagatgatgatcaaaagcaaccaagaatcttatgatggaatacttatgaaatctattagatggggaagaactgcaagaccattattattaaatagaactaaattaaaatcctgctggccatgtatgactttggaattggggaaactgaacagaacctcttgagcttcaatttcctcacatgccaaatgagaacattaatatttgacacagttgagagaaagattataagatgtcatttattttgatttattcggaatatctttcttgtatcatttgtctttcattttggaccctttgtctttcgctcacattctatgtaccaaaaatcataaaatttggattggtcactggaaactggttctatgacaaacatctccattattttaagggtttttcttttctacagaattctcaaa

SEQ ID NO: 45320 - DNA, 1777 bp, Bovine  19866881026836
  misc_feature (1)..(1): n is a, c, g, or t
nggacgatttgttcctgtagtacaaggcctcgccacctacacggaatgaatcacaaacctctcccagaaccaataaaaaataaataaatgaaaagtcaggtgtgttgtcagaattccctgctggttctgcacagggtgattagtgggcaattcagcaggcaatgggagcccttttctccgccttgtctgtgtgcttggcattattaaaaaaatatatattttttattattttgttgctcagtgccaggtgaaccgaaaagaaaatgaaaaaaagagcagtgtgtcctgtatcaggggtcgctggacccaaagaaaagaaaaggtgggttgttgaaaaaaagaagaaaaagaaaaaaccctcattttagaaggtgatgagttatctcttctctctgatacattgcatgaaacagtaggggaacttttgttttttcctttgtctttacatcttgcttacatttatctccaaaatatagtccatggtgaaaatgaagatcatttgccaactaaggaggaagagaatgaaagagggaggaaaagggaaggaagaacagaggggagagagacagcgagggagtgagcacttatacagccatttcagtggctgggtccaggcttggtattgttctaacaacattcagcactagagattcatttgatttttctgaccgactacagtctttcttaatggttgtggaccaagaccctagagatggaagagcctgcccagggtctcatggcttgtaaataattaaggcaggtcctattcgaagtaaggtcagaaccaacatctgtacattgcttgaacttgtcaatctagccaaagggtcctgcttgagtctcaggctggtggcctaagcacacgtgtgtacgggtgtgtgaggttaacaggagggaggcggggggatcactgtgggctgcagggtatcaaaatttcatttctctggctttgctccttcacgaggctgcttcaaacaaactagtgcccttgggaacttcagacagcggccttcatcctgcaagctttatcacatttttcttcccgagacttctgttagtgtttagggttttccagaacttaccattaaaagtcacctcattgattatgagagttcagtgctatatcctgcactcagaacaggtaaatgactggggaaggaatatttgacaccaggcataaaatttaaggtaagttcattgagttggttttcagaaagctgtaactattttcttgttagatttctttttatgctgaagaacacagcagctgaattggaaggaaagattttaggcaacagttacttctttttctttttattataaatctactatttatgtccaactttccctggaaccaggatatggacatccagttgctcattggaagtttcctctgagtgtctgtttatgtgtgcttgttttacaaaatttggaaaatacggagcaacaacaaaaaactcagagaaaaacaatcatatacaatctaccaagacagagatcatcatggataatattttgtgacacttccttgcaggtgttaattctaatatacctaacattagggtcacactctgtatgtgctgtttaccatttgccttcagttcaatagtatgtaccttacgtattctctaattcttctatgaaaacatccttttgattagttgtatgatatttcatatcttcattgcactcttgtttctgtaaccattctttaataattggagttacagggttcttaccagatttttcattgttataaaataactacagtttctat

SEQ ID NO: 45321 - DNA, 2052 bp, Bovine  19866881033980
  misc_feature (1)..(1): n is a, c, g, or t
nacctggcactctctttatataaagcactttctacatgtagatgcatagttgtattaccagcactattcatttatattcaaataaagttttgaaatttttgaacttgtcaatttagagtcagattacatcctaaagggacctccctggtggctcagatggtaaagaatctgcctgcaatgcaggagacccaagattgatccctgggtcaggaagattcccctgcagaaagaattggcaagccactccagtattcttgtctggagaattccatggacagaagagcctggtgggatatggtttatggagtcgtaaagagtcagacacaactgagtgactaacactacatcctaaggaaaataagctaataataaatcatccactgtatcaacactctcatggcccagctccttcggttaatttgtttgggaattaaggaccagaaagattaactgatttgctaagctctctttcatatgattggattaaagtataaatttggatatgttgtataactttgtagaagttatcacctgataattctacactagttgccttattatgtcagcaaagtcatgactcatttccacaaatccatgtggaattttccaagttttggaggaatccaaagatgattggatcttattctctaggagataatcaattaaagggaacacacataaataagtaaatatgtcattctaaagaagggaacaggtgctgtggtagatgtataaacaaaaggcggaagggacacaaagaatggagcaactaacccaaactggaggtttgggaagcgaaaatattaagcattatcttgatagctgataggagactaaatggacttgttagtgtctgcaattaaagaaatctgagaggcctaggttttcattatagtcaaattaaatgactataaaagaatcagaaggattaatttaagtgagcaactagccagtaccattcatttaaaaccatgtcaatatatgcaaggaagcatgctatgacaaacctagatagcatattaaaaagcagatcattactttgcaaacaaaggtctgtatagtcaaagctatggtttttccagtagtcatgtatggatatgacagttggaccataaagaaggctgagcgccaaagaattgatactttgaaactgagtgttgggagaagactcttgagagtctgttggactgcaaggagatccaaccagtcaatcctaaaggaaatcaacactgaatattcactggaaggactgatgctgaagctgaagcttaaaatactttggccacctgatgcaaaggagtcaactcattggaaaaatccctgctgctgggaaagattggaaaggcaggaggagaagggaatgacagaggacaagatgggttggatggcatcaccaactcaatggacatgagtttgagcaagctctgggagatagtgaaggacaggaaaacgtggtgtgctgcagttcatggggttgcaaagagtcagacaggactcagcaaatgaacaaatctgttactaatgatatcagcactattatttcgaaacatttatgtgtgtgtgtgtgcattaactaatctaaaactgttacaaactcactagtttactaatacatgataatgagctgttttatttgtgtattatctaatatattagtatacttaatatatcttagttattatttacaatttatatattagcattatcacattatatatacagtagttcaaagttaaatgtaaatacataacaatttcaaagtaataatgctgatacaatatattattagcattagtgtatgctaataatagtaatattacatgttttcacacattagttaatatatcaatacatattagtgtatgttaacatacactaaccaaaacttttcattgaaaaaggaaagagtatgaaaagcaaagaagttaaatgaaaattctgcaattctaatttaagttaaaaaatcaattatacttgatttttaaaacatacttaagagaaaaagaaacatatatgtatttatatgtaccaggactccctgcagataccaaa

SEQ ID NO: 45322 - DNA, 760 bp, Bovine  19866881068739
  misc_feature (1)..(1): n is a, c, g, or t
ntttttagtttttgctttaacttgtagaactggattttagatatgtcttttagtttgcccatgttctagtttttccatacaatgttatggaaaaaattaactgaagttttggaccaacctaatagatgcaattaaacaagctctttcccttctatgttgcaatatttagttttggtaaagctatagttgagggttctttaataaaaattaaaactacatgtttaatttgtctgctcagcgtcttcatttatctacacaaatatctcatttttgacacaagtatctttatgtgccatctaaggaaagtgctataataaatttgaatctacttctttgttgtaaaaagaaattttcacaaaatttatttaatgatcacattatgcacaatgaatgcatttttggcttttcgagatcccattttactcttctatctttgtttcggttttggagcattcattctgtggtattgttttattatagggattaaaaaccaagtgacaataaaagcaaaacagctttttttattacttatgtaaagcctacttcatgcatcaaatagtgcccagaataatgtcaaaacatgtacagaaagacaaatagcaccacctcctcaataattatgtcgcttcatagccctgtgatgatgtacatttgggattattctgggagctactgaatcaaaacaagacagctgagatcaatcagaatcctgggaaccagaggaggccagcacaattctaagctgcaggaggccccaggg

SEQ ID NO: 45323 - DNA, 1088 bp, Bovine  19866881087020
  misc_feature (1)..(1): n is a, c, g, or t
naaaaagtgttaaagtacaaacagaacttggttgaccacagaattagaaactaaaagtaggaaagaaaataatgaatctaaggaaataaacacatgaaaaggagggacgtctacaaataaatgaaaaagaatgatgatactaactgacctttacttacttcgaacatataaagataataaacgagctgaagcagcatgtgaaattcaaatttttattagtaaggcactctttcctagttgtgacagttgttaaacactggaatgggtgacagggtaaaatagactttcattatctagatgggtagacatgtgatgttgcatgaagagaaaaaccatctctcagtggcctatccaaatttaaaatgccttagatttgagaattactttgagattaaattataagtaactaaaactatttttattacttgacaacttctgagtttctaatggttcctagaggagtttggatagcttaaggttgaaaagaatttaacttgcggttttggggctaaaatctacttaatattacttgacagtgagttttaacttttttaatctcctccagtctttttccacagcaaaaagtatatgtattattcatgtatgatatctatccactataacataatggggccttcctggatggctcaacggtaaagaatctgtctccaatgtaggagatgcaggagatgcaagtacaatctctgggtccagaagataacttggaggaggaatggcaaccccactccagtattcttgcctgggaacctccgtggacagaggagcttggtggattacagtccgtgggatcacaaggagttggacataactgaaaaactgaatgtatgcatatataacatatatattgtatatataagactgcatacatcatagaattgagaacattaaatttaaaatccacataaaataattggcaaattatctgtgttattattctggagaaggaaatggaaacccaatgcagtattctcatctgaagaatcccagggacagatgagcctggtgggctacagtcaacggagtcagaaagagtcagacgtgactgaatgactaacactttcactgtg

SEQ ID NO: 45324 - DNA, 612 bp, Bovine  19866881157977
  misc_feature (1)..(1): n is a, c, g, or t
nctcacatatcatacatacattttttgtgaatttgaggattcttgaaaagctcagattttatgtcagtaaaatattagggtcttttcacttcattcttattaggcattcaaccataattagatattcatacacactcacatataaatgtgtgtacacacctatgcaaaaatctattgacgtttccaagaaaaaatgtcattgcctgtatcaggcaaaacagaacacaagtcaataactggaaattgttctattttccaaattgcaggttataggcactcaggaagtgtctcagactattactgaaatctctcattggctacaaaaacaagcacattttgaaatgaaataaaatattaaagatgaagttggatctgttaaatttgagccaaagatcagactttgcatatggagcaaaacaaaacgaaacagaacacagaacaacagtatagaaggttcccaaagttggggtaaaagataagtattcagtcaataccaaatgtcagttcaaaatgaagggaggaaagcttgtcatctccatagagaagttttacatctcaactcactcttttggaaatatcagaacatatgggaattaaaacaaaaattggaat

SEQ ID NO: 45325 - DNA, 608 bp, Bovine  19866881161606
  misc_feature (1)..(1): n is a, c, g, or t
ngagcctggcattttataagtgaattgatcctagaaacccaaatgaggattgcgtatgttaaggatagatacaaatctatacaattctatgacaagctgcttggtattttctgggagtttgggcagcaccagattgctaagtgagtctcaaggattgcagacctttaaatgacttgaaccagtgtcgagtttcaggctgaggcgttggccatgtgcagaacagactgaaatagagagcacagaggctctgcggaaagtcggaatggcagcccaagctgcgatgaatcaggaaagggggatggcctttgaaacggctttcctgctcactgtgttatcgtttggaaaacggttcgagtagggaacaagaagcaccttaagcttaaaaaaaaaaaaaaaacagtagaggcaaggttgaaggaagccaaaaaattgagactaatctttccatttatataaatccaaccctcagggccccaggcttgcctgcctcttccattaatgtctggggcagtagagctccctatggaaagctccttttcaggcttggagatgttgaatttagtctccaaagggaactggtgaaggaaacaattagagtggctatggaa

SEQ ID NO: 45326 - DNA, 1487 bp, Bovine  19866881164227
  misc_feature (1)..(1): n is a, c, g, or t
ntttcagctgctgtgtgcatggcccagctagctgagactcatttatcagaagccgactgcgatagcttacatgggaacgctacccttgggagtttgagcacacaggaacaataacaagactgccaaagaaacccagcctctaactgcatctgccgatgctcagccacttacaataaaaacaagtaacaatgcacctatgtccttaagaacctttcttcctttcagtgtattcaaaggggaactttagagactatatggaaacttacactgaaaaacacagttggaaaagaaaatggccacattgtcaccctaggggcatatccagaggccatatctgtggatgtccagagtgcagcctgggggacacctggaagcccagttcagcgccagcccagttatttgttgcctctcttgtttgatctctttgtgctgtgtgctgtgcttagtcgatcagtcaagtccgactctttgtgaccccatggacagaggagcctgacagcctgcagtccatggggattctctaggcaagaatactggagtgggttgccatgcccttctccaggggatcttcctaacccagggattgaacccaggtctcctgtgttgcaagcggattcttgaccatctgagcccctggggaagctatcctgcaagaatggatgcacctttgagcccataatattcttccctttattagaccttgcaccagctctttgatgtgagggcatttttgtaccgtcatggttctgggagacatgggaagggaggagaatgttgctacagagagcccaggttctgaggctggctccacatttaactggggcagggaaagcccagaagtgaccaactggagaggtgtcactatttgccactacctagtgctatggtgtggaaagtaagtggcatccgggaagagtcaagcatagcttcccaattttgttaccctcaattttgtaagaccacatgtaggggctaaatcattggcagtttggcagaattacatatcttctcatctgctatggtcagcttgcttgcattctccccagatccacctgttgaaaacctgatgcccagagtgataggattagatggagaggcatttgatcaagaaggctctgcgctcgtgattgggactagagcccttacaaagagggccacacagggcttcccagcccctctgccaggtgaggatatgactagaagtcttcccagaaggggttctggtggaggatatcactgtgaagcttgtgtgatgagtgacttggccagcacagcaggcatgccggacccaggacgctgctgtcagtgggctcgggatggatggagcattgagaaataccgactcctgctcaagctagagggaacgtaaaatgccgcagcactatggaaaacagtatggcagctcttcaaaacagtaaaaatagagctactatctatccagcaatttcacttctgggtatatatccaaaagaattaaagcaaggact

SEQ ID NO: 45327 - DNA, 1255 bp, Bovine  19866881207794
  misc_feature (1)..(1): n is a, c, g, or t
ntgaagcagacaccttaagcagatactgttaaagacacttaaaaaggagtgcacatcaataatcctttcacatttagcgtcaaggttttagatttgtctaccagcaccaaattctacatttggggggtagggagtgggctgttgatttctaattttaattctttgctattagactttattgagtcttcccaaaatactgtcatcatagaaaaaacagattttttcagtattcatagttcatttgtttacatatcatttaattaaattacataattaaagaatattatttttttaaattttattttatttttaaactttacaaaattgtattagttttgccaaatatcaaaatgaatctgccacaggtatacatgaaccctcctccctcctccctccgcataccatccctctgggtcgtccccgtgcactagaatattataactaacattcattcaggaataaaaacaactcactcttagtaagtatgcaaaaactggtgggaagcagaggttttcagaagagtagcccaatattggcaagcattcagcaagccacgggattagtgattgcgatttgcagagggaattgtgaacgtcaattagatatagatgggttagtagagactgtgctggaattctcatcctcagtatgcattactatctgaatcactgcttaattcaatcctggctcatctatccagcaaattgctcacagcttccctctcctctcatgctagctgccttgaattgagctcactgcttctcaagtattctgtgctgaaggatcaatttttccccgatcagtcacaaaccaatattatacttgtaaaatacaataaaggtacaatggggggaaaaagacataaaatgcaagggcatttaaaaagatcagttcagcagacataaaatgactctgttaaactgctataaatgtttctaaacattttctctcggtttctgttctcgtcacctcatgaatctggaatggtttggggaatagcatcggtgtgcagactatactctgggtagtgcttatctagaccatggcattaactaagtttcattctgtggaattactctgtatgggaaatatgatctaaaatattcttgaaaggtggatacagaaagataatttttttcaaaggaaaattattttctttagatttgtttgactattttcttctctttcacccactttagaatctaatgcacaaaaatactgtgatcttgggaacacgtggctctatattacatta

SEQ ID NO: 45328 - DNA, 1214 bp, Bovine  19866881208168
  misc_feature (1)..(1): n is a, c, g, or t
nttaggtatttccctctcaagaggtttttgtaattctgaaaacattccttctttctactgaaattctgttgtcaatgactttgtgcagctgagcagaatttgtcttaaaacaaaaacaggaaattcaggaacaaatttaggttcttaggtgtttagtcttcattggaacaaatacaccgtgtatttccactggtgatttgggttcactcaacagtgaagtgcttaaggtaaatagtgtcactgaagtacctttcggtatcaggcctactttggaggtgagctgtttcacttatctaaccaagaagagatacagccaacacttagttgattaaaaatcagatttctactgtgaagagctagcatattttcaaattattaacagcatatattaaaataataattcaggattataaataagtgtaattgaaagcacactcagaaaggctttataaataagatgcataagttacacagagtttatatagcttccccttgcttgtgaattaccattggatatatatgcgttcaatttctttttgagtgcaaagacttaggctcaaggacagaatactttaataaaaataaagaagggggatttgtgtgtgtgtgtatgtgtgtgtgtgtagattcttttcttgaatttagtttgaattacatgaacatctttggaagtaatttaaaattgatgtgcttaaagaaaattattttaatactcgaataaaagtaaatgttctaaatgctgtagtgaaataaaaatggatactactaaaaattttacatatgtctagaatttgaaagataacacctctagagaacattaaataatacaaaagtatcatggtacagaacatagtcttgggaaatttagttcatatattttatgaaatgttatctagcccaatttgtaagtaatcaagctttcacagacatctcacctttttctagtgaatttggtgaatacgacctttttggtttgtacagaaaccattttgtgatgtgtgtagaagaagaaagcaaatttatgttactatagagaacttccttatctattaagaatgaccatctatcaactggcaattccataggtttgcattccaaattattttatcattttttcttaaatattggttattcctcagatgtttttacttatataaactaattctatatttaacatttctctaagaaaatgtttgatcaacatgaacaagcca

SEQ ID NO: 45329 - DNA, 1112 bp, Bovine  19866881248306
  misc_feature (1)..(1): n is a, c, g, or t
ntctcactccaagtccatcatggaaactacactttggccaaagtacatatatacaggagcccttagactctgatgctgggagggattgggggcaggaggagaaggggacgacagaggacgagatggctggatggcatcactgactcaatggacgtgagtttgagtgaactccgggagatggtgatggacagggaggcctggcgtgctgctattcatggggtcgcaaagagtcagacatgactgagcaactgaactgaactgacctagcttaatacctacagaggctgtgtaagtaacctctaaagtgcttaaaacactacaacatttaacagtttcaatggctgaatcaatgattcttctctcttctctaactaaataattttagagcaagatagcaaataaattgcaatttgcttgccaaggacaccaagtttgcaccccaacttagaaaagaatacagtgatggattagctatgtctgccctgggcatagaaaatggcaggtagcagcacacatatttgccaaagaatctatcattttataaaacagacttggggtttatgatgagaagcaacattgacaagtctcttttaagcatcaataaatgcttgatgatttaaaatagataaccaacaaggacctattgtagagcacagggaactctgttcagtattatgtggcagcctggatggcaggggagtttgggggagaatggatacatgtacatgtatggctgaatctctttgctgtccacctgaaactatcaagacattattaactggctataatccaatatgaaatagaatattttaaaaaacaaaaaatactaagcactgtattaggcactgtgaataaacaccaaggagtttaagagaaaggctttgcctgtataacttacaacccaatgtggaaaataagccaaacgcacaaacagcattttagatgttaatcgtctgattctgactgcaaacattgcacagatttgtaaaggggcgaatcacacaataaaaggagtccgtctttgtgaaccgtgacatctttcgagaggactatcaagggaccaaatatagatgggaaagaactttaaggaattcctatatagtttcagagtg

SEQ ID NO: 45330 - DNA, 1956 bp, Bovine  19866881254892
  misc_feature (1)..(1): n is a, c, g, or t
ntgatgggattggatgccatgatctttgtttcatgaatgttgagtgttaagccaacttttttcactctcctctttcaccttcatcaagaggctctttagtttctctttgctttctgccataaggatggtgtcatctgcatatgtgaggttactgatatttctcccagcaatcttgattccagcttgtgttttatccagcttagcatttcgcatgaagtactgtgcatataagttaaataagcagggtgacaatatatatgcccatgaacagtatgaaaagatcaaactattgacaaggttaataatttttattatatatcaagtcaaggtaagatgtgagaaaaagcaaagatagcttttcctactccagctactgcgtactctctgagaccatcctgattcaagcactgcccgctctctgtcccccaaactccttactcttggctaattttgaccacatttttattctttgccctcacttcagccccagatcatcagcttttctgaaataactaatgcaaggaaacgataaaggccagaaacattggcacaagatccatgagggtgggatctttacaacttgagagcattatgtttgaaatcctatttatgcaattcttggaacagatttaaacaactcatgggtaccactcaaagaattatttttacagcatgcagagtgaaaattttataacgaagggaactggtagtcaaagtctttatcaggaagtcaaaaacatgaaggaggacatgattgtagcttctttgagtgataagatccactgaagtagaacatgaatttctcacatgttgtgtgaaagtttaaaatttctgatcatggcaccgaataactttgtgaaagaaaagcagcccgcaagacatgaaaggatcatttataataacctttcacactgaaaaatgtttaagaagtgcttatttggaggtctggggaatttgaatttaaagaaatgaactggaacatagatttgaaaaatactacttttctaaattctgccacttctgattagctcatagaggaactttataatactaaaaacagtccaggactattaactccaatttaaattttcttagctatcagaaattcagctaaaagttcacttactcttaactttcctaaacctgtttccttcgattctttgctccagtcaacttaccaggcaccagatgaataaaatgaatggttatttgaggtgacatatcaaatgatgaggagactctatctgggtaccagacatagctaattgactgtggggattctaatagttcaaggatgagagaactttggcatagaacacatgctctgaagagggccaagtctaagacaaatatcgcactctaatcaaatggaatttatagattcagacgttgacgtgctttgcattgtgagctcttgccatcttctttgtatttttgagtttttttgatttcctacctactttctttcttaaaataatcttcagcttgcttctattctgttttttttttttaattgtaaaataattgctctacaatgttgtgttggtttctgccatacaactatgtgaaccagtcataactatatatatatagtccctccctcgtgagcctccctgcctcctacttgccttataggaagtgtcagggtagtaatttccctccatactcccaagctctgtaaaaccaagtgtttgcctgtctgtaggctgtgaaatgtgactcattcagtcattgcatttttgttgtttgtttatttggggtgggcatcctgcggtccccatgtgtcacctccgagggcagtgagtctctggtcactgacccacagaggccggcgtctgtggttaatgaggtcctcctgtctcctgctctttcccaccgtgccactcaccaggtctattcctggaggctttcagacgctgggccctccctggagggagctccatctggcaagcgtca

SEQ ID NO: 45331 - DNA, 2469 bp, Bovine  19866881276607
  misc_feature (1)..(1): n is a, c, g, or t
nctggaaggctcttaaacctgtgatttttttcttccttcttttttggttcttgacagcataaaaggtgaggcgaggagggtcagaaagaggtctgtctgtcattctttacttggacagaaggccaggcagtgctacggagaaatgttgttttcttacaaagattacctgttcacttctattagtcaaatgctctgaaaatgattttgttgtgaaacgctggggaaaattgaagtcagttaaaatatgagccatgaagcgtcagagccgcaggtgtggctggagtctagggagggggagattacctcctgtgtcccccttctaaccttgctgaaatgccctgatcccagagaatacatccaagctgctttgctcagagcagcatgactcctaggacatagatctgttgaaatatgaaccaagcagggtgtgaacaagctcaaaatatgctgatttccagatgttccttgattctctcaaacactgattgcccccaaagaccatcctgagttggtggatggcagcgattactcatatttcttttctgcgatcacggccgtaatttaaaagccccatagtctttctcatgagcctatgtctgggtcttgtctaggtcatatattacttcgcagtatgaaaattgcagagtctcgctggattgggctgtaaaatatctgcacactgatgccagttttttgatttgttgctcttcccaggatgggaaaacttttcagaaatctgaatgaagggttggtgttttatagagtgaccttccttgaaggagaggtcgtggaagatctcctttctctgcaacaacaacaacaaaatcagaaaaaccagaggagttcatgttaacatgttttagggaaagtaaaagaatccaaagcagtgaatttgagtttataagaggaaaaaaatatatttgtaaaacatgcttacaaccaacattattattgtgttctaaaatctcaaccacctgagaacagataaagaaatctggcttgtgaataagttgggatggcaaatgctaaaacttctgggagcttcatttgaatctgtttatctggtatctgggataaataaggcatcagtgaaagccttatgaagggtcttccacaggtttacgagaggaagtttaatatctaccaccagaaagatggtaccataaggaaaaaaggatttccaccctgttcagagacaaatttgaggccaccaacccactgtcccctgagcctctgaactgacacatttcctccccatttcttaggaggagaaatgtgacagaactctccagttgcacggcaagaaggagaaaagactttgatctgggttcctgtgacagcactgactcatacaggaaatgaccttaatgtctcagagtcttcagtgtctcatctatgagaggcagttaataatgcctgaggaggagaggttaagcattccgtctaaaatcacacctggttggggcagaatgaggacttgaacctgctgggctcgcaacaaagatagtgtttaatccacggtattaatacctgatgaggagtaaatgggctaagacccagaaaaccctcacgactgggcgcagggcaggaggagccctctgtgaatagctgctcccattgtctttgcccttactccctgcacatctgctgcatcctctgttgcccccaaagcatctgatgcattctgtgacctgcgatggcacgcaattaagtaggagcaaaggtgattcctgtgcctttaatgcttctgccacaattatggctgctctgtccttgtatttgtttgcctattgcttcttccttgcaacggatttcttctcacgctgtataatattataatctaagttcttcattattgatgatcattttaaaaaatagaaatcattcttaggtagtcagctctccctttggggtcggggatttagaagacaatcgcagtctcctcgggggaagacctcacctagagatcaccagcatctgggtgtagctgacactggagggtttgggggaatctataagcagaagagggtgacagagaatgagatggtcagatagcattactgactcagtggacatgaattagagcaaactccgggagatagtgaaggacagagcctggcgtgctgccgtccatggggttgcaaagagtcgaacatgactgggcgactgaacaacaagcagcacaaaatgcaaatgaggacagagaacccactgctccaggagcagagctcaccaacactgcttgcttacaccatctttgagcagcacagactgcgtgctcttccacctgcctgctctcctctatttcagatgatgtccttgaatccacaccccacaccagaagagacgttcttagatctaccagatcctgtttttagctactcttggtcttgtagttttctgggcatccatgttccctagtctccaagtgcctcatgatgatatccttgaaccctaactgtactctaa

SEQ ID NO: 45332 - DNA, 1617 bp, Bovine  19866881289121
  misc_feature (1)..(1): n is a, c, g, or t
natatgggaaaggatttgaccatttcctattgttactattgacattggtttcattattcttttttaagtaggtattattattttctccttgaggagaggaatatattttaatcaattataagccttcccaaacatatatcacagtataaatatattaattgaattgaactcattggctttatcttgcaagttttacatcattttttgtgtcatatttttaattttagtagacactttcatctttattttatagacaatgcaaacctacacatttatgcccagctgatttttgaagaatgtctttaggaacacatgctcctacaaaacagagcctaaagaagactttgaagggctgactgatttaatcaaagtaagttcttttctgacagaggccttcagtcgaagaggtatctttttatatgttgggcatcagcaggtggcactttttatatcacactttgttctctctggaacacatcctcccagatgttaagggaacggcacacggttttagaagtccaaggtagcaatctactggacagtgttgcaagtagtttgttagaaataataattaaatgaataacatgtgtgaatgactatgatttggagtgaattcccattatctttgtgataactttatacccattgcgtgtgttagtcactcagtcgtgtctgactctgccaccccatagactgtagcccaccaggcccctctgtccatggacttctccaggcaagaataatggagtgggtagctgttcccttctccaggggatcttcccgggtccagggattgaacctgggtctcccacattacaggcagatttttttttaccatctgagccacctaggaagcccattgctttcttgcattcttatatgctcttttgagcaggagagaaaagtgaaaggtacaattaatgcacaggaaattattgacaccacctgagtgaacatcatgtgtcctgtgtgctagggcaggagaaagattgagagctgtgggttgagagttattcatcaagaaattgaccatgcacgtgagtgaagaaacagaaggaaatgactgtgcttgttttgggactgctaagattgcaaacagagaaaacatgtctccaactacatccttccaggagcagcaaatggaatcagaatgcaacttctagggcagccccaactctcagtggttttgttcactggcatatccagcaaaataactgaagaacagtaattcacctgggatcaagttccaaatatggtccattctgaggtgattagaggtgggcatttgtaaagctgagattatatagtgtaattgatgatgtcagagttatttttggattcttgattctgattccagatgtttttcaatagaagtaggcagggtgaatttaaatgggaagcttagttgtcagtaatattacctagtacatctttagttgggtgggtattttgaaaaattgtaaggtgtcatgtacctttgagtgcaaattggtcttgtgaataaccattattcatagccagggtgatcatgtaatttgtcattcagaccagggacactctccagagagggaaaggggtactattaataattacattggaacaacaggtataactggg

SEQ ID NO: 45333 - DNA, 871 bp, Bovine  19866881298211
  misc_feature (1)..(1): n is a, c, g, or t
nattgatatcatcttactgcttttcatttatggtaatagaaaagggttactggtttcacatgattttagttctctggaaataaatgacacaaaatgaataagtcatgcactactgtaggtttgcagacggggcacaatattactaaattatgtgctatgtaaaagaggaagctggaaagaaatcaatctttaactaagcttgagtgatccatatgatatgattctaatgtatggtttgggggggtggggggtgggaaaccctcctgtgcaagagttctaataacctagttagattggtaattaggacacagggacaaccaaaaggggaaaaaataagagtgttgaacagcagccaagtgaattttagaataatgaagaaatatcaaatagggtaaatcaatggagttaaaggacacaaaggggaaatgaaaaacattcaaagataaattaatgtagacccaagggttgtgcaagcaatttactataaatatactaggaaaaaagagacagatgtaggtgaacaaggaagtacaaaattggtaaagccttgttagaagtagaaatgcatagagcacatagtgtggcaaagcagcagtttggtgaagaagaaagaaaagcctttaagaaaaaataaagacattcttttgcagatgacatgctgttgagcaaaagctcttgctctcaaatcatgtattataatatctttataaattggatgtgaagtaaatttggccagcctcatttttagttaataaagacgaagtttcacgtacagcacagtgactatagttattaatattttattgcatatttgaaagttgctaagaagtaaatcttaaaagttctcatcataagaaaaagaaatgtataa

SEQ ID NO: 45334 - DNA, 1885 bp, Bovine  19866881303578
  misc_feature (1)..(1): n is a, c, g, or t
ngacacaatttttgacatactgggaagatagattaaaagcatagaaggaattcaatttaatggtaggtaaaaaataatgtcaagtgctatgtacatagcaaaattctgagcataataatttttggaggtaggagtctgagcaaatccattttccaagactatcagataaaaaatgacatatgcttgttgttttttttaaacattcttaattcgataattgttcagggttaatgggcatcttaagtctcttaagctcagtccaaatacctgaatacataaaagttgcatgagtgtaccttcggatattacattctgttcttaggactgtcatcgtttccctccagatcacattttttttttaacctgcttctgtgtagtctgatgatatactagtcagtactcataattgcagcttagcagatgtttctgttctaagactgtcttgaaaatgtgcattcagaaagaagtgttaagtctatgtgaaaaagccaaagaagtccacaagtattagagatttcctcagtcattccgtctaaaagtgcatgtgcaaactcacaaaccacctttaaatgaaggctccatgttcctattgggtaatatagccccaggacatccagatgagatactgaaaatgcagaagagtattctaattgttttactttaaaaaattcaaaatatctgcatgttttacaaactattagtagtgttgccttaatttgttttcattatttgaggaaataaagacaagctttatagattctgaaaatttgctgtgttggatcttttatttttctttaaagagaaacagagaatttactgaaaagacacggaactggtctgtttcaagtatagctaatcttcaggaggttgagtggtgtagatagaccttgagggcaaccacaaccagggacttaaatgtcacttttctcctttgctacacagtggctttcttcacagtgtataaatcctggctgcaaattcctactagcttatattatacagattaagccatcagaaagaggcaaatagctctttcagaccctaattcagaattcctttaatgcaatttgttcaaccatagacacccagctcattccaagaggaatgtatctgaactaggtattgcatatgaaagtaaggagcgagcctgggtgtccagtctgtctgagtggtaccttgttccacaggttcagacacacacatcacttcacagcctttcaaactaaaggctaaatcaatggttctcaaaccttgcgcattagaattccctggggagccactaacaaacaccaatgcccatattccattcaagaccaattaaatcagactccttcagcaaggggcctggaggtcggcatcctttaaataccatgccaggtgattgtagtgtgccctcaggttgagaggcactgggctaaatgatacatttaaacttaatggaggaaaaacaagataaccccatgtgtgcctgctcaggcccttcagttgtgtccaactctttgccaccctatggactgtagcccaccagtctcctctgtccatgagattctccaggcaagaatacctgagtgggttgccatgccctcctccaggggattgaacccagggatcaaacccgggtctcctgtatctcctgcttgggaggtggattctttacctctgacgaggaagcccataaccagcattaaactccagtttaagaaaaggaaagctgtatagaagtcccaattgatctcagacattttaaatttgttacaacagactttaccaataactgtctcacaagaaacaaattaaaaatatgtctcaccttttcccatttgtctaattaaaagattttatagagacacctgaagatattttcctgtcttggttctaatccatg

SEQ ID NO: 45335 - DNA, 1158 bp, Bovine  19866881312801
  misc_feature (1)..(1): n is a, c, g, or t
naaatgagatacaactgtgaagacaggatgagagaaaaggcataatattccttcttcacaaatgtattgctatttgaccccacttacgtaaaagtatacatgtaaatgtatgtataacaaagaggtacatgaaaagacagtgctcacaatatcaacattggttgtctcatcaactgcattccagtggaccttttccttcttccatgacagttctgtgaatagttgcaaaagctttacaaagaacacacatgacttaaacgatcagaaaagaagtgattctatcttcactccacatgaaaccccctaaaaaggaggacaatgttttcttgaccatagaaaatatttcttagggtgcttttatgctatcccatctccctaaaaaatggctacagaatgcttcatctgtcatttcttgaaatagagtccctatgtggtattttacatcaccagtttgatctttccatggttgaagcagtatcctttgttggcaaagaggatacattgaggaaacagatttaaatttgaatctgtacttaccaggtgcatgaccttataacctaatcctttctaatcctcaaatttcttctatataaaatgaagataacctctgcctgataggtttgctatggaaaacagataacattcctagcacaaagtaattacatggtgattcatcatttattaatcccatttttattattgttgttattatctatgctacctttcaaagtgcacattggcatactctccaaagatgtgtactattgtacatgcaaaagtaagtgcttttaactttttttgtgacatagacccttttggcattctcctgaagactacagacagcttctcagaataatgtctaaaaaaaaatgcctaaaataaaatacaaattactacataggaaactattatgttgaacttaaccaagatattttaaattgtgatagatgtagttctttattaaaacattaattgttaaggtctgggagcagatataattgctaataattattgggaaatactgatgagtgtaaatgtcactttgagagatttgcacctacaaatgtaatgcactatgaatatatgtgttaatcctattggtgataaagctatagttattgataatcctacagttgcgtcttgtctactttcataatt

SEQ ID NO: 45336 - DNA, 1259 bp, Bovine  19866881337081
  misc_feature (1)..(1): n is a, c, g, or t
nagggtatgaaaatttagtatatcttatcatcaagttgcctgaaaggacagtgagccttgaaaacacattgcttccaagtgccgtggaaattaaatgtggaacagggaataatattattatcttacattttgttcattcaaagactctatagagtcttctttagagactccatcatacttgtgatgaatgaaaatgtttctaaaattcaaggtatggtaggaaaagaaacagatgattcttgctgccttattaaaactcttatttccctttagagtttagtgacaataatacatagtgattctttctacctatgaaagcagctaaaaataacaacaggcgagctcaaagtgcttttcatttaaaatccacatttcactgtgcatgtgaaggaaagctatgcactgcctgctataaagatttattcagaagtccctcctactaatgggtggctttggctccactgcataagtcctgactgatcttctaaaggtaatgaccctcctattccactaagcctgctggatttagaggggcccagaggaaggtaagttaccagttcctccattcaatatatcagttccctctcctccccctgttctgagaatataaggaagtataacaatgtgaaataaacatctacttgtcttcactttgttttgcacatgataacacatctaagataattttatcctgaaagcattttttcttcctacttctgtagctaaatgttttcttatttcccaacaccaattcttcctgtcattctctgggtttgttcagaaaactttcactggtgttgacagcctataactgtcccttgaaagatgtacccaggatatctctaattaccagtgctccacttcctggccaaatgctcatggtaattggacagtacaagaacttcactaacctgggtgattctccctgcatgttccagaatcttttgattccaggaccagatttgatgaatagattgaggtcactgtcttccttattcgggtctttgctcttatatttgatgttaagcataagacataagcttgctaataaaacatggaaaagtgggtgtgtgatgtagaacactacccatctggagagggttgagagcatcagagttgggaagatttctcctttgatgtgaagccttaggtctacctctgtcaactgcagatgctggctgcacttctaaaacacattaagacttttaagatcgcaaaactgctgctgatgaatttttcaatggtgtatttcttgagta

SEQ ID NO: 45337 - DNA, 1558 bp, Bovine  19866881413596
  misc_feature (1)..(1): n is a, c, g, or t
naatgagtgtttgaataaaggaatgaatgaatgggtaacagtgtacagtattatgaatcatgaaagccaaaggaagaactgcaaaaaaaagtgtggccactggtgtaaatggtgagggtgactgcatctaggacttagaagcccatctgggtgatttttaagttaacactggaggattatttgttcaaaagttggttcactttttaaaatttctttaaaaattttacttattttatatatttatatttatttttggctgtgctgggtcttcattgctgcctgggcttctctctaatttcgatgtgcgggcttctcattccagtggcttctcctgctgtgaagctcaggctctagggcacatgggttcaatagttgcaactctccatctctagagcacaggctcagtggttgtggtgcatgggtttagttgctctgtggcatgtaggatcttcccggaccagggatagaacccatgtcttctgaatgcgcaggcagattctttatcactgagccaccagggaagcctccaaaagttgattttcaaacaaggaaataacttagtgactagagagggaattaagattcaaaaaagatattttgtttatttttacagaaattagaagacatgagcatgaacatttcttacgccaacatgaataataaataaatcaaattgcagagacagtccaaaatagtaatagttttttatgtagtactttgcagattccaaaatacttgaattcatgtgatctcatttgagacttgcaatgaacccttaagattcccagtttatctctggaaatggaaagcagaaaggccaaatatcttgtccaaagtcttgcaactaggaaaatgggcagactagaagaaatctccaggtttatacctatttccatggcagcattatgagaatacattcagagcaactacatgtttgtttttgaggactgagtgacatgggttaatttaatggggattctgttttcaagtgccagctttgtctatgtaaaaatgttcaaatgctgaaatttggtcctatctgtcatgttcatttactgtagctattaactagagccaaacaaacaagtgggtggttaatagcctttttacccttaggaaagaaagaatttcaatatcatttgcatttctaaatcaaagcacctcagcacaatatgcctttaaaaaaaaagcagacgctattgaagattattgaaaaaaacagatataatttagacacttatcagaaataaattatgttctcagaaagtgtttattttaagaagatatacagttttccttgagaaaagacatcagaaaagccagacatagataagttggatagaatggattgagagtgaaataataaaacagtctaatcttctagagctcattttcctaactgcatattttgctgaacacttgatgcaaaaaaatgagactaaaggaattccagatgatgaaattgagtcctgggaatgaagtgacttttttatatcttgtgactgattagttacttgtacaactaggaaaagagccctcatttcctcgtctatttttt

SEQ ID NO: 45338 - DNA, 1347 bp, Bovine  19866881414155
  misc_feature (1)..(1): n is a, c, g, or t
naatgatgaaaccagactgtaacctgatgctcttgacttacatcagacttggaaatagtaatgtgatagcaagtcgatatttggctgaaattctaacccagcttttatttgttttcagtggacgctggctaaaaattactgattttctttcaacaaggaaattgtgatattggtggctaaagaatctagccatatttttggaaagggcagcatcagtgtttaattgaatattgtccctaaattaaagggacatgagtgttttgtgcaaaaaaaagttattgaatcaatgaaggcatattatttattctcctcacctcatgaagccctggtagcttctatcctgatgtaagcacaagcaccctattctccagagtcatatatggaatatggattattcagaaactgaaaaatttagttgaagggatatattactttggcagttttttctttatatttatttgagctggtatttattcatctgaatctcaatatgaggttttttgtttagtgtattcttggtcttattattttactttgcttcttggtttttatttatgtatttttatgatatacatttgtccagagatcttggcagcaagtacatttttaaaagcaaaagcaaaagaaaaaaaaaaaagttgagcagtaatttccatcctccaaaagaacttattccatggtaacaccctcagaattctcattttgactgaatgcggaaataatttatacatggcgccataatatttttacgctgcaaatctgcttgtgttttctttttaaatatcatttctcatctatatgctgtagagatgacaataatgtaatgatatctttaaaatatggcctaattttctcacagaatatacttatttgaaaagcaaaaatccctgagtagttttccttatggtagcagagtcttctaaatttcctatcacatgggtgctgtgtgtgtgtgtgtgtgtgtgtgtgtgtgtgagtgagatttcaatttggaaacatttattcagaacctattgtatagagacatctagctaagggtctaggtctagtacatgcaaagatgactaataatgacaaaaatatggtcagtccatcacagaatttaccttgttgggggtctagacatccgtataaagctaactctaagggagccacaattgactctgccatatagtggaagtccagagaaaactggaaggagtcatgtattttattgagacactagtgaagaaaatcaaaaatataagtgaatagtgcttgctatgatagggcttccctggtgactcagtggtgaagaacctgcctgccaatgcagagacatgggtttaatccctagttgcgaaggtc

SEQ ID NO: 45339 - DNA, 948 bp, Bovine  19866881446189
  misc_feature (1)..(1): n is a, c, g, or t
nctcccaatgaaggggacctggcttcgattcctgatgggggatcccacatgcagcaagtaaaatctggtgcagccaaataaatcaacagaaagatgaccttaaaagcatgaattaaagggatatcagacctggaaatctgaagacatgtgagggccagcttgtttggaccaatgaaagctcagggcagtctccctccagccccttgggcatctcacttctgctgagagcgctgagttgtcactgggctccagtgctctcaggcaactcctggcacatctaataggacaaggacagtcacttacagtcttttactcaccccaagaggtgatttgtcagcctgttggctcctaattacttggcattagcatattcatatttctgtgtttggttttaattaagatgtttcttccctaaatcagaaacaacataagaatgtaaataagatgtctcacacactttgattgtctataatagtatatcttctttttttcttgtaatacatagagtaatctgttgaattaaaataaatgaggactcctagcttctggtgggtgggatattagttctagttttaaaaagcgacaccagagcagatagcagagctctgtgtatgggggttgtgtgtagggttccaatagtttgggttattcagtttcagctgcctcttaaaaagtgagtcagagaaaatttgatgtctgcttttcaggactagaccacattttcattccattatttttataataatatgtgatagtaaataattctaaagagcccaagttcattgctgcattttgctttctgtcagagaaaaagacagagagactgctatctgggcttcattgtaggatcagttaatgaattttcaattcccattgcattcatgctttattatttaaatttacagaagcttgtgctgtcgttcccaaatgatgtgtgtttttttgcag

SEQ ID NO: 45340 - DNA, 1474 bp, Bovine  19866881447066
  misc_feature (1)..(1): n is a, c, g, or t
ntgcttcctttgagaatgctatggaatggatatttggaaaagtcccattgaactgtgagagaggcttgcaaagagatttagaaaacttcttcattggctccttctgcctgacttgagtgttcaaaatggtcttgaaaactcagaactactggagtgtgtgccttgcagctcactctttgaactccagttcaacactgttcttagaagttgtgcccagctctccttaggatttgtcatgcagctttaaaaattttttaatttatttttaattggaggataattgctttacaatgttgtgttggtttcatacagcaacatgaatcagccacaagtccacatgtatcccctttctcttaaatctccctcccaacacacccccatcccacccctctaggttgtcacagagcaccaggctgaactccctctgttatacacactagcttgctgtttcacacatggtagtgtctatatttctatgctgctctctcaatttatcccacctctccttccccagctgtgtccacaagtccgttcatgacatctgcgtctccattcctgccccgaaaacaggttcatcggtaccatttttctagataccatatatatacgtcatgcagccttttaaaaattcttattgtggttaaacaatattttttaggtatatagagcagggttggtaaccgtatgtacactgttgtacagcaaatctctagaactttctcatctttcatgagtgaatctctctatccactgaaaaactcctcctccagccccaacccttggcaattatcaatctaactttctgtgtctagaagtgtgactacatcagataccttgggtaagtgaaattatctaatatttgtctttctgaatagtttatttcacttggcataatgtccttaaaactcatccatgttgtagtatatgaaaggatttccatttttttcccagaggtatgttacccttcaaaacatatatattttgtccacacaatttaagtatttctagtgtctgtagttgatgatctctttattttctgggaaggagagaaacttccctgaaaattttgaataaaggagttactctcctaggtcaatgtccaagtttggatcccatagtttgtgagataagccttaagaggtttatgactaatgagaacctattgtacagcacagaaaacgctactcagtgatccgcggtgacctaaatgggaaggaaatccagaaaagaggggctacatgtatacgtatagctggttcactttgctgtagagtagaaactaacataacttggtaaagcaactgtactccaataaaaattaaaaaaaaaacaatacttgggtcacattaatgtgttatcacttgtacctctaagaaagtaacaaaaataatgtaaaaaaaaaaagcaaatagaagatacactctcttctccctcaatttcaacatattttcaggacagagacaaattttggctt

SEQ ID NO: 45341 - DNA, 1257 bp, Bovine  19866881453266
  misc_feature (1)..(1): n is a, c, g, or t
nttttgcaaactgaaagtatttagaagctctcttgctattgtatgcctaacaaaatatggaacgtaggattctgagagactttgtggcatcttttcatttaaatctttaagaaattaacacttaatctaattcggcattccatacttctagaaaaccattcatttcactgccaaacttcagcttcccagcaccaattacacataaagcatctctatgaaggaccaattatttatgttgctcattgcattttatgttcggaaatcagtattgtctttctccagtaattaaggtgcaatacaaattaaatcaatcttgattttccagaatatttgagtcatcacttgttttcatagctttaagctccaagtctttccttttgaaaaaatatttctgcattgctttctgtgaaatagatcagaatgccttgttttccctgagctttctccccccagagggttttgtgcatgtatgtgaatacaccttatattaatgaatgtgaacccatgttctgtacacactaaacacaccaataacatataaatgcctgcttcatttgtttccatacctttgttatcaatattattcatattggtgagctatagtgaactatatgagccaggcagaaagctgacatcactatcagttaatgatgccacagcagtcatcacccacatggatgtggtcaaaatattattcaaattgtactcctgctttttatcatcatcccaccccatcatatgattttttagactaatttgacatgagaatttttttgtatcctaagggaattagtttactctagttaacccattccagtaagtattttggaatttcccctttcctgcaccaccaaattaatttctctcacattagcatagtaataggggatgcgatgatactccattgtttttcctgacctgccctcttttgctttgaagtcccccaaattctgtaatcacatcataacctctgttatgagtagagaagaacagactcactgaaatcggacgctagaaacagttgggtgatgctcataactgcaaacacttagcttattgaagtgcctctatttacacgttctttagttataatatgtatttttctaacagaaatacacgtctgtaattggtgtatattatactttgtatatgttataacaaaagctaaacagaggctaaagtcttaagcagagaagaacggattgcaaattcatgagttcgagctccgcttatggttctgtattaaaggacagacat

SEQ ID NO: 45342 - DNA, 832 bp, Bovine  19866881486013
  misc_feature (1)..(1): n is a, c, g, or t
naccttccagacccatcactcagctctaccagctcagtccctctggcactcttcagaggttgatcttactggcatgaataaattccgagagcccgagttaacatggggccatttcaatgaaacgaatggtgaaggtcatcaagtatgaaggtttgatttccatccaaggaacatgggttgtttgaagtctactattctcttttttttggttgtgccatgtagcatgttggatcttaggtgcccgatcagggatcgaacccctcaccccctacattggcagtgtggagtcttaaccactgggaccatcagggaagtcccaggtctactgctccttgcactggaaagggaggctaggattggaataactaccgttgccattgcttgtatgttaccactttctggttgcaaatcatgtgactgtgttttatttcagagcactcattatttcctgggggcaggaacctgggtttgaagaaattagcatgcttttctcctgcctccaacagtaggagtgccaaaggaaagctctttttcatcaactctgggccacaaaataacttgaagctgcgactatgccagtttatccccagaggtctcgcctgcccaatgtcaagtcttcagttctcattcaattcccatcactctgaagcaaaagtgcagtttttcattttctctggaactgcgaatgcaggaagatgctcaaataggagtctccagcaacattaaagtgggctcagcacagcagtcttttccacccacgtgacctgtcggaagcgcctctgggtctccagagagtgtgaataggattcaaagagaaggactttctgtccaa

SEQ ID NO: 45343 - DNA, 1393 bp, Bovine  19866881507851
  misc_feature (1)..(1): n is a, c, g, or t
nagtcagatctattaaatgtgtgtatgtgacacttacttgacctactacgcaagctattcctatgatcaaatgagatactatgtatccaactgttttgtaaaccgtaaaatggcataaaatgtaatctcttagtaaaatttttatcattatattcacagtaggaaataacttttataaaattagaaaactgtaaactaagcgttttatttgtattcctataaaaatagaaagttgggcatttgctctaagatgtttgtatcaattcttttcaagccctttatttatttatttttttttttaatttgtttttatttttactgggctctagggaatgggatggggaatacctgtgttaagttatgccccactagggtccattctaactttcctgggatagcttttggagctttttctttttcttggagccgctgctcttgctggcagcagcctcttcaggtccactgctgagtggctcctccttgggagacaatgtccgctttttcttggggaccctcttgttttctgactcatcagggtcagtaactggttcctctttgggaaaagatttcttcctcttgggaagacttccagtaccagctgtctcttcaagatcactactaactagctcttccttggaaaaagatttctttttcttgggtttggaaaaagacacagaagggtcttccattccattctcctgaagaacctcctggggcttttgctttttcttctttttgggtctttcacttgtctcctcacactcctccggggcactgctattttctgaagaagccagggcaatcacagccagccttttcttttccttcttcaagcgtttcttctcctgtttctcgagcttcctagtaaactcagcagccgcctcctctgcctgaaccattgcctccttcatgacatccacattctttcggggaatctctccagtctcataggacagccactcctcaacttgttctcaaagcttctccccaaaaacactggtgggcacctcagagaagcaatcaattcgtgaggcaatactgcatttcataacaaaaatcttatgtacagctttacaaagataagtttggattgtatttacattttattacaccgaactatttggctacgctttctagacttctgttaacatgttatacactccagcttttgggcactacctgcctgtctctccagccttctgtgttcttcagagacaagcggccacccccacctcagttgctgtgcttgctgtttcctcaggcaggtagagtggcaccacacccttgcacggctgcctcattttcctggtgtctgaaaggcacctccacagaggccttccttgaacccagtctgaaaaggccctccatcccagtcacacgctctcacatcatc

SEQ ID NO: 45344 - DNA, 881 bp, Bovine  19866881584236
  misc_feature (1)..(1): n is a, c, g, or t
nctgaacttatatttatttgaaaaacaaatgtcaaacccaaggctgttagaagttcaaatctagaggatgtattttttctgtaactattgtgtgttaatgatgtttcacagagccctaaaagcaggtaaatctgacctaattagaataatgactgaagaaaaagcttttattaccagtgatatattctcgtttcaaaactgattaggtatgccatataaggagaaactgaacacacacacacacagagaaatggcttattgatttatgtattttgttgttgcacttttgtaggctttatttggcatactaaagcagtcacacctttgctctaaaatttagaggatatatttatttcttattgtgtggaatgcacataactcttagaggctgccctgattctctggggtattaggtacattttttccacatttgtttttggtttaaactgaatagcttccctttttgtttatcagcttaaagtatttcagtatcacagaaagctggaattttgtatacagaaggatttgcccaagttttgctgtttgctttctctttctctttttattctttatcacttaaacccatccctttccagaaaaagaagagaaaaaaaaaaaccccgttattttctccagtgccttagtaggtttaaatttattggatacaccttcaaagttatatgtttaattgcatgatacagataaagggacactaattttgctgagaccttggtgaaaatggtggagtgaattcatactttaatgcatcccctctctgtctgcaaacagagcagtgacagaaaaaccataaaaaggggtgggggaagccatagagaggaagtgataggaaatacggaagaacagttacaaggtataaggta

SEQ ID NO: 45345 - DNA, 1618 bp, Bovine  19866881725027
  misc_feature (1)..(1): n is a, c, g, or t
naaatatttcattgcaaatgacactaattagaccatttttttagttcttgctttctcagagggcagagttcttaggcttctttttccatttaaaccttgttactttctgtgactaatccccagggtaattaagatcattttaaaagttatctaagaaaataaaaaaaaatggctagattgggcactatgcagttttaccccagaccttactaaaaaaaaaataatgtaacaatgtaactagaactttggtattcattgttattccatttttttcttgctttgccttattttttaatttatcatgtagttaaagaaattgacttattaaaaaaaaagaaattgacttattggtttacaagtctgtgaattttagatgtatagatttgagtaatcactaaaacattcaggatatagaaggagaaaagttttctgttggatatgtgacttaagaaaaaatttaccagtctgctcctggtcctttgattctctagggagtgtctttcaaggcacaaaagattttccatttttttctcttacagatcatgagtttggtgtcatattaatgtctcttcctaaccccaagtcatacagatttgttcctatgtgttgtagaagttttatcattttgtattttatttagatctatgatccacttttggagaaggcaatggcaaccgactccactactcttgcctggaaaatcccatggacggaggagcctggtaggcttcagtccatgggggttgtgaagagtcagacacgactgagtgacttcactttctttctcttttcactttcatgcattggagaaggaaacagcaacccactccagtgttcttggcctggagaatcccagggacgggggagcctggtgggctgccatctatggggtcgcacagagtcagacatgactgaagtgacttagcagcagcatgatccactttaaggtgtgaagtttatgttggggtttatttatttatggcatgtgactgttagctgttcttacaccatttgctgaatagaccaccctttctccttttaattgtttaagtatctttgtaaaaaaatacaatggccatcacggggtgagcttatttccgggctcactgttctgttctgttggttaacgtgtatatatccttctactaattccacacagttttgattgctgtagtttgtagtaggtcttaaggatggataatgtaattgctccaactgtgttcttcttttctgagatattttactaattctaggctctttgacttttcatgtgaattttattttacttaaaaaattttgttattattattttggccacactgaatggcatgtgggaccttaagttctctgatcagaagttgaacctgtgctccctgtagtgcgagcacagactcctagcactggatcaccagtgaagtctctccatgtgaactttaaaatcagcttatctgtatctaccggagaaaagaatcctgcagaggtttaattggaattgtattaaatcttttggtaattcaaaggaattgacatctttactatgtaagttttctgattggtgtatgtgatatatctctccatttatttggtcttttgtgatttctttcattaatcgttttta

SEQ ID NO: 45346 - DNA, 754 bp, Bovine  19866881794640
  misc_feature (1)..(1): n is a, c, g, or t
ntgagctcagccatcattgtgaatttattttttccaatctctctgtatttgaatgacccctggcttcgctgaattgtaaaacaaccaaacaaacaaaaaaaaaacagcatataaaacaaccccctgaagccttttttaaactggtacacagctttcttcattattaaacagctgggcctatagctatatgaaattttattaaattgaccttaatggcttagcacaaaaaaataaatgtttaagttgtaattttcaaccttatctaagaccgctcctattaaagatttgatattgtggatgtttgaagcaagtcttagagcaattgaataacctacattttatctgtatctttgaatctttattttggaatcacctttatgtttgttatactacttcttattatcatagtaaaaatttattaacacaaaataactggattttgtttgatatgccagaatttttatttctgtttgattgcaaccttatcaactaaaagcttgcagtttgatgacctatgtgtgtgaagcactgttataggcacagcataaaaatgtgcccataaaacaaacgagcctattgtcaagggttttataggctaaaaaaacatatagtgatactttcttcacttgtttcttgtttttttaatgaaagactttcacacctctgaggcccttgagcatacagaggtagagaaatctccatttttgtaacacaccccagctgagtaggcatttttcagaccccttccccaaaa

SEQ ID NO: 45347 - DNA, 765 bp, Bovine  19866881880003
  misc_feature (1)..(1): n is a, c, g, or t
nctatggtttattttttgttcacttgatctgtttcaggatgacattgctaaactctttttcctatccctactccttttttattcctcttgtccctaacagaagtggcccgttttctgtgcctatgcttaaagagacattctcaaaagctgttttaaattcattctggtatgtctttgtaaactggaattatagtcaaatcaatattttttctattgaaaagggtggatgattgtgttatgatgcctcaacccagatgcaaataaccttcatagagacatagcttgtgtctgaatgatgcttttgaggatgaggggaggccattgaaagtgctaaggctatctttcaaggaggatgccgatttcatttaataaatatactgaatttaagtgaaaatggcaaggtacctggaaaaacctgagcaaaggcacagaattataacagggcatatgtgtttaagaatagcaagtaatccaattctcttgaggagaggattttataggtgttaacgaggtgccttaactaacaagatgtcattaatatctaggagtaaaagagtgcatttcactagaaagccagtggttagaatgttaaacttaagatccaaggtgacaaatctggcagcatcaaaagactagaaaccagggaatcatttttgattatccagacataagggataagggcctagattagagtagagggaaagaaatatatcatagggaatgtcataaaggagtagaaagaaggataagtctttcaaacatttt

SEQ ID NO: 45348 - DNA, 876 bp, Bovine  19866881900386
  misc_feature (1)..(1): n is a, c, g, or t
nttgtttttaaagaaaacatgtatcttgaaaacaggctaagaaattttcgtaagaaagaaaacatattttgaggctactaaaagaccattcacatgaatgggactaactttaaagaaaaaccaaggggaagtattctagaaaccaaagggtgatatatccatgcatgttcagagtactgcttgctatgcttttaaaaaatgtggctgtctggtaaatgctaaattaataatagtcaataaatttgcaaaagttattttactccaaagtctatgtagctctgaattctgtacttgggacacatttgcctaccccaagaacctcttagaacagtcatttagaatatagcaagatggaagatataccagaagatgcatctcatgtcattattctccattcttcctgattattgagaagtttagatctaagtttgaagtcacgatttaacaaccccactgatctctctactgttagctgtttaacttcatctgtttaatttctgtttatttcatatttcttctctacatattcccagatgccttcaggaaatgggcccattttgaatacatcacataaataagctgcagtgggtgaaggcctcctcatttcaaaaatgccatgcagcacaacagctgaaaggaaggttcattgagtaatattagcttgcgtttctatgggagtactgtaagtgctttttccctatagcacttaacataacaaaattgcctcagtcatcagggcaaagcagtcacctttagagtggtacaccaagctgttttcaggatggagtaacacttcagatgggacgagaaatgaagaagaattctgtgtaggggggaatttaagcaggcaggatgaaattacttagttggaaatgg

SEQ ID NO: 45349 - DNA, 1007 bp, Bovine  19866880398629
  misc_feature (1)..(1): n is a, c, g, or t
nacagggccccatgatcacaccgtgaatgatttctggcagatggtttggcaggaggacagtcccgtgattgttatgatcacaaaactcaaggagaaaaatgaggtatgaccttttcccaagtgcagaacattgtatttttttctgttactctagaacagagattgtttaaggacaattaccatatacttcctaacaaatttaagatgttaagacacttaaaggctaggtcagtttatgctcccccaaaatggtaattggtgtcctatgaatgatagctttctttcagtgaaatcaatgtgcttggcatacaccattcacatttgtatccatgtatctatgtaaggaaatgaggggccctgaatcatcactctgatttataacagggaaataaaaaattgttcatttacatcatgagcaatttttgagcacctactaagtgacagatactattctatttgcttatttatttatggctgtgctgggtcttcattgctgtgcaggcttttctctggttgtggagagcaggggctactctatagttgcggtttgcgggcttctcagcatggacagaggagcctggtgggctacaatctgtgggatcgcagagtcagacaggactgagcgactaacgcacacacacacacacatgcacacactgtgggggtgtctcttgtggtggagcaggggctctagggtgctcgggcttcagtagttgcaacttgagggctcaagagcgcagactcaacagttgtggtagacgggcttggttgcttcacagcatgtgggatctccctggaccagggactgaatccacatctcctacatcggcaggtgagttctttaccacttagccaccaggaaagccccagatactattttagttgctggcagtttattagtaaacaaacacaaagattcctgcccttggtagattttaactttctagtgagggggagacagacaaaaagcaagaagcagaatttcataagagtatagcatattagga

SEQ ID NO: 45350 - DNA, 1321 bp, Bovine  19866880443818
  misc_feature (1)..(1): n is a, c, g, or t
natagtaagcagctggatgaacaataactatcactttttctgttaagaaggtctacgaaaatcagctgccatggatagagttaagtccaggttctctgataaactccatgctcagtaattcattacagttatcttacctagagatgttaattacacagcattgtacccctcttcctctttttgctcccatagacgttgcaaacagattgcaatacttgtccctgttaagtcatcagaactcagggttggtcagaatttttttttttttttcttgcatagtgactcaggcgatcatgacccaacagttggagagggcactcaaggtgaaaacagtttgctactttaccattaggagaatgactatggaagttaacggtttctagtatagctacgaagagcactcacatcctggcagccaatttctcccatcctgaaagaggtctaacctatcatcagttctgccagcataaagtagtggctggtacccggggcacaaccaaacagatcaattagcttttcagccaaagaggcttgactacatagaattcattctccttctttataaagcccactttcctcctgagaagagagccttctgtaagagaagccaaatgagacattcaacaagtagagactatcactgacttcttgatctttgtccttccacttactcacttttttattacccaaatctacaggagctgagatctagaaagctgattcatctaagttctaatgaaaagtcctaacaatgttatttagataactgtgatgaattttaatctgatgacagcttgtgacccacaaattgctgtttaaattaagatgcattcaaaatgaaactggcaagacaaccacaatattaaacttgcaatctgctgtgaaaaaaacacctatcaaaagcactacattaaaaatatgaatgtaattaatttctatatggcatcttgcaacttaaatctggagacagccttcaatgccttgtgactaaattcaattgattaatcatcttccttttttttttttttcttcaaattaagaagtcaaagtagagttggattggtttgtcttggtaatacaccctttggcagagctccaggtataatctagggctacagacttttaggtttctcttttgatgaacagaagtcctctatttcctcatcccaaatgttcacctacaacaaatttataaatgttttccacctgcttagttttaagggtatttatagcttttaagttataattactcaagatacattaaatgttatctttagaaatggtatatattagtttttaaaataacaacattaatattttt

SEQ ID NO: 45351 - DNA, 1272 bp, Bovine  19866880509042
  misc_feature (1)..(1): n is a, c, g, or t
ntaatactggtaactgtagctatgtattttcgtccaggcaccaggttagtaaaagtgaattctctggcatctctgggaagcaacttatggatgaataagaggtctctgtcgatgagtgagacgatgtatctctcccattctgctgcaggggtctgccacatgacgctcagcgaggtttcattggcatgtttgacacgaaggtgaaggacagccagggggactgaggaaaaagcagtagacatttgggtcatttggatgctggaggagactcttgagagtcccttaaactgcaaggagatcaaaccagtcaatcctaaaggaaatcaatcctgaatattcattggagggactggtgctgaagctccaatagtttggccatctgatatgaagaaccgactcattagaaaagaccctgatgctgggaaagattgagggcaggaggaaaaggggacgacagaggatgagacgattggacggcatcactgactcaatggacatgagtctgagcaagctctgggagatggtgaaggacagtgcgtggtgtgctgcagtccgtggggtagaaaagagtcagacatgcctcagcaactgaacaacagcaatgtctgggtcattgatttactcggatacatttgagtattctttagagacctgctcccttccatccacagaagtgttctagtcgaacatttcttttctgaatacttataagcatttagcaaaaaaaagaaaaaaaaaaaagaaagctaatcacaaaaaacattgtttgtgtaacataaccagaaataaggattcaaaagagtactcttggaaattactgggtcatttatttttgatcatcatccaggagatattaacagttggaaaatgaagagatgacttggaagacacagttggcaagctaaagacatgtcttggtccttttctttgacattcttctaagaacactgcatcagtgtagttatttccttattatcaggcaagactaggagagaatatatttgaatttcactctatgtgtggcatattccatgtcacagggatttgcatagaaatgttgagctttagaggtcaactttcttatttgagaattgaggaaatggactcagagaggttgtgacttgcccatggaattacagtgtaatggtgacagcaagaacactgaaatccatgtctcagaaactctcctcttccctaaaatctgaatatatccctcattgctttaacaactcttctggggtacctgaaactcccccattagtcagcagtggg

SEQ ID NO: 45352 - DNA, 1345 bp, Bovine  19866880534901
  misc_feature (1)..(1): n is a, c, g, or t
naaatttggccttaactccaaatattattgccactattacattaaaaacttaatatttagggaatgggatttttcaaagtcatctttgtatgtcattgaaaaattagaaaaatattcttttaactcatcaaatttttaagaagtccatgcttatttagtgtatagaacttcacaaagatttaaaagaataattttccccaacaatcttttgaagtatagagttcttcgactggggggaaaagaaactcccctttagaagcaggatgtggaaattagcatgacccaaactgtttacacaaaagcagtctacacctccctgattagggcaggcaattttgcctttacctgtgacagctgccttttattagtactggaaacaaattgtacaatctatgatcactgaactatgactacctttttattctcaattttctgttcaagaggaccagggtatacagaaacagagtcagtggagagaagtgttgttagatacagtttttcagaggaagagaagtacagtgcccacctttaaaagcaactgagctatcagaatggctacatgttggaaaatgaccgcagtagtgacagagagtaactcttgagaacttttccccttttacttcacaaaggaataaaaattaaaaagctgaacagtcttaggatggacagggcagcttctccctccccacttcccttagctgcaatgcatttaaggcagcttcatgggattgttttgatttaaatttcaaagctttggaaggcaggtctaggtaatggttgttctcactcttctggggttaaggataaatgattgctgtagctaagcctgaagactttgcagatttctaaatgcattttgttgcattaagaacaaattttgtactcttgagaaaaggcagtgcaaaaatgaggtgacacacaatgtccctttatcttagggcaaaacaatcttatttccctgtagtagaagtagaagcagggcaagtcagtttgtgttacctgaatccaacaatgttgtattacggctatgcccttctctccctgctccagcccctctcccttaacctagtagttactttaggggaggcagttttggaggaaggatcataaatattctgacccaataccccaggagccatggcaagcaaaagaacacacctgcctagagatagtccttgtgatatttaaatgtgtaggttaatttttttatccactttaataaccagattatcactctcccccctccacttctttgctttctatttttgctctgaaggtgtgaatgcagaaatctctgcaggcaaattactccagagccatcacagaacaatcctagaaggaacag

SEQ ID NO: 45353 - DNA, 1010 bp, Bovine  19866880552616
  misc_feature (1)..(1): n is a, c, g, or t
ngtgataaggaaatgaagagtcatgagatgtggcatatatccccccaccttctcagaagttaaaatcttgagagaaagacataaggaagagcaacactaggtaggatagcattaaggtgtggacaaaagtcctggatcagaaaccatctgcagtgtccatccacaaacctggagccttaactgaagactgtgtaagcaactgaggttagacatttctccaaatgagaaataggacaattcactaaaaattaactcccaaaaaatcaatttgttggaattgatgaattatggaagactttactttatagttttgctaaagatggcatcaccaactcgatgaacagttggtgatggacagggaggcctggcgtactgcgattcatggggttgcaaagagtcggacatgactgagagattgaactgaactgaactgaactgaccagcattttcacctttttctaagaattttttgtccagttcagctggatgctaatttcatgcatattttacatgccagatgcctaatatttttcaaatgattaatgctttatctgtgaatgtgtagtcttttcttcaaaatatccagtttattgctggactatttaaggttcatctgttattgggccataggggttaattttctttcagatccctccattcctcttgagatctaagttaagaaagtggaaacccaaatgaaaaagggaaacttatttgaagttgtgaagcagacatcactgaattgtttcagcagtgttttattgtcagaaaaagattcaaaagataaattggtatgggctgcttggggattatgttatgggaattttgattatcaaataactaagaattactccaagaggcatatttgtagtcattccttgctaaggatgaaagaagatgatgtaagcttcaagagtaaagtaacgtgatatattttggaagaaatagctggaaaaaaaataacaagaacttctcactcaatgttccagaaatacggttaaacaggccaa

SEQ ID NO: 45354 - DNA, 2146 bp, Bovine  19866880578834
  misc_feature (1)..(1): n is a, c, g, or t
nacttgaacagacttgaattatccattggtatccatacaagtgagtggtaaagacagcaaatgtttccctagaaaatgcatggagtttgcaaaacaaacaaacaagagttatgcttttttacatcacagaaataaacaattcctgctgccaggagaaagacaagtggagattagtgccagaacctaggtttaattttctctcagttaaaaaaaaatgaattttaatgctcatgaaaaacatgtgtcatgcactgtaaaggctgagccaattcataatttcatgtctctggtatcagacacatggtggggatgtaactgaggatgaagcaagagatgccaggattctgcatgcaattagaagccaagtgtggtgcctcttttcttccagttcacgattatataactagctcctccctcctttcagagcccatctgaatgacacagaggaaggaaatttaatgacttcctccatcaataccgaggcaggattgccaataaatagtctctgaaaaaaaaagcattctaaaaatgctcttttggcctttagaaaactgccaccatgaaaaaggcaccgatttcatgtgactgtaactgactgaaatgttctctcatctcttaattcattggctgattagagcataataccaataaaattaaggtcatggggcttgatccttctttagaccaattttgtggggtgtgtgttttttttttatccttgggtttaaaggatttcccctaaagcccaattcaaaaaaataataaagtaaaaacgttttgagctcacttcctttttaccctaattttccctccccctgcctataccactggcaaaaccacacacacacacacataaggagttggtgttgttttgtttttgaaataacatggctgatgctatagaattacccagtgtttaagactatttgttaagctagaaaaagaatgggacagcagaggtgatgctgtaattgcatatgacaaaagaaaaggatgggtgaggtactgaaacacattctaaaaccgacccaccgacagggcagatcagggatgcaaaccactgtctggaaacctggaccttactaaagcctgcagcctcataaggtttcccaggtggcgctgctgctgctaagttgcttcagtcacgtccaactctgtgcggccctatggacggcagaccaccaggcacccctgttcacaggattctctaggcaagaatactggagtaggcaggtggcaccagtggtaaagaatctgccttagatgcaggagatgagggctcgatcccaggtcaggaagatcccctggaggaggaaatggcaactcaatcccgtattcttatctggataattccacgagcctgtcgggctcaaagaggtccatggggggacctcatgtcccaaagagttgggacatggcttagcaactgagcagagcgcagctcacggaccacagtatctcaaagaaaatagaaaaagggatttgcaggaaaactgtcctgacctagttctgacccagtggcagagtaatcagctcctcccttcatactcccacagcatcccgtatttattttctgttagtagttttgttttttttttccacaacttacacttaccatacttccctccgagctctgtttggcttgaagcttcatctccctccctctagttcccactggcaacggtgaaggccaggatctccaggagaggatcagagaggcctgaccccacctaagggaggtggcggctgcctatccggcgccagggccttgcccagctcagataacaccactcagaggtctcagaggccagcaggccaggccagcagcccctgagagagggccagtgaaggcagggctagccagaaaagggctggccctgctgtcctgtcaggagttggatgtagtattcagcctgtgggccccagttccactgtctaggtggccatgtggatgaggggcagggctctgtggagagacaagcagtggaggcaacacagcagtgcactcctctacaggcgagaagctaacgccacctccctccacaagtgtcctcggtaacccttagcacccctggagcttccaataccagacagaactgccctttgcaagcaacttcctcggttccatgtccttcccctgcatcct

SEQ ID NO: 45355 - DNA, 1735 bp, Bovine  19866880619531
  misc_feature (1)..(1): n is a, c, g, or t
naaacaggatacagactattttgtctattttgtacttcacacaaggcactgaaaaatagttttggatgacttgcttctctctcttattctggtttattatttaccataactcttctctgaagtccatatcccatcttttctcttgttttcatcttcatctgtttctcctttgctatagattccatgcagactctcagctttgtcatatctaactgattgtattttctgcattctcagttctgttctttattgcttaaaagaagatttacaccctgctgctgagttttcagttctttgaattcttttcttcttaatttcagtctaataccttctcatcttagattgttgtgtttttgtttcatcctgattcttttttttataactgaagtagaggagttatcatcaagaaaggagaaaaaactatgaagccattatactgtacatcttaaactttaaacgtatacaatgttatatgtcaattatatctcagtaaaactgaaaaaagactatattaaaatatataaaatataaaattaatatttttaaaagaaaagaaaaaaaagggggaaaggggcttataaaaaggaaagcctgaggacaggaaggacaaaccttgatctcttcacaatttggtccactggcgtgtcccagcaaagtcagtcctattcttttaaaagttttaaaactttctgaattgagttagccattccagaaaggactctgagaatgaagaaacatgacactttggctttttttcaacacacattaaaaattttaaggagcaagaagtaaataagaaaattctgattgtccaaattattctttaacatgggccctaaattttaattttttcaagtatttactagatactcaaattaatgtgactaatgcatttcttacattaagaacttgtggcttattgcattgctatgctttaattaatactttatgagactttcttcttacacattgtagtggttgcagatctctatttctatagaagtcataagtctctatatcatggctattctttctataagttttccatgtcagtcgttttaaattagagtttacatgtgatcaaactgacatctgatacttttataaaattagccatatttgtttttgagttctatttgaaaagcagactcatgtacatatatgtttaatatgtttgtactccttgtgagggcatgtttgctcagttacttcagtcgtgtctaacactttgcaaccttgtggactgtagtccaccaggttccactgtccataggattctccagggaagaatactggcacgggctgccatttcttcctccaggggatctttctgacccagggattgaactcaagtcttctgcattgcaggtgcatttttaaacacttgagccaccagagaagccctttgcactccataactggaaacaaactgtatctttttgaagaaaatcctcaatagtataaaactgagaaattttcctaggaagctttgctcacttactttggtttgtcttctaagttgggatggagatcatattctgttgttgaacatgaaaaactgacggaaattttttgtatctccttccatagattctttacagattaaaagaaaaatttcagctttctctgagacaagataaagagaaaaatcaggagatccacctatcacccattgtgttacagcctgcacattctgaggacaagacagccaacagcatggtccagcctgaacagg

SEQ ID NO: 45356 - DNA, 1626 bp, Bovine  19866880625554
  misc_feature (1)..(1): n is a, c, g, or t
ntgtgggttatcttgtttactttatggtgtcctttgaagctcaggagtttttaattttaattaggtctcatttatctgttttgttgtggttgcttgtgcttttggtgtcatagctaagaaaccatttcctaactcaaggtcacaaaaacttcctcctatgttttcttttaaaagctggatcattttagctcttacatttagttctatgcagtaattcatttttgaagtgcactttaagcacttgaatttgtttattcaatgttgattttcaagatttaacaaaccaacataatcatctttcttttaaagtggttaatattcctttttttggatatatgtttactacgtttctttactggactatgttcaatttttgctgtataacaataatttaaatagggaagaataatgtttacaaatcccatacttaacattaacttgtaagcaaacacatctaaatcttcttaactgtgttctgattcctttttggtctgaaaagtgggagattatcctatatttggcataaatagatgggagtgtttgtgaagctgagtcatcttttgtcatgcagcatgagagactgttttagctctaaagaagaacttcctgagaccaagcactgtgaaaggctgggtacagggaaaggctggacagataatggtaccaaagaacaatgtgctaaaaaataaatctattctcagcatgttggaactattccaaatcagtgcagtgcagaagttaagaggtcaggcagaaagtgctagaacccagctctgctatcttgggcaagttacataaactcttggtatctcaaaccctcacctttaaaatgggggatggtaatagtatctaccacaaaaggccttagtgaggattagataaattattctaagcacaatgcttaaaactgcagctccgcagagaggacaaagagtcaatattagctactattattattcaggggcttccctggtggctacctagtaaagaatccacctgctaatgcaggagatacaggttcgattcctggttcgggaagatcccctggagaaggaaatgacaacccagtccagtattcttgtctgggatattccatggacagatgagcctggtgggctactgtccatgagatcacaaaagagttggatacagcttagcaactaaaaaacaacgttattcagactttccttccaacacagtttagaaaagtttctttcagaaatttatgtaaagccaagttaacatttttttttatcatgtaaaagcaacatataataaacaaaaggaaaaaagttccttctagtcttttttttttcctatgcatttctatgtatatatttcatatacacattcccatttacaacttgaaagctttttatacccacttctgttttggcctgtgtcaactcttgatctgaatgttcttcatccactatttttttaaaaaatccatttttaatagataaaaaaatctggtacctctttctaccttcttgacaagataactcctttcagtccactctgctacagaagttgtacaatttctctaatctacatcaaatcatgatcctataaagattacattccaaggaaaaataaatgatcctcccaccatcagccaagtcc

SEQ ID NO: 45357 - DNA, 1585 bp, Bovine  19866880638816
  misc_feature (1)..(1): n is a, c, g, or t
ntgagattctatgcatggctctcctgggaaggatttcaactttctcagcttcctcagcctctgggacccctcaagggggagcagcctagtatccttttcgtacccctggattagtccatgttccagtggcccacctcccagaagggtgcatctctttacccctttgctggaagtcctggaaactggaatgaggtgactctctcctcttctaaggtgcaccaatcctcacctgttattgcctctctgctgccaaaaattctgtcaagtcttctgccattgcagaaaatatgctggctgtaaaaagtaacaggattacttcctcccaggagctccccttccatgctctattctggttcaagggctccagcagtgtaagatggtagtgaaaaatgagattcttctcctgcatttcattgcccttatagagctccatagacacatcttggcatatctccatggtgggcagaattctcaaggaacccccacgacttctgcctcttgtgtacatgtgttgtgggatgttctcctttgggtaggttttgttgttgttcagtctctcagtcatgcttgactctttgtgaccccatagaccaggtggtgctagtgacaaagaatctgcctgtctattcaggaggcaggattcccacggttcaatccctgggtctggaagatcctctggaggagggcatggcaacccactccagtgttcttgtctggagaatcccatggacagagaagcctggcaggctacaatccatagagttgcaaagggtctgacatgactgaaatggacttggcacacacgcccacacagacttcagcatgccaggcttccaggttcttcaccactgagtgggtggaatctgtgaacaaagggatattactccttcaatgtgttgttaatgggttgagttcatcaaaagagaaatatctggatggacctgatctagttaaattagcacttaaaagaaactgggcagagagattgtaagtgcaagagggccattggcagggaccacagggtaaggacctgagagtggcctctagaagctgaaatagttctaggatgaagacaagtgggaacctcaatcctataagcactcagaaatgaattgtgcaaactctcagaggtagcttgaaagcaaatctttccctagttgaaccttcatgaggatacagtctggctgacactttgattttaatcttgtgagactttgagcacagtactcagctaacctgtacccagggaaacaaccagataataaatgtacattgttttaagtttgtggccattaagtcatttgttgtgcagaaatagaaaactagtataccccccttccctctctgttcctcttacatcatctaaaaatgggtgtcagtgttgacatgatatctaggaggtagcagtcaacaacctcacaacaagcctagaaatatctggcttaattttttgatgactctcttcagaatggaaaaatgtgggatgactgatacctcttaagtaggagccttgtaatccaagagcatcaacatactcagttcagttcacttcagtcgctcagttgtgtccaactctttgcgaccc

SEQ ID NO: 45358 - DNA, 816 bp, Bovine  19866880640426
  misc_feature (1)..(1): n is a, c, g, or t
ncccctttcaggatgccttgcaaaaaataatgatcacttcttggcaattcgtcagaagaagagtgggaagccagcattcatttatcaccactcacaagacattgagaagagcctggatatagctccacaaaagatacacaaaccataactaccattcctcttctgaagctcaaataggcagacaccacccaaattgttaattcagcatttcctaaacccgcatatgacccatctctcaatctgttggccatggctggtcaagaccttgaagtggaaaaccgcccagtcccagcagcaaatgtgattgtggtggtaagtactgcatttaactgatgctgatgctttcctctgtggttgatgctttcaaacaaatgaaacctaatggtgacaagttatcactggatctcaatgactatttaccatagcatttcttattctctggtgtttcctttttgttaattgattattatctgttggcttcctcttgaatgtaggcccataaaataagaaactctgtctgtatcttctctgcacagcccaatgcaaggtgcacagtaggtgcttaataatttgaacaaaaaattgtatcaggaagtctttacttatgttgattcatatcctgcagttttggatcatatcctgcgcttagcctcctgccttctgtggtaatttgctctaagtagattggcttgagtctcagtttatatatataaattgtttgttgttgcttagttgttaagtcatgtccgactcttttgcgaccccatggactgtagcccaccatgctcctctgtccataggattttccaggcaata

SEQ ID NO: 45359 - DNA, 2158 bp, Bovine  19866880648889
  misc_feature (1)..(1): n is a, c, g, or t
ntatatactataatattttattctgatattcactactgacagtactatttgttgtgcacttatttctaatacagggaataactattattcagcatcacaatgattaatttccagactgtactagtagctggggaactcctggaaggcatccgcatctttcctatttttgtacgattatggtggacaccagagaagtcattatctccatgacaggtctttgggcccgcaagtctggtctccagactagttgcttacggaatagatgtttaagtttatttctcaccactagagggcagaaaatgctttgcaaagagaaatacacccctttcacttgcgttcatgattagacaccccagaaataaataacttaatcacaagaagatcaaagctatccaatgtctgagacttttagaaaagccattgtatcttgagtacctttcccctcaaacttcttttctttatcaatgggtttggattcaagctcatacatttaagatgttaatgtttgttccctgtcctacaaaggaaacctcctgacacactcacatataaatgcctccacttaaaatactctgcaaacagtcacaccatgaaaattcaatagcagtatccttatattaatgaggcatccaaaatacttcttgcgttttcattttggttagccttctgaggtaagaactctgagcttcccaaagctaacgtgaaatccttacacttccttgacacttcctaggtaatcagatcttctgagtccatgccgtttgtgctgactgcagtaaatgattcacaatttgactgtacttttctttttaaatattcttcccctctttaaaatcccagtcccttccagtgtgagtggagtaacggtaaacaactctggccgcagtgactacctcagcatatcctggctgccagctcctggagacgtggatagctacgtggtgacactctcccatgacggcagggtggttcagtcccttgtgatcgccaagtctgtcggtgaatgttccttcagctccctcaccccaggccgcctctacaacgtgaccataactacgaggagtggcaaatatgaaagtcattccttcagccaagagcggacaggtgaggctttcatgagatacagactctcttagaaccagccgcctacgtggttcagggcatcaggcatgcatgtgtgtgtgctacgtcgtttcagtcatgtccaactctttgtgagtccattgactgtagcccaccaggctcctctgtccatgggattctccagacaagaatactggagtgggttgccatgccctcttccagggaatcttcccaacccagggattgaacccacatctcttacgtctcctgcattggcagatgggttctttaccactagcaccacctgggaggccccgtgtgattgtcatatataccatacagtaaggttcaacatagtgaataccatgcgtgcagcagatacagcatgcatgcacacacagcacagcagctcagcgtgaggaggagggctcctccaagacgaccttttcttctgcaactgggttattctgagtgccctgcttccctccggagcttccttccaaggtctctgcacgtctctgagtgaagaggggacgggagccccagctgggatcaactggccctccagttgccctcccttttctctctgctcagcttcccccatctccccgggactcccaggcccctggctgcctgggtgtccaggctgtgcatggtttcagggaagagcccagaccagggccagcagccctgaaccttgcctttgctgtgaccttgaaggtgaccttgggcagctgtgctcccagcgcttcgcagagcctggcctgtgaaagggtcgggagaaggtgtcagtgcccacttggggactggccttcgccgcccacccgggctcttcctcctcccggatgctgtcctcttccccgcaggactacaggtgaagaccctgctcagcaagcgctgtgcccccaggtgccccaacaccaacatagagttcaaatggccgtcgaactcgggggtgcccagcaagatcgtccggcactgctgctccaaatctctctgcaacagggcccccgccccgcaggagggccccagggccctctcacggggggctcctgcttcgggtagcctcggcctc

SEQ ID NO: 45360 - DNA, 3252 bp, Bovine  19866880656766
  misc_feature (1)..(1): n is a, c, g, or t
naagtttcttataaaaaatttgtatccagaccacaaggacctactgtatagcacagggaactctgctcagtgttgtgtggcagcctggatgggaggagaatttgggggagaatggatacatgtatatgtatggctaagtccctttggtgtccacctgaaactcacaatgttgttaaatatcaaataaaaagttaaaaaaattattaagctaaaagccttttccccagttttagaaaatattctatgggaaatacatattttctttatatgaagtgatatagaaaataaagatgtgtgtttcccccaaaatattgtgtctataataaaaagaatggaattacaaatacatccacttggaaaattttcataaaaggtattgagtggggcagctatttccttggttttgcttggtgtagttcccacactggggaaaaagatgaccccttgcatttatggtaactagaaaaggaaaggcgagcttacagtgggtttagtcactaaatctagacacgttatcatactgcattctggggaccctgcctttgtgtgcagacttcatgaaaagactagtcagtatcttccattgtaatcggatgtgggggaccaataaacgacagttggtgacaggagatatcctctgtctaattcccaaccgggacctcagctttgttgttttctaccagtaaaccaagaaccttattatgaaagccgggctgtcctcataagaattagggctctcattaaaaattatgtatgaattcattagctaatctgtacagaaagtgctatcctcaggtgaaaagactcacaaaatatttagttcacttaagtttatttcaaaaaaatatgtatcacgttcccattgtattctaagcattgtacaaagttctgggtgtacaaggattaaaaataagaatttatgttgaatgtttaaagataatagagtgattttggtggttggtacaaaattatggattatttctgatttatctgtggtctgtgatgatgaataacaatgtcagaaaacagtacatctgggtgtttccatccatcttaatcataaaattggattaacttcctgtctgattcaatgttgcagaaaacaatcatcaagacgccccaaatatatcgtttgattcaagaaatcaacctttatttgccacaaaatatagggctgtcagatttttttaaagtatgtttctagcgtgaaacatgaggagattataatgccgaacgatggtttggcaatcatttcaaagaaggatttagggtttagcagcaagattttagattaaagagaaataaaagtttttagtgattttcttttaatgtcttttaatacgaggaggataacatgtttaaatctgccatttaatagaaattaaagctttaaaggagacatggcttcttaattctgcacaccaaaatattgttccctacagcttccacagtcttaaatttatattttaaattgctagcgtgaattatccagttgataattgatgctagattgtgttgtatgaaatatagaaatcagccgtttctatatttagctgtaacaaggaggaattagatatatatagtttcctttgtttttctgaacaatccatgtacttctatctagcaatttaataattagttcagagatatagcaatcctaataaatatcatgaccccaattatgcttaaaggaaaaaaaaaggagtatcactaagaagattgagaagtaataacaggatgaaattggcacagtcatgctgtgcattaaagttatgctgcagacaacatcactcagaacctttattttccagaaatgagatgattctcagcattctaatcaccaaaataacacattgtgggaaattatatgcttattattttgccatctccttccacagatgataaaaaaaccacaagaacactgagtaaaacttattccaccttctctctttattcatttttagttatgcagaaaattattacttcccactgtgtcagaaaaatcaagattcccgagaataaaagttttgaaagaacactaaatcatagattttttatttgcatcccagaacacatgccaataaacctcgctttattttaccatacttcttgggaaattgggtggttcaccagaatagtgaaaaacagaatcctgttacagtcattgaagtgaaacataaactacttcatggagggaatggaaataaaagtaaatttataacatccttccagggatgttagaccacaaaccaccctgttgatcagactgatatttcagagcctgtgtggtcctccctgccactcacagctcaagatttcacgtgtgaaaaaagtcaaaagtccccaaagaatatattcctgttgattgcacgtaagcccataaaaataaaaggggacagtctccctatttaacccacagatggataaagcacccggggtctataacgattgatagtttcttcattttttaagataatatttatatgcttgatggcttgggaagcatcactttctgactgggaagcaaagtgcttgaggagttaaaggattattactttgcctggaatgtctatttccaagcatccctaaatgccacttagaaatcagcctgatcacaattcttactgcattcagtggtcagatgtctcctccgtcttttcagaaaagctgcgtgaatggagcggtcatggctgtgatgattagagttcatcctgacggggttgaatgtagaaacctgaattagtctgacctcatttttcaggcaacattcgtctgagcattgggcttttgtctgtagagtttctgcctggccttgattctagccattttccattcaagcttttggttactgtgcctgcctgtagcataagagatgctgaaggacagggagaagaagtaacaacagaggggagattgaaagacaacacaggaataagaataatggagaagaaataataatcagtacaaggtagaaaacattatcagggggagttgaatatggaaatttctgttgactggagcatataataatgagacttgaaaattctgttaaaagcaagtaacttgctattatatttgtttactgtactcagagtaatatctatttgtggataaatcgtgatttttctcctgtctccaaagaactttgtgttaaaactgtattttcttctatcttacccatagatggtgtctgtgactttacgagacagcaaaagagacactgatgtatagaacagtcttatggactctgtt

SEQ ID NO: 45361 - DNA, 699 bp, Bovine  19866880743017
  misc_feature (1)..(1): n is a, c, g, or t
ncttcctcaattcaaagttggagaccagaacctttaccttcatgatgcttacaaacacagaaatatgattgagcattatccctgtgttaataatagccaattttaaactaaaaggtcaactggaccctagaaagaaagtcagatttagttgggaatttcagaagtatccattttcactcaaaatagcctataatcaaatctgcagtataatgatacactgagttgactgcctaccagatccttttgcttatatttttttctcacatttgtaaccagaatacattggttgttcaacactaatgtaatggttgtgatggtcaatcaaccatgttcaagaaaaatacatagaaagaaagtcccaatttaagtttggcaagatttcctaccatttgcttcactaatattttgtggtaggaacaaagctcaagaaattctctgtggaacactcagctcattaaaatatacactaattatgccactaacagtggcatatacagccattacagccattattatggccatatacagccattaacatattgccctatcagtgttggaaaggcagattgattggaaatgtctaaaaaataggggtaacaccaaggatgaagtaaagtctagaggcaggtgggtccagatctgagttcggttcaaccatctactagcagtggacctcacaaagtatgtccacttcccaag

SEQ ID NO: 45362 - DNA, 1339 bp, Bovine  19866880747435
  misc_feature (1)..(1): n is a, c, g, or t
nctgattttgaaatataactggggctgggtaaggcattttccctgttcttcagtaattttcttctctttctgttgtgtttttaaccatagcccaataaaagtaaatcagtttgaagggcacttcatgaagctgcaggctgactccaactatcttctatccaaggaatatgaggtacaactcagatgcaatgatgttttagcgtccctggttcttagcagaatttcccttcagccctcactatggaatcacatcccagttgggctcaggagttagaatggcacttagggtctcactgagtgttctttcatgcccgaatccattccctgcacaatataccacctagtctcagaagccagtttgatctccagaataaccaacaaagtgctacccagatcgggtggtaagaaagaattaacagacttcaaatgcaaactgatgctgtcagttagttaacctggccttttgcttgcttgggagataatgtggttgggtaaaaagtgcccaggctttggattcagttcccagctttgcaacctgtgtgacccgaggcaaatgaattatcctgtctgagcctcctctgtaaaatggagatgagactacctcctccagggctgttgtggggatgacagccgatgcccctggtcgaataggagacattccacaaatgcagctagtgtaacatattgttatgttattatgtatctcaaggactgtccagtttgccatattctgtttcacattattcacatgcaaacttatttttgacctaacaggatttaaaagacgtgggtcgaaaccaatcatgtgacattgcactcttgccagagaacagagggaaaaatcgctacaacaatatattgccctgtaagttgtgtgttgaaatctgtaataccgccttcctctcgccatttctttccttttctgtgattaaaaatggggctaaagcaacttggtatagctagatatggaagacctgaagttctaaatgtctttaaaaacaaatgacttggacgttactgtacttctttccagagggtaaccagctgaaattctggctgggagagagagacctctcatgctgttgacatttcatcacgtggtcctgatgcttcttcttggagggttaagagctgtaacagggttaacagtaagggtcaacctgggtttacttaaagtctctagttagcaattatttcatatataaagatatatattacatatattattcttattatccttacccaattgggtgaagcaattgaaggtagcttttctgaactgcattcgttacaacaatgaaaaggagctggccactccatcagacaaatgttgttagtg

SEQ ID NO: 45363 - DNA, 1008 bp, Bovine  19866880798532
  misc_feature (1)..(1): n is a, c, g, or t
nggctctgatttaggagagctacaaactctgcatcaaagacttgatgttttattctggttatctatatttatccaaggttaatggagaaacttgaatgttttgagcaaaggaataataagatcagagttatattgctagaagattaatcttttcaattggaaaagaaagaaaagttttgtgaccactgtcttccaaaagataccacatccatcaatgtcactgtcattagaagcaacatcaatattgtctctagggctgttgtataattaaaaaaaaaaaaacagagcatttgtatcaccaggttattaatagtgttacaaaagatcgcattactgatatattgctaaaatgattttagcaaacatttctcacatgtcagatggctccaaattactcatttgcaattcacaaacatcaggaggagatagaaatgttttgaattgctagtattagatttcttatctactgttgcccatgaaaagtgaacaagtatccttacctttggattttagtatctccttgtgacatcatttcactatttagttccacagaaagttggggacctggaggcaaatagcaatggttctacgaagtccctggtagtaagctggtcgccccctgctggagactgggagcagtatcgtatcctgctctggaatgattcttcggtgctactcaacatcaccgtgggaaaggaggaaacacactatgtcatagatgacgtggggcttataccgggaagacggtatgagatagaagtcactgtggagagtggaaatctgaagaattctacgcgttgccaaggcaggacaggctaagcaaatattatggtgttaatgactgacagaaccttaatttggaccttcgtccaagtaactcaggtaaccatcaatatcttaccccagcattccctagatttgagacattttaggctggtagactgaaataggttggtaatgtttaattttgtcaaattagaacaatataaatcacttccgctagtaagt

SEQ ID NO: 45364 - DNA, 1034 bp, Bovine  19866880808815
  misc_feature (1)..(1): n is a, c, g, or t
ntggggttctagataggactggaatctttgggatgcttgctctctagaagtaaaaacaatagcaacaataccatggcaacatccctcagcatttgctgtccaaaatttaaataagataaattttctatgacataatctggtctgggaaagtccctataaatgactgtaactccaagttttggaagatctcaacaacacttcaggcttttcttgcctcccacaaccacccacaagtgcagattttccctttcacagtttccaggccttacttaaatctgctgagacaaagtgacattaaaaaaagaaatcatggtaacatctccagcacaagcctttagtcctttagttaaaggtgttcaaaaggttaaatcagaggtgttatatatatgcaaattagaagaccatagcaccctacttagtggatttctttaatgtctacttaaattaattattccacagagtgatagtagctgacaacaaaatacataagggagtaattagaatttcttcttgatcttgacgttatttaacttgtttaaattgaatctgcagttcttaggacaaaaaagttcaaaataaaaatgcaatcctctaacaccttccactttgtagacagctacagctccatattcttacctttaagacaaggtttcgaacagtatagttatcgcattcatttacactgataaccagaacctcaacttttccatatattcctctcttttctggccaataaagcacacatttctggaggaggggaaagaagaacacggcaaatattaacggttttcattggcctggaagcatttgtcattcaagcatctcaaaagtttctatttagttaaataaaataaatcaagtatcaattttaaacattctgtaaatgagctaaaaccaccgaactatacattttaaatggataaactttatagtatatatatatatgcatgtggcactcagtttgtgttcaactctatgcagcccaactctttgtaacccaccaggctcctctgcccatggggattttccaggca

SEQ ID NO: 45365 - DNA, 835 bp, Bovine  19866880829931
  misc_feature (1)..(1): n is a, c, g, or t
ntacttgacagttaatatttatggagtgagatatttcctttaatgctgttttataagcaagagggaaatgctgcaaacatattttggaaaacatacaagtttgtcaggatcttgagttaccccatgctcagagtgcaggagtaacttatgttaatatggaactttcacactttatataagcaggacttagggaagtttttggagaaggcaatggcaccccactaccagtactcttgcctggaaaatcccatggacggaggagcctggtaggctgaagttcatgtggtcgctaagagtcggacacgactgagcgacttcacttttattttcactttcatgcattggagaaggaaatggcaacccactctagtgttcttgcctggagaatcccagggacagtagagcctgatgggctgctgtctatggggttgcacagagtcggacatgactgaagcaacttagcagcagcagggaagtttcaaaatatctggaaaccagtttcaaaataacatctttgtataaagatgttaatactggaatgataaaccccttacaatgtccccagggaacagttgagtggacaaggctggtttagaggcagcctttaacataataaaaagttgttaaactttgtagtctactgttgcaggagtactggacagtaaaatcaagaatggacgacatctcacattctttccaccttgtttaaagctcaagcacttctttcaatgccagaccagggaacaaagcctagacccgagaggggagctgtggatagaaacattaatcaaatttgccttgagggaagttactcacctggagcacaaaacatctg

SEQ ID NO: 45366 - DNA, 1828 bp, Bovine  19866880865968
  misc_feature (1)..(1): n is a, c, g, or t
nttatctccttacaatgagagattcatgaatctctatcactgctgacttttctcttgagttttagtttttggtatccaactttctgttctttgtttttagcctcaactttaaaattttcatgactaagcttatctttcctccaaaactgttttttcttaccttcctgtccttcactgtgaaagtagctaacgttgcctccatttgcacattcatttcagtgctcttgacctacgtatggtctttggagtcttttttaagttgcttgtaacctcttaccaactccttgattaatgattaattaaaatctaaatgcatgcttatttgatatctacatgaatgtcatgacattattatttttttaaaaatgctttaacagtaaccaaaagttgtcttggatgattgtcttatcttggatattttaaaataccttacgtgatggtctgaataagatatactctagagatgatctgaaactgtccttcctatgggatatcaatattatcatttaagattaatagaacacattagtcattcagggtcaagtttaaaaccttttgtctaaggagaggcctgacttcaggctaaaacttaacagttcatctcctgccatgaggctgagaacaaagacaatttttttttaaaggtatgtagaggaccatatggggcccttatggggctctgggcatatggaattagagatgtggaaatagtcctgaggattatagaaaggaagatttggcagaataataaaggaaggaaaattacatcttgaacaccctttcaatctttatcaaattataacaatttaaaaaatcatttaaccataaaagagtataacttaattagatccactaacttctggaaaatgacaaagtatgaattttaaaaatctgtgaaaggaaagcaggtcaatttaggactggccacacaaataactttaatttggactaaccaaagaaaagaatctgtctcagtgatataccttatttatggcaaactttgacaagaaagataagtttaagaaggtcaagagttaaagagtaagatcttaatgtatcttgctttaatgaaaaagtccatcatttgtaatcaacacattgattgtatgcaaatgtatgtggttgcaaatgttcagaaacaaaaggtttccttaattaaacattctacctccttatattttgattacattattcatttgctttacagaacaaatgtgaattccttaattatcattatattaattagtgaggtttttcataatatggaaatctagagaatgattaatgaagggaaaaagagaggaaggaagctgaatttctcatgagattttctgttttgtaaaattttctgtgtatttccctcttgtttaaagatgtaactgccagtgcttattttttgagtatctgttagggtttagaagattagtcagtgttctgcaggtctttatggactggctaccaagagaataaggtcaacagtcatagcaattacaaatatgatcacttattgagaatttacaaaatgcagtcttgtgctgagtgctttatatgtagctatcttgtgaaagaagtaaaatacctttccttttcctgaataatccccccgtcaactctttgtatgactgactccttatttcttcacatcagctaaaacactacctcccaaagagtatcttcaaagcagattcttactatcattgacattcttgataacttgtccttttctttcattgttattgttgagttgctaagttgtgtctgactcttgagaccccatggacttgtagcctgccaggcttctctgtccatgaaattctccaggcaagaa

SEQ ID NO: 45367 - DNA, 1570 bp, Bovine  19866880869308
  misc_feature (1)..(1): n is a, c, g, or t
ngctaagctctgtgaaagatattcagtacctagcacagtgtctaatatatacagtgttgataatagctaatccacacctagcctctttttagacttcacctgttttagcttttttaagttctcataactctaagaaaaagttactgttattatccccactttacagatgaggaaaaggtgactggcacagacaggttaaatcactttaacctcgagttcccctaatgaatagtgattcgaattaagaaagcccacacttttaaccccactgtgtaaagctgaaaatgataaatgttgaatatattaattaattcttcattttaaatttgtgaattgggggataggagtaggtttatatgtgttctgttggcaattcaccagaaggcactatctcatttttttggacccagcagacttaatgggctaataatcaccaatcaatagcctaggtaaagtctcagttgagctctttcagatattattttggcattctctgttacaaggagccaaactgcagagaaaagtgaaaggaggttctctgagcccacccatgggagaagatggaatcagaggaaatgagggtttcccaaccctcccttcagctgcggaatgctctggcttcactctgggtgaagaattctgttgttacaaatgctacaaaatagagcaacccacacaagtggtaccattttcgttttggctggtgttctgcaaagctggctctcggaggacagatggcaagctgtcacttcaggcctgctttttggctcacctgcatgtagccacatgaagctttctgtttcttaagaaagcatttcttttctcaggtcatatttatagttcctgacacctcattgctcctcctagatctcttaaagtcttaacgatcaggaagtcttccaacatggatcttcccacttaaatcccaacgtttcttctagtagcaccctaatgccattcaaacctgactctgcctgctcttgctcaccaacattttagttttaatgctcacattctgaaacaaaatctttcttgcccaaatttagcgtctcctccaagacctaaatagatacaggcagatctcagagatattctgggtttggtttgaggctaccatgataaaataagcattgaaatgcagtgagtcccatggattttttggtttcccagtgcatataaaagttgtatttatgttatactgtagcctattaagtgtgcaatagcattatgttttaaaaaacaatatgcctacctcaatgaataaaatactttattgctaaaaaatgctaaccatcatcggagaaggcaatggcaccccactccagtacttttgcctggaaaatcccatggacggaagagcctggtaggctatagtccatggggtcgctaagagtcagacacgactgagcgacttcactttcacttttcactttcatgcactggagaaggaaatggcaacccactccagtgttcttgcctggagaatcccagggacgggggagcctgttgggctgtcgtctatggggtcgcacagagtggacatgactgccacgactagcagcagcagcag

SEQ ID NO: 45368 - DNA, 1631 bp, Bovine  19866880887590
  misc_feature (1)..(1): n is a, c, g, or t
natgttgttctctgaagaaattgcaatttggaaaacaggttagggtcacagcaaatggaaatggtcaggaatgtcgtaaacatgcaagaaatcattaataagctcatacctggaagctataataattggcaatcaaatctcttttttttttcataaccaaaagagaaaatcttatctagagacaggcaagtcaaagaaaactaagcccaataagtactaagaattaaaatgagtatcaaatgtgtataaagggcattaagatatgaagactcggtgacctgggaaaagcacagtctcatgggtctggaagctggagctctcaggctgtgggtctggctttgtgtgatgctggctaaaatcccaataccatttttatcctcattaattatcccccagtggttaaaattctggattttggaaagtactttccaaagatctaaagatctaaaaatacttagatagaaagagaaaatctctgatggaataaccaactttcctgggcagcatccagccatatatagtctaaaaatatcttggaaacaaaaatattcgagacacataaagcagacatgttacttccttatgctcagattactcttatatataattatcctatatctttatggttaaatggtagtaatgtgtgtcctggttaaacaactgagaaaggggaaaaagaaagaatggtgctgggattacaagactgctaagtctccaaagaaaaatagttattcaaataagcttttctgagatggttgggttaaactgaagtgttgaattacctgttgtgaaaaaaatgttggtaaaataattaaaattctttgggaaacttacccaatcatcctaggaaaaggaaagaccacatcatatagagatggaaactgggacaggccccgtcatctatctagtagacaccagctatttgtcaggctcaaggctaggcactttgcatactttattccaagttgatatctcagtaccagtgcctggctcctatccctcgagtttttgaattaattgatgtgcattgcagttgagaaccatgtcttcagaggaattcagtgagaaccagtttctgctcctagtaccccctttaaaaatttttttaatttattaatatactaagctgcatcaggtcttagctgaggcacaagggctcttcaatgaaggacaagggctttttgggttgtggacttcaggctctagaaggtgggctcagttgttctgtggcctgtggagatcttagttccctgaccagagagcaaacctgtgtgccctgcattggaaggtgaattcttaaccactggaccatgagggaaagtgaaagaaagtgttagttgctcagtatcttttctgtgtgctgttgaattccaaaaattttgccaagcacgttcccatcagagcacctgcaaacacctacaatatgcccagtaactcctaaatgtcaccttgacatgtgcccagtaactgctaaatattttctgctcttgagcctgtggataagctttataaattcaacattagtttttccatgggttccatctcagccttgtttcagagtgaaagtcggggtagcgatcaaacattattctgtcttctattgtctaatgggaatgactgccttcctacag

SEQ ID NO: 45369 - DNA, 1653 bp, Bovine  19866880961170
  misc_feature (1)..(1): n is a, c, g, or t
natatcagactttatttttttgggctccaaaatcactgcagatgttgattgcagccatgaaattaaaagacgcttacttcttggaagaaaagttatgactaacctagatagcatattgaaaagcagagacattaccttgccaacaaaggtacgtctagtcaaggctttgctttttccagtggtcatgtatggatgtgagagttggactgtgaagaaagctgagtgctgaagaattgatgcttttgacctgtggtgttggagaagactcttgagagtcccttggactgcaaggagatccatccagtccattctaaaggagatcagtcctgggtgttcattggaaggactgatgctgaagctgaaacgccaatactttgggcacctcatgtgaagagttgactcattggaaaagaccctgatgctgagagggattgggggcaggaggagaaggggacaacagaggatgagatggctggatggcatcaccgacttgatggacatgagtttgagtgaactctggcagttggtgatagacagggaggcctggcgtgctgcagttcatggggtcgcaaagagtcgaacacgactgagccacgaaatgaactgaagctgcccaagaaaggtctttgaggtaagctgtttcaggctcaatataaaatctagtgatgatggtccgtaaaacttgaattgctctagctgttataaacaagcagaggatttaatttttcaaagtctggggaaacagaaaacttctgtggcaatgaactttattttatttttaaataacatatttgagtggagattactgctgtagtcatcatttttaatctgtgtagctacctcacaaaactcatggattgttcaagacaagaaaaaaatccaagacaaaccaaccttggatgtcattcaagtgacgcctttgaagtgatgttttaagtaattttagcatgtatcaccctttctgtgcccaaacctgatatgtaatattcagaagtcctgggaaatattcaaatcctaatatttgaaactaaaagcagcaatcaatagagacgattaggttagagctggttctgatgagacttgtatgttgggacaggtgtgtccttgatgttggaaagtaaaattctttcttcataatatttatgggatttgaagtgatataagcatctcacatctattaactatcccttgagcataaacaaattctttttgacaaatagaccatcataaagactttcaggagatgtggatccttgggtttgaaagatcccctggaggaggaaatggcaacccactccactgttcttgcatggagaatctcatggacggaggagcctagaaggctgcagtcatggggcatgactgagtgagtaaacaacaacggcaacaaagaaaggtatactaatatgcattcatgatttaatccagttttcaaatgtcctcagttcgttcacttaaaaatttggcttaataaagtacaagggaccagtctcataacagctgggcagaggaaaatattctacttttaaggttaatttgggccttaacatgtatagaatcaaatgagaaatcagttttctatgtgttttagatcagatatttggagctaggtgttgttttaaaggccttaaatatttctttggcccaaggcca

SEQ ID NO: 45370 - DNA, 1062 bp, Bovine  19866881014275
  misc_feature (1)..(1): n is a, c, g, or t
nactggagtggaatgccatttccttctccaggggatcttcccgatccagggatcaaaccccagtcttctgcattgtaggcagaccctttaccatctgagccaccagggaagcccttgggattgttttagcattatttacactaacgaatatattctgtaattaaaaattttaaggctctatagtgttagttacatattcatagtcaagatcattatcagctcttttttagaagggcataccattcctgaattctttattttgatgtatctcttacttagccgtatttcattatcaagtaggttctttaaagcaggcttcataagcgctatgtttcctcccatgttatgtgtttgaaaatgtagttatggtgcctttaacaataaattacaacttggctgaatattaacttcttgattcaatccccatttttatttcttgcctttgaactctgctgctgttattccaatgcctcttggcattgaaaattgctgtgaaaaatgctctggcctgaggccagcctgtcttgtagataatttgcttttctgcctgcaatctcatagtaatctttattttttaaagttaaaaagtttcaccaggatgtttctttgatttgatagtttttgcaacatagtatgctcttgatgtctacacatcccagatgtcttgtttcagaagtatttcttcctattacacatccgaatgatctttcttctaaatattttttggttcaactttaaggatactaattatacaattttatattctttctttttaaccactttatgtacttgttttctcttaccacttctttatctttagttcatcgaaaatttctcaggtctattctgtgtttttatgtgttttcaatagaatctaatctaattatttggtttctagtgtgattttgattctgtaaagtatgttttattattatcttcatttatcttctgagttctgtcagtgtattctttgcgatgcttcagataagatacgttctctcttaactgtttcagacaggaaacggcacaaaatttcgtttatagtttcctaatcttctctat

SEQ ID NO: 45371 - DNA, 3496 bp, Bovine  19866881029386
  misc_feature (1)..(1): n is a, c, g, or t
ntttgacccatgacactttccgagactatctaaatgaaagggaaagaagttataaagtaataaatataagctgttctttccaaagtttggtgccaaagagaaaactagagatggcagaggaatgtgagcctgggaggagaccattaaaaaggtgaaagggaagggctgctgctgctgctaagtcgcttcagtcgtgtccgactctgtgcaaccccacggacggcagccccccaggctcccccgttcctgggattctccaggcaagaacactggagtgggttgccatttccttctccaatgcatgaaagtaaaagtgaagtcactcagtcgtgtccgactcttagggaccccatggactgcagcctaccaggctcctccgtccatgggattttccaggcaagagtactggagtggggtgccattgccttctccgaaggaaagggcaggactcactaattggagcatctagcttagtataataagggctacgaaagacggagttaatgtatcataaagctaatattttgaactcttcagagttcaagctccaccagatttttcctatcctctcataccctttttaacagcagcctctatccactagtgatccaaagctggacactacatcttctttatagtttatcccccaccacttttacctgcctcctctgagaagcccaaggcctgactaacagcaaagaaaaacagtgatttggatactggagatgggttacatgactgataaatcaagagtctgagcattgagtaggatcaaaaacctaatccaaagaaaacaaaaaacaaatgacaatgcttgatcattgttgtccaagataacataaatcggcaatttgtactcagatcacaagtctgcattttagcaataaattcaaatggtctgatttagaaatgagtgtgttatgctgaatggatgcttccagtgtaacaacagtgacaaagccatttggtggattcctcattctctggcaagacattatttttattggcttttgggcaacatctattaatagatgctatagttctccctgaagattcatgagtctgtgattctcctattaataatacttttgagcatattttgaactaaaataggatttctttttttccaaatgggagttcaaattcagtgctgggcacccacaggtgttttatttagaagtgcattcatggatcattccttcattgccactgtgttcattttgattaaaagatgaagtcggtaacaggcaactgggacagagcactggctggtgcatctcagggtttcccgggtagcacagtggcaaagaatctgccaaggcaggaagacacaagagacaggggttctatccctgatttgggaagatcccctacagtaggaaatggcaacccgcttagtattcttgcctgggaaatccatggacaggtgaggctgatgggctacagtccttggggttgcaaagagtcaggcacgactgagggaccgcgcatttgtgcgcgcgcatgcacacacacacacacacacacacacacactggtgagactgggaagcaggcaacaactagagaaagagatggcagggattgctggagcagatgtcaaggagcctgaagcttgtcctagctctgcccctaatttcctgtgtgaccacttgtcactctaggtctctgagtctccatatgtagaaggagaagtggtgtgtcagaggtatccaacctgtttctggtccaaagatctctttttaagagtagaatatttcatggacctcaacctgatggttatactttgaatcccatagtgctttaaattatcctattttattatttgctgctgctgctgctaagtcgcttcagtcgcgtccgactctgtgtgaccccatagatggaagcccaccaggctcccccgtccctgggattctccaggcaagaacactggagtgggttagaaagcccttattatcttatttagatatcactaaattgttgtgacaataccacctaattaaaaattccagttgctgttaaagctaaaccaaccagatttcaccatatttagagcctgctataagagattcatttagacttgtttataccatgttttgggcttccctggtagcttagctggtaaagaatctgcctgcaatgcaggagacgccagttgagttcccgggttgggaagattccctggagaagggataggctactcactccaagtattcttggacttcccttgtggctcagctggtaaagaatctgcctataatgcaggagacctgggttctgttcctgggtcaggaagatcctgtgaagaagggaggagctgcccactccagtattctggcctggagaattccatggactatatagtccatgggatcacaaagagtcagatataactgagcagctttcacttcatacaatgtttttgtggtatgagatagtgaggaaggtcatttacacattgagtatgagagatatttgtcctttaaaagaaataataatacatagtaataaaatggcctaggatactcagagaccgcctcatatgcatatggagaatgactaaggagccatatgtgaccatcagaagacatctaggcagggagggaaggaatgtgctccattgcaggctgacgtcaggcaattttttcctcattgtatttcttttcatcccacttggcacctctgaactctggaagaacttgaaaacagagtttgggaagtgaaacacataaaataatttgtgatctcaaagcctttttttttttcttcttccccttctccccccttttttccttccccagaaacaggaaacaatctgtctaatcctcccttttgagagtcagtagtgaaatctgcagttgtctttgtacatccttaccttggggaccttaaattgtaatgacatccaaagtccttacttgcggcttcccagacaggatagaaaaatgcttccagtgtgcgtcatatcattgtttaaatgttttgattaatcactttagtttgatggttttttttaaactataacaacctaaaaggaggaatacatatgccatcagtttcctttgctaatatgtgtccccagaaaattctttgtttccaaaacttggttaaaataattccaaagctaaaatttccacctcttggtatattttttttttaactaacttttgtcttgcattgagccatatccttttacaatcccgactcatcacagagatccccttaattagtgaatttcaacaatctcattgggaagatcaggaattggacactttagtttacttattttaagaacacttgaagataaagcttaaaaattggtttggatttccttgacatcacagttcctaggccgtaacaagatgttctcttgtaaaacagattacgctaactgaatcttccaagtggttgtcaggacaaccttttccttcttctcagctaggattcaactgagtgttaacctggatgttcagaagaaaattgaccagctttaa

SEQ ID NO: 45372 - DNA, 1536 bp, Bovine  19866881076901
  misc_feature (1)..(1): n is a, c, g, or t
ntggctcattttgccccaaacatatggacacctgcagcgataggaattttatttttttagttctggtgaaatactggacagcttcaagaagagtgaatgggaggtgggaaagagggaatgagaagtggttagatgtagaaggggcctgtttgcaaactggaaggtggacaggacacttctaggtgttttacagggagtgaataagtccgtgacaacaaacactcatacgtctgccttggaaagcagggcatcatcactaagcaccgaggaaaaaattatgatcgcgcttttagggtttagcattcattcatttataaaatatttatgaacattgacttaatgccaagcactattctagacatacagaaggtgctaagtaaatgagtatgcattttacaaatgagtgtgtatttgcataaatagacacataacctgtctctcagtctagtctctgttaatgatctcaaaaactaacattttaaatgaaattttgccgttgaattcagcttccccctcctccagcattgggattggggatttttggattatctccttgaccaagaaacattcttggttctcacgtctctctcttttatggggtggagggtggaaatacagaggaaataaattcacatttactaagtgttcactatattcgcagtactgtacattgtccttttacatcaattattttatttcatcttctccagaaacatatgaaaccagcattactattctcatccagatgatgagaaaactgaagtcagaggcatgaagctgcttactgctcagccagagaatggcagagcctgaagtggatatggattctcccactccagagcacaaactcatttcattacagctttcttccttacaggctttttcttcctgctattcagagaatattcatgttagtattagagaatattagtggtaatttggcttaatactgtaattttagaagtggatgtataattggcccaaaggctttatcttcaattggaaatttgttcaaacccatttcaccattttaagctgtggggcaatgttgtaaagggtgaaataaaagatgagatattgagggctcatagataaagttgatatatcacaaaaataatctctgttctctgtgaacactgggatttggaagagtttgaccaaagtgtttggtcaaggtattggaccaaagtattggatgacttgatactctcatttcacaccctgactccatccattagtatccaaaccatgttagtgattattctttgggatattgagtggggaagaactggctaaggctctaaagaaactttctatggtttagggagccattaggaaaaaactcattgtaaaaatgtcctgaacttttagggctggatttctgcggctggccaagagtcagcctcagttaggatgctgccaaattgagcatcagcagctcatttggcttggaagacaaagaaatgaaaaacaactgacatttgtatacttgaaattacgagttgtttctctaacaaagagaccaaacactttcgg

SEQ ID NO: 45373 - DNA, 653 bp, Bovine  19866881088457
  misc_feature (1)..(1): n is a, c, g, or t
natacagatcctgactgtcagcggaggcctctttagcaaggaagcccaaacagaaggccgaacaggtaattcgcacagcttactgttttgtgcaagatacagccttgtctgccattccttaagaaccgcagactcaaagggatgaagtaaccttgggagatgaagtctatttcttggtacagcaggaacatgcacgatgatcttccacttccacaccagctggcctgttcacacagccttcagctcaccacactccaattcaagattcttcatcaaaactggctctgttcatttcttactgttgctgtaatatattgtcactaactttgtagctcaaataacacaaatacatcatcttacagttctgtagatcaaaatcggaaaataagcctcatggcgtcaaagtcaaggtgtcaggtcacagaagggttgtgtttctattctagagactttatgggaagaatctattccttgccttttcaattctagaggtcactcacatttcttccaggagtgacttcactccaacttctctgctcttccacctccttcttccatcttttacagactcttgtgattccatgggtcaccacctggacaatcctgaataatcttgtcacctcaagatcctgactcaatcacactgcaaagtc

SEQ ID NO: 45374 - DNA, 1197 bp, Bovine  19866881185656
  misc_feature (1)..(1): n is a, c, g, or t
ntttatatgtcatcggaaccatgatgctttttataggaatgtgaggctttcaagagtttcctgccttctgaaaatggcaggcgtgttcacccaataacccccgaaaacctgtttttctttatcttataaatacctgcatcaaaaacccccaggttatgccatcactttagggagcaatttgacaattcctggtgatgctgaaggtgttcatacaatataacccagcagttctgcttctagatatcaaccctcgagaaatcccacacgtgtgcacgatgatgctcactgcaacacaatttgtaacagagaaaaactaaaaacaatctcattgtctatcagtagggaacggtggtttatgacctctgtaaaagaaattatgtctacatgtaacaaatgtagacaaatctcaaaaacaatattgagtagaaaagtttacataagaatacataaaacttgtttagtaccattttaataaaatttggaaacacgttaaatgagtatattgtgtatagatttacatgaatgtgggaagagtatgaaagcatgcttgaaaatgctacacagaaaatccttacccttgatgggtggagaggtggaggaaggaaggagaaaaggatggaagttcagaaccctgggtttcatttctttgagagaacacattgagagaaagaagtgtcctatattcttctctaacttggaagggaagggaaaggaaagactgtgccagagtcacgggatgcagtccagaaagtccagtttagtgaaaaaggtggtctttcttcactctcttttctagtgctggtgtgggtaggactggaacctttattgcattggatcgaatcctccagcaattagactccaaagattctgtggacatttatggagctgtgcatgacctaagacttcacagggttcacatggtccagaccgaggtaagagttcagctgaaggacacagatcaccctgtctgtctccctccgcccccaaatgttcagggctttaatctgataaagggaaagaactatgactcattaagaggagaaagagaattgaatattgatgttttctaagactttttattttaaaagaaatttcagtgaccttgaggatgatgtgtattcttatctttactgaactagttgtccatcttctttaggtgggtaggaagaaagagaatttttttaaaaaaaatcaata

SEQ ID NO: 45375 - DNA, 992 bp, Bovine  19866881372268
  misc_feature (1)..(1): n is a, c, g, or t
natagcataaatgagaacagactgcactagagaaataggaggaggaggagaatatattttccattgacttgttagaacgtgtttgttctttctttggttatttcagtattgaaaatgagacaacgaccccaaaaagtgcacctcaggttctgtgcggataggcatttcataaatattttggtattgttataaaacaatcacagaggaaaaaatatcccttaactaaaggacagttcttagttgtatatcacatagttttccttagtttaaggactctgaaaaatctgatctgattccaccgggagcccaattccataattctaatctttacacctgggtttgaaacagatgaatggtcaagtgtaaagacatcagaagaggatcatttattttcaaaggtccaaagaagaaacaatggtcattctaaacttgagagagaaacaataaaattatttaatcatggaaagattaaactaagccactacttttgaatcagaaatttaaagctagtattttgatgtattatcacctcatcttttattcaataaagtttgtgttttagccaactcttacatttctcttgaaagtctactgacataagaaataacagattgataaacagcatctaacactgaaaaatggaaaaatgagatatcgattgggatgttggaaaattgatgttgtcatttgtaatataagtggtgccattaaagattgtttaaaagtaagtcagtaggaatagctcaaaatgcttaaatgaaaaaattattttgtgtactatattgaaaaatgacttatacagtataagcagaagaaagttctgtttttttttttttttccacctggcaaataggcagctggtatctacatgttggtaaatttctatttcctattaaaataataatattcttaatcaaacttaagtagatgtataccgtcttactgcccagaaagactttcaatgtcagtagtcctaatgagtacaagtgata

SEQ ID NO: 45376 - DNA, 1204 bp, Bovine  19866881437340
  misc_feature (1)..(1): n is a, c, g, or t
nttgctatgtgtaacaaaaagagaagctttggtcaaatatatgatgaaacatacttatgaaacagaagccaagactcaagaacagaacgctgaatatgaaaaggcaaatttgaaaatacccagaaataacaattatacacagtatcaataaatatcttacctgttcacagtaaaaggttgtcgagaaggctgctgctttggcatacatattatgctcggcgagcttctgttggggctacctaaccctgaactgctcatgctatttgtcctgctaggaattccaatgccctgaccaacctgggagtggttcatcatattcctaggattcataggcaaaatacccctgaaaaagaagtccagtatactaaataagctctctataatcactcattaaaattctctgtaaataatcagttgacctaaccctagaatttcagatatacgttcaaattgcattgtaaatttttattcatttaattcttttatctggtcatttgaaaagaaaaaaagctttttgaaaagtcaaagtaaacaaaccaataagaaagggcaaattatagaagaatatatggtgatagcaaagatgagagaactattggtgtgactatcacataaaatacaaacatatttcacatatatattttgaataatttcatttcaaatgtatgtcattctatcttaatactaatatgcatcatttttgtgatctgctttattttattctcactagaacaatggatgtgtggtgagggagcaataaatagaatcatctgaggagtgatttgaaattgcacattctcctttgagaaagagagttggcttttttgaaaaaaagctccccaggtggtgattaatccttgatacccatcccagctgataaccagtatgctagctgcaagataaaagcatcctacactatacttatcaatttgcaatgaaattaaatgagcatagggtatcaactttcttttcctcagtgaaaggcactgaaccagaaaatcaaataaagagttactttattaaaaaattaaaaagctcgcttactctacaaagatacattttgagaaatattctggtccatcaatataaatacctgcttggagatggaggcgtgtgaagtgacattgttggtacccctgttgttggcgtgacgtggctcggtaactgagtgccttgtgataagctgcgatttaactgaggggta

SEQ ID NO: 45377 - DNA, 1178 bp, Bovine  19866881469452
  misc_feature (1)..(1): n is a, c, g, or t
ncctggaaaatatggcggccaagctgaacagggtgccagtgaggctgaagcaccaactttgtatgtttcaattcgtcctttgaaaagtggcatttataactcataaaatttaagcattactctttgagttagaaaaatgaggtggtagttttcttttattgacaaattggctgtgaacttaatgttcctaaaaaatgagtcatttgaattggaacattaatttatttgagcagctgggtccacatcactctgagaaaatgccattgctctgtccctacacagatcatcccataatggtcccagcacctgcctatagtagtaatagttcaggcttccttcttgccctcccacctggaatctcagatgctggaggtaataacacctttttagaagagtgcatttgagagtccaccttgccacctttgccccacttggagacattaagttttgcctgcaactgagatttaatagtaccgcatgttgtattagagacaaagtctgtcctgtctctgtaagatccatcctataagaaaaagtgggaggaagatcaagccttcagctctgaaataaccaacagggccaataagaactgcaaatacgtcacggctggggaagcataaagggacacactcacctcccatagagatgcttagcttgagtccacgggagccaaatgtaaagttctgaaccagctgttaaacacagccattattaaaaattatataagtttgcaactttataaatcatattaaaaacaaaggcaagaaacactcaaagctcattgcttcctcattattttaccaccttttactattatcccttctcttcaggttatttctgctgccagatctatatgattggacaactgtaagagtgtgccactgaatagctctctcaaattctgagttcagcagtggcacactgatggctttacaatcagccatggtgggtgtatttattccacagatgtcagtaaatcctgtgaatgagggcatctatctcacccctggctgagtgtcaaacatttaccagcatatcacctcccatcagtacatctttccaccctgcaccacacaaaacattgcaacctgctcacctcgtgaagacatgaagacatcagctacatcatttcatccaataattataaagggcaaagtaaacctctctaggatattttt

SEQ ID NO: 45378 - DNA, 1311 bp, Bovine  19866881616482
  misc_feature (1)..(1): n is a, c, g, or t
ngctaggaggtttattagtttgtttaggccgcttgaatatagttttaacattataaagccaatagcactgaacatttggaagtagtctggaacttcagtgaatgaaaagattcaaagattctaaatattcaatggtcaacaagtttttaactcatatgaagaggtctcttaaagaccaaaaagaaaaaaaaaaagtcctctaaaagacagcaaaattatgaaattacatctcttaaggttccttaggaaaagctaataaaaatgtagaggacctcaaaattaaaactaagtttgctttttccacttctgctctatcttcaacttaactttcctcctggtcccccacttcttcctttccctgatctgctccccctcctcctcttgcaccttcccttaacccccttctctactgcccatttctaaatatagtcctgtcagtgcagactattccctcacaatatcttttaatgtagatggaaatcattcttcagttttaagtcttggtcaaaacagattttcataatttagcaaaggactttctgattcttcctagggaagaaacagaagttagttgaagattttaagccttgtcttaggaatttatagtctgggcttccccgatctctataaattagtttatctctttgtgggaaaccagaggtggtagaaattcatttgaaaatgagaatggattgactaccgaaatgatacaaaatttaactgtagttaaattttttataaaaagtataaaagtaggataagatctcttagcagctattcctgaggtctttctgtcaaaattcattcatcaaaaatccagttatgtaaggagggagaaaatagatccattcttgatttcagaaacagcttaactaccatattctagaatattcttttctccatagggatgaagatatcacaactgccttaactaccttttttgctgatgatcttaaacctcaagtgacagatttagttaggaaacagagtatgagatagtatacactgctttctctgaattataagggctcagtgagcactttgaagatactttggctcagaaaaacaaaattacagatcaaattaataacttttcagataagccattagagaaatccaggaacaaaaacatctctatggctacacgactgagcgacttcactttcccttttcactttcatgcattggagaaggaaatggcaacccactccagtgttcttgcctggagaatcccagggatgggggagcctggtgggctgccgtctatggggtcgcacagagtggacacgacgaagcgactagcagcagcag

SEQ ID NO: 45379 - DNA, 1083 bp, Bovine  19866881798646
  misc_feature (1)..(1): n is a, c, g, or t
naaagagtgaacagctgtttgcatctggatacggggtaagaaggagagaacagctgctggcagctgtggcagacaagaaagtgagcaagtgagcagctgcgggtaattcaaaatctaccagactgcccagaataattgaaatccagaggaagcatgcaagactcgacttaactgctttactgtatcctgctcttcattagatcttacttgtccttcattagatacattgccatgagagcctcagaagggctccaagcaggaatatcagccccaagctccccatccaccacccttagagaatcaaaccaagagacttgaaatggcacagacttttcttccagtaagtccacatttattaatacttttatgagaagaaaaagcctatggttggcaaggattgttgttgttcagttgataactcatgtccgactctttgtgaccccatgaactgcagcacaccaggcttcctgtccttcactatctcctggagtttgctcaaacttatgtccattgagtcagtgatgtcatccaaccacctcatcctctgttgtccccttctcctcttgccctcaatctttcccagcatcagggtattttccaatgagtcagctcttcacatcaggtggccaaagtattggagtttcagcttcagcatcagtccttccaatgaatattcaggaccgatttcctttaggatggactggttggatctccttgctgcctaagggactcttaagagtcttctccagcaccacagtttgaaagcatcaattcttcagaattcaatcttctttatggttggcaagagaaggaatattaactgaaatggatctaacatgagatggagcaaaaagagttctttctatattacaagagatagtggtcatttggatgatgacaccacattttagaatttggttgctttttagtcactaagtcatgtccttttcatactgttcatggggttctcaacacatgaatactggagtggtttgccattcccttctccaatggaccatatttagtattattatgatcaaagctagtggaggtgaggaattccagctgatctatttcaaatcc

SEQ ID NO: 45380 - DNA, 1555 bp, Bovine  19866881887049
  misc_feature (1)..(1): n is a, c, g, or t
nttgtatagcaaggcaagaagcccattacagtactgggattttaccccaagatcagagtagatcagcaacaaaactgacaacctactgattatcatcatcccatcactatcattaccatgattgcaacagcagacatgatgacaatgtgttatgctttacacaatacattcactggtcctggaaaaaagcaaagaaggtagccaggtcacatattaaaattgccattaaaatgaaaaatcagagactcagaaatgttcattgacttgcccaagatctcaatggcggtcagtggcagaacagtcatgtaaacgtaggacatctccttctaagggaggaagggagaatcagggagtttgggattgacatgtacacatgtcatgctatattaaaaatggataaccaacaaggatagcccagggaactctgctcagtattatgtaacaacctaaacggggaaagaatgtgaaaaagaatagatacatgtatatatataactgaatcactttgttggacatcttaaaaataaacacaacattgttaaccaactacattctagtataaaatgaaaagttaaaaaaataaaaagtaaaagcattgtgttcctactggctcaagccactcatgataagaatgaatattggcccatgatattggattgggctgaggctaagggcctgctgagcagtgagccaaacagaccattatgcatattataatttttaacataaattatatttccttatattttcaagccgaagggttaaacaaattctgcctgtaagggagaacatgtaacattcagactcaactggtccatactgattggctatttccttgtagtgactatttgtttagagagaatatattacacaaaagatttatggcagcttacaaaaacacaaataacacaaaataaaattgaataaaaactaaggaaatgaggaaattggattagaaaacgagtgagaaaaagtaaacatccagccaagaatgaggttagttcacaaaataaataaggcactcaataaagttctatttgctagaggtggaccacaaatttggccctcagctttccagctgtcaagagaaagagggaaatatgattcacagtatttaaatgatataagccaaccaagggctcaggagcaatacaagtgttcttggtactgactagaaaactgtatttctccactgttttatataatgctaataatgtgtatatgttaagtcacttcagtcatgtctaactgtgaccctatggactgtagcctgagaggctcctctgtccttgggattctccaggcaagaatactggagtggtttgccatgccctcctccagggtatcttcccaatcaagggactgaacttgcgatcacttatgtctcatgtctccttcactggcaggtgggtctttaccactagcaccacctgagaagcccagtgctaacattttgctgtgttgttgctgctcagtcactcagtcatgtctgactcttggcaaccccatggactgcagaatgccagacttccctgtccttcaccatctccgagag

SEQ ID NO: 45381 - DNA, 1074 bp, Bovine  19866880486211
  misc_feature (1)..(1): n is a, c, g, or t
ntctatgttgaatcaccctctttttcttttactcaagttgttccgtctgccatgaacccttggtctctcacactctgttgaaatcctacttttgttcaaaggtgtggtttaaatgccacttcctccatgaagcctactcttatctttatttttgtggaattaagctccctaacctaagcacgcccatggcactttttataaacctggactggagcacttataccatctccttgacgtacatctgtctctgctttgagctggtgatcaactcagggttgaggtaggtgcatcttggtcatgtctgtagcccttgggactacgccagggcctggcatacaatagaggctcacagcaaaaattaagagctgaaaacagctgattcatgtcagggctctgctggaaggacttgatctcagtccacccgtggaagcaggggtgggggctggggagtcactccttacaatgtcaagtcttcgctccactccacctcaggcccagccctcgtgggcttggtccacttctgttgcatggggttgtcaagctcagctacacagcacacttccccagtgcctgtgaggaaccagaaacataaaaatgctcatatccaagttgagaggccattgagtagtagagaggtcataccctgggcagaggggccaggaatgcctgcagccacagccttggtagcccaccagaagcttctggctctcaccttccagctcacctcccagatgagatgctcgaagctgccttaggaataaccggataggtctggggatggatggctgggcctggggtgccatgggtggcttctcactgggaacctaagagcaggaggaggtaaaaagagctgtaagaatcccaacacagtaccctgaagacaacatgcacgcaaactatttgctttgagtgcctactcaccaggcccccaagggcagagcaagccctaaggttgaccatcatagctggctgggtgctgactatggcatcctcaatcagctcctcaatagtagagagctctacttgctcctcacctctctgcggggaggggaacaaggaggtaggccctcagct

SEQ ID NO: 45382 - DNA, 2229 bp, Bovine  19866880629496
  misc_feature (1)..(1): n is a, c, g, or t
nctcccccagtttgtggccctgataggtgcactccttgccatctgctgcatgattttcctgggcttcgcggatgatgtactgaatttgcgctggcgccataagctgctgctgcccacagctgcctcactacctctcctcatggtctatttcaccaactttggcaacacgaccattgtggtacccaagcccttacgcccgatccttggcctgcatctggacttgggtgagtagcacggccacttctgcccctatgacccctacttcagggcacccttgccccctgtgagatatccggccgagcatccttcctggtgctccacattctccttcctgttttgtccccgccttgtcttcttagatccttctgttgacctttcatcccacacttggtcctcaccacttttgtcagaatatccttaaatcctcgttccacaggcggcattacttttcttactgtcttcttcccgcagggatcctgtactatgtctacatggggctgctggcagtgttctgtaccaatgccattaatattctagcaggaattaatggccttgaggctggccagtcactcgtcatttctgcttccatcattgtcttcaacttggtggagctggatggtaggtgggattggaatagggagagaagtcttgagtgttaaggaagcggcctgatctttggctttggggaattcagaaaaaatgtgatatgtgaataattatggaaaataaggggagctatttacttattaatagtaagttacaaatagtaactaagatttgttaaatgtgagaaagaaagccctagcatttataaagggattgtcactaataggtaggccatagccttctcctattgagcataaacaattttataaaaccccaaatcagatagggtaactgtgaccaaaaccagaccccctctataacagtctgagaatagacaaaaccacaggaacacagtacatctcacaatgaccaagatcccgtgctggctaaaatgaatggttgctgcttccttctgataacagctcagttctcacttcttggataaaaattattaagcttctcaatcatggcactaaccctgctgacagcacccagtccagggcaaaactctgtttccttgtatcctccgcagaattacttaaaacaaatcctataacaagtcctcctaacacctccttactgaggcatcctaaggttccccacagtgtgtgggttccaaagtgtcctttgttacacctcagtaaacctagctttgactccaggcatgtttttagtggtctttggctgaaggacctccataagtgcttattaaagttaagcactttgaaaatgtaatctcactttaaattctgtagcagctctatgtggcaggtattttttatcaacttctttcacagataagaaactgagactcagagaggttaaacgtgtcatgttaggttaaatgtgtcatgatcatggtcactcaggaagtaaagctgatattcaaacaagagtgtgaatggtctgaaccaaatgtaagacagtaactagtttaggaggggttcatgaaagaggtgaagtattggaaattgcctgggtgatataaaaggggtagtgagtccttgagactttagagaggtggactgtatagcttgggaaagaacttaagagacagaggaaaataggaccatgatgtgcaggggaagtggacatcaacttttccttctttctttttccccttcttccaaaggtgattatcgagatgatcacatcttttctctctacttcatgatacccttttttttcaccaccttgggactgctctaccataactggtaagtaggcctgtggatggggggacagctctttggacatgtggcaggtattgtcctgattgtgacccatctcctgatacagaggctaaacctgcacatctctgtattgttctctgggtctttagttggttatattcttaagtcttgggcttccccagtggctcagtgctaaagaatccacctgcaatataggagacctggttcaatccctgggacaggaagattccctgaagcaggacatggcaccccaccccagtattcttccctgggaaattccatgggaggctacagttcatgcggtcacaaagagtcagacatgactgagggacttagcatgcacgcaattcataaatcagtcactgaggcagatgctgtgggagcccccaggaatagaaggaatcagggc

SEQ ID NO: 45383 - DNA, 872 bp, Bovine  19866880789803
  misc_feature (1)..(1): n is a, c, g, or t
nctgggtatgagacatggggccctccccgaggacaccctcaagatggaagcacctcccagaggagaagctcagcccaaacccaagcccaagctcacaggctgcttcccctgtgtcacccgcagaccccatccctccctccctggagtccccatctggccccaccccctcaccgaagatcctcaggccccaggaagcccaggtcaccatagttgatgtggaagttgaagtcatggctgtagcgattaaaggtgatgactttgcgttgagggtagggtcccatgcgggagaagaggacgcgcttattgtgcttcaggctgcggaccccagtctcctcctccacctccctcgtgaactccacctatatggcaggagaagggaggcccggtggagaagcacagcagggtctggggtggggaatgccgatggcaggaagacagagggataggcttgagcagacagtggagatgaccctgggagaggtatggggagccttccacccagcacacaggcttactcaccaggatggggtagatcactgcatcccggacgacgaaaggcttcaccttgaaggctttgctgagcgcggccgcctggtacacagcccccatagcggcggcttcgtcggcattgatgttcttccccagctcctccctgtgaacatcccaaggctcaggaccatccatctgcagcctggcctggcccccctcccctcagccctcctgctgctcaggccccacactcacttgcccacagccttcagcagcacctcttgcactttggggacacgagtggccccgcccaccaggatcacctgctcaatctcatcctgtagggggagaaagcgggggatggggtcggctccgaggtcacc

SEQ ID NO: 45384 - DNA, 1275 bp, Bovine  19866880851753
  misc_feature (1)..(1): n is a, c, g, or t
ntggggaaggagtgctgtctctataccttctgtagaaaagtttttttcaactgtgttatgacctattagtggctagtgaaatcaatttagaggattgcaaataacaatttctttttaattaaagagaataaaatagaacaattcagagagaatttaatcaaggcaaggattgtttttagtatttcttaacttctctatacagggttgtgacataaaatgcattgctaaattttactgcatttcacagtaaaaaataaataaataaataaaaacactgccagagtgaaaaaagcagactgccaacagcttgtacaatatgatcctttaaaaaaagtaaaatctaatttatatatatacatgcagagagaggtcaaaaagaatgttcactaaagtactgtcagttaattgacttttaatggcaagaggaaaggttcattccatatatccttgctgaatgagttttccagaatgagtctacaatgtttttataaacaaataaaaaaagcacaattaagaaaataaaccaccactctcactggctgcctttctccctctgtggcaaggagagtcagattttccaccatcccttgggctctttccccttcctgtgtcctgcttccttaccaagcagggtcctcctcctcctcttcttcctccccggagccctgcaggtgctgctgcaggtgctgagtgacatgctcgcagaattcctccatggccgagcacacaaaggaacaggacccccactcacactgcagccccaggttctccttccggggaactttcccaggtggcggcatggccttcaccctagaggaggaagaaatcagcacctgtacagattccacccaagtgctgctgggggttaacacgggacagccaggccagcctggagccaagagatgtttttcagtgaccctcaagaaacgctgtgctttttcagtaaggacagagtagcagttcttcaaacccctggaagctgtttggtgttcttgggaatggagaatacaaactgacattattgagcacgtaccaggctctgagctaagaactttaacagacactttttcaaggagcttcagagcaacccatcaagaaggaattactcctacaaaaggcagaacaatgctcaggttcaaaaagatgactttgaagacccagagctcagattcagactcctttgttcaccacctacttagctgtgtgaccttgaacaagtaagcttaacccttctattcctgaacacccttattttcagaatggggataacaaacc

SEQ ID NO: 45385 - DNA, 1609 bp, Bovine  19866880918196
  misc_feature (1)..(1): n is a, c, g, or t
nagtgccctggaggttgggggccttgtaggcagcatcgcagctggctacctgtcagaccgggccatggccaaggtgagtgggcagaagggacaggaaggaggagggtccctttaaatcttcccagcatgactgggacaccagaagtgggagccctggggcacatgcagcttggcatgtgctggtttaggctggctgaagtgggaatgtttccaggatatttttcttcattaagaatgtggagatgaagttaaatgatgtcaaggagagccagcatttctctctgcctagcttctccacagccccaggaaaactgggtgcagcctgccagcccatgtcctcgagcctgccccaggtggagaaggggatgttgtggagtttggcctcagaacataataagcaggtctcagggcctcccagagctgccctgggccaagaactgcagtgggattgccaaagaccagccagcagaggcctgctgtgtcagagtccaggggtgggggttctctgctgctcctggggcctgacattgccaggactgtgcccacaggcagggctgtccatctacgggaatccccgccatggcctgctcctgttcatgatggctggcatgacggcgtccatgtacctcttccgggccactgtgaccagtgactcccccaaggtaaagagggcctggctcacagcagggacaaggatgagaaagcaagggccactgactctgtctccctctccctggcctttctcggactgtccttttcagcggttcgttcctcagttcccctcttctatgctctggtgcccctccttgactctgggcctggtttcttctccactctgtgctcctctaggatactgctttctggactccggctcttcaccctcttgctgagatcacaggctttacagagaatgaggtgctccatctttatctctggtttctctcttggtgtgtctcacctttatcctaccgcgctctgcctcgtccctagccaatctggcttgcacaaatcttgagaggggacagcatctaactcaagagggatggcttccgtacctccctcacctacccacacaggcccctaggtcggttcagtgtggcccctgctcctccagtcctgtagtcacatgtactgggaagtggtctgtatgcaggagccactctctccttacaactgtttgttcccagggccaagcactctctcctgtggcaggggcaggtaggtggcagtctttctcaaactctaattgccaccctgcactgcctttacagctctggatcctggtgttgggagctgtgtttggcttttcctcttatggtcccattgccttgtttggagttatagccaatgagtgcgcccctcccaacttgtgtggcacctcccatgccattgtgggactcatggccaatggtaagtgatacccccactgatgccttgcactcaggcagcgaggggctggattaagcccctctggctccagcctcacagtgacacaggctcttctcctcctccatgacagtgggaggctttctggctgggttgcccttcagcaccattgccaaacattacagttggagcacagccttctgggtggctgaggtgatctgtg

SEQ ID NO: 45386 - DNA, 1258 bp, Bovine  19866881014380
  misc_feature (1)..(1): n is a, c, g, or t
nccactgaaaccccgagcccagacgatgcagcaaagtgaatgtctgccctcctgtggggcatagaaggaatccctgcttcctgaccttagttctcgtggtgagaattccttcagaacaggaaggaggtttgaaaaaagtagaggatacagacataatattggagcaaaacagaggagggtgtttactcaagaaacaagcaagattgccaactcgggttgaggtgggtggtcgtgaatttgtagtggaaccagtctgtccttttgtgtgacttattcttcaataacactcaactgcaccagtgtcgtggtgaagaaagcttggtgcagatttcctgggcccttgaaccaaaagtggagtctttgttttaaccaagcaactgtaaatatagaccactgacttaaggcagattatggaggaaattatctgtcctagagtaaatcaagtgcctataccatgaatataggaaactggaaagtcacacgcatcagatataggaggtcatgctgagggtggtgaggccggaatccggagaggccgtggacagaagggtccgctgccctcacttcacgaccggcggctgcagcctggatggcactgcccagcagagccagagaccagtgtcgggtcggggggggagcactgaggctgctaagtgggcacgtggatggggagccccccgcgggacagtgggacaagggcagcggcttttgacaccaagcagtgacaagtgtttaaagaaggggacggagcgagcatacgccagcggagacaggacagaacccgcccgggagcaggcgaggtctttgttctgcttaatcaggtctctttgtccctgacttcaagcctaatccagaacagaccagcttagctggcccagacccagaataaggaagttcattattactgggtagaagggaacagttaccccattaaaggcagctcccaggcccctctgccccagccgccttcctcacgcagctgctgttttgactgcacggttcctgcacttgatattcaagttccatagtcatttcaggaagcaatctgtattaataaaatgcaaatgtatacatcgtggcatctcagtgacaagacaatttcctctggcacttactttgtcctaacctttttgcaaggttgagaaggtactatctccaatattccttgttaatttttctaggcaatgccaattaatttgctgaatggattttaactttatggctttctttttactgtttggaagcaaacctctaatca

SEQ ID NO: 45387 - DNA, 1107 bp, Bovine  19866881033541
  misc_feature (1)..(1): n is a, c, g, or t
nggccgctgcgaggattcactgagacaagagccgtggcacagcgtaagcatggagtgacaaccttttaatgggtgcccatcagcagacactgtgccaggtgactgagccctcaagacagatatagctaagcttcagataccttcaggggccccctctcctgagaacgtgcccccagccaccaccccaagtaggacagcctgcacctatgccccttcttcaatcgcttacgatccaacgaggactggcgacggatatgatctaagaacttggtgttgttggcaaacatgcccccacaggtgggacaggccaccaccttctcctgggtatggctgcggaggtgctctcgaagcttaaagcggtccttgaaggtgcaggtacagcctgggaaggaaggcccggtcaggtccagccacaaacccccagagtagggtctgcacccccaagtctctccagccagcacccaaccctgccctgcaggactggtcctacccctagctgctctggtcccttagcaaccccagagtttctttagaagccataaattaaggagtggccctacctttccagccacagagcaccacattgttgtccttgccaactacttggtattcacaacacaggctgtgcgcttccacgtgccggtagaaccactcggggttgtcgaaggagttctgtgccaggagcaacttggggtaaggactgaggaagggtggagggactcctactctcaggtgtccagaggggggcttcttggttctctcccaaattaattggtgggataggaaagtttgagcaaggggctacccagaaatgaaggaaagctactagcaggaacttcaggaacatagcgtatcccagaaaggattaaggagtcttgagataagatccccaacccctctccatccctactcctggctctgtctgctgacctcacagtgctcccacaggcacaggaagtggtcggggatgtcagggatgaggttgcggctctggaagtccaggatgcaggggctgaggtcagcctggctctgcagggccctgcagtccccactgtttcagcttggtgtggtagcagtggaagtagacatggcggatgagatcagcag

SEQ ID NO: 45388 - DNA, 1654 bp, Bovine  19866881173577
  misc_feature (1)..(1): n is a, c, g, or t
ngctagcggccgggacctggctaattcctcaaggcagagagcaaggtggcattagggagcagaaagctgcttagcttaggtgttgtaagagcttcctaattcttccacggcagttgaagcaaactgctgcagccccatccagggagcagaatgggaagaactgaggagggggcacagactgggcacagacagaaacaaatccacagggctcatttccctggcaaaccggggaaagccaacttctctgctactgtagcagtcttgtccgaaggtcaggccaaggaagatggatggttagaaccccaatctccccaccccctccaagggaggctaatgtccagctgagtcagctgtcctggggagtcagtcgtcttggggagtcagtcctgacagaggaacaaggtacagggagagctgggtggaagactgagttcatggtgcagactgacagatgccatctggctttctggtcagctgagtgaaggaggaagagcaatttcttgtgtgtctactgtttccaggcatctgggcagctagttgagtgaagccctccaactagtggtggctggaaatggagaaccctctgagcgaggcggttcataggctgtgaaggccaagatgagtggggatcccaagacaaggaggtctcacttcccactcccacctcagtcttatgaccgtgcttcctgccccacttcctaggaggccagctgctggtggtgcaatgggaggaagtaggctgggctggtttgtgactgaccctcaagggactgctctaggcttatgtgctgggagggccatgaattgtcagtctcctttccacctgaacacctttccttccacacagacatggcagggagcatgaagaaggatgtgttagactggagcaatgaaattactgagggatggggggtgggtgggattcaggcttctcggggacctgcctggtcacaccagggatctggggcatgaagtgctgactgggtgtggtggcaagaggaccaagcagattctttcacaggtgcacctcttttctactcctgccagccctgctctccccccactgcccccccccccccacacacacaaccagcacccaggctaggcggaagtgccctggggcacagggattagtgttgctatgagaacagcaagttgtgcaccggtttggagccagagagtacctagaccacaggaatagaaaattgggatatagctggatttccacaacgcccaggcacacctgcacccttctctctgaccccagaggggaggagatgccacggggttcctcagttgatccccacccccatacagtcctcctggcctgagcagtccttcctcttaaaaaaaaaaaggcagagtgggggggaccatctaggtcctgtcctactcaccccatccctgcaggcctgctcgttcagcgctcgcacccaagcccgctgccagttctcccggaaagacttgaaggcgaagagagatgccagaaggccccggacgcctggctcctcgggtgcgccggcccgagtcgcccttagcctcagcagcgagcgccacacgcccagctcccgcagggagacggcgggctcggcagcgaaggcgggtccctggccccggcccccgcgggcccgcgccagccacaatccccgggcat

SEQ ID NO: 45389 - DNA, 1696 bp, Bovine  19866880340941
  misc_feature (1)..(1): n is a, c, g, or t
ntgccatttatggggtcgcacagagtcagacacgactgaaaccgacttagcagcagcagtaacagcaggcacttcagagaggagttaaagaagaggttatgggggaaggtctgcccagggaagaccccataggatcctgttcagtatctagaatagtgcaaggcatttagcaaaaatttcatgaacatggaatttagaaattagcccattcaatgaaatggtcttaaactatacttggaatgctatggcctcaaataaatgaaggcagtttggtgtctatgagtagggaaggtctctgagcattgtcttcttgggtcagaatcctgctttatgtgactttgtacaaattacttttctatgccctagatctctcaacaggcaacagaaataataatagtgcctttcctacagggattttgtgagaattaaaccaaatattgcacataaagcattgcacatggaaagtgctggacaaagtaattgatcacagattattactaatatcatgatcattttaattatgtgataagaaaaatattcatcttgtctttagctttttaaaatttacattttttccctcaatttttcaaaaggcaaaatcagggatgtctttcatgaaggtaccataagctcatctgctgtgatggtgctggtgaatgccgtgtacttcaaaggcaagtgggagtcagccttcaccaagaaccagacccaaagttgccatttcagatctcccaaggtatggaattctgtttaatttaggaagatttttgccaataatatgcctttacagggcttccctagtgactcagacagtaaagaaatcacctgcatgtaggagacctaggttcaatccctgggttgggaagatcccctggagaagggcacagcaacccactccagtattcttgcctggacaatcccacagacagaggagcctggcgggctacagtccatggagtcacaaagagtcagacatgactgagagactaatactttcactttcacacagtaatcttagtatagtagaaacatcaaagactttgtagtcagacatgccacgttagggttcttaccttgcttcagaggaattgccttgtcttagcacatgaaccttaaaaccatagtctttctcacaagtaaaaccaagtgattccattagttcacctagaacattgctttcaatactttggtcacctgatgcgaagagctgactcattggaaaagaccctgatgctgggaaagattgagggcaggagaagaggattacagaggatgagatggttagatatcatcaccaactcaatggacataaatctgagcaaactctggagataaagaaggacagggtagcctggagtgtggcatttcatgatgtacaaagagtcagacacgactttgtgactgaacaacaacaacaaattcctttcaatcctcagtttttcatgttgaagcatagaaattcagatttaacgtttaaacatagttttatttttaagtggaaaatgctattgaaatgttctttctgcatctttccacatcagaagttttagacacaggagtgctgagagctcctggaaatcaaagatgactgataagtgaggagatgcgcagtaagaagttgtctagcaggccgtgtctgtgggggagaggagcgctttgggtggaaggagaagaaacttgagcacagagtagatca

SEQ ID NO: 45390 - DNA, 1071 bp, Bovine  19866880454627
  misc_feature (1)..(1): n is a, c, g, or t
natgggttgccgtgccctcctccagggaatcttccagacccagggatcgaacccctgtctcctgcatcccctgcattgtgggtggagtcttgtactgctgaaccactggaagacctgccctcccatccccgatttgcctctcctgattgcattgtcatcaggtttcaagccctgcaattggaacatccaaattgcgctccttatctactggaaaaatgtgcctttaatttttaaagacagttcttttaaagccctgcatagctttgatcatttttttctctttctaacaggtggtgctttgtatatcagttgatgtatctcaagactatagccaagtagagaacgtcataaaacaagtaagaggttgggtcagttgaagttaatccactcgccttttgattggtccttgccggtttgacgtgtggcttggagttggcatatcttccctgtaggtctgatagttttatagattttatttactggcttgatgggctactcacggcttctttatttctcttcctcgatgcccaatttgataaacttccaggcgcaggagaagctgggcccggtggacatgcttgtaaactgtgcaggaatgtcactttcagggaaatttgaagatcttgaagttagtacttttgaagtaagtaaaaatttgtttcttttctcactgtggtggcccatacactaaaagggagaactgctgctgctgctgctaaatcgcttcagtcgtgtctgactctgtgcgacccatagatggcagcccaccaggctcccccgtccctgggattctccaggcaagaacactggagtgggctgccatttccttctccagtgcatgaaagtgaaaagtgaaactgaagtccctcagttgggtccgactcttcgggaccccatgggctgcagcccaccaggctcgtccgtccaggccagactactggattggggtgaacggggaactagttcatggctaaaactttatgaatgaagtaggtgaaatgcattccagttcaacagaagcttcagcaaactacaggaaggctggacagggttttagtcccagtgatcatc

SEQ ID NO: 45391 - DNA, 1683 bp, Bovine  19866880467316
  misc_feature (1)..(1): n is a, c, g, or t
nattatggtttcagtttgtctgccctctgttgccctctcgcaacacttatcatcttaacttgagtttctcttaccttgggcgtggggtgtctcttcatggctgctccagcaaagtgcagccactgctccttacgttggacgaggggtatctcctcaccaccgcccctcctgaccttgaatgtggagtggctcctcttggctctcctgcgcctgcacagccaccgctccttggacgtggggttgctcctctgggccgctgtccctggcaggcctgagatttcctggaactaaggaagtggctcttagatttcccccacccccgcctttatccctgcgcttttcagcaatttgattttgatgtgcctcagttaagctttttcacttgcttttgcttgctatttgttgagcttctggtatctgtaagtttgtcattttctccagatttgaaatatttttatctattaattcttcaaaacgtttttctgcctgtctcttttctcttctgaagactccagttccctgtgtgttaggctgcctgaagtcatctccccacttattaatgccctggcttttcatttctcccacaggtgtttgtccgttttggagagtgtatgggacacaggcacccttcatggaagcagtctaagtggagagactgcaggtctctggagtgcctgtgcggctctcctcccgccaatgcacacgtttcctttacttttcccagtgttttggttgtgactccgtttttgctccttgtggaagttttccttaataagcattttgtgaaagaacgtggacatacgcattcataatctggtgttattccctgtgcctcttacactctttcagtgctatttaaaaataaaatcttcagcagaagagagtgggggaaagccatgaagcataaatatgtgcttatcatttttcttcacttataaaaattggttgatgtaaattagctggggtttagttttgttgttgttcagtcactgagtcatgtccagctctttgccacatcatggactgcagcacaccaggctcctcctctttgttttctgaagtttgctcacattcatgtccattgagttgatgatgctatctaaccatttcatcttctgacacctgcttctccatttgccttcagtctttcccagcatcagggtcttttctaatcagtggctcttcatatcaagtagccaaagtattacctattcttaatctactcagagtcacgaagaaagagacaagactggattaggcgaatgggagaagagccacagctgggttgggcatggagaagaaaagatgagttgactcagcacagaagcgtttttctttgcaggttgtgtgtggcagccctgtcggtgaataacttctgcgataaccaggaggccctgtacggtgtgtttgacggagaccgcaacgtggaggtgccctacctgctccagtgcaccatgagcgacattctggcagaggagctgcagaaaacgagggacggggaggagtgcatggtcaacacgttcatcgttatgcagaggtagagcttccggcactgctgcggcttcatgctggttcccggtcacgctgtaaaaggccaggagtgaaggcattctccctgtgttgtgtgtgtgtgtgtgtctgtgtgtgtgtgtgtgtgtgtgtgtgtctgtgtatgtgtacata

SEQ ID NO: 45392 - DNA, 1686 bp, Bovine  19866880476095
  misc_feature (1)..(1): n is a, c, g, or t
ncagtgaccggggacacttctgttgccacaagtggaagaaggcatgctctggcatccagggttccggggtgccatagcactgcccccctgcgcccctccccctggaattatcctgtctgaactgccagcagcgctaaggttgagcagccttgctctctgggaaccacagagcaccgtggtctctgtgtcagatggtcaggccccgtccccaggaggctggccatcgccatgtgtcctccgccacgggagcaggcagtgcttcatgggtgatggggatttttttcttcacaggtccttcattttgaaaatgtcaaagatgtgccctttggatttcaaacagtaacatcggatgtcaacaagctgagttccttttactccctgaaattaatcaaacggctctacgtagaaaaatctctgaatctttctacagtaagtggctcagtggaattagcaagattcagctgtttaccaggggtgacgttttctcatggttagaccaacgactttttctagatgctcatttatggtttatttaaaataaattaatcccaggggagaggttgaatacagtgggaatcaactgcagttacatattttaacttaaaatacagaggagccatgagcttccttttttcactctcaaacacccacacaccccaccctttctcttagcttcctcactgagagaggtgggaaatggggttattaactctctaacaaatgcgtctctatagatgtaagacagcccgtgatttaaacctctttctccttcagcgtcagggcaggtgacctgggaagatttcaacttcttcaccttgcttgttcatgcacacagtattcttctgatgtttcccaaagtcagtaaggaaaataataactgtacgaagtgacagttttcgtcagtcacagaccattttgtttgttttgccaggctggtcaggtgggtatccaaggcagtggtggtaattttaggagtttcttggaggaatcatataaagaccactgaaatgtccttaaatttgatccagagtgaatcataatattttaaaaatcttcacttgaaacacgcagccaacttcctcaactacagagatgctcattctctgctttagtaatatcgagttcagtttgcgtttggatggtcagaatttcaagctttccaaatctaaaaggtggactaccagttaaatattttgccttagttttactatcttcaaataaatgtttgtattctggcaagaatcttttggggatgtagatcactagatactgttgtgagtttgtttttgttgcttaaagacacacacacacagccttcttcttccaaaataacctgggggaattaaagaaatattgagatgtgagttggggcccaagaatgaaaacatttaaaaaactccctaggtggtccttaaagatacttaaatgcattttgatgctggcggtgaagacagtggaggcccttcctcttgcaaggtctctggaatgttctaagctctgtcagtaaatggtaactcagtcccaaggttgggttgcagtgaagagaatccaactggctaaggttctgactgctctgaaaaaaatccagggagtcctgtattcagaagtaaagtgacatggcatttaatcaatctgtgtttagttggttaacttccattcaacatttcgaatatttcaaaccaggag

SEQ ID NO: 45393 - DNA, 745 bp, Bovine  19866880514109
  misc_feature (1)..(1): n is a, c, g, or t
nttgggaggggttgcaggaagcctggggctttgctctcattacagggacagaatctaaaaaaaacaacaacacccgagtgtgtgccttgtccgccagctttgctagtggcctggcaggccgtcagcaagcagatgtgcactcaaaagaccacgcaggtgcagctggcaccgcaaacagcaggtgatgcaaaggagcaggaaattcaggatgcctcaactcctggctgacttaaactccaaaaaatgacgcgcctttatattcctgacgttcgcccaggtttgagtactataaaaagaactggagaagaataaaatcagaaacacaccttttggcattcttaaaataaaatgggaaaaaaaagctctggggactgacaggaagaacaccagagcaggcggcattactcactgccatttagccttggccgcgcccgcgcgggtggcctgtcccgtcccactgagtggtttccatgaccccgctgtcttcttttgttcccttctgtgctctacaattttatcttaaatgcccagtattctacaaagtctctaatagcttggacgttcattatccgcaagggggtttcagttcactgctgctaagtcgcttcagtcatatccgactctgtgcgaccccatagacggcagcccaccaggctcctctgtccctggggttctccaggcaagaacactggagtgggttgccatttccttctcttctgcagttcactacctcccctaaaacaaa

SEQ ID NO: 45394 - DNA, 2072 bp, Bovine  19866880554286
  misc_feature (1)..(1): n is a, c, g, or t
nacactaagttggaaaaactctgacaatccaaatcttgttgagtataagacgtagcctgcaccaccaggctagggaagaacattagaaattcaaggctgcatttcgcttcacccagctaacatttaagttgtcattgcccagttgctcagtcatgtccagctctttgtgacccccatggactgcagcagcaggcctccctgtccttcaccatctcccagaatttacccaaactcatgtccattgagtcagtgacgccatccaacaatctcatcctctgtcttcccctcctgccttcactctttcccagcatcagggtcttttccaatgagtcggctcttctcatcaggtggccaaagtattggagtttcagcttcagtccttccagtgaatattcagggttgattgacatctaagtcacactggtcaaaccaaagctgtgtcactgaatctaggatttcacctcaatcattgcagaataatgtagtatttaatatacaagaagatgagtttagatagaggtcaaatctaggctttgtcactttatgtctgtggcctttatagaatctgcttcatgattgtagaactgataacaattttatagctacatcttacaggactgtgtgaggaatacgtgagattgagtagaatgactggcacataataaacactcagtaaaactgtatatgtaaatgccactggaaaatggcatcattcgcgttagaatttgggaactagaaagaacgtaggctaatcctctcattttacaggtgaaagatatttgtccaaagtcatgcctcaatgggaacagctctcttggctcccagcccagtgtactttccattaactctcaatattctgccattaaggacctttaaaagagagatgagaaatatgttttgttttctttctggctcataagggataattattaccaaatttgttttgtgtttcatccatgaccttactcttgggcaacaccggcgatttgcaggaagttatgtgacatttcacaaccttaaataggagtttggtaaaaaccatttcactgagactctatttccgctcaaatgtaatctcttgaagatgaatatcatgtgacacttcttatccttcattttattttataatgtgaaattcagaggatgccaagaaagctgttgacaactgttccagagggacttacctcatggagtgccatcgcctttgtcccgtagagtctgttggcgatgctgagggtatagttagagtctggcctattgatctgggagaaaaagactcctaagtctgagtgaatccttccagcttggttgcactgaagcaccagtaaataaagaagggagtactaaattgcttgatttcttgccattagagagtataaataatgtgaaagcaataactagagagcaggacgtttgcctctgaatagaagggcagtgagtatgaacaaagcaagagttggcagcggaaagccttctccttctccaggtttcctctcccacaataatctcggcactctgggactttggctacagaccatgtgcagaattgtaaactaccgcaaacacacaaggacttgtcagctctcgtggtttaacccaaaaccggacattttaatgaagagatcctagtggggattttcagagcgatgatccgagtgtgattgttgcctttgcgcctaaagaatcactttccttctctctctctcatgctcctttcaatgtctccattttctatgtgatcatttaatcaaatactgagctctttattgaactgacctgacacacccatctgtccatcacagaagcaattcacttaagcatgttttttttttttttaattgaaggatagttgctttgctgacttttgctgttttctgtcagacctcagcatgaatccgccacaggtacacatatatcccctccctcctgaacctcccttctgcttccctccccatcccaccctcgaggttggtgcagagtccctgtttgagttccctgggacatacagcaaattcccgttggctatctattttgcatacggtcatgtaagtttccatgttactctctccata

SEQ ID NO: 45395 - DNA, 1591 bp, Bovine  19866880556987
  misc_feature (1)..(1): n is a, c, g, or t
ntgtagccgaatgggcctggattagaggttagggcagagctgtccagggagaggacctcacatctggacactcagacctcaggacgtgcgggcaggagttgcatcaccactggctttagatttgcatttacaggaagttcttgcctctcctctaccctagcccgtgactttgactaggattcttactgcgctgccggatgcagttgagggcacttgaaaggtgctttagaaataacctctcccttgtcctttattccaggcccacaatggaggccctgcgactggcaaactcggcctttgcagttgacctgtacaaacagctgtgtgaaaaggagccggcggacaacatcctcttctctcccatctgtctgtccacctctctgtcacttgctcaagtcggtgccaaaggggacacagcagatgaaattggacaggtaaggcccgcagcttgcctctgctttgagtggaagagagtaatcaagacgcaccggtggtgcctggggaaaggcagtgaggctctgtggtcagattggctcagggctgagtattttgccacttctagcactctctcaatttactttttaaatgtgaaagctcatttatctggcctgccacccacgtttagaacaggcactgtgttgcgggggagaacccggggattaactagacaatcaaaagcatttccactaacaagtggcctttgacaagtcacatgacatctttctacctgttagaatgtaagtgtcaatcaaaaggatgttcgttaatgttccactgcgaataccccaaccaggaagagtgatatctaaaccctctgtcttatgcacagaatttattaaagcatcatgctgtatattaagatgcagactccactatattctactctatagtatattctgccctattctatatccttactggatagatagaatgtacccatgcttatttcaatggagaatttacacttgaaattgagtgggacttgaaaaggacacttcctttgtggggagaggagcttcatcttttcatccctctttctcccaccgcaccatccctaccccatctccctttcctcacgcctcacctaccattagagaagagacaaaagagcgtttctggtactgcgcctgctattgttctcctacagtgggtgcttgggttcttaactttctggtctgtttgcctgtcaataggcgtaacagtaatgtaccactttggaccagccagtttgaccctgcaggactgaggctgtgtgactcacgggtgcagtgtgcccataagtgatgtcacccgaggtgtggcatcagggctcggttattatgggtcaggatgtggagagaagcaccttatcctgatgtcatgttttgggcaccatggaggtgaaaagaggctgggttattggttggaacaaaaaagttacgaataaaataaaaggttttaagacttccagaaaatagcatcctgattttaagtggcttattactataaaaataattattaacattttgaatccatataatattctaggtgttttacagatagtgtctgtaatcctcacggcaatttagacaactaggcgttgtcagtccat

SEQ ID NO: 45396 - DNA, 1219 bp, Bovine  19866880601042
  misc_feature (1)..(1): n is a, c, g, or t
ngtaagagatcagttatcctgtatccacatgactgctggtgtatttacatgtttgtcacagtctgcggtgacataggggcctcaaaccccaacaggctgcgcgtctcaatcagggaggccagaggggggcagagagaagcagatggaaagacaacaggaaaagacttgtttttaacaaattacttttcctcgtcagtagtcaccttttgtcatttttgctatcttctaaaagggtctctctctccacgtcccacacacacacacacacacacacacacacacacacactgccatccaaagtccttttgataatggtgacgggctctgcgctggttcacctaagctcactgagcataaaactcagcattttcaaatggactgaacttccaggtataatataaggctgagaaacaaagtaaaagtaacagctttccaggaattaaaaatggaaatttagtttttaaattaaattcttctcagatttcttctatgagaagacagacacattgagacaatagacagaaagtaaagattcttaaaggactaagattaccgaggtgaagcagccgtatcatctgcggagtctctggacatttctttggcttatttgagaaaggactaagattaccgaggtgaaccagccctatcatctgcggagtctctggacatttctttggcttatttgagaaaggattaagattaccgaggtgaaccagccgtatcatctgcggagtctctggacatttctttggcttatttgagaagtcccaccgagcgtcagcctccacacagctttgtcacgtctggctagcagtcaaagcttcagtcaacctgtcactacatgacgaaatactactccttaacagtcccacgagaggtaagagatgcgaaataaggtttgaaaggaaactctttcaggggttcataacaacaaattaaacactgaaccagcaattttttccattgttcatcttatttgagattctctaacttaatctgtgcttaatactcaccgtgcaggaagttcacatatttgattatggccaatatccaaaacttctagctttcggctttcacagacccactcaggtacgttttctaaacagttcctaaatgtaagaatatacagtttcttctttggttggaatgtggctcaaaacatggttcacaagtcaaaataattacatacaacaaataaaacttcaaaggaaatactcaa

SEQ ID NO: 45397 - DNA, 1577 bp, Bovine  19866880652925
  misc_feature (1)..(1): n is a, c, g, or t
nataaagaacatgcctgccaatgaaggagacatgggtttgatccgtgagttgggaagatcccttggagaagggaatggcaactcactccagtattcttgcctgggaaatcccatggacagaggagcctggtgggctacagttcatggggtcacaaacggccggacgtgactgaagcaagtaaacaacagcaacagagcagacaggctgcaggcactggtaagtttccgtggtagcctaaatgtggatgccctgcaccagcctgtggtcattatgattattccccgagactgtgcctgcctaataggccaagtgctgatcaccaccacgtgctctgcgccagacacttcttatttaccgtctgttcatgtgccgtgtgtctcattttacaggtgaggaaactgaggctagcgagattaagcactttgcctagggtttctcagacgatgaatggtaagatagagtcattttccaaatttatgatttgactcttaaacccacatttccccactacagctgaatggtgtcattttccaggggtagctggccagcatcactctctgatgaccttgttgcctctactagttcccctgatgcctgaaattctactttcagagttcaactcatttagtttatgactttgacctggttcataataaaacgcccagggcgtggggagaagggaagctattagtcactcttcgtcactctcattcatatagccaacgagcgttagttgactgcacatctgtcaagaccataccaagtgttggcattacaaaaatgaatgaggcttggtccttacttcaagattctcatagtgagatagaggagattgtacagtaaaatagaagattatgagataacgtggtaaatgaacaacagaacatcaaatgagcatagcagataagcaattggctcagatttaggtcctttcctgagaacagattcagttaggaagggagtagctcccagcaaaaaaaggagctgcctgaaagcaagaaaactctggaaaacacaaagagattttctagcaaagatgggtaatcctaattgccatatttcatcgggaggcccgtcaacagtttctcccaatctggtattacatattttgctgagtagaatgtattcatagattctttttttgtgtgtaattacttttctcttttctggcatctagcagaatgagctatggaggtgagaatactttctgtggcatcaccatatttgaagagtatgaattgtcagaaccatcacatactccttctattttatgtaatatgtcaccttccggccccacgtggcctactaggggtgcccttctgtgtgtatgcatgttttcagcctcaggggaggatccaccgacagtgtcgtcctgcctgagcacgttggaggccttcagaagctgtgcagacaacagcaacttcagtctgaatcattcttttcaatcgtggacaagctgccaagaggcgggagccagaagagcaggcgcagaagtgggcggggcggggcccggtgggcgtggccgcgggcgagttcaggtgagtcgctcctgcccagcagagctgctctcacgtcc

SEQ ID NO: 45398 - DNA, 1536 bp, Bovine  19866880666171
  misc_feature (1)..(1): n is a, c, g, or t
ncaggctcccagtgctctcccccacccagcttcctgctcagctcttgtcacttgataagttcatccagttccctcacgaattcggtgcagtcgtgttctgcaggcaactttctccaggtccctgggctgagctaaataatccgcagccagtccctgctcactgtattctctgaaggtcatctgtttacatgtctgtctcccctcattcagctattagcacctggaggtgcagggaccatgttttatttatccttggatccctggagcatgtttctgtcacatgtcaggcactcagcgtatgcttgtggagctgaaatacaccttactgtagaccaggctttccaaacacactttaatagatgatgtttttcaaaaggagcatatacaaaggacaaataaactttgcactggaacaaaatcagatgcctttttttttgctgcagcagcttctagtgtcttccggtgaagaactcaagttcagatcgttcagaatggtcagcgctggatgtcactggtcggtgtccgtgccacattggtggtggcaatgtgatattcaacagttttgaacagtatcccacccgaacgccctggagtctccacaggaggtataagctgtggggcatttccaagcccactgaaccatctgtccctctgtcagggagatccctgtcttgtgaagactgagaatgcagagtggagctaacaaagcagtaattctgcgcacggcggtagaggcagcgctgatgccccctgtacaggacagggcagatggtcaaaggtgtcaaggcgatcctagaccttcatgggaacatcaagaccgctggtggctccttgtcttggaatctcctaagaggtatgagtgtgtgtgcgcacactcacttgctcagtcgtatctgactctttttcgaccccatggactgcaggctcctctgtccatgggattttctccaggcaaggatcctggagtgggttgccattacctcctccaggggatcttcctgaccaagggtcggacctacgtctcctgcattggcaggtggacgcttcacctagggccacctcggaagcaaggggtgtgagccttgttcccagtaaacaggacccatggtttctccagtgcccagaggcaactgacgtccaagccccacgcgagcaggaatggtgggaagaagaggaagccacgcagggagggagacacctgcagagcagagagcagggctctgcctgaagccgggaggcagcgatgcctggacgcccactggggctgagatcaaagggggagtggtggccaggccgctgggcatggtggcctgcgcagcacacgcgaggaagccagggctgtgtctacctgaacacagcagctggtgaaggaagtgactccacttcccgccttatcattggcccggcaggatttcctctgcagccactttgtgctgaatgagtctggaaggttccgtctggagcagagagccacggtgggcggtggccaactccagtcccctgagcgcttcctccctcctccccgccccgccttta

SEQ ID NO: 45399 - DNA, 1969 bp, Bovine  19866880687646
  misc_feature (1)..(1): n is a, c, g, or t
nactgtatagaagtgagactgtatgaggaagacaagagccgttgtgccgaagtgagactgtatgaggaagacaggagccgttgtgccgaagtgagactgtatgaggaagacaagagccgttgtgccgaagtgagactgtatgaggaagacaagaactgttgtgccgaagtgagactgtatgaggaagactggagtcgttgtgctgaagtgagactgtatgagaaagactggccaaacgtggaaccgatcccagcacccctgctccagggtgggggtcccgctggcggagaggctcagccgcagctccagcacagggcagcgagctctcaggccagagactcactcttcccaccagatgcaccatgcacgccagctgtcacgggaggcctgagggctttatgaggctgcctgttcactcccccggcttcatgtggaagccagcggtgcttggcttttagaaacatatttctttctctatgagtaatttaaaagtgactcatgctcagcttcaccagccagtgcatgtgacccgcggtgctgggtgagtgtatctatagatgtgtaaaccgaagcagttcttagaacacagcctccccctcccacgtgctgtttatttccctctacttcacaggcactgagcgatgatacagatgagctgctggggaccgcccgctccccactcaaggctggaatgggcccatgaggaggaaacaaaacacagcttccaacaagagcaaagactagaccggaggaggcaggagcggggcagacgggccagcaaacttccttcgcatgagcagatgatcatggagctctgagcaaagcccaggaagacgcaggacgacgagcgttcacctgagcaagcagcaccctctctctgcgtcctagtcgagatttcagacgtaaaaaagtagagaccgcggcctcaccacctccaagcaagccaccacggcctttcctaaaacagaagagtgttcctggggtctgtggtggctggtaactcacgtcgggggaaaagcctaatgcctccagctcgtctttgtcactggaggatgcgcagggcccggagtggggacgctgcgggaagggcctcgggagacacagctgccaagctcgcagagagcctgcagagagctccttctcacttccttttctctagacaaccacgtctgaacactcatttgcctgctctgtgaagacctccgcagtctggcctctctcgcttgacttcccggtgccgtctgcgctcactgtgcggttcgccctcggcctgggcctgccctcgctgcttcctcaccgagccgagcccgtcccccagattcccacccgccccctccgagccccccaacacacttcacccctgcctccaccgcccaactccctgtcaccttaccacctccatcccgcaagtctgcaccctgtttccaaactcggatcatccttccaggagcctggcttagccacccaggccagctggcttaagtgcctccatctctggaaggcctaccacacgtcacctgtctgccctccagctccacttgaggccagacagtcatgtttgtccagttggactgcagagtctttgaggaggggcatcctgctttttgttcccatttatccccacagtactgaaccccacagcaatgggcatgcaaagtccccagttaaaagaaatactttattttggccaaaaaagtattatatgtgaggtcttaccccaccttaaaccctcagctgggaggtcaacttcactatgcgtcctaagtggaggccatgtggagaggaacaaatgccccgaatcttcaacaaaacgacaaacatcagcataacaggtactccagagcactgtgcccaagcatgcatccaagcatttagcaaacgccagtttatctagaggcagcagatactgttagaaccccgcttctcacaggagaagactgaggcagaataggtgactcatataaagcca

SEQ ID NO: 45400 - DNA, 1619 bp, Bovine  19866880712257
  misc_feature (1)..(1): n is a, c, g, or t
ntgtacagaaaagtgattcagttatatgtacatgtatacatacatgtatattacatgttcttctcacattatcttccattatggttcaaaataaccctggtgagtgacagccagaagctaaatctgataacactcagattcgttggatgcatggccgaaagggcgatcgctggcccaagacttaagcatttcacgttcaggtgctctgggaatagaaagcatttgtggagagcacttaaataatgggaagtcagagaaggaggttagaggcggacgacccacaatgtaggtgaacggcaactttcagtgatatctttggtttgtggcagaaattagtggctattggaccaagaatactgtagctacttccctttgtaaaagatcatgttccttatgcacgcattgttatttttctaaattaaagactatatttggtggcaaatcctaacatctcaccatgccacactttaagaattccatgacttgggaatgtattccaggtcaaggaacccagaaaagaacaagtttgacctgtgtttctaaatgggtcactttatagagctgcattacaagacaactacaattgtgtagtgtctcccaagttatgaaaacagaaactccgcatgccatctgtgtggtgtggactcacctgacggcaggtcctagagtaaaatctaacacaatcatggtacaagaggagacctcttagactcagactcttgtaacaatgtctgtctgtctgtctgtatgtgtgcactcagtcacagctgaccctttgcaatcccatggaccatagcccaccaggctcctctgtccacattaggtagctggagaatcaaaactttctgagattggcagccatgacatcaaagctatgcgggggacaaaacccacttccttgtagatttagcatgaagataaagcatgtgtgaaaacagtgtatgctccaccagacactgagaggtccctctgtttataaaattgctccctagttatgtaagatgttgaaattttggagtaaagaatgactttgggttaggcaggccactttcttttatttctcatctttgtgttgtgtaaggtggacatttttattcactttgtatcagcttttaaaaagaggaaacagctagcagttcatttagggagaagaacaggggaatagtctttagataaagccttcatagaaaatgttagttttctgtgaagttgcaaaaagttgcagttcacctagattatgggtcatccgcctctaacctccttctctaactttctattatgataatagtagagaaaatgcagacctatttgggtcaaatgatgatttggtagtcccctcaaagtgcctatttagaatcattattttaattgagacaaggaatctaccagaggctatttatgcatgggtgtctctgagtacagtgggtgaatgaaggaatctcttccttggaatcaatggaagagtctctgtttttcatctgttcccaaggagagcataaggcaaagaaactgtttagatgacaagctctggaagatatagtgggtgtagtaagtgtctctgttggctgtctatcaataaagtaagtaagagttggggaagggacattcttcccatttct

SEQ ID NO: 45401 - DNA, 1477 bp, Bovine  19866880895841
  misc_feature (1)..(1): n is a, c, g, or t
ngggccctttataggagagttatagattcctgttataagtggagattagggtctgttttttccccctggttggagcaaaataaggtattttcaggggatgggaaggaggagagagtgtatatgtacaaatgaagtacatggtaattattaaaatatccccagaatattagtcacattacagaccataagttttagtgactcagacagaatgggtgtaaatatcaaagggactaaaagggaatagaagatttgggaaagtgtgatcaattgaccatgacaactggtgccttttggcaaagatagaaaatttctgacattttgaagagctagattgcctgtattatttttcctaagggaagagagctatcttgtgaagttctgatgttttgatagccatagtgaaataaaatagtgtttctcaaagggtgttcaggatcccctagattacctactaaacatgcatttttctggccattttctcatttctactgactcaacttggccagtcaccagaattcttaattctgtatagatttttgaagcctgtgtgctgtacttagttattcagtcatgtccaactctttgcaacccaatggaccactgtagccccccagattcctctgtccaaggggattctccaggcaagaatactagagtggattgccatgccctcctccattgaaaccttaccctgacctaattaataagaatatctgggaggtaaagttgagaatcacagaacttccggaatgagaacatcacttttgtgtgtttttgctagaagtgcattacattattctaatgataataaaacatcaaacaaatctaaattgagagacattccacaaaatgtacttttttaaagtgtcaaggtcatttgaaacaaattacactgattagaggagacgcatgagacacggtaaggaaatggaatgtgcagtcctcagttggagtctggagcagagcggggacgtgtgtggggtgactggctgagtcaggagaagggctgagattagcttacagcgttgcctcggtgttggttcttaatataattacactcaatttttaaagttaatcctttttgagttcttgttcagcaggtcttccatctgtatgacctttgttcccttgccctgtaggcttatgatctttattgcccaagccaggcacattttcagaccttgccaaataataacgtgtgcattctgttaggctgtacgcatgtactttctcttcccatgcagtctcactattaagcggcattgctatacaatgaataataggcatccttttttcaaactggtaagtggggatgtagtaatttagtgggtttctaccagcacttaaaaaatgggatagaaaatatcagtgtaagacagagtaaggttaaatactgttgcaagaaacttttgtttatatgtgtgtattttgcatcttcactaggcggtcatgtaaaatgttgtactcttagttgcca

SEQ ID NO: 45402 - DNA, 1463 bp, Bovine  19866880900426
  misc_feature (1)..(1): n is a, c, g, or t
ngttttgtttagcaaagtaaatgggctcctctgattagtgtgtctagaacaatccaggtaacatgtctttttaagtcagtcattccaaagctagcttccaagaagtgctactccagccttgagaagcaggcccacattagttatttcatcagaaccctggcagctctctgggtaaagcagacaggaaatctcgaggagagaaagaacctttcagagcccgcttcgggcccccttgcattccttttttaaacatcacaagattgatcctaggccacagactcggcatttggacatcagatgcaggcagatgttttcccttaaatccattgtctctccctcaatctgtttattgctatttccctctcggcctgcacctcaagctctggctaactgcatatccacgcacaagaggcatctttctagcattgcttattttctgtaaggatgcgtccactcaggaggtaacctacctactcgctaccagcgtgtgtgcatccttggccatcctcaagaactgctacaggagaagtctctcagggtttagtcttccctggtggctcagacggtaaagaatctgcctgcggcgcaggagacctgtgttaggtccctgggtcaggaagatcccctggagaagggaatggcaacccattccagtattcttgcctggagaatcctatggacagaggagccaggcaggctacagtccatggggtcacaaagagtcagacatgactgagcgcctaatacacacacacaagattaagtccccaaagttaaatcaggacttaatcagtaagggttttcttgttagaagtgacctttggcggtcacatgagctggtgtcagcctcttaaatcaactgatatcaactgacaggctctctgaatgaggtcagggctatttattcacatcttttttcttctgggctgatcagtgctcttcctacaagtcagaccaaggatctccatctgtaagtcagttatgcagatcccatggcagccaagccaagtgacaggtttcagagacgtatccaacctctctcactgcagactcacccagaatatgacccagacaagaaacagggtaacatctgctgctgcttctcacacccagaagcgccatgagagaagggagtttcttgaaggagatggaatagttctatatactgatcaggggggtagctctaggatcctagacatgggatacagtacacccatacacaaacaagtatgtctaaaaactggtgaaatctgaataaggtctggcgattacactaatgtcaatgtccccggtgttgctactgtatatactataaacattagactagatctacaattacactgtactgtatgcaacacaccactgggggaggcgaggtgaggctacctgggacctctctgtgccactttgcgactttttgcatctatacttactgcaagatataaagtttaaaaagtgccatg

SEQ ID NO: 45403 - DNA, 1294 bp, Bovine  19866880912480
  misc_feature (1)..(1): n is a, c, g, or t
naatataactgtaaaagtgacaaacattttgaattagagagatgataagaaatttggggcagtagactataaatgaattttaaatattacatgtcatttgagaatgctaaagatatttagtaatataaataatatataaataaaaacaaagctaattgtaagcccaccgacacttacacttccttttttccatattctctctttttacatagttgacctcacactacatttgtagttttgcatttttttcatttaatactacaaagaaaatatttctccgtattataaaattctgtttataaaaatcacttttcatggttatgtgaacctgccataaactagtcacctcttcccttactaatcgggcttcccttgtgactcagctggtgaagaatccacatgcaatgcggaagacccaggtttgatcccctggataagggaaaggtgacccactgcagtattctggcctggagaatcccatggcctgtgtagtccatggggtcacaaagagttggacacgactgagcaactttcactcccttactaattaaacatttcggaggtttccaatttctataaacagtgctattaaaaatctctagtggacttccctggtggtccagtggtcgggaatctgcccgccaatgcaggggacaagggttcaatccctgctccgggaatatccctccgtaccccgggacaactgagcccactcggcgcaacccttgtgccggtgctcccgagctggtgctcccaacgagaggagccgccgcagcgagaagcccacgcccctggagcagagccgcctagctctgcaggtagagaccccggagtgcagcaaccaagacccagcgcagccaataaataaacagaaattcttttttttaatctttggtttcagccttttttattggaatctcagatactttctttagcagagagatctaggtgtttaattaatggctaacactcgaacattttggggtttgaccacatcaggtcaaatgttctccactagtgcagagaaggggttgcctttccactgtgacttactaaccagtttttcctcctctaaaacctggaaaccaaaccttcaccctcctaagaaaggcatgaaacggccagcactctccacagcgcttctccgttaatcacttcagtgcaggactctgtgggtggctgttcagagtctgtgattctctcaagtcagctttggagcctccttcaactaatctctctggggcagggacaggggagtgaccatctaactttctgagtattcttaagggaacac

SEQ ID NO: 45404 - DNA, 1853 bp, Bovine  19866880919452
  misc_feature (1)..(1): n is a, c, g, or t
nggatcgtcccgacccagggatcaaacctgcgtctcctgtattgcaggtggattctttaccatttgagccaccagagaaggtgctgttagagatgcaaagttttactcgtgaaaatgagaaatattgttagctgatttgttttctgtagtggttgtgtgtgtatgtttccttgttgttttttgaacaccttggcactaagcaactggtttccctgatcctgaattgactgttggctccaagtcagaaagtcgcagcctctggttcttgcccctgatggtcgctccaagctccccaaggaggaacgcactgcctcatctttctgtcagttcaaaccacatcctgcccgtttccactctccagaagacagctcgtgacaccggtggttttacgatgcggcgggcttctccgtgaagccatagccaaagcctttttcacagaagtgaaaataattcatccaggggttaatgtgtcaggtctaggcatcgactgaaccttctcctccccacccccgcatccctcaactggatccgaacccctgattcaggggagcaaacagctcctcagcctcctctcattgtctcaactcttacaactttctagacagaaactaagctcaaggcaggaaagacagaggtgttcctgagagagggctgcacacagtccagctcgggcccaaatccagccgatgacacagtctgcagttgttggaagggacctgggcaatcttctagtcactttacaggtgaggaaatgccttcattttaaaccctgagaaaacagagttcagggatggttagtgttttgaccaagagcctattagagcctactataagcctatgaaagaacctgcttgccaatgcaggagacgcaagagacgcaggtttgatccctgggtcaggaagatcctctggaggagagcacagcaaacccactccagtattcttgcctggagaatcccatggacacaggaacctggtgggctatagtccatggggtcgcagagtcagatgtgactgaagtgacttggcacaacacacagaacccatcagaggcagagcctggattggccccagggtctctgggctcctggctcaagggcatggtaggtaaaccagttgtccccgtatctgtagtttaaggactgttggcattgctagaattggtgacttcatcctggggactggtttgggtcctggtgaccaaggggctccgctcacacctggaagctctttgctgagagccaggatggggccagcgccaaatggcagacgaagctcttagaacagagcaggtgagtagggcccgcggtgagctcagccacgtccggaacggggacaccaagggaaataaacgtcctgaaagaatctgacactggaggaaggagagaagagggaagaggagaagccgcgacaccctcatctaagtcatcgtccgagaaaatcagaactctgggattctcaccccgagggtggggggctgtgtttatcttcaagcacaggatggccccgcaggacttccaggatcacaggactccggggcaggaggggagcgccgaggcctcgcgcagggctgcagaagggacgggccgccgccacccccgccgcccccgaggcgcgcgggcgcgggcgggattctgcgtcctcccgcgagacctggcgaaggcgcccgtgacccgaggaaagagcgtttgcagagacacctgcctcacagcctcctgacctcggacagtgtttatccccaggctgaggcctcccttatctctcaggggtgcacggtggcctctcaagagttaacttattaactcgacctggacttcatccgggacgccaaggactcataggctccgggggcg

SEQ ID NO: 45405 - DNA, 1698 bp, Bovine  19866880931140
  misc_feature (1)..(1): n is a, c, g, or t
natttatgcttagaaatgcattcccattctgaagtacatctatttgattttggatttgggagggcattaatttctgatccatccatagaatttctttgggagtgtggttaaagataaaagaaagactcatattttcctaagtaattagccagttttccagcttcatttgtggagtggtcctttctttcctcacctatgtatggtgtcacatttatcatatattaaatgcctacatgtgctaaaaataacacgtgctttgagtggaatgcggtgcataaatctgaggcgtttgcaacacgtgggcatccaaccttttccctctgccctccccatccccttcctccccagagattgcaaacagagggaaggaagccagaaaaacataaaacaaggtctgtttctctggataatgtctcagaaggaaaaaagcaggctggggttttatggtttaaaagcgatgacctgcttcaagaaccccaagagaggcgccaagtggccacgtactgggcgctcacccaactccaggcatgcctctgagcacctacagcccacccacaatgtgggtgctgtcatcatgctagagatgacaaaacaggcccggaggtctcaggtcactccccctcaaatcacttggaaggacagtgatctaaaacgtggctataccatccaactgacagaggtgcaaggagcgtcaccttcttcaaaatggttcctctcagcagagatgtcaagtatcacaaaccctcggtcagaaaggtccctgcagctgcgatgcagtcttctctggtgggagggagtggtcctgggtggcaaagtgatcgagccaggtgactggtacagttctgggaactgtggacctccagcgatttctaggtactcattgaactcctgttcttttcacatcaacgcttttcctttccaggaaatagaagaaaaaggcttttcatctctctaactgactaagggaggtgcggcagagacctttccaccacaggatggtgtagtagcccagagaattctgtatctaaatcttaggagacgagtggcctttgagtgtgtgttttcattcatcataatcaatcgttgagtttgtacttttgctgagggactcagtacactagtaaggtgactgtggacacatgccccggaatgtggccccggctcacagcagtgaatatggtacaagctgtgatgactcgggggctccccttgtggctcaacgctgaagaatctgcctgacaatgcaggagacacggctttgactcctgggtcaggaagaccccctggaggaggaaatggcaacccactccagtgtttttgcctggagaatcccatggacagaggagcctggaggcctaaagtccatggggttgaagagttggatgcaacttagcgacaagacaacaaatgacaactcggggggcctcgaccttaggaatctgcttttctctctgaaggggggttctgtttacatgaattcagaagcaccagacaccaggtttggatcgaggatcaagagtcctggattcctggtctgctttgaaacttccgttttcataactaggccctgttcaatgtttttatccagaaaataggaatatcaacacgactgtgtgtttctccgtaggttacgtcaagcgttacacgtatttgaaagtgtcttaaagtgtgtaagctgctgcgtaagtaagcaggtaa

SEQ ID NO: 45406 - DNA, 983 bp, Bovine  19866881014401
  misc_feature (1)..(1): n is a, c, g, or t
nagggcaagtggccccctagtcgttctccccggaaaacaagcagcaatggaaggtgggagtcagtgcagctcagtgttcccaggggagagagcacccgggatttcatttccccagacactgaccaccaggaagaccaccccaggggtggcagggagcagcccactggcctggcagcctggggctcggttctctgttatggctgaagcagacatcacagctctctgtggtttctaagaactggtggaatttgcatgttgagaatcctcgttccttggcatgaagcagactcaaaagcatcgttgctcatcatttgtcatctgttggagaaagagcgtgtgatttgtttacttgtaatgaagcttgaccatacttctccaggggcctttgcaagaaggatgtgtcagcttacagacctgtccccatgaataaaaccacaggcaaatgctccccccatcttcccttctcccctctcatttctgtgctttatgtccccactgccgggccctcttcaagggcttatctgtgggtgagttcagaaacttcagatgataaaggacacccagataattggccggttctccaaagtgtctgtcccctcagctgctgccagattccctcttaatgagtccgtgcagtgacggtggggtctgagctcctccagctccgtgggaaaatgagcttccctgcattgtaacagcttgtggctcggggggaaaatgacagccattgcacaagtttcctttgaatgtagttttctttcccataaatgatacttggagaatacacttaaggggttattagttttctatttcatgcttggcctgtgtgtgagaataacacaagctgtcactgcaaatcagcagctccacacgctttgtcgggttaatgtgagcatttaatatttggctcgattaaaaattaactgatgaaagtacatgtccaatggaatttgaaaatgccttttgtagggactgttggaagg

SEQ ID NO: 45407 - DNA, 1203 bp, Bovine  19866881016753
  misc_feature (1)..(1): n is a, c, g, or t
nctgttcatgggattctctaggcaggaatactggagtgggttgtcatgccctcctctaggggatcttccccgaccaagggacccagccgacatctcaatgtctccagcataggcaggcagattctttactgtgagtgccacctgggaagctctgtatatcacagtataactagctgtatttgttagttggaataagagaagatatataaaagcaatactaattctgtttctcatttaaaaactagtattgaactttttcatatttattaattggttgtaaagaacatactgaagtaaaatccaccttatgacccaatattaaaaaacagaaattttccatggagaaaatcacaccccaggctgaggaggataggccagtttatcctgagtccttgcttgtctgtgtctgttttccagccccaggccccacttgccagcaaaagaagctgtctcatggactgcacatcccatcgctctgtatctgactggttatgaatgactttaattcaaacttaaaatatgtagtggtgattggagaaggatgaggatgagagcttgaccgtgacattatcttatgaaggctcttctccctgcctccctcctctctctccattgctgttcttgtggtgaccctcgtttcccagatgtgagtttgcagaaggccacccctagcagggattgttacctcccaggcactctccttcaggagagttcaccctcctctaggaactttacagaaaatgcttttttattgttgctatgtaatacatttttagctagctgtattcgttttctacactgagtatgtactacctaattaaacaaaagtaatttaacactatcgttatactgaagaaaaaaatacctattttcaatgaataatgtgggatcttagttttagcaaattcattgcccacttggttaccctcaccccgtacttccatactttctaacttacacttcttgagcattcatgcagcacatactgcttatccatcgctgggttaatattcctcaaaaatgcaagtaggattctggaactgagagttcgaagatttagtcagtctttgccaatcattgggaaataccatttttcatcacagctcctcagttcttttcggtaaaatgaggataatagcactgatctgtttccacaattttgatttaaaaaaaaaagttaaacacctacatgaaaagatgtta

SEQ ID NO: 45408 - DNA, 1067 bp, Bovine  19866881107240
  misc_feature (1)..(1): n is a, c, g, or t
ntgttttggtgtcgagtctgagacccctttgcccttgatgctgaagatggctttgttttgtctaaagatgttatggtttaagtccatgatccattttgagttagtttttgtacaagtacagagtttggtttgcgatttctccttctctctctattttattttggctcatggatgttcagttgctctggagctggttctgaggcctgtctctctgcccttacccgcctttctgtgtctttgtcagagttcagttagaggtgtttgtatggatctaattctggtagttgttttttgtttttttaatgctacccaaaattgcccgtttcattatagaatttttgaagtttccaggtcttgttttatttgttaagacttctctggttactctttgctcactgaatcttttagttaattacagagttaaaagatttgggtacttttcacactatggtttcattgctctgttgcttctgaagggcttttcccccatttaaattttactactgtcatacgctttagacataacagcatttggtttttgagaatttccgtcaacgtttttaagttgaattttcatcttactctattattccatactagccctgagcttgacttttgttgggtgaaaaattatgtgagacttagtgattggtactaggtaaagtggtgttcagatagcgtttacctatgtaacaaacgtaatttgcatttataaatagtcaccatttgtaacgtcatgcagttgtgatttagagaaaaaaagatttgttttaaagttgcttttatttttaaagaaagctttcaatatggttattgacttcagagttatcctgtgctttggttttgatggtatggtttttgtctcccttcaaacagaaagccatagatcttgctagcaaagcagcccaggaagataaagccggaaactacgaggaggcccttcaactctaccaacatgctgtgcagtattttctccacgtggttaaatgtaaggtcatcgtttgttttgttattttaaaaacaataaaatagaaaagattattcatttctgttccgagaaatagaaa

SEQ ID NO: 45409 - DNA, 4146 bp, Bovine  19866881234592
  misc_feature (1)..(1): n is a, c, g, or t
ngagaaatcaatcccataaaaacaatgagaggggaaggtttcagggaacatcattcatgttgaatactatgaagaggcagataagataaaaactgcaaagtgttcatagcttaggtgtctacatggaaggcagcagtcaacttcataaaaaaggatttcaggggagcatttaacatagaagccggattgcagtggattgaggagtaaaaggggggtaaatggactccgagaatacatattactctttcattaagctggatttttcaagcttacattttcagtctgagaaacaataagatgggaaggagaatcattaagcagcttaaaaaaaaaaactttagaaaaaaggtaccttgtacatacatttatatgctatgagaaagaagaaagtaggttagtaaaagcccaataaagaatattgttggaaagataacaccaaggaagaagtaggaggcaagaaagcagtggaggaattgaccgtttaggaaaactgttccctctgaaattgatggaaagagggggaaagatcagcaaatgggttgggatatgaatcccgcctctattttctttgtcaagaagacaagaccttcagttgaaagtggtggtggtagtaaggggctgttgggaatctgagagaagtaggagagttttcagaaactgccgtcaggaatgaaacaccaaagctggctgttggacccacgaagaacgtctgaccgggacggcagggagaccgccacgccgtggtggtaactgcacacctccaggcttcccgaaagcattcccctgtagcccaggcacaactgtgagtgaagtcacggcactgctcccaactcagggctttgttgggggaagagaatggggaaggaatggctgagagcagttcagtgtaggaataaagctaggcaaggagagagctgatacgctgagagaaagtcgagagatcaagagaatgaatagctcagtgcagctgaagaacaggtggagcagtgatgaaagaatgagacgcacgcggtgctgtgaccacactggaaaaccggagctgtagacttcaggttgttgatgagttgcagggtgtggctcaggtatctatagtggtgtagagagaaggtcaggaaactgtggaagcagaatcttccatagggacactgagtttattcaaaacagtggcagaatcaggtacggaataacatgtacagcggtcctaaccaaggcacatttagcaaggattgggggaggagagggaacatggggtcagagatagtggttgagtctcctataataccatactttcatataataccatacacagagactatttacatattattatctttatcaattctagtagaatatgtatcctcttatttgaacccatactcaaatgtgagttaaaagtgttataagaagaaatgtaagcagcttggagattatctatctttgtactgatctatctgattgaaatttgatgataggtacatttaaatcaaaagtagtttttagaataacttattatacttataaatgtttgggagagaaaaaaaaaaaaaacagctgtcttgttttcgaagatcttgattagacctcacctttactgtgcttctgggtgcattgcaagcagagtcagaaaaaggaacacaaaaaacaagatgctataaatagcaccatgatagagtcatcaacatccaggctacggctgagggtccctcaggaagataacagcatctgtggaattgagactcaaaccgtggctgaacatcatggtggcccctgtaaaacttgtgtaggatacctttgggaggattaaaagcaaagtgacctaatgcttcataattgacatgttgccaaacaattcgggagtggtgctggaaagggcaaagaatctgagtgggtgacagacagacaaagcattaatgactgggcggaacacagagagctggaaaagatgccagcggagaccagcccagagacgtcacggagtggagttttatagttgtgtgagacgtggagaattaaaagggagaacagacttcccccagagaatcgcagccactgtgtctgcttaaacaatactaccagcttctggttgtcatagcaatgatgggtcaggcataccagcatgcaagagtgcattctaggacttgctggtctttgaatgaggagaattccatgatgagggaaatcagtctactggcctcaagttattcacctcctgtgttgagtcttagctgcaattctaccactggccagccttactatgtctcttaccaagaactcttttataagtgtgtgccacatgctcagtcatgcccaactctttgcaacaccatgtctgtacccaccagactccactgtccataggattaggtaagaaaattgcagtgggtagccattccctactccggggatcttcctgacccagagattgaactcatgtctcctgtgtctcctgcattgcaagtggattccttccaagctgagccattggggaagcccccttttataagtgatcttattgaaaagataagtaactgctggcaggagagatggaagggcatagctgagaaaaaaaaaaagggaggtgaaggcactggggatgaagaactgtcctagaagacagaaaactcaaaggaaaagtgaataggctttttctctgctgcccatagacaaccctaaatgcactgtctgctcctcccaccccaattctaactccacatcactgccagtggacaagctttctctgtcttggagcatgtcaatctagtgaccctgaatatgtgttcactcaggtgaagaaaagctgtactttggaaataaagtgataatattgagaaggcatctgggaacctaattaatagtgacaggaaaacaatatatcaccttggtatggccccatggaaaggcgcaagcctttattcatatgataaattgggcaagactcaggttcataacagaaataaccatctaacataggagcctgcacttaccttccgaatatcagatactttttctgcaaaaagtccattggcaatgctgaggtcataatccttgtgggatgtgtttatatcagacagaactcttttcagttgagattggagtcctggctgctgttaaaaagatttataaaaaattattcttgggctgcaaagatatgtctactctttttacacatgaaataaaacacgtataatattatcataaaagaatttaaaagcaatgatgcttattaaagcaggaaacagtgtcacatacatgtaaaattttcaccctttttctcaaaatagtgtctgtgatcaaagttaattaaaggagttagtgaaataaataaataaccttaaaataaaactattaacagaagataatgaatttgtctaatgcatgtactaaataattcattttaccaatgtaagttgactgtgaatatcaaagtataaaacgcaaacatttagttccatgctatcttgccaaattttagctaacatgtaagtaaaatattggcttacttgataatttacaaataaattatcaaaaattgtatctggaatacccacaatacagaaatctgaaacagacatgatcctttgctttaaaggggagagaaaatagaaatatattagtgagatggggatttttctaaattgagtcttacagtctctttctctagaagaacatattgtctttacctgagtatcagaagagtttccatgtcttgagaaggtattaaagtgaagcacctgtaaacaggcaacaaggaaagcagtcagcaagtagtggcaaacaggaagagaactaataaaaaataaagtggagatgtcactgctggtggctgtgtttgtgagtttgtttgttagcacatagggcggcaatgaactgtgcaactgtcctattgatgtgtttagaacaagactattcattggggaaagtatcacaaactgggagaattcataaatcaatggctacaaagtgaaatatgtctaataattttggtttgctcattcttggggatcaatttaataatcactcactgattaaacctgaaccagaatcaaaaatagtctcataaaaaaaagaaaactttgtttaatgaaacaggaggcaagattggggttaactacatatacaccaagacacaaaagcaagaggcttccc

SEQ ID NO: 45410 - DNA, 1115 bp, Bovine  19866881265147
  misc_feature (1)..(1): n is a, c, g, or t
nttcaggagaaagcatatcttcatataagccttccccgcttctcctctgtatccccttgaggtctcagggccagtacaaagaaaccctactcttaaactaagctcgttaaagcacatatactggattaatgcagacttttgaccaattcgagtaggattttcactgcagttcagactaagccacatagcaaagtgattgttgtcaggatatcttaattcacacgcagagtaggaaaaggacatccgtttttcttgttgttgccaatttaaagagttgaagctaagactttttgttttgtagtaagaaaagtgttagtttctcagtcctgtccagctctttgcgaccccatggactgtagcccaccaaactcctctgtccttggaattttccaggccagaatgctggagtgggttgccatttcctactccaggggatcttcctgacccagtgattgaactcaggtttctgaactcgggtttcttgcatctcctgcattgcaagcagattctttgctgtctgagccaccagggaagcccctgtagtaagaaaaaaggtgttaaaatactttgatcctcaaaaacagtagtgaaaaagtgattcaacaaatcatttgttaaaatgattccgagtgaatctttaaagaatcttcagactaaattaccctttggttctcattatctattattagtattttctttttaaatttctttctagttactttgtgatttgtccaccttggattttctcttttttttagtaaaatgacgaaactggaggaacttgaagagatcgacctcagtgggaataaactgaaggccgtgccgacgaccatcatgaactgcaggcgcatgcacaccgtgacagctcactccaactgcatcgaagtcttccctgaggtgatgcagctcccggagatcaaggtatgtggtccgagccgtgacccccagcctcaggctgaagacgtgcttcctgtgagtcaccggctcaggatgccgggcaccctccgccgggttccttggagtgaggacgcctctgttgttcttgctccatccctcctcgctgctgggccacgctgctgagttggccgaggtgggaaaccagtaaacaagaagcc

SEQ ID NO: 45411 - DNA, 872 bp, Bovine  19866881328355
  misc_feature (1)..(1): n is a, c, g, or t
nctccccagcctgggtcagtgggcacagggggaaaatagcctctgtgagctgggctgaggcctcccactcggggagccaggccctggctctctgctgagggctccgctaatgaaaccaccactgctgctgcatcttgtgtttccacagagaaaagtctaagaatgggatgaacttgtaaacaagaggaagctgagccgccttccgtacttggtctgcctttgagcaaagagcggtcagaagcatgtaccccttggtacctgctctgtgcttcctaagagcgtttcatcaaccctgcgatctctgtctctctctctgcctcctgtcataaatctctgtttcaaaggaaagaaaagagagggttgttaaagcataaacctctgggtcagctcttattacatcacactctacgatgatgtcccaaaccttttgttgaactgaaatgctagattggtttgaaataaacggagccacccgtcgcctggggataggaaatctttctgttgtaaaagggtggctgcatggctggtgtatggtgtgtttgcctgtgcaaaaagtggggtgggctccggaacagtgtctgccccgtggggactgagcacagagagcagcaaccccccagccccgcaaatgcccctaaaaaacagagaaagttgaatgggggctcttccatatttgtggaacagctttcattcaggtataatttctttcactggcttgaagtttgtggtgtcagatcgcgttttctgtcttgcaccccaatacctcacatgcttgtttgccatctgctcgcttccattgcaaactgctctttacacaatgttactcggtgttaattagaacatgtgtctcttgtcattcatctggggaaggg

SEQ ID NO: 45412 - DNA, 1574 bp, Bovine  19866881352324
  misc_feature (1)..(1): n is a, c, g, or t
ntggtctctaaaaaggaaataagtacatttaagacatattcaccttagattgattgatttaaattgtgtttcatcctcctgccagctttagagtggaacctcttcatggtatgcttcacggtggatgacgaagttaatggtcttgaagttctcatgttgttttttaatacacattttaggcaagagaacgccttggaggggaatcctgttatttgggccacctggaacaggaaagtcctatttagccaaagctgtagccacagaagcaaataactcaacatttttctcaatatcttcctctgaccttgtttctaagtggctaggtgaaagtgaaaagtaagtagtaaattgatttttttttaagttttctttgcttggtggtcattctatctgtaaagtcgtaggtttcttacatcattaataggcgttccaaaaagtgctgtggtacaggcggtattgatttctctgtcaaactgttccctagttcaaaattcgtttcagagggagaagagagcatacgtggcacacgtatggtttagcacgtgacacacgtgtggagaaggagatgacagcccctccggcactcttgcctgaaaaatcccagggacagaggagcctgatgggctacagtccatggggtggcaaagagttgggcacagctgagcactcttagagttcctattgatacattgttttattttaatgttttcattgtcatgtgttattggctaatttttagaaattgaaacttttaatttatttttaggctagttaagaacttattccagcttgccagagagaataaaccttcgattatcttcattgatgaaatcgattctctgtgtggttcaagaagtgaaaatgaaagtgaagctgcaagaagaattaagacagaattcctagttcagatgcaaggtagtgctcaactgatttaatttctgcccagttgtaatcatcttggtatagtagtaaagagacttatttatatgttcacttataccagaaacaatatcaatagaaggaaaaagtagacttcaaatttaaatcttttgagaaatattttgaaaagaatattaatagtattttcccacagtttaggagattctactgttgggaatatttatatcatattctggtagtatgaaatatgattaaatacagtgttttcagagagagactctcaaggggaagcatttttaacaaagaaataccacattcataagagaagatacagatgaggtttaaagaacactgaaatgacaaattacctgaaactatatctattttgctgtaggggttggcgtggacaatgatggaattttggttctgggagctacaaatataccctgggttctggattctgccattaggcgaaggtatgacaatacagggaacactgtatttctaattacagtgtagtaagtgagtgtcaattcccattctgataactctagaatgtttttcagtgtacgtaagccctgctgacccctgacttggccaggggaggcaggcatttgttgttaatgtgttctgggtatttttcccttattaccctaaatatatatgtttaatta

SEQ ID NO: 45413 - DNA, 1937 bp, Bovine  19866881437338
  misc_feature (1)..(1): n is a, c, g, or t
nattaatttatgtgatatgcttacagataaaatgtagaatctggagtcatctttgagcaaatgtacatggtatgtggcttcccaggtggctcagtggtaaagaatctgcctgctagtgtaggagacacaggttcgatccctgggtcgggaagatccccttgaggaggaaatgacaacccattccagttttcttgcctgaaaaatccattggacagaggagcctggcaggctacagtccaaagggtcacaaagagtcagacgcatctgagccactacacagcaacagtgatatatgtgtatataaataaaatgctgattcccaggctctggtctttagcatggtcgtaggttgagcaaattattctggggagtccccttggtggccttccgccccttgacgcctcgagctctgctgactcgttgcagagcacaagcaagtctgtgccgatgatgacacagcgcccagtcctttagcttcaagaccctggaggacgtgccggccaaaattctgggccttccgtatcgaagccatgacctcagcatgttcgtgctgctgcccaatgacatcgacgggctggagaaggtaaagccttacctcttcctcgttctgccttcatcttccgaggctctctgtcccagagcttgtttctgggtgagtctggagttagggctctgatctggagctggtgaaatagaaaatatttctgtctctgcagcaggtaaagatgggtatctaaagaggagcattacatggtgtcaggtttattgagaagaaccagtactaaaatatttggggatgagataacatgaacatttgaggtcatataggagttctaaagataacccaccattctccaaagtggttgatctctgtagaccctcttccccagggaagaaagtcacctatgcacgtggacagcaattttgaattctattcacaggctattggactttctgagttccttttttagacatttcattttttaaaagacttttttagggcaattttatgtttacagcaaaacttggaggcaggtacagagatttgcaatacaccttgtgccccacatgccacagcctccccataatcggcatcactcaccagtgtgttttttttaaccccaaataaacctacctccactcataataaaagtccataggacccttaatcataaatcccttgatttagtcctgcccactggttgctcagacagtaaagaatctgctgtaatgggggagacctgggtttgattcctggggtgggacggtctgctggaaaagggaatggcaacctgctccaggattcttgcctggaaaatcccatggacacaggagcctggcaagctatagtccatggggtcgaaaaaagtcaaacacaaccgagtgactaacacttaaactgaagctgctttgtagttaaaacactgatgtggcgagtagcctgtgctttggagaacagggaggttgttttaagtccctgttctgtttagtgcctttcgaccctttgacgtttcttcatttcttggaacctcaatattttctcatttataaaatgagttccacagttcttaatgtgtgtgttgtaatgattagaatacacacacacacacgcacacacacatacatgtacatcctggaccaactctaagggacctcctagaatggatctgaaaaatgaagtcgctcagtcgtgtccccgtggacagtagcctaccaggttcctccatttccttctccaggagatcttccagacccagggattgaacatgggtctcccgcattgtaggcagatgctttactgtctgagccactagggaagtccagaatggatctaggacatgaagacttgcctagaatggttccagttcttggaaagtgctcgataaatcgatggatgctgtattattaagatactagaagctctcctgcttctgtga

SEQ ID NO: 45414 - DNA, 1508 bp, Bovine  19866881439895
  misc_feature (1)..(1): n is a, c, g, or t
ngtttctcctaaagaaatacttagatactgttgaaaaacattaccatgcttctctggaacctgttgattttgtaaatgcagcagatgaaagtcgaaagaagattaattcctgggttgaaagccaaacaaatggtagtgtatggatgaattgttcatcataaaaacacttctgagtatctgctgtgagtgaagccctgtgctggacgctgcatagggtataagggtgtacaagctttgggaggggacctgagatgggtatttcagcttggagggactggagccaaggagtgggggaatccactgcagacagtggaatggcctcagcagatgtggagagagccaagggaattgggcaggggaccacaggaagccaacttcgtggagacaagtagtggagaattacttgcgcatagctggggatcccagtgactttggggctcctgatacctggctcatgtctgtcgtgaggtcacatttgacttttacgtgagcacctttctttctgagtctgggtccataagtaaaaacgtcagagggctcctttctctcggtcagtgagaagcatcagcccactaaagacgcgcctgggccgtccgcggctgggctcctggcacggagggcggcagccttgagcctcgtccgcagcagggactcgacaaagccccgcctcctccgccccgcctcacgccccggtaggagccaaactcgcaggaaatagcagagagcaatgttaagattttgcagagcagtgctgatactttagtgttagtatttcagaatacattaaaaaaaaaaaaagggtttatttaaggatttggctgtgccaggtcttagttttggcttgtggaatcttccgtggaggcacgcgaggtctttaactgcagcatgcaaactcttaggtgcggtttgtgggatcgcgctccctgaccagggagaatacatttaaaaaacaaaattccagttatcagatagacagctgtcatttcagattgcattttttcttcatactcagttcaaaggaaatgaaaattttaaaagggggataaaagaggatctatcaaagggttggttgagggcagtattcttcagaatttcagtgggatgggctgaacccagagataaaacatcagctcctttgcaataaaataagagatctctaaacctcacgtagctataatgagtgggttaaaaataataatagctaactccgagtgcttattatgagctggataatattccaagtgcttctctacatagggaatcattgattcctttcagcagctctgtgaggcaggttttattcctgttttacaggtgtggaaactgaggctcagagagcttaagtaacttacccaggacccctcagctgatgagaggcaaagctggatgccagcagtggcaatctgactccagagcctgagctcttatccctcacacctcagtttatcctatgggataaattggagatgggcaaagtgagaacctcctatgatttctgccagcgaact

SEQ ID NO: 45415 - DNA, 1141 bp, Bovine  19866881622720
  misc_feature (1)..(1): n is a, c, g, or t
ntggctcacccgggaaaaaaatctgcctgcagtgcaggaggtgtaaagaggcgtgagttcaatccctgggtcaggaagatcccctggagaagggaatggcggcccactccagtatgcgtgcctgaagaggcccatggccagaggagcctggtggcctaccgtccacggggccacaagagctggactcgactgagtgactaagcagcagcagcagcctgagaagcagttttgtgatcgattttgcaatgagaccacttaggtctatgagagtcacaggagagagcggaaggttgggtgttaatgacaagtgccttccacatagtgggatgatcagtatttgctggttgttacagacactatcgtagagacgtcgagctagtgtgcgtgctaaaacaagtgaccgtgcggaaagaccgacaagcccagcttcccctcctcatcttttaggacctgttttatggtgggactttgcagaagtgaaaagttcaggttctctcttaaaagagaaagtatatacttctattgaggcaaggaatacgccccaaagaaagtggcttcagtgtgccagtgagaattccagaagagggatattgtaaaagcccctaccaagtagattcaggtcagggaaaatatataccttggagagggatggagacatgaacttgtttagaagttggctctcttcaaagaccctagagtgtaaagtatcatgtaattgatccaagtggacaatatgtcaatcaacaaatctaaactgagctgactgttacgtgaaaggcatctcaccctccaagctccttctaaattttcccaacgaaaaaggtgagcattgtgcactgatgtctaagtaatgggtattacaacacaaatatgtttgagaaatgccaaaagagatgctgtaatttttctgtgtggtctcagcacaccgctgtgtggtagcaagagctccctctgggcattaagctttgactctcggggttctaatcccaactctcccgctcaacagcttcctagcatttctcagcattaggagaggagctggaatgagactcggtgtggtttcatcagaagatccaggtgtgtgctcagctatgcccttccattgctttcgactactaggagagtcattattgtttctgtt

SEQ ID NO: 45416 - DNA, 1291 bp, Bovine  19866881829792
  misc_feature (1)..(1): n is a, c, g, or t
ncagtattcttgcctggagaatcccatggacagaggagcctgatgggctacatggggtctccgaaagagtcggacacaactgagcgactaaataacaaccaaagtggaaacagcagcagtgggtctcctctggtcttgcctgagaactcattattctgaagcagagcttctccaggtggagcctacagatcccctggcagcccgaagatcctttcaatgggtccatgaggttgaaactcctttcataatagtacttagacatcaccttcctttcactcttaatctcttacaaatacacggtggagtttcccagagactatggtggtggtggtggtcgtttagtcgctcagttgtctatgaagccaaatgttagagagatttgcggaaacgaaaaatgatgttactcttctctttgtatgacttcactttaggaaacagttatttttcataaaagtacgttatccatgttactatgtaatggttccattattgttaatgagtttttaaaatatttcagaattttttcagctttaatttctaacttaatatcaatagatataagcaacatgaaaaaaaacctctttgggattctcagttatttttaagcgtgtaaagggatctggaggctaaagcctgacaactgctgtgctaatgaaaggcctgcctatcctctagccctagtgcagcagatactgactgatgaagcctgaaggctcctgggtaaatccagcggtcagggcatagtcccttctagaagccaagctgagctgcatgaaccctccgctctgcctgaccccaggatagcatgtaaggggcatcattacccctggatgaccatcccacggatcaaggtttgaagcattcccccaaggcactcaagcactgtgcagtcgtgtattcagacagcaagagcgaacgtggcactgaaggccctcgggtcggaagtgctccctggcctcagacgaagcatcaccactcgagacagagggcttccgtcaatcaggagccaatgcattagagtcgaatgcacgaacaggatctcaactttgtacctcatccctgaacagaatttcaaaatgccaagacaagagactaagatcaaggaacgtgcccctggtcttcaaacagttcttcagaattctcccttttatgagacatgtggcttgtgtgtaggacagactttaaaagatcataataaatctcagtcacaagtttactagcaaaaaaaaaaaaacttttctgttgccccattcatgctcactgatcttctccagtgactgctttctcccat

SEQ ID NO: 45417 - DNA, 957 bp, Bovine  19866881881735
  misc_feature (1)..(1): n is a, c, g, or t
ntgtttcgtcactctggtcgcgtggggtcaggtgttcatgtcagtcacctacttttcttggacttttctcttttcagccccctcatactagcacactttgtaagctgtataaaatacgtaatgtgcttcttgaaatcgaacccacgtgtagtgacttctaaggtttttgctcctgttaggtcctataaaatagtaatagtagtaatcctcctggagactgtaaaaggaagcactgcatggcatcctttttcaaagatagctcttcagattaaaacaaaaagtctgcaaaaaacttgaaccagagttattcctcttttactctttcacaaattaatcatttcagatacgaagtatagatgtcaatgacacttcttcagtcttatgagctgtactcctcccccaaagaatcacgctcacaaaagaactttatggtgacatgacagagactgtctagcgcaacagtaccaggagaaaaaaaaaaacagctcacagatgttcttcaaaaatacaagcatcaatcacttcaactaaagtcacagcatgagaatccacagctaagaatcaattcttctatctttataaagatactctggacgcaagtttgcccagcagagcatcccaccaaacggtgtgcattgtaggttagggtggaaaataaaatagtctaaaaattccagcaaacttctaaatcatacacaagttatagaagcagaacataaggtaggcggccaatgcgaaatctgtcagtgatgcaacaaacacccatagcccagggttcttcaagacacaaggtcatgcccactatgaacgtgccacaaattggaggtcagtgtcaacagactctggaagtcaacttaccttttcacaatcatccaagttttctagggaaaggggctacaatggttttcctctttgggtagattttaccaagtgagtcagagaagacaggcccctggg

SEQ ID NO: 45418 - DNA, 1797 bp, Bovine  19866881014860
  misc_feature (1)..(1): n is a, c, g, or t
naacctggaatcaagattactgggagaaatacaaacaacctcagatacacagatgataccctctaatagcagaaagtgaagaggaatgaaagagcctcttggtgatggtgaaagaggagtgaaaaagctggcttgaaactcaacattcaaaaaacagatcatggcttcgggacccatcacttcatggcaaaaagaaggggaaaaattgaagcagtgacatattttattttctgggctccaaattcactgcagatggtgactacaaacataaaatgcaaagacacttgctccttggaaggaaatctatgacaaacctagatagagtattaaaaagcagagacatcaatttgcccacaaagtatagtcaaagtctgtatagtcaaagctatgatttttccagtagtcatgtgtggcttttgtgagagttggatcataaagatggctgagggctgaagaactgatacttttgaatcatggtgctggaaaagagtcttgagagtccctggactaaaaggaggtcagaccggtcaatctaaaggaaatcaacaaccctgaatatttattgaaaggactgatgctgaagctgaagctccaatcctttggccacttgatgcgtatagctgactcattggaaaagaccctgatgctggaaaagatgaaggaaaaggaggaagggaaaggcagaggatgaggtggttaggatgtatttgagcaaactccaggtggtaatggagaacagaagatcctggaaggatataatccatggggtagcaaagaatcagacacagcttagcgagagaacagcaactgcacttcagtcccttttgttgactataaatcttcagctgtctttggtgtaatcaaagttgaatttagttctatactgaatcttctctcctctacttcaatactttaactagaatctatcttgtttcttgtttagtgcaagatttttctattatactatcctttcaaactcctatacagtgattttccacaacaaccaacgtatgctcctcttcatagttttgctctatcgttcttgctttgttgttgctctcaatttttctcaaacatgttcttaataacctgaatataaatctcttctaagtctattaaatagaatatcatcaatgtttcagctcataccacactctcccttcactcaaatagtctgtgtaccttgcattgttattctgcaaattggatcagcaaactttataattccattcacacattaaccaagcccactggagtacatttggcaacaaccttcagaatctccccaaagttgggaattcctgcaggttctactttgcactcttagatttgatcttctttcttagtctagattgtcatcttttatcaattctgtatcccacagagaaagttacatcagagacatgtttacattacttgcacaaatgaagctatatatcatcaaccctaaagaaaaaaaaaatgaaaaattgaaaatgtgttaaataatggggggtagttctagcctctgtaacacctaaagcatttctctctagaatgtaactctcacttttaaattcaacataactctaagaacaagccacctactttatgtgctgattcttgaagaaaaagtaaactgtccctatgctggggtaaaagaaaagaacaacattgggtattgttagttttattgagaaatagtatagattattggcttttacagtaattttctaagtatctttaagaataactttgacatatgcaaaaattgccttttcaaaataaatttagaaatgaccccacaaaagatatgat

SEQ ID NO: 45419 - DNA, 1472 bp, Bovine  19866881563624
  misc_feature (1)..(1): n is a, c, g, or t
ncttttaaatcctagttgctggataaagaatatcagctactaccagaatgaggttttatatagtattgcttatagctattttagttgcacttatatcattttaaatacagtttatgaacattgtactactccattatattattcatttatcttcagtgatatttatagtatcaatttaaaagctgtaaaacttcatgaaaagtagcctaaacaaggattttgataaaccaaagctttcagatttagaagcaaatcatgtacttcttaaggaagatttgaagttttttgatgttgatgatgatagaattatgaaccttataaactcagtattttttagttaacctaaatacataaatctatttgaattcatcttatgaaaagagatatgtcattagatatatgatcattatatgctttagtgattcatggaccttgttacatacatgctttgtaatgtatgaattatttagcaagaaaaatcacaataattttgttgttactcaaaaatttataggttggcagaaacaattatgcagcccctgaagctggtatgttaaggtaacatcattaatgctacatatgatgatttttttagtagttatttgacataacctttactgctttcgctagaatatatcagtaattttataacaatctgtctgtaagcagaacattgaatttattaaccacagagtgattcatttaattctattttcatgtaagtgtataacttaagtgagatctaaaatgttgtctccccaaactctaaagcaaaaacaaaaatgtacaaaataaaaatcagtattctaataaatacatgtgaattaaaaaaaaatagtaactgggaaaagtggaatggctttttctgtccactaattgtctaagggatcagtttctaattttgttttgtttttccaagcttgcattataaggcttcatattattttttttttctttttcttctttagtgattagatcaggtgagagacatatagttgttgctgtcaagtgtttttctggaagatgaccttcatttatactatgtacctgtagggttcttgactagctgagcaaactgatactgctgtatcattattaactagattatatctagatatttttagtaagagcctaattttaaattttatttcactccttttcagtgttttctgtagtacttacaacacagagtctatgatttacctctgtaccgcacatatgtgaatgttctgacccaagggtcagatgcagaacattatttaaatatgttctgtcatgcagtaatgcataaggattacgaatgggcaaagatcctactcagtaaaaaggaataacatttacattgaaaagattaataaattcttaaaatttcagccacacaaaaatgataaaatacaatgggattttcaaatgttaaataaaacatctgtgctcaatagaccattgctccgagctaaagcaatctttctctg

SEQ ID NO: 45420 - DNA, 1244 bp, Bovine  19866881014875
  misc_feature (1)..(1): n is a, c, g, or t
ntaagatcattatgtgtggtggtataaatgttatatacatatttaaattctctctggtgcagagttttgagactgcactagaaattggtgatggtggccaagtgaatgcttatggaaggctcactgaaatggaaccacttgcactgtgtccccttcatctccatcttctccatagaattgagttcatagtcttcacacagtaactccttaactatttgttgagtgattcagtctaataggcagtagaagctttgacacacatatgtattgttttattggcttctaaattgctaggtgtaactaaaaagtatcagaaagttccctcataaatatatactgtatttttccaaagccaggaataaaattaatattgaataattttatttatgtagaactcaggcagttttggtttgtttttttttttttttttcttagtaaatctctcccttagctctgtagagatagcctattggttttattgtgaactgtgttttctcttttcataggcttcctcatgtatccagaggatcttgtcaacattaacattagcaatatttcccacactgtatttttttaacttcctttattatacagaagcaggatccatgttttttactctttttgcctacttgatgtgtctttatggaaatcataaaacttcagccttgcttggattttgtggcttcatgtttcgtcaaacaaatatcatctgggctatcttctgtgcaggaaatgtcattgcacaaaagttaactgaagcttggaaaactgagctacagaagaagaaagaagagaggcctacccctattaaaggaccattttcagaattcaggaagattcttcagtttcttttggcttattccatgtcctttaagaacttgagtatgcttttacttttgacttggccgtacattcttctcatgtttctattctgtgcttttgtggcagttaatggtggaattgttattggtgaccggagtagtcatgaagcctgtctacactttcctcagctgttctactttttctcttttactctctttttttcctttcctcacctgctgtctcttaacaaaatcagggcttttctttgcttagtttggaaacggagaattcagttttttgtgataactttagtatccatatttttagtttggaaatttacttatgctcataaatacctgctagcagataatagacactatacattctatgtgtggaaaagagtttttcaaagatatgaaatt

SEQ ID NO: 45421 - DNA, 1279 bp, Bovine  19866880345289
  misc_feature (1)..(1): n is a, c, g, or t
naaaagatggaggaataacatatcaatgataaaggggtgtacatggccaaagaaatgattcccttttgataggtgtaccctgcactccaggccctcctcgttcactgacctgactctgtgtgtagatgtgccttctggactgacagttcattgattaggcgctggtgctcctcttccttacttttcacttcactcagttggtcctctagtgtacggcacattttctcgaggtttccctgcggtgcgaagtagaaaacagggaaagataacatgcttctctttgtaagtctggggagctgtaactctttgcacaaaggggctgagttttctttaccttcctatctactgcaaagctctgcataatgccttggatgcaaagtcagaggcacctggttttggctaaatgaataaatgaactattgtaaaagttagattattgtcgtttggaaaactagaacgtcatttaaattctgcatcatggagaatatggtttttacatacgtttttttttttctgtattttcattctttcgtggtaataatgacaaagtttaaagtgatttttctacgaatgagataggaagattaaaataattcacttcaatatagtactatctattaataataattttaaagtttgagataacatctaaaggcttgtacagttagattagatcatatagaaactcaaatcattttgagtcatggaaaataagatgaaatgggacaggttagtacatactttggctttggagacagtctccatgttgctggccaggtcgtcgatctccatcttcatctcgctcttctccttctccagcttctgcttgaccctctgcaggttgtcaatctgctcccccagctcggccacactgtccgcgtgcttcttgcgaagagcggccgccgtggcctcgtgctgcagggtggcctcctccaggtccctgcgcatcttctggaactcggcctcccgcttcttgttcatctcaatctgggcggaagtgaccccgcctgcttcttccagccgctcgctgatctcctccagttcccgggagaggtctgagcgctgcttctctgctttggcgcgggaggcccgctcagcctcgatctcctcctccagctcctcgatgcgggcctggaggtgaggagaagctcattgtgagctcctttaagctaattggtaattttgtcgtgatggatgagactgacagaaaccacggacttacctgtaactccttgatcttcttctgcagctgcatcgcaagggcctgttcatcttcaat

SEQ ID NO: 45422 - DNA, 1790 bp, Bovine  19866880353593
  misc_feature (1)..(1): n is a, c, g, or t
ncgctatgaacagttaacaagcttctgactagcatattttccccaagactttttgctcctttgcccatgagttgttacagttttctaaaaacaccttctcagcacctgttttatctcttctgcagttctgttttccctagtgaattcttttttatcttggagatattcaacaatgtacaaggtcattttggtgtgtgtgcttggtggtaatggtgggggggtatggagattctgagtaagcactttagtggagcaagtaatgtgagggtgtgagggtgaggaagaagggatagccatgaacaggaagcctggcattaaagacttttaactttgaataggatcctcagccattttctagtattgtcttctttacgaatgaggaaactgtggcccagagtgacactgtcaatgccatacaattaatcaatagtcttctaggtctggtcccttgagagaataaatattattcccttattacatttgtccaaagtcttattgctctctttcagcccacactcataagcaggatgcttcctctgcaaaagctcatcaaactctctcattgtttaattctgacaactgctgagataaatcaaactttagaaaacttccttcactagaatgtattggttattttccttccatgtgtacctcccatgagttttattccacagcgtgtgtaattagtaagttcattggtactggttgttagttaaatgatgggaaagtatgatagtcttattctgaactaatagtactccaggtaaggataaacggattgctgttaattataatattcataataatgtactaggtagtctcagtgcctctgtttctccttatattaaagaaaatgaattcttcttaattcataaaggatatgctgatagttattaattcattttggtggaaagaaatttaagctgcttttgtaacagaccagaatagggtgagggctctggtcttggcccgttctctagtggacatactctgggctgacataaggagaatatggtggagtccaccactctacataaataggctgaaatccttcccctatctccatggaatagtctctttcttttatttttccttcactattttaaagcatctatttctttccacccgccttgctaagagctcatacttggcctcctccagctcctccgtgcgctggatggcgtccgtctcgtacttggtcctccactgggccacctcgctgttggccttggacagcgccctctgcagctcggccttgccctcttgctcctcctcgtactgttggcgcagcaggtcacagtcgtgccgggaggactgcagggcgtgggccagggcgttcttggcctgcggaagtatgagttcactgacttgaaatcatttcttcagtgatatttaacttatacacttaaagtagaatctaactgaacatgtttagatttgattagtcaagatctttggtgaaacttactttagtttcttcctctagctgacgtttcagttcctcaatctgctgagtagatgcttgcttggtccttgaaagctgagagaccaaagcatctttctcatccagttgtcgggaatattcacctaagaattatagaagtaaaggaatttgctagtggcataaaaaaataagcctaaaggtttgtatatatattatacataaaattgacagatatatacttcaaatattgttatagaattggctgctgctgctgctgctgctgctgagtcacttcagtcgtgtctgattctgtgtgacccctgagacagcagcccaccaggctccc

SEQ ID NO: 45423 - DNA, 1020 bp, Bovine  19866880424080
  misc_feature (1)..(1): n is a, c, g, or t
ntgtgtgactcaaatttttaatatttcaggaggactaccatgcccataagtcatctgaatagtacagtaattcattgaagttttgctgcacacagtcgaaaaaacagcttaattcttaaaagcccagggcagaatttactttgtcatctgaaaagaagacaaagtgatgagcggtgacaagacagaggtagtgataaacgattttagctacataccactgcacaaatcacttcacttacgtggactgcatgtgtttaatgtataaatagaaacataatatgtatatctctatttatttaacattgataaaataagaccattttattagttcatctctaaggatactttcctaatgcaaaattgtatagctttattcatggcattgtctttaatgactcaggatctaaaataatataacatcacgttcttgggtagaactgccacccaagctacaaagaatttgtctttaaagagacttaaggatttttcctgtccaatcacgcactcagttgtcaagatcaatgtgtgtacgtgaccctaaagttgcatttgctttaactggagcgtgtgtaagagccctttgctccatctgcacaggacactcagctccacttggatgatgccatcaggggccaggatgaccttaaggagcagctggccatggttgagcgcagagccaacctgatgcaagctgagattgaagagctgagggcatcgctggaacagacagagaggagcaggcgagtggcagagcaagagcttttggacgccagtgagcgtgtgcagcttctgcacacacaggtgaggtttgggactatggttgagcaaatgcactccctgaagctgaagaccattgcagaggataagcttgttcaacagtaaggaggaaccttggccagggtccctcccaggagttcaggaaaatgtacagcagtaaatatgcaccggggtccagcagattcacaaatacacttataggctggcttaatcattgttgatttgaaataatttactgttcta

SEQ ID NO: 45424 - DNA, 1590 bp, Bovine  19866880467728
  misc_feature (1)..(1): n is a, c, g, or t
natttcttaggtatattctttgagaagtcagagttgctttattttttacatctcagttaactattaggatataaaataagtaatgtgagtctctaatcctgaaaatatgtgtaagagtgtgtttggggagatagtgcaaattggtagtgagaaaagaacagggccattttcttgtttaggttatatgttatatctacgttttagttttaaaaggaatgagacttagctatagaagttcatagaaatcctgacaaagcagccattagatcagatgctccatatgtccccttttagaagaaccagtttttaagccatccaagagaatcacattatttgtagtaatgttattattactgttatttaattctttacgggtatttttctatcttaataatccatttaaatcacgagatttggctttaggtaattttcagctatcacaaaaaattatattctacctcaaaagacaaagatgcattttggtggaaagatgtcctaaaggatgtgtctcaggcttattctcaaagagggactcaggaatgttctcaaagggcaatattagtggaataaagatacggctttccgcagggagaccttttgaagttcagctgtgcttcctcaaaaatcagccttattatagaaccagaaaactcctaaaggcatttttggagttcctgaatacatgagatgagcataataaggagtagtgggtaaaacattcggccctacagaagtaccctgaacaagaggaaatatttgaaataattcctattaacattccattccctcctaatttattctaaatcctataattttaataagtcatagagaccatatggatttttgaattaaatttgtactttaccctgaaaagggctgacacagtctggaaagaagagcccttcttcttagcacctttctttgcaccgctgtctaagataaaaagaaaacccattaatgaatgtatcccagaggctggaatggcatgtaaactttctgtggggataggttaatttaaatcaggggcacagaaagtaccagcttcagcactagcatatgtggaaaagagactggccagagtcttcatggaggacttctggtacagcccaaccactgtgtcgttcagggggtccttgttcttgtccagccagccggcaatgttgtagtccacggtgcccgcgtagtgaatcagggagaagtgggcctcggctctgcccttgaccaccttgggcttctggaagttggcagacttgcccaggtgctggtcatacagcttgttcttgaaggaggtatctgtggccttggggaacatgcactcctcttccaggatggagaagatgcccagtggctgaattcagaaaagcagacgttggtgtcagtctatcttgtctcaaaaggtatagtggctgtcatttgattgaattatgagcactcctaattaaatatacttaaaaagtaaaccaggatcaagcttatagtccttttgttatcactagaatgactttccaccattctttctcacattcgatccataacattatttttaagtaaaaaaatagctagatacaaactccagatgtcagcacagca

SEQ ID NO: 45425 - DNA, 1494 bp, Bovine  19866880488373
  misc_feature (1)..(1): n is a, c, g, or t
ngatggggctgggtgggagggaggttcaagaggggagggaatatatgtatacatatagctgattcactctgttgtacagcataaactaatacaacattgtaaaacaattatcctccagtaaaaaaataatacatggaaaaaaatttctgcactgctgtattgcactgctcttgtctcttgtgattgacacatttgttttatttttttatctccccgagtaaattgtaaactctgtgagaagagagactatggtttttacttctttgccacctccctccacagctggccttttgcatagcattatgcaaattgtaggcactcaacaaatatactttgattggttacgcagtttcatctgtgaagtggggataatgtttgtgttataggagttctgggaggattaattgagacagcgtgtattaaagagcttcttaaactgcaaagtccaaaagacattattactgataataatcactttatttttaataaaataataagttaatagccatatgctaggttatctacaatctggatgaccaaggatgtaccccataaacatttcattagtacttatagaatcattaggtcctacacaagatacgagagctacaaggaggatggaacatagtagtagccttcaaggaattcttactttagcaaaggagcaaaaacagaagttcctgccatgttgtgtgaggctacagaaagctctataatacagacacaaagtgctcggagacacttaaaggattcatttatcatgactggggcattaagaaaaacttcaaagatgaactgtcacttgagcctaccctgggaggtgaataaaagtccagtagatggagaaagaggacaagaacatcctagggaagaaaaagagtagaagtgcagggtgtttgtagaagaggacacaggattatctgattacaacctaagaactttgtgaaccgtgttaaggaacgtgaacttgattccaaaggcaatgcaaaaaccacagagaagcgaaatgatgagacttgtattctggctaaatgacgatcagggacaatgcttcccactgcaaataacagacattcaatgaaaactaacgtaaaccataaggacattgatcatcttactggaaataaagggcaggcaagctacaggcatggtacaaccagccccataaacacccagaatctctccaagtctccaccgtgcaaacactagttattgcctttccctggggtggctgcaaaaaggcagtgccagtaacacattcaggcacaaataaaccctaaagcgtcttccctacaggtgcctctcccctcatctcattgggtcacatggccctgtcagaggagagaggcacatgccatgcctggcttgggcccatcatctgagctggaatgatactggagcacccaccatgatgtccaccacaaagagccttgctgccagcttacagatgggctccaaggggagactaaaacagggagacccattgaggagcag

SEQ ID NO: 45426 - DNA, 1270 bp, Bovine  19866880504028
  misc_feature (1)..(1): n is a, c, g, or t
nctggcactctactaagtacttcaaaattgttacctcatttaatcttcacaataacccaagaaggagtaacatacttctaattaaatgtggaggaacagatgcaaaaaaatcagcacgcttgctaaagatcctccagccacgtaaggcaaagccaagataggaacctggatccgtagtgtttggtccatacacaaggctccctccgtcccatggaggaaaaaggagctaaaaggagaagcacagtgacagttcatagtctttcctcttccagcttcatctgacacccaccatttcccctctgggtcattagcttcatcatctataaaaacgaaggtgtctataaagtaacgaagattactataaagacttcatcagatcttcaatgctagaccacacaaggtccctactttcacagatgtgacaatgagaagttaccaaatgtttgatatgaagagaaattaacctattaatttcactttgtacatcaaataaaggtcttaagaaaagctttccttaataaagtgacagccaaaagtgaaaatgtgaacttcaccttgaattagagagtggggtggtaaaaaggtgaggctttgcaataaattactttcacccttaaatctgaacccattactcactggattgtacttttgttgtacttttaatgcacattattgcccaggcaatctcagaaggggaaggaggtccattctaccagaactcttgctgtgtggctgacagctgtaaacaatgcccagaaatcacaaaaagggctcatgtcaaaaatgatcctttctttcctgggatttctgaataaacaataattagttcataattttatttcattactgaattacacatattttcaataaaagatttttcagtaatgaattctaccactttaaaaatccatttaacattggaaatttgcttttgtgcagttcaacagcctggaacagctgtgcatcaacttcaccaatgagaaactgcaacagtttttcaaccaccacatgttcgtgctggagcaggaggagtacaagaaggaaggcatcgagtgggagttcatcgacttcgggatggacctggccgcctgcattgagctcattgagaaggtctgtttgacttctaaagtaaatctgaactgtaagcataaccttcccaagtgtcttaagcaacttcagaaagtattacagtaatcttaaatagactgatatcagaacaagttagagaattactttagaaattatttcctcttttcagcttttacagaag

SEQ ID NO: 45427 - DNA, 1552 bp, Bovine  19866880593892
  misc_feature (1)..(1): n is a, c, g, or t
ngcagttttgaattaacaaaaatctactttgcagagattactacgatgcagtgtatccatagaactcagaaaggatgcttctcatttcagtctgagataaatcatttcccaacatgagggtcagaaacccccaaggatccccaaggtccttgaatccacccgcacagtgataatggtctcaagttcaaacaagcaacattccccaaactatgttttctcttcttttaatgaatatatctaatatagctgctatatttaacataaactcattcaaaatagttattaaatatatagtatgtttttatcattatgtatattttatatttctagtgtagtagtaaaagtacacgttccaatacatggagtgagggagatccgttaaatgtttcagttccatggagaagtccttggaaccactgatttagatcatagtttataagagctggaggcccttgagtagtcacgtaggattcagcttcctttattttactgatgaggaaaccgagtcccagaaaggtgaagagtcatgcagtgttccaaaggtgtgagtggtggtgttaggatgtgagccctgttgtcttaagtccaggttcagtgctaattccactgcaacatgctgtattttaagatacacaaagccaactggcttgacccaggcaaatagagttggtgcaaagcctggattggcacctgggaattttgacttctattgttgcacgttgttgattttatccctcctgataatatcctcagaggttaagttgcagtaatagttcatattaaatattagatgtgatccttacattctttctgaagttctcacatgtcaaagagaagagtcactagattttgtgtgggtaagtggcctgaaaagccagaattttatgagaagccagttttaaagaagaactgcttcttgtatcctattcccaatactaaactaggaaataaactggtagctctttaagacatagcaatatagaaatctctttattctttagagtgtaataataaattactcttacctcttgtgttaccagatgcagaaggtagcaggctcaaagcagaaactactgttgaaagacaaacaagagaatgcagattctttgatttttttccacttaatcacaaaatattagtaactgtattgtgtacgatgtcatcttaggagtgtcggagagagaaattaaaatttgggaaatagtagccatctcccttaagtgaataatcatttttatcaggagtgtaagactagccaagtgttcttccacgtatacataccttaaaggcttttgaggaaggacaggacagaggcattccaactctacttttatagagaccgttttgcaaacacagcagccacctcagctgtcccatctgggaacctacttggcaaaaccttttttggcaatctctttgcacaatattcactgactgtggctgtgaatggatataattagaaatatttcttgacacctataaataatttgacagaggatgatctagggttctttataggtattgatagggatggggattcaggcttctaagg

SEQ ID NO: 45428 - DNA, 1806 bp, Bovine  19866880675038
  misc_feature (1)..(1): n is a, c, g, or t
ntgggggagacaggtgggaggtgaggattaggagaagaacgagatccgggcatttccacctgctccctctctgtgggctgtggttggttgcaacatctttctatcagttcgcccctccagctgcagacctctctccagcttcctgtcaccactccttccccttgcctcccagggcctacttcaccatcccctagtccacctacatctctgggaaaactcccttctttaaactcctcactgcctccacaattaagaggtttctttgccctccacactctgatggatacaccgttcagtggtgcaattcagacacggctgtcactgaggacaggttccttggaagaacattctggtgaccaccttccctcccccaccccccaaccaatagctcctttagaaaatgacagctgataagacacagaactaagtgaggatgtgggtgacctcacttcccccccccagtagagcccactctttgtcacaaggccacatgtgtccagcttcgtgatcagacagatggggcccgaggaggaggaggaaatactgggtgggccaaaaagttcgttcaggtttttccgtcagatgttatggaaaaaccctaatggactgtttggtcaacccaatacccaccacttataagcctacagcaaaaccagactccttgcccacaaagggtggggcgagacctgaagctctaaagcgcaagataagtcaaccttgcagtttaccagggaaattttttttttaaatcccttgctgtcaactgccctgggaacctccacgcctgcaccagcaccctcgcctgacaatatgaggatcagtctgacaccagcatggggaactcaaagccacacttcctctagcagctgttggtcaaatctctttatgaatctaatgattttgagtccttctgctggactgacagtcattgtaagcaaagtcctataactggaaatgattagaagataaggctttgagtgacaagcttcaaattttcactcctccacctggtttttggatttcttaacatatcagcatttccttgttggaaagtctcatagggtatgccattcagttaatggcagacaccttggaatcatattgttacaagaatatactcctggtacccctgccaatcaactggactccttccctcatgggtcccccaccctcaaattaaaagtcatccttagacatgttaacgggagagggaaccctaatggcctgtaagtatcttaaaaggtgagaagcatcattagtcattgggaagatgcaaattaaaaccacagtgagattctagagtagaaaaaaaaaaaatcagagccaaggttgcttctggtgggtgagggtgagggccgagagaggaaggggcctgtgggtgacagtcatgttctggaacttgatagggtctggggctgcacagatgtaggcagttgtcaaaactcaacaaatgactcttagaatatccgcacttgacagtatgcaaatttaacctcaaaagaataaaataactgccaacacggtactgtggttagtagtgttactaaccacctcagtatgctgaggtgcttagggtgaggtatactgatgttctcagcttacttggaaatctttcctcaaaaaatagcctctggatggtcacaaaccacaaataagacctggaacatccttgccatccaaaatataattcccttccacccactgtggagtatgtgtgcacgctcagttgtgttgggctctttgcgacccattggactgtagcccgccatggacttcctctgtccacggaattttccacccaagacc

SEQ ID NO: 45429 - DNA, 1275 bp, Bovine  19866880686619
  misc_feature (1)..(1): n is a, c, g, or t
ntttgagaaactatataactcaataaggtttttataaatgactaaaggactcataaaagtcagttcagccactgacttattagattatctgatctggggaatttctttaacttctcagtgtttgtttatatcttaagtttttaaaatgcttgaatgaatgataatggggacttttcagggttcctttgctttcaagtgatacgcttagtacatatttactcactgactaacgataatacctatgaagagaggttaaaatgaagaggctgtgatactgtgctttaaggaaaatgtaactcatataagttaatttatcaataggaaaagttgaaaatagcttaaaaattttaagaaagctatcctttttatggatttcttcatgacattgttgggcttgcttgacttggactaaggaaatgggagattgtaattggccagaatgttgatgccaagcctgtcccactttgatttcagcttcttcttgaatcaataaacagaggagagaccttaagaactcgggatctgtatcaaaggaagaatcacagggttcactagctctgccttttaccctggtagttcagttcaaataactgcaagtcaatttgttgggctaaatcctgggggttgggaaaaagagatccagagagaaataagaatgactgtcttttttgagtttaaatgcaatcttatacatgtgtattcagaaaatagggctccacttttaaggctgggttgaagcattaaagcagtcattttctcagaaaaatgactgagatttgagggcttgcctttaaattgcttccttcatggctgttaaatttgtgacattgttaaataaattcttcaatttcccatttgcaatttggaagtagttcttgccttcttcataggaatgttgaaagttaagtgaaatactgaaaaaagcaattggaaatattctttttcaagaaaaggccatttgtaaatccaaggtgtttgtgaagtcaagaaaatggtgcaattgaagtcactgacatggtgcattcagcacagagggtactcacagattgaacctggagctgtaggtcatttttctctttcaagagagtcaccattttttcctccagttccttccttttggcctctgatttggccagttcatccttggttttctgaaactcttccttcattgtggccatctccttctctgtctctgcactcttgaggaggggcttgatctgaaaaaaagtttcatccaaggccagtgcttgacgttcatgaaggctcgtacgttat

SEQ ID NO: 45430 - DNA, 1061 bp, Bovine  19866880696069
  misc_feature (1)..(1): n is a, c, g, or t
nttgctctgtgcaaaggctcgtcgccccagcagaagaatgctatggaaaccttgggagctcacccaacacccagctgcaggagtgcctttgggggatgcagaaggtaccctccaaaggagagagctgcaaaggcaggcgacctaccgctgtttgaagtcgccatagaggatccggctggggaagcccttcctgcagatgcgaatgccctccaggaccccgttacagcgcagctggtgcaggaccaggtggtggtccatcacgcctggggagagaggagcccagggcctgttagcggcatttccactgctttctctgatgatctgggcaccacgagacccctggatacccagactcgaatgggaaggtttggtgccagtagaaataatctcaacatcctggggagactctagcaccccataaccatgggactaaaagccaaaatattaatctttgccctgttcatcgttcttgactctggtgaagacagaatggttgtcttggtctagaaatgtctctcatcattattattctcatagtaacaacagtttttattattactataattgacagccaacatttgcagagtgttcataatgtattttccctatattggttttgtttttattattttccttggtggcctaataagtaatcatgtgtaagggtttcatgagaatatgcaaagaagaagcctcctctgtcattgctgtgtttgatattttgacgaggttgaccgtataatttattatattgcatgcactcctacatattttcgtctgcctcatcaatcatgagctgacagagtttatttaaattcacctacaactactgttgtagtgctatctactagcacttttttaaaaaaattgaggcatcattgacatataacattttattagtttcaggtgtacaaccatatttgtatacaattatgaaatgattgctgcaagaagtccagttagcccccatcaccatacacagttacaattttttctcttatgattggccctgttttaaatgctgtacatgtactggcttatttaattctcacaacaaccct

SEQ ID NO: 45431 - DNA, 1556 bp, Bovine  19866880701808
  misc_feature (1)..(1): n is a, c, g, or t
nctggagatcgaacctgggtctcctgtattgtaggcagattctttaccatctcagccaccttgaacggtgctctgtaattctctgtagtaaactaggcattgcctctggagctccctctctaagtcacaccgcagcctagagagttctatgtgcaatattcaccaatccagcagcagtcttcatccatctctcccttcaatagtccaacctctttcaccaccgccttcccctttccccagagcaaacctcacaaaaactctcaaagctcaaatccttggagaaaggaagagacaggggcaaaggtgtgtgtcaaagcagtgttcacctgccgtgtcaccataaagtagatcaatggaagtcttgttctgttatcaggttgccatggatcagcatgcaatttctaatattctactccagaggatgaaggaggatgcccacgttagcaagaacgtctgagatcaacacttacccggtcatcgagggtcttgactgtgactttgtcgttttccctgccctggatcatacccttcacgtacaattccttatcatccactgcaaagcaggctttcttggagtcgaacgggcggttctgagcctcgattctttccttctccgatttccgcaggtagggagctgcttctccgaaaatggccatctccgcatcagaactcatggctgcaggggctggggacaccaggggctgctgaggcgggggctgaggggcccggcctattatctctattcaaacaggggccagattcaaaagctcttgggattaacccagttcctgcggaatctaggcccaggtttgggggcctagagcaggcaagtgggggcaagctaaaggggatattttactccaagaaaaatttttgaggggttgctttcaactctgagtgttgattttggaacagctctaagtccagctccaagtgtggaagtctgaaccaattagaggaatctaagctgagctcaataaaagagaactcagaaaacgcttccttaattcaatatcatatttgagcctcatgatctctgtgtcattcccaaatcttaaaggtgtctaagaagaatgactgttgataaatcctagtagaaattatcacaattatgtaatttggaagaggaaagtattttaattgtcctttcaaatgattgtggatattctttttagatactgtaccaaaacttacacatgatagtttctgtggtactttcttaaaggctagtcgcagcatagaattggaaaccacatcaacaaacatttggtacctgttaccttataatctgttggtctgtgttgaactttgaatgaaacttttacctatgtataaacatcatacatcaatcatttgagaaaccttgttcactgaattctacaacacttccaaatatcaacatatttcattgcacaatataaaaaaatcacagtcattaatatcagcactcattaggaaattcaaatattaggatgttgtcaagctaagtggtggtagacacaagtctttcaaaatttcaatttttgctgaaagctcaactctatcattagtaacaa

SEQ ID NO: 45432 - DNA, 1640 bp, Bovine  19866880907083
  misc_feature (1)..(1): n is a, c, g, or t
natcctcctcgaggatcttacaaaattccaaggaaatttatcatgttcttatgagataaccctctaaattccatggttgaacggagacatataggcttgaacctcaagtgaaataaagaagcccatctctactgttgatcacatcagcaaggtgagatacataactctgaattgatcacccctctccttgtctattccccagttcccttctaaaagtatcaggagagagagcactctctaaccccacatccccaaacacacacatgcacacacagacactgatggacttggtacatctaggcccttgtgatagtctacttacatcgtccacatgctgttccagcttgaccttggccttggtcagggtgttgaccttgtcctcctcagcctgaaggtcatccagggcctgctggtgggcctcttgcagagctttcttctccttggtcagcttggcaatgatctcatccagcccagccatctcctctgtcaggttcttcacctgttgaccaagaaccccatcccctctagggtcagacatcaccaacctggagacatttatggagacctccaaagccaagggccaggaccacactcaggtccgaggatcctgagacttggtctggattcaaagggagctgccctcaccttgttctctgttgcgtgcttctccttctccaccttggccagtgtcagctccaggtcatcaatgtccttcttgagctcagagcattcatcttccagcttgcgcttcttggcagtgagctcagcgttcatctcctcctcgtcctccaacctctcagtcatctccttcacctttgcctccagctggatcttgttcttgatcagctggtcacagcgctcttccgcatcattcaggttgtcttgttcctgagagaagaggacagagaggagagctggtgatgaaacagaggagagatccagagccttaaagagagctgaagcttggagactcatagtccctgatgatgagatgggttaggatccaggggagggggaaagagagatggtcttaccgcctgcacttggagctgcaggtcgttcttctcctgcagcagggacaccatcttctcctccagctccttgcgccgagcctccgatttctccagtgtctctttgatgcgcccaaactcctccttcatgttggccatctccttctcagtctctgcgctcttcagcagtggtttgatcttgaaatagagcttcatccagggccagttcttgacccccatgaaggcccgaatattccactggattaccagcagggcatccctggcaaaggagcacggaggcagggagccgcactgtgaaggagcactttccagtcatggggccagctgcactgggatcccagcacatctgaacaagtgtgtgggcacctgagggcaggaacctgctctggcaggcttgataggcaaccccaccccaacattaccacactgaacatggagttgtctataaatgtttattaattgatcaattcaacaaaagggcagtttatatcttcctttctggggtagtagtagctatggaagcgaccaattatagcacctctactgtgttcagtgtttctaatctcctaagaacctcaaatatgttaagaatatagtattttccattta

SEQ ID NO: 45433 - DNA, 1592 bp, Bovine  19866880927225
  misc_feature (1)..(1): n is a, c, g, or t
ngggctgatttaaggaactgttgtcattcctggtgacagccttggagccagctctcaatgacattgccatttggaacagggttcttgggtcactgtcggcatgctgggttggatgaagtctctgagaagtctggctccgatggggtcttgcaggagggatgagtgttttggagtgagagagcctatggggagagcgtgcctggaggaaattgggtcaagatgtttggttttaacacctctgattttcttccaaatcggagaaggaaaagattctaacttaagggatgaagggagatttagagttttccgtgaatagagctcagagctccttggagcctaggttcttcatggctcaggtgaagctgcagagggaaaagccatgcctggcatttaggagagccatgtgcttggctgggcatattgctgagcttagaaaccacatgaactggtagggttcatgctcagccacagaaagtgccactgtctttgagttgttcaggaacctgtgtatatgtattgttggggaggtggaatttttaagcttagagatcttccccaaggtgacagaaccactgagtatagttaaagggcacttcctgcccattggaatccttaggcgtgttaacaagataagttcagggcatcatggactttgcattctagtgtccatggggtcacaaagagtcagacacaactgagtgacttcactccctcactcactgaaggcagcagaccataaacaaaactaagcagggtgatgactaagaaaatttgaaccggatgggcaaggaaggtcttattaggagaggacatttgagcaaaagctctggaggagggagtaagactttggatttctgggagaagattgttctagccagaaggcagagggggaacagccagtgcaaaggccctgtggcctgagcatactttgagttcagagcagcaagatcagggtggctgggccaggtgaggagctgggtgtggggtagggagtattggaggtggagggcatcagggcaggtggaccttggagaccctcaggaggtcctaatttttactttggtgttctagggggaactgttaagtagagatttgatgtgacctgatttatttattttccccccattttatttatttatttttgactctgctgggtcttcactgctacacgagcttttctccagttgtggcgagtgggaacgctctctagttgtggtgtttggacttctcattgccatggcttctctcgtggagcatgggctccagggcatgcaagcttcagtaatggtggagcacaggctcactagttgtggctcccaggctctggagcacaggctctcgttgtggtgcacgggcttagttgctctgaggcacctgggatcttcccagaccaaggattgaacccgtgtctcctgcgttggcaggcgggttctttaccactcagccaccagggaaggcctgcttttctgtttacaagagtcactctgctgctttaagaatgggtgtgggggatgcagatggaatgggggggagagtgaaaagaaggagatgagtaaagacatcatcgcagcaatacaagtgaggggtgatga

SEQ ID NO: 45434 - DNA, 2785 bp, Bovine  19866880955862
  misc_feature (1)..(1): n is a, c, g, or t
ncatagtgtcaactgtagctttgaaagtctgtgatcttagaatgatcccatgcttattaaatatacctctttctattagctccacattggccagtattttcaatggtagattttgttgtatctgtctctgataagcaatgtatttctgttttgagactcttaaggatatataattgatcttaaaaataaccttcagcacttggacctccagcgaagaggaaagccagagtcttcattgcggacttctggtacagcccgaccactgtctcattcagggggtccttgttcttgtccagccagccggcaatgttgtagtccacggtgcccgcatagtgcaccagggagaagtgggcctcagccttgcccttggcaggtttgggcttctggaagttgttggactttccaagatgctgttcataaagcttgttcttgaaggacgtgtctgtggccttggggaacatgcactcctcttccaggatggagaagatgcccataggctgagagaatgaaaagcaacatgccacttgaattgtctgcctgcagaagtaatgggtagcattctgatcctacttgagtaaatacatcatatcattctttacagttagtgaaaactgatttctttggttagaagttgttaaatggcaaggattacttgggtgtctatcaatacccagatgtgtgctgggctctgggatatgatggagataagatgaaaaaggaaggacctctggtagaggtttatgtctttgccccaaagccttggagcaatgtttctccaagtgtgactggcaaatggggttatgtcagaaacacctggtaaaaatgcagattccgaggctctaccccactcttcccccaaaatgtttctaggagcgagcttagggggaatgtacaggtttactcagtacctgtggggtctttggcacaactgagagcccctgctttcaagtactaggaactccatcttcaaatgccagcaggaatggctccaaaactgacaaagaaataagtgaatcatgctctcctcagagctctttaataaggaaagatggtttaagaatcagacttgtcatcagactatgaggaagggtagagttctggactctaggaaagactcagtctcctttcatcagatcatctacctcagagttggccaaaggaccttccctgatcttagttaccaatagaaaccttttaccagagtgtgcagtgagatttgtgattttcctctaaatacgggtcagcagtgtgacctgtggtctgagaaaggaaggcgaaccttctcgatgagctcgatgcaggcggccaggtccatcccgaagtcgatgaactcccactcgatgccttccttcttgtactcctcctgctccagcacgaacatgtggtggttgaaaaactgttgcagtttctcattggtgaagttgatgcacagctgctccaggctgttgaactaaataagtagaaaatacaagtgaacattcttcttgtgataacagcttctctttgaaaggactcttctgacatagttagcctaactgcttcctgcatgaaaatacaacctgactcagagtgatgtccccatacacagaagccaaagaggttctaagacacgggtgaaccttgcaaatactaggctgagtgaaggaagccgggttcaaagctctaagtagtgtatgatgtcatttacatgaaatgtccagattaagcatatccttacagacaggaaacagatttctagggggtgaagtaagagggaaatgggaaagaggttgcaggtttgcactgtccttagcacttttatttgaaagcttgtggattactcttcatattattgcttggtactagattattcctttcttcccatgttgggttgaggatttctggaaatgcttttgttcctaaacccagaaaatctcattcagtgtccatgaatgcactcatagagaaaggtgtggaaatcagacctctcgatcagacacacctgagacactgctgttggggagaagacttgggtaaactgtatgggaggtattctgtctcaggcaaatgaatttgagcttatttaccatgccatttccatcccctctactggccatggagggcaggtgagaatctctggattctgctttgaatttgtcattaacttccccatggccatcttttctgccactgtcaccctcatcacgttctttatcatttactaaatgctaaactatgtgctgggggacagtgcttaggtctttaaatccagaaatcttacaatggcaaaagatttacagaaataagcatgttatgtggagctttctgtacaggtcctaggtgaatttaccctgtttggggtcaataccattttcattatctaagttcacagaggtgcagtttgagcccagatctgtctcatcccaaagctgatgtccgttcatggacttttgatctcccttcatgtgtcagttcagtttgtagtgtagttattttcatggatctttttaaacatttactgtggcagcaagatttgtaagttttcctcctgctaagtttctgcttactcacatcaaagatctcaaagccagcaatgtccaagaccccgatgaagtactgcctgggctgcttggtgtccagctgctggttgatgcgggcaaccatccacaggaacatcttatcatagacggctttggcaagagcacccactgcgttatataccttcatggacaaagtaatgatcattgccattaataaaggcatgatgtgaaggtcctgggaaggatgtattcacagaggttgggca

SEQ ID NO: 45435 - DNA, 1827 bp, Bovine  19866880973132
  misc_feature (1)..(1): n is a, c, g, or t
ntctttatcctaatttttctttccttcagagaatttatcactaattgacacttgatatctgttgttcccacatacacacactcaaatagaatttccaggaaggcaaactttgcctgttctgtcctctagcacttaaaatcttctcagcatgttgtaagtcctcagtggttgtttggtgaataaacaattgaatgagtgtcttatagttttaaaattatcagttccacatgtgatttttatcactatcctggcttggtgacagatctcagctcgttccattcaacctcatctttactatcataccttcaacaaccttttgggtagggtgataaatttatctgagtttgccaaggactgtcctgattttaaaactgaaagtctcaggaatctcttcaaatccaagcaaattagggtaaagggtcaccctgcttggagatatccaggcttcatcttccttcttttgatttattgttgtgtgtggtattgaggggcaagcgataacttaagaatgttctgaggggattccttggtggtccagtggctgggattctgcacttccactgaaggggatgtgggtttgctccttggtcgggtaactaagatcctgcatgctgcacagaagagagaaaaaaaaaaagaagttttgtgccatatgaacaagaaaatgggaagactggatgaataatagtctggctgtggtcagctggtgagcctcaccaaacaacaataaaaaagacacgagagaacaacatagaacacattgtcctgacttccagagccgactggcactgccagtggttggtacattctctagagaaagctcctggcttctgagtctcaggcttgcctgttgacatggtctcacccactctgtgtcactttcaaaaaggagcctatgatgcattcattaactcagttgtcacgagaagcccatgagttaggtattattattagccccattttacagataaagaaactgaggcccagaaaagcagaagaagttttgccttattgcccaaattcacacagtttaaaaggtgaagtctggatgtgaaccccaacattctgactctcaaagtccactctaagtgactaaattatcatgcagattttaaccatgtaaatatacatttgggctgtgcccagcaaagtttttgatcatggtttagaaaaatgtttttattatagaataaaacggtatgaatttttaagaaaaaaggtattaatcatgaacaacaaggttctactgtatagcacagggaactatattcatcctgtgataaataataacagaaaagaacatgaaaaagaatgtatgtataactgaattgtattgctgtacagcagaaactaacacactgtaaatcaagcataatttcgatcaaataaaaattttaaaaagtaatcaatcatgctttcctttgctctaatgaggctttaagcaactgaagtaatcaaagcgcaacataaaaggtgaaatgatggagaccttaactctcacagccatcagtcaaagttaagaggccagattgagggaggtcttcagtttactgagcagactaattggtagaatttcttctctggacacaatgttcccaggtcatgaacacatgctctccaggatgtttttggagaaggatgcctggtttgtgtgtagttctgagaagcatgtataattctgagaccgttcgtgtcttacaggatcttgcaaagccagaagcagctgtcttgtagtgaaaacacaaactggacttgttctagttcccactctgccacttactagctgtacgactagtcactaatctcgccaagcctcagttttcccac

SEQ ID NO: 45436 - DNA, 1534 bp, Bovine  19866881014947
  misc_feature (1)..(1): n is a, c, g, or t
nctcccacaatcaccatcaccatcatcattgctatcatcaccatccttggcaccataatgcctaaacttaaagactgaaaaggtccattaaaaaatgatctccttcaatcctctcaatttcatacacaaggaaaccaaggtcattctcaaagtccccagacaccagatcctagccctacactcctaccacgccactgccccaccctcccgattagaatgataatacagtttcagctacgaataaccattctataagatgctgaggatccacgtgccccattttcgtcttttccacaagggtctcccaacaatcctgtcgggaggtcaggcaggtattaacacccccgttttctagcagacggactgtggcttttctgacgctgagaaggagctgagctggaagcccttcagactcacggtacagcagagtctcccacggtggcctttccctgcgcatgtggggaaagccctgggctgaccttctgggtcccagtcccaccctaccactcgcagctgtgcgatttggaacaagttacttcgtgactttgagcctttgctgcctcacgtgtaaaatggggtgtaatgatgtgcattagagggctattctgagaagtaactaagaaaatgcaagacatgcccttggtctggagccagacacatagtttatactctggtaatgtgtcatcacagtgggcaggggtgacacgtgacctcagagtgcaggtggaatgtcagacgggggttcagagggggctgggattgggctgtgtctccatggggattcctctcgtttaaggagctaatataccatgcacttgaggggcatcaaaaaaatttcctgtggaatcacttctttctgacattccaaaaaaaagcagatatgaattccatctgctccaacactccccagttcacttagagctgcctagcatctctgcattcaccccaccctggtcccccagatctctagcatgtcacacttttcagaaggccttgggaaagtcagggagtgtctctgagcctcaacgtggagcaggaagtcctggaatttcctacgtcaggacagaactgttgaaagattcacacctgatgcgtgtaagagattttcctagtaactatccaaattggagatgttttactaacaagaatgataataataacgatactgttggctgctgctgctgctgttattagtttgaaacctagccaccaaacctgggcttcaagttctgggggccttggacaacagagcctaccctgacctacaggcctcttcaaaacagagctttgctgccacctcctggcggtgggaagacaggcttttcataatgcagatgccccagaggtcttaccccctcgagtcttgacaatagacattcagagtcaggaggtgtccttgggaaacaggatcatcccatccaggcccccggttttgcagatgataaaattcagattcgtgattgggattctggtgacccccacaggatgaagtgtcagagccaaacacccaactctcagggctcccagaccaggg

SEQ ID NO: 45437 - DNA, 1173 bp, Bovine  19866881025134
  misc_feature (1)..(1): n is a, c, g, or t
nagacttttctctctaggaaagccataaagtctggaggcaaaatattattctatatattatgtaatatcaataggctgtttattagcctatgtttccagactttatggcctcctataattatgtaaagagtcaaaataaatgattacaagtatcaataaaatatgatcccaaataaattattcaaatgtatattaaacccacagaatgataagaatttggtgcaaaagctagatatagtagcaacctgaattatttagaggagtttcccaagagaatcaagattttttttaagctggatttaattgcaatgcatagccaaaaatataaccttcttggacagcataaagtaaagactaaatgatgatttcccatctgaataaaaagcacatcagtctaaatggccctgcaagagaattgacttaatcatatgtgcggaagtagttgcacaggtaatttggatccaccactgtcacactggctcaggaaggatgtggaatcacttctcactgccctggcccctttcactgtgttctcacaccacctgtaaatacttgtgtgcctcagaacttggcagtaatgaccaaaaaccaacgtctattttctacttattggaaactctatccagagtagtccaaaggctgtcttaaaattcccacagaactctattgagagcattattaaaatgttctctcttcctgaaattactcaacattttcctgataaagtgtgtaaaaaagcaaaatgatgcacctgtggttacaaagcagatgaaggctaggctagggaagcccctctcagactcaagtctccaaagacccttcctaaaggttttaaccgacttcagttaccagcaagcacaccagactgcgaaacaggtgcccagtgtctacactgctgtgtcatttgtgaactctcttctgttcttggaatctccgttacattattagtgaagtaaggaatagcggttagatagtccattacagcaataaaatcatgtgactgttacaaacagtatctccagatatctgctttcataaggcagcctctttgcactgaatcaactgaaatatcagtacaataatacaggaatggttgccaagcagggtatattaagcaaattttgtctcagtcccagataaacaatgctacataagagatgcaagaccatcaag

SEQ ID NO: 45438 - DNA, 905 bp, Bovine  19866881042931
  misc_feature (1)..(1): n is a, c, g, or t
nggtacagaggaggggcacaggggaacaggcaagcatcctaggggcaaagtgacatgttaatcactcagtcatgcccgactctttgcaaccccatggactgtagcccactcctctgtccatgggatgctccaggcaacaatactggagtggattgccattccctcctccaggggatcttccccacccagggattgagcctgggtctcctgcattgcaggcagattctttatcatgtgatccactggggaagcccaggaagccctatcctgtgggcagcggacctccaggtgactgcgcggtgcacatggtcaggagctgcgggcatcatcctcactgctggagagctcagctctccctcctctgacctcagggaattggggcccaagctctcctggcacccccgttcccacagaggccgtcagggacccagggcctcagagccagagggaggggcttcctcagcctcctgccccttcggccttcccttcaggaggagcaagccaacacacagctgtccaggtgccggagggtccagcatgaactggaggaggccgaggaacgcgccgacatcgctgaatcccaggtcaacaagctgcgggccaagagccgagatgtgggagcccaggtgagagcagactccccactccaaacaccctgagactcaggaccaggcagcagccgcagagctcagagagtgcttgtcagtgtccctccctggctgccggctgtgccttcactgaggtactgctttagccaggtccccgggggttccagctcacaggagcagtgaggggctgggagccagatgccctactatccctgcccctccctccctgttgcaaaaggcagtgcccaagaagcccctgattttggggggattcgccccatctaccaggggctcgac

SEQ ID NO: 45439 - DNA, 2234 bp, Bovine  19866881214538
  misc_feature (1)..(1): n is a, c, g, or t
nattccgcaaactccgcacgagctggaggaggctgaggaacgggctgacattgccgagtcccaggtcaacaagctgcgggtaaagagccgggaggttcacacaaaagtcataagtgaagagtaattcattctaatgtgaaaaggtgaccaaagaaatgcacaaaatgtgaaattctttgtcactgtcaaatgtaattttaatatcaaggaaataaatcagtagagaattttgcaatctaaaaatacgtgtgtctcttaattacaagctcaacagtgctattagaactaagtcatttcgttcaacatttgttatgctcctactgtgtgcagtcagagacaatgacaaaaaatgaatgcggtcagtgaaccaactttaatagaaggcaaatgaaatgaagcaaaggtgtttaatggaccctcaattccattcaaccatttttactgagtaccaagaatgtgtctgtacagaaatgggcaccatggatatgactactgtgtccctgctcttgaacttcaagccagcaagtcatggcagttcagattctggtacagcatgcatactctgcgagaagcatgaaaacaaagtgtggtaacaacagagaatgagatgcgaacctagggaatccaggaaggcatctcagaggagacggagttagctcctaaaagatgagtagatagctatcatgtgaaagagaaaaggagatgagcattctaagaagagaaaacagcatgagatctcagaatagttgaagcagaggctccatgagcaaagagcatctgagaaggccagagatggaagctgagatctgactgtgaggggcacggccccacacgcaggcctgaggaattaggacaagcatctaactggtcacatttcatgtggaggagagttgatgtaattctggtagtagcgtggaggatgcagaagaataggaaagaacagagcctggaaagactgtggagctttttacatgagacagactgcagatgacagtgacagaaatgaagaagaatgcagcatgaaagcaaggctccaacactgctataaagaaaggcctgggagagcatgagaaaggtaggcagtttcacaccactcaaacctcacagttactttgtagttacagattttatttccttccgagggaaaagcttttcctcggaaccacctatctctccaagaagaaggacagaacttttaaggtaaatcttccttttgacccaatttctacatacactcctgcttaccaagaaacctaaattttctcagtaccatacatatttcaaacaagaactagaaaaaatttcttaatatcaaaaagaatgtgactgaaattttatcacagccattgccagagtactttttaaaaatacttcttaaagcttacaatttggtttcactctgtagacatttaaaaacaagctagtcgaatcccaatttactcttttacagggcatccctctctcaagaggaagctactgtgagaagtctcctttccccagtgtgggaatcctaattagcaataaggaacctgcttcatgagaagagaatttaaaagcagtagaacataattataaggaatattttacctaggtcatgatgaagactaatgaaatattctgcctggagtaggcgtttattatcaaattttaattaaattctgtagagtgaacctattgacctcaaaagcactgggcaattgctttattatcctgtctcctaactatttaaataattgcttatgtagagagttgagagtggatttcattatctaggggtcaattactctggggtccttgattaaataaggcagcaaggatttagctagttaatattcttcttcatcttcttcatagattaactgatttatagatttatatccttatgtcttacaataaaaccacacatgatcatatataaatacttataatgctctttgtattttctttaactgatatgagggatcattgagatttgggaactgtttctaaattattgataccagatacaagaatccaaacaggatgccagcaaggagaaagcagaaggcagtctccatgattaatgttaaatcaggaaaatgcaggcagtttaagtccaattccttcctgataagtgtcgcttggacttactaggatggaaagaatctaagactggaagaagactgtgaaatgttacaaagagcaaggggcattttctctaacttacagatgaatctatttaaaatgtatgcaag

SEQ ID NO: 45440 - DNA, 1500 bp, Bovine  19866881311041
  misc_feature (1)..(1): n is a, c, g, or t
nattcttaccacccaagttacagaatctccttcactggagcaatctcacctctacaaggaggcaaagctgttaagtcattaggaaccaacgttagtaaccaccttaactcaatttttctccttacccttgttgaccaaggctccatttggttcttggctcagtttacttacgagaaaattatggttctattatctaaggctaaacacctgtaagtgtaaagcaccagaggaaaaaaggacaatagccaaccaataattacaagatttcagaacacaattgaacagcctcaaaacttcatttctctgtaataagtcttgttacccactatttgaggaggcaggaaagtgctttccctcaatatgcctccatactcttacaatttgaaatagttttaattatactagaatcctattaatgaccttgaacaaagttctatactttgcacacgggatgtttgccaatgacttaaaatttggtcgcacaaacctcaaatgccttctttgaataccattttaacctgttgagtacccaccattaccatgtaatttcacaacagacaccaaaaatgcatgcaacaaaacttttattaacattttgaacaggttcagctattactgaaactggtaatttctaaacttaaattggggtaaacggctagagtgcagaaggatgtcatcattgaacattatgaatagaagactgaagaattaacagccacccctcagacgaaggaccaggtgcagggtcgactctttctggatattgtaatcagaaagagtgcggccatcttccagctgcttgccggcaaagatgagcctctgctggtcagggggaatgccttccttatcctggatcttggccttcacgttctcgatggtgtcactgggctccacctccagggtgatggtcttgccggtcagggtcttcacgaagatctgcataccacccctcagacggaggaccaggtgcagggtcgactctttctggatgttgtaatcagaaagagtgcggccatcttccagctgcttgccggcaaagatgagcctctgctggtcggggggaatgccctccttatcctggatcttggccttcacgttctcgatggtgtcactgggctccacttccagggtgatggtcttgccggtcagggtcttcacgaaaatctgcataccacccctcagacggaggaccaggtccagggtcgactctttctggatgttgtaatcagaaagagtgcggccatcttccagctgcttgccggcaaagatgagcctctgctggtcagggggaatgccttccttatcctggatcttggccttcacgttctcgatggtgtcactgggctccacctccagggtgatggtcttgccggtcagggttttcacgaagatctgcattttgacctataaggttaaaaaggaaaaggttaaaaaggaaaaggttaaaaaggaaaaggttactgtatcattttcacaatcttttaccgctttcatagttca

SEQ ID NO: 45441 - DNA, 1118 bp, Bovine  19866881453445
  misc_feature (1)..(1): n is a, c, g, or t
nctggaaggtttattgaagaaagaatgaatggttaggaagatgtgaacatatatgaaagtcaaatgacaccaaaaagaaacatcagtaaaaagaaagaaagcaaaatagaaaacccaattgtccatattggtgaatccatttttccacgagctaatgcatacttccctcctatttgtaagaaatgccacctcctctagcctgtattctgttctaccaccacaagactatattatttgacttacttcataatacccactaaacagggtacatagaacacaatgaacagaggacaacagtaaaaatgattaaacaagcacagcatttagtgaaatacaacaaggagtgactggcctttgtttaaagtccccatagaggattctgctggggaagcccttcctgcagatgcggatgccctccagcaccccgttacacctcagctggtgcaggaccagctcatgctccatggcccctagaaagagatcacagtgcatactgctgggcagttcaactgtcgcacttgtgcctgtttgattatttcgtgctcttagatcttccgggagttttggtttcattgggaatgatacagcgtacgaagtgggggggtgtgtgctcctcagattggtcatcaatttatttaaattttcctagaaaaccagggagaagggacttgatgagaaagttctatttcaggttgctttttttggcaattatatgaaatgaacctaggcactctcttaactattaagtctatgaggcttcagttgctctgtgttttaagggtctcaagagttgtagcctgccaaataactgaaaggccagagtgctacggagaaatatagctctctgtggtattcatttatgacacctaggatctgtcctgtaaacaaactgccaattcaagtggcattgaggcacatgaagtgttcttgagcaagaatcagaaaataaaagactaccgtcttgctttgccactaacgagctgcttgaaatcccttttgtctctctgggtctcatctgaaaatggttgagatcacctctaaggtctctcttgcctctctcagtgctaataattctcacagtactagtctacagtggtgacctatgtcagtcactgtcc

SEQ ID NO: 45442 - DNA, 1284 bp, Bovine  19866881521852
  misc_feature (1)..(1): n is a, c, g, or t
ntgagtgatggatattgaagcagaaaatttcctcccaggtccggatcttggaaacactagtgatggattcttttcagtctcctaaacatgaaggagaaagtttaggcagattctcagagtagacagtagtgacagaccagtgggggagtcatatagaatttagagtggatataaacacgtttgtccttttctggaggacatagctgtcttcagttcacatgttttcactgaagaaacaacaagatgccatgtgatactccatgtatgtttccactgaataatggaaggagacataatacacattcctagttaacaggcaaatcttcatgactatttgttgctcaaatgaggtgggtagtacacatttttattgaaggtgggaggaaagctatggtatccataagactgtctctctctgagttgagaacatgagtgggctgtcacatatgcccatagtacatgtaaattgggttttggtggttttgctatagacagctgctgctgaacatgacaggaaacctatctacttggtgtgactgagatctgatgtgatattgttggctatcatctgctagcttaaatgacccatcagtgtgattactgttttcaaatgtcctattaacttagaatttctttttcatacatttgcagattgaatcttttacaggttttatttctttgatacactaccgtggaagagttggtcagtctgttccccgcctcccctcccccagtctccatggaaatgattcacagaaatctagtgacttacccaaaatgttagtcttgaagccagaaagaagagccaacttttgatttttttctcaaatttaagattttcacaacttatttagttttactttttctggacctgaatatctaaatgatagacataaatgttatcaaacacgtgtactagttttggagctgaaagatgaaagaagaaactatggatgaggtcaagacatataggctgagttatacaggtagagctactggggattctctacctaatatcacagctttgcccagttgtagatagattgaccatgcagttcttaaaaagtctaaagcaaggagtaggtggaaggtgaggaagtagagtcggtttgtatatataacacttttgagaattcttgtaaagaaaagcagagaaatgactcaatagctggagaaaaaaatagggtcaaggggagagtttaagaaaggatatagtagagtgggagacattggaaataaaactgaaagaaaaggatagttcatcgtagaaatattcccaagtag

SEQ ID NO: 45443 - DNA, 1995 bp, Bovine  19866881525147
  misc_feature (1)..(1): n is a, c, g, or t
naacgaaagcctttccagaagttttgcatccattgttctttctcaaatgccttcatttctccacccttctcatttgcttgtcagatgcacagagaactccccaaattcgtcaacaaaaaaaactaattaagttgtaaaaactcttcagagatgatattttaaaatttctacagaaatgaatccttgtcctaatttaatcatgacagaggctccttattttagcgatggctcatggaagagtgtcatttgtttttgattcataatataaagtagaaatagaaataggaagttggaggccactcttctcatttagcaagtgttttactgataaatagctacaagcttttgttgtgtttgaagtgaaaaatgaaactgttgagttctgaataatcaaggacatacttcacagaaaatctgctaatctgatgatggtgtcggtcagtccctaagtcgtgtctgattctttgtgacctcatggactgcagcatgccagcttccctgtccctcgctatttcccggagtttgcccacgttcatatccattgagtcggtgatgctatccaaccacctcatcctttgctgccctcttctccttttgccttcaacctttcctagcatctctaccagctaatcttgtactcaatctagtattttcgtatttataaagaaggttttggatgcctggggcctcctgcttgctgtgggcacatggaatccacctgtgcaacataccatgtaggacattaagccagcacttataatattaatgtgcatgcatatcacagggggcttttgttcagatgcagatctggcttcagtgggcctggggtggggcctgagactctgcattgtctaacaagcttccaggtgctgctggcctctgagcctcaatttgagtaggaaagcatttgagtaccctaaggggtttttaagtttgcaagccatgattaaattctggaattagattggatttagtttacttttctttcttcatgggttatgtaagactacatagggtcatggaaagaacacaggttttggaattagacctcaatttgagtctgtttaatctgagaggtttgaaggtggtaaaaaggatggtgggcgggagggtggtatctggtgttcctatttgcccagaggggtctcttgatcgccatcatgggttggaggtggggcttgggaatgtttcaccctggctaggtaaggaagagaggtggctgagagctgaatggtaggcccagggtcttaactacagcatgcatgaacttgacagcatacagagagcccagggtggtcttgccggataccagtgtgttaggaaaaacatgtccccacatctcaaggcacttgatcccattccaagggggaatgctggatgtgttgtgtggtttggtttgtgggctggaatgtgagccctgtggctaccatcagtgtggacactctgctcaggggcagggacagaacctcctccaaatggctgaagagtgcagggtcagggtctggcagctctgggttcaaatcctgactcagaccctgctgcctgagagaccctgggccggttgcagaatctgcgtaagtttcctagggctcctgtgaggtagccaggcaccttgtacacactgttagtggagtctacaccccccatgttctggggatcatgccaagaccaatactgagagctaccgctttactggacttccatttatgggggtgcggctggggtgagaggaaactccctctttccctgggcccctctgagatcaagtacagggctccctggttgcagtcctgtggtcagggccttccgacccacaggcagaagtcaccagagcctcttactgaatgtagatttggattctgagggtctggggtgggacctgagagtctgcatttttaaaaaggtctgacaaggagatgctgcttgtctggggcccacactcttagaagcactgccggagagcacttctctggatttttcaggacccagatccta

SEQ ID NO: 45444 - DNA, 1384 bp, Bovine  19866881699602
  misc_feature (1)..(1): n is a, c, g, or t
naatctgtctgcttgggccagcggggcctggaacataccttggaacaggacacagagaggctcctgcagagaacacagcctccaaaaacagagtcctgggagccagatgcctgctggtcccaagccagggctctgaaggcgagggctggggctagacagagatagccccccttgagcacacaggctaaggatgaagcagggcccatctctcctttcacacaggtattcttcaaagctgggctcctgggcctcttggaggagatgagggacgagaagctggtgaccctgatgacacgcacgcaggctttatgccggggctacctgatgcgggtagagttcaagaagatgatggagagaaggtgatgcaagctctcgcctccctgccctcctcccgggagctgaccatcgcttcgtgctttaatcttaagatgttcactaatttgtcccacatttactgagccacggttctgttctggggcctctgcttgacactggggaagcagaaatgatccctggcctccaggagcccacagaggagtgggaagcagacacctgctcggctagttttgtggacggattgggggctggggttggcatgaaagggcagcaaaaaacaaagagctttccaaaggaggttttgcatggctggaggaagggtggcctgtgggttggggggagcaaaagcaggacacttgactgaagcgaggagaggctggcagtggaggtccccacctgccaccttgaagagcccaggttaaatcttcctcttgatggggagccatgaagatgagtgagaggatcggatttgtttcaatagctcagacaggtcacctgggggactttcctggcaagccagtggttaagactccatgcttccactgcaggaggcacaggtttgatccctgttccaggaagtaagatcccgcttgccacacggcgtggccataaaaaaaaagcacacatactcagagaggtcactggcagccgcaagaagagcaggcctgaaggcacaagaaggggaaggccaggctgtagcagaagtccaaatagaagatgacaggacctgaattagcaaacaggatggaaaggattgaatgaagcttggagggccttcgtccttcagtaattcaacaggaggaacagcagcactgtgggccagtcctgtgcggggattccctgcgaccccttccccctgattccctgtattcccctgtccttcactacctcccgaagtttgctcagactgacaaccttagggtgagcattttcagtagggtggtggaggtggaagccaggtggatggcacctctctcacctcctaaatttgcacatgctgtttcctctcctcttcatttccagaatagactctggagctcatgggatg

SEQ ID NO: 45445 - DNA, 1630 bp, Bovine  19866880389291
  misc_feature (1)..(1): n is a, c, g, or t
natccgggcagcctggggcaccagtctgtccaactggaagggggcagagcttcttgctgagcaggcgctcttaagccccagcagatctaggaattctattttatttcttttttttttttttttgcctttaaacatgcagattggaatatcagacctagaagttttccgagccgcacaatttatgctagttcattacctcctgctacactccacggctttgtaacggaaattggctctgatttctgagatgggcattacatcatggtcttcttttagcacattatgtcatccctgctgagaggcattatctagggttggctcagcagtagcgatttttgtgggccgactgcagtgttcccaaagagctgctgggaaccacagattgaaatctgaaacatttatcttctaaaacgctgaaaagaaggaaagatgttcacatcgtaccccatttattttccttaaccctctcctctctcagttcctttgagagtacagcacagcaaatgccagagatcaatgtgtggagcctacacagggaggatcatcttgaaatagctgctgctagaggtacctgaaatactccttccatacacctgacacttttggttctatctcaaggggtgctacaaccccccctgaaaggaatcaccttgtacacttacactgataacacagagcatcctgcctaattcctgggttatttaagaatttccatcccatgatctgtttataaatatgtgtaaatgaaaactatatacaagcacatacatatgcttatcctcctgaccacgttgcagccacaaaggcaaacctctagaagatttgtattagaaataatttttatgcagggaactgagctgatatgatctcttctcacatcaaccatgaaattagaagcgcattttgtatctctccatcgtaggcaggattagaaaccactgcacagagggaatagataggtgctttcaggataaagcaaagatcttcccaaaccccagagaatcccaatgcctccctcatcacaaaagcataattatgaaaagaaagaaaagtctctaaataccaaaaggaaatgggatacattcaaccatgactcaattacaatttccctcttatataccaactaatgagattcactgggggtggggggaagtaattgctgggagaggggctaggaggcaggttatgatagtcccttccccaacccagggtgcttcatttctcatccactgatttttttctatagtaaatatggttgtgccctcagttgctttttgtggctctcaaatggtaggcacagccaaacaagtaacttcataattaaagtagaagtggttaaacctatcgtttgcaccagctgaagagccttgcttctacttctaccctaaacgatttttcgtgttctttaataatgtcctcccctcacccccaggggatcataaaacaagatggcggccttcatccagggcacagccatgtgagccgtctgcgtgtgctgaaagggggtcgggacacccggccccacactcatgatacagaaacttactggcgacattagagcaaacaactgatagcccctcttcagcacctcttctttcacatttcacatccatttccatctgctccttat

SEQ ID NO: 45446 - DNA, 2772 bp, Bovine  19866880396426
  misc_feature (1)..(1): n is a, c, g, or t
nagacagagatatatattattggattggatgttgggaggaagggaatggaagggcaaagaatgagttcaaagcttttgattcaaataactagacagatggtgataatcgtctattgagatgggtaagcctttggacatgctatatttgattgcccagaaaaattctgagtgtacagttggctatttaagtcaggaactcaggaaagagcgaggctgaagatataaattatggagttgtcagtataaagatatttatgggattggatgagatcatctagagatggagtgactatagaaaggagaagaatgctgagtctagggcaatgcatcttttataggtcagtagaggaaagggctagcacacgagactcaggagtaattggtgtgggaaatactgaagacatgggttactcaaattttttaaaaaatacacatttatttggctgtgctgggtctttagttgtggcatgtaggatctttgaccttccttgtggcatatgagatctttagttgcagcatgtgagatctagttccctgaccagggatcaaaacttggtccctgcattgggagtgtggagtcttggccactggaccaccatggaagaccctgggttacatgacgtttagctagtagtttcataaaatcacttctatgggaaaaatgggatatggaagaatgtgcactggagagaggtacaggtaggtgggttaggactgtgtgtaccaaagaagtgtcaagcaatggattagtgggaatttgaagatctgtaggaagatcccctggaggaaggcatgctaccccctccagtattcttgcctggagaatcccatggacagaggagcctggcaggttacagtccatggggtcacaaagaagcgacttagcatgcatgctcgtaggagagaactttagttcttgtccctgtctcatgaatctgcttaaaaaaaaaaccctcttgagtagaaagaatttgggtcagacttacagtaatatgaagatgaagagatggttatcacatcagattgattagtaggttttaaaagacatggtgaaccatagtagatgctctgtgtctattgtgctaaaccaagcatgggttgatgggggcctggcctagggtggtggttttgagagtgaaggattagaatctagacatatttgaaaggaaagtggtggcaggattttatgacttatataagtgactggttatatgtgatgagatcaaattgccaacatctgttggatcatagaaaaagcaagagaattccagaaaaatatctacttctgctttattgactatgctaaagcctttgtgtggatcacaacaaactgtggaaaattcttaaagagatgaaaatgccagatcatcttatctgcctcctgagaaacctgtatgcaggtcaaaaagcaaaagttagaaccggacatggaacaatggactggttccaaattgggaaaagagtgtgccaggctgtatattgtcaccttgcttatttcacttatatgcagagtacatcatgagaaatgctgggcttggatgacgcacaagctgggatcaagattgccaggaaaaatatcaataacctcagatatacagatgacaccaccattaatggcagaaagtgaagaggaactaaagagcctcttgatgaaagtgaaagaggagaatgaaaaaaatggcttaaaactcaacattcagaaaacaaagatcatggcattcggtcccattacttcatggcaaattgatggggaaacaatggaaacagtgactgactttactttcttgggcttcagaatcactgcagatggtgactataaccatgaagtgaaaagatacttgctccttggaagaacatctatgaccaacctagacggcatattaaaaagcagagacattattttgccaacagaggtccgtctagtcaaagctttgttttttccagtagtcatgtatagatgtgagagttggactataaagaaagctgaggaccgaagaattgatgcttttgaactgtggtgttggagaaaactcttaagaatccctgcaaggagatcaaatcagtcaatcctaaatgaaataaatcctgaatattcattggaaggactgatgctgaagctgaagctccaatactttggccacctgatgcaaagaactaactcagaaaagcccctgctgctgggaaagattgaaggcgggaggagaagaggacaacagaatgagatgtttggatggcatcaccaactcgatggacatgagcgtgagcaagttccaggagttggtgatggacagggaagcctggcatgcagcagtccatggggtcgcaaagctcgcacatgactgagtgactgaactgaactgaactgaaccttgtgacagcgaagtcttatacatagtcctggttagggttcagggtataatttccggtgtggtaggaagaaacatttatgggtttgctcttcagaagaaagcttatttcagttggatgtgctggctggtgctgcaagatagcaagagatctggtaaatctgaaaatgctgccagttagagagcaatcaggcacatgcaacttcgtgatagggactcagaagggaattacaaaggattaaatggaagaatctgcactagaaaatgttggtgatgcttatgatttcacaaaatgaatttgctttatacaccttaaagggtttctgaaaatggtcactgaagtgaggtgaaaggaaagatgatgttaagaggtttttctaacttgactttgatattcaaaggaagg

SEQ ID NO: 45447 - DNA, 1564 bp, Bovine  19866880478715
  misc_feature (1)..(1): n is a, c, g, or t
nttaggtgctaaagatttagctaactgggaattgaatggaggaaagagtcaagcagggaaatttgtgcatgaaatggatttttttgttcctctgaggatttgttgtaagcagatataaagtgtttttctccctcagagtacctccaagggctttcataaatcaattagtcactggcagggcaagatagaggagggggagaatgagccatgtggtgacagccagagaccctggctgctctctctctctcaggcatgctgtccttgatcattagataaccacagtgacacttcaccccctggagactgtttccattacagtcagaacatcagagcaaggggaaggctttcaggatctcactctgctccactaataaacaaacacccacaagaagagattgaggaagagggaggctggccatccttttgagacacaaacccaagaaaatgaaatgaaaagaaatcaatcttttatttgctcacttgggttccagaatacttatgtattctttcagcctttgactcttaatgtggaattcggatgtttctttcagttcaatagacaagaccagcaaagcaccaccaaggagtcttcattctaagaggataaggctcttgacacagtgcttctcagcttacaaagtaggtgcagcgtatctcctgccagcttctcagcaggcagagcctacagcatatgtcttagggacccatgagctacagagtgaggacggctctgaggaacacctaaaaatgtgtccagtggagctgtcagaacaattctccatcagtcactctgcaggaacaaatggagcatctgaaatgcacgtcattttaggcacatgttttgaacttggagttcctggcttgtggatgttaaggccacgggggaggtaggagtctggatgggagaacagggtgaccattgcaaagggttcaagagagtaaaggtgaattccataatttataagatctggagtctttcaggctactcaacaagcagagggattggaaagaaaaaaaatgcttcttatataagagctgagagctcttatctcattcttgggaacaagctggggggtaggtggcaactattttggtcttcagtttcacagttggcagagctgagatacggggaagagagttggtctgtctgcccactgagccagatgtgcatgccaagagtccctgtaaaatcctccatcagtgtcgttcccaacctctgccccgagtcctctggcagcctcctagagacagagaatgcacagcatcactgaggtcaccccacagacttggaggcagaagacctgagcttgaattctggctcttctacttactagctccgaggtcaggcaggtttctcaatccctctgcagcaaatctctcagtttgcttctctttaaaatgaggatgacaacaacacagggcactgggagaattaaaagtgcttgaacgcacttaagccccctgtctcatacaactcagcaaatgctaagtgggtctgaatttaaagaagtaaaacaagccccagatttccttctctgacttcttttgatctcacggatgagca

SEQ ID NO: 45448 - DNA, 1633 bp, Bovine  19866880509742
  misc_feature (1)..(1): n is a, c, g, or t
nccctgggaaagagtcaccaagatggtccatgcaacactccagactcctgtgagagaaacacataaatgcccaagtcccttttagttcccaaactacctcaacctctacatcaaaatgcatcattcaaatcagctagactcaactgcccaaaagcaactggattgcaaatcaatctcttgcaaatgctttggaaaatgtctatggaaaaagcccctcttggagttattctcagccatccccacaaggtgagtttcatggatgtcattcaacctacattttaagtcaggtcatgtaaatgtatttgccagttaggatgaaaatccatccatgtgttcctccattatgtactaaaagcaaaggcaaacttctatatatgtgagaaagaacaataggtaaatcattaccatagaaatttatcagatcaaattttaggaaaataaaaatggtggggatgatagggaaggttaggcaaaagcataattgagatgaggctttttagaaggaacaaatttcagtgcatgggggagggggaaggtaatcctcaggtcaaattcttaagcgaaaaaataccattgatcaacccagtctagggactgattcttccgggatcagatacctactcctagtctacacactcagctgtgacctgaagagggctgagtcacacaatccactgtctacactgctccaggagggggcgagctgatttatgagaaggggagttgggtgggagggactcatacagcagaacctgtctttagaaacctaaaagacaaattgtagccctgcgacagttatacaatgatgtctactggggaagaaactcctctccccaattcatctatgctcagataaatgctgtatccactactctgatcctgtgcgactcgtgtgagtcaagatgaaaacagagtgtaaataaatggcttcaccctggcttccgtattaccattaatattattaaagataaacagatttggaagaaaggaagcttcctgggggctatgaatgaagatggttccatacctgtcaccaaaatgctacggccacattcagaatgtgaggtttgcatcaagactaataccttccttcaaacgacagcaagagtgtcctattaccaacagaacaaaaacaacatccccatgagagcagtgaaactcttggccaggaataccaagcccacagcaggtcttcgaggactcagcttgagaagctgagggcaaggccttgggctgggtgcattttgatcggaaggatggagaagcctctggaagcaggcttcccagagatggtccagttaggatctgacttcacagatcaggaaactggagccccatggggtttagagtccagggtgtcttcacagaaaatgtgggatttccttccggtccgaggcttttcaaacattgacagcaggctctgagtttgaggtgggaggaccagagagaagaagacacttaactataaaagccacatctttctgaggttagactttcaaactgaaggtatttccttttgcgactcatcgaaagtgtgcagtcggcatctttaaatacaatgattgaagggcaaatgctccttgacttgacagcctgtttataattacagcattagtacagacacagtttaatt

SEQ ID NO: 45449 - DNA, 802 bp, Bovine  19866880589462
  misc_feature (1)..(1): n is a, c, g, or t
natttggctgtatgcactgttccctcaacatctaagaaatcacctgacttattattgcctgggcacttcagaatgtcagcatgaagcacgccaagcaaaatttaagggatattaagtaaacacctgatattcctagtgctgaaggggaagagaagtactttgttcctattttaaagctacttcagagggagaaaatagtgatagggcctggaaactcaagtgttatgagcaaaacctataaatatgatgtgaaggacggggtcccacccactcttcccccatggaagtgaagagcgtgactttggcagcaattaaaagctaagggcttgccaatgatgagttcttccaccaaaaagataaattagagattttgtggggtttgtttggttttgacttcacccattccccagtgaccacaattaaaagtgggccaaacatcatgttcctcatttatacaaacgaaggtggaaaattatggtatgacccgtgtatagactgacctttttaacaggtatgatatttgaaaaactaggggtggagacagagcttcctatttgatgactccccttctccctgccacgccccatgattactaaactctcagactgtgtggagacacttccattagggagtagtttaaagaatcttgaagttggagccaggcatttccatctttggacttcaattttgtcatctgtaaaatgaaaatgttgcacttgcagtatgccaagaggtcttaggatttagatattttatgctttcaggtgctgctaagggaactcaaccaaggccatccccctaa

SEQ ID NO: 45450 - DNA, 1313 bp, Bovine  19866880634640
  misc_feature (1)..(1): n is a, c, g, or t
nttgaagaattggtgcttttgaactgtggtgttggagaagactcttgagagtcccttggactgcaaggaggtcaaatcagtcaatcctaaatattcattggaaggactgatgttgaagctgaagctctaatactttggccacctgatgcgaagacctggctcattggaaaagactgatgctgggaaagattgaaggcagaagaagaaggggacgacagagaatgagatagttggatggcatcactgacccaatggacatgagtttgagcaagctcgggaatttggtgatggacagggaagcctggtgtgctgcagtccatggggttgcaaagaaccagacacaactgagcaactaaactgaactgatggtctattcatgttcaggactggtacaagagcaagacttacacttctgctgcatgcatcatgataaggtctatttacagcagtggccaggttgctctagtataagcgttgaaatgatttactgaaatggaaagatactcagtgtacgtacgagggtagaataagtcaaaacactgttatagtgtgatatcactttttaaaagattgtgtttaaaaatgtatatacaaacatgtaagaaacttctagacatatatatatatagcaatgtttcagtgtctgtctctgggtggtggtggtatagcatggcttatctacatttcctaatatgaaatatgactgtataatcaagaaatcaaagctatgtttaacattaaaaaggaaaatacgtcttaagatgtaaatacagggctttcctgctggctcagtggtaaggaatctgcctgcaatgcaagagacatgggtttgatccttggtccaggaagatcccacgtgccacagagcaactaagcccgtgtgccacaactactgagcctgtgttctataactgggagccacaaccactgagcccgcacaccctagagcctgtgctccacagcaagagaagccatctcaatgagaagcctgcaggcaaccagagacaagcccgaatagcaacaaagacccagcacagccaaaaataaataattattttttttaagtaaatacaagggcttagcctcccaaagtggataaagctctcctgagggaaattagggaaggcttctcaaaataagtatctattaatgacctctctaacacagaaaatctataaattcactacagcctgagaaataccatagttcaattataccgcacacctagttcccagacttcacacattgaggcttgtcagtgaaatccgtttcccataaaggatggaagaaataaattatttgcctttacaaag

SEQ ID NO: 45451 - DNA, 1521 bp, Bovine  19866880862349
  misc_feature (1)..(1): n is a, c, g, or t
ngtaggatctgtttccactcttctagattctgggttgccctgcgacttctttgaccactgagatatagcagaattggtgccataccaagtctgagtccagtctttaagagactcactgactcctccttttcctttcagagtcctaagcaaggcactgtgtaaaaattcaattgccttcctaaggagagcaggtggagatgctaaaacggcatggagagggaaaaagggccaaagccattcctgtcaagacatcaaacatgtggagaaaataatctaaaccctcagcctataccagccaccaactgaagagcaccaagtaacctctgtcaatgccaggtggagcagaagagccatccagccaagcactgcccaaatttctgacccacaaaattatgagatgtaattaaatgcagcaacacataaccagactaccacactagcagctattaaacactgacctcttcaaatagttcatactcaaaattcagtctttcctaaattaccttagaataatgatagaattatctcatgccaggcagccaccactactgggagaaggggccaggttccagttgagagaatagcaggatctcctcccctagcatctcttcctacgattgctagagatgaacctacatggccaaggtgaagggccatcatctgtcactgaggactccagagatcacaggccacagagcctgaagtttgccagctcacacaggatccccatccctgagggtatcctttgaccaaccctatccatggcactgctcgaccaaacccatgtccgccacgtcatggtggtcacatgtggttactcttggaggtgggatgagaaccagttctcttactgcagcccttgcccttccaggctgagctgagaggaaaagccaagtcttggaaggagagattcctggattaacttccccaaaccacgactggcagctgccacccactccaatccatgcgcctgtcctcacccacccacagggttgccaaggcctgaaggaggtggctctgtcagaaaccataattagggattccatcatatactttagctccctgagaacaaattcttccctacagcatgcaaatctattgttcaaatttcaaacacccaaatgaccttcaaccacattgttgagaattcattaggtggacaagtaaagataccacctcttctgaattacagacatggtctcaaaatgcagaaaagggcatttctaaggttgaagcaagaatgagagactttaaaacaacatgatgaaggaatacaatgagactgacaaatataacttagcagggtccaggttgtacagagagcatgcacagagatgctatgagagcggagaaaggggaggtgaaaagagggtcttctcccctcctggttcctggcttcaaaggaatgaagttccattcaatgtcactgaacaccttcccactgtctgtagagacaaatataaatagtgagctgaccatctaataatctattattcagaaagtcggatattactagggaag

SEQ ID NO: 45452 - DNA, 5280 bp, Bovine  19866880975122
  misc_feature (1)..(1): n is a, c, g, or t
natctagacgctacgtcacagtgtttactatgaagatccctaaacattggccacaaaagtagagaattttcagatttagaaaatataatttaagtaatgacaacttttaaaagaataacaaaaattcttaggtgtctgagaataaatctaacaaatatttatgacatcttaagaaaaaatgataactttattgaaagacattaaagtagacttgaatagatatatcatgtttatgaatggcaagattcagtattctaaagatgttaatgctcaaattaatataaaattcaaaatcccaatagcttttaaaaacttgataaaattattctaaaattgattattgttctaaaatatgaaaagaacaaagggtcaacgatagcaaaaaacaagtttcaaagtcagaatgaggcaggaggactttccctctggaggtgcatgcatgctcagttgctcagtcatgtcgactctttgcaaccctatggaccatagcccaccaggctcctctgtctatgggttttttcaggcaagaatcctagagtgggttgccattttctcctccaggagctcttcccgacttggatcaaacccacatctcttgcatctcctgcattggcaggcagattctttaccactgagctacctgggaagcactggataatcagatttattaaaaattaaaatagtcaaaataggaggttagcacaacataatagggattttacctttgtttgaataaatacttaatgcaagatggtagtagctttgtaaattcgtgggggaacaggttttttttttttttaatggtgctgaagcaactgattatttctatagtgaaaaatagcattataactattttattccatatataaaatttgattccaagcagactgaatgtgaataaattgtaaaactttaataaaagttttactagaaaacatacagaaaaatctttatgatttgaggtagtaaaagatttcttaaccaaggcatgaaaaccatgtcatgaaggaaaatactgataactttgatgcttttaaaagtttacacagaaaatacagcttaaatgacgattcatgacatgaggaaagatatttgcaatacatgtaactgatggaggaataatatctggaaaacttaaagaactcccccaaacaaaaaggaaaaggcacatcaacatgtaaataggcaaaagataagaacaagcagttcagagaagatgaacgatgaatgggcaatatgcttttgaaaagctgttcactttcctcagcaacctgggtaaagttcattgaaaccatagtgaagtatttttcacatccaccaggtttgcaaagattgagaaatgtaccaggtccacgtgtcagtgaggaactggggaaagaagacattcatactcttctagtgaggtgtagagaaggcgtgtacattgcaacagccactttggaaagtgatttagaatatcagataaaatttagaatgggcttaattttcactccagcaatcctctactacgctaggaaatttttttcacgtgtgaataagaatgctcaatttagtaccatttgtaatggatggaaatttgagatagctttaatttccattcactggtgaatggaaaagttgaagtatcttcaatacaaagacatattgtagaagttaaagtaatctagaatcacatgtctcaatgtggaaggaccttaaaagtaaaatattgaaccaaaaaacccaaattccaaactgagttacagaatatttaaagtataatggtctatgtggtttttgaatttatacacattacatgcatgcagttcatatatgtaattgcacatattgcacatgtcacatatatgtgatgatacatattacacaatgtagtacatgtattatacctttattacatatattttataatattttattaaatattataaaacatgaatgggagtgaaaaacaccaaataaagatgctcattccttctgtagaaaggagtatgagaaggagaagattgggattgaggagagggctttcatcctatctgcagtaattttttccccttaaagaccctaaagcactcaaattataaggcaaaattttagactttgacaaagctgagtggtgggtacatgaatgtctgtgatttcattttctactttttggtatgtttgaactacttcagaatttaaggaaaaaattaagtttaaataaatgaattatctaagggaaatatattattgtgatctgattaaaattaaagttataaatcctagtttttgaccagtgaaacccaactttcatagatcatggagtttagtctgataaactctatctctgactctacagggactctgaaagaggatagctagattaacccaaatagatcaagcgtcctgagggtaatcagaaaggatttctttagctgtcttctctggggactttgaggatgggctggggagaagaatgttggctcagggaaagcctcagagatcaggaacttctaagaagattcagcaactcctatagaactttgtccaaggcatctctgtttctgctgtcaggatcaagtttcctggccttcacgtgacctcccacccctgcattcctgcatctctgtgggcctattaacagattgctgtgggtgtcctggccacagccatgacgctgtgacgttgccgaccttcctgttagaggaggatggaggctacacaactgataacatcccctgtctgtgcagtggaaatggagagattgtgctgtgcggggaggattggcaatcacagccatggggagggaaatcttggcaagtcagggttggaagggattttagagatcactgacttattatcttgtatgtttgtgttcacatgttttgttgcaacataatatgtaaagcaggtgactacagagctgctctggttagagacaatgtgtgtgtgttttcagtctttcagttgtgtccaactctttgcaaccctatggactgtagcccgcctggttcctctgtccaggggatttcccaggcgagaatattggagtaggttgccatttcctcctccaaggcatcttcctgacccagaaattgaatctgaatcccttgcattggcaggtggatttactgctctttactgctgagccacttggaggggactccaaagaccccattaaggcgactccattaagctcctgtttccccccttcatccttctcctctcactcacacctgtgctagtccctgaccaagctctaggaagcacatggtgtaaaacactggttcatgcccaagcccttcatttaacggatggggatcttgacgtctggtgggatttgctcaaggttaccctcagctggtggggatagatccccttggctcctgctaggatgctgtctccttcacccttcaagcagttttcttgtaatttagccactatattcaggctatattgatttgttttaaattccatttaataatacatttaaaaataatcataaataaaataaataataaaataataaattccatttatttaaaaattcattctctctattctagattaaaaaaagacaattttgagtgtttctattacaatccatgatattagcatcctgctatgttacaactttttatttcactgacctccttgtgaaggaatccaagttaatttctaagtgttatgatgatggaagaggaaagagggatctagactaattccatatgaggagataggagatcagtgttaagtagaagaggaatatctcactctgcctgttctcccaaacagttttctcataaacctcactcttttagataaaaatttggttcatgaagctgcactttttaaatacccatatcttccctccaggtaaactccactgatcacctgtaccacaaactgaatattaatgatgtttctagagcactttctacatgctggcactgtgctcagtgctccttatataatccccatcacagcggtatgatggagaaggaaatggcaacctgctccagtattcttgcctggagaaccccttggacagaggagcctggcgggctacagtccatcaggctacagtctacggggttgcaagagtcggacatgacttagcgactaaaccaccaccaccaccaccgcagtgatatgaaataaatacaactattatcttcatttacagaagataaatagaagtttatagagattaagtatttcactcaaaagcacacagctaataactagcagaaccaagatttgagttcatgctcttaggggctgtgctctcctgcaatggatagtcagcttcataaccaatacttagagaatgggtatttcactgttggaagaggggataaatgctctaaatgctctcaattctgatttcctgttgcctttgtagactttagattctttaaatcagcttgatagtgagaaaaaactgttagggacatttaagtaatataaaagttaattaccaatcatctatttcaaagagaggtgagctgggtatttgaaataatacttaaaaaaaaatctctttttgcaaatggtgtcagtcttcacatcattctgattcatttgcaagaaacagatgaccaaactcaaacgggcttaaacaacaaggctgtttattaggtcttatgctgtgctgtacttaattgctcagtcgtgtctgattctttgcgacctcatggactgtagcctgccaggctcctctgtctgtggggattctccaggcaagaatactggagtgggtttccatgcccttctccagggaatcttcccaacccagggattgaacccaggtctgcactgctggcggattctttaccatctgagccaccagggaatgggttttatgtttgattggttcagtgactcaaaaaaatgtcatcaaaggggcaggttctttccatctctttattctgttttgaagatttgtcttcactcatgagttggttttccttgtgttcacaaaatggttgacagcagcatttgagggtagaatcccccttcttcacatatagtgaagaagagaaaaccagcttcctgttgctctgtcaagaacaaagaactttcccagaaacctcctttccttctcgctggccagaatcaagtgtcacaggaccatttcttagcctatctctggaaaatgggttgagattactcataggcagttaggtctgtctctttaaatgaggtcattccctcagacatcattgctttttctccgtaagaagaaagtgggatgtatgttacagaggcaaccacgatctccagtgtagaatttgcttg

SEQ ID NO: 45453 - DNA, 1424 bp, Bovine  19866880995270
  misc_feature (1)..(1): n is a, c, g, or t
ntatttcaaatcaggattcagaccactggtttgccacactggctacccactagaaaagacaagactgggaggtacctttttaaaaatactgatgcccagctcctcccacctctccacctccaagaaactgatttaatcagacctggtgtggccaatttttttcaagctccccaagtaactctaacatacagccagagttgaaaaccactgctcttgatgtttgatttttatgcctgaggataaagatatatttgctcctaggggcaaaatggaattcagaaacccacttgcccagcctctgtcaatcagcgctgtgtatagcagaggaatgagttgttagttttagttgtcaaagaattttcttcatggaaaagaagtacattaaaataccaaatcacagtatttacatattgcatgttttttttccaactgtgttcccatagcaactaaatccatttgctccctactttctcctgagttattttccatcatgagccatgctttattagtgaggcaaacagtttgccctctgaaatgactgttttgctgtttactatttctttgccaaggaacccaactctagttagcatcttcttccctcttgtgctacccacatttgataagctggctgctggtttgggcagatagtgtccctgccactttcctcaatctggagccacccttgagatctttctgatgagctactcaagaatacacaagtggagagggaagcttccctcaggaaacctgagactggaaaacgatgcgagaaaggggatccattgaatcccaaatagtgactcagtcacttaaattgacagtgggcagagggtcacccagctcccgcagacttcactaggcttggtcaggcagggtcactggtggaaaggagtcatggctttgaagctggatgcccactagctagggagaaagtgagtcctgctcctgtatgaaagcattactcagtcccctgagaggaggccccagcgaggtgcaggacactgagatttctttgtgatttcacccaggccacttggcagaccgcacggcctgtttgtttgcatgtttgaaactatgacatttcacttgctaatggggttctgcttttcaaggggacagagatgccaaagaagacggcaggagggaggcaccaggcgcggtgcctcagctcagctcctctcactgacgtctgatgccaggatggacctgggccgccagcaccagaggagagacgatgggcaccattgactgggtgatgctttgaaatctcttctcacttgctgcctcctcctgtgccagcagcataatgaagaagaattgtttcctcctctctctcaggctcctattaaaagccagagctgtggtggagctgccctccagggacaaggaggcaggtacccaggcagtctcagaggcagcgacag

SEQ ID NO: 45454 - DNA, 1234 bp, Bovine  19866881016041
  misc_feature (1)..(1): n is a, c, g, or t
ntgtgtcttgtgatggcagaaatctgagcctgaatgtgagtgtgagtccgtgtgtagcttgggctgtcctttgttcacggggcggtaatgaagaatctagttcttttgtttccttttaggctttgctgcaatgtcatgtttcttctcttcctccttttcctcctcctccttctaaaccctaataccattttttggaggctcaagtaatacaggtcccccatccacatctttgcaccccatagttattttgctcctcagactaattaccacgaaatgcgggtggtcatccttccagtttcctgtgaagatgttccttgagaccatgtcacactctgtttctcacccaactatcacctgctggttttaatctcatcgatgattcccgcctaaaacagttattactgcagtggttgccagttagtgatgtaaactcttatgtagacctcgaaatgacctcgagaaatgcactctattattaacattgtgagaataaacaaagtaaggggaattaatgaccatgaagagctagttgttatcatctaacttctgaatcctgactcaatatacaaaaaaatccctaaaatcaaacaacccaatctactggaattagattaatccaccattgcaatgggctaacgctggaaatattcaaattaagattaaaagttgtagaaggggtactaaagtctctttttacatcttcaagaatatgactatgagaatttaaagatgtgtgtctattattctgtaccttaaaaaaaaagcacagtgtaattcagcataacactgttccaacaacttgtacttcatccgaaagaatttatttgctgaagttgttaaaaaaaaacaaaacttatcttcagaggtgttcagcagcagaaaggcccgtcggtatcttctggacccaagatccaaattcaaaaaagcttaagttgatattttattctaataggacctgcgggggtcaacttctcttgaaaaggaaggttatagtttcagcgtgcatcaagagacatgttcctacttctaattcttatgttttaaaaacatgtatattgggggagagaatgcttcatgtccttatcaagtagggcataacaaaattggaaattggttcgtgatttattgcacctccagcgacacactgaagtgcgtagtaaaattaacttcgggcctatacagtagctgcttgcacagcagactgaagaaagaccctggagcaggagaggtctca

SEQ ID NO: 45455 - DNA, 1739 bp, Bovine  19866881090332
  misc_feature (1)..(1): n is a, c, g, or t
nctctgtccactccatcaccctgagagaatttctttagaatacccttcggcttacttgcttcttgtccccatgttcctccctcatcaatggcagggtacttttttcttataattttgagagagaaacattaagacttagacacagttgcacctatcaaattcttattaaattaggtggccctaaagcattattgccccctgaactgaccaatttacataaaagaatctatatagacttggggaatatgaaacgcgagttaacgcatcttaaatctgacgaccggcacactatttccaaggcgtttgtttatgaccatgcctttcacacatcttctgtggtactacaggactttcagagttggggggagagcatttttaaaagattctgctctcctcgttatcggctgattttatttaccattttagacttttcatctctaaaatcagctgctgaaatggatataatcaatgaataacaaaaaagccatttatgctaaaatttttctgaaactgtttggtggactctagtaaaatgtctatgacagatcatgaacaatagattaatgctattcaacaaagaatggtccacagactaaacaggtcctcaatatacatgtatactcacttagttgtacccaatgctatcgaagtgaaagaagcatttgtatataactgacaaaaaaatttgacataaaacataatggcaaaaaactaatattcaaaatgaagaaacaaaaacactcaaaacacgcatttctatttaccttagtggtccacaaagcgtgaggccaaaaaaccacaagagtgaaatgacacacccagccatcgcgtgtttaaatattttgatccactacaaatggaaacaaataattagaaatttcagtcatgtttcgccagatatctcaacatcttaaacaaaacacataggggaagataatggtaacacaaatattttaaaggccaaataattacatattttgaaatgaagcagaaattattaagatgtcttgactaaatctagatttgcaagatattactctgttttgcattttctatattcttctctggtgctagatcctgaaatctttttctatatagtacaattttctccattttttacattagttctcaccagtttgccaggaacataaaatgttttagtcttcaaattcttctccagcaggaatagtcaattctccaattatttgaaaagagggcagggcagggcggggggtggggagtttaagatgggggtttaaaaaatttaacctgttttaaaaaatgttcttggtcctctaaaacagaggtacttaaatttctttctaataaaaaaccacagcacaggtttctaagttgtggcataaagcaaacatgtagtagggtataagtgctgtccaaagaggtggtaatgtgagatgattatgcagaatgtaggacatttctgggtatgcatcctgaacctcagatgcttaaagaaagtaatagttatgacaagggagacggctagtatgcactgcacactcactgcttgggttttcccaggtggcaccagtggtaaagaacccgcctgccaatgtaggagatgtaagaaatgcaggcttgataaaagagtttggaagatgccctggaggagggcatggcaacccactccagtattcttccctggagaatccccatggacagaggagcctggcaggctacagtccactgggttgcagagagtctgaagcgactcagca

SEQ ID NO: 45456 - DNA, 1514 bp, Bovine  19866881127254
  misc_feature (1)..(1): n is a, c, g, or t
ntgcttttagattttcaccattgagaataatgtttaccatgggctttttatatatggcctttactatgttgaggtaggttcctctattcccattttttgaagcatttttataataaatggatgctgaattttgtcaaaggctttttctgcatttattgaagaacatcttcatcatttaagaaatatttcatagacatgaaattgtgttctagatactttaacttcattgacattttgagcttctcagagtgacaatttactgagaaatgagattatgtcctttcaggtttcttaacaccaaccacaaggtcaaatagctaaattaaaaaaaatactattctctttaacttttctatagtatttgactatgttgagaaattttctttctagatattctctatttttgtcttctctactgacactgccagaactggactcttatcttctgtcttctgaggtaccatctgaaattttctctccccatctctgccatttcatccttcccattgccattaaaatgatctttgattaattcatatccctgcttagaaaacagtgatacttcccagttacctataggaaaaattacaaaaatccttggccatgtatctaactccagtctcagcagatgcgggataatcagtctgccctctctccattgggcccagtcttccttgtcctccttctctgcagccacttaagacatgtggctctccaagtgcttcctatgaccaacctaggtcttggaaggagaccatagctgtggagacctgaacatcgttgcaatggagaagagaggaaaggttgaaaaccaagaggcttgtctgaacagtcatgatctcagctgtctgggcaaagtggtttaccactctgaaaataacactgctgcatgtgtacagagacctcagtggagaaattccatggcttgagagcatagtggagtgtattggtgtcttgagcacgttggtactgttgttttgggatgggagaggggtagctgtgggctatgggaaggcaaaaggatgcaagtgcaagggaagtgacaaatgcttccatttgtctgaacttaccctgaaccactctaatcacaagaatcaggtttcctggagaacaggctcatgggttaaagagaggcttttgtgaggctatttttggccattattgtggatgctgttacccatagtgtgcttctgtatatatcataaccatggtgaccatatgtttttcaggttagcacatgtcagggtggtaaattttaattttccttgggaaaatatggtcaccatagctatgaactgaaaagaagaatgattcttagacaaccagtgcataatatgcctagtcagtaaagagctatgaaaaatttaatatattgaataaaaacagtacaaagcatggagagtccaaacgaataagaatctgatttctaccaccatgttatcgtcttctgatctgttttgtaaattttgtcttctttttaataaccttgaagtgggggccaattctagtgtcaa

SEQ ID NO: 45457 - DNA, 1828 bp, Bovine  19866881188501
  misc_feature (1)..(1): n is a, c, g, or t
ntgggaggaggtatgttcaactttcttaagggaaaaaccctttcaaacatttatataagcactcatttacatataatcgctttcctcatcctactttgaactcaggtatgtccttgaagggaataagtatcattgctttaaaaactctcaaattttgacttatctagtactccctaagacattagtccgagttcacaagttttaccacgtatgtcatttcatgcactttatgcctgatttgcttatgtaagaacatcagccacttaaactgagagaagagttttttatctcttcttgccaggttctgaacataatgacatatatttagattagtctaataagtattagaatagtaggaatttagagctggaatagaatttagatatcatctcatctacttcctttctcatatggaggaaaagagatctaaagaggtgagttatttgattaagttcatatacttaacatatagaaaacagtatggagcttcctcaaaaaattaaaaagagaaatacctatcttagaaattaaaaatagtacaacatggtgattattacaacatggttaatggtactgtactgtgaacttgaaatttgctagaaaagtaattcttaactgttctagccacacacacacacacacacagtaaccatgtgagatgatagatgtattgattaacttgataatggcagtccttcacttgatatacaagctacatgtatatcaaatcataacactgtatactttaagtatatacattttatttgtcaactatacctcaatataaagcttgagaaaataaccaaaaaggcaaaactacctgcaaagaaatactaaatgtatctctatctagaatggagaacaatccagtcctgtttactgtatttcaactcaatcactctgtatttcctttcttaatttctagttgcttctttaaataaccacttactgttgttttatcatttttatgtgtttttgttgaacaattttgtattcatccactttaaaaagtggaggttatgctgcattatctttctctttttttgaagagctcaatgtttctaacttaaagtctttgcgaagctgtctgtgaaattaattttccagaatgaatacatgattgttatttgtgttaattttctttcttagcagccaattattgttttggaattttgctttaccagcaattttagaagagacatttttgtttttcatttttctttctcccatttttctccatctgcctctgtgtccagcattttggcagtcccctccactgccaaccattcttcacatccctcatccataatcaggctttaaattgctccttggggctccttccacatgtgatggtggagtaccaagagccagtcaaatggtcagttagcagtatggctcagttcttattggtaaggcagtgggatttaaaactacagctcatgcatttgccctcaataaggtgaaaactgattcttgaagggtgaaaaatcttagatagtatagtggcccttcaaaactcaactcttattccttagcatttaatttttctctttagggaaaatttaaattcaaattttacttgggacttccctggcagtccagccattaagactccgtgcttccattgcaggggcacaggtttgatccttggttggggaacttagatcccacatgctgcaaggtgctgcccccaccaaaaaaaaaaaacaaaagacaaaaaattttttttcattggggggataataatgaaaaataagttgacaaacatgattacagctctagacagaagtcagctacattttgttgaggctcttagtagcctattccc

SEQ ID NO: 45458 - DNA, 773 bp, Bovine  19866881196316
  misc_feature (1)..(1): n is a, c, g, or t
ntgatctgagcttattgagagctgactttttgtcttataccacttcatttattcatgtcatcgccaactttcttacatatccctaggactttttttccccaacttctcctaagttattcttgacatattgttctacttccagtggagtagccctaggaaaaatgtaactgtcaaatgtgtaacaagacacgctttttcttggtatatatcttttttgttctgttgggcgatgctaatagatccctggagtctacagcaggctgaggcaggaggtgtgctgaatgacctctccagacctttctcagctttgccatgctaaggaaagggtttcaatacagtcttgtcccaacccttcactacagaacatctatgtaatcgttcaatgcttttccctttccttcatggttcaatagaggctgagtttgttggtcttcagctgaataaccgactaatttggtctggaatgtcatataacttatcattgacagtaatttgctttctgggatgcattaaaatctgtggcgggtgggtgcattacttataataacatttaccacacagagtgaccctatgtaaacgaggcgggcataaagctgaactaggcaagctggatctgatcctggttcactagaatcactgtagctttgcagcctagggaaacatgaccaaggactcccatcttctcccaggtgcttcttggcagggcagggtttagctgtatttatgggggtagattaggaaaacaaacccatcagttggcaataagtgtggag

SEQ ID NO: 45459 - DNA, 1998 bp, Bovine  19866881220063
  misc_feature (1)..(1): n is a, c, g, or t
ntgcatgaaagtgaaaagtggaagtgaagtcgctcagtcgtgtccaactcttagcgaccccatggactgcagcctaccaggctcctccatccatgggattttccaggcaagagtcctggagtggggtgccattgccttctccatatcatttatacacagtatctaaaatatgatacaaatgaacttatctacagaacagaaataggctcacagacatagagaacagactcatggttgctggggtgggggttagggggtggactgggagtttggggatggcaagatgcaaactattatatgtaggatggatacacaacaaggtcctactgtacagcagggggaactatattcaacatcctatgataaaccataatggaaaagaatatggaaaagaacacctttatgtataactgaatcactgcgctgtacaccagaaattaacacaacattgtaaaccaactatacttaaataaaaatacaaatgtttaaagggggaaatcccgtaagtggtccagtggttaggactccaagctttcactgccaagggcctaggtttgatccctggtcagggaactaagagcccacaagtcatgcagtacagccaaaaagaaagggaaaaaaaattcttgcttcaagctggagaatggattgcagataagcaaggattaagccaaggaaataagacagaacattcttgaggattagagatgatgctggtttgggcaagagcgttgaatacagagatgaagttgacacattctttgtgtattttgtagggagaaccacaggatttcataatgagttagatgtgaggaataacaagaaaaggaagcattagggattgttcctatgtttctaatctaaacaaagggtcaatggtattccatttgctgggttgaaaaacagtggagaggacattcagtgaatgtacgactcaccgaaacacctgaccaaatcctcaatgttttaaaaaaaaaaaacagtcatgcagataggctggacgtggactcaaccaactcaaagtctcatgttttctcccaattgaccactactttcattcttcagcatactcagagtattcttgtggttctggggcagtaggaattaaactctatgtataaaatgttctgacacaggcaggatccgtagttagactgggataaaggtttgcatgggaagacacatggagcagtgcagaatagtttggggagttggtagctaatagctgtaaggaacaacagtgataaaaaataaagtcatttgaaggtgagagactgagctctgaaaagtcacaggaatttaggactgtggcaattcaaagccccgtgtttccattttggcacagcaaaataatcctcgggtcacctactctcacgcctctctccccctcacctctctctattcactgccaccatcagaacacttgctagaattagaataaaatgcttcttgggttttatgaaccaatagttcaacgataaaatgatgccaagagcaaaaatgcagattattatctctttataaacacgaatactattagtcatcagcctgggagtcacctagaagaacaaactcaaaaaccactgctctgtgctgtaatccctttgacaaataaataaaccaacaagaatttaaaagtccaaagagacagaaagggaggccatgcctgtgccgtgcctttcttaagcaatcagaactcttagaatagctctgttgctggggcagaatcttttactctccccaagcattaaatctcccaatgtctttagcactctccatgggcatactggtgccaaagcagaaaaagatttaatttcatgttgctaggttttcactgttctgcggttattaaagaggcaggtgcagtcagccaggctgttaaaaaaagagaggcggggtgggggggtggcgggagttaagattgtttatttgaccaacttcaaatcttgctaaaccacagtataagacaactcataactgttctcagctcccgtatct

SEQ ID NO: 45460 - DNA, 1809 bp, Bovine  19866881344132
  misc_feature (1)..(1): n is a, c, g, or t
ngtaggagagagagaaatgatgatgatgatatgatgatgggagagaggagacggaatgtttactttctcgtttctactcttagaccaatctcttctgagtttctctttagcattttgatcttttcatcagtaaggtctttggggtccatcgctgctatccagtttgcctcctacgatgctctccttggagtgcagcggtgtcccatggaagtgcctcaggagtttgtgaggggggctgttggagcaggatggctccttggaaagctgtacaaatcacccccagatgttgtcactttttggttgtggatcctggcgagttacctttctaactcagttttctcatctataacaatgggcataataaaaggcctactgaaggtgggaaaagagatttaaataaataatggaagtgaaggcatgttgtgaagttctgttcaaaggtcatttttttacaaagccctactatgtcatttctaatggagtttgtgtgtactgctgtgtgtatttagttcattaagtgggaaagggtaaatgatcagtgtccccaaagcgtgattttccttttaccttctcagaaacacagtttcctctttctctcacttagaattggaataaattcatgtacttgcctttggccataagtcggcaggttccctaagtggttgaactcctgcttttgctgtattacgctgagcgtttttccagttgttgagaaccccctcaccccaatatttccatgaatcatctgagcatgaaggaaacagaaggttgatctgaagcccctgtgcggcacccacttcagggaggcccgtgggttggggagcctcagggctaggatttggctccccagaccatttagagtcagtttgtgcctcaggccccttctgttgtcaggaggatgtatacaaacaaacagaaaaaggccatttgagacggtgcaggtgaaggacacagaggaaggtgccagtgttggcatcacaaaggctaggctcttaatgggcaccaaagcagaatggacacccggccctccgtcttttcagggccacagctgttttggatcagaaaaactgtcagtgtgcgtgatggatggtggaatggatccatgctcaccctgttaggagaaagaaaacactctgccatgttatgtcttcataaacattattatcagatccactcacgtttctgtacatgtgcggaaaccacctgccaggatccagggctgactggatatggtctctcagatgagattaacatcttaccatagaaatcttttaggattttagtggaaaatgcctgatgactctattactgatggcaggcaagctatacatggtgaagattgcttacccatgcgggtgtttttttccactttgatttctccatgaagggcgggacctgtacttgtccactgacacctttctccgtgcctaccaggtacccactttgtagcagttgttccataagtgtttctggaatcaagtagaggcaaagagtgattataatattaattaaataggctgaggaaagtctatgaaaaatccagaattttttaaaagtttttttttcattaaattagtgctatcggggcaaattttaccacaattccttctgccctggggcttggaaaagcagatgaaattttattagaccaataggaatgggccttttctttttgaagtggagttaggtaaacagtcagctgagaggtgacctgcccaggcggccagctgagaggaggacgtcaggcaggatgaggtgaggagatgtttctggcttggctggggtgctggcatggtctcagcagggcca

SEQ ID NO: 45461 - DNA, 1730 bp, Bovine  19866881349274
  misc_feature (1)..(1): n is a, c, g, or t
ntgaacagagatgctggtttgtttctccttagggtctcccagcacacagttttaacacaacattaatgaatttggctcaaatggggacttgaatgcttaatttgaatccataaagtttaaattcttctcttttcaatacactgtaatttgccttatagcagtagattacaaggatcactagagcactacccccccttcataagccatttaagggcttaagtatgagctatgaacatgataagatcataagaaatttaaaacaaatttgtatgccttggatgtccctggtggtctagtggttaagaatctgcctatcagtgaaggggacacaggttcgatccccggtctgggaagatcccacatgcagttaggtcctgtgcgccacaactgctgagcctgcgtgcctatagcccatgctccacaagaagtcactgcaacgagaagcccactcaccacagctacagagtagcccccgttctctgcaaccagagaaagcccatgcacagcaccgaggacccagagcagccaaaatataataaataatttttaaaagtatgccccaatgcacagcactcctttcaaagttttccattttgtgatatagaggtggaggggtactcacttgcacaaatgatgctggcaatgctaagaatatttttgaaacaatagaaatgatttagttggaggactaactaaccaggtgctacccttccttctgtgagacaaacaattcacagatgtttctgtaagtccttattaattggtctaaataggacataaattatttctgttatcttcagagaaagaaagatcaagtctagaaagttggtataagaattaggacagatggtggatgtcgtgagctactacatcatagtctttggtttagatcaaattagtagaaaggacagttcagaaaacaaacagaacaacctgagtcaatcagatattgagggcctggaactataaaggaccaaggtaattaggataaatacttggaataggtgacaagaatgccattacaatggaaaatttagtcataaaagaatgagtatgaggtttctttctttttttttttttgcatttggtaatcacatactttttttgttaattgaaatatagttggataaaattttatacaatttacaggtatacaggagagtgaaaaagttggcttaaagctcaacattcagaaaacaaagatcatggcatctggtcccatcacttcatagcaaatagatggggaaacagtggaagcagtgtcagactttatttctgggggctccaaaatcactgcagatggtgactgcagccatgaaattaaaagacgcttactccttggaagaaaagttatgaccaacctagatagcatattcaaaagcagagacattactttgccaacaaaggtccgtctagtcaaggctatggtttttccagtggtcatgtatggatgtgagagttggactgtgaagaaagctgagtgccaaagaattgatgcttttgaactgtggtgttggagaagcctcttcagagtcccttggactgcaaggagatccaaccagtccattctgaaggagatcagccctgcgatttctttggaaggaatgatgctaaagctgaaactccagtactttggccacctcatgcgaagagctgactcattgtaaaagactctgatgctgggaggaggagaaggggacgacagaggatgagatggctggatggcatca

SEQ ID NO: 45462 - DNA, 651 bp, Bovine  19866881897940
  misc_feature (1)..(1): n is a, c, g, or t
ncctttctagctgcttctttgaagaaggaaccgttttattccctaacacccagtgtggtctccaaaggactttatcctatttactagcaaagccccaaagattagattacaacttggccaagctcaggttcctgtccctactttctattatttttatgtgtaggactagactggtcattgctgcttgactgggtcacggtgtctgtctgatgaaggatcttatcaaagatgcctttcaggaaagggggtctattcattacttgtcccagcataacactttaactacagtcccagtggagtaagagctaactagataaggaacaggagggggttccttctcccaaagctgaaacataagcttaaatgatgttgccttataagtggagcaaatcttccttattttgaaagagaaaaatctactagcttcaccagtctatgacttagagcccagtaattagcaggtgacacgcgttcatgccctttcctcaaggaggcagttcaggttccctctagccctggaactagtcctaatcttaatggtcttgggtctcttgttttccagccccactcccccaccccagatgttagatgcaacaagcaaagaaaagagaagggatgaaggagctgacttccagaggggaccaggagaga

SEQ ID NO: 45463 - DNA, 2336 bp, Bovine  19866880456049
  misc_feature (1)..(1): n is a, c, g, or t
ncgtctcccctctgccactgaaaggagccgtggagccatgaaaggctgggacccaacagaaagccacgtcagccaggacgtgtgtgagccacacgcactgacatgacgcacggacgggatgcgggggacacggttcctgatggggaccctgcgccggagctgggcctgtcttcccagcggagactcaggagccaccatggctgtgggaatgtcccctgcagggcaatgcctgccaggaacgcaggccccaggccccacaaacgctgctcacaccacaacagcagaggccagcggagggcctcagaggggtcctcccctccgagtaagtcagaagcgaggacagaagaccccgagacctgggacctggacgcaggggccacccaagcaccccaggccccgccctcagagtgactccacgggagctgaagagccacctcctgctgggaagccagcctggcggcccgcgggaccacgagcccatgcagacgagtgccgagaaccggcccccgagccccctgccccaggtgtacggggtgctccccacggccaggaggctgccctcaccctcccaggctgctctcacggggacctaaaagcccgtcccaagcaagagccgcgtgggtcccgggcgaagacccctgtgggcgtcaaagtgagctcatcacccgcccacgtggcccagcgggaggacacgagcgagtcccgagccactacctgctttggtggacatgccgatcatgctcttcttcttcttccagaagctgatgtcgtttttaaacgccaggaaatcaaaaagtagctggaagaggacaggacagcaatgagcccccatgctgtgtgggcgagcacgggctcgactggagacactgtccactcagggagaccccagccccagcgcggccctgccaagttctagcttctctggtggccagtgccctggcctgtggacccactgttacagccgggagccgggcctcacccccgccctctgccctgagcacagctccatgcaggcttttctggcagtcgccagccactgcgtctaacggggaccctcccggcaggacccgaccgtaactcttggaatcaccgtgccagacctcacacaaggcaacacctattttgctaacctcattttgatttgttttcaaaacggctccaaacagacgaaacctagcccttcagctagttaagcctgagtgtagacccctctcctgcggggcggggagagaggaggctgcactggaaaaccaggagcactcacgtgaaatgcagccacgaagaaggtcagcgccaagaaatacaagttggtgtcgacaaagatcccctttacttcgtcagcatctttttctgagaatcctgaaggggaccgaggaaccgagtgaggggcgacatggacccatgctacagaggccccgaggggtcacctcgtctgcaaaggagctcctcggaccccacagggcccaagggggacagcctcacgggcggacgggtgccgagtgccgggctcccccgactccccactcccggggcacgcccggcggcctcaccgaactgctgcagtgagtacacggcgtcctgcatgtggatccagaagcgcagccgccccagcgagatcttgtcgtaggacacggtgagcggcagctcagtgctggagcggttgatgacctgcgggggagcggtggcggtccgtccctgcgccaggctgggaccccgtgggcccggcaccacaccgtcctctggtgacctgcaggcacctcctccaggaagtcctcattcctcaagctcctctccatcaaatgaaccctatgtgtctcttgtgaccacagccccggcgctggcgcctcctgggcaggcgcggggacccacgttggcagctgagtcgagcagaggcccacgggagtctgagcccctgcccggggaccagatgccaaggctgccctgagaagaacacggcggggcagccacactcacgggggcggcgggagctgcagggaggggtggcccctcaatagggccctcgaggacacttggaattgacgtgtgactgtgtgtggaggggaggtgtcccatgacacccgaccctgcggcccccatagatgagctctgcccagagacgctaagcagcaggcctccgtggagagagcacctccctgaccctaagtgaggccctgcaggtcggagacactgtgacacagcggtttgggtgctgcgaggtgcccagcacggtgcctgcggcggtaagcaacctcaggcgtcagctgttagtgctgctgccagcccagcccaccccgggggcgcaggtgaccgggcgccagccggaagaggcaggctct

SEQ ID NO: 45464 - DNA, 2521 bp, Bovine  19866880810415
  misc_feature (1)..(1): n is a, c, g, or t
ngctctggggtgaccactggccactgagaggacctgggactgcaaggaggcaggagcgccctccccccacgccaccagcccctgccttcagaagcctgctggccaacgaccagcacctggaccccctgcccacccagccactccaggcctcgagctaacgcctgctcgtcctgtcctcagtgctggggtgacccagagcctctggaagtgctgcccaaaggactgagcccccctggtcctggtgtaagggctccgtgtccagccccctcactggctcatggtcaggtcagctgccctgtgcccccagctggggactctggagtcacggctggggaacctggcccacaggcctcatctcaggctgggggactttgggaacagcccccaggaccctcccgtccccacttttcgcacagcgggcctggctgctcccccagggtgggtgtccgctgtcctcatcgccgccctaggctgtgcagggcccaggggcgcccacgtcatcatcaccgggtcgtagggcggtctctgcaccacctgacctgagcaggtcgtgtccgaagtctgaaatagcgccttggtccagtgtcgaccgcacggcccattcgtcatgtgtcagccgcccgggatgcgcctgtgccacctccagcgagtgcagagctttggagccacctctggctccatgggcctttctgcgtgtgccgcggtgggctccccgtgcgctcgccgtacgctgccgcaggaggggtgggaggtgggtgtggaacggaggcaccatgtcctgtagcaccgtcacggtgcctgctctccccggggcacgggcccatgaagtaacctcaggtcctgcaccaggacgcagcccccttctcctcaggcccctcaggtttactccctgaggtgacgttcgctcactgacagtgatgccaagtttaagtgtgactctgttcctcagagcctgtggcactgagggcccaatccacgaccctgcctctccccaggctggccatgcccccacagggacctctccccacggggaccactcaccccctctgtctccccacgggggccgcttaccctgctctgtctcccctcgggggccgcttacccctctgtctctcccctcgggggccgctcaccccctctgtctcccctcgggggccactcatcccctctgtctcttccctcaggggctgctcaccccgctctgtctcccctcagggatgtctccccttgggggccgctcacccactctgtctcccctcgggagccgctcaccccgctctgtctcctctcagggatgtctccccttgggggccgctcacccccctctgtctcccctcgggggccgctcaccccctctgtctcccctcaggtacctctccttgtggggagcgctcactctgtctctgctcctgcaggtctggatagatgcggccatccagatatgcttctcgctgggcgtgggccttggggtgctcatcgccttctccagttataataagttcaccaacaactgctaccggtgagtcccggccgagagaggcctgtggcgtcaggcgggcgggtgtgcccctgggtgaggggaggggacaggagccgtgcttacagccccttaaccgcacgtgaaaatgagacagggaagcgacaggccaacgcgcattcctgcttaagggaggctttgaggcaggaagacgctgccccctccctgggaggaggcccctcctctgcctggcttggccaccccatcctcccagcatccggggtcaggctcctcacacctgtctcccacgaggaaggacctgtgcgtgtccccacctggccttcactgagggagcgggggccccaggcgcgccctggccccacggagccccccgcagactcagcgccaggacaggtgggagcacggccgtgccacgtgcccagagccccagcagcctgcccgccggcgctgcccggcccaggaggacctgagtgacctgcagccccctgccggcccgaaatgtcgttctaaagacagagaaaggggtttcctccgggactgcttccttgacctttgagccagtgtttgttttctttcatatcatgaggataaaaatgcggttaaaaatacaaaggcggtgtgcgcagcagaatggcccgaccgaccctacccaggggtccacacagagctggcgtctggatggcaggccagacagcggctcccgagcccaccctgtgcccatctgagtctgtgagggtcctgcactcaggcaccccagagggctggccccgcagcccctcctccctgctctgaattctcggccctcagagcggggtccccgggccagcagccctgggcccccaggcacgtaggggaaacacagcatctgggccccaccagacccaccccgtcagcacctgcatcttaataagttccccgggaggcatctccaagccctgcctggcagccctgtgggtcagggtggggaccccgtggtcagtgggctgcccacccgagcctagctttgcctgtgggatcatctcg

SEQ ID NO: 45465 - DNA, 746 bp, Bovine  19866880930532
  misc_feature (1)..(1): n is a, c, g, or t
nacccttgcggcccagttccagggtgttcgggaacccaggctgctgtccaggaagtaaactctccgtgacatcggtgcaggggctcagaaatggggaagcaccagagctgcggggtgtgcttggcccggggcttccagcgggaagtccccaaacccaggggggacaggagaccactgcccaactgcgaagcagcaccatctccacgcgcaggcccgatggcccaggagtcgcagctcctggatctcaacttgctggtttctgtcccaagagatgcttaagctcctcactaaatctgccgttaaatgacagatgggcccaggggtcattaatccccagataggcgccagcccctcccccccagcaaaggccaacaggtaaacacaggcaccagactggtcaatcccaactcaggatgaagggaggcgaatttccgagtggccctggatcgtctcggacatcgaggggtccgtttatgtgctgatttcgagaggaaggctgcccttgcgtggacaggccagtcggctctgcaaactaagcacatgaaggggagaagctgtgcaagacgctgctggtgaaaagcaaaacgttcctgcggactggcacggggacagtccgcgaccgcacaccccgcgtcaggcctggcgccacaggcctctggacagaaacatggacttggccccaaccctgcctggcgaccagggacgcacaaaggatccctgccctgcccggtgtagaacacggcccg

SEQ ID NO: 45466 - DNA, 1047 bp, Bovine  19866881016904
  misc_feature (1)..(1): n is a, c, g, or t
nttccacacatcttgtgcctacatcccatctgctgccagagcttatactgatcacagctaactggcaggtgggctggggaatgcagtctatccggctggccaagcttccctctgaaatgtgtgtgttctattgctaaggagctgaggatagatgtggcctggcctctgccccctcctcacagtgaatcgcctccttctggagcatacccttcttctgaaacgtgaggtctctcttcgcaacttcgagtgtaaaaatatttcgacacagtatttctcagtgccaactggaaagaattaccgtaagcaatttttcataaaagatcactcctttgagaatatgttttcatattttgctttttttgacattttcggaagcaaaattacatgcaaacatttgttctgcaattgcaatgtgtgaagaagctgtgcctctgagtttcaaaatctagtttgcgccgaggcccacagaagagcgtgtcatctcggctcacgttccaaaccggggaacacttgctccgtgccaaaaactggaacaggtgatgctgctaaggaagagggtgtggtgatgaccaaattcccagggcctgcgtcttcgtgaaaggggtttcagatccccagccacagcctcagggttaccccacgtgggctgaacattaaatgacagctggaaactacacatgaggtgtagcatcccgtcaagtatctagatactgacttgaggtccagggtctttatctttgaggaaaacaatcttgtctggaatccacgtgttgtagagataggacctctctctggaaggccacctgcagagacaggtgacccaggacacggaccaccctgactcgtccacaggaggaaacagcttcagtcttcactggtcccggatcggatctcagccgctgtctcctgtgccgcgattttcctgtctatgaaatggctctaacctggtccaggtgagagggacgtggaggaggggcaggcgggaaagagaggccaggagagtcgagggagactggggaaggtgctgtcgggggtggatgaggcggg

SEQ ID NO: 45467 - DNA, 692 bp, Bovine  19866881553620
  misc_feature (1)..(1): n is a, c, g, or t
ntgtttcctgaggtctctccccgcctgcgcgctgtcctgctccctgtgtcagggatcccgcaccggggggctgcaacagggcgggaagggggcgacccggggcccggagctagcgggccgggattgggccccggggccccaggcgtggtctggttcctccgacagtggcctggagacccccctttcgtccggtggagaataactgggcggggaggggaaggagccccctattaccgttctttgcactcactgccatctttttctaatggttttggcagtgccctgctgctcaccttagctcggcttgtcctcccaccttcccggacgtcagtgacctcccggtgtcccctcaccttgggccgaggtgccgccggctgggtagcagtgtgtgctgctgagcggcctccccaagctcatacggtgaaggccccctctgtgtccacagactatgcagacaagcccttagagaagcccctgaagctggtcctcaaagttggaggaagcgaagtgacggaactctcggggtccggccacgattccagttactacgatgacaggtcagaccatgagcgggagagacacaaggagaagaagaagaagaaaaagaaaaagtcggagaaggagaagcaccttgacgatgaagaaaggaggaagcgaaaggtgaacgagggtggcccaaatcccctgcaggg

SEQ ID NO: 45468 - DNA, 1898 bp, Bovine  19866880485767
  misc_feature (1)..(1): n is a, c, g, or t
ntgttcccctcagcctcagccctcagactttgctaggttaagtcttatgctcagggacttccctggcagtcccatggttaagactttgccttctgatgcaggggtacagatttgattcctgatgagggagctgagatcccacatggccttgtggctaaaaacactgcaacataaaacagaaacaatgctatagcaaattcaataaagactttttaaatggttcacattaggaaaaaaagcttaaaaaaaagtcttgctctcggccttagcactatcttttgagaaacctctgcaccatgagagtgaagtggaggaaaaagctgaagcttctttgtgctgaagcacaaaagaagaaagatgaggcagatgtcccagtaaacttgtacacccatggaagtcacagaagcggaaacaaggggagccagaggctgggacaaatcgtggactgcatgcctattatctagaacttctcagtggatctggaacatctatggccgctctgaccgcctcgaccacctttgagagacccaccttgctcgcctcaaagctgtcccttttggtcttttgccctggatctgtgatactatggactagctctgttctcagttgtggctgaatgtaatgtgtacaataaatcatctcttttgctgccttagctgaagaagaaaaaaagtcttaaactctgactgactcccaccttccagcctccacctctcagagcctgagggaattttctggaaccgatgaaggtcacgctgtcatcccgtgtatggctggcttgaagggctgggaattattattagaccctaggagcagccctcaaccagtggctctcaggagctagggaataaatatctctgccctggggcaggacgattcccaagaccagtctgcactttttcccagagctttcctgggagcctgggctgcagttacccacagagatgacttgataatcgcacaccttatcttccctatctcaatgccccttcccctctgggggtcactggggtcacttcccaaactttatctggaagctttctttcaggttctgcactgcaggagcccagattaagagagggagcttccaacactgctggttcatgtttagtgactactcttggggtgtctctggctaggaggggctccaggaggaactaaggtggctgtgatgcagctcctgaggatgaggacagccggtggggatgggaaggtggctgcaccgggacacgttctgcacccgaggggctaagacactctccgagatgcagccccagcagcagccaggcaatcagcctgggagtccttggcatctccttggtttcctcaagcaaagaatatttttggaacaagagctcctagaggccgggcctccttgccttttttggccagggcctgcgtgggagtcatcccatgcatggccatcagagttcttaggaagctctgtttaccagtaactcagtcttcacacactgaagccaggcaggtggggaggtgtccaggccctggactgcttaggactagcaggccaaggcttcttctttatttcagatacagaaggagcacatctccccatccttgtgacccccaacccccaccatcaatttcaagtccatctcctgtgagggatttaagtctgtgttggccgcccagcctctactcccactcctctgccatcacttccagacccttctccttttttaaagaacagaacaggtatatttctattggacttcttgatacagaggctagtgtggcatggatggattgcatgaatgacaaataatacaaatatattttatttgaaacaaacaaaaatgctcacacagttcaacggttcacttagaaacaaactcttgcttgatagtattacgagcaaaagcaaaccgaaacacaga

SEQ ID NO: 45469 - DNA, 2755 bp, Bovine  19866880814992
  misc_feature (1)..(1): n is a, c, g, or t
ntcagatgctatcatttcccatcacaggctccaaactggtagcccaaagactagatctgacccataaacatgtttagcttggactacagtgtttctacaaaaactgagccaaagtttaaaaatagggacacttcacatttcttgaatgataaaaatcagctgaaactggctagtgaccaccccccacacccaggggtgccacagtttccatcattgcctcccatatccctgaggacaaggctgaacatttgtgagatagtagaaaaaaatagagattattctctgcccccaattcctggcacagagcccctaaaactcttgcaatttcctaactgataagaacattagaagtattttttccaatatttggtctttgaccctgtctctgacacagggctcctaaaccccctgggttttcctgggtgacagcaatatctcttgctccagtgaggtgactctgggtgggctcctggatgggggcaagtcaccaggaaagaccttattcaatgcctggtttcatttactgatacttgtacttgctatgttatttttcttgaagtagataaatatttatctgggcccatgcctttattaagagtgagatagcagagacttctctggtggtccagtggctaagactccttgctcccaatgcaggggcccagggttctagatcactggtcagggaactagatcccacatgccacagctaaaagatcccacatgtttcaactaagactgcacacagtcaaataaactttttttaaaaaaagagtgggagagcaaaagataaactcagaattatatttcaaggaaaacaggaatgcacaaacttcttttcaaacttgaggaatattcttgtatcttcagtacgcaaaccctatgcatgtgttgaaacataaccaaaaaccctggtgactgtctgggctcttgggtcaattgaatgagtgaccttcttcatctcccagatttagactagcaaccaagttgccagtgacaaaaactaaaataagtttgcaaaaccaccttgacatagtgcataagatatgtcaacaaaaatgtgtcttgaacttggaggagccagctgtgttcagtggtggtgggcagggaaagcgtcatgatatcactgtgtctgcctttctgggggaaaacctgacttcagctcagacttcaatcaggaaataattcttcatgtcaaaagcagcagaataaaggtatctcccaccctcccccacacccatagcatatatggtgactgaaagagattgctgacttcgatagtctgtttgctctggtataacaatgtaccacaggctttgtttatttatgtctcatgttactggagctggaagtctgaggtcaggttgccagcaaggcctggtcctggcaagagcgctctcagggttgcagatgacaacttctcattgtatcttcacttggtggagagcagagaggagaagcaagctcctcaggactcctataaggacactaatcccattagtgagggctccagcctcatgacctcagctgcatgcatgctgagtcgcttcaatcatgtccgactctgggcaaccctatggactgaagaccccccagtctcctctgtccatgggattcttcagccaagaatactggagtgggttgccatgccctcttccaggggatcttctggacccaggaattgaactcgcgtctcctgtgtctcctgcattggcaggcagattctttaccactaacaccacctgggaatcctcttgacctcagctagttctaatcatgtttcaaatgccccacctcttaatatattatatggggggagggttttagcatatgaagttgggaggagctcagacctgcagtccataacgttgacccttgcctgcccagggtagagagaaaagtagttgcaccttgaaaacggaggacaaatctacctgaaatgtgtttaacagcagctcaaagttttaaagcacatctgtaggttcccacctgtgaagaaagcaagtgacaaagaataacatgtgaacttcaagtgtatcagcagctctggaagttgcaatattgcagggggagacaatcagcaggacctcacagaggaaaattccagaccatagcagaacagggcaattcccttgtctgagataccttgtccattcccacccttcaacaacagttcttgagcagaaggaatcagaaattgctagactgtccatgatggggtgccaagtgcagcagagactgtttctatatgtattagtccagaagggagtgggtgcagggcggtgcggatggccagcatttttactttccaggaagagcccccaagggcaaaggaaagtgggaggtgtctgctgttctgcatccccacaccttccagagctgttttcagagggagaggcaggaaaggttcatagcaacagaggaaactgctgttgtgacagccctgatgcccctttgaggttccacactttgagcatctttcttagactgagatggatctactgccagatgctgtaggaaagaacctttaagaagaggccaatgagcagagagggagaggctggggagctgcgtaccagtggggagaggaaaggaagggctgccatcgcctggaacagagctaaggccgacctcacccccacatcccccccccacacacacacacgcgcggggcagagaaacaccagtgggacatgagggatgtacacacaggttaattaaaagtgtttatggggaaaggtagatacatgtacaa

SEQ ID NO: 45470 - DNA, 1512 bp, Bovine  19866881200983
  misc_feature (1)..(1): n is a, c, g, or t
nattactaaaagataattgtgtatctttctcagggagaaagactttttccctaccctgttcatgctcagtggaaaatgaagagatcaagaagagagaagacagaacaagcatgtgaggaggaaaagatgaaagtgatggatgctcttgcttattcaaactagaggagaaataataaacagtgcaccttgtatcggagagaaggcaatggcaccccactccagtgctcttgcctggaaaatcccacggatgggggagcctggcaggctgcagtccatgaggtcgctaagagtcggacacgactgagcgacttcactttcatggagaaggaaatggcaacccactccagtgttcttgcctggagaatcccagggacgggggagcctggtgggctgccgtctatggggtcgcacagagtcggacacgactgaagcgatgcagcagcagcagccaccttgtattcaaacaatgaattcattcattaaagtcttacaattgactggcataagggataaaactattcccttcattatttgtaccaaaaaatgttctttccgaattacatatatcttttgattctccttcaaatggttacacgggtagtctgctttattggagtattgatacagttgcttttggtactatatcatacttgaacatgagttctctaaagaactccaaaagtacacacaagcatggatcacacaaaatgggtttaaagtgcatatgatgtatatgaaatcatcttttccttaaagataccaaaaacatcacttttggatactttctccatgttgttggcagtggcagagatacagatactcatttcacatagaagggcagagaatcagagaattaaaataagctagttgtagtgggatttttgaattcccaaagtcagatatttatattcaggctggatagtttatcctcatatttgaatttctttttcatttgccctggaattgagctacaaatcatgattaatagtgtatgaatataaagctatttatcgtaacaaataaagagggtaaaccaagttccaaggcagacttaaactgtggtagacagatcccagtgtcatgtcctgcatagttttctccccttttgagagaaaaatgaaatgaatgaaatgaaacaatgaaagatcagaaagagaattcaaggaaacaattcaatttaccacttcttcaaaaagaacaaaatatctaggaataaatctatgtaaggaagtaaaagacctgtattcagaaagctatcagacactgatgaaagaaattaaagatgattcaaacagatggaaaaacacatcaaattgttgattggaagaattaatgtaaaatgaccatactaccaaaggcaacctacagattcgatgtaatccctataaaaataccagtgacatttttcagagaactggaacaaataatgttgaaatttgtatggaaacacagaagaccctgaagagccaaaacagtcttgagaaagaaaaacagaacggaagagtcatgctc

SEQ ID NO: 45471 - DNA, 2616 bp, Bovine  19866880098891
  misc_feature (1)..(1): n is a, c, g, or t
ntgagatgagtgcaattgtgcagtagtttgagcattctttggtattgcctttctttgggattggaatgaaaactgaccttttccagtcctgtggccactgctgagttttccaaatttgctggcatattgagcacagcactttcacagcatcatctttcaggatttggaatagctcaactggaattccatcacctccactagctttgttcgtagtgatgctttctaaggcccacttgacttcacattccaggatgtctggctctaggtcagtgatcataccatcgtgattatctgggtcatgaagatgttttttgtacagttcttctgtgtattcttgccatttaaagaaagctgagtacagaagaattgatgcttttgaactgtggtgttggagaagactcttgagagtcccttggatggcaaggaaatccaaccagtccatcctaaaggaaatcggtcctgaatattcattggaaggactgatgctgaggctgaaactccaatactttggccacctgatgcaaagagctgactcactggaaaagacccttatgctgggaaaaagattgagggcaggaggagaaggggacgacagaggatgagttggttggatggcatcactgactcaatggacatgggtttgggtgaactccgggagttggtgatggacaaggaggcctggtgtgctgcagttcatggggtcgcaaagagttggacacgactgagagactgaactgaactgaactctttgccagggactacagtaggacattaggttccaaggatttttataatgaagaaatcactcttaactgccttctagtataatgggagagaaagacctaagcgtaaataattctaatcacatacgataagagccaagttaaatgtgtggagtgttctgagagcccagagccaggacatggaatccagcatggtagtgatcaagatagcttcttcaagaagagtcttgagttgattcttgaagggtaagtaaggaatagtgagggaagaatggaaagagaatccagacagtgagagactcatagcagaagggctagccaggaactggaggaagctccagagattggtaagtcgggggaggggaaggcgggaaggagagaaggctacaaggttaagtggaagctggcacccaactccagtactcttgcctggaaaatcccatggacggaggagcctggtgggcttgcggtccatggggtcgcacagagtcggacacgactgagtgacctcactttcactttcatgcattggagaaggaaatggcaacccactccagtgttcttgcctggagaatcccagggattggggagcctggtgggctgccgtctctggggtcgcacagagtcggacacgactgaagtgacttagcagcagcagcagcaaatcttggaggctagagagcctcttgatgagggtgaaagaggacagtgaaaaagctggcttaaaactcaacattcaaaaaactaagatcatggcatcatggtcctaccaccttatggcaaatagatggggaaaaagtggaagcagtgacagattttattttcttgggctccaaagtcattgtggacagtgactgcaactatgaaattaaaagaaagttactccttggaaggaaagctatgacaagcatattaaaaagcaaagagatccctttcttgacaaaggtccgtctagtcaaagctgtggtttttccagtaatcatgtatgaatgttaagagttggaccataaagaagggtgagtactaaattgatgctttcaaattgtggcgctagagaaggctcttgagagtctcttggactgcaaggaaatcaaaccagtcaatcctaaaggagatcaaccctgaatactcattggaaggactgatgctgaagctgaagaagctccaatactttggccacctgatgcaaagagccgactcactggaaaaaaccctgatgctgggaaagactgagggcaggagaagcgggtgacagaggatgagatgtctttgagcaaactccaggagatagtgaaggacagggaagcttggcatgctgcagtccacagggtcacaaagagtcggacacaactcagcaactgatcaaaaacagcacctggaggcttgtggatttgtcgctttcctctttttttagttggctccactgacatactgctattggtgggccctaggtttcccacctgctttgtttttcatcttgggcattcacaaccctgggtaaacccttctgttccgtcactgcttctgccgcagggcttctaaggacactcaggaaaaggaaaataatgacgacaaactggtatctgacacggcatgccttcctctcattccgtttctttttagaaaaatctaggttttgtttctaaaacatagacttatatagtaaacctaataaaaagaaataaaagacagagatctgaaaatatttattttagaaaatgccttacatttactaacttctgggactaagagtcagtttttattttcatggttggcttaggtaaaaggaatggccagtcatccaaatagggtgaacagctactttcaaattttattaacataggcaaatgcatagagtaatgtgtcataattt

SEQ ID NO: 45472 - DNA, 1411 bp, Bovine  19866880445961
  misc_feature (1)..(1): n is a, c, g, or t
natgctgctattcagggatgaggaaaacaccccgggagatttttatgacccatttaaaactaaatttattggcatttcttcatcagggaccaggctgtaattttataaatctttcccatggctgttagaggagcagctctgaaaaagaaataaagggttaagttaaaaaaaggttaagttcaaattctctctttttgtttttttttccttcaagaaaatgactagggtttcctgattccaagtaagaaactgccaactcagtaacagcaagtgaacagttacccgcttcaaatgcatgtgttgtcagaggtgggagtgagggctgggtctgccgcagtacccagcagggtccttggctgcactttgcaggcagtttgatttggatcctcagctcccatgagttagagggtataagggccagcagtagagagtggtttcaaatatgtggatgaaaagggcttgagacggaggatgggtactagagtggtgccagaaatcaaggccattatccaaaggaaaacaagtccatctgccctgtgagttgtccccggtgtgacaagggatgggagctgacagtggaaaggtgctgagatagagggcaggaaaatgaactttctgggcccatgtctggttttgttttttttgtttttgtttttttttggctgtcatgggtcttagttgtggcatgtgggatctagttccctgtccagggattgaacccaggtctcctgcatcgggagggtggagtcttagccactggaacagcagggaagtcccccagccccatgtctttattgcttgccatacaccacactcatgggtcctctggtcagatttgcttcttcagtaaacaagattcttcattttccccggcctctgagaaggcccgtgggagaagcagacaaataaatttcaggagggacgtctttgaaggacaaaaccacgagaggcccgcaatccccactatccactttcctggactcacagtgcccgtctttcttcctttctcagcccctgtctgaaccccgctctctgctttctttcggtccttgtaatcgcatcatctcgtccgcgcctttcagcggctggccggcctctgctccccgagcggcgatatcggttctcaggggcaccagccggagaacagacgctgcctctgctgggagctgagtctcctttcccacactccaggcagggaagtgggtgaaagggaggtgaggaagggcctctctttcgttttcaaaaccctggcatcaaaccctgctaggatttccatgcggtacttcctcgtgcattgtggactgcagcccatgtcctttctatttaagctagaattgattcactaggtaacgaatggaaaactcctccccaggcttcccagagaaattacatacgctattagtagcattca

SEQ ID NO: 45473 - DNA, 1966 bp, Bovine  19866880489996
  misc_feature (1)..(1): n is a, c, g, or t
ncatgtggaagaaaagagatcatcccaaagagatgccattcccaaagaaaccaagtcacactgtcatcactatgctccaggaaatgatcttgaaaaggcccagactaaggaatataaggaatatataaggaatcctatataactggggattaaaagggagagggcagcaatatgtgagctgcccctcgtcaactattgaaatacccttctctttttttttctaatttaatttccctctggtctttgagagtcagctcaagttctaacctcttttagtaagtcttccaagaccacgcacattcatgagattctattttttttctttatacccaatgtcaccatttccttactaccactcgttcctgaaacttggtaaatgttagatgggttagatttgggggtccctgaccagaaggctggacagctgggtaacaatgttagagagcccagaaagtagctgaacattacaaaagctcaggaacacataaaaatgtgaatagaaaggtgaaattaaagaggatagaggttatgaattaaagcattaaattaaaacagaatttaagaaaagtaaacaaaacatctgataagtaatagggaaatattatggtgaggctttctatttcttcttatattctaatccagggatcagcaaactagagcctgaaatccagatatggctgctgcttgtcttttgtaaacaaagttttattggagcaaagctatgcccattccatcatgcgtgcctacaaccgccttcccgctgtaacggtagagttgagtagacgtggaaaagactttattaccaactcttcttctaaactatacatagctatcttaccagtcaaaactggcagccaaaattttttttttagtgattttgcactagctttgtttactctctactaaacagtccaggctttgtaccatacatagagaataccaattatgtgattctgaaaacacacaaagtaaatataatatcatactgaagatacaagatatatttgtatcttccaggaaaagcaatgttaaaataaatttctaaaaatttaaaaatgaacaataaaaagatgccaagtacaataacaattaacagtaccaataacagttgtacttatgccaagtacaattagcagtgctgtcataaataatttaaaatatactatttaattatattatttttaaatgagttaagtaccttaactatacagactgttttccaattgctcacttttctacataattacaattactaggtaactatttattagtatgtttatctgattaaatactaattctcagataaaggtaatatagatggttccatgttctttgaacacatagaagatacatgacttgaagtaacagaatggactcaaatgggaaattttgaccctaggtaaaataatttctccaagcttcaagtttctcagttaaatggggatcatacttattctacaagtgacattgttataaggtcaacttatcactgacattttaaaatgatgttatataaagctgtttttaaaaaatataaagcactataagatatagaggcctccttattagttacatcatttatttttcagagagaacgagaccaattttaaaagaaactacagtaagtgatcataatcatccataaaattggctatcattttccacataggaaaaggaaattttctaatgtctcttttcataaactattttaaaagacattaagagccatttgcaattttcctggaactatgaacattcatggaatgggacagtacaatcatttccacaatttcatgcaatttcacagttccattttatgccaataatgcataatttaactatacatcacatgatgaataagcaattttgagtaatttttattttttctatgaagattttcagataatcttgcctgcagataaaatgagaacaattctacatcctagtttttaaaatgctactccag

SEQ ID NO: 45474 - DNA, 2331 bp, Bovine  19866880509304
  misc_feature (1)..(1): n is a, c, g, or t
nataatggtcactttgatgtaactgcatcaagatgtctgctttaatggtcttccttctgtcagaaatgtccctgaatggccagactgtctgtgtgaggcccttagaagcccctgcctctacagtaggaggctgagctgggaagcagtgacatttcctcctccagcctgcgaacctcaggcgatgcaactgggcagagctatggacaatggaaagtggacacaatcatgttccaaacctaggcgtttttcctgctgaccacgtcctcaccccacattcccctttccttctacccaggtacaatgtacaagcttcctagctctacctggatttccgagttatccactctgtttccccaccctccctgttttgttttttttttttaattaaatgaatgaattaatttttggctgtgcttggtcttgctgcgcaggcttttctctagttgcagcaaaccggggcttttctctcattgcgatgcgtgggcttctcaatatggcggcttctcttcttgttgcagaacacaggctcaagggcagccggcgttagtagtcgcagctccctggctctagagcacagcctcaatagttgtggcacacgggcttaattgccccgcggcatgtgataagttcccgcttcaggaatcaaatccgtgtctcccgcgttggcaggtggattctttaccactgaacccaccagggaagccccttcctgttgtttttaaaaacacctttattgaggcataatttacagatcatgaagttcactcattttcaatgtacattacaatgatttttagtaagcttactatcttgtgctaccatcaccacaatacagttttaggacattttcctgacctcactgagatctttcatgcctgtttacaattaatcccctttcccatcccaactccaggcaaccactaacctacattttgtctctatgcaattgccttttctggacagaaattaaatcatatatgcctttagttttgacatcgcctcttatctccgatgagaaattccagattcaacctcagctctatggaaacttgctggccagacgtgggttcacataactggtaaatgacagagctctgattcaggtccaagtctcgtgattccaaattctttccactccctcctgctttcctgatctggatacaattgcaatgatgaatggaaaatttagtgatggccatttaaaaaaacctcagagatcactggccttctgggtctgaacgccgaactcgtgactctgctcagccaccagtgtgttagtcgctcagtcgtgtccaactcttcacgaccccatggactgaagcccgccccaggctcctctgtccatgggattctccaggcaagaatactagagtgggttgctatttccttttccagctcagccaccagagggtgccgaaaagatctttaaattggcttttgcttgtcacaattgggcatcttaggaaagccgcgtagaatttttcttataatattttccctgtctgggaaattgcaaatatcaatggagaataaaagctaggaaatgtttttggtgtacgttgaaggttttttttttcaggcttctcagaccaagatttctttttttaatagaataaaaagggaaactacttaaaagacttggtttgggaagctggtgaaacattaagttatgacaatccagcatgacagatatccaattaatcataacattaaggtaattgtgttaatcttttgcatttttagagaactaaattgatggagggaagggaactggaaacatgttttcaaactgttacccaagtacattatctatgtagctagaattaactggataataattcaatatgaaaattgaatttatctttgagtagtaatttttttgtgatgtatccccacctatctggatggatggatgaatggacaggggctgatcaacagccaggatgggagctcctgggaggatcttcaggggaacgtgatgcttgtcctgagcaccacccctggcggctgtcaaagtcactggagccatatgtctggtggtgctgtgccccctgtacccaccacgaaccacgtgctccccagaacctggactacagttatggaaccaggattagaccagagccagtcaaaacctttcattaacaggaaccagaggttgagaactgacttcaccacaaacgggaagtagtgtctcttacgcttattcttctcttgacagctaagccagtcctgaaaaagtgatgacattgaaaggagggtgcttagaatttcaaaaaaggcaaatcttcaagtacttctgaagcatctaaatctgtgcaatgaattcatatg

SEQ ID NO: 45475 - DNA, 2988 bp, Bovine  19866880536533
  misc_feature (1)..(1): n is a, c, g, or t
ntttaaggggatgcctctcaggactcagcatgtagctgtactcacagctatgatgtattatagcaaaaggatacaaggacaatcagcaaagagaaaaggtaccgcaggcaaagtctgcagaaaaccagactcaagcttctgagtcctctcacacagaactctccagcaaggtgggacaacgcatgtgaaatgctgtctaccaggaaagctcatgagggacccagggctgggtttcttagtgggcgccagccacacaggtacccccttgattagtatgttccacaatttcagactccaagaatgagagcatgtgttccacataaaccatattgtctagttaaacagtttaggcacagcgagccgctcttatcaggaaatggcgagaattctcatgaaaatcaacttccagacaccaggcaatggccaattttgtaccacgttttctaagaatgacactttcaaggctactgcgtcatctcttttctgcgtggatttttctgtatattcataccctttctggtaactaagtcatgagggatggtgaagtcacttttagctaagtgttctttaaaagataaaaggatgctggagaaagattatttggaaggaggatggttttagcttaggctcagacataaactagctgtgcaagaactagaaagcttttaggaaactgtcaagtgctattatataaaacatgtaacaactatcattaatacatgccgacatgaggtggtggctaagtgccttagggtctgatatctgagacctgaattcaggcccgactgactcctcctagctgcatgtgcttaagcaagtattaacccctctgggtctccacccctcttcaggaagatgggtacagaaatcaaaccaatagcagcactgcaggaactaaatgaaaaaacaagtgtaaaataccactgcagtgtcaggtaaacacggtaagaaatgctaacacttatttatcactatatgctcagatgcgtctcggttcctaacactttatcgcacttaatcctcagggatattacaagatggatcttattaggttggtacaaaagtaactgtggttttggactgtgaattttaaatcattataactaggctcaaacctatctttattaatcaaaatagaaactattataatcaacacactttttccaataaaaaacaattttgtttattcctgtagcataaaaatccatgtttcagaattcaacgaactcttggaaagtattttctgcctcctgctggttatgggagcattctccctataaaaagttgttgagatgcttgaagaagtggtagtcagttggtgagaggtcaggggaatatagcagataagacgaaacttcatagcccaactcattcaacttttgaaatattggttgtatgatgtgaggttgggcgttgttgtgcataagaactgggccctttctgttgacaatgccagctgtaggtgttgtggtgcatctcattgatttgctgagcgtactcctcagacgtaagggcttgccgggattcagaaagctatagtgggtccgatgggcagcaggccaccaaacggtgaccatgaccttttctggtgcaagtttggctttaggaagtgctttggaacttcttctctgttcaaccactgagctggtcgatgctggttgtcatataaaatccacttttcataacacatcacagtctaattaagaaatggttcactgttgttgcatagaataagagaaaacaacacttcaaagcaatgatttcttttggtttttggtcatctcatgaggcacccacttatcgagatttttcacctttccaatttgcttcaaatgccaaatgatcacagaatggtcaactttgatttcttcggcaacttcttgttgtaagaagatcagcttcattaatcctctcagtcggtccctgtcaacttctgatggcctgccactgcactcctcatcttctttgcaaaacttctcaaaccaccactgcactgtacattcattagaagtttctgggccaaatgcgttgctgatgttgcgagttgtctccactgctttacgacccattttgaactcaaataagaaaattgcttgaatttgctgtctaatatcatttctatagtctaaaataaatataaacagcaagtaataaatcattaacaaaaaacaaagcaagaaatgcacattacaataatgtacaacataaccacatttatttaagaatgtattccaatatcaaagttcaacaacgtaaaaccacaattacttttgcaccaacctaataccttcatcttcaagtgagcggcctcaggtatagcctttgggacctaagaaaaagcagctagtaagcaaagggctcagtgttaaggccccatctgtcaggtaccttgctttttctactatataattactgtctgtcgtgtattacaattagcaagcttattacttaattaagggcaataataaaacaaaaaacagatcattttcccagggaaggaaactgtctccaggagaataagcgctccaactaatgaggcttcctgaggagaaaccgatgttgttgtctgatgaagagacagctcaagatcaagggagtgtttccatgatggctatacaaagtagaaatgcctcatatcaatttaataaactacagcccctgtagaaacttttatgtatgttactctgtgaactgagattttcagagtgattaggagatagcaactaggtcattatctaggtcattatagaaaatccaccaatttataatacaatgcgaagctgaagttttactcaccatctgcagttttttcttatccctaatcgcattactgtggacagcctcaattgccatgtggtgcttccaagctaattcttccaaagtcttagaatgggcctcattcagctgagccacctccccttccagtctactttgcaggttttttagctccatctcataatattcttgctgagttttctttgcctcatt

SEQ ID NO: 45476 - DNA, 1852 bp, Bovine  19866880565574
  misc_feature (1)..(1): n is a, c, g, or t
nttttgtgtagaatcggtattatttcttccataaatgtctggtaggattcaccctgaagtcatctcagcctgtatgttgcatcatttttaactagagagtcaattttcaaagtagatacaggattttgcaagatatctattcctttttagataaactttgtcattttatatattttagagaatgtgactatttcctctaagttagaacatagagttgttcattgtattttcttattattaatgtccttagtctatagtgatgtcccctctttcatttctgatatttttaactgtgtcttctatttataacttttcttctttttcctccatcagtctagccagaggtttatcaatttttatcaacaataattattataattactcactcactgtgtatcttacaccttttaaaaatctttatttatattctatttgaatatccaagaatctttaagtaaaattttctgtcatatccttttttttattgataagtaaactgaggcctggataaataatatatcctttttttttttgtagataagtaaactgagacctcagagatactgcaagttctagaccactgcagtaaagcaagtctacaggaagttttttgggttcccaattcatataaaagttatatttatactataatgtagtctattagatatacagtagcattacatctaaaaaacccatacatatttaattaaaaagtactttattgctaaaacatgcaaattgtcatctgagtaagtcataatcttgagtaagtcatgatctttttgctggtggaggttcttgtcttgatgttgatagctgctgactgatcagattgatggttgctgaaggctggggcagctgtgccaatgtcttaaataagacagtaacgaagtttgccacaccagttggctcttcctttcaccagtgatttttctgtagcaggcaataatatctgcccacagtagagctttgtttaaattggagtcaatctctcaaatcctgctgctgttttatcaactaagtctatgtaatattctaaatcctttgttgttctttcagtaatcttcatagcatcttcagcagtagattccatcccaagaaaccactctctttgctcatcataagaagcaactcttcataaagttttatcatgagattgtagcaattcaggcacatctccaggctccacttctaattctagttttcttactatttctaccacatcttcagttacaatagtaacagcaaagatcactgatcacacattactataagaaatgtaataatcatgaaaaagtttataggatataagcttcatagttataagacatgctttccaaataaaagctaacacagcttgctcatttccttaggtctgacggtaactgctgtaaaagactcaggagaatggaatttggaggcgggagcattagtcctcgcagatgctggcctctgctgtatcgatgaatttaatagcctcaaagagcatgacagaactagtatccacgaagcaatggagcagcaaaccatcagtgttgctaaggctgggtaagtgtttcttttctctagaatttatgggaatagtgagattcgttcatatatgattatggggagatgtgaaccacattgaactgcaagatgtttgtttggtcctctaagagatttatcagttaaccgccactttagttttcccatggagatatgtgaagaagtaaagacgagctgttgacaaaaagaaaaggaccactataaatgtaaattgacttaattcttggagggaacctatgaagaactttcaatgcagcattcaactcattctctcattcaataattgtgtatctgtctactctgg

SEQ ID NO: 45477 - DNA, 5874 bp, Bovine  19866880617072
  misc_feature (1)..(1): n is a, c, g, or t
nacagaaggactagcaaactgtctcttccttctttgtgcaaaacctcaccaccaccctgcccgtcaataccgcacattagcctcactggttaaataaaccctaagtacattttaagtactggtcaccttgccatctatttccagatggataactttgtgacttaatgaactgttggccaggagctgcaaaattttatatattttaaataccaccactaaaaatccatctagtctcttttctttatataatgcagtagagaagaagaacataggtatagttgggccagtggcaagcagatttcactaagaatcaagacaactgagttccagacttggctatagcattaacttcctgtatgatttgaaacaagtctttccatctcagtttcctcatctgtaaaatgagaggagtgatcagcccaggtggagcagctaggctgtcccttcagtaatgtctgttgtggatggtggagcaggaaacgcaatacacaaggaaggaatgttccatgcatggacttgagaccaccgcacccaaattatgagacatcaaaaccttacttttctcatccgtaaaatgggaataataacacctacatcatgaggactaatacagctcacatatgtatgtgttcttatctctgtacctggtaggattatgcttcaatccctgaatcccagtccctattttctagctttataaagagctaaagagaatcatctcctgcaaaagaatcatctctcctctgccttgggaagcctccagcttgttttgttatgacaacacgtttgctattattttgcttgcggtttccaactaccctaggcttctttggatgccgtccttcaatcagactgcttcaaacacatgttattgctcatcttccaaggtcagagtttagctcttattttctaagatgagaacagaaatatccagctctttcttcacaccagtgtgctgcactaattgacttttccacatactttttattaaagaacaggcggttttctttcagcatttgtagaagaaaagaaatagagatcaacctgcttgactgccgcactagtaagcgcactattatcagctgtgtcattgatgtattcaaataatgccatgaaaataaaacagtgactgcaagttaagaactgcttttaaattgaagtatagttttgttttcatccaaaagtagctttggaaaccaacaaaatcaatttaatgaactcggaaggattgctgaaataatttctgaaagagccagtattgcttccaagatcagcttacatgtttgtgccctccaaaagtcacatctgtttcccccagttcctcggaagtcctgtcatcaaaccctgctggctttcaaggtcagattccctggggattcccagtccctttgccagatccccaggctgggaagcctgacttggggcctagaaccttcacagtgggagaacctctttggtgttattgttctccagcctgtgggtcacccactcggtgactatgggatctgattttttcgtgattgtgcccctcctaccatctcattgcatcttcttgtctttggactggggtatcttttttttgtggattctagcaccctcctgtcaatggtggttcaacagctagttgtgattttggtgctctggcaggaagagatgagcacacgtatcctactctcccatcttgaactggaagctcctcagcttaaatgtttgaaatgtacttatagtaatttaaaactaatcacatcctttcaaagacaaatgcaaaagtgattttgattgagagtcctgttatctgtcccccaccttcaaaaaaaaaagaaaagaaaagaaacagagtttctatagcattgaggacatgaattatgtcagagtgacatttgccttttcatctagtactccccaccagtgaagcagactgtgcacttctaaagaggggcttgcgtttctgccctagaatctgcctaacaaagtacacgcagttcccctctcctcccctgccacacccctgctgactttcacttttctggactccacctgaaatggccctccctgtctgtattctactcttcttggaaaaatgtctactcacctttaagtctcaatttacatgtttgtaacctgtctgcctctctcttcccccaatttgttcttgcttcttgtgagtctccaaaggactttatgcaaactcctgttcacattcatcacactcttgggtcattattttttactcattcattccacagacattcattaagctcccagagtgtttcagacactatcccgggttcctagggattctgcagagagcaagttagacttgcttcttgcttgaacagagctggaggctagaaaaggggcaaatatgcaaaaatatataagattttaaaaggaagttgccgtggcttattaatgaataaaaatacaagatttaatgtggcatctggcatgtatttgtcttcaatctggttacatccttccatcctgcactggaaggcactcagagaacatacagtaaagactgaacaaagtgttaagagcttccctggtggcactagtggtaaagaacccacctgccagtacaggagacataagagacagtggttcgatccccgggccgggaaggtcccctggaggagggcatggcaacccactccaatattcttgcctggagaatcccacggacagaagagcctggagagctacagtccaaagggtagcagagtcagacacaactgaagtaactcagcacatacaaacaaagtattatgaaggaagagtctcaaacttttgttgaaaagatagaaacagaattttcatcttaagtttgcctgctacagaacatagcctctgctaggccctactaacaccaagtggtacttctttctgcaagactgaatgcggactctatttttagtgggtaatctcatgtttaccttaactgtgagatacctaattataatctgtcattagaaaattctcatcacagtacttgcaacagtaaactcaccaaagataggacagttttctcatctcttagcatgttcaaaatatatcagttgtctcagggaaaacccacaggagcccaagccgtattcctccattttaattgattctggactacacactgctggtaagatcagcagacacaccagatactctctcatcattaggattaagcttgcttgtttattttgttttagaggggatggggttttttttttgtttgagccatcatagttaaaggctgctcacacatctgagactggcttcttttggtcagtgaaacacgtgggagacactgtcagtgatgtaaaggaagaagaacgcctctgtagctactgcagcctttttgtaatcctctctagaaataggatcaaggattttaggagtcaagcaaatcccttaataatgacattgttatattcttcctagtaagttcatcttccttttcgcaagctggcctgtcttcagcgataataacaggtgacagaatggctagctagaattttcactgtcgtcaaccttatcttcttgtctctttatttctggtggaagtgctaatataaatgagcaaataaccgagagggagagtaacaagagatctcaaagagattcatcagtccctgaaaatctgaaagcgacttttgtcgttattatcaatcaatatacacaatttcttttaaacactagataaaagcatataatacatcaaaaacatgattgaaaggtaaataaatataatgaattttcacaagatcttggatttatttttctgttgtaaaaacggtatagaatagatttagttttctttctgtctcttcatacaatgatgagtgcattaagggagaagtttcaaaatttccacattgtgtatctgggcttttaacctctcccaaagatcagataaagactgccaaaccaaaaagcattcttggctcatgtacacagcttattctttaaataggagattcagcacgtctgagcaagagcaaagacttctccagagtctttatctattgattaactgtagaagctattctgtttaaaatgagtcttgaatacgctgtaaaataaatgttttattctattttggagtaaaaggtgtgaaggaaaaaatgagacatacatactcctcccttactctacaaatatatgctgtattacctttttgcccatgatatttttataaaaagttggaagcaagaaaaaaaatacatttggcaatgagattgtattttacctcatgagaaaaaacccaagaccaagtgttaattactgctccactgtacagaggttacttggtggctcctcagtacattttaggagcttccctgagacctttggtgaaactgctaatatgcctcacatctcaaaggaagttggcaaaaccttcttttttctgtgattcttatggttacaatacaagatccctagattctcagaagcaggcatcaccttgtgaagagatttgtttaaagtgagaaatcctccagtttcttctctggtcattatctttgtaattattacaagtgggaaccagaaaccactcagtctcaaaaagaagaaatttaacacaaagaacgtgttacactgctgatacaagagctgagacatcaaacagtggatggtgaactctgatggcagttcagaaattagcaactgcaatatgccactctctgggcaggaggaggaaaaacacaagctggaggtgatgctacaagagagcagaaaaggccagagcgtgagctagatcagcaatggaggactcagcagaagccgagaccgcagcgggaaggaatggtccaggagaggctggaatcatgaaggtgatacagcaatggctaggcagcgctagaagcacaatgaaaggaaaataccctggcttcttcctttctcctacttcacagtcttttaccaatgcttcccattggccaagacgaccaagactaccaggaaaacagaacaaaggagtctgagaactgtagttccctgagatgcagagttacccttaagaagcccaaggaatagataggagaggaaacaggtgaatgtcaccaaattagctatagctagactcaccgtttggaacctccgcttagcttgagagatcctcattgaaaaaaaataagccttaagactaccagctgctagaaactaatagattgaaagccttgattgcaacagtccatgagtcctccctgagctgcagagcaaaaatattgaatgtatttttgagccttcgtatctcagtgatgaacttgctggtgagaagtcacatttacttatccatgaaagatccaagaagtttagcatgtgctttcagtcaaagaataggcttcagagaaggaaatatgtgagtccatgaagcacctgttctcagagaatagagggacagatgaacctgaaataaaacctgaaaaaagcttggccatcaaaatgatcatttcagatgtcagtgattaaactttggctaccctgctttggatcacaattgatcttaactccagattttctcatgactaatagtagcacttttctaagcctttatctgccaacccatatacatcagcttagttttatatcctacttagtggaacataaaaatgatgaaagctaaatgatcttccaagagaaagaacttagatttttttcaaaacactgactctattagtttaataatacttcagttcagttcagtcgctcagtcatgtccgactctttgcgaccctatgaatcacagcacaccaggcctccctgtccatcaccaactcccagagttcacccaaactcatgtccatcgagttggtgaagccatccagccatctcatcctactgtcgtccccttctcctcctgcccccaatccctcccag

SEQ ID NO: 45478 - DNA, 810 bp, Bovine  19866880645167
  misc_feature (1)..(1): n is a, c, g, or t
nctttagtatagtcatactaaattgattcccacaacaaaattttagaacattttgttatcacccatcctaaagaaacaccatgttcattagcagtcactcctcatttcctccaaccacttcagtcctactcaacctctaatctactttctgtctctatagatttgcctacttttgacatttcataaaaatggactcatgatacacgctctttggctgtctgaagcttgttgcttggtatatccatcaggaagggctcttggaagcaatacttcccaagttcctgcatgaagataatagtttgtcagtgcccttcacacctgaaaagtcagttttgctgggtataaacccttgtttctcattcttgctacagctgccagaattgcctttgagtttgtcattaaaatgggagatttgtttataacaaaaagcaatctgcattcaaattttgcataagaaaggagttaagactgtgggtgttcataagtaaagaaccagtgcatattcctcattgtttctgtgtctacagcagtttattgttttccttgcagagcttctctaattttcagcatctcccttccactaacaaccagccaattcatcttccataggacacaaggtttttccagagcataaagaggccaactttcctatttctattacacccccaggtatttacatatctggacaacctaagaagcacaaatctgtatttcaccagaaggagttactgaatttataccccaaaacaagaagttgtgagttatgaggaggaaacttctcccacacacccactcctccaatttacaaca

SEQ ID NO: 45479 - DNA, 1491 bp, Bovine  19866880659142
  misc_feature (1)..(1): n is a, c, g, or t
ntgaaagaacaaagtgcacttcaacctaaatgtgtcttcctgtgataacacataatttggtttgatttaaggggcaaatttccgttcttttcccggcatacccttaaagaagggatttgaagtaaactatatgtgaccaagaacttcaagatctagttttccaggccactttgaagcctcttatgtctactattcatataatgttagacagcattcagtttggttctaaggtaacaaatgtggttaattgtttataaggtcctctgcctatgatttttgtttttataacagtttaggacatcacaacagttcttgaatcatacatcatcattacccagtgaattcaacatgtcagaagcagatacaaactccctaagtttaagaatagaagggtataatgactttggttcattagatttataaaaaatactatgaacataaccctttaaaactgttttgacaagtcatctgttgttggcagcatttatataaaaacagtagatttggaaatatatatttagctttatcatatgaaactatatatatttccacataaagtacttttctctgaatctcccgacactcatgtacaatatttgtggtagacattttctagatagctttttcagatgaggttttttaaaagcaatcttgaaaaggaatgcattaactaaacgggacaaaaggttctttttctttgatgagagctatgtccttcctcaaaaagtttcttatgttccagtaaattaagtgtagaatattctcatcactcttgctgctaatcaagacattagccatataatacagaattatgcagtgccttcatagctaaaacttttatactgcactttttaaaagcatttattttgaggaagggaaaggggcatatgtctgaatatggatttgaagctgtatatatttcctgtcattctacaaagtgactttgtgaagcaaaattttgctaaatgttaaactctgaagtttagtataccagataattaaaatactgtccactaactagttcatagactttaaaagtaaaatacgtacgactgttaaaacaacatgaagaaaatttcatttttgtctaattgcaattaaaagaaaatgttaaaatattaaaatgaaaataaaactaatactttccaaccaagagctcagtgattaatataacaggaacacaatacatgcttattagaaataaagcatatataagccaaattaccaaatcagttcacagctgagtttttatcctgattaattatgattgatttgtactgacatcaaacagttaggtttttaaatcaatttgtaaactgacagccaattttcgcagaagtttgaagcttaaaaactattctctcttatttaacattttgatggttctataattttaaaaaataaagagtattcaaacattagaaactaagaaactagaatgcataggttgttttttattttttatttttagctagacactgcctgaaataa

SEQ ID NO: 45480 - DNA, 2193 bp, Bovine  19866880709872
  misc_feature (1)..(1): n is a, c, g, or t
nacatcctgtgtgtgtgtgttcagtcattcagtcgtatccaactttatgagaccccttggatggtaccccaccagacccctctgtccctgggatttacacctggcgagaatactagagtgggttgccatttcctcctccagggaatcttccagacccagagatcgaacccatgtttcccacatctcctgcattggcaggtggattctctaccactgagccactggggaagcccacagaggcatcctgggttttactaattcaatgccttgcctgagtccaaaatggaggtgcaatatacctaaaaccagaccattcccactcctggttcattctgcctgggacacccgcatccctccctgatctcatcttctagtctagaatccttgggtgaatcatctaggacaattcactccctgctcagcgagctaatatatcttctaaatatcttcagtgacacatgtgtcacataagtaaaagatgccagtgagtgcctttacaattatgttcaatacgtacatatgcatggatctgtgggcatacatacataaattgggaaataaatttgactatacagctgtctcccttatagccttgaagctctttagatgagggactataccatgtgcattttggtttcccaagggtctagcaaatccccacatgggatatgtttgtagaatgatgttattttggtagtaatataatttgcaagtcactttctcagaggataatgaagaaacgggctaaattcacctgaaaccaataggatcacttaggcagacagaattttagtatttaaactgagcattgaaaagtgtctaaacataaagacagcctaaagtcatttcttaaataccatttcaataacatcaactaaagtcccttttaacaaccattctgaaacatcataagaacagaacattttttcttgatcctagcaagatattacctagtatctgatacataaagattaataatattcataattttattccagtaagtgtaactgcaggtactattttttcacctaaatcaagtatctggtatttttttgaattttaatttatctccaaggaattctatagggactcctaatctttctgaaatcacagcattcatttttgggtttttttttttttttttccctttttttttggccaggcagcatttgggatcttagttccctgaccagggatcgaacctgcatcccctgtattggaagcacagagtcttaaccactggacttctagggaagtcccacagcaattgattttgttatttataaatccccatctttctgaaatgtagtaaatacttattttcaaacaaaatggcacatctgttctctaatcctagattgcaggaattcaaagacatagctttaacactacaagttgctaattgctccactgcaatttctttaaacttaagaggctttgtctgttattcattccaaaaaagttactgagggcctgataggtgcccagcacaatgctaatcttgatataaaaaaataatgaattttatcactgggtagcatctaccaaattttcttattctttgaattacctatacttttattgtcagtagtcacaaaagctcagaaagctgtattagttttatacacacatacatatgtgtatatatgcacacaaatattctccctcctctcagttggtatggctagtagccagcctagccttccaaatgtccagagaaacagtatagaatcatgattcttctccaaaagtgaccatcaattacacaatggatatgtttttaagtatggtggcttagttgctaaattgtgtctgactcttgtgaccccgtagacagtagccctccaggcttctctatccatgggattttcccaagcaagaatactggagtgagttgccatttccttctctaggggatctttctgacctggagatgaaacctgggtcttctgtattgcaggttgattctttactatctgagtcacctggaaagcccattttaagtataaaaatctattattagtgcttaaactcaatatatgttggggatttctcaaaatcttcctaaaaaacaatatggcagtaaaattcacctgatatcctggcatgaagattctgcttcatggagagaccttcaggctgagaaagggactggagaatcgtcaaggctgatcttctcagtgcattatcaaa

SEQ ID NO: 45481 - DNA, 1576 bp, Bovine  19866880734008
  misc_feature (1)..(1): n is a, c, g, or t
naaattgttttagcctaatggaaacagatgtggggagcctgaaggaatcattcagatcttttactatccaacaaaacatctaactctatccttatttcttaaaagggagagaatctcttgaatgcatcagaggatgcttcatttaacaaattaacgtgctttctagattttgatgtggtccttcttcagtaatattttcaagtaaaatgcaaagtatccccaaataggacctttcattattaatggtttcctatcttttaattattattgctcattcttagacagaatattctagttccttctcattttgctatacaagtagccatacaggtaactaataaattagaaagggaaggttccacatcagaataaaaaacattctcgccttattatcagaaagaagaacattccattccactcccatgtaatgtttcttgcatggtctggtaagatagtgttatgttcaatatcacaaaaatcaccagttactaaatattatagttcccaatggaaaatcataaagtacttggtatttctgagaatatcaagtcacagacttcaggttcacactcagaaacttagctgttttcaccaccagataatatttaagacctgtagtttaacctttgagaatagctgatgaagcaaggcatatgggggatttgagataacaatgttcctatgaaaaacaaaacgtccccctacaattttgagatgttacagaccaaaatattatggaataatcagtacaacacacaggaatttgaacatcctaaagacggaaatagatagaatcatgatgtatggggaatgccatacagggagccattaacagagacctgctggaggcactttcagttttctaaatcatcagactctcaaggtgcctgaccaacattaactgctaatagctaacctggaggtagctttgaagtcatccatggtaagggaacaatgattggcttgtttagttggcacaaggacctcaaatttattttgtctcaaagccactttcatagtgtactatgaaatggcaactgcttaaaaaactgtacagtaaaatgaatgaaaaaggaataatgaaaaggagtattaccttagaaaagtctggttttactggcggattttcccttaattctgtctcggtatattcattatttacataataaccaactctaataaactcttgacctcgataggtgcacgttattagcacaactgttacacctacagcatctgcatctggaatgagtcccgggttaggtgcgtcagcctagaatcatgtaaaaaaaaaaaaaaaaacacggcacaaagtgttgttaaccataagcaaaactggagttttggttacactgagcaccttcagtcaagggcacagcaaccaaaacttggaaatcatactgggaaggcaaatgctcatttttgaaactgacttatagctagaaaatatagctcatacatttctccacaatatgcctaattacctgaaaacatcaccatgtctagaggaaaatacatgtggctactgtgtgtgcggctaccgtgtgtgctggttcatgacggattatgcaatatt

SEQ ID NO: 45482 - DNA, 797 bp, Bovine  19866880773302
  misc_feature (1)..(1): n is a, c, g, or t
nttgcttcttggacaggctcaccaaactattagatctgagaaattcaaaaggcaaagcactgaccttgagcagggcactttgcaaaaccatctctcaatatcttcggacagaggaagataaatagaatttaggttctaagaacacattgctggatcaataactggttgaacagctgtaacctgtaagtgactgatgtcttgctgaagatatatttatgatgatgtttgacatggctcagtcctctactttgcaataatttttatcagatatttatagaaaagtcccagttatccaaagttttcaaaggaggaaaagagaatgtatagcaaatgaacccaaagctagaataagaatataaaatcaacatgcttcaataggcagaaatgtggaggactgttcttaggtttaaaaactaaaaaccacaagtacaaattgagagtgataagatttgagggttttatttattagattttattattagacattacctttagacataagaagtatggctgtgtgagcaaaaataaattaataatttccttcctttttccttatcagtaattttgtggaatattaaagcttctaccaatatttgtatgatactcattcagagtgatacacatcacagataaactattactatggtaaagttctctaatcaaattaggtattaggtacatattagaaattagggaatacaactaaatgaactcaccagagagtcatatattatggatgatttttcctaactctaacctagttattggctcttataagtaatttttcatgatccttc

SEQ ID NO: 45483 - DNA, 1996 bp, Bovine  19866880806052
  misc_feature (1)..(1): n is a, c, g, or t
ntgtctgactactttgcgaccccgtggactatagcctgccgggctcttctgtcctggaattctccaggccagagtactggagtgggttgccatttcctgctccagggcttcttcccaaaccaagtattgaacccaagtctccggcattgcaggcaggttctttaccatctaagccaccagggaaccccaaggcatgttcactatcaattgctatttatggaaccccatgtcactgacaagtaaaattggtcttgaaatttttcgtttcatttcttttataaattgaaaatgttcttggctattcatagccttagctaatcagtgtttatggaattaaagatgacagtcaaagaaaattttaattaaaaagattcttgtctgttcattcatttggtttaattacctggccaatgaacaagttagcagtcatgtacagatgtgagagttggaccgtaaagaaggctgagcactgaagaactgatgtttttgaactgtggtgctggagaagactcttgagagtcccttggacagcaaagagatcaaatcagtcaatcctaaaagaaatcaaccctgaatattcattggaaggactgatgctgaagctccaatatttgaccatctgatgcaaggagccaattcattgacaaagcccctgatgctgggaaagaatgagggcaggaggagaagggggtgacagaggataagatggttggatagcatcactgagtcaatggacatgagtttgagcaaactctgggagatagtgaagaatagggtagcctggtgtgctgcagtccacggggtcgcaaagagttggacatgacttagcaactgaataacaataaaaatggatgagttaaattctggcagagtttctactactccaattcttagccacttccttaaagactttttatatatgtgtattaatgatgcaaagaactttacagtatcaaaattcatcttataagttcaacaacttttattgactggcaacattttatgaaatttttggattaagttagttggaacttaggatagcatctcttgaatttttaaagcaagacaaaaatgattataactagccaatcggcttcaactttgtgctagtgactgtaattataataaaaaaatctacatttacttatgaaattttacctgggggtgtaaaaaaacctcatagtctattagaaagatgatagttttatatgctattaaaatgagtcatgctgaaatgattgcttacaaggggtccatctaaatgataatgggtacaaaatgtaggttatgctctgacagtagaggtcctatttccatctggcaaatctaatgatacttgaaagatgttaagtcatgaacaaactaatagcccaattagaacatcaaataatccatgaccctactggtttattttatcttacacctttaaagtacttttggtaacaattactaatctctatgttccaaaaagatataacctcagaacctctatagtactgtagttgtttttagctctcttggggttatgtatctgaggagtattcatgcctaatgttgcataaaaattcctgggattcatagctctctagaaatcctgttctgttaggcatagaaaagaatactaaatgaaatggagttcactttactaatgctttgaaaggtatgatttataaatgattctttataaacattgctgtgacttgatatgcagaaattttaattcatacccaggccataacatttattaatattttcttaggataaaccttcagaaaatttgcatatacatctggtctaagacttgagccagctttattctatcattcagtcagtcagaaaatgtatggttaacaattactgttgtggccatctataaggaggtcacaatacatgaaatatttccttcaggtttattctcttacattcattgaagagctagttataaattttagatggacacaccaatttgctcatcagtgtggggatttttacattt

SEQ ID NO: 45484 - DNA, 1529 bp, Bovine  19866880899386
  misc_feature (1)..(1): n is a, c, g, or t
ntttgtatgcccttgggtaagttactcaactctcagtgctctgtttcttcctatataaaatgaggataaaaccaatatccactcttactttatagggctcttataacatctggattaatatttgtcagcagagactacttccccttgttcactgtttctgcagcaccaagtgcagtgcctcaaagtaggtattcaatagcatatgctgattcactcaatacatgaactcaacagatggtaaattatcccaattctcaggaattttctaccagtcccattaaatttaaaattctttgctatagctgcctcatgatacctttctaaaggacatcatagtaatttcaaaagaaaaaacatacacagaaatattcctggaaaaatatagcatttgtttaaatcacacacatatatacacatacaaattgagtattagaaatccatgtcaatataattcaggcaataaaaatgatacgaagcactggttttaacaggtattgtaaattatgaaatgattcaacataaatctaaatgtaaacatattacctcatttttacattaggttttacaaaacaagaagtacctggccttatgaaacactttaactgaagagaatagtggctggacgaaaaacatcaggtccacaaagagggctcaacacagcaggtgatgccaaagagcaacgaccagctcacccaccagacaactcagggctggtgacaggtgcttctgttctataaagtactttacgtctgtttctcaactttgctgtttgaaatttggaaagttagacaagtctagaatgatgtttcttagagaaacagaatttttgcagacatgtgctagaagagtagccttttacttgaaaagttagtgaagatatgtattcctatcccacgatgattcctattcctatccctatctctacttattaccctagggccacaggatagaagtcttttccttgtggtgcaggctaattccagtttgggaacccttcaaaaaggtctcctcctcacaaattcctgtcttcttcttctcctggcagttgggaaggctacacagtttaacccaagtcagtggccactggggctgtcattaacacgatttactccaggcaggcagaggaaccagagatcaaattgccaacattcgctgcatcatcgaaaaagcaagagaattccagaaaaacatctatttctgctttattgactatgccaaagcctttgactgtgtggatcacaatcaactgtggaaaattctgaaagagatgggcataccagaccacctgacctgcctcttgagaaacctatatgcaggtcaggaagcaacagttagaattagacatggaacaacagactggttccaaataggaaaaggagtacgtcaaggctgtatattgtcaccctgcttatttaacttatatgcagagtacatcatgagaaatgctaggctggaagaagcacaagctggaatcaagattgctgggagaaagatcaataacctcagatatgcagacaacaccaccctta

SEQ ID NO: 45485 - DNA, 999 bp, Bovine  19866881017328
  misc_feature (1)..(1): n is a, c, g, or t
nggtctgttgggccattgagccttgcctttttcctttttaaattactgttgtatttaatctttgaggaaaaatatttcaagtttgactgtgctcagaatctctgttttacatagaggcaaaaagaggtgtttttgttttttgcccttttccttcttgatattggaaaggcatcgtcatcaggaagatgcttctgaccctgagattgtagtagatacccagttagggggatacctggagggccagtggtgaagactgctcttccacctcagggggcgtggattcaatctctggtttggcaactgagatcccacatgccaggtggtgtggccaaataaataaattgagataagaaaaaagaaaacctagttaggctggaccttggtagcgttggttaaagcattgctctgagtttttatttgatattcaagttaggtttcagacatcagttataaagaccaattcttatcacaaggattctggctatttgatgttgatttaaacaaatctgtaaatatccacagggccaacagcatccaaagggctggattgctaattttcatcacaccacttgggttttctaacacacttttctgtaaatcaatccaattactttcatttgattttaaatttctttctatagggacagaatttgttaaactctgttaatccatgtgccctcttttctttctttaattttttaagctgcttgtgtcggggccaatgtgacagattgcacaggacactatggagacatctgggtctggtagcaatcggatctagagcatttatttctattccctgggtaagatccacaggaatcaggcagtctttcatgaaatgcttattttcgaaacagtatactctttactgatttggaggttccctaaaaatctcatcctggagcttggaaactttatcctaatggtagttctcagattttcctttgattctatgtaaatcacatagattatatttattaataacagggaattagcaaa

SEQ ID NO: 45486 - DNA, 1835 bp, Bovine  19866881018124
  misc_feature (1)..(1): n is a, c, g, or t
ntggtatgaaaaagaattaattagtatattatttaggagtaatagtttgcaagtttacaaagtaaactaaacacccatatctccatagattttgttttgctttttgtttaaaaaaaagtgcaaaatggaagccactcctttttcattttatctaagcaaatgtaaacctatctggttgtgcatctattcccattaatcgggcgttttttgatttctgcatgacctgcctttatttattatacatggatacctccacagtacctatgggcacagagttcataatttcatgtcagttgattgatgaacattttaagttatcaaaaggtacaaaatttggaagcagtgctatttttgtcttatgcttgtgtccctctaagcaaggtgattaatttcttttaacctcagtttccttgtctacaaaatagagacatatacagttgcattctagaactcaagagaatttttttcctattctttttcccatgccaaaactaaaaattttaattttcttattatgcaataaaactattctcactattgaaaaatcataaaattagacaaacaaaaaatagagccccattaaccctatctgcaaagagttggacacgacttagtgactgaataaccacattcctatccacccaaacacaattattcttaacatcttaactacctctcttctaaatggaattgattgcatttcttttgagaaatggcatctttccatatacactattttgtaatgttttaaattcatcctcagcaactaaatcaacattaaatacatcattcaacatcagaggtcagcaaacattttctgtagagtgtcaggtagcatttcaggcaggcacatatctcatgtcgtgatttttaaaaataatcttttaaaatgtaaaaccattgttaactctggtagtacaaatcaagtctcagactgaatctgtgctgtaggttgttgacttttgttttatatcagtggatagatctctgtatacaggtgtatggatatgtcagaacttagatacaagtcccatatcatctgacacttaggtttccactgtctagatgttgccaacagtagtgaataaacatccctgtacatacgtatctgtatgcatgattatttcctcaggttaaatatttgagtgtggaatttctggtcagagggcatttgctccttcacttactcattaactctagctgtagggtcaaagcagccatagacaaagtgtaaatgaatgagcatgtctatagtttgccaatccctggattatactaacttgattgaaagcatcaagcattaaacatttttcatttaaatgaagagatttaaaaatatattcatatatcctacttcaggacaacactactgtttttaatagatcagtgttatattcttatagtaccataaataattcaatgaaatgtcttgtattaacaataatcagaccagaatacaaaatgtcacataactcaatacttttcttattagaagacttttgaaaatatcaactgaaataattcaggacgcatttcctctttaaaatatgagcataaataataacactacaaaacataattcatcttgtgaactgtggtcactcttgtactatgtgaatgtttttaaaaataattacacacatagacacacacacacagatacacacttcaacacagcttaaacttcctaaattatgagcattcaaaaaggaacctgtactataattttgaccttttagagatgtcaagtcatttattcaacaaatatttattaaacgcctatgaactacatgtcaagtttcacaagggacttggaataccaaaactaaactttg

SEQ ID NO: 45487 - DNA, 872 bp, Bovine  19866881088272
  misc_feature (1)..(1): n is a, c, g, or t
ncatggttcctccttctattcaaatagttcctcttgctacagctcagggccctcccttgctcctgtctgcctctgcagaccctatctgtcaagacccagctacaatccctcctcttctggaaagcttcctcagcccgttccagcccacaggtatcttgtcctcccctgaactgccatggtatttactgtcatttaatcattaatcattgtcttgcctgtcccagctctgcacacttatgtagaaccactgtttatatcttctgaggttatttaacttatcacttttaatttgtcttctaaaccagactgtacagtgataagagcaggaatcttaattttattcttccttatttgccctgtaaaaccttcccgcagtacaggaattcatcaggttattgtcaaataaatgattgaaataatttagaaccaagccttgaaggaggaacaggtacaatttttcagttatctgttctaaaggatgagagcttctttttgttgttgttaatcttttagtgaaaaatagaataacagaagtatttctgaaaaacagaaagtatttcagacagagtgccgtaagttaggaacagtagaaccagcgtgaaagtaacacggaacagacttaatgaccgcaatagaccccatctgcccaacatccatttactctccctcctggcaaaccctggctttgttcaggtctccattcttttctgcacagtcatgtgctttaggggaaataacttaagcctcattgccagggactgaattccaaatctctaagttaagagaatcccactaaccttgcctttagttgttttaatcattctaaccaatgagaactgaggcaaagtctattgagggtttcgggcaagact

SEQ ID NO: 45488 - DNA, 916 bp, Bovine  19866881104881
  misc_feature (1)..(1): n is a, c, g, or t
naagattatacatcatattcagcaggaagagatccatgaaatgccaggataatccaaataacacactggacagatagaaagcttacagatattccgaggattccgagacctgtgttagaatattcatgtacaaagtagttcttctataggtactgtctaaaagttagatctaagtagctcatttgctctaattaaaagcatatattaccactatgatgctcaaagactaaaagaaacaatcatacagcggtttcttgaaacatacaacaggtaagggtgactattcccaagttgccagataccctttgtgggattaactggtcaatgtttttataaacatgagaacttaattttataataggtctttccagattctccttcaataccagaggaggtatatttatatacaaaaaacagagctgaaggcagggatgtgggatgacttaactgaaaacactcagtcttgaatggaaagatggctggtcaaagctttaagctctaagaatcataggagagttaatatactagattgatagggatcactgagtattttttccacacacatattcccataagaaacacaagcaaactaaaacgtcacctccacagcttcccaggcccatttcctgtactttggatcatgagtcagtcgccacatgtacatgtaagtctcaacaacttctggccgtaagatgtagtatttctcattttgcctcgtagcaatggcttcaacaccaccatcgaatctgaaagcttctggtcccagtttcacaactaaaagacatgcagtgggggacaagggttattgtctctgacaatgcttagtgtctataacttaaatgaaattaaaagatactttagaacactcaagaggggtgccaaaatgatcattttaaggaatagctataaacactgt

SEQ ID NO: 45489 - DNA, 3034 bp, Bovine  19866881174580
  misc_feature (1)..(1): n is a, c, g, or t
ntacagtagagagctcctggccaagtagccgccccagcaaaggcaccacatatgtgacagaagctcccttcgaagttccgatcccagctgagctcccagctaaatgcaggtgtacgagtgaccccagctggtactatgtggaccagaaataaacatcccctctaaacgcccctgaatttctgactctcagaaagtaagcactaaaagggtacggtggggttttttttttttaagccactgagctttgatggagtagattatgtagcaccaagtaactgaaatctcctacatagattttccacttactttacacttctttcatttcactaaatgccaaacaagcatgttccattacatgcctttcttggttttcttttctcacctttcaagtcttctcagttcttcactcaagaggttgggcagctccagcttttccagaatgagttcacactgcgtctggtactgctgcagagggttttcgggaaaggaagtgtggagtgcattcacacctcctagcagcgcacctccctgacaggatgagaaaatggaaaataccagggagagtcaccaggcctccacgctagggaccactgatcccaggtgcttaagaccaacccctatacccctgtcacggctctcagagtcatctgggagcctgattcaaatttcagtagtcctcttccccaatttccagtggcatgcattgctctgggaagccacactgtcttgagtggaaccatgagcatctctcaggtgtgttgaggagaagaaggattaagacccactactttacaccagtgggtaaaacaatgcagactgtttccatgacaatttttttcgcttcttttaaatgggtccctttggataaatttccaggaatgaataggtctaaaatatggccatttttataactccagatatgttataaattgtcttttttaaacaatgtttgcaattacggttcaaatgttaggtacaagatatgctcacctgcatggaggactccattaccgacaccactgtaacagcatcttccagagtcactgtatcacgaaacatcaggcgagcatgagctatgaaaggtgcactttgaaatgatgaggaaattatttttatgaatatctgaggtgacaaatgtcattggtgccccctactccaaaactgtatattattaatgtgcttctaataacaaatacattttactagaacaagcacagatgtctaagttcaatagctttaaggttctttctctaataaagggcctaattcttctgcacagcccatgacaattctgtgtattcacatgaaaaagtactctgggctccagcaaacaaaggggctatataagcatataattgatattcagtaactgttaattcttactctctaattaattcttaattcttcttaattctaatctattataatctaaacaagactaaaattgatttctcatctctggtacatctctttatctgtcagcttttcaaaagtatcaaacttgcaagcctaaatcttaggtatttcttgccttaatattaattataaatccttgaaaaagtgaagcagttttgttctatggaactttttagttaagcatatatcacatcattatatcatacagttaactcatgtgaaaaaaatttttaggattatttaagtaagtgctaaatgtaaaagccagtattaagggaaaaaaagtctgagggtgcatattagctgcgagtatgcacgcaagtctcacacgttagggatgggacagaggacggcattgctaattcaacgttactgtgttagtggcggctgtgagtagcaactggtgagaaatcacccaggatgccatacagaaaacagttcccaacaaaggcatattcagatagaggccatcgagaaggaaaacatacagcaagcaagactttttaaatggatgatgtctgaagttacaggaagttatgaaatgtcacaaagattccttttccttaatgccactacattccactcaacatctataatccgtgtaggtttcatagcttcaagcttttactttttaaccaactgtgagcaagcatctcagagatcatccttactcattgccaagtcccaagccttgcttactttgtgtgtttagtcttagtcgtgtgagactctgcgactccgtggaccgtagaccgccaggctcctctgtccatggaattctccaggcaagaatactggagtgagttttcattcccttctccaggggattttcccaacccaggaatagaacccaggtttcctgcattgcaggcggattctttacagttggagccaccaggaaagccctagctcacagtgagcacccaataaaagtatatgttgagtgaaattaaccttctgctagtcgtatcaagctctccagcaggcggatggtggtccgggcagcgttccgggagtcactctgcctttgcatctggtagtaccggagcagaacttgattaccctcatcagacagtgtgggctgtagtttcctaatgaggcagaagtaggatttcatcttttccatgctccagagcttctctgatttgcttgggtaacctgtatatatcaagtattgggtcagtaatttctaagaacaggcaaatatctcattttgagggttttgacaaagttcctgtactcatttttaaaaggataaccttctggttttctggccactgaaatctagacctatctctgcatatagctctataataaatagtcttaggctctaagcttaataaaggtaagcttcctacaaaggtttaaattattcagaataattctgttctgccatatacaataataaatagtacttggtaagcctaattttttgacaaaagatccacatttaggattctgctttataaattcagtccagttttctttgtgtacaggacgtgaaccacgtggtcattatatatcataaagttgcccttttcaccacaaaggacatacggcaagcaaaggaagacccttttccttctgtgcatgttctaggctcgctaactaggttcac

SEQ ID NO: 45490 - DNA, 3928 bp, Bovine  19866881240486
  misc_feature (1)..(1): n is a, c, g, or t
nttattgaagaatatttactggcaaataacatgtttagtaaaaaaacttaaaagcatatgcaatatgatcttaatttttttaaaatgtatgatacatctataaaatgttggagaagcattcagaaaaatttttatttatttgcttattttgaggggttaaattgggaggaaactgttaaaaccatctgatcatgtttcaaatccatcctaaggaacatggtaaaaagatgtgggcaaatggtgctgtagaccactggagatgggaatatgaacaaatatttcctccatattctctcatgtgcaatatcggtttttgattttgactatcttatttaaaatttatatatatatatatatattattttattatttatttattttgctgcaccatgtggcatgtgggcatgtgggatcttagttccccagccagggatcaaacccgcacccctgcattggaagtgcagagtcttaaccaatgggctgccagagaagtctcagttttgactatttttaatgaagagttttctacatgagttgacacagctgatcctaaaagaatggcaggcggggagagagccctgctctgccatgctgaccctggtggagcatggcactctgtggataatcaggctccccaaagcagttttcaactgtgctatgattgtttatctgtattctgcattgtacagcagtacattatttctagatgggcatatatctgcagaaagacagggtttctggctcctacatggaaaaccccagacagaactctctgccattgtcactgaacaaagggctttggaactggttcgaggaggtgaagtcaagtttgttcccttgtttctgtctgtgtcatatagtgtgcgggcacatggagggaagggtggtcaccccgatgtcaccacatgcttgtgtatgcgcgtgtgcgtccgtgtgtgtttgtgtaggcgggtgcactggttgtgtgaagaggatgcagatggtttgctctatagggtcaaagggcttgagccatgtgagtggacattgtctgccatgatcccatttaatagggatagttttgtttgtttgtttctgatggtggagggaggggacggattcatttgagcctctttgtgcttccaggaatcaggcagctcggggagctgggtcctgataatcctgagtgagcaaaggagtggggcgaggtgttcacgcatgcgtctgtaagtgtgtgtgagtgcttccagattccactgtgggaatcccctgccaacaggccttaaataggacatctattagagatttagtccagtatccctttcagatatgaatgaggagaaaaagttgggaaacccacatccagctggcagaaaggtccttccctttgctgattcagatggattgaaagctgcctctacagtacagtcctttcagctgccggttggaagctttgcctcatttcagctgttcatggagaaattgatttttctaagaacagaaattgtatgcttgaagccaaactttcctttttctctttaagatttcttgaaaagacttaagaaggttaaacagttactacatgaccaaacggtgaaaggcataagacagtttagagtaaataaggggtcttatgaaaacaccaggatgcatacacagtggtttctgtacgaactaaattgtatgttttcaaaacataattgatattcttagctgggatgatggttgggtcccgtcagccaactgaatgtactggtgccagcctgaaagggataacgattaaatcaaaagaaatgacaccagcagagatggacaaataatccatattaaaataccaacatgaactggagtttaggaattgtttataaccttgaaattcaacaggaattgcacatattagcacacatataagaatacacagatgatggaaactttactttgcactggtttaggaaaatggtaattcttaggtggaattgtgtatctctgtttaggaagattataataatttgcctggtcttggaaatagtatgaataaaaagagcacaattcataaatggagatcctctttttcccctttcactttttcttaacatatattttttaaaaagtaactattttagaaagtaaaatggatacaatttgctgatggagtatgttgttagagaatctatatttttgagttaacagttcctatggaaagaaatgcaaaattctttcagctattgaaaagcattggagtgtgatggcaaagcttaaataatgtcctgggttttttggtcagggaggggcttcgagatgtctcttgtgtaccatggtaagaacaaatatatacaaatactttcatgacactggtctatctttctctaaatgtttttgttctactgtcaagtgatgtgaaggaaaaagagaaaactgcaaactcataaaaatcccatttcttcatttcaagtataagttttgttctagagacatattcaaagtggagaataggaccaaagatgttttatgtttccattcatctttaaaatagcctctagacactgttaagttgagaccggacaattacttggcacataacccatgcagacagcaaccttgatagaattagaggaaatccttctccaaggatgaagtgttcttgaacaattcatcagaaacattaggcacaaatgcaccttttttctacacctcatgcacgccaaccttcctgcttgcccattttcatgtattatgaatggttttgtttgtttcatgttttctgggttatttccacagttatcccttcttcaagactcagatccagcagataaggaggtattccacacacgtgtaattcctacctcctccgagcatttttcttgtccccccattccctgctccagggtgcttacatggcattaacaattaactacataattgttcaagtgtcataactatttagaaaaaaacccaaaccctttatttagcttactttttttccttttgctgaacaaaatacatgctctgagcatggattttagaagtaaaaaacagcatgccagcacagcgctgggtcttaccttatgctcaagtgatagaatgaatggctttcctactaggggagactgttagatgccattgtgaatatttcaggggccaggcagacagacacacacacacacagatactatatgcttaatataagatctaatacaagcttaatataaaatataagcttataaagaaccagggctatgatcttaacaatgtcctgatgagcatgatgccattagctgctctgacccaagctcctgcctaagaaagcatgaatttttgactcctttccacttcagttctgtgtcaggggatattctggggctcagtctcctgaagtcactctctaggttttgcctgtttgaattcttctagattttgagcttcagattccattttcctatctggccttggccttaatactttagagtttcccttgctttccatcatgtccacatgtgatattttgatttataataagaagtatatatttgatcttcatccctgctcctgacacagagctcctaaaactctgtaactttctaaccattgagcatgatcaaggtgtttttgttgtgttaataatgtgatttttggaaagtccctaagtaacctaaggtggaggctggcagtccatggaatgaatcaagagattagagggctggaattttcaggcttttcaaccctcccctcccgctccagggagggaagttgttgttcaatcactaagttgtatctgactctttgtgaccccatggactgtagaacgccaggcttccctgtccttcactatacctcagagtttgctcaaattcatgtccattgagctagtgatgttatctaactatctcatcctctgtgactcccctctcctcttgccctcagtcttccctagcatcagggtcttttccaa

SEQ ID NO: 45491 - DNA, 841 bp, Bovine  19866881247380
  misc_feature (1)..(1): n is a, c, g, or t
naatcagaaactctgatagtggggcccacaaatctgcattttaataaggtttcctgggaaatctgatacatagcacagtttaagaagcactgacctaggtgaactcaggtaattcaataagaatgggaaataaattgattggaacgaataataaaaatatttattgccatgggtatgatgtacactgtttctgtagtgaactaagcaaaaaaatctttaataatcttcaagtttagcaaataaaagaggtattaggccatgtgatgctgaatctgcagtttaacagccaactctccatttgctgcttgcctgatatttaagagcaaatgggacagccaattcctaaacgaatagcagtcatcgcggcataatttcagtcttatgtgcttgccactgtggtttaggagcttattttactagttaagtcatgtctctaagtcacttaatagcattagaatggaaagacatggtcaaatttatgaggccaagaatgaacctcctgtgagtactttacaccacattgagaatctaattattggttaacaacacagcatttattagttttctctctcttcatacagactctgaggcaaatcagcacacaatagtattgttttaaagagccatttatatgtaaaatagctcttgtatctgtttttggtagttcataggttaaaaaaaatcccccttttagggtaagactggtcatacaaggtcaaacacgttagaaaacaataaaacaactattttcaaccatgagagctatgccaataccgtagatttgaaatcacataattgaaaagtgtttgtaaaataaggcacagtatatgaacaatgggaa

SEQ ID NO: 45492 - DNA, 1190 bp, Bovine  19866881323195
  misc_feature (1)..(1): n is a, c, g, or t
ncatttaagaaatgagaaagccaaggctgagagaaagaagagatgtgatcccattatttttaaataaaagttatactcagtaaacacagcatcttaaacatatagtttgatgtatttttgagaaataaatcacactgttaatgtagcagaattgggacttatgttcctattccttctgctgccattttcttacacacaatcagccaagttatagaaactggcagtgtcagatactaaaaaattatggcacatatgtaattcataattcatttattttccaaagtccatttgtagagtgctggccccaaaaaatcactactctgacagcagtttgggacagagagagtgggacaggacattccctagctctctaaggagagagggtaccaaccccagggtctaggcacagaaaatacaagtgagagaacacaagaatgtataataggtttgtccaaagcatacagaagatcatttataaaatcatatgctttaagggtctggcaagtagattcactgacctttgaaagaaatgcagtcatattttaaaagaaagaaacacaaaaaatccaagctctttgtacagtgtattcacacacagctatacgaatgatatccaccttaaaatagcttatgtaacttttattgtacttccagggggatagaatagatttatgcttaaaattttggaaaaactgctcactgataaagccattatagtaattgcactgggtctgtttattaatttgtcacaattaagtcaataagagctttactaatgtcctattacttgattagttttgaaagtgattatcttaagaactagacttaattggaagcctctcaatttacaaggtacattaaactctcagtagcatcttaagattattcaacatatgcaggtcaattaccagtaatcactgttttgtacaaatgttccataaaaactatagcatgacatgacaaagagggaaagtgagatttaattaataatgccagactccaattgacatttccaggataaaagggcaacatgagcattcatataaagtcttcctgaaagggggtctgttactaaaaatcaaataatggaaagctagcaactctacaccttatggatgaagataatttgtcatgattgctaaatcaccaaattgcactgcctctactcatgcccagctgcatattaattt

SEQ ID NO: 45493 - DNA, 999 bp, Bovine  19866881507924
  misc_feature (1)..(1): n is a, c, g, or t
ntagtatttgcatatcagagcttaaaatattcacatttgctctctgtttttgtagtacagtgttaaaaatacaatatgcatttttcagagatttggctgacaacaaaagaaggatgaaagtaatctacattataacactacacatagtaacatacatttaactaaccaaaaagtctctaaacacatctgaacagaattttttcagattctgttttctaagaacctaacctcgccattacatggaaagaacacagcagttctttaagcatcttttgtgttagggcgcttcgctacgtgttagagatgcatcagggaacaagacagtctctgctttttaaagtgagtctattatattttggttgctcatgccaaattttaaaaagtactattagattcccgagtcctgttgtggcaggtttctggaattgttaatgactgagccatctcaagatagagaagctggatgggctgaattacgttttataagatcacatttgtgtacttctctgctctcccccttgtcgactctttagtgcgtttggttgaaaagcagggcttgtgggatgaaattctaaaatggctttatttttgtcattcactgcccctttcagtttatggataaacttgacttttctggttgctttgagataatgcaaattgtccttcagtgactaagtcacaaaaatctcaatttggttattaaaaaatgtctagtgccaacaaattaaagccccaaactgaacctgaattaaaggtgaagcttctcccccatgcccacttcctagctctgcccattgcaaggggggaagataataatcgaggattttttttccttctgactgggctttttctgtttctcctttgtcttgccagtccttgtttctcatccctcccaagctggacaagggaagaagggaagagaggaaagaggagcagcaactcactcactcgtgcttgagtagtacctggtgatttaacttcagtgctgttgtaaacttg

SEQ ID NO: 45494 - DNA, 1262 bp, Bovine  19866881931455
  misc_feature (1)..(1): n is a, c, g, or t
natgcaatggtttgaagagtttatattaagattgtatatcaaataaaaagtgtgtttttgttgaagatagtaaaaagtgcttttctgccaatataatacttgaggatgagagtaaatgtgtaaaattcagtatggccaattgtcattaataaagcatttataatgataaacatctcgaagtacgtgtatagtgttttgtttatgataaatgctgagtaatttttatgcctgacagaacatttacttgtgatggtttagttgggtgcacagcatttgcttcaagtaattatgtctttagtcatgcatgacctaattccaacacagattggaataaaatggtgaaaaaaagctgaaataatttcagtaagtaaagaggatgctagaaagaagtttttaaaacaaactggagaccagagcctaggtaatatctttattggatatgatgatttctcaagctgaactgtcaaaataaattggggaaattaacaggggacatttttatttgcaaaagcgtggaaatgaaagtttcagtaaaggtcaagaaaaatgtggaatatggtcattaaagtaaggagatggccatgttacctaatatacattccagttacctatccctgcctttcataccatccaaaaccatgtataaaaccactgccattttattctcttacaaccttgtgttaggaattcagagacgagacagtggggatgatgtgtctgctcgataatgtctggattttcagatgggagaactagaatggctgggtgtgacttgaccagggggagttgaaacaagtggggtggagaatccactttcaggatgactcccttactcatgtgatacctagcctgggatgacttgaaggcctggctcccctggggcagttgactagaggacttgacacatatgtcctctccacagagctggggctttcacaggatggcagtttctggagactgggtgctccagacacatagagagctgacaggcttctactgagctgggctcggaagtctcagtctcacttcccccacattctgttggttacaagccagtcattcactcaggccgtcgtagatttgagagaagagttgaactctacttcttgagaggggagtggcgcggtcacactgcagaagagcatgtggaatgggaaatgttgtgaccgttttggaaaatatagtctgccccaacctgcactttctgggagtagaggggaaaatttaaaccacatttacaggcttttcagttagccacacac

SEQ ID NO: 45495 - DNA, 1683 bp, Bovine  19866880380036
  misc_feature (1)..(1): n is a, c, g, or t
nttacctttcatgtgtgtgggacagtgcttggttaacaatttctgtgatatatctgttaccttccttcctatagagtaacatattagtttgtatgcctgttttttctagcctgtgagcctagtgctggtacatgtcgatactttagtgcttgatgaatgaatgaaagaagtttcctggtctcctccttctactccaggtgtttgttactgaatttcaaagagcattttgtggttcctttggagggcagagctgtacacacattatgcacgcatgctcagttgtgtccaactctttgcaatcctgtagactgtagcctaccaggctcctctgtccatgggattatccagggaccactgctggagttgctattgccttccccagacacacagtataacttctaccaattagaggtgctatgcttggcccctgtacccttcagccatgcagggagtttctagagatcaggaaggaaaagtggtcaggggactaatggctgattcacattgctgtatggcagaaaccaacacaacattgtacattaccctccaaataaaaataaattaaaaaaaaaatctctgaatcatggtgcctcaattactttcaaaggtgcatttgtttagccactttctttggagttttggatgtacagtgagcctggaagatacactgttatcattacctacaggtcacaggggaggctgattgagagactatgacatttaaagcaacttaggcttatttcccaggggtcttgcgactaaatgcaaagggcatggttattgttttagagccacatggaagagttcaagccactctaatacacagactaaatccaaggtgttttcaacttcatttgccaccagagaaatagctgaaagttgatttcagattaaagcaatctagtgaaaaatccagctttcttaaatcttggtcctggactactcaatcctggggattagatacttggagtctcagagaggtggggatttaaggcattctgaaagattctagatcagagcttcacaaacttttccatggcaggagatctctaaaaatgatgatatgtgtcttctcatggctacaggtgatggtttagggaccgtggcttatactagaccccatcagttaccctaaggtaactgaacatcacagcacatctgtaatccatttgtagcataccaatatgatatgaaggcttcacaggtggcgcaagtggtaaagaacctgtctgccaggtaagagatgcagattctttcctgggttggaaagatcccatggaggagggcatggcaatccactccagtatgttttgcctggagaatcccatggacagaggagcctggtgggctacagtccataggatcacaaagagttggacatgactgaactgggaaattcttttctaatctaaaatgtctttgtgggaaggaagcagaatctcattataccctatatggattccttatgtgaagtgagagatcaataaccttcctaagatcttccctgggacctgggtttgatccctaggttgggaagattctctggagaagggaatggctactcactccagtattcttgcctggagaattctatggatagaggagcctggtgggctacagaccatagggttgcaaagagttgaacaccactgagtgactaacgcacacacacacacacccctc

SEQ ID NO: 45496 - DNA, 2044 bp, Bovine  19866880406614
  misc_feature (1)..(1): n is a, c, g, or t
ngaccgtactggatgacggtacaagttagacccaatacttgccttcagggagcaacaaaaaatatagaacttgaagattctgtaatgagcttaaaagaataatgttctctccctccctctttctctctcacacacatactcacacagaactttactgacatgggacctcataggctccatcccctgagggcccccagtttacaagtttttgctgtgtgataagcagcccttcactcatcaaagacggattcatctgtcagtggcagaagcttcagacttgcttgccaggtgtccttggcactttccttggggagacaagttaactgagagcctcacccagagcctcatgtgataaagcctgggtcactgtgtgcagacccgggaggcccctctggcccagaacttcccttgaggtcacagggttctccagaagagagaaggcaaggcagaccagaatctctaagcaaaaagctgcacatttcaaagcctttgaaacctgatctccatgcagattaaccttcctcaaaaccacttccatgacactccagtagctccttgtgcctgagaacaaacctgtcttccttcctcccccaggcactgagcccccatcagctgctccacagtggaggagtaacgagtagagaccacagagccagaatgcctggcttctcaggctggctccacctctcttggctcagcctcctcaactgtttaaaaaaaagaagaacaaaataataccgcctcctcatagggctgtgggcattaaatgcactaacatttgtaaaagcccgaaaagtgcctggccctggtgagtgctgtgtgtgttcactgctgtttcttccaaggcgtctatataggtttttgaagcccaagagtccagagccaccaccgcattcaatgagccaccacctcattcaatgcgggcacattgtttacaggtaggaagcctgggaagacaaaatctctgctaaaaatgtgtcctcatcagccctccagggtctctacatgtgactccagtggcctaactggtcctcttcccccaacagtctctagttaatgacagcagaggtagacaggccttttgcccttctctgtggcctctgtcacttgacctctgatagtccggccatgcgtttcaccatacactcactcctgtcttccttttttctctgtaagtctatatctcgcacatctttgagactcatgttctccaaagagtctgtcaacactagcctgtgtgttgattacttgcttcctttgccttcctacagtctttggtctctgataaatttgcacctgatcagatcatggaactagaggcaaggagtgagatcctagagattgcctggccccagtgttctcagcagcctggagtgtgtgtgtggtatgtgtgctggaggaaggaggagtggcatggagaaaaggaaggaggagaagagaggaataactgatatcttgggttggggtgtatttctatttctatattttataatatttggaaaacctccaagaagattttgatgtaactctccaggctgagccactgatggaacccccttcacattgtttgattgataagaaaatgtagggccacagaagttcagtgagttacaatccattattcaagatttgggacaaaaacaggacatgaacctgggtttcttagcactaagcctagggcacattttgtctttatatcacttgtgtcagaagttaattgaaattttaagaagctgaaatccataaattccagagcttccgtcatcattgacaattatgttttgataccaattattatgtgccagacattgatctaaaaactttccattcattggctcacttaattcttaaaacactttatgaagttgatgttgctgttatgcccatttttacagaggaacaaactcaagaacagagaagtcagtgatggtatcccaaaaatgtcctttggacagtgtaaaccacctaagatccatagatgttaatcttataagggaactgtggccacagaaggttatactaaattcctcttggtcaccctcat

SEQ ID NO: 45497 - DNA, 1574 bp, Bovine  19866880410534
  misc_feature (1)..(1): n is a, c, g, or t
ntcgtgaaactgagtctattttccttttggttaaaaaaaaattcaaaaatacaccatgtaacaaaaagtacttttgcatttctggaggtcatgatttaatcaaacagattaggtttaacagattaatccaaacagattaatccaacaaggaaagtgggggacttatttaagccctctgtctcactaactttcactagcaacaagaacatgcctgcgaaagcagggagaaaggaaggaggaaataccaaaaggaaggctgagcttcaggacaaattagttaaagtgagtttgactcctaagggagaagaaacactgaacttcagaagagagatgtggtcagcaaattcccttccagattcaacacaagtcctcctagccttctgcatgccctcatgactgtctaaactcctcaaatagctacccagctccagagttcttagtaatcacctcggcacagaacctgggagaacataaaactgccaggcagctatgtgatttagatggtgacctgaagatgaaggcagtttttgcatttctattggggaaaacccattaactggataatttacatttccctctccaatctccctctggtatgaacatttccaagtttttgtcaatgtccagtcttaggaagaacattaacttccgtcatcaccaccataatcatcaatctatattgtaatgtgaggattctagggaagtcagctttgctatggagatgggcagggacattattctagtcttgaccatcgtcagcttactggatggagagcgcaaatcactcaggggtggcactcagaagccataaagcctgccctgggaagccagcatcccaggagtgactcccaagatagtaggaagacagaagtaaattcttaaaatgtctaagtcatgcagttactttgacagagagtcccaaagtcactcattcaagtaatatcttcctgatttaattttgccatgtccaccaaccacctaaaatggtagtcactttcatgtttttaaaccaaaatttactttaaatttttttgcttaatctgaatttttgtcacaaaaatcaatgaaattatgagtttgaaatgcattttattttataatatgcatatgttctaatacatgcataaatattatatttttaaacaataggccgtgtaccacctaaaaatattctcataccaatgaatgctaatttcttaattttgatcattcattacacttgagcaacatgtaaattaggagaagctgagtgaagggtgtatgagcattctctgaattattaatatttttgcaactattctgcatgcctaacattatttcccaaaaataagttatcatttattgggcagtgctgacattgaacaaagtcccacaggtaaacaaaatgtcaagtttcttttcctttaggtttggctagaactttttaaagtcccaatggaaattatgggttattacaagtttccacagagtataacttactgttgatgaagtcttgagaaattctggagcatggtctctaagctagattactggactaaatatgaacagtacctaaagctgagaccaaaacaggt

SEQ ID NO: 45498 - DNA, 835 bp, Bovine  19866880429295
  misc_feature (1)..(1): n is a, c, g, or t
natgcatttaccagtcaaagggaagtggcgtggtctagagttatgagcaggagacttcaagtcaggagccctgagtgttatttctggctgtgactggctacctctctgaccttgaacaagtccaactcactactttgaaccctaagagtccccacctgcctcacagggctggtgtgagagcagatcacttaaatgtttattgtactgagggctagagtggagcaaatgtgggcatgcaggggtcacaaatggaattaagagacaggatctctgctcttacagctcttaccactagcctgttaagagacagtgtctgagaagtgggctgattgctcagatcttggtctgacaggtcttgaggagttgctgagaggtcggctaatggaatttaaaagctgaccaaaaattgagtaagatggccaagccccatcctgctatttagaaagttttcacaagtatgtatatcgtctcttttctcataatggtgcccctgagactgttcatgttagccctgggaccagggagctggcagggaccactgactcccttctgtaggacacctcaaggcaggcctgctcagttggctatccccgactttagaagaaaggtcattctctgtggtgactctaaaacaggctggaaataagctagctcttcatggtagtccataagaccagtaagagtgtgccccagagaagatacattcattctccagttgagagagagagagaaggaattaaggttaatacactttaaaaaagaaagcacgagggacttcccttgtgattccattgtttgggtctctgtgcttgcaatggaggggatataggtttga

SEQ ID NO: 45499 - DNA, 2043 bp, Bovine  19866880435450
  misc_feature (1)..(1): n is a, c, g, or t
ntcaactgtcagcatctcagaagcactgccctctgtatacccctccctggtcaaattcccatttctccctccagtccaattcacttcttgtcttgttgaaaaataattttcctttcccctttcgctcatgccaccggctcgtctctggcctttttgctgtgcctgtgcctgtcacttgactaagattctgagcgacacgtcattcacaggagaggcatgaaaccaagtggttcggcagcagggacacacgtgcgtgcgtgcgtgtgtgtccacacctcccacctctgtggagagcagccaaccagacatcctgtgagacatgtcttaaccgcaaagaacagaaggacaagtggactgacgggagagaggcttgcaaacatttgggctgcttcctagcacttgcactgtaccccccctcccccagcctggaccaaatccggtgccttcagtggtggcggatgctcattacattacagccaccagaacttgattactgagtccacaaggttttttttccctttagaccccagattctatcccacctggaatttccaggtggcgctagtgctaaagaacctgcctgccgatgcaggagacataagagatacaggttccatccctggatcaggaagatcccctggaggagggcatggcaccccactccagtattcttgcctggagaatcccatggatggaggagcctggtggctacagtccatggggtctcacagaggcagacatgagtgaagcgacttagcatgcacacatgcaaacggacagatccatttccaatttaaatgttcccttctcaaagacatcttcctcaatcactctctcctactgtgctctattttgatgcttttcttcattatcagcacggaaaatatctcatttatttgtctacatatttctctttatggatatatagtaataaacaatatagactcagtatctaaactgggttagaatgtcagccacctcttactagctgtgtgactttggacaaatggtttaacctccctgggcttccaattcatcatctgtaaaatgggaatataagatttattaaaatgagaatgatagaatcatgacatgaaggcaatgagttaatatacgtaaaaccttcagtatagggcctgacacataagtcctactaaagtgtaagtacttctgtgtaagacagataaggactacacataaagtacctcttttatcagccatgccaatagtaatcatcatcatgattatcatcctctagagtgtaagcatcttgatggcagggtttttatctgttattcactgcagaactcccagtgcctaagaagagtacctgatacataccgtatccataatattctgaataaatagttcctgacaaatgcatcttagaactccaaccccaacagtgcctctgagtacaggagagggccataggaacagataactatagtgtgctgggtatagtacaaaaacagagtttgagtgagacgtgcaggggtgtagaagaggaggcagttaattccttgtcttgggcaagtcttctcttccataaggagagtatccttacgtagtgttaaagcttagtaaccctcaagaaacagaccacagggcaagggaaggttctccacaaaagcaacacagcacatctgacagcttgggatactgaggaaactgcctggagttcaggtagctgaactgagaaggggtaaggaaacagagacatggagaggctgctggaccagatcgtgaagggcctcctctttgtgatgctaacaaacttgggtttttctcctgatagccgtgaggagccacaggagaaccatactaaaggaaagagcgtaatggtgtttacccgtttgaaagatcactccagccagaggctgggttggctagtccttaaaaaaaggagacagggagaccaagtacagggcaaatccaggtgagagggatgagagccagatagataggggctggaggaggagggaaggggaggatgcctttgagagatcagcaggaggtagatctccttaagtccaaattgat

SEQ ID NO: 45500 - DNA, 920 bp, Bovine  19866880442752
  misc_feature (1)..(1): n is a, c, g, or t
naattatcttgccattttgacccatgcttcctttgagctaaatcaactaatttagtacctaaaactggatgaagagtgggcgggattaattagctgcttgtcaactcccaaatcaaattagctaagtaattgccaaatttccatttctgtgtgaatcatatgggaataattatagataagaaaaatgggaaaaaaggtcaggagaggtgcttactgaatcaattgcttaaatttgatctcaggtaatcaaagataagttacttgaaactcagaaaaggttttcagtatgcttcctttcagatgctcttcttttagggcattaagctttgtgatgccagttttacttctgcatactctggcttttagcctttatgttaatcggagaagcatataaaggaaattctaactttacaagtataagactgcagtcacaggcctccaaggtatgttttcttagagttataatgtgcatgttttgtaaaattgttctatgaagcacacgttctctagtgatgctagctcatcagcttgctgctatttcagaaactctattaataaaaagatagcaagcctgataaataaagattgttttcaatatatcagaaaacattccctttaagggaattgtttcctagcaggaaaacaaaagggcagggaatcaggaggtgggacctggccaggggatctagtggttcccagcactgtatctgtaaagtgagcagctgagctgagatgacccctggcctccttttcaattctgtaattccaatcagtgtgatttggggctcggcaactcatttctttcagtttttgtatctgaaaaataggggataatagaattcatccaggctactttataggtaggttatcaggacaaataaagttacaggtacaaaagcccacggagaaaatataagcat

SEQ ID NO: 45501 - DNA, 648 bp, Bovine  19866880463501
  misc_feature (1)..(1): n is a, c, g, or t
nactcaaatgttaataaggagcaggtgggtaacataaatgtatgagtgtggccctgcttatagtaatgaaggagtcatagggctgggagtgaaagtagaggcccatcttaccaaaatgccttcaatgagaaaacaggctttgtgaaaggcaactgtaacatgtatttggcctagagtcacccactaactagatatttcctgaatcacagcaaccagaactgacctcaaaagtctgggtgtcatttgaccagctcaaaagaaatgatgttaatctctcattggagtaactatacttctattaatgctgcaaacattacattaaccttttaggatgtgacattctgttgactcacatcaagctctctgtgaagtaaagcctggaattatttttatagggctgttattagttgtttttcttgaatgcagttttacgactctatgtttattcctatgaaatttgaccttgtcagattcatcccatctttccaatcatcaagatttttctgagtactgactttgccatttttgccatccaatgcaaatattccccttgctagtttcaagtaacctgtaattatgataagcacacatttttattgagatataattcacataccctataatctacgcttgtatattgtaccatag

SEQ ID NO: 45502 - DNA, 2712 bp, Bovine  19866880516574
  misc_feature (1)..(1): n is a, c, g, or t
nttgcctggaaaatagtgaacagtctttaatatacatttgcaggataatgctaagatgtgccagcaagagaaagcccagaaaggagggactcgtacacgggctgagggagaggcgcgcaggtggggagcccgtcagctccgaaagcagtggagtcacatcgacaccagtcctcgatgacgtctccggttcccgagcaccagagggagctcatggtggcctccagcaagagctgcaagggagggcagagacaagagtgagtgtcagggtgccagggccgggtcatcagactctagagacggagttatcagggctctgcttggccctaaataagtccagccagccagctgcagcaccacgtctccgtgtatttctaccccaggggcgtgtttctgggaaagctggacctcagaggacttgtagggtgtccctgtctcattagcatccctgtggttgagggccggaaccttgggagccagtcttattccaccttgcctctccctcccattctgcaccagcattctatactctagctccagcgacacaacctcgtctccatccactcagcagggttacccttggcccagaggcactcagccttttctcaaatgcctctcagggcatcctcctctgccctcttcaccccaccccagtatttcctctgtactccttcagttgatgtcttgtatctcacttacaatatgtatgcagttctgccttgggctgtgactacgcatcatgcctctctttctaatggaaggtagaagccacgtgacacacaggctgagacccgggctctggagcagtccctctgggtgagaactccagctctgccaacccctgctctgtgactttgggcaaatgacataaactcattggtaaaatggtaaaatgggataaaaacagcactttccctataaggatgttgtgacagttaaatgaaacaactctatgccaaggagcacagcagagtgcccatgctaatgcccacattgaattgaaggaagcaaaagttgctcagtcgtgcccgactctttacgaccccagggactgtcctctgtccatggaattttttttcaattcaatttttttttcagaaagttttcaagtttacaaagcccttgtagatgctaactcctttgtatcagagtggagccctgtagagccttccccttcatccttcgctctggctcctctctgaagtacctagataatatatctgatgcacatttcctgagttgttttacagatgtcaatcccccaccaaatggaagatgtgtctacttgatgaccaggcttcctagaacctaaggactgcatcgataatgttaacccccgagacactatcctgttccctcaccatcagccattcagagaattgttcaccacgaattgatcacataccctcctccttcacctggcctttaaaactgttttgctgaaacctttccaggagtttagggttttggagcataagccactgtccttgtattggcaaccttcacaatgtaagctgcattttccttcatcatgaccgggtgtcagtagattggctttaccacatgcaggagagcagacctgagtttggatcagtgacactttaatttgagctccatgattaacatgattcacagtggaagacacttacagagtccaagaggttgggtcaccatgagcttgctcatggtcacaggttagtaaatgggcaacagaatggatttggtatctcaggctagatggacacatcaagctgtcttgattaatgccatatccactagctcccaagatgaagcctggtccatactaagtgctcacttcatgttttcctggactgaactatattaaaatatgcatatatatatatatacacacacacatatatataaatatgtatataaagatacatatatatatatatatatatttttttttttttttaaactaggaaaacagaaaacctttgagatgagcagaatggagaggatttcatggctgctgccttagagtctttaatcgactattattgattcagcacctataaagaccatttcctgtgctaagcattaaggatacaatgcaaaggtaaatacggcccctgcttgcattaagtcttacagttaataaacaaataataaacaaaagttccataaataaccacagctgtgacaaggactccagaaagggctgagatggtggcaggaggcacaaggagggggcccgtatcacagacgagtgcgggaatgccttcgagagactggagggataggtcaagagtaatcgagtcacaaaagttggagaagtgttccaggtggaaaaaaaccaacattaagaagactttagcctgtatgagactttacttctaacatcaactgagaaaaagttcacctggctgtgagagaaagcaggggcaaagagatgctgaggaagtgggagggcggcagggttgattacagagagtccttggacactgcgtgggaaggtgtcatgttctaagagcaacaggcagtcatcagaatgtttcacacaagggagcaacatgaccagattgtcctcccaaaggcgtgacgaccgtcacttacgatgacaaacattctgaatgccatttcagaccattccctgcaagttcctcctctttatgttctgtgcgagaggtaactgtgaaggtaggttgagggtaccagagaggaattgacagggacagaggaaagggggaa

SEQ ID NO: 45503 - DNA, 1226 bp, Bovine  19866880529845
  misc_feature (1)..(1): n is a, c, g, or t
nccaaataccactaactggtgaatggcagagtgaattgtgatatatacatgctgtgaacggcttctcagccataacaaagtatgaagtactgatacactgtacaatatggatgaacctcaaaaattttattctgagggaagaaagtcagacacaaaagggtcacatcttgcatgattccatgtatatgaaatattcagaataggtaattcatagggacagaatgtagagtggtagtgcacaggttatggaagcaggggagggaagaatggagagagactctttaatggatgtggggttttatcttggagtgacaaaaatgcggtggagctggagacaggtggcagttgcacagcgtggtgaatgtgctagatgccactaaattgttcattttcaaaaggttaactttatactatgtgtatttcacctcacttaattatatttttaattgtggcttttgaagaatatgtactgatataggaaaattcacatcatgtacgtattgttaaaagctggacttacagtataatctcaattttgtaaacttaaaaatgtgtgagcatgtgcatatgcatatgtttgtatatatatatatatatgcacacatatatatttaccatatatgcaaatatttttatatgtatatacaccatcctcccaccaaaaaaacctaagaggaaattcagaaaggattagtgaattctaggttatttcacttttacactgtttttcatattccataaaatgagtccatgccaattttataatttgagagaaatacatgttattgaataagaattgagttttaaagtatctctaaggttttctccagcctacaattctaggagtccaaatgcattacatctaagtgattgcccattagatgttgggtcagagcagataagccttttgggtaggtacctaggaaatggtgatttaaggcaggcaggcaatagaggagcacagagacatttaatatgcaaacagttgtatcggcaatctgcatgcagaacttcagtccttgtcacattgttcataagtgggactgctagaaggacatacacatccgtcatccagctccataacccattctctttgatggctccttcaagaattatggtaacattcatggctctcatgtggactctttccataatatgtgcatctgaaaataaaatagatgtccctatcctgcacagctaccctagctgaatcccactcgtaaaag

SEQ ID NO: 45504 - DNA, 719 bp, Bovine  19866880557884
  misc_feature (1)..(1): n is a, c, g, or t
ntggtactagatataggtctcactctctatgtatatatatttatgtatgtatacacacaaatatatatatatatatatacagcaactacttcattttctgtattatatttatttataatgccccaccctacatcccataaacacagtaaatggtaagattcttccgaataggacttgttcttttctgcatttatttccccatcacattgtgttaaacatagctgttagatgaatggataaaagaccaaatatatattagtaataatactgagtgtgactaatgactaatctgattactttagtgaatctaggtaataaaatagtttttgtataaaagtgcaatcagttgaggcaactttcttctttaaggatgatgggtgttatttttcaattatcaccaattaatatgcatggcctgttcacaggatgactggtgctgatcctagggggggctctatggactattactgaggtgagcctcgctctccagtgctctgagagaagtaatttgtcttgatattcttggtgtcagtatgcaaattagtatatccctaggagcataaagaaaccagctagttaaagtaaagaccactaaggtgggttcagaacagggtacgtctttctttaaaaaagtcattacgcagagtcaaactaatggtggaatgtcttaggggagaaagtattctaatccccaaacaaaaggcttttcaaacagttca

SEQ ID NO: 45505 - DNA, 2677 bp, Bovine  19866880572078
  misc_feature (1)..(1): n is a, c, g, or t
ntgaaagttcttgggggcagtctctgattttgcagatgaagaagctaacatttgctgggaccataacttgggttgccttatacctcagcctgtgctttccattgatttttttttatgaggttgggtcagtttttcacatgtcagatgtgttgcaaattgggtgaaactcagctaaaaaacagtgaattcttcagtgtcaggtctgatgttctgtggaactgatgaatccaaagctatctgtagcactattttaactcattctgtttttgttctacatagaaaaagggctgtaaacacagcaaaaagcactgtgtgcccacacacggtgttgtacactggataccatcaacaaattaacatgcatcgccttgaataaagtctcccataactccctctattctgcgtgtgctacagactcctggtggagcgcgctcaactcaatcacactgggtcaggggcccttctgcgacattgttttgccaccttcatggtgttctatgggtggataggagaattatatgtagatttgtgctgtcattggcagacctctatttaaatggcattttcaatgaggtttgaggtggtaagagagggagatgcagtgatacattttgaagtttttagtgagatcccaaaaagaaatatatccagccacatacagtacataaaactacagtctgtttcccctctaattggtaataaatgtaaatgtttagttatgcctgactagggagctatgaacaacacatctgtctgactgcttttgctgtcttcacaaggactgcagcatttataccatctgtagcttgcgaaggaaggaagagacagagagaaagtgaggctgaaatacagagaatggatattactagaggtgcatagggaattgactcgttcaacaaatatttattgaacatctattatggcctgggaaccaggcaagaaaaagagggagataataaatatcttcccttccaaaattctaaataaattgatggagtgaagatcaggaaaatgaagatataaatgcttaatttgttactgaaaacaaattctcaagtatccattattgggttggggtaagaatgggtttcctaatggtaaactctaggattagacaagtccatctgccctgatgcagacagcactggaggacagcaagcttacccacaagggcagagccctgactgtttatctcaaggcctctccaggagcagagcaggtcagcagggcaggggaggagaggacggctaggagtggctacaggccagtcttcctcttctactcagatgagtgagagagtaacagggaaagaccagaacatacacacaaacactctgactctctgacccacctgtaggttaggatcacctgggagctttagcaaaacatagattcagtcccccaaaccagagcttctgattctatcagacattgattgtgcataggtgtgaattttttaaactcccctcataattctatgtgcatcaggggttgagcatcacctaatagggagtgaggggaaaagagcccccattctgcacagcctgcctgcaagcttagttgtgtctgactttttgggagtccatggaccatagcctgccaggcttctctgtccatggggttttccaggcaaaaatactggagtgggttgctattttcttctccaggggattttcctgacccagggattgaacccatgtctcctgtgtctcctgcattgcaggcagattctttaccatctgagccatcggggaagtccagatgttataaagatacatgagggacagtccctctcttccagaatctctcactctcctgagactaagtcacaaaagcaaccacagtgccctttgctgagtgcactggcactcagagggtagaaagacaaaagacccaggatttcagagaccttcccaggaccatgggggcccaggttcagaaggtcaccctggcagttgtggaagaggcaataagaggaaggctgatgacccaagaggttactatagattgagagagaataaagtaaaaaggaagccaggcagctagggacacagactgctcattaatgagcatccttccagtttcagacttggaataacaaaccttcctttttcaagcaggctgtctgtggtctgccttggccacactgggtgctggggttctgcactgaggagctcaagttccctggggttatactgaggattagaggagaggatgtctatcagggccacagcctagagcctggcaaagaggatgtctttattaaattttgctgctgctaagttgcttcagtcatgtttgactctgtgtgaccccatagacggcagcccactaggctccgccatccctgggattctccaggcaagaacactggagtgggttgccatttccttctccagtgcatgaaagtgaaaagtgaaagtgaagtcgctcagtcgtatccgactcctagcgaccccatggactgcagcctaccaggctcctccatccatgggattttccaggcaagagtactggagtggggtgccattgccttctccttattagatgttagatgctcctgtttgtttggggaagccacagaaactacagcaacaaagccttagcctggctagtttgctgtgagctctgattcacctgcgtgaaagggagatttacaggattatcacaaactaac

SEQ ID NO: 45506 - DNA, 1960 bp, Bovine  19866880617521
  misc_feature (1)..(1): n is a, c, g, or t
nttacatagtcatttaacaaatgctttttttgtttgttttttagccttgcctgtactcccacttctgaaagtatcactgcttactattcctgggcttttctaggcttcaggggtatagacctgcttgcttctgaacttttcctcatggcaagctctgtttttgccctcctctgacatgctaagtttattaccacttgttcatctattccctctagagctaaagttttgtggccttcttccccactttatttttcttgactcttatgaccaaatgctgcctttaaaaaatcatcttatttgtgggttttcaggaagatgcagaaatatgcaagtgtgtttgtctgccactcttcacaattatacttctcaatgcatttctcatgattctggttctgcctttttgggctataaataatgagggctgccatccagataattaataaatgggttaccttagtctatgaagctgctgctgcaagtcattggtgagggatttgagctatgagtcttgagagggaatttttctgatcagccgacaggctctcggtgtgtgatcagcagttcacacgtgtaaactggttagcaaggctcaggggaacagtctgttttcccatgatggtgattcatgtctctgtgaccttggacaattaaaacatctgacgtcagttctttccctggtgaagcaaacacacctctgcttccatattttgtgttaggcttagaaattgtaaactgtaattgaaactgaaagtgttagttgtgtccgattctttgtgacccatggattgcaggctgccagggtgctctgcctgtgaaattctccaggcaagaatactggagtgggttgccatgcccttctccaggggatcttccctacccagaaatcaaacccagacctcctgcattccaggcagattctttacccactgagctaccaggtaaagctctgtataattgataggaaacattatattttcattgctcccctttcttggctcccaaacttatcaatctatacacatttatttattttacaatagaaaccacactagagtgaaatgcctgttttctgtccttctcctatgttagactgagcagcttctgggcaggcatatcggtcatgatttacttagcctggtatcatcaagtcctagccctgggcatggtatataatagttgttcactaaaatgttgactgaatacagaggagacaaagctatctgacaccaggattgaacccataaccttgacctccttagttggaacttctaaccatctgctgctaagtcgcttcagttgtgtccgactttgtgcgaccccagagatagcagcccaccaggctcccccatccatgggattctccaggcaagaacactggagtgggttgtcatttccttctcaaatgcatggaagtgaaaagtgaaagtgaagtcgctcagtcgtgtccaactcccagcgaccccatggacttcagcctaccaggcccctccatccatgggatttgccaggcaagagtactggagtgggatgccattgccttctccgtctaaccatctacatacagccttatgagaacccacttccatgacagagaagatccattcttcgctggctctgagcagtggtaagctgcttcgcactgcctgccttgaatacctggggggaagacctgaaaaatgatcttcctgctaagcctgactccacatcctattacccatcccttgagccatatgtttagcaacttatatttaataaatacagcagcagaatccgattagagtgagcccagtgatagttaaactcgattgccagggaaatcaagttagaatcctgaattgtttttatgtattgcaatgggcaactggaatgcctgttccatatggcgcggactctgtctgcgaattgcacagcccattccctgtcagatggtcccatttggggtcagtgacgatggcaggaa

SEQ ID NO: 45507 - DNA, 780 bp, Bovine  19866880682690
  misc_feature (1)..(1): n is a, c, g, or t
naacgcataagcttatttaagaaaaggaaaaagaaacctagaagctgagagaactaaataactcctgggaactagccttaggaatgtcttttcaatttgattgtggaaatacgtttctgtcagggttttggccttggatttccagctttgtgtgaatccagatcaagaaaacccctttgagatgcctaaggggaggagaaagcccttcgtggaaagacagtgggttatgtgactttgtaagcagcggggctctgggcaccaacagccttctcaatgcctggtttccatactgtctttatgtaaaatttcccagtgtttaactttcaccagggtagttgaggatgtattgagtatcgatgttgcagctcagcattttaatacttcaattaaatatcaaggaatcacagaaacacttcgaggagactttccagcacgagaccagagacaggagctttaaactgctgctccctgttccagctctgaggccatgctgctgctgcttttggtgtagcagggagcaaacacacatcagcaaaacatggctgcttcctggtgcctcacagaaaaggaggagaaggaggagcctgtttcctggaagacttggtgagtttttgaccatggatcgtgcaacaaagcacctggcttctgaaccagagaacggggttctttcaacagctccccatggcctggcctgccccattgctttccctgctattttaggactgaggtgggtggcttctggtagacaacgagaagattgttagtggacatacttggggg

SEQ ID NO: 45508 - DNA, 1111 bp, Bovine  19866880689272
  misc_feature (1)..(1): n is a, c, g, or t
ntgccatatcttgtcctccaacatgccaaaagggtctcctagacactgatttctttcacggtgcagttttaaaaagcctctttcctgaagtggcatgtcattttcctgtattagcgatgagtaaaatgaagtagaagtaattacatatctgtagaaagtaggaccaaaggcaattccttgtgtttctacctggggaaaaatggactttgaatatgcacccggtgagaaaatgatatgctgtgctttgagatcttataaagccacctgttcaactgaaaatccagtgtcatccatgctttaaaaattgaatttagagtaagcttcccacacggtgtgtttgctcacttggtcctcttgcaagcatttatggaacatctactttgtggaaagcattattctgggcaccatagcaggctgccaaaaagaaaacaggattctactggtttccaggggttcagctgtccggtttgagtgacagcacactcacgggaaaaacacattagaatgtagcatcccaggctctggggagaagaaggtatttagcacactctcagtgagtgatggatagatttggtccatgaatgccgtatcagaataaattctcaggatgtcagtcccatgctccccaagggcaaaatgactcttgccccaaattttctcatgtcttctggggggctatatccaggtcattcacatgggattgaaataggattgcacaggtggtctgtgaatagaaaatgtaaaaaaaaaaaaaaaaagtgcaaaaaaggcagggaaaaagccaggaaggccagggggagaaagccagttcagttttgttttcagatgagatttagtagacagatcttgagtcagtcaggcagagaaaaagaggattaatttttgctttgagaaataattaattttattcatgaatgaattgctacttagaggcgcgtagatgtagaaaggaatgaggtaggcttcatctagaaaccgtcgcgacacagatgtagacagggacactggctggccacgtggtcttttcatttttttttttttttccctcaagagaaaagctttttctgggtcagggattcttccgtttttcttcctgctattcagcttctgg

SEQ ID NO: 45509 - DNA, 1608 bp, Bovine  19866880706238
  misc_feature (1)..(1): n is a, c, g, or t
ntgcatcattaataaaaacagccaccaggatttatgtagggtcattcttccaaggatctcaaacttggaggaatgcatcaatcagtgttatttattgagcattttcagataggagaagtggggagttaaaaacacccatgtatttagtatgtacattcccttaattcaaaaattgtgcaggtgaattatagaatgaaacgtgggagagcctatgcagctaagtgaaagcagaagctgaacttagcatgctttcggcagtcaggctgctttggttcaaatcccatccctgtcctttacaattgtgaagggcgggatatgtcatttcatctgttttagcctcagtctgcacatctgtaaaagaggggtgataactttgtgtacatcataggatgttgtgatggtcaaataaggtaaatcctataaagggtagagtaagcgcacagcacatatcgcattagatgtgcattgtcgtttagttgctaagtcgtgtcctactctttgcaactccatggaccatagccccctaggctcctctgtccatgagatttttcaggcaagaatactggaatgggttaccatttcctcctccagggtatcttcctaacccagggattgaacctatgtcttctgtatgttctacattgcagatggattgtttacctgctgagccatcagggaggcccaagctcacagcacatatagatagtctccgtgtttagaggaaagaaaggaaagggaagcaaaggaaaggtaaaaggaatattcatactactcacagcaaacttcatcctcgaaacagagaaatttatcatctggggcccttacatcagggtcactggctaatataatagaaaggtcttcaatgacagttttgtggcagacatagataagtcattcaaacagatatttcttagataaatcctctaaaaaggcagagaatataatattataacatcacctatcaccaaaatgcccgtgtctgactaggttacatggcccaggtacattgtttctgatgatataaattattagaatgatagagcttgaagcatcagagagaatggctagttaacattcccattagaccatctctttcaaagatgtgcgtctctttcaagagtgcacatcctaagtgcacttctagcgagtaccagattgcaggcaattcctagttgaattccgtgatggaaaaccagaatatagttctaccataatatttttagataccgacatgagggaggcagagtgtctcctccagttccattagaagtagaagacatatgtgaatagacagaaaggtgggaaagtggtacctaagaagtggtagcaccatgagcctaggcccatgttcctagacacaatgacaagtcagcctgatgttcacatcccagacccatcctcctgccctccattcttttctttttaaaacaccagctctgggacttccctggtggttcagtggctaaggctccatgcttccaatgcaggaggcctgggttcgtttcctggttggggaactaaatagatctcacatgccacgaccagaagatcctgcatcgtgcaatgaagatcaaaggtcccatatgctgcagctaagaccggcacagc

SEQ ID NO: 45510 - DNA, 461 bp, Bovine  19866880723062
  misc_feature (1)..(1): n is a, c, g, or t
nccctccacaattcagaggctggctcctttcataatttttgttgacttcagtagccattaaaacgatctttccaattctcaaaccattcactgccttgacttctctcctcaaacgatcctgtcccccactctcactcccatgatcgtagcctagattgccaatatctgcaacctctccttggtcacagcttcaagaatccctatatctgaccaacacttcctgccctcccagttcattcttcctatacccacagaatattttctatccatctgagccttaaaatgcattcatctaaccaccattttattgaccctcacccacctcatgtaccctctttcctctttactcaaattaaattctgtgatccattattgtaatcaccctttcaaggaacctcaactctcttgccctccattgcttcatcatacttgtctgaaacactccaacacggttaaactca

SEQ ID NO: 45511 - DNA, 1100 bp, Bovine  19866880762677
  misc_feature (1)..(1): n is a, c, g, or t
nttacagttatttaaatcataggaagtattgagcttttcaaatatacatgaaatcccatcactcctctgcttgttttctactgtgctttgacttatattaaaagtcttatcccagccatgtgagccggctccagcctacctctgaacgtcatcttgcaccagcatctttcttgctcacctctctggagtcacagcagtcctggctttcaccatggttcctgcctcagcaccttagcacttaccattccctcctcctgaacaccctttccctcagatctacacacagctggcttctaaggattcagaccccagtctaaaccccaagtgccctcccctgcccctctcgcctcagaagtctgcacctatgaccctgttttccccttacatcataacctggagtgactctgctgacttttacaagtttattatgttcattcccccactataatgtgacctctggaaagcagtggccctggttgcctttcgctgaggttccctcagtgggagcctgccttagggaagatgccatgtggctctttgctgcagaaggaagcgcctgcccaggctttagggctggtttagggctgtgcccacatcagaaagttgctttccgactaccttcagtcaggcccggctgacgtggagctggcgaagacccaggcctccgcctggtgtctctgcctgcctgtctctgcctgcctcccccaggacctctcaggcccttaccttgatggcccccgtggctatctggatgtggtgcagccgccgcagggtgctctctctgtcgatgaagtaggaggctgccagctggtgcagggtctccaaggacacagcggagctgttcccactgcccccgatcacagaggcacttcctgccgtctccgacttccggctcagtttccgcttgtccacaaagatggtcagggactcttctcctacagcaaacaacatgggtgtcctggtgaggcccccagctccccaagcccctacccgtaagaacatgaaaaccctcagactgagccttactgtggcccctgctgacagccttttcccatccctaccatgctcggagcactctcatcaaactgcaccacagcaga

SEQ ID NO: 45512 - DNA, 993 bp, Bovine  19866880892084
  misc_feature (1)..(1): n is a, c, g, or t
ncagatgatgacgataatgaaatttcactgtgctggaaacaggggaaatgaggtcagttagctggcatttggtgatgcttttgttaaggcagaacatttattattctctctctctgcatattaaaaaaaatctatgtactttgctaaaaaaaaaaaagccttaggcaactaaatatcattcattaaaacatttaagacaagtgacagcttctagtaatacatttccagaacagaacaagcaggataaagatagcttagaaactgcatacatagagaatttttccacagataccctaatcccctgctggccaatttttaaaagtgggcttttattgtaccataaaaatgaacgggctgaggctttcacatccggagaaaggttggtacctgcacgaaaaatgttttgcctttcagagtccaggatgagacaaaatccttgttactcctgggtgaggaaaactaaccactgtgatagaattgggtattgaaatgccatttgtgagtagcatataaactataactgagcaagataattccatttctaagatgattactgatgccaggttgatcccagggtcctttcccagtgttaccactaatatgaccttgtcttttcaaaaccaaagacccagctttggagaactgtttgacagtagctttgaaagctaagcactttgtatccagaaattccagtcatcagtgtatacctaactaatatgcatttgtatatgagtcaaaaaacattcacaagaatactcatgacacccctattcaaaactgccccagactggaaactacccaaatggccatcgtgagtaggatggataaatacattgtgttatagttacacaatggagtactgttttgcagtgatagtgagtgaactagagctactctcaataacacaaacaaattttcacaaaaacatattgtagagtaaaagaagccacacaaaaagtttgaaccctatgattctgttatataaaatttcaa

SEQ ID NO: 45513 - DNA, 1403 bp, Bovine  19866880926721
  misc_feature (1)..(1): n is a, c, g, or t
ncccacaaaactccttcagatactcgaacttctatcattacttctagtccactcctctttttttcactactgagctgcaaaagatactgtggtcctgcttctgcagcttgcatgcacaggtgcatgtgactttgttatccaaaatttccttcacttctccctgtgcagatccacctcaccttgcggtgcaggccagccatgcagtccatttctttagtgctgctataaaccaccattcttattttgccaaggagagaattaacagacagccaccagtaagtttctagatccaaggaaaaaaatgtgaaaatgtccaggaagctttccatccgtttgactaccctaccaactaaagttcactttgtagggacatggcttcctgatggctgtatgtaggttagaaccacaaatggaatggtatttcacatccctttcatgttctttccttatgagacgtgaaacattaagaagtggatgagtaaacccccactctccagtctgtggaaaaacaatttcaaaaactgcctggtcctttgaaaagttggtttatagttcctggagtagagctcggtagatctcattaagcccaacctatagtcttgatggtgtttacttttgcattagaaatgtactaataatacaaaaactgggggctggctgggaatgctgacattgtggatatgctgttcattgaaatgtacaattgctgggttatttggtggatgtaaattttgtgttggaagtcatgctgatgtgcaagtaagtacacagtctgttcatcatccagtgtaagaacgagtgtagggaattatatgtttctaaagagcctatttgggggctctacatgcagtgcttactgtgcatgagaagggacatgtgtggtacatgaaaaaaggaagattggatgagcagatattcaacgttccacttcattttttgcagaatcccaaaggcagggcctgaagccatgatgtgcctgctcagatccaatgtgtacagcaaaagcccacatgttaaagaatgggttttctgcacctctgtgcaaagctgcccactgcagcatcctgctggagttgctatggtaaccttctgcaacttggcattgacacacaggagcagacacacacttttatttcaggggcagatgcatttgctaaatgcattgattgtccccagccctcccagtcagtgggggtatgttcagagccagagatatgctggtacctccccttttggctctaaattcccaggggaaataggagtgaatctcagctggggcagtgggccaaagcaggggacaaaaggagaggagtccaagttcacagaagtcaagtgtggttgcttttgaacttaatttttgtagtcctgtatcctgtcactcgtggtcaatagtaaggtctata

SEQ ID NO: 45514 - DNA, 1471 bp, Bovine  19866880999313
  misc_feature (1)..(1): n is a, c, g, or t
nctataatgaatagacatgattaatctgagctataaaaataattataataaaaccataacctcttgtattggcatagagttttcccttagttttgtaaaaaaaaagaaaactgtacacaatttttacacaagctcaacaattttagaaatgcaaggacttcaaaaaagaggaaatggatttatcactacttgactttttatgaactttttagaggttaacaaacgaagagatagaaattgagaaaaaggaccaagtctccattgatcggctgtagagtttggtgagcacccacgtcatggcacaagtggttttctacctttgtctatgacctgtgttcaagttcaaagaccactgtccctctttgtcatgttgacacttcccaggaaattcttttgtcccatttaccactgtggctgggagaaatttccaggcagaaaaactccagtccagaagcatttggttaaataatgtctcggcccctgcaactctaggaggcacagaagcagaaagaagtccagcccaccccacatgctccagtgcccccagtccacccactggaagaattcaagaagcctggcatggaggtaattcagcagcctgctgtgttctcaaacaacggtccgtaaacaatgattggccaatttcattctaatcttcccaattttgctctaattaaaatcaagctgtagctttcaaacagtttaattaaggctgattgggagaaatggggaggggagactcaagtttaaaggaggaggacgggatccctggtgaacctcgcaccgcacagtccgggctcaggggtgtggagagggtgctgagagtggttatgcttgcggaatcaataagatatacagcagacacattgaaatgaaggaccagtggatctaggagactagaaggaactgaaaatggagctaaggcctgtgttttccaaggcacagaaacctcagctctgccctgacctccaaacctgctccccacagctcatctttttaactgaggagaaaatggctttgttcaccactcttcacctcctgttgtggttgtctttgctcagcaagctgacagcccatgccaggcttctccccagcaaacacccacgggcttccaatcatctatttaaccccaagagaaatccccctgactggcagttccttctgttatttgacaagtttattcctgttgcaatgagaaagcccttctggtatttgggtgcatttgctttttatacaggtcactcttctttggattaactatttttagttccttcaatacagcttccagatccctagactgtctagtcaaagctatggtttttccagtaatcatgcatggatgtgagagttggaccataaagaaggctgagtgctgaagaattgatgctttcaaactgtggtgctggagaagactcttgagactcccttggacagcaaggaaatcaaaccagtcaatccaaaaggaaattaa

SEQ ID NO: 45515 - DNA, 2249 bp, Bovine  19866881000742
  misc_feature (1)..(1): n is a, c, g, or t
natgtgagcagtgatgacctagcctccaaatgacagagacatctcggctacagcacacttcacagggaccacagcccacttgtttctaaaaagagaaattcaagacccaacagctatgaaagatggcacagcacagccagagtggggaaggtgtgggcactgggctggacacagacatctggtcaccacgctctttccatgactgccctagagtctgcaggcctcacttttgtcatttataaaatataggctcagattcagtgacctttaaaatacttccagctttaacattctaaaaatttgtcactctgggtacacccagggcccagcaacacccatgtgtacagtgtgtataacgatagcttattagacatggaatgtcctggtccctaccccggaagtacttaaagagaccctgcattttaacagtatctccaggtgattcatatgcacattaaagttttacaattattgttctagaatatttgatcacaggtttatagagaatcatccatcctaagttgagaattataaagcaaaacaaatgccagactagatgacctgtcttctttaaaaagtatcactgtagctcattaataggacccgacactgtgctttaaaacttgtcatcgaattaagccttatcccaggctttgactcgctattttactcagagcaagcgccccgtgcctcagaaggcatcgctgtagtcccagtgcttctcaggcagcgtgtcctcttttgaacatatctccgctgccttgcttaaaggtcttagtgcattcggtaactatttcaacagaacagccttcacacacgtgaaaatacaatattatatgaggtatcaaatagcagttttaggcaaacctccctttccggatgcaactacccgattgtaacaggactaaatctgcaggtggagtggctctgtttaccaacccaggggttcgtgtgtctaacagtaatagatgattcctctctttcttgttaggtagccctgtgctgcagaacattcacgtggaaatggacatatctggcccctgcacttacagaattaaaaatggttatatgagagtgtctaaatgccagcactactgacgtttcggacctgacaattctttgttgcgggggctgtcctgtgcattggaggttgtttagcagcatctctggcctgtatccaccagatgcctgaagcagtcaccgttcagctgtggcagccaggatgtctccagacactgccaaacgttccttgggggaaggggggtacaatcacccctggtggagaaccactggactagaaaacactagtgaggactacccggaaagcataaggaagacgtctatgaggatgtgactgaaaacaaccacaacacacacgctgagcaattatattaatggtgaaataaacaatgaggtattcataacacatgcaagtcaacaggccggggaggacaggaggaagaatcaagtgagatccatgacccagaaaggagaacccaaggggaacaggctacctctacttccagcaaacacctcatattgaagagcagagttcctgatcacaggctgtttctcagccacagacattattaacaaagatggaagtaatgtcagagacaaagaagagttcaaggatgtcagacaagaagggctgtaacagtatactgttacagtatttgaagtatactgttacaatactctgaagtattagttctcagaggcaggtgtgctgcacagagattcataaaatctacagctggaatgggccttagattcacctcctccaatgccatcatcctgcacataacccagagaggcaaatgcactagtccaagttacagctacctcgaggcggagtggggacacttgtctatggaggcgcaggcttggtgttggtctctgttgcccggcacccagagcagggcctggagaatcctgaggaccagggacggttgagtagtcaaagtgaacctggatctctggccgcacagcctgatactcttcctgccatgcccctctacctgctgggacttaagaggctttttagagtatggcaagtccgttggtgaaatgctaattaaaatagcattctagtgtactggaaaacataaaatgtgcatctgtgggtcttccaatagaaaatgagaggaatagggttgagagaggttaagatacctcacccaggggagagtgagttgtatgccttccagggtatagggcagggaatagaggctagaaataaaaagaag

SEQ ID NO: 45516 - DNA, 1086 bp, Bovine  19866881018351
  misc_feature (1)..(1): n is a, c, g, or t
nctaaccactcttgcttgtctgatgttgaaaaaccaccatgttgaaaaacatatcagtagctaaattatatccagcacatcaaaaaccaaagctgggccaaggcgaggctgtcaagtggagccatagggtctccctaggtcctgtctcccagagtcccagctgttttcccctttctgcttcccaggtctttctcctgttatgtctggagactgatctggcttgtctcatcatctcccagtgcactcccaccctttgaccctgcattttggatcatgaactaaggtcaacatctttctggtactctagggcacacctgaatatcccatagtgttgaccttatttctgtgtaagcctgggcaaggcagcttctctttcttccagtgataacatactctgactctaattccaaccagctatcttacagcattggtcacaagggagaccaggagagtatgtttctgattctgcgtaaaaccatcctggctgctagaaaaacaaagcacaacacatgctgtatgaagaataagcccatcacatcacgctcctgtgtgagggcaggccaattcatttttaaaaatcgagacactttatggggaagcaaatctcgcagatttctcttgttctttgccctcaactaattcttcgaaatggaaagacagcaccgtgggagaaatatgtcctggtgttactaacacagagagatcctgggaaacaagaggaagttttgttaccattgaggtgatgtccattcagagctgtcatgtctgacactgcttcctgtctctttgccttaataatgagtttccagaaatcaagtgatgaaggctccctgagtaatgcaactggagaggaattcatctgtgatgctgcaagtgacaacatagactgcttttcacgttgcttaaagcatgcgatatgccattcttgtagtacaacacctcacaaaacctgtccatagaaatgacgctggaggagcctatcagctctagaataccaaatcttcctccaataaactacccttgcagatggggcaactaattaggtcccatgtgctgaatgcagaggaactttaaaataatcttttt

SEQ ID NO: 45517 - DNA, 1115 bp, Bovine  19866881026842
  misc_feature (1)..(1): n is a, c, g, or t
ntttggtttatgttcaaggtcaaccttggaactgacagattgggatttcagaattttcctgctccagaaaatctctctgctaggggagcactcttatcatgagaccaaagtttcttataccaccataaaccaaaaaggcttaaaacataactgctggttgggctaacacattagctaaaatccaatctcattcaagtaccatcagttaataaaaaagcattaattggggcttccctggtggctcagtggtaaagaatccacctgccaatgcaggatactcgggtttgatccctgtccaggaagatcccacatgccacagagcagctaagcccatgcgctacaactgctgaagcctgtgctcgagagccagggagctgcaactgcaaaagcccacgtgctgcatcaactgaagcccgcatgccctagagcccgtgctctgcaacacaagaagccaccacaatgagaagcccgtgcacctcaactagagagtagccccatttgccgcaattagagaaaagccctcagagcagtgaagccccagtatggccaaaataaataaataaaaatcattaattgcgtcagatcctttacagtttttgtggtgggatggaagcaaagtcatggaggaatctctggttgctgaggaggggaagaaagagggaaagcacagaaagaaaaggctgtggatccagataaatttagaacacttggtcattttgctgagccaacagggctccctcttcaactggactgggacaaatagctgtgtctcaaggtggctttgtcatgctaatgaacccagacagctctgcttcccaagatttagaggaggttttgtgagtttgttagaaccaatctgagcttccttagaaagcttttcattaatcaggatatcactgaacagaaccagtacttgggagccacccgattaaaggcagaggagaaggtgcagcctgggtggcgtccaagtggatctacaacatgaagcatcgcctcagtgctggacattgtgccagcttccttacaaaagtgatttctagcactcttacgagaaaagcattatctggacaacgcagatgaggcagccaatgtttatgggcttgaataaaactggg

SEQ ID NO: 45518 - DNA, 2357 bp, Bovine  19866881175776
  misc_feature (1)..(1): n is a, c, g, or t
nggctctgcacccagtacatatacatctttgatggagaacagctccctgcacagagcaggtgctcagagacaaggaagtggggggtatgaaggatggaattggcccagcatcctcccagcttgcccctgctctgggtccctttacaagagcacagctgccagactgggaagcaagatgaagcttatatcctccctagagctggaagctcccagctctgcctggaaacactgcataacaatgtgtctcaattaatcacctcttccactccttcatgccaactttgtgtacagcattcctgtctctcttctctgccccattccctttcctctctgtgaggactgcatcattccatccttaagagaagggaaggctgaaaactgatagtgttgatgggcaagaaaatgatcaatataaaggcaccagcaggcttgcccacctgctcctgcctccattcacctacgcaggtccaccagttttcacatccatggcatggcatggagcttagttcactccagcccagtctttgtatgtcatagcatcacacagcttatacatcgtcaaagcccatgaagtgaaagtgaaagtcactcagtcgtgtctgactctttgcgaccccatggactagaaccaataaaataggaaaccatctttggtgaagcaagagttcattgccatagtttcaaaggggatgtatttttattgtttctctgccattcctggcataacttacttcttttatcattttggacttaggtaggtatcttctaaaatttcctattacagtcaatgtaatttgactctaaacaaaggtaggcatcttctagaatttcctattgtagtaaatgcagtctatttcctattggagtcaatattttaccattgagcagttaattagttctcaaattgtttgaggatatcgctcatcaactagagtgcaagactattaagaaagaaagaaccatgctacacagttcatgacattttccttggatagttgcacacagtaggtgctgcataaatacctctagattagctctgcataaatacctctaattagctccttagctctgtcaaaagaaaattcataacatagactagacagtagttaaagctagggaggaatcactctcgaccctctgttttactcacaatatgtttccacctctatcttcattgtgtcttatcctgtggccccactttctgaaattacaagctcaacagggcagacgtaccacgcagccggtcgaatccagtttgcgatctgagatgcaacggaagttcttactgcagcccccattgtccttgctgcaatcacggactggtccaaacgagtctaagaggacctccaggctgtcgaaggaggacgaggtcatcagctcctctctgtgggaagaagtggcaggaggtgggaggaggtcaggggacgccaggtgcaacaggtagcttcacatcccactttcctgtctggccgaccagatcacgtctcactctctcttacaaatactaaagatcaaccagtcttggagccttgaactaacaaattatagacgttctccatctctgggaaataagccaaggcagtaacacctggtcaaagaaggaggtctaaactcaggcaaagaaattaacattttattgcctgtcagtcctgaggggccgtaggaagtgcttacaaactctcattttatgtcctctctcggtgcatcagccttgcggtgtgcaatattgacccagatagagtagaccttggcactgcatctggggaagcggaaggcagcctgccagcttctccttccagcttgattcctctcccagcgctcgggaccttcgggtagtttctcacccagcctcccaaactcagtgcgtgcctcgggccccgaggctggactcaccggacctccacagcatcttccatcactgtcatgtctgtcttacactttgctgatgggttgatggccagttcagcaggtggaatcacaaagcttttgctgagcggcagccacatgccctccccaagcgtgtaggtgaatctgcagggacacccaacaccacctggttagggctgggggataaacaccaccggaggacctggcaccctaactccagctgcttccttctcaacccttgtagtcctctccaaaaaggagagcatattcccattttatggatgagataattgagtctgatggaggcagagaggctgacccctgctcacgcatccagaccattggagagctcaacatgttatccactcgccagctgctaaaagtgtctcttcttcaaaccataagacatcgagttccagtttccttcagatttgaagctggcttccatgatcttgctgctgctgctgcta

SEQ ID NO: 45519 - DNA, 844 bp, Bovine  19866881201833
  misc_feature (1)..(1): n is a, c, g, or t
natacatacacacatgcatacatacaagtgtctgtgttcatgacacacacactcattcacaaactcacacaccttgccacactactgcaacacttcctttgggagcccgagcgagggctggtcagatggctggtaggattcacagttgttctctgccacctctcttaaccccctggcagcttctgtgggcactgaaagcagacctgggagaggagcccctgatagcagagtctcctgcagacacatctgggccttcagtcgttcacataaattaccccaaaaggctcagattttgtgggtgggctctggagtcagatcccccttcaagtccaaggtctggacttgagctccttgccagaggtgtgaaactgaccagatatttacccttttcagccctcactttctttcgctgtgaaattgtgataatagtaactgcctgttacttctagggctgtagaagaataaatgaataaacacagtttcaggacaatgactgacatacagttgtcactttctaaatgtaagtttccttccttatttgtctctggactgtatctacagactcagttgatttttcactctgggctaatgcagccagggtctaaagttcaatcctcctgaaagcttgttagtctctcctactcctgccttgtgggcaaagcctgcaccggatatcgctggacacccatctttgctcacaaatgcacaggacaggagcttagtgacggatctgcgcaaatccatctctgcacaagaaaaacggctcaacacttacttgctgtggagtgtgacctcccggtaagagaagggcacaaacctgggagcccctcctcctccacagatg

SEQ ID NO: 45520 - DNA, 1695 bp, Bovine  19866881217147
  misc_feature (1)..(1): n is a, c, g, or t
ngatcttcccgacccagggattgaactcggtcttccacattgtaggcagacgctttactgtctgagccaccagggaagcccctgctttgtccatcctcagactcctcagcaaggcagagagcccccaccaacttataaatccttccatatcgccaacttgattgtgacatgtctgaaagcataattctacttctatgtctgaatgtacatttatatgaggtattttgctttaaggtatactctaacatgtatacatacaactctactacatatggcaaagttgaagccaagcaggagacacagggaagagaagatagcatgtttgctaatcggtgtcctgtttatatttcttttgtcaagttttaagcacatttttgttttcatcaatgtttatcttcacgaaacccagcaataccactcaggaaaggctaatgtgagtgtatttcaccttaatttgtaaacaccacatgcctgtattatagcaagagcaatctttatcaatgtcttccttaagtgacaattgtaatcaatctatgggagtctaacaaaaactagcaaaccattatctttcactctgtgaataggaccttatcacttctaccaattgttagagtctagtctgtttgggatctgcaggcaaaatgaggagaatgtactaatcagggtcactagactgtggcctccaggccaaatgtggcccactgcctgtttttataaataaagctctattggaacacagccacatacactattcatacagtgtgtatggctgctttggcactatgatggcaagagttggatagttgcaacaaagcttaaatggccttcaaagctgaacatgtttaccatttggccctttacagatccttggcctaattttctgcctttagccatgctaggggtctctctgtgggcataagctggctctatctactacgcataaatctagccttctccaaccaagccccatgggtgtgagtttgtggtcataaatatgggcaaacttcaggtctgtgagagaatcccaaagctttagggaggggcagaaggtgagggaagacagcaagatctggaggaaagataacatcattaggaataagaatctgagtttttccgccagtgctgacctgaatatcccccaccattatgtatatgccttcttttggctgttgagaatgtaataacaatctttgtatctgtggatacatgggcagaaaaggaattcccataatgacatcatttggtttgatgaaaaaaataaatgagggaagttcttccagggaagtttggagttgagattatcatgctaaactacaggatagctgctaggaaaccctgtaaacaacaaaactgaagttgacttaacaatgccctggatgtatatgaccacgtcccagctttgtcacgggcacctcctgtggccctgatggccctaattgcctcagtcttctccctgagccaaactcctcgaggactcctctaagaggttgctatgatcccacctgctttcctggctccccaaggcagagggcccctgggtaacacactgcacacagaaattgttacagctagcttacatggcatcgcaagagtttatctaggtgatatttactaggcatctcccaggggccaggcacataggaagtgcttaataagaatcatctcatttaatcatcataccagccctaagaggta

SEQ ID NO: 45521 - DNA, 922 bp, Bovine  19866881219845
  misc_feature (1)..(1): n is a, c, g, or t
naacaccacctccccctccgtggagtcacttttgtattctttttaaccgatttcttaaaatggcgctgtttcgtgatttccccacgttggttcttactcttttgtatgctgcctccactgagctctccagacacggactgcccctcaagctggctcccttgggaaacaaggcgacagccccccccccacccccggcccccgcccacagaggaccgctcagggcaggcaggcagccgtgtttcccacccgctcccttagctcctctgcttcctcgacctccccagtttcagggcctggctgcctccatgttctgctcatggtccagtcagagcgcctcttccaacagcatctgttctgtccaagaaagcagctctgtcaagttagagaccatgtatagggaaatgtttttcttttttttaagaaaaaagaaaaaaacaacaaaaatatttattttgtgattgtttttcttgtcaatcagctccagcaacatgaacatatgaggtaaaactgatgtggtttaatacatatattttttaaaaagacctttttttaggggaaaaatgagagtgaaaagaagaaaaggatagtttcctgggctgcttggatttttaaaaattgctctgtgtgtgacatgtgggtgtcccatggatggaggatattgctgtgtaggaggctgggtgattagtgaacacacaagtgaagacatgtctggcttgactgtgtgtgtgcaagagagacaggttgagatggacattcgataaagaatggagtgaggcagaactcttccagagaattatcggctcatcccacaccttttatcccaggtgtgagggctgacacaggtcctagaaccaagacctcctactatccagagaagagtagaaagctcctactctctaggaaaactgcagctatggtctag

SEQ ID NO: 45522 - DNA, 2353 bp, Bovine  19866881247792
  misc_feature (1)..(1): n is a, c, g, or t
nttgaaatgatgtgtgattaccccagttccatttttctttcaccttgaacgctgatcgcagcagacttgtccctgtgctgctgagtgaagcttgctctaagtacttactgcacctcagtgaatgaatgaataaataaatgggtgagtgatggatggtgacaatgggaggggtcgacgcctcttggtgggaggagctcacctgttttcactgtccatttgctgtcctccttcccagggtggcatgatcgcactgctgctgtctatcttatgcctggtgatgatcctgtacactcgccggcgctggtgcaagcgccgccgggtcccccaaccccagaagagtgccagcgccgaggcggccaacgagattcactacattccttccgtgctcattggcgggcacgggcgggagagtctgcgcaacgcccgtgtgcagggccacaactctagcggcaccctgagcatccgggagacgcctatcctggacggctacgagtacgacatcaccgacctgcgccaccacctgcagcgggagtgcatgaacggaggggaggactttgccagccaggtcacccgcacccttgactccctgcagggctgtaacgagaaggcagggatggacctcacgccaggtgggtggactccgttctcatctcgtggctttagggggcgctagggaacagctgttctctaatttcatggttgattgtcatacgtacatattgagatgagccagggccctttcccaagtgggcaagaagaataagctttctcttgctatgatgggagctgtcttctaatatagaaaatcagtacaaggataaattggattcctctccatttccacttggcactgaaaacagagatactttgaaaaaaatttttttaatttattttttaatcgaaagagaattgctttacaatgttgtattggtttcttccatgtaacaaggcgaatcagccataattacacatttattgcctccctcttgagcctccctcccctgcccccagcccatccctccaggtagttaaagagcaccaggctctccctgtgttatagaacaacttctcaccagctatctgtttcacacatggtagtatatatatgacaatgctactttctccattcatcccactctctccttcccctgctgtgtccacaagtttgttctctgtatctgtgtctccattacgtcctgcaaataggctcatcagtaccagtttcctagattccatttatgtgcattaatatatgatgtttgcttttctctttctgacttacttcactctgtgttctaggttcattcacctcactagaactgactcaaatttgttctttttatggctgagtaatattcctttgttcatatgtaccacatcttctttatccactcatctgttgatggacatctaggttgggaagcagaggtactttaatatccaacagaagagtgggttagaagctttttcatatgcaatgagcaatcctcagggaaataagagatagcaagaaagatgtgtatgacatttttgcaggtcgtatgtttgtgtgggcaatttaattttccattgacatggaggggacagaggtatctgttcttttctatgactcctgagactttggcctgggaaagttgttctgccttgcctataacctctgtggtctttacaagagatgtacttcttcaaagaaaattgaggaatgcaagcaaaccgtttgaccttagacactttgtatatctgtgaaacgctgagtatagaagagtcttggacctaatgtggctgagcaagaccaaggtcgataaaatgcagagaggaaaagactgtacttttcatttatagcctctctctctcatacttctataaataacaactatctgttgataaaatcccaaggcaatgatccttcaaggaactgcccaattatctttggagaagacattttttgaaatgaatcttgcttacagtgtatggactttcagtggggcttgaaaagagtgaaattgcatcatggaggtttccattctgcttatctagagaagattccctaagactaggaatgacttaataagatttaaagtcagaaattcctggagagtaaggggacatatctttaatacctcttatttttcatagcacctgccatagtgctaagcccaccgagtagccatatgattagagacttggggaacagcagatagcacgaacatgtgagagagccagctgtcagacgatagggaatggtccagactgggatgacagagagggggcaagttctgtctgaatgcactgaaattcaaatttttgtcaaacctgttcttaccaaaggaaagaaatctgcagtctctctctc

SEQ ID NO: 45523 - DNA, 1588 bp, Bovine  19866881251815
  misc_feature (1)..(1): n is a, c, g, or t
nggtgtgcttcaccttagggtgtgagcaccttaaaagacaatgatttcaatgtcccaagcaatgtcaaatcttcactccagtctaacctcactctacgtctcccctttctcttgaccacacagtggacacgttagggatgatgtgattggagactttaggggccaggtccatcttcagactagacctcaggttggtgagaaaggttctcatccaggctggtatagatatgtagattctaagaaagaaaccttggagcttctgcacacaatagagaacgaggaagacaggaccttaggcaaggaaagtcatactacagaataacctgggacgggcaaaggcagagaggaggagagtgagatgaactcactcttacataggccttagtcattgttctaatgttagcctgtgtgctctgagcttgccacactgtctttctgaggggttagcttaggacacccaaaactcactgcagaaatccctggtccttctttaggcatcgcttcacactgagtccctgaactgacctgctaagacgatgcatcacatcagagtatcagaatctgcccaaaggacaacttcatcgaggaccagatgcatgatttcctctttcaaagaatctggcaatttaaagtcaaatgtggattttaacttgggaaattctcaaagatcctttaattcactgaataacttaagagtagcttagagcagacctggcattctgggtcccctttccctctgctggcaaggccgagtttcacgctaaatccagctgagtagtaatgaggtggctcaggtgttgacgtcaagccagaaggaagcattaacttgtccattcttagcctcttgttaagggcacctgatgaactgaccccgcagtctttcaagattgagggtgataccccctgatggccatgactattagaagactttgcttagatcaggatttttaaattcattgttaatcttaaaaaccttgcctccaaaccaaatctaatatggcttcggaaggggctccccagagcagagttagaaaaggactggatcaattggaagacaaataaaatgcacaaccatgaaattccctgccattaggggattggagggggagtgtctatgggttattagttttgcttggttgttttttcaattctattaagtgtggtattgtgaagagcttcatattcttcatgaaagaattacaagcgaaagggaacatctctaaaaatagtatctagccacccattcaacctctgctatctacgctgccattctgagttgttctctgccacagggattgagctcagaactttagtggtgataagctaattatcccaaactaaggataacaagtgggtcttgtccatcagtgactaacattaaggcgaccaaaggtaggcctgtgatagaattacacctttttcttccattctttttttaatcgcccccgcccccgacttcagagtttgaaaggtattaatggtaggtctatgtttcccacatgctctcgttatggtcttcggagggaaactgttaacaatggcagtaactttcaacacctctgtaagaaaataacctgctaaaggtcag

SEQ ID NO: 45524 - DNA, 844 bp, Bovine  19866881259294
  misc_feature (1)..(1): n is a, c, g, or t
ntaaataactggacaagtgtgcaaagatgtgtgtaaaagactgttcatcacagcattgtttaaaagagcgaaaaattggaaatagcttaagtgtccattagtggagaattgcttaactacctgtacatctgtctcccgtccagtgacttaagatgatactgtagatctatatctgttaatatggaaagtagcccaccatctattcaatgggggaaaatgatgttataaaatagaaggtacagcaggatgccatttttaaggagaattttaaaaaaacctttatctgcttctgtatcagaaaaaagacagggtgcattcatcaaatgttcacagagtctttctctgatttagaggacatcaaggttgttccttttatgcgttttgggatcttttgacttttttctctcttttccacattgaatatatattaaacctagaaccagaaaaaatatagatattaagacatacagacatgtgccccttaagacatgattccaatttctatccaccagaatcatgacgtgtaatgaagacactttcccttttccccttgtccacctgccatccacaccgtccttctctggcaggtggccctcctcggtaggaggatgggctgggtggagatagggctccagtgatggccgtcacataaagatccacttctccaatacatctgtgtatccggaagctctggtctctgtggctaatcctcccagactgtcagtcaccctgctctcgtttttcccttgagcttgcccagtgatttggtgccatgaagacaaaactgaagacactggttctttgctcttggcttttgactacagctggttccgccttcctgacc

SEQ ID NO: 45525 - DNA, 1782 bp, Bovine  19866881277781
  misc_feature (1)..(1): n is a, c, g, or t
naaatcctgcacccagaggcagccaagactgtttttgagaaggaaggagttctgcttcaagattctaggggtgatagtaacaagcaagaacaggtgcagtgggtatatggggacgtgggctgagaacacagaatctctacccttggcttccagtccagccctctgaacctatctatgagttgatgccaaattcctttggaaaattatattctgtttctgtccagaccagaaccatcatagagagcaaagggcaaaagaaggaagttaccatacctgccactgaaggtggctgtcattttttagattaaacataattacagaatgataggttcctccttggctttttcccacctctcctggcaacatctggcatgggagagctaaaacgctaaaccaggaagttatttacttaggctctatctggcctgggttaaccaaagaaaaaccacacagggacagtaaatgtcttgtgaatttcatcacaggggggctgagatcaaaggcttggaacatcagtgtaatcacgttggtctggatgtcagcaaaatggctcaagaacaataaatgctcagaaattgcttgatcaatgcaaacctgacctgggactctgaagcagcaaatatgggacgtgatcaaatagttactttagtccaaggcctcctgagggctgcggatgaggctccaacagagcctttgccagtgtactgaataaaacaagtgtcaagaggagccagtgtcatctcagggtaccaccatggccatctatcatagtgtggggctgagatctccaaagaggtagggctgccctctcttttagcgttccagtccttccaagcttcccctccatgaaccttatggatctcagcacctccaaaatttttgaatgtctgaaacacacagaaaccaggatgccatttattcttgtattcagccaagatccttggagcacaccctgttattggtgtttagttgcttagccgtgtctgactctacatgggctcctctgcccgtgggacttcccaggcaagaacactggagtgggctgccatttcctcctccaggggatcttcctgacccaggaatgaaacccacatctcttccactggcaggcagattctttaccactgagccacctggaaagtccaccctatttgccacatttagcaagttgtgctgcaggttttctactctcagggaggtgttggtctagtaagaaactgaagacagagccatgaataactactctaaacagtaacagcagtgctgggtgagagggtggaacttggctgggcctgttcccttgggaagggataaaatgggaagaagtgttgggaggcaattcgagatgaagagaacagtgtataaggaacagcaggtgctgcatgcttgcagaaccgcgggaggtctggttatgctgcagagtgaagacacgcagagcagtagtggagaactggggctgaaaagccagactggggtcaactgtaaaagctgtgaatgccagtttaaggagttgagccccagtgcaaagtcacccatggctttattaaacagaaggatgaataaagccatgattatagagatgaagaagaacagaaagagcagcaacagatgagactcggtcacagtctcaccgtcatgctgatcctctattccacagagaccacaatactaagacctcggtctggaggaaccttaaatgagacatcaggcttgggttttcttctctgtatacggaggagctgcgtcgatgaattttaagatcctttttaagttgccagtcca

SEQ ID NO: 45526 - DNA, 955 bp, Bovine  19866881284817
  misc_feature (1)..(1): n is a, c, g, or t
natttataagacagattgtactttcaggaacattcaatctatattaacacttaacatttgacgatgatcttcagcagaactgtgtgccaagtgctttcccattccatcccattctttataccctctttataattctgttcttctctttcctgaagctcacagaggccttcagttaccctcatttttccagacagcaaggaaaatagctaagaggccaaattttcactaggatactaatatcttttaaggatactaatatctgttaacaacttgatgtaatattctcttcagcaatttagcttagttttgatatagatgccaacaatttacttttaaatacttagtttcaaaaatccctgatgatctatttgaaagcaagcatcatgatctccgtggggtttaactcaatattaagagttggtaatattcatagtaaagaagctgtcccttcactcattctgttccagacaatgtatgggattatcttcaggaacaatagcaatttctgtagcagctttgtgaaatagacattaattctcccatattttggatatgaacactgagacagaaagtaaattacagacccaaggtcacgcaggtggaaccagttttcaagacaagtacatctgacttcagacttgactctgacattaagactgcagcttggtggcatgagagttggctggcttctccagttttgcgggctgtggaacaaatgtgcttcttttgggtagcacagcaagaaacctttacttaatggaggttaggaagacacatagagaattgggcaaggtattgttatgctggagtctctaagccacttcaaagagtgaagaactagattgggccacaagaccaagcattatagaagcctgaggttggatctgagcaaaagtcattgagaagccaagaagccagtgaagacggtaagtcctatgtgtagtactgtgtagtt

SEQ ID NO: 45527 - DNA, 1478 bp, Bovine  19866881297175
  misc_feature (1)..(1): n is a, c, g, or t
ntcagaatgtaaagtgataatgccctgagctctgccaaacagtacagagctccggagatgttacagatgcagctgtgaccagcaaacaacagtgtttccgggattgtgtttgtaaatacatgagttgcccgacagcttgtggaattaaatatagatgctacatcacaaactctagctaaaataaactatatgctgctcaatgaatgtcaataagtacactgagaaagaatcattatccctttctgtagcagggtccaagaaacccatctctaagtgatttttcagttgtttgttttttgatgaaggcaaatttttttctccctcgggccttggactggtattgcaggcagctgggggagggtggtgtgaagagacaaagtggatgccatcactaagtcaggtatgttgggagcagtgtgtatggtatggtgacaggagccagctgggaggttaccaggtagacaaagaaatcactagtcaacttttttggggactgatgaccaaggggcaccatttctaaaagtatggcgtgaggccattggtggtttggaaagattgtttaagggaaacatgcttacccatcactatacatctgctctttggttctcaaactaaattattcaccttcttttgctaggattactacaggtggctcatatattaccaacatcttgtattaataatggcaggttaacagaagcaggtattcccacactaaaatcagcattctgcaagagtttactgagcactctctctccatctggcttaagctgacatggcttattgccatgcaaccctttgtgctgatgcaaagctcactgtgccctacccagatcaccaaacctccactctaggaagtggtacagaaggaggggtgctttgaatctagggtctcttcagtattaccctgaggacttaaggtttttacttgtgttgatcatgtcatgtaactgctgcttttatttgtttgcttgcttttttatgaagttcctttgcttccctggtggctcagatggtgaagaatctgcctgcaatgaagaggaccctggtttgattcctgggttgggaagatcccctggagaagggaatggcaacccactctggtattcttgcctggagaattctatggacagaggagcctggtgggctacagtccatggggtggcaaagactcggatacaactgagtgactaacacttttactcaattatttaacagcaagttctatctccactgaaaggagaagctatatacttagactgtagcaattctggtactatctggagatccttgtgcaaaaagttttcagagacttcagtggaagaactagagcaaagcttttaaagtcttaattcacaattcattctgtctcacactgctactgactatctaaactatttttgacaaattaagccttttgtaaaatgtggtagcaagtttcccactttcttccttttaggaaagttaataaatatctg

SEQ ID NO: 45528 - DNA, 2880 bp, Bovine  19866881319008
  misc_feature (1)..(1): n is a, c, g, or t
ncggacacaactgagtgacaacactttccttcttcaccaggtctcaagtttcttgttcacagtgattaaaaataaaatactttttttggctgcactgggtctttgctgctccactgacttttctctagttgcagagaacagaggctattcttggttgtggtgcttgggtttctcattgtggtggcatctcctgttgcagagcacaggctctagggtgcacaggcttcagtagctgtggcacttgggcttcagcagtttgcagttcctgggctctagagcacaggctcaacagttgtggcacacagacttagttgctccggagcacgtggaatcttcctggatcagggatcaaacccatgtctcctgcattggcaggcggattctttaccactgagccactatggaagccctcaacagtgatttttatagacagtattctgctaagcactggagttcaaaaattgtatcctagagcattcttacatccaatgcagtgaagccttctgtcccctgggatagtgtatgtgcatgtgtgtgtgtgaaacacaatttagctcctttaaaaccactttgagagttttatcaggtgtgtctcaaatatcttctaacaatgtgtcacaaatgtaacatcagcgatttcatgcacactttcctagtaagtatctatattcctctactatttcctgaacaaatgaattccttagatttactacctattttctgtgagcttcaagtaaatacttttaagtgtagcaaactatatttgaaaagtcaatatttgtaatttaaagaatttcacttatgtctattctcaattttaatttttaccaaactgatgaggcctgacatcctctatctattctagatgttgtgcagaatcaaatagccccacattttgttgaatttcttctcatttttccctatgctgttctatctccttttcttgctcatcattcttttgtggtggtggttgttgtttagttgctaagtcatgtccaactctttttgtgaccccatggactgtagcctgccaggctcctctatccatggcattttccaggcaagaacactggagtgggctgccatttcctgctccaggggatcttcccaacccaggggaggaacctgtgtcgcctgcattggcaggtggattctttaccactgagccacctgggaagccctcatccttctctacctcaccaccttcaagactcagtcctagatcttctgcttgttctccataggttatctcatttactctgttgattttattgctacctaaatgcacacaactgctaagtctagtcctccagttcagatattcttctgaactcaaaagctgtatgtatagtatttgtatatcaaatatgagcatttttatatctcagaggcacagaatgttaacatgctccaaactagatttactgtttctccctttacctgccatccctcttccttctgtttttcccaacctaataattggcactgcccattattcacaataaccaaaaggtggaaagaacccaattttccatcagcagatgaatagataaaatgtgttatacacatacaatggaatattattcggccttaaaaagaaggaaatgctgacacatgctacagcatggataacccttgaggacgttatgctacgtgaaataagccagtcacaaataagccagtcaatgattccacttattcctagagtgatcagattcacagacagaaaatagagtgatcactgccacgggttgagaggaaggggctataggaaagagagggttgctgtttaactggtacagagattcagtttaggaagatgagaattctggagatggatggtggggggtaatgattgtacaacaatgtgaatgtactttagtgtcctgtaaatgccgacttaaaaatagttagagatgttaaatttcatgctatatgtatctcactacaaacttttaaaagacaaaaaaagtaaggcaacatgttaaaagacaccacataaagcaatcccagaatgtggaacatgctctaggacaaatgaccaggttttagtaaaaaatcaaaggcataaaaaaggaggagagagggagggaagaatgattatggaataaaggaggcctaagagataaaaataaagaaaggagtaaacaacacccaccttccatctggggtcttaagccaggaacctagaggttatgcctgaatcttcttgccccatgtatccatttctgtttgcacatgtgctttgcttacagaaaccccctggtttcaaacttagaagcaagcaccaaaaagaattttgataaaggaggaatttttaggttttaaagttgcagggaagacttacaaagaaggagcctgctaagggccttgaatgctgggtgacttaagaaccggttgctggtgataagattctagctagagggacagaatgaagatacggtaggaataagcttgacacccgagtggcagttatggatgggcagctgcaggaaagccttcttacctgaccagtctggtcatgctgactccttgtagaggtgggccctctggagcggtgtgggccaaactccactcagggagagtagcatgtggttttgtagataggcaaatgcatgtacacgtgtgacagtctgtgatgtaaaggagtcagaaagaaattagatcgtatctaatcctggaagctcctgcaaaataggggtcatactaaacaaaggaatgggggacctaaacacgttgattgtgagaggataggtcttacagggaaagggcgggcttatccaatcaatgctgtactttagggagaagggatggagaggggacactttcaagagatgacttatcttcaaaggctgtttgtggatgcaggccagatgagca

SEQ ID NO: 45529 - DNA, 1168 bp, Bovine  19866881367941
  misc_feature (1)..(1): n is a, c, g, or t
nttttctatctgtgtagaaaatgaatataccatagttactgcttaagaagcaaaagataataaaatgatgctcgatctttgtttctcagattttaggctccccctttaacagatgagaacactgagcctaggaatagataagcgagttgcacaaggtcatgtatgttggtggcagatttgggtctacctattctggttccgctagtatttttactttgtgcaccactcacatgatttacagctacaagaatacacaggcttttccacttacaagtttgttcccttgggagcaagtcacttcgctctgagagcctccctatggtcatccgtgaaataatccctatggtcctgcccaatgctgaaatcccttaattctaagcagataaaaggaggacaaatataagggatgaggctctgagattttagtcttctttgggaggaggctctttgtttttgaaagggagtgaagcacaagagaagcgaggggtaaagcagagattcttgcctgttggagcagtgacatttaataaagtgattaggcagtgacattaaataagttttcaagtcatttgagtggttaattggccaactctattgaagagatgttttcttgaataaatctgagggcatccatggtacaaactcacagaaaatgttattcttttaatctacggcatcttgatgtaaaacctcttttaaatcctcctgttttgactagaaagggagagcagaccagaaaaatgacaggacatcctgcagtggaggttccccaaggggaggatggtggaagcactgtcagttcagatgaatgacttgcattctcctctcttgttgggatgatctgccagcttcaacacacactaaccatggtgtttttacccttataacacactcctggtagcacatcagagagcttcaacagtgcccatcattcctcatgtgcacccggggaaagatgtcactccccaactgccactgtcccctccaggctctggatgtggctttcagtgtcactcaccccacccccaaagtggcatggaactggcagggtacacttgatgcattcccccactgctaaacttaacagaagcatagggacagcctccctgcacagaatcaggttaacagtgttaacgatgatgtgtgcaaaggtaagtgctaatcatga

SEQ ID NO: 45530 - DNA, 1007 bp, Bovine  19866881369102
  misc_feature (1)..(1): n is a, c, g, or t
nctctttgcatgaggtggccaaagtactggagtttcagctttagcatcattccttccaaagaaatcccagggctgatctccttcagaatgaactaggggtagttcttgtctttggaagggtttagccaaatggggcagatgggaccttttcctttgggtgatctaaactttttcttttttttaaccagctatggaaagtgtgaaaatcaccacagggtaccttaccgagcagctgcaccttgttctctggactctgtaccagaacagagctgactgagtccaggttgtcgtagttgctgcagcccagggggccagttctggtctccgtgacctagagaaggaagggcgggtttagacaacaagccaaggctttccctttgccctgctctcttccggtcagccattctcaggctctgtgtcctgtcctggactggcccaaggaaggacatggctcgtcctaccctgggagcatgaagccacttttccccttgttctgagacagggaatatcagtggtgtagggctggcagcagcagctgtccagaagtgcaagcctttcagagaagccagggggactttgtgtctgaaaaaaagaaactcagtgtaggaagaggaagctgagcctccacactggagttcccccatctcctcccccagaggaagaccggaggccagatgcagatgctgtcagcccactggccagcccagctgtagccacttgatgtggtgctcacaggctttagggatcccaaagatgaaacacactagagaaatatgagttatgagtattattattaatattaaacatttaagttccacctcggcactgagacgtccttagagaaaatcagccgtgggcttactgcatattttaataagtatattaaatatacataatctcttatagctatgtaatattccaaaacaccacagagtcatgttaaaatattataaagttggactatcagtttttccctgatgtttaaagtataagataaaaatggggag

SEQ ID NO: 45531 - DNA, 1007 bp, Bovine  19866881502891
  misc_feature (1)..(1): n is a, c, g, or t
naattgattccctttttatttaattttataaaaagtcttctttgggatgtgtgatgccaatattcttttacccctggtgataggacagaaaatggagaagagaagagatgcttaagaggagaagaggaaggacacaaggagtgtggctgttgaacgttttacctgccaaattgattttttccctaggtttaataactccaagatggaaattgacatttttgcttgagcattaaacacataacattcacagcattcattggacctcaacagatactggctgttgacagaattcgaattttgacagcaattttatatagtgcagggagtctaaaattaaatataccggacagagcaatagagagaatattcgaaatagaagcatcttagaatatttttaaaaaccttttcaaatatttttttgagaggcagtataacagaaagagattctttctctggatttcttatgggctaatgctctgtgtgaccttgggcaaaatacttaactaagtttttgtgatgttttaaatgaggggtgtgtgtgcacatttatgcccttgaaggattgggcatctataaaatgaggacagcatctctgagttcctttgtagtacatgtgtctttaggttttatgatggtggggatactcaagttggttcccaggcacctttagagcataccaggtgatgtggcagctggaagcaagagaagggatcagatcagatcagtcgctcagtcgtgtccgactctttgcgaccccatgaatcacagcacgctaggcctccctgtccatcaccaactctcggaattcactcaaactcacgtccatcgagtcagcgatgccatccagccatctcattctctgtcgtccccttctcctcctacccccaatccctcccagcatcagagtcttttccaatgagtcaactcttcacatgaggtggccaaagtactggagtttcagctttagcatcaaatggggcccagataataaaaacaagggaaaatag

SEQ ID NO: 45532 - DNA, 808 bp, Bovine  19866880540158
  misc_feature (1)..(1): n is a, c, g, or t
naacattcgagtgggttgccatttccttctccaaggcatgaaagtgaaaagtgaaagtgaagtcgctcagtcgtgtccgactcttagcgaccccatggactgcagcctaccaggctcctcggtccatgggattttccagggcaagagtactggaggcaagagtactggactggggtgccattgccttctctgttgctagtaaatattaatttaaatacttactattggttacagtccaactaatatttaattatacatacacactttaattatactactgaaggcttgggcatgacattagaattccttcaaatacataattttttgtacaatggaaacaattttttactgaaatatttgctattctgcatgtattgaggctaaccatataggaatttattaaaatttgttatattttgctgcttctgttgcgtgaatgttgactcatatttaccctgtctgcttgtgctaggtagaaattcattcaaatttattgcatattatgccttgctttttagttaccaccgttagtcaaatatagtattagcttatacagggttttgtagcctagtatttactagtatacaaatacatgattatttctaagtacataactcaaattatttttcagtactagtataatattaatgcttatataaaacttatgcatttctatagaattatgtttcatattgtattatatttacatgcataagtttttttcaacaaaataattttaaaatttctttcaaaacctatttaaaagtgttgatattttatttttcatcagaatttttgctatatatat

SEQ ID NO: 45533 - DNA, 1717 bp, Bovine  19866880596981
  misc_feature (1)..(1): n is a, c, g, or t
ncagagcaaggggctggcttcatactcctgcatcaacagtggctggccatggctttctgcagggaggggctctgaccagggcaaggtaagctccctttgtcaaaggcaattcttggaaaggaatcaggtctgagttgttagcagcagatgtccccaggagctagaactaaatgcttcagtcctgaaggaggtgtgggtggccaccatagtgtccactacgtggggcaggacaccaggggaagtccaaccttctctaagtatgtggagatgaactaacaaccatcaggtaaagcatgcttcctcctccttcccttacagagagaactccccagtgacgtgaaaagcaacgttttatctggatattctcagacttcctcaaaggaatgtgacagttccggggagagctaactctggccccagacccccacctacctcctttccttcccacttacagctccatcgtacaccccagcctgagtgagccaagctccatccacacccatatccagccacccctttattgaaaccctttatccttgcttctcttttatggttatttgttttgtttagtcactaagttgtgtctgactcttttgtaacccaccaggctccgctgtttgtgggatttcccagacaagaatactgtaatgggttgccattttcttctccaggggatcctcccaacccaggggttgaacccaagtcctgcttggcaggcagattctttgccgctgaaccacctggaaaggttatatgtccctaataattatcccatctgtctgatggttaaaaaaagaaaaagaaaaatgacaaagaactaaaacaactaaggcacaaaggcaaacttcattaacattctagtaaaaagtttactacgtcaatagtaaaagaattagataaaattaggatttaatggcttcaatgatcctttcaattttattatttttaggcatcaagattactgtatttttttagaaggagaaatttgctttaggaaaattgggcactgggtggtatagaccattatgttcaagctagactgggtcttgttctaaaatcaattatctgtgttcaacttaccatcttattaagttgctttaagtctcagttgcttcattcgtcacacatggataacaaattatttcaaaatattgttgtaggaactaaataactttatgtataacctacttagcttgcagtttctgtcatgtattacaacagttcagagccagatgcctgcatctgaatcctggccatgactcagaatattcataacattggaacagttacataatatagttgagcctgaattattttgtgtgtataaaagtgaggacaatagtatatgcttcttggagtttttatgatattaagtagggtataaataaaatatttaaaatagagtctaaaacaaggtaacaataaggaaacgctaagcacttttttataggtagtaatatcaataagtgtttctctttacttcctccttgtattagaaaatagagttttagaaaacaagggtggtcagaaatcatagagttcccaggtgactcagtggtacagaatctgcctgccagtgcaggagacttgggttcgatcccttagttgggaagatcccctggaggaagaaatggcaatccatgccattattcttgcctgggaaacttcaggacagagagcctgctgggctgcagtccatagggtcacaaagagtcag

SEQ ID NO: 45534 - DNA, 1063 bp, Bovine  19866880616804
  misc_feature (1)..(1): n is a, c, g, or t
ncctctgtagctgaaaaggcagagagctgctcttcaattacaccgaaatttttaaaaagtctcaaagctgaatttggtttaggtctgatttttaacatttcctacatcttttcaatataggctggatcaaggtcaagagaaactggagtagattttaaatgaggaactgtataattttgtccttaggctattctctatggacaatatttaaatgtgatactttttttaaaataatgcagacacaggcaaaggaggagactcctgtactgctattcacttactatgatatgggcaatttatataattcaatttagatagatatacttttgctaacattttcataaagcaaggcatgagagtgcctgtactctaattttctgataaattatttcagaataatttgcatatatttctttgatgcatacaactgaataatcagtgcatagataaattattgaatatgatatttaaatattctttttaaaataaaatacctggtagatattaaaatggtatttcatattcagctaaatttacttttgtgcttgaaaatttaattcaaaatacatgtgtctaaaatttgtagataataaattattgaagtattttttattgcacccaaatggcaacttcttataaatgatagcactctacaaaagcctaatagtttttcttttatgggagatttaattagtagactctcaattcagtgatatatagcctccaaatctgttctctcactgaatctccacaggcttcctggattctacagatgtacagattaatctagatgcttcaggggaaattgtgtaacagatttcctcatttctgattgaacactaccataaaaaccactgcagtttctgtcttttgacctaattattggttgaagtcacatggttagtattcttgatatgaactctaaagaattatacccaagaagcacattgatgttactcaaatagcaggtaggctctaacttgactgtgggactgacaagccacaaagttaaacagggggagaaacaagttcgtcacttatgtgtttctcactttcctatttt

SEQ ID NO: 45535 - DNA, 796 bp, Bovine  19866880633624
  misc_feature (1)..(1): n is a, c, g, or t
ngagccagagaaaaagagagtgaaccttatagaaatcagtatccagaaatagcatattagccatcttgagggaagggtgctagttacaattataaatatgcctaatgctttttgaagagaaatctgacattagaaaatattttaatcaggcattaagttactcaattcaatcaaatgtcaaaatgtgtgtgaaagagtttcttttcaaaattggaatataggattacgtaagagttgatgataatacaaatactgaaaatatcacagccaaagcagttcttactagtaatttattgtgtaggtgtaagaggatgttattaagatttaccaaatatgtactgcagctgatatttataataaaaatgctttgcttgttgaaagagcccaattcggaagcaatggcactccttttcacatcttaagtgagtaaaggaagaaaggagatatataaatattttgggaggagtgttgattatataacttgtcaaaaaatgcatctcttagatgcttcatctactgacatcatgaaggtcaatcccaggccttggacatctatacatggacataataaacactaataggaaatgtaaattttgctctctgccttgcctgcttcagataaaatgtgcttttgctccattcatatgcaccttttattaactgtttctcatattttcaatcaaattctttcttagccttattctttaatggtcattttcagtttatttttttaaagatttatgattccattttattgataccctcttagaaaaataatctcctagagaaacatttt

SEQ ID NO: 45536 - DNA, 963 bp, Bovine  19866880667157
  misc_feature (1)..(1): n is a, c, g, or t
natatcaggttactagagacttgtccttgaaattacaaaaatgtgtgaacaatatataatgtgtcttcaaatagatttattagcgcaagagtattcaaaacccattaacaacctaattatttctgtgtccacatgacaatattttattaaccatcatttacaaaattttgaatgtggaaaagaataaaaagagaagctttttaaaaagccatagggcaatttactgatttttaggttatgaatgtgcattagttgctcagtcgtgtctgattctttgtgaccccatggactatagcctgccaggctcctctgtccatgggagtttttcaggcaagaacactagagtgagttgccattttcctcctccaatgtatattcccaatccggggatcaaacccacatctcctgtgtctcctattttgcagacagattctttaccttctgagacatcagggaggcccttttacattttgagtaatatgtttttatgaatagaggttgcatgcttttcttaatttgcttttggaattgtgttttgaatataaatatgtacattcatttcagtatatttattacatcagttaatttgaacactctggatacttttattaataccatttaatcagcgtttgagtgatttgctgtcatcaaatcactcaatttccttcagatataaccagtttttctctggtattaattcagtaatgttaaactactcaatttcactttaataataacacagtacagtcagtaattctatatgggggggggaacctatctgtatcatgaattattttaaaagaagatagatttctatcttgttttaattcaaagatgtactgaaattcaaatgagtcaatagtatgttgctatataaatccttattaacatcttcaaagataagtagatgtgatagatagtaattagtgtgtatctatattgcctccaattatttaagggaga

SEQ ID NO: 45537 - DNA, 1618 bp, Bovine  19866880811512
  misc_feature (1)..(1): n is a, c, g, or t
ntgatgaagaggacatcttttttttttttttggtcttacttctagaagaccttctagaagtcttccagaactaaagagtagaactggtcagcttcagctctttcaggatcagtggtgggggcatagacctccattactgtgatggtttaccttggaaacaagtcaagatcattctgtcatttttgaggttggacaaaagcccttcattttgaactcttttgttgaccatgagggttactgcatttcttctaagggattcttgctcacagtagcagacataatggtcatctgaattaaatttgctcattctcatccattttttattcccactgcttcctaagatgctgatgttcaatcttgccatctattgtttgactacgactcatttaccttcattaaacatgttttttcctgtgccagtctctgagctgtgtgtaaatggaatccttaaatcccaaaactattgctatctatttcagaaaatggaactaaaattaaataaatttcagtaacctatccaagatagctcagtggcaaaattagaatgtaaatcctgcaaccaaattctgaagcattctttgttgtaaatcagtgtacgtttgtattacttgtgtacttctgcatacctgttgctagggattcaagaacatgggttctgcctatatgagtgggaaactattaaaaaaaaaaaaaaaagaagagaaaaataaccttaattttttgctttgatgatatcaagcatatactacttgacttatttttttccttgctttttcttcttcttcttcttttttttttttccaagcaaaaatattgtctatggtagaggtcagaaagaaaacagggttactgaactctactaggaaaaagaagccaatgctggtatacctagattctaaacaatacgtaatcaacatgtatctgccaaatgttctaaaatgataatctcacagcactgggtatttcggtaaatgatagtctaaagaaacaatattcacatgtcatagctcgttaataaattttagctatacagtctaaatacttggatcacagaaatacttatttccatttttcaaactctggagcattgtaacaaactaaagttgtgtgcatgtttgaaaaaattaataaattattttatttatatttttgcttatttattaaagtctttataactgatatacaggtactgtaagagtaaataaatcttatgaattcctaatttatgcccagggattaatttattcactaaatatgtccaatatattcttgctttgaggctgtaacatgtataggtaatgacaaagcctaattcttctgctatttcctattagcttatcttcatttctttccaatatcctaatatttcactaactatttttgcactcatttataagtcaatttattttgattaagtaaaagaacagaattcttaggttgttttcattaagagtgttaacaaacatctgtcttactaatggagacctttggatgacccagtaaaatgctaccaattagtattaatattatccaaatagacacaacagcaggaaaatagagcctggtaaataatttctaagccagtattgataagaggtaagaaaaaaataaaacagat

SEQ ID NO: 45538 - DNA, 655 bp, Bovine  19866880837874
  misc_feature (1)..(1): n is a, c, g, or t
ntttctatatatttctattctctgaaatggtcgtgaaccatatttgtgttgaatgaaaaacaagcaaggtaaagatggttatcatcttgaaacttatttggtagaatacacgctgtaagaaaaatatttattttttaggcttgtaatatttttgattgatttttaattaatgaaacatattaaagggaccatttaaaggaaaatttcttgtttacttcttttatcaactagaagcagcctttgtagaatatgaaagtgtgaacattaaagctctatttcatgttttcaaagctatatattcataatcgttttgtagatacatgctgttttcaagaaacaccggatacatgtttgtaaattatattaatatggatatatatataatatggataatgactatattctcaacttttctagtgctattttgatggcatatttatttttaagtgataggtttaacttacatgactcaactaatttctttccagcaactgtggtgcttaggtatgttttcttaagctccacttggtggtaactttaaaaatgtaatttaagcataagtcatcaactggtatacttttacaatatttctacctgaatcagtaatcattattaagcaatgattgaattatacttatacctagaattttcgtgt

SEQ ID NO: 45539 - DNA, 765 bp, Bovine  19866880857734
  misc_feature (1)..(1): n is a, c, g, or t
nctttaaatgtgcaatattttagtataataattttaatttgcaatggtcagcttgtgaaaactaaaggataaaagaaaattaaagttgtcatcctaaaaaccatatctaaacttcaattaattctggaaaattgaagattggattgactctgcaattgtctgtgaatttgaaaggtttcaggtgctgaatttcaaatctgttattctttgtttctattcaatatataattttaccaacctttaactctaaaaatgcatcctaatgtagcttcaaaatagtcaagaatgcatattaaatattatgttcatgtttacaagtaaatcccgatttagtttggtatttatgagccttgagcaatacagcaattgagttactatttattttgccataattttctattaaacattttttcatgcagggcaatttacaatcatgaaactaaaccaattagtttttattacaatgttgaaggaaaataggaacccaagtttaaacttaatgaaaatgaataccattaacatattgtgttgtgtgctctcattttattcttttacatattaattcaaagtttatttcatgtctagctgttcaccttacagagaaaaataaatcaaacatcatcaaagtgacataatgtttttgatgaatatgacagatgacatctgattcattgtactttaaatctaacaagggcaccctccctggtcagttatctttcattcatgagatataataattttccatgtttgcattttgaagaaaaa

SEQ ID NO: 45540 - DNA, 933 bp, Bovine  19866880975808
  misc_feature (1)..(1): n is a, c, g, or t
ncaaaaactggctgtggactggaaaacaaagcaatttcacgtacttgtggatagaccagtgccccagagtagattgcttgttgcagaaattttaagatgttgtgtcaaaaacactgttgtaaagtggatgtggcaattcaaagcaatgcttctctgttgattttgcactgttatatatgtggaatgcctagtataaacaccatggaagccttgcagtattttaggagacaaagtattaatcaaccactggggagcttaccccatatcagaccccctgaggattctgaaagtattttcagcagagcaattccaaagcctctggcaaaggaagggttttggtatattaaactcaactgcaattttcaatgagtgcagataggatgctctggaatgcttaatgtttcagcatatagctgctaaaaaggtgtggattctgttgtttattcttacatttatcttacctgacagaatcctacttatgtcctagggttttaaagtaatgaaatgcaaagagtgtctgctttttggcagttgggcagaatgcatatttacaaatagaactgaaaacaaaggacaaccaaaagatgtcacaagttctgaaattattttgtagtaaactggttttgaactttgtctaatgttaagtgaccatgaaatgattggattatgtttttccttctattatcaaacactagttggatttcttgaaacagtttttccattttaataatattacctgtcttcattactccaaactatcatttaactaggcatctatatttttcaaaaatcacttatttcctttgtttggcttttgtactggtcttttccccttaaagttaatctttaatgtgtacaaatctttttcacctacctctattcaactttgcatatctattcttcctttcctttcctctcaacatatttgttagt

SEQ ID NO: 45541 - DNA, 1745 bp, Bovine  19866880998611
  misc_feature (1)..(1): n is a, c, g, or t
nacataataaggaggttgacttcaaaagacaaaataattatttattttcctaaaaagaaaactctcaatgtattattgccagtcaggttaaaatgcttatattttttcctcaagtaaatctttattttttgaggtattaattgaaattaaatttagataagaaattatttcctgagctttagatttttagcttctctgaagctaagactatatttctctctgtgctatatgattttctaagacattcttaggggcttataattattttattactttattacaaattacacctgaactctatcatttaacatattttattctaggtgtactcaattttcttattaggtttttaaaattgcaattagtctcatctccattactctccaaatgtctcgatttctttctcccatttttttttttttcccttcaagacaagtttaaaatattagttctgtagcttggctactaaaaactcatcattaattttatttccctcctaatttatatgaagctattatccctgctgtctcattcccttctgctacatttgttccctgtagttcttattttatgttctcactgattttcacttgctatcaagccttaaccaatcaatgtgtgtgaatttatatatatatgtggtatcttatcacttttattctgtaccaagcagtcaatgtttcttgagctattacatatttatgtcttctttgtgttgtatgtctatattaaggattatatttcaggtatgcatgcatgctaagtcacttcagtcatgtctgactctttcagaccctaaggactcaagcctgccatgccctcctccaggggatctttttcacacggggattgaactctcatctcctacagttcctgcattgcaggcagatgttttaccgctgagtctactgaggaagcctgtattttatgtatgaaattaagtactatacaattttaattaataaacattcctcccaaattatcttataaaaagtaccccctcaggaagacactactttcttcctttccctttatgtttctccccaaacactataacacagtgttttcagaatttctttttaaacgatgggggagcttagaagttaaagttagatggatggtgatggaagtgatactataatgagaagaaaactagcaaattattatatccaaaaccagattttcttttccattatgtgtatgttattgctacacatgtgggcaaaaactatcttcaaaatttttgcaaaacaagaaatactgtatttatatacacatgaggaaaaagagtgaaaagaaaaaaagaaaatgtagaaataaagatgtggagagaaatcacgatttggaagtttcatactaaacaggagcatttgtaattgaaaaatctatcaactaatacctgatttaaaaaaatatatattttgttttattcaggaaaaataatatttgctgtttaaatttgacttctgcatttatggatccattttatttgtgtggtattttcattaattttcagtaataaaaaaaagaaaaagatcttttctgtaagaattttccagttgaaaactggaaaccaaatattcaaacacagcaaatacaaaccctgtggaattgagtagtggatattcaggtagaaatattccttttatccaagaccaagttttggaaacaaactgacattagctgcatttcaaaaaatcatttcactgcctcattatgcgtagcaaacggctgcaagtgtcagg

SEQ ID NO: 45542 - DNA, 861 bp, Bovine  19866881018848
  misc_feature (1)..(1): n is a, c, g, or t
ncccacaaagttaatacgagtgcttacctagttaaaaagtgatagagaatattcttatctcaagtgtatatttcccattaagtagcaataaccaatgtagcaaatgtggctatacctgaaaaaaagcattttagctcattttaaatcaaactttctttggtctaaactataacataacaatcttcaattcaaatttttatcgggttttgacacacacacgtgtcataattactggatacttaaacaaaagaggcaactttttttttttacttgaaaaagaaacactgaattttaatttgttattatatttgtaattgcatacttcttcaactacactggttgaggcaatatgtgaatttaataataaagataatactaatttctcagactatttgaaaattatataaaatgactaataaaagtgaggaaaaataaaaaaatatatacctttcagtttatgtccaaatatttggaaattttgtagtctatagggtggtaaaccaactatgtgttacaggtgtttagacatctttgtatctggagtttaatcatcaaggttaattggaatatttgttgaatttataatgtatgttgttgtttataagactctgagaactactatgggcttaaatggaatctgtttggctactaggcattattatgttttagtaatgttattaaagaaaaacaagagggaaagagtaactcatgtatttttattgaaattgttctaagctatttggcacatatgtcagagaattataaagaaggaaactaacatttctgatggagatatgaatcatatcacacaatatcttcacttcaaatacttataatcagaagaaaagtagaaggacatat

SEQ ID NO: 45543 - DNA, 1117 bp, Bovine  19866881077963
  misc_feature (1)..(1): n is a, c, g, or t
nataatttaaggaatcctaaaagcatttcctggtggctcagactgtaaagcgtctgcctacaatgcaggagacccaggttcaatcccttggtcaggaagatctcctggagaaggaaatggcaacccactccagtattcttacctggaaaatcccatggatgaaggagcctggcatgttgcagtccctggggtcacaaagaatcaaacatgactgagcgacttcactaaaagcatacttgaaaatcttccagttaaatttcttcatctttatataggtctttttatttcctaaaaagatgacattcatcaaatatttagggaagtagctacaggtcaacatagctcttttcttttcctctttttacaaaacatgctatttaaataaaagagaatcgtcacttcattgagatagatctcaaaagttgaaaattacctgtaatctgttgataattataataataagcgggattttttttctaataaacaccatcaggcagagactactatagttcagacaattttaagtctcaaaacttctgcattgtgcttttaaaaagttaaattaccatttcctctggcagaatcaaatgggatgggaatggaaatgtctttttcttgcaagacaatcagggtgtgattgattatgcttgtccatacacatggctgatggattttaaagtgatagcatctctaattgcaaatccaatacctgaataatgttgctctgagctttagtgaccttttaaaatagaaaaatatttcacatcaatccctctattgttattcatctgaatatctatttttactcatttgggatatgttctgctattgggcaatgtgccactaggtcataacaactggagctttaactactaaattgcttttacctgggcaaaaaagaaatgcagatgtaaaccatgtaaactactttgattcacaatattcattacaagtagaacattcttttggaaaaaaggaatctgagtagagcagtctataacaggtttttttcattttgagctacgaaatgccctagaccttagcaatgtctctgacaagataaagaaaacttcacaggtgcatgagtgacacacacacaataggaattcattaacag

SEQ ID NO: 45544 - DNA, 1991 bp, Bovine  19866881114799
  misc_feature (1)..(1): n is a, c, g, or t
nacagaagcccaccaggctcccctgtccctgggattctccaggcaagaacactggagtgggttgtcatttccttctccaatgcatgaaagtgaaaagtgaaagtgaagtcgctcagtcgtctccagctctcaacgaccccatggactgcagcctaccaggctccgccatccatgggattttccaggcaagagtactggagtggggtgccattgccttctccgagtaaatggtactaacaacattaaaatcacacttccttatccccaaacacctgcaagctttgttttcaaactaaacaccccacactatctattgcttgattacatttttcttaattaaatggtgtatataacttgcattttcagttaacacagcaaaagaagccggcattctcataagtcatttttatgagttgggcccctatcattttaatgtagcaattaattaagtgtttaataaaactgtgttttattatagcaaagcctggtttcaagagtctagttacagtcgtgtcagcattttttgtttaccaactcctttttaacttctcaataattgttctataaaaatttgctttgggtacaagctatgaaatgctgtaaattgcaataataagctattgtttagatataaaaatacttttactatgactctaagtataaactgaatattttattgtctcctcccctggataattgtttacttatcaaaacatatattctatctgactgtacattaatgatattgctcacattgacagattttcttaattattttgactgaatggttatatctccaatgataatatgaacctaaagaaaattggactttcaaaaaccacacaaacataggattataatttaattatatcttgattgagaaaatgtgtatatacccttatgattacatggttcttattaaaatatattacaaaggaaaatacttttatagcaatgttttcaaataagcacataaaatacaaaaaataagtttgttacattttaagaattacatcttaagcaagtgtttagaaacttgagttttcagaaacgtcctatgaaatattacctaaatgttatcctgttccaaaattgttaagtaaaaaaaaattgtctctggtattctggttttcctatacaatggtagaaattgtttcaaaatatacaaaaattaactaatttaaatatttattatgatatcagatcagatcagatcagtcgctcagtcgtgtccaactctttgtgatcccatgaatcacagcatgccaggcctccctgtccatcaccatctcatggagttcactcagactcacgtccttcgagtcagtgatgccatccagccatctcatcctctgtcgttcccttctcctcctgcccctaaaccctcccagcatcagagtcttttccaatgagtcaactcttcacatgaagtggccaaaatactggagtttcagctttagcatcattccttatattttctaggaactcttaaaatatttcaccagagcattctacagatgaagaagctgaacctcaaaagactgagtgatttgcgaattttaacaaccagttagttgaaaaagccaaagactccttcaacaataccaacttctaatagcaaatgaaccttgtcaatcttgtcccctggagatgaactggctacctttgcactcacaggtattggttcttacctctcaaataacatctgctactctagtttctactggagaagaaaatggcaacccactccagtattcttgcctggaaaattccatgaacagaggagcctggtgggctacagtccatggagttgcaaaagagtcaaatacaacttagagactaaacaataacaactctagctcctgtacgatcctgtctttcctttacaagacggtttggtccagagactgctgagcttctgggtcaaatacaacttagagactaaacaataacaactctagctcctgtacgatcctgtctttcctttacaa

SEQ ID NO: 45545 - DNA, 1229 bp, Bovine  19866881173746
  misc_feature (1)..(1): n is a, c, g, or t
nttactatttcccctaattgaagggcaccttgctggtacactaaggaaaaaatcattttttgatggattaatcctattaagagtagcagctaaaatgcaaggtggggggaagaattagcaggtgaataagaaattattcacaattgagtatacacatcttccttgatttaggatgaagttacatctccacaaacccattttaagttgaaaaaatcctaagttcaaaaagtttttaatacaccaattaccaaacatcatacttagcctagctttctttaattttgctcaaaacacttgcattaccctacagttaggcaaaaccatctaatacaatgcctattttataacaaggtattggatatctcatgtaatttattgaatactgcactgaaagtaaaaagtagaatggttgtataggtacagaatggctgttaaatgaatcagttgtttatcctcatgattgtgcagctgactgggagcggtggctcactgccgctgcccagcagcaagagagaatagtatactgcacattgctagtccagaaaagatcaaaagtccaaagtccaagtacactttttttttggtcttttttttttttactgaatggatattgctttcacactctcattaacttaaaaaaccctaagccaaattcttattaagtcatggactgtctacatacatgctggtaatggaaaaagcaatgactttggagtccaaaacccctggggttcaattctgcctttgtcattcaattgatgtgcattcataaattcattccaaaatttatttgatccccagtgtcttcatctgaaaaataggcacaatagaacctacttcaagttattactctgagaagacaatgcatcagtggtgctcagggtctagcatggagcatccacatattcttagatcacttttctccaagggaaagtggaaactaacttatttagcagttgaagaaggtaaaataatacatgggcttccctgctggctcagatggtagagaatctgcctgcaatgctcctctttgtatattacaagcactttcagcaatattcactagaataaacattgataaacatttacctgatagataactataaggtataattatatttaggaaactataactataaaataggaaattaaaatgatagatctagtattgtctttactattttccctaattgaaggacaccttgctggtacactaaggaaaaaatcat

SEQ ID NO: 45546 - DNA, 944 bp, Bovine  19866881296583
  misc_feature (1)..(1): n is a, c, g, or t
ntgtgcacttaggaaccagtaaatgtagtgccttgttggttaaagaagacaacattatgctgtagcttataaatatttatttaatttaatctctaacaggacaattgagtcatgtaaaataaatgaaatatattttagaacaaagcttatgtgtaaattaaactagttttcagtattaagaaggataacaattatttttattttagcaaagtggtttacaatgtgttatataccttttacgtggtgtaaattcatatgcttaatttcatgaatatagattcatgtacaacataaacccatatcagaactatagtaatggattgtcacattacagaccataaaaaaaaatgtttatgataaacataaacacaaacatcaactttctgatgtaaatctcatatagatttttttttttttagattttttttattattgatctgaaagcacaaatttttagtaagattggaataaaatttataaataaggatacttaatggaagtttgcacatatactatagagtgaagatgtcaaagagctgcattttacagtgataaagggatatttaattgaagtggaacatatacaaaataagattatgaggaagaatagccggaggtgttctatcaatggggtgggctgtttgggaaaacgtagtttattaatgtctctgaaaggtggtgctgaactgcaaattacatgagcaagcgttgtgcggtggcatcagaagctgtcagtgtatatgtgtctcggtattcagagtttgtcattatcagatgcatttctattgcttttcaagtactcctagtgagaactaaattacatattttaaaaaatccaaggctcttatactcatgaaatataaacagcattaaacagctaaaagaaatgcatagtgcagaccttgtaggaaaagacgtatcagtaaaatctttaaaaattaata

SEQ ID NO: 45547 - DNA, 1637 bp, Bovine  19866881378692
  misc_feature (1)..(1): n is a, c, g, or t
ngggaatatagctagtattttgtaacaattttaaatgaaaattaatctttcaaaattgcataaaagttaaagaaaattaatagcctttgttaacacgagtgtggatgatgaacaaactacttctaaagatttagtacagaggaaacaactcaatattctggttgcagtgactaataattctaaaatatttttttaaatttcattattcaaagcataaataatgaattgaatcatgtgagggcttaggtaagaattcctcatcttactctcctcagtaatttttaaagactttgtaaaatcagtagttatagcagtatggacatattgactcctactatgtatctatccctgttacaaaaccttagaattgactgtaaattataataaaaaaactactataatgaaattcaataatgtcctagaaaatgttttatgagtagaaacattttttttctaatagagtaaagctgattagctctaaaatttatatcagtaaaattacgtactatccttttatccataatttttgtttttcactttggtacttattttaaaaactatgttattcctgtataaaaccaagttgctagtcagttcatctggccacagctgccaatcaaaaagtttggtatcaaccaagaaggcaagggcaccccactccagtacttttgcctggaaaatcccatggatggaggagcctggaaggctgcagtccatagtgtcgctgagagtcggacacgactgagtaacttcactttcacttttcactttcctgcattggagaaggaaatggcaacccactctggtgttcttgcctggagaatcccagggacggggaagcctggtgggctgccatctatgggatcgcacagagtcagacacgactgaagtgacttagcaatagcaatagcaattctcaaacttactatcactttataaatctgaattatttcaagaataaaggaacagtgtacaaagtattatctaacatagagtcataaataattacgctaactaatcagaagaaggaagcaaatatcaggggtatgtaagtatgcatatatatatatatacatttgtatgaatgcatgtatgcatttatctacgtatttgccttccagttattcagctaactggattctccattccatctctctctttcttttaactgagtagatatggattgtgttgtgtgctcagttgctcagttgtgttcaattatttgagacctcttagactgtagcctgccaggcttctatgtccctagaatttttaaagcaagaatactgaagtaagttgcaattgcctactgtagaggatcttccccacccagggattgaacctgcatcactagaatctcctatattgtccggagggttctttaccagggcactacctgggaagccctaatgggttactgagcattaatctatggcttttcaatagcttttatttagccatagattttggagtgctttcttctctgaactatgtaaaacaaatgctcaaagtaagcaagaacatgtgatattgaaatgacttctgagcaaacctcaacctcaaatatagcctttgctcaaaaaagtctattactcaaactgctaaaataaaaccaactgaggaggaagcctgtaaca

SEQ ID NO: 45548 - DNA, 1233 bp, Bovine  19866881412870
  misc_feature (1)..(1): n is a, c, g, or t
ncagaaatacttagcagtctctatttacttcagcagattcttgtgaattacttgttaaatattattctgtaaaaagaagaatctattctgttggaaatacttagcagtctctatttacttcactcttactacctatgaatcagcactaccaacacactcaatgctgcccaggagtcagttaagaagaatcatgtgtaaggctgcattacttcttcacattataaagtgtattttattgttaacttatgatctggcatggctattgaaataaatttagtcaatggtaatatttgaaataaataaacagcaaataggttaaaaattgtatcaaattaaacgtattttgaaattaatgataatgtgaaaattctaaggtcatttcactcttttggggcactcttagtgaaataaggatctcatgtgaaggataactaaatgtggctcttttctgtaattggtattggatgtcaaaacagttaaatatgtctcagcataaatatttacttagctacctcttaaggatatgcctatggtttaggactccagcaggtccaagaacttggcagctctaagcctttatgcctgcaggtgacaggttactgttaatgacaaatgggtcgtctctaacaagcaggattgtcaggtagaaaactcagcatggggacagatttaaagtggcttaattatacttatttagaagggcttataagaagagcttattatacttatttagaaagtatttactcagtgtcattattatctatcacagtgaatgaagagagcatttggtttacttggtggaggcggtacataaacagccgttttaggatctcttctagttatgataatctgaacaatgaagatgcagaaaccaataagagatgtttgtacgtgtgattagtcacatccgagtttttgagactttatggactgtagccctctgggtttctctgtccattggattttcccagcaagaatactggactgggttgccatttgctcttccaagggatcttcccaagccagggattcaacccatccttaacattgcagggtgggttctttattgctgagccactggagaagcccaataagaggtgtttactgttcagcagacagaaaactatgaaaagggaaagaaatgaataaatactttgagtaaagtgaaagacagtggttaggtgatgaagcaactgctgctccaaggatctaatatcttaggcaagtattata

SEQ ID NO: 45549 - DNA, 1275 bp, Bovine  19866881536970
  misc_feature (1)..(1): n is a, c, g, or t
nataaaataaagctgatcccctaagaagggcaggtaaaatgaaattcctcaggtgtaaaaggaagagtttgcctctgagactatctcaaacgtctggtctactgctgccttagaggtcaaatgacatgattaatttatgctccaaactcaagtcacttgtccttaacgtgtatgtggaatctgtcactcccatgacactgggagtctgtggggccaggtattagaaaaagtgatggtggtggaaggtgtcagatcaagaaaatggcaatgcttaaacagaagctaggggatcgtaaatatgtccagatgctataggatgaatgcttctattgatttcttgggcatcttccgacctgactttaattctttcaaagtaatatgtggaatgccaaaaatgtcagattgactttctaaatgaggtgaggggaaggtgagtgcaaatggtttcttaaaagttttatttcttttgacacatattctgttttacccatctgtaaagcagggtgggtggttccaatgcacattttatgaatttgaacttgaaatgactctggtttaaaaataataatggtaatgtgttaaaagggtgacaggaactccagtggcaaagatgaaagtctgcacattgacaggctaattaatacaaatagtagttaccatagccaatccacattcgagattttatttggaacaactcagctaaatatgcactaagtgagttaaaagtaaagttaacatacactgtagtgaaggctggtgttaccaacagaccaggaacacattgtgaaagggaaaaccatagtctgaacctataaggtgttctttccagagagactcagtcaccctccagcacatgcacaaacttgctgggttttatttatgctggaatatttctatattgaaaagcaatataattgctgaaataccactactgttcaaggtaatttaattcctaatggtttatttacatagtgaaatttgcattttatttcacagaaaatgttgtgactccacctgccctcagttcagttcagttcagttcagtcgctcagtcgtgtccgactctttgcaaccccatgaaccacagcactcctggcctccctgtccatcaccaactcccagaatttattcaaactcatgtccattgagtcggtgatgccatccaaccatctcatcctctgtcatccccttctcctcgtgccttcaatctttcccagcttcagggtcttttcaaagagtcagttcttcaggtcaggggccaaagtatggagtttc

SEQ ID NO: 45550 - DNA, 920 bp, Bovine  19866881649703
  misc_feature (1)..(1): n is a, c, g, or t
nttatgtaatttgacataaatcgagggagattaaaagtgagtggcataacatgagaataattaaagtcttacttgtgtattggttttactttttattttgatgtgcttaattcttgtgagtagacagagacatgtgacataaaaaaaaactgtatatcagcatgacaactctatatgttgagtcagaagaaagtattttgcaggtgctgataatgtaggtatttgcatttctaattgaattacacttgtatttgattaagacactgactaccaatgtgtctactgcaacttaggctctattcttacatttagtcctgaagactataggaaggtaatcttggaatttctggacccctcataaactattctgagacagttggctgctatttgtttaattgtgttgtctccttaaatttaggcaatcaaatgagtcctcactcatatttccctcacatgactaaattcataaagattattcaaaattcaaaccagttgtcatcttgactacacatagtcgactgacagaaggatctcattttttgttttccaaatatcagtgggtttcaattaaattatgtaattatataaagtaaacgaattttaaaaatccccacagctctctctcaaaatatggctcttggcctccaatgaaggattgagtgagaaatgtggcagtaagccaaatctgtctttcttccaaaatcagccacaatagaatctgctgagttgaaacagacaataggagtttagtttggcactcagtacttttgaccagtactctatttgcaacatgatttactgggccaactgcccagggaagctctgtgtctagttgcccaattttgaaataatggagaagagttcatgaccaccatgctttgtaaacctacatttctgaaaattatatttctccatttaaa

SEQ ID NO: 45551 - DNA, 704 bp, Bovine  19866881657811
  misc_feature (1)..(1): n is a, c, g, or t
ncacacacatttgttttttaacgacctttcaggtctgtcaggtgtgaagtattcagctgtatcctctgcccctgttacatgtgtgaggagataaaaagtagcagtgatgtgatcatgaatttaataaaatttaaactcacttaagcaaccagcattcacattatggcacttcaaaaatattcagtggcaatctggagaaaaatatgattttatttgtaatgtgtcaggaaaaataagaaaattttcaatttgaaatgctgtatagtcaatctctttgatttaaaacgtgttttataatactgcctagaagtgcaaatctcttccaaaatgaatgtattgccttgttcactaagtggtatttaaagtaactacccagaaaaaatagaactgtcatatagtgaatggtataccatatagcaactgtacttagtgttatctatttttatactacttttttccatggtgcactgttttttttccttctgtaattgttcagcatttcagcatggaagtatgaagtgtgggcaaatgttagagggcgaaaatatggctgtctctgtacattcgaagtctgcgtttattactcttatgttaaccatgctatcatcccacaaggacataccaactgtaaacttccctatgtcttagtttttatgtaagaaatgtatcatgcaaagtgagaattagcagccaagaggtaagtg

SEQ ID NO: 45552 - DNA, 714 bp, Bovine  19866881910614
  misc_feature (1)..(1): n is a, c, g, or t
nacagacaaatagaagtgtgtcgcatgtatatcaatagattctctcaaacactgtctgaaaccaattttacagtctatcactggaagaacacagtgcacaagactgaaaagtaccacccacactccacaactttgcatctgtattttgctacatcttttttttttttgctttactttaaaaatattgaatttatacttctgcagtagcaaggacacaataacaggcttctgcttagtcacaggacagaatgttgatgccattaagaacttctttattataagataatttatttcaggagaccaaaggatagcaatacatcactgtcaaagctagtggtgaaagctatgactaactgtaaaatactgtgtgcctttgaagggaattcttgtcaatgtctcctttgctaaaacaggttgacaataggttagtgtaggtccaatgaagatttaaaagcgttttgtagatgggtgtcagaagtcaacactatcttcaaattgataggcaagatgaccattatgttagtctctaacaaatagacagtcattggttgaaggaattcaataggaaaaaaaaaaaaaaacaccctctccctaatgactttactaaaagatggctttaagataatgcccaatgggatttattaaacagaagcatcactgaggggaatacattctgaagcaatgactaaaatcacaattaacaggtgcatttgt

SEQ ID NO: 45553 - DNA, 1372 bp, Bovine  19866881985242
  misc_feature (1)..(1): n is a, c, g, or t
ntttatgagatgctccaatcttgaaataatctaaactgttaatataaagcattggctcaggtgtataaaacagaaatttagtaccataatttgagcaaaaagtccccaaagttggggtaattaacagagctcgttatatatctggataatcaaaattaaactaaaattattcattattcatagaaaaatataaaacttcatggaagtacatcttgtttattagtcttatgagttcattgagactgtatatggggccttcctaggaggacatagcaattaaaaagaatcctgatagaacaagctcaggaactgaatatccttgccaatgtttctgagatgatttcctgcttgatattttataattttggttttggtcaaaaacttagtttaatggatggattctatttatatcctatggtgaagattaatgaaatggtgtcttggaaacagaaggtcagtgtatatattttacaattatgcacactctgcctcttttccacttgtaaaaatattttagtattaagctttattatattgcaaaaaaagaaatcaccataagaagatacagctacaaaagctatctaaaaagatataaaataatattctagtcccatccattaatatatcagagctatacactctgatttaataattttagagcacatgattagagtggctaatcagaaataagggtgtagctattcttctgtttgttatacgagatcttggatatttcttaaaggagaccaaaaaaataacaacttgattcaatcgtgcaactttttaccctcatttattgtatgtgaacaaaagatgagtgtcattcatttctattcagtttccagattcctgttgatatattgcaggaacaaggcaatattgtaaagtaagtatccttcaattaaaaataaataaattttaaaaagattaaaaataagagttgagattggctttttttttttttgcaacctagcacattattgtattaagattcctgctattattgcaactaagtgccacaaatagttgctttaaacaaataagttttactattgcatttttgaggcaagaagtacaaaattagtttttctgggttcaagaatcagtgatcacgtgattctatttttctggaggctcttggagaaaatccatccccttgccattttcagattttaaaggcttcctgcatttcttggcttctatctcccttctgtcctcaaatccaggaaaataacatattctcttcctatcttaaggaccttgtgagtacattggaccaactcagataattcaaaataacctttccattcaatggtccttaactcaatcacagctgcaaagtcctttgttgatatgtaaggtaacacataca

SEQ ID NO: 45554 - DNA, 1741 bp, Bovine  19866880068462
  misc_feature (1)..(1): n is a, c, g, or t
nttctgacttacttcactctgtataataggctccagtttcatccaccctcattagaactgattcaaatgtattctttttaatggctgagtaatactccattgtgtatatgtaccactgctttcttatccattcatctgctgatgggcatctaggttgcttccatgtcctggctattataaacagtgctgcaatgaacattggggtacacgtgtctctttcccttctggtttcctcagtgtgtatgcccagcagtgggattgctggatcataaggcagttctatttccagttttttaaggaatctccacactgttctccatagtggctgtactagtttgcattcccaccaacagtgtaagagagttcccttttctccacaccctctccagcatttattgcttgtagatttttggattgcagccattctgactggcttgaaatggtacctcatagtggttttgatttgcatttctctgataatgagtgatgttgagcatcttttcatgtgtttgttagccatctgtatgtcttctttggagaaatgtctatttagttctttggcccattttttgattgagtcatttatttttctggagttgagctgtaggagttgcttgtatatttttgagattagttgaagtacagttgatttacaatgttgtgcttaatttctcctatacatcaaagtgactttttaaatagtcttgtcaaaaatcaaaaactttgactgtgctagtgaaagtaggagaaagcagacactcttgtacattgcttgtgacagggtaaattggtggacaaatgtatacatataactgattcactttgctgtatagcagaaactaatacaacattgtaaatcaactatattccaacaaaaattaatttaaaaaataaaaaaatggataaaacatgtgttggtgagggtaggagaaagcaggcattcttatacattgcttgtgacagggtaaattagtacaaattctaaaaagggcaatttggaaatattgatcaaattacaaatacacatacattttgacttagcaatcccatttctagaaatggaacttgttaagtataggatccatgtgatataacatgtatacatggttacttttgttgcatttcctttacaagcaaaatgttgaaaatattatgaatgtccattcctacctccttagataatttaagaaacatcaatataataaactattattcaccataaaaagaattagggagccctttttttcccactgatatagaaggatcttgatcactgctaaggaagaaagttaagtgcaataagtatagttcactaccacctatgtaaaaaattgagaaatatatttgattgtatataataaatatctctaacagagggggaaaaaagacagtgaactctgtgattgggaaacctggataggaaggaagtttgaaccatacgaatcttttttttttaagttacatattaagtatataatctggtcatagtggaaattaggcttctaggaactcatcatttttttaaagtatgtacaatttgaaattaaaagtaagaatgaacttaatcacctccacaccttagtcatgtcagtcttctgacccaggtcatcatgcacttcacctgccaaaaccaaaactgagaattaaaaatagatgaaattgaaactagatttacacatttagtttgaagaaatatacttgtttattaaagcaccactactagagaacattagagttcaaa

SEQ ID NO: 45555 - DNA, 1218 bp, Bovine  19866880412578
  misc_feature (1)..(1): n is a, c, g, or t
nctgaattagaagccttggctccttaagtagtggttttcaaccttagctgcagattagaatcactggagagctttaaacaaacactgatgcctgggttcttcgtgccttcacaagagtctcctttaactagggggtggtttccccagtaatctaatgtgatccccgtggttttgtagccatgtcaggattatctggggaacttttgaaatttctgatgcccaggctgcaccccaaataaaatttaatgagaatttttgtggatggaacctggtatcagtattttttaaagtttcccagctggtttcaatatctagttaaggctgagaaatagaaaaatctagaaaagaaatcccttccacatagatctaaaaggtggcatcttacatcctcttcaattcacctgggtctctgaaagctctaaaactataggctgaagagttgtgatacaactgagtcacaaggtaaagtgcatgatcagatactctggattgataagaaatgaaagtgatgatcagttcaaataagaatctataaaataaataagaaatacacctgtggcaatgagctgttgttagcatttattaaacaccagacactggtattagcctaaaaacagaggaagaccataaaatggaaaattattcttaatattagagttttcaaagaatagctaatatttccaaattgagctatttccaaatagctgttatttccaaatcttccataatttaaaccttgggaacttaaggaaatgcaggtcaccagttctataggattccattttgtcagtaattctacagttttcattaaattccatagatatgtttgtcattgtctattttttttaaataaggttgttgtgatttttttatttcttcctttgacagtgtgagttatttttttcttttagataacctactaagaactcattgaagcataagcaagtttaccatctttatatttagaggagatatgtatatttgttagctactagcagagattcttgttgagcaggaacttatccaaagaattgttgacaattaaatcgctgaagattttgtggtcaaagtcaaatccaacaacagtgtgtttattttctttttgccgattgttaggccatatcccatcacagtctaacaatccaaaagagaatattgccaaatcactggccagttttcagaatggctaacccttttcttactatggaactttcaatg

SEQ ID NO: 45556 - DNA, 1657 bp, Bovine  19866880431431
  misc_feature (1)..(1): n is a, c, g, or t
naggcctccctgtcctaccactcctggagttactcgactcacattctcgagtagtgatgccatccagccatctcatcctctgtcgtccccttctcctcttgcccccaatccctcccagcatcagagtcttttccaatgaggcaactcttcgcatgaggtggccaaagtactggagtttcagctttagcatcattccttccaaagaaatcccagggctgatctccttcagaatggactggttggatctccttgcagtccaagggactctcaagagtcttctccaacaccacagtttaaaagcatcaattcttcggcactcagccttcttcacagtccaactctcacatccacacgtgaccacaggaaaaaccatagccttgatcaacagggtccaaatgaggctttccctcaataatcatagcaatttcttgatttgatatcgaagagagaactgaacatagtgatttgctgtctttgatgcatcatattgacatgtatgaagtggaaattctattacactgactttctctattatcttaaacaaattattaacatagtatgtgccccaggctccccctttttaatgacgggttgataatatctgccctatatttctcataaagttgttcagtaataaatatgaagatgacccaagaggatctggatagtgtggcaacaagagttggatagaacctttcctgcctattactgactaagaaacagtcctcttcatctggacttctgggcctcctattccaaaagtaaacaaatgatctcttactaaaaggtatcatcgactgaaaaagatacacaatctaaaatctggtgattgtattttatttggcagacttcctgaggacttaagctcagatagctctgagggactgctctgaagaggaagggaggagccaggatatacaggggtgtttgcaacaaagatcaagtagttggaacaataaaagattactgttaattaaagaaaactagacatctcaagctaatgtttagcatgcttttctctgtatgggaagctgcaagagcctgggcccactgaaatcattcctaggatacgcaccttaactatacaagggtcagtatcatgttcttttccatcctgaatcccctcagggtacactgctggaggtggttgccgtggctgagggcttgatggcttcaacatcattaaacaatatggcaggcgaccttctccatccttagtatatcccacacactcctattgggtatactcactgttgttgttgttcagtcactaaattgtgtctgactccttgcgactccatgaactgtagcacatcaggcttccctgtccttcactatctcctggagttgtctcaaactgatgtctattgagtcagtgatgccatccaatcatcttatcctctgtttcccccttctcctcctgcctttcccagcataagggtcttttccagtaaactggcccttcgtatcaggtggccaaagtagatgctgagcttcaacttcagcatcagtccttccaatgaatattcagggttgatttcctttaggaatgactggcctgatctccttgatgtccaagggactcactgtatattattatatagatcggatttacggtctttattttctttggctaagtattacattttaaccaaca

SEQ ID NO: 45557 - DNA, 1611 bp, Bovine  19866880471017
  misc_feature (1)..(1): n is a, c, g, or t
nctttctgggaaagtttcgccctgaatatgtataaaatacgaaaaaatttttcctcattaaagatttcttgttactttgttaatttaagaacataaaaatgtgcttcacttaaaagaatcatttacgcaagttataattataaatctctattgtgtttgccttgaaatgttttaaatttcagttgaaatgcctctaaagactctaactttaagtgtatctacattaattagttttgggaagctgttagaagaagagcagggaggaacagaaagagagaaggaagacataagaacagaagaaactgtgaacattaaagcaaaacaaagaaaaaccatctttattggtttagtgtcctttcctgtgctatggagactcaaaaaggtactcatttttcaaaaagggatcttgggaaaataggaggggaaaaataagtagtacttatagttttgccatgtggagttctacctaatcagtctcattttcaaagctatcttgatttatcatttctccactgacccttcatttttattgtctgaaagcagaaagtttactcagattaagaaaagcttctttacttttttaacatgagagtttatttcctgatttaatgagatcatttccaaataaaaattatattcattcatatgttgctgaaaacagaaaggtggcaccatattataaggaaaacacgcttagccgaattccagtctacattcactaggcataagtatattcttaacatcaacatctatctgcatagcttatattagcagttttctatattaccaataaattttatctttattcctcttttgtacatatatataatgttagattctcatgatttgcagcagcatgatttacaaaatattctgcatcttgataaagcccttcaattttctttcctccacattttaaaagagagaaaaattcagagtacttaaaataatgagttttatctacatcagttggaaggagtgtgtggcagaaaatcagtttcactgactaaagtccctctaaaatgcacgtggcattatacagttaaactcagaagagtttataaacagcctcaggaacaaaaggttctgcagtggataaaggttttcagctacctcttaccaaggagaaatcctttttctactaactgcaaaaagacatgcccccatatcccattctgacaacttttcactacagagattcagcaccacaatattatttctctttttcttcttgtatctttggaaaagagtcattacaacatgaacccacttcacatatcttgtacttgttttcgctctcctatggatctcatagacgatatctaatttcatgataaaactctgaaaacaatgttgtgtatgtttgaggtctcctcaggaaggcagcacttactcatctatctcaaaaagtcaacaggaataagcccttaaacaaataagacactaatttcttccatctcctgaaagaagaggcttgccctaaaaagggaaaaacaaaattcactgaagtctttgacactgaaaggttaactgcactacttctcatatatgcactgatcagaagagttcaatattaaaacatttctcactaaaggtcttcagtgaatactt

SEQ ID NO: 45558 - DNA, 1220 bp, Bovine  19866880598608
  misc_feature (1)..(1): n is a, c, g, or t
nattatactgttgtctgttatgtgtgcaatagcattatgtataagaatatacatacttaattaaaaaatactttattgtgaaaaaaatgttaataatctgagtcttaggtgattcataatattttggcaatagtaacatcaaaaaatcactgatcacagatcaccatgagaaatacatgtgtttgtcactagtcatgtctgactctttgtgacccccatgcactgtagcctgccaagtttctctgttcacgggattgtccaggcaagaatactggagtgagttgccattttttctccaggggatcttccccactcgaggatcgatcttgggtttcctgcattgcaggcagattctttaccagctgagccatcaggtgaaaaagtttgaaatattaaaagaattacaaaaatgtcacatagtgacacaaagtgagcaaatgctgttagaaaaatggtgccaataaacttgctcgatgcagggttggcacaaatcttcaatttgtagaaaacacaatatatgtgaagtggaataaagtgaagcacaacaaaatgaggtatgcctgtatttccactttatactggtaaaacgtacgaaaatgttatgcgacttttgcaagataacacaccagagtgatgatgcagacatcccaaattcctcttcagtctgctactagggatctttttatgaaaatacatcaaagaaatcccttgaaatataaggaatcaaaccaagatattaatgactggtacctgatattgtgtatgtgctggagtgggagtaagaggagagaagagaggaaaagaatgaagtgcggggaaaaaaataaaaatacacttaaaacccagcatgaataaagtaagctcttctatataaaagtatctttgtatgtaaaaataaattagaaaaaattaggcagagctagatccatatttactgacttataataatgtccaagataaattgttaagaaaactggttgcatattaatctatgtactagaattttttttgttaaaaaaaaactacttacatatctatccatatatatgtgcgtatatgtataagcaagtagaaagtgtgaaatcatgtacaccaaatgttaacattagttacctctctgctgctgctgctgctaagtcacttcagtcatgtctgactctgtgtgaccccatagacggcagcccaccaggctaccccgtccctgggattctccaggcaag

SEQ ID NO: 45559 - DNA, 1518 bp, Bovine  19866880616123
  misc_feature (1)..(1): n is a, c, g, or t
nctttggcccctcatgtaaagagttgactcattggaaaagactatgatgctgggagggattaggggcagaagaaagaggggacgacagaggatgagatggctggatggcatcactgactcaatggacgtgagtctgagtgaactccgggagatggtgatggacagggaggcctggtgtgctgtgattcatggggtcgcaaagagtcagacacgactgagcgactaaactgaactgaactgattcataaaggacatgttataatggttattcttttgcttccaaactttcagtggtataccctattaaaagcaaaacaaaataaagcttctttttcttggaattcaatgccctccaaaatttgactccagcctacttgtacaattttctcccattattcctctacaacttacatgggcctttggctccaaactgatttgctcgttgtctttctctcccatacaaattgccagaaacttttcttgcatctgcccaccagttcccgtaattacatagagtctctatttcagtattttccaagtattgcctcatggactggctgcatggaatcacatgacgaactctttaaaaattttcaaatgcccagttcctactcctaagaaagtctgatccaataggtttgaggggaggcttaggaatcagtattttaacagcttccatttagcaacatatttctttcaaagccaaattaaaattcaagtttctccataattttttacagttttctaatctgtcatcatctattttactttaagaatgcattgctatactacaaaagcaatcacctctattttattgttcctcataattttagcctattttttaaatctgatttacaagctatttgaggagagattaccttacaacttctgcaaatctctagtacttattataaggctttgtacttggcagactctcattaagtgctgaaggacagaataatgcataaaccccatgttaactagtgtgtcatactttaaatcagcaaatgtaaattgttaatactccaggattcaaagaattaatgtgtgtcttaatcatgctaaacatcagaagaacctaagggtaaagattgattaaccagaagtatttgttaaatttccctttaattttcattacatttttggagatcatctaattagataagaagcacaaaattccatggtttattcaaactatagttcatctcagatcatattttattatgccagctcaatcagctccatgtttgattccaaacatctctagttttctaatcagttataggtttcatttttagttttggctaaacctctcttgaacctatttatatttttcgcatgcagtacttacatgtgtaacaactcacatatgctttctgtttgctgtgtagtatagcacgtctatttctctgccttgctcctagaacattaaggctttaggtgcatgctagttctaatatttcataagttgactaacaagtctctattctgcttctccatatttttagattttataga

SEQ ID NO: 45560 - DNA, 1238 bp, Bovine  19866880622857
  misc_feature (1)..(1): n is a, c, g, or t
ncagagaagtgaaagcaggtaaggtgaacgggaatactgctgaggctgggtctcaaaggggcaactgtgaatgctaaaatgagcaacaacatcacctgggaacttgatagaacttgtgccactcaaacttcctgagttataatctaggcatggggctcagcaatctgtgtttcaacagaccctcctggtgatatctatacatattaaaatttgaacactactctaaacaagtcattttgatcctgaaaatatgtccattcatcaaacttctgggcagtcagacaaaatggatgtataaccaggggcctctgaaatgggccaggattcaggctgaagaacagttagctagacattggcaatgaggcaaaggtttaccttcctctcccgtctaaagataccatgtgaaaccttccaaattctcaagagaaaggtgtctctgatgtatattgtttgcctttgctgctgctgctgctaagtcatgtcagtcgtgtccaactctgtgtgaacccatagacggcagaccaccaggctcctccgtccctgggattctccaggcaagaacactggagtgggttgccatttccttctccagtgcatgaaagtgaaaagtgaaagtgaagttgctcagtcgcatccgactgttcgccaccccagggactgtagcctaccaggcacctccgtccatgggatattccaggcaggagtattggagtgggttgccattgccttctcctgtttgcctttagtcttactcaaaataaaacattttcaaaaggaaagtaaatgtgaaggaaaggtgaaaaatgcaggagccacacatatcacttagcattgctcttgggaatgccaggccctgcttcctcacctggcattttcagttacctcccacagagcttgctccaaggcctgcacccagaatcccctgcagtttcagaatctatagagcaggggtgtggatcaaatggagtggccataaggacactactcttcttctgtagtggactcagtcaaccaggaaagggttctagtgagacctgacgagatatttagagttcttcaatcactgcagcaagaggatgggcagaccaggagtgaggcacatgggtgaattcagttctgcgtgacccccagaagggacctctgtgggtgtttcagtgtgtacttccatctctgagcctcagctggctcatattcaaaatgaaaggtgctgtgtgccaagtcacttcattcatgtctaa

SEQ ID NO: 45561 - DNA, 3520 bp, Bovine  19866880740050
  misc_feature (1)..(1): n is a, c, g, or t
naaatggtatggatactgtgaaaaagattgagtcatttggttctcctaaagggtctgttagtcgaagaattattatcacagaatgtggacagatataaaatcattgttttccatagtaaaatttacctgtatagaagttgaattgaggcctagctgttttgacaacatggtaattaattatgttcagcttttgaaaatggacatttccaatgtacaaatgtaaaattgcagcttatagctgttgtcactttctaatgtgttataattgaccttgcatggtgtgaaataaaagtttaaacactggtgtaaaaaaaaaaaaaaaaaaaagcattttgaccatatacagccttgactttcccaatttggaaccacttttatgttcagttgtaactcttgcttcttgacctgcatacaagattctcacgaggcaggttaaatccaatattcccatccgtttaagaattttctacagtttcttgtgatccacacagccaaaggctttagtgtaatcaatgaagcagaagtatatgttttcctggaattctcttgctttttctatgatccaatgagtggtggcaacttgatctctagttcctctgccttttctaaatccagcttgtacatttggaatttctcagttcaggtaatactgaagccttgcttggaggattttgagcattaccttgtgagcatgtgaaatgagtgcaattgtgtggtagtctgaacattctatggcattgccctttatgattagaatgaaaaatgattttttccagtcctgtggctactgctaagttttccaaatttgctggcatattgaatgcagcactttaatagcatcatcttttagaatttgaaataactcagctgtggatggtttaagactatgcaaatattcttctcttcatcaaatctttcccacatacttattagttattgatgtttcttgcctgatgcactctttactatgatgattcaaaaatgttaattttccagctcccattccctctccacatttataagttggctctcagtattttttggtaagcatgggccctccatgctcactcatatttattcatgtattactagtatggatgcatggcttttaatttttttcaaaagttcatcatcaaacttaagtatattgatgatcaaattattccacgtttggccagttagaaccctttacagttactaccttggtccttgtgacatgatcccttttttttttttaatgctttcttacttttaagaatagcaagatgttccaggctcacattttacctacacttccccatccctggagttagctatttatccaaagagccttggttccttttaatagataatggtattagagaccaggctctgggtcttaggtatgatcattgctactaagtgggtctttggttctcagccatttcaataggcagagctagggaatagttacatgtaaatatacctgtacatatacatatacctacacaaacatgcatataaacacaatacataatgacaaatactcatatgtttgcttgtgcatattatatgcatacacataattataagaaaacattggttcacactgatttctccagtctcaattcataccactaaagttctttcttgccttctctcattctatatttgcatgtcccttcttccacagtaggaattctgactttcatcaacattaacccatttgctcaatctataaggcatctaaaacaatttcagaattgctttgctcatatttctataattgaaaaaagtgctaaaaagagttcataatttgcaattcttctccactcctcatgctcagctttggccgagattgtgggtatatggtcaaaaaattgcgttactagccactatccccatatatgacaccctaatacgttaaagccccaaggattacagtaaggaaatttattggctaaagatctaaatgaattcagggtacctaaagaacccatggttttgatgtgtattattatgagagacccacaggtctgctctataatggggactggtgtccccatgtccccatgtcctatgtttcaattcctataaaaaatacaaatggaattgatttgggctcagagactaagagccatgctcctccagattggtttctctttgatgtagtcaatcctccactatttgcagagtgaaccataaatttggtcttactacacttcttaaaacctgcaggctaccaactcatcaccaaagtgagaatgtagcttcccatctccaagttcagcttccagagttgaatccatgtcctctggacagagccagtatattaactggcagacaactggagaaagcacagttttcctataaccattcggaatccctcctttgatgtggggttacagttctctcctgcatgctgtagtacacacaatttcatctgaatgaaatccagctctgataaccctgggaagccacaacatgccaggaaagagagatttatacgggtagttcttttccacagcaagaaaataatcaaggtagaaaagattgtcattgaaacagcagtgcttccaagagccttctgctctatgttggaggtggtcctattcagtcttgacccctttagttacagtcttctgtttgtaatcagctcatgatgaatagagagttaataaaataaatgttaagtccttaatgacaaagtccccgatgtgatttacatttctcttgactttcaaaagtgactaggaaaggaccatagagatagtgttggagtgtggcagaatcaagtgaggactgggaacaagggactttgttctaaatgcttatccctggtctcagagcatgaatttgattagtacacctatctcaaaatcctgcctttcttctcccatatctttttccaccatttgttccctctgtctcagaggcacttccttaagacagattcaaacacaaaagttatgtttggcccaccacttctccttccacttgaatttctacaatgtataagaatgtgagccatgctctcctagttcacgtgatcttttatacctgcaaattacctggaacacaattcataaccctcaaatataaatgtaatggtcttgttcttctttccagttctagctggcagtagcaattgtagattgtggtaggcagtattggaaatgccactcctctttccaatgatcttcactttctgtgtaattccctcaagtatgatctggatttgaggacttgcttctaactcatcagatcagatcagtcgctcagtcgtgtccgactctttgcgaccccataaatcgcagcacgccaggcctccctgtccatcaccaactcccagagttcactcagactcacgtccattgagtcagtgatgccatccagccatctcattctctgtcgtccctttctcctcctgcccccaatccctcccagcatcagagtcttttccaatgagtcaactcttcacatgaggtggccaaagtactggagtttcagctttagcatcattcctcccaaagaaatccca

SEQ ID NO: 45562 - DNA, 1661 bp, Bovine  19866880749799
  misc_feature (1)..(1): n is a, c, g, or t
naacctgggcaactcacttcccctccatgaaaaccagggttttcagagccataaaaaggtgacaagccacccaagcagcatcacagctgtataaagacttaggaagtgttcagcatcctgccttgtcagctccagaatgtttggcacttgtttcagttcagttgctcagtcgtgtccgactctttgcaaccccatggactgcagcacaccaggcctccctgccatcaccaactcctggagcttactcaaactcatgtccattgtggcagtgatgccatccaaccatctcatcctctgtcgtccccttctcctctgccttcaatctttcccagcatcagcgtcttttccaatgagtcagttcttcgcatcaggtggccaaactattggagtttcagcttcagcatcagtccttccaatgaatattcaggactgatttcctttaggatggactgattggatctccttgcagtccaagggactctcaagagttttctccaacaccacagtttaaaagcatcaattctttggtgctcagctttctttcggagaaggtgatggcaccccactccagtactcttgcctggaaaatcccatggacagaggagcccagtaggctgcagtccatggggtcgctcagagttggacaggactgagcgacttcactttcacttttcaccttcatgcattggagaaggaaatggcaacccactccagtattcttgcctggagaatcccagggacagaggagcctggtgggctgccgtctatggggtcgcacagagttggacacgactgaagcgacttagcagtagcagcagctttctttaaagcccaactctcacatccatacatgactactggaaaaaccatagctctgactaaatagacctttgttggcaaagtaatgtctcagctttttaatatgctgtctaggttggtcatagcttttcttccaagaagaaagcttttattccaaggagcaaacaatgtagtataacctcaataataattggggttatgctacattaactcacctaaatggactttaaattatttaaaaacatgcttttatttctcaccacacacacacaaaatgataactgtgtgatgtaatagaggtattagctgatgctgtggtggtaatcatattgcaaaatacaaatatagcaacatgttgtacaccttaaacttacacagtattacatgtcaaatatacttcaattaaatgtatatatactttgtattacaatgactagaaagagggtatactttttctgaaagaggatatcaacaacaaggtaaaatgaaataagtatagaaccattaaaccttaaccgttaacttcatcctttatccaaattaaattttttcccctaaatgctaacaaatagctaaactgatatgactttattttcaactcttctttgttcatattcgtcagttgttggaagtacaaagaggcaaaaaaggccaaaaacaagttataaggagaaaaagggacatgtatatttcaaaaactcaataacttctttggtatttgagatgttacatgaaatatgaaattattttaatatggctctgttttggtaggtgtatcctgattgtttggcacaagctatctacgcaacattccaggaagcatttccagaatccagtaatct

SEQ ID NO: 45563 - DNA, 1092 bp, Bovine  19866880770363
  misc_feature (1)..(1): n is a, c, g, or t
ngcaggataatacattgatttgcagtctccatgcctgagttgttattcacttgacaggaaatgatacaaatatttttaaaaactataattctttggtgacatgaagttatcattttatctacaactcctggggtattttattaaccatgacaggatggaatggaatgggactgactgataaaacggattccctaaaccacattttagggagcctaaagattgggtgtcaggcttctttctcaggctgatgccacagctaatgggaagcttatggtaaagagtgcctattgatccataaatcagcttgggacagaaatttaatgatcctattaaggtggctcatggcattggtccagttaggcttccacagacttctgggctatagaaagacaccatccaagtaaactaccagtcattctgaaaacagttgtctcaattaattccaacatatagtttgcaatcattctattattctaatcagtttgtatatgttaggctacatccatgaataaaagtatggatatagccataaatgaagaggatatgcacattaagctcacaaacaggacttttataattactaaaatcactcaaaaaaccaaagaattttgaaactgaaaaaaattacttgaatcgatacttcttaaccaaatttaccaaaattagccattaactaaatccttaatgcagttaaaatctgatttctctctacagcgtcctatctcagaaatcctggagacaggtgtctaaatgcagacctcgtaagttccctctagagatgatgaccttttgattgaatcagctgtataatatgtgaggcccagcataaaatgaaagtgcagggccttttgttaaaatattaggaacttaatgatagcagaacattcaaccaagtatgtttgatgacacagggtataaacccatgaagcaggccctgtcctcagggcaaggcctcaggattgctgtattccagctccccttctgttgagccaccaggaacacatgacatttcactgtgcattgccaactgttctgtgagaagatggtccggctatctataggacatctgcagggacagcaacaggaggaaaa

SEQ ID NO: 45564 - DNA, 1980 bp, Bovine  19866880815877
  misc_feature (1)..(1): n is a, c, g, or t
ngacgagcttacaatttttcatataaaatccgtaatactttaattctcccctcttagatgataatagttatatctgacaaaaagtgttagtgaataacatatatcaggaaaacactagtgattatgacgtgtgtgagagagagagaggctacatgcaataactcaactgtccattcaagtgtaggtacagatagaacatttccaaaaattttctgcatactaagtcaaaaataaaatcccaacaatatatagatcttactaacccttcttcttccctttttacctaactactgtagtcagtagttctagctacttctttgtattcatccccaactccttttacaatttgccaactaaaaatagttaaaataattaaaaatcattctccatctgtacacatctgaaagtgtgcagctaaatgtacacagagaacacattcaaccatgctaactagtctcatttttaattcagaagtacacaactccagtgggcctgaattctgtcaggtaatcatacagtttcctctggtcctttatttctaccactcatgaagccaactatttcccccttttatcttctcatatctccaacactctctcccctatactcaatctcagatagtgattttgcttcctacttcagtgagaaaattaagacaatgagaacttccactaactcccaccaccacagtatacccaggtaccaacattattttccattcctctgctttcccaggcttcccaggcggcacagtggtgacgaatctgcctgccagtataagaaacatgagagacacaggtttgatccctgggttgggaagatcccctagaaccagtattcttgcctggaaaattccatggagagagaagcctgatgggctaccatccatgttttcacaaagagtcagacatgactaagtgcacatgaatactctttcccttctgtgctcctgtctaaggtcaactttgccaagcacttcacaaacataatgttcacttactctcctagtgattctttgagaccagtgttcatgatactgttttacagctgagggtacaggttcaaagtcacatcattagagagtaactgttgcaacgccgtgttacctaccaccttattactcaaaaggcaactccatggactgtggtatagcacaccaaacacctgtggtgttattaaaccccatacctaataacaaaatcaaaaactgcacttgaaaaagagtccccacaattatttccttcaatgaagaacactagctatctgtgccattctcttctttcccatggattttccactgtagtataatggtaccaattattttagtaataaaatttgttcttagatcatattgtagtagcactcagtctttccctataagaaaattttattaagaatgacatgtcttcccaaggtactaactaattcaaaccttccataaattctattagtgctttgtggtcttaaaatgaaacttctgacggtgtctgttctcttggtatgattgattccattaagtttgaatttggttagtctcagtagtcaggataggagcttagtggtagtagatcaaagaatttggaattaccagcattaaaagagccaattcttattctaatcattcattttaactattaattcctcattgacatagaaatcttggtttaattaaaagcataaattaatttttcaaatttgatcttgcaatatgaactttctttaagacatattattggtgtttactgggattaatgttgataatccacccatggaagaggtttgagagcctagaaatttttttaatggtggaataaaatgctagttcctttgtttaggaacgaagtctaacttacagtaattattctaatggaaagattttggtgaaagggtggggaagtgacactgcatcactaggacctctgctagcatttttcccattagagcacaatgactctaaacagagtagaaattatatgggtg

SEQ ID NO: 45565 - DNA, 2201 bp, Bovine  19866880940367
  misc_feature (1)..(1): n is a, c, g, or t
nattttgattttctagtgactggtcaaactgtacagcaggaggaggcaaggctcccatatggtgacattgaggagaatgggtcaaccagactaagtaacatttcattgttatttaatgtttcataaataatgtttcaaagtgagaaaggattttaacaaaaggacatggacaaaagtacaggcatagagatggagaatgtataaggttttgtttcaggctgaccaccatctatgattcattttgagaaattgtaggaaaagtatctagggatgatggataaagccaaactgtgggtggtggtgaccttgaaagcaagacaaaaaactaggattttcattactaaatgctataaagtcatgaaaggttcttaagttcttaagaaaatcaaagatatcaccgtgttgaatctaagtaggaagtcagatgtgaagatggtcagatgtgaagatggatcatgatgacccaacatttttttttttagtgccaaaatatttactgaaaattttcaaatctttcaaaactgttacaaaaagcaaacaaacacagtgaagctgataacagattagacactaaaaactaacatttggacaagtacacagacatgtaggagataagggaatatctatgagtattaactgtgattaaagcactatctcatttgatccctatcaaatgagcactatctcatttgacataagatctgcataacttatatgcccagtaagtcatgtgaaatgccaggttggatgaagcacaagctggaatcaagattaccaggagaaatttcaataatctcagatatacagatgacaccacctttggcagaaagcaaagagtaaataaagagctcttgatgaaagtgaaagaggagagtgaaaaagctggcttaaaactcagccttcagaaaaccaagatcatggcatcttatcccaccacttcatggcaattagatggggaaacaatggaaacagtgagagactttattattttggctccaaaatcactgcagatggtgactgcagccatgaaatcaaaagagcttgcctcttggaagaaaagctataacaaacctagacagcatattaaaaagcagagacatcactttgccaacaaaagtccatctagtcaaagctttggtttttccagtaggcatgtatggatgtgagagttggcccataaagaaggctgagcaccaaagaattgatgcttttgaactgtggtgttagagaagactcttgagagtcccttggactgcaaggaaatccaaccagtccacctaacagaaatcagtcctgaatatactggaagactgatactgaagctgaaactccagtactttggccacctgatgcaaagagctgactcatttgaaaagaccctgatgctgggaaagactgagggcaggaggagaaggggacaacatacaatgagatggttggatagcatcaccgactcaacagacatgggtttgggtagactctggcagttggtgatggacagggaaggctggtgtgctgaggttcatggggttgcaaagagttggacacgactgagtgactgaactgaactgaactgaaattattctctttacaaaaattaacgttttcatcatgttgcatgtatgttttcaatttgtgagtgtttaaaaaaaagttttttttaatttttatttatttacttttggctctactgggccttcattgctgtgctcatttctctctagttgtgctaagtgggggctactctcttattgtggagcacaggctctaacacacaggcttgagtagttgcaacatgcaggctctagagccctgggccagtagttgtggtgcacaggcttagttcctcagtggcatgtgggatcttcccagaccagggatcaaatttgtgtccgctgctttggcaggcagattcttaaccactgggccacagtggaagtccccatgactctgtttctattacagttcttttcacttatatcatgaagatatttattttattttcaaaaatatcagtaatttaaatacttttgttattttggttgtgagaaggaaaagggggaaggatattatgactaatattcttattaagagttaaatattcctttaaaatattttactaattatgaaaatagctacaggtatttcaagacaaacttttctattaaacaatttgaatatttctaaagatattcaccaaa

SEQ ID NO: 45566 - DNA, 1446 bp, Bovine  19866880994266
  misc_feature (1)..(1): n is a, c, g, or t
ntctttttctggtgcttctcaaaagctgcttctgtgctgggccctggggtgggtgagtctgcctgtaggcactttaaagagctgtgcttcagtttgccgtagtcctgccctgttggtctttgaagcagatgctttggaggctgtctctcaggtactcatctggaaagttggggtatgaacccttcgcttctcaggttgaagctctgggttttgagttcccttctcctttgtgtggggatgagattgtgtctcagactttcctacctgctttgattggtttccctcttgtttgcctgatgtgaagggcatcacccagctagtttttaggtgtttttcagaggaacttgttccaggtatagctgttgatgtggtgtgtctatggggaggagatgacttcaagatcttcataagttgctaccttgagctggaattctgcatttgctttccgaagagatttgacttttttggccatttccagctaagggccggtctcagtgtcctgaagatgtcaagttcctctcactatgcatggattgtttagacattttaccattggctccataaccattaggtcagtgacctcactggccacttcagtatggttttgtttggctatattacgtcttacaattctatagcaaaacaaaatttcctttccagtgtggcatttgacatagctttttttagaaactttttagaaactacctgaagttaacagaaagggtctttatggagtgaaagggatatagaaattggcgacacatactgttttgctttatggctggcgttagaaagacaatgaaaaacacttcagctttccatttggggacttttccgatacgtgttccaacatttaggctggaaaaaaaccaatgcccttcaaatttcaaaagaaagaattcttgcaaccttgatgacaatcaaagtaacctatgtgatgttagtttaatgagtcgtatgtttcttttggttgaaaatttaatttcttacctgatttctctttctctttagaagtggaacggatagtaaaagccaatgaccgtgaatataatgagaagttcctgtacaaagtgagtaaaacacatatcccgcacacaacctggggtaggtcttaagatagtaggattcataccttctagaactttgacttcactaaaaactttgttggcccattttaatagcaaggtgccatatgtttcagatttttaaaaataaatttagattttagtaatgtttatacacttatttttttacacattaagaatgattggtattcatattggtatgggaataagatgaagtatcttcttaagaatgatgcttagtttattctggtgcccattgggcacttgaataatgtaaggatactatgaaaacaggcttctatggtagtactttgtgatagaagtggtgaaagtggctgatgggggatgaataacatttggg

SEQ ID NO: 45567 - DNA, 1067 bp, Bovine  19866880995090
  misc_feature (1)..(1): n is a, c, g, or t
naaaaatcccagaacaggaattacttaattcttttcatataactacagaagacaggtaaaaattctactagcattcactagcaattatattacaaacttttactaaaaataagtaaatatattttatcccacctaagaaaaatcttcaaatatccaacagtccattctgaaggagatcagccctgggatttctttggaaggaatgatgctaaagctgaaactccagtactttggccacctcatgcgaagagttgactcattggaaaagactctaatgctgggagggattgggggcaggaggagaaggggacgacagaggatgagatggctggatggcatcactgacttgatggacgtgagtctgggtgaactccgggagttggtaatggacagggaggcctggcgtgctgcgattcatggggtcgcaaagagtcggacacgactgagcgactgaactgaactgaactaaactgatgatattaagagccctggcatattcatatgtcaaaaatttaaaagtaaaagcaattatttcagaactaattttaacttaaattacaacaaattttagacgggctacacataaagaaattgatgagtcagaaaaagagcttctgtattttttccaactctctcttctggggccattatctatatttattgctgtattactttaaacattcttttagttccacataatatttttgatatataatctcataaaacagaaattttaaatacctctatatccttctttgtttccatttcatctgaaagctggaaaaaatttaaaataaaatctttaaaattctaaatttaagaatttttagactttgtaactctactaagtatgtgtgtgtgtgtgtgtgtgtgtatgtgtcttactgagacagagaatgctgttgctatataagatgctgagaatacaaaaatattccttgccctcaagttagtctgggggtaagaagggagtcagctacatatacaaaacacaaagacataagagctataacagaaatacataccaactacttattgcagttgatttttctgggaaacagactgtg

SEQ ID NO: 45568 - DNA, 1219 bp, Bovine  19866881032511
  misc_feature (1)..(1): n is a, c, g, or t
natttccttttggattgttaatgaaaagatacttttatctcatattaacagaagtcttcattacactttgccatgggctaagtactttacatgttttgcaatgctttatttcatttcatctttgtaacaaccccataatgaagattctaatatgattctcaattcactaatagagaaactgaggcttacagaggttggggatgctgctgaggatatagagataataatggtggagctgtccatactttcaatctgagaactacaaacatcagaggccatactcttcctctatcttttaccacccacgcccctagcatataaagacatattatttccctttgctaagcagtgtactgtgacaatgtttgaatccagtagaagaaacgtacttgatatagaattccccagacactggtatagccagtcagatggttcttatcttttgcaaacacatcttttccttcagtttcccccaccagacctgccaagtttgggatgggtatctgttatcaactcctggacctgtccagttggtatccagattggtccagaacccaaagaagcagattttaaatgacttgtttttgtgttgcacattgcagcctaggagaaaactggatagtcaccagcttataaaagtaaggaaatgagaaccatgcttaagaggagtaaggcctgccagtgagcagagacagggattaaactttcaaaatatgatgggcgattagggtggggcaggggatggttaggcagaggatgaatcagagtttgaaggcagccttagccaaagaactgaccgacagacagaccctgggcacttaataacctctggtaacttcgtaaaagagtggaagatatcctcaaggtaatttttcttcaattcttgtccattggagactgaggagcagtcatcactgggggccttcagagttgagataacatgctgattggggtaagaccaaaggcaggatgaagtcaaatgtacctgctgctgggacccagccacctccttggccttagagcagcactcaacccagtagcctcccactgtattgttaatacatgtcctgataatcactgtcccaggttctactaaaggcctgagtctttataatattgcttacacatggtgagtatcagatagcaagagaacaccacagtccttgctgagctgaagaacacagcctctgaggtcaggaaactaattaattaatggcgg

SEQ ID NO: 45569 - DNA, 1960 bp, Bovine  19866881041927
  misc_feature (1)..(1): n is a, c, g, or t
ntgactggcactattctagaaacttgggatacactggtgaacactgtgaattatgtcatggtgctgctgctaagttgcttcagtcgtgtccgactctcattaaaatctcctctttccttgactcaacttaaggttgctacatgggcttttaagataagttctaagaaagataattggtagaattgatgctgcggttgacatgcagcctataagacctggtatgattgagttactagcacattaaccagagtctgaattcacagaggggtttgatgactattaagatgtagcaatgtgagtttcttgggacaaactttagcagtgtccatccaggaactagctagaggagagagaattttggccaatggattatttttagtatttggttccttttgggaggtcatttccatatgtgtagatgaaagcattggacggctctagctcaataccaacagagatagctaaccactcctcttctcatgctgtgctaattacctaacttgtgattctctacagggagattctctacagcacactgcctctatgacagatttctcattagaataatacatggcaactctgattttattcatttattttataaacttggttaaagtaagcctccccatgagagaaggaatctctctcagaaggctaatgaatgtgctttctagcctggagtgggagtgggaggatgactttcttcatggtgattatttccactctgtgcagcctcctgccatctggtcatttagcctggctggtgatcactagacttggccccatgcctttctatccattttatagccagttccttaactcttaaggatgacccttgaaagccttgaccaccaaatcctaaataagaggagtagaaatctatattttaagatctcgggggaaaagttcagtaatctactactgggtaatcatgcatttacatatttggctatatccttatttttccaatatgtaagaagtattttcattctgtgagtagtgactgtataaggaaagccatattttttatgttacttgtaagatgatactgtcctttatagttatttttacttaatttatataatatttaaaacttagagaaaagtacaggaaataatatatcacctgtatgcccactacacagattaaataggtagtaaccatttgccatgcttgcttcatctttcttttactattaataataatatgccaatcataacagaggtttttattttcttgagcttgcatgatattgaacagaagcacacagatgtgtgtgttttctattggtcttcttaacagtgacaaggcagtagaacaatattctgcagctgcagcagatggaataaggcagcttcatctctgagtttaaacatactaaggaaaaaacaaagcccattaaggtctaggaaaaccaagaatgacaccaagagttgagagaaggaagctgcagagcagagaggggcatgagtgtcctgggtctaatgacccttcccatggctcaaaggggataagccaggccctcctacagtgaacaagggtccctaccagacctggctgatggtgtgttgatttgggaactcccaataggatgtctggccacacatgagttgtaggacttttctcagcctcagtctattcagataaaaattacagataataagtgtagtgatttcataaacttattgtatggattaaagcagaataacaaaaagtgaccccatgagctattctttatagagatagtatttgaatctatatctatctgattttaaggatttttaagcacttcatacgtgggctatccttttaggtaaggcagaagccatgggcctttcgctcagtctcgcgtagctttaaaggatattacctcaaatggaaaagggttttttaaaaaatgtgcagatctcaggcactagtaaagtaatgcttaaaattctccaagccaggcttcagcaat

SEQ ID NO: 45570 - DNA, 812 bp, Bovine  19866881407149
  misc_feature (1)..(1): n is a, c, g, or t
naatcatcttcagctgcccctctcaaaattcatctcagatttgtagctaggaaagttccagtgatagggcaggagagaagctgccgaagacccccgcccatatgtggtttatttcttacatttgcttaataatttttaaaagaagcaagaaattttcaaaaatcacaaaattgtgaataatcttgcaagtacatacgtttggaattcatttgtaatatagttcttgttattcaggccaattttttttcccctttaatgctgtttttaatgtggatgttcatggcttggcctaaaactgttatgtgaagaaatccaaggttttttcctctgggtctactcaaatatcttaaaagtgttccttttctttggttgagcacatactttattcattctatcaaatggtactttttgaagaattaatcaaaggaaatgaaacatattcaaaagaaggcagaaaattctggaaaaatatcccccaaagatgtagatgttgtcataatgtaatatagatatcaatagtagattaacaaggtaaagatgattcctgatgtaccatggtttaagatttatcagctttacaacagtgcaaaagtgatagcattcagtagaaactgtacttggaattttgaattttgaccttttccatggctagaactatgtgattacgtattcccctgatgctggtcagcaacagcaagacaccgctcccaggcaaccgtgtcatcacaaggcttcacaactgatacactgcacaaccaccctgtactcatacagccattctgagtactttcttcaataaattatatgggata

SEQ ID NO: 45571 - DNA, 1068 bp, Bovine  19866881937299
  misc_feature (1)..(1): n is a, c, g, or t
naaactaacacaatttgtaaagtttaaaaataaaataaaatttaaaattaaaaaaaaataaattgcatttgactataattttattagaattgaattagtatctaattcaccccagactttactacagggtagttgttcagtaaacactttattgactaaataaaagaaagatgacaattctaagcttcagaacaatgagcccattataaatattctgtgctcagaattgccaaccaattttaaaattgagcaaaataaaatttaaaattttactgttgcagatcatccaccatataatgtagtccaaagatattagtttttcagggcactgaacttagtgattcagatatttaattatgacaacacatattaagtgtctagtacattagtcttgttatacatggtaacagcagatggtatgtttgaataagtcccttttgaaacaccactgttctactttattaacaaagatcattttaaagtagcatgatctttaaaaaaaagatcatgttgcccagggaaacaaaaagtaaacatcaatgttttatttgttactttaaaaatactatgtaatacttttaaagtttattactactatttattttttaatataaatttatttattttaattggaggttaattacttacaatattgtgttggttttgccattcatcaacatgaatccgccaattactactatttaaaatcctttaatttgagtgctgatagtccctaatccggagaaggcaatggcaccccactccactactcttgcttggaaaatcccatggatggaggagcatggaaggtgcagtccatggggttgctgagggtcggacacgaatgagtgacttcactttcacttttcactttcacgcattggagaaggaaatggcaacccactccagtgttcttgcctgaagaatcccagggaccgaagagcctggtgggctgctgtctatggggtcgcacagagtcagacacgactgaagcgacttagcagcagcagcagcagcagtccttaatcaaactacagctacattcctatatgactttttgactgcttg

SEQ ID NO: 45572 - DNA, 2351 bp, Bovine  19866880179559
  misc_feature (1)..(1): n is a, c, g, or t
nttttgttgatcatgatggctactccatttcttctgagggattcctgcccgcagtagtagatataatggtcgtctgagttaaattcacccattccagtccattttagttcactgattcctagaatgtcgacgttcactcttgccatctcttatttgaccacttccaatttgccttgattcatggacctgacattccaggttcctatgcaatattgctctttacagcatcggaccttgcttctatcaccagtcacacccacagctgggtattctttttgctttggctccatcccttcattctttctggagttatttctccactgatctccagtagcattttgggcacctactgacctggggagttcctctttcagtcctatcattttgctttttcatactgttcatggggttctcaaggcaagaatactgaagtggtttgccattcccttctccagtggaccacattgtgtcagatctctccgccatgacccgcccatcttgggttgcctaatggcttagtttcattgaggtagaccaaggctgtggtccgtgtgattagattgactagtgcaactttaaatgtgagcactagagagtaggtgcctcagagtctagcagatgccttgttatttggattaaatcattgtagttttttaaaatgtcttattttttaaattttaaatatttatttatttggctgtcttgtatcttagttgtggcacagaggatctttgctgggtcaggcaggatctttccttgcagcgcacaaagtctccagttgcagcactcaagtttagttgctccgcagcatgtaggatcttagttttccgaccagggttcagacctgcaccccctgccctgcaaggcaggttcccaaccactggaccaccagggaagtgcccatctataatttttaaaattgtgataaaatactcataaaatttaccatcttcatcatttttaagtgtgcatacagttcagtagtgttagtatattcatattgtgaaagagatctccagaactttttcatctcacaaaactgaaatctacacccattaaacaataactctccatttcctgcacactctgccactggcagcctccgttctacattctgagtttaactactctagatgcctcatgtaagtggaatcatagcgaatgtatatttttgtgactggtttattttaattaacaaaatgtcctacaggttccttcaagttgcagcatgtgtcagactctccttcctttttaagactgaataatattccactgtaagtatatattccattttgtttatccattcatctattgatgcacatttgagtagcttatctgtaatgctttcagggtgtaggagccatctttacaggaggtggaccccgcaggcaacattatagtttggcttaaatcttcacctcctacagattctagccaccaactgcatttctttttcttttcctcatctttatttaatttttttatttgtatacaatttttaaaggttactttccagttacagttattacaaaatagcggttgtattccctgttgcatacaatacatctttgaacctgtcttactcccaatagtttacacctcgcactccactaccgctactactgcattctaattccgaaatgacaaattcgggggtttaggaatggtagctgaatcaaagtaggtacagaggcaaaataggtattttgaaaaaatacgtgaggagtcactagtaaatttctccccacattttgttattctgtgtataagagaacaaatctacacacacacacaaaaaagtttgaaaataggagtaatggaaagcattactataaaatgtaaagcctaaacttgacatcaaaacaccccaaattatattcattattctgaaaatttctatttgcctcatgctgaagcacagaatagaattttagagctcttttatgattatgcgtagctttttggtctattatccaaataggaggcctataatttatgcctcctatcttgaaaaaaatgtttttcaactttacattaaaacagaaaaagaatctttcaaaagccaacttaggtcagaagttagagttgtttcttcaactcaacaacgaataaaatttgggtatttcgtttttaaaaaagaacagtgacactctacgatggtgtctatcccatagaaatgttggcaatgtgtacaaggttgtacgaacaaaaacattcattggattgttgcctgtataaagagaatagaaatgtcgtaaacatcgaacgacaagagaatagttctataaatcacggtacatcaatactatagaataatatgtatccatttaaaagaaagtagtagatcacta

SEQ ID NO: 45573 - DNA, 1968 bp, Bovine  19866880344429
  misc_feature (1)..(1): n is a, c, g, or t
ncacaaacaaaatctttctctaataaaatgctcagcccaacaatcagcatgttaagaaaaacaatagcaaaaaaatctgaccaaaggattacttggctcatctcaatgtacatttatgattcaatagaatccatatcattgtcacagaagatgtctcaccataggtatgttagtgtactgcttcaacattatttttcttcctacagggtttgtctattgagtctacagtatggtcctggctcagtaaatggtttggtgggtaaatttaaaccaatatctcaaataggaggacccagaagcccctgtatgcttatttaactgaagggtgcaattctcctcttcacccccgccccgacccccaagcaggcaggattcagggcctcggtcccatttctctttaaactaggccttggtaacacaaatggccctgattacggacacttccttgccaatacacaagaatatgctcccttgccagtaatcgtatcacatccatatcactctacaaagccccctgttccacagccctcagtctctataggccaccgtttcacgaagaaaagccaccaactaaactgagcagaaagaaagctaaaccttgcacctaaattcttgacatactttatgctttgtcacctagagaaaattacagggtcaactaataaaatgcaaaatctctcacctagagagagttttcactttatgtccttttgtaacttttgagtttcgaaacatctatattgtgaaattcaatccattttttttcccttaattttcttcctaggattcagttcagttcagttcagttgctcagtcgtgtccgactctttgagaccccatggactgcagcatgccaggcctccctgtccattaccaactcccggagtttactcaaactcatgtccatcgagtcagtgatgccatctaaccatctcatcctgtcgtccccttctcctctcgccttcaatctttcccagcatcagggtctttccaaatgtaaacaaaaccagtcttcctcttcggggacatggacgtcaaaaaggaggtagggggtgaggggtggggagtggggaacaagaacagaacacatcacaactttgcacttctctttgtgataaagggtttggattcttggtccaaagagagaagggaagttacctgggtcttgaattaaatctgtcggcaccaaaactagggctcttatggagcaatggatattaaagcaacgcctgggccgcacagggaggggggttatgttgaatatgcatgacacacagaaggaaaatgttcatgacttacagatgtgctctgagtggcgctttcttccttttttggaatatcaaacagagggaagagagaggtttgctgccatgttattataagcactgctgcctctctccctcccgaactaaaatattctagtatttattttgccatccatatgaccacagtttagactagagtaaaaatagaagccgtgtgggcctaacctgaaaagtcccaagggctggagagggtcaggattaatatattctaactgaaataaccagattctgtttcctggtggcgtttggcaggggaggaggggagaaaagagatttggaatgtatttctcattcagaagtgttttgtaaaaactaccataatggaacagactccaagtcaagcacaggaagccaagaggctctggtttagatttaataattcactctaaaggcttttcaactgctacaattttaagccctgaggcacagccacatatattctctccactatacgggagctgacggagtgccccaggatgcctatgggacaggaaaataggaaagacctcaggtccaaagggcagaccacaccctgccaggctccaactaatgcaggagaataaacctgctctcaagagatgaggggcagtcggtgaatggaatttccaactcagcctatttcaggtctaagctagcactgaga

SEQ ID NO: 45574 - DNA, 1867 bp, Bovine  19866880397940
  misc_feature (1)..(1): n is a, c, g, or t
ncgggttagttttttttcctctcttgctatgtttctccatttttcactttttctttaatgagcatgtgtttccaaagtttctgcctcccatttgctcggtaagtaatgacattcatgtgcccttttgactctcttgtaatgtgttggaatcgcccccaggttcctccaaagcctggtttctcactgtggctgggataatgtgggaaagccacgattcagatgagggtctgaccttaacttctgtagttaagaatgagggtgagtgtgagcctgagtcacaaagacattgagaaaggagaaaagtgattcagaaactacctcgatagcttctattgctcacttctaacccctccgcattttagcttcagttcacatctcatgttttcccctgaggggctcgcaccactgaggtcagctccacgctttccaagtctttgaaacaagccgcatcacatccttagtccgagagtgtatactgttctttaacagaatccagaggcctttggggtccaaatacatttgctttattgcccgttttctgccactcctgttgccttctgccctcttttactaaagaaaatattttatccatgtattcctaaggaaaaaaattagaaagatacagacaacagctctgaggtcgacttcagtgactcgctgctacattcactgtgttctgtccaagaactggatgtaaatacaaaagatggctcatgccttcaataagatcaaagtctacaattaaaatatcctctagatattttagaaatattgtagaaataaggtctacaaggaaaaatcctccttcaataagatcaaggaaaatcaattaaaatatcctctagaaagtgacatgcggataaacataggagctttaagaacacatgggaaacctaattcagctaaagccagggcagggccagaggagacttcccagaagatgcagagaaaaggaaaaataagagtttagagatggggagatgagattaggcactctaagcagatggaatggcatgttcagagaccagaatcaagagagagaaagattgtgattacttcaggatggcgtggatactgaaaataaagaaaggagaggggaaagacacagctgaagacatagagtgagatgtatcacaggatgctaagtgtaagcagataaaagattggacccaattttgtacagttttaaagctagaaaaaaaaaaatcttagaattggatgtaccatcttacagctcaagatactgagctccagagaggtcaagtgacttgcacagtgtcatacagcttgtgaaggggggagttgagtctagaacactcttcactctttccactccctctcactgactctcccaaaagggagatgactgatcgagcaccttgtcccatgcaccagaactactgagcctgtgctctagagctcgggagcagcaactactgggcccacgtgccccgactactgaagcccgagcaccctggagcccttgctcctcaacaagaaaagcaaccacaatgagaagccctcacactgaaattagagagtagccaccactcgccacaactagagaaaaccctgcacagcagcaaagacctagcacagccaaaaatacataaataaaaattttaaaaaaaagaataaaggtcaagctgttcatgtgggcagttataaggccacatttccaaaatcagtgcagtattttgagacagaaagaaatgggatttgagcaaagaataaaaggtgggttcagcaggacacgagtccaattcttacagtatcttctgctccagctttctgtccaaatgacctcaacccgtcccatgccccctgaccttcctacatgcctttgatttctcctcatctccttttt

SEQ ID NO: 45575 - DNA, 901 bp, Bovine  19866880446420
  misc_feature (1)..(1): n is a, c, g, or t
ncttgacagaaggattgggaaccccccacccaagcaaagaggattatgctgcattggagctaaacctcagaagaaaatattgctgtgaggggcttcatattttgcctctaatatgggggatggaaagcagggaagataatgaccaccaacagcgtaaggaaaatgtaactaaatatggcagccccgagaagacagatgagttatggaatcccaaagcgcccagattcactttagagtttacaggtgatgattccctttgattcatggtcatggttcttaagggcaaaagaacttagttagctggagaaggggatgcaaacagaaagaaagccttctccagctgggaaaacaaaagatgtttgggatgatgtcgatgaaagcttttttaaagtgagaggtacagagagagtgtaagaggaaggcagctggagtgtttccagatccgctaatgatgcgtggtgctgctgacaaagcagttcaccaaccggtgcgagagacagctgcctgggggacctgccctttctcttagggctggatcctaagagtccaggtcgggggagccttcaccgcttgcttcagagagcttttttcttttgctctaatttaaatgcttaccactgggacatacttaaagcttagcttattttttccccccttttcagacttcatttcccttagcaagtatttggtttctaagatcagaaatcaacaggggagaggacattagcctgggttataaaatgaaatgaaacgccttcactttttcatccacttttaccaaaatgcttggttctttgctcacaagactgagaaaaacccaacctgggtttaaactactcacccgtttgggaatcaattgcccatcccagggacccagggacctgtgggtctggtaattatg

SEQ ID NO: 45576 - DNA, 1275 bp, Bovine  19866880580800
  misc_feature (1)..(1): n is a, c, g, or t
ntctttttcaaattttctttcttctcataagacatctaggatgaaagagaactctaacgttgcttgcttccgaatccctctgatctttgaaactgtatacatttcatcggagcccagtcagcttgatccccattcaggatcccagtcaagcatctgaatgccagccatctgaataccgatctgaatgccgatctgaatgccagcctcatctgaccttggtgtacaagtcattgtgtcttgctctatctccaggtaactgaaagctttcttagaggtgacaggggagaggttgcctttcagagatcagagattgcctctcccagcaacatcagcctatcgcttcagaaactgaggctcagagatgggaagaaccttaaaatcacacatcccctttttttcagaagccaaaaattgctgagcccaccaagatgaccaagctgtgctccccctccctgtaccccttgagcataaagaacctcacgtttcctccaacttccccatcccacttgcctcttcaggggtctgaagcaatttgaatgagcctccccctgccctgtcacagactggagcacattaagggcaggaaattaggctggggcatgtttgtagatccggtgccgattactcttcccctccgattgtacatccaccaatacggaatggatttctctctaatttattaaaggtcggtcagcatggaatgataaaggaaagggccatgtctgataaattcacctaaattgaattcttgggccacattaccaaaacagcagacataatttatctggattgcaggaaagcatttagggctgtaccatataacagatgcatttactaaggcaaaccattgtgtgatggttaagtgtcaggtggcaattttgggaacaggtttaaaatggcccagaacccaatgctgggtgcactgccaggagacacttaagagtatagacagaggggtcagtctgggggtcattatttcaaagtccttgaccctaattataatttaatttccacaatggtcatatctcttgagagcagaattgggatgaagggggctgggggggggggggcggagacagttttgaaaggaacagactgaaaacaagttctgtgcttcttttttcaatcagagtggctcagtgagggatgaatgagttattcttccaccaaatgaacacaaataaacaggagaataaaggaagccaaagacttctgagcaacagagcactgcagcgacaaactcggaacaggacagggatgggaggcagtgggttt

SEQ ID NO: 45577 - DNA, 851 bp, Bovine  19866880600816
  misc_feature (1)..(1): n is a, c, g, or t
nagagggagattgcagagagctaaatgtggcaggcctcaaagcattttggtcaaggattgtagaatactacccatggtagaacatataaagtaaatataaaatttcaagaaggatttagaaatatgcaagttttactatgtgagagtttaaaagagagcaattgaagtctcaatcaaagggggtgaagagttttgccaagtgaagtagaatatgattatgtagaggattggaagctacgattattattatttttttccagaaagaacactgcacttggcagcagccccagttccagtacacagaagttagtaaactaatgacgtagcgagggattcatctagagaggctgatttctttgtcaccttcggccaagaccatttggaaataagcccttctgtcctatttctgctgttgttggaaagagatggaggttgaccacgaaagactcaacaagtaacaggtgaatttaggcatttgggcatggtatgttttcactaaatatttgtagaatgaacacaaggaccctgagggatgggatggagagggaggtgggaggggggttcaggatgggggacacgcgtacacccatggctgattcatgtcaatgtacggcaaaaatcactgcaatactgtaaagcaattagactccaattaaaataaataaattaaaaaaaagagagtctagaagtttaggtcggaggacagttttctggactaggctatgggtatgctacatctcgcagtggcatgggtgcagatccttatacgtatggatatatgcatgtgtaattatctgacctattccacctgttgagccctaactgcatgcccataatgagttggagaagtt

SEQ ID NO: 45578 - DNA, 988 bp, Bovine  19866880641121
  misc_feature (1)..(1): n is a, c, g, or t
ngcctgcaatgcaagagacctggtttcgatccctgggttgggaagataccctggagaagggaacagttgcccactccagtattctggccttgagaattccatggactattccatgggatcacaaagagtcggacatgactgtaatcttgctcattacattataagtaatattgacaactggtaaaatccaaagagcctcaaattgtttaacagcaagtccctatccctacttggctcccacagatgagatcctctagccaaacagccctcctcatcaaagggaccaggcactgttcctgcttatccctagaggtggattccagtttcccaaccagcccacagaatctttcaaacaagccaatcatatctttccatggaaagcagggatcactcccaccctcctttttttttttttaatttatttttaattggaagataattgctttacaatgtggtgttggtttctgccacacaacatcgtgaagcagctctaagtataccaatactgcctccctcttgagcttccctcacaaggccccccatcccccctgctacatcatcacagagcaccaggctgagctccttgcacccccaccctcttgatactaaaaacctgcctcccacagcccctggttgttcaccctgttccaagtgcaacgctcctgtgacttcacatgcatgagtgtcttctttccctgggctgtgagcgtttggagcgtaagtggctgaggacatgtgaatgcttatgaccagtcctggggcgtcctttgttcagccgttccctagccctagggcaggaatctctccctcaccagtgaggtgaatcacctcttggtgactcaaagaggatgcagcacagtgaaggtgaggccgagttcagttccacacatagagacagaaaatttcaaagctggataaacctgtcttactctccaaataaggaaacagatttagaggccagggttctcgactgtctgtgccttttcca

SEQ ID NO: 45579 - DNA, 1984 bp, Bovine  19866880665085
  misc_feature (1)..(1): n is a, c, g, or t
ntgccttgggtcgggaagatccacttgtagaaggcatggcaacccactccagtattcttgcctagagaataccccatggacagaagagcctggcaggctacagtccatgggcttgcaagagtcgggcacaagttcgtgactaatccctccaccaccgttttgaacagctaatgagttttaccgttgtttttattaccttttaccttttggaatttctaatcatgtggcttactaccaaaaaaagttagattttctagctttgggtcgtaacatatgtagaaagtgaaacttgccttagaattccctcctccgaggccacttagtgctccttttgggtagggagtgagatccgtctgtttatctttagccttgctcttctggcaaactggctcacacactggcaatgtgatgtctgttactttgtatttcatggaggatttcccccagccccaggagttccatgacctttgcgactcagacatttatggtcaattctcttccatgctctctggatccaagatactgggtagtgacataaatgacgagtcattggctggttctgaaaagatttccaagaataactgccacaaaactttttaaggaaaacgatgacttttaaagatctagaaatgttgtctgtcaactgaggtctagaatggagactgctggtggccaaatcatctcacaggcatgttttgcttggccaggctagtgttggcctgcagagtgtttaagaaatatttaattagttcccaacatttgaaaaatcaggagatgtcatgtaaaaaaatccagatttctggcatcatctgatttggtagctcagagtctgcatacccacctggcaataattggctacccctctatagcagtcatcccagctggttgggccaagcgcactccactcatcagtccctaccactccacaccagacttcttcactcaactccatagcatgcctggctcagtaggcgatttgaggttgagatctttactttagaacttcactgtgcctagcatgctgctaagaactgtggaggaaacaggaaaaggattagcattgtaagctggttagagaaaacaagaatattaacaataaaaaaaaagttaatttatggatcaattaaggtctccatcgtaaggtatcaagcacagacgtgacccctgacctacacacaacacacacgtgtgtcctgtctgtagaagtgatgatgaaaaagagccagcactgcaggagaccagttgaagaactcgacagtttgtccagttaggtcatgaaggtgcctccactgtggacgtcagagactcattcatgtatttatctactgtttcatttgtcaacaaatatctgtaaactgatggggaggccccagaagcccaccactcagccctctctccagggaaccttcctggggaccttggtggacgacagtcacacatactgagcctttgcattcactgtggatccaacctcccagagaccactttctgccacaatctgagcttggtggggggttctggaccgaggccattcctgcccaatatgggatttccccagggagcaacctttgtgtgggccccaccttcagtctagccaaaacttgctgagaactgcaccgtggtctgaggctcttcttacccaatctcccttccttccctctctcctttcactagcctcctgtcagacctgtgtcacagtctaaaacctctcccagccttctctcagcttcctctatgttatcccttataggtgtttccactaataagctgcttgggtgtctaatccttggcctctgcttctcaaagaagcagatagaacttgcagttgtatgtcagacactgtgcaattaagtgagggtacatacaccataagcagtagaaataagttatttaaactagggaaaggcttgagaatgactttcagatttattggggtggtcaaggaaggtctttctaaggagataatgcttaagctgacatttaa

SEQ ID NO: 45580 - DNA, 1279 bp, Bovine  19866880816531
  misc_feature (1)..(1): n is a, c, g, or t
ntggagtttgagtaaacatataaccctttgttatttatatacacggttcaaaaaataatatatgaggccaaagttggagaaagagcattggattaagaattggtagggctcaattctcggttcagccacttattctcagagtgacgttggaaaggttagctaatctttttgagtctcggtttcctgacttgtagttacctccaggcttatggtgagacttaagtgagctaatgcatgattcggggtcacagaaggaggtgcttaaagtagatggtcacatagggaggtacttataagtggatgctcaggagataactttacccttttaggtgccaaggaagaaacacattcaggtcaaaccactgttgggattacttttagttacaagtgacaggaagcttaaatcaaactgatttaaataatgtaagaaaagtgttcgctcatttagctgaaaattccagaggtgggacatcaggcgtggtttgatccagagattcagaacgttgtcagggttgcaggtctgtttttcagtggccctccttcatgttttggctttatccttctgttggcttctctcttgtcacatagctgcctgctgccccagggctatattttcttcattcacatccagggggaaagaagcttctcttgccccagacatcaaagagagctataaacttctctctggttgggccggtttaggtcatgggcccatcactgaatctgtctatcactgtgactaggcaaatatgactccttgattggtttaatcaaggctaacgtctggagttagaagatggagttacagcttctcagaccacaaaactgaggaattgctagtcttattaggaatgagggaaagaaatggatacaaaagagacgattctttggcaaatcccctccttgagttcttcctttctttccatacatatacctttgaaagtctgtgcctgcttgagccacacatatcttttcatcaaagggagacccctcaaggagcttccctggtggctcagtgataaagaatctgtctgccaatgtaggggacatgggttccatccctgatctgggaagatccctcatgccaccgagcagctaaggccgttcatctcgactattgagcctgtgttctagagcctgggaactgcaactcctgggtccatgtaccgcaatgactgaagtcctagagcctctgccccacaactgggggaagtcgctgcaataagaagcccacacacttcataatagagaaaacccacggatcaatgaaaacctagca

SEQ ID NO: 45581 - DNA, 1269 bp, Bovine  19866880845537
  misc_feature (1)..(1): n is a, c, g, or t
nagcattctctgtcacagacggagatggagcagcgtgtctccccaagtaaaccacacgcaacttctgggtaaagactgccaaatccgtgatgacctccagtggctgagagaaccggaatcggccagagtggacacgcgatcacactcgcatgaccgcccgcctctcaccggcagctggcctgagatctcgggccctgtcatctcacagatctcactctctgctccaaagcactggccaactgaagcctggaaggtggggaagggaggaggtgccctgggcgctgagcaggtctctccacctggagggtgaggagggggagaggagcagaccaggacccctgctcctccaagtccagacctgccctgaagcagggctgcccccgggagatggaaggaggggagcttgaaactgggtgagaaacaggagtccaggaaacaaatgggtttgtgtcttaaaaactgcaccgagactcttctaataactgaaaatgatccgaaaattctggagtctgtccagatgttactaagggatgataaggtatatggtgctttgtggcacacctcacaggaaggactggggaaaaataaaaccgtttcaagttcgtgtttcgttgaatgcagaccatacaattacctggttatatgcaatagagtagaaaggatacagatattaaactcaggctgacttgggtttgagtccttgctcagccacttactttccacatgatttctggcaaattactttctgcacagtttccttaactgtgaaatgtggatgggttgtagcaaacacctcccagggatttgagggaagattaaattaaataagttctaggaagtgtctagtgtgatggctacagcatggatccttgaaaaggggagtgatcattactgtaacttgagacagaggtgataagtcaaggactaatggccagtgtagctgtcacctgtcatttaccgcagttagacgtgtcaaatctgctaagtatttgatgttttgtaaatcccaaactttctttttcaatgaaagcagtaacactttcaaagcatttttctgcttgatttgcaagtttaaacatctaactggaatctaattctatgaaaaccatgaaaaaagggtctcttgtcctgatcagaaacacgaggaagctccaaagaagagacccgaggcagggcttctgtcagcctccaaatgtgccacacacgtttcactgggaaaacgctctgaatgacatgctctcagaccttgggagcgcgttcctcagcaac

SEQ ID NO: 45582 - DNA, 1001 bp, Bovine  19866880944343
  misc_feature (1)..(1): n is a, c, g, or t
ngcataccagggtcagctttccatcattaatggataaaatgcagcccatgaccacacacaagccaggaaatagaaatggtcctaataaatacagccttgcattagcaaggttctcagtttgtgacaagaccaaaaagcctcatatgatatcttgtaagacatgcatcccacaggccagctgttgacatgttcttggaacatgaaaaggatgagggtcttctctatacctcacctgcccttcctggggtctaggcatttacaggtcacagtgtctcatggggctttttaaaaagcgatgctttcgaattctaatttgccttccttttctttttgccacatctctttactaattgaaaactgacaagcaaaattgtcctcaaccacaaatatctagaagaacatggagacattcgaacaggctgaaatactttgacttttatgagttttaagaagattaatcaaggctctggaaagaattttgtttcatggtggactcaacaaaaaaacgagctgggccctcctgtgattggccagaggagaaggcctggagccggggccctgatcaaccgctggtcaagccgggtgaggccaggccgcaacttctttccgcggtgacgcaatcatggtggccattggacgctatctgttgcttggccttcagactgatgtcagtctccgctccctgggagtcctaaataagcctcctctgaagttctcacagctgagtttctccctcagggaatttgttttctgaggagtttttgtctcaagtggaggcatgtttccctacctcatttcttgacagcgacgttacgtaacccaggctggggtgtgcggtggttgggtgagaggcaacggggaaagattttacctcagggatagcaacagagaaagtggggttgacgaatgagaggcgcgcatccaggtattagtgctggtgtcggacagcctgcggagaggagtgaaattccctcttccctcacccatccttcgtctcctcc

SEQ ID NO: 45583 - DNA, 834 bp, Bovine  19866880995935
  misc_feature (1)..(1): n is a, c, g, or t
naaatggtagggaggctatgtagcatttgagaaacttgaggcattaagacttatcaactgaactttacagctggaaatatgatggtgtaggaaggttaagtggcttggtcattgtgccaaaggtaggaacatacattagggattattagtgatggctttgctatgaaattcatcaacaggcccccaagccaatattattcccttgttccaacacagaactcggagagaagggagaggcagcaagaggaagatgattaagcagtaaaactctttctagaggaaagtgaaaatgtgtccaaagtatatagacaaggagcaatattagagtcagccagaagagacccaaggagctacaactgtttaaataaaattgccattttatattcacaatgggccagcttttatcccggtatagctcctcaggaattctctggaaaggttcctaactctagaattacttggtgtgagtgaattggggccctatgaaaatgatactcagtgatgattttatgcaactactttttaaccacctaacagacagagaatcacttttctcccagtcccacgttggcacggtcctgggatgaaggttcagcaaatcccattatacatggatttgacttttctttcactttgatagctttggggaaagaaactccaatgagttgtgtatttgtccagctaactcagcataaatattcatttctacagaatatgtgcactatgcaaagttggctcagccatttaaacttataaaaagtccagcacatgctgtaagaatcacttaagtaacgaaaataaaaaccccagtgatgtctataccggagaatcata

SEQ ID NO: 45584 - DNA, 754 bp, Bovine  19866881025722
  misc_feature (1)..(1): n is a, c, g, or t
ntgagggacagggaagcctgtaatgctgcagtccgtggggtcacaaagagtcggatacaacttggtgactgaacaacaaccaaccccaaatcttcagagtctagtacactatgcagacacatagtgagcatacataaataacttgctgaatgaatgaatggttagaatgttaggtgaaaagggcaggttataacagtattttcaaaactgttcatttttataaaattaagcaaaatggaaaacaaaagctactacacacacagagtcaatccttattacatggattcctcataggtaaattttcctactcactaaaattcatgtgtaacctcaaaatcaagaactgcaacattttcatggtcattcacggacatgtgaatgcacagatggtgaaaaatttgagttgcctgatgtgtacattaccaactgaggtccaaggctgggagatatgcagccttctggcttcagatttcaaactataaatgagtgtccttttagtggtttatttagtgcaatatttttcacatttttgtgcttttggtgggtgacttcactgtttaaaatgactcccaagtgtagtgcagaagtgctgtctagtagtttctaggtgcaagaaggctgtgatgtgccttctacagaatacatgtgttagataaggttaattcaggcataaattacagtgctgttcaccatgagttcaatgttaagaatcaataatatatattaaataacgtgtcttaacaaaaacacacat

SEQ ID NO: 45585 - DNA, 926 bp, Bovine  19866881025834
  misc_feature (1)..(1): n is a, c, g, or t
nctggggagtcccagattgaattacggaagtttttgaagtgggtcttacattacaccaatgggagcataacctgtgaagtctgaattatttttcaagtgaggttgtcagtatacgtataatcagtataacagactagtaagacccaaggaaactccagatatgagagtaagtggagtagaaggtgcagaaataaacataattccccatgggggttccatatgctccatacctcctttttccactcttattcaagatcagggacatagccaggccttggagaagaggttgtaggagattgactcattggtctccaactcttcaagcatctctatgttagaatcacacatccatgccatttgtcatatgaatttcctttctccctccagaggaagagtatattttcctgctcctggatcttggatttggctatatgatttgccttggcctgtgtggaatgaagtgatctgagcagaggcttgaaatgtgtacttactggccctcttgagcttcttccatttgccattaggacagaccttacatagctgctgtttccagtaagcaaaaggacatgggggtggctacctctgaatggaacccaatgatggagccaacccaacaagcttgcatcccaaaatacagctactgagtcattgaactcagatcaaattagccaaaatctagtccatgagaactgtactgtcaagccataaggtcagagatttttgagtttgtttgttattcagtataaactgactactacagatgcaaggtgtgtgaacaaattctgaaaatgtatgccaaagggcaaatcctggaggttacgactgtgcaggataaccaaatatgaccacccaaaatctttgaccacgtaattagcacaggctttgtgaggaagccaaagttggaaagaagcttaaatgaacca

SEQ ID NO: 45586 - DNA, 1237 bp, Bovine  19866881111338
  misc_feature (1)..(1): n is a, c, g, or t
nttctcttccatcagatgggttctaaagtgtttttagaaatacctctttgttggccagtgcagctcactaaccagaagggactccaagccctgtgtttcagtgactgcaagacaccgccttctgtaaaccagactttgtggctggcagttgcatttcaaggaggccccttcctacccttggggagatgatttttaccagtggtggccttgacgtgaccttgtgcatgaaccacaagttgagcccaatggagaatgctttcttttagtcagcagaaactttttcacagtatggataagggattaagtagcattagggatatgacagcagttaacactgaatgtggcacatggaaggtgagcattgcatgctagttctgtctgaagaatctgagaatcgtctcctgtgacctccgaggatgggagctactcatcccatgtggccctgctaaggggcgggcctgcatgtaagtactggggaactctgcttccctgccactgacccacactagacaatgagtctccatcagaggatcttatctggggctacagagatttctattgtccagtcactgggctgggtggaacatagagtaagccctaggtcagcccccttttccttgagcacagttcagttcagttcagtcactcagccgcgtcccactctttgcaaccctatgggctccagcactccaggcctccctgtccatcaccaactcctggagtttactcaaactcatgtccattgagtcagcgatgccatccaaccatcttatcctctgtcgtccccttctcctcttaccttcaatctttcccagcatcagggtcttttccaatgagtcagctcttcacagcaggtggccaaagtactggagcttcagcttcaacatcagtccttccaatgaatattcagaactgatttcctttaggatggactggttggatctccttgcagtccaagggactctcaagagtcttctctaacaccacagttcaaaagcatcagttcttctgcgctcagctttcttcatagttcaactctcacatccatacatgactactggaaaaaccatagccttgactagatggacctttgttggcaaaggtccttgtgcacagagaggaaggcaaatgaagcagagcaagtagagacaagaggctgctcctccttttccaaaccagtatctcatcctcccaagtggggggtcttttatagcaaacatctttattaagatatgat

SEQ ID NO: 45587 - DNA, 1447 bp, Bovine  19866881142341
  misc_feature (1)..(1): n is a, c, g, or t
ncattttgtttagctccttattcttcagggtggcaatttaggtggcctgactgggctctttcccatgtcagtggtcagctgcaggttgagtttgctgatcttgctgggctctgtcatatctgtggggtagccgggcagacgtggctctggtcactgtgggctctcattctccagaagtccagccatttgtccacagagaggagacagagatcccaagatagcaagtaggagtgtgcaaaggctcttgaagccttcgaatgggcacaatttcactaccatgtttaataggtcaaagccagtcgtaggcccagcccagactctgcctcctagtgaagggagctgtagggttgtcacagtgcagaggaaaacactacaaggaagagaaaggatttgatcattttgcaatcaatttcccatacctgggacatatttcacctgtgccaggaggctcccaggaaactgagaaagaggaggagttagtgcatgtattaatgatcagatcaggaaggtgaggtcagcagcatgctaggcaagtcttatccaggatcttccttgatttgagtttcattttacattcaacatttggtaaaagtctgtgtagtcaaagctatggtttttccaatagtcatgtacagatgtgagacttggaccataaagaaggttgagtgtcaaagaactgctactttcaaaccatggtgctgaagactcttgggagtcccttgaatagcaaggagatcaaacaagtcaatcgtaaagaaaatcaaccctgaatttgatgctgaagctgaagccacctgatgtgaagagctgattcattggaaaagaccctgatgctggggaagattgagggcaggaggagaaggggatgacagaggatgagatggttgggtcagtccactggaccaactcaatggacatgagtttgagcaaactctgggagatagtgaaggacaggaaagcctggtgtgctgctgtgcatgggattgcaaagagtcagacatgagttagcaactgaacaaatgctgaatgtagatgtctcacaatcagatcagcgtgggcttcagaatacccagagcaaattaaaatcgtgtctttgggagagatctagctacataagaatgagtatcttaggttggaaaatggcgagtctgagaaagacaagaagggttgtggccgacctagttaacagtgagcttacaatgcagtgctcatgtaaaaatagccctagttattctggggagagtgatacatatcacacacgcaggatgagtgtgaaaagttgttctctgtagcccacaactctattaatactgttcactcatggcacctcttttttttgttaacacctcaaaagtgctttgtaactgtcttcttcaaaatgtctcaggaaatatacctctacatacattttggtcctcatttcacagaccttagaatctgagagttg

SEQ ID NO: 45588 - DNA, 1211 bp, Bovine  19866881151293
  misc_feature (1)..(1): n is a, c, g, or t
natgcggctcgcggtgggctgttgccccagtcccagcctcgcgggccctgctcctggcgggtgtggtgctggcctctccgtggccctgagagctcctggccatgatggtgcctctctcagtgtggccgggtctgtaattgtccaagggaccttgacgcatccctgggaggtgattttgcccaagcaccctaatacatccccaagaaagtcttaaatgagttgactgtcttgcagcttttccagtcaaggagcctcacggtgactttgggaaagcagatggctcgagctagcactggggccactggaactcagacagctttagtgggaagtgaggaaataagcccgtgataggtgcttctgaggcatcttctgaggatccactgggttaggtttccctcaggagcattgtctgcggtcagcccttgacgtcatgcgacttgtcagggtgtgctgaggaaaggtagggacaaaaatcggcttaaaggaacaggaaagagggataggtagtcactgaggtataagcctgaataaactcatttcctcatttctcaccatcctcgcctctctctgctttctcagcgggcagagctgacatctgataaagacatgtaccttgacaacagctccattgaagaagcttcaggagtgtatcctattgacgatgacgactacgcgtctgcatcaggctcgggtaaggctagctgcatccacactcatctctgttctctgtgtttgtgtatgcacgtgccacacacaccctgtcttacacacgcatacactcacactctattggaatgtgcttcagggaagcaagcaggaggcataactgttaagggcacgctctgtggagtcacagtgcctgggtgtgaattctagctctcagctacttgagctgtgagatcttgggaatatatttaatttggctgaacctcagtttcctcatttatagactggaagataataatcagccctcccacatagggttgtcatgcatcttaaggggttgatacatctgtaactcttagagcttgctgcttggcgtgtggtcagtgttctgtcaacattatcagagtgatgtcctgaaaaccaccctcaaatactagtttcataaaactgccagccctaccttaaagcttataaatgagaccaagaagagttatactttcttactgctagtgtatgcctcagaagtaggagggagaatgtagcag

SEQ ID NO: 45589 - DNA, 1328 bp, Bovine  19866881256679
  misc_feature (1)..(1): n is a, c, g, or t
ncagttttgttcatgctgcctgcccagcacctagaatagtgcctggaatgtggtaagtgcttagtgtagatacatcaaataaacaaattaattaaaatgtacattacacatcccaatatctatgcaaacatatcttggagaggaagtgatggcaacgatagggctgggcacccagggcgctcactggaacttgggacatttggacatgggagtaaaatcagtccaaatccactctttctaggtgttttgccatcaggcgttgaatctccctcagcttgctcctgagtcttgcaaaatgggaataattatagccacttaaggagttacggagattacatgagaagaggatacaaatgtgctttgaaaaatctgctaaaacttacagaagcatcagatttccttatgtgttgtgtacacatgtctgttgatggagtgagtgattgggttacactaatccgttgcttaattcaaccactctgctgaagaggctactaatggatgctcagttgtcatggcaggtgcgtaaagggagatgcctttcccatgaaataccagggatcagaggccaatcagaactgcccaaggagctgtttaaaaattgtatattctgaggtgtggtaagctgtatgcttgtttgcatttatttgtctcccttgccactctcaggctgccatatataccatgttttcctggaggtgatgtttggttttcatcccccaaaatatgggcgtggccatagatttgcccttagtcgatgaattataagtgagcatgatgcatgccacaccaacatagaaacattagatgtgttggcatggtttggcttggcatcccctctagcttctgcactcagttaagagaatggcacaccctagttagaggatactccttcagcctagtttctggaatgaggatacacatgcttcttggtcaggcccaggcatgcccaacatagccacaccgactcacagcccttatgaaacgtgagcacaaatgtttgtgtgagccactgagatgctgaagtggtttgttaccttagtgaaagctgactggtaaaccaggatccacgccaaggcccccacagtccatccactgaggctcagagatctgtgtttttaaaaaccttgtaatcaatcagatttgggaacaattctcctagattatctacaccccatccttccttcctcccacctgcccataggaacagggtttgactaacgcgtctatcatccctataactcagctggtagcattcttggttgtcaggccagaaggaaaagaaaaggatgtctctctgtgtgggaattagatcgaatataagctgcaga

SEQ ID NO: 45590 - DNA, 916 bp, Bovine  19866881262510
  misc_feature (1)..(1): n is a, c, g, or t
nccccaaatgccttattgaccctttgaggtgttttcttaaagcagctgaggaggatgtcttacgttgcttgagtttagggcaagattccataaaatgagatccttccaaaactattttttacaaagaaatgcagcctaattagtaaaagagccttagggttgaccttcttttcttttcttttttttttgcctgttgctgggccctggttcagagtgctagactcagaggcaagaagggtctcaaaagagcatgcctaacctcaacaaatcatctcctggaaacatggccctctcatcttgtgttctgtgtggggaccaatatcaatatcaggatgataacctagccacccatcctggaggcagccacccaggaatgttcccataccagagggagcttgggcacgaccccaaagacaacatgtaactgatcatcagaagactgggaccaatggaatcttaacaggacagggctcgtttatacggcagttttacctatatcagtggttctcaactgggcggagattttccacccaaaggtatttggcaatatgtgctgacattttggggtgtcacaactgaagcagatggtgctattggcatctagtgggcagaaatcaagaattctggtaattatcctgcaaagtccttatgatacccttacaataaagacttatgcaggccccaaagcaatggtgctgatgttgagatactagtgccgtctggggattagactggtgtgcacacattggagtggggatgttgttttcacttttctgctctcccagcaaagccccagaaactcgtgtggccatacctgagagtcctcgaaggcactcaattaactctactctgccataggggcaaaagctacagactttgctggtaattgggtcgtcaccttaggagagaagacagg

SEQ ID NO: 45591 - DNA, 2560 bp, Bovine  19866881527224
  misc_feature (1)..(1): n is a, c, g, or t
naaaaatattttctgttatgttacatatgcttatcagctgtctttcacatgaaccaaataactacaatggttattgtaaaacatgcccaaataaaatctgtaatggttcatacttcattattttcccagaaatattgtgagtagaataactcaaaaccctttcacaatatttcttatcattctaaggaattagctgcagcctttgcttccaaagccataacactattaatggttttataacaccatagcattaggacaaattaaatgctcttaaacaatcaagaaataattaaaggctgagagagagtttaagtgtttaagttcatgaatttaccaaagtcaactctaatgcttgtatgtgaactgtgctttgaaattaaaattcccgatttctttaagagaaggcatctaagaaacccacaataaagtcaaccaatataataaacactataaccaggataactctcatgataaaacactagacatttcctttcaccgctttatgccacacctccacatcatccgatgacggcttcccacagccaaggtaaggcagctaatgcttctggcaccgagatgagggagaccaggcagtgggtaccatcaacagcaaaaggggtgctctctctttttctccgtcatgagatgctctcacttctctctgttctcaccaagtcttctcacaagactttcaggatcaagcgattcatgcccaggaaacaaaagcagaactgtcccaacgccccaacggattggatgaaaacgcgtaacaaaatcaggtacaactccaaaaggagacaccggagaagaaccgagctgggtctgtaaggtgtcgcacatctgagctggcacacatatagatgctgtatcaaggtcacccgcatcttaccatatcgctgtgaaaacatcactactgtctggacagccaaatgtgcgttactgggaaaatgatttgtctctttgtttcagtgtttctgtattagtgagctggcttggtgataaatacataagatcttttgtttgaaaaaaaagaaaagtgactctacagggaactcaaacccgggctctgtaacaacctcaaggggtgggatgggaagggaggttcaagcgggaggggacatatgtatacctatggctgattgatgctgatgtttggcagaaaccaacacaacactgtaaagcaattatctttcaattaaaattacataaattaaaaaaatttttaaaaagaggtccaatatcctactatatagcacagggaacttgctcaatcttatgtaacaatctaaatgggaaaagaatttgaaaaagaacagatgcatgtgtatatacaactgaaccactttgctgtccacctaaaactatcacaatattgttaatcaactataatataaaatataaatgtctttaaaaagtatataaaaaaatgtgagtctagaatcctactcaagatcacacagctaataagtgacgtaagaggcagaagagaaggcagactcaagcccagatctgcagagcatcatgcatatggcattcttcactcacagtacgagtcatccagggagtgacaactcaggtatttcaactggctgcagaacttcaactccacaacactctgggtcattgatcccccagtcttccacccctgggcccttcccttcccacccccaagggaaacaccatttcattccaaatgtcttcagtttcttcatgaccatttctatgaggcctttctgatcagacacacctagggcagggctggtggaagcaaaggtggcttttcccaatctatgtgggatgtgtgctgggggcacagtgggactcagggaaggctgagacacagccagaaggcgaccctctcaacactgcagtgacagcagtgctgctggtgctggcatcacagaccactgcctgccctgtccctgctgcaaccggcaagaccccgcaaggacagtgccagggctcctgtgtgctatgctctgtttatccaaaacgccattaaactaagactcaacctaaatttatttcttccacacagagaaacacagaagattcttttcagtatgacaaccccacaggaccctgagatatcatctgaataaaagataaaagtcagactcaggatggtttcagaaatcagtgtgatttatcagggcctcactacgtgtgtgtacgtgcatgctaagtcgtgtccaactctttgcaaccccatggactgcagccggccatgcctccctgtccatgggattctccaggcaagaatactagagtgggttgccaagccctcctccaggggaccttcccaacccagggatcgaacccacatctcctgcatcgtaggcaagattctttactgccaagccattggggaagcccaaagagattctatttcttatctaacaagaaacaaaggacctcactgtacttagctataaaataagagattgggcatctctaataaaactttcacctctagaaaaaaaaattctgagaatttttgaaaaattgaacttatagacagctaatgtatacacttaaccagactattattgaacagtaa

SEQ ID NO: 45592 - DNA, 1207 bp, Bovine  19866881567066
  misc_feature (1)..(1): n is a, c, g, or t
nttaaaatacttgatatgcattatgcctttattgtacatctttaatgcattacaattttcctaaaaactactttcctttcctcaacatgcaactttaaaaaataaataaatatacctcggcaaaaaaagatacctatcccattgcttgctaatttatcaaagtttgtgaagtaaagaatggacacagaatgactaaaatggaacagaaggcatgaagtcagttttctaaaggatcacaaagttcaactcccaaagcaatggacaaggaactttgcaaagcaccagcaaggtcaacctcatcacttaactacacagaaatgagaaaatttctaagacgaaccacaggaaaagatatctagaatcagaagacatttcctcagaatgttttgtttggggttagatattacaagtccagaggtaagtacatcttaggcacatttactcagcagcaagcactcttcagactttcccttcagaataccttacaaaagaagccccatgaaatgagaggtcctttacctccctgtgtgaggccaggccacaggctgcaagtttaaaggactgcaggctagacccagagaacgtcactgtaatgagaagacgagtgaaaagtcttcttttgggttctggttatcttccagacaccctcctcacactcatgtacccttggacttgcccttgcaaagagaaaagcacagaagtggctctaacaagctggaggccacaccaccttcctacctgttctttcctaccccctgctgatggtacaggcagcctacacatccatttttcaatgggacaaggatagatccccacatttaaaaataagactaaaacgtaaagccttctcatcaggacacatggggacacctgagtctttaaaagggtgtaattaccaagccaccaagctacaaggctgtacctaggcctgggaacagaaaacaaccgagatgctggcattactttcagtgtacagccctgtagtttggtaattggcagttgactggctgtagagcctgctggtctgtaatgacagagcaaggccatctgtggcccacgagtcaagatgacaagtatcctcatgtagcaagtagagaggaaacagaagtataacccttaattcaacagtgcttttacaggcaaagggcctgtcagctggcacagagtacgagcttaaattatacacatttttagttcaaaactccat

SEQ ID NO: 45593 - DNA, 1716 bp, Bovine  19866881623587
  misc_feature (1)..(1): n is a, c, g, or t
nttgcttttgcttttatttttctttttaactctaccagttatctagctttaaaagtagtgcaatcatcttttctccaaggaagtgacatttaaactgtgccctgaatgttggagaggagccaccaggggaagccccctggttctctgtgcaggagaccacctgggaagcttaaaaacaaataagcaacccaaaccgaaaccactttgttgcctgggtaccactcctgagaatctgaattgatcggtttgggatgtggcctggaatgcagatggttttactgtgtaactaagctgagagacataggtcaagtgcaaaacggtcctagctgagaaaacatcaagtgctaaggacctgtggcggcagggagtcagtaaggggactctgctggagcagcccatcacactgaattctggtggagaagggagaggaaaccccgaggtcagagaggcaggcacagcacccacattggctgttttatccctgggtgcgtgctaagtctcttcagtcatgtctgactctgtgcgaccccatggactgtcgccctccaggctcctctgtctgtgggattctccaggcaagaattctggaacagatcacatacccttctccaggagatctccctgacccaggcatcaaacctacatctcacgtctcctgcattgggaggcaggtttgttaccactagcgccttcccggggaagaagtttggattttacgtaaatacaactggaaggcccagagggttttgagcagagcagtgaactatgattttaaagcaggtactctgtgtataaaactacctcattctttttaaggaatgcatagccctccagattatggatgtcccgtaatttattcaaccactttccaggtgattgacatttgggttgcttccaagggaatgcaattacaaatagagctgcagcgaatatctgtgtgcactgtgcttttacatttttgtaggatagagtccaagggcttaaaaaatttagggaacacagtgggggtggggaggggagaaaatcctttaaaactccctgtcatgcgagggagagagctctcttaagcccaagtgtcttaaatgtgtgttccacaccagcctggataaagccaggtttagcagaccatcaagatcttgcgaacagccgctggagtgtcctgcaataatactgaagtgtgagaaacatggacacgcccggtgttcctgaaacggacatttcatttccccttaggttttaataatatcataaattgattacatttgctctgctttcagttctatccaagaaatttcgctaacatattgtatgtttagtatttcatgttcacttgaaaatcagctttttaaaactcttgtcataaatcagagcagaatttcactttgagataagtataccgtttttaaataatttccattgtctatagaaaaggagggcttcccaggtggcacagtgggaaagagtctgcctaccagtgcaggagacataagatacatgggttcgatccctgggtcgggaagatcctctggaggaggaaatgacaacctgctccagtattcctgcctgaagaatcccatggacagaggagcctgggaggctacagaccatgggatcacaaacagctggacacgaccgagcgcatacatatagaaaaggaacttaatataacatgtttctccatctattcaaataactttttttgttaacttctcaggg

SEQ ID NO: 45594 - DNA, 848 bp, Bovine  19866881885837
  misc_feature (1)..(1): n is a, c, g, or t
natgtaaaatctgatcaaaaggagccccagttttggaaggcaaagaacacgggactgtttagagtatccagtgtcattctacaaaaacctttttctttcctcatgagggcctttgatactctgccctggaaaaccaatacacagtattgtacaatttgataatgtgtgcacactgctctgtgagaagttggcaggaaaagtaaagggaagaaataatccttgtagttttaggggaaaataataaggtcactgcaagtagaatttttcccttcgtcaagtctcagtacccatcgtttttctgagattggatttcatgcgcatttccgcactggatgagaaaacttcatgttagtcctatcaactcacctgcctgtgacaatctcgagatcttaatagccagaccaccaaacaggaaatagtcgtgcagctcaagttttgaaagctatcagtccacaaccttgcttgccagaaatattttccagagcctatccaatatttaccattaaatatttgcaagtttaaaacacaaatattttatgttttttcatatagaacagaaataagagctattctaaggaaattaattcattcacatttatctactcatgtattcaactgtgtttgcttattcagttaatcgtcattcttttcctcaactaacacaagtcagaaagagggctgctgagtgatgaaaatacgaagatgaataagaccctgcattttccttcagggagctcttaggaaggtaggcgggcaaccacaatctaagatagattttgatttacaaagagatgcatccagttccaaacaggccagaagagttccacccaaggaaaaggagcatttag

SEQ ID NO: 45595 - DNA, 2499 bp, Bovine  19866880572046
  misc_feature (1)..(1): n is a, c, g, or t
nagaaagaaatccactcccatggagtgtctaaatgtgtctggcatttagctgacttttggtcgggtggtctcggggtcacattgcaggcgtgcagctcctcccactgagcactctgggttcccaccattcctcctctgcccctctctcttttgcgcatcccctgagggcctctttctgttcttctcatctctcggtattactgctgttctgcaaaaacctttaggatgattcagaatcttgcatggtacaaggcaccccaagaagcttatccaagtacttcttcaaaccattgtagttgctcatcccaagaaaaattctggtctatacagttttataaatatgacattcgcactgccaactgcttcttggtgcatgaatggcctattggcttctctttgtaaacttcagaagggaggcatgcatcttacatatgtagatatccatgtgctgtagctccttgcctggtcctttcacagaatcaccacttaataaatattgaaaatggaagaatcacttttcttgtttttacatgaaagaaatgaaaattaacgtttccctaagcgtaacttcattagcaagctaaattgactgtagcaattacacacacacacagacacacacaggtggtgcagtggtaaagaatttcatgccaatgtaagagacacaagaaacgcaggtttgatctctgtgtcaggtagatgccctggaggaggaaatggcaccccactccagtgttcttgcctggagaatcccagggaccggggagcctggtgggctgccatctatggggtcgcacagagtcggacacgactgaagcgacttagcagcagcagcagcagcaggctgtaaacataacggatgtttcttttgacctgtctgtaatcaggtcagtttcatggacaattcatagacagaggagcctggagactatagtgacatggggttgcaaaaagctggacatgactgagcacacatgcatatgtatatatatagagagagacagagttaatcctctcatttaaactaacatctgtgataacggtggtggaagggagttggtggttggagaggaaagttggacaattttgtattttcacccactctttcttgtgtgtaacgtgggaatccaaagctgtgtctctggtgctgtgcttttgtacttaactgtgctgaaggtggttcctggggtcagctgcctttggggagcacctgcattgcagagttcccctgtgaggcctgggagctttctccgccagcagatgcccctggctccgtgatcactctgctacctcacttgaggggaccccacccccgaggggctgacaggctcttattaccaggaaggctgtttctaatgacctgtgatctccatgcccaacctgccttctggcttgtttttctttaattctcacattggctttttgttcttggagtggttagaatggattttcatttgggttttcttcatctctaataattctagaatgccatatactgtgaaatgctaagtagggatgaacggtaaagctgcttaaaatccccccggagcgctccagcccatcacttctaaatctgattagcactcagcacctgccaagcagtggggcgattacaggctcacagttgaatttcgttttgtgctggtgcttcccccacgttcctactgtgggaaatctgacgtacagcacggaggagttaagaagtcgcagccccacttgagttgtattagtattaattacctgtgcagatcttggataattgaagcaattactcttcatttcagctccagggcctggaatggatggtttctctgtataataacaatttgaacggaatcttagctgatgaaatggggctgggaaagaccatacagaccattgcactcatcacttatctgatggagcacaaacgactcaatggcccctatctcatcattgttcccctttcgtaagtaaagccatttattctgcagttatctttctttatgttagagcttgccctatttgtcatctgtcatttaaggcagagttgtagcctgtagtgggattatcaagagcatataatctggatttagatgtttcatttcccaccctgtctcccaccctggcctctttgattggctacataagcacaaaatgaagtgattttttcctagcccgtcgtgttgttgcagtctacacagcctgcacaccgcatagtgggtctcattctttatcacacctgaagtggctcatgaagctgaaagttttgatttttttaagatttcctatttttttcttatgtttctaaaaggctacatatattcaaaaaaatgtatattcttagatcttcctttactgtcccctttaaagcagagtctaaatcaaaatccagactctgaactttgtattgaactgccctcagtactgtggtttatctgcagtggtgatgccgctttgtcaggacaggtcttcactgttttccatcacatttccagtgaccttgtccactgcgggacc

SEQ ID NO: 45596 - DNA, 946 bp, Bovine  19866880580760
  misc_feature (1)..(1): n is a, c, g, or t
ncggctccgccccgtgccccaccctcaccgcctccgcggggccggaagacgcgcccgcagttggtccagcgagccgctcctccccccgcccggcccggggcgcgggttggcgggaagcgcctgtcactcgccccgctcgggcgactcccggagctctgggagggaggagggggcggtgtgcaagaatgtggatcgagacagctctacagtatgcgtggatctgtgtgtgtctgcaaggcgccggctccctggccgtgtttgtgcctggagcagaaaaactgcgcaggacgctgaaagccccaagccctgatggagggagttgggcgcccgttatccttccccagcagtcttccggggcccctgccggcctcctcacgggaggctgggaagcggaggaggctaagtgaaagggagggcagccgtagtaatagcgcgtagtagtttaggggtatgggaagaaggtgctggaatttcactgtgcctctgcctgccagagcgagcctgcggaggtaaagggaggggacggggggaaggctccaagtggcacccaagctgtttgtagcacagtgttgaccatggaaaaaaaaaaaaaaaacaggcatcgacgtgctgcccgaaactttttctcccccaccccgccccccacccaaggctgtaattataaatctgtttcttttctcccccgtaaaaaggaaggagggcacaaagaacattcctgccaaatctgtctctcttctaaaggactgcaagcttccaaatgccaatgagggaaaaacagctgagaggctgaacgctttataaataaacaaacctgccctaacccctgtgttgactctgtggaccagacacagcactttaaccttccctcacctatcgtcttcccgtaagatatatacctaaaaaaaaaaagaaaacaacctcgtgggggcgggcgggagataggggg

SEQ ID NO: 45597 - DNA, 1315 bp, Bovine  19866881232015
  misc_feature (1)..(1): n is a, c, g, or t
nagccttaagatgctccaattccaagctccgaggaaactgagaagccccagaagaaaggcgctttgcccgggaccctgagggttggtagtggccctgagattggcagacaggaacccaaagtctctggggtcccagtcagaagccagagagtcacagtcaagttgcgcagtagtccagatcccttagctgggcggcatgaggcacgttgctcattcgttagactatgctgttcctctgagctaacttcttgtgtgtgtgctcatctatgctatttcatggacacatgcattaagggcatgcttctaaagattctcgacttaagaaaaagtttcccatgcaacatgttaacattcctctatatgcccatactttcctacttcccgtctcctgtgttttcccctaagaagtttttggtagtttcctataacaaaaaatgaggagcgtttttatgggactgtataccattcattacaaccttctatgagattcccaggtgaaaatcattatatatgcataaaatcattagatattaaaatataaaacatgaaaaatggaactaccaggctgacagcatttgtatcttcattgttcaaacttgtggtatcttaccatcatagccactgaagccagtttcaaggtaaaccataacaggaagtaagcaatttccttttattcactaaaaaataaaggggtttattagtttgctgatatacatgaaagaacatttaaacttggagtacccctgaattgacgtcagcttcctaaatttaaaatgctgactgaacgtgtgtgtgtgtgtacgtgtgtgtgtgtatgtgagggggtggaatgccaaaaaaaaaaagttacttctgcctgctttgttaatcacaaagaaaaaataataacatttggctctctagtgaattcaaggctataattcaccatccaggcttccctgttgttttagaaaccacttgaactgggttctcttagtcccctcttgtatcaccaaaacagtttgagtgatcccttgctcgaaatcattccaaagcagcctttcatcgcttcctgttttagccctaattcatttatcagattggcccagatccttgcctccgctgttaagatttctttgtttgagcataccttgagcactgattgctctcctaattttttattttttaataattgactctattaatagtttgtccatgcaattttgtctacagttcattcagttttgttttttttactccacactggttgaatgtgctggggaaacaggagcaaggaagagcaagtccttgccctcatggccctcacattctagag

SEQ ID NO: 45598 - DNA, 959 bp, Bovine  19866881330059
  misc_feature (1)..(1): n is a, c, g, or t
ngaattcaacgctatcctggctgtaaaccagctcctattcaccactcttggaaaatgttaccccctgccatagtaagaacattttggtatccccaatctctgaaatgctagggctgccatccaaatcatacagcaatttaggaagtatctctaaattcatattttcttccgttcatattttttgactagttttttaaagacatagtgtcactctaaaaatcaggcaaatattctgcatagttcacaaaatccagcaaacaatgaagccatgtcttttaaggtagcatgtatatacttctatttagaaaatgagagaagttttaatgatagatataatcttatgtggactattacactgttactgaagaagggaattataacttttatccctttaaaatatgccttcacattaaaacctaaaggtttatcaaaatattctatatggggggggggagtgcatagagaatagacaagcccaaaggcaagaagagttttttaattttagtttagtttaattgtggtacttataaatgattttaagtcacgtgcattggcttgaatgtaggaaaaacatctgctcaaagatttcagcttattttaggctggaggatataaaaactgctatctagagaacctggacctcactctgctaattcttcaaacaattttacccctgcttttgactgaggttggatctgagttgccagtatccctgtactctgaatagcatggctgtgaagcctaattccttacacactcaccatcaaggcgcaggtaaaggaagttccgaaaagcaaagtaatcctccatgatggtcatgagggacgtcatctggcagaaaagcagcacgcggtggttagtcgctctcaattttggcagaatacgatcaagtagctcaaactttcccgaggcccgatacagctcagccctaacccaaaaatgcaaaacaagaagacagt

SEQ ID NO: 45599 - DNA, 3360 bp, Bovine  19866880512002
  misc_feature (1)..(1): n is a, c, g, or t
naaaaagcaagagagttccagaaaaacatttatttctgctttattgattatgccaaagcctttgactgtgtggatcacaataaactgtggaaaactctgaaagagatgggattaccagaccacctgacctgcctcctgagaaatctgtatgcaggtcaggaagcaatagttagaactggacatggaacaacagactggttccaaattggggaaggaatacatcaaggctgtatattgtcaccctgcttatttaacttatatgcagagtacatcatgagaaatgctgggctgggtgaagcacaagctggaatcaagattgctgggagaaataccaataacttcagatatgcagatgacatcacccttatggcagaaagcaaagaagaaataaagaacctcttgatgaaagtgaaagaggagagtgaaaaaagttcgcttaaaactcaacattcagaaaagtaagatcatggcatccgatcccatcacttcatggcaaatagatagggaaacaatggaaacagtgacaaattttatcttgggaggctccataatcactgcagatggtgactgcagccatgaaattaaaagacacttactccttggaagaaaagttatgaccaatctagacagcctattagaaagcagagaccaacaaatgtccatctagtcaaggctatggtttttccagtagtcatgtatggatgtgagagttggactataaagaacatgagtgccaaagtattgatgcttttgaactgtggtgttggagaagactcttgagagtcctttggactgcaaggagatccaaccagtccatcctaaaggaaatcagtcctgaatattcattggaaggactgatgctgaagctgaaactccaatactttggccacctgatgtgaggaactaactcgttgaaaaagacccaataccaggaaagattgagagcaggaggagaaggggacgacagaggatgagatggttggatggtatcatggacacaatgggcatgagtttgagtaaactctgggagttggtgattgacagggaggcctagcatgctgcagtccatggggttgcaaagagttggacacgactaagtgactgaactgaaagagagcttgcctctacaccttgaacaaacttcttttttttttttttgattggtgttttgctctctggttgtcttatgctcctggtgatactcagcagcacagaatttgaaagagattaaggagcaaatgagttaacctttaacagcagtgggaagacgatatttgtagtctccctcaaagtccactgggttcataggaacagatgatataggaagaaattacatttaaagatttacaaacctttcagcagaacaaaaatctcccaacatgtagctataaaatatcattagagagcattaattaagtcacaagaaaaaatagagttgaccgttgaacaacagggaggtaggcgtgctgactctctacccaatcaaaaatccaagtataacctcacagttggtttttggtatccaagtttccttcataacctcagctctgcatccacagattcaatcagttgctaattgtgtggttctatgacattcatttcttgaaaaaaattttaaaaacatgtataaatggtctcatgcagtccaagcccatattgttcaagggtcaactgtttagcttgctggagaaaaatcataattcatttatggaaactcgtaccttcaattatctattaaaacaaattcctgagtcaaatttaaatatctctgagcagcaacaactcattttatgctggataagattttaaactggataaatctttaatattatacatttgaagtattgcggagggattaactgcaagaacaaaatattctgtctttgtttcttaacaaattcctttgaagcaccaatgcatgaacacaaataacttatccatataactctagctcattgactttgggattagaaggctgaaataatctcccagtaaaaaagatatgatagcttctttgaaattatgatgaataattactaaagggtgacatgcatgttaaattggaaatggtttaggggccatcggatgattttgctttacagacagaaaaccaagtgaatattgcaggagggtagctggggaacagacaggttgtgactctacttgctttattattttatccaatttgatgcctgcttctttccttctcacctggggccctccactgtgacgtgtgcaattttaaagaaaactgaagggtaaaatgaatcaaacgaggcttttgctcctaggaccctgatccactccaactgagaagtcacaaagggaatttagtcttattaaagggcagtgggtcagaccacagaatccacaaagctgctcttaaggctcagtgttcttgctgggtatcattaccatcaaaaccaaataactatgcagcatatctgttgccagaaaactgtagtaaattgggttgctgggatgtagaaaatttaaagcatccaaagagacagtgctgttgttcaaagcaggtctctttgcccttctctatcatcttcattttgtactttgtttaatcttttcctcccatgagttttgctaccccagactgagccatcatgtagatgtttaaaatttataccatttccttaaacccatgctcagtagtgacctcgttctaaagcatggtttctcagtgttggcagaactgacatttggggtagcatagttatttgttgtcagggtcattctgcacatgtagaatggttaatagcatctctgagctctatacggttgatgttggtagtatccctgagctctgataagcaaacacatctccagacatttccagatgtccccaggtagtggcaaaaccaccccaggtaaagactcactgctttggaagttgaaactgctggacccaacaactccctatgcaagacaagctgatgacagctcaggctagccactgctccaaagcttttcttcagcaacagaagaggaaacataaaataactcgcacagtatcccaggcttagagaaactccattaattaacgtggaggtttgacattgacatgatggatttatctgcttgggaagcatgtggtttagaagttggacctgctgtaccaaacgctcagtctgtagtatggttgtaggtatggtatatggttccttgattcattgggtgacttgacaatgcctcagtcttctctgtgtctgcaagatgcctaatgccacatagtgacacaaaacaatactcataaaagggaatcaggtgtcgtagatgcaaccatggctagccacctgcccaagcacttcaacctgttagcagtagagcaaaatgaattccaaggac

SEQ ID NO: 45600 - DNA, 1670 bp, Bovine  19866880576224
  misc_feature (1)..(1): n is a, c, g, or t
ncccatttggatcactgatcccaaacttggcttcacattagaaccatcttgggagtgggctttggaaatatggatgactggtcttcactctcagaggtttcactggaaatgaagatgcagcctcatccccccaaagttctaaaatgaacgagtatattctaatatatggaaaagtttgagaatggctgctgtgaattaatttcattggaacctttttttcatacattaatcaaaagcaccatttcaaccaagatactgcataaatcaattatttttaaaaaatccatcactgagattttactagagatatttttgacataaaaaatgtaaacatgtatgtgtactaacaggaagacatatagatcaatttaaatctttttaacttgaaacttgttcttgcatgacaataacaaaacaaggttgaaaggctgtgaaagataccatggcaagacagagttaggatgtggattgagttgaaggattttggaagaaagcatcatagagcacttgaaacattagagaatctgggcgaggtatttctgccagcttttcacttgtcagtacatcagaattaaggttgagccgcataaattgttagcaatgtcaactttgattgttggagtatgttcctaatcatggctgccaagagtggatcttgctgacttttgcatcttccttcccaaatcttggaagaatgatagatggagactttctttccaatgtgtaattgatacatttgtttagaaacaagtgatacttctgtgggaggacttgtgtgaaaatattccacctaccgataagacctgtgaaaaatcttactgggagtttcatctttagaaaagattgtagtatctcatcaggctagatacattttcccaatttttttccaaaagtgatacattttaaataaatctattagatgcatcatgactctagacatttcagtgcttgacaaaactccagctatgcctctcatgttaagaaaaccttgaagttgaaaataagtccctaaattttgtttattcacattaactaatacatcagaagcaagaaagtgaaagtgttagtcactcagttgtgtttgactctttgtgaccccatgggctatagcctgctgtccatggaattcttcaggcaagaatactggagtaggttgccattcctttctccaaatataccagaagtcaactttgaatacatatagtatgttttcactctttaataacttaattgatgcttgctgctactgctgctgctaagtcgcatcagtcgtgtccgactctgtgtgaccccatagatggcagcccaccaggctccgccatccctgggattctccaggcaagaacactggagtgggttgccattttcttctccaatgcatgaaagtgaaaagtgaaagtgaagtcattcagttatgtccgactcttcgcaaccccatgaactgcagcctaccaggctcctccgtccatgggattttccaggcaagagtcctggagtgcggtgccattgccttctccgaattgatgcttacactacaggaaaaaaaaagcaaaataagttgtaaaaaatatttaatctttggggaaagcacactggagtgaggtttaagttgtaattggtaaagaagcagtgtcactcatacaaggctggggtagaggaggggtgtttgg

SEQ ID NO: 45601 - DNA, 3467 bp, Bovine  19866880581575
  misc_feature (1)..(1): n is a, c, g, or t
nctggggatcggggatgggggtgggaggggtcatcaaagaactgcctgtgccacagtttgtccccacgttgtccctaaaagagttgtttgaaggaacaggagactgtacacttctattttccacccatccatgccttgtgtttctaggattagtttgatctgtgtcactgtgtcactctttgggacacatgcagtaaaaggaagctctgttgaggttaactaatgggatcatctgaatcttctctcatctccttttccagctgaggaatcttgggtaagccacttaaattctcaggatctctatttatgcatttatttttttggatcatgtggtagctctgtttttaattttttgaggaacctccatacagttttccatagtgctggcaatttttttcccagcagcagtgcaataaaaatttcttgttctacatccttgccaacacttgttatttcttgtcttgttgaaaatagacattttaacacgtgtgaagtaatgtctcattgtgattttgctttgtgtttccttgatgattattgatgttgaacatctttttgtataccctttggctttctttatatatttatgcattttcagttttgggcaatacatgcttcatagatttcttcttagaattaaatgatgtaatgatgtaaagaaatgaggtgcctggaacattgtagctgataaacacgtgttggccattttctcacctccctcctcctttctccagtggagaacggcaggctccatggtgcatcatagaatgtcctccagggctgagtccagtgaacctgggtttaaatctgagagctgccacttattagctgtgatgacttagacaatccaccaacctagctcctctgagcctatagtccctggctagtgaaatgcagacaaaaattacaagttttgatcattggttgaatttcatgattaggtaccagctttatgctaggaagtggattcaccatagtggacaaagcaggcaaggccccctccctttaggaaacttacattctcgaggagaggcaggcattattcaaataaccacaccaattattatgtcttaaatagtatcccacacactagctatcagtacctgagcatcagtgatgctgtggttaccgtcttctttatgagggtcccatgtgattacagcctctttcctcacataatttcctgttgtctttccagacccatttatacacatgaacccatgtgtataaagcagagacccttttctctaactattcctttcagcccgggttaggtctggcacagccattaattagtaatggctttcccatgaagtggttgtctttgtaggctctgagcaagcatgtccatgctaccataatgtaccagaatgtgtgcccctaacagtcctgaggcaaagatcaggaaattctgtttttattctcttcagagctaagatacaattaaaaatgttaccacagtaattggcaacatccattaacttgatgagaattgccagaggcagcacatttttcccctcttctgcacattattagcctataaatatacctggttcctttctctttcttctctagaatttctacaaaatacccacccaagctgtctccttaatgccctttgccttttaaaattaactctctcagttcctccagtacttccagtccataccacacaatcttgcatctaattacatgtgctgatgtacggggaagcagctggggaaagcccacagcactgagagctctgggctcagagtcagcagagtctggtgggaaccccagctccacctggttatcttgagtgactttggcttggggtttgatcatctgcaaaatgggaacaatacctgctagaaataaaacagtgagattacaggaggatgatgggaaggtgctttgtaaactcttgcatgtggggccctccagatcattggtccccagcagtaactttgtcttcctgctccctccttggtcttttggtccccatagaggtgcagggcagatgggatttggtggcacaagactgttgagaaaagccctcttcagctgcagctgcaccctgccagtggctagcaacacctcagggacctttccagcaggaggttcctctcccttctgatgcactcacttgattagaaagatatcccacccctgcctcaaagaagtagggcagagcaggatggaacaggggcttaagaacagtcagtgcaaaggaagagctcatgtacctccatcctccacagccatagagcctctcaatgccagagagcagagggggaggggatcccggcatcacccaccccacacctgtgatttgcagagagaggaaccgtgcccagaggggtcaagtgacgtagccaaagccacagtgctagactgtgaccagaactaaggtctttgccccagcccagtgctctttcttctacactccaatgcaagttttccttagacacttttgaaaggttgttgttgaaccatgtaaagatgccgggattcttggcctccagaggagaagaattcaatctggggcgagagacgaggcttgatcgctcagagcttttgtgtaataaagttttattaaagtataaaggagatagagaaagcttctgacatagacatcagaagggggcagaaagagtacccccttgctagtgttagcaatggagttatatactctccaatgaatccaaagaatgtctggaggttgtaaagacctcaccagacctactcccataatttaaattttaagataacaggattagccagaaggtttaatccagagactatcttcaggcaggatacattattgttatacaatcctaaggaatgtcgaggaaagaaaagtttgtcctttcttcctctttgagaattccagacccctctctccttggggacccctagacttcttatcaacctgcctaggaaatgactttctcactttctacacaatcagtggtattcagatcagtgtatgtctgtgtgcacatctttgtgtgtgtctgaatgtaagatgccaggaaccattgggaatattctctaaatatgtgcacatgctatttcatgttcatcaagacaaaacaaggaagttttgactcttatggaaaattatagatttagagaggttaagtaacttgctcaaagtcacacagctaatagaaatagagccaggattagaacctagggctgatgattccaaagctcctaaccactggacatagaagagacaagttcttgtcctaaaaacagactatgggttgaaaataatacctagtgtgatcgggcaaccccaataaacactgactgtgtcatcccagactccagtttaggaaatgtggggcagtgagacttctttttttaataagataatgtgatttttctcattaaaaaaaattatttacttttaattgaaggataattcctttacaatattgtattggtttctgccttacatcatcatgtatcagcca

SEQ ID NO: 45602 - DNA, 1579 bp, Bovine  19866880638988
  misc_feature (1)..(1): n is a, c, g, or t
ngaatagaaaaattcatttaaaatttcagcatcttaactcaacttttagtgtcttgttttatttgtcatgtgtacacatttttatttttatagaattgtagccaaggaaatgtaaagaactagatcagaatacagctctcattaagcatttttccatgttgtctcactgtgctaattatcatctttatggtagcataaacattatttacttaactttttaaaatatttaatattttcccatttatttgatattataagtaatgttatgagtgtttctttctccaaatggcttttcctatattttggattatttctttaggacaaacactccaagttacagtttctgaatgaagggtctgaatatgtttatgactttacagtaagccttttgaaaaataaattggcaacatgtatcaatttttagtgctgccagcaacagttgaggaaacctcttaattgaagctgcaccaatattagctattttaacttaataaaaaatcctgctttagtaagtgaaaacaagaactgctttgctctttttttaatttgcattttcccgtgtttgtttataacttcttattcttcatttgcagccagtctgttcatgttttagccagaagctttagtcttcttagtgtagaaaaaatggaaaatgtgggaggagcttttgccaatgttgccagcaaacaatactttgcagatcattcatagtagtatttcagtttcatgaaaggtgtatgtaagagcagaggaggtagagaaactaattctctgcttagcagttctagggaaagcaaaaggaaagcctgaatgtatattggaaactgtgccttaaatgctgtattaaatatgcatagtcaatatccgtgttattgacttggggaaggctggatcctccaggaccccactcttcagtcaaaatgtctttgcaggtaaccagtgtcccggaagaccagatcctcgttgccgtgttccctggcctccccacttctgcagagctgttcatccttccccccaagaacttgacagagaggaggaaaggcaatgaaggggacctggaacaagtaagtgaaagaaaccttggctaggacactcttctgcaccaccctctaagggaacacaaagcatttctagcccaaaaggtagactgaaccctttcctatttgtccatcaacctgtcactcattgtctggcaccagggctttggaagcaatcagctttacccagaataaacacaaatgcacaaacactggcacatttagccacacaagaaagaaaagcgctcctgaaatcattcattccaagagttgccattcttgcaacttgctcatgtctcccagctaatgagttgtcctggcaaaaagggatggagtggggggaggggagggttgtgggggatgaagagaaggatttgagtttccctgtctatttctcaaaaatgtgcttcctgtcttgaaagaggctggtcaacagaagttctgcttctaggaagaaaatgaactgcttttaaacgtgtgtctttggagagagatggattccctcatcttgctttgactaaggaagcagcattccccaaagg

SEQ ID NO: 45603 - DNA, 1031 bp, Bovine  19866880644405
  misc_feature (1)..(1): n is a, c, g, or t
naatatcctctattaggtggtaatgtatcctcaaacccaataagtgacaagcacattcagtttagaagttgagaaagaggggacaagggaaagagtcttagtgaagttcagccctagaggaaagaaaggatgattcagcttgtcatggatgagaagagggatgcagtatgccaagttaatgagtaacatgagccaaaaggcacaattagatacccacagctagactggaaagctcttgtgatgaaatagtcaacaatgagaaggaaatacgggtattagtcaccttggggctgattttcagcatcagaataagagaaattcaactgaaagtcagtgaaagtaatttgtggttgtggctaaggacttggccttcagtaccagctctccccagctcaccctcctcctcacgctttccgtccatttagacaaggctgatagacacagcctgaacttgcctttaggagaatgtcaaggcagctcatttactcttggcccttccaccaagcccaccagctttgcagcggccttacaccactgggggtgccctcagggcactgcctgcatcccagcgctgtcctgaatgcttccacttggcctcaaactcaccttcctaaggctcttgttggctaactggataaaattactgagcattaatggttagcaatgaattaaaaaatgagcactaaaccttccacacatttagacattagatgtcaggtttgattctggtcattggaagtagttcctttgcacaaatccaaagaggcgatcctaatagtgagaaatgccaggcagggcaggagaaataagagaatgtactgacttgtttacctgcaggtgatcacaactggcagtctgctcatgctgcccctcagctgggaaatctttctcatagcctcctgtgagaggcttgcctccctattaaaaacactactctctttccacagtcaactgaaatgtcaccaccccagaaatgccttccccaccaccccctttataattgcaatgcctaataataattgactgcttgt

SEQ ID NO: 45604 - DNA, 2202 bp, Bovine  19866880678563
  misc_feature (1)..(1): n is a, c, g, or t
nagcaccaaagaatagatgcttttcaactatggtgttggagaagaattcttaagagtcccttggactgtaaggagatcaaacccagtcaatcctaaaggaattcagtcctgaatattcattggaaggactgatgctgaagctgaagctccaatattttagccacctgatgtgaagaattgactaattataaaagaccctgatgctgggaaagattgaaggtaggaagagaaggggacaacagaagatgagatggttggatggcatcactgacttgatggacatgagtttgagcaagcttcaggagttggtgatggacagggaggcctggcatgctgcagtcatggggttgcaaagagttggacatgacagcgactgaactgaactgaactgaagaactgtagccattctgataccaagaatatttagaagttcactttccaaagcaagaattgttgcaaaaaccatagtattaaacatccattgcatttcttctaactgccaggaacagcataaatgctatatgcaatccaagggaaataaaatactcaatgccttcaaggaccaaacggtcttacaaagtaattaacctgcttaaccagtgaagcaaagcagaatgggatgcatttgagaagaagaactaaccacatgccacaggaagatgagactataaataacatcaagctacactggataaataggcagccccaggagtgtgagtatggaggttccatcacacattctctttttcccactgagccatattgcccagataactctaacaggacaggcccatgatgttttaggataactcagactttctggatccctgagtttcgaattcacatcagaaccagtccccatacatgagctttttttttacagggaatgtagacactagtccaggcttccctctatacttatgcctctgatctatttccctcccttcttttttatttgattctcaaacagaaatataacactctggcctcaacaaaatattttcatcattggttgtattatggaaacaaggtgtgaaaaatataaatatctgttctgaccacagccaccaaaagactcccaattcaaaaagatcttcagttttcccagagttttagagaactctggatgatccatcagttatcaacagaagagttcatgtgttatgaataaagacagaaggcctaaggagacactctggagtctgtgcgtctgtggttgctccagcctcagaccctctcagaccagcatgggcacccccctcgaagtcctcctgcattacccaagcatagcagccagaattcagaggcttagccaccaacattcccatgctccaagttgaaagccaaaggagtagctttagaagtcagtccctgaggacctgagtttcttaatgaagcgccttcatcagaaagaatgttcatgaaatggtcactctgcacattgaggatcaccgctgggctcccatcaagccagcgatctcttctggagcgggtttagacccttaagcccctctgagcctcacttaagtcaccggaaaaatggagatatctttccttttctcctttgcctttcacttttcttttcacagctatttgtaaggcctcctcagacagccattttgcttttttgcatttctttctcttggggatggtcttgatccctgcctcctgtacaatgtcacaaaccctcccatccatagtttttcaggcactctatcagatctaatcccttgaatctatttctcacttccattgtataatcataaaggatcttatttaggtcacacctgaatggtatagtggcttttccctactttcttcaatttaaatctgaatttggcaaatgagttcatgatctgagccacagtcagctcctggtcttgtttttgctgactgtatagagcttctccatctttggctgcaaagaatataatcaatctgattttggtattgaccatctgatgatgtccatgtgtagggccatgaaattaaaagacacttgcccctttgaagaaaagttataaccaacctagacagcatatttaaaagcagagacaattactttgccaacaaaggtctatctagtcaaagctatggtttttccagtagtcatgtatagatgtgagaggtgggactataaagaaagctgagcaccaaagaattgatgctttgaactgcggtgtggagaagactcttagagtt

SEQ ID NO: 45605 - DNA, 769 bp, Bovine  19866880683199
  misc_feature (1)..(1): n is a, c, g, or t
ngcatggcctttctctaacttccccgttgacacaaaagaattgttttaggtaaaatatctaagaagtcatctcttgacaattgggatattttagtgtcttaattattcaaattaatgattactgattattttctggagcaatggttgctgaaaaacgtggcaattcccagacagcctctctttttctcactattattaatatcttgtgttagtgtggtacattggttataattaactaaagctcattgtttttactctttgtgtacatcctatgagttttgacaaatgtagaaggaatgatatatatccactggtggcacacaatagtttcaactgcccttaaaaattctccacgctctactctttcatccttcctctctccctagtccttggaaaccactgattttttattgtctccatagctttgccttttccagaatttcatatatttggaattatacattatgatttgtagcttatacaaattggcttatacatattggaaaacataaatgtctcccaactttctcttaactgtaagctctgaaccagactggggacaccgtgaaaaactaatcaaacaaaagcctagtgcttcctaacattattaagggcaaattcacaaagatgcattttatattatccagtgtgtttatagatatgtcaagtgagtcaactgaaattatcccatctcagggaacattattacaattaccagttattagaattattcattattaaaatgagaatgtgtcagagttcaggtggg

SEQ ID NO: 45606 - DNA, 1148 bp, Bovine  19866880692411
  misc_feature (1)..(1): n is a, c, g, or t
nctttcactttcatgcactggagaaggaaatggcaactcactccagtgttcttgcctggagaatcccagggatgggggagcctggtgggctgccgtctatggggtcgcacagagtcggacacgactgaagcaacttagcagcagcagcagcatagtctcaaaagtcttacaggtagatgtgttaaaaaatgaagagcaatttgaaaaaaaaatttaaatgctgccaaattgtgacataaaattcattctcttccaaccatctattaaaaatattgaaaaaagtgtgttttcagagatgcaaataaggtgaacaatctttataagggcaagtatatccaaattcttacaggtatcaatcattaaaaaagcaggaagggggagacagtgatctctggctgaagctctgaagtacccagacttgtgtgatcaggagtggtttgactgccccagcacctaataaatattacagttgatcccaacattcatgagtaatatgtacttttatgattagaagaaatctaaatcattaggctgcctttctatttagataagaagaaagtaagggctagcatgaaattttaattactcacatttagagagcctgtggcctgctgcctcacacataatctattcatttaaggttcttgtaaattatattaagctagattagaccagtaggagtcaagggacacctcccttaatgtatggaaagcagccattaaaaacatgaaaattggatgtcaatggaaggtagaaactgtccgtgtttcaaacatgttttgagggctttccaaattagctacgggagacctcattaaatgcccacattctacctggttgtggggttgaagcagggaagggaatgtagatgcttaaaaatacagctggttggcactagggcagcagagtgattctgcttcacactttcacagaatgttctgtattgggatgggtgtcatatgtcttgagttttaataacatctatgccagtaattaacttcatgaaatgtctgaacttcagaccaatttccccaccatttaatgaggtaagacaggactcttctacctataaaattctaagatagaagtgtggtctttttgtttgagggcataataaatgaaaatagagcattagcttgaggtcatta

SEQ ID NO: 45607 - DNA, 1288 bp, Bovine  19866880707779
  misc_feature (1)..(1): n is a, c, g, or t
ntctttcatttagcaaacagagaagaaagggtgtcaggaagcttagggcaatgtctaatcctgtccgactccaagccatcagcttggtcataaaatagagcaatagaattttaaagccaagaaatcaaattattgtttcagaggcccaggtgaaaattctgagctagaaagggatttcagttttgcagaagggacgctatactctgaatgctgcatctctgagcctctgcagcatccaggtgcacagatgtgctgtgtgaactctggctgatatccacattcttaaaaggcaagtctatgcatcctcacaactggtgacatcactgctctatcctattgtcatcctaacccacagagaggagatggggtctgctcatctgcacttgtgacatctattcatgagctgccttagaaaagccttaccttgcaaacaccagatagcttcagaggacgtgggcctcaagataaccactgaataatgacactttaatctcagaatctgcattctcttctctccaataaacccttgcttctactgagatcctaatttctaagggaaagcatgtgcttattatctttctctatctatcttttgcaagtcctatctgttatgatcaggggaagacagaaaaataaaaaaagattaaaaagtgagcacagatatgcatgtttctctgtttcccagcttatttaaattgttagaaatgccttgcaatgaaacacacagatcaataatacgactgtatatacaacttatatatggattctgctagatgtaagacaacatgccaaaggcaggtaggtgattcagaaagaaataaaatatggtcacttctctgagaaatcttgcagcccaatggaatacatgatgaaaatataagtcgcacaaaatattagaggaaaagagaaagtgatcagctattcccagagtcactaggaatagattataaaaggtgcttctactttgccccaggagaagtaacagaatgatggacaaaatccatggtgcccagtcttatcttcatctcttagaattagcattttacagtgtatttcaagtatattaatatgcttcctggatactagctatataatttagaaagctgtgcaatttttttcttccttcttcaagttaggatcccttggggatatgcaaatgctatgcagattggtgacagtctgagatttacaggaaaggagggaatctaatattcccataaaggactaagtaagtgtttcggcttctctcttttagcccctcatcacctggacagcagcatttccttca

SEQ ID NO: 45608 - DNA, 2250 bp, Bovine  19866880722814
  misc_feature (1)..(1): n is a, c, g, or t
ngtgtctgacttttagcgaccccatggactgcagcctaccggctcctccatccatgggattttccaggcaagagtactggagtggggtgccattggggttgaccccactttaaatattaaaattcacacgttacaatgggtcctatccattcacaaaggattcaggatagacttgttaaaagcaggataaattctaaaagcctgtttttaggaagccacttaaatttaaaacaagaagagggggctataagacagagttccaccaaacagctgtgcagcaggtggatacaagtgtttcatcctcagggtcacctgccgttctttaaagacacttatctctacactcttaccatttccactcccttcaggagaaatttaaatagggttgaatctgagattaaagagaaagagaaggctattgataagtcctagttcacccctgtagccattacaagatcatttcccactgtgcagggcttttctctgctggagcatttcatgagtccctcctcccccaaccctgaggaagggaagtggcatctttctcctccccttaaaacacacatctgtacagtggcaaaaacggctcccaggaggcagatctaccgggaggtgaaagtgaaagtgttagtcgctcagttgtgtcctactttttgtgactccatggattgtagtccgccaggctcttctgcccatggaatcctctaggcaagaatcctggagtggatatctattcccttctccaggggatcctcctgacccagagattgaacccaggtctcctgcactataggtggattctttaccacctgagccacccagcaagccccaaccaggaggcagaccaagctaatcttcaggacctcttatcacctaataatcacccccattttcaagcacacaccttgtcaaacatttcacattcaccaaacccccacattggtgtgcaaaataaggattataattcagctaaataaaagagacaactaggtttcagaaaagaaactgcccaaagtcacagagctggtcagtgatggagctaagaatcaaggtgaggtccatctacctaagcatgactctgccacctaaaacaccccagcttctgtctccccgtaagtcatctaatttattcattccatcctactggaataaaaaagcccgagactgtactaagaacttaatgggaaacaagaacctcaaggtgccaaaaaagatcagtggattaggaatcagctagacagacattagtatgggttcctccactatcttggtgaatttaaacactctgcagtttctatttggagaaggaaatggcaacccactccagtgttcttgcctggagaatcccagggacgggggagcctggtgggctgccgtctatggggtcacacagagtcggacacgactgaagtaacttagcagcagcagtttctcttagccatatttttcatacctggaaaaggacatggttatatcattaagtgttctttctagctttaaaatatgacctctgaactatttatattcttagagaatcttggagaggaccatgtttaacccaaaggaatgactcgaattgtcaagtttctgcccccatcaaaaaaaaaatcattgagcacagaatcctttcttctgcctcccaaagtcacatcacaagtatgagcaactttttttatgatttggtagccacagaactctctcacacatgtctggaagtgtatagtttataatgccctttcaaacatatgatttcattttgatccctccaactattacacagatgagaaaatgagtctgatgttgactgatttggaccatttcataaagctggtagaagatgatatggagactggctttccagttccagtttagtcacaagcaaaagggatgctcctgagggtaccctgtacttggatccagagtcctcttgcagcctgagcctgttcacacaaccactaagctatgaccatcatcatccccattaatctcttttgaggccataatagacactaagtaatagttgttgaaataactaataaaggatgctagtaccacctaaaaatctgccaactccatctccaggtcagatcagctctgtttaaaggcatgtgcacattaacactcacatgtacacacgcatgacctccccacaattttctctccttacctctactcctgaaaaggcccactgagaagtattttatcccagacatgattctttcagtatccctcagtccaaactgtgaagag

SEQ ID NO: 45609 - DNA, 1989 bp, Bovine  19866880728281
  misc_feature (1)..(1): n is a, c, g, or t
nttaagttagcctttggatctttccttttcaggattttattattacatctggtttagacaagtgccatagtcttttaacaggtcatctcctgtgaaatcatcccctaccctattcatttcccacctctagagaccatcctctgtattaccacaagattgggtgtctgaaatataaagccactaatcccatcatgataaaacctgagactgtgagccaggtggcagagcagttctgagttcccttaccctactgctctccacccaggcaccacttcccaataaaatctcttgctttgttagcaaaataaataaagtatttttttaacctaaataataaagaaagaacacatttcacacttctcagaacctacaggaagtatgtcaaaaccccttttagctgctcagacctttcacaaagtgatcaatccatcccagcataacatcagtcacacctgcccttataacttatagattggctaaaataaactgtcatttatcaaatatgctgtacttaccatagaccatggctttgcacacgccttcattgtacctgagagacatcatcctgtctctgttaactaccgtttatcctttaaaacagagttcaagtattccctccaaagactattccattagttcacaagaatttactgaatcacaaatatgtgtcaagcctgaacttttctagatagaatgaattgcacttttctccatgctcctttgaaatgctggccatgcctctctcatagaactagttgcacattagacttaaatttgaattgaccgtgttttatccatcattatactctagtgcctaggtctgagcaaatggttaacaaaaccatttcaacttgctctaaggaaaatatgctgttgtcgttcagttgccaagtcatgtctgactctttgtgacaccacagactgcagaatgccaggcttggtgctatcaccctagagtctgctggcatgctctaattcctagcttgtcaccttctgactgcgacatatggtcaatggaaatcttgaagtctgattgtctggttaaaaacaacaacaaaagggaggggatatatgtatacctatggctgattcatattgaggtttgacagaaaacaacaaaggtctgtaaagcaattatccttcaattaaaaaacaaataaattttttaaaaagcagcaacaaaaacaacaaacaaacaaaagctctctaaactttggtgggccaaacgagtgagtgacattagtatatacttaagcagtggtccatcaatcattttattaaagggctcaatctcctgtcttagaaaaatgcaggagaaagatggtgccaatttcccatcctcaaacatggattaattgtctttatctctctcttctgaatctctccatctttcttttccatccttcattttctctacccttctctctctttttacagagcaataatctttatttaactgtagaatggtggtctgaatcatgaaaatgcctctgggaccacaccatctggttctttattcaagaagatttaagcaaagataaagtcaacttactttcaccagagcccgcttgatcacattggcaatatcttgcctccactctggaatgtcaggattgtggtaatccagattaggagagaaagataagagctgggactggaagtattctgcaaggagagagcatgtgtgagtgaggctgagagaggctgcgataaggtggggagactccaccatctttgtgctttaggaaaagggcttccatgtggcctcatctctaattctgtcttttcagcctgtctcttggcttctaaatgaagtgggatttggtgactggaagtcacctactggaagtaggtttgtgctcctaccactttttttttttttaatcttaagaatttcttcttgtaaataaacatccaaaatgcaagatgattgtgaaacttgaggaaaaggagacttttgctgctacaggtagtcatgcagaggcaaca

SEQ ID NO: 45610 - DNA, 1611 bp, Bovine  19866880731590
  misc_feature (1)..(1): n is a, c, g, or t
nctgccccttgtgtttgtttcgctcctcattagcacagctcttttgacctttatcatccagctcaacccaacttccttgagttcctaatgtttgttaagtgacttaatgagcaaatgagtttatttcctctcgtaattcgtcctgtcttgggctgtactgccactagctgttagggttacagctacacacagtatgtaccgtggggtccaaagtaccaagtaaagtcaaagaaacatttccttatgcttctaaaatgaaactcttgaagagtagagttttaaaattttaccaatagtatatatcagtattataaagtaagctttacacaaattcaatgcctttaactgctaagattcatagccattttccttttttgttcctatataacttccaagacaagcttactttctttttctcaaatacttgctttggcttcattgaaataagttattactagttatcagcaaatttttgagaaatagatgcagtacaggcagtctagtttcttttttctttttttaattcatgtgtgaataatctaggacgaaagcttttagattcgtagacagaatagctgtctcctcccttggcactgtgaagggtgaggactactggaaaaagcacccctgctgaccttgaaaaaacctcagaggatgcatccacgctccttgaagactgcgaggacaaatatactgggaaagaacgaggctttcctaactactctccctcacttctcaccaagtactgatgggctacataacaggcaatgaaatcatttctcccctggtgcagagaaattaaactgcttcttttatgcaggtataaagaagtttcatgcccatgattttaattagaagataagaccaacatcataaatgaactttattttatataccatgagttacaataagggttaccatcaaatatctagtgcaatgtactctcttcctctagccctgtttcttcctgtacacacactccatactttcatacacaaagcacattaatctgcacacaacacaaacattacatgtatgtgtacacacatatgcttacacgtacacctctgtggcacatttatgcatacacatgtacagaaaagcaattatatataaggtgcactgacattgtgagctggttttaggggaccctttttggcaagagtacatttttattgcaatctttctctgaaatccttttatatactttgatatcactggcagtgtctatattaaatctagtgtctgagaagaatggaaggagggatgtagaaacctatatgttttagatttctgacctacgctgggtactttgcaggatattttatcgaaacctcaaacaaattatgtgatgggtcattatttgtgttttacaggtaaggaaacaggctcagaggaggaaagtaacttgcctattaccctctctaacagactcaaatgtcaccaccttgagtcacatacgcacatactaatgctaatactttgctacacccggaaaagcactttgtcatctttaccaagggacaagggggaagtcagagaagcagctttttagtctttttttaagcatctttaagaaactggttcactggtaaagaatccgcctgcaat

SEQ ID NO: 45611 - DNA, 823 bp, Bovine  19866880745703
  misc_feature (1)..(1): n is a, c, g, or t
ncccaggaacaaatcccattctaatcgtctcaagcctcctcttcctatttcttgaaaattaacattgccaccaggtttaattaacaagcagaggctccttcatgcctaaacaccatgcttgaatgctctctttttagaggatggtgtgcaggtgcttgctttatatagctttatgaagcatgtgttataaaaccacctcaaccatatggcttttctataccatggcagtccattcatttcaatcccataaaatcctagcaatatttaagtgttaaaggtgactttcactatgatatttattattggataatgaaaaatgggacagatagccttcaaacctccaggcaatggactgaaccacgtctcttctaagcttttaataacaggactactatatttcctggaaatgacacaaattcccagagtcccctttgagattctcttttggcagcatgaattttcttaacagttctttttatttttactttagtggagaccaaatctcgtatcagtcagaggaaaatcagttagttgaatatttgaatctgctttctccatcagactggacgtttttagcatagccctgcccttcgcatttggccaagaattccctatgactcgtgactccccttgctgtagatacccctatagaactcaacatagagaactgtcagaacacagcgggaattaacttatgtcgtggttcccacctctggaccctcttgaatcctatgtcctgttgctattatatgcgttagcttgcttatggtcatccattactctgtatgtttgtgtctttagcagactgcgacatctctgagaa

SEQ ID NO: 45612 - DNA, 880 bp, Bovine  19866880746937
  misc_feature (1)..(1): n is a, c, g, or t
ncactccagtattctgtcctggagaattcaatggactgtatagtccatggggctgcaaagagtcacgactgagtgactctcaactcatctgtcagagatgcaatccccaaactgcccccccctcataactctatgtcttcccccactaaagagcctacattttcggctttctaaacatcaccccatttacagaactggaaagaaattagcatcaactgtggagcaataagctgctttctacatttagtttctggactagaaatgagcaggaattagccagcttctctcctcattaataggcaacagttgccatccctgctaatttacaacatgttaacacaacttgagctactccctggctgtcgtgactagcttaaggtgacatcaaagggaaacacataatatttggtgtcactgtgtgtattcatttaggctggagaggcaaggatgtggggatgcaaacttgaatttgatcagaatagagtaagcacagctctcaactcagttccaaggtggaaagcaagaggactttcagcctttgttcctgccccatggtttaatgcagaccctaaggatcctggacatctagactaggaagggccaatttaagtcaaaggggagaaaaagatatagttgagagcagtgaacttcaagcttgaatatgttcatggatcaccaaagattgtattaaaatacacattctggtccagtgggtgtagtgatgggtatgagattctgtacttctaacaagctcctaacttaagccaatgcatccaggtctaacagatcataccttgactaatatggacttagaggaagtaaggactctgagatacaactggtgtagtcttgtggtgcttaggcttcagtgtgcatcagt

SEQ ID NO: 45613 - DNA, 1424 bp, Bovine  19866880775552
  misc_feature (1)..(1): n is a, c, g, or t
ncacattgaagatttttagagggtgatgctgttttgcacctggatatgcattctgtgatttggagataaagctcaatttaattggtctctagggatcattagactttaactttcttcactggagattctcatagaaactgagattgtgtaccatatggccagttaacaaagagactataatttttgtggactctagatgcccttgagtaatacagctggaaaaaaacagcatgcttttacattcaattgcatttaaattaacacacttttgtgaagtgtattttgtttgatgaggctggtgcataagaccatctactggaaagatgtaagtgactctaatagagttgtgatcatggtctaatttgtgttagaggtataattcctgtatgttatagaattactgtaagagtaaagctaattctaatttgatgaatctggggagtctggcagatgcgtaggtttaaatgatgaattattagagcatgggagtaaggcatgcctgagtcccagcatgagaagagaaccagagtctgatgagtagaggtccattttattagaatatgagatgaccttggaaaataatggggataaaaatttaaagatgctaggaaagagcttgactaaagagttggacatttattctccaggctactgtatctctgttttctctttacatctagcaaataaatatatgcacgatttagtccctgtgcgaagttaattcaaagatatacattctagtgtaacagggtatcacatctgtttttccttgtctaagatacgtatagttaacacagatgtgaagtggcctgagctgactgtggccacttgaagctactggtgtatcattctgtcttctacgtgaacctcttcttgacattggaaagggaacaaagaaagtaagaatttatttgagaaattaaccttctagtctttggcactaagagaccttggagatcaatggggatcaatctcacccaactccgtaaaatctaaagggaaatattgtttatttcctggtctgttggaacagtttactgctaaagagggactcttgtccactccctgcctcagagtgcagtattgttatggctgtaattatacaatcaggggagaaaatacttcttgaaggccaaataataatctcttctttaagataacagagcccattccatccaaggtcaatgttgacaatgaatgtagttcattaggtgtgctcaccattactcttacaacactcttttcatggagagttctgttgttgctttctcatatctctaaatataaactacatttcttcttagctgttctccactgataaatccggtaacaaatattatttccaacagtctcaattgtattatggaaacatgctttgagctgctgcattttcttcagtattttccaacttgtaaatctgtaca

SEQ ID NO: 45614 - DNA, 2477 bp, Bovine  19866880799095
  misc_feature (1)..(1): n is a, c, g, or t
ntaccttgcctgatatatcttgcttctatgtgaatgcaatgacactatgtagttttttcccctcaacaagaccaacttcagcaagataaaaaaaaaaaaaaaatcacatgtatcttggcacatttttcattttgattcatactccagagcagaatgtctcattgttctaaatgaccaaggaatttcaggaacattttttttttttaaggaaaaggaacagcacagtggcaaaatgcactccataccatatcagcagagtctgagaaacagggatttctcaactaaaggtcatctgcagcaacgtctacctctcttaatgggctctgaccacaggagcatgaataatcctcttacctctataggcttacttgtgcaaacaggaatggcctccatcctaggaacattcatcgaaaccttcccacagatgcgacttactgcacaataacaaagatatagttctgcctcctggtgtgatgagaggcatgaaaatgtaagcttctcaaagccatttacactctttagtcatctctactggtctttacaactttgggaagaaatctaggtcatttcccaagctggaatcttgttgctaagtgaattatttcagcaccagtctacttcctagaaaatcagggtatttcttccctgacattcctgtctctccttctttttatatacttccattcaccccatgcctttttgcaatcctccttctaccttgtaaaataattgggatcttatatatttccatcactgttagtaaatgagcaaccaacttagataccagagtaggggatactggaactttgacatgagaagctcagaagagaccactgtaaagcagaagtccatgtacccatctctctgttttgacagccactcccactgttcaaaggggaaaactcacatggaagtagcttctgcaagaggcaacggtgaatgaatgacctccaccagcacagtatttatgggtctgaccacaagttactggtaaatgtgggagataatgagacacacctactttgctaaaatcaatccatctagttgaagtagtcagtcaagtactttcactgagaaagatcacatacatgttactagagatatagacatacaatatatcattagggttactgaaacaattaggttgctttcttaatatagtctctaaatggggtcacttggtttcctagataaattattatttaactggtgtgtgtgtatatatgtatatctatagatagatagatagatagatataaactcaacgaaggttatcgtatttaaaaataagaaaatttcaatgttaagtcaaggctggttctttcccacacataggtgttggcatctggcggcattttagaggaaccttcactcttaccactgatatttgctttcttctcttataaagttgctcataaaacatgattttccaaataatttaaagcatatagacagtactaaaccctccacctagacttcatagaaagaagcacagatttgaaaagggtacttaagagatcacttgacgtcacgtaccttcacttctggcctgcaatcatgctatatttaagacatcgactcgagctaccatttgttgaaggcttattgagtcaactaccacacaaggtgctttacaaacattatccctctttctcacaataattttattagatagatgttttatccccattttacaggtgagggaattgaggcacagagaagttaagtcccctgccccaaatcacaactgctaagcgcacagctgatatctgaactcaggactttatgactccaatgcttgtgttcatattgttagaactcatgaaaaagagaggcagattcaagtgcaggataatgttggctacatacctcatacaattcaataatgatgtttcccatcagacctcggctgctcttgatgttctccatggccagggtgaagtagatcccacgtgtgtctgagatgtagaggttgtacgtgtcattctggttccattcctggacggctgcaaacacttggttctcattggtactaatgatgtgcatgtcctgtaagaagatggaaagcccataaggcagcagatctccgtatctccttgcccactgggacccagagtaattaccatgacttatgaaatggctgaggaaaagcttgagttataggcaatgttaaacaattctgtgttgggccaaggctataaattatgagcttcatgatttctgctccttgctaagtgacagtaagatgggtgtaaggggctttggtgggtatcattttccatggcttcaagggatttatccactttcattttttatttttataactgaaaattggtgttagcactaacagagacatacaaccttgcgtgaggaaacccacacatgaaaaaaagacagggcttctcccttcactcaatcttaatttatggtttcaacatttctaggatagtggttttcatgcctttcttgggaatctt

SEQ ID NO: 45615 - DNA, 1498 bp, Bovine  19866880852335
  misc_feature (1)..(1): n is a, c, g, or t
ntgggcatatatcctgagaaacccataattgaaaaggacagatgtaccccggtgttcattgcagcagtatttataatagccaggacatggaagcaacctagatgtccatagacagatgactagataaagaagttgtggtacatatatacgatggaatattactcagccaccattagaagaacaaatgtgaatgagttgaactgaagtagatgaacctagagcttgttaaacagagtgaagtaactcaaaaggaggaaaaaaaaatctatattaacgcatatgtacataatctagtaaaatagtagtgatgaacctatttgaagggaagaatagagacacagacatagagaatggacttgtgaacacagcaggggacggagacggggggccaaattgaaagggtagcatgaaatatatgcattactatgtgtaaaatagatagctggtaggcagtggttatacaacacagggagctcagcctggtcctctgtgatgaccgagaggggtgggatggcaggatggtggtttgggagggaggctcaagagggtggtgatatgtgtgtacttatggctgcttcacatagctgtacggcagaaatcaacacaagactataagcaattatcctccaattaaaaataaaaattaaaaaaaaaatcaactgtacagctctacaacaaataaggtgatgataagcagcagcttgtttaggttatacggttctcttgtcccctccaatcagaattccattaacacaaccagaaagaactttcgaatatcacatgttttccccattccaatatcccttcagaggctctccatggcctgcagataatgcacaaattccttactgggatcctgcctctctgaacacctcaggcctcctcctccacatccactcattccactaaataggccctgaagattttgtcttcctctggattccgccgcctttggggtttgccccaggcttggtggctggaaggttagcctgtcattaggaattagaagagtgaacaaccttgaccctctgctagtacactggcctaaggaagcctactttggcagtgcagcttgatcaaggtggtcagccctctattatttttttttaaatcatggtaatatagaatataccttcaaaatatcatatatgcacaaatttgtagcaattgggggaaaattctcatatttgcttgacagacacacagcacctctcaggaaagaaaagcaaatgtgcaacaagctgtgaaatggaaggcaacactgcctcagaagagctcattttaagttggttttaaaagacgttttgtcatgcatctgaagaacttcagtgggtaccgggaatgggtttatccgtatggcttggaatgaatctccattgctcccctaaagataacccttctgagaattggaaagggcaaaagaaaaaattccctctttctctacaggaggttgtgcatgtaatcaggacttcaatgacatatctcctccaaaaattcc

SEQ ID NO: 45616 - DNA, 2925 bp, Bovine  19866880867369
  misc_feature (1)..(1): n is a, c, g, or t
ntgtatggatgtgagagttggactataaagaaagctgagtgctgaagaattgatgcttttgaactgtagtattggagaagaccctttagagtcccttggacagcaaggagatccaaccagttcatcccaaaggaaatcagtcctgaatattcactggaagaactgatgttgaagctgaaactctggccacctgatgcgaagaactgactcatttgaaaagatcctgatgctgggaaagattgaaggcaggaggagaaggggacgagagaggatgagatggttggatggcatcaccaactcaatggacatgagtttgagtaaactccaggagttggtgatggacagggaggcctgacgtgctgcagtccatggggtcgcaaagagtttggacacgactgagcaactgaactgaactgaactgaatcactgacaactcccatattgatatttttagcctggactctctgccctgaactccagactcattaatccagctatttgactcatccacttgaattctcttaggcatctcaaacttaatgtccaaaactaaacatctcaacttaccttccaacctccttctgctgtagtcttcatctcataaaatggcacctctatgcttccagttacttagtcccaaatctgaaggtcattttggactcttctcttttattcacaccccacatccaaattttcaccaaatcttcctggctttaccttcaaagtgtgttcacaccatgtttcttttcctgtccatgcttgcttgggccattttcacctggatggttacaacacagtccaaattcgcattttcccccaccctgcctttcttaacaccacaaccggagccaccctgtgaacactgaagtcctctgacataatcctccagtagctcctcgtctcactcagtaagagccaggatcttcacagtccttcacaagtcccagcaagatctaagcctccccagatctcccggacttcatctccttctgctctcccttgtctctcagctccatcctcattggtcctcttgatgttgattgaatatgaaaggcctcagcatctttgcgtttgttgtctcttacatggcttcatccctcatctcattcaggattttgctcgagtgtcagtttttcatagttttcctgggctccttttattctgctgcagctgcatagccctgaactaccctgcatgttaggacttgctcttctccttttgtttatccgcctgcccctccccacccccaccccttaacactcaccatcatctgactactgtgttacttacctacctgtttgtttatcttccttgccagaatgtaagctctctgagggcagagaagctggtttgttttcctcactgctgaacccatagcccttggccagtgggaaacattccatgcatatttgcttagtgggtgaatgaaaaaattatgagaatcagaaattggatgattcagtggactatcatacatttcagaagattttgtgtttgtttgctgtatgtgggatgagggtgggatcaggggtcatgctgaggttctttttttttttttttttcattttttttctttcttttcttttttttttcatttttttcctttttaaaaaaattttttaactttacaatattgtattggttttgccatatatcaacatgaatccgccacaggtatacacgtgttccccatcctgaaccctcctccctcctccctccccgtaccatccatctgagtcatcccagtgcaccagccccaagcatccagtatcgtgcgtcaaacctgcactgttcaaacacatgtccgctgagtcaatgatgccatccaaccatctcatcctctgtcaccctctttgcctcctgccctcaatctttcccagcatcagctgtggactacaaatactcaatttctgttccctgcagggagtgccccatgaattgggatgaggactccaggatttagacactgctgaaactgaaaaatatactcttgtgtacagtccctgaggagtatgttttagcatccttactacattaccactgtcgatcactttcactaaaggtcatggtccctattttaattggctggaaacaaagaactatcaggtaggggcaggaatgtggtggtgagacataaggggaacttcagggggcatgtatagaacctgatggatttaaagacaccaaggtttcaggaaggtttaatgaactaaagtaattttccttcagagtaaaattttacaggtattaaaggtcctcacttcactgaatgtgctcacgggcgagagcgtcccagtgatttatgaatttgcagattatgcattatcctttcagaggacaggactcccccggggcttcctgccttccttctgaagctgaagctgaagctgagtagaggagcccagagaacacaccacgtctgatttgtagcctcctgtatcacaactggggtctagaatgtgtgggtatttttcagagggagcttagcaactctagtgtctgaatcctccttctcccccatcaaataaggataacttggaagcctcgcctcctgaagaataattatcatactaataactcatatttgcatagtacagcttctaaagcaggtcaactttccttatttgatttgattcaaaaaccctgtgaggttggcaggggaaggagaatcattatccccattttaggaaattggaacagattctgaaaacgtaaataagttgctcaggctcgcccagtagcatatggtgagacttgggtgttgagtgcagccctctagtttgtaagtgctctttccacgctgccaggagagccccatccaggaggcagacggctggacccagtgggtcctggcttcatgaaatatgtgatcttacgaaaggaagagccatttctcttctgatcactttatcaccaagaatctta

SEQ ID NO: 45617 - DNA, 1774 bp, Bovine  19866880896611
  misc_feature (1)..(1): n is a, c, g, or t
nctagagcctggaattcctgctcaccaggtgacacagtcccagtacaggtctaaactaagatgcactcacagcaaatctggctgcttctaatcctgaccatgccccagtgttttaagttgcccccccccccccagttcttttacattagtttagtctaaaataacttagctcattcatttttatgaccaaaacatctggggaaagccaagcatttctattgcatttttaacagggtaagtgaatttaatccgaatttcctgcagctgctatttcccctcctactgggttcctgggctttcattccacaccagcacaacatgacttcatcagatggtttttaagagtaagcctcatttccattttcaagcacctcagcaggaacctgcaattctacaaggtgtgtaaacacaaacgagcagagcaggtgaggtcttagtcaaggtgacctcggaagtccaaggctagaggctgagatttcacagaggatctccaataaaagagatccagaactccttttcttactttccccacctcccagctatccaaatcaaatgagttcgttctttttaaaatcggctcggaggagctctccatggttcgatattatagacatggctgctcctgtttttttgttgaaagcatttctgggaaaggttggtctaataaggtaaaggctagatccaccctacgtgttcacttactgtcacttcccttgcctgtgtccctgtcaccagtgctttctgcatcagtgacaaggatgcctctcttttgcttttccagcgtgctattactccttggcatatgcacttgtatactcatagttattcattttaaaaattactcttgtgttgtcaaatgtttatccaggtcaacatttccttctgacagtataagttatttaggtaatgacttgagtttgtgataatatgtgtacagttcctagccacatatgcaaactgggttttgaaaactattttgaattctgaactattagaaatgattttagaaatgacccagtcatttctaaattcaattagaattaggaattaggaatacaaatcaaaggggcttgagggaccaagaaggtaacgttaatatatatataggcagatgatcggagaaggcaatggcaccccactccagttctcttgcctggaaaatcccatggatggaggagcgtgggaggctgcagtccatggagttgcaaagagttaaacatgactgagcgacttcattttcacttttcactttcatgcattggagaaggaaatggcaacccactccagtgttcttgcctggagaatcccagggacgggggagcctggtgggccaccgtctatggggtcgcacagagttggacacagctggagtgacttagcagcagtagcagtagcaggcagatgataggaatctttgggtgtggaaggctaaggcttcaatgagtactgactccatctaaaatactacacttttaggtatatggtagaggctttggtcaaaccaagggcttccctggtgacagagaggtaaagaaatccacctgccaatgcagcagatgtgggttcaatccctgggtcagaaagatctcctggtgaaggaaatggcagcccactccatatgacagaggagcctggtgggcttcaatccatggagctgtgaaaaagtcatataagacttagtgactgaacaacaacaacaataataatcagaccaaacaattatgattcatattcatttcatgggtcattcatttgcaacttctggcttaacagt

SEQ ID NO: 45618 - DNA, 940 bp, Bovine  19866880899433
  misc_feature (1)..(1): n is a, c, g, or t
ntaaaagttttatttttatataaattttcaatgaataaatgtgtctctaattagatctgaaaagattgtgaatcaccatgtattatataacctatgctgctgctactgctgctgctaagtcgcttcagttgtgtctgactctgtgcaaccccatagatggcagcccaccaggctcctccgtccctgggattctccaggcaagaaaactggagtgggttgccatttccttctccagtgcatgaaagtggaaagtgaaaatgaagtctcccagtcatgttcgactcttcacaaccccagggactgtagcctaccaggctcctccatccatgggattttccaggcaagagtactggagtgggttgccacgtccttctccaatataacctatactttttgacaaaattaacctaagatggttaccttagcttaagaggttagctaataatgtttaccaaaagatggtgacacagatatctgattttaaactttggcctaacttggcatgtaagtgaaacatttgggagtaaatctgccaatgacatggtgatcatttactgagtttgcagggccatgatcataaaatgggagctctccataaaatgggagttctccatagaatgggagatccaccaatgcatggggagacagaatgctatgggagaggggctggtctggctctgctgccagcaagctgtaaaacctctctgctcctaggttcattatttatttactatttataccttgcctatttccaaaacagattagaggtggctttcaataaaaaccactaatgtatcagaattcttttatgaggttaataacctgagattaaaaaaaaaaaaaagttatagcagcaaatctaagctgagagaatatgttgtaatggagcaaaaatgctgctatgagttccatggctacagagcaaaacaggaaacaagtt

SEQ ID NO: 45619 - DNA, 1674 bp, Bovine  19866880907548
  misc_feature (1)..(1): n is a, c, g, or t
ngtgacctgtggtagcaactgagttaaaagaacctatttggacaaaacagaatttcataaaaacactgagaaaaaaggaaggaattgtccagcaattcccttttgggaaaataaaattcctttaagttggtgtttttcaaacaagggcaattttatttcttaggaggcaatctggtactatctggagatgttttcagttgttaaattggggaggtcctattggcatttgatggattgaagtcagtaattttaataacgaagactatggctggcatcaagccagtgccttgagaagtacagagggaccatccaatattcagaaacttggttgcacactaaaaatgctctcaatagttttttttttttttttccatttgattgacattcacaaatactgcttgagatcaataaaactcagggcatcaggaaaggagtcaaaatgaagaaagagaatgggttataaccaggatcagaaaggtcaaaagaaataaagcaaagaacagaaggagatgaagtgaatcaaatgaaaacaaaagaagcagagtcaaatgccttgtttctaagaaagcagaagtatgttctgatatttacatgaggaagaacctctagacgcaagcaacactctttggcatctctttctttcctgggatttagaacaaattgctgcacacctgatgttaacttaacctagaatcttcagtttggaaatcagtagggaactcgattgaacattttaggataacttgtgtgcctacatcagactgatttaaatggaacagcatcataggaaaaattggccctttgccagctgtttcaaacgccaattccatctgaggcttcttctgtaagggaagaattaacattgctttctgacattttccctcatgactgacattcactaggaatttatccacaaccattggtttcattaacattattattgctttaggttggcactctgttctctgcctcatcctgtaaatatcagatggcattttgttccaaagataaaaaattttctttcttgtacacacatttaccacacaggaaccccacatgaggacgtgaacacaacctactgtagatcaagtagatgtcaagagactgtgttcttccaaacccaggcagagggagttagccatgtttgccatgacagtctatactgctcacaaatgttttagaacaggagagaaggaagaaatgccttcatctctgtacactaagtcttcctcaatctgaggacattaagagccctttcatgaatgtcacatctacctgtctctagtctaaattgaaaaacagcatcacacagttaactaaagatgtgtctagagaggctcactatagtgcaatgaaagaaaattagggtaatttcttacctggtatttcagcatatgtgcatatgtgtgcaactgcatgccagtctgaaagcagatacacataaaaaagaatgcatctcactctctttgctcttcacagcagatcctgatttttaggatttatgagctgtcagaatttcaataagtgaaaatgtcatcctacttctaatgatatatttgattaagccatgcagatatgtgatagagattcttcacgggtttattgagatcagtcagtacataaaatgccttctctactggtaaccgatatttattgaatgcctcctatgcatgt

SEQ ID NO: 45620 - DNA, 846 bp, Bovine  19866880916220
  misc_feature (1)..(1): n is a, c, g, or t
naaaagaggttaagtgttacaatcgtatgagactctaaaaagtgaaagtgaggggaacggttttacggtgctctctaaaagaaatctatgatgtctcaatgctgtaagcaagaagaaaagaggcctggggaaaagcatagcttcccaaccaccccagaaaagatgaccataaacctgcaactctttttttgtttttgtttttattaattaatttattttttaattgaaggattaatcgctttacagacttttgttgttttctgtcaaacctcaacatgaatcagcaataggtatacatatatcccctccccttttaaacctccctcccatctctctcaccattccacacctctaggctgatacatagcccctttttgagtttcctgagccatacagcaaattcccattggctatctattttacatatggtaatgtaagtttccatgttactctttccatacatcttgccctctcggcccctctccccatgtccataagtctattttctatgtctgtttttccattgctgtcctgtaaataaaatcttcagtaccatttttctagattctgtatatatgctttagaatatgatattatctttctctttctgacttacttcactctgtataatagattctaggttcatccacctctttagatctgactcaaatatgttcctttttatggctgagtaatattccattgtgtatatgtaccacaacttctttatctatttatctgttgatggacatctagattgcttccatgttctagttattggcaaatagtgctgcagtgaacaatgggatgcatgtgtctttttcaatttggcgtaaactcccaact

SEQ ID NO: 45621 - DNA, 1363 bp, Bovine  19866880989523
  misc_feature (1)..(1): n is a, c, g, or t
natctcatagtctctgtgggtcagtaatcaaggcacagcttctctggttctcctttttaggggctcacagagctcaaccaggctgtcagccagggctgcagcctcatctgagacttgactggggaagggtctgctttcaagctcacacagagtgttggcagaattcagttcagggctttagtttcttgctggctctcagccaaagaccttcaaccctaacacagctgcctgcttttccaaaacgcacaaggcaggaaagtctccagcaagatggttgctacatcctgtgtgaatgctaagtcgcttcagtcatgtccgactctgtgcaaccccatagacggcagcccaccaggctccgtcatccctgggattctccaggcaagaacactggagtgggttgccatttccttctccaatgcatgaaagtgaaaagtgaaagtgaagtcgctcagtcgtgtccgactcttagcgaccccatggactgcagcccaccaggctcctccatccttgggattttccaggcaagagtactggagtgggttgacattgccttctccacctggaaacactaagttaatcaaaatcaaactgcttcccttctccatcagattccccagaacctttatttggctcctctgctttgtgaacgtcacaagacccccttgagaacaaagggtctagtatgcagtatttcccagacttacttgctctctctacagaagtacatggcttcagacttctcaggtaaactcccaggtcccatcccaagcctgtcaaattaagagtttctggaagtagggtccaggaatcaattttttaataatcagatggttcttatgacattaccttggaatcaccagaaagaatcctttgactgctgcttgattacccctaaaaataagaagctcatcaccttataaggcagccagcttcactatggggcagctaatactcttgtaacaatccttaccccaattggtgatattaccagcattatcattatcccaaatggccccccaaagaaaagccatctgaccaaacggtacctcttaaaatctagaggactgagggctctccaagctcaatcccttcatctttcagataaggaactgagacggcagaagggcaatcctatcctaagtcacacacacagacagaatcagacttggaatcagtggttacttctcgcagccctgcctcagacccctgcagccaacacccctctggctctgaccagagaccccagccctgctggaggctggctccaattcctggtggacctccctcagttctggcaagttgtcttggaggaccacgccacccttccctctgcccccgctcccttaggcaccagaccggaacc

SEQ ID NO: 45622 - DNA, 2059 bp, Bovine  19866881009533
  misc_feature (1)..(1): n is a, c, g, or t
nttctatatggggaatctgggacgtgtcaggtactgtcccagtgctgaagatattgtgaaaaataggacagaccattgtgttgccctgaggcattttacagtctagtcaagtccctactctgggtctcttgggctgttagctacttccaatctggggactttcttatcccttgaaaatccccttggttcagcagctacaatggtttggctgaaagctctttcagttcctgagctctaagagggaatgatgccccttgacaggaatggtgggaggaaggggagtgtgcattcctgtaggcaggaaaagcagagacagactctgaaatggaaagtgacaagtgggtaggatcacacactaggcaaaatggacttgatgggcctgtgatcttcccattgctgaggctttcaatgcatgtccactcaaagtaagcaccagcacccagggagtgctccaggctttcatctctacatcagtgagaggcctggtgaaattgctctttattttctgagcttcaagttgtcatcactaaagaagtgacatgttccattttggggcatgccattttcctactcgggtgggcaaatgacctggtttgctcagagatgaacctaatgtgtactgaggcctgaccatgtgcctggaacataattctaatcctcacatcaatccagtgaagggaatgatactggcttcattgtccagataaggacactgagactccatggggcaagctacttgccttaggtcacacagagagtaaatggcagagcctgaactctacactaagactgtctgggtcagagcttttggtctattaccaaggtaacagattgcttatattttcctctgtattcacgccaatggctttggagccatggtttcatctttcgtctgtttacacctgttgctgcccttggcttcctcatgagagtggtgctggtggtggttggatggaaggagtgatggacatgtaggaaggtgtgagctcagagtcctagttaatggtacactttgagctaatgaactctagttctggtgatctctcatcatgaaatacggacattggcagagaattctggggtcattttgccccacccccttactgggctgcatgctacctaaatcatttctaagagatggctgtctccttccttttcagtgtctcttaggaaatgaaagtgaatggatttttaattcatttttaatggctcgttacacaaaaccaggacaacctcccactactcaacagccatttttcacaagctcctagtttcaacaatgctgcattctgcttccttgatctgccacttgccttgttcagctgccacatgctgcaaagtgctttcttaacaatggtcccattttaattagggatgactaatgctaagtctcgtcagtcgtgtccgactctgtgtgaccccatagacagcagctcaccaggctcccctgggattctccaagcaagaacactggagtgggttgccattgccttctccaatgcatgaaagtgaaaagtgaaagtgaagtcactcagtcgtgtccgactcttctcgaccccatggactgtaacctaccaggttcctctgtccatgggatttcccaggtgagagtactggagtggggtgccattgccttctcctaatgtctattaatttctctatcttgtatccctttcttggatcatataggaatagacaaacctgtgtttgggtgctgactcctacctctccccagcagcatggcctggacagtttcttcatctggactacgtggatggtgatatctgctcttcactgtggttatgctcattacctgtgtaatgcacacagaacacaagcacagcgcttggcattttgtaggtgctcaggatatactagcattgccactgctaccttttctgtgtttgttcttctcttgcctaaattactcagtcatgtttctggctgtagacatactgttttctttcatttacatccagtcaggtataggtatgtatctttgtcatctttagaaatccctagagagtaaaatcgcactaaaacttaatttagtcacagg

SEQ ID NO: 45623 - DNA, 1942 bp, Bovine  19866881028231
  misc_feature (1)..(1): n is a, c, g, or t
natttaaaaaaaaatgttcgttagaaagaaaggggaaaaaaaaaaaactagtctcaatgagaccaagtggcttgctctagttcacatgtctgctaagcagcatgggtatttgaaaccatgtctgcttgattttagaacacaagtcattcttctctgagccaaagagactggcagatgacttaaaaagaggccattgcaacccaatcctaaatcacctcctcaatggtgctaaggaacatatgtgtaaccagggagattttgccctctcttctccacctccatgaaaatgaatgagctgaactgagggtgagaagtcaggataggctgcaggtatctaaatctgtgtccccaaagcttagctggcaggcatgagtggggctactccactcaaaattcgatattcttctgtttttcaaccatttaaaaatgtgaaagctgtacttagcacacaggctacacataaaacaggagggaggcaggatttggttcatgggctacagtctgctgacctctgcctttggcccctgccttcttgccccctccccactattagctccctaacaccttgctgacctagaagcaccaacactcagcctacctcctagaccaaaatctgcacacatacttgaagccatgccttctccgagcgtgccttgcctgaaccaccccagtcccagggcaccatcctggacttcgtccatggtggctagaatgctcatctggttcgtgctagctttagtagtgggagagcaaagaaaaggactgctaaatgctgtgcttcttcatgccttcaaaagacctgcatgttaagagtggccaagctgcagcttacccagtggaccaacatgcaggctgcccaagctggagttcttcccaaagtgaatgggaagcatccaccacctccctttctttgccacaagcccagggatgaagcatgtgtcctgtgaagaggggaagtgacaacccctgcaggggaaaagatgcaccaaacccatctggtcagtgcaatctggccaggcccatgcggctaaactcatgttgcctaaagcaacagtttacctccaggttggaaaatggcagcaataaaaatataaatggaacccagccagagagatgattctcagtaaaaaagagactctgcataaggagaaatggggggaaaatatttatatccatagagagagagagacattatcttcttctccaacacatttttctgaagttacaaatcaatggtttctatttattcccactggagagaaaaacaaaaaccctgagatttatgagcagtgttgtttatttataatccaaaaactcttctcataccatatggttgggaaatttacagagagacaaagtgagaggaaattgcctgcttaattcaatggtcttggcaaagctagtaggcagagagtgcatcccaaactcttcctctgacacatgtgtaagcgtgtacaggcgaggaggcctgcatgcagagagcagagggagcccttccatcaccagaaaagccacaatgtagtgtagtgggaatgcaagcagctgatgagctcagctgagaaggacaggctcatttctctatcccagcacaggctagagaaagggatactgagaaacagaccagaaaggagggtgagggctaagcgatgtaggagcaaccagtcttctggacaagtaaagaggatgcacagcacatgagggttctcaggaaggcaaagtacacacagctctctactacacttctgttcaatcattttccttctccatgttagtgagaaataagcagaaatttctgattccatctctgctgctcagcatgctctacagaaaggcaatcactcaccgccttgaaggaaccaacacaagtttgcactggacgccttcacttcctccatgctcgacccttccctttcagaatgatgacaaacagaaaaaaggaaaa

SEQ ID NO: 45624 - DNA, 1426 bp, Bovine  19866881043806
  misc_feature (1)..(1): n is a, c, g, or t
nggggttccaaaatcactgtagatggtgactgcagtcatgaaataaaaagatgcttactccttggaagaaatgttatgaccaacttagacagcatattaaaaagcagagacattactttgtcaacaaaggtctgtctagtcaaggctatggtttttccagtggtcatatatggatgcgagagttggactgtgaagaaggctgagcgccaaagaattgatgcttttgaactgtggttttggagaaggctcttgcaagtcccttggactgcaaggagatccaaccagtccatcctaaaggagatcagtcctgggtgttggacagggaagcctggagtgctgcagtccatggggtcacaaagagtcagacacgactgagcgactgaactgaactgaagtcaatggaggcagacatggtgctgtcaccttgcgcttcacatgctgccttttggtgttgatactgacttcttcatcaacttcttgtgaaagggagaacccgctgtcacaagcagtctccaaaggacctggtctggaggaagctgcatgagcacaagaaaaagcagccacagaagatccgagtcgggtcaactcattgctctaaatggggtgtgagtgaagtagtttggtccaaagataaaactcatgggtctgctgttccctccggctcaattatcttccaacttcatccaggcttttctcagctgtcacctcccaagagacaccctctgaattaaatcctccaacattctgcatccattatcctgctttgcttttcttcatagaattttacatgacagttgctcattaatttctcgtctgcctcctccccaagggaaaggcagggatactcacctgttttgttctctgctgagcctagaacagtgcctgacacatacacaggaggtgctcaagaaatatttgctcagtgaatgaaagaaggagaggtcctctcctggcagacataaccaccagtattccaggcaggactgcagagttgacacccttctgccaaatgacttttctcaagcccagaaggatgggctgggctgggttgtagggcaaagggaacctgcaaacccaggtcccaactcagttctttcaggtggacaggaagactctgactgccttcatctggaaaacacacgccgtgaaattccatcattcacttagaaagttaaagagttgcaacaaaattaatttcttatccccagggaaattaaaatatctgcaaacaaattctacccctgcagcccagtttcaggtggttgatacatctgatgtgttggcagcagtgagaaccaagagggaagcattgggaaaactagtttctagctggaagggaagatttaggaaaggtaaaacccaaaaataaggaaaactaaaaatacaccaccaccaccaccaaaagcaacaacagcaaccactgcca

SEQ ID NO: 45625 - DNA, 781 bp, Bovine  19866881064212
  misc_feature (1)..(1): n is a, c, g, or t
ntttttttgcgaaggagaaacataatatttctgggacttagaaatgtttctcacatatgtcctctttaagagggcactgagggttgtgaatttcactgttaatgatatggcttccctcctcatttggagttgcagcccctgagaacagagatcacgtcttatatattagatcctccatgtgcctatgtcaatatcccatacagctggaaccctgggaatgctgagagattaactcttgtccatgtggacataccagcctgcatttcttgggcttctaatgcagcttttacttaccttacccattttcaagcacttatcaaatggcatcatatcagtatcagctaataggtatttaccactcctgagctctgcctgggacccttgggcacaggctttctcctatgcatctttctcttactagaagttgtagcacatagtatattctcaagtaaaagcttgtggaatccaactgaactttccatccagacgatatggcagtctgagtccacagatcaatgccctaggagttgtaggaaatccctgcccagcaccaggcaccttcctaaggcctctctggtggaataaggcccctgatggagcatccccaggtaagtagtctgccctgtggtctcacatgagaccgggacactgaccagcaggcagtgtactgggtttcctctcaggtccatatctggagcttgcaggaggcgccaatccctgcctttgttgtaggtgatgtatgtcttcacctggtcatccaccttcttgtttgccaggaata

SEQ ID NO: 45626 - DNA, 794 bp, Bovine  19866881126295
  misc_feature (1)..(1): n is a, c, g, or t
ntctgtgtgtgtccttgagcacatttaaaaaatatctctctgcctttcttcctttatctacaaaatacagaatataattaacaacaaaatagggaacatcttaagagcgcttgctatgttttaggcaccatggtaactgctttatttgattattacttaatcatgcaaccaccctaggatataaatgccatcactgccatttcatagatgtaaaagcagggacagaaagcagctctttaatagagctggatgtgaacccaggatatagaatctgtgctctcaatcttttaaattcctaacaagtgcatcagtctcatagtgatgttgggagattcaatcattttactccatggagatcttagcatctgactggcatagagggagagctgacagaatgttagttattattattctggccttcaaagaagttaggaaaactcgaatttgtattctctttaagaatttggtactgtgttctccttgtgagtggaaaatagaaaaaaataaagcaggaagaagacctagtggagactgggacccttagaccttgctcttcccactatggacatatcattcccctcctctgctttggtttcctcacctagaacatgtagggtttactagaatgtccctggactcttgtttctttttctaaattctccgattccttgataaatggggcctactttgcattgcacaattacaagtcatgtataaatattagcttatgcagctggttaatcacttaatgtcagataaacgtgcagagcaaggtcttaatatgtttacataaa

SEQ ID NO: 45627 - DNA, 754 bp, Bovine  19866881144601
  misc_feature (1)..(1): n is a, c, g, or t
nagaagagacccagccccagagaaaagagtgaccacaatcactgcccatcccatctggctcccaagctcctgcctcctcttgatggaagcaggccagctggagtgaacagtgtggggctcggcgtgggtgagcgatgctagacagccaggtgacacatcccaaaaccaagtcaacaactccaggctcagtgtgtatcaggcagaaatatgacagcgactgtcaatcacaggaaatatcataaaagaggtttaaaataataaagctgcctcggaactgctaatacgaatgatccatgcacacgatggcagaccctgctccagattactgagtgtggaggcatccctgtgagtgtgtgtgtgtgagtccacaggcacaaacacacacctgcacctcacaatacacagagaaacaaagctggcactgtgtctgcaaaactcagtaactgtatccttattccaactcagttcttctacctgaaggagacaagtgatggcggagaagtgagatagacccagtggaccaggaaagaggcaggaagacccgccctgattgatgccaaagcatggcatagctatagatggccaacctgggcctgatgattagcaggaggaaacaggggcacccagtgaacctgtcagcattttctattgcttttctggaatctaggaaaggatatgttattgttgttcagttgctcaatcacgtctgactttttgtgaccctgtggattgcagcatgccaggcttccctatc

SEQ ID NO: 45628 - DNA, 1117 bp, Bovine  19866881183865
  misc_feature (1)..(1): n is a, c, g, or t
natttctggctttatttttagaagaacagattctcaaatttacaagtcatatgaattaaatgaatccaatgatctacatgtaattgaaagccatccttccagtgccagaggataattttaattgcaaatgttattaaactgtccttgtgaatttatttatgtgaacaaagtcccccataacagtgttagtatttggttgttttaatgtgtatcctacagtacttaaaggtctccagaagttaaaataattatctttctctttcatttatttcttaaaatattgatattcacttcaaatcatttccctgaaagcttacaatgtgggttggtgatgtttttgtcttaatgacaccaacatttatttttgtgagggtttaagttcttcagtaaatagtaatctgagattttaaagaaaaatggatcacccaagttcaacgtagtacctatgtataatagagagtagaggaactctggttttcagatccatatatgtccatcgacttcatttttgcttttggataaaatgcaaaatgataccctctttaacttgaataatgcaggtaacattttaggaggaaaagttggagaaaaatttgtagttagctctctttgaaatcatttgttcattttcagaaaggtcagagaagatgtgaacaaagattgtaatgctgagctgaagaaatcagccacttatttattttttcattcatgtcatatatacatattatgtgactgtataaatcttgtttttcattttctgtcttttatgatactttaacatcttaggaacttggctgactaggaaaagaggggctctgccatggctagctaattcctagagacagcaaattagtccctttcatgtgcaaaccaatgacccaaagttcatctctctcaatcaccttctttattgaatgtttacatgtgaagccgatattcctctgacctgacctgatcagcgcaggcctaggtagcggacaactcgagacagcccctactgaaattgcagcctgatggagttattcacactaaccaattctcatcctgtttaccttgctttacccattttcttgccttaaaaaccataatcattttcccccatacttttctcaaatcc

SEQ ID NO: 45629 - DNA, 1797 bp, Bovine  19866881228965
  misc_feature (1)..(1): n is a, c, g, or t
ncatctaccatttggctggcttccatccccactggtggtcaaatgtgaaccagtccttactgctgtgcctcataattcaaggcagaagtgcacacaagcactgccagaggacagcgaccaaacatgtgggcagcatcatttggaagtgcctggtggtgcggcaaggtacatgcagcagtggcatcccgccaccactttgctaagtgaccttcaataaccccctgagaggtgagaaagggtgcattcacccgttcttattaaagcaaccaggggcatctgcctggagcttagggaagggctgtccatccaaaacccatgcttgacttggctgcgatgaacaggaggaaaacatatcacaggcaccatccgtattcaggtattcaatgctgctttgcctcatggtaagtgaaggtgacatgagctattcagtcagagagaacttaaactgacttacaaaacacgtattcagttttagcaatcacacagaatggaacttgaattttatagtgaaagcttctaatggatttaatattcagcttcctgggattcaaattaatacctacttttttctacaacatgccttctaaagtgaaattcagctacaaccactaatccatttgacaaattctcactcatcttttaaaacttaagtcaaacatgaccctcggttccacgtcttctactaaccactctcagtagacttaatcacttcctcttttgttaccaaagcacttaatacacctctatcgtaatgtgtttccctggacaaagactaagtcttgttcatcttggtgattcctgtgcctggcactgtgctaaccacagagtaaatttttaataaatgtctgcttttttgatgccacactgggtttatttgctcttaatcctatgttcaacaacaagaactgcaaacaaactttattgttgaattcatctttgtttgccaagacctacgtgtgctcttaagtataagcctgtctcctaagatctagacccaactgcctaaaactttcatacctggatgttccatgaggtcaaactcaacatgccctaaccaaactgattatcttttgcccaaaacctgttctttttctgtagttcatccatgtctaagtaatatccccaatccccactcatttatctactcagctgaaatcctgagaaccaccctaaaatctttgtattgcaacatccaaataaactctaatttgagttgactccatgtctttagcccttctcaaagccaaccttcctcttcaaccttccaccactgcagaagtccaggccctcagcatcccttgcccagagcaccatgtcagtcactagcgtttcacttgctctatttcaaatacataggtctataacttctttttttctaatatataatgaagaagttttcatatcaacaaacctaatatttaattattacatgatattctaccacactaatgcattttaattgactaataaatctctcgtggttgggcattcagatgacttctaatcttttaaataattatttcaatagtagcaatcattctaataataatttttataaggcaatgtcatactggactctgatgtcactctcaccatccttcacccttacctcccggcgtgacctttctaagcaacagatctgatccaatgacaccctactctgtattctgttaagaacaaaacgttaacactccactacctagcccagaacaggagacccttcctctgcagcactttaccacctctttcctcttctgccacctcctcacatgggctttcagtctacccccgcaaaga

SEQ ID NO: 45630 - DNA, 737 bp, Bovine  19866881241583
  misc_feature (1)..(1): n is a, c, g, or t
ngaggagatgactctgtacggggccctgaagatggttggaatccaagtaagtagagagagagcatgggaggaacttctaagaagacatagtgagcccaagcacaggacctgctggagaaacgaaagggaacgtggagcctttctgaattctatgagggtagaagagtgggcaggaggaaatatctggtgcaggtaagtgtgtttagtcacttagtcatgtccaattctttgtgacctcatggaccatagccctccaggcttctctgtccaaggaattctccaggcaagaatattggagtgggtagccattcccttctccagggaatcttcctgacccagggatttcacccaggtctcctgtgctgcaagtggagtctttaccatctgagtcaccaggtgagggaggagttttaatcccttgctatggacattagcctgaatcctgaagcaatgtgcagtggctagcagattttgagcagggtggggactacataaaagcaaattaacttacatcatatttttccctggaaaacagagctccctgcccaataaacgccatccgattgcaagatgtcaaagcacagcctagtctcagattataaatttacctgccaactactgagagtcatatcagcctgagaaggtttggtctctgcactgtatttatttcccagtcaaaaatgcaaggcactaatagcagtagagaaagaggcaagctgaggttgagtgggttcccg

SEQ ID NO: 45631 - DNA, 754 bp, Bovine  19866881268691
  misc_feature (1)..(1): n is a, c, g, or t
nccccagaatcagcaccataaagcgattctctgaggatcctcatgtgcactgaagttcgagaatcactggtctgtctaccactaaaatagcttagcgagagtaagagtcactggggtaaaagtcgcctcccctagcccctgttaccatggtacaaggcatcttggcctacagaagtgagaacagtttccaaattcgctcattttctcctgggcaacagctgcaactctgggcaagttcctggattgagttacctaaagcaaatcacaccgtgagtcagggtggtgatggattgtgccctgcaacaaatagtaagccaggaattagaagagttctgaccatcagcaagtcattctagaccacaatttctacatttgtaaaaggaaaacaccttatggtcttcctcattggctagttttgatttccacagatgtgaaaaacacactgccagttccacagttatcaagagaccggtgctcaggagtgcttaggtgaactctcttcttctgtagagggataaactgagactcagagaggaaagtgacttctctaaggctacactacagatgagtgcagagctgaagatagaatcgatatcctccttattgtagggcagtattatttctgtcacatacctcctcagcaaatgcagaactgatccaactgcccttgttgagagccagcagagagcctgattgggtatgcagtgtggcccccatattcataatgtacagaatgctttaaaatctgacttcc

SEQ ID NO: 45632 - DNA, 1960 bp, Bovine  19866881279499
  misc_feature (1)..(1): n is a, c, g, or t
naggaggagaaagggaaagacaagggcaaggcaaagagatttgaacacattggtttgaagtatcaggaaggagttttacaaaggaaagtgtaataaggcatttccagaaggaagagttttactttgctctgttattaaaattattgtttagtttagaaagtgtccaggtattttggtgcctgggatgactggacaaagcactttcaaagagtaatggggaacaaagttagatgcataaaagtcaaaagttgatggaggtggaagtacaaatagcaagggtaacaaaccagagagttcaagtctgatgagaagcccttcccttccggaaaggccagagctggatagtcttcttccaagataccgcttggaccctcgttcccttgtcttcatgcagaaactgccctctgtgagaacactccatctttacatggaggatgcagaaagcatcaactttagctctgctaagcaaccatactctcctgagatggatgaggcccaaataattgaacctggaagttcgaatgcttatcatttagggtaggtttttctacagatggctaatttcatttcctgcatgttgactttttcctagctcttggcttggaagggaagctaaatttcatgcttagggagtaccttgcccttacccatgaacatatgcttaaagacagaatattttctctgctcatttttaactcataaaagatgcagcaggcttggggcagagaggaagaagagtatgaaacttacatggtctgtctagcagtagccatcccaccaccttctcagaggaactgcctcatctctatgtacaccagaggaatggtcatctctgcatcacaatactccactagccaggtctcagctgacggggctagagttggataatcattcaaaatctgcacaaagacagtacctggctggttcaaaaaaacaaactgcaataacaagattccctctatctgaaacttccttctaagactcttagcttgcaggagctagaaactttcttctaggacccttacagttggagaagcatgcactggaaaagcaagtgaaaatagagagggctaagagcaggcagaggaaatcagagatgcaagatgatagagattaagaccctattttcatggtccccaaataattctcagagtgggaaaaagaagagagaaacttgtgttaagggttcattgcaaatgggagaaaacaattataaacagcagctaaagtcacagtttgggggtagagcatttctgccataatcgaagggcagcctgattttctgtcagcaaagcaagggcagcttggactcccatggatgaccactgggtgcttgcagcttacctctttctaatcattggttcatcactataggcggtgtacatattttagcctacttaaaaggctctttttttttttactttacaatattgtattggttttgccatacatcaacatgcatccgccacgggtgtacacgtgttccccatcctgaacccccctcccacctccctccccataccatccttctgggtcatcccagtgcaccagccccaagcttcctgtatcctgcatcgaacctggactggcgattcgtttcttatatgatattatacatgttttaatgaaactggagcctattatacagagtgaagtaaaccaggaaggctggtttctatctctgctacaaagccatagtctgtccactacctctgggttataactagagggatatactgatttggtctggataatttctataaaatgtaaatatattttttcttcattgagagttccaaaccaagtcacaagaataatgtacagatcagaggcactcagattagtatttgataagtgggagctaagtagggtacaagaattctctcatataatcctcaaatcgtaccatggaacacctactattattattatttacagtttgagctgaaaagaaatgaag

SEQ ID NO: 45633 - DNA, 974 bp, Bovine  19866881287864
  misc_feature (1)..(1): n is a, c, g, or t
nttacatctcttattgccctggcttctacctctaaatcttatactaatgtttactgtaactcacacctgtaacagacacctgtacaggtggtctcatgcagcttaaacaaaaactacacacaaactaaacttgtgtataaactgggagtttgggattgacacatagcactactatagataaaacagataaccaccaaggaccaactatatagcacagggaactctgcttaatattctgtaataacctaaatgggaaaagaatttgaaaagaatagtatgtgtatatccgaatcactttgctgtacacctgaaactaacacattacaaaccatagtccagtctaaaataaaaattataaaaaattaaatgcataagtcaaatcttattcctccactggcttaaagcttctttcaggttctctgccatgtagctaatgatctgtgaatcaatagtgaactataccaaggcattgaccagcaagttcactatttgctcctccactccaacctccacacacacacactcaaagcccacctattttaatattcaaaatatttatattgtgggttttcttaaagggaacatgaatttaagtatacatttggttctgctcaaaaagtcacaatgaacaaaggccccaaatctggaccatgccagatgactgctctaaggttctctttattacataagtatatggaataaaaatagaatgtatttatgaaaggctgaaagaagttccaagagatagcgtaaaattccctaagaagtagaaggtggaagtcatacttaacttattttcttaatatgctatactttgaaccccttagagaatgcctactctgttaaaatgtttcactgtcttactgggaaaaataaatcagttcatctatcattttcctgaactgccaattccaactaaaagcctgacttcccaggcttgaattactttccaaactatttcacttttcctacgg

SEQ ID NO: 45634 - DNA, 2875 bp, Bovine  19866881349204
  misc_feature (1)..(1): n is a, c, g, or t
natttatttttctaatactaaatgatattgcatcctaaaaataaattatattttagaataatacactttcttttgcatacgctgctagattcagtttgtcccactgaatcttcacattgtgaagtaggtgctttacagtctccttacagagtgtcctttagtagtaatatgatcaagggtaaaggtagaacttgccctcaaacctgtctggttgcaaactccaagattttaaccatctgccataactctttggatcctttgaagtttacaactcatgaacgtgcatcaacatacatttgcatagtgtccactagtctagttttttcctcttgagacagtaagatccaacaggctgattaaactgttgtttattaaacaggctgtaattaaactgatggaccttgaaaatcaaccttttagatgtctgagtgtaaaaagaggaaaaaatgattgaacttcaggcattaacatgctccaagaccagagggatagattataaatgcagactaaaatgtcttttaggtctattatagagaatgattctaagtttatcaagttaccatcttaataggaagggaaggacctcatctccttcccatttatgtattaatagatttatgtatctatcaagcctatttacacaagcccacctgcacttacacacttcctcatcagaacctttaccattgtcaatcgttcaatacaaaagacattcactgaaaatgaagcttttggcaagctttcaccaaaccattcaatgtccaaagattaattcagatctcctgttatgtttttctttcactttgaacatgtatgttttctcaacctactccagttactccacatccttttctaaattccatcactagagccaaacaccatagagaacccaaatgaactggaaagaacctaggtcaagggaggcaaatgctttggaaaattcaagaatgggtgtcaaggggttctgtcccttctgtgctgttaaaagcctgcccgtattcaagagatcatgttctaggcattaatggtatgctggagatccacagaaatgactggaatctctgctctggaactttgcttctctcacattgtcttgaggagccctctcttgaccaccctaatttgcagctctcccaccctgactctccctaatctttcttatgctattttccttatagcacttatgacaataattaacaacacatattattgttagatcaattccaacaacagttagccaactacagttgaccttgaacaatgcaggtttgaactgtccaggtgcacttacatgcagatatttttcaatagtaaatactatagggagggctacataatcagtggctggttgaattcatagataagaggaaccaaggatatagagggctgacaataaattatgcacggattgacccccaccttgttcaagggtcaactgtatatcaagagttggccaactatacaaaccaacaataacaataaatatagcactttatttttaatttgacacacatggaaagtttcatgatgggagaaattttttgtctgctttttgtttgttccttaatgtactcaggtacctagagcagtgcctgggacacagtcactgtgccatgaatactgatggaaagagaaaaggacactggaatgagggaggtaaggagaggaaagtgaaagggaagtcgctcagtcatgtctgaagttggccttcatttctcactgtgcaacctggattggaacatgctgaccaccactgttggtcactagagcagggtctatattcctaaaatgtggagacaaatgatctcagctcagatatgcataaagagtttcccaagtacacaaccagcaagaatagccatttaaaggtctaagaattgtgttaaccttaaaacaccaaaatcaatagacagcagcagaaaggaatggactacggatatgcacagtgacatgatggaatctgagaatccctgtgcttaatgaaaaaagccaggcacacaaaagaagtgggcattgtatgaccccatttgtgtaagatgcaaactaatctacagtgataaaaagcagaggagtgctggcctggggccataggtggagggaggaatggactgcacagaggcacgagacatctctggcagaggtgatggaaatgctctgcatcttggaagtggctttataggagcttatgactgtcaacccccattgaactgtgtactttaagtaaatgtggtttattagacagaaaatatttttcaataaagtcaataaggaaaagaataccataactagcacagggagaggcagatggctctttagcttggttttctatccaaagaacaacagccaccagacctctgtataatcatcagtccagatatctacaatatgcaatctcaattatttctctcacttgcccttcccccctttctagccatcactcctcctcctgatatgaagaaatcctgaaaaagtatatcagcatgcacagttccactccttccacctcagtacctgtgtggccaccctagatgttgtttgtaccgtttgtcaccatacgaggtttagccaacactccatttgaaccaaggcagccataatccccagcatctccctagagattcaccctgaccctagcctcaccttactgtcctcttagaagtgtttaaagatcaggaaagtaccccagaatgaaaaaaaaaaaaaaaaagaaagaaagaaagtgtacttccaatagaaagatttttcatttaaatgcactttattgtgtgatgtattcctttaattaaagtgtgtgtctgggtgcattggttgctattacagtgcaattcctcatgtttatgaacgcaagagagctagggcaatgcagggaaactca

SEQ ID NO: 45635 - DNA, 1320 bp, Bovine  19866881349857
  misc_feature (1)..(1): n is a, c, g, or t
ntgctgcatttagagtttgtggcccaggtcttaggtataagaaagtaataattggtttccctttgtcttttcccatgagactcttgggaacctctcaggtaggaatgtttgagacaagagtggggcatttttgatacactgtcctattttacaccatcttatttctataaaatcctgccatggctccatagcatctgcatcttgacttaaaagagctttattcctctttatttggtggaggaaagcaatttcatgcaactctccaccaatgtgggaccaattattcaggagttaatgcaaccagaaactacagctgaatttagaagctagaaaagggcatgctgtgggtacctagataagtgagaggaaagacgagctacagcactcttcccaacacatacacacagctgaacaatgcttctgcaaatctagcccttctctagaatgatccacatgccatacctcggatgtacccaagattgttacagtctctggactacctgagtctgagaagctctcagactctatccatctaaatccagcccagttgtgactccctcatcaagccttcctagcaagtccagctcaattttcctccactctccccgtgtcccaagtgtttgctctacaacctggaactgtactaccaccactttactctccccgttcaccacgagaggggcaagagacagagagatgcagcagaaatggacaagggactgtcagatgtcctagattctagttccaagtcttctcaaactctttggttgtctttggctagttattccatctatctgggcatatttccttttctataaaaaaggattcagtttttgaagagaaatgatgtctgccctttctgtcttatcaggccattgtttgtaccaaatgagacaccccatcctgtaatgaatttaatatactagctgagagctgctatagcagtgagctgagtatgaaagcaatttcctggcttttccctgggcctgtttgcacttctttgaccacagcagtgcacccagcaccagcctctgtgagtgttggctgctaatgcctcactgttgctcgtgccccagaggggtcaccgtctctctctaacaccccagcctcctcctggatggggcacatctgtggtgtaatggcctatcacagcaacaaccctacctctgctaggagttttcttctgtggctgctaagccctcaatctcaagaatgattactgaccacacaagctgagctttcttgaaagtgattgtttactgggaacatctggtgtgtgaatggaacacttatattttttctcttccctccctccagtca

SEQ ID NO: 45636 - DNA, 1545 bp, Bovine  19866881384550
  misc_feature (1)..(1): n is a, c, g, or t
nctcaaagctcttgttactttgcaattaatttcacttcccatttgagcacaattaccctttatttttacaaatccatgcagtgaacagatacttgttgattctttccatatgcaagttaattaaaggcatcaaaagtcaaagaaagaactctggatttgaaaatcagaaatctgaagcctgaatctcagttctactagttcatgactggtgatgtcaaggtctgaaacctcactagaggaaagatggcttcttaggggaacccagaaaccacagcaagaaatggtcctctggcttgcacttgctggaaagcctgccaaattgcatagctctgcagatggctgctcttggtccaattaccctaactcaggggagattaatattcacaggagaagacaacgtagcctgttcagagaaaatagcagggaaacaatagcaaccgggcttctgtgctgaggaggcaattactgggggcacaggctctgtgctcactaagaccccagcacttgctggagacaggccagtcccccagatctggtccaaccctggtgcccatccatagcggctgctgagagtaggaggttgttacatttctagtgaaagccacccatcgctcctcactctgaggcatgacatctcctgtggctcctccttaacctctgcagattggaagcccacaaagcaggcaccacaagctgccagggagagcagatgttcgagtcagtgtgagggcagagctgtgaaaaaaacctggtgcaaagacttaggctggaaaccaacaggagagaccagctttctgcctgatggtcattgctatcctcacatctctattttctaactagaatcactcttgtcttgtattccaagacctttatttttttttttctggataagacatctgttctaaatctatgttgttctatgttggcttagaggtgggatgttgacagattaagatcaatgagttgcagagaattttttttaaaataaatctcaattgcatagaatctggttaaaatgtaacccttggttctaaacacagtcaccattaatcctggcaattatttgcttctttaatttgctatttatttgcttctttaatttggttttacttttaattgtaaaaccaacacatgcaaacatacctgcaaaactcaagaagcagatcagtagttttgaaatttcaggatgcaccagaatcacctggaaagcttgttaaaactcagactgctgggccccacccatggagactccgaatcaatcagtctgggtggggtccaagagttgctttttctaattaagtttccagatgatgttgatgctgctggtctggggaccacacttggagcagcacagaagcagaactttaatgccaactgacatacagctctgtgcctctctgctcctcacctatcttgaacccggcctccctctcagatgcagcttctttcctgaattttgtgtttagtgatgataatttttttttttttttaaccaaggtgaaattcatataagagaaaattcaccattttaaaggtacaattcag

SEQ ID NO: 45637 - DNA, 1475 bp, Bovine  19866881438899
  misc_feature (1)..(1): n is a, c, g, or t
nttcgtttgtttctctaattaagataccattttaattaatacagttactttaaagttcaggtatcatttgccagtttgccagggagtcaaaaccacatacaccaaaggactaataggatacacaggaatctcactgaacgtgaacaaagacttgctctaaaaccatacctacctatttaccttagatatgtgccactgcttatttggcaatgctacagaatggcaataaggacacctctttgtggtattaacccttttctccatcggaatcaagttctccactgtagatctctcttgttctgacagcaaattccaaccatactcattcagctgagaattttcaaaatttcacttttgttcattagtgtcaccccatgtgcattttttatcaaattctgaacctgtctgataggcatctggcatttcttgatccttcccatcttagctagtctaccgaaataggttgaccagctgtctgttgttttttttttttttttccttgattaacattcatctacataattgaattcaatacctctgatccttaataatagataaaatcctcccaccatactaggaccacctagtgctgtctttctctgttctattaaggcaggacatcttttctccttatatggtcttggctccaaacaatggacaaaagagatttgatgacctcctgacttggtgcagaaaaatcaacacagaagttctggattctgttatacataattgcttatgatcaaaatacagtgtatgtttttcgctttaaagaaggcagctaaactctaataagcatgattattaagtctgaatatgtgaagatgaagtcaataattgaaaattcctgtatgatggtatataaaatagatgaagcatcaaataaggtatgagatatagcaagtgtaatcaaatgtatttactgttgataattttaattaaggaagtcgttaatggagttgtgtatactcaggaaagatttcatgactttatttttagaagtacacattctcaaatttgcaagtcatatgaattaaatgaatccaatgatctacaggtaattgaaagctgcccttcctctttgcgaccccacggactatatagtccctggaattctccaggccagaatactggagtgggtagactttcttttctccaggggatctagccaacccagggattgatccgaggtctctcacttgcagtcagattctttaccagattctttaccacaaaggaagcccaataatactggagtgggtggcctatcctttctccagaagatcttcccaacccaggaatcgaacccatgtctcctgcattgcaggcagattctttaccaactgagctatcaggaaagccctaagattttatttggctgccctaggtcttagttgcagtacgtgggacctagttcccgatcagggatcaaaccccaggcctcctgcatgggagtgcagagtcttagccaggga

SEQ ID NO: 45638 - DNA, 1050 bp, Bovine  19866881476510
  misc_feature (1)..(1): n is a, c, g, or t
ncaagcctggggttaccttcatcacctgctcctcctaagatagcatctctgacgcattgttccctgcctcccactcttcccagctccctgaatttgctggaccaaagcagagacaaagatcgaaggtactttactagcagaaaactggccacccaagcctgtcgtcatttatggcactggctccggaaatgtctaattaattcatttatccaattagccccttgctctctgaaatgctttttcttggttgctgggcaactgggatagactttcaacacatgcatgctgctggtgaatgaaccatcagttttttccttcaccctggcacccccacttttctttctccttttatttgtctaatgcacagtaatgaagaacatctccaccaatctccagttttctcaccttccccaggcctctggatatacttgctgtctgccttaacacatttctgaaggtaatttttatgccagacatttgtcatggacgaggagagtgacagaacatataggtacacagagatgtgtttgcaaaataatggaattagccccgctcacgcaagacttgaggagagcttagctggtgcctgggacctggccaaggttatgctcagaagtgtttgggcagagtggggagactctcttctggtgatgtggcattaacaagggcagtggttccatttgtctttatggcctgcccttcctggggaattgtcatccgtctccagcctacagtgtattgtgagcactaactaggaggcaggactttaagagagactgaaagagacatcaggagggcagtacagtgccttgaggaatcatccttgaaacataacatgctctcgttgcaggatgtggaagtgccacatgctgcttcagggagttaaagtgttagaactggactttgagctgaggcttccacccttttctgtctttacagatgagaaattggaggataaaccttccggaggatataccatttgcttggtgtctcagaaccagagtttggggttccagagtcccagaccttctcatggactaccctgctcct

SEQ ID NO: 45639 - DNA, 1307 bp, Bovine  19866881558855
  misc_feature (1)..(1): n is a, c, g, or t
natccatcctcctgtgacatgcacatctcaccttcctgtgtcttctctcccctgcaggaggcattgccaccattgcaaacagcgaaagcacaaaggagatccccaactgcactagtgtttaacaccaacaagccgcgtgggcaatcgcctttctgactttttatttttgatgattcctattactcttattatggaaaaatgaaagtgtcttttttacctattgtttaccaagggccccatgaatagcaggcagatgcttagctttgggaggcaaagcatacttagctgattatgagccacgaagaataaatggctgtttttgtgctaagggcaaaggatgcgtcttcccatggctttcttacttcattctgccatttatagtgcaagaaatcctgtttcccctgtgatctgtctttttattttttaagttgggttggttttccactaacctcccatcctctccctgccctgtaccacaccaaaccaccagtacccagctcctccctcccagcacacccacctaaaacagaaaccatttcccagctagatctgcagaaggtaggttggtggggagtgagggtggctgtagaaagtacacacctgtcagaagagaccctgcctcatgcatgtccattgcgaggctgcagatggcttattgtatataattacaatgtaaatagctttttatttcctaagaaataatttaatgtttagtaaaaaagaaaactgaaaaaagaaagatgcgtctgttggcttatgcactcagctttggagctgaccaaccccaggcctgcttgatgtgttgggttctggatgctccccagttgtctgtcacacttaactcttgcatctctgtgtccctgccatcactggtttctatttatgtgtataaagtggggagggggagtacttctttgaaacaaacaactggtaaagggaggacaagagtgacatgatagaatgtgtgagtttttggtcccatccgtgatgtgggagaagttgcaagatgaagtccactagagacttcaaactgaaacccagatgggcaaacaaggcttcccctccagaagagtgaggttgaggatagttaacagtctgaggttttctctaaagaagccaggcaatggatcttaaaaaaaaaaaaaaatggcatcctgctttctggttggattccatggaattgtataatgcttacagggaattctctgaaaagacccttgggcactaggttaagtccagtgagggcctcagcctgggagaagttagaggtgggaagggagccggcacttgtggaatcatgtgaccgt

SEQ ID NO: 45640 - DNA, 1137 bp, Bovine  19866881757032
  misc_feature (1)..(1): n is a, c, g, or t
ngatgcagtttggctcaggcccctgacctcttggggcccttggctgggggccctgggatccctgggtggagggcagacacatcatatcataatgaacgggttgtagtttgaatcatggtgctgtcggagtgctttccagggagacctggtgtcaggcaaggctttcttgaagaagcaatgtttagaatgagaattgaaggggctgcgggctaatcagtaaaacagcatagttgtgagcctggaggcttctggaaggaggtgaggctggagaggtggcaggggtcaagtcctgccagtccatggaggcatagcttttcgccccagcacacctctctcctgcacagcatcgtgtgtgttaatctgtccacatcctcctgatcgggccgtgggctccttgcaggcaggagctgcacccggacacctctgattcctcctcagcagcagtggtagctggtgccgagtggctttgggagctgaaagttacattttgggaaattttgtgagctggttaatgcacatggatggtttgaaattggccacgatgacaatatttacactatgaaaattggtgaatgctatataaatcagggttcttatttttcctctcagtgagcctgtgtttaaacatttcccagcacacccctgccagctgactcagggttgggcataggcatacagagcaggaggcagcagcgggggagaagctggaactcagaattgggagacggacaccagctgtgtgtcaccagtcaagtaacttagtctctctgagctcagtttccttattggtcagatggaaattctgagacagatttgagaggctggctaccagaaatgtgtcccacgaagcatccttggttcagggcagacaaaccaaaccaggctggtttctcctatctctcaacaactggaaatacctactctcttttccttttgcattgtttttgattgttctttaaactttttttttttttttactttgtaatatgatattctctgtggtggttaatttcacaagccatctcccaccctttcgaaagaaggtgggatgtataccttcctgtacagggtaaactccaggaataattgttctgttggcttatgtcatccctccccctccccacccggctctcagtg

SEQ ID NO: 45641 - DNA, 774 bp, Bovine  19866881769297
  misc_feature (1)..(1): n is a, c, g, or t
naacaaagcaagaagctggaccaagaagtatttgcttctgtaaaaaataagaagagaaaaataagtagcctaagtaagaagtctgtaaattgaaacctttagtgactaatgacaatgattgaggtaaatgttttctaactcagaatgaagctaaaagtgttttttccaccaaatatgtttttgtaaaacaacaaaatctcaatgtagatcagatgcccaccaaataaataaaatcaaaggagctgcatttgccattggtttgatggagccaagctgtttgctaagccaacctttgccaacttttcttttctgagaaagctctgaatcaaacctgatttaaaaaaatatatagagagaatctgaaaatgtgttggctgtaaacatttgactaatttctatgtgccatatgcatttatctcacctagtctaaataacaaactgtaacttcagagagcttaagcctctgagagtttaaggttaatggctcgaaatcacacagcaagcaaggtgagacaaggattggaatttcatatctccagctgttgtctctacatccaaagtcaatgcattttggacttagttgcctttttctagcctgtgtgtaaatatccccttctccctttaactgtaaaattctctcaaagacaagagaagattgtcacttgggagattgcaaaaaaaaatcatcttaggtattttttaaaaaaataagagaatgaacatacacaggtttctgagtcccaactcagatctactgaatcagcatttctaaag

SEQ ID NO: 45642 - DNA, 814 bp, Bovine  19866881867586
  misc_feature (1)..(1): n is a, c, g, or t
ntcaagtacctaataagtaccccagtgagtttccctccttggtgaaatcttcctcatccttcaaagtccagctaactccctcccccaatattctgtagtctccacaatcccttccctgctggtggtctcagaaagtcattagtttcttagattcctatgtcaacatacgtgattaacagttcattactttttctctctcattagactgagctacttcagggaaggtctgagtctgattcatcattatatccacataagcactgtatacaattatttaaacctttcaagttctcagtgaagttttgtagaatggaaaagcaacctccggcataagaaaatgagggtcttgttacagagccaagctgtacacatgaaacagacattgaagaaaagatcgttacatgctacactctgtatcccagattttaattactgcagagataatccctaaggcacagtccccggaaaacaaaaagcacacatatacctctcccacctccagctccagatgtgctctctcctctcagagattggaagcatcaacaaagggttgttccctatgactataaagacaggtcactgtctgatcaagactggatttcttgatatgattattgatggaaagtccaagtctcacaccaagagagacagagttggacagaaaagtacacatactaaattctaaacaaaactgaaagtctacatgaagcttataaaaggcaaaactaaagattatctctgctgctgctaagttgcttcagtcacgtccgactctgtgcaaccccacagacggcagcccaccaggctcccccgt

SEQ ID NO: 45643 - DNA, 2451 bp, Bovine  19866880344183
  misc_feature (1)..(1): n is a, c, g, or t
nccctgggatttctttggaagggatgatgctaaagctgaaactccagtactttggccacctcatgcgaagagttgactccttggaaaagactctgatgctgggagcgactgggggcaggaggagaaggggacgacagaggatgagatggctggatggcatcactgactcgatggacgtgagtctcagtgaactccgggagttgtgatggacagggagacctggcgtgctgcaattcatggggtcgcaaagagtcggacacgactgagcgactgatctgatctgaaggtattatcaagcccatcaaattacacaattgatctggaacaacatgggtccacttacatatgagtatttttcagtagtaaatatacattgctacatgatctaaggttggttgaatctgggaaggtggaaccttcggtacagaggattcctggtatatacagtgccaactataaagtatacatggattttcgtgtttatagagggtcagtgactctaatgcttatattgttcaagggtcaactgtatttgctttatcaaagttaatcagaaattactcttaacatgcaattgaaatacaatatagtttataaagtcagttgctacaaataatcaaacaaatttgctttacactactgaaattacaaatcaaaacttacagtgataatatctgtgtgggctcatttcgttgttgtctaaaatcccatatttttaactgtccaattgaatttactgtaaggatctcaggagttcgaaggaaggttacagcatggagtgtactgctatctgcattgtctgtaaattaagaaaaccacagtgtatgttaacagggcaccacttttccatgaatatcttaaacagcgttccctctgttgactgaaaaattacaagtgaaattttaaataagtcacaattttatttttatggaaaaatataagaacatatgttaaaatggactctcctttgatagaaaaattatattactcacaggacatctgaactgttttccaaattgaggactaagttttcatatatttctctatttccacttaagagtactaccctccatgtctgagacagctgttcaagtttctttataatccaattttatctcccaccactgcttcaccctagacaacctagacatcatgttaaaaagcagagatattatttgccggcaaaggtccatctagtcaaagctacggtttttccactagtcatgtatggatgtgagagttggactataaagaaagctaagtgctgaagaattgatgcttttgaactgtgatgttggagaagactcttgagagtcccttggactgcaaggagatcaaaccagtccatcttaaagcagatcagtcctgaatattcattggaaggactgatgctcaagctgaagctccaatcctttggcaacctgatgtgaagaactgactcactggaaaagattctgatgctgggaaagattgaaggcaagagaaggggacgacagagaatgagatggttggatggcatcactgactcaatggatatgagcttgagcaagctccaggagttggtgatggacagggaagcctggcgggctgcagtccatggggtcgcaaagagcacctgaactcaactgctttacccagaacctccattctgttgggccaaacaccacagcttcctacagagctcattctgaccctgtattattctgctgactcatctcaaatcgattcatctttatccttatcagctctctcttctgccatgttcttcctgtttgccttaatgttccttctgttttttctagtgtgtctaagcttatacatctttatttagtatatacttaaagacttttgttttgtgaccctcctcccaactgtcaccaggccggcagtctttcaaagctaaacaaatggtattcctcagaactaaaataataataatacaaaaaactgattcatgggctcaatccatagaagttctaattcaagaggtctagggtgacgggctgttaaaaatctcctcaggcaagtctgtgcaaaatatggttgagaactactacactagtcagacatgatttagcaactaaaccactaccactgcactaaataatccttctaaaacatgatgtgggtacattacccctttgctcaaaaactttcaatggctccttagctgtctacctaataaagtgtattagattcttcacaacctgactgcaatctacctttcttgtttcatctctcaattctccaaatatctaaagtcaggtcaaactacactttctgtcattctctgaatggccttaccccgcctctatgctattccctttatctggtgtgccacttctcagtattatttatggtctagaatctagattaaatgaattgccctgcccctcaattctttatccgataattccttccaaccatcctccccataaatttctctttctt

SEQ ID NO: 45644 - DNA, 2840 bp, Bovine  19866880543345
  misc_feature (1)..(1): n is a, c, g, or t
natatgtatggttttgaagaattttttaaattattacattgttttgctgaactagtctttttattaaatctgtttttgagtcatattttctgcatgctgcaaaaactcatttttcttgaactgcaaactcacacatgtaaccagtttgctttgtaagtcttaaggaggcttgatgattacattgcttttaacgttgtgctaaatatttgaggatctttaagtatttgagctttgctttgctttgcttttttttttttttactatgttcttacccttcctcaaggtgttggaggtgcttctgaaaatgatgacccttccaaaatggttatggttctggcagctactaattttccctgggatattgatgaggctttaagacgacgtcttgagaaaagaatctatattccattaccatcaggtatcttcatttgagtcaggaagctcatgttaacttttatttttttaatatttttttattttatttatttactcagctgaaccaggtcttagttgcagcatgcgaactgttagttgcagtcatgtgggatctagtttcctgaccaggatttgaacccaggctgcttgaattgggagtgagagtcttagccactggaccaccaggaaagtccttcatgctgagtcttcagtagttttgctaaattttgaagtttggtattactttaaaagacaaaccagttcaattaaaaacataaaaactaaaaaaatttcaattaaaaaaagttttttcaattaaaaatttaaatttaaaaataaactaaattcagtgaggaatagctgttaaattttttaagcaaatgagctctaagaattgaaaaacaaaaagtagactggagaaaaatagaacattgtttatgttgatatttatgtttatattgatttatatttctgtatatgtttatatatttttatatattatgtttatatatattcatttatattttgtttttcccaatagcaaaaggcagggaggaactgttacgaataagtctccgtgagctggaattggctgatgacgttgaccttgcgagtatagcagaaaacatggagggttattcaggtgcggacattaccaacgtgtgcaggtatgaattattttcaaagtataggtttttgtttctggttctggttttgtttttaggaagcatagatttttgtcagtgtaaacttctgttatgaagttttaatgctaaatttagatgaataaagacccacattatataacctagtcagagacacacgttttggcattaagctagtgttagctggtgctagttatcttgtttggttatcttgtatgtcactgaagactgtggttcatttaaaagctacacgttcaagaaggtagtgttaaaacaactgatataaaatagataaccagtaattgtcttggattagaaaaaaaagttttaggttttaacactttttatttgcatactttaaaaagtgtacattctagtaattaaaatcatttgaacaaaagaaactgttatactggttacactgcattttaacagcccatgggacaccttggaccagttgctttttactctagatttcactgccacccctcccagcttcctccttcaccagcatgtaaactggttttcttccccactggccagacaggcagatgggagaggcaggaatggccttcagccctcctgtaagtagttctcctttctttgacatgaaagggcagcacagtcatttaaatttgatccacactctgcatcttacaaaattaaaacagctaaaagtaaaataagaaggcagagcttgtggaatgtatggtgcttattggcggcacacaccttattaaaacttgcctgcttacttctgttgtcatttcttttgaaagcagtggattttcctcttccatttatttttgtcttcaattttgacttaccaaattttataatctcagccatatcaggtatgtcagatatggtcgcagaggaagcagagcgaggcatgactgagcagagtccagtctgcacggtgactgctgcaagtgcctgggttagaaaaattaacattggtgcattcattcagtatattgttccataggagacgtagtccagtatagattgatttggcacatcagaggggagtacagtctcattttcagtgaagtgtcataaatgtgataggagtatcagtaacaggaaaagatggtctctacttcaaaacgttattgaagtagctttggacctaatcttagtattagcttggacattattaggaaggtacttgactgcactggtttactcacctccaaagtaaacattctatgcagggctgatgtgaggattagcaataatgtgtgtatgaaaccctttgtagctgtcgctttgcacacgtggtggctgctgttaaggatcaaactgggtgaaagcaaggaggtagttgaatctgaagtttctccttaaaaaaaaaatagcactaatacagaggaggggaaaggagagaccacttgactgtttagtttttcttacacatgcagtagaaaatatttaattttccagccaacaagttctctcctgtccctgtgatgcttattctttatggtacacctttaattaaattcagttgccctcatgttatatccttctactacttcttgggctttttgctcagatttaactgctaacaaaacagctcaaaaacaggcctaattgtccaatactagattctgtgcagtactattatgtatatataataattacagaataacacatgcactgaaaaaacatcttctgttcacagttttgtatttgcctagcacatcattttaggttttcgtctttttaatttaaaac

SEQ ID NO: 45645 - DNA, 2217 bp, Bovine  19866880719680
  misc_feature (1)..(1): n is a, c, g, or t
ngccttatggactatagacctcaggcccctctgtcctgggattctccaggcaggactacaggagtgggttccatatgcttctccaggggatcttcccaacacaggggttgaacctgagtctcttaggtctcctgcattggcaggtgagctctttaccactagaaccacctgggaagccctagtgaggtcttaggggttcactgtataatatccatttatttttttttcccttctcccttcttcaactgaagaacaaaatgcaagaggtagacaaaggaggtcaaaatgtcagctatattgctgagaaagtcaattagagaacatggcgttagacctgtgatcaaaagagcatgtcacaagaaagagtaacttgacagtgaagaaacctgacagatgctgtctcagccaggtgatcaaggtcaacattgaccattgtaaaccatgtagatacaagtacacttgacatgtatggtatgatgagaataacactttacctccaaggtcttcctccccaaaacctaaccatcagaagaacttcagacaaattgcaaatgacgaattttctacaaaatacctgatcagtacaccatcaagctcctcaaaaacaagcaaaatctgaaaaactgacctaagccaaaaggagcgtaagcagatatgaccaaaaattgcaatgtggtaccctggatgggttgcaaaagagtcagatgtgactaagcgactgagcacgcatgagcacaaagtattaagaatggttttaaataaagccttaattctatcaagtcatcaacaaactacagacctaaagcttcttctctatattttctggggcaaatggtaacaacctctctgcagagagggttctccacatcagagaggcagttcaccttactctgttcatccatcttccttgtttgcagcatctcacccctcctttccataagcagttgctgtctcagatggcaggagaaggaaactcagagaaacgcttatcactctcaactgggtgattctgggctcctgccaccattaggaagaagcttcttttagcctcataactgttgccagaactgaatgagctcaattcagtcgctataactcacttctatggcacctcccagcaggcaaggtgttacactagacggaagctcttagctcccagcctcccaggaagggtaagcttagggtgtgcttgagaaaatgacatgtaaacaacaaggatatggttcaatatagttgtgatgcctccataattaaaatagtcttaggttttgtaatcaagtggcctgcatgctgaaacaggaaatttgaaatagtaacaataacggtaggtgctgacattcacaccttgatgcagagtggtgaacagatgctagatgaacaggagtaaacaaagaaaaagagaaaggaaactggagctccttaatcagtcttgagattgcacatctggaccatttttcagaggagacgaggccacagaggtcatggttcatccaagctcactggccatgtagcaggtacagtgatggctgggatgtacacgtcaggcatagacttcagctaacaaactggctgaaatcacaggatttatgtctgtttacactgacagtctcatgttcctcgacttaaggaagagggtattagggtgggtgtccaggacagtcttgtgtatatgtccatcctgtaaataacagtactcttttcactctcaacaatgtctggccgaacaataaatgacatgatcactctagtatttggccagacagacggccaatgtctgccagacttcagagactaatcagaggggaaatatttcctgattcagctttagggtggcaggctcccttgggacggccagaagcctgtgttcagagtgccctgattctcctcacccagttcttagccgacgcaacaagttcaaaagagtcttttgtcctgcgcactctgcaggcatcttcttcgtgctctggagcctgatcctttcaggagcaggagccactcagtgcagacgcggcctttcagtacatctgccccggcccctcccctctgaacagccctggcctgccgaccgtcgctggagagcagcctcagcaaactccagaaaaccctttcacctggaaggtatggcttccaagttggatggcctctgggaaacagaaagattagaaacgcttccttggagttgaaaaacaagtacctaaccatctgggagggctaggg

SEQ ID NO: 45646 - DNA, 1329 bp, Bovine  19866880826400
  misc_feature (1)..(1): n is a, c, g, or t
nggataaaatatgtattgccccatttttttcttttgaatggggaagtattgattggattatttttaatccagaggaaatacttaacttgcaaagatgtccttgattatcctataatggcttagcttgaggcagcagctcatatatattaaagagaccttctatggaagagaaagaggagaggcagagaaatccagggaatggggaggagagtgggggtggggagagagagaaagagaggacactgcaaggaatacaatccctctgagactcccaggacacacgggacagtgggcttcaggcttcataaagaatgtgcagtgtactcaagcttccttttttttctcctttttgattttaaaggaaagagtgacctcctaggagaaagacttgggaactgacatcccaagcagacacttggattgcatcacaagttttctatgaaatggaagggtttttatcatgccacacacattcctgccacaaagaaacctcaggtcctgatggacactctctgcagaggctgagactgccttctttcttatatatccagctgttctttagacactgtctttagtgctccccaaggaataagccacaagtactccatcataagaaagacaggtttacaatagctggggagaacagtttaatttagctccaaggaaagggccagagttgtcaaaggagaattgaggacaccccctgctcttcccagcctttatattctgtgattctgaggaagagaggggccaaaccccggttttgtgccttgatgaataaaatggcctggctgggtgtcagctggcctgccaaatctggcagctggcaaggaagaaacagagaacttccaaggaactagctccatttgcatgtataatgtgttcatatatgctgtgtgcatatagattgtataacatccatgacataaagaggaagatttgggattcttggggggaaaaagctcagaaacagacacaaatcaggatatagattctcacatgcagggtgacctcagccaccagaggacatttagaaagtaggaaggcacacatgaggacaaaggaagccattcccacagtcagggccctgacctaaagctcagggagctttagggcagttgcctggcaacaggagagacctagtagggatgctggggggatcatttctcatgggggagctgagccctaaggagctaaatcccatttcactgaagcatttggttgcacagaataggtttgccaacacttactggggcaaaatgtgatgacaaaagctcacagctaggagaagagaggtgacatggtcccaaatgcctgcagaaacagcaa

SEQ ID NO: 45647 - DNA, 2785 bp, Bovine  19866880886053
  misc_feature (1)..(1): n is a, c, g, or t
ntactttgccacaaggtccatctagtcaagttatggtttttccgtagtcacgtatagatatgagagttggaccataaagaaagctgagcactgaagaattgatggttttgaactgtggtgttggaaaagactcttgaaggagatccaaccagtccatcctaaaggaaatcagtcatgaatattcattggaaggactgatgctgaagctgaagctccaatactttgaccacctgatgcaaagaactgactcattggaaaagaccctgatgctgggaaagactgaatgtgggaggagaaggggacaacaaggatgagatggttggatgacatcattgacttgatggatatgagtttgagcaagctccaggagttggtgatggacagagaagcctgacatgctgcagtccatggggtcacaaagggtcagacacgagtgagcaactgaactgaatctaattaatattagcacatatatagggctgccatctatggggtcacacagagttggacacgactgaagtgacttaccagcagcagcagcagcagttttaaaaagcctttgtagaaatttaatacatactattttttattttaaatgatctatgcatgtaagtcagattaaaaatatggttatgtagaattttaaatattaggaaaaattaagaaggttaatagattttgaagtcttaggatgtgacagggttatacatgccatggcagcaaatttttggttttccttaacaacttaaatgttataattcagatctgtaaacttaatttcttttcctttttttgtgtgtttgggtgggggcgggggggatactgttaatatccttgccttctatttgttttccacagtaatattcctatcaaagtaatgtacatgcatttaaaaataggaaaaaaacaaacagaaaagaataaaagtcatccataatcccagaatctagagataacctcttgttaacattttagattttttcttcttttctatatatccatagaagtatatacatttcttttgtattcctgagatcatagttttattttataatctctctttatttaataaaatatcatcaacattgtctttcatcattaaatattttttaatggtatgattttttttcaccagttttattgagatataattgacatatagcattgtagtagttttaggtgtacaacatagtgatttggtatgttgcaaaatgatcaccacaataagtttaggtcttacattcaagtctttaacccattttgatttggggggatgtggtggtaggatagaggtccagtttcattctgttttcatgtggctgtccagttttcccaacaccacttattgaagagactgttctttctacatcatatattcttggctcctaattaattgaccatatatgcatgagtttacttctgggctttttactctgttccattggtctctatgtctgtttttatgctgagtaccatactgttttgattactttggctttgtaatatagttggacatcaggaagtgtgatacctccagtcttattgttctttctaaagattgctttggctatttggagtctcttgtggccctgtacacattttaggattgttctatttatgtgaagaatgtcattgaaattttgatagggattttattgactcagtagattactttgggtagtatggatattttaactattaactcttccagttcatgggtatgaaatatatttacatttatttgtgtcatcttcagtatctttcattaacattctgtagttttcagtgtacaactctcacctctttggttaaatttacttccagatattttatcctttttgctataattgtaaatgagattgttttcttaatttttcttttgatagtttattattagtatatagaaacaactaattttagttatcatctgcaaaaagagacagttttacatctttctttccgattttgatgccttttatttctttttcttgcctaattgctctggctaggatttccagtactatgttgaataaaagtggcgagagtgggcatccttgtcttgttcctgattttagaggaaaagctttcagtttttcaccattgagaaatgatgttagctgtgagcttgtcatatgtggcctttattatgttgaggtacgttccctctatacccagtttgttgagagtttttaatccttttcccttttcaaaaaaatttttaaatggagaggatatttagaaatgtactatattgttgggcaataaagatatttattgacaaaatccttagtactttgcaactgtaaaatgtggtaaaatgatttaaaaaaatagtatctttaattcatatttttaaaagcacgagtaaatttatgaatagagcattttgcaagtaaactctttgaagattaagtattttaatgcttgcatgaatttcattaaaagctgtttcatgagaattatagtacttatattatttggaagaatatattaagaggagccagaactggtaacttatcatttgacagacaatccagtgttgtatgacaaagacaacttatgggagaagtcatttttaaaatattttcttgcacaatttataaaattcatattttatagaaaataccatattgtccaaaaatcccttaattcaccacatacctgggaaattttagctctttatttatctttccttcaaatttatttaacagctttttaaaaacttaaaaaaaaaatttattacagacaagttgcaagaattgtgcaaagagctcctgaatctctt

SEQ ID NO: 45648 - DNA, 1193 bp, Bovine  19866880996695
  misc_feature (1)..(1): n is a, c, g, or t
nctgcagggctcccatcagcacactccggtgtggtcatcacctgcccccagttcccctgctttcctgtctaagtcccacgaagcaataaacagtggaggcacctgccgcatagctgccgcttggcacagcctgcctgattctgagccagagtcagagagagcgagagtctgcccagccacctcctctgggcaggccacctgcctggccacccactccctttggcttagctgcacccctgtggccatagggaggggtcataatgacccttcccttgcaaccatgtgggtgggggtgggagggaagtttcccaaagaaagggggtgtcaggccccaaacccaccggaactcaagtctcctggccagcctgccaaaagtgtgtgtgatcagtattctgagacctaggaccaggagtggagaaggggatcataggactgctgcaaggatggcactgatttccagctcaggaagatgtcagattctgtgcttcgggctcttaactgtgatgcttcctgtttggtatcaggtgcctcagtccggaaccctgaagctgtcccacctgcgggaaggagcatacacctttcagttgactgtgatggacaccgccgggcagaggagctccgacaacgtctcagtgaccgtgcttcccgtggccttctccacagtaggtgagaagaaagcccttccctcgcattcacagtggccaacagaggccaggctgtggatggaagggtggtgttaaactggcattttaggggcttccctggcatccagtggttgaggcttcgtcttccagggcagggattgcaggttccatccctggccagggagctatgatgcccacatgccttgagggcaaaacaccaaaacacagaacagaagcaagggcttccctggtggctcagtggtaaagaacccatctgccaatgcaggggacacgggttctatccctggtccgggaagattcccacatgcggcggagcaactaaggtgtgcccaggagccacaactacccagcacacggcagcaactactgaagcctgcacgccccggagtccgtgctccgcaacaagagaggccactgcgatgaggagccctcataccacggctagagaaaaagcccgagcagcagtgaagacccggcccagtcaaaaataagtaaatagaattatttttaaaaaaccagaagcaatat

SEQ ID NO: 45649 - DNA, 759 bp, Bovine  19866881059414
  misc_feature (1)..(1): n is a, c, g, or t
naactgtatttacaacacaggaacgctagtgcagaaccatgggcaccaaacgaccccccacgtatgactttagatgtgacattgaccacaaaagggcatagatggatgcaaaaataaaataccaaccagtagcctgaattccttctcctagtgataaaactgcctgcactgagcttctaatagaaagagacgggtgaaagacgagtagaaattagctgccccacccccattcttgaggtgcaatctggcatttagctggaggcagctactgtaaaaagatttgtggcagtgactgtgaaagagaaatgaaacgtcagggtttcctccccggcggggccccagtgggtcagtgcagatggcaccccaccatgcagtgtgctgaaaatacgtattaaaggctgttttatggacttagcaaactatgctgcttgaacataatggaatacaagctagctaataagatgctgtgtgaaaatgttgattaatatggatacagcatttgaaataatgcaaattaaaaaaaaaacaaacccacccagaactcaaaatagcatgaacacactaatgatagctccataatacatggatccatttttaaatatttgaaagagtgtttggagtatagttaatagagtttacgagattggaaatcttagttcatggttaattttaaaggaattctggagaatggtcttctttgggcaaattggtgatacacgttccattaaattaattctgctggtcccaggccagctggat

SEQ ID NO: 45650 - DNA, 840 bp, Bovine  19866881330364
  misc_feature (1)..(1): n is a, c, g, or t
nacttctgacaaaatgtggtcccctggaaaagggaatggcaaccatttcagtgttcttgcctcaagaaccccataagcagtatgaaaagacagtaaagaaatgtattgaaaacacgtattcaactgcaaacaggagacagttgttgccatcaaaggacttccaattatgtggatgcctccattctcctcctataatgcatagggttcctttaccttctctttctctcttacctaatttaaatggatgatggcgtcctattcctctttccccatctatgcaaatatttgttggaatgaatgaataaatgaatattcttgccctccacaagtctttccacagtttgccccaaggattctttcaaaaaggaaaaacccttctgtgatcattttttcctcaaccataaagtgatgctttagagaccaaatcacactctggtctccttttttctcagcttttacgcagtggaacagatttccaaaatgccagtgctgactaagaaaaacctggtgaaaatttattggcctgaacttttaagcagaggcaggaatcctggctttcattccttgttccatcaagacatgtgtgagcctgttgctctgaatgttatctgccgctggaaaagccctcacttcttcccagtacagcaagcatctccactcccaaagaagtgaacaattactgtgcaaacaaagtaatattattgtacataataaaaaattaaaattacagagaagaatggcagtaatgtgtgattactccctttgaagacttttatgacccgggcattaatgccttattccatcatgatactcttttaattcacagtttcaaaaaactgt

SEQ ID NO: 45651 - DNA, 948 bp, Bovine  19866880349804
  misc_feature (1)..(1): n is a, c, g, or t
nttatgaaccgctgcagaccagggaagagaggcagtcacagtttggatgatattctggtggacacgaaactgtacatattttcccttctttgttctaacttcccttttctatccatcctcggggcttcccgggtggctcagtggagacatgggttcgatccctgggtcgggaagatgccctggaggaggaaatggcaacccactccagtaatcttgcctgggaaatcccaggaacagaggagcctggcaggctatagtccatggggtcgcaaagagtgggacacaactttgcgactcaacaacaatgaaaatccatcctcaaattatctatgactaaaaaagcgacatggatccagatggatatatactggattctgaatatatactttcatctggggaagatatgagagaagagataatatgtctttgtggaggtcacattcagtggtgttttctactaataaacaggaaggggtgggattactgcattaatatactctcgtgtgatcactacatacataatttaaaaaagaaagatgggggacttccctgatggtccagcagttaagacttcgctttccaatgcagggtgtgcgggttccatccctggtcaggaagctaatatcccacatgccccatggtcaaaaaaaaaaaacaaccataaagtagaagcaatattgtaacaaattccataaagactttaaaatggtacacctcaaaaaaaaaaaaaaatcctaaatacataaaacgaaagctagactagctgtagttgccggcggggagacgcacctcagaggcaggagaacacagtagcgcacgatgacgcccagcacccacaccatggtgagccgcggactgacgtactggaaattcacattggtccttgtgaggaggttccatgacactagctcctctgaggagaacctctgggtcacttcgtcttccaca

SEQ ID NO: 45652 - DNA, 1100 bp, Bovine  19866880675520
  misc_feature (1)..(1): n is a, c, g, or t
nagttttgtcctaactgcctcggtgggaccttgagaattgaactgtgctcgtatttcagaacatagtatgttgctgtggaaggaacaccctggagctttgtgttgtttcataggagagcccagagctgtttaataaaatgttttctgtctctttcagactcaaaaacttcctgagtgaagtggtccacctgacttgctgccgcatctgtgttcgcgccctctctggaaccattcactatcataacaggtgcgtgtgttccgctttcgtgcctgcttcctcaggtcagtctcgcatgtgattgtcaggagtgggtgggggaaaacaagggaaggaagagtacttccggagtgttcatctctaccgtgtagagcgtcacagacgtaacaatgcacctgaacacttttcgaaggcaatccagggacttccctggtggtccagtggttaagaatccaccttctaatgtatgggcgggccttcagtccctggtgaactaagatctcgcatcccgcagggcaactaagcccgcacaccacaactagagaagcccaagtgctgtaacaaacacccagcacagcgcctccccttcccctcaaaacagcaatccatttgcagaaagtgaaagtgaagtcactcagtccaactctttgcgaccccgtggactgtagcctaccaggctcctccctccatgggattctccaggcagtactggagtgggttgccatttccttctccaggggatcttctggacccagggatcgaacccgggtctcctgctttgcaggcagacgctttaacctctgagtctagggaagccccatggaacatgatgataaacatgtaatgacacctaataattgggcgtttgtggtgtgcaggcctggcctgtgattctttctcctaggtcatctctaagagaaggcgctattataccgttttacaggtgaagcagtggaagctccaggattggttgtctagggtcatatgcctaataaatgtcagttaggtttagaatgggggttaattaaaaattttttttttaatggtgaaggtgatagggctgtaaaaatgatggaaagaaggctagacatggaattctgag

SEQ ID NO: 45653 - DNA, 1175 bp, Bovine  19866880819944
  misc_feature (1)..(1): n is a, c, g, or t
nctgtcttctgtaagaggatctagcggggttgtatctcctctctaatagcatcattgtggcacttggtttaaaaagtgctatgagattactcctttatagcaatattatagtctagactctaaagagatgctatttttctttctaaaatgtgccatattttttcatataaaggagaaagcaactggtatcaaacagggaccaggcttgtaggttttctctgagatgcaaaggaatgcagatcgggtgtgaaacaatgttggaatgccaatcagtgggcatgtcttacagtcacattctactgccacctatttctatgaccttggccaagtcccttcacatctcacagcttgtctcctcacttttaaagcaagggatttgagcaaaatggctttgaggtttcttttgattttaactgttctttgacgctttgtcatctaaaccaaagcttgtgtaggctgggatggaggcttaatttatttcccctgcttaaatacgggaaatgatgtgcaatttcaacaatgtatggactgtcatctctcttttgagattctctgtggagttatactagaaagagagggtttgggaatttgcagcataatttgttatctacaaatttagtatccacaatttcttctttatatttcggcctggcctttgtagttagcatcctgatctgaattcatgttaataataatagtaatagtaataataatggaagaatcctttccatctctccttacttttttttccttcactctgcaattgttttttttaacttctatctcacctcataaaacaatgaacattttccaatttatcgaaacagttgctctgtagaagaccagcatgctccgatgactctcagtatcattatatcttcatcaaccccacagagaagagtgtgctggtgtgtgtttgtgtgtgtgagtgagcatccacgcagagttgagaagcatgaggtaggcagaggaatgattaggtggttgggcttcaaagagaacatttgtagattctatctggaacacattttattaaaattgcaacaaactttataaaatcagatgtatggttcattaagggaacattaccttacaattatgattaattagattaaacttatgaaagtgtgttatttgttcaaaccaaagggtgggggaagatgatggatgatgaa

SEQ ID NO: 45654 - DNA, 1074 bp, Bovine  19866880831775
  misc_feature (1)..(1): n is a, c, g, or t
ntcactgtcagttacatggctagaaccaagatctagggctgtggttcttaacggggtggcggtggtggccagcttgcctgcaggggacgtttgggtaatgtctggaggcacttttggttgggaaagggtaccactagcgtctagtgagtaaaagaccagggatgccgctaaacaatcctaaaatgcacatcacagcccttcacagaattcaaagaagtctctgaattattaagttcaaaatgtcattagagatgaggttgaaaaactctggtctaggatgagttatgaatttaagaatggcaaatcagtgaacaagtgaagatgaaatttaaggtgaattacaaggctgacattataaaaatcagtctaaattatatttttaaagagacacaacaaacacgtctaccaatattatgccaaatgaaccctaaactcaacaacctgactattacactagcaactttaagtagaatatagtgtaaattgggttagtcttggatcccaaccaaagcaatgtaattctgaagtaccagaataattgtgctcagttaaaatcattttcataacatattccctcaggagttgattcattaaattacagtgaggtttttaggaggtgttatgatcactacttttccacagaggggaattggaagggtaggctttgatcttatggctgaattagaaacagaactggaaccataattcagcttctctgagtgtatggcttgattctcccagttaaaccagctctcttttccaggctgggaggccgtcccctctcctgtgaggagatagtctctattaatgcaaattgtctaggaaaagaatgtcttgaaggtgaaggaaggtggtagagccttgagtcatattaaactattcaaaagaggagtttagaggaagaaactgtcacacttgtctgagttctgacatgaaaatacatttcggggctaagacaattcatctgtcaggcttcctgttggaataatatttactcagctgtgagaagacagcttcagtgaacatccaagataatgaaagtttgataatactcattttctggaaataaccctg

SEQ ID NO: 45655 - DNA, 1488 bp, Bovine  19866880992570
  misc_feature (1)..(1): n is a, c, g, or t
naggcaggatactagtcttggtctcataactccctggcacaatatcaccatgctatgagtgtctgcagagaagagaaggggctaggggagcaaactgggtgtcttctttactttgagcaagggtgctggcacccagtcacttactgagtttcatggtaataatacaagctagagagtcagcattctgattcatcattccctgggcccatgcccattcaccttacatctgagtaataatgtctccctgtgagaccatgctgtcattctcctaggagtccttgaatactctctatggtcttgtgggaaatgaagggttaggagtcgcttttccatagaagatgcagagtggctaatttccttctttcctcccccacacacccatttcaaactcatccatcagatctcaggaaagtacaatacgtgaaacaacaagaataaaagcctttatattaaattccttgtgggtgagctttgcagataaagcagaacaatctgatcttagcaagttaaatggtttgcaaatcacaatgtgctgcacccttcagatgcatccttatgtaaaataaatcacctagtattatcataacagtattggggaaatttgcaagtccagtggaggaagagggtttgcttcagaaaacatgcatatatttataagtattttttatatatgaatttataccaggggtctcaagccatttggtaagagacaaataatgtttcatttacctaaactcataatagcttgataagaatatggagaccagggaaagggaaactagaatgtagaggaagggaagggaggaatagaggatgtcttcactgagttcttgagtttatagaatcagagacaaggacagaaaaagatggtttgtcactccctatggaaatcaagggaaagtaagcttcacagaaagatcataggacaggataaagctatacgatattttgttgatattgccctgttgattgcagacaaaatattttatgtgtatttatacttcttcttcttattattattattataattattccagtggtcatgtatggatgtgagagttggagtataaagaaagctgagcacagaagaatttgatgcttttgaactgtggtgttggagaagactcttgagagtcccttggactgcaaggagatccaaccagtccatcctaaaggagatcagtcctagatgttcattggaaggactgatgttgaagctgaaactccaatactttggccacctgatgagaagagctgactcactagaaaagcccctggtgctgggaaagattgagggcaggaggagaaggggacaacagaggatgagatggttggatgacatcactgacttgatggacgtggatttgggtggactccaggagttagtgatggacagggaggcctggcgtgctgtgattcatggggttgcagagtgggacatgactgagtgactgaactgaactgaatacacattatacaactgcaaaa

SEQ ID NO: 45656 - DNA, 1322 bp, Bovine  19866881124218
  misc_feature (1)..(1): n is a, c, g, or t
ngcaagtctattttcctcctttggcaagcagacgaggaaggtgtggtggaagttatatattaagaaaaaagtaagtgcactgtagtgcatacttgaaagcctttctgtgataaaaggacggaacttagctcaggaaagtcacagtgtcaagcttaaatgctttctctactggtgtgcttcagcagggacaaaaagcacataacctgggaagctggtctggcaattatattactgacagagagttttatgagacaatatcagaggggaaatgcactgaggctgtgtcaaaccacaggctgcacaaaaagaaaaaaaaaaggggggggatcatagaaacaggggcaaataaagttggcaatgaagagggcattgatttaattgttcaacctttcctttcaactgcacagatacgtggagcaaaacgccccgtcctatctcccgaagtcacctgatgcttaacgagagaaccaggaccttgaagacgaggtcaggcagaagagggcaccagtctcccagggagaagccaggactcgtcagtaacgggtgagatatagtgtataacccctcaaatgatgtatttcagccttccactgagtctgaaatggcaggtggcaaagctttgaccccaaaagaaaacaatttgcactgttcgcgcctgtgggagaattcatggaagaatggttacttttgcttcaagctttgtaggcagcataaaagatcactgggaatagatgcatgggaagaggaaatctgtgtttggtgggcagctcagtgcacggagccttggggacctgaaggctgtgaattctaattctggctctgctgctaatttcccctgggacttgaaaggatgtacttcatatctgagagtgtcaatttctttcccagaagaggtgggcatgaaccttatccataaatgattatgaagcaagtgtttcatttaagtccccagagcagcctattccatggagttattctcaagagcagcaaattaaaataatcctaatacaatgaagctagaaaaaccaaaatattaatgtgatggaagatacacattttactcaagtctaatcttttgagtttccctggtggctcagatggtaaagaatctgacttcaatgcaagagacctgagtttgatacctgggttgggaagatcccctggaaaaagggcatggcaacccattcagtattcttgcctggaaaattccatggacagaggagtctgccaggctacagtccagagggttgcaaagagtaggacacaactgagcgactaacactttcactttcaatcttaaaagggcggcaatttccccccaa

SEQ ID NO: 45657 - DNA, 1135 bp, Bovine  19866881493234
  misc_feature (1)..(1): n is a, c, g, or t
nttataatgtgagctattgaaaaatacccaaatttgaaaaatccatttggcttagagaggataggaatgcggaggaggacaaaataggtgaaggagattaagagtaccaacttccagttacaaaacaagtaagccatgggatgtaatgtaccgcacagggaatatagtcaattaatgttgcattaactttgtatggtgagcagacaaatactaaatgtatagtggtaatcaattcataatgtatataagtgatgaatcatcatattgtacacctgaaactaacataacattgtattcaactataattaaaaaattaaaagtaaaaaataaatccaataggcttttggtttctatcattcaaaccattaaagtttgcagttctatttctaatacttggctaaaactgtaaattataccattatacattgaagttgtaatgataattacatattatcaagaagcacggaaaaatgctaagaaaattctgaggcctacagtcacaaatgagtcatactcaatctttgttgactaagacacagaatgagtactgtctcagaaacacaaaatcattattaggcaagttggttacgaaatttacaaagatagtactgtaggaaaacagctgctttctccgctaaacatctcagccctaacctctttggattacagggaggtcacaatggatgtgaaaggtcacaaaagattacaatggatatgacagtgcttgtccacttaaatgaaaagaattattatatacacccagagttggatggggtctatcaaggactgttagcatgagggtctctggatgggctttttggaatccataaacatcttggaactacataaaaatacttgttggtataaagcaaatgcatgctattgtttttctgaaaaaaaggatacataaatattaactgattgctaacctaataaatgtcaagaactaccaattcccataagtcttttcagagaggtggttaaagcttccttagattcaggaagagctccacaacttagagaaatgtataacttgttaaaaggtagttgtccaagagttatatatctgaccttatattttagacaatgtctgccaataaaaaaatagtttttacaaaggtcttcaaacccccgt

SEQ ID NO: 45658 - DNA, 1243 bp, Bovine  19866880462074
  misc_feature (1)..(1): n is a, c, g, or t
ntggggatcaagcgtggaggttgaatgagtttgttccgtgtccccatcccagaggagctgagaaggcttatgtgacaggaataaggtttaagtagttttacttcttggtctgcaccatggaatgaccgcagtgacattctcccagggccatgtgaggaatgcaaagaggttggataagggaactacctgcagcagctctgggcagtgactgaccaatgaggtggttgtccgggaaattggttcccaatgtacccccatctactgccccttctgcaagtttcaggttggagcattaatggtaaccatccccaggcaagaaaagttctgctggacttagagggagcttgtacactgggaaagcctggtgctgggatgataacattagaagaaggggccacagagaagaggcagaaaagaataaagttccagcagacagtgttggcagctgccagcaaccctcaaaagggcccctcctcttggcacctgtgtccttactggccctgaaactcactaaaggtttgccctggggaattccctggtggtgcagtggttgggactccatgctctcactgccaaggtccaggttcaatccctggttagggaactaagagcccacaggctgtgctgtgcaaccaaaaaaaaaaaaaagacttatcctgggccagttggcagctacctactaaggactagccttgaatggagccaccttattgacaagcgtgggcagagcttgtggcctcaggccagtggggtcaagaggtcagacaggccatgcgaggcagcacgtagcgccccaccccctccacctctggcttcccggacctgccacctactgccaggatggggacagacccggggaagtacggggctcccaggaaaataggaaagaccaagagccaggttgtggtttcagttcttgccagtgaggttgaaaaatacacaagacttggacccagtgagaaccaggggccagcccccattccatcttcatggctcccaccaccctccttgtccagtggactctgctgtcatggagtccccatgagacccggagaattcatgtcttccccctaaattctccagtccatcctgtccctgtttggtacatgtaaaaggaggtatccatcctccagctggtcccggcactgcggctgggcagcatgccaagatgagtctcagtgtctctgcagcatggtgctgcccccaagtttaggttgaactctaattcctccagctttggggc

SEQ ID NO: 45659 - DNA, 2806 bp, Bovine  19866880550711
  misc_feature (1)..(1): n is a, c, g, or t
ncctccctccccgtgtctgacagtcccccacctgtccctgctgtcccccaggcactgtgtgtctgacctgtgcggcacccgcgaccccaaggagcaggaggagctgcgttgccaggtcctcagcgggtacgccagcatctgccaggaggcgggcgccaccccggccagctggcgggaccacacccactgcggtgaggccctgacctgccccagcagctggcccctgaccccctcagctctttccactccctgttctgctctgagcccccacagctgcccccaccttggctttccctcttggttcccccagccctagactctcccccttgtcaatgtcctcctgaccaaaccccttccctgccctaacccccatcacccctgcccactcctttctgccaaggcccacctttgatcctcctcatgagttagtgccacagacaaaaagactcacgaagccggtcctccctgcctctagcaaactctgtgctctgttgggtgaccttcttctccatacctggaggggcctacccctgctcagccactttctgactatgactgtgtcctctcagccttgtcatgtccagccaatactgtctaccagagctgtatgacaccctgcccggcctcctgtgccacgctggcagccccccggggctgcaagggcccatgtgtggagggctgtgccagcctcccgggctatgtctacagcggagcccagagcctccccctggcccactgcggctgcaccgagaacggcatctactaccaggtcagggctagaagtgggagaccccaggggagcgcaggggtgaaaggacagcccaaccctggaggtcaagcaggtgcccctgcttcccgggccttttccctctccagcagggggacagctttgtgaatgacgactgctcccagcgctgcacctgcgcgcgcacggggttcctgctatgtgagcccctcggctgcagccctggggaggtctgcacgctggggaacctcactcgtggctgcttccgaggtgagccgggatgggccctcagcttccagctgccctcatcccctgtaggggcaggggaagggggaagtccctggacttggaacaaaccagccctttcagtcctgggaagagcccatctcatcaagatcaggacgctgctgccatttcatttctctctctctctctctctctcgggagggacaaggcagaggccctgtcttctgagcctctgctctctgctctgcattcgtgtctcaagatctcctttagtccttaatcagcacttggggtggtgagcatagcattcccacattatagggtaaagaaaatggagttcagaagagggtaagcagtttccccagatctcgggggtatagaaccaggactggaagcctggtcagcggaccccagcaaatgtctctgggagaaattcttccctggtgtcccagcccccaggcccctcttcctggctctgagtgtcctcccagaaccccctcccacttgcttccatccttgcagacagcccgtgcctacagaacccctgtcagaatgatgggcggtgctgggagcagggaacgcacttcacctgtgagtgtgaacctggttacgggggagaccgttgcatggagctgcaggatgtacctccccctgaaaagccaggcaagaacttcaccccagacctgtatcctcacaagctcctctcaccttccaccccaacaatggccacagaataagtccgtgtatataatattaacctgctgctgctgctgctaagtcacttcagtcgtgtccaactctgtgcgaccctgtagacagaagcccaccaggctccctggtccctgggattctccaggcaagaacactggagtgggttgccatttcctcctcaatgcatgaaagtgaaaagtgaaagtgaagtcgctcagtcgtgtccaactcctagcgaccccatggacttcagcctaccaggctcctccgtccatgggattttccaggcaaaagtactggagtggggtgccattgccttctccaatattaacctacagtatctattatagatgtatgcgtgtgtatgtgtgtcttagttgctcagttgtgtccaactctttgtgaccccatggattatagctcaccaggctcctctgtccatgggattcttcaggcaagaatactggggtgggttgccattcccttctccaggggatcttcccaactcagggatcgaacctgggtgtccctcattacaggcagattctttaccctctgagccaccaaggaagcccatagatgtatagtagatagtatattatcaatgtcttatattactatatgagatataataatataatatttggatatgatccctaaagattagcaagatcagtatcttcaaagaatctcagagtccctatgccctacccagcactctggaatcttctctctgaccctgagctccccacttctgtgatctgtatgcctcaccctgttgttgttcccctctcttgtgccctcttagcctccctggtactgtttattagttttctccatcccaaattataattcccatgtgcctctgcaccagcaattctccaactgtgattgtgcctaagatcagggtgggggaaggttgtctctgggactcagccccagagacatggatttggtaggtctccgtggggcctcaagatgcctgcatttcacaagctcccaggtgactgatggaagtgataccagggctactcttggagaagcactgacccagctgataccctggactctgggggaccagctgggtgaacatcctcctgaagg

SEQ ID NO: 45660 - DNA, 2741 bp, Bovine  19866880683039
  misc_feature (1)..(1): n is a, c, g, or t
ngatcctaccatatagcacagggaactatattcaatatcttatgataaaccataatggaaaagaatacgaaaaagaatatatgtataactgaatcactttgctgtgcagctacaaagtattccttcatataaataatatttcttaatacaatccaaccatccatctggcaaacatttgcgtgcatactaagtcatttcattcacgtctgactttttgcaaccctgtggactgtagcccgccaggctcttctgtccatgggattctccaggcaagaatactggactgggttgccatgtcctcctctaggggatcttcctgatccagggattgaatccacatcgcttgcatctgttaggtctcctgtactggcaagcagattctttaccactagcaccacctgggaagcccagcaaacatttaggtaaccttgacttttccttcctattgtaaatgatgctgcaattgacatctttaaggcatgtacatctttgtgaaaatacacacatatttctgcaggtaaaatcctagaaagataaattggatccaagataaacacatttgaaagttgaatagtcattgtcaaattaccttctaagacgctttctcgaacatagtcatcaatgtatttcagtgtgtacagtacctgtaccgtgaccaacgctcaatgcttcaatcctttgaactgttgccaacatgaaaattgtagtcttgatcagcatttcccttatgacaacggaagcagaacctcttttccaatgtttcctggctccttgtaggtcttcctctgtgacttgtctttttcaattctttgcgaagaagcattttcagtcctcacttcactccatctttctgttgccttcgcccctgttgccagctgtgtagaactttaggtttgaaatggttggaattctgcagacagtgttccactggatctcagaatccatggttactattgaaaattctggtgccatgctgattcctgatctttagtacgtgacctgcttttttctgtctgaaagtgtttgggaatgttctcttcagccctgacagtctgagatttcatgacacacctttcatgggtctctttgcatttgtcggaatggaccccttttaatcaagagactcattagtcagttctggggaatcttcttctgtgttttttcttaagtaatttcttttcctttgttatttcttttctggactctcctggctgaatgtcagtcatcctggactgagtctctctctcgcttttctccctctctttctttccctctctcgttcttattttatttctcttgatttcaacatttaactcttctgtaagggtttaggcttcggttctcgtagttttcatttcccagagcattcttgtgttctctgtgcagttttcatggcttcctcagaaggacgccaagcgaggaggggcagggggggataaggtggcctgggctcctcactctggcttcctcctctccccgagagccgcctctgaggtcccgcatggctcctccagtctggactctggtgctgctcctgggggctgcctggggccaggaccacatgcctgccccaacccggtaagctgggctcagggggtatttgggggtgcctctgaggaagagaacgaggggcaaagctggaaaggacaagcgggctggtgatgaatggtgtggccccggggaggaaggagggaccccctgatggatgttaggaggctcggaacagaagcaggcggggccctgcagcctgctgagactggacctgggggtgtgagccgctgagcagaagcaggacagaggtgaagtgtgaggggacagggaggaggtgcagagctcgggagacgggtctgggggtggcaggggaggacagagagggtgggttctcaagaaaatggacaaaacccaaggcagagccagtggacagagacacagcaagtaggaagcagcaacaggtgatggatggcttggtgtcctggagcttgtttgagaggattttttttttttaacatttatccatttggctgtgttgggtcttagttgtggcactcgggattttcgttgcgtcatgtgggctcagtcactgtggcatgtggactcggtcgttgctgcacgcaggcatggttgccccacggcatgtgggatctatttccccaaccagggatcgaaccctagtcccctgcattgaaacgcagattcttagccactaaaccaccgggaagttccatgtttgaagggatgtgaacaagcaggacttgaactactaaaacaaacagctgttctacgtggcccacgccacctgggaaaggccactggcttctctgtggaatctgtaagggtcactggtctgtgtgttcagtcagggcaggaccgtccccgccacacatctggcaataccagacccatatggtccctactccttggagaaaacttgggcaacagcacaggaaaaccttgacctgaaagaaagagatgcctccgatgtaaactctcagatgtaaactctcaaactctcagaattcctgcacagagaaactggctcttctcatgttagagaaccacgcgtgacatccagggcacagggggtagagggagccagaggggacatgaggaacttggaggggagatgcttttcaggagacagatgacaaggtgagaaggctgtgagtgacctttttgaaaaccctcaagtaagtgtatgttccctgcatacacgttgatacaataggataaaaagaaaggac

SEQ ID NO: 45661 - DNA, 1120 bp, Bovine  19866880772552
  misc_feature (1)..(1): n is a, c, g, or t
nattcttgtagcactgtgtcctaggggggtctgctctctggggcccctctactccctggagctctgacgaccacttgcctgtggcatttctgcgggtctgagaccagatgagtcttattttgcagggtagggggctgagggaggcggagccgctaatgctttgcttggggcttgcagataaaaggacagcttcccaggtcagccgcccccaggtctccttcccttcctcctccagctcccacccaggcaggggtggggccccagaggcgagatgacagagccaggcctagaggagccgtggtgttttatttttcgaattattaactacgatgacagtagtcctcctctcgtgcccttagcgctcccttcactctgaaccctgtcaggggaggaagccatgggcataggctgaccagtgctcccctgtgggaacaactccccagtgcccagctagctgatgctgttctcctcgtggtcggaagcactgtggggaaagcagggcaaaggtggggggtgaggcacagaatggtgatcagacaggccgaggaggccctgggggaccagcgtgccctggctcgggccagcacccctttctccatgttctcgcttccccagcttcctgccacgttctgggcacttaggatgaatcatttcacctatagacttacacacgcccaactgccgtcaagcactttagttagctgtggtgtcatgtttggataccagtgttttatatttatacatagagaattttctaatatagcctattatctatctatctatatatatgcacacacacatatccacacacagccattctcccctcccagacagctcttccacatgggaatgggatgaacccctatcggggccttgactgcagagccggagctccaggggctgggggagggagccacatgtcccgatcaccccagggcctgagctttttcaggaaaaggctttgtgcaattggttgggttggttttttcctttttttttccccatgtgcctcccctcctttccctgccccccaaatcgctgcaccaaagctgttgcgggcaatgttgggaaagaactgcatttaaaaaaaaaaaaatggctctcgtggtcttgctttggg

SEQ ID NO: 45662 - DNA, 710 bp, Bovine  19866880790056
  misc_feature (1)..(1): n is a, c, g, or t
ntacctttttggcttctttctcagagtcttccttcttctcttctttgtccccatcaccttcagatttcttaattttgtcatcactggaactctcattttcagcctataggtagagacaaatcaccaggaacatcattctctccttcagcctttttcagagagccctgccaactctccagcagctcagtccacaagtttgcctctcgcccacccaatacccaacaccctaaagtggctccatttcccgccctccaggcctcacagacagcgccagaagccccagcactgagacctgtttgccatcttctttcttgtcatccttttcgttggccttgcgctctccatcacccaggcctggtccgacccggctttcctctttcttgttgggctccccaggctttcctgcctgctcctcctcctcctcctgctccaggatccgcagatcattctctgtacctccttccatcttaatcacagctatcaacacagggagcagaggtcacattccaagggtcctggccttctgcctctggctttctgtcaattttcatcttcagccaagaccctggtcaccagacaagtccacccctcccaatccacacacctgcatccagcatcttgacaatggcgtcagctttgtctatgtccagcagaagattatcaaaccagccactctccatgagggacaggaacacccttagtcggttttg

SEQ ID NO: 45663 - DNA, 1800 bp, Bovine  19866880837732
  misc_feature (1)..(1): n is a, c, g, or t
nccccttgaggccgaatggaggggcgcttcctcccccgccgctcccagggtccccctatgggggccccactccggcctcctatgctacggccagcacccccgccggccctgccttccctgtgcaagtcaaagtggcacaacccctgagaggctgcggccctcccaggcggggggcctctcaggcctccgggccctccccgggcccccattttcctctcccaggccgaggtgaagtctggggggctggctacaagagccaccgcgagccagggcggggggttaaggaggaggccccgggggtctccggccctgcaggcgaaagaggaggctggtatgggtcccaggtccctctgagccagcctcccgagaaggagcttgagaggctgaccaagaagctggtgcacgacatgaaccacccgcccagctgggagtacttcggccgctgtggtggctgcggagaagacgtggtcggggacggggtcggggccgtggccctggatcgcgtcttccacgtgggctgctttgtgtgttctgcgtgcggggcccagctccggggccagcatttctacgccgtggagaggagggcgtattgtgagagctgctatgtggccaccctggagaagtgctccacgtgctcccagcccatcctggaccagattctgcgggctatggggaaggcctaccacccgggctgcttcacctgtgtggtgtgacaccgcggcttggacggcattcctttcactgtggatgccacgagccagatccactgcatcgaggacttccacaggaagtttgccccaagatgctcagtatgtggtggggccatcatgcctgagccaggtcaggaggagaccctgcgaatcgtagctctggatctcagttttcacattggctgttacaagtgtgaggagggtgggctgctgctgtcctctgagggtgagtgtcagggctgctacccactggatgggcacatcttgtgcaagacctgcactgcctggcagatccaggagctctcggccaccgtcaccaccgactgctgagtctccccaggagcacctgctgtgccctcccttcccatccaccaccttccccaacaactacctttataactttgtcaccaaatgttgtctcctcgttctccagtcatgaaataacaaccctgccagagtttacaaaaaaaaagacaaattcaaggagagcttgccaattactacctagttttagctgctatcatataataatatgatgcttacaaaggagatagcatggaaatcctaaggatggaagagtggaaagtcagaattaagttgggccttatgatgttgttaggttatgactgtaaccaacccttgaacttttcaatatgtaagacaaatgaactccttttgttaagtcactttgggtcaggtaatctgttacttgtagcctaaagcatttttccttatgaaccaaccatttttcttctccactctccatcaaagcagtgagatcccagaatcattcatctaggagccattacaaatgtgtgctttctgggctaaacgagacctctcaggctacctggaactcactcttcctatccctcgtcaacttccccatgtgtggagttccagtttttcagttctttcttcaatctgcatcccctttctctatataaggttagagacctcatttcctacttctcagagaaaataaacaacagctgatggaaattccctcagccttctgacatctcttacagacatacctacatccatactcatctttgattccttcccccattgatgctcatcatctcct

SEQ ID NO: 45664 - DNA, 1389 bp, Bovine  19866880889197
  misc_feature (1)..(1): n is a, c, g, or t
nacacacaccaggcctccctgcccatcaccagcttccgagatgatacgagatcgggcgccttcaggctgatacagccggaggcccatcaccagcttccggagtttactcaaactcatgtccattgagtcagtgataccatccaaccatctcatcctctgtcgtccccttctcctcctgccttcaatcttttccagcatcagggtcttttctaaggagtcagttcgcatcaggtggccaacgtattggagtttcagcttcacgcatcacgtccttccaatgaatattcaggactgatttcctttaggacagactggttggatctccttgcagtccaagggactcttgcaataactcacactccctaatgccgggtttttcccttgaggcgtgtctaccgttttaggcacaaagagttagagcctcttgctagtcttactcaggtgccccaatagatgcaccttcagaggggcagcccatccggagggtccagcttccattgctcctctgccatctctgaattgccctcaggatgaagtgaggagcctgttgcctggggactcatccaggccacccactggcctctgccaccattccagggcagtcttttgccaccaaaaatggctggcagccagaaatagcaggctggaggcaccagagatggtgtcaccaccatttcaaaaaatttccactgaccaagtggtgaccttatgctgattgtgtttgacattcctgccttaaagcccagggatgggtagaatggcaagatgtacacattccagagatttcagagtcatgagggagactttccgggaaaattagaaacagagggaaaattttaaatatacatatattatttatttcactgcccattcagatctgaaatcacttagctcatttaataaccaaaaaatgcatccttacatttgggtcataaaattgtcatggttggtcttcttagagataaggaaatctgaaaactggaggatgccgccctgctttattttgaggtggggtctgggtgagtggcaaggtctgtggggaaaagttctcctctccttcatttttcttctttttccacctagctcagttggtaaagaatccgcctgcgatgtggaagacttgggttcgatccctgggttggggaagatcccctggagaagggaaaggctactcactccagtattctggcctagagaattccatagactgtatagtccatggagttgcaaagagttggacatgactgagcaagtttcacttttcccacctagcaggtcccaagacaagagaaacaagacagctcctagtaggaattttgtaccgaggcaaagccatacacccggagtgggaaggagagtcaacttctagaattcccttctggggtcagg

SEQ ID NO: 45665 - DNA, 928 bp, Bovine  19866880913216
  misc_feature (1)..(1): n is a, c, g, or t
nccgtcattgttgaacgcccagattatccctctccggattccaggccccctcagccagagccatgggtgacagcgatgacgagtatgatcgaaggcgcagggacaagtttagacgagagcgcagcgactacgaccgttcccgggagagagatgaaagacgtcgaggggatgattggaatgaccggtaggacacaattttttcttaatttcggctccctgttttattgtcgggcattcaagtttcattgcagttttcttaaagctttatttattaggtcgagccatatgaaatcactcgtttttgactgtttcatgtggtttgacttcattgctctatggcttaatttttgaaatgttcagaagatcagagcaacagaggtaagagtttgagtaggaaaaagcagtgtttgtgtgtgcattctattgtttgtaaattatacccccagaaagttgactcagaaaaagtaataatacagaattggcttgattggagaggttatcagactagttctctatcaggatataattaaatttcttgtaatagtgtagcctagaatcagaaagagttctttgaacagtgatcagttcagttcagttgctcagtagggtcggacccattgtgaccccatggactgcagcataccaggcttccctgtccatcaccaactcctggagattgctaaaactcatgtccattgagttggtgatgccatcggtgatccatggatgggattacttgattaggtttgatgtagctagtgatttggagaaggcaatggcatcccactccagtactcttgcctggaaaatcccatggatggaggagcctggtaggctgcagtccacgaggtcgctaagagtcggacaggactgagcgacttcccttttccaacttttcactttcatgctttggagaaggaaatggcaa

SEQ ID NO: 45666 - DNA, 902 bp, Bovine  19866880997709
  misc_feature (1)..(1): n is a, c, g, or t
nttggtcttcctcccaccatttttaaaggagaaaggaattaactaatcctcagaaagtgctctgtctgacttgcccgctgtctccctaccgcttggggttcccggatccgagacgtgttaggacgtggttgcgggattcagtatctaggtttttctcccctcctgttggctcccgggtctacctgttaggacatctcggggtatctatccagcctccagttctagggatccccgaacacacacccggaccgcccctcggagacaggacgcccaatccccgcctccaggtgccccactccgagttcaggccctataaatgctacctcaccggagatccaccctccctactcccgcggagagctccgcaggattaagtcttgtgaatcccgacccccaaccctcccccaggccccaggggcagatgagcccttggccaccgcccctccaatttcctgcagacccggcaaacaaaaggctcgggaagagaggcgaggctgaacagggcgcccttcctgcaggaacagctgatggagcaaaatgacccaggagggagagcaggggagggatgaaattccagggttccaggaggaccgcagcaggaggccagactcttggatctcgaggaaggagggagggagtcccggaaagtggatatgcaaggcccaggcaggacactgcagtttgctgggctctctcagatcccagcagccctggtgggggtgatgtcagccgtagggaatggagagggtggggggaacactggatttcaggtgagctctgaggcccctaggctggagtggtgggggcttgggagaggcctgaagccctgcgtcatctcctttggggcccagcctaccgccccctggcccgacctgctaccctcggtgagggccccaccctgg

SEQ ID NO: 45667 - DNA, 674 bp, Bovine  19866881002126
  misc_feature (1)..(1): n is a, c, g, or t
ncacccccacacacaccctggggttggctctgcatgcaggctcccctctcctctccccagccattctcacccagtgtgattttgaggatgactccagacccctctgtgattggagccaagcgactaaagacgatggagactggactcgagaaagcaggcccttcctcgccagcggcactgcccctcccggggggtaccccagtggaggtgaggaggctgaaggtttagggaggcagctggaaggtggacacgggcagatctgggtgcagggagctggccggaagtgggtgctagggctctgggaaggggctgggggcagcccttggtgggggtggggtgggagtgggcaaggcttcaccattcagggctctgcctcccccagagggctactacctgcacatggactccagcgccttccacccgggcggggtggcccgcctgcgaagcccccctatatgggaccagggccccctctgtgtgcgcttcgcctacttcatgtttgggctgtcgtggggtgcccaactcaagctgtggctggcctcaggcgccaagggcaagcaccccaacctgctgtggaaacacgtgaacacgcaaagcccctcctggatccccaccgctgtcacggtgcctctggggctcgtcctgcccagccgggtgaggctgcaggcagagta

SEQ ID NO: 45668 - DNA, 1196 bp, Bovine  19866881240264
  misc_feature (1)..(1): n is a, c, g, or t
ncgacctggctggaccggacaaagaattgccccgttgcaggtcacagccgggaagggagggccccgacatcacactttacacacacacacacacaggagggatgccaaccctggcatcacccctgagctgagaattgtagatatttactgctgccaaacccttttccctgttcagaggggtctcccctaccccagctttaacttcagaacccctccagccccctacagggccagaatgatctctgaagtggagagcagtgggggctcttccctaggagaggggagaatcccaaattctgagctgggggaatgtcaaggggggccttgggggaagggctgcatgtgaactaagctcatctctgagtaggcctggcagagcattgcgttgccaggcaacggtaggggcctccctctcctctccctcttgtctggatgggttgccatggtaacagctgggaggcagctgtgtttagctcctcgtgtgcgcacactcacaaacacacacacccctgcagcccagtggagggaggggtggggagtagagcagagcaggacaggaccggaggaggagaccagatcctgccccctccctactccaggtcttcctgccctgtcagcgaacacacggggacctcaccccttcagtctgctgcatgtccccatccctctgatctcccagaaaagttcccagttcaggacaatgggctgtggcttccaagtaaccccttcaacacctccaccagatcatcacagacatcccccaggcctccccgttccccctcctcactcactgtccagctcttttgccttcctccctccatacaggaccttccgctgcagagcccagcctgccccaaacgtcgaggcgcccatctcttcttcctcctctggcgtccctgcgctggcgatgacgtgggcacaggagatgctggcgaaggcccccccgtctgtccccttgctcttgcagcttggatcttgaccatgggggacggagctcccatcccacagcccttattcagcacccccccagccttgaggctctcataggcagggggtctcttgagcccagctgctgcagctgggtaggtccagaggggggtcagggggcctgtggttggatccggaaggctgtgtggggaggccaggcaggcgcggtggtggagaaccccagctgctgcacccagagccccactgtg

SEQ ID NO: 45669 - DNA, 1154 bp, Bovine  19866881628095
  misc_feature (1)..(1): n is a, c, g, or t
nctgccaccccagacttctgaggggagcccaggagcagagagtgaggaggggaccacagccatccgaaaaaggagctacttcccagcctcgctgacagctagccgtggtcccattgctgcaccccaagtgccgttggatggagctgacacagcggtcttccccaacaacgttgtcttcgtcacggtaagagggtccccaggctcctgggataggggtcaggcatgaagatgagagagaatgagaacatggccaggagggttatgacccagagggttcctatgcatgcacccctccctggagaagccaggtcctcaagagagtggtctgaatctgccattgattccattttggttgtatctgcccttctataacctggaaaggcaggggctgtacctggagtccttgctcatgacaagccccaggatagaggcagcttccttttgctctgctcctggacagtattgtaatctagacccatccactttcctttggaggctgctgctcatactactgggggatgtggtccagatgaaaacttgtcttccaggcttctgtaggtgcctgaagggatgggtgtcagacattcaatgtcttgggatggggaggaggattaggctagtggctggctaattatgtcctgccctttgatagggacctcatttgcgttacacacacagttgattgtcagtggccaggaacccaagcgacttggtcttagaccaccaccacactgaccctagatggtgggatggggaactgtgcaggagagtaccaagtcttaagtatctgtgccctgactgcacatcagtccccaatacttcagttagtccacctacaggaatagttggcagtgtgttcagttacacccagaagaatggactttgcagaggggtggtagtgagctaatcatctaggtctcctgagagatggaggtcttcatttctctggaaaaaaggaataggcctgaaactttgatagtcccatctagggaaggaacccacaggtctccctttcaacatgagttgggcccctttgcagaacattgaatctctcaccttaaatgcctgtggggaataagtactggacaggatcctcggagaaccccagcattctttctctgcaatttgaacttagctttgattgccttggggat

SEQ ID NO: 45670 - DNA, 1635 bp, Bovine  19866880168527
  misc_feature (1)..(1): n is a, c, g, or t
naattgatgcttttgaagtgtggtgttggagaagactcttgagagtcccttggactgcaaggagatccaaccagtccatcctgaaggagatcagtcctgggtgttcattggaaggactgatgctgaagctgaaactccaatactttggccacctcatgtgaagagttgactcattggaaaagaccctgatgctgggagggattgggggcgggaggagaaggggacaatagaggatgagatggctggatggcatcaccgactcgatggacatgagtttgggtgaactccaggagttggtgatggacagcatggcctggcatgctgcagtccatggggtcgcaaagagtcagacacgactgagcaactgaactgaactgaagactattgaaaacagttttgttacagtaggaaaaaactggaaacagtcaaaacaatctaaatggaaacaacaataaggccatggctagacatcattttaggaaatatatagtcattacaaagcatgttttcaaatgacataataagtatagaaagaatactgaaaaatgcctatggaacattaacaaattagaatagcaaccagtttacaaacagcataatgccaaatttatttttaaaaattaaaaaaacgcttatttccgagcgatacgattgcacattgtttaaattcctcacactgcacatgcactacttttataaacagatactacgatgagcagaagagaggggcacccacatcacctcacgtcactctaagtgtgtctgtctggctcaaagtgcgccctcagacaggcacctgaggaactagaaaaaggtagctcacagctgggctgggcctgtctattctgaggtgatctgctgtgaattcccatcaggaatcactcccttggagcaatgcctttgaccttagccagtaggcaggaatggtttctcttgggtggtaccccctgggcaggggactgcaggagatgacatcactgccatgtgtgaagcaccccatgaaggtcctcccacagagaagccaggggaccctgagggacgtactcacttttcaccaggagcgtccagcgacaggacgcctggcctcggacattggtggctgtgcagctgtagctcccgctgtcccgggcccgggctctccacaggcagaggtaatgggtccccccagcttcgtaaacctcgatgctgccctcctgactcctcacggggacaccgtccaggaaccaggtcacttcaggttttgggatccctgaaactacatggccaggtgaaggacgtgaggcccccaagagtgcttgtggggtggagtgggtgatgaagggactgagcctgagggcgggctcagctggtatgccactgccctctggctggaacctactcgcttaccctccccctcctccccaagacagaggccggggcgctttgagaggagagtgccaagtgacacaccaggcctccagaccagccagagcctgcagaaggggaccctggggtttgttcctggtggccatggtggtgacaggtttcccatggtgggggctaaaaatcagggttcggggtcagtgctctcttcaaccatgaacaatgggccactgcagggagcatctcctgaggggagacccctatcaagtgctt

SEQ ID NO: 45671 - DNA, 1578 bp, Bovine  19866880420845
  misc_feature (1)..(1): n is a, c, g, or t
ntttaaaaagaattagtttaaaaaaaaaaaaaaaaaaagatttccaaaaatattgtcagagttgaattttggtcaactctagatctgtggttaggaatctcatttctaaattttatttatattttctggtcttctttgattgatctggttggatttgctatttcctatttccaagactagcccttaaatatattcattaatataatttttctactttataatgaactcatttcttttatataaataaatcattttctttggtttgttctattattttattttgtgagttgaatgcttggttcattaatatttaatatttttgttcaataataaaaaattaaagacatgagtatatttctgatattggctttagctggttataaactactcaaaaagcaagattgttgtcatatttagtagctgttactagttagaaaacgttcacacactcacacttcatctaggaataaacttaagatgtgcaaactttcaaattttccaagcaacatatgacaactcttgaataaataaagaaaaatactttgtcattagattaaaaataatcagtggaattatattattaaatatggaatgttaaaacactgtcataattaaaaccattttggttctgatacaaaaatatacatattgattaataaaacagtccagaaaatccaaaagtaatctccatacatgtgacttcagtatatgataaaagtgccttaaaatgcatgataaaagaatgaattaagtaaatatgtataattttttaaaaatcacatttaaggtccctacttcatactacacagagaaacattcatttcaattaaaattttaaaggtaacaaaggccagaagacatgcatattataagcttagagatttcaagtatgataccaacagcagaaaccataaagacatttaggcacttatatttaaaatttttgtacaaaagtacaattatgaccaaaattaaaaggtaaacaaaaaatattagagttatatgtagaaaacaaaggtggaagctctttatatatatatatatatatatatataatttatattactaaataaaatgagtacataaagaaaaaagtaaagggtatgaagctcatgagacagccaaagctcatgagacagccaaacataaaaagaagtttaaaagtgatcaagcaaatatgaaatcaaatgtgatactattcattattaaagtttgctaattaaagtgataaccagtgcttatgagaggatagaaaaattaaaagttaaaaattaaattcctaaacattgctgatgtgagagtaacaatttgaacttcatttttcttacctattaagtttcatagtaatgatgatcttaacaatctggaaatagctatcaaagattttaaaagattcaataagtctaatatctgcctatggaattatcaaagatgtccatgaggatggatgtagtgtggtcgttcagtcgtgttcaactctttgcgaccccatggactgtagcccgccaggctcctctgtccatgggattctccaggcaagaatacaggagtgggtagccattcccttctccaggggat

SEQ ID NO: 45672 - DNA, 1133 bp, Bovine  19866880422558
  misc_feature (1)..(1): n is a, c, g, or t
ntgtgctgccaggcttcgatccagcacagcgctgcagacttgatcagctgagtgatccctggtccttgcaggctgcctgggcaccaggcttcagatgcattctgggtagtatgaagtagctttctgcagtctgacagtgctgacccctcttacatttgtggtgatggaaaacccaagaatttgtgtccttccccatatttttgaacttttttttaaaagctaaaagcaagacttgactgtaaaatgaaagctgagtcacatagtttaacacaatacattctcaattttggatgttacaagtaaagtcaaaggccctttttacttcataccaacttaatttctccctggaggtagatcctggtagcagacatcagggactttccagacctttccatgtatttacatatatgtctgtctatctgtggaaatttgtaaatatctctctgtgtatatatggctgagggttaacatatagggcttttatatcattttgcaacttttttttttttttccatgcaatgacatgtcttgaaaatcttccagatagtatttctcatggtggatattccatagctgttttagcaattcttctattgtttcttttttaaattttttaccattataaacagtgctgcagtgaacattcatgaacaagcatgcacataggcaattatttctctagggtagatacaaaggattggaattgctaagctgagtaataggtacattttttaattttaaaatgtagatttcatgcataaagcttgcccttgttaattttggcctagtgttcaaatctactgagataaatttatttattgattttggtcatctcttacagtattaacctcactataccagttttgtgtcatctgtccataccatcaggcatatctttcatcttgtcatcttagaaactattttctttttaagtcaaaatgcagcagtcaagggaagagctttgtggctaccaccagagacctgtatcctacccaaagctcactgtattgtcctaataaacactcttagggttctgcaatttatctgcagtaatcccacccagctctactcttatcctgttcatttttcaccatcttatctgtaagactgctgtggaggacatttgccaaagg

SEQ ID NO: 45673 - DNA, 1431 bp, Bovine  19866880437838
  misc_feature (1)..(1): n is a, c, g, or t
ncccacaggtactggaaggccattaaaaagaatgagtcaattagttgaagaatttggggaaagcatccaaactatgcatatcctgttctgtgaaacagcctgtctgtcctttcttgaggcaagcaaacaggaaaaacactggcctgggtacacctcaccccccttctgaaaccttctctggcacacagtgccccttgaaatcaaggttgggaggactgtttcctgagaaaggagaaaatgagtctgaccctctgggttataaccccttagaaagggtggagggacattttgttatacttctgagggtctgatgaatgcccatatcctttaagatgtcaggccattaagcaggagccagtggcctgaactggaaatgttctcactggtggagtgtctttagcatgtgggagatataccagccacaaaggaatagttttacttacagccaaatgttttcctggaacttttgaagttaataaaaattttttaagtacaaaggaaaaagaaaaacaacaaaataatcagtgttaacaagctggtatgtttatctcctatatatttttttgagttttacaaagctttttatgacgggcatgtattactttataatgatgataataaacattgttctttctctaaatagttcagtatcacatgccaggaagttttctagatgctggagatacagcagtaaacagataaaaatccctcttcctctagagcttccagttagggggtatttggatggaggaagtagtaaaataggagacagtgatagccctggaaggaaaagttgggatggagtgagaggatgggagagccctggggatgaaacatcagagacggttctccaaggaggggatgtctgagcagagatctgaagtaagtgaggggccgagtcaggggcagggctgcggaaagagcacttctttacacagggaacagcaggcgagggccctgaggttttgctcaaggagaagcagaaggccagtgtgaccacagtggagcaagcagtgagcacagtggaggagcggaaggaaatgggtctggagagccaggcaggagtgcactgggccttgtaaggccatgatgaggagtccatccagtctcagtctcagtgtgaggggaagcaaagggaaggctgaaactggggagtgaggtgatgtgtagttcgacattgtctcctggatgcctccgtgttccggggaccacatttcccccatcagacgacaaggtcctgagttcagggatatgcggatgttttctcttgtgggttcctctcccaagagagggctgaagcaggagctgcaggccacaggaaagtgacggcttatctctccccaggggtttcacctcctgggactcaccttctactgtcaactccactgtcacctggcgggcaccactaccgttagtggcttcacaggtata

SEQ ID NO: 45674 - DNA, 1581 bp, Bovine  19866880483344
  misc_feature (1)..(1): n is a, c, g, or t
ncgtgtgggtttgaagttttgggtaggtgtttatttttgtttgtctctccaatggtttttgtttccttctttgggctagagaacaggaagctactgtgcccagggtggggcagcagaggctgtacatagcaaaggcccagggcaacgctggtaacttaagagtgtctgcagggctcagaggagtttatcagattaacccagaagttcaggaccaggggagctgaaaggagagggggcggagggccacagaggaaggtgagcgcttaggaagccaaactctgtcataagtgagagattcttgttttatcacttcctgctcctggtgtatacaacattccactaaccgtctttctaccttctctctttttccaggtttggacaattccaataggtatgtgtaggctttgtgactgtcatcggtccatctcgaaatgccctgttatagaaaagagggattgtaatcaagaaatgccctaaatttctgagtcatcatatagtggggagaaccgcctgtttgaggggcgttgttttatttggaatgtttcattttctattgtaatttgctgccgaggttctgggccaggcttgccatcagtattgagactcttgaaggccctgctcagtatctttactagttagccatcattaggaagggcactgctctgcaagcatgccctccatgttcaaggccagaatccacctgcttgttttctggctggaaactgagccaactgcagagaaagactttcgctcttcagttcaattcagctcagtcgctcagtcgtgtccgactctttgcgaccccatgaattgcagcaggccaggcctccctgtccatcaccaactcccggagttcactcaaactcatgtccatcgagtcggtgatgccatccagccatctcatcctctgtcgtctccttttcctttctctcttactctgtcctaattagtgggctttcataattcctggagcccgtgcttgtgatgagtaactagatgattgttctcttccttcttcttcttctgccccaccatccatccctcaccaccaaacaggtcactcgtgagaggaacaaaggtggccggtacggacatcaggaaggaagtgaccaatggagtcactcaggggtccaaaccggatggcctggatgctgctgccgagagtaagaaccgccccagcacccagcgaggcggctccccgacctgggccacagggagccagcctcaaccccccagggaatctgagctggaaccactggggaactcccccagaaagggccagagggcccccgtcctgcaaaagacctccagcaccatcaccctgcaggcagcaaaagtccagctggagcccagagcgccagtcccaggcacgccctgtccttccagagaagagatgggaggggccagctgcgtcccctccagacaccctctccaccaggcggtcaggcctgggaagccaggacaccatgggcaaggttgctaccaggaaggtccccatggagagccagagggacaccatgtttcccaaatttgagaacaagccccagagccaggaggtcagtgaagatgagccagtcgagt

SEQ ID NO: 45675 - DNA, 1560 bp, Bovine  19866880509143
  misc_feature (1)..(1): n is a, c, g, or t
ntttcccaattagaagagaatcatctccccacccggctcttaaagaaaggagaaactttgttctccaacacagctgtcagcttgggtgttgcttaaaatttgaatacaatcaacaacccttgtcccagtccctagcaacctaaaatgataacattgccttggttacaaatcacttcagaaaacctggttctcaaaaagttatctctgtaagagcttgtgaatgaatgaaaacaaagcaaggttttcttaaaactgagacttagagccgctttatcacaataaaccatgtacctgagtcaaggtgtcagtcatccttctgcatctcaggtgaaacgcctcttcttccaggaagccctcaggagaccagggctgagttggctgccccatgctgggtgcaccagtagcatcctgtgcctgccttgtcacagccggccttaccctgtcactgtccttaccacactcacttcagtggcctctgcactggcccatttcctggttacactgcaggattcaggaagacccagactatatttgtttcttttacaactgaatcccctgaacactgctgctgctgctgctaagtcgcttcagtcatgtccgactctgtgcgaccccatagatggcctcctaccaggctcctctgtccctgggattctccaggcaagaacactggagtgggttgccatttccttctccaatgcatgaaagtgaaaagtgaaagcgaagtcgctcggtcgtgtccgactcttagcgacctcatggactgcagcctaccaggctcctccgtccatgggattttccaggcaagagtactggagtggggtgccattgccttctccgtccctgaacacagtaggactcaataaatattcatgaaactatcataaatacatacattatcaattaactaactgacgtggagcccaagtgtaggcagctgctccactgaggatattatttatccatttcacaaacatttcctgagcatctctcgtgccactgtggtacaggatgtgtcaaatgcaggctctgccctcaaagagcatgcagtgagggaaggaagtcaatgacacgaatacctatgctgtgaagtagacacacagtaaaaccaaaacaggatggatattagagaacgagaaaacaaccaaggcactggggtcaccgagcagttcagagcggctggagctgaggctgtgggacaggtaatactggaaccagagtctggaggcccttgaataaaaacttcaattaaatagtcaacatgtggcagggtaagagctttatatatatgatttcacttatttcttgaaacagttctatgtaaaaccatcctattacagagaaggaaaagtctcagaggagtcaagaaaactgcataagatgacacagccagtaaatgccagagctgggtccacacctaggccagactaatgacaacgacagggctgtagggctttggagactgagatgccaagttaaggggctgttactttatccagtgggatgcagggccactttgagtaggaaaatgccccaaagactgaagatttatcagacagt

SEQ ID NO: 45676 - DNA, 5287 bp, Bovine  19866880635284
  misc_feature (1)..(1): n is a, c, g, or t
ntcagaagggcctgaggtataacctaaggctgccaagctgtaacctgtctcatgctctttgtggaaattacagtgtgttctctgtctggctggtgtgggggtgtgggggtgtctgtgtcctgggccaaaggaaaagaaaacttgccacaggaagtgagagcggctgatcacagagagagacttccggcatctttcctgaagacctgggtggccttctccaggccggtgtgaagagtgcttctctgcattttgcttttgtttttcatggaaatgcttcagttcctgctgtttcacaactttggacttaagggcagagagggtccagcaatttaagcctctcactaattgctgcttttagctggtatgatctcttcctgaagattctgtgggttcagtcaaggcttttgactgttggtaatgggattattcaaagccttaattaagttcctgcccatccaatgggccaggtgccgggtgctgacactgacccaggcccctaaactgtcatgtcataactatggttcacccttcactcttcactctcataatatatccatgatgtaagtttcataggcattttctgtggtctaatttgctgggaatgttaatatttaaattccttctgtgcatccgtgtccatttattatctggatgagcttatacttggagatgggacagaagattcgtcttcaatgaattcctcaggatcattggtgtctttgctattattttcagtttttaaatcaccagctctgtcctagtcatttatcctaggagaatttatttatgtaggagaagatgccttgaaatagggcaagaagttcagagtgatgggctataggcaggctggcaatcataggaagcatggagaaagtcgcgttgcagaatcagctttgtctgtcttgaggagggggacatctgtccagcaggtttccttaatttcccatccttcaggctcagcctttcccagcattgattttggttacccagtaggattcaaagaagtacttatggacaaccccttcatctattattcccagccccaaggatttctcagctcactgctcacatcttctttgtgtatctttccaactccccagtgtcccgctgagcagtcccttttcaccctggctttagtgtaaccctggtttctctctctctctctttttggtctccctccattctcatcatgagcagagcttcagtttcatgtcttgcccagctcggcactgcagctgtgtggcttggcagtgtgcacacagggacaggtccacccaggtacaaaagacatgcaggagatcatcaaaaacaggaacatcaccccctttctacctcttaccaagctgagaaggcagatgtgtagctctgagtcttgggggtatggcggtcagagaagctgactttgctctgggcttacaccctggtagcctgttccaggcaacctggaattgactgcaagcccttcacacacatcagaaaaaaatcaaaagataggttcgattcctgggtcagaaagatcccttggaggagggcatggcaacccactccagcattctttcctggataatcccatggacagaggagcctggcaggctatagtccatagggtcgcaaagagtcagacgcaactgaagtgactgagcacgcacacccttaagaatgtttcactttcagtcattaagtagatctctaaatagcaccagattctgaaaaacttcccagcatggcaggcagatgtgacacggcagcaagcagccgcccgcctgcagcccagctttctcctcaccagccaacacacgcagaacgagcccccactccttttaaaggtcttttgaggccataaaggctcttggggacattttatggaactgaagcacagttttactattttaaattattataggggttatggtgactctatctttatttttatgacaagttgtcagatatgcccttgatttatttgatcccaagcttttaagaatacaacctccaattaaatgtggttactgtggcaaaaaatatgattctccttagaatgaccctctttggggccatttccaaaaactcattatggtgagaagtcagggctgcctactcatattcacaggcatctctccttatggttgctcggttttcccttatggaggattagagagtattaaagctgtgggctgggcccaggggagactgaaaggggaagaaagaatcttcccccagaagctaagtgggtcattatttaattcagactacttcagggatagaaggacctgaggcatcaagaactgttttatcatcaatgaaaggaaggcattacaacctgaagaggtcaggaagccaagccagacctgggacacaggcctgggtcttatgtcatctgtcttctctgtcccacacggactctcctagggatgtcttgggcacatgcatggcacccatcctatctgtcctaggccgttgggttatttctgctataatggaaatacaatagatggggtggtttaaacaacagaaatttatttttcacagttttggagactggaaagtccaaaatcaaggccccagcagattcagtgtctggggagatccagctcctggtttgtagatggccagcttcttgctgtgtacccacatggtaaaaaggagtgagggagctccctggaatagcttttgtaagggcactaatcccattcatgagggtcccacccttctgacctcatcactccaaagggcccgcctcctaatataatcatattaagggttagtatttcaacatgaactttagagagacacatttagtctatggcactgtcctttgttgctccaaggaaacagccctagacttgcttttagcatggccatgaccattgacatttttcccaagtggggaacagatattgctttaacataggggaggtttaaggtctataagggatagacatttatcaatgctttgggttctatagtatttatctttccaaaaacataaatttacagtgaggcacagagagacagctactcaactgatagaccaaaattgtggtcccagatctgtcacttgatcttaaagatagcatatcgttcacttctccaggcctctttccttagctctcagggcttaataatatgattgtccttgcatgctgtcacagacactcttggtaccccacccaaatcaccttcaccaggctgctacacctgctcctagttgctctgagtgtcagttaagggcttggcttcctgaatccttatctcaggttctgcttctgcttcccaagacacctccattatagcactgcaagaatcaaataagattctctatgtggaagactctgaaaactgaagtatcactgggcttttattgcagttttgactgggctgtaaaagtcccagctgtggcttcttggcagaaggcccatgatgaaggcagataagacgtccagggaggggggggctgttgtcacacacccaagattgtgggtactgggtttctcttctttccccacctaggagcccaagatagtgggaagacaataaaaacgagtttacttgaagctgagtaatttttaggtaaggttaggtagtgactgaacaagtttttccatatcgggaggataagaattggagctgcggattattcagaccttggaacagaaaaaggtcatagaaattcctgcttttgcttcagatacaggctgtataaaagtccattgcaaactgcagttttctaagtggcactagtttcagcattaaaaaaaaaatccttggatacttactttaagggcactgcaaaggtggatttggtggtgtggggtggaggggaatgtctatgcatatagaaaatgagaggaaaatagaaagggaaatagggatctgtgtcctcaaaatctggagcacttgcaatgtccccagttaatcattgatgcctccagccctgatggccccagagctggcaccactgcagggggccagagtacttgctcatggaatgctaaggatgcatttggtgaagttaatgattcatcacctccccccagtcccagggccctacatccctttctctgacactgacagaagcttacctgatcattttctggaggtgaggctggccctgcctctcacaaattcactgtaagaccagattcccaaggggcttccttctgtaggaaagtttctttccttagctgtttcctgaagataagcttcaaagagaaaaagaatgtgttgctagagtgattgtctgatattccttggcatgaagttttgtgccaagagggtaccacaagatgatatgttttttatatggattatgcattataaacatgcataatgtttatttgtgtaccactgttaattccaattctagatttaggtaccttgaggggctccacaaattaataaatggttgtgctatacatttattatgtgcatgtgtgttaagtcacttctgttgtgtctgactctctgtgactccatgggcgatagcccactaggctcatctgtccacaggatttcccaggcaagaatactggagtgagtgccatgccctactccagggtatcttcctgagccaggaatcaaacctgcatcttctgtgactcctcagtgcaggcagcttccttaccactgagccactggggaggtcatatattcattatacagacacactaatatgaaaggaacacatattttcatttaaatttttttctgttttacaaagatcaagtgtgttatttgcaagaatatcagaaaatgatagttaagtaaaaggaaaaggagcaacccagaggtgatctctttttgtttcatatcacaatagacattataatatgcatgtggtccccttcaaacccatcaccctaagataggatatgtgtgcttggcaaggctgcaacggtccaggtgtgagtgcgcagccacctaccctccccttgctcccacgtgctgataaagcatcctctctgacctcgctgaggcatgtgatgagaattatagttgccagtcactgaaggctttctttgtaaatgcaatttggggttatccagtgaatttgggttttgctgcatctgtacccatgctctcttgtcttggaagtggatacatgtgtaaaagctaccgctgccacctatttgcaacaccaacagtttctttctcaggagggttctatgatgtcttctgtgcatttccaatgctaaaatcccccaattcagggccccagggtttgcactgatgggccagtctgagccctgcttctctgaagaggaatccattctgaagggctgattga

SEQ ID NO: 45677 - DNA, 1789 bp, Bovine  19866880641046
  misc_feature (1)..(1): n is a, c, g, or t
naaatttcaatggcttggactgggaagtctaaatctgctttaaatgtgtgtttcgaaataggactcaaacctctttggcattccctgcccccagcatgccaccaacagacacccagacaagcacggcacgcacaggcttgctcacaatgggaccttctaggagggtcctgggatttgcttctgctctctttcctgtgtcccctggggccctgccttagaattcctgaacaatatcttgtgcaagagcttccctgcatgcaactcatttggcaagagtcatgaatcaggcagaagtggccgaggagcatgccccgggtgacactagggtgtttgtggagggaagtgggtggagggtaaggagccccaaggctcctgccaggctgtcctcccactgccctggcctgccatccatctctgttcacccctccttgagcccatcccaggtggggaccctgagggactgccacgaagtcagcagagttaccaggaaccatctgctgtccagtcagacttgagtggctggttcttacacacccagctctatcaaccacccacccccgctccctgggggctgatgctgtactggaaggtggtccctggaatcctgctcaactcactgcagcagcaccatatggggctcccgacatcctccctgtactccttcaatcctcagtccacaccccttctgcagccctgactatgtgtgccctgtcatcttgcaggcagggagccactccaagacggagtgcctgttgtctccatctttttcctggcatggagaagaggcctgtgtggcaggggtacagtgagcaaggatggagcagagagaaagaggcaggggccaggccacccagggccttgggagccgtggtaattgggctttattcttagtgcaatgagaaattgttggaaatttttaaaatagaggagtgactttggtctgatttatgtgttttcaaacttttatttcttgttttaatacctaacatagagctattgtactaaaggcaatgtagtatttggcagagggataaacacacggctcatcgaaacaaaacagagttcaaaaatagatccacatatatttggctcattgatttttatttattgctgtaaaatatacatggcataaaattgactgttttatccatgtttaagtatacatacagttcagtggtattaagtatattcatattgttgtgtaattaaactccaccacccatttcccaaactttttccatcttataaaactgaaactttgtacccattaaacactaactccccatttccctccttctcccactgctggcaacaagcattccattttctgtttccatgaaattgattattctagatcttcatctatgtgagggttggaccatgaagaaggttgaacgccaaagaattgatgctttcgaattgtagtcctggagaagattcttgagagtttcttggagagcaaggagatcaaaccattcaatcctaaaggaaatcaactctgaatattcactggaaggactaatgctgaagctgaagctccaatatttgtccatctgatgcgattagccaacacattagaaaagaccctggtgctggaaaagattgagggcaggaggagaaggaggtgacaggatgagatggttggatggtatcactgactcaatggacatgagttggagcaaactctgggagatagtgagggacagagaagcctggcgtactacacagtccatggggtcacaaagagacatgactgagcaactgaacagcaacaggtccttatctaagt

SEQ ID NO: 45678 - DNA, 928 bp, Bovine  19866880785762
  misc_feature (1)..(1): n is a, c, g, or t
ncctgggggaagcagccccgagtgcccctctcccagcccagggcccctcgtcagccaggagtgtcagctcacataccattcctgaaaagccaactccagagtctctggctggtctctgtctccttccagcaggtctgcccacaggccagtgtccctgctgggcaggggtttctgccctcttccactcacctgtttgttcagaacgtccttttccagaatgcattcccaaaatcatcacagtcagctggtggagcgtactcacctgcctctgtccctgccacagtctggggacctgaacttgtctctcttggtgatgtccagtgcgagggcctggtccatctgccccttgcattgtgctactgctctccaaggtcaggggctatttctccctcttcttcttaccttgctgttgtatatttctatgagagaactcactagaagcgggggttgggtgtatttagggatcagttattttggatctgggttatctgtgggctttgatgaggagagtgggttggttcccacaggacctctgacttctgggctcctgaggatgcctgtgtgaagcgcactcgctgtgatactcccagtgccaggcagatgttgggctcagacctggtccactcaatacatcttcctcctccccacaggctccttgtgctccgtctccatcgagaaggcactgcccgaggacagaggcttatacaagtgtgtagccaagaacagtgccggccaggctgagtcctcctgccaagtcaccgtggacggtaggtggtgtccacccaacacagccccacacagagtcccacttatcagcgcccaccgtccctgaacagatctgcccccaaagcggccatccccaccagaggcattctcatcgtggatgagaaaccatcttttgcaagacgaggcaggaagggaaacagca

SEQ ID NO: 45679 - DNA, 1557 bp, Bovine  19866880800690
  misc_feature (1)..(1): n is a, c, g, or t
naaaaaccctcttgtcgttgggaatatccggagcagaattggagcatcatgggtatatacagaaatatactactgaaaatttttcaaagtgactgcatccatcagcaaagagagttcctggagcgccacacttggtattattggtaaagacttctttttaccaagtaacccgggaaaggcacagcccatactttgcaagtatatcagacaaagcaaagcctttatcaaaggcctataataaatctttatttaacctttgtgatatcagctaatgagagaataatctgaaaagtttaacagatttaagatgttatcatctgagaccaggtcagacaaggatgcgatggataatgagaactttggaacctgggaggagaggactttgctcaagaccagagcacactgactaaactcatcattcgttctacagtgagaaggactagaaattgatttcagagcttcttttatatgcttaatgattcttggaataatttatttttcccattgctgtatattgttttctccttccattgtgtagattcaatcaataaatcctttttatcttagtcccccccccccaaaaaaaaagacttctttttaaagtatcactgtgaaacaaggtaccccagttaggtttttagataaccgattttaatctataagcaactttttaattctaatttttaattctaacaattctacttcttgaacagagttaaccacctaacccttgcagcccacacagaggtgggcagagagatgtctactcacatattcaatatctagcaatttcactgtctcttctttcatgggtagtcatcactaaagtgtcagaaggtcacacaccttctaatcactcttttaggaaatgttgaagatggccaaaacaagaacttaatttccacataatcgttaagcccataagttctagtctcattgtgcatggacatctttgctgctttaaggctatttctatgtccagaatactgaaggttgccctgtaagtgggcaagtgagttattactcatttcatttgttttcatgcggcttggcaaatgttactcagttatcaaataatcaacacatatttacaaagcacatattttatgttactgagctagacattctggaagccacaaagaaaatcaacatttctcttgaggaggcagggccctagggtaaatcatgtggaatgttgtcatctaccttcctcttctcattttaatacaaactctttcatagatgaaatggagttaaaacaaacatcagtgatggccttgaccttggagaggaaagaatgtcttaagagaatgaaaatggaagaggggagaacaagcctgcccatagggccatggtgatggggttagcaggcgtttggttctatccaaaatgtccataaggcacttggtcccataagacatctggtccatgtcgaaaggtccttgaaatttggtcctatctaaatcatccatgaatatattttgggtccatgccaaatggtcttggacaggaccaaatattaaggatcttttggcatggaccaaacaaactgcaata

SEQ ID NO: 45680 - DNA, 1807 bp, Bovine  19866880824813
  misc_feature (1)..(1): n is a, c, g, or t
nactcccagtagagacagtggtttgagagtatccgtgtcggtgagtcagagcccactgttcaagggcaaggatggcagacttgcccgtctgcctgccacggctcttccagcctcatcttggcagcatcactaattggcagtgccgctctttccacatccatcctgtctgtggcctcagtggtgtttgttttttaactacatagtctcaaagatatgtattgatacaaggggaagatagtagctgtttaacacaagctctggacaattactgcctctgaccagagctggaacttgatatgaaacatagttgccatctctgaccaaagtcccacaaggtgtctaagtggctgatgactgagtgggctgagaagaggtgggttgtactgagtgctcgctgaggtcacaaagcacctagcccatccctgtggtgaacaaggagtggtgcgaagtgtgggatgaactgcctttgccagtcagggaatgggtgcatgagtccagggactcggttccgatggcctgtgggttctctgtggatcatctcacattcaggaccctgtgagtgagaagtgaaggaacttgctgtcctggccctgagggagctctcatttttcataaaaagcctgagctgctacttcagtcagcctaaatgctttcaaaattaccaaagtaatgaacgcttatggtaaaaagttataaggatataaaactgcgtaaaatataattctctaaccacttactcccatctcctagggataatcactgttagcagtttggtaaatgtcctaccggaactccttttctatgcacatactcatagtgtctatgtgtgtatttatattctatcttttctcacaaaaaaatggactagtacaaattatttcaaattatcttgcaaattttttctcccacacatacaatatatcatggacatccttaaattgtcactatatataaaactccttggagaaggcaatggcaccccactccagtactcttgcctggaaaatcccatggacagaggagcctggtaggctgcagttcatgaggtcgctaagagtcggacacgactgagcgacttcactttcacttttcactttcatgcattggagaaggaaatggcaacccactccagtgttcttgcctggagaatcccagggacgggggagcctggtggactgacatctatggggtcgcacagagtcggacatgactggagcgacttagcagcagcagcagcagcagcataaaactccttgtcctttatactggtttcaaagtgtaatgtagattgtatcaataattatatcagtttattttactaattccttattgttggatttctaggttatctccagttttttcttgctagtttttacagaatatactgaagcatttttgtaattgtgagagttttataagtagaattgctggaattgaaggttgtgcactttataaatgttgataggtactgccaaattaatttctaaaaccactgtatcaatatactcttctgccatgttatgtatatatattttccaatctgataggtgaaatatggcctgcttttatgcttttatttgcatttccctgatcattagtagtagaagttagcatctttttactttttatcgatcatttgtgtttcttcttttgtaaatttcctgttcatgttcttgactcatttttatagtaggtttacctttttctttctgtttttttgagagctctttgtaaatttgagatcttaatcttttatgtaatggttttgttgcaatgcagcatatatttgtctcctagattatctttt

SEQ ID NO: 45681 - DNA, 1803 bp, Bovine  19866880879909
  misc_feature (1)..(1): n is a, c, g, or t
ntcccagcaatgaagaggcagggtgcgggcatccaacatcatgctgggccctaatctcgctcaatccctggtcctacaaggcagttctgattattctcctttcacaaatgaggacaccagggctcagaaagtcaactccaagtaatccaaggtcacagagctaagaagtggaaaccaaaactgaattctgatcgcagccataccctgtgggcttcctggaggaccccagactcagacgaggcatttcctgctttcctcagtaatgggagatgccataggcagaggcttggaactgcacaaaggaagggggagggggaggtgtaacactcccttctgctctcagttctggctttggaagacacaagactcttcctctctactttcaggggagctggaaactaagagtagtgacatcaggctcagaatcctctctattaatcctcttgattctgaccttctgaggtctcttgaaggtcttggatgctatcagccaaaggaatatgctcagcctcaaacacagaacacagaagtaagtcatctatccccggccaggtgggaaagtctggcttcaggttagaacaggcaagtcagtgcagcaagtgcattgtgaggagtgagggtgggtgagcaggctggttactaaccagagcccactcccaagctgggttaggtacaccaagcagctctgctcagcctatcgctccaccccctgccatcagccacataaacagatcctgtccacagtgccagtgaacgattactgacatatttggaatgctcgatcagaataataataatagtaacaataataatacaaaacacccttgttcccttctatccctcatccagcccagggaccacattccaatcaagagcaccagcggggctgggtggtttctgcagtaatttctctaccagcagcagcagtgctcagtgactagaattgaatacacctagctaggggggttccattcaacacgagttaaatgcagatcaaaggaatagaagaagagaaaaaaaaaaaagaagaggggatcagaagagcagtggtctgagagctggaagccacaccctgccacacacacgcaaggcatgggccaaagctcacctccaaatagggttttcataagtagcagagttttttcatcattcaaaacagcactacattaatttgactttattttgatcaaaagcacttcaaattctctcttgaacccagaaaggaaccctttcaactatggaacgacggccaaaagagagggcaaaaagactgaggcacaaagactcagacgttttaaatcaagaatcctgttatacagcagaagtttagagaaaccagctgccccctccccacccaaagtacacacatttcaaatgctcattgtccttaagctcctgatctggcagcaaggcatctggaaatacaataccttccccacagggaagggctcccagcaggctctgtactggaagccgggcagtcggctatgaacccacggagccacgggcacacagcagacacagcaaaccacccaggtgcaaatgcccccagcaatgacagctcgctctctccaccttaatcctctctcttcagagccctcaaatcccgacaaatgccctaatcgctcttaatcctggaacgagctgctcctcggctgtgggctgagcccgctgacttgccattacccacgggagcaggcagtgggacagggccacaagccagacaatggacgcgccttaccgtggcctctccctgggcagctctcccaggagtcgggatacgcgtgggcagccacttcacca

SEQ ID NO: 45682 - DNA, 1511 bp, Bovine  19866880953216
  misc_feature (1)..(1): n is a, c, g, or t
ngtattttgaggttggtggcattatctctgcctcacagataaggaaacctgggttctaaaagaccaatgtcttcccagcatcacatgctctgtgaatcagggagctatggcttgaaatcagccccagacttcaaagtccactctcttgacatggtcaggtctgtcttgactcagaagttttatgctgttctgtgagccgtgtggattacaggacattgtgggctgagtgacagggagagtacgtgcacaggggcaagaagaggcatggctaccaaagccaggagaaactcgagggccgtctacagttgaagtggcagggactgattgggaagacagagtcccactagcccagggatctcacccagagtcagggcagacagaaccctaccttgagccaggtgacctgtggctggggccggccagtgatcttgcaggagaaccgccccatctgtccttctctgaccaccgctcggcccagcttggtagcaaattttggtggacattctccccagatgctaggacgggtctccatggcagggggtgcaaatctgtccctgggaaaagatcagcaggaaatccacagcaatgcagatccttttctgtctattcccacccaagtcacttaagatgggctcagaaaccagcaaagggaaaccttcccaattctgtgcctcaaatacattcctggaaaatatctgtggcaccaaaacctatttcctctacctcctgagcattcggctagtcttcatttactagccccttgaatttgtgctcctcctcccgctcagttactcagtcatgctcaactctttgtgaccccatagactgtagcctgccaggctcctctgtccatgggattttccaggcaagaatactggagtggtttgctatttcctactacagggaatcttcctgacccagggattgaacccatgtctcttgcaacttctgcattggcaggtggattctttaccactgagtcacctgggaagtccagtgaatttaggtacacctgaattctaccgaaccctggccaaagcctaggttttggccaacagactgtgaacagaaagcagaagcactatgtgctacttttaggctggactattcaaaacctcctatgtgattctcttctggctagatgcagagggttctgccgaagagatgatggagccacaaaatggaaggatcctgggtccctgaaatttggttggaaggttctccacttgtctgagaaaatatgaactgattttgcttgagtaagaaagaaactttgcttgtgttaagcctttgtgatttagaggcttgtttgttacagcagccatttttatttgcccttgccaatataggtttacttgccataagaaaagtcacatattgattgcctcttctaagtctgtttattttaggtcttctgactctggtcttggttattagagactcctgcagactatgtccatatagcccacttccatttagttggaccaaaggagcgatccacagaggccaca

SEQ ID NO: 45683 - DNA, 887 bp, Bovine  19866881181690
  misc_feature (1)..(1): n is a, c, g, or t
ntggcctttccaggtagtgctagtggtaaagaacccaccttgccaatgcaggagacatgagacgtgggtttgatccctgggtcaggaagattcccctggaggagggcatagcaacccactcccatattcttgcctggagaatcccatggacagaggagcctggtaggctgcagtccatagggtcgcaacgagtcagacaccactgaagcgatttagcacacatgctggtctctgctttttctcatacaattcttctaatccatgagctatgttaagagacccaccaagggtcacagagtttgcagttggcacagctgggattcaaacctggtactttgtgacttcaaagctgacagagcatcatcttctcctgaatgcaagtaccatacttctgtcaccaaaaagaataatcttccctcagccctaacgcagcttctcaaggcaagaatcatgaagccccattagactggttcctcccactgggctctataaaccctgtgggctgactgaaccatccgcttccagaaaacacagagaggaaaacatatttgccatccacatgccagtgagaaacgaagagatatgtggcttctcttgttacatcagatttttaggaggctgaagaaagggaggagggaagcacccagccaacagagaggaatcattgaccaccccaggatccataataacatttctgagtcccagaaacctcataactgtagggattatgagaaagtgattcatttattcaccatccagtagatacttcctgagcacctactatgtgccaacattgtactaggtgctgggagaagaggtgaaaaagccatcagcctctgtcctcataaagctagcagctattggaggacatttgtggggtaaggcat

SEQ ID NO: 45684 - DNA, 2160 bp, Bovine  19866881206398
  misc_feature (1)..(1): n is a, c, g, or t
naagttgtgaaaagaagttccagcttggagaggtcagaataaggcaaggcggtattttcattgcttcccctgaaagctgtatccagcaacaaagacttgagccaggagaggaggcacgtagagctaaaatgcttaggaacttgagtgaaaattataggcgccaaggattacttttattaagggtcaaggaatcataggatgtaatgttagtaaaggaagtacaacttttgtggcagaatctctaccttgtccgtcctaaaatgctacctttacttctctttaacttatgctccataacctgacaaaatagaggttcaaaccatagatatagtcaggttttataatctggaatactgtgaagacaaagtaaccgagttctctttggtacaaattactgacattgctcccaatttagccacatatgtaaatgtttttaatagggatgaactcggggaaggaataaggtaggcaggtaagatttggggaaaagggaacagagggtaataatcccttgaaacagaacagggaacctctgactttcaacttaactggatgttgaatgatggtcttgagttgaaccatcataagctgagtcacagacaactttgcttgcaaattctcctaaactctggtctttcgcccacttcctgaaacactcaaacatccttggctcacagtgcaaacttctccctctgctgccgtactgaaacttctcttaaatgttagaaaaacatgaaggctttagctgaaatagttgctggtttcagaggtacattggctggcttcatcggatcaggcattagctcatcctatgttcctatcaccactatcacagagacctagcattgggtgtgagagtgaggcagttgtaaacaggtactttaatagactctgtccccctggattcctacacacaactctaggggaatgtggcttctccttaccttcagctgttgagaatcactgcttgtgatgagaactattactgatgtggagccagaaagaagtccaatagccactgtctcaggaagaagaggagagctggtcacctgcttctttgtctcagttatcttcttggcctctggctatacacttaaggtcatgttcagcccacctcgcacctcaaaaatacccaaaacagctgttcaggaagtaggggtacatttaactttcttccaacttgattttcccatctgaaaatacaaagcaagtatgagacacggtgaggcatacccatatctctcaggttttatcattttcagtgggctccacacatcttccaactgccattatctacaagctggtgcttgaagactttatctgaagctctggaagctcactaggtccaagataacatggcagctcagcagttctagaaatttaaccaccctgtcccacagccccgagcttccttcaaccaatgaatgatgggagattatgtgtaaatatcccagtaacctcatgccttgggtgggataattctgaagtgtgtgttttacactgtttccctgtaggcttaagctatagctgtccactgtgtagttggcttaataattcactttttattggctgtcttccccttcctgactcacttcctcactctcttgctggtatttccttggatcaattcccaaataaactacttgctctcaaatacttatttcaaggttgatttctgagggaccccaaacaaagaggattttctagtgtaagttagcatcattatacatacattactgaaaagccactaaatgagagagacaccccctcctcttattcctctgtttttatctgaggcattggggcttgaacccagagatttgtgaggtgtgctatatggagcctcccctatgagcagcctggtgttgtaacaacatgtttacagacattgggggtctcctaactgtgtgtgaatgtttgatgaaggaacatgggtcacagtggaaagagagtggtcagaagctgggctgatggtgagtgagagaagctatggttttcaagagtggtaccccctacactgtgttccctggtgttctgggagatgtttaataaatggaaaccccaaaataaagttcctttggtcaaatgctcggaaactgctggatcaagcagaggctgtgttatggtaagacttcttaggatctttaagacaaagtacat

SEQ ID NO: 45685 - DNA, 1981 bp, Bovine  19866881216336
  misc_feature (1)..(1): n is a, c, g, or t
ncaagaggttaagtaagggtagcttgtctgagctgctgtctgcagaccaaagggagtgaagcccctgaggtgctcaggctcacaaagggctgacaggatgtgtgtatcaggttataattggtacatccaggagtgatgttagaggtcttctaaccccagaaatgttaggatattccccccgggcccactgtcagcagatcctgcccctgaaattcagtggctcttgtcttaagttagatgcttctgtgtgagcctctggttttcttattgatagtctgagggtaagctaaggcccccttgtgttctgatgctgtgtgtaatctaggacaagacaccaccagcctggactctgacccactctcagctcctccccatggcgtcactaacagtgtgacattgtcacctggctctgaaccttggagtcagaggcctgggttcaaattcagctgataagaagtagctgtcattggtagctttgcgattttggatagattgctcaacttcggagtctccttttcatctttaaagtgataatcatacctcttacagagttgctttgaaaatgaaagttaacttaggcaaaactctcagtacagtgcctagctcctagtaggcattcagtaaatggattatttccattgtagacattatggtttgtcagcacttcatttggctgagtctgaggtttccttactgtgtgatactggggttgggtggaaccagtgcttctctgaccctcccgtcctcaagagaagtggaaaaataatagtattctaaaggtaggggctgggaatgtagcctgaagcagcttgcagaaagcaatcacatttctttgaagtcttaggatgacttgtaaaatcaacttataattgtcattcagtacaccaatgtgaatgcattggttctcacataaaaatgcttctgccaaatctttaagtataatttatgcacaagggataagttgctccactctgaggaagggggtgtgagagcaggatttttaagatcctttccagccctaacattctaggttcccagggtaagtgagtctcctccacaaaggacctgaaattggtatccaagaatcctgaagggaccttggggaggtaggctcccctgtgcccctgcccctcgtgagactgcacggtgccaggggggtgccactggtggaggagggaagatgacgcagcccctcagagtgaagactgaagaagcctgaaggaggagcagggctgtgtctgagcctgactttccgtccttgggctgatatgtggctgagttgggttggcagctctccaccaccccaggtaaacttcaggaaacaataaaccattgtttctcatccagagctgggggctgtcctggagacaggacctcctgtcacgggagggcaggtgagggcaaggggtgaactccatgtggaagcacagggcttgtcacactgccaaggtgtcctctgggcagttccgatgcaacagccaaggccaacgtctggggctgtgcctagccagtgggagaacagaggggagtctggagaagagctgcatgctctgggggagaacacagagatgtttggcctgtgaatgggaaaagagagcctctctgtgcatggggcgagctgtacctactgatggtggcttgggtcctgcataaactagctgaagattacccagtaagcatggtctttccctcaggcatgaggggttgaaaagaagccatccttttgtttgggacaaataataaggggctttccctaggtaggggcccgcccacattagtcaaatttgtacccatcagatatcattccaattaaatctaaaggaatatcaacacagtgctatactgaaaatttcctgttgggcatggtgtttattatgataagatcgaaaatatcttgctaaattctcccggaagatattattgaattgcagctaggatttggagtgagaaggactggactctagttctgccttattagtta

SEQ ID NO: 45686 - DNA, 1143 bp, Bovine  19866881340598
  misc_feature (1)..(1): n is a, c, g, or t
ntcactcactagcaatggaaatgttctgattttctacagatctacaaaagttctgtggaggccagaaatggaatcatccagaattgcagtttccaaattattccttaggtaacccaggcccctcacagctatacctaatgtctgtctgatatcatacaaattactaactctgaaggaggaaacagacagaacaggctccatcttgaaagcaggactccatcttgggccagactatggactttgagctatatgcccagtatctatggaaatgacataccaaccggaaaaccagactcccggcaggaagagccccagggtgcataccgagactctccgttgcctaaaaggataccctaatcatctgtgtaactgaatagaatcacacattgtattatgcttattggcgtatgaccacaggcctattgataactgtccactcacgggttaactttgattctatctttcttttcctttgttcagactagtttcagggaatttggggtggtgggtttcgtacacttagggtatataaggttttcacaaaaactggtggggtccttggctaagaggagactctgccttgggcccgccggtgtaataaactgctctccactctctgcattgtccttctgagtgagtttgttgcctggaacgcgtggctacaacaactcaaaccactctcagttccaaagttacattgcactacatttctttctaagacatcctgtcttcgtgaagtgggattttcataaaacacaagtaccgtgcctaatgcaatacaggaaaggaaatgagagtgttggtgtacaatctgattcccagatctgagaaactgtgcagtgcccaatagacacacatatcccattaggaagtaattgtggttgtttaagaatgaaataaatgtcttccattcatatatcttactttttcaaacagctactaagttgttaggacataaatacgtttcagctgatttgacctaactgcctaataaacagaatggctggctatttctcctagcctagggatggtgtgagaaagtaactgagacactaacatcatcttaagccaagaactttgggaacttctgcttagaagttcagaatggctctaaatttcttagtaaatggcttcttcagattc

SEQ ID NO: 45687 - DNA, 1523 bp, Bovine  19866880107376
  misc_feature (1)..(1): n is a, c, g, or t
nccacaggaaaaaccatagccttgactagacggaccctgtgttggcaaagtaatgtctctgctttttaatatgctgtctaggttggtcataactttccttccaaggagtaagtgtcttttaatttcatggctgcagtcaccatctgtagtgattttggagcccagaaaaataaagtctgacactgtttgcactgtttccccatctatttcccatgaagtgatgggaccagatgccatgatcttcattttctgaatgttgagctttaagccaactttttcactctctgctttcaccttcatcaagagtctttttagttcctcttcactttctgccataagggtggtgtcatctgcatatctgagcttattgatatttctccaggcaatcttgattccagcttgtgcttcttccagcccagcatttctcatgatgtactctgcatagaagttaaataaacagggtgacaatatatagccttgatgtactccttttcctatttggaaccagtctgttcttccatgtccagttctaactgttgcttcctgacctgcatacaaatttctcaagaagcagatcaggtggtctggtattcccatctctttcagaattttccacataaatggtattcatgaatgcagtgaacatatactaaatggtacattatatactaatggccaccccccctcagaaaactgtaaaatcaaatgatggagggagagtcactgagttcaagagggtagagatgcaaaagaacgtgaggttggttaatctatacataacatttggtgccaggattttattattatcattttgaagctaccatttttgattgatgggaagatagtttcccttggcagggggcggagggtggggaatgtggctaacttctcctcattgagactggcagatgattaaaaaagtcttttggataaagcagacatgcattgcccttattagcagcatctgctggcttggaatagaagctttaaaccctaatttacggtgtgttacattctgcaagatcatgaaagactgaggttgaaaatatcttcatcacttagttgcaaaataacagtaaacattgcaagtttattgtttctagttaactttttcagtgtctttctaacttcgattagtaggggaaataactgcaagatgttttcccctcaggacttttatttttatatttgagcagcagcttattgtgaagctaatgcagttttaaagttagaattgcctttaaatcagttacggttccctttctgccatattgctgagaagacagctgctcttcatttgtaattgctcaagggcctctgatgagcttgcgcctatgggagaaatggtttgttgttctatttatttatttatttttagcaaaggtttttgaaagagccctgaacattgaagttcccaatccatgctcataatcagagcttaatgccaactggaacaatcccttggtttttctgagcttcagtttgcctgtgtgaatgctcggttgctcaggcactcagttgtg

SEQ ID NO: 45688 - DNA, 1538 bp, Bovine  19866880355246
  misc_feature (1)..(1): n is a, c, g, or t
nttggaggataattactttacaatattgtgatggtttctgccatacatctacatgaatcagccataggtatacatatgtcccttccctcttgaaccttcctcctacctccctccccatcccaccactctaggttgtcacagagaattggctttgggttccctgcatcatacaggaaattcctactcgctatctattttacatgtggtaacgtgtatatttcaatgctactctgtcaaatcatctcactctctccttcccctactgtgttccaaagtctgtcctttatgtctgtgtctcctttgctgacctgaaaatagggttatcagtaccatattttgagattctatataaatgaattaatatacagtgtttgtcgttctctttctgacttatcctctgtataataggctctaggttcatctgcctcgttagaactgactcagtgtgttcctttttatagctgagtgatagtccattgtgtgtatgtatcacaacttctttaccaattcatctgtcagtacatctaggttgcttccgtgtcctagctattatgaatagtgctgcaataaaccttggggtacatgtgtctttttcagttatggtttcctcagaatatatggtcagtagtgggattgctgggttgtttggtagtttaattcctggtttttaaaggaaattccatgctgttctccatagtgctgtatcaatttgcattcccactaacagtgcagtaacgttcccttttctcaacaccctctccaacatttactgtctgtagactttgttaatggccattctgacaggtgtgagatacctcattgtagttttgtaaatcagtgtttttcaaatttgagtggtgaacctgtttgaaatcaatttagatcagttaccatttctagaaaaaaacaatataagagtgcattgcaagtacaaagtctatatagaggatctgaatcctcagtacctaggaagaaattttcaaaagtctctgaattagaagatctctttaacttttacagttttattaattgttcatgagaagggcatgtagtgcgggaaaatgaggggtaggcaacttatttcaagcgtagtatctaaaatatatccacatattcttgccacaaaatgtcatggtcagtgatctttagaaagaaaagacttgttttgatacagtatttggtttactcacaacaggtagaaaaggtgaaaaaagtatataaaattacagcttatgaatgtggaaatatgtcttatctttgagaccagagaatgctcactgcgagaagtgaacagatgcattgtgaattacagctaccgatttaagaggtggtattattcagtctggccagaatgttctctcatcagtcaaatgacttccaagctaaaaagtgagaatgtgctctgctttttgattgcttcatttatatttcatccatgttattctacattttgtgcttactgttgggaaatgggttctttcagtggagagtaagggaagggacagcccagtaatttacaaaaaaacatgagtttcaag

SEQ ID NO: 45689 - DNA, 1162 bp, Bovine  19866880426717
  misc_feature (1)..(1): n is a, c, g, or t
nactttggcccctcatgcgaagagttgactcttggaaaagacgctgatgctgggaggaactgggggcaggaggagatggggacgacagaggatgagatggctggatggcatcactgactcgatggacatgagtctgagtgaactccgggagttggtgatggacagggaggcctggcgtgctgtgattcatggggtcgcaaagagtcaaacatgactgagcgactgaactgaactgaactgaactgaattattaaatgatgtaatatgatttgaagtagagcttggctaaggtttacctgaatttattagcaccttttcacagtgtaggtgagttgttgaaataaaacttggggtcacaggaaagtaagacatttttaagtactactgcattagagaagtcgcgatttacaattaacatgctatttacaaagtttgccttatctagtcactaaaacaagtgccctgaggacctgattaggcatctatattattgaagtcaatggatgtttttgtgtagcacttcctgacgggctacagtccatggggttgcaaagagtcagacacagctgagtgactaacatttccacttttctgatttacaccatttttaagagtagcctatgtacccatttccttcactcaactcagttaataagattctattagttttattaacggagaaggcaatggcaagccactccagtattcttgccaggagaatcccatggatggaggagcctggtaggctgcagtccatggggtcgcgaagagtcagacacgactgagcgacttcactttcatgcactggagaaggaaatggcaacccactccagtgttcttgcctggagagtcccagggacgggggagcctggtgggctgctgtctatgaggtcacacagagtcggacatgactgaagcaacttagcagcagcagcagcagttttattaaattacttaccaactaagatcatttagtgaaacattaggtagaagcattttagagggagttttgctcaatttattccctcctacttgatctctgcaaggaggtcaaacaagtcaatcctaaaggaaatcaaccctgaatattcattggaaagactgatgctgaagctgaagctccaatactttggccacctgatgggaacagctgaactcattg

SEQ ID NO: 45690 - DNA, 1489 bp, Bovine  19866880462951
  misc_feature (1)..(1): n is a, c, g, or t
nactagtacagacagatttcttctcttggaaatatgtgaaaccttttcttattctgtaggattttttttaatattcatattgtttatcctcaacttgaactttttgaaattagaaatgtttcattaattctttcaactttagatggacatgtctaatgttccagacattatactatctgctggccttcagagtaaaacctatccatgaagaattctctatccaataatttaaataagatatgaataaatatcaaaacatagagtattactgccatggtagaggaagcacaagatctgatagtggcttgcatgagagaacgattgattctggctgtgttctttagggtgcacagtgtaataccttatgcttattaggcttacagtaaacagttattggtaatgataatatggcataagtagaaattcacagaagagaggaggtggaaaatcatctttcttagaactgagatagatgccaagcattgtgatgataagaatgcttctcggtaatgggtggcttttattattaatactggcaatcacttattacagttataaattgctgccatttattgagtgcacattatatatcaggtaccatgctatattaatatatttttctcatggtacactatttaattataacacagtccctggtggttgggtatttttcctactttatggataagaaaacagaggctcagtgagacagtgaattcctgagccagaattataatactctctgtcttccacatttctccatttaaccactctatattattatcaatatgaagattggagccaaatatgtcgatatgtttccaaaacaactaattatttgaaacagttgtaccaatgccctaggattctttagacaattggaatagtcatgatgtgttattcagttattagcaaaattgaaatagaatctcttagagggaagagagagagagagagagagaaagagagatatagtttaaaatcatttcccggcaatgtggactattgaatacatgagtgaatttgcatccggtattcaaacttctcctggccttacaaattatataatagtaaagtgacaaactataaaaccagcatttaaatttaaaacagtactttagttcttcatgaagagtttataaagcatttcttggaagtattttcataggcatttcctcagtcaagatttacacttcattttaaataaagatttcttcctattgaatattatcctagtcatttacatttacgtttttttcatttattgcctttttgtaaatctgtgatcaaggctgttataataaaacttgtaactacttataagtattcactgggaacataatcttattctcaaaggattaggctataaacaaggattagtgtcactaaacacaatatgctagaattgagtgtttaaaatgagttacaaatgttttagagacttaaaataaagcgtttctttaataaagaattaagcaagtcttgtatc

SEQ ID NO: 45691 - DNA, 977 bp, Bovine  19866880511944
  misc_feature (1)..(1): n is a, c, g, or t
ncactgaaaaatgagtatatttccttgtatttaaattatacctcattttttaagaggaaaaaatgtgttataaaaagaaagaaaaaaagaacttcaggctgcttcttaatcttacaaagcagagttagtatatgcatgttctgattttcctcttagggtcattgcttataaaaatgaagcagtcaacaagatcatacaacagagaacatcttgaaggatagtatagcacatatttacaaagagttcaacaccatggctagcaacagtggagatgaaaggtgttatcatatttagttctctcagctgcagttcttaagaattggaaacattctaatcagtttctactaattctggtatctctcccttactcttaaaccccaaggcttccctatgctgttagcagcttcactcttgacccctaactgcttgctaggtcaatctactaacacatcttgtctcttgtcatttctttcacagttacctgaatagatgctggctcaatatctcctgcctgtggacataaaaatgtcatgcagaatcacctccaagcgggtggagagttaaaaggacactacaaatgaaattaacaacagagaaaaatgccaatatatctgactacaggaaaatattaaagcccctatgcttttgaactgtggtgttggagaagactcttgagagtcccttggactgcaaggaaattcaaccactccatcctaaaggagatcagtcctaggtgttcattggaaggaatgatgctaaagctgaaactccaatactttggccacctcatgcgaagagctgactcattggaaaagaccctgatgctgggagggattgggggcaggaggagaaggggacgacagaggatgagatggctggatggcatcactgactcgatggacatgagtgaactccgggagttggtgatggaacagggaggcctggcatgctgggttcatggggtcgcaaagagtcag

SEQ ID NO: 45692 - DNA, 2241 bp, Bovine  19866880532530
  misc_feature (1)..(1): n is a, c, g, or t
nattttccaggcaagagtactggagtggcttgccattgccttcttctctctattgctgcattgtaaataaattcttcagttccatttttctagattccgtatatatgcattagaatacgatgtttatctttctctttctgacttacttcactctgtataataggttctagattcatccccccccccacagaattgactcaaatatgttccttcttatggctgagtaatattccattgtgtatatgtaccactttcctttatccattcatctgtcgatggacatctaaggtggcttccacgtcctagctattgtaaatagtgctgcactgaacaatgggatacatgtgtctttttcaattttggtttcctcagggtgtatgcctgaagtaggattgtgggatcgtatggtggttttattcctagttttttaaggaatcaccatactgtcttccataatgtctgtaccattttacattcccaccaacagtgcaagagggttctcttttctccacaccctctccagcacttattgtttgtagcctttttgatgatggccattctgaccagtgtgaggtgatatctcattgtagttttgatttgcatttctttaataatgagcgatgttgagcatcttttcatatgtttgttagccatcggtatgtcttctttggagaaatgtctgtttaggtctttttcctaccttttgattgggttatttgttttctggtattgagttgaatgagctgctagtatattttggaaattagtcctttgtcagttgtttcatttactattattttttcccattttgagggttgtcttttcaccttgcttacagtttcctttgctgtgcaaaagcttttaagtttaatcaggtcccacttgtttacttttgtttttatttccgctgctccaggaggtgggtcatagaggatcttgctttgatttatgtcattgagtgttctgcctatgttttcctctaagagttttatagtttctggtcttacatttaggtctttaatccattttgagtttatctttgtgtttggtgttaagaagtgttctgatttcattcttttacatgtaactgtccagttttcctgtcccgttttcccagcaccatttattgaagaggttgtatttctagaatcttttataataccttcaaggtagaggtatagagtgttgattatcaagaaaagcttgttgaatcaatgattcaaggggtaagtgcttcagtgatgacatgggagtcgttttattatgaagcaattttatttttagtgttgtttgttattgcattttggctgtaggtactatttatgaacttgattgtttcaaggtttagtttgcaatctttagatggaggggagaaataacatgttcatcttgattttaaaagcgggtactgtgaagcaagtctgcagaaagctgttacttttttatgtgcataggtcctatgttaaaaagaacagaataatagtatttttattgggtgtaggacatttaaaaaaatgacattcatatccatcttcataatgctcacctttcccctcctctgactgactttaaaaattaatttgattatagaactgtcctatagggttaatcacaaatgattctgtctattaaaaatagccaagatataaataaatgaagttaaaatggctcctactcagaaattgtgcttacagatctgcaggatattgactcagtagtatactacctcactccgtgagtgcagtttcttagaataatgatgtggagtgtgtaccaagtgttctaattaaaacccatggtcattcatctatctaattgcaataatgccctccaggatacttccactccaaatgtaccattcttcttttgcctgagcaagtgactttaaaaccacctggctttgtgccaggacctgaagtgaaaaatttactgactgtgatatcacactagtaacagcattacagaatgaaaaattaaagaggacaggcaaagaagctagattttctatcaggtttctagaggtatagcttataaggtttcagtattagctgtcataatatctaattttctccacaaattaatagaagtcatctgttaataaaagactttctaaaatacactgtaacctctgagttcccaagctaaagaaaaaaaaaaaaatgaagctttaaggagacagacaccattattggctatgctttcttatagatttaacccagaaggctgggaaactgtattcag

SEQ ID NO: 45693 - DNA, 1612 bp, Bovine  19866880571539
  misc_feature (1)..(1): n is a, c, g, or t
ntttgatgttcatagaataatccaactacttaataaagaaattataggtaaaccagagtgttgcaaggatcaaatatgcttaggcatttgataattaaactcttggatctgtccttcaaatagtgtaataattaggtttgaaatacatgctagacacatgggttttaggatgctactggaacaacagaaattctgatgaatggggttagacatagtactgtgtcaaaggcttgagttaactcaagtgattatgagattaactctcggaaatcatgcccttgacttctgcaatgcaattctaagaaagtcagttgttcaaaaaggtccaaaatgatcatcttggaaagtgcttaagaaatgggaagagtagagggaagagcctaagatttcaaattaagccacatatttaaaaaagaaatcataattttattgtgcattaacacctgtcttaagtagactttcataagtttatatagttttgacctggaggatttaaaaaccacttcaatttagttaaaagtctgccaggtctgccatgcacattatagattagagtgtatttaaataccatgaaaatgtactgttatgtaagaaaggcttagctccttctgtgctctgaggcaactctttctcattggttagtcagacacaaaccaggtgttatcaaacagaactatgacatctttgatatctgcaatgctcactggttccacaaagttagggaaggaatcaaaaataacatggaagcttgtggaaagagctataatgtgaaagagtctgggataagaatcataagacctatttctttactgagctctactaccaatggttaatagtgagggctaaaacatgcctcttatattttcccttcactgtgaataggaggctgtgctttgctgtgcttagttgctcagttgtgtccgactctttgtgacccccatggactgtagcccgccaggctcctttgcccatggggaatctccagctaagaatactggagtgggttgccatgcccccctccaggggatcttcccaacctggggactgaacccaggtctcctgcattgtaggcaaattccttactatatgagtcaccagggaagcccttgaataggataaaatgatacagtctttgctttttctttaaaactgtatagtcagatggaaaaggctgggaatctgaatggctgcagtttaatggattccaatgtatttcatacagatttgggaaatccatcaactaggtagcccagaaaatacagactaccacatatgcactacactggatatgggatctcaggatcaaaactaaaataataataacaaattccaggtttatttatgggagagtgggagtaaatatctccccccctacttctttctcagaccaggtttggcatcctggaacattccactgaaagatagataaaatcatgtctgataatttttttcccctttaagctcaatagatacacctatatttatattcttattatgtttttcttgaaacatcttgtcaccattcagaattttctcttttcaatcatcttttaccttcttctagtctctcttatttttgaattttgtatacattatttttcccactaagagg

SEQ ID NO: 45694 - DNA, 1721 bp, Bovine  19866880623568
  misc_feature (1)..(1): n is a, c, g, or t
nggctcctctgtcctgggatttcccggcatatctggaatggcttgccatttccttctgctttcctaggttagggagcttcctaacctagggatcaaacctgtatctcttgtactacaggcggattctttacccagtgagtcatcagggaagcctcaggacaatttgtgaagtacaaagtaaaaaaggtaagagcacatgaatgtgatagcctttctgaaatcctggggaagaaatagtagggtaatttttctcaactgcatgtcttgtttaactaggcacataaaagttgactggtcattaagtcacagatgaagcacaagggttacctctcctaataaactctttcctgaaggcaagaagataacgcctactgcttgagcaaatctagcaagagtagagttacataaaatgcaatataatactaagaaatattatatataggacactgcatcttcaatgaaagaataactgtcatcaaggattttatgaaaagtgattccactataaattcagtgagtaagtcacccaaagaattatatgtatagataatggcatcatattatcatataacaaacatgtcctgttgaaacttcctttatttgtgttgttacgtatgcaaaaactgcctctggtggtttctcctagtatgtgtccatagcactgggccttataaggccttaatatactgacagaagttttgtgtttaccttaaaaaaataatccactttttaatctcttctagtaggtcaataaataaacaccaaggaagagattagaaactctgtgcacacagaatgtcagtaaaaggaagcagtccaaaatgccatctaaccaatagcattaggataaactggtggatatcttatatgttcacttaatttagcaaatgattgtacgatgatgtctctcaaaactgcttgagatactggcttttgtcaagaaaaacaatctgaagttctggatatgcaccaaaagcttcagtctgtaaggacttttcaatctcctccagcttgcaagtttagaaactgaattgttcagcatatctctaataaaaaatcatttcccaaggctcattttctatgcaggcaaaatcaaattaactttaaacagaagaggttagatgcatacacaaaggaagtatcaaactgtaacatcatcttcctctagttctcgcaggtctcctagaatctacccaggagagaaacccaaatactaacttcaccttgagtgaaagaaagaaagtgaagtcactcagtcgtgtccgaccgactctttgcgaccccgtggactgtagcccaccaggctcctccatccatgggattctccaggcaagaatactggagtgggttgccatttccttctccaggggatcttcctgacccagggatcgaacccaggtctcccgtattacaggcagacgctttaacctctgagctgcaaaattaagcaagggtagtttccggatgggaatggcacaaagtgaattatcttactgtgctgttgaacacactgatgatgagactatagtcctctggacttttatttaccatttgctgacagccaacagcgatcctaggttcctttcagagcccacacgttgtgacgcatcctggccttgatcgctgggaagctgctacatcaggggatccccatgctttggcattagggctgaagtgatgctctgtaccctccgggccagactgctatgtgagcaccacaa

SEQ ID NO: 45695 - DNA, 740 bp, Bovine  19866880627252
  misc_feature (1)..(1): n is a, c, g, or t
ncttatgaaggaaatttcctcaatttgctgaaggataaacttaagtaatgcctcaagaaagggggcccatggacccaaggaacattgggacttggggaggaggcaaagatgacccttctctccatctttgttcttgaactagattaacgaatgagcaagactgacctcaattcaaatccctgggtaataaattgcaaggagtaagtaaaataacctcatttaaatctattttttttaatgtaaaaattaactttgaataataagtagttccctaaacagtattttatagtgtcagagactgtgtaaaatagaaaaaaaaaacataaataataaaaaaatccatttagtgtttagtagggacttagcagcagcagcagcagggagtcaatatataggagctccttcccatgtacatacagatgcaagcaaacagatgtgtcaaattcaggaacaagggaagggacagcaggaggagttaagccaaccctttctctttctaaagggggcaggacccagaagttccacaatacaagtaggtacagctgtgttaggcaatcactgtgtagagcgagtttctgctgctctttccatagcaagagcttgtacataaaagccagagagaatgggacacaaacagctgggaaataaagatgaaagcaaaactgtgtcagcggggagagacatgcaaccccctgagaacgtggcagcgtcatgaaagacaatttaaacaaggtcacagg

SEQ ID NO: 45696 - DNA, 1330 bp, Bovine  19866880630130
  misc_feature (1)..(1): n is a, c, g, or t
nttttttcttcagaagcttgaaaccaagctattttggagacctatgatgtacagtataaggagagggaaaaaaagaagtgtgaaaacttgattcaacaggaaggcagtcaaggatgcactggttttagtctgaaatgcagatataaaaagtgctaccaagtgtttttgagtgtgtgtgtgtttgtttcagctttagatctcagaatatatgacactgtcaaaaagagataataaggtctctgagaaagaaatatattaagaactttgtcactagagtagctaaaacttacaatatacaaaatgtgattataaagtaagaaaactaattctcaattgagttcagttgctcagtcctgtctgactctttgcagctccatagactgcagcaaaccaggcttacctgtccatcaccaactcccagagcatgctcaaactcacgtccaccgagttggtgatgccatccaaccatctcatcctctgtctaaattaattctaaaatctatatataattttttttaatctatagtcaccttgacaacttaatctctatgcaggtggacatctctttagaaaatagttttctgaaaataacatatatgaaaaatgcactggtaaatcctattaataattgaactgttttctctctttcttttccttttgttctctccttttcttcctccctcccccaccccctccttttctattttctccttctctgttttttgcctattttatgacgattattttcctattttggtttttacagcaaaatctatagattagaaccgtttctttaaaaagaattgtcattattgaccatttttagatgcaatttaacttctggttgtgtgagagggtgattacatttggaggaagtaactctttgcttccaaagaaaagtttgctgatgaaataattctacaaagttaaaggaacacatgactactaaagcattgaataaacatttgttgaacattttttacagaacagccatgatgcacagggaaaatattgtaagcagaatagttgtctgccctcatgtaatgtgtctctagcaacatattctggataatccaaaaaaaatgatacagtctagtatctatttttagaatttgtaaattgctagttttctaaaaattatcccactctttcatcgaataaaattagacagtgaaaagagagatcagaattttctggttcacacaactagagccatacaaaacctatcattaaagagcatgcaggattagaactcaggattagaactctgtgtaggtgcccgcacagaactttttgcttactaggaagcatttctgccgactcccatgtt

SEQ ID NO: 45697 - DNA, 2841 bp, Bovine  19866880692403
  misc_feature (1)..(1): n is a, c, g, or t
ncctccgtactcttgcctagaaaatccccacggatgggggagccgggtgggctgcagtccatggggtcgctacaagtcggacgcgactgagtaacttcactttcacttttcactttcatgcaatggagaaggaaatggcaacccactccagtgttcttggctggagaatcccagggacggcagagcctggtgggctgctgtctatggggtcgcacagagtcggacacgactgaagtgacttagcagcagcagcagccccagccataaggccccctcagaagctgtcccctccaaagctgccccttcctgagaccttacctgttactaggtcctgccctagattctgggttacatccctctccttctgacttctcttccctgtcttgtctccctgttcttatttcttaacatggatacttctcaaggttccattctctttctctctccatccttaccctctccaacaggcatgtatgttcccacatctacaatacccactctgcgtgagcggctcctgatctttctctttagtacccgccctgctttccacaacagtggaggaacctctctgcggatttttcaggaagaatatagcttttctcatttgctgcccagcagccagagcatacctggaacacagctcagtgttcagcacatgttttgtgagtaaaaaaatgaatgagtcgcctcctgtatcctctaattacctttcccaatgagcatatccatttccaaagtgtcaataccatctccatgtcaattggttgaacaaacaaatgaatgagtttaaaacaaaacttttttttccacctttatccaatactccccctgcttgctgtgcccttaaatgagttttagattcagagtgaatgagtttgaaactgtgatcaatatattaataagtgaagtctcaggcaaatcacttagctttcctgagccatctccttaggaaacaaacaaacaaacaaatatcacagagaataatgatcactctacttgtatattatgaaaattaaatagtacctgtaaaatatctcagtgccagccatattcatgcttatcagctttaatctcttaactttcccaaaagtacatgaagtatctcacttaaacctcacagatatcacatgagataaatacttttatctctattttatgaatgaggtgatgagaaaacagagggacagaatgtgacttacttgcacagtcagaccaaagccaagtccccaacgcccataaaataaccatcttactcttagattataagctaagaggcaggattcagaccttataaaaaatgataaatcaaatggctccaaataaaatgagcctttagaaagtgatcattaaatactgaagaaataaatatatttacttttggaaatctgacttctcagtttgatggtaagttatttcagggaaaagcttgtgaatgctcccacaatactaagtgaaatatacatacatacatatatatatatatatgcacccttgacttaaaaattatggtctaataaagaaaacatacttggtgatgcttttccaaaaaacatgagggagtggatgctgcacaaaataagaattttaagataagaagaaatgagaaagaaaagtgtttctgagcaaacatgctccagtgaaagttgtatgagtcaacatcctagaaaccaagttacaatttcttcatcagaagagggaatatatgattgagaaatctgttctgctaattggggttgaagcagttgcacttgatgaaaaggaaatcatcagaaacagtttgatgttttctataagaagctagaaagtgcattataattccagttgtggatagaaatttaatgcattttaaacagggtggaaagggtgaataattgttttgtcagttggtggagtagattttagtcatctcaataactataaacctaattgaaggggagcaggaaggcatatcagaaattggggaatgtaaaatcaaatggaggaaagcagattgactgcttacatgagaaattaatatggtaaattgcttagacagagtttttgattaaatgaggaacagaaataataattagaagagaggtacctgactcaaaaacaagaagaaagaactgctcaaatacagcaggttgttgaaaagcttaaaaaaaaaagatcctgaagcgaacaatttgttttatgaaaatgataagaacacacaaaatataattgcttaattagaattatattacttaattagagtcacatccttgcagtgatagatatggtataactgaaaagtgtggttatgattggagaccaaaaataagtggggaaataaaatttctaagtggaaatacaaagatttgctctctgtgacaagggatagtaataaaggtgaaagacatgttttatgggccctgcaaaagctcacaactctacttagaagtaaagtttctagaggaatagctgaactgtggcctttctccaacagctcttttttctactagatgatgagagactagaaactcaagattaatttgaaagacacttgtagaatcgtgtgatcattaaacttctggtaagaataagaacagaggaaaattacatgaaagactgtgacatttaaaaaactgacaatgggaaaatgccttttcagattctaagtttacctaaatgaaaattaggtgaaaaaaatattgagtgatgtggttgcttatatagacaaatggcaccccactccagtactcttgcctggaaaatcccatggacggaggagcctggtgggctactgtccatggggtcgcgaagagtcagacacgactgagtgacttcactttcccttttcactttcatgtattggaa

SEQ ID NO: 45698 - DNA, 902 bp, Bovine  19866880702211
  misc_feature (1)..(1): n is a, c, g, or t
ntgctgctgctgctgctaagtcgcttcagtcgtgaccgactctgtgcgaccccatagacggcagcccaccaggctcacccgtccctgggattctccaggcaagaacactggagtgaattgccatttccttctccaatgcatgaatgtgagaagtgaaagtgaagtcactcagttgtgtccaactattagcaaccccaaggaccacagcctgccaggctcctccgtccatgggattttccaggcaggagtactcgagtggggtgccattgccttctctgtattcaatgctaagcatagttaaaatatagtttggatgcctctggctgcatctaggggcctgaggagcagggaggaaatgcagtgttggaggaaggaggtagtgtcttgctcctgttagtgctgggctatgctcatggattcccaggggtggcagagcctagtggactgccgactatgggatctcacagagtcggacacgactgaagtgacttagcagcagcatgctcatggattattttgaccaagattgtttattgtcccctgctttcagttcttgaataacctaactgcccacttggaacggtttgccttacaatggggagaatgaatttctaggtcctttaactcccaccacatattcagaaaaaaactaaaattgcaacactggaaagggagaaaaaattacccattgccactcaatatatttcactcagaaggaggctttgaaagaagcaatgatcctttgtgcccaaggctgctcaatttgagcactgcatcctgttactctctgaaatgatattttgtttctatttggattccaggccactaaaatagagtcctcctcaggcgaatgtacaagaatacagtgtattgtcctcaaataactctccttacagaatgat

SEQ ID NO: 45699 - DNA, 1704 bp, Bovine  19866880726904
  misc_feature (1)..(1): n is a, c, g, or t
naatttattgtctgctggcctggcccacagagaccaccatttccccagagtagctgggcctggtaaccaaaaaacactgtgtagcagaaccagatgcaaactggattttagaataccttatgccgtggtccactcctgtgtctcagtgtgtgtcctctggagacaagaaccaccccagatagtacctcttggagtttgacaatgtctgcagactggtcagaagaaggagctaggaggaagttctcacagacctagcctcctggcccatggctctataaggctggttacaaattggtgtttttaggtctgcctattgttttcatcagatctgagttggattttaaaaattagagataactgtaatatcaggtcccacagaaacctgttgaattcaggagtaaagagacacattcacaaggaatctttggtttatggtagccaatatttccaagatgggacagaatttagctcggccatcccagctaatctcagtaagtacagggcatctgattgtacagatgaatgtttattcatccgaatatcgtttggtgttcttttgtaaatgtaaatgattgtttttgcttatggttcattttcttttgttttttagacaaaatgggtttgggaaattaaagcctatttttaagatagaaataaacaaattgcacaaagtagttgtattgcctactatatctctagaatgactaatacatgtaaagaaggtacaaaatatatatttaatcccattacaaattagaataatgatccacaaacccagattatgcctcagagctcctgatgtcttagaaagaatagtgatttgaagaataaaaatttgagccgtaattctagattgattatagtagttatgcaaatgtaattataattttctgtgcagaaaaacatatttaaatagaaagcacagcaatgatttttttcagaagctattccagtgaatacttttactgtaaagaagaatttggtgtattttagtaattgtcagccaaccattatgattgtattactgtactgcgtaattttcttgaattggatatgtctttttgtatgattttaattaccaaaagtaatgacaaaccttagtaaatatgctaattgtacataatagcaattttctccatataggcataatattcttgaaagtgtttttgcatttctaaaggaagaatgtgcagggaactcagatgaaagccactgaagagagcttctctgagatccattaaaaggtgggatgtcctcctcacagcaaataaatttcaaacaagttgttatgcttcaaggctctagttaccttgggtctggctgtcctatgattttctgaatgatagttggagaatgtgaacttaatcctagtttaataatgaccaaatgaataatctaaagacatctccattatgtgagtacagtaagtcccctacacacaaatgagttctgttccaagagagtgtgcataagtccaatttgttcataaatccaatacaattagcctaggtgcccaactaacacaattaactatatagtactgtactgtaatagatttataatactttttccataaataatacatgaaagcaaataccaaaaataaagacaacatttttaatcttacagtacggtaccctggaaagtacaacagtgcagaacaatgactgccagggacaggtttgcatctttggaagcttgcac

SEQ ID NO: 45700 - DNA, 948 bp, Bovine  19866880737964
  misc_feature (1)..(1): n is a, c, g, or t
natctatttgcaagcaatactcaaggtcattttaaactatgtttttattagattaattttttgttcaaagtatcaaggctcctacatagttagagctatgaatacggaaccactattgtggcttgtgtttgttcctgaagctatcatgccttttttagaatagtttaataaaaagcaaatatttgagtatataatttttttcaaatgttatacacctcagcatgtcaagctttaaatgaaactgaaggacactcaaataaagtcacttttgtcaaagccttctcctatcataacatatttggatgatgcaagatgcattcccttatgatgtccaagtggttgataaaccgatttctgtggaatatgtaagaactattcagactttgtggtttccttaaatgagatgaataagaatttctcttttctgaataggacataaagtatgctaggcctattttagatgcttcagtgtgccaaagatggtattaagtttggtgttcataaattactaatctggaataagagattgaatgtattttgaaaacttaaacctgtttcacctgaacatgtttaactagttaataagaaacatcaaaaagacaaaaccctgagatcaacggtcatttttttgcaaagctattatatgctgtttaaattggttgttcgggtctgtctataacataagttttaataacctagctcaaatgcagatttctaattttcaattaacataggaataattttgtttgctaaaataaaataaatgaatgaatgacaagtctgaaacatgaaatgttctaggtagaactttttaaaattccaaatttcaaaaaatcatgtggcaactgtatagctcaagctttaagtattaacttttaacctttgaccttacagattttaaccaatgaaatgtctctttaaactttaaaggaaacaatataacgagcg

SEQ ID NO: 45701 - DNA, 1252 bp, Bovine  19866880774279
  misc_feature (1)..(1): n is a, c, g, or t
nggttagcctgtaaaatagcatttcgtttgagctgcattttactttttgagctcacctattagatttgtgggcataaacaggctctctttgtagttaacaagaggctgactctgagacaagggttacagccatcaccacatactttatgttagacaaataaagtaccgggattgtaaacatattctgcaattacagaaagtgaaatccttttcttctttcaccctgcttagaaagaatatttttttctctagaaagaaagattttctctttccagttcccaactccgctatgtacttgtctttcaaatcaaagggaaagatcttatcaatataaatgaacagctcttgccaggcaaacatgtgaccatgatgattcccacagggctttggaatatatcaggacagaacagaaggagccatggagggggcgtgtgtcagaactgaggttatgttttggtctgctgaagcagtcgttttaaccctatgcaagtcattcaaagctcaaatttcctgcaatcatattaaagtgctaataaccacttgttcagtgtttgctgtcatggtaaatgagacagaagctgtggatatgctctgagtgaatcacaaagtcccattcaaatagacacttctgttattttctcctattactgacaagtttttcaagcattttgtcttgctcatttgagtaatcaagtatcaataaggaaggaaaaaagtctgttcagactttcttagcagctggtgaaagaatatttgcattggtgtatatgggttgggcagattcatcatcagagactcagggtacaagccagcctcagacccctgctggtcaggggctccctatgtatctaggaaatctcaccaataaaagaaaactaaaaagctctagaagaaactcattaggtatctggttaacttgactccagattgattaaaagctgttgggactaaaaggtgttgcaaacacctacttttctttataaataacatgactaagaatacatttttctcactctttaaattttaatcatgcatgcattcttaggtgttgtattttttgagctgctattaaaaatacatatgtttctgccatataaaaggaggaacagacacttgtgtgctgtattattaacatcgtgctagagatgaaattctgggtcagtctttgcagaaggcacacacacacacacgccccataagccaaggacgtgccacatgtacacagccacgtgtgttcctgcctgctgctctg

SEQ ID NO: 45702 - DNA, 1714 bp, Bovine  19866880777881
  misc_feature (1)..(1): n is a, c, g, or t
nacgggtgatgttcaatcttcattacacgtgggaagaaggttcagtgccttttctcaggtctgagactgggatcagttctaattcatattttcattaatatcagggatgatgggatagggtaagctcaatacattttccaattatgccaaattgaatagtgaagctaacacctggaagaacttgattgcaatttaaatgacatttttgagtttctaaagaactgaatgacagtttaattagacaagaacaagatgctggggacaaattactagtgatgataagaataattttgctgtgctttagaaaacaagttcacatctttgttaattttatttcaaccttgatggaaggtatagttatcactctggaggtaaagacaggactaggtaagcatttaatggggttggtacagaaagatggtgggatgaacagggatggagttgaattaaagagtgaatcactaaataacttggcaaccaagcttcacattatggtgtttaagattataccttggggtaatatggactaattttactggtattctaaaaactggacatgccttgaatcagtatgttgtactcaattttgatatccaaagtgcaagaaaaatagcagaggtccagaagagatcaacagaaattctgcttgactaggagactaggtctaggaaagactggaaattattcagcaccaaaaagagaaggtgcaaagtacgtatttaatttcaaacacattttcatggttcatattggaagaacagtcagcaggtcttcaatatttctgttgctgttggacaatatactcttgctttttttgtttgtttgtttttcttgaagtacattctcaataaagacaaacatcacatcaacgtggacctgggatgtatgattttctgtcgggatgatgcaggacaatcattgcccctagtccttctccttctctcttgccctcccaccctctccctcttccttccttccttttcctttttcttcttccttcctaccaatcctcctttcctttcttcacttctttcttctacctgtaaaaaattctacaactttagtgaatgtaaaatttggagcagagattaaaacttgagctaagaaagctttattaatattatctgattcagtctcaccctgtaaggtcatttctttgtttgttttttaaagttgaaagtgccctgtagatgcagaaaatagtaatagaccatcttcccttttaggtcaaatggcaggggatcatacaaggctggagttccacaatatagagaccgggatcatcacggaacgccggtatctgtcttctgttccctccaacttcattggacacctgcagagcctgacatttaatgggatggcatacattgacttgtgcaaaaatggtgacatagattattgtgagctcaatgccaggtttggcttcaggaacatcatagcagaccctgtcacctttaagaccaaatcaagctatgttgccttagctacattgcaagcctacacgtctatgcatctttttttccagttcaagacaacatccctagatggactaattctgtataacagtggggatggaaacgactttatcgtggttgagttagttaaagggtaagtgtaggtctgttcaatgacaaataattagagctttgggaaaatgaacctcattttccataactatatatttagcagaagagggaaggtggtttgcaaataa

SEQ ID NO: 45703 - DNA, 837 bp, Bovine  19866880782075
  misc_feature (1)..(1): n is a, c, g, or t
nttattttaagagaattcaggaattcattcaagttctcagagtggcccctggtttaaactgtagagaggcttatctggaaatcactaagaacttagtttctgttaaagtatatattttatatgaatgaaataggttattgataatgagatggaaactggatccacctttttcaaaaggtgaaaggactagtatacgcattgcaggcatagcattggcgttttcattggaatttgaaagagtagatttacttctgcatcaaacgagctggctaatagaaatgcttggttacactgtgtcagtaatcacaaatagaagaatagccagaaaggaatttggtagattattgctctcatagaaataatgtgtgaatgaccttgaacttcttttgttggaggtaatgttggtggaaggaagcctcttcccaatgaagaaaaacaaacaaacggctactacagttaaaaaatttaaaaaagctaccagctaaggagtaatgtcacttcctagagaaaaggcaagtgtaatttgctgttaatcaaaaagaagttacatataaaacatctattatttgtttttaaaactaagaaccctcttcttgtgagttctgacagtctttcataagcccctttaccttagccagaaagttactctcttatttgattatcacattatagggttctgcagagaggcataaaaagctaaaaggtgagcttgttaaccttgtaggtcagaatgaaaatatgttttaattcacagctacactagttagactcagtgccttgaagggaaagggagattgctttgacaggttcagaaatgttgcttcaactcagggagtt

SEQ ID NO: 45704 - DNA, 1362 bp, Bovine  19866880797946
  misc_feature (1)..(1): n is a, c, g, or t
ntctttgcgaccccatggactacagcatgccaggcttccctgtccatcaccaactcccagagcttactcaaactcaaatccatcgagtcagtgatgccatccaaccatctcattgtctgtcatccccttctcctcctgccttcaatctttcccagcatcagggtcttttcaaatgagtcagttcttcacaccagttggccaaatatttgagtttcagcttcagcatcagtccttccaatgaatattcaggattgatttcctttaggatggactggttggatctccttgctgtccaagggactctcaagagtcttctccaataccacagctcaaaagcatcaattcttcagcactccgcttttcttcatagtccaacactcacctccatacatgaccactggaaaaaccatagctttgactagatgggcctttgttggcaaagtaatgtccctgctttttaatatgctgtctaggttggtcataacttttcttccaaggagcaaacatcttttaatttcatggctgcagttaccatctacagtgattttggagcccccaaaataaagtctctcactgtttccattgttcccccatttattcaccatgaagtgataggaccagatgccatgatcttagttttctgaatgttaggttttaagccaagtttttcactctcctctttcactttcatcaagaggctctttagttcttcttcgctttctgccataagggtggtgtcatctgtatatttgaggttattgatatttctcccggcaatcttgattccagcttgtgcttgataggagtaaagaaaggaatattcaaaactgaagcatgaagtaccaaaaatattgtatctgtatcttttccactcaaagttaactgttcttattctctgctccaggattatgatggtcatgaagaattatccttggttgggtaagttgttaacaagataatgattaattatttaaaatatttacatgaatgacatatgaaactaaccctgatgaagctttttaagtaaattaaactgaaaatgggttctgccattttattaaagactgccacaaagctctaaacagtacttgtttatgaactgctttgaaagataaaatatttgctctgtagtgatcattgttgacaaagtgccaagaatcattttcaaattagcaaagataatacaatattaagtgattcataagtcacaatataaaacagagaaaagttagagtgaacatattgaaaatattgtctcaaaagagattaattttaaagtaacttaaaatggcaataacattaagtcacttaattttaacttaaatgttaatttatcttaaaattttattcaggtttccttcc

SEQ ID NO: 45705 - DNA, 986 bp, Bovine  19866880827414
  misc_feature (1)..(1): n is a, c, g, or t
ntttggtagtcatctgtactgttcaggaatagctttcagggagcatgtgaagttatggacacaaagaagccagtatgtatgccttcctattcctcatggttactttaagaccatttagatgaaaaagttttacactgaaaataatttctgtggttagcagaagggaggaataactaaagcctggactcctgatgatattattgaatttctcagctcgaagaactgtcctgtttgggctttattatttgggtcaattaattagattgctatttaagttagatctttctttcttgcagctaaaaatatacccaatgttattattttgtaatccagaaaatatgataaaatacatattgtgtttgtgtgtgtgtggttttttattttgaggtttcactttttgaagtggaaacacttaagcagcaatagaaattattgacataggaatatattttagagaaatatagaatattttttaaagagtggaaagaaactgtggtttgagtattatgtttagggaggaagccagactgaaaaagatcagggagaaagctatctcagaggaagtgggtagataatatcagattcattttaatatgaatattagtttcagattaattaccttaagtgcaaacttgataattgtgtttccatgatttataaaattttctatgtggccaaagctaaaagaaaaaaaaaattattaattactaaatggatgtggtagtatttcaatattgctatttaccttagtagaacatacatagtttagcagagtttaaatcatcaatgattgttatttggttcttacttttaccttaattttttctgtgagtgtcatgtggctctgaatgttgtataattttgaggagcacacacaccagctcttaacaagtttgacaacaaggaaagccttttcattaaccatcctgtaaaaagtatttgggaagtaaacccatatttatatatatacatatatatataattat

SEQ ID NO: 45706 - DNA, 1166 bp, Bovine  19866880858945
  misc_feature (1)..(1): n is a, c, g, or t
nacaaagcctttcctttgttcaaatgcaaggatccagtaaaaagagctttgacatgttgtgccttttatgtgtgcatttttctggtttcactgatgtccggaattttgcaaactataacgtgtgccttcaagttctcctatataatgccatttgtacactgtatcaagaacagtttaggatagcattacattcacacgactctaacgtccaataaatacttgatggtttctcagaaaacccacagtggggtgaaacggacgcaaaacaatgctttgttttcgtttgtttttcataaaatcttcccccgatacacattcactggcttacctgcagggtagcgctcaatcaccggccagctgtccacctgcaacgtggcattgccaccacttctcgtgaagcggactacgtggtatttcccatcgttaatgattgcattggactcttcgatggcgatgtcatccgtcccaacattaaatttaactccaatttttccttgatgctggaagagagcagaggagtaaaaagagttgagtgaagttgtgctgattcatcagtatttagtaaggattacattcagggtattgctcaaaaatatggttcagaacaacagttgctctccttctattttatttcttaaaatttgtgctacattcttgacatctgggtaaatctgaagcatctctctcacggataattaatatttcaaaagacacgctttcaagagaattcagccgccttcttcccaggggttgccacagacaaggtgcacagctgcctgtgtgaaacgatatactttcatgttctttaacatagttcctttaatccatgccttccatttcacaagaaaaatgaggcttgaaattctcccttttaataactggtgaaatcagagcaataaagtctatttctgaatacaacgtggacaaaggctaacaatatagaaaatcattctctagagtatgaacacacaggcatttagtgagtgcaatcattattcacacacagaagatcctcctatgctaagactctgaaatttactcaaattattttacagatgatgaaatgatgacgcaggaaggtgcaatgacttgttcaaggtcgcataataaaaaggagggatgctagagttagaattcagttccctcgttcttagtgtatatctaag

SEQ ID NO: 45707 - DNA, 1531 bp, Bovine  19866880865094
  misc_feature (1)..(1): n is a, c, g, or t
ntctctgttctcatgccactcatcgagtcatggatccatgtcactctttctagacatcccttatgtccccaaaagtcttactttccttttctagtttcaatagtcaaaccctttgtttctttagtatagcttaggtagacattaagaaagcaatctgattcaatgacgtcaacatacaagcgctgaccatgtactcaaagtactgtgtcaggcatacatgcttggactttggctggggagtcaagggccaaattaaaaaagttagatggaaattcaacataatacataacttggtatccatctacaataaaccaccgtttgaattgtagttgccacagaagttcacagaagaaaatggattagaacaaagaaggtgtgacagaacacacaggattttacctagattgcaaataatctaaatcttattgaaattacaaccagataaaaaatgtattgtaatgtggatagtaatcttcaaaaggttgataagtaattattctctgtaacttcataaaactctacactcctacatctattttataatcaatacattctctaacagaatatattttgactcaaaataattacagatatgaataaaagtggttaaaatacttctgtcatgcaaagtgaaatatgtaatacacataatgttaggactattaagtaaaacactatgtcagttggcaagaatttgagggtaataggcagaaatgaaaatattcgtgttagggtggagggatgatgagtgatcttttccaaaatttaattgaatattgttggtatatttataaacactgtaattttgcccctactatttctttaaaaagaagcattttctacaaattaaatgtagtatcttaacacaatgttatagcaagagagggtggcacactcaagtgccctgccaatcagcccacttgcacagctgaagaaagaacaggctgctcaaggagggaaatactctgttcataactaatgcttcacagggcaccccagttctttctgcagaacagcaggcctttgtatccagttaaataatatcttcatgtgagactgctgttatgctgaacatagaaaaccacaagctatctatgcaggctttaacagtgctttggggaagaaattagaagcttagcgtatttctaactggcttaagaaatttctcccttcatgtccctttgttatgtggaaatacattaagatatctagtgtgcctttatagaaagttttttatgagcatatgttcctactagctacttacattcaaaattttacttcggatattgttccatcaaaagaattagaaataaaggtaatcttgtgaactttgggtctcaactgcctatgtgtaatgaacagtgatttataggttcttccctaagccttctaggatgttggattcctaatacaaaaacaaaaacaaaaaaacaactggagtatcatatcaaaaaccagcagtggaaaaaaaaagaaatgaaagcatcagggagaagcagataagaaaatacagaacatactctgataaatt

SEQ ID NO: 45708 - DNA, 1860 bp, Bovine  19866880884123
  misc_feature (1)..(1): n is a, c, g, or t
nagttcagagaacagatcccaactcctccaagttggagaagagcaagaggtttgggttaaaaccttggactgggaattaaggggaacactgttttatttaagtcgttcccaaactgtcctgcaaggaatgttgttagataatatgttttgtatgctgcctcaatgggggaaaaaaaaatatgccaaagcaaacaaaaataacagagtactttggagctgaacaagtttgggaagggctaggtagaatatatttcagctttctttattattttcatgattaaccatttatatgctaatcagcattatgaaccttaaaaaagtattaagtccactgaaaatctgctgaaatttgggatgtcctgctttatgtatcctccacatggtgactttaagggagcagctacagctgaaggcaatcagttgaaaattcaaggacttgggatcctggtcaattcttttccagatataatgactaacaaaatttaatactaaaatgatcagaaatatttctgcaaaaatatggcccaatttatttaacttaagtatgtctctaattgataacatattaagcaaaacttatttcttattggtatcatcttctgacatcagttgggcatctctgaaacccattttaattttgtagaattctcagactattttggaagcaaatgttcaatggagtagacttagataagattttcaaaaatgaatttctcagcttgggttgtaaaacttaaacatgttcactgttcatctgcaagagaatggtatttaggcagtcctttctcaactgaattaatcattaacacctttgtctggagcacctaatatttcaaggatttaaaggtgtccatttaaataccactgatggacaaactttatcatttgactttattatcatagatgatgagggttttctttgctaagtcttcaaaatacaaccaaactcagtcatgtaattgagaaacaaacccaacactgagctagtgacaacatcctgacttaggtcttggtgttagcaagatagctgatattccctttgaggacagggaccttgccttgtacatctccacagtgctttgcacagaactgacactgagctccataaatgtttcctcaatgaaggaagaaaggctgtgctgccacgtacagtgcaaagtagttttcatcttcaaagccctttattcacattaattcagctatttacattttgctgatgggtaaaggctggagaggctaaatgggctgttaaaggccaggaagagtaaagccctgcctgtcaggaagcagacatttgcacttactgatttccagtcacatgccccaggcttcatccaagggagaaaaaaacaaaaaaagacatttaaccaagggcaggtaggtactggttattctactctcgtgataagataatagctattaaagacacaaatccactagatggtccccacagttctactgaacaggtgtaaacaaaaagtgctctgtgttgtgtctttagacatgtgactcgtgtgtgtgtgtgtgtgtgtgtgtgtgtgtgtgtgtagaattctgatacacactgtgatgcagaggtaccatttcccatttgcaatacctaaatggcttccaggcgccatgtgcagtttacacagaaattgaaatgcatttgacctaacgcttattttgctctagcaaaagtgtgctaattgtacagacccaaaggtggcggtgtttgctgtttagtcactaagtgatgtccaactcttttgcgatgccatgaactgtagcccaccaggctcctctgtccatgggatttcacaggcaagaatactggaggggttgtcatttccttctccaggggatcttccatacccg

SEQ ID NO: 45709 - DNA, 1711 bp, Bovine  19866880991906
  misc_feature (1)..(1): n is a, c, g, or t
nagacctgggttcaatccctaggttgggaagatcccctggaggatggaacagctacccactccagtattctggcctggagaattccatggacttcatagtccatgcagtcgcagggagtcggacatgacttaaaaaaactttaacttttttgtttaaaaagtttaaaaaaaccatcatttttttggttaatgtatctcatcaccttttttctcatgttttcttgagaaggcctggcaccctgacttaacttcacaaatagtcagacaaattttgctggtctgggtgatgatattattgcaaagaaaatagatatatgttcttacatgagagtggtctatggttttgcttccacttcttgtctccaaaagacaaaacaaaaccctaagaagatgctgctgctgctgctaagttgcttcagccgtgcccaactctgtgtgaccccatagacggcagcccatcagactcctctgtccctgggattctccaggcaggaatactggagtgggttgctatttccttttccaatgcatgcatgcatgctaagtcactttagccgtgtctgactctgtgtgaccctatggacagcggcccaccaggcttcgtctgtccacaggattctccaggcaagaatactggagcaggttgccatttccttctccccactaagaagataactgtgctgaaatgcatccataatgctagtccaattaggtgcacaaatcattcaaaatcggttaagaaaatggaaaaatatctattttaatattctgggtgagtttctccatttcactgtaccactcagggaaatcatcattttgctggagtacgtggcggtctccttatctcttggttacttcttactgttgatgggaatgcctgatatttcttattttcccacccatctgactgtaatttaccttttttcaaaatgattgccttgtcatttaccttttggggcgtctgctttgaaaatgctttgttttttaggaacgagtggatagtttccttggatatgaaatgttgatggctctcttgagacctagtgactgctgtaccatgttatctgtcctatttgtctgtgtgtatgtctgtgtgcattccattttttcttttcttttctttttattttttatcactagggatttttcatcccttttctttaaatacacacacacatgcaatataaacataaatcttgttgatgaacccctgctttaaatgtataacttactctgccatattgtccttatgtcataaatttgttagttgctacggttgtcccactacataatattgtagcacttattgcttatacaagccattttagtgcgttagaagaaatatagcagattgaaagcttcactcaatggactaggttcattaaatcttaaggactcataatattgaagttgagaaagatgaaagcagcaacagtccattgatttcacacgatgtcacttgctaaatggtcttcaaaccaagagagcaacctttataccaatccaggtttgcactggtcctgagccaaatatccaatcaatagagtgacgcaaagttaagttgatgtctgaggatgtagcccttatcctaaacaagctgtggtgttgaacttggtatgaagactggtgataggaacaacttggagaactctggaagaatatgtgctctaactttcttagttcagtggtactgctcttatttttctcattt

SEQ ID NO: 45710 - DNA, 1015 bp, Bovine  19866880999465
  misc_feature (1)..(1): n is a, c, g, or t
naatgacaaactttgctactgagaatcttcttaagctttgtgtctttctgtcctttgacagtgtgaacattagcatcacggacattttgtaattgtagtgccaaatcatgtggcagttaaagagaagagaggaacataccaataattcggaacctttccagaaagccgactagccctctggataagcagatgcatgcctaccactgcacatgtgtgcaggaaaagagaaatgactaaattcaaccaaatggtgatgagaaagatgagagcaatttatctgttgcagaagttggactttcccttcttgtccttcgtgtgtttgtataatagttctaatagctaacatttgttgggcaatgtagcaagggctctgcttgagtaaaaacttactctttaaatcaaatggatgaagtagacgccaatgttaaccttggcttttttaacaacgaaactgacacacattaggttgtgacttactaggtcacacagtcaataaatggtagcactgtctctgaggcacacatcattattatcctaatagtctctgtaagtgtctgggttccaaatgacttttacagcacagaacagtattcacaagtatcagattctcatccatattacttttgttctttaaacatgaagatatattagtaaaataaatgtgagaatggaggaatttgaaagtcagcaagctccattcttccaaatcctaacattggagaatctgtacaaagaacactgcagttggaaatagtcttaactttgagtgtcccacttcaacccagtattaatttatatccaaactcagtttgtaagcaaggatttattttctagaaggtgaacagcacatgtacatggacctaataataaagcctgaaatctttcagtgatttcaaagacaccatgagatttccaactaaaacttttatattggttttttctagaagaagaaatcctatgattaaagtttgcttcatgatagaagctcattgtaactgtgtaaaaggggttagaa

SEQ ID NO: 45711 - DNA, 2115 bp, Bovine  19866881020178
  misc_feature (1)..(1): n is a, c, g, or t
ngaagatctcagcatcctgaagaactttatactgtcaaaagtttgcgaagattcactttctgggattatctttatagaaagtttctctcttgttaggatgagtgggtcttatggaaacatttagatactaaatatcataaacaaaataactttttgtgaattttatataatccatattaaaaagtactactaatattgttatagtcatattttttaaaattatttaatcagaagggttggtaaatggatccattacttcatgacatagatcatgtctttctaaagtaaatatcagtcttaaaattgatcactatcaagagaagaaaaacttttttttttctttttaaagcatattcacttttaaataagaatgtaaacagaatcttatgggatgacattttgtgaattctcttttatattctttgactctgtgaaaactgaaaaatacatttctccccactacttgccttgcagaatggctgaaaaaacctcatctcatctatctgaaatgaatccaatttaattctgcttgaccaaaaatctgtttctatagttctaaaacatgcaatcacccttcggtacataggcattgtaacttaagaggctctgtgttatcactgaggaaaatacacgttgattgagaaaacagtccagtatggcttttgaaaactaaatgaccctccctggcatacaactgagtaagacagttgataaaagcaggcagttatagccattatggaaggaagatgcctcatccaacctgcaaaaatgggtcaaaggttatagtcttagactgagcattacaaatcactttcctattgaaacttccaagactcataattctagcaaacacttaaattctgtatatatcaataatttctttgtagttggagggcagttaaaaatcaattgtgaagtaaaggaaattcacaataaattagcctgctattcaaaaataagcaatttgatttcttctccagtagtctctctttcatacattcacattttactacctgtaatcacaaacatatccttatgagagaattttaaaagctttcagtacaactttaaaacactgttgccacaattgaatatttgtagtatattattctaaattctttaattgctattattggtctgttgaaatctgaagatttaaaatatctattttttaatcaacctagtaatcttttatttaagtcaatacctcctcaaatgaaccaagtaatcactaattgattagatcatttacttccataaaccattgctatctttaaacatgttatagcttataaaaaaagagagtcttttcattggcaattaatgggcagttaactattttccttttacattacttaatattataaaatgcataaattttaatttcttcatttttaggtgtttaacttgtacatgaaatagctattttacacatattttcttaacaaacataatttcttactacatagcaagtactaataaataaagcatattaaaatgaggctgatacttccttattgggggatatatctggtttacctaagaacttaagcagctgcaatttcattaatgatgaagcaagacttctgaggaaaaaaaatctgcttaattaaaattttattcacaagaatatttccaattctaaatgtcctagaatatcctcttttgaattatttacttaaaggaaaaagtttatcattgttctgtgttttgctttcctatatcagatttgcttgaataacctgcttattgttaaataagccacacacaataaacacaacaacaaatcattaatgaagtaatatcttaattgaattgtatacttcttgtacattgtgacatttaaaatttttttcccctaaaaatttagacataagattgaaaaataagctcagtgaatattttgggtgagggcagttagccacataatgtacaaaatatgttggcccaagacagtttttaaataccatattttgggtctttgtactcagataaactaatagtgcattttttcctatcaacagtagaagagtagacttatcgttcatgacaagacccacgtgccttccaattcaaaattttcagacttcaaaatacaagtgctgtaggtaattt

SEQ ID NO: 45712 - DNA, 1471 bp, Bovine  19866881034580
  misc_feature (1)..(1): n is a, c, g, or t
nttaataaagaaatcctaaagtgtaatgtggtggtagacaccttgagctctagcccagtgtgagaggtccccacaattgtggcatggctctgcagctggggtcagggggctgcgtgcaaaccatgttgataacaagtctccagagtaacatcagcccccatttttcaaatcttcttaaacaaaacacagcttcctttgcttaacacgaaggctagcacaatctttgacacttgtcctagcagctccactacctccccaagtcccgcgtatgttgctgcctctggtcgcttgggttatgggtggccctgcccacgtaacgccaggctctgcatatgagaaagacttttctttgccaacacattcatggatacctatcagagctcaaaaatgcagattaccctgattacagagggaaactgtttctcatggggataaaaaggggtaaagggtaggaaaggaggactttgcctcccctgccacccaatttgtctttcctgaataaattctaacaggatgtttttatcctccctcccttggctagtaattttcacagagaaaatttgaatgtaagtttgtctaacttcaagctcatatttttacctgcacctacagttctccccagaaagggatagatcctgaaattcctcagatgcaaaattccccagagaagttggtaatgactgatattaacattgtaaatttttttttccaacctcatctgactcttgattcttacatataatgttaagcattgtgttgcatgaaacatgctcttctccttaacttctcacttctgcttccaaagacaagttaaaaattcatagctgtttaaagcctactgtcattaactttcagttctgttataaaaagatactgattatgaaatagagatggggaattttctggtgatgtttccgtgacagcctgggtttctcaaaaataataatttaatacttgataatgaagtcaggcaaaatacttcccaagcttattttctttgactcagagtcacaacgtatattatgggaaaggaggagcaaaaattcagaattgtgttgatcactgcataggtatcaagtgtttgatgatgatgattacatctcaggtttctctttatgtggtgttaaggtggaaaggaggaaaaaaaaatgaagtcagaggttagcggtgtagtcttttaaggtctttgaatgattcacaggtatgacatgagagaatgcatgaagcccaaaccatggacagtgcttacaggattagtagttaagatcaaagcctgcttgtatttgtaggaaagagaaagaaagattctgaggaagtgtgcaaagaaaggtcatgataaaaataatgttgtgcttgctttaacgaataattttagttgtagggaaaaaatattaccatgaagacaatacacctagtccagcaatcctttttccttcccaaaacaaagtattctgtttctttaatagattta

SEQ ID NO: 45713 - DNA, 1781 bp, Bovine  19866881067458
  misc_feature (1)..(1): n is a, c, g, or t
ntaaggggcattactgttttgtgagtttatgtatgtctttcagcttgagagttctttggacgctttctgggtttaagaatgtttcttgcaaaaaaaaaaaaaaaagaatgtttcttccattttcagctgcacttattgtgtgtcagtttcatattccattggctagaaagtaagcttgttgctttcaacagcattatagaggagattttatttttgccacctttcaatttaactccaggaaaaactaacctctttggttataccttggaggctttccttggtatataaagtcatttaagcaaaacctgggaaattctttaaatattttgagtttgtgcatatgacttaatttgcaggatcaaatttagtctagagtaacgtatatgtgtgtgtatatatatatgtaacttctctggatacctgtgtagagtctgagtccttcagggcctcagaaggggggtgagttctagaatataaatggttatagttttgtagattggagaaggaaatggcaacccactccagtgttcttgcctagagaatcccagggacgggggagcctggtgggctgcagtccatggggtcgctaggagtcggacacaactgagcgacttcactttgacttttcacttttatgcactggaaaaggaaatggcaacccactccagtgttcttgcctggagaatcacagggacgggggagcctggtgggctgccgtctatggggttacacagagttggacacgactgaagtgacttagcagcagcagcagcagttttgtagattagaagaaagagttaatattatagcttaattagatgtcagattttcttcatctttgtctctagcttgaaatcagtctggggggaggaaatcggcaaaactcagtaatcatcaaatcttttttaaggctttttctttctttttcttttttttttttttttaattgaaaagaaggaagattgtccaaaattcattaaccacatattcccacttggacccgcaatttaacctgcctcaatattgaatatgtaccttggagcagccatagaggaaaatgggaggagactggtctcctgaggatcctcagtgtctggtttttacgagtgacagttttgtctggctgaaatctgtgcttccaacataaggaattagctgctgtggtttagttctttgtatatgttggactaacactactctgatattgtctttcttttcaggaatttcaattccacaagttaggtctgtgactgatcttatttcagctgtgcaaaattgcttctttccaagaaaaagctgaacttcttttgctactggtgtttgctctgcgtgaaaaaaattagttaactgggacttatagttcttttctctgtctcttgcattcctctctcctaaggagcatggttgtactccactgaacaatagaatccaagatgagctgaatctccctcttgaaccaaacccggggatgctgtgtacacttgtttaagacgtagaaatgtggaggtgttctcatttatgttgttacctccacagagttgcatatttaatatgataattttctaggaaagagtaagcaaatggcttgttctgacaagatcagtatactgtaacagtttcccagcaattggaagtaaagggttttgaagaagatttgatttttttctgatttgcctaagggtatcctagggactggaagtaaccatgccctttatgttctaggagacagagggtctgtactagatcaaagttagggttacaatacagaatgtctaactaaa

SEQ ID NO: 45714 - DNA, 824 bp, Bovine  19866881078538
  misc_feature (1)..(1): n is a, c, g, or t
ncctctttgctctccctatcaccacaatgcatcctgagctttgtggggtccaggtaatgctttacagttggaatgtttcaagctaactgtgttctggaagtcaaatctatcattatgagatttcattagaagctaagtctctcctacacataacaatttgtaccacaaaatgctggtttcccagagcatccgttaaatcctgtctgggtttaaatgctgataagaaatagaaaaaattaaaaatgaaatcattgtaacttccataaattaagtcttaatactgtgtcaaagttttaatatcatttcctatgtctaaaaatatttccctgctaaatatttccaactgctatagacattcacaaactatataagtttttatagctaaattatgaacacccataaaaattatttggcctacacatttaaccttttttctcaatacagacccactttctttaccacatttataggaaaatgcttacaaagtcttgttctctgaggatgtcattggtactgattaaatttatttttcataaatctttattggtgatgagaatttttgcagactgtgctgttgattgcttatgttacctctctctttaccactttcattagaagcctcattgtaccttgttctcttagagaagaatttaaaactgatttggggacgaaggaattttagtccagtgtatacagcactttatgaaacatttattgatataaagcctaaaaatacacatggtaggtacagcattcatgtgggtaattatttagcagattcagcccataattttataccacaggggttcttactaggaatacca

SEQ ID NO: 45715 - DNA, 1289 bp, Bovine  19866881091348
  misc_feature (1)..(1): n is a, c, g, or t
ntggtttcttccatagagaactctgtttttggtgaactgttttgacataatggctaacaaaatatacacaaacgctagtgatcagcatgttgataaaaagcaaagaaagtgtccatggagttttaggggttcatccaacaatgtggtggggagttaaaatccagtcagcattttgaggtcagagactgaagttgttcaacattttatctccagtgctgttttatttcttgtctaaagtcaccatctcataaatgtttgatgaatgaataaagggaaaaaatagatatataaggtaggaagggctattcagtataaagaatctgaagccctctttttttagaaacaggatagtcaaggaaagttctaccatacatatatatatatatatatacatatgactcagatctttaaggagacagattacaatctgcagaaaggagaaagtaggacaagagatgacagatatataagaaatgaagggacggggaagttttgggttatctaattttaatcatcacgatgcctatgatttccttgcttcttgatgtttcactgaatctttttacagttccttcccttgctattatgattctttcctgcatccaggggctcttcccaagggggctgacatcagcgaggtctctgtgatgttctagggactagcgagtctactgggtaggagagagcacctttctctccttcagtagatggcccagagctgagcctgaacgcgtgcccccatttgcccactaaacacaagtcaagagtccctcagcaaagattcaggcttggctttgtccccttagctattaagctccattcccacagaattatgacatgtctgaggtttctaaaaccctttgtgtgcatctcacacagttattgtgctggatccaaatttcaaccttggttaaacaggcctcaaatcctttccaaccctgcccctggcagtgaaggctcaagagcacataataaaggaggggataagaataacatctatagcttagtgatcacttattatgggccaatcactgtgctaaactcagaatgcagcatctcctcaccaccagcctgcctgctagctacctacgatgactactcctatcacctctgctttatggatgaaataaagaaactcgtttaagttacataagcactaagaattaaagccagatttgagactccggcagtcaatttttgcagttttcaagggcaagggcccacaacactagaagtacataaacaggtttaataatgtgagagctgtcaagccagcacgtagataccta

SEQ ID NO: 45716 - DNA, 1578 bp, Bovine  19866881107048
  misc_feature (1)..(1): n is a, c, g, or t
ntctttttctgtagaaatagttaaaaggaacatcctagtatagtgggtcaataaactcatttttgcaaaagaacttatttcttttgctccttttgagttcactctctacctcactcattgcccctagctcctcaaattataaacttcttccaagacttagcctatctgttctcagctatagtgaacctctgtatagtgcggtgtttgcagatttatagtctgagtgaatgttgttatgatgccatcttaaaactaatgtgattctgtcagcaagtctaatatcctcattttatagttgagtaacccaaggaatttaaaatcttaccatggtgacaaagctgactgtgtaaatgaggctagaactggttctatgcactcagtgtttaattctttagctagctctgtaattgatattttttaaaaagccctttcttccccactttaaaggaaactgttagtattatcctatacagtagtctatgtattgtaatttacttgtaaaagtaaggtgttaaatatattcagggaaagtagggcataagacagggcgattattatttctcttcagtttaaccttaggatatttctgaatgtaagatattttagcacaacacacaagacaaaactggtaccttgtgttcctaggtattatagcttagtactctaggcataaggtcttgattatacttaaattcagtttcagttccttatctgatctgctgtggtatataagggacattatttaaacccctctgacatgcatatgtacatatatcaagcaagcctaggcaccttctacaaatcactctcctcagtgtattctttattcttccctatcagtgaggaagggcggatacagtcccttgaaagacaacagaatgatgaattgctacctgatttcagcaagagctagcaatatatagaaagagacctagttccatctgtaaaacgataataagagcccctaattcctggagtgctatgaggattatatgaaataatctgtgtacagtgttttttgtaaatatcagatatgttaatatcatccttcatatttccagatgctatatataaactagttctgttatgttacaaaatgtgtatgagaggacaactttacttttctgaaaattacatataacactcactaaatattatagtatgcaatgtggccatctgtccatctacctcacagtgatttgttgcttgaatatttaaatttccttggataagctccaaaggagaccatctctttaaacaagtttggccctggagtgaatggcgctacagcaattatcccactgaactacttttaaaaagattactccattagctttgcctttgccccccgctccttttttaaaatgtgatactgaataaatatccatgaaacctacattaaccttttattcaaagtaagtaaaaaccagtcccagattttcattgcaaacctgtcatcggtcactaggatgaacacatttgcaggagaaaacataatgagttttcacagaaaaaaaaaaattgacactagcccctttaatgttcttgggttcatttttagttagatttaggccaagg

SEQ ID NO: 45717 - DNA, 1674 bp, Bovine  19866881111025
  misc_feature (1)..(1): n is a, c, g, or t
naaacacttaaagagcatcaactaagcaagaggaaatagcgcagtggttgaagccagctcagagccagtttgttccaaggggccctggctgccttgtggaggctgtgcaaccttgtgcaaacatttgcctcttcagctgcccttgcatcattggtaaaatgaagatggaagcagtgcctaaagttgtagtgaggactaaatgaaataatacattttgtacacatggtaaatgctccataaatattctttattactgtgattatgtgccaagcacaacctcaaccggattctcattactgcttggaaattcttgtgttcatctgttgtggactctaatttgtattccttacagtgggacttagaactgtttccccgtattctggccagactttctcactctagatagtgtgatcttggagggctgggattctaactaatttattcttctatttgccagatggacatatagatggtacacattgaaaacacctactgaatgaatacgtgaaggacagcaagtatttattgagtctactgtctttagttagcacataaactaattggatgggaaagacaagtataaaaagaatgagaagacaatgcaaataagaatacgatgaagcacgagccttgaacagactaaaggccacgatatttaagaggggaatgatagtgaggccgaacaaagtgagttgagacagaattttatttgcatcttaaagtctggatagtttacatatacagaagggataatggtatcatttcttgtgagaagtcgttatacatttctgagcaaaaaagtggaaggttgatgacagaaatgttaaagataccttgcagcaaagaaagaaaatgttacagatgtttttttaaagtaaatctttttatagagataaggaagagtatagaaccaatataggttttcccatcatttgtcaggttagaagaaagaccataggaatttcataattaaaattttcataattttaaaaaaatttagtaatttttaaaagaagtgtaaagaataacatccacaggcttatcctcgtgtctacgggaaatagcctccctttccattctctgtgacccagaggtgacggataaagctgtaaatactggagtcagtgttccaagttctcaagatcgtgagttgaggtcttcctacttcccagaatgatcaatcaatgcacaaactgaacttcataaattcattgtggaaaaggaatgctacgtaggttaaaattgcatttgaggattggatttataacctggtttgtagactgtctcccaaacagattattccttttagctaatggtttcagaggtacatggagcagaattagtcatcagagaaaaaccagagaaaaaatattgtgcactcactgtctctgtattaaatggaaatgctgaactcacagttattaattatgcacatggacatccctaatacctggtatgtcatgagtttataatgaatataattttcctttcctgccttttcactcagatcctactgacatctggctagacatggccatgaggggtcctcttgactgcagagtcaaacagtaaaatttatgctaagataagatttcttattgaaaagtggaggtcattaaagcaaagtagaatttgggtgctgtcaacaaaatactcaagagatgaggaaccaca

SEQ ID NO: 45718 - DNA, 897 bp, Bovine  19866881126671
  misc_feature (1)..(1): n is a, c, g, or t
nctcacactgtagacagacgctttactgtctgagccaccagggaagaaaacaagcctacgaaaccataatatgtatgtgtgctttagtgtgtgcatatgtacttgatgtgcatgcgtgtgtgtatgtgtgcatgcgcacacatatttgagtccttgaccattttccagagtgccttatgcatattttataaagatgtatatagaagtgaatattttttaaccttgagattttattgatattttcctctatctcatatatattttgtttgaaagcactctgcaaatcagaaagcactgagggttacatttacgtgagaaacagagaaagtgagaagtatttcaagtataatattaaattgtctttttgtatgttctttattattggcttcttgatcagcaatagagcaggattctattaacagttgcacggaggggaacgtatgatagggaacaaaagcactaattgtatgcacgtgttaaaagtagaacaggttccttctttcactgaacccaaaacatttttcttaaaaactcatgaaagtgtcttcttgtaatacttacacaaattttatatttttatcattcttgagtggtagtggaaacattaaaaagagcaaaataagtataaaaatgactcatgtaaatataggaagaggacactgaaacagattgttttggtggcagttgaaagaattgaaaagaaggctttctatgcagatctgtatattttagttccttttgccttattagctgaattaggatttggagacaaaaatctcttgagctaggatttcactcttttactctattttccactcaacctggaagagacacttgctccattttacattcaaatggtagagtttttttaaaaaataaactcccttttcagcgttt

SEQ ID NO: 45719 - DNA, 766 bp, Bovine  19866881126841
  misc_feature (1)..(1): n is a, c, g, or t
naatataaaatggggtcaaagctgacagctttaatatataacaaagcagagtttatgttttctgggtcaggaatacagagtgcagacagtcttcatctacaatttaaaaatacttcacagcaaatgtgccttcaaatatgggccagtttttgaatcatcagagttgttctgtagttattttcctaaaggaagggaaaagaaccagtttgttgaaaggagattcaattaattggggagatgtagagcatgtataaatggtgaaatcttacagcttgtgattaggatttttgtgtcatcattttgtacctctgtttatttcactgtttcaggctctgcagctgtgagacaaaatgcctcagagaggacctgggaaagattaatgaggggataggcactgggctgaaataaagttttgtggactcagtttcttctgctcccacactgttcttaacttccatgactcccaagtgcttagtgtccaataagatgaacaaccttgagatgcagaggaagtttatagaagttctttgagatctatgatagaagacatcaaaacaagtcaggattatagctctgatgtccagttggtaggatgttatgtaagtagaaagaagttatgagcctcgaagtaattcattatttactcaaagtttatgacataattgcaaaattattgctgctagagacccaggactactaggtagagattagcttcctcttttccacctggaatctgaaataaaggagacaagaaagatttcagtgc

SEQ ID NO: 45720 - DNA, 959 bp, Bovine  19866881188924
  misc_feature (1)..(1): n is a, c, g, or t
ntgtgctatacatatcccttctgcttcccacccaccacacaccatacctaatcaaacacatatgcacacacccacaggcacaaatattaacatgtatcatcttcacattctttaacctccaaaccttctttgaagaaagagtctgagactaatttatactaaaatgtaaatgattgactatagcttaaagagctattccttacccccaccctaaggggagtttgaatttttaacagaaatcaagcactgtatgtaatggaatgaggccactaaagaagacatttggacttttaatgataaagcaaatgacagatttaagtagaggttctctgaatacctctgcatcatgttatgctagaaatgaacttctcctgagtaattgctaatagctttcctgtacatgggctataaggtttctccatagtgacaagctgcttctagcctgatatgaggagccaatgtgcacagaaaatcctcactaaaagtacaagctacagaaccagtcaagactaaagcagaacaaacacaaaaatcaatttggcagcttatttgaatctacactgtgcctctttccaagggcagacaggatttataatctagctcggaaaaaataaaatgaagtcccaatttccattaaacatctgtgtaatgaaaagaaatggaaattgtctaaccagagatgattcgaatatctaagtaacagtatcaatgaaagcagacatcatgcttgcttttgaggcaatatcattttactaatttaatctagcccaacaatctactacttattccacacctttaattaaaatcagtgtttacttccatgggattctagatggaaatcaatgacagatgctcaggagggaaacgtaaggcgtaaaataagacagtcaacataatgcagagaggtttatatgaagctgctctgtaccaacacattcctaaataacagaagaagacca

SEQ ID NO: 45721 - DNA, 1578 bp, Bovine  19866881190579
  misc_feature (1)..(1): n is a, c, g, or t
ntgccgtatgttcatatgaaaagttatgttccccaggggctcagctggtaaagaactgccagtcaatgcaggagactcaggtttgaaccctgggtcaggaagacctcctggagaaagggaatggcaaccctcaccagtattcttgtctgaaaaattccatggacagaggagcctggcaggtacagtccgtggagttgcaaagggtcagacacaactacacatgcacacacacgtctaatgagtgggtttgagcatctatgtacttaagaactacactctgaatgctgctaagtcgcttcagtcgtgtccgactctgtgcaaccccatagacggcaggcctaccaggctcctctgtccctgggattctccaggcaagaacactggagtgggttgcccatttccttctccaatgcatgcatgcaggctaagtcgtttcagtcatgtccgattctgtgcatccccatagacagcaagcccactaggctcctttgtccatgggattctctaggcaagaatactggagtgggttgccatttccttctcctaagccaacttaaattcaacttgcacaagtttacataggttcgcttgcaattacttttccagttgcttacacttctgactctttttcctttggtccttagctggaaatcacttcccgataccactgcttaatcattttttcccctcccactcaacagttggccctttatggacagtgtttttcttgactttcttcacttcttaagagtcagtacttttacctatacccactctctgggccttcactagttctcagacacattccagaaatttaaaagcctggtgaatattgaaggtacatgataataagtgcaaagagcagtcatcacacaatctaatacccagagcaacctccttgccagggcctaatcaaccaggtgccattcattgaaaattgttagataatggcctagggtcagatctctccccaaggtcagaagatgtcttatgactgctatctacttcattagccaaaaaaaaaggaaaaaagagatagtgcaaaataagaaaatttctgagagagggaaaagtttgtgcaaatttgggagcattgctgtattgagtgtgcctatttatgacaacaggtgcatttgtttgtctttgattgatgcataatgttaacgattcttcttaaactgttacacctgaatatatattaactggtaattttccttgcttgctgtgactctaatgggcttgagaattgatccagccagtctctcctccctctgtctttttctctcctctttctttcattcctttctctctcctccctctcccttgcttcccccctttctttgtctctttctctcactctctgtgaggttcatttgctcgactgattctgagtgtccataatgactgtttggcatattctacaggcaaaggtcccgagaccctttttgctggctataacctcaatgataacgaatggcacacagtgcgtgtggttcgccgaggaaaaagtttaaagttaacggtggatgaccagcaggccatgacaggtaaagccctatcgtccttgcctttgctgaa

SEQ ID NO: 45722 - DNA, 706 bp, Bovine  19866881192049
  misc_feature (1)..(1): n is a, c, g, or t
nattgatgctgggagaaaggttagaatcaatgagatatgttttgatatcctaaaaggaaaaagaaattttaaaaggaattcagatcactaatggtatgaatgactataattctgccgtagggacaaatgattctgaaattcaaaatttcaacagaggataaattatcctaggtcagacctaggagagaagacatctctatcacattttagctatgtgaccttgggctgagttgttttagctttctaggccttcggtttcacgccagcaaaatgataataaggtaaagatgaaataagttaataaagtgcctggtacataacaaacatttaccaggacccaacttccttctcagtagcaaataaggaccagcaaccgcaatccttaattccctgtccagttcactttccatgacacttcatgtcacataaataacattgttttaaactgagaatattaagtgcatttaaaaaaagcctcttccaaaatcaatttcttcacatttttaataatgcagggaaggagcttgaagttggtccacagagattttcatgaaccaaagggttatttttaattggattttgtgcctgttgttatggaaattattgtttcatggataaagctttatgatttcactgcaagatcaagcccagaatgggggtataatgatgatatcaccccctatgcttcttttttcttgacaaaaca

SEQ ID NO: 45723 - DNA, 1166 bp, Bovine  19866881274011
  misc_feature (1)..(1): n is a, c, g, or t
nctcataggaaatttaatcatttgcatatgttgacaaagtactctacattctctctcttgagactattagaatgaacttaaattgtgtcatctgggaaggtaaaatctggaaaaccaaataagctggagatagtggaggtgaaatcaaaaaggatgcttcttattccaagtctttaacacctgtgtaattgtctattatttagaaggtttaaactggtccagatgatgctgtcccaatgaaagaagagaatgcttaagtatatttctttagttttataattttgggaatggaaaacctagttatggacttccccggtggctcagcagtaaagaatcagcctgccaatgtaggagatgctgcaggagctatgggttcaatccctgggttgggaagatcccctggagaaggaaatggctacccactccagtattcttacggggagaatcccatggacagaggagcctggcgggctgcagtccatggggtcccaaatagttggacaggactgagcaactaaacagcagcagcaagcctagttataaccaagggatacaaatggccagtttctcttatacaaaaacactgcctgagagccctgctggataagcaggctttgtgtgcaggagaatcttaacccaagaccatcaggagccaaacagaagcaaaggggctttttttgttactactggcttaggaagtcacatgagtaaagaagggtgagcgggtttggtcagaacatctatgaggccttgaaacactaagactggtgagaatggtgtttggtgagttgcttttctcccaaggtggatgcgcttcataaactaataagtgttttccatctgtgagatcaaaagacagatttttacaacatttggcagggagggttaagcatttggagtccacatggagattatataggagaaaaatcagggaaaagctgcttttttggctttggtaggcaccagattcaagcagtccataaacaacaccctccaaaagataaaccagaatgccacttcaaaaaccccacttgtcaaaattgtcttttctcttctcaatttttgtattagcagtttctatttagtttcctcattccattcatattgttctgagaaggtacaatcagattaagaatatatacatatagagagaaatagaagtgggg

SEQ ID NO: 45724 - DNA, 804 bp, Bovine  19866881379950
  misc_feature (1)..(1): n is a, c, g, or t
naagatatataaataaatggaagaaactttgaaaactggcattttttcaattcaccaaggacttttaacttctctaagcatcagtcttcataggtagcatcacactattctagaaacataaggaaacttaaaacttgtaagggtcaagctccctcattttacaaatacataacttaaatccaagaaatactaatgatttatccaaggttaaaaataaaagaaataaatatttgagaaagaagtctagattagaatctgtgttttcctaactcttagttcattgttgttgcctacagaacaaactccactctgttaaatgtagaagtgtttaccagaatttactgatttaaaagtaattttacagtgatgtgaaattcttcagatctaagacatattttcaaaataaaatcttattttatatttattatatcctagttgggtttcaagacagataattgtttcatctgaaagtgaaaattttcagaacagagacggatagcagagacaacatggaatcaatgttttcaactaagcccagtattctttccatttttcagctatctccatcatatttttattacaagggattctgcttcttttaatagtgctgcatactatatatttttaaaagtaggacaaagtaaaattaatttttctgggggagtcttgtgatatcctttgtgatgtctggagacacccaagagtatctcaaaactaggatgaagaatatctacactagattattcaatctcccaaagtaatttgtctcttaataacaatcataattactttctacagtatcca

SEQ ID NO: 45725 - DNA, 1519 bp, Bovine  19866881383681
  misc_feature (1)..(1): n is a, c, g, or t
natgctgagtcttaagttgattgtagaatttgaaatagacattggtcaagccctgagatttcatgataaaatcaacaagtacttaaataaaacattcaaagttattctagaaatgaatgtgtatttatgagccagaagtaaaataacagattagtcagcatgagctccttatgttttcagaattgaaaacttacttagggaaaaagtcaataagccttattgatgattgaattgttacaatctgaaaataagtttagtagttactgccttatttatatttttaatactacaaactcatataacatgacaactaaatttaaatttttttcctacttctcctgaatatgacaaagaggaaaagattacaaacaacaacaaataacacaccatttataatctggcaaagtaccttctattcatggaacttctttcctaatctatgaaaaatagttgtcacaacagacatgactttctcataattaaaggaggatgcaatcagaagttactttggaaagggaggccaggcttccttcactattaaggccacttcctccccctccccctcctccctcccctttcctgagattcactcccttctgttctccatctgctccgcccccacctattgtctctactccctgccaagcatgccaatcccatctggtcctactcttgcttctgctggctctaattcccatgggcctaggaaacagttcaatgccaaggcttttctcctcttcaggagaataaggatagctaggagactatcaaacaattagccaaagaattcacacacatgaacaggcacataatgtctcaaatacacaattctctcctaggctaaaatttaaaaatgtttctaattctcttatctcagattcatttttaaaaattgaaatcgtcctatctctgaaataatcacaatttatatttcaaaaatacaaacattttcattaatcccagatatgcattttttcagtaagcagaaataattagtgtaaataaatgttactcaaatcttaccatcatgaaatatttccattaattaatcagatttaataatcactaatacattttctgctgcattaaacatacatttaattcacacattccaccttcatgacttctcaacgaaaatccactctgccgcaaaagcatgcatggtcagaatctaagcatatttaggcaaaattattatcaagtcattaacaataataaagcagtctggcgagtattgaaagcagcttttattcatgcttttactcgaaccaacttaatacatatatacatatatagaaacacacacacacacaattttcggttgtttctgccacaagcatgctcaaaaacctctgaagctcacagaaagcagcaaacaaaagtataagcaaccatgctcagggtttaaggacatttaaaaatttaaaacaacctttctacatttcctatagagcatgcataaatttgacatgcaattccaagaagaaacattttaaatataaatattaaaattagttta

SEQ ID NO: 45726 - DNA, 1397 bp, Bovine  19866881395742
  misc_feature (1)..(1): n is a, c, g, or t
nacgcttactccttggaaggaaaattatgcccaaccctacatagcatattgaaaagcagagactactttgcctacaaagggtccgtctagtcaaggctatggtttttccagtggtcatgtatggatgtgagagttggattgtgaagaaagctgagtgctgaagaattgatgcttttgaactgtggtgttggagaagactcttcagagtcccttggactgcaaggagatccaaccagtccatcctaaaggagatcagccctgggatttctttggaaggaatgatgctaaagctgaaactccagtacttagccacctcatacgaagagttgactcattggaaaagactctgatgctgggagggattgagggcaggaggagaaggggatgacagaggatgagatggctggatggcatcactgacttgatggacgtgagtctgagtgaactctgggagttggtgatggacagggaggccgagtgtgctgcaaattcatggggtcgcaaagagtcggacacgactgagtgactgaactgaactgaaaatatggtatagatatggaagaattaaggagtacatgcagcaccctacacacatacacaaacacatacaccctcagagcaattatttttgtcaattgagtaggttatttgatggcaacattccagcaaagatagggcttcacaaacacttttctttaaaaatagcctttggcaccacttagcctaagtaccactttttttgaaagattcctttaacttcattaattagtatgatttatccaagattacacttacaagggaaaaaagtattcccatcatcccattgttaattatgtctccaggctaacataaataaatttttctagttactctaactctatgaaacttatcagagagatgacatttgtaaggtctatgggggattggagtaggggaatctcatttgcaatgtgctgtgttctttctctttccttaaaaaatagttttctttctattttccattctttttttaatttgtttgttttccacgcagttgacagctacagtcacagaaattaaggaaaaatatctaaactggagaagaaaatttcattaagaaacaaaatgtcatattttgctttatttaaaaattaaaagccatcctctataggaaaaggagcttgttaaaatggaatcacacttggcttatgtgtacaacttaaagaaaagcagtgagatgcagagataaggtttattttgatcagtttaaagagtgaagaaactgcgacataccacatttgttgcttgttaattgcatgtcttcaggataactgtcactattgtataatagtgacaacttctacaaatagatatgaaaataagatttgcttttaaatattgatctgtacccacataac

SEQ ID NO: 45727 - DNA, 776 bp, Bovine  19866881397445
  misc_feature (1)..(1): n is a, c, g, or t
natatgcccctgctcaagtatggcaggaagatttatctcagaagaagaaaaagctaatttgtaagcgactctgaggagccctatctcatgttgttagggttttcaagtaccacacaaacacagctgtagcgagaaacaaagccagatactctcttatccactgcgctgttacctgacgcagattcctggtgactttcacatcatgccaggcattatcattaaactttccattcacgggctccaccagtgcttcaaaggcccctgatcccaaattaatgaccagagagacagctccatttttcagggcgagattgacataatcggctgatttcccggtgtgaagcatcagtccgttcctctgaagggttttaaaggacagagttatttcatcgctgctgctttgaatggggttttgagacaagtcgtagcagaagtattccgatcccttgaaagtggcaatatattcttcttttcctggaggaaaacagatacacacatgcataagtaaagaaaatatactatgcaaattaccaaagcttaacagaaacgatcactaatcagcccccagattaactctttgtctagttaacattcatgacaagagccttgtcagagttaaacagcattgtgaaaaagtgaaagggttagtcactcagtcgtgctcgactctttgtgaacctgtgaactgtagcctgccaggctcctcagtccatggaattcaggcaagaattctggagtgggttgccattccttaacaatactgtaggtggcagcat

SEQ ID NO: 45728 - DNA, 1454 bp, Bovine  19866881504274
  misc_feature (1)..(1): n is a, c, g, or t
nggagctcaatcacatattgattttaaaagttgcattaaaaaatgatgctttttaaaaaaaaataaaaccacttataaggtcataatattgagtactgacagtggtataaataaaatttgaggtgtgaaggaagttttccattcattttctaaaatccgtattattcagcctcccaccttccatttggttctccatcaaacatcgcaaaggcctgtttgcctccttttattcagaaatatgtactgagtgcgtgataggggtcaagcacagtctctgttctttatggctctagtctcatagtggaggacagactttgaaacactataaaagttctcaaaatgtggtccccagatcagcagtaacagcatcacctggagacttgtttgatgcaaattcttatgtcctacccacacctaataaatcaggaactctagagttggggcccagcaaacctgtagtttaacaagcgctgcaggagattctgctgcatgataaagtttgtgacaatctatttcttgaggaataacagacattgggcaactgtagagggtacagtgaccctgccgggaattgttaactggggggaagaagacttctgatgaagttttatggaggataagacctatgagctggatcttgtaaaaatactgtctaatagttatttttatgcttgcattttagtaaattccaatatatcatataactaaattattttgacttttcaaaatcacagtttataatgaaaactaacactaaagttattttatagttggaagagaaatcattttagaatatgctttaaaatgttggtggactggttaatatagaatgacttacagataaaacactgataagaaggaatgcactatcctcagggctaataacatcctttaactccatgaggttagtttttaaattattgctttagaatttcatttttcaagaataggtttttgtttttttttttaatttggggtgaataacttgagatagaaatagcagtgagaaaaataaaatagtattggcttataagtaaatctttggcaaaggcaaggaatgaatttatatctaaattcatatcctgcctctactcaaccttattagttgtcagatctagtgatagattagagagctttgcatacttatagggtagcataattctaaaagaatcatcacgtgaaagattccttgtctaagaaatcactgttgtcaattccttattcaggatgtgtgtgcatactgaagagggtatctcttagtgatcaaatacattaaaatcacagaatcattcctgatggaccaagttattaaatccaactcccctgttcatactctgtcccagaataccaccaccaccaccacataaggtgtgtttggagtattttgtttgtttgtttattccttttaaatgattgttttgaggctcttctctgtcgagctgaggtgatgaagg

SEQ ID NO: 45729 - DNA, 1017 bp, Bovine  19866881506922
  misc_feature (1)..(1): n is a, c, g, or t
nactttaaggataagctctttagtcctactggtcagaaaatcgatgctgaagtgattacctatttaggaatattttcttacagacagcattacagagaattacaacaagtcacagtaacaaaaagcatactcagctttcccaattccctaaccatggctccgagttcaccgttacaacagaatgaaatttgaagtgggggaaacacttcactcatgcaatgcaaagaaattaatactccagttgagtaagcctaaaggacttcactgaattcacaaatcagtgtggactgtggaggcaaagacagattgtgcataatagccatcaagccaagaaaaaacttactctgaatgctttaacaagccctagtcgacaatttcgcaaactctgttaaagaagatggtcagaaaagatgcagaacatctcaaactacaattactttgtcttgtccagataactgacaattgcattatgacattccatatgattagaaccaagctttttcacattttagattcctgctgctgctgctgctaagtcacttcagtcgtgtccgactctgtgcgaccccatagacggcagcccaccaggctcccccgtccctgggattctccaggcaagaacactggagtgggttgccatttccttctccaatgcatgaaagtgaatagtgaaagtcaaatcgctcagtcgtgtccgactcttctcgaccccatggactgcagcccaccaggctcctccgcccatgggattttccaggcaagagtactggagtggggtgccattgccttctctgttttagattccaggttagtataattcccttaccacacaaaacacaacagaagtccttttagttcaataagatgtatccaatttcaacaatttttcaattttcaatatagctagaccagaatctttggtaaaacccattttaaatggaccattatcaattccacatctttctatgaatatcagcatatattagctagacagtcatcttattttagctttagaat

SEQ ID NO: 45730 - DNA, 1267 bp, Bovine  19866881550118
  misc_feature (1)..(1): n is a, c, g, or t
naagaataagagatctaagttctccccttgtttccagtataattagagtggtaagatatcaacacacaagtcttattttccttgactttgtttagaggcatttgtgtacttgaagtgtgccttgcactatctaagaagcagcttgagaagattatttgatatactccatttgaatcccagcagcattaaacctggtaacataaacaggacagttgtttaatgcatatcttttaatttgacgtaaatagactgagacagaagaattatgtgaatacccagggccaggttgtaaggttcaggctaaatgtgcctgataaaatcagagaaatagaaggactttatggccactgattgtaagctggaatattatgaaagagtttagatcaaaagaaaatataggatgcattactttgggataatataaatgcacacaccaaacatgggggacagcacaaatataccaggaagacaaaattaaaacagcattcaagaaagaacacaaaaggccagaatagactagaaaagaagaattttcgaaaggaccatggtaaataatgttggatgagaaaagtcaaaggagagccttgagcaacatgatagaatttgtgactatttttttttccaaaggcaatgagaagtccaaaaatataagacatgcaggctaggagatgagagaatgtgaaatagcaataatctggagagaagagaagaaattgtatttaacattcaacatgtgtaatttgagtaggagtgtcctttaggaatcagatgatatgaactggggactcaggaatgctaggcctggaagacctggcttgggagccatcaaccagaagcagataaatgaagtggtgtaagaagttttctcttttcttaaaacagggagcataaggcagttagagcaaggacttggagtgcgtcttccaaaagcagaatgtaagcatcaaggtataattagttctttgactcagctttcctgtttattcatatgcattttttagtgcctcaaacatctcagtttcattttaattaaaaagaacatacataaaaaggacaactgctttatggatttgaatagctaaaactctagggaaacttaaggaggctcctgcaatctcttgtaagtggcatatggggggaaaaaaagtgaaacaatacacattgtcttactttccaactggccagactggagaagtttctagaggctttgctgagaggatttgaccttgtttagcaaagatggagactgctaactttcctctcaatt

SEQ ID NO: 45731 - DNA, 1013 bp, Bovine  19866881628229
  misc_feature (1)..(1): n is a, c, g, or t
ngcaaaaccagaattgaattccagctctgctaggtgatgtgacttcttgatgtttcctcatccattaaatgggagtcatatttagtcatcttcttgagatgtttgaatgattctgtaaagttcttatcatgggaacataagcatattttacttccatttcccttaagagaggttaggcaaactgctgttctttatgcttccatgggacctagtgaaggacattgtaaacttcttccctatctagtcatatgcttctttccagtgatcaccagtacagaggccctgtcctccaaagttgctagctccatgttagcaccatcctttgtcttttcagcacagggtactgcctccattcttactttattatgattctttcttcccttgacatctgtttcatttaactgtactattttctttccattctgatagttccatcctctccttctctcccaatttcttcctttctctgccaccaaggtgcagaaattctattttaagtcctctcccctctgtctaccttctcttttttggtgatctcatcaagtattctcgtttatttccctcgacccaactgttctgttggatatttaaacccatgctggactttttccacctgaatttctgggcagcacatcaaagtccaagaataaaagtgaacataccttccccaccactagaaacttttcctgcagagtcagatggaggtttttcagggtctaaagctaataaaattcaaggagtgccagttaagaaaaagaataccaaatgttaaataaaaatgaccacagtcgctctgttgtcacctggtgtgagggggagtatggcgaaggaaaacctggagcagaaagatttagaagcttaacgatcaagatagaaatgacttttgcaagttttacaagaagatatgactatgtgaacacactgctggggttcccccactctgggttctgaaagaagtcctatagataggtgaccctgaagcttaagattcattagcttcatgtaaattaatt

SEQ ID NO: 45732 - DNA, 1115 bp, Bovine  19866881787383
  misc_feature (1)..(1): n is a, c, g, or t
ncttttgtctagttatgataataaaacaagggcacagaaggtgtgtgtgggagttagacccgagtgaaagatgaggagtgtcttttgcaataaaagacaattggaaatcatgggtgactgggtgagtccatcttatagctcattaacactgcccgtaattggcacagatcattgctgagtttatccttatgaaataattatacatacatacatatgcaaacctttatgtacatatagaaatgaaagttatttccactaaatcaattttaggaggagaaatagagaccagcatttccttgctattacagtacaggtttgttctatgctagcccttcatagtacggtctatcttcaatccagaaaaagactgtctttttttttttttattgaagtatagttaaattacagtgttgtgttaattactgctttaaaagtgactcagttatacatgtatatacattatttttcatattatttccattatgttttatcacaggaggactgcctttagtaatctcaaaaaaaatcataggggataattctcagtgttagtaagtcaagtgttgaacacaggaattaattaggaaaaatgtaagtagaaaattcattcgcacttttgaattccagttcatccaagtaaaggagtttttggaataaccctccttctttccctcccaactctttttccatgttcctcttccttcactgttgtctttttccttcttatcataaacaattatttatggtgcactctaggaagtgcctagttttatagaaaaaaaaatttaaagaagatacaaaggaccatctgggcaagacatcaaccctcaaggcatttactatctggtggctgacagaagacacactgaggaaatcattgtttctttgtttctcaaaaacacatatggatggacatgccaagatgcaatatcttaacaggagtgccagacatttataagcacctgctgtatgcaaggctttaggctggcaaatatttgtgacactagtgtccagtcatctgttacgaatgcagactcctgagcaaaacctcagcaattcagtaagtccagggtggaagtacaactttaaatcatggtttcacaggaaaagttttt

SEQ ID NO: 45733 - DNA, 1045 bp, Bovine  19866881787440
  misc_feature (1)..(1): n is a, c, g, or t
nttgtagtaaagtaaaaataaccctgaataaacctggcctaaaaaaatgtgaaaagtgtacatggaaaattcagcataaaaatattaccatgcaaaaataataattaacccaagtagacctgcacatagtgattttcagcacttttggaaaggaacaaattttgctatgaaagcagtactcaaaatcaaataaaggttaggagacctagtttaaaattgttattaaaacacacaggtattttactttaatggtcatgggcgtagttccaactatttcagaagcaaaagcttattgcttggatagtaaatacaactgatcccaaggctatatttgccactaaatttagaatgttgggaggttagccctgaagggatcctggtggtttatctgcccttggtgtaatctgacacaaagatcctgatgtccatctcctgaaaaaggctgagcccaagcaggaagtataggagaagtgagcctaggagtgttttcctagggtcttgtcattctgagatgctgaggctctgggtgtaagcctcagggtcatttctaagctacttaattgtatactgttttatatttaatatgtttaaaatgcagatcatagttgcaattgaggttcattctagccatgtttaatgccaatcagagcataattgtgcatcatgcagtcaatgatgggagttcccagggggagctaatggtaaagaacctccctgccagacatggattcgatccctgggtcgggaagatcccctggcacggtaactcactctggtattcttgcctagagaatcccatggataaaggaacctggcaggctacagttcatgggattgcacagtcagatatgactgaagagacttagtgggtgcacacagtcaatgatgtcaataaaataaaggggctgaggtgctccagacgagtgattttcaaagtttaatttgcatatgaaatcacccgggtatcttactaaaatgtagattttgatttatagatctggggaggagcctgaggtttttcatctaacaagctcctaggtgatat

SEQ ID NO: 45734 - DNA, 1031 bp, Bovine  19866881798981
  misc_feature (1)..(1): n is a, c, g, or t
ntcactcttacaaagtgtgtaatctatttgtcctgaattggatggtgattagattatagatcccagacaaacctatttagagattcagttcaaattgcatgattaaattatttttagtgaattcagatggcaacatatgctccagaacatatatccataaagatacatcagattggtttatgctccaagtactccagcgttcaggaaattaaactcatggcatgggtatgatgtctggttctagatttgaatatctctatttactaagaaatttgcaaattacatctcagtttttatatcaccctcacttgccttatagttgtccttcaactctagttccattctctataatgccgtgttgctttcttctgcagcgatgcatgtatgtgacagactgtgccaccgctgatgtaggtgacagctcccgggttgtcagtttttgtcattgatctctcccgtagttgatgctggtcagactgaaaacttgaaatgccaggacctgaaagggactacttttttttttttcttttttaaacggtacctgactgtttggatgactaggttttatatggaaacaagcattctcacctgcataagttagtaaagtcagattcagagtgtaatgtcatgcagtcagtgagctcaaattcaaaagatgagagagaaaagaaaatagttttttctaagtagaatgaaaggaatttatagttacatggtgtgaaatgagaacatctaggtttataaggtagacatcttgaagtctttaaagaatgctttaaagatctgggaacagcactgctgtctatgtttagagtacacagccagagaggcaaagttattggtaaggagcttaattagaaagccctcccggtgttggttaataaaacccatgttaaagactttgacattcagacagagcagtggttctgaaaatctaattcccctgggccagcagtatgagcattacctgggaacttgttaaaaatgcaaattatcaggccactgtacagatcaagggaatcaaaagcaaa

SEQ ID NO: 45735 - DNA, 926 bp, Bovine  19866881805281
  misc_feature (1)..(1): n is a, c, g, or t
natagcattgatatgtaatatgtgagtaactgatacactgattgattgaaactcatgatatcttattgttcctttaataccctttaaaatatttactacagaggcatgtgtacagttcatccaattttgaacccattatgtcaacattctccttaactagaaggagaagctaattgtatctgaatttattacatatgaaacaaagtatcctccctcccttaggaagcacctatgaattttagaagagagatatgagatgagaagctagaattctacaattctagggatgtcattataacatttttttcccataaaaattgtcctaatgcatcaaataggcactatttcaaggtctaatcaatttgtgtatttaattgtagtttcataattataaaacaattgaaagctaatgacatggaaggaaatggaattggaattcattaaaagctagagtttcatacctctgtgaatggaaaaaagcaacaaataccatttatttttatttgttctacttcaaaatcagatcctttgagagacacccacatagtaattcagaactgaaacatttatatgtttatctctgctgaatccttgcagagtgggatggttagcaaaatattaaagaatgaaacagtcctcctaaattaaaggctttattacataataaataatttctctgaatcttacaaaatgggttcttttatcttcatctgtggaaacccacggaaatagacaaagtggctgccatggtcttgataagcagaaaactgctttgactgttctgtcataatgacagaatatactagaaaaggctcttccttgctaaaatctaggtagatacacaacatagctgttagactggaaaatgaaaagaggggttactcattgctgttggcttttcctttgtcatgtacataggccagcag

SEQ ID NO: 45736 - DNA, 723 bp, Bovine  19866881893376
  misc_feature (1)..(1): n is a, c, g, or t
ntccacagccttttggaacaattccacagcaaacagaaagtgtcagaatgttttcagtgttatctttcacaaatcacagtacctaaaataacaaaagatgtcatagaataaatagtacctcctatagctctttacagtagaaaaaaaaagtcactgtacaaatatgaccctattgtacaactatattttagtttttagtgtactttacctgatataaacaatacacttttttcatatttttctctcagaaattaaaatccagcaatagtcttgtgaataaaagatctcaaatcaatagatgccgtgatagaaatcatcactgtatgaaaaatcaggaagtggctcaagtgcagggaggaaaatcaaatttcattccaggggctgaattaactaaacacttttctagccaaagctgtgtaatttaaatttaattcactatgtttggaactatctccctatgacatgctgttgaagagaggtataagaaactcaaatatgtcacattaatcaattctattcttcaatatacttttccttgatgtttataacctttcccagaaaagagacgacctgctgaagaagacagaatactgatcaagcaaaggcactgtcttttcataaccagtacatttagagtaagtgtccctaactgtgtatttaaccactcataggtcaaagcgcatgctggtcttccttaattcagagtggtctgggatattttta

SEQ ID NO: 45737 - DNA, 1569 bp, Bovine  19866880415378
  misc_feature (1)..(1): n is a, c, g, or t
naatcaccctctgatgtagatactattgttattgtccccattttactgatggcaaactgagacacagagcaatctaataatttttccaggccacacagtgagtttagaggcctggccagaatttgaactaaggaattctggctccagaacttgcactcttaaattataattgcctctctagaattcctagacattctagaatacaccctttgcctcctgtatgatttcctcttctggcataaagtcttcaactgcagatctgcagatagcatccccagactacatctttttttaaaagcaatggtgtggggaccccagtctctggccgactcaggcagctggctgactttggcatacttgttgtagacaattgaagaagggtggtaagggatataaagcagcagcagtgaactggggcaagcctgcattcacacttctaccatatctgggtgatttgactagctattcaatccccctcaggctggcttccttcccttaaactctctgagcctcacagccttttttgtaaattaggagtaatattatctaccttcagagttattttgacaaattcaaaatatttatttaagagcccagcatgtaatgtacaattaatagatagtagttattgctattattaatggttgaacatcttgtgccagacactgtgctaaaccctgagaaatgaggatggggaacaaaggtgaatcagaggagacttcactagtgatgcacatcaataatggcacaaggcaggctgatgatgttggtaaatgagtttcttgtgcccttgagtctgggatgtttgctttaatcatagaattaattaggtgtgtcactcagctttgtcagaaacccaatgtgctagaaaattagccaaagtgcttgctctcttcagagagatctgaagaattccacttccaaaaagacacaataggcatacttctccatagtcttcccatgaagcacaactgaaaccccagacagtatgtgtaaagcaaacataagagactcagaaaggtggagagaagaaagcagactggctaaggacctcagggtcaaatggatgacagggcatcaagttctaggtttcctttttgtctatgtatccaaactggatactgggaatattggagaagctggcagccccaaaacatggacagatactcacaaaaacacctcaagaaaagacagaatacttggcaatgaaaacagtccttctccaaccaaacaccataaataaaaaacatctctagccccactcctggcagcaaaagtcaagtcaatgtttcctctgttgccaggatttaacatgatatcccaacacccttattaataaattatcagagaaagccaagtgaggagcagggacattcatacccactgtagtagcaagctctccctctccctgtggtgtcagtggagaccacacagggagcatgaactttcaccacaaccaggcagtaacaaattataccttcaagccaggatggtatgagtagaatgcttgtggaagcctgaactcccatcctgactcaccagtaacaaggagctccagcccagtcccag

SEQ ID NO: 45738 - DNA, 1302 bp, Bovine  19866880501316
  misc_feature (1)..(1): n is a, c, g, or t
nacatagtaagtctacagaagtgtcagctatctttattatatgagatttcacatccatatgtcagagggctaccaatctctattgttatgtgaaattttctaatctgaagttggtaactgattaaaattttatttaagtagtcccagatccaaatacaatgctgaggtctgcatatggctcttgggctgccaatttgagacctccgacagccatggtaaattaaagtggggatggagtagtggttgtgcttagagaagagggaaatgaggagagctggccctgggagaggtggcagagaagacagtgcctgcctcatgatgtcccatgccctgcagggtcccggaaggagaggcaggtgtacagcaaggccgtgaagaagctgttcagtgtggaaacctctggaaggagggcccgggtccgcagagggggcggccgtggtctctggcgtgatgacctcctggagcctgccaccaagcccagcatcaccggcaagttcaaggtgctggagccaccggtgctgggtcacgacctgaagctggccctgtgcttgaccagcctcacctcccgggcccagcgggtccaagtcaacttgagcggtgccaccatcctttacacccgcaggccagtggcagagatcctgcacgaatcccacacagtgaagctagggccagaagaaggtaagaatgccccagctgggtgggacctggtcggcccagccccttttcccagaagagaaggggatatttctgagcatttgcagatgagaaaactgaggttcagagggactgaataataaggataataataaaagtgcacaatcatctcgtggcaaacatgtaatgctcaagtgttcccactcagtttgaatacttaccaatgaataaatacctgctgggagcatttcttaacatgtggaatatgtcttgtgttacctttttaaaatccaacaaattttggagctcatctggctctagtgtttctcaagagacaagtaaaaggtgtttattaagtgcctacctatgtgagaccctgtcctgagaattctgcaggcatcaggcacaacctacaaccaccctgaatcctctcccctctcctcttacaccatatattctctatctctccctctctctctcatacactttctgaaccctaaggattcaatcaaagacattgttctctgaaccacttttccagtaagtgaagcttgtgttttttgacaaggtgtgaaaatatgtgaaggaggtgtcccatattttttgcttttctctcacttatttttcacagaatctaaatcacaaaat

SEQ ID NO: 45739 - DNA, 1821 bp, Bovine  19866880637500
  misc_feature (1)..(1): n is a, c, g, or t
ntaatcttcctaggggctgtgagtttgagaggactttgcctggtaactgtagaccggggtctgtaaatatcactggggaagctctctctccagacccccacaatcaaacacatgaagttctgctgagatatctggatggttctgcctccaagctgtttttgcttagactgcactgcataaaacaagtgctctaaaacaggagtctccaacttcctggccaggtacctcctgtcagatcagaagcggcattagattagaagtaaagtgcacagtaaatgcaactcatttgagggacttccctggtggtccaatggttaaggatctgcctgccaatgcagggaacacaagtccaatccctggtccaggaagatcccacattctgcagagcaattaagcccgtgagccacaactactgaaacccttgctctacagcccatgctccacagagagaagccaccgcgatgagaagccaagtactgcgaggaagagtagcccccactcactgccaactagagaaagcccacgcacagcaataaagactcagtgaagccaaaaaataaatttaagaaaaggtaatatgcttgaatcatgaaaacatcccctcaccccaagtctgtagaaaaactgtcttccacaaaaccactccttggtatcaaaaaagttggggactgctgttacaaaatatttcaactttatttacaaccagaaccctggccccaaccccagcttttcgggctttgctctgtgggaagatctagatgagcagggacacttctgacaggtccagggctcaggaagatgagcaggtaggctcctcatttcttctgggcttgtgcccgggcccgttgaatcttgtcggctgtggccccatctgtggctccagtgcagtgggacaatacgaggctcatctccgcctcattccggtgttcaatagcaacgtccgcagcctgagccacatccctgcagtttgagtaggaggggagataagtattgagctgcccaagggcacaaattgtgcctctcatcagcccactggctctgccacccagcaccccagggctctcagcagacgcacccaacaagaagcaaggccttgaccttctgctcaggacccacacgggaagcatacttcttggcctcatatttattgtgttgcttcatgcagatctccacaaagggcttaggagaagagggtagaaagacatcaggcaaagccctcctgttctctcttatgagcaaagcctgtgtgtcaagtcacatcagttgtgtctgattctttgcgaccctatggaccatagctctcaaagctcctctgtccatgagtaaagccaagtggctacattatcccaatgtatcttatatacccttctgtctgtataatccccccaattcctatcccacacccatacaacagttgtgatctcaaaattctttgggtgaaaaccacctaccccaagctctattagagctttgagatcaattatttctatgcatccacgccatcatctaccgttacccctcacagcaggcatttcccgccttcccagggcctgagttttgggcagtttatagctgcccttatttgaccaacctaccacacctcttaactgcctgccacagaaaacaaacaactcaacatcctccactgctttgcaaatgtactctccccttcctccccaccaacaggactttccttcagacactggtgtcccctatggccctccttggggaaaagcagctcagtctcctttcctccagcatctgcaggcggacttgggcctgtcctcccctgtgccagactccgaaatgtgcccaccagtt

SEQ ID NO: 45740 - DNA, 2808 bp, Bovine  19866880768687
  misc_feature (1)..(1): n is a, c, g, or t
ntgttttgtcccgagggctggagtgagtagcagctgctggagccgcttcctcccccaccctctcctgagctgaggaggctcaactttctaagtggcctaaacaccagctttcctagaccttggcctgggctttaatcccacccttctaggaccacttggttttcaaggttcagcccaggtccactccctctctggactcttcctgccaccctggttcccaccgtctcctcagtgcctccacactctctgggcctccccacacctgtcctgccaggttcaagttaagaagccctgtctgatgacccccaatatctaccatgtagtcaggaggtcgttcaattaaccatgtaactagctcattagcttggatattctccagctccaaaaagactggaaatgcctagtccattaatcacacacacacagaagttgacacttctgagtaattgtttagtttcagacggttaaagttcaaaactctctgacttttagctttctaacttttgagcaggttatcccttgtttggacatttttctgatggggatgttttctacccactgagtagagagcattcctccagcattcagcttgtgtatgtgtccagctaatgtgtgtgtttggataggtggggtaggtttctcacgtggagggagtgggtgagtgaaggtggctccaggcgggcagttggaggccttattctggctggactcactcgaaagctaagttgtgagtgatttccttcagccccctggcatcaggttccccatccagaagacgaccatgtcaacctctgtcctccctgctggcactcaagccctctgtgctgaggaggggatgagtcagaacaaaggagcatagccccttccccaggagccccagggatggagtaatgtctcaggtttgtgtcctcccagccctggtggacccccacagatcaagtccttgtcatctgaggaaggcctcacaaaacagtgggaagggcttgggagccggcagcctgggtctggttctgcctctgccactcgctcctgtgtgtctcaggcaagtcctttaatttacaggtgtgtcatactctgtgtgtacaaaacggggatataataaccaccaactttattttgtgagacatcaaccaacaagatgagtggttgtgcctaacccatagctgagtttgatataggggaacaactagttattatggttttctcatcactcaccattgcactgagaacccggccaacatatttgggatcgtttctgtgggccacatccgtagcagggtcacggcgaaaattcagactgttatccaggactgagaggcaaatgttcaggatgccttcttcaaactgttcaaaatggggccatatgttactataaaagaaattgcaagtagtatcggctaattgagggcatggaggctatgctggtaagagccacgggcactgcccatatctcagcccccgctccatggcccccagaactgagaggctgaggaacaaccacccacctggcctttaaccctgagaactcatccagacctcttgctgtacacaaggccctgtactgaggcccctcaagtttaatgagactgcctcactgttacgaactcgagagcagtcacttgacctgtctgggccttaatttcaccagctgtataacaagagatcaggctgagcacatctcaaagtttccatctagttctgacattgatctctagcatatcacttagactttggggaactgattataaagtgtctcactaaaattggaatttgaagccattttcacaaaatggagaaggccaagctctttcttgccttagagtcttcatatatgctgttctttcttcctccaatgcctttccccaagatatctatccagctcccttgtctccattaagtttcttatcctaagttcctttctaagcaaggttctcccagatcaccccatcaaaaatatcctcccttccacccctcagtgcacccaccccacccctttttcttttctatgaaatttaacacagaacacaacatttaaaactcaaccatataaaatatatggcattatactgaagatagaatacatggcagatgtgccctggttgactccagaaagggatctggacatggcagaatgtgcacctgtccaccctctgctggacatccatggcactccatccaaggtgcttcattgaaatacttcatttgtctgccggaaagaagaaaatatggagggaatccctggatgtggctagctgagcaaactcgggaattctgtggattcagatgtcatagtaccataggacccttggaaggtcgaatgctcacaccaaggaaatttcatcacattatgatgcggaatgaataacagaaactatactgttgtgcaagtctctactgggccttatcttcattcatgcatcatggtaccaataacacgttgttgcatcaatttagttatgtgtctgttttgcccatgaaagtgtgacctcttcaaagacatgaaataagtcgtatccatctcctgtatccataggtgtaccttggcccctggcacatagtaggtcatcaatgaatggatgaacaaataagaagcaggcaaatggacagatttgggaactgccacctatctgtggggtctgctgtggagcttctttgggtagaatagggacattactgccagcctctatgacccttttacctgtccgtagttccagccaatcatgctaattcgatttgtgcttcccacaaagatgatgccagcatcttcctgaacatattcctctctctcagcaggtactcataaagaca

SEQ ID NO: 45741 - DNA, 1109 bp, Bovine  19866880792232
  misc_feature (1)..(1): n is a, c, g, or t
ntacaaatgtacatctccctttgacccagaaattctgcttctagtaatatccttcatataaatgcacacacatgctaagtgacacatggacaaagtaattcactacagcatattttatccctgaagaagaatgaaaacagccaaaatgtccagcaatagacactaaagaaattacggtccatccatacaatggaatattttgcagtagcaaaaaaaagaatgaggagactgtctgtgtctgcattttcttgcacaggctagctcaggaaggatactcatgaaactggggacaatgcttgcttatttggagggcaatggatgagtcagaagcagaggtggaagactttgctgtcaacccttttaaatttgaattttagtacactgtgaatgatttatctatttaaaggagaagaaggcagggtttagttccaatatggaatgcgttctaagatattaataaaaaaggtaagtattaaatacaaaagattgtgtacaatatgctatacataggtgtagggcagacttatttttccttaattactcttctgtgttatcttttgaattttgtaccttatatatatacatatttcctattcagaaagaaaaatgcattttcatatgcatcacctctacaatcctatgactgaaactcaccaagtatttccctatttttctaacaaaggaaatgaacagagaagttagaggaggcaccaggaccagagcccactttccctgccactccctgttagctcctccagccgtggcatcctctaccacctcccatccctgtcttctctggcttcttccctcaggaagcacaactcttaagtccagcctcagagagtctgccaccaggggcttcactcaggggacccgtttctcttgctcagagccaccaaagggtggtgggagccactgtgctctgtggctggttccagcctgccctgaccttgcaagctgccaggccctcctcccctggcctgtacctgtcaatgatgacggggtctgagggcgtctcattccggttgccacagctcttccggtcacagcatcggctgaaggaaaggtgaggagggagggaaggaagaaagaaggagagggagattaca

SEQ ID NO: 45742 - DNA, 1261 bp, Bovine  19866880803323
  misc_feature (1)..(1): n is a, c, g, or t
natccacagcccacaatgcctttccacccacagggagccagaggaagagagctgtgggcctctcatgggagaaaatcttccccattccctcctataccacagtcatcctggtcaattaggtaattatttagttttagagctgtggcatccaattaggtagccatacgtggttatttaagtttgaactaattaaaattaaataaaatttaaaactcagttcctctggtgggctgccatctctggagttgcacagagtcagacacaactgaagcaacttagcagcagcagcagcagcagccacagtagaccaaatgcccagtaagtacatgtggctagtgagtaccatattggtcaatgcagaacatttccatcattacaggaaattcttttgcagagtgtgtcttaaagtcttatattgttctctagttcctcttatcattatgtaaaggctcatgtaattacattttgtgtcctcaacagctctgtaagctttcagaaggcaggaatcattgtttgaacctctctatcttttcctaagcctctatcatagtgcctaccccacagcaggtgctcacggattcataattactatgacaggatgaatgctgtatcaagcccccaaatagaactctgagaattgaagagcaaggatctttgaaaatctgttcctccacaaaacaacaggaacataggcaaaaactgtcaaaatcaactttttcagaattctgaaaattaacaaaaggtttgcaacagtccagggggtatttatttaagaaaaatggctgaatcttagtaagaacgaagaactttgcagttgttgttgtttttggccatgctgcacagcttatgggatcttagttccctaaccagggattgaaccaagggcctcagcagtgacagcacagagtcctaaccactggactgccagggaattccctgcagtgttttaatttgccctattcccagatctgtagtagtctcgcaaccatagtagttgtaaaaactagcagcctagtagccactaaaagggacagattgggtttggatcttctcaacaagttgtattttcatacaactgtcacaatttgatctgcctggcagttccctgacagccctattttcaggacttgttatctggcctgactcagaacttgcttagtgggaaaaaccctattcttagggtatttgttgaaaacaaccagtagcaactattgaacactgctgttgcttgagacagtgatagtggttgaggcaagacaat

SEQ ID NO: 45743 - DNA, 4031 bp, Bovine  19866880824242
  misc_feature (1)..(1): n is a, c, g, or t
naagatatttgtttacatggtgaagggaagaaggctttctccttgctcctgccaaaatcctgctcctcagtgtgcctggtttgggccaaaacctcctctctcaattagaatggttccaaggctccagagtgatatccctggccaacaatgcacagccaagttagcgaggggcccaagattggcatccaggcttcatctctgacaggagcttaaacaatgggcactgagaagccctggggtctttagtgaggttgtatttcctccattggtttctctttagtagcctatcaggctggactaggactcaaacaacctgaccttaccataggcaagtagctatcctgtgcctgacttctcatctctaaaatggaatagtaataatagcatagctacagtttgtggtgtgaggagtcagtccaggaattttgcccacataccagatgccccatgggtgccccaggacaggtatgcttgcctttattttaaccaacagaaaaattaagttcaagaagggttagcaatttttgccaaagctgtgggactggaaagtgcagtgctgggattcgagcccagcttgagctaatacaccagagcccatgctagctatgacgctttgccacttccatggcctgccttgcccttgctaccaggccatatttcagggagaacaggaaggaaaaaggaaggaaggactgtgtcttgggtttcaggagctgatgctgaaggcatctgatcagtggcacacagggttatgaaactccacagcgaatgggttttagcaaaaatgaacatgggttctaggggctggttcacagggcttgagtatttaggtggccagagaggaggcttttagttgagggatacaggagtgagggttttagggtgatgtatgtagtgggatcaagtctggctaggaattggagagggtcagggactaagtggaggcctggagtggggtgagggtcaggtgggtgggtcttaccctatcatgtgtcttacttgtagtgactaatcactcactgttttgtctggagggttagctgagatgtgaaaagccagcatcctgggcatcgagggatgccaccttccaaggctctcctggtgtaaacagcttgttgggttggttttagaaacccctgggctatgttttccgcactcacatggctgtgcaagccgtctcccggcaccaagccccaccgagcatttcacagtcagaagagttcaacacctgcatattttgagatttcatggcatacgaccttttacctcttgttcacactcatccatcctccgtttaccattgtagggtccaaactgtatccaggacagaacatttctctgaaggcctagagaagctttctgctctttagagttccatacaatagcttacaattttctggtctttacaaagtacttcacacacagatattattgcctttgactcacagcaactccatgacaggacccacttcataccaaggctcaaaagaattaattggccaaggtcacacactgcataggtgggtgaaatgggatttcttgtttgtttttccatagcaaacctcaggagtcttaaagagtaagctctccctgggaaactcactgtgttggttggctcatttcccagacttggggatgtggacgaggcaggaggtaggaagtctagggagcggggaatgcttgggcagaaacatctggaaggtgaaagctgaggtctcatgaggattctggctagccctctctcagctacatttctgtcattgagccctttctagagcctgggcaagtgaaaagaggcggttggtgggggaaatggtaaatacaggtagaagttgctatgagtctaatgctgagacagttgagcagctgcaagaaaaagatactgccagctgctaaaggggccccagtagcatcagcacatgcacgtggaaactcttgatggcttggccacgctctgctcctggttgagccttctgccctaacatctcttcccaaaatttctggccttccacaccaagtacctgcagcatcagcttgagggaggtgcccagaggtcaggccagtctatatcctgccagttccagcaatatcacccatgtcccgcccagtcccagctagagactgtaggttgggggcctgctgacacagaaaggccctggtcccactgccctccctttcccctgggcctcaggccctaggccagggctcaacagacacaagcagcgggatggggttgcccttctattggtctaagtcctgagcgttgcctgggtgagacatggaggtgaggaggcccacgaggctcagtagtgtggaaaacagcagcaggaaggaggcggtgaagagcagcgcagggagggcactgagcagcagcagcaggacagccggcagcagatggcgccacaccgcagccgccacgggccacagggagctcaggaggtgggagccggtggtgaagagcgcgtgacacagcatcagggccagcagcaggtagaggaccccctccagaccccacagcacacgctgcagtggctgccgccagccagatgtagtccaccactgggtccagctcgggggcacgtgacacatgcaccagcgcacccagccctcccgagagacccaggctgaccagggcaccgcacgctgcggcccctcaccggccccgatggcatctgtctccattcgtagctgctgcatcgtggttggtgcacctagggagagggccaggccagctgcaggagcagccctggagatgcctgggacctcagggcaggtgtgggtgcagagggatcaggagggaccagcatgggtgtggtggggctttgaactgggtcctgggtcttacctctgggcagagccacctaagtcatgttgcttcctgccgcacccaggacagcctggcagccagagttgagcccccactctcagtgcccccaccctccccagaggagccctattatgacctggatcagggtgggggccagccaagatagggaccattgctgggtgtgaggtttacctgagcctctctcgtggacccttcaggctttaggggagcctggtgagcccacagatgtagtctgtcacgttttcttgtggaaagccctctttggagccctcccttccctgctggcctgtatccagccctgcttcactcttttaattctttcaagagaagttctctagaatcacagaggaggccagaatagcctccccccaacctacaggttctgagatggctccataccctgcactgggctccctgtcccttatctcacattttactgatgccctcagactcagacttaggtatccactgtccacattgtgaggccagaggtcccccaagatgcaggctgggggataaaggagtatcctcccaccttcccaacctagggtggaggaaaggaagcctgaggaaacagcatggccagtgtatttccggaggacactcaagtccaaggatgaaggcaaaaagcaagggcaagcagggtcaagggcacaccgcgggctcccaggagcaaccccgcgcccaggcacagcagcaacagagcctcctggaggctgagtcgtcctgcgactgccactgcgggtggagcctcctgctgttccggaccctcgccggccccctgactctggcctcttgtgagatgtgtgtgctgtgaccaggtgggacctgcaggcctgtggagagaaagggcggcagctgggtttggggaggctgatggtttgctcacctgcccaacctgtaggctgcagtccacttaccggtggagcatgtcgaaggccaggaagctgaccagtagcagcagcagcagcaaggctgggccagttgtggaaaagatggcccaaattgtcagccccagtgcccccagtccgaggacactatccaggacctgggcccagctagggccccagggggacacacacggacccactggactagctgatccctcccctgcacccatgcccctgggagggcctggggtaggagaaacagcagcttcgggcctgggtaagcagaggtgggt

SEQ ID NO: 45744 - DNA, 794 bp, Bovine  19866880873760
  misc_feature (1)..(1): n is a, c, g, or t
ncctggcaggctctctgcggcgggatgtggttgaagggaacttctacagtgctactctggctggggaccactgctttgatgtcttagacctccactttcactttcggcatgcagtacggcaccgtcaccgggatggtgtccattgggaccagcatgctcaccgccacctctcacatttgcttctgacccatgtggccgatgcctggggtgtggagctgcccaagcgtgactatccccatggtgagccctatcacaggtggggagggtagtgatgcaaagagggccctcagagcataggtctcataaacagcaggacagagatcctcaaggggagcagagccccctgaaggaccattgtgaatcctgagtgtgccttccttcccctagccctgtagtcacctttgtgtacacgaattgagtattgagtacataaggcaatatgtcaaaagatccatatgctacagataaacaggaaaagaatgggagtacttttaggtaggagtggatgtagggcgtggaaaagcagaatcagaggaaaggtaattcaggcagagtggtagaagcaacaaagccccttggcagggactgttaaaccctcagttcccgcctgccctcagttcccgcctggttttaaaggggacgtcatggtttattgttccatgtctgcttctgccctggatcatgtcctgcaagggtaaagtacctgcctcacttgttaataactcatccctttcagccccagtatctagcacaattgctgtgtatatagtacctgcaggatggtgtttattgaa

SEQ ID NO: 45745 - DNA, 911 bp, Bovine  19866880955299
  misc_feature (1)..(1): n is a, c, g, or t
ntttcactctcattgtctcatgagtgtacagtgttttccagaggctacatgatattgcaaaaaattgaatgcaaaagcagatatgagaatagagccttctatttaaagagatttgcaaaaagagtaaagcaatgctattcttattattttttgtttttgaaaaagaattatttttcataaatgcatgttatttgtcttaagatgcaatgagcttattagtttttaaatgagttaatgaataacattttataagtttctcagtgttaatttccaacttggtaactattcagaaatataacccacataaacaagtgttctttggaattctcaataatttttaaggatataaagaggtcctgagaccaaaatgttggagaactgctggactagaatatggttcccctctaggatttcagttctgtccctcaagagaaaagccataaactgacaaatcagagaggaggggcctgaggccatgccctcaagtccagatgagaccataggacagacaagtccaggggcagctgtgctgtgcttggggcagcccacagagtgccctggtgctgggaatcttcatttccagagccttgtggctccagcaaatatggacaggtgctgcttatgggtgaatccaaaggtctgagcagttggctggaaatatgagtccctgtgtgcttaggatagaagttacctccactgtcttgagaactcatcctcataggatcgtggtgggtcagagggacccaccaaggactagacctggactggtctggtggtaagccatcccttcccctctctgggcctctgacaacccagcctgtaaaatggaagatgattcttttcccctcccaccactgggtgaactcactggacaactaagactgtgaagctctaactcattgctgcatcac

SEQ ID NO: 45746 - DNA, 1158 bp, Bovine  19866880957593
  misc_feature (1)..(1): n is a, c, g, or t
ntttcagcattccttttacagagccagaaactgaggcttggagagattgtgattcacttaaaagattaagtgtcatagctactaggtggcaatgccagatcctggtcctggaattcctgatgtgaaatccagtgccaccacccattttctcggttttactgctgtgaccccttcccctttccagctcccaccctaccttacccccatcccacaatgaatcactttcccggtttgaccctagaggggttgcaatataccacgagggcttgaattcccaccagtgttcccccacagctgccagtgggtgggtgaagttccttgatttccagtgacagtgatgggttttcttggaggcctgagcttccgggaggaagagtgagttggttctcctgggtagcacagatgggaggggaacaaggtggagcagagagaggctggggctgtggaaggactagcaggcaggtgtgcccaagatggcaaaatccttcaagctgttatggaaagtctagacgtacaaagcagattaataagggtggggtggctatttgcttcacataaggaactaataaaaactgattacttatacagcccatcttgaaaaaattttgtctgcagaaaaactgaaagctatcacacctgtcagaggcagcatcccctagcaacctgtcttctggcagaactgagcagaaatcttccctataacaaaagcacccggctggctgttatttaccttcaaagctcaagggaagagctatttttgtaggacaaaaataatttatgtgagggaaatgcttttaaaaaaaactgtacttctgcaagaagcaacagagttaaatgggaaggcaggaggaaacaggcaaaatggtcttggagtcctgacgtcatcacctactctctggatgactctgttaagtctccctcctttcctgagcctcagggttcactgttcaagggagctggaccagctgatgccagggcctgtcatctccatatttggggcaggctgggtaaatccctccagtgctaaaaacagagacagctccctccttacagcctcacctcaaggcgtgtgtgacctgtaggtgccgggcaccccccagccacctagcatgactgcatgagggagggggagaccacccagaggcaggcgagcccccc

SEQ ID NO: 45747 - DNA, 1251 bp, Bovine  19866880999945
  misc_feature (1)..(1): n is a, c, g, or t
ntgcctttaattactgacatctggtatctggctccttctctcatgcctgcagcctgctgccctgggctctgggcagacctgggccctccgaagctgttcttctgcctatatagggtcagactcctccctgctaatgatagtctcactcagggcccttttatctttcatcttgggtttgcttgcctggactggggcttccagaagaggccagggcattccaaaatcgccccttcaacaaacccaaacaattcattgtcagatttaggggaaagcagcctggcagtagagccctgggatgaaagccaggagattgggcttggtatctctgggccaaactggctgtgtggcccacaagaagtcacttaccatctctgagactctgtgtcctcatctatgaaataagggtgtgagctggatcttatcggttctaacattctctgattctaaatgatcagactagagatggcagacaggagccaaagactgggaaaactcaggatactccagtgtccagcatatagtgggtgtttcacaagttaaaatctgtgctatgaaataaaaatgctttaaaataatttaattatttttcttgctgtaaagaaaactatacttgtagaaaatccaagcaacacagaggaagaagaaagcatacatgcatattgcctcaaacatatgtaaaataaatttccataaatcccattgtccagagaagctcgtttgttgcctgcgctttatgcttaactgtataaatgctcattcgatgctttcttttccaatcacggactgcacacgcattgtcgtcagcagtggggtctcttgcatgagcttacagaatttagttagccttccccaaatcgatagggatttactttgtgtccagtatttttgtccttataaagaaacagaatactatttttcctggtatttgtgagtgcttcctggtttcagtctccttgactgaagagcatcttgagggcttttggagttccctgtcctctcacctgctcccagcaccaagccctagatctggtggagaaggaggtcctgttaagtagccctgtccttttggtggtggtagtacagaaaaacagaggcctctaggtgggccttggagaatgggggaagaactttctccaggaagcgaagcagctagaggactaggcagggctcctgccctttagcaataatggattatccacatgcttgagaccagcaaaatgtgagcaccaaaagcagtttaaaaaataatta

SEQ ID NO: 45748 - DNA, 1425 bp, Bovine  19866881085178
  misc_feature (1)..(1): n is a, c, g, or t
nttacaataaatcagtcacctttaggtttacagatgatagctgtagggagtaggtcagcctatgtgtactttttagaattacctcattatctaaatttaagccagaagccctgaataatcacacttgttatcattcttgctacacacacacaaatatacccccacacacccttgccccttacccatgtacaagtatggataataaaaacacctttataactcttcaggtaatgggttctaatatagaatgtaaaatgaaatcattttgaaaagtactgttggccatctttttgaaaatacttatttggctgtgttgggtcttccctggggcgtgtggggtctccatggcgtcatgtgggatctttccctgaggtgcagctgtctagttgtagtgtgtgggcttaattgctccaacggatgggatcttaacttcccaaaccaggtattgaacctgtgtccgtggcattacaaggcaaattcttcaccagtggaccacgagggaagccacagttttggtaatcttttcatttgtaagattaatataaagggttaaaaattctatattagcggggaggattctgggaagctggcagagtagcaggcactgtgtagtcatcttcccacctagacagtaactgcagtggcagaatctgtctgatatattcggaatgctagaatctgttgaatgcttacaacttccaggggaagatggtgaattgtggttaacttcagtagatttcagctcttagtgagtggcagccattcattcccctgtccccgtccatgtgacagtcagctgtgtgccgttcctgaagcagcttgcacacagctggcggggccaagacagacaaaatgacctggccctccagatcttggggctctgtgttctggtcactgcttctgatatcagaagtgcagacagaggtagacggctgttgctgagctgttgtcagcttccccctcccccctccatatctccagggaatatgcgagaattggaaagtgaccatgaatgcccagggaatggctcatcaaggacctgaggagatgttaagtttacatcaggctgatcttcaaagatcagccttcaacaataagagaaacagtgactagggacagtaacaaaactccgcaaactctggggaagggtagaatctaatttccagagttatcacattgataaattcaaatgtccagtgttcaacaaaaaatcacaaggcacataaaaaaacaggaaagtatggctcattcagaagaaaaaataagtcaacagaaactgtcccagagcaaaagggaggtttatttctataagcatttatgttaaaaacaagacttgtgttgaaaaacagtatttcaacaggtagttgcacagtaaatgttctgcttttaaaaacaagaatgatgtcaaatcaaatatatatatat

SEQ ID NO: 45749 - DNA, 1375 bp, Bovine  19866881104833
  misc_feature (1)..(1): n is a, c, g, or t
ngaacagttttgtacgtttcctgctatcttttgtacttttcctgctatgatggacacttgggctgtattcttgggatttttctcttgcaggcatgatgggcccacctcctggtatgaggcctcccatgggtcccccaatggggatcccacctggacgaggaactcctatgggcatgccgccaccggggatgcggcctcctcccccagggatgcgaggtaagtgcctgtagcagtggccttgattccctagggctaggttgggttaggaattggagagaaggttggattttgatcataccttcttggcttttatgccttaagtttagggaagtgaacacttagaggacagctttgttcagaaaggaaagagggagcaagcatttcttaaatggaccttacctccctcttagaatagtgagaacctccctgtacacagtacttccagtatctaaggcagtattctctggtcactgtaaaatagtgcattttgttgcatgaccaagaaaggtcttaggccctttggtttgggagtggctattaattaaggagggactctgggctttgctgtactatttattatggattatctgtttaactccagtttgagaaatgctgatgcagatcagttcttttgttttgtaggcgagaaacaggcccatagagagctcattgtccaggccagtgttcttttcatgaagccatagtggcctataagttaacccgtggccaaactggctgatcactgtatttatagttttccattactgagctttgtaagcttaggagcccatggccccagagaagtacccctctgagcatttggtaactgccgggtgtgggaggctggggtagggtggggatttgagttgcagatcaggcactgactaaacttcttactcttacttcaggccttctttgaccttggccacagagttatggaagtagctccacagaggcttgggcccgattctccagggccacgttaccacacctgtttgtttgttaagccgttgttcgcggagtctcaccggattgtctggtttcccttacaggggccccctcccccgggaatgcgcccaccaaggccctaggctcatcttggccctcctcagctccctgcctgtttcccgtaaggctgtacatagtccttttacttccttgtggcctgtgacactagtttataataaactctttaagagaatattacaaatgcacctagtatgtttgtttattttcagaaaaactgttgatgtattgggtgcttgataagaatcaagaagggttgccttggaaaaactagccctaatcctgtttccttagccctaatccttagctgtttcccttgtaaaatactgtatttatttgcagggatgca

SEQ ID NO: 45750 - DNA, 1478 bp, Bovine  19866881116395
  misc_feature (1)..(1): n is a, c, g, or t
ntaaaatctatcttcctaacaagaggctttctttcacttttgtatgttcccatccactgtctacagcaaagaaaaccaagctcatttcaagcactctcagtaagtctcagtagccctgatgacattattctctaaaggattttattaacttatgttgtctgtaccagtttccccagcaccagtgtgtgtttatttagcagattcctttcatttgcacttaatagttatccaccaaggatcaacacttctttggtctgctatttccatttctgtaagatgttacgttctttgacaaagtaaaatgtcaataaaaagtaaggaaagataatgcagtaattctgcatcctcttctccagcctattctacttaaggtttagtggggtctgtttccttattttcctgcttcacatcgcttatcagtgtacttactgccttgtttcagcccccacctcatactacacccaacccagggtcaagatcatttatcaaagctgagatgctatacttttaaaaagttaattaatttggctgtgccaggtctgagttgcatgtgggatataggatctttatttgcagcatgaagtatctagttccccgaccacaaactgaacctgggcctctgcatgcgttcggagcatggagtcttagtcactaccatcagggaagtccctgaattcttttaactttcttattaagtttggcacagctccccactccctactcccaaccttggaattctctctctgctcctcttctcctgcccacccaccaaataggtttgcgttcactttactactactgcatattgtatctattaagtaatggttttctaatcagtctcccacttgggcctgggagcttcttgcttagttccaaccacttctgagtgtctaccatgagccaagaaattatacaaggcaaggttggtatatctcccggagtaggtgaacgttgaacatacatatgaatgggtgagactagtacaggtgagaactagccagattccaaactccatacaaaatattaagtttcaattacagctcagcctgtgacatttcccaatcccaaagagctgctgacaataggtaacccctccagggtctttgttaagtacacgtgtgttctggtaggagtataattgagcgtgtgagacagtatgaaagatgcagtcaatgatttctaaacagtgtggattgcaaggtccgactggagagaacccagaggtagcctcctcaactcttaagatcacagttcagagactcactccctttcacaaaaagatgtcactctgtttttccatgcctttattggtgacagcaatgtacaacaacgtcaggcatagcaggtgccacgccaacacctggtgtagcaaacaggcactgcagggccactggcacacacagcccaagcgcaagaaccagtctaccccggccatgtacccgaatgggcatgaggtcgtctatccagtttgtatgtgt

SEQ ID NO: 45751 - DNA, 1673 bp, Bovine  19866881206383
  misc_feature (1)..(1): n is a, c, g, or t
ncaggtttgattacatttcctgttcgtgtgtgctcagtcatgtctgactctgggcaacctcacagactgtagtccaccaggctcctctgtccatggaattttccaagcaacaacactggagcaagttgccatttcctcctccaggggatcttcccaacccagggattgaatctgcgtctcttgtgtctcctgcattggcaggcgggttctttatcactgtgccacctgggaagtccatgtttcctgtttagtgtctcacaaatcccaagtcaaggaagatgttgactgagttgggctcttatctagaggttgtaggaagaatccacttcccaggcttatttaggctgttggcagaattcagttccttgcagttgttggactgaggtctcattttcttgctggctgttggttaaggggtcaatttcagatataagaagccacttacatatggtgccctccaacttcaaaatccaataataacagtgtatcgaatcctttcttcaaatctgatttctctttctgccactagtctgagaaagctcattgtttttaagggccacttgattagttcaggcccacgcagggtaacctcccctatctgagtcagctgtgccatatataacattacaatagctttccttttacctctgtggccgcagccatgagtatgctcaggcttcagaagaggcttgcctccagtgtcttctgctgtggcagaaagaaggtctgtttggaccccaatgagactaacaaaatcgccaatgccaactcccgccagcagatccagaagctgatcaaagatgggctgatcatccggaagcctgtgactatccattcacgggcttgatgctggaaaaacaccttggcttgccggaaaggcaggcatatgggcataggtaagcgaaagggtactgccaacacttgaatgcccgagaaggtaacctgtatgaagaggatgagaattctgcaccggctgctcagacaataccgtgaatctaagaagattgactaccacatgtatcacagcctgtacctgaaggtgaagggtaacgtgttcaaaaacaaacggaatctcatggaacatatccacaagctgaaggcgacaaggctcgcaagaagtctctggtggaacaggctgaggcctgcaggtctaagaccaaggaaacccgcaagcgtggtgaagagcggcttcaggccaaggaggaggaaatcattaagactctgtccaaggaggaagagaccaagaaataaaattccccgcctcttctctgtacatagtggctttggcaactgcatagatcactcattcaataaaaaacaagcctacctctctgcttccaaagtctctggctgcctgctgggtcttcactgtgtactggaccagaactgaggatggggatacaggcccttctctgggttcctgctttgttgcttccttggctcttagcctctggtcaggttcatgccccctccatccatggagtgtggggcctactttgaagggaggagaggaatgacttctatccaactttcagatactgtgcttcaaaactgccctttacagcagagtatgagtgggatctcagacgcggcctcagatgttggttattattcaattgggagttgtcacattatttaaaaacaacagaaaataatatgcttgcactcctcaa

SEQ ID NO: 45752 - DNA, 1046 bp, Bovine  19866881317436
  misc_feature (1)..(1): n is a, c, g, or t
nctcttagcgaccccatggactgcagcctaccaggctcctccgtccatgggattttccaggcaagagttctggagtggggtaccattgccttctccaaatctactaagttgtaaataattttcttcaaaattttgtgggcattgctttattatttggggctgactcagaaaaacgcaaccaatgaaaggtcccaggggtggtggcattggctgtatcattgttgagcccaccatcaccaaatatgtcaaggtcactaggcttgaatctttgaacagagtcccctggagacagatatgcagcgagacgcttgctttgtctcctctcctaggggctgtatggccactgtccctctacccctaactccatcagtttaccttcaaaatatgatatgagaataaggattaagttctcttgattatgacccattttcactcttgcctctcaagtcaataaactgaaatgtgttggaacctctgtaaccatttacagattaccagttagagacaggtttcttttccagatcagtccctttatacatgttcattcttcttaatttcattcttggagggtaaccttaacctcccattttggggttactatgttgtagccctctcacagtcacattctctgtgccatttctggaatgccagtatccagaacacctcccacaaaccacattgcttctaacacctaaacagccctcctgccccacccccatttagcaggtcatgtggttaccccattccagaaagcctcaggttgcttcctggcagagtctatctgtgcattccaggattgaaattctgaataatcccccacatgaatgcccacaggcatcaccttgctctcaagggaaagaactggggacagacaggttgagcgacttgcccctggacacctagtcctgggaacctgtgagataaagtggctcttcctttcttggtcagctgcccaggtggtgatggggttacaatgcctcctggcaactcagatccccacagaccccttgggtggagaattagcaaagataagaggatgagtctta

SEQ ID NO: 45753 - DNA, 1560 bp, Bovine  19866881348857
  misc_feature (1)..(1): n is a, c, g, or t
naactcccaagaaaaaagcaaagagtctgagaagataaaattcctcactgactactgcagaaaacttttacttcctaggttatggaaaggagaagtgaaacttaacttctgacaatattttccacttgaagagacccagatttgtttcaagaacatctgcatacatttaccagaaggttaaaatccttttctttgtatgcgagagtgacaatggcttaaggctataggacaaagtggattgactcataatccttgattttcaggtgtgcactctttaggtaatgtagaaaagaatccaatgattttgtaagtaatataacactcctttgctaccaagtattaatactattataatagatcctcatccttttctaactaatttaattcacattctgtggaagtcttttaatttcatgaaaaatagatatttaggaacgtttcccaaggatgtgactacagatagaattgactctaatattctcatggaattatttgtaataaagtaggaatcagtaatctatcatagagccgattaataaatctggaagaaaaaactactaaattcataaatatcattaccctctaagctgtagaggtaaatccgccgctgtgcccagcactagtgccaggaggttcagacaggactatagcaattactgtgctgagtgctagtgggccacagtcacccctggaaagggacccaggacagcactctggaaacctggcatttcattcaccacaagtttatcatgtagatttgcacaggtcatttgttcgttttttgtctctctattactgatttataggtaaggatctatctacatccataataagattgtatatgggagaatagtgaggagcgctattcaaatgcagggtttctttggggtaataaattataatgtaatgcgaactctatctctcttttttttcagggtaaaagaaaacacctcactgaagtattaattcttgactaatctcaaagtaaaataaaaggtagaaaaatgtagggtccacatattcattcagacatgcaaacattctggttccattcttcatactgggttctctgggcaattgatgtgagcatcgaattaaaaacaaatgatggattctttgtaaaacagagtatttgtttcatataaatgaagatggtagtcatgataagcctcataacactatccaaagttataggcagttcttttcttacctctgggattatgactagaccaaatattaagccaaagaggacaaggttaactccatacatccatcggaggaagatgaaatatgatgccactgaagaaccaaagtgacctgaagagaagacgatggtgggtgtaagtgttacagaaggagaatggtaacgttgccaagcactgtatgtgtgtgatgggtacaatttgcatgtcagtctgtgtaacacatatctcttctttttttcccaaataaaaagggcttaacctatctgcctaagttcctacaatcagaaagtgaagaagcacaatttaaattctggtctaactagtccaaagcccattcctttttctaatacaacag

SEQ ID NO: 45754 - DNA, 869 bp, Bovine  19866881349041
  misc_feature (1)..(1): n is a, c, g, or t
ntgtgatttgtgcaaaggatggattccccaaaatctaggggcccagaggcagcctttgagtgggagtggggtgggaccaggggaaagccccagcagaactgatatttaaactggactttaaatgatgacttggggagcttttcaggtatcaagaagggtggagagcttcccagtcaaaggtctctatggctggtattgtcaaggaaagtctcctggaagaagaaaaagttaatctgggccttggatgtaattggaatgggaagggcaccctaggtaggaggaacaatccatccaaaagcctagaggagggtaagtataaggtatgttcagggcatggggaggagactagcctgactggttgaaataagtgagaagtaatggaagggaccactaagctgaaagcacattgaaaggcttgaatgtcaagccacaaagtatgacctgatcctgagggctctggagtgccatggactggcagaccaggctcaggaaggagacgtgactgatggtctgtctttcttccatcttctttccccagtgtgcccagcctggatccccaagagaaggcctcggtccaattcaagatcacccccttcaagagcggcccacggcagctgcagggtagacttcgtcagcccccacttcccggacatcaagggctttgtgatcatccacgtggccacagctaaataacaggcatgaagggctgagaagggaggagaaggtccctattcctctcctgtccacttctctgctcttcccatatgggagtcaggaggcctggattccagtcccacttcagcttttgccatactctgtgaacttggggcaagtccctcctttcccgagtctcagtttcctcatctgta

SEQ ID NO: 45755 - DNA, 3007 bp, Bovine  19866881413911
  misc_feature (1)..(1): n is a, c, g, or t
naaaagcaaagcagctagaggttcagagataattgaaatgacaccaaaataatagaaagcagacagagaaaatacacccactgtagcgtatgacacttacaatttcaacccatgaacattcaaaattatcagcgtatactattgttactgtgaggctattggttgcttttgtgaaacgtctggagtaaaaaagttaggttggtgatggtgtatgtttgtactccatttatttcagtactgatttgctttcaaagaggacactttttttttttggataagatagagtatgagtaaaaacacaacaaaatataatctcattttcattgcaaaatcttttttctcttagtccgctctggctgctataacaaaaagatcatagactgggtaagttgtaaacagcagaaattcatttctcgcagttctgaaggctacaagctcaagatcaaggagctgcagattctgtgtctggagagggcctgcctcctggttcagagatgcccatcttctcgttactgtcctcacatggcagaagggacaggggagctctcagggtctcttttataaggacacggtccattcatgagaagtcaagactcattgacctatcacctcccaagggtcctgtctctaaatgctgtcatactgaggattcgatttcaacatacaattttggcgggggggcacaaacatgtaacgcatagtcttcctcaaatgtattcaagagcttggaaaagaccctgatgttgggaaggattgagggcacgaggagaagggggcgacagaggatgggatggttggatggcatccctgactcagtggacatgagtttgagcaaactcagggagatggtcaaggacagggaggcctggtgtgctgcagtccatgaggccgcaaagagctggacatgacttaacggctgaataacaaattcaagtgctgggcaagaaaagcaaccccacatattaaaataacttattcactataaatgttatatatttattaaagagcacgtggaaaatcccacatgctgtggagcatctaagcctacgtgctgcatctacggagcctggggccacaactagagaagcctgtgcactgcgacgaagacccagcatagccaaagaaatacatgtttttttaaatgaaaaaaattaaattctttcctgatgatttactagtgagcttccccacaatgtcaggttagccaggagtcttgcctgtggggtcatccgtatttttgtgctctccttaaacagatctgtgtcacttagcacagaatacattcagctcctgggcataatagcttcttcagcagactttgtggtttcttcttaaagactcctttgttaggattaatttggccatcctgtttctcctactaaaactttattttggcttgggtttttagagacaaaggatttccgcttttgaaggtgagacaacagagagagaaagggagaccagggtgaaagcttggcgactgaaatagaaccgaggggtctgagggtgaccccgtggggaccgaaccagtcaaaccttcatgcaagtcagagcatgactcgaaaggtgtctgcaccagccctgcctctacattctaatcatgatttgtttcctcaagaagagagaatgcgtttcaggcagttctgctgacacagttgccaccatttgccagtgaggctgggtgttgtttatttatgtgactgccgtgagagcgggcgtggagtgatctgaagaaaacctgcacagctccctgacataatagaagagccccaacgtgtcctgggtatgcgtgtggaaaaaccctcagagagaaggcacgtatggtgccgaataaaggaaggactgtttgagtgtcctaagttcagagatgaagcacagctgagtgagtggatttgcatatctttttttttaaagtctaaaaattcactctgtcctgtttccagagaccagttaatgtatttaatatttaagatgtaaaggttacatttagatggctgaaatcatggcataaataaaggttatagctcttcctttctcaacttgtggcagaataactagaggcaaaactttcaaaggaatccaggctgagtgagagagtttttgtgctaacacacaagggacaaagttcctccggttgaatagtccctgtgagatgagtgctatggaaatatgaagaggctcaaaccatattttcctcccgggctatagaatttggcaggtgtttttgtctatgatttttttctcttccaattatatgctctgtatagatctttattctttttaaacaaaagtcatgtttgtggctaactggcattatgcataatagaggtcagaaggtgaccatatgcaagttatttcttctccacccttgtgtctctgctacaggcagggactgggtaacaggtccagagagtgcattcatatagacaatatgcattcgcttgtcctatagagcatgaggctgaacagtatttctaaaggtggtcaacacagaagcaataccagggttttttaaacaactctcctccttcctagaagtccaggcttcaagcatttttctcttgtgaccttgagaggttcacctggtcgtgcattctgcttctaggatgtggcttcaagctttcatcatgaaacacttctctgcagccttgcctatctggtaattcctgggtttgatctcactctgggaaggaggaagaatattgaaagggtccggttggagcaaagcctcttcctcttttctaattgcttcagatattattttgccaccatatcaagtacatgtttagtgtgttacttgtcctgaaaacggaatccctctagttggaaaaatactacctagaaaagcagtttgcccgtggtggtgttggcttatgatgcagccctgatgacgccacacgtgtgggttttcatgaagaagaggcgggggcttcagtgcacgtgtgcacatcttggcctcggaaaatcaccagggctctggggaaaaaggcaaagtttctggggctca

SEQ ID NO: 45756 - DNA, 884 bp, Bovine  19866880752578
  misc_feature (1)..(1): n is a, c, g, or t
nagtgtttgtcttcttaggatagatacaagaaggaaatcaatggtttgattcctctgagcatcctgcctgagaaacaatgacttcagaagcagactatataccattactgtcatcactgtaacctagtctataaatatcaatgctgcatccatatcacagactgttaagagaatatttcagagtatattattctgttagttgagtgatctaattcttccaagtacaattccacttcggggttatagtgttggtaacgtgcattccagaagcataactgataaaactgttgctatagccacagcaaaggaattaaaagtcataaaatgatgatgaaacgtattttaaaagaaatgcagatgtgacgttttcagcttacagaattaagatttctaagttcacacaattcagcttaaaactaaatctgtcaacgatgctgatggtactaaggcacaaggccttgttacttatattcattgctaagttcaaggccaagagcttcatgtagtttctccacagtctatagtaggttgcattaatatttgaaaattcaaattcttcacctaagcctgagcacatgcaaatacatacacgaagactgtcttgcagaagaataatgttgacatatcactcacctcaagaataatcttatacatcaaaactacgatttataatacttttttaatatatacatctgcttccatgcagggaagattaaaaaaaaaaacacaaaaaggttggggggtgagggtttgtgtattttcacccttcattttatatatcattattacttttactgagaaggcatcacagatgcatcttaaatcagaagagttgttgaaaaccactctctacaaacctctaaattagcattcatatcacctag

SEQ ID NO: 45757 - DNA, 3110 bp, Bovine  19866880872580
  misc_feature (1)..(1): n is a, c, g, or t
nttacatatgtgaataatcgcaaagcagcaaacaactggagacagcacggtgcgccagcaatcattgcgggtgggtaagctgacaacatgtaaccacatattaagacaaatgtagaatttagacaaagtattccatctcttttcagatgtatacttttaaacctcaggaactgttttcagtagatgtcatgccttttaacttgaaaaaagataagcgcaaataagctcccaattgtctccccaatatgtaaaccacatctcgggctgctgtctctgctactcctttgaagtttccctgaaatgtcatgtgttgtgaagactgctgtgcataagcaagacaatttgctcactctcagaattcttaccggtttccactgctatttggtatccagcctctagtctccgagatgacctttccagcctctctgtgttatccagcagatgtgccctctgaaaaagaaaaagggaaaaaaaatcagacgaccgtttacaatgttcttttttttgccttaaaaaaaataatgctgttgtatgccctaacatttcggggggagggtggatcacaatccattatagataatttttagccaatcttcctttatacaaaccactacaatgaaccgatgttcaatcaatcgtgtatggaccatccagtttttgttgttttgttttagaaggcagactcacattgtacatggccacagtgaatcttactccaaaacactaagaaatgtacgaagaccagaaccaactggatctttcctgttgcagcagaagtagctttatgagttatttgcatggattgatgatccctattttgtatttattttttataaaatgcaatcatgaaaaaaaaaaaaactcactagttcctttggttcctaaagaattaaaaaatttttaatattcttaaagaatgccccctaattttcgatgtgcagcaagatgccatatagaacaacatatgctactaaaacagaatactaaacagcaattctagttctaagaccactcaggacaaccactaagaaacaagagacacatgttcctccatgcacacagatgtacaaaattgtggatttattcccaaatatccccagatatatggcactatactgaaagtgaatttccgacacagtgttttagactaagaactaaaatgataataataatatacattattttatattatgtctgatgggggaaattagaagattttccccaaatcctcagcttctgaactttcttttctacattgaggctgatctttttaaaagcataacaatcatacacttgatcatattcagactgacaaatacatttataagctaatcatggctgtgaatggatagcaatatgtgcatgcccttgggagtgtgtgtgtgtgtgtgtgtgtgtccatatgtgtgtactgatgcatgtatgtctggatacttaaaaataccaaaatatgtgtaactatatatttgggtatatgtacgtgcatgcatgtatttgtatgaattagtactttaccccttcaaatcagttttggtatctggtcaaaaagaaagaaaaaaatgcaaccataactccaagtttgtgttgttgacagatgtcatttaaaatcgaagaaatgctttctaataataaaaaaaaaggaggtgccacacatattatctgagtggctgtcgagcgaaacgatccaccttgctctaatgagcccccatggatcttggagatgcaagctgtattgacatgcacacttaagctaatacacctagaccagtgcctccaagctctagcagccagggatgctgacagaatatctcgcttccatcttcaaagaaaggaagtgattagtatgttatcattaccattcaaaacgtgatttccttattccctcccggcataggtgacacatctgagatgcggccagacgttggaggcagctaaagccacatcaaagctttccttgaaaaaaattttttgggggggagtgctggggggagtggggggaagaatcattaaaacaatgcatttagaacagagagataggacctgatgtgaaggtcaggaaagctgcaacaacagtctatagtaattaatagagtcgtctactacacagtggagaaattaagagaaaaactgcccctccctctgcaaaaaaaaaaaaaaaaagcactaaataaataaaagggaggaaggaaagcatatatcataaaaatgtaaaatcagtagtctgtaattgagaaaaggaaaagcaaggggagctttatgtgtttggcactaatgactatttttaaataaatttaacactttactcagcttgtcaaaaattaggaataagaaaagctttcttattcctaattctcactacatgaaggttttgggagggggaattgctcttcccttctttgaatattgttttctaacttaacaaaggacttgatttttcaaataggtgattctctaaaaagatatcagcattgtggcatcaagaataaatgtgaattttattcaagaattcagatcaaagattttggttcattttcatattgggtgaaatccctaaactaaaagaaaatatttagctactgcagatttagagaaatcaaagttcaatactgaaaatggagagtttaattatacaataataaaaatgtaggaaacaaagtatttaaacatagaatgatttctgagattccatgaatgggagccaaattagcttatcgagtatatggctttgtaatggaaagcaaactgctaaaacaactttttcattaaaaaaaaaaaaaaaagggtctattcctaaataatgtcagtaactcttctgcaggacagttcaattttatcagagcaaatctgcacacaagaggactatcagtttaccagcagctttccagcaggacctcactttgtattttggaacctcttcacttaagtcaagctaaaatcaagttcttgtaacagctgtgctatttacattgttcccttagttgtacattgccctggtctctgaaaatgaaaggaaatacagtacagtagcagctgatgctttcaacttgcccccacactccatcccaaactcattctctcaccctcttctcagcccttttcaaagcaggtaa

SEQ ID NO: 45758 - DNA, 1952 bp, Bovine  19866880936865
  misc_feature (1)..(1): n is a, c, g, or t
ntgttcttgcctggagatcctagggactggggagcctggtgggctgccatctatggggtcgcacagagtcagacacgactgaagtgacttagcagcagcagcagcaacagttagtgatattgagcatcttttcatgtaccttttggtcatttgtatgtcttctttggagaaatttctatttagatcttgtgcccaattttcaattggattttgtattgcagtatagtcaattaacaatattgtgatagtttcagttgaacagcaaagggactcaaccatacatatacatgtagggtttttttcttttttaattctgagctatatgagctatttgtatattttagagattaatcccttgttggtagcattgtttgcaaatatttcctcccattttgtaggttgtacttattttgtttatggctttctttgctgtacaaaagcttttgagtttaattaggtccaatttgtttatttttgtttctacctccattactcccccactccagtactcttgcctggaaaatcccatggatggaggagcctggtgggctgcagtccaaggggtcgctaagagtcggacacgactgagcgacttcactttcacttttcacttgcatgcgttggagaaggaaatggcaacccactccagtgttctcacctggagaatcccagggacgggggagcctggtgggctgccgtctctggggtcgtgcagagtcggacacgactgaagcgacttagcagtaccctaggtgtacctgagtgtttaggatggaaagtcttatgagcttccatgtgtatttgcagggctccatcaagagctcagtgcaaaggtttatctacaaagcttgcaacccgtgttgtctaaaatggataacgatcttatccttcagatggaaaagagtagacaaaatgcaaatggtcttctaaaaatactctctggttaaagataggggaccagagggacagcaagcttgtgtttgcgaagtgctgtaaacaatacccacgcaaactgctgctttgtattctgggtgccacgttcgtggtgtctccaaacaggcagtatctgggcatggtgattcccaccaggccagccaccacgggacctgcaaagccaaggacagaggggcacggccagtccgcaatctccccagtgtcaactccacaatgcacatccagtcaacaaatgtttgtcaagtactctcttggagcaaagtttggcaacagatttcaaggattacaatgaggcaaactatggaattcacagactctgagtggaaagcaacataatcaattgttgtgggttgaatgtctgtgtgcctcccctcacattcacatgttgaatctctaaactcaatacaatggtattaggaagtggggcctttaggtggtaattagaggaggtcgtgagtgtagggctcttttgatgggattagtgcccttgtaagaagaggaattgggcttcccaggtggcactagcagtgaagaacccgcctgccaatggaggagacatgagacataggttcgatccttgggtctggaagatcctttggaggagggcatggcaacctactccagtattcttgcttggagaatcccagggacagaggagcctggtgggctatagtctatggggtcgcaaagagtcagacatgactgaaatgacttagccctgaaatgaacaggaagagacaccagagttctctttttctacatgaggacacagccagaaggcactctacaagcttgaacaggtagaacccactgtggtagaatccttgagcttagactttccagcccccagaactgccagaaaagtgtgtggtttaagccacccggtctatgtatggcattttaacaaccaggctgactaagacataaatcaatgatgatgttattcatgcccttgggatgtacacaaggcatcagcagcacaaacatcggagggttaa

SEQ ID NO: 45759 - DNA, 1767 bp, Bovine  19866880955759
  misc_feature (1)..(1): n is a, c, g, or t
natttatatatatataaaataatataacatgtaaatgtctacttttataaaagtttatagttaacttgggacttccctggtggctcagacaataaggaatctgcctgtaatgcaggggaccctcagacaacaaagaatctgactcaggcagtcctggagaagggaattggctacccactccagtattcttgcctggagaattccatggacagaggagcctggtgggctacagtccgtgggagtcatagagtcagatacaactaagcaacttttacacacacacacacacacacaccaacagttaatttaccactgtattctactaaaaaatccaagggcactgaggttggtttgcaggacaaccttaaagtgacatcttccatgctggctatattgatagtttaatgttagagcactcaccaaaaggagttaactatcaaatctcaatcttataaccttgatcaatgcattgaccctccagtatctatgaccttctttgattatattcttcagctttgggagggagctacatgaaaggtgttgtgagagagaaaaggcagtccaattagccaaatcaagccctgtgatcagtgtcatagcaagaacatccccaacccaacccagtcctgtctggaaagaggctcaccaataggatgctttgacaaagaaggtcctttaatgttcaacaggtatagtgatacattctcctttttagaaactcctttaatacaaattttgatcaaataacttttttctatgaaaggtaaatgcctatgtatcatcaactgaccacacgttactaataatagttatatttaaatagtgttttatggtgtataacacattttaacttatgccatcatttcttaggaatattctgagacaggcaatataatttcccttttattgaagaagaaacagactcagaggttatgtgatttgcttgtgcttagttgctcagtcgagtatgaccctttgcaaccccacagactgtagtgcgctaggctcctctgtccatgggatttttcaagcaagaacactggttggggttgccatttcctcctctaggagatcttcccaacccaagaactgtaatcacatctcctggctctcctgcattggcaggcagattctctgccactgagccacctgggaagcccatgacttgcttaaggtcacacaaacaagagcttgaacccaaggctggtcctttgaccgcatgttcagggcacttctcattattagcaatctttgcaaagacagtcgagtcacttcttaaggtaagctcaaggactaaaagaagaaacgaaaactggcttttattccaatcaggacagacagccaatctatcagcaacctcagaaagaagggctgcccacactattaaaaaatctgggagggttgatggttttcttcagttttctcaccattactataatgccaatgtcatttgtgttcattctatctgatttcttagaattcatcatgtaagtaagccaatataacatagccatgaattaggggcaagggagaacactggccattcataaaagaaaccacttggaatcattttcactatatttgctcttacaaaatgaatatttttttggtaacattaaactttaaaaaaattaatggaaatgttgtcaaccacctatttttgttgttcatacactgggcaagagctacccaaaaatacataaaataggtcctatataatctatactttgcaaaatagctgaataataagagactgctaagtataaa
